United States Patent Application Publication US 2007/0111227 A1 - sequence listing, part 3

SEQ ID NO: 78783 - DNA, 17 bp, Arabidopsis thaliana
cgcactgtgcttcagtc

SEQ ID NO: 78784 - DNA, 17 bp, Arabidopsis thaliana
cgcacttaagctctggt

SEQ ID NO: 78785 - DNA, 17 bp, Arabidopsis thaliana
cgcacttacaggaattc

SEQ ID NO: 78786 - DNA, 17 bp, Arabidopsis thaliana
cgcacttctataaccgc

SEQ ID NO: 78787 - DNA, 17 bp, Arabidopsis thaliana
cgcactttatctgcagg

SEQ ID NO: 78788 - DNA, 17 bp, Arabidopsis thaliana
cgcactttggagggtga

SEQ ID NO: 78789 - DNA, 17 bp, Arabidopsis thaliana
cgcacttttcaaatcag

SEQ ID NO: 78790 - DNA, 17 bp, Arabidopsis thaliana
cgcacttttttaacttg

SEQ ID NO: 78791 - DNA, 17 bp, Arabidopsis thaliana
cgcagaaagactgtgtc

SEQ ID NO: 78792 - DNA, 17 bp, Arabidopsis thaliana
cgcagaagaagccgcga

SEQ ID NO: 78793 - DNA, 17 bp, Arabidopsis thaliana
cgcagaaggagctccag

SEQ ID NO: 78794 - DNA, 17 bp, Arabidopsis thaliana
cgcagaaggcttgacag

SEQ ID NO: 78795 - DNA, 17 bp, Arabidopsis thaliana
cgcagaattctttgcag

SEQ ID NO: 78796 - DNA, 17 bp, Arabidopsis thaliana
cgcagaattttgcaggt

SEQ ID NO: 78797 - DNA, 17 bp, Arabidopsis thaliana
cgcagacaaattagacc

SEQ ID NO: 78798 - DNA, 17 bp, Arabidopsis thaliana
cgcagacgtcgctgccg

SEQ ID NO: 78799 - DNA, 17 bp, Arabidopsis thaliana
cgcagagactgcttcta

SEQ ID NO: 78800 - DNA, 17 bp, Arabidopsis thaliana
cgcagagccgtgcctca

SEQ ID NO: 78801 - DNA, 17 bp, Arabidopsis thaliana
cgcagagctcatctcga

SEQ ID NO: 78802 - DNA, 17 bp, Arabidopsis thaliana
cgcagagtctttggttg

SEQ ID NO: 78803 - DNA, 17 bp, Arabidopsis thaliana
cgcagataaattagacc

SEQ ID NO: 78804 - DNA, 17 bp, Arabidopsis thaliana
cgcagataatatgggct

SEQ ID NO: 78805 - DNA, 17 bp, Arabidopsis thaliana
cgcagatcaggggctca

SEQ ID NO: 78806 - DNA, 17 bp, Arabidopsis thaliana
cgcagatcatttgtcac

SEQ ID NO: 78807 - DNA, 17 bp, Arabidopsis thaliana
cgcagattcaaatttga

SEQ ID NO: 78808 - DNA, 17 bp, Arabidopsis thaliana
cgcagatttgcggttgg

SEQ ID NO: 78809 - DNA, 17 bp, Arabidopsis thaliana
cgcagattttcatttct

SEQ ID NO: 78810 - DNA, 17 bp, Arabidopsis thaliana
cgcagattttttaaccg

SEQ ID NO: 78811 - DNA, 17 bp, Arabidopsis thaliana
cgcagcagttgactgga

SEQ ID NO: 78812 - DNA, 17 bp, Arabidopsis thaliana
cgcagccaaggatgact

SEQ ID NO: 78813 - DNA, 17 bp, Arabidopsis thaliana
cgcagcccttgggccat

SEQ ID NO: 78814 - DNA, 17 bp, Arabidopsis thaliana
cgcagccggatcttata

SEQ ID NO: 78815 - DNA, 17 bp, Arabidopsis thaliana
cgcagccgttcgtcaag

SEQ ID NO: 78816 - DNA, 17 bp, Arabidopsis thaliana
cgcagccgtttattgtt

SEQ ID NO: 78817 - DNA, 17 bp, Arabidopsis thaliana
cgcagcctgtagatgga

SEQ ID NO: 78818 - DNA, 17 bp, Arabidopsis thaliana
cgcagcctgtaggatgg

SEQ ID NO: 78819 - DNA, 17 bp, Arabidopsis thaliana
cgcagcgactatcacca

SEQ ID NO: 78820 - DNA, 17 bp, Arabidopsis thaliana
cgcagcgatactgacgt

SEQ ID NO: 78821 - DNA, 17 bp, Arabidopsis thaliana
cgcagcgattagtgatt

SEQ ID NO: 78822 - DNA, 17 bp, Arabidopsis thaliana
cgcagcggaagcgtggt

SEQ ID NO: 78823 - DNA, 17 bp, Arabidopsis thaliana
cgcagcggaccaattcc

SEQ ID NO: 78824 - DNA, 17 bp, Arabidopsis thaliana
cgcagcggcttatctgc

SEQ ID NO: 78825 - DNA, 17 bp, Arabidopsis thaliana
cgcagcgggtgcggttg

SEQ ID NO: 78826 - DNA, 17 bp, Arabidopsis thaliana
cgcagcggtttattgtt

SEQ ID NO: 78827 - DNA, 17 bp, Arabidopsis thaliana
cgcagcgtagcccgccc

SEQ ID NO: 78828 - DNA, 17 bp, Arabidopsis thaliana
cgcagcgtcagcgacaa

SEQ ID NO: 78829 - DNA, 17 bp, Arabidopsis thaliana
cgcagcgtggcaggcga

SEQ ID NO: 78830 - DNA, 17 bp, Arabidopsis thaliana
cgcagctacaattatcg

SEQ ID NO: 78831 - DNA, 17 bp, Arabidopsis thaliana
cgcagctcatgtggcct

SEQ ID NO: 78832 - DNA, 17 bp, Arabidopsis thaliana
cgcagctgtcgcttgaa

SEQ ID NO: 78833 - DNA, 17 bp, Arabidopsis thaliana
cgcagctgttgactgga

SEQ ID NO: 78834 - DNA, 17 bp, Arabidopsis thaliana
cgcaggacgtgaaagat

SEQ ID NO: 78835 - DNA, 17 bp, Arabidopsis thaliana
cgcaggagacaacttcg

SEQ ID NO: 78836 - DNA, 17 bp, Arabidopsis thaliana
cgcaggagagctcttcc

SEQ ID NO: 78837 - DNA, 17 bp, Arabidopsis thaliana
cgcaggagcgctcggcc

SEQ ID NO: 78838 - DNA, 17 bp, Arabidopsis thaliana
cgcaggagtgaaccatc

SEQ ID NO: 78839 - DNA, 17 bp, Arabidopsis thaliana
cgcaggatcggtccgcc

SEQ ID NO: 78840 - DNA, 17 bp, Arabidopsis thaliana
cgcaggattttgttgtt

SEQ ID NO: 78841 - DNA, 17 bp, Arabidopsis thaliana
cgcaggcggctttgtaa

SEQ ID NO: 78842 - DNA, 17 bp, Arabidopsis thaliana
cgcaggcgttgcgtcta

SEQ ID NO: 78843 - DNA, 17 bp, Arabidopsis thaliana
cgcaggctttgcagcac

SEQ ID NO: 78844 - DNA, 17 bp, Arabidopsis thaliana
cgcagggacatgcggaa

SEQ ID NO: 78845 - DNA, 17 bp, Arabidopsis thaliana
cgcagggagagcctcct

SEQ ID NO: 78846 - DNA, 17 bp, Arabidopsis thaliana
cgcagggcacgtctgcc

SEQ ID NO: 78847 - DNA, 17 bp, Arabidopsis thaliana
cgcaggggccatgctaa

SEQ ID NO: 78848 - DNA, 17 bp, Arabidopsis thaliana
cgcaggggccatgctgc

SEQ ID NO: 78849 - DNA, 17 bp, Arabidopsis thaliana
cgcagggggattgtcgg

SEQ ID NO: 78850 - DNA, 17 bp, Arabidopsis thaliana
cgcaggggtggtaaaat

SEQ ID NO: 78851 - DNA, 17 bp, Arabidopsis thaliana
cgcagggttttaggccg

SEQ ID NO: 78852 - DNA, 17 bp, Arabidopsis thaliana
cgcagggtttttggccg

SEQ ID NO: 78853 - DNA, 17 bp, Arabidopsis thaliana
cgcaggtaggcttatat

SEQ ID NO: 78854 - DNA, 17 bp, Arabidopsis thaliana
cgcaggtccaaagattc

SEQ ID NO: 78855 - DNA, 17 bp, Arabidopsis thaliana
cgcaggtgatgatgttc

SEQ ID NO: 78856 - DNA, 17 bp, Arabidopsis thaliana
cgcaggtgtcctaagat

SEQ ID NO: 78857 - DNA, 17 bp, Arabidopsis thaliana
cgcaggtgtcctaatga

SEQ ID NO: 78858 - DNA, 17 bp, Arabidopsis thaliana
cgcaggtgtggttgctt

SEQ ID NO: 78859 - DNA, 17 bp, Arabidopsis thaliana
cgcaggttcgaaccctc

SEQ ID NO: 78860 - DNA, 17 bp, Arabidopsis thaliana
cgcaggttcgaatcctg

SEQ ID NO: 78861 - DNA, 17 bp, Arabidopsis thaliana
cgcaggttcgtaacctg

SEQ ID NO: 78862 - DNA, 17 bp, Arabidopsis thaliana
cgcaggttcgtatcctg

SEQ ID NO: 78863 - DNA, 17 bp, Arabidopsis thaliana
cgcaggttgggccgcga

SEQ ID NO: 78864 - DNA, 17 bp, Arabidopsis thaliana
cgcaggtttgcccgaga

SEQ ID NO: 78865 - DNA, 17 bp, Arabidopsis thaliana
cgcaggttttgtgttcg

SEQ ID NO: 78866 - DNA, 17 bp, Arabidopsis thaliana
cgcagtacgccacgaag

SEQ ID NO: 78867 - DNA, 17 bp, Arabidopsis thaliana
cgcagtagctccacctt

SEQ ID NO: 78868 - DNA, 17 bp, Arabidopsis thaliana
cgcagtagttgggactt

SEQ ID NO: 78869 - DNA, 17 bp, Arabidopsis thaliana
cgcagtattttgtctgg

SEQ ID NO: 78870 - DNA, 17 bp, Arabidopsis thaliana
cgcagtcaccactcgga

SEQ ID NO: 78871 - DNA, 17 bp, Arabidopsis thaliana
cgcagtcaccattcgga

SEQ ID NO: 78872 - DNA, 17 bp, Arabidopsis thaliana
cgcagtcaccattcggg

SEQ ID NO: 78873 - DNA, 17 bp, Arabidopsis thaliana
cgcagtcactattcgga

SEQ ID NO: 78874 - DNA, 17 bp, Arabidopsis thaliana
cgcagtccggtgcggtg

SEQ ID NO: 78875 - DNA, 17 bp, Arabidopsis thaliana
cgcagtcctccacgtcg

SEQ ID NO: 78876 - DNA, 17 bp, Arabidopsis thaliana
cgcagtcctgtagatgg

SEQ ID NO: 78877 - DNA, 17 bp, Arabidopsis thaliana
cgcagtcgagtgatctc

SEQ ID NO: 78878 - DNA, 17 bp, Arabidopsis thaliana
cgcagtcgccattcgga

SEQ ID NO: 78879 - DNA, 17 bp, Arabidopsis thaliana
cgcagtcgcccgccatt

SEQ ID NO: 78880 - DNA, 17 bp, Arabidopsis thaliana
cgcagtcgggcagagtg

SEQ ID NO: 78881 - DNA, 17 bp, Arabidopsis thaliana
cgcagtctttgatcatt

SEQ ID NO: 78882 - DNA, 17 bp, Arabidopsis thaliana
cgcagtcttttgtctgg

SEQ ID NO: 78883 - DNA, 17 bp, Arabidopsis thaliana
cgcagtgaccaggcccc

SEQ ID NO: 78884 - DNA, 17 bp, Arabidopsis thaliana
cgcagtgactgtaattc

SEQ ID NO: 78885 - DNA, 17 bp, Arabidopsis thaliana
cgcagtgggctgcgcca

SEQ ID NO: 78886 - DNA, 17 bp, Arabidopsis thaliana
cgcagtgggtgcggttg

SEQ ID NO: 78887 - DNA, 17 bp, Arabidopsis thaliana
cgcagtgtagcggtcat

SEQ ID NO: 78888 - DNA, 17 bp, Arabidopsis thaliana
cgcagttaaacgtgctt

SEQ ID NO: 78889 - DNA, 17 bp, Arabidopsis thaliana
cgcagttaagcgtactt

SEQ ID NO: 78890 - DNA, 17 bp, Arabidopsis thaliana
cgcagttaagcgtgctt

SEQ ID NO: 78891 - DNA, 17 bp, Arabidopsis thaliana
cgcagttagcattcgga

SEQ ID NO: 78892 - DNA, 17 bp, Arabidopsis thaliana
cgcagttaggcgtgctt

SEQ ID NO: 78893 - DNA, 17 bp, Arabidopsis thaliana
cgcagttatcattcgga

SEQ ID NO: 78894 - DNA, 17 bp, Arabidopsis thaliana
cgcagttgaaccgcacg

SEQ ID NO: 78895 - DNA, 17 bp, Arabidopsis thaliana
cgcagttgaacctcggg

SEQ ID NO: 78896 - DNA, 17 bp, Arabidopsis thaliana
cgcagttgcagagatgg

SEQ ID NO: 78897 - DNA, 17 bp, Arabidopsis thaliana
cgcagttgggcaccgta

SEQ ID NO: 78898 - DNA, 17 bp, Arabidopsis thaliana
cgcagttgtcatgtgag

SEQ ID NO: 78899 - DNA, 17 bp, Arabidopsis thaliana
cgcagtttcttctggga

SEQ ID NO: 78900 - DNA, 17 bp, Arabidopsis thaliana
cgcagtttgcgagactc

SEQ ID NO: 78901 - DNA, 17 bp, Arabidopsis thaliana
cgcagtttgcgaggctc

SEQ ID NO: 78902 - DNA, 17 bp, Arabidopsis thaliana
cgcagtttgttctacgg

SEQ ID NO: 78903 - DNA, 17 bp, Arabidopsis thaliana
cgcagttttgtctgggc

SEQ ID NO: 78904 - DNA, 17 bp, Arabidopsis thaliana
cgcagtttttctgatcg

SEQ ID NO: 78905 - DNA, 17 bp, Arabidopsis thaliana
cgcagttttttctgggt

SEQ ID NO: 78906 - DNA, 17 bp, Arabidopsis thaliana
cgcataatctgccagga

SEQ ID NO: 78907 - DNA, 17 bp, Arabidopsis thaliana
cgcataatggcataatg

SEQ ID NO: 78908 - DNA, 17 bp, Arabidopsis thaliana
cgcataccaccggaccg

SEQ ID NO: 78909 - DNA, 17 bp, Arabidopsis thaliana
cgcataccaccggatcg

SEQ ID NO: 78910 - DNA, 17 bp, Arabidopsis thaliana
cgcatacttaggacggt

SEQ ID NO: 78911 - DNA, 17 bp, Arabidopsis thaliana
cgcatagagccattcaa

SEQ ID NO: 78912 - DNA, 17 bp, Arabidopsis thaliana
cgcatagcgttggagac

SEQ ID NO: 78913 - DNA, 17 bp, Arabidopsis thaliana
cgcatagttagctaacc

SEQ ID NO: 78914 - DNA, 17 bp, Arabidopsis thaliana
cgcatagtttgctaatc

SEQ ID NO: 78915 - DNA, 17 bp, Arabidopsis thaliana
cgcatatgatttgttga

SEQ ID NO: 78916 - DNA, 17 bp, Arabidopsis thaliana
cgcatattgtgaccagc

SEQ ID NO: 78917 - DNA, 17 bp, Arabidopsis thaliana
cgcatcaacgatatttt

SEQ ID NO: 78918 - DNA, 17 bp, Arabidopsis thaliana
cgcatcatatcacatat

SEQ ID NO: 78919 - DNA, 17 bp, Arabidopsis thaliana
cgcatccagggaaacgg

SEQ ID NO: 78920 - DNA, 17 bp, Arabidopsis thaliana
cgcatccaggggatgga

SEQ ID NO: 78921 - DNA, 17 bp, Arabidopsis thaliana
cgcatccagtagatgga

SEQ ID NO: 78922 - DNA, 17 bp, Arabidopsis thaliana
cgcatccgctgtccttc

SEQ ID NO: 78923 - DNA, 17 bp, Arabidopsis thaliana
cgcatccggtagatgga

SEQ ID NO: 78924 - DNA, 17 bp, Arabidopsis thaliana
cgcatcctccgacagtt

SEQ ID NO: 78925 - DNA, 17 bp, Arabidopsis thaliana
cgcatcctctagatgga

SEQ ID NO: 78926 - DNA, 17 bp, Arabidopsis thaliana
cgcatcctctagcatcc

SEQ ID NO: 78927 - DNA, 17 bp, Arabidopsis thaliana
cgcatcctctagcatgg

SEQ ID NO: 78928 - DNA, 17 bp, Arabidopsis thaliana
cgcatcctggatggttt

SEQ ID NO: 78929 - DNA, 17 bp, Arabidopsis thaliana
cgcatcctgtaaagatg

SEQ ID NO: 78930 - DNA, 17 bp, Arabidopsis thaliana
cgcatcctgtaaatgga

SEQ ID NO: 78931 - DNA, 17 bp, Arabidopsis thaliana
cgcatcctgtaaatgtt

SEQ ID NO: 78932 - DNA, 17 bp, Arabidopsis thaliana
cgcatcctgtaatggat

SEQ ID NO: 78933 - DNA, 17 bp, Arabidopsis thaliana
cgcatcctgtacatgac

SEQ ID NO: 78934 - DNA, 17 bp, Arabidopsis thaliana
cgcatcctgtagaacca

SEQ ID NO: 78935 - DNA, 17 bp, Arabidopsis thaliana
cgcatcctgtagaatga

SEQ ID NO: 78936 - DNA, 17 bp, Arabidopsis thaliana
cgcatcctgtagacgga

SEQ ID NO: 78937 - DNA, 17 bp, Arabidopsis thaliana
cgcatcctgtagaggga

SEQ ID NO: 78938 - DNA, 17 bp, Arabidopsis thaliana
cgcatcctgtagaggtg

SEQ ID NO: 78939 - DNA, 17 bp, Arabidopsis thaliana
cgcatcctgtagataga

SEQ ID NO: 78940 - DNA, 17 bp, Arabidopsis thaliana
cgcatcctgtagatagt

SEQ ID NO: 78941 - DNA, 17 bp, Arabidopsis thaliana
cgcatcctgtagatcat

SEQ ID NO: 78942 - DNA, 17 bp, Arabidopsis thaliana
cgcatcctgtagatcca

SEQ ID NO: 78943 - DNA, 17 bp, Arabidopsis thaliana
cgcatcctgtagatcct

SEQ ID NO: 78944 - DNA, 17 bp, Arabidopsis thaliana
cgcatcctgtagatcga

SEQ ID NO: 78945 - DNA, 17 bp, Arabidopsis thaliana
cgcatcctgtagatgaa

SEQ ID NO: 78946 - DNA, 17 bp, Arabidopsis thaliana
cgcatcctgtagatgac

SEQ ID NO: 78947 - DNA, 17 bp, Arabidopsis thaliana
cgcatcctgtagatgag

SEQ ID NO: 78948 - DNA, 17 bp, Arabidopsis thaliana
cgcatcctgtagatgat

SEQ ID NO: 78949 - DNA, 17 bp, Arabidopsis thaliana
cgcatcctgtagatgca

SEQ ID NO: 78950 - DNA, 17 bp, Arabidopsis thaliana
cgcatcctgtagatgcc

SEQ ID NO: 78951 - DNA, 17 bp, Arabidopsis thaliana
cgcatcctgtagatgct

SEQ ID NO: 78952 - DNA, 17 bp, Arabidopsis thaliana
cgcatcctgtagatgga

SEQ ID NO: 78953 - DNA, 17 bp, Arabidopsis thaliana
cgcatcctgtagatggc

SEQ ID NO: 78954 - DNA, 17 bp, Arabidopsis thaliana
cgcatcctgtagatggg

SEQ ID NO: 78955 - DNA, 17 bp, Arabidopsis thaliana
cgcatcctgtagatggt

SEQ ID NO: 78956 - DNA, 17 bp, Arabidopsis thaliana
cgcatcctgtagatgta

SEQ ID NO: 78957 - DNA, 17 bp, Arabidopsis thaliana
cgcatcctgtagatgtc

SEQ ID NO: 78958 - DNA, 17 bp, Arabidopsis thaliana
cgcatcctgtagatgtg

SEQ ID NO: 78959 - DNA, 17 bp, Arabidopsis thaliana
cgcatcctgtagatgtt

SEQ ID NO: 78960 - DNA, 17 bp, Arabidopsis thaliana
cgcatcctgtagattag

SEQ ID NO: 78961 - DNA, 17 bp, Arabidopsis thaliana
cgcatcctgtagattat

SEQ ID NO: 78962 - DNA, 17 bp, Arabidopsis thaliana
cgcatcctgtagattct

SEQ ID NO: 78963 - DNA, 17 bp, Arabidopsis thaliana
cgcatcctgtagattga

SEQ ID NO: 78964 - DNA, 17 bp, Arabidopsis thaliana
cgcatcctgtagattgt

SEQ ID NO: 78965 - DNA, 17 bp, Arabidopsis thaliana
cgcatcctgtagcatag

SEQ ID NO: 78966 - DNA, 17 bp, Arabidopsis thaliana
cgcatcctgtagcatcc

SEQ ID NO: 78967 - DNA, 17 bp, Arabidopsis thaliana
cgcatcctgtagcatcg

SEQ ID NO: 78968 - DNA, 17 bp, Arabidopsis thaliana
cgcatcctgtagcatgg

SEQ ID NO: 78969 - DNA, 17 bp, Arabidopsis thaliana
cgcatcctgtagcatta

SEQ ID NO: 78970 - DNA, 17 bp, Arabidopsis thaliana
cgcatcctgtagcattc

SEQ ID NO: 78971 - DNA, 17 bp, Arabidopsis thaliana
cgcatcctgtagcattg

SEQ ID NO: 78972 - DNA, 17 bp, Arabidopsis thaliana
cgcatcctgtagctgga

SEQ ID NO: 78973 - DNA, 17 bp, Arabidopsis thaliana
cgcatcctgtaggaggg

SEQ ID NO: 78974 - DNA, 17 bp, Arabidopsis thaliana
cgcatcctgtaggatgg

SEQ ID NO: 78975 - DNA, 17 bp, Arabidopsis thaliana
cgcatcctgtagtggat

SEQ ID NO: 78976 - DNA, 17 bp, Arabidopsis thaliana
cgcatcctgtagttgga

SEQ ID NO: 78977 - DNA, 17 bp, Arabidopsis thaliana
cgcatcctgtatatgac

SEQ ID NO: 78978 - DNA, 17 bp, Arabidopsis thaliana
cgcatcctgtatatgga

SEQ ID NO: 78979 - DNA, 17 bp, Arabidopsis thaliana
cgcatcctgtatgctga

SEQ ID NO: 78980 - DNA, 17 bp, Arabidopsis thaliana
cgcatcctgtccatcta

SEQ ID NO: 78981 - DNA, 17 bp, Arabidopsis thaliana
cgcatcctgtcgatgga

SEQ ID NO: 78982 - DNA, 17 bp, Arabidopsis thaliana
cgcatcctgtgatggaa

SEQ ID NO: 78983 - DNA, 17 bp, Arabidopsis thaliana
cgcatcctgtgatggat

SEQ ID NO: 78984 - DNA, 17 bp, Arabidopsis thaliana
cgcatcctgtggatctt

SEQ ID NO: 78985 - DNA, 17 bp, Arabidopsis thaliana
cgcatcctgtggtggat

SEQ ID NO: 78986 - DNA, 17 bp, Arabidopsis thaliana
cgcatcctgttgatgga

SEQ ID NO: 78987 - DNA, 17 bp, Arabidopsis thaliana
cgcatcgtgtagatgga

SEQ ID NO: 78988 - DNA, 17 bp, Arabidopsis thaliana
cgcatctgtagatggat

SEQ ID NO: 78989 - DNA, 17 bp, Arabidopsis thaliana
cgcatctgtaggatgga

SEQ ID NO: 78990 - DNA, 17 bp, Arabidopsis thaliana
cgcatgaatggattaac

SEQ ID NO: 78991 - DNA, 17 bp, Arabidopsis thaliana
cgcatgagcgtctacca

SEQ ID NO: 78992 - DNA, 17 bp, Arabidopsis thaliana
cgcatgagctagcagct

SEQ ID NO: 78993 - DNA, 17 bp, Arabidopsis thaliana
cgcatgattttgttatt

SEQ ID NO: 78994 - DNA, 17 bp, Arabidopsis thaliana
cgcatgcgcccccgccc

SEQ ID NO: 78995 - DNA, 17 bp, Arabidopsis thaliana
cgcatgcgcccgccgcc

SEQ ID NO: 78996 - DNA, 17 bp, Arabidopsis thaliana
cgcatggcctctgctgg

SEQ ID NO: 78997 - DNA, 17 bp, Arabidopsis thaliana
cgcatggcctctgtgcc

SEQ ID NO: 78998 - DNA, 17 bp, Arabidopsis thaliana
cgcatggcctctgtgct

SEQ ID NO: 78999 - DNA, 17 bp, Arabidopsis thaliana
cgcatgtgattgttacc

SEQ ID NO: 79000 - DNA, 17 bp, Arabidopsis thaliana
cgcatgtggctttgttg

SEQ ID NO: 79001 - DNA, 17 bp, Arabidopsis thaliana
cgcatgttgattgttga

SEQ ID NO: 79002 - DNA, 17 bp, Arabidopsis thaliana
cgcattagccatagttg

SEQ ID NO: 79003 - DNA, 17 bp, Arabidopsis thaliana
cgcattatacagttcgg

SEQ ID NO: 79004 - DNA, 17 bp, Arabidopsis thaliana
cgcattcacagtttagg

SEQ ID NO: 79005 - DNA, 17 bp, Arabidopsis thaliana
cgcattcacggatagat

SEQ ID NO: 79006 - DNA, 17 bp, Arabidopsis thaliana
cgcattcctgtagatgg

SEQ ID NO: 79007 - DNA, 17 bp, Arabidopsis thaliana
cgcattcggatcttaaa

SEQ ID NO: 79008 - DNA, 17 bp, Arabidopsis thaliana
cgcattctaaccgcttg

SEQ ID NO: 79009 - DNA, 17 bp, Arabidopsis thaliana
cgcattctgcagatgga

SEQ ID NO: 79010 - DNA, 17 bp, Arabidopsis thaliana
cgcattctgtagatgga

SEQ ID NO: 79011 - DNA, 17 bp, Arabidopsis thaliana
cgcattctgtagatggt

SEQ ID NO: 79012 - DNA, 17 bp, Arabidopsis thaliana
cgcattcttagggtccc

SEQ ID NO: 79013 - DNA, 17 bp, Arabidopsis thaliana
cgcattcttagggttcg

SEQ ID NO: 79014 - DNA, 17 bp, Arabidopsis thaliana
cgcattcttagggtttg

SEQ ID NO: 79015 - DNA, 17 bp, Arabidopsis thaliana
cgcattgacggtgaggc

SEQ ID NO: 79016 - DNA, 17 bp, Arabidopsis thaliana
cgcattgactcgattgt

SEQ ID NO: 79017 - DNA, 17 bp, Arabidopsis thaliana
cgcattggtcggcttgt

SEQ ID NO: 79018 - DNA, 17 bp, Arabidopsis thaliana
cgcattgtcgcgcctga

SEQ ID NO: 79019 - DNA, 17 bp, Arabidopsis thaliana
cgcatttaagggttttg

SEQ ID NO: 79020 - DNA, 17 bp, Arabidopsis thaliana
cgcatttattagataaa

SEQ ID NO: 79021 - DNA, 17 bp, Arabidopsis thaliana
cgcatttcccgagatct

SEQ ID NO: 79022 - DNA, 17 bp, Arabidopsis thaliana
cgcatttgccaaggatg

SEQ ID NO: 79023 - DNA, 17 bp, Arabidopsis thaliana
cgcatttgttgagccgc

SEQ ID NO: 79024 - DNA, 17 bp, Arabidopsis thaliana
cgcattttctacttaac

SEQ ID NO: 79025 - DNA, 17 bp, Arabidopsis thaliana
cgcattttctgacattt

SEQ ID NO: 79026 - DNA, 17 bp, Arabidopsis thaliana
cgcatttttcgacattt

SEQ ID NO: 79027 - DNA, 17 bp, Arabidopsis thaliana
cgccaaaaacaaaaacc

SEQ ID NO: 79028 - DNA, 17 bp, Arabidopsis thaliana
cgccaaaaacggcacgg

SEQ ID NO: 79029 - DNA, 17 bp, Arabidopsis thaliana
cgccaaaaggagtgagg

SEQ ID NO: 79030 - DNA, 17 bp, Arabidopsis thaliana
cgccaaaatgtggatgt

SEQ ID NO: 79031 - DNA, 17 bp, Arabidopsis thaliana
cgccaaacaccccggcc

SEQ ID NO: 79032 - DNA, 17 bp, Arabidopsis thaliana
cgccaaacttggcatgt

SEQ ID NO: 79033 - DNA, 17 bp, Arabidopsis thaliana
cgccaaagactgcggac

SEQ ID NO: 79034 - DNA, 17 bp, Arabidopsis thaliana
cgccaaagcccgcaagg

SEQ ID NO: 79035 - DNA, 17 bp, Arabidopsis thaliana
cgccaaagctcatccgt

SEQ ID NO: 79036 - DNA, 17 bp, Arabidopsis thaliana
cgccaaatctatcccac

SEQ ID NO: 79037 - DNA, 17 bp, Arabidopsis thaliana
cgccaaatctgccggtg

SEQ ID NO: 79038 - DNA, 17 bp, Arabidopsis thaliana
cgccaaatgctaagttg

SEQ ID NO: 79039 - DNA, 17 bp, Arabidopsis thaliana
cgccaaattaggatttt

SEQ ID NO: 79040 - DNA, 17 bp, Arabidopsis thaliana
cgccaaattatccgctt

SEQ ID NO: 79041 - DNA, 17 bp, Arabidopsis thaliana
cgccaacactatctgta

SEQ ID NO: 79042 - DNA, 17 bp, Arabidopsis thaliana
cgccaacgaatttcctc

SEQ ID NO: 79043 - DNA, 17 bp, Arabidopsis thaliana
cgccaacgctataagga

SEQ ID NO: 79044 - DNA, 17 bp, Arabidopsis thaliana
cgccaactggacgcaac

SEQ ID NO: 79045 - DNA, 17 bp, Arabidopsis thaliana
cgccaactggacggaag

SEQ ID NO: 79046 - DNA, 17 bp, Arabidopsis thaliana
cgccaactggtgtaagt

SEQ ID NO: 79047 - DNA, 17 bp, Arabidopsis thaliana
cgccaagaactagtgtc

SEQ ID NO: 79048 - DNA, 17 bp, Arabidopsis thaliana
cgccaagctaccgtgcg

SEQ ID NO: 79049 - DNA, 17 bp, Arabidopsis thaliana
cgccaaggacgcgtggc

SEQ ID NO: 79050 - DNA, 17 bp, Arabidopsis thaliana
cgccaaggcctaagttt

SEQ ID NO: 79051 - DNA, 17 bp, Arabidopsis thaliana
cgccaagggacagtctc

SEQ ID NO: 79052 - DNA, 17 bp, Arabidopsis thaliana
cgccaatcctctgttgc

SEQ ID NO: 79053 - DNA, 17 bp, Arabidopsis thaliana
cgccaatcggaccctcc

SEQ ID NO: 79054 - DNA, 17 bp, Arabidopsis thaliana
cgccaatgcctaagttt

SEQ ID NO: 79055 - DNA, 17 bp, Arabidopsis thaliana
cgccacaaagaaaaccg

SEQ ID NO: 79056 - DNA, 17 bp, Arabidopsis thaliana
cgccacacaaggtgtct

SEQ ID NO: 79057 - DNA, 17 bp, Arabidopsis thaliana
cgccacagagctgatga

SEQ ID NO: 79058 - DNA, 17 bp, Arabidopsis thaliana
cgccacagtatctcgat

SEQ ID NO: 79059 - DNA, 17 bp, Arabidopsis thaliana
cgccacagtcgaccatc

SEQ ID NO: 79060 - DNA, 17 bp, Arabidopsis thaliana
cgccacatcagggtgct

SEQ ID NO: 79061 - DNA, 17 bp, Arabidopsis thaliana
cgccaccaccttttctt

SEQ ID NO: 79062 - DNA, 17 bp, Arabidopsis thaliana
cgccaccgtaacccgcg

SEQ ID NO: 79063 - DNA, 17 bp, Arabidopsis thaliana
cgccaccgtaatccgcg

SEQ ID NO: 79064 - DNA, 17 bp, Arabidopsis thaliana
cgccacctagggataaa

SEQ ID NO: 79065 - DNA, 17 bp, Arabidopsis thaliana
cgccacctggggctgta

SEQ ID NO: 79066 - DNA, 17 bp, Arabidopsis thaliana
cgccaccttgtggtcaa

SEQ ID NO: 79067 - DNA, 17 bp, Arabidopsis thaliana
cgccacggactaactgt

SEQ ID NO: 79068 - DNA, 17 bp, Arabidopsis thaliana
cgccacgtctcaccgtc

SEQ ID NO: 79069 - DNA, 17 bp, Arabidopsis thaliana
cgccacgtctgcctggg

SEQ ID NO: 79070 - DNA, 17 bp, Arabidopsis thaliana
cgccacgtgtcgttggc

SEQ ID NO: 79071 - DNA, 17 bp, Arabidopsis thaliana
cgccactaagtcgagga

SEQ ID NO: 79072 - DNA, 17 bp, Arabidopsis thaliana
cgccactcaaggcccaa

SEQ ID NO: 79073 - DNA, 17 bp, Arabidopsis thaliana
cgccactcgatctcttt

SEQ ID NO: 79074 - DNA, 17 bp, Arabidopsis thaliana
cgccactctcaccggcg

SEQ ID NO: 79075 - DNA, 17 bp, Arabidopsis thaliana
cgccacttttttcctca

SEQ ID NO: 79076 - DNA, 17 bp, Arabidopsis thaliana
cgccagaaccggcgcca

SEQ ID NO: 79077 - DNA, 17 bp, Arabidopsis thaliana
cgccagaactgcttgat

SEQ ID NO: 79078 - DNA, 17 bp, Arabidopsis thaliana
cgccagacatatcctcc

SEQ ID NO: 79079 - DNA, 17 bp, Arabidopsis thaliana
cgccagactacgtggat

SEQ ID NO: 79080 - DNA, 17 bp, Arabidopsis thaliana
cgccagagagctgatga

SEQ ID NO: 79081 - DNA, 17 bp, Arabidopsis thaliana
cgccagatcttactccg

SEQ ID NO: 79082 - DNA, 17 bp, Arabidopsis thaliana
cgccagcactaatgcac

SEQ ID NO: 79083 - DNA, 17 bp, Arabidopsis thaliana
cgccagcagatggatag

SEQ ID NO: 79084 - DNA, 17 bp, Arabidopsis thaliana
cgccagcagccgcggta

SEQ ID NO: 79085 - DNA, 17 bp, Arabidopsis thaliana
cgccagcatttctaact

SEQ ID NO: 79086 - DNA, 17 bp, Arabidopsis thaliana
cgccagcgactgcaatt

SEQ ID NO: 79087 - DNA, 17 bp, Arabidopsis thaliana
cgccagcgactgtcgcc

SEQ ID NO: 79088 - DNA, 17 bp, Arabidopsis thaliana
cgccagcgattgtctca

SEQ ID NO: 79089 - DNA, 17 bp, Arabidopsis thaliana
cgccaggagatcccttg

SEQ ID NO: 79090 - DNA, 17 bp, Arabidopsis thaliana
cgccaggtacacgctga

SEQ ID NO: 79091 - DNA, 17 bp, Arabidopsis thaliana
cgccagtcaacactacg

SEQ ID NO: 79092 - DNA, 17 bp, Arabidopsis thaliana
cgccagtgaccagcgac

SEQ ID NO: 79093 - DNA, 17 bp, Arabidopsis thaliana
cgccagtgactagtaat

SEQ ID NO: 79094 - DNA, 17 bp, Arabidopsis thaliana
cgccagttgacttaacg

SEQ ID NO: 79095 - DNA, 17 bp, Arabidopsis thaliana
cgccagttgcaacagcc

SEQ ID NO: 79096 - DNA, 17 bp, Arabidopsis thaliana
cgccatagcgatggacg

SEQ ID NO: 79097 - DNA, 17 bp, Arabidopsis thaliana
cgccatatcccatgtga

SEQ ID NO: 79098 - DNA, 17 bp, Arabidopsis thaliana
cgccatattctaggagc

SEQ ID NO: 79099 - DNA, 17 bp, Arabidopsis thaliana
cgccatattgtgaccta

SEQ ID NO: 79100 - DNA, 17 bp, Arabidopsis thaliana
cgccatcaggatctcga

SEQ ID NO: 79101 - DNA, 17 bp, Arabidopsis thaliana
cgccatccacaagcttg

SEQ ID NO: 79102 - DNA, 17 bp, Arabidopsis thaliana
cgccatccatcctgagt

SEQ ID NO: 79103 - DNA, 17 bp, Arabidopsis thaliana
cgccatccattgcccgg

SEQ ID NO: 79104 - DNA, 17 bp, Arabidopsis thaliana
cgccatcctgtagatgg

SEQ ID NO: 79105 - DNA, 17 bp, Arabidopsis thaliana
cgccatcgcctgttgtg

SEQ ID NO: 79106 - DNA, 17 bp, Arabidopsis thaliana
cgccatcgctggagact

SEQ ID NO: 79107 - DNA, 17 bp, Arabidopsis thaliana
cgccatctcatgcatgc

SEQ ID NO: 79108 - DNA, 17 bp, Arabidopsis thaliana
cgccatgactccgaaca

SEQ ID NO: 79109 - DNA, 17 bp, Arabidopsis thaliana
cgccatgcaaaccagtt

SEQ ID NO: 79110 - DNA, 17 bp, Arabidopsis thaliana
cgccattaagtctccct

SEQ ID NO: 79111 - DNA, 17 bp, Arabidopsis thaliana
cgccattaattgagtgc

SEQ ID NO: 79112 - DNA, 17 bp, Arabidopsis thaliana
cgccattatgccaagta

SEQ ID NO: 79113 - DNA, 17 bp, Arabidopsis thaliana
cgccattatgccattat

SEQ ID NO: 79114 - DNA, 17 bp, Arabidopsis thaliana
cgccattccaaactcgt

SEQ ID NO: 79115 - DNA, 17 bp, Arabidopsis thaliana
cgccattcttgtcgatc

SEQ ID NO: 79116 - DNA, 17 bp, Arabidopsis thaliana
cgccattgaatttgtcg

SEQ ID NO: 79117 - DNA, 17 bp, Arabidopsis thaliana
cgccattgggagaggcc

SEQ ID NO: 79118 - DNA, 17 bp, Arabidopsis thaliana
cgccattggtcggcttg

SEQ ID NO: 79119 - DNA, 17 bp, Arabidopsis thaliana
cgccattgtctaagcgt

SEQ ID NO: 79120 - DNA, 17 bp, Arabidopsis thaliana
cgccattttcgtgattt

SEQ ID NO: 79121 - DNA, 17 bp, Arabidopsis thaliana
cgcccaaggatgacttg

SEQ ID NO: 79122 - DNA, 17 bp, Arabidopsis thaliana
cgcccacccacccaccc

SEQ ID NO: 79123 - DNA, 17 bp, Arabidopsis thaliana
cgcccactcgcaccaac

SEQ ID NO: 79124 - DNA, 17 bp, Arabidopsis thaliana
cgcccagcacaagttac

SEQ ID NO: 79125 - DNA, 17 bp, Arabidopsis thaliana
cgcccaggcagacgtgc

SEQ ID NO: 79126 - DNA, 17 bp, Arabidopsis thaliana
cgcccagggtttttacc

SEQ ID NO: 79127 - DNA, 17 bp, Arabidopsis thaliana
cgcccagttcgacccaa

SEQ ID NO: 79128 - DNA, 17 bp, Arabidopsis thaliana
cgcccatagagtagccc

SEQ ID NO: 79129 - DNA, 17 bp, Arabidopsis thaliana
cgcccatcatctaagcc

SEQ ID NO: 79130 - DNA, 17 bp, Arabidopsis thaliana
cgcccatgggcttgtcc

SEQ ID NO: 79131 - DNA, 17 bp, Arabidopsis thaliana
cgcccattctcttcggc

SEQ ID NO: 79132 - DNA, 17 bp, Arabidopsis thaliana
cgcccatttgtttgcgg

SEQ ID NO: 79133 - DNA, 17 bp, Arabidopsis thaliana
cgccccaccaatcctgt

SEQ ID NO: 79134 - DNA, 17 bp, Arabidopsis thaliana
cgccccacccacccacc

SEQ ID NO: 79135 - DNA, 17 bp, Arabidopsis thaliana
cgcccccatcgtctagt

SEQ ID NO: 79136 - DNA, 17 bp, Arabidopsis thaliana
cgcccccggcggcccat

SEQ ID NO: 79137 - DNA, 17 bp, Arabidopsis thaliana
cgccccctcgagatgat

SEQ ID NO: 79138 - DNA, 17 bp, Arabidopsis thaliana
cgccccgccgggaccac

SEQ ID NO: 79139 - DNA, 17 bp, Arabidopsis thaliana
cgccccgcgatagtgcc

SEQ ID NO: 79140 - DNA, 17 bp, Arabidopsis thaliana
cgccccgctaagtctgt

SEQ ID NO: 79141 - DNA, 17 bp, Arabidopsis thaliana
cgccccgtcgtgcccgg

SEQ ID NO: 79142 - DNA, 17 bp, Arabidopsis thaliana
cgcccctactaggtgcc

SEQ ID NO: 79143 - DNA, 17 bp, Arabidopsis thaliana
cgcccctttgtcgctaa

SEQ ID NO: 79144 - DNA, 17 bp, Arabidopsis thaliana
cgcccgaaactcgtaat

SEQ ID NO: 79145 - DNA, 17 bp, Arabidopsis thaliana
cgcccgacttatcacgt

SEQ ID NO: 79146 - DNA, 17 bp, Arabidopsis thaliana
cgcccgagcacgacccg

SEQ ID NO: 79147 - DNA, 17 bp, Arabidopsis thaliana
cgcccgattgccgaccc

SEQ ID NO: 79148 - DNA, 17 bp, Arabidopsis thaliana
cgcccgcaaccagatct

SEQ ID NO: 79149 - DNA, 17 bp, Arabidopsis thaliana
cgcccgcaaccggatct

SEQ ID NO: 79150 - DNA, 17 bp, Arabidopsis thaliana
cgcccgcaactggatct

SEQ ID NO: 79151 - DNA, 17 bp, Arabidopsis thaliana
cgcccgcaaggatttgt

SEQ ID NO: 79152 - DNA, 17 bp, Arabidopsis thaliana
cgcccgcaatggactat

SEQ ID NO: 79153 - DNA, 17 bp, Arabidopsis thaliana
cgcccgcagataaatta

SEQ ID NO: 79154 - DNA, 17 bp, Arabidopsis thaliana
cgcccgcccaggttcgt

SEQ ID NO: 79155 - DNA, 17 bp, Arabidopsis thaliana
cgcccgccctaacccag

SEQ ID NO: 79156 - DNA, 17 bp, Arabidopsis thaliana
cgcccgccgaccgaagg

SEQ ID NO: 79157 - DNA, 17 bp, Arabidopsis thaliana
cgcccgccgcccgatcg

SEQ ID NO: 79158 - DNA, 17 bp, Arabidopsis thaliana
cgcccgccgcccgatta

SEQ ID NO: 79159 - DNA, 17 bp, Arabidopsis thaliana
cgcccgccgcccgattg

SEQ ID NO: 79160 - DNA, 17 bp, Arabidopsis thaliana
cgcccgccggtttgttc

SEQ ID NO: 79161 - DNA, 17 bp, Arabidopsis thaliana
cgcccgcctctaagtca

SEQ ID NO: 79162 - DNA, 17 bp, Arabidopsis thaliana
cgcccgccttagtcgcg

SEQ ID NO: 79163 - DNA, 17 bp, Arabidopsis thaliana
cgcccgccttgcatcaa

SEQ ID NO: 79164 - DNA, 17 bp, Arabidopsis thaliana
cgcccgcctttaagatc

SEQ ID NO: 79165 - DNA, 17 bp, Arabidopsis thaliana
cgcccgcctttgatgta

SEQ ID NO: 79166 - DNA, 17 bp, Arabidopsis thaliana
cgcccgcgaagctaccg

SEQ ID NO: 79167 - DNA, 17 bp, Arabidopsis thaliana
cgcccgcgaatgtgatt

SEQ ID NO: 79168 - DNA, 17 bp, Arabidopsis thaliana
cgcccgcgacgtcgcga

SEQ ID NO: 79169 - DNA, 17 bp, Arabidopsis thaliana
cgcccgcgagtacgatg

SEQ ID NO: 79170 - DNA, 17 bp, Arabidopsis thaliana
cgcccgcgagttttccg

SEQ ID NO: 79171 - DNA, 17 bp, Arabidopsis thaliana
cgcccgcgcaggttcga

SEQ ID NO: 79172 - DNA, 17 bp, Arabidopsis thaliana
cgcccgcgcaggttcgt

SEQ ID NO: 79173 - DNA, 17 bp, Arabidopsis thaliana
cgcccgcgcctaacggc

SEQ ID NO: 79174 - DNA, 17 bp, Arabidopsis thaliana
cgcccgcgcgacctata

SEQ ID NO: 79175 - DNA, 17 bp, Arabidopsis thaliana
cgcccgcgctaacctag

SEQ ID NO: 79176 - DNA, 17 bp, Arabidopsis thaliana
cgcccgcggacaaaact

SEQ ID NO: 79177 - DNA, 17 bp, Arabidopsis thaliana
cgcccgcggcacgaccg

SEQ ID NO: 79178 - DNA, 17 bp, Arabidopsis thaliana
cgcccgcggcggctacg

SEQ ID NO: 79179 - DNA, 17 bp, Arabidopsis thaliana
cgcccgcgggtgcaccg

SEQ ID NO: 79180 - DNA, 17 bp, Arabidopsis thaliana
cgcccgcgggttcgccc

SEQ ID NO: 79181 - DNA, 17 bp, Arabidopsis thaliana
cgcccgcgggttcgggc

SEQ ID NO: 79182 - DNA, 17 bp, Arabidopsis thaliana
cgcccgcgggttcgtgc

SEQ ID NO: 79183 - DNA, 17 bp, Arabidopsis thaliana
cgcccgcgtccagttgg

SEQ ID NO: 79184 - DNA, 17 bp, Arabidopsis thaliana
cgcccgcgtctgcctgg

SEQ ID NO: 79185 - DNA, 17 bp, Arabidopsis thaliana
cgcccgcgtggtgtccg

SEQ ID NO: 79186 - DNA, 17 bp, Arabidopsis thaliana
cgcccgcgttgactacg

SEQ ID NO: 79187 - DNA, 17 bp, Arabidopsis thaliana
cgcccgctatccatcct

SEQ ID NO: 79188 - DNA, 17 bp, Arabidopsis thaliana
cgcccgctcagatttgg

SEQ ID NO: 79189 - DNA, 17 bp, Arabidopsis thaliana
cgcccgctccgactgaa

SEQ ID NO: 79190 - DNA, 17 bp, Arabidopsis thaliana
cgcccgctccgattgga

SEQ ID NO: 79191 - DNA, 17 bp, Arabidopsis thaliana
cgcccgctgaaccaatg

SEQ ID NO: 79192 - DNA, 17 bp, Arabidopsis thaliana
cgcccgctgagctcagg

SEQ ID NO: 79193 - DNA, 17 bp, Arabidopsis thaliana
cgcccgcttgccgcccg

SEQ ID NO: 79194 - DNA, 17 bp, Arabidopsis thaliana
cgcccgcttgtacctag

SEQ ID NO: 79195 - DNA, 17 bp, Arabidopsis thaliana
cgcccgcttttgatacg

SEQ ID NO: 79196 - DNA, 17 bp, Arabidopsis thaliana
cgcccggcggggcacac

SEQ ID NO: 79197 - DNA, 17 bp, Arabidopsis thaliana
cgcccggcggggcaccc

SEQ ID NO: 79198 - DNA, 17 bp, Arabidopsis thaliana
cgcccgtcacactatgg

SEQ ID NO: 79199 - DNA, 17 bp, Arabidopsis thaliana
cgcccgtcatcgtaggt

SEQ ID NO: 79200 - DNA, 17 bp, Arabidopsis thaliana
cgcccgtcgctcctacc

SEQ ID NO: 79201 - DNA, 17 bp, Arabidopsis thaliana
cgcccgtctagctcagt

SEQ ID NO: 79202 - DNA, 17 bp, Arabidopsis thaliana
cgcccgtggtcgaggaa

SEQ ID NO: 79203 - DNA, 17 bp, Arabidopsis thaliana
cgcccgtgtgtgcggca

SEQ ID NO: 79204 - DNA, 17 bp, Arabidopsis thaliana
cgccctaaatcgcttca

SEQ ID NO: 79205 - DNA, 17 bp, Arabidopsis thaliana
cgccctaacccagtttt

SEQ ID NO: 79206 - DNA, 17 bp, Arabidopsis thaliana
cgccctatggggccgct

SEQ ID NO: 79207 - DNA, 17 bp, Arabidopsis thaliana
cgccctcatcgtctagt

SEQ ID NO: 79208 - DNA, 17 bp, Arabidopsis thaliana
cgccctccctccctgcc

SEQ ID NO: 79209 - DNA, 17 bp, Arabidopsis thaliana
cgccctgtagatggatc

SEQ ID NO: 79210 - DNA, 17 bp, Arabidopsis thaliana
cgcccttaagattcggt

SEQ ID NO: 79211 - DNA, 17 bp, Arabidopsis thaliana
cgcccttaatctactgg

SEQ ID NO: 79212 - DNA, 17 bp, Arabidopsis thaliana
cgcccttagatgttctg

SEQ ID NO: 79213 - DNA, 17 bp, Arabidopsis thaliana
cgcccttccaaactcgt

SEQ ID NO: 79214 - DNA, 17 bp, Arabidopsis thaliana
cgcccttgctaggtgcc

SEQ ID NO: 79215 - DNA, 17 bp, Arabidopsis thaliana
cgcccttgggatgggtc

SEQ ID NO: 79216 - DNA, 17 bp, Arabidopsis thaliana
cgccctttgtcgctaag

SEQ ID NO: 79217 - DNA, 17 bp, Arabidopsis thaliana
cgccgaagaatctctcc

SEQ ID NO: 79218 - DNA, 17 bp, Arabidopsis thaliana
cgccgaagagagtttga

SEQ ID NO: 79219 - DNA, 17 bp, Arabidopsis thaliana
cgccgaagatgaacggg

SEQ ID NO: 79220 - DNA, 17 bp, Arabidopsis thaliana
cgccgaagcgagccttg

SEQ ID NO: 79221 - DNA, 17 bp, Arabidopsis thaliana
cgccgaatacaccagat

SEQ ID NO: 79222 - DNA, 17 bp, Arabidopsis thaliana
cgccgaattacagtcac

SEQ ID NO: 79223 - DNA, 17 bp, Arabidopsis thaliana
cgccgacaaaccgggca

SEQ ID NO: 79224 - DNA, 17 bp, Arabidopsis thaliana
cgccgacaggcccgggt

SEQ ID NO: 79225 - DNA, 17 bp, Arabidopsis thaliana
cgccgaccagggatcag

SEQ ID NO: 79226 - DNA, 17 bp, Arabidopsis thaliana
cgccgaccgaagggaca

SEQ ID NO: 79227 - DNA, 17 bp, Arabidopsis thaliana
cgccgaccgaccttgat

SEQ ID NO: 79228 - DNA, 17 bp, Arabidopsis thaliana
cgccgacgcggattacg

SEQ ID NO: 79229 - DNA, 17 bp, Arabidopsis thaliana
cgccgacggatcgcatg

SEQ ID NO: 79230 - DNA, 17 bp, Arabidopsis thaliana
cgccgacgtgggtggta

SEQ ID NO: 79231 - DNA, 17 bp, Arabidopsis thaliana
cgccgactgtcaaccag

SEQ ID NO: 79232 - DNA, 17 bp, Arabidopsis thaliana
cgccgacttgaaaatcc

SEQ ID NO: 79233 - DNA, 17 bp, Arabidopsis thaliana
cgccgacttggctcagg

SEQ ID NO: 79234 - DNA, 17 bp, Arabidopsis thaliana
cgccgagacattttaag

SEQ ID NO: 79235 - DNA, 17 bp, Arabidopsis thaliana
cgccgagacgtccagga

SEQ ID NO: 79236 - DNA, 17 bp, Arabidopsis thaliana
cgccgagacgtccggga

SEQ ID NO: 79237 - DNA, 17 bp, Arabidopsis thaliana
cgccgagccttaggata

SEQ ID NO: 79238 - DNA, 17 bp, Arabidopsis thaliana
cgccgagggcacgtctg

SEQ ID NO: 79239 - DNA, 17 bp, Arabidopsis thaliana
cgccgataaagtaccat

SEQ ID NO: 79240 - DNA, 17 bp, Arabidopsis thaliana
cgccgataccctcgagg

SEQ ID NO: 79241 - DNA, 17 bp, Arabidopsis thaliana
cgccgatactggttcca

SEQ ID NO: 79242 - DNA, 17 bp, Arabidopsis thaliana
cgccgatcgattcgggg

SEQ ID NO: 79243 - DNA, 17 bp, Arabidopsis thaliana
cgccgatctattcacgc

SEQ ID NO: 79244 - DNA, 17 bp, Arabidopsis thaliana
cgccgatctattcgggg

SEQ ID NO: 79245 - DNA, 17 bp, Arabidopsis thaliana
cgccgatgacacagtat

SEQ ID NO: 79246 - DNA, 17 bp, Arabidopsis thaliana
cgccgattggaccatca

SEQ ID NO: 79247 - DNA, 17 bp, Arabidopsis thaliana
cgccgattttcccgccg

SEQ ID NO: 79248 - DNA, 17 bp, Arabidopsis thaliana
cgccgattttccctctc

SEQ ID NO: 79249 - DNA, 17 bp, Arabidopsis thaliana
cgccgattttccctttc

SEQ ID NO: 79250 - DNA, 17 bp, Arabidopsis thaliana
cgccgattttgtaccgt

SEQ ID NO: 79251 - DNA, 17 bp, Arabidopsis thaliana
cgccgattttttccttg

SEQ ID NO: 79252 - DNA, 17 bp, Arabidopsis thaliana
cgccgattttttctctc

SEQ ID NO: 79253 - DNA, 17 bp, Arabidopsis thaliana
cgccgcaagtagttgca

SEQ ID NO: 79254 - DNA, 17 bp, Arabidopsis thaliana
cgccgcaatgagaagac

SEQ ID NO: 79255 - DNA, 17 bp, Arabidopsis thaliana
cgccgcactgtagatgg

SEQ ID NO: 79256 - DNA, 17 bp, Arabidopsis thaliana
cgccgcagatctgtttt

SEQ ID NO: 79257 - DNA, 17 bp, Arabidopsis thaliana
cgccgcatggcacacat

SEQ ID NO: 79258 - DNA, 17 bp, Arabidopsis thaliana
cgccgccaccgccggac

SEQ ID NO: 79259 - DNA, 17 bp, Arabidopsis thaliana
cgccgccaccgccggcc

SEQ ID NO: 79260 - DNA, 17 bp, Arabidopsis thaliana
cgccgccatcctgagtt

SEQ ID NO: 79261 - DNA, 17 bp, Arabidopsis thaliana
cgccgcccgattgccga

SEQ ID NO: 79262 - DNA, 17 bp, Arabidopsis thaliana
cgccgccgccggaacta

SEQ ID NO: 79263 - DNA, 17 bp, Arabidopsis thaliana
cgccgccggtttgccga

SEQ ID NO: 79264 - DNA, 17 bp, Arabidopsis thaliana
cgccgcctgtagatgga

SEQ ID NO: 79265 - DNA, 17 bp, Arabidopsis thaliana
cgccgccttcgtctgaa

SEQ ID NO: 79266 - DNA, 17 bp, Arabidopsis thaliana
cgccgcggttttttcag

SEQ ID NO: 79267 - DNA, 17 bp, Arabidopsis thaliana
cgccgcgtgccggccgg

SEQ ID NO: 79268 - DNA, 17 bp, Arabidopsis thaliana
cgccgctatggtgaaat

SEQ ID NO: 79269 - DNA, 17 bp, Arabidopsis thaliana
cgccgctgccgtgatcg

SEQ ID NO: 79270 - DNA, 17 bp, Arabidopsis thaliana
cgccgctttgcagtttg

SEQ ID NO: 79271 - DNA, 17 bp, Arabidopsis thaliana
cgccgcttttgcttctg

SEQ ID NO: 79272 - DNA, 17 bp, Arabidopsis thaliana
cgccggaaaccagcgcc

SEQ ID NO: 79273 - DNA, 17 bp, Arabidopsis thaliana
cgccggaaagtcgctaa

SEQ ID NO: 79274 - DNA, 17 bp, Arabidopsis thaliana
cgccggactgtgccaca

SEQ ID NO: 79275 - DNA, 17 bp, Arabidopsis thaliana
cgccggagacgacgaat

SEQ ID NO: 79276 - DNA, 17 bp, Arabidopsis thaliana
cgccggagcgacacagt

SEQ ID NO: 79277 - DNA, 17 bp, Arabidopsis thaliana
cgccggaggaccgagtg

SEQ ID NO: 79278 - DNA, 17 bp, Arabidopsis thaliana
cgccggatccgtggttt

SEQ ID NO: 79279 - DNA, 17 bp, Arabidopsis thaliana
cgccggatctaaggctc

SEQ ID NO: 79280 - DNA, 17 bp, Arabidopsis thaliana
cgccggatctatgtcgt

SEQ ID NO: 79281 - DNA, 17 bp, Arabidopsis thaliana
cgccggatctgctaata

SEQ ID NO: 79282 - DNA, 17 bp, Arabidopsis thaliana
cgccggcagcagaacgg

SEQ ID NO: 79283 - DNA, 17 bp, Arabidopsis thaliana
cgccggccggaaagtcg

SEQ ID NO: 79284 - DNA, 17 bp, Arabidopsis thaliana
cgccggccgggggacgg

SEQ ID NO: 79285 - DNA, 17 bp, Arabidopsis thaliana
cgccggccgtgggacgg

SEQ ID NO: 79286 - DNA, 17 bp, Arabidopsis thaliana
cgccggctcattcttca

SEQ ID NO: 79287 - DNA, 17 bp, Arabidopsis thaliana
cgccggcttatgtttgt

SEQ ID NO: 79288 - DNA, 17 bp, Arabidopsis thaliana
cgccggctttgtaattt

SEQ ID NO: 79289 - DNA, 17 bp, Arabidopsis thaliana
cgccgggcggagcggcc

SEQ ID NO: 79290 - DNA, 17 bp, Arabidopsis thaliana
cgccggggtgtcaaatt

SEQ ID NO: 79291 - DNA, 17 bp, Arabidopsis thaliana
cgccggtccgtctcaag

SEQ ID NO: 79292 - DNA, 17 bp, Arabidopsis thaliana
cgccggtgaaatcacgc

SEQ ID NO: 79293 - DNA, 17 bp, Arabidopsis thaliana
cgccggtgcttgtcgca

SEQ ID NO: 79294 - DNA, 17 bp, Arabidopsis thaliana
cgccggttgcggtttat

SEQ ID NO: 79295 - DNA, 17 bp, Arabidopsis thaliana
cgccggttgtaggctga

SEQ ID NO: 79296 - DNA, 17 bp, Arabidopsis thaliana
cgccggtttgttctgtt

SEQ ID NO: 79297 - DNA, 17 bp, Arabidopsis thaliana
cgccgtacaacttctct

SEQ ID NO: 79298 - DNA, 17 bp, Arabidopsis thaliana
cgccgtatcttctggag

SEQ ID NO: 79299 - DNA, 17 bp, Arabidopsis thaliana
cgccgtcaaatcccagg

SEQ ID NO: 79300 - DNA, 17 bp, Arabidopsis thaliana
cgccgtcgctaatttca

SEQ ID NO: 79301 - DNA, 17 bp, Arabidopsis thaliana
cgccgtcgtagcttctg

SEQ ID NO: 79302 - DNA, 17 bp, Arabidopsis thaliana
cgccgtcgtgccgtgcc

SEQ ID NO: 79303 - DNA, 17 bp, Arabidopsis thaliana
cgccgtctacaccgccg

SEQ ID NO: 79304 - DNA, 17 bp, Arabidopsis thaliana
cgccgtctcaaagatct

SEQ ID NO: 79305 - DNA, 17 bp, Arabidopsis thaliana
cgccgtctcccttatgt

SEQ ID NO: 79306 - DNA, 17 bp, Arabidopsis thaliana
cgccgtctcttggattt

SEQ ID NO: 79307 - DNA, 17 bp, Arabidopsis thaliana
cgccgtctgatagcgct

SEQ ID NO: 79308 - DNA, 17 bp, Arabidopsis thaliana
cgccgtctgcctgggtg

SEQ ID NO: 79309 - DNA, 17 bp, Arabidopsis thaliana
cgccgtctgcggaaaga

SEQ ID NO: 79310 - DNA, 17 bp, Arabidopsis thaliana
cgccgtgaagccatcag

SEQ ID NO: 79311 - DNA, 17 bp, Arabidopsis thaliana
cgccgtgaatccagccg

SEQ ID NO: 79312 - DNA, 17 bp, Arabidopsis thaliana
cgccgtgaattggaagg

SEQ ID NO: 79313 - DNA, 17 bp, Arabidopsis thaliana
cgccgtggacgaggccg

SEQ ID NO: 79314 - DNA, 17 bp, Arabidopsis thaliana
cgccgtggtaagagctt

SEQ ID NO: 79315 - DNA, 17 bp, Arabidopsis thaliana
cgccgttaaatgattct

SEQ ID NO: 79316 - DNA, 17 bp, Arabidopsis thaliana
cgccgttactaagggaa

SEQ ID NO: 79317 - DNA, 17 bp, Arabidopsis thaliana
cgccgttactagtcaac

SEQ ID NO: 79318 - DNA, 17 bp, Arabidopsis thaliana
cgccgttcaaggtgcat

SEQ ID NO: 79319 - DNA, 17 bp, Arabidopsis thaliana
cgccgttcggaccccct

SEQ ID NO: 79320 - DNA, 17 bp, Arabidopsis thaliana
cgccgttgagtcgctgc

SEQ ID NO: 79321 - DNA, 17 bp, Arabidopsis thaliana
cgccgttgtctgggctg

SEQ ID NO: 79322 - DNA, 17 bp, Arabidopsis thaliana
cgccgttgttgtaggag

SEQ ID NO: 79323 - DNA, 17 bp, Arabidopsis thaliana
cgccgtttacgaatttg

SEQ ID NO: 79324 - DNA, 17 bp, Arabidopsis thaliana
cgccgttttttggagat

SEQ ID NO: 79325 - DNA, 17 bp, Arabidopsis thaliana
cgcctaacggcgtgcct

SEQ ID NO: 79326 - DNA, 17 bp, Arabidopsis thaliana
cgcctaacggggtgcct

SEQ ID NO: 79327 - DNA, 17 bp, Arabidopsis thaliana
cgcctaagcactcggcg

SEQ ID NO: 79328 - DNA, 17 bp, Arabidopsis thaliana
cgcctaagcactcggtg

SEQ ID NO: 79329 - DNA, 17 bp, Arabidopsis thaliana
cgcctaaggcgtatctt

SEQ ID NO: 79330 - DNA, 17 bp, Arabidopsis thaliana
cgcctaattctctcttc

SEQ ID NO: 79331 - DNA, 17 bp, Arabidopsis thaliana
cgcctactaatgcgaca

SEQ ID NO: 79332 - DNA, 17 bp, Arabidopsis thaliana
cgcctaggctcacaggc

SEQ ID NO: 79333 - DNA, 17 bp, Arabidopsis thaliana
cgcctagggttaccggt

SEQ ID NO: 79334 - DNA, 17 bp, Arabidopsis thaliana
cgcctagggtttccagt

SEQ ID NO: 79335 - DNA, 17 bp, Arabidopsis thaliana
cgcctaggtttttccgg

SEQ ID NO: 79336 - DNA, 17 bp, Arabidopsis thaliana
cgcctagtcgatgtttg

SEQ ID NO: 79337 - DNA, 17 bp, Arabidopsis thaliana
cgcctataagcaccgtt

SEQ ID NO: 79338 - DNA, 17 bp, Arabidopsis thaliana
cgcctatcagattttca

SEQ ID NO: 79339 - DNA, 17 bp, Arabidopsis thaliana
cgcctatctgatcgcaa

SEQ ID NO: 79340 - DNA, 17 bp, Arabidopsis thaliana
cgcctatgcccgtcaca

SEQ ID NO: 79341 - DNA, 17 bp, Arabidopsis thaliana
cgcctatgggcgccgca

SEQ ID NO: 79342 - DNA, 17 bp, Arabidopsis thaliana
cgcctatgggcgcggca

SEQ ID NO: 79343 - DNA, 17 bp, Arabidopsis thaliana
cgcctatggggtcgctt

SEQ ID NO: 79344 - DNA, 17 bp, Arabidopsis thaliana
cgcctattagctcagtg

SEQ ID NO: 79345 - DNA, 17 bp, Arabidopsis thaliana
cgcctattgttggacta

SEQ ID NO: 79346 - DNA, 17 bp, Arabidopsis thaliana
cgcctatttccgagggt

SEQ ID NO: 79347 - DNA, 17 bp, Arabidopsis thaliana
cgcctatttgtttgcgg

SEQ ID NO: 79348 - DNA, 17 bp, Arabidopsis thaliana
cgcctcaaaaatcagat

SEQ ID NO: 79349 - DNA, 17 bp, Arabidopsis thaliana
cgcctcaaaaatgagat

SEQ ID NO: 79350 - DNA, 17 bp, Arabidopsis thaliana
cgcctcaaatattcatc

SEQ ID NO: 79351 - DNA, 17 bp, Arabidopsis thaliana
cgcctcaaccgccataa

SEQ ID NO: 79352 - DNA, 17 bp, Arabidopsis thaliana
cgcctcaatgacgatat

SEQ ID NO: 79353 - DNA, 17 bp, Arabidopsis thaliana
cgcctcaggagcagccc

SEQ ID NO: 79354 - DNA, 17 bp, Arabidopsis thaliana
cgcctcaggagcggccc

SEQ ID NO: 79355 - DNA, 17 bp, Arabidopsis thaliana
cgcctcaggatcggccc

SEQ ID NO: 79356 - DNA, 17 bp, Arabidopsis thaliana
cgcctcatatggacttt

SEQ ID NO: 79357 - DNA, 17 bp, Arabidopsis thaliana
cgcctcatctatttcat

SEQ ID NO: 79358 - DNA, 17 bp, Arabidopsis thaliana
cgcctccacctagtgac

SEQ ID NO: 79359 - DNA, 17 bp, Arabidopsis thaliana
cgcctccacttttgcat

SEQ ID NO: 79360 - DNA, 17 bp, Arabidopsis thaliana
cgcctccagttcggatg

SEQ ID NO: 79361 - DNA, 17 bp, Arabidopsis thaliana
cgcctcccttgcgatat

SEQ ID NO: 79362 - DNA, 17 bp, Arabidopsis thaliana
cgcctccgattcacggc

SEQ ID NO: 79363 - DNA, 17 bp, Arabidopsis thaliana
cgcctcggaagattcag

SEQ ID NO: 79364 - DNA, 17 bp, Arabidopsis thaliana
cgcctcggattcatccc

SEQ ID NO: 79365 - DNA, 17 bp, Arabidopsis thaliana
cgcctcggtggcctcag

SEQ ID NO: 79366 - DNA, 17 bp, Arabidopsis thaliana
cgcctcgtctggtgagg

SEQ ID NO: 79367 - DNA, 17 bp, Arabidopsis thaliana
cgcctctaagatctggt

SEQ ID NO: 79368 - DNA, 17 bp, Arabidopsis thaliana
cgcctctaagccagaat

SEQ ID NO: 79369 - DNA, 17 bp, Arabidopsis thaliana
cgcctctaagtaagaat

SEQ ID NO: 79370 - DNA, 17 bp, Arabidopsis thaliana
cgcctctaagtcagaat

SEQ ID NO: 79371 - DNA, 17 bp, Arabidopsis thaliana
cgcctctaagtcaggat

SEQ ID NO: 79372 - DNA, 17 bp, Arabidopsis thaliana
cgcctctaagtcataat

SEQ ID NO: 79373 - DNA, 17 bp, Arabidopsis thaliana
cgcctctactatgagaa

SEQ ID NO: 79374 - DNA, 17 bp, Arabidopsis thaliana
cgcctctccattggcag

SEQ ID NO: 79375 - DNA, 17 bp, Arabidopsis thaliana
cgcctctccggtgactt

SEQ ID NO: 79376 - DNA, 17 bp, Arabidopsis thaliana
cgcctctcgcgatattc

SEQ ID NO: 79377 - DNA, 17 bp, Arabidopsis thaliana
cgcctctcggcaacgga

SEQ ID NO: 79378 - DNA, 17 bp, Arabidopsis thaliana
cgcctctcgtgacttcg

SEQ ID NO: 79379 - DNA, 17 bp, Arabidopsis thaliana
cgcctctcttcttcttc

SEQ ID NO: 79380 - DNA, 17 bp, Arabidopsis thaliana
cgcctctgccttggatg

SEQ ID NO: 79381 - DNA, 17 bp, Arabidopsis thaliana
cgcctctggaagatgta

SEQ ID NO: 79382 - DNA, 17 bp, Arabidopsis thaliana
cgcctctgggagatgta

SEQ ID NO: 79383 - DNA, 17 bp, Arabidopsis thaliana
cgcctctgtgctggcga

SEQ ID NO: 79384 - DNA, 17 bp, Arabidopsis thaliana
cgcctcttctatggtag

SEQ ID NO: 79385 - DNA, 17 bp, Arabidopsis thaliana
cgcctgagacatgtacg

SEQ ID NO: 79386 - DNA, 17 bp, Arabidopsis thaliana
cgcctgagcaggctcat

SEQ ID NO: 79387 - DNA, 17 bp, Arabidopsis thaliana
cgcctgatacgtttgat

SEQ ID NO: 79388 - DNA, 17 bp, Arabidopsis thaliana
cgcctgatctggaccgt

SEQ ID NO: 79389 - DNA, 17 bp, Arabidopsis thaliana
cgcctgattcgttgatt

SEQ ID NO: 79390 - DNA, 17 bp, Arabidopsis thaliana
cgcctgcaaaatgacgc

SEQ ID NO: 79391 - DNA, 17 bp, Arabidopsis thaliana
cgcctgcacctatgttg

SEQ ID NO: 79392 - DNA, 17 bp, Arabidopsis thaliana
cgcctgcatttctaact

SEQ ID NO: 79393 - DNA, 17 bp, Arabidopsis thaliana
cgcctgcatttctgact

SEQ ID NO: 79394 - DNA, 17 bp, Arabidopsis thaliana
cgcctgccgcccgattg

SEQ ID NO: 79395 - DNA, 17 bp, Arabidopsis thaliana
cgcctgcctgggtgccc

SEQ ID NO: 79396 - DNA, 17 bp, Arabidopsis thaliana
cgcctgctgaggctcat

SEQ ID NO: 79397 - DNA, 17 bp, Arabidopsis thaliana
cgcctggagcgtaccga

SEQ ID NO: 79398 - DNA, 17 bp, Arabidopsis thaliana
cgcctgtatttagggtt

SEQ ID NO: 79399 - DNA, 17 bp, Arabidopsis thaliana
cgcctgtgaatcctgga

SEQ ID NO: 79400 - DNA, 17 bp, Arabidopsis thaliana
cgcctgtgagaaagttg

SEQ ID NO: 79401 - DNA, 17 bp, Arabidopsis thaliana
cgcctgttatcatttct

SEQ ID NO: 79402 - DNA, 17 bp, Arabidopsis thaliana
cgcctgtttttgttcaa

SEQ ID NO: 79403 - DNA, 17 bp, Arabidopsis thaliana
cgccttaagacggtgac

SEQ ID NO: 79404 - DNA, 17 bp, Arabidopsis thaliana
cgccttaagtcagaatc

SEQ ID NO: 79405 - DNA, 17 bp, Arabidopsis thaliana
cgccttaccactcggcc

SEQ ID NO: 79406 - DNA, 17 bp, Arabidopsis thaliana
cgccttagaaccttatg

SEQ ID NO: 79407 - DNA, 17 bp, Arabidopsis thaliana
cgccttaggctatgccg

SEQ ID NO: 79408 - DNA, 17 bp, Arabidopsis thaliana
cgccttagtcgcgctgt

SEQ ID NO: 79409 - DNA, 17 bp, Arabidopsis thaliana
cgccttccatcctgagt

SEQ ID NO: 79410 - DNA, 17 bp, Arabidopsis thaliana
cgccttccatgaatact

SEQ ID NO: 79411 - DNA, 17 bp, Arabidopsis thaliana
cgccttcgaggtggatg

SEQ ID NO: 79412 - DNA, 17 bp, Arabidopsis thaliana
cgccttcgcctccacct

SEQ ID NO: 79413 - DNA, 17 bp, Arabidopsis thaliana
cgccttcttcggatttg

SEQ ID NO: 79414 - DNA, 17 bp, Arabidopsis thaliana
cgccttcttcgttgtgt

SEQ ID NO: 79415 - DNA, 17 bp, Arabidopsis thaliana
cgccttgaaccgcacat

SEQ ID NO: 79416 - DNA, 17 bp, Arabidopsis thaliana
cgccttgcatcaactga

SEQ ID NO: 79417 - DNA, 17 bp, Arabidopsis thaliana
cgccttggccgcgtctg

SEQ ID NO: 79418 - DNA, 17 bp, Arabidopsis thaliana
cgccttggtgaataagt

SEQ ID NO: 79419 - DNA, 17 bp, Arabidopsis thaliana
cgccttggtgcaggtcg

SEQ ID NO: 79420 - DNA, 17 bp, Arabidopsis thaliana
cgccttgtatttatgct

SEQ ID NO: 79421 - DNA, 17 bp, Arabidopsis thaliana
cgcctttaagatcagat

SEQ ID NO: 79422 - DNA, 17 bp, Arabidopsis thaliana
cgcctttaagatcaggt

SEQ ID NO: 79423 - DNA, 17 bp, Arabidopsis thaliana
cgcctttaagatccagt

SEQ ID NO: 79424 - DNA, 17 bp, Arabidopsis thaliana
cgcctttaagatccgat

SEQ ID NO: 79425 - DNA, 17 bp, Arabidopsis thaliana
cgcctttaagatccggt

SEQ ID NO: 79426 - DNA, 17 bp, Arabidopsis thaliana
cgcctttaagatccgtt

SEQ ID NO: 79427 - DNA, 17 bp, Arabidopsis thaliana
cgcctttaagatcctct

SEQ ID NO: 79428 - DNA, 17 bp, Arabidopsis thaliana
cgcctttaagatcctgt

SEQ ID NO: 79429 - DNA, 17 bp, Arabidopsis thaliana
cgcctttaagatcgggt

SEQ ID NO: 79430 - DNA, 17 bp, Arabidopsis thaliana
cgcctttaagatcggtt

SEQ ID NO: 79431 - DNA, 17 bp, Arabidopsis thaliana
cgcctttaagatctagt

SEQ ID NO: 79432 - DNA, 17 bp, Arabidopsis thaliana
cgcctttaagatctggt

SEQ ID NO: 79433 - DNA, 17 bp, Arabidopsis thaliana
cgcctttaagatctgtt

SEQ ID NO: 79434 - DNA, 17 bp, Arabidopsis thaliana
cgcctttaagattcgtt

SEQ ID NO: 79435 - DNA, 17 bp, Arabidopsis thaliana
cgcctttcatttcttag

SEQ ID NO: 79436 - DNA, 17 bp, Arabidopsis thaliana
cgcctttctgattacca

SEQ ID NO: 79437 - DNA, 17 bp, Arabidopsis thaliana
cgcctttgatgtatccg

SEQ ID NO: 79438 - DNA, 17 bp, Arabidopsis thaliana
cgcctttggtgtgcatt

SEQ ID NO: 79439 - DNA, 17 bp, Arabidopsis thaliana
cgccttttaacagtttg

SEQ ID NO: 79440 - DNA, 17 bp, Arabidopsis thaliana
cgcgaaaaagagtgttc

SEQ ID NO: 79441 - DNA, 17 bp, Arabidopsis thaliana
cgcgaaaccacggaccc

SEQ ID NO: 79442 - DNA, 17 bp, Arabidopsis thaliana
cgcgaaactaccgtgcg

SEQ ID NO: 79443 - DNA, 17 bp, Arabidopsis thaliana
cgcgaaagcactctgct

SEQ ID NO: 79444 - DNA, 17 bp, Arabidopsis thaliana
cgcgaaaggtagattat

SEQ ID NO: 79445 - DNA, 17 bp, Arabidopsis thaliana
cgcgaaatacagggttt

SEQ ID NO: 79446 - DNA, 17 bp, Arabidopsis thaliana
cgcgaaatcctcggtca

SEQ ID NO: 79447 - DNA, 17 bp, Arabidopsis thaliana
cgcgaaatgaaaggaag

SEQ ID NO: 79448 - DNA, 17 bp, Arabidopsis thaliana
cgcgaaatgttacggaa

SEQ ID NO: 79449 - DNA, 17 bp, Arabidopsis thaliana
cgcgaacaaagattctt

SEQ ID NO: 79450 - DNA, 17 bp, Arabidopsis thaliana
cgcgaacaagctcgtcc

SEQ ID NO: 79451 - DNA, 17 bp, Arabidopsis thaliana
cgcgaacacaggtggtg

SEQ ID NO: 79452 - DNA, 17 bp, Arabidopsis thaliana
cgcgaactcgcccgtct

SEQ ID NO: 79453 - DNA, 17 bp, Arabidopsis thaliana
cgcgaactgaggattat

SEQ ID NO: 79454 - DNA, 17 bp, Arabidopsis thaliana
cgcgaactgctccgtcg

SEQ ID NO: 79455 - DNA, 17 bp, Arabidopsis thaliana
cgcgaacttgagtacac

SEQ ID NO: 79456 - DNA, 17 bp, Arabidopsis thaliana
cgcgaactttcaaattt

SEQ ID NO: 79457 - DNA, 17 bp, Arabidopsis thaliana
cgcgaagatgtagttta

SEQ ID NO: 79458 - DNA, 17 bp, Arabidopsis thaliana
cgcgaagccacggaccc

SEQ ID NO: 79459 - DNA, 17 bp, Arabidopsis thaliana
cgcgaagcgacggtaac

SEQ ID NO: 79460 - DNA, 17 bp, Arabidopsis thaliana
cgcgaagctaccgtccc

SEQ ID NO: 79461 - DNA, 17 bp, Arabidopsis thaliana
cgcgaagctaccgtccg

SEQ ID NO: 79462 - DNA, 17 bp, Arabidopsis thaliana
cgcgaagctaccgtgcg

SEQ ID NO: 79463 - DNA, 17 bp, Arabidopsis thaliana
cgcgaagcttagagatc

SEQ ID NO: 79464 - DNA, 17 bp, Arabidopsis thaliana
cgcgaaggattgcggac

SEQ ID NO: 79465 - DNA, 17 bp, Arabidopsis thaliana
cgcgaaggcgttcctgg

SEQ ID NO: 79466 - DNA, 17 bp, Arabidopsis thaliana
cgcgaaggctgcttttt

SEQ ID NO: 79467 - DNA, 17 bp, Arabidopsis thaliana
cgcgaagggacgctcgt

SEQ ID NO: 79468 - DNA, 17 bp, Arabidopsis thaliana
cgcgaaggtcacaggtt

SEQ ID NO: 79469 - DNA, 17 bp, Arabidopsis thaliana
cgcgaatattgtggagt

SEQ ID NO: 79470 - DNA, 17 bp, Arabidopsis thaliana
cgcgaatgtgattgcga

SEQ ID NO: 79471 - DNA, 17 bp, Arabidopsis thaliana
cgcgaattttcaaattt

SEQ ID NO: 79472 - DNA, 17 bp, Arabidopsis thaliana
cgcgacaatgactgggt

SEQ ID NO: 79473 - DNA, 17 bp, Arabidopsis thaliana
cgcgacagtgtgctact

SEQ ID NO: 79474 - DNA, 17 bp, Arabidopsis thaliana
cgcgacatgtgaccgtt

SEQ ID NO: 79475 - DNA, 17 bp, Arabidopsis thaliana
cgcgacatgttaccgtt

SEQ ID NO: 79476 - DNA, 17 bp, Arabidopsis thaliana
cgcgaccaaaagttgtt

SEQ ID NO: 79477 - DNA, 17 bp, Arabidopsis thaliana
cgcgacccatccccccc

SEQ ID NO: 79478 - DNA, 17 bp, Arabidopsis thaliana
cgcgaccccaggtcagg

SEQ ID NO: 79479 - DNA, 17 bp, Arabidopsis thaliana
cgcgacctatacacccc

SEQ ID NO: 79480 - DNA, 17 bp, Arabidopsis thaliana
cgcgacctatacacggc

SEQ ID NO: 79481 - DNA, 17 bp, Arabidopsis thaliana
cgcgacctatacccacc

SEQ ID NO: 79482 - DNA, 17 bp, Arabidopsis thaliana
cgcgacctatacccagc

SEQ ID NO: 79483 - DNA, 17 bp, Arabidopsis thaliana
cgcgacctatacccccc

SEQ ID NO: 79484 - DNA, 17 bp, Arabidopsis thaliana
cgcgacctataccccgc

SEQ ID NO: 79485 - DNA, 17 bp, Arabidopsis thaliana
cgcgacctatacccgcc

SEQ ID NO: 79486 - DNA, 17 bp, Arabidopsis thaliana
cgcgacctatacccgga

SEQ ID NO: 79487 - DNA, 17 bp, Arabidopsis thaliana
cgcgacctatacccggc

SEQ ID NO: 79488 - DNA, 17 bp, Arabidopsis thaliana
cgcgacctatccatacc

SEQ ID NO: 79489 - DNA, 17 bp, Arabidopsis thaliana
cgcgacctccaactgtc

SEQ ID NO: 79490 - DNA, 17 bp, Arabidopsis thaliana
cgcgacctgatttgcat

SEQ ID NO: 79491 - DNA, 17 bp, Arabidopsis thaliana
cgcgacgaaggagcaga

SEQ ID NO: 79492 - DNA, 17 bp, Arabidopsis thaliana
cgcgacgaaggaggaga

SEQ ID NO: 79493 - DNA, 17 bp, Arabidopsis thaliana
cgcgacgacagatacgc

SEQ ID NO: 79494 - DNA, 17 bp, Arabidopsis thaliana
cgcgacgatctatcccg

SEQ ID NO: 79495 - DNA, 17 bp, Arabidopsis thaliana
cgcgacgcatgggtcta

SEQ ID NO: 79496 - DNA, 17 bp, Arabidopsis thaliana
cgcgacgctcttttctc

SEQ ID NO: 79497 - DNA, 17 bp, Arabidopsis thaliana
cgcgacggcaacggtga

SEQ ID NO: 79498 - DNA, 17 bp, Arabidopsis thaliana
cgcgacggcagcccttt

SEQ ID NO: 79499 - DNA, 17 bp, Arabidopsis thaliana
cgcgacggcgacagacg

SEQ ID NO: 79500 - DNA, 17 bp, Arabidopsis thaliana
cgcgacggggtattgta

SEQ ID NO: 79501 - DNA, 17 bp, Arabidopsis thaliana
cgcgacgtcgccagacg

SEQ ID NO: 79502 - DNA, 17 bp, Arabidopsis thaliana
cgcgacgtcgcgagaag

SEQ ID NO: 79503 - DNA, 17 bp, Arabidopsis thaliana
cgcgacgtcgtgggcgc

SEQ ID NO: 79504 - DNA, 17 bp, Arabidopsis thaliana
cgcgacgtcgtgggcgg

SEQ ID NO: 79505 - DNA, 17 bp, Arabidopsis thaliana
cgcgacgtgccggagtg

SEQ ID NO: 79506 - DNA, 17 bp, Arabidopsis thaliana
cgcgacgttgagtttta

SEQ ID NO: 79507 - DNA, 17 bp, Arabidopsis thaliana
cgcgactattagtcttc

SEQ ID NO: 79508 - DNA, 17 bp, Arabidopsis thaliana
cgcgactcagccatgca

SEQ ID NO: 79509 - DNA, 17 bp, Arabidopsis thaliana
cgcgactcataggcagt

SEQ ID NO: 79510 - DNA, 17 bp, Arabidopsis thaliana
cgcgactctcggcaacg

SEQ ID NO: 79511 - DNA, 17 bp, Arabidopsis thaliana
cgcgactctggtcagtg

SEQ ID NO: 79512 - DNA, 17 bp, Arabidopsis thaliana
cgcgactgcttgtgctg

SEQ ID NO: 79513 - DNA, 17 bp, Arabidopsis thaliana
cgcgactggatcttaaa

SEQ ID NO: 79514 - DNA, 17 bp, Arabidopsis thaliana
cgcgacttccgctggtg

SEQ ID NO: 79515 - DNA, 17 bp, Arabidopsis thaliana
cgcgacttcgtgggatc

SEQ ID NO: 79516 - DNA, 17 bp, Arabidopsis thaliana
cgcgactttatggtttt

SEQ ID NO: 79517 - DNA, 17 bp, Arabidopsis thaliana
cgcgactttgcatatct

SEQ ID NO: 79518 - DNA, 17 bp, Arabidopsis thaliana
cgcgagaagtccactaa

SEQ ID NO: 79519 - DNA, 17 bp, Arabidopsis thaliana
cgcgagaatctagggat

SEQ ID NO: 79520 - DNA, 17 bp, Arabidopsis thaliana
cgcgagacaactctctc

SEQ ID NO: 79521 - DNA, 17 bp, Arabidopsis thaliana
cgcgagagccttgtcgt

SEQ ID NO: 79522 - DNA, 17 bp, Arabidopsis thaliana
cgcgagagttcgaatct

SEQ ID NO: 79523 - DNA, 17 bp, Arabidopsis thaliana
cgcgagagttcgtatct

SEQ ID NO: 79524 - DNA, 17 bp, Arabidopsis thaliana
cgcgagatcaggaggtt

SEQ ID NO: 79525 - DNA, 17 bp, Arabidopsis thaliana
cgcgagcaagctcgtcc

SEQ ID NO: 79526 - DNA, 17 bp, Arabidopsis thaliana
cgcgagcccgggcggag

SEQ ID NO: 79527 - DNA, 17 bp, Arabidopsis thaliana
cgcgagctatgcagtca

SEQ ID NO: 79528 - DNA, 17 bp, Arabidopsis thaliana
cgcgagctatgcggtcg

SEQ ID NO: 79529 - DNA, 17 bp, Arabidopsis thaliana
cgcgaggaagacgaagg

SEQ ID NO: 79530 - DNA, 17 bp, Arabidopsis thaliana
cgcgaggagccctttgt

SEQ ID NO: 79531 - DNA, 17 bp, Arabidopsis thaliana
cgcgaggcccgctaatt

SEQ ID NO: 79532 - DNA, 17 bp, Arabidopsis thaliana
cgcgaggtaaagatgaa

SEQ ID NO: 79533 - DNA, 17 bp, Arabidopsis thaliana
cgcgaggtgtgaagcca

SEQ ID NO: 79534 - DNA, 17 bp, Arabidopsis thaliana
cgcgaggttggtgcgag

SEQ ID NO: 79535 - DNA, 17 bp, Arabidopsis thaliana
cgcgagtaagttagttc

SEQ ID NO: 79536 - DNA, 17 bp, Arabidopsis thaliana
cgcgagtacgatggaag

SEQ ID NO: 79537 - DNA, 17 bp, Arabidopsis thaliana
cgcgagtatccgattgt

SEQ ID NO: 79538 - DNA, 17 bp, Arabidopsis thaliana
cgcgagtcaccgctgtg

SEQ ID NO: 79539 - DNA, 17 bp, Arabidopsis thaliana
cgcgagtcatcagctcg

SEQ ID NO: 79540 - DNA, 17 bp, Arabidopsis thaliana
cgcgagtccgcattttt

SEQ ID NO: 79541 - DNA, 17 bp, Arabidopsis thaliana
cgcgagttcgatcctcg

SEQ ID NO: 79542 - DNA, 17 bp, Arabidopsis thaliana
cgcgagttcgttcctcc

SEQ ID NO: 79543 - DNA, 17 bp, Arabidopsis thaliana
cgcgagttcgttcctcg

SEQ ID NO: 79544 - DNA, 17 bp, Arabidopsis thaliana
cgcgagttctatcgggt

SEQ ID NO: 79545 - DNA, 17 bp, Arabidopsis thaliana
cgcgagttttccggatt

SEQ ID NO: 79546 - DNA, 17 bp, Arabidopsis thaliana
cgcgagttttgagattt

SEQ ID NO: 79547 - DNA, 17 bp, Arabidopsis thaliana
cgcgatacagcggcagt

SEQ ID NO: 79548 - DNA, 17 bp, Arabidopsis thaliana
cgcgataggtactttgg

SEQ ID NO: 79549 - DNA, 17 bp, Arabidopsis thaliana
cgcgatagtgccgtgac

SEQ ID NO: 79550 - DNA, 17 bp, Arabidopsis thaliana
cgcgatcaataagacga

SEQ ID NO: 79551 - DNA, 17 bp, Arabidopsis thaliana
cgcgatcagggattttt

SEQ ID NO: 79552 - DNA, 17 bp, Arabidopsis thaliana
cgcgatcccgcgagggt

SEQ ID NO: 79553 - DNA, 17 bp, Arabidopsis thaliana
cgcgatcgagtgacagt

SEQ ID NO: 79554 - DNA, 17 bp, Arabidopsis thaliana
cgcgatctcggattcat

SEQ ID NO: 79555 - DNA, 17 bp, Arabidopsis thaliana
cgcgatgacccacatgg

SEQ ID NO: 79556 - DNA, 17 bp, Arabidopsis thaliana
cgcgatgagttgtttca

SEQ ID NO: 79557 - DNA, 17 bp, Arabidopsis thaliana
cgcgatgatggctagct

SEQ ID NO: 79558 - DNA, 17 bp, Arabidopsis thaliana
cgcgattaaatcgtgct

SEQ ID NO: 79559 - DNA, 17 bp, Arabidopsis thaliana
cgcgattagcggcgttc

SEQ ID NO: 79560 - DNA, 17 bp, Arabidopsis thaliana
cgcgattatccttagag

SEQ ID NO: 79561 - DNA, 17 bp, Arabidopsis thaliana
cgcgattcacgacggcc

SEQ ID NO: 79562 - DNA, 17 bp, Arabidopsis thaliana
cgcgattcctaaaatga

SEQ ID NO: 79563 - DNA, 17 bp, Arabidopsis thaliana
cgcgattcggttccgtt

SEQ ID NO: 79564 - DNA, 17 bp, Arabidopsis thaliana
cgcgattctcgagaaca

SEQ ID NO: 79565 - DNA, 17 bp, Arabidopsis thaliana
cgcgattcttccccaac

SEQ ID NO: 79566 - DNA, 17 bp, Arabidopsis thaliana
cgcgattgggttgtgtg

SEQ ID NO: 79567 - DNA, 17 bp, Arabidopsis thaliana
cgcgatttagtggagtc

SEQ ID NO: 79568 - DNA, 17 bp, Arabidopsis thaliana
cgcgatttcgtggctgt

SEQ ID NO: 79569 - DNA, 17 bp, Arabidopsis thaliana
cgcgatttgggctatat

SEQ ID NO: 79570 - DNA, 17 bp, Arabidopsis thaliana
cgcgattttggggacgt

SEQ ID NO: 79571 - DNA, 17 bp, Arabidopsis thaliana
cgcgcaaattacccaat

SEQ ID NO: 79572 - DNA, 17 bp, Arabidopsis thaliana
cgcgcaacctatacccg

SEQ ID NO: 79573 - DNA, 17 bp, Arabidopsis thaliana
cgcgcacagttttctat

SEQ ID NO: 79574 - DNA, 17 bp, Arabidopsis thaliana
cgcgcacctatacccgg

SEQ ID NO: 79575 - DNA, 17 bp, Arabidopsis thaliana
cgcgcagacccgctaca

SEQ ID NO: 79576 - DNA, 17 bp, Arabidopsis thaliana
cgcgcagacccgctata

SEQ ID NO: 79577 - DNA, 17 bp, Arabidopsis thaliana
cgcgcagacgttcatgc

SEQ ID NO: 79578 - DNA, 17 bp, Arabidopsis thaliana
cgcgcagagttcagcgg

SEQ ID NO: 79579 - DNA, 17 bp, Arabidopsis thaliana
cgcgcagggatagtggg

SEQ ID NO: 79580 - DNA, 17 bp, Arabidopsis thaliana
cgcgcatcctgtagatg

SEQ ID NO: 79581 - DNA, 17 bp, Arabidopsis thaliana
cgcgcatgaatggataa

SEQ ID NO: 79582 - DNA, 17 bp, Arabidopsis thaliana
cgcgcatgaatggatta

SEQ ID NO: 79583 - DNA, 17 bp, Arabidopsis thaliana
cgcgcatgttcggtttt

SEQ ID NO: 79584 - DNA, 17 bp, Arabidopsis thaliana
cgcgcattcgacggttt

SEQ ID NO: 79585 - DNA, 17 bp, Arabidopsis thaliana
cgcgccacgccgaggtt

SEQ ID NO: 79586 - DNA, 17 bp, Arabidopsis thaliana
cgcgccagcaggcgaag

SEQ ID NO: 79587 - DNA, 17 bp, Arabidopsis thaliana
cgcgccatggacacgtg

SEQ ID NO: 79588 - DNA, 17 bp, Arabidopsis thaliana
cgcgccattttagtctt

SEQ ID NO: 79589 - DNA, 17 bp, Arabidopsis thaliana
cgcgcccacaggcgaca

SEQ ID NO: 79590 - DNA, 17 bp, Arabidopsis thaliana
cgcgcccgtagatggat

SEQ ID NO: 79591 - DNA, 17 bp, Arabidopsis thaliana
cgcgcccgtggcctaat

SEQ ID NO: 79592 - DNA, 17 bp, Arabidopsis thaliana
cgcgccgcgagcccaag

SEQ ID NO: 79593 - DNA, 17 bp, Arabidopsis thaliana
cgcgccgggagtcacgt

SEQ ID NO: 79594 - DNA, 17 bp, Arabidopsis thaliana
cgcgcctaacggcgtgc

SEQ ID NO: 79595 - DNA, 17 bp, Arabidopsis thaliana
cgcgcctctagttccac

SEQ ID NO: 79596 - DNA, 17 bp, Arabidopsis thaliana
cgcgcctctccattggc

SEQ ID NO: 79597 - DNA, 17 bp, Arabidopsis thaliana
cgcgcctgtagatggat

SEQ ID NO: 79598 - DNA, 17 bp, Arabidopsis thaliana
cgcgcctgtagatggcc

SEQ ID NO: 79599 - DNA, 17 bp, Arabidopsis thaliana
cgcgccttcgcctccac

SEQ ID NO: 79600 - DNA, 17 bp, Arabidopsis thaliana
cgcgcgacccatacccg

SEQ ID NO: 79601 - DNA, 17 bp, Arabidopsis thaliana
cgcgcgacctacacccg

SEQ ID NO: 79602 - DNA, 17 bp, Arabidopsis thaliana
cgcgcgacctataccca

SEQ ID NO: 79603 - DNA, 17 bp, Arabidopsis thaliana
cgcgcgacctatacccg

SEQ ID NO: 79604 - DNA, 17 bp, Arabidopsis thaliana
cgcgcgacctataccct

SEQ ID NO: 79605 - DNA, 17 bp, Arabidopsis thaliana
cgcgcgacctatacctg

SEQ ID NO: 79606 - DNA, 17 bp, Arabidopsis thaliana
cgcgcgacctatacggc

SEQ ID NO: 79607 - DNA, 17 bp, Arabidopsis thaliana
cgcgcgacctatattcg

SEQ ID NO: 79608 - DNA, 17 bp, Arabidopsis thaliana
cgcgcgacctatcccca

SEQ ID NO: 79609 - DNA, 17 bp, Arabidopsis thaliana
cgcgcgacctattcccg

SEQ ID NO: 79610 - DNA, 17 bp, Arabidopsis thaliana
cgcgcggatgtgtttga

SEQ ID NO: 79611 - DNA, 17 bp, Arabidopsis thaliana
cgcgcggattacggtgg

SEQ ID NO: 79612 - DNA, 17 bp, Arabidopsis thaliana
cgcgcgggattttgttg

SEQ ID NO: 79613 - DNA, 17 bp, Arabidopsis thaliana
cgcgcgtgcggcccaga

SEQ ID NO: 79614 - DNA, 17 bp, Arabidopsis thaliana
cgcgcgttgatttggtt

SEQ ID NO: 79615 - DNA, 17 bp, Arabidopsis thaliana
cgcgcgtttctaaacag

SEQ ID NO: 79616 - DNA, 17 bp, Arabidopsis thaliana
cgcgctaacctagaacc

SEQ ID NO: 79617 - DNA, 17 bp, Arabidopsis thaliana
cgcgctaactgcttata

SEQ ID NO: 79618 - DNA, 17 bp, Arabidopsis thaliana
cgcgctaagtgctcgca

SEQ ID NO: 79619 - DNA, 17 bp, Arabidopsis thaliana
cgcgctaagtgtttttt

SEQ ID NO: 79620 - DNA, 17 bp, Arabidopsis thaliana
cgcgctacactgatgta

SEQ ID NO: 79621 - DNA, 17 bp, Arabidopsis thaliana
cgcgctacctatacccg

SEQ ID NO: 79622 - DNA, 17 bp, Arabidopsis thaliana
cgcgctacctatccccg

SEQ ID NO: 79623 - DNA, 17 bp, Arabidopsis thaliana
cgcgctacgccgcgggt

SEQ ID NO: 79624 - DNA, 17 bp, Arabidopsis thaliana
cgcgctacgctgcggtt

SEQ ID NO: 79625 - DNA, 17 bp, Arabidopsis thaliana
cgcgctatcctctgtct

SEQ ID NO: 79626 - DNA, 17 bp, Arabidopsis thaliana
cgcgctatttcaaattt

SEQ ID NO: 79627 - DNA, 17 bp, Arabidopsis thaliana
cgcgctatttgcagggg

SEQ ID NO: 79628 - DNA, 17 bp, Arabidopsis thaliana
cgcgctctttctgcgat

SEQ ID NO: 79629 - DNA, 17 bp, Arabidopsis thaliana
cgcgctgcacattcact

SEQ ID NO: 79630 - DNA, 17 bp, Arabidopsis thaliana
cgcgctgctgagggtgc

SEQ ID NO: 79631 - DNA, 17 bp, Arabidopsis thaliana
cgcgctggatgaggata

SEQ ID NO: 79632 - DNA, 17 bp, Arabidopsis thaliana
cgcgctgtaccgcagat

SEQ ID NO: 79633 - DNA, 17 bp, Arabidopsis thaliana
cgcgctgtagatggatc

SEQ ID NO: 79634 - DNA, 17 bp, Arabidopsis thaliana
cgcgctgtaggtggatg

SEQ ID NO: 79635 - DNA, 17 bp, Arabidopsis thaliana
cgcgctgtctacgagtc

SEQ ID NO: 79636 - DNA, 17 bp, Arabidopsis thaliana
cgcgctgttgcttctcc

SEQ ID NO: 79637 - DNA, 17 bp, Arabidopsis thaliana
cgcgcttacggctcaac

SEQ ID NO: 79638 - DNA, 17 bp, Arabidopsis thaliana
cgcgcttactaggaatt

SEQ ID NO: 79639 - DNA, 17 bp, Arabidopsis thaliana
cgcgcttatttgtgtcc

SEQ ID NO: 79640 - DNA, 17 bp, Arabidopsis thaliana
cgcgcttcagcccagaa

SEQ ID NO: 79641 - DNA, 17 bp, Arabidopsis thaliana
cgcgcttggttgaaaaa

SEQ ID NO: 79642 - DNA, 17 bp, Arabidopsis thaliana
cgcgcttgtacggcttt

SEQ ID NO: 79643 - DNA, 17 bp, Arabidopsis thaliana
cgcgcttttttagtctt

SEQ ID NO: 79644 - DNA, 17 bp, Arabidopsis thaliana
cgcggaaaaggcgaaag

SEQ ID NO: 79645 - DNA, 17 bp, Arabidopsis thaliana
cgcggaaatcgtccagg

SEQ ID NO: 79646 - DNA, 17 bp, Arabidopsis thaliana
cgcggaaatggccgagg

SEQ ID NO: 79647 - DNA, 17 bp, Arabidopsis thaliana
cgcggaagcaccaagtt

SEQ ID NO: 79648 - DNA, 17 bp, Arabidopsis thaliana
cgcggaagcagctcgag

SEQ ID NO: 79649 - DNA, 17 bp, Arabidopsis thaliana
cgcggaagtatgctaaa

SEQ ID NO: 79650 - DNA, 17 bp, Arabidopsis thaliana
cgcggacaacgaaatag

SEQ ID NO: 79651 - DNA, 17 bp, Arabidopsis thaliana
cgcggacacaggcgggg

SEQ ID NO: 79652 - DNA, 17 bp, Arabidopsis thaliana
cgcggacacaggtggtg

SEQ ID NO: 79653 - DNA, 17 bp, Arabidopsis thaliana
cgcggaccgaccataga

SEQ ID NO: 79654 - DNA, 17 bp, Arabidopsis thaliana
cgcggaccgtattcttg

SEQ ID NO: 79655 - DNA, 17 bp, Arabidopsis thaliana
cgcggacggtattcttg

SEQ ID NO: 79656 - DNA, 17 bp, Arabidopsis thaliana
cgcggactatccagcca

SEQ ID NO: 79657 - DNA, 17 bp, Arabidopsis thaliana
cgcggagataccgtgac

SEQ ID NO: 79658 - DNA, 17 bp, Arabidopsis thaliana
cgcggataatatgggct

SEQ ID NO: 79659 - DNA, 17 bp, Arabidopsis thaliana
cgcggataccttctgtt

SEQ ID NO: 79660 - DNA, 17 bp, Arabidopsis thaliana
cgcggatatgcggttgg

SEQ ID NO: 79661 - DNA, 17 bp, Arabidopsis thaliana
cgcggatccgatcctag

SEQ ID NO: 79662 - DNA, 17 bp, Arabidopsis thaliana
cgcggatccttatgacc

SEQ ID NO: 79663 - DNA, 17 bp, Arabidopsis thaliana
cgcggatccttttgacc

SEQ ID NO: 79664 - DNA, 17 bp, Arabidopsis thaliana
cgcggatcgaccggtgc

SEQ ID NO: 79665 - DNA, 17 bp, Arabidopsis thaliana
cgcggatcgccaggtta

SEQ ID NO: 79666 - DNA, 17 bp, Arabidopsis thaliana
cgcggatctttatgacc

SEQ ID NO: 79667 - DNA, 17 bp, Arabidopsis thaliana
cgcggatgaacagtgag

SEQ ID NO: 79668 - DNA, 17 bp, Arabidopsis thaliana
cgcggatgaacagtggc

SEQ ID NO: 79669 - DNA, 17 bp, Arabidopsis thaliana
cgcggatgacatggagt

SEQ ID NO: 79670 - DNA, 17 bp, Arabidopsis thaliana
cgcggatgacgtggacc

SEQ ID NO: 79671 - DNA, 17 bp, Arabidopsis thaliana
cgcggatgagacgcaga

SEQ ID NO: 79672 - DNA, 17 bp, Arabidopsis thaliana
cgcggatgggttagcta

SEQ ID NO: 79673 - DNA, 17 bp, Arabidopsis thaliana
cgcggatgtagccaagt

SEQ ID NO: 79674 - DNA, 17 bp, Arabidopsis thaliana
cgcggatgtgcttaaag

SEQ ID NO: 79675 - DNA, 17 bp, Arabidopsis thaliana
cgcggatgtgcttgatg

SEQ ID NO: 79676 - DNA, 17 bp, Arabidopsis thaliana
cgcggatgttgccgcac

SEQ ID NO: 79677 - DNA, 17 bp, Arabidopsis thaliana
cgcggattacggtggcc

SEQ ID NO: 79678 - DNA, 17 bp, Arabidopsis thaliana
cgcggattacggtggcg

SEQ ID NO: 79679 - DNA, 17 bp, Arabidopsis thaliana
cgcggattccgtttttt

SEQ ID NO: 79680 - DNA, 17 bp, Arabidopsis thaliana
cgcggcaatcgccaacc

SEQ ID NO: 79681 - DNA, 17 bp, Arabidopsis thaliana
cgcggcacctacaacgt

SEQ ID NO: 79682 - DNA, 17 bp, Arabidopsis thaliana
cgcggcacctccatcaa

SEQ ID NO: 79683 - DNA, 17 bp, Arabidopsis thaliana
cgcggcacgcccgtatt

SEQ ID NO: 79684 - DNA, 17 bp, Arabidopsis thaliana
cgcggcatggccgagtg

SEQ ID NO: 79685 - DNA, 17 bp, Arabidopsis thaliana
cgcggcatgggtgtgga

SEQ ID NO: 79686 - DNA, 17 bp, Arabidopsis thaliana
cgcggcatgggtgtggg

SEQ ID NO: 79687 - DNA, 17 bp, Arabidopsis thaliana
cgcggcattttcgtgat

SEQ ID NO: 79688 - DNA, 17 bp, Arabidopsis thaliana
cgcggccgttccaaatc

SEQ ID NO: 79689 - DNA, 17 bp, Arabidopsis thaliana
cgcggcgaaccctcaga

SEQ ID NO: 79690 - DNA, 17 bp, Arabidopsis thaliana
cgcggcgacgtgggggg

SEQ ID NO: 79691 - DNA, 17 bp, Arabidopsis thaliana
cgcggcgacgtgggtgg

SEQ ID NO: 79692 - DNA, 17 bp, Arabidopsis thaliana
cgcggcgacgtgggtgt

SEQ ID NO: 79693 - DNA, 17 bp, Arabidopsis thaliana
cgcggcggccctgtggt

SEQ ID NO: 79694 - DNA, 17 bp, Arabidopsis thaliana
cgcggcggctacggtgg

SEQ ID NO: 79695 - DNA, 17 bp, Arabidopsis thaliana
cgcggctagcttcatga

SEQ ID NO: 79696 - DNA, 17 bp, Arabidopsis thaliana
cgcggctcagcaagaat

SEQ ID NO: 79697 - DNA, 17 bp, Arabidopsis thaliana
cgcggctctgggtgaag

SEQ ID NO: 79698 - DNA, 17 bp, Arabidopsis thaliana
cgcgggaagcatttgca

SEQ ID NO: 79699 - DNA, 17 bp, Arabidopsis thaliana
cgcgggacgggtttggc

SEQ ID NO: 79700 - DNA, 17 bp, Arabidopsis thaliana
cgcgggagttttatgac

SEQ ID NO: 79701 - DNA, 17 bp, Arabidopsis thaliana
cgcgggccgctgccggt

SEQ ID NO: 79702 - DNA, 17 bp, Arabidopsis thaliana
cgcgggcggcgaaccac

SEQ ID NO: 79703 - DNA, 17 bp, Arabidopsis thaliana
cgcgggctggtttcttt

SEQ ID NO: 79704 - DNA, 17 bp, Arabidopsis thaliana
cgcggggacaatttatc

SEQ ID NO: 79705 - DNA, 17 bp, Arabidopsis thaliana
cgcggggccccgccggg

SEQ ID NO: 79706 - DNA, 17 bp, Arabidopsis thaliana
cgcgggggtaatggaag

SEQ ID NO: 79707 - DNA, 17 bp, Arabidopsis thaliana
cgcggggtagaccagtt

SEQ ID NO: 79708 - DNA, 17 bp, Arabidopsis thaliana
cgcggggtagagcagta

SEQ ID NO: 79709 - DNA, 17 bp, Arabidopsis thaliana
cgcggggtagagcagtt

SEQ ID NO: 79710 - DNA, 17 bp, Arabidopsis thaliana
cgcggggtagagtttgg

SEQ ID NO: 79711 - DNA, 17 bp, Arabidopsis thaliana
cgcggggtagatcagtt

SEQ ID NO: 79712 - DNA, 17 bp, Arabidopsis thaliana
cgcggggtgccccgccg

SEQ ID NO: 79713 - DNA, 17 bp, Arabidopsis thaliana
cgcggggtggagcagcc

SEQ ID NO: 79714 - DNA, 17 bp, Arabidopsis thaliana
cgcgggtaaacggcggg

SEQ ID NO: 79715 - DNA, 17 bp, Arabidopsis thaliana
cgcgggtagaatccttt

SEQ ID NO: 79716 - DNA, 17 bp, Arabidopsis thaliana
cgcgggtcaggatgacg

SEQ ID NO: 79717 - DNA, 17 bp, Arabidopsis thaliana
cgcgggtccttcttccg

SEQ ID NO: 79718 - DNA, 17 bp, Arabidopsis thaliana
cgcgggtgacccgggtg

SEQ ID NO: 79719 - DNA, 17 bp, Arabidopsis thaliana
cgcgggtgacccgggtt

SEQ ID NO: 79720 - DNA, 17 bp, Arabidopsis thaliana
cgcgggtgaccctggtt

SEQ ID NO: 79721 - DNA, 17 bp, Arabidopsis thaliana
cgcgggtgactttgaga

SEQ ID NO: 79722 - DNA, 17 bp, Arabidopsis thaliana
cgcgggtgattcccgtc

SEQ ID NO: 79723 - DNA, 17 bp, Arabidopsis thaliana
cgcgggtgcaccaccga

SEQ ID NO: 79724 - DNA, 17 bp, Arabidopsis thaliana
cgcgggtgcacccgacc

SEQ ID NO: 79725 - DNA, 17 bp, Arabidopsis thaliana
cgcgggtgcaccgccga

SEQ ID NO: 79726 - DNA, 17 bp, Arabidopsis thaliana
cgcgggtgcaccgccgg

SEQ ID NO: 79727 - DNA, 17 bp, Arabidopsis thaliana
cgcgggtgcaccgctga

SEQ ID NO: 79728 - DNA, 17 bp, Arabidopsis thaliana
cgcgggtgcaccgtcga

SEQ ID NO: 79729 - DNA, 17 bp, Arabidopsis thaliana
cgcgggtgccccgccgg

SEQ ID NO: 79730 - DNA, 17 bp, Arabidopsis thaliana
cgcgggtgtaccgccga

SEQ ID NO: 79731 - DNA, 17 bp, Arabidopsis thaliana
cgcgggttcaagcaccg

SEQ ID NO: 79732 - DNA, 17 bp, Arabidopsis thaliana
cgcgggttcgaatcccg

SEQ ID NO: 79733 - DNA, 17 bp, Arabidopsis thaliana
cgcgggttcgagccccg

SEQ ID NO: 79734 - DNA, 17 bp, Arabidopsis thaliana
cgcgggttcgattcccc

SEQ ID NO: 79735 - DNA, 17 bp, Arabidopsis thaliana
cgcgggttcgattcccg

SEQ ID NO: 79736 - DNA, 17 bp, Arabidopsis thaliana
cgcgggttcgccccgcc

SEQ ID NO: 79737 - DNA, 17 bp, Arabidopsis thaliana
cgcgggttcgggccccg

SEQ ID NO: 79738 - DNA, 17 bp, Arabidopsis thaliana
cgcgggttcgtcccgcc

SEQ ID NO: 79739 - DNA, 17 bp, Arabidopsis thaliana
cgcgggttcgtgccccg

SEQ ID NO: 79740 - DNA, 17 bp, Arabidopsis thaliana
cgcgggttgagccccgc

SEQ ID NO: 79741 - DNA, 17 bp, Arabidopsis thaliana
cgcgggttgagtatttg

SEQ ID NO: 79742 - DNA, 17 bp, Arabidopsis thaliana
cgcgggttggagccccg

SEQ ID NO: 79743 - DNA, 17 bp, Arabidopsis thaliana
cgcgggtttgagccccg

SEQ ID NO: 79744 - DNA, 17 bp, Arabidopsis thaliana
cgcggtaaattccgtcc

SEQ ID NO: 79745 - DNA, 17 bp, Arabidopsis thaliana
cgcggtaactaggatgg

SEQ ID NO: 79746 - DNA, 17 bp, Arabidopsis thaliana
cgcggtacatcgcagag

SEQ ID NO: 79747 - DNA, 17 bp, Arabidopsis thaliana
cgcggtagccgctgagc

SEQ ID NO: 79748 - DNA, 17 bp, Arabidopsis thaliana
cgcggtccatgcccttt

SEQ ID NO: 79749 - DNA, 17 bp, Arabidopsis thaliana
cgcggtcgagctcgggc

SEQ ID NO: 79750 - DNA, 17 bp, Arabidopsis thaliana
cgcggtgacaatttatc

SEQ ID NO: 79751 - DNA, 17 bp, Arabidopsis thaliana
cgcggtgatgtttgccc

SEQ ID NO: 79752 - DNA, 17 bp, Arabidopsis thaliana
cgcggtggtacagacag

SEQ ID NO: 79753 - DNA, 17 bp, Arabidopsis thaliana
cgcggtggtccagacag

SEQ ID NO: 79754 - DNA, 17 bp, Arabidopsis thaliana
cgcggtgtagagcagtt

SEQ ID NO: 79755 - DNA, 17 bp, Arabidopsis thaliana
cgcggtgtagagctgtt

SEQ ID NO: 79756 - DNA, 17 bp, Arabidopsis thaliana
cgcggtgtagatcagtt

SEQ ID NO: 79757 - DNA, 17 bp, Arabidopsis thaliana
cgcggtgtttttggctt

SEQ ID NO: 79758 - DNA, 17 bp, Arabidopsis thaliana
cgcggttaaatcctagt

SEQ ID NO: 79759 - DNA, 17 bp, Arabidopsis thaliana
cgcggttaccattcaga

SEQ ID NO: 79760 - DNA, 17 bp, Arabidopsis thaliana
cgcggttaccattcgga

SEQ ID NO: 79761 - DNA, 17 bp, Arabidopsis thaliana
cgcggttacggtggcgg

SEQ ID NO: 79762 - DNA, 17 bp, Arabidopsis thaliana
cgcggttagtagagtgt

SEQ ID NO: 79763 - DNA, 17 bp, Arabidopsis thaliana
cgcggttgacggcaacg

SEQ ID NO: 79764 - DNA, 17 bp, Arabidopsis thaliana
cgcggttggatgttgat

SEQ ID NO: 79765 - DNA, 17 bp, Arabidopsis thaliana
cgcggttttgagtgcgg

SEQ ID NO: 79766 - DNA, 17 bp, Arabidopsis thaliana
cgcgtaaacgccgcagt

SEQ ID NO: 79767 - DNA, 17 bp, Arabidopsis thaliana
cgcgtaaagcgtctgta

SEQ ID NO: 79768 - DNA, 17 bp, Arabidopsis thaliana
cgcgtaaagttcgtgtc

SEQ ID NO: 79769 - DNA, 17 bp, Arabidopsis thaliana
cgcgtaagttgctcttt

SEQ ID NO: 79770 - DNA, 17 bp, Arabidopsis thaliana
cgcgtaatggacttctc

SEQ ID NO: 79771 - DNA, 17 bp, Arabidopsis thaliana
cgcgtaccgcggggcta

SEQ ID NO: 79772 - DNA, 17 bp, Arabidopsis thaliana
cgcgtaccgtggaaatt

SEQ ID NO: 79773 - DNA, 17 bp, Arabidopsis thaliana
cgcgtacgtgaggcgac

SEQ ID NO: 79774 - DNA, 17 bp, Arabidopsis thaliana
cgcgtatatctctgctt

SEQ ID NO: 79775 - DNA, 17 bp, Arabidopsis thaliana
cgcgtatcaaaagcccg

SEQ ID NO: 79776 - DNA, 17 bp, Arabidopsis thaliana
cgcgtatgtgggctcgt

SEQ ID NO: 79777 - DNA, 17 bp, Arabidopsis thaliana
cgcgtcaacaggataat

SEQ ID NO: 79778 - DNA, 17 bp, Arabidopsis thaliana
cgcgtcagagacaacgt

SEQ ID NO: 79779 - DNA, 17 bp, Arabidopsis thaliana
cgcgtcattgaggcaga

SEQ ID NO: 79780 - DNA, 17 bp, Arabidopsis thaliana
cgcgtccaggagtctgc

SEQ ID NO: 79781 - DNA, 17 bp, Arabidopsis thaliana
cgcgtcccaggatcgga

SEQ ID NO: 79782 - DNA, 17 bp, Arabidopsis thaliana
cgcgtcccagtttgcag

SEQ ID NO: 79783 - DNA, 17 bp, Arabidopsis thaliana
cgcgtcccgccaaaccc

SEQ ID NO: 79784 - DNA, 17 bp, Arabidopsis thaliana
cgcgtcctcagcgacgg

SEQ ID NO: 79785 - DNA, 17 bp, Arabidopsis thaliana
cgcgtcctgtagatgga

SEQ ID NO: 79786 - DNA, 17 bp, Arabidopsis thaliana
cgcgtccttctactagt

SEQ ID NO: 79787 - DNA, 17 bp, Arabidopsis thaliana
cgcgtcgcgatagtaat

SEQ ID NO: 79788 - DNA, 17 bp, Arabidopsis thaliana
cgcgtcgtgtggatttt

SEQ ID NO: 79789 - DNA, 17 bp, Arabidopsis thaliana
cgcgtctaccgcagctg

SEQ ID NO: 79790 - DNA, 17 bp, Arabidopsis thaliana
cgcgtctactaatccag

SEQ ID NO: 79791 - DNA, 17 bp, Arabidopsis thaliana
cgcgtctagctgtgatt

SEQ ID NO: 79792 - DNA, 17 bp, Arabidopsis thaliana
cgcgtctcttgtcgccg

SEQ ID NO: 79793 - DNA, 17 bp, Arabidopsis thaliana
cgcgtctgattagctag

SEQ ID NO: 79794 - DNA, 17 bp, Arabidopsis thaliana
cgcgtctgcctgggtgt

SEQ ID NO: 79795 - DNA, 17 bp, Arabidopsis thaliana
cgcgtctgtagatggat

SEQ ID NO: 79796 - DNA, 17 bp, Arabidopsis thaliana
cgcgtctgtagtccaac

SEQ ID NO: 79797 - DNA, 17 bp, Arabidopsis thaliana
cgcgtctgtcgtggatc

SEQ ID NO: 79798 - DNA, 17 bp, Arabidopsis thaliana
cgcgtctgttggtgcca

SEQ ID NO: 79799 - DNA, 17 bp, Arabidopsis thaliana
cgcgtcttcatgtcctc

SEQ ID NO: 79800 - DNA, 17 bp, Arabidopsis thaliana
cgcgtcttgccaattgt

SEQ ID NO: 79801 - DNA, 17 bp, Arabidopsis thaliana
cgcgtctttgaactgtt

SEQ ID NO: 79802 - DNA, 17 bp, Arabidopsis thaliana
cgcgtctttgacatcaa

SEQ ID NO: 79803 - DNA, 17 bp, Arabidopsis thaliana
cgcgtctttgacatcga

SEQ ID NO: 79804 - DNA, 17 bp, Arabidopsis thaliana
cgcgtgaaacaatccgc

SEQ ID NO: 79805 - DNA, 17 bp, Arabidopsis thaliana
cgcgtgaaacactccgc

SEQ ID NO: 79806 - DNA, 17 bp, Arabidopsis thaliana
cgcgtgagacagtttgc

SEQ ID NO: 79807 - DNA, 17 bp, Arabidopsis thaliana
cgcgtgagagacttgtt

SEQ ID NO: 79808 - DNA, 17 bp, Arabidopsis thaliana
cgcgtgagatcgaccat

SEQ ID NO: 79809 - DNA, 17 bp, Arabidopsis thaliana
cgcgtgccggccggggg

SEQ ID NO: 79810 - DNA, 17 bp, Arabidopsis thaliana
cgcgtgcggtgatctat

SEQ ID NO: 79811 - DNA, 17 bp, Arabidopsis thaliana
cgcgtgctccgggcgtc

SEQ ID NO: 79812 - DNA, 17 bp, Arabidopsis thaliana
cgcgtggcctctgtgct

SEQ ID NO: 79813 - DNA, 17 bp, Arabidopsis thaliana
cgcgtgggctgcgccac

SEQ ID NO: 79814 - DNA, 17 bp, Arabidopsis thaliana
cgcgtggtccggtgccc

SEQ ID NO: 79815 - DNA, 17 bp, Arabidopsis thaliana
cgcgtggtgtccggtgc

SEQ ID NO: 79816 - DNA, 17 bp, Arabidopsis thaliana
cgcgtggtgtccggtgg

SEQ ID NO: 79817 - DNA, 17 bp, Arabidopsis thaliana
cgcgtggtgtccggttg

SEQ ID NO: 79818 - DNA, 17 bp, Arabidopsis thaliana
cgcgtgtgcgagttata

SEQ ID NO: 79819 - DNA, 17 bp, Arabidopsis thaliana
cgcgtgtgcgatattaa

SEQ ID NO: 79820 - DNA, 17 bp, Arabidopsis thaliana
cgcgtgtgctttgatct

SEQ ID NO: 79821 - DNA, 17 bp, Arabidopsis thaliana
cgcgtgttcgtttcacg

SEQ ID NO: 79822 - DNA, 17 bp, Arabidopsis thaliana
cgcgtgtttctcttcgg

SEQ ID NO: 79823 - DNA, 17 bp, Arabidopsis thaliana
cgcgttaacaacctggt

SEQ ID NO: 79824 - DNA, 17 bp, Arabidopsis thaliana
cgcgttaagattcggtt

SEQ ID NO: 79825 - DNA, 17 bp, Arabidopsis thaliana
cgcgttaaggttcctgc

SEQ ID NO: 79826 - DNA, 17 bp, Arabidopsis thaliana
cgcgttaagtatcccgc

SEQ ID NO: 79827 - DNA, 17 bp, Arabidopsis thaliana
cgcgttaagtctccaat

SEQ ID NO: 79828 - DNA, 17 bp, Arabidopsis thaliana
cgcgttacggctgagtt

SEQ ID NO: 79829 - DNA, 17 bp, Arabidopsis thaliana
cgcgttagatctccatt

SEQ ID NO: 79830 - DNA, 17 bp, Arabidopsis thaliana
cgcgttcaaattctcga

SEQ ID NO: 79831 - DNA, 17 bp, Arabidopsis thaliana
cgcgttccgagccaaag

SEQ ID NO: 79832 - DNA, 17 bp, Arabidopsis thaliana
cgcgttccgtaaacagc

SEQ ID NO: 79833 - DNA, 17 bp, Arabidopsis thaliana
cgcgttctaaccgtttg

SEQ ID NO: 79834 - DNA, 17 bp, Arabidopsis thaliana
cgcgttctatggatgtg

SEQ ID NO: 79835 - DNA, 17 bp, Arabidopsis thaliana
cgcgttctgctaaaccc

SEQ ID NO: 79836 - DNA, 17 bp, Arabidopsis thaliana
cgcgttgactacgtccc

SEQ ID NO: 79837 - DNA, 17 bp, Arabidopsis thaliana
cgcgttgactgcgtcct

SEQ ID NO: 79838 - DNA, 17 bp, Arabidopsis thaliana
cgcgttgagcgagtgag

SEQ ID NO: 79839 - DNA, 17 bp, Arabidopsis thaliana
cgcgttgtgagccgatc

SEQ ID NO: 79840 - DNA, 17 bp, Arabidopsis thaliana
cgcgttgtgagctgtcc

SEQ ID NO: 79841 - DNA, 17 bp, Arabidopsis thaliana
cgcgtttactgtaccgc

SEQ ID NO: 79842 - DNA, 17 bp, Arabidopsis thaliana
cgcgtttgaagcctcca

SEQ ID NO: 79843 - DNA, 17 bp, Arabidopsis thaliana
cgcgtttgaatacgaca

SEQ ID NO: 79844 - DNA, 17 bp, Arabidopsis thaliana
cgcgtttgtggctacag

SEQ ID NO: 79845 - DNA, 17 bp, Arabidopsis thaliana
cgcgtttgttaatagat

SEQ ID NO: 79846 - DNA, 17 bp, Arabidopsis thaliana
cgcgttttcatagattg

SEQ ID NO: 79847 - DNA, 17 bp, Arabidopsis thaliana
cgcgttttctcactttc

SEQ ID NO: 79848 - DNA, 17 bp, Arabidopsis thaliana
cgcgttttttggacctg

SEQ ID NO: 79849 - DNA, 17 bp, Arabidopsis thaliana
cgctaaaacaaagtttc

SEQ ID NO: 79850 - DNA, 17 bp, Arabidopsis thaliana
cgctaaaacttgtgtcc

SEQ ID NO: 79851 - DNA, 17 bp, Arabidopsis thaliana
cgctaaaacttgtgtct

SEQ ID NO: 79852 - DNA, 17 bp, Arabidopsis thaliana
cgctaaaccgcggccgg

SEQ ID NO: 79853 - DNA, 17 bp, Arabidopsis thaliana
cgctaaaccgcggctgg

SEQ ID NO: 79854 - DNA, 17 bp, Arabidopsis thaliana
cgctaaactcggcacgg

SEQ ID NO: 79855 - DNA, 17 bp, Arabidopsis thaliana
cgctaaagcccttatgc

SEQ ID NO: 79856 - DNA, 17 bp, Arabidopsis thaliana
cgctaaagcgagttaga

SEQ ID NO: 79857 - DNA, 17 bp, Arabidopsis thaliana
cgctaaatagaaatgtc

SEQ ID NO: 79858 - DNA, 17 bp, Arabidopsis thaliana
cgctaaatgtttgctca

SEQ ID NO: 79859 - DNA, 17 bp, Arabidopsis thaliana
cgctaaatttccgttaa

SEQ ID NO: 79860 - DNA, 17 bp, Arabidopsis thaliana
cgctaacaaccgctacc

SEQ ID NO: 79861 - DNA, 17 bp, Arabidopsis thaliana
cgctaacaaccggtacc

SEQ ID NO: 79862 - DNA, 17 bp, Arabidopsis thaliana
cgctaacacatcttgcc

SEQ ID NO: 79863 - DNA, 17 bp, Arabidopsis thaliana
cgctaacctagaaccca

SEQ ID NO: 79864 - DNA, 17 bp, Arabidopsis thaliana
cgctaacgactaatggt

SEQ ID NO: 79865 - DNA, 17 bp, Arabidopsis thaliana
cgctaacgactattgct

SEQ ID NO: 79866 - DNA, 17 bp, Arabidopsis thaliana
cgctaagattggtcgtt

SEQ ID NO: 79867 - DNA, 17 bp, Arabidopsis thaliana
cgctaagccttaggata

SEQ ID NO: 79868 - DNA, 17 bp, Arabidopsis thaliana
cgctaaggagtgtgtaa

SEQ ID NO: 79869 - DNA, 17 bp, Arabidopsis thaliana
cgctaaggtccctaagc

SEQ ID NO: 79870 - DNA, 17 bp, Arabidopsis thaliana
cgctaagttattcgttt

SEQ ID NO: 79871 - DNA, 17 bp, Arabidopsis thaliana
cgctaagttgttcgctt

SEQ ID NO: 79872 - DNA, 17 bp, Arabidopsis thaliana
cgctaagttgttcgttt

SEQ ID NO: 79873 - DNA, 17 bp, Arabidopsis thaliana
cgctaatacggagagcc

SEQ ID NO: 79874 - DNA, 17 bp, Arabidopsis thaliana
cgctaatatttagtgga

SEQ ID NO: 79875 - DNA, 17 bp, Arabidopsis thaliana
cgctaatgaccacggat

SEQ ID NO: 79876 - DNA, 17 bp, Arabidopsis thaliana
cgctaatgaccacggtt

SEQ ID NO: 79877 - DNA, 17 bp, Arabidopsis thaliana
cgctaatgcccaattgg

SEQ ID NO: 79878 - DNA, 17 bp, Arabidopsis thaliana
cgctaatggagaagcag

SEQ ID NO: 79879 - DNA, 17 bp, Arabidopsis thaliana
cgctaattactgtcgct

SEQ ID NO: 79880 - DNA, 17 bp, Arabidopsis thaliana
cgctaattccgtttgat

SEQ ID NO: 79881 - DNA, 17 bp, Arabidopsis thaliana
cgctaattccgtttgtt

SEQ ID NO: 79882 - DNA, 17 bp, Arabidopsis thaliana
cgctaattcgggattta

SEQ ID NO: 79883 - DNA, 17 bp, Arabidopsis thaliana
cgctaattcgggatttc

SEQ ID NO: 79884 - DNA, 17 bp, Arabidopsis thaliana
cgctaattcgggatttg

SEQ ID NO: 79885 - DNA, 17 bp, Arabidopsis thaliana
cgctaatttccaggttt

SEQ ID NO: 79886 - DNA, 17 bp, Arabidopsis thaliana
cgctaatttttgtcgct

SEQ ID NO: 79887 - DNA, 17 bp, Arabidopsis thaliana
cgctacaaagatcagct

SEQ ID NO: 79888 - DNA, 17 bp, Arabidopsis thaliana
cgctacaaatttttcgt

SEQ ID NO: 79889 - DNA, 17 bp, Arabidopsis thaliana
cgctacaagatctgaaa

SEQ ID NO: 79890 - DNA, 17 bp, Arabidopsis thaliana
cgctacaagcctttcgc

SEQ ID NO: 79891 - DNA, 17 bp, Arabidopsis thaliana
cgctacactgatgtatt

SEQ ID NO: 79892 - DNA, 17 bp, Arabidopsis thaliana
cgctacactgcttatct

SEQ ID NO: 79893 - DNA, 17 bp, Arabidopsis thaliana
cgctacatcggtttttg

SEQ ID NO: 79894 - DNA, 17 bp, Arabidopsis thaliana
cgctaccgcctgcaacc

SEQ ID NO: 79895 - DNA, 17 bp, Arabidopsis thaliana
cgctaccgtgcgctgga

SEQ ID NO: 79896 - DNA, 17 bp, Arabidopsis thaliana
cgctaccttgtggtcaa

SEQ ID NO: 79897 - DNA, 17 bp, Arabidopsis thaliana
cgctacgagtgaactat

SEQ ID NO: 79898 - DNA, 17 bp, Arabidopsis thaliana
cgctacgccgcgggttt

SEQ ID NO: 79899 - DNA, 17 bp, Arabidopsis thaliana
cgctacgcgtgggtttg

SEQ ID NO: 79900 - DNA, 17 bp, Arabidopsis thaliana
cgctacgctgcggtttt

SEQ ID NO: 79901 - DNA, 17 bp, Arabidopsis thaliana
cgctacggcgctgaaat

SEQ ID NO: 79902 - DNA, 17 bp, Arabidopsis thaliana
cgctacgggagaaatac

SEQ ID NO: 79903 - DNA, 17 bp, Arabidopsis thaliana
cgctacgtctcggggga

SEQ ID NO: 79904 - DNA, 17 bp, Arabidopsis thaliana
cgctacgtgccggagtg

SEQ ID NO: 79905 - DNA, 17 bp, Arabidopsis thaliana
cgctactccatgctgtg

SEQ ID NO: 79906 - DNA, 17 bp, Arabidopsis thaliana
cgctactggatcttaaa

SEQ ID NO: 79907 - DNA, 17 bp, Arabidopsis thaliana
cgctactgggaattagg

SEQ ID NO: 79908 - DNA, 17 bp, Arabidopsis thaliana
cgctactgtgcgctggt

SEQ ID NO: 79909 - DNA, 17 bp, Arabidopsis thaliana
cgctacttcttctctct

SEQ ID NO: 79910 - DNA, 17 bp, Arabidopsis thaliana
cgctactttcgcaactt

SEQ ID NO: 79911 - DNA, 17 bp, Arabidopsis thaliana
cgctactttgttttcga

SEQ ID NO: 79912 - DNA, 17 bp, Arabidopsis thaliana
cgctacttttgatcgct

SEQ ID NO: 79913 - DNA, 17 bp, Arabidopsis thaliana
cgctacttttggtcgct

SEQ ID NO: 79914 - DNA, 17 bp, Arabidopsis thaliana
cgctagtaatcgccggt

SEQ ID NO: 79915 - DNA, 17 bp, Arabidopsis thaliana
cgctataggctttcatc

SEQ ID NO: 79916 - DNA, 17 bp, Arabidopsis thaliana
cgctatatccagcgact

SEQ ID NO: 79917 - DNA, 17 bp, Arabidopsis thaliana
cgctatatccagcgatt

SEQ ID NO: 79918 - DNA, 17 bp, Arabidopsis thaliana
cgctatatgtacaccgc

SEQ ID NO: 79919 - DNA, 17 bp, Arabidopsis thaliana
cgctatcagacgggttt

SEQ ID NO: 79920 - DNA, 17 bp, Arabidopsis thaliana
cgctatcagtacaccgc

SEQ ID NO: 79921 - DNA, 17 bp, Arabidopsis thaliana
cgctatcatcctgagtt

SEQ ID NO: 79922 - DNA, 17 bp, Arabidopsis thaliana
cgctatccatccagagc

SEQ ID NO: 79923 - DNA, 17 bp, Arabidopsis thaliana
cgctatccatccagagt

SEQ ID NO: 79924 - DNA, 17 bp, Arabidopsis thaliana
cgctatccatcctgaat

SEQ ID NO: 79925 - DNA, 17 bp, Arabidopsis thaliana
cgctatccatcctgact

SEQ ID NO: 79926 - DNA, 17 bp, Arabidopsis thaliana
cgctatccatcctgaga

SEQ ID NO: 79927 - DNA, 17 bp, Arabidopsis thaliana
cgctatccatcctgagc

SEQ ID NO: 79928 - DNA, 17 bp, Arabidopsis thaliana
cgctatccatcctgagt

SEQ ID NO: 79929 - DNA, 17 bp, Arabidopsis thaliana
cgctatccatcctgatt

SEQ ID NO: 79930 - DNA, 17 bp, Arabidopsis thaliana
cgctatccatcctgcct

SEQ ID NO: 79931 - DNA, 17 bp, Arabidopsis thaliana
cgctatccatcctgcgt

SEQ ID NO: 79932 - DNA, 17 bp, Arabidopsis thaliana
cgctatccatctcgagt

SEQ ID NO: 79933 - DNA, 17 bp, Arabidopsis thaliana
cgctatccatctgagtt

SEQ ID NO: 79934 - DNA, 17 bp, Arabidopsis thaliana
cgctatccatcttgagt

SEQ ID NO: 79935 - DNA, 17 bp, Arabidopsis thaliana
cgctatccattctgagt

SEQ ID NO: 79936 - DNA, 17 bp, Arabidopsis thaliana
cgctatccattgagttt

SEQ ID NO: 79937 - DNA, 17 bp, Arabidopsis thaliana
cgctatccatttgagtt

SEQ ID NO: 79938 - DNA, 17 bp, Arabidopsis thaliana
cgctatccattttgagt

SEQ ID NO: 79939 - DNA, 17 bp, Arabidopsis thaliana
cgctatccctcctgccc

SEQ ID NO: 79940 - DNA, 17 bp, Arabidopsis thaliana
cgctatccctcctgctc

SEQ ID NO: 79941 - DNA, 17 bp, Arabidopsis thaliana
cgctatcgaatgttgcg

SEQ ID NO: 79942 - DNA, 17 bp, Arabidopsis thaliana
cgctatctacgagtcgg

SEQ ID NO: 79943 - DNA, 17 bp, Arabidopsis thaliana
cgctatctatcctgagt

SEQ ID NO: 79944 - DNA, 17 bp, Arabidopsis thaliana
cgctatctgtacagcgt

SEQ ID NO: 79945 - DNA, 17 bp, Arabidopsis thaliana
cgctatctgtacatcgc

SEQ ID NO: 79946 - DNA, 17 bp, Arabidopsis thaliana
cgctatgctggacttag

SEQ ID NO: 79947 - DNA, 17 bp, Arabidopsis thaliana
cgctatggtgccatcaa

SEQ ID NO: 79948 - DNA, 17 bp, Arabidopsis thaliana
cgctatgtctaacgcct

SEQ ID NO: 79949 - DNA, 17 bp, Arabidopsis thaliana
cgctatgttggacttag

SEQ ID NO: 79950 - DNA, 17 bp, Arabidopsis thaliana
cgctattaacctaacag

SEQ ID NO: 79951 - DNA, 17 bp, Arabidopsis thaliana
cgctattatgccaagta

SEQ ID NO: 79952 - DNA, 17 bp, Arabidopsis thaliana
cgctattcatcctgagt

SEQ ID NO: 79953 - DNA, 17 bp, Arabidopsis thaliana
cgctattcggaggttcg

SEQ ID NO: 79954 - DNA, 17 bp, Arabidopsis thaliana
cgctattgcgtgtaatg

SEQ ID NO: 79955 - DNA, 17 bp, Arabidopsis thaliana
cgctatttggccgattg

SEQ ID NO: 79956 - DNA, 17 bp, Arabidopsis thaliana
cgctattttcgtcagag

SEQ ID NO: 79957 - DNA, 17 bp, Arabidopsis thaliana
cgctcaaactaggttat

SEQ ID NO: 79958 - DNA, 17 bp, Arabidopsis thaliana
cgctcaaatcgtgctac

SEQ ID NO: 79959 - DNA, 17 bp, Arabidopsis thaliana
cgctcaacatctttacg

SEQ ID NO: 79960 - DNA, 17 bp, Arabidopsis thaliana
cgctcaacggcagattt

SEQ ID NO: 79961 - DNA, 17 bp, Arabidopsis thaliana
cgctcaactaatctgtg

SEQ ID NO: 79962 - DNA, 17 bp, Arabidopsis thaliana
cgctcaaggattccact

SEQ ID NO: 79963 - DNA, 17 bp, Arabidopsis thaliana
cgctcaattcggatggc

SEQ ID NO: 79964 - DNA, 17 bp, Arabidopsis thaliana
cgctcacacggttttga

SEQ ID NO: 79965 - DNA, 17 bp, Arabidopsis thaliana
cgctcacataagttctg

SEQ ID NO: 79966 - DNA, 17 bp, Arabidopsis thaliana
cgctcacctaatcatca

SEQ ID NO: 79967 - DNA, 17 bp, Arabidopsis thaliana
cgctcacctctctttct

SEQ ID NO: 79968 - DNA, 17 bp, Arabidopsis thaliana
cgctcacgcccggtcgt

SEQ ID NO: 79969 - DNA, 17 bp, Arabidopsis thaliana
cgctcactgctctatct

SEQ ID NO: 79970 - DNA, 17 bp, Arabidopsis thaliana
cgctcactggtctatct

SEQ ID NO: 79971 - DNA, 17 bp, Arabidopsis thaliana
cgctcagaaccactatg

SEQ ID NO: 79972 - DNA, 17 bp, Arabidopsis thaliana
cgctcagagcattttgg

SEQ ID NO: 79973 - DNA, 17 bp, Arabidopsis thaliana
cgctcagatctgctgct

SEQ ID NO: 79974 - DNA, 17 bp, Arabidopsis thaliana
cgctcagatttggctgc

SEQ ID NO: 79975 - DNA, 17 bp, Arabidopsis thaliana
cgctcagatttggctgg

SEQ ID NO: 79976 - DNA, 17 bp, Arabidopsis thaliana
cgctcagcctcaacgcc

SEQ ID NO: 79977 - DNA, 17 bp, Arabidopsis thaliana
cgctcagcggagtgtta

SEQ ID NO: 79978 - DNA, 17 bp, Arabidopsis thaliana
cgctcagctctgcagac

SEQ ID NO: 79979 - DNA, 17 bp, Arabidopsis thaliana
cgctcaggacagggact

SEQ ID NO: 79980 - DNA, 17 bp, Arabidopsis thaliana
cgctcaggctcgaaata

SEQ ID NO: 79981 - DNA, 17 bp, Arabidopsis thaliana
cgctcagtccggctctg

SEQ ID NO: 79982 - DNA, 17 bp, Arabidopsis thaliana
cgctcagtcgtcagcgg

SEQ ID NO: 79983 - DNA, 17 bp, Arabidopsis thaliana
cgctcagtgactatgtt

SEQ ID NO: 79984 - DNA, 17 bp, Arabidopsis thaliana
cgctcatcacttcttcc

SEQ ID NO: 79985 - DNA, 17 bp, Arabidopsis thaliana
cgctcatcttgtggtgt

SEQ ID NO: 79986 - DNA, 17 bp, Arabidopsis thaliana
cgctccaagtgaacgag

SEQ ID NO: 79987 - DNA, 17 bp, Arabidopsis thaliana
cgctccatctaatgtta

SEQ ID NO: 79988 - DNA, 17 bp, Arabidopsis thaliana
cgctccgactatttcct

SEQ ID NO: 79989 - DNA, 17 bp, Arabidopsis thaliana
cgctccgattgaaccat

SEQ ID NO: 79990 - DNA, 17 bp, Arabidopsis thaliana
cgctccgattgcaccat

SEQ ID NO: 79991 - DNA, 17 bp, Arabidopsis thaliana
cgctccgattgcacccc

SEQ ID NO: 79992 - DNA, 17 bp, Arabidopsis thaliana
cgctccgattggaccaa

SEQ ID NO: 79993 - DNA, 17 bp, Arabidopsis thaliana
cgctccgattggaccat

SEQ ID NO: 79994 - DNA, 17 bp, Arabidopsis thaliana
cgctccggcggctagac

SEQ ID NO: 79995 - DNA, 17 bp, Arabidopsis thaliana
cgctccgtagatggatc

SEQ ID NO: 79996 - DNA, 17 bp, Arabidopsis thaliana
cgctccgttagatggat

SEQ ID NO: 79997 - DNA, 17 bp, Arabidopsis thaliana
cgctcctaccgattgaa

SEQ ID NO: 79998 - DNA, 17 bp, Arabidopsis thaliana
cgctcctattggaccat

SEQ ID NO: 79999 - DNA, 17 bp, Arabidopsis thaliana
cgctcctcggagacggg

SEQ ID NO: 80000 - DNA, 17 bp, Arabidopsis thaliana
cgctcctgcatgcatag

SEQ ID NO: 80001 - DNA, 17 bp, Arabidopsis thaliana
cgctcctggcgttggtc

SEQ ID NO: 80002 - DNA, 17 bp, Arabidopsis thaliana
cgctcctggtcttaact

SEQ ID NO: 80003 - DNA, 17 bp, Arabidopsis thaliana
cgctcctggtcttaatt

SEQ ID NO: 80004 - DNA, 17 bp, Arabidopsis thaliana
cgctcctggtcttattg

SEQ ID NO: 80005 - DNA, 17 bp, Arabidopsis thaliana
cgctcctgtagatggat

SEQ ID NO: 80006 - DNA, 17 bp, Arabidopsis thaliana
cgctccttggggttgta

SEQ ID NO: 80007 - DNA, 17 bp, Arabidopsis thaliana
cgctcgaatctggtcct

SEQ ID NO: 80008 - DNA, 17 bp, Arabidopsis thaliana
cgctcgagcccgagttc

SEQ ID NO: 80009 - DNA, 17 bp, Arabidopsis thaliana
cgctcgatgataagttc

SEQ ID NO: 80010 - DNA, 17 bp, Arabidopsis thaliana
cgctcgatgatgagttc

SEQ ID NO: 80011 - DNA, 17 bp, Arabidopsis thaliana
cgctcgattcagatcgg

SEQ ID NO: 80012 - DNA, 17 bp, Arabidopsis thaliana
cgctcgcacagggcagc

SEQ ID NO: 80013 - DNA, 17 bp, Arabidopsis thaliana
cgctcgcaggttgggca

SEQ ID NO: 80014 - DNA, 17 bp, Arabidopsis thaliana
cgctcgcccgattgccg

SEQ ID NO: 80015 - DNA, 17 bp, Arabidopsis thaliana
cgctcgcgaagctaccg

SEQ ID NO: 80016 - DNA, 17 bp, Arabidopsis thaliana
cgctcgctactcctcag

SEQ ID NO: 80017 - DNA, 17 bp, Arabidopsis thaliana
cgctcgcttttgtcaag

SEQ ID NO: 80018 - DNA, 17 bp, Arabidopsis thaliana
cgctcggatctgctgct

SEQ ID NO: 80019 - DNA, 17 bp, Arabidopsis thaliana
cgctcggctcgtgaaaa

SEQ ID NO: 80020 - DNA, 17 bp, Arabidopsis thaliana
cgctcggcttgtccctt

SEQ ID NO: 80021 - DNA, 17 bp, Arabidopsis thaliana
cgctcggtcctgttaat

SEQ ID NO: 80022 - DNA, 17 bp, Arabidopsis thaliana
cgctcggtgatcggctt

SEQ ID NO: 80023 - DNA, 17 bp, Arabidopsis thaliana
cgctcggttgccaacgt

SEQ ID NO: 80024 - DNA, 17 bp, Arabidopsis thaliana
cgctcggtttgtccgtc

SEQ ID NO: 80025 - DNA, 17 bp, Arabidopsis thaliana
cgctctaacccggattt

SEQ ID NO: 80026 - DNA, 17 bp, Arabidopsis thaliana
cgctctacaaaccgctc

SEQ ID NO: 80027 - DNA, 17 bp, Arabidopsis thaliana
cgctctactcgaccctg

SEQ ID NO: 80028 - DNA, 17 bp, Arabidopsis thaliana
cgctctagcaccgggtc

SEQ ID NO: 80029 - DNA, 17 bp, Arabidopsis thaliana
cgctctagttggatgac

SEQ ID NO: 80030 - DNA, 17 bp, Arabidopsis thaliana
cgctctattgattcgac

SEQ ID NO: 80031 - DNA, 17 bp, Arabidopsis thaliana
cgctctcagattgtgtg

SEQ ID NO: 80032 - DNA, 17 bp, Arabidopsis thaliana
cgctctcagcagtagac

SEQ ID NO: 80033 - DNA, 17 bp, Arabidopsis thaliana
cgctctcagcagtggac

SEQ ID NO: 80034 - DNA, 17 bp, Arabidopsis thaliana
cgctctccggaactatc

SEQ ID NO: 80035 - DNA, 17 bp, Arabidopsis thaliana
cgctctcgcggatgggt

SEQ ID NO: 80036 - DNA, 17 bp, Arabidopsis thaliana
cgctctcggatcgtcac

SEQ ID NO: 80037 - DNA, 17 bp, Arabidopsis thaliana
cgctctctagccttctg

SEQ ID NO: 80038 - DNA, 17 bp, Arabidopsis thaliana
cgctctctttcaaactg

SEQ ID NO: 80039 - DNA, 17 bp, Arabidopsis thaliana
cgctctgacgaagatgg

SEQ ID NO: 80040 - DNA, 17 bp, Arabidopsis thaliana
cgctctgacgaagatgt

SEQ ID NO: 80041 - DNA, 17 bp, Arabidopsis thaliana
cgctctgagacttagtt

SEQ ID NO: 80042 - DNA, 17 bp, Arabidopsis thaliana
cgctctgagggctgggc

SEQ ID NO: 80043 - DNA, 17 bp, Arabidopsis thaliana
cgctctgatgatactcg

SEQ ID NO: 80044 - DNA, 17 bp, Arabidopsis thaliana
cgctctgatgatacttg

SEQ ID NO: 80045 - DNA, 17 bp, Arabidopsis thaliana
cgctctgcaagttgtgg

SEQ ID NO: 80046 - DNA, 17 bp, Arabidopsis thaliana
cgctctggatacattaa

SEQ ID NO: 80047 - DNA, 17 bp, Arabidopsis thaliana
cgctctggatacattag

SEQ ID NO: 80048 - DNA, 17 bp, Arabidopsis thaliana
cgctctggtgtcctagg

SEQ ID NO: 80049 - DNA, 17 bp, Arabidopsis thaliana
cgctctgttctttgcct

SEQ ID NO: 80050 - DNA, 17 bp, Arabidopsis thaliana
cgctctgttgctggtat

SEQ ID NO: 80051 - DNA, 17 bp, Arabidopsis thaliana
cgctctgttgttctttt

SEQ ID NO: 80052 - DNA, 17 bp, Arabidopsis thaliana
cgctctgtttatggtat

SEQ ID NO: 80053 - DNA, 17 bp, Arabidopsis thaliana
cgctcttcacaagacta

SEQ ID NO: 80054 - DNA, 17 bp, Arabidopsis thaliana
cgctcttcttcttcgat

SEQ ID NO: 80055 - DNA, 17 bp, Arabidopsis thaliana
cgctcttgcgaataagt

SEQ ID NO: 80056 - DNA, 17 bp, Arabidopsis thaliana
cgctcttgcgccgaaga

SEQ ID NO: 80057 - DNA, 17 bp, Arabidopsis thaliana
cgctcttgctcatcttc

SEQ ID NO: 80058 - DNA, 17 bp, Arabidopsis thaliana
cgctcttggatcgtcac

SEQ ID NO: 80059 - DNA, 17 bp, Arabidopsis thaliana
cgctcttggttaaagat

SEQ ID NO: 80060 - DNA, 17 bp, Arabidopsis thaliana
cgctcttgttccgcttg

SEQ ID NO: 80061 - DNA, 17 bp, Arabidopsis thaliana
cgctctttctgcgagtg

SEQ ID NO: 80062 - DNA, 17 bp, Arabidopsis thaliana
cgctctttgtgtgatat

SEQ ID NO: 80063 - DNA, 17 bp, Arabidopsis thaliana
cgctgaaaccagtaact

SEQ ID NO: 80064 - DNA, 17 bp, Arabidopsis thaliana
cgctgaaacccttcgta

SEQ ID NO: 80065 - DNA, 17 bp, Arabidopsis thaliana
cgctgaaactagcgact

SEQ ID NO: 80066 - DNA, 17 bp, Arabidopsis thaliana
cgctgaaattaagcagc

SEQ ID NO: 80067 - DNA, 17 bp, Arabidopsis thaliana
cgctgaaattttggcgg

SEQ ID NO: 80068 - DNA, 17 bp, Arabidopsis thaliana
cgctgaaccaatggtgt

SEQ ID NO: 80069 - DNA, 17 bp, Arabidopsis thaliana
cgctgaaccagcgacag

SEQ ID NO: 80070 - DNA, 17 bp, Arabidopsis thaliana
cgctgaaccttgggatg

SEQ ID NO: 80071 - DNA, 17 bp, Arabidopsis thaliana
cgctgaactagcgacag

SEQ ID NO: 80072 - DNA, 17 bp, Arabidopsis thaliana
cgctgaactgcttgacc

SEQ ID NO: 80073 - DNA, 17 bp, Arabidopsis thaliana
cgctgaatccagcgaca

SEQ ID NO: 80074 - DNA, 17 bp, Arabidopsis thaliana
cgctgaatctcagtgga

SEQ ID NO: 80075 - DNA, 17 bp, Arabidopsis thaliana
cgctgacagccgacggg

SEQ ID NO: 80076 - DNA, 17 bp, Arabidopsis thaliana
cgctgacggcatagccg

SEQ ID NO: 80077 - DNA, 17 bp, Arabidopsis thaliana
cgctgacgtggctgtat

SEQ ID NO: 80078 - DNA, 17 bp, Arabidopsis thaliana
cgctgacttgtgtacgt

SEQ ID NO: 80079 - DNA, 17 bp, Arabidopsis thaliana
cgctgagaagttgccag

SEQ ID NO: 80080 - DNA, 17 bp, Arabidopsis thaliana
cgctgagaatcgtctgg

SEQ ID NO: 80081 - DNA, 17 bp, Arabidopsis thaliana
cgctgagacaatcgctg

SEQ ID NO: 80082 - DNA, 17 bp, Arabidopsis thaliana
cgctgagacgaattctg

SEQ ID NO: 80083 - DNA, 17 bp, Arabidopsis thaliana
cgctgagactgatgttg

SEQ ID NO: 80084 - DNA, 17 bp, Arabidopsis thaliana
cgctgagacttgtcgca

SEQ ID NO: 80085 - DNA, 17 bp, Arabidopsis thaliana
cgctgagagattacggg

SEQ ID NO: 80086 - DNA, 17 bp, Arabidopsis thaliana
cgctgagatttcctggt

SEQ ID NO: 80087 - DNA, 17 bp, Arabidopsis thaliana
cgctgagcaacataagg

SEQ ID NO: 80088 - DNA, 17 bp, Arabidopsis thaliana
cgctgagccgcgaacga

SEQ ID NO: 80089 - DNA, 17 bp, Arabidopsis thaliana
cgctgagcgacgggcgg

SEQ ID NO: 80090 - DNA, 17 bp, Arabidopsis thaliana
cgctgagctcaggccga

SEQ ID NO: 80091 - DNA, 17 bp, Arabidopsis thaliana
cgctgatccagtcaatt

SEQ ID NO: 80092 - DNA, 17 bp, Arabidopsis thaliana
cgctgatcgctggcgac

SEQ ID NO: 80093 - DNA, 17 bp, Arabidopsis thaliana
cgctgatggtacttgga

SEQ ID NO: 80094 - DNA, 17 bp, Arabidopsis thaliana
cgctgattgtcttgcta

SEQ ID NO: 80095 - DNA, 17 bp, Arabidopsis thaliana
cgctgcaaaacctaggg

SEQ ID NO: 80096 - DNA, 17 bp, Arabidopsis thaliana
cgctgcaatatgtgcta

SEQ ID NO: 80097 - DNA, 17 bp, Arabidopsis thaliana
cgctgcactggctgtac

SEQ ID NO: 80098 - DNA, 17 bp, Arabidopsis thaliana
cgctgccaccccgatct

SEQ ID NO: 80099 - DNA, 17 bp, Arabidopsis thaliana
cgctgcccgattgccga

SEQ ID NO: 80100 - DNA, 17 bp, Arabidopsis thaliana
cgctgccctgaggatta

SEQ ID NO: 80101 - DNA, 17 bp, Arabidopsis thaliana
cgctgccctgatcgtgg

SEQ ID NO: 80102 - DNA, 17 bp, Arabidopsis thaliana
cgctgccgtatcgtggt

SEQ ID NO: 80103 - DNA, 17 bp, Arabidopsis thaliana
cgctgccgtgatcatgg

SEQ ID NO: 80104 - DNA, 17 bp, Arabidopsis thaliana
cgctgccgtgatcggcg

SEQ ID NO: 80105 - DNA, 17 bp, Arabidopsis thaliana
cgctgccgtgatcgggc

SEQ ID NO: 80106 - DNA, 17 bp, Arabidopsis thaliana
cgctgccgtgatcgtga

SEQ ID NO: 80107 - DNA, 17 bp, Arabidopsis thaliana
cgctgccgtgatcgtgg

SEQ ID NO: 80108 - DNA, 17 bp, Arabidopsis thaliana
cgctgccgtgatcgtgt

SEQ ID NO: 80109 - DNA, 17 bp, Arabidopsis thaliana
cgctgccgtgattgtgg

SEQ ID NO: 80110 - DNA, 17 bp, Arabidopsis thaliana
cgctgcgaatgtcggcc

SEQ ID NO: 80111 - DNA, 17 bp, Arabidopsis thaliana
cgctgcgacaagcaccg

SEQ ID NO: 80112 - DNA, 17 bp, Arabidopsis thaliana
cgctgcgacaagcccgc

SEQ ID NO: 80113 - DNA, 17 bp, Arabidopsis thaliana
cgctgcgactctttcat

SEQ ID NO: 80114 - DNA, 17 bp, Arabidopsis thaliana
cgctgcgatcggtcgct

SEQ ID NO: 80115 - DNA, 17 bp, Arabidopsis thaliana
cgctgcgcccgccgccc

SEQ ID NO: 80116 - DNA, 17 bp, Arabidopsis thaliana
cgctgcggaccatctgc

SEQ ID NO: 80117 - DNA, 17 bp, Arabidopsis thaliana
cgctgcggactaactgc

SEQ ID NO: 80118 - DNA, 17 bp, Arabidopsis thaliana
cgctgcggctccttggc

SEQ ID NO: 80119 - DNA, 17 bp, Arabidopsis thaliana
cgctgcggtattttcag

SEQ ID NO: 80120 - DNA, 17 bp, Arabidopsis thaliana
cgctgcggttgctgtcc

SEQ ID NO: 80121 - DNA, 17 bp, Arabidopsis thaliana
cgctgcgtttgcgggtg

SEQ ID NO: 80122 - DNA, 17 bp, Arabidopsis thaliana
cgctgctatgtggatgg

SEQ ID NO: 80123 - DNA, 17 bp, Arabidopsis thaliana
cgctgctcaagaggaaa

SEQ ID NO: 80124 - DNA, 17 bp, Arabidopsis thaliana
cgctgctcaaggggaaa

SEQ ID NO: 80125 - DNA, 17 bp, Arabidopsis thaliana
cgctgctcatcttcagc

SEQ ID NO: 80126 - DNA, 17 bp, Arabidopsis thaliana
cgctgctccggtcttat

SEQ ID NO: 80127 - DNA, 17 bp, Arabidopsis thaliana
cgctgctctgtgaaacc

SEQ ID NO: 80128 - DNA, 17 bp, Arabidopsis thaliana
cgctgctgaatcttcta

SEQ ID NO: 80129 - DNA, 17 bp, Arabidopsis thaliana
cgctgctgatgtttgat

SEQ ID NO: 80130 - DNA, 17 bp, Arabidopsis thaliana
cgctgcttgttcgccct

SEQ ID NO: 80131 - DNA, 17 bp, Arabidopsis thaliana
cgctgctttcggccctg

SEQ ID NO: 80132 - DNA, 17 bp, Arabidopsis thaliana
cgctgcttttgatcgct

SEQ ID NO: 80133 - DNA, 17 bp, Arabidopsis thaliana
cgctgcttttggtcgct

SEQ ID NO: 80134 - DNA, 17 bp, Arabidopsis thaliana
cgctggactcagcgacc

SEQ ID NO: 80135 - DNA, 17 bp, Arabidopsis thaliana
cgctggagagacaacca

SEQ ID NO: 80136 - DNA, 17 bp, Arabidopsis thaliana
cgctggagcagacctat

SEQ ID NO: 80137 - DNA, 17 bp, Arabidopsis thaliana
cgctggagtgtaacagg

SEQ ID NO: 80138 - DNA, 17 bp, Arabidopsis thaliana
cgctggatccagcgaca

SEQ ID NO: 80139 - DNA, 17 bp, Arabidopsis thaliana
cgctggattatgactga

SEQ ID NO: 80140 - DNA, 17 bp, Arabidopsis thaliana
cgctggattcagcgaca

SEQ ID NO: 80141 - DNA, 17 bp, Arabidopsis thaliana
cgctggatttggcgaag

SEQ ID NO: 80142 - DNA, 17 bp, Arabidopsis thaliana
cgctggctaagaggcca

SEQ ID NO: 80143 - DNA, 17 bp, Arabidopsis thaliana
cgctggctaatgtggag

SEQ ID NO: 80144 - DNA, 17 bp, Arabidopsis thaliana
cgctgggaagcccaaag

SEQ ID NO: 80145 - DNA, 17 bp, Arabidopsis thaliana
cgctgggatttctgtat

SEQ ID NO: 80146 - DNA, 17 bp, Arabidopsis thaliana
cgctggtacggacaagg

SEQ ID NO: 80147 - DNA, 17 bp, Arabidopsis thaliana
cgctggtccagctccat

SEQ ID NO: 80148 - DNA, 17 bp, Arabidopsis thaliana
cgctggtcccaattcgc

SEQ ID NO: 80149 - DNA, 17 bp, Arabidopsis thaliana
cgctggtccctggcgac

SEQ ID NO: 80150 - DNA, 17 bp, Arabidopsis thaliana
cgctggtcgaatcttcg

SEQ ID NO: 80151 - DNA, 17 bp, Arabidopsis thaliana
cgctggtcgctactttt

SEQ ID NO: 80152 - DNA, 17 bp, Arabidopsis thaliana
cgctggtcgctggtcgc

SEQ ID NO: 80153 - DNA, 17 bp, Arabidopsis thaliana
cgctggtcgctgtcgct

SEQ ID NO: 80154 - DNA, 17 bp, Arabidopsis thaliana
cgctggtcgctgttgct

SEQ ID NO: 80155 - DNA, 17 bp, Arabidopsis thaliana
cgctggtctgcagcacg

SEQ ID NO: 80156 - DNA, 17 bp, Arabidopsis thaliana
cgctggtggactcaggt

SEQ ID NO: 80157 - DNA, 17 bp, Arabidopsis thaliana
cgctggttacttccttt

SEQ ID NO: 80158 - DNA, 17 bp, Arabidopsis thaliana
cgctggttcaaatccag

SEQ ID NO: 80159 - DNA, 17 bp, Arabidopsis thaliana
cgctggttcgattccgg

SEQ ID NO: 80160 - DNA, 17 bp, Arabidopsis thaliana
cgctggttcgtttccgg

SEQ ID NO: 80161 - DNA, 17 bp, Arabidopsis thaliana
cgctggttctccggcag

SEQ ID NO: 80162 - DNA, 17 bp, Arabidopsis thaliana
cgctggttgctgtcgct

SEQ ID NO: 80163 - DNA, 17 bp, Arabidopsis thaliana
cgctggttgcttgatgt

SEQ ID NO: 80164 - DNA, 17 bp, Arabidopsis thaliana
cgctggtttccggcagg

SEQ ID NO: 80165 - DNA, 17 bp, Arabidopsis thaliana
cgctggtttgtccgctt

SEQ ID NO: 80166 - DNA, 17 bp, Arabidopsis thaliana
cgctggttttactaagc

SEQ ID NO: 80167 - DNA, 17 bp, Arabidopsis thaliana
cgctgtaaccattcaaa

SEQ ID NO: 80168 - DNA, 17 bp, Arabidopsis thaliana
cgctgtaattggtcgct

SEQ ID NO: 80169 - DNA, 17 bp, Arabidopsis thaliana
cgctgtaattggttgct

SEQ ID NO: 80170 - DNA, 17 bp, Arabidopsis thaliana
cgctgtacagatacggg

SEQ ID NO: 80171 - DNA, 17 bp, Arabidopsis thaliana
cgctgtacagatagggg

SEQ ID NO: 80172 - DNA, 17 bp, Arabidopsis thaliana
cgctgtacttgctttga

SEQ ID NO: 80173 - DNA, 17 bp, Arabidopsis thaliana
cgctgtagtctagctgg

SEQ ID NO: 80174 - DNA, 17 bp, Arabidopsis thaliana
cgctgtatcgcgttacg

SEQ ID NO: 80175 - DNA, 17 bp, Arabidopsis thaliana
cgctgtcacttggaccc

SEQ ID NO: 80176 - DNA, 17 bp, Arabidopsis thaliana
cgctgtcacttggatcc

SEQ ID NO: 80177 - DNA, 17 bp, Arabidopsis thaliana
cgctgtccacagagatc

SEQ ID NO: 80178 - DNA, 17 bp, Arabidopsis thaliana
cgctgtccacagaggtt

SEQ ID NO: 80179 - DNA, 17 bp, Arabidopsis thaliana
cgctgtccatatggtca

SEQ ID NO: 80180 - DNA, 17 bp, Arabidopsis thaliana
cgctgtccatcctgagt

SEQ ID NO: 80181 - DNA, 17 bp, Arabidopsis thaliana
cgctgtccatcttgagt

SEQ ID NO: 80182 - DNA, 17 bp, Arabidopsis thaliana
cgctgtccctgattcta

SEQ ID NO: 80183 - DNA, 17 bp, Arabidopsis thaliana
cgctgtcctacatgata

SEQ ID NO: 80184 - DNA, 17 bp, Arabidopsis thaliana
cgctgtccttcctggtg

SEQ ID NO: 80185 - DNA, 17 bp, Arabidopsis thaliana
cgctgtcggttctgagc

SEQ ID NO: 80186 - DNA, 17 bp, Arabidopsis thaliana
cgctgtctacgaatcgg

SEQ ID NO: 80187 - DNA, 17 bp, Arabidopsis thaliana
cgctgtctacgagacgg

SEQ ID NO: 80188 - DNA, 17 bp, Arabidopsis thaliana
cgctgtctacgagccgg

SEQ ID NO: 80189 - DNA, 17 bp, Arabidopsis thaliana
cgctgtctacgagtcag

SEQ ID NO: 80190 - DNA, 17 bp, Arabidopsis thaliana
cgctgtctacgagtcgg

SEQ ID NO: 80191 - DNA, 17 bp, Arabidopsis thaliana
cgctgtctccgacatgg

SEQ ID NO: 80192 - DNA, 17 bp, Arabidopsis thaliana
cgctgtcttcgtttgta

SEQ ID NO: 80193 - DNA, 17 bp, Arabidopsis thaliana
cgctgtgaagagtgttt

SEQ ID NO: 80194 - DNA, 17 bp, Arabidopsis thaliana
cgctgtgcattggtcgg

SEQ ID NO: 80195 - DNA, 17 bp, Arabidopsis thaliana
cgctgtgcgtatccacc

SEQ ID NO: 80196 - DNA, 17 bp, Arabidopsis thaliana
cgctgtgcgtatcgacc

SEQ ID NO: 80197 - DNA, 17 bp, Arabidopsis thaliana
cgctgtgcgtatcgccc

SEQ ID NO: 80198 - DNA, 17 bp, Arabidopsis thaliana
cgctgtgcgtatcggcc

SEQ ID NO: 80199 - DNA, 17 bp, Arabidopsis thaliana
cgctgtgctggctggac

SEQ ID NO: 80200 - DNA, 17 bp, Arabidopsis thaliana
cgctgtgttgttcgtgt

SEQ ID NO: 80201 - DNA, 17 bp, Arabidopsis thaliana
cgctgtgttgttcgttt

SEQ ID NO: 80202 - DNA, 17 bp, Arabidopsis thaliana
cgctgttatgagtttgc

SEQ ID NO: 80203 - DNA, 17 bp, Arabidopsis thaliana
cgctgttctgagactac

SEQ ID NO: 80204 - DNA, 17 bp, Arabidopsis thaliana
cgctgttggagatggat

SEQ ID NO: 80205 - DNA, 17 bp, Arabidopsis thaliana
cgctgtttcccattgga

SEQ ID NO: 80206 - DNA, 17 bp, Arabidopsis thaliana
cgctgtttcttaatgga

SEQ ID NO: 80207 - DNA, 17 bp, Arabidopsis thaliana
cgctgtttttcgtggcc

SEQ ID NO: 80208 - DNA, 17 bp, Arabidopsis thaliana
cgcttaacaggtgatcc

SEQ ID NO: 80209 - DNA, 17 bp, Arabidopsis thaliana
cgcttaactagcgacaa

SEQ ID NO: 80210 - DNA, 17 bp, Arabidopsis thaliana
cgcttaactgcggagtt

SEQ ID NO: 80211 - DNA, 17 bp, Arabidopsis thaliana
cgcttaacttgaagagg

SEQ ID NO: 80212 - DNA, 17 bp, Arabidopsis thaliana
cgcttaagtaacttttc

SEQ ID NO: 80213 - DNA, 17 bp, Arabidopsis thaliana
cgcttaatctgcacttg

SEQ ID NO: 80214 - DNA, 17 bp, Arabidopsis thaliana
cgcttaatgtccgcata

SEQ ID NO: 80215 - DNA, 17 bp, Arabidopsis thaliana
cgcttacaagatcgggt

SEQ ID NO: 80216 - DNA, 17 bp, Arabidopsis thaliana
cgcttacagcagtggac

SEQ ID NO: 80217 - DNA, 17 bp, Arabidopsis thaliana
cgcttacagggattctc

SEQ ID NO: 80218 - DNA, 17 bp, Arabidopsis thaliana
cgcttacggggtggagg

SEQ ID NO: 80219 - DNA, 17 bp, Arabidopsis thaliana
cgcttacgtaaatgcga

SEQ ID NO: 80220 - DNA, 17 bp, Arabidopsis thaliana
cgcttagagctgagcgt

SEQ ID NO: 80221 - DNA, 17 bp, Arabidopsis thaliana
cgcttagagtctgtgta

SEQ ID NO: 80222 - DNA, 17 bp, Arabidopsis thaliana
cgcttagatgtgccata

SEQ ID NO: 80223 - DNA, 17 bp, Arabidopsis thaliana
cgcttagcttcttgttc

SEQ ID NO: 80224 - DNA, 17 bp, Arabidopsis thaliana
cgcttaggctgactggc

SEQ ID NO: 80225 - DNA, 17 bp, Arabidopsis thaliana
cgcttaggctggctgaa

SEQ ID NO: 80226 - DNA, 17 bp, Arabidopsis thaliana
cgcttagggctttggat

SEQ ID NO: 80227 - DNA, 17 bp, Arabidopsis thaliana
cgcttaggtctcataat

SEQ ID NO: 80228 - DNA, 17 bp, Arabidopsis thaliana
cgcttagtccgtcttaa

SEQ ID NO: 80229 - DNA, 17 bp, Arabidopsis thaliana
cgcttatacgattgcga

SEQ ID NO: 80230 - DNA, 17 bp, Arabidopsis thaliana
cgcttatactttgggtt

SEQ ID NO: 80231 - DNA, 17 bp, Arabidopsis thaliana
cgcttatactttggttt

SEQ ID NO: 80232 - DNA, 17 bp, Arabidopsis thaliana
cgcttatccgcctcgaa

SEQ ID NO: 80233 - DNA, 17 bp, Arabidopsis thaliana
cgcttatggcggttctc

SEQ ID NO: 80234 - DNA, 17 bp, Arabidopsis thaliana
cgcttcaacgaccttct

SEQ ID NO: 80235 - DNA, 17 bp, Arabidopsis thaliana
cgcttcaacttcgcttg

SEQ ID NO: 80236 - DNA, 17 bp, Arabidopsis thaliana
cgcttcacaagactaga

SEQ ID NO: 80237 - DNA, 17 bp, Arabidopsis thaliana
cgcttcaccctgagttt

SEQ ID NO: 80238 - DNA, 17 bp, Arabidopsis thaliana
cgcttcagcccagaacc

SEQ ID NO: 80239 - DNA, 17 bp, Arabidopsis thaliana
cgcttcagtcatctctg

SEQ ID NO: 80240 - DNA, 17 bp, Arabidopsis thaliana
cgcttcataatatgctt

SEQ ID NO: 80241 - DNA, 17 bp, Arabidopsis thaliana
cgcttcatcctgagttt

SEQ ID NO: 80242 - DNA, 17 bp, Arabidopsis thaliana
cgcttccaattgaaccg

SEQ ID NO: 80243 - DNA, 17 bp, Arabidopsis thaliana
cgcttccaccacatcag

SEQ ID NO: 80244 - DNA, 17 bp, Arabidopsis thaliana
cgcttccctggccactt

SEQ ID NO: 80245 - DNA, 17 bp, Arabidopsis thaliana
cgcttccgaggaggcgg

SEQ ID NO: 80246 - DNA, 17 bp, Arabidopsis thaliana
cgcttccgccgaacgga

SEQ ID NO: 80247 - DNA, 17 bp, Arabidopsis thaliana
cgcttcctgtagatgga

SEQ ID NO: 80248 - DNA, 17 bp, Arabidopsis thaliana
cgcttcgattggaccat

SEQ ID NO: 80249 - DNA, 17 bp, Arabidopsis thaliana
cgcttcgccgccgtcac

SEQ ID NO: 80250 - DNA, 17 bp, Arabidopsis thaliana
cgcttcgcgtgcgagag

SEQ ID NO: 80251 - DNA, 17 bp, Arabidopsis thaliana
cgcttcggcgggtcgat

SEQ ID NO: 80252 - DNA, 17 bp, Arabidopsis thaliana
cgcttcgggacctggcg

SEQ ID NO: 80253 - DNA, 17 bp, Arabidopsis thaliana
cgcttcgggagcgctgc

SEQ ID NO: 80254 - DNA, 17 bp, Arabidopsis thaliana
cgcttcggtgcgagagg

SEQ ID NO: 80255 - DNA, 17 bp, Arabidopsis thaliana
cgcttcgtcagaaccac

SEQ ID NO: 80256 - DNA, 17 bp, Arabidopsis thaliana
cgcttcgtgcccagacc

SEQ ID NO: 80257 - DNA, 17 bp, Arabidopsis thaliana
cgcttcgtgcttaggcc

SEQ ID NO: 80258 - DNA, 17 bp, Arabidopsis thaliana
cgcttcgtgtcccaccg

SEQ ID NO: 80259 - DNA, 17 bp, Arabidopsis thaliana
cgcttctaagcaagttt

SEQ ID NO: 80260 - DNA, 17 bp, Arabidopsis thaliana
cgcttctacgaatagct

SEQ ID NO: 80261 - DNA, 17 bp, Arabidopsis thaliana
cgcttctagccagtctg

SEQ ID NO: 80262 - DNA, 17 bp, Arabidopsis thaliana
cgcttctagcccggatt

SEQ ID NO: 80263 - DNA, 17 bp, Arabidopsis thaliana
cgcttctagtggtgtgg

SEQ ID NO: 80264 - DNA, 17 bp, Arabidopsis thaliana
cgcttctccttccctgg

SEQ ID NO: 80265 - DNA, 17 bp, Arabidopsis thaliana
cgcttctcttctacctt

SEQ ID NO: 80266 - DNA, 17 bp, Arabidopsis thaliana
cgcttctgatacttgat

SEQ ID NO: 80267 - DNA, 17 bp, Arabidopsis thaliana
cgcttctgccttggatg

SEQ ID NO: 80268 - DNA, 17 bp, Arabidopsis thaliana
cgcttctgccttggttg

SEQ ID NO: 80269 - DNA, 17 bp, Arabidopsis thaliana
cgcttctgctatgtatt

SEQ ID NO: 80270 - DNA, 17 bp, Arabidopsis thaliana
cgcttctgtaactggat

SEQ ID NO: 80271 - DNA, 17 bp, Arabidopsis thaliana
cgcttctgtgttttctc

SEQ ID NO: 80272 - DNA, 17 bp, Arabidopsis thaliana
cgcttcttcactgagtt

SEQ ID NO: 80273 - DNA, 17 bp, Arabidopsis thaliana
cgcttcttcttgatttc

SEQ ID NO: 80274 - DNA, 17 bp, Arabidopsis thaliana
cgcttcttcttttcgcg

SEQ ID NO: 80275 - DNA, 17 bp, Arabidopsis thaliana
cgcttcttgatcgacgg

SEQ ID NO: 80276 - DNA, 17 bp, Arabidopsis thaliana
cgcttcttgcaaattcg

SEQ ID NO: 80277 - DNA, 17 bp, Arabidopsis thaliana
cgcttctttggccctgc

SEQ ID NO: 80278 - DNA, 17 bp, Arabidopsis thaliana
cgcttctttgtctgcac

SEQ ID NO: 80279 - DNA, 17 bp, Arabidopsis thaliana
cgcttcttttggctaac

SEQ ID NO: 80280 - DNA, 17 bp, Arabidopsis thaliana
cgcttctttttccccaa

SEQ ID NO: 80281 - DNA, 17 bp, Arabidopsis thaliana
cgcttgaaattccagtg

SEQ ID NO: 80282 - DNA, 17 bp, Arabidopsis thaliana
cgcttgaccctctgccc

SEQ ID NO: 80283 - DNA, 17 bp, Arabidopsis thaliana
cgcttgaccctctgtcc

SEQ ID NO: 80284 - DNA, 17 bp, Arabidopsis thaliana
cgcttgactaatgacat

SEQ ID NO: 80285 - DNA, 17 bp, Arabidopsis thaliana
cgcttgactctagtccg

SEQ ID NO: 80286 - DNA, 17 bp, Arabidopsis thaliana
cgcttgagagacaacct

SEQ ID NO: 80287 - DNA, 17 bp, Arabidopsis thaliana
cgcttgagaggatgtac

SEQ ID NO: 80288 - DNA, 17 bp, Arabidopsis thaliana
cgcttgaggatatgttg

SEQ ID NO: 80289 - DNA, 17 bp, Arabidopsis thaliana
cgcttgatcatgttctc

SEQ ID NO: 80290 - DNA, 17 bp, Arabidopsis thaliana
cgcttgatccacagttg

SEQ ID NO: 80291 - DNA, 17 bp, Arabidopsis thaliana
cgcttgatccactctac

SEQ ID NO: 80292 - DNA, 17 bp, Arabidopsis thaliana
cgcttgatccgcactct

SEQ ID NO: 80293 - DNA, 17 bp, Arabidopsis thaliana
cgcttgatccgcttgat

SEQ ID NO: 80294 - DNA, 17 bp, Arabidopsis thaliana
cgcttgatccgctttac

SEQ ID NO: 80295 - DNA, 17 bp, Arabidopsis thaliana
cgcttgatctgctctac

SEQ ID NO: 80296 - DNA, 17 bp, Arabidopsis thaliana
cgcttgatctgcttaat

SEQ ID NO: 80297 - DNA, 17 bp, Arabidopsis thaliana
cgcttgatggacacctt

SEQ ID NO: 80298 - DNA, 17 bp, Arabidopsis thaliana
cgcttgatggacatttt

SEQ ID NO: 80299 - DNA, 17 bp, Arabidopsis thaliana
cgcttgcagagagaaat

SEQ ID NO: 80300 - DNA, 17 bp, Arabidopsis thaliana
cgcttgccaggattcta

SEQ ID NO: 80301 - DNA, 17 bp, Arabidopsis thaliana
cgcttgccgcccgattg

SEQ ID NO: 80302 - DNA, 17 bp, Arabidopsis thaliana
cgcttgcgggaatgagc

SEQ ID NO: 80303 - DNA, 17 bp, Arabidopsis thaliana
cgcttgctacttggtga

SEQ ID NO: 80304 - DNA, 17 bp, Arabidopsis thaliana
cgcttgcttcatcaact

SEQ ID NO: 80305 - DNA, 17 bp, Arabidopsis thaliana
cgcttgggagtccctga

SEQ ID NO: 80306 - DNA, 17 bp, Arabidopsis thaliana
cgcttggggtgcgagtg

SEQ ID NO: 80307 - DNA, 17 bp, Arabidopsis thaliana
cgcttgggttccggggg

SEQ ID NO: 80308 - DNA, 17 bp, Arabidopsis thaliana
cgcttgggttgcgagag

SEQ ID NO: 80309 - DNA, 17 bp, Arabidopsis thaliana
cgcttgggtttgaactt

SEQ ID NO: 80310 - DNA, 17 bp, Arabidopsis thaliana
cgcttggtaggtcggga

SEQ ID NO: 80311 - DNA, 17 bp, Arabidopsis thaliana
cgcttggtccattacat

SEQ ID NO: 80312 - DNA, 17 bp, Arabidopsis thaliana
cgcttggtgcaggtcgg

SEQ ID NO: 80313 - DNA, 17 bp, Arabidopsis thaliana
cgcttggtgcaggtcgt

SEQ ID NO: 80314 - DNA, 17 bp, Arabidopsis thaliana
cgcttggttgaaaagcc

SEQ ID NO: 80315 - DNA, 17 bp, Arabidopsis thaliana
cgcttgtaaagctcttt

SEQ ID NO: 80316 - DNA, 17 bp, Arabidopsis thaliana
cgcttgtgccatgactt

SEQ ID NO: 80317 - DNA, 17 bp, Arabidopsis thaliana
cgcttgtgctatggctt

SEQ ID NO: 80318 - DNA, 17 bp, Arabidopsis thaliana
cgcttgtggagacatcg

SEQ ID NO: 80319 - DNA, 17 bp, Arabidopsis thaliana
cgcttgtggagacgtca

SEQ ID NO: 80320 - DNA, 17 bp, Arabidopsis thaliana
cgcttgtggagacgtcg

SEQ ID NO: 80321 - DNA, 17 bp, Arabidopsis thaliana
cgcttgttaaacaaatg

SEQ ID NO: 80322 - DNA, 17 bp, Arabidopsis thaliana
cgcttgttaccgggcag

SEQ ID NO: 80323 - DNA, 17 bp, Arabidopsis thaliana
cgctttaacatttgcac

SEQ ID NO: 80324 - DNA, 17 bp, Arabidopsis thaliana
cgctttagccgagtggt

SEQ ID NO: 80325 - DNA, 17 bp, Arabidopsis thaliana
cgctttatctgctttat

SEQ ID NO: 80326 - DNA, 17 bp, Arabidopsis thaliana
cgctttatggtgtagcc

SEQ ID NO: 80327 - DNA, 17 bp, Arabidopsis thaliana
cgctttcaacttcggac

SEQ ID NO: 80328 - DNA, 17 bp, Arabidopsis thaliana
cgctttcaagcaccggt

SEQ ID NO: 80329 - DNA, 17 bp, Arabidopsis thaliana
cgctttcaatcaccgat

SEQ ID NO: 80330 - DNA, 17 bp, Arabidopsis thaliana
cgctttcccttatctct

SEQ ID NO: 80331 - DNA, 17 bp, Arabidopsis thaliana
cgctttccgagatgtta

SEQ ID NO: 80332 - DNA, 17 bp, Arabidopsis thaliana
cgctttcggttctctgg

SEQ ID NO: 80333 - DNA, 17 bp, Arabidopsis thaliana
cgctttctccattcaga

SEQ ID NO: 80334 - DNA, 17 bp, Arabidopsis thaliana
cgctttctccattcgga

SEQ ID NO: 80335 - DNA, 17 bp, Arabidopsis thaliana
cgctttctctattcgga

SEQ ID NO: 80336 - DNA, 17 bp, Arabidopsis thaliana
cgctttgaaaactgtga

SEQ ID NO: 80337 - DNA, 17 bp, Arabidopsis thaliana
cgctttgaccactctgt

SEQ ID NO: 80338 - DNA, 17 bp, Arabidopsis thaliana
cgctttgaccagttgac

SEQ ID NO: 80339 - DNA, 17 bp, Arabidopsis thaliana
cgctttgaccgggtcaa

SEQ ID NO: 80340 - DNA, 17 bp, Arabidopsis thaliana
cgctttgagtccagttt

SEQ ID NO: 80341 - DNA, 17 bp, Arabidopsis thaliana
cgctttgccaaggatgt

SEQ ID NO: 80342 - DNA, 17 bp, Arabidopsis thaliana
cgctttgcgcttttccg

SEQ ID NO: 80343 - DNA, 17 bp, Arabidopsis thaliana
cgctttggaagtgatct

SEQ ID NO: 80344 - DNA, 17 bp, Arabidopsis thaliana
cgctttggaccgcttga

SEQ ID NO: 80345 - DNA, 17 bp, Arabidopsis thaliana
cgctttggaccgcttta

SEQ ID NO: 80346 - DNA, 17 bp, Arabidopsis thaliana
cgctttggcattccatc

SEQ ID NO: 80347 - DNA, 17 bp, Arabidopsis thaliana
cgctttggccgagtggt

SEQ ID NO: 80348 - DNA, 17 bp, Arabidopsis thaliana
cgctttggctgcgagag

SEQ ID NO: 80349 - DNA, 17 bp, Arabidopsis thaliana
cgctttgggaattgtga

SEQ ID NO: 80350 - DNA, 17 bp, Arabidopsis thaliana
cgctttgggtgcgagag

SEQ ID NO: 80351 - DNA, 17 bp, Arabidopsis thaliana
cgctttggtgcgagagg

SEQ ID NO: 80352 - DNA, 17 bp, Arabidopsis thaliana
cgctttgtattcttgct

SEQ ID NO: 80353 - DNA, 17 bp, Arabidopsis thaliana
cgctttgtccgttacat

SEQ ID NO: 80354 - DNA, 17 bp, Arabidopsis thaliana
cgctttgtgtcttctaa

SEQ ID NO: 80355 - DNA, 17 bp, Arabidopsis thaliana
cgctttgtttaggattg

SEQ ID NO: 80356 - DNA, 17 bp, Arabidopsis thaliana
cgcttttaagatccggt

SEQ ID NO: 80357 - DNA, 17 bp, Arabidopsis thaliana
cgcttttaagatcgggt

SEQ ID NO: 80358 - DNA, 17 bp, Arabidopsis thaliana
cgcttttaccagtgggt

SEQ ID NO: 80359 - DNA, 17 bp, Arabidopsis thaliana
cgcttttactgcaactt

SEQ ID NO: 80360 - DNA, 17 bp, Arabidopsis thaliana
cgcttttagctgtttgc

SEQ ID NO: 80361 - DNA, 17 bp, Arabidopsis thaliana
cgcttttcagatcgggt

SEQ ID NO: 80362 - DNA, 17 bp, Arabidopsis thaliana
cgcttttgatacgcttg

SEQ ID NO: 80363 - DNA, 17 bp, Arabidopsis thaliana
cgcttttgcaggtcggt

SEQ ID NO: 80364 - DNA, 17 bp, Arabidopsis thaliana
cgcttttgctttgtttc

SEQ ID NO: 80365 - DNA, 17 bp, Arabidopsis thaliana
cgcttttgtaatccgga

SEQ ID NO: 80366 - DNA, 17 bp, Arabidopsis thaliana
cgcttttgtccagcttg

SEQ ID NO: 80367 - DNA, 17 bp, Arabidopsis thaliana
cgctttttagcgaggat

SEQ ID NO: 80368 - DNA, 17 bp, Arabidopsis thaliana
cgctttttgacaaatcc

SEQ ID NO: 80369 - DNA, 17 bp, Arabidopsis thaliana
cggaaaaaatcgaataa

SEQ ID NO: 80370 - DNA, 17 bp, Arabidopsis thaliana
cggaaaaacggtctatt

SEQ ID NO: 80371 - DNA, 17 bp, Arabidopsis thaliana
cggaaaaagtgcagtgc

SEQ ID NO: 80372 - DNA, 17 bp, Arabidopsis thaliana
cggaaaaatagctcgac

SEQ ID NO: 80373 - DNA, 17 bp, Arabidopsis thaliana
cggaaaaattttggcgg

SEQ ID NO: 80374 - DNA, 17 bp, Arabidopsis thaliana
cggaaaacattccaaac

SEQ ID NO: 80375 - DNA, 17 bp, Arabidopsis thaliana
cggaaaaccgacgccgc

SEQ ID NO: 80376 - DNA, 17 bp, Arabidopsis thaliana
cggaaaacttgattcaa

SEQ ID NO: 80377 - DNA, 17 bp, Arabidopsis thaliana
cggaaaagccgggactg

SEQ ID NO: 80378 - DNA, 17 bp, Arabidopsis thaliana
cggaaaatgtgtgattg

SEQ ID NO: 80379 - DNA, 17 bp, Arabidopsis thaliana
cggaaaatttaccatgc

SEQ ID NO: 80380 - DNA, 17 bp, Arabidopsis thaliana
cggaaactaattcgtgt

SEQ ID NO: 80381 - DNA, 17 bp, Arabidopsis thaliana
cggaaacttaatgacgt

SEQ ID NO: 80382 - DNA, 17 bp, Arabidopsis thaliana
cggaaactttgctgctt

SEQ ID NO: 80383 - DNA, 17 bp, Arabidopsis thaliana
cggaaagcattccaaac

SEQ ID NO: 80384 - DNA, 17 bp, Arabidopsis thaliana
cggaaagcattccaatc

SEQ ID NO: 80385 - DNA, 17 bp, Arabidopsis thaliana
cggaaagcccaaagaaa

SEQ ID NO: 80386 - DNA, 17 bp, Arabidopsis thaliana
cggaaagcccaaagaca

SEQ ID NO: 80387 - DNA, 17 bp, Arabidopsis thaliana
cggaaagcccaaagaga

SEQ ID NO: 80388 - DNA, 17 bp, Arabidopsis thaliana
cggaaagcccaaagata

SEQ ID NO: 80389 - DNA, 17 bp, Arabidopsis thaliana
cggaaagcccaaaggaa

SEQ ID NO: 80390 - DNA, 17 bp, Arabidopsis thaliana
cggaaagcccaaaggca

SEQ ID NO: 80391 - DNA, 17 bp, Arabidopsis thaliana
cggaaagcccaaaggta

SEQ ID NO: 80392 - DNA, 17 bp, Arabidopsis thaliana
cggaaagcccaaagtca

SEQ ID NO: 80393 - DNA, 17 bp, Arabidopsis thaliana
cggaaaggaatttgttt

SEQ ID NO: 80394 - DNA, 17 bp, Arabidopsis thaliana
cggaaagtcctcgtgtt

SEQ ID NO: 80395 - DNA, 17 bp, Arabidopsis thaliana
cggaaagtcttgattcg

SEQ ID NO: 80396 - DNA, 17 bp, Arabidopsis thaliana
cggaaagtttataggct

SEQ ID NO: 80397 - DNA, 17 bp, Arabidopsis thaliana
cggaaatatcttcgaca

SEQ ID NO: 80398 - DNA, 17 bp, Arabidopsis thaliana
cggaaatcaactcgatc

SEQ ID NO: 80399 - DNA, 17 bp, Arabidopsis thaliana
cggaaatccgctttgct

SEQ ID NO: 80400 - DNA, 17 bp, Arabidopsis thaliana
cggaaatctgtctgaaa

SEQ ID NO: 80401 - DNA, 17 bp, Arabidopsis thaliana
cggaaatgatcgtcgga

SEQ ID NO: 80402 - DNA, 17 bp, Arabidopsis thaliana
cggaaatggaggaagcg

SEQ ID NO: 80403 - DNA, 17 bp, Arabidopsis thaliana
cggaaatgtagatatgg

SEQ ID NO: 80404 - DNA, 17 bp, Arabidopsis thaliana
cggaaatgttgtgcgac

SEQ ID NO: 80405 - DNA, 17 bp, Arabidopsis thaliana
cggaaattacgactttg

SEQ ID NO: 80406 - DNA, 17 bp, Arabidopsis thaliana
cggaaattacggctttg

SEQ ID NO: 80407 - DNA, 17 bp, Arabidopsis thaliana
cggaaattgtgccggct

SEQ ID NO: 80408 - DNA, 17 bp, Arabidopsis thaliana
cggaaatttgcgtgatt

SEQ ID NO: 80409 - DNA, 17 bp, Arabidopsis thaliana
cggaaatttgtgtggtt

SEQ ID NO: 80410 - DNA, 17 bp, Arabidopsis thaliana
cggaacaagcggattag

SEQ ID NO: 80411 - DNA, 17 bp, Arabidopsis thaliana
cggaacaagtgcagttt

SEQ ID NO: 80412 - DNA, 17 bp, Arabidopsis thaliana
cggaacagacagtgcgg

SEQ ID NO: 80413 - DNA, 17 bp, Arabidopsis thaliana
cggaacagcgtcgagtg

SEQ ID NO: 80414 - DNA, 17 bp, Arabidopsis thaliana
cggaacccatttggtct

SEQ ID NO: 80415 - DNA, 17 bp, Arabidopsis thaliana
cggaaccggatcttaga

SEQ ID NO: 80416 - DNA, 17 bp, Arabidopsis thaliana
cggaacctggctctgat

SEQ ID NO: 80417 - DNA, 17 bp, Arabidopsis thaliana
cggaacgaaacagctga

SEQ ID NO: 80418 - DNA, 17 bp, Arabidopsis thaliana
cggaacgcgaccggtta

SEQ ID NO: 80419 - DNA, 17 bp, Arabidopsis thaliana
cggaacggattggcggg

SEQ ID NO: 80420 - DNA, 17 bp, Arabidopsis thaliana
cggaacgggtttggcag

SEQ ID NO: 80421 - DNA, 17 bp, Arabidopsis thaliana
cggaacttcgaatctag

SEQ ID NO: 80422 - DNA, 17 bp, Arabidopsis thaliana
cggaagatccgcaccga

SEQ ID NO: 80423 - DNA, 17 bp, Arabidopsis thaliana
cggaagatctgcagggt

SEQ ID NO: 80424 - DNA, 17 bp, Arabidopsis thaliana
cggaagattcgggggcg

SEQ ID NO: 80425 - DNA, 17 bp, Arabidopsis thaliana
cggaagattggctatgt

SEQ ID NO: 80426 - DNA, 17 bp, Arabidopsis thaliana
cggaagcacggacaatg

SEQ ID NO: 80427 - DNA, 17 bp, Arabidopsis thaliana
cggaagcgtcgttcgga

SEQ ID NO: 80428 - DNA, 17 bp, Arabidopsis thaliana
cggaagggcaccaccag

SEQ ID NO: 80429 - DNA, 17 bp, Arabidopsis thaliana
cggaagggtgctatgct

SEQ ID NO: 80430 - DNA, 17 bp, Arabidopsis thaliana
cggaaggtcacccatct

SEQ ID NO: 80431 - DNA, 17 bp, Arabidopsis thaliana
cggaagtttgcggaaac

SEQ ID NO: 80432 - DNA, 17 bp, Arabidopsis thaliana
cggaatacggaccagga

SEQ ID NO: 80433 - DNA, 17 bp, Arabidopsis thaliana
cggaatagcgcgggtga

SEQ ID NO: 80434 - DNA, 17 bp, Arabidopsis thaliana
cggaatatcaggaggtt

SEQ ID NO: 80435 - DNA, 17 bp, Arabidopsis thaliana
cggaatcatctacaaac

SEQ ID NO: 80436 - DNA, 17 bp, Arabidopsis thaliana
cggaatcgggcaacgag

SEQ ID NO: 80437 - DNA, 17 bp, Arabidopsis thaliana
cggaatcggtgtttctt

SEQ ID NO: 80438 - DNA, 17 bp, Arabidopsis thaliana
cggaatctcagttgcac

SEQ ID NO: 80439 - DNA, 17 bp, Arabidopsis thaliana
cggaatctccaggtcac

SEQ ID NO: 80440 - DNA, 17 bp, Arabidopsis thaliana
cggaatctccgggtcac

SEQ ID NO: 80441 - DNA, 17 bp, Arabidopsis thaliana
cggaatctttgcgatgt

SEQ ID NO: 80442 - DNA, 17 bp, Arabidopsis thaliana
cggaatcttttcgtgtc

SEQ ID NO: 80443 - DNA, 17 bp, Arabidopsis thaliana
cggaatggaggcagttg

SEQ ID NO: 80444 - DNA, 17 bp, Arabidopsis thaliana
cggaatggagtacggaa

SEQ ID NO: 80445 - DNA, 17 bp, Arabidopsis thaliana
cggaattcaggatgtgg

SEQ ID NO: 80446 - DNA, 17 bp, Arabidopsis thaliana
cggaatttccactgcag

SEQ ID NO: 80447 - DNA, 17 bp, Arabidopsis thaliana
cggaatttgtctgttag

SEQ ID NO: 80448 - DNA, 17 bp, Arabidopsis thaliana
cggaatttgtctgttgg

SEQ ID NO: 80449 - DNA, 17 bp, Arabidopsis thaliana
cggaatttttgacgatg

SEQ ID NO: 80450 - DNA, 17 bp, Arabidopsis thaliana
cggacaaaccgtctata

SEQ ID NO: 80451 - DNA, 17 bp, Arabidopsis thaliana
cggacaaactagttcac

SEQ ID NO: 80452 - DNA, 17 bp, Arabidopsis thaliana
cggacaaagcggtctaa

SEQ ID NO: 80453 - DNA, 17 bp, Arabidopsis thaliana
cggacaaagggacaatc

SEQ ID NO: 80454 - DNA, 17 bp, Arabidopsis thaliana
cggacaacaacacagct

SEQ ID NO: 80455 - DNA, 17 bp, Arabidopsis thaliana
cggacaacaagccattc

SEQ ID NO: 80456 - DNA, 17 bp, Arabidopsis thaliana
cggacaacggattggtt

SEQ ID NO: 80457 - DNA, 17 bp, Arabidopsis thaliana
cggacaagaatcctgga

SEQ ID NO: 80458 - DNA, 17 bp, Arabidopsis thaliana
cggacaagatctcgagg

SEQ ID NO: 80459 - DNA, 17 bp, Arabidopsis thaliana
cggacaagatctcgatg

SEQ ID NO: 80460 - DNA, 17 bp, Arabidopsis thaliana
cggacaagccacgggcg

SEQ ID NO: 80461 - DNA, 17 bp, Arabidopsis thaliana
cggacaaggggaatcca

SEQ ID NO: 80462 - DNA, 17 bp, Arabidopsis thaliana
cggacaaggggaatccg

SEQ ID NO: 80463 - DNA, 17 bp, Arabidopsis thaliana
cggacaataaaccgctc

SEQ ID NO: 80464 - DNA, 17 bp, Arabidopsis thaliana
cggacaataaactgctg

SEQ ID NO: 80465 - DNA, 17 bp, Arabidopsis thaliana
cggacaatcatttgtga

SEQ ID NO: 80466 - DNA, 17 bp, Arabidopsis thaliana
cggacacaaccgtcaat

SEQ ID NO: 80467 - DNA, 17 bp, Arabidopsis thaliana
cggacacaggtactggt

SEQ ID NO: 80468 - DNA, 17 bp, Arabidopsis thaliana
cggacacaggtcgtcca

SEQ ID NO: 80469 - DNA, 17 bp, Arabidopsis thaliana
cggacacaggtggagca

SEQ ID NO: 80470 - DNA, 17 bp, Arabidopsis thaliana
cggacacaggtggtgca

SEQ ID NO: 80471 - DNA, 17 bp, Arabidopsis thaliana
cggacacaggttgtgca

SEQ ID NO: 80472 - DNA, 17 bp, Arabidopsis thaliana
cggacaccacgcgacgt

SEQ ID NO: 80473 - DNA, 17 bp, Arabidopsis thaliana
cggacaccttcaatatc

SEQ ID NO: 80474 - DNA, 17 bp, Arabidopsis thaliana
cggacacgggttcgagc

SEQ ID NO: 80475 - DNA, 17 bp, Arabidopsis thaliana
cggacactcttctccgg

SEQ ID NO: 80476 - DNA, 17 bp, Arabidopsis thaliana
cggacactggagaggca

SEQ ID NO: 80477 - DNA, 17 bp, Arabidopsis thaliana
cggacagaatcagtcgg

SEQ ID NO: 80478 - DNA, 17 bp, Arabidopsis thaliana
cggacagagtggtcaaa

SEQ ID NO: 80479 - DNA, 17 bp, Arabidopsis thaliana
cggacagctaaaggcat

SEQ ID NO: 80480 - DNA, 17 bp, Arabidopsis thaliana
cggacaggcaatgtatc

SEQ ID NO: 80481 - DNA, 17 bp, Arabidopsis thaliana
cggacagtcggctcact

SEQ ID NO: 80482 - DNA, 17 bp, Arabidopsis thaliana
cggacatcatcgctata

SEQ ID NO: 80483 - DNA, 17 bp, Arabidopsis thaliana
cggacatccggccgtcc

SEQ ID NO: 80484 - DNA, 17 bp, Arabidopsis thaliana
cggacatgaatttttgg

SEQ ID NO: 80485 - DNA, 17 bp, Arabidopsis thaliana
cggacatgagcaaagcg

SEQ ID NO: 80486 - DNA, 17 bp, Arabidopsis thaliana
cggacatgccgtgaaat

SEQ ID NO: 80487 - DNA, 17 bp, Arabidopsis thaliana
cggacattaggtttatt

SEQ ID NO: 80488 - DNA, 17 bp, Arabidopsis thaliana
cggacattgacgaagaa

SEQ ID NO: 80489 - DNA, 17 bp, Arabidopsis thaliana
cggacattttcgtgatt

SEQ ID NO: 80490 - DNA, 17 bp, Arabidopsis thaliana
cggaccaaatatgacgg

SEQ ID NO: 80491 - DNA, 17 bp, Arabidopsis thaliana
cggaccaaatgttacgg

SEQ ID NO: 80492 - DNA, 17 bp, Arabidopsis thaliana
cggaccaagtttatttg

SEQ ID NO: 80493 - DNA, 17 bp, Arabidopsis thaliana
cggaccaattaactcgt

SEQ ID NO: 80494 - DNA, 17 bp, Arabidopsis thaliana
cggaccaccttctttct

SEQ ID NO: 80495 - DNA, 17 bp, Arabidopsis thaliana
cggaccaggcttcatca

SEQ ID NO: 80496 - DNA, 17 bp, Arabidopsis thaliana
cggaccaggcttcatcc

SEQ ID NO: 80497 - DNA, 17 bp, Arabidopsis thaliana
cggaccaggcttcattc

SEQ ID NO: 80498 - DNA, 17 bp, Arabidopsis thaliana
cggaccaggcttcattt

SEQ ID NO: 80499 - DNA, 17 bp, Arabidopsis thaliana
cggaccagggttcattc

SEQ ID NO: 80500 - DNA, 17 bp, Arabidopsis thaliana
cggaccatctgcagacc

SEQ ID NO: 80501 - DNA, 17 bp, Arabidopsis thaliana
cggaccatctgccgacc

SEQ ID NO: 80502 - DNA, 17 bp, Arabidopsis thaliana
cggaccatctgcggact

SEQ ID NO: 80503 - DNA, 17 bp, Arabidopsis thaliana
cggaccatgcttcattc

SEQ ID NO: 80504 - DNA, 17 bp, Arabidopsis thaliana
cggaccatttgacagcc

SEQ ID NO: 80505 - DNA, 17 bp, Arabidopsis thaliana
cggacccaaaattactt

SEQ ID NO: 80506 - DNA, 17 bp, Arabidopsis thaliana
cggacccgaaagatggt

SEQ ID NO: 80507 - DNA, 17 bp, Arabidopsis thaliana
cggacccgggcgaagcc

SEQ ID NO: 80508 - DNA, 17 bp, Arabidopsis thaliana
cggacccggtcgacgat

SEQ ID NO: 80509 - DNA, 17 bp, Arabidopsis thaliana
cggacccggtgaaccag

SEQ ID NO: 80510 - DNA, 17 bp, Arabidopsis thaliana
cggacccgtcggccaac

SEQ ID NO: 80511 - DNA, 17 bp, Arabidopsis thaliana
cggaccctgtcgcacca

SEQ ID NO: 80512 - DNA, 17 bp, Arabidopsis thaliana
cggaccgacgcggatta

SEQ ID NO: 80513 - DNA, 17 bp, Arabidopsis thaliana
cggaccgagtgccgctc

SEQ ID NO: 80514 - DNA, 17 bp, Arabidopsis thaliana
cggaccgccttgaatta

SEQ ID NO: 80515 - DNA, 17 bp, Arabidopsis thaliana
cggaccggcagagacac

SEQ ID NO: 80516 - DNA, 17 bp, Arabidopsis thaliana
cggaccggccgacccac

SEQ ID NO: 80517 - DNA, 17 bp, Arabidopsis thaliana
cggaccggtcagacgcg

SEQ ID NO: 80518 - DNA, 17 bp, Arabidopsis thaliana
cggaccgtttcacagtt

SEQ ID NO: 80519 - DNA, 17 bp, Arabidopsis thaliana
cggacctaggggattac

SEQ ID NO: 80520 - DNA, 17 bp, Arabidopsis thaliana
cggacctgaaagattac

SEQ ID NO: 80521 - DNA, 17 bp, Arabidopsis thaliana
cggacctgagagattaa

SEQ ID NO: 80522 - DNA, 17 bp, Arabidopsis thaliana
cggacctgagagattac

SEQ ID NO: 80523 - DNA, 17 bp, Arabidopsis thaliana
cggaccttagctcagtt

SEQ ID NO: 80524 - DNA, 17 bp, Arabidopsis thaliana
cggacgaagcacattct

SEQ ID NO: 80525 - DNA, 17 bp, Arabidopsis thaliana
cggacgaatccgagcca

SEQ ID NO: 80526 - DNA, 17 bp, Arabidopsis thaliana
cggacgacaagagaatt

SEQ ID NO: 80527 - DNA, 17 bp, Arabidopsis thaliana
cggacgagattattgtg

SEQ ID NO: 80528 - DNA, 17 bp, Arabidopsis thaliana
cggacgagccaccaacc

SEQ ID NO: 80529 - DNA, 17 bp, Arabidopsis thaliana
cggacgataccacttct

SEQ ID NO: 80530 - DNA, 17 bp, Arabidopsis thaliana
cggacgatgaaccggac

SEQ ID NO: 80531 - DNA, 17 bp, Arabidopsis thaliana
cggacgccactaggtgc

SEQ ID NO: 80532 - DNA, 17 bp, Arabidopsis thaliana
cggacgcgagttctatc

SEQ ID NO: 80533 - DNA, 17 bp, Arabidopsis thaliana
cggacgcggattacggt

SEQ ID NO: 80534 - DNA, 17 bp, Arabidopsis thaliana
cggacggacaacccggg

SEQ ID NO: 80535 - DNA, 17 bp, Arabidopsis thaliana
cggacggactgggaacg

SEQ ID NO: 80536 - DNA, 17 bp, Arabidopsis thaliana
cggacggagattggccc

SEQ ID NO: 80537 - DNA, 17 bp, Arabidopsis thaliana
cggacggagcagatcaa

SEQ ID NO: 80538 - DNA, 17 bp, Arabidopsis thaliana
cggacggatcggggcag

SEQ ID NO: 80539 - DNA, 17 bp, Arabidopsis thaliana
cggacggatggcgggac

SEQ ID NO: 80540 - DNA, 17 bp, Arabidopsis thaliana
cggacggcggacgagct

SEQ ID NO: 80541 - DNA, 17 bp, Arabidopsis thaliana
cggacgggaagtagtgt

SEQ ID NO: 80542 - DNA, 17 bp, Arabidopsis thaliana
cggacgggaagtggtgt

SEQ ID NO: 80543 - DNA, 17 bp, Arabidopsis thaliana
cggacgggtttggcaag

SEQ ID NO: 80544 - DNA, 17 bp, Arabidopsis thaliana
cggacgggtttggcagg

SEQ ID NO: 80545 - DNA, 17 bp, Arabidopsis thaliana
cggacggtagcagttaa

SEQ ID NO: 80546 - DNA, 17 bp, Arabidopsis thaliana
cggacggtagcagttag

SEQ ID NO: 80547 - DNA, 17 bp, Arabidopsis thaliana
cggacggtcggtcattc

SEQ ID NO: 80548 - DNA, 17 bp, Arabidopsis thaliana
cggacggtgaatcagac

SEQ ID NO: 80549 - DNA, 17 bp, Arabidopsis thaliana
cggacgtaacttcatta

SEQ ID NO: 80550 - DNA, 17 bp, Arabidopsis thaliana
cggacgtaatttgcctc

SEQ ID NO: 80551 - DNA, 17 bp, Arabidopsis thaliana
cggacgtgagagccagc

SEQ ID NO: 80552 - DNA, 17 bp, Arabidopsis thaliana
cggacgtgagtttgata

SEQ ID NO: 80553 - DNA, 17 bp, Arabidopsis thaliana
cggacgtgagttttata

SEQ ID NO: 80554 - DNA, 17 bp, Arabidopsis thaliana
cggacgtttttgccccc

SEQ ID NO: 80555 - DNA, 17 bp, Arabidopsis thaliana
cggactaaaacggctgt

SEQ ID NO: 80556 - DNA, 17 bp, Arabidopsis thaliana
cggactaaaacgtctgt

SEQ ID NO: 80557 - DNA, 17 bp, Arabidopsis thaliana
cggactaaccggatcaa

SEQ ID NO: 80558 - DNA, 17 bp, Arabidopsis thaliana
cggactaactgcggaca

SEQ ID NO: 80559 - DNA, 17 bp, Arabidopsis thaliana
cggactaactgcggacc

SEQ ID NO: 80560 - DNA, 17 bp, Arabidopsis thaliana
cggactaatccgtcacc

SEQ ID NO: 80561 - DNA, 17 bp, Arabidopsis thaliana
cggactaatccgtcagc

SEQ ID NO: 80562 - DNA, 17 bp, Arabidopsis thaliana
cggactaccttctgagt

SEQ ID NO: 80563 - DNA, 17 bp, Arabidopsis thaliana
cggactaccttctgggt

SEQ ID NO: 80564 - DNA, 17 bp, Arabidopsis thaliana
cggactacttcaccaaa

SEQ ID NO: 80565 - DNA, 17 bp, Arabidopsis thaliana
cggactagcggacaagg

SEQ ID NO: 80566 - DNA, 17 bp, Arabidopsis thaliana
cggactaggcttcatcc

SEQ ID NO: 80567 - DNA, 17 bp, Arabidopsis thaliana
cggactatagattaccg

SEQ ID NO: 80568 - DNA, 17 bp, Arabidopsis thaliana
cggactatgcggtttca

SEQ ID NO: 80569 - DNA, 17 bp, Arabidopsis thaliana
cggactccattgttggc

SEQ ID NO: 80570 - DNA, 17 bp, Arabidopsis thaliana
cggactcctcgcagggg

SEQ ID NO: 80571 - DNA, 17 bp, Arabidopsis thaliana
cggactcgacgttttgt

SEQ ID NO: 80572 - DNA, 17 bp, Arabidopsis thaliana
cggactcgttaaatttc

SEQ ID NO: 80573 - DNA, 17 bp, Arabidopsis thaliana
cggactctgatgatatt

SEQ ID NO: 80574 - DNA, 17 bp, Arabidopsis thaliana
cggactgagaacggctc

SEQ ID NO: 80575 - DNA, 17 bp, Arabidopsis thaliana
cggactgagttgttttg

SEQ ID NO: 80576 - DNA, 17 bp, Arabidopsis thaliana
cggactgatggtcggga

SEQ ID NO: 80577 - DNA, 17 bp, Arabidopsis thaliana
cggactgatgtgcgatc

SEQ ID NO: 80578 - DNA, 17 bp, Arabidopsis thaliana
cggactgcgaacggccc

SEQ ID NO: 80579 - DNA, 17 bp, Arabidopsis thaliana
cggactgcggcctgtat

SEQ ID NO: 80580 - DNA, 17 bp, Arabidopsis thaliana
cggactgctcgagctgc

SEQ ID NO: 80581 - DNA, 17 bp, Arabidopsis thaliana
cggactgctcgagttgc

SEQ ID NO: 80582 - DNA, 17 bp, Arabidopsis thaliana
cggactgctctagctgc

SEQ ID NO: 80583 - DNA, 17 bp, Arabidopsis thaliana
cggactggacattgttg

SEQ ID NO: 80584 - DNA, 17 bp, Arabidopsis thaliana
cggactggcagtttgat

SEQ ID NO: 80585 - DNA, 17 bp, Arabidopsis thaliana
cggactgggaacggccc

SEQ ID NO: 80586 - DNA, 17 bp, Arabidopsis thaliana
cggactgggaacggcta

SEQ ID NO: 80587 - DNA, 17 bp, Arabidopsis thaliana
cggactgggaacggctc

SEQ ID NO: 80588 - DNA, 17 bp, Arabidopsis thaliana
cggactggggacggctc

SEQ ID NO: 80589 - DNA, 17 bp, Arabidopsis thaliana
cggactggtcaactgaa

SEQ ID NO: 80590 - DNA, 17 bp, Arabidopsis thaliana
cggactgttcagacctg

SEQ ID NO: 80591 - DNA, 17 bp, Arabidopsis thaliana
cggactgttcagatctg

SEQ ID NO: 80592 - DNA, 17 bp, Arabidopsis thaliana
cggactgttgtctggct

SEQ ID NO: 80593 - DNA, 17 bp, Arabidopsis thaliana
cggacttagccaacgac

SEQ ID NO: 80594 - DNA, 17 bp, Arabidopsis thaliana
cggacttatttacaatg

SEQ ID NO: 80595 - DNA, 17 bp, Arabidopsis thaliana
cggacttatttacagtg

SEQ ID NO: 80596 - DNA, 17 bp, Arabidopsis thaliana
cggacttgacggaatgt

SEQ ID NO: 80597 - DNA, 17 bp, Arabidopsis thaliana
cggacttgctcaggcgc

SEQ ID NO: 80598 - DNA, 17 bp, Arabidopsis thaliana
cggacttgcttgtggcc

SEQ ID NO: 80599 - DNA, 17 bp, Arabidopsis thaliana
cggacttggcttgactg

SEQ ID NO: 80600 - DNA, 17 bp, Arabidopsis thaliana
cggacttgtgatcaggc

SEQ ID NO: 80601 - DNA, 17 bp, Arabidopsis thaliana
cggacttgtgatcaggg

SEQ ID NO: 80602 - DNA, 17 bp, Arabidopsis thaliana
cggactttcaaactact

SEQ ID NO: 80603 - DNA, 17 bp, Arabidopsis thaliana
cggactttgacccagaa

SEQ ID NO: 80604 - DNA, 17 bp, Arabidopsis thaliana
cggactttgccggtaag

SEQ ID NO: 80605 - DNA, 17 bp, Arabidopsis thaliana
cggactttggatccctt

SEQ ID NO: 80606 - DNA, 17 bp, Arabidopsis thaliana
cggactttggtttcctt

SEQ ID NO: 80607 - DNA, 17 bp, Arabidopsis thaliana
cggagaaacactcgacc

SEQ ID NO: 80608 - DNA, 17 bp, Arabidopsis thaliana
cggagaagagaagacgg

SEQ ID NO: 80609 - DNA, 17 bp, Arabidopsis thaliana
cggagaagtgacagatc

SEQ ID NO: 80610 - DNA, 17 bp, Arabidopsis thaliana
cggagaatgccctttgg

SEQ ID NO: 80611 - DNA, 17 bp, Arabidopsis thaliana
cggagaatgcttgtaag

SEQ ID NO: 80612 - DNA, 17 bp, Arabidopsis thaliana
cggagaattacgggttt

SEQ ID NO: 80613 - DNA, 17 bp, Arabidopsis thaliana
cggagaattgcttgcta

SEQ ID NO: 80614 - DNA, 17 bp, Arabidopsis thaliana
cggagacactttttgtt

SEQ ID NO: 80615 - DNA, 17 bp, Arabidopsis thaliana
cggagacaggatcgagc

SEQ ID NO: 80616 - DNA, 17 bp, Arabidopsis thaliana
cggagacccgggttcgt

SEQ ID NO: 80617 - DNA, 17 bp, Arabidopsis thaliana
cggagacctgggctcga

SEQ ID NO: 80618 - DNA, 17 bp, Arabidopsis thaliana
cggagacctgggctcgt

SEQ ID NO: 80619 - DNA, 17 bp, Arabidopsis thaliana
cggagacggagtgtggg

SEQ ID NO: 80620 - DNA, 17 bp, Arabidopsis thaliana
cggagacgtcaacgggg

SEQ ID NO: 80621 - DNA, 17 bp, Arabidopsis thaliana
cggagacgtcgacgggg

SEQ ID NO: 80622 - DNA, 17 bp, Arabidopsis thaliana
cggagacgtcggcgggg

SEQ ID NO: 80623 - DNA, 17 bp, Arabidopsis thaliana
cggagactggatcgagc

SEQ ID NO: 80624 - DNA, 17 bp, Arabidopsis thaliana
cggagactggctcaact

SEQ ID NO: 80625 - DNA, 17 bp, Arabidopsis thaliana
cggagactttcgaggat

SEQ ID NO: 80626 - DNA, 17 bp, Arabidopsis thaliana
cggagagaatctccggc

SEQ ID NO: 80627 - DNA, 17 bp, Arabidopsis thaliana
cggagagacaaaaacag

SEQ ID NO: 80628 - DNA, 17 bp, Arabidopsis thaliana
cggagagattctccggc

SEQ ID NO: 80629 - DNA, 17 bp, Arabidopsis thaliana
cggagagccacggcctg

SEQ ID NO: 80630 - DNA, 17 bp, Arabidopsis thaliana
cggagagccatccagga

SEQ ID NO: 80631 - DNA, 17 bp, Arabidopsis thaliana
cggagagcgacggatcg

SEQ ID NO: 80632 - DNA, 17 bp, Arabidopsis thaliana
cggagagctctctttgg

SEQ ID NO: 80633 - DNA, 17 bp, Arabidopsis thaliana
cggagaggcagaggcag

SEQ ID NO: 80634 - DNA, 17 bp, Arabidopsis thaliana
cggagagtccgagttgc

SEQ ID NO: 80635 - DNA, 17 bp, Arabidopsis thaliana
cggagagtcttctgtca

SEQ ID NO: 80636 - DNA, 17 bp, Arabidopsis thaliana
cggagataacgctggct

SEQ ID NO: 80637 - DNA, 17 bp, Arabidopsis thaliana
cggagatacaaaaacag

SEQ ID NO: 80638 - DNA, 17 bp, Arabidopsis thaliana
cggagatcgctgttttt

SEQ ID NO: 80639 - DNA, 17 bp, Arabidopsis thaliana
cggagatctcgtgtggg

SEQ ID NO: 80640 - DNA, 17 bp, Arabidopsis thaliana
cggagatgtagaacctt

SEQ ID NO: 80641 - DNA, 17 bp, Arabidopsis thaliana
cggagatgtagagtctt

SEQ ID NO: 80642 - DNA, 17 bp, Arabidopsis thaliana
cggagattattgagcat

SEQ ID NO: 80643 - DNA, 17 bp, Arabidopsis thaliana
cggagattcatcggtga

SEQ ID NO: 80644 - DNA, 17 bp, Arabidopsis thaliana
cggagattccgagactt

SEQ ID NO: 80645 - DNA, 17 bp, Arabidopsis thaliana
cggagattttgcatgcg

SEQ ID NO: 80646 - DNA, 17 bp, Arabidopsis thaliana
cggagcaatccggtccg

SEQ ID NO: 80647 - DNA, 17 bp, Arabidopsis thaliana
cggagcagtgacaaagc

SEQ ID NO: 80648 - DNA, 17 bp, Arabidopsis thaliana
cggagccggatttttcg

SEQ ID NO: 80649 - DNA, 17 bp, Arabidopsis thaliana
cggagcgacacagtgcg

SEQ ID NO: 80650 - DNA, 17 bp, Arabidopsis thaliana
cggagcgatttgtctgg

SEQ ID NO: 80651 - DNA, 17 bp, Arabidopsis thaliana
cggaggaaaaattacgg

SEQ ID NO: 80652 - DNA, 17 bp, Arabidopsis thaliana
cggaggaaaccaaggcg

SEQ ID NO: 80653 - DNA, 17 bp, Arabidopsis thaliana
cggaggaaacgggtgtc

SEQ ID NO: 80654 - DNA, 17 bp, Arabidopsis thaliana
cggaggaacgagtgccg

SEQ ID NO: 80655 - DNA, 17 bp, Arabidopsis thaliana
cggaggaagcggtggtg

SEQ ID NO: 80656 - DNA, 17 bp, Arabidopsis thaliana
cggaggaagtgcggtgc

SEQ ID NO: 80657 - DNA, 17 bp, Arabidopsis thaliana
cggaggacattgtcagg

SEQ ID NO: 80658 - DNA, 17 bp, Arabidopsis thaliana
cggaggaccaccacact

SEQ ID NO: 80659 - DNA, 17 bp, Arabidopsis thaliana
cggaggaccgagtaccg

SEQ ID NO: 80660 - DNA, 17 bp, Arabidopsis thaliana
cggaggaccgagtgccg

SEQ ID NO: 80661 - DNA, 17 bp, Arabidopsis thaliana
cggaggaccttgtcagg

SEQ ID NO: 80662 - DNA, 17 bp, Arabidopsis thaliana
cggaggacggagtgccg

SEQ ID NO: 80663 - DNA, 17 bp, Arabidopsis thaliana
cggaggatgaaaattat

SEQ ID NO: 80664 - DNA, 17 bp, Arabidopsis thaliana
cggaggatttgcgtcca

SEQ ID NO: 80665 - DNA, 17 bp, Arabidopsis thaliana
cggaggcaagtgtgcaa

SEQ ID NO: 80666 - DNA, 17 bp, Arabidopsis thaliana
cggaggcagcggttcat

SEQ ID NO: 80667 - DNA, 17 bp, Arabidopsis thaliana
cggaggcggagatatca

SEQ ID NO: 80668 - DNA, 17 bp, Arabidopsis thaliana
cggaggcgtcgttcgga

SEQ ID NO: 80669 - DNA, 17 bp, Arabidopsis thaliana
cggaggcgtgcaaaggt

SEQ ID NO: 80670 - DNA, 17 bp, Arabidopsis thaliana
cggaggcgttgacccaa

SEQ ID NO: 80671 - DNA, 17 bp, Arabidopsis thaliana
cggaggctacggcgtta

SEQ ID NO: 80672 - DNA, 17 bp, Arabidopsis thaliana
cggaggcttgttcgagt

SEQ ID NO: 80673 - DNA, 17 bp, Arabidopsis thaliana
cggagggatgtctttgg

SEQ ID NO: 80674 - DNA, 17 bp, Arabidopsis thaliana
cggagggctacctttag

SEQ ID NO: 80675 - DNA, 17 bp, Arabidopsis thaliana
cggagggctctctttgg

SEQ ID NO: 80676 - DNA, 17 bp, Arabidopsis thaliana
cggagggctgtctttgg

SEQ ID NO: 80677 - DNA, 17 bp, Arabidopsis thaliana
cggagggctgttttggg

SEQ ID NO: 80678 - DNA, 17 bp, Arabidopsis thaliana
cggagggctttctttgg

SEQ ID NO: 80679 - DNA, 17 bp, Arabidopsis thaliana
cggaggggaccactatg

SEQ ID NO: 80680 - DNA, 17 bp, Arabidopsis thaliana
cggagggtagcagttag

SEQ ID NO: 80681 - DNA, 17 bp, Arabidopsis thaliana
cggaggtgatcagacct

SEQ ID NO: 80682 - DNA, 17 bp, Arabidopsis thaliana
cggaggttccccctcct

SEQ ID NO: 80683 - DNA, 17 bp, Arabidopsis thaliana
cggaggttcgagtcctc

SEQ ID NO: 80684 - DNA, 17 bp, Arabidopsis thaliana
cggagtaaggtggtttt

SEQ ID NO: 80685 - DNA, 17 bp, Arabidopsis thaliana
cggagtaggctcatgtt

SEQ ID NO: 80686 - DNA, 17 bp, Arabidopsis thaliana
cggagtccatcccactg

SEQ ID NO: 80687 - DNA, 17 bp, Arabidopsis thaliana
cggagtcctataagcaa

SEQ ID NO: 80688 - DNA, 17 bp, Arabidopsis thaliana
cggagtcctgtgatccg

SEQ ID NO: 80689 - DNA, 17 bp, Arabidopsis thaliana
cggagtcgagtatcact

SEQ ID NO: 80690 - DNA, 17 bp, Arabidopsis thaliana
cggagtcgcatcctgtg

SEQ ID NO: 80691 - DNA, 17 bp, Arabidopsis thaliana
cggagtctctttcatct

SEQ ID NO: 80692 - DNA, 17 bp, Arabidopsis thaliana
cggagtcttcattgtcc

SEQ ID NO: 80693 - DNA, 17 bp, Arabidopsis thaliana
cggagtgccatcaattt

SEQ ID NO: 80694 - DNA, 17 bp, Arabidopsis thaliana
cggagtgcgaggagggt

SEQ ID NO: 80695 - DNA, 17 bp, Arabidopsis thaliana
cggagtgcttatggaat

SEQ ID NO: 80696 - DNA, 17 bp, Arabidopsis thaliana
cggagtgtgtattactg

SEQ ID NO: 80697 - DNA, 17 bp, Arabidopsis thaliana
cggagttactaactcac

SEQ ID NO: 80698 - DNA, 17 bp, Arabidopsis thaliana
cggagttagtcgatcag

SEQ ID NO: 80699 - DNA, 17 bp, Arabidopsis thaliana
cggagttctgatgggag

SEQ ID NO: 80700 - DNA, 17 bp, Arabidopsis thaliana
cggagttctgatgggat

SEQ ID NO: 80701 - DNA, 17 bp, Arabidopsis thaliana
cggagttgaaacttggg

SEQ ID NO: 80702 - DNA, 17 bp, Arabidopsis thaliana
cggagttgcgactcctt

SEQ ID NO: 80703 - DNA, 17 bp, Arabidopsis thaliana
cggagttgtcgagtaag

SEQ ID NO: 80704 - DNA, 17 bp, Arabidopsis thaliana
cggagttgtggacgctt

SEQ ID NO: 80705 - DNA, 17 bp, Arabidopsis thaliana
cggagttgtttttggta

SEQ ID NO: 80706 - DNA, 17 bp, Arabidopsis thaliana
cggagtttatttacagt

SEQ ID NO: 80707 - DNA, 17 bp, Arabidopsis thaliana
cggagttttcatctacc

SEQ ID NO: 80708 - DNA, 17 bp, Arabidopsis thaliana
cggagttttgatcggcg

SEQ ID NO: 80709 - DNA, 17 bp, Arabidopsis thaliana
cggataaacgactctcg

SEQ ID NO: 80710 - DNA, 17 bp, Arabidopsis thaliana
cggataaaggacagtgc

SEQ ID NO: 80711 - DNA, 17 bp, Arabidopsis thaliana
cggataaagtgcggtgc

SEQ ID NO: 80712 - DNA, 17 bp, Arabidopsis thaliana
cggataaccaccgccgc

SEQ ID NO: 80713 - DNA, 17 bp, Arabidopsis thaliana
cggataagattgcggtt

SEQ ID NO: 80714 - DNA, 17 bp, Arabidopsis thaliana
cggataagtggttggtt

SEQ ID NO: 80715 - DNA, 17 bp, Arabidopsis thaliana
cggataatacggacaaa

SEQ ID NO: 80716 - DNA, 17 bp, Arabidopsis thaliana
cggataatttggcgcga

SEQ ID NO: 80717 - DNA, 17 bp, Arabidopsis thaliana
cggataatttggcgcgt

SEQ ID NO: 80718 - DNA, 17 bp, Arabidopsis thaliana
cggatacaaagccgacg

SEQ ID NO: 80719 - DNA, 17 bp, Arabidopsis thaliana
cggatacaacgtcgttc

SEQ ID NO: 80720 - DNA, 17 bp, Arabidopsis thaliana
cggatacactacttccc

SEQ ID NO: 80721 - DNA, 17 bp, Arabidopsis thaliana
cggataccaaactacgt

SEQ ID NO: 80722 - DNA, 17 bp, Arabidopsis thaliana
cggatacctcttgtgga

SEQ ID NO: 80723 - DNA, 17 bp, Arabidopsis thaliana
cggatacggatccagat

SEQ ID NO: 80724 - DNA, 17 bp, Arabidopsis thaliana
cggatacggatcggatt

SEQ ID NO: 80725 - DNA, 17 bp, Arabidopsis thaliana
cggatactacccagccc

SEQ ID NO: 80726 - DNA, 17 bp, Arabidopsis thaliana
cggatactcgcgtctaa

SEQ ID NO: 80727 - DNA, 17 bp, Arabidopsis thaliana
cggatactgcaccaggc

SEQ ID NO: 80728 - DNA, 17 bp, Arabidopsis thaliana
cggatacttcttcggca

SEQ ID NO: 80729 - DNA, 17 bp, Arabidopsis thaliana
cggatagaagcctagcc

SEQ ID NO: 80730 - DNA, 17 bp, Arabidopsis thaliana
cggatagaccagcggtg

SEQ ID NO: 80731 - DNA, 17 bp, Arabidopsis thaliana
cggatagctggttggac

SEQ ID NO: 80732 - DNA, 17 bp, Arabidopsis thaliana
cggatagtttgtggatt

SEQ ID NO: 80733 - DNA, 17 bp, Arabidopsis thaliana
cggatatccacgggtct

SEQ ID NO: 80734 - DNA, 17 bp, Arabidopsis thaliana
cggatatccacgggttt

SEQ ID NO: 80735 - DNA, 17 bp, Arabidopsis thaliana
cggatatccgaacgccc

SEQ ID NO: 80736 - DNA, 17 bp, Arabidopsis thaliana
cggatatccgaggttta

SEQ ID NO: 80737 - DNA, 17 bp, Arabidopsis thaliana
cggatatccgcttcgtg

SEQ ID NO: 80738 - DNA, 17 bp, Arabidopsis thaliana
cggatatctcggctctc

SEQ ID NO: 80739 - DNA, 17 bp, Arabidopsis thaliana
cggatatgccgcaggcc

SEQ ID NO: 80740 - DNA, 17 bp, Arabidopsis thaliana
cggatattcgattcgtg

SEQ ID NO: 80741 - DNA, 17 bp, Arabidopsis thaliana
cggatattttcgggttc

SEQ ID NO: 80742 - DNA, 17 bp, Arabidopsis thaliana
cggatcaagtagatatt

SEQ ID NO: 80743 - DNA, 17 bp, Arabidopsis thaliana
cggatcgcggcgacgtg

SEQ ID NO: 80744 - DNA, 17 bp, Arabidopsis thaliana
cggatgaagctttttgg

SEQ ID NO: 80745 - DNA, 17 bp, Arabidopsis thaliana
cggatgcggataccatc

SEQ ID NO: 80746 - DNA, 17 bp, Arabidopsis thaliana
cggatgcggtgcgagtc

SEQ ID NO: 80747 - DNA, 17 bp, Arabidopsis thaliana
cggatgctaacgcaatg

SEQ ID NO: 80748 - DNA, 17 bp, Arabidopsis thaliana
cggatgctaacgcaatt

SEQ ID NO: 80749 - DNA, 17 bp, Arabidopsis thaliana
cggatggactctctggc

SEQ ID NO: 80750 - DNA, 17 bp, Arabidopsis thaliana
cggatggctgtctttgg

SEQ ID NO: 80751 - DNA, 17 bp, Arabidopsis thaliana
cggatgggctcggttta

SEQ ID NO: 80752 - DNA, 17 bp, Arabidopsis thaliana
cggatgtggttctagtt

SEQ ID NO: 80753 - DNA, 17 bp, Arabidopsis thaliana
cggattaaaatgtgacg

SEQ ID NO: 80754 - DNA, 17 bp, Arabidopsis thaliana
cggattaagtgctggcg

SEQ ID NO: 80755 - DNA, 17 bp, Arabidopsis thaliana
cggattaatcagtagac

SEQ ID NO: 80756 - DNA, 17 bp, Arabidopsis thaliana
cggattaatccgtcagc

SEQ ID NO: 80757 - DNA, 17 bp, Arabidopsis thaliana
cggattacgacttggat

SEQ ID NO: 80758 - DNA, 17 bp, Arabidopsis thaliana
cggattacggtggcggc

SEQ ID NO: 80759 - DNA, 17 bp, Arabidopsis thaliana
cggattactgagatttt

SEQ ID NO: 80760 - DNA, 17 bp, Arabidopsis thaliana
cggattagattttcttt

SEQ ID NO: 80761 - DNA, 17 bp, Arabidopsis thaliana
cggattataccgtggac

SEQ ID NO: 80762 - DNA, 17 bp, Arabidopsis thaliana
cggattatctgatgtta

SEQ ID NO: 80763 - DNA, 17 bp, Arabidopsis thaliana
cggattcagacttacct

SEQ ID NO: 80764 - DNA, 17 bp, Arabidopsis thaliana
cggattcaggccatcga

SEQ ID NO: 80765 - DNA, 17 bp, Arabidopsis thaliana
cggattcaggtcggttt

SEQ ID NO: 80766 - DNA, 17 bp, Arabidopsis thaliana
cggattcataaacgctg

SEQ ID NO: 80767 - DNA, 17 bp, Arabidopsis thaliana
cggattcatactttgtg

SEQ ID NO: 80768 - DNA, 17 bp, Arabidopsis thaliana
cggattccactttttac

SEQ ID NO: 80769 - DNA, 17 bp, Arabidopsis thaliana
cggattcgcttggtgca

SEQ ID NO: 80770 - DNA, 17 bp, Arabidopsis thaliana
cggattctgacttagaa

SEQ ID NO: 80771 - DNA, 17 bp, Arabidopsis thaliana
cggattctgacttagag

SEQ ID NO: 80772 - DNA, 17 bp, Arabidopsis thaliana
cggattctgcgaagctc

SEQ ID NO: 80773 - DNA, 17 bp, Arabidopsis thaliana
cggattctggtcaaagt

SEQ ID NO: 80774 - DNA, 17 bp, Arabidopsis thaliana
cggattgaagctgagta

SEQ ID NO: 80775 - DNA, 17 bp, Arabidopsis thaliana
cggattgaagggagctc

SEQ ID NO: 80776 - DNA, 17 bp, Arabidopsis thaliana
cggattgagcatgtgtt

SEQ ID NO: 80777 - DNA, 17 bp, Arabidopsis thaliana
cggattgcacgcagcga

SEQ ID NO: 80778 - DNA, 17 bp, Arabidopsis thaliana
cggattgcagctgagta

SEQ ID NO: 80779 - DNA, 17 bp, Arabidopsis thaliana
cggattgcaggctgcaa

SEQ ID NO: 80780 - DNA, 17 bp, Arabidopsis thaliana
cggattgcctctacaca

SEQ ID NO: 80781 - DNA, 17 bp, Arabidopsis thaliana
cggattgcggcattgaa

SEQ ID NO: 80782 - DNA, 17 bp, Arabidopsis thaliana
cggattgcgggttttag

SEQ ID NO: 80783 - DNA, 17 bp, Arabidopsis thaliana
cggattggaccacgggt

SEQ ID NO: 80784 - DNA, 17 bp, Arabidopsis thaliana
cggattggatgtgtttt

SEQ ID NO: 80785 - DNA, 17 bp, Arabidopsis thaliana
cggattggcgggacgga

SEQ ID NO: 80786 - DNA, 17 bp, Arabidopsis thaliana
cggattggcgggacggg

SEQ ID NO: 80787 - DNA, 17 bp, Arabidopsis thaliana
cggattgtggacagaac

SEQ ID NO: 80788 - DNA, 17 bp, Arabidopsis thaliana
cggattgtggccagaac

SEQ ID NO: 80789 - DNA, 17 bp, Arabidopsis thaliana
cggattgttgcactact

SEQ ID NO: 80790 - DNA, 17 bp, Arabidopsis thaliana
cggatttaatgcgcagt

SEQ ID NO: 80791 - DNA, 17 bp, Arabidopsis thaliana
cggatttacaggtttag

SEQ ID NO: 80792 - DNA, 17 bp, Arabidopsis thaliana
cggatttagccggcaaa

SEQ ID NO: 80793 - DNA, 17 bp, Arabidopsis thaliana
cggatttaggccaaccg

SEQ ID NO: 80794 - DNA, 17 bp, Arabidopsis thaliana
cggatttagtgtgagac

SEQ ID NO: 80795 - DNA, 17 bp, Arabidopsis thaliana
cggatttatcggttgct

SEQ ID NO: 80796 - DNA, 17 bp, Arabidopsis thaliana
cggatttatctgactgc

SEQ ID NO: 80797 - DNA, 17 bp, Arabidopsis thaliana
cggatttattgtgtacg

SEQ ID NO: 80798 - DNA, 17 bp, Arabidopsis thaliana
cggatttccgacggact

SEQ ID NO: 80799 - DNA, 17 bp, Arabidopsis thaliana
cggatttccgacgggct

SEQ ID NO: 80800 - DNA, 17 bp, Arabidopsis thaliana
cggatttccggccaacg

SEQ ID NO: 80801 - DNA, 17 bp, Arabidopsis thaliana
cggatttcggcccagaa

SEQ ID NO: 80802 - DNA, 17 bp, Arabidopsis thaliana
cggatttcttcctcgga

SEQ ID NO: 80803 - DNA, 17 bp, Arabidopsis thaliana
cggatttgccaaggatg

SEQ ID NO: 80804 - DNA, 17 bp, Arabidopsis thaliana
cggatttgctgctggag

SEQ ID NO: 80805 - DNA, 17 bp, Arabidopsis thaliana
cggatttggattgggtt

SEQ ID NO: 80806 - DNA, 17 bp, Arabidopsis thaliana
cggatttggcaggacgt

SEQ ID NO: 80807 - DNA, 17 bp, Arabidopsis thaliana
cggatttggtcgacgaa

SEQ ID NO: 80808 - DNA, 17 bp, Arabidopsis thaliana
cggatttggttgaggca

SEQ ID NO: 80809 - DNA, 17 bp, Arabidopsis thaliana
cggatttggttgctctt

SEQ ID NO: 80810 - DNA, 17 bp, Arabidopsis thaliana
cggatttgtggttaatc

SEQ ID NO: 80811 - DNA, 17 bp, Arabidopsis thaliana
cggattttacaaaaacg

SEQ ID NO: 80812 - DNA, 17 bp, Arabidopsis thaliana
cggattttgcagaagtg

SEQ ID NO: 80813 - DNA, 17 bp, Arabidopsis thaliana
cggattttggaaacttg

SEQ ID NO: 80814 - DNA, 17 bp, Arabidopsis thaliana
cggattttggattccgc

SEQ ID NO: 80815 - DNA, 17 bp, Arabidopsis thaliana
cggattttggattctga

SEQ ID NO: 80816 - DNA, 17 bp, Arabidopsis thaliana
cggattttggcccaaaa

SEQ ID NO: 80817 - DNA, 17 bp, Arabidopsis thaliana
cggattttggcctaaaa

SEQ ID NO: 80818 - DNA, 17 bp, Arabidopsis thaliana
cggattttttgggtcag

SEQ ID NO: 80819 - DNA, 17 bp, Arabidopsis thaliana
cggattttttggttcag

SEQ ID NO: 80820 - DNA, 17 bp, Arabidopsis thaliana
cggcaaacacgagagag

SEQ ID NO: 80821 - DNA, 17 bp, Arabidopsis thaliana
cggcaaagaaggttaat

SEQ ID NO: 80822 - DNA, 17 bp, Arabidopsis thaliana
cggcaaagtcaaatgtg

SEQ ID NO: 80823 - DNA, 17 bp, Arabidopsis thaliana
cggcaaatcggtttaat

SEQ ID NO: 80824 - DNA, 17 bp, Arabidopsis thaliana
cggcaaatggcaagtgg

SEQ ID NO: 80825 - DNA, 17 bp, Arabidopsis thaliana
cggcaacctctactagc

SEQ ID NO: 80826 - DNA, 17 bp, Arabidopsis thaliana
cggcaacgatttttcag

SEQ ID NO: 80827 - DNA, 17 bp, Arabidopsis thaliana
cggcaacggatatctca

SEQ ID NO: 80828 - DNA, 17 bp, Arabidopsis thaliana
cggcaacggatatctcg

SEQ ID NO: 80829 - DNA, 17 bp, Arabidopsis thaliana
cggcaactgaatcactt

SEQ ID NO: 80830 - DNA, 17 bp, Arabidopsis thaliana
cggcaagacggttagac

SEQ ID NO: 80831 - DNA, 17 bp, Arabidopsis thaliana
cggcaagactaaaatgc

SEQ ID NO: 80832 - DNA, 17 bp, Arabidopsis thaliana
cggcaagactaaaatgg

SEQ ID NO: 80833 - DNA, 17 bp, Arabidopsis thaliana
cggcaagccttccagga

SEQ ID NO: 80834 - DNA, 17 bp, Arabidopsis thaliana
cggcaagctgttgttgg

SEQ ID NO: 80835 - DNA, 17 bp, Arabidopsis thaliana
cggcaagttgaccttgg

SEQ ID NO: 80836 - DNA, 17 bp, Arabidopsis thaliana
cggcaagttgtccttgg

SEQ ID NO: 80837 - DNA, 17 bp, Arabidopsis thaliana
cggcaatatctctacat

SEQ ID NO: 80838 - DNA, 17 bp, Arabidopsis thaliana
cggcaatgcggtttgag

SEQ ID NO: 80839 - DNA, 17 bp, Arabidopsis thaliana
cggcaatgtgctacaac

SEQ ID NO: 80840 - DNA, 17 bp, Arabidopsis thaliana
cggcaattagcagtgtt

SEQ ID NO: 80841 - DNA, 17 bp, Arabidopsis thaliana
cggcaatttggtattgc

SEQ ID NO: 80842 - DNA, 17 bp, Arabidopsis thaliana
cggcacaaaaatcttag

SEQ ID NO: 80843 - DNA, 17 bp, Arabidopsis thaliana
cggcaccaatcatacac

SEQ ID NO: 80844 - DNA, 17 bp, Arabidopsis thaliana
cggcaccacagggttac

SEQ ID NO: 80845 - DNA, 17 bp, Arabidopsis thaliana
cggcaccgcagggttac

SEQ ID NO: 80846 - DNA, 17 bp, Arabidopsis thaliana
cggcaccggtttcagga

SEQ ID NO: 80847 - DNA, 17 bp, Arabidopsis thaliana
cggcaccgtccgtttca

SEQ ID NO: 80848 - DNA, 17 bp, Arabidopsis thaliana
cggcacctcgatgtcgg

SEQ ID NO: 80849 - DNA, 17 bp, Arabidopsis thaliana
cggcacgtccgcctggg

SEQ ID NO: 80850 - DNA, 17 bp, Arabidopsis thaliana
cggcacgtctgcctgcc

SEQ ID NO: 80851 - DNA, 17 bp, Arabidopsis thaliana
cggcacgtctgcctggc

SEQ ID NO: 80852 - DNA, 17 bp, Arabidopsis thaliana
cggcacgtctgcctggg

SEQ ID NO: 80853 - DNA, 17 bp, Arabidopsis thaliana
cggcacgtctgtctggc

SEQ ID NO: 80854 - DNA, 17 bp, Arabidopsis thaliana
cggcacgtgtcgttggc

SEQ ID NO: 80855 - DNA, 17 bp, Arabidopsis thaliana
cggcactctgcctgggt

SEQ ID NO: 80856 - DNA, 17 bp, Arabidopsis thaliana
cggcacttactggtgtg

SEQ ID NO: 80857 - DNA, 17 bp, Arabidopsis thaliana
cggcacttgcacatgcg

SEQ ID NO: 80858 - DNA, 17 bp, Arabidopsis thaliana
cggcacttgcacatggg

SEQ ID NO: 80859 - DNA, 17 bp, Arabidopsis thaliana
cggcagaaaacggggag

SEQ ID NO: 80860 - DNA, 17 bp, Arabidopsis thaliana
cggcagaagtccacgat

SEQ ID NO: 80861 - DNA, 17 bp, Arabidopsis thaliana
cggcagatcatgtagga

SEQ ID NO: 80862 - DNA, 17 bp, Arabidopsis thaliana
cggcagatcccgaggtc

SEQ ID NO: 80863 - DNA, 17 bp, Arabidopsis thaliana
cggcagatcgtctgacg

SEQ ID NO: 80864 - DNA, 17 bp, Arabidopsis thaliana
cggcagctaagttatgg

SEQ ID NO: 80865 - DNA, 17 bp, Arabidopsis thaliana
cggcaggactcgtatac

SEQ ID NO: 80866 - DNA, 17 bp, Arabidopsis thaliana
cggcaggagtactactc

SEQ ID NO: 80867 - DNA, 17 bp, Arabidopsis thaliana
cggcagtaggtgaacag

SEQ ID NO: 80868 - DNA, 17 bp, Arabidopsis thaliana
cggcagtgattttctct

SEQ ID NO: 80869 - DNA, 17 bp, Arabidopsis thaliana
cggcagtggtgaagacg

SEQ ID NO: 80870 - DNA, 17 bp, Arabidopsis thaliana
cggcagtgtgctactgt

SEQ ID NO: 80871 - DNA, 17 bp, Arabidopsis thaliana
cggcagttacggctgac

SEQ ID NO: 80872 - DNA, 17 bp, Arabidopsis thaliana
cggcagttatgtcttta

SEQ ID NO: 80873 - DNA, 17 bp, Arabidopsis thaliana
cggcagttatgtctttg

SEQ ID NO: 80874 - DNA, 17 bp, Arabidopsis thaliana
cggcagttattctctaa

SEQ ID NO: 80875 - DNA, 17 bp, Arabidopsis thaliana
cggcagttcttctctaa

SEQ ID NO: 80876 - DNA, 17 bp, Arabidopsis thaliana
cggcagttgatcgtttg

SEQ ID NO: 80877 - DNA, 17 bp, Arabidopsis thaliana
cggcataacgattccca

SEQ ID NO: 80878 - DNA, 17 bp, Arabidopsis thaliana
cggcataataaggccct

SEQ ID NO: 80879 - DNA, 17 bp, Arabidopsis thaliana
cggcatctattgatttg

SEQ ID NO: 80880 - DNA, 17 bp, Arabidopsis thaliana
cggcatgccactttttg

SEQ ID NO: 80881 - DNA, 17 bp, Arabidopsis thaliana
cggcatgggattcaacg

SEQ ID NO: 80882 - DNA, 17 bp, Arabidopsis thaliana
cggcattacggtaaaca

SEQ ID NO: 80883 - DNA, 17 bp, Arabidopsis thaliana
cggcattatgacccttt

SEQ ID NO: 80884 - DNA, 17 bp, Arabidopsis thaliana
cggcattccgtcatcct

SEQ ID NO: 80885 - DNA, 17 bp, Arabidopsis thaliana
cggcattggatgataca

SEQ ID NO: 80886 - DNA, 17 bp, Arabidopsis thaliana
cggcatttgcatttgtg

SEQ ID NO: 80887 - DNA, 17 bp, Arabidopsis thaliana
cggcattttcgtgatct

SEQ ID NO: 80888 - DNA, 17 bp, Arabidopsis thaliana
cggcattttcgtgattt

SEQ ID NO: 80889 - DNA, 17 bp, Arabidopsis thaliana
cggcattttctgtgtat

SEQ ID NO: 80890 - DNA, 17 bp, Arabidopsis thaliana
cggccaaaaacctcctg

SEQ ID NO: 80891 - DNA, 17 bp, Arabidopsis thaliana
cggccaacaagtgtgac

SEQ ID NO: 80892 - DNA, 17 bp, Arabidopsis thaliana
cggccaacctatctaat

SEQ ID NO: 80893 - DNA, 17 bp, Arabidopsis thaliana
cggccaagagttccggt

SEQ ID NO: 80894 - DNA, 17 bp, Arabidopsis thaliana
cggccaaggatgacttg

SEQ ID NO: 80895 - DNA, 17 bp, Arabidopsis thaliana
cggccaaggtgtgaact

SEQ ID NO: 80896 - DNA, 17 bp, Arabidopsis thaliana
cggccaagtcatgaaat

SEQ ID NO: 80897 - DNA, 17 bp, Arabidopsis thaliana
cggccaatagccaactg

SEQ ID NO: 80898 - DNA, 17 bp, Arabidopsis thaliana
cggccaatccgttttgc

SEQ ID NO: 80899 - DNA, 17 bp, Arabidopsis thaliana
cggccaattcgcagcgc

SEQ ID NO: 80900 - DNA, 17 bp, Arabidopsis thaliana
cggccacctgcatttat

SEQ ID NO: 80901 - DNA, 17 bp, Arabidopsis thaliana
cggccacgggttgggat

SEQ ID NO: 80902 - DNA, 17 bp, Arabidopsis thaliana
cggccacttcctccaac

SEQ ID NO: 80903 - DNA, 17 bp, Arabidopsis thaliana
cggccacttcctctaac

SEQ ID NO: 80904 - DNA, 17 bp, Arabidopsis thaliana
cggccagaccggtgtcc

SEQ ID NO: 80905 - DNA, 17 bp, Arabidopsis thaliana
cggccagcaccgctctg

SEQ ID NO: 80906 - DNA, 17 bp, Arabidopsis thaliana
cggccagggaatgctat

SEQ ID NO: 80907 - DNA, 17 bp, Arabidopsis thaliana
cggccatattgcatgtt

SEQ ID NO: 80908 - DNA, 17 bp, Arabidopsis thaliana
cggccatcaggagtgga

SEQ ID NO: 80909 - DNA, 17 bp, Arabidopsis thaliana
cggccatgatgacttgc

SEQ ID NO: 80910 - DNA, 17 bp, Arabidopsis thaliana
cggccattcggttggaa

SEQ ID NO: 80911 - DNA, 17 bp, Arabidopsis thaliana
cggccattcggttggag

SEQ ID NO: 80912 - DNA, 17 bp, Arabidopsis thaliana
cggccattcggttgggg

SEQ ID NO: 80913 - DNA, 17 bp, Arabidopsis thaliana
cggccattgctctatgt

SEQ ID NO: 80914 - DNA, 17 bp, Arabidopsis thaliana
cggccatttcaaaaatt

SEQ ID NO: 80915 - DNA, 17 bp, Arabidopsis thaliana
cggccattttttgaaag

SEQ ID NO: 80916 - DNA, 17 bp, Arabidopsis thaliana
cggcccaaaacctccag

SEQ ID NO: 80917 - DNA, 17 bp, Arabidopsis thaliana
cggcccaagtctttttg

SEQ ID NO: 80918 - DNA, 17 bp, Arabidopsis thaliana
cggcccaagtttgtctc

SEQ ID NO: 80919 - DNA, 17 bp, Arabidopsis thaliana
cggcccaagtttgtctg

SEQ ID NO: 80920 - DNA, 17 bp, Arabidopsis thaliana
cggcccaccagtccacc

SEQ ID NO: 80921 - DNA, 17 bp, Arabidopsis thaliana
cggcccacgggtcggat

SEQ ID NO: 80922 - DNA, 17 bp, Arabidopsis thaliana
cggcccagaaccttttg

SEQ ID NO: 80923 - DNA, 17 bp, Arabidopsis thaliana
cggcccaggccacctct

SEQ ID NO: 80924 - DNA, 17 bp, Arabidopsis thaliana
cggcccatcatctaagc

SEQ ID NO: 80925 - DNA, 17 bp, Arabidopsis thaliana
cggcccatgggcttgcc

SEQ ID NO: 80926 - DNA, 17 bp, Arabidopsis thaliana
cggcccattagctcagt

SEQ ID NO: 80927 - DNA, 17 bp, Arabidopsis thaliana
cggcccccatccgcttc

SEQ ID NO: 80928 - DNA, 17 bp, Arabidopsis thaliana
cggccccgaacctcctg

SEQ ID NO: 80929 - DNA, 17 bp, Arabidopsis thaliana
cggccccgtcgtccgca

SEQ ID NO: 80930 - DNA, 17 bp, Arabidopsis thaliana
cggcccgacgatgatcc

SEQ ID NO: 80931 - DNA, 17 bp, Arabidopsis thaliana
cggcccgcctttggtgt

SEQ ID NO: 80932 - DNA, 17 bp, Arabidopsis thaliana
cggccctgccagtgtgc

SEQ ID NO: 80933 - DNA, 17 bp, Arabidopsis thaliana
cggccctgggctaaagt

SEQ ID NO: 80934 - DNA, 17 bp, Arabidopsis thaliana
cggccctgggttaaagt

SEQ ID NO: 80935 - DNA, 17 bp, Arabidopsis thaliana
cggccctgttcgtttct

SEQ ID NO: 80936 - DNA, 17 bp, Arabidopsis thaliana
cggccctgtttgtttct

SEQ ID NO: 80937 - DNA, 17 bp, Arabidopsis thaliana
cggccctttgtcgctaa

SEQ ID NO: 80938 - DNA, 17 bp, Arabidopsis thaliana
cggccgaaggcacgtct

SEQ ID NO: 80939 - DNA, 17 bp, Arabidopsis thaliana
cggccgaatcccgtagt

SEQ ID NO: 80940 - DNA, 17 bp, Arabidopsis thaliana
cggccgaatcctgtagt

SEQ ID NO: 80941 - DNA, 17 bp, Arabidopsis thaliana
cggccgacctcggtagg

SEQ ID NO: 80942 - DNA, 17 bp, Arabidopsis thaliana
cggccgagggcacggct

SEQ ID NO: 80943 - DNA, 17 bp, Arabidopsis thaliana
cggccgagggcacgtct

SEQ ID NO: 80944 - DNA, 17 bp, Arabidopsis thaliana
cggccgagtacgacctg

SEQ ID NO: 80945 - DNA, 17 bp, Arabidopsis thaliana
cggccgagtataagctt

SEQ ID NO: 80946 - DNA, 17 bp, Arabidopsis thaliana
cggccgagtgttgttgt

SEQ ID NO: 80947 - DNA, 17 bp, Arabidopsis thaliana
cggccgagttcacacat

SEQ ID NO: 80948 - DNA, 17 bp, Arabidopsis thaliana
cggccgagttcacacgt

SEQ ID NO: 80949 - DNA, 17 bp, Arabidopsis thaliana
cggccgatgtggattgg

SEQ ID NO: 80950 - DNA, 17 bp, Arabidopsis thaliana
cggccgcagtgaccgca

SEQ ID NO: 80951 - DNA, 17 bp, Arabidopsis thaliana
cggccgcatacgaagtt

SEQ ID NO: 80952 - DNA, 17 bp, Arabidopsis thaliana
cggccgcggaagacgac

SEQ ID NO: 80953 - DNA, 17 bp, Arabidopsis thaliana
cggccgcggacggactg

SEQ ID NO: 80954 - DNA, 17 bp, Arabidopsis thaliana
cggccggaacaactgcc

SEQ ID NO: 80955 - DNA, 17 bp, Arabidopsis thaliana
cggccggacggagattg

SEQ ID NO: 80956 - DNA, 17 bp, Arabidopsis thaliana
cggccggactctgacca

SEQ ID NO: 80957 - DNA, 17 bp, Arabidopsis thaliana
cggccggcttcttagag

SEQ ID NO: 80958 - DNA, 17 bp, Arabidopsis thaliana
cggccgggggacggact

SEQ ID NO: 80959 - DNA, 17 bp, Arabidopsis thaliana
cggccggtaagcttttt

SEQ ID NO: 80960 - DNA, 17 bp, Arabidopsis thaliana
cggccggtccgccttcg

SEQ ID NO: 80961 - DNA, 17 bp, Arabidopsis thaliana
cggccggtccgccttta

SEQ ID NO: 80962 - DNA, 17 bp, Arabidopsis thaliana
cggccggtccgcctttc

SEQ ID NO: 80963 - DNA, 17 bp, Arabidopsis thaliana
cggccggtccgcctttg

SEQ ID NO: 80964 - DNA, 17 bp, Arabidopsis thaliana
cggccggtccgttagat

SEQ ID NO: 80965 - DNA, 17 bp, Arabidopsis thaliana
cggccggtccgttttgg

SEQ ID NO: 80966 - DNA, 17 bp, Arabidopsis thaliana
cggccggttccgttgct

SEQ ID NO: 80967 - DNA, 17 bp, Arabidopsis thaliana
cggccgtcctggtcgac

SEQ ID NO: 80968 - DNA, 17 bp, Arabidopsis thaliana
cggccgtcggtgcagat

SEQ ID NO: 80969 - DNA, 17 bp, Arabidopsis thaliana
cggccgtctttagtagt

SEQ ID NO: 80970 - DNA, 17 bp, Arabidopsis thaliana
cggccgtctttatcagt

SEQ ID NO: 80971 - DNA, 17 bp, Arabidopsis thaliana
cggccgtgaattctttc

SEQ ID NO: 80972 - DNA, 17 bp, Arabidopsis thaliana
cggccgtggtccacaag

SEQ ID NO: 80973 - DNA, 17 bp, Arabidopsis thaliana
cggccgtttacaaggcg

SEQ ID NO: 80974 - DNA, 17 bp, Arabidopsis thaliana
cggccgtttataaggtc

SEQ ID NO: 80975 - DNA, 17 bp, Arabidopsis thaliana
cggcctaattcgacaga

SEQ ID NO: 80976 - DNA, 17 bp, Arabidopsis thaliana
cggcctagttcacacgt

SEQ ID NO: 80977 - DNA, 17 bp, Arabidopsis thaliana
cggcctatgtttgatcc

SEQ ID NO: 80978 - DNA, 17 bp, Arabidopsis thaliana
cggcctattagctcagt

SEQ ID NO: 80979 - DNA, 17 bp, Arabidopsis thaliana
cggcctcccatcccccc

SEQ ID NO: 80980 - DNA, 17 bp, Arabidopsis thaliana
cggcctcccggcagacg

SEQ ID NO: 80981 - DNA, 17 bp, Arabidopsis thaliana
cggcctcggcttgaccg

SEQ ID NO: 80982 - DNA, 17 bp, Arabidopsis thaliana
cggcctgactactctct

SEQ ID NO: 80983 - DNA, 17 bp, Arabidopsis thaliana
cggcctgagattggacg

SEQ ID NO: 80984 - DNA, 17 bp, Arabidopsis thaliana
cggcctggacctccgtc

SEQ ID NO: 80985 - DNA, 17 bp, Arabidopsis thaliana
cggcctggtataggtcg

SEQ ID NO: 80986 - DNA, 17 bp, Arabidopsis thaliana
cggcctgtagccgagtg

SEQ ID NO: 80987 - DNA, 17 bp, Arabidopsis thaliana
cggcctgtcccatccga

SEQ ID NO: 80988 - DNA, 17 bp, Arabidopsis thaliana
cggcctgtcggaacctc

SEQ ID NO: 80989 - DNA, 17 bp, Arabidopsis thaliana
cggcctgtggactcccc

SEQ ID NO: 80990 - DNA, 17 bp, Arabidopsis thaliana
cggcctgtgggctcccc

SEQ ID NO: 80991 - DNA, 17 bp, Arabidopsis thaliana
cggcctgtgggctccct

SEQ ID NO: 80992 - DNA, 17 bp, Arabidopsis thaliana
cggcctgttggacgttg

SEQ ID NO: 80993 - DNA, 17 bp, Arabidopsis thaliana
cggccttgttcgtcaac

SEQ ID NO: 80994 - DNA, 17 bp, Arabidopsis thaliana
cggccttttcgtgatct

SEQ ID NO: 80995 - DNA, 17 bp, Arabidopsis thaliana
cggccttttttcagcac

SEQ ID NO: 80996 - DNA, 17 bp, Arabidopsis thaliana
cggcgaaaatcccggcg

SEQ ID NO: 80997 - DNA, 17 bp, Arabidopsis thaliana
cggcgaaaatcccggtg

SEQ ID NO: 80998 - DNA, 17 bp, Arabidopsis thaliana
cggcgaaagcactctgc

SEQ ID NO: 80999 - DNA, 17 bp, Arabidopsis thaliana
cggcgaaatctttcaac

SEQ ID NO: 81000 - DNA, 17 bp, Arabidopsis thaliana
cggcgaacccgggcgaa

SEQ ID NO: 81001 - DNA, 17 bp, Arabidopsis thaliana
cggcgaagacgactgcg

SEQ ID NO: 81002 - DNA, 17 bp, Arabidopsis thaliana
cggcgaagcacccaccc

SEQ ID NO: 81003 - DNA, 17 bp, Arabidopsis thaliana
cggcgaagcctcacgta

SEQ ID NO: 81004 - DNA, 17 bp, Arabidopsis thaliana
cggcgaagcctccggga

SEQ ID NO: 81005 - DNA, 17 bp, Arabidopsis thaliana
cggcgaaggagaaattt

SEQ ID NO: 81006 - DNA, 17 bp, Arabidopsis thaliana
cggcgaatcgattccgg

SEQ ID NO: 81007 - DNA, 17 bp, Arabidopsis thaliana
cggcgaatctgataatg

SEQ ID NO: 81008 - DNA, 17 bp, Arabidopsis thaliana
cggcgaatggttcatca

SEQ ID NO: 81009 - DNA, 17 bp, Arabidopsis thaliana
cggcgacaaggactttg

SEQ ID NO: 81010 - DNA, 17 bp, Arabidopsis thaliana
cggcgacccttccttct

SEQ ID NO: 81011 - DNA, 17 bp, Arabidopsis thaliana
cggcgaccgaacccccc

SEQ ID NO: 81012 - DNA, 17 bp, Arabidopsis thaliana
cggcgaccgaagccccg

SEQ ID NO: 81013 - DNA, 17 bp, Arabidopsis thaliana
cggcgaccgagacatcc

SEQ ID NO: 81014 - DNA, 17 bp, Arabidopsis thaliana
cggcgaccgcggcagtt

SEQ ID NO: 81015 - DNA, 17 bp, Arabidopsis thaliana
cggcgacctctaagctt

SEQ ID NO: 81016 - DNA, 17 bp, Arabidopsis thaliana
cggcgacgaggaaaaca

SEQ ID NO: 81017 - DNA, 17 bp, Arabidopsis thaliana
cggcgacgatgggtaga

SEQ ID NO: 81018 - DNA, 17 bp, Arabidopsis thaliana
cggcgacgatggttgtc

SEQ ID NO: 81019 - DNA, 17 bp, Arabidopsis thaliana
cggcgacgcggattacg

SEQ ID NO: 81020 - DNA, 17 bp, Arabidopsis thaliana
cggcgacggagagtgag

SEQ ID NO: 81021 - DNA, 17 bp, Arabidopsis thaliana
cggcgacggagccattt

SEQ ID NO: 81022 - DNA, 17 bp, Arabidopsis thaliana
cggcgacggcaagtttg

SEQ ID NO: 81023 - DNA, 17 bp, Arabidopsis thaliana
cggcgacggcgagatca

SEQ ID NO: 81024 - DNA, 17 bp, Arabidopsis thaliana
cggcgacggcggcgagg

SEQ ID NO: 81025 - DNA, 17 bp, Arabidopsis thaliana
cggcgacggcggcgatg

SEQ ID NO: 81026 - DNA, 17 bp, Arabidopsis thaliana
cggcgacggcggcgggg

SEQ ID NO: 81027 - DNA, 17 bp, Arabidopsis thaliana
cggcgacggcggcggtg

SEQ ID NO: 81028 - DNA, 17 bp, Arabidopsis thaliana
cggcgacgggaagtttg

SEQ ID NO: 81029 - DNA, 17 bp, Arabidopsis thaliana
cggcgacggtgacaacg

SEQ ID NO: 81030 - DNA, 17 bp, Arabidopsis thaliana
cggcgacggttgatcgg

SEQ ID NO: 81031 - DNA, 17 bp, Arabidopsis thaliana
cggcgacgtggggttcg

SEQ ID NO: 81032 - DNA, 17 bp, Arabidopsis thaliana
cggcgacgtgggtggtt

SEQ ID NO: 81033 - DNA, 17 bp, Arabidopsis thaliana
cggcgacgttttgacaa

SEQ ID NO: 81034 - DNA, 17 bp, Arabidopsis thaliana
cggcgactcataggcag

SEQ ID NO: 81035 - DNA, 17 bp, Arabidopsis thaliana
cggcgactgataggcag

SEQ ID NO: 81036 - DNA, 17 bp, Arabidopsis thaliana
cggcgactgtcgctact

SEQ ID NO: 81037 - DNA, 17 bp, Arabidopsis thaliana
cggcgacttctagtgtt

SEQ ID NO: 81038 - DNA, 17 bp, Arabidopsis thaliana
cggcgacttctccggcg

SEQ ID NO: 81039 - DNA, 17 bp, Arabidopsis thaliana
cggcgactttacagtta

SEQ ID NO: 81040 - DNA, 17 bp, Arabidopsis thaliana
cggcgacttttccggcg

SEQ ID NO: 81041 - DNA, 17 bp, Arabidopsis thaliana
cggcgagacgtagcgtt

SEQ ID NO: 81042 - DNA, 17 bp, Arabidopsis thaliana
cggcgagagcacatgtc

SEQ ID NO: 81043 - DNA, 17 bp, Arabidopsis thaliana
cggcgagagcgggtcgc

SEQ ID NO: 81044 - DNA, 17 bp, Arabidopsis thaliana
cggcgagagcgggtggc

SEQ ID NO: 81045 - DNA, 17 bp, Arabidopsis thaliana
cggcgagcagcgtagat

SEQ ID NO: 81046 - DNA, 17 bp, Arabidopsis thaliana
cggcgagcgaaccggga

SEQ ID NO: 81047 - DNA, 17 bp, Arabidopsis thaliana
cggcgagctgactaagg

SEQ ID NO: 81048 - DNA, 17 bp, Arabidopsis thaliana
cggcgaggacgattctg

SEQ ID NO: 81049 - DNA, 17 bp, Arabidopsis thaliana
cggcgagggcacgtctg

SEQ ID NO: 81050 - DNA, 17 bp, Arabidopsis thaliana
cggcgagtaaactcact

SEQ ID NO: 81051 - DNA, 17 bp, Arabidopsis thaliana
cggcgagtccgaggagc

SEQ ID NO: 81052 - DNA, 17 bp, Arabidopsis thaliana
cggcgatacaccgttgg

SEQ ID NO: 81053 - DNA, 17 bp, Arabidopsis thaliana
cggcgatacgctcctcg

SEQ ID NO: 81054 - DNA, 17 bp, Arabidopsis thaliana
cggcgatacgctcctgg

SEQ ID NO: 81055 - DNA, 17 bp, Arabidopsis thaliana
cggcgatacgctggtct

SEQ ID NO: 81056 - DNA, 17 bp, Arabidopsis thaliana
cggcgatacggttgtgg

SEQ ID NO: 81057 - DNA, 17 bp, Arabidopsis thaliana
cggcgatacgtcctggt

SEQ ID NO: 81058 - DNA, 17 bp, Arabidopsis thaliana
cggcgatactctcctgg

SEQ ID NO: 81059 - DNA, 17 bp, Arabidopsis thaliana
cggcgatcatttcgttg

SEQ ID NO: 81060 - DNA, 17 bp, Arabidopsis thaliana
cggcgatctgccttctc

SEQ ID NO: 81061 - DNA, 17 bp, Arabidopsis thaliana
cggcgatgcgtcctggt

SEQ ID NO: 81062 - DNA, 17 bp, Arabidopsis thaliana
cggcgattgtggcaacg

SEQ ID NO: 81063 - DNA, 17 bp, Arabidopsis thaliana
cggcgattgttgtccaa

SEQ ID NO: 81064 - DNA, 17 bp, Arabidopsis thaliana
cggcgattttctttctc

SEQ ID NO: 81065 - DNA, 17 bp, Arabidopsis thaliana
cggcgattttggggttt

SEQ ID NO: 81066 - DNA, 17 bp, Arabidopsis thaliana
cggcgcaatttactctg

SEQ ID NO: 81067 - DNA, 17 bp, Arabidopsis thaliana
cggcgcaggagcgctcg

SEQ ID NO: 81068 - DNA, 17 bp, Arabidopsis thaliana
cggcgctgtctacgagt

SEQ ID NO: 81069 - DNA, 17 bp, Arabidopsis thaliana
cggcggaagcgtcgtcc

SEQ ID NO: 81070 - DNA, 17 bp, Arabidopsis thaliana
cggcggaagcgtcgttc

SEQ ID NO: 81071 - DNA, 17 bp, Arabidopsis thaliana
cggcggaagcgtcgttg

SEQ ID NO: 81072 - DNA, 17 bp, Arabidopsis thaliana
cggcggaccaggttgca

SEQ ID NO: 81073 - DNA, 17 bp, Arabidopsis thaliana
cggcggaccggattgct

SEQ ID NO: 81074 - DNA, 17 bp, Arabidopsis thaliana
cggcggaccttatctag

SEQ ID NO: 81075 - DNA, 17 bp, Arabidopsis thaliana
cggcggagaatccctgt

SEQ ID NO: 81076 - DNA, 17 bp, Arabidopsis thaliana
cggcggagagaacggcg

SEQ ID NO: 81077 - DNA, 17 bp, Arabidopsis thaliana
cggcggagagacagaga

SEQ ID NO: 81078 - DNA, 17 bp, Arabidopsis thaliana
cggcggagcggattaag

SEQ ID NO: 81079 - DNA, 17 bp, Arabidopsis thaliana
cggcggaggacagggaa

SEQ ID NO: 81080 - DNA, 17 bp, Arabidopsis thaliana
cggcggaggacattgtc

SEQ ID NO: 81081 - DNA, 17 bp, Arabidopsis thaliana
cggcggaggagagggaa

SEQ ID NO: 81082 - DNA, 17 bp, Arabidopsis thaliana
cggcggagggaacggcg

SEQ ID NO: 81083 - DNA, 17 bp, Arabidopsis thaliana
cggcggatggacccccc

SEQ ID NO: 81084 - DNA, 17 bp, Arabidopsis thaliana
cggcggatgtagccaag

SEQ ID NO: 81085 - DNA, 17 bp, Arabidopsis thaliana
cggcggattacggtggc

SEQ ID NO: 81086 - DNA, 17 bp, Arabidopsis thaliana
cggcggcgatggtgatt

SEQ ID NO: 81087 - DNA, 17 bp, Arabidopsis thaliana
cggcggcggagctgtgt

SEQ ID NO: 81088 - DNA, 17 bp, Arabidopsis thaliana
cggcggcgtccttagtg

SEQ ID NO: 81089 - DNA, 17 bp, Arabidopsis thaliana
cggcggctcccttttta

SEQ ID NO: 81090 - DNA, 17 bp, Arabidopsis thaliana
cggcggctgaagtttta

SEQ ID NO: 81091 - DNA, 17 bp, Arabidopsis thaliana
cggcggctgagttggtc

SEQ ID NO: 81092 - DNA, 17 bp, Arabidopsis thaliana
cggcggcttcatctaca

SEQ ID NO: 81093 - DNA, 17 bp, Arabidopsis thaliana
cggcgggaccggcgggc

SEQ ID NO: 81094 - DNA, 17 bp, Arabidopsis thaliana
cggcgggagtaactatg

SEQ ID NO: 81095 - DNA, 17 bp, Arabidopsis thaliana
cggcgggagttgagtga

SEQ ID NO: 81096 - DNA, 17 bp, Arabidopsis thaliana
cggcgggatccctcgcg

SEQ ID NO: 81097 - DNA, 17 bp, Arabidopsis thaliana
cggcgggatggaggctc

SEQ ID NO: 81098 - DNA, 17 bp, Arabidopsis thaliana
cggcgggattacctacg

SEQ ID NO: 81099 - DNA, 17 bp, Arabidopsis thaliana
cggcgggtagaatcctt

SEQ ID NO: 81100 - DNA, 17 bp, Arabidopsis thaliana
cggcgggtcgatccggg

SEQ ID NO: 81101 - DNA, 17 bp, Arabidopsis thaliana
cggcggtccgttcggtg

SEQ ID NO: 81102 - DNA, 17 bp, Arabidopsis thaliana
cggcggttatccggcgg

SEQ ID NO: 81103 - DNA, 17 bp, Arabidopsis thaliana
cggcggttcgattccgt

SEQ ID NO: 81104 - DNA, 17 bp, Arabidopsis thaliana
cggcggtttttctacag

SEQ ID NO: 81105 - DNA, 17 bp, Arabidopsis thaliana
cggcgtaagaccttgtg

SEQ ID NO: 81106 - DNA, 17 bp, Arabidopsis thaliana
cggcgtagcgcggatga

SEQ ID NO: 81107 - DNA, 17 bp, Arabidopsis thaliana
cggcgtagcgcgggtga

SEQ ID NO: 81108 - DNA, 17 bp, Arabidopsis thaliana
cggcgtatggagagagt

SEQ ID NO: 81109 - DNA, 17 bp, Arabidopsis thaliana
cggcgtatggagcgaga

SEQ ID NO: 81110 - DNA, 17 bp, Arabidopsis thaliana
cggcgtcactggtccta

SEQ ID NO: 81111 - DNA, 17 bp, Arabidopsis thaliana
cggcgtcatcagcgacc

SEQ ID NO: 81112 - DNA, 17 bp, Arabidopsis thaliana
cggcgtccatattgagc

SEQ ID NO: 81113 - DNA, 17 bp, Arabidopsis thaliana
cggcgtccggatctctg

SEQ ID NO: 81114 - DNA, 17 bp, Arabidopsis thaliana
cggcgtcggaacttctc

SEQ ID NO: 81115 - DNA, 17 bp, Arabidopsis thaliana
cggcgtcgggataccct

SEQ ID NO: 81116 - DNA, 17 bp, Arabidopsis thaliana
cggcgtctctggcagct

SEQ ID NO: 81117 - DNA, 17 bp, Arabidopsis thaliana
cggcgtgctgtccatca

SEQ ID NO: 81118 - DNA, 17 bp, Arabidopsis thaliana
cggcgtgcttatgatca

SEQ ID NO: 81119 - DNA, 17 bp, Arabidopsis thaliana
cggcgttatctttctac

SEQ ID NO: 81120 - DNA, 17 bp, Arabidopsis thaliana
cggcgttccgtaaagat

SEQ ID NO: 81121 - DNA, 17 bp, Arabidopsis thaliana
cggcgttgaaagtctgt

SEQ ID NO: 81122 - DNA, 17 bp, Arabidopsis thaliana
cggcgttgacccgttgt

SEQ ID NO: 81123 - DNA, 17 bp, Arabidopsis thaliana
cggcgttgactagtgtt

SEQ ID NO: 81124 - DNA, 17 bp, Arabidopsis thaliana
cggcgttgtagactttg

SEQ ID NO: 81125 - DNA, 17 bp, Arabidopsis thaliana
cggctaaatatccggag

SEQ ID NO: 81126 - DNA, 17 bp, Arabidopsis thaliana
cggctaaccagtctaat

SEQ ID NO: 81127 - DNA, 17 bp, Arabidopsis thaliana
cggctaacgcgtgaata

SEQ ID NO: 81128 - DNA, 17 bp, Arabidopsis thaliana
cggctaactacgtgcca

SEQ ID NO: 81129 - DNA, 17 bp, Arabidopsis thaliana
cggctaactctgtgcca

SEQ ID NO: 81130 - DNA, 17 bp, Arabidopsis thaliana
cggctaactttctccag

SEQ ID NO: 81131 - DNA, 17 bp, Arabidopsis thaliana
cggctaatccggttagt

SEQ ID NO: 81132 - DNA, 17 bp, Arabidopsis thaliana
cggctaatgcgcagtaa

SEQ ID NO: 81133 - DNA, 17 bp, Arabidopsis thaliana
cggctaatgcgcagtat

SEQ ID NO: 81134 - DNA, 17 bp, Arabidopsis thaliana
cggctaatgcggagtat

SEQ ID NO: 81135 - DNA, 17 bp, Arabidopsis thaliana
cggctacaaacgatcca

SEQ ID NO: 81136 - DNA, 17 bp, Arabidopsis thaliana
cggctacaggccgagtg

SEQ ID NO: 81137 - DNA, 17 bp, Arabidopsis thaliana
cggctaccagataattg

SEQ ID NO: 81138 - DNA, 17 bp, Arabidopsis thaliana
cggctaccgtgcgctgg

SEQ ID NO: 81139 - DNA, 17 bp, Arabidopsis thaliana
cggctaccgttatccgc

SEQ ID NO: 81140 - DNA, 17 bp, Arabidopsis thaliana
cggctacgaggcgacgg

SEQ ID NO: 81141 - DNA, 17 bp, Arabidopsis thaliana
cggctacggcaaatcag

SEQ ID NO: 81142 - DNA, 17 bp, Arabidopsis thaliana
cggctactttcgcaact

SEQ ID NO: 81143 - DNA, 17 bp, Arabidopsis thaliana
cggctagacacgctaac

SEQ ID NO: 81144 - DNA, 17 bp, Arabidopsis thaliana
cggctaggcagcagttt

SEQ ID NO: 81145 - DNA, 17 bp, Arabidopsis thaliana
cggctataattgtactt

SEQ ID NO: 81146 - DNA, 17 bp, Arabidopsis thaliana
cggctataattgtgcac

SEQ ID NO: 81147 - DNA, 17 bp, Arabidopsis thaliana
cggctatccgtttgttt

SEQ ID NO: 81148 - DNA, 17 bp, Arabidopsis thaliana
cggctatcttcggatct

SEQ ID NO: 81149 - DNA, 17 bp, Arabidopsis thaliana
cggctatgagtttcgtc

SEQ ID NO: 81150 - DNA, 17 bp, Arabidopsis thaliana
cggctatgggcggggtc

SEQ ID NO: 81151 - DNA, 17 bp, Arabidopsis thaliana
cggctattccgtagacg

SEQ ID NO: 81152 - DNA, 17 bp, Arabidopsis thaliana
cggctatttcaagagtt

SEQ ID NO: 81153 - DNA, 17 bp, Arabidopsis thaliana
cggctatttgagattgt

SEQ ID NO: 81154 - DNA, 17 bp, Arabidopsis thaliana
cggctcaagtcggctgc

SEQ ID NO: 81155 - DNA, 17 bp, Arabidopsis thaliana
cggctcactcgagacgg

SEQ ID NO: 81156 - DNA, 17 bp, Arabidopsis thaliana
cggctcagaatgtgttt

SEQ ID NO: 81157 - DNA, 17 bp, Arabidopsis thaliana
cggctcagatcaggcga

SEQ ID NO: 81158 - DNA, 17 bp, Arabidopsis thaliana
cggctcagatcaggcgc

SEQ ID NO: 81159 - DNA, 17 bp, Arabidopsis thaliana
cggctcagccggaggta

SEQ ID NO: 81160 - DNA, 17 bp, Arabidopsis thaliana
cggctcaggaccattgc

SEQ ID NO: 81161 - DNA, 17 bp, Arabidopsis thaliana
cggctcaggccactatg

SEQ ID NO: 81162 - DNA, 17 bp, Arabidopsis thaliana
cggctcaggcccaaatc

SEQ ID NO: 81163 - DNA, 17 bp, Arabidopsis thaliana
cggctcagtacaggacc

SEQ ID NO: 81164 - DNA, 17 bp, Arabidopsis thaliana
cggctcagtcggaggta

SEQ ID NO: 81165 - DNA, 17 bp, Arabidopsis thaliana
cggctcattgaccaaaa

SEQ ID NO: 81166 - DNA, 17 bp, Arabidopsis thaliana
cggctccaacgacaacg

SEQ ID NO: 81167 - DNA, 17 bp, Arabidopsis thaliana
cggctcccactgtggtc

SEQ ID NO: 81168 - DNA, 17 bp, Arabidopsis thaliana
cggctcccatggttggc

SEQ ID NO: 81169 - DNA, 17 bp, Arabidopsis thaliana
cggctcccggtaggacc

SEQ ID NO: 81170 - DNA, 17 bp, Arabidopsis thaliana
cggctccgggcgatttc

SEQ ID NO: 81171 - DNA, 17 bp, Arabidopsis thaliana
cggctcctccttctttc

SEQ ID NO: 81172 - DNA, 17 bp, Arabidopsis thaliana
cggctccttctttgacg

SEQ ID NO: 81173 - DNA, 17 bp, Arabidopsis thaliana
cggctcctttatgatgt

SEQ ID NO: 81174 - DNA, 17 bp, Arabidopsis thaliana
cggctcgaaagtgcgat

SEQ ID NO: 81175 - DNA, 17 bp, Arabidopsis thaliana
cggctcgagtccgcttt

SEQ ID NO: 81176 - DNA, 17 bp, Arabidopsis thaliana
cggctcgattcccgcta

SEQ ID NO: 81177 - DNA, 17 bp, Arabidopsis thaliana
cggctcgatttaggtat

SEQ ID NO: 81178 - DNA, 17 bp, Arabidopsis thaliana
cggctcgcagtcatcac

SEQ ID NO: 81179 - DNA, 17 bp, Arabidopsis thaliana
cggctcgccagtagtag

SEQ ID NO: 81180 - DNA, 17 bp, Arabidopsis thaliana
cggctcggaagtgcgat

SEQ ID NO: 81181 - DNA, 17 bp, Arabidopsis thaliana
cggctctactctccacg

SEQ ID NO: 81182 - DNA, 17 bp, Arabidopsis thaliana
cggctctatgcgctgct

SEQ ID NO: 81183 - DNA, 17 bp, Arabidopsis thaliana
cggctctctcgggagcc

SEQ ID NO: 81184 - DNA, 17 bp, Arabidopsis thaliana
cggctctctcgggagct

SEQ ID NO: 81185 - DNA, 17 bp, Arabidopsis thaliana
cggctctctgtgggttg

SEQ ID NO: 81186 - DNA, 17 bp, Arabidopsis thaliana
cggctctgataccaatt

SEQ ID NO: 81187 - DNA, 17 bp, Arabidopsis thaliana
cggctctgatgttggct

SEQ ID NO: 81188 - DNA, 17 bp, Arabidopsis thaliana
cggctctgcgcataagt

SEQ ID NO: 81189 - DNA, 17 bp, Arabidopsis thaliana
cggctctgctatgcgct

SEQ ID NO: 81190 - DNA, 17 bp, Arabidopsis thaliana
cggctctgggtgaaggc

SEQ ID NO: 81191 - DNA, 17 bp, Arabidopsis thaliana
cggctctggttgctcgt

SEQ ID NO: 81192 - DNA, 17 bp, Arabidopsis thaliana
cggctctgtcggacggg

SEQ ID NO: 81193 - DNA, 17 bp, Arabidopsis thaliana
cggctctgtgacggagt

SEQ ID NO: 81194 - DNA, 17 bp, Arabidopsis thaliana
cggctcttcctatcatt

SEQ ID NO: 81195 - DNA, 17 bp, Arabidopsis thaliana
cggctcttggccgagtg

SEQ ID NO: 81196 - DNA, 17 bp, Arabidopsis thaliana
cggctctttgccgagtg

SEQ ID NO: 81197 - DNA, 17 bp, Arabidopsis thaliana
cggctgaacctccggag

SEQ ID NO: 81198 - DNA, 17 bp, Arabidopsis thaliana
cggctgacagtgacagg

SEQ ID NO: 81199 - DNA, 17 bp, Arabidopsis thaliana
cggctgaggcggcggag

SEQ ID NO: 81200 - DNA, 17 bp, Arabidopsis thaliana
cggctgaggcggggacg

SEQ ID NO: 81201 - DNA, 17 bp, Arabidopsis thaliana
cggctgatagggtagtc

SEQ ID NO: 81202 - DNA, 17 bp, Arabidopsis thaliana
cggctgatccggtcagc

SEQ ID NO: 81203 - DNA, 17 bp, Arabidopsis thaliana
cggctgcagcttcaatt

SEQ ID NO: 81204 - DNA, 17 bp, Arabidopsis thaliana
cggctgcatttctaact

SEQ ID NO: 81205 - DNA, 17 bp, Arabidopsis thaliana
cggctgcggttacggtt

SEQ ID NO: 81206 - DNA, 17 bp, Arabidopsis thaliana
cggctgctaataccccg

SEQ ID NO: 81207 - DNA, 17 bp, Arabidopsis thaliana
cggctgctgagatagag

SEQ ID NO: 81208 - DNA, 17 bp, Arabidopsis thaliana
cggctgctgaggtagag

SEQ ID NO: 81209 - DNA, 17 bp, Arabidopsis thaliana
cggctggaaatcacggt

SEQ ID NO: 81210 - DNA, 17 bp, Arabidopsis thaliana
cggctggaagagcaccg

SEQ ID NO: 81211 - DNA, 17 bp, Arabidopsis thaliana
cggctggaggccgagtg

SEQ ID NO: 81212 - DNA, 17 bp, Arabidopsis thaliana
cggctggcggactggtc

SEQ ID NO: 81213 - DNA, 17 bp, Arabidopsis thaliana
cggctggggactgacca

SEQ ID NO: 81214 - DNA, 17 bp, Arabidopsis thaliana
cggctggggactgagca

SEQ ID NO: 81215 - DNA, 17 bp, Arabidopsis thaliana
cggctgtagccgttatc

SEQ ID NO: 81216 - DNA, 17 bp, Arabidopsis thaliana
cggctgtcagcggacta

SEQ ID NO: 81217 - DNA, 17 bp, Arabidopsis thaliana
cggctgtcagcggactg

SEQ ID NO: 81218 - DNA, 17 bp, Arabidopsis thaliana
cggctgtccagtgagct

SEQ ID NO: 81219 - DNA, 17 bp, Arabidopsis thaliana
cggctgtctttcggttt

SEQ ID NO: 81220 - DNA, 17 bp, Arabidopsis thaliana
cggctgtgttacggtga

SEQ ID NO: 81221 - DNA, 17 bp, Arabidopsis thaliana
cggcttaaaccagagga

SEQ ID NO: 81222 - DNA, 17 bp, Arabidopsis thaliana
cggcttaactctgttca

SEQ ID NO: 81223 - DNA, 17 bp, Arabidopsis thaliana
cggcttaagccattagg

SEQ ID NO: 81224 - DNA, 17 bp, Arabidopsis thaliana
cggcttaatccgtcagc

SEQ ID NO: 81225 - DNA, 17 bp, Arabidopsis thaliana
cggcttacacgtgtcac

SEQ ID NO: 81226 - DNA, 17 bp, Arabidopsis thaliana
cggcttagaattctcct

SEQ ID NO: 81227 - DNA, 17 bp, Arabidopsis thaliana
cggcttagatctttgct

SEQ ID NO: 81228 - DNA, 17 bp, Arabidopsis thaliana
cggcttagccggaggta

SEQ ID NO: 81229 - DNA, 17 bp, Arabidopsis thaliana
cggcttaggccctgttc

SEQ ID NO: 81230 - DNA, 17 bp, Arabidopsis thaliana
cggcttagtggtgttgt

SEQ ID NO: 81231 - DNA, 17 bp, Arabidopsis thaliana
cggcttatgttttcgga

SEQ ID NO: 81232 - DNA, 17 bp, Arabidopsis thaliana
cggcttcagacgtcctg

SEQ ID NO: 81233 - DNA, 17 bp, Arabidopsis thaliana
cggcttcccctgggggt

SEQ ID NO: 81234 - DNA, 17 bp, Arabidopsis thaliana
cggcttcctcgggagct

SEQ ID NO: 81235 - DNA, 17 bp, Arabidopsis thaliana
cggcttcgcttttgggt

SEQ ID NO: 81236 - DNA, 17 bp, Arabidopsis thaliana
cggcttcggttcttttg

SEQ ID NO: 81237 - DNA, 17 bp, Arabidopsis thaliana
cggcttctatcagatgt

SEQ ID NO: 81238 - DNA, 17 bp, Arabidopsis thaliana
cggcttctccggttatc

SEQ ID NO: 81239 - DNA, 17 bp, Arabidopsis thaliana
cggcttctctggttatc

SEQ ID NO: 81240 - DNA, 17 bp, Arabidopsis thaliana
cggcttcttagagggac

SEQ ID NO: 81241 - DNA, 17 bp, Arabidopsis thaliana
cggcttgagtaacgcaa

SEQ ID NO: 81242 - DNA, 17 bp, Arabidopsis thaliana
cggcttgagtaacgcca

SEQ ID NO: 81243 - DNA, 17 bp, Arabidopsis thaliana
cggcttgccgcccttgc

SEQ ID NO: 81244 - DNA, 17 bp, Arabidopsis thaliana
cggcttgccttttcctt

SEQ ID NO: 81245 - DNA, 17 bp, Arabidopsis thaliana
cggcttggttcacactt

SEQ ID NO: 81246 - DNA, 17 bp, Arabidopsis thaliana
cggcttgtcccttcgct

SEQ ID NO: 81247 - DNA, 17 bp, Arabidopsis thaliana
cggcttgtcccttcggt

SEQ ID NO: 81248 - DNA, 17 bp, Arabidopsis thaliana
cggcttgtcccttcgtt

SEQ ID NO: 81249 - DNA, 17 bp, Arabidopsis thaliana
cggcttgtctttctgta

SEQ ID NO: 81250 - DNA, 17 bp, Arabidopsis thaliana
cggcttgtgcggcaagc

SEQ ID NO: 81251 - DNA, 17 bp, Arabidopsis thaliana
cggcttgtgggctcccc

SEQ ID NO: 81252 - DNA, 17 bp, Arabidopsis thaliana
cggcttgtgtttcggtc

SEQ ID NO: 81253 - DNA, 17 bp, Arabidopsis thaliana
cggcttgttccttcgtt

SEQ ID NO: 81254 - DNA, 17 bp, Arabidopsis thaliana
cggctttaggccgagtg

SEQ ID NO: 81255 - DNA, 17 bp, Arabidopsis thaliana
cggctttcacatggatg

SEQ ID NO: 81256 - DNA, 17 bp, Arabidopsis thaliana
cggctttcactatttcg

SEQ ID NO: 81257 - DNA, 17 bp, Arabidopsis thaliana
cggctttcactatttct

SEQ ID NO: 81258 - DNA, 17 bp, Arabidopsis thaliana
cggctttctcagggggg

SEQ ID NO: 81259 - DNA, 17 bp, Arabidopsis thaliana
cggctttctcatcgtat

SEQ ID NO: 81260 - DNA, 17 bp, Arabidopsis thaliana
cggctttggaagattct

SEQ ID NO: 81261 - DNA, 17 bp, Arabidopsis thaliana
cggctttggacgtttgt

SEQ ID NO: 81262 - DNA, 17 bp, Arabidopsis thaliana
cggctttgtgacggagt

SEQ ID NO: 81263 - DNA, 17 bp, Arabidopsis thaliana
cggctttgttgcctttg

SEQ ID NO: 81264 - DNA, 17 bp, Arabidopsis thaliana
cggcttttcccttccct

SEQ ID NO: 81265 - DNA, 17 bp, Arabidopsis thaliana
cggcttttctggatgtt

SEQ ID NO: 81266 - DNA, 17 bp, Arabidopsis thaliana
cggctttttcagcgagg

SEQ ID NO: 81267 - DNA, 17 bp, Arabidopsis thaliana
cgggaaaaggattggct

SEQ ID NO: 81268 - DNA, 17 bp, Arabidopsis thaliana
cgggaaaagtgatgact

SEQ ID NO: 81269 - DNA, 17 bp, Arabidopsis thaliana
cgggaaaagtgcggtgc

SEQ ID NO: 81270 - DNA, 17 bp, Arabidopsis thaliana
cgggaaaatcacgggtt

SEQ ID NO: 81271 - DNA, 17 bp, Arabidopsis thaliana
cgggaaatactcgtgtt

SEQ ID NO: 81272 - DNA, 17 bp, Arabidopsis thaliana
cgggaaatttgtttttg

SEQ ID NO: 81273 - DNA, 17 bp, Arabidopsis thaliana
cgggaacagagtcccca

SEQ ID NO: 81274 - DNA, 17 bp, Arabidopsis thaliana
cgggaacaggagtggct

SEQ ID NO: 81275 - DNA, 17 bp, Arabidopsis thaliana
cgggaacctaatcgacc

SEQ ID NO: 81276 - DNA, 17 bp, Arabidopsis thaliana
cgggaacctaatcgcct

SEQ ID NO: 81277 - DNA, 17 bp, Arabidopsis thaliana
cgggaactcctcgtgtt

SEQ ID NO: 81278 - DNA, 17 bp, Arabidopsis thaliana
cgggaagcctaatcaac

SEQ ID NO: 81279 - DNA, 17 bp, Arabidopsis thaliana
cgggaagctcatcgcgg

SEQ ID NO: 81280 - DNA, 17 bp, Arabidopsis thaliana
cgggaagctcgaccagt

SEQ ID NO: 81281 - DNA, 17 bp, Arabidopsis thaliana
cgggaagtaatcgctgc

SEQ ID NO: 81282 - DNA, 17 bp, Arabidopsis thaliana
cgggaagtccgcgtgtt

SEQ ID NO: 81283 - DNA, 17 bp, Arabidopsis thaliana
cgggaagtcctcgtgct

SEQ ID NO: 81284 - DNA, 17 bp, Arabidopsis thaliana
cgggaagtcctcgtggt

SEQ ID NO: 81285 - DNA, 17 bp, Arabidopsis thaliana
cgggaagtcctcgtgtt

SEQ ID NO: 81286 - DNA, 17 bp, Arabidopsis thaliana
cgggaagtcctcgtttt

SEQ ID NO: 81287 - DNA, 17 bp, Arabidopsis thaliana
cgggaagtcctctgttg

SEQ ID NO: 81288 - DNA, 17 bp, Arabidopsis thaliana
cgggaagtccttgtgtt

SEQ ID NO: 81289 - DNA, 17 bp, Arabidopsis thaliana
cgggaagtcgtgttgca

SEQ ID NO: 81290 - DNA, 17 bp, Arabidopsis thaliana
cgggaagtcttcgtgtt

SEQ ID NO: 81291 - DNA, 17 bp, Arabidopsis thaliana
cgggaagtgaatcggat

SEQ ID NO: 81292 - DNA, 17 bp, Arabidopsis thaliana
cgggaagtgcgccggtc

SEQ ID NO: 81293 - DNA, 17 bp, Arabidopsis thaliana
cgggaagtgctcgtgtt

SEQ ID NO: 81294 - DNA, 17 bp, Arabidopsis thaliana
cgggaatatgaccagtt

SEQ ID NO: 81295 - DNA, 17 bp, Arabidopsis thaliana
cgggaatgtagtggcca

SEQ ID NO: 81296 - DNA, 17 bp, Arabidopsis thaliana
cgggaattacgggcttc

SEQ ID NO: 81297 - DNA, 17 bp, Arabidopsis thaliana
cgggaattacttcgaga

SEQ ID NO: 81298 - DNA, 17 bp, Arabidopsis thaliana
cgggaatttggacccgc

SEQ ID NO: 81299 - DNA, 17 bp, Arabidopsis thaliana
cgggacaaagggtcgcg

SEQ ID NO: 81300 - DNA, 17 bp, Arabidopsis thaliana
cgggacaagtgcggtgc

SEQ ID NO: 81301 - DNA, 17 bp, Arabidopsis thaliana
cgggacagacaatgtgg

SEQ ID NO: 81302 - DNA, 17 bp, Arabidopsis thaliana
cgggacagacagtgtgg

SEQ ID NO: 81303 - DNA, 17 bp, Arabidopsis thaliana
cgggacagattggcggg

SEQ ID NO: 81304 - DNA, 17 bp, Arabidopsis thaliana
cgggacagcctaggcgg

SEQ ID NO: 81305 - DNA, 17 bp, Arabidopsis thaliana
cgggacaggttggcggg

SEQ ID NO: 81306 - DNA, 17 bp, Arabidopsis thaliana
cgggacaggtttggcgg

SEQ ID NO: 81307 - DNA, 17 bp, Arabidopsis thaliana
cgggacatgtttggcgg

SEQ ID NO: 81308 - DNA, 17 bp, Arabidopsis thaliana
cgggaccagatttcgac

SEQ ID NO: 81309 - DNA, 17 bp, Arabidopsis thaliana
cgggacccgaaagatgg

SEQ ID NO: 81310 - DNA, 17 bp, Arabidopsis thaliana
cgggaccggtcacagca

SEQ ID NO: 81311 - DNA, 17 bp, Arabidopsis thaliana
cgggaccggtgccgccg

SEQ ID NO: 81312 - DNA, 17 bp, Arabidopsis thaliana
cgggacctctcgaccac

SEQ ID NO: 81313 - DNA, 17 bp, Arabidopsis thaliana
cgggacctttgtgtgat

SEQ ID NO: 81314 - DNA, 17 bp, Arabidopsis thaliana
cgggacgaagggtcgcg

SEQ ID NO: 81315 - DNA, 17 bp, Arabidopsis thaliana
cgggacgagtttggcag

SEQ ID NO: 81316 - DNA, 17 bp, Arabidopsis thaliana
cgggacgagtttggtaa

SEQ ID NO: 81317 - DNA, 17 bp, Arabidopsis thaliana
cgggacgatgacacgcg

SEQ ID NO: 81318 - DNA, 17 bp, Arabidopsis thaliana
cgggacggattggcggg

SEQ ID NO: 81319 - DNA, 17 bp, Arabidopsis thaliana
cgggacggatttggcag

SEQ ID NO: 81320 - DNA, 17 bp, Arabidopsis thaliana
cgggacggatttggcga

SEQ ID NO: 81321 - DNA, 17 bp, Arabidopsis thaliana
cgggacggatttggcgg

SEQ ID NO: 81322 - DNA, 17 bp, Arabidopsis thaliana
cgggacggatttgggga

SEQ ID NO: 81323 - DNA, 17 bp, Arabidopsis thaliana
cgggacgggttgacggg

SEQ ID NO: 81324 - DNA, 17 bp, Arabidopsis thaliana
cgggacgggttggcgga

SEQ ID NO: 81325 - DNA, 17 bp, Arabidopsis thaliana
cgggacgggttggcggc

SEQ ID NO: 81326 - DNA, 17 bp, Arabidopsis thaliana
cgggacgggttggcggg

SEQ ID NO: 81327 - DNA, 17 bp, Arabidopsis thaliana
cgggacgggtttggcaa

SEQ ID NO: 81328 - DNA, 17 bp, Arabidopsis thaliana
cgggacgggtttggcag

SEQ ID NO: 81329 - DNA, 17 bp, Arabidopsis thaliana
cgggacgggtttggcgg

SEQ ID NO: 81330 - DNA, 17 bp, Arabidopsis thaliana
cgggacgggtttggcgt

SEQ ID NO: 81331 - DNA, 17 bp, Arabidopsis thaliana
cgggacgtagctcagct

SEQ ID NO: 81332 - DNA, 17 bp, Arabidopsis thaliana
cgggacgtgccggagtg

SEQ ID NO: 81333 - DNA, 17 bp, Arabidopsis thaliana
cgggacgtggcggtggg

SEQ ID NO: 81334 - DNA, 17 bp, Arabidopsis thaliana
cgggacgtggcggttga

SEQ ID NO: 81335 - DNA, 17 bp, Arabidopsis thaliana
cgggactcctcactatc

SEQ ID NO: 81336 - DNA, 17 bp, Arabidopsis thaliana
cgggactgattgggttt

SEQ ID NO: 81337 - DNA, 17 bp, Arabidopsis thaliana
cgggactgggtctcaca

SEQ ID NO: 81338 - DNA, 17 bp, Arabidopsis thaliana
cgggacttcgtcgttag

SEQ ID NO: 81339 - DNA, 17 bp, Arabidopsis thaliana
cgggacttgttgttcgg

SEQ ID NO: 81340 - DNA, 17 bp, Arabidopsis thaliana
cgggactttgcttctct

SEQ ID NO: 81341 - DNA, 17 bp, Arabidopsis thaliana
cgggagaaatacggtgc

SEQ ID NO: 81342 - DNA, 17 bp, Arabidopsis thaliana
cgggagaaatgtggtgc

SEQ ID NO: 81343 - DNA, 17 bp, Arabidopsis thaliana
cgggagaacggtctatg

SEQ ID NO: 81344 - DNA, 17 bp, Arabidopsis thaliana
cgggagaacggtctatt

SEQ ID NO: 81345 - DNA, 17 bp, Arabidopsis thaliana
cgggagaaggggtgcct

SEQ ID NO: 81346 - DNA, 17 bp, Arabidopsis thaliana
cgggagaagtgcgatac

SEQ ID NO: 81347 - DNA, 17 bp, Arabidopsis thaliana
cgggagaagtgcggtgc

SEQ ID NO: 81348 - DNA, 17 bp, Arabidopsis thaliana
cgggagaagtgcggtgg

SEQ ID NO: 81349 - DNA, 17 bp, Arabidopsis thaliana
cgggagagagagcgtcg

SEQ ID NO: 81350 - DNA, 17 bp, Arabidopsis thaliana
cgggagagatgtcagta

SEQ ID NO: 81351 - DNA, 17 bp, Arabidopsis thaliana
cgggagcagagtcccca

SEQ ID NO: 81352 - DNA, 17 bp, Arabidopsis thaliana
cgggagccgagatgatt

SEQ ID NO: 81353 - DNA, 17 bp, Arabidopsis thaliana
cgggagcgagagagagg

SEQ ID NO: 81354 - DNA, 17 bp, Arabidopsis thaliana
cgggagctttccccggg

SEQ ID NO: 81355 - DNA, 17 bp, Arabidopsis thaliana
cgggaggactgtattgc

SEQ ID NO: 81356 - DNA, 17 bp, Arabidopsis thaliana
cgggaggagtactactc

SEQ ID NO: 81357 - DNA, 17 bp, Arabidopsis thaliana
cgggaggagtgcggtgc

SEQ ID NO: 81358 - DNA, 17 bp, Arabidopsis thaliana
cgggaggatttgatcca

SEQ ID NO: 81359 - DNA, 17 bp, Arabidopsis thaliana
cgggagggaagcggatg

SEQ ID NO: 81360 - DNA, 17 bp, Arabidopsis thaliana
cgggagggaagcggggg

SEQ ID NO: 81361 - DNA, 17 bp, Arabidopsis thaliana
cgggagggtgctatgct

SEQ ID NO: 81362 - DNA, 17 bp, Arabidopsis thaliana
cgggagtaactatgact

SEQ ID NO: 81363 - DNA, 17 bp, Arabidopsis thaliana
cgggagtttgcggaaac

SEQ ID NO: 81364 - DNA, 17 bp, Arabidopsis thaliana
cgggataacggacacct

SEQ ID NO: 81365 - DNA, 17 bp, Arabidopsis thaliana
cgggataagaatttgtt

SEQ ID NO: 81366 - DNA, 17 bp, Arabidopsis thaliana
cgggataatcgatactc

SEQ ID NO: 81367 - DNA, 17 bp, Arabidopsis thaliana
cgggatacagtgtttaa

SEQ ID NO: 81368 - DNA, 17 bp, Arabidopsis thaliana
cgggatacgcgttagag

SEQ ID NO: 81369 - DNA, 17 bp, Arabidopsis thaliana
cgggatatgtttttttg

SEQ ID NO: 81370 - DNA, 17 bp, Arabidopsis thaliana
cgggatcaccaggagag

SEQ ID NO: 81371 - DNA, 17 bp, Arabidopsis thaliana
cgggatcactgccgaaa

SEQ ID NO: 81372 - DNA, 17 bp, Arabidopsis thaliana
cgggatcactgccggaa

SEQ ID NO: 81373 - DNA, 17 bp, Arabidopsis thaliana
cgggatcatgaaaccgg

SEQ ID NO: 81374 - DNA, 17 bp, Arabidopsis thaliana
cgggatccctcacgggt

SEQ ID NO: 81375 - DNA, 17 bp, Arabidopsis thaliana
cgggatccctcgcacgc

SEQ ID NO: 81376 - DNA, 17 bp, Arabidopsis thaliana
cgggatccctcgcgggt

SEQ ID NO: 81377 - DNA, 17 bp, Arabidopsis thaliana
cgggatccctcgctggt

SEQ ID NO: 81378 - DNA, 17 bp, Arabidopsis thaliana
cgggatccctcgtgggt

SEQ ID NO: 81379 - DNA, 17 bp, Arabidopsis thaliana
cgggatccctcgtggtg

SEQ ID NO: 81380 - DNA, 17 bp, Arabidopsis thaliana
cgggatcccttgcgggt

SEQ ID NO: 81381 - DNA, 17 bp, Arabidopsis thaliana
cgggatcctgaaaccgg

SEQ ID NO: 81382 - DNA, 17 bp, Arabidopsis thaliana
cgggatcgagtatttcc

SEQ ID NO: 81383 - DNA, 17 bp, Arabidopsis thaliana
cgggatcgtctgaatga

SEQ ID NO: 81384 - DNA, 17 bp, Arabidopsis thaliana
cgggatctccagaaact

SEQ ID NO: 81385 - DNA, 17 bp, Arabidopsis thaliana
cgggatctctctctgga

SEQ ID NO: 81386 - DNA, 17 bp, Arabidopsis thaliana
cgggatctgattctccg

SEQ ID NO: 81387 - DNA, 17 bp, Arabidopsis thaliana
cgggatgaaccggaagc

SEQ ID NO: 81388 - DNA, 17 bp, Arabidopsis thaliana
cgggatgaatgcggtgc

SEQ ID NO: 81389 - DNA, 17 bp, Arabidopsis thaliana
cgggatgatgatcgacg

SEQ ID NO: 81390 - DNA, 17 bp, Arabidopsis thaliana
cgggatgcctaggcgcg

SEQ ID NO: 81391 - DNA, 17 bp, Arabidopsis thaliana
cgggatggatttggcga

SEQ ID NO: 81392 - DNA, 17 bp, Arabidopsis thaliana
cgggatggctcagatct

SEQ ID NO: 81393 - DNA, 17 bp, Arabidopsis thaliana
cgggatgggtttggcag

SEQ ID NO: 81394 - DNA, 17 bp, Arabidopsis thaliana
cgggatgtagctcaaat

SEQ ID NO: 81395 - DNA, 17 bp, Arabidopsis thaliana
cgggatgtagctcagat

SEQ ID NO: 81396 - DNA, 17 bp, Arabidopsis thaliana
cgggatgtagctcagca

SEQ ID NO: 81397 - DNA, 17 bp, Arabidopsis thaliana
cgggatgtagctcagct

SEQ ID NO: 81398 - DNA, 17 bp, Arabidopsis thaliana
cgggatgtatgcaattt

SEQ ID NO: 81399 - DNA, 17 bp, Arabidopsis thaliana
cgggatgtcgtttccac

SEQ ID NO: 81400 - DNA, 17 bp, Arabidopsis thaliana
cgggatgtcgttttcac

SEQ ID NO: 81401 - DNA, 17 bp, Arabidopsis thaliana
cgggatgttgtatggac

SEQ ID NO: 81402 - DNA, 17 bp, Arabidopsis thaliana
cgggatgttgtatggat

SEQ ID NO: 81403 - DNA, 17 bp, Arabidopsis thaliana
cgggatgttgtgtccga

SEQ ID NO: 81404 - DNA, 17 bp, Arabidopsis thaliana
cgggattacccgctgag

SEQ ID NO: 81405 - DNA, 17 bp, Arabidopsis thaliana
cgggattacgcctctgt

SEQ ID NO: 81406 - DNA, 17 bp, Arabidopsis thaliana
cgggattagatggtagg

SEQ ID NO: 81407 - DNA, 17 bp, Arabidopsis thaliana
cgggattatcaccggat

SEQ ID NO: 81408 - DNA, 17 bp, Arabidopsis thaliana
cgggattcagcccagaa

SEQ ID NO: 81409 - DNA, 17 bp, Arabidopsis thaliana
cgggattcagcccagca

SEQ ID NO: 81410 - DNA, 17 bp, Arabidopsis thaliana
cgggattcccgctaccc

SEQ ID NO: 81411 - DNA, 17 bp, Arabidopsis thaliana
cgggattcgggcaagcg

SEQ ID NO: 81412 - DNA, 17 bp, Arabidopsis thaliana
cgggattgaaggtcgcg

SEQ ID NO: 81413 - DNA, 17 bp, Arabidopsis thaliana
cgggattggaccggacg

SEQ ID NO: 81414 - DNA, 17 bp, Arabidopsis thaliana
cgggatttcccggctgg

SEQ ID NO: 81415 - DNA, 17 bp, Arabidopsis thaliana
cgggatttggggaagcg

SEQ ID NO: 81416 - DNA, 17 bp, Arabidopsis thaliana
cgggattttcgccggac

SEQ ID NO: 81417 - DNA, 17 bp, Arabidopsis thaliana
cgggattttgcttctct

SEQ ID NO: 81418 - DNA, 17 bp, Arabidopsis thaliana
cgggattttggcaaggt

SEQ ID NO: 81419 - DNA, 17 bp, Arabidopsis thaliana
cgggcaaagccagaccc

SEQ ID NO: 81420 - DNA, 17 bp, Arabidopsis thaliana
cgggcacaaacacaagc

SEQ ID NO: 81421 - DNA, 17 bp, Arabidopsis thaliana
cgggcacgtcagccggc

SEQ ID NO: 81422 - DNA, 17 bp, Arabidopsis thaliana
cgggcacgtctgcctgc

SEQ ID NO: 81423 - DNA, 17 bp, Arabidopsis thaliana
cgggcacgtctgcctgg

SEQ ID NO: 81424 - DNA, 17 bp, Arabidopsis thaliana
cgggcactttcgtgatt

SEQ ID NO: 81425 - DNA, 17 bp, Arabidopsis thaliana
cgggcagagacctttgg

SEQ ID NO: 81426 - DNA, 17 bp, Arabidopsis thaliana
cgggcagagcccgcgtc

SEQ ID NO: 81427 - DNA, 17 bp, Arabidopsis thaliana
cgggcagaggcctttgg

SEQ ID NO: 81428 - DNA, 17 bp, Arabidopsis thaliana
cgggcagagttttcgac

SEQ ID NO: 81429 - DNA, 17 bp, Arabidopsis thaliana
cgggcagcggcagcggg

SEQ ID NO: 81430 - DNA, 17 bp, Arabidopsis thaliana
cgggcagcggcagcggt

SEQ ID NO: 81431 - DNA, 17 bp, Arabidopsis thaliana
cgggcagctcggaccgt

SEQ ID NO: 81432 - DNA, 17 bp, Arabidopsis thaliana
cgggcaggtcggagaga

SEQ ID NO: 81433 - DNA, 17 bp, Arabidopsis thaliana
cgggcatatccgctgct

SEQ ID NO: 81434 - DNA, 17 bp, Arabidopsis thaliana
cgggcatgacgttaatt

SEQ ID NO: 81435 - DNA, 17 bp, Arabidopsis thaliana
cgggcatggaggatgac

SEQ ID NO: 81436 - DNA, 17 bp, Arabidopsis thaliana
cgggcatggcacgtctg

SEQ ID NO: 81437 - DNA, 17 bp, Arabidopsis thaliana
cgggcatgggattgatg

SEQ ID NO: 81438 - DNA, 17 bp, Arabidopsis thaliana
cgggcattcgtgatttg

SEQ ID NO: 81439 - DNA, 17 bp, Arabidopsis thaliana
cgggcattctcgtgatt

SEQ ID NO: 81440 - DNA, 17 bp, Arabidopsis thaliana
cgggcatttccgtgatc

SEQ ID NO: 81441 - DNA, 17 bp, Arabidopsis thaliana
cgggcattttcgtaatt

SEQ ID NO: 81442 - DNA, 17 bp, Arabidopsis thaliana
cgggcattttcgtgact

SEQ ID NO: 81443 - DNA, 17 bp, Arabidopsis thaliana
cgggcattttcgtgatc

SEQ ID NO: 81444 - DNA, 17 bp, Arabidopsis thaliana
cgggcattttcgtgatg

SEQ ID NO: 81445 - DNA, 17 bp, Arabidopsis thaliana
cgggcattttcgtgatt

SEQ ID NO: 81446 - DNA, 17 bp, Arabidopsis thaliana
cgggcattttcgtgctc

SEQ ID NO: 81447 - DNA, 17 bp, Arabidopsis thaliana
cgggcattttcgtgttt

SEQ ID NO: 81448 - DNA, 17 bp, Arabidopsis thaliana
cgggcattttcgttatt

SEQ ID NO: 81449 - DNA, 17 bp, Arabidopsis thaliana
cgggcatttttgtgatt

SEQ ID NO: 81450 - DNA, 17 bp, Arabidopsis thaliana
cgggcccatagctcagt

SEQ ID NO: 81451 - DNA, 17 bp, Arabidopsis thaliana
cgggccgaatgccataa

SEQ ID NO: 81452 - DNA, 17 bp, Arabidopsis thaliana
cgggccgatggaccggt

SEQ ID NO: 81453 - DNA, 17 bp, Arabidopsis thaliana
cgggcgaaagtttggga

SEQ ID NO: 81454 - DNA, 17 bp, Arabidopsis thaliana
cgggcgaagccaaaacg

SEQ ID NO: 81455 - DNA, 17 bp, Arabidopsis thaliana
cgggcgaatgctcgatc

SEQ ID NO: 81456 - DNA, 17 bp, Arabidopsis thaliana
cgggcgagagaccgata

SEQ ID NO: 81457 - DNA, 17 bp, Arabidopsis thaliana
cgggcgaggttaatttg

SEQ ID NO: 81458 - DNA, 17 bp, Arabidopsis thaliana
cgggcgattaggttact

SEQ ID NO: 81459 - DNA, 17 bp, Arabidopsis thaliana
cgggcgattaggttatt

SEQ ID NO: 81460 - DNA, 17 bp, Arabidopsis thaliana
cgggcgcacctccggct

SEQ ID NO: 81461 - DNA, 17 bp, Arabidopsis thaliana
cgggcgccccgccggga

SEQ ID NO: 81462 - DNA, 17 bp, Arabidopsis thaliana
cgggcgctacctgattt

SEQ ID NO: 81463 - DNA, 17 bp, Arabidopsis thaliana
cgggcgcttagccggag

SEQ ID NO: 81464 - DNA, 17 bp, Arabidopsis thaliana
cgggcggaggacattgt

SEQ ID NO: 81465 - DNA, 17 bp, Arabidopsis thaliana
cgggcggcatcccgccc

SEQ ID NO: 81466 - DNA, 17 bp, Arabidopsis thaliana
cgggcggccgtcggtgc

SEQ ID NO: 81467 - DNA, 17 bp, Arabidopsis thaliana
cgggcggcgaaccaccc

SEQ ID NO: 81468 - DNA, 17 bp, Arabidopsis thaliana
cgggcggcgctgtctac

SEQ ID NO: 81469 - DNA, 17 bp, Arabidopsis thaliana
cgggcggctgatggacc

SEQ ID NO: 81470 - DNA, 17 bp, Arabidopsis thaliana
cgggcggcttcgcctcg

SEQ ID NO: 81471 - DNA, 17 bp, Arabidopsis thaliana
cgggcgggcacgtctgc

SEQ ID NO: 81472 - DNA, 17 bp, Arabidopsis thaliana
cgggcgggcgggcgggc

SEQ ID NO: 81473 - DNA, 17 bp, Arabidopsis thaliana
cgggcggggatcgttac

SEQ ID NO: 81474 - DNA, 17 bp, Arabidopsis thaliana
cgggcgggtgacccggg

SEQ ID NO: 81475 - DNA, 17 bp, Arabidopsis thaliana
cgggcggtagcggttag

SEQ ID NO: 81476 - DNA, 17 bp, Arabidopsis thaliana
cgggcggtagctgttag

SEQ ID NO: 81477 - DNA, 17 bp, Arabidopsis thaliana
cgggcggtttgcgtcgg

SEQ ID NO: 81478 - DNA, 17 bp, Arabidopsis thaliana
cgggcgtcggcctgtgg

SEQ ID NO: 81479 - DNA, 17 bp, Arabidopsis thaliana
cgggcgtctaacagtca

SEQ ID NO: 81480 - DNA, 17 bp, Arabidopsis thaliana
cgggcgtttggtctagt

SEQ ID NO: 81481 - DNA, 17 bp, Arabidopsis thaliana
cgggctaagaatcgggc

SEQ ID NO: 81482 - DNA, 17 bp, Arabidopsis thaliana
cgggctacgatattggt

SEQ ID NO: 81483 - DNA, 17 bp, Arabidopsis thaliana
cgggctagaagcgacgc

SEQ ID NO: 81484 - DNA, 17 bp, Arabidopsis thaliana
cgggctattagctcagt

SEQ ID NO: 81485 - DNA, 17 bp, Arabidopsis thaliana
cgggctcccggcagacg

SEQ ID NO: 81486 - DNA, 17 bp, Arabidopsis thaliana
cgggctccgaacctgga

SEQ ID NO: 81487 - DNA, 17 bp, Arabidopsis thaliana
cgggctcgcaataacct

SEQ ID NO: 81488 - DNA, 17 bp, Arabidopsis thaliana
cgggctcggggcgacca

SEQ ID NO: 81489 - DNA, 17 bp, Arabidopsis thaliana
cgggctcgtatcccggc

SEQ ID NO: 81490 - DNA, 17 bp, Arabidopsis thaliana
cgggctcgtttcccggc

SEQ ID NO: 81491 - DNA, 17 bp, Arabidopsis thaliana
cgggctgaccacagacc

SEQ ID NO: 81492 - DNA, 17 bp, Arabidopsis thaliana
cgggctgactgtctcgc

SEQ ID NO: 81493 - DNA, 17 bp, Arabidopsis thaliana
cgggctgagtgactgac

SEQ ID NO: 81494 - DNA, 17 bp, Arabidopsis thaliana
cgggctggtcaggatac

SEQ ID NO: 81495 - DNA, 17 bp, Arabidopsis thaliana
cgggcttcaacccagaa

SEQ ID NO: 81496 - DNA, 17 bp, Arabidopsis thaliana
cgggcttcagccagaac

SEQ ID NO: 81497 - DNA, 17 bp, Arabidopsis thaliana
cgggcttccaccagagt

SEQ ID NO: 81498 - DNA, 17 bp, Arabidopsis thaliana
cgggcttcccggctggt

SEQ ID NO: 81499 - DNA, 17 bp, Arabidopsis thaliana
cgggcttccttgtggga

SEQ ID NO: 81500 - DNA, 17 bp, Arabidopsis thaliana
cgggcttcggactagaa

SEQ ID NO: 81501 - DNA, 17 bp, Arabidopsis thaliana
cgggcttcggccaaaac

SEQ ID NO: 81502 - DNA, 17 bp, Arabidopsis thaliana
cgggcttcggccagaac

SEQ ID NO: 81503 - DNA, 17 bp, Arabidopsis thaliana
cgggcttcggccagaat

SEQ ID NO: 81504 - DNA, 17 bp, Arabidopsis thaliana
cgggcttcggccagacc

SEQ ID NO: 81505 - DNA, 17 bp, Arabidopsis thaliana
cgggcttcggccagccc

SEQ ID NO: 81506 - DNA, 17 bp, Arabidopsis thaliana
cgggcttcggccaggac

SEQ ID NO: 81507 - DNA, 17 bp, Arabidopsis thaliana
cgggcttcggcccagaa

SEQ ID NO: 81508 - DNA, 17 bp, Arabidopsis thaliana
cgggcttctgccagaac

SEQ ID NO: 81509 - DNA, 17 bp, Arabidopsis thaliana
cgggcttggcagaatca

SEQ ID NO: 81510 - DNA, 17 bp, Arabidopsis thaliana
cgggcttggcagaatcg

SEQ ID NO: 81511 - DNA, 17 bp, Arabidopsis thaliana
cgggcttggcagaatga

SEQ ID NO: 81512 - DNA, 17 bp, Arabidopsis thaliana
cgggcttgtgactttct

SEQ ID NO: 81513 - DNA, 17 bp, Arabidopsis thaliana
cgggcttgtgcgctaca

SEQ ID NO: 81514 - DNA, 17 bp, Arabidopsis thaliana
cgggcttgtgcgctata

SEQ ID NO: 81515 - DNA, 17 bp, Arabidopsis thaliana
cgggctttcgtgatttg

SEQ ID NO: 81516 - DNA, 17 bp, Arabidopsis thaliana
cgggctttggagaatta

SEQ ID NO: 81517 - DNA, 17 bp, Arabidopsis thaliana
cgggctttggagattac

SEQ ID NO: 81518 - DNA, 17 bp, Arabidopsis thaliana
cgggctttggcccagaa

SEQ ID NO: 81519 - DNA, 17 bp, Arabidopsis thaliana
cgggcttttctccggcg

SEQ ID NO: 81520 - DNA, 17 bp, Arabidopsis thaliana
cgggcttttgatacgct

SEQ ID NO: 81521 - DNA, 17 bp, Arabidopsis thaliana
cgggcttttgatacgtt

SEQ ID NO: 81522 - DNA, 17 bp, Arabidopsis thaliana
cgggcttttgttttcgg

SEQ ID NO: 81523 - DNA, 17 bp, Arabidopsis thaliana
cgggctttttcgtgatc

SEQ ID NO: 81524 - DNA, 17 bp, Arabidopsis thaliana
cggggaaacttaccagg

SEQ ID NO: 81525 - DNA, 17 bp, Arabidopsis thaliana
cggggaaagctcccgag

SEQ ID NO: 81526 - DNA, 17 bp, Arabidopsis thaliana
cggggaacgccaagcgc

SEQ ID NO: 81527 - DNA, 17 bp, Arabidopsis thaliana
cggggaacggactggga

SEQ ID NO: 81528 - DNA, 17 bp, Arabidopsis thaliana
cggggaagtccccgtgt

SEQ ID NO: 81529 - DNA, 17 bp, Arabidopsis thaliana
cggggaagtgtttgttt

SEQ ID NO: 81530 - DNA, 17 bp, Arabidopsis thaliana
cggggacacaggtcgtt

SEQ ID NO: 81531 - DNA, 17 bp, Arabidopsis thaliana
cggggacagcactgggt

SEQ ID NO: 81532 - DNA, 17 bp, Arabidopsis thaliana
cggggaccttgtgctat

SEQ ID NO: 81533 - DNA, 17 bp, Arabidopsis thaliana
cggggacggactgggaa

SEQ ID NO: 81534 - DNA, 17 bp, Arabidopsis thaliana
cggggacttgacctcga

SEQ ID NO: 81535 - DNA, 17 bp, Arabidopsis thaliana
cggggagactatctttt

SEQ ID NO: 81536 - DNA, 17 bp, Arabidopsis thaliana
cggggagatttaccgtt

SEQ ID NO: 81537 - DNA, 17 bp, Arabidopsis thaliana
cggggagtcccggtaac

SEQ ID NO: 81538 - DNA, 17 bp, Arabidopsis thaliana
cggggagtgttaggata

SEQ ID NO: 81539 - DNA, 17 bp, Arabidopsis thaliana
cggggatcctggtgagc

SEQ ID NO: 81540 - DNA, 17 bp, Arabidopsis thaliana
cggggatcgataccccg

SEQ ID NO: 81541 - DNA, 17 bp, Arabidopsis thaliana
cggggatcggtaccccg

SEQ ID NO: 81542 - DNA, 17 bp, Arabidopsis thaliana
cggggatcgttaccccg

SEQ ID NO: 81543 - DNA, 17 bp, Arabidopsis thaliana
cggggatctaccccgca

SEQ ID NO: 81544 - DNA, 17 bp, Arabidopsis thaliana
cggggatgacttcccct

SEQ ID NO: 81545 - DNA, 17 bp, Arabidopsis thaliana
cggggatggtccaggcg

SEQ ID NO: 81546 - DNA, 17 bp, Arabidopsis thaliana
cggggatgtagctcaaa

SEQ ID NO: 81547 - DNA, 17 bp, Arabidopsis thaliana
cggggatgtagctcaag

SEQ ID NO: 81548 - DNA, 17 bp, Arabidopsis thaliana
cggggatgtagctcaga

SEQ ID NO: 81549 - DNA, 17 bp, Arabidopsis thaliana
cggggatgtagctcatg

SEQ ID NO: 81550 - DNA, 17 bp, Arabidopsis thaliana
cggggatgtagctcgaa

SEQ ID NO: 81551 - DNA, 17 bp, Arabidopsis thaliana
cggggatgttcgaactt

SEQ ID NO: 81552 - DNA, 17 bp, Arabidopsis thaliana
cggggatgttctgtaac

SEQ ID NO: 81553 - DNA, 17 bp, Arabidopsis thaliana
cggggattccacggacg

SEQ ID NO: 81554 - DNA, 17 bp, Arabidopsis thaliana
cggggattcccgctatc

SEQ ID NO: 81555 - DNA, 17 bp, Arabidopsis thaliana
cggggattcgacctccc

SEQ ID NO: 81556 - DNA, 17 bp, Arabidopsis thaliana
cggggattcgacttccc

SEQ ID NO: 81557 - DNA, 17 bp, Arabidopsis thaliana
cggggattcgactttcc

SEQ ID NO: 81558 - DNA, 17 bp, Arabidopsis thaliana
cggggattctcctggat

SEQ ID NO: 81559 - DNA, 17 bp, Arabidopsis thaliana
cggggatttgtccacat

SEQ ID NO: 81560 - DNA, 17 bp, Arabidopsis thaliana
cggggattttcgtgatt

SEQ ID NO: 81561 - DNA, 17 bp, Arabidopsis thaliana
cggggcaagaccgctca

SEQ ID NO: 81562 - DNA, 17 bp, Arabidopsis thaliana
cggggcaagcacaaacc

SEQ ID NO: 81563 - DNA, 17 bp, Arabidopsis thaliana
cggggcaggtgggaaga

SEQ ID NO: 81564 - DNA, 17 bp, Arabidopsis thaliana
cggggcattttcgtgat

SEQ ID NO: 81565 - DNA, 17 bp, Arabidopsis thaliana
cggggccatctggatcg

SEQ ID NO: 81566 - DNA, 17 bp, Arabidopsis thaliana
cggggccgatcagatcg

SEQ ID NO: 81567 - DNA, 17 bp, Arabidopsis thaliana
cggggcctgtgtttcgt

SEQ ID NO: 81568 - DNA, 17 bp, Arabidopsis thaliana
cggggcctttgtgtgat

SEQ ID NO: 81569 - DNA, 17 bp, Arabidopsis thaliana
cggggcgattagattat

SEQ ID NO: 81570 - DNA, 17 bp, Arabidopsis thaliana
cggggcgtagccaagcg

SEQ ID NO: 81571 - DNA, 17 bp, Arabidopsis thaliana
cggggcgtggaccgacg

SEQ ID NO: 81572 - DNA, 17 bp, Arabidopsis thaliana
cggggcgtggaccggcg

SEQ ID NO: 81573 - DNA, 17 bp, Arabidopsis thaliana
cggggctatttttcttc

SEQ ID NO: 81574 - DNA, 17 bp, Arabidopsis thaliana
cggggctggacactcag

SEQ ID NO: 81575 - DNA, 17 bp, Arabidopsis thaliana
cggggctgtcagcggac

SEQ ID NO: 81576 - DNA, 17 bp, Arabidopsis thaliana
cgggggacggacgggca

SEQ ID NO: 81577 - DNA, 17 bp, Arabidopsis thaliana
cgggggacggacgggcg

SEQ ID NO: 81578 - DNA, 17 bp, Arabidopsis thaliana
cgggggacggactggca

SEQ ID NO: 81579 - DNA, 17 bp, Arabidopsis thaliana
cgggggacggactggga

SEQ ID NO: 81580 - DNA, 17 bp, Arabidopsis thaliana
cgggggcacgtctgcct

SEQ ID NO: 81581 - DNA, 17 bp, Arabidopsis thaliana
cgggggcctcgggaaga

SEQ ID NO: 81582 - DNA, 17 bp, Arabidopsis thaliana
cgggggctctgtgaggt

SEQ ID NO: 81583 - DNA, 17 bp, Arabidopsis thaliana
cgggggctgggactggg

SEQ ID NO: 81584 - DNA, 17 bp, Arabidopsis thaliana
cgggggctgtgagaggc

SEQ ID NO: 81585 - DNA, 17 bp, Arabidopsis thaliana
cgggggctgtgagaggg

SEQ ID NO: 81586 - DNA, 17 bp, Arabidopsis thaliana
cgggggctttcgatggc

SEQ ID NO: 81587 - DNA, 17 bp, Arabidopsis thaliana
cggggggagaccgcggt

SEQ ID NO: 81588 - DNA, 17 bp, Arabidopsis thaliana
cggggggtagctgaact

SEQ ID NO: 81589 - DNA, 17 bp, Arabidopsis thaliana
cgggggtcccacttccg

SEQ ID NO: 81590 - DNA, 17 bp, Arabidopsis thaliana
cgggggtcccagttcca

SEQ ID NO: 81591 - DNA, 17 bp, Arabidopsis thaliana
cgggggtcccagttccg

SEQ ID NO: 81592 - DNA, 17 bp, Arabidopsis thaliana
cgggggtcccagttcct

SEQ ID NO: 81593 - DNA, 17 bp, Arabidopsis thaliana
cgggggtcccagttcgg

SEQ ID NO: 81594 - DNA, 17 bp, Arabidopsis thaliana
cgggggtcgcagtgacc

SEQ ID NO: 81595 - DNA, 17 bp, Arabidopsis thaliana
cgggggttctgcctcaa

SEQ ID NO: 81596 - DNA, 17 bp, Arabidopsis thaliana
cggggtagacagcgctt

SEQ ID NO: 81597 - DNA, 17 bp, Arabidopsis thaliana
cggggtatgctcctgag

SEQ ID NO: 81598 - DNA, 17 bp, Arabidopsis thaliana
cggggtcccggcaacgg

SEQ ID NO: 81599 - DNA, 17 bp, Arabidopsis thaliana
cggggtcgagggggcag

SEQ ID NO: 81600 - DNA, 17 bp, Arabidopsis thaliana
cggggtcgagtgatgtg

SEQ ID NO: 81601 - DNA, 17 bp, Arabidopsis thaliana
cggggtcgcagtgacca

SEQ ID NO: 81602 - DNA, 17 bp, Arabidopsis thaliana
cggggtctttcgggtga

SEQ ID NO: 81603 - DNA, 17 bp, Arabidopsis thaliana
cggggtgaaggctgcaa

SEQ ID NO: 81604 - DNA, 17 bp, Arabidopsis thaliana
cggggtgctagtgtttg

SEQ ID NO: 81605 - DNA, 17 bp, Arabidopsis thaliana
cggggtgctagtgtttt

SEQ ID NO: 81606 - DNA, 17 bp, Arabidopsis thaliana
cggggtggagctacaag

SEQ ID NO: 81607 - DNA, 17 bp, Arabidopsis thaliana
cggggtgtttgggcttt

SEQ ID NO: 81608 - DNA, 17 bp, Arabidopsis thaliana
cggggttaatcagcgag

SEQ ID NO: 81609 - DNA, 17 bp, Arabidopsis thaliana
cggggttaggaacggtc

SEQ ID NO: 81610 - DNA, 17 bp, Arabidopsis thaliana
cggggttcacgattcta

SEQ ID NO: 81611 - DNA, 17 bp, Arabidopsis thaliana
cggggttcctagcgagc

SEQ ID NO: 81612 - DNA, 17 bp, Arabidopsis thaliana
cggggttcgagtcccct

SEQ ID NO: 81613 - DNA, 17 bp, Arabidopsis thaliana
cggggttcgagtccctt

SEQ ID NO: 81614 - DNA, 17 bp, Arabidopsis thaliana
cggggttcgatcccccg

SEQ ID NO: 81615 - DNA, 17 bp, Arabidopsis thaliana
cggggttcggtcccccg

SEQ ID NO: 81616 - DNA, 17 bp, Arabidopsis thaliana
cggggttcgttcccccc

SEQ ID NO: 81617 - DNA, 17 bp, Arabidopsis thaliana
cggggttcgttcccccg

SEQ ID NO: 81618 - DNA, 17 bp, Arabidopsis thaliana
cggggttcgtttccccg

SEQ ID NO: 81619 - DNA, 17 bp, Arabidopsis thaliana
cggggttgaagtttggg

SEQ ID NO: 81620 - DNA, 17 bp, Arabidopsis thaliana
cggggtttccccgcacc

SEQ ID NO: 81621 - DNA, 17 bp, Arabidopsis thaliana
cggggtttcccggctgg

SEQ ID NO: 81622 - DNA, 17 bp, Arabidopsis thaliana
cggggtttgcagcgata

SEQ ID NO: 81623 - DNA, 17 bp, Arabidopsis thaliana
cggggtttggtcccccg

SEQ ID NO: 81624 - DNA, 17 bp, Arabidopsis thaliana
cggggtttttcgtgatc

SEQ ID NO: 81625 - DNA, 17 bp, Arabidopsis thaliana
cggggttttttcaggat

SEQ ID NO: 81626 - DNA, 17 bp, Arabidopsis thaliana
cgggtaaacggcgggag

SEQ ID NO: 81627 - DNA, 17 bp, Arabidopsis thaliana
cgggtaagcagcagaca

SEQ ID NO: 81628 - DNA, 17 bp, Arabidopsis thaliana
cgggtaatcgggtattt

SEQ ID NO: 81629 - DNA, 17 bp, Arabidopsis thaliana
cgggtaatgttgtggct

SEQ ID NO: 81630 - DNA, 17 bp, Arabidopsis thaliana
cgggtaccagtgtataa

SEQ ID NO: 81631 - DNA, 17 bp, Arabidopsis thaliana
cgggtacctgcggctgc

SEQ ID NO: 81632 - DNA, 17 bp, Arabidopsis thaliana
cgggtacgcagaccctc

SEQ ID NO: 81633 - DNA, 17 bp, Arabidopsis thaliana
cgggtacttgatcgggt

SEQ ID NO: 81634 - DNA, 17 bp, Arabidopsis thaliana
cgggtagaatcctttcc

SEQ ID NO: 81635 - DNA, 17 bp, Arabidopsis thaliana
cgggtagaatcctttga

SEQ ID NO: 81636 - DNA, 17 bp, Arabidopsis thaliana
cgggtagaatcctttgc

SEQ ID NO: 81637 - DNA, 17 bp, Arabidopsis thaliana
cgggtagatgacacgtg

SEQ ID NO: 81638 - DNA, 17 bp, Arabidopsis thaliana
cgggtagtctcggaata

SEQ ID NO: 81639 - DNA, 17 bp, Arabidopsis thaliana
cgggtagtgaggtcaag

SEQ ID NO: 81640 - DNA, 17 bp, Arabidopsis thaliana
cgggtataccgcgagta

SEQ ID NO: 81641 - DNA, 17 bp, Arabidopsis thaliana
cgggtattcgattcggt

SEQ ID NO: 81642 - DNA, 17 bp, Arabidopsis thaliana
cgggtattgtaagattt

SEQ ID NO: 81643 - DNA, 17 bp, Arabidopsis thaliana
cgggtcaaagtccgtaa

SEQ ID NO: 81644 - DNA, 17 bp, Arabidopsis thaliana
cgggtcaaccaggttgg

SEQ ID NO: 81645 - DNA, 17 bp, Arabidopsis thaliana
cgggtcaaccggattgg

SEQ ID NO: 81646 - DNA, 17 bp, Arabidopsis thaliana
cgggtcaagctcatgct

SEQ ID NO: 81647 - DNA, 17 bp, Arabidopsis thaliana
cgggtcacaaggcgtcg

SEQ ID NO: 81648 - DNA, 17 bp, Arabidopsis thaliana
cgggtcactacaatcgt

SEQ ID NO: 81649 - DNA, 17 bp, Arabidopsis thaliana
cgggtcatgtgcatcct

SEQ ID NO: 81650 - DNA, 17 bp, Arabidopsis thaliana
cgggtcattcttcaggt

SEQ ID NO: 81651 - DNA, 17 bp, Arabidopsis thaliana
cgggtccaagtgtgtca

SEQ ID NO: 81652 - DNA, 17 bp, Arabidopsis thaliana
cgggtccagtcgggttt

SEQ ID NO: 81653 - DNA, 17 bp, Arabidopsis thaliana
cgggtccagttgggtct

SEQ ID NO: 81654 - DNA, 17 bp, Arabidopsis thaliana
cgggtccagttgggttt

SEQ ID NO: 81655 - DNA, 17 bp, Arabidopsis thaliana
cgggtccatttgggtct

SEQ ID NO: 81656 - DNA, 17 bp, Arabidopsis thaliana
cgggtccatttgggttt

SEQ ID NO: 81657 - DNA, 17 bp, Arabidopsis thaliana
cgggtcccaccggctgt

SEQ ID NO: 81658 - DNA, 17 bp, Arabidopsis thaliana
cgggtcccaccgggtgt

SEQ ID NO: 81659 - DNA, 17 bp, Arabidopsis thaliana
cgggtcccactgggtgt

SEQ ID NO: 81660 - DNA, 17 bp, Arabidopsis thaliana
cgggtccgaggaatcgt

SEQ ID NO: 81661 - DNA, 17 bp, Arabidopsis thaliana
cgggtccgtttcccggc

SEQ ID NO: 81662 - DNA, 17 bp, Arabidopsis thaliana
cgggtccgtttttttgt

SEQ ID NO: 81663 - DNA, 17 bp, Arabidopsis thaliana
cgggtcctaaacttcta

SEQ ID NO: 81664 - DNA, 17 bp, Arabidopsis thaliana
cgggtcgaatcttagcg

SEQ ID NO: 81665 - DNA, 17 bp, Arabidopsis thaliana
cgggtcgaccatggact

SEQ ID NO: 81666 - DNA, 17 bp, Arabidopsis thaliana
cgggtcgatccgggcgg

SEQ ID NO: 81667 - DNA, 17 bp, Arabidopsis thaliana
cgggtcgattcccggca

SEQ ID NO: 81668 - DNA, 17 bp, Arabidopsis thaliana
cgggtcgattcccggct

SEQ ID NO: 81669 - DNA, 17 bp, Arabidopsis thaliana
cgggtcgccgcgtgccg

SEQ ID NO: 81670 - DNA, 17 bp, Arabidopsis thaliana
cgggtcggatctgttgt

SEQ ID NO: 81671 - DNA, 17 bp, Arabidopsis thaliana
cgggtcggatgagacag

SEQ ID NO: 81672 - DNA, 17 bp, Arabidopsis thaliana
cgggtcggattttgttt

SEQ ID NO: 81673 - DNA, 17 bp, Arabidopsis thaliana
cgggtcgggtccagtcg

SEQ ID NO: 81674 - DNA, 17 bp, Arabidopsis thaliana
cgggtcgggtccagttg

SEQ ID NO: 81675 - DNA, 17 bp, Arabidopsis thaliana
cgggtcgtgcctccggc

SEQ ID NO: 81676 - DNA, 17 bp, Arabidopsis thaliana
cgggtcgttctgttttg

SEQ ID NO: 81677 - DNA, 17 bp, Arabidopsis thaliana
cgggtctacgtcgtgga

SEQ ID NO: 81678 - DNA, 17 bp, Arabidopsis thaliana
cgggtctcccggcagac

SEQ ID NO: 81679 - DNA, 17 bp, Arabidopsis thaliana
cgggtctggaggattac

SEQ ID NO: 81680 - DNA, 17 bp, Arabidopsis thaliana
cgggtctggagggagga

SEQ ID NO: 81681 - DNA, 17 bp, Arabidopsis thaliana
cgggtctgggattacgg

SEQ ID NO: 81682 - DNA, 17 bp, Arabidopsis thaliana
cgggtctgggtggatta

SEQ ID NO: 81683 - DNA, 17 bp, Arabidopsis thaliana
cgggtgaactcctagaa

SEQ ID NO: 81684 - DNA, 17 bp, Arabidopsis thaliana
cgggtgacccgagttcg

SEQ ID NO: 81685 - DNA, 17 bp, Arabidopsis thaliana
cgggtgacccgggttcc

SEQ ID NO: 81686 - DNA, 17 bp, Arabidopsis thaliana
cgggtgacccgggttcg

SEQ ID NO: 81687 - DNA, 17 bp, Arabidopsis thaliana
cgggtgacccgggttct

SEQ ID NO: 81688 - DNA, 17 bp, Arabidopsis thaliana
cgggtgacctgggttcg

SEQ ID NO: 81689 - DNA, 17 bp, Arabidopsis thaliana
cgggtgacggagaatta

SEQ ID NO: 81690 - DNA, 17 bp, Arabidopsis thaliana
cgggtgagtaacgcgta

SEQ ID NO: 81691 - DNA, 17 bp, Arabidopsis thaliana
cgggtgatagagcggac

SEQ ID NO: 81692 - DNA, 17 bp, Arabidopsis thaliana
cgggtgatcacctaata

SEQ ID NO: 81693 - DNA, 17 bp, Arabidopsis thaliana
cgggtgatgggcgatgt

SEQ ID NO: 81694 - DNA, 17 bp, Arabidopsis thaliana
cgggtgcaaaggattat

SEQ ID NO: 81695 - DNA, 17 bp, Arabidopsis thaliana
cgggtgcaccaccgacc

SEQ ID NO: 81696 - DNA, 17 bp, Arabidopsis thaliana
cgggtgcacccccgacc

SEQ ID NO: 81697 - DNA, 17 bp, Arabidopsis thaliana
cgggtgcacccccgact

SEQ ID NO: 81698 - DNA, 17 bp, Arabidopsis thaliana
cgggtgcacccgaccga

SEQ ID NO: 81699 - DNA, 17 bp, Arabidopsis thaliana
cgggtgcaccgccaacc

SEQ ID NO: 81700 - DNA, 17 bp, Arabidopsis thaliana
cgggtgcaccgccgacc

SEQ ID NO: 81701 - DNA, 17 bp, Arabidopsis thaliana
cgggtgcaccgccgatc

SEQ ID NO: 81702 - DNA, 17 bp, Arabidopsis thaliana
cgggtgcaccgccgccc

SEQ ID NO: 81703 - DNA, 17 bp, Arabidopsis thaliana
cgggtgcaccgccgtag

SEQ ID NO: 81704 - DNA, 17 bp, Arabidopsis thaliana
cgggtgcaccgcctacc

SEQ ID NO: 81705 - DNA, 17 bp, Arabidopsis thaliana
cgggtgcaccgctgacc

SEQ ID NO: 81706 - DNA, 17 bp, Arabidopsis thaliana
cgggtgcaccgtcgacc

SEQ ID NO: 81707 - DNA, 17 bp, Arabidopsis thaliana
cgggtgcacgccgaccg

SEQ ID NO: 81708 - DNA, 17 bp, Arabidopsis thaliana
cgggtgcactcgggttc

SEQ ID NO: 81709 - DNA, 17 bp, Arabidopsis thaliana
cgggtgcagcgccgacc

SEQ ID NO: 81710 - DNA, 17 bp, Arabidopsis thaliana
cgggtgcagtacttacc

SEQ ID NO: 81711 - DNA, 17 bp, Arabidopsis thaliana
cgggtgcattggtcggc

SEQ ID NO: 81712 - DNA, 17 bp, Arabidopsis thaliana
cgggtgccaagaacgct

SEQ ID NO: 81713 - DNA, 17 bp, Arabidopsis thaliana
cgggtgccccgccggga

SEQ ID NO: 81714 - DNA, 17 bp, Arabidopsis thaliana
cgggtggaagattgaac

SEQ ID NO: 81715 - DNA, 17 bp, Arabidopsis thaliana
cgggtggcagagggaga

SEQ ID NO: 81716 - DNA, 17 bp, Arabidopsis thaliana
cgggtgggacccacggc

SEQ ID NO: 81717 - DNA, 17 bp, Arabidopsis thaliana
cgggtgggacccacggt

SEQ ID NO: 81718 - DNA, 17 bp, Arabidopsis thaliana
cgggtgggacccagggc

SEQ ID NO: 81719 - DNA, 17 bp, Arabidopsis thaliana
cgggtgggacgcagggc

SEQ ID NO: 81720 - DNA, 17 bp, Arabidopsis thaliana
cgggtgggtttggcagg

SEQ ID NO: 81721 - DNA, 17 bp, Arabidopsis thaliana
cgggtgtgcattggtcg

SEQ ID NO: 81722 - DNA, 17 bp, Arabidopsis thaliana
cgggtgtggcaagtcac

SEQ ID NO: 81723 - DNA, 17 bp, Arabidopsis thaliana
cgggtgtgtttaacagc

SEQ ID NO: 81724 - DNA, 17 bp, Arabidopsis thaliana
cgggtgttacacttaga

SEQ ID NO: 81725 - DNA, 17 bp, Arabidopsis thaliana
cgggttaaatcatagaa

SEQ ID NO: 81726 - DNA, 17 bp, Arabidopsis thaliana
cgggttaagtcctagtt

SEQ ID NO: 81727 - DNA, 17 bp, Arabidopsis thaliana
cgggttaatacttttgg

SEQ ID NO: 81728 - DNA, 17 bp, Arabidopsis thaliana
cgggttacggtgcccaa

SEQ ID NO: 81729 - DNA, 17 bp, Arabidopsis thaliana
cgggttacggtgcctaa

SEQ ID NO: 81730 - DNA, 17 bp, Arabidopsis thaliana
cgggttagatggtatga

SEQ ID NO: 81731 - DNA, 17 bp, Arabidopsis thaliana
cgggttagcgggacggg

SEQ ID NO: 81732 - DNA, 17 bp, Arabidopsis thaliana
cgggttaggtttgttgc

SEQ ID NO: 81733 - DNA, 17 bp, Arabidopsis thaliana
cgggttcaaatcccgcc

SEQ ID NO: 81734 - DNA, 17 bp, Arabidopsis thaliana
cgggttcaaatcctgtc

SEQ ID NO: 81735 - DNA, 17 bp, Arabidopsis thaliana
cgggttcaagtccctct

SEQ ID NO: 81736 - DNA, 17 bp, Arabidopsis thaliana
cgggttcaattcccggc

SEQ ID NO: 81737 - DNA, 17 bp, Arabidopsis thaliana
cgggttcaattcccgtc

SEQ ID NO: 81738 - DNA, 17 bp, Arabidopsis thaliana
cgggttcactcccggca

SEQ ID NO: 81739 - DNA, 17 bp, Arabidopsis thaliana
cgggttcagattgtatt

SEQ ID NO: 81740 - DNA, 17 bp, Arabidopsis thaliana
cgggttcagcaggagct

SEQ ID NO: 81741 - DNA, 17 bp, Arabidopsis thaliana
cgggttcaggtcgggct

SEQ ID NO: 81742 - DNA, 17 bp, Arabidopsis thaliana
cgggttcaggttcgagt

SEQ ID NO: 81743 - DNA, 17 bp, Arabidopsis thaliana
cgggttcagttcccggc

SEQ ID NO: 81744 - DNA, 17 bp, Arabidopsis thaliana
cgggttcatctcttgct

SEQ ID NO: 81745 - DNA, 17 bp, Arabidopsis thaliana
cgggttcatttcccggc

SEQ ID NO: 81746 - DNA, 17 bp, Arabidopsis thaliana
cgggttcatttcccggt

SEQ ID NO: 81747 - DNA, 17 bp, Arabidopsis thaliana
cgggttccccggctggt

SEQ ID NO: 81748 - DNA, 17 bp, Arabidopsis thaliana
cgggttcccggcaacgg

SEQ ID NO: 81749 - DNA, 17 bp, Arabidopsis thaliana
cgggttcctccggcaga

SEQ ID NO: 81750 - DNA, 17 bp, Arabidopsis thaliana
cgggttcgaatcccgtc

SEQ ID NO: 81751 - DNA, 17 bp, Arabidopsis thaliana
cgggttcgaatccctct

SEQ ID NO: 81752 - DNA, 17 bp, Arabidopsis thaliana
cgggttcgactcccggc

SEQ ID NO: 81753 - DNA, 17 bp, Arabidopsis thaliana
cgggttcgactcccggt

SEQ ID NO: 81754 - DNA, 17 bp, Arabidopsis thaliana
cgggttcgagcccccca

SEQ ID NO: 81755 - DNA, 17 bp, Arabidopsis thaliana
cgggttcgagccccccc

SEQ ID NO: 81756 - DNA, 17 bp, Arabidopsis thaliana
cgggttcgagccccctc

SEQ ID NO: 81757 - DNA, 17 bp, Arabidopsis thaliana
cgggttcgagccccgcc

SEQ ID NO: 81758 - DNA, 17 bp, Arabidopsis thaliana
cgggttcgagccccgtc

SEQ ID NO: 81759 - DNA, 17 bp, Arabidopsis thaliana
cgggttcgagtcccgcg

SEQ ID NO: 81760 - DNA, 17 bp, Arabidopsis thaliana
cgggttcgagtcccggc

SEQ ID NO: 81761 - DNA, 17 bp, Arabidopsis thaliana
cgggttcgagtcccggg

SEQ ID NO: 81762 - DNA, 17 bp, Arabidopsis thaliana
cgggttcgagttcaagt

SEQ ID NO: 81763 - DNA, 17 bp, Arabidopsis thaliana
cgggttcgatccccgcc

SEQ ID NO: 81764 - DNA, 17 bp, Arabidopsis thaliana
cgggttcgatcttcggc

SEQ ID NO: 81765 - DNA, 17 bp, Arabidopsis thaliana
cgggttcgattcccccc

SEQ ID NO: 81766 - DNA, 17 bp, Arabidopsis thaliana
cgggttcgattcccgcc

SEQ ID NO: 81767 - DNA, 17 bp, Arabidopsis thaliana
cgggttcgattcccgct

SEQ ID NO: 81768 - DNA, 17 bp, Arabidopsis thaliana
cgggttcgattcccggc

SEQ ID NO: 81769 - DNA, 17 bp, Arabidopsis thaliana
cgggttcgattcccggt

SEQ ID NO: 81770 - DNA, 17 bp, Arabidopsis thaliana
cgggttcgattcccgta

SEQ ID NO: 81771 - DNA, 17 bp, Arabidopsis thaliana
cgggttcgattcccgtc

SEQ ID NO: 81772 - DNA, 17 bp, Arabidopsis thaliana
cgggttcgattcccgtt

SEQ ID NO: 81773 - DNA, 17 bp, Arabidopsis thaliana
cgggttcgattccggag

SEQ ID NO: 81774 - DNA, 17 bp, Arabidopsis thaliana
cgggttcgccccgccgg

SEQ ID NO: 81775 - DNA, 17 bp, Arabidopsis thaliana
cgggttcggaccccgcc

SEQ ID NO: 81776 - DNA, 17 bp, Arabidopsis thaliana
cgggttcggatcggttc

SEQ ID NO: 81777 - DNA, 17 bp, Arabidopsis thaliana
cgggttcggctcccgcc

SEQ ID NO: 81778 - DNA, 17 bp, Arabidopsis thaliana
cgggttcggctcccggc

SEQ ID NO: 81779 - DNA, 17 bp, Arabidopsis thaliana
cgggttcggctcccggt

SEQ ID NO: 81780 - DNA, 17 bp, Arabidopsis thaliana
cgggttcggctcctggc

SEQ ID NO: 81781 - DNA, 17 bp, Arabidopsis thaliana
cgggttcggctctcggc

SEQ ID NO: 81782 - DNA, 17 bp, Arabidopsis thaliana
cgggttcggcttttgtg

SEQ ID NO: 81783 - DNA, 17 bp, Arabidopsis thaliana
cgggttcgggccccgcc

SEQ ID NO: 81784 - DNA, 17 bp, Arabidopsis thaliana
cgggttcgggtcccggc

SEQ ID NO: 81785 - DNA, 17 bp, Arabidopsis thaliana
cgggttcgggttgggct

SEQ ID NO: 81786 - DNA, 17 bp, Arabidopsis thaliana
cgggttcggttcccggc

SEQ ID NO: 81787 - DNA, 17 bp, Arabidopsis thaliana
cgggttcgtctcccggc

SEQ ID NO: 81788 - DNA, 17 bp, Arabidopsis thaliana
cgggttcgtgcccagcc

SEQ ID NO: 81789 - DNA, 17 bp, Arabidopsis thaliana
cgggttcgtgccccccc

SEQ ID NO: 81790 - DNA, 17 bp, Arabidopsis thaliana
cgggttcgtgccccgcc

SEQ ID NO: 81791 - DNA, 17 bp, Arabidopsis thaliana
cgggttcgtgccccgct

SEQ ID NO: 81792 - DNA, 17 bp, Arabidopsis thaliana
cgggttcgtgtcccggc

SEQ ID NO: 81793 - DNA, 17 bp, Arabidopsis thaliana
cgggttcgtgtcggcga

SEQ ID NO: 81794 - DNA, 17 bp, Arabidopsis thaliana
cgggttcgttccccggc

SEQ ID NO: 81795 - DNA, 17 bp, Arabidopsis thaliana
cgggttcgttcccggta

SEQ ID NO: 81796 - DNA, 17 bp, Arabidopsis thaliana
cgggttcgtttccccgc

SEQ ID NO: 81797 - DNA, 17 bp, Arabidopsis thaliana
cgggttcgtttcccgcc

SEQ ID NO: 81798 - DNA, 17 bp, Arabidopsis thaliana
cgggttcgtttcccggc

SEQ ID NO: 81799 - DNA, 17 bp, Arabidopsis thaliana
cgggttcgtttcccggt

SEQ ID NO: 81800 - DNA, 17 bp, Arabidopsis thaliana
cgggttcgtttcctggt

SEQ ID NO: 81801 - DNA, 17 bp, Arabidopsis thaliana
cgggttcgtttctcggt

SEQ ID NO: 81802 - DNA, 17 bp, Arabidopsis thaliana
cgggttcgttttccggt

SEQ ID NO: 81803 - DNA, 17 bp, Arabidopsis thaliana
cgggttctaaacttcta

SEQ ID NO: 81804 - DNA, 17 bp, Arabidopsis thaliana
cgggttctgtagtgtct

SEQ ID NO: 81805 - DNA, 17 bp, Arabidopsis thaliana
cgggttcttctcccggc

SEQ ID NO: 81806 - DNA, 17 bp, Arabidopsis thaliana
cgggttgactcccggca

SEQ ID NO: 81807 - DNA, 17 bp, Arabidopsis thaliana
cgggttgagtatgtgcg

SEQ ID NO: 81808 - DNA, 17 bp, Arabidopsis thaliana
cgggttgagtattagcc

SEQ ID NO: 81809 - DNA, 17 bp, Arabidopsis thaliana
cgggttgagtattaggg

SEQ ID NO: 81810 - DNA, 17 bp, Arabidopsis thaliana
cgggttgattcccgcta

SEQ ID NO: 81811 - DNA, 17 bp, Arabidopsis thaliana
cgggttgattcccggct

SEQ ID NO: 81812 - DNA, 17 bp, Arabidopsis thaliana
cgggttgcccttggctt

SEQ ID NO: 81813 - DNA, 17 bp, Arabidopsis thaliana
cgggttgcggacagtgt

SEQ ID NO: 81814 - DNA, 17 bp, Arabidopsis thaliana
cgggttgcggtttaagt

SEQ ID NO: 81815 - DNA, 17 bp, Arabidopsis thaliana
cgggttgcttgctgctt

SEQ ID NO: 81816 - DNA, 17 bp, Arabidopsis thaliana
cgggttggaatagacaa

SEQ ID NO: 81817 - DNA, 17 bp, Arabidopsis thaliana
cgggttggaccacgggt

SEQ ID NO: 81818 - DNA, 17 bp, Arabidopsis thaliana
cgggttggcgggacaga

SEQ ID NO: 81819 - DNA, 17 bp, Arabidopsis thaliana
cgggttggcgggacggg

SEQ ID NO: 81820 - DNA, 17 bp, Arabidopsis thaliana
cgggttggctaagtccg

SEQ ID NO: 81821 - DNA, 17 bp, Arabidopsis thaliana
cgggttggcttgtttag

SEQ ID NO: 81822 - DNA, 17 bp, Arabidopsis thaliana
cgggttggcttgtttcg

SEQ ID NO: 81823 - DNA, 17 bp, Arabidopsis thaliana
cgggttgggcttgtagt

SEQ ID NO: 81824 - DNA, 17 bp, Arabidopsis thaliana
cgggttgggctttttta

SEQ ID NO: 81825 - DNA, 17 bp, Arabidopsis thaliana
cgggttgtttgggaatg

SEQ ID NO: 81826 - DNA, 17 bp, Arabidopsis thaliana
cgggtttacgatttttg

SEQ ID NO: 81827 - DNA, 17 bp, Arabidopsis thaliana
cgggtttacgtttttga

SEQ ID NO: 81828 - DNA, 17 bp, Arabidopsis thaliana
cgggtttacgtttttgg

SEQ ID NO: 81829 - DNA, 17 bp, Arabidopsis thaliana
cgggtttagcaagacgt

SEQ ID NO: 81830 - DNA, 17 bp, Arabidopsis thaliana
cgggtttagcagaacgt

SEQ ID NO: 81831 - DNA, 17 bp, Arabidopsis thaliana
cgggtttagcaggatgt

SEQ ID NO: 81832 - DNA, 17 bp, Arabidopsis thaliana
cgggtttagcagttact

SEQ ID NO: 81833 - DNA, 17 bp, Arabidopsis thaliana
cgggtttagttcagttt

SEQ ID NO: 81834 - DNA, 17 bp, Arabidopsis thaliana
cgggtttattttgaatt

SEQ ID NO: 81835 - DNA, 17 bp, Arabidopsis thaliana
cgggtttattttgagtt

SEQ ID NO: 81836 - DNA, 17 bp, Arabidopsis thaliana
cgggtttcaactgacac

SEQ ID NO: 81837 - DNA, 17 bp, Arabidopsis thaliana
cgggtttcagcgtctat

SEQ ID NO: 81838 - DNA, 17 bp, Arabidopsis thaliana
cgggtttcattcgtctt

SEQ ID NO: 81839 - DNA, 17 bp, Arabidopsis thaliana
cgggtttcccggcaggt

SEQ ID NO: 81840 - DNA, 17 bp, Arabidopsis thaliana
cgggtttcccggcggtg

SEQ ID NO: 81841 - DNA, 17 bp, Arabidopsis thaliana
cgggtttcccggctggt

SEQ ID NO: 81842 - DNA, 17 bp, Arabidopsis thaliana
cgggtttcggcccagag

SEQ ID NO: 81843 - DNA, 17 bp, Arabidopsis thaliana
cgggtttctaattgcga

SEQ ID NO: 81844 - DNA, 17 bp, Arabidopsis thaliana
cgggtttctaggttcta

SEQ ID NO: 81845 - DNA, 17 bp, Arabidopsis thaliana
cgggtttctctcggcag

SEQ ID NO: 81846 - DNA, 17 bp, Arabidopsis thaliana
cgggtttcttccatctt

SEQ ID NO: 81847 - DNA, 17 bp, Arabidopsis thaliana
cgggtttgacaggacgt

SEQ ID NO: 81848 - DNA, 17 bp, Arabidopsis thaliana
cgggtttgagaggacgt

SEQ ID NO: 81849 - DNA, 17 bp, Arabidopsis thaliana
cgggtttgataagacgt

SEQ ID NO: 81850 - DNA, 17 bp, Arabidopsis thaliana
cgggtttgataggacgt

SEQ ID NO: 81851 - DNA, 17 bp, Arabidopsis thaliana
cgggtttgcgggccggc

SEQ ID NO: 81852 - DNA, 17 bp, Arabidopsis thaliana
cgggtttgctttagcta

SEQ ID NO: 81853 - DNA, 17 bp, Arabidopsis thaliana
cgggtttggaaggacgg

SEQ ID NO: 81854 - DNA, 17 bp, Arabidopsis thaliana
cgggtttggcaagacgt

SEQ ID NO: 81855 - DNA, 17 bp, Arabidopsis thaliana
cgggtttggcaagatgt

SEQ ID NO: 81856 - DNA, 17 bp, Arabidopsis thaliana
cgggtttggcaggacgt

SEQ ID NO: 81857 - DNA, 17 bp, Arabidopsis thaliana
cgggtttggcaggatgt

SEQ ID NO: 81858 - DNA, 17 bp, Arabidopsis thaliana
cgggtttggcaggttgt

SEQ ID NO: 81859 - DNA, 17 bp, Arabidopsis thaliana
cgggtttggcagtacgt

SEQ ID NO: 81860 - DNA, 17 bp, Arabidopsis thaliana
cgggtttggcgagacgg

SEQ ID NO: 81861 - DNA, 17 bp, Arabidopsis thaliana
cgggtttggcggaacgg

SEQ ID NO: 81862 - DNA, 17 bp, Arabidopsis thaliana
cgggtttggcgggacgg

SEQ ID NO: 81863 - DNA, 17 bp, Arabidopsis thaliana
cgggtttgggtcggtta

SEQ ID NO: 81864 - DNA, 17 bp, Arabidopsis thaliana
cgggtttgggttcgaat

SEQ ID NO: 81865 - DNA, 17 bp, Arabidopsis thaliana
cgggtttggtaggacgt

SEQ ID NO: 81866 - DNA, 17 bp, Arabidopsis thaliana
cgggtttggtcgatggt

SEQ ID NO: 81867 - DNA, 17 bp, Arabidopsis thaliana
cgggtttgtcaggacgt

SEQ ID NO: 81868 - DNA, 17 bp, Arabidopsis thaliana
cgggtttgtttcccggc

SEQ ID NO: 81869 - DNA, 17 bp, Arabidopsis thaliana
cgggtttgtttcgggaa

SEQ ID NO: 81870 - DNA, 17 bp, Arabidopsis thaliana
cgggttttccggattgc

SEQ ID NO: 81871 - DNA, 17 bp, Arabidopsis thaliana
cgggttttgcgggacgg

SEQ ID NO: 81872 - DNA, 17 bp, Arabidopsis thaliana
cgggttttgcgggaggg

SEQ ID NO: 81873 - DNA, 17 bp, Arabidopsis thaliana
cgggttttggtccaagt

SEQ ID NO: 81874 - DNA, 17 bp, Arabidopsis thaliana
cgggtttttcggatcgg

SEQ ID NO: 81875 - DNA, 17 bp, Arabidopsis thaliana
cgggttttttcgggctt

SEQ ID NO: 81876 - DNA, 17 bp, Arabidopsis thaliana
cggtaaaaagtgtggca

SEQ ID NO: 81877 - DNA, 17 bp, Arabidopsis thaliana
cggtaaactaggaccgg

SEQ ID NO: 81878 - DNA, 17 bp, Arabidopsis thaliana
cggtaaacttttctcga

SEQ ID NO: 81879 - DNA, 17 bp, Arabidopsis thaliana
cggtaaattccgtccaa

SEQ ID NO: 81880 - DNA, 17 bp, Arabidopsis thaliana
cggtaacacttatttct

SEQ ID NO: 81881 - DNA, 17 bp, Arabidopsis thaliana
cggtaactcgctggatt

SEQ ID NO: 81882 - DNA, 17 bp, Arabidopsis thaliana
cggtaagattccgagtt

SEQ ID NO: 81883 - DNA, 17 bp, Arabidopsis thaliana
cggtaagcagatcaatg

SEQ ID NO: 81884 - DNA, 17 bp, Arabidopsis thaliana
cggtaagccgcagtgaa

SEQ ID NO: 81885 - DNA, 17 bp, Arabidopsis thaliana
cggtaaggcaacgggtt

SEQ ID NO: 81886 - DNA, 17 bp, Arabidopsis thaliana
cggtaagggttgtggta

SEQ ID NO: 81887 - DNA, 17 bp, Arabidopsis thaliana
cggtaagtcctcgtgtt

SEQ ID NO: 81888 - DNA, 17 bp, Arabidopsis thaliana
cggtaattccttcaacg

SEQ ID NO: 81889 - DNA, 17 bp, Arabidopsis thaliana
cggtacaagcctttcgc

SEQ ID NO: 81890 - DNA, 17 bp, Arabidopsis thaliana
cggtacaattccggaaa

SEQ ID NO: 81891 - DNA, 17 bp, Arabidopsis thaliana
cggtacagtaaacgcgg

SEQ ID NO: 81892 - DNA, 17 bp, Arabidopsis thaliana
cggtagaccactggtga

SEQ ID NO: 81893 - DNA, 17 bp, Arabidopsis thaliana
cggtagagatgaattga

SEQ ID NO: 81894 - DNA, 17 bp, Arabidopsis thaliana
cggtagagatgacttga

SEQ ID NO: 81895 - DNA, 17 bp, Arabidopsis thaliana
cggtagaggttgtagac

SEQ ID NO: 81896 - DNA, 17 bp, Arabidopsis thaliana
cggtagattagttggaa

SEQ ID NO: 81897 - DNA, 17 bp, Arabidopsis thaliana
cggtagcggccacgcct

SEQ ID NO: 81898 - DNA, 17 bp, Arabidopsis thaliana
cggtagcgtcaacactg

SEQ ID NO: 81899 - DNA, 17 bp, Arabidopsis thaliana
cggtagctgctgcgttg

SEQ ID NO: 81900 - DNA, 17 bp, Arabidopsis thaliana
cggtaggagcgacgggc

SEQ ID NO: 81901 - DNA, 17 bp, Arabidopsis thaliana
cggtagtcgcatcctgt

SEQ ID NO: 81902 - DNA, 17 bp, Arabidopsis thaliana
cggtagttgtggctgtt

SEQ ID NO: 81903 - DNA, 17 bp, Arabidopsis thaliana
cggtagtttgttgtttt

SEQ ID NO: 81904 - DNA, 17 bp, Arabidopsis thaliana
cggtataccacaagtga

SEQ ID NO: 81905 - DNA, 17 bp, Arabidopsis thaliana
cggtataccgcggagac

SEQ ID NO: 81906 - DNA, 17 bp, Arabidopsis thaliana
cggtataccgcgggacg

SEQ ID NO: 81907 - DNA, 17 bp, Arabidopsis thaliana
cggtatatcgcgggaat

SEQ ID NO: 81908 - DNA, 17 bp, Arabidopsis thaliana
cggtatccaagcttgct

SEQ ID NO: 81909 - DNA, 17 bp, Arabidopsis thaliana
cggtatccaattatccg

SEQ ID NO: 81910 - DNA, 17 bp, Arabidopsis thaliana
cggtatcgtctgtcgtg

SEQ ID NO: 81911 - DNA, 17 bp, Arabidopsis thaliana
cggtatcttggtgccgc

SEQ ID NO: 81912 - DNA, 17 bp, Arabidopsis thaliana
cggtatgctgccttcac

SEQ ID NO: 81913 - DNA, 17 bp, Arabidopsis thaliana
cggtatggggattttgg

SEQ ID NO: 81914 - DNA, 17 bp, Arabidopsis thaliana
cggtattgatcatttac

SEQ ID NO: 81915 - DNA, 17 bp, Arabidopsis thaliana
cggtattgatcttccgc

SEQ ID NO: 81916 - DNA, 17 bp, Arabidopsis thaliana
cggtattgcggtgcggt

SEQ ID NO: 81917 - DNA, 17 bp, Arabidopsis thaliana
cggtattgtcggaggtg

SEQ ID NO: 81918 - DNA, 17 bp, Arabidopsis thaliana
cggtattgtgcgtgtgc

SEQ ID NO: 81919 - DNA, 17 bp, Arabidopsis thaliana
cggtatttcgcctgtga

SEQ ID NO: 81920 - DNA, 17 bp, Arabidopsis thaliana
cggtatttttcgatcgt

SEQ ID NO: 81921 - DNA, 17 bp, Arabidopsis thaliana
cggtcaaatctaattgt

SEQ ID NO: 81922 - DNA, 17 bp, Arabidopsis thaliana
cggtcaacaagagatgt

SEQ ID NO: 81923 - DNA, 17 bp, Arabidopsis thaliana
cggtcaaccgagtacaa

SEQ ID NO: 81924 - DNA, 17 bp, Arabidopsis thaliana
cggtcaagcccatattg

SEQ ID NO: 81925 - DNA, 17 bp, Arabidopsis thaliana
cggtcacgtctgcctgg

SEQ ID NO: 81926 - DNA, 17 bp, Arabidopsis thaliana
cggtcactacactatcc

SEQ ID NO: 81927 - DNA, 17 bp, Arabidopsis thaliana
cggtcagccctttgtcg

SEQ ID NO: 81928 - DNA, 17 bp, Arabidopsis thaliana
cggtcagctaccgactt

SEQ ID NO: 81929 - DNA, 17 bp, Arabidopsis thaliana
cggtcagttccaggagt

SEQ ID NO: 81930 - DNA, 17 bp, Arabidopsis thaliana
cggtcatcatcgtgaat

SEQ ID NO: 81931 - DNA, 17 bp, Arabidopsis thaliana
cggtcatcattgtgaat

SEQ ID NO: 81932 - DNA, 17 bp, Arabidopsis thaliana
cggtccaagctgatgat

SEQ ID NO: 81933 - DNA, 17 bp, Arabidopsis thaliana
cggtccaatttggttgc

SEQ ID NO: 81934 - DNA, 17 bp, Arabidopsis thaliana
cggtccagagcgtccag

SEQ ID NO: 81935 - DNA, 17 bp, Arabidopsis thaliana
cggtccataatggacaa

SEQ ID NO: 81936 - DNA, 17 bp, Arabidopsis thaliana
cggtccatccaatactc

SEQ ID NO: 81937 - DNA, 17 bp, Arabidopsis thaliana
cggtccccacagacggc

SEQ ID NO: 81938 - DNA, 17 bp, Arabidopsis thaliana
cggtccctatctgtcgt

SEQ ID NO: 81939 - DNA, 17 bp, Arabidopsis thaliana
cggtccctgtatagccc

SEQ ID NO: 81940 - DNA, 17 bp, Arabidopsis thaliana
cggtccctgtataggcc

SEQ ID NO: 81941 - DNA, 17 bp, Arabidopsis thaliana
cggtccgaacgacgctt

SEQ ID NO: 81942 - DNA, 17 bp, Arabidopsis thaliana
cggtccgcagttagtcc

SEQ ID NO: 81943 - DNA, 17 bp, Arabidopsis thaliana
cggtccgccgatcgatt

SEQ ID NO: 81944 - DNA, 17 bp, Arabidopsis thaliana
cggtccgcctttggtgt

SEQ ID NO: 81945 - DNA, 17 bp, Arabidopsis thaliana
cggtccgctctagcacc

SEQ ID NO: 81946 - DNA, 17 bp, Arabidopsis thaliana
cggtcctccgctgagcc

SEQ ID NO: 81947 - DNA, 17 bp, Arabidopsis thaliana
cggtcctgcgtgtggca

SEQ ID NO: 81948 - DNA, 17 bp, Arabidopsis thaliana
cggtcctggagcttttc

SEQ ID NO: 81949 - DNA, 17 bp, Arabidopsis thaliana
cggtcctgggcagcacc

SEQ ID NO: 81950 - DNA, 17 bp, Arabidopsis thaliana
cggtcgacgattcctcc

SEQ ID NO: 81951 - DNA, 17 bp, Arabidopsis thaliana
cggtcgactttccaaac

SEQ ID NO: 81952 - DNA, 17 bp, Arabidopsis thaliana
cggtcgagagggatggt

SEQ ID NO: 81953 - DNA, 17 bp, Arabidopsis thaliana
cggtcgagcgcctagga

SEQ ID NO: 81954 - DNA, 17 bp, Arabidopsis thaliana
cggtcgaggattcgtca

SEQ ID NO: 81955 - DNA, 17 bp, Arabidopsis thaliana
cggtcgaggattcgtta

SEQ ID NO: 81956 - DNA, 17 bp, Arabidopsis thaliana
cggtcgagtgactttca

SEQ ID NO: 81957 - DNA, 17 bp, Arabidopsis thaliana
cggtcgatctggatatg

SEQ ID NO: 81958 - DNA, 17 bp, Arabidopsis thaliana
cggtcgatctttggttc

SEQ ID NO: 81959 - DNA, 17 bp, Arabidopsis thaliana
cggtcgcacggcggtct

SEQ ID NO: 81960 - DNA, 17 bp, Arabidopsis thaliana
cggtcgcattctgtaga

SEQ ID NO: 81961 - DNA, 17 bp, Arabidopsis thaliana
cggtcggagcagcctgt

SEQ ID NO: 81962 - DNA, 17 bp, Arabidopsis thaliana
cggtcggcagatggtcc

SEQ ID NO: 81963 - DNA, 17 bp, Arabidopsis thaliana
cggtcggccatattgca

SEQ ID NO: 81964 - DNA, 17 bp, Arabidopsis thaliana
cggtcggcgatacgctc

SEQ ID NO: 81965 - DNA, 17 bp, Arabidopsis thaliana
cggtcggcttgtccctc

SEQ ID NO: 81966 - DNA, 17 bp, Arabidopsis thaliana
cggtcggcttgtccctt

SEQ ID NO: 81967 - DNA, 17 bp, Arabidopsis thaliana
cggtcgggatggacaaa

SEQ ID NO: 81968 - DNA, 17 bp, Arabidopsis thaliana
cggtcggggtcggcttg

SEQ ID NO: 81969 - DNA, 17 bp, Arabidopsis thaliana
cggtcggtgatacgctc

SEQ ID NO: 81970 - DNA, 17 bp, Arabidopsis thaliana
cggtcggttcaggagta

SEQ ID NO: 81971 - DNA, 17 bp, Arabidopsis thaliana
cggtcgtacattgcagc

SEQ ID NO: 81972 - DNA, 17 bp, Arabidopsis thaliana
cggtcgtctttaccagt

SEQ ID NO: 81973 - DNA, 17 bp, Arabidopsis thaliana
cggtcgttagagattcc

SEQ ID NO: 81974 - DNA, 17 bp, Arabidopsis thaliana
cggtctaaaagttatgg

SEQ ID NO: 81975 - DNA, 17 bp, Arabidopsis thaliana
cggtctaacgtttgcgg

SEQ ID NO: 81976 - DNA, 17 bp, Arabidopsis thaliana
cggtctagcggagcagg

SEQ ID NO: 81977 - DNA, 17 bp, Arabidopsis thaliana
cggtctcagaattgtgt

SEQ ID NO: 81978 - DNA, 17 bp, Arabidopsis thaliana
cggtctcatagcgacat

SEQ ID NO: 81979 - DNA, 17 bp, Arabidopsis thaliana
cggtctcgtggcacact

SEQ ID NO: 81980 - DNA, 17 bp, Arabidopsis thaliana
cggtctcgtgtaagttg

SEQ ID NO: 81981 - DNA, 17 bp, Arabidopsis thaliana
cggtctctacgcttgat

SEQ ID NO: 81982 - DNA, 17 bp, Arabidopsis thaliana
cggtctctattttccca

SEQ ID NO: 81983 - DNA, 17 bp, Arabidopsis thaliana
cggtctgcagatggtcc

SEQ ID NO: 81984 - DNA, 17 bp, Arabidopsis thaliana
cggtctgtttggcaaag

SEQ ID NO: 81985 - DNA, 17 bp, Arabidopsis thaliana
cggtcttagcctgtttg

SEQ ID NO: 81986 - DNA, 17 bp, Arabidopsis thaliana
cggtcttcctatgactc

SEQ ID NO: 81987 - DNA, 17 bp, Arabidopsis thaliana
cggtcttcgcttcaacg

SEQ ID NO: 81988 - DNA, 17 bp, Arabidopsis thaliana
cggtcttctagttaagg

SEQ ID NO: 81989 - DNA, 17 bp, Arabidopsis thaliana
cggtcttggtaggatga

SEQ ID NO: 81990 - DNA, 17 bp, Arabidopsis thaliana
cggtcttgtgcaaggta

SEQ ID NO: 81991 - DNA, 17 bp, Arabidopsis thaliana
cggtgaaaaccacatct

SEQ ID NO: 81992 - DNA, 17 bp, Arabidopsis thaliana
cggtgaaatgcgtagag

SEQ ID NO: 81993 - DNA, 17 bp, Arabidopsis thaliana
cggtgaacctgcggaag

SEQ ID NO: 81994 - DNA, 17 bp, Arabidopsis thaliana
cggtgaacggcggccgt

SEQ ID NO: 81995 - DNA, 17 bp, Arabidopsis thaliana
cggtgaacggttcatca

SEQ ID NO: 81996 - DNA, 17 bp, Arabidopsis thaliana
cggtgaacggttcatta

SEQ ID NO: 81997 - DNA, 17 bp, Arabidopsis thaliana
cggtgaacttcttggac

SEQ ID NO: 81998 - DNA, 17 bp, Arabidopsis thaliana
cggtgaacttgtatcat

SEQ ID NO: 81999 - DNA, 17 bp, Arabidopsis thaliana
cggtgaagcagcccttg

SEQ ID NO: 82000 - DNA, 17 bp, Arabidopsis thaliana
cggtgaaggaggaaggg

SEQ ID NO: 82001 - DNA, 17 bp, Arabidopsis thaliana
cggtgaaggggtgggga

SEQ ID NO: 82002 - DNA, 17 bp, Arabidopsis thaliana
cggtgaagtgttcggat

SEQ ID NO: 82003 - DNA, 17 bp, Arabidopsis thaliana
cggtgaagtgttcggtt

SEQ ID NO: 82004 - DNA, 17 bp, Arabidopsis thaliana
cggtgaatcgggttgaa

SEQ ID NO: 82005 - DNA, 17 bp, Arabidopsis thaliana
cggtgacagatttgctt

SEQ ID NO: 82006 - DNA, 17 bp, Arabidopsis thaliana
cggtgacatcgatgatt

SEQ ID NO: 82007 - DNA, 17 bp, Arabidopsis thaliana
cggtgacccgggttcgt

SEQ ID NO: 82008 - DNA, 17 bp, Arabidopsis thaliana
cggtgacctctatgttt

SEQ ID NO: 82009 - DNA, 17 bp, Arabidopsis thaliana
cggtgacgaagatgacg

SEQ ID NO: 82010 - DNA, 17 bp, Arabidopsis thaliana
cggtgacggaaggcaac

SEQ ID NO: 82011 - DNA, 17 bp, Arabidopsis thaliana
cggtgacgtcggagacg

SEQ ID NO: 82012 - DNA, 17 bp, Arabidopsis thaliana
cggtgacgttgacagta

SEQ ID NO: 82013 - DNA, 17 bp, Arabidopsis thaliana
cggtgactcagctagcg

SEQ ID NO: 82014 - DNA, 17 bp, Arabidopsis thaliana
cggtgactctgacggtg

SEQ ID NO: 82015 - DNA, 17 bp, Arabidopsis thaliana
cggtgactgatttggta

SEQ ID NO: 82016 - DNA, 17 bp, Arabidopsis thaliana
cggtgagcggtcaagaa

SEQ ID NO: 82017 - DNA, 17 bp, Arabidopsis thaliana
cggtgagcggtcaagta

SEQ ID NO: 82018 - DNA, 17 bp, Arabidopsis thaliana
cggtgaggaccagcagg

SEQ ID NO: 82019 - DNA, 17 bp, Arabidopsis thaliana
cggtgagtcgatttggc

SEQ ID NO: 82020 - DNA, 17 bp, Arabidopsis thaliana
cggtgagtctatttggc

SEQ ID NO: 82021 - DNA, 17 bp, Arabidopsis thaliana
cggtgagtctatttgtc

SEQ ID NO: 82022 - DNA, 17 bp, Arabidopsis thaliana
cggtgagtcttacgctg

SEQ ID NO: 82023 - DNA, 17 bp, Arabidopsis thaliana
cggtgatcggtttcgtg

SEQ ID NO: 82024 - DNA, 17 bp, Arabidopsis thaliana
cggtgatgtaaactggt

SEQ ID NO: 82025 - DNA, 17 bp, Arabidopsis thaliana
cggtgattgccggcgat

SEQ ID NO: 82026 - DNA, 17 bp, Arabidopsis thaliana
cggtgattggaagatcg

SEQ ID NO: 82027 - DNA, 17 bp, Arabidopsis thaliana
cggtgatttccgcaggt

SEQ ID NO: 82028 - DNA, 17 bp, Arabidopsis thaliana
cggtgatttctacattg

SEQ ID NO: 82029 - DNA, 17 bp, Arabidopsis thaliana
cggtgatttgttatttt

SEQ ID NO: 82030 - DNA, 17 bp, Arabidopsis thaliana
cggtgcagatcttggtg

SEQ ID NO: 82031 - DNA, 17 bp, Arabidopsis thaliana
cggtgcagcacggaggg

SEQ ID NO: 82032 - DNA, 17 bp, Arabidopsis thaliana
cggtgcaggagaagtgc

SEQ ID NO: 82033 - DNA, 17 bp, Arabidopsis thaliana
cggtgcatttctaccgg

SEQ ID NO: 82034 - DNA, 17 bp, Arabidopsis thaliana
cggtgccaggcgggcta

SEQ ID NO: 82035 - DNA, 17 bp, Arabidopsis thaliana
cggtgccatctctgttg

SEQ ID NO: 82036 - DNA, 17 bp, Arabidopsis thaliana
cggtgcccaactgcccg

SEQ ID NO: 82037 - DNA, 17 bp, Arabidopsis thaliana
cggtgcccaactgcgca

SEQ ID NO: 82038 - DNA, 17 bp, Arabidopsis thaliana
cggtgcccaactgcgcg

SEQ ID NO: 82039 - DNA, 17 bp, Arabidopsis thaliana
cggtgccgagtggaagg

SEQ ID NO: 82040 - DNA, 17 bp, Arabidopsis thaliana
cggtgcctgtagactcc

SEQ ID NO: 82041 - DNA, 17 bp, Arabidopsis thaliana
cggtgcgacgaagggct

SEQ ID NO: 82042 - DNA, 17 bp, Arabidopsis thaliana
cggtgcgagccccgcag

SEQ ID NO: 82043 - DNA, 17 bp, Arabidopsis thaliana
cggtgcggaacaagcgg

SEQ ID NO: 82044 - DNA, 17 bp, Arabidopsis thaliana
cggtgcgggagaagtgc

SEQ ID NO: 82045 - DNA, 17 bp, Arabidopsis thaliana
cggtgcggttcagatag

SEQ ID NO: 82046 - DNA, 17 bp, Arabidopsis thaliana
cggtgcggttcagatgg

SEQ ID NO: 82047 - DNA, 17 bp, Arabidopsis thaliana
cggtgcgttccggggtg

SEQ ID NO: 82048 - DNA, 17 bp, Arabidopsis thaliana
cggtgcgtttctaccga

SEQ ID NO: 82049 - DNA, 17 bp, Arabidopsis thaliana
cggtgcgtttctaccgg

SEQ ID NO: 82050 - DNA, 17 bp, Arabidopsis thaliana
cggtgctacaaagactt

SEQ ID NO: 82051 - DNA, 17 bp, Arabidopsis thaliana
cggtgctgttactttga

SEQ ID NO: 82052 - DNA, 17 bp, Arabidopsis thaliana
cggtgcttgtcgcagcg

SEQ ID NO: 82053 - DNA, 17 bp, Arabidopsis thaliana
cggtggaaggattacgg

SEQ ID NO: 82054 - DNA, 17 bp, Arabidopsis thaliana
cggtggacagcggtact

SEQ ID NO: 82055 - DNA, 17 bp, Arabidopsis thaliana
cggtggagattacaaac

SEQ ID NO: 82056 - DNA, 17 bp, Arabidopsis thaliana
cggtggagcatgtggtt

SEQ ID NO: 82057 - DNA, 17 bp, Arabidopsis thaliana
cggtggagcgatttgtc

SEQ ID NO: 82058 - DNA, 17 bp, Arabidopsis thaliana
cggtggaggaactttag

SEQ ID NO: 82059 - DNA, 17 bp, Arabidopsis thaliana
cggtggaggaactttcg

SEQ ID NO: 82060 - DNA, 17 bp, Arabidopsis thaliana
cggtggcagtcaagatc

SEQ ID NO: 82061 - DNA, 17 bp, Arabidopsis thaliana
cggtggcagtgccgatg

SEQ ID NO: 82062 - DNA, 17 bp, Arabidopsis thaliana
cggtggcatacaaactt

SEQ ID NO: 82063 - DNA, 17 bp, Arabidopsis thaliana
cggtggcggcctaaacc

SEQ ID NO: 82064 - DNA, 17 bp, Arabidopsis thaliana
cggtggcggcctaagcc

SEQ ID NO: 82065 - DNA, 17 bp, Arabidopsis thaliana
cggtggcggcctaagcg

SEQ ID NO: 82066 - DNA, 17 bp, Arabidopsis thaliana
cggtggcggcctaagtc

SEQ ID NO: 82067 - DNA, 17 bp, Arabidopsis thaliana
cggtggcggcggcggtt

SEQ ID NO: 82068 - DNA, 17 bp, Arabidopsis thaliana
cggtgggagcgagatcg

SEQ ID NO: 82069 - DNA, 17 bp, Arabidopsis thaliana
cggtgggatgggtcggc

SEQ ID NO: 82070 - DNA, 17 bp, Arabidopsis thaliana
cggtgggctttaatgaa

SEQ ID NO: 82071 - DNA, 17 bp, Arabidopsis thaliana
cggtgggctttaatgag

SEQ ID NO: 82072 - DNA, 17 bp, Arabidopsis thaliana
cggtgggtaggtagaga

SEQ ID NO: 82073 - DNA, 17 bp, Arabidopsis thaliana
cggtggtacagacagta

SEQ ID NO: 82074 - DNA, 17 bp, Arabidopsis thaliana
cggtggtattccctatc

SEQ ID NO: 82075 - DNA, 17 bp, Arabidopsis thaliana
cggtggtccagacagta

SEQ ID NO: 82076 - DNA, 17 bp, Arabidopsis thaliana
cggtggtccaggtgcct

SEQ ID NO: 82077 - DNA, 17 bp, Arabidopsis thaliana
cggtggtcggcgtcggc

SEQ ID NO: 82078 - DNA, 17 bp, Arabidopsis thaliana
cggtggtgattatggaa

SEQ ID NO: 82079 - DNA, 17 bp, Arabidopsis thaliana
cggtgtaatgcgtcttc

SEQ ID NO: 82080 - DNA, 17 bp, Arabidopsis thaliana
cggtgtagggttcaaga

SEQ ID NO: 82081 - DNA, 17 bp, Arabidopsis thaliana
cggtgtccattggtcgg

SEQ ID NO: 82082 - DNA, 17 bp, Arabidopsis thaliana
cggtgtccctgagatca

SEQ ID NO: 82083 - DNA, 17 bp, Arabidopsis thaliana
cggtgtcgggggttcga

SEQ ID NO: 82084 - DNA, 17 bp, Arabidopsis thaliana
cggtgtctctaaaggtt

SEQ ID NO: 82085 - DNA, 17 bp, Arabidopsis thaliana
cggtgtctttgattttg

SEQ ID NO: 82086 - DNA, 17 bp, Arabidopsis thaliana
cggtgtgaagccatctc

SEQ ID NO: 82087 - DNA, 17 bp, Arabidopsis thaliana
cggtgtgacacagattg

SEQ ID NO: 82088 - DNA, 17 bp, Arabidopsis thaliana
cggtgtgatggcaactt

SEQ ID NO: 82089 - DNA, 17 bp, Arabidopsis thaliana
cggtgtgcattggtagg

SEQ ID NO: 82090 - DNA, 17 bp, Arabidopsis thaliana
cggtgtgcattggtccc

SEQ ID NO: 82091 - DNA, 17 bp, Arabidopsis thaliana
cggtgtgcattggtccg

SEQ ID NO: 82092 - DNA, 17 bp, Arabidopsis thaliana
cggtgtgcattggtcga

SEQ ID NO: 82093 - DNA, 17 bp, Arabidopsis thaliana
cggtgtgcattggtcgc

SEQ ID NO: 82094 - DNA, 17 bp, Arabidopsis thaliana
cggtgtgcattggtcgg

SEQ ID NO: 82095 - DNA, 17 bp, Arabidopsis thaliana
cggtgtgcattggtctg

SEQ ID NO: 82096 - DNA, 17 bp, Arabidopsis thaliana
cggtgtgcattggtggg

SEQ ID NO: 82097 - DNA, 17 bp, Arabidopsis thaliana
cggtgtggatatcggat

SEQ ID NO: 82098 - DNA, 17 bp, Arabidopsis thaliana
cggtgtgggcgttagag

SEQ ID NO: 82099 - DNA, 17 bp, Arabidopsis thaliana
cggtgtgttcctatcga

SEQ ID NO: 82100 - DNA, 17 bp, Arabidopsis thaliana
cggtgtgttgttcgttt

SEQ ID NO: 82101 - DNA, 17 bp, Arabidopsis thaliana
cggtgttaggcggagat

SEQ ID NO: 82102 - DNA, 17 bp, Arabidopsis thaliana
cggtgttctgagatcat

SEQ ID NO: 82103 - DNA, 17 bp, Arabidopsis thaliana
cggtgttgaacgtttca

SEQ ID NO: 82104 - DNA, 17 bp, Arabidopsis thaliana
cggtgttggcattggac

SEQ ID NO: 82105 - DNA, 17 bp, Arabidopsis thaliana
cggtgttggtcccgacc

SEQ ID NO: 82106 - DNA, 17 bp, Arabidopsis thaliana
cggtgtttatcagttta

SEQ ID NO: 82107 - DNA, 17 bp, Arabidopsis thaliana
cggtgttttcagacaat

SEQ ID NO: 82108 - DNA, 17 bp, Arabidopsis thaliana
cggttaaccatagaccc

SEQ ID NO: 82109 - DNA, 17 bp, Arabidopsis thaliana
cggttaacccgcgattc

SEQ ID NO: 82110 - DNA, 17 bp, Arabidopsis thaliana
cggttaactgatcggtt

SEQ ID NO: 82111 - DNA, 17 bp, Arabidopsis thaliana
cggttaagacggacaaa

SEQ ID NO: 82112 - DNA, 17 bp, Arabidopsis thaliana
cggttaagattcatggg

SEQ ID NO: 82113 - DNA, 17 bp, Arabidopsis thaliana
cggttaaggttgtctac

SEQ ID NO: 82114 - DNA, 17 bp, Arabidopsis thaliana
cggttaatccgacaggt

SEQ ID NO: 82115 - DNA, 17 bp, Arabidopsis thaliana
cggttaatctcaggcca

SEQ ID NO: 82116 - DNA, 17 bp, Arabidopsis thaliana
cggttacaagaatctct

SEQ ID NO: 82117 - DNA, 17 bp, Arabidopsis thaliana
cggttagacggaccgac

SEQ ID NO: 82118 - DNA, 17 bp, Arabidopsis thaliana
cggttagccggaacccg

SEQ ID NO: 82119 - DNA, 17 bp, Arabidopsis thaliana
cggttagcctgttaatc

SEQ ID NO: 82120 - DNA, 17 bp, Arabidopsis thaliana
cggttagcctgttgatg

SEQ ID NO: 82121 - DNA, 17 bp, Arabidopsis thaliana
cggttaggatatctggc

SEQ ID NO: 82122 - DNA, 17 bp, Arabidopsis thaliana
cggttaggtttctgttg

SEQ ID NO: 82123 - DNA, 17 bp, Arabidopsis thaliana
cggttatagtggacata

SEQ ID NO: 82124 - DNA, 17 bp, Arabidopsis thaliana
cggttatgctcagggct

SEQ ID NO: 82125 - DNA, 17 bp, Arabidopsis thaliana
cggttatgcttctgttg

SEQ ID NO: 82126 - DNA, 17 bp, Arabidopsis thaliana
cggttattagcgattgg

SEQ ID NO: 82127 - DNA, 17 bp, Arabidopsis thaliana
cggttattcggtcatgt

SEQ ID NO: 82128 - DNA, 17 bp, Arabidopsis thaliana
cggttattgggactctt

SEQ ID NO: 82129 - DNA, 17 bp, Arabidopsis thaliana
cggttcaaagcggcatg

SEQ ID NO: 82130 - DNA, 17 bp, Arabidopsis thaliana
cggttcaaccggttcac

SEQ ID NO: 82131 - DNA, 17 bp, Arabidopsis thaliana
cggttcaactacggtac

SEQ ID NO: 82132 - DNA, 17 bp, Arabidopsis thaliana
cggttcaactgcagtac

SEQ ID NO: 82133 - DNA, 17 bp, Arabidopsis thaliana
cggttcaactgcggata

SEQ ID NO: 82134 - DNA, 17 bp, Arabidopsis thaliana
cggttcaagtgacgctt

SEQ ID NO: 82135 - DNA, 17 bp, Arabidopsis thaliana
cggttcaatttcgcttc

SEQ ID NO: 82136 - DNA, 17 bp, Arabidopsis thaliana
cggttcagattgggttt

SEQ ID NO: 82137 - DNA, 17 bp, Arabidopsis thaliana
cggttcagtgcgatttt

SEQ ID NO: 82138 - DNA, 17 bp, Arabidopsis thaliana
cggttcatgaggtgagt

SEQ ID NO: 82139 - DNA, 17 bp, Arabidopsis thaliana
cggttcattctgcgtga

SEQ ID NO: 82140 - DNA, 17 bp, Arabidopsis thaliana
cggttcattctgctgaa

SEQ ID NO: 82141 - DNA, 17 bp, Arabidopsis thaliana
cggttcattggcattgt

SEQ ID NO: 82142 - DNA, 17 bp, Arabidopsis thaliana
cggttccaaattcactc

SEQ ID NO: 82143 - DNA, 17 bp, Arabidopsis thaliana
cggttccaactacactt

SEQ ID NO: 82144 - DNA, 17 bp, Arabidopsis thaliana
cggttcccaatggtgac

SEQ ID NO: 82145 - DNA, 17 bp, Arabidopsis thaliana
cggttcccgaatgactc

SEQ ID NO: 82146 - DNA, 17 bp, Arabidopsis thaliana
cggttcccggctggtgc

SEQ ID NO: 82147 - DNA, 17 bp, Arabidopsis thaliana
cggttcccggggtgtgg

SEQ ID NO: 82148 - DNA, 17 bp, Arabidopsis thaliana
cggttccgaggaatcgt

SEQ ID NO: 82149 - DNA, 17 bp, Arabidopsis thaliana
cggttccggcaggtcgg

SEQ ID NO: 82150 - DNA, 17 bp, Arabidopsis thaliana
cggttccgttacaagtg

SEQ ID NO: 82151 - DNA, 17 bp, Arabidopsis thaliana
cggttcctatctaccga

SEQ ID NO: 82152 - DNA, 17 bp, Arabidopsis thaliana
cggttcctatctaccgt

SEQ ID NO: 82153 - DNA, 17 bp, Arabidopsis thaliana
cggttcctcacgagggt

SEQ ID NO: 82154 - DNA, 17 bp, Arabidopsis thaliana
cggttcctgaatgactc

SEQ ID NO: 82155 - DNA, 17 bp, Arabidopsis thaliana
cggttcctgaatggctc

SEQ ID NO: 82156 - DNA, 17 bp, Arabidopsis thaliana
cggttccttaatggctc

SEQ ID NO: 82157 - DNA, 17 bp, Arabidopsis thaliana
cggttcctttggaattc

SEQ ID NO: 82158 - DNA, 17 bp, Arabidopsis thaliana
cggttcgaatcctactt

SEQ ID NO: 82159 - DNA, 17 bp, Arabidopsis thaliana
cggttcgaatcctgccg

SEQ ID NO: 82160 - DNA, 17 bp, Arabidopsis thaliana
cggttcgaatgatgctt

SEQ ID NO: 82161 - DNA, 17 bp, Arabidopsis thaliana
cggttcgacggaccgcg

SEQ ID NO: 82162 - DNA, 17 bp, Arabidopsis thaliana
cggttcgactccgtcct

SEQ ID NO: 82163 - DNA, 17 bp, Arabidopsis thaliana
cggttcgactttctttt

SEQ ID NO: 82164 - DNA, 17 bp, Arabidopsis thaliana
cggttcgagtcccctta

SEQ ID NO: 82165 - DNA, 17 bp, Arabidopsis thaliana
cggttcgagtccgagca

SEQ ID NO: 82166 - DNA, 17 bp, Arabidopsis thaliana
cggttcgagtccgagta

SEQ ID NO: 82167 - DNA, 17 bp, Arabidopsis thaliana
cggttcgagtccgctac

SEQ ID NO: 82168 - DNA, 17 bp, Arabidopsis thaliana
cggttcgagtccgctta

SEQ ID NO: 82169 - DNA, 17 bp, Arabidopsis thaliana
cggttcgagtccgtata

SEQ ID NO: 82170 - DNA, 17 bp, Arabidopsis thaliana
cggttcgagtcctcttc

SEQ ID NO: 82171 - DNA, 17 bp, Arabidopsis thaliana
cggttcgagtgacgctt

SEQ ID NO: 82172 - DNA, 17 bp, Arabidopsis thaliana
cggttcgagtgacgttt

SEQ ID NO: 82173 - DNA, 17 bp, Arabidopsis thaliana
cggttcgagtgatgatt

SEQ ID NO: 82174 - DNA, 17 bp, Arabidopsis thaliana
cggttcgagtgatgttt

SEQ ID NO: 82175 - DNA, 17 bp, Arabidopsis thaliana
cggttcgatcccgtcag

SEQ ID NO: 82176 - DNA, 17 bp, Arabidopsis thaliana
cggttcgattcccgcta

SEQ ID NO: 82177 - DNA, 17 bp, Arabidopsis thaliana
cggttcgattcccggct

SEQ ID NO: 82178 - DNA, 17 bp, Arabidopsis thaliana
cggttcgattccgatag

SEQ ID NO: 82179 - DNA, 17 bp, Arabidopsis thaliana
cggttcgattccgatcg

SEQ ID NO: 82180 - DNA, 17 bp, Arabidopsis thaliana
cggttcgattccgctta

SEQ ID NO: 82181 - DNA, 17 bp, Arabidopsis thaliana
cggttcgattcctactg

SEQ ID NO: 82182 - DNA, 17 bp, Arabidopsis thaliana
cggttcggctcccactg

SEQ ID NO: 82183 - DNA, 17 bp, Arabidopsis thaliana
cggttcggctcggttca

SEQ ID NO: 82184 - DNA, 17 bp, Arabidopsis thaliana
cggttcgggttgggatc

SEQ ID NO: 82185 - DNA, 17 bp, Arabidopsis thaliana
cggttcggttaatcggt

SEQ ID NO: 82186 - DNA, 17 bp, Arabidopsis thaliana
cggttcggttcccggct

SEQ ID NO: 82187 - DNA, 17 bp, Arabidopsis thaliana
cggttcggtttgtagat

SEQ ID NO: 82188 - DNA, 17 bp, Arabidopsis thaliana
cggttcgtacccgggcg

SEQ ID NO: 82189 - DNA, 17 bp, Arabidopsis thaliana
cggttcgtcccaccggg

SEQ ID NO: 82190 - DNA, 17 bp, Arabidopsis thaliana
cggttcgtctatggcct

SEQ ID NO: 82191 - DNA, 17 bp, Arabidopsis thaliana
cggttcgtttcccggct

SEQ ID NO: 82192 - DNA, 17 bp, Arabidopsis thaliana
cggttctacggattcgg

SEQ ID NO: 82193 - DNA, 17 bp, Arabidopsis thaliana
cggttctactttgaccc

SEQ ID NO: 82194 - DNA, 17 bp, Arabidopsis thaliana
cggttctagtgacgttt

SEQ ID NO: 82195 - DNA, 17 bp, Arabidopsis thaliana
cggttctcagtgatgag

SEQ ID NO: 82196 - DNA, 17 bp, Arabidopsis thaliana
cggttctcggaatgccc

SEQ ID NO: 82197 - DNA, 17 bp, Arabidopsis thaliana
cggttctcttctgtgcg

SEQ ID NO: 82198 - DNA, 17 bp, Arabidopsis thaliana
cggttctggaggattac

SEQ ID NO: 82199 - DNA, 17 bp, Arabidopsis thaliana
cggttctggtgactgag

SEQ ID NO: 82200 - DNA, 17 bp, Arabidopsis thaliana
cggttgaacccgggctc

SEQ ID NO: 82201 - DNA, 17 bp, Arabidopsis thaliana
cggttgaaccggctggg

SEQ ID NO: 82202 - DNA, 17 bp, Arabidopsis thaliana
cggttgaatcgaaaccg

SEQ ID NO: 82203 - DNA, 17 bp, Arabidopsis thaliana
cggttgacccgatgacc

SEQ ID NO: 82204 - DNA, 17 bp, Arabidopsis thaliana
cggttgacccgatgact

SEQ ID NO: 82205 - DNA, 17 bp, Arabidopsis thaliana
cggttgacctgatgacc

SEQ ID NO: 82206 - DNA, 17 bp, Arabidopsis thaliana
cggttgagatgatgagc

SEQ ID NO: 82207 - DNA, 17 bp, Arabidopsis thaliana
cggttgatcatccgcgc

SEQ ID NO: 82208 - DNA, 17 bp, Arabidopsis thaliana
cggttgatccgctcgga

SEQ ID NO: 82209 - DNA, 17 bp, Arabidopsis thaliana
cggttgatccggttagt

SEQ ID NO: 82210 - DNA, 17 bp, Arabidopsis thaliana
cggttgatcgggtggac

SEQ ID NO: 82211 - DNA, 17 bp, Arabidopsis thaliana
cggttgattaaaacgca

SEQ ID NO: 82212 - DNA, 17 bp, Arabidopsis thaliana
cggttgccaggttgtgt

SEQ ID NO: 82213 - DNA, 17 bp, Arabidopsis thaliana
cggttgcggcctaagcc

SEQ ID NO: 82214 - DNA, 17 bp, Arabidopsis thaliana
cggttgcgggagtttgc

SEQ ID NO: 82215 - DNA, 17 bp, Arabidopsis thaliana
cggttgcggtataagtt

SEQ ID NO: 82216 - DNA, 17 bp, Arabidopsis thaliana
cggttgcggttaatgtt

SEQ ID NO: 82217 - DNA, 17 bp, Arabidopsis thaliana
cggttgcggttctagtt

SEQ ID NO: 82218 - DNA, 17 bp, Arabidopsis thaliana
cggttgcggttgaagtt

SEQ ID NO: 82219 - DNA, 17 bp, Arabidopsis thaliana
cggttgcggttgcggga

SEQ ID NO: 82220 - DNA, 17 bp, Arabidopsis thaliana
cggttgcggtttcaagc

SEQ ID NO: 82221 - DNA, 17 bp, Arabidopsis thaliana
cggttgcgtctaatcct

SEQ ID NO: 82222 - DNA, 17 bp, Arabidopsis thaliana
cggttgctatgtttgcg

SEQ ID NO: 82223 - DNA, 17 bp, Arabidopsis thaliana
cggttgctctttccctt

SEQ ID NO: 82224 - DNA, 17 bp, Arabidopsis thaliana
cggttggaagtttgaag

SEQ ID NO: 82225 - DNA, 17 bp, Arabidopsis thaliana
cggttggctgattcctt

SEQ ID NO: 82226 - DNA, 17 bp, Arabidopsis thaliana
cggttgggtaagacacc

SEQ ID NO: 82227 - DNA, 17 bp, Arabidopsis thaliana
cggttgggttatccgag

SEQ ID NO: 82228 - DNA, 17 bp, Arabidopsis thaliana
cggttgtaggctgaatt

SEQ ID NO: 82229 - DNA, 17 bp, Arabidopsis thaliana
cggttgtccaaggatgt

SEQ ID NO: 82230 - DNA, 17 bp, Arabidopsis thaliana
cggttgtctgtcggttc

SEQ ID NO: 82231 - DNA, 17 bp, Arabidopsis thaliana
cggttgtgctatggctt

SEQ ID NO: 82232 - DNA, 17 bp, Arabidopsis thaliana
cggttgtggcagtgaca

SEQ ID NO: 82233 - DNA, 17 bp, Arabidopsis thaliana
cggttgtgggttcgacc

SEQ ID NO: 82234 - DNA, 17 bp, Arabidopsis thaliana
cggttgttagcgattga

SEQ ID NO: 82235 - DNA, 17 bp, Arabidopsis thaliana
cggttgttagcgattgg

SEQ ID NO: 82236 - DNA, 17 bp, Arabidopsis thaliana
cggttgttggtcagaaa

SEQ ID NO: 82237 - DNA, 17 bp, Arabidopsis thaliana
cggtttaaaccggtcgt

SEQ ID NO: 82238 - DNA, 17 bp, Arabidopsis thaliana
cggtttaactctgttcg

SEQ ID NO: 82239 - DNA, 17 bp, Arabidopsis thaliana
cggtttaatgactggtt

SEQ ID NO: 82240 - DNA, 17 bp, Arabidopsis thaliana
cggtttaatgatcggtt

SEQ ID NO: 82241 - DNA, 17 bp, Arabidopsis thaliana
cggtttactaacgaatc

SEQ ID NO: 82242 - DNA, 17 bp, Arabidopsis thaliana
cggtttacttcttattt

SEQ ID NO: 82243 - DNA, 17 bp, Arabidopsis thaliana
cggtttagcctgttaat

SEQ ID NO: 82244 - DNA, 17 bp, Arabidopsis thaliana
cggtttaggcgctagac

SEQ ID NO: 82245 - DNA, 17 bp, Arabidopsis thaliana
cggtttagtttagcagg

SEQ ID NO: 82246 - DNA, 17 bp, Arabidopsis thaliana
cggtttatctttggttt

SEQ ID NO: 82247 - DNA, 17 bp, Arabidopsis thaliana
cggtttcaagtctttgt

SEQ ID NO: 82248 - DNA, 17 bp, Arabidopsis thaliana
cggtttcacatcaagtg

SEQ ID NO: 82249 - DNA, 17 bp, Arabidopsis thaliana
cggtttcacgtcaagtg

SEQ ID NO: 82250 - DNA, 17 bp, Arabidopsis thaliana
cggtttcgattcccggc

SEQ ID NO: 82251 - DNA, 17 bp, Arabidopsis thaliana
cggtttctatgattggt

SEQ ID NO: 82252 - DNA, 17 bp, Arabidopsis thaliana
cggtttctcaggcgttg

SEQ ID NO: 82253 - DNA, 17 bp, Arabidopsis thaliana
cggtttctgaatttccg

SEQ ID NO: 82254 - DNA, 17 bp, Arabidopsis thaliana
cggtttcttcagatctc

SEQ ID NO: 82255 - DNA, 17 bp, Arabidopsis thaliana
cggtttgacacaagcgg

SEQ ID NO: 82256 - DNA, 17 bp, Arabidopsis thaliana
cggtttgactaatgcac

SEQ ID NO: 82257 - DNA, 17 bp, Arabidopsis thaliana
cggtttgcgctggtgct

SEQ ID NO: 82258 - DNA, 17 bp, Arabidopsis thaliana
cggtttggatcatatgg

SEQ ID NO: 82259 - DNA, 17 bp, Arabidopsis thaliana
cggtttggcgaactatg

SEQ ID NO: 82260 - DNA, 17 bp, Arabidopsis thaliana
cggtttggggttagtgc

SEQ ID NO: 82261 - DNA, 17 bp, Arabidopsis thaliana
cggtttggtttcggttc

SEQ ID NO: 82262 - DNA, 17 bp, Arabidopsis thaliana
cggtttgtaagaccttg

SEQ ID NO: 82263 - DNA, 17 bp, Arabidopsis thaliana
cggttttaagtgcggtt

SEQ ID NO: 82264 - DNA, 17 bp, Arabidopsis thaliana
cggttttacgggtttgc

SEQ ID NO: 82265 - DNA, 17 bp, Arabidopsis thaliana
cggttttactgcgggcc

SEQ ID NO: 82266 - DNA, 17 bp, Arabidopsis thaliana
cggttttcgtagaaact

SEQ ID NO: 82267 - DNA, 17 bp, Arabidopsis thaliana
cggttttgaatgcggtt

SEQ ID NO: 82268 - DNA, 17 bp, Arabidopsis thaliana
cggttttgagtgcggtt

SEQ ID NO: 82269 - DNA, 17 bp, Arabidopsis thaliana
cggttttgagtgtggtc

SEQ ID NO: 82270 - DNA, 17 bp, Arabidopsis thaliana
cggttttgagtttggtc

SEQ ID NO: 82271 - DNA, 17 bp, Arabidopsis thaliana
cggttttgatcgcacat

SEQ ID NO: 82272 - DNA, 17 bp, Arabidopsis thaliana
cggttttgcggactttt

SEQ ID NO: 82273 - DNA, 17 bp, Arabidopsis thaliana
cggttttgctccagaat

SEQ ID NO: 82274 - DNA, 17 bp, Arabidopsis thaliana
cggttttggatgtggtc

SEQ ID NO: 82275 - DNA, 17 bp, Arabidopsis thaliana
cggttttgggtgcgatt

SEQ ID NO: 82276 - DNA, 17 bp, Arabidopsis thaliana
cggttttgggtgcggtt

SEQ ID NO: 82277 - DNA, 17 bp, Arabidopsis thaliana
cggttttgtccgtccca

SEQ ID NO: 82278 - DNA, 17 bp, Arabidopsis thaliana
cggttttgtgcgcttgc

SEQ ID NO: 82279 - DNA, 17 bp, Arabidopsis thaliana
cggttttgtgcgcttgg

SEQ ID NO: 82280 - DNA, 17 bp, Arabidopsis thaliana
cggttttgtgtacggtc

SEQ ID NO: 82281 - DNA, 17 bp, Arabidopsis thaliana
cggttttgtttttcctg

SEQ ID NO: 82282 - DNA, 17 bp, Arabidopsis thaliana
cggtttttagcgttatc

SEQ ID NO: 82283 - DNA, 17 bp, Arabidopsis thaliana
cggtttttcggcttttt

SEQ ID NO: 82284 - DNA, 17 bp, Arabidopsis thaliana
cgtaaaaaaagttgtaa

SEQ ID NO: 82285 - DNA, 17 bp, Arabidopsis thaliana
cgtaaacccccaggccc

SEQ ID NO: 82286 - DNA, 17 bp, Arabidopsis thaliana
cgtaaacccgtgatttt

SEQ ID NO: 82287 - DNA, 17 bp, Arabidopsis thaliana
cgtaaacgtaatggatc

SEQ ID NO: 82288 - DNA, 17 bp, Arabidopsis thaliana
cgtaaagatggtgaact

SEQ ID NO: 82289 - DNA, 17 bp, Arabidopsis thaliana
cgtaaagcgtctgtagg

SEQ ID NO: 82290 - DNA, 17 bp, Arabidopsis thaliana
cgtaaatgcgactccgg

SEQ ID NO: 82291 - DNA, 17 bp, Arabidopsis thaliana
cgtaacaaggtagccgt

SEQ ID NO: 82292 - DNA, 17 bp, Arabidopsis thaliana
cgtaacaaggtttccgt

SEQ ID NO: 82293 - DNA, 17 bp, Arabidopsis thaliana
cgtaacatttcggtgcg

SEQ ID NO: 82294 - DNA, 17 bp, Arabidopsis thaliana
cgtaacatttggtccgt

SEQ ID NO: 82295 - DNA, 17 bp, Arabidopsis thaliana
cgtaaccggaccgttta

SEQ ID NO: 82296 - DNA, 17 bp, Arabidopsis thaliana
cgtaaccggatcttaaa

SEQ ID NO: 82297 - DNA, 17 bp, Arabidopsis thaliana
cgtaacctggctctgat

SEQ ID NO: 82298 - DNA, 17 bp, Arabidopsis thaliana
cgtaacctggctctgct

SEQ ID NO: 82299 - DNA, 17 bp, Arabidopsis thaliana
cgtaacgacatcggccc

SEQ ID NO: 82300 - DNA, 17 bp, Arabidopsis thaliana
cgtaacgatctgggcac

SEQ ID NO: 82301 - DNA, 17 bp, Arabidopsis thaliana
cgtaacgtacatgtctc

SEQ ID NO: 82302 - DNA, 17 bp, Arabidopsis thaliana
cgtaactgttgtaaccg

SEQ ID NO: 82303 - DNA, 17 bp, Arabidopsis thaliana
cgtaacttcgggaaaag

SEQ ID NO: 82304 - DNA, 17 bp, Arabidopsis thaliana
cgtaagaatttcggccg

SEQ ID NO: 82305 - DNA, 17 bp, Arabidopsis thaliana
cgtaagacaagctggtt

SEQ ID NO: 82306 - DNA, 17 bp, Arabidopsis thaliana
cgtaagaccatgcccag

SEQ ID NO: 82307 - DNA, 17 bp, Arabidopsis thaliana
cgtaagaccatgtatgg

SEQ ID NO: 82308 - DNA, 17 bp, Arabidopsis thaliana
cgtaagatcgcagggat

SEQ ID NO: 82309 - DNA, 17 bp, Arabidopsis thaliana
cgtaagccgattctacc

SEQ ID NO: 82310 - DNA, 17 bp, Arabidopsis thaliana
cgtaagcggtattctag

SEQ ID NO: 82311 - DNA, 17 bp, Arabidopsis thaliana
cgtaaggtgttgggtta

SEQ ID NO: 82312 - DNA, 17 bp, Arabidopsis thaliana
cgtaagtacaacctcgc

SEQ ID NO: 82313 - DNA, 17 bp, Arabidopsis thaliana
cgtaagtcatgcggtgt

SEQ ID NO: 82314 - DNA, 17 bp, Arabidopsis thaliana
cgtaagtgactacatcg

SEQ ID NO: 82315 - DNA, 17 bp, Arabidopsis thaliana
cgtaatagcggctcacc

SEQ ID NO: 82316 - DNA, 17 bp, Arabidopsis thaliana
cgtaatagtctgtagtc

SEQ ID NO: 82317 - DNA, 17 bp, Arabidopsis thaliana
cgtaatatcatgttttc

SEQ ID NO: 82318 - DNA, 17 bp, Arabidopsis thaliana
cgtaatccccccaagcc

SEQ ID NO: 82319 - DNA, 17 bp, Arabidopsis thaliana
cgtaatccctcaggtcc

SEQ ID NO: 82320 - DNA, 17 bp, Arabidopsis thaliana
cgtaatccgcgtcggtc

SEQ ID NO: 82321 - DNA, 17 bp, Arabidopsis thaliana
cgtaatcctcccaggcc

SEQ ID NO: 82322 - DNA, 17 bp, Arabidopsis thaliana
cgtaatcggctaatgat

SEQ ID NO: 82323 - DNA, 17 bp, Arabidopsis thaliana
cgtaatctgtacagcgc

SEQ ID NO: 82324 - DNA, 17 bp, Arabidopsis thaliana
cgtaattagtgagattt

SEQ ID NO: 82325 - DNA, 17 bp, Arabidopsis thaliana
cgtaattctctcaggcc

SEQ ID NO: 82326 - DNA, 17 bp, Arabidopsis thaliana
cgtaattgcctggactt

SEQ ID NO: 82327 - DNA, 17 bp, Arabidopsis thaliana
cgtacaatttacaggat

SEQ ID NO: 82328 - DNA, 17 bp, Arabidopsis thaliana
cgtacacaccgcccgtc

SEQ ID NO: 82329 - DNA, 17 bp, Arabidopsis thaliana
cgtacacatagaggcgc

SEQ ID NO: 82330 - DNA, 17 bp, Arabidopsis thaliana
cgtacaccacgaggttg

SEQ ID NO: 82331 - DNA, 17 bp, Arabidopsis thaliana
cgtacaccgtcgggttg

SEQ ID NO: 82332 - DNA, 17 bp, Arabidopsis thaliana
cgtacacggatttggca

SEQ ID NO: 82333 - DNA, 17 bp, Arabidopsis thaliana
cgtacacgttgtgagcc

SEQ ID NO: 82334 - DNA, 17 bp, Arabidopsis thaliana
cgtacactacttctgtt

SEQ ID NO: 82335 - DNA, 17 bp, Arabidopsis thaliana
cgtacagaatgagtcca

SEQ ID NO: 82336 - DNA, 17 bp, Arabidopsis thaliana
cgtacagacccgggttc

SEQ ID NO: 82337 - DNA, 17 bp, Arabidopsis thaliana
cgtacagtggcttcggg

SEQ ID NO: 82338 - DNA, 17 bp, Arabidopsis thaliana
cgtacagtggtgtacag

SEQ ID NO: 82339 - DNA, 17 bp, Arabidopsis thaliana
cgtacagttggctggaa

SEQ ID NO: 82340 - DNA, 17 bp, Arabidopsis thaliana
cgtacatcgttggagat

SEQ ID NO: 82341 - DNA, 17 bp, Arabidopsis thaliana
cgtacatgctgtggttt

SEQ ID NO: 82342 - DNA, 17 bp, Arabidopsis thaliana
cgtacatgttgctggct

SEQ ID NO: 82343 - DNA, 17 bp, Arabidopsis thaliana
cgtaccaaagacctctt

SEQ ID NO: 82344 - DNA, 17 bp, Arabidopsis thaliana
cgtaccactctcagacg

SEQ ID NO: 82345 - DNA, 17 bp, Arabidopsis thaliana
cgtaccaggcttcattc

SEQ ID NO: 82346 - DNA, 17 bp, Arabidopsis thaliana
cgtacccgggcgaagcc

SEQ ID NO: 82347 - DNA, 17 bp, Arabidopsis thaliana
cgtacccgggctcagac

SEQ ID NO: 82348 - DNA, 17 bp, Arabidopsis thaliana
cgtaccctgctgtcgac

SEQ ID NO: 82349 - DNA, 17 bp, Arabidopsis thaliana
cgtaccgaccgtcagac

SEQ ID NO: 82350 - DNA, 17 bp, Arabidopsis thaliana
cgtaccgcattttttcc

SEQ ID NO: 82351 - DNA, 17 bp, Arabidopsis thaliana
cgtaccgccaacgaccg

SEQ ID NO: 82352 - DNA, 17 bp, Arabidopsis thaliana
cgtaccgcggttttttt

SEQ ID NO: 82353 - DNA, 17 bp, Arabidopsis thaliana
cgtacctcagacctttt

SEQ ID NO: 82354 - DNA, 17 bp, Arabidopsis thaliana
cgtacctggagctgatt

SEQ ID NO: 82355 - DNA, 17 bp, Arabidopsis thaliana
cgtacgaaagtggactg

SEQ ID NO: 82356 - DNA, 17 bp, Arabidopsis thaliana
cgtacgagcgctatcaa

SEQ ID NO: 82357 - DNA, 17 bp, Arabidopsis thaliana
cgtacgagtgacagggc

SEQ ID NO: 82358 - DNA, 17 bp, Arabidopsis thaliana
cgtacgattcgtcttgc

SEQ ID NO: 82359 - DNA, 17 bp, Arabidopsis thaliana
cgtacgcactggattcg

SEQ ID NO: 82360 - DNA, 17 bp, Arabidopsis thaliana
cgtacgcggattacggt

SEQ ID NO: 82361 - DNA, 17 bp, Arabidopsis thaliana
cgtacgctactggcgct

SEQ ID NO: 82362 - DNA, 17 bp, Arabidopsis thaliana
cgtacggaccgcatcgt

SEQ ID NO: 82363 - DNA, 17 bp, Arabidopsis thaliana
cgtacggagatgttccc

SEQ ID NO: 82364 - DNA, 17 bp, Arabidopsis thaliana
cgtacgtagttgaacct

SEQ ID NO: 82365 - DNA, 17 bp, Arabidopsis thaliana
cgtacgtctgcctgggt

SEQ ID NO: 82366 - DNA, 17 bp, Arabidopsis thaliana
cgtactacacggagttc

SEQ ID NO: 82367 - DNA, 17 bp, Arabidopsis thaliana
cgtactaggaaagacaa

SEQ ID NO: 82368 - DNA, 17 bp, Arabidopsis thaliana
cgtactaggatgggtga

SEQ ID NO: 82369 - DNA, 17 bp, Arabidopsis thaliana
cgtactatgtaaccgtt

SEQ ID NO: 82370 - DNA, 17 bp, Arabidopsis thaliana
cgtactatgtctcgact

SEQ ID NO: 82371 - DNA, 17 bp, Arabidopsis thaliana
cgtactcataaccgcat

SEQ ID NO: 82372 - DNA, 17 bp, Arabidopsis thaliana
cgtactcgagatcatct

SEQ ID NO: 82373 - DNA, 17 bp, Arabidopsis thaliana
cgtactcgagggagtag

SEQ ID NO: 82374 - DNA, 17 bp, Arabidopsis thaliana
cgtactcgagggagtcg

SEQ ID NO: 82375 - DNA, 17 bp, Arabidopsis thaliana
cgtactctattcacagt

SEQ ID NO: 82376 - DNA, 17 bp, Arabidopsis thaliana
cgtactctcggtgatgt

SEQ ID NO: 82377 - DNA, 17 bp, Arabidopsis thaliana
cgtactctctgcagatt

SEQ ID NO: 82378 - DNA, 17 bp, Arabidopsis thaliana
cgtactgcaggactgtt

SEQ ID NO: 82379 - DNA, 17 bp, Arabidopsis thaliana
cgtactgcggtgcggga

SEQ ID NO: 82380 - DNA, 17 bp, Arabidopsis thaliana
cgtactggaaggtgcgg

SEQ ID NO: 82381 - DNA, 17 bp, Arabidopsis thaliana
cgtacttcaggtccgta

SEQ ID NO: 82382 - DNA, 17 bp, Arabidopsis thaliana
cgtactttttcgggcat

SEQ ID NO: 82383 - DNA, 17 bp, Arabidopsis thaliana
cgtagaaatggaccaac

SEQ ID NO: 82384 - DNA, 17 bp, Arabidopsis thaliana
cgtagaaatggaccacc

SEQ ID NO: 82385 - DNA, 17 bp, Arabidopsis thaliana
cgtagaatcttgacgaa

SEQ ID NO: 82386 - DNA, 17 bp, Arabidopsis thaliana
cgtagacaagcacaatg

SEQ ID NO: 82387 - DNA, 17 bp, Arabidopsis thaliana
cgtagaccaaaatgtgg

SEQ ID NO: 82388 - DNA, 17 bp, Arabidopsis thaliana
cgtagaccaactccgcc

SEQ ID NO: 82389 - DNA, 17 bp, Arabidopsis thaliana
cgtagaccaggtcactg

SEQ ID NO: 82390 - DNA, 17 bp, Arabidopsis thaliana
cgtagagctctggtttg

SEQ ID NO: 82391 - DNA, 17 bp, Arabidopsis thaliana
cgtagaggaaatcgtgg

SEQ ID NO: 82392 - DNA, 17 bp, Arabidopsis thaliana
cgtagaggtcgatctcc

SEQ ID NO: 82393 - DNA, 17 bp, Arabidopsis thaliana
cgtagatatccgattgg

SEQ ID NO: 82394 - DNA, 17 bp, Arabidopsis thaliana
cgtagatctgcaggttt

SEQ ID NO: 82395 - DNA, 17 bp, Arabidopsis thaliana
cgtagccaggttcgaca

SEQ ID NO: 82396 - DNA, 17 bp, Arabidopsis thaliana
cgtagcgcgggtaatca

SEQ ID NO: 82397 - DNA, 17 bp, Arabidopsis thaliana
cgtagcggaccgagtgt

SEQ ID NO: 82398 - DNA, 17 bp, Arabidopsis thaliana
cgtagcgtaccgaccgt

SEQ ID NO: 82399 - DNA, 17 bp, Arabidopsis thaliana
cgtagcgtttgaggccg

SEQ ID NO: 82400 - DNA, 17 bp, Arabidopsis thaliana
cgtagctaactttgtgt

SEQ ID NO: 82401 - DNA, 17 bp, Arabidopsis thaliana
cgtaggaacctgcggaa

SEQ ID NO: 82402 - DNA, 17 bp, Arabidopsis thaliana
cgtaggaatgctcaagt

SEQ ID NO: 82403 - DNA, 17 bp, Arabidopsis thaliana
cgtaggacattgtcagg

SEQ ID NO: 82404 - DNA, 17 bp, Arabidopsis thaliana
cgtaggacctaacacca

SEQ ID NO: 82405 - DNA, 17 bp, Arabidopsis thaliana
cgtaggacgtgtcggct

SEQ ID NO: 82406 - DNA, 17 bp, Arabidopsis thaliana
cgtaggactttgatttc

SEQ ID NO: 82407 - DNA, 17 bp, Arabidopsis thaliana
cgtaggcgaaggtttct

SEQ ID NO: 82408 - DNA, 17 bp, Arabidopsis thaliana
cgtagggaacctgcgga

SEQ ID NO: 82409 - DNA, 17 bp, Arabidopsis thaliana
cgtagggcacgtctgcc

SEQ ID NO: 82410 - DNA, 17 bp, Arabidopsis thaliana
cgtaggggaacctgtgg

SEQ ID NO: 82411 - DNA, 17 bp, Arabidopsis thaliana
cgtagggtcgcagtttc

SEQ ID NO: 82412 - DNA, 17 bp, Arabidopsis thaliana
cgtaggtacctgcggaa

SEQ ID NO: 82413 - DNA, 17 bp, Arabidopsis thaliana
cgtaggtcaaaatttgg

SEQ ID NO: 82414 - DNA, 17 bp, Arabidopsis thaliana
cgtaggtgaacccgcgg

SEQ ID NO: 82415 - DNA, 17 bp, Arabidopsis thaliana
cgtaggtgaacctgccc

SEQ ID NO: 82416 - DNA, 17 bp, Arabidopsis thaliana
cgtaggtgaacctgccg

SEQ ID NO: 82417 - DNA, 17 bp, Arabidopsis thaliana
cgtaggtgaacctgcgg

SEQ ID NO: 82418 - DNA, 17 bp, Arabidopsis thaliana
cgtaggtggacctgcgg

SEQ ID NO: 82419 - DNA, 17 bp, Arabidopsis thaliana
cgtaggttacctgcgga

SEQ ID NO: 82420 - DNA, 17 bp, Arabidopsis thaliana
cgtaggttcaaatccta

SEQ ID NO: 82421 - DNA, 17 bp, Arabidopsis thaliana
cgtaggttcgattccta

SEQ ID NO: 82422 - DNA, 17 bp, Arabidopsis thaliana
cgtaggttcgcccccta

SEQ ID NO: 82423 - DNA, 17 bp, Arabidopsis thaliana
cgtagtaaatctcttcg

SEQ ID NO: 82424 - DNA, 17 bp, Arabidopsis thaliana
cgtagtatacgtcggac

SEQ ID NO: 82425 - DNA, 17 bp, Arabidopsis thaliana
cgtagtcgatcctgtaa

SEQ ID NO: 82426 - DNA, 17 bp, Arabidopsis thaliana
cgtagtcgatcctgtag

SEQ ID NO: 82427 - DNA, 17 bp, Arabidopsis thaliana
cgtagtcgcacctgtag

SEQ ID NO: 82428 - DNA, 17 bp, Arabidopsis thaliana
cgtagtcgcatcctgta

SEQ ID NO: 82429 - DNA, 17 bp, Arabidopsis thaliana
cgtagtcgctcctgtag

SEQ ID NO: 82430 - DNA, 17 bp, Arabidopsis thaliana
cgtagtcttcgaaggcc

SEQ ID NO: 82431 - DNA, 17 bp, Arabidopsis thaliana
cgtagtgttgactggcg

SEQ ID NO: 82432 - DNA, 17 bp, Arabidopsis thaliana
cgtagttaaaccgcact

SEQ ID NO: 82433 - DNA, 17 bp, Arabidopsis thaliana
cgtagttcggtcctgcg

SEQ ID NO: 82434 - DNA, 17 bp, Arabidopsis thaliana
cgtagttcggttctggg

SEQ ID NO: 82435 - DNA, 17 bp, Arabidopsis thaliana
cgtagttcgttcctgcg

SEQ ID NO: 82436 - DNA, 17 bp, Arabidopsis thaliana
cgtagttgaaccttgga

SEQ ID NO: 82437 - DNA, 17 bp, Arabidopsis thaliana
cgtagttgaaccttggc

SEQ ID NO: 82438 - DNA, 17 bp, Arabidopsis thaliana
cgtagttgaaccttggg

SEQ ID NO: 82439 - DNA, 17 bp, Arabidopsis thaliana
cgtagttgaaccttggt

SEQ ID NO: 82440 - DNA, 17 bp, Arabidopsis thaliana
cgtagttgaacgttggg

SEQ ID NO: 82441 - DNA, 17 bp, Arabidopsis thaliana
cgtagttgagccttggg

SEQ ID NO: 82442 - DNA, 17 bp, Arabidopsis thaliana
cgtagttgttgcaattg

SEQ ID NO: 82443 - DNA, 17 bp, Arabidopsis thaliana
cgtagtttacacgaccg

SEQ ID NO: 82444 - DNA, 17 bp, Arabidopsis thaliana
cgtagtttcagagatgg

SEQ ID NO: 82445 - DNA, 17 bp, Arabidopsis thaliana
cgtagtttgaaaacaaa

SEQ ID NO: 82446 - DNA, 17 bp, Arabidopsis thaliana
cgtagtttgcaaagtcc

SEQ ID NO: 82447 - DNA, 17 bp, Arabidopsis thaliana
cgtataaagaaccgaag

SEQ ID NO: 82448 - DNA, 17 bp, Arabidopsis thaliana
cgtataagcttgctcct

SEQ ID NO: 82449 - DNA, 17 bp, Arabidopsis thaliana
cgtatcagtttcaccag

SEQ ID NO: 82450 - DNA, 17 bp, Arabidopsis thaliana
cgtatccggttgggctc

SEQ ID NO: 82451 - DNA, 17 bp, Arabidopsis thaliana
cgtatccgtctggaaag

SEQ ID NO: 82452 - DNA, 17 bp, Arabidopsis thaliana
cgtatcctgctgtcgac

SEQ ID NO: 82453 - DNA, 17 bp, Arabidopsis thaliana
cgtatcctgctgttgac

SEQ ID NO: 82454 - DNA, 17 bp, Arabidopsis thaliana
cgtatcctggagatgga

SEQ ID NO: 82455 - DNA, 17 bp, Arabidopsis thaliana
cgtatcctgtagatgga

SEQ ID NO: 82456 - DNA, 17 bp, Arabidopsis thaliana
cgtatccttccgtccca

SEQ ID NO: 82457 - DNA, 17 bp, Arabidopsis thaliana
cgtatcgacccacgcac

SEQ ID NO: 82458 - DNA, 17 bp, Arabidopsis thaliana
cgtatcgacccatgcag

SEQ ID NO: 82459 - DNA, 17 bp, Arabidopsis thaliana
cgtatcgacccgtgcaa

SEQ ID NO: 82460 - DNA, 17 bp, Arabidopsis thaliana
cgtatcgacccgtgcag

SEQ ID NO: 82461 - DNA, 17 bp, Arabidopsis thaliana
cgtatcgacgtagacaa

SEQ ID NO: 82462 - DNA, 17 bp, Arabidopsis thaliana
cgtatcgcagttgaact

SEQ ID NO: 82463 - DNA, 17 bp, Arabidopsis thaliana
cgtatcgccgaccgaag

SEQ ID NO: 82464 - DNA, 17 bp, Arabidopsis thaliana
cgtatctagatctgccg

SEQ ID NO: 82465 - DNA, 17 bp, Arabidopsis thaliana
cgtatctaggtatcccg

SEQ ID NO: 82466 - DNA, 17 bp, Arabidopsis thaliana
cgtatctctcaggtgtc

SEQ ID NO: 82467 - DNA, 17 bp, Arabidopsis thaliana
cgtatctgctaaacgcg

SEQ ID NO: 82468 - DNA, 17 bp, Arabidopsis thaliana
cgtatctgctttcaaat

SEQ ID NO: 82469 - DNA, 17 bp, Arabidopsis thaliana
cgtatctgtgacatcta

SEQ ID NO: 82470 - DNA, 17 bp, Arabidopsis thaliana
cgtatgaactggatttt

SEQ ID NO: 82471 - DNA, 17 bp, Arabidopsis thaliana
cgtatgaaggagatagg

SEQ ID NO: 82472 - DNA, 17 bp, Arabidopsis thaliana
cgtatgatgtcgatggc

SEQ ID NO: 82473 - DNA, 17 bp, Arabidopsis thaliana
cgtatgcctgctacaga

SEQ ID NO: 82474 - DNA, 17 bp, Arabidopsis thaliana
cgtatgcggccgttccc

SEQ ID NO: 82475 - DNA, 17 bp, Arabidopsis thaliana
cgtatgcggccgtttca

SEQ ID NO: 82476 - DNA, 17 bp, Arabidopsis thaliana
cgtatgcttcctccttt

SEQ ID NO: 82477 - DNA, 17 bp, Arabidopsis thaliana
cgtatggattttggcct

SEQ ID NO: 82478 - DNA, 17 bp, Arabidopsis thaliana
cgtatggtgtaatgtga

SEQ ID NO: 82479 - DNA, 17 bp, Arabidopsis thaliana
cgtatggttgattctag

SEQ ID NO: 82480 - DNA, 17 bp, Arabidopsis thaliana
cgtatggttgattgtag

SEQ ID NO: 82481 - DNA, 17 bp, Arabidopsis thaliana
cgtatgtacccgaatac

SEQ ID NO: 82482 - DNA, 17 bp, Arabidopsis thaliana
cgtatgtacccgagtcc

SEQ ID NO: 82483 - DNA, 17 bp, Arabidopsis thaliana
cgtatgtgcgggtcagg

SEQ ID NO: 82484 - DNA, 17 bp, Arabidopsis thaliana
cgtattacggtcccgcc

SEQ ID NO: 82485 - DNA, 17 bp, Arabidopsis thaliana
cgtattacggtggcggc

SEQ ID NO: 82486 - DNA, 17 bp, Arabidopsis thaliana
cgtattatccgctctgt

SEQ ID NO: 82487 - DNA, 17 bp, Arabidopsis thaliana
cgtattcaggtaccatg

SEQ ID NO: 82488 - DNA, 17 bp, Arabidopsis thaliana
cgtattcaggtgccatg

SEQ ID NO: 82489 - DNA, 17 bp, Arabidopsis thaliana
cgtattcgtatctctct

SEQ ID NO: 82490 - DNA, 17 bp, Arabidopsis thaliana
cgtattcttttttttac

SEQ ID NO: 82491 - DNA, 17 bp, Arabidopsis thaliana
cgtattgccgtcactac

SEQ ID NO: 82492 - DNA, 17 bp, Arabidopsis thaliana
cgtattgtgcgatttac

SEQ ID NO: 82493 - DNA, 17 bp, Arabidopsis thaliana
cgtatttaggtgcgttt

SEQ ID NO: 82494 - DNA, 17 bp, Arabidopsis thaliana
cgtatttggtgcggttt

SEQ ID NO: 82495 - DNA, 17 bp, Arabidopsis thaliana
cgtattttgacataggc

SEQ ID NO: 82496 - DNA, 17 bp, Arabidopsis thaliana
cgtatttttcggcttca

SEQ ID NO: 82497 - DNA, 17 bp, Arabidopsis thaliana
cgtattttttctgtttt

SEQ ID NO: 82498 - DNA, 17 bp, Arabidopsis thaliana
cgtcaaaacttcatacg

SEQ ID NO: 82499 - DNA, 17 bp, Arabidopsis thaliana
cgtcaaagcattgcgat

SEQ ID NO: 82500 - DNA, 17 bp, Arabidopsis thaliana
cgtcaaagttagtcaat

SEQ ID NO: 82501 - DNA, 17 bp, Arabidopsis thaliana
cgtcaaatattatgtgc

SEQ ID NO: 82502 - DNA, 17 bp, Arabidopsis thaliana
cgtcaaatccacaataa

SEQ ID NO: 82503 - DNA, 17 bp, Arabidopsis thaliana
cgtcaacatctacttaa

SEQ ID NO: 82504 - DNA, 17 bp, Arabidopsis thaliana
cgtcaacatctacttca

SEQ ID NO: 82505 - DNA, 17 bp, Arabidopsis thaliana
cgtcaacatctccttca

SEQ ID NO: 82506 - DNA, 17 bp, Arabidopsis thaliana
cgtcaacccgacggtca

SEQ ID NO: 82507 - DNA, 17 bp, Arabidopsis thaliana
cgtcaacccgacggtga

SEQ ID NO: 82508 - DNA, 17 bp, Arabidopsis thaliana
cgtcaaccgccacgtcc

SEQ ID NO: 82509 - DNA, 17 bp, Arabidopsis thaliana
cgtcaacgctggagtta

SEQ ID NO: 82510 - DNA, 17 bp, Arabidopsis thaliana
cgtcaacggatatctcg

SEQ ID NO: 82511 - DNA, 17 bp, Arabidopsis thaliana
cgtcaactacggaggat

SEQ ID NO: 82512 - DNA, 17 bp, Arabidopsis thaliana
cgtcaactcgtcaagac

SEQ ID NO: 82513 - DNA, 17 bp, Arabidopsis thaliana
cgtcaactctacggtcg

SEQ ID NO: 82514 - DNA, 17 bp, Arabidopsis thaliana
cgtcaactctcgttgtc

SEQ ID NO: 82515 - DNA, 17 bp, Arabidopsis thaliana
cgtcaacttcgtatgcg

SEQ ID NO: 82516 - DNA, 17 bp, Arabidopsis thaliana
cgtcaacttgacatctc

SEQ ID NO: 82517 - DNA, 17 bp, Arabidopsis thaliana
cgtcaacttgacttctc

SEQ ID NO: 82518 - DNA, 17 bp, Arabidopsis thaliana
cgtcaaggttatgccgc

SEQ ID NO: 82519 - DNA, 17 bp, Arabidopsis thaliana
cgtcaatccaaagatca

SEQ ID NO: 82520 - DNA, 17 bp, Arabidopsis thaliana
cgtcaatgaacggccga

SEQ ID NO: 82521 - DNA, 17 bp, Arabidopsis thaliana
cgtcaatgatgttgcgg

SEQ ID NO: 82522 - DNA, 17 bp, Arabidopsis thaliana
cgtcaatgccggtgtta

SEQ ID NO: 82523 - DNA, 17 bp, Arabidopsis thaliana
cgtcaatggacatttga

SEQ ID NO: 82524 - DNA, 17 bp, Arabidopsis thaliana
cgtcaatggctgcctgt

SEQ ID NO: 82525 - DNA, 17 bp, Arabidopsis thaliana
cgtcaatggctgcttgt

SEQ ID NO: 82526 - DNA, 17 bp, Arabidopsis thaliana
cgtcaatgtccgccatc

SEQ ID NO: 82527 - DNA, 17 bp, Arabidopsis thaliana
cgtcaatgtttctaaga

SEQ ID NO: 82528 - DNA, 17 bp, Arabidopsis thaliana
cgtcaattctaagattt

SEQ ID NO: 82529 - DNA, 17 bp, Arabidopsis thaliana
cgtcaattctaggattt

SEQ ID NO: 82530 - DNA, 17 bp, Arabidopsis thaliana
cgtcaatttatctggcc

SEQ ID NO: 82531 - DNA, 17 bp, Arabidopsis thaliana
cgtcaatttttgtctcc

SEQ ID NO: 82532 - DNA, 17 bp, Arabidopsis thaliana
cgtcacaaagatgactg

SEQ ID NO: 82533 - DNA, 17 bp, Arabidopsis thaliana
cgtcacacctgagtcca

SEQ ID NO: 82534 - DNA, 17 bp, Arabidopsis thaliana
cgtcacacggaatcgag

SEQ ID NO: 82535 - DNA, 17 bp, Arabidopsis thaliana
cgtcacactatgggacc

SEQ ID NO: 82536 - DNA, 17 bp, Arabidopsis thaliana
cgtcacactatgggagc

SEQ ID NO: 82537 - DNA, 17 bp, Arabidopsis thaliana
cgtcacagtggcagata

SEQ ID NO: 82538 - DNA, 17 bp, Arabidopsis thaliana
cgtcaccgtctccttcg

SEQ ID NO: 82539 - DNA, 17 bp, Arabidopsis thaliana
cgtcacctgtagatgga

SEQ ID NO: 82540 - DNA, 17 bp, Arabidopsis thaliana
cgtcacgtcaactggcc

SEQ ID NO: 82541 - DNA, 17 bp, Arabidopsis thaliana
cgtcacgtctgcctggg

SEQ ID NO: 82542 - DNA, 17 bp, Arabidopsis thaliana
cgtcactacaatcgtat

SEQ ID NO: 82543 - DNA, 17 bp, Arabidopsis thaliana
cgtcactcaaaaggccc

SEQ ID NO: 82544 - DNA, 17 bp, Arabidopsis thaliana
cgtcactcaaatagaca

SEQ ID NO: 82545 - DNA, 17 bp, Arabidopsis thaliana
cgtcactccaagtcaca

SEQ ID NO: 82546 - DNA, 17 bp, Arabidopsis thaliana
cgtcactcgaaccagcg

SEQ ID NO: 82547 - DNA, 17 bp, Arabidopsis thaliana
cgtcactcgaatcggcg

SEQ ID NO: 82548 - DNA, 17 bp, Arabidopsis thaliana
cgtcactgctggattgt

SEQ ID NO: 82549 - DNA, 17 bp, Arabidopsis thaliana
cgtcactggctatggct

SEQ ID NO: 82550 - DNA, 17 bp, Arabidopsis thaliana
cgtcactgtttccacgc

SEQ ID NO: 82551 - DNA, 17 bp, Arabidopsis thaliana
cgtcacttgtcttctga

SEQ ID NO: 82552 - DNA, 17 bp, Arabidopsis thaliana
cgtcactttcggcgatg

SEQ ID NO: 82553 - DNA, 17 bp, Arabidopsis thaliana
cgtcagaaacgtgatgg

SEQ ID NO: 82554 - DNA, 17 bp, Arabidopsis thaliana
cgtcagaaatgcaggcg

SEQ ID NO: 82555 - DNA, 17 bp, Arabidopsis thaliana
cgtcagaacagcttgcg

SEQ ID NO: 82556 - DNA, 17 bp, Arabidopsis thaliana
cgtcagactgaagatct

SEQ ID NO: 82557 - DNA, 17 bp, Arabidopsis thaliana
cgtcagatctggtgatg

SEQ ID NO: 82558 - DNA, 17 bp, Arabidopsis thaliana
cgtcagatgacactctt

SEQ ID NO: 82559 - DNA, 17 bp, Arabidopsis thaliana
cgtcagattcaggttgt

SEQ ID NO: 82560 - DNA, 17 bp, Arabidopsis thaliana
cgtcagatttgcgcact

SEQ ID NO: 82561 - DNA, 17 bp, Arabidopsis thaliana
cgtcagatttgggcact

SEQ ID NO: 82562 - DNA, 17 bp, Arabidopsis thaliana
cgtcagcaagacggtta

SEQ ID NO: 82563 - DNA, 17 bp, Arabidopsis thaliana
cgtcagcacgagcagct

SEQ ID NO: 82564 - DNA, 17 bp, Arabidopsis thaliana
cgtcagcagtcaagtcc

SEQ ID NO: 82565 - DNA, 17 bp, Arabidopsis thaliana
cgtcagccgttcttgac

SEQ ID NO: 82566 - DNA, 17 bp, Arabidopsis thaliana
cgtcagcgaagcttgtt

SEQ ID NO: 82567 - DNA, 17 bp, Arabidopsis thaliana
cgtcagcgatttagtcc

SEQ ID NO: 82568 - DNA, 17 bp, Arabidopsis thaliana
cgtcagcggtctagtcc

SEQ ID NO: 82569 - DNA, 17 bp, Arabidopsis thaliana
cgtcagcggtttagtcc

SEQ ID NO: 82570 - DNA, 17 bp, Arabidopsis thaliana
cgtcagctgttgcgcta

SEQ ID NO: 82571 - DNA, 17 bp, Arabidopsis thaliana
cgtcagcttagtcatcg

SEQ ID NO: 82572 - DNA, 17 bp, Arabidopsis thaliana
cgtcagctttgcgttac

SEQ ID NO: 82573 - DNA, 17 bp, Arabidopsis thaliana
cgtcagcttttcttgac

SEQ ID NO: 82574 - DNA, 17 bp, Arabidopsis thaliana
cgtcaggaatcgagcgc

SEQ ID NO: 82575 - DNA, 17 bp, Arabidopsis thaliana
cgtcaggaattggtgtc

SEQ ID NO: 82576 - DNA, 17 bp, Arabidopsis thaliana
cgtcaggatatccgcaa

SEQ ID NO: 82577 - DNA, 17 bp, Arabidopsis thaliana
cgtcaggatttctattg

SEQ ID NO: 82578 - DNA, 17 bp, Arabidopsis thaliana
cgtcaggcgttcgaaac

SEQ ID NO: 82579 - DNA, 17 bp, Arabidopsis thaliana
cgtcaggcttaaggtag

SEQ ID NO: 82580 - DNA, 17 bp, Arabidopsis thaliana
cgtcaggcttaaggtat

SEQ ID NO: 82581 - DNA, 17 bp, Arabidopsis thaliana
cgtcagggacagtcggg

SEQ ID NO: 82582 - DNA, 17 bp, Arabidopsis thaliana
cgtcaggggcattttgg

SEQ ID NO: 82583 - DNA, 17 bp, Arabidopsis thaliana
cgtcaggtcgaacgagc

SEQ ID NO: 82584 - DNA, 17 bp, Arabidopsis thaliana
cgtcaggttggccgagt

SEQ ID NO: 82585 - DNA, 17 bp, Arabidopsis thaliana
cgtcagtatcgctgcgg

SEQ ID NO: 82586 - DNA, 17 bp, Arabidopsis thaliana
cgtcagtccaagaagcc

SEQ ID NO: 82587 - DNA, 17 bp, Arabidopsis thaliana
cgtcagtccttgcttat

SEQ ID NO: 82588 - DNA, 17 bp, Arabidopsis thaliana
cgtcagtctaaagcaca

SEQ ID NO: 82589 - DNA, 17 bp, Arabidopsis thaliana
cgtcagtgcttgcagct

SEQ ID NO: 82590 - DNA, 17 bp, Arabidopsis thaliana
cgtcagttctaccgtga

SEQ ID NO: 82591 - DNA, 17 bp, Arabidopsis thaliana
cgtcagttgacttaacg

SEQ ID NO: 82592 - DNA, 17 bp, Arabidopsis thaliana
cgtcagttgcatttgtg

SEQ ID NO: 82593 - DNA, 17 bp, Arabidopsis thaliana
cgtcagttgcgtcatgg

SEQ ID NO: 82594 - DNA, 17 bp, Arabidopsis thaliana
cgtcagtttccgagcta

SEQ ID NO: 82595 - DNA, 17 bp, Arabidopsis thaliana
cgtcagtttctcgttcc

SEQ ID NO: 82596 - DNA, 17 bp, Arabidopsis thaliana
cgtcagtttgatgtcca

SEQ ID NO: 82597 - DNA, 17 bp, Arabidopsis thaliana
cgtcagtttggtcggca

SEQ ID NO: 82598 - DNA, 17 bp, Arabidopsis thaliana
cgtcatacatgtggttc

SEQ ID NO: 82599 - DNA, 17 bp, Arabidopsis thaliana
cgtcatacgtgattcaa

SEQ ID NO: 82600 - DNA, 17 bp, Arabidopsis thaliana
cgtcataggattgtgcc

SEQ ID NO: 82601 - DNA, 17 bp, Arabidopsis thaliana
cgtcatatctgaggtgt

SEQ ID NO: 82602 - DNA, 17 bp, Arabidopsis thaliana
cgtcatcaagcttgggt

SEQ ID NO: 82603 - DNA, 17 bp, Arabidopsis thaliana
cgtcatcagttgctcga

SEQ ID NO: 82604 - DNA, 17 bp, Arabidopsis thaliana
cgtcatcatttctttgg

SEQ ID NO: 82605 - DNA, 17 bp, Arabidopsis thaliana
cgtcatccaatcatttt

SEQ ID NO: 82606 - DNA, 17 bp, Arabidopsis thaliana
cgtcatcctctcctcaa

SEQ ID NO: 82607 - DNA, 17 bp, Arabidopsis thaliana
cgtcatcgagctttgca

SEQ ID NO: 82608 - DNA, 17 bp, Arabidopsis thaliana
cgtcatcgcaaatgcag

SEQ ID NO: 82609 - DNA, 17 bp, Arabidopsis thaliana
cgtcatcggatctggcg

SEQ ID NO: 82610 - DNA, 17 bp, Arabidopsis thaliana
cgtcatcgttttgcctc

SEQ ID NO: 82611 - DNA, 17 bp, Arabidopsis thaliana
cgtcatctaattagtga

SEQ ID NO: 82612 - DNA, 17 bp, Arabidopsis thaliana
cgtcatctagtacacca

SEQ ID NO: 82613 - DNA, 17 bp, Arabidopsis thaliana
cgtcatctatggtgtcg

SEQ ID NO: 82614 - DNA, 17 bp, Arabidopsis thaliana
cgtcatctctttactgc

SEQ ID NO: 82615 - DNA, 17 bp, Arabidopsis thaliana
cgtcatctggatcatac

SEQ ID NO: 82616 - DNA, 17 bp, Arabidopsis thaliana
cgtcatcttttgcccga

SEQ ID NO: 82617 - DNA, 17 bp, Arabidopsis thaliana
cgtcatggtgattgagt

SEQ ID NO: 82618 - DNA, 17 bp, Arabidopsis thaliana
cgtcattagagactggt

SEQ ID NO: 82619 - DNA, 17 bp, Arabidopsis thaliana
cgtcattagtgtgtcgg

SEQ ID NO: 82620 - DNA, 17 bp, Arabidopsis thaliana
cgtcattcaaggccttg

SEQ ID NO: 82621 - DNA, 17 bp, Arabidopsis thaliana
cgtcattccaaccagcg

SEQ ID NO: 82622 - DNA, 17 bp, Arabidopsis thaliana
cgtcattccgggagaat

SEQ ID NO: 82623 - DNA, 17 bp, Arabidopsis thaliana
cgtcattcgaatcggcg

SEQ ID NO: 82624 - DNA, 17 bp, Arabidopsis thaliana
cgtcattctactcccga

SEQ ID NO: 82625 - DNA, 17 bp, Arabidopsis thaliana
cgtcattgccgctacca

SEQ ID NO: 82626 - DNA, 17 bp, Arabidopsis thaliana
cgtcattggagatggtc

SEQ ID NO: 82627 - DNA, 17 bp, Arabidopsis thaliana
cgtcattgtacgtctca

SEQ ID NO: 82628 - DNA, 17 bp, Arabidopsis thaliana
cgtcattgtgctcgatt

SEQ ID NO: 82629 - DNA, 17 bp, Arabidopsis thaliana
cgtcatttagatctgtc

SEQ ID NO: 82630 - DNA, 17 bp, Arabidopsis thaliana
cgtcatttccggcccat

SEQ ID NO: 82631 - DNA, 17 bp, Arabidopsis thaliana
cgtcatttcggctggaa

SEQ ID NO: 82632 - DNA, 17 bp, Arabidopsis thaliana
cgtcatttcttgataag

SEQ ID NO: 82633 - DNA, 17 bp, Arabidopsis thaliana
cgtccaaaccgccctcc

SEQ ID NO: 82634 - DNA, 17 bp, Arabidopsis thaliana
cgtccaaagtcagaata

SEQ ID NO: 82635 - DNA, 17 bp, Arabidopsis thaliana
cgtccaaagtcagcaat

SEQ ID NO: 82636 - DNA, 17 bp, Arabidopsis thaliana
cgtccaaccgccgtaac

SEQ ID NO: 82637 - DNA, 17 bp, Arabidopsis thaliana
cgtccaaggatgacttg

SEQ ID NO: 82638 - DNA, 17 bp, Arabidopsis thaliana
cgtccaaggcatgggac

SEQ ID NO: 82639 - DNA, 17 bp, Arabidopsis thaliana
cgtccaaggctaaatac

SEQ ID NO: 82640 - DNA, 17 bp, Arabidopsis thaliana
cgtccaataggatttga

SEQ ID NO: 82641 - DNA, 17 bp, Arabidopsis thaliana
cgtccaattaagcccaa

SEQ ID NO: 82642 - DNA, 17 bp, Arabidopsis thaliana
cgtccaattaagcccca

SEQ ID NO: 82643 - DNA, 17 bp, Arabidopsis thaliana
cgtccacaaatgtgcat

SEQ ID NO: 82644 - DNA, 17 bp, Arabidopsis thaliana
cgtccacagtcggccaa

SEQ ID NO: 82645 - DNA, 17 bp, Arabidopsis thaliana
cgtccaccaagtgtttg

SEQ ID NO: 82646 - DNA, 17 bp, Arabidopsis thaliana
cgtccaccacctccatt

SEQ ID NO: 82647 - DNA, 17 bp, Arabidopsis thaliana
cgtccaccagttatcta

SEQ ID NO: 82648 - DNA, 17 bp, Arabidopsis thaliana
cgtccaccatccgcatt

SEQ ID NO: 82649 - DNA, 17 bp, Arabidopsis thaliana
cgtccaccggagcgttt

SEQ ID NO: 82650 - DNA, 17 bp, Arabidopsis thaliana
cgtccacgataattgag

SEQ ID NO: 82651 - DNA, 17 bp, Arabidopsis thaliana
cgtccacggagggtgag

SEQ ID NO: 82652 - DNA, 17 bp, Arabidopsis thaliana
cgtccactgctgagagc

SEQ ID NO: 82653 - DNA, 17 bp, Arabidopsis thaliana
cgtccagaataaagcgt

SEQ ID NO: 82654 - DNA, 17 bp, Arabidopsis thaliana
cgtccagcggttaggat

SEQ ID NO: 82655 - DNA, 17 bp, Arabidopsis thaliana
cgtccagctcctacatg

SEQ ID NO: 82656 - DNA, 17 bp, Arabidopsis thaliana
cgtccaggaagtcttgt

SEQ ID NO: 82657 - DNA, 17 bp, Arabidopsis thaliana
cgtccaggattcctcca

SEQ ID NO: 82658 - DNA, 17 bp, Arabidopsis thaliana
cgtccaggattcctcga

SEQ ID NO: 82659 - DNA, 17 bp, Arabidopsis thaliana
cgtccaggtcgatttga

SEQ ID NO: 82660 - DNA, 17 bp, Arabidopsis thaliana
cgtccagtagcgacaac

SEQ ID NO: 82661 - DNA, 17 bp, Arabidopsis thaliana
cgtccagtcaagatctc

SEQ ID NO: 82662 - DNA, 17 bp, Arabidopsis thaliana
cgtccagtgagccgttg

SEQ ID NO: 82663 - DNA, 17 bp, Arabidopsis thaliana
cgtccatcgccattgca

SEQ ID NO: 82664 - DNA, 17 bp, Arabidopsis thaliana
cgtccatcttttgttga

SEQ ID NO: 82665 - DNA, 17 bp, Arabidopsis thaliana
cgtccatgcgtcgagca

SEQ ID NO: 82666 - DNA, 17 bp, Arabidopsis thaliana
cgtccatttgattccgc

SEQ ID NO: 82667 - DNA, 17 bp, Arabidopsis thaliana
cgtcccaaatttgaaag

SEQ ID NO: 82668 - DNA, 17 bp, Arabidopsis thaliana
cgtcccaagtgggctta

SEQ ID NO: 82669 - DNA, 17 bp, Arabidopsis thaliana
cgtcccaccgggtgtgc

SEQ ID NO: 82670 - DNA, 17 bp, Arabidopsis thaliana
cgtcccactgggtgtgc

SEQ ID NO: 82671 - DNA, 17 bp, Arabidopsis thaliana
cgtcccatcctacaggt

SEQ ID NO: 82672 - DNA, 17 bp, Arabidopsis thaliana
cgtcccatgactaccgg

SEQ ID NO: 82673 - DNA, 17 bp, Arabidopsis thaliana
cgtcccatgtactgcag

SEQ ID NO: 82674 - DNA, 17 bp, Arabidopsis thaliana
cgtcccccgcatctcca

SEQ ID NO: 82675 - DNA, 17 bp, Arabidopsis thaliana
cgtccccctggtgtgaa

SEQ ID NO: 82676 - DNA, 17 bp, Arabidopsis thaliana
cgtcccctccttctacc

SEQ ID NO: 82677 - DNA, 17 bp, Arabidopsis thaliana
cgtcccctttgtacaca

SEQ ID NO: 82678 - DNA, 17 bp, Arabidopsis thaliana
cgtcccgactctggttt

SEQ ID NO: 82679 - DNA, 17 bp, Arabidopsis thaliana
cgtcccgatgttgctcg

SEQ ID NO: 82680 - DNA, 17 bp, Arabidopsis thaliana
cgtcccgattggaccat

SEQ ID NO: 82681 - DNA, 17 bp, Arabidopsis thaliana
cgtcccgccaatccgtt

SEQ ID NO: 82682 - DNA, 17 bp, Arabidopsis thaliana
cgtcccggttgctgtgg

SEQ ID NO: 82683 - DNA, 17 bp, Arabidopsis thaliana
cgtcccgtagctcagtt

SEQ ID NO: 82684 - DNA, 17 bp, Arabidopsis thaliana
cgtcccgtcaacccgtc

SEQ ID NO: 82685 - DNA, 17 bp, Arabidopsis thaliana
cgtcccgtgtacttgag

SEQ ID NO: 82686 - DNA, 17 bp, Arabidopsis thaliana
cgtccctgagttgagac

SEQ ID NO: 82687 - DNA, 17 bp, Arabidopsis thaliana
cgtccctgagttgagcc

SEQ ID NO: 82688 - DNA, 17 bp, Arabidopsis thaliana
cgtccctgccctttgta

SEQ ID NO: 82689 - DNA, 17 bp, Arabidopsis thaliana
cgtccctttcttactta

SEQ ID NO: 82690 - DNA, 17 bp, Arabidopsis thaliana
cgtccgacagtcggtgc

SEQ ID NO: 82691 - DNA, 17 bp, Arabidopsis thaliana
cgtccgacctggactgc

SEQ ID NO: 82692 - DNA, 17 bp, Arabidopsis thaliana
cgtccgacgaaaccaaa

SEQ ID NO: 82693 - DNA, 17 bp, Arabidopsis thaliana
cgtccgacgatcggcct

SEQ ID NO: 82694 - DNA, 17 bp, Arabidopsis thaliana
cgtccgacttcaggtgt

SEQ ID NO: 82695 - DNA, 17 bp, Arabidopsis thaliana
cgtccgattcaagttaa

SEQ ID NO: 82696 - DNA, 17 bp, Arabidopsis thaliana
cgtccgatttctttctt

SEQ ID NO: 82697 - DNA, 17 bp, Arabidopsis thaliana
cgtccgcagttgctaga

SEQ ID NO: 82698 - DNA, 17 bp, Arabidopsis thaliana
cgtccgccatcatcttc

SEQ ID NO: 82699 - DNA, 17 bp, Arabidopsis thaliana
cgtccgctaagcgtcta

SEQ ID NO: 82700 - DNA, 17 bp, Arabidopsis thaliana
cgtccggaagctgtaga

SEQ ID NO: 82701 - DNA, 17 bp, Arabidopsis thaliana
cgtccggggtgaaagct

SEQ ID NO: 82702 - DNA, 17 bp, Arabidopsis thaliana
cgtccggtccatggtgg

SEQ ID NO: 82703 - DNA, 17 bp, Arabidopsis thaliana
cgtccggttgccgaccc

SEQ ID NO: 82704 - DNA, 17 bp, Arabidopsis thaliana
cgtccgtaatagacctt

SEQ ID NO: 82705 - DNA, 17 bp, Arabidopsis thaliana
cgtccgtacaccgtcgg

SEQ ID NO: 82706 - DNA, 17 bp, Arabidopsis thaliana
cgtccgtaggaacctgc

SEQ ID NO: 82707 - DNA, 17 bp, Arabidopsis thaliana
cgtccgtagttgaacct

SEQ ID NO: 82708 - DNA, 17 bp, Arabidopsis thaliana
cgtccgtatttgttttg

SEQ ID NO: 82709 - DNA, 17 bp, Arabidopsis thaliana
cgtccgtcaggcttaag

SEQ ID NO: 82710 - DNA, 17 bp, Arabidopsis thaliana
cgtccgtccctgccctt

SEQ ID NO: 82711 - DNA, 17 bp, Arabidopsis thaliana
cgtccgtccgtttccat

SEQ ID NO: 82712 - DNA, 17 bp, Arabidopsis thaliana
cgtccgtcctcagcgac

SEQ ID NO: 82713 - DNA, 17 bp, Arabidopsis thaliana
cgtccgtcgaaaacccg

SEQ ID NO: 82714 - DNA, 17 bp, Arabidopsis thaliana
cgtccgtcgataactcc

SEQ ID NO: 82715 - DNA, 17 bp, Arabidopsis thaliana
cgtccgtcgatgttgag

SEQ ID NO: 82716 - DNA, 17 bp, Arabidopsis thaliana
cgtccgtcgatttctgt

SEQ ID NO: 82717 - DNA, 17 bp, Arabidopsis thaliana
cgtccgtcgccgtgatc

SEQ ID NO: 82718 - DNA, 17 bp, Arabidopsis thaliana
cgtccgtcgctgccgtg

SEQ ID NO: 82719 - DNA, 17 bp, Arabidopsis thaliana
cgtccgtcggctttagt

SEQ ID NO: 82720 - DNA, 17 bp, Arabidopsis thaliana
cgtccgtcggtctgtcg

SEQ ID NO: 82721 - DNA, 17 bp, Arabidopsis thaliana
cgtccgtcgttcggacc

SEQ ID NO: 82722 - DNA, 17 bp, Arabidopsis thaliana
cgtccgtctgacttggg

SEQ ID NO: 82723 - DNA, 17 bp, Arabidopsis thaliana
cgtccgtctgcctgggt

SEQ ID NO: 82724 - DNA, 17 bp, Arabidopsis thaliana
cgtccgtctgtagtcca

SEQ ID NO: 82725 - DNA, 17 bp, Arabidopsis thaliana
cgtccgtctgtgggtgg

SEQ ID NO: 82726 - DNA, 17 bp, Arabidopsis thaliana
cgtccgtcttcttggtt

SEQ ID NO: 82727 - DNA, 17 bp, Arabidopsis thaliana
cgtccgtgagggttcaa

SEQ ID NO: 82728 - DNA, 17 bp, Arabidopsis thaliana
cgtccgtgatttgggct

SEQ ID NO: 82729 - DNA, 17 bp, Arabidopsis thaliana
cgtccgtgccgacgcgg

SEQ ID NO: 82730 - DNA, 17 bp, Arabidopsis thaliana
cgtccgtggcttcttct

SEQ ID NO: 82731 - DNA, 17 bp, Arabidopsis thaliana
cgtccgtggtgtccggt

SEQ ID NO: 82732 - DNA, 17 bp, Arabidopsis thaliana
cgtccgtgtcgttggct

SEQ ID NO: 82733 - DNA, 17 bp, Arabidopsis thaliana
cgtccgtgttcggtcca

SEQ ID NO: 82734 - DNA, 17 bp, Arabidopsis thaliana
cgtccgttatcatctgt

SEQ ID NO: 82735 - DNA, 17 bp, Arabidopsis thaliana
cgtccgttcatctcttc

SEQ ID NO: 82736 - DNA, 17 bp, Arabidopsis thaliana
cgtccgttcctaagagt

SEQ ID NO: 82737 - DNA, 17 bp, Arabidopsis thaliana
cgtccgttcgtctgact

SEQ ID NO: 82738 - DNA, 17 bp, Arabidopsis thaliana
cgtccgttgcggtaaga

SEQ ID NO: 82739 - DNA, 17 bp, Arabidopsis thaliana
cgtccgttgtccatatg

SEQ ID NO: 82740 - DNA, 17 bp, Arabidopsis thaliana
cgtccgtttcaagcaca

SEQ ID NO: 82741 - DNA, 17 bp, Arabidopsis thaliana
cgtccgtttcccggctg

SEQ ID NO: 82742 - DNA, 17 bp, Arabidopsis thaliana
cgtccgtttcgtattgg

SEQ ID NO: 82743 - DNA, 17 bp, Arabidopsis thaliana
cgtccgtttctcggaat

SEQ ID NO: 82744 - DNA, 17 bp, Arabidopsis thaliana
cgtccgtttgcctgtcg

SEQ ID NO: 82745 - DNA, 17 bp, Arabidopsis thaliana
cgtcctaatactgcgtc

SEQ ID NO: 82746 - DNA, 17 bp, Arabidopsis thaliana
cgtcctacacagatggg

SEQ ID NO: 82747 - DNA, 17 bp, Arabidopsis thaliana
cgtcctaccatctaacc

SEQ ID NO: 82748 - DNA, 17 bp, Arabidopsis thaliana
cgtcctaccatgtaaac

SEQ ID NO: 82749 - DNA, 17 bp, Arabidopsis thaliana
cgtcctactaatggtcg

SEQ ID NO: 82750 - DNA, 17 bp, Arabidopsis thaliana
cgtcctagacgacgcca

SEQ ID NO: 82751 - DNA, 17 bp, Arabidopsis thaliana
cgtcctagacgacgcct

SEQ ID NO: 82752 - DNA, 17 bp, Arabidopsis thaliana
cgtcctcaaagttccag

SEQ ID NO: 82753 - DNA, 17 bp, Arabidopsis thaliana
cgtcctcacttacacga

SEQ ID NO: 82754 - DNA, 17 bp, Arabidopsis thaliana
cgtcctcagcatggacc

SEQ ID NO: 82755 - DNA, 17 bp, Arabidopsis thaliana
cgtcctcagcgacggac

SEQ ID NO: 82756 - DNA, 17 bp, Arabidopsis thaliana
cgtcctcagcgacggat

SEQ ID NO: 82757 - DNA, 17 bp, Arabidopsis thaliana
cgtcctcagcgacgtac

SEQ ID NO: 82758 - DNA, 17 bp, Arabidopsis thaliana
cgtcctcagttcggatt

SEQ ID NO: 82759 - DNA, 17 bp, Arabidopsis thaliana
cgtcctccagcgacgga

SEQ ID NO: 82760 - DNA, 17 bp, Arabidopsis thaliana
cgtcctcgatttcatca

SEQ ID NO: 82761 - DNA, 17 bp, Arabidopsis thaliana
cgtcctcgttgtctacg

SEQ ID NO: 82762 - DNA, 17 bp, Arabidopsis thaliana
cgtcctctatccgcaaa

SEQ ID NO: 82763 - DNA, 17 bp, Arabidopsis thaliana
cgtcctctcaaacccgt

SEQ ID NO: 82764 - DNA, 17 bp, Arabidopsis thaliana
cgtcctcttctcctccc

SEQ ID NO: 82765 - DNA, 17 bp, Arabidopsis thaliana
cgtcctcttctcctcgg

SEQ ID NO: 82766 - DNA, 17 bp, Arabidopsis thaliana
cgtcctctttagcgcgt

SEQ ID NO: 82767 - DNA, 17 bp, Arabidopsis thaliana
cgtcctgccaaacccgt

SEQ ID NO: 82768 - DNA, 17 bp, Arabidopsis thaliana
cgtcctgccaaactcgt

SEQ ID NO: 82769 - DNA, 17 bp, Arabidopsis thaliana
cgtcctgccaaatccgt

SEQ ID NO: 82770 - DNA, 17 bp, Arabidopsis thaliana
cgtcctggtcgagcatt

SEQ ID NO: 82771 - DNA, 17 bp, Arabidopsis thaliana
cgtcctgtagatggatc

SEQ ID NO: 82772 - DNA, 17 bp, Arabidopsis thaliana
cgtcctgtcaaatccgt

SEQ ID NO: 82773 - DNA, 17 bp, Arabidopsis thaliana
cgtccttatgagttggt

SEQ ID NO: 82774 - DNA, 17 bp, Arabidopsis thaliana
cgtccttccaaactcgt

SEQ ID NO: 82775 - DNA, 17 bp, Arabidopsis thaliana
cgtccttccaaccccgt

SEQ ID NO: 82776 - DNA, 17 bp, Arabidopsis thaliana
cgtccttctctatgtgg

SEQ ID NO: 82777 - DNA, 17 bp, Arabidopsis thaliana
cgtccttgaacattgcg

SEQ ID NO: 82778 - DNA, 17 bp, Arabidopsis thaliana
cgtccttgaaccacgat

SEQ ID NO: 82779 - DNA, 17 bp, Arabidopsis thaliana
cgtccttgaattgtcta

SEQ ID NO: 82780 - DNA, 17 bp, Arabidopsis thaliana
cgtccttgctcatcttc

SEQ ID NO: 82781 - DNA, 17 bp, Arabidopsis thaliana
cgtccttggattgctgt

SEQ ID NO: 82782 - DNA, 17 bp, Arabidopsis thaliana
cgtccttgggatctcac

SEQ ID NO: 82783 - DNA, 17 bp, Arabidopsis thaliana
cgtcctttgtgtttccg

SEQ ID NO: 82784 - DNA, 17 bp, Arabidopsis thaliana
cgtcgaaacggctgttt

SEQ ID NO: 82785 - DNA, 17 bp, Arabidopsis thaliana
cgtcgaacagtcagctc

SEQ ID NO: 82786 - DNA, 17 bp, Arabidopsis thaliana
cgtcgaacagtggctgg

SEQ ID NO: 82787 - DNA, 17 bp, Arabidopsis thaliana
cgtcgaacattcagctc

SEQ ID NO: 82788 - DNA, 17 bp, Arabidopsis thaliana
cgtcgaaccaaatcttt

SEQ ID NO: 82789 - DNA, 17 bp, Arabidopsis thaliana
cgtcgaaggatactgtg

SEQ ID NO: 82790 - DNA, 17 bp, Arabidopsis thaliana
cgtcgaatctcttgcgt

SEQ ID NO: 82791 - DNA, 17 bp, Arabidopsis thaliana
cgtcgaattctcggacc

SEQ ID NO: 82792 - DNA, 17 bp, Arabidopsis thaliana
cgtcgacattgaacgag

SEQ ID NO: 82793 - DNA, 17 bp, Arabidopsis thaliana
cgtcgaccgggtccgag

SEQ ID NO: 82794 - DNA, 17 bp, Arabidopsis thaliana
cgtcgaccgggtcggag

SEQ ID NO: 82795 - DNA, 17 bp, Arabidopsis thaliana
cgtcgacgagtttggtg

SEQ ID NO: 82796 - DNA, 17 bp, Arabidopsis thaliana
cgtcgacgcagatgatt

SEQ ID NO: 82797 - DNA, 17 bp, Arabidopsis thaliana
cgtcgacgggggcctcg

SEQ ID NO: 82798 - DNA, 17 bp, Arabidopsis thaliana
cgtcgactgagattatc

SEQ ID NO: 82799 - DNA, 17 bp, Arabidopsis thaliana
cgtcgacttggctggaa

SEQ ID NO: 82800 - DNA, 17 bp, Arabidopsis thaliana
cgtcgagaactgcaagg

SEQ ID NO: 82801 - DNA, 17 bp, Arabidopsis thaliana
cgtcgagaagatctacg

SEQ ID NO: 82802 - DNA, 17 bp, Arabidopsis thaliana
cgtcgagcaactgtagc

SEQ ID NO: 82803 - DNA, 17 bp, Arabidopsis thaliana
cgtcgaggagcctttga

SEQ ID NO: 82804 - DNA, 17 bp, Arabidopsis thaliana
cgtcgagggcacgtctg

SEQ ID NO: 82805 - DNA, 17 bp, Arabidopsis thaliana
cgtcgagtatcatcaca

SEQ ID NO: 82806 - DNA, 17 bp, Arabidopsis thaliana
cgtcgagtccttctgct

SEQ ID NO: 82807 - DNA, 17 bp, Arabidopsis thaliana
cgtcgagtgttgcgaga

SEQ ID NO: 82808 - DNA, 17 bp, Arabidopsis thaliana
cgtcgataacaggtgga

SEQ ID NO: 82809 - DNA, 17 bp, Arabidopsis thaliana
cgtcgataactccatct

SEQ ID NO: 82810 - DNA, 17 bp, Arabidopsis thaliana
cgtcgatacggggagca

SEQ ID NO: 82811 - DNA, 17 bp, Arabidopsis thaliana
cgtcgatgaagctgaat

SEQ ID NO: 82812 - DNA, 17 bp, Arabidopsis thaliana
cgtcgatgttgagaccg

SEQ ID NO: 82813 - DNA, 17 bp, Arabidopsis thaliana
cgtcgattaattgcctc

SEQ ID NO: 82814 - DNA, 17 bp, Arabidopsis thaliana
cgtcgattctggttccc

SEQ ID NO: 82815 - DNA, 17 bp, Arabidopsis thaliana
cgtcgattgaactgatt

SEQ ID NO: 82816 - DNA, 17 bp, Arabidopsis thaliana
cgtcgatttctgtaggg

SEQ ID NO: 82817 - DNA, 17 bp, Arabidopsis thaliana
cgtcgcaaatagatttg

SEQ ID NO: 82818 - DNA, 17 bp, Arabidopsis thaliana
cgtcgcaattccctcgt

SEQ ID NO: 82819 - DNA, 17 bp, Arabidopsis thaliana
cgtcgcacccaaaaccg

SEQ ID NO: 82820 - DNA, 17 bp, Arabidopsis thaliana
cgtcgcacgaaaggcgt

SEQ ID NO: 82821 - DNA, 17 bp, Arabidopsis thaliana
cgtcgcactgtagatgg

SEQ ID NO: 82822 - DNA, 17 bp, Arabidopsis thaliana
cgtcgcactttcgctcc

SEQ ID NO: 82823 - DNA, 17 bp, Arabidopsis thaliana
cgtcgcagagatggagc

SEQ ID NO: 82824 - DNA, 17 bp, Arabidopsis thaliana
cgtcgcagattgtgggt

SEQ ID NO: 82825 - DNA, 17 bp, Arabidopsis thaliana
cgtcgcaggtgtggttg

SEQ ID NO: 82826 - DNA, 17 bp, Arabidopsis thaliana
cgtcgcatcctgtagat

SEQ ID NO: 82827 - DNA, 17 bp, Arabidopsis thaliana
cgtcgcatgtgccttaa

SEQ ID NO: 82828 - DNA, 17 bp, Arabidopsis thaliana
cgtcgcattcctgtaga

SEQ ID NO: 82829 - DNA, 17 bp, Arabidopsis thaliana
cgtcgcatttttgatcg

SEQ ID NO: 82830 - DNA, 17 bp, Arabidopsis thaliana
cgtcgccgcaggtagtt

SEQ ID NO: 82831 - DNA, 17 bp, Arabidopsis thaliana
cgtcgccggaaccacca

SEQ ID NO: 82832 - DNA, 17 bp, Arabidopsis thaliana
cgtcgccggacctaccg

SEQ ID NO: 82833 - DNA, 17 bp, Arabidopsis thaliana
cgtcgccggcgacttga

SEQ ID NO: 82834 - DNA, 17 bp, Arabidopsis thaliana
cgtcgccgtgatcgtgg

SEQ ID NO: 82835 - DNA, 17 bp, Arabidopsis thaliana
cgtcgcctcttagtgca

SEQ ID NO: 82836 - DNA, 17 bp, Arabidopsis thaliana
cgtcgccttcagttgtt

SEQ ID NO: 82837 - DNA, 17 bp, Arabidopsis thaliana
cgtcgccttggccgagt

SEQ ID NO: 82838 - DNA, 17 bp, Arabidopsis thaliana
cgtcgcgagaagtccac

SEQ ID NO: 82839 - DNA, 17 bp, Arabidopsis thaliana
cgtcgcgatagtaattc

SEQ ID NO: 82840 - DNA, 17 bp, Arabidopsis thaliana
cgtcgcggtgtttttgg

SEQ ID NO: 82841 - DNA, 17 bp, Arabidopsis thaliana
cgtcgcggttttttcgg

SEQ ID NO: 82842 - DNA, 17 bp, Arabidopsis thaliana
cgtcgctagtgtgtcgg

SEQ ID NO: 82843 - DNA, 17 bp, Arabidopsis thaliana
cgtcgctcagaaccact

SEQ ID NO: 82844 - DNA, 17 bp, Arabidopsis thaliana
cgtcgctcattggtgtg

SEQ ID NO: 82845 - DNA, 17 bp, Arabidopsis thaliana
cgtcgctgagaatcgtc

SEQ ID NO: 82846 - DNA, 17 bp, Arabidopsis thaliana
cgtcgctgaggacgctt

SEQ ID NO: 82847 - DNA, 17 bp, Arabidopsis thaliana
cgtcgctgccgtgatcg

SEQ ID NO: 82848 - DNA, 17 bp, Arabidopsis thaliana
cgtcgctgtgttgttcg

SEQ ID NO: 82849 - DNA, 17 bp, Arabidopsis thaliana
cgtcgcttccatcttcg

SEQ ID NO: 82850 - DNA, 17 bp, Arabidopsis thaliana
cgtcgcttccttgacgt

SEQ ID NO: 82851 - DNA, 17 bp, Arabidopsis thaliana
cgtcgcttctagcccgg

SEQ ID NO: 82852 - DNA, 17 bp, Arabidopsis thaliana
cgtcgcttgaagttgcc

SEQ ID NO: 82853 - DNA, 17 bp, Arabidopsis thaliana
cgtcgcttggtgtccgg

SEQ ID NO: 82854 - DNA, 17 bp, Arabidopsis thaliana
cgtcgctttggccgagt

SEQ ID NO: 82855 - DNA, 17 bp, Arabidopsis thaliana
cgtcggaaatcacaagc

SEQ ID NO: 82856 - DNA, 17 bp, Arabidopsis thaliana
cgtcggaccaggcttca

SEQ ID NO: 82857 - DNA, 17 bp, Arabidopsis thaliana
cgtcggactgtagaact

SEQ ID NO: 82858 - DNA, 17 bp, Arabidopsis thaliana
cgtcggagataaagttc

SEQ ID NO: 82859 - DNA, 17 bp, Arabidopsis thaliana
cgtcggagggctgtctt

SEQ ID NO: 82860 - DNA, 17 bp, Arabidopsis thaliana
cgtcggagttggactct

SEQ ID NO: 82861 - DNA, 17 bp, Arabidopsis thaliana
cgtcggatcctgttaaa

SEQ ID NO: 82862 - DNA, 17 bp, Arabidopsis thaliana
cgtcggatgaagctttt

SEQ ID NO: 82863 - DNA, 17 bp, Arabidopsis thaliana
cgtcggatttggcgatt

SEQ ID NO: 82864 - DNA, 17 bp, Arabidopsis thaliana
cgtcggccaaaacgaag

SEQ ID NO: 82865 - DNA, 17 bp, Arabidopsis thaliana
cgtcggccaccatcgat

SEQ ID NO: 82866 - DNA, 17 bp, Arabidopsis thaliana
cgtcggccacggacata

SEQ ID NO: 82867 - DNA, 17 bp, Arabidopsis thaliana
cgtcggccgtcgattca

SEQ ID NO: 82868 - DNA, 17 bp, Arabidopsis thaliana
cgtcggcctgtcggccc

SEQ ID NO: 82869 - DNA, 17 bp, Arabidopsis thaliana
cgtcggcctgtcggccg

SEQ ID NO: 82870 - DNA, 17 bp, Arabidopsis thaliana
cgtcggcctgtgggctc

SEQ ID NO: 82871 - DNA, 17 bp, Arabidopsis thaliana
cgtcggcgacttggttg

SEQ ID NO: 82872 - DNA, 17 bp, Arabidopsis thaliana
cgtcggcgggggcctcg

SEQ ID NO: 82873 - DNA, 17 bp, Arabidopsis thaliana
cgtcggctgacaggcgg

SEQ ID NO: 82874 - DNA, 17 bp, Arabidopsis thaliana
cgtcggctgtcagcgga

SEQ ID NO: 82875 - DNA, 17 bp, Arabidopsis thaliana
cgtcgggatgatcgccg

SEQ ID NO: 82876 - DNA, 17 bp, Arabidopsis thaliana
cgtcgggccgatccgat

SEQ ID NO: 82877 - DNA, 17 bp, Arabidopsis thaliana
cgtcgggcgaagccacc

SEQ ID NO: 82878 - DNA, 17 bp, Arabidopsis thaliana
cgtcgggctgcagagcg

SEQ ID NO: 82879 - DNA, 17 bp, Arabidopsis thaliana
cgtcggggcaagagcca

SEQ ID NO: 82880 - DNA, 17 bp, Arabidopsis thaliana
cgtcggtagcggccacg

SEQ ID NO: 82881 - DNA, 17 bp, Arabidopsis thaliana
cgtcggtctgtcggccc

SEQ ID NO: 82882 - DNA, 17 bp, Arabidopsis thaliana
cgtcggtctgtcggccg

SEQ ID NO: 82883 - DNA, 17 bp, Arabidopsis thaliana
cgtcggtctgtcggctc

SEQ ID NO: 82884 - DNA, 17 bp, Arabidopsis thaliana
cgtcggtgcaaatcttg

SEQ ID NO: 82885 - DNA, 17 bp, Arabidopsis thaliana
cgtcggtgcagatcttg

SEQ ID NO: 82886 - DNA, 17 bp, Arabidopsis thaliana
cgtcggtgtagatgatg

SEQ ID NO: 82887 - DNA, 17 bp, Arabidopsis thaliana
cgtcggttcccgaatga

SEQ ID NO: 82888 - DNA, 17 bp, Arabidopsis thaliana
cgtcggttccttaatag

SEQ ID NO: 82889 - DNA, 17 bp, Arabidopsis thaliana
cgtcggttcggccaatg

SEQ ID NO: 82890 - DNA, 17 bp, Arabidopsis thaliana
cgtcggttgtggttgtt

SEQ ID NO: 82891 - DNA, 17 bp, Arabidopsis thaliana
cgtcggtttggtctcct

SEQ ID NO: 82892 - DNA, 17 bp, Arabidopsis thaliana
cgtcgtaaatagtgaca

SEQ ID NO: 82893 - DNA, 17 bp, Arabidopsis thaliana
cgtcgtagtcttgactt

SEQ ID NO: 82894 - DNA, 17 bp, Arabidopsis thaliana
cgtcgtagtttggcgac

SEQ ID NO: 82895 - DNA, 17 bp, Arabidopsis thaliana
cgtcgtataagattgtc

SEQ ID NO: 82896 - DNA, 17 bp, Arabidopsis thaliana
cgtcgtatctgtgacat

SEQ ID NO: 82897 - DNA, 17 bp, Arabidopsis thaliana
cgtcgtcaatgatgttg

SEQ ID NO: 82898 - DNA, 17 bp, Arabidopsis thaliana
cgtcgtcctcgttgtct

SEQ ID NO: 82899 - DNA, 17 bp, Arabidopsis thaliana
cgtcgtcgtcttcgaag

SEQ ID NO: 82900 - DNA, 17 bp, Arabidopsis thaliana
cgtcgtctaaatcctca

SEQ ID NO: 82901 - DNA, 17 bp, Arabidopsis thaliana
cgtcgtctaatggatct

SEQ ID NO: 82902 - DNA, 17 bp, Arabidopsis thaliana
cgtcgtctagctcagtt

SEQ ID NO: 82903 - DNA, 17 bp, Arabidopsis thaliana
cgtcgtctagtcggagg

SEQ ID NO: 82904 - DNA, 17 bp, Arabidopsis thaliana
cgtcgtctcggtcgatc

SEQ ID NO: 82905 - DNA, 17 bp, Arabidopsis thaliana
cgtcgtctgtcgtggat

SEQ ID NO: 82906 - DNA, 17 bp, Arabidopsis thaliana
cgtcgtcttactgatcc

SEQ ID NO: 82907 - DNA, 17 bp, Arabidopsis thaliana
cgtcgtcttcgaaggcc

SEQ ID NO: 82908 - DNA, 17 bp, Arabidopsis thaliana
cgtcgtcttcggtcgcc

SEQ ID NO: 82909 - DNA, 17 bp, Arabidopsis thaliana
cgtcgtcttcgtggtcc

SEQ ID NO: 82910 - DNA, 17 bp, Arabidopsis thaliana
cgtcgtcttcgttggtg

SEQ ID NO: 82911 - DNA, 17 bp, Arabidopsis thaliana
cgtcgtctttccactaa

SEQ ID NO: 82912 - DNA, 17 bp, Arabidopsis thaliana
cgtcgtgacttttgatt

SEQ ID NO: 82913 - DNA, 17 bp, Arabidopsis thaliana
cgtcgtgagacaggtta

SEQ ID NO: 82914 - DNA, 17 bp, Arabidopsis thaliana
cgtcgtgagacagttcg

SEQ ID NO: 82915 - DNA, 17 bp, Arabidopsis thaliana
cgtcgtgcccggaccca

SEQ ID NO: 82916 - DNA, 17 bp, Arabidopsis thaliana
cgtcgtgcccggaccct

SEQ ID NO: 82917 - DNA, 17 bp, Arabidopsis thaliana
cgtcgtgccgtttgtta

SEQ ID NO: 82918 - DNA, 17 bp, Arabidopsis thaliana
cgtcgtgcggatctagg

SEQ ID NO: 82919 - DNA, 17 bp, Arabidopsis thaliana
cgtcgtggatttgacaa

SEQ ID NO: 82920 - DNA, 17 bp, Arabidopsis thaliana
cgtcgtggcagaggcgg

SEQ ID NO: 82921 - DNA, 17 bp, Arabidopsis thaliana
cgtcgtgtggattttgg

SEQ ID NO: 82922 - DNA, 17 bp, Arabidopsis thaliana
cgtcgtgttcttcttct

SEQ ID NO: 82923 - DNA, 17 bp, Arabidopsis thaliana
cgtcgttacatattgga

SEQ ID NO: 82924 - DNA, 17 bp, Arabidopsis thaliana
cgtcgttcacaacttag

SEQ ID NO: 82925 - DNA, 17 bp, Arabidopsis thaliana
cgtcgttcagtctacgg

SEQ ID NO: 82926 - DNA, 17 bp, Arabidopsis thaliana
cgtcgttcggaccgcct

SEQ ID NO: 82927 - DNA, 17 bp, Arabidopsis thaliana
cgtcgttgcaccgtttt

SEQ ID NO: 82928 - DNA, 17 bp, Arabidopsis thaliana
cgtcgttgtttactgtg

SEQ ID NO: 82929 - DNA, 17 bp, Arabidopsis thaliana
cgtcgtttagatctgcc

SEQ ID NO: 82930 - DNA, 17 bp, Arabidopsis thaliana
cgtcgtttagatctgtc

SEQ ID NO: 82931 - DNA, 17 bp, Arabidopsis thaliana
cgtcgtttccggcaggt

SEQ ID NO: 82932 - DNA, 17 bp, Arabidopsis thaliana
cgtctaaactttttggg

SEQ ID NO: 82933 - DNA, 17 bp, Arabidopsis thaliana
cgtctaaccgattactc

SEQ ID NO: 82934 - DNA, 17 bp, Arabidopsis thaliana
cgtctaactgttgtatg

SEQ ID NO: 82935 - DNA, 17 bp, Arabidopsis thaliana
cgtctaagatatgtacc

SEQ ID NO: 82936 - DNA, 17 bp, Arabidopsis thaliana
cgtctaagccaggtccc

SEQ ID NO: 82937 - DNA, 17 bp, Arabidopsis thaliana
cgtctaagcgttaggca

SEQ ID NO: 82938 - DNA, 17 bp, Arabidopsis thaliana
cgtctaaggttatttca

SEQ ID NO: 82939 - DNA, 17 bp, Arabidopsis thaliana
cgtctaatcttagccat

SEQ ID NO: 82940 - DNA, 17 bp, Arabidopsis thaliana
cgtctacagaagtggga

SEQ ID NO: 82941 - DNA, 17 bp, Arabidopsis thaliana
cgtctacagaggtgttt

SEQ ID NO: 82942 - DNA, 17 bp, Arabidopsis thaliana
cgtctacaggatgcgac

SEQ ID NO: 82943 - DNA, 17 bp, Arabidopsis thaliana
cgtctacaggcaccgtg

SEQ ID NO: 82944 - DNA, 17 bp, Arabidopsis thaliana
cgtctacagttctgtgg

SEQ ID NO: 82945 - DNA, 17 bp, Arabidopsis thaliana
cgtctacagttttgtgg

SEQ ID NO: 82946 - DNA, 17 bp, Arabidopsis thaliana
cgtctacattatggtct

SEQ ID NO: 82947 - DNA, 17 bp, Arabidopsis thaliana
cgtctaccacgggtgag

SEQ ID NO: 82948 - DNA, 17 bp, Arabidopsis thaliana
cgtctaccactttgtca

SEQ ID NO: 82949 - DNA, 17 bp, Arabidopsis thaliana
cgtctacccgggtgtca

SEQ ID NO: 82950 - DNA, 17 bp, Arabidopsis thaliana
cgtctaccgcagccgca

SEQ ID NO: 82951 - DNA, 17 bp, Arabidopsis thaliana
cgtctacctgggtgtca

SEQ ID NO: 82952 - DNA, 17 bp, Arabidopsis thaliana
cgtctacctttgcatag

SEQ ID NO: 82953 - DNA, 17 bp, Arabidopsis thaliana
cgtctacgtccctgccc

SEQ ID NO: 82954 - DNA, 17 bp, Arabidopsis thaliana
cgtctactttgctcaat

SEQ ID NO: 82955 - DNA, 17 bp, Arabidopsis thaliana
cgtctagagcagtacgt

SEQ ID NO: 82956 - DNA, 17 bp, Arabidopsis thaliana
cgtctagagcagtccgt

SEQ ID NO: 82957 - DNA, 17 bp, Arabidopsis thaliana
cgtctagaggatctgcg

SEQ ID NO: 82958 - DNA, 17 bp, Arabidopsis thaliana
cgtctagctcagttggt

SEQ ID NO: 82959 - DNA, 17 bp, Arabidopsis thaliana
cgtctagcttctaatcg

SEQ ID NO: 82960 - DNA, 17 bp, Arabidopsis thaliana
cgtctagcttgactggc

SEQ ID NO: 82961 - DNA, 17 bp, Arabidopsis thaliana
cgtctaggaactgggat

SEQ ID NO: 82962 - DNA, 17 bp, Arabidopsis thaliana
cgtctagtctctgatca

SEQ ID NO: 82963 - DNA, 17 bp, Arabidopsis thaliana
cgtctatcactgcgaca

SEQ ID NO: 82964 - DNA, 17 bp, Arabidopsis thaliana
cgtctatccatactctt

SEQ ID NO: 82965 - DNA, 17 bp, Arabidopsis thaliana
cgtctatctactacatg

SEQ ID NO: 82966 - DNA, 17 bp, Arabidopsis thaliana
cgtctattagctcagtg

SEQ ID NO: 82967 - DNA, 17 bp, Arabidopsis thaliana
cgtctattgtgtgatcc

SEQ ID NO: 82968 - DNA, 17 bp, Arabidopsis thaliana
cgtctcaaccgtcgtaa

SEQ ID NO: 82969 - DNA, 17 bp, Arabidopsis thaliana
cgtctcaatttcactcg

SEQ ID NO: 82970 - DNA, 17 bp, Arabidopsis thaliana
cgtctcaccagcgctat

SEQ ID NO: 82971 - DNA, 17 bp, Arabidopsis thaliana
cgtctcacggtggatag

SEQ ID NO: 82972 - DNA, 17 bp, Arabidopsis thaliana
cgtctcagctcgctgcg

SEQ ID NO: 82973 - DNA, 17 bp, Arabidopsis thaliana
cgtctcaggagggatag

SEQ ID NO: 82974 - DNA, 17 bp, Arabidopsis thaliana
cgtctcatcatcgcctt

SEQ ID NO: 82975 - DNA, 17 bp, Arabidopsis thaliana
cgtctccaaccttggtc

SEQ ID NO: 82976 - DNA, 17 bp, Arabidopsis thaliana
cgtctccagagatgtgt

SEQ ID NO: 82977 - DNA, 17 bp, Arabidopsis thaliana
cgtctccagctgtggtt

SEQ ID NO: 82978 - DNA, 17 bp, Arabidopsis thaliana
cgtctccattcagagcc

SEQ ID NO: 82979 - DNA, 17 bp, Arabidopsis thaliana
cgtctcccggcagacgc

SEQ ID NO: 82980 - DNA, 17 bp, Arabidopsis thaliana
cgtctcccggtagaacc

SEQ ID NO: 82981 - DNA, 17 bp, Arabidopsis thaliana
cgtctcccggtaggacc

SEQ ID NO: 82982 - DNA, 17 bp, Arabidopsis thaliana
cgtctccctgggtgtca

SEQ ID NO: 82983 - DNA, 17 bp, Arabidopsis thaliana
cgtctccgaatcttagt

SEQ ID NO: 82984 - DNA, 17 bp, Arabidopsis thaliana
cgtctccgattccacca

SEQ ID NO: 82985 - DNA, 17 bp, Arabidopsis thaliana
cgtctccggcaagtcag

SEQ ID NO: 82986 - DNA, 17 bp, Arabidopsis thaliana
cgtctcgccaaacccgt

SEQ ID NO: 82987 - DNA, 17 bp, Arabidopsis thaliana
cgtctcgccaaatccgt

SEQ ID NO: 82988 - DNA, 17 bp, Arabidopsis thaliana
cgtctcggggattttgg

SEQ ID NO: 82989 - DNA, 17 bp, Arabidopsis thaliana
cgtctcggtaacacttg

SEQ ID NO: 82990 - DNA, 17 bp, Arabidopsis thaliana
cgtctcggtcgatcttt

SEQ ID NO: 82991 - DNA, 17 bp, Arabidopsis thaliana
cgtctcggtgcgcggag

SEQ ID NO: 82992 - DNA, 17 bp, Arabidopsis thaliana
cgtctcggttcgcgatc

SEQ ID NO: 82993 - DNA, 17 bp, Arabidopsis thaliana
cgtctcgttccagttcc

SEQ ID NO: 82994 - DNA, 17 bp, Arabidopsis thaliana
cgtctctaagacgaacg

SEQ ID NO: 82995 - DNA, 17 bp, Arabidopsis thaliana
cgtctctaagtcagaat

SEQ ID NO: 82996 - DNA, 17 bp, Arabidopsis thaliana
cgtctctcgtttcactc

SEQ ID NO: 82997 - DNA, 17 bp, Arabidopsis thaliana
cgtctctgctgtgttct

SEQ ID NO: 82998 - DNA, 17 bp, Arabidopsis thaliana
cgtctctggcagctata

SEQ ID NO: 82999 - DNA, 17 bp, Arabidopsis thaliana
cgtctctggcagctatc

SEQ ID NO: 83000 - DNA, 17 bp, Arabidopsis thaliana
cgtctcttccggccgaa

SEQ ID NO: 83001 - DNA, 17 bp, Arabidopsis thaliana
cgtctcttctccggttc

SEQ ID NO: 83002 - DNA, 17 bp, Arabidopsis thaliana
cgtctcttggcgtttgg

SEQ ID NO: 83003 - DNA, 17 bp, Arabidopsis thaliana
cgtctctttggttgtta

SEQ ID NO: 83004 - DNA, 17 bp, Arabidopsis thaliana
cgtctgaaagtcgcgcc

SEQ ID NO: 83005 - DNA, 17 bp, Arabidopsis thaliana
cgtctgaaagtcgcgtc

SEQ ID NO: 83006 - DNA, 17 bp, Arabidopsis thaliana
cgtctgaatttcggccg

SEQ ID NO: 83007 - DNA, 17 bp, Arabidopsis thaliana
cgtctgacttgggtacc

SEQ ID NO: 83008 - DNA, 17 bp, Arabidopsis thaliana
cgtctgacttgggtata

SEQ ID NO: 83009 - DNA, 17 bp, Arabidopsis thaliana
cgtctgacttgggtcct

SEQ ID NO: 83010 - DNA, 17 bp, Arabidopsis thaliana
cgtctgagaaaatgtgt

SEQ ID NO: 83011 - DNA, 17 bp, Arabidopsis thaliana
cgtctgagacaggtcgg

SEQ ID NO: 83012 - DNA, 17 bp, Arabidopsis thaliana
cgtctgatcgatgaaga

SEQ ID NO: 83013 - DNA, 17 bp, Arabidopsis thaliana
cgtctgatcggcgaaga

SEQ ID NO: 83014 - DNA, 17 bp, Arabidopsis thaliana
cgtctgatgtcaatgcc

SEQ ID NO: 83015 - DNA, 17 bp, Arabidopsis thaliana
cgtctgattcagatctc

SEQ ID NO: 83016 - DNA, 17 bp, Arabidopsis thaliana
cgtctgcaaaggattct

SEQ ID NO: 83017 - DNA, 17 bp, Arabidopsis thaliana
cgtctgccgcagccgca

SEQ ID NO: 83018 - DNA, 17 bp, Arabidopsis thaliana
cgtctgcctaggtgtca

SEQ ID NO: 83019 - DNA, 17 bp, Arabidopsis thaliana
cgtctgcctggatgtca

SEQ ID NO: 83020 - DNA, 17 bp, Arabidopsis thaliana
cgtctgcctgggggccg

SEQ ID NO: 83021 - DNA, 17 bp, Arabidopsis thaliana
cgtctgcctgggtgccc

SEQ ID NO: 83022 - DNA, 17 bp, Arabidopsis thaliana
cgtctgcctgggtgtca

SEQ ID NO: 83023 - DNA, 17 bp, Arabidopsis thaliana
cgtctgcctgggtgtcc

SEQ ID NO: 83024 - DNA, 17 bp, Arabidopsis thaliana
cgtctgcctggtctcct

SEQ ID NO: 83025 - DNA, 17 bp, Arabidopsis thaliana
cgtctgcgtttagggtt

SEQ ID NO: 83026 - DNA, 17 bp, Arabidopsis thaliana
cgtctgctgcgatagaa

SEQ ID NO: 83027 - DNA, 17 bp, Arabidopsis thaliana
cgtctggaaaaagaaca

SEQ ID NO: 83028 - DNA, 17 bp, Arabidopsis thaliana
cgtctggaaagcaggtt

SEQ ID NO: 83029 - DNA, 17 bp, Arabidopsis thaliana
cgtctggccaatccctt

SEQ ID NO: 83030 - DNA, 17 bp, Arabidopsis thaliana
cgtctggccgatccgat

SEQ ID NO: 83031 - DNA, 17 bp, Arabidopsis thaliana
cgtctggctctgttagc

SEQ ID NO: 83032 - DNA, 17 bp, Arabidopsis thaliana
cgtctggtgccagcagc

SEQ ID NO: 83033 - DNA, 17 bp, Arabidopsis thaliana
cgtctgtaatccaacgg

SEQ ID NO: 83034 - DNA, 17 bp, Arabidopsis thaliana
cgtctgtaggtggcttt

SEQ ID NO: 83035 - DNA, 17 bp, Arabidopsis thaliana
cgtctgtagtccaacgg

SEQ ID NO: 83036 - DNA, 17 bp, Arabidopsis thaliana
cgtctgtagtccaccgg

SEQ ID NO: 83037 - DNA, 17 bp, Arabidopsis thaliana
cgtctgtcgtggatcta

SEQ ID NO: 83038 - DNA, 17 bp, Arabidopsis thaliana
cgtctgtctgggtatag

SEQ ID NO: 83039 - DNA, 17 bp, Arabidopsis thaliana
cgtctgttcctgctgct

SEQ ID NO: 83040 - DNA, 17 bp, Arabidopsis thaliana
cgtctgttgctatggtg

SEQ ID NO: 83041 - DNA, 17 bp, Arabidopsis thaliana
cgtcttaaccgcgtaaa

SEQ ID NO: 83042 - DNA, 17 bp, Arabidopsis thaliana
cgtcttaagcaaagtgt

SEQ ID NO: 83043 - DNA, 17 bp, Arabidopsis thaliana
cgtcttacgttccatga

SEQ ID NO: 83044 - DNA, 17 bp, Arabidopsis thaliana
cgtcttagcacatcctc

SEQ ID NO: 83045 - DNA, 17 bp, Arabidopsis thaliana
cgtcttaggcgcacagg

SEQ ID NO: 83046 - DNA, 17 bp, Arabidopsis thaliana
cgtcttaggctcccaaa

SEQ ID NO: 83047 - DNA, 17 bp, Arabidopsis thaliana
cgtcttatgatggagaa

SEQ ID NO: 83048 - DNA, 17 bp, Arabidopsis thaliana
cgtcttattgaagtcgg

SEQ ID NO: 83049 - DNA, 17 bp, Arabidopsis thaliana
cgtcttattgaccgact

SEQ ID NO: 83050 - DNA, 17 bp, Arabidopsis thaliana
cgtcttcactttcagga

SEQ ID NO: 83051 - DNA, 17 bp, Arabidopsis thaliana
cgtcttcagagtcgtat

SEQ ID NO: 83052 - DNA, 17 bp, Arabidopsis thaliana
cgtcttccacgacctcg

SEQ ID NO: 83053 - DNA, 17 bp, Arabidopsis thaliana
cgtcttccgactgttca

SEQ ID NO: 83054 - DNA, 17 bp, Arabidopsis thaliana
cgtcttcgaaattcgca

SEQ ID NO: 83055 - DNA, 17 bp, Arabidopsis thaliana
cgtcttcgaattgccgt

SEQ ID NO: 83056 - DNA, 17 bp, Arabidopsis thaliana
cgtcttcgagtgtcagg

SEQ ID NO: 83057 - DNA, 17 bp, Arabidopsis thaliana
cgtcttcgcaagggaga

SEQ ID NO: 83058 - DNA, 17 bp, Arabidopsis thaliana
cgtcttcggcgtgtgct

SEQ ID NO: 83059 - DNA, 17 bp, Arabidopsis thaliana
cgtcttcggtcgccttc

SEQ ID NO: 83060 - DNA, 17 bp, Arabidopsis thaliana
cgtcttcgtactctgat

SEQ ID NO: 83061 - DNA, 17 bp, Arabidopsis thaliana
cgtcttcgtggtccagg

SEQ ID NO: 83062 - DNA, 17 bp, Arabidopsis thaliana
cgtcttctatcggaggt

SEQ ID NO: 83063 - DNA, 17 bp, Arabidopsis thaliana
cgtcttctattggaggt

SEQ ID NO: 83064 - DNA, 17 bp, Arabidopsis thaliana
cgtcttctcattgcggc

SEQ ID NO: 83065 - DNA, 17 bp, Arabidopsis thaliana
cgtcttctgaattgcgt

SEQ ID NO: 83066 - DNA, 17 bp, Arabidopsis thaliana
cgtcttctgttgcgttc

SEQ ID NO: 83067 - DNA, 17 bp, Arabidopsis thaliana
cgtcttcttcctttgag

SEQ ID NO: 83068 - DNA, 17 bp, Arabidopsis thaliana
cgtcttcttctttgggt

SEQ ID NO: 83069 - DNA, 17 bp, Arabidopsis thaliana
cgtcttcttgacactac

SEQ ID NO: 83070 - DNA, 17 bp, Arabidopsis thaliana
cgtcttcttgatcgcga

SEQ ID NO: 83071 - DNA, 17 bp, Arabidopsis thaliana
cgtcttcttggttgtta

SEQ ID NO: 83072 - DNA, 17 bp, Arabidopsis thaliana
cgtcttcttttttttgg

SEQ ID NO: 83073 - DNA, 17 bp, Arabidopsis thaliana
cgtcttgaaacacggac

SEQ ID NO: 83074 - DNA, 17 bp, Arabidopsis thaliana
cgtcttgaacgggcttg

SEQ ID NO: 83075 - DNA, 17 bp, Arabidopsis thaliana
cgtcttgagacaggtta

SEQ ID NO: 83076 - DNA, 17 bp, Arabidopsis thaliana
cgtcttgattggcttgg

SEQ ID NO: 83077 - DNA, 17 bp, Arabidopsis thaliana
cgtcttgattgtcaccc

SEQ ID NO: 83078 - DNA, 17 bp, Arabidopsis thaliana
cgtcttgattgtcagcg

SEQ ID NO: 83079 - DNA, 17 bp, Arabidopsis thaliana
cgtcttgcgatagagtg

SEQ ID NO: 83080 - DNA, 17 bp, Arabidopsis thaliana
cgtcttgcggatagatt

SEQ ID NO: 83081 - DNA, 17 bp, Arabidopsis thaliana
cgtcttggatcgtatgc

SEQ ID NO: 83082 - DNA, 17 bp, Arabidopsis thaliana
cgtcttgggattttggc

SEQ ID NO: 83083 - DNA, 17 bp, Arabidopsis thaliana
cgtcttgggatttttgc

SEQ ID NO: 83084 - DNA, 17 bp, Arabidopsis thaliana
cgtcttggtccatctta

SEQ ID NO: 83085 - DNA, 17 bp, Arabidopsis thaliana
cgtcttgtcaaaccgtc

SEQ ID NO: 83086 - DNA, 17 bp, Arabidopsis thaliana
cgtcttgtccaatcgct

SEQ ID NO: 83087 - DNA, 17 bp, Arabidopsis thaliana
cgtcttgtgaagtgcga

SEQ ID NO: 83088 - DNA, 17 bp, Arabidopsis thaliana
cgtcttgtgacgagctg

SEQ ID NO: 83089 - DNA, 17 bp, Arabidopsis thaliana
cgtcttgtgctcgtttg

SEQ ID NO: 83090 - DNA, 17 bp, Arabidopsis thaliana
cgtcttgtggctctgat

SEQ ID NO: 83091 - DNA, 17 bp, Arabidopsis thaliana
cgtcttgtgttgctcag

SEQ ID NO: 83092 - DNA, 17 bp, Arabidopsis thaliana
cgtctttaaaactaagt

SEQ ID NO: 83093 - DNA, 17 bp, Arabidopsis thaliana
cgtctttaagatcgggt

SEQ ID NO: 83094 - DNA, 17 bp, Arabidopsis thaliana
cgtctttacattggatg

SEQ ID NO: 83095 - DNA, 17 bp, Arabidopsis thaliana
cgtctttaccgtctaag

SEQ ID NO: 83096 - DNA, 17 bp, Arabidopsis thaliana
cgtctttaggactttag

SEQ ID NO: 83097 - DNA, 17 bp, Arabidopsis thaliana
cgtctttagtccaacgg

SEQ ID NO: 83098 - DNA, 17 bp, Arabidopsis thaliana
cgtctttccactaagca

SEQ ID NO: 83099 - DNA, 17 bp, Arabidopsis thaliana
cgtctttccccgagcta

SEQ ID NO: 83100 - DNA, 17 bp, Arabidopsis thaliana
cgtctttcggaccgcgt

SEQ ID NO: 83101 - DNA, 17 bp, Arabidopsis thaliana
cgtctttcttgacttgt

SEQ ID NO: 83102 - DNA, 17 bp, Arabidopsis thaliana
cgtctttgcccaatggt

SEQ ID NO: 83103 - DNA, 17 bp, Arabidopsis thaliana
cgtctttgggtgtgtcg

SEQ ID NO: 83104 - DNA, 17 bp, Arabidopsis thaliana
cgtctttgttcggtatt

SEQ ID NO: 83105 - DNA, 17 bp, Arabidopsis thaliana
cgtcttttcggttgtgt

SEQ ID NO: 83106 - DNA, 17 bp, Arabidopsis thaliana
cgtcttttggagagaag

SEQ ID NO: 83107 - DNA, 17 bp, Arabidopsis thaliana
cgtcttttggtattcgc

SEQ ID NO: 83108 - DNA, 17 bp, Arabidopsis thaliana
cgtgaaaacgggccgca

SEQ ID NO: 83109 - DNA, 17 bp, Arabidopsis thaliana
cgtgaaaatccatcttc

SEQ ID NO: 83110 - DNA, 17 bp, Arabidopsis thaliana
cgtgaaacatctatccg

SEQ ID NO: 83111 - DNA, 17 bp, Arabidopsis thaliana
cgtgaaactgcgaatgg

SEQ ID NO: 83112 - DNA, 17 bp, Arabidopsis thaliana
cgtgaaagagcattgac

SEQ ID NO: 83113 - DNA, 17 bp, Arabidopsis thaliana
cgtgaaaggatcagacc

SEQ ID NO: 83114 - DNA, 17 bp, Arabidopsis thaliana
cgtgaaaggtcgattca

SEQ ID NO: 83115 - DNA, 17 bp, Arabidopsis thaliana
cgtgaaccgtacttcct

SEQ ID NO: 83116 - DNA, 17 bp, Arabidopsis thaliana
cgtgaacctgcggaagg

SEQ ID NO: 83117 - DNA, 17 bp, Arabidopsis thaliana
cgtgaacgactgacgag

SEQ ID NO: 83118 - DNA, 17 bp, Arabidopsis thaliana
cgtgaactcgtgaaatg

SEQ ID NO: 83119 - DNA, 17 bp, Arabidopsis thaliana
cgtgaacttctgccgac

SEQ ID NO: 83120 - DNA, 17 bp, Arabidopsis thaliana
cgtgaactttcaaaaag

SEQ ID NO: 83121 - DNA, 17 bp, Arabidopsis thaliana
cgtgaactttcgaaatg

SEQ ID NO: 83122 - DNA, 17 bp, Arabidopsis thaliana
cgtgaagctgatgtgaa

SEQ ID NO: 83123 - DNA, 17 bp, Arabidopsis thaliana
cgtgaaggcgattaccc

SEQ ID NO: 83124 - DNA, 17 bp, Arabidopsis thaliana
cgtgaatcggaggcggg

SEQ ID NO: 83125 - DNA, 17 bp, Arabidopsis thaliana
cgtgaatgtgagcaccg

SEQ ID NO: 83126 - DNA, 17 bp, Arabidopsis thaliana
cgtgaatgtgggcaccg

SEQ ID NO: 83127 - DNA, 17 bp, Arabidopsis thaliana
cgtgaattcagagttct

SEQ ID NO: 83128 - DNA, 17 bp, Arabidopsis thaliana
cgtgaattcgttcccgg

SEQ ID NO: 83129 - DNA, 17 bp, Arabidopsis thaliana
cgtgaatttttgaaatg

SEQ ID NO: 83130 - DNA, 17 bp, Arabidopsis thaliana
cgtgacaacatacggtt

SEQ ID NO: 83131 - DNA, 17 bp, Arabidopsis thaliana
cgtgacaatcatttttt

SEQ ID NO: 83132 - DNA, 17 bp, Arabidopsis thaliana
cgtgacaatggaggatc

SEQ ID NO: 83133 - DNA, 17 bp, Arabidopsis thaliana
cgtgacacaatttggat

SEQ ID NO: 83134 - DNA, 17 bp, Arabidopsis thaliana
cgtgacacgatcctatg

SEQ ID NO: 83135 - DNA, 17 bp, Arabidopsis thaliana
cgtgacagatcgagact

SEQ ID NO: 83136 - DNA, 17 bp, Arabidopsis thaliana
cgtgacagcatacggtt

SEQ ID NO: 83137 - DNA, 17 bp, Arabidopsis thaliana
cgtgacagtttgcttgg

SEQ ID NO: 83138 - DNA, 17 bp, Arabidopsis thaliana
cgtgacatcacaccatt

SEQ ID NO: 83139 - DNA, 17 bp, Arabidopsis thaliana
cgtgacatgacgcagtt

SEQ ID NO: 83140 - DNA, 17 bp, Arabidopsis thaliana
cgtgacatgatctcggt

SEQ ID NO: 83141 - DNA, 17 bp, Arabidopsis thaliana
cgtgaccaaaagttgtt

SEQ ID NO: 83142 - DNA, 17 bp, Arabidopsis thaliana
cgtgaccccacttgccc

SEQ ID NO: 83143 - DNA, 17 bp, Arabidopsis thaliana
cgtgacgacaactgatt

SEQ ID NO: 83144 - DNA, 17 bp, Arabidopsis thaliana
cgtgacgacaattccga

SEQ ID NO: 83145 - DNA, 17 bp, Arabidopsis thaliana
cgtgacgactagaacct

SEQ ID NO: 83146 - DNA, 17 bp, Arabidopsis thaliana
cgtgacgactgagttat

SEQ ID NO: 83147 - DNA, 17 bp, Arabidopsis thaliana
cgtgacgcagaattcaa

SEQ ID NO: 83148 - DNA, 17 bp, Arabidopsis thaliana
cgtgacgtagagttcgg

SEQ ID NO: 83149 - DNA, 17 bp, Arabidopsis thaliana
cgtgactaatacggaca

SEQ ID NO: 83150 - DNA, 17 bp, Arabidopsis thaliana
cgtgactgagcgtgttc

SEQ ID NO: 83151 - DNA, 17 bp, Arabidopsis thaliana
cgtgacttcatcgaccg

SEQ ID NO: 83152 - DNA, 17 bp, Arabidopsis thaliana
cgtgacttcccgacgta

SEQ ID NO: 83153 - DNA, 17 bp, Arabidopsis thaliana
cgtgacttgggctatat

SEQ ID NO: 83154 - DNA, 17 bp, Arabidopsis thaliana
cgtgactttgtctctgc

SEQ ID NO: 83155 - DNA, 17 bp, Arabidopsis thaliana
cgtgacttttaccatcg

SEQ ID NO: 83156 - DNA, 17 bp, Arabidopsis thaliana
cgtgacttttagattag

SEQ ID NO: 83157 - DNA, 17 bp, Arabidopsis thaliana
cgtgagaaagttagttt

SEQ ID NO: 83158 - DNA, 17 bp, Arabidopsis thaliana
cgtgagaatctaccgaa

SEQ ID NO: 83159 - DNA, 17 bp, Arabidopsis thaliana
cgtgagacacgtttttt

SEQ ID NO: 83160 - DNA, 17 bp, Arabidopsis thaliana
cgtgagacaggttagtt

SEQ ID NO: 83161 - DNA, 17 bp, Arabidopsis thaliana
cgtgagacagttcggtc

SEQ ID NO: 83162 - DNA, 17 bp, Arabidopsis thaliana
cgtgagacagtttgccg

SEQ ID NO: 83163 - DNA, 17 bp, Arabidopsis thaliana
cgtgagacgggggacta

SEQ ID NO: 83164 - DNA, 17 bp, Arabidopsis thaliana
cgtgagagacttgttgt

SEQ ID NO: 83165 - DNA, 17 bp, Arabidopsis thaliana
cgtgagagcctagggcc

SEQ ID NO: 83166 - DNA, 17 bp, Arabidopsis thaliana
cgtgagcaaagtggtat

SEQ ID NO: 83167 - DNA, 17 bp, Arabidopsis thaliana
cgtgagcacctgttctg

SEQ ID NO: 83168 - DNA, 17 bp, Arabidopsis thaliana
cgtgagcagcagttcaa

SEQ ID NO: 83169 - DNA, 17 bp, Arabidopsis thaliana
cgtgagctaagatgtga

SEQ ID NO: 83170 - DNA, 17 bp, Arabidopsis thaliana
cgtgagctcaacatggc

SEQ ID NO: 83171 - DNA, 17 bp, Arabidopsis thaliana
cgtgagctgggattaga

SEQ ID NO: 83172 - DNA, 17 bp, Arabidopsis thaliana
cgtgagctggggttaga

SEQ ID NO: 83173 - DNA, 17 bp, Arabidopsis thaliana
cgtgagctgggtttaga

SEQ ID NO: 83174 - DNA, 17 bp, Arabidopsis thaliana
cgtgagctgggtttgga

SEQ ID NO: 83175 - DNA, 17 bp, Arabidopsis thaliana
cgtgagctgtttttggc

SEQ ID NO: 83176 - DNA, 17 bp, Arabidopsis thaliana
cgtgagcttatgtttag

SEQ ID NO: 83177 - DNA, 17 bp, Arabidopsis thaliana
cgtgagctttggctagc

SEQ ID NO: 83178 - DNA, 17 bp, Arabidopsis thaliana
cgtgaggatctccaaca

SEQ ID NO: 83179 - DNA, 17 bp, Arabidopsis thaliana
cgtgaggcataaggcac

SEQ ID NO: 83180 - DNA, 17 bp, Arabidopsis thaliana
cgtgaggccaaacttag

SEQ ID NO: 83181 - DNA, 17 bp, Arabidopsis thaliana
cgtgaggccaaacttgg

SEQ ID NO: 83182 - DNA, 17 bp, Arabidopsis thaliana
cgtgaggccggccaatg

SEQ ID NO: 83183 - DNA, 17 bp, Arabidopsis thaliana
cgtgagggttcaagtcc

SEQ ID NO: 83184 - DNA, 17 bp, Arabidopsis thaliana
cgtgagtgccgtagatt

SEQ ID NO: 83185 - DNA, 17 bp, Arabidopsis thaliana
cgtgagtgcgtcactta

SEQ ID NO: 83186 - DNA, 17 bp, Arabidopsis thaliana
cgtgagttcgttcctca

SEQ ID NO: 83187 - DNA, 17 bp, Arabidopsis thaliana
cgtgataactgaaaatc

SEQ ID NO: 83188 - DNA, 17 bp, Arabidopsis thaliana
cgtgataagtgcctgct

SEQ ID NO: 83189 - DNA, 17 bp, Arabidopsis thaliana
cgtgatacaccgtgggg

SEQ ID NO: 83190 - DNA, 17 bp, Arabidopsis thaliana
cgtgatactttaggttt

SEQ ID NO: 83191 - DNA, 17 bp, Arabidopsis thaliana
cgtgatagagacgagag

SEQ ID NO: 83192 - DNA, 17 bp, Arabidopsis thaliana
cgtgatagagtaaactg

SEQ ID NO: 83193 - DNA, 17 bp, Arabidopsis thaliana
cgtgataggcggacgtt

SEQ ID NO: 83194 - DNA, 17 bp, Arabidopsis thaliana
cgtgatattggtccgtg

SEQ ID NO: 83195 - DNA, 17 bp, Arabidopsis thaliana
cgtgatcaccggttcat

SEQ ID NO: 83196 - DNA, 17 bp, Arabidopsis thaliana
cgtgatcactaatagag

SEQ ID NO: 83197 - DNA, 17 bp, Arabidopsis thaliana
cgtgatccatggttctt

SEQ ID NO: 83198 - DNA, 17 bp, Arabidopsis thaliana
cgtgatcgcatggcccc

SEQ ID NO: 83199 - DNA, 17 bp, Arabidopsis thaliana
cgtgatcgcatggcctc

SEQ ID NO: 83200 - DNA, 17 bp, Arabidopsis thaliana
cgtgatcgtagtctgca

SEQ ID NO: 83201 - DNA, 17 bp, Arabidopsis thaliana
cgtgatcgtggtccgca

SEQ ID NO: 83202 - DNA, 17 bp, Arabidopsis thaliana
cgtgatcgtggtccgta

SEQ ID NO: 83203 - DNA, 17 bp, Arabidopsis thaliana
cgtgatcgtggtctgca

SEQ ID NO: 83204 - DNA, 17 bp, Arabidopsis thaliana
cgtgatcgtggtctgga

SEQ ID NO: 83205 - DNA, 17 bp, Arabidopsis thaliana
cgtgatcgtggtttgca

SEQ ID NO: 83206 - DNA, 17 bp, Arabidopsis thaliana
cgtgatcgtgtctgcag

SEQ ID NO: 83207 - DNA, 17 bp, Arabidopsis thaliana
cgtgatctaagtaggct

SEQ ID NO: 83208 - DNA, 17 bp, Arabidopsis thaliana
cgtgatctactggtttc

SEQ ID NO: 83209 - DNA, 17 bp, Arabidopsis thaliana
cgtgatctgaaccttgg

SEQ ID NO: 83210 - DNA, 17 bp, Arabidopsis thaliana
cgtgatctgttcgtcgc

SEQ ID NO: 83211 - DNA, 17 bp, Arabidopsis thaliana
cgtgatcttgcttttcg

SEQ ID NO: 83212 - DNA, 17 bp, Arabidopsis thaliana
cgtgatcttggtctgca

SEQ ID NO: 83213 - DNA, 17 bp, Arabidopsis thaliana
cgtgatctttgctatat

SEQ ID NO: 83214 - DNA, 17 bp, Arabidopsis thaliana
cgtgatgacatttgtgg

SEQ ID NO: 83215 - DNA, 17 bp, Arabidopsis thaliana
cgtgatgcgatagttct

SEQ ID NO: 83216 - DNA, 17 bp, Arabidopsis thaliana
cgtgatggggatagatc

SEQ ID NO: 83217 - DNA, 17 bp, Arabidopsis thaliana
cgtgatggtccaagacg

SEQ ID NO: 83218 - DNA, 17 bp, Arabidopsis thaliana
cgtgatgttgaccacat

SEQ ID NO: 83219 - DNA, 17 bp, Arabidopsis thaliana
cgtgattaggttgggca

SEQ ID NO: 83220 - DNA, 17 bp, Arabidopsis thaliana
cgtgatttacggttaag

SEQ ID NO: 83221 - DNA, 17 bp, Arabidopsis thaliana
cgtgatttagaccagcg

SEQ ID NO: 83222 - DNA, 17 bp, Arabidopsis thaliana
cgtgatttagaccatcg

SEQ ID NO: 83223 - DNA, 17 bp, Arabidopsis thaliana
cgtgatttccagccgat

SEQ ID NO: 83224 - DNA, 17 bp, Arabidopsis thaliana
cgtgatttctggttggt

SEQ ID NO: 83225 - DNA, 17 bp, Arabidopsis thaliana
cgtgatttggactatat

SEQ ID NO: 83226 - DNA, 17 bp, Arabidopsis thaliana
cgtgatttgggccatat

SEQ ID NO: 83227 - DNA, 17 bp, Arabidopsis thaliana
cgtgatttgggctaggg

SEQ ID NO: 83228 - DNA, 17 bp, Arabidopsis thaliana
cgtgatttgggctatag

SEQ ID NO: 83229 - DNA, 17 bp, Arabidopsis thaliana
cgtgatttgggctatat

SEQ ID NO: 83230 - DNA, 17 bp, Arabidopsis thaliana
cgtgatttgggctatct

SEQ ID NO: 83231 - DNA, 17 bp, Arabidopsis thaliana
cgtgatttgggctgtat

SEQ ID NO: 83232 - DNA, 17 bp, Arabidopsis thaliana
cgtgatttgggctttat

SEQ ID NO: 83233 - DNA, 17 bp, Arabidopsis thaliana
cgtgatttgtgctatat

SEQ ID NO: 83234 - DNA, 17 bp, Arabidopsis thaliana
cgtgatttgtgctgtat

SEQ ID NO: 83235 - DNA, 17 bp, Arabidopsis thaliana
cgtgatttgttgcgatg

SEQ ID NO: 83236 - DNA, 17 bp, Arabidopsis thaliana
cgtgattttttccgact

SEQ ID NO: 83237 - DNA, 17 bp, Arabidopsis thaliana
cgtgcaaaccaacaatg

SEQ ID NO: 83238 - DNA, 17 bp, Arabidopsis thaliana
cgtgcaaaggtttcctc

SEQ ID NO: 83239 - DNA, 17 bp, Arabidopsis thaliana
cgtgcaagaactccctg

SEQ ID NO: 83240 - DNA, 17 bp, Arabidopsis thaliana
cgtgcaagttaccacaa

SEQ ID NO: 83241 - DNA, 17 bp, Arabidopsis thaliana
cgtgcaatccaccacct

SEQ ID NO: 83242 - DNA, 17 bp, Arabidopsis thaliana
cgtgcacaagtccacac

SEQ ID NO: 83243 - DNA, 17 bp, Arabidopsis thaliana
cgtgcaccgtcgatagg

SEQ ID NO: 83244 - DNA, 17 bp, Arabidopsis thaliana
cgtgcacgtctgcctgg

SEQ ID NO: 83245 - DNA, 17 bp, Arabidopsis thaliana
cgtgcactatttagcta

SEQ ID NO: 83246 - DNA, 17 bp, Arabidopsis thaliana
cgtgcagcttctgatag

SEQ ID NO: 83247 - DNA, 17 bp, Arabidopsis thaliana
cgtgcaggtgggttttt

SEQ ID NO: 83248 - DNA, 17 bp, Arabidopsis thaliana
cgtgcagtgctgtagct

SEQ ID NO: 83249 - DNA, 17 bp, Arabidopsis thaliana
cgtgcagtttggtcggc

SEQ ID NO: 83250 - DNA, 17 bp, Arabidopsis thaliana
cgtgcatgcgacatcga

SEQ ID NO: 83251 - DNA, 17 bp, Arabidopsis thaliana
cgtgcattggttggttg

SEQ ID NO: 83252 - DNA, 17 bp, Arabidopsis thaliana
cgtgcatttcgtgatct

SEQ ID NO: 83253 - DNA, 17 bp, Arabidopsis thaliana
cgtgcattttcgtgatt

SEQ ID NO: 83254 - DNA, 17 bp, Arabidopsis thaliana
cgtgccaaattatccgc

SEQ ID NO: 83255 - DNA, 17 bp, Arabidopsis thaliana
cgtgccaagagggaaaa

SEQ ID NO: 83256 - DNA, 17 bp, Arabidopsis thaliana
cgtgccaatttgtccgc

SEQ ID NO: 83257 - DNA, 17 bp, Arabidopsis thaliana
cgtgccaccagaatcga

SEQ ID NO: 83258 - DNA, 17 bp, Arabidopsis thaliana
cgtgccccgccgggacc

SEQ ID NO: 83259 - DNA, 17 bp, Arabidopsis thaliana
cgtgcccggaccctgcc

SEQ ID NO: 83260 - DNA, 17 bp, Arabidopsis thaliana
cgtgcccggaccctgtc

SEQ ID NO: 83261 - DNA, 17 bp, Arabidopsis thaliana
cgtgcccggcgctgtta

SEQ ID NO: 83262 - DNA, 17 bp, Arabidopsis thaliana
cgtgccctttgtcgcta

SEQ ID NO: 83263 - DNA, 17 bp, Arabidopsis thaliana
cgtgccgacgcggacga

SEQ ID NO: 83264 - DNA, 17 bp, Arabidopsis thaliana
cgtgccgacgcggatta

SEQ ID NO: 83265 - DNA, 17 bp, Arabidopsis thaliana
cgtgccgagggcacgtc

SEQ ID NO: 83266 - DNA, 17 bp, Arabidopsis thaliana
cgtgccgcaacaacgtt

SEQ ID NO: 83267 - DNA, 17 bp, Arabidopsis thaliana
cgtgccggccggggacg

SEQ ID NO: 83268 - DNA, 17 bp, Arabidopsis thaliana
cgtgccggccgggggac

SEQ ID NO: 83269 - DNA, 17 bp, Arabidopsis thaliana
cgtgcctatgacttcgt

SEQ ID NO: 83270 - DNA, 17 bp, Arabidopsis thaliana
cgtgcctcgaagttacg

SEQ ID NO: 83271 - DNA, 17 bp, Arabidopsis thaliana
cgtgcctcgaagttact

SEQ ID NO: 83272 - DNA, 17 bp, Arabidopsis thaliana
cgtgcctctctcacccc

SEQ ID NO: 83273 - DNA, 17 bp, Arabidopsis thaliana
cgtgcctgttgaagaat

SEQ ID NO: 83274 - DNA, 17 bp, Arabidopsis thaliana
cgtgcgaaagggtttac

SEQ ID NO: 83275 - DNA, 17 bp, Arabidopsis thaliana
cgtgcgaatgatcgaca

SEQ ID NO: 83276 - DNA, 17 bp, Arabidopsis thaliana
cgtgcgacctatacccg

SEQ ID NO: 83277 - DNA, 17 bp, Arabidopsis thaliana
cgtgcgactatgttctg

SEQ ID NO: 83278 - DNA, 17 bp, Arabidopsis thaliana
cgtgcgactatgttctt

SEQ ID NO: 83279 - DNA, 17 bp, Arabidopsis thaliana
cgtgcgactgtcttctg

SEQ ID NO: 83280 - DNA, 17 bp, Arabidopsis thaliana
cgtgcgactgtgttctg

SEQ ID NO: 83281 - DNA, 17 bp, Arabidopsis thaliana
cgtgcgcgttgcttccg

SEQ ID NO: 83282 - DNA, 17 bp, Arabidopsis thaliana
cgtgcgctggatgacta

SEQ ID NO: 83283 - DNA, 17 bp, Arabidopsis thaliana
cgtgcgctggattatga

SEQ ID NO: 83284 - DNA, 17 bp, Arabidopsis thaliana
cgtgcggcccagaacat

SEQ ID NO: 83285 - DNA, 17 bp, Arabidopsis thaliana
cgtgcggctgatgtggt

SEQ ID NO: 83286 - DNA, 17 bp, Arabidopsis thaliana
cgtgcgggagaagtgcg

SEQ ID NO: 83287 - DNA, 17 bp, Arabidopsis thaliana
cgtgcgggtattggcct

SEQ ID NO: 83288 - DNA, 17 bp, Arabidopsis thaliana
cgtgcggtgatctatta

SEQ ID NO: 83289 - DNA, 17 bp, Arabidopsis thaliana
cgtgcggttcaactcca

SEQ ID NO: 83290 - DNA, 17 bp, Arabidopsis thaliana
cgtgcggttcaactgca

SEQ ID NO: 83291 - DNA, 17 bp, Arabidopsis thaliana
cgtgcggttcgatcacc

SEQ ID NO: 83292 - DNA, 17 bp, Arabidopsis thaliana
cgtgcgtatgaactttt

SEQ ID NO: 83293 - DNA, 17 bp, Arabidopsis thaliana
cgtgcgtcctcagcgac

SEQ ID NO: 83294 - DNA, 17 bp, Arabidopsis thaliana
cgtgcgtctgtagtcca

SEQ ID NO: 83295 - DNA, 17 bp, Arabidopsis thaliana
cgtgcgtgctcgagaag

SEQ ID NO: 83296 - DNA, 17 bp, Arabidopsis thaliana
cgtgcgttttttagatt

SEQ ID NO: 83297 - DNA, 17 bp, Arabidopsis thaliana
cgtgctacaatggccgg

SEQ ID NO: 83298 - DNA, 17 bp, Arabidopsis thaliana
cgtgctacgccgctgtt

SEQ ID NO: 83299 - DNA, 17 bp, Arabidopsis thaliana
cgtgctacgttcaaagg

SEQ ID NO: 83300 - DNA, 17 bp, Arabidopsis thaliana
cgtgctagtaggcctgg

SEQ ID NO: 83301 - DNA, 17 bp, Arabidopsis thaliana
cgtgctattggtcagtt

SEQ ID NO: 83302 - DNA, 17 bp, Arabidopsis thaliana
cgtgctcaaagcggccc

SEQ ID NO: 83303 - DNA, 17 bp, Arabidopsis thaliana
cgtgctcactgctcttt

SEQ ID NO: 83304 - DNA, 17 bp, Arabidopsis thaliana
cgtgctccgggcgtccg

SEQ ID NO: 83305 - DNA, 17 bp, Arabidopsis thaliana
cgtgctcgagtgtctgg

SEQ ID NO: 83306 - DNA, 17 bp, Arabidopsis thaliana
cgtgctgattgttgtta

SEQ ID NO: 83307 - DNA, 17 bp, Arabidopsis thaliana
cgtgctgcaccgccggc

SEQ ID NO: 83308 - DNA, 17 bp, Arabidopsis thaliana
cgtgctgcagaccacga

SEQ ID NO: 83309 - DNA, 17 bp, Arabidopsis thaliana
cgtgctgctaagcgaag

SEQ ID NO: 83310 - DNA, 17 bp, Arabidopsis thaliana
cgtgctgctaggcgaag

SEQ ID NO: 83311 - DNA, 17 bp, Arabidopsis thaliana
cgtgctgctttctcgag

SEQ ID NO: 83312 - DNA, 17 bp, Arabidopsis thaliana
cgtgctggtttgtgctt

SEQ ID NO: 83313 - DNA, 17 bp, Arabidopsis thaliana
cgtgcttaggactttag

SEQ ID NO: 83314 - DNA, 17 bp, Arabidopsis thaliana
cgtgcttcatccgtgac

SEQ ID NO: 83315 - DNA, 17 bp, Arabidopsis thaliana
cgtgcttccgttctggc

SEQ ID NO: 83316 - DNA, 17 bp, Arabidopsis thaliana
cgtgcttcggccagaac

SEQ ID NO: 83317 - DNA, 17 bp, Arabidopsis thaliana
cgtgcttctgtcgcctc

SEQ ID NO: 83318 - DNA, 17 bp, Arabidopsis thaliana
cgtgcttgcagagagaa

SEQ ID NO: 83319 - DNA, 17 bp, Arabidopsis thaliana
cgtgcttgggcgagagt

SEQ ID NO: 83320 - DNA, 17 bp, Arabidopsis thaliana
cgtgcttgggtcgtgtt

SEQ ID NO: 83321 - DNA, 17 bp, Arabidopsis thaliana
cgtgctttctgtatgcc

SEQ ID NO: 83322 - DNA, 17 bp, Arabidopsis thaliana
cgtgctttggccgagtg

SEQ ID NO: 83323 - DNA, 17 bp, Arabidopsis thaliana
cgtgctttggtgcaact

SEQ ID NO: 83324 - DNA, 17 bp, Arabidopsis thaliana
cgtggaaagactcgttc

SEQ ID NO: 83325 - DNA, 17 bp, Arabidopsis thaliana
cgtggaaattgcgcatg

SEQ ID NO: 83326 - DNA, 17 bp, Arabidopsis thaliana
cgtggaagcctgattat

SEQ ID NO: 83327 - DNA, 17 bp, Arabidopsis thaliana
cgtggaattgacctgtt

SEQ ID NO: 83328 - DNA, 17 bp, Arabidopsis thaliana
cgtggaattgcgttttt

SEQ ID NO: 83329 - DNA, 17 bp, Arabidopsis thaliana
cgtggacagtcgggggc

SEQ ID NO: 83330 - DNA, 17 bp, Arabidopsis thaliana
cgtggacatcgcagcgt

SEQ ID NO: 83331 - DNA, 17 bp, Arabidopsis thaliana
cgtggacatgtagatca

SEQ ID NO: 83332 - DNA, 17 bp, Arabidopsis thaliana
cgtggacatgtggacca

SEQ ID NO: 83333 - DNA, 17 bp, Arabidopsis thaliana
cgtggacatttagacca

SEQ ID NO: 83334 - DNA, 17 bp, Arabidopsis thaliana
cgtggaccaaaatgtgg

SEQ ID NO: 83335 - DNA, 17 bp, Arabidopsis thaliana
cgtggaccaaccactgg

SEQ ID NO: 83336 - DNA, 17 bp, Arabidopsis thaliana
cgtggaccatctgtttc

SEQ ID NO: 83337 - DNA, 17 bp, Arabidopsis thaliana
cgtggaccgacccgccc

SEQ ID NO: 83338 - DNA, 17 bp, Arabidopsis thaliana
cgtggaccgacgcggat

SEQ ID NO: 83339 - DNA, 17 bp, Arabidopsis thaliana
cgtggaccgacgcggct

SEQ ID NO: 83340 - DNA, 17 bp, Arabidopsis thaliana
cgtggaccgacgcgggt

SEQ ID NO: 83341 - DNA, 17 bp, Arabidopsis thaliana
cgtggacgggtaattga

SEQ ID NO: 83342 - DNA, 17 bp, Arabidopsis thaliana
cgtggacgtgccgaagt

SEQ ID NO: 83343 - DNA, 17 bp, Arabidopsis thaliana
cgtggacgtgctggagt

SEQ ID NO: 83344 - DNA, 17 bp, Arabidopsis thaliana
cgtggactattgtgggg

SEQ ID NO: 83345 - DNA, 17 bp, Arabidopsis thaliana
cgtggactccataaatc

SEQ ID NO: 83346 - DNA, 17 bp, Arabidopsis thaliana
cgtggactctgaagatg

SEQ ID NO: 83347 - DNA, 17 bp, Arabidopsis thaliana
cgtggactgcgcctttc

SEQ ID NO: 83348 - DNA, 17 bp, Arabidopsis thaliana
cgtggacttctgtaatc

SEQ ID NO: 83349 - DNA, 17 bp, Arabidopsis thaliana
cgtggacttctgtactc

SEQ ID NO: 83350 - DNA, 17 bp, Arabidopsis thaliana
cgtggagaaaccaaggt

SEQ ID NO: 83351 - DNA, 17 bp, Arabidopsis thaliana
cgtggagacctgggctc

SEQ ID NO: 83352 - DNA, 17 bp, Arabidopsis thaliana
cgtggagaccttgcttt

SEQ ID NO: 83353 - DNA, 17 bp, Arabidopsis thaliana
cgtggagaggatcaagc

SEQ ID NO: 83354 - DNA, 17 bp, Arabidopsis thaliana
cgtggagattttggcct

SEQ ID NO: 83355 - DNA, 17 bp, Arabidopsis thaliana
cgtggagcagctcggta

SEQ ID NO: 83356 - DNA, 17 bp, Arabidopsis thaliana
cgtggaggtactatcga

SEQ ID NO: 83357 - DNA, 17 bp, Arabidopsis thaliana
cgtggaggtagaaggcc

SEQ ID NO: 83358 - DNA, 17 bp, Arabidopsis thaliana
cgtggaggttcgagtcc

SEQ ID NO: 83359 - DNA, 17 bp, Arabidopsis thaliana
cgtggagtcgcgtctct

SEQ ID NO: 83360 - DNA, 17 bp, Arabidopsis thaliana
cgtggagtgccatttgg

SEQ ID NO: 83361 - DNA, 17 bp, Arabidopsis thaliana
cgtggagttgggactta

SEQ ID NO: 83362 - DNA, 17 bp, Arabidopsis thaliana
cgtggataggcctacca

SEQ ID NO: 83363 - DNA, 17 bp, Arabidopsis thaliana
cgtggatatccgattga

SEQ ID NO: 83364 - DNA, 17 bp, Arabidopsis thaliana
cgtggatcaaaaggact

SEQ ID NO: 83365 - DNA, 17 bp, Arabidopsis thaliana
cgtggatccttatgacc

SEQ ID NO: 83366 - DNA, 17 bp, Arabidopsis thaliana
cgtggatcgaacacgcg

SEQ ID NO: 83367 - DNA, 17 bp, Arabidopsis thaliana
cgtggatgactgcgtcg

SEQ ID NO: 83368 - DNA, 17 bp, Arabidopsis thaliana
cgtggatgattcacaga

SEQ ID NO: 83369 - DNA, 17 bp, Arabidopsis thaliana
cgtggatggcgatggtt

SEQ ID NO: 83370 - DNA, 17 bp, Arabidopsis thaliana
cgtggatgggtcggccg

SEQ ID NO: 83371 - DNA, 17 bp, Arabidopsis thaliana
cgtggatgtaccaaaac

SEQ ID NO: 83372 - DNA, 17 bp, Arabidopsis thaliana
cgtggatgttctgtaac

SEQ ID NO: 83373 - DNA, 17 bp, Arabidopsis thaliana
cgtggattcggaatcgg

SEQ ID NO: 83374 - DNA, 17 bp, Arabidopsis thaliana
cgtggcaacattacctc

SEQ ID NO: 83375 - DNA, 17 bp, Arabidopsis thaliana
cgtggcaactaggatga

SEQ ID NO: 83376 - DNA, 17 bp, Arabidopsis thaliana
cgtggcacgatcctata

SEQ ID NO: 83377 - DNA, 17 bp, Arabidopsis thaliana
cgtggcacgatcctatg

SEQ ID NO: 83378 - DNA, 17 bp, Arabidopsis thaliana
cgtggcagacaagcttg

SEQ ID NO: 83379 - DNA, 17 bp, Arabidopsis thaliana
cgtggcagacttcaacc

SEQ ID NO: 83380 - DNA, 17 bp, Arabidopsis thaliana
cgtggcatgatcctatg

SEQ ID NO: 83381 - DNA, 17 bp, Arabidopsis thaliana
cgtggccgctaccgacg

SEQ ID NO: 83382 - DNA, 17 bp, Arabidopsis thaliana
cgtggccggccggcggg

SEQ ID NO: 83383 - DNA, 17 bp, Arabidopsis thaliana
cgtggccgtggaagtgg

SEQ ID NO: 83384 - DNA, 17 bp, Arabidopsis thaliana
cgtggccgtgggttcga

SEQ ID NO: 83385 - DNA, 17 bp, Arabidopsis thaliana
cgtggccgtgggttcgt

SEQ ID NO: 83386 - DNA, 17 bp, Arabidopsis thaliana
cgtggcctacactctgt

SEQ ID NO: 83387 - DNA, 17 bp, Arabidopsis thaliana
cgtggcctatcgatcct

SEQ ID NO: 83388 - DNA, 17 bp, Arabidopsis thaliana
cgtggcgaattggtggt

SEQ ID NO: 83389 - DNA, 17 bp, Arabidopsis thaliana
cgtggcgagaagtcgat

SEQ ID NO: 83390 - DNA, 17 bp, Arabidopsis thaliana
cgtggcgattgggtgta

SEQ ID NO: 83391 - DNA, 17 bp, Arabidopsis thaliana
cgtggcggttgacggca

SEQ ID NO: 83392 - DNA, 17 bp, Arabidopsis thaliana
cgtggcgtactgcgaca

SEQ ID NO: 83393 - DNA, 17 bp, Arabidopsis thaliana
cgtggctctccgtatta

SEQ ID NO: 83394 - DNA, 17 bp, Arabidopsis thaliana
cgtggctgttacttact

SEQ ID NO: 83395 - DNA, 17 bp, Arabidopsis thaliana
cgtggcttcgacacgtt

SEQ ID NO: 83396 - DNA, 17 bp, Arabidopsis thaliana
cgtggcttcttctgatt

SEQ ID NO: 83397 - DNA, 17 bp, Arabidopsis thaliana
cgtggctttgtatagga

SEQ ID NO: 83398 - DNA, 17 bp, Arabidopsis thaliana
cgtgggaactatggccg

SEQ ID NO: 83399 - DNA, 17 bp, Arabidopsis thaliana
cgtgggagtcgactcag

SEQ ID NO: 83400 - DNA, 17 bp, Arabidopsis thaliana
cgtgggatgaccaatgg

SEQ ID NO: 83401 - DNA, 17 bp, Arabidopsis thaliana
cgtgggcctgggtgtca

SEQ ID NO: 83402 - DNA, 17 bp, Arabidopsis thaliana
cgtgggcgagagtagta

SEQ ID NO: 83403 - DNA, 17 bp, Arabidopsis thaliana
cgtgggctctccccaca

SEQ ID NO: 83404 - DNA, 17 bp, Arabidopsis thaliana
cgtgggctgggctcggg

SEQ ID NO: 83405 - DNA, 17 bp, Arabidopsis thaliana
cgtggggaaagcggcga

SEQ ID NO: 83406 - DNA, 17 bp, Arabidopsis thaliana
cgtggggaggaggttgg

SEQ ID NO: 83407 - DNA, 17 bp, Arabidopsis thaliana
cgtggggatgagagcag

SEQ ID NO: 83408 - DNA, 17 bp, Arabidopsis thaliana
cgtggggttccccacag

SEQ ID NO: 83409 - DNA, 17 bp, Arabidopsis thaliana
cgtgggtcacgcctctc

SEQ ID NO: 83410 - DNA, 17 bp, Arabidopsis thaliana
cgtgggtccatggttat

SEQ ID NO: 83411 - DNA, 17 bp, Arabidopsis thaliana
cgtgggtgaccgagtgg

SEQ ID NO: 83412 - DNA, 17 bp, Arabidopsis thaliana
cgtgggtggaagaattg

SEQ ID NO: 83413 - DNA, 17 bp, Arabidopsis thaliana
cgtgggtggttcgccgc

SEQ ID NO: 83414 - DNA, 17 bp, Arabidopsis thaliana
cgtgggttcaaatccca

SEQ ID NO: 83415 - DNA, 17 bp, Arabidopsis thaliana
cgtgggttcatcccact

SEQ ID NO: 83416 - DNA, 17 bp, Arabidopsis thaliana
cgtgggttcattcccca

SEQ ID NO: 83417 - DNA, 17 bp, Arabidopsis thaliana
cgtgggttcgatcccca

SEQ ID NO: 83418 - DNA, 17 bp, Arabidopsis thaliana
cgtgggttcgggcccca

SEQ ID NO: 83419 - DNA, 17 bp, Arabidopsis thaliana
cgtgggttcggtcccca

SEQ ID NO: 83420 - DNA, 17 bp, Arabidopsis thaliana
cgtgggttcgtgcccca

SEQ ID NO: 83421 - DNA, 17 bp, Arabidopsis thaliana
cgtgggttcgtgccccg

SEQ ID NO: 83422 - DNA, 17 bp, Arabidopsis thaliana
cgtgggttcgttcccca

SEQ ID NO: 83423 - DNA, 17 bp, Arabidopsis thaliana
cgtgggttcgttctcca

SEQ ID NO: 83424 - DNA, 17 bp, Arabidopsis thaliana
cgtgggttctccccaca

SEQ ID NO: 83425 - DNA, 17 bp, Arabidopsis thaliana
cgtgggttttccggatt

SEQ ID NO: 83426 - DNA, 17 bp, Arabidopsis thaliana
cgtggtatatctctcgc

SEQ ID NO: 83427 - DNA, 17 bp, Arabidopsis thaliana
cgtggtatgtctaacgt

SEQ ID NO: 83428 - DNA, 17 bp, Arabidopsis thaliana
cgtggtcaagagggcag

SEQ ID NO: 83429 - DNA, 17 bp, Arabidopsis thaliana
cgtggtcacaaggtctt

SEQ ID NO: 83430 - DNA, 17 bp, Arabidopsis thaliana
cgtggtcagggttcaga

SEQ ID NO: 83431 - DNA, 17 bp, Arabidopsis thaliana
cgtggtcagggttcagg

SEQ ID NO: 83432 - DNA, 17 bp, Arabidopsis thaliana
cgtggtcctctgaattg

SEQ ID NO: 83433 - DNA, 17 bp, Arabidopsis thaliana
cgtggtcgaagattgcc

SEQ ID NO: 83434 - DNA, 17 bp, Arabidopsis thaliana
cgtggtcgaagattgct

SEQ ID NO: 83435 - DNA, 17 bp, Arabidopsis thaliana
cgtggtcgtggtcgcgg

SEQ ID NO: 83436 - DNA, 17 bp, Arabidopsis thaliana
cgtggtctgcagcaagc

SEQ ID NO: 83437 - DNA, 17 bp, Arabidopsis thaliana
cgtggtctgcagcaccc

SEQ ID NO: 83438 - DNA, 17 bp, Arabidopsis thaliana
cgtggtctgcagcacgc

SEQ ID NO: 83439 - DNA, 17 bp, Arabidopsis thaliana
cgtggtctgcagcacgg

SEQ ID NO: 83440 - DNA, 17 bp, Arabidopsis thaliana
cgtggtctgtctgtttt

SEQ ID NO: 83441 - DNA, 17 bp, Arabidopsis thaliana
cgtggtgcgacagggtc

SEQ ID NO: 83442 - DNA, 17 bp, Arabidopsis thaliana
cgtggtgctgcttgtga

SEQ ID NO: 83443 - DNA, 17 bp, Arabidopsis thaliana
cgtggtggtagcggcag

SEQ ID NO: 83444 - DNA, 17 bp, Arabidopsis thaliana
cgtggtggtgcatggcc

SEQ ID NO: 83445 - DNA, 17 bp, Arabidopsis thaliana
cgtggtggttgctggta

SEQ ID NO: 83446 - DNA, 17 bp, Arabidopsis thaliana
cgtggtgtactgcgaca

SEQ ID NO: 83447 - DNA, 17 bp, Arabidopsis thaliana
cgtggtgtccggtgcgc

SEQ ID NO: 83448 - DNA, 17 bp, Arabidopsis thaliana
cgtggtgtccggtgcgt

SEQ ID NO: 83449 - DNA, 17 bp, Arabidopsis thaliana
cgtggtgtgaactcgat

SEQ ID NO: 83450 - DNA, 17 bp, Arabidopsis thaliana
cgtggtgtggtaggaga

SEQ ID NO: 83451 - DNA, 17 bp, Arabidopsis thaliana
cgtggttaagagatcta

SEQ ID NO: 83452 - DNA, 17 bp, Arabidopsis thaliana
cgtggttagtgcggact

SEQ ID NO: 83453 - DNA, 17 bp, Arabidopsis thaliana
cgtggttctcctgtagg

SEQ ID NO: 83454 - DNA, 17 bp, Arabidopsis thaliana
cgtggttctgggctggg

SEQ ID NO: 83455 - DNA, 17 bp, Arabidopsis thaliana
cgtggttgtctgtcggt

SEQ ID NO: 83456 - DNA, 17 bp, Arabidopsis thaliana
cgtggtttcgcaagggt

SEQ ID NO: 83457 - DNA, 17 bp, Arabidopsis thaliana
cgtggtttcgcgtatcg

SEQ ID NO: 83458 - DNA, 17 bp, Arabidopsis thaliana
cgtggtttttggaattt

SEQ ID NO: 83459 - DNA, 17 bp, Arabidopsis thaliana
cgtgtaaaagtcgccga

SEQ ID NO: 83460 - DNA, 17 bp, Arabidopsis thaliana
cgtgtaaattttggcat

SEQ ID NO: 83461 - DNA, 17 bp, Arabidopsis thaliana
cgtgtaacccgggcgat

SEQ ID NO: 83462 - DNA, 17 bp, Arabidopsis thaliana
cgtgtaagcttgctcat

SEQ ID NO: 83463 - DNA, 17 bp, Arabidopsis thaliana
cgtgtaatagacgagcg

SEQ ID NO: 83464 - DNA, 17 bp, Arabidopsis thaliana
cgtgtacaactatgtca

SEQ ID NO: 83465 - DNA, 17 bp, Arabidopsis thaliana
cgtgtacagatacagcg

SEQ ID NO: 83466 - DNA, 17 bp, Arabidopsis thaliana
cgtgtacctctcataat

SEQ ID NO: 83467 - DNA, 17 bp, Arabidopsis thaliana
cgtgtagaatgtcgaac

SEQ ID NO: 83468 - DNA, 17 bp, Arabidopsis thaliana
cgtgtagattttggcct

SEQ ID NO: 83469 - DNA, 17 bp, Arabidopsis thaliana
cgtgtagcggtgaaatg

SEQ ID NO: 83470 - DNA, 17 bp, Arabidopsis thaliana
cgtgtagcggtgaatta

SEQ ID NO: 83471 - DNA, 17 bp, Arabidopsis thaliana
cgtgtagctgtttgcga

SEQ ID NO: 83472 - DNA, 17 bp, Arabidopsis thaliana
cgtgtagtgagattggg

SEQ ID NO: 83473 - DNA, 17 bp, Arabidopsis thaliana
cgtgtagtggaagtgtt

SEQ ID NO: 83474 - DNA, 17 bp, Arabidopsis thaliana
cgtgtatagcacgggcc

SEQ ID NO: 83475 - DNA, 17 bp, Arabidopsis thaliana
cgtgtatcagacggtga

SEQ ID NO: 83476 - DNA, 17 bp, Arabidopsis thaliana
cgtgtatggactggacc

SEQ ID NO: 83477 - DNA, 17 bp, Arabidopsis thaliana
cgtgtcaagaagccttg

SEQ ID NO: 83478 - DNA, 17 bp, Arabidopsis thaliana
cgtgtcaaggcctatcg

SEQ ID NO: 83479 - DNA, 17 bp, Arabidopsis thaliana
cgtgtcactctctgggg

SEQ ID NO: 83480 - DNA, 17 bp, Arabidopsis thaliana
cgtgtccacgcggagcc

SEQ ID NO: 83481 - DNA, 17 bp, Arabidopsis thaliana
cgtgtcccaccgggctt

SEQ ID NO: 83482 - DNA, 17 bp, Arabidopsis thaliana
cgtgtcccaccgggtgt

SEQ ID NO: 83483 - DNA, 17 bp, Arabidopsis thaliana
cgtgtcccaccgtggtc

SEQ ID NO: 83484 - DNA, 17 bp, Arabidopsis thaliana
cgtgtcccactgggtgt

SEQ ID NO: 83485 - DNA, 17 bp, Arabidopsis thaliana
cgtgtcccggcgacgga

SEQ ID NO: 83486 - DNA, 17 bp, Arabidopsis thaliana
cgtgtccggcggaatcc

SEQ ID NO: 83487 - DNA, 17 bp, Arabidopsis thaliana
cgtgtcgagtacagtgt

SEQ ID NO: 83488 - DNA, 17 bp, Arabidopsis thaliana
cgtgtcggcggctttgt

SEQ ID NO: 83489 - DNA, 17 bp, Arabidopsis thaliana
cgtgtcggctgctttgt

SEQ ID NO: 83490 - DNA, 17 bp, Arabidopsis thaliana
cgtgtcgtcggtagcgg

SEQ ID NO: 83491 - DNA, 17 bp, Arabidopsis thaliana
cgtgtcgttggctaagt

SEQ ID NO: 83492 - DNA, 17 bp, Arabidopsis thaliana
cgtgtcgtttgccagtt

SEQ ID NO: 83493 - DNA, 17 bp, Arabidopsis thaliana
cgtgtctaagcaaatgg

SEQ ID NO: 83494 - DNA, 17 bp, Arabidopsis thaliana
cgtgtctacatgattca

SEQ ID NO: 83495 - DNA, 17 bp, Arabidopsis thaliana
cgtgtctacgcttgact

SEQ ID NO: 83496 - DNA, 17 bp, Arabidopsis thaliana
cgtgtctagccgccgga

SEQ ID NO: 83497 - DNA, 17 bp, Arabidopsis thaliana
cgtgtctcactgcggtt

SEQ ID NO: 83498 - DNA, 17 bp, Arabidopsis thaliana
cgtgtctcagcccaaaa

SEQ ID NO: 83499 - DNA, 17 bp, Arabidopsis thaliana
cgtgtctcagcccataa

SEQ ID NO: 83500 - DNA, 17 bp, Arabidopsis thaliana
cgtgtctgcagcacgcg

SEQ ID NO: 83501 - DNA, 17 bp, Arabidopsis thaliana
cgtgtctgcagcacggc

SEQ ID NO: 83502 - DNA, 17 bp, Arabidopsis thaliana
cgtgtctgcctgggtgt

SEQ ID NO: 83503 - DNA, 17 bp, Arabidopsis thaliana
cgtgtctgcttctaatt

SEQ ID NO: 83504 - DNA, 17 bp, Arabidopsis thaliana
cgtgtctgtaatccacg

SEQ ID NO: 83505 - DNA, 17 bp, Arabidopsis thaliana
cgtgtcttactcgtacc

SEQ ID NO: 83506 - DNA, 17 bp, Arabidopsis thaliana
cgtgtcttgtgatctcc

SEQ ID NO: 83507 - DNA, 17 bp, Arabidopsis thaliana
cgtgtgaaacggttccg

SEQ ID NO: 83508 - DNA, 17 bp, Arabidopsis thaliana
cgtgtgaaagacggata

SEQ ID NO: 83509 - DNA, 17 bp, Arabidopsis thaliana
cgtgtgaacgacctgtg

SEQ ID NO: 83510 - DNA, 17 bp, Arabidopsis thaliana
cgtgtgaactttttgct

SEQ ID NO: 83511 - DNA, 17 bp, Arabidopsis thaliana
cgtgtgaattttgtgct

SEQ ID NO: 83512 - DNA, 17 bp, Arabidopsis thaliana
cgtgtgacatcgacact

SEQ ID NO: 83513 - DNA, 17 bp, Arabidopsis thaliana
cgtgtgacggtctttag

SEQ ID NO: 83514 - DNA, 17 bp, Arabidopsis thaliana
cgtgtgaggagaactaa

SEQ ID NO: 83515 - DNA, 17 bp, Arabidopsis thaliana
cgtgtgatggccgagtt

SEQ ID NO: 83516 - DNA, 17 bp, Arabidopsis thaliana
cgtgtgcaggccaaaag

SEQ ID NO: 83517 - DNA, 17 bp, Arabidopsis thaliana
cgtgtgcattggtcggc

SEQ ID NO: 83518 - DNA, 17 bp, Arabidopsis thaliana
cgtgtgccccacggtgg

SEQ ID NO: 83519 - DNA, 17 bp, Arabidopsis thaliana
cgtgtgcctctgatgtt

SEQ ID NO: 83520 - DNA, 17 bp, Arabidopsis thaliana
cgtgtgccttgatgttc

SEQ ID NO: 83521 - DNA, 17 bp, Arabidopsis thaliana
cgtgtgcggacatcatc

SEQ ID NO: 83522 - DNA, 17 bp, Arabidopsis thaliana
cgtgtgctttgatctga

SEQ ID NO: 83523 - DNA, 17 bp, Arabidopsis thaliana
cgtgtggacttgtgcac

SEQ ID NO: 83524 - DNA, 17 bp, Arabidopsis thaliana
cgtgtggagcgatttgt

SEQ ID NO: 83525 - DNA, 17 bp, Arabidopsis thaliana
cgtgtggattttggcat

SEQ ID NO: 83526 - DNA, 17 bp, Arabidopsis thaliana
cgtgtggattttggcct

SEQ ID NO: 83527 - DNA, 17 bp, Arabidopsis thaliana
cgtgtgtagtcgctcaa

SEQ ID NO: 83528 - DNA, 17 bp, Arabidopsis thaliana
cgtgtgtgaagatagcg

SEQ ID NO: 83529 - DNA, 17 bp, Arabidopsis thaliana
cgtgtgtgttaagcgaa

SEQ ID NO: 83530 - DNA, 17 bp, Arabidopsis thaliana
cgtgtgttcctatcgat

SEQ ID NO: 83531 - DNA, 17 bp, Arabidopsis thaliana
cgtgtgtttgatgtcgt

SEQ ID NO: 83532 - DNA, 17 bp, Arabidopsis thaliana
cgtgttaagtcgagctc

SEQ ID NO: 83533 - DNA, 17 bp, Arabidopsis thaliana
cgtgttaccggtccgat

SEQ ID NO: 83534 - DNA, 17 bp, Arabidopsis thaliana
cgtgttacgagtcggat

SEQ ID NO: 83535 - DNA, 17 bp, Arabidopsis thaliana
cgtgttatgactttagt

SEQ ID NO: 83536 - DNA, 17 bp, Arabidopsis thaliana
cgtgttatgagacgtta

SEQ ID NO: 83537 - DNA, 17 bp, Arabidopsis thaliana
cgtgttattgtgattcg

SEQ ID NO: 83538 - DNA, 17 bp, Arabidopsis thaliana
cgtgttcaaaacttgcg

SEQ ID NO: 83539 - DNA, 17 bp, Arabidopsis thaliana
cgtgttcacttaaccgg

SEQ ID NO: 83540 - DNA, 17 bp, Arabidopsis thaliana
cgtgttcgaattctgat

SEQ ID NO: 83541 - DNA, 17 bp, Arabidopsis thaliana
cgtgttcgacaagcaac

SEQ ID NO: 83542 - DNA, 17 bp, Arabidopsis thaliana
cgtgttcgacgtggcac

SEQ ID NO: 83543 - DNA, 17 bp, Arabidopsis thaliana
cgtgttcgatccacgct

SEQ ID NO: 83544 - DNA, 17 bp, Arabidopsis thaliana
cgtgttcgattcacgtc

SEQ ID NO: 83545 - DNA, 17 bp, Arabidopsis thaliana
cgtgttcggatcgcggc

SEQ ID NO: 83546 - DNA, 17 bp, Arabidopsis thaliana
cgtgttcggtccacgct

SEQ ID NO: 83547 - DNA, 17 bp, Arabidopsis thaliana
cgtgttcgttccacgct

SEQ ID NO: 83548 - DNA, 17 bp, Arabidopsis thaliana
cgtgttcgtttcacgcc

SEQ ID NO: 83549 - DNA, 17 bp, Arabidopsis thaliana
cgtgttcgtttcacgtc

SEQ ID NO: 83550 - DNA, 17 bp, Arabidopsis thaliana
cgtgttcgtttcccggc

SEQ ID NO: 83551 - DNA, 17 bp, Arabidopsis thaliana
cgtgttgactgctgaaa

SEQ ID NO: 83552 - DNA, 17 bp, Arabidopsis thaliana
cgtgttgatgactaggc

SEQ ID NO: 83553 - DNA, 17 bp, Arabidopsis thaliana
cgtgttgccattgatga

SEQ ID NO: 83554 - DNA, 17 bp, Arabidopsis thaliana
cgtgttgcctaagttca

SEQ ID NO: 83555 - DNA, 17 bp, Arabidopsis thaliana
cgtgttgcttgacttct

SEQ ID NO: 83556 - DNA, 17 bp, Arabidopsis thaliana
cgtgttggtaatcttca

SEQ ID NO: 83557 - DNA, 17 bp, Arabidopsis thaliana
cgtgttggtccaccgga

SEQ ID NO: 83558 - DNA, 17 bp, Arabidopsis thaliana
cgtgtttactgtacccc

SEQ ID NO: 83559 - DNA, 17 bp, Arabidopsis thaliana
cgtgtttactgtaccgc

SEQ ID NO: 83560 - DNA, 17 bp, Arabidopsis thaliana
cgtgtttagaggatgaa

SEQ ID NO: 83561 - DNA, 17 bp, Arabidopsis thaliana
cgtgtttatctaaggtc

SEQ ID NO: 83562 - DNA, 17 bp, Arabidopsis thaliana
cgtgttttaagcaccta

SEQ ID NO: 83563 - DNA, 17 bp, Arabidopsis thaliana
cgtgttttctatgcggc

SEQ ID NO: 83564 - DNA, 17 bp, Arabidopsis thaliana
cgtgttttctttgcggc

SEQ ID NO: 83565 - DNA, 17 bp, Arabidopsis thaliana
cgtgttttggcgggaaa

SEQ ID NO: 83566 - DNA, 17 bp, Arabidopsis thaliana
cgtgtttttgcggtttt

SEQ ID NO: 83567 - DNA, 17 bp, Arabidopsis thaliana
cgtgttttttccgccaa

SEQ ID NO: 83568 - DNA, 17 bp, Arabidopsis thaliana
cgttaacagaccgataa

SEQ ID NO: 83569 - DNA, 17 bp, Arabidopsis thaliana
cgttaagtcaactgacg

SEQ ID NO: 83570 - DNA, 17 bp, Arabidopsis thaliana
cgttaagttgtgttatc

SEQ ID NO: 83571 - DNA, 17 bp, Arabidopsis thaliana
cgttaatttccgcttgt

SEQ ID NO: 83572 - DNA, 17 bp, Arabidopsis thaliana
cgttaatttttacattg

SEQ ID NO: 83573 - DNA, 17 bp, Arabidopsis thaliana
cgttaatttttattgac

SEQ ID NO: 83574 - DNA, 17 bp, Arabidopsis thaliana
cgttacaaacaaagccc

SEQ ID NO: 83575 - DNA, 17 bp, Arabidopsis thaliana
cgttacaacttttttta

SEQ ID NO: 83576 - DNA, 17 bp, Arabidopsis thaliana
cgttacaagcctttcgc

SEQ ID NO: 83577 - DNA, 17 bp, Arabidopsis thaliana
cgttacacactcgacct

SEQ ID NO: 83578 - DNA, 17 bp, Arabidopsis thaliana
cgttacacactcgacgt

SEQ ID NO: 83579 - DNA, 17 bp, Arabidopsis thaliana
cgttacacggcggaacg

SEQ ID NO: 83580 - DNA, 17 bp, Arabidopsis thaliana
cgttacagctgtcgtgg

SEQ ID NO: 83581 - DNA, 17 bp, Arabidopsis thaliana
cgttacagtaaacgcgg

SEQ ID NO: 83582 - DNA, 17 bp, Arabidopsis thaliana
cgttacctgccagccgg

SEQ ID NO: 83583 - DNA, 17 bp, Arabidopsis thaliana
cgttacgagtttatcta

SEQ ID NO: 83584 - DNA, 17 bp, Arabidopsis thaliana
cgttacgctcctggtct

SEQ ID NO: 83585 - DNA, 17 bp, Arabidopsis thaliana
cgttacgggatgttgaa

SEQ ID NO: 83586 - DNA, 17 bp, Arabidopsis thaliana
cgttacggtttgctaat

SEQ ID NO: 83587 - DNA, 17 bp, Arabidopsis thaliana
cgttactagactttgca

SEQ ID NO: 83588 - DNA, 17 bp, Arabidopsis thaliana
cgttactctgttttccg

SEQ ID NO: 83589 - DNA, 17 bp, Arabidopsis thaliana
cgttagactgttgtaag

SEQ ID NO: 83590 - DNA, 17 bp, Arabidopsis thaliana
cgttagacttgtcatgt

SEQ ID NO: 83591 - DNA, 17 bp, Arabidopsis thaliana
cgttagcagagacggta

SEQ ID NO: 83592 - DNA, 17 bp, Arabidopsis thaliana
cgttagcggttgttagc

SEQ ID NO: 83593 - DNA, 17 bp, Arabidopsis thaliana
cgttagctcaattggta

SEQ ID NO: 83594 - DNA, 17 bp, Arabidopsis thaliana
cgttaggcactagtcca

SEQ ID NO: 83595 - DNA, 17 bp, Arabidopsis thaliana
cgttagtttgcgaagaa

SEQ ID NO: 83596 - DNA, 17 bp, Arabidopsis thaliana
cgttataatcttggcca

SEQ ID NO: 83597 - DNA, 17 bp, Arabidopsis thaliana
cgttatccatcctgagt

SEQ ID NO: 83598 - DNA, 17 bp, Arabidopsis thaliana
cgttatccggaatgatt

SEQ ID NO: 83599 - DNA, 17 bp, Arabidopsis thaliana
cgttatcgtccagcggt

SEQ ID NO: 83600 - DNA, 17 bp, Arabidopsis thaliana
cgttatcttaatgatcc

SEQ ID NO: 83601 - DNA, 17 bp, Arabidopsis thaliana
cgttatctttctcaaaa

SEQ ID NO: 83602 - DNA, 17 bp, Arabidopsis thaliana
cgttatgcttacaagat

SEQ ID NO: 83603 - DNA, 17 bp, Arabidopsis thaliana
cgttatggggattttgg

SEQ ID NO: 83604 - DNA, 17 bp, Arabidopsis thaliana
cgttatgtactttcggt

SEQ ID NO: 83605 - DNA, 17 bp, Arabidopsis thaliana
cgttattagatctacga

SEQ ID NO: 83606 - DNA, 17 bp, Arabidopsis thaliana
cgttattcctcttccac

SEQ ID NO: 83607 - DNA, 17 bp, Arabidopsis thaliana
cgttattcgaaccgatg

SEQ ID NO: 83608 - DNA, 17 bp, Arabidopsis thaliana
cgttattgatgttttgc

SEQ ID NO: 83609 - DNA, 17 bp, Arabidopsis thaliana
cgttattgtttgtggct

SEQ ID NO: 83610 - DNA, 17 bp, Arabidopsis thaliana
cgttatttggatgtgag

SEQ ID NO: 83611 - DNA, 17 bp, Arabidopsis thaliana
cgttatttgtgcaccgc

SEQ ID NO: 83612 - DNA, 17 bp, Arabidopsis thaliana
cgttattttgcggtttt

SEQ ID NO: 83613 - DNA, 17 bp, Arabidopsis thaliana
cgttcaaaatcagccag

SEQ ID NO: 83614 - DNA, 17 bp, Arabidopsis thaliana
cgttcaaatctttctgt

SEQ ID NO: 83615 - DNA, 17 bp, Arabidopsis thaliana
cgttcaaatggatgtct

SEQ ID NO: 83616 - DNA, 17 bp, Arabidopsis thaliana
cgttcaacgacggtccg

SEQ ID NO: 83617 - DNA, 17 bp, Arabidopsis thaliana
cgttcaactctagtgtg

SEQ ID NO: 83618 - DNA, 17 bp, Arabidopsis thaliana
cgttcaatccgctgtag

SEQ ID NO: 83619 - DNA, 17 bp, Arabidopsis thaliana
cgttcaatccgttgtag

SEQ ID NO: 83620 - DNA, 17 bp, Arabidopsis thaliana
cgttcaattgcacagcc

SEQ ID NO: 83621 - DNA, 17 bp, Arabidopsis thaliana
cgttcacaactggatac

SEQ ID NO: 83622 - DNA, 17 bp, Arabidopsis thaliana
cgttcacgcaagtctgt

SEQ ID NO: 83623 - DNA, 17 bp, Arabidopsis thaliana
cgttcacggataggatc

SEQ ID NO: 83624 - DNA, 17 bp, Arabidopsis thaliana
cgttcagatgttgacat

SEQ ID NO: 83625 - DNA, 17 bp, Arabidopsis thaliana
cgttcagatgttgatat

SEQ ID NO: 83626 - DNA, 17 bp, Arabidopsis thaliana
cgttcagcgattgtacc

SEQ ID NO: 83627 - DNA, 17 bp, Arabidopsis thaliana
cgttcagcggaagcgtc

SEQ ID NO: 83628 - DNA, 17 bp, Arabidopsis thaliana
cgttcaggtatccgttc

SEQ ID NO: 83629 - DNA, 17 bp, Arabidopsis thaliana
cgttcataagacgtgac

SEQ ID NO: 83630 - DNA, 17 bp, Arabidopsis thaliana
cgttcatagcgacgttg

SEQ ID NO: 83631 - DNA, 17 bp, Arabidopsis thaliana
cgttcatagggtgttct

SEQ ID NO: 83632 - DNA, 17 bp, Arabidopsis thaliana
cgttcatcacattgttt

SEQ ID NO: 83633 - DNA, 17 bp, Arabidopsis thaliana
cgttcatcaccaatagc

SEQ ID NO: 83634 - DNA, 17 bp, Arabidopsis thaliana
cgttcatcggaaatgct

SEQ ID NO: 83635 - DNA, 17 bp, Arabidopsis thaliana
cgttcatctagcagagg

SEQ ID NO: 83636 - DNA, 17 bp, Arabidopsis thaliana
cgttcatctagcagtgg

SEQ ID NO: 83637 - DNA, 17 bp, Arabidopsis thaliana
cgttcatctccaatcgt

SEQ ID NO: 83638 - DNA, 17 bp, Arabidopsis thaliana
cgttcatctcttcggcg

SEQ ID NO: 83639 - DNA, 17 bp, Arabidopsis thaliana
cgttcatctgactctgg

SEQ ID NO: 83640 - DNA, 17 bp, Arabidopsis thaliana
cgttcatctgactctgt

SEQ ID NO: 83641 - DNA, 17 bp, Arabidopsis thaliana
cgttcatttctcggaat

SEQ ID NO: 83642 - DNA, 17 bp, Arabidopsis thaliana
cgttcatttgactggac

SEQ ID NO: 83643 - DNA, 17 bp, Arabidopsis thaliana
cgttccaaccatgtcgg

SEQ ID NO: 83644 - DNA, 17 bp, Arabidopsis thaliana
cgttccaacttttccta

SEQ ID NO: 83645 - DNA, 17 bp, Arabidopsis thaliana
cgttccaaggcaaattt

SEQ ID NO: 83646 - DNA, 17 bp, Arabidopsis thaliana
cgttccaaggcgatcag

SEQ ID NO: 83647 - DNA, 17 bp, Arabidopsis thaliana
cgttccagggcaaattc

SEQ ID NO: 83648 - DNA, 17 bp, Arabidopsis thaliana
cgttccagtcagtgata

SEQ ID NO: 83649 - DNA, 17 bp, Arabidopsis thaliana
cgttccatcctctttca

SEQ ID NO: 83650 - DNA, 17 bp, Arabidopsis thaliana
cgttccatcgtttgcat

SEQ ID NO: 83651 - DNA, 17 bp, Arabidopsis thaliana
cgttccatgtcaatcgc

SEQ ID NO: 83652 - DNA, 17 bp, Arabidopsis thaliana
cgttcccagctggacca

SEQ ID NO: 83653 - DNA, 17 bp, Arabidopsis thaliana
cgttcccagctggccac

SEQ ID NO: 83654 - DNA, 17 bp, Arabidopsis thaliana
cgttcccagtccgtccc

SEQ ID NO: 83655 - DNA, 17 bp, Arabidopsis thaliana
cgttccccacagacggc

SEQ ID NO: 83656 - DNA, 17 bp, Arabidopsis thaliana
cgttccccagcagagtt

SEQ ID NO: 83657 - DNA, 17 bp, Arabidopsis thaliana
cgttccccccccccccc

SEQ ID NO: 83658 - DNA, 17 bp, Arabidopsis thaliana
cgttcccgggccttgta

SEQ ID NO: 83659 - DNA, 17 bp, Arabidopsis thaliana
cgttccctgtataggcc

SEQ ID NO: 83660 - DNA, 17 bp, Arabidopsis thaliana
cgttccgaccaattaca

SEQ ID NO: 83661 - DNA, 17 bp, Arabidopsis thaliana
cgttccgacgtcaaggt

SEQ ID NO: 83662 - DNA, 17 bp, Arabidopsis thaliana
cgttccgaggtatactg

SEQ ID NO: 83663 - DNA, 17 bp, Arabidopsis thaliana
cgttccgcactaactgc

SEQ ID NO: 83664 - DNA, 17 bp, Arabidopsis thaliana
cgttccgccaacccgtc

SEQ ID NO: 83665 - DNA, 17 bp, Arabidopsis thaliana
cgttccgccttagagag

SEQ ID NO: 83666 - DNA, 17 bp, Arabidopsis thaliana
cgttccggcctactagt

SEQ ID NO: 83667 - DNA, 17 bp, Arabidopsis thaliana
cgttccgtctctggcga

SEQ ID NO: 83668 - DNA, 17 bp, Arabidopsis thaliana
cgttcctaagagtctga

SEQ ID NO: 83669 - DNA, 17 bp, Arabidopsis thaliana
cgttcctaccgaggtcg

SEQ ID NO: 83670 - DNA, 17 bp, Arabidopsis thaliana
cgttcctccagtgaccg

SEQ ID NO: 83671 - DNA, 17 bp, Arabidopsis thaliana
cgttcctcgaacccaag

SEQ ID NO: 83672 - DNA, 17 bp, Arabidopsis thaliana
cgttcctgagccagccg

SEQ ID NO: 83673 - DNA, 17 bp, Arabidopsis thaliana
cgttcctgagtgacttg

SEQ ID NO: 83674 - DNA, 17 bp, Arabidopsis thaliana
cgttcctgcgtgtgggc

SEQ ID NO: 83675 - DNA, 17 bp, Arabidopsis thaliana
cgttcgaacccgggcga

SEQ ID NO: 83676 - DNA, 17 bp, Arabidopsis thaliana
cgttcgaatcctgctgt

SEQ ID NO: 83677 - DNA, 17 bp, Arabidopsis thaliana
cgttcgagggacctcat

SEQ ID NO: 83678 - DNA, 17 bp, Arabidopsis thaliana
cgttcgattccgatagc

SEQ ID NO: 83679 - DNA, 17 bp, Arabidopsis thaliana
cgttcgccaggattcta

SEQ ID NO: 83680 - DNA, 17 bp, Arabidopsis thaliana
cgttcgccctgggtccc

SEQ ID NO: 83681 - DNA, 17 bp, Arabidopsis thaliana
cgttcgcgttcttcaga

SEQ ID NO: 83682 - DNA, 17 bp, Arabidopsis thaliana
cgttcgctgacgtggca

SEQ ID NO: 83683 - DNA, 17 bp, Arabidopsis thaliana
cgttcggaccgcatgga

SEQ ID NO: 83684 - DNA, 17 bp, Arabidopsis thaliana
cgttcggaccgccttga

SEQ ID NO: 83685 - DNA, 17 bp, Arabidopsis thaliana
cgttcggatgtgttttt

SEQ ID NO: 83686 - DNA, 17 bp, Arabidopsis thaliana
cgttcggcaaaagtagg

SEQ ID NO: 83687 - DNA, 17 bp, Arabidopsis thaliana
cgttcggcggaagcgtc

SEQ ID NO: 83688 - DNA, 17 bp, Arabidopsis thaliana
cgttcggcggaagcgtt

SEQ ID NO: 83689 - DNA, 17 bp, Arabidopsis thaliana
cgttcgtagtggtctga

SEQ ID NO: 83690 - DNA, 17 bp, Arabidopsis thaliana
cgttcgtcgctttggcc

SEQ ID NO: 83691 - DNA, 17 bp, Arabidopsis thaliana
cgttcgtctcacttggg

SEQ ID NO: 83692 - DNA, 17 bp, Arabidopsis thaliana
cgttcgtctgactggta

SEQ ID NO: 83693 - DNA, 17 bp, Arabidopsis thaliana
cgttcgtctgacttggg

SEQ ID NO: 83694 - DNA, 17 bp, Arabidopsis thaliana
cgttcgtctgtctgggt

SEQ ID NO: 83695 - DNA, 17 bp, Arabidopsis thaliana
cgttcgtctgtcttggg

SEQ ID NO: 83696 - DNA, 17 bp, Arabidopsis thaliana
cgttcgtgaagttgcct

SEQ ID NO: 83697 - DNA, 17 bp, Arabidopsis thaliana
cgttcgtgccaccagaa

SEQ ID NO: 83698 - DNA, 17 bp, Arabidopsis thaliana
cgttcgtgtcccggcga

SEQ ID NO: 83699 - DNA, 17 bp, Arabidopsis thaliana
cgttcgtttcacgtcgg

SEQ ID NO: 83700 - DNA, 17 bp, Arabidopsis thaliana
cgttcgtttcccggctg

SEQ ID NO: 83701 - DNA, 17 bp, Arabidopsis thaliana
cgttcgtttccctgtcg

SEQ ID NO: 83702 - DNA, 17 bp, Arabidopsis thaliana
cgttcgtttccggcagg

SEQ ID NO: 83703 - DNA, 17 bp, Arabidopsis thaliana
cgttcgtttgcctgtcg

SEQ ID NO: 83704 - DNA, 17 bp, Arabidopsis thaliana
cgttctaacctgggccc

SEQ ID NO: 83705 - DNA, 17 bp, Arabidopsis thaliana
cgttctacggttcaggt

SEQ ID NO: 83706 - DNA, 17 bp, Arabidopsis thaliana
cgttctatggatgtggg

SEQ ID NO: 83707 - DNA, 17 bp, Arabidopsis thaliana
cgttctcaacttcaggc

SEQ ID NO: 83708 - DNA, 17 bp, Arabidopsis thaliana
cgttctcagctggacca

SEQ ID NO: 83709 - DNA, 17 bp, Arabidopsis thaliana
cgttctcatcgatggtc

SEQ ID NO: 83710 - DNA, 17 bp, Arabidopsis thaliana
cgttctcgtagcggcgg

SEQ ID NO: 83711 - DNA, 17 bp, Arabidopsis thaliana
cgttctctgaattgcgt

SEQ ID NO: 83712 - DNA, 17 bp, Arabidopsis thaliana
cgttctgatggtgcacc

SEQ ID NO: 83713 - DNA, 17 bp, Arabidopsis thaliana
cgttctgatgtgcaccg

SEQ ID NO: 83714 - DNA, 17 bp, Arabidopsis thaliana
cgttctgcagtgtactc

SEQ ID NO: 83715 - DNA, 17 bp, Arabidopsis thaliana
cgttctgccaaacccgt

SEQ ID NO: 83716 - DNA, 17 bp, Arabidopsis thaliana
cgttctgccaaactcgt

SEQ ID NO: 83717 - DNA, 17 bp, Arabidopsis thaliana
cgttctgggatctgcct

SEQ ID NO: 83718 - DNA, 17 bp, Arabidopsis thaliana
cgttctgtacttacggt

SEQ ID NO: 83719 - DNA, 17 bp, Arabidopsis thaliana
cgttctgtcaaatccgt

SEQ ID NO: 83720 - DNA, 17 bp, Arabidopsis thaliana
cgttctgtccgcttgtg

SEQ ID NO: 83721 - DNA, 17 bp, Arabidopsis thaliana
cgttctgtccggtcgag

SEQ ID NO: 83722 - DNA, 17 bp, Arabidopsis thaliana
cgttcttagttggtgga

SEQ ID NO: 83723 - DNA, 17 bp, Arabidopsis thaliana
cgttcttcaatctttag

SEQ ID NO: 83724 - DNA, 17 bp, Arabidopsis thaliana
cgttcttcagtgaattg

SEQ ID NO: 83725 - DNA, 17 bp, Arabidopsis thaliana
cgttcttcgcggtggcc

SEQ ID NO: 83726 - DNA, 17 bp, Arabidopsis thaliana
cgttcttcggatcacag

SEQ ID NO: 83727 - DNA, 17 bp, Arabidopsis thaliana
cgttcttctgatgggcc

SEQ ID NO: 83728 - DNA, 17 bp, Arabidopsis thaliana
cgttcttcttcgggatt

SEQ ID NO: 83729 - DNA, 17 bp, Arabidopsis thaliana
cgttcttctttggtgga

SEQ ID NO: 83730 - DNA, 17 bp, Arabidopsis thaliana
cgttcttgagctgcttc

SEQ ID NO: 83731 - DNA, 17 bp, Arabidopsis thaliana
cgttcttgctcatcttc

SEQ ID NO: 83732 - DNA, 17 bp, Arabidopsis thaliana
cgttcttggtagggttt

SEQ ID NO: 83733 - DNA, 17 bp, Arabidopsis thaliana
cgttctttgatagccgc

SEQ ID NO: 83734 - DNA, 17 bp, Arabidopsis thaliana
cgttctttggatacggt

SEQ ID NO: 83735 - DNA, 17 bp, Arabidopsis thaliana
cgttcttttggtttttg

SEQ ID NO: 83736 - DNA, 17 bp, Arabidopsis thaliana
cgttgaaccttgggatg

SEQ ID NO: 83737 - DNA, 17 bp, Arabidopsis thaliana
cgttgaacgaatggagt

SEQ ID NO: 83738 - DNA, 17 bp, Arabidopsis thaliana
cgttgaacgacctgtgt

SEQ ID NO: 83739 - DNA, 17 bp, Arabidopsis thaliana
cgttgaagtgttcggat

SEQ ID NO: 83740 - DNA, 17 bp, Arabidopsis thaliana
cgttgaatcttccaaga

SEQ ID NO: 83741 - DNA, 17 bp, Arabidopsis thaliana
cgttgaatgcggaagac

SEQ ID NO: 83742 - DNA, 17 bp, Arabidopsis thaliana
cgttgaatttatggaca

SEQ ID NO: 83743 - DNA, 17 bp, Arabidopsis thaliana
cgttgacagcgcaactc

SEQ ID NO: 83744 - DNA, 17 bp, Arabidopsis thaliana
cgttgacatgacgcagt

SEQ ID NO: 83745 - DNA, 17 bp, Arabidopsis thaliana
cgttgaccagttctgta

SEQ ID NO: 83746 - DNA, 17 bp, Arabidopsis thaliana
cgttgacccgaatgcac

SEQ ID NO: 83747 - DNA, 17 bp, Arabidopsis thaliana
cgttgacccgaccaaat

SEQ ID NO: 83748 - DNA, 17 bp, Arabidopsis thaliana
cgttgacgatgttgtgg

SEQ ID NO: 83749 - DNA, 17 bp, Arabidopsis thaliana
cgttgacgggaatggct

SEQ ID NO: 83750 - DNA, 17 bp, Arabidopsis thaliana
cgttgacgggggtccac

SEQ ID NO: 83751 - DNA, 17 bp, Arabidopsis thaliana
cgttgacgggggtcccc

SEQ ID NO: 83752 - DNA, 17 bp, Arabidopsis thaliana
cgttgactaagccaatt

SEQ ID NO: 83753 - DNA, 17 bp, Arabidopsis thaliana
cgttgactacgtcccta

SEQ ID NO: 83754 - DNA, 17 bp, Arabidopsis thaliana
cgttgactacgtccctg

SEQ ID NO: 83755 - DNA, 17 bp, Arabidopsis thaliana
cgttgactgatgatggg

SEQ ID NO: 83756 - DNA, 17 bp, Arabidopsis thaliana
cgttgactgattttcca

SEQ ID NO: 83757 - DNA, 17 bp, Arabidopsis thaliana
cgttgactgcgtccctg

SEQ ID NO: 83758 - DNA, 17 bp, Arabidopsis thaliana
cgttgacttaacgacgt

SEQ ID NO: 83759 - DNA, 17 bp, Arabidopsis thaliana
cgttgacttgaccattg

SEQ ID NO: 83760 - DNA, 17 bp, Arabidopsis thaliana
cgttgacttgaccattt

SEQ ID NO: 83761 - DNA, 17 bp, Arabidopsis thaliana
cgttgacttgacgattt

SEQ ID NO: 83762 - DNA, 17 bp, Arabidopsis thaliana
cgttgacttggccattt

SEQ ID NO: 83763 - DNA, 17 bp, Arabidopsis thaliana
cgttgagcggtcttgcc

SEQ ID NO: 83764 - DNA, 17 bp, Arabidopsis thaliana
cgttgagtatgacagag

SEQ ID NO: 83765 - DNA, 17 bp, Arabidopsis thaliana
cgttgatcaggccaaaa

SEQ ID NO: 83766 - DNA, 17 bp, Arabidopsis thaliana
cgttgatcagggcaaat

SEQ ID NO: 83767 - DNA, 17 bp, Arabidopsis thaliana
cgttgatgcgacaacgt

SEQ ID NO: 83768 - DNA, 17 bp, Arabidopsis thaliana
cgttgatgcgttcggaa

SEQ ID NO: 83769 - DNA, 17 bp, Arabidopsis thaliana
cgttgatggatttcagg

SEQ ID NO: 83770 - DNA, 17 bp, Arabidopsis thaliana
cgttgatgtcctttgtg

SEQ ID NO: 83771 - DNA, 17 bp, Arabidopsis thaliana
cgttgatgtttgtgctg

SEQ ID NO: 83772 - DNA, 17 bp, Arabidopsis thaliana
cgttgattcgatgtgaa

SEQ ID NO: 83773 - DNA, 17 bp, Arabidopsis thaliana
cgttgattcggccaaat

SEQ ID NO: 83774 - DNA, 17 bp, Arabidopsis thaliana
cgttgattcggcctaat

SEQ ID NO: 83775 - DNA, 17 bp, Arabidopsis thaliana
cgttgatttgccatttg

SEQ ID NO: 83776 - DNA, 17 bp, Arabidopsis thaliana
cgttgcaacgtgcgaat

SEQ ID NO: 83777 - DNA, 17 bp, Arabidopsis thaliana
cgttgcaacgtgcgact

SEQ ID NO: 83778 - DNA, 17 bp, Arabidopsis thaliana
cgttgcagcatacggtt

SEQ ID NO: 83779 - DNA, 17 bp, Arabidopsis thaliana
cgttgcaggttttgatc

SEQ ID NO: 83780 - DNA, 17 bp, Arabidopsis thaliana
cgttgccactaagctat

SEQ ID NO: 83781 - DNA, 17 bp, Arabidopsis thaliana
cgttgccattaggaaca

SEQ ID NO: 83782 - DNA, 17 bp, Arabidopsis thaliana
cgttgccgagagtcgta

SEQ ID NO: 83783 - DNA, 17 bp, Arabidopsis thaliana
cgttgcgacgtaagcat

SEQ ID NO: 83784 - DNA, 17 bp, Arabidopsis thaliana
cgttgcggtaagaagtg

SEQ ID NO: 83785 - DNA, 17 bp, Arabidopsis thaliana
cgttgctatgaagtctt

SEQ ID NO: 83786 - DNA, 17 bp, Arabidopsis thaliana
cgttgctatggtgccat

SEQ ID NO: 83787 - DNA, 17 bp, Arabidopsis thaliana
cgttgctcctggtagga

SEQ ID NO: 83788 - DNA, 17 bp, Arabidopsis thaliana
cgttgctcggcgaacat

SEQ ID NO: 83789 - DNA, 17 bp, Arabidopsis thaliana
cgttgctctgatgattc

SEQ ID NO: 83790 - DNA, 17 bp, Arabidopsis thaliana
cgttgctgatgtttgat

SEQ ID NO: 83791 - DNA, 17 bp, Arabidopsis thaliana
cgttgctgcggttgctg

SEQ ID NO: 83792 - DNA, 17 bp, Arabidopsis thaliana
cgttgcttcttctcttc

SEQ ID NO: 83793 - DNA, 17 bp, Arabidopsis thaliana
cgttgctttctcttctc

SEQ ID NO: 83794 - DNA, 17 bp, Arabidopsis thaliana
cgttgctttttgatcct

SEQ ID NO: 83795 - DNA, 17 bp, Arabidopsis thaliana
cgttggaatcacggagc

SEQ ID NO: 83796 - DNA, 17 bp, Arabidopsis thaliana
cgttggaccataggtgc

SEQ ID NO: 83797 - DNA, 17 bp, Arabidopsis thaliana
cgttggaccggctctgt

SEQ ID NO: 83798 - DNA, 17 bp, Arabidopsis thaliana
cgttggaccgtttccca

SEQ ID NO: 83799 - DNA, 17 bp, Arabidopsis thaliana
cgttggactgggatagc

SEQ ID NO: 83800 - DNA, 17 bp, Arabidopsis thaliana
cgttggagagatctgaa

SEQ ID NO: 83801 - DNA, 17 bp, Arabidopsis thaliana
cgttggatctccagggt

SEQ ID NO: 83802 - DNA, 17 bp, Arabidopsis thaliana
cgttggcaagaatgtgt

SEQ ID NO: 83803 - DNA, 17 bp, Arabidopsis thaliana
cgttggcagtatgtcta

SEQ ID NO: 83804 - DNA, 17 bp, Arabidopsis thaliana
cgttggcatacatagga

SEQ ID NO: 83805 - DNA, 17 bp, Arabidopsis thaliana
cgttggccaattgctgt

SEQ ID NO: 83806 - DNA, 17 bp, Arabidopsis thaliana
cgttggcgggacgggtt

SEQ ID NO: 83807 - DNA, 17 bp, Arabidopsis thaliana
cgttggcgtatgtagat

SEQ ID NO: 83808 - DNA, 17 bp, Arabidopsis thaliana
cgttggctaagtccgtt

SEQ ID NO: 83809 - DNA, 17 bp, Arabidopsis thaliana
cgttggctaagtctgtt

SEQ ID NO: 83810 - DNA, 17 bp, Arabidopsis thaliana
cgttggctcagaacagt

SEQ ID NO: 83811 - DNA, 17 bp, Arabidopsis thaliana
cgttggctggctttggt

SEQ ID NO: 83812 - DNA, 17 bp, Arabidopsis thaliana
cgttggctgtcgacaag

SEQ ID NO: 83813 - DNA, 17 bp, Arabidopsis thaliana
cgttggctttaggtttc

SEQ ID NO: 83814 - DNA, 17 bp, Arabidopsis thaliana
cgttggctttgatgtat

SEQ ID NO: 83815 - DNA, 17 bp, Arabidopsis thaliana
cgttggctttgtaccat

SEQ ID NO: 83816 - DNA, 17 bp, Arabidopsis thaliana
cgttgggatgtgttgtg

SEQ ID NO: 83817 - DNA, 17 bp, Arabidopsis thaliana
cgttgggcttaggctgt

SEQ ID NO: 83818 - DNA, 17 bp, Arabidopsis thaliana
cgttggggaagaatcgc

SEQ ID NO: 83819 - DNA, 17 bp, Arabidopsis thaliana
cgttggggctgtcttcg

SEQ ID NO: 83820 - DNA, 17 bp, Arabidopsis thaliana
cgttgggtatggtcttt

SEQ ID NO: 83821 - DNA, 17 bp, Arabidopsis thaliana
cgttggtcgaggatttc

SEQ ID NO: 83822 - DNA, 17 bp, Arabidopsis thaliana
cgttggtcggtgttgcg

SEQ ID NO: 83823 - DNA, 17 bp, Arabidopsis thaliana
cgttggtgccggagatg

SEQ ID NO: 83824 - DNA, 17 bp, Arabidopsis thaliana
cgttggtgctcaaactt

SEQ ID NO: 83825 - DNA, 17 bp, Arabidopsis thaliana
cgttggtgcttagatct

SEQ ID NO: 83826 - DNA, 17 bp, Arabidopsis thaliana
cgttggtggagcgattt

SEQ ID NO: 83827 - DNA, 17 bp, Arabidopsis thaliana
cgttggtggtgctctta

SEQ ID NO: 83828 - DNA, 17 bp, Arabidopsis thaliana
cgttggttcacgaaagt

SEQ ID NO: 83829 - DNA, 17 bp, Arabidopsis thaliana
cgttggttgctgtcgct

SEQ ID NO: 83830 - DNA, 17 bp, Arabidopsis thaliana
cgttgtaacaccgacta

SEQ ID NO: 83831 - DNA, 17 bp, Arabidopsis thaliana
cgttgtaactgtaggcg

SEQ ID NO: 83832 - DNA, 17 bp, Arabidopsis thaliana
cgttgtacttaaaccag

SEQ ID NO: 83833 - DNA, 17 bp, Arabidopsis thaliana
cgttgtacttaaaccgg

SEQ ID NO: 83834 - DNA, 17 bp, Arabidopsis thaliana
cgttgtagcggttcacc

SEQ ID NO: 83835 - DNA, 17 bp, Arabidopsis thaliana
cgttgtagtgacggctt

SEQ ID NO: 83836 - DNA, 17 bp, Arabidopsis thaliana
cgttgtatatcttctgc

SEQ ID NO: 83837 - DNA, 17 bp, Arabidopsis thaliana
cgttgtattcttggttg

SEQ ID NO: 83838 - DNA, 17 bp, Arabidopsis thaliana
cgttgtcacacagctgc

SEQ ID NO: 83839 - DNA, 17 bp, Arabidopsis thaliana
cgttgtcactcgaaccc

SEQ ID NO: 83840 - DNA, 17 bp, Arabidopsis thaliana
cgttgtcactcgaaccg

SEQ ID NO: 83841 - DNA, 17 bp, Arabidopsis thaliana
cgttgtcatcaactcga

SEQ ID NO: 83842 - DNA, 17 bp, Arabidopsis thaliana
cgttgtcatctcttttg

SEQ ID NO: 83843 - DNA, 17 bp, Arabidopsis thaliana
cgttgtcattttaggga

SEQ ID NO: 83844 - DNA, 17 bp, Arabidopsis thaliana
cgttgtccatatggtca

SEQ ID NO: 83845 - DNA, 17 bp, Arabidopsis thaliana
cgttgtccattaaggac

SEQ ID NO: 83846 - DNA, 17 bp, Arabidopsis thaliana
cgttgtcgaagtcctga

SEQ ID NO: 83847 - DNA, 17 bp, Arabidopsis thaliana
cgttgtcgctgccgctg

SEQ ID NO: 83848 - DNA, 17 bp, Arabidopsis thaliana
cgttgtcgctggttgct

SEQ ID NO: 83849 - DNA, 17 bp, Arabidopsis thaliana
cgttgtcggtgaacttc

SEQ ID NO: 83850 - DNA, 17 bp, Arabidopsis thaliana
cgttgtcggttccacac

SEQ ID NO: 83851 - DNA, 17 bp, Arabidopsis thaliana
cgttgtcgtccagcggt

SEQ ID NO: 83852 - DNA, 17 bp, Arabidopsis thaliana
cgttgtctacgtcgtct

SEQ ID NO: 83853 - DNA, 17 bp, Arabidopsis thaliana
cgttgtctgtcggttcg

SEQ ID NO: 83854 - DNA, 17 bp, Arabidopsis thaliana
cgttgtgacaccgattc

SEQ ID NO: 83855 - DNA, 17 bp, Arabidopsis thaliana
cgttgtgataggtggtg

SEQ ID NO: 83856 - DNA, 17 bp, Arabidopsis thaliana
cgttgtgccattgttag

SEQ ID NO: 83857 - DNA, 17 bp, Arabidopsis thaliana
cgttgtgcggccatttt

SEQ ID NO: 83858 - DNA, 17 bp, Arabidopsis thaliana
cgttgtgctgctcagat

SEQ ID NO: 83859 - DNA, 17 bp, Arabidopsis thaliana
cgttgtggacaaggtga

SEQ ID NO: 83860 - DNA, 17 bp, Arabidopsis thaliana
cgttgtgtctatgagtc

SEQ ID NO: 83861 - DNA, 17 bp, Arabidopsis thaliana
cgttgttacgacaagtg

SEQ ID NO: 83862 - DNA, 17 bp, Arabidopsis thaliana
cgttgttacgtggatgg

SEQ ID NO: 83863 - DNA, 17 bp, Arabidopsis thaliana
cgttgttcatgacttat

SEQ ID NO: 83864 - DNA, 17 bp, Arabidopsis thaliana
cgttgttcggctaggtg

SEQ ID NO: 83865 - DNA, 17 bp, Arabidopsis thaliana
cgttgttctgatgggcc

SEQ ID NO: 83866 - DNA, 17 bp, Arabidopsis thaliana
cgttgttgcgcttggtg

SEQ ID NO: 83867 - DNA, 17 bp, Arabidopsis thaliana
cgttgttgcggcacgga

SEQ ID NO: 83868 - DNA, 17 bp, Arabidopsis thaliana
cgttgttgcggcacggg

SEQ ID NO: 83869 - DNA, 17 bp, Arabidopsis thaliana
cgttgtttaccgtaatg

SEQ ID NO: 83870 - DNA, 17 bp, Arabidopsis thaliana
cgttgtttaccgtaatt

SEQ ID NO: 83871 - DNA, 17 bp, Arabidopsis thaliana
cgttgtttgtaccaaat

SEQ ID NO: 83872 - DNA, 17 bp, Arabidopsis thaliana
cgttgttttgtggacgg

SEQ ID NO: 83873 - DNA, 17 bp, Arabidopsis thaliana
cgttgttttgttgatcg

SEQ ID NO: 83874 - DNA, 17 bp, Arabidopsis thaliana
cgttgttttgttgatgg

SEQ ID NO: 83875 - DNA, 17 bp, Arabidopsis thaliana
cgtttaaatccacatca

SEQ ID NO: 83876 - DNA, 17 bp, Arabidopsis thaliana
cgtttaagattaatcgt

SEQ ID NO: 83877 - DNA, 17 bp, Arabidopsis thaliana
cgtttaccgcatattct

SEQ ID NO: 83878 - DNA, 17 bp, Arabidopsis thaliana
cgtttacggttttggcg

SEQ ID NO: 83879 - DNA, 17 bp, Arabidopsis thaliana
cgtttacgtcttgtttt

SEQ ID NO: 83880 - DNA, 17 bp, Arabidopsis thaliana
cgtttaggatttgccga

SEQ ID NO: 83881 - DNA, 17 bp, Arabidopsis thaliana
cgtttatagttgctaaa

SEQ ID NO: 83882 - DNA, 17 bp, Arabidopsis thaliana
cgtttatcagctgtgca

SEQ ID NO: 83883 - DNA, 17 bp, Arabidopsis thaliana
cgtttatcgatcgaatg

SEQ ID NO: 83884 - DNA, 17 bp, Arabidopsis thaliana
cgtttatctgcctcgga

SEQ ID NO: 83885 - DNA, 17 bp, Arabidopsis thaliana
cgtttattacaagctgc

SEQ ID NO: 83886 - DNA, 17 bp, Arabidopsis thaliana
cgtttattcgtttcagg

SEQ ID NO: 83887 - DNA, 17 bp, Arabidopsis thaliana
cgtttcaaattgaagtc

SEQ ID NO: 83888 - DNA, 17 bp, Arabidopsis thaliana
cgtttcaacagccgccc

SEQ ID NO: 83889 - DNA, 17 bp, Arabidopsis thaliana
cgtttcaagatcgttgc

SEQ ID NO: 83890 - DNA, 17 bp, Arabidopsis thaliana
cgtttcacaaatggatt

SEQ ID NO: 83891 - DNA, 17 bp, Arabidopsis thaliana
cgtttcacgtcgggttc

SEQ ID NO: 83892 - DNA, 17 bp, Arabidopsis thaliana
cgtttcactcgacttcg

SEQ ID NO: 83893 - DNA, 17 bp, Arabidopsis thaliana
cgtttcaggagggatag

SEQ ID NO: 83894 - DNA, 17 bp, Arabidopsis thaliana
cgtttcaggcctcaact

SEQ ID NO: 83895 - DNA, 17 bp, Arabidopsis thaliana
cgtttcagtttgtgtca

SEQ ID NO: 83896 - DNA, 17 bp, Arabidopsis thaliana
cgtttcatctacgtagc

SEQ ID NO: 83897 - DNA, 17 bp, Arabidopsis thaliana
cgtttcatcttctcctt

SEQ ID NO: 83898 - DNA, 17 bp, Arabidopsis thaliana
cgtttcattctctggtg

SEQ ID NO: 83899 - DNA, 17 bp, Arabidopsis thaliana
cgtttccagcaggccgg

SEQ ID NO: 83900 - DNA, 17 bp, Arabidopsis thaliana
cgtttccagggtgggca

SEQ ID NO: 83901 - DNA, 17 bp, Arabidopsis thaliana
cgtttccattgtggact

SEQ ID NO: 83902 - DNA, 17 bp, Arabidopsis thaliana
cgtttccccgcacctcc

SEQ ID NO: 83903 - DNA, 17 bp, Arabidopsis thaliana
cgtttcccgcccccccc

SEQ ID NO: 83904 - DNA, 17 bp, Arabidopsis thaliana
cgtttcccggctggtac

SEQ ID NO: 83905 - DNA, 17 bp, Arabidopsis thaliana
cgtttcccggctggtcc

SEQ ID NO: 83906 - DNA, 17 bp, Arabidopsis thaliana
cgtttcccggctggtgc

SEQ ID NO: 83907 - DNA, 17 bp, Arabidopsis thaliana
cgtttcccggctggtgg

SEQ ID NO: 83908 - DNA, 17 bp, Arabidopsis thaliana
cgtttcccggctggttc

SEQ ID NO: 83909 - DNA, 17 bp, Arabidopsis thaliana
cgtttcccggctgttgc

SEQ ID NO: 83910 - DNA, 17 bp, Arabidopsis thaliana
cgtttcccggcttgcac

SEQ ID NO: 83911 - DNA, 17 bp, Arabidopsis thaliana
cgtttccctgactgtca

SEQ ID NO: 83912 - DNA, 17 bp, Arabidopsis thaliana
cgtttccctgactgtta

SEQ ID NO: 83913 - DNA, 17 bp, Arabidopsis thaliana
cgtttccctggatgtgc

SEQ ID NO: 83914 - DNA, 17 bp, Arabidopsis thaliana
cgtttcccttgtctagt

SEQ ID NO: 83915 - DNA, 17 bp, Arabidopsis thaliana
cgtttcccttgtctggt

SEQ ID NO: 83916 - DNA, 17 bp, Arabidopsis thaliana
cgtttccgcaaactccc

SEQ ID NO: 83917 - DNA, 17 bp, Arabidopsis thaliana
cgtttccgccaggtcgg

SEQ ID NO: 83918 - DNA, 17 bp, Arabidopsis thaliana
cgtttccggcagctcgg

SEQ ID NO: 83919 - DNA, 17 bp, Arabidopsis thaliana
cgtttccggcaggccgg

SEQ ID NO: 83920 - DNA, 17 bp, Arabidopsis thaliana
cgtttccggcaggtcgg

SEQ ID NO: 83921 - DNA, 17 bp, Arabidopsis thaliana
cgtttccggcgggtcgg

SEQ ID NO: 83922 - DNA, 17 bp, Arabidopsis thaliana
cgtttcctcagtttaca

SEQ ID NO: 83923 - DNA, 17 bp, Arabidopsis thaliana
cgtttcgacggaactgt

SEQ ID NO: 83924 - DNA, 17 bp, Arabidopsis thaliana
cgtttcgacggacttac

SEQ ID NO: 83925 - DNA, 17 bp, Arabidopsis thaliana
cgtttcgacggacttgg

SEQ ID NO: 83926 - DNA, 17 bp, Arabidopsis thaliana
cgtttcgatacacggaa

SEQ ID NO: 83927 - DNA, 17 bp, Arabidopsis thaliana
cgtttcgcttcttcgga

SEQ ID NO: 83928 - DNA, 17 bp, Arabidopsis thaliana
cgtttcggcctgtcgga

SEQ ID NO: 83929 - DNA, 17 bp, Arabidopsis thaliana
cgtttcggtctacggcc

SEQ ID NO: 83930 - DNA, 17 bp, Arabidopsis thaliana
cgtttcgtattgggctc

SEQ ID NO: 83931 - DNA, 17 bp, Arabidopsis thaliana
cgtttcgtcgccgcagg

SEQ ID NO: 83932 - DNA, 17 bp, Arabidopsis thaliana
cgtttcgtcgccgcggg

SEQ ID NO: 83933 - DNA, 17 bp, Arabidopsis thaliana
cgtttctacttaggttc

SEQ ID NO: 83934 - DNA, 17 bp, Arabidopsis thaliana
cgtttctacttaggttg

SEQ ID NO: 83935 - DNA, 17 bp, Arabidopsis thaliana
cgtttctcatggatgga

SEQ ID NO: 83936 - DNA, 17 bp, Arabidopsis thaliana
cgtttctcatgtgtgat

SEQ ID NO: 83937 - DNA, 17 bp, Arabidopsis thaliana
cgtttctccaagtccag

SEQ ID NO: 83938 - DNA, 17 bp, Arabidopsis thaliana
cgtttctccgcacctcc

SEQ ID NO: 83939 - DNA, 17 bp, Arabidopsis thaliana
cgtttctcggaacaccc

SEQ ID NO: 83940 - DNA, 17 bp, Arabidopsis thaliana
cgtttctcggaacgccc

SEQ ID NO: 83941 - DNA, 17 bp, Arabidopsis thaliana
cgtttctcggaatcccc

SEQ ID NO: 83942 - DNA, 17 bp, Arabidopsis thaliana
cgtttctcggaatgccc

SEQ ID NO: 83943 - DNA, 17 bp, Arabidopsis thaliana
cgtttctgagccgttgt

SEQ ID NO: 83944 - DNA, 17 bp, Arabidopsis thaliana
cgtttctgattcaccag

SEQ ID NO: 83945 - DNA, 17 bp, Arabidopsis thaliana
cgtttctgcatgttcac

SEQ ID NO: 83946 - DNA, 17 bp, Arabidopsis thaliana
cgtttctgcttgtgacg

SEQ ID NO: 83947 - DNA, 17 bp, Arabidopsis thaliana
cgtttctggccacgtgt

SEQ ID NO: 83948 - DNA, 17 bp, Arabidopsis thaliana
cgtttcttccagttggc

SEQ ID NO: 83949 - DNA, 17 bp, Arabidopsis thaliana
cgtttcttcgatctcta

SEQ ID NO: 83950 - DNA, 17 bp, Arabidopsis thaliana
cgtttcttggcctcgtc

SEQ ID NO: 83951 - DNA, 17 bp, Arabidopsis thaliana
cgtttgacttgacacgt

SEQ ID NO: 83952 - DNA, 17 bp, Arabidopsis thaliana
cgtttgacttgacactt

SEQ ID NO: 83953 - DNA, 17 bp, Arabidopsis thaliana
cgtttgacttgacatgt

SEQ ID NO: 83954 - DNA, 17 bp, Arabidopsis thaliana
cgtttgatggctgagtt

SEQ ID NO: 83955 - DNA, 17 bp, Arabidopsis thaliana
cgtttgattatttggtt

SEQ ID NO: 83956 - DNA, 17 bp, Arabidopsis thaliana
cgtttgattctgatttt

SEQ ID NO: 83957 - DNA, 17 bp, Arabidopsis thaliana
cgtttgcatgtcactgg

SEQ ID NO: 83958 - DNA, 17 bp, Arabidopsis thaliana
cgtttgcatgtcgctgg

SEQ ID NO: 83959 - DNA, 17 bp, Arabidopsis thaliana
cgtttgccattctacaa

SEQ ID NO: 83960 - DNA, 17 bp, Arabidopsis thaliana
cgtttgcccgcgcaggt

SEQ ID NO: 83961 - DNA, 17 bp, Arabidopsis thaliana
cgtttgcctgtcgctga

SEQ ID NO: 83962 - DNA, 17 bp, Arabidopsis thaliana
cgtttgcctgtcgctgg

SEQ ID NO: 83963 - DNA, 17 bp, Arabidopsis thaliana
cgtttgcgagagtttta

SEQ ID NO: 83964 - DNA, 17 bp, Arabidopsis thaliana
cgtttgcgatacggttt

SEQ ID NO: 83965 - DNA, 17 bp, Arabidopsis thaliana
cgtttgcggatggtagc

SEQ ID NO: 83966 - DNA, 17 bp, Arabidopsis thaliana
cgtttgcgggagtttta

SEQ ID NO: 83967 - DNA, 17 bp, Arabidopsis thaliana
cgtttgcgggtggtaga

SEQ ID NO: 83968 - DNA, 17 bp, Arabidopsis thaliana
cgtttgcggttgagggc

SEQ ID NO: 83969 - DNA, 17 bp, Arabidopsis thaliana
cgtttgcggttgcgggc

SEQ ID NO: 83970 - DNA, 17 bp, Arabidopsis thaliana
cgtttgcggttgtggac

SEQ ID NO: 83971 - DNA, 17 bp, Arabidopsis thaliana
cgtttgcggttgttagc

SEQ ID NO: 83972 - DNA, 17 bp, Arabidopsis thaliana
cgtttgctatctgcctg

SEQ ID NO: 83973 - DNA, 17 bp, Arabidopsis thaliana
cgtttgctcattcggga

SEQ ID NO: 83974 - DNA, 17 bp, Arabidopsis thaliana
cgtttgctcatttggga

SEQ ID NO: 83975 - DNA, 17 bp, Arabidopsis thaliana
cgtttgctgtcggataa

SEQ ID NO: 83976 - DNA, 17 bp, Arabidopsis thaliana
cgtttgcttatctctat

SEQ ID NO: 83977 - DNA, 17 bp, Arabidopsis thaliana
cgtttgcttttaaactc

SEQ ID NO: 83978 - DNA, 17 bp, Arabidopsis thaliana
cgtttggaccatcgtct

SEQ ID NO: 83979 - DNA, 17 bp, Arabidopsis thaliana
cgtttggaccgtcatct

SEQ ID NO: 83980 - DNA, 17 bp, Arabidopsis thaliana
cgtttggatctgactct

SEQ ID NO: 83981 - DNA, 17 bp, Arabidopsis thaliana
cgtttggctaagttgtc

SEQ ID NO: 83982 - DNA, 17 bp, Arabidopsis thaliana
cgtttgggacacttttg

SEQ ID NO: 83983 - DNA, 17 bp, Arabidopsis thaliana
cgtttgggatcacacgt

SEQ ID NO: 83984 - DNA, 17 bp, Arabidopsis thaliana
cgtttgggttacccatt

SEQ ID NO: 83985 - DNA, 17 bp, Arabidopsis thaliana
cgtttggtacggtgact

SEQ ID NO: 83986 - DNA, 17 bp, Arabidopsis thaliana
cgtttggttgacagaaa

SEQ ID NO: 83987 - DNA, 17 bp, Arabidopsis thaliana
cgtttggttttgttgga

SEQ ID NO: 83988 - DNA, 17 bp, Arabidopsis thaliana
cgtttgtcgtgactgtg

SEQ ID NO: 83989 - DNA, 17 bp, Arabidopsis thaliana
cgtttgtgccatcaccg

SEQ ID NO: 83990 - DNA, 17 bp, Arabidopsis thaliana
cgtttgtgccatggctt

SEQ ID NO: 83991 - DNA, 17 bp, Arabidopsis thaliana
cgtttgtggaattagac

SEQ ID NO: 83992 - DNA, 17 bp, Arabidopsis thaliana
cgtttgtgtccagatct

SEQ ID NO: 83993 - DNA, 17 bp, Arabidopsis thaliana
cgtttgttcatccaaat

SEQ ID NO: 83994 - DNA, 17 bp, Arabidopsis thaliana
cgtttgttccggttacg

SEQ ID NO: 83995 - DNA, 17 bp, Arabidopsis thaliana
cgtttgttgtgtccgac

SEQ ID NO: 83996 - DNA, 17 bp, Arabidopsis thaliana
cgtttgtttcggttacg

SEQ ID NO: 83997 - DNA, 17 bp, Arabidopsis thaliana
cgtttgttttctcaaat

SEQ ID NO: 83998 - DNA, 17 bp, Arabidopsis thaliana
cgttttaatgtgcggac

SEQ ID NO: 83999 - DNA, 17 bp, Arabidopsis thaliana
cgttttacagtgcggaa

SEQ ID NO: 84000 - DNA, 17 bp, Arabidopsis thaliana
cgttttatctctctcct

SEQ ID NO: 84001 - DNA, 17 bp, Arabidopsis thaliana
cgttttcaccattcgat

SEQ ID NO: 84002 - DNA, 17 bp, Arabidopsis thaliana
cgttttcaccgtgaccg

SEQ ID NO: 84003 - DNA, 17 bp, Arabidopsis thaliana
cgttttcacgccgattc

SEQ ID NO: 84004 - DNA, 17 bp, Arabidopsis thaliana
cgttttcacgctgattc

SEQ ID NO: 84005 - DNA, 17 bp, Arabidopsis thaliana
cgttttcacggcgagta

SEQ ID NO: 84006 - DNA, 17 bp, Arabidopsis thaliana
cgttttcatctccatgt

SEQ ID NO: 84007 - DNA, 17 bp, Arabidopsis thaliana
cgttttcattgttcttc

SEQ ID NO: 84008 - DNA, 17 bp, Arabidopsis thaliana
cgttttcctctccgatt

SEQ ID NO: 84009 - DNA, 17 bp, Arabidopsis thaliana
cgttttcgctcagtgac

SEQ ID NO: 84010 - DNA, 17 bp, Arabidopsis thaliana
cgttttcggtgggctgg

SEQ ID NO: 84011 - DNA, 17 bp, Arabidopsis thaliana
cgttttcgtcttgtcca

SEQ ID NO: 84012 - DNA, 17 bp, Arabidopsis thaliana
cgttttcgtgagaaacc

SEQ ID NO: 84013 - DNA, 17 bp, Arabidopsis thaliana
cgttttctctatgtgca

SEQ ID NO: 84014 - DNA, 17 bp, Arabidopsis thaliana
cgttttcttaacgggtg

SEQ ID NO: 84015 - DNA, 17 bp, Arabidopsis thaliana
cgttttcttcagtgttt

SEQ ID NO: 84016 - DNA, 17 bp, Arabidopsis thaliana
cgttttgaacccggctt

SEQ ID NO: 84017 - DNA, 17 bp, Arabidopsis thaliana
cgttttgacaattaccg

SEQ ID NO: 84018 - DNA, 17 bp, Arabidopsis thaliana
cgttttgagacttggtg

SEQ ID NO: 84019 - DNA, 17 bp, Arabidopsis thaliana
cgttttgcagttctttc

SEQ ID NO: 84020 - DNA, 17 bp, Arabidopsis thaliana
cgttttgcattccgatc

SEQ ID NO: 84021 - DNA, 17 bp, Arabidopsis thaliana
cgttttgcgacgttaac

SEQ ID NO: 84022 - DNA, 17 bp, Arabidopsis thaliana
cgttttgcgaggaactg

SEQ ID NO: 84023 - DNA, 17 bp, Arabidopsis thaliana
cgttttgcggtgcggga

SEQ ID NO: 84024 - DNA, 17 bp, Arabidopsis thaliana
cgttttgcgttacggga

SEQ ID NO: 84025 - DNA, 17 bp, Arabidopsis thaliana
cgttttgctattcatcc

SEQ ID NO: 84026 - DNA, 17 bp, Arabidopsis thaliana
cgttttggaccgttcga

SEQ ID NO: 84027 - DNA, 17 bp, Arabidopsis thaliana
cgttttggctcggattc

SEQ ID NO: 84028 - DNA, 17 bp, Arabidopsis thaliana
cgttttggtggtctgta

SEQ ID NO: 84029 - DNA, 17 bp, Arabidopsis thaliana
cgttttgtccgctgcct

SEQ ID NO: 84030 - DNA, 17 bp, Arabidopsis thaliana
cgttttgtccttttggt

SEQ ID NO: 84031 - DNA, 17 bp, Arabidopsis thaliana
cgttttgttaggaaact

SEQ ID NO: 84032 - DNA, 17 bp, Arabidopsis thaliana
cgtttttagatcgaatg

SEQ ID NO: 84033 - DNA, 17 bp, Arabidopsis thaliana
cgtttttcacgattgag

SEQ ID NO: 84034 - DNA, 17 bp, Arabidopsis thaliana
cgtttttcaggaatggt

SEQ ID NO: 84035 - DNA, 17 bp, Arabidopsis thaliana
cgtttttccaatctctc

SEQ ID NO: 84036 - DNA, 17 bp, Arabidopsis thaliana
cgtttttccgtggttgg

SEQ ID NO: 84037 - DNA, 17 bp, Arabidopsis thaliana
cgtttttccttgcggcg

SEQ ID NO: 84038 - DNA, 17 bp, Arabidopsis thaliana
cgtttttcgagttcgcg

SEQ ID NO: 84039 - DNA, 17 bp, Arabidopsis thaliana
cgtttttgcactgctct

SEQ ID NO: 84040 - DNA, 17 bp, Arabidopsis thaliana
cgtttttgcttgttgcc

SEQ ID NO: 84041 - DNA, 17 bp, Arabidopsis thaliana
cgtttttgcttgttggt

SEQ ID NO: 84042 - DNA, 17 bp, Arabidopsis thaliana
cgtttttgttatttgga

SEQ ID NO: 84043 - DNA, 17 bp, Arabidopsis thaliana
cgttttttacattcgag

SEQ ID NO: 84044 - DNA, 17 bp, Arabidopsis thaliana
ctaaaaaccgcgggcta

SEQ ID NO: 84045 - DNA, 17 bp, Arabidopsis thaliana
ctaaaaaccgcggtgac

SEQ ID NO: 84046 - DNA, 17 bp, Arabidopsis thaliana
ctaaaaagttgacaagt

SEQ ID NO: 84047 - DNA, 17 bp, Arabidopsis thaliana
ctaaaaatccgttgttc

SEQ ID NO: 84048 - DNA, 17 bp, Arabidopsis thaliana
ctaaaaatctgacaagt

SEQ ID NO: 84049 - DNA, 17 bp, Arabidopsis thaliana
ctaaaaatgggctttga

SEQ ID NO: 84050 - DNA, 17 bp, Arabidopsis thaliana
ctaaaaattgcagtcgc

SEQ ID NO: 84051 - DNA, 17 bp, Arabidopsis thaliana
ctaaaacaaatagtccc

SEQ ID NO: 84052 - DNA, 17 bp, Arabidopsis thaliana
ctaaaacgactctcagc

SEQ ID NO: 84053 - DNA, 17 bp, Arabidopsis thaliana
ctaaaacgactctcggc

SEQ ID NO: 84054 - DNA, 17 bp, Arabidopsis thaliana
ctaaaactaatggccat

SEQ ID NO: 84055 - DNA, 17 bp, Arabidopsis thaliana
ctaaaacttggttggct

SEQ ID NO: 84056 - DNA, 17 bp, Arabidopsis thaliana
ctaaaatatttcggtgc

SEQ ID NO: 84057 - DNA, 17 bp, Arabidopsis thaliana
ctaaaatatttctgggt

SEQ ID NO: 84058 - DNA, 17 bp, Arabidopsis thaliana
ctaaaatccaacgctac

SEQ ID NO: 84059 - DNA, 17 bp, Arabidopsis thaliana
ctaaaatccgctgagat

SEQ ID NO: 84060 - DNA, 17 bp, Arabidopsis thaliana
ctaaaatccgggttggc

SEQ ID NO: 84061 - DNA, 17 bp, Arabidopsis thaliana
ctaaaatcgtcaatcgg

SEQ ID NO: 84062 - DNA, 17 bp, Arabidopsis thaliana
ctaaaatctggctggac

SEQ ID NO: 84063 - DNA, 17 bp, Arabidopsis thaliana
ctaaaatcttacggata

SEQ ID NO: 84064 - DNA, 17 bp, Arabidopsis thaliana
ctaaaatcttccactca

SEQ ID NO: 84065 - DNA, 17 bp, Arabidopsis thaliana
ctaaaatgcgagtaggt

SEQ ID NO: 84066 - DNA, 17 bp, Arabidopsis thaliana
ctaaaatggatactcga

SEQ ID NO: 84067 - DNA, 17 bp, Arabidopsis thaliana
ctaaacaaggcttttga

SEQ ID NO: 84068 - DNA, 17 bp, Arabidopsis thaliana
ctaaacactacgacttc

SEQ ID NO: 84069 - DNA, 17 bp, Arabidopsis thaliana
ctaaacagtgcaacggt

SEQ ID NO: 84070 - DNA, 17 bp, Arabidopsis thaliana
ctaaaccattgggattg

SEQ ID NO: 84071 - DNA, 17 bp, Arabidopsis thaliana
ctaaacccataatttcc

SEQ ID NO: 84072 - DNA, 17 bp, Arabidopsis thaliana
ctaaaccgaaaccaact

SEQ ID NO: 84073 - DNA, 17 bp, Arabidopsis thaliana
ctaaaccgaaatcaagt

SEQ ID NO: 84074 - DNA, 17 bp, Arabidopsis thaliana
ctaaaccgaatccaact

SEQ ID NO: 84075 - DNA, 17 bp, Arabidopsis thaliana
ctaaaccgctacggatt

SEQ ID NO: 84076 - DNA, 17 bp, Arabidopsis thaliana
ctaaaccgttttccgtt

SEQ ID NO: 84077 - DNA, 17 bp, Arabidopsis thaliana
ctaaacgacgacagcag

SEQ ID NO: 84078 - DNA, 17 bp, Arabidopsis thaliana
ctaaacgacggtaagcc

SEQ ID NO: 84079 - DNA, 17 bp, Arabidopsis thaliana
ctaaacgacggtaagtc

SEQ ID NO: 84080 - DNA, 17 bp, Arabidopsis thaliana
ctaaacgtgtcacattc

SEQ ID NO: 84081 - DNA, 17 bp, Arabidopsis thaliana
ctaaacgttgaccaaca

SEQ ID NO: 84082 - DNA, 17 bp, Arabidopsis thaliana
ctaaacgttgatcagcc

SEQ ID NO: 84083 - DNA, 17 bp, Arabidopsis thaliana
ctaaactcgtcccgcca

SEQ ID NO: 84084 - DNA, 17 bp, Arabidopsis thaliana
ctaaactgaattcgtcg

SEQ ID NO: 84085 - DNA, 17 bp, Arabidopsis thaliana
ctaaactgattttgcca

SEQ ID NO: 84086 - DNA, 17 bp, Arabidopsis thaliana
ctaaactgtgaatgcgc

SEQ ID NO: 84087 - DNA, 17 bp, Arabidopsis thaliana
ctaaacttccgatgtgg

SEQ ID NO: 84088 - DNA, 17 bp, Arabidopsis thaliana
ctaaacttcgcctagtg

SEQ ID NO: 84089 - DNA, 17 bp, Arabidopsis thaliana
ctaaacttcgcgtagga

SEQ ID NO: 84090 - DNA, 17 bp, Arabidopsis thaliana
ctaaacttggaacataa

SEQ ID NO: 84091 - DNA, 17 bp, Arabidopsis thaliana
ctaaacttggaccaaag

SEQ ID NO: 84092 - DNA, 17 bp, Arabidopsis thaliana
ctaaacttggttatgct

SEQ ID NO: 84093 - DNA, 17 bp, Arabidopsis thaliana
ctaaactttcgatgtgg

SEQ ID NO: 84094 - DNA, 17 bp, Arabidopsis thaliana
ctaaagaagccaagcgg

SEQ ID NO: 84095 - DNA, 17 bp, Arabidopsis thaliana
ctaaagaatcctgatga

SEQ ID NO: 84096 - DNA, 17 bp, Arabidopsis thaliana
ctaaagactggcgattt

SEQ ID NO: 84097 - DNA, 17 bp, Arabidopsis thaliana
ctaaagacttttatggc

SEQ ID NO: 84098 - DNA, 17 bp, Arabidopsis thaliana
ctaaagagcctaagcaa

SEQ ID NO: 84099 - DNA, 17 bp, Arabidopsis thaliana
ctaaagatttcaacagt

SEQ ID NO: 84100 - DNA, 17 bp, Arabidopsis thaliana
ctaaagcaccgtttact

SEQ ID NO: 84101 - DNA, 17 bp, Arabidopsis thaliana
ctaaagcgaatctcgat

SEQ ID NO: 84102 - DNA, 17 bp, Arabidopsis thaliana
ctaaagctctgactgtg

SEQ ID NO: 84103 - DNA, 17 bp, Arabidopsis thaliana
ctaaaggcgaagaccct

SEQ ID NO: 84104 - DNA, 17 bp, Arabidopsis thaliana
ctaaagggattacgggt

SEQ ID NO: 84105 - DNA, 17 bp, Arabidopsis thaliana
ctaaagggtggtccaag

SEQ ID NO: 84106 - DNA, 17 bp, Arabidopsis thaliana
ctaaagggtggtccagg

SEQ ID NO: 84107 - DNA, 17 bp, Arabidopsis thaliana
ctaaaggttacaggtgc

SEQ ID NO: 84108 - DNA, 17 bp, Arabidopsis thaliana
ctaaagtcctaagcacg

SEQ ID NO: 84109 - DNA, 17 bp, Arabidopsis thaliana
ctaaagtgactacatcg

SEQ ID NO: 84110 - DNA, 17 bp, Arabidopsis thaliana
ctaaatacggctttcga

SEQ ID NO: 84111 - DNA, 17 bp, Arabidopsis thaliana
ctaaatactcctgggtg

SEQ ID NO: 84112 - DNA, 17 bp, Arabidopsis thaliana
ctaaatagtttctccgt

SEQ ID NO: 84113 - DNA, 17 bp, Arabidopsis thaliana
ctaaatatcattggtcg

SEQ ID NO: 84114 - DNA, 17 bp, Arabidopsis thaliana
ctaaatatttcggatgt

SEQ ID NO: 84115 - DNA, 17 bp, Arabidopsis thaliana
ctaaatcaccatggcct

SEQ ID NO: 84116 - DNA, 17 bp, Arabidopsis thaliana
ctaaatcatcgagttga

SEQ ID NO: 84117 - DNA, 17 bp, Arabidopsis thaliana
ctaaatccaggcccttg

SEQ ID NO: 84118 - DNA, 17 bp, Arabidopsis thaliana
ctaaatccgagccaagg

SEQ ID NO: 84119 - DNA, 17 bp, Arabidopsis thaliana
ctaaatccgtcaattct

SEQ ID NO: 84120 - DNA, 17 bp, Arabidopsis thaliana
ctaaatccgtcttgcca

SEQ ID NO: 84121 - DNA, 17 bp, Arabidopsis thaliana
ctaaatctattgaacat

SEQ ID NO: 84122 - DNA, 17 bp, Arabidopsis thaliana
ctaaatgcggaagtctc

SEQ ID NO: 84123 - DNA, 17 bp, Arabidopsis thaliana
ctaaatggctctctcta

SEQ ID NO: 84124 - DNA, 17 bp, Arabidopsis thaliana
ctaaattacagtttctc

SEQ ID NO: 84125 - DNA, 17 bp, Arabidopsis thaliana
ctaaattctggaataat

SEQ ID NO: 84126 - DNA, 17 bp, Arabidopsis thaliana
ctaaatttcgttgattt

SEQ ID NO: 84127 - DNA, 17 bp, Arabidopsis thaliana
ctaaatttctgtcacgg

SEQ ID NO: 84128 - DNA, 17 bp, Arabidopsis thaliana
ctaaatttggaaatttg

SEQ ID NO: 84129 - DNA, 17 bp, Arabidopsis thaliana
ctaacaaaactattgac

SEQ ID NO: 84130 - DNA, 17 bp, Arabidopsis thaliana
ctaacaaacgctgcgaa

SEQ ID NO: 84131 - DNA, 17 bp, Arabidopsis thaliana
ctaacaaatctactgac

SEQ ID NO: 84132 - DNA, 17 bp, Arabidopsis thaliana
ctaacaaatgtcgtcta

SEQ ID NO: 84133 - DNA, 17 bp, Arabidopsis thaliana
ctaacaacaatcagcac

SEQ ID NO: 84134 - DNA, 17 bp, Arabidopsis thaliana
ctaacaaccgctaccac

SEQ ID NO: 84135 - DNA, 17 bp, Arabidopsis thaliana
ctaacaagcgtcctgtt

SEQ ID NO: 84136 - DNA, 17 bp, Arabidopsis thaliana
ctaacaagcgtttgcgg

SEQ ID NO: 84137 - DNA, 17 bp, Arabidopsis thaliana
ctaacaaggaagaacgg

SEQ ID NO: 84138 - DNA, 17 bp, Arabidopsis thaliana
ctaacaaggattccctt

SEQ ID NO: 84139 - DNA, 17 bp, Arabidopsis thaliana
ctaacaatcgggtgatt

SEQ ID NO: 84140 - DNA, 17 bp, Arabidopsis thaliana
ctaacacagtttgaaat

SEQ ID NO: 84141 - DNA, 17 bp, Arabidopsis thaliana
ctaacactggtgtactc

SEQ ID NO: 84142 - DNA, 17 bp, Arabidopsis thaliana
ctaacagaccggtagac

SEQ ID NO: 84143 - DNA, 17 bp, Arabidopsis thaliana
ctaacagatgatctagc

SEQ ID NO: 84144 - DNA, 17 bp, Arabidopsis thaliana
ctaacagctttgcactg

SEQ ID NO: 84145 - DNA, 17 bp, Arabidopsis thaliana
ctaacaggagtttcgat

SEQ ID NO: 84146 - DNA, 17 bp, Arabidopsis thaliana
ctaacaggataggaagc

SEQ ID NO: 84147 - DNA, 17 bp, Arabidopsis thaliana
ctaacatggtatcagag

SEQ ID NO: 84148 - DNA, 17 bp, Arabidopsis thaliana
ctaaccaaactaaccag

SEQ ID NO: 84149 - DNA, 17 bp, Arabidopsis thaliana
ctaaccactcgatcaac

SEQ ID NO: 84150 - DNA, 17 bp, Arabidopsis thaliana
ctaaccactttgatgag

SEQ ID NO: 84151 - DNA, 17 bp, Arabidopsis thaliana
ctaaccagatcagccga

SEQ ID NO: 84152 - DNA, 17 bp, Arabidopsis thaliana
ctaacccgtctgcactt

SEQ ID NO: 84153 - DNA, 17 bp, Arabidopsis thaliana
ctaaccctggatatgtc

SEQ ID NO: 84154 - DNA, 17 bp, Arabidopsis thaliana
ctaaccgcctaacggat

SEQ ID NO: 84155 - DNA, 17 bp, Arabidopsis thaliana
ctaaccgcgcctaggca

SEQ ID NO: 84156 - DNA, 17 bp, Arabidopsis thaliana
ctaaccgctaccgcccg

SEQ ID NO: 84157 - DNA, 17 bp, Arabidopsis thaliana
ctaaccgcttccacccg

SEQ ID NO: 84158 - DNA, 17 bp, Arabidopsis thaliana
ctaaccgcttgatccgc

SEQ ID NO: 84159 - DNA, 17 bp, Arabidopsis thaliana
ctaaccggattttggat

SEQ ID NO: 84160 - DNA, 17 bp, Arabidopsis thaliana
ctaaccggattttgggt

SEQ ID NO: 84161 - DNA, 17 bp, Arabidopsis thaliana
ctaaccggtctagtctg

SEQ ID NO: 84162 - DNA, 17 bp, Arabidopsis thaliana
ctaaccgtgcctaagca

SEQ ID NO: 84163 - DNA, 17 bp, Arabidopsis thaliana
ctaaccgtttacccgtc

SEQ ID NO: 84164 - DNA, 17 bp, Arabidopsis thaliana
ctaaccgtttgtgccag

SEQ ID NO: 84165 - DNA, 17 bp, Arabidopsis thaliana
ctaacctcagaggcggt

SEQ ID NO: 84166 - DNA, 17 bp, Arabidopsis thaliana
ctaacctggtgtcgggc

SEQ ID NO: 84167 - DNA, 17 bp, Arabidopsis thaliana
ctaacctggtgtcggtc

SEQ ID NO: 84168 - DNA, 17 bp, Arabidopsis thaliana
ctaacctgtctcacgac

SEQ ID NO: 84169 - DNA, 17 bp, Arabidopsis thaliana
ctaaccttcaggttgca

SEQ ID NO: 84170 - DNA, 17 bp, Arabidopsis thaliana
ctaaccttcgtgtcttg

SEQ ID NO: 84171 - DNA, 17 bp, Arabidopsis thaliana
ctaaccttgtgtcagga

SEQ ID NO: 84172 - DNA, 17 bp, Arabidopsis thaliana
ctaacgaaaaaacggac

SEQ ID NO: 84173 - DNA, 17 bp, Arabidopsis thaliana
ctaacgaaccatcttct

SEQ ID NO: 84174 - DNA, 17 bp, Arabidopsis thaliana
ctaacgacaaagatgtg

SEQ ID NO: 84175 - DNA, 17 bp, Arabidopsis thaliana
ctaacgacacttagtca

SEQ ID NO: 84176 - DNA, 17 bp, Arabidopsis thaliana
ctaacgagactttagat

SEQ ID NO: 84177 - DNA, 17 bp, Arabidopsis thaliana
ctaacgaggaaacacta

SEQ ID NO: 84178 - DNA, 17 bp, Arabidopsis thaliana
ctaacgaggcaacaatc

SEQ ID NO: 84179 - DNA, 17 bp, Arabidopsis thaliana
ctaacgattctgctcat

SEQ ID NO: 84180 - DNA, 17 bp, Arabidopsis thaliana
ctaacgcaatgtgattt

SEQ ID NO: 84181 - DNA, 17 bp, Arabidopsis thaliana
ctaacgcctgttatcga

SEQ ID NO: 84182 - DNA, 17 bp, Arabidopsis thaliana
ctaacgcggaatacggt

SEQ ID NO: 84183 - DNA, 17 bp, Arabidopsis thaliana
ctaacgcggattacggt

SEQ ID NO: 84184 - DNA, 17 bp, Arabidopsis thaliana
ctaacgcgttaagtatc

SEQ ID NO: 84185 - DNA, 17 bp, Arabidopsis thaliana
ctaacggatgtgttaac

SEQ ID NO: 84186 - DNA, 17 bp, Arabidopsis thaliana
ctaacggcagtgtgatt

SEQ ID NO: 84187 - DNA, 17 bp, Arabidopsis thaliana
ctaacggcgtgcctcgg

SEQ ID NO: 84188 - DNA, 17 bp, Arabidopsis thaliana
ctaacgtcgcagggttt

SEQ ID NO: 84189 - DNA, 17 bp, Arabidopsis thaliana
ctaacgtcgcaggtttt

SEQ ID NO: 84190 - DNA, 17 bp, Arabidopsis thaliana
ctaacgtttgcgggcac

SEQ ID NO: 84191 - DNA, 17 bp, Arabidopsis thaliana
ctaactaaacacaagcc

SEQ ID NO: 84192 - DNA, 17 bp, Arabidopsis thaliana
ctaactaacgccgtacc

SEQ ID NO: 84193 - DNA, 17 bp, Arabidopsis thaliana
ctaactaacgccgtagc

SEQ ID NO: 84194 - DNA, 17 bp, Arabidopsis thaliana
ctaactaagtccttctt

SEQ ID NO: 84195 - DNA, 17 bp, Arabidopsis thaliana
ctaactaagtcgttcgt

SEQ ID NO: 84196 - DNA, 17 bp, Arabidopsis thaliana
ctaactacaaaagctga

SEQ ID NO: 84197 - DNA, 17 bp, Arabidopsis thaliana
ctaactactgatgactc

SEQ ID NO: 84198 - DNA, 17 bp, Arabidopsis thaliana
ctaactactgctaacat

SEQ ID NO: 84199 - DNA, 17 bp, Arabidopsis thaliana
ctaactagatttaggct

SEQ ID NO: 84200 - DNA, 17 bp, Arabidopsis thaliana
ctaactagctacgtgga

SEQ ID NO: 84201 - DNA, 17 bp, Arabidopsis thaliana
ctaactatcacaggttt

SEQ ID NO: 84202 - DNA, 17 bp, Arabidopsis thaliana
ctaactcacgtgatccc

SEQ ID NO: 84203 - DNA, 17 bp, Arabidopsis thaliana
ctaactcagaagaaaaa

SEQ ID NO: 84204 - DNA, 17 bp, Arabidopsis thaliana
ctaactcaggcgttcac

SEQ ID NO: 84205 - DNA, 17 bp, Arabidopsis thaliana
ctaactcataagattgt

SEQ ID NO: 84206 - DNA, 17 bp, Arabidopsis thaliana
ctaactcataggatcgt

SEQ ID NO: 84207 - DNA, 17 bp, Arabidopsis thaliana
ctaactcataggattgt

SEQ ID NO: 84208 - DNA, 17 bp, Arabidopsis thaliana
ctaactcatccgctaga

SEQ ID NO: 84209 - DNA, 17 bp, Arabidopsis thaliana
ctaactctgtgccagca

SEQ ID NO: 84210 - DNA, 17 bp, Arabidopsis thaliana
ctaactgaatcacttgt

SEQ ID NO: 84211 - DNA, 17 bp, Arabidopsis thaliana
ctaactgagaaacggat

SEQ ID NO: 84212 - DNA, 17 bp, Arabidopsis thaliana
ctaactgcagacggtct

SEQ ID NO: 84213 - DNA, 17 bp, Arabidopsis thaliana
ctaactgcggaccgtct

SEQ ID NO: 84214 - DNA, 17 bp, Arabidopsis thaliana
ctaactggatcacttgt

SEQ ID NO: 84215 - DNA, 17 bp, Arabidopsis thaliana
ctaactggattttggat

SEQ ID NO: 84216 - DNA, 17 bp, Arabidopsis thaliana
ctaactgtcctaaggta

SEQ ID NO: 84217 - DNA, 17 bp, Arabidopsis thaliana
ctaacttgactttgcca

SEQ ID NO: 84218 - DNA, 17 bp, Arabidopsis thaliana
ctaacttggctctgata

SEQ ID NO: 84219 - DNA, 17 bp, Arabidopsis thaliana
ctaacttgtgtcaggac

SEQ ID NO: 84220 - DNA, 17 bp, Arabidopsis thaliana
ctaacttgtttgtcgat

SEQ ID NO: 84221 - DNA, 17 bp, Arabidopsis thaliana
ctaactttatgtgccaa

SEQ ID NO: 84222 - DNA, 17 bp, Arabidopsis thaliana
ctaactttcaacatgat

SEQ ID NO: 84223 - DNA, 17 bp, Arabidopsis thaliana
ctaactttgcgaggact

SEQ ID NO: 84224 - DNA, 17 bp, Arabidopsis thaliana
ctaagaaactactgctg

SEQ ID NO: 84225 - DNA, 17 bp, Arabidopsis thaliana
ctaagaaactactggag

SEQ ID NO: 84226 - DNA, 17 bp, Arabidopsis thaliana
ctaagaaatgaaaggcc

SEQ ID NO: 84227 - DNA, 17 bp, Arabidopsis thaliana
ctaagaagcatggacgt

SEQ ID NO: 84228 - DNA, 17 bp, Arabidopsis thaliana
ctaagaatttgatgatg

SEQ ID NO: 84229 - DNA, 17 bp, Arabidopsis thaliana
ctaagaatttgattatg

SEQ ID NO: 84230 - DNA, 17 bp, Arabidopsis thaliana
ctaagacacgtgtcgtt

SEQ ID NO: 84231 - DNA, 17 bp, Arabidopsis thaliana
ctaagacagttcggtcc

SEQ ID NO: 84232 - DNA, 17 bp, Arabidopsis thaliana
ctaagacattgttgaca

SEQ ID NO: 84233 - DNA, 17 bp, Arabidopsis thaliana
ctaagaccgtagactgt

SEQ ID NO: 84234 - DNA, 17 bp, Arabidopsis thaliana
ctaagagattctttcca

SEQ ID NO: 84235 - DNA, 17 bp, Arabidopsis thaliana
ctaagagatttaccact

SEQ ID NO: 84236 - DNA, 17 bp, Arabidopsis thaliana
ctaagatccaatcaaac

SEQ ID NO: 84237 - DNA, 17 bp, Arabidopsis thaliana
ctaagatccagagcggt

SEQ ID NO: 84238 - DNA, 17 bp, Arabidopsis thaliana
ctaagatccggttgcgg

SEQ ID NO: 84239 - DNA, 17 bp, Arabidopsis thaliana
ctaagatcgggttgcgg

SEQ ID NO: 84240 - DNA, 17 bp, Arabidopsis thaliana
ctaagatgaggactcca

SEQ ID NO: 84241 - DNA, 17 bp, Arabidopsis thaliana
ctaagatgccaaaacag

SEQ ID NO: 84242 - DNA, 17 bp, Arabidopsis thaliana
ctaagatgttggtccgc

SEQ ID NO: 84243 - DNA, 17 bp, Arabidopsis thaliana
ctaagattccactacct

SEQ ID NO: 84244 - DNA, 17 bp, Arabidopsis thaliana
ctaagattccactgcct

SEQ ID NO: 84245 - DNA, 17 bp, Arabidopsis thaliana
ctaagattctcagtgat

SEQ ID NO: 84246 - DNA, 17 bp, Arabidopsis thaliana
ctaagattctgctcgtg

SEQ ID NO: 84247 - DNA, 17 bp, Arabidopsis thaliana
ctaagattttgtcggga

SEQ ID NO: 84248 - DNA, 17 bp, Arabidopsis thaliana
ctaagatttttgtgccg

SEQ ID NO: 84249 - DNA, 17 bp, Arabidopsis thaliana
ctaagcaacttggatct

SEQ ID NO: 84250 - DNA, 17 bp, Arabidopsis thaliana
ctaagcaggtgctcgat

SEQ ID NO: 84251 - DNA, 17 bp, Arabidopsis thaliana
ctaagcagtcggctact

SEQ ID NO: 84252 - DNA, 17 bp, Arabidopsis thaliana
ctaagcccaaggtatgt

SEQ ID NO: 84253 - DNA, 17 bp, Arabidopsis thaliana
ctaagccgtggcttcac

SEQ ID NO: 84254 - DNA, 17 bp, Arabidopsis thaliana
ctaagcctacggatcgg

SEQ ID NO: 84255 - DNA, 17 bp, Arabidopsis thaliana
ctaagcctacttagatc

SEQ ID NO: 84256 - DNA, 17 bp, Arabidopsis thaliana
ctaagcgccttggtttc

SEQ ID NO: 84257 - DNA, 17 bp, Arabidopsis thaliana
ctaagcgcgagattttg

SEQ ID NO: 84258 - DNA, 17 bp, Arabidopsis thaliana
ctaagcgcggtgcgatc

SEQ ID NO: 84259 - DNA, 17 bp, Arabidopsis thaliana
ctaagctcctactgagg

SEQ ID NO: 84260 - DNA, 17 bp, Arabidopsis thaliana
ctaagctgccagcatga

SEQ ID NO: 84261 - DNA, 17 bp, Arabidopsis thaliana
ctaagcttcgcctaagg

SEQ ID NO: 84262 - DNA, 17 bp, Arabidopsis thaliana
ctaagcttcgcctagga

SEQ ID NO: 84263 - DNA, 17 bp, Arabidopsis thaliana
ctaagcttcgcctaggg

SEQ ID NO: 84264 - DNA, 17 bp, Arabidopsis thaliana
ctaagcttcgcgtaaga

SEQ ID NO: 84265 - DNA, 17 bp, Arabidopsis thaliana
ctaagcttgatctttgt

SEQ ID NO: 84266 - DNA, 17 bp, Arabidopsis thaliana
ctaaggaatagacggat

SEQ ID NO: 84267 - DNA, 17 bp, Arabidopsis thaliana
ctaaggactttctttga

SEQ ID NO: 84268 - DNA, 17 bp, Arabidopsis thaliana
ctaaggagtagacggat

SEQ ID NO: 84269 - DNA, 17 bp, Arabidopsis thaliana
ctaaggccaaactcgtg

SEQ ID NO: 84270 - DNA, 17 bp, Arabidopsis thaliana
ctaaggcccctaaatga

SEQ ID NO: 84271 - DNA, 17 bp, Arabidopsis thaliana
ctaaggcccctagatga

SEQ ID NO: 84272 - DNA, 17 bp, Arabidopsis thaliana
ctaaggcgcttaaggaa

SEQ ID NO: 84273 - DNA, 17 bp, Arabidopsis thaliana
ctaaggcgtcagttgta

SEQ ID NO: 84274 - DNA, 17 bp, Arabidopsis thaliana
ctaaggcttacaagatc

SEQ ID NO: 84275 - DNA, 17 bp, Arabidopsis thaliana
ctaagggaacagaagtc

SEQ ID NO: 84276 - DNA, 17 bp, Arabidopsis thaliana
ctaagggccgagtggaa

SEQ ID NO: 84277 - DNA, 17 bp, Arabidopsis thaliana
ctaaggggacacaggtc

SEQ ID NO: 84278 - DNA, 17 bp, Arabidopsis thaliana
ctaaggggattacgggc

SEQ ID NO: 84279 - DNA, 17 bp, Arabidopsis thaliana
ctaaggggattataggt

SEQ ID NO: 84280 - DNA, 17 bp, Arabidopsis thaliana
ctaagggtgcctaaccg

SEQ ID NO: 84281 - DNA, 17 bp, Arabidopsis thaliana
ctaagggttttagtcga

SEQ ID NO: 84282 - DNA, 17 bp, Arabidopsis thaliana
ctaaggtacgcatttct

SEQ ID NO: 84283 - DNA, 17 bp, Arabidopsis thaliana
ctaaggtcatctccatt

SEQ ID NO: 84284 - DNA, 17 bp, Arabidopsis thaliana
ctaaggtgccaaaatta

SEQ ID NO: 84285 - DNA, 17 bp, Arabidopsis thaliana
ctaaggttaggattgaa

SEQ ID NO: 84286 - DNA, 17 bp, Arabidopsis thaliana
ctaaggttctacttgtg

SEQ ID NO: 84287 - DNA, 17 bp, Arabidopsis thaliana
ctaaggttgttatttgg

SEQ ID NO: 84288 - DNA, 17 bp, Arabidopsis thaliana
ctaaggtttcgttttgg

SEQ ID NO: 84289 - DNA, 17 bp, Arabidopsis thaliana
ctaaggtttgctgctcc

SEQ ID NO: 84290 - DNA, 17 bp, Arabidopsis thaliana
ctaagtaccttgttccg

SEQ ID NO: 84291 - DNA, 17 bp, Arabidopsis thaliana
ctaagtcagaatccggg

SEQ ID NO: 84292 - DNA, 17 bp, Arabidopsis thaliana
ctaagtcagctacctgc

SEQ ID NO: 84293 - DNA, 17 bp, Arabidopsis thaliana
ctaagtccacagcagtt

SEQ ID NO: 84294 - DNA, 17 bp, Arabidopsis thaliana
ctaagtccatcatatcc

SEQ ID NO: 84295 - DNA, 17 bp, Arabidopsis thaliana
ctaagtccgcagcgggt

SEQ ID NO: 84296 - DNA, 17 bp, Arabidopsis thaliana
ctaagtccgcagcggtt

SEQ ID NO: 84297 - DNA, 17 bp, Arabidopsis thaliana
ctaagtccgttcggcgg

SEQ ID NO: 84298 - DNA, 17 bp, Arabidopsis thaliana
ctaagtcgcatcctgta

SEQ ID NO: 84299 - DNA, 17 bp, Arabidopsis thaliana
ctaagtctgtagcagtt

SEQ ID NO: 84300 - DNA, 17 bp, Arabidopsis thaliana
ctaagtgtgcgggatat

SEQ ID NO: 84301 - DNA, 17 bp, Arabidopsis thaliana
ctaagtgtgcgttggat

SEQ ID NO: 84302 - DNA, 17 bp, Arabidopsis thaliana
ctaagttattcgtttgc

SEQ ID NO: 84303 - DNA, 17 bp, Arabidopsis thaliana
ctaagttcttcgtttgc

SEQ ID NO: 84304 - DNA, 17 bp, Arabidopsis thaliana
ctaagttgttcgtttgc

SEQ ID NO: 84305 - DNA, 17 bp, Arabidopsis thaliana
ctaagtttcctgacaca

SEQ ID NO: 84306 - DNA, 17 bp, Arabidopsis thaliana
ctaagtttcgcctaagg

SEQ ID NO: 84307 - DNA, 17 bp, Arabidopsis thaliana
ctaagtttcgcctagga

SEQ ID NO: 84308 - DNA, 17 bp, Arabidopsis thaliana
ctaagtttcgcctaggg

SEQ ID NO: 84309 - DNA, 17 bp, Arabidopsis thaliana
ctaagtttgccaacttc

SEQ ID NO: 84310 - DNA, 17 bp, Arabidopsis thaliana
ctaagtttgctcggccg

SEQ ID NO: 84311 - DNA, 17 bp, Arabidopsis thaliana
ctaagttttctgacaca

SEQ ID NO: 84312 - DNA, 17 bp, Arabidopsis thaliana
ctaataaaacttctgtt

SEQ ID NO: 84313 - DNA, 17 bp, Arabidopsis thaliana
ctaataaatcgcagtag

SEQ ID NO: 84314 - DNA, 17 bp, Arabidopsis thaliana
ctaatacggagagccac

SEQ ID NO: 84315 - DNA, 17 bp, Arabidopsis thaliana
ctaatactagggccgcg

SEQ ID NO: 84316 - DNA, 17 bp, Arabidopsis thaliana
ctaatacttttgactgt

SEQ ID NO: 84317 - DNA, 17 bp, Arabidopsis thaliana
ctaatagatcaccgcac

SEQ ID NO: 84318 - DNA, 17 bp, Arabidopsis thaliana
ctaatagctgctggagt

SEQ ID NO: 84319 - DNA, 17 bp, Arabidopsis thaliana
ctaatattggactattg

SEQ ID NO: 84320 - DNA, 17 bp, Arabidopsis thaliana
ctaatcaaacgattgtg

SEQ ID NO: 84321 - DNA, 17 bp, Arabidopsis thaliana
ctaatcaaagttcaaag

SEQ ID NO: 84322 - DNA, 17 bp, Arabidopsis thaliana
ctaatcagacgattgtg

SEQ ID NO: 84323 - DNA, 17 bp, Arabidopsis thaliana
ctaatcatcttgcggat

SEQ ID NO: 84324 - DNA, 17 bp, Arabidopsis thaliana
ctaatccaggactatct

SEQ ID NO: 84325 - DNA, 17 bp, Arabidopsis thaliana
ctaatccgtagcggttt

SEQ ID NO: 84326 - DNA, 17 bp, Arabidopsis thaliana
ctaatccgtcggtaatt

SEQ ID NO: 84327 - DNA, 17 bp, Arabidopsis thaliana
ctaatccgtctgctaga

SEQ ID NO: 84328 - DNA, 17 bp, Arabidopsis thaliana
ctaatcgaaccatcaag

SEQ ID NO: 84329 - DNA, 17 bp, Arabidopsis thaliana
ctaatcgaaccatctag

SEQ ID NO: 84330 - DNA, 17 bp, Arabidopsis thaliana
ctaatcgaagtttcggc

SEQ ID NO: 84331 - DNA, 17 bp, Arabidopsis thaliana
ctaatcgacacaatgtt

SEQ ID NO: 84332 - DNA, 17 bp, Arabidopsis thaliana
ctaatcgaccgctggtt

SEQ ID NO: 84333 - DNA, 17 bp, Arabidopsis thaliana
ctaatcgctgcgtaaag

SEQ ID NO: 84334 - DNA, 17 bp, Arabidopsis thaliana
ctaatcggcccgccgtc

SEQ ID NO: 84335 - DNA, 17 bp, Arabidopsis thaliana
ctaatcggctttggatg

SEQ ID NO: 84336 - DNA, 17 bp, Arabidopsis thaliana
ctaatcgggctaagtct

SEQ ID NO: 84337 - DNA, 17 bp, Arabidopsis thaliana
ctaatcggtcgagggct

SEQ ID NO: 84338 - DNA, 17 bp, Arabidopsis thaliana
ctaatcgtcttgcggat

SEQ ID NO: 84339 - DNA, 17 bp, Arabidopsis thaliana
ctaatctcagtggatcg

SEQ ID NO: 84340 - DNA, 17 bp, Arabidopsis thaliana
ctaatctcgtgcagtta

SEQ ID NO: 84341 - DNA, 17 bp, Arabidopsis thaliana
ctaatctcttttcggcg

SEQ ID NO: 84342 - DNA, 17 bp, Arabidopsis thaliana
ctaatctgactgcgtgt

SEQ ID NO: 84343 - DNA, 17 bp, Arabidopsis thaliana
ctaatctgtttgggact

SEQ ID NO: 84344 - DNA, 17 bp, Arabidopsis thaliana
ctaatcttctcggttcc

SEQ ID NO: 84345 - DNA, 17 bp, Arabidopsis thaliana
ctaatcttgatgatgct

SEQ ID NO: 84346 - DNA, 17 bp, Arabidopsis thaliana
ctaatcttgtttctgga

SEQ ID NO: 84347 - DNA, 17 bp, Arabidopsis thaliana
ctaatgactgaccttgg

SEQ ID NO: 84348 - DNA, 17 bp, Arabidopsis thaliana
ctaatgaggctgattgg

SEQ ID NO: 84349 - DNA, 17 bp, Arabidopsis thaliana
ctaatgagggtcgaaag

SEQ ID NO: 84350 - DNA, 17 bp, Arabidopsis thaliana
ctaatgattgtgaagtg

SEQ ID NO: 84351 - DNA, 17 bp, Arabidopsis thaliana
ctaatgcaccggatccc

SEQ ID NO: 84352 - DNA, 17 bp, Arabidopsis thaliana
ctaatgcaggggagttg

SEQ ID NO: 84353 - DNA, 17 bp, Arabidopsis thaliana
ctaatgccagagggaag

SEQ ID NO: 84354 - DNA, 17 bp, Arabidopsis thaliana
ctaatgccagagggtag

SEQ ID NO: 84355 - DNA, 17 bp, Arabidopsis thaliana
ctaatgccagggggtaa

SEQ ID NO: 84356 - DNA, 17 bp, Arabidopsis thaliana
ctaatgccagggggtag

SEQ ID NO: 84357 - DNA, 17 bp, Arabidopsis thaliana
ctaatgcgtctactgaa

SEQ ID NO: 84358 - DNA, 17 bp, Arabidopsis thaliana
ctaatgcgtctcaatgg

SEQ ID NO: 84359 - DNA, 17 bp, Arabidopsis thaliana
ctaatggcttgtggagt

SEQ ID NO: 84360 - DNA, 17 bp, Arabidopsis thaliana
ctaatggtgtgtcggtg

SEQ ID NO: 84361 - DNA, 17 bp, Arabidopsis thaliana
ctaatggttttaagtgc

SEQ ID NO: 84362 - DNA, 17 bp, Arabidopsis thaliana
ctaatgtcagagggtag

SEQ ID NO: 84363 - DNA, 17 bp, Arabidopsis thaliana
ctaatgtcaggggataa

SEQ ID NO: 84364 - DNA, 17 bp, Arabidopsis thaliana
ctaatgtccataggaaa

SEQ ID NO: 84365 - DNA, 17 bp, Arabidopsis thaliana
ctaatgtggagattcga

SEQ ID NO: 84366 - DNA, 17 bp, Arabidopsis thaliana
ctaatgtgtcggatgac

SEQ ID NO: 84367 - DNA, 17 bp, Arabidopsis thaliana
ctaatgttttggatttc

SEQ ID NO: 84368 - DNA, 17 bp, Arabidopsis thaliana
ctaattccggtgccgga

SEQ ID NO: 84369 - DNA, 17 bp, Arabidopsis thaliana
ctaattggccgggtcgt

SEQ ID NO: 84370 - DNA, 17 bp, Arabidopsis thaliana
ctaattggggcctatat

SEQ ID NO: 84371 - DNA, 17 bp, Arabidopsis thaliana
ctaattgtcttgcggac

SEQ ID NO: 84372 - DNA, 17 bp, Arabidopsis thaliana
ctaatttatcgagtgag

SEQ ID NO: 84373 - DNA, 17 bp, Arabidopsis thaliana
ctaatttatctgcgatt

SEQ ID NO: 84374 - DNA, 17 bp, Arabidopsis thaliana
ctaatttatctggtgct

SEQ ID NO: 84375 - DNA, 17 bp, Arabidopsis thaliana
ctaatttctgagcgtct

SEQ ID NO: 84376 - DNA, 17 bp, Arabidopsis thaliana
ctaatttgaccacttgc

SEQ ID NO: 84377 - DNA, 17 bp, Arabidopsis thaliana
ctaatttggaatcctcc

SEQ ID NO: 84378 - DNA, 17 bp, Arabidopsis thaliana
ctaatttgtctgcggtt

SEQ ID NO: 84379 - DNA, 17 bp, Arabidopsis thaliana
ctaattttcctcctgct

SEQ ID NO: 84380 - DNA, 17 bp, Arabidopsis thaliana
ctacaaaactggtttgc

SEQ ID NO: 84381 - DNA, 17 bp, Arabidopsis thaliana
ctacaaacctaattttg

SEQ ID NO: 84382 - DNA, 17 bp, Arabidopsis thaliana
ctacaaagagtattgag

SEQ ID NO: 84383 - DNA, 17 bp, Arabidopsis thaliana
ctacaaagatcagctgt

SEQ ID NO: 84384 - DNA, 17 bp, Arabidopsis thaliana
ctacaaatcaaagatgt

SEQ ID NO: 84385 - DNA, 17 bp, Arabidopsis thaliana
ctacaaattgcgccaag

SEQ ID NO: 84386 - DNA, 17 bp, Arabidopsis thaliana
ctacaacaggcggtggc

SEQ ID NO: 84387 - DNA, 17 bp, Arabidopsis thaliana
ctacaaccgctagatcc

SEQ ID NO: 84388 - DNA, 17 bp, Arabidopsis thaliana
ctacaacgagttgtgtt

SEQ ID NO: 84389 - DNA, 17 bp, Arabidopsis thaliana
ctacaacttgacacatc

SEQ ID NO: 84390 - DNA, 17 bp, Arabidopsis thaliana
ctacaagagtggcatgc

SEQ ID NO: 84391 - DNA, 17 bp, Arabidopsis thaliana
ctacaagccagtttgtt

SEQ ID NO: 84392 - DNA, 17 bp, Arabidopsis thaliana
ctacaagcgttgcagct

SEQ ID NO: 84393 - DNA, 17 bp, Arabidopsis thaliana
ctacaagctgacacgtg

SEQ ID NO: 84394 - DNA, 17 bp, Arabidopsis thaliana
ctacaagctgctgggat

SEQ ID NO: 84395 - DNA, 17 bp, Arabidopsis thaliana
ctacaaggccggtccaa

SEQ ID NO: 84396 - DNA, 17 bp, Arabidopsis thaliana
ctacaagtctttcctgt

SEQ ID NO: 84397 - DNA, 17 bp, Arabidopsis thaliana
ctacaagttaactcagg

SEQ ID NO: 84398 - DNA, 17 bp, Arabidopsis thaliana
ctacaagttgcactcgt

SEQ ID NO: 84399 - DNA, 17 bp, Arabidopsis thaliana
ctacaatctgtgtgcta

SEQ ID NO: 84400 - DNA, 17 bp, Arabidopsis thaliana
ctacaatgcgatgtgtg

SEQ ID NO: 84401 - DNA, 17 bp, Arabidopsis thaliana
ctacaatggccgggaca

SEQ ID NO: 84402 - DNA, 17 bp, Arabidopsis thaliana
ctacaatggtgctacta

SEQ ID NO: 84403 - DNA, 17 bp, Arabidopsis thaliana
ctacacaattggactgg

SEQ ID NO: 84404 - DNA, 17 bp, Arabidopsis thaliana
ctacacacttgtgcggg

SEQ ID NO: 84405 - DNA, 17 bp, Arabidopsis thaliana
ctacaccaagaggtctg

SEQ ID NO: 84406 - DNA, 17 bp, Arabidopsis thaliana
ctacaccgctgacggat

SEQ ID NO: 84407 - DNA, 17 bp, Arabidopsis thaliana
ctacaccggattccgct

SEQ ID NO: 84408 - DNA, 17 bp, Arabidopsis thaliana
ctacacctggtcactgc

SEQ ID NO: 84409 - DNA, 17 bp, Arabidopsis thaliana
ctacaccttctggagtg

SEQ ID NO: 84410 - DNA, 17 bp, Arabidopsis thaliana
ctacacgaatcagcgtc

SEQ ID NO: 84411 - DNA, 17 bp, Arabidopsis thaliana
ctacacttgactgtgat

SEQ ID NO: 84412 - DNA, 17 bp, Arabidopsis thaliana
ctacactttatgactcg

SEQ ID NO: 84413 - DNA, 17 bp, Arabidopsis thaliana
ctacactttgttcagcc

SEQ ID NO: 84414 - DNA, 17 bp, Arabidopsis thaliana
ctacagaaagtttgtac

SEQ ID NO: 84415 - DNA, 17 bp, Arabidopsis thaliana
ctacagaaattgatgaa

SEQ ID NO: 84416 - DNA, 17 bp, Arabidopsis thaliana
ctacagaaattgatgac

SEQ ID NO: 84417 - DNA, 17 bp, Arabidopsis thaliana
ctacagaagttggtgat

SEQ ID NO: 84418 - DNA, 17 bp, Arabidopsis thaliana
ctacagaatgaccgaat

SEQ ID NO: 84419 - DNA, 17 bp, Arabidopsis thaliana
ctacagactgtgaattg

SEQ ID NO: 84420 - DNA, 17 bp, Arabidopsis thaliana
ctacagattacgtccat

SEQ ID NO: 84421 - DNA, 17 bp, Arabidopsis thaliana
ctacagatttgaggtgc

SEQ ID NO: 84422 - DNA, 17 bp, Arabidopsis thaliana
ctacagatttgaggtgt

SEQ ID NO: 84423 - DNA, 17 bp, Arabidopsis thaliana
ctacagattttgtagta

SEQ ID NO: 84424 - DNA, 17 bp, Arabidopsis thaliana
ctacagcaaatgagtga

SEQ ID NO: 84425 - DNA, 17 bp, Arabidopsis thaliana
ctacagcagctgctgct

SEQ ID NO: 84426 - DNA, 17 bp, Arabidopsis thaliana
ctacagccacttctgcc

SEQ ID NO: 84427 - DNA, 17 bp, Arabidopsis thaliana
ctacagccctctgttgc

SEQ ID NO: 84428 - DNA, 17 bp, Arabidopsis thaliana
ctacagccgctgagtac

SEQ ID NO: 84429 - DNA, 17 bp, Arabidopsis thaliana
ctacagcgccggcgtcg

SEQ ID NO: 84430 - DNA, 17 bp, Arabidopsis thaliana
ctacagcggattgaacg

SEQ ID NO: 84431 - DNA, 17 bp, Arabidopsis thaliana
ctacagcggtttcaact

SEQ ID NO: 84432 - DNA, 17 bp, Arabidopsis thaliana
ctacagctggctgatgg

SEQ ID NO: 84433 - DNA, 17 bp, Arabidopsis thaliana
ctacagcttggagagct

SEQ ID NO: 84434 - DNA, 17 bp, Arabidopsis thaliana
ctacaggaacttacggg

SEQ ID NO: 84435 - DNA, 17 bp, Arabidopsis thaliana
ctacaggacaacgatac

SEQ ID NO: 84436 - DNA, 17 bp, Arabidopsis thaliana
ctacaggcaccgtgtct

SEQ ID NO: 84437 - DNA, 17 bp, Arabidopsis thaliana
ctacaggctcactgcga

SEQ ID NO: 84438 - DNA, 17 bp, Arabidopsis thaliana
ctacaggctccaagctt

SEQ ID NO: 84439 - DNA, 17 bp, Arabidopsis thaliana
ctacaggtatcgaggcc

SEQ ID NO: 84440 - DNA, 17 bp, Arabidopsis thaliana
ctacaggtcatcacggc

SEQ ID NO: 84441 - DNA, 17 bp, Arabidopsis thaliana
ctacaggtcgagtgtgg

SEQ ID NO: 84442 - DNA, 17 bp, Arabidopsis thaliana
ctacagttctagtactt

SEQ ID NO: 84443 - DNA, 17 bp, Arabidopsis thaliana
ctacagttctgtggtca

SEQ ID NO: 84444 - DNA, 17 bp, Arabidopsis thaliana
ctacagtttgtgtacaa

SEQ ID NO: 84445 - DNA, 17 bp, Arabidopsis thaliana
ctacataacatttggct

SEQ ID NO: 84446 - DNA, 17 bp, Arabidopsis thaliana
ctacatacgattggcgg

SEQ ID NO: 84447 - DNA, 17 bp, Arabidopsis thaliana
ctacatactgtttagtg

SEQ ID NO: 84448 - DNA, 17 bp, Arabidopsis thaliana
ctacatacttctccggc

SEQ ID NO: 84449 - DNA, 17 bp, Arabidopsis thaliana
ctacatacttgcgtgga

SEQ ID NO: 84450 - DNA, 17 bp, Arabidopsis thaliana
ctacatagcattgagcc

SEQ ID NO: 84451 - DNA, 17 bp, Arabidopsis thaliana
ctacatagcgggtggga

SEQ ID NO: 84452 - DNA, 17 bp, Arabidopsis thaliana
ctacatagcgggtgggg

SEQ ID NO: 84453 - DNA, 17 bp, Arabidopsis thaliana
ctacatagctggaggga

SEQ ID NO: 84454 - DNA, 17 bp, Arabidopsis thaliana
ctacatagctggtggga

SEQ ID NO: 84455 - DNA, 17 bp, Arabidopsis thaliana
ctacatcagcgtctgca

SEQ ID NO: 84456 - DNA, 17 bp, Arabidopsis thaliana
ctacatccggggtcatt

SEQ ID NO: 84457 - DNA, 17 bp, Arabidopsis thaliana
ctacatcgatgagtcta

SEQ ID NO: 84458 - DNA, 17 bp, Arabidopsis thaliana
ctacatcgttccagtca

SEQ ID NO: 84459 - DNA, 17 bp, Arabidopsis thaliana
ctacatctcccagaggc

SEQ ID NO: 84460 - DNA, 17 bp, Arabidopsis thaliana
ctacatctcctagaagt

SEQ ID NO: 84461 - DNA, 17 bp, Arabidopsis thaliana
ctacatctcctagagac

SEQ ID NO: 84462 - DNA, 17 bp, Arabidopsis thaliana
ctacatctcgccggaga

SEQ ID NO: 84463 - DNA, 17 bp, Arabidopsis thaliana
ctacatctctcagaggc

SEQ ID NO: 84464 - DNA, 17 bp, Arabidopsis thaliana
ctacatctctcgagacg

SEQ ID NO: 84465 - DNA, 17 bp, Arabidopsis thaliana
ctacatctctctgaggc

SEQ ID NO: 84466 - DNA, 17 bp, Arabidopsis thaliana
ctacatcttccagaggc

SEQ ID NO: 84467 - DNA, 17 bp, Arabidopsis thaliana
ctacatcttggttatcg

SEQ ID NO: 84468 - DNA, 17 bp, Arabidopsis thaliana
ctacatcttggttatta

SEQ ID NO: 84469 - DNA, 17 bp, Arabidopsis thaliana
ctacatcttggttgtcg

SEQ ID NO: 84470 - DNA, 17 bp, Arabidopsis thaliana
ctacatgaagttgtgga

SEQ ID NO: 84471 - DNA, 17 bp, Arabidopsis thaliana
ctacatgatgaaagttt

SEQ ID NO: 84472 - DNA, 17 bp, Arabidopsis thaliana
ctacatgcgattcatcg

SEQ ID NO: 84473 - DNA, 17 bp, Arabidopsis thaliana
ctacatgctatggtttc

SEQ ID NO: 84474 - DNA, 17 bp, Arabidopsis thaliana
ctacatggaagagttgt

SEQ ID NO: 84475 - DNA, 17 bp, Arabidopsis thaliana
ctacatggcgggtggga

SEQ ID NO: 84476 - DNA, 17 bp, Arabidopsis thaliana
ctacatgtagcagctat

SEQ ID NO: 84477 - DNA, 17 bp, Arabidopsis thaliana
ctacatgtgtggcaatg

SEQ ID NO: 84478 - DNA, 17 bp, Arabidopsis thaliana
ctacatgtgtggcgatg

SEQ ID NO: 84479 - DNA, 17 bp, Arabidopsis thaliana
ctacatgtgttaggtgt

SEQ ID NO: 84480 - DNA, 17 bp, Arabidopsis thaliana
ctacattaaatgactgc

SEQ ID NO: 84481 - DNA, 17 bp, Arabidopsis thaliana
ctacattattgctcgac

SEQ ID NO: 84482 - DNA, 17 bp, Arabidopsis thaliana
ctacattgctggatgga

SEQ ID NO: 84483 - DNA, 17 bp, Arabidopsis thaliana
ctacatttgccacgttg

SEQ ID NO: 84484 - DNA, 17 bp, Arabidopsis thaliana
ctacattttccagaggc

SEQ ID NO: 84485 - DNA, 17 bp, Arabidopsis thaliana
ctacattttctagaggc

SEQ ID NO: 84486 - DNA, 17 bp, Arabidopsis thaliana
ctaccaaactgctctac

SEQ ID NO: 84487 - DNA, 17 bp, Arabidopsis thaliana
ctaccaaaggatctgcc

SEQ ID NO: 84488 - DNA, 17 bp, Arabidopsis thaliana
ctaccaaggatgactcc

SEQ ID NO: 84489 - DNA, 17 bp, Arabidopsis thaliana
ctaccaaggatgacttg

SEQ ID NO: 84490 - DNA, 17 bp, Arabidopsis thaliana
ctaccaagtcaccatta

SEQ ID NO: 84491 - DNA, 17 bp, Arabidopsis thaliana
ctaccaagtgattcagt

SEQ ID NO: 84492 - DNA, 17 bp, Arabidopsis thaliana
ctaccaatcaggattag

SEQ ID NO: 84493 - DNA, 17 bp, Arabidopsis thaliana
ctaccaatggggctgct

SEQ ID NO: 84494 - DNA, 17 bp, Arabidopsis thaliana
ctaccaatggggttgct

SEQ ID NO: 84495 - DNA, 17 bp, Arabidopsis thaliana
ctaccacatccaaggaa

SEQ ID NO: 84496 - DNA, 17 bp, Arabidopsis thaliana
ctaccactatctaaccc

SEQ ID NO: 84497 - DNA, 17 bp, Arabidopsis thaliana
ctaccactgttgaagca

SEQ ID NO: 84498 - DNA, 17 bp, Arabidopsis thaliana
ctaccacttaacaggcg

SEQ ID NO: 84499 - DNA, 17 bp, Arabidopsis thaliana
ctaccactttgctctct

SEQ ID NO: 84500 - DNA, 17 bp, Arabidopsis thaliana
ctaccagactagtacta

SEQ ID NO: 84501 - DNA, 17 bp, Arabidopsis thaliana
ctaccagactcaagtga

SEQ ID NO: 84502 - DNA, 17 bp, Arabidopsis thaliana
ctaccagagactgaccc

SEQ ID NO: 84503 - DNA, 17 bp, Arabidopsis thaliana
ctaccagataaactgct

SEQ ID NO: 84504 - DNA, 17 bp, Arabidopsis thaliana
ctaccagatccgattcg

SEQ ID NO: 84505 - DNA, 17 bp, Arabidopsis thaliana
ctaccagccgttgatca

SEQ ID NO: 84506 - DNA, 17 bp, Arabidopsis thaliana
ctaccaggtaaaccaat

SEQ ID NO: 84507 - DNA, 17 bp, Arabidopsis thaliana
ctaccaggtaaaccgat

SEQ ID NO: 84508 - DNA, 17 bp, Arabidopsis thaliana
ctaccataaccgtgttt

SEQ ID NO: 84509 - DNA, 17 bp, Arabidopsis thaliana
ctaccatcactagagtt

SEQ ID NO: 84510 - DNA, 17 bp, Arabidopsis thaliana
ctaccatccgatcaaca

SEQ ID NO: 84511 - DNA, 17 bp, Arabidopsis thaliana
ctaccatctaaccctgt

SEQ ID NO: 84512 - DNA, 17 bp, Arabidopsis thaliana
ctaccatctaatcacgt

SEQ ID NO: 84513 - DNA, 17 bp, Arabidopsis thaliana
ctaccatctaatcccgt

SEQ ID NO: 84514 - DNA, 17 bp, Arabidopsis thaliana
ctaccatctaatctcgt

SEQ ID NO: 84515 - DNA, 17 bp, Arabidopsis thaliana
ctaccatctgagctaca

SEQ ID NO: 84516 - DNA, 17 bp, Arabidopsis thaliana
ctaccatctggaatact

SEQ ID NO: 84517 - DNA, 17 bp, Arabidopsis thaliana
ctaccatgcaagctttg

SEQ ID NO: 84518 - DNA, 17 bp, Arabidopsis thaliana
ctaccatgtgggggggt

SEQ ID NO: 84519 - DNA, 17 bp, Arabidopsis thaliana
ctaccattgaggatgat

SEQ ID NO: 84520 - DNA, 17 bp, Arabidopsis thaliana
ctaccatttgcctgaga

SEQ ID NO: 84521 - DNA, 17 bp, Arabidopsis thaliana
ctaccgacccagaggca

SEQ ID NO: 84522 - DNA, 17 bp, Arabidopsis thaliana
ctaccgattgaatgatc

SEQ ID NO: 84523 - DNA, 17 bp, Arabidopsis thaliana
ctaccgatttatctgca

SEQ ID NO: 84524 - DNA, 17 bp, Arabidopsis thaliana
ctaccgcaagagttgca

SEQ ID NO: 84525 - DNA, 17 bp, Arabidopsis thaliana
ctaccgcccgcaaccgc

SEQ ID NO: 84526 - DNA, 17 bp, Arabidopsis thaliana
ctaccgcctcaactgtt

SEQ ID NO: 84527 - DNA, 17 bp, Arabidopsis thaliana
ctaccgcctttaagatc

SEQ ID NO: 84528 - DNA, 17 bp, Arabidopsis thaliana
ctaccgcggttaaaatt

SEQ ID NO: 84529 - DNA, 17 bp, Arabidopsis thaliana
ctaccggagctgaccag

SEQ ID NO: 84530 - DNA, 17 bp, Arabidopsis thaliana
ctaccgtaaacctgttg

SEQ ID NO: 84531 - DNA, 17 bp, Arabidopsis thaliana
ctaccgtacacagttga

SEQ ID NO: 84532 - DNA, 17 bp, Arabidopsis thaliana
ctaccgtacgtccgtag

SEQ ID NO: 84533 - DNA, 17 bp, Arabidopsis thaliana
ctaccgtcctcttcacg

SEQ ID NO: 84534 - DNA, 17 bp, Arabidopsis thaliana
ctaccgtgcgctggatt

SEQ ID NO: 84535 - DNA, 17 bp, Arabidopsis thaliana
ctacctaaagactttta

SEQ ID NO: 84536 - DNA, 17 bp, Arabidopsis thaliana
ctacctaacaaggatga

SEQ ID NO: 84537 - DNA, 17 bp, Arabidopsis thaliana
ctacctaaccttgtgtc

SEQ ID NO: 84538 - DNA, 17 bp, Arabidopsis thaliana
ctacctaagttgttcgt

SEQ ID NO: 84539 - DNA, 17 bp, Arabidopsis thaliana
ctacctacaagtctttc

SEQ ID NO: 84540 - DNA, 17 bp, Arabidopsis thaliana
ctacctacacaattgga

SEQ ID NO: 84541 - DNA, 17 bp, Arabidopsis thaliana
ctacctaccacttgttg

SEQ ID NO: 84542 - DNA, 17 bp, Arabidopsis thaliana
ctacctaccatttgcct

SEQ ID NO: 84543 - DNA, 17 bp, Arabidopsis thaliana
ctacctacgagcacggc

SEQ ID NO: 84544 - DNA, 17 bp, Arabidopsis thaliana
ctacctactatcctcca

SEQ ID NO: 84545 - DNA, 17 bp, Arabidopsis thaliana
ctacctactctacaaga

SEQ ID NO: 84546 - DNA, 17 bp, Arabidopsis thaliana
ctacctactgcgttgaa

SEQ ID NO: 84547 - DNA, 17 bp, Arabidopsis thaliana
ctacctacttcaatcaa

SEQ ID NO: 84548 - DNA, 17 bp, Arabidopsis thaliana
ctacctactttgcaaat

SEQ ID NO: 84549 - DNA, 17 bp, Arabidopsis thaliana
ctacctagaacgattat

SEQ ID NO: 84550 - DNA, 17 bp, Arabidopsis thaliana
ctacctagaccgcagaa

SEQ ID NO: 84551 - DNA, 17 bp, Arabidopsis thaliana
ctacctagatgaggccc

SEQ ID NO: 84552 - DNA, 17 bp, Arabidopsis thaliana
ctacctagcggtcgtcg

SEQ ID NO: 84553 - DNA, 17 bp, Arabidopsis thaliana
ctacctaggatattggt

SEQ ID NO: 84554 - DNA, 17 bp, Arabidopsis thaliana
ctacctaggatgggtga

SEQ ID NO: 84555 - DNA, 17 bp, Arabidopsis thaliana
ctacctaggtcggggat

SEQ ID NO: 84556 - DNA, 17 bp, Arabidopsis thaliana
ctacctagtccgacttt

SEQ ID NO: 84557 - DNA, 17 bp, Arabidopsis thaliana
ctacctatacggttgcg

SEQ ID NO: 84558 - DNA, 17 bp, Arabidopsis thaliana
ctacctatccagggatt

SEQ ID NO: 84559 - DNA, 17 bp, Arabidopsis thaliana
ctacctatgattccttg

SEQ ID NO: 84560 - DNA, 17 bp, Arabidopsis thaliana
ctacctatgggtggtgg

SEQ ID NO: 84561 - DNA, 17 bp, Arabidopsis thaliana
ctacctattgccaattg

SEQ ID NO: 84562 - DNA, 17 bp, Arabidopsis thaliana
ctacctattggaccgca

SEQ ID NO: 84563 - DNA, 17 bp, Arabidopsis thaliana
ctacctcagcaggcgtc

SEQ ID NO: 84564 - DNA, 17 bp, Arabidopsis thaliana
ctacctcagcgacggac

SEQ ID NO: 84565 - DNA, 17 bp, Arabidopsis thaliana
ctacctccaccgcagat

SEQ ID NO: 84566 - DNA, 17 bp, Arabidopsis thaliana
ctacctccacctcagct

SEQ ID NO: 84567 - DNA, 17 bp, Arabidopsis thaliana
ctacctccactatacgt

SEQ ID NO: 84568 - DNA, 17 bp, Arabidopsis thaliana
ctacctccccgtgtcag

SEQ ID NO: 84569 - DNA, 17 bp, Arabidopsis thaliana
ctacctccccgtgtccg

SEQ ID NO: 84570 - DNA, 17 bp, Arabidopsis thaliana
ctacctcgcagtttggc

SEQ ID NO: 84571 - DNA, 17 bp, Arabidopsis thaliana
ctacctctcattttgtt

SEQ ID NO: 84572 - DNA, 17 bp, Arabidopsis thaliana
ctacctgatcttgctag

SEQ ID NO: 84573 - DNA, 17 bp, Arabidopsis thaliana
ctacctgcctcaaaccg

SEQ ID NO: 84574 - DNA, 17 bp, Arabidopsis thaliana
ctacctggcaatgtacg

SEQ ID NO: 84575 - DNA, 17 bp, Arabidopsis thaliana
ctacctggcgcgccttt

SEQ ID NO: 84576 - DNA, 17 bp, Arabidopsis thaliana
ctacctggttgatcctg

SEQ ID NO: 84577 - DNA, 17 bp, Arabidopsis thaliana
ctaccttattgaccgca

SEQ ID NO: 84578 - DNA, 17 bp, Arabidopsis thaliana
ctaccttcaacggttgg

SEQ ID NO: 84579 - DNA, 17 bp, Arabidopsis thaliana
ctaccttcgacctgtag

SEQ ID NO: 84580 - DNA, 17 bp, Arabidopsis thaliana
ctaccttctgagtcact

SEQ ID NO: 84581 - DNA, 17 bp, Arabidopsis thaliana
ctaccttgttctctagg

SEQ ID NO: 84582 - DNA, 17 bp, Arabidopsis thaliana
ctacctttggtgtccag

SEQ ID NO: 84583 - DNA, 17 bp, Arabidopsis thaliana
ctacgaagccaagctcc

SEQ ID NO: 84584 - DNA, 17 bp, Arabidopsis thaliana
ctacgaagggtttcagc

SEQ ID NO: 84585 - DNA, 17 bp, Arabidopsis thaliana
ctacgacaagcaaagga

SEQ ID NO: 84586 - DNA, 17 bp, Arabidopsis thaliana
ctacgaccggtgatttg

SEQ ID NO: 84587 - DNA, 17 bp, Arabidopsis thaliana
ctacgaccttctgctta

SEQ ID NO: 84588 - DNA, 17 bp, Arabidopsis thaliana
ctacgactgatgacttg

SEQ ID NO: 84589 - DNA, 17 bp, Arabidopsis thaliana
ctacgacttctgacctg

SEQ ID NO: 84590 - DNA, 17 bp, Arabidopsis thaliana
ctacgacttgtccaatc

SEQ ID NO: 84591 - DNA, 17 bp, Arabidopsis thaliana
ctacgagaactatcgca

SEQ ID NO: 84592 - DNA, 17 bp, Arabidopsis thaliana
ctacgagatgttagcga

SEQ ID NO: 84593 - DNA, 17 bp, Arabidopsis thaliana
ctacgaggcgacggttc

SEQ ID NO: 84594 - DNA, 17 bp, Arabidopsis thaliana
ctacgagggcacgtctg

SEQ ID NO: 84595 - DNA, 17 bp, Arabidopsis thaliana
ctacgaggtcagtcaag

SEQ ID NO: 84596 - DNA, 17 bp, Arabidopsis thaliana
ctacgaggttccgacag

SEQ ID NO: 84597 - DNA, 17 bp, Arabidopsis thaliana
ctacgagtcgggttgtt

SEQ ID NO: 84598 - DNA, 17 bp, Arabidopsis thaliana
ctacgataagtccgcct

SEQ ID NO: 84599 - DNA, 17 bp, Arabidopsis thaliana
ctacgatacttagggcc

SEQ ID NO: 84600 - DNA, 17 bp, Arabidopsis thaliana
ctacgatatctcacggt

SEQ ID NO: 84601 - DNA, 17 bp, Arabidopsis thaliana
ctacgatgaggagcgcc

SEQ ID NO: 84602 - DNA, 17 bp, Arabidopsis thaliana
ctacgatgccaagaagt

SEQ ID NO: 84603 - DNA, 17 bp, Arabidopsis thaliana
ctacgattaggcctgtt

SEQ ID NO: 84604 - DNA, 17 bp, Arabidopsis thaliana
ctacgattattccgtcc

SEQ ID NO: 84605 - DNA, 17 bp, Arabidopsis thaliana
ctacgattattgcgttc

SEQ ID NO: 84606 - DNA, 17 bp, Arabidopsis thaliana
ctacgatttcactaggc

SEQ ID NO: 84607 - DNA, 17 bp, Arabidopsis thaliana
ctacgcagcgagtcgga

SEQ ID NO: 84608 - DNA, 17 bp, Arabidopsis thaliana
ctacgcagcgattagtg

SEQ ID NO: 84609 - DNA, 17 bp, Arabidopsis thaliana
ctacgcctttaagatcc

SEQ ID NO: 84610 - DNA, 17 bp, Arabidopsis thaliana
ctacgcgatgtgtggat

SEQ ID NO: 84611 - DNA, 17 bp, Arabidopsis thaliana
ctacgcgcgggattttg

SEQ ID NO: 84612 - DNA, 17 bp, Arabidopsis thaliana
ctacgcggatcgagaga

SEQ ID NO: 84613 - DNA, 17 bp, Arabidopsis thaliana
ctacgctatgttggact

SEQ ID NO: 84614 - DNA, 17 bp, Arabidopsis thaliana
ctacgctcaccgcacca

SEQ ID NO: 84615 - DNA, 17 bp, Arabidopsis thaliana
ctacgctccggatacat

SEQ ID NO: 84616 - DNA, 17 bp, Arabidopsis thaliana
ctacgctctggacacat

SEQ ID NO: 84617 - DNA, 17 bp, Arabidopsis thaliana
ctacgctctggatacat

SEQ ID NO: 84618 - DNA, 17 bp, Arabidopsis thaliana
ctacgcttgaagacttt

SEQ ID NO: 84619 - DNA, 17 bp, Arabidopsis thaliana
ctacggaacgggtttgg

SEQ ID NO: 84620 - DNA, 17 bp, Arabidopsis thaliana
ctacggaatgaccgaat

SEQ ID NO: 84621 - DNA, 17 bp, Arabidopsis thaliana
ctacggaatggccgaat

SEQ ID NO: 84622 - DNA, 17 bp, Arabidopsis thaliana
ctacggacaattctttc

SEQ ID NO: 84623 - DNA, 17 bp, Arabidopsis thaliana
ctacggaccgggctcca

SEQ ID NO: 84624 - DNA, 17 bp, Arabidopsis thaliana
ctacggaccgtttttac

SEQ ID NO: 84625 - DNA, 17 bp, Arabidopsis thaliana
ctacggacggatggagt

SEQ ID NO: 84626 - DNA, 17 bp, Arabidopsis thaliana
ctacggatgggacaccg

SEQ ID NO: 84627 - DNA, 17 bp, Arabidopsis thaliana
ctacggcaaatggatca

SEQ ID NO: 84628 - DNA, 17 bp, Arabidopsis thaliana
ctacggcaactgaatca

SEQ ID NO: 84629 - DNA, 17 bp, Arabidopsis thaliana
ctacggccaagatctgc

SEQ ID NO: 84630 - DNA, 17 bp, Arabidopsis thaliana
ctacggccccacgcaag

SEQ ID NO: 84631 - DNA, 17 bp, Arabidopsis thaliana
ctacggccctgtttgtt

SEQ ID NO: 84632 - DNA, 17 bp, Arabidopsis thaliana
ctacggcctcgcctgat

SEQ ID NO: 84633 - DNA, 17 bp, Arabidopsis thaliana
ctacggctattcctcga

SEQ ID NO: 84634 - DNA, 17 bp, Arabidopsis thaliana
ctacgggactggagaag

SEQ ID NO: 84635 - DNA, 17 bp, Arabidopsis thaliana
ctacgggatttcatttc

SEQ ID NO: 84636 - DNA, 17 bp, Arabidopsis thaliana
ctacgggcagctgtgca

SEQ ID NO: 84637 - DNA, 17 bp, Arabidopsis thaliana
ctacgggccaagggaca

SEQ ID NO: 84638 - DNA, 17 bp, Arabidopsis thaliana
ctacgggccacgggaca

SEQ ID NO: 84639 - DNA, 17 bp, Arabidopsis thaliana
ctacggggataagcttt

SEQ ID NO: 84640 - DNA, 17 bp, Arabidopsis thaliana
ctacggggccagaagct

SEQ ID NO: 84641 - DNA, 17 bp, Arabidopsis thaliana
ctacggggcgatgaact

SEQ ID NO: 84642 - DNA, 17 bp, Arabidopsis thaliana
ctacggtctaaaagtta

SEQ ID NO: 84643 - DNA, 17 bp, Arabidopsis thaliana
ctacggtgctcaactgc

SEQ ID NO: 84644 - DNA, 17 bp, Arabidopsis thaliana
ctacggtggcggcctaa

SEQ ID NO: 84645 - DNA, 17 bp, Arabidopsis thaliana
ctacgtccctgcccttt

SEQ ID NO: 84646 - DNA, 17 bp, Arabidopsis thaliana
ctacgtccggtgtaatg

SEQ ID NO: 84647 - DNA, 17 bp, Arabidopsis thaliana
ctacgtcctcttcttct

SEQ ID NO: 84648 - DNA, 17 bp, Arabidopsis thaliana
ctacgtctacagttctg

SEQ ID NO: 84649 - DNA, 17 bp, Arabidopsis thaliana
ctacgtctacagtttgt

SEQ ID NO: 84650 - DNA, 17 bp, Arabidopsis thaliana
ctacgtctcgccggaga

SEQ ID NO: 84651 - DNA, 17 bp, Arabidopsis thaliana
ctacgtctgcctgggtg

SEQ ID NO: 84652 - DNA, 17 bp, Arabidopsis thaliana
ctacgtgcgaaattagg

SEQ ID NO: 84653 - DNA, 17 bp, Arabidopsis thaliana
ctacgtggctaaccggt

SEQ ID NO: 84654 - DNA, 17 bp, Arabidopsis thaliana
ctacgtggtggtcaggt

SEQ ID NO: 84655 - DNA, 17 bp, Arabidopsis thaliana
ctacgtggttttggtct

SEQ ID NO: 84656 - DNA, 17 bp, Arabidopsis thaliana
ctacgttcacgcggatc

SEQ ID NO: 84657 - DNA, 17 bp, Arabidopsis thaliana
ctacgttctggaccatt

SEQ ID NO: 84658 - DNA, 17 bp, Arabidopsis thaliana
ctactaagtattttggt

SEQ ID NO: 84659 - DNA, 17 bp, Arabidopsis thaliana
ctactaagtattttgtt

SEQ ID NO: 84660 - DNA, 17 bp, Arabidopsis thaliana
ctactaagttatgggta

SEQ ID NO: 84661 - DNA, 17 bp, Arabidopsis thaliana
ctactaatccaggaaat

SEQ ID NO: 84662 - DNA, 17 bp, Arabidopsis thaliana
ctactaatccaggagat

SEQ ID NO: 84663 - DNA, 17 bp, Arabidopsis thaliana
ctactacaaggccggtc

SEQ ID NO: 84664 - DNA, 17 bp, Arabidopsis thaliana
ctactacggtggtggct

SEQ ID NO: 84665 - DNA, 17 bp, Arabidopsis thaliana
ctactacgtctacagtt

SEQ ID NO: 84666 - DNA, 17 bp, Arabidopsis thaliana
ctactacgtcttgaacg

SEQ ID NO: 84667 - DNA, 17 bp, Arabidopsis thaliana
ctactacgttgaatcca

SEQ ID NO: 84668 - DNA, 17 bp, Arabidopsis thaliana
ctactactacggtggat

SEQ ID NO: 84669 - DNA, 17 bp, Arabidopsis thaliana
ctactactatgtcctaa

SEQ ID NO: 84670 - DNA, 17 bp, Arabidopsis thaliana
ctactagaccagatctt

SEQ ID NO: 84671 - DNA, 17 bp, Arabidopsis thaliana
ctactagaggatagctt

SEQ ID NO: 84672 - DNA, 17 bp, Arabidopsis thaliana
ctactagctagtgcgga

SEQ ID NO: 84673 - DNA, 17 bp, Arabidopsis thaliana
ctactaggcatgaattt

SEQ ID NO: 84674 - DNA, 17 bp, Arabidopsis thaliana
ctactagggcgtaaccc

SEQ ID NO: 84675 - DNA, 17 bp, Arabidopsis thaliana
ctactagtggatggtgg

SEQ ID NO: 84676 - DNA, 17 bp, Arabidopsis thaliana
ctactataatgccctaa

SEQ ID NO: 84677 - DNA, 17 bp, Arabidopsis thaliana
ctactatagttagtgcg

SEQ ID NO: 84678 - DNA, 17 bp, Arabidopsis thaliana
ctactatccagcgaaac

SEQ ID NO: 84679 - DNA, 17 bp, Arabidopsis thaliana
ctactatcctccaggat

SEQ ID NO: 84680 - DNA, 17 bp, Arabidopsis thaliana
ctactatggctgtctct

SEQ ID NO: 84681 - DNA, 17 bp, Arabidopsis thaliana
ctactatggtagcggcg

SEQ ID NO: 84682 - DNA, 17 bp, Arabidopsis thaliana
ctactattagctcagtg

SEQ ID NO: 84683 - DNA, 17 bp, Arabidopsis thaliana
ctactattatctcagtg

SEQ ID NO: 84684 - DNA, 17 bp, Arabidopsis thaliana
ctactcaacatccgatg

SEQ ID NO: 84685 - DNA, 17 bp, Arabidopsis thaliana
ctactcaacttccgatg

SEQ ID NO: 84686 - DNA, 17 bp, Arabidopsis thaliana
ctactcaacttccgatt

SEQ ID NO: 84687 - DNA, 17 bp, Arabidopsis thaliana
ctactcactactaatgg

SEQ ID NO: 84688 - DNA, 17 bp, Arabidopsis thaliana
ctactcactgtcggggc

SEQ ID NO: 84689 - DNA, 17 bp, Arabidopsis thaliana
ctactcagatgggatct

SEQ ID NO: 84690 - DNA, 17 bp, Arabidopsis thaliana
ctactcaggatcattgt

SEQ ID NO: 84691 - DNA, 17 bp, Arabidopsis thaliana
ctactcaggcaggatgg

SEQ ID NO: 84692 - DNA, 17 bp, Arabidopsis thaliana
ctactcagttgctgccg

SEQ ID NO: 84693 - DNA, 17 bp, Arabidopsis thaliana
ctactccagcccaagca

SEQ ID NO: 84694 - DNA, 17 bp, Arabidopsis thaliana
ctactccatcccttacc

SEQ ID NO: 84695 - DNA, 17 bp, Arabidopsis thaliana
ctactccctccaaagtg

SEQ ID NO: 84696 - DNA, 17 bp, Arabidopsis thaliana
ctactccggactggttt

SEQ ID NO: 84697 - DNA, 17 bp, Arabidopsis thaliana
ctactccgttgaatcca

SEQ ID NO: 84698 - DNA, 17 bp, Arabidopsis thaliana
ctactcctcgaccgtgc

SEQ ID NO: 84699 - DNA, 17 bp, Arabidopsis thaliana
ctactcctttggaagtg

SEQ ID NO: 84700 - DNA, 17 bp, Arabidopsis thaliana
ctactcgaatggttggt

SEQ ID NO: 84701 - DNA, 17 bp, Arabidopsis thaliana
ctactcgaattattgct

SEQ ID NO: 84702 - DNA, 17 bp, Arabidopsis thaliana
ctactcggacaacggtg

SEQ ID NO: 84703 - DNA, 17 bp, Arabidopsis thaliana
ctactcggattgcggat

SEQ ID NO: 84704 - DNA, 17 bp, Arabidopsis thaliana
ctactcggctactaggg

SEQ ID NO: 84705 - DNA, 17 bp, Arabidopsis thaliana
ctactcggctttggatg

SEQ ID NO: 84706 - DNA, 17 bp, Arabidopsis thaliana
ctactcggtcactaggc

SEQ ID NO: 84707 - DNA, 17 bp, Arabidopsis thaliana
ctactcgtgcgaggttg

SEQ ID NO: 84708 - DNA, 17 bp, Arabidopsis thaliana
ctactctaagatttcta

SEQ ID NO: 84709 - DNA, 17 bp, Arabidopsis thaliana
ctactctacaagacaag

SEQ ID NO: 84710 - DNA, 17 bp, Arabidopsis thaliana
ctactctatgtcccaga

SEQ ID NO: 84711 - DNA, 17 bp, Arabidopsis thaliana
ctactctccccctccgg

SEQ ID NO: 84712 - DNA, 17 bp, Arabidopsis thaliana
ctactctcgaagtcaaa

SEQ ID NO: 84713 - DNA, 17 bp, Arabidopsis thaliana
ctactctcgcccaagca

SEQ ID NO: 84714 - DNA, 17 bp, Arabidopsis thaliana
ctactctcggcaacgga

SEQ ID NO: 84715 - DNA, 17 bp, Arabidopsis thaliana
ctactctgtaagctaat

SEQ ID NO: 84716 - DNA, 17 bp, Arabidopsis thaliana
ctactcttcttcttctg

SEQ ID NO: 84717 - DNA, 17 bp, Arabidopsis thaliana
ctactcttttggaagtg

SEQ ID NO: 84718 - DNA, 17 bp, Arabidopsis thaliana
ctactgaacaagatgtg

SEQ ID NO: 84719 - DNA, 17 bp, Arabidopsis thaliana
ctactgagctaatgatg

SEQ ID NO: 84720 - DNA, 17 bp, Arabidopsis thaliana
ctactgaggatgagctt

SEQ ID NO: 84721 - DNA, 17 bp, Arabidopsis thaliana
ctactgaggctttttag

SEQ ID NO: 84722 - DNA, 17 bp, Arabidopsis thaliana
ctactgagggtcggcaa

SEQ ID NO: 84723 - DNA, 17 bp, Arabidopsis thaliana
ctactgatcctgctgac

SEQ ID NO: 84724 - DNA, 17 bp, Arabidopsis thaliana
ctactgatgcccgcgtc

SEQ ID NO: 84725 - DNA, 17 bp, Arabidopsis thaliana
ctactgcaagggctggc

SEQ ID NO: 84726 - DNA, 17 bp, Arabidopsis thaliana
ctactgcacaggcttgg

SEQ ID NO: 84727 - DNA, 17 bp, Arabidopsis thaliana
ctactgcacgggccggc

SEQ ID NO: 84728 - DNA, 17 bp, Arabidopsis thaliana
ctactgcacgggcctgg

SEQ ID NO: 84729 - DNA, 17 bp, Arabidopsis thaliana
ctactgcacgggcttgg

SEQ ID NO: 84730 - DNA, 17 bp, Arabidopsis thaliana
ctactgcacggtcttgg

SEQ ID NO: 84731 - DNA, 17 bp, Arabidopsis thaliana
ctactgcacggttctga

SEQ ID NO: 84732 - DNA, 17 bp, Arabidopsis thaliana
ctactgcacttttgctg

SEQ ID NO: 84733 - DNA, 17 bp, Arabidopsis thaliana
ctactgcgatggattat

SEQ ID NO: 84734 - DNA, 17 bp, Arabidopsis thaliana
ctactgcgttgaatcca

SEQ ID NO: 84735 - DNA, 17 bp, Arabidopsis thaliana
ctactgctaacattggt

SEQ ID NO: 84736 - DNA, 17 bp, Arabidopsis thaliana
ctactgctcattgggct

SEQ ID NO: 84737 - DNA, 17 bp, Arabidopsis thaliana
ctactgctttgttctcc

SEQ ID NO: 84738 - DNA, 17 bp, Arabidopsis thaliana
ctactggaagcagttac

SEQ ID NO: 84739 - DNA, 17 bp, Arabidopsis thaliana
ctactggaaggattcct

SEQ ID NO: 84740 - DNA, 17 bp, Arabidopsis thaliana
ctactggcaggatcaac

SEQ ID NO: 84741 - DNA, 17 bp, Arabidopsis thaliana
ctactggcgcttcaaaa

SEQ ID NO: 84742 - DNA, 17 bp, Arabidopsis thaliana
ctactggttatgatctg

SEQ ID NO: 84743 - DNA, 17 bp, Arabidopsis thaliana
ctactggtttcagaggt

SEQ ID NO: 84744 - DNA, 17 bp, Arabidopsis thaliana
ctactgtaaggattctc

SEQ ID NO: 84745 - DNA, 17 bp, Arabidopsis thaliana
ctactgtctccactcat

SEQ ID NO: 84746 - DNA, 17 bp, Arabidopsis thaliana
ctactgtcttcgctacg

SEQ ID NO: 84747 - DNA, 17 bp, Arabidopsis thaliana
ctactgtgttttacttt

SEQ ID NO: 84748 - DNA, 17 bp, Arabidopsis thaliana
ctactgttctttccgcg

SEQ ID NO: 84749 - DNA, 17 bp, Arabidopsis thaliana
ctactgttggtttgcta

SEQ ID NO: 84750 - DNA, 17 bp, Arabidopsis thaliana
ctacttaaaaagctacg

SEQ ID NO: 84751 - DNA, 17 bp, Arabidopsis thaliana
ctacttaactggttgca

SEQ ID NO: 84752 - DNA, 17 bp, Arabidopsis thaliana
ctacttaagtctctgct

SEQ ID NO: 84753 - DNA, 17 bp, Arabidopsis thaliana
ctacttaatccgcttgt

SEQ ID NO: 84754 - DNA, 17 bp, Arabidopsis thaliana
ctacttacgatgtagca

SEQ ID NO: 84755 - DNA, 17 bp, Arabidopsis thaliana
ctacttacgcttacaag

SEQ ID NO: 84756 - DNA, 17 bp, Arabidopsis thaliana
ctacttacggcagttat

SEQ ID NO: 84757 - DNA, 17 bp, Arabidopsis thaliana
ctacttactaatgcagg

SEQ ID NO: 84758 - DNA, 17 bp, Arabidopsis thaliana
ctacttagcttttcgag

SEQ ID NO: 84759 - DNA, 17 bp, Arabidopsis thaliana
ctacttaggcttctaag

SEQ ID NO: 84760 - DNA, 17 bp, Arabidopsis thaliana
ctacttaggcttttaag

SEQ ID NO: 84761 - DNA, 17 bp, Arabidopsis thaliana
ctacttcaacagggaga

SEQ ID NO: 84762 - DNA, 17 bp, Arabidopsis thaliana
ctacttcaagcagatca

SEQ ID NO: 84763 - DNA, 17 bp, Arabidopsis thaliana
ctacttccatttgtcgc

SEQ ID NO: 84764 - DNA, 17 bp, Arabidopsis thaliana
ctacttccccagagcct

SEQ ID NO: 84765 - DNA, 17 bp, Arabidopsis thaliana
ctacttcctccgatttc

SEQ ID NO: 84766 - DNA, 17 bp, Arabidopsis thaliana
ctacttcgactagcaac

SEQ ID NO: 84767 - DNA, 17 bp, Arabidopsis thaliana
ctacttctaaaggttcc

SEQ ID NO: 84768 - DNA, 17 bp, Arabidopsis thaliana
ctacttctctcacagac

SEQ ID NO: 84769 - DNA, 17 bp, Arabidopsis thaliana
ctacttctcttctgcat

SEQ ID NO: 84770 - DNA, 17 bp, Arabidopsis thaliana
ctacttctcttgagcaa

SEQ ID NO: 84771 - DNA, 17 bp, Arabidopsis thaliana
ctacttctgggttttct

SEQ ID NO: 84772 - DNA, 17 bp, Arabidopsis thaliana
ctacttcttagggcacc

SEQ ID NO: 84773 - DNA, 17 bp, Arabidopsis thaliana
ctacttcttggttgtca

SEQ ID NO: 84774 - DNA, 17 bp, Arabidopsis thaliana
ctacttcttggttgtcg

SEQ ID NO: 84775 - DNA, 17 bp, Arabidopsis thaliana
ctacttgaaatgcttga

SEQ ID NO: 84776 - DNA, 17 bp, Arabidopsis thaliana
ctacttgacttttcggg

SEQ ID NO: 84777 - DNA, 17 bp, Arabidopsis thaliana
ctacttgagtgtcatcc

SEQ ID NO: 84778 - DNA, 17 bp, Arabidopsis thaliana
ctacttgattcaccagg

SEQ ID NO: 84779 - DNA, 17 bp, Arabidopsis thaliana
ctacttgcaatggaggt

SEQ ID NO: 84780 - DNA, 17 bp, Arabidopsis thaliana
ctacttgcagcgtggag

SEQ ID NO: 84781 - DNA, 17 bp, Arabidopsis thaliana
ctacttggaattttggt

SEQ ID NO: 84782 - DNA, 17 bp, Arabidopsis thaliana
ctacttggtgagaatca

SEQ ID NO: 84783 - DNA, 17 bp, Arabidopsis thaliana
ctacttgtgagctggta

SEQ ID NO: 84784 - DNA, 17 bp, Arabidopsis thaliana
ctacttgtggctgcagc

SEQ ID NO: 84785 - DNA, 17 bp, Arabidopsis thaliana
ctacttgtgttgctgtt

SEQ ID NO: 84786 - DNA, 17 bp, Arabidopsis thaliana
ctactttactttggctc

SEQ ID NO: 84787 - DNA, 17 bp, Arabidopsis thaliana
ctactttcgcaacttgg

SEQ ID NO: 84788 - DNA, 17 bp, Arabidopsis thaliana
ctactttgaattaagtc

SEQ ID NO: 84789 - DNA, 17 bp, Arabidopsis thaliana
ctactttgaccagaatc

SEQ ID NO: 84790 - DNA, 17 bp, Arabidopsis thaliana
ctactttgcctgtcttc

SEQ ID NO: 84791 - DNA, 17 bp, Arabidopsis thaliana
ctactttgcctgtcttt

SEQ ID NO: 84792 - DNA, 17 bp, Arabidopsis thaliana
ctactttgcgttgacta

SEQ ID NO: 84793 - DNA, 17 bp, Arabidopsis thaliana
ctactttgtggcaaact

SEQ ID NO: 84794 - DNA, 17 bp, Arabidopsis thaliana
ctacttttgaagggtca

SEQ ID NO: 84795 - DNA, 17 bp, Arabidopsis thaliana
ctacttttgatcgctgg

SEQ ID NO: 84796 - DNA, 17 bp, Arabidopsis thaliana
ctacttttgccgaacgt

SEQ ID NO: 84797 - DNA, 17 bp, Arabidopsis thaliana
ctacttttgttcctaag

SEQ ID NO: 84798 - DNA, 17 bp, Arabidopsis thaliana
ctactttttctactatc

SEQ ID NO: 84799 - DNA, 17 bp, Arabidopsis thaliana
ctagaaacatctagatg

SEQ ID NO: 84800 - DNA, 17 bp, Arabidopsis thaliana
ctagaaagtgccattca

SEQ ID NO: 84801 - DNA, 17 bp, Arabidopsis thaliana
ctagaaattgcaggtct

SEQ ID NO: 84802 - DNA, 17 bp, Arabidopsis thaliana
ctagaaattttagaccg

SEQ ID NO: 84803 - DNA, 17 bp, Arabidopsis thaliana
ctagaacaacctttggg

SEQ ID NO: 84804 - DNA, 17 bp, Arabidopsis thaliana
ctagaacaactcttagg

SEQ ID NO: 84805 - DNA, 17 bp, Arabidopsis thaliana
ctagaacacaaggctgc

SEQ ID NO: 84806 - DNA, 17 bp, Arabidopsis thaliana
ctagaaccataattaac

SEQ ID NO: 84807 - DNA, 17 bp, Arabidopsis thaliana
ctagaacccacaaaggg

SEQ ID NO: 84808 - DNA, 17 bp, Arabidopsis thaliana
ctagaaccgcttgatcc

SEQ ID NO: 84809 - DNA, 17 bp, Arabidopsis thaliana
ctagaacctccagaccc

SEQ ID NO: 84810 - DNA, 17 bp, Arabidopsis thaliana
ctagaacgaggtctgaa

SEQ ID NO: 84811 - DNA, 17 bp, Arabidopsis thaliana
ctagaacgattatgggt

SEQ ID NO: 84812 - DNA, 17 bp, Arabidopsis thaliana
ctagaactgtgttgcgt

SEQ ID NO: 84813 - DNA, 17 bp, Arabidopsis thaliana
ctagaacttttagaccg

SEQ ID NO: 84814 - DNA, 17 bp, Arabidopsis thaliana
ctagaagactctaggca

SEQ ID NO: 84815 - DNA, 17 bp, Arabidopsis thaliana
ctagaagatgctgcttc

SEQ ID NO: 84816 - DNA, 17 bp, Arabidopsis thaliana
ctagaagattacgggca

SEQ ID NO: 84817 - DNA, 17 bp, Arabidopsis thaliana
ctagaagattacgggta

SEQ ID NO: 84818 - DNA, 17 bp, Arabidopsis thaliana
ctagaagcgacgcatgc

SEQ ID NO: 84819 - DNA, 17 bp, Arabidopsis thaliana
ctagaagcgacgcatgt

SEQ ID NO: 84820 - DNA, 17 bp, Arabidopsis thaliana
ctagaagcgataaaggg

SEQ ID NO: 84821 - DNA, 17 bp, Arabidopsis thaliana
ctagaaggattacgggt

SEQ ID NO: 84822 - DNA, 17 bp, Arabidopsis thaliana
ctagaaggttctgggcc

SEQ ID NO: 84823 - DNA, 17 bp, Arabidopsis thaliana
ctagaagtctaaaccgt

SEQ ID NO: 84824 - DNA, 17 bp, Arabidopsis thaliana
ctagaagttgtctacgc

SEQ ID NO: 84825 - DNA, 17 bp, Arabidopsis thaliana
ctagaatcacctcgaat

SEQ ID NO: 84826 - DNA, 17 bp, Arabidopsis thaliana
ctagaatcttcataatc

SEQ ID NO: 84827 - DNA, 17 bp, Arabidopsis thaliana
ctagaatgattgtcttt

SEQ ID NO: 84828 - DNA, 17 bp, Arabidopsis thaliana
ctagaatgctttgagtc

SEQ ID NO: 84829 - DNA, 17 bp, Arabidopsis thaliana
ctagaatgtagtccagt

SEQ ID NO: 84830 - DNA, 17 bp, Arabidopsis thaliana
ctagacaaatactgcaa

SEQ ID NO: 84831 - DNA, 17 bp, Arabidopsis thaliana
ctagacaatgtgaacct

SEQ ID NO: 84832 - DNA, 17 bp, Arabidopsis thaliana
ctagacacacaatgcgc

SEQ ID NO: 84833 - DNA, 17 bp, Arabidopsis thaliana
ctagacacattagtttg

SEQ ID NO: 84834 - DNA, 17 bp, Arabidopsis thaliana
ctagacacgctaacttg

SEQ ID NO: 84835 - DNA, 17 bp, Arabidopsis thaliana
ctagaccaaggttggag

SEQ ID NO: 84836 - DNA, 17 bp, Arabidopsis thaliana
ctagaccagatcttcgc

SEQ ID NO: 84837 - DNA, 17 bp, Arabidopsis thaliana
ctagaccccatctatct

SEQ ID NO: 84838 - DNA, 17 bp, Arabidopsis thaliana
ctagaccgcaatttgtt

SEQ ID NO: 84839 - DNA, 17 bp, Arabidopsis thaliana
ctagaccgctgagggat

SEQ ID NO: 84840 - DNA, 17 bp, Arabidopsis thaliana
ctagacctagctgctgt

SEQ ID NO: 84841 - DNA, 17 bp, Arabidopsis thaliana
ctagacgaacgcctaga

SEQ ID NO: 84842 - DNA, 17 bp, Arabidopsis thaliana
ctagacgaatcttagag

SEQ ID NO: 84843 - DNA, 17 bp, Arabidopsis thaliana
ctagacgacggtaagtc

SEQ ID NO: 84844 - DNA, 17 bp, Arabidopsis thaliana
ctagacggactgggaac

SEQ ID NO: 84845 - DNA, 17 bp, Arabidopsis thaliana
ctagacgtgccggagtg

SEQ ID NO: 84846 - DNA, 17 bp, Arabidopsis thaliana
ctagactctgaactgta

SEQ ID NO: 84847 - DNA, 17 bp, Arabidopsis thaliana
ctagactctgaatctag

SEQ ID NO: 84848 - DNA, 17 bp, Arabidopsis thaliana
ctagactgagactgaag

SEQ ID NO: 84849 - DNA, 17 bp, Arabidopsis thaliana
ctagactggcatgttaa

SEQ ID NO: 84850 - DNA, 17 bp, Arabidopsis thaliana
ctagacttcacggggtg

SEQ ID NO: 84851 - DNA, 17 bp, Arabidopsis thaliana
ctagacttgacgggttg

SEQ ID NO: 84852 - DNA, 17 bp, Arabidopsis thaliana
ctagacttgatgacgag

SEQ ID NO: 84853 - DNA, 17 bp, Arabidopsis thaliana
ctagagaaactttggca

SEQ ID NO: 84854 - DNA, 17 bp, Arabidopsis thaliana
ctagagagacctaccgt

SEQ ID NO: 84855 - DNA, 17 bp, Arabidopsis thaliana
ctagagagcttgtcact

SEQ ID NO: 84856 - DNA, 17 bp, Arabidopsis thaliana
ctagagatatgatccac

SEQ ID NO: 84857 - DNA, 17 bp, Arabidopsis thaliana
ctagagattgccacgta

SEQ ID NO: 84858 - DNA, 17 bp, Arabidopsis thaliana
ctagagcaatttcagga

SEQ ID NO: 84859 - DNA, 17 bp, Arabidopsis thaliana
ctagagcgacgattgtg

SEQ ID NO: 84860 - DNA, 17 bp, Arabidopsis thaliana
ctagagcggcgagcatg

SEQ ID NO: 84861 - DNA, 17 bp, Arabidopsis thaliana
ctagagctggacagggt

SEQ ID NO: 84862 - DNA, 17 bp, Arabidopsis thaliana
ctagagctgtcaaatgg

SEQ ID NO: 84863 - DNA, 17 bp, Arabidopsis thaliana
ctagagcttatttctgt

SEQ ID NO: 84864 - DNA, 17 bp, Arabidopsis thaliana
ctagaggacatccggag

SEQ ID NO: 84865 - DNA, 17 bp, Arabidopsis thaliana
ctagaggacgcaatgtt

SEQ ID NO: 84866 - DNA, 17 bp, Arabidopsis thaliana
ctagaggactctctgag

SEQ ID NO: 84867 - DNA, 17 bp, Arabidopsis thaliana
ctagaggatggcagtcg

SEQ ID NO: 84868 - DNA, 17 bp, Arabidopsis thaliana
ctagagggctgggctcg

SEQ ID NO: 84869 - DNA, 17 bp, Arabidopsis thaliana
ctagaggtgtcagaaaa

SEQ ID NO: 84870 - DNA, 17 bp, Arabidopsis thaliana
ctagaggttacaggtgc

SEQ ID NO: 84871 - DNA, 17 bp, Arabidopsis thaliana
ctagagtcaagctcaac

SEQ ID NO: 84872 - DNA, 17 bp, Arabidopsis thaliana
ctagagtcgctggttgg

SEQ ID NO: 84873 - DNA, 17 bp, Arabidopsis thaliana
ctagagtctgagagggc

SEQ ID NO: 84874 - DNA, 17 bp, Arabidopsis thaliana
ctagagtgcctaacttc

SEQ ID NO: 84875 - DNA, 17 bp, Arabidopsis thaliana
ctagagtgcctgccagt

SEQ ID NO: 84876 - DNA, 17 bp, Arabidopsis thaliana
ctagagtgtttcgagcc

SEQ ID NO: 84877 - DNA, 17 bp, Arabidopsis thaliana
ctagagttaatctacag

SEQ ID NO: 84878 - DNA, 17 bp, Arabidopsis thaliana
ctagagttgctttggat

SEQ ID NO: 84879 - DNA, 17 bp, Arabidopsis thaliana
ctagagttgttggtcgg

SEQ ID NO: 84880 - DNA, 17 bp, Arabidopsis thaliana
ctagagttgttggtggg

SEQ ID NO: 84881 - DNA, 17 bp, Arabidopsis thaliana
ctagagtttggatgtgt

SEQ ID NO: 84882 - DNA, 17 bp, Arabidopsis thaliana
ctagataacatgtgcgc

SEQ ID NO: 84883 - DNA, 17 bp, Arabidopsis thaliana
ctagataaggcccgcct

SEQ ID NO: 84884 - DNA, 17 bp, Arabidopsis thaliana
ctagataccgctttgga

SEQ ID NO: 84885 - DNA, 17 bp, Arabidopsis thaliana
ctagatatcgctttgga

SEQ ID NO: 84886 - DNA, 17 bp, Arabidopsis thaliana
ctagatattcctctggg

SEQ ID NO: 84887 - DNA, 17 bp, Arabidopsis thaliana
ctagatcaccatctttc

SEQ ID NO: 84888 - DNA, 17 bp, Arabidopsis thaliana
ctagatcaccttcactt

SEQ ID NO: 84889 - DNA, 17 bp, Arabidopsis thaliana
ctagatcagtctcagaa

SEQ ID NO: 84890 - DNA, 17 bp, Arabidopsis thaliana
ctagatccgcacgacga

SEQ ID NO: 84891 - DNA, 17 bp, Arabidopsis thaliana
ctagatccgccactgct

SEQ ID NO: 84892 - DNA, 17 bp, Arabidopsis thaliana
ctagatccgtcactggc

SEQ ID NO: 84893 - DNA, 17 bp, Arabidopsis thaliana
ctagatccttgtgttgt

SEQ ID NO: 84894 - DNA, 17 bp, Arabidopsis thaliana
ctagatcggcctttcga

SEQ ID NO: 84895 - DNA, 17 bp, Arabidopsis thaliana
ctagatcgtggtgtttc

SEQ ID NO: 84896 - DNA, 17 bp, Arabidopsis thaliana
ctagatctgaggcgggg

SEQ ID NO: 84897 - DNA, 17 bp, Arabidopsis thaliana
ctagatctgaggcggtg

SEQ ID NO: 84898 - DNA, 17 bp, Arabidopsis thaliana
ctagatctgggttttgc

SEQ ID NO: 84899 - DNA, 17 bp, Arabidopsis thaliana
ctagatgaggcccagca

SEQ ID NO: 84900 - DNA, 17 bp, Arabidopsis thaliana
ctagatgagggtgattt

SEQ ID NO: 84901 - DNA, 17 bp, Arabidopsis thaliana
ctagatgatgggcttag

SEQ ID NO: 84902 - DNA, 17 bp, Arabidopsis thaliana
ctagatgatgtgatggt

SEQ ID NO: 84903 - DNA, 17 bp, Arabidopsis thaliana
ctagatgatttctcttg

SEQ ID NO: 84904 - DNA, 17 bp, Arabidopsis thaliana
ctagatggcgagagtcc

SEQ ID NO: 84905 - DNA, 17 bp, Arabidopsis thaliana
ctagatggtccatttgg

SEQ ID NO: 84906 - DNA, 17 bp, Arabidopsis thaliana
ctagatggtccttttca

SEQ ID NO: 84907 - DNA, 17 bp, Arabidopsis thaliana
ctagatgtgtagaggaa

SEQ ID NO: 84908 - DNA, 17 bp, Arabidopsis thaliana
ctagatgtgtcaaatgg

SEQ ID NO: 84909 - DNA, 17 bp, Arabidopsis thaliana
ctagatgtttgcccgct

SEQ ID NO: 84910 - DNA, 17 bp, Arabidopsis thaliana
ctagattacagggctta

SEQ ID NO: 84911 - DNA, 17 bp, Arabidopsis thaliana
ctagattagacagtgtg

SEQ ID NO: 84912 - DNA, 17 bp, Arabidopsis thaliana
ctagattagaccctaac

SEQ ID NO: 84913 - DNA, 17 bp, Arabidopsis thaliana
ctagattaggaagattc

SEQ ID NO: 84914 - DNA, 17 bp, Arabidopsis thaliana
ctagattcagctgagcc

SEQ ID NO: 84915 - DNA, 17 bp, Arabidopsis thaliana
ctagattccgtttaggt

SEQ ID NO: 84916 - DNA, 17 bp, Arabidopsis thaliana
ctagattctgctggaac

SEQ ID NO: 84917 - DNA, 17 bp, Arabidopsis thaliana
ctagattctgttggaac

SEQ ID NO: 84918 - DNA, 17 bp, Arabidopsis thaliana
ctagattctttggtgta

SEQ ID NO: 84919 - DNA, 17 bp, Arabidopsis thaliana
ctagattgcgggtaaat

SEQ ID NO: 84920 - DNA, 17 bp, Arabidopsis thaliana
ctagattttgacccgcg

SEQ ID NO: 84921 - DNA, 17 bp, Arabidopsis thaliana
ctagcaactttgcgagg

SEQ ID NO: 84922 - DNA, 17 bp, Arabidopsis thaliana
ctagcaagtcgctgagc

SEQ ID NO: 84923 - DNA, 17 bp, Arabidopsis thaliana
ctagcaagttacgatat

SEQ ID NO: 84924 - DNA, 17 bp, Arabidopsis thaliana
ctagcaattgcaacaac

SEQ ID NO: 84925 - DNA, 17 bp, Arabidopsis thaliana
ctagcacactgagcacc

SEQ ID NO: 84926 - DNA, 17 bp, Arabidopsis thaliana
ctagcacgacttagttc

SEQ ID NO: 84927 - DNA, 17 bp, Arabidopsis thaliana
ctagcactactttgttc

SEQ ID NO: 84928 - DNA, 17 bp, Arabidopsis thaliana
ctagcagagagaaagtt

SEQ ID NO: 84929 - DNA, 17 bp, Arabidopsis thaliana
ctagcagcagatcacgc

SEQ ID NO: 84930 - DNA, 17 bp, Arabidopsis thaliana
ctagcagcggcaaagta

SEQ ID NO: 84931 - DNA, 17 bp, Arabidopsis thaliana
ctagcaggtggaggaga

SEQ ID NO: 84932 - DNA, 17 bp, Arabidopsis thaliana
ctagccaaggactgtca

SEQ ID NO: 84933 - DNA, 17 bp, Arabidopsis thaliana
ctagccaaggatgactt

SEQ ID NO: 84934 - DNA, 17 bp, Arabidopsis thaliana
ctagccaaggatgatgg

SEQ ID NO: 84935 - DNA, 17 bp, Arabidopsis thaliana
ctagccacttcttgaga

SEQ ID NO: 84936 - DNA, 17 bp, Arabidopsis thaliana
ctagccatctatggtat

SEQ ID NO: 84937 - DNA, 17 bp, Arabidopsis thaliana
ctagcccaagaccttgg

SEQ ID NO: 84938 - DNA, 17 bp, Arabidopsis thaliana
ctagcccggattctgac

SEQ ID NO: 84939 - DNA, 17 bp, Arabidopsis thaliana
ctagccctcctcttagg

SEQ ID NO: 84940 - DNA, 17 bp, Arabidopsis thaliana
ctagcccttttccttct

SEQ ID NO: 84941 - DNA, 17 bp, Arabidopsis thaliana
ctagccgccggaacgac

SEQ ID NO: 84942 - DNA, 17 bp, Arabidopsis thaliana
ctagccgccggagcgac

SEQ ID NO: 84943 - DNA, 17 bp, Arabidopsis thaliana
ctagccgctatcgtttc

SEQ ID NO: 84944 - DNA, 17 bp, Arabidopsis thaliana
ctagccggttgatttcc

SEQ ID NO: 84945 - DNA, 17 bp, Arabidopsis thaliana
ctagcctgaaggttttg

SEQ ID NO: 84946 - DNA, 17 bp, Arabidopsis thaliana
ctagccttgtgtcagga

SEQ ID NO: 84947 - DNA, 17 bp, Arabidopsis thaliana
ctagcgacaatgagtgc

SEQ ID NO: 84948 - DNA, 17 bp, Arabidopsis thaliana
ctagcgacagcgaccaa

SEQ ID NO: 84949 - DNA, 17 bp, Arabidopsis thaliana
ctagcgacagcgaccag

SEQ ID NO: 84950 - DNA, 17 bp, Arabidopsis thaliana
ctagcgacatagggaaa

SEQ ID NO: 84951 - DNA, 17 bp, Arabidopsis thaliana
ctagcgacgtagggaaa

SEQ ID NO: 84952 - DNA, 17 bp, Arabidopsis thaliana
ctagcgatgggagaaca

SEQ ID NO: 84953 - DNA, 17 bp, Arabidopsis thaliana
ctagcgatttcggcgca

SEQ ID NO: 84954 - DNA, 17 bp, Arabidopsis thaliana
ctagcgatttcgtccat

SEQ ID NO: 84955 - DNA, 17 bp, Arabidopsis thaliana
ctagcgccgcgctttac

SEQ ID NO: 84956 - DNA, 17 bp, Arabidopsis thaliana
ctagcggtcgtcggctg

SEQ ID NO: 84957 - DNA, 17 bp, Arabidopsis thaliana
ctagcggtttctatgat

SEQ ID NO: 84958 - DNA, 17 bp, Arabidopsis thaliana
ctagcgtgttagaccaa

SEQ ID NO: 84959 - DNA, 17 bp, Arabidopsis thaliana
ctagcgttctgtagcca

SEQ ID NO: 84960 - DNA, 17 bp, Arabidopsis thaliana
ctagctacgtggaggca

SEQ ID NO: 84961 - DNA, 17 bp, Arabidopsis thaliana
ctagctagtcgccctgt

SEQ ID NO: 84962 - DNA, 17 bp, Arabidopsis thaliana
ctagctatttttgcgag

SEQ ID NO: 84963 - DNA, 17 bp, Arabidopsis thaliana
ctagctcagatgattcg

SEQ ID NO: 84964 - DNA, 17 bp, Arabidopsis thaliana
ctagctcagggccgaga

SEQ ID NO: 84965 - DNA, 17 bp, Arabidopsis thaliana
ctagctgaggtggcgac

SEQ ID NO: 84966 - DNA, 17 bp, Arabidopsis thaliana
ctagctgagtaaaaccc

SEQ ID NO: 84967 - DNA, 17 bp, Arabidopsis thaliana
ctagctgcccttggccg

SEQ ID NO: 84968 - DNA, 17 bp, Arabidopsis thaliana
ctagctgctgtgatttg

SEQ ID NO: 84969 - DNA, 17 bp, Arabidopsis thaliana
ctagctggtcagaatac

SEQ ID NO: 84970 - DNA, 17 bp, Arabidopsis thaliana
ctagctggtcaggatac

SEQ ID NO: 84971 - DNA, 17 bp, Arabidopsis thaliana
ctagcttaaccaaagat

SEQ ID NO: 84972 - DNA, 17 bp, Arabidopsis thaliana
ctagcttatgctctgac

SEQ ID NO: 84973 - DNA, 17 bp, Arabidopsis thaliana
ctagcttcctcttcacg

SEQ ID NO: 84974 - DNA, 17 bp, Arabidopsis thaliana
ctagctttgggtgtgag

SEQ ID NO: 84975 - DNA, 17 bp, Arabidopsis thaliana
ctagcttttgggtgtga

SEQ ID NO: 84976 - DNA, 17 bp, Arabidopsis thaliana
ctagcttttgggtgtta

SEQ ID NO: 84977 - DNA, 17 bp, Arabidopsis thaliana
ctaggaaattacgggct

SEQ ID NO: 84978 - DNA, 17 bp, Arabidopsis thaliana
ctaggaaattcgggtga

SEQ ID NO: 84979 - DNA, 17 bp, Arabidopsis thaliana
ctaggaaccagtcatac

SEQ ID NO: 84980 - DNA, 17 bp, Arabidopsis thaliana
ctaggaacggatgtcca

SEQ ID NO: 84981 - DNA, 17 bp, Arabidopsis thaliana
ctaggaagattctttga

SEQ ID NO: 84982 - DNA, 17 bp, Arabidopsis thaliana
ctaggaagcatgctttg

SEQ ID NO: 84983 - DNA, 17 bp, Arabidopsis thaliana
ctaggaagtcctcgtgt

SEQ ID NO: 84984 - DNA, 17 bp, Arabidopsis thaliana
ctaggaattggaccggt

SEQ ID NO: 84985 - DNA, 17 bp, Arabidopsis thaliana
ctaggacaccgctgaag

SEQ ID NO: 84986 - DNA, 17 bp, Arabidopsis thaliana
ctaggacacttctaagg

SEQ ID NO: 84987 - DNA, 17 bp, Arabidopsis thaliana
ctaggacagaggagaga

SEQ ID NO: 84988 - DNA, 17 bp, Arabidopsis thaliana
ctaggacctccattgcc

SEQ ID NO: 84989 - DNA, 17 bp, Arabidopsis thaliana
ctaggacgcctaggcac

SEQ ID NO: 84990 - DNA, 17 bp, Arabidopsis thaliana
ctaggacttggaaaaga

SEQ ID NO: 84991 - DNA, 17 bp, Arabidopsis thaliana
ctaggagagaccaagag

SEQ ID NO: 84992 - DNA, 17 bp, Arabidopsis thaliana
ctaggagagccaccgcg

SEQ ID NO: 84993 - DNA, 17 bp, Arabidopsis thaliana
ctaggagagccggacag

SEQ ID NO: 84994 - DNA, 17 bp, Arabidopsis thaliana
ctaggagcagtgagatc

SEQ ID NO: 84995 - DNA, 17 bp, Arabidopsis thaliana
ctaggagctctacattg

SEQ ID NO: 84996 - DNA, 17 bp, Arabidopsis thaliana
ctaggaggattacgggc

SEQ ID NO: 84997 - DNA, 17 bp, Arabidopsis thaliana
ctaggaggattacgggt

SEQ ID NO: 84998 - DNA, 17 bp, Arabidopsis thaliana
ctaggaggctctcacca

SEQ ID NO: 84999 - DNA, 17 bp, Arabidopsis thaliana
ctaggaggttatggcca

SEQ ID NO: 85000 - DNA, 17 bp, Arabidopsis thaliana
ctaggagtcgactcact

SEQ ID NO: 85001 - DNA, 17 bp, Arabidopsis thaliana
ctaggatattggttctc

SEQ ID NO: 85002 - DNA, 17 bp, Arabidopsis thaliana
ctaggatcaaatcttct

SEQ ID NO: 85003 - DNA, 17 bp, Arabidopsis thaliana
ctaggatcagatcttgt

SEQ ID NO: 85004 - DNA, 17 bp, Arabidopsis thaliana
ctaggatccttgtgttg

SEQ ID NO: 85005 - DNA, 17 bp, Arabidopsis thaliana
ctaggatcgtgccacgt

SEQ ID NO: 85006 - DNA, 17 bp, Arabidopsis thaliana
ctaggatgagatttcag

SEQ ID NO: 85007 - DNA, 17 bp, Arabidopsis thaliana
ctaggatgggtgacctc

SEQ ID NO: 85008 - DNA, 17 bp, Arabidopsis thaliana
ctaggatgggttacctc

SEQ ID NO: 85009 - DNA, 17 bp, Arabidopsis thaliana
ctaggatggtgacctcc

SEQ ID NO: 85010 - DNA, 17 bp, Arabidopsis thaliana
ctaggatgtgtgacctc

SEQ ID NO: 85011 - DNA, 17 bp, Arabidopsis thaliana
ctaggattacgccatta

SEQ ID NO: 85012 - DNA, 17 bp, Arabidopsis thaliana
ctaggattccgacatac

SEQ ID NO: 85013 - DNA, 17 bp, Arabidopsis thaliana
ctaggattctttccatc

SEQ ID NO: 85014 - DNA, 17 bp, Arabidopsis thaliana
ctaggatttcacccgtg

SEQ ID NO: 85015 - DNA, 17 bp, Arabidopsis thaliana
ctaggattttccagctt

SEQ ID NO: 85016 - DNA, 17 bp, Arabidopsis thaliana
ctaggcaagtcctcttg

SEQ ID NO: 85017 - DNA, 17 bp, Arabidopsis thaliana
ctaggcatagtgagttt

SEQ ID NO: 85018 - DNA, 17 bp, Arabidopsis thaliana
ctaggcatgtgacttgg

SEQ ID NO: 85019 - DNA, 17 bp, Arabidopsis thaliana
ctaggcattggatcact

SEQ ID NO: 85020 - DNA, 17 bp, Arabidopsis thaliana
ctaggccacgtctgcct

SEQ ID NO: 85021 - DNA, 17 bp, Arabidopsis thaliana
ctaggccgtcatcttgt

SEQ ID NO: 85022 - DNA, 17 bp, Arabidopsis thaliana
ctaggcgaaacttagag

SEQ ID NO: 85023 - DNA, 17 bp, Arabidopsis thaliana
ctaggcgaacaacgaat

SEQ ID NO: 85024 - DNA, 17 bp, Arabidopsis thaliana
ctaggcgaagcggtgga

SEQ ID NO: 85025 - DNA, 17 bp, Arabidopsis thaliana
ctaggcgcagttagttt

SEQ ID NO: 85026 - DNA, 17 bp, Arabidopsis thaliana
ctaggcgctgtgcgtat

SEQ ID NO: 85027 - DNA, 17 bp, Arabidopsis thaliana
ctaggcggaaagactgt

SEQ ID NO: 85028 - DNA, 17 bp, Arabidopsis thaliana
ctaggcggattagtcgg

SEQ ID NO: 85029 - DNA, 17 bp, Arabidopsis thaliana
ctaggcggcgcatagat

SEQ ID NO: 85030 - DNA, 17 bp, Arabidopsis thaliana
ctaggcggcgcgtagat

SEQ ID NO: 85031 - DNA, 17 bp, Arabidopsis thaliana
ctaggcggtctccctac

SEQ ID NO: 85032 - DNA, 17 bp, Arabidopsis thaliana
ctaggcggttttttgga

SEQ ID NO: 85033 - DNA, 17 bp, Arabidopsis thaliana
ctaggctaatcggcttt

SEQ ID NO: 85034 - DNA, 17 bp, Arabidopsis thaliana
ctaggctcaggcctgcg

SEQ ID NO: 85035 - DNA, 17 bp, Arabidopsis thaliana
ctaggctgagacgatga

SEQ ID NO: 85036 - DNA, 17 bp, Arabidopsis thaliana
ctaggcttacagatttc

SEQ ID NO: 85037 - DNA, 17 bp, Arabidopsis thaliana
ctaggcttcggctatta

SEQ ID NO: 85038 - DNA, 17 bp, Arabidopsis thaliana
ctaggctttgaatgttg

SEQ ID NO: 85039 - DNA, 17 bp, Arabidopsis thaliana
ctaggctttgtgaattc

SEQ ID NO: 85040 - DNA, 17 bp, Arabidopsis thaliana
ctaggctttgtggaatt

SEQ ID NO: 85041 - DNA, 17 bp, Arabidopsis thaliana
ctagggatgtcaaaatg

SEQ ID NO: 85042 - DNA, 17 bp, Arabidopsis thaliana
ctagggcacgtctgcct

SEQ ID NO: 85043 - DNA, 17 bp, Arabidopsis thaliana
ctagggccaagagttcg

SEQ ID NO: 85044 - DNA, 17 bp, Arabidopsis thaliana
ctagggcgaacgcaact

SEQ ID NO: 85045 - DNA, 17 bp, Arabidopsis thaliana
ctagggctttcaagatc

SEQ ID NO: 85046 - DNA, 17 bp, Arabidopsis thaliana
ctaggggagattacggg

SEQ ID NO: 85047 - DNA, 17 bp, Arabidopsis thaliana
ctaggggagattatggg

SEQ ID NO: 85048 - DNA, 17 bp, Arabidopsis thaliana
ctaggggattacgggct

SEQ ID NO: 85049 - DNA, 17 bp, Arabidopsis thaliana
ctagggggtagtcaggc

SEQ ID NO: 85050 - DNA, 17 bp, Arabidopsis thaliana
ctaggggtgttatgccg

SEQ ID NO: 85051 - DNA, 17 bp, Arabidopsis thaliana
ctagggtaaatacgatt

SEQ ID NO: 85052 - DNA, 17 bp, Arabidopsis thaliana
ctagggtctttaccaat

SEQ ID NO: 85053 - DNA, 17 bp, Arabidopsis thaliana
ctagggttagaccgtcg

SEQ ID NO: 85054 - DNA, 17 bp, Arabidopsis thaliana
ctagggttcatcaggtg

SEQ ID NO: 85055 - DNA, 17 bp, Arabidopsis thaliana
ctagggtttctgccttt

SEQ ID NO: 85056 - DNA, 17 bp, Arabidopsis thaliana
ctagggtttgctctata

SEQ ID NO: 85057 - DNA, 17 bp, Arabidopsis thaliana
ctagggtttgctcttta

SEQ ID NO: 85058 - DNA, 17 bp, Arabidopsis thaliana
ctagggttttcactgac

SEQ ID NO: 85059 - DNA, 17 bp, Arabidopsis thaliana
ctaggtaatttcgatcg

SEQ ID NO: 85060 - DNA, 17 bp, Arabidopsis thaliana
ctaggtcaccggctcga

SEQ ID NO: 85061 - DNA, 17 bp, Arabidopsis thaliana
ctaggtcagtactcgtg

SEQ ID NO: 85062 - DNA, 17 bp, Arabidopsis thaliana
ctaggtcatgctctgac

SEQ ID NO: 85063 - DNA, 17 bp, Arabidopsis thaliana
ctaggtcatgctggtag

SEQ ID NO: 85064 - DNA, 17 bp, Arabidopsis thaliana
ctaggtccatatcgagc

SEQ ID NO: 85065 - DNA, 17 bp, Arabidopsis thaliana
ctaggtccgagccctct

SEQ ID NO: 85066 - DNA, 17 bp, Arabidopsis thaliana
ctaggtcggggatgagg

SEQ ID NO: 85067 - DNA, 17 bp, Arabidopsis thaliana
ctaggtcggggatgtag

SEQ ID NO: 85068 - DNA, 17 bp, Arabidopsis thaliana
ctaggtctccaacaaag

SEQ ID NO: 85069 - DNA, 17 bp, Arabidopsis thaliana
ctaggtcttctgcaatt

SEQ ID NO: 85070 - DNA, 17 bp, Arabidopsis thaliana
ctaggtcttttggtttc

SEQ ID NO: 85071 - DNA, 17 bp, Arabidopsis thaliana
ctaggtgaggtcgagtg

SEQ ID NO: 85072 - DNA, 17 bp, Arabidopsis thaliana
ctaggtgagtgcccgcg

SEQ ID NO: 85073 - DNA, 17 bp, Arabidopsis thaliana
ctaggtgatcatccgca

SEQ ID NO: 85074 - DNA, 17 bp, Arabidopsis thaliana
ctaggtgatcatccgcg

SEQ ID NO: 85075 - DNA, 17 bp, Arabidopsis thaliana
ctaggtgcaacgttttt

SEQ ID NO: 85076 - DNA, 17 bp, Arabidopsis thaliana
ctaggtgcctgttttaa

SEQ ID NO: 85077 - DNA, 17 bp, Arabidopsis thaliana
ctaggtgcgaaaccgca

SEQ ID NO: 85078 - DNA, 17 bp, Arabidopsis thaliana
ctaggtggggtatccct

SEQ ID NO: 85079 - DNA, 17 bp, Arabidopsis thaliana
ctaggtggtgagtcaga

SEQ ID NO: 85080 - DNA, 17 bp, Arabidopsis thaliana
ctaggttccattaggtt

SEQ ID NO: 85081 - DNA, 17 bp, Arabidopsis thaliana
ctaggttcgaatccttc

SEQ ID NO: 85082 - DNA, 17 bp, Arabidopsis thaliana
ctaggtttcggcttaga

SEQ ID NO: 85083 - DNA, 17 bp, Arabidopsis thaliana
ctaggtttgccaaggtt

SEQ ID NO: 85084 - DNA, 17 bp, Arabidopsis thaliana
ctaggttttgcagcgac

SEQ ID NO: 85085 - DNA, 17 bp, Arabidopsis thaliana
ctagtaagcgcgagtca

SEQ ID NO: 85086 - DNA, 17 bp, Arabidopsis thaliana
ctagtaatcgccggtca

SEQ ID NO: 85087 - DNA, 17 bp, Arabidopsis thaliana
ctagtaatctgctgcta

SEQ ID NO: 85088 - DNA, 17 bp, Arabidopsis thaliana
ctagtaatttgaacagt

SEQ ID NO: 85089 - DNA, 17 bp, Arabidopsis thaliana
ctagtacgagaggaacc

SEQ ID NO: 85090 - DNA, 17 bp, Arabidopsis thaliana
ctagtacgcttgtgcta

SEQ ID NO: 85091 - DNA, 17 bp, Arabidopsis thaliana
ctagtacggttgtgcta

SEQ ID NO: 85092 - DNA, 17 bp, Arabidopsis thaliana
ctagtacgtttgtgcta

SEQ ID NO: 85093 - DNA, 17 bp, Arabidopsis thaliana
ctagtagctagttccct

SEQ ID NO: 85094 - DNA, 17 bp, Arabidopsis thaliana
ctagtagctggttccct

SEQ ID NO: 85095 - DNA, 17 bp, Arabidopsis thaliana
ctagtatcatctgacgt

SEQ ID NO: 85096 - DNA, 17 bp, Arabidopsis thaliana
ctagtatgcgcgagtca

SEQ ID NO: 85097 - DNA, 17 bp, Arabidopsis thaliana
ctagtcacttccttgct

SEQ ID NO: 85098 - DNA, 17 bp, Arabidopsis thaliana
ctagtcagtttcatcgt

SEQ ID NO: 85099 - DNA, 17 bp, Arabidopsis thaliana
ctagtccaccgtctgat

SEQ ID NO: 85100 - DNA, 17 bp, Arabidopsis thaliana
ctagtccatcctgtaga

SEQ ID NO: 85101 - DNA, 17 bp, Arabidopsis thaliana
ctagtcccatcctgtag

SEQ ID NO: 85102 - DNA, 17 bp, Arabidopsis thaliana
ctagtccccatgggccg

SEQ ID NO: 85103 - DNA, 17 bp, Arabidopsis thaliana
ctagtccgaccttgtga

SEQ ID NO: 85104 - DNA, 17 bp, Arabidopsis thaliana
ctagtccgactttgtga

SEQ ID NO: 85105 - DNA, 17 bp, Arabidopsis thaliana
ctagtccgagtagcggc

SEQ ID NO: 85106 - DNA, 17 bp, Arabidopsis thaliana
ctagtccgatttgtgaa

SEQ ID NO: 85107 - DNA, 17 bp, Arabidopsis thaliana
ctagtcgaggatatttt

SEQ ID NO: 85108 - DNA, 17 bp, Arabidopsis thaliana
ctagtcgatcctgtaga

SEQ ID NO: 85109 - DNA, 17 bp, Arabidopsis thaliana
ctagtcgcaacctgtag

SEQ ID NO: 85110 - DNA, 17 bp, Arabidopsis thaliana
ctagtcgcaacctgtat

SEQ ID NO: 85111 - DNA, 17 bp, Arabidopsis thaliana
ctagtcgcacctgtaga

SEQ ID NO: 85112 - DNA, 17 bp, Arabidopsis thaliana
ctagtcgcacctgtagg

SEQ ID NO: 85113 - DNA, 17 bp, Arabidopsis thaliana
ctagtcgcatcctgtag

SEQ ID NO: 85114 - DNA, 17 bp, Arabidopsis thaliana
ctagtcgcatctgtaga

SEQ ID NO: 85115 - DNA, 17 bp, Arabidopsis thaliana
ctagtcgcattctgtag

SEQ ID NO: 85116 - DNA, 17 bp, Arabidopsis thaliana
ctagtcgccctgtagat

SEQ ID NO: 85117 - DNA, 17 bp, Arabidopsis thaliana
ctagtcgctcctgtaga

SEQ ID NO: 85118 - DNA, 17 bp, Arabidopsis thaliana
ctagtcgcttgtagatg

SEQ ID NO: 85119 - DNA, 17 bp, Arabidopsis thaliana
ctagtcgggaagagact

SEQ ID NO: 85120 - DNA, 17 bp, Arabidopsis thaliana
ctagtctccatgggccg

SEQ ID NO: 85121 - DNA, 17 bp, Arabidopsis thaliana
ctagtctcggcggaatc

SEQ ID NO: 85122 - DNA, 17 bp, Arabidopsis thaliana
ctagtctcggtagacgt

SEQ ID NO: 85123 - DNA, 17 bp, Arabidopsis thaliana
ctagtctgcacttttcc

SEQ ID NO: 85124 - DNA, 17 bp, Arabidopsis thaliana
ctagtctgcttaggcgt

SEQ ID NO: 85125 - DNA, 17 bp, Arabidopsis thaliana
ctagtctggatacgcaa

SEQ ID NO: 85126 - DNA, 17 bp, Arabidopsis thaliana
ctagtcttgtgaagtgc

SEQ ID NO: 85127 - DNA, 17 bp, Arabidopsis thaliana
ctagtctttcagaccat

SEQ ID NO: 85128 - DNA, 17 bp, Arabidopsis thaliana
ctagtgaaccacgctac

SEQ ID NO: 85129 - DNA, 17 bp, Arabidopsis thaliana
ctagtgactggttgatc

SEQ ID NO: 85130 - DNA, 17 bp, Arabidopsis thaliana
ctagtgagcacgagtta

SEQ ID NO: 85131 - DNA, 17 bp, Arabidopsis thaliana
ctagtgatctgagactg

SEQ ID NO: 85132 - DNA, 17 bp, Arabidopsis thaliana
ctagtgcaccgggtccc

SEQ ID NO: 85133 - DNA, 17 bp, Arabidopsis thaliana
ctagtgcatcctgtaga

SEQ ID NO: 85134 - DNA, 17 bp, Arabidopsis thaliana
ctagtgcattggtcggc

SEQ ID NO: 85135 - DNA, 17 bp, Arabidopsis thaliana
ctagtgcggttgcaagg

SEQ ID NO: 85136 - DNA, 17 bp, Arabidopsis thaliana
ctagtggatggtggctg

SEQ ID NO: 85137 - DNA, 17 bp, Arabidopsis thaliana
ctagtggcgatcgacac

SEQ ID NO: 85138 - DNA, 17 bp, Arabidopsis thaliana
ctagtggtatgattctc

SEQ ID NO: 85139 - DNA, 17 bp, Arabidopsis thaliana
ctagtgtatagggaagc

SEQ ID NO: 85140 - DNA, 17 bp, Arabidopsis thaliana
ctagtgtctcagaccat

SEQ ID NO: 85141 - DNA, 17 bp, Arabidopsis thaliana
ctagtgttcgtaaggtt

SEQ ID NO: 85142 - DNA, 17 bp, Arabidopsis thaliana
ctagtgttgaccggcgt

SEQ ID NO: 85143 - DNA, 17 bp, Arabidopsis thaliana
ctagtgttggtgagtag

SEQ ID NO: 85144 - DNA, 17 bp, Arabidopsis thaliana
ctagtgttgtgtccagc

SEQ ID NO: 85145 - DNA, 17 bp, Arabidopsis thaliana
ctagttaacggccgtta

SEQ ID NO: 85146 - DNA, 17 bp, Arabidopsis thaliana
ctagttagtttgcgaag

SEQ ID NO: 85147 - DNA, 17 bp, Arabidopsis thaliana
ctagttcaacactgagg

SEQ ID NO: 85148 - DNA, 17 bp, Arabidopsis thaliana
ctagttccttacaggag

SEQ ID NO: 85149 - DNA, 17 bp, Arabidopsis thaliana
ctagttcgttcctcgcc

SEQ ID NO: 85150 - DNA, 17 bp, Arabidopsis thaliana
ctagttgccacgagcat

SEQ ID NO: 85151 - DNA, 17 bp, Arabidopsis thaliana
ctagttgccacgaggat

SEQ ID NO: 85152 - DNA, 17 bp, Arabidopsis thaliana
ctagttgctcgatcagg

SEQ ID NO: 85153 - DNA, 17 bp, Arabidopsis thaliana
ctagttgctggttgggc

SEQ ID NO: 85154 - DNA, 17 bp, Arabidopsis thaliana
ctagttggagttggact

SEQ ID NO: 85155 - DNA, 17 bp, Arabidopsis thaliana
ctagttgtcaaccgatg

SEQ ID NO: 85156 - DNA, 17 bp, Arabidopsis thaliana
ctagtttaattccgcag

SEQ ID NO: 85157 - DNA, 17 bp, Arabidopsis thaliana
ctagtttccaaccggtt

SEQ ID NO: 85158 - DNA, 17 bp, Arabidopsis thaliana
ctagtttgccttgttga

SEQ ID NO: 85159 - DNA, 17 bp, Arabidopsis thaliana
ctagtttgtcctgacag

SEQ ID NO: 85160 - DNA, 17 bp, Arabidopsis thaliana
ctagtttgttgtttgct

SEQ ID NO: 85161 - DNA, 17 bp, Arabidopsis thaliana
ctagttttattccgcag

SEQ ID NO: 85162 - DNA, 17 bp, Arabidopsis thaliana
ctagtttttgggttaag

SEQ ID NO: 85163 - DNA, 17 bp, Arabidopsis thaliana
ctataaaatcgtcaatc

SEQ ID NO: 85164 - DNA, 17 bp, Arabidopsis thaliana
ctataaacattcgttga

SEQ ID NO: 85165 - DNA, 17 bp, Arabidopsis thaliana
ctataaacgcgtcttgg

SEQ ID NO: 85166 - DNA, 17 bp, Arabidopsis thaliana
ctataacttctataccg

SEQ ID NO: 85167 - DNA, 17 bp, Arabidopsis thaliana
ctataacttttagaccg

SEQ ID NO: 85168 - DNA, 17 bp, Arabidopsis thaliana
ctataagttatcgttga

SEQ ID NO: 85169 - DNA, 17 bp, Arabidopsis thaliana
ctataatcatcgatcgg

SEQ ID NO: 85170 - DNA, 17 bp, Arabidopsis thaliana
ctataatgtcctaagcc

SEQ ID NO: 85171 - DNA, 17 bp, Arabidopsis thaliana
ctataatttaccggcga

SEQ ID NO: 85172 - DNA, 17 bp, Arabidopsis thaliana
ctatacaaagccacgtc

SEQ ID NO: 85173 - DNA, 17 bp, Arabidopsis thaliana
ctatacaatggcggtcc

SEQ ID NO: 85174 - DNA, 17 bp, Arabidopsis thaliana
ctataccccgtcgtcgg

SEQ ID NO: 85175 - DNA, 17 bp, Arabidopsis thaliana
ctatacccggccgtcgg

SEQ ID NO: 85176 - DNA, 17 bp, Arabidopsis thaliana
ctataccgcaggacgat

SEQ ID NO: 85177 - DNA, 17 bp, Arabidopsis thaliana
ctatacgaactcgaatg

SEQ ID NO: 85178 - DNA, 17 bp, Arabidopsis thaliana
ctatacgagtcgtgcag

SEQ ID NO: 85179 - DNA, 17 bp, Arabidopsis thaliana
ctatacgcctagtgcgt

SEQ ID NO: 85180 - DNA, 17 bp, Arabidopsis thaliana
ctatacggttgcgcaat

SEQ ID NO: 85181 - DNA, 17 bp, Arabidopsis thaliana
ctatactagattttgac

SEQ ID NO: 85182 - DNA, 17 bp, Arabidopsis thaliana
ctatagattgacccgcg

SEQ ID NO: 85183 - DNA, 17 bp, Arabidopsis thaliana
ctataggctttcatcgt

SEQ ID NO: 85184 - DNA, 17 bp, Arabidopsis thaliana
ctataggtgtgaaggca

SEQ ID NO: 85185 - DNA, 17 bp, Arabidopsis thaliana
ctatatcggtgcgagcg

SEQ ID NO: 85186 - DNA, 17 bp, Arabidopsis thaliana
ctatatcgttccagtca

SEQ ID NO: 85187 - DNA, 17 bp, Arabidopsis thaliana
ctatatgaaaatcgcgg

SEQ ID NO: 85188 - DNA, 17 bp, Arabidopsis thaliana
ctatattctcaggtgct

SEQ ID NO: 85189 - DNA, 17 bp, Arabidopsis thaliana
ctatattctctaaatgc

SEQ ID NO: 85190 - DNA, 17 bp, Arabidopsis thaliana
ctatattgtgcgttcta

SEQ ID NO: 85191 - DNA, 17 bp, Arabidopsis thaliana
ctatcaaagtggatgag

SEQ ID NO: 85192 - DNA, 17 bp, Arabidopsis thaliana
ctatcaaatgtctctgc

SEQ ID NO: 85193 - DNA, 17 bp, Arabidopsis thaliana
ctatcaacctgagtcat

SEQ ID NO: 85194 - DNA, 17 bp, Arabidopsis thaliana
ctatcaacggtcctgtc

SEQ ID NO: 85195 - DNA, 17 bp, Arabidopsis thaliana
ctatcaacggttctgtc

SEQ ID NO: 85196 - DNA, 17 bp, Arabidopsis thaliana
ctatcaagatttggcca

SEQ ID NO: 85197 - DNA, 17 bp, Arabidopsis thaliana
ctatcacaggtttggtc

SEQ ID NO: 85198 - DNA, 17 bp, Arabidopsis thaliana
ctatcaccctgtccgat

SEQ ID NO: 85199 - DNA, 17 bp, Arabidopsis thaliana
ctatcaccggggactgc

SEQ ID NO: 85200 - DNA, 17 bp, Arabidopsis thaliana
ctatcagaagctgcacg

SEQ ID NO: 85201 - DNA, 17 bp, Arabidopsis thaliana
ctatcagaagctgtacg

SEQ ID NO: 85202 - DNA, 17 bp, Arabidopsis thaliana
ctatcagcctgcgacca

SEQ ID NO: 85203 - DNA, 17 bp, Arabidopsis thaliana
ctatcagcggagatagg

SEQ ID NO: 85204 - DNA, 17 bp, Arabidopsis thaliana
ctatcaggagcttggaa

SEQ ID NO: 85205 - DNA, 17 bp, Arabidopsis thaliana
ctatcaggttttaggtc

SEQ ID NO: 85206 - DNA, 17 bp, Arabidopsis thaliana
ctatcagtatcttttcc

SEQ ID NO: 85207 - DNA, 17 bp, Arabidopsis thaliana
ctatcagttgcttgacc

SEQ ID NO: 85208 - DNA, 17 bp, Arabidopsis thaliana
ctatcagttgtgctttg

SEQ ID NO: 85209 - DNA, 17 bp, Arabidopsis thaliana
ctatcatctaatcccgt

SEQ ID NO: 85210 - DNA, 17 bp, Arabidopsis thaliana
ctatcatctcttggaga

SEQ ID NO: 85211 - DNA, 17 bp, Arabidopsis thaliana
ctatcatctgacgtggt

SEQ ID NO: 85212 - DNA, 17 bp, Arabidopsis thaliana
ctatcatgaaccgccag

SEQ ID NO: 85213 - DNA, 17 bp, Arabidopsis thaliana
ctatccaaaggatgggg

SEQ ID NO: 85214 - DNA, 17 bp, Arabidopsis thaliana
ctatccaactccacgtg

SEQ ID NO: 85215 - DNA, 17 bp, Arabidopsis thaliana
ctatccaagtagcactt

SEQ ID NO: 85216 - DNA, 17 bp, Arabidopsis thaliana
ctatccacctccgcaag

SEQ ID NO: 85217 - DNA, 17 bp, Arabidopsis thaliana
ctatccagaaccgtgcc

SEQ ID NO: 85218 - DNA, 17 bp, Arabidopsis thaliana
ctatccagcgaaaccac

SEQ ID NO: 85219 - DNA, 17 bp, Arabidopsis thaliana
ctatccagggattgaat

SEQ ID NO: 85220 - DNA, 17 bp, Arabidopsis thaliana
ctatccagggcctggag

SEQ ID NO: 85221 - DNA, 17 bp, Arabidopsis thaliana
ctatccatcgaaaccac

SEQ ID NO: 85222 - DNA, 17 bp, Arabidopsis thaliana
ctatcccatttacgaac

SEQ ID NO: 85223 - DNA, 17 bp, Arabidopsis thaliana
ctatccccgtgtgctat

SEQ ID NO: 85224 - DNA, 17 bp, Arabidopsis thaliana
ctatcccgcagggacat

SEQ ID NO: 85225 - DNA, 17 bp, Arabidopsis thaliana
ctatcccgtatgctcag

SEQ ID NO: 85226 - DNA, 17 bp, Arabidopsis thaliana
ctatccgattggagcca

SEQ ID NO: 85227 - DNA, 17 bp, Arabidopsis thaliana
ctatccgcaacctttgt

SEQ ID NO: 85228 - DNA, 17 bp, Arabidopsis thaliana
ctatccggcaatctgac

SEQ ID NO: 85229 - DNA, 17 bp, Arabidopsis thaliana
ctatccggtttaaggct

SEQ ID NO: 85230 - DNA, 17 bp, Arabidopsis thaliana
ctatccgtatccggaac

SEQ ID NO: 85231 - DNA, 17 bp, Arabidopsis thaliana
ctatccgtatgctcaga

SEQ ID NO: 85232 - DNA, 17 bp, Arabidopsis thaliana
ctatccttcgtttgcag

SEQ ID NO: 85233 - DNA, 17 bp, Arabidopsis thaliana
ctatccttctctgttgt

SEQ ID NO: 85234 - DNA, 17 bp, Arabidopsis thaliana
ctatccttctgattcca

SEQ ID NO: 85235 - DNA, 17 bp, Arabidopsis thaliana
ctatccttggtcgtcta

SEQ ID NO: 85236 - DNA, 17 bp, Arabidopsis thaliana
ctatcgactgatccgct

SEQ ID NO: 85237 - DNA, 17 bp, Arabidopsis thaliana
ctatcgaggataaccga

SEQ ID NO: 85238 - DNA, 17 bp, Arabidopsis thaliana
ctatcgcagaccaacaa

SEQ ID NO: 85239 - DNA, 17 bp, Arabidopsis thaliana
ctatcgcagcctcggag

SEQ ID NO: 85240 - DNA, 17 bp, Arabidopsis thaliana
ctatcggattcgtcact

SEQ ID NO: 85241 - DNA, 17 bp, Arabidopsis thaliana
ctatcggctgattcggt

SEQ ID NO: 85242 - DNA, 17 bp, Arabidopsis thaliana
ctatcggctgcaacatc

SEQ ID NO: 85243 - DNA, 17 bp, Arabidopsis thaliana
ctatcggtttcgactcg

SEQ ID NO: 85244 - DNA, 17 bp, Arabidopsis thaliana
ctatcgtacgcctccaa

SEQ ID NO: 85245 - DNA, 17 bp, Arabidopsis thaliana
ctatcgtggaccttttc

SEQ ID NO: 85246 - DNA, 17 bp, Arabidopsis thaliana
ctatcgtgttggccttc

SEQ ID NO: 85247 - DNA, 17 bp, Arabidopsis thaliana
ctatcgtttgatggcag

SEQ ID NO: 85248 - DNA, 17 bp, Arabidopsis thaliana
ctatctaccgttggtgt

SEQ ID NO: 85249 - DNA, 17 bp, Arabidopsis thaliana
ctatctagtccggatag

SEQ ID NO: 85250 - DNA, 17 bp, Arabidopsis thaliana
ctatctatgaccaggat

SEQ ID NO: 85251 - DNA, 17 bp, Arabidopsis thaliana
ctatctcagaccggtgt

SEQ ID NO: 85252 - DNA, 17 bp, Arabidopsis thaliana
ctatctcagtagccgtc

SEQ ID NO: 85253 - DNA, 17 bp, Arabidopsis thaliana
ctatctcatttttgggg

SEQ ID NO: 85254 - DNA, 17 bp, Arabidopsis thaliana
ctatctccctcaagaag

SEQ ID NO: 85255 - DNA, 17 bp, Arabidopsis thaliana
ctatctccttcacttgc

SEQ ID NO: 85256 - DNA, 17 bp, Arabidopsis thaliana
ctatctcgcctttttct

SEQ ID NO: 85257 - DNA, 17 bp, Arabidopsis thaliana
ctatctctccgacatgg

SEQ ID NO: 85258 - DNA, 17 bp, Arabidopsis thaliana
ctatctctgttttgcca

SEQ ID NO: 85259 - DNA, 17 bp, Arabidopsis thaliana
ctatctcttcagatctg

SEQ ID NO: 85260 - DNA, 17 bp, Arabidopsis thaliana
ctatctctttccatcac

SEQ ID NO: 85261 - DNA, 17 bp, Arabidopsis thaliana
ctatctgacgtgatgtc

SEQ ID NO: 85262 - DNA, 17 bp, Arabidopsis thaliana
ctatctgattcgatggg

SEQ ID NO: 85263 - DNA, 17 bp, Arabidopsis thaliana
ctatctgcacaacgcta

SEQ ID NO: 85264 - DNA, 17 bp, Arabidopsis thaliana
ctatctgcagtccggtg

SEQ ID NO: 85265 - DNA, 17 bp, Arabidopsis thaliana
ctatctgccatgatcga

SEQ ID NO: 85266 - DNA, 17 bp, Arabidopsis thaliana
ctatctggtgtgagctc

SEQ ID NO: 85267 - DNA, 17 bp, Arabidopsis thaliana
ctatctgtggtgttgga

SEQ ID NO: 85268 - DNA, 17 bp, Arabidopsis thaliana
ctatctgtggtgttggt

SEQ ID NO: 85269 - DNA, 17 bp, Arabidopsis thaliana
ctatcttaaccagatct

SEQ ID NO: 85270 - DNA, 17 bp, Arabidopsis thaliana
ctatcttcaccaggtct

SEQ ID NO: 85271 - DNA, 17 bp, Arabidopsis thaliana
ctatcttccaactcgtc

SEQ ID NO: 85272 - DNA, 17 bp, Arabidopsis thaliana
ctatcttcctgacgaga

SEQ ID NO: 85273 - DNA, 17 bp, Arabidopsis thaliana
ctatcttcgtgccggct

SEQ ID NO: 85274 - DNA, 17 bp, Arabidopsis thaliana
ctatcttgggattagcc

SEQ ID NO: 85275 - DNA, 17 bp, Arabidopsis thaliana
ctatctttagcggccga

SEQ ID NO: 85276 - DNA, 17 bp, Arabidopsis thaliana
ctatcttttgggcttag

SEQ ID NO: 85277 - DNA, 17 bp, Arabidopsis thaliana
ctatgaacggcctatct

SEQ ID NO: 85278 - DNA, 17 bp, Arabidopsis thaliana
ctatgaccaggatgaag

SEQ ID NO: 85279 - DNA, 17 bp, Arabidopsis thaliana
ctatgactacgtcccag

SEQ ID NO: 85280 - DNA, 17 bp, Arabidopsis thaliana
ctatgactcacacaaaa

SEQ ID NO: 85281 - DNA, 17 bp, Arabidopsis thaliana
ctatgactgaacgcctc

SEQ ID NO: 85282 - DNA, 17 bp, Arabidopsis thaliana
ctatgagaccatcttca

SEQ ID NO: 85283 - DNA, 17 bp, Arabidopsis thaliana
ctatgagacttgctcct

SEQ ID NO: 85284 - DNA, 17 bp, Arabidopsis thaliana
ctatgagattacgagtt

SEQ ID NO: 85285 - DNA, 17 bp, Arabidopsis thaliana
ctatgagtcatggacag

SEQ ID NO: 85286 - DNA, 17 bp, Arabidopsis thaliana
ctatgatctccggagat

SEQ ID NO: 85287 - DNA, 17 bp, Arabidopsis thaliana
ctatgattatggcattc

SEQ ID NO: 85288 - DNA, 17 bp, Arabidopsis thaliana
ctatgattccttgcgac

SEQ ID NO: 85289 - DNA, 17 bp, Arabidopsis thaliana
ctatgattcgcttgtgg

SEQ ID NO: 85290 - DNA, 17 bp, Arabidopsis thaliana
ctatgattgttttgttt

SEQ ID NO: 85291 - DNA, 17 bp, Arabidopsis thaliana
ctatgcagaaccgtgcc

SEQ ID NO: 85292 - DNA, 17 bp, Arabidopsis thaliana
ctatgcatgcaggagcg

SEQ ID NO: 85293 - DNA, 17 bp, Arabidopsis thaliana
ctatgccaaaggttttc

SEQ ID NO: 85294 - DNA, 17 bp, Arabidopsis thaliana
ctatgccgctatggttt

SEQ ID NO: 85295 - DNA, 17 bp, Arabidopsis thaliana
ctatgccgggttatgcg

SEQ ID NO: 85296 - DNA, 17 bp, Arabidopsis thaliana
ctatgcgactgccgtgt

SEQ ID NO: 85297 - DNA, 17 bp, Arabidopsis thaliana
ctatgcgctgctcggag

SEQ ID NO: 85298 - DNA, 17 bp, Arabidopsis thaliana
ctatgcgggataacgcg

SEQ ID NO: 85299 - DNA, 17 bp, Arabidopsis thaliana
ctatggaagaccccctg

SEQ ID NO: 85300 - DNA, 17 bp, Arabidopsis thaliana
ctatggaccacgttgtc

SEQ ID NO: 85301 - DNA, 17 bp, Arabidopsis thaliana
ctatggatcggactttg

SEQ ID NO: 85302 - DNA, 17 bp, Arabidopsis thaliana
ctatggatcttcttcct

SEQ ID NO: 85303 - DNA, 17 bp, Arabidopsis thaliana
ctatggatggtgtcctc

SEQ ID NO: 85304 - DNA, 17 bp, Arabidopsis thaliana
ctatggccctgttcgtt

SEQ ID NO: 85305 - DNA, 17 bp, Arabidopsis thaliana
ctatggccgttaggcaa

SEQ ID NO: 85306 - DNA, 17 bp, Arabidopsis thaliana
ctatggccgttcgccag

SEQ ID NO: 85307 - DNA, 17 bp, Arabidopsis thaliana
ctatggcgactgagaga

SEQ ID NO: 85308 - DNA, 17 bp, Arabidopsis thaliana
ctatggcggcaagttgg

SEQ ID NO: 85309 - DNA, 17 bp, Arabidopsis thaliana
ctatggctatgccggtg

SEQ ID NO: 85310 - DNA, 17 bp, Arabidopsis thaliana
ctatggcttatgatcag

SEQ ID NO: 85311 - DNA, 17 bp, Arabidopsis thaliana
ctatgggacctgctaat

SEQ ID NO: 85312 - DNA, 17 bp, Arabidopsis thaliana
ctatggggtcgcttctg

SEQ ID NO: 85313 - DNA, 17 bp, Arabidopsis thaliana
ctatggggtcgcttctt

SEQ ID NO: 85314 - DNA, 17 bp, Arabidopsis thaliana
ctatgggtagtggtgca

SEQ ID NO: 85315 - DNA, 17 bp, Arabidopsis thaliana
ctatgggtctttctgcg

SEQ ID NO: 85316 - DNA, 17 bp, Arabidopsis thaliana
ctatgggtggggctgca

SEQ ID NO: 85317 - DNA, 17 bp, Arabidopsis thaliana
ctatgggtggtggggca

SEQ ID NO: 85318 - DNA, 17 bp, Arabidopsis thaliana
ctatgggtggtggtcca

SEQ ID NO: 85319 - DNA, 17 bp, Arabidopsis thaliana
ctatgggtggtggtccg

SEQ ID NO: 85320 - DNA, 17 bp, Arabidopsis thaliana
ctatgggtggtggtgca

SEQ ID NO: 85321 - DNA, 17 bp, Arabidopsis thaliana
ctatgggtggtggtgcg

SEQ ID NO: 85322 - DNA, 17 bp, Arabidopsis thaliana
ctatgggtggtggtgct

SEQ ID NO: 85323 - DNA, 17 bp, Arabidopsis thaliana
ctatgggtggttgtgca

SEQ ID NO: 85324 - DNA, 17 bp, Arabidopsis thaliana
ctatggttatccacaga

SEQ ID NO: 85325 - DNA, 17 bp, Arabidopsis thaliana
ctatggttgcctctccg

SEQ ID NO: 85326 - DNA, 17 bp, Arabidopsis thaliana
ctatgtaactcagggat

SEQ ID NO: 85327 - DNA, 17 bp, Arabidopsis thaliana
ctatgtacccgtcagtt

SEQ ID NO: 85328 - DNA, 17 bp, Arabidopsis thaliana
ctatgtcaccattcatg

SEQ ID NO: 85329 - DNA, 17 bp, Arabidopsis thaliana
ctatgtcacgtttcagg

SEQ ID NO: 85330 - DNA, 17 bp, Arabidopsis thaliana
ctatgtcaggttctcag

SEQ ID NO: 85331 - DNA, 17 bp, Arabidopsis thaliana
ctatgtcctaactaagc

SEQ ID NO: 85332 - DNA, 17 bp, Arabidopsis thaliana
ctatgtcctctaggtat

SEQ ID NO: 85333 - DNA, 17 bp, Arabidopsis thaliana
ctatgtcgacgatgttg

SEQ ID NO: 85334 - DNA, 17 bp, Arabidopsis thaliana
ctatgtcgccacgggat

SEQ ID NO: 85335 - DNA, 17 bp, Arabidopsis thaliana
ctatgtctgtagccgac

SEQ ID NO: 85336 - DNA, 17 bp, Arabidopsis thaliana
ctatgtcttctaagtct

SEQ ID NO: 85337 - DNA, 17 bp, Arabidopsis thaliana
ctatgtctttgatttgc

SEQ ID NO: 85338 - DNA, 17 bp, Arabidopsis thaliana
ctatgtgatctaggagc

SEQ ID NO: 85339 - DNA, 17 bp, Arabidopsis thaliana
ctatgtgcataggtggc

SEQ ID NO: 85340 - DNA, 17 bp, Arabidopsis thaliana
ctatgtgctgctcggag

SEQ ID NO: 85341 - DNA, 17 bp, Arabidopsis thaliana
ctatgttccaagggttg

SEQ ID NO: 85342 - DNA, 17 bp, Arabidopsis thaliana
ctatgttgccagttcac

SEQ ID NO: 85343 - DNA, 17 bp, Arabidopsis thaliana
ctatgtttacaagaatc

SEQ ID NO: 85344 - DNA, 17 bp, Arabidopsis thaliana
ctatgtttgatcctgct

SEQ ID NO: 85345 - DNA, 17 bp, Arabidopsis thaliana
ctattaagaccctgttt

SEQ ID NO: 85346 - DNA, 17 bp, Arabidopsis thaliana
ctattacacctagccgg

SEQ ID NO: 85347 - DNA, 17 bp, Arabidopsis thaliana
ctattacagtgggtgga

SEQ ID NO: 85348 - DNA, 17 bp, Arabidopsis thaliana
ctattaccaggtaggtt

SEQ ID NO: 85349 - DNA, 17 bp, Arabidopsis thaliana
ctattacgagagaagct

SEQ ID NO: 85350 - DNA, 17 bp, Arabidopsis thaliana
ctattacgctcttctgc

SEQ ID NO: 85351 - DNA, 17 bp, Arabidopsis thaliana
ctattagctggaccgtt

SEQ ID NO: 85352 - DNA, 17 bp, Arabidopsis thaliana
ctattagcttaggcagc

SEQ ID NO: 85353 - DNA, 17 bp, Arabidopsis thaliana
ctattagctttcaccat

SEQ ID NO: 85354 - DNA, 17 bp, Arabidopsis thaliana
ctattagtaggcccagg

SEQ ID NO: 85355 - DNA, 17 bp, Arabidopsis thaliana
ctattatgcttgatttg

SEQ ID NO: 85356 - DNA, 17 bp, Arabidopsis thaliana
ctattcagagccgtgcc

SEQ ID NO: 85357 - DNA, 17 bp, Arabidopsis thaliana
ctattcagtaacagtgc

SEQ ID NO: 85358 - DNA, 17 bp, Arabidopsis thaliana
ctattcagtgaccaaag

SEQ ID NO: 85359 - DNA, 17 bp, Arabidopsis thaliana
ctattcattctctggat

SEQ ID NO: 85360 - DNA, 17 bp, Arabidopsis thaliana
ctattccacagggacaa

SEQ ID NO: 85361 - DNA, 17 bp, Arabidopsis thaliana
ctattccacatcagttt

SEQ ID NO: 85362 - DNA, 17 bp, Arabidopsis thaliana
ctattcccttcgcaatt

SEQ ID NO: 85363 - DNA, 17 bp, Arabidopsis thaliana
ctattccgctatgggtt

SEQ ID NO: 85364 - DNA, 17 bp, Arabidopsis thaliana
ctattcctctcaggtct

SEQ ID NO: 85365 - DNA, 17 bp, Arabidopsis thaliana
ctattcgacaggtatcc

SEQ ID NO: 85366 - DNA, 17 bp, Arabidopsis thaliana
ctattcgacaggtatgc

SEQ ID NO: 85367 - DNA, 17 bp, Arabidopsis thaliana
ctattcgaccggcatgt

SEQ ID NO: 85368 - DNA, 17 bp, Arabidopsis thaliana
ctattcgattcgtatgc

SEQ ID NO: 85369 - DNA, 17 bp, Arabidopsis thaliana
ctattcggttgcacaat

SEQ ID NO: 85370 - DNA, 17 bp, Arabidopsis thaliana
ctattcgtcggcgaaca

SEQ ID NO: 85371 - DNA, 17 bp, Arabidopsis thaliana
ctattcgtcggcgaaga

SEQ ID NO: 85372 - DNA, 17 bp, Arabidopsis thaliana
ctattcgtttaggacat

SEQ ID NO: 85373 - DNA, 17 bp, Arabidopsis thaliana
ctattctaccatgaccg

SEQ ID NO: 85374 - DNA, 17 bp, Arabidopsis thaliana
ctattctcgtccgactt

SEQ ID NO: 85375 - DNA, 17 bp, Arabidopsis thaliana
ctattctgcacgagatc

SEQ ID NO: 85376 - DNA, 17 bp, Arabidopsis thaliana
ctattctgttgggttgt

SEQ ID NO: 85377 - DNA, 17 bp, Arabidopsis thaliana
ctattcttagccaagct

SEQ ID NO: 85378 - DNA, 17 bp, Arabidopsis thaliana
ctattgacacgtggagt

SEQ ID NO: 85379 - DNA, 17 bp, Arabidopsis thaliana
ctattgacaggctataa

SEQ ID NO: 85380 - DNA, 17 bp, Arabidopsis thaliana
ctattgactttttgtcg

SEQ ID NO: 85381 - DNA, 17 bp, Arabidopsis thaliana
ctattgactttttgtga

SEQ ID NO: 85382 - DNA, 17 bp, Arabidopsis thaliana
ctattgcaccttcattg

SEQ ID NO: 85383 - DNA, 17 bp, Arabidopsis thaliana
ctattgcacgggcttgg

SEQ ID NO: 85384 - DNA, 17 bp, Arabidopsis thaliana
ctattgccgacttcact

SEQ ID NO: 85385 - DNA, 17 bp, Arabidopsis thaliana
ctattgccgacttcagt

SEQ ID NO: 85386 - DNA, 17 bp, Arabidopsis thaliana
ctattgcgatacggagg

SEQ ID NO: 85387 - DNA, 17 bp, Arabidopsis thaliana
ctattgcgatacgtagg

SEQ ID NO: 85388 - DNA, 17 bp, Arabidopsis thaliana
ctattgcggtgcagttt

SEQ ID NO: 85389 - DNA, 17 bp, Arabidopsis thaliana
ctattgctaagccggct

SEQ ID NO: 85390 - DNA, 17 bp, Arabidopsis thaliana
ctattggaccgcagtca

SEQ ID NO: 85391 - DNA, 17 bp, Arabidopsis thaliana
ctattggagctggaatt

SEQ ID NO: 85392 - DNA, 17 bp, Arabidopsis thaliana
ctattggatgagggtaa

SEQ ID NO: 85393 - DNA, 17 bp, Arabidopsis thaliana
ctattggatttgagctt

SEQ ID NO: 85394 - DNA, 17 bp, Arabidopsis thaliana
ctattggcagggttggc

SEQ ID NO: 85395 - DNA, 17 bp, Arabidopsis thaliana
ctattggccacagtcca

SEQ ID NO: 85396 - DNA, 17 bp, Arabidopsis thaliana
ctattggccacagttca

SEQ ID NO: 85397 - DNA, 17 bp, Arabidopsis thaliana
ctattggcctggttcac

SEQ ID NO: 85398 - DNA, 17 bp, Arabidopsis thaliana
ctattggctattacagt

SEQ ID NO: 85399 - DNA, 17 bp, Arabidopsis thaliana
ctattgggacctcctca

SEQ ID NO: 85400 - DNA, 17 bp, Arabidopsis thaliana
ctattgggccaaggggg

SEQ ID NO: 85401 - DNA, 17 bp, Arabidopsis thaliana
ctattggtgctattgtt

SEQ ID NO: 85402 - DNA, 17 bp, Arabidopsis thaliana
ctattgtgaaaggtgct

SEQ ID NO: 85403 - DNA, 17 bp, Arabidopsis thaliana
ctattgtgttggccttc

SEQ ID NO: 85404 - DNA, 17 bp, Arabidopsis thaliana
ctattgtgtttcgagcc

SEQ ID NO: 85405 - DNA, 17 bp, Arabidopsis thaliana
ctatttcctatatgtgg

SEQ ID NO: 85406 - DNA, 17 bp, Arabidopsis thaliana
ctatttcctcttgagca

SEQ ID NO: 85407 - DNA, 17 bp, Arabidopsis thaliana
ctatttcgttcgtgttg

SEQ ID NO: 85408 - DNA, 17 bp, Arabidopsis thaliana
ctatttctcagctgttg

SEQ ID NO: 85409 - DNA, 17 bp, Arabidopsis thaliana
ctatttctgctaagttg

SEQ ID NO: 85410 - DNA, 17 bp, Arabidopsis thaliana
ctatttcttcctacggt

SEQ ID NO: 85411 - DNA, 17 bp, Arabidopsis thaliana
ctatttcttcctacgtt

SEQ ID NO: 85412 - DNA, 17 bp, Arabidopsis thaliana
ctatttctttagcgacg

SEQ ID NO: 85413 - DNA, 17 bp, Arabidopsis thaliana
ctatttgaaccgcaccg

SEQ ID NO: 85414 - DNA, 17 bp, Arabidopsis thaliana
ctatttgagtgacgctt

SEQ ID NO: 85415 - DNA, 17 bp, Arabidopsis thaliana
ctatttgatccgcttaa

SEQ ID NO: 85416 - DNA, 17 bp, Arabidopsis thaliana
ctatttgccgtgatgtg

SEQ ID NO: 85417 - DNA, 17 bp, Arabidopsis thaliana
ctatttgctcggcctca

SEQ ID NO: 85418 - DNA, 17 bp, Arabidopsis thaliana
ctatttgcttcttaagc

SEQ ID NO: 85419 - DNA, 17 bp, Arabidopsis thaliana
ctatttggcgtgatgtg

SEQ ID NO: 85420 - DNA, 17 bp, Arabidopsis thaliana
ctatttgggttttgatt

SEQ ID NO: 85421 - DNA, 17 bp, Arabidopsis thaliana
ctatttgtctacgattg

SEQ ID NO: 85422 - DNA, 17 bp, Arabidopsis thaliana
ctatttgtgatagttac

SEQ ID NO: 85423 - DNA, 17 bp, Arabidopsis thaliana
ctatttgtgatgggcgt

SEQ ID NO: 85424 - DNA, 17 bp, Arabidopsis thaliana
ctatttgtgtttgggcc

SEQ ID NO: 85425 - DNA, 17 bp, Arabidopsis thaliana
ctatttgtttttgctgc

SEQ ID NO: 85426 - DNA, 17 bp, Arabidopsis thaliana
ctattttaacaggtttc

SEQ ID NO: 85427 - DNA, 17 bp, Arabidopsis thaliana
ctattttatcgtggtgc

SEQ ID NO: 85428 - DNA, 17 bp, Arabidopsis thaliana
ctattttatcgtggttc

SEQ ID NO: 85429 - DNA, 17 bp, Arabidopsis thaliana
ctattttatcgtggttg

SEQ ID NO: 85430 - DNA, 17 bp, Arabidopsis thaliana
ctattttcgcagcttcc

SEQ ID NO: 85431 - DNA, 17 bp, Arabidopsis thaliana
ctattttgacggagttt

SEQ ID NO: 85432 - DNA, 17 bp, Arabidopsis thaliana
ctattttgcttaggtgt

SEQ ID NO: 85433 - DNA, 17 bp, Arabidopsis thaliana
ctattttggcctggtca

SEQ ID NO: 85434 - DNA, 17 bp, Arabidopsis thaliana
ctattttggtccacaga

SEQ ID NO: 85435 - DNA, 17 bp, Arabidopsis thaliana
ctatttttacggactgt

SEQ ID NO: 85436 - DNA, 17 bp, Arabidopsis thaliana
ctatttttactcctacg

SEQ ID NO: 85437 - DNA, 17 bp, Arabidopsis thaliana
ctatttttggacggaca

SEQ ID NO: 85438 - DNA, 17 bp, Arabidopsis thaliana
ctattttttcagcgaca

SEQ ID NO: 85439 - DNA, 17 bp, Arabidopsis thaliana
ctcaaaaacctcctcat

SEQ ID NO: 85440 - DNA, 17 bp, Arabidopsis thaliana
ctcaaaaatccctgatc

SEQ ID NO: 85441 - DNA, 17 bp, Arabidopsis thaliana
ctcaaaaccgcaccgca

SEQ ID NO: 85442 - DNA, 17 bp, Arabidopsis thaliana
ctcaaaacctgttgctt

SEQ ID NO: 85443 - DNA, 17 bp, Arabidopsis thaliana
ctcaaaagaaactctct

SEQ ID NO: 85444 - DNA, 17 bp, Arabidopsis thaliana
ctcaaaatcctagcagc

SEQ ID NO: 85445 - DNA, 17 bp, Arabidopsis thaliana
ctcaaaattgattccag

SEQ ID NO: 85446 - DNA, 17 bp, Arabidopsis thaliana
ctcaaacatctgcttgg

SEQ ID NO: 85447 - DNA, 17 bp, Arabidopsis thaliana
ctcaaacgacgttgttt

SEQ ID NO: 85448 - DNA, 17 bp, Arabidopsis thaliana
ctcaaactctgtaggat

SEQ ID NO: 85449 - DNA, 17 bp, Arabidopsis thaliana
ctcaaacttgatctttc

SEQ ID NO: 85450 - DNA, 17 bp, Arabidopsis thaliana
ctcaaacttggccctgt

SEQ ID NO: 85451 - DNA, 17 bp, Arabidopsis thaliana
ctcaaagaaaaagtgct

SEQ ID NO: 85452 - DNA, 17 bp, Arabidopsis thaliana
ctcaaagaccaggtggt

SEQ ID NO: 85453 - DNA, 17 bp, Arabidopsis thaliana
ctcaaagagcaaaagaa

SEQ ID NO: 85454 - DNA, 17 bp, Arabidopsis thaliana
ctcaaagattaagccat

SEQ ID NO: 85455 - DNA, 17 bp, Arabidopsis thaliana
ctcaaagcaagcctacg

SEQ ID NO: 85456 - DNA, 17 bp, Arabidopsis thaliana
ctcaaagctttcatggt

SEQ ID NO: 85457 - DNA, 17 bp, Arabidopsis thaliana
ctcaaagctttgatggt

SEQ ID NO: 85458 - DNA, 17 bp, Arabidopsis thaliana
ctcaaaggattgtgcca

SEQ ID NO: 85459 - DNA, 17 bp, Arabidopsis thaliana
ctcaaagttccagagat

SEQ ID NO: 85460 - DNA, 17 bp, Arabidopsis thaliana
ctcaaatccatggactt

SEQ ID NO: 85461 - DNA, 17 bp, Arabidopsis thaliana
ctcaaatcctacagagc

SEQ ID NO: 85462 - DNA, 17 bp, Arabidopsis thaliana
ctcaaatccttcttctg

SEQ ID NO: 85463 - DNA, 17 bp, Arabidopsis thaliana
ctcaaatcggctacagc

SEQ ID NO: 85464 - DNA, 17 bp, Arabidopsis thaliana
ctcaaatctgggatggt

SEQ ID NO: 85465 - DNA, 17 bp, Arabidopsis thaliana
ctcaaatcttcgacgca

SEQ ID NO: 85466 - DNA, 17 bp, Arabidopsis thaliana
ctcaaatgctttgtttt

SEQ ID NO: 85467 - DNA, 17 bp, Arabidopsis thaliana
ctcaaatgtgtgtgtca

SEQ ID NO: 85468 - DNA, 17 bp, Arabidopsis thaliana
ctcaaattgacgttttc

SEQ ID NO: 85469 - DNA, 17 bp, Arabidopsis thaliana
ctcaaattgatctgctt

SEQ ID NO: 85470 - DNA, 17 bp, Arabidopsis thaliana
ctcaaattgcgttaccg

SEQ ID NO: 85471 - DNA, 17 bp, Arabidopsis thaliana
ctcaaatttctaatctt

SEQ ID NO: 85472 - DNA, 17 bp, Arabidopsis thaliana
ctcaaatttctgagcca

SEQ ID NO: 85473 - DNA, 17 bp, Arabidopsis thaliana
ctcaaattttgggccac

SEQ ID NO: 85474 - DNA, 17 bp, Arabidopsis thaliana
ctcaacacccccccccc

SEQ ID NO: 85475 - DNA, 17 bp, Arabidopsis thaliana
ctcaacacggggaaact

SEQ ID NO: 85476 - DNA, 17 bp, Arabidopsis thaliana
ctcaacagatttttcac

SEQ ID NO: 85477 - DNA, 17 bp, Arabidopsis thaliana
ctcaacaggttgttggt

SEQ ID NO: 85478 - DNA, 17 bp, Arabidopsis thaliana
ctcaacatcactaaacc

SEQ ID NO: 85479 - DNA, 17 bp, Arabidopsis thaliana
ctcaacatttagacgaa

SEQ ID NO: 85480 - DNA, 17 bp, Arabidopsis thaliana
ctcaacccttcgatttc

SEQ ID NO: 85481 - DNA, 17 bp, Arabidopsis thaliana
ctcaaccggatcttaaa

SEQ ID NO: 85482 - DNA, 17 bp, Arabidopsis thaliana
ctcaacgaatcaagact

SEQ ID NO: 85483 - DNA, 17 bp, Arabidopsis thaliana
ctcaacgattgtcgaga

SEQ ID NO: 85484 - DNA, 17 bp, Arabidopsis thaliana
ctcaacggctttgttct

SEQ ID NO: 85485 - DNA, 17 bp, Arabidopsis thaliana
ctcaacggtgatgacaa

SEQ ID NO: 85486 - DNA, 17 bp, Arabidopsis thaliana
ctcaacggtggcacaga

SEQ ID NO: 85487 - DNA, 17 bp, Arabidopsis thaliana
ctcaacggtggctgagc

SEQ ID NO: 85488 - DNA, 17 bp, Arabidopsis thaliana
ctcaactcgctatccac

SEQ ID NO: 85489 - DNA, 17 bp, Arabidopsis thaliana
ctcaactggatcttaaa

SEQ ID NO: 85490 - DNA, 17 bp, Arabidopsis thaliana
ctcaacttatcttgtga

SEQ ID NO: 85491 - DNA, 17 bp, Arabidopsis thaliana
ctcaacttccgatgtgg

SEQ ID NO: 85492 - DNA, 17 bp, Arabidopsis thaliana
ctcaagaacgcctcttg

SEQ ID NO: 85493 - DNA, 17 bp, Arabidopsis thaliana
ctcaagacaaaagcaga

SEQ ID NO: 85494 - DNA, 17 bp, Arabidopsis thaliana
ctcaagactcgatcgca

SEQ ID NO: 85495 - DNA, 17 bp, Arabidopsis thaliana
ctcaagactctatcgca

SEQ ID NO: 85496 - DNA, 17 bp, Arabidopsis thaliana
ctcaagagttaaggatt

SEQ ID NO: 85497 - DNA, 17 bp, Arabidopsis thaliana
ctcaagatctcgtggtg

SEQ ID NO: 85498 - DNA, 17 bp, Arabidopsis thaliana
ctcaagcagctccgacg

SEQ ID NO: 85499 - DNA, 17 bp, Arabidopsis thaliana
ctcaagccattctctat

SEQ ID NO: 85500 - DNA, 17 bp, Arabidopsis thaliana
ctcaagccttactccag

SEQ ID NO: 85501 - DNA, 17 bp, Arabidopsis thaliana
ctcaagcgggttttggt

SEQ ID NO: 85502 - DNA, 17 bp, Arabidopsis thaliana
ctcaagcggtatgatga

SEQ ID NO: 85503 - DNA, 17 bp, Arabidopsis thaliana
ctcaagctaagattctg

SEQ ID NO: 85504 - DNA, 17 bp, Arabidopsis thaliana
ctcaagctcaaggcggc

SEQ ID NO: 85505 - DNA, 17 bp, Arabidopsis thaliana
ctcaaggacctacagct

SEQ ID NO: 85506 - DNA, 17 bp, Arabidopsis thaliana
ctcaaggacctacaggt

SEQ ID NO: 85507 - DNA, 17 bp, Arabidopsis thaliana
ctcaaggattccactat

SEQ ID NO: 85508 - DNA, 17 bp, Arabidopsis thaliana
ctcaagggttatgagtt

SEQ ID NO: 85509 - DNA, 17 bp, Arabidopsis thaliana
ctcaaggttgagagaga

SEQ ID NO: 85510 - DNA, 17 bp, Arabidopsis thaliana
ctcaagtccatatctat

SEQ ID NO: 85511 - DNA, 17 bp, Arabidopsis thaliana
ctcaagtccatatctga

SEQ ID NO: 85512 - DNA, 17 bp, Arabidopsis thaliana
ctcaagtccatatctgt

SEQ ID NO: 85513 - DNA, 17 bp, Arabidopsis thaliana
ctcaagtccgtcttgct

SEQ ID NO: 85514 - DNA, 17 bp, Arabidopsis thaliana
ctcaagtgttgtgcttt

SEQ ID NO: 85515 - DNA, 17 bp, Arabidopsis thaliana
ctcaataacagggcatt

SEQ ID NO: 85516 - DNA, 17 bp, Arabidopsis thaliana
ctcaataacatggccgg

SEQ ID NO: 85517 - DNA, 17 bp, Arabidopsis thaliana
ctcaatactttcagcag

SEQ ID NO: 85518 - DNA, 17 bp, Arabidopsis thaliana
ctcaatatggacgccgg

SEQ ID NO: 85519 - DNA, 17 bp, Arabidopsis thaliana
ctcaatcgcaaggcgga

SEQ ID NO: 85520 - DNA, 17 bp, Arabidopsis thaliana
ctcaatcggattggaac

SEQ ID NO: 85521 - DNA, 17 bp, Arabidopsis thaliana
ctcaatctcctcttggt

SEQ ID NO: 85522 - DNA, 17 bp, Arabidopsis thaliana
ctcaatgattatggacc

SEQ ID NO: 85523 - DNA, 17 bp, Arabidopsis thaliana
ctcaatgcattgataaa

SEQ ID NO: 85524 - DNA, 17 bp, Arabidopsis thaliana
ctcaatgcttgaccctt

SEQ ID NO: 85525 - DNA, 17 bp, Arabidopsis thaliana
ctcaatgtcattcgacc

SEQ ID NO: 85526 - DNA, 17 bp, Arabidopsis thaliana
ctcaatgtgatttctgc

SEQ ID NO: 85527 - DNA, 17 bp, Arabidopsis thaliana
ctcaattaccgcggacg

SEQ ID NO: 85528 - DNA, 17 bp, Arabidopsis thaliana
ctcaatttccggctccg

SEQ ID NO: 85529 - DNA, 17 bp, Arabidopsis thaliana
ctcaattttccaccata

SEQ ID NO: 85530 - DNA, 17 bp, Arabidopsis thaliana
ctcaattttgggtttat

SEQ ID NO: 85531 - DNA, 17 bp, Arabidopsis thaliana
ctcacaacatctagttt

SEQ ID NO: 85532 - DNA, 17 bp, Arabidopsis thaliana
ctcacaacatttagttt

SEQ ID NO: 85533 - DNA, 17 bp, Arabidopsis thaliana
ctcacaagatcagatcg

SEQ ID NO: 85534 - DNA, 17 bp, Arabidopsis thaliana
ctcacaatctccaggtt

SEQ ID NO: 85535 - DNA, 17 bp, Arabidopsis thaliana
ctcacacactagaggtc

SEQ ID NO: 85536 - DNA, 17 bp, Arabidopsis thaliana
ctcacagactcagcgtc

SEQ ID NO: 85537 - DNA, 17 bp, Arabidopsis thaliana
ctcacagatgtgtgctt

SEQ ID NO: 85538 - DNA, 17 bp, Arabidopsis thaliana
ctcacaggagcatacat

SEQ ID NO: 85539 - DNA, 17 bp, Arabidopsis thaliana
ctcacaggcgaaatacc

SEQ ID NO: 85540 - DNA, 17 bp, Arabidopsis thaliana
ctcacagtcgcttgcgt

SEQ ID NO: 85541 - DNA, 17 bp, Arabidopsis thaliana
ctcacagtttttgatct

SEQ ID NO: 85542 - DNA, 17 bp, Arabidopsis thaliana
ctcacatcaatatgctt

SEQ ID NO: 85543 - DNA, 17 bp, Arabidopsis thaliana
ctcacatctgaggagag

SEQ ID NO: 85544 - DNA, 17 bp, Arabidopsis thaliana
ctcacatgaagtcctcg

SEQ ID NO: 85545 - DNA, 17 bp, Arabidopsis thaliana
ctcacattctgctacag

SEQ ID NO: 85546 - DNA, 17 bp, Arabidopsis thaliana
ctcacattgggcaacac

SEQ ID NO: 85547 - DNA, 17 bp, Arabidopsis thaliana
ctcacattgggtttgga

SEQ ID NO: 85548 - DNA, 17 bp, Arabidopsis thaliana
ctcaccaccgtttcatg

SEQ ID NO: 85549 - DNA, 17 bp, Arabidopsis thaliana
ctcaccagcggaagtcg

SEQ ID NO: 85550 - DNA, 17 bp, Arabidopsis thaliana
ctcacccaagtctgagt

SEQ ID NO: 85551 - DNA, 17 bp, Arabidopsis thaliana
ctcacccagatgtgaag

SEQ ID NO: 85552 - DNA, 17 bp, Arabidopsis thaliana
ctcacccatcgatgtac

SEQ ID NO: 85553 - DNA, 17 bp, Arabidopsis thaliana
ctcacccatcgatgtgc

SEQ ID NO: 85554 - DNA, 17 bp, Arabidopsis thaliana
ctcacccatcgatgtgt

SEQ ID NO: 85555 - DNA, 17 bp, Arabidopsis thaliana
ctcaccctctgggagag

SEQ ID NO: 85556 - DNA, 17 bp, Arabidopsis thaliana
ctcaccgcaaaggtaga

SEQ ID NO: 85557 - DNA, 17 bp, Arabidopsis thaliana
ctcaccgccaaggtaga

SEQ ID NO: 85558 - DNA, 17 bp, Arabidopsis thaliana
ctcaccggaactctctg

SEQ ID NO: 85559 - DNA, 17 bp, Arabidopsis thaliana
ctcaccgtaacacagcc

SEQ ID NO: 85560 - DNA, 17 bp, Arabidopsis thaliana
ctcaccgtagaactgtt

SEQ ID NO: 85561 - DNA, 17 bp, Arabidopsis thaliana
ctcaccgtgagtaaggg

SEQ ID NO: 85562 - DNA, 17 bp, Arabidopsis thaliana
ctcaccgtttgtgtcca

SEQ ID NO: 85563 - DNA, 17 bp, Arabidopsis thaliana
ctcacctaaccgaaagg

SEQ ID NO: 85564 - DNA, 17 bp, Arabidopsis thaliana
ctcacctgccgaatcaa

SEQ ID NO: 85565 - DNA, 17 bp, Arabidopsis thaliana
ctcacctgtgcaaatat

SEQ ID NO: 85566 - DNA, 17 bp, Arabidopsis thaliana
ctcaccttgaccacttg

SEQ ID NO: 85567 - DNA, 17 bp, Arabidopsis thaliana
ctcaccttggtgttgcg

SEQ ID NO: 85568 - DNA, 17 bp, Arabidopsis thaliana
ctcacgacggtcgtctg

SEQ ID NO: 85569 - DNA, 17 bp, Arabidopsis thaliana
ctcacgactgttcgact

SEQ ID NO: 85570 - DNA, 17 bp, Arabidopsis thaliana
ctcacgagaacgggact

SEQ ID NO: 85571 - DNA, 17 bp, Arabidopsis thaliana
ctcacgatggttgtgcc

SEQ ID NO: 85572 - DNA, 17 bp, Arabidopsis thaliana
ctcacgattaagcaagg

SEQ ID NO: 85573 - DNA, 17 bp, Arabidopsis thaliana
ctcacgcccggtcgtac

SEQ ID NO: 85574 - DNA, 17 bp, Arabidopsis thaliana
ctcacgcctttaagatc

SEQ ID NO: 85575 - DNA, 17 bp, Arabidopsis thaliana
ctcacggtctaaaagtt

SEQ ID NO: 85576 - DNA, 17 bp, Arabidopsis thaliana
ctcacggtgactccgac

SEQ ID NO: 85577 - DNA, 17 bp, Arabidopsis thaliana
ctcacgtaatctggtgc

SEQ ID NO: 85578 - DNA, 17 bp, Arabidopsis thaliana
ctcacgtctgcctgggt

SEQ ID NO: 85579 - DNA, 17 bp, Arabidopsis thaliana
ctcacgtgtgcccttgt

SEQ ID NO: 85580 - DNA, 17 bp, Arabidopsis thaliana
ctcacgttttttggacc

SEQ ID NO: 85581 - DNA, 17 bp, Arabidopsis thaliana
ctcactagggccttcat

SEQ ID NO: 85582 - DNA, 17 bp, Arabidopsis thaliana
ctcactagggtggagcg

SEQ ID NO: 85583 - DNA, 17 bp, Arabidopsis thaliana
ctcactatgcaccttcg

SEQ ID NO: 85584 - DNA, 17 bp, Arabidopsis thaliana
ctcactatgcacctttg

SEQ ID NO: 85585 - DNA, 17 bp, Arabidopsis thaliana
ctcactcagcgaaattg

SEQ ID NO: 85586 - DNA, 17 bp, Arabidopsis thaliana
ctcactccaggtcgcca

SEQ ID NO: 85587 - DNA, 17 bp, Arabidopsis thaliana
ctcactcgattgcaaga

SEQ ID NO: 85588 - DNA, 17 bp, Arabidopsis thaliana
ctcactcttctgtgacg

SEQ ID NO: 85589 - DNA, 17 bp, Arabidopsis thaliana
ctcactcttctttcggc

SEQ ID NO: 85590 - DNA, 17 bp, Arabidopsis thaliana
ctcactgatcgagcgct

SEQ ID NO: 85591 - DNA, 17 bp, Arabidopsis thaliana
ctcactgatggagatgt

SEQ ID NO: 85592 - DNA, 17 bp, Arabidopsis thaliana
ctcactgctataaccgt

SEQ ID NO: 85593 - DNA, 17 bp, Arabidopsis thaliana
ctcactgctcacgcctc

SEQ ID NO: 85594 - DNA, 17 bp, Arabidopsis thaliana
ctcactgctctatctgt

SEQ ID NO: 85595 - DNA, 17 bp, Arabidopsis thaliana
ctcactggcagacaagc

SEQ ID NO: 85596 - DNA, 17 bp, Arabidopsis thaliana
ctcactggcagacaccc

SEQ ID NO: 85597 - DNA, 17 bp, Arabidopsis thaliana
ctcactggtgtgatgat

SEQ ID NO: 85598 - DNA, 17 bp, Arabidopsis thaliana
ctcactgtcaccaccgt

SEQ ID NO: 85599 - DNA, 17 bp, Arabidopsis thaliana
ctcactgtccagttgtg

SEQ ID NO: 85600 - DNA, 17 bp, Arabidopsis thaliana
ctcactgttaacgatac

SEQ ID NO: 85601 - DNA, 17 bp, Arabidopsis thaliana
ctcactgttagtagact

SEQ ID NO: 85602 - DNA, 17 bp, Arabidopsis thaliana
ctcactgtttacatggg

SEQ ID NO: 85603 - DNA, 17 bp, Arabidopsis thaliana
ctcacttaacatggcga

SEQ ID NO: 85604 - DNA, 17 bp, Arabidopsis thaliana
ctcacttaagatttgag

SEQ ID NO: 85605 - DNA, 17 bp, Arabidopsis thaliana
ctcacttcgccggaaaa

SEQ ID NO: 85606 - DNA, 17 bp, Arabidopsis thaliana
ctcacttgagaaacttt

SEQ ID NO: 85607 - DNA, 17 bp, Arabidopsis thaliana
ctcacttgatgagaagt

SEQ ID NO: 85608 - DNA, 17 bp, Arabidopsis thaliana
ctcacttggacattgat

SEQ ID NO: 85609 - DNA, 17 bp, Arabidopsis thaliana
ctcacttggatggatag

SEQ ID NO: 85610 - DNA, 17 bp, Arabidopsis thaliana
ctcactttatctacttg

SEQ ID NO: 85611 - DNA, 17 bp, Arabidopsis thaliana
ctcactttgccgaatca

SEQ ID NO: 85612 - DNA, 17 bp, Arabidopsis thaliana
ctcagaaaatgatccca

SEQ ID NO: 85613 - DNA, 17 bp, Arabidopsis thaliana
ctcagaaatttgcgtga

SEQ ID NO: 85614 - DNA, 17 bp, Arabidopsis thaliana
ctcagaactggcacccc

SEQ ID NO: 85615 - DNA, 17 bp, Arabidopsis thaliana
ctcagaactggtacgaa

SEQ ID NO: 85616 - DNA, 17 bp, Arabidopsis thaliana
ctcagaactggtacgga

SEQ ID NO: 85617 - DNA, 17 bp, Arabidopsis thaliana
ctcagaactttgcctct

SEQ ID NO: 85618 - DNA, 17 bp, Arabidopsis thaliana
ctcagaagacaagtgac

SEQ ID NO: 85619 - DNA, 17 bp, Arabidopsis thaliana
ctcagaagtgcggcgat

SEQ ID NO: 85620 - DNA, 17 bp, Arabidopsis thaliana
ctcagaataatggatta

SEQ ID NO: 85621 - DNA, 17 bp, Arabidopsis thaliana
ctcagaatctgtgctca

SEQ ID NO: 85622 - DNA, 17 bp, Arabidopsis thaliana
ctcagaattcgcatttt

SEQ ID NO: 85623 - DNA, 17 bp, Arabidopsis thaliana
ctcagaattgtgtcctc

SEQ ID NO: 85624 - DNA, 17 bp, Arabidopsis thaliana
ctcagacacgatctcat

SEQ ID NO: 85625 - DNA, 17 bp, Arabidopsis thaliana
ctcagacaggtaatcag

SEQ ID NO: 85626 - DNA, 17 bp, Arabidopsis thaliana
ctcagaccgaattgtcc

SEQ ID NO: 85627 - DNA, 17 bp, Arabidopsis thaliana
ctcagactctgatagtg

SEQ ID NO: 85628 - DNA, 17 bp, Arabidopsis thaliana
ctcagagccggccttgc

SEQ ID NO: 85629 - DNA, 17 bp, Arabidopsis thaliana
ctcagatactcgcagcg

SEQ ID NO: 85630 - DNA, 17 bp, Arabidopsis thaliana
ctcagatatttggctgc

SEQ ID NO: 85631 - DNA, 17 bp, Arabidopsis thaliana
ctcagatccgtcgcctc

SEQ ID NO: 85632 - DNA, 17 bp, Arabidopsis thaliana
ctcagatctgcttcact

SEQ ID NO: 85633 - DNA, 17 bp, Arabidopsis thaliana
ctcagatgggatctgga

SEQ ID NO: 85634 - DNA, 17 bp, Arabidopsis thaliana
ctcagattaggtcgctg

SEQ ID NO: 85635 - DNA, 17 bp, Arabidopsis thaliana
ctcagattccactgtct

SEQ ID NO: 85636 - DNA, 17 bp, Arabidopsis thaliana
ctcagattcttgcacca

SEQ ID NO: 85637 - DNA, 17 bp, Arabidopsis thaliana
ctcagatttggccggca

SEQ ID NO: 85638 - DNA, 17 bp, Arabidopsis thaliana
ctcagatttggctggca

SEQ ID NO: 85639 - DNA, 17 bp, Arabidopsis thaliana
ctcagcaactggccctt

SEQ ID NO: 85640 - DNA, 17 bp, Arabidopsis thaliana
ctcagcacatatgactt

SEQ ID NO: 85641 - DNA, 17 bp, Arabidopsis thaliana
ctcagcaccggaaccgg

SEQ ID NO: 85642 - DNA, 17 bp, Arabidopsis thaliana
ctcagcagaatggtcgg

SEQ ID NO: 85643 - DNA, 17 bp, Arabidopsis thaliana
ctcagcccatcacggct

SEQ ID NO: 85644 - DNA, 17 bp, Arabidopsis thaliana
ctcagccctttgtcgct

SEQ ID NO: 85645 - DNA, 17 bp, Arabidopsis thaliana
ctcagccggttcttctt

SEQ ID NO: 85646 - DNA, 17 bp, Arabidopsis thaliana
ctcagcctccacttgcc

SEQ ID NO: 85647 - DNA, 17 bp, Arabidopsis thaliana
ctcagcctgctaactag

SEQ ID NO: 85648 - DNA, 17 bp, Arabidopsis thaliana
ctcagcgacggaccgag

SEQ ID NO: 85649 - DNA, 17 bp, Arabidopsis thaliana
ctcagcgacggaccggg

SEQ ID NO: 85650 - DNA, 17 bp, Arabidopsis thaliana
ctcagcttactgttggt

SEQ ID NO: 85651 - DNA, 17 bp, Arabidopsis thaliana
ctcagcttctatcttcc

SEQ ID NO: 85652 - DNA, 17 bp, Arabidopsis thaliana
ctcagctttggccagac

SEQ ID NO: 85653 - DNA, 17 bp, Arabidopsis thaliana
ctcagctttggccagat

SEQ ID NO: 85654 - DNA, 17 bp, Arabidopsis thaliana
ctcagctttgggatgga

SEQ ID NO: 85655 - DNA, 17 bp, Arabidopsis thaliana
ctcaggaacaggatggt

SEQ ID NO: 85656 - DNA, 17 bp, Arabidopsis thaliana
ctcaggaagtgtgtgtt

SEQ ID NO: 85657 - DNA, 17 bp, Arabidopsis thaliana
ctcaggaggtgcgatct

SEQ ID NO: 85658 - DNA, 17 bp, Arabidopsis thaliana
ctcaggatagccggccc

SEQ ID NO: 85659 - DNA, 17 bp, Arabidopsis thaliana
ctcaggatagctggaac

SEQ ID NO: 85660 - DNA, 17 bp, Arabidopsis thaliana
ctcaggatagctggagc

SEQ ID NO: 85661 - DNA, 17 bp, Arabidopsis thaliana
ctcaggatagctggggg

SEQ ID NO: 85662 - DNA, 17 bp, Arabidopsis thaliana
ctcaggatcaaacttaa

SEQ ID NO: 85663 - DNA, 17 bp, Arabidopsis thaliana
ctcaggatcggtgaagt

SEQ ID NO: 85664 - DNA, 17 bp, Arabidopsis thaliana
ctcaggatgaacgctgg

SEQ ID NO: 85665 - DNA, 17 bp, Arabidopsis thaliana
ctcaggatgagggaatc

SEQ ID NO: 85666 - DNA, 17 bp, Arabidopsis thaliana
ctcaggatggatagcgg

SEQ ID NO: 85667 - DNA, 17 bp, Arabidopsis thaliana
ctcaggattagctcgtt

SEQ ID NO: 85668 - DNA, 17 bp, Arabidopsis thaliana
ctcaggattctacgcag

SEQ ID NO: 85669 - DNA, 17 bp, Arabidopsis thaliana
ctcaggattggctcgtt

SEQ ID NO: 85670 - DNA, 17 bp, Arabidopsis thaliana
ctcaggattgggatcgg

SEQ ID NO: 85671 - DNA, 17 bp, Arabidopsis thaliana
ctcaggcccgaaaccac

SEQ ID NO: 85672 - DNA, 17 bp, Arabidopsis thaliana
ctcaggctatgaacggg

SEQ ID NO: 85673 - DNA, 17 bp, Arabidopsis thaliana
ctcagggatttggactg

SEQ ID NO: 85674 - DNA, 17 bp, Arabidopsis thaliana
ctcagggccagtccaag

SEQ ID NO: 85675 - DNA, 17 bp, Arabidopsis thaliana
ctcagggctgggctcgg

SEQ ID NO: 85676 - DNA, 17 bp, Arabidopsis thaliana
ctcagggtcgccgtggt

SEQ ID NO: 85677 - DNA, 17 bp, Arabidopsis thaliana
ctcagggtgtctctcta

SEQ ID NO: 85678 - DNA, 17 bp, Arabidopsis thaliana
ctcaggtagacagtttc

SEQ ID NO: 85679 - DNA, 17 bp, Arabidopsis thaliana
ctcaggtattagttcgt

SEQ ID NO: 85680 - DNA, 17 bp, Arabidopsis thaliana
ctcaggtcccgagtcaa

SEQ ID NO: 85681 - DNA, 17 bp, Arabidopsis thaliana
ctcaggtccttggtaag

SEQ ID NO: 85682 - DNA, 17 bp, Arabidopsis thaliana
ctcaggtggtgcatggc

SEQ ID NO: 85683 - DNA, 17 bp, Arabidopsis thaliana
ctcaggtgtggctggta

SEQ ID NO: 85684 - DNA, 17 bp, Arabidopsis thaliana
ctcaggtgttgattaag

SEQ ID NO: 85685 - DNA, 17 bp, Arabidopsis thaliana
ctcaggttctgaaccga

SEQ ID NO: 85686 - DNA, 17 bp, Arabidopsis thaliana
ctcagtagatcaaaaac

SEQ ID NO: 85687 - DNA, 17 bp, Arabidopsis thaliana
ctcagtatcaggtgacg

SEQ ID NO: 85688 - DNA, 17 bp, Arabidopsis thaliana
ctcagtatgtgtcaact

SEQ ID NO: 85689 - DNA, 17 bp, Arabidopsis thaliana
ctcagtatgtgtcaagt

SEQ ID NO: 85690 - DNA, 17 bp, Arabidopsis thaliana
ctcagtcaacagagtgt

SEQ ID NO: 85691 - DNA, 17 bp, Arabidopsis thaliana
ctcagtccatatgtcct

SEQ ID NO: 85692 - DNA, 17 bp, Arabidopsis thaliana
ctcagtcgcatcctgta

SEQ ID NO: 85693 - DNA, 17 bp, Arabidopsis thaliana
ctcagtctgcgacgagt

SEQ ID NO: 85694 - DNA, 17 bp, Arabidopsis thaliana
ctcagtctgttgagacc

SEQ ID NO: 85695 - DNA, 17 bp, Arabidopsis thaliana
ctcagtgacacaagctt

SEQ ID NO: 85696 - DNA, 17 bp, Arabidopsis thaliana
ctcagtgactatggttg

SEQ ID NO: 85697 - DNA, 17 bp, Arabidopsis thaliana
ctcagtgatgaggagca

SEQ ID NO: 85698 - DNA, 17 bp, Arabidopsis thaliana
ctcagtgcccccatcac

SEQ ID NO: 85699 - DNA, 17 bp, Arabidopsis thaliana
ctcagtgcctctatggc

SEQ ID NO: 85700 - DNA, 17 bp, Arabidopsis thaliana
ctcagtgcgtctgatct

SEQ ID NO: 85701 - DNA, 17 bp, Arabidopsis thaliana
ctcagtggcagacaagc

SEQ ID NO: 85702 - DNA, 17 bp, Arabidopsis thaliana
ctcagtggcagttaagt

SEQ ID NO: 85703 - DNA, 17 bp, Arabidopsis thaliana
ctcagtggtaaatctcg

SEQ ID NO: 85704 - DNA, 17 bp, Arabidopsis thaliana
ctcagtggtagagcgcg

SEQ ID NO: 85705 - DNA, 17 bp, Arabidopsis thaliana
ctcagtggtagagcgtg

SEQ ID NO: 85706 - DNA, 17 bp, Arabidopsis thaliana
ctcagtgtctcggcact

SEQ ID NO: 85707 - DNA, 17 bp, Arabidopsis thaliana
ctcagtgttgaactaga

SEQ ID NO: 85708 - DNA, 17 bp, Arabidopsis thaliana
ctcagtgtttcgtttca

SEQ ID NO: 85709 - DNA, 17 bp, Arabidopsis thaliana
ctcagttacggcttagg

SEQ ID NO: 85710 - DNA, 17 bp, Arabidopsis thaliana
ctcagttcggattgcag

SEQ ID NO: 85711 - DNA, 17 bp, Arabidopsis thaliana
ctcagttgaaccttggg

SEQ ID NO: 85712 - DNA, 17 bp, Arabidopsis thaliana
ctcagttggttcaggag

SEQ ID NO: 85713 - DNA, 17 bp, Arabidopsis thaliana
ctcagtttcaatctccg

SEQ ID NO: 85714 - DNA, 17 bp, Arabidopsis thaliana
ctcataaccacccgacc

SEQ ID NO: 85715 - DNA, 17 bp, Arabidopsis thaliana
ctcataaccactcgacc

SEQ ID NO: 85716 - DNA, 17 bp, Arabidopsis thaliana
ctcataagattgtgcca

SEQ ID NO: 85717 - DNA, 17 bp, Arabidopsis thaliana
ctcataatacgactttt

SEQ ID NO: 85718 - DNA, 17 bp, Arabidopsis thaliana
ctcataattgtaaaccg

SEQ ID NO: 85719 - DNA, 17 bp, Arabidopsis thaliana
ctcatacagtgatgagt

SEQ ID NO: 85720 - DNA, 17 bp, Arabidopsis thaliana
ctcatacggactttggc

SEQ ID NO: 85721 - DNA, 17 bp, Arabidopsis thaliana
ctcatagatggctaggg

SEQ ID NO: 85722 - DNA, 17 bp, Arabidopsis thaliana
ctcataggatcgtgcca

SEQ ID NO: 85723 - DNA, 17 bp, Arabidopsis thaliana
ctcataggattgtgcca

SEQ ID NO: 85724 - DNA, 17 bp, Arabidopsis thaliana
ctcataggcagtggctt

SEQ ID NO: 85725 - DNA, 17 bp, Arabidopsis thaliana
ctcatatggaaagtgtt

SEQ ID NO: 85726 - DNA, 17 bp, Arabidopsis thaliana
ctcatatggactttggc

SEQ ID NO: 85727 - DNA, 17 bp, Arabidopsis thaliana
ctcatatggagagagtt

SEQ ID NO: 85728 - DNA, 17 bp, Arabidopsis thaliana
ctcatatgttgctgagc

SEQ ID NO: 85729 - DNA, 17 bp, Arabidopsis thaliana
ctcatattggcttctac

SEQ ID NO: 85730 - DNA, 17 bp, Arabidopsis thaliana
ctcatcaaactgctcgg

SEQ ID NO: 85731 - DNA, 17 bp, Arabidopsis thaliana
ctcatcaaagtggttag

SEQ ID NO: 85732 - DNA, 17 bp, Arabidopsis thaliana
ctcatcaacaactgcag

SEQ ID NO: 85733 - DNA, 17 bp, Arabidopsis thaliana
ctcatcaatagctgctc

SEQ ID NO: 85734 - DNA, 17 bp, Arabidopsis thaliana
ctcatcacagttgcttt

SEQ ID NO: 85735 - DNA, 17 bp, Arabidopsis thaliana
ctcatcaccggagctgc

SEQ ID NO: 85736 - DNA, 17 bp, Arabidopsis thaliana
ctcatcacggtgcaaga

SEQ ID NO: 85737 - DNA, 17 bp, Arabidopsis thaliana
ctcatcagctctgtgac

SEQ ID NO: 85738 - DNA, 17 bp, Arabidopsis thaliana
ctcatcagctctgtggc

SEQ ID NO: 85739 - DNA, 17 bp, Arabidopsis thaliana
ctcatcagctctgttgc

SEQ ID NO: 85740 - DNA, 17 bp, Arabidopsis thaliana
ctcatcagctgagacca

SEQ ID NO: 85741 - DNA, 17 bp, Arabidopsis thaliana
ctcatcaggatgtgatt

SEQ ID NO: 85742 - DNA, 17 bp, Arabidopsis thaliana
ctcatcagtgtgacttt

SEQ ID NO: 85743 - DNA, 17 bp, Arabidopsis thaliana
ctcatcagttaccggag

SEQ ID NO: 85744 - DNA, 17 bp, Arabidopsis thaliana
ctcatcatcatgccgag

SEQ ID NO: 85745 - DNA, 17 bp, Arabidopsis thaliana
ctcatcatcgccttgcg

SEQ ID NO: 85746 - DNA, 17 bp, Arabidopsis thaliana
ctcatcatgaactttgc

SEQ ID NO: 85747 - DNA, 17 bp, Arabidopsis thaliana
ctcatcatgaagtttgc

SEQ ID NO: 85748 - DNA, 17 bp, Arabidopsis thaliana
ctcatcatgggcttgta

SEQ ID NO: 85749 - DNA, 17 bp, Arabidopsis thaliana
ctcatcattcagcaccc

SEQ ID NO: 85750 - DNA, 17 bp, Arabidopsis thaliana
ctcatccaaagggggaa

SEQ ID NO: 85751 - DNA, 17 bp, Arabidopsis thaliana
ctcatccacctggtgtg

SEQ ID NO: 85752 - DNA, 17 bp, Arabidopsis thaliana
ctcatcccgaaatgaac

SEQ ID NO: 85753 - DNA, 17 bp, Arabidopsis thaliana
ctcatcccgagaccatg

SEQ ID NO: 85754 - DNA, 17 bp, Arabidopsis thaliana
ctcatccgtccttcggg

SEQ ID NO: 85755 - DNA, 17 bp, Arabidopsis thaliana
ctcatcctcacacgcaa

SEQ ID NO: 85756 - DNA, 17 bp, Arabidopsis thaliana
ctcatcctcgacagatg

SEQ ID NO: 85757 - DNA, 17 bp, Arabidopsis thaliana
ctcatcctcgcgaagtt

SEQ ID NO: 85758 - DNA, 17 bp, Arabidopsis thaliana
ctcatcctgaaactact

SEQ ID NO: 85759 - DNA, 17 bp, Arabidopsis thaliana
ctcatcctgtagatgga

SEQ ID NO: 85760 - DNA, 17 bp, Arabidopsis thaliana
ctcatcgacaaagtgat

SEQ ID NO: 85761 - DNA, 17 bp, Arabidopsis thaliana
ctcatcgataccggaag

SEQ ID NO: 85762 - DNA, 17 bp, Arabidopsis thaliana
ctcatcgatgatggtgt

SEQ ID NO: 85763 - DNA, 17 bp, Arabidopsis thaliana
ctcatcgcttgctactt

SEQ ID NO: 85764 - DNA, 17 bp, Arabidopsis thaliana
ctcatcgtagatgtcaa

SEQ ID NO: 85765 - DNA, 17 bp, Arabidopsis thaliana
ctcatcgtcttcctagt

SEQ ID NO: 85766 - DNA, 17 bp, Arabidopsis thaliana
ctcatcgtgaatctgca

SEQ ID NO: 85767 - DNA, 17 bp, Arabidopsis thaliana
ctcatcgtttaaaactg

SEQ ID NO: 85768 - DNA, 17 bp, Arabidopsis thaliana
ctcatctcaagggcttt

SEQ ID NO: 85769 - DNA, 17 bp, Arabidopsis thaliana
ctcatctccattgttgt

SEQ ID NO: 85770 - DNA, 17 bp, Arabidopsis thaliana
ctcatctcctgctgaga

SEQ ID NO: 85771 - DNA, 17 bp, Arabidopsis thaliana
ctcatctcgagggcttc

SEQ ID NO: 85772 - DNA, 17 bp, Arabidopsis thaliana
ctcatctcgatcgtgtc

SEQ ID NO: 85773 - DNA, 17 bp, Arabidopsis thaliana
ctcatctcgcaatgggc

SEQ ID NO: 85774 - DNA, 17 bp, Arabidopsis thaliana
ctcatctcgggttcgtt

SEQ ID NO: 85775 - DNA, 17 bp, Arabidopsis thaliana
ctcatctgaacatagac

SEQ ID NO: 85776 - DNA, 17 bp, Arabidopsis thaliana
ctcatctgagattgaac

SEQ ID NO: 85777 - DNA, 17 bp, Arabidopsis thaliana
ctcatctggaattctgt

SEQ ID NO: 85778 - DNA, 17 bp, Arabidopsis thaliana
ctcatctgggcctggtc

SEQ ID NO: 85779 - DNA, 17 bp, Arabidopsis thaliana
ctcatctgtggtgtcgt

SEQ ID NO: 85780 - DNA, 17 bp, Arabidopsis thaliana
ctcatcttacttgccac

SEQ ID NO: 85781 - DNA, 17 bp, Arabidopsis thaliana
ctcatcttagttgccac

SEQ ID NO: 85782 - DNA, 17 bp, Arabidopsis thaliana
ctcatcttattgccaag

SEQ ID NO: 85783 - DNA, 17 bp, Arabidopsis thaliana
ctcatcttcagcatgct

SEQ ID NO: 85784 - DNA, 17 bp, Arabidopsis thaliana
ctcatcttcattggact

SEQ ID NO: 85785 - DNA, 17 bp, Arabidopsis thaliana
ctcatcttcggcatgct

SEQ ID NO: 85786 - DNA, 17 bp, Arabidopsis thaliana
ctcatcttcttcaggtt

SEQ ID NO: 85787 - DNA, 17 bp, Arabidopsis thaliana
ctcatcttggtggtgag

SEQ ID NO: 85788 - DNA, 17 bp, Arabidopsis thaliana
ctcatctttggggttag

SEQ ID NO: 85789 - DNA, 17 bp, Arabidopsis thaliana
ctcatgagccggcatgc

SEQ ID NO: 85790 - DNA, 17 bp, Arabidopsis thaliana
ctcatgtacaactttat

SEQ ID NO: 85791 - DNA, 17 bp, Arabidopsis thaliana
ctcatgtctatgatggc

SEQ ID NO: 85792 - DNA, 17 bp, Arabidopsis thaliana
ctcatgtgctgatgtgt

SEQ ID NO: 85793 - DNA, 17 bp, Arabidopsis thaliana
ctcatgtggcttgtcct

SEQ ID NO: 85794 - DNA, 17 bp, Arabidopsis thaliana
ctcatgtgtgtgctgat

SEQ ID NO: 85795 - DNA, 17 bp, Arabidopsis thaliana
ctcattaacatggccgg

SEQ ID NO: 85796 - DNA, 17 bp, Arabidopsis thaliana
ctcattagggttcatgg

SEQ ID NO: 85797 - DNA, 17 bp, Arabidopsis thaliana
ctcattatcgccattct

SEQ ID NO: 85798 - DNA, 17 bp, Arabidopsis thaliana
ctcattatgggcaatga

SEQ ID NO: 85799 - DNA, 17 bp, Arabidopsis thaliana
ctcattccactatccgg

SEQ ID NO: 85800 - DNA, 17 bp, Arabidopsis thaliana
ctcattccatttggctg

SEQ ID NO: 85801 - DNA, 17 bp, Arabidopsis thaliana
ctcattcgcacagttcc

SEQ ID NO: 85802 - DNA, 17 bp, Arabidopsis thaliana
ctcattcggatattggt

SEQ ID NO: 85803 - DNA, 17 bp, Arabidopsis thaliana
ctcattcgttgttcgcc

SEQ ID NO: 85804 - DNA, 17 bp, Arabidopsis thaliana
ctcattcgttttcgttc

SEQ ID NO: 85805 - DNA, 17 bp, Arabidopsis thaliana
ctcattctgagcttatg

SEQ ID NO: 85806 - DNA, 17 bp, Arabidopsis thaliana
ctcattgacggcggtgc

SEQ ID NO: 85807 - DNA, 17 bp, Arabidopsis thaliana
ctcattgagtttccggt

SEQ ID NO: 85808 - DNA, 17 bp, Arabidopsis thaliana
ctcattgccatttaccg

SEQ ID NO: 85809 - DNA, 17 bp, Arabidopsis thaliana
ctcattggtgtgatgat

SEQ ID NO: 85810 - DNA, 17 bp, Arabidopsis thaliana
ctcattggttgactaag

SEQ ID NO: 85811 - DNA, 17 bp, Arabidopsis thaliana
ctcattgtaggcttgcc

SEQ ID NO: 85812 - DNA, 17 bp, Arabidopsis thaliana
ctcatttcggtgcgttt

SEQ ID NO: 85813 - DNA, 17 bp, Arabidopsis thaliana
ctcatttcttggttttg

SEQ ID NO: 85814 - DNA, 17 bp, Arabidopsis thaliana
ctcatttgattatgagt

SEQ ID NO: 85815 - DNA, 17 bp, Arabidopsis thaliana
ctcatttggaagtgcct

SEQ ID NO: 85816 - DNA, 17 bp, Arabidopsis thaliana
ctcatttggatggactt

SEQ ID NO: 85817 - DNA, 17 bp, Arabidopsis thaliana
ctcatttggctaagggt

SEQ ID NO: 85818 - DNA, 17 bp, Arabidopsis thaliana
ctcatttggtcagttct

SEQ ID NO: 85819 - DNA, 17 bp, Arabidopsis thaliana
ctcattttcgacggcat

SEQ ID NO: 85820 - DNA, 17 bp, Arabidopsis thaliana
ctccaaaatcagagctg

SEQ ID NO: 85821 - DNA, 17 bp, Arabidopsis thaliana
ctccaaaatgtcacagg

SEQ ID NO: 85822 - DNA, 17 bp, Arabidopsis thaliana
ctccaaaggaagtctat

SEQ ID NO: 85823 - DNA, 17 bp, Arabidopsis thaliana
ctccaaagggatcgcat

SEQ ID NO: 85824 - DNA, 17 bp, Arabidopsis thaliana
ctccaaatatttggagg

SEQ ID NO: 85825 - DNA, 17 bp, Arabidopsis thaliana
ctccaaatggtgtgttc

SEQ ID NO: 85826 - DNA, 17 bp, Arabidopsis thaliana
ctccaaatttccggatg

SEQ ID NO: 85827 - DNA, 17 bp, Arabidopsis thaliana
ctccaaattttgacctt

SEQ ID NO: 85828 - DNA, 17 bp, Arabidopsis thaliana
ctccaaccgaatggcca

SEQ ID NO: 85829 - DNA, 17 bp, Arabidopsis thaliana
ctccaaccgaatggccg

SEQ ID NO: 85830 - DNA, 17 bp, Arabidopsis thaliana
ctccaaccgggtgtgtt

SEQ ID NO: 85831 - DNA, 17 bp, Arabidopsis thaliana
ctccaactgtgtgacac

SEQ ID NO: 85832 - DNA, 17 bp, Arabidopsis thaliana
ctccaacttccgatgtg

SEQ ID NO: 85833 - DNA, 17 bp, Arabidopsis thaliana
ctccaagagatcgcctt

SEQ ID NO: 85834 - DNA, 17 bp, Arabidopsis thaliana
ctccaagctttgatggc

SEQ ID NO: 85835 - DNA, 17 bp, Arabidopsis thaliana
ctccaaggacatgggcc

SEQ ID NO: 85836 - DNA, 17 bp, Arabidopsis thaliana
ctccaagggttcgagct

SEQ ID NO: 85837 - DNA, 17 bp, Arabidopsis thaliana
ctccaaggtgaacagcc

SEQ ID NO: 85838 - DNA, 17 bp, Arabidopsis thaliana
ctccaagtccagaattc

SEQ ID NO: 85839 - DNA, 17 bp, Arabidopsis thaliana
ctccaagttgcgaaagt

SEQ ID NO: 85840 - DNA, 17 bp, Arabidopsis thaliana
ctccaatatgtttccga

SEQ ID NO: 85841 - DNA, 17 bp, Arabidopsis thaliana
ctccaatcccataggcc

SEQ ID NO: 85842 - DNA, 17 bp, Arabidopsis thaliana
ctccaatccttgggtgt

SEQ ID NO: 85843 - DNA, 17 bp, Arabidopsis thaliana
ctccaattgtcgattca

SEQ ID NO: 85844 - DNA, 17 bp, Arabidopsis thaliana
ctccaattttcaaatta

SEQ ID NO: 85845 - DNA, 17 bp, Arabidopsis thaliana
ctccaattttcaaattc

SEQ ID NO: 85846 - DNA, 17 bp, Arabidopsis thaliana
ctccaattttcaaattg

SEQ ID NO: 85847 - DNA, 17 bp, Arabidopsis thaliana
ctccacagctttcttga

SEQ ID NO: 85848 - DNA, 17 bp, Arabidopsis thaliana
ctccacagttaagcgtg

SEQ ID NO: 85849 - DNA, 17 bp, Arabidopsis thaliana
ctccacatctccattgt

SEQ ID NO: 85850 - DNA, 17 bp, Arabidopsis thaliana
ctccaccacaacacgca

SEQ ID NO: 85851 - DNA, 17 bp, Arabidopsis thaliana
ctccaccatcgctagtt

SEQ ID NO: 85852 - DNA, 17 bp, Arabidopsis thaliana
ctccaccccgtaggaac

SEQ ID NO: 85853 - DNA, 17 bp, Arabidopsis thaliana
ctccacccgtcgcaaaa

SEQ ID NO: 85854 - DNA, 17 bp, Arabidopsis thaliana
ctccaccgagctgaacc

SEQ ID NO: 85855 - DNA, 17 bp, Arabidopsis thaliana
ctccacctattgccaat

SEQ ID NO: 85856 - DNA, 17 bp, Arabidopsis thaliana
ctccaccttagcagaat

SEQ ID NO: 85857 - DNA, 17 bp, Arabidopsis thaliana
ctccaccttcaagacct

SEQ ID NO: 85858 - DNA, 17 bp, Arabidopsis thaliana
ctccactcaaaatgaaa

SEQ ID NO: 85859 - DNA, 17 bp, Arabidopsis thaliana
ctccactcggaaccatg

SEQ ID NO: 85860 - DNA, 17 bp, Arabidopsis thaliana
ctccagaagatacggcg

SEQ ID NO: 85861 - DNA, 17 bp, Arabidopsis thaliana
ctccagaattcactaaa

SEQ ID NO: 85862 - DNA, 17 bp, Arabidopsis thaliana
ctccagactcaaggtgt

SEQ ID NO: 85863 - DNA, 17 bp, Arabidopsis thaliana
ctccagaggaccagatt

SEQ ID NO: 85864 - DNA, 17 bp, Arabidopsis thaliana
ctccagaggtgggggcc

SEQ ID NO: 85865 - DNA, 17 bp, Arabidopsis thaliana
ctccagatcagaaggtt

SEQ ID NO: 85866 - DNA, 17 bp, Arabidopsis thaliana
ctccagatctgagaatg

SEQ ID NO: 85867 - DNA, 17 bp, Arabidopsis thaliana
ctccagcacatgtgcac

SEQ ID NO: 85868 - DNA, 17 bp, Arabidopsis thaliana
ctccagcacatgtgtag

SEQ ID NO: 85869 - DNA, 17 bp, Arabidopsis thaliana
ctccagcccctacttct

SEQ ID NO: 85870 - DNA, 17 bp, Arabidopsis thaliana
ctccagccgagtgcctt

SEQ ID NO: 85871 - DNA, 17 bp, Arabidopsis thaliana
ctccagcgagacgtagg

SEQ ID NO: 85872 - DNA, 17 bp, Arabidopsis thaliana
ctccagcgaggcagagc

SEQ ID NO: 85873 - DNA, 17 bp, Arabidopsis thaliana
ctccagcggctattagg

SEQ ID NO: 85874 - DNA, 17 bp, Arabidopsis thaliana
ctccagcggtgtgcaat

SEQ ID NO: 85875 - DNA, 17 bp, Arabidopsis thaliana
ctccagcttggctaacg

SEQ ID NO: 85876 - DNA, 17 bp, Arabidopsis thaliana
ctccagcttgtgtcaat

SEQ ID NO: 85877 - DNA, 17 bp, Arabidopsis thaliana
ctccaggagcccatcag

SEQ ID NO: 85878 - DNA, 17 bp, Arabidopsis thaliana
ctccaggatacaatcct

SEQ ID NO: 85879 - DNA, 17 bp, Arabidopsis thaliana
ctccaggatagcgtagt

SEQ ID NO: 85880 - DNA, 17 bp, Arabidopsis thaliana
ctccaggcccaaaacca

SEQ ID NO: 85881 - DNA, 17 bp, Arabidopsis thaliana
ctccagggcagagtgtt

SEQ ID NO: 85882 - DNA, 17 bp, Arabidopsis thaliana
ctccagggccagatggg

SEQ ID NO: 85883 - DNA, 17 bp, Arabidopsis thaliana
ctccaggtcatcacggc

SEQ ID NO: 85884 - DNA, 17 bp, Arabidopsis thaliana
ctccaggtcgccatgtt

SEQ ID NO: 85885 - DNA, 17 bp, Arabidopsis thaliana
ctccaggtgcaatagat

SEQ ID NO: 85886 - DNA, 17 bp, Arabidopsis thaliana
ctccagtcctaggtcca

SEQ ID NO: 85887 - DNA, 17 bp, Arabidopsis thaliana
ctccagtctccaagccc

SEQ ID NO: 85888 - DNA, 17 bp, Arabidopsis thaliana
ctccagtgaaggtttag

SEQ ID NO: 85889 - DNA, 17 bp, Arabidopsis thaliana
ctccagtgatcgccgcc

SEQ ID NO: 85890 - DNA, 17 bp, Arabidopsis thaliana
ctccagtgcttcaaatg

SEQ ID NO: 85891 - DNA, 17 bp, Arabidopsis thaliana
ctccagttcatctgcag

SEQ ID NO: 85892 - DNA, 17 bp, Arabidopsis thaliana
ctccagttcattgcgtc

SEQ ID NO: 85893 - DNA, 17 bp, Arabidopsis thaliana
ctccagttcggaccttt

SEQ ID NO: 85894 - DNA, 17 bp, Arabidopsis thaliana
ctccagttgtactactg

SEQ ID NO: 85895 - DNA, 17 bp, Arabidopsis thaliana
ctccatatcgatgtagg

SEQ ID NO: 85896 - DNA, 17 bp, Arabidopsis thaliana
ctccatcagtgagatac

SEQ ID NO: 85897 - DNA, 17 bp, Arabidopsis thaliana
ctccatccctgcaaagt

SEQ ID NO: 85898 - DNA, 17 bp, Arabidopsis thaliana
ctccatccggagtttct

SEQ ID NO: 85899 - DNA, 17 bp, Arabidopsis thaliana
ctccatcgccaaagact

SEQ ID NO: 85900 - DNA, 17 bp, Arabidopsis thaliana
ctccatcgggagtttct

SEQ ID NO: 85901 - DNA, 17 bp, Arabidopsis thaliana
ctccatctattgcccaa

SEQ ID NO: 85902 - DNA, 17 bp, Arabidopsis thaliana
ctccatctattgcccag

SEQ ID NO: 85903 - DNA, 17 bp, Arabidopsis thaliana
ctccatctcacggatag

SEQ ID NO: 85904 - DNA, 17 bp, Arabidopsis thaliana
ctccatctcttgctact

SEQ ID NO: 85905 - DNA, 17 bp, Arabidopsis thaliana
ctccatcttgaggtcca

SEQ ID NO: 85906 - DNA, 17 bp, Arabidopsis thaliana
ctccatgaatgtgtccg

SEQ ID NO: 85907 - DNA, 17 bp, Arabidopsis thaliana
ctccatgatgtttatca

SEQ ID NO: 85908 - DNA, 17 bp, Arabidopsis thaliana
ctccatgctttggatgg

SEQ ID NO: 85909 - DNA, 17 bp, Arabidopsis thaliana
ctccatggctaaagtct

SEQ ID NO: 85910 - DNA, 17 bp, Arabidopsis thaliana
ctccatgtttggtaatg

SEQ ID NO: 85911 - DNA, 17 bp, Arabidopsis thaliana
ctccatgtttggtgcct

SEQ ID NO: 85912 - DNA, 17 bp, Arabidopsis thaliana
ctccattaccgctcagg

SEQ ID NO: 85913 - DNA, 17 bp, Arabidopsis thaliana
ctccattcactcaggag

SEQ ID NO: 85914 - DNA, 17 bp, Arabidopsis thaliana
ctccattcgatatctgc

SEQ ID NO: 85915 - DNA, 17 bp, Arabidopsis thaliana
ctccattcgatccgcaa

SEQ ID NO: 85916 - DNA, 17 bp, Arabidopsis thaliana
ctccattcgtctcttta

SEQ ID NO: 85917 - DNA, 17 bp, Arabidopsis thaliana
ctccattctaatcctcc

SEQ ID NO: 85918 - DNA, 17 bp, Arabidopsis thaliana
ctccattgacgttttgt

SEQ ID NO: 85919 - DNA, 17 bp, Arabidopsis thaliana
ctccattgcataacctc

SEQ ID NO: 85920 - DNA, 17 bp, Arabidopsis thaliana
ctccattgcggcatact

SEQ ID NO: 85921 - DNA, 17 bp, Arabidopsis thaliana
ctccattggatatgctc

SEQ ID NO: 85922 - DNA, 17 bp, Arabidopsis thaliana
ctccatttgacagatcc

SEQ ID NO: 85923 - DNA, 17 bp, Arabidopsis thaliana
ctccatttgctgtcctc

SEQ ID NO: 85924 - DNA, 17 bp, Arabidopsis thaliana
ctccatttggacatatc

SEQ ID NO: 85925 - DNA, 17 bp, Arabidopsis thaliana
ctccattttctctttgt

SEQ ID NO: 85926 - DNA, 17 bp, Arabidopsis thaliana
ctcccaaaggcacgtgt

SEQ ID NO: 85927 - DNA, 17 bp, Arabidopsis thaliana
ctcccaacaggggctgg

SEQ ID NO: 85928 - DNA, 17 bp, Arabidopsis thaliana
ctcccaaccgaatggcc

SEQ ID NO: 85929 - DNA, 17 bp, Arabidopsis thaliana
ctcccaacgtgactcga

SEQ ID NO: 85930 - DNA, 17 bp, Arabidopsis thaliana
ctcccaacgtgcctcga

SEQ ID NO: 85931 - DNA, 17 bp, Arabidopsis thaliana
ctcccaactatggagga

SEQ ID NO: 85932 - DNA, 17 bp, Arabidopsis thaliana
ctcccaagcatggtgca

SEQ ID NO: 85933 - DNA, 17 bp, Arabidopsis thaliana
ctcccaagccgcgatgg

SEQ ID NO: 85934 - DNA, 17 bp, Arabidopsis thaliana
ctcccaagggtcgaatt

SEQ ID NO: 85935 - DNA, 17 bp, Arabidopsis thaliana
ctcccaatctctatcgc

SEQ ID NO: 85936 - DNA, 17 bp, Arabidopsis thaliana
ctcccaattcaaaacca

SEQ ID NO: 85937 - DNA, 17 bp, Arabidopsis thaliana
ctcccacggtgccagcc

SEQ ID NO: 85938 - DNA, 17 bp, Arabidopsis thaliana
ctcccacggtgccagtc

SEQ ID NO: 85939 - DNA, 17 bp, Arabidopsis thaliana
ctcccacggtggcagtc

SEQ ID NO: 85940 - DNA, 17 bp, Arabidopsis thaliana
ctcccactgtccctgtc

SEQ ID NO: 85941 - DNA, 17 bp, Arabidopsis thaliana
ctcccactgtggtcgcc

SEQ ID NO: 85942 - DNA, 17 bp, Arabidopsis thaliana
ctcccagtgatcaattt

SEQ ID NO: 85943 - DNA, 17 bp, Arabidopsis thaliana
ctcccatccgtttgctg

SEQ ID NO: 85944 - DNA, 17 bp, Arabidopsis thaliana
ctcccatctctgagccg

SEQ ID NO: 85945 - DNA, 17 bp, Arabidopsis thaliana
ctcccatggcatgaatg

SEQ ID NO: 85946 - DNA, 17 bp, Arabidopsis thaliana
ctcccattatttgtgtg

SEQ ID NO: 85947 - DNA, 17 bp, Arabidopsis thaliana
ctcccattgcacatacc

SEQ ID NO: 85948 - DNA, 17 bp, Arabidopsis thaliana
ctcccatttatttgcag

SEQ ID NO: 85949 - DNA, 17 bp, Arabidopsis thaliana
ctccccaagggttcgag

SEQ ID NO: 85950 - DNA, 17 bp, Arabidopsis thaliana
ctccccattcgacccgt

SEQ ID NO: 85951 - DNA, 17 bp, Arabidopsis thaliana
ctccccgaaggaccacc

SEQ ID NO: 85952 - DNA, 17 bp, Arabidopsis thaliana
ctcccctgaacgtggtg

SEQ ID NO: 85953 - DNA, 17 bp, Arabidopsis thaliana
ctcccctgcgacatggg

SEQ ID NO: 85954 - DNA, 17 bp, Arabidopsis thaliana
ctcccctgcgaggagtc

SEQ ID NO: 85955 - DNA, 17 bp, Arabidopsis thaliana
ctcccctttgtcgctaa

SEQ ID NO: 85956 - DNA, 17 bp, Arabidopsis thaliana
ctcccgcgtgtgcgata

SEQ ID NO: 85957 - DNA, 17 bp, Arabidopsis thaliana
ctcccgcgtgtgcgctc

SEQ ID NO: 85958 - DNA, 17 bp, Arabidopsis thaliana
ctcccggacgtggcgca

SEQ ID NO: 85959 - DNA, 17 bp, Arabidopsis thaliana
ctcccgggaactcctcg

SEQ ID NO: 85960 - DNA, 17 bp, Arabidopsis thaliana
ctcccgggaagtcctcg

SEQ ID NO: 85961 - DNA, 17 bp, Arabidopsis thaliana
ctccctcaacacgggga

SEQ ID NO: 85962 - DNA, 17 bp, Arabidopsis thaliana
ctccctcacttaagatt

SEQ ID NO: 85963 - DNA, 17 bp, Arabidopsis thaliana
ctccctcagaattcgca

SEQ ID NO: 85964 - DNA, 17 bp, Arabidopsis thaliana
ctccctcaggattggct

SEQ ID NO: 85965 - DNA, 17 bp, Arabidopsis thaliana
ctccctcatctccattg

SEQ ID NO: 85966 - DNA, 17 bp, Arabidopsis thaliana
ctccctccaaagtgccc

SEQ ID NO: 85967 - DNA, 17 bp, Arabidopsis thaliana
ctccctccaaggtgaac

SEQ ID NO: 85968 - DNA, 17 bp, Arabidopsis thaliana
ctccctccatcagtgag

SEQ ID NO: 85969 - DNA, 17 bp, Arabidopsis thaliana
ctccctccctccctccc

SEQ ID NO: 85970 - DNA, 17 bp, Arabidopsis thaliana
ctccctccctcggacca

SEQ ID NO: 85971 - DNA, 17 bp, Arabidopsis thaliana
ctccctccgaatcttag

SEQ ID NO: 85972 - DNA, 17 bp, Arabidopsis thaliana
ctccctccgattggacc

SEQ ID NO: 85973 - DNA, 17 bp, Arabidopsis thaliana
ctccctccgtcctacta

SEQ ID NO: 85974 - DNA, 17 bp, Arabidopsis thaliana
ctccctcctcggttttg

SEQ ID NO: 85975 - DNA, 17 bp, Arabidopsis thaliana
ctccctcctgcagcgct

SEQ ID NO: 85976 - DNA, 17 bp, Arabidopsis thaliana
ctccctcctgttgcgct

SEQ ID NO: 85977 - DNA, 17 bp, Arabidopsis thaliana
ctccctccttatgacac

SEQ ID NO: 85978 - DNA, 17 bp, Arabidopsis thaliana
ctccctcgagatgatgg

SEQ ID NO: 85979 - DNA, 17 bp, Arabidopsis thaliana
ctccctcgatgtgaaat

SEQ ID NO: 85980 - DNA, 17 bp, Arabidopsis thaliana
ctccctcgccggatcta

SEQ ID NO: 85981 - DNA, 17 bp, Arabidopsis thaliana
ctccctcgcgacctata

SEQ ID NO: 85982 - DNA, 17 bp, Arabidopsis thaliana
ctccctcggctctcacc

SEQ ID NO: 85983 - DNA, 17 bp, Arabidopsis thaliana
ctccctcgggattctcg

SEQ ID NO: 85984 - DNA, 17 bp, Arabidopsis thaliana
ctccctcgttcccagct

SEQ ID NO: 85985 - DNA, 17 bp, Arabidopsis thaliana
ctccctctcagccttca

SEQ ID NO: 85986 - DNA, 17 bp, Arabidopsis thaliana
ctccctctgaacttcgc

SEQ ID NO: 85987 - DNA, 17 bp, Arabidopsis thaliana
ctccctctgagggctgg

SEQ ID NO: 85988 - DNA, 17 bp, Arabidopsis thaliana
ctccctctgcccgttgc

SEQ ID NO: 85989 - DNA, 17 bp, Arabidopsis thaliana
ctccctcttcgttgcaa

SEQ ID NO: 85990 - DNA, 17 bp, Arabidopsis thaliana
ctccctcttggctcctt

SEQ ID NO: 85991 - DNA, 17 bp, Arabidopsis thaliana
ctccctctttctctgac

SEQ ID NO: 85992 - DNA, 17 bp, Arabidopsis thaliana
ctcccttcaatccaacg

SEQ ID NO: 85993 - DNA, 17 bp, Arabidopsis thaliana
ctcccttcggtcggcga

SEQ ID NO: 85994 - DNA, 17 bp, Arabidopsis thaliana
ctcccttgttcagccgt

SEQ ID NO: 85995 - DNA, 17 bp, Arabidopsis thaliana
ctccctttactgggcct

SEQ ID NO: 85996 - DNA, 17 bp, Arabidopsis thaliana
ctccctttctcattgcc

SEQ ID NO: 85997 - DNA, 17 bp, Arabidopsis thaliana
ctccctttgtcgctaag

SEQ ID NO: 85998 - DNA, 17 bp, Arabidopsis thaliana
ctccctttgttcctttt

SEQ ID NO: 85999 - DNA, 17 bp, Arabidopsis thaliana
ctccctttttggttgca

SEQ ID NO: 86000 - DNA, 17 bp, Arabidopsis thaliana
ctccgaaacaggtacaa

SEQ ID NO: 86001 - DNA, 17 bp, Arabidopsis thaliana
ctccgaacatgccgtgc

SEQ ID NO: 86002 - DNA, 17 bp, Arabidopsis thaliana
ctccgaacctgcagaga

SEQ ID NO: 86003 - DNA, 17 bp, Arabidopsis thaliana
ctccgaagactagacaa

SEQ ID NO: 86004 - DNA, 17 bp, Arabidopsis thaliana
ctccgaagactagacta

SEQ ID NO: 86005 - DNA, 17 bp, Arabidopsis thaliana
ctccgaagtttccctca

SEQ ID NO: 86006 - DNA, 17 bp, Arabidopsis thaliana
ctccgaataccatcgct

SEQ ID NO: 86007 - DNA, 17 bp, Arabidopsis thaliana
ctccgaatcgggattgc

SEQ ID NO: 86008 - DNA, 17 bp, Arabidopsis thaliana
ctccgaatcttagtggg

SEQ ID NO: 86009 - DNA, 17 bp, Arabidopsis thaliana
ctccgaatggtgactgc

SEQ ID NO: 86010 - DNA, 17 bp, Arabidopsis thaliana
ctccgaatggtgattgc

SEQ ID NO: 86011 - DNA, 17 bp, Arabidopsis thaliana
ctccgaatggtgattgt

SEQ ID NO: 86012 - DNA, 17 bp, Arabidopsis thaliana
ctccgacagcagctccg

SEQ ID NO: 86013 - DNA, 17 bp, Arabidopsis thaliana
ctccgacatctgtcaag

SEQ ID NO: 86014 - DNA, 17 bp, Arabidopsis thaliana
ctccgaccaatttatga

SEQ ID NO: 86015 - DNA, 17 bp, Arabidopsis thaliana
ctccgacgaaagaagca

SEQ ID NO: 86016 - DNA, 17 bp, Arabidopsis thaliana
ctccgacgacttgcaac

SEQ ID NO: 86017 - DNA, 17 bp, Arabidopsis thaliana
ctccgacgagaccgttc

SEQ ID NO: 86018 - DNA, 17 bp, Arabidopsis thaliana
ctccgacgattcctttt

SEQ ID NO: 86019 - DNA, 17 bp, Arabidopsis thaliana
ctccgacggatcgcatg

SEQ ID NO: 86020 - DNA, 17 bp, Arabidopsis thaliana
ctccgactatttcctgc

SEQ ID NO: 86021 - DNA, 17 bp, Arabidopsis thaliana
ctccgagaagaagattg

SEQ ID NO: 86022 - DNA, 17 bp, Arabidopsis thaliana
ctccgagcagcgcatag

SEQ ID NO: 86023 - DNA, 17 bp, Arabidopsis thaliana
ctccgaggcctggaccg

SEQ ID NO: 86024 - DNA, 17 bp, Arabidopsis thaliana
ctccgaggcctggacgg

SEQ ID NO: 86025 - DNA, 17 bp, Arabidopsis thaliana
ctccgatctaattacgg

SEQ ID NO: 86026 - DNA, 17 bp, Arabidopsis thaliana
ctccgatctgacattgt

SEQ ID NO: 86027 - DNA, 17 bp, Arabidopsis thaliana
ctccgatggaccatcac

SEQ ID NO: 86028 - DNA, 17 bp, Arabidopsis thaliana
ctccgatgtggatgaga

SEQ ID NO: 86029 - DNA, 17 bp, Arabidopsis thaliana
ctccgatgtgtttgctt

SEQ ID NO: 86030 - DNA, 17 bp, Arabidopsis thaliana
ctccgattgcgtgcttt

SEQ ID NO: 86031 - DNA, 17 bp, Arabidopsis thaliana
ctccgattggaccatca

SEQ ID NO: 86032 - DNA, 17 bp, Arabidopsis thaliana
ctccgcaaagtcgtaag

SEQ ID NO: 86033 - DNA, 17 bp, Arabidopsis thaliana
ctccgcagataaggtgc

SEQ ID NO: 86034 - DNA, 17 bp, Arabidopsis thaliana
ctccgcagctaagcgtg

SEQ ID NO: 86035 - DNA, 17 bp, Arabidopsis thaliana
ctccgcaggtaagcgtg

SEQ ID NO: 86036 - DNA, 17 bp, Arabidopsis thaliana
ctccgcagttaagcgtg

SEQ ID NO: 86037 - DNA, 17 bp, Arabidopsis thaliana
ctccgccagaaccgcca

SEQ ID NO: 86038 - DNA, 17 bp, Arabidopsis thaliana
ctccgccgattttccct

SEQ ID NO: 86039 - DNA, 17 bp, Arabidopsis thaliana
ctccgcggttaagcgtg

SEQ ID NO: 86040 - DNA, 17 bp, Arabidopsis thaliana
ctccgctacacgctgct

SEQ ID NO: 86041 - DNA, 17 bp, Arabidopsis thaliana
ctccgctcagacaagac

SEQ ID NO: 86042 - DNA, 17 bp, Arabidopsis thaliana
ctccgctcgctgcgtgc

SEQ ID NO: 86043 - DNA, 17 bp, Arabidopsis thaliana
ctccgctgacgctgcgt

SEQ ID NO: 86044 - DNA, 17 bp, Arabidopsis thaliana
ctccgctgcagcttcgc

SEQ ID NO: 86045 - DNA, 17 bp, Arabidopsis thaliana
ctccgcttcaccgttgt

SEQ ID NO: 86046 - DNA, 17 bp, Arabidopsis thaliana
ctccgcttgattgtgta

SEQ ID NO: 86047 - DNA, 17 bp, Arabidopsis thaliana
ctccggaaactctgaag

SEQ ID NO: 86048 - DNA, 17 bp, Arabidopsis thaliana
ctccggaacgcgggcga

SEQ ID NO: 86049 - DNA, 17 bp, Arabidopsis thaliana
ctccggacgccggcaaa

SEQ ID NO: 86050 - DNA, 17 bp, Arabidopsis thaliana
ctccggatcttcttcgc

SEQ ID NO: 86051 - DNA, 17 bp, Arabidopsis thaliana
ctccggatcttctttgc

SEQ ID NO: 86052 - DNA, 17 bp, Arabidopsis thaliana
ctccggccacagccctt

SEQ ID NO: 86053 - DNA, 17 bp, Arabidopsis thaliana
ctccggcgagacgtagc

SEQ ID NO: 86054 - DNA, 17 bp, Arabidopsis thaliana
ctccggcgctgttactt

SEQ ID NO: 86055 - DNA, 17 bp, Arabidopsis thaliana
ctccggctacgccattg

SEQ ID NO: 86056 - DNA, 17 bp, Arabidopsis thaliana
ctccggctcaggccact

SEQ ID NO: 86057 - DNA, 17 bp, Arabidopsis thaliana
ctccggctcgttcttct

SEQ ID NO: 86058 - DNA, 17 bp, Arabidopsis thaliana
ctccggctgggtgaata

SEQ ID NO: 86059 - DNA, 17 bp, Arabidopsis thaliana
ctccgggacacacttgc

SEQ ID NO: 86060 - DNA, 17 bp, Arabidopsis thaliana
ctccggggaggcgaatg

SEQ ID NO: 86061 - DNA, 17 bp, Arabidopsis thaliana
ctccgggttatgcaatg

SEQ ID NO: 86062 - DNA, 17 bp, Arabidopsis thaliana
ctccgggtttcctaatg

SEQ ID NO: 86063 - DNA, 17 bp, Arabidopsis thaliana
ctccggtacaagctgct

SEQ ID NO: 86064 - DNA, 17 bp, Arabidopsis thaliana
ctccggtacccgggcga

SEQ ID NO: 86065 - DNA, 17 bp, Arabidopsis thaliana
ctccggtgaagtgttcg

SEQ ID NO: 86066 - DNA, 17 bp, Arabidopsis thaliana
ctccggtgtgatgatgt

SEQ ID NO: 86067 - DNA, 17 bp, Arabidopsis thaliana
ctccggttcaactgcgg

SEQ ID NO: 86068 - DNA, 17 bp, Arabidopsis thaliana
ctccggttcgtacccgg

SEQ ID NO: 86069 - DNA, 17 bp, Arabidopsis thaliana
ctccggttcgttccggg

SEQ ID NO: 86070 - DNA, 17 bp, Arabidopsis thaliana
ctccgtacgtattttgc

SEQ ID NO: 86071 - DNA, 17 bp, Arabidopsis thaliana
ctccgtactctctgcag

SEQ ID NO: 86072 - DNA, 17 bp, Arabidopsis thaliana
ctccgtagctgcaacga

SEQ ID NO: 86073 - DNA, 17 bp, Arabidopsis thaliana
ctccgtcagagtcgcta

SEQ ID NO: 86074 - DNA, 17 bp, Arabidopsis thaliana
ctccgtcctttcctaga

SEQ ID NO: 86075 - DNA, 17 bp, Arabidopsis thaliana
ctccgtcgaattctcag

SEQ ID NO: 86076 - DNA, 17 bp, Arabidopsis thaliana
ctccgtctccgtctccg

SEQ ID NO: 86077 - DNA, 17 bp, Arabidopsis thaliana
ctccgtctctcattcgc

SEQ ID NO: 86078 - DNA, 17 bp, Arabidopsis thaliana
ctccgtcttctggttga

SEQ ID NO: 86079 - DNA, 17 bp, Arabidopsis thaliana
ctccgtctttcgttggc

SEQ ID NO: 86080 - DNA, 17 bp, Arabidopsis thaliana
ctccgtcttttggttga

SEQ ID NO: 86081 - DNA, 17 bp, Arabidopsis thaliana
ctccgtgaatcggaggc

SEQ ID NO: 86082 - DNA, 17 bp, Arabidopsis thaliana
ctccgtgttctgtcggc

SEQ ID NO: 86083 - DNA, 17 bp, Arabidopsis thaliana
ctccgttacagggctaa

SEQ ID NO: 86084 - DNA, 17 bp, Arabidopsis thaliana
ctccgttgtagtctagc

SEQ ID NO: 86085 - DNA, 17 bp, Arabidopsis thaliana
ctccgtttgcttgttga

SEQ ID NO: 86086 - DNA, 17 bp, Arabidopsis thaliana
ctcctaacgaactctgc

SEQ ID NO: 86087 - DNA, 17 bp, Arabidopsis thaliana
ctcctaactagctacgt

SEQ ID NO: 86088 - DNA, 17 bp, Arabidopsis thaliana
ctcctaagctggctgca

SEQ ID NO: 86089 - DNA, 17 bp, Arabidopsis thaliana
ctcctaagtcctaacca

SEQ ID NO: 86090 - DNA, 17 bp, Arabidopsis thaliana
ctcctaagtgtgcgttg

SEQ ID NO: 86091 - DNA, 17 bp, Arabidopsis thaliana
ctcctacaaccgtggca

SEQ ID NO: 86092 - DNA, 17 bp, Arabidopsis thaliana
ctcctacagggagctct

SEQ ID NO: 86093 - DNA, 17 bp, Arabidopsis thaliana
ctcctacatcttagcaa

SEQ ID NO: 86094 - DNA, 17 bp, Arabidopsis thaliana
ctcctaccaactggatg

SEQ ID NO: 86095 - DNA, 17 bp, Arabidopsis thaliana
ctcctaccgattgaatg

SEQ ID NO: 86096 - DNA, 17 bp, Arabidopsis thaliana
ctcctacgggaggcagc

SEQ ID NO: 86097 - DNA, 17 bp, Arabidopsis thaliana
ctcctacgtggaagtat

SEQ ID NO: 86098 - DNA, 17 bp, Arabidopsis thaliana
ctcctactttgccattg

SEQ ID NO: 86099 - DNA, 17 bp, Arabidopsis thaliana
ctcctagggctctgggt

SEQ ID NO: 86100 - DNA, 17 bp, Arabidopsis thaliana
ctcctatctttggtgct

SEQ ID NO: 86101 - DNA, 17 bp, Arabidopsis thaliana
ctcctatgaagtgtggc

SEQ ID NO: 86102 - DNA, 17 bp, Arabidopsis thaliana
ctcctattcgaccatca

SEQ ID NO: 86103 - DNA, 17 bp, Arabidopsis thaliana
ctcctattggaagtgct

SEQ ID NO: 86104 - DNA, 17 bp, Arabidopsis thaliana
ctcctatttcctctcgc

SEQ ID NO: 86105 - DNA, 17 bp, Arabidopsis thaliana
ctcctcaaatggtggga

SEQ ID NO: 86106 - DNA, 17 bp, Arabidopsis thaliana
ctcctcagcgacggacc

SEQ ID NO: 86107 - DNA, 17 bp, Arabidopsis thaliana
ctcctcagttggtggac

SEQ ID NO: 86108 - DNA, 17 bp, Arabidopsis thaliana
ctcctcattctcctaca

SEQ ID NO: 86109 - DNA, 17 bp, Arabidopsis thaliana
ctcctccaaatacacag

SEQ ID NO: 86110 - DNA, 17 bp, Arabidopsis thaliana
ctcctccaatgtcgatg

SEQ ID NO: 86111 - DNA, 17 bp, Arabidopsis thaliana
ctcctccatctttcttc

SEQ ID NO: 86112 - DNA, 17 bp, Arabidopsis thaliana
ctcctccatttttgcct

SEQ ID NO: 86113 - DNA, 17 bp, Arabidopsis thaliana
ctcctccgatgaaggct

SEQ ID NO: 86114 - DNA, 17 bp, Arabidopsis thaliana
ctcctccgccgattttc

SEQ ID NO: 86115 - DNA, 17 bp, Arabidopsis thaliana
ctcctccgtacggatca

SEQ ID NO: 86116 - DNA, 17 bp, Arabidopsis thaliana
ctcctcgaatggatcga

SEQ ID NO: 86117 - DNA, 17 bp, Arabidopsis thaliana
ctcctcgagggcctcac

SEQ ID NO: 86118 - DNA, 17 bp, Arabidopsis thaliana
ctcctcgattgtgaaaa

SEQ ID NO: 86119 - DNA, 17 bp, Arabidopsis thaliana
ctcctcgcaacttggct

SEQ ID NO: 86120 - DNA, 17 bp, Arabidopsis thaliana
ctcctcgcaggggagag

SEQ ID NO: 86121 - DNA, 17 bp, Arabidopsis thaliana
ctcctcggttttgctcc

SEQ ID NO: 86122 - DNA, 17 bp, Arabidopsis thaliana
ctcctcgtctagctatc

SEQ ID NO: 86123 - DNA, 17 bp, Arabidopsis thaliana
ctcctcgtttcctgcaa

SEQ ID NO: 86124 - DNA, 17 bp, Arabidopsis thaliana
ctcctctatttggcatg

SEQ ID NO: 86125 - DNA, 17 bp, Arabidopsis thaliana
ctcctctcacagtgagt

SEQ ID NO: 86126 - DNA, 17 bp, Arabidopsis thaliana
ctcctctcgctcggttc

SEQ ID NO: 86127 - DNA, 17 bp, Arabidopsis thaliana
ctcctctctggaatctc

SEQ ID NO: 86128 - DNA, 17 bp, Arabidopsis thaliana
ctcctctcttcctagcc

SEQ ID NO: 86129 - DNA, 17 bp, Arabidopsis thaliana
ctcctctcttttcagca

SEQ ID NO: 86130 - DNA, 17 bp, Arabidopsis thaliana
ctcctctgatcactggg

SEQ ID NO: 86131 - DNA, 17 bp, Arabidopsis thaliana
ctcctctgtggctggcc

SEQ ID NO: 86132 - DNA, 17 bp, Arabidopsis thaliana
ctcctcttgcgatctat

SEQ ID NO: 86133 - DNA, 17 bp, Arabidopsis thaliana
ctcctctttctgggact

SEQ ID NO: 86134 - DNA, 17 bp, Arabidopsis thaliana
ctcctgaaagtgaagac

SEQ ID NO: 86135 - DNA, 17 bp, Arabidopsis thaliana
ctcctgaacatctgtct

SEQ ID NO: 86136 - DNA, 17 bp, Arabidopsis thaliana
ctcctgaacgtggttga

SEQ ID NO: 86137 - DNA, 17 bp, Arabidopsis thaliana
ctcctgaagccgacggt

SEQ ID NO: 86138 - DNA, 17 bp, Arabidopsis thaliana
ctcctgaccatcctgac

SEQ ID NO: 86139 - DNA, 17 bp, Arabidopsis thaliana
ctcctgaccgtcgcacc

SEQ ID NO: 86140 - DNA, 17 bp, Arabidopsis thaliana
ctcctgatacgttttga

SEQ ID NO: 86141 - DNA, 17 bp, Arabidopsis thaliana
ctcctgcaagtgactac

SEQ ID NO: 86142 - DNA, 17 bp, Arabidopsis thaliana
ctcctgcacacttgcct

SEQ ID NO: 86143 - DNA, 17 bp, Arabidopsis thaliana
ctcctgcagcgctgtct

SEQ ID NO: 86144 - DNA, 17 bp, Arabidopsis thaliana
ctcctgccctttcgcct

SEQ ID NO: 86145 - DNA, 17 bp, Arabidopsis thaliana
ctcctgcgcaaactcac

SEQ ID NO: 86146 - DNA, 17 bp, Arabidopsis thaliana
ctcctgcgtttgtgttt

SEQ ID NO: 86147 - DNA, 17 bp, Arabidopsis thaliana
ctcctggaactgactgc

SEQ ID NO: 86148 - DNA, 17 bp, Arabidopsis thaliana
ctcctggctcgcgagtt

SEQ ID NO: 86149 - DNA, 17 bp, Arabidopsis thaliana
ctcctgggaagtcctcg

SEQ ID NO: 86150 - DNA, 17 bp, Arabidopsis thaliana
ctcctgggcagcaccac

SEQ ID NO: 86151 - DNA, 17 bp, Arabidopsis thaliana
ctcctgggtgaccgata

SEQ ID NO: 86152 - DNA, 17 bp, Arabidopsis thaliana
ctcctggtcttaattcg

SEQ ID NO: 86153 - DNA, 17 bp, Arabidopsis thaliana
ctcctggtcttaattgg

SEQ ID NO: 86154 - DNA, 17 bp, Arabidopsis thaliana
ctcctggtgtcgttttc

SEQ ID NO: 86155 - DNA, 17 bp, Arabidopsis thaliana
ctcctgttgcgctaact

SEQ ID NO: 86156 - DNA, 17 bp, Arabidopsis thaliana
ctcctgtttcagctgcg

SEQ ID NO: 86157 - DNA, 17 bp, Arabidopsis thaliana
ctccttaatcgaatggt

SEQ ID NO: 86158 - DNA, 17 bp, Arabidopsis thaliana
ctccttcaacacccacc

SEQ ID NO: 86159 - DNA, 17 bp, Arabidopsis thaliana
ctccttcaggttagtta

SEQ ID NO: 86160 - DNA, 17 bp, Arabidopsis thaliana
ctccttcagtgtgacta

SEQ ID NO: 86161 - DNA, 17 bp, Arabidopsis thaliana
ctccttccgcgggatac

SEQ ID NO: 86162 - DNA, 17 bp, Arabidopsis thaliana
ctccttccgctgctccg

SEQ ID NO: 86163 - DNA, 17 bp, Arabidopsis thaliana
ctccttcggatggagaa

SEQ ID NO: 86164 - DNA, 17 bp, Arabidopsis thaliana
ctccttcggtatgactg

SEQ ID NO: 86165 - DNA, 17 bp, Arabidopsis thaliana
ctccttcgtggggaagt

SEQ ID NO: 86166 - DNA, 17 bp, Arabidopsis thaliana
ctccttctccatgctct

SEQ ID NO: 86167 - DNA, 17 bp, Arabidopsis thaliana
ctccttctgctagagtt

SEQ ID NO: 86168 - DNA, 17 bp, Arabidopsis thaliana
ctccttcttagactgca

SEQ ID NO: 86169 - DNA, 17 bp, Arabidopsis thaliana
ctccttcttttcttcat

SEQ ID NO: 86170 - DNA, 17 bp, Arabidopsis thaliana
ctccttgactctagtcc

SEQ ID NO: 86171 - DNA, 17 bp, Arabidopsis thaliana
ctccttgatggagagcc

SEQ ID NO: 86172 - DNA, 17 bp, Arabidopsis thaliana
ctccttgcactccaaac

SEQ ID NO: 86173 - DNA, 17 bp, Arabidopsis thaliana
ctccttgggattctgaa

SEQ ID NO: 86174 - DNA, 17 bp, Arabidopsis thaliana
ctccttggggttgtagg

SEQ ID NO: 86175 - DNA, 17 bp, Arabidopsis thaliana
ctccttggttaacacct

SEQ ID NO: 86176 - DNA, 17 bp, Arabidopsis thaliana
ctcctttaagatccgat

SEQ ID NO: 86177 - DNA, 17 bp, Arabidopsis thaliana
ctcctttaaggctgagg

SEQ ID NO: 86178 - DNA, 17 bp, Arabidopsis thaliana
ctcctttcgtttttttg

SEQ ID NO: 86179 - DNA, 17 bp, Arabidopsis thaliana
ctcctttctcttatttc

SEQ ID NO: 86180 - DNA, 17 bp, Arabidopsis thaliana
ctcctttggagaagaga

SEQ ID NO: 86181 - DNA, 17 bp, Arabidopsis thaliana
ctcctttggcggaaaga

SEQ ID NO: 86182 - DNA, 17 bp, Arabidopsis thaliana
ctcctttggtggatacc

SEQ ID NO: 86183 - DNA, 17 bp, Arabidopsis thaliana
ctcctttggtgggtacc

SEQ ID NO: 86184 - DNA, 17 bp, Arabidopsis thaliana
ctcctttgtcgctaaga

SEQ ID NO: 86185 - DNA, 17 bp, Arabidopsis thaliana
ctcctttgtgcctatcc

SEQ ID NO: 86186 - DNA, 17 bp, Arabidopsis thaliana
ctccttttccatttttg

SEQ ID NO: 86187 - DNA, 17 bp, Arabidopsis thaliana
ctccttttccggacctg

SEQ ID NO: 86188 - DNA, 17 bp, Arabidopsis thaliana
ctcctttttgaaggctt

SEQ ID NO: 86189 - DNA, 17 bp, Arabidopsis thaliana
ctcgaaaaatgtgggct

SEQ ID NO: 86190 - DNA, 17 bp, Arabidopsis thaliana
ctcgaaaaggccatgag

SEQ ID NO: 86191 - DNA, 17 bp, Arabidopsis thaliana
ctcgaaactgctctgga

SEQ ID NO: 86192 - DNA, 17 bp, Arabidopsis thaliana
ctcgaaagaagacttgg

SEQ ID NO: 86193 - DNA, 17 bp, Arabidopsis thaliana
ctcgaaagagcccggta

SEQ ID NO: 86194 - DNA, 17 bp, Arabidopsis thaliana
ctcgaaatctgtgcgct

SEQ ID NO: 86195 - DNA, 17 bp, Arabidopsis thaliana
ctcgaaatctgtttgag

SEQ ID NO: 86196 - DNA, 17 bp, Arabidopsis thaliana
ctcgaacatcagcaagt

SEQ ID NO: 86197 - DNA, 17 bp, Arabidopsis thaliana
ctcgaacccagcacctc

SEQ ID NO: 86198 - DNA, 17 bp, Arabidopsis thaliana
ctcgaaccccagacctc

SEQ ID NO: 86199 - DNA, 17 bp, Arabidopsis thaliana
ctcgaaccccctcagaa

SEQ ID NO: 86200 - DNA, 17 bp, Arabidopsis thaliana
ctcgaaccgacgatctt

SEQ ID NO: 86201 - DNA, 17 bp, Arabidopsis thaliana
ctcgaacctaagacctc

SEQ ID NO: 86202 - DNA, 17 bp, Arabidopsis thaliana
ctcgaacctaccccccc

SEQ ID NO: 86203 - DNA, 17 bp, Arabidopsis thaliana
ctcgaacctcagacctc

SEQ ID NO: 86204 - DNA, 17 bp, Arabidopsis thaliana
ctcgaacctgggtaagg

SEQ ID NO: 86205 - DNA, 17 bp, Arabidopsis thaliana
ctcgaacctgttcaaat

SEQ ID NO: 86206 - DNA, 17 bp, Arabidopsis thaliana
ctcgaacgacctgtgtc

SEQ ID NO: 86207 - DNA, 17 bp, Arabidopsis thaliana
ctcgaagacgatcagat

SEQ ID NO: 86208 - DNA, 17 bp, Arabidopsis thaliana
ctcgaagctacagttat

SEQ ID NO: 86209 - DNA, 17 bp, Arabidopsis thaliana
ctcgaagctactgcgat

SEQ ID NO: 86210 - DNA, 17 bp, Arabidopsis thaliana
ctcgaaggattatggat

SEQ ID NO: 86211 - DNA, 17 bp, Arabidopsis thaliana
ctcgaaggttgtcatgc

SEQ ID NO: 86212 - DNA, 17 bp, Arabidopsis thaliana
ctcgaagtaaaactgtt

SEQ ID NO: 86213 - DNA, 17 bp, Arabidopsis thaliana
ctcgaagtcagctaatc

SEQ ID NO: 86214 - DNA, 17 bp, Arabidopsis thaliana
ctcgaagtgcagcggcc

SEQ ID NO: 86215 - DNA, 17 bp, Arabidopsis thaliana
ctcgaagttactgcgat

SEQ ID NO: 86216 - DNA, 17 bp, Arabidopsis thaliana
ctcgaataagtgctgta

SEQ ID NO: 86217 - DNA, 17 bp, Arabidopsis thaliana
ctcgaatcccagcagcc

SEQ ID NO: 86218 - DNA, 17 bp, Arabidopsis thaliana
ctcgaatcgggtttgga

SEQ ID NO: 86219 - DNA, 17 bp, Arabidopsis thaliana
ctcgaatctactgcgat

SEQ ID NO: 86220 - DNA, 17 bp, Arabidopsis thaliana
ctcgaatctccttcatc

SEQ ID NO: 86221 - DNA, 17 bp, Arabidopsis thaliana
ctcgaatctgatttcac

SEQ ID NO: 86222 - DNA, 17 bp, Arabidopsis thaliana
ctcgaatgcgttcagct

SEQ ID NO: 86223 - DNA, 17 bp, Arabidopsis thaliana
ctcgaattcgtaatcga

SEQ ID NO: 86224 - DNA, 17 bp, Arabidopsis thaliana
ctcgacaattaacctga

SEQ ID NO: 86225 - DNA, 17 bp, Arabidopsis thaliana
ctcgacaattccgtcct

SEQ ID NO: 86226 - DNA, 17 bp, Arabidopsis thaliana
ctcgacacagacaggac

SEQ ID NO: 86227 - DNA, 17 bp, Arabidopsis thaliana
ctcgacaccgaggcaga

SEQ ID NO: 86228 - DNA, 17 bp, Arabidopsis thaliana
ctcgacagaattgagaa

SEQ ID NO: 86229 - DNA, 17 bp, Arabidopsis thaliana
ctcgacatgaaaggcgc

SEQ ID NO: 86230 - DNA, 17 bp, Arabidopsis thaliana
ctcgaccaacacagctc

SEQ ID NO: 86231 - DNA, 17 bp, Arabidopsis thaliana
ctcgaccacccagttgt

SEQ ID NO: 86232 - DNA, 17 bp, Arabidopsis thaliana
ctcgaccagtcactcga

SEQ ID NO: 86233 - DNA, 17 bp, Arabidopsis thaliana
ctcgaccgcgtacttga

SEQ ID NO: 86234 - DNA, 17 bp, Arabidopsis thaliana
ctcgaccggagcattta

SEQ ID NO: 86235 - DNA, 17 bp, Arabidopsis thaliana
ctcgaccgttgactctc

SEQ ID NO: 86236 - DNA, 17 bp, Arabidopsis thaliana
ctcgaccgtttcactcg

SEQ ID NO: 86237 - DNA, 17 bp, Arabidopsis thaliana
ctcgacctcatactcga

SEQ ID NO: 86238 - DNA, 17 bp, Arabidopsis thaliana
ctcgacctcatggcctc

SEQ ID NO: 86239 - DNA, 17 bp, Arabidopsis thaliana
ctcgacgaaatcagatg

SEQ ID NO: 86240 - DNA, 17 bp, Arabidopsis thaliana
ctcgacgagaaaggttt

SEQ ID NO: 86241 - DNA, 17 bp, Arabidopsis thaliana
ctcgacgatttcaagtc

SEQ ID NO: 86242 - DNA, 17 bp, Arabidopsis thaliana
ctcgacgcatagacgag

SEQ ID NO: 86243 - DNA, 17 bp, Arabidopsis thaliana
ctcgacgcatcgccccc

SEQ ID NO: 86244 - DNA, 17 bp, Arabidopsis thaliana
ctcgacgcatggacgag

SEQ ID NO: 86245 - DNA, 17 bp, Arabidopsis thaliana
ctcgacgcgtggacgag

SEQ ID NO: 86246 - DNA, 17 bp, Arabidopsis thaliana
ctcgacggaccgcatgg

SEQ ID NO: 86247 - DNA, 17 bp, Arabidopsis thaliana
ctcgacggatcgcaccc

SEQ ID NO: 86248 - DNA, 17 bp, Arabidopsis thaliana
ctcgacggatcgcacgg

SEQ ID NO: 86249 - DNA, 17 bp, Arabidopsis thaliana
ctcgacggatcgcatcg

SEQ ID NO: 86250 - DNA, 17 bp, Arabidopsis thaliana
ctcgacggatcgcatga

SEQ ID NO: 86251 - DNA, 17 bp, Arabidopsis thaliana
ctcgacggatcgcatgg

SEQ ID NO: 86252 - DNA, 17 bp, Arabidopsis thaliana
ctcgacggatcgcatgt

SEQ ID NO: 86253 - DNA, 17 bp, Arabidopsis thaliana
ctcgactacatactcga

SEQ ID NO: 86254 - DNA, 17 bp, Arabidopsis thaliana
ctcgactcctgcgatca

SEQ ID NO: 86255 - DNA, 17 bp, Arabidopsis thaliana
ctcgactcgtaggtttg

SEQ ID NO: 86256 - DNA, 17 bp, Arabidopsis thaliana
ctcgactcttgacagca

SEQ ID NO: 86257 - DNA, 17 bp, Arabidopsis thaliana
ctcgactgatggattca

SEQ ID NO: 86258 - DNA, 17 bp, Arabidopsis thaliana
ctcgactgcacagtctg

SEQ ID NO: 86259 - DNA, 17 bp, Arabidopsis thaliana
ctcgacttcttcttcgg

SEQ ID NO: 86260 - DNA, 17 bp, Arabidopsis thaliana
ctcgactttgtcatctt

SEQ ID NO: 86261 - DNA, 17 bp, Arabidopsis thaliana
ctcgagagattacagac

SEQ ID NO: 86262 - DNA, 17 bp, Arabidopsis thaliana
ctcgagaggttgaggac

SEQ ID NO: 86263 - DNA, 17 bp, Arabidopsis thaliana
ctcgagatccggcgggt

SEQ ID NO: 86264 - DNA, 17 bp, Arabidopsis thaliana
ctcgagatctgtgcgct

SEQ ID NO: 86265 - DNA, 17 bp, Arabidopsis thaliana
ctcgagatgatggcttt

SEQ ID NO: 86266 - DNA, 17 bp, Arabidopsis thaliana
ctcgagatttctaacac

SEQ ID NO: 86267 - DNA, 17 bp, Arabidopsis thaliana
ctcgagcaggcattcga

SEQ ID NO: 86268 - DNA, 17 bp, Arabidopsis thaliana
ctcgagccgtacgagga

SEQ ID NO: 86269 - DNA, 17 bp, Arabidopsis thaliana
ctcgagctgatgtatgg

SEQ ID NO: 86270 - DNA, 17 bp, Arabidopsis thaliana
ctcgagctgccactcga

SEQ ID NO: 86271 - DNA, 17 bp, Arabidopsis thaliana
ctcgaggagatacgcga

SEQ ID NO: 86272 - DNA, 17 bp, Arabidopsis thaliana
ctcgaggatgcttatgg

SEQ ID NO: 86273 - DNA, 17 bp, Arabidopsis thaliana
ctcgagggcttcgattt

SEQ ID NO: 86274 - DNA, 17 bp, Arabidopsis thaliana
ctcgagtagtgacgggt

SEQ ID NO: 86275 - DNA, 17 bp, Arabidopsis thaliana
ctcgagtccaatgagaa

SEQ ID NO: 86276 - DNA, 17 bp, Arabidopsis thaliana
ctcgagtcctgttcggg

SEQ ID NO: 86277 - DNA, 17 bp, Arabidopsis thaliana
ctcgagtgacttttttc

SEQ ID NO: 86278 - DNA, 17 bp, Arabidopsis thaliana
ctcgagtgagccgactg

SEQ ID NO: 86279 - DNA, 17 bp, Arabidopsis thaliana
ctcgagtgcctggtgcg

SEQ ID NO: 86280 - DNA, 17 bp, Arabidopsis thaliana
ctcgagtgcttccgcgg

SEQ ID NO: 86281 - DNA, 17 bp, Arabidopsis thaliana
ctcgagtgggtgtatta

SEQ ID NO: 86282 - DNA, 17 bp, Arabidopsis thaliana
ctcgagtggttggtctc

SEQ ID NO: 86283 - DNA, 17 bp, Arabidopsis thaliana
ctcgagttcacggttac

SEQ ID NO: 86284 - DNA, 17 bp, Arabidopsis thaliana
ctcgagttgcggtttaa

SEQ ID NO: 86285 - DNA, 17 bp, Arabidopsis thaliana
ctcgagtttgaaatgct

SEQ ID NO: 86286 - DNA, 17 bp, Arabidopsis thaliana
ctcgataaacctctgca

SEQ ID NO: 86287 - DNA, 17 bp, Arabidopsis thaliana
ctcgataactaagtctc

SEQ ID NO: 86288 - DNA, 17 bp, Arabidopsis thaliana
ctcgataacttttggag

SEQ ID NO: 86289 - DNA, 17 bp, Arabidopsis thaliana
ctcgataccctcatccc

SEQ ID NO: 86290 - DNA, 17 bp, Arabidopsis thaliana
ctcgataggtgttacga

SEQ ID NO: 86291 - DNA, 17 bp, Arabidopsis thaliana
ctcgatatcaatcagaa

SEQ ID NO: 86292 - DNA, 17 bp, Arabidopsis thaliana
ctcgatatggcgccgaa

SEQ ID NO: 86293 - DNA, 17 bp, Arabidopsis thaliana
ctcgatatgtccgagtg

SEQ ID NO: 86294 - DNA, 17 bp, Arabidopsis thaliana
ctcgatcacaaggtcgc

SEQ ID NO: 86295 - DNA, 17 bp, Arabidopsis thaliana
ctcgatcacactacttc

SEQ ID NO: 86296 - DNA, 17 bp, Arabidopsis thaliana
ctcgatccatcaggctc

SEQ ID NO: 86297 - DNA, 17 bp, Arabidopsis thaliana
ctcgatccattatgtct

SEQ ID NO: 86298 - DNA, 17 bp, Arabidopsis thaliana
ctcgatccattatgtta

SEQ ID NO: 86299 - DNA, 17 bp, Arabidopsis thaliana
ctcgatcgatgtcaggc

SEQ ID NO: 86300 - DNA, 17 bp, Arabidopsis thaliana
ctcgatcgtgtcgtcgg

SEQ ID NO: 86301 - DNA, 17 bp, Arabidopsis thaliana
ctcgatctcttttgcct

SEQ ID NO: 86302 - DNA, 17 bp, Arabidopsis thaliana
ctcgatctttcttttgc

SEQ ID NO: 86303 - DNA, 17 bp, Arabidopsis thaliana
ctcgatgagtaggaggg

SEQ ID NO: 86304 - DNA, 17 bp, Arabidopsis thaliana
ctcgatgagttatggac

SEQ ID NO: 86305 - DNA, 17 bp, Arabidopsis thaliana
ctcgatgatttagactc

SEQ ID NO: 86306 - DNA, 17 bp, Arabidopsis thaliana
ctcgatgggttctgttt

SEQ ID NO: 86307 - DNA, 17 bp, Arabidopsis thaliana
ctcgatggttcacggga

SEQ ID NO: 86308 - DNA, 17 bp, Arabidopsis thaliana
ctcgatgtcggctcttc

SEQ ID NO: 86309 - DNA, 17 bp, Arabidopsis thaliana
ctcgatgtgaaatatgt

SEQ ID NO: 86310 - DNA, 17 bp, Arabidopsis thaliana
ctcgatgtgaaccacac

SEQ ID NO: 86311 - DNA, 17 bp, Arabidopsis thaliana
ctcgattacggcggcgc

SEQ ID NO: 86312 - DNA, 17 bp, Arabidopsis thaliana
ctcgattacggcggtgc

SEQ ID NO: 86313 - DNA, 17 bp, Arabidopsis thaliana
ctcgattcccggctggt

SEQ ID NO: 86314 - DNA, 17 bp, Arabidopsis thaliana
ctcgattccgtgtgacg

SEQ ID NO: 86315 - DNA, 17 bp, Arabidopsis thaliana
ctcgattcttcttcaat

SEQ ID NO: 86316 - DNA, 17 bp, Arabidopsis thaliana
ctcgattgcgagcttca

SEQ ID NO: 86317 - DNA, 17 bp, Arabidopsis thaliana
ctcgattgctcgaccga

SEQ ID NO: 86318 - DNA, 17 bp, Arabidopsis thaliana
ctcgattggaccatcac

SEQ ID NO: 86319 - DNA, 17 bp, Arabidopsis thaliana
ctcgattggtctactgt

SEQ ID NO: 86320 - DNA, 17 bp, Arabidopsis thaliana
ctcgatttcatcttctt

SEQ ID NO: 86321 - DNA, 17 bp, Arabidopsis thaliana
ctcgattttatccaccg

SEQ ID NO: 86322 - DNA, 17 bp, Arabidopsis thaliana
ctcgattttgatttctc

SEQ ID NO: 86323 - DNA, 17 bp, Arabidopsis thaliana
ctcgcaaaacgactgtt

SEQ ID NO: 86324 - DNA, 17 bp, Arabidopsis thaliana
ctcgcaactaaactaat

SEQ ID NO: 86325 - DNA, 17 bp, Arabidopsis thaliana
ctcgcaagaatcgacgt

SEQ ID NO: 86326 - DNA, 17 bp, Arabidopsis thaliana
ctcgcaagaccttggag

SEQ ID NO: 86327 - DNA, 17 bp, Arabidopsis thaliana
ctcgcaagtgatcatct

SEQ ID NO: 86328 - DNA, 17 bp, Arabidopsis thaliana
ctcgcaagttgcaattg

SEQ ID NO: 86329 - DNA, 17 bp, Arabidopsis thaliana
ctcgcaagttgcgacgg

SEQ ID NO: 86330 - DNA, 17 bp, Arabidopsis thaliana
ctcgcaatttgcgatga

SEQ ID NO: 86331 - DNA, 17 bp, Arabidopsis thaliana
ctcgcacaaggtggaga

SEQ ID NO: 86332 - DNA, 17 bp, Arabidopsis thaliana
ctcgcacacgagcgtct

SEQ ID NO: 86333 - DNA, 17 bp, Arabidopsis thaliana
ctcgcacgtgtgaactc

SEQ ID NO: 86334 - DNA, 17 bp, Arabidopsis thaliana
ctcgcactctctaaaac

SEQ ID NO: 86335 - DNA, 17 bp, Arabidopsis thaliana
ctcgcactgtagatgga

SEQ ID NO: 86336 - DNA, 17 bp, Arabidopsis thaliana
ctcgcagaacgttttat

SEQ ID NO: 86337 - DNA, 17 bp, Arabidopsis thaliana
ctcgcagaatcttatac

SEQ ID NO: 86338 - DNA, 17 bp, Arabidopsis thaliana
ctcgcagacttgggccc

SEQ ID NO: 86339 - DNA, 17 bp, Arabidopsis thaliana
ctcgcagctattagaca

SEQ ID NO: 86340 - DNA, 17 bp, Arabidopsis thaliana
ctcgccaaaaacgtaaa

SEQ ID NO: 86341 - DNA, 17 bp, Arabidopsis thaliana
ctcgccaaaattgtatt

SEQ ID NO: 86342 - DNA, 17 bp, Arabidopsis thaliana
ctcgccagaaaccaccg

SEQ ID NO: 86343 - DNA, 17 bp, Arabidopsis thaliana
ctcgccaggctgacctc

SEQ ID NO: 86344 - DNA, 17 bp, Arabidopsis thaliana
ctcgccagttcattgtg

SEQ ID NO: 86345 - DNA, 17 bp, Arabidopsis thaliana
ctcgcccaagcacgctt

SEQ ID NO: 86346 - DNA, 17 bp, Arabidopsis thaliana
ctcgcccaagcacttaa

SEQ ID NO: 86347 - DNA, 17 bp, Arabidopsis thaliana
ctcgccccgctaagtct

SEQ ID NO: 86348 - DNA, 17 bp, Arabidopsis thaliana
ctcgcccttctctatgt

SEQ ID NO: 86349 - DNA, 17 bp, Arabidopsis thaliana
ctcgccggacactcttc

SEQ ID NO: 86350 - DNA, 17 bp, Arabidopsis thaliana
ctcgccgtcgttgcacc

SEQ ID NO: 86351 - DNA, 17 bp, Arabidopsis thaliana
ctcgcctatttagacgg

SEQ ID NO: 86352 - DNA, 17 bp, Arabidopsis thaliana
ctcgcctctacagtggc

SEQ ID NO: 86353 - DNA, 17 bp, Arabidopsis thaliana
ctcgcctctacagtggt

SEQ ID NO: 86354 - DNA, 17 bp, Arabidopsis thaliana
ctcgcctctatcacggc

SEQ ID NO: 86355 - DNA, 17 bp, Arabidopsis thaliana
ctcgcctgttgtgcaaa

SEQ ID NO: 86356 - DNA, 17 bp, Arabidopsis thaliana
ctcgccttcacagccga

SEQ ID NO: 86357 - DNA, 17 bp, Arabidopsis thaliana
ctcgcctttgtgtctat

SEQ ID NO: 86358 - DNA, 17 bp, Arabidopsis thaliana
ctcgcgacaagatttgt

SEQ ID NO: 86359 - DNA, 17 bp, Arabidopsis thaliana
ctcgcgacctatacccg

SEQ ID NO: 86360 - DNA, 17 bp, Arabidopsis thaliana
ctcgcgattgctgagaa

SEQ ID NO: 86361 - DNA, 17 bp, Arabidopsis thaliana
ctcgcggacatcctgta

SEQ ID NO: 86362 - DNA, 17 bp, Arabidopsis thaliana
ctcgcggctcgagtcca

SEQ ID NO: 86363 - DNA, 17 bp, Arabidopsis thaliana
ctcgcgggctttccggc

SEQ ID NO: 86364 - DNA, 17 bp, Arabidopsis thaliana
ctcgcgggtgcaccgcc

SEQ ID NO: 86365 - DNA, 17 bp, Arabidopsis thaliana
ctcgcgggttttccgga

SEQ ID NO: 86366 - DNA, 17 bp, Arabidopsis thaliana
ctcgcggtggtccagac

SEQ ID NO: 86367 - DNA, 17 bp, Arabidopsis thaliana
ctcgcggttttcgttgt

SEQ ID NO: 86368 - DNA, 17 bp, Arabidopsis thaliana
ctcgcgtctgattagct

SEQ ID NO: 86369 - DNA, 17 bp, Arabidopsis thaliana
ctcgctaacagtttgca

SEQ ID NO: 86370 - DNA, 17 bp, Arabidopsis thaliana
ctcgctaagactcgagg

SEQ ID NO: 86371 - DNA, 17 bp, Arabidopsis thaliana
ctcgctaagctcaggcc

SEQ ID NO: 86372 - DNA, 17 bp, Arabidopsis thaliana
ctcgctaggtctggcag

SEQ ID NO: 86373 - DNA, 17 bp, Arabidopsis thaliana
ctcgctagtattcgaga

SEQ ID NO: 86374 - DNA, 17 bp, Arabidopsis thaliana
ctcgctattttcatcca

SEQ ID NO: 86375 - DNA, 17 bp, Arabidopsis thaliana
ctcgctcagatttggct

SEQ ID NO: 86376 - DNA, 17 bp, Arabidopsis thaliana
ctcgctcagtatctatc

SEQ ID NO: 86377 - DNA, 17 bp, Arabidopsis thaliana
ctcgctcggttcacccc

SEQ ID NO: 86378 - DNA, 17 bp, Arabidopsis thaliana
ctcgctcggttcaccct

SEQ ID NO: 86379 - DNA, 17 bp, Arabidopsis thaliana
ctcgctcttaccctcac

SEQ ID NO: 86380 - DNA, 17 bp, Arabidopsis thaliana
ctcgctgcgtgcaatcc

SEQ ID NO: 86381 - DNA, 17 bp, Arabidopsis thaliana
ctcgcttaacttgcgac

SEQ ID NO: 86382 - DNA, 17 bp, Arabidopsis thaliana
ctcgcttaagagattct

SEQ ID NO: 86383 - DNA, 17 bp, Arabidopsis thaliana
ctcgcttaccggatcga

SEQ ID NO: 86384 - DNA, 17 bp, Arabidopsis thaliana
ctcgcttcggcgggtcg

SEQ ID NO: 86385 - DNA, 17 bp, Arabidopsis thaliana
ctcgcttcttccagttt

SEQ ID NO: 86386 - DNA, 17 bp, Arabidopsis thaliana
ctcgcttgagaaactct

SEQ ID NO: 86387 - DNA, 17 bp, Arabidopsis thaliana
ctcgcttgcagagagaa

SEQ ID NO: 86388 - DNA, 17 bp, Arabidopsis thaliana
ctcgcttgccaggattt

SEQ ID NO: 86389 - DNA, 17 bp, Arabidopsis thaliana
ctcgcttggggtgcgag

SEQ ID NO: 86390 - DNA, 17 bp, Arabidopsis thaliana
ctcgcttggtgcaggtc

SEQ ID NO: 86391 - DNA, 17 bp, Arabidopsis thaliana
ctcgcttgttgcaggtc

SEQ ID NO: 86392 - DNA, 17 bp, Arabidopsis thaliana
ctcgctttggcattcca

SEQ ID NO: 86393 - DNA, 17 bp, Arabidopsis thaliana
ctcgctttggccgagtg

SEQ ID NO: 86394 - DNA, 17 bp, Arabidopsis thaliana
ctcgctttggtgcgaga

SEQ ID NO: 86395 - DNA, 17 bp, Arabidopsis thaliana
ctcggaaagagaagact

SEQ ID NO: 86396 - DNA, 17 bp, Arabidopsis thaliana
ctcggaaatttgcgtga

SEQ ID NO: 86397 - DNA, 17 bp, Arabidopsis thaliana
ctcggaacaatcaggtt

SEQ ID NO: 86398 - DNA, 17 bp, Arabidopsis thaliana
ctcggaatggtgactgc

SEQ ID NO: 86399 - DNA, 17 bp, Arabidopsis thaliana
ctcggacaaaaactgct

SEQ ID NO: 86400 - DNA, 17 bp, Arabidopsis thaliana
ctcggacacaggtactg

SEQ ID NO: 86401 - DNA, 17 bp, Arabidopsis thaliana
ctcggacattggtggtt

SEQ ID NO: 86402 - DNA, 17 bp, Arabidopsis thaliana
ctcggaccacgctccat

SEQ ID NO: 86403 - DNA, 17 bp, Arabidopsis thaliana
ctcggaccaggcctcat

SEQ ID NO: 86404 - DNA, 17 bp, Arabidopsis thaliana
ctcggaccaggcgtcat

SEQ ID NO: 86405 - DNA, 17 bp, Arabidopsis thaliana
ctcggaccaggcttcac

SEQ ID NO: 86406 - DNA, 17 bp, Arabidopsis thaliana
ctcggaccaggcttcat

SEQ ID NO: 86407 - DNA, 17 bp, Arabidopsis thaliana
ctcggaccaggtttcat

SEQ ID NO: 86408 - DNA, 17 bp, Arabidopsis thaliana
ctcggacccggtcgacg

SEQ ID NO: 86409 - DNA, 17 bp, Arabidopsis thaliana
ctcggacctggtcgacg

SEQ ID NO: 86410 - DNA, 17 bp, Arabidopsis thaliana
ctcggacggttgtcgga

SEQ ID NO: 86411 - DNA, 17 bp, Arabidopsis thaliana
ctcggactacttgatca

SEQ ID NO: 86412 - DNA, 17 bp, Arabidopsis thaliana
ctcggactatcctaagg

SEQ ID NO: 86413 - DNA, 17 bp, Arabidopsis thaliana
ctcggactcccagaccc

SEQ ID NO: 86414 - DNA, 17 bp, Arabidopsis thaliana
ctcggactctgatgtgc

SEQ ID NO: 86415 - DNA, 17 bp, Arabidopsis thaliana
ctcggatacctaggcgc

SEQ ID NO: 86416 - DNA, 17 bp, Arabidopsis thaliana
ctcggataggtggtagg

SEQ ID NO: 86417 - DNA, 17 bp, Arabidopsis thaliana
ctcggatatttctggag

SEQ ID NO: 86418 - DNA, 17 bp, Arabidopsis thaliana
ctcggatcaggcttcat

SEQ ID NO: 86419 - DNA, 17 bp, Arabidopsis thaliana
ctcggatcatgctgggc

SEQ ID NO: 86420 - DNA, 17 bp, Arabidopsis thaliana
ctcggatgtcgcttggg

SEQ ID NO: 86421 - DNA, 17 bp, Arabidopsis thaliana
ctcggatgtgccctgcc

SEQ ID NO: 86422 - DNA, 17 bp, Arabidopsis thaliana
ctcggattactgagatt

SEQ ID NO: 86423 - DNA, 17 bp, Arabidopsis thaliana
ctcggattttggttgtt

SEQ ID NO: 86424 - DNA, 17 bp, Arabidopsis thaliana
ctcggcaaactgtctca

SEQ ID NO: 86425 - DNA, 17 bp, Arabidopsis thaliana
ctcggcaacggatatct

SEQ ID NO: 86426 - DNA, 17 bp, Arabidopsis thaliana
ctcggcaacggatattc

SEQ ID NO: 86427 - DNA, 17 bp, Arabidopsis thaliana
ctcggcaacggattctc

SEQ ID NO: 86428 - DNA, 17 bp, Arabidopsis thaliana
ctcggcaacgggcaacg

SEQ ID NO: 86429 - DNA, 17 bp, Arabidopsis thaliana
ctcggcacggcacggcg

SEQ ID NO: 86430 - DNA, 17 bp, Arabidopsis thaliana
ctcggcatgatgatgag

SEQ ID NO: 86431 - DNA, 17 bp, Arabidopsis thaliana
ctcggccgcatactctg

SEQ ID NO: 86432 - DNA, 17 bp, Arabidopsis thaliana
ctcggccggtgaagtag

SEQ ID NO: 86433 - DNA, 17 bp, Arabidopsis thaliana
ctcggcctaattcgaca

SEQ ID NO: 86434 - DNA, 17 bp, Arabidopsis thaliana
ctcggcctggcccggtc

SEQ ID NO: 86435 - DNA, 17 bp, Arabidopsis thaliana
ctcggcctggggagcgt

SEQ ID NO: 86436 - DNA, 17 bp, Arabidopsis thaliana
ctcggcgacaaggactt

SEQ ID NO: 86437 - DNA, 17 bp, Arabidopsis thaliana
ctcggcggagttgctag

SEQ ID NO: 86438 - DNA, 17 bp, Arabidopsis thaliana
ctcggcggcgattaatt

SEQ ID NO: 86439 - DNA, 17 bp, Arabidopsis thaliana
ctcggcgggtggacaaa

SEQ ID NO: 86440 - DNA, 17 bp, Arabidopsis thaliana
ctcggcgtaattcgaca

SEQ ID NO: 86441 - DNA, 17 bp, Arabidopsis thaliana
ctcggctcatcgtggaa

SEQ ID NO: 86442 - DNA, 17 bp, Arabidopsis thaliana
ctcggctctcgcatcga

SEQ ID NO: 86443 - DNA, 17 bp, Arabidopsis thaliana
ctcggctgggctcaagt

SEQ ID NO: 86444 - DNA, 17 bp, Arabidopsis thaliana
ctcggctgtgcaattga

SEQ ID NO: 86445 - DNA, 17 bp, Arabidopsis thaliana
ctcggcttaatctgtcg

SEQ ID NO: 86446 - DNA, 17 bp, Arabidopsis thaliana
ctcggcttcgaatccta

SEQ ID NO: 86447 - DNA, 17 bp, Arabidopsis thaliana
ctcgggaaaatggcgta

SEQ ID NO: 86448 - DNA, 17 bp, Arabidopsis thaliana
ctcgggaaatgcgtatg

SEQ ID NO: 86449 - DNA, 17 bp, Arabidopsis thaliana
ctcgggaagcatttgca

SEQ ID NO: 86450 - DNA, 17 bp, Arabidopsis thaliana
ctcgggaagcttggtaa

SEQ ID NO: 86451 - DNA, 17 bp, Arabidopsis thaliana
ctcgggacagacagtgt

SEQ ID NO: 86452 - DNA, 17 bp, Arabidopsis thaliana
ctcgggacgaactgggg

SEQ ID NO: 86453 - DNA, 17 bp, Arabidopsis thaliana
ctcgggagctttccccg

SEQ ID NO: 86454 - DNA, 17 bp, Arabidopsis thaliana
ctcgggagtcagcgcac

SEQ ID NO: 86455 - DNA, 17 bp, Arabidopsis thaliana
ctcgggatccctcgcgg

SEQ ID NO: 86456 - DNA, 17 bp, Arabidopsis thaliana
ctcgggatggctctgca

SEQ ID NO: 86457 - DNA, 17 bp, Arabidopsis thaliana
ctcgggattcgctaatg

SEQ ID NO: 86458 - DNA, 17 bp, Arabidopsis thaliana
ctcgggattctcgctct

SEQ ID NO: 86459 - DNA, 17 bp, Arabidopsis thaliana
ctcgggattggctcttt

SEQ ID NO: 86460 - DNA, 17 bp, Arabidopsis thaliana
ctcgggatttaatgcgc

SEQ ID NO: 86461 - DNA, 17 bp, Arabidopsis thaliana
ctcgggcagtcctacca

SEQ ID NO: 86462 - DNA, 17 bp, Arabidopsis thaliana
ctcgggccggacggaga

SEQ ID NO: 86463 - DNA, 17 bp, Arabidopsis thaliana
ctcgggggtcccaattc

SEQ ID NO: 86464 - DNA, 17 bp, Arabidopsis thaliana
ctcgggggtcccagttc

SEQ ID NO: 86465 - DNA, 17 bp, Arabidopsis thaliana
ctcggggtcgagtgatg

SEQ ID NO: 86466 - DNA, 17 bp, Arabidopsis thaliana
ctcggggtggagtgatg

SEQ ID NO: 86467 - DNA, 17 bp, Arabidopsis thaliana
ctcgggtatggagagat

SEQ ID NO: 86468 - DNA, 17 bp, Arabidopsis thaliana
ctcgggtcactcgctta

SEQ ID NO: 86469 - DNA, 17 bp, Arabidopsis thaliana
ctcgggtcattcgctta

SEQ ID NO: 86470 - DNA, 17 bp, Arabidopsis thaliana
ctcgggtctgtgggtct

SEQ ID NO: 86471 - DNA, 17 bp, Arabidopsis thaliana
ctcgggtgccaagaacg

SEQ ID NO: 86472 - DNA, 17 bp, Arabidopsis thaliana
ctcggtacggctgagtt

SEQ ID NO: 86473 - DNA, 17 bp, Arabidopsis thaliana
ctcggtagcgttctata

SEQ ID NO: 86474 - DNA, 17 bp, Arabidopsis thaliana
ctcggtagtccagtgac

SEQ ID NO: 86475 - DNA, 17 bp, Arabidopsis thaliana
ctcggtatgcgaattct

SEQ ID NO: 86476 - DNA, 17 bp, Arabidopsis thaliana
ctcggtcagtttgtcac

SEQ ID NO: 86477 - DNA, 17 bp, Arabidopsis thaliana
ctcggtcgaggaatcaa

SEQ ID NO: 86478 - DNA, 17 bp, Arabidopsis thaliana
ctcggtcgatctttggt

SEQ ID NO: 86479 - DNA, 17 bp, Arabidopsis thaliana
ctcggtcgtgacttcgt

SEQ ID NO: 86480 - DNA, 17 bp, Arabidopsis thaliana
ctcggtgaagattctgg

SEQ ID NO: 86481 - DNA, 17 bp, Arabidopsis thaliana
ctcggtggcagagatgt

SEQ ID NO: 86482 - DNA, 17 bp, Arabidopsis thaliana
ctcggtggtgttcacca

SEQ ID NO: 86483 - DNA, 17 bp, Arabidopsis thaliana
ctcggtgtcggcggtgc

SEQ ID NO: 86484 - DNA, 17 bp, Arabidopsis thaliana
ctcggttaggccatatg

SEQ ID NO: 86485 - DNA, 17 bp, Arabidopsis thaliana
ctcggttcggacttggg

SEQ ID NO: 86486 - DNA, 17 bp, Arabidopsis thaliana
ctcggttgctatgtttg

SEQ ID NO: 86487 - DNA, 17 bp, Arabidopsis thaliana
ctcggttgcttgggtta

SEQ ID NO: 86488 - DNA, 17 bp, Arabidopsis thaliana
ctcggttggcggactgc

SEQ ID NO: 86489 - DNA, 17 bp, Arabidopsis thaliana
ctcggtttcaatctccg

SEQ ID NO: 86490 - DNA, 17 bp, Arabidopsis thaliana
ctcggtttgtaagacct

SEQ ID NO: 86491 - DNA, 17 bp, Arabidopsis thaliana
ctcggtttgtaagatct

SEQ ID NO: 86492 - DNA, 17 bp, Arabidopsis thaliana
ctcggttttgctccaga

SEQ ID NO: 86493 - DNA, 17 bp, Arabidopsis thaliana
ctcgtaaataagtttca

SEQ ID NO: 86494 - DNA, 17 bp, Arabidopsis thaliana
ctcgtaatcccccaccc

SEQ ID NO: 86495 - DNA, 17 bp, Arabidopsis thaliana
ctcgtaatcccccaggc

SEQ ID NO: 86496 - DNA, 17 bp, Arabidopsis thaliana
ctcgtaatcctctcaga

SEQ ID NO: 86497 - DNA, 17 bp, Arabidopsis thaliana
ctcgtaatttgaggctc

SEQ ID NO: 86498 - DNA, 17 bp, Arabidopsis thaliana
ctcgtactcgagggagt

SEQ ID NO: 86499 - DNA, 17 bp, Arabidopsis thaliana
ctcgtagagaccgttca

SEQ ID NO: 86500 - DNA, 17 bp, Arabidopsis thaliana
ctcgtagcgtggttcac

SEQ ID NO: 86501 - DNA, 17 bp, Arabidopsis thaliana
ctcgtagtgatgttcgg

SEQ ID NO: 86502 - DNA, 17 bp, Arabidopsis thaliana
ctcgtagttgaaccttg

SEQ ID NO: 86503 - DNA, 17 bp, Arabidopsis thaliana
ctcgtatcagatcgcgg

SEQ ID NO: 86504 - DNA, 17 bp, Arabidopsis thaliana
ctcgtatccaagtgtgt

SEQ ID NO: 86505 - DNA, 17 bp, Arabidopsis thaliana
ctcgtatcctggcgtct

SEQ ID NO: 86506 - DNA, 17 bp, Arabidopsis thaliana
ctcgtatctgctaacgc

SEQ ID NO: 86507 - DNA, 17 bp, Arabidopsis thaliana
ctcgtatgcaggttgtg

SEQ ID NO: 86508 - DNA, 17 bp, Arabidopsis thaliana
ctcgtattactgccccg

SEQ ID NO: 86509 - DNA, 17 bp, Arabidopsis thaliana
ctcgtatttgcagattt

SEQ ID NO: 86510 - DNA, 17 bp, Arabidopsis thaliana
ctcgtcaatgatgttgc

SEQ ID NO: 86511 - DNA, 17 bp, Arabidopsis thaliana
ctcgtcaatggtgattg

SEQ ID NO: 86512 - DNA, 17 bp, Arabidopsis thaliana
ctcgtcacatcccagat

SEQ ID NO: 86513 - DNA, 17 bp, Arabidopsis thaliana
ctcgtcactagattact

SEQ ID NO: 86514 - DNA, 17 bp, Arabidopsis thaliana
ctcgtcacttgtcttct

SEQ ID NO: 86515 - DNA, 17 bp, Arabidopsis thaliana
ctcgtcatctcgattcc

SEQ ID NO: 86516 - DNA, 17 bp, Arabidopsis thaliana
ctcgtccaacagtttga

SEQ ID NO: 86517 - DNA, 17 bp, Arabidopsis thaliana
ctcgtccaggtgatcga

SEQ ID NO: 86518 - DNA, 17 bp, Arabidopsis thaliana
ctcgtccatgcgtcgag

SEQ ID NO: 86519 - DNA, 17 bp, Arabidopsis thaliana
ctcgtccgacttcaggt

SEQ ID NO: 86520 - DNA, 17 bp, Arabidopsis thaliana
ctcgtccgagacttcgt

SEQ ID NO: 86521 - DNA, 17 bp, Arabidopsis thaliana
ctcgtccgtcggcttta

SEQ ID NO: 86522 - DNA, 17 bp, Arabidopsis thaliana
ctcgtccgtcttcttgg

SEQ ID NO: 86523 - DNA, 17 bp, Arabidopsis thaliana
ctcgtcctcatcagatt

SEQ ID NO: 86524 - DNA, 17 bp, Arabidopsis thaliana
ctcgtcctgaaagcagt

SEQ ID NO: 86525 - DNA, 17 bp, Arabidopsis thaliana
ctcgtccttctctatgt

SEQ ID NO: 86526 - DNA, 17 bp, Arabidopsis thaliana
ctcgtcgagattggacc

SEQ ID NO: 86527 - DNA, 17 bp, Arabidopsis thaliana
ctcgtcgcagactgaga

SEQ ID NO: 86528 - DNA, 17 bp, Arabidopsis thaliana
ctcgtcggcttaatgag

SEQ ID NO: 86529 - DNA, 17 bp, Arabidopsis thaliana
ctcgtcgggaagagact

SEQ ID NO: 86530 - DNA, 17 bp, Arabidopsis thaliana
ctcgtcgggatgatcgc

SEQ ID NO: 86531 - DNA, 17 bp, Arabidopsis thaliana
ctcgtcgggttctagga

SEQ ID NO: 86532 - DNA, 17 bp, Arabidopsis thaliana
ctcgtcgtaaagcgacg

SEQ ID NO: 86533 - DNA, 17 bp, Arabidopsis thaliana
ctcgtcgtttgccaaat

SEQ ID NO: 86534 - DNA, 17 bp, Arabidopsis thaliana
ctcgtctagcttgactg

SEQ ID NO: 86535 - DNA, 17 bp, Arabidopsis thaliana
ctcgtctcagagatgat

SEQ ID NO: 86536 - DNA, 17 bp, Arabidopsis thaliana
ctcgtctcagctcgcag

SEQ ID NO: 86537 - DNA, 17 bp, Arabidopsis thaliana
ctcgtctcgccaaaccc

SEQ ID NO: 86538 - DNA, 17 bp, Arabidopsis thaliana
ctcgtctgcctgggtgt

SEQ ID NO: 86539 - DNA, 17 bp, Arabidopsis thaliana
ctcgtctggtgaggttg

SEQ ID NO: 86540 - DNA, 17 bp, Arabidopsis thaliana
ctcgtcttcagtgtcta

SEQ ID NO: 86541 - DNA, 17 bp, Arabidopsis thaliana
ctcgtcttgtgcaaccg

SEQ ID NO: 86542 - DNA, 17 bp, Arabidopsis thaliana
ctcgtcttgtgttgctc

SEQ ID NO: 86543 - DNA, 17 bp, Arabidopsis thaliana
ctcgtgaactacctttc

SEQ ID NO: 86544 - DNA, 17 bp, Arabidopsis thaliana
ctcgtgaacttagccga

SEQ ID NO: 86545 - DNA, 17 bp, Arabidopsis thaliana
ctcgtgagtatcgaaat

SEQ ID NO: 86546 - DNA, 17 bp, Arabidopsis thaliana
ctcgtgattctgtatgc

SEQ ID NO: 86547 - DNA, 17 bp, Arabidopsis thaliana
ctcgtgcagtttggtcg

SEQ ID NO: 86548 - DNA, 17 bp, Arabidopsis thaliana
ctcgtgccaagtttttc

SEQ ID NO: 86549 - DNA, 17 bp, Arabidopsis thaliana
ctcgtgcgacacagcgt

SEQ ID NO: 86550 - DNA, 17 bp, Arabidopsis thaliana
ctcgtgcgttttttaga

SEQ ID NO: 86551 - DNA, 17 bp, Arabidopsis thaliana
ctcgtgctaaagagcgt

SEQ ID NO: 86552 - DNA, 17 bp, Arabidopsis thaliana
ctcgtgctattgccttt

SEQ ID NO: 86553 - DNA, 17 bp, Arabidopsis thaliana
ctcgtggaatctgatac

SEQ ID NO: 86554 - DNA, 17 bp, Arabidopsis thaliana
ctcgtggaccatctgtt

SEQ ID NO: 86555 - DNA, 17 bp, Arabidopsis thaliana
ctcgtggattccgttca

SEQ ID NO: 86556 - DNA, 17 bp, Arabidopsis thaliana
ctcgtggcaaataggat

SEQ ID NO: 86557 - DNA, 17 bp, Arabidopsis thaliana
ctcgtggtgcgacaggg

SEQ ID NO: 86558 - DNA, 17 bp, Arabidopsis thaliana
ctcgtggtgcggcaggg

SEQ ID NO: 86559 - DNA, 17 bp, Arabidopsis thaliana
ctcgtgtaaaggatgtg

SEQ ID NO: 86560 - DNA, 17 bp, Arabidopsis thaliana
ctcgtgtgtgactgaga

SEQ ID NO: 86561 - DNA, 17 bp, Arabidopsis thaliana
ctcgttacttgaccacc

SEQ ID NO: 86562 - DNA, 17 bp, Arabidopsis thaliana
ctcgttacttgcctcgt

SEQ ID NO: 86563 - DNA, 17 bp, Arabidopsis thaliana
ctcgttatgagcttcgg

SEQ ID NO: 86564 - DNA, 17 bp, Arabidopsis thaliana
ctcgttcaagttgcatg

SEQ ID NO: 86565 - DNA, 17 bp, Arabidopsis thaliana
ctcgttcaggtcgccgc

SEQ ID NO: 86566 - DNA, 17 bp, Arabidopsis thaliana
ctcgttcagtcgacgga

SEQ ID NO: 86567 - DNA, 17 bp, Arabidopsis thaliana
ctcgttcatcatctcta

SEQ ID NO: 86568 - DNA, 17 bp, Arabidopsis thaliana
ctcgttcccagctggac

SEQ ID NO: 86569 - DNA, 17 bp, Arabidopsis thaliana
ctcgttcctgggcagaa

SEQ ID NO: 86570 - DNA, 17 bp, Arabidopsis thaliana
ctcgttcgaagactaga

SEQ ID NO: 86571 - DNA, 17 bp, Arabidopsis thaliana
ctcgttcggtgatgaaa

SEQ ID NO: 86572 - DNA, 17 bp, Arabidopsis thaliana
ctcgttctcagctgcct

SEQ ID NO: 86573 - DNA, 17 bp, Arabidopsis thaliana
ctcgttctggtcgccgt

SEQ ID NO: 86574 - DNA, 17 bp, Arabidopsis thaliana
ctcgttgagctcatctt

SEQ ID NO: 86575 - DNA, 17 bp, Arabidopsis thaliana
ctcgttggatatgtgat

SEQ ID NO: 86576 - DNA, 17 bp, Arabidopsis thaliana
ctcgttggctaagtccg

SEQ ID NO: 86577 - DNA, 17 bp, Arabidopsis thaliana
ctcgttgtctacgtctt

SEQ ID NO: 86578 - DNA, 17 bp, Arabidopsis thaliana
ctcgttgtctgttcgac

SEQ ID NO: 86579 - DNA, 17 bp, Arabidopsis thaliana
ctcgttgtggtggtgtg

SEQ ID NO: 86580 - DNA, 17 bp, Arabidopsis thaliana
ctcgtttacacgtgcgc

SEQ ID NO: 86581 - DNA, 17 bp, Arabidopsis thaliana
ctcgtttaccgtgataa

SEQ ID NO: 86582 - DNA, 17 bp, Arabidopsis thaliana
ctcgtttagaaacgctc

SEQ ID NO: 86583 - DNA, 17 bp, Arabidopsis thaliana
ctcgtttcccacagcct

SEQ ID NO: 86584 - DNA, 17 bp, Arabidopsis thaliana
ctcgtttcggagttgat

SEQ ID NO: 86585 - DNA, 17 bp, Arabidopsis thaliana
ctcgtttgaccaaatga

SEQ ID NO: 86586 - DNA, 17 bp, Arabidopsis thaliana
ctcgtttgctgtgtcat

SEQ ID NO: 86587 - DNA, 17 bp, Arabidopsis thaliana
ctcgtttggccagccta

SEQ ID NO: 86588 - DNA, 17 bp, Arabidopsis thaliana
ctcgttttcgatggcat

SEQ ID NO: 86589 - DNA, 17 bp, Arabidopsis thaliana
ctcgttttcgcctattc

SEQ ID NO: 86590 - DNA, 17 bp, Arabidopsis thaliana
ctcgtttttccgttgag

SEQ ID NO: 86591 - DNA, 17 bp, Arabidopsis thaliana
ctctaaaactccagccg

SEQ ID NO: 86592 - DNA, 17 bp, Arabidopsis thaliana
ctctaaaagtgtgaagg

SEQ ID NO: 86593 - DNA, 17 bp, Arabidopsis thaliana
ctctaaacctatagcga

SEQ ID NO: 86594 - DNA, 17 bp, Arabidopsis thaliana
ctctaaacttcgcctag

SEQ ID NO: 86595 - DNA, 17 bp, Arabidopsis thaliana
ctctaaagggagttgcc

SEQ ID NO: 86596 - DNA, 17 bp, Arabidopsis thaliana
ctctaaaggtcttgggc

SEQ ID NO: 86597 - DNA, 17 bp, Arabidopsis thaliana
ctctaaagttcttcggt

SEQ ID NO: 86598 - DNA, 17 bp, Arabidopsis thaliana
ctctaaatcactaagtt

SEQ ID NO: 86599 - DNA, 17 bp, Arabidopsis thaliana
ctctaaatcgactgatg

SEQ ID NO: 86600 - DNA, 17 bp, Arabidopsis thaliana
ctctaaatctcgaccgt

SEQ ID NO: 86601 - DNA, 17 bp, Arabidopsis thaliana
ctctaaatgtgcctaaa

SEQ ID NO: 86602 - DNA, 17 bp, Arabidopsis thaliana
ctctaacagagtggcca

SEQ ID NO: 86603 - DNA, 17 bp, Arabidopsis thaliana
ctctaacaggccttgga

SEQ ID NO: 86604 - DNA, 17 bp, Arabidopsis thaliana
ctctaactttggtccga

SEQ ID NO: 86605 - DNA, 17 bp, Arabidopsis thaliana
ctctaagactcttaatt

SEQ ID NO: 86606 - DNA, 17 bp, Arabidopsis thaliana
ctctaagctagctcccc

SEQ ID NO: 86607 - DNA, 17 bp, Arabidopsis thaliana
ctctaagctagctcctc

SEQ ID NO: 86608 - DNA, 17 bp, Arabidopsis thaliana
ctctaagctaggtcctc

SEQ ID NO: 86609 - DNA, 17 bp, Arabidopsis thaliana
ctctaagcttcgcctaa

SEQ ID NO: 86610 - DNA, 17 bp, Arabidopsis thaliana
ctctaagcttcgcctag

SEQ ID NO: 86611 - DNA, 17 bp, Arabidopsis thaliana
ctctaagctttcatggt

SEQ ID NO: 86612 - DNA, 17 bp, Arabidopsis thaliana
ctctaagctttgcataa

SEQ ID NO: 86613 - DNA, 17 bp, Arabidopsis thaliana
ctctaagctttgcctag

SEQ ID NO: 86614 - DNA, 17 bp, Arabidopsis thaliana
ctctaagctttgcgtag

SEQ ID NO: 86615 - DNA, 17 bp, Arabidopsis thaliana
ctctaagggacgcagac

SEQ ID NO: 86616 - DNA, 17 bp, Arabidopsis thaliana
ctctaagtgcccttgaa

SEQ ID NO: 86617 - DNA, 17 bp, Arabidopsis thaliana
ctctaagttcaacatag

SEQ ID NO: 86618 - DNA, 17 bp, Arabidopsis thaliana
ctctaagtttcgccaaa

SEQ ID NO: 86619 - DNA, 17 bp, Arabidopsis thaliana
ctctaagtttcgcctag

SEQ ID NO: 86620 - DNA, 17 bp, Arabidopsis thaliana
ctctaatcatcgagata

SEQ ID NO: 86621 - DNA, 17 bp, Arabidopsis thaliana
ctctaatgacgtggcgg

SEQ ID NO: 86622 - DNA, 17 bp, Arabidopsis thaliana
ctctaattacttttgta

SEQ ID NO: 86623 - DNA, 17 bp, Arabidopsis thaliana
ctctaattctctcacac

SEQ ID NO: 86624 - DNA, 17 bp, Arabidopsis thaliana
ctctaatttgtctgcgg

SEQ ID NO: 86625 - DNA, 17 bp, Arabidopsis thaliana
ctctaattttctggagc

SEQ ID NO: 86626 - DNA, 17 bp, Arabidopsis thaliana
ctctacaaggtctcaaa

SEQ ID NO: 86627 - DNA, 17 bp, Arabidopsis thaliana
ctctacaagtagagccg

SEQ ID NO: 86628 - DNA, 17 bp, Arabidopsis thaliana
ctctacacaagtttgca

SEQ ID NO: 86629 - DNA, 17 bp, Arabidopsis thaliana
ctctacacatgtgccgg

SEQ ID NO: 86630 - DNA, 17 bp, Arabidopsis thaliana
ctctacagttaaatgtg

SEQ ID NO: 86631 - DNA, 17 bp, Arabidopsis thaliana
ctctacataaatgcgtt

SEQ ID NO: 86632 - DNA, 17 bp, Arabidopsis thaliana
ctctacattgggtggta

SEQ ID NO: 86633 - DNA, 17 bp, Arabidopsis thaliana
ctctacattttgggtgg

SEQ ID NO: 86634 - DNA, 17 bp, Arabidopsis thaliana
ctctaccaccaagtcga

SEQ ID NO: 86635 - DNA, 17 bp, Arabidopsis thaliana
ctctaccgactttgtgc

SEQ ID NO: 86636 - DNA, 17 bp, Arabidopsis thaliana
ctctaccgatggatgga

SEQ ID NO: 86637 - DNA, 17 bp, Arabidopsis thaliana
ctctaccgggaagtcga

SEQ ID NO: 86638 - DNA, 17 bp, Arabidopsis thaliana
ctctaccgggactgacc

SEQ ID NO: 86639 - DNA, 17 bp, Arabidopsis thaliana
ctctacctggaagtcga

SEQ ID NO: 86640 - DNA, 17 bp, Arabidopsis thaliana
ctctacctggaagtcta

SEQ ID NO: 86641 - DNA, 17 bp, Arabidopsis thaliana
ctctacgagaccgggaa

SEQ ID NO: 86642 - DNA, 17 bp, Arabidopsis thaliana
ctctacggagtgtggac

SEQ ID NO: 86643 - DNA, 17 bp, Arabidopsis thaliana
ctctactaagttgtgtt

SEQ ID NO: 86644 - DNA, 17 bp, Arabidopsis thaliana
ctctactatgagaacgc

SEQ ID NO: 86645 - DNA, 17 bp, Arabidopsis thaliana
ctctactgcctcgacgc

SEQ ID NO: 86646 - DNA, 17 bp, Arabidopsis thaliana
ctctactgcggtgacga

SEQ ID NO: 86647 - DNA, 17 bp, Arabidopsis thaliana
ctctacttacgacgagg

SEQ ID NO: 86648 - DNA, 17 bp, Arabidopsis thaliana
ctctacttgagctaact

SEQ ID NO: 86649 - DNA, 17 bp, Arabidopsis thaliana
ctctagatttgaatgcc

SEQ ID NO: 86650 - DNA, 17 bp, Arabidopsis thaliana
ctctagcggagagttta

SEQ ID NO: 86651 - DNA, 17 bp, Arabidopsis thaliana
ctctaggcatagtgagt

SEQ ID NO: 86652 - DNA, 17 bp, Arabidopsis thaliana
ctctaggcctgaaacca

SEQ ID NO: 86653 - DNA, 17 bp, Arabidopsis thaliana
ctctaggcgaattctga

SEQ ID NO: 86654 - DNA, 17 bp, Arabidopsis thaliana
ctctaggtttgcttcat

SEQ ID NO: 86655 - DNA, 17 bp, Arabidopsis thaliana
ctctagtccgactttgt

SEQ ID NO: 86656 - DNA, 17 bp, Arabidopsis thaliana
ctctataacttctatac

SEQ ID NO: 86657 - DNA, 17 bp, Arabidopsis thaliana
ctctataagtgccacgt

SEQ ID NO: 86658 - DNA, 17 bp, Arabidopsis thaliana
ctctatacgaacagcga

SEQ ID NO: 86659 - DNA, 17 bp, Arabidopsis thaliana
ctctataggagaccgcc

SEQ ID NO: 86660 - DNA, 17 bp, Arabidopsis thaliana
ctctatattcgaaccga

SEQ ID NO: 86661 - DNA, 17 bp, Arabidopsis thaliana
ctctatcaaaaccctgc

SEQ ID NO: 86662 - DNA, 17 bp, Arabidopsis thaliana
ctctatccaacttcaca

SEQ ID NO: 86663 - DNA, 17 bp, Arabidopsis thaliana
ctctatccgtttctcga

SEQ ID NO: 86664 - DNA, 17 bp, Arabidopsis thaliana
ctctatcggctgatccg

SEQ ID NO: 86665 - DNA, 17 bp, Arabidopsis thaliana
ctctatctccgcgttct

SEQ ID NO: 86666 - DNA, 17 bp, Arabidopsis thaliana
ctctatctccgcgttgt

SEQ ID NO: 86667 - DNA, 17 bp, Arabidopsis thaliana
ctctatctctccgacat

SEQ ID NO: 86668 - DNA, 17 bp, Arabidopsis thaliana
ctctatctctgtagttg

SEQ ID NO: 86669 - DNA, 17 bp, Arabidopsis thaliana
ctctatctttggaatct

SEQ ID NO: 86670 - DNA, 17 bp, Arabidopsis thaliana
ctctatgcgctgctcgg

SEQ ID NO: 86671 - DNA, 17 bp, Arabidopsis thaliana
ctctatggatcggaagt

SEQ ID NO: 86672 - DNA, 17 bp, Arabidopsis thaliana
ctctatgggtcgttctg

SEQ ID NO: 86673 - DNA, 17 bp, Arabidopsis thaliana
ctctatgggtggtggtg

SEQ ID NO: 86674 - DNA, 17 bp, Arabidopsis thaliana
ctctatggttcggttcg

SEQ ID NO: 86675 - DNA, 17 bp, Arabidopsis thaliana
ctctatgtggtaccttg

SEQ ID NO: 86676 - DNA, 17 bp, Arabidopsis thaliana
ctctatgttctcgtcta

SEQ ID NO: 86677 - DNA, 17 bp, Arabidopsis thaliana
ctctatgtttggtaacc

SEQ ID NO: 86678 - DNA, 17 bp, Arabidopsis thaliana
ctctattagctgatcag

SEQ ID NO: 86679 - DNA, 17 bp, Arabidopsis thaliana
ctctattccatgcgcaa

SEQ ID NO: 86680 - DNA, 17 bp, Arabidopsis thaliana
ctctattctcgagcaag

SEQ ID NO: 86681 - DNA, 17 bp, Arabidopsis thaliana
ctctattgagtttccaa

SEQ ID NO: 86682 - DNA, 17 bp, Arabidopsis thaliana
ctctattgccgacttca

SEQ ID NO: 86683 - DNA, 17 bp, Arabidopsis thaliana
ctctattttcttggaat

SEQ ID NO: 86684 - DNA, 17 bp, Arabidopsis thaliana
ctctcaaaatgattgtc

SEQ ID NO: 86685 - DNA, 17 bp, Arabidopsis thaliana
ctctcaaattgcggaat

SEQ ID NO: 86686 - DNA, 17 bp, Arabidopsis thaliana
ctctcaatggtctactt

SEQ ID NO: 86687 - DNA, 17 bp, Arabidopsis thaliana
ctctcaatggtgatgac

SEQ ID NO: 86688 - DNA, 17 bp, Arabidopsis thaliana
ctctcacagacgctctc

SEQ ID NO: 86689 - DNA, 17 bp, Arabidopsis thaliana
ctctcaccggcgaggac

SEQ ID NO: 86690 - DNA, 17 bp, Arabidopsis thaliana
ctctcacggtgactccg

SEQ ID NO: 86691 - DNA, 17 bp, Arabidopsis thaliana
ctctcactttctttgac

SEQ ID NO: 86692 - DNA, 17 bp, Arabidopsis thaliana
ctctcagacttgagttc

SEQ ID NO: 86693 - DNA, 17 bp, Arabidopsis thaliana
ctctcagagattggcga

SEQ ID NO: 86694 - DNA, 17 bp, Arabidopsis thaliana
ctctcagatcttgctgc

SEQ ID NO: 86695 - DNA, 17 bp, Arabidopsis thaliana
ctctcagcagtggacgg

SEQ ID NO: 86696 - DNA, 17 bp, Arabidopsis thaliana
ctctcagccttcactcc

SEQ ID NO: 86697 - DNA, 17 bp, Arabidopsis thaliana
ctctcaggcgacgttat

SEQ ID NO: 86698 - DNA, 17 bp, Arabidopsis thaliana
ctctcagggagggccga

SEQ ID NO: 86699 - DNA, 17 bp, Arabidopsis thaliana
ctctcaggtccgaaacc

SEQ ID NO: 86700 - DNA, 17 bp, Arabidopsis thaliana
ctctcaggtggaggtgc

SEQ ID NO: 86701 - DNA, 17 bp, Arabidopsis thaliana
ctctcagttctactcgg

SEQ ID NO: 86702 - DNA, 17 bp, Arabidopsis thaliana
ctctcatatgctgatgt

SEQ ID NO: 86703 - DNA, 17 bp, Arabidopsis thaliana
ctctcatggattcgtgg

SEQ ID NO: 86704 - DNA, 17 bp, Arabidopsis thaliana
ctctcatgtgatgacac

SEQ ID NO: 86705 - DNA, 17 bp, Arabidopsis thaliana
ctctcatgtgctgatct

SEQ ID NO: 86706 - DNA, 17 bp, Arabidopsis thaliana
ctctcatgtgctgatgt

SEQ ID NO: 86707 - DNA, 17 bp, Arabidopsis thaliana
ctctccaaattccttat

SEQ ID NO: 86708 - DNA, 17 bp, Arabidopsis thaliana
ctctccaaattctccat

SEQ ID NO: 86709 - DNA, 17 bp, Arabidopsis thaliana
ctctccaagggttcgag

SEQ ID NO: 86710 - DNA, 17 bp, Arabidopsis thaliana
ctctccacctattgcca

SEQ ID NO: 86711 - DNA, 17 bp, Arabidopsis thaliana
ctctccacctcttgcca

SEQ ID NO: 86712 - DNA, 17 bp, Arabidopsis thaliana
ctctccacttattgtca

SEQ ID NO: 86713 - DNA, 17 bp, Arabidopsis thaliana
ctctccaggaagtcttg

SEQ ID NO: 86714 - DNA, 17 bp, Arabidopsis thaliana
ctctccagtactgtcgt

SEQ ID NO: 86715 - DNA, 17 bp, Arabidopsis thaliana
ctctccagtgtgatgat

SEQ ID NO: 86716 - DNA, 17 bp, Arabidopsis thaliana
ctctccatatggttgcc

SEQ ID NO: 86717 - DNA, 17 bp, Arabidopsis thaliana
ctctccatcagggacgg

SEQ ID NO: 86718 - DNA, 17 bp, Arabidopsis thaliana
ctctccatcatagcttt

SEQ ID NO: 86719 - DNA, 17 bp, Arabidopsis thaliana
ctctccatcgtcgccga

SEQ ID NO: 86720 - DNA, 17 bp, Arabidopsis thaliana
ctctccatgcaactgga

SEQ ID NO: 86721 - DNA, 17 bp, Arabidopsis thaliana
ctctccattcattgtca

SEQ ID NO: 86722 - DNA, 17 bp, Arabidopsis thaliana
ctctccatttcgtcaca

SEQ ID NO: 86723 - DNA, 17 bp, Arabidopsis thaliana
ctctccatttgggtgac

SEQ ID NO: 86724 - DNA, 17 bp, Arabidopsis thaliana
ctctcccaatctctatc

SEQ ID NO: 86725 - DNA, 17 bp, Arabidopsis thaliana
ctctcccacaatttgac

SEQ ID NO: 86726 - DNA, 17 bp, Arabidopsis thaliana
ctctcccagccgatggg

SEQ ID NO: 86727 - DNA, 17 bp, Arabidopsis thaliana
ctctcccctctctctcc

SEQ ID NO: 86728 - DNA, 17 bp, Arabidopsis thaliana
ctctcccctgcgaggag

SEQ ID NO: 86729 - DNA, 17 bp, Arabidopsis thaliana
ctctccctccctccctc

SEQ ID NO: 86730 - DNA, 17 bp, Arabidopsis thaliana
ctctccctcgacgattt

SEQ ID NO: 86731 - DNA, 17 bp, Arabidopsis thaliana
ctctccgaaggaccacc

SEQ ID NO: 86732 - DNA, 17 bp, Arabidopsis thaliana
ctctccgacaaacctct

SEQ ID NO: 86733 - DNA, 17 bp, Arabidopsis thaliana
ctctccgagcagcgcat

SEQ ID NO: 86734 - DNA, 17 bp, Arabidopsis thaliana
ctctccgagttcggcag

SEQ ID NO: 86735 - DNA, 17 bp, Arabidopsis thaliana
ctctccgccgatttcca

SEQ ID NO: 86736 - DNA, 17 bp, Arabidopsis thaliana
ctctccgccgattttca

SEQ ID NO: 86737 - DNA, 17 bp, Arabidopsis thaliana
ctctccggaactatcct

SEQ ID NO: 86738 - DNA, 17 bp, Arabidopsis thaliana
ctctccggtgaccaatt

SEQ ID NO: 86739 - DNA, 17 bp, Arabidopsis thaliana
ctctccggtgtgatgat

SEQ ID NO: 86740 - DNA, 17 bp, Arabidopsis thaliana
ctctccgtctaaaggct

SEQ ID NO: 86741 - DNA, 17 bp, Arabidopsis thaliana
ctctccgttgtactggc

SEQ ID NO: 86742 - DNA, 17 bp, Arabidopsis thaliana
ctctcctactccatcaa

SEQ ID NO: 86743 - DNA, 17 bp, Arabidopsis thaliana
ctctcctcaacttggtg

SEQ ID NO: 86744 - DNA, 17 bp, Arabidopsis thaliana
ctctcctcccagatttg

SEQ ID NO: 86745 - DNA, 17 bp, Arabidopsis thaliana
ctctcctccgccgattt

SEQ ID NO: 86746 - DNA, 17 bp, Arabidopsis thaliana
ctctcctccttgccatg

SEQ ID NO: 86747 - DNA, 17 bp, Arabidopsis thaliana
ctctcctctaaagactc

SEQ ID NO: 86748 - DNA, 17 bp, Arabidopsis thaliana
ctctcctctgggcgatg

SEQ ID NO: 86749 - DNA, 17 bp, Arabidopsis thaliana
ctctcctgccagaaacg

SEQ ID NO: 86750 - DNA, 17 bp, Arabidopsis thaliana
ctctcctgcctgctctc

SEQ ID NO: 86751 - DNA, 17 bp, Arabidopsis thaliana
ctctcctgcctggtctc

SEQ ID NO: 86752 - DNA, 17 bp, Arabidopsis thaliana
ctctcctggaccaccac

SEQ ID NO: 86753 - DNA, 17 bp, Arabidopsis thaliana
ctctccttcttccacta

SEQ ID NO: 86754 - DNA, 17 bp, Arabidopsis thaliana
ctctccttgcgtctgaa

SEQ ID NO: 86755 - DNA, 17 bp, Arabidopsis thaliana
ctctcgaaaggcgattc

SEQ ID NO: 86756 - DNA, 17 bp, Arabidopsis thaliana
ctctcgaataaggcgac

SEQ ID NO: 86757 - DNA, 17 bp, Arabidopsis thaliana
ctctcgacgaatccttg

SEQ ID NO: 86758 - DNA, 17 bp, Arabidopsis thaliana
ctctcgacgggagaatc

SEQ ID NO: 86759 - DNA, 17 bp, Arabidopsis thaliana
ctctcgatagggtggtt

SEQ ID NO: 86760 - DNA, 17 bp, Arabidopsis thaliana
ctctcgatgatgtgctt

SEQ ID NO: 86761 - DNA, 17 bp, Arabidopsis thaliana
ctctcgattcccttgag

SEQ ID NO: 86762 - DNA, 17 bp, Arabidopsis thaliana
ctctcgcaactaaacaa

SEQ ID NO: 86763 - DNA, 17 bp, Arabidopsis thaliana
ctctcgcccaagcacgc

SEQ ID NO: 86764 - DNA, 17 bp, Arabidopsis thaliana
ctctcgctcttctttct

SEQ ID NO: 86765 - DNA, 17 bp, Arabidopsis thaliana
ctctcggaatgcccccc

SEQ ID NO: 86766 - DNA, 17 bp, Arabidopsis thaliana
ctctcggatgtttccca

SEQ ID NO: 86767 - DNA, 17 bp, Arabidopsis thaliana
ctctcggatttcggttc

SEQ ID NO: 86768 - DNA, 17 bp, Arabidopsis thaliana
ctctcggcaacggatat

SEQ ID NO: 86769 - DNA, 17 bp, Arabidopsis thaliana
ctctcggcaacggatct

SEQ ID NO: 86770 - DNA, 17 bp, Arabidopsis thaliana
ctctcggcgacgaccaa

SEQ ID NO: 86771 - DNA, 17 bp, Arabidopsis thaliana
ctctcgggagctttccc

SEQ ID NO: 86772 - DNA, 17 bp, Arabidopsis thaliana
ctctcggtcctgcagca

SEQ ID NO: 86773 - DNA, 17 bp, Arabidopsis thaliana
ctctcggtgatgtttgg

SEQ ID NO: 86774 - DNA, 17 bp, Arabidopsis thaliana
ctctcggttacgggcga

SEQ ID NO: 86775 - DNA, 17 bp, Arabidopsis thaliana
ctctcggttctagggat

SEQ ID NO: 86776 - DNA, 17 bp, Arabidopsis thaliana
ctctcgtactccttgat

SEQ ID NO: 86777 - DNA, 17 bp, Arabidopsis thaliana
ctctcgtatcttgtgac

SEQ ID NO: 86778 - DNA, 17 bp, Arabidopsis thaliana
ctctcgtcaatggacaa

SEQ ID NO: 86779 - DNA, 17 bp, Arabidopsis thaliana
ctctcgtgacagagacc

SEQ ID NO: 86780 - DNA, 17 bp, Arabidopsis thaliana
ctctcgtgatagagacc

SEQ ID NO: 86781 - DNA, 17 bp, Arabidopsis thaliana
ctctcgtgtggattttg

SEQ ID NO: 86782 - DNA, 17 bp, Arabidopsis thaliana
ctctcgtgtggcggcag

SEQ ID NO: 86783 - DNA, 17 bp, Arabidopsis thaliana
ctctctaaagatgtcca

SEQ ID NO: 86784 - DNA, 17 bp, Arabidopsis thaliana
ctctctaaagggtttgg

SEQ ID NO: 86785 - DNA, 17 bp, Arabidopsis thaliana
ctctctaagctttttga

SEQ ID NO: 86786 - DNA, 17 bp, Arabidopsis thaliana
ctctctacaaagctccg

SEQ ID NO: 86787 - DNA, 17 bp, Arabidopsis thaliana
ctctctacggccacaag

SEQ ID NO: 86788 - DNA, 17 bp, Arabidopsis thaliana
ctctctagagcggcact

SEQ ID NO: 86789 - DNA, 17 bp, Arabidopsis thaliana
ctctctagagttccggc

SEQ ID NO: 86790 - DNA, 17 bp, Arabidopsis thaliana
ctctctagcaggttaaa

SEQ ID NO: 86791 - DNA, 17 bp, Arabidopsis thaliana
ctctctagccttctgtc

SEQ ID NO: 86792 - DNA, 17 bp, Arabidopsis thaliana
ctctctatcattttgca

SEQ ID NO: 86793 - DNA, 17 bp, Arabidopsis thaliana
ctctctatcatttttca

SEQ ID NO: 86794 - DNA, 17 bp, Arabidopsis thaliana
ctctctcaactatgatt

SEQ ID NO: 86795 - DNA, 17 bp, Arabidopsis thaliana
ctctctcacaagccagg

SEQ ID NO: 86796 - DNA, 17 bp, Arabidopsis thaliana
ctctctcacaagtgcct

SEQ ID NO: 86797 - DNA, 17 bp, Arabidopsis thaliana
ctctctccaagcggatc

SEQ ID NO: 86798 - DNA, 17 bp, Arabidopsis thaliana
ctctctccagcttatcc

SEQ ID NO: 86799 - DNA, 17 bp, Arabidopsis thaliana
ctctctccatttcgtga

SEQ ID NO: 86800 - DNA, 17 bp, Arabidopsis thaliana
ctctctccatttgggtg

SEQ ID NO: 86801 - DNA, 17 bp, Arabidopsis thaliana
ctctctcccacaacttg

SEQ ID NO: 86802 - DNA, 17 bp, Arabidopsis thaliana
ctctctccgccgatttt

SEQ ID NO: 86803 - DNA, 17 bp, Arabidopsis thaliana
ctctctccgcggcggct

SEQ ID NO: 86804 - DNA, 17 bp, Arabidopsis thaliana
ctctctcgaaaggcgat

SEQ ID NO: 86805 - DNA, 17 bp, Arabidopsis thaliana
ctctctcgatgatggcg

SEQ ID NO: 86806 - DNA, 17 bp, Arabidopsis thaliana
ctctctcgcaagcgatt

SEQ ID NO: 86807 - DNA, 17 bp, Arabidopsis thaliana
ctctctcgcaagttgca

SEQ ID NO: 86808 - DNA, 17 bp, Arabidopsis thaliana
ctctctcggtcctgcag

SEQ ID NO: 86809 - DNA, 17 bp, Arabidopsis thaliana
ctctctctaaggaactc

SEQ ID NO: 86810 - DNA, 17 bp, Arabidopsis thaliana
ctctctctcacacgctg

SEQ ID NO: 86811 - DNA, 17 bp, Arabidopsis thaliana
ctctctctccatttcgt

SEQ ID NO: 86812 - DNA, 17 bp, Arabidopsis thaliana
ctctctctctcttgaac

SEQ ID NO: 86813 - DNA, 17 bp, Arabidopsis thaliana
ctctctctgagatgtgc

SEQ ID NO: 86814 - DNA, 17 bp, Arabidopsis thaliana
ctctctctgttctgtac

SEQ ID NO: 86815 - DNA, 17 bp, Arabidopsis thaliana
ctctctcttcaaaaccc

SEQ ID NO: 86816 - DNA, 17 bp, Arabidopsis thaliana
ctctctcttcaaaaccg

SEQ ID NO: 86817 - DNA, 17 bp, Arabidopsis thaliana
ctctctcttccacatgt

SEQ ID NO: 86818 - DNA, 17 bp, Arabidopsis thaliana
ctctctcttctgccttt

SEQ ID NO: 86819 - DNA, 17 bp, Arabidopsis thaliana
ctctctcttgaactcgg

SEQ ID NO: 86820 - DNA, 17 bp, Arabidopsis thaliana
ctctctctttcgtctag

SEQ ID NO: 86821 - DNA, 17 bp, Arabidopsis thaliana
ctctctgaattctctcc

SEQ ID NO: 86822 - DNA, 17 bp, Arabidopsis thaliana
ctctctgaggcgagacc

SEQ ID NO: 86823 - DNA, 17 bp, Arabidopsis thaliana
ctctctgatttctctac

SEQ ID NO: 86824 - DNA, 17 bp, Arabidopsis thaliana
ctctctgcagagctcat

SEQ ID NO: 86825 - DNA, 17 bp, Arabidopsis thaliana
ctctctgcagatttggc

SEQ ID NO: 86826 - DNA, 17 bp, Arabidopsis thaliana
ctctctgctactggtga

SEQ ID NO: 86827 - DNA, 17 bp, Arabidopsis thaliana
ctctctgctcgctactc

SEQ ID NO: 86828 - DNA, 17 bp, Arabidopsis thaliana
ctctctggcttgcgttt

SEQ ID NO: 86829 - DNA, 17 bp, Arabidopsis thaliana
ctctctgttgttcgttt

SEQ ID NO: 86830 - DNA, 17 bp, Arabidopsis thaliana
ctctctgtttcctggcc

SEQ ID NO: 86831 - DNA, 17 bp, Arabidopsis thaliana
ctctcttaaggtagcca

SEQ ID NO: 86832 - DNA, 17 bp, Arabidopsis thaliana
ctctcttagacgaaatt

SEQ ID NO: 86833 - DNA, 17 bp, Arabidopsis thaliana
ctctcttatttgggatt

SEQ ID NO: 86834 - DNA, 17 bp, Arabidopsis thaliana
ctctcttctactttcac

SEQ ID NO: 86835 - DNA, 17 bp, Arabidopsis thaliana
ctctcttctagcattgg

SEQ ID NO: 86836 - DNA, 17 bp, Arabidopsis thaliana
ctctcttctgctgacac

SEQ ID NO: 86837 - DNA, 17 bp, Arabidopsis thaliana
ctctcttcttctgctgc

SEQ ID NO: 86838 - DNA, 17 bp, Arabidopsis thaliana
ctctcttgaatctcggc

SEQ ID NO: 86839 - DNA, 17 bp, Arabidopsis thaliana
ctctcttgaatctcgtc

SEQ ID NO: 86840 - DNA, 17 bp, Arabidopsis thaliana
ctctcttgagtgacttt

SEQ ID NO: 86841 - DNA, 17 bp, Arabidopsis thaliana
ctctcttgcagccgtga

SEQ ID NO: 86842 - DNA, 17 bp, Arabidopsis thaliana
ctctcttgcgagataag

SEQ ID NO: 86843 - DNA, 17 bp, Arabidopsis thaliana
ctctcttgtgcactgtg

SEQ ID NO: 86844 - DNA, 17 bp, Arabidopsis thaliana
ctctctttatgatggga

SEQ ID NO: 86845 - DNA, 17 bp, Arabidopsis thaliana
ctctctttcatctcctc

SEQ ID NO: 86846 - DNA, 17 bp, Arabidopsis thaliana
ctctctttcatctctgc

SEQ ID NO: 86847 - DNA, 17 bp, Arabidopsis thaliana
ctctctttccggagcac

SEQ ID NO: 86848 - DNA, 17 bp, Arabidopsis thaliana
ctctctttgacagtcaa

SEQ ID NO: 86849 - DNA, 17 bp, Arabidopsis thaliana
ctctctttgcatttaca

SEQ ID NO: 86850 - DNA, 17 bp, Arabidopsis thaliana
ctctctttgccatgatt

SEQ ID NO: 86851 - DNA, 17 bp, Arabidopsis thaliana
ctctcttttcaccttag

SEQ ID NO: 86852 - DNA, 17 bp, Arabidopsis thaliana
ctctgaaacatcattga

SEQ ID NO: 86853 - DNA, 17 bp, Arabidopsis thaliana
ctctgaaagccagaagc

SEQ ID NO: 86854 - DNA, 17 bp, Arabidopsis thaliana
ctctgaactgtatgtgt

SEQ ID NO: 86855 - DNA, 17 bp, Arabidopsis thaliana
ctctgaagatgtttagt

SEQ ID NO: 86856 - DNA, 17 bp, Arabidopsis thaliana
ctctgaagttgtgtgtc

SEQ ID NO: 86857 - DNA, 17 bp, Arabidopsis thaliana
ctctgaatatgacacgc

SEQ ID NO: 86858 - DNA, 17 bp, Arabidopsis thaliana
ctctgaatggtaactgc

SEQ ID NO: 86859 - DNA, 17 bp, Arabidopsis thaliana
ctctgaatggtgaccaa

SEQ ID NO: 86860 - DNA, 17 bp, Arabidopsis thaliana
ctctgacaatggttttc

SEQ ID NO: 86861 - DNA, 17 bp, Arabidopsis thaliana
ctctgacagaatcgcca

SEQ ID NO: 86862 - DNA, 17 bp, Arabidopsis thaliana
ctctgacccgagtagca

SEQ ID NO: 86863 - DNA, 17 bp, Arabidopsis thaliana
ctctgacgaagatggcg

SEQ ID NO: 86864 - DNA, 17 bp, Arabidopsis thaliana
ctctgacgatattctca

SEQ ID NO: 86865 - DNA, 17 bp, Arabidopsis thaliana
ctctgacgctgctgatg

SEQ ID NO: 86866 - DNA, 17 bp, Arabidopsis thaliana
ctctgacggctgggctc

SEQ ID NO: 86867 - DNA, 17 bp, Arabidopsis thaliana
ctctgactgtgactaaa

SEQ ID NO: 86868 - DNA, 17 bp, Arabidopsis thaliana
ctctgactttcgggtcg

SEQ ID NO: 86869 - DNA, 17 bp, Arabidopsis thaliana
ctctgagactccattag

SEQ ID NO: 86870 - DNA, 17 bp, Arabidopsis thaliana
ctctgagactctgattg

SEQ ID NO: 86871 - DNA, 17 bp, Arabidopsis thaliana
ctctgagcctctgactg

SEQ ID NO: 86872 - DNA, 17 bp, Arabidopsis thaliana
ctctgagcggttcacct

SEQ ID NO: 86873 - DNA, 17 bp, Arabidopsis thaliana
ctctgagctattgcggt

SEQ ID NO: 86874 - DNA, 17 bp, Arabidopsis thaliana
ctctgaggaaactcgac

SEQ ID NO: 86875 - DNA, 17 bp, Arabidopsis thaliana
ctctgaggcactattac

SEQ ID NO: 86876 - DNA, 17 bp, Arabidopsis thaliana
ctctgagggctgggccg

SEQ ID NO: 86877 - DNA, 17 bp, Arabidopsis thaliana
ctctgagggctgggcgc

SEQ ID NO: 86878 - DNA, 17 bp, Arabidopsis thaliana
ctctgagggctgggctc

SEQ ID NO: 86879 - DNA, 17 bp, Arabidopsis thaliana
ctctgaggttttggctt

SEQ ID NO: 86880 - DNA, 17 bp, Arabidopsis thaliana
ctctgagtggtgactta

SEQ ID NO: 86881 - DNA, 17 bp, Arabidopsis thaliana
ctctgagttcgcgagct

SEQ ID NO: 86882 - DNA, 17 bp, Arabidopsis thaliana
ctctgagtttgcaagct

SEQ ID NO: 86883 - DNA, 17 bp, Arabidopsis thaliana
ctctgagtttgcaaggt

SEQ ID NO: 86884 - DNA, 17 bp, Arabidopsis thaliana
ctctgatagtagatcca

SEQ ID NO: 86885 - DNA, 17 bp, Arabidopsis thaliana
ctctgatcacatcctga

SEQ ID NO: 86886 - DNA, 17 bp, Arabidopsis thaliana
ctctgatcacctttttc

SEQ ID NO: 86887 - DNA, 17 bp, Arabidopsis thaliana
ctctgatccttctcaac

SEQ ID NO: 86888 - DNA, 17 bp, Arabidopsis thaliana
ctctgatctacttgcaa

SEQ ID NO: 86889 - DNA, 17 bp, Arabidopsis thaliana
ctctgatctacttgctc

SEQ ID NO: 86890 - DNA, 17 bp, Arabidopsis thaliana
ctctgatctacttggca

SEQ ID NO: 86891 - DNA, 17 bp, Arabidopsis thaliana
ctctgatgacatggcgg

SEQ ID NO: 86892 - DNA, 17 bp, Arabidopsis thaliana
ctctgatgcgggtaaag

SEQ ID NO: 86893 - DNA, 17 bp, Arabidopsis thaliana
ctctgatggttcaatga

SEQ ID NO: 86894 - DNA, 17 bp, Arabidopsis thaliana
ctctgatgttcgccatt

SEQ ID NO: 86895 - DNA, 17 bp, Arabidopsis thaliana
ctctgcaaaaacagtgt

SEQ ID NO: 86896 - DNA, 17 bp, Arabidopsis thaliana
ctctgcagcaaccgctt

SEQ ID NO: 86897 - DNA, 17 bp, Arabidopsis thaliana
ctctgcagcaactgctt

SEQ ID NO: 86898 - DNA, 17 bp, Arabidopsis thaliana
ctctgcagcgcatcgcc

SEQ ID NO: 86899 - DNA, 17 bp, Arabidopsis thaliana
ctctgcagtagctgttt

SEQ ID NO: 86900 - DNA, 17 bp, Arabidopsis thaliana
ctctgcagttaagcgtg

SEQ ID NO: 86901 - DNA, 17 bp, Arabidopsis thaliana
ctctgccacgtgtgtct

SEQ ID NO: 86902 - DNA, 17 bp, Arabidopsis thaliana
ctctgcccatcatcagt

SEQ ID NO: 86903 - DNA, 17 bp, Arabidopsis thaliana
ctctgcccgttgctctg

SEQ ID NO: 86904 - DNA, 17 bp, Arabidopsis thaliana
ctctgccctctgctgta

SEQ ID NO: 86905 - DNA, 17 bp, Arabidopsis thaliana
ctctgccgcagtgactg

SEQ ID NO: 86906 - DNA, 17 bp, Arabidopsis thaliana
ctctgccttctacggtt

SEQ ID NO: 86907 - DNA, 17 bp, Arabidopsis thaliana
ctctgccttggatagat

SEQ ID NO: 86908 - DNA, 17 bp, Arabidopsis thaliana
ctctgcgaaaccgactg

SEQ ID NO: 86909 - DNA, 17 bp, Arabidopsis thaliana
ctctgcgagtatgctca

SEQ ID NO: 86910 - DNA, 17 bp, Arabidopsis thaliana
ctctgcgagtgatacca

SEQ ID NO: 86911 - DNA, 17 bp, Arabidopsis thaliana
ctctgcgagtgataccg

SEQ ID NO: 86912 - DNA, 17 bp, Arabidopsis thaliana
ctctgcgcaactgtagc

SEQ ID NO: 86913 - DNA, 17 bp, Arabidopsis thaliana
ctctgcggcggctccat

SEQ ID NO: 86914 - DNA, 17 bp, Arabidopsis thaliana
ctctgctagatcagttt

SEQ ID NO: 86915 - DNA, 17 bp, Arabidopsis thaliana
ctctgctcacagaattt

SEQ ID NO: 86916 - DNA, 17 bp, Arabidopsis thaliana
ctctgctcagttacggc

SEQ ID NO: 86917 - DNA, 17 bp, Arabidopsis thaliana
ctctgctcgatacgctc

SEQ ID NO: 86918 - DNA, 17 bp, Arabidopsis thaliana
ctctgctgctgctactt

SEQ ID NO: 86919 - DNA, 17 bp, Arabidopsis thaliana
ctctgctgcttccctcc

SEQ ID NO: 86920 - DNA, 17 bp, Arabidopsis thaliana
ctctgctgggccgacac

SEQ ID NO: 86921 - DNA, 17 bp, Arabidopsis thaliana
ctctgcttctagttttc

SEQ ID NO: 86922 - DNA, 17 bp, Arabidopsis thaliana
ctctgcttctgcctcgg

SEQ ID NO: 86923 - DNA, 17 bp, Arabidopsis thaliana
ctctgcttgaagactgc

SEQ ID NO: 86924 - DNA, 17 bp, Arabidopsis thaliana
ctctgcttgtaccttga

SEQ ID NO: 86925 - DNA, 17 bp, Arabidopsis thaliana
ctctgctttctacggtt

SEQ ID NO: 86926 - DNA, 17 bp, Arabidopsis thaliana
ctctgctttgctgatgg

SEQ ID NO: 86927 - DNA, 17 bp, Arabidopsis thaliana
ctctgctttgttgagcc

SEQ ID NO: 86928 - DNA, 17 bp, Arabidopsis thaliana
ctctggaacggatgtga

SEQ ID NO: 86929 - DNA, 17 bp, Arabidopsis thaliana
ctctggaactggtggtc

SEQ ID NO: 86930 - DNA, 17 bp, Arabidopsis thaliana
ctctggaactttgagga

SEQ ID NO: 86931 - DNA, 17 bp, Arabidopsis thaliana
ctctggaatccattggt

SEQ ID NO: 86932 - DNA, 17 bp, Arabidopsis thaliana
ctctggaatccttttct

SEQ ID NO: 86933 - DNA, 17 bp, Arabidopsis thaliana
ctctggaattagtggtt

SEQ ID NO: 86934 - DNA, 17 bp, Arabidopsis thaliana
ctctggaccttgtgatt

SEQ ID NO: 86935 - DNA, 17 bp, Arabidopsis thaliana
ctctggagcgatttgtc

SEQ ID NO: 86936 - DNA, 17 bp, Arabidopsis thaliana
ctctggatacattagca

SEQ ID NO: 86937 - DNA, 17 bp, Arabidopsis thaliana
ctctggatatggcacgc

SEQ ID NO: 86938 - DNA, 17 bp, Arabidopsis thaliana
ctctggattcatgtgaa

SEQ ID NO: 86939 - DNA, 17 bp, Arabidopsis thaliana
ctctggattcgcgtacg

SEQ ID NO: 86940 - DNA, 17 bp, Arabidopsis thaliana
ctctggattgcaggctg

SEQ ID NO: 86941 - DNA, 17 bp, Arabidopsis thaliana
ctctggatttgaatgcc

SEQ ID NO: 86942 - DNA, 17 bp, Arabidopsis thaliana
ctctggcctagcttcaa

SEQ ID NO: 86943 - DNA, 17 bp, Arabidopsis thaliana
ctctggcctcttctagg

SEQ ID NO: 86944 - DNA, 17 bp, Arabidopsis thaliana
ctctggcgacaaaagtc

SEQ ID NO: 86945 - DNA, 17 bp, Arabidopsis thaliana
ctctggcgttgtaagtt

SEQ ID NO: 86946 - DNA, 17 bp, Arabidopsis thaliana
ctctggcttgcgtttgc

SEQ ID NO: 86947 - DNA, 17 bp, Arabidopsis thaliana
ctctgggcgaagcttga

SEQ ID NO: 86948 - DNA, 17 bp, Arabidopsis thaliana
ctctgggcgatgaagtg

SEQ ID NO: 86949 - DNA, 17 bp, Arabidopsis thaliana
ctctgggcggaacaagt

SEQ ID NO: 86950 - DNA, 17 bp, Arabidopsis thaliana
ctctggggctgggctcg

SEQ ID NO: 86951 - DNA, 17 bp, Arabidopsis thaliana
ctctggtcccattgctg

SEQ ID NO: 86952 - DNA, 17 bp, Arabidopsis thaliana
ctctggtccgcaggcct

SEQ ID NO: 86953 - DNA, 17 bp, Arabidopsis thaliana
ctctggtcggggattag

SEQ ID NO: 86954 - DNA, 17 bp, Arabidopsis thaliana
ctctggtcgtaggctga

SEQ ID NO: 86955 - DNA, 17 bp, Arabidopsis thaliana
ctctggtctccagtcct

SEQ ID NO: 86956 - DNA, 17 bp, Arabidopsis thaliana
ctctggtgattttggtc

SEQ ID NO: 86957 - DNA, 17 bp, Arabidopsis thaliana
ctctggtggaagcccgc

SEQ ID NO: 86958 - DNA, 17 bp, Arabidopsis thaliana
ctctggttcaaatccag

SEQ ID NO: 86959 - DNA, 17 bp, Arabidopsis thaliana
ctctggtttgctgcttt

SEQ ID NO: 86960 - DNA, 17 bp, Arabidopsis thaliana
ctctggttttcaaaggc

SEQ ID NO: 86961 - DNA, 17 bp, Arabidopsis thaliana
ctctgtaaacacaaggc

SEQ ID NO: 86962 - DNA, 17 bp, Arabidopsis thaliana
ctctgtaactgcttatt

SEQ ID NO: 86963 - DNA, 17 bp, Arabidopsis thaliana
ctctgtaacttagcagg

SEQ ID NO: 86964 - DNA, 17 bp, Arabidopsis thaliana
ctctgtaactttgacac

SEQ ID NO: 86965 - DNA, 17 bp, Arabidopsis thaliana
ctctgtacactgacttc

SEQ ID NO: 86966 - DNA, 17 bp, Arabidopsis thaliana
ctctgtagagtgtgctg

SEQ ID NO: 86967 - DNA, 17 bp, Arabidopsis thaliana
ctctgtagtttggttgc

SEQ ID NO: 86968 - DNA, 17 bp, Arabidopsis thaliana
ctctgtcaactagggga

SEQ ID NO: 86969 - DNA, 17 bp, Arabidopsis thaliana
ctctgtcactgagaagc

SEQ ID NO: 86970 - DNA, 17 bp, Arabidopsis thaliana
ctctgtcagccaatgct

SEQ ID NO: 86971 - DNA, 17 bp, Arabidopsis thaliana
ctctgtccaacagtcag

SEQ ID NO: 86972 - DNA, 17 bp, Arabidopsis thaliana
ctctgtcggcgatacgc

SEQ ID NO: 86973 - DNA, 17 bp, Arabidopsis thaliana
ctctgtcgttgtcggct

SEQ ID NO: 86974 - DNA, 17 bp, Arabidopsis thaliana
ctctgtctaagactttg

SEQ ID NO: 86975 - DNA, 17 bp, Arabidopsis thaliana
ctctgtctgtatcttcc

SEQ ID NO: 86976 - DNA, 17 bp, Arabidopsis thaliana
ctctgtgaatgtcgacg

SEQ ID NO: 86977 - DNA, 17 bp, Arabidopsis thaliana
ctctgtgagatctattt

SEQ ID NO: 86978 - DNA, 17 bp, Arabidopsis thaliana
ctctgtgagtgactctg

SEQ ID NO: 86979 - DNA, 17 bp, Arabidopsis thaliana
ctctgtgcattggtcgg

SEQ ID NO: 86980 - DNA, 17 bp, Arabidopsis thaliana
ctctgtgcctggccagt

SEQ ID NO: 86981 - DNA, 17 bp, Arabidopsis thaliana
ctctgtggaaacgacat

SEQ ID NO: 86982 - DNA, 17 bp, Arabidopsis thaliana
ctctgtggttctggtcg

SEQ ID NO: 86983 - DNA, 17 bp, Arabidopsis thaliana
ctctgtgttgttcgttt

SEQ ID NO: 86984 - DNA, 17 bp, Arabidopsis thaliana
ctctgttaattggcctt

SEQ ID NO: 86985 - DNA, 17 bp, Arabidopsis thaliana
ctctgttcgcattgaca

SEQ ID NO: 86986 - DNA, 17 bp, Arabidopsis thaliana
ctctgttcgtctaccat

SEQ ID NO: 86987 - DNA, 17 bp, Arabidopsis thaliana
ctctgttctcaatctac

SEQ ID NO: 86988 - DNA, 17 bp, Arabidopsis thaliana
ctctgttgcggtggcac

SEQ ID NO: 86989 - DNA, 17 bp, Arabidopsis thaliana
ctctgttgctgctctgc

SEQ ID NO: 86990 - DNA, 17 bp, Arabidopsis thaliana
ctctgttgtgaatagat

SEQ ID NO: 86991 - DNA, 17 bp, Arabidopsis thaliana
ctctgtttctagtgatc

SEQ ID NO: 86992 - DNA, 17 bp, Arabidopsis thaliana
ctctgtttgctcaacaa

SEQ ID NO: 86993 - DNA, 17 bp, Arabidopsis thaliana
ctctgttttcaactagg

SEQ ID NO: 86994 - DNA, 17 bp, Arabidopsis thaliana
ctctgttttgaccacct

SEQ ID NO: 86995 - DNA, 17 bp, Arabidopsis thaliana
ctcttaaatcctctgag

SEQ ID NO: 86996 - DNA, 17 bp, Arabidopsis thaliana
ctcttaacagtggtcct

SEQ ID NO: 86997 - DNA, 17 bp, Arabidopsis thaliana
ctcttaactgtgaggtt

SEQ ID NO: 86998 - DNA, 17 bp, Arabidopsis thaliana
ctcttaagatcgtgcca

SEQ ID NO: 86999 - DNA, 17 bp, Arabidopsis thaliana
ctcttaaggtatccaaa

SEQ ID NO: 87000 - DNA, 17 bp, Arabidopsis thaliana
ctcttaagtggctgaaa

SEQ ID NO: 87001 - DNA, 17 bp, Arabidopsis thaliana
ctcttaattcctgagtc

SEQ ID NO: 87002 - DNA, 17 bp, Arabidopsis thaliana
ctcttacagtgagtgcc

SEQ ID NO: 87003 - DNA, 17 bp, Arabidopsis thaliana
ctcttacgcatatgccg

SEQ ID NO: 87004 - DNA, 17 bp, Arabidopsis thaliana
ctcttactgccgacgtt

SEQ ID NO: 87005 - DNA, 17 bp, Arabidopsis thaliana
ctcttagaccttgcaaa

SEQ ID NO: 87006 - DNA, 17 bp, Arabidopsis thaliana
ctcttagaccttgcaat

SEQ ID NO: 87007 - DNA, 17 bp, Arabidopsis thaliana
ctcttagccagtattta

SEQ ID NO: 87008 - DNA, 17 bp, Arabidopsis thaliana
ctcttagcggcaagtct

SEQ ID NO: 87009 - DNA, 17 bp, Arabidopsis thaliana
ctcttagctaagagcca

SEQ ID NO: 87010 - DNA, 17 bp, Arabidopsis thaliana
ctcttaggggtttggac

SEQ ID NO: 87011 - DNA, 17 bp, Arabidopsis thaliana
ctcttaggggtttggat

SEQ ID NO: 87012 - DNA, 17 bp, Arabidopsis thaliana
ctcttaggtctactcga

SEQ ID NO: 87013 - DNA, 17 bp, Arabidopsis thaliana
ctcttagtcgcactgta

SEQ ID NO: 87014 - DNA, 17 bp, Arabidopsis thaliana
ctcttagtcgcatcctg

SEQ ID NO: 87015 - DNA, 17 bp, Arabidopsis thaliana
ctcttagtctctcttgc

SEQ ID NO: 87016 - DNA, 17 bp, Arabidopsis thaliana
ctcttatccttcaattt

SEQ ID NO: 87017 - DNA, 17 bp, Arabidopsis thaliana
ctcttatcgattatggc

SEQ ID NO: 87018 - DNA, 17 bp, Arabidopsis thaliana
ctcttcacaagactaga

SEQ ID NO: 87019 - DNA, 17 bp, Arabidopsis thaliana
ctcttcacgctcaataa

SEQ ID NO: 87020 - DNA, 17 bp, Arabidopsis thaliana
ctcttcacggccggctt

SEQ ID NO: 87021 - DNA, 17 bp, Arabidopsis thaliana
ctcttcacttgattccg

SEQ ID NO: 87022 - DNA, 17 bp, Arabidopsis thaliana
ctcttcagaggctcact

SEQ ID NO: 87023 - DNA, 17 bp, Arabidopsis thaliana
ctcttcagatctattgc

SEQ ID NO: 87024 - DNA, 17 bp, Arabidopsis thaliana
ctcttcagatctgtcgc

SEQ ID NO: 87025 - DNA, 17 bp, Arabidopsis thaliana
ctcttcaggaacttcat

SEQ ID NO: 87026 - DNA, 17 bp, Arabidopsis thaliana
ctcttcagttctgcctc

SEQ ID NO: 87027 - DNA, 17 bp, Arabidopsis thaliana
ctcttcatctccgtctg

SEQ ID NO: 87028 - DNA, 17 bp, Arabidopsis thaliana
ctcttcatgctcttttg

SEQ ID NO: 87029 - DNA, 17 bp, Arabidopsis thaliana
ctcttcatggtgttctt

SEQ ID NO: 87030 - DNA, 17 bp, Arabidopsis thaliana
ctcttccacaacttgac

SEQ ID NO: 87031 - DNA, 17 bp, Arabidopsis thaliana
ctcttccagccgctgga

SEQ ID NO: 87032 - DNA, 17 bp, Arabidopsis thaliana
ctcttccatcttgtgag

SEQ ID NO: 87033 - DNA, 17 bp, Arabidopsis thaliana
ctcttcccggctggtgc

SEQ ID NO: 87034 - DNA, 17 bp, Arabidopsis thaliana
ctcttcccgtagtgcgt

SEQ ID NO: 87035 - DNA, 17 bp, Arabidopsis thaliana
ctcttcccttcttatac

SEQ ID NO: 87036 - DNA, 17 bp, Arabidopsis thaliana
ctcttccgagaaactta

SEQ ID NO: 87037 - DNA, 17 bp, Arabidopsis thaliana
ctcttccggatctaagt

SEQ ID NO: 87038 - DNA, 17 bp, Arabidopsis thaliana
ctcttccttctggtctg

SEQ ID NO: 87039 - DNA, 17 bp, Arabidopsis thaliana
ctcttcctttacgcgga

SEQ ID NO: 87040 - DNA, 17 bp, Arabidopsis thaliana
ctcttcgccgacgaatt

SEQ ID NO: 87041 - DNA, 17 bp, Arabidopsis thaliana
ctcttcgccgacgactt

SEQ ID NO: 87042 - DNA, 17 bp, Arabidopsis thaliana
ctcttcggatgaattca

SEQ ID NO: 87043 - DNA, 17 bp, Arabidopsis thaliana
ctcttcggggagaccat

SEQ ID NO: 87044 - DNA, 17 bp, Arabidopsis thaliana
ctcttcggggaggccat

SEQ ID NO: 87045 - DNA, 17 bp, Arabidopsis thaliana
ctcttcggtgtgatggc

SEQ ID NO: 87046 - DNA, 17 bp, Arabidopsis thaliana
ctcttcgttgtgtgaag

SEQ ID NO: 87047 - DNA, 17 bp, Arabidopsis thaliana
ctcttctacagcgctgc

SEQ ID NO: 87048 - DNA, 17 bp, Arabidopsis thaliana
ctcttctactttcacgg

SEQ ID NO: 87049 - DNA, 17 bp, Arabidopsis thaliana
ctcttctcatcactgga

SEQ ID NO: 87050 - DNA, 17 bp, Arabidopsis thaliana
ctcttctccttttgtgt

SEQ ID NO: 87051 - DNA, 17 bp, Arabidopsis thaliana
ctcttctccttttgttt

SEQ ID NO: 87052 - DNA, 17 bp, Arabidopsis thaliana
ctcttctctggatccac

SEQ ID NO: 87053 - DNA, 17 bp, Arabidopsis thaliana
ctcttctgcatagttgt

SEQ ID NO: 87054 - DNA, 17 bp, Arabidopsis thaliana
ctcttctgtagctacct

SEQ ID NO: 87055 - DNA, 17 bp, Arabidopsis thaliana
ctcttctgtgacgggtt

SEQ ID NO: 87056 - DNA, 17 bp, Arabidopsis thaliana
ctcttcttcgagggcgt

SEQ ID NO: 87057 - DNA, 17 bp, Arabidopsis thaliana
ctcttcttcggcgcctt

SEQ ID NO: 87058 - DNA, 17 bp, Arabidopsis thaliana
ctcttctttcatatgag

SEQ ID NO: 87059 - DNA, 17 bp, Arabidopsis thaliana
ctcttctttcggcttag

SEQ ID NO: 87060 - DNA, 17 bp, Arabidopsis thaliana
ctcttcttttcctgcga

SEQ ID NO: 87061 - DNA, 17 bp, Arabidopsis thaliana
ctcttctttttcggcgc

SEQ ID NO: 87062 - DNA, 17 bp, Arabidopsis thaliana
ctcttgaaggatgatcc

SEQ ID NO: 87063 - DNA, 17 bp, Arabidopsis thaliana
ctcttgaatctccccct

SEQ ID NO: 87064 - DNA, 17 bp, Arabidopsis thaliana
ctcttgacaacagatat

SEQ ID NO: 87065 - DNA, 17 bp, Arabidopsis thaliana
ctcttgagacctttgtt

SEQ ID NO: 87066 - DNA, 17 bp, Arabidopsis thaliana
ctcttgatcctagtaat

SEQ ID NO: 87067 - DNA, 17 bp, Arabidopsis thaliana
ctcttgatctgtcgcat

SEQ ID NO: 87068 - DNA, 17 bp, Arabidopsis thaliana
ctcttgcagccgtgaca

SEQ ID NO: 87069 - DNA, 17 bp, Arabidopsis thaliana
ctcttgcatttgtctcc

SEQ ID NO: 87070 - DNA, 17 bp, Arabidopsis thaliana
ctcttgccgatggagat

SEQ ID NO: 87071 - DNA, 17 bp, Arabidopsis thaliana
ctcttgcgaagtggatg

SEQ ID NO: 87072 - DNA, 17 bp, Arabidopsis thaliana
ctcttgcgggagaagcc

SEQ ID NO: 87073 - DNA, 17 bp, Arabidopsis thaliana
ctcttgcgtgctctaga

SEQ ID NO: 87074 - DNA, 17 bp, Arabidopsis thaliana
ctcttgctacgggtgca

SEQ ID NO: 87075 - DNA, 17 bp, Arabidopsis thaliana
ctcttgctcatcagcat

SEQ ID NO: 87076 - DNA, 17 bp, Arabidopsis thaliana
ctcttgctcatcttcag

SEQ ID NO: 87077 - DNA, 17 bp, Arabidopsis thaliana
ctcttgctcatctttag

SEQ ID NO: 87078 - DNA, 17 bp, Arabidopsis thaliana
ctcttgcttgatgatcg

SEQ ID NO: 87079 - DNA, 17 bp, Arabidopsis thaliana
ctcttgctttctaaact

SEQ ID NO: 87080 - DNA, 17 bp, Arabidopsis thaliana
ctcttggatattcggca

SEQ ID NO: 87081 - DNA, 17 bp, Arabidopsis thaliana
ctcttggcaagctccac

SEQ ID NO: 87082 - DNA, 17 bp, Arabidopsis thaliana
ctcttggcaccaacaga

SEQ ID NO: 87083 - DNA, 17 bp, Arabidopsis thaliana
ctcttggcccttcagga

SEQ ID NO: 87084 - DNA, 17 bp, Arabidopsis thaliana
ctcttgggacaacaccc

SEQ ID NO: 87085 - DNA, 17 bp, Arabidopsis thaliana
ctcttgggacaacatgc

SEQ ID NO: 87086 - DNA, 17 bp, Arabidopsis thaliana
ctcttgggtctcttcag

SEQ ID NO: 87087 - DNA, 17 bp, Arabidopsis thaliana
ctcttggtccgaaaaaa

SEQ ID NO: 87088 - DNA, 17 bp, Arabidopsis thaliana
ctcttggtgcaggtcgg

SEQ ID NO: 87089 - DNA, 17 bp, Arabidopsis thaliana
ctcttggtgttgtcttc

SEQ ID NO: 87090 - DNA, 17 bp, Arabidopsis thaliana
ctcttggtgttgtcttt

SEQ ID NO: 87091 - DNA, 17 bp, Arabidopsis thaliana
ctcttggttttgcgagg

SEQ ID NO: 87092 - DNA, 17 bp, Arabidopsis thaliana
ctcttgtcagctttgaa

SEQ ID NO: 87093 - DNA, 17 bp, Arabidopsis thaliana
ctcttgtcgccggtagt

SEQ ID NO: 87094 - DNA, 17 bp, Arabidopsis thaliana
ctcttgtcggggtgccc

SEQ ID NO: 87095 - DNA, 17 bp, Arabidopsis thaliana
ctcttgtgctatcaatc

SEQ ID NO: 87096 - DNA, 17 bp, Arabidopsis thaliana
ctcttgtgctatcaatg

SEQ ID NO: 87097 - DNA, 17 bp, Arabidopsis thaliana
ctcttgtggttattgct

SEQ ID NO: 87098 - DNA, 17 bp, Arabidopsis thaliana
ctctttaacgttggtcc

SEQ ID NO: 87099 - DNA, 17 bp, Arabidopsis thaliana
ctctttaaggcaacggg

SEQ ID NO: 87100 - DNA, 17 bp, Arabidopsis thaliana
ctctttaatggtcccat

SEQ ID NO: 87101 - DNA, 17 bp, Arabidopsis thaliana
ctctttagcgcgtatct

SEQ ID NO: 87102 - DNA, 17 bp, Arabidopsis thaliana
ctctttcaaggaggcag

SEQ ID NO: 87103 - DNA, 17 bp, Arabidopsis thaliana
ctctttcattgcggcat

SEQ ID NO: 87104 - DNA, 17 bp, Arabidopsis thaliana
ctctttcatttaaggtt

SEQ ID NO: 87105 - DNA, 17 bp, Arabidopsis thaliana
ctctttccattcttcgg

SEQ ID NO: 87106 - DNA, 17 bp, Arabidopsis thaliana
ctctttccgccagcccc

SEQ ID NO: 87107 - DNA, 17 bp, Arabidopsis thaliana
ctctttccgctgctccg

SEQ ID NO: 87108 - DNA, 17 bp, Arabidopsis thaliana
ctctttccttaggtggt

SEQ ID NO: 87109 - DNA, 17 bp, Arabidopsis thaliana
ctctttcgatgatgtcg

SEQ ID NO: 87110 - DNA, 17 bp, Arabidopsis thaliana
ctctttcgctacagttg

SEQ ID NO: 87111 - DNA, 17 bp, Arabidopsis thaliana
ctctttcggaggattct

SEQ ID NO: 87112 - DNA, 17 bp, Arabidopsis thaliana
ctctttcgggacgattc

SEQ ID NO: 87113 - DNA, 17 bp, Arabidopsis thaliana
ctctttcgtctagtggt

SEQ ID NO: 87114 - DNA, 17 bp, Arabidopsis thaliana
ctctttcgtgttcgtgc

SEQ ID NO: 87115 - DNA, 17 bp, Arabidopsis thaliana
ctctttctatggtgcag

SEQ ID NO: 87116 - DNA, 17 bp, Arabidopsis thaliana
ctctttctcatacagtg

SEQ ID NO: 87117 - DNA, 17 bp, Arabidopsis thaliana
ctctttctctgactatc

SEQ ID NO: 87118 - DNA, 17 bp, Arabidopsis thaliana
ctctttctgggctactt

SEQ ID NO: 87119 - DNA, 17 bp, Arabidopsis thaliana
ctctttctggtgctttg

SEQ ID NO: 87120 - DNA, 17 bp, Arabidopsis thaliana
ctctttctggttttgct

SEQ ID NO: 87121 - DNA, 17 bp, Arabidopsis thaliana
ctctttctttccgacaa

SEQ ID NO: 87122 - DNA, 17 bp, Arabidopsis thaliana
ctctttctttctctttc

SEQ ID NO: 87123 - DNA, 17 bp, Arabidopsis thaliana
ctctttgaccgtctcct

SEQ ID NO: 87124 - DNA, 17 bp, Arabidopsis thaliana
ctctttgagacatctcg

SEQ ID NO: 87125 - DNA, 17 bp, Arabidopsis thaliana
ctctttgaggttccatc

SEQ ID NO: 87126 - DNA, 17 bp, Arabidopsis thaliana
ctctttgatccttcgat

SEQ ID NO: 87127 - DNA, 17 bp, Arabidopsis thaliana
ctctttgatgtacttgt

SEQ ID NO: 87128 - DNA, 17 bp, Arabidopsis thaliana
ctctttgccatactttt

SEQ ID NO: 87129 - DNA, 17 bp, Arabidopsis thaliana
ctctttgctggagacag

SEQ ID NO: 87130 - DNA, 17 bp, Arabidopsis thaliana
ctctttggacctcgctc

SEQ ID NO: 87131 - DNA, 17 bp, Arabidopsis thaliana
ctctttgggctttccga

SEQ ID NO: 87132 - DNA, 17 bp, Arabidopsis thaliana
ctctttgggtctacatg

SEQ ID NO: 87133 - DNA, 17 bp, Arabidopsis thaliana
ctctttgtcatctatcg

SEQ ID NO: 87134 - DNA, 17 bp, Arabidopsis thaliana
ctctttgtccgttgcta

SEQ ID NO: 87135 - DNA, 17 bp, Arabidopsis thaliana
ctctttgtcgctaagat

SEQ ID NO: 87136 - DNA, 17 bp, Arabidopsis thaliana
ctctttgtggatgttag

SEQ ID NO: 87137 - DNA, 17 bp, Arabidopsis thaliana
ctctttgtttgtccatc

SEQ ID NO: 87138 - DNA, 17 bp, Arabidopsis thaliana
ctctttgttttcattgc

SEQ ID NO: 87139 - DNA, 17 bp, Arabidopsis thaliana
ctcttttccctacatgg

SEQ ID NO: 87140 - DNA, 17 bp, Arabidopsis thaliana
ctcttttctaatttttg

SEQ ID NO: 87141 - DNA, 17 bp, Arabidopsis thaliana
ctcttttgaaatccgtc

SEQ ID NO: 87142 - DNA, 17 bp, Arabidopsis thaliana
ctcttttgagtaggtgt

SEQ ID NO: 87143 - DNA, 17 bp, Arabidopsis thaliana
ctcttttgcctccgaac

SEQ ID NO: 87144 - DNA, 17 bp, Arabidopsis thaliana
ctcttttgcctcgcaaa

SEQ ID NO: 87145 - DNA, 17 bp, Arabidopsis thaliana
ctcttttgcgattttac

SEQ ID NO: 87146 - DNA, 17 bp, Arabidopsis thaliana
ctcttttgcggtcgctg

SEQ ID NO: 87147 - DNA, 17 bp, Arabidopsis thaliana
ctctttttcccgttgtt

SEQ ID NO: 87148 - DNA, 17 bp, Arabidopsis thaliana
ctctttttctggcatgc

SEQ ID NO: 87149 - DNA, 17 bp, Arabidopsis thaliana
ctcttttttcgccatta

SEQ ID NO: 87150 - DNA, 17 bp, Arabidopsis thaliana
ctgaaaaatctactttg

SEQ ID NO: 87151 - DNA, 17 bp, Arabidopsis thaliana
ctgaaaacaagttgaac

SEQ ID NO: 87152 - DNA, 17 bp, Arabidopsis thaliana
ctgaaaacactggccat

SEQ ID NO: 87153 - DNA, 17 bp, Arabidopsis thaliana
ctgaaaacagagaattt

SEQ ID NO: 87154 - DNA, 17 bp, Arabidopsis thaliana
ctgaaaacagagacgat

SEQ ID NO: 87155 - DNA, 17 bp, Arabidopsis thaliana
ctgaaaacagggacgat

SEQ ID NO: 87156 - DNA, 17 bp, Arabidopsis thaliana
ctgaaaaccgaggttga

SEQ ID NO: 87157 - DNA, 17 bp, Arabidopsis thaliana
ctgaaaaccggcgatct

SEQ ID NO: 87158 - DNA, 17 bp, Arabidopsis thaliana
ctgaaaactgcgacatg

SEQ ID NO: 87159 - DNA, 17 bp, Arabidopsis thaliana
ctgaaaactgtgactat

SEQ ID NO: 87160 - DNA, 17 bp, Arabidopsis thaliana
ctgaaaagttttctggc

SEQ ID NO: 87161 - DNA, 17 bp, Arabidopsis thaliana
ctgaaaatgagatgatt

SEQ ID NO: 87162 - DNA, 17 bp, Arabidopsis thaliana
ctgaaaattcaggcaac

SEQ ID NO: 87163 - DNA, 17 bp, Arabidopsis thaliana
ctgaaaattccagcgtc

SEQ ID NO: 87164 - DNA, 17 bp, Arabidopsis thaliana
ctgaaaatttccatcgc

SEQ ID NO: 87165 - DNA, 17 bp, Arabidopsis thaliana
ctgaaaatttgtccaag

SEQ ID NO: 87166 - DNA, 17 bp, Arabidopsis thaliana
ctgaaactggtttgctc

SEQ ID NO: 87167 - DNA, 17 bp, Arabidopsis thaliana
ctgaaagacctgaattc

SEQ ID NO: 87168 - DNA, 17 bp, Arabidopsis thaliana
ctgaaagagtaacttcc

SEQ ID NO: 87169 - DNA, 17 bp, Arabidopsis thaliana
ctgaaagatcagatatc

SEQ ID NO: 87170 - DNA, 17 bp, Arabidopsis thaliana
ctgaaagattatgggtt

SEQ ID NO: 87171 - DNA, 17 bp, Arabidopsis thaliana
ctgaaagcaagtcaagt

SEQ ID NO: 87172 - DNA, 17 bp, Arabidopsis thaliana
ctgaaagtccagttgag

SEQ ID NO: 87173 - DNA, 17 bp, Arabidopsis thaliana
ctgaaagtgactacatc

SEQ ID NO: 87174 - DNA, 17 bp, Arabidopsis thaliana
ctgaaagtgactacatt

SEQ ID NO: 87175 - DNA, 17 bp, Arabidopsis thaliana
ctgaaatacttcggtct

SEQ ID NO: 87176 - DNA, 17 bp, Arabidopsis thaliana
ctgaaatcacctgtgaa

SEQ ID NO: 87177 - DNA, 17 bp, Arabidopsis thaliana
ctgaaatcacctgtgac

SEQ ID NO: 87178 - DNA, 17 bp, Arabidopsis thaliana
ctgaaatccagagattt

SEQ ID NO: 87179 - DNA, 17 bp, Arabidopsis thaliana
ctgaaatccagaggttt

SEQ ID NO: 87180 - DNA, 17 bp, Arabidopsis thaliana
ctgaaatccatcaacgc

SEQ ID NO: 87181 - DNA, 17 bp, Arabidopsis thaliana
ctgaaatcgatcgagat

SEQ ID NO: 87182 - DNA, 17 bp, Arabidopsis thaliana
ctgaaatgcttcagagt

SEQ ID NO: 87183 - DNA, 17 bp, Arabidopsis thaliana
ctgaaatgtcagtactg

SEQ ID NO: 87184 - DNA, 17 bp, Arabidopsis thaliana
ctgaaatgtggatctat

SEQ ID NO: 87185 - DNA, 17 bp, Arabidopsis thaliana
ctgaaatttcatcgtga

SEQ ID NO: 87186 - DNA, 17 bp, Arabidopsis thaliana
ctgaaatttgacccttt

SEQ ID NO: 87187 - DNA, 17 bp, Arabidopsis thaliana
ctgaacagactgccggt

SEQ ID NO: 87188 - DNA, 17 bp, Arabidopsis thaliana
ctgaacagcttcaggcc

SEQ ID NO: 87189 - DNA, 17 bp, Arabidopsis thaliana
ctgaacagtttctgctt

SEQ ID NO: 87190 - DNA, 17 bp, Arabidopsis thaliana
ctgaacagttttcgcgc

SEQ ID NO: 87191 - DNA, 17 bp, Arabidopsis thaliana
ctgaacataagctgatt

SEQ ID NO: 87192 - DNA, 17 bp, Arabidopsis thaliana
ctgaacattctcaggct

SEQ ID NO: 87193 - DNA, 17 bp, Arabidopsis thaliana
ctgaaccaatggtgtga

SEQ ID NO: 87194 - DNA, 17 bp, Arabidopsis thaliana
ctgaacgactctcggca

SEQ ID NO: 87195 - DNA, 17 bp, Arabidopsis thaliana
ctgaacgatagacttga

SEQ ID NO: 87196 - DNA, 17 bp, Arabidopsis thaliana
ctgaacgcctctaagtc

SEQ ID NO: 87197 - DNA, 17 bp, Arabidopsis thaliana
ctgaacggggtttgtgg

SEQ ID NO: 87198 - DNA, 17 bp, Arabidopsis thaliana
ctgaacgtgtcacattc

SEQ ID NO: 87199 - DNA, 17 bp, Arabidopsis thaliana
ctgaactgcaccgtact

SEQ ID NO: 87200 - DNA, 17 bp, Arabidopsis thaliana
ctgaactgcgtttccga

SEQ ID NO: 87201 - DNA, 17 bp, Arabidopsis thaliana
ctgaactggatctcagc

SEQ ID NO: 87202 - DNA, 17 bp, Arabidopsis thaliana
ctgaacttcatgttgta

SEQ ID NO: 87203 - DNA, 17 bp, Arabidopsis thaliana
ctgaacttccttgaccc

SEQ ID NO: 87204 - DNA, 17 bp, Arabidopsis thaliana
ctgaacttgacattcgc

SEQ ID NO: 87205 - DNA, 17 bp, Arabidopsis thaliana
ctgaagaactgtggacc

SEQ ID NO: 87206 - DNA, 17 bp, Arabidopsis thaliana
ctgaagacattttgttg

SEQ ID NO: 87207 - DNA, 17 bp, Arabidopsis thaliana
ctgaagaccagctcatg

SEQ ID NO: 87208 - DNA, 17 bp, Arabidopsis thaliana
ctgaagaggacttggaa

SEQ ID NO: 87209 - DNA, 17 bp, Arabidopsis thaliana
ctgaagatgagcaagag

SEQ ID NO: 87210 - DNA, 17 bp, Arabidopsis thaliana
ctgaagattagcgattt

SEQ ID NO: 87211 - DNA, 17 bp, Arabidopsis thaliana
ctgaagcagccagcatg

SEQ ID NO: 87212 - DNA, 17 bp, Arabidopsis thaliana
ctgaagcccaaagacag

SEQ ID NO: 87213 - DNA, 17 bp, Arabidopsis thaliana
ctgaagctcatccacct

SEQ ID NO: 87214 - DNA, 17 bp, Arabidopsis thaliana
ctgaagctgccagcatg

SEQ ID NO: 87215 - DNA, 17 bp, Arabidopsis thaliana
ctgaaggaattacgggg

SEQ ID NO: 87216 - DNA, 17 bp, Arabidopsis thaliana
ctgaaggaattacgggt

SEQ ID NO: 87217 - DNA, 17 bp, Arabidopsis thaliana
ctgaagggattacggat

SEQ ID NO: 87218 - DNA, 17 bp, Arabidopsis thaliana
ctgaagggattacgggt

SEQ ID NO: 87219 - DNA, 17 bp, Arabidopsis thaliana
ctgaagtatttcggtgc

SEQ ID NO: 87220 - DNA, 17 bp, Arabidopsis thaliana
ctgaagtctctgacaat

SEQ ID NO: 87221 - DNA, 17 bp, Arabidopsis thaliana
ctgaagtgtttgggggg

SEQ ID NO: 87222 - DNA, 17 bp, Arabidopsis thaliana
ctgaagttgcttgatct

SEQ ID NO: 87223 - DNA, 17 bp, Arabidopsis thaliana
ctgaagttggatacctc

SEQ ID NO: 87224 - DNA, 17 bp, Arabidopsis thaliana
ctgaagttgtgtgtcta

SEQ ID NO: 87225 - DNA, 17 bp, Arabidopsis thaliana
ctgaagttttgccttcc

SEQ ID NO: 87226 - DNA, 17 bp, Arabidopsis thaliana
ctgaagtttttgacata

SEQ ID NO: 87227 - DNA, 17 bp, Arabidopsis thaliana
ctgaatactacggacgc

SEQ ID NO: 87228 - DNA, 17 bp, Arabidopsis thaliana
ctgaatactgtgtgcgt

SEQ ID NO: 87229 - DNA, 17 bp, Arabidopsis thaliana
ctgaatagttcaaggct

SEQ ID NO: 87230 - DNA, 17 bp, Arabidopsis thaliana
ctgaatattcacaccct

SEQ ID NO: 87231 - DNA, 17 bp, Arabidopsis thaliana
ctgaatcatcatttgtc

SEQ ID NO: 87232 - DNA, 17 bp, Arabidopsis thaliana
ctgaatctcagtggatc

SEQ ID NO: 87233 - DNA, 17 bp, Arabidopsis thaliana
ctgaatctgaaccgcca

SEQ ID NO: 87234 - DNA, 17 bp, Arabidopsis thaliana
ctgaatgactctctctc

SEQ ID NO: 87235 - DNA, 17 bp, Arabidopsis thaliana
ctgaatgactttgtaaa

SEQ ID NO: 87236 - DNA, 17 bp, Arabidopsis thaliana
ctgaatgcgtctctgct

SEQ ID NO: 87237 - DNA, 17 bp, Arabidopsis thaliana
ctgaatgctaacactgg

SEQ ID NO: 87238 - DNA, 17 bp, Arabidopsis thaliana
ctgaatggagacgtgcg

SEQ ID NO: 87239 - DNA, 17 bp, Arabidopsis thaliana
ctgaatggttgcagcgg

SEQ ID NO: 87240 - DNA, 17 bp, Arabidopsis thaliana
ctgaattacccgtttag

SEQ ID NO: 87241 - DNA, 17 bp, Arabidopsis thaliana
ctgaattctactcttgg

SEQ ID NO: 87242 - DNA, 17 bp, Arabidopsis thaliana
ctgaattggaccacgga

SEQ ID NO: 87243 - DNA, 17 bp, Arabidopsis thaliana
ctgaattgttcattgac

SEQ ID NO: 87244 - DNA, 17 bp, Arabidopsis thaliana
ctgaatttcacctgtgg

SEQ ID NO: 87245 - DNA, 17 bp, Arabidopsis thaliana
ctgaatttcttcatctt

SEQ ID NO: 87246 - DNA, 17 bp, Arabidopsis thaliana
ctgaatttggactattt

SEQ ID NO: 87247 - DNA, 17 bp, Arabidopsis thaliana
ctgacaaagactgagat

SEQ ID NO: 87248 - DNA, 17 bp, Arabidopsis thaliana
ctgacaaagccactttg

SEQ ID NO: 87249 - DNA, 17 bp, Arabidopsis thaliana
ctgacaaagtggtagac

SEQ ID NO: 87250 - DNA, 17 bp, Arabidopsis thaliana
ctgacaaatctggtgac

SEQ ID NO: 87251 - DNA, 17 bp, Arabidopsis thaliana
ctgacaaatggattaac

SEQ ID NO: 87252 - DNA, 17 bp, Arabidopsis thaliana
ctgacaaatggattagc

SEQ ID NO: 87253 - DNA, 17 bp, Arabidopsis thaliana
ctgacaaattagaccgt

SEQ ID NO: 87254 - DNA, 17 bp, Arabidopsis thaliana
ctgacaagggtagattc

SEQ ID NO: 87255 - DNA, 17 bp, Arabidopsis thaliana
ctgacaagtttctgtag

SEQ ID NO: 87256 - DNA, 17 bp, Arabidopsis thaliana
ctgacaatgcaacatct

SEQ ID NO: 87257 - DNA, 17 bp, Arabidopsis thaliana
ctgacaatgtcctccgc

SEQ ID NO: 87258 - DNA, 17 bp, Arabidopsis thaliana
ctgacacagggtgagcg

SEQ ID NO: 87259 - DNA, 17 bp, Arabidopsis thaliana
ctgacaccacggctatt

SEQ ID NO: 87260 - DNA, 17 bp, Arabidopsis thaliana
ctgacaccatggctatt

SEQ ID NO: 87261 - DNA, 17 bp, Arabidopsis thaliana
ctgacacctcagctttt

SEQ ID NO: 87262 - DNA, 17 bp, Arabidopsis thaliana
ctgacacgtgtcaacat

SEQ ID NO: 87263 - DNA, 17 bp, Arabidopsis thaliana
ctgacactacagctgct

SEQ ID NO: 87264 - DNA, 17 bp, Arabidopsis thaliana
ctgacagactttccaaa

SEQ ID NO: 87265 - DNA, 17 bp, Arabidopsis thaliana
ctgacagagacaaactc

SEQ ID NO: 87266 - DNA, 17 bp, Arabidopsis thaliana
ctgacagggcgggtatg

SEQ ID NO: 87267 - DNA, 17 bp, Arabidopsis thaliana
ctgacatcgggtttggc

SEQ ID NO: 87268 - DNA, 17 bp, Arabidopsis thaliana
ctgacatctatcaaggc

SEQ ID NO: 87269 - DNA, 17 bp, Arabidopsis thaliana
ctgacatctgcagtcag

SEQ ID NO: 87270 - DNA, 17 bp, Arabidopsis thaliana
ctgacatgcgggataac

SEQ ID NO: 87271 - DNA, 17 bp, Arabidopsis thaliana
ctgacatgcgtgacagt

SEQ ID NO: 87272 - DNA, 17 bp, Arabidopsis thaliana
ctgacatgctagtttcc

SEQ ID NO: 87273 - DNA, 17 bp, Arabidopsis thaliana
ctgacatggagaagttg

SEQ ID NO: 87274 - DNA, 17 bp, Arabidopsis thaliana
ctgacatgtgtgcgagc

SEQ ID NO: 87275 - DNA, 17 bp, Arabidopsis thaliana
ctgacatgtgtgcgagt

SEQ ID NO: 87276 - DNA, 17 bp, Arabidopsis thaliana
ctgacatgtgtgcgatt

SEQ ID NO: 87277 - DNA, 17 bp, Arabidopsis thaliana
ctgacatgtgtgcgccc

SEQ ID NO: 87278 - DNA, 17 bp, Arabidopsis thaliana
ctgacattgccgtattg

SEQ ID NO: 87279 - DNA, 17 bp, Arabidopsis thaliana
ctgacattgctggttat

SEQ ID NO: 87280 - DNA, 17 bp, Arabidopsis thaliana
ctgaccaaccgtatgct

SEQ ID NO: 87281 - DNA, 17 bp, Arabidopsis thaliana
ctgaccaaccgtatgtt

SEQ ID NO: 87282 - DNA, 17 bp, Arabidopsis thaliana
ctgaccaagtcactagc

SEQ ID NO: 87283 - DNA, 17 bp, Arabidopsis thaliana
ctgaccaatctattcaa

SEQ ID NO: 87284 - DNA, 17 bp, Arabidopsis thaliana
ctgaccagcacttgctt

SEQ ID NO: 87285 - DNA, 17 bp, Arabidopsis thaliana
ctgaccagttcaaccgg

SEQ ID NO: 87286 - DNA, 17 bp, Arabidopsis thaliana
ctgaccatcgtctttgt

SEQ ID NO: 87287 - DNA, 17 bp, Arabidopsis thaliana
ctgaccatgggatgtcc

SEQ ID NO: 87288 - DNA, 17 bp, Arabidopsis thaliana
ctgaccattgctgtgga

SEQ ID NO: 87289 - DNA, 17 bp, Arabidopsis thaliana
ctgaccattgctgtggc

SEQ ID NO: 87290 - DNA, 17 bp, Arabidopsis thaliana
ctgaccattggacaatg

SEQ ID NO: 87291 - DNA, 17 bp, Arabidopsis thaliana
ctgaccatttggccgat

SEQ ID NO: 87292 - DNA, 17 bp, Arabidopsis thaliana
ctgacccaaacccaact

SEQ ID NO: 87293 - DNA, 17 bp, Arabidopsis thaliana
ctgacccacctgaccca

SEQ ID NO: 87294 - DNA, 17 bp, Arabidopsis thaliana
ctgacccgccagtagat

SEQ ID NO: 87295 - DNA, 17 bp, Arabidopsis thaliana
ctgacccggctgttctg

SEQ ID NO: 87296 - DNA, 17 bp, Arabidopsis thaliana
ctgaccctctttacagc

SEQ ID NO: 87297 - DNA, 17 bp, Arabidopsis thaliana
ctgacccttattagatc

SEQ ID NO: 87298 - DNA, 17 bp, Arabidopsis thaliana
ctgaccgaatcgcacac

SEQ ID NO: 87299 - DNA, 17 bp, Arabidopsis thaliana
ctgaccgaatcgcacag

SEQ ID NO: 87300 - DNA, 17 bp, Arabidopsis thaliana
ctgaccgaggatttcgc

SEQ ID NO: 87301 - DNA, 17 bp, Arabidopsis thaliana
ctgaccgcctgtcgacc

SEQ ID NO: 87302 - DNA, 17 bp, Arabidopsis thaliana
ctgaccgcttttacttt

SEQ ID NO: 87303 - DNA, 17 bp, Arabidopsis thaliana
ctgaccggatcagccga

SEQ ID NO: 87304 - DNA, 17 bp, Arabidopsis thaliana
ctgacctaagacaagta

SEQ ID NO: 87305 - DNA, 17 bp, Arabidopsis thaliana
ctgacctatctgaggat

SEQ ID NO: 87306 - DNA, 17 bp, Arabidopsis thaliana
ctgacctattatgacgg

SEQ ID NO: 87307 - DNA, 17 bp, Arabidopsis thaliana
ctgacctcaggtttggc

SEQ ID NO: 87308 - DNA, 17 bp, Arabidopsis thaliana
ctgacctcccgggaagt

SEQ ID NO: 87309 - DNA, 17 bp, Arabidopsis thaliana
ctgacctcggaatcggc

SEQ ID NO: 87310 - DNA, 17 bp, Arabidopsis thaliana
ctgacctcgtagatgat

SEQ ID NO: 87311 - DNA, 17 bp, Arabidopsis thaliana
ctgacctgatggatgtt

SEQ ID NO: 87312 - DNA, 17 bp, Arabidopsis thaliana
ctgacctggctgtatct

SEQ ID NO: 87313 - DNA, 17 bp, Arabidopsis thaliana
ctgaccttacctcagct

SEQ ID NO: 87314 - DNA, 17 bp, Arabidopsis thaliana
ctgaccttagctcagtt

SEQ ID NO: 87315 - DNA, 17 bp, Arabidopsis thaliana
ctgaccttcaacttctc

SEQ ID NO: 87316 - DNA, 17 bp, Arabidopsis thaliana
ctgaccttggtaccaga

SEQ ID NO: 87317 - DNA, 17 bp, Arabidopsis thaliana
ctgaccttgttgttgtt

SEQ ID NO: 87318 - DNA, 17 bp, Arabidopsis thaliana
ctgacgaaaaaacggac

SEQ ID NO: 87319 - DNA, 17 bp, Arabidopsis thaliana
ctgacgaaattgaaccc

SEQ ID NO: 87320 - DNA, 17 bp, Arabidopsis thaliana
ctgacgaagcatgacgg

SEQ ID NO: 87321 - DNA, 17 bp, Arabidopsis thaliana
ctgacgacctttggtac

SEQ ID NO: 87322 - DNA, 17 bp, Arabidopsis thaliana
ctgacgactctcggcaa

SEQ ID NO: 87323 - DNA, 17 bp, Arabidopsis thaliana
ctgacgagctccgattg

SEQ ID NO: 87324 - DNA, 17 bp, Arabidopsis thaliana
ctgacgagtctcacagt

SEQ ID NO: 87325 - DNA, 17 bp, Arabidopsis thaliana
ctgacgcagattacggt

SEQ ID NO: 87326 - DNA, 17 bp, Arabidopsis thaliana
ctgacgccatggctatt

SEQ ID NO: 87327 - DNA, 17 bp, Arabidopsis thaliana
ctgacgccgctgatgtt

SEQ ID NO: 87328 - DNA, 17 bp, Arabidopsis thaliana
ctgacgcctgcccagcg

SEQ ID NO: 87329 - DNA, 17 bp, Arabidopsis thaliana
ctgacgcctgcccagtg

SEQ ID NO: 87330 - DNA, 17 bp, Arabidopsis thaliana
ctgacgcctttaagatc

SEQ ID NO: 87331 - DNA, 17 bp, Arabidopsis thaliana
ctgacgcggattacggt

SEQ ID NO: 87332 - DNA, 17 bp, Arabidopsis thaliana
ctgacgctgatcacgtg

SEQ ID NO: 87333 - DNA, 17 bp, Arabidopsis thaliana
ctgacgctgctgatgtt

SEQ ID NO: 87334 - DNA, 17 bp, Arabidopsis thaliana
ctgacggagagagagac

SEQ ID NO: 87335 - DNA, 17 bp, Arabidopsis thaliana
ctgacggagcaatgccg

SEQ ID NO: 87336 - DNA, 17 bp, Arabidopsis thaliana
ctgacggatttatctat

SEQ ID NO: 87337 - DNA, 17 bp, Arabidopsis thaliana
ctgacggcgaaggatat

SEQ ID NO: 87338 - DNA, 17 bp, Arabidopsis thaliana
ctgacggcttcacaggt

SEQ ID NO: 87339 - DNA, 17 bp, Arabidopsis thaliana
ctgacgggaacaccaac

SEQ ID NO: 87340 - DNA, 17 bp, Arabidopsis thaliana
ctgacggtcggttcgtt

SEQ ID NO: 87341 - DNA, 17 bp, Arabidopsis thaliana
ctgacggtgagagggta

SEQ ID NO: 87342 - DNA, 17 bp, Arabidopsis thaliana
ctgacgttgagattgca

SEQ ID NO: 87343 - DNA, 17 bp, Arabidopsis thaliana
ctgacgtttggcttgca

SEQ ID NO: 87344 - DNA, 17 bp, Arabidopsis thaliana
ctgactaaacccgagtt

SEQ ID NO: 87345 - DNA, 17 bp, Arabidopsis thaliana
ctgactaacaaacctcc

SEQ ID NO: 87346 - DNA, 17 bp, Arabidopsis thaliana
ctgactaagtctcttct

SEQ ID NO: 87347 - DNA, 17 bp, Arabidopsis thaliana
ctgactaatgtcagagg

SEQ ID NO: 87348 - DNA, 17 bp, Arabidopsis thaliana
ctgactaccaggtaaac

SEQ ID NO: 87349 - DNA, 17 bp, Arabidopsis thaliana
ctgactaccaggtaatc

SEQ ID NO: 87350 - DNA, 17 bp, Arabidopsis thaliana
ctgactaccataacgtt

SEQ ID NO: 87351 - DNA, 17 bp, Arabidopsis thaliana
ctgactaccccctggca

SEQ ID NO: 87352 - DNA, 17 bp, Arabidopsis thaliana
ctgactactcctggtat

SEQ ID NO: 87353 - DNA, 17 bp, Arabidopsis thaliana
ctgactactctctggca

SEQ ID NO: 87354 - DNA, 17 bp, Arabidopsis thaliana
ctgactagagttcggtt

SEQ ID NO: 87355 - DNA, 17 bp, Arabidopsis thaliana
ctgactagctgctgctt

SEQ ID NO: 87356 - DNA, 17 bp, Arabidopsis thaliana
ctgactagtccactggg

SEQ ID NO: 87357 - DNA, 17 bp, Arabidopsis thaliana
ctgactagtccattggg

SEQ ID NO: 87358 - DNA, 17 bp, Arabidopsis thaliana
ctgactatcagataaac

SEQ ID NO: 87359 - DNA, 17 bp, Arabidopsis thaliana
ctgactatcaggtaaac

SEQ ID NO: 87360 - DNA, 17 bp, Arabidopsis thaliana
ctgactatccctggcat

SEQ ID NO: 87361 - DNA, 17 bp, Arabidopsis thaliana
ctgactattgttgacgg

SEQ ID NO: 87362 - DNA, 17 bp, Arabidopsis thaliana
ctgactccagatcagaa

SEQ ID NO: 87363 - DNA, 17 bp, Arabidopsis thaliana
ctgactcgtgaagttac

SEQ ID NO: 87364 - DNA, 17 bp, Arabidopsis thaliana
ctgactcgttattcact

SEQ ID NO: 87365 - DNA, 17 bp, Arabidopsis thaliana
ctgactctgctgtccat

SEQ ID NO: 87366 - DNA, 17 bp, Arabidopsis thaliana
ctgactctgtttctgca

SEQ ID NO: 87367 - DNA, 17 bp, Arabidopsis thaliana
ctgactcttaggaactt

SEQ ID NO: 87368 - DNA, 17 bp, Arabidopsis thaliana
ctgactctttgactgat

SEQ ID NO: 87369 - DNA, 17 bp, Arabidopsis thaliana
ctgactgacgggttagc

SEQ ID NO: 87370 - DNA, 17 bp, Arabidopsis thaliana
ctgactgcctgcgttcc

SEQ ID NO: 87371 - DNA, 17 bp, Arabidopsis thaliana
ctgactgctctcttgac

SEQ ID NO: 87372 - DNA, 17 bp, Arabidopsis thaliana
ctgactgctgccttgac

SEQ ID NO: 87373 - DNA, 17 bp, Arabidopsis thaliana
ctgactgtgacaagtat

SEQ ID NO: 87374 - DNA, 17 bp, Arabidopsis thaliana
ctgactgtgagaccgac

SEQ ID NO: 87375 - DNA, 17 bp, Arabidopsis thaliana
ctgactgttcgacgccc

SEQ ID NO: 87376 - DNA, 17 bp, Arabidopsis thaliana
ctgacttaccgtcgttc

SEQ ID NO: 87377 - DNA, 17 bp, Arabidopsis thaliana
ctgacttaccgtcgttt

SEQ ID NO: 87378 - DNA, 17 bp, Arabidopsis thaliana
ctgacttaccgtcttac

SEQ ID NO: 87379 - DNA, 17 bp, Arabidopsis thaliana
ctgacttagaggcgttc

SEQ ID NO: 87380 - DNA, 17 bp, Arabidopsis thaliana
ctgacttattccccgac

SEQ ID NO: 87381 - DNA, 17 bp, Arabidopsis thaliana
ctgacttattccccggc

SEQ ID NO: 87382 - DNA, 17 bp, Arabidopsis thaliana
ctgacttcgcattgcca

SEQ ID NO: 87383 - DNA, 17 bp, Arabidopsis thaliana
ctgacttcggccaatcc

SEQ ID NO: 87384 - DNA, 17 bp, Arabidopsis thaliana
ctgacttcggtcaaccc

SEQ ID NO: 87385 - DNA, 17 bp, Arabidopsis thaliana
ctgacttctttgtggac

SEQ ID NO: 87386 - DNA, 17 bp, Arabidopsis thaliana
ctgacttggagttacgc

SEQ ID NO: 87387 - DNA, 17 bp, Arabidopsis thaliana
ctgacttggctcgggcg

SEQ ID NO: 87388 - DNA, 17 bp, Arabidopsis thaliana
ctgacttggctcggggg

SEQ ID NO: 87389 - DNA, 17 bp, Arabidopsis thaliana
ctgacttggctttttat

SEQ ID NO: 87390 - DNA, 17 bp, Arabidopsis thaliana
ctgacttgggtataggg

SEQ ID NO: 87391 - DNA, 17 bp, Arabidopsis thaliana
ctgacttgggtctctct

SEQ ID NO: 87392 - DNA, 17 bp, Arabidopsis thaliana
ctgacttgtatcgatga

SEQ ID NO: 87393 - DNA, 17 bp, Arabidopsis thaliana
ctgacttgtctacgtac

SEQ ID NO: 87394 - DNA, 17 bp, Arabidopsis thaliana
ctgactttcttacattt

SEQ ID NO: 87395 - DNA, 17 bp, Arabidopsis thaliana
ctgactttggacgtctt

SEQ ID NO: 87396 - DNA, 17 bp, Arabidopsis thaliana
ctgactttggtttggca

SEQ ID NO: 87397 - DNA, 17 bp, Arabidopsis thaliana
ctgactttgtaaccggt

SEQ ID NO: 87398 - DNA, 17 bp, Arabidopsis thaliana
ctgactttgtagtcctg

SEQ ID NO: 87399 - DNA, 17 bp, Arabidopsis thaliana
ctgacttttgactgtag

SEQ ID NO: 87400 - DNA, 17 bp, Arabidopsis thaliana
ctgacttttggcttaat

SEQ ID NO: 87401 - DNA, 17 bp, Arabidopsis thaliana
ctgacttttgttgacgg

SEQ ID NO: 87402 - DNA, 17 bp, Arabidopsis thaliana
ctgactttttcttcagg

SEQ ID NO: 87403 - DNA, 17 bp, Arabidopsis thaliana
ctgagaaacggctacca

SEQ ID NO: 87404 - DNA, 17 bp, Arabidopsis thaliana
ctgagaaagtcggccat

SEQ ID NO: 87405 - DNA, 17 bp, Arabidopsis thaliana
ctgagaaattaataggc

SEQ ID NO: 87406 - DNA, 17 bp, Arabidopsis thaliana
ctgagaaccgccataag

SEQ ID NO: 87407 - DNA, 17 bp, Arabidopsis thaliana
ctgagaacggctctctc

SEQ ID NO: 87408 - DNA, 17 bp, Arabidopsis thaliana
ctgagaagattatgggt

SEQ ID NO: 87409 - DNA, 17 bp, Arabidopsis thaliana
ctgagaagggttcgagt

SEQ ID NO: 87410 - DNA, 17 bp, Arabidopsis thaliana
ctgagaaggtcggccat

SEQ ID NO: 87411 - DNA, 17 bp, Arabidopsis thaliana
ctgagaagttgccagac

SEQ ID NO: 87412 - DNA, 17 bp, Arabidopsis thaliana
ctgagaataggtgttgc

SEQ ID NO: 87413 - DNA, 17 bp, Arabidopsis thaliana
ctgagaatcagtcggct

SEQ ID NO: 87414 - DNA, 17 bp, Arabidopsis thaliana
ctgagaatgagatacgt

SEQ ID NO: 87415 - DNA, 17 bp, Arabidopsis thaliana
ctgagaatgccctttgc

SEQ ID NO: 87416 - DNA, 17 bp, Arabidopsis thaliana
ctgagaatgtcggctat

SEQ ID NO: 87417 - DNA, 17 bp, Arabidopsis thaliana
ctgagaatttgcttgtt

SEQ ID NO: 87418 - DNA, 17 bp, Arabidopsis thaliana
ctgagacaccggtgtta

SEQ ID NO: 87419 - DNA, 17 bp, Arabidopsis thaliana
ctgagacacggcccaga

SEQ ID NO: 87420 - DNA, 17 bp, Arabidopsis thaliana
ctgagacgagggaatgc

SEQ ID NO: 87421 - DNA, 17 bp, Arabidopsis thaliana
ctgagacgagggagtgc

SEQ ID NO: 87422 - DNA, 17 bp, Arabidopsis thaliana
ctgagacgctctttgat

SEQ ID NO: 87423 - DNA, 17 bp, Arabidopsis thaliana
ctgagactacccgcggg

SEQ ID NO: 87424 - DNA, 17 bp, Arabidopsis thaliana
ctgagactacccgtggg

SEQ ID NO: 87425 - DNA, 17 bp, Arabidopsis thaliana
ctgagactgcattggtt

SEQ ID NO: 87426 - DNA, 17 bp, Arabidopsis thaliana
ctgagactgtccgtttt

SEQ ID NO: 87427 - DNA, 17 bp, Arabidopsis thaliana
ctgagacttagcatata

SEQ ID NO: 87428 - DNA, 17 bp, Arabidopsis thaliana
ctgagagaattacggga

SEQ ID NO: 87429 - DNA, 17 bp, Arabidopsis thaliana
ctgagagaccggctcgt

SEQ ID NO: 87430 - DNA, 17 bp, Arabidopsis thaliana
ctgagagacctataccg

SEQ ID NO: 87431 - DNA, 17 bp, Arabidopsis thaliana
ctgagagactcgtgtct

SEQ ID NO: 87432 - DNA, 17 bp, Arabidopsis thaliana
ctgagagactctagttt

SEQ ID NO: 87433 - DNA, 17 bp, Arabidopsis thaliana
ctgagagatatgaactc

SEQ ID NO: 87434 - DNA, 17 bp, Arabidopsis thaliana
ctgagagattacgggat

SEQ ID NO: 87435 - DNA, 17 bp, Arabidopsis thaliana
ctgagagattacgggct

SEQ ID NO: 87436 - DNA, 17 bp, Arabidopsis thaliana
ctgagagatttagaccg

SEQ ID NO: 87437 - DNA, 17 bp, Arabidopsis thaliana
ctgagagatttggaccg

SEQ ID NO: 87438 - DNA, 17 bp, Arabidopsis thaliana
ctgagagattttaccac

SEQ ID NO: 87439 - DNA, 17 bp, Arabidopsis thaliana
ctgagagcagtgaaatc

SEQ ID NO: 87440 - DNA, 17 bp, Arabidopsis thaliana
ctgagagcgaacgtgag

SEQ ID NO: 87441 - DNA, 17 bp, Arabidopsis thaliana
ctgagagctctttcttg

SEQ ID NO: 87442 - DNA, 17 bp, Arabidopsis thaliana
ctgagaggattacgggc

SEQ ID NO: 87443 - DNA, 17 bp, Arabidopsis thaliana
ctgagaggcgagaccga

SEQ ID NO: 87444 - DNA, 17 bp, Arabidopsis thaliana
ctgagagtgatccgtgt

SEQ ID NO: 87445 - DNA, 17 bp, Arabidopsis thaliana
ctgagatacagcccttt

SEQ ID NO: 87446 - DNA, 17 bp, Arabidopsis thaliana
ctgagatagcactttgt

SEQ ID NO: 87447 - DNA, 17 bp, Arabidopsis thaliana
ctgagatatcaggtccg

SEQ ID NO: 87448 - DNA, 17 bp, Arabidopsis thaliana
ctgagatatcctggaat

SEQ ID NO: 87449 - DNA, 17 bp, Arabidopsis thaliana
ctgagatccagttcagc

SEQ ID NO: 87450 - DNA, 17 bp, Arabidopsis thaliana
ctgagatctctatgact

SEQ ID NO: 87451 - DNA, 17 bp, Arabidopsis thaliana
ctgagatggctgttgcg

SEQ ID NO: 87452 - DNA, 17 bp, Arabidopsis thaliana
ctgagatgtggttttca

SEQ ID NO: 87453 - DNA, 17 bp, Arabidopsis thaliana
ctgagattatcgcgtcg

SEQ ID NO: 87454 - DNA, 17 bp, Arabidopsis thaliana
ctgagattcagccctct

SEQ ID NO: 87455 - DNA, 17 bp, Arabidopsis thaliana
ctgagattcagcccttc

SEQ ID NO: 87456 - DNA, 17 bp, Arabidopsis thaliana
ctgagattcagcccttg

SEQ ID NO: 87457 - DNA, 17 bp, Arabidopsis thaliana
ctgagattcagcccttt

SEQ ID NO: 87458 - DNA, 17 bp, Arabidopsis thaliana
ctgagattcagcttttg

SEQ ID NO: 87459 - DNA, 17 bp, Arabidopsis thaliana
ctgagattctgcccttt

SEQ ID NO: 87460 - DNA, 17 bp, Arabidopsis thaliana
ctgagattgtttgcggg

SEQ ID NO: 87461 - DNA, 17 bp, Arabidopsis thaliana
ctgagatttatgatcgg

SEQ ID NO: 87462 - DNA, 17 bp, Arabidopsis thaliana
ctgagatttgtagattc

SEQ ID NO: 87463 - DNA, 17 bp, Arabidopsis thaliana
ctgagattttgcagaag

SEQ ID NO: 87464 - DNA, 17 bp, Arabidopsis thaliana
ctgagattttgtcggga

SEQ ID NO: 87465 - DNA, 17 bp, Arabidopsis thaliana
ctgagcaaccccaggac

SEQ ID NO: 87466 - DNA, 17 bp, Arabidopsis thaliana
ctgagcaggaagcttat

SEQ ID NO: 87467 - DNA, 17 bp, Arabidopsis thaliana
ctgagcaggcagctgta

SEQ ID NO: 87468 - DNA, 17 bp, Arabidopsis thaliana
ctgagccaactcttcgc

SEQ ID NO: 87469 - DNA, 17 bp, Arabidopsis thaliana
ctgagccaaggatgact

SEQ ID NO: 87470 - DNA, 17 bp, Arabidopsis thaliana
ctgagccagaacacttg

SEQ ID NO: 87471 - DNA, 17 bp, Arabidopsis thaliana
ctgagcccgaagacttc

SEQ ID NO: 87472 - DNA, 17 bp, Arabidopsis thaliana
ctgagccgccgccgctt

SEQ ID NO: 87473 - DNA, 17 bp, Arabidopsis thaliana
ctgagccgtgattaagt

SEQ ID NO: 87474 - DNA, 17 bp, Arabidopsis thaliana
ctgagccgtgccactat

SEQ ID NO: 87475 - DNA, 17 bp, Arabidopsis thaliana
ctgagccttggcgttgt

SEQ ID NO: 87476 - DNA, 17 bp, Arabidopsis thaliana
ctgagcctttcatttct

SEQ ID NO: 87477 - DNA, 17 bp, Arabidopsis thaliana
ctgagcgaacagagtca

SEQ ID NO: 87478 - DNA, 17 bp, Arabidopsis thaliana
ctgagcgattgggttgt

SEQ ID NO: 87479 - DNA, 17 bp, Arabidopsis thaliana
ctgagcgtctagttatc

SEQ ID NO: 87480 - DNA, 17 bp, Arabidopsis thaliana
ctgagctcgttgaaccg

SEQ ID NO: 87481 - DNA, 17 bp, Arabidopsis thaliana
ctgagctgactgttcga

SEQ ID NO: 87482 - DNA, 17 bp, Arabidopsis thaliana
ctgagctgtccttgttt

SEQ ID NO: 87483 - DNA, 17 bp, Arabidopsis thaliana
ctgagctttgttccagc

SEQ ID NO: 87484 - DNA, 17 bp, Arabidopsis thaliana
ctgaggaaactcgacct

SEQ ID NO: 87485 - DNA, 17 bp, Arabidopsis thaliana
ctgaggaagaggttgag

SEQ ID NO: 87486 - DNA, 17 bp, Arabidopsis thaliana
ctgaggacattgtcagg

SEQ ID NO: 87487 - DNA, 17 bp, Arabidopsis thaliana
ctgaggaccgagtgccg

SEQ ID NO: 87488 - DNA, 17 bp, Arabidopsis thaliana
ctgaggattacggtttc

SEQ ID NO: 87489 - DNA, 17 bp, Arabidopsis thaliana
ctgaggcaactaagatt

SEQ ID NO: 87490 - DNA, 17 bp, Arabidopsis thaliana
ctgaggccaagcttaag

SEQ ID NO: 87491 - DNA, 17 bp, Arabidopsis thaliana
ctgaggcccggtgcaga

SEQ ID NO: 87492 - DNA, 17 bp, Arabidopsis thaliana
ctgaggctcttggacag

SEQ ID NO: 87493 - DNA, 17 bp, Arabidopsis thaliana
ctgaggctgggctcggg

SEQ ID NO: 87494 - DNA, 17 bp, Arabidopsis thaliana
ctgagggaacgtctgcc

SEQ ID NO: 87495 - DNA, 17 bp, Arabidopsis thaliana
ctgagggattacgagtt

SEQ ID NO: 87496 - DNA, 17 bp, Arabidopsis thaliana
ctgagggcacgtctgcc

SEQ ID NO: 87497 - DNA, 17 bp, Arabidopsis thaliana
ctgagggccgggctcgg

SEQ ID NO: 87498 - DNA, 17 bp, Arabidopsis thaliana
ctgagggcggggctggg

SEQ ID NO: 87499 - DNA, 17 bp, Arabidopsis thaliana
ctgagggctgggcgcgg

SEQ ID NO: 87500 - DNA, 17 bp, Arabidopsis thaliana
ctgagggctgggctcga

SEQ ID NO: 87501 - DNA, 17 bp, Arabidopsis thaliana
ctgagggctgggctcgg

SEQ ID NO: 87502 - DNA, 17 bp, Arabidopsis thaliana
ctgagggctgggctggg

SEQ ID NO: 87503 - DNA, 17 bp, Arabidopsis thaliana
ctgagggctggtctcgg

SEQ ID NO: 87504 - DNA, 17 bp, Arabidopsis thaliana
ctgaggggattacgggc

SEQ ID NO: 87505 - DNA, 17 bp, Arabidopsis thaliana
ctgagggtcgagtgtga

SEQ ID NO: 87506 - DNA, 17 bp, Arabidopsis thaliana
ctgaggtacggggatcg

SEQ ID NO: 87507 - DNA, 17 bp, Arabidopsis thaliana
ctgaggtcgagagttcg

SEQ ID NO: 87508 - DNA, 17 bp, Arabidopsis thaliana
ctgaggttaagccaatc

SEQ ID NO: 87509 - DNA, 17 bp, Arabidopsis thaliana
ctgagtagtcgtgtgtc

SEQ ID NO: 87510 - DNA, 17 bp, Arabidopsis thaliana
ctgagtcaccaggagcc

SEQ ID NO: 87511 - DNA, 17 bp, Arabidopsis thaliana
ctgagtcagacagtgat

SEQ ID NO: 87512 - DNA, 17 bp, Arabidopsis thaliana
ctgagtcgatatcgccg

SEQ ID NO: 87513 - DNA, 17 bp, Arabidopsis thaliana
ctgagtcgcatcctgta

SEQ ID NO: 87514 - DNA, 17 bp, Arabidopsis thaliana
ctgagtctactacgcag

SEQ ID NO: 87515 - DNA, 17 bp, Arabidopsis thaliana
ctgagtggtgacttagg

SEQ ID NO: 87516 - DNA, 17 bp, Arabidopsis thaliana
ctgagtggtgataggtt

SEQ ID NO: 87517 - DNA, 17 bp, Arabidopsis thaliana
ctgagtgtccagccccg

SEQ ID NO: 87518 - DNA, 17 bp, Arabidopsis thaliana
ctgagttacggtatatt

SEQ ID NO: 87519 - DNA, 17 bp, Arabidopsis thaliana
ctgagttacggtatgtt

SEQ ID NO: 87520 - DNA, 17 bp, Arabidopsis thaliana
ctgagttgccgcagctg

SEQ ID NO: 87521 - DNA, 17 bp, Arabidopsis thaliana
ctgagttggatcaatcg

SEQ ID NO: 87522 - DNA, 17 bp, Arabidopsis thaliana
ctgagtttctgaccaac

SEQ ID NO: 87523 - DNA, 17 bp, Arabidopsis thaliana
ctgataaaccagccggt

SEQ ID NO: 87524 - DNA, 17 bp, Arabidopsis thaliana
ctgataacaaccaggtt

SEQ ID NO: 87525 - DNA, 17 bp, Arabidopsis thaliana
ctgataacttagctcga

SEQ ID NO: 87526 - DNA, 17 bp, Arabidopsis thaliana
ctgataagactttgtcc

SEQ ID NO: 87527 - DNA, 17 bp, Arabidopsis thaliana
ctgataatggacatagc

SEQ ID NO: 87528 - DNA, 17 bp, Arabidopsis thaliana
ctgatacccagctgaga

SEQ ID NO: 87529 - DNA, 17 bp, Arabidopsis thaliana
ctgataccgggactatc

SEQ ID NO: 87530 - DNA, 17 bp, Arabidopsis thaliana
ctgatacgactttgttt

SEQ ID NO: 87531 - DNA, 17 bp, Arabidopsis thaliana
ctgatacgtccagaggt

SEQ ID NO: 87532 - DNA, 17 bp, Arabidopsis thaliana
ctgatactcgatcaccc

SEQ ID NO: 87533 - DNA, 17 bp, Arabidopsis thaliana
ctgatagctagggtcga

SEQ ID NO: 87534 - DNA, 17 bp, Arabidopsis thaliana
ctgatatactcgatcgc

SEQ ID NO: 87535 - DNA, 17 bp, Arabidopsis thaliana
ctgatatgatcgctggt

SEQ ID NO: 87536 - DNA, 17 bp, Arabidopsis thaliana
ctgatatttgtcataag

SEQ ID NO: 87537 - DNA, 17 bp, Arabidopsis thaliana
ctgatcaagacgctgtc

SEQ ID NO: 87538 - DNA, 17 bp, Arabidopsis thaliana
ctgatcaaggtcgagga

SEQ ID NO: 87539 - DNA, 17 bp, Arabidopsis thaliana
ctgatcactttctgtcc

SEQ ID NO: 87540 - DNA, 17 bp, Arabidopsis thaliana
ctgatcaggggaaagat

SEQ ID NO: 87541 - DNA, 17 bp, Arabidopsis thaliana
ctgatcataagccatag

SEQ ID NO: 87542 - DNA, 17 bp, Arabidopsis thaliana
ctgatccacatcggtcc

SEQ ID NO: 87543 - DNA, 17 bp, Arabidopsis thaliana
ctgatccagtttgtgtg

SEQ ID NO: 87544 - DNA, 17 bp, Arabidopsis thaliana
ctgatcccaccaagaca

SEQ ID NO: 87545 - DNA, 17 bp, Arabidopsis thaliana
ctgatcccgacacaaag

SEQ ID NO: 87546 - DNA, 17 bp, Arabidopsis thaliana
ctgatccgccaatctac

SEQ ID NO: 87547 - DNA, 17 bp, Arabidopsis thaliana
ctgatccgctccaccaa

SEQ ID NO: 87548 - DNA, 17 bp, Arabidopsis thaliana
ctgatccggttagccct

SEQ ID NO: 87549 - DNA, 17 bp, Arabidopsis thaliana
ctgatccttggctaaac

SEQ ID NO: 87550 - DNA, 17 bp, Arabidopsis thaliana
ctgatcgacaagtgttg

SEQ ID NO: 87551 - DNA, 17 bp, Arabidopsis thaliana
ctgatcgacagatctct

SEQ ID NO: 87552 - DNA, 17 bp, Arabidopsis thaliana
ctgatcgatagacttga

SEQ ID NO: 87553 - DNA, 17 bp, Arabidopsis thaliana
ctgatcgatcctccatt

SEQ ID NO: 87554 - DNA, 17 bp, Arabidopsis thaliana
ctgatcgccaactgcaa

SEQ ID NO: 87555 - DNA, 17 bp, Arabidopsis thaliana
ctgatcgctggcgactg

SEQ ID NO: 87556 - DNA, 17 bp, Arabidopsis thaliana
ctgatcgctggtcgctg

SEQ ID NO: 87557 - DNA, 17 bp, Arabidopsis thaliana
ctgatcgcttgagtctg

SEQ ID NO: 87558 - DNA, 17 bp, Arabidopsis thaliana
ctgatcggactaggtta

SEQ ID NO: 87559 - DNA, 17 bp, Arabidopsis thaliana
ctgatcggtaaccgaaa

SEQ ID NO: 87560 - DNA, 17 bp, Arabidopsis thaliana
ctgatcggtgctagctg

SEQ ID NO: 87561 - DNA, 17 bp, Arabidopsis thaliana
ctgatcgttcatatggc

SEQ ID NO: 87562 - DNA, 17 bp, Arabidopsis thaliana
ctgatcgttgacttgac

SEQ ID NO: 87563 - DNA, 17 bp, Arabidopsis thaliana
ctgatcgtttgacttga

SEQ ID NO: 87564 - DNA, 17 bp, Arabidopsis thaliana
ctgatcgtttgatttga

SEQ ID NO: 87565 - DNA, 17 bp, Arabidopsis thaliana
ctgatctacgactctgg

SEQ ID NO: 87566 - DNA, 17 bp, Arabidopsis thaliana
ctgatctcctaggcttt

SEQ ID NO: 87567 - DNA, 17 bp, Arabidopsis thaliana
ctgatctgactctgttt

SEQ ID NO: 87568 - DNA, 17 bp, Arabidopsis thaliana
ctgatctgattcacctg

SEQ ID NO: 87569 - DNA, 17 bp, Arabidopsis thaliana
ctgatctggaaggatta

SEQ ID NO: 87570 - DNA, 17 bp, Arabidopsis thaliana
ctgatcttgccaaaacg

SEQ ID NO: 87571 - DNA, 17 bp, Arabidopsis thaliana
ctgatcttttgacttga

SEQ ID NO: 87572 - DNA, 17 bp, Arabidopsis thaliana
ctgatgaaacgaacaaa

SEQ ID NO: 87573 - DNA, 17 bp, Arabidopsis thaliana
ctgatgaaacgaacagg

SEQ ID NO: 87574 - DNA, 17 bp, Arabidopsis thaliana
ctgatgaaccctgacag

SEQ ID NO: 87575 - DNA, 17 bp, Arabidopsis thaliana
ctgatgaatgccgatat

SEQ ID NO: 87576 - DNA, 17 bp, Arabidopsis thaliana
ctgatgactcaccatag

SEQ ID NO: 87577 - DNA, 17 bp, Arabidopsis thaliana
ctgatgaggagcacttc

SEQ ID NO: 87578 - DNA, 17 bp, Arabidopsis thaliana
ctgatgatagggctgcg

SEQ ID NO: 87579 - DNA, 17 bp, Arabidopsis thaliana
ctgatgatcattgtctt

SEQ ID NO: 87580 - DNA, 17 bp, Arabidopsis thaliana
ctgatgattcatgataa

SEQ ID NO: 87581 - DNA, 17 bp, Arabidopsis thaliana
ctgatgctttagcccgt

SEQ ID NO: 87582 - DNA, 17 bp, Arabidopsis thaliana
ctgatggattcattgac

SEQ ID NO: 87583 - DNA, 17 bp, Arabidopsis thaliana
ctgatggcagtccagat

SEQ ID NO: 87584 - DNA, 17 bp, Arabidopsis thaliana
ctgatggccaggaatcg

SEQ ID NO: 87585 - DNA, 17 bp, Arabidopsis thaliana
ctgatggcgaaattccg

SEQ ID NO: 87586 - DNA, 17 bp, Arabidopsis thaliana
ctgatggctcacatgga

SEQ ID NO: 87587 - DNA, 17 bp, Arabidopsis thaliana
ctgatgggaactattga

SEQ ID NO: 87588 - DNA, 17 bp, Arabidopsis thaliana
ctgatgggaactattgt

SEQ ID NO: 87589 - DNA, 17 bp, Arabidopsis thaliana
ctgatgggctcaccgat

SEQ ID NO: 87590 - DNA, 17 bp, Arabidopsis thaliana
ctgatggtagatttgaa

SEQ ID NO: 87591 - DNA, 17 bp, Arabidopsis thaliana
ctgatggtagatttgta

SEQ ID NO: 87592 - DNA, 17 bp, Arabidopsis thaliana
ctgatggtatgcctcta

SEQ ID NO: 87593 - DNA, 17 bp, Arabidopsis thaliana
ctgatggtgatctctga

SEQ ID NO: 87594 - DNA, 17 bp, Arabidopsis thaliana
ctgatggtgtgattaac

SEQ ID NO: 87595 - DNA, 17 bp, Arabidopsis thaliana
ctgatgtatcaactgct

SEQ ID NO: 87596 - DNA, 17 bp, Arabidopsis thaliana
ctgatgtcgaaacttca

SEQ ID NO: 87597 - DNA, 17 bp, Arabidopsis thaliana
ctgatgtcgtccagcgg

SEQ ID NO: 87598 - DNA, 17 bp, Arabidopsis thaliana
ctgatgtcgtcggcgat

SEQ ID NO: 87599 - DNA, 17 bp, Arabidopsis thaliana
ctgatgtcttacccgta

SEQ ID NO: 87600 - DNA, 17 bp, Arabidopsis thaliana
ctgatgtgaccaatcaa

SEQ ID NO: 87601 - DNA, 17 bp, Arabidopsis thaliana
ctgatgtgggtccgtct

SEQ ID NO: 87602 - DNA, 17 bp, Arabidopsis thaliana
ctgatgtgtcaactgct

SEQ ID NO: 87603 - DNA, 17 bp, Arabidopsis thaliana
ctgatgttgctccagct

SEQ ID NO: 87604 - DNA, 17 bp, Arabidopsis thaliana
ctgattaacgacgtatt

SEQ ID NO: 87605 - DNA, 17 bp, Arabidopsis thaliana
ctgattaacgctcgtag

SEQ ID NO: 87606 - DNA, 17 bp, Arabidopsis thaliana
ctgattaagataccggc

SEQ ID NO: 87607 - DNA, 17 bp, Arabidopsis thaliana
ctgattacgaatgagca

SEQ ID NO: 87608 - DNA, 17 bp, Arabidopsis thaliana
ctgattacgtcgggctg

SEQ ID NO: 87609 - DNA, 17 bp, Arabidopsis thaliana
ctgattactctcacctt

SEQ ID NO: 87610 - DNA, 17 bp, Arabidopsis thaliana
ctgattattgctctgga

SEQ ID NO: 87611 - DNA, 17 bp, Arabidopsis thaliana
ctgattcaaccggttca

SEQ ID NO: 87612 - DNA, 17 bp, Arabidopsis thaliana
ctgattcaatgcagttg

SEQ ID NO: 87613 - DNA, 17 bp, Arabidopsis thaliana
ctgattcacggtctgcg

SEQ ID NO: 87614 - DNA, 17 bp, Arabidopsis thaliana
ctgattcactggtcgct

SEQ ID NO: 87615 - DNA, 17 bp, Arabidopsis thaliana
ctgattcagcagtagtg

SEQ ID NO: 87616 - DNA, 17 bp, Arabidopsis thaliana
ctgattcatcgcggttt

SEQ ID NO: 87617 - DNA, 17 bp, Arabidopsis thaliana
ctgattccagagccgaa

SEQ ID NO: 87618 - DNA, 17 bp, Arabidopsis thaliana
ctgattcccaaactctc

SEQ ID NO: 87619 - DNA, 17 bp, Arabidopsis thaliana
ctgattcccggttgact

SEQ ID NO: 87620 - DNA, 17 bp, Arabidopsis thaliana
ctgattccgcactgggt

SEQ ID NO: 87621 - DNA, 17 bp, Arabidopsis thaliana
ctgattcctcaatgcat

SEQ ID NO: 87622 - DNA, 17 bp, Arabidopsis thaliana
ctgattcgctcttccag

SEQ ID NO: 87623 - DNA, 17 bp, Arabidopsis thaliana
ctgattctgtgttgcta

SEQ ID NO: 87624 - DNA, 17 bp, Arabidopsis thaliana
ctgattctttcacgatt

SEQ ID NO: 87625 - DNA, 17 bp, Arabidopsis thaliana
ctgattctttgactgat

SEQ ID NO: 87626 - DNA, 17 bp, Arabidopsis thaliana
ctgattgaccgtttagt

SEQ ID NO: 87627 - DNA, 17 bp, Arabidopsis thaliana
ctgattgacgccagaca

SEQ ID NO: 87628 - DNA, 17 bp, Arabidopsis thaliana
ctgattgagaagatcgg

SEQ ID NO: 87629 - DNA, 17 bp, Arabidopsis thaliana
ctgattgagccgtgtaa

SEQ ID NO: 87630 - DNA, 17 bp, Arabidopsis thaliana
ctgattgagccgtgtca

SEQ ID NO: 87631 - DNA, 17 bp, Arabidopsis thaliana
ctgattgatttgaccac

SEQ ID NO: 87632 - DNA, 17 bp, Arabidopsis thaliana
ctgattgcgaaataccg

SEQ ID NO: 87633 - DNA, 17 bp, Arabidopsis thaliana
ctgattgcttaggttgc

SEQ ID NO: 87634 - DNA, 17 bp, Arabidopsis thaliana
ctgattggagagaagga

SEQ ID NO: 87635 - DNA, 17 bp, Arabidopsis thaliana
ctgattggcgggatccc

SEQ ID NO: 87636 - DNA, 17 bp, Arabidopsis thaliana
ctgattgtaagacagct

SEQ ID NO: 87637 - DNA, 17 bp, Arabidopsis thaliana
ctgattgtcgctgtatt

SEQ ID NO: 87638 - DNA, 17 bp, Arabidopsis thaliana
ctgattgtcgggatccc

SEQ ID NO: 87639 - DNA, 17 bp, Arabidopsis thaliana
ctgattgtgacacgcgt

SEQ ID NO: 87640 - DNA, 17 bp, Arabidopsis thaliana
ctgattgttccgagtct

SEQ ID NO: 87641 - DNA, 17 bp, Arabidopsis thaliana
ctgatttaatgagccat

SEQ ID NO: 87642 - DNA, 17 bp, Arabidopsis thaliana
ctgatttccttatcttg

SEQ ID NO: 87643 - DNA, 17 bp, Arabidopsis thaliana
ctgatttctacaggttg

SEQ ID NO: 87644 - DNA, 17 bp, Arabidopsis thaliana
ctgatttgggcctgagc

SEQ ID NO: 87645 - DNA, 17 bp, Arabidopsis thaliana
ctgattttagtcaccag

SEQ ID NO: 87646 - DNA, 17 bp, Arabidopsis thaliana
ctgattttccaagcagg

SEQ ID NO: 87647 - DNA, 17 bp, Arabidopsis thaliana
ctgattttgtccctgtt

SEQ ID NO: 87648 - DNA, 17 bp, Arabidopsis thaliana
ctgatttttctacagtc

SEQ ID NO: 87649 - DNA, 17 bp, Arabidopsis thaliana
ctgatttttttagaggc

SEQ ID NO: 87650 - DNA, 17 bp, Arabidopsis thaliana
ctgcaaaacctagggcg

SEQ ID NO: 87651 - DNA, 17 bp, Arabidopsis thaliana
ctgcaaaataactctct

SEQ ID NO: 87652 - DNA, 17 bp, Arabidopsis thaliana
ctgcaaaatctgtatca

SEQ ID NO: 87653 - DNA, 17 bp, Arabidopsis thaliana
ctgcaaaatgacgtttc

SEQ ID NO: 87654 - DNA, 17 bp, Arabidopsis thaliana
ctgcaaacctaattttg

SEQ ID NO: 87655 - DNA, 17 bp, Arabidopsis thaliana
ctgcaaacgccttggat

SEQ ID NO: 87656 - DNA, 17 bp, Arabidopsis thaliana
ctgcaaactactgtgaa

SEQ ID NO: 87657 - DNA, 17 bp, Arabidopsis thaliana
ctgcaaactccattgcc

SEQ ID NO: 87658 - DNA, 17 bp, Arabidopsis thaliana
ctgcaaacttgtgtaga

SEQ ID NO: 87659 - DNA, 17 bp, Arabidopsis thaliana
ctgcaaagatgggtcag

SEQ ID NO: 87660 - DNA, 17 bp, Arabidopsis thaliana
ctgcaaagctcgatgac

SEQ ID NO: 87661 - DNA, 17 bp, Arabidopsis thaliana
ctgcaaaggattctacc

SEQ ID NO: 87662 - DNA, 17 bp, Arabidopsis thaliana
ctgcaaagtctgcgcct

SEQ ID NO: 87663 - DNA, 17 bp, Arabidopsis thaliana
ctgcaaatagcttctct

SEQ ID NO: 87664 - DNA, 17 bp, Arabidopsis thaliana
ctgcaaatatgtgacgt

SEQ ID NO: 87665 - DNA, 17 bp, Arabidopsis thaliana
ctgcaaatctttggctg

SEQ ID NO: 87666 - DNA, 17 bp, Arabidopsis thaliana
ctgcaaatgatggattg

SEQ ID NO: 87667 - DNA, 17 bp, Arabidopsis thaliana
ctgcaaatgtcacgaag

SEQ ID NO: 87668 - DNA, 17 bp, Arabidopsis thaliana
ctgcaaatgtcatgggt

SEQ ID NO: 87669 - DNA, 17 bp, Arabidopsis thaliana
ctgcaaattcagtgtgg

SEQ ID NO: 87670 - DNA, 17 bp, Arabidopsis thaliana
ctgcaaattctgtgctg

SEQ ID NO: 87671 - DNA, 17 bp, Arabidopsis thaliana
ctgcaaatttcctcaag

SEQ ID NO: 87672 - DNA, 17 bp, Arabidopsis thaliana
ctgcaaatttcctcccc

SEQ ID NO: 87673 - DNA, 17 bp, Arabidopsis thaliana
ctgcaacaacatatcgc

SEQ ID NO: 87674 - DNA, 17 bp, Arabidopsis thaliana
ctgcaacaagtcttgat

SEQ ID NO: 87675 - DNA, 17 bp, Arabidopsis thaliana
ctgcaacacgcgcctaa

SEQ ID NO: 87676 - DNA, 17 bp, Arabidopsis thaliana
ctgcaacatctttggtc

SEQ ID NO: 87677 - DNA, 17 bp, Arabidopsis thaliana
ctgcaaccattgaaaac

SEQ ID NO: 87678 - DNA, 17 bp, Arabidopsis thaliana
ctgcaaccgtgtttgag

SEQ ID NO: 87679 - DNA, 17 bp, Arabidopsis thaliana
ctgcaacgataaacgac

SEQ ID NO: 87680 - DNA, 17 bp, Arabidopsis thaliana
ctgcaacggaactgtaa

SEQ ID NO: 87681 - DNA, 17 bp, Arabidopsis thaliana
ctgcaacggatatctcg

SEQ ID NO: 87682 - DNA, 17 bp, Arabidopsis thaliana
ctgcaacggttttttgt

SEQ ID NO: 87683 - DNA, 17 bp, Arabidopsis thaliana
ctgcaactggctcggac

SEQ ID NO: 87684 - DNA, 17 bp, Arabidopsis thaliana
ctgcaacttgtccgctt

SEQ ID NO: 87685 - DNA, 17 bp, Arabidopsis thaliana
ctgcaagacccacccac

SEQ ID NO: 87686 - DNA, 17 bp, Arabidopsis thaliana
ctgcaagacccacccgt

SEQ ID NO: 87687 - DNA, 17 bp, Arabidopsis thaliana
ctgcaagatgtatgtga

SEQ ID NO: 87688 - DNA, 17 bp, Arabidopsis thaliana
ctgcaaggatggttgga

SEQ ID NO: 87689 - DNA, 17 bp, Arabidopsis thaliana
ctgcaaggatttgttat

SEQ ID NO: 87690 - DNA, 17 bp, Arabidopsis thaliana
ctgcaagggctggctca

SEQ ID NO: 87691 - DNA, 17 bp, Arabidopsis thaliana
ctgcaatagtgcggacg

SEQ ID NO: 87692 - DNA, 17 bp, Arabidopsis thaliana
ctgcaatagtgcggatg

SEQ ID NO: 87693 - DNA, 17 bp, Arabidopsis thaliana
ctgcaatccagcttatg

SEQ ID NO: 87694 - DNA, 17 bp, Arabidopsis thaliana
ctgcaatctgcatgttc

SEQ ID NO: 87695 - DNA, 17 bp, Arabidopsis thaliana
ctgcaatgattttatga

SEQ ID NO: 87696 - DNA, 17 bp, Arabidopsis thaliana
ctgcaatgccattcggg

SEQ ID NO: 87697 - DNA, 17 bp, Arabidopsis thaliana
ctgcaatttctgtggtc

SEQ ID NO: 87698 - DNA, 17 bp, Arabidopsis thaliana
ctgcaattttttcaacg

SEQ ID NO: 87699 - DNA, 17 bp, Arabidopsis thaliana
ctgcacacttgtctcta

SEQ ID NO: 87700 - DNA, 17 bp, Arabidopsis thaliana
ctgcacaggcttggctc

SEQ ID NO: 87701 - DNA, 17 bp, Arabidopsis thaliana
ctgcacatctgtagaac

SEQ ID NO: 87702 - DNA, 17 bp, Arabidopsis thaliana
ctgcaccaaagggaagt

SEQ ID NO: 87703 - DNA, 17 bp, Arabidopsis thaliana
ctgcaccatcgaagtta

SEQ ID NO: 87704 - DNA, 17 bp, Arabidopsis thaliana
ctgcaccgagtaaaatt

SEQ ID NO: 87705 - DNA, 17 bp, Arabidopsis thaliana
ctgcaccgctggctgta

SEQ ID NO: 87706 - DNA, 17 bp, Arabidopsis thaliana
ctgcacctgctgctgct

SEQ ID NO: 87707 - DNA, 17 bp, Arabidopsis thaliana
ctgcacgactcgtatag

SEQ ID NO: 87708 - DNA, 17 bp, Arabidopsis thaliana
ctgcacgggcctggctc

SEQ ID NO: 87709 - DNA, 17 bp, Arabidopsis thaliana
ctgcactatagaaggct

SEQ ID NO: 87710 - DNA, 17 bp, Arabidopsis thaliana
ctgcactccctgctgca

SEQ ID NO: 87711 - DNA, 17 bp, Arabidopsis thaliana
ctgcactgtagacggtt

SEQ ID NO: 87712 - DNA, 17 bp, Arabidopsis thaliana
ctgcacttgtaccgcta

SEQ ID NO: 87713 - DNA, 17 bp, Arabidopsis thaliana
ctgcactttgtccgtat

SEQ ID NO: 87714 - DNA, 17 bp, Arabidopsis thaliana
ctgcagaagccttgttg

SEQ ID NO: 87715 - DNA, 17 bp, Arabidopsis thaliana
ctgcagacattgaaaac

SEQ ID NO: 87716 - DNA, 17 bp, Arabidopsis thaliana
ctgcagacctggtgaag

SEQ ID NO: 87717 - DNA, 17 bp, Arabidopsis thaliana
ctgcagacggtctttaa

SEQ ID NO: 87718 - DNA, 17 bp, Arabidopsis thaliana
ctgcagactgttcagat

SEQ ID NO: 87719 - DNA, 17 bp, Arabidopsis thaliana
ctgcagagaaaatcaag

SEQ ID NO: 87720 - DNA, 17 bp, Arabidopsis thaliana
ctgcagagcggccaccg

SEQ ID NO: 87721 - DNA, 17 bp, Arabidopsis thaliana
ctgcagagctattctca

SEQ ID NO: 87722 - DNA, 17 bp, Arabidopsis thaliana
ctgcagataaacggcag

SEQ ID NO: 87723 - DNA, 17 bp, Arabidopsis thaliana
ctgcagatcaataggtc

SEQ ID NO: 87724 - DNA, 17 bp, Arabidopsis thaliana
ctgcagatgaagttgat

SEQ ID NO: 87725 - DNA, 17 bp, Arabidopsis thaliana
ctgcagatgacacgtgc

SEQ ID NO: 87726 - DNA, 17 bp, Arabidopsis thaliana
ctgcagatgggtgttcc

SEQ ID NO: 87727 - DNA, 17 bp, Arabidopsis thaliana
ctgcagatgggtgttgc

SEQ ID NO: 87728 - DNA, 17 bp, Arabidopsis thaliana
ctgcagatggtccgttg

SEQ ID NO: 87729 - DNA, 17 bp, Arabidopsis thaliana
ctgcagatgttagttcg

SEQ ID NO: 87730 - DNA, 17 bp, Arabidopsis thaliana
ctgcagatttggcctaa

SEQ ID NO: 87731 - DNA, 17 bp, Arabidopsis thaliana
ctgcagcacgccccccc

SEQ ID NO: 87732 - DNA, 17 bp, Arabidopsis thaliana
ctgcagcacgcgcctaa

SEQ ID NO: 87733 - DNA, 17 bp, Arabidopsis thaliana
ctgcagcagatgacagt

SEQ ID NO: 87734 - DNA, 17 bp, Arabidopsis thaliana
ctgcagcagttggatgt

SEQ ID NO: 87735 - DNA, 17 bp, Arabidopsis thaliana
ctgcagccaaggatgac

SEQ ID NO: 87736 - DNA, 17 bp, Arabidopsis thaliana
ctgcagccacaagtact

SEQ ID NO: 87737 - DNA, 17 bp, Arabidopsis thaliana
ctgcagccacaagtagt

SEQ ID NO: 87738 - DNA, 17 bp, Arabidopsis thaliana
ctgcagcggaaggatga

SEQ ID NO: 87739 - DNA, 17 bp, Arabidopsis thaliana
ctgcagcggtcgagtaa

SEQ ID NO: 87740 - DNA, 17 bp, Arabidopsis thaliana
ctgcagcggtcgagtag

SEQ ID NO: 87741 - DNA, 17 bp, Arabidopsis thaliana
ctgcagctaagcgtgct

SEQ ID NO: 87742 - DNA, 17 bp, Arabidopsis thaliana
ctgcagctcagcgtgct

SEQ ID NO: 87743 - DNA, 17 bp, Arabidopsis thaliana
ctgcagctcggcttatc

SEQ ID NO: 87744 - DNA, 17 bp, Arabidopsis thaliana
ctgcagcttctggatgt

SEQ ID NO: 87745 - DNA, 17 bp, Arabidopsis thaliana
ctgcaggaaacactaca

SEQ ID NO: 87746 - DNA, 17 bp, Arabidopsis thaliana
ctgcaggaaacactaga

SEQ ID NO: 87747 - DNA, 17 bp, Arabidopsis thaliana
ctgcaggaatgtcggtt

SEQ ID NO: 87748 - DNA, 17 bp, Arabidopsis thaliana
ctgcaggaatttggtgt

SEQ ID NO: 87749 - DNA, 17 bp, Arabidopsis thaliana
ctgcaggaggtttgtta

SEQ ID NO: 87750 - DNA, 17 bp, Arabidopsis thaliana
ctgcaggattaaccagt

SEQ ID NO: 87751 - DNA, 17 bp, Arabidopsis thaliana
ctgcagtaggccaggtt

SEQ ID NO: 87752 - DNA, 17 bp, Arabidopsis thaliana
ctgcagtagtgcggatg

SEQ ID NO: 87753 - DNA, 17 bp, Arabidopsis thaliana
ctgcagtataccgcaag

SEQ ID NO: 87754 - DNA, 17 bp, Arabidopsis thaliana
ctgcagtataccgcatg

SEQ ID NO: 87755 - DNA, 17 bp, Arabidopsis thaliana
ctgcagtataccgcggg

SEQ ID NO: 87756 - DNA, 17 bp, Arabidopsis thaliana
ctgcagtggacacggat

SEQ ID NO: 87757 - DNA, 17 bp, Arabidopsis thaliana
ctgcagtggatggcaat

SEQ ID NO: 87758 - DNA, 17 bp, Arabidopsis thaliana
ctgcagtggtagcactc

SEQ ID NO: 87759 - DNA, 17 bp, Arabidopsis thaliana
ctgcagtgtagcgcagg

SEQ ID NO: 87760 - DNA, 17 bp, Arabidopsis thaliana
ctgcagttcgtgtctct

SEQ ID NO: 87761 - DNA, 17 bp, Arabidopsis thaliana
ctgcagttcgttgattc

SEQ ID NO: 87762 - DNA, 17 bp, Arabidopsis thaliana
ctgcagttgaaccgcac

SEQ ID NO: 87763 - DNA, 17 bp, Arabidopsis thaliana
ctgcagttggaagagat

SEQ ID NO: 87764 - DNA, 17 bp, Arabidopsis thaliana
ctgcagttggccaggtt

SEQ ID NO: 87765 - DNA, 17 bp, Arabidopsis thaliana
ctgcagttgtagatgag

SEQ ID NO: 87766 - DNA, 17 bp, Arabidopsis thaliana
ctgcagttgttgatgag

SEQ ID NO: 87767 - DNA, 17 bp, Arabidopsis thaliana
ctgcagtttcagttctg

SEQ ID NO: 87768 - DNA, 17 bp, Arabidopsis thaliana
ctgcataacagctacga

SEQ ID NO: 87769 - DNA, 17 bp, Arabidopsis thaliana
ctgcataagaaaggggt

SEQ ID NO: 87770 - DNA, 17 bp, Arabidopsis thaliana
ctgcataatgcctcaac

SEQ ID NO: 87771 - DNA, 17 bp, Arabidopsis thaliana
ctgcataatgcttccat

SEQ ID NO: 87772 - DNA, 17 bp, Arabidopsis thaliana
ctgcatagaccatgatg

SEQ ID NO: 87773 - DNA, 17 bp, Arabidopsis thaliana
ctgcatatgctaacgaa

SEQ ID NO: 87774 - DNA, 17 bp, Arabidopsis thaliana
ctgcatatgctagacct

SEQ ID NO: 87775 - DNA, 17 bp, Arabidopsis thaliana
ctgcatatgcttcgtcc

SEQ ID NO: 87776 - DNA, 17 bp, Arabidopsis thaliana
ctgcatgaagattatcc

SEQ ID NO: 87777 - DNA, 17 bp, Arabidopsis thaliana
ctgcatgaagtttatcc

SEQ ID NO: 87778 - DNA, 17 bp, Arabidopsis thaliana
ctgcatgcaggtgtgcc

SEQ ID NO: 87779 - DNA, 17 bp, Arabidopsis thaliana
ctgcatgtaggacatgg

SEQ ID NO: 87780 - DNA, 17 bp, Arabidopsis thaliana
ctgcatgttcacttagg

SEQ ID NO: 87781 - DNA, 17 bp, Arabidopsis thaliana
ctgcatgttccacggct

SEQ ID NO: 87782 - DNA, 17 bp, Arabidopsis thaliana
ctgcatgttcgcttagg

SEQ ID NO: 87783 - DNA, 17 bp, Arabidopsis thaliana
ctgcattccctgtgttg

SEQ ID NO: 87784 - DNA, 17 bp, Arabidopsis thaliana
ctgcattctacaccgcc

SEQ ID NO: 87785 - DNA, 17 bp, Arabidopsis thaliana
ctgcattctttctttct

SEQ ID NO: 87786 - DNA, 17 bp, Arabidopsis thaliana
ctgcattgatttggcgg

SEQ ID NO: 87787 - DNA, 17 bp, Arabidopsis thaliana
ctgcattgggaactggg

SEQ ID NO: 87788 - DNA, 17 bp, Arabidopsis thaliana
ctgcatttcaatttggg

SEQ ID NO: 87789 - DNA, 17 bp, Arabidopsis thaliana
ctgcatttcgtggatat

SEQ ID NO: 87790 - DNA, 17 bp, Arabidopsis thaliana
ctgcatttctgactacc

SEQ ID NO: 87791 - DNA, 17 bp, Arabidopsis thaliana
ctgcatttgttggatgt

SEQ ID NO: 87792 - DNA, 17 bp, Arabidopsis thaliana
ctgcatttttaggtgtt

SEQ ID NO: 87793 - DNA, 17 bp, Arabidopsis thaliana
ctgccaaacccgccccg

SEQ ID NO: 87794 - DNA, 17 bp, Arabidopsis thaliana
ctgccaaacccgtccaa

SEQ ID NO: 87795 - DNA, 17 bp, Arabidopsis thaliana
ctgccaaacccgtcccg

SEQ ID NO: 87796 - DNA, 17 bp, Arabidopsis thaliana
ctgccaaactcgccccg

SEQ ID NO: 87797 - DNA, 17 bp, Arabidopsis thaliana
ctgccaaagcagcggtc

SEQ ID NO: 87798 - DNA, 17 bp, Arabidopsis thaliana
ctgccaaatccgtcctg

SEQ ID NO: 87799 - DNA, 17 bp, Arabidopsis thaliana
ctgccaaattaggatta

SEQ ID NO: 87800 - DNA, 17 bp, Arabidopsis thaliana
ctgccaacgagccgccc

SEQ ID NO: 87801 - DNA, 17 bp, Arabidopsis thaliana
ctgccaaggatgacttg

SEQ ID NO: 87802 - DNA, 17 bp, Arabidopsis thaliana
ctgccaaggatgttttc

SEQ ID NO: 87803 - DNA, 17 bp, Arabidopsis thaliana
ctgccaaggctgttttc

SEQ ID NO: 87804 - DNA, 17 bp, Arabidopsis thaliana
ctgccacaaaggctgat

SEQ ID NO: 87805 - DNA, 17 bp, Arabidopsis thaliana
ctgccacaatccactga

SEQ ID NO: 87806 - DNA, 17 bp, Arabidopsis thaliana
ctgccacattttggtcc

SEQ ID NO: 87807 - DNA, 17 bp, Arabidopsis thaliana
ctgccaccgcaacctcc

SEQ ID NO: 87808 - DNA, 17 bp, Arabidopsis thaliana
ctgccacgatccactga

SEQ ID NO: 87809 - DNA, 17 bp, Arabidopsis thaliana
ctgccacggtacagacc

SEQ ID NO: 87810 - DNA, 17 bp, Arabidopsis thaliana
ctgccacttgacagtcc

SEQ ID NO: 87811 - DNA, 17 bp, Arabidopsis thaliana
ctgccactttacctata

SEQ ID NO: 87812 - DNA, 17 bp, Arabidopsis thaliana
ctgccagcaaattagcc

SEQ ID NO: 87813 - DNA, 17 bp, Arabidopsis thaliana
ctgccagggctaaccag

SEQ ID NO: 87814 - DNA, 17 bp, Arabidopsis thaliana
ctgccagtctgccacct

SEQ ID NO: 87815 - DNA, 17 bp, Arabidopsis thaliana
ctgccatatccgggcct

SEQ ID NO: 87816 - DNA, 17 bp, Arabidopsis thaliana
ctgccatcaacaaagtc

SEQ ID NO: 87817 - DNA, 17 bp, Arabidopsis thaliana
ctgccatctgacgtcga

SEQ ID NO: 87818 - DNA, 17 bp, Arabidopsis thaliana
ctgccatcttgagattg

SEQ ID NO: 87819 - DNA, 17 bp, Arabidopsis thaliana
ctgccatctttgtgacg

SEQ ID NO: 87820 - DNA, 17 bp, Arabidopsis thaliana
ctgccatgaacaccatt

SEQ ID NO: 87821 - DNA, 17 bp, Arabidopsis thaliana
ctgccatgaagactgct

SEQ ID NO: 87822 - DNA, 17 bp, Arabidopsis thaliana
ctgccattcacaaggaa

SEQ ID NO: 87823 - DNA, 17 bp, Arabidopsis thaliana
ctgccattctaagtgat

SEQ ID NO: 87824 - DNA, 17 bp, Arabidopsis thaliana
ctgccattcttgtcgat

SEQ ID NO: 87825 - DNA, 17 bp, Arabidopsis thaliana
ctgccatttacgttgag

SEQ ID NO: 87826 - DNA, 17 bp, Arabidopsis thaliana
ctgcccacaatggtagc

SEQ ID NO: 87827 - DNA, 17 bp, Arabidopsis thaliana
ctgcccaccctggaaac

SEQ ID NO: 87828 - DNA, 17 bp, Arabidopsis thaliana
ctgcccagtgctctgaa

SEQ ID NO: 87829 - DNA, 17 bp, Arabidopsis thaliana
ctgcccagtgctcttga

SEQ ID NO: 87830 - DNA, 17 bp, Arabidopsis thaliana
ctgcccatggacgggat

SEQ ID NO: 87831 - DNA, 17 bp, Arabidopsis thaliana
ctgcccatgtcgtaagt

SEQ ID NO: 87832 - DNA, 17 bp, Arabidopsis thaliana
ctgccccctcgaccccg

SEQ ID NO: 87833 - DNA, 17 bp, Arabidopsis thaliana
ctgcccgtgcgcaggct

SEQ ID NO: 87834 - DNA, 17 bp, Arabidopsis thaliana
ctgcccgttgctctgat

SEQ ID NO: 87835 - DNA, 17 bp, Arabidopsis thaliana
ctgccctaagcgctgca

SEQ ID NO: 87836 - DNA, 17 bp, Arabidopsis thaliana
ctgccctaatttcgagt

SEQ ID NO: 87837 - DNA, 17 bp, Arabidopsis thaliana
ctgccctctgctgtaga

SEQ ID NO: 87838 - DNA, 17 bp, Arabidopsis thaliana
ctgccctcttgaccacc

SEQ ID NO: 87839 - DNA, 17 bp, Arabidopsis thaliana
ctgccctttgtacacac

SEQ ID NO: 87840 - DNA, 17 bp, Arabidopsis thaliana
ctgccctttgtacaccc

SEQ ID NO: 87841 - DNA, 17 bp, Arabidopsis thaliana
ctgccctttgtcgctaa

SEQ ID NO: 87842 - DNA, 17 bp, Arabidopsis thaliana
ctgccgaagctgtggga

SEQ ID NO: 87843 - DNA, 17 bp, Arabidopsis thaliana
ctgccgacgttgctccg

SEQ ID NO: 87844 - DNA, 17 bp, Arabidopsis thaliana
ctgccgacttagtttcc

SEQ ID NO: 87845 - DNA, 17 bp, Arabidopsis thaliana
ctgccgacttgagtttc

SEQ ID NO: 87846 - DNA, 17 bp, Arabidopsis thaliana
ctgccgagccatgaact

SEQ ID NO: 87847 - DNA, 17 bp, Arabidopsis thaliana
ctgccgcaaccaccacc

SEQ ID NO: 87848 - DNA, 17 bp, Arabidopsis thaliana
ctgccgcaaccaccacg

SEQ ID NO: 87849 - DNA, 17 bp, Arabidopsis thaliana
ctgccgcaccaccagcc

SEQ ID NO: 87850 - DNA, 17 bp, Arabidopsis thaliana
ctgccgcaccacgaagc

SEQ ID NO: 87851 - DNA, 17 bp, Arabidopsis thaliana
ctgccgcaccacgagcc

SEQ ID NO: 87852 - DNA, 17 bp, Arabidopsis thaliana
ctgccgcaccacgaggc

SEQ ID NO: 87853 - DNA, 17 bp, Arabidopsis thaliana
ctgccgcagcgactgta

SEQ ID NO: 87854 - DNA, 17 bp, Arabidopsis thaliana
ctgccgcaggttgttgt

SEQ ID NO: 87855 - DNA, 17 bp, Arabidopsis thaliana
ctgccgcagtgactgta

SEQ ID NO: 87856 - DNA, 17 bp, Arabidopsis thaliana
ctgccgcttctttggcc

SEQ ID NO: 87857 - DNA, 17 bp, Arabidopsis thaliana
ctgccggccggcgtgtg

SEQ ID NO: 87858 - DNA, 17 bp, Arabidopsis thaliana
ctgccgtcataatgcag

SEQ ID NO: 87859 - DNA, 17 bp, Arabidopsis thaliana
ctgccgtcatcgttttg

SEQ ID NO: 87860 - DNA, 17 bp, Arabidopsis thaliana
ctgccgtcgtgatcgtg

SEQ ID NO: 87861 - DNA, 17 bp, Arabidopsis thaliana
ctgccgtctcgagtgag

SEQ ID NO: 87862 - DNA, 17 bp, Arabidopsis thaliana
ctgccgtgaggccaaac

SEQ ID NO: 87863 - DNA, 17 bp, Arabidopsis thaliana
ctgccgtgatcgtggtc

SEQ ID NO: 87864 - DNA, 17 bp, Arabidopsis thaliana
ctgccgtgatcgtgttc

SEQ ID NO: 87865 - DNA, 17 bp, Arabidopsis thaliana
ctgccgtgatcgttgtc

SEQ ID NO: 87866 - DNA, 17 bp, Arabidopsis thaliana
ctgccgttagattatgt

SEQ ID NO: 87867 - DNA, 17 bp, Arabidopsis thaliana
ctgccgttagattattt

SEQ ID NO: 87868 - DNA, 17 bp, Arabidopsis thaliana
ctgcctaatgggaaccg

SEQ ID NO: 87869 - DNA, 17 bp, Arabidopsis thaliana
ctgcctacgagtcggct

SEQ ID NO: 87870 - DNA, 17 bp, Arabidopsis thaliana
ctgcctacgagtcgggt

SEQ ID NO: 87871 - DNA, 17 bp, Arabidopsis thaliana
ctgcctactcgtgcgag

SEQ ID NO: 87872 - DNA, 17 bp, Arabidopsis thaliana
ctgcctaggtccagaat

SEQ ID NO: 87873 - DNA, 17 bp, Arabidopsis thaliana
ctgcctagttcaccaat

SEQ ID NO: 87874 - DNA, 17 bp, Arabidopsis thaliana
ctgcctatccggcggac

SEQ ID NO: 87875 - DNA, 17 bp, Arabidopsis thaliana
ctgcctatgcggcggac

SEQ ID NO: 87876 - DNA, 17 bp, Arabidopsis thaliana
ctgcctatgcgggggac

SEQ ID NO: 87877 - DNA, 17 bp, Arabidopsis thaliana
ctgcctcaacttcaact

SEQ ID NO: 87878 - DNA, 17 bp, Arabidopsis thaliana
ctgcctcaatcgtctaa

SEQ ID NO: 87879 - DNA, 17 bp, Arabidopsis thaliana
ctgcctccttctcaagg

SEQ ID NO: 87880 - DNA, 17 bp, Arabidopsis thaliana
ctgcctcgaaggctgct

SEQ ID NO: 87881 - DNA, 17 bp, Arabidopsis thaliana
ctgcctctgaaggtcct

SEQ ID NO: 87882 - DNA, 17 bp, Arabidopsis thaliana
ctgcctctgaccgcgtg

SEQ ID NO: 87883 - DNA, 17 bp, Arabidopsis thaliana
ctgcctgacaaattaga

SEQ ID NO: 87884 - DNA, 17 bp, Arabidopsis thaliana
ctgcctgacaagtttct

SEQ ID NO: 87885 - DNA, 17 bp, Arabidopsis thaliana
ctgcctgaccttagctc

SEQ ID NO: 87886 - DNA, 17 bp, Arabidopsis thaliana
ctgcctgactgtgagac

SEQ ID NO: 87887 - DNA, 17 bp, Arabidopsis thaliana
ctgcctgaggattacgg

SEQ ID NO: 87888 - DNA, 17 bp, Arabidopsis thaliana
ctgcctgaggccaagct

SEQ ID NO: 87889 - DNA, 17 bp, Arabidopsis thaliana
ctgcctgagggctgggc

SEQ ID NO: 87890 - DNA, 17 bp, Arabidopsis thaliana
ctgcctgcaaattcagt

SEQ ID NO: 87891 - DNA, 17 bp, Arabidopsis thaliana
ctgcctgcaaatttcct

SEQ ID NO: 87892 - DNA, 17 bp, Arabidopsis thaliana
ctgcctgcacgactcgt

SEQ ID NO: 87893 - DNA, 17 bp, Arabidopsis thaliana
ctgcctgcactgctgag

SEQ ID NO: 87894 - DNA, 17 bp, Arabidopsis thaliana
ctgcctgcagtgtagcg

SEQ ID NO: 87895 - DNA, 17 bp, Arabidopsis thaliana
ctgcctgccaaactcgc

SEQ ID NO: 87896 - DNA, 17 bp, Arabidopsis thaliana
ctgcctgccgatgaccg

SEQ ID NO: 87897 - DNA, 17 bp, Arabidopsis thaliana
ctgcctgccgcagtgac

SEQ ID NO: 87898 - DNA, 17 bp, Arabidopsis thaliana
ctgcctgccttttgtac

SEQ ID NO: 87899 - DNA, 17 bp, Arabidopsis thaliana
ctgcctgcgaaagcatt

SEQ ID NO: 87900 - DNA, 17 bp, Arabidopsis thaliana
ctgcctgcgcattgtgt

SEQ ID NO: 87901 - DNA, 17 bp, Arabidopsis thaliana
ctgcctgcgggttcgag

SEQ ID NO: 87902 - DNA, 17 bp, Arabidopsis thaliana
ctgcctgctcgtcatca

SEQ ID NO: 87903 - DNA, 17 bp, Arabidopsis thaliana
ctgcctgctgcgttgcc

SEQ ID NO: 87904 - DNA, 17 bp, Arabidopsis thaliana
ctgcctgctgtcatttt

SEQ ID NO: 87905 - DNA, 17 bp, Arabidopsis thaliana
ctgcctggaaggtgcgg

SEQ ID NO: 87906 - DNA, 17 bp, Arabidopsis thaliana
ctgcctggaccgtttaa

SEQ ID NO: 87907 - DNA, 17 bp, Arabidopsis thaliana
ctgcctggactgccatc

SEQ ID NO: 87908 - DNA, 17 bp, Arabidopsis thaliana
ctgcctggatcgagtga

SEQ ID NO: 87909 - DNA, 17 bp, Arabidopsis thaliana
ctgcctggcagatttcg

SEQ ID NO: 87910 - DNA, 17 bp, Arabidopsis thaliana
ctgcctggccgagggca

SEQ ID NO: 87911 - DNA, 17 bp, Arabidopsis thaliana
ctgcctggcgactatcg

SEQ ID NO: 87912 - DNA, 17 bp, Arabidopsis thaliana
ctgcctggctccctgta

SEQ ID NO: 87913 - DNA, 17 bp, Arabidopsis thaliana
ctgcctgggaattggtt

SEQ ID NO: 87914 - DNA, 17 bp, Arabidopsis thaliana
ctgcctgggagaagact

SEQ ID NO: 87915 - DNA, 17 bp, Arabidopsis thaliana
ctgcctgggagatttac

SEQ ID NO: 87916 - DNA, 17 bp, Arabidopsis thaliana
ctgcctgggctcgtatc

SEQ ID NO: 87917 - DNA, 17 bp, Arabidopsis thaliana
ctgcctgggctctgacc

SEQ ID NO: 87918 - DNA, 17 bp, Arabidopsis thaliana
ctgcctgggtgtcacaa

SEQ ID NO: 87919 - DNA, 17 bp, Arabidopsis thaliana
ctgcctgggttcgtctc

SEQ ID NO: 87920 - DNA, 17 bp, Arabidopsis thaliana
ctgcctgggttctcccg

SEQ ID NO: 87921 - DNA, 17 bp, Arabidopsis thaliana
ctgcctggtcaggagac

SEQ ID NO: 87922 - DNA, 17 bp, Arabidopsis thaliana
ctgcctggtcatgtggt

SEQ ID NO: 87923 - DNA, 17 bp, Arabidopsis thaliana
ctgcctggtcgacgatt

SEQ ID NO: 87924 - DNA, 17 bp, Arabidopsis thaliana
ctgcctggtcttgggcc

SEQ ID NO: 87925 - DNA, 17 bp, Arabidopsis thaliana
ctgcctggtgccagcag

SEQ ID NO: 87926 - DNA, 17 bp, Arabidopsis thaliana
ctgcctggttcaaatcc

SEQ ID NO: 87927 - DNA, 17 bp, Arabidopsis thaliana
ctgcctgtccagtttgc

SEQ ID NO: 87928 - DNA, 17 bp, Arabidopsis thaliana
ctgcctgtcctgagcgg

SEQ ID NO: 87929 - DNA, 17 bp, Arabidopsis thaliana
ctgcctgttgcggtgcg

SEQ ID NO: 87930 - DNA, 17 bp, Arabidopsis thaliana
ctgccttcaaaatgttt

SEQ ID NO: 87931 - DNA, 17 bp, Arabidopsis thaliana
ctgccttcacacctata

SEQ ID NO: 87932 - DNA, 17 bp, Arabidopsis thaliana
ctgccttctccggtggc

SEQ ID NO: 87933 - DNA, 17 bp, Arabidopsis thaliana
ctgccttgatcgtggtc

SEQ ID NO: 87934 - DNA, 17 bp, Arabidopsis thaliana
ctgccttggatagattg

SEQ ID NO: 87935 - DNA, 17 bp, Arabidopsis thaliana
ctgcctttctgactacc

SEQ ID NO: 87936 - DNA, 17 bp, Arabidopsis thaliana
ctgccttttgtacacac

SEQ ID NO: 87937 - DNA, 17 bp, Arabidopsis thaliana
ctgcgaaagcactctgc

SEQ ID NO: 87938 - DNA, 17 bp, Arabidopsis thaliana
ctgcgaaagcatttgcc

SEQ ID NO: 87939 - DNA, 17 bp, Arabidopsis thaliana
ctgcgaacctcaatgcg

SEQ ID NO: 87940 - DNA, 17 bp, Arabidopsis thaliana
ctgcgaagataccaggc

SEQ ID NO: 87941 - DNA, 17 bp, Arabidopsis thaliana
ctgcgaagtgaagcatt

SEQ ID NO: 87942 - DNA, 17 bp, Arabidopsis thaliana
ctgcgaatccctcctgc

SEQ ID NO: 87943 - DNA, 17 bp, Arabidopsis thaliana
ctgcgaatctgcctggg

SEQ ID NO: 87944 - DNA, 17 bp, Arabidopsis thaliana
ctgcgaatgaccggcat

SEQ ID NO: 87945 - DNA, 17 bp, Arabidopsis thaliana
ctgcgaatggcccatta

SEQ ID NO: 87946 - DNA, 17 bp, Arabidopsis thaliana
ctgcgaatggctcatta

SEQ ID NO: 87947 - DNA, 17 bp, Arabidopsis thaliana
ctgcgaatgtcggtcaa

SEQ ID NO: 87948 - DNA, 17 bp, Arabidopsis thaliana
ctgcgaatttgttgtcc

SEQ ID NO: 87949 - DNA, 17 bp, Arabidopsis thaliana
ctgcgacaaacaccggc

SEQ ID NO: 87950 - DNA, 17 bp, Arabidopsis thaliana
ctgcgacaaaggcaacg

SEQ ID NO: 87951 - DNA, 17 bp, Arabidopsis thaliana
ctgcgacaagcaccggc

SEQ ID NO: 87952 - DNA, 17 bp, Arabidopsis thaliana
ctgcgacagctgttttc

SEQ ID NO: 87953 - DNA, 17 bp, Arabidopsis thaliana
ctgcgacagtttagtct

SEQ ID NO: 87954 - DNA, 17 bp, Arabidopsis thaliana
ctgcgacctgggttcgg

SEQ ID NO: 87955 - DNA, 17 bp, Arabidopsis thaliana
ctgcgaccttggtattc

SEQ ID NO: 87956 - DNA, 17 bp, Arabidopsis thaliana
ctgcgacgcgacagttt

SEQ ID NO: 87957 - DNA, 17 bp, Arabidopsis thaliana
ctgcgacgcggattacg

SEQ ID NO: 87958 - DNA, 17 bp, Arabidopsis thaliana
ctgcgacgctctcagct

SEQ ID NO: 87959 - DNA, 17 bp, Arabidopsis thaliana
ctgcgactctggctgtg

SEQ ID NO: 87960 - DNA, 17 bp, Arabidopsis thaliana
ctgcgactgctgttttc

SEQ ID NO: 87961 - DNA, 17 bp, Arabidopsis thaliana
ctgcgactgggattgtg

SEQ ID NO: 87962 - DNA, 17 bp, Arabidopsis thaliana
ctgcgactggtaactct

SEQ ID NO: 87963 - DNA, 17 bp, Arabidopsis thaliana
ctgcgactggtaactgt

SEQ ID NO: 87964 - DNA, 17 bp, Arabidopsis thaliana
ctgcgactttgtagttt

SEQ ID NO: 87965 - DNA, 17 bp, Arabidopsis thaliana
ctgcgagaggctctcca

SEQ ID NO: 87966 - DNA, 17 bp, Arabidopsis thaliana
ctgcgagaggtcccgag

SEQ ID NO: 87967 - DNA, 17 bp, Arabidopsis thaliana
ctgcgagatttaccact

SEQ ID NO: 87968 - DNA, 17 bp, Arabidopsis thaliana
ctgcgaggagtccgaca

SEQ ID NO: 87969 - DNA, 17 bp, Arabidopsis thaliana
ctgcgagggcacgtctg

SEQ ID NO: 87970 - DNA, 17 bp, Arabidopsis thaliana
ctgcgagtagactttca

SEQ ID NO: 87971 - DNA, 17 bp, Arabidopsis thaliana
ctgcgagtgataccgct

SEQ ID NO: 87972 - DNA, 17 bp, Arabidopsis thaliana
ctgcgatacggtggatc

SEQ ID NO: 87973 - DNA, 17 bp, Arabidopsis thaliana
ctgcgatatactgcggg

SEQ ID NO: 87974 - DNA, 17 bp, Arabidopsis thaliana
ctgcgatcggtcgctcg

SEQ ID NO: 87975 - DNA, 17 bp, Arabidopsis thaliana
ctgcgatctgctcatgt

SEQ ID NO: 87976 - DNA, 17 bp, Arabidopsis thaliana
ctgcgatggattattct

SEQ ID NO: 87977 - DNA, 17 bp, Arabidopsis thaliana
ctgcgattaagtcctat

SEQ ID NO: 87978 - DNA, 17 bp, Arabidopsis thaliana
ctgcgattgaataagtt

SEQ ID NO: 87979 - DNA, 17 bp, Arabidopsis thaliana
ctgcgattttgaagtca

SEQ ID NO: 87980 - DNA, 17 bp, Arabidopsis thaliana
ctgcgattttgaggccc

SEQ ID NO: 87981 - DNA, 17 bp, Arabidopsis thaliana
ctgcgattttgaggtca

SEQ ID NO: 87982 - DNA, 17 bp, Arabidopsis thaliana
ctgcgcacaggcctgag

SEQ ID NO: 87983 - DNA, 17 bp, Arabidopsis thaliana
ctgcgcactcaaaaggc

SEQ ID NO: 87984 - DNA, 17 bp, Arabidopsis thaliana
ctgcgcagcttaggtgg

SEQ ID NO: 87985 - DNA, 17 bp, Arabidopsis thaliana
ctgcgcatgagacccgt

SEQ ID NO: 87986 - DNA, 17 bp, Arabidopsis thaliana
ctgcgccatgactctgg

SEQ ID NO: 87987 - DNA, 17 bp, Arabidopsis thaliana
ctgcgccgaaattcacg

SEQ ID NO: 87988 - DNA, 17 bp, Arabidopsis thaliana
ctgcgccgactttccta

SEQ ID NO: 87989 - DNA, 17 bp, Arabidopsis thaliana
ctgcgccgtatgatttg

SEQ ID NO: 87990 - DNA, 17 bp, Arabidopsis thaliana
ctgcgcctcctccgaca

SEQ ID NO: 87991 - DNA, 17 bp, Arabidopsis thaliana
ctgcgcctttgtgtcta

SEQ ID NO: 87992 - DNA, 17 bp, Arabidopsis thaliana
ctgcgctagtcatgtca

SEQ ID NO: 87993 - DNA, 17 bp, Arabidopsis thaliana
ctgcgctatctctacaa

SEQ ID NO: 87994 - DNA, 17 bp, Arabidopsis thaliana
ctgcgctcgggctatca

SEQ ID NO: 87995 - DNA, 17 bp, Arabidopsis thaliana
ctgcgctctgaaggata

SEQ ID NO: 87996 - DNA, 17 bp, Arabidopsis thaliana
ctgcgctgaagtaaccc

SEQ ID NO: 87997 - DNA, 17 bp, Arabidopsis thaliana
ctgcgctgtctacgagt

SEQ ID NO: 87998 - DNA, 17 bp, Arabidopsis thaliana
ctgcgcttgatcgtgga

SEQ ID NO: 87999 - DNA, 17 bp, Arabidopsis thaliana
ctgcgcttggtctaatc

SEQ ID NO: 88000 - DNA, 17 bp, Arabidopsis thaliana
ctgcggaaggatcattg

SEQ ID NO: 88001 - DNA, 17 bp, Arabidopsis thaliana
ctgcggaattggttgga

SEQ ID NO: 88002 - DNA, 17 bp, Arabidopsis thaliana
ctgcggaatttgtgatt

SEQ ID NO: 88003 - DNA, 17 bp, Arabidopsis thaliana
ctgcggacctgtaactg

SEQ ID NO: 88004 - DNA, 17 bp, Arabidopsis thaliana
ctgcggactaactacgg

SEQ ID NO: 88005 - DNA, 17 bp, Arabidopsis thaliana
ctgcggactaactgcgg

SEQ ID NO: 88006 - DNA, 17 bp, Arabidopsis thaliana
ctgcggagttctgatgg

SEQ ID NO: 88007 - DNA, 17 bp, Arabidopsis thaliana
ctgcggagttgctagta

SEQ ID NO: 88008 - DNA, 17 bp, Arabidopsis thaliana
ctgcggatgctaacgca

SEQ ID NO: 88009 - DNA, 17 bp, Arabidopsis thaliana
ctgcggcacccatcact

SEQ ID NO: 88010 - DNA, 17 bp, Arabidopsis thaliana
ctgcggccaccgtaata

SEQ ID NO: 88011 - DNA, 17 bp, Arabidopsis thaliana
ctgcggcgcggaggtct

SEQ ID NO: 88012 - DNA, 17 bp, Arabidopsis thaliana
ctgcggcggtcataagg

SEQ ID NO: 88013 - DNA, 17 bp, Arabidopsis thaliana
ctgcggcgtactgcgga

SEQ ID NO: 88014 - DNA, 17 bp, Arabidopsis thaliana
ctgcggcgtgaaatcag

SEQ ID NO: 88015 - DNA, 17 bp, Arabidopsis thaliana
ctgcggctgcttgatag

SEQ ID NO: 88016 - DNA, 17 bp, Arabidopsis thaliana
ctgcggcttaatttgac

SEQ ID NO: 88017 - DNA, 17 bp, Arabidopsis thaliana
ctgcggcttcgagcccc

SEQ ID NO: 88018 - DNA, 17 bp, Arabidopsis thaliana
ctgcggcttgctatggc

SEQ ID NO: 88019 - DNA, 17 bp, Arabidopsis thaliana
ctgcggcttgctatggt

SEQ ID NO: 88020 - DNA, 17 bp, Arabidopsis thaliana
ctgcggctttggctttc

SEQ ID NO: 88021 - DNA, 17 bp, Arabidopsis thaliana
ctgcgggaagcatttac

SEQ ID NO: 88022 - DNA, 17 bp, Arabidopsis thaliana
ctgcgggaagcatttgc

SEQ ID NO: 88023 - DNA, 17 bp, Arabidopsis thaliana
ctgcgggttcgaatccc

SEQ ID NO: 88024 - DNA, 17 bp, Arabidopsis thaliana
ctgcgggttcgagcccc

SEQ ID NO: 88025 - DNA, 17 bp, Arabidopsis thaliana
ctgcgggttcgtttcaa

SEQ ID NO: 88026 - DNA, 17 bp, Arabidopsis thaliana
ctgcggtacacagcggg

SEQ ID NO: 88027 - DNA, 17 bp, Arabidopsis thaliana
ctgcggtatgtgcggaa

SEQ ID NO: 88028 - DNA, 17 bp, Arabidopsis thaliana
ctgcggtgatctgcagg

SEQ ID NO: 88029 - DNA, 17 bp, Arabidopsis thaliana
ctgcggtgcggtttaac

SEQ ID NO: 88030 - DNA, 17 bp, Arabidopsis thaliana
ctgcggttgagtcaccg

SEQ ID NO: 88031 - DNA, 17 bp, Arabidopsis thaliana
ctgcggttgcgggcggt

SEQ ID NO: 88032 - DNA, 17 bp, Arabidopsis thaliana
ctgcggttgctgatgac

SEQ ID NO: 88033 - DNA, 17 bp, Arabidopsis thaliana
ctgcggttgttgtgacc

SEQ ID NO: 88034 - DNA, 17 bp, Arabidopsis thaliana
ctgcggtttattttccg

SEQ ID NO: 88035 - DNA, 17 bp, Arabidopsis thaliana
ctgcggttttgagtgcg

SEQ ID NO: 88036 - DNA, 17 bp, Arabidopsis thaliana
ctgcgtagcacaggtac

SEQ ID NO: 88037 - DNA, 17 bp, Arabidopsis thaliana
ctgcgtagtagactcag

SEQ ID NO: 88038 - DNA, 17 bp, Arabidopsis thaliana
ctgcgtatctgattgct

SEQ ID NO: 88039 - DNA, 17 bp, Arabidopsis thaliana
ctgcgtattcagatttg

SEQ ID NO: 88040 - DNA, 17 bp, Arabidopsis thaliana
ctgcgtcagttacctcc

SEQ ID NO: 88041 - DNA, 17 bp, Arabidopsis thaliana
ctgcgtcagttacctgc

SEQ ID NO: 88042 - DNA, 17 bp, Arabidopsis thaliana
ctgcgtcctgatattag

SEQ ID NO: 88043 - DNA, 17 bp, Arabidopsis thaliana
ctgcgtcggagttgcga

SEQ ID NO: 88044 - DNA, 17 bp, Arabidopsis thaliana
ctgcgtctcagctctca

SEQ ID NO: 88045 - DNA, 17 bp, Arabidopsis thaliana
ctgcgtgaagattagag

SEQ ID NO: 88046 - DNA, 17 bp, Arabidopsis thaliana
ctgcgtggcattcatca

SEQ ID NO: 88047 - DNA, 17 bp, Arabidopsis thaliana
ctgcgtggctgagtgca

SEQ ID NO: 88048 - DNA, 17 bp, Arabidopsis thaliana
ctgcgtggtaactggta

SEQ ID NO: 88049 - DNA, 17 bp, Arabidopsis thaliana
ctgcgtgtagctgacta

SEQ ID NO: 88050 - DNA, 17 bp, Arabidopsis thaliana
ctgcgtgtctagtttgg

SEQ ID NO: 88051 - DNA, 17 bp, Arabidopsis thaliana
ctgcgttaacgactccc

SEQ ID NO: 88052 - DNA, 17 bp, Arabidopsis thaliana
ctgcgttcctgattgta

SEQ ID NO: 88053 - DNA, 17 bp, Arabidopsis thaliana
ctgcgttgagctacgaa

SEQ ID NO: 88054 - DNA, 17 bp, Arabidopsis thaliana
ctgcgttgttggttgtg

SEQ ID NO: 88055 - DNA, 17 bp, Arabidopsis thaliana
ctgcgtttgcgggtggc

SEQ ID NO: 88056 - DNA, 17 bp, Arabidopsis thaliana
ctgcgttttgataagcg

SEQ ID NO: 88057 - DNA, 17 bp, Arabidopsis thaliana
ctgcgttttgccgcaag

SEQ ID NO: 88058 - DNA, 17 bp, Arabidopsis thaliana
ctgcgttttggagagcc

SEQ ID NO: 88059 - DNA, 17 bp, Arabidopsis thaliana
ctgcgtttttcggttgg

SEQ ID NO: 88060 - DNA, 17 bp, Arabidopsis thaliana
ctgctaaaagtggacca

SEQ ID NO: 88061 - DNA, 17 bp, Arabidopsis thaliana
ctgctaacaacagcata

SEQ ID NO: 88062 - DNA, 17 bp, Arabidopsis thaliana
ctgctaacattggtgcc

SEQ ID NO: 88063 - DNA, 17 bp, Arabidopsis thaliana
ctgctaacattggtggc

SEQ ID NO: 88064 - DNA, 17 bp, Arabidopsis thaliana
ctgctaactagctacgt

SEQ ID NO: 88065 - DNA, 17 bp, Arabidopsis thaliana
ctgctaagatcgctgat

SEQ ID NO: 88066 - DNA, 17 bp, Arabidopsis thaliana
ctgctaagattgccaag

SEQ ID NO: 88067 - DNA, 17 bp, Arabidopsis thaliana
ctgctaaggtggagcta

SEQ ID NO: 88068 - DNA, 17 bp, Arabidopsis thaliana
ctgctaataatcatgtg

SEQ ID NO: 88069 - DNA, 17 bp, Arabidopsis thaliana
ctgctaataccccgtag

SEQ ID NO: 88070 - DNA, 17 bp, Arabidopsis thaliana
ctgctaataccctgtag

SEQ ID NO: 88071 - DNA, 17 bp, Arabidopsis thaliana
ctgctaatgctatcacc

SEQ ID NO: 88072 - DNA, 17 bp, Arabidopsis thaliana
ctgctacaaaggttacc

SEQ ID NO: 88073 - DNA, 17 bp, Arabidopsis thaliana
ctgctacagaactggtc

SEQ ID NO: 88074 - DNA, 17 bp, Arabidopsis thaliana
ctgctacagctgtgttt

SEQ ID NO: 88075 - DNA, 17 bp, Arabidopsis thaliana
ctgctacatctgatttt

SEQ ID NO: 88076 - DNA, 17 bp, Arabidopsis thaliana
ctgctacgccgcttttg

SEQ ID NO: 88077 - DNA, 17 bp, Arabidopsis thaliana
ctgctacggatccggat

SEQ ID NO: 88078 - DNA, 17 bp, Arabidopsis thaliana
ctgctacgtgcgaaatt

SEQ ID NO: 88079 - DNA, 17 bp, Arabidopsis thaliana
ctgctactgcaacctgg

SEQ ID NO: 88080 - DNA, 17 bp, Arabidopsis thaliana
ctgctactgcggcttaa

SEQ ID NO: 88081 - DNA, 17 bp, Arabidopsis thaliana
ctgctacttttaaagat

SEQ ID NO: 88082 - DNA, 17 bp, Arabidopsis thaliana
ctgctagagacgcagct

SEQ ID NO: 88083 - DNA, 17 bp, Arabidopsis thaliana
ctgctagagatcttcaa

SEQ ID NO: 88084 - DNA, 17 bp, Arabidopsis thaliana
ctgctagaggacgcaat

SEQ ID NO: 88085 - DNA, 17 bp, Arabidopsis thaliana
ctgctagccaaagctca

SEQ ID NO: 88086 - DNA, 17 bp, Arabidopsis thaliana
ctgctagcgggagacgg

SEQ ID NO: 88087 - DNA, 17 bp, Arabidopsis thaliana
ctgctagctcatctacc

SEQ ID NO: 88088 - DNA, 17 bp, Arabidopsis thaliana
ctgctagcttctctgtg

SEQ ID NO: 88089 - DNA, 17 bp, Arabidopsis thaliana
ctgctaggcgaagcggt

SEQ ID NO: 88090 - DNA, 17 bp, Arabidopsis thaliana
ctgctaggtaattgttc

SEQ ID NO: 88091 - DNA, 17 bp, Arabidopsis thaliana
ctgctataaccgtattg

SEQ ID NO: 88092 - DNA, 17 bp, Arabidopsis thaliana
ctgctataaccgtattt

SEQ ID NO: 88093 - DNA, 17 bp, Arabidopsis thaliana
ctgctatatccgcttga

SEQ ID NO: 88094 - DNA, 17 bp, Arabidopsis thaliana
ctgctatcgtattttga

SEQ ID NO: 88095 - DNA, 17 bp, Arabidopsis thaliana
ctgctatctaagcgtag

SEQ ID NO: 88096 - DNA, 17 bp, Arabidopsis thaliana
ctgctatctgaatcgac

SEQ ID NO: 88097 - DNA, 17 bp, Arabidopsis thaliana
ctgctatgccgcttttg

SEQ ID NO: 88098 - DNA, 17 bp, Arabidopsis thaliana
ctgctatgttcgggaga

SEQ ID NO: 88099 - DNA, 17 bp, Arabidopsis thaliana
ctgctattagctcagtg

SEQ ID NO: 88100 - DNA, 17 bp, Arabidopsis thaliana
ctgctattccacaggta

SEQ ID NO: 88101 - DNA, 17 bp, Arabidopsis thaliana
ctgctattctccctgtc

SEQ ID NO: 88102 - DNA, 17 bp, Arabidopsis thaliana
ctgctattgaccggtgt

SEQ ID NO: 88103 - DNA, 17 bp, Arabidopsis thaliana
ctgctatttcgtggaca

SEQ ID NO: 88104 - DNA, 17 bp, Arabidopsis thaliana
ctgctcaacaagatgga

SEQ ID NO: 88105 - DNA, 17 bp, Arabidopsis thaliana
ctgctcaaccgtccaac

SEQ ID NO: 88106 - DNA, 17 bp, Arabidopsis thaliana
ctgctcaactaccctag

SEQ ID NO: 88107 - DNA, 17 bp, Arabidopsis thaliana
ctgctcaactgtggcac

SEQ ID NO: 88108 - DNA, 17 bp, Arabidopsis thaliana
ctgctcaagacgcttct

SEQ ID NO: 88109 - DNA, 17 bp, Arabidopsis thaliana
ctgctcaagctgcttcc

SEQ ID NO: 88110 - DNA, 17 bp, Arabidopsis thaliana
ctgctcaagggagtgga

SEQ ID NO: 88111 - DNA, 17 bp, Arabidopsis thaliana
ctgctcacctccttttc

SEQ ID NO: 88112 - DNA, 17 bp, Arabidopsis thaliana
ctgctcagccaagacca

SEQ ID NO: 88113 - DNA, 17 bp, Arabidopsis thaliana
ctgctcagccggacttc

SEQ ID NO: 88114 - DNA, 17 bp, Arabidopsis thaliana
ctgctcatattgacagg

SEQ ID NO: 88115 - DNA, 17 bp, Arabidopsis thaliana
ctgctccaaaaccagtt

SEQ ID NO: 88116 - DNA, 17 bp, Arabidopsis thaliana
ctgctccagcggaccaa

SEQ ID NO: 88117 - DNA, 17 bp, Arabidopsis thaliana
ctgctccagcggatcaa

SEQ ID NO: 88118 - DNA, 17 bp, Arabidopsis thaliana
ctgctccgacgaaataa

SEQ ID NO: 88119 - DNA, 17 bp, Arabidopsis thaliana
ctgctccggtcttatgg

SEQ ID NO: 88120 - DNA, 17 bp, Arabidopsis thaliana
ctgctccttctacttgt

SEQ ID NO: 88121 - DNA, 17 bp, Arabidopsis thaliana
ctgctcgagctgcttcc

SEQ ID NO: 88122 - DNA, 17 bp, Arabidopsis thaliana
ctgctcgatacgctctc

SEQ ID NO: 88123 - DNA, 17 bp, Arabidopsis thaliana
ctgctcgctaagctcag

SEQ ID NO: 88124 - DNA, 17 bp, Arabidopsis thaliana
ctgctcggcatggaagg

SEQ ID NO: 88125 - DNA, 17 bp, Arabidopsis thaliana
ctgctcgggattggcca

SEQ ID NO: 88126 - DNA, 17 bp, Arabidopsis thaliana
ctgctcgtcatcaacaa

SEQ ID NO: 88127 - DNA, 17 bp, Arabidopsis thaliana
ctgctcgtcattgtttg

SEQ ID NO: 88128 - DNA, 17 bp, Arabidopsis thaliana
ctgctcgtcggagggct

SEQ ID NO: 88129 - DNA, 17 bp, Arabidopsis thaliana
ctgctctcttgcggtta

SEQ ID NO: 88130 - DNA, 17 bp, Arabidopsis thaliana
ctgctctgctatgtttc

SEQ ID NO: 88131 - DNA, 17 bp, Arabidopsis thaliana
ctgctctgtcaactagg

SEQ ID NO: 88132 - DNA, 17 bp, Arabidopsis thaliana
ctgctctgtcggacggg

SEQ ID NO: 88133 - DNA, 17 bp, Arabidopsis thaliana
ctgctctgtgcccataa

SEQ ID NO: 88134 - DNA, 17 bp, Arabidopsis thaliana
ctgctctttgtacacac

SEQ ID NO: 88135 - DNA, 17 bp, Arabidopsis thaliana
ctgctcttttttccttc

SEQ ID NO: 88136 - DNA, 17 bp, Arabidopsis thaliana
ctgctgaaagttactcg

SEQ ID NO: 88137 - DNA, 17 bp, Arabidopsis thaliana
ctgctgaagaatgctga

SEQ ID NO: 88138 - DNA, 17 bp, Arabidopsis thaliana
ctgctgaatccatgggc

SEQ ID NO: 88139 - DNA, 17 bp, Arabidopsis thaliana
ctgctgaatcctgtctg

SEQ ID NO: 88140 - DNA, 17 bp, Arabidopsis thaliana
ctgctgaatcttctact

SEQ ID NO: 88141 - DNA, 17 bp, Arabidopsis thaliana
ctgctgaatttgccgct

SEQ ID NO: 88142 - DNA, 17 bp, Arabidopsis thaliana
ctgctgagattaagaac

SEQ ID NO: 88143 - DNA, 17 bp, Arabidopsis thaliana
ctgctgagattggacgc

SEQ ID NO: 88144 - DNA, 17 bp, Arabidopsis thaliana
ctgctgaggaatatgtt

SEQ ID NO: 88145 - DNA, 17 bp, Arabidopsis thaliana
ctgctgaggtagaggag

SEQ ID NO: 88146 - DNA, 17 bp, Arabidopsis thaliana
ctgctgataagggaatg

SEQ ID NO: 88147 - DNA, 17 bp, Arabidopsis thaliana
ctgctgatccatctaca

SEQ ID NO: 88148 - DNA, 17 bp, Arabidopsis thaliana
ctgctgatccatctacc

SEQ ID NO: 88149 - DNA, 17 bp, Arabidopsis thaliana
ctgctgatgtaagacag

SEQ ID NO: 88150 - DNA, 17 bp, Arabidopsis thaliana
ctgctgatgtttgatct

SEQ ID NO: 88151 - DNA, 17 bp, Arabidopsis thaliana
ctgctgatttataaacc

SEQ ID NO: 88152 - DNA, 17 bp, Arabidopsis thaliana
ctgctgattttgtgcca

SEQ ID NO: 88153 - DNA, 17 bp, Arabidopsis thaliana
ctgctgcagatcctgag

SEQ ID NO: 88154 - DNA, 17 bp, Arabidopsis thaliana
ctgctgcatgcgaagaa

SEQ ID NO: 88155 - DNA, 17 bp, Arabidopsis thaliana
ctgctgcattgctcggg

SEQ ID NO: 88156 - DNA, 17 bp, Arabidopsis thaliana
ctgctgccctaagtctt

SEQ ID NO: 88157 - DNA, 17 bp, Arabidopsis thaliana
ctgctgcgaaccaagtt

SEQ ID NO: 88158 - DNA, 17 bp, Arabidopsis thaliana
ctgctgcgaatgtcggt

SEQ ID NO: 88159 - DNA, 17 bp, Arabidopsis thaliana
ctgctgcgccaaggagc

SEQ ID NO: 88160 - DNA, 17 bp, Arabidopsis thaliana
ctgctgcgtcggtggtg

SEQ ID NO: 88161 - DNA, 17 bp, Arabidopsis thaliana
ctgctgcgttgcctact

SEQ ID NO: 88162 - DNA, 17 bp, Arabidopsis thaliana
ctgctgctcagccaaga

SEQ ID NO: 88163 - DNA, 17 bp, Arabidopsis thaliana
ctgctgctctacatgtt

SEQ ID NO: 88164 - DNA, 17 bp, Arabidopsis thaliana
ctgctgctgaatccatg

SEQ ID NO: 88165 - DNA, 17 bp, Arabidopsis thaliana
ctgctgctgagtcttct

SEQ ID NO: 88166 - DNA, 17 bp, Arabidopsis thaliana
ctgctgctggagcgttc

SEQ ID NO: 88167 - DNA, 17 bp, Arabidopsis thaliana
ctgctgctttcgcagac

SEQ ID NO: 88168 - DNA, 17 bp, Arabidopsis thaliana
ctgctgctttggaacaa

SEQ ID NO: 88169 - DNA, 17 bp, Arabidopsis thaliana
ctgctggactatcactt

SEQ ID NO: 88170 - DNA, 17 bp, Arabidopsis thaliana
ctgctggagtattgagg

SEQ ID NO: 88171 - DNA, 17 bp, Arabidopsis thaliana
ctgctggatattagggt

SEQ ID NO: 88172 - DNA, 17 bp, Arabidopsis thaliana
ctgctgggttggctgtt

SEQ ID NO: 88173 - DNA, 17 bp, Arabidopsis thaliana
ctgctggtcattgctct

SEQ ID NO: 88174 - DNA, 17 bp, Arabidopsis thaliana
ctgctggtgctgagatt

SEQ ID NO: 88175 - DNA, 17 bp, Arabidopsis thaliana
ctgctggttgcttgagt

SEQ ID NO: 88176 - DNA, 17 bp, Arabidopsis thaliana
ctgctgtagatcgggtc

SEQ ID NO: 88177 - DNA, 17 bp, Arabidopsis thaliana
ctgctgtcacgttggat

SEQ ID NO: 88178 - DNA, 17 bp, Arabidopsis thaliana
ctgctgtcagcggactg

SEQ ID NO: 88179 - DNA, 17 bp, Arabidopsis thaliana
ctgctgtcattttggac

SEQ ID NO: 88180 - DNA, 17 bp, Arabidopsis thaliana
ctgctgtgacttttgtc

SEQ ID NO: 88181 - DNA, 17 bp, Arabidopsis thaliana
ctgctgttgaaagtcca

SEQ ID NO: 88182 - DNA, 17 bp, Arabidopsis thaliana
ctgcttaactgctttgc

SEQ ID NO: 88183 - DNA, 17 bp, Arabidopsis thaliana
ctgcttaatgtgatgat

SEQ ID NO: 88184 - DNA, 17 bp, Arabidopsis thaliana
ctgcttaattaggaatg

SEQ ID NO: 88185 - DNA, 17 bp, Arabidopsis thaliana
ctgcttacaagatcggg

SEQ ID NO: 88186 - DNA, 17 bp, Arabidopsis thaliana
ctgcttacggcggttat

SEQ ID NO: 88187 - DNA, 17 bp, Arabidopsis thaliana
ctgcttagggccccacg

SEQ ID NO: 88188 - DNA, 17 bp, Arabidopsis thaliana
ctgcttaggtgtgtgac

SEQ ID NO: 88189 - DNA, 17 bp, Arabidopsis thaliana
ctgcttagtggaaagac

SEQ ID NO: 88190 - DNA, 17 bp, Arabidopsis thaliana
ctgcttatacttgttgg

SEQ ID NO: 88191 - DNA, 17 bp, Arabidopsis thaliana
ctgcttatctcgaattt

SEQ ID NO: 88192 - DNA, 17 bp, Arabidopsis thaliana
ctgcttatggacccgaa

SEQ ID NO: 88193 - DNA, 17 bp, Arabidopsis thaliana
ctgcttatgtcttcttt

SEQ ID NO: 88194 - DNA, 17 bp, Arabidopsis thaliana
ctgcttattcgtcggag

SEQ ID NO: 88195 - DNA, 17 bp, Arabidopsis thaliana
ctgcttatttaaactgg

SEQ ID NO: 88196 - DNA, 17 bp, Arabidopsis thaliana
ctgcttatttcgtcaga

SEQ ID NO: 88197 - DNA, 17 bp, Arabidopsis thaliana
ctgcttatttcgtcgga

SEQ ID NO: 88198 - DNA, 17 bp, Arabidopsis thaliana
ctgcttatttcgtcggt

SEQ ID NO: 88199 - DNA, 17 bp, Arabidopsis thaliana
ctgcttcaaactatcag

SEQ ID NO: 88200 - DNA, 17 bp, Arabidopsis thaliana
ctgcttcaagtccctgc

SEQ ID NO: 88201 - DNA, 17 bp, Arabidopsis thaliana
ctgcttcaggcggtgcc

SEQ ID NO: 88202 - DNA, 17 bp, Arabidopsis thaliana
ctgcttcaggcggtgct

SEQ ID NO: 88203 - DNA, 17 bp, Arabidopsis thaliana
ctgcttcatctcattgc

SEQ ID NO: 88204 - DNA, 17 bp, Arabidopsis thaliana
ctgcttccactttggtg

SEQ ID NO: 88205 - DNA, 17 bp, Arabidopsis thaliana
ctgcttccatcgggtct

SEQ ID NO: 88206 - DNA, 17 bp, Arabidopsis thaliana
ctgcttccgcggcgaga

SEQ ID NO: 88207 - DNA, 17 bp, Arabidopsis thaliana
ctgcttcgccggacgtt

SEQ ID NO: 88208 - DNA, 17 bp, Arabidopsis thaliana
ctgcttcggcgcttgat

SEQ ID NO: 88209 - DNA, 17 bp, Arabidopsis thaliana
ctgcttcgggtggtgct

SEQ ID NO: 88210 - DNA, 17 bp, Arabidopsis thaliana
ctgcttcgtgcccaggc

SEQ ID NO: 88211 - DNA, 17 bp, Arabidopsis thaliana
ctgcttctaagcaagtt

SEQ ID NO: 88212 - DNA, 17 bp, Arabidopsis thaliana
ctgcttctacctcggtg

SEQ ID NO: 88213 - DNA, 17 bp, Arabidopsis thaliana
ctgcttctccgggactg

SEQ ID NO: 88214 - DNA, 17 bp, Arabidopsis thaliana
ctgcttctctatgtctt

SEQ ID NO: 88215 - DNA, 17 bp, Arabidopsis thaliana
ctgcttctgcaacttaa

SEQ ID NO: 88216 - DNA, 17 bp, Arabidopsis thaliana
ctgcttctgcctcggtg

SEQ ID NO: 88217 - DNA, 17 bp, Arabidopsis thaliana
ctgcttctttcgtcgga

SEQ ID NO: 88218 - DNA, 17 bp, Arabidopsis thaliana
ctgcttctttgaggaac

SEQ ID NO: 88219 - DNA, 17 bp, Arabidopsis thaliana
ctgcttgaaccgcacat

SEQ ID NO: 88220 - DNA, 17 bp, Arabidopsis thaliana
ctgcttgaagactgctg

SEQ ID NO: 88221 - DNA, 17 bp, Arabidopsis thaliana
ctgcttgaatcgggatc

SEQ ID NO: 88222 - DNA, 17 bp, Arabidopsis thaliana
ctgcttgatacactttt

SEQ ID NO: 88223 - DNA, 17 bp, Arabidopsis thaliana
ctgcttgatacgctttt

SEQ ID NO: 88224 - DNA, 17 bp, Arabidopsis thaliana
ctgcttgatccgtttaa

SEQ ID NO: 88225 - DNA, 17 bp, Arabidopsis thaliana
ctgcttgatgtgcttga

SEQ ID NO: 88226 - DNA, 17 bp, Arabidopsis thaliana
ctgcttgccatatttga

SEQ ID NO: 88227 - DNA, 17 bp, Arabidopsis thaliana
ctgcttggaccgctata

SEQ ID NO: 88228 - DNA, 17 bp, Arabidopsis thaliana
ctgcttggcatggtctt

SEQ ID NO: 88229 - DNA, 17 bp, Arabidopsis thaliana
ctgcttggctaacgaca

SEQ ID NO: 88230 - DNA, 17 bp, Arabidopsis thaliana
ctgcttggtgtctttgc

SEQ ID NO: 88231 - DNA, 17 bp, Arabidopsis thaliana
ctgcttgtaggggcgca

SEQ ID NO: 88232 - DNA, 17 bp, Arabidopsis thaliana
ctgcttgtgagttattg

SEQ ID NO: 88233 - DNA, 17 bp, Arabidopsis thaliana
ctgcttgtgattctcag

SEQ ID NO: 88234 - DNA, 17 bp, Arabidopsis thaliana
ctgcttgttcacttagg

SEQ ID NO: 88235 - DNA, 17 bp, Arabidopsis thaliana
ctgctttacatgcggcc

SEQ ID NO: 88236 - DNA, 17 bp, Arabidopsis thaliana
ctgctttataggtcggt

SEQ ID NO: 88237 - DNA, 17 bp, Arabidopsis thaliana
ctgctttcgttttctca

SEQ ID NO: 88238 - DNA, 17 bp, Arabidopsis thaliana
ctgctttctacggttgt

SEQ ID NO: 88239 - DNA, 17 bp, Arabidopsis thaliana
ctgctttggatcttgat

SEQ ID NO: 88240 - DNA, 17 bp, Arabidopsis thaliana
ctgctttggttggtagt

SEQ ID NO: 88241 - DNA, 17 bp, Arabidopsis thaliana
ctgctttgtccgcttga

SEQ ID NO: 88242 - DNA, 17 bp, Arabidopsis thaliana
ctgctttgttgagccgt

SEQ ID NO: 88243 - DNA, 17 bp, Arabidopsis thaliana
ctgcttttctcgggttt

SEQ ID NO: 88244 - DNA, 17 bp, Arabidopsis thaliana
ctgcttttgtcttgagc

SEQ ID NO: 88245 - DNA, 17 bp, Arabidopsis thaliana
ctgcttttgtggaaggg

SEQ ID NO: 88246 - DNA, 17 bp, Arabidopsis thaliana
ctgctttttcgcctcag

SEQ ID NO: 88247 - DNA, 17 bp, Arabidopsis thaliana
ctgctttttgcggatga

SEQ ID NO: 88248 - DNA, 17 bp, Arabidopsis thaliana
ctggaaaacaggaagat

SEQ ID NO: 88249 - DNA, 17 bp, Arabidopsis thaliana
ctggaaaacgcagtggg

SEQ ID NO: 88250 - DNA, 17 bp, Arabidopsis thaliana
ctggaaacggctcagcc

SEQ ID NO: 88251 - DNA, 17 bp, Arabidopsis thaliana
ctggaaagattacgggt

SEQ ID NO: 88252 - DNA, 17 bp, Arabidopsis thaliana
ctggaaattcaggttca

SEQ ID NO: 88253 - DNA, 17 bp, Arabidopsis thaliana
ctggaaattgcgcatgt

SEQ ID NO: 88254 - DNA, 17 bp, Arabidopsis thaliana
ctggaacattagacctc

SEQ ID NO: 88255 - DNA, 17 bp, Arabidopsis thaliana
ctggaaccgttcaccgt

SEQ ID NO: 88256 - DNA, 17 bp, Arabidopsis thaliana
ctggaacgattacgggg

SEQ ID NO: 88257 - DNA, 17 bp, Arabidopsis thaliana
ctggaacgattacgggt

SEQ ID NO: 88258 - DNA, 17 bp, Arabidopsis thaliana
ctggaactgactgctgc

SEQ ID NO: 88259 - DNA, 17 bp, Arabidopsis thaliana
ctggaactggaacatta

SEQ ID NO: 88260 - DNA, 17 bp, Arabidopsis thaliana
ctggaactttgaggacg

SEQ ID NO: 88261 - DNA, 17 bp, Arabidopsis thaliana
ctggaagagcaccgcac

SEQ ID NO: 88262 - DNA, 17 bp, Arabidopsis thaliana
ctggaagattacgagat

SEQ ID NO: 88263 - DNA, 17 bp, Arabidopsis thaliana
ctggaaggattacgggc

SEQ ID NO: 88264 - DNA, 17 bp, Arabidopsis thaliana
ctggaaggtcctgtaaa

SEQ ID NO: 88265 - DNA, 17 bp, Arabidopsis thaliana
ctggaaggtcctgtaca

SEQ ID NO: 88266 - DNA, 17 bp, Arabidopsis thaliana
ctggaaggtgcgctgga

SEQ ID NO: 88267 - DNA, 17 bp, Arabidopsis thaliana
ctggaaggtgcggatgg

SEQ ID NO: 88268 - DNA, 17 bp, Arabidopsis thaliana
ctggaaggtgcggccgc

SEQ ID NO: 88269 - DNA, 17 bp, Arabidopsis thaliana
ctggaaggtgcggccgg

SEQ ID NO: 88270 - DNA, 17 bp, Arabidopsis thaliana
ctggaaggtgcggcggg

SEQ ID NO: 88271 - DNA, 17 bp, Arabidopsis thaliana
ctggaaggtgcggctga

SEQ ID NO: 88272 - DNA, 17 bp, Arabidopsis thaliana
ctggaaggtgcggctgg

SEQ ID NO: 88273 - DNA, 17 bp, Arabidopsis thaliana
ctggaaggtgcggctgt

SEQ ID NO: 88274 - DNA, 17 bp, Arabidopsis thaliana
ctggaagtcctcgtgtt

SEQ ID NO: 88275 - DNA, 17 bp, Arabidopsis thaliana
ctggaagtcgagtatca

SEQ ID NO: 88276 - DNA, 17 bp, Arabidopsis thaliana
ctggaagttcaaggcca

SEQ ID NO: 88277 - DNA, 17 bp, Arabidopsis thaliana
ctggaagttgtacagaa

SEQ ID NO: 88278 - DNA, 17 bp, Arabidopsis thaliana
ctggaatacttgaacta

SEQ ID NO: 88279 - DNA, 17 bp, Arabidopsis thaliana
ctggaatacttgaatta

SEQ ID NO: 88280 - DNA, 17 bp, Arabidopsis thaliana
ctggaatatggtcgtgc

SEQ ID NO: 88281 - DNA, 17 bp, Arabidopsis thaliana
ctggaatccaaggatca

SEQ ID NO: 88282 - DNA, 17 bp, Arabidopsis thaliana
ctggaatgttgcagcga

SEQ ID NO: 88283 - DNA, 17 bp, Arabidopsis thaliana
ctggaattagtggttca

SEQ ID NO: 88284 - DNA, 17 bp, Arabidopsis thaliana
ctggaattctgcagtgg

SEQ ID NO: 88285 - DNA, 17 bp, Arabidopsis thaliana
ctggaattggagaagct

SEQ ID NO: 88286 - DNA, 17 bp, Arabidopsis thaliana
ctggaattggcctcgtt

SEQ ID NO: 88287 - DNA, 17 bp, Arabidopsis thaliana
ctggaatttcaagcgac

SEQ ID NO: 88288 - DNA, 17 bp, Arabidopsis thaliana
ctggaatttgccaactt

SEQ ID NO: 88289 - DNA, 17 bp, Arabidopsis thaliana
ctggacagtggtgtaca

SEQ ID NO: 88290 - DNA, 17 bp, Arabidopsis thaliana
ctggacatccatctagc

SEQ ID NO: 88291 - DNA, 17 bp, Arabidopsis thaliana
ctggaccaccgggagaa

SEQ ID NO: 88292 - DNA, 17 bp, Arabidopsis thaliana
ctggaccagaatcaccc

SEQ ID NO: 88293 - DNA, 17 bp, Arabidopsis thaliana
ctggaccagaattaccc

SEQ ID NO: 88294 - DNA, 17 bp, Arabidopsis thaliana
ctggaccaggcttcatt

SEQ ID NO: 88295 - DNA, 17 bp, Arabidopsis thaliana
ctggacccggtcactat

SEQ ID NO: 88296 - DNA, 17 bp, Arabidopsis thaliana
ctggaccctcttctcct

SEQ ID NO: 88297 - DNA, 17 bp, Arabidopsis thaliana
ctggaccgctcattctt

SEQ ID NO: 88298 - DNA, 17 bp, Arabidopsis thaliana
ctggaccgctgatcgga

SEQ ID NO: 88299 - DNA, 17 bp, Arabidopsis thaliana
ctggaccgctgcccgcc

SEQ ID NO: 88300 - DNA, 17 bp, Arabidopsis thaliana
ctggaccgggtgggcgg

SEQ ID NO: 88301 - DNA, 17 bp, Arabidopsis thaliana
ctggaccgtttaaattg

SEQ ID NO: 88302 - DNA, 17 bp, Arabidopsis thaliana
ctggacctaggcctctg

SEQ ID NO: 88303 - DNA, 17 bp, Arabidopsis thaliana
ctggacgggtttggcag

SEQ ID NO: 88304 - DNA, 17 bp, Arabidopsis thaliana
ctggacgtccatttact

SEQ ID NO: 88305 - DNA, 17 bp, Arabidopsis thaliana
ctggacgtctggactca

SEQ ID NO: 88306 - DNA, 17 bp, Arabidopsis thaliana
ctggacgtgacatgata

SEQ ID NO: 88307 - DNA, 17 bp, Arabidopsis thaliana
ctggacgtgccggagtg

SEQ ID NO: 88308 - DNA, 17 bp, Arabidopsis thaliana
ctggacgtttctgactc

SEQ ID NO: 88309 - DNA, 17 bp, Arabidopsis thaliana
ctggacgtttctgcttc

SEQ ID NO: 88310 - DNA, 17 bp, Arabidopsis thaliana
ctggactaggtcccggg

SEQ ID NO: 88311 - DNA, 17 bp, Arabidopsis thaliana
ctggactcgggcaatcg

SEQ ID NO: 88312 - DNA, 17 bp, Arabidopsis thaliana
ctggactcgggcattcg

SEQ ID NO: 88313 - DNA, 17 bp, Arabidopsis thaliana
ctggactgaagcccgta

SEQ ID NO: 88314 - DNA, 17 bp, Arabidopsis thaliana
ctggactgatactcatc

SEQ ID NO: 88315 - DNA, 17 bp, Arabidopsis thaliana
ctggactgcttggacaa

SEQ ID NO: 88316 - DNA, 17 bp, Arabidopsis thaliana
ctggactgggcttcatt

SEQ ID NO: 88317 - DNA, 17 bp, Arabidopsis thaliana
ctggactggtggttgtg

SEQ ID NO: 88318 - DNA, 17 bp, Arabidopsis thaliana
ctggactgtcaagtggc

SEQ ID NO: 88319 - DNA, 17 bp, Arabidopsis thaliana
ctggactgtccgaattt

SEQ ID NO: 88320 - DNA, 17 bp, Arabidopsis thaliana
ctggactgtttcagacg

SEQ ID NO: 88321 - DNA, 17 bp, Arabidopsis thaliana
ctggacttgattatgca

SEQ ID NO: 88322 - DNA, 17 bp, Arabidopsis thaliana
ctggacttgtggttgca

SEQ ID NO: 88323 - DNA, 17 bp, Arabidopsis thaliana
ctggagaactctccagc

SEQ ID NO: 88324 - DNA, 17 bp, Arabidopsis thaliana
ctggagaagacaccatc

SEQ ID NO: 88325 - DNA, 17 bp, Arabidopsis thaliana
ctggagaagcagggcac

SEQ ID NO: 88326 - DNA, 17 bp, Arabidopsis thaliana
ctggagaagcgtcctca

SEQ ID NO: 88327 - DNA, 17 bp, Arabidopsis thaliana
ctggagaccaaaccctt

SEQ ID NO: 88328 - DNA, 17 bp, Arabidopsis thaliana
ctggagacttctctttc

SEQ ID NO: 88329 - DNA, 17 bp, Arabidopsis thaliana
ctggagagattacagga

SEQ ID NO: 88330 - DNA, 17 bp, Arabidopsis thaliana
ctggagagattacgggc

SEQ ID NO: 88331 - DNA, 17 bp, Arabidopsis thaliana
ctggagagctgaaggtc

SEQ ID NO: 88332 - DNA, 17 bp, Arabidopsis thaliana
ctggagaggttggacga

SEQ ID NO: 88333 - DNA, 17 bp, Arabidopsis thaliana
ctggagagtccgaatca

SEQ ID NO: 88334 - DNA, 17 bp, Arabidopsis thaliana
ctggagatcaccatcaa

SEQ ID NO: 88335 - DNA, 17 bp, Arabidopsis thaliana
ctggagatgtcgccgac

SEQ ID NO: 88336 - DNA, 17 bp, Arabidopsis thaliana
ctggagattttgtgtgg

SEQ ID NO: 88337 - DNA, 17 bp, Arabidopsis thaliana
ctggagcaggttggcaa

SEQ ID NO: 88338 - DNA, 17 bp, Arabidopsis thaliana
ctggagccagatccaag

SEQ ID NO: 88339 - DNA, 17 bp, Arabidopsis thaliana
ctggagcgattggaatc

SEQ ID NO: 88340 - DNA, 17 bp, Arabidopsis thaliana
ctggagctcggacgcga

SEQ ID NO: 88341 - DNA, 17 bp, Arabidopsis thaliana
ctggagctctatccaga

SEQ ID NO: 88342 - DNA, 17 bp, Arabidopsis thaliana
ctggaggaatgcgaaaa

SEQ ID NO: 88343 - DNA, 17 bp, Arabidopsis thaliana
ctggaggaattacaggc

SEQ ID NO: 88344 - DNA, 17 bp, Arabidopsis thaliana
ctggaggaattacgggc

SEQ ID NO: 88345 - DNA, 17 bp, Arabidopsis thaliana
ctggaggaattacgggg

SEQ ID NO: 88346 - DNA, 17 bp, Arabidopsis thaliana
ctggaggaattacggtg

SEQ ID NO: 88347 - DNA, 17 bp, Arabidopsis thaliana
ctggaggatgtgaatcc

SEQ ID NO: 88348 - DNA, 17 bp, Arabidopsis thaliana
ctggaggattaagagct

SEQ ID NO: 88349 - DNA, 17 bp, Arabidopsis thaliana
ctggaggattaagagtt

SEQ ID NO: 88350 - DNA, 17 bp, Arabidopsis thaliana
ctggaggattacaggct

SEQ ID NO: 88351 - DNA, 17 bp, Arabidopsis thaliana
ctggaggattacgggtt

SEQ ID NO: 88352 - DNA, 17 bp, Arabidopsis thaliana
ctggaggattatggcat

SEQ ID NO: 88353 - DNA, 17 bp, Arabidopsis thaliana
ctggaggcaagtgtgca

SEQ ID NO: 88354 - DNA, 17 bp, Arabidopsis thaliana
ctggagggataacgggc

SEQ ID NO: 88355 - DNA, 17 bp, Arabidopsis thaliana
ctggagggattaaggac

SEQ ID NO: 88356 - DNA, 17 bp, Arabidopsis thaliana
ctggagggattacggac

SEQ ID NO: 88357 - DNA, 17 bp, Arabidopsis thaliana
ctggagggattacgggc

SEQ ID NO: 88358 - DNA, 17 bp, Arabidopsis thaliana
ctggagggattacgggg

SEQ ID NO: 88359 - DNA, 17 bp, Arabidopsis thaliana
ctggagggtgcggtgta

SEQ ID NO: 88360 - DNA, 17 bp, Arabidopsis thaliana
ctggagtaaggcttgag

SEQ ID NO: 88361 - DNA, 17 bp, Arabidopsis thaliana
ctggagtcgaggtctga

SEQ ID NO: 88362 - DNA, 17 bp, Arabidopsis thaliana
ctggagtgattacgggt

SEQ ID NO: 88363 - DNA, 17 bp, Arabidopsis thaliana
ctggagtgattgtgcgg

SEQ ID NO: 88364 - DNA, 17 bp, Arabidopsis thaliana
ctggagttcgacttcgg

SEQ ID NO: 88365 - DNA, 17 bp, Arabidopsis thaliana
ctggagttgctcgatct

SEQ ID NO: 88366 - DNA, 17 bp, Arabidopsis thaliana
ctggagttgcttgcgtt

SEQ ID NO: 88367 - DNA, 17 bp, Arabidopsis thaliana
ctggagttgggacttat

SEQ ID NO: 88368 - DNA, 17 bp, Arabidopsis thaliana
ctggagttgggatttat

SEQ ID NO: 88369 - DNA, 17 bp, Arabidopsis thaliana
ctggatagactgatcga

SEQ ID NO: 88370 - DNA, 17 bp, Arabidopsis thaliana
ctggatagcaggaggtg

SEQ ID NO: 88371 - DNA, 17 bp, Arabidopsis thaliana
ctggatagtccgaatct

SEQ ID NO: 88372 - DNA, 17 bp, Arabidopsis thaliana
ctggatatagcgaccca

SEQ ID NO: 88373 - DNA, 17 bp, Arabidopsis thaliana
ctggatatagcgaccta

SEQ ID NO: 88374 - DNA, 17 bp, Arabidopsis thaliana
ctggatatagcgacctg

SEQ ID NO: 88375 - DNA, 17 bp, Arabidopsis thaliana
ctggatatcatacggcg

SEQ ID NO: 88376 - DNA, 17 bp, Arabidopsis thaliana
ctggatatccgcttcgt

SEQ ID NO: 88377 - DNA, 17 bp, Arabidopsis thaliana
ctggatatgatcgcagc

SEQ ID NO: 88378 - DNA, 17 bp, Arabidopsis thaliana
ctggatattgcattcgc

SEQ ID NO: 88379 - DNA, 17 bp, Arabidopsis thaliana
ctggatcagatctggaa

SEQ ID NO: 88380 - DNA, 17 bp, Arabidopsis thaliana
ctggatcagattgcacc

SEQ ID NO: 88381 - DNA, 17 bp, Arabidopsis thaliana
ctggatcaggcttttgt

SEQ ID NO: 88382 - DNA, 17 bp, Arabidopsis thaliana
ctggatcatttattttg

SEQ ID NO: 88383 - DNA, 17 bp, Arabidopsis thaliana
ctggatccagagatatt

SEQ ID NO: 88384 - DNA, 17 bp, Arabidopsis thaliana
ctggatccagcgacaga

SEQ ID NO: 88385 - DNA, 17 bp, Arabidopsis thaliana
ctggatccagcgacagc

SEQ ID NO: 88386 - DNA, 17 bp, Arabidopsis thaliana
ctggatccagcgaccag

SEQ ID NO: 88387 - DNA, 17 bp, Arabidopsis thaliana
ctggatccgactccgag

SEQ ID NO: 88388 - DNA, 17 bp, Arabidopsis thaliana
ctggatccgctgtagat

SEQ ID NO: 88389 - DNA, 17 bp, Arabidopsis thaliana
ctggatccttatttgca

SEQ ID NO: 88390 - DNA, 17 bp, Arabidopsis thaliana
ctggatccttatttgta

SEQ ID NO: 88391 - DNA, 17 bp, Arabidopsis thaliana
ctggatcgaagcatttc

SEQ ID NO: 88392 - DNA, 17 bp, Arabidopsis thaliana
ctggatcgagtgaatga

SEQ ID NO: 88393 - DNA, 17 bp, Arabidopsis thaliana
ctggatcgagtgaatgg

SEQ ID NO: 88394 - DNA, 17 bp, Arabidopsis thaliana
ctggatcggactcagca

SEQ ID NO: 88395 - DNA, 17 bp, Arabidopsis thaliana
ctggatcgggagatgtc

SEQ ID NO: 88396 - DNA, 17 bp, Arabidopsis thaliana
ctggatctgatcacagc

SEQ ID NO: 88397 - DNA, 17 bp, Arabidopsis thaliana
ctggatctttcggactt

SEQ ID NO: 88398 - DNA, 17 bp, Arabidopsis thaliana
ctggatgaaggcactgc

SEQ ID NO: 88399 - DNA, 17 bp, Arabidopsis thaliana
ctggatgcccgatacca

SEQ ID NO: 88400 - DNA, 17 bp, Arabidopsis thaliana
ctggatgcctgataccg

SEQ ID NO: 88401 - DNA, 17 bp, Arabidopsis thaliana
ctggatggagatgagtt

SEQ ID NO: 88402 - DNA, 17 bp, Arabidopsis thaliana
ctggatggcatgtcttc

SEQ ID NO: 88403 - DNA, 17 bp, Arabidopsis thaliana
ctggatgtagctgaacg

SEQ ID NO: 88404 - DNA, 17 bp, Arabidopsis thaliana
ctggatgtcagttagtt

SEQ ID NO: 88405 - DNA, 17 bp, Arabidopsis thaliana
ctggatgtgtccttgtt

SEQ ID NO: 88406 - DNA, 17 bp, Arabidopsis thaliana
ctggatgtttcaaagcc

SEQ ID NO: 88407 - DNA, 17 bp, Arabidopsis thaliana
ctggattagtgagtcga

SEQ ID NO: 88408 - DNA, 17 bp, Arabidopsis thaliana
ctggattatgactgaac

SEQ ID NO: 88409 - DNA, 17 bp, Arabidopsis thaliana
ctggattcacagacttt

SEQ ID NO: 88410 - DNA, 17 bp, Arabidopsis thaliana
ctggattcagcgacagc

SEQ ID NO: 88411 - DNA, 17 bp, Arabidopsis thaliana
ctggattcgacttcccc

SEQ ID NO: 88412 - DNA, 17 bp, Arabidopsis thaliana
ctggattctccttttga

SEQ ID NO: 88413 - DNA, 17 bp, Arabidopsis thaliana
ctggattctccttttgt

SEQ ID NO: 88414 - DNA, 17 bp, Arabidopsis thaliana
ctggattgagacgacat

SEQ ID NO: 88415 - DNA, 17 bp, Arabidopsis thaliana
ctggattgccgaaccat

SEQ ID NO: 88416 - DNA, 17 bp, Arabidopsis thaliana
ctggattgctgaggtgt

SEQ ID NO: 88417 - DNA, 17 bp, Arabidopsis thaliana
ctggattggaccacgga

SEQ ID NO: 88418 - DNA, 17 bp, Arabidopsis thaliana
ctggattgtggtcattg

SEQ ID NO: 88419 - DNA, 17 bp, Arabidopsis thaliana
ctggattgtttgtggtt

SEQ ID NO: 88420 - DNA, 17 bp, Arabidopsis thaliana
ctggatttaatcgcatg

SEQ ID NO: 88421 - DNA, 17 bp, Arabidopsis thaliana
ctggattttgggatcat

SEQ ID NO: 88422 - DNA, 17 bp, Arabidopsis thaliana
ctggcaaatctagggct

SEQ ID NO: 88423 - DNA, 17 bp, Arabidopsis thaliana
ctggcaacagactgtgc

SEQ ID NO: 88424 - DNA, 17 bp, Arabidopsis thaliana
ctggcaacgacggacat

SEQ ID NO: 88425 - DNA, 17 bp, Arabidopsis thaliana
ctggcaagacggatttg

SEQ ID NO: 88426 - DNA, 17 bp, Arabidopsis thaliana
ctggcaagttgaccttg

SEQ ID NO: 88427 - DNA, 17 bp, Arabidopsis thaliana
ctggcaagttgtccttc

SEQ ID NO: 88428 - DNA, 17 bp, Arabidopsis thaliana
ctggcaatgctaacacc

SEQ ID NO: 88429 - DNA, 17 bp, Arabidopsis thaliana
ctggcaatgctaacact

SEQ ID NO: 88430 - DNA, 17 bp, Arabidopsis thaliana
ctggcacactttttgat

SEQ ID NO: 88431 - DNA, 17 bp, Arabidopsis thaliana
ctggcaccagacttccc

SEQ ID NO: 88432 - DNA, 17 bp, Arabidopsis thaliana
ctggcagaagacacaat

SEQ ID NO: 88433 - DNA, 17 bp, Arabidopsis thaliana
ctggcagatttcgacga

SEQ ID NO: 88434 - DNA, 17 bp, Arabidopsis thaliana
ctggcagctatagcgat

SEQ ID NO: 88435 - DNA, 17 bp, Arabidopsis thaliana
ctggcagctggatttgg

SEQ ID NO: 88436 - DNA, 17 bp, Arabidopsis thaliana
ctggcaggaaagaagcg

SEQ ID NO: 88437 - DNA, 17 bp, Arabidopsis thaliana
ctggcaggatggctctt

SEQ ID NO: 88438 - DNA, 17 bp, Arabidopsis thaliana
ctggcatgatgtgatac

SEQ ID NO: 88439 - DNA, 17 bp, Arabidopsis thaliana
ctggcatgttaagatct

SEQ ID NO: 88440 - DNA, 17 bp, Arabidopsis thaliana
ctggcattttcgtgatt

SEQ ID NO: 88441 - DNA, 17 bp, Arabidopsis thaliana
ctggcattttcgtggtt

SEQ ID NO: 88442 - DNA, 17 bp, Arabidopsis thaliana
ctggccaaagaccgccg

SEQ ID NO: 88443 - DNA, 17 bp, Arabidopsis thaliana
ctggccaacacacgact

SEQ ID NO: 88444 - DNA, 17 bp, Arabidopsis thaliana
ctggccactacattccc

SEQ ID NO: 88445 - DNA, 17 bp, Arabidopsis thaliana
ctggccactttggagat

SEQ ID NO: 88446 - DNA, 17 bp, Arabidopsis thaliana
ctggccatgcccgaaag

SEQ ID NO: 88447 - DNA, 17 bp, Arabidopsis thaliana
ctggcccaacttcacaa

SEQ ID NO: 88448 - DNA, 17 bp, Arabidopsis thaliana
ctggcccggtcgcccta

SEQ ID NO: 88449 - DNA, 17 bp, Arabidopsis thaliana
ctggccctcgtggctga

SEQ ID NO: 88450 - DNA, 17 bp, Arabidopsis thaliana
ctggccctgagcacagc

SEQ ID NO: 88451 - DNA, 17 bp, Arabidopsis thaliana
ctggccgaagcccgtaa

SEQ ID NO: 88452 - DNA, 17 bp, Arabidopsis thaliana
ctggccgacacacgact

SEQ ID NO: 88453 - DNA, 17 bp, Arabidopsis thaliana
ctggccgaggacacgtc

SEQ ID NO: 88454 - DNA, 17 bp, Arabidopsis thaliana
ctggccgagggcacgac

SEQ ID NO: 88455 - DNA, 17 bp, Arabidopsis thaliana
ctggccgagggcacgtc

SEQ ID NO: 88456 - DNA, 17 bp, Arabidopsis thaliana
ctggccgagggcacgtg

SEQ ID NO: 88457 - DNA, 17 bp, Arabidopsis thaliana
ctggccgcgacgaagga

SEQ ID NO: 88458 - DNA, 17 bp, Arabidopsis thaliana
ctggccggacatgtggc

SEQ ID NO: 88459 - DNA, 17 bp, Arabidopsis thaliana
ctggccggggaacggac

SEQ ID NO: 88460 - DNA, 17 bp, Arabidopsis thaliana
ctggccggtgaatgacg

SEQ ID NO: 88461 - DNA, 17 bp, Arabidopsis thaliana
ctggccgtccgtttctt

SEQ ID NO: 88462 - DNA, 17 bp, Arabidopsis thaliana
ctggcctaacggcgtgc

SEQ ID NO: 88463 - DNA, 17 bp, Arabidopsis thaliana
ctggcctcttctaggtg

SEQ ID NO: 88464 - DNA, 17 bp, Arabidopsis thaliana
ctggcgaacggctataa

SEQ ID NO: 88465 - DNA, 17 bp, Arabidopsis thaliana
ctggcgaagctggtgat

SEQ ID NO: 88466 - DNA, 17 bp, Arabidopsis thaliana
ctggcgaagttagaaat

SEQ ID NO: 88467 - DNA, 17 bp, Arabidopsis thaliana
ctggcgacagaaaccga

SEQ ID NO: 88468 - DNA, 17 bp, Arabidopsis thaliana
ctggcgacagaaaccgg

SEQ ID NO: 88469 - DNA, 17 bp, Arabidopsis thaliana
ctggcgacagtcgctgc

SEQ ID NO: 88470 - DNA, 17 bp, Arabidopsis thaliana
ctggcgacagtcgctgg

SEQ ID NO: 88471 - DNA, 17 bp, Arabidopsis thaliana
ctggcgacgcatcattc

SEQ ID NO: 88472 - DNA, 17 bp, Arabidopsis thaliana
ctggcgactaaaaccag

SEQ ID NO: 88473 - DNA, 17 bp, Arabidopsis thaliana
ctggcgactatcgctat

SEQ ID NO: 88474 - DNA, 17 bp, Arabidopsis thaliana
ctggcgactgaaaccaa

SEQ ID NO: 88475 - DNA, 17 bp, Arabidopsis thaliana
ctggcgactgaaaccag

SEQ ID NO: 88476 - DNA, 17 bp, Arabidopsis thaliana
ctggcgactgaaacgaa

SEQ ID NO: 88477 - DNA, 17 bp, Arabidopsis thaliana
ctggcgactggaaccag

SEQ ID NO: 88478 - DNA, 17 bp, Arabidopsis thaliana
ctggcgagtcgggtttg

SEQ ID NO: 88479 - DNA, 17 bp, Arabidopsis thaliana
ctggcgataatctcaga

SEQ ID NO: 88480 - DNA, 17 bp, Arabidopsis thaliana
ctggcgatctcataact

SEQ ID NO: 88481 - DNA, 17 bp, Arabidopsis thaliana
ctggcgatgctactttt

SEQ ID NO: 88482 - DNA, 17 bp, Arabidopsis thaliana
ctggcgatttcaagcgg

SEQ ID NO: 88483 - DNA, 17 bp, Arabidopsis thaliana
ctggcgatttcagcact

SEQ ID NO: 88484 - DNA, 17 bp, Arabidopsis thaliana
ctggcgatttcgagcgg

SEQ ID NO: 88485 - DNA, 17 bp, Arabidopsis thaliana
ctggcgcaaacatctaa

SEQ ID NO: 88486 - DNA, 17 bp, Arabidopsis thaliana
ctggcggaaggacgcgg

SEQ ID NO: 88487 - DNA, 17 bp, Arabidopsis thaliana
ctggcggaaggacgggg

SEQ ID NO: 88488 - DNA, 17 bp, Arabidopsis thaliana
ctggcggaccgatcctg

SEQ ID NO: 88489 - DNA, 17 bp, Arabidopsis thaliana
ctggcggacgacgttcg

SEQ ID NO: 88490 - DNA, 17 bp, Arabidopsis thaliana
ctggcggactggtcaac

SEQ ID NO: 88491 - DNA, 17 bp, Arabidopsis thaliana
ctggcggagagggacac

SEQ ID NO: 88492 - DNA, 17 bp, Arabidopsis thaliana
ctggcggatcaaagaac

SEQ ID NO: 88493 - DNA, 17 bp, Arabidopsis thaliana
ctggcggatcaaagagc

SEQ ID NO: 88494 - DNA, 17 bp, Arabidopsis thaliana
ctggcggattacggtgg

SEQ ID NO: 88495 - DNA, 17 bp, Arabidopsis thaliana
ctggcggattccatact

SEQ ID NO: 88496 - DNA, 17 bp, Arabidopsis thaliana
ctggcggcgctggtggt

SEQ ID NO: 88497 - DNA, 17 bp, Arabidopsis thaliana
ctggcgggaaaattaca

SEQ ID NO: 88498 - DNA, 17 bp, Arabidopsis thaliana
ctggcgggacgggtttg

SEQ ID NO: 88499 - DNA, 17 bp, Arabidopsis thaliana
ctggcggtactagtgct

SEQ ID NO: 88500 - DNA, 17 bp, Arabidopsis thaliana
ctggcgtaaggtaattg

SEQ ID NO: 88501 - DNA, 17 bp, Arabidopsis thaliana
ctggcgtcagaccattc

SEQ ID NO: 88502 - DNA, 17 bp, Arabidopsis thaliana
ctggcgtcggaatcttt

SEQ ID NO: 88503 - DNA, 17 bp, Arabidopsis thaliana
ctggctaagaggccacc

SEQ ID NO: 88504 - DNA, 17 bp, Arabidopsis thaliana
ctggctaagttctggat

SEQ ID NO: 88505 - DNA, 17 bp, Arabidopsis thaliana
ctggctaagttgtccta

SEQ ID NO: 88506 - DNA, 17 bp, Arabidopsis thaliana
ctggctaatgtggagat

SEQ ID NO: 88507 - DNA, 17 bp, Arabidopsis thaliana
ctggctaatgtggagta

SEQ ID NO: 88508 - DNA, 17 bp, Arabidopsis thaliana
ctggctaccatcagatt

SEQ ID NO: 88509 - DNA, 17 bp, Arabidopsis thaliana
ctggctactgaaaccag

SEQ ID NO: 88510 - DNA, 17 bp, Arabidopsis thaliana
ctggctagatcatctgt

SEQ ID NO: 88511 - DNA, 17 bp, Arabidopsis thaliana
ctggctatccgttgact

SEQ ID NO: 88512 - DNA, 17 bp, Arabidopsis thaliana
ctggctatgtcgcagga

SEQ ID NO: 88513 - DNA, 17 bp, Arabidopsis thaliana
ctggctcaactcttaat

SEQ ID NO: 88514 - DNA, 17 bp, Arabidopsis thaliana
ctggctcaggatgaacg

SEQ ID NO: 88515 - DNA, 17 bp, Arabidopsis thaliana
ctggctcatactcagtt

SEQ ID NO: 88516 - DNA, 17 bp, Arabidopsis thaliana
ctggctcattttgacat

SEQ ID NO: 88517 - DNA, 17 bp, Arabidopsis thaliana
ctggctcctccacctcc

SEQ ID NO: 88518 - DNA, 17 bp, Arabidopsis thaliana
ctggctcggactccaag

SEQ ID NO: 88519 - DNA, 17 bp, Arabidopsis thaliana
ctggctctgtggatcga

SEQ ID NO: 88520 - DNA, 17 bp, Arabidopsis thaliana
ctggctgacctacattg

SEQ ID NO: 88521 - DNA, 17 bp, Arabidopsis thaliana
ctggctgactgcattta

SEQ ID NO: 88522 - DNA, 17 bp, Arabidopsis thaliana
ctggctgacttattcac

SEQ ID NO: 88523 - DNA, 17 bp, Arabidopsis thaliana
ctggctgcggcaggagg

SEQ ID NO: 88524 - DNA, 17 bp, Arabidopsis thaliana
ctggcttaactcaggga

SEQ ID NO: 88525 - DNA, 17 bp, Arabidopsis thaliana
ctggcttcattgttgac

SEQ ID NO: 88526 - DNA, 17 bp, Arabidopsis thaliana
ctggcttcggcccagaa

SEQ ID NO: 88527 - DNA, 17 bp, Arabidopsis thaliana
ctggcttgcgtctgctc

SEQ ID NO: 88528 - DNA, 17 bp, Arabidopsis thaliana
ctggcttgcgtttgctc

SEQ ID NO: 88529 - DNA, 17 bp, Arabidopsis thaliana
ctggcttggatatgcaa

SEQ ID NO: 88530 - DNA, 17 bp, Arabidopsis thaliana
ctggcttgtggcagcca

SEQ ID NO: 88531 - DNA, 17 bp, Arabidopsis thaliana
ctggctttaccccgctc

SEQ ID NO: 88532 - DNA, 17 bp, Arabidopsis thaliana
ctggctttgatgattgt

SEQ ID NO: 88533 - DNA, 17 bp, Arabidopsis thaliana
ctgggaaagactattgg

SEQ ID NO: 88534 - DNA, 17 bp, Arabidopsis thaliana
ctgggaacgctaaaatt

SEQ ID NO: 88535 - DNA, 17 bp, Arabidopsis thaliana
ctgggaacggccctccc

SEQ ID NO: 88536 - DNA, 17 bp, Arabidopsis thaliana
ctgggaacggccctctc

SEQ ID NO: 88537 - DNA, 17 bp, Arabidopsis thaliana
ctgggaacggctcagcc

SEQ ID NO: 88538 - DNA, 17 bp, Arabidopsis thaliana
ctgggaacggctctccg

SEQ ID NO: 88539 - DNA, 17 bp, Arabidopsis thaliana
ctgggaacggctctctc

SEQ ID NO: 88540 - DNA, 17 bp, Arabidopsis thaliana
ctgggaactggtggcta

SEQ ID NO: 88541 - DNA, 17 bp, Arabidopsis thaliana
ctgggaagcccaaaggc

SEQ ID NO: 88542 - DNA, 17 bp, Arabidopsis thaliana
ctgggaaggtcggtcga

SEQ ID NO: 88543 - DNA, 17 bp, Arabidopsis thaliana
ctgggaaggtgtggctt

SEQ ID NO: 88544 - DNA, 17 bp, Arabidopsis thaliana
ctgggaagtcctcgtgt

SEQ ID NO: 88545 - DNA, 17 bp, Arabidopsis thaliana
ctgggaatgtgatgatc

SEQ ID NO: 88546 - DNA, 17 bp, Arabidopsis thaliana
ctgggaattggtttcgc

SEQ ID NO: 88547 - DNA, 17 bp, Arabidopsis thaliana
ctgggacaaagcccgta

SEQ ID NO: 88548 - DNA, 17 bp, Arabidopsis thaliana
ctgggacatagagtagg

SEQ ID NO: 88549 - DNA, 17 bp, Arabidopsis thaliana
ctgggaccaagcccgca

SEQ ID NO: 88550 - DNA, 17 bp, Arabidopsis thaliana
ctgggactgaaacacgg

SEQ ID NO: 88551 - DNA, 17 bp, Arabidopsis thaliana
ctgggactgagacacag

SEQ ID NO: 88552 - DNA, 17 bp, Arabidopsis thaliana
ctgggactgagacacgg

SEQ ID NO: 88553 - DNA, 17 bp, Arabidopsis thaliana
ctgggacttgtcggcgg

SEQ ID NO: 88554 - DNA, 17 bp, Arabidopsis thaliana
ctgggagaagactctgc

SEQ ID NO: 88555 - DNA, 17 bp, Arabidopsis thaliana
ctgggagactatgattt

SEQ ID NO: 88556 - DNA, 17 bp, Arabidopsis thaliana
ctgggagagtaggacgt

SEQ ID NO: 88557 - DNA, 17 bp, Arabidopsis thaliana
ctgggagatgtaaggcc

SEQ ID NO: 88558 - DNA, 17 bp, Arabidopsis thaliana
ctgggagatttaccact

SEQ ID NO: 88559 - DNA, 17 bp, Arabidopsis thaliana
ctgggagcaatcacagg

SEQ ID NO: 88560 - DNA, 17 bp, Arabidopsis thaliana
ctgggaggaagaggagg

SEQ ID NO: 88561 - DNA, 17 bp, Arabidopsis thaliana
ctgggaggattacgagt

SEQ ID NO: 88562 - DNA, 17 bp, Arabidopsis thaliana
ctgggaggattacgggt

SEQ ID NO: 88563 - DNA, 17 bp, Arabidopsis thaliana
ctgggaggtgcggatgg

SEQ ID NO: 88564 - DNA, 17 bp, Arabidopsis thaliana
ctgggaggtgcggctgg

SEQ ID NO: 88565 - DNA, 17 bp, Arabidopsis thaliana
ctgggagtgtagtgttc

SEQ ID NO: 88566 - DNA, 17 bp, Arabidopsis thaliana
ctgggatcttccaccta

SEQ ID NO: 88567 - DNA, 17 bp, Arabidopsis thaliana
ctgggatgggtcggccg

SEQ ID NO: 88568 - DNA, 17 bp, Arabidopsis thaliana
ctgggattacggacttc

SEQ ID NO: 88569 - DNA, 17 bp, Arabidopsis thaliana
ctgggattagaccgtcg

SEQ ID NO: 88570 - DNA, 17 bp, Arabidopsis thaliana
ctgggattagcccgtcg

SEQ ID NO: 88571 - DNA, 17 bp, Arabidopsis thaliana
ctgggattcgacttccc

SEQ ID NO: 88572 - DNA, 17 bp, Arabidopsis thaliana
ctgggattgcctttaat

SEQ ID NO: 88573 - DNA, 17 bp, Arabidopsis thaliana
ctgggattggctttggg

SEQ ID NO: 88574 - DNA, 17 bp, Arabidopsis thaliana
ctgggcaaaatatttgt

SEQ ID NO: 88575 - DNA, 17 bp, Arabidopsis thaliana
ctgggcaacaccgtatc

SEQ ID NO: 88576 - DNA, 17 bp, Arabidopsis thaliana
ctgggcaagcccatgga

SEQ ID NO: 88577 - DNA, 17 bp, Arabidopsis thaliana
ctgggcaagtccatggg

SEQ ID NO: 88578 - DNA, 17 bp, Arabidopsis thaliana
ctgggcaatgaagtgta

SEQ ID NO: 88579 - DNA, 17 bp, Arabidopsis thaliana
ctgggcaccccaaattt

SEQ ID NO: 88580 - DNA, 17 bp, Arabidopsis thaliana
ctgggcactgtctcgga

SEQ ID NO: 88581 - DNA, 17 bp, Arabidopsis thaliana
ctgggcagtccgtggga

SEQ ID NO: 88582 - DNA, 17 bp, Arabidopsis thaliana
ctgggcagtccgtgggg

SEQ ID NO: 88583 - DNA, 17 bp, Arabidopsis thaliana
ctgggcatggtcttagg

SEQ ID NO: 88584 - DNA, 17 bp, Arabidopsis thaliana
ctgggccgaaacccgta

SEQ ID NO: 88585 - DNA, 17 bp, Arabidopsis thaliana
ctgggccgaaactcgta

SEQ ID NO: 88586 - DNA, 17 bp, Arabidopsis thaliana
ctgggccgaaatccgta

SEQ ID NO: 88587 - DNA, 17 bp, Arabidopsis thaliana
ctgggccgaagcctgta

SEQ ID NO: 88588 - DNA, 17 bp, Arabidopsis thaliana
ctgggccgaatcccata

SEQ ID NO: 88589 - DNA, 17 bp, Arabidopsis thaliana
ctgggccgaatcttgta

SEQ ID NO: 88590 - DNA, 17 bp, Arabidopsis thaliana
ctgggccgacaggccga

SEQ ID NO: 88591 - DNA, 17 bp, Arabidopsis thaliana
ctgggcctgaccctctt

SEQ ID NO: 88592 - DNA, 17 bp, Arabidopsis thaliana
ctgggcgaatactccta

SEQ ID NO: 88593 - DNA, 17 bp, Arabidopsis thaliana
ctgggcgaatgctccta

SEQ ID NO: 88594 - DNA, 17 bp, Arabidopsis thaliana
ctgggcgacacacgtgc

SEQ ID NO: 88595 - DNA, 17 bp, Arabidopsis thaliana
ctgggcgcgagcccggg

SEQ ID NO: 88596 - DNA, 17 bp, Arabidopsis thaliana
ctgggctaaacggttgt

SEQ ID NO: 88597 - DNA, 17 bp, Arabidopsis thaliana
ctgggctaaagttggtg

SEQ ID NO: 88598 - DNA, 17 bp, Arabidopsis thaliana
ctgggctatgtcggttt

SEQ ID NO: 88599 - DNA, 17 bp, Arabidopsis thaliana
ctgggctcatcccagca

SEQ ID NO: 88600 - DNA, 17 bp, Arabidopsis thaliana
ctgggctcccggtagga

SEQ ID NO: 88601 - DNA, 17 bp, Arabidopsis thaliana
ctgggctccgaccgcgt

SEQ ID NO: 88602 - DNA, 17 bp, Arabidopsis thaliana
ctgggctcgaatcccag

SEQ ID NO: 88603 - DNA, 17 bp, Arabidopsis thaliana
ctgggctcgggggtccc

SEQ ID NO: 88604 - DNA, 17 bp, Arabidopsis thaliana
ctgggctcggggtccca

SEQ ID NO: 88605 - DNA, 17 bp, Arabidopsis thaliana
ctgggctcgtatcccag

SEQ ID NO: 88606 - DNA, 17 bp, Arabidopsis thaliana
ctgggctctatctgtta

SEQ ID NO: 88607 - DNA, 17 bp, Arabidopsis thaliana
ctgggctctgaccgcgt

SEQ ID NO: 88608 - DNA, 17 bp, Arabidopsis thaliana
ctgggctctgaccgctt

SEQ ID NO: 88609 - DNA, 17 bp, Arabidopsis thaliana
ctgggctctgtccgcgt

SEQ ID NO: 88610 - DNA, 17 bp, Arabidopsis thaliana
ctgggctgagcatggtt

SEQ ID NO: 88611 - DNA, 17 bp, Arabidopsis thaliana
ctggggaagttacggac

SEQ ID NO: 88612 - DNA, 17 bp, Arabidopsis thaliana
ctggggacggactggga

SEQ ID NO: 88613 - DNA, 17 bp, Arabidopsis thaliana
ctggggatgaagactgt

SEQ ID NO: 88614 - DNA, 17 bp, Arabidopsis thaliana
ctggggattggctttgg

SEQ ID NO: 88615 - DNA, 17 bp, Arabidopsis thaliana
ctggggcaaggtcctgc

SEQ ID NO: 88616 - DNA, 17 bp, Arabidopsis thaliana
ctggggcaggagatgtc

SEQ ID NO: 88617 - DNA, 17 bp, Arabidopsis thaliana
ctggggcgtagccaagc

SEQ ID NO: 88618 - DNA, 17 bp, Arabidopsis thaliana
ctggggctcccggtagg

SEQ ID NO: 88619 - DNA, 17 bp, Arabidopsis thaliana
ctggggctggaccagaa

SEQ ID NO: 88620 - DNA, 17 bp, Arabidopsis thaliana
ctgggggaattacgggt

SEQ ID NO: 88621 - DNA, 17 bp, Arabidopsis thaliana
ctgggggattacgggtt

SEQ ID NO: 88622 - DNA, 17 bp, Arabidopsis thaliana
ctgggggcacaagtttc

SEQ ID NO: 88623 - DNA, 17 bp, Arabidopsis thaliana
ctgggggctcccggtag

SEQ ID NO: 88624 - DNA, 17 bp, Arabidopsis thaliana
ctgggggctgggctcgg

SEQ ID NO: 88625 - DNA, 17 bp, Arabidopsis thaliana
ctggggggattacgggc

SEQ ID NO: 88626 - DNA, 17 bp, Arabidopsis thaliana
ctggggggattacgggt

SEQ ID NO: 88627 - DNA, 17 bp, Arabidopsis thaliana
ctgggggggctcccggt

SEQ ID NO: 88628 - DNA, 17 bp, Arabidopsis thaliana
ctggggggtgaaccgct

SEQ ID NO: 88629 - DNA, 17 bp, Arabidopsis thaliana
ctgggggtttacgggct

SEQ ID NO: 88630 - DNA, 17 bp, Arabidopsis thaliana
ctggggtcaaggtcggc

SEQ ID NO: 88631 - DNA, 17 bp, Arabidopsis thaliana
ctggggtccagaataca

SEQ ID NO: 88632 - DNA, 17 bp, Arabidopsis thaliana
ctggggtctcccggtag

SEQ ID NO: 88633 - DNA, 17 bp, Arabidopsis thaliana
ctggggttagaccgtcg

SEQ ID NO: 88634 - DNA, 17 bp, Arabidopsis thaliana
ctgggtatcagttgaac

SEQ ID NO: 88635 - DNA, 17 bp, Arabidopsis thaliana
ctgggtatgcgcccttg

SEQ ID NO: 88636 - DNA, 17 bp, Arabidopsis thaliana
ctgggtatgcgtccttg

SEQ ID NO: 88637 - DNA, 17 bp, Arabidopsis thaliana
ctgggtcaaagtccgta

SEQ ID NO: 88638 - DNA, 17 bp, Arabidopsis thaliana
ctgggtcaataaactag

SEQ ID NO: 88639 - DNA, 17 bp, Arabidopsis thaliana
ctgggtcacttctgcct

SEQ ID NO: 88640 - DNA, 17 bp, Arabidopsis thaliana
ctgggtccattgggctt

SEQ ID NO: 88641 - DNA, 17 bp, Arabidopsis thaliana
ctgggtcccacccgcca

SEQ ID NO: 88642 - DNA, 17 bp, Arabidopsis thaliana
ctgggtccgagccctct

SEQ ID NO: 88643 - DNA, 17 bp, Arabidopsis thaliana
ctgggtccttgttaatt

SEQ ID NO: 88644 - DNA, 17 bp, Arabidopsis thaliana
ctgggtcgacgcgggct

SEQ ID NO: 88645 - DNA, 17 bp, Arabidopsis thaliana
ctgggtcgagtacagtt

SEQ ID NO: 88646 - DNA, 17 bp, Arabidopsis thaliana
ctgggtctcccggtagg

SEQ ID NO: 88647 - DNA, 17 bp, Arabidopsis thaliana
ctgggtctgtgttgcga

SEQ ID NO: 88648 - DNA, 17 bp, Arabidopsis thaliana
ctgggtgaaggcttgac

SEQ ID NO: 88649 - DNA, 17 bp, Arabidopsis thaliana
ctgggtgacgaagggta

SEQ ID NO: 88650 - DNA, 17 bp, Arabidopsis thaliana
ctgggtgaggtcgagtg

SEQ ID NO: 88651 - DNA, 17 bp, Arabidopsis thaliana
ctgggtgatctatctat

SEQ ID NO: 88652 - DNA, 17 bp, Arabidopsis thaliana
ctgggtggattacgggt

SEQ ID NO: 88653 - DNA, 17 bp, Arabidopsis thaliana
ctgggtggcgagaccgg

SEQ ID NO: 88654 - DNA, 17 bp, Arabidopsis thaliana
ctgggtggtcaggcttt

SEQ ID NO: 88655 - DNA, 17 bp, Arabidopsis thaliana
ctgggtgtcacaaatcg

SEQ ID NO: 88656 - DNA, 17 bp, Arabidopsis thaliana
ctgggtgtggtcgagta

SEQ ID NO: 88657 - DNA, 17 bp, Arabidopsis thaliana
ctgggtgtggttgagtg

SEQ ID NO: 88658 - DNA, 17 bp, Arabidopsis thaliana
ctgggtgttcggctaaa

SEQ ID NO: 88659 - DNA, 17 bp, Arabidopsis thaliana
ctgggttcctcccggta

SEQ ID NO: 88660 - DNA, 17 bp, Arabidopsis thaliana
ctgggttcgaaacatgt

SEQ ID NO: 88661 - DNA, 17 bp, Arabidopsis thaliana
ctgggttcgactcccgg

SEQ ID NO: 88662 - DNA, 17 bp, Arabidopsis thaliana
ctgggttcgatccccag

SEQ ID NO: 88663 - DNA, 17 bp, Arabidopsis thaliana
ctgggttcgcctcccgg

SEQ ID NO: 88664 - DNA, 17 bp, Arabidopsis thaliana
ctgggttcggctccccg

SEQ ID NO: 88665 - DNA, 17 bp, Arabidopsis thaliana
ctgggttcggctcccgc

SEQ ID NO: 88666 - DNA, 17 bp, Arabidopsis thaliana
ctgggttcggctcccgg

SEQ ID NO: 88667 - DNA, 17 bp, Arabidopsis thaliana
ctgggttcggctgccgg

SEQ ID NO: 88668 - DNA, 17 bp, Arabidopsis thaliana
ctgggttcggtccccag

SEQ ID NO: 88669 - DNA, 17 bp, Arabidopsis thaliana
ctgggttcgtcccaccg

SEQ ID NO: 88670 - DNA, 17 bp, Arabidopsis thaliana
ctgggttcgtctcccgg

SEQ ID NO: 88671 - DNA, 17 bp, Arabidopsis thaliana
ctgggttcgttccccag

SEQ ID NO: 88672 - DNA, 17 bp, Arabidopsis thaliana
ctgggttctcccggtag

SEQ ID NO: 88673 - DNA, 17 bp, Arabidopsis thaliana
ctgggttctgaagcagt

SEQ ID NO: 88674 - DNA, 17 bp, Arabidopsis thaliana
ctgggttgaaccagact

SEQ ID NO: 88675 - DNA, 17 bp, Arabidopsis thaliana
ctgggttgacaagagac

SEQ ID NO: 88676 - DNA, 17 bp, Arabidopsis thaliana
ctgggttgactcccggt

SEQ ID NO: 88677 - DNA, 17 bp, Arabidopsis thaliana
ctgggttggtgcgaccc

SEQ ID NO: 88678 - DNA, 17 bp, Arabidopsis thaliana
ctgggtttagaccgtcg

SEQ ID NO: 88679 - DNA, 17 bp, Arabidopsis thaliana
ctgggtttagacctctg

SEQ ID NO: 88680 - DNA, 17 bp, Arabidopsis thaliana
ctgggtttagtcggttt

SEQ ID NO: 88681 - DNA, 17 bp, Arabidopsis thaliana
ctgggtttccgattatc

SEQ ID NO: 88682 - DNA, 17 bp, Arabidopsis thaliana
ctgggtttcggcgaatt

SEQ ID NO: 88683 - DNA, 17 bp, Arabidopsis thaliana
ctgggtttgaacaatga

SEQ ID NO: 88684 - DNA, 17 bp, Arabidopsis thaliana
ctgggtttggctcccgg

SEQ ID NO: 88685 - DNA, 17 bp, Arabidopsis thaliana
ctgggttttatgttccg

SEQ ID NO: 88686 - DNA, 17 bp, Arabidopsis thaliana
ctgggttttgctttacg

SEQ ID NO: 88687 - DNA, 17 bp, Arabidopsis thaliana
ctgggttttgggatcat

SEQ ID NO: 88688 - DNA, 17 bp, Arabidopsis thaliana
ctggtaaaaacggatca

SEQ ID NO: 88689 - DNA, 17 bp, Arabidopsis thaliana
ctggtaaacatgcgggt

SEQ ID NO: 88690 - DNA, 17 bp, Arabidopsis thaliana
ctggtaaaccagcaggt

SEQ ID NO: 88691 - DNA, 17 bp, Arabidopsis thaliana
ctggtaaaccagcggat

SEQ ID NO: 88692 - DNA, 17 bp, Arabidopsis thaliana
ctggtaaaccagcgggt

SEQ ID NO: 88693 - DNA, 17 bp, Arabidopsis thaliana
ctggtaaacggctatct

SEQ ID NO: 88694 - DNA, 17 bp, Arabidopsis thaliana
ctggtaaactgattgta

SEQ ID NO: 88695 - DNA, 17 bp, Arabidopsis thaliana
ctggtaaatcagcgagt

SEQ ID NO: 88696 - DNA, 17 bp, Arabidopsis thaliana
ctggtaagattaggtgg

SEQ ID NO: 88697 - DNA, 17 bp, Arabidopsis thaliana
ctggtaagtggcgtcct

SEQ ID NO: 88698 - DNA, 17 bp, Arabidopsis thaliana
ctggtaagtggcgtttt

SEQ ID NO: 88699 - DNA, 17 bp, Arabidopsis thaliana
ctggtaattgatgtcgt

SEQ ID NO: 88700 - DNA, 17 bp, Arabidopsis thaliana
ctggtacggacaagggg

SEQ ID NO: 88701 - DNA, 17 bp, Arabidopsis thaliana
ctggtactccgagtgtc

SEQ ID NO: 88702 - DNA, 17 bp, Arabidopsis thaliana
ctggtaggattacgggc

SEQ ID NO: 88703 - DNA, 17 bp, Arabidopsis thaliana
ctggtagggacgtgagc

SEQ ID NO: 88704 - DNA, 17 bp, Arabidopsis thaliana
ctggtaggtgcggatgg

SEQ ID NO: 88705 - DNA, 17 bp, Arabidopsis thaliana
ctggtaggtgcggctgg

SEQ ID NO: 88706 - DNA, 17 bp, Arabidopsis thaliana
ctggtagtcagaaatac

SEQ ID NO: 88707 - DNA, 17 bp, Arabidopsis thaliana
ctggtagtcagaaatgc

SEQ ID NO: 88708 - DNA, 17 bp, Arabidopsis thaliana
ctggtatagccgcttca

SEQ ID NO: 88709 - DNA, 17 bp, Arabidopsis thaliana
ctggtatctatctctgc

SEQ ID NO: 88710 - DNA, 17 bp, Arabidopsis thaliana
ctggtatgatgtgatag

SEQ ID NO: 88711 - DNA, 17 bp, Arabidopsis thaliana
ctggtattcatattggg

SEQ ID NO: 88712 - DNA, 17 bp, Arabidopsis thaliana
ctggtattgatgtagag

SEQ ID NO: 88713 - DNA, 17 bp, Arabidopsis thaliana
ctggtcaacaggtgatg

SEQ ID NO: 88714 - DNA, 17 bp, Arabidopsis thaliana
ctggtcaaccgaaactt

SEQ ID NO: 88715 - DNA, 17 bp, Arabidopsis thaliana
ctggtcaagttgggagg

SEQ ID NO: 88716 - DNA, 17 bp, Arabidopsis thaliana
ctggtcacttctccgat

SEQ ID NO: 88717 - DNA, 17 bp, Arabidopsis thaliana
ctggtcacttgctttcc

SEQ ID NO: 88718 - DNA, 17 bp, Arabidopsis thaliana
ctggtcaggagactgag

SEQ ID NO: 88719 - DNA, 17 bp, Arabidopsis thaliana
ctggtcaggatactcgc

SEQ ID NO: 88720 - DNA, 17 bp, Arabidopsis thaliana
ctggtcaggatactcgg

SEQ ID NO: 88721 - DNA, 17 bp, Arabidopsis thaliana
ctggtcagtttgtcact

SEQ ID NO: 88722 - DNA, 17 bp, Arabidopsis thaliana
ctggtcatatgcccaat

SEQ ID NO: 88723 - DNA, 17 bp, Arabidopsis thaliana
ctggtcatgtggttacg

SEQ ID NO: 88724 - DNA, 17 bp, Arabidopsis thaliana
ctggtcatgtggttatg

SEQ ID NO: 88725 - DNA, 17 bp, Arabidopsis thaliana
ctggtcatgtggttgtg

SEQ ID NO: 88726 - DNA, 17 bp, Arabidopsis thaliana
ctggtccaaatccagct

SEQ ID NO: 88727 - DNA, 17 bp, Arabidopsis thaliana
ctggtcccctccgaagt

SEQ ID NO: 88728 - DNA, 17 bp, Arabidopsis thaliana
ctggtccgagaggatga

SEQ ID NO: 88729 - DNA, 17 bp, Arabidopsis thaliana
ctggtccgctgctactt

SEQ ID NO: 88730 - DNA, 17 bp, Arabidopsis thaliana
ctggtcctagaggatga

SEQ ID NO: 88731 - DNA, 17 bp, Arabidopsis thaliana
ctggtcctcagcgacgg

SEQ ID NO: 88732 - DNA, 17 bp, Arabidopsis thaliana
ctggtcctgtaaacgct

SEQ ID NO: 88733 - DNA, 17 bp, Arabidopsis thaliana
ctggtcctgttacttgc

SEQ ID NO: 88734 - DNA, 17 bp, Arabidopsis thaliana
ctggtccttcccagttt

SEQ ID NO: 88735 - DNA, 17 bp, Arabidopsis thaliana
ctggtcgacaaatcctc

SEQ ID NO: 88736 - DNA, 17 bp, Arabidopsis thaliana
ctggtcgacgaatcctc

SEQ ID NO: 88737 - DNA, 17 bp, Arabidopsis thaliana
ctggtcgacgattcctc

SEQ ID NO: 88738 - DNA, 17 bp, Arabidopsis thaliana
ctggtcgacgatttcaa

SEQ ID NO: 88739 - DNA, 17 bp, Arabidopsis thaliana
ctggtcgacggatctct

SEQ ID NO: 88740 - DNA, 17 bp, Arabidopsis thaliana
ctggtcgactgtggtag

SEQ ID NO: 88741 - DNA, 17 bp, Arabidopsis thaliana
ctggtcgagtatcactt

SEQ ID NO: 88742 - DNA, 17 bp, Arabidopsis thaliana
ctggtcgagtggctgct

SEQ ID NO: 88743 - DNA, 17 bp, Arabidopsis thaliana
ctggtcgatagacttga

SEQ ID NO: 88744 - DNA, 17 bp, Arabidopsis thaliana
ctggtcgatggaacaat

SEQ ID NO: 88745 - DNA, 17 bp, Arabidopsis thaliana
ctggtcgcagtagacta

SEQ ID NO: 88746 - DNA, 17 bp, Arabidopsis thaliana
ctggtcgctggatcctg

SEQ ID NO: 88747 - DNA, 17 bp, Arabidopsis thaliana
ctggtcgctgtcgctgg

SEQ ID NO: 88748 - DNA, 17 bp, Arabidopsis thaliana
ctggtcgtctttatgca

SEQ ID NO: 88749 - DNA, 17 bp, Arabidopsis thaliana
ctggtctaaagattctg

SEQ ID NO: 88750 - DNA, 17 bp, Arabidopsis thaliana
ctggtctacggcaactg

SEQ ID NO: 88751 - DNA, 17 bp, Arabidopsis thaliana
ctggtctccagtcctag

SEQ ID NO: 88752 - DNA, 17 bp, Arabidopsis thaliana
ctggtctcccgtgtgtt

SEQ ID NO: 88753 - DNA, 17 bp, Arabidopsis thaliana
ctggtctgcagcacgcg

SEQ ID NO: 88754 - DNA, 17 bp, Arabidopsis thaliana
ctggtctgcctgggtgt

SEQ ID NO: 88755 - DNA, 17 bp, Arabidopsis thaliana
ctggtcttagctcagtg

SEQ ID NO: 88756 - DNA, 17 bp, Arabidopsis thaliana
ctggtcttgggccttga

SEQ ID NO: 88757 - DNA, 17 bp, Arabidopsis thaliana
ctggtgaaactatgtct

SEQ ID NO: 88758 - DNA, 17 bp, Arabidopsis thaliana
ctggtgaactatgcctg

SEQ ID NO: 88759 - DNA, 17 bp, Arabidopsis thaliana
ctggtgaagaaggtgtc

SEQ ID NO: 88760 - DNA, 17 bp, Arabidopsis thaliana
ctggtgaagatggtgtc

SEQ ID NO: 88761 - DNA, 17 bp, Arabidopsis thaliana
ctggtgacaagtttctg

SEQ ID NO: 88762 - DNA, 17 bp, Arabidopsis thaliana
ctggtgacggcggcgcg

SEQ ID NO: 88763 - DNA, 17 bp, Arabidopsis thaliana
ctggtgactatagtgct

SEQ ID NO: 88764 - DNA, 17 bp, Arabidopsis thaliana
ctggtgactgtcccaat

SEQ ID NO: 88765 - DNA, 17 bp, Arabidopsis thaliana
ctggtgacttaaattag

SEQ ID NO: 88766 - DNA, 17 bp, Arabidopsis thaliana
ctggtgagatatgatcc

SEQ ID NO: 88767 - DNA, 17 bp, Arabidopsis thaliana
ctggtgagattacgggc

SEQ ID NO: 88768 - DNA, 17 bp, Arabidopsis thaliana
ctggtgataggtgttgc

SEQ ID NO: 88769 - DNA, 17 bp, Arabidopsis thaliana
ctggtgatagtcgctgc

SEQ ID NO: 88770 - DNA, 17 bp, Arabidopsis thaliana
ctggtgatatggaccaa

SEQ ID NO: 88771 - DNA, 17 bp, Arabidopsis thaliana
ctggtgatgaagttgat

SEQ ID NO: 88772 - DNA, 17 bp, Arabidopsis thaliana
ctggtgcaggagatgtc

SEQ ID NO: 88773 - DNA, 17 bp, Arabidopsis thaliana
ctggtgcattggtcggc

SEQ ID NO: 88774 - DNA, 17 bp, Arabidopsis thaliana
ctggtgcatttgtactg

SEQ ID NO: 88775 - DNA, 17 bp, Arabidopsis thaliana
ctggtgccagcagccac

SEQ ID NO: 88776 - DNA, 17 bp, Arabidopsis thaliana
ctggtgccagcagcccc

SEQ ID NO: 88777 - DNA, 17 bp, Arabidopsis thaliana
ctggtgccagcagccga

SEQ ID NO: 88778 - DNA, 17 bp, Arabidopsis thaliana
ctggtgccagcagccgc

SEQ ID NO: 88779 - DNA, 17 bp, Arabidopsis thaliana
ctggtgccagcagccgg

SEQ ID NO: 88780 - DNA, 17 bp, Arabidopsis thaliana
ctggtgccagcagccgt

SEQ ID NO: 88781 - DNA, 17 bp, Arabidopsis thaliana
ctggtgccattaatcga

SEQ ID NO: 88782 - DNA, 17 bp, Arabidopsis thaliana
ctggtgcgccaacgggt

SEQ ID NO: 88783 - DNA, 17 bp, Arabidopsis thaliana
ctggtgcgctggattat

SEQ ID NO: 88784 - DNA, 17 bp, Arabidopsis thaliana
ctggtgcggttgtgcca

SEQ ID NO: 88785 - DNA, 17 bp, Arabidopsis thaliana
ctggtgctctacatagg

SEQ ID NO: 88786 - DNA, 17 bp, Arabidopsis thaliana
ctggtgctgagattatc

SEQ ID NO: 88787 - DNA, 17 bp, Arabidopsis thaliana
ctggtgctgatgaagac

SEQ ID NO: 88788 - DNA, 17 bp, Arabidopsis thaliana
ctggtgctggtctctgc

SEQ ID NO: 88789 - DNA, 17 bp, Arabidopsis thaliana
ctggtgctttggctctg

SEQ ID NO: 88790 - DNA, 17 bp, Arabidopsis thaliana
ctggtggaacggttact

SEQ ID NO: 88791 - DNA, 17 bp, Arabidopsis thaliana
ctggtggaagcccgcag

SEQ ID NO: 88792 - DNA, 17 bp, Arabidopsis thaliana
ctggtggagcgatttgt

SEQ ID NO: 88793 - DNA, 17 bp, Arabidopsis thaliana
ctggtggagtgacttgt

SEQ ID NO: 88794 - DNA, 17 bp, Arabidopsis thaliana
ctggtggattacggatt

SEQ ID NO: 88795 - DNA, 17 bp, Arabidopsis thaliana
ctggtggctaagtttgg

SEQ ID NO: 88796 - DNA, 17 bp, Arabidopsis thaliana
ctggtgggttctgagac

SEQ ID NO: 88797 - DNA, 17 bp, Arabidopsis thaliana
ctggtggtcgagtggac

SEQ ID NO: 88798 - DNA, 17 bp, Arabidopsis thaliana
ctggtggtgcatggccg

SEQ ID NO: 88799 - DNA, 17 bp, Arabidopsis thaliana
ctggtgtaagtacaatg

SEQ ID NO: 88800 - DNA, 17 bp, Arabidopsis thaliana
ctggtgtaccgatcaac

SEQ ID NO: 88801 - DNA, 17 bp, Arabidopsis thaliana
ctggtgtataggctcgt

SEQ ID NO: 88802 - DNA, 17 bp, Arabidopsis thaliana
ctggtgtcaaactgtga

SEQ ID NO: 88803 - DNA, 17 bp, Arabidopsis thaliana
ctggtgtcgctaaggca

SEQ ID NO: 88804 - DNA, 17 bp, Arabidopsis thaliana
ctggtgtcgttaaggca

SEQ ID NO: 88805 - DNA, 17 bp, Arabidopsis thaliana
ctggtgtcttttgagtt

SEQ ID NO: 88806 - DNA, 17 bp, Arabidopsis thaliana
ctggtgtgatgatgtgt

SEQ ID NO: 88807 - DNA, 17 bp, Arabidopsis thaliana
ctggtgtgcaaagagtg

SEQ ID NO: 88808 - DNA, 17 bp, Arabidopsis thaliana
ctggtgttcagtcttca

SEQ ID NO: 88809 - DNA, 17 bp, Arabidopsis thaliana
ctggtgttcagtcttta

SEQ ID NO: 88810 - DNA, 17 bp, Arabidopsis thaliana
ctggtgttgtacaactt

SEQ ID NO: 88811 - DNA, 17 bp, Arabidopsis thaliana
ctggtgtttgcttcagc

SEQ ID NO: 88812 - DNA, 17 bp, Arabidopsis thaliana
ctggttaacaaccgtga

SEQ ID NO: 88813 - DNA, 17 bp, Arabidopsis thaliana
ctggttaagatcagcgt

SEQ ID NO: 88814 - DNA, 17 bp, Arabidopsis thaliana
ctggttaatcggaaact

SEQ ID NO: 88815 - DNA, 17 bp, Arabidopsis thaliana
ctggttaatctctactt

SEQ ID NO: 88816 - DNA, 17 bp, Arabidopsis thaliana
ctggttaattccgttaa

SEQ ID NO: 88817 - DNA, 17 bp, Arabidopsis thaliana
ctggttacccatatggc

SEQ ID NO: 88818 - DNA, 17 bp, Arabidopsis thaliana
ctggttacggagggacc

SEQ ID NO: 88819 - DNA, 17 bp, Arabidopsis thaliana
ctggttaggattctgcc

SEQ ID NO: 88820 - DNA, 17 bp, Arabidopsis thaliana
ctggttagtccgggttt

SEQ ID NO: 88821 - DNA, 17 bp, Arabidopsis thaliana
ctggttagtccgtattt

SEQ ID NO: 88822 - DNA, 17 bp, Arabidopsis thaliana
ctggttcaaatccagct

SEQ ID NO: 88823 - DNA, 17 bp, Arabidopsis thaliana
ctggttcaaatccagga

SEQ ID NO: 88824 - DNA, 17 bp, Arabidopsis thaliana
ctggttcaagtgacgtt

SEQ ID NO: 88825 - DNA, 17 bp, Arabidopsis thaliana
ctggttcaccggatcac

SEQ ID NO: 88826 - DNA, 17 bp, Arabidopsis thaliana
ctggttcatcgggtcac

SEQ ID NO: 88827 - DNA, 17 bp, Arabidopsis thaliana
ctggttccaatccagga

SEQ ID NO: 88828 - DNA, 17 bp, Arabidopsis thaliana
ctggttccctccgaagt

SEQ ID NO: 88829 - DNA, 17 bp, Arabidopsis thaliana
ctggttccgttggcttt

SEQ ID NO: 88830 - DNA, 17 bp, Arabidopsis thaliana
ctggttccttgaacggt

SEQ ID NO: 88831 - DNA, 17 bp, Arabidopsis thaliana
ctggttcgaagcccgta

SEQ ID NO: 88832 - DNA, 17 bp, Arabidopsis thaliana
ctggttcgaagccggta

SEQ ID NO: 88833 - DNA, 17 bp, Arabidopsis thaliana
ctggttcgattcccggc

SEQ ID NO: 88834 - DNA, 17 bp, Arabidopsis thaliana
ctggttcgattccggca

SEQ ID NO: 88835 - DNA, 17 bp, Arabidopsis thaliana
ctggttcgattccggga

SEQ ID NO: 88836 - DNA, 17 bp, Arabidopsis thaliana
ctggttcggtcggttta

SEQ ID NO: 88837 - DNA, 17 bp, Arabidopsis thaliana
ctggttcggttccggga

SEQ ID NO: 88838 - DNA, 17 bp, Arabidopsis thaliana
ctggttcgtgccccacg

SEQ ID NO: 88839 - DNA, 17 bp, Arabidopsis thaliana
ctggttcgtttccggca

SEQ ID NO: 88840 - DNA, 17 bp, Arabidopsis thaliana
ctggttcgtttccggct

SEQ ID NO: 88841 - DNA, 17 bp, Arabidopsis thaliana
ctggttcgtttccggga

SEQ ID NO: 88842 - DNA, 17 bp, Arabidopsis thaliana
ctggttctaatccagga

SEQ ID NO: 88843 - DNA, 17 bp, Arabidopsis thaliana
ctggttctccggcaggt

SEQ ID NO: 88844 - DNA, 17 bp, Arabidopsis thaliana
ctggttctgaagatcgc

SEQ ID NO: 88845 - DNA, 17 bp, Arabidopsis thaliana
ctggttctgattggtcg

SEQ ID NO: 88846 - DNA, 17 bp, Arabidopsis thaliana
ctggttctggcggttat

SEQ ID NO: 88847 - DNA, 17 bp, Arabidopsis thaliana
ctggttcttctcctctg

SEQ ID NO: 88848 - DNA, 17 bp, Arabidopsis thaliana
ctggttcttctcctttg

SEQ ID NO: 88849 - DNA, 17 bp, Arabidopsis thaliana
ctggttctttccggcag

SEQ ID NO: 88850 - DNA, 17 bp, Arabidopsis thaliana
ctggttgaaacctgaga

SEQ ID NO: 88851 - DNA, 17 bp, Arabidopsis thaliana
ctggttgaaccgcttga

SEQ ID NO: 88852 - DNA, 17 bp, Arabidopsis thaliana
ctggttgactcagtgat

SEQ ID NO: 88853 - DNA, 17 bp, Arabidopsis thaliana
ctggttgactttccctg

SEQ ID NO: 88854 - DNA, 17 bp, Arabidopsis thaliana
ctggttgagaggtacaa

SEQ ID NO: 88855 - DNA, 17 bp, Arabidopsis thaliana
ctggttgagcgtttgat

SEQ ID NO: 88856 - DNA, 17 bp, Arabidopsis thaliana
ctggttgagtctccagt

SEQ ID NO: 88857 - DNA, 17 bp, Arabidopsis thaliana
ctggttgatgaaccatg

SEQ ID NO: 88858 - DNA, 17 bp, Arabidopsis thaliana
ctggttgcggacagtac

SEQ ID NO: 88859 - DNA, 17 bp, Arabidopsis thaliana
ctggttgcgtggttttg

SEQ ID NO: 88860 - DNA, 17 bp, Arabidopsis thaliana
ctggttgctgtcgctgg

SEQ ID NO: 88861 - DNA, 17 bp, Arabidopsis thaliana
ctggttgcttgggttgc

SEQ ID NO: 88862 - DNA, 17 bp, Arabidopsis thaliana
ctggttggttgccttca

SEQ ID NO: 88863 - DNA, 17 bp, Arabidopsis thaliana
ctggttggttgctttca

SEQ ID NO: 88864 - DNA, 17 bp, Arabidopsis thaliana
ctggttgttcgtttgac

SEQ ID NO: 88865 - DNA, 17 bp, Arabidopsis thaliana
ctggtttagtcactttc

SEQ ID NO: 88866 - DNA, 17 bp, Arabidopsis thaliana
ctggtttatgagctaag

SEQ ID NO: 88867 - DNA, 17 bp, Arabidopsis thaliana
ctggtttatggtttgaa

SEQ ID NO: 88868 - DNA, 17 bp, Arabidopsis thaliana
ctggtttcacagagcag

SEQ ID NO: 88869 - DNA, 17 bp, Arabidopsis thaliana
ctggtttcagccattcc

SEQ ID NO: 88870 - DNA, 17 bp, Arabidopsis thaliana
ctggtttcagcgattag

SEQ ID NO: 88871 - DNA, 17 bp, Arabidopsis thaliana
ctggtttcggctttctt

SEQ ID NO: 88872 - DNA, 17 bp, Arabidopsis thaliana
ctggtttctgcgactat

SEQ ID NO: 88873 - DNA, 17 bp, Arabidopsis thaliana
ctggtttgccaacgaaa

SEQ ID NO: 88874 - DNA, 17 bp, Arabidopsis thaliana
ctggtttgtgcttgccc

SEQ ID NO: 88875 - DNA, 17 bp, Arabidopsis thaliana
ctggttttactcggatg

SEQ ID NO: 88876 - DNA, 17 bp, Arabidopsis thaliana
ctggttttccggcaggt

SEQ ID NO: 88877 - DNA, 17 bp, Arabidopsis thaliana
ctggttttgtagaatcc

SEQ ID NO: 88878 - DNA, 17 bp, Arabidopsis thaliana
ctggtttttcgcaggat

SEQ ID NO: 88879 - DNA, 17 bp, Arabidopsis thaliana
ctgtaaaagaactggtg

SEQ ID NO: 88880 - DNA, 17 bp, Arabidopsis thaliana
ctgtaaaaggctttgtg

SEQ ID NO: 88881 - DNA, 17 bp, Arabidopsis thaliana
ctgtaaacaacattcct

SEQ ID NO: 88882 - DNA, 17 bp, Arabidopsis thaliana
ctgtaaaccggtcttca

SEQ ID NO: 88883 - DNA, 17 bp, Arabidopsis thaliana
ctgtaaactctgattgc

SEQ ID NO: 88884 - DNA, 17 bp, Arabidopsis thaliana
ctgtaaacttgctaaaa

SEQ ID NO: 88885 - DNA, 17 bp, Arabidopsis thaliana
ctgtaaattccgtccaa

SEQ ID NO: 88886 - DNA, 17 bp, Arabidopsis thaliana
ctgtaacagttcagctt

SEQ ID NO: 88887 - DNA, 17 bp, Arabidopsis thaliana
ctgtaacgccccgaccg

SEQ ID NO: 88888 - DNA, 17 bp, Arabidopsis thaliana
ctgtaactacatttgcc

SEQ ID NO: 88889 - DNA, 17 bp, Arabidopsis thaliana
ctgtaactctcattggc

SEQ ID NO: 88890 - DNA, 17 bp, Arabidopsis thaliana
ctgtaactttgacacat

SEQ ID NO: 88891 - DNA, 17 bp, Arabidopsis thaliana
ctgtaaggatactcgcc

SEQ ID NO: 88892 - DNA, 17 bp, Arabidopsis thaliana
ctgtaagtgcttcatcc

SEQ ID NO: 88893 - DNA, 17 bp, Arabidopsis thaliana
ctgtaagtggtcctcct

SEQ ID NO: 88894 - DNA, 17 bp, Arabidopsis thaliana
ctgtaataatcggggtg

SEQ ID NO: 88895 - DNA, 17 bp, Arabidopsis thaliana
ctgtaatccccacaggt

SEQ ID NO: 88896 - DNA, 17 bp, Arabidopsis thaliana
ctgtaatcctccaggcc

SEQ ID NO: 88897 - DNA, 17 bp, Arabidopsis thaliana
ctgtaatctttaggtcg

SEQ ID NO: 88898 - DNA, 17 bp, Arabidopsis thaliana
ctgtaatgacggttcga

SEQ ID NO: 88899 - DNA, 17 bp, Arabidopsis thaliana
ctgtaatggataatttt

SEQ ID NO: 88900 - DNA, 17 bp, Arabidopsis thaliana
ctgtaattattgcaatc

SEQ ID NO: 88901 - DNA, 17 bp, Arabidopsis thaliana
ctgtaattggtcgctga

SEQ ID NO: 88902 - DNA, 17 bp, Arabidopsis thaliana
ctgtaatttctttaccc

SEQ ID NO: 88903 - DNA, 17 bp, Arabidopsis thaliana
ctgtacaaatatgacgc

SEQ ID NO: 88904 - DNA, 17 bp, Arabidopsis thaliana
ctgtacaactttgacag

SEQ ID NO: 88905 - DNA, 17 bp, Arabidopsis thaliana
ctgtacacggatctttc

SEQ ID NO: 88906 - DNA, 17 bp, Arabidopsis thaliana
ctgtacatctttaggtc

SEQ ID NO: 88907 - DNA, 17 bp, Arabidopsis thaliana
ctgtaccgcgattgcga

SEQ ID NO: 88908 - DNA, 17 bp, Arabidopsis thaliana
ctgtacgaaatttgcac

SEQ ID NO: 88909 - DNA, 17 bp, Arabidopsis thaliana
ctgtacgttttctgaca

SEQ ID NO: 88910 - DNA, 17 bp, Arabidopsis thaliana
ctgtactgctgacggat

SEQ ID NO: 88911 - DNA, 17 bp, Arabidopsis thaliana
ctgtactttcggttttc

SEQ ID NO: 88912 - DNA, 17 bp, Arabidopsis thaliana
ctgtacttttttggtcg

SEQ ID NO: 88913 - DNA, 17 bp, Arabidopsis thaliana
ctgtagacggttttgtt

SEQ ID NO: 88914 - DNA, 17 bp, Arabidopsis thaliana
ctgtagagattacggga

SEQ ID NO: 88915 - DNA, 17 bp, Arabidopsis thaliana
ctgtagagattacgggt

SEQ ID NO: 88916 - DNA, 17 bp, Arabidopsis thaliana
ctgtagatggatcctta

SEQ ID NO: 88917 - DNA, 17 bp, Arabidopsis thaliana
ctgtagatggatcggtt

SEQ ID NO: 88918 - DNA, 17 bp, Arabidopsis thaliana
ctgtagatggatctcgc

SEQ ID NO: 88919 - DNA, 17 bp, Arabidopsis thaliana
ctgtagccggaatgatt

SEQ ID NO: 88920 - DNA, 17 bp, Arabidopsis thaliana
ctgtaggattcatcttt

SEQ ID NO: 88921 - DNA, 17 bp, Arabidopsis thaliana
ctgtaggtctcgaaacc

SEQ ID NO: 88922 - DNA, 17 bp, Arabidopsis thaliana
ctgtaggttctgcaggt

SEQ ID NO: 88923 - DNA, 17 bp, Arabidopsis thaliana
ctgtaggttgcaggttt

SEQ ID NO: 88924 - DNA, 17 bp, Arabidopsis thaliana
ctgtagtcagaaatgca

SEQ ID NO: 88925 - DNA, 17 bp, Arabidopsis thaliana
ctgtagtccggtcgccg

SEQ ID NO: 88926 - DNA, 17 bp, Arabidopsis thaliana
ctgtatccgagaacaat

SEQ ID NO: 88927 - DNA, 17 bp, Arabidopsis thaliana
ctgtatgcataacttgg

SEQ ID NO: 88928 - DNA, 17 bp, Arabidopsis thaliana
ctgtatggcccgactga

SEQ ID NO: 88929 - DNA, 17 bp, Arabidopsis thaliana
ctgtattggtgcggttc

SEQ ID NO: 88930 - DNA, 17 bp, Arabidopsis thaliana
ctgtattgttcgacttg

SEQ ID NO: 88931 - DNA, 17 bp, Arabidopsis thaliana
ctgtatttctgactacc

SEQ ID NO: 88932 - DNA, 17 bp, Arabidopsis thaliana
ctgtattttcaggtttt

SEQ ID NO: 88933 - DNA, 17 bp, Arabidopsis thaliana
ctgtcaaaatgtcgact

SEQ ID NO: 88934 - DNA, 17 bp, Arabidopsis thaliana
ctgtcaaacccgtcccg

SEQ ID NO: 88935 - DNA, 17 bp, Arabidopsis thaliana
ctgtcaaactcatcccg

SEQ ID NO: 88936 - DNA, 17 bp, Arabidopsis thaliana
ctgtcaaagttgtacag

SEQ ID NO: 88937 - DNA, 17 bp, Arabidopsis thaliana
ctgtcaaccaaacgcgt

SEQ ID NO: 88938 - DNA, 17 bp, Arabidopsis thaliana
ctgtcaacttggtgtgg

SEQ ID NO: 88939 - DNA, 17 bp, Arabidopsis thaliana
ctgtcaagttgaggcct

SEQ ID NO: 88940 - DNA, 17 bp, Arabidopsis thaliana
ctgtcaagttgccttcc

SEQ ID NO: 88941 - DNA, 17 bp, Arabidopsis thaliana
ctgtcaatctgcacgag

SEQ ID NO: 88942 - DNA, 17 bp, Arabidopsis thaliana
ctgtcaatggaaggaca

SEQ ID NO: 88943 - DNA, 17 bp, Arabidopsis thaliana
ctgtcaattaagatttt

SEQ ID NO: 88944 - DNA, 17 bp, Arabidopsis thaliana
ctgtcaatttaggcggg

SEQ ID NO: 88945 - DNA, 17 bp, Arabidopsis thaliana
ctgtcaccccggccagt

SEQ ID NO: 88946 - DNA, 17 bp, Arabidopsis thaliana
ctgtcacgagagtggat

SEQ ID NO: 88947 - DNA, 17 bp, Arabidopsis thaliana
ctgtcacgcgggtgacc

SEQ ID NO: 88948 - DNA, 17 bp, Arabidopsis thaliana
ctgtcacggtgaaagca

SEQ ID NO: 88949 - DNA, 17 bp, Arabidopsis thaliana
ctgtcactcgacctcac

SEQ ID NO: 88950 - DNA, 17 bp, Arabidopsis thaliana
ctgtcactcgacctgtc

SEQ ID NO: 88951 - DNA, 17 bp, Arabidopsis thaliana
ctgtcactcgatcgcgt

SEQ ID NO: 88952 - DNA, 17 bp, Arabidopsis thaliana
ctgtcactcgatcgctt

SEQ ID NO: 88953 - DNA, 17 bp, Arabidopsis thaliana
ctgtcactgagaagcgt

SEQ ID NO: 88954 - DNA, 17 bp, Arabidopsis thaliana
ctgtcactgtcagccgt

SEQ ID NO: 88955 - DNA, 17 bp, Arabidopsis thaliana
ctgtcagcggactgctc

SEQ ID NO: 88956 - DNA, 17 bp, Arabidopsis thaliana
ctgtcagctacagtcga

SEQ ID NO: 88957 - DNA, 17 bp, Arabidopsis thaliana
ctgtcaggacccgaaag

SEQ ID NO: 88958 - DNA, 17 bp, Arabidopsis thaliana
ctgtcaggtaagttcat

SEQ ID NO: 88959 - DNA, 17 bp, Arabidopsis thaliana
ctgtcagttgatgtgga

SEQ ID NO: 88960 - DNA, 17 bp, Arabidopsis thaliana
ctgtcataccccacttc

SEQ ID NO: 88961 - DNA, 17 bp, Arabidopsis thaliana
ctgtcatcggttctaac

SEQ ID NO: 88962 - DNA, 17 bp, Arabidopsis thaliana
ctgtcatctcgcgagct

SEQ ID NO: 88963 - DNA, 17 bp, Arabidopsis thaliana
ctgtcatctcggtcgat

SEQ ID NO: 88964 - DNA, 17 bp, Arabidopsis thaliana
ctgtccacgaaaggaat

SEQ ID NO: 88965 - DNA, 17 bp, Arabidopsis thaliana
ctgtccagaattgttga

SEQ ID NO: 88966 - DNA, 17 bp, Arabidopsis thaliana
ctgtccagaattgttgc

SEQ ID NO: 88967 - DNA, 17 bp, Arabidopsis thaliana
ctgtccagaccggtgtt

SEQ ID NO: 88968 - DNA, 17 bp, Arabidopsis thaliana
ctgtccagcattattgc

SEQ ID NO: 88969 - DNA, 17 bp, Arabidopsis thaliana
ctgtccagtgagctttg

SEQ ID NO: 88970 - DNA, 17 bp, Arabidopsis thaliana
ctgtccagtttgcttca

SEQ ID NO: 88971 - DNA, 17 bp, Arabidopsis thaliana
ctgtccagtttgcttcc

SEQ ID NO: 88972 - DNA, 17 bp, Arabidopsis thaliana
ctgtccagtttgcttta

SEQ ID NO: 88973 - DNA, 17 bp, Arabidopsis thaliana
ctgtcccatctgaactt

SEQ ID NO: 88974 - DNA, 17 bp, Arabidopsis thaliana
ctgtcccatggagacta

SEQ ID NO: 88975 - DNA, 17 bp, Arabidopsis thaliana
ctgtccccagtggcatt

SEQ ID NO: 88976 - DNA, 17 bp, Arabidopsis thaliana
ctgtcccgccaactcgt

SEQ ID NO: 88977 - DNA, 17 bp, Arabidopsis thaliana
ctgtccctgtctactat

SEQ ID NO: 88978 - DNA, 17 bp, Arabidopsis thaliana
ctgtccgacggtcggtc

SEQ ID NO: 88979 - DNA, 17 bp, Arabidopsis thaliana
ctgtccgacggtcggtg

SEQ ID NO: 88980 - DNA, 17 bp, Arabidopsis thaliana
ctgtccgaggagatgtt

SEQ ID NO: 88981 - DNA, 17 bp, Arabidopsis thaliana
ctgtccgctctgctttg

SEQ ID NO: 88982 - DNA, 17 bp, Arabidopsis thaliana
ctgtccggacatgtggc

SEQ ID NO: 88983 - DNA, 17 bp, Arabidopsis thaliana
ctgtccggatcgagaca

SEQ ID NO: 88984 - DNA, 17 bp, Arabidopsis thaliana
ctgtccgtagcatagtg

SEQ ID NO: 88985 - DNA, 17 bp, Arabidopsis thaliana
ctgtcctaaggtagcga

SEQ ID NO: 88986 - DNA, 17 bp, Arabidopsis thaliana
ctgtcctataggcccaa

SEQ ID NO: 88987 - DNA, 17 bp, Arabidopsis thaliana
ctgtcctccgccgattt

SEQ ID NO: 88988 - DNA, 17 bp, Arabidopsis thaliana
ctgtcctgagcggtaat

SEQ ID NO: 88989 - DNA, 17 bp, Arabidopsis thaliana
ctgtcctggtgagatat

SEQ ID NO: 88990 - DNA, 17 bp, Arabidopsis thaliana
ctgtcctggttccattc

SEQ ID NO: 88991 - DNA, 17 bp, Arabidopsis thaliana
ctgtcgaaactgcgtac

SEQ ID NO: 88992 - DNA, 17 bp, Arabidopsis thaliana
ctgtcgaacaggagtgg

SEQ ID NO: 88993 - DNA, 17 bp, Arabidopsis thaliana
ctgtcgaataaaatgca

SEQ ID NO: 88994 - DNA, 17 bp, Arabidopsis thaliana
ctgtcgacagttttcag

SEQ ID NO: 88995 - DNA, 17 bp, Arabidopsis thaliana
ctgtcgaccatttgctg

SEQ ID NO: 88996 - DNA, 17 bp, Arabidopsis thaliana
ctgtcgaccgtttgcta

SEQ ID NO: 88997 - DNA, 17 bp, Arabidopsis thaliana
ctgtcgagtaaggagtg

SEQ ID NO: 88998 - DNA, 17 bp, Arabidopsis thaliana
ctgtcgagtaaggattg

SEQ ID NO: 88999 - DNA, 17 bp, Arabidopsis thaliana
ctgtcgatcttgagctt

SEQ ID NO: 89000 - DNA, 17 bp, Arabidopsis thaliana
ctgtcgatgggagtgca

SEQ ID NO: 89001 - DNA, 17 bp, Arabidopsis thaliana
ctgtcgatttgacctcc

SEQ ID NO: 89002 - DNA, 17 bp, Arabidopsis thaliana
ctgtcgcaaaggatatc

SEQ ID NO: 89003 - DNA, 17 bp, Arabidopsis thaliana
ctgtcgcaccacgaggc

SEQ ID NO: 89004 - DNA, 17 bp, Arabidopsis thaliana
ctgtcgcaccgcttgcc

SEQ ID NO: 89005 - DNA, 17 bp, Arabidopsis thaliana
ctgtcgcatcctgtaga

SEQ ID NO: 89006 - DNA, 17 bp, Arabidopsis thaliana
ctgtcgcatgggggcgc

SEQ ID NO: 89007 - DNA, 17 bp, Arabidopsis thaliana
ctgtcgcatttgggtct

SEQ ID NO: 89008 - DNA, 17 bp, Arabidopsis thaliana
ctgtcgcatttgggtgt

SEQ ID NO: 89009 - DNA, 17 bp, Arabidopsis thaliana
ctgtcgccagcgaccag

SEQ ID NO: 89010 - DNA, 17 bp, Arabidopsis thaliana
ctgtcgccggatggata

SEQ ID NO: 89011 - DNA, 17 bp, Arabidopsis thaliana
ctgtcgccgtgtcgggt

SEQ ID NO: 89012 - DNA, 17 bp, Arabidopsis thaliana
ctgtcgccttgcctgta

SEQ ID NO: 89013 - DNA, 17 bp, Arabidopsis thaliana
ctgtcgcgaccatcacg

SEQ ID NO: 89014 - DNA, 17 bp, Arabidopsis thaliana
ctgtcgcgtcgcagacc

SEQ ID NO: 89015 - DNA, 17 bp, Arabidopsis thaliana
ctgtcgctgaaactgag

SEQ ID NO: 89016 - DNA, 17 bp, Arabidopsis thaliana
ctgtcgctgacgactga

SEQ ID NO: 89017 - DNA, 17 bp, Arabidopsis thaliana
ctgtcgctgagacaatc

SEQ ID NO: 89018 - DNA, 17 bp, Arabidopsis thaliana
ctgtcgctggtcgctgg

SEQ ID NO: 89019 - DNA, 17 bp, Arabidopsis thaliana
ctgtcgctggtgactaa

SEQ ID NO: 89020 - DNA, 17 bp, Arabidopsis thaliana
ctgtcgctggttgctgt

SEQ ID NO: 89021 - DNA, 17 bp, Arabidopsis thaliana
ctgtcgctggttgcttt

SEQ ID NO: 89022 - DNA, 17 bp, Arabidopsis thaliana
ctgtcggaaaatagtgt

SEQ ID NO: 89023 - DNA, 17 bp, Arabidopsis thaliana
ctgtcggagaaggcgca

SEQ ID NO: 89024 - DNA, 17 bp, Arabidopsis thaliana
ctgtcggaggaggcgca

SEQ ID NO: 89025 - DNA, 17 bp, Arabidopsis thaliana
ctgtcggataaaatgca

SEQ ID NO: 89026 - DNA, 17 bp, Arabidopsis thaliana
ctgtcggattgctactg

SEQ ID NO: 89027 - DNA, 17 bp, Arabidopsis thaliana
ctgtcggccaaggtgtg

SEQ ID NO: 89028 - DNA, 17 bp, Arabidopsis thaliana
ctgtcggcgatacgctc

SEQ ID NO: 89029 - DNA, 17 bp, Arabidopsis thaliana
ctgtcgggacccgaaag

SEQ ID NO: 89030 - DNA, 17 bp, Arabidopsis thaliana
ctgtcgggacccgtaag

SEQ ID NO: 89031 - DNA, 17 bp, Arabidopsis thaliana
ctgtcggttcggccaat

SEQ ID NO: 89032 - DNA, 17 bp, Arabidopsis thaliana
ctgtcggttcgtcggcg

SEQ ID NO: 89033 - DNA, 17 bp, Arabidopsis thaliana
ctgtcgtcagctcgtcc

SEQ ID NO: 89034 - DNA, 17 bp, Arabidopsis thaliana
ctgtcgtcagctcgtgc

SEQ ID NO: 89035 - DNA, 17 bp, Arabidopsis thaliana
ctgtcgtcatcgttttg

SEQ ID NO: 89036 - DNA, 17 bp, Arabidopsis thaliana
ctgtcgtcgaagctctg

SEQ ID NO: 89037 - DNA, 17 bp, Arabidopsis thaliana
ctgtcgtcggtagcggc

SEQ ID NO: 89038 - DNA, 17 bp, Arabidopsis thaliana
ctgtcgtcgttcaggcc

SEQ ID NO: 89039 - DNA, 17 bp, Arabidopsis thaliana
ctgtcgtctaacgtccc

SEQ ID NO: 89040 - DNA, 17 bp, Arabidopsis thaliana
ctgtcgtctcggttcgc

SEQ ID NO: 89041 - DNA, 17 bp, Arabidopsis thaliana
ctgtcgtctgagacact

SEQ ID NO: 89042 - DNA, 17 bp, Arabidopsis thaliana
ctgtcgtggatatagta

SEQ ID NO: 89043 - DNA, 17 bp, Arabidopsis thaliana
ctgtcgtggatgagtgg

SEQ ID NO: 89044 - DNA, 17 bp, Arabidopsis thaliana
ctgtcgtggctaacttg

SEQ ID NO: 89045 - DNA, 17 bp, Arabidopsis thaliana
ctgtctacgagtcaggt

SEQ ID NO: 89046 - DNA, 17 bp, Arabidopsis thaliana
ctgtctacgagtcgggt

SEQ ID NO: 89047 - DNA, 17 bp, Arabidopsis thaliana
ctgtctacggtaatcgg

SEQ ID NO: 89048 - DNA, 17 bp, Arabidopsis thaliana
ctgtctactatccagcg

SEQ ID NO: 89049 - DNA, 17 bp, Arabidopsis thaliana
ctgtctagaaccgacaa

SEQ ID NO: 89050 - DNA, 17 bp, Arabidopsis thaliana
ctgtctagtttgcttca

SEQ ID NO: 89051 - DNA, 17 bp, Arabidopsis thaliana
ctgtctatccagggcct

SEQ ID NO: 89052 - DNA, 17 bp, Arabidopsis thaliana
ctgtctattactcgacc

SEQ ID NO: 89053 - DNA, 17 bp, Arabidopsis thaliana
ctgtctcacgcgtgcgg

SEQ ID NO: 89054 - DNA, 17 bp, Arabidopsis thaliana
ctgtctccgacatggac

SEQ ID NO: 89055 - DNA, 17 bp, Arabidopsis thaliana
ctgtctccggattgatt

SEQ ID NO: 89056 - DNA, 17 bp, Arabidopsis thaliana
ctgtctccgtttccatc

SEQ ID NO: 89057 - DNA, 17 bp, Arabidopsis thaliana
ctgtctcgaaggctgct

SEQ ID NO: 89058 - DNA, 17 bp, Arabidopsis thaliana
ctgtctcgccaacccag

SEQ ID NO: 89059 - DNA, 17 bp, Arabidopsis thaliana
ctgtctctccggcgact

SEQ ID NO: 89060 - DNA, 17 bp, Arabidopsis thaliana
ctgtctctgttgacaac

SEQ ID NO: 89061 - DNA, 17 bp, Arabidopsis thaliana
ctgtctctgttgacgac

SEQ ID NO: 89062 - DNA, 17 bp, Arabidopsis thaliana
ctgtctctgttgtagca

SEQ ID NO: 89063 - DNA, 17 bp, Arabidopsis thaliana
ctgtctgacccgtagaa

SEQ ID NO: 89064 - DNA, 17 bp, Arabidopsis thaliana
ctgtctgcccgttgctc

SEQ ID NO: 89065 - DNA, 17 bp, Arabidopsis thaliana
ctgtctgcggttcgaat

SEQ ID NO: 89066 - DNA, 17 bp, Arabidopsis thaliana
ctgtctgcttagattac

SEQ ID NO: 89067 - DNA, 17 bp, Arabidopsis thaliana
ctgtctggaccaccgcg

SEQ ID NO: 89068 - DNA, 17 bp, Arabidopsis thaliana
ctgtctggccgagggca

SEQ ID NO: 89069 - DNA, 17 bp, Arabidopsis thaliana
ctgtctgggtaccgctg

SEQ ID NO: 89070 - DNA, 17 bp, Arabidopsis thaliana
ctgtctggtgcgtcttt

SEQ ID NO: 89071 - DNA, 17 bp, Arabidopsis thaliana
ctgtctggtgtcctagg

SEQ ID NO: 89072 - DNA, 17 bp, Arabidopsis thaliana
ctgtctgtaccaccgcg

SEQ ID NO: 89073 - DNA, 17 bp, Arabidopsis thaliana
ctgtctgtcccgagttt

SEQ ID NO: 89074 - DNA, 17 bp, Arabidopsis thaliana
ctgtctgtgatgtgcga

SEQ ID NO: 89075 - DNA, 17 bp, Arabidopsis thaliana
ctgtctgtgattgctcc

SEQ ID NO: 89076 - DNA, 17 bp, Arabidopsis thaliana
ctgtctgtggtgttgga

SEQ ID NO: 89077 - DNA, 17 bp, Arabidopsis thaliana
ctgtctgtgttgctgca

SEQ ID NO: 89078 - DNA, 17 bp, Arabidopsis thaliana
ctgtctgttactcgacc

SEQ ID NO: 89079 - DNA, 17 bp, Arabidopsis thaliana
ctgtcttagactttgct

SEQ ID NO: 89080 - DNA, 17 bp, Arabidopsis thaliana
ctgtcttatgtgtgtga

SEQ ID NO: 89081 - DNA, 17 bp, Arabidopsis thaliana
ctgtcttccttcgccat

SEQ ID NO: 89082 - DNA, 17 bp, Arabidopsis thaliana
ctgtcttgcgcctgatt

SEQ ID NO: 89083 - DNA, 17 bp, Arabidopsis thaliana
ctgtcttgcttctgggc

SEQ ID NO: 89084 - DNA, 17 bp, Arabidopsis thaliana
ctgtcttgcttctgtgc

SEQ ID NO: 89085 - DNA, 17 bp, Arabidopsis thaliana
ctgtcttgggcctgtgg

SEQ ID NO: 89086 - DNA, 17 bp, Arabidopsis thaliana
ctgtcttggtgggatca

SEQ ID NO: 89087 - DNA, 17 bp, Arabidopsis thaliana
ctgtgaaactgcgaatg

SEQ ID NO: 89088 - DNA, 17 bp, Arabidopsis thaliana
ctgtgaaaggtgtgaag

SEQ ID NO: 89089 - DNA, 17 bp, Arabidopsis thaliana
ctgtgaacctgcggaag

SEQ ID NO: 89090 - DNA, 17 bp, Arabidopsis thaliana
ctgtgaactttttgtac

SEQ ID NO: 89091 - DNA, 17 bp, Arabidopsis thaliana
ctgtgaagatgtctgga

SEQ ID NO: 89092 - DNA, 17 bp, Arabidopsis thaliana
ctgtgaagattttccag

SEQ ID NO: 89093 - DNA, 17 bp, Arabidopsis thaliana
ctgtgaagcgtaacctc

SEQ ID NO: 89094 - DNA, 17 bp, Arabidopsis thaliana
ctgtgaatccggaaact

SEQ ID NO: 89095 - DNA, 17 bp, Arabidopsis thaliana
ctgtgaatcttcaggaa

SEQ ID NO: 89096 - DNA, 17 bp, Arabidopsis thaliana
ctgtgaatgtcgacgtg

SEQ ID NO: 89097 - DNA, 17 bp, Arabidopsis thaliana
ctgtgaattgccaagag

SEQ ID NO: 89098 - DNA, 17 bp, Arabidopsis thaliana
ctgtgacaaagtaaaca

SEQ ID NO: 89099 - DNA, 17 bp, Arabidopsis thaliana
ctgtgacactatcatcg

SEQ ID NO: 89100 - DNA, 17 bp, Arabidopsis thaliana
ctgtgacagttgagcag

SEQ ID NO: 89101 - DNA, 17 bp, Arabidopsis thaliana
ctgtgacatctttcaga

SEQ ID NO: 89102 - DNA, 17 bp, Arabidopsis thaliana
ctgtgaccattctttct

SEQ ID NO: 89103 - DNA, 17 bp, Arabidopsis thaliana
ctgtgaccggtggtccc

SEQ ID NO: 89104 - DNA, 17 bp, Arabidopsis thaliana
ctgtgacctactgttca

SEQ ID NO: 89105 - DNA, 17 bp, Arabidopsis thaliana
ctgtgacctcacatgtt

SEQ ID NO: 89106 - DNA, 17 bp, Arabidopsis thaliana
ctgtgacggaggtggtg

SEQ ID NO: 89107 - DNA, 17 bp, Arabidopsis thaliana
ctgtgactaaatccagg

SEQ ID NO: 89108 - DNA, 17 bp, Arabidopsis thaliana
ctgtgactcaaggttag

SEQ ID NO: 89109 - DNA, 17 bp, Arabidopsis thaliana
ctgtgacttgccgtttc

SEQ ID NO: 89110 - DNA, 17 bp, Arabidopsis thaliana
ctgtgagaccaagtcca

SEQ ID NO: 89111 - DNA, 17 bp, Arabidopsis thaliana
ctgtgagataggatgta

SEQ ID NO: 89112 - DNA, 17 bp, Arabidopsis thaliana
ctgtgagtttgcgcagt

SEQ ID NO: 89113 - DNA, 17 bp, Arabidopsis thaliana
ctgtgatccaactgaag

SEQ ID NO: 89114 - DNA, 17 bp, Arabidopsis thaliana
ctgtgatccgtcaagtc

SEQ ID NO: 89115 - DNA, 17 bp, Arabidopsis thaliana
ctgtgatcgagtacaac

SEQ ID NO: 89116 - DNA, 17 bp, Arabidopsis thaliana
ctgtgatgaaattggct

SEQ ID NO: 89117 - DNA, 17 bp, Arabidopsis thaliana
ctgtgatgatcttgttc

SEQ ID NO: 89118 - DNA, 17 bp, Arabidopsis thaliana
ctgtgatgatgaccgga

SEQ ID NO: 89119 - DNA, 17 bp, Arabidopsis thaliana
ctgtgatgatgtgaagc

SEQ ID NO: 89120 - DNA, 17 bp, Arabidopsis thaliana
ctgtgatggtgtagact

SEQ ID NO: 89121 - DNA, 17 bp, Arabidopsis thaliana
ctgtgatgtgcgaagca

SEQ ID NO: 89122 - DNA, 17 bp, Arabidopsis thaliana
ctgtgattcgcaatgca

SEQ ID NO: 89123 - DNA, 17 bp, Arabidopsis thaliana
ctgtgatttttgagcag

SEQ ID NO: 89124 - DNA, 17 bp, Arabidopsis thaliana
ctgtgcaaatattgtcc

SEQ ID NO: 89125 - DNA, 17 bp, Arabidopsis thaliana
ctgtgcaacgagaacaa

SEQ ID NO: 89126 - DNA, 17 bp, Arabidopsis thaliana
ctgtgcagattgtcaga

SEQ ID NO: 89127 - DNA, 17 bp, Arabidopsis thaliana
ctgtgcaggttgtcagg

SEQ ID NO: 89128 - DNA, 17 bp, Arabidopsis thaliana
ctgtgccagcagccgcg

SEQ ID NO: 89129 - DNA, 17 bp, Arabidopsis thaliana
ctgtgccatttcgggta

SEQ ID NO: 89130 - DNA, 17 bp, Arabidopsis thaliana
ctgtgcgaatgttattc

SEQ ID NO: 89131 - DNA, 17 bp, Arabidopsis thaliana
ctgtgcgatctcggagc

SEQ ID NO: 89132 - DNA, 17 bp, Arabidopsis thaliana
ctgtgcgattcggtcag

SEQ ID NO: 89133 - DNA, 17 bp, Arabidopsis thaliana
ctgtgcggatttgggga

SEQ ID NO: 89134 - DNA, 17 bp, Arabidopsis thaliana
ctgtgcggttcggttac

SEQ ID NO: 89135 - DNA, 17 bp, Arabidopsis thaliana
ctgtgcggttttgggtg

SEQ ID NO: 89136 - DNA, 17 bp, Arabidopsis thaliana
ctgtgcgtatcgacccg

SEQ ID NO: 89137 - DNA, 17 bp, Arabidopsis thaliana
ctgtgcgttctattatt

SEQ ID NO: 89138 - DNA, 17 bp, Arabidopsis thaliana
ctgtgctacttctcaat

SEQ ID NO: 89139 - DNA, 17 bp, Arabidopsis thaliana
ctgtgctgacttggctc

SEQ ID NO: 89140 - DNA, 17 bp, Arabidopsis thaliana
ctgtgctgcgaactgaa

SEQ ID NO: 89141 - DNA, 17 bp, Arabidopsis thaliana
ctgtgctggcgacgcat

SEQ ID NO: 89142 - DNA, 17 bp, Arabidopsis thaliana
ctgtgcttgctggctgg

SEQ ID NO: 89143 - DNA, 17 bp, Arabidopsis thaliana
ctgtgctttagctcctc

SEQ ID NO: 89144 - DNA, 17 bp, Arabidopsis thaliana
ctgtggaagatccagct

SEQ ID NO: 89145 - DNA, 17 bp, Arabidopsis thaliana
ctgtggagttctctcaa

SEQ ID NO: 89146 - DNA, 17 bp, Arabidopsis thaliana
ctgtggatgataaggag

SEQ ID NO: 89147 - DNA, 17 bp, Arabidopsis thaliana
ctgtggattctcttcga

SEQ ID NO: 89148 - DNA, 17 bp, Arabidopsis thaliana
ctgtggccctgcaggaa

SEQ ID NO: 89149 - DNA, 17 bp, Arabidopsis thaliana
ctgtggcctgaggaacc

SEQ ID NO: 89150 - DNA, 17 bp, Arabidopsis thaliana
ctgtggcggcgcagaga

SEQ ID NO: 89151 - DNA, 17 bp, Arabidopsis thaliana
ctgtggcgttctctcag

SEQ ID NO: 89152 - DNA, 17 bp, Arabidopsis thaliana
ctgtggctccaaagaca

SEQ ID NO: 89153 - DNA, 17 bp, Arabidopsis thaliana
ctgtggctcttgttgcg

SEQ ID NO: 89154 - DNA, 17 bp, Arabidopsis thaliana
ctgtggctgaagctaat

SEQ ID NO: 89155 - DNA, 17 bp, Arabidopsis thaliana
ctgtggctgagtgttcc

SEQ ID NO: 89156 - DNA, 17 bp, Arabidopsis thaliana
ctgtgggagcggttcta

SEQ ID NO: 89157 - DNA, 17 bp, Arabidopsis thaliana
ctgtgggatgggtcggc

SEQ ID NO: 89158 - DNA, 17 bp, Arabidopsis thaliana
ctgtgggcccattcgac

SEQ ID NO: 89159 - DNA, 17 bp, Arabidopsis thaliana
ctgtgggcctgcgtgcc

SEQ ID NO: 89160 - DNA, 17 bp, Arabidopsis thaliana
ctgtgggctccccatcc

SEQ ID NO: 89161 - DNA, 17 bp, Arabidopsis thaliana
ctgtgggctccccattc

SEQ ID NO: 89162 - DNA, 17 bp, Arabidopsis thaliana
ctgtgggctgttgttct

SEQ ID NO: 89163 - DNA, 17 bp, Arabidopsis thaliana
ctgtggggattacaggc

SEQ ID NO: 89164 - DNA, 17 bp, Arabidopsis thaliana
ctgtgggtcattgtgcg

SEQ ID NO: 89165 - DNA, 17 bp, Arabidopsis thaliana
ctgtgggtgcttcgccg

SEQ ID NO: 89166 - DNA, 17 bp, Arabidopsis thaliana
ctgtgggtggtaggcag

SEQ ID NO: 89167 - DNA, 17 bp, Arabidopsis thaliana
ctgtgggttcgagtccc

SEQ ID NO: 89168 - DNA, 17 bp, Arabidopsis thaliana
ctgtgggttcgggtccc

SEQ ID NO: 89169 - DNA, 17 bp, Arabidopsis thaliana
ctgtgggttcgtgtccc

SEQ ID NO: 89170 - DNA, 17 bp, Arabidopsis thaliana
ctgtgggtttcccattc

SEQ ID NO: 89171 - DNA, 17 bp, Arabidopsis thaliana
ctgtggtctcaagaccc

SEQ ID NO: 89172 - DNA, 17 bp, Arabidopsis thaliana
ctgtggtgacttaggtt

SEQ ID NO: 89173 - DNA, 17 bp, Arabidopsis thaliana
ctgtggtgatataccct

SEQ ID NO: 89174 - DNA, 17 bp, Arabidopsis thaliana
ctgtggtgatccttgcg

SEQ ID NO: 89175 - DNA, 17 bp, Arabidopsis thaliana
ctgtggtttagacaaag

SEQ ID NO: 89176 - DNA, 17 bp, Arabidopsis thaliana
ctgtggtttcaggcttt

SEQ ID NO: 89177 - DNA, 17 bp, Arabidopsis thaliana
ctgtggtttcgacaaag

SEQ ID NO: 89178 - DNA, 17 bp, Arabidopsis thaliana
ctgtgtaagactttggt

SEQ ID NO: 89179 - DNA, 17 bp, Arabidopsis thaliana
ctgtgtaagcccaagtg

SEQ ID NO: 89180 - DNA, 17 bp, Arabidopsis thaliana
ctgtgtaatccggattt

SEQ ID NO: 89181 - DNA, 17 bp, Arabidopsis thaliana
ctgtgtaatcgatctgg

SEQ ID NO: 89182 - DNA, 17 bp, Arabidopsis thaliana
ctgtgtactaactgcag

SEQ ID NO: 89183 - DNA, 17 bp, Arabidopsis thaliana
ctgtgtactcatcggag

SEQ ID NO: 89184 - DNA, 17 bp, Arabidopsis thaliana
ctgtgtcatttccagca

SEQ ID NO: 89185 - DNA, 17 bp, Arabidopsis thaliana
ctgtgtccgagtatctg

SEQ ID NO: 89186 - DNA, 17 bp, Arabidopsis thaliana
ctgtgtgacaccgcgct

SEQ ID NO: 89187 - DNA, 17 bp, Arabidopsis thaliana
ctgtgtgcgagtcaacg

SEQ ID NO: 89188 - DNA, 17 bp, Arabidopsis thaliana
ctgtgtgcggtattctt

SEQ ID NO: 89189 - DNA, 17 bp, Arabidopsis thaliana
ctgtgtgtcggccttgc

SEQ ID NO: 89190 - DNA, 17 bp, Arabidopsis thaliana
ctgtgttaccatctccg

SEQ ID NO: 89191 - DNA, 17 bp, Arabidopsis thaliana
ctgtgttcgtttgcttg

SEQ ID NO: 89192 - DNA, 17 bp, Arabidopsis thaliana
ctgtgttctaagttggc

SEQ ID NO: 89193 - DNA, 17 bp, Arabidopsis thaliana
ctgtgttctatgttggc

SEQ ID NO: 89194 - DNA, 17 bp, Arabidopsis thaliana
ctgtgttgactgtagct

SEQ ID NO: 89195 - DNA, 17 bp, Arabidopsis thaliana
ctgtgttggctacagct

SEQ ID NO: 89196 - DNA, 17 bp, Arabidopsis thaliana
ctgtgttggctatacct

SEQ ID NO: 89197 - DNA, 17 bp, Arabidopsis thaliana
ctgtgttgttcgtttga

SEQ ID NO: 89198 - DNA, 17 bp, Arabidopsis thaliana
ctgtgtttcatagtcga

SEQ ID NO: 89199 - DNA, 17 bp, Arabidopsis thaliana
ctgtgtttctccatctt

SEQ ID NO: 89200 - DNA, 17 bp, Arabidopsis thaliana
ctgtgtttgatttagtt

SEQ ID NO: 89201 - DNA, 17 bp, Arabidopsis thaliana
ctgtgtttgccggagct

SEQ ID NO: 89202 - DNA, 17 bp, Arabidopsis thaliana
ctgtgttttgatggatc

SEQ ID NO: 89203 - DNA, 17 bp, Arabidopsis thaliana
ctgttaaaacgccgaaa

SEQ ID NO: 89204 - DNA, 17 bp, Arabidopsis thaliana
ctgttaaccaaacggtc

SEQ ID NO: 89205 - DNA, 17 bp, Arabidopsis thaliana
ctgttaaccaaacgttc

SEQ ID NO: 89206 - DNA, 17 bp, Arabidopsis thaliana
ctgttaatttggcgaca

SEQ ID NO: 89207 - DNA, 17 bp, Arabidopsis thaliana
ctgttacagcattgttg

SEQ ID NO: 89208 - DNA, 17 bp, Arabidopsis thaliana
ctgttaccattcagacg

SEQ ID NO: 89209 - DNA, 17 bp, Arabidopsis thaliana
ctgttacgcttgtgaca

SEQ ID NO: 89210 - DNA, 17 bp, Arabidopsis thaliana
ctgttactcgacctgtc

SEQ ID NO: 89211 - DNA, 17 bp, Arabidopsis thaliana
ctgttagcgtgtaaggc

SEQ ID NO: 89212 - DNA, 17 bp, Arabidopsis thaliana
ctgttagcgttttcgga

SEQ ID NO: 89213 - DNA, 17 bp, Arabidopsis thaliana
ctgttagggtagttgac

SEQ ID NO: 89214 - DNA, 17 bp, Arabidopsis thaliana
ctgttagtatcggggcc

SEQ ID NO: 89215 - DNA, 17 bp, Arabidopsis thaliana
ctgttagtcctggtggt

SEQ ID NO: 89216 - DNA, 17 bp, Arabidopsis thaliana
ctgttagttggagcggt

SEQ ID NO: 89217 - DNA, 17 bp, Arabidopsis thaliana
ctgttagttggggtttg

SEQ ID NO: 89218 - DNA, 17 bp, Arabidopsis thaliana
ctgttatcaccttgctg

SEQ ID NO: 89219 - DNA, 17 bp, Arabidopsis thaliana
ctgttatccctctcata

SEQ ID NO: 89220 - DNA, 17 bp, Arabidopsis thaliana
ctgttatggtttctgac

SEQ ID NO: 89221 - DNA, 17 bp, Arabidopsis thaliana
ctgttattgcttggctt

SEQ ID NO: 89222 - DNA, 17 bp, Arabidopsis thaliana
ctgttattttttggcga

SEQ ID NO: 89223 - DNA, 17 bp, Arabidopsis thaliana
ctgttcaaatggctcga

SEQ ID NO: 89224 - DNA, 17 bp, Arabidopsis thaliana
ctgttcaagcggtctag

SEQ ID NO: 89225 - DNA, 17 bp, Arabidopsis thaliana
ctgttcagacctggtga

SEQ ID NO: 89226 - DNA, 17 bp, Arabidopsis thaliana
ctgttcagacttggtga

SEQ ID NO: 89227 - DNA, 17 bp, Arabidopsis thaliana
ctgttcaggaagaaacc

SEQ ID NO: 89228 - DNA, 17 bp, Arabidopsis thaliana
ctgttcagtgctgccac

SEQ ID NO: 89229 - DNA, 17 bp, Arabidopsis thaliana
ctgttcatccgtcggct

SEQ ID NO: 89230 - DNA, 17 bp, Arabidopsis thaliana
ctgttcatcttcaggcg

SEQ ID NO: 89231 - DNA, 17 bp, Arabidopsis thaliana
ctgttcatgttcggtgt

SEQ ID NO: 89232 - DNA, 17 bp, Arabidopsis thaliana
ctgttccctgggattgg

SEQ ID NO: 89233 - DNA, 17 bp, Arabidopsis thaliana
ctgttccggccgaaatt

SEQ ID NO: 89234 - DNA, 17 bp, Arabidopsis thaliana
ctgttcctttgacggtc

SEQ ID NO: 89235 - DNA, 17 bp, Arabidopsis thaliana
ctgttcgacaaactgtt

SEQ ID NO: 89236 - DNA, 17 bp, Arabidopsis thaliana
ctgttcgacacacgact

SEQ ID NO: 89237 - DNA, 17 bp, Arabidopsis thaliana
ctgttcgacgcccgggg

SEQ ID NO: 89238 - DNA, 17 bp, Arabidopsis thaliana
ctgttcgctcagacgtc

SEQ ID NO: 89239 - DNA, 17 bp, Arabidopsis thaliana
ctgttcgtcaggattct

SEQ ID NO: 89240 - DNA, 17 bp, Arabidopsis thaliana
ctgttcgtcatcggagt

SEQ ID NO: 89241 - DNA, 17 bp, Arabidopsis thaliana
ctgttcgtcgatcttgg

SEQ ID NO: 89242 - DNA, 17 bp, Arabidopsis thaliana
ctgttcgtttctgtgtc

SEQ ID NO: 89243 - DNA, 17 bp, Arabidopsis thaliana
ctgttctaagtaggcat

SEQ ID NO: 89244 - DNA, 17 bp, Arabidopsis thaliana
ctgttctaggatctccc

SEQ ID NO: 89245 - DNA, 17 bp, Arabidopsis thaliana
ctgttctattgggttgt

SEQ ID NO: 89246 - DNA, 17 bp, Arabidopsis thaliana
ctgttctctgttgacta

SEQ ID NO: 89247 - DNA, 17 bp, Arabidopsis thaliana
ctgttctgcctaccata

SEQ ID NO: 89248 - DNA, 17 bp, Arabidopsis thaliana
ctgttctgcctacgatt

SEQ ID NO: 89249 - DNA, 17 bp, Arabidopsis thaliana
ctgttctgcttggaacc

SEQ ID NO: 89250 - DNA, 17 bp, Arabidopsis thaliana
ctgttcttagttgttgg

SEQ ID NO: 89251 - DNA, 17 bp, Arabidopsis thaliana
ctgttcttcgctatcct

SEQ ID NO: 89252 - DNA, 17 bp, Arabidopsis thaliana
ctgttgactgcaaatta

SEQ ID NO: 89253 - DNA, 17 bp, Arabidopsis thaliana
ctgttgacttcgactca

SEQ ID NO: 89254 - DNA, 17 bp, Arabidopsis thaliana
ctgttgagcttgactct

SEQ ID NO: 89255 - DNA, 17 bp, Arabidopsis thaliana
ctgttgaggctttggcg

SEQ ID NO: 89256 - DNA, 17 bp, Arabidopsis thaliana
ctgttgcaggagtgtct

SEQ ID NO: 89257 - DNA, 17 bp, Arabidopsis thaliana
ctgttgcagtgccactc

SEQ ID NO: 89258 - DNA, 17 bp, Arabidopsis thaliana
ctgttgcagtgcgggtt

SEQ ID NO: 89259 - DNA, 17 bp, Arabidopsis thaliana
ctgttgcagtgcggtct

SEQ ID NO: 89260 - DNA, 17 bp, Arabidopsis thaliana
ctgttgcagtgcggttt

SEQ ID NO: 89261 - DNA, 17 bp, Arabidopsis thaliana
ctgttgccactgaagtt

SEQ ID NO: 89262 - DNA, 17 bp, Arabidopsis thaliana
ctgttgccagacactgg

SEQ ID NO: 89263 - DNA, 17 bp, Arabidopsis thaliana
ctgttgcgatacgattt

SEQ ID NO: 89264 - DNA, 17 bp, Arabidopsis thaliana
ctgttgcgatacggttt

SEQ ID NO: 89265 - DNA, 17 bp, Arabidopsis thaliana
ctgttgcgatgcgattt

SEQ ID NO: 89266 - DNA, 17 bp, Arabidopsis thaliana
ctgttgcgctgcgattt

SEQ ID NO: 89267 - DNA, 17 bp, Arabidopsis thaliana
ctgttgcggctactgca

SEQ ID NO: 89268 - DNA, 17 bp, Arabidopsis thaliana
ctgttgcggtgcagttt

SEQ ID NO: 89269 - DNA, 17 bp, Arabidopsis thaliana
ctgttgcggtggcactt

SEQ ID NO: 89270 - DNA, 17 bp, Arabidopsis thaliana
ctgttgcgttttctccg

SEQ ID NO: 89271 - DNA, 17 bp, Arabidopsis thaliana
ctgttgctatggtgcca

SEQ ID NO: 89272 - DNA, 17 bp, Arabidopsis thaliana
ctgttgctgctctgcca

SEQ ID NO: 89273 - DNA, 17 bp, Arabidopsis thaliana
ctgttgctggtgccatc

SEQ ID NO: 89274 - DNA, 17 bp, Arabidopsis thaliana
ctgttggagctggattc

SEQ ID NO: 89275 - DNA, 17 bp, Arabidopsis thaliana
ctgttggcaacctaaac

SEQ ID NO: 89276 - DNA, 17 bp, Arabidopsis thaliana
ctgttggcccagtgata

SEQ ID NO: 89277 - DNA, 17 bp, Arabidopsis thaliana
ctgttggcccagtggta

SEQ ID NO: 89278 - DNA, 17 bp, Arabidopsis thaliana
ctgttggcctagtggta

SEQ ID NO: 89279 - DNA, 17 bp, Arabidopsis thaliana
ctgttgggcttgcttct

SEQ ID NO: 89280 - DNA, 17 bp, Arabidopsis thaliana
ctgttggtttgctacat

SEQ ID NO: 89281 - DNA, 17 bp, Arabidopsis thaliana
ctgttgtcaggtgggga

SEQ ID NO: 89282 - DNA, 17 bp, Arabidopsis thaliana
ctgttgtgacaccgatt

SEQ ID NO: 89283 - DNA, 17 bp, Arabidopsis thaliana
ctgttgtgatacgattt

SEQ ID NO: 89284 - DNA, 17 bp, Arabidopsis thaliana
ctgttgtggactgagtt

SEQ ID NO: 89285 - DNA, 17 bp, Arabidopsis thaliana
ctgttgtggatgtgtta

SEQ ID NO: 89286 - DNA, 17 bp, Arabidopsis thaliana
ctgttgtgtaatttctg

SEQ ID NO: 89287 - DNA, 17 bp, Arabidopsis thaliana
ctgttgtgtgctctgca

SEQ ID NO: 89288 - DNA, 17 bp, Arabidopsis thaliana
ctgttgtgttgcgtaag

SEQ ID NO: 89289 - DNA, 17 bp, Arabidopsis thaliana
ctgttgttcttcttctt

SEQ ID NO: 89290 - DNA, 17 bp, Arabidopsis thaliana
ctgttgttgctactggg

SEQ ID NO: 89291 - DNA, 17 bp, Arabidopsis thaliana
ctgttgttggagatgac

SEQ ID NO: 89292 - DNA, 17 bp, Arabidopsis thaliana
ctgtttaacagcctgcc

SEQ ID NO: 89293 - DNA, 17 bp, Arabidopsis thaliana
ctgtttaagtttaccag

SEQ ID NO: 89294 - DNA, 17 bp, Arabidopsis thaliana
ctgtttaccaatttccg

SEQ ID NO: 89295 - DNA, 17 bp, Arabidopsis thaliana
ctgtttcaactggctca

SEQ ID NO: 89296 - DNA, 17 bp, Arabidopsis thaliana
ctgtttcaagatcagac

SEQ ID NO: 89297 - DNA, 17 bp, Arabidopsis thaliana
ctgtttcaatgacgcgc

SEQ ID NO: 89298 - DNA, 17 bp, Arabidopsis thaliana
ctgtttcaatgacgctt

SEQ ID NO: 89299 - DNA, 17 bp, Arabidopsis thaliana
ctgtttcaggtgctttt

SEQ ID NO: 89300 - DNA, 17 bp, Arabidopsis thaliana
ctgtttccagatatgaa

SEQ ID NO: 89301 - DNA, 17 bp, Arabidopsis thaliana
ctgtttccatcgttatt

SEQ ID NO: 89302 - DNA, 17 bp, Arabidopsis thaliana
ctgtttcccattggacc

SEQ ID NO: 89303 - DNA, 17 bp, Arabidopsis thaliana
ctgtttcccgttaaacc

SEQ ID NO: 89304 - DNA, 17 bp, Arabidopsis thaliana
ctgtttcctggagcgtc

SEQ ID NO: 89305 - DNA, 17 bp, Arabidopsis thaliana
ctgtttcgagtcagaag

SEQ ID NO: 89306 - DNA, 17 bp, Arabidopsis thaliana
ctgtttcggaactgcac

SEQ ID NO: 89307 - DNA, 17 bp, Arabidopsis thaliana
ctgtttcggtgcgggcc

SEQ ID NO: 89308 - DNA, 17 bp, Arabidopsis thaliana
ctgtttctccaaagtat

SEQ ID NO: 89309 - DNA, 17 bp, Arabidopsis thaliana
ctgtttctccggcttat

SEQ ID NO: 89310 - DNA, 17 bp, Arabidopsis thaliana
ctgtttctcggacgcag

SEQ ID NO: 89311 - DNA, 17 bp, Arabidopsis thaliana
ctgtttctctgacggtc

SEQ ID NO: 89312 - DNA, 17 bp, Arabidopsis thaliana
ctgtttctgcttcttcg

SEQ ID NO: 89313 - DNA, 17 bp, Arabidopsis thaliana
ctgtttcttgttgtgcc

SEQ ID NO: 89314 - DNA, 17 bp, Arabidopsis thaliana
ctgtttctttgttcgga

SEQ ID NO: 89315 - DNA, 17 bp, Arabidopsis thaliana
ctgtttgattcgtacac

SEQ ID NO: 89316 - DNA, 17 bp, Arabidopsis thaliana
ctgtttgcaagtagatc

SEQ ID NO: 89317 - DNA, 17 bp, Arabidopsis thaliana
ctgtttggaccattgtc

SEQ ID NO: 89318 - DNA, 17 bp, Arabidopsis thaliana
ctgtttggctctgtgga

SEQ ID NO: 89319 - DNA, 17 bp, Arabidopsis thaliana
ctgtttggctggtactg

SEQ ID NO: 89320 - DNA, 17 bp, Arabidopsis thaliana
ctgtttggctttccgtg

SEQ ID NO: 89321 - DNA, 17 bp, Arabidopsis thaliana
ctgtttggctttcggtg

SEQ ID NO: 89322 - DNA, 17 bp, Arabidopsis thaliana
ctgtttggtttgcaact

SEQ ID NO: 89323 - DNA, 17 bp, Arabidopsis thaliana
ctgtttgtcatgttcct

SEQ ID NO: 89324 - DNA, 17 bp, Arabidopsis thaliana
ctgtttgtcttttccac

SEQ ID NO: 89325 - DNA, 17 bp, Arabidopsis thaliana
ctgtttgtttggccatt

SEQ ID NO: 89326 - DNA, 17 bp, Arabidopsis thaliana
ctgttttacatcaagtg

SEQ ID NO: 89327 - DNA, 17 bp, Arabidopsis thaliana
ctgttttactctgctgc

SEQ ID NO: 89328 - DNA, 17 bp, Arabidopsis thaliana
ctgttttatctactttt

SEQ ID NO: 89329 - DNA, 17 bp, Arabidopsis thaliana
ctgttttcagactacgt

SEQ ID NO: 89330 - DNA, 17 bp, Arabidopsis thaliana
ctgttttcgtcttaaac

SEQ ID NO: 89331 - DNA, 17 bp, Arabidopsis thaliana
ctgttttcttgatggct

SEQ ID NO: 89332 - DNA, 17 bp, Arabidopsis thaliana
ctgttttgctcaggcat

SEQ ID NO: 89333 - DNA, 17 bp, Arabidopsis thaliana
ctgttttggacaggtat

SEQ ID NO: 89334 - DNA, 17 bp, Arabidopsis thaliana
ctgttttggacagttat

SEQ ID NO: 89335 - DNA, 17 bp, Arabidopsis thaliana
ctgttttggctgagcta

SEQ ID NO: 89336 - DNA, 17 bp, Arabidopsis thaliana
ctgttttgggtctaaga

SEQ ID NO: 89337 - DNA, 17 bp, Arabidopsis thaliana
ctgttttggtcccaagg

SEQ ID NO: 89338 - DNA, 17 bp, Arabidopsis thaliana
ctgttttggtttcacgg

SEQ ID NO: 89339 - DNA, 17 bp, Arabidopsis thaliana
ctgttttgtgcttgaat

SEQ ID NO: 89340 - DNA, 17 bp, Arabidopsis thaliana
ctgtttttcgttggacc

SEQ ID NO: 89341 - DNA, 17 bp, Arabidopsis thaliana
ctgtttttggtcccaag

SEQ ID NO: 89342 - DNA, 17 bp, Arabidopsis thaliana
ctgtttttggtccctag

SEQ ID NO: 89343 - DNA, 17 bp, Arabidopsis thaliana
ctgttttttccattgtt

SEQ ID NO: 89344 - DNA, 17 bp, Arabidopsis thaliana
ctgtttttttttcaggt

SEQ ID NO: 89345 - DNA, 17 bp, Arabidopsis thaliana
ctgtttttttttcagtt

SEQ ID NO: 89346 - DNA, 17 bp, Arabidopsis thaliana
cttaaaaatctctggtc

SEQ ID NO: 89347 - DNA, 17 bp, Arabidopsis thaliana
cttaaaaccgttacgtc

SEQ ID NO: 89348 - DNA, 17 bp, Arabidopsis thaliana
cttaaaacgaggcttgg

SEQ ID NO: 89349 - DNA, 17 bp, Arabidopsis thaliana
cttaaaacttttcaaaa

SEQ ID NO: 89350 - DNA, 17 bp, Arabidopsis thaliana
cttaaaatccgctgaga

SEQ ID NO: 89351 - DNA, 17 bp, Arabidopsis thaliana
cttaaaatgtcccgacc

SEQ ID NO: 89352 - DNA, 17 bp, Arabidopsis thaliana
cttaaaccaatgtcgaa

SEQ ID NO: 89353 - DNA, 17 bp, Arabidopsis thaliana
cttaaaccgcaaccgca

SEQ ID NO: 89354 - DNA, 17 bp, Arabidopsis thaliana
cttaaactctactgcgg

SEQ ID NO: 89355 - DNA, 17 bp, Arabidopsis thaliana
cttaaactctgagccta

SEQ ID NO: 89356 - DNA, 17 bp, Arabidopsis thaliana
cttaaaggcttccaaga

SEQ ID NO: 89357 - DNA, 17 bp, Arabidopsis thaliana
cttaaaggtcaaaattt

SEQ ID NO: 89358 - DNA, 17 bp, Arabidopsis thaliana
cttaaatctgtgatgag

SEQ ID NO: 89359 - DNA, 17 bp, Arabidopsis thaliana
cttaaatgagattccac

SEQ ID NO: 89360 - DNA, 17 bp, Arabidopsis thaliana
cttaaatgcattggatt

SEQ ID NO: 89361 - DNA, 17 bp, Arabidopsis thaliana
cttaaatgggtctgaca

SEQ ID NO: 89362 - DNA, 17 bp, Arabidopsis thaliana
cttaaatgtctctcagg

SEQ ID NO: 89363 - DNA, 17 bp, Arabidopsis thaliana
cttaaatttcgcaccga

SEQ ID NO: 89364 - DNA, 17 bp, Arabidopsis thaliana
cttaaattttgcaccca

SEQ ID NO: 89365 - DNA, 17 bp, Arabidopsis thaliana
cttaaattttgcaccga

SEQ ID NO: 89366 - DNA, 17 bp, Arabidopsis thaliana
cttaacactatggtaga

SEQ ID NO: 89367 - DNA, 17 bp, Arabidopsis thaliana
cttaacagaccgttcag

SEQ ID NO: 89368 - DNA, 17 bp, Arabidopsis thaliana
cttaacagactgttcag

SEQ ID NO: 89369 - DNA, 17 bp, Arabidopsis thaliana
cttaacagcgatttgtt

SEQ ID NO: 89370 - DNA, 17 bp, Arabidopsis thaliana
cttaacagtggaattct

SEQ ID NO: 89371 - DNA, 17 bp, Arabidopsis thaliana
cttaacatccgcttgcg

SEQ ID NO: 89372 - DNA, 17 bp, Arabidopsis thaliana
cttaaccactcgagctt

SEQ ID NO: 89373 - DNA, 17 bp, Arabidopsis thaliana
cttaaccatcagaagtt

SEQ ID NO: 89374 - DNA, 17 bp, Arabidopsis thaliana
cttaacgacaccaaatt

SEQ ID NO: 89375 - DNA, 17 bp, Arabidopsis thaliana
cttaacgacgatgttaa

SEQ ID NO: 89376 - DNA, 17 bp, Arabidopsis thaliana
cttaacggactaaaacg

SEQ ID NO: 89377 - DNA, 17 bp, Arabidopsis thaliana
cttaactctcagtctct

SEQ ID NO: 89378 - DNA, 17 bp, Arabidopsis thaliana
cttaactgcctgtgacg

SEQ ID NO: 89379 - DNA, 17 bp, Arabidopsis thaliana
cttaactgtggacttct

SEQ ID NO: 89380 - DNA, 17 bp, Arabidopsis thaliana
cttaagaaactagcccc

SEQ ID NO: 89381 - DNA, 17 bp, Arabidopsis thaliana
cttaagacggtgacaga

SEQ ID NO: 89382 - DNA, 17 bp, Arabidopsis thaliana
cttaagactccatgggg

SEQ ID NO: 89383 - DNA, 17 bp, Arabidopsis thaliana
cttaagatcctcgaaac

SEQ ID NO: 89384 - DNA, 17 bp, Arabidopsis thaliana
cttaagatcgtgccacg

SEQ ID NO: 89385 - DNA, 17 bp, Arabidopsis thaliana
cttaagatcgtggcacg

SEQ ID NO: 89386 - DNA, 17 bp, Arabidopsis thaliana
cttaagatttgtgttag

SEQ ID NO: 89387 - DNA, 17 bp, Arabidopsis thaliana
cttaagcatttaagatc

SEQ ID NO: 89388 - DNA, 17 bp, Arabidopsis thaliana
cttaagcctttaaaatc

SEQ ID NO: 89389 - DNA, 17 bp, Arabidopsis thaliana
cttaagcctttaagatc

SEQ ID NO: 89390 - DNA, 17 bp, Arabidopsis thaliana
cttaagcgacttcttca

SEQ ID NO: 89391 - DNA, 17 bp, Arabidopsis thaliana
cttaagcgagagccgtc

SEQ ID NO: 89392 - DNA, 17 bp, Arabidopsis thaliana
cttaagcgctatcagac

SEQ ID NO: 89393 - DNA, 17 bp, Arabidopsis thaliana
cttaagctaagtgattg

SEQ ID NO: 89394 - DNA, 17 bp, Arabidopsis thaliana
cttaagctatgccgcta

SEQ ID NO: 89395 - DNA, 17 bp, Arabidopsis thaliana
cttaagctctatctgct

SEQ ID NO: 89396 - DNA, 17 bp, Arabidopsis thaliana
cttaagctctgagccta

SEQ ID NO: 89397 - DNA, 17 bp, Arabidopsis thaliana
cttaagcttctttcacc

SEQ ID NO: 89398 - DNA, 17 bp, Arabidopsis thaliana
cttaagctttcaagatc

SEQ ID NO: 89399 - DNA, 17 bp, Arabidopsis thaliana
cttaagcttttaagatc

SEQ ID NO: 89400 - DNA, 17 bp, Arabidopsis thaliana
cttaaggggattacggg

SEQ ID NO: 89401 - DNA, 17 bp, Arabidopsis thaliana
cttaagggtccgagtga

SEQ ID NO: 89402 - DNA, 17 bp, Arabidopsis thaliana
cttaagggtgaacgacc

SEQ ID NO: 89403 - DNA, 17 bp, Arabidopsis thaliana
cttaaggtagccaaatg

SEQ ID NO: 89404 - DNA, 17 bp, Arabidopsis thaliana
cttaaggtcaacctttg

SEQ ID NO: 89405 - DNA, 17 bp, Arabidopsis thaliana
cttaagtaacaggggat

SEQ ID NO: 89406 - DNA, 17 bp, Arabidopsis thaliana
cttaagtcccttagccc

SEQ ID NO: 89407 - DNA, 17 bp, Arabidopsis thaliana
cttaagtcgcatcctgt

SEQ ID NO: 89408 - DNA, 17 bp, Arabidopsis thaliana
cttaagtctctgcttct

SEQ ID NO: 89409 - DNA, 17 bp, Arabidopsis thaliana
cttaagtgactacatcg

SEQ ID NO: 89410 - DNA, 17 bp, Arabidopsis thaliana
cttaagtttcaccgtta

SEQ ID NO: 89411 - DNA, 17 bp, Arabidopsis thaliana
cttaataaattgtgggg

SEQ ID NO: 89412 - DNA, 17 bp, Arabidopsis thaliana
cttaatatcatgcggtc

SEQ ID NO: 89413 - DNA, 17 bp, Arabidopsis thaliana
cttaatcagctgcgcca

SEQ ID NO: 89414 - DNA, 17 bp, Arabidopsis thaliana
cttaatccgcaaccgga

SEQ ID NO: 89415 - DNA, 17 bp, Arabidopsis thaliana
cttaatccgcttttgtt

SEQ ID NO: 89416 - DNA, 17 bp, Arabidopsis thaliana
cttaatcctccttcata

SEQ ID NO: 89417 - DNA, 17 bp, Arabidopsis thaliana
cttaatcgcatcctgta

SEQ ID NO: 89418 - DNA, 17 bp, Arabidopsis thaliana
cttaatcgtctcgcagg

SEQ ID NO: 89419 - DNA, 17 bp, Arabidopsis thaliana
cttaatctcacacatgc

SEQ ID NO: 89420 - DNA, 17 bp, Arabidopsis thaliana
cttaatctcaccaggcc

SEQ ID NO: 89421 - DNA, 17 bp, Arabidopsis thaliana
cttaatctctcggcggt

SEQ ID NO: 89422 - DNA, 17 bp, Arabidopsis thaliana
cttaatctctcgtgtgt

SEQ ID NO: 89423 - DNA, 17 bp, Arabidopsis thaliana
cttaatgacttgttccg

SEQ ID NO: 89424 - DNA, 17 bp, Arabidopsis thaliana
cttaatgctcaggaggt

SEQ ID NO: 89425 - DNA, 17 bp, Arabidopsis thaliana
cttaattcttgggtcac

SEQ ID NO: 89426 - DNA, 17 bp, Arabidopsis thaliana
cttaattggccgggtcg

SEQ ID NO: 89427 - DNA, 17 bp, Arabidopsis thaliana
cttaattgtgccaatcc

SEQ ID NO: 89428 - DNA, 17 bp, Arabidopsis thaliana
cttaattgtgctgatct

SEQ ID NO: 89429 - DNA, 17 bp, Arabidopsis thaliana
cttaattgtggagttat

SEQ ID NO: 89430 - DNA, 17 bp, Arabidopsis thaliana
cttaattgtggagttct

SEQ ID NO: 89431 - DNA, 17 bp, Arabidopsis thaliana
cttaattgtggagtttt

SEQ ID NO: 89432 - DNA, 17 bp, Arabidopsis thaliana
cttaatttctgacagag

SEQ ID NO: 89433 - DNA, 17 bp, Arabidopsis thaliana
cttaatttctgcttctg

SEQ ID NO: 89434 - DNA, 17 bp, Arabidopsis thaliana
cttaatttgttgggctc

SEQ ID NO: 89435 - DNA, 17 bp, Arabidopsis thaliana
cttacaactaggtcagt

SEQ ID NO: 89436 - DNA, 17 bp, Arabidopsis thaliana
cttacaactgcaatcaa

SEQ ID NO: 89437 - DNA, 17 bp, Arabidopsis thaliana
cttacaactttcacttg

SEQ ID NO: 89438 - DNA, 17 bp, Arabidopsis thaliana
cttacaagactggtcca

SEQ ID NO: 89439 - DNA, 17 bp, Arabidopsis thaliana
cttacaagatcaggttg

SEQ ID NO: 89440 - DNA, 17 bp, Arabidopsis thaliana
cttacaagatcgggttg

SEQ ID NO: 89441 - DNA, 17 bp, Arabidopsis thaliana
cttacaatcaccagctt

SEQ ID NO: 89442 - DNA, 17 bp, Arabidopsis thaliana
cttacaatctcaagatg

SEQ ID NO: 89443 - DNA, 17 bp, Arabidopsis thaliana
cttacacatggatcaac

SEQ ID NO: 89444 - DNA, 17 bp, Arabidopsis thaliana
cttacaccagttggcta

SEQ ID NO: 89445 - DNA, 17 bp, Arabidopsis thaliana
cttacaccgtagatccg

SEQ ID NO: 89446 - DNA, 17 bp, Arabidopsis thaliana
cttacacctttaagatc

SEQ ID NO: 89447 - DNA, 17 bp, Arabidopsis thaliana
cttacacctttatgatc

SEQ ID NO: 89448 - DNA, 17 bp, Arabidopsis thaliana
cttacaccttttggccg

SEQ ID NO: 89449 - DNA, 17 bp, Arabidopsis thaliana
cttacagaacgggtttg

SEQ ID NO: 89450 - DNA, 17 bp, Arabidopsis thaliana
cttacagactcttcaga

SEQ ID NO: 89451 - DNA, 17 bp, Arabidopsis thaliana
cttacagcagtggacgg

SEQ ID NO: 89452 - DNA, 17 bp, Arabidopsis thaliana
cttacagctttggacga

SEQ ID NO: 89453 - DNA, 17 bp, Arabidopsis thaliana
cttacaggagcttttat

SEQ ID NO: 89454 - DNA, 17 bp, Arabidopsis thaliana
cttacagggattctccg

SEQ ID NO: 89455 - DNA, 17 bp, Arabidopsis thaliana
cttacagggtctgtaac

SEQ ID NO: 89456 - DNA, 17 bp, Arabidopsis thaliana
cttacagttcgtcggct

SEQ ID NO: 89457 - DNA, 17 bp, Arabidopsis thaliana
cttacataagctggagc

SEQ ID NO: 89458 - DNA, 17 bp, Arabidopsis thaliana
cttacatactcaagccc

SEQ ID NO: 89459 - DNA, 17 bp, Arabidopsis thaliana
cttacatagcgggtggg

SEQ ID NO: 89460 - DNA, 17 bp, Arabidopsis thaliana
cttacatcgacaggatt

SEQ ID NO: 89461 - DNA, 17 bp, Arabidopsis thaliana
cttacatcgatgtctga

SEQ ID NO: 89462 - DNA, 17 bp, Arabidopsis thaliana
cttacatctctccgatg

SEQ ID NO: 89463 - DNA, 17 bp, Arabidopsis thaliana
cttacatcttctaaagg

SEQ ID NO: 89464 - DNA, 17 bp, Arabidopsis thaliana
cttacatcttctaatgg

SEQ ID NO: 89465 - DNA, 17 bp, Arabidopsis thaliana
cttacatgctgtggttt

SEQ ID NO: 89466 - DNA, 17 bp, Arabidopsis thaliana
cttacatggtttgctat

SEQ ID NO: 89467 - DNA, 17 bp, Arabidopsis thaliana
cttacattgctggaggc

SEQ ID NO: 89468 - DNA, 17 bp, Arabidopsis thaliana
cttacattgttggaggc

SEQ ID NO: 89469 - DNA, 17 bp, Arabidopsis thaliana
cttaccacaacggcggt

SEQ ID NO: 89470 - DNA, 17 bp, Arabidopsis thaliana
cttaccagctagagtga

SEQ ID NO: 89471 - DNA, 17 bp, Arabidopsis thaliana
cttaccaggtccagaca

SEQ ID NO: 89472 - DNA, 17 bp, Arabidopsis thaliana
cttacccgatagccgat

SEQ ID NO: 89473 - DNA, 17 bp, Arabidopsis thaliana
cttacccgcggatcgcg

SEQ ID NO: 89474 - DNA, 17 bp, Arabidopsis thaliana
cttacccgtcccgccaa

SEQ ID NO: 89475 - DNA, 17 bp, Arabidopsis thaliana
cttaccgattgaatgat

SEQ ID NO: 89476 - DNA, 17 bp, Arabidopsis thaliana
cttaccgattgtgtcca

SEQ ID NO: 89477 - DNA, 17 bp, Arabidopsis thaliana
cttaccggaccaccagc

SEQ ID NO: 89478 - DNA, 17 bp, Arabidopsis thaliana
cttaccggatcgaatta

SEQ ID NO: 89479 - DNA, 17 bp, Arabidopsis thaliana
cttaccggatcgaattg

SEQ ID NO: 89480 - DNA, 17 bp, Arabidopsis thaliana
cttacctcggtgcaaga

SEQ ID NO: 89481 - DNA, 17 bp, Arabidopsis thaliana
cttacctgacagacgtg

SEQ ID NO: 89482 - DNA, 17 bp, Arabidopsis thaliana
cttacctgacctatatg

SEQ ID NO: 89483 - DNA, 17 bp, Arabidopsis thaliana
cttacctgttgtgtcca

SEQ ID NO: 89484 - DNA, 17 bp, Arabidopsis thaliana
cttacgaagacaacgag

SEQ ID NO: 89485 - DNA, 17 bp, Arabidopsis thaliana
cttacgactctcggcaa

SEQ ID NO: 89486 - DNA, 17 bp, Arabidopsis thaliana
cttacgactttaagatc

SEQ ID NO: 89487 - DNA, 17 bp, Arabidopsis thaliana
cttacgagacctcagcc

SEQ ID NO: 89488 - DNA, 17 bp, Arabidopsis thaliana
cttacgaggaagctgat

SEQ ID NO: 89489 - DNA, 17 bp, Arabidopsis thaliana
cttacgatcatatttcc

SEQ ID NO: 89490 - DNA, 17 bp, Arabidopsis thaliana
cttacgatgtctgcggg

SEQ ID NO: 89491 - DNA, 17 bp, Arabidopsis thaliana
cttacgcctctaagatc

SEQ ID NO: 89492 - DNA, 17 bp, Arabidopsis thaliana
cttacgccttaagatcc

SEQ ID NO: 89493 - DNA, 17 bp, Arabidopsis thaliana
cttacgccttcaagatc

SEQ ID NO: 89494 - DNA, 17 bp, Arabidopsis thaliana
cttacgccttgaagatc

SEQ ID NO: 89495 - DNA, 17 bp, Arabidopsis thaliana
cttacgcctttaagaac

SEQ ID NO: 89496 - DNA, 17 bp, Arabidopsis thaliana
cttacgcctttaagata

SEQ ID NO: 89497 - DNA, 17 bp, Arabidopsis thaliana
cttacgcctttaagatc

SEQ ID NO: 89498 - DNA, 17 bp, Arabidopsis thaliana
cttacgcctttaagatt

SEQ ID NO: 89499 - DNA, 17 bp, Arabidopsis thaliana
cttacgcctttatgatc

SEQ ID NO: 89500 - DNA, 17 bp, Arabidopsis thaliana
cttacgcgaccgcggtg

SEQ ID NO: 89501 - DNA, 17 bp, Arabidopsis thaliana
cttacgcggattacggt

SEQ ID NO: 89502 - DNA, 17 bp, Arabidopsis thaliana
cttacgcgtataagatc

SEQ ID NO: 89503 - DNA, 17 bp, Arabidopsis thaliana
cttacgcgtttaagatc

SEQ ID NO: 89504 - DNA, 17 bp, Arabidopsis thaliana
cttacgcttttaagatc

SEQ ID NO: 89505 - DNA, 17 bp, Arabidopsis thaliana
cttacggctcaacgcgt

SEQ ID NO: 89506 - DNA, 17 bp, Arabidopsis thaliana
cttacgggattgctgga

SEQ ID NO: 89507 - DNA, 17 bp, Arabidopsis thaliana
cttactaatgtgccctc

SEQ ID NO: 89508 - DNA, 17 bp, Arabidopsis thaliana
cttactacatctcgacc

SEQ ID NO: 89509 - DNA, 17 bp, Arabidopsis thaliana
cttactactcagtcctg

SEQ ID NO: 89510 - DNA, 17 bp, Arabidopsis thaliana
cttactagttggagttg

SEQ ID NO: 89511 - DNA, 17 bp, Arabidopsis thaliana
cttactcagccaccaag

SEQ ID NO: 89512 - DNA, 17 bp, Arabidopsis thaliana
cttactccgtgaatcgg

SEQ ID NO: 89513 - DNA, 17 bp, Arabidopsis thaliana
cttactcgacagttccg

SEQ ID NO: 89514 - DNA, 17 bp, Arabidopsis thaliana
cttactcgatcaaggca

SEQ ID NO: 89515 - DNA, 17 bp, Arabidopsis thaliana
cttactcgtcgatagta

SEQ ID NO: 89516 - DNA, 17 bp, Arabidopsis thaliana
cttactctcggcaacgg

SEQ ID NO: 89517 - DNA, 17 bp, Arabidopsis thaliana
cttactcttgggcagtt

SEQ ID NO: 89518 - DNA, 17 bp, Arabidopsis thaliana
cttactgatctgtcagc

SEQ ID NO: 89519 - DNA, 17 bp, Arabidopsis thaliana
cttactggggatgttgc

SEQ ID NO: 89520 - DNA, 17 bp, Arabidopsis thaliana
cttactggtgtgatgat

SEQ ID NO: 89521 - DNA, 17 bp, Arabidopsis thaliana
cttactggtgtgttgat

SEQ ID NO: 89522 - DNA, 17 bp, Arabidopsis thaliana
cttacttaaggaccatc

SEQ ID NO: 89523 - DNA, 17 bp, Arabidopsis thaliana
cttacttatctctcgtt

SEQ ID NO: 89524 - DNA, 17 bp, Arabidopsis thaliana
cttacttcaattctact

SEQ ID NO: 89525 - DNA, 17 bp, Arabidopsis thaliana
cttacttccacgaattc

SEQ ID NO: 89526 - DNA, 17 bp, Arabidopsis thaliana
cttacttccatccattc

SEQ ID NO: 89527 - DNA, 17 bp, Arabidopsis thaliana
cttacttgggctttaag

SEQ ID NO: 89528 - DNA, 17 bp, Arabidopsis thaliana
cttactttctggttttc

SEQ ID NO: 89529 - DNA, 17 bp, Arabidopsis thaliana
cttactttgaccagaat

SEQ ID NO: 89530 - DNA, 17 bp, Arabidopsis thaliana
cttactttggcctatgc

SEQ ID NO: 89531 - DNA, 17 bp, Arabidopsis thaliana
cttacttttgaaaggcg

SEQ ID NO: 89532 - DNA, 17 bp, Arabidopsis thaliana
cttactttttcgggcat

SEQ ID NO: 89533 - DNA, 17 bp, Arabidopsis thaliana
cttagaaaattattcac

SEQ ID NO: 89534 - DNA, 17 bp, Arabidopsis thaliana
cttagaaacttcttcct

SEQ ID NO: 89535 - DNA, 17 bp, Arabidopsis thaliana
cttagaacggagctttt

SEQ ID NO: 89536 - DNA, 17 bp, Arabidopsis thaliana
cttagaatgctgagtac

SEQ ID NO: 89537 - DNA, 17 bp, Arabidopsis thaliana
cttagacaacctgaatc

SEQ ID NO: 89538 - DNA, 17 bp, Arabidopsis thaliana
cttagacaacgacagag

SEQ ID NO: 89539 - DNA, 17 bp, Arabidopsis thaliana
cttagaccatctccatc

SEQ ID NO: 89540 - DNA, 17 bp, Arabidopsis thaliana
cttagaccgaaccgtca

SEQ ID NO: 89541 - DNA, 17 bp, Arabidopsis thaliana
cttagacgacattgtcc

SEQ ID NO: 89542 - DNA, 17 bp, Arabidopsis thaliana
cttagaggggcccatca

SEQ ID NO: 89543 - DNA, 17 bp, Arabidopsis thaliana
cttagaggtcgtcggtt

SEQ ID NO: 89544 - DNA, 17 bp, Arabidopsis thaliana
cttagatcttttatgag

SEQ ID NO: 89545 - DNA, 17 bp, Arabidopsis thaliana
cttagatgatgattatg

SEQ ID NO: 89546 - DNA, 17 bp, Arabidopsis thaliana
cttagatgttctgggcc

SEQ ID NO: 89547 - DNA, 17 bp, Arabidopsis thaliana
cttagatgttctggtcc

SEQ ID NO: 89548 - DNA, 17 bp, Arabidopsis thaliana
cttagattcaatcgcgg

SEQ ID NO: 89549 - DNA, 17 bp, Arabidopsis thaliana
cttagattcaatctcgg

SEQ ID NO: 89550 - DNA, 17 bp, Arabidopsis thaliana
cttagattgtgattgta

SEQ ID NO: 89551 - DNA, 17 bp, Arabidopsis thaliana
cttagatttcggtttcg

SEQ ID NO: 89552 - DNA, 17 bp, Arabidopsis thaliana
cttagattttctgggcc

SEQ ID NO: 89553 - DNA, 17 bp, Arabidopsis thaliana
cttagcacagatttgga

SEQ ID NO: 89554 - DNA, 17 bp, Arabidopsis thaliana
cttagcagagatggact

SEQ ID NO: 89555 - DNA, 17 bp, Arabidopsis thaliana
cttagcagggagacaga

SEQ ID NO: 89556 - DNA, 17 bp, Arabidopsis thaliana
cttagccatcctgtaga

SEQ ID NO: 89557 - DNA, 17 bp, Arabidopsis thaliana
cttagccattgaatttg

SEQ ID NO: 89558 - DNA, 17 bp, Arabidopsis thaliana
cttagcccatcctgtag

SEQ ID NO: 89559 - DNA, 17 bp, Arabidopsis thaliana
cttagcccatcctgtga

SEQ ID NO: 89560 - DNA, 17 bp, Arabidopsis thaliana
cttagccgatcctgtag

SEQ ID NO: 89561 - DNA, 17 bp, Arabidopsis thaliana
cttagccgcaccctgta

SEQ ID NO: 89562 - DNA, 17 bp, Arabidopsis thaliana
cttagccgcatcctgta

SEQ ID NO: 89563 - DNA, 17 bp, Arabidopsis thaliana
cttagccgcattgtaga

SEQ ID NO: 89564 - DNA, 17 bp, Arabidopsis thaliana
cttagccgctcctgtag

SEQ ID NO: 89565 - DNA, 17 bp, Arabidopsis thaliana
cttagcgaaaacggcaa

SEQ ID NO: 89566 - DNA, 17 bp, Arabidopsis thaliana
cttagcgaatattccgt

SEQ ID NO: 89567 - DNA, 17 bp, Arabidopsis thaliana
cttagcgagagccggcc

SEQ ID NO: 89568 - DNA, 17 bp, Arabidopsis thaliana
cttagcgcatcctgcag

SEQ ID NO: 89569 - DNA, 17 bp, Arabidopsis thaliana
cttagcgcatcctgtag

SEQ ID NO: 89570 - DNA, 17 bp, Arabidopsis thaliana
cttagcggatattgcgt

SEQ ID NO: 89571 - DNA, 17 bp, Arabidopsis thaliana
cttagcggcttggccgg

SEQ ID NO: 89572 - DNA, 17 bp, Arabidopsis thaliana
cttagctgatggatgtt

SEQ ID NO: 89573 - DNA, 17 bp, Arabidopsis thaliana
cttagcttcttgtgcac

SEQ ID NO: 89574 - DNA, 17 bp, Arabidopsis thaliana
cttaggaatcatgtgca

SEQ ID NO: 89575 - DNA, 17 bp, Arabidopsis thaliana
cttaggacttagaccag

SEQ ID NO: 89576 - DNA, 17 bp, Arabidopsis thaliana
cttaggactttagaggc

SEQ ID NO: 89577 - DNA, 17 bp, Arabidopsis thaliana
cttaggagacccgggtt

SEQ ID NO: 89578 - DNA, 17 bp, Arabidopsis thaliana
cttaggatatttacgga

SEQ ID NO: 89579 - DNA, 17 bp, Arabidopsis thaliana
cttaggattcggtagcc

SEQ ID NO: 89580 - DNA, 17 bp, Arabidopsis thaliana
cttaggattctgaactg

SEQ ID NO: 89581 - DNA, 17 bp, Arabidopsis thaliana
cttaggattgtcactta

SEQ ID NO: 89582 - DNA, 17 bp, Arabidopsis thaliana
cttaggcagcatgattg

SEQ ID NO: 89583 - DNA, 17 bp, Arabidopsis thaliana
cttaggccaactccagt

SEQ ID NO: 89584 - DNA, 17 bp, Arabidopsis thaliana
cttaggcccggtccgtc

SEQ ID NO: 89585 - DNA, 17 bp, Arabidopsis thaliana
cttaggccctgttcgtt

SEQ ID NO: 89586 - DNA, 17 bp, Arabidopsis thaliana
cttaggccgatcgtctg

SEQ ID NO: 89587 - DNA, 17 bp, Arabidopsis thaliana
cttaggccgccaccgta

SEQ ID NO: 89588 - DNA, 17 bp, Arabidopsis thaliana
cttaggcgcatccatgt

SEQ ID NO: 89589 - DNA, 17 bp, Arabidopsis thaliana
cttaggcgcatcctgta

SEQ ID NO: 89590 - DNA, 17 bp, Arabidopsis thaliana
cttaggcgcctactacg

SEQ ID NO: 89591 - DNA, 17 bp, Arabidopsis thaliana
cttaggcgtgtgaccct

SEQ ID NO: 89592 - DNA, 17 bp, Arabidopsis thaliana
cttaggctcagcataca

SEQ ID NO: 89593 - DNA, 17 bp, Arabidopsis thaliana
cttaggctcccaaaggc

SEQ ID NO: 89594 - DNA, 17 bp, Arabidopsis thaliana
cttaggctgcgtttgtg

SEQ ID NO: 89595 - DNA, 17 bp, Arabidopsis thaliana
cttaggcttacaagata

SEQ ID NO: 89596 - DNA, 17 bp, Arabidopsis thaliana
cttaggcttacaagatc

SEQ ID NO: 89597 - DNA, 17 bp, Arabidopsis thaliana
cttaggcttacgagatc

SEQ ID NO: 89598 - DNA, 17 bp, Arabidopsis thaliana
cttaggcttatacgatc

SEQ ID NO: 89599 - DNA, 17 bp, Arabidopsis thaliana
cttaggcttatacgttc

SEQ ID NO: 89600 - DNA, 17 bp, Arabidopsis thaliana
cttaggcttatagtact

SEQ ID NO: 89601 - DNA, 17 bp, Arabidopsis thaliana
cttaggctttgaatggt

SEQ ID NO: 89602 - DNA, 17 bp, Arabidopsis thaliana
cttaggcttttaagacg

SEQ ID NO: 89603 - DNA, 17 bp, Arabidopsis thaliana
cttaggcttttatgatc

SEQ ID NO: 89604 - DNA, 17 bp, Arabidopsis thaliana
cttagggattacgggtt

SEQ ID NO: 89605 - DNA, 17 bp, Arabidopsis thaliana
cttaggggattacgggc

SEQ ID NO: 89606 - DNA, 17 bp, Arabidopsis thaliana
cttaggggtttggacgt

SEQ ID NO: 89607 - DNA, 17 bp, Arabidopsis thaliana
cttagggttttggtttt

SEQ ID NO: 89608 - DNA, 17 bp, Arabidopsis thaliana
cttaggtaaaatcctag

SEQ ID NO: 89609 - DNA, 17 bp, Arabidopsis thaliana
cttaggtcagattcccc

SEQ ID NO: 89610 - DNA, 17 bp, Arabidopsis thaliana
cttaggtccggaattac

SEQ ID NO: 89611 - DNA, 17 bp, Arabidopsis thaliana
cttaggtcctgttcgtt

SEQ ID NO: 89612 - DNA, 17 bp, Arabidopsis thaliana
cttaggtcgcacctgtg

SEQ ID NO: 89613 - DNA, 17 bp, Arabidopsis thaliana
cttaggtgatcatccgc

SEQ ID NO: 89614 - DNA, 17 bp, Arabidopsis thaliana
cttaggtggctagggtt

SEQ ID NO: 89615 - DNA, 17 bp, Arabidopsis thaliana
cttaggtgttgatgtgt

SEQ ID NO: 89616 - DNA, 17 bp, Arabidopsis thaliana
cttaggttaggattctt

SEQ ID NO: 89617 - DNA, 17 bp, Arabidopsis thaliana
cttaggttctggatccc

SEQ ID NO: 89618 - DNA, 17 bp, Arabidopsis thaliana
cttaggttttctatcaa

SEQ ID NO: 89619 - DNA, 17 bp, Arabidopsis thaliana
cttagtaacggcgagcg

SEQ ID NO: 89620 - DNA, 17 bp, Arabidopsis thaliana
cttagtaactatgtcca

SEQ ID NO: 89621 - DNA, 17 bp, Arabidopsis thaliana
cttagtacgagaggacc

SEQ ID NO: 89622 - DNA, 17 bp, Arabidopsis thaliana
cttagtactcgagcctc

SEQ ID NO: 89623 - DNA, 17 bp, Arabidopsis thaliana
cttagtagcaacctgca

SEQ ID NO: 89624 - DNA, 17 bp, Arabidopsis thaliana
cttagtagcatctgtag

SEQ ID NO: 89625 - DNA, 17 bp, Arabidopsis thaliana
cttagtagccgtttgca

SEQ ID NO: 89626 - DNA, 17 bp, Arabidopsis thaliana
cttagtagccgtttgcc

SEQ ID NO: 89627 - DNA, 17 bp, Arabidopsis thaliana
cttagtagctgcacgac

SEQ ID NO: 89628 - DNA, 17 bp, Arabidopsis thaliana
cttagtatcagggaggg

SEQ ID NO: 89629 - DNA, 17 bp, Arabidopsis thaliana
cttagtatccgatgact

SEQ ID NO: 89630 - DNA, 17 bp, Arabidopsis thaliana
cttagtattgtttgtgc

SEQ ID NO: 89631 - DNA, 17 bp, Arabidopsis thaliana
cttagtcacatcctgga

SEQ ID NO: 89632 - DNA, 17 bp, Arabidopsis thaliana
cttagtcacatcctgta

SEQ ID NO: 89633 - DNA, 17 bp, Arabidopsis thaliana
cttagtcaccagttccc

SEQ ID NO: 89634 - DNA, 17 bp, Arabidopsis thaliana
cttagtcactcctgtag

SEQ ID NO: 89635 - DNA, 17 bp, Arabidopsis thaliana
cttagtcatcctggatg

SEQ ID NO: 89636 - DNA, 17 bp, Arabidopsis thaliana
cttagtcatcctgtaga

SEQ ID NO: 89637 - DNA, 17 bp, Arabidopsis thaliana
cttagtccaattagttg

SEQ ID NO: 89638 - DNA, 17 bp, Arabidopsis thaliana
cttagtccagcctgtag

SEQ ID NO: 89639 - DNA, 17 bp, Arabidopsis thaliana
cttagtccatcctgaga

SEQ ID NO: 89640 - DNA, 17 bp, Arabidopsis thaliana
cttagtccatcctgcag

SEQ ID NO: 89641 - DNA, 17 bp, Arabidopsis thaliana
cttagtccatcctggat

SEQ ID NO: 89642 - DNA, 17 bp, Arabidopsis thaliana
cttagtccatcctgtaa

SEQ ID NO: 89643 - DNA, 17 bp, Arabidopsis thaliana
cttagtccatcctgtag

SEQ ID NO: 89644 - DNA, 17 bp, Arabidopsis thaliana
cttagtccatcctgtga

SEQ ID NO: 89645 - DNA, 17 bp, Arabidopsis thaliana
cttagtccatcgtagtg

SEQ ID NO: 89646 - DNA, 17 bp, Arabidopsis thaliana
cttagtccatctgtaga

SEQ ID NO: 89647 - DNA, 17 bp, Arabidopsis thaliana
cttagtcccatcctccc

SEQ ID NO: 89648 - DNA, 17 bp, Arabidopsis thaliana
cttagtcccatcctgga

SEQ ID NO: 89649 - DNA, 17 bp, Arabidopsis thaliana
cttagtcccatcctgta

SEQ ID NO: 89650 - DNA, 17 bp, Arabidopsis thaliana
cttagtcgaatcctgta

SEQ ID NO: 89651 - DNA, 17 bp, Arabidopsis thaliana
cttagtcgacctgtaga

SEQ ID NO: 89652 - DNA, 17 bp, Arabidopsis thaliana
cttagtcgatcctgccc

SEQ ID NO: 89653 - DNA, 17 bp, Arabidopsis thaliana
cttagtcgatcctgtaa

SEQ ID NO: 89654 - DNA, 17 bp, Arabidopsis thaliana
cttagtcgatcctgtag

SEQ ID NO: 89655 - DNA, 17 bp, Arabidopsis thaliana
cttagtcgatctgtaga

SEQ ID NO: 89656 - DNA, 17 bp, Arabidopsis thaliana
cttagtcgattcagata

SEQ ID NO: 89657 - DNA, 17 bp, Arabidopsis thaliana
cttagtcgcaacctgta

SEQ ID NO: 89658 - DNA, 17 bp, Arabidopsis thaliana
cttagtcgcaatcccgt

SEQ ID NO: 89659 - DNA, 17 bp, Arabidopsis thaliana
cttagtcgcaatcctat

SEQ ID NO: 89660 - DNA, 17 bp, Arabidopsis thaliana
cttagtcgcaatcctcc

SEQ ID NO: 89661 - DNA, 17 bp, Arabidopsis thaliana
cttagtcgcaatcctgt

SEQ ID NO: 89662 - DNA, 17 bp, Arabidopsis thaliana
cttagtcgcacccggta

SEQ ID NO: 89663 - DNA, 17 bp, Arabidopsis thaliana
cttagtcgcaccctaga

SEQ ID NO: 89664 - DNA, 17 bp, Arabidopsis thaliana
cttagtcgcaccctccc

SEQ ID NO: 89665 - DNA, 17 bp, Arabidopsis thaliana
cttagtcgcaccctgca

SEQ ID NO: 89666 - DNA, 17 bp, Arabidopsis thaliana
cttagtcgcaccctgta

SEQ ID NO: 89667 - DNA, 17 bp, Arabidopsis thaliana
cttagtcgcacctatag

SEQ ID NO: 89668 - DNA, 17 bp, Arabidopsis thaliana
cttagtcgcacctgaga

SEQ ID NO: 89669 - DNA, 17 bp, Arabidopsis thaliana
cttagtcgcacctgccc

SEQ ID NO: 89670 - DNA, 17 bp, Arabidopsis thaliana
cttagtcgcacctgtag

SEQ ID NO: 89671 - DNA, 17 bp, Arabidopsis thaliana
cttagtcgcacctgtcg

SEQ ID NO: 89672 - DNA, 17 bp, Arabidopsis thaliana
cttagtcgcacctgtgg

SEQ ID NO: 89673 - DNA, 17 bp, Arabidopsis thaliana
cttagtcgcacggacgc

SEQ ID NO: 89674 - DNA, 17 bp, Arabidopsis thaliana
cttagtcgcactgtaga

SEQ ID NO: 89675 - DNA, 17 bp, Arabidopsis thaliana
cttagtcgcactgtgat

SEQ ID NO: 89676 - DNA, 17 bp, Arabidopsis thaliana
cttagtcgcactgttga

SEQ ID NO: 89677 - DNA, 17 bp, Arabidopsis thaliana
cttagtcgcagcctgaa

SEQ ID NO: 89678 - DNA, 17 bp, Arabidopsis thaliana
cttagtcgcagcctgta

SEQ ID NO: 89679 - DNA, 17 bp, Arabidopsis thaliana
cttagtcgcagctgtag

SEQ ID NO: 89680 - DNA, 17 bp, Arabidopsis thaliana
cttagtcgcaggtgtgg

SEQ ID NO: 89681 - DNA, 17 bp, Arabidopsis thaliana
cttagtcgcatcaggta

SEQ ID NO: 89682 - DNA, 17 bp, Arabidopsis thaliana
cttagtcgcatccactc

SEQ ID NO: 89683 - DNA, 17 bp, Arabidopsis thaliana
cttagtcgcatccagat

SEQ ID NO: 89684 - DNA, 17 bp, Arabidopsis thaliana
cttagtcgcatccagta

SEQ ID NO: 89685 - DNA, 17 bp, Arabidopsis thaliana
cttagtcgcatcccgta

SEQ ID NO: 89686 - DNA, 17 bp, Arabidopsis thaliana
cttagtcgcatccctta

SEQ ID NO: 89687 - DNA, 17 bp, Arabidopsis thaliana
cttagtcgcatccgaga

SEQ ID NO: 89688 - DNA, 17 bp, Arabidopsis thaliana
cttagtcgcatccggta

SEQ ID NO: 89689 - DNA, 17 bp, Arabidopsis thaliana
cttagtcgcatccgtag

SEQ ID NO: 89690 - DNA, 17 bp, Arabidopsis thaliana
cttagtcgcatcctaga

SEQ ID NO: 89691 - DNA, 17 bp, Arabidopsis thaliana
cttagtcgcatcctata

SEQ ID NO: 89692 - DNA, 17 bp, Arabidopsis thaliana
cttagtcgcatcctccc

SEQ ID NO: 89693 - DNA, 17 bp, Arabidopsis thaliana
cttagtcgcatcctcta

SEQ ID NO: 89694 - DNA, 17 bp, Arabidopsis thaliana
cttagtcgcatcctgaa

SEQ ID NO: 89695 - DNA, 17 bp, Arabidopsis thaliana
cttagtcgcatcctgac

SEQ ID NO: 89696 - DNA, 17 bp, Arabidopsis thaliana
cttagtcgcatcctgag

SEQ ID NO: 89697 - DNA, 17 bp, Arabidopsis thaliana
cttagtcgcatcctgat

SEQ ID NO: 89698 - DNA, 17 bp, Arabidopsis thaliana
cttagtcgcatcctgca

SEQ ID NO: 89699 - DNA, 17 bp, Arabidopsis thaliana
cttagtcgcatcctgcc

SEQ ID NO: 89700 - DNA, 17 bp, Arabidopsis thaliana
cttagtcgcatcctgga

SEQ ID NO: 89701 - DNA, 17 bp, Arabidopsis thaliana
cttagtcgcatcctggt

SEQ ID NO: 89702 - DNA, 17 bp, Arabidopsis thaliana
cttagtcgcatcctgta

SEQ ID NO: 89703 - DNA, 17 bp, Arabidopsis thaliana
cttagtcgcatcctgtc

SEQ ID NO: 89704 - DNA, 17 bp, Arabidopsis thaliana
cttagtcgcatcctgtg

SEQ ID NO: 89705 - DNA, 17 bp, Arabidopsis thaliana
cttagtcgcatccttaa

SEQ ID NO: 89706 - DNA, 17 bp, Arabidopsis thaliana
cttagtcgcatccttga

SEQ ID NO: 89707 - DNA, 17 bp, Arabidopsis thaliana
cttagtcgcatccttta

SEQ ID NO: 89708 - DNA, 17 bp, Arabidopsis thaliana
cttagtcgcatcgtagg

SEQ ID NO: 89709 - DNA, 17 bp, Arabidopsis thaliana
cttagtcgcatctgtag

SEQ ID NO: 89710 - DNA, 17 bp, Arabidopsis thaliana
cttagtcgcatctgtcg

SEQ ID NO: 89711 - DNA, 17 bp, Arabidopsis thaliana
cttagtcgcatctgtgg

SEQ ID NO: 89712 - DNA, 17 bp, Arabidopsis thaliana
cttagtcgcatcttgta

SEQ ID NO: 89713 - DNA, 17 bp, Arabidopsis thaliana
cttagtcgcatgctgta

SEQ ID NO: 89714 - DNA, 17 bp, Arabidopsis thaliana
cttagtcgcatgtagat

SEQ ID NO: 89715 - DNA, 17 bp, Arabidopsis thaliana
cttagtcgcattaggta

SEQ ID NO: 89716 - DNA, 17 bp, Arabidopsis thaliana
cttagtcgcattcctgt

SEQ ID NO: 89717 - DNA, 17 bp, Arabidopsis thaliana
cttagtcgcattctgca

SEQ ID NO: 89718 - DNA, 17 bp, Arabidopsis thaliana
cttagtcgcattctgga

SEQ ID NO: 89719 - DNA, 17 bp, Arabidopsis thaliana
cttagtcgcattctgta

SEQ ID NO: 89720 - DNA, 17 bp, Arabidopsis thaliana
cttagtcgcattctgtc

SEQ ID NO: 89721 - DNA, 17 bp, Arabidopsis thaliana
cttagtcgcattcttta

SEQ ID NO: 89722 - DNA, 17 bp, Arabidopsis thaliana
cttagtcgcattgtaga

SEQ ID NO: 89723 - DNA, 17 bp, Arabidopsis thaliana
cttagtcgcattgtagg

SEQ ID NO: 89724 - DNA, 17 bp, Arabidopsis thaliana
cttagtcgcatttgtag

SEQ ID NO: 89725 - DNA, 17 bp, Arabidopsis thaliana
cttagtcgccatcctgg

SEQ ID NO: 89726 - DNA, 17 bp, Arabidopsis thaliana
cttagtcgccatctgta

SEQ ID NO: 89727 - DNA, 17 bp, Arabidopsis thaliana
cttagtcgccctgcaga

SEQ ID NO: 89728 - DNA, 17 bp, Arabidopsis thaliana
cttagtcgccctgtaaa

SEQ ID NO: 89729 - DNA, 17 bp, Arabidopsis thaliana
cttagtcgccctgtaga

SEQ ID NO: 89730 - DNA, 17 bp, Arabidopsis thaliana
cttagtcgccctgtagg

SEQ ID NO: 89731 - DNA, 17 bp, Arabidopsis thaliana
cttagtcgccgtagatg

SEQ ID NO: 89732 - DNA, 17 bp, Arabidopsis thaliana
cttagtcgcctcctgta

SEQ ID NO: 89733 - DNA, 17 bp, Arabidopsis thaliana
cttagtcgcctctagat

SEQ ID NO: 89734 - DNA, 17 bp, Arabidopsis thaliana
cttagtcgcctgtagat

SEQ ID NO: 89735 - DNA, 17 bp, Arabidopsis thaliana
cttagtcgcctgtaggt

SEQ ID NO: 89736 - DNA, 17 bp, Arabidopsis thaliana
cttagtcgctccgtaga

SEQ ID NO: 89737 - DNA, 17 bp, Arabidopsis thaliana
cttagtcgctcctgaga

SEQ ID NO: 89738 - DNA, 17 bp, Arabidopsis thaliana
cttagtcgctcctgtag

SEQ ID NO: 89739 - DNA, 17 bp, Arabidopsis thaliana
cttagtcgctgcttttg

SEQ ID NO: 89740 - DNA, 17 bp, Arabidopsis thaliana
cttagtcgctgtagatg

SEQ ID NO: 89741 - DNA, 17 bp, Arabidopsis thaliana
cttagtcgctgtaggat

SEQ ID NO: 89742 - DNA, 17 bp, Arabidopsis thaliana
cttagtcgcttactgta

SEQ ID NO: 89743 - DNA, 17 bp, Arabidopsis thaliana
cttagtcgcttagtcgc

SEQ ID NO: 89744 - DNA, 17 bp, Arabidopsis thaliana
cttagtcgcttcctgca

SEQ ID NO: 89745 - DNA, 17 bp, Arabidopsis thaliana
cttagtcgcttcctgta

SEQ ID NO: 89746 - DNA, 17 bp, Arabidopsis thaliana
cttagtcgcttgtagat

SEQ ID NO: 89747 - DNA, 17 bp, Arabidopsis thaliana
cttagtcggatcctgta

SEQ ID NO: 89748 - DNA, 17 bp, Arabidopsis thaliana
cttagtcgtactgtagt

SEQ ID NO: 89749 - DNA, 17 bp, Arabidopsis thaliana
cttagtcgtatcctgta

SEQ ID NO: 89750 - DNA, 17 bp, Arabidopsis thaliana
cttagtcgtatcctgtt

SEQ ID NO: 89751 - DNA, 17 bp, Arabidopsis thaliana
cttagtcgtatcttgta

SEQ ID NO: 89752 - DNA, 17 bp, Arabidopsis thaliana
cttagtcgtcctgtaga

SEQ ID NO: 89753 - DNA, 17 bp, Arabidopsis thaliana
cttagtcgtcctgtgat

SEQ ID NO: 89754 - DNA, 17 bp, Arabidopsis thaliana
cttagtctcatcctgta

SEQ ID NO: 89755 - DNA, 17 bp, Arabidopsis thaliana
cttagtctctcttgcga

SEQ ID NO: 89756 - DNA, 17 bp, Arabidopsis thaliana
cttagtcttgtactgct

SEQ ID NO: 89757 - DNA, 17 bp, Arabidopsis thaliana
cttagtgacttctgatc

SEQ ID NO: 89758 - DNA, 17 bp, Arabidopsis thaliana
cttagtgagccggactc

SEQ ID NO: 89759 - DNA, 17 bp, Arabidopsis thaliana
cttagtgaggcgatcct

SEQ ID NO: 89760 - DNA, 17 bp, Arabidopsis thaliana
cttagtgcaccctgtag

SEQ ID NO: 89761 - DNA, 17 bp, Arabidopsis thaliana
cttagtgcatcctgtag

SEQ ID NO: 89762 - DNA, 17 bp, Arabidopsis thaliana
cttagtggttctcttcg

SEQ ID NO: 89763 - DNA, 17 bp, Arabidopsis thaliana
cttagtgtttaggttgt

SEQ ID NO: 89764 - DNA, 17 bp, Arabidopsis thaliana
cttagttacaatggttg

SEQ ID NO: 89765 - DNA, 17 bp, Arabidopsis thaliana
cttagttattccactcc

SEQ ID NO: 89766 - DNA, 17 bp, Arabidopsis thaliana
cttagttcaagccagat

SEQ ID NO: 89767 - DNA, 17 bp, Arabidopsis thaliana
cttagttctactaccgg

SEQ ID NO: 89768 - DNA, 17 bp, Arabidopsis thaliana
cttagttgcatcctgga

SEQ ID NO: 89769 - DNA, 17 bp, Arabidopsis thaliana
cttagttggtggagcga

SEQ ID NO: 89770 - DNA, 17 bp, Arabidopsis thaliana
cttagttggtggagcgg

SEQ ID NO: 89771 - DNA, 17 bp, Arabidopsis thaliana
cttagtttccgggatca

SEQ ID NO: 89772 - DNA, 17 bp, Arabidopsis thaliana
cttagtttccgggatcc

SEQ ID NO: 89773 - DNA, 17 bp, Arabidopsis thaliana
cttagtttccgtctggg

SEQ ID NO: 89774 - DNA, 17 bp, Arabidopsis thaliana
cttagtttggcttggct

SEQ ID NO: 89775 - DNA, 17 bp, Arabidopsis thaliana
cttagttttctggtgtt

SEQ ID NO: 89776 - DNA, 17 bp, Arabidopsis thaliana
cttagttttggattgaa

SEQ ID NO: 89777 - DNA, 17 bp, Arabidopsis thaliana
cttataagaccggttgc

SEQ ID NO: 89778 - DNA, 17 bp, Arabidopsis thaliana
cttatacggatcaggcg

SEQ ID NO: 89779 - DNA, 17 bp, Arabidopsis thaliana
cttataggactccgctg

SEQ ID NO: 89780 - DNA, 17 bp, Arabidopsis thaliana
cttatcaagggactcgt

SEQ ID NO: 89781 - DNA, 17 bp, Arabidopsis thaliana
cttatcaagtgcttcaa

SEQ ID NO: 89782 - DNA, 17 bp, Arabidopsis thaliana
cttatcattgggtgaga

SEQ ID NO: 89783 - DNA, 17 bp, Arabidopsis thaliana
cttatccaaggagacag

SEQ ID NO: 89784 - DNA, 17 bp, Arabidopsis thaliana
cttatccatcttgatga

SEQ ID NO: 89785 - DNA, 17 bp, Arabidopsis thaliana
cttatccctactgtttc

SEQ ID NO: 89786 - DNA, 17 bp, Arabidopsis thaliana
cttatccctctgatccc

SEQ ID NO: 89787 - DNA, 17 bp, Arabidopsis thaliana
cttatcgaacgctatgt

SEQ ID NO: 89788 - DNA, 17 bp, Arabidopsis thaliana
cttatcgaagtgatgat

SEQ ID NO: 89789 - DNA, 17 bp, Arabidopsis thaliana
cttatcgacccggctgt

SEQ ID NO: 89790 - DNA, 17 bp, Arabidopsis thaliana
cttatcgattatgacgg

SEQ ID NO: 89791 - DNA, 17 bp, Arabidopsis thaliana
cttatcgattatggcgg

SEQ ID NO: 89792 - DNA, 17 bp, Arabidopsis thaliana
cttatcgcaacttagcc

SEQ ID NO: 89793 - DNA, 17 bp, Arabidopsis thaliana
cttatcgcatcctgtag

SEQ ID NO: 89794 - DNA, 17 bp, Arabidopsis thaliana
cttatcgcttgtggagt

SEQ ID NO: 89795 - DNA, 17 bp, Arabidopsis thaliana
cttatcgtccacagcaa

SEQ ID NO: 89796 - DNA, 17 bp, Arabidopsis thaliana
cttatctatcctatcgg

SEQ ID NO: 89797 - DNA, 17 bp, Arabidopsis thaliana
cttatctcgaccgattt

SEQ ID NO: 89798 - DNA, 17 bp, Arabidopsis thaliana
cttatctgagcgattgg

SEQ ID NO: 89799 - DNA, 17 bp, Arabidopsis thaliana
cttatctgcggaccgct

SEQ ID NO: 89800 - DNA, 17 bp, Arabidopsis thaliana
cttatctggactttggc

SEQ ID NO: 89801 - DNA, 17 bp, Arabidopsis thaliana
cttatctggatctggct

SEQ ID NO: 89802 - DNA, 17 bp, Arabidopsis thaliana
cttatctgtcagtcgcg

SEQ ID NO: 89803 - DNA, 17 bp, Arabidopsis thaliana
cttatctgtggtaagta

SEQ ID NO: 89804 - DNA, 17 bp, Arabidopsis thaliana
cttatcttcaagttcgc

SEQ ID NO: 89805 - DNA, 17 bp, Arabidopsis thaliana
cttatcttcagccatac

SEQ ID NO: 89806 - DNA, 17 bp, Arabidopsis thaliana
cttatcttcatgaatcg

SEQ ID NO: 89807 - DNA, 17 bp, Arabidopsis thaliana
cttatcttccggcctcc

SEQ ID NO: 89808 - DNA, 17 bp, Arabidopsis thaliana
cttatcttgtgacacat

SEQ ID NO: 89809 - DNA, 17 bp, Arabidopsis thaliana
cttatgaccaactcccg

SEQ ID NO: 89810 - DNA, 17 bp, Arabidopsis thaliana
cttatgaccaactctcg

SEQ ID NO: 89811 - DNA, 17 bp, Arabidopsis thaliana
cttatgagaatctgtac

SEQ ID NO: 89812 - DNA, 17 bp, Arabidopsis thaliana
cttatgagatgctatga

SEQ ID NO: 89813 - DNA, 17 bp, Arabidopsis thaliana
cttatgagggagtgggc

SEQ ID NO: 89814 - DNA, 17 bp, Arabidopsis thaliana
cttatgagggagtgggt

SEQ ID NO: 89815 - DNA, 17 bp, Arabidopsis thaliana
cttatgagggagtggtc

SEQ ID NO: 89816 - DNA, 17 bp, Arabidopsis thaliana
cttatgagggtccgaga

SEQ ID NO: 89817 - DNA, 17 bp, Arabidopsis thaliana
cttatgagggtccgata

SEQ ID NO: 89818 - DNA, 17 bp, Arabidopsis thaliana
cttatgccatcctgctc

SEQ ID NO: 89819 - DNA, 17 bp, Arabidopsis thaliana
cttatgccctagcacaa

SEQ ID NO: 89820 - DNA, 17 bp, Arabidopsis thaliana
cttatgcctttaagatc

SEQ ID NO: 89821 - DNA, 17 bp, Arabidopsis thaliana
cttatgcgcagagccgt

SEQ ID NO: 89822 - DNA, 17 bp, Arabidopsis thaliana
cttatgcggggcggggg

SEQ ID NO: 89823 - DNA, 17 bp, Arabidopsis thaliana
cttatgcgtctatgtca

SEQ ID NO: 89824 - DNA, 17 bp, Arabidopsis thaliana
cttatggacccgaacct

SEQ ID NO: 89825 - DNA, 17 bp, Arabidopsis thaliana
cttatggcagtccacat

SEQ ID NO: 89826 - DNA, 17 bp, Arabidopsis thaliana
cttatggcggttctcag

SEQ ID NO: 89827 - DNA, 17 bp, Arabidopsis thaliana
cttatggtcgttgggat

SEQ ID NO: 89828 - DNA, 17 bp, Arabidopsis thaliana
cttatgtcaattgcttt

SEQ ID NO: 89829 - DNA, 17 bp, Arabidopsis thaliana
cttatgtgatgatgtga

SEQ ID NO: 89830 - DNA, 17 bp, Arabidopsis thaliana
cttatgtgtgattgctt

SEQ ID NO: 89831 - DNA, 17 bp, Arabidopsis thaliana
cttattaaacaactccc

SEQ ID NO: 89832 - DNA, 17 bp, Arabidopsis thaliana
cttattaccaggacctg

SEQ ID NO: 89833 - DNA, 17 bp, Arabidopsis thaliana
cttattatttgcttggg

SEQ ID NO: 89834 - DNA, 17 bp, Arabidopsis thaliana
cttattcactccaccac

SEQ ID NO: 89835 - DNA, 17 bp, Arabidopsis thaliana
cttattcacttttccat

SEQ ID NO: 89836 - DNA, 17 bp, Arabidopsis thaliana
cttattcagcaggacgt

SEQ ID NO: 89837 - DNA, 17 bp, Arabidopsis thaliana
cttattcattggtggct

SEQ ID NO: 89838 - DNA, 17 bp, Arabidopsis thaliana
cttattcgcagcctgta

SEQ ID NO: 89839 - DNA, 17 bp, Arabidopsis thaliana
cttattcgcatcctgta

SEQ ID NO: 89840 - DNA, 17 bp, Arabidopsis thaliana
cttattcgctagtacct

SEQ ID NO: 89841 - DNA, 17 bp, Arabidopsis thaliana
cttattctccaggagag

SEQ ID NO: 89842 - DNA, 17 bp, Arabidopsis thaliana
cttattctcttccagga

SEQ ID NO: 89843 - DNA, 17 bp, Arabidopsis thaliana
cttattgaccgcaactt

SEQ ID NO: 89844 - DNA, 17 bp, Arabidopsis thaliana
cttattgctcgacgcat

SEQ ID NO: 89845 - DNA, 17 bp, Arabidopsis thaliana
cttattgggttcgtcgt

SEQ ID NO: 89846 - DNA, 17 bp, Arabidopsis thaliana
cttattgtggtttcgac

SEQ ID NO: 89847 - DNA, 17 bp, Arabidopsis thaliana
cttattgttatgcgtct

SEQ ID NO: 89848 - DNA, 17 bp, Arabidopsis thaliana
cttatttacaacggctg

SEQ ID NO: 89849 - DNA, 17 bp, Arabidopsis thaliana
cttatttacaatggccg

SEQ ID NO: 89850 - DNA, 17 bp, Arabidopsis thaliana
cttatttacaatggctc

SEQ ID NO: 89851 - DNA, 17 bp, Arabidopsis thaliana
cttatttacaatggctg

SEQ ID NO: 89852 - DNA, 17 bp, Arabidopsis thaliana
cttatttacaatggctt

SEQ ID NO: 89853 - DNA, 17 bp, Arabidopsis thaliana
cttatttacaatggttg

SEQ ID NO: 89854 - DNA, 17 bp, Arabidopsis thaliana
cttatttacagtggccc

SEQ ID NO: 89855 - DNA, 17 bp, Arabidopsis thaliana
cttatttacagtggcta

SEQ ID NO: 89856 - DNA, 17 bp, Arabidopsis thaliana
cttatttacagtggctc

SEQ ID NO: 89857 - DNA, 17 bp, Arabidopsis thaliana
cttatttacagtggctg

SEQ ID NO: 89858 - DNA, 17 bp, Arabidopsis thaliana
cttatttacattggctt

SEQ ID NO: 89859 - DNA, 17 bp, Arabidopsis thaliana
cttatttacgatggctg

SEQ ID NO: 89860 - DNA, 17 bp, Arabidopsis thaliana
cttatttaggcgggcct

SEQ ID NO: 89861 - DNA, 17 bp, Arabidopsis thaliana
cttatttcctccgcgac

SEQ ID NO: 89862 - DNA, 17 bp, Arabidopsis thaliana
cttatttcgtcggaggg

SEQ ID NO: 89863 - DNA, 17 bp, Arabidopsis thaliana
cttatttcgttgctctt

SEQ ID NO: 89864 - DNA, 17 bp, Arabidopsis thaliana
cttattttcagacatgt

SEQ ID NO: 89865 - DNA, 17 bp, Arabidopsis thaliana
cttatttttgccgatgg

SEQ ID NO: 89866 - DNA, 17 bp, Arabidopsis thaliana
cttcaaaacccgaaaac

SEQ ID NO: 89867 - DNA, 17 bp, Arabidopsis thaliana
cttcaaaagtgacattc

SEQ ID NO: 89868 - DNA, 17 bp, Arabidopsis thaliana
cttcaaaatatgacaga

SEQ ID NO: 89869 - DNA, 17 bp, Arabidopsis thaliana
cttcaaaatttggaggc

SEQ ID NO: 89870 - DNA, 17 bp, Arabidopsis thaliana
cttcaaacggtgcttag

SEQ ID NO: 89871 - DNA, 17 bp, Arabidopsis thaliana
cttcaaacttccaatgt

SEQ ID NO: 89872 - DNA, 17 bp, Arabidopsis thaliana
cttcaaatgacggtgct

SEQ ID NO: 89873 - DNA, 17 bp, Arabidopsis thaliana
cttcaaatgtcacttcc

SEQ ID NO: 89874 - DNA, 17 bp, Arabidopsis thaliana
cttcaaatgttatttcc

SEQ ID NO: 89875 - DNA, 17 bp, Arabidopsis thaliana
cttcaaattggctgctg

SEQ ID NO: 89876 - DNA, 17 bp, Arabidopsis thaliana
cttcaacaacattgtga

SEQ ID NO: 89877 - DNA, 17 bp, Arabidopsis thaliana
cttcaacacggataatg

SEQ ID NO: 89878 - DNA, 17 bp, Arabidopsis thaliana
cttcaacacttgctttt

SEQ ID NO: 89879 - DNA, 17 bp, Arabidopsis thaliana
cttcaaccaccacatct

SEQ ID NO: 89880 - DNA, 17 bp, Arabidopsis thaliana
cttcaaccatttgtgcc

SEQ ID NO: 89881 - DNA, 17 bp, Arabidopsis thaliana
cttcaacgggagtttgt

SEQ ID NO: 89882 - DNA, 17 bp, Arabidopsis thaliana
cttcaacgtcgtcttgc

SEQ ID NO: 89883 - DNA, 17 bp, Arabidopsis thaliana
cttcaactggagatcgg

SEQ ID NO: 89884 - DNA, 17 bp, Arabidopsis thaliana
cttcaactgtttggctc

SEQ ID NO: 89885 - DNA, 17 bp, Arabidopsis thaliana
cttcaactttcaaattg

SEQ ID NO: 89886 - DNA, 17 bp, Arabidopsis thaliana
cttcaagactcttttgc

SEQ ID NO: 89887 - DNA, 17 bp, Arabidopsis thaliana
cttcaagattcctctgg

SEQ ID NO: 89888 - DNA, 17 bp, Arabidopsis thaliana
cttcaagctcaggttat

SEQ ID NO: 89889 - DNA, 17 bp, Arabidopsis thaliana
cttcaagcttcaagagg

SEQ ID NO: 89890 - DNA, 17 bp, Arabidopsis thaliana
cttcaaggaaaagtcta

SEQ ID NO: 89891 - DNA, 17 bp, Arabidopsis thaliana
cttcaaggtcgaatccg

SEQ ID NO: 89892 - DNA, 17 bp, Arabidopsis thaliana
cttcaaggtgatgttgt

SEQ ID NO: 89893 - DNA, 17 bp, Arabidopsis thaliana
cttcaagtttgcagtag

SEQ ID NO: 89894 - DNA, 17 bp, Arabidopsis thaliana
cttcaagtttgcgttga

SEQ ID NO: 89895 - DNA, 17 bp, Arabidopsis thaliana
cttcaagtttgcgttgc

SEQ ID NO: 89896 - DNA, 17 bp, Arabidopsis thaliana
cttcaatattctgtagt

SEQ ID NO: 89897 - DNA, 17 bp, Arabidopsis thaliana
cttcaatccaaagatca

SEQ ID NO: 89898 - DNA, 17 bp, Arabidopsis thaliana
cttcaatccaaagatcc

SEQ ID NO: 89899 - DNA, 17 bp, Arabidopsis thaliana
cttcaatccgggtagtc

SEQ ID NO: 89900 - DNA, 17 bp, Arabidopsis thaliana
cttcaatcctagagtgc

SEQ ID NO: 89901 - DNA, 17 bp, Arabidopsis thaliana
cttcaatcgggaccaca

SEQ ID NO: 89902 - DNA, 17 bp, Arabidopsis thaliana
cttcaatcttggatcaa

SEQ ID NO: 89903 - DNA, 17 bp, Arabidopsis thaliana
cttcaatgacaagtcca

SEQ ID NO: 89904 - DNA, 17 bp, Arabidopsis thaliana
cttcaatgcatgtggct

SEQ ID NO: 89905 - DNA, 17 bp, Arabidopsis thaliana
cttcaatggtcgatctc

SEQ ID NO: 89906 - DNA, 17 bp, Arabidopsis thaliana
cttcaatgtatgcaaat

SEQ ID NO: 89907 - DNA, 17 bp, Arabidopsis thaliana
cttcaattttctcagac

SEQ ID NO: 89908 - DNA, 17 bp, Arabidopsis thaliana
cttcaattttgcgaggg

SEQ ID NO: 89909 - DNA, 17 bp, Arabidopsis thaliana
cttcaattttgttgcga

SEQ ID NO: 89910 - DNA, 17 bp, Arabidopsis thaliana
cttcacaaagccactac

SEQ ID NO: 89911 - DNA, 17 bp, Arabidopsis thaliana
cttcacaattggactgg

SEQ ID NO: 89912 - DNA, 17 bp, Arabidopsis thaliana
cttcacacagctatacc

SEQ ID NO: 89913 - DNA, 17 bp, Arabidopsis thaliana
cttcacaccagggggac

SEQ ID NO: 89914 - DNA, 17 bp, Arabidopsis thaliana
cttcacagaggctcagt

SEQ ID NO: 89915 - DNA, 17 bp, Arabidopsis thaliana
cttcacagcgagaaggt

SEQ ID NO: 89916 - DNA, 17 bp, Arabidopsis thaliana
cttcacagcgatttgtt

SEQ ID NO: 89917 - DNA, 17 bp, Arabidopsis thaliana
cttcacagttaagcgtg

SEQ ID NO: 89918 - DNA, 17 bp, Arabidopsis thaliana
cttcacattgaatttga

SEQ ID NO: 89919 - DNA, 17 bp, Arabidopsis thaliana
cttcacatttacaggcc

SEQ ID NO: 89920 - DNA, 17 bp, Arabidopsis thaliana
cttcaccaaatctgaac

SEQ ID NO: 89921 - DNA, 17 bp, Arabidopsis thaliana
cttcaccaagactcccg

SEQ ID NO: 89922 - DNA, 17 bp, Arabidopsis thaliana
cttcaccaagtctgaac

SEQ ID NO: 89923 - DNA, 17 bp, Arabidopsis thaliana
cttcaccacgaggcgct

SEQ ID NO: 89924 - DNA, 17 bp, Arabidopsis thaliana
cttcaccagaggaagat

SEQ ID NO: 89925 - DNA, 17 bp, Arabidopsis thaliana
cttcaccagatctgaac

SEQ ID NO: 89926 - DNA, 17 bp, Arabidopsis thaliana
cttcaccaggtctgaac

SEQ ID NO: 89927 - DNA, 17 bp, Arabidopsis thaliana
cttcaccaggtctgagc

SEQ ID NO: 89928 - DNA, 17 bp, Arabidopsis thaliana
cttcaccagtcgccatt

SEQ ID NO: 89929 - DNA, 17 bp, Arabidopsis thaliana
cttcaccattctgtgaa

SEQ ID NO: 89930 - DNA, 17 bp, Arabidopsis thaliana
cttcaccgaattagggt

SEQ ID NO: 89931 - DNA, 17 bp, Arabidopsis thaliana
cttcaccgagaaccttg

SEQ ID NO: 89932 - DNA, 17 bp, Arabidopsis thaliana
cttcaccgccactacaa

SEQ ID NO: 89933 - DNA, 17 bp, Arabidopsis thaliana
cttcaccgctgttgtct

SEQ ID NO: 89934 - DNA, 17 bp, Arabidopsis thaliana
cttcaccggagaagtga

SEQ ID NO: 89935 - DNA, 17 bp, Arabidopsis thaliana
cttcaccggagtttctc

SEQ ID NO: 89936 - DNA, 17 bp, Arabidopsis thaliana
cttcaccggatctggcg

SEQ ID NO: 89937 - DNA, 17 bp, Arabidopsis thaliana
cttcaccgtcgtgttcc

SEQ ID NO: 89938 - DNA, 17 bp, Arabidopsis thaliana
cttcaccttgtgttgcg

SEQ ID NO: 89939 - DNA, 17 bp, Arabidopsis thaliana
cttcacgagaacgggac

SEQ ID NO: 89940 - DNA, 17 bp, Arabidopsis thaliana
cttcacgattgctctag

SEQ ID NO: 89941 - DNA, 17 bp, Arabidopsis thaliana
cttcacggccggcttct

SEQ ID NO: 89942 - DNA, 17 bp, Arabidopsis thaliana
cttcacgggcgggcgac

SEQ ID NO: 89943 - DNA, 17 bp, Arabidopsis thaliana
cttcacgggcgggcgcc

SEQ ID NO: 89944 - DNA, 17 bp, Arabidopsis thaliana
cttcacggttgcgactc

SEQ ID NO: 89945 - DNA, 17 bp, Arabidopsis thaliana
cttcacgtagctgatta

SEQ ID NO: 89946 - DNA, 17 bp, Arabidopsis thaliana
cttcacgtcatccgata

SEQ ID NO: 89947 - DNA, 17 bp, Arabidopsis thaliana
cttcacgtcattcaccg

SEQ ID NO: 89948 - DNA, 17 bp, Arabidopsis thaliana
cttcacgtctgcctggg

SEQ ID NO: 89949 - DNA, 17 bp, Arabidopsis thaliana
cttcactaggatcatct

SEQ ID NO: 89950 - DNA, 17 bp, Arabidopsis thaliana
cttcactccgccggact

SEQ ID NO: 89951 - DNA, 17 bp, Arabidopsis thaliana
cttcactctttaggatg

SEQ ID NO: 89952 - DNA, 17 bp, Arabidopsis thaliana
cttcactgacaaagaca

SEQ ID NO: 89953 - DNA, 17 bp, Arabidopsis thaliana
cttcactgcgtttctac

SEQ ID NO: 89954 - DNA, 17 bp, Arabidopsis thaliana
cttcactgctctatctg

SEQ ID NO: 89955 - DNA, 17 bp, Arabidopsis thaliana
cttcactggtgtgatga

SEQ ID NO: 89956 - DNA, 17 bp, Arabidopsis thaliana
cttcactgttccctggg

SEQ ID NO: 89957 - DNA, 17 bp, Arabidopsis thaliana
cttcacttggactctcc

SEQ ID NO: 89958 - DNA, 17 bp, Arabidopsis thaliana
cttcactttccgttaac

SEQ ID NO: 89959 - DNA, 17 bp, Arabidopsis thaliana
cttcactttcggactag

SEQ ID NO: 89960 - DNA, 17 bp, Arabidopsis thaliana
cttcagaatttgtgtgc

SEQ ID NO: 89961 - DNA, 17 bp, Arabidopsis thaliana
cttcagagccgagaccc

SEQ ID NO: 89962 - DNA, 17 bp, Arabidopsis thaliana
cttcagagccgagagag

SEQ ID NO: 89963 - DNA, 17 bp, Arabidopsis thaliana
cttcagagtccacattt

SEQ ID NO: 89964 - DNA, 17 bp, Arabidopsis thaliana
cttcagagtggactttt

SEQ ID NO: 89965 - DNA, 17 bp, Arabidopsis thaliana
cttcagatctgcaggat

SEQ ID NO: 89966 - DNA, 17 bp, Arabidopsis thaliana
cttcagatcttgttcag

SEQ ID NO: 89967 - DNA, 17 bp, Arabidopsis thaliana
cttcagatctttttcag

SEQ ID NO: 89968 - DNA, 17 bp, Arabidopsis thaliana
cttcagcattccgggac

SEQ ID NO: 89969 - DNA, 17 bp, Arabidopsis thaliana
cttcagccaattgcgga

SEQ ID NO: 89970 - DNA, 17 bp, Arabidopsis thaliana
cttcagccagcctaagc

SEQ ID NO: 89971 - DNA, 17 bp, Arabidopsis thaliana
cttcagcccacaccact

SEQ ID NO: 89972 - DNA, 17 bp, Arabidopsis thaliana
cttcagccctttgtcgc

SEQ ID NO: 89973 - DNA, 17 bp, Arabidopsis thaliana
cttcagcctcttgcgaa

SEQ ID NO: 89974 - DNA, 17 bp, Arabidopsis thaliana
cttcagcgatggtgcaa

SEQ ID NO: 89975 - DNA, 17 bp, Arabidopsis thaliana
cttcagcggtgtcctag

SEQ ID NO: 89976 - DNA, 17 bp, Arabidopsis thaliana
cttcagcgtctgccaat

SEQ ID NO: 89977 - DNA, 17 bp, Arabidopsis thaliana
cttcagctcgcgttgac

SEQ ID NO: 89978 - DNA, 17 bp, Arabidopsis thaliana
cttcagctgtgtgagga

SEQ ID NO: 89979 - DNA, 17 bp, Arabidopsis thaliana
cttcaggaaagggcagt

SEQ ID NO: 89980 - DNA, 17 bp, Arabidopsis thaliana
cttcaggacatttggcg

SEQ ID NO: 89981 - DNA, 17 bp, Arabidopsis thaliana
cttcaggacttggatac

SEQ ID NO: 89982 - DNA, 17 bp, Arabidopsis thaliana
cttcaggacttggatcc

SEQ ID NO: 89983 - DNA, 17 bp, Arabidopsis thaliana
cttcaggatgtctacaa

SEQ ID NO: 89984 - DNA, 17 bp, Arabidopsis thaliana
cttcaggattattggct

SEQ ID NO: 89985 - DNA, 17 bp, Arabidopsis thaliana
cttcaggccgagtgttg

SEQ ID NO: 89986 - DNA, 17 bp, Arabidopsis thaliana
cttcagggataactggc

SEQ ID NO: 89987 - DNA, 17 bp, Arabidopsis thaliana
cttcagggattcgctta

SEQ ID NO: 89988 - DNA, 17 bp, Arabidopsis thaliana
cttcagggctctgttga

SEQ ID NO: 89989 - DNA, 17 bp, Arabidopsis thaliana
cttcaggggactgtacc

SEQ ID NO: 89990 - DNA, 17 bp, Arabidopsis thaliana
cttcaggggctcagctg

SEQ ID NO: 89991 - DNA, 17 bp, Arabidopsis thaliana
cttcaggtcccgagtta

SEQ ID NO: 89992 - DNA, 17 bp, Arabidopsis thaliana
cttcaggtctccaaggt

SEQ ID NO: 89993 - DNA, 17 bp, Arabidopsis thaliana
cttcagtagactgtgtc

SEQ ID NO: 89994 - DNA, 17 bp, Arabidopsis thaliana
cttcagtaggggccttt

SEQ ID NO: 89995 - DNA, 17 bp, Arabidopsis thaliana
cttcagtatcaagtggc

SEQ ID NO: 89996 - DNA, 17 bp, Arabidopsis thaliana
cttcagtccttgccggg

SEQ ID NO: 89997 - DNA, 17 bp, Arabidopsis thaliana
cttcagtgcgtttctac

SEQ ID NO: 89998 - DNA, 17 bp, Arabidopsis thaliana
cttcagttcaactatag

SEQ ID NO: 89999 - DNA, 17 bp, Arabidopsis thaliana
cttcagttcggattgca

SEQ ID NO: 90000 - DNA, 17 bp, Arabidopsis thaliana
cttcagttgaccagtcc

SEQ ID NO: 90001 - DNA, 17 bp, Arabidopsis thaliana
cttcagttggatcacgg

SEQ ID NO: 90002 - DNA, 17 bp, Arabidopsis thaliana
cttcagtttggtttgac

SEQ ID NO: 90003 - DNA, 17 bp, Arabidopsis thaliana
cttcataccgggcagat

SEQ ID NO: 90004 - DNA, 17 bp, Arabidopsis thaliana
cttcatacgattgtgcc

SEQ ID NO: 90005 - DNA, 17 bp, Arabidopsis thaliana
cttcatactcggttgcc

SEQ ID NO: 90006 - DNA, 17 bp, Arabidopsis thaliana
cttcataggaacgtgat

SEQ ID NO: 90007 - DNA, 17 bp, Arabidopsis thaliana
cttcatagtcctctctg

SEQ ID NO: 90008 - DNA, 17 bp, Arabidopsis thaliana
cttcatagttacaggct

SEQ ID NO: 90009 - DNA, 17 bp, Arabidopsis thaliana
cttcatcaagtttcggc

SEQ ID NO: 90010 - DNA, 17 bp, Arabidopsis thaliana
cttcatcaccatgaact

SEQ ID NO: 90011 - DNA, 17 bp, Arabidopsis thaliana
cttcatcactttatttg

SEQ ID NO: 90012 - DNA, 17 bp, Arabidopsis thaliana
cttcatcaggctgatca

SEQ ID NO: 90013 - DNA, 17 bp, Arabidopsis thaliana
cttcatcagggacaaac

SEQ ID NO: 90014 - DNA, 17 bp, Arabidopsis thaliana
cttcatcatcgccttgc

SEQ ID NO: 90015 - DNA, 17 bp, Arabidopsis thaliana
cttcatccatcaacgga

SEQ ID NO: 90016 - DNA, 17 bp, Arabidopsis thaliana
cttcatcccttgagtga

SEQ ID NO: 90017 - DNA, 17 bp, Arabidopsis thaliana
cttcatccgaggggggg

SEQ ID NO: 90018 - DNA, 17 bp, Arabidopsis thaliana
cttcatccgtgacaagt

SEQ ID NO: 90019 - DNA, 17 bp, Arabidopsis thaliana
cttcatcctcgggatca

SEQ ID NO: 90020 - DNA, 17 bp, Arabidopsis thaliana
cttcatcgaacctatgc

SEQ ID NO: 90021 - DNA, 17 bp, Arabidopsis thaliana
cttcatcgcaatggcta

SEQ ID NO: 90022 - DNA, 17 bp, Arabidopsis thaliana
cttcatcgcccagagga

SEQ ID NO: 90023 - DNA, 17 bp, Arabidopsis thaliana
cttcatcgcctagagaa

SEQ ID NO: 90024 - DNA, 17 bp, Arabidopsis thaliana
cttcatcgctacgcaga

SEQ ID NO: 90025 - DNA, 17 bp, Arabidopsis thaliana
cttcatcggagaagtga

SEQ ID NO: 90026 - DNA, 17 bp, Arabidopsis thaliana
cttcatcggagtcgctg

SEQ ID NO: 90027 - DNA, 17 bp, Arabidopsis thaliana
cttcatcggttgacaag

SEQ ID NO: 90028 - DNA, 17 bp, Arabidopsis thaliana
cttcatcgtcgtgacgt

SEQ ID NO: 90029 - DNA, 17 bp, Arabidopsis thaliana
cttcatctatatcatcc

SEQ ID NO: 90030 - DNA, 17 bp, Arabidopsis thaliana
cttcatctccaacaaat

SEQ ID NO: 90031 - DNA, 17 bp, Arabidopsis thaliana
cttcatctctggtctct

SEQ ID NO: 90032 - DNA, 17 bp, Arabidopsis thaliana
cttcatctctggtttct

SEQ ID NO: 90033 - DNA, 17 bp, Arabidopsis thaliana
cttcatctgcacatggc

SEQ ID NO: 90034 - DNA, 17 bp, Arabidopsis thaliana
cttcatctgcagtttca

SEQ ID NO: 90035 - DNA, 17 bp, Arabidopsis thaliana
cttcatcttcaggttca

SEQ ID NO: 90036 - DNA, 17 bp, Arabidopsis thaliana
cttcatcttcgcaggtt

SEQ ID NO: 90037 - DNA, 17 bp, Arabidopsis thaliana
cttcatcttcggaaatg

SEQ ID NO: 90038 - DNA, 17 bp, Arabidopsis thaliana
cttcatcttctcaacgg

SEQ ID NO: 90039 - DNA, 17 bp, Arabidopsis thaliana
cttcatcttctgtaatg

SEQ ID NO: 90040 - DNA, 17 bp, Arabidopsis thaliana
cttcatcttcttcacca

SEQ ID NO: 90041 - DNA, 17 bp, Arabidopsis thaliana
cttcatgaggttaccac

SEQ ID NO: 90042 - DNA, 17 bp, Arabidopsis thaliana
cttcatgcacaccttca

SEQ ID NO: 90043 - DNA, 17 bp, Arabidopsis thaliana
cttcatgcttctcaaaa

SEQ ID NO: 90044 - DNA, 17 bp, Arabidopsis thaliana
cttcatgtctgaaccgc

SEQ ID NO: 90045 - DNA, 17 bp, Arabidopsis thaliana
cttcatgtctgcattct

SEQ ID NO: 90046 - DNA, 17 bp, Arabidopsis thaliana
cttcatgttgttgcttg

SEQ ID NO: 90047 - DNA, 17 bp, Arabidopsis thaliana
cttcattagtttttgct

SEQ ID NO: 90048 - DNA, 17 bp, Arabidopsis thaliana
cttcattccattcaacg

SEQ ID NO: 90049 - DNA, 17 bp, Arabidopsis thaliana
cttcattcccggctggt

SEQ ID NO: 90050 - DNA, 17 bp, Arabidopsis thaliana
cttcattcctctcctgg

SEQ ID NO: 90051 - DNA, 17 bp, Arabidopsis thaliana
cttcattctaactgtcc

SEQ ID NO: 90052 - DNA, 17 bp, Arabidopsis thaliana
cttcattctaactgtgc

SEQ ID NO: 90053 - DNA, 17 bp, Arabidopsis thaliana
cttcattggtggtttct

SEQ ID NO: 90054 - DNA, 17 bp, Arabidopsis thaliana
cttcatttaccatcgca

SEQ ID NO: 90055 - DNA, 17 bp, Arabidopsis thaliana
cttccaaaaaactttga

SEQ ID NO: 90056 - DNA, 17 bp, Arabidopsis thaliana
cttccaaacccgttccg

SEQ ID NO: 90057 - DNA, 17 bp, Arabidopsis thaliana
cttccaaattttgggtg

SEQ ID NO: 90058 - DNA, 17 bp, Arabidopsis thaliana
cttccaacaggcgtcga

SEQ ID NO: 90059 - DNA, 17 bp, Arabidopsis thaliana
cttccaaccaaccaaat

SEQ ID NO: 90060 - DNA, 17 bp, Arabidopsis thaliana
cttccaaccgcgtgcgg

SEQ ID NO: 90061 - DNA, 17 bp, Arabidopsis thaliana
cttccaacctaaaacca

SEQ ID NO: 90062 - DNA, 17 bp, Arabidopsis thaliana
cttccaacgtgactcga

SEQ ID NO: 90063 - DNA, 17 bp, Arabidopsis thaliana
cttccaactcatgccac

SEQ ID NO: 90064 - DNA, 17 bp, Arabidopsis thaliana
cttccaagctaacggtg

SEQ ID NO: 90065 - DNA, 17 bp, Arabidopsis thaliana
cttccaaggatgacttg

SEQ ID NO: 90066 - DNA, 17 bp, Arabidopsis thaliana
cttccaaggattacttg

SEQ ID NO: 90067 - DNA, 17 bp, Arabidopsis thaliana
cttccaatcaagaccgt

SEQ ID NO: 90068 - DNA, 17 bp, Arabidopsis thaliana
cttccaatcggcgatat

SEQ ID NO: 90069 - DNA, 17 bp, Arabidopsis thaliana
cttccaattccatgttc

SEQ ID NO: 90070 - DNA, 17 bp, Arabidopsis thaliana
cttccaatttcatgcaa

SEQ ID NO: 90071 - DNA, 17 bp, Arabidopsis thaliana
cttccacaagctgacac

SEQ ID NO: 90072 - DNA, 17 bp, Arabidopsis thaliana
cttccacacttaggagg

SEQ ID NO: 90073 - DNA, 17 bp, Arabidopsis thaliana
cttccacagctttcttg

SEQ ID NO: 90074 - DNA, 17 bp, Arabidopsis thaliana
cttccacatccacggca

SEQ ID NO: 90075 - DNA, 17 bp, Arabidopsis thaliana
cttccacattctgataa

SEQ ID NO: 90076 - DNA, 17 bp, Arabidopsis thaliana
cttccacattctgatat

SEQ ID NO: 90077 - DNA, 17 bp, Arabidopsis thaliana
cttccaccgctgctttt

SEQ ID NO: 90078 - DNA, 17 bp, Arabidopsis thaliana
cttccaccggaagattt

SEQ ID NO: 90079 - DNA, 17 bp, Arabidopsis thaliana
cttccacgagggcgatt

SEQ ID NO: 90080 - DNA, 17 bp, Arabidopsis thaliana
cttccactcatcctgga

SEQ ID NO: 90081 - DNA, 17 bp, Arabidopsis thaliana
cttccactggggactat

SEQ ID NO: 90082 - DNA, 17 bp, Arabidopsis thaliana
cttccacttcggttttc

SEQ ID NO: 90083 - DNA, 17 bp, Arabidopsis thaliana
cttccactttggtgatt

SEQ ID NO: 90084 - DNA, 17 bp, Arabidopsis thaliana
cttccagaatcttgatt

SEQ ID NO: 90085 - DNA, 17 bp, Arabidopsis thaliana
cttccagacagatttca

SEQ ID NO: 90086 - DNA, 17 bp, Arabidopsis thaliana
cttccagacctgggtcc

SEQ ID NO: 90087 - DNA, 17 bp, Arabidopsis thaliana
cttccagacctgggttc

SEQ ID NO: 90088 - DNA, 17 bp, Arabidopsis thaliana
cttccagagcttatatc

SEQ ID NO: 90089 - DNA, 17 bp, Arabidopsis thaliana
cttccagatttcatcaa

SEQ ID NO: 90090 - DNA, 17 bp, Arabidopsis thaliana
cttccagccaagtcgac

SEQ ID NO: 90091 - DNA, 17 bp, Arabidopsis thaliana
cttccagctatgtgctt

SEQ ID NO: 90092 - DNA, 17 bp, Arabidopsis thaliana
cttccagcttgttccag

SEQ ID NO: 90093 - DNA, 17 bp, Arabidopsis thaliana
cttccaggcccgaaacc

SEQ ID NO: 90094 - DNA, 17 bp, Arabidopsis thaliana
cttccagggggacacag

SEQ ID NO: 90095 - DNA, 17 bp, Arabidopsis thaliana
cttccaggttccggggt

SEQ ID NO: 90096 - DNA, 17 bp, Arabidopsis thaliana
cttccagttacggttta

SEQ ID NO: 90097 - DNA, 17 bp, Arabidopsis thaliana
cttccataagcaggcgt

SEQ ID NO: 90098 - DNA, 17 bp, Arabidopsis thaliana
cttccataagtcagggt

SEQ ID NO: 90099 - DNA, 17 bp, Arabidopsis thaliana
cttccatagtgtgttac

SEQ ID NO: 90100 - DNA, 17 bp, Arabidopsis thaliana
cttccatcactctatca

SEQ ID NO: 90101 - DNA, 17 bp, Arabidopsis thaliana
cttccatccattcatgg

SEQ ID NO: 90102 - DNA, 17 bp, Arabidopsis thaliana
cttccatcggagagatg

SEQ ID NO: 90103 - DNA, 17 bp, Arabidopsis thaliana
cttccatcgggtctgtg

SEQ ID NO: 90104 - DNA, 17 bp, Arabidopsis thaliana
cttccatcgttttgcca

SEQ ID NO: 90105 - DNA, 17 bp, Arabidopsis thaliana
cttccatcttctgcttg

SEQ ID NO: 90106 - DNA, 17 bp, Arabidopsis thaliana
cttccatgagagtcttc

SEQ ID NO: 90107 - DNA, 17 bp, Arabidopsis thaliana
cttccatgagcggtaat

SEQ ID NO: 90108 - DNA, 17 bp, Arabidopsis thaliana
cttccatgagtggttct

SEQ ID NO: 90109 - DNA, 17 bp, Arabidopsis thaliana
cttccatgagtggtttg

SEQ ID NO: 90110 - DNA, 17 bp, Arabidopsis thaliana
cttccatgagtggtttt

SEQ ID NO: 90111 - DNA, 17 bp, Arabidopsis thaliana
cttccatgcctcagcgg

SEQ ID NO: 90112 - DNA, 17 bp, Arabidopsis thaliana
cttccatgcgtcataag

SEQ ID NO: 90113 - DNA, 17 bp, Arabidopsis thaliana
cttccatggcgagggta

SEQ ID NO: 90114 - DNA, 17 bp, Arabidopsis thaliana
cttccattctatgtagc

SEQ ID NO: 90115 - DNA, 17 bp, Arabidopsis thaliana
cttccattgacaggcag

SEQ ID NO: 90116 - DNA, 17 bp, Arabidopsis thaliana
cttccatttcggtatgt

SEQ ID NO: 90117 - DNA, 17 bp, Arabidopsis thaliana
cttccatttgggttcac

SEQ ID NO: 90118 - DNA, 17 bp, Arabidopsis thaliana
cttcccaaccgaatggc

SEQ ID NO: 90119 - DNA, 17 bp, Arabidopsis thaliana
cttcccaattaggcatt

SEQ ID NO: 90120 - DNA, 17 bp, Arabidopsis thaliana
cttcccacccacccacc

SEQ ID NO: 90121 - DNA, 17 bp, Arabidopsis thaliana
cttcccaccttggatct

SEQ ID NO: 90122 - DNA, 17 bp, Arabidopsis thaliana
cttcccactaagaacag

SEQ ID NO: 90123 - DNA, 17 bp, Arabidopsis thaliana
cttcccattgttggcgg

SEQ ID NO: 90124 - DNA, 17 bp, Arabidopsis thaliana
cttccccaaccgaatga

SEQ ID NO: 90125 - DNA, 17 bp, Arabidopsis thaliana
cttccccaaccgaatgg

SEQ ID NO: 90126 - DNA, 17 bp, Arabidopsis thaliana
cttccccacagacggcc

SEQ ID NO: 90127 - DNA, 17 bp, Arabidopsis thaliana
cttccccctgggggtac

SEQ ID NO: 90128 - DNA, 17 bp, Arabidopsis thaliana
cttccccctttggatga

SEQ ID NO: 90129 - DNA, 17 bp, Arabidopsis thaliana
cttccccgggcgtcgaa

SEQ ID NO: 90130 - DNA, 17 bp, Arabidopsis thaliana
cttcccctgggggtacc

SEQ ID NO: 90131 - DNA, 17 bp, Arabidopsis thaliana
cttccccttggattccc

SEQ ID NO: 90132 - DNA, 17 bp, Arabidopsis thaliana
cttcccgacagaagagt

SEQ ID NO: 90133 - DNA, 17 bp, Arabidopsis thaliana
cttcccgctgtcccgcg

SEQ ID NO: 90134 - DNA, 17 bp, Arabidopsis thaliana
cttcccgcttcctgaca

SEQ ID NO: 90135 - DNA, 17 bp, Arabidopsis thaliana
cttcccggatttgctgc

SEQ ID NO: 90136 - DNA, 17 bp, Arabidopsis thaliana
cttcccggctggtgcac

SEQ ID NO: 90137 - DNA, 17 bp, Arabidopsis thaliana
cttcccgtctaagtcga

SEQ ID NO: 90138 - DNA, 17 bp, Arabidopsis thaliana
cttccctacaggcaaca

SEQ ID NO: 90139 - DNA, 17 bp, Arabidopsis thaliana
cttccctatgttgcttg

SEQ ID NO: 90140 - DNA, 17 bp, Arabidopsis thaliana
cttccctattcattgcg

SEQ ID NO: 90141 - DNA, 17 bp, Arabidopsis thaliana
cttccctctcctctgcc

SEQ ID NO: 90142 - DNA, 17 bp, Arabidopsis thaliana
cttccctcttacagcag

SEQ ID NO: 90143 - DNA, 17 bp, Arabidopsis thaliana
cttccctcttttgggct

SEQ ID NO: 90144 - DNA, 17 bp, Arabidopsis thaliana
cttccctgcctatctac

SEQ ID NO: 90145 - DNA, 17 bp, Arabidopsis thaliana
cttcccttggggatgaa

SEQ ID NO: 90146 - DNA, 17 bp, Arabidopsis thaliana
cttccctttcctccagg

SEQ ID NO: 90147 - DNA, 17 bp, Arabidopsis thaliana
cttccctttggggttaa

SEQ ID NO: 90148 - DNA, 17 bp, Arabidopsis thaliana
cttccgacaacgtggct

SEQ ID NO: 90149 - DNA, 17 bp, Arabidopsis thaliana
cttccgacaacgtgggt

SEQ ID NO: 90150 - DNA, 17 bp, Arabidopsis thaliana
cttccgaccaccatcaa

SEQ ID NO: 90151 - DNA, 17 bp, Arabidopsis thaliana
cttccgaccctttatta

SEQ ID NO: 90152 - DNA, 17 bp, Arabidopsis thaliana
cttccgacgaatccgaa

SEQ ID NO: 90153 - DNA, 17 bp, Arabidopsis thaliana
cttccgactaatgccaa

SEQ ID NO: 90154 - DNA, 17 bp, Arabidopsis thaliana
cttccgactaatgccag

SEQ ID NO: 90155 - DNA, 17 bp, Arabidopsis thaliana
cttccgagatgattcat

SEQ ID NO: 90156 - DNA, 17 bp, Arabidopsis thaliana
cttccgaggatgtgttt

SEQ ID NO: 90157 - DNA, 17 bp, Arabidopsis thaliana
cttccgagggggacaca

SEQ ID NO: 90158 - DNA, 17 bp, Arabidopsis thaliana
cttccgatgagagacct

SEQ ID NO: 90159 - DNA, 17 bp, Arabidopsis thaliana
cttccgattgattggcc

SEQ ID NO: 90160 - DNA, 17 bp, Arabidopsis thaliana
cttccgatttggatcct

SEQ ID NO: 90161 - DNA, 17 bp, Arabidopsis thaliana
cttccgcagggagagcc

SEQ ID NO: 90162 - DNA, 17 bp, Arabidopsis thaliana
cttccgcagtgcgtttt

SEQ ID NO: 90163 - DNA, 17 bp, Arabidopsis thaliana
cttccgcatcctgtaga

SEQ ID NO: 90164 - DNA, 17 bp, Arabidopsis thaliana
cttccgccattgactct

SEQ ID NO: 90165 - DNA, 17 bp, Arabidopsis thaliana
cttccgcctcttgtgct

SEQ ID NO: 90166 - DNA, 17 bp, Arabidopsis thaliana
cttccgcggcgagagcg

SEQ ID NO: 90167 - DNA, 17 bp, Arabidopsis thaliana
cttccggcaggtcggac

SEQ ID NO: 90168 - DNA, 17 bp, Arabidopsis thaliana
cttccgggaactgcttg

SEQ ID NO: 90169 - DNA, 17 bp, Arabidopsis thaliana
cttccgggagccacctc

SEQ ID NO: 90170 - DNA, 17 bp, Arabidopsis thaliana
cttccggtttagtttgg

SEQ ID NO: 90171 - DNA, 17 bp, Arabidopsis thaliana
cttccgtaaccgcatcc

SEQ ID NO: 90172 - DNA, 17 bp, Arabidopsis thaliana
cttccgtcatttgtagt

SEQ ID NO: 90173 - DNA, 17 bp, Arabidopsis thaliana
cttccgtcggtttttgc

SEQ ID NO: 90174 - DNA, 17 bp, Arabidopsis thaliana
cttccgttggaaagcag

SEQ ID NO: 90175 - DNA, 17 bp, Arabidopsis thaliana
cttcctaatacgcatgt

SEQ ID NO: 90176 - DNA, 17 bp, Arabidopsis thaliana
cttcctacatagcgggt

SEQ ID NO: 90177 - DNA, 17 bp, Arabidopsis thaliana
cttcctactttgggtcg

SEQ ID NO: 90178 - DNA, 17 bp, Arabidopsis thaliana
cttcctagaggtctttg

SEQ ID NO: 90179 - DNA, 17 bp, Arabidopsis thaliana
cttcctagataggtctg

SEQ ID NO: 90180 - DNA, 17 bp, Arabidopsis thaliana
cttcctagccatgattc

SEQ ID NO: 90181 - DNA, 17 bp, Arabidopsis thaliana
cttcctaggggtgtcaa

SEQ ID NO: 90182 - DNA, 17 bp, Arabidopsis thaliana
cttcctcaaaggggtgt

SEQ ID NO: 90183 - DNA, 17 bp, Arabidopsis thaliana
cttcctcaatgtcgttg

SEQ ID NO: 90184 - DNA, 17 bp, Arabidopsis thaliana
cttcctcacaaattctc

SEQ ID NO: 90185 - DNA, 17 bp, Arabidopsis thaliana
cttcctcacgcacttga

SEQ ID NO: 90186 - DNA, 17 bp, Arabidopsis thaliana
cttcctcaggattggct

SEQ ID NO: 90187 - DNA, 17 bp, Arabidopsis thaliana
cttcctcagttcggatt

SEQ ID NO: 90188 - DNA, 17 bp, Arabidopsis thaliana
cttcctcatgagggttg

SEQ ID NO: 90189 - DNA, 17 bp, Arabidopsis thaliana
cttcctcatgggcatgc

SEQ ID NO: 90190 - DNA, 17 bp, Arabidopsis thaliana
cttcctcccctgcatag

SEQ ID NO: 90191 - DNA, 17 bp, Arabidopsis thaliana
cttcctccctaagatat

SEQ ID NO: 90192 - DNA, 17 bp, Arabidopsis thaliana
cttcctccgtcgacatt

SEQ ID NO: 90193 - DNA, 17 bp, Arabidopsis thaliana
cttcctcctctggttcc

SEQ ID NO: 90194 - DNA, 17 bp, Arabidopsis thaliana
cttcctcctttggatga

SEQ ID NO: 90195 - DNA, 17 bp, Arabidopsis thaliana
cttcctcgagatctgtg

SEQ ID NO: 90196 - DNA, 17 bp, Arabidopsis thaliana
cttcctcgatgtttcct

SEQ ID NO: 90197 - DNA, 17 bp, Arabidopsis thaliana
cttcctcgggacttcgt

SEQ ID NO: 90198 - DNA, 17 bp, Arabidopsis thaliana
cttcctctctgcagatc

SEQ ID NO: 90199 - DNA, 17 bp, Arabidopsis thaliana
cttcctctgaaacttgc

SEQ ID NO: 90200 - DNA, 17 bp, Arabidopsis thaliana
cttcctctgacgctgct

SEQ ID NO: 90201 - DNA, 17 bp, Arabidopsis thaliana
cttcctcttctggtttg

SEQ ID NO: 90202 - DNA, 17 bp, Arabidopsis thaliana
cttcctgaaaggccacc

SEQ ID NO: 90203 - DNA, 17 bp, Arabidopsis thaliana
cttcctgaaggccctga

SEQ ID NO: 90204 - DNA, 17 bp, Arabidopsis thaliana
cttcctgatcgtgtcac

SEQ ID NO: 90205 - DNA, 17 bp, Arabidopsis thaliana
cttcctgcggtgctgct

SEQ ID NO: 90206 - DNA, 17 bp, Arabidopsis thaliana
cttcctggcatgtgata

SEQ ID NO: 90207 - DNA, 17 bp, Arabidopsis thaliana
cttcctggtgcgtttgt

SEQ ID NO: 90208 - DNA, 17 bp, Arabidopsis thaliana
cttcctgtgaaagtgcc

SEQ ID NO: 90209 - DNA, 17 bp, Arabidopsis thaliana
cttccttaagtaacagg

SEQ ID NO: 90210 - DNA, 17 bp, Arabidopsis thaliana
cttccttaagtgcacca

SEQ ID NO: 90211 - DNA, 17 bp, Arabidopsis thaliana
cttccttacgcctttaa

SEQ ID NO: 90212 - DNA, 17 bp, Arabidopsis thaliana
cttccttagtcgcacct

SEQ ID NO: 90213 - DNA, 17 bp, Arabidopsis thaliana
cttccttagtcgcatcc

SEQ ID NO: 90214 - DNA, 17 bp, Arabidopsis thaliana
cttccttagtcgctcct

SEQ ID NO: 90215 - DNA, 17 bp, Arabidopsis thaliana
cttccttattctccagg

SEQ ID NO: 90216 - DNA, 17 bp, Arabidopsis thaliana
cttccttatttacaatg

SEQ ID NO: 90217 - DNA, 17 bp, Arabidopsis thaliana
cttccttcaagcttcaa

SEQ ID NO: 90218 - DNA, 17 bp, Arabidopsis thaliana
cttccttcaagtttgcg

SEQ ID NO: 90219 - DNA, 17 bp, Arabidopsis thaliana
cttccttcagagtagac

SEQ ID NO: 90220 - DNA, 17 bp, Arabidopsis thaliana
cttccttcagttgacca

SEQ ID NO: 90221 - DNA, 17 bp, Arabidopsis thaliana
cttccttcatccgtgac

SEQ ID NO: 90222 - DNA, 17 bp, Arabidopsis thaliana
cttccttcccactaaga

SEQ ID NO: 90223 - DNA, 17 bp, Arabidopsis thaliana
cttccttccttccaggg

SEQ ID NO: 90224 - DNA, 17 bp, Arabidopsis thaliana
cttccttccttgtcgct

SEQ ID NO: 90225 - DNA, 17 bp, Arabidopsis thaliana
cttccttcgaatggaat

SEQ ID NO: 90226 - DNA, 17 bp, Arabidopsis thaliana
cttccttcgcagtctca

SEQ ID NO: 90227 - DNA, 17 bp, Arabidopsis thaliana
cttccttcggctgatct

SEQ ID NO: 90228 - DNA, 17 bp, Arabidopsis thaliana
cttccttctaccggccc

SEQ ID NO: 90229 - DNA, 17 bp, Arabidopsis thaliana
cttccttctaggttggt

SEQ ID NO: 90230 - DNA, 17 bp, Arabidopsis thaliana
cttccttctattccatg

SEQ ID NO: 90231 - DNA, 17 bp, Arabidopsis thaliana
cttccttctccttttcc

SEQ ID NO: 90232 - DNA, 17 bp, Arabidopsis thaliana
cttccttctccttttgt

SEQ ID NO: 90233 - DNA, 17 bp, Arabidopsis thaliana
cttccttctcttgctgt

SEQ ID NO: 90234 - DNA, 17 bp, Arabidopsis thaliana
cttccttctgggcgatt

SEQ ID NO: 90235 - DNA, 17 bp, Arabidopsis thaliana
cttccttctgtggatct

SEQ ID NO: 90236 - DNA, 17 bp, Arabidopsis thaliana
cttccttcttcatcgcg

SEQ ID NO: 90237 - DNA, 17 bp, Arabidopsis thaliana
cttccttgacacgtggc

SEQ ID NO: 90238 - DNA, 17 bp, Arabidopsis thaliana
cttccttgagctgtgat

SEQ ID NO: 90239 - DNA, 17 bp, Arabidopsis thaliana
cttccttgaggaaccga

SEQ ID NO: 90240 - DNA, 17 bp, Arabidopsis thaliana
cttccttgatttgtgtc

SEQ ID NO: 90241 - DNA, 17 bp, Arabidopsis thaliana
cttccttgcaaaaggtg

SEQ ID NO: 90242 - DNA, 17 bp, Arabidopsis thaliana
cttccttgccatgattc

SEQ ID NO: 90243 - DNA, 17 bp, Arabidopsis thaliana
cttccttggaaccaatt

SEQ ID NO: 90244 - DNA, 17 bp, Arabidopsis thaliana
cttccttggactgaagg

SEQ ID NO: 90245 - DNA, 17 bp, Arabidopsis thaliana
cttccttgggatgggtc

SEQ ID NO: 90246 - DNA, 17 bp, Arabidopsis thaliana
cttccttgtactcattc

SEQ ID NO: 90247 - DNA, 17 bp, Arabidopsis thaliana
cttccttgtccttgatc

SEQ ID NO: 90248 - DNA, 17 bp, Arabidopsis thaliana
cttccttgtcgcatcct

SEQ ID NO: 90249 - DNA, 17 bp, Arabidopsis thaliana
cttccttgtcgctctga

SEQ ID NO: 90250 - DNA, 17 bp, Arabidopsis thaliana
cttccttgtcgctctgt

SEQ ID NO: 90251 - DNA, 17 bp, Arabidopsis thaliana
cttccttgtctcaaaga

SEQ ID NO: 90252 - DNA, 17 bp, Arabidopsis thaliana
cttccttgtctcagttg

SEQ ID NO: 90253 - DNA, 17 bp, Arabidopsis thaliana
cttccttgtgtcaggac

SEQ ID NO: 90254 - DNA, 17 bp, Arabidopsis thaliana
cttccttgttccagcaa

SEQ ID NO: 90255 - DNA, 17 bp, Arabidopsis thaliana
cttcctttactggtggt

SEQ ID NO: 90256 - DNA, 17 bp, Arabidopsis thaliana
cttcctttcatctctgc

SEQ ID NO: 90257 - DNA, 17 bp, Arabidopsis thaliana
cttcctttccacatatg

SEQ ID NO: 90258 - DNA, 17 bp, Arabidopsis thaliana
cttcctttccgactaat

SEQ ID NO: 90259 - DNA, 17 bp, Arabidopsis thaliana
cttcctttccgttggcg

SEQ ID NO: 90260 - DNA, 17 bp, Arabidopsis thaliana
cttcctttctatgtacc

SEQ ID NO: 90261 - DNA, 17 bp, Arabidopsis thaliana
cttcctttgaatgatta

SEQ ID NO: 90262 - DNA, 17 bp, Arabidopsis thaliana
cttcctttgatgacatg

SEQ ID NO: 90263 - DNA, 17 bp, Arabidopsis thaliana
cttcctttgattgatcg

SEQ ID NO: 90264 - DNA, 17 bp, Arabidopsis thaliana
cttcctttgctttgctt

SEQ ID NO: 90265 - DNA, 17 bp, Arabidopsis thaliana
cttcctttgtcgctaag

SEQ ID NO: 90266 - DNA, 17 bp, Arabidopsis thaliana
cttcctttttccacgcg

SEQ ID NO: 90267 - DNA, 17 bp, Arabidopsis thaliana
cttcctttttggatgtt

SEQ ID NO: 90268 - DNA, 17 bp, Arabidopsis thaliana
cttcctttttggccggt

SEQ ID NO: 90269 - DNA, 17 bp, Arabidopsis thaliana
cttccttttttagggca

SEQ ID NO: 90270 - DNA, 17 bp, Arabidopsis thaliana
cttcgaaagttgtgatg

SEQ ID NO: 90271 - DNA, 17 bp, Arabidopsis thaliana
cttcgaacccgggctca

SEQ ID NO: 90272 - DNA, 17 bp, Arabidopsis thaliana
cttcgaactttgtgggt

SEQ ID NO: 90273 - DNA, 17 bp, Arabidopsis thaliana
cttcgaagacttctgcg

SEQ ID NO: 90274 - DNA, 17 bp, Arabidopsis thaliana
cttcgaatatgattttg

SEQ ID NO: 90275 - DNA, 17 bp, Arabidopsis thaliana
cttcgaatctggttgct

SEQ ID NO: 90276 - DNA, 17 bp, Arabidopsis thaliana
cttcgaatgaccggcat

SEQ ID NO: 90277 - DNA, 17 bp, Arabidopsis thaliana
cttcgaatggaataggc

SEQ ID NO: 90278 - DNA, 17 bp, Arabidopsis thaliana
cttcgaatggtaactgc

SEQ ID NO: 90279 - DNA, 17 bp, Arabidopsis thaliana
cttcgacaaaggctccg

SEQ ID NO: 90280 - DNA, 17 bp, Arabidopsis thaliana
cttcgacgcggattacg

SEQ ID NO: 90281 - DNA, 17 bp, Arabidopsis thaliana
cttcgacggatcaaatt

SEQ ID NO: 90282 - DNA, 17 bp, Arabidopsis thaliana
cttcgagacacggctac

SEQ ID NO: 90283 - DNA, 17 bp, Arabidopsis thaliana
cttcgagacatgtcaat

SEQ ID NO: 90284 - DNA, 17 bp, Arabidopsis thaliana
cttcgagactccatcag

SEQ ID NO: 90285 - DNA, 17 bp, Arabidopsis thaliana
cttcgagagcgggtcgc

SEQ ID NO: 90286 - DNA, 17 bp, Arabidopsis thaliana
cttcgagctaacgatcg

SEQ ID NO: 90287 - DNA, 17 bp, Arabidopsis thaliana
cttcgagggcacgtctg

SEQ ID NO: 90288 - DNA, 17 bp, Arabidopsis thaliana
cttcgaggtggatgtgg

SEQ ID NO: 90289 - DNA, 17 bp, Arabidopsis thaliana
cttcgatcacgatctcc

SEQ ID NO: 90290 - DNA, 17 bp, Arabidopsis thaliana
cttcgatccctgtatag

SEQ ID NO: 90291 - DNA, 17 bp, Arabidopsis thaliana
cttcgatctcacattgg

SEQ ID NO: 90292 - DNA, 17 bp, Arabidopsis thaliana
cttcgatctcgggaaca

SEQ ID NO: 90293 - DNA, 17 bp, Arabidopsis thaliana
cttcgatgtcggctctt

SEQ ID NO: 90294 - DNA, 17 bp, Arabidopsis thaliana
cttcgatgtctaccagt

SEQ ID NO: 90295 - DNA, 17 bp, Arabidopsis thaliana
cttcgattcccgctacc

SEQ ID NO: 90296 - DNA, 17 bp, Arabidopsis thaliana
cttcgattcccgctatc

SEQ ID NO: 90297 - DNA, 17 bp, Arabidopsis thaliana
cttcgattcccggctgg

SEQ ID NO: 90298 - DNA, 17 bp, Arabidopsis thaliana
cttcgattccggagagg

SEQ ID NO: 90299 - DNA, 17 bp, Arabidopsis thaliana
cttcgattctggtggca

SEQ ID NO: 90300 - DNA, 17 bp, Arabidopsis thaliana
cttcgattctgtagcca

SEQ ID NO: 90301 - DNA, 17 bp, Arabidopsis thaliana
cttcgatttgcagtgta

SEQ ID NO: 90302 - DNA, 17 bp, Arabidopsis thaliana
cttcgcacatttctgag

SEQ ID NO: 90303 - DNA, 17 bp, Arabidopsis thaliana
cttcgcagcagcgcagg

SEQ ID NO: 90304 - DNA, 17 bp, Arabidopsis thaliana
cttcgcagcttagacgg

SEQ ID NO: 90305 - DNA, 17 bp, Arabidopsis thaliana
cttcgcagtcttttgtc

SEQ ID NO: 90306 - DNA, 17 bp, Arabidopsis thaliana
cttcgcatcctccggag

SEQ ID NO: 90307 - DNA, 17 bp, Arabidopsis thaliana
cttcgccaacgacctcg

SEQ ID NO: 90308 - DNA, 17 bp, Arabidopsis thaliana
cttcgccgacgaattca

SEQ ID NO: 90309 - DNA, 17 bp, Arabidopsis thaliana
cttcgccgctttgctcc

SEQ ID NO: 90310 - DNA, 17 bp, Arabidopsis thaliana
cttcgccggcgcctgaa

SEQ ID NO: 90311 - DNA, 17 bp, Arabidopsis thaliana
cttcgccgggaaaaaca

SEQ ID NO: 90312 - DNA, 17 bp, Arabidopsis thaliana
cttcgcctccacctagt

SEQ ID NO: 90313 - DNA, 17 bp, Arabidopsis thaliana
cttcgcctctgtttgtt

SEQ ID NO: 90314 - DNA, 17 bp, Arabidopsis thaliana
cttcgcctggatttggg

SEQ ID NO: 90315 - DNA, 17 bp, Arabidopsis thaliana
cttcgcgacattcaaga

SEQ ID NO: 90316 - DNA, 17 bp, Arabidopsis thaliana
cttcgcgaccagaacat

SEQ ID NO: 90317 - DNA, 17 bp, Arabidopsis thaliana
cttcgcgactggtgaca

SEQ ID NO: 90318 - DNA, 17 bp, Arabidopsis thaliana
cttcgctcaaatctatc

SEQ ID NO: 90319 - DNA, 17 bp, Arabidopsis thaliana
cttcgctcttcacacga

SEQ ID NO: 90320 - DNA, 17 bp, Arabidopsis thaliana
cttcgctcttcttgtct

SEQ ID NO: 90321 - DNA, 17 bp, Arabidopsis thaliana
cttcgctggcaagcagc

SEQ ID NO: 90322 - DNA, 17 bp, Arabidopsis thaliana
cttcgctgtaagtgtga

SEQ ID NO: 90323 - DNA, 17 bp, Arabidopsis thaliana
cttcgcttcaacgacct

SEQ ID NO: 90324 - DNA, 17 bp, Arabidopsis thaliana
cttcgcttctcggattt

SEQ ID NO: 90325 - DNA, 17 bp, Arabidopsis thaliana
cttcgcttgcagagaga

SEQ ID NO: 90326 - DNA, 17 bp, Arabidopsis thaliana
cttcgctttggaagtac

SEQ ID NO: 90327 - DNA, 17 bp, Arabidopsis thaliana
cttcgctttggccgagt

SEQ ID NO: 90328 - DNA, 17 bp, Arabidopsis thaliana
cttcgctttgtccgctg

SEQ ID NO: 90329 - DNA, 17 bp, Arabidopsis thaliana
cttcggaaattacggct

SEQ ID NO: 90330 - DNA, 17 bp, Arabidopsis thaliana
cttcggaaccgtctgtg

SEQ ID NO: 90331 - DNA, 17 bp, Arabidopsis thaliana
cttcggaaggagctaca

SEQ ID NO: 90332 - DNA, 17 bp, Arabidopsis thaliana
cttcggaccaggcttca

SEQ ID NO: 90333 - DNA, 17 bp, Arabidopsis thaliana
cttcggaccgtaaccga

SEQ ID NO: 90334 - DNA, 17 bp, Arabidopsis thaliana
cttcggatgtgagactt

SEQ ID NO: 90335 - DNA, 17 bp, Arabidopsis thaliana
cttcggatttggttgct

SEQ ID NO: 90336 - DNA, 17 bp, Arabidopsis thaliana
cttcggcatggaaccgc

SEQ ID NO: 90337 - DNA, 17 bp, Arabidopsis thaliana
cttcggcgacatttgtt

SEQ ID NO: 90338 - DNA, 17 bp, Arabidopsis thaliana
cttcggcggggaactgg

SEQ ID NO: 90339 - DNA, 17 bp, Arabidopsis thaliana
cttcggcgggtcgatcc

SEQ ID NO: 90340 - DNA, 17 bp, Arabidopsis thaliana
cttcggcgggtcgatcg

SEQ ID NO: 90341 - DNA, 17 bp, Arabidopsis thaliana
cttcggcggtgactctg

SEQ ID NO: 90342 - DNA, 17 bp, Arabidopsis thaliana
cttcggctgatctgact

SEQ ID NO: 90343 - DNA, 17 bp, Arabidopsis thaliana
cttcgggaaaaggattg

SEQ ID NO: 90344 - DNA, 17 bp, Arabidopsis thaliana
cttcgggagaaggggtg

SEQ ID NO: 90345 - DNA, 17 bp, Arabidopsis thaliana
cttcgggaggacgcccg

SEQ ID NO: 90346 - DNA, 17 bp, Arabidopsis thaliana
cttcgggatcggagtaa

SEQ ID NO: 90347 - DNA, 17 bp, Arabidopsis thaliana
cttcgggcattttcgta

SEQ ID NO: 90348 - DNA, 17 bp, Arabidopsis thaliana
cttcgggcattttcgtg

SEQ ID NO: 90349 - DNA, 17 bp, Arabidopsis thaliana
cttcgggccgagtggtg

SEQ ID NO: 90350 - DNA, 17 bp, Arabidopsis thaliana
cttcgggctctatctgg

SEQ ID NO: 90351 - DNA, 17 bp, Arabidopsis thaliana
cttcgggctctatcttg

SEQ ID NO: 90352 - DNA, 17 bp, Arabidopsis thaliana
cttcgggggtctgctga

SEQ ID NO: 90353 - DNA, 17 bp, Arabidopsis thaliana
cttcgggtatccaagct

SEQ ID NO: 90354 - DNA, 17 bp, Arabidopsis thaliana
cttcgggtgcgagaggt

SEQ ID NO: 90355 - DNA, 17 bp, Arabidopsis thaliana
cttcgggtgcgcgagcc

SEQ ID NO: 90356 - DNA, 17 bp, Arabidopsis thaliana
cttcgggttcgctttgg

SEQ ID NO: 90357 - DNA, 17 bp, Arabidopsis thaliana
cttcggtcagcgatacg

SEQ ID NO: 90358 - DNA, 17 bp, Arabidopsis thaliana
cttcggtccacgtcatt

SEQ ID NO: 90359 - DNA, 17 bp, Arabidopsis thaliana
cttcggtcgccggagat

SEQ ID NO: 90360 - DNA, 17 bp, Arabidopsis thaliana
cttcggtcggcgatacg

SEQ ID NO: 90361 - DNA, 17 bp, Arabidopsis thaliana
cttcggtcggcgggtcg

SEQ ID NO: 90362 - DNA, 17 bp, Arabidopsis thaliana
cttcggtctcatcttga

SEQ ID NO: 90363 - DNA, 17 bp, Arabidopsis thaliana
cttcggtctgcgagagc

SEQ ID NO: 90364 - DNA, 17 bp, Arabidopsis thaliana
cttcggtgatcggaggg

SEQ ID NO: 90365 - DNA, 17 bp, Arabidopsis thaliana
cttcggtgcggtggtgc

SEQ ID NO: 90366 - DNA, 17 bp, Arabidopsis thaliana
cttcggtgtgatggcaa

SEQ ID NO: 90367 - DNA, 17 bp, Arabidopsis thaliana
cttcggttcgggatatc

SEQ ID NO: 90368 - DNA, 17 bp, Arabidopsis thaliana
cttcggttctctggatt

SEQ ID NO: 90369 - DNA, 17 bp, Arabidopsis thaliana
cttcggttctgtggcaa

SEQ ID NO: 90370 - DNA, 17 bp, Arabidopsis thaliana
cttcggttgctttcctt

SEQ ID NO: 90371 - DNA, 17 bp, Arabidopsis thaliana
cttcggttggggtttgt

SEQ ID NO: 90372 - DNA, 17 bp, Arabidopsis thaliana
cttcggttttaccgctg

SEQ ID NO: 90373 - DNA, 17 bp, Arabidopsis thaliana
cttcgtactctgattct

SEQ ID NO: 90374 - DNA, 17 bp, Arabidopsis thaliana
cttcgtactgtcaaaat

SEQ ID NO: 90375 - DNA, 17 bp, Arabidopsis thaliana
cttcgtacttgtgtgat

SEQ ID NO: 90376 - DNA, 17 bp, Arabidopsis thaliana
cttcgtagccaggttcg

SEQ ID NO: 90377 - DNA, 17 bp, Arabidopsis thaliana
cttcgtagcggtaagga

SEQ ID NO: 90378 - DNA, 17 bp, Arabidopsis thaliana
cttcgtcaatgtccgcc

SEQ ID NO: 90379 - DNA, 17 bp, Arabidopsis thaliana
cttcgtcacgggtggtt

SEQ ID NO: 90380 - DNA, 17 bp, Arabidopsis thaliana
cttcgtcagagcgctga

SEQ ID NO: 90381 - DNA, 17 bp, Arabidopsis thaliana
cttcgtccgggatctgc

SEQ ID NO: 90382 - DNA, 17 bp, Arabidopsis thaliana
cttcgtcctcgacccaa

SEQ ID NO: 90383 - DNA, 17 bp, Arabidopsis thaliana
cttcgtccttacacttg

SEQ ID NO: 90384 - DNA, 17 bp, Arabidopsis thaliana
cttcgtcgaaacattgt

SEQ ID NO: 90385 - DNA, 17 bp, Arabidopsis thaliana
cttcgtcgcaggtgtgg

SEQ ID NO: 90386 - DNA, 17 bp, Arabidopsis thaliana
cttcgtctagctcagtt

SEQ ID NO: 90387 - DNA, 17 bp, Arabidopsis thaliana
cttcgtctcaggtttgt

SEQ ID NO: 90388 - DNA, 17 bp, Arabidopsis thaliana
cttcgtctgcctgggtg

SEQ ID NO: 90389 - DNA, 17 bp, Arabidopsis thaliana
cttcgtctgttgctatg

SEQ ID NO: 90390 - DNA, 17 bp, Arabidopsis thaliana
cttcgtgcccagaccta

SEQ ID NO: 90391 - DNA, 17 bp, Arabidopsis thaliana
cttcgtggcgtactgcg

SEQ ID NO: 90392 - DNA, 17 bp, Arabidopsis thaliana
cttcgtggtccaggtcg

SEQ ID NO: 90393 - DNA, 17 bp, Arabidopsis thaliana
cttcgtggtgtactgcg

SEQ ID NO: 90394 - DNA, 17 bp, Arabidopsis thaliana
cttcgttcatcgattag

SEQ ID NO: 90395 - DNA, 17 bp, Arabidopsis thaliana
cttcgttcattcttcga

SEQ ID NO: 90396 - DNA, 17 bp, Arabidopsis thaliana
cttcgttccatgtcaat

SEQ ID NO: 90397 - DNA, 17 bp, Arabidopsis thaliana
cttcgttccatgtctat

SEQ ID NO: 90398 - DNA, 17 bp, Arabidopsis thaliana
cttcgttctgtccgctt

SEQ ID NO: 90399 - DNA, 17 bp, Arabidopsis thaliana
cttcgttggaaagcatg

SEQ ID NO: 90400 - DNA, 17 bp, Arabidopsis thaliana
cttcgttggatctggcg

SEQ ID NO: 90401 - DNA, 17 bp, Arabidopsis thaliana
cttcgtttcccggctgg

SEQ ID NO: 90402 - DNA, 17 bp, Arabidopsis thaliana
cttcgtttccggcaggt

SEQ ID NO: 90403 - DNA, 17 bp, Arabidopsis thaliana
cttcgtttgcagtcacg

SEQ ID NO: 90404 - DNA, 17 bp, Arabidopsis thaliana
cttcgtttggttggagc

SEQ ID NO: 90405 - DNA, 17 bp, Arabidopsis thaliana
cttctaaagttagtgta

SEQ ID NO: 90406 - DNA, 17 bp, Arabidopsis thaliana
cttctaaatgggtggta

SEQ ID NO: 90407 - DNA, 17 bp, Arabidopsis thaliana
cttctaacatgcctcga

SEQ ID NO: 90408 - DNA, 17 bp, Arabidopsis thaliana
cttctaacgctcttgat

SEQ ID NO: 90409 - DNA, 17 bp, Arabidopsis thaliana
cttctaacgtccgtccg

SEQ ID NO: 90410 - DNA, 17 bp, Arabidopsis thaliana
cttctaacgtgccttga

SEQ ID NO: 90411 - DNA, 17 bp, Arabidopsis thaliana
cttctaactgtacagcc

SEQ ID NO: 90412 - DNA, 17 bp, Arabidopsis thaliana
cttctaagcctctcgac

SEQ ID NO: 90413 - DNA, 17 bp, Arabidopsis thaliana
cttctaagcgggtgtct

SEQ ID NO: 90414 - DNA, 17 bp, Arabidopsis thaliana
cttctaatcatttttcg

SEQ ID NO: 90415 - DNA, 17 bp, Arabidopsis thaliana
cttctaatcgcttctac

SEQ ID NO: 90416 - DNA, 17 bp, Arabidopsis thaliana
cttctaattccaccgtc

SEQ ID NO: 90417 - DNA, 17 bp, Arabidopsis thaliana
cttctaattgaaggtgt

SEQ ID NO: 90418 - DNA, 17 bp, Arabidopsis thaliana
cttctacaagctgacac

SEQ ID NO: 90419 - DNA, 17 bp, Arabidopsis thaliana
cttctacaagttgcact

SEQ ID NO: 90420 - DNA, 17 bp, Arabidopsis thaliana
cttctacaattgaacaa

SEQ ID NO: 90421 - DNA, 17 bp, Arabidopsis thaliana
cttctacacaagcctgg

SEQ ID NO: 90422 - DNA, 17 bp, Arabidopsis thaliana
cttctacacttagaaga

SEQ ID NO: 90423 - DNA, 17 bp, Arabidopsis thaliana
cttctacagaatgcgac

SEQ ID NO: 90424 - DNA, 17 bp, Arabidopsis thaliana
cttctacaggcttttcc

SEQ ID NO: 90425 - DNA, 17 bp, Arabidopsis thaliana
cttctacagttaggagc

SEQ ID NO: 90426 - DNA, 17 bp, Arabidopsis thaliana
cttctacagttctgtgg

SEQ ID NO: 90427 - DNA, 17 bp, Arabidopsis thaliana
cttctacatccagaggt

SEQ ID NO: 90428 - DNA, 17 bp, Arabidopsis thaliana
cttctacatttggttgc

SEQ ID NO: 90429 - DNA, 17 bp, Arabidopsis thaliana
cttctacctctgctgct

SEQ ID NO: 90430 - DNA, 17 bp, Arabidopsis thaliana
cttctacgaggttccga

SEQ ID NO: 90431 - DNA, 17 bp, Arabidopsis thaliana
cttctacgatccgcttg

SEQ ID NO: 90432 - DNA, 17 bp, Arabidopsis thaliana
cttctacggtgctcctg

SEQ ID NO: 90433 - DNA, 17 bp, Arabidopsis thaliana
cttctactccggactgg

SEQ ID NO: 90434 - DNA, 17 bp, Arabidopsis thaliana
cttctactttgacctac

SEQ ID NO: 90435 - DNA, 17 bp, Arabidopsis thaliana
cttctagcccggattct

SEQ ID NO: 90436 - DNA, 17 bp, Arabidopsis thaliana
cttctaggatgtataga

SEQ ID NO: 90437 - DNA, 17 bp, Arabidopsis thaliana
cttctagtgcggttgca

SEQ ID NO: 90438 - DNA, 17 bp, Arabidopsis thaliana
cttctagttcaacactg

SEQ ID NO: 90439 - DNA, 17 bp, Arabidopsis thaliana
cttctatacgagtcgtg

SEQ ID NO: 90440 - DNA, 17 bp, Arabidopsis thaliana
cttctatacgagttgtg

SEQ ID NO: 90441 - DNA, 17 bp, Arabidopsis thaliana
cttctatagaagcttgt

SEQ ID NO: 90442 - DNA, 17 bp, Arabidopsis thaliana
cttctatcagctgatct

SEQ ID NO: 90443 - DNA, 17 bp, Arabidopsis thaliana
cttctatccaaaggatg

SEQ ID NO: 90444 - DNA, 17 bp, Arabidopsis thaliana
cttctatcctaccacct

SEQ ID NO: 90445 - DNA, 17 bp, Arabidopsis thaliana
cttctatgagtggtttt

SEQ ID NO: 90446 - DNA, 17 bp, Arabidopsis thaliana
cttctattagctcagtg

SEQ ID NO: 90447 - DNA, 17 bp, Arabidopsis thaliana
cttctattcgcagatga

SEQ ID NO: 90448 - DNA, 17 bp, Arabidopsis thaliana
cttctattctgcacgag

SEQ ID NO: 90449 - DNA, 17 bp, Arabidopsis thaliana
cttctattggcccagag

SEQ ID NO: 90450 - DNA, 17 bp, Arabidopsis thaliana
cttctattgttgtgcag

SEQ ID NO: 90451 - DNA, 17 bp, Arabidopsis thaliana
cttctatttccggcatt

SEQ ID NO: 90452 - DNA, 17 bp, Arabidopsis thaliana
cttctatttcttttggt

SEQ ID NO: 90453 - DNA, 17 bp, Arabidopsis thaliana
cttctatttggatttgt

SEQ ID NO: 90454 - DNA, 17 bp, Arabidopsis thaliana
cttctcaaagatcctcc

SEQ ID NO: 90455 - DNA, 17 bp, Arabidopsis thaliana
cttctcaaagcttcagg

SEQ ID NO: 90456 - DNA, 17 bp, Arabidopsis thaliana
cttctcaatgctggaaa

SEQ ID NO: 90457 - DNA, 17 bp, Arabidopsis thaliana
cttctcacctacaaggc

SEQ ID NO: 90458 - DNA, 17 bp, Arabidopsis thaliana
cttctcacgtacaaggc

SEQ ID NO: 90459 - DNA, 17 bp, Arabidopsis thaliana
cttctcacgtacaatgc

SEQ ID NO: 90460 - DNA, 17 bp, Arabidopsis thaliana
cttctcactatgcacct

SEQ ID NO: 90461 - DNA, 17 bp, Arabidopsis thaliana
cttctcacttggatgga

SEQ ID NO: 90462 - DNA, 17 bp, Arabidopsis thaliana
cttctcagaaagtataa

SEQ ID NO: 90463 - DNA, 17 bp, Arabidopsis thaliana
cttctcagaagatcaag

SEQ ID NO: 90464 - DNA, 17 bp, Arabidopsis thaliana
cttctcagaatcggtgt

SEQ ID NO: 90465 - DNA, 17 bp, Arabidopsis thaliana
cttctcagagcttgttt

SEQ ID NO: 90466 - DNA, 17 bp, Arabidopsis thaliana
cttctcaggacggataa

SEQ ID NO: 90467 - DNA, 17 bp, Arabidopsis thaliana
cttctcaggagggatag

SEQ ID NO: 90468 - DNA, 17 bp, Arabidopsis thaliana
cttctcagtaggccatg

SEQ ID NO: 90469 - DNA, 17 bp, Arabidopsis thaliana
cttctcagtgtatttgg

SEQ ID NO: 90470 - DNA, 17 bp, Arabidopsis thaliana
cttctcagttgtggtac

SEQ ID NO: 90471 - DNA, 17 bp, Arabidopsis thaliana
cttctcatcgatggtct

SEQ ID NO: 90472 - DNA, 17 bp, Arabidopsis thaliana
cttctcatctccattgt

SEQ ID NO: 90473 - DNA, 17 bp, Arabidopsis thaliana
cttctcattcagtgttg

SEQ ID NO: 90474 - DNA, 17 bp, Arabidopsis thaliana
cttctcattgcggcatt

SEQ ID NO: 90475 - DNA, 17 bp, Arabidopsis thaliana
cttctcattttgacacg

SEQ ID NO: 90476 - DNA, 17 bp, Arabidopsis thaliana
cttctccaaaaatggcc

SEQ ID NO: 90477 - DNA, 17 bp, Arabidopsis thaliana
cttctccaaaagaatgg

SEQ ID NO: 90478 - DNA, 17 bp, Arabidopsis thaliana
cttctccaaccgaatga

SEQ ID NO: 90479 - DNA, 17 bp, Arabidopsis thaliana
cttctccaaccgaatgg

SEQ ID NO: 90480 - DNA, 17 bp, Arabidopsis thaliana
cttctccacgaaggacc

SEQ ID NO: 90481 - DNA, 17 bp, Arabidopsis thaliana
cttctccagcaacggtg

SEQ ID NO: 90482 - DNA, 17 bp, Arabidopsis thaliana
cttctccagcagccgtc

SEQ ID NO: 90483 - DNA, 17 bp, Arabidopsis thaliana
cttctccatcatcactt

SEQ ID NO: 90484 - DNA, 17 bp, Arabidopsis thaliana
cttctccatcttgttga

SEQ ID NO: 90485 - DNA, 17 bp, Arabidopsis thaliana
cttctccatgcgtttga

SEQ ID NO: 90486 - DNA, 17 bp, Arabidopsis thaliana
cttctccattgacgttt

SEQ ID NO: 90487 - DNA, 17 bp, Arabidopsis thaliana
cttctccattgactttt

SEQ ID NO: 90488 - DNA, 17 bp, Arabidopsis thaliana
cttctcccagatgtgtg

SEQ ID NO: 90489 - DNA, 17 bp, Arabidopsis thaliana
cttctcccagtggtgtg

SEQ ID NO: 90490 - DNA, 17 bp, Arabidopsis thaliana
cttctccccgaaagacc

SEQ ID NO: 90491 - DNA, 17 bp, Arabidopsis thaliana
cttctccccgaaggacc

SEQ ID NO: 90492 - DNA, 17 bp, Arabidopsis thaliana
cttctcccgttcctctc

SEQ ID NO: 90493 - DNA, 17 bp, Arabidopsis thaliana
cttctccgacatggtcc

SEQ ID NO: 90494 - DNA, 17 bp, Arabidopsis thaliana
cttctccgatgaaggct

SEQ ID NO: 90495 - DNA, 17 bp, Arabidopsis thaliana
cttctccgattagactt

SEQ ID NO: 90496 - DNA, 17 bp, Arabidopsis thaliana
cttctccgcctcggcca

SEQ ID NO: 90497 - DNA, 17 bp, Arabidopsis thaliana
cttctccgctcatgcgc

SEQ ID NO: 90498 - DNA, 17 bp, Arabidopsis thaliana
cttctccggtctcgtgg

SEQ ID NO: 90499 - DNA, 17 bp, Arabidopsis thaliana
cttctccgtcttcatgc

SEQ ID NO: 90500 - DNA, 17 bp, Arabidopsis thaliana
cttctcctaccactgga

SEQ ID NO: 90501 - DNA, 17 bp, Arabidopsis thaliana
cttctcctcgatcggac

SEQ ID NO: 90502 - DNA, 17 bp, Arabidopsis thaliana
cttctcctctcaaccgc

SEQ ID NO: 90503 - DNA, 17 bp, Arabidopsis thaliana
cttctccttctcaatgc

SEQ ID NO: 90504 - DNA, 17 bp, Arabidopsis thaliana
cttctccttcttgcgtg

SEQ ID NO: 90505 - DNA, 17 bp, Arabidopsis thaliana
cttctcctttcaaagtg

SEQ ID NO: 90506 - DNA, 17 bp, Arabidopsis thaliana
cttctcctttggaagtg

SEQ ID NO: 90507 - DNA, 17 bp, Arabidopsis thaliana
cttctccttttccatgc

SEQ ID NO: 90508 - DNA, 17 bp, Arabidopsis thaliana
cttctccttttgtgtcc

SEQ ID NO: 90509 - DNA, 17 bp, Arabidopsis thaliana
cttctcgaacaaatgct

SEQ ID NO: 90510 - DNA, 17 bp, Arabidopsis thaliana
cttctcgactactgtga

SEQ ID NO: 90511 - DNA, 17 bp, Arabidopsis thaliana
cttctcgatgttagctt

SEQ ID NO: 90512 - DNA, 17 bp, Arabidopsis thaliana
cttctcgctgatcatat

SEQ ID NO: 90513 - DNA, 17 bp, Arabidopsis thaliana
cttctcgctgtgaagag

SEQ ID NO: 90514 - DNA, 17 bp, Arabidopsis thaliana
cttctcggaatgccccc

SEQ ID NO: 90515 - DNA, 17 bp, Arabidopsis thaliana
cttctcggcacggcagg

SEQ ID NO: 90516 - DNA, 17 bp, Arabidopsis thaliana
cttctcggttttgctcc

SEQ ID NO: 90517 - DNA, 17 bp, Arabidopsis thaliana
cttctcgtactggatgc

SEQ ID NO: 90518 - DNA, 17 bp, Arabidopsis thaliana
cttctcgtactggatgg

SEQ ID NO: 90519 - DNA, 17 bp, Arabidopsis thaliana
cttctcgtagtgatgtt

SEQ ID NO: 90520 - DNA, 17 bp, Arabidopsis thaliana
cttctcgtctgcgaaaa

SEQ ID NO: 90521 - DNA, 17 bp, Arabidopsis thaliana
cttctcgtggagaaata

SEQ ID NO: 90522 - DNA, 17 bp, Arabidopsis thaliana
cttctcgtggggaaata

SEQ ID NO: 90523 - DNA, 17 bp, Arabidopsis thaliana
cttctcgttccctgcag

SEQ ID NO: 90524 - DNA, 17 bp, Arabidopsis thaliana
cttctctacatgtgctt

SEQ ID NO: 90525 - DNA, 17 bp, Arabidopsis thaliana
cttctctaggcgatgaa

SEQ ID NO: 90526 - DNA, 17 bp, Arabidopsis thaliana
cttctctatacgcttga

SEQ ID NO: 90527 - DNA, 17 bp, Arabidopsis thaliana
cttctctatgtggtacc

SEQ ID NO: 90528 - DNA, 17 bp, Arabidopsis thaliana
cttctctcgatgatgtg

SEQ ID NO: 90529 - DNA, 17 bp, Arabidopsis thaliana
cttctctctaaagggcc

SEQ ID NO: 90530 - DNA, 17 bp, Arabidopsis thaliana
cttctctctcaaacgac

SEQ ID NO: 90531 - DNA, 17 bp, Arabidopsis thaliana
cttctctcttcttcact

SEQ ID NO: 90532 - DNA, 17 bp, Arabidopsis thaliana
cttctctcttgaacctt

SEQ ID NO: 90533 - DNA, 17 bp, Arabidopsis thaliana
cttctctcttttgggct

SEQ ID NO: 90534 - DNA, 17 bp, Arabidopsis thaliana
cttctctgacgacgaac

SEQ ID NO: 90535 - DNA, 17 bp, Arabidopsis thaliana
cttctctgattctgtct

SEQ ID NO: 90536 - DNA, 17 bp, Arabidopsis thaliana
cttctctgccgttttgc

SEQ ID NO: 90537 - DNA, 17 bp, Arabidopsis thaliana
cttctctggcgttgtaa

SEQ ID NO: 90538 - DNA, 17 bp, Arabidopsis thaliana
cttctctgggccgaaac

SEQ ID NO: 90539 - DNA, 17 bp, Arabidopsis thaliana
cttctctggttgtgtct

SEQ ID NO: 90540 - DNA, 17 bp, Arabidopsis thaliana
cttctctgtgtgtgtgg

SEQ ID NO: 90541 - DNA, 17 bp, Arabidopsis thaliana
cttctcttattttcgct

SEQ ID NO: 90542 - DNA, 17 bp, Arabidopsis thaliana
cttctcttcgcgcctct

SEQ ID NO: 90543 - DNA, 17 bp, Arabidopsis thaliana
cttctctttgatgacca

SEQ ID NO: 90544 - DNA, 17 bp, Arabidopsis thaliana
cttctctttggatttgg

SEQ ID NO: 90545 - DNA, 17 bp, Arabidopsis thaliana
cttctcttttcgattcg

SEQ ID NO: 90546 - DNA, 17 bp, Arabidopsis thaliana
cttctcttttggaagtg

SEQ ID NO: 90547 - DNA, 17 bp, Arabidopsis thaliana
cttctgaccgaggaagg

SEQ ID NO: 90548 - DNA, 17 bp, Arabidopsis thaliana
cttctgacgaaaaaacg

SEQ ID NO: 90549 - DNA, 17 bp, Arabidopsis thaliana
cttctgacggaaggcaa

SEQ ID NO: 90550 - DNA, 17 bp, Arabidopsis thaliana
cttctgactgacgggtt

SEQ ID NO: 90551 - DNA, 17 bp, Arabidopsis thaliana
cttctgagaagggttcg

SEQ ID NO: 90552 - DNA, 17 bp, Arabidopsis thaliana
cttctgagaggatatgg

SEQ ID NO: 90553 - DNA, 17 bp, Arabidopsis thaliana
cttctgagatcacattg

SEQ ID NO: 90554 - DNA, 17 bp, Arabidopsis thaliana
cttctgagatcattgtc

SEQ ID NO: 90555 - DNA, 17 bp, Arabidopsis thaliana
cttctgaggattacggt

SEQ ID NO: 90556 - DNA, 17 bp, Arabidopsis thaliana
cttctgagtcaattcat

SEQ ID NO: 90557 - DNA, 17 bp, Arabidopsis thaliana
cttctgagtcactgggt

SEQ ID NO: 90558 - DNA, 17 bp, Arabidopsis thaliana
cttctgatgggccgttc

SEQ ID NO: 90559 - DNA, 17 bp, Arabidopsis thaliana
cttctgattcaactagc

SEQ ID NO: 90560 - DNA, 17 bp, Arabidopsis thaliana
cttctgattccaattgt

SEQ ID NO: 90561 - DNA, 17 bp, Arabidopsis thaliana
cttctgattcttctgag

SEQ ID NO: 90562 - DNA, 17 bp, Arabidopsis thaliana
cttctgattcttcttag

SEQ ID NO: 90563 - DNA, 17 bp, Arabidopsis thaliana
cttctgcaacctgtaac

SEQ ID NO: 90564 - DNA, 17 bp, Arabidopsis thaliana
cttctgcaacctgtaga

SEQ ID NO: 90565 - DNA, 17 bp, Arabidopsis thaliana
cttctgcaactgttgaa

SEQ ID NO: 90566 - DNA, 17 bp, Arabidopsis thaliana
cttctgcaaggctcttt

SEQ ID NO: 90567 - DNA, 17 bp, Arabidopsis thaliana
cttctgcacacttgcct

SEQ ID NO: 90568 - DNA, 17 bp, Arabidopsis thaliana
cttctgcactggctcgg

SEQ ID NO: 90569 - DNA, 17 bp, Arabidopsis thaliana
cttctgcagctattgga

SEQ ID NO: 90570 - DNA, 17 bp, Arabidopsis thaliana
cttctgcataattgttg

SEQ ID NO: 90571 - DNA, 17 bp, Arabidopsis thaliana
cttctgcatttctgctt

SEQ ID NO: 90572 - DNA, 17 bp, Arabidopsis thaliana
cttctgcccatgcgcag

SEQ ID NO: 90573 - DNA, 17 bp, Arabidopsis thaliana
cttctgccggggaaata

SEQ ID NO: 90574 - DNA, 17 bp, Arabidopsis thaliana
cttctgcctcaagcgga

SEQ ID NO: 90575 - DNA, 17 bp, Arabidopsis thaliana
cttctgccttggtgtcg

SEQ ID NO: 90576 - DNA, 17 bp, Arabidopsis thaliana
cttctgcggagccattt

SEQ ID NO: 90577 - DNA, 17 bp, Arabidopsis thaliana
cttctgcggcagttatt

SEQ ID NO: 90578 - DNA, 17 bp, Arabidopsis thaliana
cttctgcgtgtaggaca

SEQ ID NO: 90579 - DNA, 17 bp, Arabidopsis thaliana
cttctgcgtttaggaca

SEQ ID NO: 90580 - DNA, 17 bp, Arabidopsis thaliana
cttctgctgacacctcc

SEQ ID NO: 90581 - DNA, 17 bp, Arabidopsis thaliana
cttctgctgatgttgcc

SEQ ID NO: 90582 - DNA, 17 bp, Arabidopsis thaliana
cttctgctgggccaaaa

SEQ ID NO: 90583 - DNA, 17 bp, Arabidopsis thaliana
cttctgctgggccaaca

SEQ ID NO: 90584 - DNA, 17 bp, Arabidopsis thaliana
cttctgcttaggaaaca

SEQ ID NO: 90585 - DNA, 17 bp, Arabidopsis thaliana
cttctgcttgacagaag

SEQ ID NO: 90586 - DNA, 17 bp, Arabidopsis thaliana
cttctgcttgttgggct

SEQ ID NO: 90587 - DNA, 17 bp, Arabidopsis thaliana
cttctgcttttgtgaaa

SEQ ID NO: 90588 - DNA, 17 bp, Arabidopsis thaliana
cttctggaatgtgcgcg

SEQ ID NO: 90589 - DNA, 17 bp, Arabidopsis thaliana
cttctggattcctttgg

SEQ ID NO: 90590 - DNA, 17 bp, Arabidopsis thaliana
cttctggattcgttgag

SEQ ID NO: 90591 - DNA, 17 bp, Arabidopsis thaliana
cttctggccatttggtt

SEQ ID NO: 90592 - DNA, 17 bp, Arabidopsis thaliana
cttctggccgagggcac

SEQ ID NO: 90593 - DNA, 17 bp, Arabidopsis thaliana
cttctgggacaagttca

SEQ ID NO: 90594 - DNA, 17 bp, Arabidopsis thaliana
cttctgggagttgtggt

SEQ ID NO: 90595 - DNA, 17 bp, Arabidopsis thaliana
cttctgggataaccacc

SEQ ID NO: 90596 - DNA, 17 bp, Arabidopsis thaliana
cttctgggtgcgggaat

SEQ ID NO: 90597 - DNA, 17 bp, Arabidopsis thaliana
cttctgggttggcccct

SEQ ID NO: 90598 - DNA, 17 bp, Arabidopsis thaliana
cttctggtttttgctgc

SEQ ID NO: 90599 - DNA, 17 bp, Arabidopsis thaliana
cttctgtaactggataa

SEQ ID NO: 90600 - DNA, 17 bp, Arabidopsis thaliana
cttctgtaatcttgagg

SEQ ID NO: 90601 - DNA, 17 bp, Arabidopsis thaliana
cttctgtagatgttcca

SEQ ID NO: 90602 - DNA, 17 bp, Arabidopsis thaliana
cttctgtcagcggcacg

SEQ ID NO: 90603 - DNA, 17 bp, Arabidopsis thaliana
cttctgtcagcggcagg

SEQ ID NO: 90604 - DNA, 17 bp, Arabidopsis thaliana
cttctgtccccagtttg

SEQ ID NO: 90605 - DNA, 17 bp, Arabidopsis thaliana
cttctgtctctgactct

SEQ ID NO: 90606 - DNA, 17 bp, Arabidopsis thaliana
cttctgtggaccaggcg

SEQ ID NO: 90607 - DNA, 17 bp, Arabidopsis thaliana
cttctgtgtcactattt

SEQ ID NO: 90608 - DNA, 17 bp, Arabidopsis thaliana
cttctgtgtctttttca

SEQ ID NO: 90609 - DNA, 17 bp, Arabidopsis thaliana
cttctgttcgacgaagt

SEQ ID NO: 90610 - DNA, 17 bp, Arabidopsis thaliana
cttctgttgtagctcct

SEQ ID NO: 90611 - DNA, 17 bp, Arabidopsis thaliana
cttcttaaggtgtgttt

SEQ ID NO: 90612 - DNA, 17 bp, Arabidopsis thaliana
cttcttagaccatcctc

SEQ ID NO: 90613 - DNA, 17 bp, Arabidopsis thaliana
cttcttagagggactat

SEQ ID NO: 90614 - DNA, 17 bp, Arabidopsis thaliana
cttcttagcggcttccc

SEQ ID NO: 90615 - DNA, 17 bp, Arabidopsis thaliana
cttcttagcggcttggc

SEQ ID NO: 90616 - DNA, 17 bp, Arabidopsis thaliana
cttcttagcttttgctt

SEQ ID NO: 90617 - DNA, 17 bp, Arabidopsis thaliana
cttcttaggctgcgttt

SEQ ID NO: 90618 - DNA, 17 bp, Arabidopsis thaliana
cttcttatgactcgcgt

SEQ ID NO: 90619 - DNA, 17 bp, Arabidopsis thaliana
cttcttatgattcgtgt

SEQ ID NO: 90620 - DNA, 17 bp, Arabidopsis thaliana
cttcttcaagactcttt

SEQ ID NO: 90621 - DNA, 17 bp, Arabidopsis thaliana
cttcttcaagctcgaca

SEQ ID NO: 90622 - DNA, 17 bp, Arabidopsis thaliana
cttcttcaccaggtctg

SEQ ID NO: 90623 - DNA, 17 bp, Arabidopsis thaliana
cttcttcaccgacgaat

SEQ ID NO: 90624 - DNA, 17 bp, Arabidopsis thaliana
cttcttcagcgcacgtg

SEQ ID NO: 90625 - DNA, 17 bp, Arabidopsis thaliana
cttcttcatccatgtgg

SEQ ID NO: 90626 - DNA, 17 bp, Arabidopsis thaliana
cttcttcatcgcgtctt

SEQ ID NO: 90627 - DNA, 17 bp, Arabidopsis thaliana
cttcttcatgaggacag

SEQ ID NO: 90628 - DNA, 17 bp, Arabidopsis thaliana
cttcttccactgaggta

SEQ ID NO: 90629 - DNA, 17 bp, Arabidopsis thaliana
cttcttccgtaggtctc

SEQ ID NO: 90630 - DNA, 17 bp, Arabidopsis thaliana
cttcttcctaggggtgt

SEQ ID NO: 90631 - DNA, 17 bp, Arabidopsis thaliana
cttcttcctatctagtt

SEQ ID NO: 90632 - DNA, 17 bp, Arabidopsis thaliana
cttcttcctctcttgct

SEQ ID NO: 90633 - DNA, 17 bp, Arabidopsis thaliana
cttcttcgaccgacaat

SEQ ID NO: 90634 - DNA, 17 bp, Arabidopsis thaliana
cttcttcgcagaaactt

SEQ ID NO: 90635 - DNA, 17 bp, Arabidopsis thaliana
cttcttcgctgccactc

SEQ ID NO: 90636 - DNA, 17 bp, Arabidopsis thaliana
cttcttcggaagcgcca

SEQ ID NO: 90637 - DNA, 17 bp, Arabidopsis thaliana
cttcttcgggaagaaag

SEQ ID NO: 90638 - DNA, 17 bp, Arabidopsis thaliana
cttcttcgtcggccttg

SEQ ID NO: 90639 - DNA, 17 bp, Arabidopsis thaliana
cttcttcgtctttgtcc

SEQ ID NO: 90640 - DNA, 17 bp, Arabidopsis thaliana
cttcttcgttgtgtctg

SEQ ID NO: 90641 - DNA, 17 bp, Arabidopsis thaliana
cttcttcgttttggccg

SEQ ID NO: 90642 - DNA, 17 bp, Arabidopsis thaliana
cttcttctactgcggcc

SEQ ID NO: 90643 - DNA, 17 bp, Arabidopsis thaliana
cttcttctagttgttgc

SEQ ID NO: 90644 - DNA, 17 bp, Arabidopsis thaliana
cttcttctcagctgtga

SEQ ID NO: 90645 - DNA, 17 bp, Arabidopsis thaliana
cttcttctcattgcctt

SEQ ID NO: 90646 - DNA, 17 bp, Arabidopsis thaliana
cttcttctcctttcttc

SEQ ID NO: 90647 - DNA, 17 bp, Arabidopsis thaliana
cttcttctctctctcct

SEQ ID NO: 90648 - DNA, 17 bp, Arabidopsis thaliana
cttcttctctttctcca

SEQ ID NO: 90649 - DNA, 17 bp, Arabidopsis thaliana
cttcttctgactcaatt

SEQ ID NO: 90650 - DNA, 17 bp, Arabidopsis thaliana
cttcttctgagattggc

SEQ ID NO: 90651 - DNA, 17 bp, Arabidopsis thaliana
cttcttctgattggtca

SEQ ID NO: 90652 - DNA, 17 bp, Arabidopsis thaliana
cttcttctgcaactggc

SEQ ID NO: 90653 - DNA, 17 bp, Arabidopsis thaliana
cttcttctgcaactgtt

SEQ ID NO: 90654 - DNA, 17 bp, Arabidopsis thaliana
cttcttctgtcagatgg

SEQ ID NO: 90655 - DNA, 17 bp, Arabidopsis thaliana
cttcttctgtttttgtt

SEQ ID NO: 90656 - DNA, 17 bp, Arabidopsis thaliana
cttcttcttaggctttg

SEQ ID NO: 90657 - DNA, 17 bp, Arabidopsis thaliana
cttcttcttcctcgcag

SEQ ID NO: 90658 - DNA, 17 bp, Arabidopsis thaliana
cttcttcttcgggtatc

SEQ ID NO: 90659 - DNA, 17 bp, Arabidopsis thaliana
cttcttcttcgtcacga

SEQ ID NO: 90660 - DNA, 17 bp, Arabidopsis thaliana
cttcttcttctcttctc

SEQ ID NO: 90661 - DNA, 17 bp, Arabidopsis thaliana
cttcttcttgcagtctt

SEQ ID NO: 90662 - DNA, 17 bp, Arabidopsis thaliana
cttcttcttggctctgc

SEQ ID NO: 90663 - DNA, 17 bp, Arabidopsis thaliana
cttcttcttgtgtctcg

SEQ ID NO: 90664 - DNA, 17 bp, Arabidopsis thaliana
cttcttctttggtcgac

SEQ ID NO: 90665 - DNA, 17 bp, Arabidopsis thaliana
cttcttcttttcgactg

SEQ ID NO: 90666 - DNA, 17 bp, Arabidopsis thaliana
cttcttcttttcgcagg

SEQ ID NO: 90667 - DNA, 17 bp, Arabidopsis thaliana
cttcttgaatgttttgc

SEQ ID NO: 90668 - DNA, 17 bp, Arabidopsis thaliana
cttcttgacgagatcca

SEQ ID NO: 90669 - DNA, 17 bp, Arabidopsis thaliana
cttcttgactctagtcc

SEQ ID NO: 90670 - DNA, 17 bp, Arabidopsis thaliana
cttcttgactgaaaaat

SEQ ID NO: 90671 - DNA, 17 bp, Arabidopsis thaliana
cttcttgagatcgatgg

SEQ ID NO: 90672 - DNA, 17 bp, Arabidopsis thaliana
cttcttgaggcacctac

SEQ ID NO: 90673 - DNA, 17 bp, Arabidopsis thaliana
cttcttgaggcaccttc

SEQ ID NO: 90674 - DNA, 17 bp, Arabidopsis thaliana
cttcttgaggcccctcc

SEQ ID NO: 90675 - DNA, 17 bp, Arabidopsis thaliana
cttcttgagggagatag

SEQ ID NO: 90676 - DNA, 17 bp, Arabidopsis thaliana
cttcttgatttccgaca

SEQ ID NO: 90677 - DNA, 17 bp, Arabidopsis thaliana
cttcttgcaagggagtg

SEQ ID NO: 90678 - DNA, 17 bp, Arabidopsis thaliana
cttcttgcaatcatccc

SEQ ID NO: 90679 - DNA, 17 bp, Arabidopsis thaliana
cttcttgcagacgacgc

SEQ ID NO: 90680 - DNA, 17 bp, Arabidopsis thaliana
cttcttgccatatctcg

SEQ ID NO: 90681 - DNA, 17 bp, Arabidopsis thaliana
cttcttgcttctcaaac

SEQ ID NO: 90682 - DNA, 17 bp, Arabidopsis thaliana
cttcttggacaagatcg

SEQ ID NO: 90683 - DNA, 17 bp, Arabidopsis thaliana
cttcttggatctggcct

SEQ ID NO: 90684 - DNA, 17 bp, Arabidopsis thaliana
cttcttggcgtgcagtg

SEQ ID NO: 90685 - DNA, 17 bp, Arabidopsis thaliana
cttcttggctctgcgga

SEQ ID NO: 90686 - DNA, 17 bp, Arabidopsis thaliana
cttcttggctttgattc

SEQ ID NO: 90687 - DNA, 17 bp, Arabidopsis thaliana
cttcttgggatgggtcg

SEQ ID NO: 90688 - DNA, 17 bp, Arabidopsis thaliana
cttcttgggttcgtcgt

SEQ ID NO: 90689 - DNA, 17 bp, Arabidopsis thaliana
cttcttgggttcgttgt

SEQ ID NO: 90690 - DNA, 17 bp, Arabidopsis thaliana
cttcttggtagtcgttt

SEQ ID NO: 90691 - DNA, 17 bp, Arabidopsis thaliana
cttcttggttcgggttg

SEQ ID NO: 90692 - DNA, 17 bp, Arabidopsis thaliana
cttcttggttgtcggca

SEQ ID NO: 90693 - DNA, 17 bp, Arabidopsis thaliana
cttcttggttgttacgt

SEQ ID NO: 90694 - DNA, 17 bp, Arabidopsis thaliana
cttcttgtaactcacga

SEQ ID NO: 90695 - DNA, 17 bp, Arabidopsis thaliana
cttcttgtaagcgacgt

SEQ ID NO: 90696 - DNA, 17 bp, Arabidopsis thaliana
cttcttgtaggtgacgt

SEQ ID NO: 90697 - DNA, 17 bp, Arabidopsis thaliana
cttcttgtcagattggg

SEQ ID NO: 90698 - DNA, 17 bp, Arabidopsis thaliana
cttcttgtgaacttgac

SEQ ID NO: 90699 - DNA, 17 bp, Arabidopsis thaliana
cttcttgttatgaccgg

SEQ ID NO: 90700 - DNA, 17 bp, Arabidopsis thaliana
cttctttaagatccggt

SEQ ID NO: 90701 - DNA, 17 bp, Arabidopsis thaliana
cttctttagaggcggca

SEQ ID NO: 90702 - DNA, 17 bp, Arabidopsis thaliana
cttctttcattgcagtg

SEQ ID NO: 90703 - DNA, 17 bp, Arabidopsis thaliana
cttctttcggccgcaac

SEQ ID NO: 90704 - DNA, 17 bp, Arabidopsis thaliana
cttctttcggcttagtg

SEQ ID NO: 90705 - DNA, 17 bp, Arabidopsis thaliana
cttctttcgtcggaggg

SEQ ID NO: 90706 - DNA, 17 bp, Arabidopsis thaliana
cttctttcgtttctctg

SEQ ID NO: 90707 - DNA, 17 bp, Arabidopsis thaliana
cttctttctcgggatag

SEQ ID NO: 90708 - DNA, 17 bp, Arabidopsis thaliana
cttctttctcgggatcg

SEQ ID NO: 90709 - DNA, 17 bp, Arabidopsis thaliana
cttctttctgggagatg

SEQ ID NO: 90710 - DNA, 17 bp, Arabidopsis thaliana
cttctttcttcgacaaa

SEQ ID NO: 90711 - DNA, 17 bp, Arabidopsis thaliana
cttctttcttgccagaa

SEQ ID NO: 90712 - DNA, 17 bp, Arabidopsis thaliana
cttctttgacgagatcg

SEQ ID NO: 90713 - DNA, 17 bp, Arabidopsis thaliana
cttctttgcgggagatt

SEQ ID NO: 90714 - DNA, 17 bp, Arabidopsis thaliana
cttctttgctattgttg

SEQ ID NO: 90715 - DNA, 17 bp, Arabidopsis thaliana
cttctttggccctgctg

SEQ ID NO: 90716 - DNA, 17 bp, Arabidopsis thaliana
cttctttggctatgtct

SEQ ID NO: 90717 - DNA, 17 bp, Arabidopsis thaliana
cttctttggctctgtct

SEQ ID NO: 90718 - DNA, 17 bp, Arabidopsis thaliana
cttctttggctgtaccg

SEQ ID NO: 90719 - DNA, 17 bp, Arabidopsis thaliana
cttctttgggagacaag

SEQ ID NO: 90720 - DNA, 17 bp, Arabidopsis thaliana
cttctttgggcccgaaa

SEQ ID NO: 90721 - DNA, 17 bp, Arabidopsis thaliana
cttctttgggcgatgaa

SEQ ID NO: 90722 - DNA, 17 bp, Arabidopsis thaliana
cttctttgggtctacct

SEQ ID NO: 90723 - DNA, 17 bp, Arabidopsis thaliana
cttctttgtcacgccac

SEQ ID NO: 90724 - DNA, 17 bp, Arabidopsis thaliana
cttctttgtcatctaac

SEQ ID NO: 90725 - DNA, 17 bp, Arabidopsis thaliana
cttctttgtcgctctga

SEQ ID NO: 90726 - DNA, 17 bp, Arabidopsis thaliana
cttctttgttgtcgctg

SEQ ID NO: 90727 - DNA, 17 bp, Arabidopsis thaliana
cttcttttccattagcc

SEQ ID NO: 90728 - DNA, 17 bp, Arabidopsis thaliana
cttcttttccattagcg

SEQ ID NO: 90729 - DNA, 17 bp, Arabidopsis thaliana
cttcttttcgatggcca

SEQ ID NO: 90730 - DNA, 17 bp, Arabidopsis thaliana
cttcttttgatgatttt

SEQ ID NO: 90731 - DNA, 17 bp, Arabidopsis thaliana
cttctttttcgggcatt

SEQ ID NO: 90732 - DNA, 17 bp, Arabidopsis thaliana
cttctttttgaggttgt

SEQ ID NO: 90733 - DNA, 17 bp, Arabidopsis thaliana
cttctttttgtctttgc

SEQ ID NO: 90734 - DNA, 17 bp, Arabidopsis thaliana
cttgaaaatccggagga

SEQ ID NO: 90735 - DNA, 17 bp, Arabidopsis thaliana
cttgaaaatcggacgtc

SEQ ID NO: 90736 - DNA, 17 bp, Arabidopsis thaliana
cttgaaaattacgggtt

SEQ ID NO: 90737 - DNA, 17 bp, Arabidopsis thaliana
cttgaaacgattctctg

SEQ ID NO: 90738 - DNA, 17 bp, Arabidopsis thaliana
cttgaaacgcctgatcc

SEQ ID NO: 90739 - DNA, 17 bp, Arabidopsis thaliana
cttgaaacgcgcttctt

SEQ ID NO: 90740 - DNA, 17 bp, Arabidopsis thaliana
cttgaaacgttgtgagg

SEQ ID NO: 90741 - DNA, 17 bp, Arabidopsis thaliana
cttgaaactctggttaa

SEQ ID NO: 90742 - DNA, 17 bp, Arabidopsis thaliana
cttgaaactctttgtga

SEQ ID NO: 90743 - DNA, 17 bp, Arabidopsis thaliana
cttgaaactgggttttg

SEQ ID NO: 90744 - DNA, 17 bp, Arabidopsis thaliana
cttgaaagagaggggga

SEQ ID NO: 90745 - DNA, 17 bp, Arabidopsis thaliana
cttgaaagcctaagtag

SEQ ID NO: 90746 - DNA, 17 bp, Arabidopsis thaliana
cttgaaatccaagatta

SEQ ID NO: 90747 - DNA, 17 bp, Arabidopsis thaliana
cttgaaatccgcatttt

SEQ ID NO: 90748 - DNA, 17 bp, Arabidopsis thaliana
cttgaaatctatagtct

SEQ ID NO: 90749 - DNA, 17 bp, Arabidopsis thaliana
cttgaaattccagtgac

SEQ ID NO: 90750 - DNA, 17 bp, Arabidopsis thaliana
cttgaaattgtcgggag

SEQ ID NO: 90751 - DNA, 17 bp, Arabidopsis thaliana
cttgaaattttagtgac

SEQ ID NO: 90752 - DNA, 17 bp, Arabidopsis thaliana
cttgaaccacaacagag

SEQ ID NO: 90753 - DNA, 17 bp, Arabidopsis thaliana
cttgaaccgcatttgta

SEQ ID NO: 90754 - DNA, 17 bp, Arabidopsis thaliana
cttgaaccgtgaaagcg

SEQ ID NO: 90755 - DNA, 17 bp, Arabidopsis thaliana
cttgaacctccaaaacg

SEQ ID NO: 90756 - DNA, 17 bp, Arabidopsis thaliana
cttgaaccttgggatgg

SEQ ID NO: 90757 - DNA, 17 bp, Arabidopsis thaliana
cttgaactatgcctgag

SEQ ID NO: 90758 - DNA, 17 bp, Arabidopsis thaliana
cttgaactattgagacc

SEQ ID NO: 90759 - DNA, 17 bp, Arabidopsis thaliana
cttgaacttggttgatg

SEQ ID NO: 90760 - DNA, 17 bp, Arabidopsis thaliana
cttgaagaaaggcgttg

SEQ ID NO: 90761 - DNA, 17 bp, Arabidopsis thaliana
cttgaagacgacggaag

SEQ ID NO: 90762 - DNA, 17 bp, Arabidopsis thaliana
cttgaagactgctggtt

SEQ ID NO: 90763 - DNA, 17 bp, Arabidopsis thaliana
cttgaagatcgggttgc

SEQ ID NO: 90764 - DNA, 17 bp, Arabidopsis thaliana
cttgaagatttctatca

SEQ ID NO: 90765 - DNA, 17 bp, Arabidopsis thaliana
cttgaagcaactattgc

SEQ ID NO: 90766 - DNA, 17 bp, Arabidopsis thaliana
cttgaagcctaccatac

SEQ ID NO: 90767 - DNA, 17 bp, Arabidopsis thaliana
cttgaagccttccatac

SEQ ID NO: 90768 - DNA, 17 bp, Arabidopsis thaliana
cttgaagctcaggtctg

SEQ ID NO: 90769 - DNA, 17 bp, Arabidopsis thaliana
cttgaaggccggccgga

SEQ ID NO: 90770 - DNA, 17 bp, Arabidopsis thaliana
cttgaaggctggtgagc

SEQ ID NO: 90771 - DNA, 17 bp, Arabidopsis thaliana
cttgaaggtctcgacac

SEQ ID NO: 90772 - DNA, 17 bp, Arabidopsis thaliana
cttgaagtcgattagga

SEQ ID NO: 90773 - DNA, 17 bp, Arabidopsis thaliana
cttgaagtcttctaggt

SEQ ID NO: 90774 - DNA, 17 bp, Arabidopsis thaliana
cttgaagttttgtggac

SEQ ID NO: 90775 - DNA, 17 bp, Arabidopsis thaliana
cttgaatatgttggagt

SEQ ID NO: 90776 - DNA, 17 bp, Arabidopsis thaliana
cttgaatcaactcttca

SEQ ID NO: 90777 - DNA, 17 bp, Arabidopsis thaliana
cttgaatccttttctgt

SEQ ID NO: 90778 - DNA, 17 bp, Arabidopsis thaliana
cttgaatctcggctatt

SEQ ID NO: 90779 - DNA, 17 bp, Arabidopsis thaliana
cttgaatctctctcagc

SEQ ID NO: 90780 - DNA, 17 bp, Arabidopsis thaliana
cttgaatctttaactgt

SEQ ID NO: 90781 - DNA, 17 bp, Arabidopsis thaliana
cttgaatggattcgcga

SEQ ID NO: 90782 - DNA, 17 bp, Arabidopsis thaliana
cttgaatggattcgcta

SEQ ID NO: 90783 - DNA, 17 bp, Arabidopsis thaliana
cttgaattactcgaacg

SEQ ID NO: 90784 - DNA, 17 bp, Arabidopsis thaliana
cttgaattgatcatctt

SEQ ID NO: 90785 - DNA, 17 bp, Arabidopsis thaliana
cttgaatttcactcctt

SEQ ID NO: 90786 - DNA, 17 bp, Arabidopsis thaliana
cttgacaacaaagacgg

SEQ ID NO: 90787 - DNA, 17 bp, Arabidopsis thaliana
cttgacaattcgtcctg

SEQ ID NO: 90788 - DNA, 17 bp, Arabidopsis thaliana
cttgacacacgtgctac

SEQ ID NO: 90789 - DNA, 17 bp, Arabidopsis thaliana
cttgacacatcagcaca

SEQ ID NO: 90790 - DNA, 17 bp, Arabidopsis thaliana
cttgacaccttgtagac

SEQ ID NO: 90791 - DNA, 17 bp, Arabidopsis thaliana
cttgacacgtagcacaa

SEQ ID NO: 90792 - DNA, 17 bp, Arabidopsis thaliana
cttgacatggttcctcg

SEQ ID NO: 90793 - DNA, 17 bp, Arabidopsis thaliana
cttgacatttgtgtgat

SEQ ID NO: 90794 - DNA, 17 bp, Arabidopsis thaliana
cttgaccaagcgttgtt

SEQ ID NO: 90795 - DNA, 17 bp, Arabidopsis thaliana
cttgaccacaacaggct

SEQ ID NO: 90796 - DNA, 17 bp, Arabidopsis thaliana
cttgaccaccctcatgt

SEQ ID NO: 90797 - DNA, 17 bp, Arabidopsis thaliana
cttgaccaggcttcatt

SEQ ID NO: 90798 - DNA, 17 bp, Arabidopsis thaliana
cttgaccaggcttcccc

SEQ ID NO: 90799 - DNA, 17 bp, Arabidopsis thaliana
cttgaccataggttcga

SEQ ID NO: 90800 - DNA, 17 bp, Arabidopsis thaliana
cttgaccatatggacaa

SEQ ID NO: 90801 - DNA, 17 bp, Arabidopsis thaliana
cttgaccatttagggca

SEQ ID NO: 90802 - DNA, 17 bp, Arabidopsis thaliana
cttgaccattttgggca

SEQ ID NO: 90803 - DNA, 17 bp, Arabidopsis thaliana
cttgacccattctcaag

SEQ ID NO: 90804 - DNA, 17 bp, Arabidopsis thaliana
cttgaccgatcaatctt

SEQ ID NO: 90805 - DNA, 17 bp, Arabidopsis thaliana
cttgaccgatttgagcg

SEQ ID NO: 90806 - DNA, 17 bp, Arabidopsis thaliana
cttgaccgggatctctc

SEQ ID NO: 90807 - DNA, 17 bp, Arabidopsis thaliana
cttgaccggtttagtgt

SEQ ID NO: 90808 - DNA, 17 bp, Arabidopsis thaliana
cttgaccgtcatctttt

SEQ ID NO: 90809 - DNA, 17 bp, Arabidopsis thaliana
cttgaccttccactcga

SEQ ID NO: 90810 - DNA, 17 bp, Arabidopsis thaliana
cttgaccttgccacaag

SEQ ID NO: 90811 - DNA, 17 bp, Arabidopsis thaliana
cttgaccttttcttcat

SEQ ID NO: 90812 - DNA, 17 bp, Arabidopsis thaliana
cttgacgaaaggtcggc

SEQ ID NO: 90813 - DNA, 17 bp, Arabidopsis thaliana
cttgacgacctatcaag

SEQ ID NO: 90814 - DNA, 17 bp, Arabidopsis thaliana
cttgacgagggagtgct

SEQ ID NO: 90815 - DNA, 17 bp, Arabidopsis thaliana
cttgacgattggaccag

SEQ ID NO: 90816 - DNA, 17 bp, Arabidopsis thaliana
cttgacgccaccaacca

SEQ ID NO: 90817 - DNA, 17 bp, Arabidopsis thaliana
cttgacgccaccaacta

SEQ ID NO: 90818 - DNA, 17 bp, Arabidopsis thaliana
cttgacgctgctgatgt

SEQ ID NO: 90819 - DNA, 17 bp, Arabidopsis thaliana
cttgacggctccaaact

SEQ ID NO: 90820 - DNA, 17 bp, Arabidopsis thaliana
cttgacggtggaaggat

SEQ ID NO: 90821 - DNA, 17 bp, Arabidopsis thaliana
cttgacgtgccggagtg

SEQ ID NO: 90822 - DNA, 17 bp, Arabidopsis thaliana
cttgactaacccctgca

SEQ ID NO: 90823 - DNA, 17 bp, Arabidopsis thaliana
cttgactaacgatctca

SEQ ID NO: 90824 - DNA, 17 bp, Arabidopsis thaliana
cttgactatgcagccgg

SEQ ID NO: 90825 - DNA, 17 bp, Arabidopsis thaliana
cttgactcacgatctcc

SEQ ID NO: 90826 - DNA, 17 bp, Arabidopsis thaliana
cttgactccgatgtatg

SEQ ID NO: 90827 - DNA, 17 bp, Arabidopsis thaliana
cttgactcctctgaaag

SEQ ID NO: 90828 - DNA, 17 bp, Arabidopsis thaliana
cttgactcggcttcttg

SEQ ID NO: 90829 - DNA, 17 bp, Arabidopsis thaliana
cttgactcgggactagt

SEQ ID NO: 90830 - DNA, 17 bp, Arabidopsis thaliana
cttgactctagtccgac

SEQ ID NO: 90831 - DNA, 17 bp, Arabidopsis thaliana
cttgactctcggcaacg

SEQ ID NO: 90832 - DNA, 17 bp, Arabidopsis thaliana
cttgactgacctcgtag

SEQ ID NO: 90833 - DNA, 17 bp, Arabidopsis thaliana
cttgactgattcgagac

SEQ ID NO: 90834 - DNA, 17 bp, Arabidopsis thaliana
cttgactgctgacggat

SEQ ID NO: 90835 - DNA, 17 bp, Arabidopsis thaliana
cttgacttagagctttt

SEQ ID NO: 90836 - DNA, 17 bp, Arabidopsis thaliana
cttgacttagtgacttc

SEQ ID NO: 90837 - DNA, 17 bp, Arabidopsis thaliana
cttgacttctacacagg

SEQ ID NO: 90838 - DNA, 17 bp, Arabidopsis thaliana
cttgacttcttggcatc

SEQ ID NO: 90839 - DNA, 17 bp, Arabidopsis thaliana
cttgacttgagccatga

SEQ ID NO: 90840 - DNA, 17 bp, Arabidopsis thaliana
cttgacttgcttcagcc

SEQ ID NO: 90841 - DNA, 17 bp, Arabidopsis thaliana
cttgacttgctttcagc

SEQ ID NO: 90842 - DNA, 17 bp, Arabidopsis thaliana
cttgacttggatctcga

SEQ ID NO: 90843 - DNA, 17 bp, Arabidopsis thaliana
cttgacttgtgtatgag

SEQ ID NO: 90844 - DNA, 17 bp, Arabidopsis thaliana
cttgactttctgggctg

SEQ ID NO: 90845 - DNA, 17 bp, Arabidopsis thaliana
cttgactttgataatct

SEQ ID NO: 90846 - DNA, 17 bp, Arabidopsis thaliana
cttgactttgccaactg

SEQ ID NO: 90847 - DNA, 17 bp, Arabidopsis thaliana
cttgactttgctggagt

SEQ ID NO: 90848 - DNA, 17 bp, Arabidopsis thaliana
cttgactttgtgtcgtg

SEQ ID NO: 90849 - DNA, 17 bp, Arabidopsis thaliana
cttgagaagtagccgct

SEQ ID NO: 90850 - DNA, 17 bp, Arabidopsis thaliana
cttgagacatcgattcg

SEQ ID NO: 90851 - DNA, 17 bp, Arabidopsis thaliana
cttgagacgcctctgtt

SEQ ID NO: 90852 - DNA, 17 bp, Arabidopsis thaliana
cttgagacgggctattc

SEQ ID NO: 90853 - DNA, 17 bp, Arabidopsis thaliana
cttgagagatcccttgt

SEQ ID NO: 90854 - DNA, 17 bp, Arabidopsis thaliana
cttgagagtctctgttg

SEQ ID NO: 90855 - DNA, 17 bp, Arabidopsis thaliana
cttgagatatgcggcaa

SEQ ID NO: 90856 - DNA, 17 bp, Arabidopsis thaliana
cttgagattgtaatccg

SEQ ID NO: 90857 - DNA, 17 bp, Arabidopsis thaliana
cttgagcaactggcagg

SEQ ID NO: 90858 - DNA, 17 bp, Arabidopsis thaliana
cttgagcaacttgtctc

SEQ ID NO: 90859 - DNA, 17 bp, Arabidopsis thaliana
cttgagcagccgcacaa

SEQ ID NO: 90860 - DNA, 17 bp, Arabidopsis thaliana
cttgagcagcttacgtc

SEQ ID NO: 90861 - DNA, 17 bp, Arabidopsis thaliana
cttgagcagtgaccgga

SEQ ID NO: 90862 - DNA, 17 bp, Arabidopsis thaliana
cttgagcagttgatcga

SEQ ID NO: 90863 - DNA, 17 bp, Arabidopsis thaliana
cttgagccgtgccaata

SEQ ID NO: 90864 - DNA, 17 bp, Arabidopsis thaliana
cttgagcctttgaccat

SEQ ID NO: 90865 - DNA, 17 bp, Arabidopsis thaliana
cttgagcgaatggcggt

SEQ ID NO: 90866 - DNA, 17 bp, Arabidopsis thaliana
cttgagcggatcaagcg

SEQ ID NO: 90867 - DNA, 17 bp, Arabidopsis thaliana
cttgagcgtctgacaac

SEQ ID NO: 90868 - DNA, 17 bp, Arabidopsis thaliana
cttgagcgtctggcaac

SEQ ID NO: 90869 - DNA, 17 bp, Arabidopsis thaliana
cttgagcgtgcgaaaac

SEQ ID NO: 90870 - DNA, 17 bp, Arabidopsis thaliana
cttgagctatagcggaa

SEQ ID NO: 90871 - DNA, 17 bp, Arabidopsis thaliana
cttgagctctgatttca

SEQ ID NO: 90872 - DNA, 17 bp, Arabidopsis thaliana
cttgagctgtggcattg

SEQ ID NO: 90873 - DNA, 17 bp, Arabidopsis thaliana
cttgagcttgaaggcca

SEQ ID NO: 90874 - DNA, 17 bp, Arabidopsis thaliana
cttgagcttgactctag

SEQ ID NO: 90875 - DNA, 17 bp, Arabidopsis thaliana
cttgaggaagcaagaca

SEQ ID NO: 90876 - DNA, 17 bp, Arabidopsis thaliana
cttgaggaatctgacga

SEQ ID NO: 90877 - DNA, 17 bp, Arabidopsis thaliana
cttgaggagcacgtttg

SEQ ID NO: 90878 - DNA, 17 bp, Arabidopsis thaliana
cttgaggatttctatca

SEQ ID NO: 90879 - DNA, 17 bp, Arabidopsis thaliana
cttgaggcacggctctg

SEQ ID NO: 90880 - DNA, 17 bp, Arabidopsis thaliana
cttgaggtccctactga

SEQ ID NO: 90881 - DNA, 17 bp, Arabidopsis thaliana
cttgaggttgtggagga

SEQ ID NO: 90882 - DNA, 17 bp, Arabidopsis thaliana
cttgaggttttgtgaac

SEQ ID NO: 90883 - DNA, 17 bp, Arabidopsis thaliana
cttgagtaatctgtgtt

SEQ ID NO: 90884 - DNA, 17 bp, Arabidopsis thaliana
cttgagtaatgccatat

SEQ ID NO: 90885 - DNA, 17 bp, Arabidopsis thaliana
cttgagtatcaacttgg

SEQ ID NO: 90886 - DNA, 17 bp, Arabidopsis thaliana
cttgagtcctctgacaa

SEQ ID NO: 90887 - DNA, 17 bp, Arabidopsis thaliana
cttgagtcgcgtcgggg

SEQ ID NO: 90888 - DNA, 17 bp, Arabidopsis thaliana
cttgagtgacttttggc

SEQ ID NO: 90889 - DNA, 17 bp, Arabidopsis thaliana
cttgagtgatgatgtga

SEQ ID NO: 90890 - DNA, 17 bp, Arabidopsis thaliana
cttgagtgtgacaatgt

SEQ ID NO: 90891 - DNA, 17 bp, Arabidopsis thaliana
cttgagtgtgcgaatcc

SEQ ID NO: 90892 - DNA, 17 bp, Arabidopsis thaliana
cttgagttcgatcctct

SEQ ID NO: 90893 - DNA, 17 bp, Arabidopsis thaliana
cttgagttggagcttct

SEQ ID NO: 90894 - DNA, 17 bp, Arabidopsis thaliana
cttgagtttgatttacg

SEQ ID NO: 90895 - DNA, 17 bp, Arabidopsis thaliana
cttgataccgtagcact

SEQ ID NO: 90896 - DNA, 17 bp, Arabidopsis thaliana
cttgatatacggtggtt

SEQ ID NO: 90897 - DNA, 17 bp, Arabidopsis thaliana
cttgatatccgtcgtga

SEQ ID NO: 90898 - DNA, 17 bp, Arabidopsis thaliana
cttgatatggtttcgct

SEQ ID NO: 90899 - DNA, 17 bp, Arabidopsis thaliana
cttgatcactgtgcaca

SEQ ID NO: 90900 - DNA, 17 bp, Arabidopsis thaliana
cttgatcacttcggcgc

SEQ ID NO: 90901 - DNA, 17 bp, Arabidopsis thaliana
cttgatcagtatcagcc

SEQ ID NO: 90902 - DNA, 17 bp, Arabidopsis thaliana
cttgatccccgtcgaca

SEQ ID NO: 90903 - DNA, 17 bp, Arabidopsis thaliana
cttgatccgcctaatac

SEQ ID NO: 90904 - DNA, 17 bp, Arabidopsis thaliana
cttgatccgcctgatac

SEQ ID NO: 90905 - DNA, 17 bp, Arabidopsis thaliana
cttgatccgcctgatat

SEQ ID NO: 90906 - DNA, 17 bp, Arabidopsis thaliana
cttgatccgctccgtcc

SEQ ID NO: 90907 - DNA, 17 bp, Arabidopsis thaliana
cttgatccttcgatgtc

SEQ ID NO: 90908 - DNA, 17 bp, Arabidopsis thaliana
cttgatcctttccagaa

SEQ ID NO: 90909 - DNA, 17 bp, Arabidopsis thaliana
cttgatcgaaccatttg

SEQ ID NO: 90910 - DNA, 17 bp, Arabidopsis thaliana
cttgatcgctaagtcag

SEQ ID NO: 90911 - DNA, 17 bp, Arabidopsis thaliana
cttgatctatcgttgac

SEQ ID NO: 90912 - DNA, 17 bp, Arabidopsis thaliana
cttgatctatggttgac

SEQ ID NO: 90913 - DNA, 17 bp, Arabidopsis thaliana
cttgatctctgaactta

SEQ ID NO: 90914 - DNA, 17 bp, Arabidopsis thaliana
cttgatctctgaacttc

SEQ ID NO: 90915 - DNA, 17 bp, Arabidopsis thaliana
cttgatctgcttgatcc

SEQ ID NO: 90916 - DNA, 17 bp, Arabidopsis thaliana
cttgatctgtttcacgt

SEQ ID NO: 90917 - DNA, 17 bp, Arabidopsis thaliana
cttgatcttggctgata

SEQ ID NO: 90918 - DNA, 17 bp, Arabidopsis thaliana
cttgatgaaccattcgc

SEQ ID NO: 90919 - DNA, 17 bp, Arabidopsis thaliana
cttgatgaaccgttcgc

SEQ ID NO: 90920 - DNA, 17 bp, Arabidopsis thaliana
cttgatgatgtcttctt

SEQ ID NO: 90921 - DNA, 17 bp, Arabidopsis thaliana
cttgatgattctggacc

SEQ ID NO: 90922 - DNA, 17 bp, Arabidopsis thaliana
cttgatgcaattgtcca

SEQ ID NO: 90923 - DNA, 17 bp, Arabidopsis thaliana
cttgatgcccaaaaatc

SEQ ID NO: 90924 - DNA, 17 bp, Arabidopsis thaliana
cttgatgctctcaatgg

SEQ ID NO: 90925 - DNA, 17 bp, Arabidopsis thaliana
cttgatggacgagacgg

SEQ ID NO: 90926 - DNA, 17 bp, Arabidopsis thaliana
cttgatggcgcttattt

SEQ ID NO: 90927 - DNA, 17 bp, Arabidopsis thaliana
cttgatggtgaaaggtc

SEQ ID NO: 90928 - DNA, 17 bp, Arabidopsis thaliana
cttgatggtgacagact

SEQ ID NO: 90929 - DNA, 17 bp, Arabidopsis thaliana
cttgatggtgataagct

SEQ ID NO: 90930 - DNA, 17 bp, Arabidopsis thaliana
cttgatgtatggttgag

SEQ ID NO: 90931 - DNA, 17 bp, Arabidopsis thaliana
cttgatgtcggctcttc

SEQ ID NO: 90932 - DNA, 17 bp, Arabidopsis thaliana
cttgatgtgctgatccg

SEQ ID NO: 90933 - DNA, 17 bp, Arabidopsis thaliana
cttgatgtgcttgatcc

SEQ ID NO: 90934 - DNA, 17 bp, Arabidopsis thaliana
cttgatgtggttcccgt

SEQ ID NO: 90935 - DNA, 17 bp, Arabidopsis thaliana
cttgattaaggaatctc

SEQ ID NO: 90936 - DNA, 17 bp, Arabidopsis thaliana
cttgattaagggagttt

SEQ ID NO: 90937 - DNA, 17 bp, Arabidopsis thaliana
cttgattatccagtggc

SEQ ID NO: 90938 - DNA, 17 bp, Arabidopsis thaliana
cttgattatctgcaccg

SEQ ID NO: 90939 - DNA, 17 bp, Arabidopsis thaliana
cttgattcacgtcgggt

SEQ ID NO: 90940 - DNA, 17 bp, Arabidopsis thaliana
cttgattcatcacaggc

SEQ ID NO: 90941 - DNA, 17 bp, Arabidopsis thaliana
cttgattccttggctga

SEQ ID NO: 90942 - DNA, 17 bp, Arabidopsis thaliana
cttgattcgcccgagag

SEQ ID NO: 90943 - DNA, 17 bp, Arabidopsis thaliana
cttgattcgtcaccgtg

SEQ ID NO: 90944 - DNA, 17 bp, Arabidopsis thaliana
cttgattctatgggtgg

SEQ ID NO: 90945 - DNA, 17 bp, Arabidopsis thaliana
cttgattgccgaccctc

SEQ ID NO: 90946 - DNA, 17 bp, Arabidopsis thaliana
cttgattggttttccct

SEQ ID NO: 90947 - DNA, 17 bp, Arabidopsis thaliana
cttgattgtcttgtgcc

SEQ ID NO: 90948 - DNA, 17 bp, Arabidopsis thaliana
cttgattgtggcccatg

SEQ ID NO: 90949 - DNA, 17 bp, Arabidopsis thaliana
cttgattgttggcgcca

SEQ ID NO: 90950 - DNA, 17 bp, Arabidopsis thaliana
cttgattgttgtaggat

SEQ ID NO: 90951 - DNA, 17 bp, Arabidopsis thaliana
cttgatttatcaggcgt

SEQ ID NO: 90952 - DNA, 17 bp, Arabidopsis thaliana
cttgatttcgattagct

SEQ ID NO: 90953 - DNA, 17 bp, Arabidopsis thaliana
cttgatttctttgttgt

SEQ ID NO: 90954 - DNA, 17 bp, Arabidopsis thaliana
cttgatttgcctgctcc

SEQ ID NO: 90955 - DNA, 17 bp, Arabidopsis thaliana
cttgatttggtccgccg

SEQ ID NO: 90956 - DNA, 17 bp, Arabidopsis thaliana
cttgatttgtgtcatgg

SEQ ID NO: 90957 - DNA, 17 bp, Arabidopsis thaliana
cttgattttagtttttg

SEQ ID NO: 90958 - DNA, 17 bp, Arabidopsis thaliana
cttgattttgatcttgc

SEQ ID NO: 90959 - DNA, 17 bp, Arabidopsis thaliana
cttgatttttcgacaat

SEQ ID NO: 90960 - DNA, 17 bp, Arabidopsis thaliana
cttgcaaaaggtgcccg

SEQ ID NO: 90961 - DNA, 17 bp, Arabidopsis thaliana
cttgcaaaggactggat

SEQ ID NO: 90962 - DNA, 17 bp, Arabidopsis thaliana
cttgcaaattcagtgtg

SEQ ID NO: 90963 - DNA, 17 bp, Arabidopsis thaliana
cttgcaaccattgagac

SEQ ID NO: 90964 - DNA, 17 bp, Arabidopsis thaliana
cttgcaaccgtcatcat

SEQ ID NO: 90965 - DNA, 17 bp, Arabidopsis thaliana
cttgcaacggagtgcta

SEQ ID NO: 90966 - DNA, 17 bp, Arabidopsis thaliana
cttgcaactaatgtcag

SEQ ID NO: 90967 - DNA, 17 bp, Arabidopsis thaliana
cttgcaagcagtgaggc

SEQ ID NO: 90968 - DNA, 17 bp, Arabidopsis thaliana
cttgcaagctatcatgc

SEQ ID NO: 90969 - DNA, 17 bp, Arabidopsis thaliana
cttgcaagggagtgcta

SEQ ID NO: 90970 - DNA, 17 bp, Arabidopsis thaliana
cttgcaatgtcctaacc

SEQ ID NO: 90971 - DNA, 17 bp, Arabidopsis thaliana
cttgcacatgggttagt

SEQ ID NO: 90972 - DNA, 17 bp, Arabidopsis thaliana
cttgcacgtctgcctgg

SEQ ID NO: 90973 - DNA, 17 bp, Arabidopsis thaliana
cttgcagaacattctca

SEQ ID NO: 90974 - DNA, 17 bp, Arabidopsis thaliana
cttgcagaacggtgttg

SEQ ID NO: 90975 - DNA, 17 bp, Arabidopsis thaliana
cttgcagaatattctca

SEQ ID NO: 90976 - DNA, 17 bp, Arabidopsis thaliana
cttgcagacagtgtgtt

SEQ ID NO: 90977 - DNA, 17 bp, Arabidopsis thaliana
cttgcagacccgagttg

SEQ ID NO: 90978 - DNA, 17 bp, Arabidopsis thaliana
cttgcagaccttgtgtt

SEQ ID NO: 90979 - DNA, 17 bp, Arabidopsis thaliana
cttgcagacgacttaaa

SEQ ID NO: 90980 - DNA, 17 bp, Arabidopsis thaliana
cttgcagatgttgacgg

SEQ ID NO: 90981 - DNA, 17 bp, Arabidopsis thaliana
cttgcagcatctgtttt

SEQ ID NO: 90982 - DNA, 17 bp, Arabidopsis thaliana
cttgcagccccgcaagc

SEQ ID NO: 90983 - DNA, 17 bp, Arabidopsis thaliana
cttgcagccgcggtaat

SEQ ID NO: 90984 - DNA, 17 bp, Arabidopsis thaliana
cttgcagccgtgacatg

SEQ ID NO: 90985 - DNA, 17 bp, Arabidopsis thaliana
cttgcaggcttcagacg

SEQ ID NO: 90986 - DNA, 17 bp, Arabidopsis thaliana
cttgcaggttcaacatg

SEQ ID NO: 90987 - DNA, 17 bp, Arabidopsis thaliana
cttgcagtagtcgtgtg

SEQ ID NO: 90988 - DNA, 17 bp, Arabidopsis thaliana
cttgcagtcgtcccagg

SEQ ID NO: 90989 - DNA, 17 bp, Arabidopsis thaliana
cttgcagtctttggcga

SEQ ID NO: 90990 - DNA, 17 bp, Arabidopsis thaliana
cttgcagtgcggattat

SEQ ID NO: 90991 - DNA, 17 bp, Arabidopsis thaliana
cttgcagttctggcgtt

SEQ ID NO: 90992 - DNA, 17 bp, Arabidopsis thaliana
cttgcatcttccaaccc

SEQ ID NO: 90993 - DNA, 17 bp, Arabidopsis thaliana
cttgcatcttccaactc

SEQ ID NO: 90994 - DNA, 17 bp, Arabidopsis thaliana
cttgcatgaagattatc

SEQ ID NO: 90995 - DNA, 17 bp, Arabidopsis thaliana
cttgcatggtgttagca

SEQ ID NO: 90996 - DNA, 17 bp, Arabidopsis thaliana
cttgccaactgaatgac

SEQ ID NO: 90997 - DNA, 17 bp, Arabidopsis thaliana
cttgccaggattctacg

SEQ ID NO: 90998 - DNA, 17 bp, Arabidopsis thaliana
cttgccaggtcggccag

SEQ ID NO: 90999 - DNA, 17 bp, Arabidopsis thaliana
cttgccatggcttgtcg

SEQ ID NO: 91000 - DNA, 17 bp, Arabidopsis thaliana
cttgcccatatgtgctt

SEQ ID NO: 91001 - DNA, 17 bp, Arabidopsis thaliana
cttgccccgatgttgtg

SEQ ID NO: 91002 - DNA, 17 bp, Arabidopsis thaliana
cttgccccgtaagacca

SEQ ID NO: 91003 - DNA, 17 bp, Arabidopsis thaliana
cttgcccgtggacgatg

SEQ ID NO: 91004 - DNA, 17 bp, Arabidopsis thaliana
cttgcccgtggccgatg

SEQ ID NO: 91005 - DNA, 17 bp, Arabidopsis thaliana
cttgcccgtggtacgcc

SEQ ID NO: 91006 - DNA, 17 bp, Arabidopsis thaliana
cttgccctgactgatgg

SEQ ID NO: 91007 - DNA, 17 bp, Arabidopsis thaliana
cttgccctggtgacacc

SEQ ID NO: 91008 - DNA, 17 bp, Arabidopsis thaliana
cttgccctttgtcgcta

SEQ ID NO: 91009 - DNA, 17 bp, Arabidopsis thaliana
cttgccgaagtcgaact

SEQ ID NO: 91010 - DNA, 17 bp, Arabidopsis thaliana
cttgccgacactttgcc

SEQ ID NO: 91011 - DNA, 17 bp, Arabidopsis thaliana
cttgccgatccatcatt

SEQ ID NO: 91012 - DNA, 17 bp, Arabidopsis thaliana
cttgccgcccgattgcc

SEQ ID NO: 91013 - DNA, 17 bp, Arabidopsis thaliana
cttgccggggtggtcgc

SEQ ID NO: 91014 - DNA, 17 bp, Arabidopsis thaliana
cttgccggtggtgcacc

SEQ ID NO: 91015 - DNA, 17 bp, Arabidopsis thaliana
cttgccgtgatcgatga

SEQ ID NO: 91016 - DNA, 17 bp, Arabidopsis thaliana
cttgccgttggaaattt

SEQ ID NO: 91017 - DNA, 17 bp, Arabidopsis thaliana
cttgccgtttactcgac

SEQ ID NO: 91018 - DNA, 17 bp, Arabidopsis thaliana
cttgcctcgtgtcctcc

SEQ ID NO: 91019 - DNA, 17 bp, Arabidopsis thaliana
cttgcctcttgtgctaa

SEQ ID NO: 91020 - DNA, 17 bp, Arabidopsis thaliana
cttgcctgctattgcca

SEQ ID NO: 91021 - DNA, 17 bp, Arabidopsis thaliana
cttgccttaggcttgta

SEQ ID NO: 91022 - DNA, 17 bp, Arabidopsis thaliana
cttgccttgcgagttta

SEQ ID NO: 91023 - DNA, 17 bp, Arabidopsis thaliana
cttgccttggcttgatc

SEQ ID NO: 91024 - DNA, 17 bp, Arabidopsis thaliana
cttgcctttttcaacgt

SEQ ID NO: 91025 - DNA, 17 bp, Arabidopsis thaliana
cttgcgaaatattatcc

SEQ ID NO: 91026 - DNA, 17 bp, Arabidopsis thaliana
cttgcgaagattctgta

SEQ ID NO: 91027 - DNA, 17 bp, Arabidopsis thaliana
cttgcgaagtggatgta

SEQ ID NO: 91028 - DNA, 17 bp, Arabidopsis thaliana
cttgcgaatcgttcaga

SEQ ID NO: 91029 - DNA, 17 bp, Arabidopsis thaliana
cttgcgacgtcgcgaga

SEQ ID NO: 91030 - DNA, 17 bp, Arabidopsis thaliana
cttgcgactccggcgac

SEQ ID NO: 91031 - DNA, 17 bp, Arabidopsis thaliana
cttgcgagaggcacggg

SEQ ID NO: 91032 - DNA, 17 bp, Arabidopsis thaliana
cttgcgaggtgagcttt

SEQ ID NO: 91033 - DNA, 17 bp, Arabidopsis thaliana
cttgcgatccatcatta

SEQ ID NO: 91034 - DNA, 17 bp, Arabidopsis thaliana
cttgcgatctattgatc

SEQ ID NO: 91035 - DNA, 17 bp, Arabidopsis thaliana
cttgcgattcattctgg

SEQ ID NO: 91036 - DNA, 17 bp, Arabidopsis thaliana
cttgcgattctcagaat

SEQ ID NO: 91037 - DNA, 17 bp, Arabidopsis thaliana
cttgcgattgaacttac

SEQ ID NO: 91038 - DNA, 17 bp, Arabidopsis thaliana
cttgcgattgaacttag

SEQ ID NO: 91039 - DNA, 17 bp, Arabidopsis thaliana
cttgcgattttttcctt

SEQ ID NO: 91040 - DNA, 17 bp, Arabidopsis thaliana
cttgcgcataaggcgtt

SEQ ID NO: 91041 - DNA, 17 bp, Arabidopsis thaliana
cttgcgcctcaagaggt

SEQ ID NO: 91042 - DNA, 17 bp, Arabidopsis thaliana
cttgcgcctctacaagc

SEQ ID NO: 91043 - DNA, 17 bp, Arabidopsis thaliana
cttgcgctaactacaaa

SEQ ID NO: 91044 - DNA, 17 bp, Arabidopsis thaliana
cttgcggaccgtcatgc

SEQ ID NO: 91045 - DNA, 17 bp, Arabidopsis thaliana
cttgcggaggtgcttga

SEQ ID NO: 91046 - DNA, 17 bp, Arabidopsis thaliana
cttgcggctattactta

SEQ ID NO: 91047 - DNA, 17 bp, Arabidopsis thaliana
cttgcgggagaagccaa

SEQ ID NO: 91048 - DNA, 17 bp, Arabidopsis thaliana
cttgcgggcttgagcat

SEQ ID NO: 91049 - DNA, 17 bp, Arabidopsis thaliana
cttgcgggctttggcat

SEQ ID NO: 91050 - DNA, 17 bp, Arabidopsis thaliana
cttgcggtagtacccag

SEQ ID NO: 91051 - DNA, 17 bp, Arabidopsis thaliana
cttgcgtcgttgtgcct

SEQ ID NO: 91052 - DNA, 17 bp, Arabidopsis thaliana
cttgcgtctgaaacagt

SEQ ID NO: 91053 - DNA, 17 bp, Arabidopsis thaliana
cttgcgtctgaaactcg

SEQ ID NO: 91054 - DNA, 17 bp, Arabidopsis thaliana
cttgcgttctgctgcac

SEQ ID NO: 91055 - DNA, 17 bp, Arabidopsis thaliana
cttgcgtttgatctttc

SEQ ID NO: 91056 - DNA, 17 bp, Arabidopsis thaliana
cttgcgtttgctctgga

SEQ ID NO: 91057 - DNA, 17 bp, Arabidopsis thaliana
cttgcgtttgctctggg

SEQ ID NO: 91058 - DNA, 17 bp, Arabidopsis thaliana
cttgctaaagccatctg

SEQ ID NO: 91059 - DNA, 17 bp, Arabidopsis thaliana
cttgctaactagctacg

SEQ ID NO: 91060 - DNA, 17 bp, Arabidopsis thaliana
cttgctaagtaaatggg

SEQ ID NO: 91061 - DNA, 17 bp, Arabidopsis thaliana
cttgctactctgccatg

SEQ ID NO: 91062 - DNA, 17 bp, Arabidopsis thaliana
cttgctacttggtgagg

SEQ ID NO: 91063 - DNA, 17 bp, Arabidopsis thaliana
cttgctaggtgccacct

SEQ ID NO: 91064 - DNA, 17 bp, Arabidopsis thaliana
cttgctagtaggcctgg

SEQ ID NO: 91065 - DNA, 17 bp, Arabidopsis thaliana
cttgctatggctatcca

SEQ ID NO: 91066 - DNA, 17 bp, Arabidopsis thaliana
cttgctatttcctcttg

SEQ ID NO: 91067 - DNA, 17 bp, Arabidopsis thaliana
cttgctcaaactcgttc

SEQ ID NO: 91068 - DNA, 17 bp, Arabidopsis thaliana
cttgctcactaagtcgg

SEQ ID NO: 91069 - DNA, 17 bp, Arabidopsis thaliana
cttgctcatctacaacg

SEQ ID NO: 91070 - DNA, 17 bp, Arabidopsis thaliana
cttgctcatcttcagca

SEQ ID NO: 91071 - DNA, 17 bp, Arabidopsis thaliana
cttgctccaggtcatca

SEQ ID NO: 91072 - DNA, 17 bp, Arabidopsis thaliana
cttgctcctactattat

SEQ ID NO: 91073 - DNA, 17 bp, Arabidopsis thaliana
cttgctcctcatcactg

SEQ ID NO: 91074 - DNA, 17 bp, Arabidopsis thaliana
cttgctcgaagagacga

SEQ ID NO: 91075 - DNA, 17 bp, Arabidopsis thaliana
cttgctcgacggtaatt

SEQ ID NO: 91076 - DNA, 17 bp, Arabidopsis thaliana
cttgctcgcaactttgt

SEQ ID NO: 91077 - DNA, 17 bp, Arabidopsis thaliana
cttgctcgcagtggtac

SEQ ID NO: 91078 - DNA, 17 bp, Arabidopsis thaliana
cttgctcgcggtggtac

SEQ ID NO: 91079 - DNA, 17 bp, Arabidopsis thaliana
cttgctcggaccaggct

SEQ ID NO: 91080 - DNA, 17 bp, Arabidopsis thaliana
cttgctgaccatttggc

SEQ ID NO: 91081 - DNA, 17 bp, Arabidopsis thaliana
cttgctgacttcacgcc

SEQ ID NO: 91082 - DNA, 17 bp, Arabidopsis thaliana
cttgctgagacggtcta

SEQ ID NO: 91083 - DNA, 17 bp, Arabidopsis thaliana
cttgctgagatgaattt

SEQ ID NO: 91084 - DNA, 17 bp, Arabidopsis thaliana
cttgctgagccgcgaac

SEQ ID NO: 91085 - DNA, 17 bp, Arabidopsis thaliana
cttgctgaggcgggcga

SEQ ID NO: 91086 - DNA, 17 bp, Arabidopsis thaliana
cttgctgagttcccagg

SEQ ID NO: 91087 - DNA, 17 bp, Arabidopsis thaliana
cttgctgcattttctac

SEQ ID NO: 91088 - DNA, 17 bp, Arabidopsis thaliana
cttgctgccacgatcca

SEQ ID NO: 91089 - DNA, 17 bp, Arabidopsis thaliana
cttgctgcccttgctag

SEQ ID NO: 91090 - DNA, 17 bp, Arabidopsis thaliana
cttgctgctaatgagat

SEQ ID NO: 91091 - DNA, 17 bp, Arabidopsis thaliana
cttgctgctacagttga

SEQ ID NO: 91092 - DNA, 17 bp, Arabidopsis thaliana
cttgctggaccagtcca

SEQ ID NO: 91093 - DNA, 17 bp, Arabidopsis thaliana
cttgctgtggtgattga

SEQ ID NO: 91094 - DNA, 17 bp, Arabidopsis thaliana
cttgctgttctaggcgg

SEQ ID NO: 91095 - DNA, 17 bp, Arabidopsis thaliana
cttgctgttgagactgc

SEQ ID NO: 91096 - DNA, 17 bp, Arabidopsis thaliana
cttgcttattaggatat

SEQ ID NO: 91097 - DNA, 17 bp, Arabidopsis thaliana
cttgcttccagcttttg

SEQ ID NO: 91098 - DNA, 17 bp, Arabidopsis thaliana
cttgcttcgatgacaag

SEQ ID NO: 91099 - DNA, 17 bp, Arabidopsis thaliana
cttgcttctcaagttac

SEQ ID NO: 91100 - DNA, 17 bp, Arabidopsis thaliana
cttgcttctggtctggt

SEQ ID NO: 91101 - DNA, 17 bp, Arabidopsis thaliana
cttgcttcttaggcgca

SEQ ID NO: 91102 - DNA, 17 bp, Arabidopsis thaliana
cttgcttcttgaggact

SEQ ID NO: 91103 - DNA, 17 bp, Arabidopsis thaliana
cttgcttgcagagagaa

SEQ ID NO: 91104 - DNA, 17 bp, Arabidopsis thaliana
cttgcttggatgtttgt

SEQ ID NO: 91105 - DNA, 17 bp, Arabidopsis thaliana
cttgctttcagccacat

SEQ ID NO: 91106 - DNA, 17 bp, Arabidopsis thaliana
cttgctttccctcgctg

SEQ ID NO: 91107 - DNA, 17 bp, Arabidopsis thaliana
cttgctttccgttgtgg

SEQ ID NO: 91108 - DNA, 17 bp, Arabidopsis thaliana
cttgctttctctcatga

SEQ ID NO: 91109 - DNA, 17 bp, Arabidopsis thaliana
cttgctttgaacgcaag

SEQ ID NO: 91110 - DNA, 17 bp, Arabidopsis thaliana
cttgcttttgctgcttc

SEQ ID NO: 91111 - DNA, 17 bp, Arabidopsis thaliana
cttgcttttgtcgctaa

SEQ ID NO: 91112 - DNA, 17 bp, Arabidopsis thaliana
cttgctttttcctgaat

SEQ ID NO: 91113 - DNA, 17 bp, Arabidopsis thaliana
cttggaaatctcgtcta

SEQ ID NO: 91114 - DNA, 17 bp, Arabidopsis thaliana
cttggaaattatttaca

SEQ ID NO: 91115 - DNA, 17 bp, Arabidopsis thaliana
cttggaaccaattcaac

SEQ ID NO: 91116 - DNA, 17 bp, Arabidopsis thaliana
cttggaacgaaactaag

SEQ ID NO: 91117 - DNA, 17 bp, Arabidopsis thaliana
cttggaactgactactg

SEQ ID NO: 91118 - DNA, 17 bp, Arabidopsis thaliana
cttggaactgactgctc

SEQ ID NO: 91119 - DNA, 17 bp, Arabidopsis thaliana
cttggaactgactgctg

SEQ ID NO: 91120 - DNA, 17 bp, Arabidopsis thaliana
cttggaagcccatacga

SEQ ID NO: 91121 - DNA, 17 bp, Arabidopsis thaliana
cttggaagcctagtgaa

SEQ ID NO: 91122 - DNA, 17 bp, Arabidopsis thaliana
cttggaagctagtgatg

SEQ ID NO: 91123 - DNA, 17 bp, Arabidopsis thaliana
cttggaagttggttcgt

SEQ ID NO: 91124 - DNA, 17 bp, Arabidopsis thaliana
cttggaatagcacatgg

SEQ ID NO: 91125 - DNA, 17 bp, Arabidopsis thaliana
cttggaatcgaatcgtt

SEQ ID NO: 91126 - DNA, 17 bp, Arabidopsis thaliana
cttggaatgtgacacgt

SEQ ID NO: 91127 - DNA, 17 bp, Arabidopsis thaliana
cttggacagggtcttgc

SEQ ID NO: 91128 - DNA, 17 bp, Arabidopsis thaliana
cttggacatattccagg

SEQ ID NO: 91129 - DNA, 17 bp, Arabidopsis thaliana
cttggaccaggcttcat

SEQ ID NO: 91130 - DNA, 17 bp, Arabidopsis thaliana
cttggaccgacgctgat

SEQ ID NO: 91131 - DNA, 17 bp, Arabidopsis thaliana
cttggaccgctataacc

SEQ ID NO: 91132 - DNA, 17 bp, Arabidopsis thaliana
cttggaccgctgtaacc

SEQ ID NO: 91133 - DNA, 17 bp, Arabidopsis thaliana
cttggaccgtcagttgc

SEQ ID NO: 91134 - DNA, 17 bp, Arabidopsis thaliana
cttggacctggcaaact

SEQ ID NO: 91135 - DNA, 17 bp, Arabidopsis thaliana
cttggacctggcaatct

SEQ ID NO: 91136 - DNA, 17 bp, Arabidopsis thaliana
cttggacggaccatttg

SEQ ID NO: 91137 - DNA, 17 bp, Arabidopsis thaliana
cttggactaatatgccg

SEQ ID NO: 91138 - DNA, 17 bp, Arabidopsis thaliana
cttggactgaagggagc

SEQ ID NO: 91139 - DNA, 17 bp, Arabidopsis thaliana
cttggactgaagggccc

SEQ ID NO: 91140 - DNA, 17 bp, Arabidopsis thaliana
cttggactgcaagacag

SEQ ID NO: 91141 - DNA, 17 bp, Arabidopsis thaliana
cttggactgtttcccgt

SEQ ID NO: 91142 - DNA, 17 bp, Arabidopsis thaliana
cttggactgtttttcgt

SEQ ID NO: 91143 - DNA, 17 bp, Arabidopsis thaliana
cttggacttcaactgtg

SEQ ID NO: 91144 - DNA, 17 bp, Arabidopsis thaliana
cttggacttctcgtttt

SEQ ID NO: 91145 - DNA, 17 bp, Arabidopsis thaliana
cttggacttgcgcataa

SEQ ID NO: 91146 - DNA, 17 bp, Arabidopsis thaliana
cttggacttgtgttagt

SEQ ID NO: 91147 - DNA, 17 bp, Arabidopsis thaliana
cttggagaccaaaccct

SEQ ID NO: 91148 - DNA, 17 bp, Arabidopsis thaliana
cttggagaccgtgatcc

SEQ ID NO: 91149 - DNA, 17 bp, Arabidopsis thaliana
cttggagagtcgccaac

SEQ ID NO: 91150 - DNA, 17 bp, Arabidopsis thaliana
cttggagatatcaggac

SEQ ID NO: 91151 - DNA, 17 bp, Arabidopsis thaliana
cttggagatggccttat

SEQ ID NO: 91152 - DNA, 17 bp, Arabidopsis thaliana
cttggagcaactatcag

SEQ ID NO: 91153 - DNA, 17 bp, Arabidopsis thaliana
cttggagccaatcggga

SEQ ID NO: 91154 - DNA, 17 bp, Arabidopsis thaliana
cttggaggataggtccg

SEQ ID NO: 91155 - DNA, 17 bp, Arabidopsis thaliana
cttggaggattacggac

SEQ ID NO: 91156 - DNA, 17 bp, Arabidopsis thaliana
cttggaggtgcacagtg

SEQ ID NO: 91157 - DNA, 17 bp, Arabidopsis thaliana
cttggaggttgttagtg

SEQ ID NO: 91158 - DNA, 17 bp, Arabidopsis thaliana
cttggatatctacggca

SEQ ID NO: 91159 - DNA, 17 bp, Arabidopsis thaliana
cttggatcacggcccac

SEQ ID NO: 91160 - DNA, 17 bp, Arabidopsis thaliana
cttggatcaggcagtgt

SEQ ID NO: 91161 - DNA, 17 bp, Arabidopsis thaliana
cttggatccaccatcgg

SEQ ID NO: 91162 - DNA, 17 bp, Arabidopsis thaliana
cttggatccatctctgc

SEQ ID NO: 91163 - DNA, 17 bp, Arabidopsis thaliana
cttggatctgagagctt

SEQ ID NO: 91164 - DNA, 17 bp, Arabidopsis thaliana
cttggatctgggccgct

SEQ ID NO: 91165 - DNA, 17 bp, Arabidopsis thaliana
cttggatcttagattca

SEQ ID NO: 91166 - DNA, 17 bp, Arabidopsis thaliana
cttggatcttctgcttg

SEQ ID NO: 91167 - DNA, 17 bp, Arabidopsis thaliana
cttggatgccgccagtc

SEQ ID NO: 91168 - DNA, 17 bp, Arabidopsis thaliana
cttggatggatcggcca

SEQ ID NO: 91169 - DNA, 17 bp, Arabidopsis thaliana
cttggatgtcctaaacg

SEQ ID NO: 91170 - DNA, 17 bp, Arabidopsis thaliana
cttggatgtggtagccg

SEQ ID NO: 91171 - DNA, 17 bp, Arabidopsis thaliana
cttggattagggagttt

SEQ ID NO: 91172 - DNA, 17 bp, Arabidopsis thaliana
cttggattccaaggacg

SEQ ID NO: 91173 - DNA, 17 bp, Arabidopsis thaliana
cttggattcctcttgcg

SEQ ID NO: 91174 - DNA, 17 bp, Arabidopsis thaliana
cttggattcctcttggg

SEQ ID NO: 91175 - DNA, 17 bp, Arabidopsis thaliana
cttggatttcaagagaa

SEQ ID NO: 91176 - DNA, 17 bp, Arabidopsis thaliana
cttggcaaacggctata

SEQ ID NO: 91177 - DNA, 17 bp, Arabidopsis thaliana
cttggcaagaatatccg

SEQ ID NO: 91178 - DNA, 17 bp, Arabidopsis thaliana
cttggcaattcacagtc

SEQ ID NO: 91179 - DNA, 17 bp, Arabidopsis thaliana
cttggcagaaactttga

SEQ ID NO: 91180 - DNA, 17 bp, Arabidopsis thaliana
cttggcagacagggcaa

SEQ ID NO: 91181 - DNA, 17 bp, Arabidopsis thaliana
cttggcagaggcagtct

SEQ ID NO: 91182 - DNA, 17 bp, Arabidopsis thaliana
cttggcatatgatacct

SEQ ID NO: 91183 - DNA, 17 bp, Arabidopsis thaliana
cttggcatgtgatacct

SEQ ID NO: 91184 - DNA, 17 bp, Arabidopsis thaliana
cttggcattccagtcac

SEQ ID NO: 91185 - DNA, 17 bp, Arabidopsis thaliana
cttggccatctccatga

SEQ ID NO: 91186 - DNA, 17 bp, Arabidopsis thaliana
cttggccatctgctcga

SEQ ID NO: 91187 - DNA, 17 bp, Arabidopsis thaliana
cttggccctttagccaa

SEQ ID NO: 91188 - DNA, 17 bp, Arabidopsis thaliana
cttggccggaggttgat

SEQ ID NO: 91189 - DNA, 17 bp, Arabidopsis thaliana
cttggccggctttcgaa

SEQ ID NO: 91190 - DNA, 17 bp, Arabidopsis thaliana
cttggccgtacttgctt

SEQ ID NO: 91191 - DNA, 17 bp, Arabidopsis thaliana
cttggcctcgtctgact

SEQ ID NO: 91192 - DNA, 17 bp, Arabidopsis thaliana
cttggcctttcataagt

SEQ ID NO: 91193 - DNA, 17 bp, Arabidopsis thaliana
cttggcgagtaacttgt

SEQ ID NO: 91194 - DNA, 17 bp, Arabidopsis thaliana
cttggcgcgtaccaccc

SEQ ID NO: 91195 - DNA, 17 bp, Arabidopsis thaliana
cttggcgtgcagtgacc

SEQ ID NO: 91196 - DNA, 17 bp, Arabidopsis thaliana
cttggcgtgcggagtag

SEQ ID NO: 91197 - DNA, 17 bp, Arabidopsis thaliana
cttggctagatccatct

SEQ ID NO: 91198 - DNA, 17 bp, Arabidopsis thaliana
cttggctatcttcgcaa

SEQ ID NO: 91199 - DNA, 17 bp, Arabidopsis thaliana
cttggctcaggcggttt

SEQ ID NO: 91200 - DNA, 17 bp, Arabidopsis thaliana
cttggctccaccatgaa

SEQ ID NO: 91201 - DNA, 17 bp, Arabidopsis thaliana
cttggctgaagccttgg

SEQ ID NO: 91202 - DNA, 17 bp, Arabidopsis thaliana
cttggctggtatgaaac

SEQ ID NO: 91203 - DNA, 17 bp, Arabidopsis thaliana
cttggcttgagtaattg

SEQ ID NO: 91204 - DNA, 17 bp, Arabidopsis thaliana
cttggcttgattaattg

SEQ ID NO: 91205 - DNA, 17 bp, Arabidopsis thaliana
cttggcttgccgatcca

SEQ ID NO: 91206 - DNA, 17 bp, Arabidopsis thaliana
cttggctttgatctcat

SEQ ID NO: 91207 - DNA, 17 bp, Arabidopsis thaliana
cttggctttgggctttt

SEQ ID NO: 91208 - DNA, 17 bp, Arabidopsis thaliana
cttgggaacgcggtgtc

SEQ ID NO: 91209 - DNA, 17 bp, Arabidopsis thaliana
cttgggaagcaaaggaa

SEQ ID NO: 91210 - DNA, 17 bp, Arabidopsis thaliana
cttgggaatcttcgaga

SEQ ID NO: 91211 - DNA, 17 bp, Arabidopsis thaliana
cttgggaatcttcgagg

SEQ ID NO: 91212 - DNA, 17 bp, Arabidopsis thaliana
cttgggacatctattgg

SEQ ID NO: 91213 - DNA, 17 bp, Arabidopsis thaliana
cttgggacgctgattgg

SEQ ID NO: 91214 - DNA, 17 bp, Arabidopsis thaliana
cttgggactaaggagca

SEQ ID NO: 91215 - DNA, 17 bp, Arabidopsis thaliana
cttgggacttaccttta

SEQ ID NO: 91216 - DNA, 17 bp, Arabidopsis thaliana
cttgggagatttatcac

SEQ ID NO: 91217 - DNA, 17 bp, Arabidopsis thaliana
cttgggagcaatcacag

SEQ ID NO: 91218 - DNA, 17 bp, Arabidopsis thaliana
cttgggatgatctcatc

SEQ ID NO: 91219 - DNA, 17 bp, Arabidopsis thaliana
cttgggatgggtcggcc

SEQ ID NO: 91220 - DNA, 17 bp, Arabidopsis thaliana
cttgggatgggtcggcg

SEQ ID NO: 91221 - DNA, 17 bp, Arabidopsis thaliana
cttgggatgggtcggtc

SEQ ID NO: 91222 - DNA, 17 bp, Arabidopsis thaliana
cttgggatgggtcggtg

SEQ ID NO: 91223 - DNA, 17 bp, Arabidopsis thaliana
cttgggatgggttggcc

SEQ ID NO: 91224 - DNA, 17 bp, Arabidopsis thaliana
cttgggatggtcggccg

SEQ ID NO: 91225 - DNA, 17 bp, Arabidopsis thaliana
cttgggattggctttgg

SEQ ID NO: 91226 - DNA, 17 bp, Arabidopsis thaliana
cttgggattggtcggcc

SEQ ID NO: 91227 - DNA, 17 bp, Arabidopsis thaliana
cttgggcaacccgagct

SEQ ID NO: 91228 - DNA, 17 bp, Arabidopsis thaliana
cttgggcaactgcgtgg

SEQ ID NO: 91229 - DNA, 17 bp, Arabidopsis thaliana
cttgggccaatctttgt

SEQ ID NO: 91230 - DNA, 17 bp, Arabidopsis thaliana
cttgggccaattggttt

SEQ ID NO: 91231 - DNA, 17 bp, Arabidopsis thaliana
cttgggccaattgttga

SEQ ID NO: 91232 - DNA, 17 bp, Arabidopsis thaliana
cttgggccattaccatc

SEQ ID NO: 91233 - DNA, 17 bp, Arabidopsis thaliana
cttgggccgctgtaacc

SEQ ID NO: 91234 - DNA, 17 bp, Arabidopsis thaliana
cttgggccgctgtaccc

SEQ ID NO: 91235 - DNA, 17 bp, Arabidopsis thaliana
cttgggcgagagtagta

SEQ ID NO: 91236 - DNA, 17 bp, Arabidopsis thaliana
cttgggctatcgacagc

SEQ ID NO: 91237 - DNA, 17 bp, Arabidopsis thaliana
cttgggctggagtagtt

SEQ ID NO: 91238 - DNA, 17 bp, Arabidopsis thaliana
cttgggctttcaacgac

SEQ ID NO: 91239 - DNA, 17 bp, Arabidopsis thaliana
cttgggctttcaagatc

SEQ ID NO: 91240 - DNA, 17 bp, Arabidopsis thaliana
cttggggaaaggattca

SEQ ID NO: 91241 - DNA, 17 bp, Arabidopsis thaliana
cttggggaagaatcgcg

SEQ ID NO: 91242 - DNA, 17 bp, Arabidopsis thaliana
cttggggattataagtt

SEQ ID NO: 91243 - DNA, 17 bp, Arabidopsis thaliana
cttggggtgcgagaggt

SEQ ID NO: 91244 - DNA, 17 bp, Arabidopsis thaliana
cttgggtagcgatcgag

SEQ ID NO: 91245 - DNA, 17 bp, Arabidopsis thaliana
cttgggtatcaataggg

SEQ ID NO: 91246 - DNA, 17 bp, Arabidopsis thaliana
cttgggtccacaaggtt

SEQ ID NO: 91247 - DNA, 17 bp, Arabidopsis thaliana
cttgggtctatctttgt

SEQ ID NO: 91248 - DNA, 17 bp, Arabidopsis thaliana
cttgggtctgtgttgca

SEQ ID NO: 91249 - DNA, 17 bp, Arabidopsis thaliana
cttgggtgaaactaagt

SEQ ID NO: 91250 - DNA, 17 bp, Arabidopsis thaliana
cttgggtgagacctttg

SEQ ID NO: 91251 - DNA, 17 bp, Arabidopsis thaliana
cttgggttgctctggaa

SEQ ID NO: 91252 - DNA, 17 bp, Arabidopsis thaliana
cttggtaagccgttggg

SEQ ID NO: 91253 - DNA, 17 bp, Arabidopsis thaliana
cttggtactcggatctg

SEQ ID NO: 91254 - DNA, 17 bp, Arabidopsis thaliana
cttggtagtcatatgag

SEQ ID NO: 91255 - DNA, 17 bp, Arabidopsis thaliana
cttggtagtcatttgag

SEQ ID NO: 91256 - DNA, 17 bp, Arabidopsis thaliana
cttggtcattttggtag

SEQ ID NO: 91257 - DNA, 17 bp, Arabidopsis thaliana
cttggtccaaaagtgtg

SEQ ID NO: 91258 - DNA, 17 bp, Arabidopsis thaliana
cttggtccaaacccttc

SEQ ID NO: 91259 - DNA, 17 bp, Arabidopsis thaliana
cttggtccacaacggct

SEQ ID NO: 91260 - DNA, 17 bp, Arabidopsis thaliana
cttggtccacaacggtt

SEQ ID NO: 91261 - DNA, 17 bp, Arabidopsis thaliana
cttggtccgcagcgatt

SEQ ID NO: 91262 - DNA, 17 bp, Arabidopsis thaliana
cttggtccgcagcggtt

SEQ ID NO: 91263 - DNA, 17 bp, Arabidopsis thaliana
cttggtcctttctctcc

SEQ ID NO: 91264 - DNA, 17 bp, Arabidopsis thaliana
cttggtcctttctctcg

SEQ ID NO: 91265 - DNA, 17 bp, Arabidopsis thaliana
cttggtcgagtaggctc

SEQ ID NO: 91266 - DNA, 17 bp, Arabidopsis thaliana
cttggtcgagtaggctt

SEQ ID NO: 91267 - DNA, 17 bp, Arabidopsis thaliana
cttggtcgcatctgtag

SEQ ID NO: 91268 - DNA, 17 bp, Arabidopsis thaliana
cttggtcggtgttgcga

SEQ ID NO: 91269 - DNA, 17 bp, Arabidopsis thaliana
cttggtcgtccttgagg

SEQ ID NO: 91270 - DNA, 17 bp, Arabidopsis thaliana
cttggtcgtcttgcaga

SEQ ID NO: 91271 - DNA, 17 bp, Arabidopsis thaliana
cttggtcgttttaggtg

SEQ ID NO: 91272 - DNA, 17 bp, Arabidopsis thaliana
cttggtctctcttgcga

SEQ ID NO: 91273 - DNA, 17 bp, Arabidopsis thaliana
cttggtctgcagcggtt

SEQ ID NO: 91274 - DNA, 17 bp, Arabidopsis thaliana
cttggtcttggctgagc

SEQ ID NO: 91275 - DNA, 17 bp, Arabidopsis thaliana
cttggtgcaaagcaatc

SEQ ID NO: 91276 - DNA, 17 bp, Arabidopsis thaliana
cttggtgcaattttcgg

SEQ ID NO: 91277 - DNA, 17 bp, Arabidopsis thaliana
cttggtgcaggtcggga

SEQ ID NO: 91278 - DNA, 17 bp, Arabidopsis thaliana
cttggtgcattgttacc

SEQ ID NO: 91279 - DNA, 17 bp, Arabidopsis thaliana
cttggtgcggctcatca

SEQ ID NO: 91280 - DNA, 17 bp, Arabidopsis thaliana
cttggtggagcgatttg

SEQ ID NO: 91281 - DNA, 17 bp, Arabidopsis thaliana
cttggtggattccgagg

SEQ ID NO: 91282 - DNA, 17 bp, Arabidopsis thaliana
cttggtggcgaaggcgg

SEQ ID NO: 91283 - DNA, 17 bp, Arabidopsis thaliana
cttggtggtgcatggcc

SEQ ID NO: 91284 - DNA, 17 bp, Arabidopsis thaliana
cttggtggtgctcctga

SEQ ID NO: 91285 - DNA, 17 bp, Arabidopsis thaliana
cttggtggtgttaggct

SEQ ID NO: 91286 - DNA, 17 bp, Arabidopsis thaliana
cttggtgtgtgcgtttg

SEQ ID NO: 91287 - DNA, 17 bp, Arabidopsis thaliana
cttggttaagtgagcgt

SEQ ID NO: 91288 - DNA, 17 bp, Arabidopsis thaliana
cttggttatggatttgt

SEQ ID NO: 91289 - DNA, 17 bp, Arabidopsis thaliana
cttggttcagtgagcgt

SEQ ID NO: 91290 - DNA, 17 bp, Arabidopsis thaliana
cttggttcatccggatt

SEQ ID NO: 91291 - DNA, 17 bp, Arabidopsis thaliana
cttggttcctggcagtg

SEQ ID NO: 91292 - DNA, 17 bp, Arabidopsis thaliana
cttggttcgtgctgagg

SEQ ID NO: 91293 - DNA, 17 bp, Arabidopsis thaliana
cttggttctctattagg

SEQ ID NO: 91294 - DNA, 17 bp, Arabidopsis thaliana
cttggttgacaatttcc

SEQ ID NO: 91295 - DNA, 17 bp, Arabidopsis thaliana
cttggttgcctacttct

SEQ ID NO: 91296 - DNA, 17 bp, Arabidopsis thaliana
cttggttggagctgcgt

SEQ ID NO: 91297 - DNA, 17 bp, Arabidopsis thaliana
cttggttggtgtaatcc

SEQ ID NO: 91298 - DNA, 17 bp, Arabidopsis thaliana
cttggttgtcggcacca

SEQ ID NO: 91299 - DNA, 17 bp, Arabidopsis thaliana
cttggttgtctactcaa

SEQ ID NO: 91300 - DNA, 17 bp, Arabidopsis thaliana
cttggttgtgatctctc

SEQ ID NO: 91301 - DNA, 17 bp, Arabidopsis thaliana
cttggttgttacgtgga

SEQ ID NO: 91302 - DNA, 17 bp, Arabidopsis thaliana
cttggtttatccgttct

SEQ ID NO: 91303 - DNA, 17 bp, Arabidopsis thaliana
cttggtttcagtttcgg

SEQ ID NO: 91304 - DNA, 17 bp, Arabidopsis thaliana
cttggtttctttgtctt

SEQ ID NO: 91305 - DNA, 17 bp, Arabidopsis thaliana
cttggtttttccagacc

SEQ ID NO: 91306 - DNA, 17 bp, Arabidopsis thaliana
cttgtaaaggctgagaa

SEQ ID NO: 91307 - DNA, 17 bp, Arabidopsis thaliana
cttgtaacactgaccaa

SEQ ID NO: 91308 - DNA, 17 bp, Arabidopsis thaliana
cttgtaactattcaacc

SEQ ID NO: 91309 - DNA, 17 bp, Arabidopsis thaliana
cttgtaactattcgacc

SEQ ID NO: 91310 - DNA, 17 bp, Arabidopsis thaliana
cttgtaactgtagcgat

SEQ ID NO: 91311 - DNA, 17 bp, Arabidopsis thaliana
cttgtaagaccccatct

SEQ ID NO: 91312 - DNA, 17 bp, Arabidopsis thaliana
cttgtaaggccttttct

SEQ ID NO: 91313 - DNA, 17 bp, Arabidopsis thaliana
cttgtaatctagtgttg

SEQ ID NO: 91314 - DNA, 17 bp, Arabidopsis thaliana
cttgtaattggttcaga

SEQ ID NO: 91315 - DNA, 17 bp, Arabidopsis thaliana
cttgtaattggttcagg

SEQ ID NO: 91316 - DNA, 17 bp, Arabidopsis thaliana
cttgtacacaccgcccg

SEQ ID NO: 91317 - DNA, 17 bp, Arabidopsis thaliana
cttgtacacatcttgat

SEQ ID NO: 91318 - DNA, 17 bp, Arabidopsis thaliana
cttgtacaggtctcgaa

SEQ ID NO: 91319 - DNA, 17 bp, Arabidopsis thaliana
cttgtaccaggtggcac

SEQ ID NO: 91320 - DNA, 17 bp, Arabidopsis thaliana
cttgtactatggacggg

SEQ ID NO: 91321 - DNA, 17 bp, Arabidopsis thaliana
cttgtactcattctact

SEQ ID NO: 91322 - DNA, 17 bp, Arabidopsis thaliana
cttgtagaggctgagaa

SEQ ID NO: 91323 - DNA, 17 bp, Arabidopsis thaliana
cttgtagttttcgacga

SEQ ID NO: 91324 - DNA, 17 bp, Arabidopsis thaliana
cttgtatccatcatcgg

SEQ ID NO: 91325 - DNA, 17 bp, Arabidopsis thaliana
cttgtatctttaatctt

SEQ ID NO: 91326 - DNA, 17 bp, Arabidopsis thaliana
cttgtattgtcttgact

SEQ ID NO: 91327 - DNA, 17 bp, Arabidopsis thaliana
cttgtatttcaccggaa

SEQ ID NO: 91328 - DNA, 17 bp, Arabidopsis thaliana
cttgtcaagaggacttc

SEQ ID NO: 91329 - DNA, 17 bp, Arabidopsis thaliana
cttgtcaagttttgtcc

SEQ ID NO: 91330 - DNA, 17 bp, Arabidopsis thaliana
cttgtcacaggattacc

SEQ ID NO: 91331 - DNA, 17 bp, Arabidopsis thaliana
cttgtcacaggcccgct

SEQ ID NO: 91332 - DNA, 17 bp, Arabidopsis thaliana
cttgtcacggatgaagc

SEQ ID NO: 91333 - DNA, 17 bp, Arabidopsis thaliana
cttgtcactatgcaatt

SEQ ID NO: 91334 - DNA, 17 bp, Arabidopsis thaliana
cttgtcactgttgtgag

SEQ ID NO: 91335 - DNA, 17 bp, Arabidopsis thaliana
cttgtcagctcgccctt

SEQ ID NO: 91336 - DNA, 17 bp, Arabidopsis thaliana
cttgtcagctttgaacg

SEQ ID NO: 91337 - DNA, 17 bp, Arabidopsis thaliana
cttgtcaggcatgaagc

SEQ ID NO: 91338 - DNA, 17 bp, Arabidopsis thaliana
cttgtcagggatgaggc

SEQ ID NO: 91339 - DNA, 17 bp, Arabidopsis thaliana
cttgtcagggatgaggt

SEQ ID NO: 91340 - DNA, 17 bp, Arabidopsis thaliana
cttgtcattcagcgctt

SEQ ID NO: 91341 - DNA, 17 bp, Arabidopsis thaliana
cttgtcattctgtcttc

SEQ ID NO: 91342 - DNA, 17 bp, Arabidopsis thaliana
cttgtcccatgtccttc

SEQ ID NO: 91343 - DNA, 17 bp, Arabidopsis thaliana
cttgtccctctgaaacg

SEQ ID NO: 91344 - DNA, 17 bp, Arabidopsis thaliana
cttgtcccttcggtcga

SEQ ID NO: 91345 - DNA, 17 bp, Arabidopsis thaliana
cttgtcccttcggtcgg

SEQ ID NO: 91346 - DNA, 17 bp, Arabidopsis thaliana
cttgtcccttcggtggc

SEQ ID NO: 91347 - DNA, 17 bp, Arabidopsis thaliana
cttgtcccttcgttcgg

SEQ ID NO: 91348 - DNA, 17 bp, Arabidopsis thaliana
cttgtccgctgcctcca

SEQ ID NO: 91349 - DNA, 17 bp, Arabidopsis thaliana
cttgtccgctgcctccc

SEQ ID NO: 91350 - DNA, 17 bp, Arabidopsis thaliana
cttgtccgctttaacat

SEQ ID NO: 91351 - DNA, 17 bp, Arabidopsis thaliana
cttgtccgctttgacca

SEQ ID NO: 91352 - DNA, 17 bp, Arabidopsis thaliana
cttgtcctgcttcttgc

SEQ ID NO: 91353 - DNA, 17 bp, Arabidopsis thaliana
cttgtcctgtttcatgc

SEQ ID NO: 91354 - DNA, 17 bp, Arabidopsis thaliana
cttgtccttgttttctg

SEQ ID NO: 91355 - DNA, 17 bp, Arabidopsis thaliana
cttgtcctttgggtttc

SEQ ID NO: 91356 - DNA, 17 bp, Arabidopsis thaliana
cttgtcgacccgacctt

SEQ ID NO: 91357 - DNA, 17 bp, Arabidopsis thaliana
cttgtcgaggacggtag

SEQ ID NO: 91358 - DNA, 17 bp, Arabidopsis thaliana
cttgtcgatggacttgc

SEQ ID NO: 91359 - DNA, 17 bp, Arabidopsis thaliana
cttgtcgatgtctctgt

SEQ ID NO: 91360 - DNA, 17 bp, Arabidopsis thaliana
cttgtcgatttgaggag

SEQ ID NO: 91361 - DNA, 17 bp, Arabidopsis thaliana
cttgtcgcactgtagat

SEQ ID NO: 91362 - DNA, 17 bp, Arabidopsis thaliana
cttgtcgcatcctgtag

SEQ ID NO: 91363 - DNA, 17 bp, Arabidopsis thaliana
cttgtcgcatcctgtcg

SEQ ID NO: 91364 - DNA, 17 bp, Arabidopsis thaliana
cttgtcgcggtgttttt

SEQ ID NO: 91365 - DNA, 17 bp, Arabidopsis thaliana
cttgtcgctctgtaact

SEQ ID NO: 91366 - DNA, 17 bp, Arabidopsis thaliana
cttgtcgctctgtaatt

SEQ ID NO: 91367 - DNA, 17 bp, Arabidopsis thaliana
cttgtcgctgagtgaca

SEQ ID NO: 91368 - DNA, 17 bp, Arabidopsis thaliana
cttgtcgcttctttggc

SEQ ID NO: 91369 - DNA, 17 bp, Arabidopsis thaliana
cttgtcggagctttctc

SEQ ID NO: 91370 - DNA, 17 bp, Arabidopsis thaliana
cttgtcggaggattgtg

SEQ ID NO: 91371 - DNA, 17 bp, Arabidopsis thaliana
cttgtcggctacagaaa

SEQ ID NO: 91372 - DNA, 17 bp, Arabidopsis thaliana
cttgtcggggtgcccta

SEQ ID NO: 91373 - DNA, 17 bp, Arabidopsis thaliana
cttgtcgtactggaacc

SEQ ID NO: 91374 - DNA, 17 bp, Arabidopsis thaliana
cttgtcgtcagtccaag

SEQ ID NO: 91375 - DNA, 17 bp, Arabidopsis thaliana
cttgtcgtcgtgcggat

SEQ ID NO: 91376 - DNA, 17 bp, Arabidopsis thaliana
cttgtcgtctgaatcgc

SEQ ID NO: 91377 - DNA, 17 bp, Arabidopsis thaliana
cttgtcgtgcgcgttgc

SEQ ID NO: 91378 - DNA, 17 bp, Arabidopsis thaliana
cttgtcgtgtcgtgcca

SEQ ID NO: 91379 - DNA, 17 bp, Arabidopsis thaliana
cttgtcgttggattctt

SEQ ID NO: 91380 - DNA, 17 bp, Arabidopsis thaliana
cttgtcgtttgccagtt

SEQ ID NO: 91381 - DNA, 17 bp, Arabidopsis thaliana
cttgtctacaaaaggtg

SEQ ID NO: 91382 - DNA, 17 bp, Arabidopsis thaliana
cttgtctcaaacattca

SEQ ID NO: 91383 - DNA, 17 bp, Arabidopsis thaliana
cttgtctcaaagactaa

SEQ ID NO: 91384 - DNA, 17 bp, Arabidopsis thaliana
cttgtctcaaagattaa

SEQ ID NO: 91385 - DNA, 17 bp, Arabidopsis thaliana
cttgtctcaatgtgcct

SEQ ID NO: 91386 - DNA, 17 bp, Arabidopsis thaliana
cttgtctcagactctgc

SEQ ID NO: 91387 - DNA, 17 bp, Arabidopsis thaliana
cttgtctcagttggtgc

SEQ ID NO: 91388 - DNA, 17 bp, Arabidopsis thaliana
cttgtctccagagtccg

SEQ ID NO: 91389 - DNA, 17 bp, Arabidopsis thaliana
cttgtctgagcggagat

SEQ ID NO: 91390 - DNA, 17 bp, Arabidopsis thaliana
cttgtctgcctgggtgt

SEQ ID NO: 91391 - DNA, 17 bp, Arabidopsis thaliana
cttgtctgtaagtgcca

SEQ ID NO: 91392 - DNA, 17 bp, Arabidopsis thaliana
cttgtcttaggtcagat

SEQ ID NO: 91393 - DNA, 17 bp, Arabidopsis thaliana
cttgtcttcaacgccaa

SEQ ID NO: 91394 - DNA, 17 bp, Arabidopsis thaliana
cttgtcttctgagctca

SEQ ID NO: 91395 - DNA, 17 bp, Arabidopsis thaliana
cttgtgaacagcgaact

SEQ ID NO: 91396 - DNA, 17 bp, Arabidopsis thaliana
cttgtgaacttgaccgg

SEQ ID NO: 91397 - DNA, 17 bp, Arabidopsis thaliana
cttgtgaagatccggtg

SEQ ID NO: 91398 - DNA, 17 bp, Arabidopsis thaliana
cttgtgaatcttcttgg

SEQ ID NO: 91399 - DNA, 17 bp, Arabidopsis thaliana
cttgtgactcgacttgc

SEQ ID NO: 91400 - DNA, 17 bp, Arabidopsis thaliana
cttgtgatcaactaacc

SEQ ID NO: 91401 - DNA, 17 bp, Arabidopsis thaliana
cttgtgatctccatttg

SEQ ID NO: 91402 - DNA, 17 bp, Arabidopsis thaliana
cttgtgattcagatcgt

SEQ ID NO: 91403 - DNA, 17 bp, Arabidopsis thaliana
cttgtgcacggctctgg

SEQ ID NO: 91404 - DNA, 17 bp, Arabidopsis thaliana
cttgtgcagtctggaag

SEQ ID NO: 91405 - DNA, 17 bp, Arabidopsis thaliana
cttgtgcagtgatagat

SEQ ID NO: 91406 - DNA, 17 bp, Arabidopsis thaliana
cttgtgcagttcttcgg

SEQ ID NO: 91407 - DNA, 17 bp, Arabidopsis thaliana
cttgtgcattggtcggc

SEQ ID NO: 91408 - DNA, 17 bp, Arabidopsis thaliana
cttgtgccatcatgtat

SEQ ID NO: 91409 - DNA, 17 bp, Arabidopsis thaliana
cttgtgccgtctgaact

SEQ ID NO: 91410 - DNA, 17 bp, Arabidopsis thaliana
cttgtgccttttttgca

SEQ ID NO: 91411 - DNA, 17 bp, Arabidopsis thaliana
cttgtgcgatctcttac

SEQ ID NO: 91412 - DNA, 17 bp, Arabidopsis thaliana
cttgtgcgatgatgtga

SEQ ID NO: 91413 - DNA, 17 bp, Arabidopsis thaliana
cttgtgcgtgtttgtga

SEQ ID NO: 91414 - DNA, 17 bp, Arabidopsis thaliana
cttgtgctcatggccgg

SEQ ID NO: 91415 - DNA, 17 bp, Arabidopsis thaliana
cttgtgctctgtcgctt

SEQ ID NO: 91416 - DNA, 17 bp, Arabidopsis thaliana
cttgtggactgagttgt

SEQ ID NO: 91417 - DNA, 17 bp, Arabidopsis thaliana
cttgtggagacgtcgct

SEQ ID NO: 91418 - DNA, 17 bp, Arabidopsis thaliana
cttgtggagacgtcggt

SEQ ID NO: 91419 - DNA, 17 bp, Arabidopsis thaliana
cttgtggatcgaccccg

SEQ ID NO: 91420 - DNA, 17 bp, Arabidopsis thaliana
cttgtggatgaagacct

SEQ ID NO: 91421 - DNA, 17 bp, Arabidopsis thaliana
cttgtggatggcgatgg

SEQ ID NO: 91422 - DNA, 17 bp, Arabidopsis thaliana
cttgtggattttgctgt

SEQ ID NO: 91423 - DNA, 17 bp, Arabidopsis thaliana
cttgtggcagccaagcc

SEQ ID NO: 91424 - DNA, 17 bp, Arabidopsis thaliana
cttgtggcagccaagcg

SEQ ID NO: 91425 - DNA, 17 bp, Arabidopsis thaliana
cttgtggcctttttcag

SEQ ID NO: 91426 - DNA, 17 bp, Arabidopsis thaliana
cttgtggctgcccaaac

SEQ ID NO: 91427 - DNA, 17 bp, Arabidopsis thaliana
cttgtgggatacgggct

SEQ ID NO: 91428 - DNA, 17 bp, Arabidopsis thaliana
cttgtggtcatttccgg

SEQ ID NO: 91429 - DNA, 17 bp, Arabidopsis thaliana
cttgtggtcgtgggccc

SEQ ID NO: 91430 - DNA, 17 bp, Arabidopsis thaliana
cttgtggtcgtgggtgc

SEQ ID NO: 91431 - DNA, 17 bp, Arabidopsis thaliana
cttgtggtcgtgggttc

SEQ ID NO: 91432 - DNA, 17 bp, Arabidopsis thaliana
cttgtggtggctaacag

SEQ ID NO: 91433 - DNA, 17 bp, Arabidopsis thaliana
cttgtggttggttgctt

SEQ ID NO: 91434 - DNA, 17 bp, Arabidopsis thaliana
cttgtgtcaactaaccc

SEQ ID NO: 91435 - DNA, 17 bp, Arabidopsis thaliana
cttgtgtcagaacctac

SEQ ID NO: 91436 - DNA, 17 bp, Arabidopsis thaliana
cttgtgtcaggacctac

SEQ ID NO: 91437 - DNA, 17 bp, Arabidopsis thaliana
cttgtgtcaggacttac

SEQ ID NO: 91438 - DNA, 17 bp, Arabidopsis thaliana
cttgtgtccatgggtga

SEQ ID NO: 91439 - DNA, 17 bp, Arabidopsis thaliana
cttgtgtctatgtgcca

SEQ ID NO: 91440 - DNA, 17 bp, Arabidopsis thaliana
cttgtgtctgcaggtgg

SEQ ID NO: 91441 - DNA, 17 bp, Arabidopsis thaliana
cttgtgtgaccattcgc

SEQ ID NO: 91442 - DNA, 17 bp, Arabidopsis thaliana
cttgtgtgatgatgtgt

SEQ ID NO: 91443 - DNA, 17 bp, Arabidopsis thaliana
cttgtgtgtgattagtt

SEQ ID NO: 91444 - DNA, 17 bp, Arabidopsis thaliana
cttgtgtgtttccgtca

SEQ ID NO: 91445 - DNA, 17 bp, Arabidopsis thaliana
cttgtgttctcaggtca

SEQ ID NO: 91446 - DNA, 17 bp, Arabidopsis thaliana
cttgtgttgctcagaca

SEQ ID NO: 91447 - DNA, 17 bp, Arabidopsis thaliana
cttgtgtttctctgcca

SEQ ID NO: 91448 - DNA, 17 bp, Arabidopsis thaliana
cttgtgttttctttcat

SEQ ID NO: 91449 - DNA, 17 bp, Arabidopsis thaliana
cttgtgttttggagacc

SEQ ID NO: 91450 - DNA, 17 bp, Arabidopsis thaliana
cttgttaactccgatgg

SEQ ID NO: 91451 - DNA, 17 bp, Arabidopsis thaliana
cttgttaagttgcaaac

SEQ ID NO: 91452 - DNA, 17 bp, Arabidopsis thaliana
cttgttatcctgtgacc

SEQ ID NO: 91453 - DNA, 17 bp, Arabidopsis thaliana
cttgttcaaccttgagt

SEQ ID NO: 91454 - DNA, 17 bp, Arabidopsis thaliana
cttgttcacagttttcg

SEQ ID NO: 91455 - DNA, 17 bp, Arabidopsis thaliana
cttgttcagactttgag

SEQ ID NO: 91456 - DNA, 17 bp, Arabidopsis thaliana
cttgttcatgtgcattt

SEQ ID NO: 91457 - DNA, 17 bp, Arabidopsis thaliana
cttgttccagcaatcag

SEQ ID NO: 91458 - DNA, 17 bp, Arabidopsis thaliana
cttgttccaggaccaaa

SEQ ID NO: 91459 - DNA, 17 bp, Arabidopsis thaliana
cttgttcccattcggat

SEQ ID NO: 91460 - DNA, 17 bp, Arabidopsis thaliana
cttgttcctattcggat

SEQ ID NO: 91461 - DNA, 17 bp, Arabidopsis thaliana
cttgttcctcaccccag

SEQ ID NO: 91462 - DNA, 17 bp, Arabidopsis thaliana
cttgttcctcaccccat

SEQ ID NO: 91463 - DNA, 17 bp, Arabidopsis thaliana
cttgttcctcttttcat

SEQ ID NO: 91464 - DNA, 17 bp, Arabidopsis thaliana
cttgttcgcggtggtct

SEQ ID NO: 91465 - DNA, 17 bp, Arabidopsis thaliana
cttgttcgggaaggtga

SEQ ID NO: 91466 - DNA, 17 bp, Arabidopsis thaliana
cttgttcgttcttgctg

SEQ ID NO: 91467 - DNA, 17 bp, Arabidopsis thaliana
cttgttcgtttgctcat

SEQ ID NO: 91468 - DNA, 17 bp, Arabidopsis thaliana
cttgttctacatgatcc

SEQ ID NO: 91469 - DNA, 17 bp, Arabidopsis thaliana
cttgttctatttgtggt

SEQ ID NO: 91470 - DNA, 17 bp, Arabidopsis thaliana
cttgttctatttgtgtt

SEQ ID NO: 91471 - DNA, 17 bp, Arabidopsis thaliana
cttgttctcgatgtcgc

SEQ ID NO: 91472 - DNA, 17 bp, Arabidopsis thaliana
cttgttctgcttggact

SEQ ID NO: 91473 - DNA, 17 bp, Arabidopsis thaliana
cttgttcttctactcga

SEQ ID NO: 91474 - DNA, 17 bp, Arabidopsis thaliana
cttgttcttgaaagcaa

SEQ ID NO: 91475 - DNA, 17 bp, Arabidopsis thaliana
cttgttcttgacagccg

SEQ ID NO: 91476 - DNA, 17 bp, Arabidopsis thaliana
cttgttgaactggttgt

SEQ ID NO: 91477 - DNA, 17 bp, Arabidopsis thaliana
cttgttgactacacggc

SEQ ID NO: 91478 - DNA, 17 bp, Arabidopsis thaliana
cttgttgagtaaaccgg

SEQ ID NO: 91479 - DNA, 17 bp, Arabidopsis thaliana
cttgttgagttagggca

SEQ ID NO: 91480 - DNA, 17 bp, Arabidopsis thaliana
cttgttgcaaacgttga

SEQ ID NO: 91481 - DNA, 17 bp, Arabidopsis thaliana
cttgttgcgacggattt

SEQ ID NO: 91482 - DNA, 17 bp, Arabidopsis thaliana
cttgttgctctgaacca

SEQ ID NO: 91483 - DNA, 17 bp, Arabidopsis thaliana
cttgttgggcctttgaa

SEQ ID NO: 91484 - DNA, 17 bp, Arabidopsis thaliana
cttgttgtaggacgttt

SEQ ID NO: 91485 - DNA, 17 bp, Arabidopsis thaliana
cttgttgtatttccgag

SEQ ID NO: 91486 - DNA, 17 bp, Arabidopsis thaliana
cttgttgtctagggata

SEQ ID NO: 91487 - DNA, 17 bp, Arabidopsis thaliana
cttgtttaccagatcag

SEQ ID NO: 91488 - DNA, 17 bp, Arabidopsis thaliana
cttgtttacgcgtattg

SEQ ID NO: 91489 - DNA, 17 bp, Arabidopsis thaliana
cttgtttatctccaacc

SEQ ID NO: 91490 - DNA, 17 bp, Arabidopsis thaliana
cttgtttccaagcctat

SEQ ID NO: 91491 - DNA, 17 bp, Arabidopsis thaliana
cttgtttcgcgatgtaa

SEQ ID NO: 91492 - DNA, 17 bp, Arabidopsis thaliana
cttgtttcgtgcctgga

SEQ ID NO: 91493 - DNA, 17 bp, Arabidopsis thaliana
cttgtttctgaagaagg

SEQ ID NO: 91494 - DNA, 17 bp, Arabidopsis thaliana
cttgtttctggagtgac

SEQ ID NO: 91495 - DNA, 17 bp, Arabidopsis thaliana
cttgtttgacgaagatg

SEQ ID NO: 91496 - DNA, 17 bp, Arabidopsis thaliana
cttgtttgacttggtga

SEQ ID NO: 91497 - DNA, 17 bp, Arabidopsis thaliana
cttgtttgctgagcgtc

SEQ ID NO: 91498 - DNA, 17 bp, Arabidopsis thaliana
cttgtttgtcttgacca

SEQ ID NO: 91499 - DNA, 17 bp, Arabidopsis thaliana
cttgttttccgccgact

SEQ ID NO: 91500 - DNA, 17 bp, Arabidopsis thaliana
cttgttttctacgggca

SEQ ID NO: 91501 - DNA, 17 bp, Arabidopsis thaliana
cttgttttggccgacct

SEQ ID NO: 91502 - DNA, 17 bp, Arabidopsis thaliana
cttgttttgtctccttc

SEQ ID NO: 91503 - DNA, 17 bp, Arabidopsis thaliana
cttgtttttgacatcac

SEQ ID NO: 91504 - DNA, 17 bp, Arabidopsis thaliana
ctttaaactaagtccgc

SEQ ID NO: 91505 - DNA, 17 bp, Arabidopsis thaliana
ctttaaactctgggatc

SEQ ID NO: 91506 - DNA, 17 bp, Arabidopsis thaliana
ctttaaacttcgcctag

SEQ ID NO: 91507 - DNA, 17 bp, Arabidopsis thaliana
ctttaaccagcggttta

SEQ ID NO: 91508 - DNA, 17 bp, Arabidopsis thaliana
ctttaacgaacgagacc

SEQ ID NO: 91509 - DNA, 17 bp, Arabidopsis thaliana
ctttaactgcgccgtat

SEQ ID NO: 91510 - DNA, 17 bp, Arabidopsis thaliana
ctttaagattcggttgc

SEQ ID NO: 91511 - DNA, 17 bp, Arabidopsis thaliana
ctttaagattcgtttgc

SEQ ID NO: 91512 - DNA, 17 bp, Arabidopsis thaliana
ctttaagccgtccttgc

SEQ ID NO: 91513 - DNA, 17 bp, Arabidopsis thaliana
ctttaagtactttttcg

SEQ ID NO: 91514 - DNA, 17 bp, Arabidopsis thaliana
ctttaatctgatgtgga

SEQ ID NO: 91515 - DNA, 17 bp, Arabidopsis thaliana
ctttaatcttctttgtg

SEQ ID NO: 91516 - DNA, 17 bp, Arabidopsis thaliana
ctttacactattccggt

SEQ ID NO: 91517 - DNA, 17 bp, Arabidopsis thaliana
ctttacacttatcgcca

SEQ ID NO: 91518 - DNA, 17 bp, Arabidopsis thaliana
ctttacagccctatgct

SEQ ID NO: 91519 - DNA, 17 bp, Arabidopsis thaliana
ctttacagtccgagaag

SEQ ID NO: 91520 - DNA, 17 bp, Arabidopsis thaliana
ctttacagttaagcgtg

SEQ ID NO: 91521 - DNA, 17 bp, Arabidopsis thaliana
ctttacagttacagccc

SEQ ID NO: 91522 - DNA, 17 bp, Arabidopsis thaliana
ctttacagttgccagac

SEQ ID NO: 91523 - DNA, 17 bp, Arabidopsis thaliana
ctttacataatccgatt

SEQ ID NO: 91524 - DNA, 17 bp, Arabidopsis thaliana
ctttacatcagcaaggt

SEQ ID NO: 91525 - DNA, 17 bp, Arabidopsis thaliana
ctttacatgccgaggtg

SEQ ID NO: 91526 - DNA, 17 bp, Arabidopsis thaliana
ctttacatttcttctta

SEQ ID NO: 91527 - DNA, 17 bp, Arabidopsis thaliana
ctttacatttgcagttc

SEQ ID NO: 91528 - DNA, 17 bp, Arabidopsis thaliana
ctttacatttgtattcg

SEQ ID NO: 91529 - DNA, 17 bp, Arabidopsis thaliana
ctttaccaatgtcacag

SEQ ID NO: 91530 - DNA, 17 bp, Arabidopsis thaliana
ctttacccacacgttag

SEQ ID NO: 91531 - DNA, 17 bp, Arabidopsis thaliana
ctttacccgcggtacac

SEQ ID NO: 91532 - DNA, 17 bp, Arabidopsis thaliana
ctttacccgtcctgtga

SEQ ID NO: 91533 - DNA, 17 bp, Arabidopsis thaliana
ctttaccgacttagcta

SEQ ID NO: 91534 - DNA, 17 bp, Arabidopsis thaliana
ctttaccgacttagctc

SEQ ID NO: 91535 - DNA, 17 bp, Arabidopsis thaliana
ctttaccgtctaagcgt

SEQ ID NO: 91536 - DNA, 17 bp, Arabidopsis thaliana
ctttacctatttggctt

SEQ ID NO: 91537 - DNA, 17 bp, Arabidopsis thaliana
ctttacgaagacaacga

SEQ ID NO: 91538 - DNA, 17 bp, Arabidopsis thaliana
ctttacggcggttgatc

SEQ ID NO: 91539 - DNA, 17 bp, Arabidopsis thaliana
ctttacgggacgggttg

SEQ ID NO: 91540 - DNA, 17 bp, Arabidopsis thaliana
ctttactgggccgcaac

SEQ ID NO: 91541 - DNA, 17 bp, Arabidopsis thaliana
ctttactgtcctacggt

SEQ ID NO: 91542 - DNA, 17 bp, Arabidopsis thaliana
ctttacttcaactttgg

SEQ ID NO: 91543 - DNA, 17 bp, Arabidopsis thaliana
ctttacttcttggcgat

SEQ ID NO: 91544 - DNA, 17 bp, Arabidopsis thaliana
ctttacttggcataatg

SEQ ID NO: 91545 - DNA, 17 bp, Arabidopsis thaliana
ctttactttttcgggca

SEQ ID NO: 91546 - DNA, 17 bp, Arabidopsis thaliana
ctttagaccaggctcgt

SEQ ID NO: 91547 - DNA, 17 bp, Arabidopsis thaliana
ctttagaccatccacac

SEQ ID NO: 91548 - DNA, 17 bp, Arabidopsis thaliana
ctttagaccatccacat

SEQ ID NO: 91549 - DNA, 17 bp, Arabidopsis thaliana
ctttagaccttcggaat

SEQ ID NO: 91550 - DNA, 17 bp, Arabidopsis thaliana
ctttagatccaataagc

SEQ ID NO: 91551 - DNA, 17 bp, Arabidopsis thaliana
ctttagcatttgccatg

SEQ ID NO: 91552 - DNA, 17 bp, Arabidopsis thaliana
ctttagccatggactta

SEQ ID NO: 91553 - DNA, 17 bp, Arabidopsis thaliana
ctttagccatggacttc

SEQ ID NO: 91554 - DNA, 17 bp, Arabidopsis thaliana
ctttagcccgcgttacc

SEQ ID NO: 91555 - DNA, 17 bp, Arabidopsis thaliana
ctttagccctttgtcgc

SEQ ID NO: 91556 - DNA, 17 bp, Arabidopsis thaliana
ctttagctcgggatgat

SEQ ID NO: 91557 - DNA, 17 bp, Arabidopsis thaliana
ctttagcttcgcgagtc

SEQ ID NO: 91558 - DNA, 17 bp, Arabidopsis thaliana
ctttagcttgaagcctc

SEQ ID NO: 91559 - DNA, 17 bp, Arabidopsis thaliana
ctttaggacctagttca

SEQ ID NO: 91560 - DNA, 17 bp, Arabidopsis thaliana
ctttaggctggccttct

SEQ ID NO: 91561 - DNA, 17 bp, Arabidopsis thaliana
ctttaggtttcatcaaa

SEQ ID NO: 91562 - DNA, 17 bp, Arabidopsis thaliana
ctttagtcacaagggat

SEQ ID NO: 91563 - DNA, 17 bp, Arabidopsis thaliana
ctttagtcgcatcctgt

SEQ ID NO: 91564 - DNA, 17 bp, Arabidopsis thaliana
ctttagtcgcctgtaga

SEQ ID NO: 91565 - DNA, 17 bp, Arabidopsis thaliana
ctttagttctcagagcc

SEQ ID NO: 91566 - DNA, 17 bp, Arabidopsis thaliana
ctttagtttggtgctac

SEQ ID NO: 91567 - DNA, 17 bp, Arabidopsis thaliana
ctttataaaacgaaaag

SEQ ID NO: 91568 - DNA, 17 bp, Arabidopsis thaliana
ctttatatagtttcgcg

SEQ ID NO: 91569 - DNA, 17 bp, Arabidopsis thaliana
ctttatcatgatccgga

SEQ ID NO: 91570 - DNA, 17 bp, Arabidopsis thaliana
ctttatccatactaggg

SEQ ID NO: 91571 - DNA, 17 bp, Arabidopsis thaliana
ctttatcgtcctcgatt

SEQ ID NO: 91572 - DNA, 17 bp, Arabidopsis thaliana
ctttatctgtttttcca

SEQ ID NO: 91573 - DNA, 17 bp, Arabidopsis thaliana
ctttatcttgtcgctgc

SEQ ID NO: 91574 - DNA, 17 bp, Arabidopsis thaliana
ctttatgatccggttgc

SEQ ID NO: 91575 - DNA, 17 bp, Arabidopsis thaliana
ctttatgggttactggg

SEQ ID NO: 91576 - DNA, 17 bp, Arabidopsis thaliana
ctttattaccttcggtc

SEQ ID NO: 91577 - DNA, 17 bp, Arabidopsis thaliana
ctttattcgcagttgaa

SEQ ID NO: 91578 - DNA, 17 bp, Arabidopsis thaliana
ctttatttccacctatc

SEQ ID NO: 91579 - DNA, 17 bp, Arabidopsis thaliana
ctttatttcggcccgaa

SEQ ID NO: 91580 - DNA, 17 bp, Arabidopsis thaliana
ctttatttctgctgtgt

SEQ ID NO: 91581 - DNA, 17 bp, Arabidopsis thaliana
ctttcaaaactcaggtg

SEQ ID NO: 91582 - DNA, 17 bp, Arabidopsis thaliana
ctttcaaagcatgttac

SEQ ID NO: 91583 - DNA, 17 bp, Arabidopsis thaliana
ctttcaaagctgtcctg

SEQ ID NO: 91584 - DNA, 17 bp, Arabidopsis thaliana
ctttcaaatctggttgt

SEQ ID NO: 91585 - DNA, 17 bp, Arabidopsis thaliana
ctttcaaatttgggacg

SEQ ID NO: 91586 - DNA, 17 bp, Arabidopsis thaliana
ctttcaacaacgtcggc

SEQ ID NO: 91587 - DNA, 17 bp, Arabidopsis thaliana
ctttcaactgcagtgtt

SEQ ID NO: 91588 - DNA, 17 bp, Arabidopsis thaliana
ctttcaactgcagttgc

SEQ ID NO: 91589 - DNA, 17 bp, Arabidopsis thaliana
ctttcaagatctggttg

SEQ ID NO: 91590 - DNA, 17 bp, Arabidopsis thaliana
ctttcaaggatcggtgg

SEQ ID NO: 91591 - DNA, 17 bp, Arabidopsis thaliana
ctttcaagtcactcgaa

SEQ ID NO: 91592 - DNA, 17 bp, Arabidopsis thaliana
ctttcaatcttggggtt

SEQ ID NO: 91593 - DNA, 17 bp, Arabidopsis thaliana
ctttcaatgtgtttcgc

SEQ ID NO: 91594 - DNA, 17 bp, Arabidopsis thaliana
ctttcaccgtgggagga

SEQ ID NO: 91595 - DNA, 17 bp, Arabidopsis thaliana
ctttcacctgagagatt

SEQ ID NO: 91596 - DNA, 17 bp, Arabidopsis thaliana
ctttcacgcttcttgca

SEQ ID NO: 91597 - DNA, 17 bp, Arabidopsis thaliana
ctttcacggtttcgttc

SEQ ID NO: 91598 - DNA, 17 bp, Arabidopsis thaliana
ctttcactacgttgtgt

SEQ ID NO: 91599 - DNA, 17 bp, Arabidopsis thaliana
ctttcactcgattgcga

SEQ ID NO: 91600 - DNA, 17 bp, Arabidopsis thaliana
ctttcacttgaaatgac

SEQ ID NO: 91601 - DNA, 17 bp, Arabidopsis thaliana
ctttcactttttcagtt

SEQ ID NO: 91602 - DNA, 17 bp, Arabidopsis thaliana
ctttcagagactctctt

SEQ ID NO: 91603 - DNA, 17 bp, Arabidopsis thaliana
ctttcagagagagcaaa

SEQ ID NO: 91604 - DNA, 17 bp, Arabidopsis thaliana
ctttcagatccggttgc

SEQ ID NO: 91605 - DNA, 17 bp, Arabidopsis thaliana
ctttcagattgagaagt

SEQ ID NO: 91606 - DNA, 17 bp, Arabidopsis thaliana
ctttcagcatgccaaag

SEQ ID NO: 91607 - DNA, 17 bp, Arabidopsis thaliana
ctttcagccacatttct

SEQ ID NO: 91608 - DNA, 17 bp, Arabidopsis thaliana
ctttcagcggtggtggc

SEQ ID NO: 91609 - DNA, 17 bp, Arabidopsis thaliana
ctttcagctctatttgc

SEQ ID NO: 91610 - DNA, 17 bp, Arabidopsis thaliana
ctttcagcttctaaatt

SEQ ID NO: 91611 - DNA, 17 bp, Arabidopsis thaliana
ctttcaggtctgtgtgc

SEQ ID NO: 91612 - DNA, 17 bp, Arabidopsis thaliana
ctttcagtctaactgga

SEQ ID NO: 91613 - DNA, 17 bp, Arabidopsis thaliana
ctttcagtttgcagaga

SEQ ID NO: 91614 - DNA, 17 bp, Arabidopsis thaliana
ctttcatcatccttagg

SEQ ID NO: 91615 - DNA, 17 bp, Arabidopsis thaliana
ctttcatcgaactgtta

SEQ ID NO: 91616 - DNA, 17 bp, Arabidopsis thaliana
ctttcatctacaatcgg

SEQ ID NO: 91617 - DNA, 17 bp, Arabidopsis thaliana
ctttcatctctgccgca

SEQ ID NO: 91618 - DNA, 17 bp, Arabidopsis thaliana
ctttcatctgcatttta

SEQ ID NO: 91619 - DNA, 17 bp, Arabidopsis thaliana
ctttcatgattcgtcag

SEQ ID NO: 91620 - DNA, 17 bp, Arabidopsis thaliana
ctttcatgcttctgttt

SEQ ID NO: 91621 - DNA, 17 bp, Arabidopsis thaliana
ctttcatggtgtagcca

SEQ ID NO: 91622 - DNA, 17 bp, Arabidopsis thaliana
ctttcatggtgtgccca

SEQ ID NO: 91623 - DNA, 17 bp, Arabidopsis thaliana
ctttcatgtgaccgcgt

SEQ ID NO: 91624 - DNA, 17 bp, Arabidopsis thaliana
ctttcattattccaaga

SEQ ID NO: 91625 - DNA, 17 bp, Arabidopsis thaliana
ctttcattggttggtga

SEQ ID NO: 91626 - DNA, 17 bp, Arabidopsis thaliana
ctttcatttccttgtgt

SEQ ID NO: 91627 - DNA, 17 bp, Arabidopsis thaliana
ctttcatttggaaagtg

SEQ ID NO: 91628 - DNA, 17 bp, Arabidopsis thaliana
ctttcattttcacgcag

SEQ ID NO: 91629 - DNA, 17 bp, Arabidopsis thaliana
ctttccaaaattggctc

SEQ ID NO: 91630 - DNA, 17 bp, Arabidopsis thaliana
ctttccaacaggtgtcg

SEQ ID NO: 91631 - DNA, 17 bp, Arabidopsis thaliana
ctttccaactaatgcca

SEQ ID NO: 91632 - DNA, 17 bp, Arabidopsis thaliana
ctttccacgctgcaggt

SEQ ID NO: 91633 - DNA, 17 bp, Arabidopsis thaliana
ctttccactaagcagat

SEQ ID NO: 91634 - DNA, 17 bp, Arabidopsis thaliana
ctttccactgagtaaca

SEQ ID NO: 91635 - DNA, 17 bp, Arabidopsis thaliana
ctttccagagggttttc

SEQ ID NO: 91636 - DNA, 17 bp, Arabidopsis thaliana
ctttccagattgcagcg

SEQ ID NO: 91637 - DNA, 17 bp, Arabidopsis thaliana
ctttccagggctctttc

SEQ ID NO: 91638 - DNA, 17 bp, Arabidopsis thaliana
ctttccagtatgcgagt

SEQ ID NO: 91639 - DNA, 17 bp, Arabidopsis thaliana
ctttccatctattgcca

SEQ ID NO: 91640 - DNA, 17 bp, Arabidopsis thaliana
ctttccattgacttttt

SEQ ID NO: 91641 - DNA, 17 bp, Arabidopsis thaliana
ctttcccatcgtagttt

SEQ ID NO: 91642 - DNA, 17 bp, Arabidopsis thaliana
ctttccccaaggcgtgg

SEQ ID NO: 91643 - DNA, 17 bp, Arabidopsis thaliana
ctttccccattcgtact

SEQ ID NO: 91644 - DNA, 17 bp, Arabidopsis thaliana
ctttccccgctgattct

SEQ ID NO: 91645 - DNA, 17 bp, Arabidopsis thaliana
ctttccccgggcgtcga

SEQ ID NO: 91646 - DNA, 17 bp, Arabidopsis thaliana
ctttcccggctggtgca

SEQ ID NO: 91647 - DNA, 17 bp, Arabidopsis thaliana
ctttccctaagtgatga

SEQ ID NO: 91648 - DNA, 17 bp, Arabidopsis thaliana
ctttccctggaccatgc

SEQ ID NO: 91649 - DNA, 17 bp, Arabidopsis thaliana
ctttcccttagttgctg

SEQ ID NO: 91650 - DNA, 17 bp, Arabidopsis thaliana
ctttccgaagtttccct

SEQ ID NO: 91651 - DNA, 17 bp, Arabidopsis thaliana
ctttccgacctttatta

SEQ ID NO: 91652 - DNA, 17 bp, Arabidopsis thaliana
ctttccgactaatgcca

SEQ ID NO: 91653 - DNA, 17 bp, Arabidopsis thaliana
ctttccgcattcagaac

SEQ ID NO: 91654 - DNA, 17 bp, Arabidopsis thaliana
ctttccgctgctccggt

SEQ ID NO: 91655 - DNA, 17 bp, Arabidopsis thaliana
ctttccggacaactgct

SEQ ID NO: 91656 - DNA, 17 bp, Arabidopsis thaliana
ctttccgggtgcgatgt

SEQ ID NO: 91657 - DNA, 17 bp, Arabidopsis thaliana
ctttccggtaagagaag

SEQ ID NO: 91658 - DNA, 17 bp, Arabidopsis thaliana
ctttccgttcccaaacc

SEQ ID NO: 91659 - DNA, 17 bp, Arabidopsis thaliana
ctttccgttggcgtatg

SEQ ID NO: 91660 - DNA, 17 bp, Arabidopsis thaliana
ctttcctagccgaccac

SEQ ID NO: 91661 - DNA, 17 bp, Arabidopsis thaliana
ctttcctcagttgtgac

SEQ ID NO: 91662 - DNA, 17 bp, Arabidopsis thaliana
ctttcctcatctctaag

SEQ ID NO: 91663 - DNA, 17 bp, Arabidopsis thaliana
ctttcctccgaaagact

SEQ ID NO: 91664 - DNA, 17 bp, Arabidopsis thaliana
ctttcctcctgtcaggg

SEQ ID NO: 91665 - DNA, 17 bp, Arabidopsis thaliana
ctttcctcctgtcagtg

SEQ ID NO: 91666 - DNA, 17 bp, Arabidopsis thaliana
ctttcctcgaaataggc

SEQ ID NO: 91667 - DNA, 17 bp, Arabidopsis thaliana
ctttcctcgtctttcgc

SEQ ID NO: 91668 - DNA, 17 bp, Arabidopsis thaliana
ctttcctctatcggatc

SEQ ID NO: 91669 - DNA, 17 bp, Arabidopsis thaliana
ctttccttagccgtgga

SEQ ID NO: 91670 - DNA, 17 bp, Arabidopsis thaliana
ctttccttgcttggttc

SEQ ID NO: 91671 - DNA, 17 bp, Arabidopsis thaliana
ctttccttggtttccag

SEQ ID NO: 91672 - DNA, 17 bp, Arabidopsis thaliana
ctttcctttaggctttg

SEQ ID NO: 91673 - DNA, 17 bp, Arabidopsis thaliana
ctttcgaatcgtggaga

SEQ ID NO: 91674 - DNA, 17 bp, Arabidopsis thaliana
ctttcgacatgtggcat

SEQ ID NO: 91675 - DNA, 17 bp, Arabidopsis thaliana
ctttcgatcaatttcta

SEQ ID NO: 91676 - DNA, 17 bp, Arabidopsis thaliana
ctttcgatccccaatgg

SEQ ID NO: 91677 - DNA, 17 bp, Arabidopsis thaliana
ctttcgatggtaggata

SEQ ID NO: 91678 - DNA, 17 bp, Arabidopsis thaliana
ctttcgatgtctaccag

SEQ ID NO: 91679 - DNA, 17 bp, Arabidopsis thaliana
ctttcgcaacttggaga

SEQ ID NO: 91680 - DNA, 17 bp, Arabidopsis thaliana
ctttcgcagttgttcgt

SEQ ID NO: 91681 - DNA, 17 bp, Arabidopsis thaliana
ctttcgcatcctgtaga

SEQ ID NO: 91682 - DNA, 17 bp, Arabidopsis thaliana
ctttcgccaaagctctt

SEQ ID NO: 91683 - DNA, 17 bp, Arabidopsis thaliana
ctttcgccatctattta

SEQ ID NO: 91684 - DNA, 17 bp, Arabidopsis thaliana
ctttcgccatctatttt

SEQ ID NO: 91685 - DNA, 17 bp, Arabidopsis thaliana
ctttcgcccgacttatc

SEQ ID NO: 91686 - DNA, 17 bp, Arabidopsis thaliana
ctttcgctactaagtca

SEQ ID NO: 91687 - DNA, 17 bp, Arabidopsis thaliana
ctttcgctgaagccgag

SEQ ID NO: 91688 - DNA, 17 bp, Arabidopsis thaliana
ctttcgcttccgttgac

SEQ ID NO: 91689 - DNA, 17 bp, Arabidopsis thaliana
ctttcggcaggtcggac

SEQ ID NO: 91690 - DNA, 17 bp, Arabidopsis thaliana
ctttcgggagccacctc

SEQ ID NO: 91691 - DNA, 17 bp, Arabidopsis thaliana
ctttcggggtgattcta

SEQ ID NO: 91692 - DNA, 17 bp, Arabidopsis thaliana
ctttcggtggtgttgat

SEQ ID NO: 91693 - DNA, 17 bp, Arabidopsis thaliana
ctttcggttctctggat

SEQ ID NO: 91694 - DNA, 17 bp, Arabidopsis thaliana
ctttcggttgccgatca

SEQ ID NO: 91695 - DNA, 17 bp, Arabidopsis thaliana
ctttcggttttctggat

SEQ ID NO: 91696 - DNA, 17 bp, Arabidopsis thaliana
ctttcgtcccaatcgcc

SEQ ID NO: 91697 - DNA, 17 bp, Arabidopsis thaliana
ctttcgtccgccacaat

SEQ ID NO: 91698 - DNA, 17 bp, Arabidopsis thaliana
ctttcgtctactgaatt

SEQ ID NO: 91699 - DNA, 17 bp, Arabidopsis thaliana
ctttcgtgctttctgta

SEQ ID NO: 91700 - DNA, 17 bp, Arabidopsis thaliana
ctttcgttctgactcgt

SEQ ID NO: 91701 - DNA, 17 bp, Arabidopsis thaliana
ctttcgttgttgcgctt

SEQ ID NO: 91702 - DNA, 17 bp, Arabidopsis thaliana
ctttcgttttatgacga

SEQ ID NO: 91703 - DNA, 17 bp, Arabidopsis thaliana
ctttctaaggcccagac

SEQ ID NO: 91704 - DNA, 17 bp, Arabidopsis thaliana
ctttctaagggtgtgtg

SEQ ID NO: 91705 - DNA, 17 bp, Arabidopsis thaliana
ctttctaccgatcagat

SEQ ID NO: 91706 - DNA, 17 bp, Arabidopsis thaliana
ctttctacgctgctgca

SEQ ID NO: 91707 - DNA, 17 bp, Arabidopsis thaliana
ctttctacggttggatc

SEQ ID NO: 91708 - DNA, 17 bp, Arabidopsis thaliana
ctttctactcctgacat

SEQ ID NO: 91709 - DNA, 17 bp, Arabidopsis thaliana
ctttctacttgcagcta

SEQ ID NO: 91710 - DNA, 17 bp, Arabidopsis thaliana
ctttctacttggactgg

SEQ ID NO: 91711 - DNA, 17 bp, Arabidopsis thaliana
ctttctactttgatggt

SEQ ID NO: 91712 - DNA, 17 bp, Arabidopsis thaliana
ctttctatccacctctg

SEQ ID NO: 91713 - DNA, 17 bp, Arabidopsis thaliana
ctttctatcgcaaagga

SEQ ID NO: 91714 - DNA, 17 bp, Arabidopsis thaliana
ctttctatggtgcagtc

SEQ ID NO: 91715 - DNA, 17 bp, Arabidopsis thaliana
ctttctatgtacccgtc

SEQ ID NO: 91716 - DNA, 17 bp, Arabidopsis thaliana
ctttctatttcgtgccg

SEQ ID NO: 91717 - DNA, 17 bp, Arabidopsis thaliana
ctttctcaacacaggaa

SEQ ID NO: 91718 - DNA, 17 bp, Arabidopsis thaliana
ctttctcaacatctctc

SEQ ID NO: 91719 - DNA, 17 bp, Arabidopsis thaliana
ctttctcaacatctctg

SEQ ID NO: 91720 - DNA, 17 bp, Arabidopsis thaliana
ctttctcacggatatga

SEQ ID NO: 91721 - DNA, 17 bp, Arabidopsis thaliana
ctttctcaggcgttgtc

SEQ ID NO: 91722 - DNA, 17 bp, Arabidopsis thaliana
ctttctcatctacggcc

SEQ ID NO: 91723 - DNA, 17 bp, Arabidopsis thaliana
ctttctcatctgttgac

SEQ ID NO: 91724 - DNA, 17 bp, Arabidopsis thaliana
ctttctccaatctgcta

SEQ ID NO: 91725 - DNA, 17 bp, Arabidopsis thaliana
ctttctccagctacaat

SEQ ID NO: 91726 - DNA, 17 bp, Arabidopsis thaliana
ctttctccatcttgtcg

SEQ ID NO: 91727 - DNA, 17 bp, Arabidopsis thaliana
ctttctccatcttgttg

SEQ ID NO: 91728 - DNA, 17 bp, Arabidopsis thaliana
ctttctccgtatgagtc

SEQ ID NO: 91729 - DNA, 17 bp, Arabidopsis thaliana
ctttctccgttaggatt

SEQ ID NO: 91730 - DNA, 17 bp, Arabidopsis thaliana
ctttctcgaatcttagc

SEQ ID NO: 91731 - DNA, 17 bp, Arabidopsis thaliana
ctttctcgatcacagtc

SEQ ID NO: 91732 - DNA, 17 bp, Arabidopsis thaliana
ctttctcgcaatgattc

SEQ ID NO: 91733 - DNA, 17 bp, Arabidopsis thaliana
ctttctcggtttttatt

SEQ ID NO: 91734 - DNA, 17 bp, Arabidopsis thaliana
ctttctcgttgtcggtg

SEQ ID NO: 91735 - DNA, 17 bp, Arabidopsis thaliana
ctttctctaggcggtga

SEQ ID NO: 91736 - DNA, 17 bp, Arabidopsis thaliana
ctttctctccgagcctt

SEQ ID NO: 91737 - DNA, 17 bp, Arabidopsis thaliana
ctttctctcgacgggaa

SEQ ID NO: 91738 - DNA, 17 bp, Arabidopsis thaliana
ctttctctctcttccac

SEQ ID NO: 91739 - DNA, 17 bp, Arabidopsis thaliana
ctttctctgagtttgcg

SEQ ID NO: 91740 - DNA, 17 bp, Arabidopsis thaliana
ctttctctgcgagcctt

SEQ ID NO: 91741 - DNA, 17 bp, Arabidopsis thaliana
ctttctctggatttgaa

SEQ ID NO: 91742 - DNA, 17 bp, Arabidopsis thaliana
ctttctctgtgggtgca

SEQ ID NO: 91743 - DNA, 17 bp, Arabidopsis thaliana
ctttctcttctcatcac

SEQ ID NO: 91744 - DNA, 17 bp, Arabidopsis thaliana
ctttctgaacgggattt

SEQ ID NO: 91745 - DNA, 17 bp, Arabidopsis thaliana
ctttctgccatgggaac

SEQ ID NO: 91746 - DNA, 17 bp, Arabidopsis thaliana
ctttctgcctgggtgtc

SEQ ID NO: 91747 - DNA, 17 bp, Arabidopsis thaliana
ctttctgcggctgctca

SEQ ID NO: 91748 - DNA, 17 bp, Arabidopsis thaliana
ctttctggagaccaaac

SEQ ID NO: 91749 - DNA, 17 bp, Arabidopsis thaliana
ctttctggagaccgaac

SEQ ID NO: 91750 - DNA, 17 bp, Arabidopsis thaliana
ctttctggttttgctcg

SEQ ID NO: 91751 - DNA, 17 bp, Arabidopsis thaliana
ctttctgtcaaaataag

SEQ ID NO: 91752 - DNA, 17 bp, Arabidopsis thaliana
ctttctgtcaaccaaac

SEQ ID NO: 91753 - DNA, 17 bp, Arabidopsis thaliana
ctttcttaaatccctag

SEQ ID NO: 91754 - DNA, 17 bp, Arabidopsis thaliana
ctttcttaaatgcctag

SEQ ID NO: 91755 - DNA, 17 bp, Arabidopsis thaliana
ctttcttagggttttcg

SEQ ID NO: 91756 - DNA, 17 bp, Arabidopsis thaliana
ctttcttagtcccatcc

SEQ ID NO: 91757 - DNA, 17 bp, Arabidopsis thaliana
ctttcttagtcgcatcc

SEQ ID NO: 91758 - DNA, 17 bp, Arabidopsis thaliana
ctttcttcaacgccgaa

SEQ ID NO: 91759 - DNA, 17 bp, Arabidopsis thaliana
ctttcttcaagttcatc

SEQ ID NO: 91760 - DNA, 17 bp, Arabidopsis thaliana
ctttcttcatctgaggt

SEQ ID NO: 91761 - DNA, 17 bp, Arabidopsis thaliana
ctttcttcattgtctgg

SEQ ID NO: 91762 - DNA, 17 bp, Arabidopsis thaliana
ctttcttcccaccttgg

SEQ ID NO: 91763 - DNA, 17 bp, Arabidopsis thaliana
ctttcttccgacaacat

SEQ ID NO: 91764 - DNA, 17 bp, Arabidopsis thaliana
ctttcttccgacaacgt

SEQ ID NO: 91765 - DNA, 17 bp, Arabidopsis thaliana
ctttcttcctcctgagc

SEQ ID NO: 91766 - DNA, 17 bp, Arabidopsis thaliana
ctttcttcgctaggcta

SEQ ID NO: 91767 - DNA, 17 bp, Arabidopsis thaliana
ctttcttcggttgtgac

SEQ ID NO: 91768 - DNA, 17 bp, Arabidopsis thaliana
ctttcttctaatggctt

SEQ ID NO: 91769 - DNA, 17 bp, Arabidopsis thaliana
ctttcttctccatcttg

SEQ ID NO: 91770 - DNA, 17 bp, Arabidopsis thaliana
ctttcttctctgggacg

SEQ ID NO: 91771 - DNA, 17 bp, Arabidopsis thaliana
ctttcttggaacgctct

SEQ ID NO: 91772 - DNA, 17 bp, Arabidopsis thaliana
ctttcttggctgcgtca

SEQ ID NO: 91773 - DNA, 17 bp, Arabidopsis thaliana
ctttcttgtttcgtcgg

SEQ ID NO: 91774 - DNA, 17 bp, Arabidopsis thaliana
ctttcttgttttcgtgg

SEQ ID NO: 91775 - DNA, 17 bp, Arabidopsis thaliana
ctttctttccatgagct

SEQ ID NO: 91776 - DNA, 17 bp, Arabidopsis thaliana
ctttctttccgacaata

SEQ ID NO: 91777 - DNA, 17 bp, Arabidopsis thaliana
ctttctttgttgtcgct

SEQ ID NO: 91778 - DNA, 17 bp, Arabidopsis thaliana
ctttcttttgttttgag

SEQ ID NO: 91779 - DNA, 17 bp, Arabidopsis thaliana
ctttgaaatcaccgagc

SEQ ID NO: 91780 - DNA, 17 bp, Arabidopsis thaliana
ctttgaaatttcatcgt

SEQ ID NO: 91781 - DNA, 17 bp, Arabidopsis thaliana
ctttgaacagcggcgaa

SEQ ID NO: 91782 - DNA, 17 bp, Arabidopsis thaliana
ctttgaacctgcggaag

SEQ ID NO: 91783 - DNA, 17 bp, Arabidopsis thaliana
ctttgaaccttgggatg

SEQ ID NO: 91784 - DNA, 17 bp, Arabidopsis thaliana
ctttgaacgcaagttgc

SEQ ID NO: 91785 - DNA, 17 bp, Arabidopsis thaliana
ctttgaatctgagagtt

SEQ ID NO: 91786 - DNA, 17 bp, Arabidopsis thaliana
ctttgaatgattacagc

SEQ ID NO: 91787 - DNA, 17 bp, Arabidopsis thaliana
ctttgaatgttgcgtca

SEQ ID NO: 91788 - DNA, 17 bp, Arabidopsis thaliana
ctttgaatttggcagga

SEQ ID NO: 91789 - DNA, 17 bp, Arabidopsis thaliana
ctttgaccgaaacagtg

SEQ ID NO: 91790 - DNA, 17 bp, Arabidopsis thaliana
ctttgaccgtaatccag

SEQ ID NO: 91791 - DNA, 17 bp, Arabidopsis thaliana
ctttgacctccttcagc

SEQ ID NO: 91792 - DNA, 17 bp, Arabidopsis thaliana
ctttgacctttattgct

SEQ ID NO: 91793 - DNA, 17 bp, Arabidopsis thaliana
ctttgacgacgaaggta

SEQ ID NO: 91794 - DNA, 17 bp, Arabidopsis thaliana
ctttgactcagcctcct

SEQ ID NO: 91795 - DNA, 17 bp, Arabidopsis thaliana
ctttgactgtagaaact

SEQ ID NO: 91796 - DNA, 17 bp, Arabidopsis thaliana
ctttgacttgtccgatg

SEQ ID NO: 91797 - DNA, 17 bp, Arabidopsis thaliana
ctttgagaccgtagtct

SEQ ID NO: 91798 - DNA, 17 bp, Arabidopsis thaliana
ctttgagagttcaaagt

SEQ ID NO: 91799 - DNA, 17 bp, Arabidopsis thaliana
ctttgagatccgtttgc

SEQ ID NO: 91800 - DNA, 17 bp, Arabidopsis thaliana
ctttgagcattaggtta

SEQ ID NO: 91801 - DNA, 17 bp, Arabidopsis thaliana
ctttgaggattacggtt

SEQ ID NO: 91802 - DNA, 17 bp, Arabidopsis thaliana
ctttgagtccgtagatt

SEQ ID NO: 91803 - DNA, 17 bp, Arabidopsis thaliana
ctttgatacgtagtcta

SEQ ID NO: 91804 - DNA, 17 bp, Arabidopsis thaliana
ctttgatacgtagttta

SEQ ID NO: 91805 - DNA, 17 bp, Arabidopsis thaliana
ctttgatcagtcttgag

SEQ ID NO: 91806 - DNA, 17 bp, Arabidopsis thaliana
ctttgatcattctggac

SEQ ID NO: 91807 - DNA, 17 bp, Arabidopsis thaliana
ctttgatccttcgatgt

SEQ ID NO: 91808 - DNA, 17 bp, Arabidopsis thaliana
ctttgatgacatggcgg

SEQ ID NO: 91809 - DNA, 17 bp, Arabidopsis thaliana
ctttgatgacccgtctt

SEQ ID NO: 91810 - DNA, 17 bp, Arabidopsis thaliana
ctttgatgtcgcagaga

SEQ ID NO: 91811 - DNA, 17 bp, Arabidopsis thaliana
ctttgattgatcgctaa

SEQ ID NO: 91812 - DNA, 17 bp, Arabidopsis thaliana
ctttgattgatcgctac

SEQ ID NO: 91813 - DNA, 17 bp, Arabidopsis thaliana
ctttgattgatcgctgc

SEQ ID NO: 91814 - DNA, 17 bp, Arabidopsis thaliana
ctttgatttcagacaac

SEQ ID NO: 91815 - DNA, 17 bp, Arabidopsis thaliana
ctttgatttccattcca

SEQ ID NO: 91816 - DNA, 17 bp, Arabidopsis thaliana
ctttgatttccttggtt

SEQ ID NO: 91817 - DNA, 17 bp, Arabidopsis thaliana
ctttgatttctctcgga

SEQ ID NO: 91818 - DNA, 17 bp, Arabidopsis thaliana
ctttgatttcttcaggg

SEQ ID NO: 91819 - DNA, 17 bp, Arabidopsis thaliana
ctttgatttgctgcgag

SEQ ID NO: 91820 - DNA, 17 bp, Arabidopsis thaliana
ctttgattttatagccg

SEQ ID NO: 91821 - DNA, 17 bp, Arabidopsis thaliana
ctttgcaaccacctcag

SEQ ID NO: 91822 - DNA, 17 bp, Arabidopsis thaliana
ctttgcaaccggtaatt

SEQ ID NO: 91823 - DNA, 17 bp, Arabidopsis thaliana
ctttgcaacgtttgtac

SEQ ID NO: 91824 - DNA, 17 bp, Arabidopsis thaliana
ctttgcacagtatttgc

SEQ ID NO: 91825 - DNA, 17 bp, Arabidopsis thaliana
ctttgcacttgggtgcg

SEQ ID NO: 91826 - DNA, 17 bp, Arabidopsis thaliana
ctttgcagaccagtctt

SEQ ID NO: 91827 - DNA, 17 bp, Arabidopsis thaliana
ctttgcaggctgttatg

SEQ ID NO: 91828 - DNA, 17 bp, Arabidopsis thaliana
ctttgccaaggatcgat

SEQ ID NO: 91829 - DNA, 17 bp, Arabidopsis thaliana
ctttgccagatcatccg

SEQ ID NO: 91830 - DNA, 17 bp, Arabidopsis thaliana
ctttgccattctttagc

SEQ ID NO: 91831 - DNA, 17 bp, Arabidopsis thaliana
ctttgcccctagatgga

SEQ ID NO: 91832 - DNA, 17 bp, Arabidopsis thaliana
ctttgcccgcgcagatt

SEQ ID NO: 91833 - DNA, 17 bp, Arabidopsis thaliana
ctttgcccgcgcaggtt

SEQ ID NO: 91834 - DNA, 17 bp, Arabidopsis thaliana
ctttgcccgtcgaagct

SEQ ID NO: 91835 - DNA, 17 bp, Arabidopsis thaliana
ctttgcccgttcatctc

SEQ ID NO: 91836 - DNA, 17 bp, Arabidopsis thaliana
ctttgccgctgctagaa

SEQ ID NO: 91837 - DNA, 17 bp, Arabidopsis thaliana
ctttgccgcttgtgact

SEQ ID NO: 91838 - DNA, 17 bp, Arabidopsis thaliana
ctttgcctaagcgatgt

SEQ ID NO: 91839 - DNA, 17 bp, Arabidopsis thaliana
ctttgccttctttgcag

SEQ ID NO: 91840 - DNA, 17 bp, Arabidopsis thaliana
ctttgcgaattcacaac

SEQ ID NO: 91841 - DNA, 17 bp, Arabidopsis thaliana
ctttgcgagaaagccat

SEQ ID NO: 91842 - DNA, 17 bp, Arabidopsis thaliana
ctttgcgatgaattgga

SEQ ID NO: 91843 - DNA, 17 bp, Arabidopsis thaliana
ctttgcgatttactggt

SEQ ID NO: 91844 - DNA, 17 bp, Arabidopsis thaliana
ctttgcgcagcattttt

SEQ ID NO: 91845 - DNA, 17 bp, Arabidopsis thaliana
ctttgcgcatgcttgga

SEQ ID NO: 91846 - DNA, 17 bp, Arabidopsis thaliana
ctttgcgcgtcactgac

SEQ ID NO: 91847 - DNA, 17 bp, Arabidopsis thaliana
ctttgcgctaacccggt

SEQ ID NO: 91848 - DNA, 17 bp, Arabidopsis thaliana
ctttgcggtgtagatcg

SEQ ID NO: 91849 - DNA, 17 bp, Arabidopsis thaliana
ctttgcggttcagtgga

SEQ ID NO: 91850 - DNA, 17 bp, Arabidopsis thaliana
ctttgcgtcttctcttc

SEQ ID NO: 91851 - DNA, 17 bp, Arabidopsis thaliana
ctttgcgttctctccgt

SEQ ID NO: 91852 - DNA, 17 bp, Arabidopsis thaliana
ctttgctacttattttt

SEQ ID NO: 91853 - DNA, 17 bp, Arabidopsis thaliana
ctttgctattgttgtgc

SEQ ID NO: 91854 - DNA, 17 bp, Arabidopsis thaliana
ctttgctattgttgtgg

SEQ ID NO: 91855 - DNA, 17 bp, Arabidopsis thaliana
ctttgctcacaacgacc

SEQ ID NO: 91856 - DNA, 17 bp, Arabidopsis thaliana
ctttgctcactacgacc

SEQ ID NO: 91857 - DNA, 17 bp, Arabidopsis thaliana
ctttgctcattcgggat

SEQ ID NO: 91858 - DNA, 17 bp, Arabidopsis thaliana
ctttgctcattttacgg

SEQ ID NO: 91859 - DNA, 17 bp, Arabidopsis thaliana
ctttgctccggttgatc

SEQ ID NO: 91860 - DNA, 17 bp, Arabidopsis thaliana
ctttgctcgtggcaaat

SEQ ID NO: 91861 - DNA, 17 bp, Arabidopsis thaliana
ctttgctctccatgccc

SEQ ID NO: 91862 - DNA, 17 bp, Arabidopsis thaliana
ctttgctcttcaaggtg

SEQ ID NO: 91863 - DNA, 17 bp, Arabidopsis thaliana
ctttgctgctggagctg

SEQ ID NO: 91864 - DNA, 17 bp, Arabidopsis thaliana
ctttgctgtagccacat

SEQ ID NO: 91865 - DNA, 17 bp, Arabidopsis thaliana
ctttgctgtgctcaggg

SEQ ID NO: 91866 - DNA, 17 bp, Arabidopsis thaliana
ctttgctgttacgactg

SEQ ID NO: 91867 - DNA, 17 bp, Arabidopsis thaliana
ctttgcttacatggagc

SEQ ID NO: 91868 - DNA, 17 bp, Arabidopsis thaliana
ctttgcttcagtgtgac

SEQ ID NO: 91869 - DNA, 17 bp, Arabidopsis thaliana
ctttgcttccgagatta

SEQ ID NO: 91870 - DNA, 17 bp, Arabidopsis thaliana
ctttgcttcggctaaga

SEQ ID NO: 91871 - DNA, 17 bp, Arabidopsis thaliana
ctttgcttctcagatgt

SEQ ID NO: 91872 - DNA, 17 bp, Arabidopsis thaliana
ctttgctttcaaagttg

SEQ ID NO: 91873 - DNA, 17 bp, Arabidopsis thaliana
ctttgctttgacgattt

SEQ ID NO: 91874 - DNA, 17 bp, Arabidopsis thaliana
ctttgctttgcttcgaa

SEQ ID NO: 91875 - DNA, 17 bp, Arabidopsis thaliana
ctttggaatctctacat

SEQ ID NO: 91876 - DNA, 17 bp, Arabidopsis thaliana
ctttggaatgcagagcc

SEQ ID NO: 91877 - DNA, 17 bp, Arabidopsis thaliana
ctttggaccaaagagtt

SEQ ID NO: 91878 - DNA, 17 bp, Arabidopsis thaliana
ctttggaccacactggt

SEQ ID NO: 91879 - DNA, 17 bp, Arabidopsis thaliana
ctttggaccacacttgt

SEQ ID NO: 91880 - DNA, 17 bp, Arabidopsis thaliana
ctttggaccgtgtaact

SEQ ID NO: 91881 - DNA, 17 bp, Arabidopsis thaliana
ctttggacgacaatagg

SEQ ID NO: 91882 - DNA, 17 bp, Arabidopsis thaliana
ctttggactaacagtat

SEQ ID NO: 91883 - DNA, 17 bp, Arabidopsis thaliana
ctttggagaattacggg

SEQ ID NO: 91884 - DNA, 17 bp, Arabidopsis thaliana
ctttggagagctttcca

SEQ ID NO: 91885 - DNA, 17 bp, Arabidopsis thaliana
ctttggagagctttcta

SEQ ID NO: 91886 - DNA, 17 bp, Arabidopsis thaliana
ctttggagtagcgttaa

SEQ ID NO: 91887 - DNA, 17 bp, Arabidopsis thaliana
ctttggagtgatcagtg

SEQ ID NO: 91888 - DNA, 17 bp, Arabidopsis thaliana
ctttggagttttgatgg

SEQ ID NO: 91889 - DNA, 17 bp, Arabidopsis thaliana
ctttggatctgcctatg

SEQ ID NO: 91890 - DNA, 17 bp, Arabidopsis thaliana
ctttggattaaccttgg

SEQ ID NO: 91891 - DNA, 17 bp, Arabidopsis thaliana
ctttggattccgtcatt

SEQ ID NO: 91892 - DNA, 17 bp, Arabidopsis thaliana
ctttggattgaagggag

SEQ ID NO: 91893 - DNA, 17 bp, Arabidopsis thaliana
ctttggattgaaggtag

SEQ ID NO: 91894 - DNA, 17 bp, Arabidopsis thaliana
ctttggatttggttgct

SEQ ID NO: 91895 - DNA, 17 bp, Arabidopsis thaliana
ctttggccagaggatgg

SEQ ID NO: 91896 - DNA, 17 bp, Arabidopsis thaliana
ctttggcccaattggtt

SEQ ID NO: 91897 - DNA, 17 bp, Arabidopsis thaliana
ctttggcccagaacctc

SEQ ID NO: 91898 - DNA, 17 bp, Arabidopsis thaliana
ctttggccccattggtt

SEQ ID NO: 91899 - DNA, 17 bp, Arabidopsis thaliana
ctttggccctcgagatc

SEQ ID NO: 91900 - DNA, 17 bp, Arabidopsis thaliana
ctttggccgacagaccc

SEQ ID NO: 91901 - DNA, 17 bp, Arabidopsis thaliana
ctttggccgactgcggg

SEQ ID NO: 91902 - DNA, 17 bp, Arabidopsis thaliana
ctttggcctcgagatct

SEQ ID NO: 91903 - DNA, 17 bp, Arabidopsis thaliana
ctttggcctgaaacttt

SEQ ID NO: 91904 - DNA, 17 bp, Arabidopsis thaliana
ctttggcctgaactagg

SEQ ID NO: 91905 - DNA, 17 bp, Arabidopsis thaliana
ctttggcggaaagattg

SEQ ID NO: 91906 - DNA, 17 bp, Arabidopsis thaliana
ctttggcgtgcagtgac

SEQ ID NO: 91907 - DNA, 17 bp, Arabidopsis thaliana
ctttggcgtgcattggt

SEQ ID NO: 91908 - DNA, 17 bp, Arabidopsis thaliana
ctttggctacaagcctt

SEQ ID NO: 91909 - DNA, 17 bp, Arabidopsis thaliana
ctttggctaccagtatg

SEQ ID NO: 91910 - DNA, 17 bp, Arabidopsis thaliana
ctttggctcatgggctt

SEQ ID NO: 91911 - DNA, 17 bp, Arabidopsis thaliana
ctttggctccatcgtta

SEQ ID NO: 91912 - DNA, 17 bp, Arabidopsis thaliana
ctttggctcggattcgg

SEQ ID NO: 91913 - DNA, 17 bp, Arabidopsis thaliana
ctttggctcggattcgt

SEQ ID NO: 91914 - DNA, 17 bp, Arabidopsis thaliana
ctttggctctgtgtctt

SEQ ID NO: 91915 - DNA, 17 bp, Arabidopsis thaliana
ctttgggatgggtcggc

SEQ ID NO: 91916 - DNA, 17 bp, Arabidopsis thaliana
ctttgggattattgttg

SEQ ID NO: 91917 - DNA, 17 bp, Arabidopsis thaliana
ctttgggccttgcaacg

SEQ ID NO: 91918 - DNA, 17 bp, Arabidopsis thaliana
ctttgggcgacgagtga

SEQ ID NO: 91919 - DNA, 17 bp, Arabidopsis thaliana
ctttgggctctatctag

SEQ ID NO: 91920 - DNA, 17 bp, Arabidopsis thaliana
ctttgggcttgccgaaa

SEQ ID NO: 91921 - DNA, 17 bp, Arabidopsis thaliana
ctttgggctttccgaaa

SEQ ID NO: 91922 - DNA, 17 bp, Arabidopsis thaliana
ctttggggtatccggcg

SEQ ID NO: 91923 - DNA, 17 bp, Arabidopsis thaliana
ctttggggtctctcaag

SEQ ID NO: 91924 - DNA, 17 bp, Arabidopsis thaliana
ctttgggtgccttgagt

SEQ ID NO: 91925 - DNA, 17 bp, Arabidopsis thaliana
ctttgggtgccttgatt

SEQ ID NO: 91926 - DNA, 17 bp, Arabidopsis thaliana
ctttgggtgcgagaggt

SEQ ID NO: 91927 - DNA, 17 bp, Arabidopsis thaliana
ctttgggtgttgagagt

SEQ ID NO: 91928 - DNA, 17 bp, Arabidopsis thaliana
ctttgggttagtctgca

SEQ ID NO: 91929 - DNA, 17 bp, Arabidopsis thaliana
ctttgggttctatctag

SEQ ID NO: 91930 - DNA, 17 bp, Arabidopsis thaliana
ctttggtatcaggggta

SEQ ID NO: 91931 - DNA, 17 bp, Arabidopsis thaliana
ctttggtatctgctccg

SEQ ID NO: 91932 - DNA, 17 bp, Arabidopsis thaliana
ctttggtcaccaatcgg

SEQ ID NO: 91933 - DNA, 17 bp, Arabidopsis thaliana
ctttggtccgaacggag

SEQ ID NO: 91934 - DNA, 17 bp, Arabidopsis thaliana
ctttggtccgacagtaa

SEQ ID NO: 91935 - DNA, 17 bp, Arabidopsis thaliana
ctttggtctacatttgc

SEQ ID NO: 91936 - DNA, 17 bp, Arabidopsis thaliana
ctttggtgaataccgaa

SEQ ID NO: 91937 - DNA, 17 bp, Arabidopsis thaliana
ctttggtgattggctaa

SEQ ID NO: 91938 - DNA, 17 bp, Arabidopsis thaliana
ctttggtggataccgag

SEQ ID NO: 91939 - DNA, 17 bp, Arabidopsis thaliana
ctttggtgtgaacgaag

SEQ ID NO: 91940 - DNA, 17 bp, Arabidopsis thaliana
ctttggtgtgactaaca

SEQ ID NO: 91941 - DNA, 17 bp, Arabidopsis thaliana
ctttggtgtgactaacc

SEQ ID NO: 91942 - DNA, 17 bp, Arabidopsis thaliana
ctttggtgtgcattggt

SEQ ID NO: 91943 - DNA, 17 bp, Arabidopsis thaliana
ctttggttcacctacat

SEQ ID NO: 91944 - DNA, 17 bp, Arabidopsis thaliana
ctttggttggatgtatt

SEQ ID NO: 91945 - DNA, 17 bp, Arabidopsis thaliana
ctttggttgtaccactg

SEQ ID NO: 91946 - DNA, 17 bp, Arabidopsis thaliana
ctttggttgttttgggc

SEQ ID NO: 91947 - DNA, 17 bp, Arabidopsis thaliana
ctttggtttcttcggac

SEQ ID NO: 91948 - DNA, 17 bp, Arabidopsis thaliana
ctttgtaagcctttgca

SEQ ID NO: 91949 - DNA, 17 bp, Arabidopsis thaliana
ctttgtacacaccgccc

SEQ ID NO: 91950 - DNA, 17 bp, Arabidopsis thaliana
ctttgtaccctgatcct

SEQ ID NO: 91951 - DNA, 17 bp, Arabidopsis thaliana
ctttgtagaagacaagg

SEQ ID NO: 91952 - DNA, 17 bp, Arabidopsis thaliana
ctttgtcaaagccttca

SEQ ID NO: 91953 - DNA, 17 bp, Arabidopsis thaliana
ctttgtcactaagattc

SEQ ID NO: 91954 - DNA, 17 bp, Arabidopsis thaliana
ctttgtccagctagttc

SEQ ID NO: 91955 - DNA, 17 bp, Arabidopsis thaliana
ctttgtccgcttgggcc

SEQ ID NO: 91956 - DNA, 17 bp, Arabidopsis thaliana
ctttgtccgttgctacg

SEQ ID NO: 91957 - DNA, 17 bp, Arabidopsis thaliana
ctttgtccgttgctatg

SEQ ID NO: 91958 - DNA, 17 bp, Arabidopsis thaliana
ctttgtcctgatcgatt

SEQ ID NO: 91959 - DNA, 17 bp, Arabidopsis thaliana
ctttgtcgagacaggat

SEQ ID NO: 91960 - DNA, 17 bp, Arabidopsis thaliana
ctttgtcgcatcctgta

SEQ ID NO: 91961 - DNA, 17 bp, Arabidopsis thaliana
ctttgtcgctaagattc

SEQ ID NO: 91962 - DNA, 17 bp, Arabidopsis thaliana
ctttgtcggaaactgac

SEQ ID NO: 91963 - DNA, 17 bp, Arabidopsis thaliana
ctttgtcggagacctag

SEQ ID NO: 91964 - DNA, 17 bp, Arabidopsis thaliana
ctttgtcgttagccaag

SEQ ID NO: 91965 - DNA, 17 bp, Arabidopsis thaliana
ctttgtctcaatgccga

SEQ ID NO: 91966 - DNA, 17 bp, Arabidopsis thaliana
ctttgtctcccttggct

SEQ ID NO: 91967 - DNA, 17 bp, Arabidopsis thaliana
ctttgtctgctggatat

SEQ ID NO: 91968 - DNA, 17 bp, Arabidopsis thaliana
ctttgtcttgaacaggt

SEQ ID NO: 91969 - DNA, 17 bp, Arabidopsis thaliana
ctttgtcttgccattta

SEQ ID NO: 91970 - DNA, 17 bp, Arabidopsis thaliana
ctttgtctttcttgcga

SEQ ID NO: 91971 - DNA, 17 bp, Arabidopsis thaliana
ctttgtgaaaatggcaa

SEQ ID NO: 91972 - DNA, 17 bp, Arabidopsis thaliana
ctttgtgattcgctaac

SEQ ID NO: 91973 - DNA, 17 bp, Arabidopsis thaliana
ctttgtgctacagccct

SEQ ID NO: 91974 - DNA, 17 bp, Arabidopsis thaliana
ctttgtgctttagacct

SEQ ID NO: 91975 - DNA, 17 bp, Arabidopsis thaliana
ctttgtggctattggtg

SEQ ID NO: 91976 - DNA, 17 bp, Arabidopsis thaliana
ctttgtggcttagtgga

SEQ ID NO: 91977 - DNA, 17 bp, Arabidopsis thaliana
ctttgtgggtgatttgt

SEQ ID NO: 91978 - DNA, 17 bp, Arabidopsis thaliana
ctttgtgggtttctcat

SEQ ID NO: 91979 - DNA, 17 bp, Arabidopsis thaliana
ctttgtggtttgcaggc

SEQ ID NO: 91980 - DNA, 17 bp, Arabidopsis thaliana
ctttgtgtctatgctcc

SEQ ID NO: 91981 - DNA, 17 bp, Arabidopsis thaliana
ctttgtgtctgctggtt

SEQ ID NO: 91982 - DNA, 17 bp, Arabidopsis thaliana
ctttgtgttggtgcaat

SEQ ID NO: 91983 - DNA, 17 bp, Arabidopsis thaliana
ctttgtgtttccgtcgc

SEQ ID NO: 91984 - DNA, 17 bp, Arabidopsis thaliana
ctttgttcagtgtagga

SEQ ID NO: 91985 - DNA, 17 bp, Arabidopsis thaliana
ctttgttccattgacca

SEQ ID NO: 91986 - DNA, 17 bp, Arabidopsis thaliana
ctttgttccctcgtttg

SEQ ID NO: 91987 - DNA, 17 bp, Arabidopsis thaliana
ctttgttcgtcagtcct

SEQ ID NO: 91988 - DNA, 17 bp, Arabidopsis thaliana
ctttgttcttgggcttg

SEQ ID NO: 91989 - DNA, 17 bp, Arabidopsis thaliana
ctttgttgagccgtcac

SEQ ID NO: 91990 - DNA, 17 bp, Arabidopsis thaliana
ctttgttgctcagactg

SEQ ID NO: 91991 - DNA, 17 bp, Arabidopsis thaliana
ctttgttggaaagggcc

SEQ ID NO: 91992 - DNA, 17 bp, Arabidopsis thaliana
ctttgttggagacctag

SEQ ID NO: 91993 - DNA, 17 bp, Arabidopsis thaliana
ctttgtttactgcagcg

SEQ ID NO: 91994 - DNA, 17 bp, Arabidopsis thaliana
ctttgtttaggattgtg

SEQ ID NO: 91995 - DNA, 17 bp, Arabidopsis thaliana
ctttgtttctacagtgc

SEQ ID NO: 91996 - DNA, 17 bp, Arabidopsis thaliana
ctttgtttctagccgct

SEQ ID NO: 91997 - DNA, 17 bp, Arabidopsis thaliana
ctttgtttgctccatag

SEQ ID NO: 91998 - DNA, 17 bp, Arabidopsis thaliana
ctttgtttgtaacgggc

SEQ ID NO: 91999 - DNA, 17 bp, Arabidopsis thaliana
ctttgtttttccgagcc

SEQ ID NO: 92000 - DNA, 17 bp, Arabidopsis thaliana
cttttaaaatgcggttg

SEQ ID NO: 92001 - DNA, 17 bp, Arabidopsis thaliana
cttttaagatcgggttg

SEQ ID NO: 92002 - DNA, 17 bp, Arabidopsis thaliana
cttttacaggccaagtg

SEQ ID NO: 92003 - DNA, 17 bp, Arabidopsis thaliana
cttttacatttggctgt

SEQ ID NO: 92004 - DNA, 17 bp, Arabidopsis thaliana
cttttacggattctgat

SEQ ID NO: 92005 - DNA, 17 bp, Arabidopsis thaliana
cttttagctttcaccat

SEQ ID NO: 92006 - DNA, 17 bp, Arabidopsis thaliana
cttttaggttctgagaa

SEQ ID NO: 92007 - DNA, 17 bp, Arabidopsis thaliana
cttttatttcggttcgg

SEQ ID NO: 92008 - DNA, 17 bp, Arabidopsis thaliana
cttttattttgtacgct

SEQ ID NO: 92009 - DNA, 17 bp, Arabidopsis thaliana
cttttcaaccaagcgcg

SEQ ID NO: 92010 - DNA, 17 bp, Arabidopsis thaliana
cttttcaatagtttgct

SEQ ID NO: 92011 - DNA, 17 bp, Arabidopsis thaliana
cttttcaatcctttgat

SEQ ID NO: 92012 - DNA, 17 bp, Arabidopsis thaliana
cttttcacagtcgcgtg

SEQ ID NO: 92013 - DNA, 17 bp, Arabidopsis thaliana
cttttcaccgtccaccg

SEQ ID NO: 92014 - DNA, 17 bp, Arabidopsis thaliana
cttttcacggccggctt

SEQ ID NO: 92015 - DNA, 17 bp, Arabidopsis thaliana
cttttcacggttccctt

SEQ ID NO: 92016 - DNA, 17 bp, Arabidopsis thaliana
cttttcacttgcagaga

SEQ ID NO: 92017 - DNA, 17 bp, Arabidopsis thaliana
cttttcagaatagtgca

SEQ ID NO: 92018 - DNA, 17 bp, Arabidopsis thaliana
cttttcagattgtggtt

SEQ ID NO: 92019 - DNA, 17 bp, Arabidopsis thaliana
cttttcagctgaaattt

SEQ ID NO: 92020 - DNA, 17 bp, Arabidopsis thaliana
cttttcagggatgaggc

SEQ ID NO: 92021 - DNA, 17 bp, Arabidopsis thaliana
cttttcagggattaggc

SEQ ID NO: 92022 - DNA, 17 bp, Arabidopsis thaliana
cttttcagtgtgataaa

SEQ ID NO: 92023 - DNA, 17 bp, Arabidopsis thaliana
cttttcagttgctttag

SEQ ID NO: 92024 - DNA, 17 bp, Arabidopsis thaliana
cttttcatctacgggat

SEQ ID NO: 92025 - DNA, 17 bp, Arabidopsis thaliana
cttttcatcttgacggg

SEQ ID NO: 92026 - DNA, 17 bp, Arabidopsis thaliana
cttttcatgactttcca

SEQ ID NO: 92027 - DNA, 17 bp, Arabidopsis thaliana
cttttcattcctgcaac

SEQ ID NO: 92028 - DNA, 17 bp, Arabidopsis thaliana
cttttcatttggaggac

SEQ ID NO: 92029 - DNA, 17 bp, Arabidopsis thaliana
cttttccaacaaagtga

SEQ ID NO: 92030 - DNA, 17 bp, Arabidopsis thaliana
cttttccaaccgaatga

SEQ ID NO: 92031 - DNA, 17 bp, Arabidopsis thaliana
cttttccattgactttt

SEQ ID NO: 92032 - DNA, 17 bp, Arabidopsis thaliana
cttttccatttccgttc

SEQ ID NO: 92033 - DNA, 17 bp, Arabidopsis thaliana
cttttcccacaaacttg

SEQ ID NO: 92034 - DNA, 17 bp, Arabidopsis thaliana
cttttccccccaaaaga

SEQ ID NO: 92035 - DNA, 17 bp, Arabidopsis thaliana
cttttcccgaagttacg

SEQ ID NO: 92036 - DNA, 17 bp, Arabidopsis thaliana
cttttcccgactttttg

SEQ ID NO: 92037 - DNA, 17 bp, Arabidopsis thaliana
cttttccctcttggcac

SEQ ID NO: 92038 - DNA, 17 bp, Arabidopsis thaliana
cttttccggcagctggc

SEQ ID NO: 92039 - DNA, 17 bp, Arabidopsis thaliana
cttttcctactccgccc

SEQ ID NO: 92040 - DNA, 17 bp, Arabidopsis thaliana
cttttcctaggcgcctt

SEQ ID NO: 92041 - DNA, 17 bp, Arabidopsis thaliana
cttttccttctttgacg

SEQ ID NO: 92042 - DNA, 17 bp, Arabidopsis thaliana
cttttccttttagccga

SEQ ID NO: 92043 - DNA, 17 bp, Arabidopsis thaliana
cttttcgaaagcttcac

SEQ ID NO: 92044 - DNA, 17 bp, Arabidopsis thaliana
cttttcgaccagcttat

SEQ ID NO: 92045 - DNA, 17 bp, Arabidopsis thaliana
cttttcgactaatgcca

SEQ ID NO: 92046 - DNA, 17 bp, Arabidopsis thaliana
cttttcgactagatgtc

SEQ ID NO: 92047 - DNA, 17 bp, Arabidopsis thaliana
cttttcgaggatgaggc

SEQ ID NO: 92048 - DNA, 17 bp, Arabidopsis thaliana
cttttcgatgtctacca

SEQ ID NO: 92049 - DNA, 17 bp, Arabidopsis thaliana
cttttcgcatgagctat

SEQ ID NO: 92050 - DNA, 17 bp, Arabidopsis thaliana
cttttcgcctactgcca

SEQ ID NO: 92051 - DNA, 17 bp, Arabidopsis thaliana
cttttcgcgatcaagtt

SEQ ID NO: 92052 - DNA, 17 bp, Arabidopsis thaliana
cttttcgcttttccatc

SEQ ID NO: 92053 - DNA, 17 bp, Arabidopsis thaliana
cttttcggaaagcccaa

SEQ ID NO: 92054 - DNA, 17 bp, Arabidopsis thaliana
cttttcgggccttttcg

SEQ ID NO: 92055 - DNA, 17 bp, Arabidopsis thaliana
cttttcgggtttcgcaa

SEQ ID NO: 92056 - DNA, 17 bp, Arabidopsis thaliana
cttttcggtcaccgact

SEQ ID NO: 92057 - DNA, 17 bp, Arabidopsis thaliana
cttttcggtcccgtctc

SEQ ID NO: 92058 - DNA, 17 bp, Arabidopsis thaliana
cttttcggttgtgtctt

SEQ ID NO: 92059 - DNA, 17 bp, Arabidopsis thaliana
cttttcggtttagaata

SEQ ID NO: 92060 - DNA, 17 bp, Arabidopsis thaliana
cttttcgtgccaagtta

SEQ ID NO: 92061 - DNA, 17 bp, Arabidopsis thaliana
cttttcgtgtcccaccg

SEQ ID NO: 92062 - DNA, 17 bp, Arabidopsis thaliana
cttttcgttgtcgataa

SEQ ID NO: 92063 - DNA, 17 bp, Arabidopsis thaliana
cttttctatgccatcct

SEQ ID NO: 92064 - DNA, 17 bp, Arabidopsis thaliana
cttttctcaggcgttgt

SEQ ID NO: 92065 - DNA, 17 bp, Arabidopsis thaliana
cttttctccagaatgtt

SEQ ID NO: 92066 - DNA, 17 bp, Arabidopsis thaliana
cttttctccccaaatta

SEQ ID NO: 92067 - DNA, 17 bp, Arabidopsis thaliana
cttttctccgaaggatc

SEQ ID NO: 92068 - DNA, 17 bp, Arabidopsis thaliana
cttttctctaacatgct

SEQ ID NO: 92069 - DNA, 17 bp, Arabidopsis thaliana
cttttctctggttttca

SEQ ID NO: 92070 - DNA, 17 bp, Arabidopsis thaliana
cttttctgactgcggcg

SEQ ID NO: 92071 - DNA, 17 bp, Arabidopsis thaliana
cttttctggatcttgga

SEQ ID NO: 92072 - DNA, 17 bp, Arabidopsis thaliana
cttttctggccctttgt

SEQ ID NO: 92073 - DNA, 17 bp, Arabidopsis thaliana
cttttctgggctgaaac

SEQ ID NO: 92074 - DNA, 17 bp, Arabidopsis thaliana
cttttctgttcaaatgg

SEQ ID NO: 92075 - DNA, 17 bp, Arabidopsis thaliana
cttttctgtttaacagc

SEQ ID NO: 92076 - DNA, 17 bp, Arabidopsis thaliana
cttttcttcatctactt

SEQ ID NO: 92077 - DNA, 17 bp, Arabidopsis thaliana
cttttcttcctgtgatc

SEQ ID NO: 92078 - DNA, 17 bp, Arabidopsis thaliana
cttttcttccttctgct

SEQ ID NO: 92079 - DNA, 17 bp, Arabidopsis thaliana
cttttcttctgatccgc

SEQ ID NO: 92080 - DNA, 17 bp, Arabidopsis thaliana
cttttcttttttgtcgg

SEQ ID NO: 92081 - DNA, 17 bp, Arabidopsis thaliana
cttttgaacatgggatt

SEQ ID NO: 92082 - DNA, 17 bp, Arabidopsis thaliana
cttttgaagggaaggtg

SEQ ID NO: 92083 - DNA, 17 bp, Arabidopsis thaliana
cttttgaattttgtaat

SEQ ID NO: 92084 - DNA, 17 bp, Arabidopsis thaliana
cttttgacctctgaatc

SEQ ID NO: 92085 - DNA, 17 bp, Arabidopsis thaliana
cttttgacgaatagacc

SEQ ID NO: 92086 - DNA, 17 bp, Arabidopsis thaliana
cttttgacgaattgacc

SEQ ID NO: 92087 - DNA, 17 bp, Arabidopsis thaliana
cttttgactagcatttc

SEQ ID NO: 92088 - DNA, 17 bp, Arabidopsis thaliana
cttttgactgagtaacg

SEQ ID NO: 92089 - DNA, 17 bp, Arabidopsis thaliana
cttttgactgttgtccg

SEQ ID NO: 92090 - DNA, 17 bp, Arabidopsis thaliana
cttttgacttgacacgt

SEQ ID NO: 92091 - DNA, 17 bp, Arabidopsis thaliana
cttttgatcgctgtcgc

SEQ ID NO: 92092 - DNA, 17 bp, Arabidopsis thaliana
cttttgatctagccttt

SEQ ID NO: 92093 - DNA, 17 bp, Arabidopsis thaliana
cttttgatctcgagttg

SEQ ID NO: 92094 - DNA, 17 bp, Arabidopsis thaliana
cttttgatgattttgca

SEQ ID NO: 92095 - DNA, 17 bp, Arabidopsis thaliana
cttttgattaccaatca

SEQ ID NO: 92096 - DNA, 17 bp, Arabidopsis thaliana
cttttgcaaaaggtcga

SEQ ID NO: 92097 - DNA, 17 bp, Arabidopsis thaliana
cttttgcaaccaatctt

SEQ ID NO: 92098 - DNA, 17 bp, Arabidopsis thaliana
cttttgcaatctggatc

SEQ ID NO: 92099 - DNA, 17 bp, Arabidopsis thaliana
cttttgcagtgggcact

SEQ ID NO: 92100 - DNA, 17 bp, Arabidopsis thaliana
cttttgccgaccagagt

SEQ ID NO: 92101 - DNA, 17 bp, Arabidopsis thaliana
cttttgccgatggagat

SEQ ID NO: 92102 - DNA, 17 bp, Arabidopsis thaliana
cttttgccgtctttgtt

SEQ ID NO: 92103 - DNA, 17 bp, Arabidopsis thaliana
cttttgcgacggaagta

SEQ ID NO: 92104 - DNA, 17 bp, Arabidopsis thaliana
cttttgcgatggtccct

SEQ ID NO: 92105 - DNA, 17 bp, Arabidopsis thaliana
cttttgcgtccagatct

SEQ ID NO: 92106 - DNA, 17 bp, Arabidopsis thaliana
cttttgcttgaaccggt

SEQ ID NO: 92107 - DNA, 17 bp, Arabidopsis thaliana
cttttgctttgtttcta

SEQ ID NO: 92108 - DNA, 17 bp, Arabidopsis thaliana
cttttggacgctggaca

SEQ ID NO: 92109 - DNA, 17 bp, Arabidopsis thaliana
cttttggatgaggagtt

SEQ ID NO: 92110 - DNA, 17 bp, Arabidopsis thaliana
cttttggcaaatgcccc

SEQ ID NO: 92111 - DNA, 17 bp, Arabidopsis thaliana
cttttggcaaatgcgac

SEQ ID NO: 92112 - DNA, 17 bp, Arabidopsis thaliana
cttttggccatttcaac

SEQ ID NO: 92113 - DNA, 17 bp, Arabidopsis thaliana
cttttggcctgcacacg

SEQ ID NO: 92114 - DNA, 17 bp, Arabidopsis thaliana
cttttggcgtctaaccg

SEQ ID NO: 92115 - DNA, 17 bp, Arabidopsis thaliana
cttttggctcgatttac

SEQ ID NO: 92116 - DNA, 17 bp, Arabidopsis thaliana
cttttggctgagtgata

SEQ ID NO: 92117 - DNA, 17 bp, Arabidopsis thaliana
cttttgggaaaaggttt

SEQ ID NO: 92118 - DNA, 17 bp, Arabidopsis thaliana
cttttgggaccaacagt

SEQ ID NO: 92119 - DNA, 17 bp, Arabidopsis thaliana
cttttgggctgctgcaa

SEQ ID NO: 92120 - DNA, 17 bp, Arabidopsis thaliana
cttttgggtcttcgggt

SEQ ID NO: 92121 - DNA, 17 bp, Arabidopsis thaliana
cttttgggtgtgagtta

SEQ ID NO: 92122 - DNA, 17 bp, Arabidopsis thaliana
cttttgggtgtgagttt

SEQ ID NO: 92123 - DNA, 17 bp, Arabidopsis thaliana
cttttgggttaagttag

SEQ ID NO: 92124 - DNA, 17 bp, Arabidopsis thaliana
cttttggtagttgcaga

SEQ ID NO: 92125 - DNA, 17 bp, Arabidopsis thaliana
cttttggtcgctgtcgc

SEQ ID NO: 92126 - DNA, 17 bp, Arabidopsis thaliana
cttttggtcggtgcttt

SEQ ID NO: 92127 - DNA, 17 bp, Arabidopsis thaliana
cttttggtcgttgtcgc

SEQ ID NO: 92128 - DNA, 17 bp, Arabidopsis thaliana
cttttggtggccaacaa

SEQ ID NO: 92129 - DNA, 17 bp, Arabidopsis thaliana
cttttggttaccaatca

SEQ ID NO: 92130 - DNA, 17 bp, Arabidopsis thaliana
cttttggttgtggactt

SEQ ID NO: 92131 - DNA, 17 bp, Arabidopsis thaliana
cttttgtaacttaggat

SEQ ID NO: 92132 - DNA, 17 bp, Arabidopsis thaliana
cttttgtagacaagctt

SEQ ID NO: 92133 - DNA, 17 bp, Arabidopsis thaliana
cttttgtccgctgtcca

SEQ ID NO: 92134 - DNA, 17 bp, Arabidopsis thaliana
cttttgtcctcaactcg

SEQ ID NO: 92135 - DNA, 17 bp, Arabidopsis thaliana
cttttgtcgctaagatt

SEQ ID NO: 92136 - DNA, 17 bp, Arabidopsis thaliana
cttttgtctctctgtaa

SEQ ID NO: 92137 - DNA, 17 bp, Arabidopsis thaliana
cttttgtggctttgtcg

SEQ ID NO: 92138 - DNA, 17 bp, Arabidopsis thaliana
cttttgttccgctacaa

SEQ ID NO: 92139 - DNA, 17 bp, Arabidopsis thaliana
cttttgttctgagtcct

SEQ ID NO: 92140 - DNA, 17 bp, Arabidopsis thaliana
cttttgttgatcgctgc

SEQ ID NO: 92141 - DNA, 17 bp, Arabidopsis thaliana
cttttgttgttgacagc

SEQ ID NO: 92142 - DNA, 17 bp, Arabidopsis thaliana
ctttttaagtccgccgt

SEQ ID NO: 92143 - DNA, 17 bp, Arabidopsis thaliana
ctttttacagtctctcg

SEQ ID NO: 92144 - DNA, 17 bp, Arabidopsis thaliana
ctttttaccggcggcgg

SEQ ID NO: 92145 - DNA, 17 bp, Arabidopsis thaliana
ctttttaggtcttaggc

SEQ ID NO: 92146 - DNA, 17 bp, Arabidopsis thaliana
ctttttatctggttagg

SEQ ID NO: 92147 - DNA, 17 bp, Arabidopsis thaliana
ctttttcaaactttgcc

SEQ ID NO: 92148 - DNA, 17 bp, Arabidopsis thaliana
ctttttcaaaggccatc

SEQ ID NO: 92149 - DNA, 17 bp, Arabidopsis thaliana
ctttttcaatctggatc

SEQ ID NO: 92150 - DNA, 17 bp, Arabidopsis thaliana
ctttttcagccggggtt

SEQ ID NO: 92151 - DNA, 17 bp, Arabidopsis thaliana
ctttttcaggccttttc

SEQ ID NO: 92152 - DNA, 17 bp, Arabidopsis thaliana
ctttttcagtgagcgag

SEQ ID NO: 92153 - DNA, 17 bp, Arabidopsis thaliana
ctttttcagttgatgtc

SEQ ID NO: 92154 - DNA, 17 bp, Arabidopsis thaliana
ctttttcataaaaacat

SEQ ID NO: 92155 - DNA, 17 bp, Arabidopsis thaliana
ctttttcattaaacttt

SEQ ID NO: 92156 - DNA, 17 bp, Arabidopsis thaliana
ctttttccaactacaat

SEQ ID NO: 92157 - DNA, 17 bp, Arabidopsis thaliana
ctttttccacgcgctgt

SEQ ID NO: 92158 - DNA, 17 bp, Arabidopsis thaliana
ctttttccatgggcgct

SEQ ID NO: 92159 - DNA, 17 bp, Arabidopsis thaliana
ctttttcctcgttttgc

SEQ ID NO: 92160 - DNA, 17 bp, Arabidopsis thaliana
ctttttcctgtccaatt

SEQ ID NO: 92161 - DNA, 17 bp, Arabidopsis thaliana
ctttttcgataaatcta

SEQ ID NO: 92162 - DNA, 17 bp, Arabidopsis thaliana
ctttttcgcagatagtg

SEQ ID NO: 92163 - DNA, 17 bp, Arabidopsis thaliana
ctttttcgcctcagatc

SEQ ID NO: 92164 - DNA, 17 bp, Arabidopsis thaliana
ctttttcgggcattttc

SEQ ID NO: 92165 - DNA, 17 bp, Arabidopsis thaliana
ctttttcggttcggact

SEQ ID NO: 92166 - DNA, 17 bp, Arabidopsis thaliana
ctttttcgtttctggtt

SEQ ID NO: 92167 - DNA, 17 bp, Arabidopsis thaliana
ctttttctactatcctg

SEQ ID NO: 92168 - DNA, 17 bp, Arabidopsis thaliana
ctttttctctgactttg

SEQ ID NO: 92169 - DNA, 17 bp, Arabidopsis thaliana
ctttttctgtcaaccaa

SEQ ID NO: 92170 - DNA, 17 bp, Arabidopsis thaliana
ctttttcttccgtcgca

SEQ ID NO: 92171 - DNA, 17 bp, Arabidopsis thaliana
ctttttgaactatgaga

SEQ ID NO: 92172 - DNA, 17 bp, Arabidopsis thaliana
ctttttgagacatctcg

SEQ ID NO: 92173 - DNA, 17 bp, Arabidopsis thaliana
ctttttgagttctcctt

SEQ ID NO: 92174 - DNA, 17 bp, Arabidopsis thaliana
ctttttgatccttcgat

SEQ ID NO: 92175 - DNA, 17 bp, Arabidopsis thaliana
ctttttgattcttcgat

SEQ ID NO: 92176 - DNA, 17 bp, Arabidopsis thaliana
ctttttgccatttactg

SEQ ID NO: 92177 - DNA, 17 bp, Arabidopsis thaliana
ctttttgctaccacact

SEQ ID NO: 92178 - DNA, 17 bp, Arabidopsis thaliana
ctttttgctgcctcgtt

SEQ ID NO: 92179 - DNA, 17 bp, Arabidopsis thaliana
ctttttggatacagtgg

SEQ ID NO: 92180 - DNA, 17 bp, Arabidopsis thaliana
ctttttggatgtttgtg

SEQ ID NO: 92181 - DNA, 17 bp, Arabidopsis thaliana
ctttttggatttgtgat

SEQ ID NO: 92182 - DNA, 17 bp, Arabidopsis thaliana
ctttttggcaagacgga

SEQ ID NO: 92183 - DNA, 17 bp, Arabidopsis thaliana
ctttttggcggaaaaat

SEQ ID NO: 92184 - DNA, 17 bp, Arabidopsis thaliana
ctttttgggtctaccta

SEQ ID NO: 92185 - DNA, 17 bp, Arabidopsis thaliana
ctttttgtcgctaagat

SEQ ID NO: 92186 - DNA, 17 bp, Arabidopsis thaliana
ctttttgtgatttggat

SEQ ID NO: 92187 - DNA, 17 bp, Arabidopsis thaliana
ctttttgtttacatgac

SEQ ID NO: 92188 - DNA, 17 bp, Arabidopsis thaliana
cttttttaccatccgtg

SEQ ID NO: 92189 - DNA, 17 bp, Arabidopsis thaliana
cttttttagaggacggg

SEQ ID NO: 92190 - DNA, 17 bp, Arabidopsis thaliana
cttttttatcaatgcac

SEQ ID NO: 92191 - DNA, 17 bp, Arabidopsis thaliana
cttttttcacacgctgc

SEQ ID NO: 92192 - DNA, 17 bp, Arabidopsis thaliana
cttttttcacttgggtg

SEQ ID NO: 92193 - DNA, 17 bp, Arabidopsis thaliana
cttttttccgtttccta

SEQ ID NO: 92194 - DNA, 17 bp, Arabidopsis thaliana
cttttttgaagacttga

SEQ ID NO: 92195 - DNA, 17 bp, Arabidopsis thaliana
cttttttgaccggagtt

SEQ ID NO: 92196 - DNA, 17 bp, Arabidopsis thaliana
cttttttgcaagactat

SEQ ID NO: 92197 - DNA, 17 bp, Arabidopsis thaliana
cttttttgggcattttc

SEQ ID NO: 92198 - DNA, 17 bp, Arabidopsis thaliana
cttttttggtgaattcc

SEQ ID NO: 92199 - DNA, 17 bp, Arabidopsis thaliana
cttttttgtggacacga

SEQ ID NO: 92200 - DNA, 17 bp, Arabidopsis thaliana
ctttttttccgttgcga

SEQ ID NO: 92201 - DNA, 17 bp, Arabidopsis thaliana
ctttttttgaagacttg

SEQ ID NO: 92202 - DNA, 17 bp, Arabidopsis thaliana
ctttttttgacaatcaa

SEQ ID NO: 92203 - DNA, 17 bp, Arabidopsis thaliana
ctttttttgctaagaaa

SEQ ID NO: 92204 - DNA, 17 bp, Arabidopsis thaliana
cttttttttagtcgccc

SEQ ID NO: 92205 - DNA, 17 bp, Arabidopsis thaliana
ctttttttttctttcga

SEQ ID NO: 92206 - DNA, 17 bp, Arabidopsis thaliana
gaaaaaaaaaatctccc

SEQ ID NO: 92207 - DNA, 17 bp, Arabidopsis thaliana
gaaaaaaactcatcaaa

SEQ ID NO: 92208 - DNA, 17 bp, Arabidopsis thaliana
gaaaaaaatctctcaga

SEQ ID NO: 92209 - DNA, 17 bp, Arabidopsis thaliana
gaaaaaacccgcagcgg

SEQ ID NO: 92210 - DNA, 17 bp, Arabidopsis thaliana
gaaaaaaccgcagcggt

SEQ ID NO: 92211 - DNA, 17 bp, Arabidopsis thaliana
gaaaaaactgatctgga

SEQ ID NO: 92212 - DNA, 17 bp, Arabidopsis thaliana
gaaaaacagtctatttc

SEQ ID NO: 92213 - DNA, 17 bp, Arabidopsis thaliana
gaaaaaccagatgaaag

SEQ ID NO: 92214 - DNA, 17 bp, Arabidopsis thaliana
gaaaaaccctgtggaga

SEQ ID NO: 92215 - DNA, 17 bp, Arabidopsis thaliana
gaaaaacgagttggcca

SEQ ID NO: 92216 - DNA, 17 bp, Arabidopsis thaliana
gaaaaacggtctatttc

SEQ ID NO: 92217 - DNA, 17 bp, Arabidopsis thaliana
gaaaaacggtctatttt

SEQ ID NO: 92218 - DNA, 17 bp, Arabidopsis thaliana
gaaaaacgtgacttttc

SEQ ID NO: 92219 - DNA, 17 bp, Arabidopsis thaliana
gaaaaactacatcttgg

SEQ ID NO: 92220 - DNA, 17 bp, Arabidopsis thaliana
gaaaaactcgtgttgct

SEQ ID NO: 92221 - DNA, 17 bp, Arabidopsis thaliana
gaaaaactctgagatac

SEQ ID NO: 92222 - DNA, 17 bp, Arabidopsis thaliana
gaaaaactggttcatgc

SEQ ID NO: 92223 - DNA, 17 bp, Arabidopsis thaliana
gaaaaactgtgactaat

SEQ ID NO: 92224 - DNA, 17 bp, Arabidopsis thaliana
gaaaaagacgatctacg

SEQ ID NO: 92225 - DNA, 17 bp, Arabidopsis thaliana
gaaaaagactccggcga

SEQ ID NO: 92226 - DNA, 17 bp, Arabidopsis thaliana
gaaaaagcacgagattt

SEQ ID NO: 92227 - DNA, 17 bp, Arabidopsis thaliana
gaaaaagcctcgagtgt

SEQ ID NO: 92228 - DNA, 17 bp, Arabidopsis thaliana
gaaaaagcctctgacgc

SEQ ID NO: 92229 - DNA, 17 bp, Arabidopsis thaliana
gaaaaagctacttctcg

SEQ ID NO: 92230 - DNA, 17 bp, Arabidopsis thaliana
gaaaaagctacttttcg

SEQ ID NO: 92231 - DNA, 17 bp, Arabidopsis thaliana
gaaaaagctggtcattc

SEQ ID NO: 92232 - DNA, 17 bp, Arabidopsis thaliana
gaaaaagggatgacttg

SEQ ID NO: 92233 - DNA, 17 bp, Arabidopsis thaliana
gaaaaagggattgtgac

SEQ ID NO: 92234 - DNA, 17 bp, Arabidopsis thaliana
gaaaaaggtcttccggg

SEQ ID NO: 92235 - DNA, 17 bp, Arabidopsis thaliana
gaaaaagtatcacatgc

SEQ ID NO: 92236 - DNA, 17 bp, Arabidopsis thaliana
gaaaaagtctcacatgc

SEQ ID NO: 92237 - DNA, 17 bp, Arabidopsis thaliana
gaaaaagtgactagttt

SEQ ID NO: 92238 - DNA, 17 bp, Arabidopsis thaliana
gaaaaagtgactatttt

SEQ ID NO: 92239 - DNA, 17 bp, Arabidopsis thaliana
gaaaaagttccattgtc

SEQ ID NO: 92240 - DNA, 17 bp, Arabidopsis thaliana
gaaaaagttcgtcttta

SEQ ID NO: 92241 - DNA, 17 bp, Arabidopsis thaliana
gaaaaagttgcgccgta

SEQ ID NO: 92242 - DNA, 17 bp, Arabidopsis thaliana
gaaaaatccgtaccgaa

SEQ ID NO: 92243 - DNA, 17 bp, Arabidopsis thaliana
gaaaaatgtcacaaaaa

SEQ ID NO: 92244 - DNA, 17 bp, Arabidopsis thaliana
gaaaaatgtttatggcc

SEQ ID NO: 92245 - DNA, 17 bp, Arabidopsis thaliana
gaaaaattacgggcttc

SEQ ID NO: 92246 - DNA, 17 bp, Arabidopsis thaliana
gaaaaattagaccgctt

SEQ ID NO: 92247 - DNA, 17 bp, Arabidopsis thaliana
gaaaaattgagctcaga

SEQ ID NO: 92248 - DNA, 17 bp, Arabidopsis thaliana
gaaaaattgttttttta

SEQ ID NO: 92249 - DNA, 17 bp, Arabidopsis thaliana
gaaaacaaactgtaaca

SEQ ID NO: 92250 - DNA, 17 bp, Arabidopsis thaliana
gaaaacactgaccactg

SEQ ID NO: 92251 - DNA, 17 bp, Arabidopsis thaliana
gaaaacactggccattc

SEQ ID NO: 92252 - DNA, 17 bp, Arabidopsis thaliana
gaaaacagagacgattc

SEQ ID NO: 92253 - DNA, 17 bp, Arabidopsis thaliana
gaaaacagatattgatg

SEQ ID NO: 92254 - DNA, 17 bp, Arabidopsis thaliana
gaaaacaggatcttaaa

SEQ ID NO: 92255 - DNA, 17 bp, Arabidopsis thaliana
gaaaacagggacgattc

SEQ ID NO: 92256 - DNA, 17 bp, Arabidopsis thaliana
gaaaacagtgtgtaatt

SEQ ID NO: 92257 - DNA, 17 bp, Arabidopsis thaliana
gaaaacatctgatcgtt

SEQ ID NO: 92258 - DNA, 17 bp, Arabidopsis thaliana
gaaaacatgagattgcg

SEQ ID NO: 92259 - DNA, 17 bp, Arabidopsis thaliana
gaaaacattccaaactc

SEQ ID NO: 92260 - DNA, 17 bp, Arabidopsis thaliana
gaaaaccaacctccaat

SEQ ID NO: 92261 - DNA, 17 bp, Arabidopsis thaliana
gaaaaccacctttcact

SEQ ID NO: 92262 - DNA, 17 bp, Arabidopsis thaliana
gaaaaccagttctcact

SEQ ID NO: 92263 - DNA, 17 bp, Arabidopsis thaliana
gaaaacccgtccctcca

SEQ ID NO: 92264 - DNA, 17 bp, Arabidopsis thaliana
gaaaacccgtgattttt

SEQ ID NO: 92265 - DNA, 17 bp, Arabidopsis thaliana
gaaaacccgtgtttttc

SEQ ID NO: 92266 - DNA, 17 bp, Arabidopsis thaliana
gaaaaccgaacagggga

SEQ ID NO: 92267 - DNA, 17 bp, Arabidopsis thaliana
gaaaaccgagattgtgg

SEQ ID NO: 92268 - DNA, 17 bp, Arabidopsis thaliana
gaaaaccgcagcggatc

SEQ ID NO: 92269 - DNA, 17 bp, Arabidopsis thaliana
gaaaaccgcccgttttt

SEQ ID NO: 92270 - DNA, 17 bp, Arabidopsis thaliana
gaaaaccggcaaggcag

SEQ ID NO: 92271 - DNA, 17 bp, Arabidopsis thaliana
gaaaaccggcaaggcca

SEQ ID NO: 92272 - DNA, 17 bp, Arabidopsis thaliana
gaaaaccggggtgttac

SEQ ID NO: 92273 - DNA, 17 bp, Arabidopsis thaliana
gaaaaccggtaatccct

SEQ ID NO: 92274 - DNA, 17 bp, Arabidopsis thaliana
gaaaacctagaacttcc

SEQ ID NO: 92275 - DNA, 17 bp, Arabidopsis thaliana
gaaaacgaatctggcgt

SEQ ID NO: 92276 - DNA, 17 bp, Arabidopsis thaliana
gaaaacgactatcccgg

SEQ ID NO: 92277 - DNA, 17 bp, Arabidopsis thaliana
gaaaacgcagttaagcg

SEQ ID NO: 92278 - DNA, 17 bp, Arabidopsis thaliana
gaaaacgcatagttgga

SEQ ID NO: 92279 - DNA, 17 bp, Arabidopsis thaliana
gaaaacgccattatgcc

SEQ ID NO: 92280 - DNA, 17 bp, Arabidopsis thaliana
gaaaacgctggccattc

SEQ ID NO: 92281 - DNA, 17 bp, Arabidopsis thaliana
gaaaacgctggtcattc

SEQ ID NO: 92282 - DNA, 17 bp, Arabidopsis thaliana
gaaaacggcaagatacc

SEQ ID NO: 92283 - DNA, 17 bp, Arabidopsis thaliana
gaaaactaaccggactt

SEQ ID NO: 92284 - DNA, 17 bp, Arabidopsis thaliana
gaaaactaatctggttt

SEQ ID NO: 92285 - DNA, 17 bp, Arabidopsis thaliana
gaaaactaccctttccc

SEQ ID NO: 92286 - DNA, 17 bp, Arabidopsis thaliana
gaaaactagaacctcaa

SEQ ID NO: 92287 - DNA, 17 bp, Arabidopsis thaliana
gaaaactatgagcggtt

SEQ ID NO: 92288 - DNA, 17 bp, Arabidopsis thaliana
gaaaactcggagctcga

SEQ ID NO: 92289 - DNA, 17 bp, Arabidopsis thaliana
gaaaactgaaattttcc

SEQ ID NO: 92290 - DNA, 17 bp, Arabidopsis thaliana
gaaaactgagcactttt

SEQ ID NO: 92291 - DNA, 17 bp, Arabidopsis thaliana
gaaaactggcgatttcg

SEQ ID NO: 92292 - DNA, 17 bp, Arabidopsis thaliana
gaaaactgggtggtcga

SEQ ID NO: 92293 - DNA, 17 bp, Arabidopsis thaliana
gaaaacttgaaaaagcg

SEQ ID NO: 92294 - DNA, 17 bp, Arabidopsis thaliana
gaaaactttgacttttg

SEQ ID NO: 92295 - DNA, 17 bp, Arabidopsis thaliana
gaaaacttttccggcga

SEQ ID NO: 92296 - DNA, 17 bp, Arabidopsis thaliana
gaaaactttttcgactc

SEQ ID NO: 92297 - DNA, 17 bp, Arabidopsis thaliana
gaaaactttttcgactt

SEQ ID NO: 92298 - DNA, 17 bp, Arabidopsis thaliana
gaaaagaaatcaggtgg

SEQ ID NO: 92299 - DNA, 17 bp, Arabidopsis thaliana
gaaaagaacccccatcg

SEQ ID NO: 92300 - DNA, 17 bp, Arabidopsis thaliana
gaaaagacaattttggt

SEQ ID NO: 92301 - DNA, 17 bp, Arabidopsis thaliana
gaaaagacacaagcaga

SEQ ID NO: 92302 - DNA, 17 bp, Arabidopsis thaliana
gaaaagacatcactggt

SEQ ID NO: 92303 - DNA, 17 bp, Arabidopsis thaliana
gaaaagacatcactgtc

SEQ ID NO: 92304 - DNA, 17 bp, Arabidopsis thaliana
gaaaagacttcgttggc

SEQ ID NO: 92305 - DNA, 17 bp, Arabidopsis thaliana
gaaaagagcaatcatcc

SEQ ID NO: 92306 - DNA, 17 bp, Arabidopsis thaliana
gaaaagagcagtcatcc

SEQ ID NO: 92307 - DNA, 17 bp, Arabidopsis thaliana
gaaaagatcatgtggtg

SEQ ID NO: 92308 - DNA, 17 bp, Arabidopsis thaliana
gaaaagattcggccctg

SEQ ID NO: 92309 - DNA, 17 bp, Arabidopsis thaliana
gaaaagcacttacggcc

SEQ ID NO: 92310 - DNA, 17 bp, Arabidopsis thaliana
gaaaagcagcaggatgt

SEQ ID NO: 92311 - DNA, 17 bp, Arabidopsis thaliana
gaaaagccagtggcgcg

SEQ ID NO: 92312 - DNA, 17 bp, Arabidopsis thaliana
gaaaagcgaccggatat

SEQ ID NO: 92313 - DNA, 17 bp, Arabidopsis thaliana
gaaaagcggtctgtcag

SEQ ID NO: 92314 - DNA, 17 bp, Arabidopsis thaliana
gaaaagctaccgcatga

SEQ ID NO: 92315 - DNA, 17 bp, Arabidopsis thaliana
gaaaagctttctctctc

SEQ ID NO: 92316 - DNA, 17 bp, Arabidopsis thaliana
gaaaaggattggctctg

SEQ ID NO: 92317 - DNA, 17 bp, Arabidopsis thaliana
gaaaaggattgggtctg

SEQ ID NO: 92318 - DNA, 17 bp, Arabidopsis thaliana
gaaaaggcctaagtgtg

SEQ ID NO: 92319 - DNA, 17 bp, Arabidopsis thaliana
gaaaagggcgtctgttt

SEQ ID NO: 92320 - DNA, 17 bp, Arabidopsis thaliana
gaaaaggggtagtgtgg

SEQ ID NO: 92321 - DNA, 17 bp, Arabidopsis thaliana
gaaaagggtttctcctg

SEQ ID NO: 92322 - DNA, 17 bp, Arabidopsis thaliana
gaaaagggtttgacatt

SEQ ID NO: 92323 - DNA, 17 bp, Arabidopsis thaliana
gaaaaggtatcacatgc

SEQ ID NO: 92324 - DNA, 17 bp, Arabidopsis thaliana
gaaaaggtatggcatgc

SEQ ID NO: 92325 - DNA, 17 bp, Arabidopsis thaliana
gaaaagtcgtatgggct

SEQ ID NO: 92326 - DNA, 17 bp, Arabidopsis thaliana
gaaaagtcttatgggaa

SEQ ID NO: 92327 - DNA, 17 bp, Arabidopsis thaliana
gaaaagtgaccgctggt

SEQ ID NO: 92328 - DNA, 17 bp, Arabidopsis thaliana
gaaaagtgggctaggtg

SEQ ID NO: 92329 - DNA, 17 bp, Arabidopsis thaliana
gaaaagtgtcgtctgtc

SEQ ID NO: 92330 - DNA, 17 bp, Arabidopsis thaliana
gaaaagttaagctgagg

SEQ ID NO: 92331 - DNA, 17 bp, Arabidopsis thaliana
gaaaagttaccacaggg

SEQ ID NO: 92332 - DNA, 17 bp, Arabidopsis thaliana
gaaaagttcattctttc

SEQ ID NO: 92333 - DNA, 17 bp, Arabidopsis thaliana
gaaaagttccattgtcc

SEQ ID NO: 92334 - DNA, 17 bp, Arabidopsis thaliana
gaaaagttccattgtct

SEQ ID NO: 92335 - DNA, 17 bp, Arabidopsis thaliana
gaaaagttcgcactgaa

SEQ ID NO: 92336 - DNA, 17 bp, Arabidopsis thaliana
gaaaagttgagattcca

SEQ ID NO: 92337 - DNA, 17 bp, Arabidopsis thaliana
gaaaagttgtcgacggt

SEQ ID NO: 92338 - DNA, 17 bp, Arabidopsis thaliana
gaaaagtttccgggatc

SEQ ID NO: 92339 - DNA, 17 bp, Arabidopsis thaliana
gaaaatagactacatag

SEQ ID NO: 92340 - DNA, 17 bp, Arabidopsis thaliana
gaaaatagagctgtcca

SEQ ID NO: 92341 - DNA, 17 bp, Arabidopsis thaliana
gaaaatagaggctgatg

SEQ ID NO: 92342 - DNA, 17 bp, Arabidopsis thaliana
gaaaatagctacttgtc

SEQ ID NO: 92343 - DNA, 17 bp, Arabidopsis thaliana
gaaaatatagcaagtgt

SEQ ID NO: 92344 - DNA, 17 bp, Arabidopsis thaliana
gaaaatataggcccgcg

SEQ ID NO: 92345 - DNA, 17 bp, Arabidopsis thaliana
gaaaatcaaagggttgc

SEQ ID NO: 92346 - DNA, 17 bp, Arabidopsis thaliana
gaaaatcagccaggttg

SEQ ID NO: 92347 - DNA, 17 bp, Arabidopsis thaliana
gaaaatcccggcggcaa

SEQ ID NO: 92348 - DNA, 17 bp, Arabidopsis thaliana
gaaaatccggaggaccg

SEQ ID NO: 92349 - DNA, 17 bp, Arabidopsis thaliana
gaaaatccgtgattttt

SEQ ID NO: 92350 - DNA, 17 bp, Arabidopsis thaliana
gaaaatcgaactgatat

SEQ ID NO: 92351 - DNA, 17 bp, Arabidopsis thaliana
gaaaatcggcggaggag

SEQ ID NO: 92352 - DNA, 17 bp, Arabidopsis thaliana
gaaaatcgttgaccggt

SEQ ID NO: 92353 - DNA, 17 bp, Arabidopsis thaliana
gaaaatctctcagatgt

SEQ ID NO: 92354 - DNA, 17 bp, Arabidopsis thaliana
gaaaatctggtggaagg

SEQ ID NO: 92355 - DNA, 17 bp, Arabidopsis thaliana
gaaaatcttcgactcaa

SEQ ID NO: 92356 - DNA, 17 bp, Arabidopsis thaliana
gaaaatgacaaactaca

SEQ ID NO: 92357 - DNA, 17 bp, Arabidopsis thaliana
gaaaatgacgaaaatag

SEQ ID NO: 92358 - DNA, 17 bp, Arabidopsis thaliana
gaaaatgacgagatgtg

SEQ ID NO: 92359 - DNA, 17 bp, Arabidopsis thaliana
gaaaatgacttttggcg

SEQ ID NO: 92360 - DNA, 17 bp, Arabidopsis thaliana
gaaaatgcaggccattc

SEQ ID NO: 92361 - DNA, 17 bp, Arabidopsis thaliana
gaaaatgcccgaaaaag

SEQ ID NO: 92362 - DNA, 17 bp, Arabidopsis thaliana
gaaaatgcctgatccat

SEQ ID NO: 92363 - DNA, 17 bp, Arabidopsis thaliana
gaaaatgctggccattc

SEQ ID NO: 92364 - DNA, 17 bp, Arabidopsis thaliana
gaaaatggcatagtgtg

SEQ ID NO: 92365 - DNA, 17 bp, Arabidopsis thaliana
gaaaatggccacgtgga

SEQ ID NO: 92366 - DNA, 17 bp, Arabidopsis thaliana
gaaaatgtcgtctttcg

SEQ ID NO: 92367 - DNA, 17 bp, Arabidopsis thaliana
gaaaatgtctcttccac

SEQ ID NO: 92368 - DNA, 17 bp, Arabidopsis thaliana
gaaaatgttttcaggct

SEQ ID NO: 92369 - DNA, 17 bp, Arabidopsis thaliana
gaaaattacgggttttg

SEQ ID NO: 92370 - DNA, 17 bp, Arabidopsis thaliana
gaaaattccagcgtcta

SEQ ID NO: 92371 - DNA, 17 bp, Arabidopsis thaliana
gaaaattgtggaagtaa

SEQ ID NO: 92372 - DNA, 17 bp, Arabidopsis thaliana
gaaaattgtggaagtca

SEQ ID NO: 92373 - DNA, 17 bp, Arabidopsis thaliana
gaaaattgtgtgcaaga

SEQ ID NO: 92374 - DNA, 17 bp, Arabidopsis thaliana
gaaaatttaccaggagt

SEQ ID NO: 92375 - DNA, 17 bp, Arabidopsis thaliana
gaaaatttttcagatgt

SEQ ID NO: 92376 - DNA, 17 bp, Arabidopsis thaliana
gaaacaaaacttgtcac

SEQ ID NO: 92377 - DNA, 17 bp, Arabidopsis thaliana
gaaacaaaagtggacgg

SEQ ID NO: 92378 - DNA, 17 bp, Arabidopsis thaliana
gaaacaaagcactaact

SEQ ID NO: 92379 - DNA, 17 bp, Arabidopsis thaliana
gaaacaacctcgtgggg

SEQ ID NO: 92380 - DNA, 17 bp, Arabidopsis thaliana
gaaacaacgtcatctac

SEQ ID NO: 92381 - DNA, 17 bp, Arabidopsis thaliana
gaaacaactatgaccgt

SEQ ID NO: 92382 - DNA, 17 bp, Arabidopsis thaliana
gaaacaagaaaggtgac

SEQ ID NO: 92383 - DNA, 17 bp, Arabidopsis thaliana
gaaacaaggttagatag

SEQ ID NO: 92384 - DNA, 17 bp, Arabidopsis thaliana
gaaacaagtgcggatca

SEQ ID NO: 92385 - DNA, 17 bp, Arabidopsis thaliana
gaaacaatcttgcttta

SEQ ID NO: 92386 - DNA, 17 bp, Arabidopsis thaliana
gaaacaatgcttaccgg

SEQ ID NO: 92387 - DNA, 17 bp, Arabidopsis thaliana
gaaacaattgattgtga

SEQ ID NO: 92388 - DNA, 17 bp, Arabidopsis thaliana
gaaacaccgattccgag

SEQ ID NO: 92389 - DNA, 17 bp, Arabidopsis thaliana
gaaacaccgatttcaag

SEQ ID NO: 92390 - DNA, 17 bp, Arabidopsis thaliana
gaaacactccaagatcg

SEQ ID NO: 92391 - DNA, 17 bp, Arabidopsis thaliana
gaaacactttgattgac

SEQ ID NO: 92392 - DNA, 17 bp, Arabidopsis thaliana
gaaacagacagtgtggt

SEQ ID NO: 92393 - DNA, 17 bp, Arabidopsis thaliana
gaaacagaccggagatt

SEQ ID NO: 92394 - DNA, 17 bp, Arabidopsis thaliana
gaaacagactatgaggc

SEQ ID NO: 92395 - DNA, 17 bp, Arabidopsis thaliana
gaaacagagccgaccac

SEQ ID NO: 92396 - DNA, 17 bp, Arabidopsis thaliana
gaaacagagtcagatcc

SEQ ID NO: 92397 - DNA, 17 bp, Arabidopsis thaliana
gaaacagatttgagatc

SEQ ID NO: 92398 - DNA, 17 bp, Arabidopsis thaliana
gaaacagcagccaagcg

SEQ ID NO: 92399 - DNA, 17 bp, Arabidopsis thaliana
gaaacagcccttttgat

SEQ ID NO: 92400 - DNA, 17 bp, Arabidopsis thaliana
gaaacagcgtatctctc

SEQ ID NO: 92401 - DNA, 17 bp, Arabidopsis thaliana
gaaacagctataccacg

SEQ ID NO: 92402 - DNA, 17 bp, Arabidopsis thaliana
gaaacaggaatccgagt

SEQ ID NO: 92403 - DNA, 17 bp, Arabidopsis thaliana
gaaacaggggaacgcct

SEQ ID NO: 92404 - DNA, 17 bp, Arabidopsis thaliana
gaaacagtccttgctaa

SEQ ID NO: 92405 - DNA, 17 bp, Arabidopsis thaliana
gaaacagtggttccggg

SEQ ID NO: 92406 - DNA, 17 bp, Arabidopsis thaliana
gaaacagttcagaaacg

SEQ ID NO: 92407 - DNA, 17 bp, Arabidopsis thaliana
gaaacagttggcgtcga

SEQ ID NO: 92408 - DNA, 17 bp, Arabidopsis thaliana
gaaacataacaaggacg

SEQ ID NO: 92409 - DNA, 17 bp, Arabidopsis thaliana
gaaacatatgtcaggag

SEQ ID NO: 92410 - DNA, 17 bp, Arabidopsis thaliana
gaaacatcctcactttg

SEQ ID NO: 92411 - DNA, 17 bp, Arabidopsis thaliana
gaaacatctgcagtctt

SEQ ID NO: 92412 - DNA, 17 bp, Arabidopsis thaliana
gaaacatgatgtggttt

SEQ ID NO: 92413 - DNA, 17 bp, Arabidopsis thaliana
gaaacatggtaaggcta

SEQ ID NO: 92414 - DNA, 17 bp, Arabidopsis thaliana
gaaacattagaccatcc

SEQ ID NO: 92415 - DNA, 17 bp, Arabidopsis thaliana
gaaacatttgctgtggc

SEQ ID NO: 92416 - DNA, 17 bp, Arabidopsis thaliana
gaaacatttggcggtgt

SEQ ID NO: 92417 - DNA, 17 bp, Arabidopsis thaliana
gaaacattttctgctta

SEQ ID NO: 92418 - DNA, 17 bp, Arabidopsis thaliana
gaaaccaaagcaaatac

SEQ ID NO: 92419 - DNA, 17 bp, Arabidopsis thaliana
gaaaccaaagcaaatgc

SEQ ID NO: 92420 - DNA, 17 bp, Arabidopsis thaliana
gaaaccaaatctctcgg

SEQ ID NO: 92421 - DNA, 17 bp, Arabidopsis thaliana
gaaaccaactgttgtac

SEQ ID NO: 92422 - DNA, 17 bp, Arabidopsis thaliana
gaaaccacagccaaggg

SEQ ID NO: 92423 - DNA, 17 bp, Arabidopsis thaliana
gaaaccacagggggact

SEQ ID NO: 92424 - DNA, 17 bp, Arabidopsis thaliana
gaaaccaccgtcggaac

SEQ ID NO: 92425 - DNA, 17 bp, Arabidopsis thaliana
gaaacccaaaacgacgt

SEQ ID NO: 92426 - DNA, 17 bp, Arabidopsis thaliana
gaaaccccaatctgtat

SEQ ID NO: 92427 - DNA, 17 bp, Arabidopsis thaliana
gaaacccccttggctca

SEQ ID NO: 92428 - DNA, 17 bp, Arabidopsis thaliana
gaaacccgtaatccccc

SEQ ID NO: 92429 - DNA, 17 bp, Arabidopsis thaliana
gaaacccgtaatccctt

SEQ ID NO: 92430 - DNA, 17 bp, Arabidopsis thaliana
gaaacccgtaatcctcc

SEQ ID NO: 92431 - DNA, 17 bp, Arabidopsis thaliana
gaaacccgtaattcccc

SEQ ID NO: 92432 - DNA, 17 bp, Arabidopsis thaliana
gaaacccgtaatttctc

SEQ ID NO: 92433 - DNA, 17 bp, Arabidopsis thaliana
gaaaccctcgtcttgtg

SEQ ID NO: 92434 - DNA, 17 bp, Arabidopsis thaliana
gaaaccgaacaccgttc

SEQ ID NO: 92435 - DNA, 17 bp, Arabidopsis thaliana
gaaaccgaagttcctaa

SEQ ID NO: 92436 - DNA, 17 bp, Arabidopsis thaliana
gaaaccgacacaggtgg

SEQ ID NO: 92437 - DNA, 17 bp, Arabidopsis thaliana
gaaaccgcaaccgcccg

SEQ ID NO: 92438 - DNA, 17 bp, Arabidopsis thaliana
gaaaccgcaaccgtccg

SEQ ID NO: 92439 - DNA, 17 bp, Arabidopsis thaliana
gaaaccgccatggattg

SEQ ID NO: 92440 - DNA, 17 bp, Arabidopsis thaliana
gaaaccgctaagattga

SEQ ID NO: 92441 - DNA, 17 bp, Arabidopsis thaliana
gaaaccgctgcctcgac

SEQ ID NO: 92442 - DNA, 17 bp, Arabidopsis thaliana
gaaaccggctggttcat

SEQ ID NO: 92443 - DNA, 17 bp, Arabidopsis thaliana
gaaaccgtagctccatc

SEQ ID NO: 92444 - DNA, 17 bp, Arabidopsis thaliana
gaaaccgtgtgatctac

SEQ ID NO: 92445 - DNA, 17 bp, Arabidopsis thaliana
gaaacctaagatcgttg

SEQ ID NO: 92446 - DNA, 17 bp, Arabidopsis thaliana
gaaacctaagcactttt

SEQ ID NO: 92447 - DNA, 17 bp, Arabidopsis thaliana
gaaacctaagcggaact

SEQ ID NO: 92448 - DNA, 17 bp, Arabidopsis thaliana
gaaacctaggtctgttt

SEQ ID NO: 92449 - DNA, 17 bp, Arabidopsis thaliana
gaaacctctacaatgca

SEQ ID NO: 92450 - DNA, 17 bp, Arabidopsis thaliana
gaaacctgcatgggcca

SEQ ID NO: 92451 - DNA, 17 bp, Arabidopsis thaliana
gaaacctgcggttgcgg

SEQ ID NO: 92452 - DNA, 17 bp, Arabidopsis thaliana
gaaacctggctctgata

SEQ ID NO: 92453 - DNA, 17 bp, Arabidopsis thaliana
gaaacctggctctgcta

SEQ ID NO: 92454 - DNA, 17 bp, Arabidopsis thaliana
gaaaccttctaatcgcc

SEQ ID NO: 92455 - DNA, 17 bp, Arabidopsis thaliana
gaaaccttctaatctcc

SEQ ID NO: 92456 - DNA, 17 bp, Arabidopsis thaliana
gaaaccttctattttcc

SEQ ID NO: 92457 - DNA, 17 bp, Arabidopsis thaliana
gaaaccttttgatcact

SEQ ID NO: 92458 - DNA, 17 bp, Arabidopsis thaliana
gaaacgaacaagttctc

SEQ ID NO: 92459 - DNA, 17 bp, Arabidopsis thaliana
gaaacgaacccaagcag

SEQ ID NO: 92460 - DNA, 17 bp, Arabidopsis thaliana
gaaacgaagagatgtgt

SEQ ID NO: 92461 - DNA, 17 bp, Arabidopsis thaliana
gaaacgacgtcgttttg

SEQ ID NO: 92462 - DNA, 17 bp, Arabidopsis thaliana
gaaacgactctcggcaa

SEQ ID NO: 92463 - DNA, 17 bp, Arabidopsis thaliana
gaaacgagcgtcccttc

SEQ ID NO: 92464 - DNA, 17 bp, Arabidopsis thaliana
gaaacgatgattgggct

SEQ ID NO: 92465 - DNA, 17 bp, Arabidopsis thaliana
gaaacgatttggcgacc

SEQ ID NO: 92466 - DNA, 17 bp, Arabidopsis thaliana
gaaacgcaccgtcttgg

SEQ ID NO: 92467 - DNA, 17 bp, Arabidopsis thaliana
gaaacgcgcggatgtgt

SEQ ID NO: 92468 - DNA, 17 bp, Arabidopsis thaliana
gaaacgcggattacggt

SEQ ID NO: 92469 - DNA, 17 bp, Arabidopsis thaliana
gaaacgcggttcactac

SEQ ID NO: 92470 - DNA, 17 bp, Arabidopsis thaliana
gaaacgcgtatgactga

SEQ ID NO: 92471 - DNA, 17 bp, Arabidopsis thaliana
gaaacgctgatgtccct

SEQ ID NO: 92472 - DNA, 17 bp, Arabidopsis thaliana
gaaacgctgcgtttgcg

SEQ ID NO: 92473 - DNA, 17 bp, Arabidopsis thaliana
gaaacgcttactggcct

SEQ ID NO: 92474 - DNA, 17 bp, Arabidopsis thaliana
gaaacggaccggagatg

SEQ ID NO: 92475 - DNA, 17 bp, Arabidopsis thaliana
gaaacggatcatgttca

SEQ ID NO: 92476 - DNA, 17 bp, Arabidopsis thaliana
gaaacggcccgcacggt

SEQ ID NO: 92477 - DNA, 17 bp, Arabidopsis thaliana
gaaacggctacagtttc

SEQ ID NO: 92478 - DNA, 17 bp, Arabidopsis thaliana
gaaacggctcagccgga

SEQ ID NO: 92479 - DNA, 17 bp, Arabidopsis thaliana
gaaacgggacttgattg

SEQ ID NO: 92480 - DNA, 17 bp, Arabidopsis thaliana
gaaacgggtcggtttga

SEQ ID NO: 92481 - DNA, 17 bp, Arabidopsis thaliana
gaaacggtccaacgaaa

SEQ ID NO: 92482 - DNA, 17 bp, Arabidopsis thaliana
gaaacggttcagtgcga

SEQ ID NO: 92483 - DNA, 17 bp, Arabidopsis thaliana
gaaacggttcgtagtta

SEQ ID NO: 92484 - DNA, 17 bp, Arabidopsis thaliana
gaaacgtgcggccgtgg

SEQ ID NO: 92485 - DNA, 17 bp, Arabidopsis thaliana
gaaactaaacgttgacc

SEQ ID NO: 92486 - DNA, 17 bp, Arabidopsis thaliana
gaaactaaccgcgctgg

SEQ ID NO: 92487 - DNA, 17 bp, Arabidopsis thaliana
gaaactaaccggattag

SEQ ID NO: 92488 - DNA, 17 bp, Arabidopsis thaliana
gaaactaaccggatttt

SEQ ID NO: 92489 - DNA, 17 bp, Arabidopsis thaliana
gaaactaagtccgcagc

SEQ ID NO: 92490 - DNA, 17 bp, Arabidopsis thaliana
gaaactaatcagtgtcg

SEQ ID NO: 92491 - DNA, 17 bp, Arabidopsis thaliana
gaaactacaatgcttct

SEQ ID NO: 92492 - DNA, 17 bp, Arabidopsis thaliana
gaaactaccctatcagc

SEQ ID NO: 92493 - DNA, 17 bp, Arabidopsis thaliana
gaaactactccagccca

SEQ ID NO: 92494 - DNA, 17 bp, Arabidopsis thaliana
gaaactagaggaagcct

SEQ ID NO: 92495 - DNA, 17 bp, Arabidopsis thaliana
gaaactagccgggtgtt

SEQ ID NO: 92496 - DNA, 17 bp, Arabidopsis thaliana
gaaactaggaggtcagt

SEQ ID NO: 92497 - DNA, 17 bp, Arabidopsis thaliana
gaaactatatgaagatc

SEQ ID NO: 92498 - DNA, 17 bp, Arabidopsis thaliana
gaaactatgattttggt

SEQ ID NO: 92499 - DNA, 17 bp, Arabidopsis thaliana
gaaactatgtgcatagg

SEQ ID NO: 92500 - DNA, 17 bp, Arabidopsis thaliana
gaaactcaaacccattt

SEQ ID NO: 92501 - DNA, 17 bp, Arabidopsis thaliana
gaaactcaaacgtggtt

SEQ ID NO: 92502 - DNA, 17 bp, Arabidopsis thaliana
gaaactcacggccatgg

SEQ ID NO: 92503 - DNA, 17 bp, Arabidopsis thaliana
gaaactcactcagatct

SEQ ID NO: 92504 - DNA, 17 bp, Arabidopsis thaliana
gaaactcaggatggata

SEQ ID NO: 92505 - DNA, 17 bp, Arabidopsis thaliana
gaaactcatagccgacg

SEQ ID NO: 92506 - DNA, 17 bp, Arabidopsis thaliana
gaaactcatttggatgg

SEQ ID NO: 92507 - DNA, 17 bp, Arabidopsis thaliana
gaaactcccaatggaaa

SEQ ID NO: 92508 - DNA, 17 bp, Arabidopsis thaliana
gaaactcccagaacatc

SEQ ID NO: 92509 - DNA, 17 bp, Arabidopsis thaliana
gaaactcccgtccttct

SEQ ID NO: 92510 - DNA, 17 bp, Arabidopsis thaliana
gaaactcgacatctctc

SEQ ID NO: 92511 - DNA, 17 bp, Arabidopsis thaliana
gaaactcgattgtctcc

SEQ ID NO: 92512 - DNA, 17 bp, Arabidopsis thaliana
gaaactcggacatttgc

SEQ ID NO: 92513 - DNA, 17 bp, Arabidopsis thaliana
gaaactcggaccgtgag

SEQ ID NO: 92514 - DNA, 17 bp, Arabidopsis thaliana
gaaactcgtaatcccct

SEQ ID NO: 92515 - DNA, 17 bp, Arabidopsis thaliana
gaaactctctctgaggt

SEQ ID NO: 92516 - DNA, 17 bp, Arabidopsis thaliana
gaaactctggtggaagc

SEQ ID NO: 92517 - DNA, 17 bp, Arabidopsis thaliana
gaaactcttctgccttg

SEQ ID NO: 92518 - DNA, 17 bp, Arabidopsis thaliana
gaaactctttttgtgcc

SEQ ID NO: 92519 - DNA, 17 bp, Arabidopsis thaliana
gaaactgacggagccgg

SEQ ID NO: 92520 - DNA, 17 bp, Arabidopsis thaliana
gaaactgagttaaggct

SEQ ID NO: 92521 - DNA, 17 bp, Arabidopsis thaliana
gaaactgagttacaatc

SEQ ID NO: 92522 - DNA, 17 bp, Arabidopsis thaliana
gaaactgatcacctatg

SEQ ID NO: 92523 - DNA, 17 bp, Arabidopsis thaliana
gaaactgatcactgcag

SEQ ID NO: 92524 - DNA, 17 bp, Arabidopsis thaliana
gaaactgcctatctatc

SEQ ID NO: 92525 - DNA, 17 bp, Arabidopsis thaliana
gaaactgcgaatggctc

SEQ ID NO: 92526 - DNA, 17 bp, Arabidopsis thaliana
gaaactgcggatggctc

SEQ ID NO: 92527 - DNA, 17 bp, Arabidopsis thaliana
gaaactgcttgtttctg

SEQ ID NO: 92528 - DNA, 17 bp, Arabidopsis thaliana
gaaactggaaagcgatg

SEQ ID NO: 92529 - DNA, 17 bp, Arabidopsis thaliana
gaaactggatagactga

SEQ ID NO: 92530 - DNA, 17 bp, Arabidopsis thaliana
gaaactggatggtctct

SEQ ID NO: 92531 - DNA, 17 bp, Arabidopsis thaliana
gaaactgggatttcagt

SEQ ID NO: 92532 - DNA, 17 bp, Arabidopsis thaliana
gaaactggttacagtca

SEQ ID NO: 92533 - DNA, 17 bp, Arabidopsis thaliana
gaaactgtaggcggtct

SEQ ID NO: 92534 - DNA, 17 bp, Arabidopsis thaliana
gaaactgtcacactacg

SEQ ID NO: 92535 - DNA, 17 bp, Arabidopsis thaliana
gaaactgtgaatggtga

SEQ ID NO: 92536 - DNA, 17 bp, Arabidopsis thaliana
gaaactgtgatatagac

SEQ ID NO: 92537 - DNA, 17 bp, Arabidopsis thaliana
gaaactgttgatgttct

SEQ ID NO: 92538 - DNA, 17 bp, Arabidopsis thaliana
gaaactgttgtcttcgt

SEQ ID NO: 92539 - DNA, 17 bp, Arabidopsis thaliana
gaaactgttgttggaga

SEQ ID NO: 92540 - DNA, 17 bp, Arabidopsis thaliana
gaaactgtttcccagca

SEQ ID NO: 92541 - DNA, 17 bp, Arabidopsis thaliana
gaaacttacatcatcgt

SEQ ID NO: 92542 - DNA, 17 bp, Arabidopsis thaliana
gaaacttaccaggtcca

SEQ ID NO: 92543 - DNA, 17 bp, Arabidopsis thaliana
gaaacttagaaccgaaa

SEQ ID NO: 92544 - DNA, 17 bp, Arabidopsis thaliana
gaaacttagaggtcgcc

SEQ ID NO: 92545 - DNA, 17 bp, Arabidopsis thaliana
gaaacttagaggtcgct

SEQ ID NO: 92546 - DNA, 17 bp, Arabidopsis thaliana
gaaacttagaggtcgtc

SEQ ID NO: 92547 - DNA, 17 bp, Arabidopsis thaliana
gaaacttccagacctgg

SEQ ID NO: 92548 - DNA, 17 bp, Arabidopsis thaliana
gaaacttccagatctgg

SEQ ID NO: 92549 - DNA, 17 bp, Arabidopsis thaliana
gaaacttcccctggggg

SEQ ID NO: 92550 - DNA, 17 bp, Arabidopsis thaliana
gaaacttccgaggggga

SEQ ID NO: 92551 - DNA, 17 bp, Arabidopsis thaliana
gaaacttctactgtccc

SEQ ID NO: 92552 - DNA, 17 bp, Arabidopsis thaliana
gaaacttctatggcggc

SEQ ID NO: 92553 - DNA, 17 bp, Arabidopsis thaliana
gaaacttcttgaccagc

SEQ ID NO: 92554 - DNA, 17 bp, Arabidopsis thaliana
gaaacttggttcatttc

SEQ ID NO: 92555 - DNA, 17 bp, Arabidopsis thaliana
gaaacttgtaaggtccc

SEQ ID NO: 92556 - DNA, 17 bp, Arabidopsis thaliana
gaaacttgtgttggtaa

SEQ ID NO: 92557 - DNA, 17 bp, Arabidopsis thaliana
gaaacttgttagggaga

SEQ ID NO: 92558 - DNA, 17 bp, Arabidopsis thaliana
gaaactttcaatttccc

SEQ ID NO: 92559 - DNA, 17 bp, Arabidopsis thaliana
gaaactttccatgggga

SEQ ID NO: 92560 - DNA, 17 bp, Arabidopsis thaliana
gaaactttcttctctct

SEQ ID NO: 92561 - DNA, 17 bp, Arabidopsis thaliana
gaaactttgagcttctg

SEQ ID NO: 92562 - DNA, 17 bp, Arabidopsis thaliana
gaaactttgatcagtct

SEQ ID NO: 92563 - DNA, 17 bp, Arabidopsis thaliana
gaaactttgatcgcctt

SEQ ID NO: 92564 - DNA, 17 bp, Arabidopsis thaliana
gaaactttgctatgtgg

SEQ ID NO: 92565 - DNA, 17 bp, Arabidopsis thaliana
gaaagaaaaggctctcg

SEQ ID NO: 92566 - DNA, 17 bp, Arabidopsis thaliana
gaaagaaaatgcatagt

SEQ ID NO: 92567 - DNA, 17 bp, Arabidopsis thaliana
gaaagaaaccttcgcct

SEQ ID NO: 92568 - DNA, 17 bp, Arabidopsis thaliana
gaaagaagaccctgttg

SEQ ID NO: 92569 - DNA, 17 bp, Arabidopsis thaliana
gaaagaagaccctgttt

SEQ ID NO: 92570 - DNA, 17 bp, Arabidopsis thaliana
gaaagaagcaggacaat

SEQ ID NO: 92571 - DNA, 17 bp, Arabidopsis thaliana
gaaagaaggctaactct

SEQ ID NO: 92572 - DNA, 17 bp, Arabidopsis thaliana
gaaagaaggttaaagtg

SEQ ID NO: 92573 - DNA, 17 bp, Arabidopsis thaliana
gaaagaagtccggctag

SEQ ID NO: 92574 - DNA, 17 bp, Arabidopsis thaliana
gaaagacaaagtgggct

SEQ ID NO: 92575 - DNA, 17 bp, Arabidopsis thaliana
gaaagacaccatcttca

SEQ ID NO: 92576 - DNA, 17 bp, Arabidopsis thaliana
gaaagacatgtgtcaca

SEQ ID NO: 92577 - DNA, 17 bp, Arabidopsis thaliana
gaaagacattgggtttt

SEQ ID NO: 92578 - DNA, 17 bp, Arabidopsis thaliana
gaaagaccacactgtct

SEQ ID NO: 92579 - DNA, 17 bp, Arabidopsis thaliana
gaaagacggttgatatc

SEQ ID NO: 92580 - DNA, 17 bp, Arabidopsis thaliana
gaaagacgtgttgctcg

SEQ ID NO: 92581 - DNA, 17 bp, Arabidopsis thaliana
gaaagactgctccagta

SEQ ID NO: 92582 - DNA, 17 bp, Arabidopsis thaliana
gaaagacttcgtgcgtt

SEQ ID NO: 92583 - DNA, 17 bp, Arabidopsis thaliana
gaaagacttgacctcct

SEQ ID NO: 92584 - DNA, 17 bp, Arabidopsis thaliana
gaaagagagagagggag

SEQ ID NO: 92585 - DNA, 17 bp, Arabidopsis thaliana
gaaagagataagcttga

SEQ ID NO: 92586 - DNA, 17 bp, Arabidopsis thaliana
gaaagagatcgtgggat

SEQ ID NO: 92587 - DNA, 17 bp, Arabidopsis thaliana
gaaagagcactctatat

SEQ ID NO: 92588 - DNA, 17 bp, Arabidopsis thaliana
gaaagaggcattccggt

SEQ ID NO: 92589 - DNA, 17 bp, Arabidopsis thaliana
gaaagagggcgatgtca

SEQ ID NO: 92590 - DNA, 17 bp, Arabidopsis thaliana
gaaagagggcgtgggtt

SEQ ID NO: 92591 - DNA, 17 bp, Arabidopsis thaliana
gaaagagggtatcttgc

SEQ ID NO: 92592 - DNA, 17 bp, Arabidopsis thaliana
gaaagagtcgcagcaat

SEQ ID NO: 92593 - DNA, 17 bp, Arabidopsis thaliana
gaaagagttctgaagac

SEQ ID NO: 92594 - DNA, 17 bp, Arabidopsis thaliana
gaaagataccaaaccta

SEQ ID NO: 92595 - DNA, 17 bp, Arabidopsis thaliana
gaaagataccatcttca

SEQ ID NO: 92596 - DNA, 17 bp, Arabidopsis thaliana
gaaagatactgggtctt

SEQ ID NO: 92597 - DNA, 17 bp, Arabidopsis thaliana
gaaagatagtgcgcaat

SEQ ID NO: 92598 - DNA, 17 bp, Arabidopsis thaliana
gaaagatcaaacatcag

SEQ ID NO: 92599 - DNA, 17 bp, Arabidopsis thaliana
gaaagatcacggtcgtc

SEQ ID NO: 92600 - DNA, 17 bp, Arabidopsis thaliana
gaaagatcatataattg

SEQ ID NO: 92601 - DNA, 17 bp, Arabidopsis thaliana
gaaagatgactgctatg

SEQ ID NO: 92602 - DNA, 17 bp, Arabidopsis thaliana
gaaagatggtgaactac

SEQ ID NO: 92603 - DNA, 17 bp, Arabidopsis thaliana
gaaagatggtgaactat

SEQ ID NO: 92604 - DNA, 17 bp, Arabidopsis thaliana
gaaagattaagccatgc

SEQ ID NO: 92605 - DNA, 17 bp, Arabidopsis thaliana
gaaagattatgttgccg

SEQ ID NO: 92606 - DNA, 17 bp, Arabidopsis thaliana
gaaagattccgtctttc

SEQ ID NO: 92607 - DNA, 17 bp, Arabidopsis thaliana
gaaagattcgtaccgat

SEQ ID NO: 92608 - DNA, 17 bp, Arabidopsis thaliana
gaaagattgatcttaat

SEQ ID NO: 92609 - DNA, 17 bp, Arabidopsis thaliana
gaaagattgttcgagtt

SEQ ID NO: 92610 - DNA, 17 bp, Arabidopsis thaliana
gaaagatttcttcttca

SEQ ID NO: 92611 - DNA, 17 bp, Arabidopsis thaliana
gaaagcactctgctgcg

SEQ ID NO: 92612 - DNA, 17 bp, Arabidopsis thaliana
gaaagcactctgctggg

SEQ ID NO: 92613 - DNA, 17 bp, Arabidopsis thaliana
gaaagcagagcgttctt

SEQ ID NO: 92614 - DNA, 17 bp, Arabidopsis thaliana
gaaagcatacctgtccg

SEQ ID NO: 92615 - DNA, 17 bp, Arabidopsis thaliana
gaaagcatggatccgcc

SEQ ID NO: 92616 - DNA, 17 bp, Arabidopsis thaliana
gaaagcattccaaactc

SEQ ID NO: 92617 - DNA, 17 bp, Arabidopsis thaliana
gaaagcatttgccaagg

SEQ ID NO: 92618 - DNA, 17 bp, Arabidopsis thaliana
gaaagccaaggagttga

SEQ ID NO: 92619 - DNA, 17 bp, Arabidopsis thaliana
gaaagccaaggtccatt

SEQ ID NO: 92620 - DNA, 17 bp, Arabidopsis thaliana
gaaagccatgtcagatg

SEQ ID NO: 92621 - DNA, 17 bp, Arabidopsis thaliana
gaaagcccaaagacagc

SEQ ID NO: 92622 - DNA, 17 bp, Arabidopsis thaliana
gaaagcccaaagacagt

SEQ ID NO: 92623 - DNA, 17 bp, Arabidopsis thaliana
gaaagcccaaagagagc

SEQ ID NO: 92624 - DNA, 17 bp, Arabidopsis thaliana
gaaagccgagagccgtg

SEQ ID NO: 92625 - DNA, 17 bp, Arabidopsis thaliana
gaaagccgggagccgtg

SEQ ID NO: 92626 - DNA, 17 bp, Arabidopsis thaliana
gaaagcctatggggtcg

SEQ ID NO: 92627 - DNA, 17 bp, Arabidopsis thaliana
gaaagcgaaagcctatg

SEQ ID NO: 92628 - DNA, 17 bp, Arabidopsis thaliana
gaaagcgaccgtgggga

SEQ ID NO: 92629 - DNA, 17 bp, Arabidopsis thaliana
gaaagcgagagatcggg

SEQ ID NO: 92630 - DNA, 17 bp, Arabidopsis thaliana
gaaagcgaggccatatc

SEQ ID NO: 92631 - DNA, 17 bp, Arabidopsis thaliana
gaaagcgcaacacctcg

SEQ ID NO: 92632 - DNA, 17 bp, Arabidopsis thaliana
gaaagcgtcatggactt

SEQ ID NO: 92633 - DNA, 17 bp, Arabidopsis thaliana
gaaagcgtggcctatcg

SEQ ID NO: 92634 - DNA, 17 bp, Arabidopsis thaliana
gaaaggacctgacccga

SEQ ID NO: 92635 - DNA, 17 bp, Arabidopsis thaliana
gaaaggactcggttgct

SEQ ID NO: 92636 - DNA, 17 bp, Arabidopsis thaliana
gaaaggagcaggtccaa

SEQ ID NO: 92637 - DNA, 17 bp, Arabidopsis thaliana
gaaaggagccgtcacca

SEQ ID NO: 92638 - DNA, 17 bp, Arabidopsis thaliana
gaaaggagctacagcag

SEQ ID NO: 92639 - DNA, 17 bp, Arabidopsis thaliana
gaaaggagtatctgaga

SEQ ID NO: 92640 - DNA, 17 bp, Arabidopsis thaliana
gaaaggattatttgcct

SEQ ID NO: 92641 - DNA, 17 bp, Arabidopsis thaliana
gaaaggattcatccgct

SEQ ID NO: 92642 - DNA, 17 bp, Arabidopsis thaliana
gaaaggccctttggtcc

SEQ ID NO: 92643 - DNA, 17 bp, Arabidopsis thaliana
gaaaggcctgaatctcc

SEQ ID NO: 92644 - DNA, 17 bp, Arabidopsis thaliana
gaaaggcggagaggaga

SEQ ID NO: 92645 - DNA, 17 bp, Arabidopsis thaliana
gaaaggcgtaacgatct

SEQ ID NO: 92646 - DNA, 17 bp, Arabidopsis thaliana
gaaaggcgtagtccaca

SEQ ID NO: 92647 - DNA, 17 bp, Arabidopsis thaliana
gaaaggctattgatggc

SEQ ID NO: 92648 - DNA, 17 bp, Arabidopsis thaliana
gaaaggctcagcccaca

SEQ ID NO: 92649 - DNA, 17 bp, Arabidopsis thaliana
gaaaggctcagtccaca

SEQ ID NO: 92650 - DNA, 17 bp, Arabidopsis thaliana
gaaaggctcagtcgtca

SEQ ID NO: 92651 - DNA, 17 bp, Arabidopsis thaliana
gaaagggaatccgaaca

SEQ ID NO: 92652 - DNA, 17 bp, Arabidopsis thaliana
gaaagggcacgtctgcc

SEQ ID NO: 92653 - DNA, 17 bp, Arabidopsis thaliana
gaaagggcgtgggttca

SEQ ID NO: 92654 - DNA, 17 bp, Arabidopsis thaliana
gaaaggggatagtcaga

SEQ ID NO: 92655 - DNA, 17 bp, Arabidopsis thaliana
gaaagggtgcttcgccg

SEQ ID NO: 92656 - DNA, 17 bp, Arabidopsis thaliana
gaaagggttcaaatccc

SEQ ID NO: 92657 - DNA, 17 bp, Arabidopsis thaliana
gaaaggtatccagatcc

SEQ ID NO: 92658 - DNA, 17 bp, Arabidopsis thaliana
gaaaggtccagcccaca

SEQ ID NO: 92659 - DNA, 17 bp, Arabidopsis thaliana
gaaaggtcccgcccaca

SEQ ID NO: 92660 - DNA, 17 bp, Arabidopsis thaliana
gaaaggtgtctagaggc

SEQ ID NO: 92661 - DNA, 17 bp, Arabidopsis thaliana
gaaaggttccatgtgaa

SEQ ID NO: 92662 - DNA, 17 bp, Arabidopsis thaliana
gaaaggttctattggat

SEQ ID NO: 92663 - DNA, 17 bp, Arabidopsis thaliana
gaaaggtttacctgatt

SEQ ID NO: 92664 - DNA, 17 bp, Arabidopsis thaliana
gaaaggtttgcacaggc

SEQ ID NO: 92665 - DNA, 17 bp, Arabidopsis thaliana
gaaagtagcagtaggta

SEQ ID NO: 92666 - DNA, 17 bp, Arabidopsis thaliana
gaaagtagcgacagtcg

SEQ ID NO: 92667 - DNA, 17 bp, Arabidopsis thaliana
gaaagtaggattgacag

SEQ ID NO: 92668 - DNA, 17 bp, Arabidopsis thaliana
gaaagtaggtcatcgtc

SEQ ID NO: 92669 - DNA, 17 bp, Arabidopsis thaliana
gaaagtcacttggcgca

SEQ ID NO: 92670 - DNA, 17 bp, Arabidopsis thaliana
gaaagtcaggtcgatgt

SEQ ID NO: 92671 - DNA, 17 bp, Arabidopsis thaliana
gaaagtcagtgacagcc

SEQ ID NO: 92672 - DNA, 17 bp, Arabidopsis thaliana
gaaagtcccattatgcg

SEQ ID NO: 92673 - DNA, 17 bp, Arabidopsis thaliana
gaaagtcccgaggtgct

SEQ ID NO: 92674 - DNA, 17 bp, Arabidopsis thaliana
gaaagtcctcgtgttgc

SEQ ID NO: 92675 - DNA, 17 bp, Arabidopsis thaliana
gaaagtctgtcagttag

SEQ ID NO: 92676 - DNA, 17 bp, Arabidopsis thaliana
gaaagtctgtcagttgg

SEQ ID NO: 92677 - DNA, 17 bp, Arabidopsis thaliana
gaaagtgattggtcgag

SEQ ID NO: 92678 - DNA, 17 bp, Arabidopsis thaliana
gaaagtgcaatgtccgc

SEQ ID NO: 92679 - DNA, 17 bp, Arabidopsis thaliana
gaaagtgcctctatgtg

SEQ ID NO: 92680 - DNA, 17 bp, Arabidopsis thaliana
gaaagtgccttgtattc

SEQ ID NO: 92681 - DNA, 17 bp, Arabidopsis thaliana
gaaagtgcttggacacg

SEQ ID NO: 92682 - DNA, 17 bp, Arabidopsis thaliana
gaaagtgcttttgcccc

SEQ ID NO: 92683 - DNA, 17 bp, Arabidopsis thaliana
gaaagtggcaaagtggg

SEQ ID NO: 92684 - DNA, 17 bp, Arabidopsis thaliana
gaaagtggcttctgaga

SEQ ID NO: 92685 - DNA, 17 bp, Arabidopsis thaliana
gaaagtgtaggtcatgt

SEQ ID NO: 92686 - DNA, 17 bp, Arabidopsis thaliana
gaaagtgtctcggtgat

SEQ ID NO: 92687 - DNA, 17 bp, Arabidopsis thaliana
gaaagttactaactcac

SEQ ID NO: 92688 - DNA, 17 bp, Arabidopsis thaliana
gaaagttcgaatcctag

SEQ ID NO: 92689 - DNA, 17 bp, Arabidopsis thaliana
gaaagttcggatccttg

SEQ ID NO: 92690 - DNA, 17 bp, Arabidopsis thaliana
gaaagttctgggctgca

SEQ ID NO: 92691 - DNA, 17 bp, Arabidopsis thaliana
gaaagttcttctgagac

SEQ ID NO: 92692 - DNA, 17 bp, Arabidopsis thaliana
gaaagttgaccttggct

SEQ ID NO: 92693 - DNA, 17 bp, Arabidopsis thaliana
gaaagttgagtaggatc

SEQ ID NO: 92694 - DNA, 17 bp, Arabidopsis thaliana
gaaagttgccaactctc

SEQ ID NO: 92695 - DNA, 17 bp, Arabidopsis thaliana
gaaagttggctaacact

SEQ ID NO: 92696 - DNA, 17 bp, Arabidopsis thaliana
gaaagttgggggctcga

SEQ ID NO: 92697 - DNA, 17 bp, Arabidopsis thaliana
gaaagttgttagaagga

SEQ ID NO: 92698 - DNA, 17 bp, Arabidopsis thaliana
gaaagtttatctgtgac

SEQ ID NO: 92699 - DNA, 17 bp, Arabidopsis thaliana
gaaagtttccggggacc

SEQ ID NO: 92700 - DNA, 17 bp, Arabidopsis thaliana
gaaagtttgcgtgggct

SEQ ID NO: 92701 - DNA, 17 bp, Arabidopsis thaliana
gaaagtttggccgagtg

SEQ ID NO: 92702 - DNA, 17 bp, Arabidopsis thaliana
gaaagtttttttttctt

SEQ ID NO: 92703 - DNA, 17 bp, Arabidopsis thaliana
gaaataaaatctcaatc

SEQ ID NO: 92704 - DNA, 17 bp, Arabidopsis thaliana
gaaataaatcctggagt

SEQ ID NO: 92705 - DNA, 17 bp, Arabidopsis thaliana
gaaataattacgggttt

SEQ ID NO: 92706 - DNA, 17 bp, Arabidopsis thaliana
gaaataattgttgtgac

SEQ ID NO: 92707 - DNA, 17 bp, Arabidopsis thaliana
gaaatacgatgagattc

SEQ ID NO: 92708 - DNA, 17 bp, Arabidopsis thaliana
gaaatacgggtcgtctt

SEQ ID NO: 92709 - DNA, 17 bp, Arabidopsis thaliana
gaaatacggtgcggttc

SEQ ID NO: 92710 - DNA, 17 bp, Arabidopsis thaliana
gaaatactatggattcg

SEQ ID NO: 92711 - DNA, 17 bp, Arabidopsis thaliana
gaaatagaccgtttttc

SEQ ID NO: 92712 - DNA, 17 bp, Arabidopsis thaliana
gaaatagatcggataaa

SEQ ID NO: 92713 - DNA, 17 bp, Arabidopsis thaliana
gaaatagctcatgccag

SEQ ID NO: 92714 - DNA, 17 bp, Arabidopsis thaliana
gaaataggcatacgact

SEQ ID NO: 92715 - DNA, 17 bp, Arabidopsis thaliana
gaaatagggcaggttac

SEQ ID NO: 92716 - DNA, 17 bp, Arabidopsis thaliana
gaaatagtcctggtatc

SEQ ID NO: 92717 - DNA, 17 bp, Arabidopsis thaliana
gaaatcaaagccctccg

SEQ ID NO: 92718 - DNA, 17 bp, Arabidopsis thaliana
gaaatcaaagtttttgg

SEQ ID NO: 92719 - DNA, 17 bp, Arabidopsis thaliana
gaaatcagtagctctct

SEQ ID NO: 92720 - DNA, 17 bp, Arabidopsis thaliana
gaaatcagttatgtacc

SEQ ID NO: 92721 - DNA, 17 bp, Arabidopsis thaliana
gaaatcagttgtttgtg

SEQ ID NO: 92722 - DNA, 17 bp, Arabidopsis thaliana
gaaatccacctgtagat

SEQ ID NO: 92723 - DNA, 17 bp, Arabidopsis thaliana
gaaatccagacgagttc

SEQ ID NO: 92724 - DNA, 17 bp, Arabidopsis thaliana
gaaatccaggaggttat

SEQ ID NO: 92725 - DNA, 17 bp, Arabidopsis thaliana
gaaatccaggaggttca

SEQ ID NO: 92726 - DNA, 17 bp, Arabidopsis thaliana
gaaatccaggaggttct

SEQ ID NO: 92727 - DNA, 17 bp, Arabidopsis thaliana
gaaatccaggaggtttt

SEQ ID NO: 92728 - DNA, 17 bp, Arabidopsis thaliana
gaaatccattaacacag

SEQ ID NO: 92729 - DNA, 17 bp, Arabidopsis thaliana
gaaatccgctaaggagt

SEQ ID NO: 92730 - DNA, 17 bp, Arabidopsis thaliana
gaaatccgcttacatgt

SEQ ID NO: 92731 - DNA, 17 bp, Arabidopsis thaliana
gaaatccgtctaatagg

SEQ ID NO: 92732 - DNA, 17 bp, Arabidopsis thaliana
gaaatccgtgcactttg

SEQ ID NO: 92733 - DNA, 17 bp, Arabidopsis thaliana
gaaatcctatgatgtta

SEQ ID NO: 92734 - DNA, 17 bp, Arabidopsis thaliana
gaaatccttttcgctaa

SEQ ID NO: 92735 - DNA, 17 bp, Arabidopsis thaliana
gaaatcgccaattctga

SEQ ID NO: 92736 - DNA, 17 bp, Arabidopsis thaliana
gaaatcgcctggagccg

SEQ ID NO: 92737 - DNA, 17 bp, Arabidopsis thaliana
gaaatcgctaatgacca

SEQ ID NO: 92738 - DNA, 17 bp, Arabidopsis thaliana
gaaatcgctaatggcca

SEQ ID NO: 92739 - DNA, 17 bp, Arabidopsis thaliana
gaaatcggaactatgcc

SEQ ID NO: 92740 - DNA, 17 bp, Arabidopsis thaliana
gaaatcgggaacgagat

SEQ ID NO: 92741 - DNA, 17 bp, Arabidopsis thaliana
gaaatcgggacgtccaa

SEQ ID NO: 92742 - DNA, 17 bp, Arabidopsis thaliana
gaaatcggggacaagat

SEQ ID NO: 92743 - DNA, 17 bp, Arabidopsis thaliana
gaaatcgtccatcgcta

SEQ ID NO: 92744 - DNA, 17 bp, Arabidopsis thaliana
gaaatctaaccggattt

SEQ ID NO: 92745 - DNA, 17 bp, Arabidopsis thaliana
gaaatctaagatccgtt

SEQ ID NO: 92746 - DNA, 17 bp, Arabidopsis thaliana
gaaatctaagtgttgag

SEQ ID NO: 92747 - DNA, 17 bp, Arabidopsis thaliana
gaaatctaatcggattt

SEQ ID NO: 92748 - DNA, 17 bp, Arabidopsis thaliana
gaaatctatgaggttct

SEQ ID NO: 92749 - DNA, 17 bp, Arabidopsis thaliana
gaaatctcaccggattt

SEQ ID NO: 92750 - DNA, 17 bp, Arabidopsis thaliana
gaaatctccaaggtgtt

SEQ ID NO: 92751 - DNA, 17 bp, Arabidopsis thaliana
gaaatctcgtctggaac

SEQ ID NO: 92752 - DNA, 17 bp, Arabidopsis thaliana
gaaatctctggttttgc

SEQ ID NO: 92753 - DNA, 17 bp, Arabidopsis thaliana
gaaatctgagaagtatc

SEQ ID NO: 92754 - DNA, 17 bp, Arabidopsis thaliana
gaaatctgagatgtttc

SEQ ID NO: 92755 - DNA, 17 bp, Arabidopsis thaliana
gaaatctgcgtgacata

SEQ ID NO: 92756 - DNA, 17 bp, Arabidopsis thaliana
gaaatctgcttcgtgcc

SEQ ID NO: 92757 - DNA, 17 bp, Arabidopsis thaliana
gaaatctggcgatttcg

SEQ ID NO: 92758 - DNA, 17 bp, Arabidopsis thaliana
gaaatctgtcagttggg

SEQ ID NO: 92759 - DNA, 17 bp, Arabidopsis thaliana
gaaatctgtgcgcttta

SEQ ID NO: 92760 - DNA, 17 bp, Arabidopsis thaliana
gaaatctgttttggttt

SEQ ID NO: 92761 - DNA, 17 bp, Arabidopsis thaliana
gaaatcttaagtgttga

SEQ ID NO: 92762 - DNA, 17 bp, Arabidopsis thaliana
gaaatctttgatgaccc

SEQ ID NO: 92763 - DNA, 17 bp, Arabidopsis thaliana
gaaatctttgatgatcc

SEQ ID NO: 92764 - DNA, 17 bp, Arabidopsis thaliana
gaaatgaagaagtcagg

SEQ ID NO: 92765 - DNA, 17 bp, Arabidopsis thaliana
gaaatgaagcctggtcc

SEQ ID NO: 92766 - DNA, 17 bp, Arabidopsis thaliana
gaaatgacttgagaggt

SEQ ID NO: 92767 - DNA, 17 bp, Arabidopsis thaliana
gaaatgagccacaaacg

SEQ ID NO: 92768 - DNA, 17 bp, Arabidopsis thaliana
gaaatgatctgaatcct

SEQ ID NO: 92769 - DNA, 17 bp, Arabidopsis thaliana
gaaatgatgatgacgac

SEQ ID NO: 92770 - DNA, 17 bp, Arabidopsis thaliana
gaaatgcaaaccgattt

SEQ ID NO: 92771 - DNA, 17 bp, Arabidopsis thaliana
gaaatgcaggcggtctg

SEQ ID NO: 92772 - DNA, 17 bp, Arabidopsis thaliana
gaaatgcaggtgacttg

SEQ ID NO: 92773 - DNA, 17 bp, Arabidopsis thaliana
gaaatgcatgcggtctg

SEQ ID NO: 92774 - DNA, 17 bp, Arabidopsis thaliana
gaaatgccatctccatt

SEQ ID NO: 92775 - DNA, 17 bp, Arabidopsis thaliana
gaaatgcggtgcggttc

SEQ ID NO: 92776 - DNA, 17 bp, Arabidopsis thaliana
gaaatgctgatggagat

SEQ ID NO: 92777 - DNA, 17 bp, Arabidopsis thaliana
gaaatggaactctcatt

SEQ ID NO: 92778 - DNA, 17 bp, Arabidopsis thaliana
gaaatggaccaccacac

SEQ ID NO: 92779 - DNA, 17 bp, Arabidopsis thaliana
gaaatggactaaaccgc

SEQ ID NO: 92780 - DNA, 17 bp, Arabidopsis thaliana
gaaatggatcgttttga

SEQ ID NO: 92781 - DNA, 17 bp, Arabidopsis thaliana
gaaatggatctgaaaat

SEQ ID NO: 92782 - DNA, 17 bp, Arabidopsis thaliana
gaaatggatgacccggc

SEQ ID NO: 92783 - DNA, 17 bp, Arabidopsis thaliana
gaaatggccagtcaacg

SEQ ID NO: 92784 - DNA, 17 bp, Arabidopsis thaliana
gaaatggccattcaacg

SEQ ID NO: 92785 - DNA, 17 bp, Arabidopsis thaliana
gaaatggccgcggtagt

SEQ ID NO: 92786 - DNA, 17 bp, Arabidopsis thaliana
gaaatggctaagtgttt

SEQ ID NO: 92787 - DNA, 17 bp, Arabidopsis thaliana
gaaatgggattggacca

SEQ ID NO: 92788 - DNA, 17 bp, Arabidopsis thaliana
gaaatgggtggctctta

SEQ ID NO: 92789 - DNA, 17 bp, Arabidopsis thaliana
gaaatgggttcatcctg

SEQ ID NO: 92790 - DNA, 17 bp, Arabidopsis thaliana
gaaatggtcttttctag

SEQ ID NO: 92791 - DNA, 17 bp, Arabidopsis thaliana
gaaatgtccgaggagac

SEQ ID NO: 92792 - DNA, 17 bp, Arabidopsis thaliana
gaaatgtctgaggagac

SEQ ID NO: 92793 - DNA, 17 bp, Arabidopsis thaliana
gaaatgtgatggtggct

SEQ ID NO: 92794 - DNA, 17 bp, Arabidopsis thaliana
gaaatgtgttgacctcg

SEQ ID NO: 92795 - DNA, 17 bp, Arabidopsis thaliana
gaaatgttaccgagagt

SEQ ID NO: 92796 - DNA, 17 bp, Arabidopsis thaliana
gaaatgttgaccgaaca

SEQ ID NO: 92797 - DNA, 17 bp, Arabidopsis thaliana
gaaatgttgggcttagg

SEQ ID NO: 92798 - DNA, 17 bp, Arabidopsis thaliana
gaaattaacgctgtggc

SEQ ID NO: 92799 - DNA, 17 bp, Arabidopsis thaliana
gaaattaagacaggaac

SEQ ID NO: 92800 - DNA, 17 bp, Arabidopsis thaliana
gaaattacggctttggt

SEQ ID NO: 92801 - DNA, 17 bp, Arabidopsis thaliana
gaaattacgggattcat

SEQ ID NO: 92802 - DNA, 17 bp, Arabidopsis thaliana
gaaattacgggattcgt

SEQ ID NO: 92803 - DNA, 17 bp, Arabidopsis thaliana
gaaattagccgaaataa

SEQ ID NO: 92804 - DNA, 17 bp, Arabidopsis thaliana
gaaattatgtgccttct

SEQ ID NO: 92805 - DNA, 17 bp, Arabidopsis thaliana
gaaattattaggtttgt

SEQ ID NO: 92806 - DNA, 17 bp, Arabidopsis thaliana
gaaattattccactgac

SEQ ID NO: 92807 - DNA, 17 bp, Arabidopsis thaliana
gaaattattgcaaatcc

SEQ ID NO: 92808 - DNA, 17 bp, Arabidopsis thaliana
gaaattcaagtccaaag

SEQ ID NO: 92809 - DNA, 17 bp, Arabidopsis thaliana
gaaattcaggaagttct

SEQ ID NO: 92810 - DNA, 17 bp, Arabidopsis thaliana
gaaattcaggagattct

SEQ ID NO: 92811 - DNA, 17 bp, Arabidopsis thaliana
gaaattcaggaggttct

SEQ ID NO: 92812 - DNA, 17 bp, Arabidopsis thaliana
gaaattccaacttccgg

SEQ ID NO: 92813 - DNA, 17 bp, Arabidopsis thaliana
gaaattccattctgaag

SEQ ID NO: 92814 - DNA, 17 bp, Arabidopsis thaliana
gaaattcgattcgctga

SEQ ID NO: 92815 - DNA, 17 bp, Arabidopsis thaliana
gaaattcgccgttttct

SEQ ID NO: 92816 - DNA, 17 bp, Arabidopsis thaliana
gaaattcgcctttttct

SEQ ID NO: 92817 - DNA, 17 bp, Arabidopsis thaliana
gaaattcggggcgtgga

SEQ ID NO: 92818 - DNA, 17 bp, Arabidopsis thaliana
gaaattctatcaagcgt

SEQ ID NO: 92819 - DNA, 17 bp, Arabidopsis thaliana
gaaattctcaatccatc

SEQ ID NO: 92820 - DNA, 17 bp, Arabidopsis thaliana
gaaattctcagactcga

SEQ ID NO: 92821 - DNA, 17 bp, Arabidopsis thaliana
gaaattctctgttgcgt

SEQ ID NO: 92822 - DNA, 17 bp, Arabidopsis thaliana
gaaattctgtgaccgga

SEQ ID NO: 92823 - DNA, 17 bp, Arabidopsis thaliana
gaaattcttcaagtgac

SEQ ID NO: 92824 - DNA, 17 bp, Arabidopsis thaliana
gaaattgacgaaacccg

SEQ ID NO: 92825 - DNA, 17 bp, Arabidopsis thaliana
gaaattgactgaatcag

SEQ ID NO: 92826 - DNA, 17 bp, Arabidopsis thaliana
gaaattgaggtatgagg

SEQ ID NO: 92827 - DNA, 17 bp, Arabidopsis thaliana
gaaattgagtgagactc

SEQ ID NO: 92828 - DNA, 17 bp, Arabidopsis thaliana
gaaattgcaggtcttct

SEQ ID NO: 92829 - DNA, 17 bp, Arabidopsis thaliana
gaaattgcccttgatgg

SEQ ID NO: 92830 - DNA, 17 bp, Arabidopsis thaliana
gaaattgcgccggcttc

SEQ ID NO: 92831 - DNA, 17 bp, Arabidopsis thaliana
gaaattgctcttgatgg

SEQ ID NO: 92832 - DNA, 17 bp, Arabidopsis thaliana
gaaattggccatggctc

SEQ ID NO: 92833 - DNA, 17 bp, Arabidopsis thaliana
gaaattggccgttgatc

SEQ ID NO: 92834 - DNA, 17 bp, Arabidopsis thaliana
gaaattgggtgatctat

SEQ ID NO: 92835 - DNA, 17 bp, Arabidopsis thaliana
gaaattgggttatgtgg

SEQ ID NO: 92836 - DNA, 17 bp, Arabidopsis thaliana
gaaattgtccatcatgt

SEQ ID NO: 92837 - DNA, 17 bp, Arabidopsis thaliana
gaaattgtctgatttca

SEQ ID NO: 92838 - DNA, 17 bp, Arabidopsis thaliana
gaaattgtgccggcttc

SEQ ID NO: 92839 - DNA, 17 bp, Arabidopsis thaliana
gaaatttaagatccgtt

SEQ ID NO: 92840 - DNA, 17 bp, Arabidopsis thaliana
gaaatttacttcgcaag

SEQ ID NO: 92841 - DNA, 17 bp, Arabidopsis thaliana
gaaatttaggatccaat

SEQ ID NO: 92842 - DNA, 17 bp, Arabidopsis thaliana
gaaatttaggctgtgaa

SEQ ID NO: 92843 - DNA, 17 bp, Arabidopsis thaliana
gaaatttcaccgtgatg

SEQ ID NO: 92844 - DNA, 17 bp, Arabidopsis thaliana
gaaatttcatcgtaatg

SEQ ID NO: 92845 - DNA, 17 bp, Arabidopsis thaliana
gaaatttcatcgtgatg

SEQ ID NO: 92846 - DNA, 17 bp, Arabidopsis thaliana
gaaatttccattgctgg

SEQ ID NO: 92847 - DNA, 17 bp, Arabidopsis thaliana
gaaatttcctcgagtgg

SEQ ID NO: 92848 - DNA, 17 bp, Arabidopsis thaliana
gaaatttcgattgaggc

SEQ ID NO: 92849 - DNA, 17 bp, Arabidopsis thaliana
gaaatttcggagtcatg

SEQ ID NO: 92850 - DNA, 17 bp, Arabidopsis thaliana
gaaatttgaccatttta

SEQ ID NO: 92851 - DNA, 17 bp, Arabidopsis thaliana
gaaatttgatttctgcc

SEQ ID NO: 92852 - DNA, 17 bp, Arabidopsis thaliana
gaaatttgggctctatc

SEQ ID NO: 92853 - DNA, 17 bp, Arabidopsis thaliana
gaaatttgtagtcccgt

SEQ ID NO: 92854 - DNA, 17 bp, Arabidopsis thaliana
gaaatttgtgcgcttta

SEQ ID NO: 92855 - DNA, 17 bp, Arabidopsis thaliana
gaaatttgtgtggactg

SEQ ID NO: 92856 - DNA, 17 bp, Arabidopsis thaliana
gaaatttgttcccttga

SEQ ID NO: 92857 - DNA, 17 bp, Arabidopsis thaliana
gaaattttaatcttcgg

SEQ ID NO: 92858 - DNA, 17 bp, Arabidopsis thaliana
gaaattttaccctcgat

SEQ ID NO: 92859 - DNA, 17 bp, Arabidopsis thaliana
gaaattttatggtccat

SEQ ID NO: 92860 - DNA, 17 bp, Arabidopsis thaliana
gaaattttggatcttgg

SEQ ID NO: 92861 - DNA, 17 bp, Arabidopsis thaliana
gaaattttgggtggacc

SEQ ID NO: 92862 - DNA, 17 bp, Arabidopsis thaliana
gaaattttgtctaattt

SEQ ID NO: 92863 - DNA, 17 bp, Arabidopsis thaliana
gaacaaaaaagttgggc

SEQ ID NO: 92864 - DNA, 17 bp, Arabidopsis thaliana
gaacaaaaagctagggt

SEQ ID NO: 92865 - DNA, 17 bp, Arabidopsis thaliana
gaacaaaactcagtctc

SEQ ID NO: 92866 - DNA, 17 bp, Arabidopsis thaliana
gaacaaaagccttttgt

SEQ ID NO: 92867 - DNA, 17 bp, Arabidopsis thaliana
gaacaaaatgcacaaat

SEQ ID NO: 92868 - DNA, 17 bp, Arabidopsis thaliana
gaacaaaatgcatgtac

SEQ ID NO: 92869 - DNA, 17 bp, Arabidopsis thaliana
gaacaaaatgcatgtgc

SEQ ID NO: 92870 - DNA, 17 bp, Arabidopsis thaliana
gaacaaacttagggcct

SEQ ID NO: 92871 - DNA, 17 bp, Arabidopsis thaliana
gaacaaagaattgggac

SEQ ID NO: 92872 - DNA, 17 bp, Arabidopsis thaliana
gaacaaagacaccatca

SEQ ID NO: 92873 - DNA, 17 bp, Arabidopsis thaliana
gaacaaagacgttttaa

SEQ ID NO: 92874 - DNA, 17 bp, Arabidopsis thaliana
gaacaaagactgcaaat

SEQ ID NO: 92875 - DNA, 17 bp, Arabidopsis thaliana
gaacaaagctccagtct

SEQ ID NO: 92876 - DNA, 17 bp, Arabidopsis thaliana
gaacaaaggaaggttgt

SEQ ID NO: 92877 - DNA, 17 bp, Arabidopsis thaliana
gaacaaagtcggtttat

SEQ ID NO: 92878 - DNA, 17 bp, Arabidopsis thaliana
gaacaaatagacgatcg

SEQ ID NO: 92879 - DNA, 17 bp, Arabidopsis thaliana
gaacaaatttaattttg

SEQ ID NO: 92880 - DNA, 17 bp, Arabidopsis thaliana
gaacaacaaagattgac

SEQ ID NO: 92881 - DNA, 17 bp, Arabidopsis thaliana
gaacaacacatcgccaa

SEQ ID NO: 92882 - DNA, 17 bp, Arabidopsis thaliana
gaacaacacgacgaacc

SEQ ID NO: 92883 - DNA, 17 bp, Arabidopsis thaliana
gaacaacagcccacagg

SEQ ID NO: 92884 - DNA, 17 bp, Arabidopsis thaliana
gaacaacattcctcagg

SEQ ID NO: 92885 - DNA, 17 bp, Arabidopsis thaliana
gaacaacctggctgatt

SEQ ID NO: 92886 - DNA, 17 bp, Arabidopsis thaliana
gaacaacgacccgaaag

SEQ ID NO: 92887 - DNA, 17 bp, Arabidopsis thaliana
gaacaacggtgtaccgc

SEQ ID NO: 92888 - DNA, 17 bp, Arabidopsis thaliana
gaacaactggttaagcg

SEQ ID NO: 92889 - DNA, 17 bp, Arabidopsis thaliana
gaacaagagttgatggc

SEQ ID NO: 92890 - DNA, 17 bp, Arabidopsis thaliana
gaacaagatgggttagg

SEQ ID NO: 92891 - DNA, 17 bp, Arabidopsis thaliana
gaacaagcccgcaagga

SEQ ID NO: 92892 - DNA, 17 bp, Arabidopsis thaliana
gaacaagctatagtcgc

SEQ ID NO: 92893 - DNA, 17 bp, Arabidopsis thaliana
gaacaagctcgtccacg

SEQ ID NO: 92894 - DNA, 17 bp, Arabidopsis thaliana
gaacaagctgcatgacg

SEQ ID NO: 92895 - DNA, 17 bp, Arabidopsis thaliana
gaacaaggatgacttgc

SEQ ID NO: 92896 - DNA, 17 bp, Arabidopsis thaliana
gaacaagtaattttggg

SEQ ID NO: 92897 - DNA, 17 bp, Arabidopsis thaliana
gaacaagtaccgcgagg

SEQ ID NO: 92898 - DNA, 17 bp, Arabidopsis thaliana
gaacaagtccggtcgga

SEQ ID NO: 92899 - DNA, 17 bp, Arabidopsis thaliana
gaacaagtctgcatcgg

SEQ ID NO: 92900 - DNA, 17 bp, Arabidopsis thaliana
gaacaagtgattgttgt

SEQ ID NO: 92901 - DNA, 17 bp, Arabidopsis thaliana
gaacaagtgcagttttg

SEQ ID NO: 92902 - DNA, 17 bp, Arabidopsis thaliana
gaacaagttgccatcac

SEQ ID NO: 92903 - DNA, 17 bp, Arabidopsis thaliana
gaacaagttgccgctat

SEQ ID NO: 92904 - DNA, 17 bp, Arabidopsis thaliana
gaacaataacagcaatc

SEQ ID NO: 92905 - DNA, 17 bp, Arabidopsis thaliana
gaacaatctggaacctt

SEQ ID NO: 92906 - DNA, 17 bp, Arabidopsis thaliana
gaacaatgttctcatgg

SEQ ID NO: 92907 - DNA, 17 bp, Arabidopsis thaliana
gaacaattagtggatta

SEQ ID NO: 92908 - DNA, 17 bp, Arabidopsis thaliana
gaacaattttcttctac

SEQ ID NO: 92909 - DNA, 17 bp, Arabidopsis thaliana
gaacacaaactttgacc

SEQ ID NO: 92910 - DNA, 17 bp, Arabidopsis thaliana
gaacacaaccgcaaccg

SEQ ID NO: 92911 - DNA, 17 bp, Arabidopsis thaliana
gaacacacactcatccc

SEQ ID NO: 92912 - DNA, 17 bp, Arabidopsis thaliana
gaacacagggtccgaat

SEQ ID NO: 92913 - DNA, 17 bp, Arabidopsis thaliana
gaacacaggtgatctga

SEQ ID NO: 92914 - DNA, 17 bp, Arabidopsis thaliana
gaacacagtttttgcca

SEQ ID NO: 92915 - DNA, 17 bp, Arabidopsis thaliana
gaacacatcaccgatac

SEQ ID NO: 92916 - DNA, 17 bp, Arabidopsis thaliana
gaacaccaacaggatct

SEQ ID NO: 92917 - DNA, 17 bp, Arabidopsis thaliana
gaacaccacctgacttt

SEQ ID NO: 92918 - DNA, 17 bp, Arabidopsis thaliana
gaacaccattgacttag

SEQ ID NO: 92919 - DNA, 17 bp, Arabidopsis thaliana
gaacacctcttcctctc

SEQ ID NO: 92920 - DNA, 17 bp, Arabidopsis thaliana
gaacacgaagctcatta

SEQ ID NO: 92921 - DNA, 17 bp, Arabidopsis thaliana
gaacacggcctatgttt

SEQ ID NO: 92922 - DNA, 17 bp, Arabidopsis thaliana
gaacacggcgtgcgtat

SEQ ID NO: 92923 - DNA, 17 bp, Arabidopsis thaliana
gaacacggttaactgct

SEQ ID NO: 92924 - DNA, 17 bp, Arabidopsis thaliana
gaacacggttaggattg

SEQ ID NO: 92925 - DNA, 17 bp, Arabidopsis thaliana
gaacacgtctgcctggg

SEQ ID NO: 92926 - DNA, 17 bp, Arabidopsis thaliana
gaacactagactattta

SEQ ID NO: 92927 - DNA, 17 bp, Arabidopsis thaliana
gaacactgctctatctg

SEQ ID NO: 92928 - DNA, 17 bp, Arabidopsis thaliana
gaacactggatcggccc

SEQ ID NO: 92929 - DNA, 17 bp, Arabidopsis thaliana
gaacactggctcggccc

SEQ ID NO: 92930 - DNA, 17 bp, Arabidopsis thaliana
gaacacttggacttagc

SEQ ID NO: 92931 - DNA, 17 bp, Arabidopsis thaliana
gaacacttttccggttt

SEQ ID NO: 92932 - DNA, 17 bp, Arabidopsis thaliana
gaacagaaagctagggt

SEQ ID NO: 92933 - DNA, 17 bp, Arabidopsis thaliana
gaacagaacggatgtgc

SEQ ID NO: 92934 - DNA, 17 bp, Arabidopsis thaliana
gaacagacaaggcgttg

SEQ ID NO: 92935 - DNA, 17 bp, Arabidopsis thaliana
gaacagacaatgtggtg

SEQ ID NO: 92936 - DNA, 17 bp, Arabidopsis thaliana
gaacagacttgcgacgg

SEQ ID NO: 92937 - DNA, 17 bp, Arabidopsis thaliana
gaacagagaaccagttg

SEQ ID NO: 92938 - DNA, 17 bp, Arabidopsis thaliana
gaacagagccagacgca

SEQ ID NO: 92939 - DNA, 17 bp, Arabidopsis thaliana
gaacagatctctgtgga

SEQ ID NO: 92940 - DNA, 17 bp, Arabidopsis thaliana
gaacagatctgtcgttg

SEQ ID NO: 92941 - DNA, 17 bp, Arabidopsis thaliana
gaacagattcattcagg

SEQ ID NO: 92942 - DNA, 17 bp, Arabidopsis thaliana
gaacagcctctggtcga

SEQ ID NO: 92943 - DNA, 17 bp, Arabidopsis thaliana
gaacagctcagctgccg

SEQ ID NO: 92944 - DNA, 17 bp, Arabidopsis thaliana
gaacagctggttacata

SEQ ID NO: 92945 - DNA, 17 bp, Arabidopsis thaliana
gaacagctggttacatt

SEQ ID NO: 92946 - DNA, 17 bp, Arabidopsis thaliana
gaacaggccatggtgat

SEQ ID NO: 92947 - DNA, 17 bp, Arabidopsis thaliana
gaacaggcccaatcacc

SEQ ID NO: 92948 - DNA, 17 bp, Arabidopsis thaliana
gaacaggcctcggtatc

SEQ ID NO: 92949 - DNA, 17 bp, Arabidopsis thaliana
gaacaggcggtcgcttt

SEQ ID NO: 92950 - DNA, 17 bp, Arabidopsis thaliana
gaacagggccaaggtct

SEQ ID NO: 92951 - DNA, 17 bp, Arabidopsis thaliana
gaacagggccatagtct

SEQ ID NO: 92952 - DNA, 17 bp, Arabidopsis thaliana
gaacagggccgaaagca

SEQ ID NO: 92953 - DNA, 17 bp, Arabidopsis thaliana
gaacagggccgtaattt

SEQ ID NO: 92954 - DNA, 17 bp, Arabidopsis thaliana
gaacagggttagtggta

SEQ ID NO: 92955 - DNA, 17 bp, Arabidopsis thaliana
gaacaggtgaagcttga

SEQ ID NO: 92956 - DNA, 17 bp, Arabidopsis thaliana
gaacaggttcgggtatt

SEQ ID NO: 92957 - DNA, 17 bp, Arabidopsis thaliana
gaacaggtttggcatga

SEQ ID NO: 92958 - DNA, 17 bp, Arabidopsis thaliana
gaacagtcaccggtgcg

SEQ ID NO: 92959 - DNA, 17 bp, Arabidopsis thaliana
gaacagtcagctcagaa

SEQ ID NO: 92960 - DNA, 17 bp, Arabidopsis thaliana
gaacagtctccgattta

SEQ ID NO: 92961 - DNA, 17 bp, Arabidopsis thaliana
gaacagtctgcctatga

SEQ ID NO: 92962 - DNA, 17 bp, Arabidopsis thaliana
gaacagtgaggtccata

SEQ ID NO: 92963 - DNA, 17 bp, Arabidopsis thaliana
gaacagtttctgcttct

SEQ ID NO: 92964 - DNA, 17 bp, Arabidopsis thaliana
gaacataatcttctgga

SEQ ID NO: 92965 - DNA, 17 bp, Arabidopsis thaliana
gaacatatccacccgcg

SEQ ID NO: 92966 - DNA, 17 bp, Arabidopsis thaliana
gaacatattagggaatc

SEQ ID NO: 92967 - DNA, 17 bp, Arabidopsis thaliana
gaacatcaatccagaag

SEQ ID NO: 92968 - DNA, 17 bp, Arabidopsis thaliana
gaacatcactgcaagta

SEQ ID NO: 92969 - DNA, 17 bp, Arabidopsis thaliana
gaacatcaggaagaact

SEQ ID NO: 92970 - DNA, 17 bp, Arabidopsis thaliana
gaacatcatgtggtttt

SEQ ID NO: 92971 - DNA, 17 bp, Arabidopsis thaliana
gaacatcctaagtgcgt

SEQ ID NO: 92972 - DNA, 17 bp, Arabidopsis thaliana
gaacatcgttgaagatc

SEQ ID NO: 92973 - DNA, 17 bp, Arabidopsis thaliana
gaacatcgttggctgga

SEQ ID NO: 92974 - DNA, 17 bp, Arabidopsis thaliana
gaacatctccaggatta

SEQ ID NO: 92975 - DNA, 17 bp, Arabidopsis thaliana
gaacatcttcaggatta

SEQ ID NO: 92976 - DNA, 17 bp, Arabidopsis thaliana
gaacatcttcttgatct

SEQ ID NO: 92977 - DNA, 17 bp, Arabidopsis thaliana
gaacatcttgtaacttc

SEQ ID NO: 92978 - DNA, 17 bp, Arabidopsis thaliana
gaacattacgcggaaac

SEQ ID NO: 92979 - DNA, 17 bp, Arabidopsis thaliana
gaacattagacctctcg

SEQ ID NO: 92980 - DNA, 17 bp, Arabidopsis thaliana
gaacattagacctctgg

SEQ ID NO: 92981 - DNA, 17 bp, Arabidopsis thaliana
gaacattatcagtggcg

SEQ ID NO: 92982 - DNA, 17 bp, Arabidopsis thaliana
gaacattatgtgggtat

SEQ ID NO: 92983 - DNA, 17 bp, Arabidopsis thaliana
gaacattattatgtgcg

SEQ ID NO: 92984 - DNA, 17 bp, Arabidopsis thaliana
gaacattctccagagat

SEQ ID NO: 92985 - DNA, 17 bp, Arabidopsis thaliana
gaacattgcgtcctcta

SEQ ID NO: 92986 - DNA, 17 bp, Arabidopsis thaliana
gaacattgtgtgcaaga

SEQ ID NO: 92987 - DNA, 17 bp, Arabidopsis thaliana
gaacatttacatcatgt

SEQ ID NO: 92988 - DNA, 17 bp, Arabidopsis thaliana
gaacatttggattcgag

SEQ ID NO: 92989 - DNA, 17 bp, Arabidopsis thaliana
gaacatttggtcaacta

SEQ ID NO: 92990 - DNA, 17 bp, Arabidopsis thaliana
gaacattttgtgaacta

SEQ ID NO: 92991 - DNA, 17 bp, Arabidopsis thaliana
gaacatttttcggacca

SEQ ID NO: 92992 - DNA, 17 bp, Arabidopsis thaliana
gaaccaaaagcaggctt

SEQ ID NO: 92993 - DNA, 17 bp, Arabidopsis thaliana
gaaccaaacaatgcgtt

SEQ ID NO: 92994 - DNA, 17 bp, Arabidopsis thaliana
gaaccaaatagtacttg

SEQ ID NO: 92995 - DNA, 17 bp, Arabidopsis thaliana
gaaccaaatggccagaa

SEQ ID NO: 92996 - DNA, 17 bp, Arabidopsis thaliana
gaaccaacgacaggcaa

SEQ ID NO: 92997 - DNA, 17 bp, Arabidopsis thaliana
gaaccaactgggaatgt

SEQ ID NO: 92998 - DNA, 17 bp, Arabidopsis thaliana
gaaccaagccacaaatc

SEQ ID NO: 92999 - DNA, 17 bp, Arabidopsis thaliana
gaaccaaggatgacttg

SEQ ID NO: 93000 - DNA, 17 bp, Arabidopsis thaliana
gaaccaaggattacttg

SEQ ID NO: 93001 - DNA, 17 bp, Arabidopsis thaliana
gaaccaatagatccctg

SEQ ID NO: 93002 - DNA, 17 bp, Arabidopsis thaliana
gaaccaatctccatcaa

SEQ ID NO: 93003 - DNA, 17 bp, Arabidopsis thaliana
gaaccaatgatgtgatg

SEQ ID NO: 93004 - DNA, 17 bp, Arabidopsis thaliana
gaaccaatggtgtgacg

SEQ ID NO: 93005 - DNA, 17 bp, Arabidopsis thaliana
gaaccaatggtgtgatg

SEQ ID NO: 93006 - DNA, 17 bp, Arabidopsis thaliana
gaaccacaccgcacttc

SEQ ID NO: 93007 - DNA, 17 bp, Arabidopsis thaliana
gaaccacccacgtcgcc

SEQ ID NO: 93008 - DNA, 17 bp, Arabidopsis thaliana
gaaccacctcccgaggt

SEQ ID NO: 93009 - DNA, 17 bp, Arabidopsis thaliana
gaaccacgagtaccaag

SEQ ID NO: 93010 - DNA, 17 bp, Arabidopsis thaliana
gaaccactaattccaga

SEQ ID NO: 93011 - DNA, 17 bp, Arabidopsis thaliana
gaaccactatggcctga

SEQ ID NO: 93012 - DNA, 17 bp, Arabidopsis thaliana
gaaccactatggcctgc

SEQ ID NO: 93013 - DNA, 17 bp, Arabidopsis thaliana
gaaccactccatctatt

SEQ ID NO: 93014 - DNA, 17 bp, Arabidopsis thaliana
gaaccactctttagtca

SEQ ID NO: 93015 - DNA, 17 bp, Arabidopsis thaliana
gaaccagacattgtcag

SEQ ID NO: 93016 - DNA, 17 bp, Arabidopsis thaliana
gaaccagagcacgaaga

SEQ ID NO: 93017 - DNA, 17 bp, Arabidopsis thaliana
gaaccagatggccgcgg

SEQ ID NO: 93018 - DNA, 17 bp, Arabidopsis thaliana
gaaccagcactgccgca

SEQ ID NO: 93019 - DNA, 17 bp, Arabidopsis thaliana
gaaccaggcgatggaga

SEQ ID NO: 93020 - DNA, 17 bp, Arabidopsis thaliana
gaaccaggggaattacg

SEQ ID NO: 93021 - DNA, 17 bp, Arabidopsis thaliana
gaaccaggtgagagctg

SEQ ID NO: 93022 - DNA, 17 bp, Arabidopsis thaliana
gaaccaggttcggtcgt

SEQ ID NO: 93023 - DNA, 17 bp, Arabidopsis thaliana
gaaccaggttgtactga

SEQ ID NO: 93024 - DNA, 17 bp, Arabidopsis thaliana
gaaccagtcgggtgtgg

SEQ ID NO: 93025 - DNA, 17 bp, Arabidopsis thaliana
gaaccatcgagtctttg

SEQ ID NO: 93026 - DNA, 17 bp, Arabidopsis thaliana
gaaccatgacactgctg

SEQ ID NO: 93027 - DNA, 17 bp, Arabidopsis thaliana
gaaccatgactttcact

SEQ ID NO: 93028 - DNA, 17 bp, Arabidopsis thaliana
gaaccatggaacattag

SEQ ID NO: 93029 - DNA, 17 bp, Arabidopsis thaliana
gaaccatgggagcttac

SEQ ID NO: 93030 - DNA, 17 bp, Arabidopsis thaliana
gaaccattaggcgtggg

SEQ ID NO: 93031 - DNA, 17 bp, Arabidopsis thaliana
gaaccattcgccctggc

SEQ ID NO: 93032 - DNA, 17 bp, Arabidopsis thaliana
gaaccattcgccgtggg

SEQ ID NO: 93033 - DNA, 17 bp, Arabidopsis thaliana
gaaccattggtgctact

SEQ ID NO: 93034 - DNA, 17 bp, Arabidopsis thaliana
gaaccatttggatggtc

SEQ ID NO: 93035 - DNA, 17 bp, Arabidopsis thaliana
gaacccaaaataaaccc

SEQ ID NO: 93036 - DNA, 17 bp, Arabidopsis thaliana
gaacccaaagacgtgtt

SEQ ID NO: 93037 - DNA, 17 bp, Arabidopsis thaliana
gaacccaagttttgttc

SEQ ID NO: 93038 - DNA, 17 bp, Arabidopsis thaliana
gaacccacaaagggtgt

SEQ ID NO: 93039 - DNA, 17 bp, Arabidopsis thaliana
gaacccagcacctccac

SEQ ID NO: 93040 - DNA, 17 bp, Arabidopsis thaliana
gaacccagttcttcgac

SEQ ID NO: 93041 - DNA, 17 bp, Arabidopsis thaliana
gaacccagttctttgac

SEQ ID NO: 93042 - DNA, 17 bp, Arabidopsis thaliana
gaacccatctgctgcag

SEQ ID NO: 93043 - DNA, 17 bp, Arabidopsis thaliana
gaacccatcttctgtta

SEQ ID NO: 93044 - DNA, 17 bp, Arabidopsis thaliana
gaacccatgggctgact

SEQ ID NO: 93045 - DNA, 17 bp, Arabidopsis thaliana
gaaccccacagcctgca

SEQ ID NO: 93046 - DNA, 17 bp, Arabidopsis thaliana
gaaccccaccggttatt

SEQ ID NO: 93047 - DNA, 17 bp, Arabidopsis thaliana
gaaccccagtggcggat

SEQ ID NO: 93048 - DNA, 17 bp, Arabidopsis thaliana
gaacccccgaaattcct

SEQ ID NO: 93049 - DNA, 17 bp, Arabidopsis thaliana
gaaccccgtaattcctc

SEQ ID NO: 93050 - DNA, 17 bp, Arabidopsis thaliana
gaacccgattggacccg

SEQ ID NO: 93051 - DNA, 17 bp, Arabidopsis thaliana
gaacccgggcaagccac

SEQ ID NO: 93052 - DNA, 17 bp, Arabidopsis thaliana
gaacccgggcgaagcca

SEQ ID NO: 93053 - DNA, 17 bp, Arabidopsis thaliana
gaacccgggctcagaca

SEQ ID NO: 93054 - DNA, 17 bp, Arabidopsis thaliana
gaacccgggtctgtacc

SEQ ID NO: 93055 - DNA, 17 bp, Arabidopsis thaliana
gaacccggttaggattg

SEQ ID NO: 93056 - DNA, 17 bp, Arabidopsis thaliana
gaacccgtcggctgtca

SEQ ID NO: 93057 - DNA, 17 bp, Arabidopsis thaliana
gaacccgttcaggtttg

SEQ ID NO: 93058 - DNA, 17 bp, Arabidopsis thaliana
gaaccctagatcagctc

SEQ ID NO: 93059 - DNA, 17 bp, Arabidopsis thaliana
gaaccctagatcagctt

SEQ ID NO: 93060 - DNA, 17 bp, Arabidopsis thaliana
gaaccctatcgactgat

SEQ ID NO: 93061 - DNA, 17 bp, Arabidopsis thaliana
gaaccctatgagggata

SEQ ID NO: 93062 - DNA, 17 bp, Arabidopsis thaliana
gaaccctgaacagactg

SEQ ID NO: 93063 - DNA, 17 bp, Arabidopsis thaliana
gaaccctgctgttgacg

SEQ ID NO: 93064 - DNA, 17 bp, Arabidopsis thaliana
gaacccttaacagactg

SEQ ID NO: 93065 - DNA, 17 bp, Arabidopsis thaliana
gaaccgaaacgcttcat

SEQ ID NO: 93066 - DNA, 17 bp, Arabidopsis thaliana
gaaccgaaccaggctgc

SEQ ID NO: 93067 - DNA, 17 bp, Arabidopsis thaliana
gaaccgaacccggaccg

SEQ ID NO: 93068 - DNA, 17 bp, Arabidopsis thaliana
gaaccgaagtccgtaat

SEQ ID NO: 93069 - DNA, 17 bp, Arabidopsis thaliana
gaaccgaatcgcgtcaa

SEQ ID NO: 93070 - DNA, 17 bp, Arabidopsis thaliana
gaaccgaatctaatacc

SEQ ID NO: 93071 - DNA, 17 bp, Arabidopsis thaliana
gaaccgaatctaatatc

SEQ ID NO: 93072 - DNA, 17 bp, Arabidopsis thaliana
gaaccgaatggccagtg

SEQ ID NO: 93073 - DNA, 17 bp, Arabidopsis thaliana
gaaccgacagacaacca

SEQ ID NO: 93074 - DNA, 17 bp, Arabidopsis thaliana
gaaccgaccgctcaccc

SEQ ID NO: 93075 - DNA, 17 bp, Arabidopsis thaliana
gaaccgacgacctctaa

SEQ ID NO: 93076 - DNA, 17 bp, Arabidopsis thaliana
gaaccgacgacctctct

SEQ ID NO: 93077 - DNA, 17 bp, Arabidopsis thaliana
gaaccgacgatctctaa

SEQ ID NO: 93078 - DNA, 17 bp, Arabidopsis thaliana
gaaccgacgatctttaa

SEQ ID NO: 93079 - DNA, 17 bp, Arabidopsis thaliana
gaaccgacggtctgtcc

SEQ ID NO: 93080 - DNA, 17 bp, Arabidopsis thaliana
gaaccgactgggctcaa

SEQ ID NO: 93081 - DNA, 17 bp, Arabidopsis thaliana
gaaccgaggcacgtctg

SEQ ID NO: 93082 - DNA, 17 bp, Arabidopsis thaliana
gaaccgatgacgcgtct

SEQ ID NO: 93083 - DNA, 17 bp, Arabidopsis thaliana
gaaccgattgtgccgaa

SEQ ID NO: 93084 - DNA, 17 bp, Arabidopsis thaliana
gaaccgatttgcggttc

SEQ ID NO: 93085 - DNA, 17 bp, Arabidopsis thaliana
gaaccgcaaccggcttc

SEQ ID NO: 93086 - DNA, 17 bp, Arabidopsis thaliana
gaaccgcaccgcacttc

SEQ ID NO: 93087 - DNA, 17 bp, Arabidopsis thaliana
gaaccgcaccgcacttt

SEQ ID NO: 93088 - DNA, 17 bp, Arabidopsis thaliana
gaaccgcaccgcatttc

SEQ ID NO: 93089 - DNA, 17 bp, Arabidopsis thaliana
gaaccgcaccgcatttt

SEQ ID NO: 93090 - DNA, 17 bp, Arabidopsis thaliana
gaaccgcactgcacttt

SEQ ID NO: 93091 - DNA, 17 bp, Arabidopsis thaliana
gaaccgccagaactgct

SEQ ID NO: 93092 - DNA, 17 bp, Arabidopsis thaliana
gaaccgccgtgatgacc

SEQ ID NO: 93093 - DNA, 17 bp, Arabidopsis thaliana
gaaccgccgtgtctcca

SEQ ID NO: 93094 - DNA, 17 bp, Arabidopsis thaliana
gaaccgccttgttctgt

SEQ ID NO: 93095 - DNA, 17 bp, Arabidopsis thaliana
gaaccgcgaaactcgga

SEQ ID NO: 93096 - DNA, 17 bp, Arabidopsis thaliana
gaaccgcgtcatgggtg

SEQ ID NO: 93097 - DNA, 17 bp, Arabidopsis thaliana
gaaccgctcctgcatgc

SEQ ID NO: 93098 - DNA, 17 bp, Arabidopsis thaliana
gaaccgctcttgcatgc

SEQ ID NO: 93099 - DNA, 17 bp, Arabidopsis thaliana
gaaccgcttgatccgct

SEQ ID NO: 93100 - DNA, 17 bp, Arabidopsis thaliana
gaaccgcttgatctgct

SEQ ID NO: 93101 - DNA, 17 bp, Arabidopsis thaliana
gaaccggccgggtgtgg

SEQ ID NO: 93102 - DNA, 17 bp, Arabidopsis thaliana
gaaccgtaccgcacttt

SEQ ID NO: 93103 - DNA, 17 bp, Arabidopsis thaliana
gaaccgtatcgcacttc

SEQ ID NO: 93104 - DNA, 17 bp, Arabidopsis thaliana
gaaccgtcctctaggtg

SEQ ID NO: 93105 - DNA, 17 bp, Arabidopsis thaliana
gaaccgtgaggccaaac

SEQ ID NO: 93106 - DNA, 17 bp, Arabidopsis thaliana
gaaccgtgattttgatg

SEQ ID NO: 93107 - DNA, 17 bp, Arabidopsis thaliana
gaaccgtgcattccatg

SEQ ID NO: 93108 - DNA, 17 bp, Arabidopsis thaliana
gaaccgtggcatgcgtg

SEQ ID NO: 93109 - DNA, 17 bp, Arabidopsis thaliana
gaaccgtggtagaatcg

SEQ ID NO: 93110 - DNA, 17 bp, Arabidopsis thaliana
gaaccgttcaccgtggg

SEQ ID NO: 93111 - DNA, 17 bp, Arabidopsis thaliana
gaaccgttccatacagc

SEQ ID NO: 93112 - DNA, 17 bp, Arabidopsis thaliana
gaaccgttcgccctggg

SEQ ID NO: 93113 - DNA, 17 bp, Arabidopsis thaliana
gaaccgttcgccgtggg

SEQ ID NO: 93114 - DNA, 17 bp, Arabidopsis thaliana
gaaccgtttcataaatt

SEQ ID NO: 93115 - DNA, 17 bp, Arabidopsis thaliana
gaaccgttttcaacctc

SEQ ID NO: 93116 - DNA, 17 bp, Arabidopsis thaliana
gaacctacatagcgggt

SEQ ID NO: 93117 - DNA, 17 bp, Arabidopsis thaliana
gaacctagactggcatg

SEQ ID NO: 93118 - DNA, 17 bp, Arabidopsis thaliana
gaacctattcgattttg

SEQ ID NO: 93119 - DNA, 17 bp, Arabidopsis thaliana
gaacctcataatctttc

SEQ ID NO: 93120 - DNA, 17 bp, Arabidopsis thaliana
gaacctccgctgacgct

SEQ ID NO: 93121 - DNA, 17 bp, Arabidopsis thaliana
gaacctcgggaaagcta

SEQ ID NO: 93122 - DNA, 17 bp, Arabidopsis thaliana
gaacctcggttggatat

SEQ ID NO: 93123 - DNA, 17 bp, Arabidopsis thaliana
gaacctgagaccgtcca

SEQ ID NO: 93124 - DNA, 17 bp, Arabidopsis thaliana
gaacctgagaggattac

SEQ ID NO: 93125 - DNA, 17 bp, Arabidopsis thaliana
gaacctgattgatcaaa

SEQ ID NO: 93126 - DNA, 17 bp, Arabidopsis thaliana
gaacctgcaggagaaga

SEQ ID NO: 93127 - DNA, 17 bp, Arabidopsis thaliana
gaacctgcggaaggatc

SEQ ID NO: 93128 - DNA, 17 bp, Arabidopsis thaliana
gaacctgcggatgatca

SEQ ID NO: 93129 - DNA, 17 bp, Arabidopsis thaliana
gaacctggctctgatac

SEQ ID NO: 93130 - DNA, 17 bp, Arabidopsis thaliana
gaacctgggtgatctat

SEQ ID NO: 93131 - DNA, 17 bp, Arabidopsis thaliana
gaacctggttaggattg

SEQ ID NO: 93132 - DNA, 17 bp, Arabidopsis thaliana
gaacctgtgacatctac

SEQ ID NO: 93133 - DNA, 17 bp, Arabidopsis thaliana
gaacctgtggctggatg

SEQ ID NO: 93134 - DNA, 17 bp, Arabidopsis thaliana
gaaccttaggatgggtc

SEQ ID NO: 93135 - DNA, 17 bp, Arabidopsis thaliana
gaaccttatctcctggt

SEQ ID NO: 93136 - DNA, 17 bp, Arabidopsis thaliana
gaaccttcgcctcgtag

SEQ ID NO: 93137 - DNA, 17 bp, Arabidopsis thaliana
gaaccttctcggcttcg

SEQ ID NO: 93138 - DNA, 17 bp, Arabidopsis thaliana
gaaccttcttaaagtac

SEQ ID NO: 93139 - DNA, 17 bp, Arabidopsis thaliana
gaaccttgagccgccgc

SEQ ID NO: 93140 - DNA, 17 bp, Arabidopsis thaliana
gaaccttgccttcatcc

SEQ ID NO: 93141 - DNA, 17 bp, Arabidopsis thaliana
gaaccttgctgaccatt

SEQ ID NO: 93142 - DNA, 17 bp, Arabidopsis thaliana
gaaccttgggatgggcc

SEQ ID NO: 93143 - DNA, 17 bp, Arabidopsis thaliana
gaaccttgggatggggc

SEQ ID NO: 93144 - DNA, 17 bp, Arabidopsis thaliana
gaaccttgggatgggtc

SEQ ID NO: 93145 - DNA, 17 bp, Arabidopsis thaliana
gaaccttgggatggtcg

SEQ ID NO: 93146 - DNA, 17 bp, Arabidopsis thaliana
gaaccttgtgtcaggac

SEQ ID NO: 93147 - DNA, 17 bp, Arabidopsis thaliana
gaaccttgttcatcaga

SEQ ID NO: 93148 - DNA, 17 bp, Arabidopsis thaliana
gaacctttccatttccg

SEQ ID NO: 93149 - DNA, 17 bp, Arabidopsis thaliana
gaaccttttcaaccctt

SEQ ID NO: 93150 - DNA, 17 bp, Arabidopsis thaliana
gaacgaaaacccgtgtt

SEQ ID NO: 93151 - DNA, 17 bp, Arabidopsis thaliana
gaacgaaaagctagggt

SEQ ID NO: 93152 - DNA, 17 bp, Arabidopsis thaliana
gaacgaaaatataggcc

SEQ ID NO: 93153 - DNA, 17 bp, Arabidopsis thaliana
gaacgaaacccgtaatt

SEQ ID NO: 93154 - DNA, 17 bp, Arabidopsis thaliana
gaacgaaactaaggggg

SEQ ID NO: 93155 - DNA, 17 bp, Arabidopsis thaliana
gaacgaaactagccggg

SEQ ID NO: 93156 - DNA, 17 bp, Arabidopsis thaliana
gaacgaaactgagttac

SEQ ID NO: 93157 - DNA, 17 bp, Arabidopsis thaliana
gaacgaaagcactctgc

SEQ ID NO: 93158 - DNA, 17 bp, Arabidopsis thaliana
gaacgaaagttgggggc

SEQ ID NO: 93159 - DNA, 17 bp, Arabidopsis thaliana
gaacgaaatccaggagg

SEQ ID NO: 93160 - DNA, 17 bp, Arabidopsis thaliana
gaacgaaatctcgggat

SEQ ID NO: 93161 - DNA, 17 bp, Arabidopsis thaliana
gaacgaaattagccgaa

SEQ ID NO: 93162 - DNA, 17 bp, Arabidopsis thaliana
gaacgaaattgcccttg

SEQ ID NO: 93163 - DNA, 17 bp, Arabidopsis thaliana
gaacgaaatttacttcg

SEQ ID NO: 93164 - DNA, 17 bp, Arabidopsis thaliana
gaacgaacaaagttgct

SEQ ID NO: 93165 - DNA, 17 bp, Arabidopsis thaliana
gaacgaacaggcggtcg

SEQ ID NO: 93166 - DNA, 17 bp, Arabidopsis thaliana
gaacgaacagtgaggtc

SEQ ID NO: 93167 - DNA, 17 bp, Arabidopsis thaliana
gaacgaacagttgatca

SEQ ID NO: 93168 - DNA, 17 bp, Arabidopsis thaliana
gaacgaacatatccacc

SEQ ID NO: 93169 - DNA, 17 bp, Arabidopsis thaliana
gaacgaacatcgttgaa

SEQ ID NO: 93170 - DNA, 17 bp, Arabidopsis thaliana
gaacgaaccagttgaac

SEQ ID NO: 93171 - DNA, 17 bp, Arabidopsis thaliana
gaacgaacccacaaagg

SEQ ID NO: 93172 - DNA, 17 bp, Arabidopsis thaliana
gaacgaacccgggctca

SEQ ID NO: 93173 - DNA, 17 bp, Arabidopsis thaliana
gaacgaaccctagatca

SEQ ID NO: 93174 - DNA, 17 bp, Arabidopsis thaliana
gaacgaaccgacggtct

SEQ ID NO: 93175 - DNA, 17 bp, Arabidopsis thaliana
gaacgaaccgtggcatg

SEQ ID NO: 93176 - DNA, 17 bp, Arabidopsis thaliana
gaacgaacctcggttgg

SEQ ID NO: 93177 - DNA, 17 bp, Arabidopsis thaliana
gaacgaacctgcggaag

SEQ ID NO: 93178 - DNA, 17 bp, Arabidopsis thaliana
gaacgaaccttgggatg

SEQ ID NO: 93179 - DNA, 17 bp, Arabidopsis thaliana
gaacgaacgaacttcaa

SEQ ID NO: 93180 - DNA, 17 bp, Arabidopsis thaliana
gaacgaacgagccaatc

SEQ ID NO: 93181 - DNA, 17 bp, Arabidopsis thaliana
gaacgaacgcttggact

SEQ ID NO: 93182 - DNA, 17 bp, Arabidopsis thaliana
gaacgaactaaaacacc

SEQ ID NO: 93183 - DNA, 17 bp, Arabidopsis thaliana
gaacgaactatgcctga

SEQ ID NO: 93184 - DNA, 17 bp, Arabidopsis thaliana
gaacgaactctagaccg

SEQ ID NO: 93185 - DNA, 17 bp, Arabidopsis thaliana
gaacgaactctcggtca

SEQ ID NO: 93186 - DNA, 17 bp, Arabidopsis thaliana
gaacgaactggtacgga

SEQ ID NO: 93187 - DNA, 17 bp, Arabidopsis thaliana
gaacgaactgtacagtg

SEQ ID NO: 93188 - DNA, 17 bp, Arabidopsis thaliana
gaacgaactgtgacttt

SEQ ID NO: 93189 - DNA, 17 bp, Arabidopsis thaliana
gaacgaactgtgagtcc

SEQ ID NO: 93190 - DNA, 17 bp, Arabidopsis thaliana
gaacgaacttagtttcc

SEQ ID NO: 93191 - DNA, 17 bp, Arabidopsis thaliana
gaacgaacttgaactaa

SEQ ID NO: 93192 - DNA, 17 bp, Arabidopsis thaliana
gaacgaactttggtaag

SEQ ID NO: 93193 - DNA, 17 bp, Arabidopsis thaliana
gaacgaagacgcgggtt

SEQ ID NO: 93194 - DNA, 17 bp, Arabidopsis thaliana
gaacgaagactcaggac

SEQ ID NO: 93195 - DNA, 17 bp, Arabidopsis thaliana
gaacgaagccagaaggg

SEQ ID NO: 93196 - DNA, 17 bp, Arabidopsis thaliana
gaacgaagcgacgcatg

SEQ ID NO: 93197 - DNA, 17 bp, Arabidopsis thaliana
gaacgaagcgtcctcag

SEQ ID NO: 93198 - DNA, 17 bp, Arabidopsis thaliana
gaacgaagcttgtagct

SEQ ID NO: 93199 - DNA, 17 bp, Arabidopsis thaliana
gaacgaaggaaaatatc

SEQ ID NO: 93200 - DNA, 17 bp, Arabidopsis thaliana
gaacgaagtaacactcg

SEQ ID NO: 93201 - DNA, 17 bp, Arabidopsis thaliana
gaacgaagtcctcgtgt

SEQ ID NO: 93202 - DNA, 17 bp, Arabidopsis thaliana
gaacgaagttccgtagt

SEQ ID NO: 93203 - DNA, 17 bp, Arabidopsis thaliana
gaacgaataccaggagg

SEQ ID NO: 93204 - DNA, 17 bp, Arabidopsis thaliana
gaacgaatacgcagtcc

SEQ ID NO: 93205 - DNA, 17 bp, Arabidopsis thaliana
gaacgaatactgggacc

SEQ ID NO: 93206 - DNA, 17 bp, Arabidopsis thaliana
gaacgaatcaacgatgt

SEQ ID NO: 93207 - DNA, 17 bp, Arabidopsis thaliana
gaacgaatccagcgacc

SEQ ID NO: 93208 - DNA, 17 bp, Arabidopsis thaliana
gaacgaatcctgtaatc

SEQ ID NO: 93209 - DNA, 17 bp, Arabidopsis thaliana
gaacgaatctcaggtta

SEQ ID NO: 93210 - DNA, 17 bp, Arabidopsis thaliana
gaacgaatctgtggccc

SEQ ID NO: 93211 - DNA, 17 bp, Arabidopsis thaliana
gaacgaatggtgattgc

SEQ ID NO: 93212 - DNA, 17 bp, Arabidopsis thaliana
gaacgaattcagactgt

SEQ ID NO: 93213 - DNA, 17 bp, Arabidopsis thaliana
gaacgaattgtggcgca

SEQ ID NO: 93214 - DNA, 17 bp, Arabidopsis thaliana
gaacgacatcttctggc

SEQ ID NO: 93215 - DNA, 17 bp, Arabidopsis thaliana
gaacgacctgtgtcccc

SEQ ID NO: 93216 - DNA, 17 bp, Arabidopsis thaliana
gaacgacctgtgtgcca

SEQ ID NO: 93217 - DNA, 17 bp, Arabidopsis thaliana
gaacgacctgtgtgctt

SEQ ID NO: 93218 - DNA, 17 bp, Arabidopsis thaliana
gaacgaccttgatgagc

SEQ ID NO: 93219 - DNA, 17 bp, Arabidopsis thaliana
gaacgacgagatcttgc

SEQ ID NO: 93220 - DNA, 17 bp, Arabidopsis thaliana
gaacgacgcggattacg

SEQ ID NO: 93221 - DNA, 17 bp, Arabidopsis thaliana
gaacgacgggttttgat

SEQ ID NO: 93222 - DNA, 17 bp, Arabidopsis thaliana
gaacgacgtcgctgcag

SEQ ID NO: 93223 - DNA, 17 bp, Arabidopsis thaliana
gaacgactctaggcaac

SEQ ID NO: 93224 - DNA, 17 bp, Arabidopsis thaliana
gaacgactggttgagcg

SEQ ID NO: 93225 - DNA, 17 bp, Arabidopsis thaliana
gaacgactgtttttgta

SEQ ID NO: 93226 - DNA, 17 bp, Arabidopsis thaliana
gaacgactttcttggca

SEQ ID NO: 93227 - DNA, 17 bp, Arabidopsis thaliana
gaacgagacctcagcct

SEQ ID NO: 93228 - DNA, 17 bp, Arabidopsis thaliana
gaacgaggctctaacca

SEQ ID NO: 93229 - DNA, 17 bp, Arabidopsis thaliana
gaacgagtaaactctac

SEQ ID NO: 93230 - DNA, 17 bp, Arabidopsis thaliana
gaacgatagacttgaca

SEQ ID NO: 93231 - DNA, 17 bp, Arabidopsis thaliana
gaacgatcattatctct

SEQ ID NO: 93232 - DNA, 17 bp, Arabidopsis thaliana
gaacgatctgtgtcccc

SEQ ID NO: 93233 - DNA, 17 bp, Arabidopsis thaliana
gaacgatcttagatttt

SEQ ID NO: 93234 - DNA, 17 bp, Arabidopsis thaliana
gaacgattacggggttt

SEQ ID NO: 93235 - DNA, 17 bp, Arabidopsis thaliana
gaacgattactcgaacc

SEQ ID NO: 93236 - DNA, 17 bp, Arabidopsis thaliana
gaacgattatgggtttc

SEQ ID NO: 93237 - DNA, 17 bp, Arabidopsis thaliana
gaacgatttgtaatccg

SEQ ID NO: 93238 - DNA, 17 bp, Arabidopsis thaliana
gaacgcacagtatagag

SEQ ID NO: 93239 - DNA, 17 bp, Arabidopsis thaliana
gaacgcaccatccacct

SEQ ID NO: 93240 - DNA, 17 bp, Arabidopsis thaliana
gaacgcagcatcagcga

SEQ ID NO: 93241 - DNA, 17 bp, Arabidopsis thaliana
gaacgcagcgtcagcga

SEQ ID NO: 93242 - DNA, 17 bp, Arabidopsis thaliana
gaacgccatgttggact

SEQ ID NO: 93243 - DNA, 17 bp, Arabidopsis thaliana
gaacgcccccgatcagt

SEQ ID NO: 93244 - DNA, 17 bp, Arabidopsis thaliana
gaacgccgttgagtcgc

SEQ ID NO: 93245 - DNA, 17 bp, Arabidopsis thaliana
gaacgctatgttgaact

SEQ ID NO: 93246 - DNA, 17 bp, Arabidopsis thaliana
gaacgctatgttggact

SEQ ID NO: 93247 - DNA, 17 bp, Arabidopsis thaliana
gaacgctattagtttgc

SEQ ID NO: 93248 - DNA, 17 bp, Arabidopsis thaliana
gaacgctccgatggtaa

SEQ ID NO: 93249 - DNA, 17 bp, Arabidopsis thaliana
gaacgctctatataacc

SEQ ID NO: 93250 - DNA, 17 bp, Arabidopsis thaliana
gaacgctgaggcgattg

SEQ ID NO: 93251 - DNA, 17 bp, Arabidopsis thaliana
gaacgctggcggcatgc

SEQ ID NO: 93252 - DNA, 17 bp, Arabidopsis thaliana
gaacgcttcaacccagt

SEQ ID NO: 93253 - DNA, 17 bp, Arabidopsis thaliana
gaacgcttggacttagg

SEQ ID NO: 93254 - DNA, 17 bp, Arabidopsis thaliana
gaacgctttggacttag

SEQ ID NO: 93255 - DNA, 17 bp, Arabidopsis thaliana
gaacggaagattggcta

SEQ ID NO: 93256 - DNA, 17 bp, Arabidopsis thaliana
gaacggaattagatggt

SEQ ID NO: 93257 - DNA, 17 bp, Arabidopsis thaliana
gaacggaatttagggtt

SEQ ID NO: 93258 - DNA, 17 bp, Arabidopsis thaliana
gaacggaccatttgaca

SEQ ID NO: 93259 - DNA, 17 bp, Arabidopsis thaliana
gaacggaccttgcaagt

SEQ ID NO: 93260 - DNA, 17 bp, Arabidopsis thaliana
gaacggacttagccaac

SEQ ID NO: 93261 - DNA, 17 bp, Arabidopsis thaliana
gaacggagaaccgaaag

SEQ ID NO: 93262 - DNA, 17 bp, Arabidopsis thaliana
gaacggaggcaattttg

SEQ ID NO: 93263 - DNA, 17 bp, Arabidopsis thaliana
gaacggagtagtaccta

SEQ ID NO: 93264 - DNA, 17 bp, Arabidopsis thaliana
gaacggatttgagattc

SEQ ID NO: 93265 - DNA, 17 bp, Arabidopsis thaliana
gaacggcacttgcacat

SEQ ID NO: 93266 - DNA, 17 bp, Arabidopsis thaliana
gaacggccgacccatcc

SEQ ID NO: 93267 - DNA, 17 bp, Arabidopsis thaliana
gaacggcgaagaaatta

SEQ ID NO: 93268 - DNA, 17 bp, Arabidopsis thaliana
gaacggctctctcggga

SEQ ID NO: 93269 - DNA, 17 bp, Arabidopsis thaliana
gaacggcttgtccctgg

SEQ ID NO: 93270 - DNA, 17 bp, Arabidopsis thaliana
gaacgggactacaaatt

SEQ ID NO: 93271 - DNA, 17 bp, Arabidopsis thaliana
gaacgggatgggatgtt

SEQ ID NO: 93272 - DNA, 17 bp, Arabidopsis thaliana
gaacgggcttgattatg

SEQ ID NO: 93273 - DNA, 17 bp, Arabidopsis thaliana
gaacgggcttggcagaa

SEQ ID NO: 93274 - DNA, 17 bp, Arabidopsis thaliana
gaacggggttaaatggt

SEQ ID NO: 93275 - DNA, 17 bp, Arabidopsis thaliana
gaacggggttagatggt

SEQ ID NO: 93276 - DNA, 17 bp, Arabidopsis thaliana
gaacggggttagtggta

SEQ ID NO: 93277 - DNA, 17 bp, Arabidopsis thaliana
gaacgggtatcgtctgt

SEQ ID NO: 93278 - DNA, 17 bp, Arabidopsis thaliana
gaacgggtcaagttctg

SEQ ID NO: 93279 - DNA, 17 bp, Arabidopsis thaliana
gaacgggtcctaaactt

SEQ ID NO: 93280 - DNA, 17 bp, Arabidopsis thaliana
gaacgggtctgcgcatc

SEQ ID NO: 93281 - DNA, 17 bp, Arabidopsis thaliana
gaacgggtttggaaaga

SEQ ID NO: 93282 - DNA, 17 bp, Arabidopsis thaliana
gaacggtataagagatg

SEQ ID NO: 93283 - DNA, 17 bp, Arabidopsis thaliana
gaacggtcatctatttg

SEQ ID NO: 93284 - DNA, 17 bp, Arabidopsis thaliana
gaacggtccagcttgcg

SEQ ID NO: 93285 - DNA, 17 bp, Arabidopsis thaliana
gaacggtgactgcattt

SEQ ID NO: 93286 - DNA, 17 bp, Arabidopsis thaliana
gaacggtgactgcgttt

SEQ ID NO: 93287 - DNA, 17 bp, Arabidopsis thaliana
gaacggtgctaagcgat

SEQ ID NO: 93288 - DNA, 17 bp, Arabidopsis thaliana
gaacggtgctacaaaga

SEQ ID NO: 93289 - DNA, 17 bp, Arabidopsis thaliana
gaacggtgttcgcctag

SEQ ID NO: 93290 - DNA, 17 bp, Arabidopsis thaliana
gaacggttcaactgcgg

SEQ ID NO: 93291 - DNA, 17 bp, Arabidopsis thaliana
gaacggttcttcttcaa

SEQ ID NO: 93292 - DNA, 17 bp, Arabidopsis thaliana
gaacgtaaagtacctac

SEQ ID NO: 93293 - DNA, 17 bp, Arabidopsis thaliana
gaacgtccatcaccatg

SEQ ID NO: 93294 - DNA, 17 bp, Arabidopsis thaliana
gaacgtcggttgtttgg

SEQ ID NO: 93295 - DNA, 17 bp, Arabidopsis thaliana
gaacgtcgtcttattca

SEQ ID NO: 93296 - DNA, 17 bp, Arabidopsis thaliana
gaacgtcgtggtggtcg

SEQ ID NO: 93297 - DNA, 17 bp, Arabidopsis thaliana
gaacgtcgttaggtcat

SEQ ID NO: 93298 - DNA, 17 bp, Arabidopsis thaliana
gaacgtctagctcagtt

SEQ ID NO: 93299 - DNA, 17 bp, Arabidopsis thaliana
gaacgtctgcctgggtg

SEQ ID NO: 93300 - DNA, 17 bp, Arabidopsis thaliana
gaacgtctggaaaatct

SEQ ID NO: 93301 - DNA, 17 bp, Arabidopsis thaliana
gaacgtgactcttcgct

SEQ ID NO: 93302 - DNA, 17 bp, Arabidopsis thaliana
gaacgtgactgatttgt

SEQ ID NO: 93303 - DNA, 17 bp, Arabidopsis thaliana
gaacgtggtcccgggga

SEQ ID NO: 93304 - DNA, 17 bp, Arabidopsis thaliana
gaacgttaaccgggtga

SEQ ID NO: 93305 - DNA, 17 bp, Arabidopsis thaliana
gaacgttgctagacatt

SEQ ID NO: 93306 - DNA, 17 bp, Arabidopsis thaliana
gaacgttgctagacttt

SEQ ID NO: 93307 - DNA, 17 bp, Arabidopsis thaliana
gaacgttggcggctccc

SEQ ID NO: 93308 - DNA, 17 bp, Arabidopsis thaliana
gaacgtttgcggttgcg

SEQ ID NO: 93309 - DNA, 17 bp, Arabidopsis thaliana
gaacgtttgttgtgtcc

SEQ ID NO: 93310 - DNA, 17 bp, Arabidopsis thaliana
gaactaaaacaccaggc

SEQ ID NO: 93311 - DNA, 17 bp, Arabidopsis thaliana
gaactaaaatgcgagta

SEQ ID NO: 93312 - DNA, 17 bp, Arabidopsis thaliana
gaactaaaccttcaatg

SEQ ID NO: 93313 - DNA, 17 bp, Arabidopsis thaliana
gaactaaatgtactttt

SEQ ID NO: 93314 - DNA, 17 bp, Arabidopsis thaliana
gaactaacaaaatagcc

SEQ ID NO: 93315 - DNA, 17 bp, Arabidopsis thaliana
gaactaacgacacctgg

SEQ ID NO: 93316 - DNA, 17 bp, Arabidopsis thaliana
gaactaacgacacttgg

SEQ ID NO: 93317 - DNA, 17 bp, Arabidopsis thaliana
gaactaactgcgaaccg

SEQ ID NO: 93318 - DNA, 17 bp, Arabidopsis thaliana
gaactaactgcggattg

SEQ ID NO: 93319 - DNA, 17 bp, Arabidopsis thaliana
gaactaagtttgcagcg

SEQ ID NO: 93320 - DNA, 17 bp, Arabidopsis thaliana
gaactaataacacggct

SEQ ID NO: 93321 - DNA, 17 bp, Arabidopsis thaliana
gaactaatcacgaacaa

SEQ ID NO: 93322 - DNA, 17 bp, Arabidopsis thaliana
gaactaatccgtcaacg

SEQ ID NO: 93323 - DNA, 17 bp, Arabidopsis thaliana
gaactaatttgcggtct

SEQ ID NO: 93324 - DNA, 17 bp, Arabidopsis thaliana
gaactacaagatctccg

SEQ ID NO: 93325 - DNA, 17 bp, Arabidopsis thaliana
gaactacagagcgacag

SEQ ID NO: 93326 - DNA, 17 bp, Arabidopsis thaliana
gaactacagggagtttg

SEQ ID NO: 93327 - DNA, 17 bp, Arabidopsis thaliana
gaactaccacactgtct

SEQ ID NO: 93328 - DNA, 17 bp, Arabidopsis thaliana
gaactacgaggtggctt

SEQ ID NO: 93329 - DNA, 17 bp, Arabidopsis thaliana
gaactacggatggcttg

SEQ ID NO: 93330 - DNA, 17 bp, Arabidopsis thaliana
gaactacgggtcgtctt

SEQ ID NO: 93331 - DNA, 17 bp, Arabidopsis thaliana
gaactacgggttggttt

SEQ ID NO: 93332 - DNA, 17 bp, Arabidopsis thaliana
gaactactatgtgacga

SEQ ID NO: 93333 - DNA, 17 bp, Arabidopsis thaliana
gaactactgatcaatta

SEQ ID NO: 93334 - DNA, 17 bp, Arabidopsis thaliana
gaactagacctcagcca

SEQ ID NO: 93335 - DNA, 17 bp, Arabidopsis thaliana
gaactaggatcgagggg

SEQ ID NO: 93336 - DNA, 17 bp, Arabidopsis thaliana
gaactatagaacgtcag

SEQ ID NO: 93337 - DNA, 17 bp, Arabidopsis thaliana
gaactatctaatttccg

SEQ ID NO: 93338 - DNA, 17 bp, Arabidopsis thaliana
gaactatgcctgaacgg

SEQ ID NO: 93339 - DNA, 17 bp, Arabidopsis thaliana
gaactatgcctgagcgg

SEQ ID NO: 93340 - DNA, 17 bp, Arabidopsis thaliana
gaactatgcgagtgacg

SEQ ID NO: 93341 - DNA, 17 bp, Arabidopsis thaliana
gaactatgggcaagcag

SEQ ID NO: 93342 - DNA, 17 bp, Arabidopsis thaliana
gaactattagctcagtg

SEQ ID NO: 93343 - DNA, 17 bp, Arabidopsis thaliana
gaactattctcaatcgg

SEQ ID NO: 93344 - DNA, 17 bp, Arabidopsis thaliana
gaactattggctctggg

SEQ ID NO: 93345 - DNA, 17 bp, Arabidopsis thaliana
gaactatttcatacagg

SEQ ID NO: 93346 - DNA, 17 bp, Arabidopsis thaliana
gaactcaaacatcgctt

SEQ ID NO: 93347 - DNA, 17 bp, Arabidopsis thaliana
gaactcaaacatctgct

SEQ ID NO: 93348 - DNA, 17 bp, Arabidopsis thaliana
gaactcaaccgcttctc

SEQ ID NO: 93349 - DNA, 17 bp, Arabidopsis thaliana
gaactcaattttacata

SEQ ID NO: 93350 - DNA, 17 bp, Arabidopsis thaliana
gaactcacgctacacgt

SEQ ID NO: 93351 - DNA, 17 bp, Arabidopsis thaliana
gaactcacttggtttcg

SEQ ID NO: 93352 - DNA, 17 bp, Arabidopsis thaliana
gaactcagcttgctcaa

SEQ ID NO: 93353 - DNA, 17 bp, Arabidopsis thaliana
gaactcagtcccggtaa

SEQ ID NO: 93354 - DNA, 17 bp, Arabidopsis thaliana
gaactcatcaatagctg

SEQ ID NO: 93355 - DNA, 17 bp, Arabidopsis thaliana
gaactcatccttgtcgc

SEQ ID NO: 93356 - DNA, 17 bp, Arabidopsis thaliana
gaactcatttggctaag

SEQ ID NO: 93357 - DNA, 17 bp, Arabidopsis thaliana
gaactccaaccttggtc

SEQ ID NO: 93358 - DNA, 17 bp, Arabidopsis thaliana
gaactccatggctaaag

SEQ ID NO: 93359 - DNA, 17 bp, Arabidopsis thaliana
gaactcccagaacatcc

SEQ ID NO: 93360 - DNA, 17 bp, Arabidopsis thaliana
gaactccggtggaacca

SEQ ID NO: 93361 - DNA, 17 bp, Arabidopsis thaliana
gaactcgacattattgt

SEQ ID NO: 93362 - DNA, 17 bp, Arabidopsis thaliana
gaactcgagacagacag

SEQ ID NO: 93363 - DNA, 17 bp, Arabidopsis thaliana
gaactcgatttagccgc

SEQ ID NO: 93364 - DNA, 17 bp, Arabidopsis thaliana
gaactcggcaaaatagc

SEQ ID NO: 93365 - DNA, 17 bp, Arabidopsis thaliana
gaactcggcatagactt

SEQ ID NO: 93366 - DNA, 17 bp, Arabidopsis thaliana
gaactcgggagagtgtc

SEQ ID NO: 93367 - DNA, 17 bp, Arabidopsis thaliana
gaactcgggatagtgtc

SEQ ID NO: 93368 - DNA, 17 bp, Arabidopsis thaliana
gaactcgggctcgagac

SEQ ID NO: 93369 - DNA, 17 bp, Arabidopsis thaliana
gaactcgggtcgagatg

SEQ ID NO: 93370 - DNA, 17 bp, Arabidopsis thaliana
gaactcggttaccaatt

SEQ ID NO: 93371 - DNA, 17 bp, Arabidopsis thaliana
gaactcgtccttcatgt

SEQ ID NO: 93372 - DNA, 17 bp, Arabidopsis thaliana
gaactcgtgaaatggtc

SEQ ID NO: 93373 - DNA, 17 bp, Arabidopsis thaliana
gaactcgttgattctgg

SEQ ID NO: 93374 - DNA, 17 bp, Arabidopsis thaliana
gaactctacaaccatga

SEQ ID NO: 93375 - DNA, 17 bp, Arabidopsis thaliana
gaactctacgctttggt

SEQ ID NO: 93376 - DNA, 17 bp, Arabidopsis thaliana
gaactctactgcggtga

SEQ ID NO: 93377 - DNA, 17 bp, Arabidopsis thaliana
gaactctagaccgttgt

SEQ ID NO: 93378 - DNA, 17 bp, Arabidopsis thaliana
gaactctatggctaaag

SEQ ID NO: 93379 - DNA, 17 bp, Arabidopsis thaliana
gaactctatgttggact

SEQ ID NO: 93380 - DNA, 17 bp, Arabidopsis thaliana
gaactctcggtcatctg

SEQ ID NO: 93381 - DNA, 17 bp, Arabidopsis thaliana
gaactctctcaaaagcc

SEQ ID NO: 93382 - DNA, 17 bp, Arabidopsis thaliana
gaactctctcaaaagct

SEQ ID NO: 93383 - DNA, 17 bp, Arabidopsis thaliana
gaactctcttctgctga

SEQ ID NO: 93384 - DNA, 17 bp, Arabidopsis thaliana
gaactctgacgtcggcc

SEQ ID NO: 93385 - DNA, 17 bp, Arabidopsis thaliana
gaactctgcttgaagac

SEQ ID NO: 93386 - DNA, 17 bp, Arabidopsis thaliana
gaactcttcagcttgtt

SEQ ID NO: 93387 - DNA, 17 bp, Arabidopsis thaliana
gaactcttcatctcgag

SEQ ID NO: 93388 - DNA, 17 bp, Arabidopsis thaliana
gaactcttggctactgt

SEQ ID NO: 93389 - DNA, 17 bp, Arabidopsis thaliana
gaactcttggtcaacca

SEQ ID NO: 93390 - DNA, 17 bp, Arabidopsis thaliana
gaactcttttgcttgaa

SEQ ID NO: 93391 - DNA, 17 bp, Arabidopsis thaliana
gaactgaagattctgcc

SEQ ID NO: 93392 - DNA, 17 bp, Arabidopsis thaliana
gaactgaattaaaaccg

SEQ ID NO: 93393 - DNA, 17 bp, Arabidopsis thaliana
gaactgaattcgtcggc

SEQ ID NO: 93394 - DNA, 17 bp, Arabidopsis thaliana
gaactgacatctgagat

SEQ ID NO: 93395 - DNA, 17 bp, Arabidopsis thaliana
gaactgacatctgatat

SEQ ID NO: 93396 - DNA, 17 bp, Arabidopsis thaliana
gaactgagctgattagg

SEQ ID NO: 93397 - DNA, 17 bp, Arabidopsis thaliana
gaactgaggcacagggt

SEQ ID NO: 93398 - DNA, 17 bp, Arabidopsis thaliana
gaactgaggtccgttat

SEQ ID NO: 93399 - DNA, 17 bp, Arabidopsis thaliana
gaactgattcaccgata

SEQ ID NO: 93400 - DNA, 17 bp, Arabidopsis thaliana
gaactgattgaccgttt

SEQ ID NO: 93401 - DNA, 17 bp, Arabidopsis thaliana
gaactgatttggccatc

SEQ ID NO: 93402 - DNA, 17 bp, Arabidopsis thaliana
gaactgcaacatgatgt

SEQ ID NO: 93403 - DNA, 17 bp, Arabidopsis thaliana
gaactgcacagtgtggt

SEQ ID NO: 93404 - DNA, 17 bp, Arabidopsis thaliana
gaactgcaccgcacttc

SEQ ID NO: 93405 - DNA, 17 bp, Arabidopsis thaliana
gaactgcaccgcacttt

SEQ ID NO: 93406 - DNA, 17 bp, Arabidopsis thaliana
gaactgcactgcacttt

SEQ ID NO: 93407 - DNA, 17 bp, Arabidopsis thaliana
gaactgcactgtatccg

SEQ ID NO: 93408 - DNA, 17 bp, Arabidopsis thaliana
gaactgcagcggtttat

SEQ ID NO: 93409 - DNA, 17 bp, Arabidopsis thaliana
gaactgcagtggagctt

SEQ ID NO: 93410 - DNA, 17 bp, Arabidopsis thaliana
gaactgcgaggactgct

SEQ ID NO: 93411 - DNA, 17 bp, Arabidopsis thaliana
gaactgcgggaagtaac

SEQ ID NO: 93412 - DNA, 17 bp, Arabidopsis thaliana
gaactgcttgatttgcc

SEQ ID NO: 93413 - DNA, 17 bp, Arabidopsis thaliana
gaactggaacgtctcat

SEQ ID NO: 93414 - DNA, 17 bp, Arabidopsis thaliana
gaactggattagatggt

SEQ ID NO: 93415 - DNA, 17 bp, Arabidopsis thaliana
gaactggcgatgaagat

SEQ ID NO: 93416 - DNA, 17 bp, Arabidopsis thaliana
gaactgggagtccatga

SEQ ID NO: 93417 - DNA, 17 bp, Arabidopsis thaliana
gaactgggtaaaaaatc

SEQ ID NO: 93418 - DNA, 17 bp, Arabidopsis thaliana
gaactgggtcccgtcgg

SEQ ID NO: 93419 - DNA, 17 bp, Arabidopsis thaliana
gaactgggtttaacatg

SEQ ID NO: 93420 - DNA, 17 bp, Arabidopsis thaliana
gaactggtacaccagat

SEQ ID NO: 93421 - DNA, 17 bp, Arabidopsis thaliana
gaactggtacggacaag

SEQ ID NO: 93422 - DNA, 17 bp, Arabidopsis thaliana
gaactggtcatgcttgc

SEQ ID NO: 93423 - DNA, 17 bp, Arabidopsis thaliana
gaactggtccgaaaggg

SEQ ID NO: 93424 - DNA, 17 bp, Arabidopsis thaliana
gaactggttgggcttga

SEQ ID NO: 93425 - DNA, 17 bp, Arabidopsis thaliana
gaactgtaagatctttt

SEQ ID NO: 93426 - DNA, 17 bp, Arabidopsis thaliana
gaactgtagacatacgg

SEQ ID NO: 93427 - DNA, 17 bp, Arabidopsis thaliana
gaactgtagacgtagta

SEQ ID NO: 93428 - DNA, 17 bp, Arabidopsis thaliana
gaactgtagttgcgtgt

SEQ ID NO: 93429 - DNA, 17 bp, Arabidopsis thaliana
gaactgtcaattggaca

SEQ ID NO: 93430 - DNA, 17 bp, Arabidopsis thaliana
gaactgtcctggtgaga

SEQ ID NO: 93431 - DNA, 17 bp, Arabidopsis thaliana
gaactgtcgatttgacc

SEQ ID NO: 93432 - DNA, 17 bp, Arabidopsis thaliana
gaactgtgacttttgtc

SEQ ID NO: 93433 - DNA, 17 bp, Arabidopsis thaliana
gaactgtgagtccaggt

SEQ ID NO: 93434 - DNA, 17 bp, Arabidopsis thaliana
gaactgtgctacattac

SEQ ID NO: 93435 - DNA, 17 bp, Arabidopsis thaliana
gaactgtggttggatcc

SEQ ID NO: 93436 - DNA, 17 bp, Arabidopsis thaliana
gaactgtgtttcccaag

SEQ ID NO: 93437 - DNA, 17 bp, Arabidopsis thaliana
gaactgttggaggaggg

SEQ ID NO: 93438 - DNA, 17 bp, Arabidopsis thaliana
gaacttaaaccgcaacc

SEQ ID NO: 93439 - DNA, 17 bp, Arabidopsis thaliana
gaacttaaaccgcaacg

SEQ ID NO: 93440 - DNA, 17 bp, Arabidopsis thaliana
gaacttaaaccgcagct

SEQ ID NO: 93441 - DNA, 17 bp, Arabidopsis thaliana
gaacttaaactgcaacc

SEQ ID NO: 93442 - DNA, 17 bp, Arabidopsis thaliana
gaacttaaatcacaacc

SEQ ID NO: 93443 - DNA, 17 bp, Arabidopsis thaliana
gaacttaaatcgcaacc

SEQ ID NO: 93444 - DNA, 17 bp, Arabidopsis thaliana
gaacttagagtgtgtgg

SEQ ID NO: 93445 - DNA, 17 bp, Arabidopsis thaliana
gaacttagatgtcagag

SEQ ID NO: 93446 - DNA, 17 bp, Arabidopsis thaliana
gaacttagcatgtgtga

SEQ ID NO: 93447 - DNA, 17 bp, Arabidopsis thaliana
gaacttagccggtattc

SEQ ID NO: 93448 - DNA, 17 bp, Arabidopsis thaliana
gaacttagtttccgtct

SEQ ID NO: 93449 - DNA, 17 bp, Arabidopsis thaliana
gaacttatgatcgtcta

SEQ ID NO: 93450 - DNA, 17 bp, Arabidopsis thaliana
gaacttattcgatttcg

SEQ ID NO: 93451 - DNA, 17 bp, Arabidopsis thaliana
gaacttattggcctttt

SEQ ID NO: 93452 - DNA, 17 bp, Arabidopsis thaliana
gaacttatttacaatgg

SEQ ID NO: 93453 - DNA, 17 bp, Arabidopsis thaliana
gaacttcaagacttgct

SEQ ID NO: 93454 - DNA, 17 bp, Arabidopsis thaliana
gaacttcacatccacgg

SEQ ID NO: 93455 - DNA, 17 bp, Arabidopsis thaliana
gaacttcagggtcagct

SEQ ID NO: 93456 - DNA, 17 bp, Arabidopsis thaliana
gaacttccaaggttgct

SEQ ID NO: 93457 - DNA, 17 bp, Arabidopsis thaliana
gaacttccctgtcctcc

SEQ ID NO: 93458 - DNA, 17 bp, Arabidopsis thaliana
gaacttccttctcctcc

SEQ ID NO: 93459 - DNA, 17 bp, Arabidopsis thaliana
gaacttcgcatgtgact

SEQ ID NO: 93460 - DNA, 17 bp, Arabidopsis thaliana
gaacttcgctctccgga

SEQ ID NO: 93461 - DNA, 17 bp, Arabidopsis thaliana
gaacttctaacgtccgt

SEQ ID NO: 93462 - DNA, 17 bp, Arabidopsis thaliana
gaacttctatcctacca

SEQ ID NO: 93463 - DNA, 17 bp, Arabidopsis thaliana
gaacttctatgcgtttc

SEQ ID NO: 93464 - DNA, 17 bp, Arabidopsis thaliana
gaacttctattggttgt

SEQ ID NO: 93465 - DNA, 17 bp, Arabidopsis thaliana
gaacttctcaaatcatc

SEQ ID NO: 93466 - DNA, 17 bp, Arabidopsis thaliana
gaacttctctaggatga

SEQ ID NO: 93467 - DNA, 17 bp, Arabidopsis thaliana
gaacttctctgatttgc

SEQ ID NO: 93468 - DNA, 17 bp, Arabidopsis thaliana
gaacttctttttgtgac

SEQ ID NO: 93469 - DNA, 17 bp, Arabidopsis thaliana
gaacttgaaatagagtt

SEQ ID NO: 93470 - DNA, 17 bp, Arabidopsis thaliana
gaacttgaaatctgtct

SEQ ID NO: 93471 - DNA, 17 bp, Arabidopsis thaliana
gaacttgaactaacagc

SEQ ID NO: 93472 - DNA, 17 bp, Arabidopsis thaliana
gaacttgacttgagatc

SEQ ID NO: 93473 - DNA, 17 bp, Arabidopsis thaliana
gaacttgacttgctttc

SEQ ID NO: 93474 - DNA, 17 bp, Arabidopsis thaliana
gaacttgagagaaccgg

SEQ ID NO: 93475 - DNA, 17 bp, Arabidopsis thaliana
gaacttgagagggttga

SEQ ID NO: 93476 - DNA, 17 bp, Arabidopsis thaliana
gaacttgagattcatgt

SEQ ID NO: 93477 - DNA, 17 bp, Arabidopsis thaliana
gaacttgagtacacggt

SEQ ID NO: 93478 - DNA, 17 bp, Arabidopsis thaliana
gaacttgataattccag

SEQ ID NO: 93479 - DNA, 17 bp, Arabidopsis thaliana
gaacttgcgatttaaca

SEQ ID NO: 93480 - DNA, 17 bp, Arabidopsis thaliana
gaacttgcgatttatca

SEQ ID NO: 93481 - DNA, 17 bp, Arabidopsis thaliana
gaacttggatttggcca

SEQ ID NO: 93482 - DNA, 17 bp, Arabidopsis thaliana
gaacttggcatgtgata

SEQ ID NO: 93483 - DNA, 17 bp, Arabidopsis thaliana
gaacttggctactacag

SEQ ID NO: 93484 - DNA, 17 bp, Arabidopsis thaliana
gaacttgggatgggtcg

SEQ ID NO: 93485 - DNA, 17 bp, Arabidopsis thaliana
gaacttggtgcaggtcg

SEQ ID NO: 93486 - DNA, 17 bp, Arabidopsis thaliana
gaacttggttgatggca

SEQ ID NO: 93487 - DNA, 17 bp, Arabidopsis thaliana
gaacttgtcctgcaaac

SEQ ID NO: 93488 - DNA, 17 bp, Arabidopsis thaliana
gaacttgtgatgttgct

SEQ ID NO: 93489 - DNA, 17 bp, Arabidopsis thaliana
gaacttgtgctcagttg

SEQ ID NO: 93490 - DNA, 17 bp, Arabidopsis thaliana
gaacttgtgttgaccgc

SEQ ID NO: 93491 - DNA, 17 bp, Arabidopsis thaliana
gaactttaaaatttggg

SEQ ID NO: 93492 - DNA, 17 bp, Arabidopsis thaliana
gaactttacgcgggtac

SEQ ID NO: 93493 - DNA, 17 bp, Arabidopsis thaliana
gaactttagaaggacca

SEQ ID NO: 93494 - DNA, 17 bp, Arabidopsis thaliana
gaactttaggccaccct

SEQ ID NO: 93495 - DNA, 17 bp, Arabidopsis thaliana
gaactttcaaatttggg

SEQ ID NO: 93496 - DNA, 17 bp, Arabidopsis thaliana
gaactttgaaggccgaa

SEQ ID NO: 93497 - DNA, 17 bp, Arabidopsis thaliana
gaactttgacgctatgg

SEQ ID NO: 93498 - DNA, 17 bp, Arabidopsis thaliana
gaactttgattccatct

SEQ ID NO: 93499 - DNA, 17 bp, Arabidopsis thaliana
gaactttgcaggctgtt

SEQ ID NO: 93500 - DNA, 17 bp, Arabidopsis thaliana
gaactttgcgttgacta

SEQ ID NO: 93501 - DNA, 17 bp, Arabidopsis thaliana
gaactttgcgttgactg

SEQ ID NO: 93502 - DNA, 17 bp, Arabidopsis thaliana
gaactttgctttcaaag

SEQ ID NO: 93503 - DNA, 17 bp, Arabidopsis thaliana
gaactttggcttcacca

SEQ ID NO: 93504 - DNA, 17 bp, Arabidopsis thaliana
gaactttggtaagaatc

SEQ ID NO: 93505 - DNA, 17 bp, Arabidopsis thaliana
gaacttttagaccgtga

SEQ ID NO: 93506 - DNA, 17 bp, Arabidopsis thaliana
gaacttttccagctcac

SEQ ID NO: 93507 - DNA, 17 bp, Arabidopsis thaliana
gaacttttccattgact

SEQ ID NO: 93508 - DNA, 17 bp, Arabidopsis thaliana
gaacttttgctcttgga

SEQ ID NO: 93509 - DNA, 17 bp, Arabidopsis thaliana
gaacttttggatagcag

SEQ ID NO: 93510 - DNA, 17 bp, Arabidopsis thaliana
gaacttttgtacctcaa

SEQ ID NO: 93511 - DNA, 17 bp, Arabidopsis thaliana
gaactttttgtggctgc

SEQ ID NO: 93512 - DNA, 17 bp, Arabidopsis thaliana
gaactttttttggatag

SEQ ID NO: 93513 - DNA, 17 bp, Arabidopsis thaliana
gaactttttttgggtcg

SEQ ID NO: 93514 - DNA, 17 bp, Arabidopsis thaliana
gaagaaaaccgcagcgg

SEQ ID NO: 93515 - DNA, 17 bp, Arabidopsis thaliana
gaagaaaaccgccgcgg

SEQ ID NO: 93516 - DNA, 17 bp, Arabidopsis thaliana
gaagaaaaccgctgcgg

SEQ ID NO: 93517 - DNA, 17 bp, Arabidopsis thaliana
gaagaaaaccgtagcgg

SEQ ID NO: 93518 - DNA, 17 bp, Arabidopsis thaliana
gaagaaaaccgttgcgg

SEQ ID NO: 93519 - DNA, 17 bp, Arabidopsis thaliana
gaagaaaactttctgga

SEQ ID NO: 93520 - DNA, 17 bp, Arabidopsis thaliana
gaagaaaagtgatgact

SEQ ID NO: 93521 - DNA, 17 bp, Arabidopsis thaliana
gaagaaacaacagaggt

SEQ ID NO: 93522 - DNA, 17 bp, Arabidopsis thaliana
gaagaaactaaagaccg

SEQ ID NO: 93523 - DNA, 17 bp, Arabidopsis thaliana
gaagaaactgcgaatgg

SEQ ID NO: 93524 - DNA, 17 bp, Arabidopsis thaliana
gaagaaagaggtgtcgt

SEQ ID NO: 93525 - DNA, 17 bp, Arabidopsis thaliana
gaagaaaggaccgatga

SEQ ID NO: 93526 - DNA, 17 bp, Arabidopsis thaliana
gaagaaagtcatatttc

SEQ ID NO: 93527 - DNA, 17 bp, Arabidopsis thaliana
gaagaaagtgccggttt

SEQ ID NO: 93528 - DNA, 17 bp, Arabidopsis thaliana
gaagaaatagttccgct

SEQ ID NO: 93529 - DNA, 17 bp, Arabidopsis thaliana
gaagaaatccgaggcgg

SEQ ID NO: 93530 - DNA, 17 bp, Arabidopsis thaliana
gaagaaattcaaccaag

SEQ ID NO: 93531 - DNA, 17 bp, Arabidopsis thaliana
gaagaaattcaggtatg

SEQ ID NO: 93532 - DNA, 17 bp, Arabidopsis thaliana
gaagaacaaaatagtcc

SEQ ID NO: 93533 - DNA, 17 bp, Arabidopsis thaliana
gaagaacaagactatgc

SEQ ID NO: 93534 - DNA, 17 bp, Arabidopsis thaliana
gaagaaccccggaggtg

SEQ ID NO: 93535 - DNA, 17 bp, Arabidopsis thaliana
gaagaacgacggagctt

SEQ ID NO: 93536 - DNA, 17 bp, Arabidopsis thaliana
gaagaacgagccggagg

SEQ ID NO: 93537 - DNA, 17 bp, Arabidopsis thaliana
gaagaacgctcgaatct

SEQ ID NO: 93538 - DNA, 17 bp, Arabidopsis thaliana
gaagaactagctgattc

SEQ ID NO: 93539 - DNA, 17 bp, Arabidopsis thaliana
gaagaagaaactctcct

SEQ ID NO: 93540 - DNA, 17 bp, Arabidopsis thaliana
gaagaagacatgtttgg

SEQ ID NO: 93541 - DNA, 17 bp, Arabidopsis thaliana
gaagaagagttaccgca

SEQ ID NO: 93542 - DNA, 17 bp, Arabidopsis thaliana
gaagaagcagcctgacc

SEQ ID NO: 93543 - DNA, 17 bp, Arabidopsis thaliana
gaagaagcaggcggacc

SEQ ID NO: 93544 - DNA, 17 bp, Arabidopsis thaliana
gaagaagccacgtcaga

SEQ ID NO: 93545 - DNA, 17 bp, Arabidopsis thaliana
gaagaagctgctgcttt

SEQ ID NO: 93546 - DNA, 17 bp, Arabidopsis thaliana
gaagaagcttaaggtcg

SEQ ID NO: 93547 - DNA, 17 bp, Arabidopsis thaliana
gaagaagcttccatcga

SEQ ID NO: 93548 - DNA, 17 bp, Arabidopsis thaliana
gaagaagctttggtgtc

SEQ ID NO: 93549 - DNA, 17 bp, Arabidopsis thaliana
gaagaaggctctgaagc

SEQ ID NO: 93550 - DNA, 17 bp, Arabidopsis thaliana
gaagaaggctgggaatt

SEQ ID NO: 93551 - DNA, 17 bp, Arabidopsis thaliana
gaagaagtcagttgggc

SEQ ID NO: 93552 - DNA, 17 bp, Arabidopsis thaliana
gaagaagttgcaggttt

SEQ ID NO: 93553 - DNA, 17 bp, Arabidopsis thaliana
gaagaatacccgttttt

SEQ ID NO: 93554 - DNA, 17 bp, Arabidopsis thaliana
gaagaatatctaatgtc

SEQ ID NO: 93555 - DNA, 17 bp, Arabidopsis thaliana
gaagaatatctaccgac

SEQ ID NO: 93556 - DNA, 17 bp, Arabidopsis thaliana
gaagaatatgatttttc

SEQ ID NO: 93557 - DNA, 17 bp, Arabidopsis thaliana
gaagaatcacggtgtta

SEQ ID NO: 93558 - DNA, 17 bp, Arabidopsis thaliana
gaagaatccagtttcgc

SEQ ID NO: 93559 - DNA, 17 bp, Arabidopsis thaliana
gaagaatcggcgacggc

SEQ ID NO: 93560 - DNA, 17 bp, Arabidopsis thaliana
gaagaatctcttgatag

SEQ ID NO: 93561 - DNA, 17 bp, Arabidopsis thaliana
gaagaatctttattgtg

SEQ ID NO: 93562 - DNA, 17 bp, Arabidopsis thaliana
gaagaatgccccgatgt

SEQ ID NO: 93563 - DNA, 17 bp, Arabidopsis thaliana
gaagaatgctttgattt

SEQ ID NO: 93564 - DNA, 17 bp, Arabidopsis thaliana
gaagaatgtgtcgtctg

SEQ ID NO: 93565 - DNA, 17 bp, Arabidopsis thaliana
gaagaattcgtacctat

SEQ ID NO: 93566 - DNA, 17 bp, Arabidopsis thaliana
gaagaattctattttgc

SEQ ID NO: 93567 - DNA, 17 bp, Arabidopsis thaliana
gaagaatttgacagtgg

SEQ ID NO: 93568 - DNA, 17 bp, Arabidopsis thaliana
gaagaatttgctgatcg

SEQ ID NO: 93569 - DNA, 17 bp, Arabidopsis thaliana
gaagacaacccaccggc

SEQ ID NO: 93570 - DNA, 17 bp, Arabidopsis thaliana
gaagacaacgagctcct

SEQ ID NO: 93571 - DNA, 17 bp, Arabidopsis thaliana
gaagacaactccagtct

SEQ ID NO: 93572 - DNA, 17 bp, Arabidopsis thaliana
gaagacaactttgtctg

SEQ ID NO: 93573 - DNA, 17 bp, Arabidopsis thaliana
gaagacaagcagcatca

SEQ ID NO: 93574 - DNA, 17 bp, Arabidopsis thaliana
gaagacaaggcttttcg

SEQ ID NO: 93575 - DNA, 17 bp, Arabidopsis thaliana
gaagacaatctctctta

SEQ ID NO: 93576 - DNA, 17 bp, Arabidopsis thaliana
gaagacaccatcttcac

SEQ ID NO: 93577 - DNA, 17 bp, Arabidopsis thaliana
gaagacaccttcttcac

SEQ ID NO: 93578 - DNA, 17 bp, Arabidopsis thaliana
gaagacacgggttcgat

SEQ ID NO: 93579 - DNA, 17 bp, Arabidopsis thaliana
gaagacactcgaccagg

SEQ ID NO: 93580 - DNA, 17 bp, Arabidopsis thaliana
gaagacatcatcttcac

SEQ ID NO: 93581 - DNA, 17 bp, Arabidopsis thaliana
gaagacattgtaaccct

SEQ ID NO: 93582 - DNA, 17 bp, Arabidopsis thaliana
gaagacccgtgtcttcc

SEQ ID NO: 93583 - DNA, 17 bp, Arabidopsis thaliana
gaagaccctgttgaact

SEQ ID NO: 93584 - DNA, 17 bp, Arabidopsis thaliana
gaagaccctgttgagct

SEQ ID NO: 93585 - DNA, 17 bp, Arabidopsis thaliana
gaagaccgatgaagaca

SEQ ID NO: 93586 - DNA, 17 bp, Arabidopsis thaliana
gaagaccggaacgagat

SEQ ID NO: 93587 - DNA, 17 bp, Arabidopsis thaliana
gaagaccggagaagtga

SEQ ID NO: 93588 - DNA, 17 bp, Arabidopsis thaliana
gaagaccttggattcgg

SEQ ID NO: 93589 - DNA, 17 bp, Arabidopsis thaliana
gaagacgaacagtcggc

SEQ ID NO: 93590 - DNA, 17 bp, Arabidopsis thaliana
gaagacgacgacccatt

SEQ ID NO: 93591 - DNA, 17 bp, Arabidopsis thaliana
gaagacgaggtggttgg

SEQ ID NO: 93592 - DNA, 17 bp, Arabidopsis thaliana
gaagacgatacaagtgg

SEQ ID NO: 93593 - DNA, 17 bp, Arabidopsis thaliana
gaagacgatcagatacc

SEQ ID NO: 93594 - DNA, 17 bp, Arabidopsis thaliana
gaagacgatgatggcgg

SEQ ID NO: 93595 - DNA, 17 bp, Arabidopsis thaliana
gaagacgccatggataa

SEQ ID NO: 93596 - DNA, 17 bp, Arabidopsis thaliana
gaagacgcccgatctat

SEQ ID NO: 93597 - DNA, 17 bp, Arabidopsis thaliana
gaagacgcgggttcgat

SEQ ID NO: 93598 - DNA, 17 bp, Arabidopsis thaliana
gaagacgtgatcgagtg

SEQ ID NO: 93599 - DNA, 17 bp, Arabidopsis thaliana
gaagacgtgcggttcaa

SEQ ID NO: 93600 - DNA, 17 bp, Arabidopsis thaliana
gaagacgtttgcactct

SEQ ID NO: 93601 - DNA, 17 bp, Arabidopsis thaliana
gaagactaaaacgaacg

SEQ ID NO: 93602 - DNA, 17 bp, Arabidopsis thaliana
gaagactaagctattgc

SEQ ID NO: 93603 - DNA, 17 bp, Arabidopsis thaliana
gaagactacatctcagt

SEQ ID NO: 93604 - DNA, 17 bp, Arabidopsis thaliana
gaagactactggatttg

SEQ ID NO: 93605 - DNA, 17 bp, Arabidopsis thaliana
gaagactagacgtttgt

SEQ ID NO: 93606 - DNA, 17 bp, Arabidopsis thaliana
gaagactcaggacgcac

SEQ ID NO: 93607 - DNA, 17 bp, Arabidopsis thaliana
gaagactcaggacgctc

SEQ ID NO: 93608 - DNA, 17 bp, Arabidopsis thaliana
gaagactcaggacgctg

SEQ ID NO: 93609 - DNA, 17 bp, Arabidopsis thaliana
gaagactccataaggtt

SEQ ID NO: 93610 - DNA, 17 bp, Arabidopsis thaliana
gaagactctcggcaacg

SEQ ID NO: 93611 - DNA, 17 bp, Arabidopsis thaliana
gaagactgcctcttcac

SEQ ID NO: 93612 - DNA, 17 bp, Arabidopsis thaliana
gaagactgcgacctttc

SEQ ID NO: 93613 - DNA, 17 bp, Arabidopsis thaliana
gaagactgcgatgaggt

SEQ ID NO: 93614 - DNA, 17 bp, Arabidopsis thaliana
gaagactgctggttctg

SEQ ID NO: 93615 - DNA, 17 bp, Arabidopsis thaliana
gaagactgcttatggtg

SEQ ID NO: 93616 - DNA, 17 bp, Arabidopsis thaliana
gaagactgcttgtgagc

SEQ ID NO: 93617 - DNA, 17 bp, Arabidopsis thaliana
gaagactggtgaaagct

SEQ ID NO: 93618 - DNA, 17 bp, Arabidopsis thaliana
gaagactgtagccgacc

SEQ ID NO: 93619 - DNA, 17 bp, Arabidopsis thaliana
gaagactgtcttggtgg

SEQ ID NO: 93620 - DNA, 17 bp, Arabidopsis thaliana
gaagacttagggcagca

SEQ ID NO: 93621 - DNA, 17 bp, Arabidopsis thaliana
gaagacttcacaatccc

SEQ ID NO: 93622 - DNA, 17 bp, Arabidopsis thaliana
gaagacttcgtggttgc

SEQ ID NO: 93623 - DNA, 17 bp, Arabidopsis thaliana
gaagacttgatgaacca

SEQ ID NO: 93624 - DNA, 17 bp, Arabidopsis thaliana
gaagactttggcagtgc

SEQ ID NO: 93625 - DNA, 17 bp, Arabidopsis thaliana
gaagagaacaaaagatt

SEQ ID NO: 93626 - DNA, 17 bp, Arabidopsis thaliana
gaagagacaaagcacca

SEQ ID NO: 93627 - DNA, 17 bp, Arabidopsis thaliana
gaagagacattagacca

SEQ ID NO: 93628 - DNA, 17 bp, Arabidopsis thaliana
gaagagacgggtcccac

SEQ ID NO: 93629 - DNA, 17 bp, Arabidopsis thaliana
gaagagatcctctcaac

SEQ ID NO: 93630 - DNA, 17 bp, Arabidopsis thaliana
gaagagatctctcccag

SEQ ID NO: 93631 - DNA, 17 bp, Arabidopsis thaliana
gaagagatctgtcttaa

SEQ ID NO: 93632 - DNA, 17 bp, Arabidopsis thaliana
gaagagattcggccctg

SEQ ID NO: 93633 - DNA, 17 bp, Arabidopsis thaliana
gaagagcaccgcacgtc

SEQ ID NO: 93634 - DNA, 17 bp, Arabidopsis thaliana
gaagagcctccacggac

SEQ ID NO: 93635 - DNA, 17 bp, Arabidopsis thaliana
gaagagcgcggctgtac

SEQ ID NO: 93636 - DNA, 17 bp, Arabidopsis thaliana
gaagagcgctaggatgg

SEQ ID NO: 93637 - DNA, 17 bp, Arabidopsis thaliana
gaagaggaagccagctg

SEQ ID NO: 93638 - DNA, 17 bp, Arabidopsis thaliana
gaagaggacaacgacga

SEQ ID NO: 93639 - DNA, 17 bp, Arabidopsis thaliana
gaagaggacttagaact

SEQ ID NO: 93640 - DNA, 17 bp, Arabidopsis thaliana
gaagaggacttggaact

SEQ ID NO: 93641 - DNA, 17 bp, Arabidopsis thaliana
gaagaggcacaagggcc

SEQ ID NO: 93642 - DNA, 17 bp, Arabidopsis thaliana
gaagaggcccatcttga

SEQ ID NO: 93643 - DNA, 17 bp, Arabidopsis thaliana
gaagaggccgtgggaaa

SEQ ID NO: 93644 - DNA, 17 bp, Arabidopsis thaliana
gaagaggctgaaagtcc

SEQ ID NO: 93645 - DNA, 17 bp, Arabidopsis thaliana
gaagaggctgcgggtgg

SEQ ID NO: 93646 - DNA, 17 bp, Arabidopsis thaliana
gaagaggggaaaggttc

SEQ ID NO: 93647 - DNA, 17 bp, Arabidopsis thaliana
gaagagggtctgggagt

SEQ ID NO: 93648 - DNA, 17 bp, Arabidopsis thaliana
gaagagtcactacatgc

SEQ ID NO: 93649 - DNA, 17 bp, Arabidopsis thaliana
gaagagtccttggagcg

SEQ ID NO: 93650 - DNA, 17 bp, Arabidopsis thaliana
gaagagtctgccggtac

SEQ ID NO: 93651 - DNA, 17 bp, Arabidopsis thaliana
gaagagtggctgacttg

SEQ ID NO: 93652 - DNA, 17 bp, Arabidopsis thaliana
gaagagttcattctccg

SEQ ID NO: 93653 - DNA, 17 bp, Arabidopsis thaliana
gaagagttccaaaccat

SEQ ID NO: 93654 - DNA, 17 bp, Arabidopsis thaliana
gaagagttgctaagatg

SEQ ID NO: 93655 - DNA, 17 bp, Arabidopsis thaliana
gaagataaataggaaca

SEQ ID NO: 93656 - DNA, 17 bp, Arabidopsis thaliana
gaagataagggactggg

SEQ ID NO: 93657 - DNA, 17 bp, Arabidopsis thaliana
gaagatagccagtttgc

SEQ ID NO: 93658 - DNA, 17 bp, Arabidopsis thaliana
gaagatagcgacaactt

SEQ ID NO: 93659 - DNA, 17 bp, Arabidopsis thaliana
gaagatcccaagggttc

SEQ ID NO: 93660 - DNA, 17 bp, Arabidopsis thaliana
gaagatgactttgggat

SEQ ID NO: 93661 - DNA, 17 bp, Arabidopsis thaliana
gaagatgcggactacct

SEQ ID NO: 93662 - DNA, 17 bp, Arabidopsis thaliana
gaagatggtaaggactg

SEQ ID NO: 93663 - DNA, 17 bp, Arabidopsis thaliana
gaagatggtgtcttctc

SEQ ID NO: 93664 - DNA, 17 bp, Arabidopsis thaliana
gaagatgtagactttcg

SEQ ID NO: 93665 - DNA, 17 bp, Arabidopsis thaliana
gaagatgtaggaccttt

SEQ ID NO: 93666 - DNA, 17 bp, Arabidopsis thaliana
gaagatgtcagcagcca

SEQ ID NO: 93667 - DNA, 17 bp, Arabidopsis thaliana
gaagatgtcctaactcg

SEQ ID NO: 93668 - DNA, 17 bp, Arabidopsis thaliana
gaagatgtcgtctgtcg

SEQ ID NO: 93669 - DNA, 17 bp, Arabidopsis thaliana
gaagatgtgatcgagtg

SEQ ID NO: 93670 - DNA, 17 bp, Arabidopsis thaliana
gaagatgttgcccttgt

SEQ ID NO: 93671 - DNA, 17 bp, Arabidopsis thaliana
gaagattacgagattcg

SEQ ID NO: 93672 - DNA, 17 bp, Arabidopsis thaliana
gaagattacgggcatcc

SEQ ID NO: 93673 - DNA, 17 bp, Arabidopsis thaliana
gaagattacgggcatcg

SEQ ID NO: 93674 - DNA, 17 bp, Arabidopsis thaliana
gaagattacgggtttcg

SEQ ID NO: 93675 - DNA, 17 bp, Arabidopsis thaliana
gaagattacgggtttct

SEQ ID NO: 93676 - DNA, 17 bp, Arabidopsis thaliana
gaagattaggtttccac

SEQ ID NO: 93677 - DNA, 17 bp, Arabidopsis thaliana
gaagattatcttggccg

SEQ ID NO: 93678 - DNA, 17 bp, Arabidopsis thaliana
gaagattatgggtttcg

SEQ ID NO: 93679 - DNA, 17 bp, Arabidopsis thaliana
gaagattatgttgtctc

SEQ ID NO: 93680 - DNA, 17 bp, Arabidopsis thaliana
gaagattcacaagcatg

SEQ ID NO: 93681 - DNA, 17 bp, Arabidopsis thaliana
gaagattccagtactta

SEQ ID NO: 93682 - DNA, 17 bp, Arabidopsis thaliana
gaagattcccaagtttt

SEQ ID NO: 93683 - DNA, 17 bp, Arabidopsis thaliana
gaagattcgggatggct

SEQ ID NO: 93684 - DNA, 17 bp, Arabidopsis thaliana
gaagattgacgtgacgc

SEQ ID NO: 93685 - DNA, 17 bp, Arabidopsis thaliana
gaagattgagacgacat

SEQ ID NO: 93686 - DNA, 17 bp, Arabidopsis thaliana
gaagattgctctcgtgc

SEQ ID NO: 93687 - DNA, 17 bp, Arabidopsis thaliana
gaagatttaattcacca

SEQ ID NO: 93688 - DNA, 17 bp, Arabidopsis thaliana
gaagatttattcacaag

SEQ ID NO: 93689 - DNA, 17 bp, Arabidopsis thaliana
gaagatttccaaattcg

SEQ ID NO: 93690 - DNA, 17 bp, Arabidopsis thaliana
gaagatttctatgattg

SEQ ID NO: 93691 - DNA, 17 bp, Arabidopsis thaliana
gaagatttctgattttg

SEQ ID NO: 93692 - DNA, 17 bp, Arabidopsis thaliana
gaagatttgaggcagta

SEQ ID NO: 93693 - DNA, 17 bp, Arabidopsis thaliana
gaagatttgatcctagc

SEQ ID NO: 93694 - DNA, 17 bp, Arabidopsis thaliana
gaagatttgttgcagga

SEQ ID NO: 93695 - DNA, 17 bp, Arabidopsis thaliana
gaagatttttgtgacat

SEQ ID NO: 93696 - DNA, 17 bp, Arabidopsis thaliana
gaagcaaaagcggcgca

SEQ ID NO: 93697 - DNA, 17 bp, Arabidopsis thaliana
gaagcaaaggcccataa

SEQ ID NO: 93698 - DNA, 17 bp, Arabidopsis thaliana
gaagcaaccaccgtata

SEQ ID NO: 93699 - DNA, 17 bp, Arabidopsis thaliana
gaagcaactattgcgat

SEQ ID NO: 93700 - DNA, 17 bp, Arabidopsis thaliana
gaagcaaggattttctt

SEQ ID NO: 93701 - DNA, 17 bp, Arabidopsis thaliana
gaagcaatctgtcaccg

SEQ ID NO: 93702 - DNA, 17 bp, Arabidopsis thaliana
gaagcaatggtatgtga

SEQ ID NO: 93703 - DNA, 17 bp, Arabidopsis thaliana
gaagcaccggatcccat

SEQ ID NO: 93704 - DNA, 17 bp, Arabidopsis thaliana
gaagcacgctacatcat

SEQ ID NO: 93705 - DNA, 17 bp, Arabidopsis thaliana
gaagcacggatagaggc

SEQ ID NO: 93706 - DNA, 17 bp, Arabidopsis thaliana
gaagcacgtctgcctgg

SEQ ID NO: 93707 - DNA, 17 bp, Arabidopsis thaliana
gaagcactatgctggag

SEQ ID NO: 93708 - DNA, 17 bp, Arabidopsis thaliana
gaagcagaaagtggcaa

SEQ ID NO: 93709 - DNA, 17 bp, Arabidopsis thaliana
gaagcagacaataaacc

SEQ ID NO: 93710 - DNA, 17 bp, Arabidopsis thaliana
gaagcagaggcagagac

SEQ ID NO: 93711 - DNA, 17 bp, Arabidopsis thaliana
gaagcagaggcagagtc

SEQ ID NO: 93712 - DNA, 17 bp, Arabidopsis thaliana
gaagcagagggactgaa

SEQ ID NO: 93713 - DNA, 17 bp, Arabidopsis thaliana
gaagcagattcgccaac

SEQ ID NO: 93714 - DNA, 17 bp, Arabidopsis thaliana
gaagcagcgacgcagtc

SEQ ID NO: 93715 - DNA, 17 bp, Arabidopsis thaliana
gaagcagctgcatggta

SEQ ID NO: 93716 - DNA, 17 bp, Arabidopsis thaliana
gaagcagctgcttgatg

SEQ ID NO: 93717 - DNA, 17 bp, Arabidopsis thaliana
gaagcaggggctgcggt

SEQ ID NO: 93718 - DNA, 17 bp, Arabidopsis thaliana
gaagcaggtctacaaca

SEQ ID NO: 93719 - DNA, 17 bp, Arabidopsis thaliana
gaagcaggtctcaaggt

SEQ ID NO: 93720 - DNA, 17 bp, Arabidopsis thaliana
gaagcaggttatggcag

SEQ ID NO: 93721 - DNA, 17 bp, Arabidopsis thaliana
gaagcaggttgcggata

SEQ ID NO: 93722 - DNA, 17 bp, Arabidopsis thaliana
gaagcagtggcgagagt

SEQ ID NO: 93723 - DNA, 17 bp, Arabidopsis thaliana
gaagcagttaccgcagt

SEQ ID NO: 93724 - DNA, 17 bp, Arabidopsis thaliana
gaagcatagacactaag

SEQ ID NO: 93725 - DNA, 17 bp, Arabidopsis thaliana
gaagcatattgatgtgc

SEQ ID NO: 93726 - DNA, 17 bp, Arabidopsis thaliana
gaagcatcggaccaatg

SEQ ID NO: 93727 - DNA, 17 bp, Arabidopsis thaliana
gaagcatcgttcggacc

SEQ ID NO: 93728 - DNA, 17 bp, Arabidopsis thaliana
gaagcatggatcgaccg

SEQ ID NO: 93729 - DNA, 17 bp, Arabidopsis thaliana
gaagcatgtgcgggatc

SEQ ID NO: 93730 - DNA, 17 bp, Arabidopsis thaliana
gaagcattaatgaaccc

SEQ ID NO: 93731 - DNA, 17 bp, Arabidopsis thaliana
gaagcatttgccaagga

SEQ ID NO: 93732 - DNA, 17 bp, Arabidopsis thaliana
gaagcatttgggtgata

SEQ ID NO: 93733 - DNA, 17 bp, Arabidopsis thaliana
gaagcatttgttatggc

SEQ ID NO: 93734 - DNA, 17 bp, Arabidopsis thaliana
gaagccacgtcagatga

SEQ ID NO: 93735 - DNA, 17 bp, Arabidopsis thaliana
gaagccacgtctgtcag

SEQ ID NO: 93736 - DNA, 17 bp, Arabidopsis thaliana
gaagccagaagggcggc

SEQ ID NO: 93737 - DNA, 17 bp, Arabidopsis thaliana
gaagccatactcttcag

SEQ ID NO: 93738 - DNA, 17 bp, Arabidopsis thaliana
gaagccatctactcgac

SEQ ID NO: 93739 - DNA, 17 bp, Arabidopsis thaliana
gaagccatgaagtgtta

SEQ ID NO: 93740 - DNA, 17 bp, Arabidopsis thaliana
gaagcccccttggtcca

SEQ ID NO: 93741 - DNA, 17 bp, Arabidopsis thaliana
gaagcccctgtcgctaa

SEQ ID NO: 93742 - DNA, 17 bp, Arabidopsis thaliana
gaagcccgtaaacccac

SEQ ID NO: 93743 - DNA, 17 bp, Arabidopsis thaliana
gaagcccgtaaaccccc

SEQ ID NO: 93744 - DNA, 17 bp, Arabidopsis thaliana
gaagcccgtaatcccct

SEQ ID NO: 93745 - DNA, 17 bp, Arabidopsis thaliana
gaagcccgtaatccctc

SEQ ID NO: 93746 - DNA, 17 bp, Arabidopsis thaliana
gaagcccgtaatcctct

SEQ ID NO: 93747 - DNA, 17 bp, Arabidopsis thaliana
gaagcccgtaatccttc

SEQ ID NO: 93748 - DNA, 17 bp, Arabidopsis thaliana
gaagcccgtaatctctc

SEQ ID NO: 93749 - DNA, 17 bp, Arabidopsis thaliana
gaagcccgtaattcctc

SEQ ID NO: 93750 - DNA, 17 bp, Arabidopsis thaliana
gaagcccgtattcacca

SEQ ID NO: 93751 - DNA, 17 bp, Arabidopsis thaliana
gaagcccgtgagtctcg

SEQ ID NO: 93752 - DNA, 17 bp, Arabidopsis thaliana
gaagcccgttatccctc

SEQ ID NO: 93753 - DNA, 17 bp, Arabidopsis thaliana
gaagccctgtttttgac

SEQ ID NO: 93754 - DNA, 17 bp, Arabidopsis thaliana
gaagccgagaccgaacc

SEQ ID NO: 93755 - DNA, 17 bp, Arabidopsis thaliana
gaagccgagtaagccgg

SEQ ID NO: 93756 - DNA, 17 bp, Arabidopsis thaliana
gaagccgctcgatctga

SEQ ID NO: 93757 - DNA, 17 bp, Arabidopsis thaliana
gaagccggaatcgctag

SEQ ID NO: 93758 - DNA, 17 bp, Arabidopsis thaliana
gaagccggacaatcgac

SEQ ID NO: 93759 - DNA, 17 bp, Arabidopsis thaliana
gaagccggcggcggagc

SEQ ID NO: 93760 - DNA, 17 bp, Arabidopsis thaliana
gaagccgggttacggtg

SEQ ID NO: 93761 - DNA, 17 bp, Arabidopsis thaliana
gaagccggttcggcttg

SEQ ID NO: 93762 - DNA, 17 bp, Arabidopsis thaliana
gaagccggttgcggttc

SEQ ID NO: 93763 - DNA, 17 bp, Arabidopsis thaliana
gaagccgtcagctcccg

SEQ ID NO: 93764 - DNA, 17 bp, Arabidopsis thaliana
gaagccgtcttattatg

SEQ ID NO: 93765 - DNA, 17 bp, Arabidopsis thaliana
gaagccgttcgatttcg

SEQ ID NO: 93766 - DNA, 17 bp, Arabidopsis thaliana
gaagccgttgttgtttg

SEQ ID NO: 93767 - DNA, 17 bp, Arabidopsis thaliana
gaagcctaggcgcgatt

SEQ ID NO: 93768 - DNA, 17 bp, Arabidopsis thaliana
gaagcctccaacgccgg

SEQ ID NO: 93769 - DNA, 17 bp, Arabidopsis thaliana
gaagcctccgatacaaa

SEQ ID NO: 93770 - DNA, 17 bp, Arabidopsis thaliana
gaagcctcggtatttcg

SEQ ID NO: 93771 - DNA, 17 bp, Arabidopsis thaliana
gaagcctggaggtccaa

SEQ ID NO: 93772 - DNA, 17 bp, Arabidopsis thaliana
gaagccttgggccaatg

SEQ ID NO: 93773 - DNA, 17 bp, Arabidopsis thaliana
gaagccttttgggacca

SEQ ID NO: 93774 - DNA, 17 bp, Arabidopsis thaliana
gaagcgaaacgaacctg

SEQ ID NO: 93775 - DNA, 17 bp, Arabidopsis thaliana
gaagcgaaagccgacca

SEQ ID NO: 93776 - DNA, 17 bp, Arabidopsis thaliana
gaagcgaagaccggaga

SEQ ID NO: 93777 - DNA, 17 bp, Arabidopsis thaliana
gaagcgaagcactatgt

SEQ ID NO: 93778 - DNA, 17 bp, Arabidopsis thaliana
gaagcgaattgtcatga

SEQ ID NO: 93779 - DNA, 17 bp, Arabidopsis thaliana
gaagcgaccgccagcgt

SEQ ID NO: 93780 - DNA, 17 bp, Arabidopsis thaliana
gaagcgacctacaaact

SEQ ID NO: 93781 - DNA, 17 bp, Arabidopsis thaliana
gaagcgacctatacccg

SEQ ID NO: 93782 - DNA, 17 bp, Arabidopsis thaliana
gaagcgacgagaccttg

SEQ ID NO: 93783 - DNA, 17 bp, Arabidopsis thaliana
gaagcgacgcatccgcc

SEQ ID NO: 93784 - DNA, 17 bp, Arabidopsis thaliana
gaagcgacgcatgcgcc

SEQ ID NO: 93785 - DNA, 17 bp, Arabidopsis thaliana
gaagcgacggagacaac

SEQ ID NO: 93786 - DNA, 17 bp, Arabidopsis thaliana
gaagcgactcgcgttgg

SEQ ID NO: 93787 - DNA, 17 bp, Arabidopsis thaliana
gaagcgacttttctggc

SEQ ID NO: 93788 - DNA, 17 bp, Arabidopsis thaliana
gaagcgaggtcgagcag

SEQ ID NO: 93789 - DNA, 17 bp, Arabidopsis thaliana
gaagcggaaagtcttga

SEQ ID NO: 93790 - DNA, 17 bp, Arabidopsis thaliana
gaagcggactaagcgcg

SEQ ID NO: 93791 - DNA, 17 bp, Arabidopsis thaliana
gaagcggatgggggccg

SEQ ID NO: 93792 - DNA, 17 bp, Arabidopsis thaliana
gaagcggcaggccgtgg

SEQ ID NO: 93793 - DNA, 17 bp, Arabidopsis thaliana
gaagcggccacgtctga

SEQ ID NO: 93794 - DNA, 17 bp, Arabidopsis thaliana
gaagcggcctggacctc

SEQ ID NO: 93795 - DNA, 17 bp, Arabidopsis thaliana
gaagcggcgatcgagtg

SEQ ID NO: 93796 - DNA, 17 bp, Arabidopsis thaliana
gaagcgggtgaggaagc

SEQ ID NO: 93797 - DNA, 17 bp, Arabidopsis thaliana
gaagcggtgataaacaa

SEQ ID NO: 93798 - DNA, 17 bp, Arabidopsis thaliana
gaagcggtgataaataa

SEQ ID NO: 93799 - DNA, 17 bp, Arabidopsis thaliana
gaagcggtggagtgccg

SEQ ID NO: 93800 - DNA, 17 bp, Arabidopsis thaliana
gaagcgtaaccagaccg

SEQ ID NO: 93801 - DNA, 17 bp, Arabidopsis thaliana
gaagcgtaatagacctt

SEQ ID NO: 93802 - DNA, 17 bp, Arabidopsis thaliana
gaagcgtcctcagcaac

SEQ ID NO: 93803 - DNA, 17 bp, Arabidopsis thaliana
gaagcgtcctcagcgac

SEQ ID NO: 93804 - DNA, 17 bp, Arabidopsis thaliana
gaagcgtcctctgcgac

SEQ ID NO: 93805 - DNA, 17 bp, Arabidopsis thaliana
gaagcgtcgctcggacc

SEQ ID NO: 93806 - DNA, 17 bp, Arabidopsis thaliana
gaagcgtcggccggaaa

SEQ ID NO: 93807 - DNA, 17 bp, Arabidopsis thaliana
gaagcgtcgttcggacc

SEQ ID NO: 93808 - DNA, 17 bp, Arabidopsis thaliana
gaagcgtgattctgaga

SEQ ID NO: 93809 - DNA, 17 bp, Arabidopsis thaliana
gaagcgtggtgcggttt

SEQ ID NO: 93810 - DNA, 17 bp, Arabidopsis thaliana
gaagcgtgtgcaatgat

SEQ ID NO: 93811 - DNA, 17 bp, Arabidopsis thaliana
gaagcgttccaaccgct

SEQ ID NO: 93812 - DNA, 17 bp, Arabidopsis thaliana
gaagcgttgataggttg

SEQ ID NO: 93813 - DNA, 17 bp, Arabidopsis thaliana
gaagctaactcgccgat

SEQ ID NO: 93814 - DNA, 17 bp, Arabidopsis thaliana
gaagctaactttcgtcc

SEQ ID NO: 93815 - DNA, 17 bp, Arabidopsis thaliana
gaagctaccccgctgga

SEQ ID NO: 93816 - DNA, 17 bp, Arabidopsis thaliana
gaagctacgacggcgaa

SEQ ID NO: 93817 - DNA, 17 bp, Arabidopsis thaliana
gaagctacggttatccc

SEQ ID NO: 93818 - DNA, 17 bp, Arabidopsis thaliana
gaagctagatgtacagc

SEQ ID NO: 93819 - DNA, 17 bp, Arabidopsis thaliana
gaagctagccgcaagtg

SEQ ID NO: 93820 - DNA, 17 bp, Arabidopsis thaliana
gaagctagctagtgacg

SEQ ID NO: 93821 - DNA, 17 bp, Arabidopsis thaliana
gaagctagctctcttga

SEQ ID NO: 93822 - DNA, 17 bp, Arabidopsis thaliana
gaagctatagctagtcc

SEQ ID NO: 93823 - DNA, 17 bp, Arabidopsis thaliana
gaagctatctctctcca

SEQ ID NO: 93824 - DNA, 17 bp, Arabidopsis thaliana
gaagctatgatggtacg

SEQ ID NO: 93825 - DNA, 17 bp, Arabidopsis thaliana
gaagctatggctccgtt

SEQ ID NO: 93826 - DNA, 17 bp, Arabidopsis thaliana
gaagctcaagaaccgaa

SEQ ID NO: 93827 - DNA, 17 bp, Arabidopsis thaliana
gaagctcaggtctggta

SEQ ID NO: 93828 - DNA, 17 bp, Arabidopsis thaliana
gaagctccagaagcacg

SEQ ID NO: 93829 - DNA, 17 bp, Arabidopsis thaliana
gaagctcccttgggcca

SEQ ID NO: 93830 - DNA, 17 bp, Arabidopsis thaliana
gaagctcgcctgggttg

SEQ ID NO: 93831 - DNA, 17 bp, Arabidopsis thaliana
gaagctcggaaatttgc

SEQ ID NO: 93832 - DNA, 17 bp, Arabidopsis thaliana
gaagctgagccctggtc

SEQ ID NO: 93833 - DNA, 17 bp, Arabidopsis thaliana
gaagctgagtcctggtc

SEQ ID NO: 93834 - DNA, 17 bp, Arabidopsis thaliana
gaagctgattggcgggc

SEQ ID NO: 93835 - DNA, 17 bp, Arabidopsis thaliana
gaagctgcacgactcgt

SEQ ID NO: 93836 - DNA, 17 bp, Arabidopsis thaliana
gaagctgccagcacgat

SEQ ID NO: 93837 - DNA, 17 bp, Arabidopsis thaliana
gaagctgccagcagatc

SEQ ID NO: 93838 - DNA, 17 bp, Arabidopsis thaliana
gaagctgccagcatcat

SEQ ID NO: 93839 - DNA, 17 bp, Arabidopsis thaliana
gaagctgccagcatgat

SEQ ID NO: 93840 - DNA, 17 bp, Arabidopsis thaliana
gaagctgccgatggatc

SEQ ID NO: 93841 - DNA, 17 bp, Arabidopsis thaliana
gaagctgcgatctttgt

SEQ ID NO: 93842 - DNA, 17 bp, Arabidopsis thaliana
gaagctgcgtcaaaaaa

SEQ ID NO: 93843 - DNA, 17 bp, Arabidopsis thaliana
gaagctgctcacggccc

SEQ ID NO: 93844 - DNA, 17 bp, Arabidopsis thaliana
gaagctgctcgaggggg

SEQ ID NO: 93845 - DNA, 17 bp, Arabidopsis thaliana
gaagctggagtctcatc

SEQ ID NO: 93846 - DNA, 17 bp, Arabidopsis thaliana
gaagctggagtgccgtt

SEQ ID NO: 93847 - DNA, 17 bp, Arabidopsis thaliana
gaagctggcataggttg

SEQ ID NO: 93848 - DNA, 17 bp, Arabidopsis thaliana
gaagctggcctaggttg

SEQ ID NO: 93849 - DNA, 17 bp, Arabidopsis thaliana
gaagctgggatttcatc

SEQ ID NO: 93850 - DNA, 17 bp, Arabidopsis thaliana
gaagctgggttaagtca

SEQ ID NO: 93851 - DNA, 17 bp, Arabidopsis thaliana
gaagctggttggcaggt

SEQ ID NO: 93852 - DNA, 17 bp, Arabidopsis thaliana
gaagctgtgtaaaatac

SEQ ID NO: 93853 - DNA, 17 bp, Arabidopsis thaliana
gaagctgtttcaggtgt

SEQ ID NO: 93854 - DNA, 17 bp, Arabidopsis thaliana
gaagcttaaagatcgtc

SEQ ID NO: 93855 - DNA, 17 bp, Arabidopsis thaliana
gaagcttacccatcagg

SEQ ID NO: 93856 - DNA, 17 bp, Arabidopsis thaliana
gaagcttagaggtcatc

SEQ ID NO: 93857 - DNA, 17 bp, Arabidopsis thaliana
gaagcttagaggtcgtc

SEQ ID NO: 93858 - DNA, 17 bp, Arabidopsis thaliana
gaagcttagtgatcctg

SEQ ID NO: 93859 - DNA, 17 bp, Arabidopsis thaliana
gaagcttatcgcgatac

SEQ ID NO: 93860 - DNA, 17 bp, Arabidopsis thaliana
gaagcttcactgttccc

SEQ ID NO: 93861 - DNA, 17 bp, Arabidopsis thaliana
gaagcttcgttccaaag

SEQ ID NO: 93862 - DNA, 17 bp, Arabidopsis thaliana
gaagcttctcagtggtc

SEQ ID NO: 93863 - DNA, 17 bp, Arabidopsis thaliana
gaagcttctgctcacag

SEQ ID NO: 93864 - DNA, 17 bp, Arabidopsis thaliana
gaagcttcttggaacca

SEQ ID NO: 93865 - DNA, 17 bp, Arabidopsis thaliana
gaagcttgactgaggtt

SEQ ID NO: 93866 - DNA, 17 bp, Arabidopsis thaliana
gaagcttgagatctgcg

SEQ ID NO: 93867 - DNA, 17 bp, Arabidopsis thaliana
gaagcttgagtctatgt

SEQ ID NO: 93868 - DNA, 17 bp, Arabidopsis thaliana
gaagcttgatttatcag

SEQ ID NO: 93869 - DNA, 17 bp, Arabidopsis thaliana
gaagcttgcagagagaa

SEQ ID NO: 93870 - DNA, 17 bp, Arabidopsis thaliana
gaagcttgggtgaaact

SEQ ID NO: 93871 - DNA, 17 bp, Arabidopsis thaliana
gaagcttgggtgccttg

SEQ ID NO: 93872 - DNA, 17 bp, Arabidopsis thaliana
gaagcttgtagcttccc

SEQ ID NO: 93873 - DNA, 17 bp, Arabidopsis thaliana
gaagctttacatgtagg

SEQ ID NO: 93874 - DNA, 17 bp, Arabidopsis thaliana
gaagctttatttatcag

SEQ ID NO: 93875 - DNA, 17 bp, Arabidopsis thaliana
gaagctttcctctgcat

SEQ ID NO: 93876 - DNA, 17 bp, Arabidopsis thaliana
gaagctttgattgtcct

SEQ ID NO: 93877 - DNA, 17 bp, Arabidopsis thaliana
gaagctttgccgtcttt

SEQ ID NO: 93878 - DNA, 17 bp, Arabidopsis thaliana
gaagctttggccgagtg

SEQ ID NO: 93879 - DNA, 17 bp, Arabidopsis thaliana
gaagctttggcctgaac

SEQ ID NO: 93880 - DNA, 17 bp, Arabidopsis thaliana
gaagctttggcctttgg

SEQ ID NO: 93881 - DNA, 17 bp, Arabidopsis thaliana
gaagcttttgccgtctt

SEQ ID NO: 93882 - DNA, 17 bp, Arabidopsis thaliana
gaaggaaaatatcgtat

SEQ ID NO: 93883 - DNA, 17 bp, Arabidopsis thaliana
gaaggaaaccacttttc

SEQ ID NO: 93884 - DNA, 17 bp, Arabidopsis thaliana
gaaggaacgctccaggc

SEQ ID NO: 93885 - DNA, 17 bp, Arabidopsis thaliana
gaaggaactgagactac

SEQ ID NO: 93886 - DNA, 17 bp, Arabidopsis thaliana
gaaggaagccgggttac

SEQ ID NO: 93887 - DNA, 17 bp, Arabidopsis thaliana
gaaggaagcttgtagct

SEQ ID NO: 93888 - DNA, 17 bp, Arabidopsis thaliana
gaaggaatcaccgccgc

SEQ ID NO: 93889 - DNA, 17 bp, Arabidopsis thaliana
gaaggaatgtgccactc

SEQ ID NO: 93890 - DNA, 17 bp, Arabidopsis thaliana
gaaggaatgtggcactc

SEQ ID NO: 93891 - DNA, 17 bp, Arabidopsis thaliana
gaaggaattcgggctga

SEQ ID NO: 93892 - DNA, 17 bp, Arabidopsis thaliana
gaaggaccaacacactg

SEQ ID NO: 93893 - DNA, 17 bp, Arabidopsis thaliana
gaaggaccaccacactg

SEQ ID NO: 93894 - DNA, 17 bp, Arabidopsis thaliana
gaaggacgcacctctgg

SEQ ID NO: 93895 - DNA, 17 bp, Arabidopsis thaliana
gaaggagaagcagaata

SEQ ID NO: 93896 - DNA, 17 bp, Arabidopsis thaliana
gaaggagaccatctctg

SEQ ID NO: 93897 - DNA, 17 bp, Arabidopsis thaliana
gaaggagacccgggtgc

SEQ ID NO: 93898 - DNA, 17 bp, Arabidopsis thaliana
gaaggagctcgttgtct

SEQ ID NO: 93899 - DNA, 17 bp, Arabidopsis thaliana
gaaggaggaattacggg

SEQ ID NO: 93900 - DNA, 17 bp, Arabidopsis thaliana
gaaggaggatactctta

SEQ ID NO: 93901 - DNA, 17 bp, Arabidopsis thaliana
gaaggagtgctgattgc

SEQ ID NO: 93902 - DNA, 17 bp, Arabidopsis thaliana
gaaggatacaattctta

SEQ ID NO: 93903 - DNA, 17 bp, Arabidopsis thaliana
gaaggatatgggccact

SEQ ID NO: 93904 - DNA, 17 bp, Arabidopsis thaliana
gaaggatatggtgtgat

SEQ ID NO: 93905 - DNA, 17 bp, Arabidopsis thaliana
gaaggatcacatcccgt

SEQ ID NO: 93906 - DNA, 17 bp, Arabidopsis thaliana
gaaggatcaccaaaggt

SEQ ID NO: 93907 - DNA, 17 bp, Arabidopsis thaliana
gaaggatcatttgtcag

SEQ ID NO: 93908 - DNA, 17 bp, Arabidopsis thaliana
gaaggatcccgttgcct

SEQ ID NO: 93909 - DNA, 17 bp, Arabidopsis thaliana
gaaggatcgagttacgg

SEQ ID NO: 93910 - DNA, 17 bp, Arabidopsis thaliana
gaaggatctttcgagtt

SEQ ID NO: 93911 - DNA, 17 bp, Arabidopsis thaliana
gaaggattacgggtttt

SEQ ID NO: 93912 - DNA, 17 bp, Arabidopsis thaliana
gaaggattccaagtgtg

SEQ ID NO: 93913 - DNA, 17 bp, Arabidopsis thaliana
gaaggattgctccatga

SEQ ID NO: 93914 - DNA, 17 bp, Arabidopsis thaliana
gaaggatttatataccg

SEQ ID NO: 93915 - DNA, 17 bp, Arabidopsis thaliana
gaaggcaaagctgttgg

SEQ ID NO: 93916 - DNA, 17 bp, Arabidopsis thaliana
gaaggcaacagaggatt

SEQ ID NO: 93917 - DNA, 17 bp, Arabidopsis thaliana
gaaggcaacagggtgag

SEQ ID NO: 93918 - DNA, 17 bp, Arabidopsis thaliana
gaaggcaacttgaattg

SEQ ID NO: 93919 - DNA, 17 bp, Arabidopsis thaliana
gaaggcaagagcacgag

SEQ ID NO: 93920 - DNA, 17 bp, Arabidopsis thaliana
gaaggcacgtctgcctg

SEQ ID NO: 93921 - DNA, 17 bp, Arabidopsis thaliana
gaaggcagaccgcctat

SEQ ID NO: 93922 - DNA, 17 bp, Arabidopsis thaliana
gaaggcagccaaggctt

SEQ ID NO: 93923 - DNA, 17 bp, Arabidopsis thaliana
gaaggcaggggacagcg

SEQ ID NO: 93924 - DNA, 17 bp, Arabidopsis thaliana
gaaggcatgctcttatg

SEQ ID NO: 93925 - DNA, 17 bp, Arabidopsis thaliana
gaaggcatgtagatgtg

SEQ ID NO: 93926 - DNA, 17 bp, Arabidopsis thaliana
gaaggcatttatctcgg

SEQ ID NO: 93927 - DNA, 17 bp, Arabidopsis thaliana
gaaggcgagagatcaga

SEQ ID NO: 93928 - DNA, 17 bp, Arabidopsis thaliana
gaaggcgattgccgtca

SEQ ID NO: 93929 - DNA, 17 bp, Arabidopsis thaliana
gaaggcggcttcgggca

SEQ ID NO: 93930 - DNA, 17 bp, Arabidopsis thaliana
gaaggcgttggtgttac

SEQ ID NO: 93931 - DNA, 17 bp, Arabidopsis thaliana
gaaggctaaggaccagc

SEQ ID NO: 93932 - DNA, 17 bp, Arabidopsis thaliana
gaaggctacgctcgttc

SEQ ID NO: 93933 - DNA, 17 bp, Arabidopsis thaliana
gaaggctccaaataagg

SEQ ID NO: 93934 - DNA, 17 bp, Arabidopsis thaliana
gaaggctctctagattt

SEQ ID NO: 93935 - DNA, 17 bp, Arabidopsis thaliana
gaaggctgattccgccg

SEQ ID NO: 93936 - DNA, 17 bp, Arabidopsis thaliana
gaaggcttgatcaccgg

SEQ ID NO: 93937 - DNA, 17 bp, Arabidopsis thaliana
gaagggaaggtgctatg

SEQ ID NO: 93938 - DNA, 17 bp, Arabidopsis thaliana
gaagggacacgtgttta

SEQ ID NO: 93939 - DNA, 17 bp, Arabidopsis thaliana
gaagggacgtatccagt

SEQ ID NO: 93940 - DNA, 17 bp, Arabidopsis thaliana
gaagggactctcagacc

SEQ ID NO: 93941 - DNA, 17 bp, Arabidopsis thaliana
gaagggagaagatgaag

SEQ ID NO: 93942 - DNA, 17 bp, Arabidopsis thaliana
gaagggagtctctaccg

SEQ ID NO: 93943 - DNA, 17 bp, Arabidopsis thaliana
gaagggatccctcgcgg

SEQ ID NO: 93944 - DNA, 17 bp, Arabidopsis thaliana
gaagggattacaggttt

SEQ ID NO: 93945 - DNA, 17 bp, Arabidopsis thaliana
gaagggattacgggttt

SEQ ID NO: 93946 - DNA, 17 bp, Arabidopsis thaliana
gaagggccaggtctctg

SEQ ID NO: 93947 - DNA, 17 bp, Arabidopsis thaliana
gaagggccgtcgctcaa

SEQ ID NO: 93948 - DNA, 17 bp, Arabidopsis thaliana
gaaggggagcagttgca

SEQ ID NO: 93949 - DNA, 17 bp, Arabidopsis thaliana
gaaggggtatcgtctgt

SEQ ID NO: 93950 - DNA, 17 bp, Arabidopsis thaliana
gaaggggtctgcgacag

SEQ ID NO: 93951 - DNA, 17 bp, Arabidopsis thaliana
gaagggtaaaggttggt

SEQ ID NO: 93952 - DNA, 17 bp, Arabidopsis thaliana
gaagggtctgaccatcg

SEQ ID NO: 93953 - DNA, 17 bp, Arabidopsis thaliana
gaagggtctgcgatttt

SEQ ID NO: 93954 - DNA, 17 bp, Arabidopsis thaliana
gaagggtctgtaactcc

SEQ ID NO: 93955 - DNA, 17 bp, Arabidopsis thaliana
gaagggtctgtcatctc

SEQ ID NO: 93956 - DNA, 17 bp, Arabidopsis thaliana
gaagggtgaaactccgg

SEQ ID NO: 93957 - DNA, 17 bp, Arabidopsis thaliana
gaagggtgaaactctca

SEQ ID NO: 93958 - DNA, 17 bp, Arabidopsis thaliana
gaagggtgaaacttgca

SEQ ID NO: 93959 - DNA, 17 bp, Arabidopsis thaliana
gaagggtgacaccaacg

SEQ ID NO: 93960 - DNA, 17 bp, Arabidopsis thaliana
gaagggtgtcgatcgac

SEQ ID NO: 93961 - DNA, 17 bp, Arabidopsis thaliana
gaagggttttttgtcga

SEQ ID NO: 93962 - DNA, 17 bp, Arabidopsis thaliana
gaaggtacatatccgga

SEQ ID NO: 93963 - DNA, 17 bp, Arabidopsis thaliana
gaaggtactggaccgaa

SEQ ID NO: 93964 - DNA, 17 bp, Arabidopsis thaliana
gaaggtagtccggttca

SEQ ID NO: 93965 - DNA, 17 bp, Arabidopsis thaliana
gaaggtatcctgctgca

SEQ ID NO: 93966 - DNA, 17 bp, Arabidopsis thaliana
gaaggtcatgcagacga

SEQ ID NO: 93967 - DNA, 17 bp, Arabidopsis thaliana
gaaggtcccaagggttc

SEQ ID NO: 93968 - DNA, 17 bp, Arabidopsis thaliana
gaaggtcccaccgggcg

SEQ ID NO: 93969 - DNA, 17 bp, Arabidopsis thaliana
gaaggtcgcgtgtttgg

SEQ ID NO: 93970 - DNA, 17 bp, Arabidopsis thaliana
gaaggtcgtctactcga

SEQ ID NO: 93971 - DNA, 17 bp, Arabidopsis thaliana
gaaggtctttgatctgc

SEQ ID NO: 93972 - DNA, 17 bp, Arabidopsis thaliana
gaaggtgcgctggatca

SEQ ID NO: 93973 - DNA, 17 bp, Arabidopsis thaliana
gaaggtgcggctggatc

SEQ ID NO: 93974 - DNA, 17 bp, Arabidopsis thaliana
gaaggtgcggctggatg

SEQ ID NO: 93975 - DNA, 17 bp, Arabidopsis thaliana
gaaggtgctctgatgga

SEQ ID NO: 93976 - DNA, 17 bp, Arabidopsis thaliana
gaaggtggactgttgat

SEQ ID NO: 93977 - DNA, 17 bp, Arabidopsis thaliana
gaaggtggggccaaacc

SEQ ID NO: 93978 - DNA, 17 bp, Arabidopsis thaliana
gaaggtgtccatcaaac

SEQ ID NO: 93979 - DNA, 17 bp, Arabidopsis thaliana
gaaggtgtgctggatca

SEQ ID NO: 93980 - DNA, 17 bp, Arabidopsis thaliana
gaaggtgtgttcaaagc

SEQ ID NO: 93981 - DNA, 17 bp, Arabidopsis thaliana
gaaggttagtcaacata

SEQ ID NO: 93982 - DNA, 17 bp, Arabidopsis thaliana
gaaggttcaggcgccgg

SEQ ID NO: 93983 - DNA, 17 bp, Arabidopsis thaliana
gaaggttccgcgtgctt

SEQ ID NO: 93984 - DNA, 17 bp, Arabidopsis thaliana
gaaggttcggttcccgg

SEQ ID NO: 93985 - DNA, 17 bp, Arabidopsis thaliana
gaaggttcgtgtcccac

SEQ ID NO: 93986 - DNA, 17 bp, Arabidopsis thaliana
gaaggttgcgtgttcgt

SEQ ID NO: 93987 - DNA, 17 bp, Arabidopsis thaliana
gaaggttgctctatcac

SEQ ID NO: 93988 - DNA, 17 bp, Arabidopsis thaliana
gaaggttgttaaagggt

SEQ ID NO: 93989 - DNA, 17 bp, Arabidopsis thaliana
gaagtaacactcggtgg

SEQ ID NO: 93990 - DNA, 17 bp, Arabidopsis thaliana
gaagtaaccacgattcg

SEQ ID NO: 93991 - DNA, 17 bp, Arabidopsis thaliana
gaagtaaccgatcttgt

SEQ ID NO: 93992 - DNA, 17 bp, Arabidopsis thaliana
gaagtaaggcatattca

SEQ ID NO: 93993 - DNA, 17 bp, Arabidopsis thaliana
gaagtaaggtcgggtca

SEQ ID NO: 93994 - DNA, 17 bp, Arabidopsis thaliana
gaagtagagcagagcac

SEQ ID NO: 93995 - DNA, 17 bp, Arabidopsis thaliana
gaagtagatgttgtcgc

SEQ ID NO: 93996 - DNA, 17 bp, Arabidopsis thaliana
gaagtagggagacaggc

SEQ ID NO: 93997 - DNA, 17 bp, Arabidopsis thaliana
gaagtagttgctgatcg

SEQ ID NO: 93998 - DNA, 17 bp, Arabidopsis thaliana
gaagtagtttcaggatg

SEQ ID NO: 93999 - DNA, 17 bp, Arabidopsis thaliana
gaagtataccgcaggta

SEQ ID NO: 94000 - DNA, 17 bp, Arabidopsis thaliana
gaagtatatcagttggg

SEQ ID NO: 94001 - DNA, 17 bp, Arabidopsis thaliana
gaagtatcagcattctg

SEQ ID NO: 94002 - DNA, 17 bp, Arabidopsis thaliana
gaagtatcgaacagaca

SEQ ID NO: 94003 - DNA, 17 bp, Arabidopsis thaliana
gaagtattaggttcgac

SEQ ID NO: 94004 - DNA, 17 bp, Arabidopsis thaliana
gaagtattggtgctgga

SEQ ID NO: 94005 - DNA, 17 bp, Arabidopsis thaliana
gaagtatttcggtgcgt

SEQ ID NO: 94006 - DNA, 17 bp, Arabidopsis thaliana
gaagtcaaagctctact

SEQ ID NO: 94007 - DNA, 17 bp, Arabidopsis thaliana
gaagtcaacacttttgg

SEQ ID NO: 94008 - DNA, 17 bp, Arabidopsis thaliana
gaagtcaccgcttggcg

SEQ ID NO: 94009 - DNA, 17 bp, Arabidopsis thaliana
gaagtcaccttgtccca

SEQ ID NO: 94010 - DNA, 17 bp, Arabidopsis thaliana
gaagtcacgttagatga

SEQ ID NO: 94011 - DNA, 17 bp, Arabidopsis thaliana
gaagtcactaagtcaag

SEQ ID NO: 94012 - DNA, 17 bp, Arabidopsis thaliana
gaagtcaggatggtcag

SEQ ID NO: 94013 - DNA, 17 bp, Arabidopsis thaliana
gaagtccaccttacgac

SEQ ID NO: 94014 - DNA, 17 bp, Arabidopsis thaliana
gaagtcccctcaagaac

SEQ ID NO: 94015 - DNA, 17 bp, Arabidopsis thaliana
gaagtccctttggtcca

SEQ ID NO: 94016 - DNA, 17 bp, Arabidopsis thaliana
gaagtccgaggtgtttc

SEQ ID NO: 94017 - DNA, 17 bp, Arabidopsis thaliana
gaagtccgctccgtgtc

SEQ ID NO: 94018 - DNA, 17 bp, Arabidopsis thaliana
gaagtccggatcggggc

SEQ ID NO: 94019 - DNA, 17 bp, Arabidopsis thaliana
gaagtccgtatgagtct

SEQ ID NO: 94020 - DNA, 17 bp, Arabidopsis thaliana
gaagtcctcatcttcag

SEQ ID NO: 94021 - DNA, 17 bp, Arabidopsis thaliana
gaagtcctcgtgttgca

SEQ ID NO: 94022 - DNA, 17 bp, Arabidopsis thaliana
gaagtcctcgtgttgga

SEQ ID NO: 94023 - DNA, 17 bp, Arabidopsis thaliana
gaagtcctcgttttgca

SEQ ID NO: 94024 - DNA, 17 bp, Arabidopsis thaliana
gaagtccttgtatggtt

SEQ ID NO: 94025 - DNA, 17 bp, Arabidopsis thaliana
gaagtcctttggcccaa

SEQ ID NO: 94026 - DNA, 17 bp, Arabidopsis thaliana
gaagtcgaactccagga

SEQ ID NO: 94027 - DNA, 17 bp, Arabidopsis thaliana
gaagtcgaacttggttg

SEQ ID NO: 94028 - DNA, 17 bp, Arabidopsis thaliana
gaagtcggctaggcggt

SEQ ID NO: 94029 - DNA, 17 bp, Arabidopsis thaliana
gaagtcggtggatgagc

SEQ ID NO: 94030 - DNA, 17 bp, Arabidopsis thaliana
gaagtcggttcgctcag

SEQ ID NO: 94031 - DNA, 17 bp, Arabidopsis thaliana
gaagtctaaatcctttg

SEQ ID NO: 94032 - DNA, 17 bp, Arabidopsis thaliana
gaagtctaatgttccag

SEQ ID NO: 94033 - DNA, 17 bp, Arabidopsis thaliana
gaagtctaggtggcaaa

SEQ ID NO: 94034 - DNA, 17 bp, Arabidopsis thaliana
gaagtctaggtggcaag

SEQ ID NO: 94035 - DNA, 17 bp, Arabidopsis thaliana
gaagtctaggtgtcaag

SEQ ID NO: 94036 - DNA, 17 bp, Arabidopsis thaliana
gaagtctcggacccggt

SEQ ID NO: 94037 - DNA, 17 bp, Arabidopsis thaliana
gaagtctcggacctggt

SEQ ID NO: 94038 - DNA, 17 bp, Arabidopsis thaliana
gaagtctctcctgtgct

SEQ ID NO: 94039 - DNA, 17 bp, Arabidopsis thaliana
gaagtctctgacaatgg

SEQ ID NO: 94040 - DNA, 17 bp, Arabidopsis thaliana
gaagtctgcaggcacct

SEQ ID NO: 94041 - DNA, 17 bp, Arabidopsis thaliana
gaagtctgcctgggtgt

SEQ ID NO: 94042 - DNA, 17 bp, Arabidopsis thaliana
gaagtctgtcagttgag

SEQ ID NO: 94043 - DNA, 17 bp, Arabidopsis thaliana
gaagtctgtcagttggg

SEQ ID NO: 94044 - DNA, 17 bp, Arabidopsis thaliana
gaagtctgtcagttggt

SEQ ID NO: 94045 - DNA, 17 bp, Arabidopsis thaliana
gaagtcttctcttttcg

SEQ ID NO: 94046 - DNA, 17 bp, Arabidopsis thaliana
gaagtcttttttttttt

SEQ ID NO: 94047 - DNA, 17 bp, Arabidopsis thaliana
gaagtgaaaatggatgt

SEQ ID NO: 94048 - DNA, 17 bp, Arabidopsis thaliana
gaagtgaatgttgctac

SEQ ID NO: 94049 - DNA, 17 bp, Arabidopsis thaliana
gaagtgaccagatccca

SEQ ID NO: 94050 - DNA, 17 bp, Arabidopsis thaliana
gaagtgacctccatcac

SEQ ID NO: 94051 - DNA, 17 bp, Arabidopsis thaliana
gaagtgacttttccccc

SEQ ID NO: 94052 - DNA, 17 bp, Arabidopsis thaliana
gaagtgacttttgtcct

SEQ ID NO: 94053 - DNA, 17 bp, Arabidopsis thaliana
gaagtgagacacgtgga

SEQ ID NO: 94054 - DNA, 17 bp, Arabidopsis thaliana
gaagtgagacccggtgc

SEQ ID NO: 94055 - DNA, 17 bp, Arabidopsis thaliana
gaagtgagtctctccca

SEQ ID NO: 94056 - DNA, 17 bp, Arabidopsis thaliana
gaagtgatctatgcgtg

SEQ ID NO: 94057 - DNA, 17 bp, Arabidopsis thaliana
gaagtgcaccgcatttt

SEQ ID NO: 94058 - DNA, 17 bp, Arabidopsis thaliana
gaagtgcagtgatgtat

SEQ ID NO: 94059 - DNA, 17 bp, Arabidopsis thaliana
gaagtgcattggtcggc

SEQ ID NO: 94060 - DNA, 17 bp, Arabidopsis thaliana
gaagtgccctactctat

SEQ ID NO: 94061 - DNA, 17 bp, Arabidopsis thaliana
gaagtgccgtaacacct

SEQ ID NO: 94062 - DNA, 17 bp, Arabidopsis thaliana
gaagtgcctaaacatgt

SEQ ID NO: 94063 - DNA, 17 bp, Arabidopsis thaliana
gaagtgcggatctacct

SEQ ID NO: 94064 - DNA, 17 bp, Arabidopsis thaliana
gaagtgcggtcctgtgt

SEQ ID NO: 94065 - DNA, 17 bp, Arabidopsis thaliana
gaagtgcggttttgggt

SEQ ID NO: 94066 - DNA, 17 bp, Arabidopsis thaliana
gaagtgctctgctcggc

SEQ ID NO: 94067 - DNA, 17 bp, Arabidopsis thaliana
gaagtgctggcgaccat

SEQ ID NO: 94068 - DNA, 17 bp, Arabidopsis thaliana
gaagtgctttgacccat

SEQ ID NO: 94069 - DNA, 17 bp, Arabidopsis thaliana
gaagtggatgttgttgg

SEQ ID NO: 94070 - DNA, 17 bp, Arabidopsis thaliana
gaagtggctgcctgatc

SEQ ID NO: 94071 - DNA, 17 bp, Arabidopsis thaliana
gaagtgggacccggtgc

SEQ ID NO: 94072 - DNA, 17 bp, Arabidopsis thaliana
gaagtgggcggcgaagg

SEQ ID NO: 94073 - DNA, 17 bp, Arabidopsis thaliana
gaagtgtatccgttggc

SEQ ID NO: 94074 - DNA, 17 bp, Arabidopsis thaliana
gaagtgtatgattggtg

SEQ ID NO: 94075 - DNA, 17 bp, Arabidopsis thaliana
gaagtgtatgattggtt

SEQ ID NO: 94076 - DNA, 17 bp, Arabidopsis thaliana
gaagtgtccgccccggt

SEQ ID NO: 94077 - DNA, 17 bp, Arabidopsis thaliana
gaagtgtcggttgtgga

SEQ ID NO: 94078 - DNA, 17 bp, Arabidopsis thaliana
gaagtgttccatctctg

SEQ ID NO: 94079 - DNA, 17 bp, Arabidopsis thaliana
gaagtgttcggatcgcg

SEQ ID NO: 94080 - DNA, 17 bp, Arabidopsis thaliana
gaagtgtttgacgtgct

SEQ ID NO: 94081 - DNA, 17 bp, Arabidopsis thaliana
gaagttaacttgggctt

SEQ ID NO: 94082 - DNA, 17 bp, Arabidopsis thaliana
gaagttaagtcccttgg

SEQ ID NO: 94083 - DNA, 17 bp, Arabidopsis thaliana
gaagttactgcgatggg

SEQ ID NO: 94084 - DNA, 17 bp, Arabidopsis thaliana
gaagttaggtgcttgcg

SEQ ID NO: 94085 - DNA, 17 bp, Arabidopsis thaliana
gaagttcaaacacaaag

SEQ ID NO: 94086 - DNA, 17 bp, Arabidopsis thaliana
gaagttcaccgattttc

SEQ ID NO: 94087 - DNA, 17 bp, Arabidopsis thaliana
gaagttcagagggaggc

SEQ ID NO: 94088 - DNA, 17 bp, Arabidopsis thaliana
gaagttcagatccaaag

SEQ ID NO: 94089 - DNA, 17 bp, Arabidopsis thaliana
gaagttccaagtcctct

SEQ ID NO: 94090 - DNA, 17 bp, Arabidopsis thaliana
gaagttccattgtcctg

SEQ ID NO: 94091 - DNA, 17 bp, Arabidopsis thaliana
gaagttccgctcaacct

SEQ ID NO: 94092 - DNA, 17 bp, Arabidopsis thaliana
gaagttctaaacctata

SEQ ID NO: 94093 - DNA, 17 bp, Arabidopsis thaliana
gaagttctaggttctcg

SEQ ID NO: 94094 - DNA, 17 bp, Arabidopsis thaliana
gaagttctaggttttct

SEQ ID NO: 94095 - DNA, 17 bp, Arabidopsis thaliana
gaagttctatcaggatg

SEQ ID NO: 94096 - DNA, 17 bp, Arabidopsis thaliana
gaagttctgataagatc

SEQ ID NO: 94097 - DNA, 17 bp, Arabidopsis thaliana
gaagttctgggccaatg

SEQ ID NO: 94098 - DNA, 17 bp, Arabidopsis thaliana
gaagttctgggccgaaa

SEQ ID NO: 94099 - DNA, 17 bp, Arabidopsis thaliana
gaagttctgggctaatg

SEQ ID NO: 94100 - DNA, 17 bp, Arabidopsis thaliana
gaagttcttttgaccca

SEQ ID NO: 94101 - DNA, 17 bp, Arabidopsis thaliana
gaagttgaagtcgccgt

SEQ ID NO: 94102 - DNA, 17 bp, Arabidopsis thaliana
gaagttgacactggaac

SEQ ID NO: 94103 - DNA, 17 bp, Arabidopsis thaliana
gaagttgagttgaccca

SEQ ID NO: 94104 - DNA, 17 bp, Arabidopsis thaliana
gaagttgagtttgcgtc

SEQ ID NO: 94105 - DNA, 17 bp, Arabidopsis thaliana
gaagttgcaggaatgga

SEQ ID NO: 94106 - DNA, 17 bp, Arabidopsis thaliana
gaagttgctaactcata

SEQ ID NO: 94107 - DNA, 17 bp, Arabidopsis thaliana
gaagttgctccgacagg

SEQ ID NO: 94108 - DNA, 17 bp, Arabidopsis thaliana
gaagttgctgatctagc

SEQ ID NO: 94109 - DNA, 17 bp, Arabidopsis thaliana
gaagttgcttgactcct

SEQ ID NO: 94110 - DNA, 17 bp, Arabidopsis thaliana
gaagttggccaactctc

SEQ ID NO: 94111 - DNA, 17 bp, Arabidopsis thaliana
gaagttggctaagtccg

SEQ ID NO: 94112 - DNA, 17 bp, Arabidopsis thaliana
gaagttggcttgtatgg

SEQ ID NO: 94113 - DNA, 17 bp, Arabidopsis thaliana
gaagttggtgattgacg

SEQ ID NO: 94114 - DNA, 17 bp, Arabidopsis thaliana
gaagttgtaatgaatct

SEQ ID NO: 94115 - DNA, 17 bp, Arabidopsis thaliana
gaagttgtcttaggcgc

SEQ ID NO: 94116 - DNA, 17 bp, Arabidopsis thaliana
gaagttgttcaaggact

SEQ ID NO: 94117 - DNA, 17 bp, Arabidopsis thaliana
gaagttgttcgagaagc

SEQ ID NO: 94118 - DNA, 17 bp, Arabidopsis thaliana
gaagttgttcgtttgac

SEQ ID NO: 94119 - DNA, 17 bp, Arabidopsis thaliana
gaagtttaagacccgtt

SEQ ID NO: 94120 - DNA, 17 bp, Arabidopsis thaliana
gaagtttaagactcgtt

SEQ ID NO: 94121 - DNA, 17 bp, Arabidopsis thaliana
gaagtttaagagtgaga

SEQ ID NO: 94122 - DNA, 17 bp, Arabidopsis thaliana
gaagtttacccatcagg

SEQ ID NO: 94123 - DNA, 17 bp, Arabidopsis thaliana
gaagtttactgcagctt

SEQ ID NO: 94124 - DNA, 17 bp, Arabidopsis thaliana
gaagtttacttggtatg

SEQ ID NO: 94125 - DNA, 17 bp, Arabidopsis thaliana
gaagtttagagatcgcc

SEQ ID NO: 94126 - DNA, 17 bp, Arabidopsis thaliana
gaagtttaggacccaat

SEQ ID NO: 94127 - DNA, 17 bp, Arabidopsis thaliana
gaagtttaggacctgtt

SEQ ID NO: 94128 - DNA, 17 bp, Arabidopsis thaliana
gaagtttaggatccaat

SEQ ID NO: 94129 - DNA, 17 bp, Arabidopsis thaliana
gaagtttaggatccatt

SEQ ID NO: 94130 - DNA, 17 bp, Arabidopsis thaliana
gaagtttaggatccgtt

SEQ ID NO: 94131 - DNA, 17 bp, Arabidopsis thaliana
gaagtttaggatcctct

SEQ ID NO: 94132 - DNA, 17 bp, Arabidopsis thaliana
gaagtttcatcttacca

SEQ ID NO: 94133 - DNA, 17 bp, Arabidopsis thaliana
gaagtttccctcaggat

SEQ ID NO: 94134 - DNA, 17 bp, Arabidopsis thaliana
gaagtttcgttgatgtc

SEQ ID NO: 94135 - DNA, 17 bp, Arabidopsis thaliana
gaagtttctaacgggcc

SEQ ID NO: 94136 - DNA, 17 bp, Arabidopsis thaliana
gaagtttgcaggctgtt

SEQ ID NO: 94137 - DNA, 17 bp, Arabidopsis thaliana
gaagtttgcggaaacgg

SEQ ID NO: 94138 - DNA, 17 bp, Arabidopsis thaliana
gaagtttgcgttgttgg

SEQ ID NO: 94139 - DNA, 17 bp, Arabidopsis thaliana
gaagttttatcgacttt

SEQ ID NO: 94140 - DNA, 17 bp, Arabidopsis thaliana
gaagttttccccaaccg

SEQ ID NO: 94141 - DNA, 17 bp, Arabidopsis thaliana
gaagttttgacgggaaa

SEQ ID NO: 94142 - DNA, 17 bp, Arabidopsis thaliana
gaagttttgggccgaaa

SEQ ID NO: 94143 - DNA, 17 bp, Arabidopsis thaliana
gaagttttgtgccgaag

SEQ ID NO: 94144 - DNA, 17 bp, Arabidopsis thaliana
gaagtttttttgaccca

SEQ ID NO: 94145 - DNA, 17 bp, Arabidopsis thaliana
gaataaagcctggtccg

SEQ ID NO: 94146 - DNA, 17 bp, Arabidopsis thaliana
gaataaccggtggtgtt

SEQ ID NO: 94147 - DNA, 17 bp, Arabidopsis thaliana
gaataagcagatatttg

SEQ ID NO: 94148 - DNA, 17 bp, Arabidopsis thaliana
gaataagccagtggcag

SEQ ID NO: 94149 - DNA, 17 bp, Arabidopsis thaliana
gaataagcgtcacagtg

SEQ ID NO: 94150 - DNA, 17 bp, Arabidopsis thaliana
gaataagctgttgatca

SEQ ID NO: 94151 - DNA, 17 bp, Arabidopsis thaliana
gaataatcagtctttgc

SEQ ID NO: 94152 - DNA, 17 bp, Arabidopsis thaliana
gaatacaagggtggatc

SEQ ID NO: 94153 - DNA, 17 bp, Arabidopsis thaliana
gaataccaaaacgctta

SEQ ID NO: 94154 - DNA, 17 bp, Arabidopsis thaliana
gaataccaatcttagtt

SEQ ID NO: 94155 - DNA, 17 bp, Arabidopsis thaliana
gaataccacttctatct

SEQ ID NO: 94156 - DNA, 17 bp, Arabidopsis thaliana
gaataccaggaagttct

SEQ ID NO: 94157 - DNA, 17 bp, Arabidopsis thaliana
gaataccaggaggctcg

SEQ ID NO: 94158 - DNA, 17 bp, Arabidopsis thaliana
gaataccaggaggctct

SEQ ID NO: 94159 - DNA, 17 bp, Arabidopsis thaliana
gaataccaggaggttct

SEQ ID NO: 94160 - DNA, 17 bp, Arabidopsis thaliana
gaataccaggaggtttt

SEQ ID NO: 94161 - DNA, 17 bp, Arabidopsis thaliana
gaataccggaactcttg

SEQ ID NO: 94162 - DNA, 17 bp, Arabidopsis thaliana
gaatacgaaccgtgaaa

SEQ ID NO: 94163 - DNA, 17 bp, Arabidopsis thaliana
gaatacgaccttgactg

SEQ ID NO: 94164 - DNA, 17 bp, Arabidopsis thaliana
gaatacgcagtcctgtc

SEQ ID NO: 94165 - DNA, 17 bp, Arabidopsis thaliana
gaatacgcgcaggttcc

SEQ ID NO: 94166 - DNA, 17 bp, Arabidopsis thaliana
gaatacgctgtcactaa

SEQ ID NO: 94167 - DNA, 17 bp, Arabidopsis thaliana
gaatacggggtacttcc

SEQ ID NO: 94168 - DNA, 17 bp, Arabidopsis thaliana
gaatacggtttagactg

SEQ ID NO: 94169 - DNA, 17 bp, Arabidopsis thaliana
gaatacgtacaaacctc

SEQ ID NO: 94170 - DNA, 17 bp, Arabidopsis thaliana
gaatactaaccggattt

SEQ ID NO: 94171 - DNA, 17 bp, Arabidopsis thaliana
gaatactaatcggtcga

SEQ ID NO: 94172 - DNA, 17 bp, Arabidopsis thaliana
gaatactagaaggttct

SEQ ID NO: 94173 - DNA, 17 bp, Arabidopsis thaliana
gaatactaggaggttct

SEQ ID NO: 94174 - DNA, 17 bp, Arabidopsis thaliana
gaatactgcgggtgacg

SEQ ID NO: 94175 - DNA, 17 bp, Arabidopsis thaliana
gaatacttgaactacca

SEQ ID NO: 94176 - DNA, 17 bp, Arabidopsis thaliana
gaatactttagcgtttg

SEQ ID NO: 94177 - DNA, 17 bp, Arabidopsis thaliana
gaatactttcgtgaacc

SEQ ID NO: 94178 - DNA, 17 bp, Arabidopsis thaliana
gaatagacacttttctc

SEQ ID NO: 94179 - DNA, 17 bp, Arabidopsis thaliana
gaatagacagacctggt

SEQ ID NO: 94180 - DNA, 17 bp, Arabidopsis thaliana
gaatagaccatttatcg

SEQ ID NO: 94181 - DNA, 17 bp, Arabidopsis thaliana
gaatagccttgtgtcag

SEQ ID NO: 94182 - DNA, 17 bp, Arabidopsis thaliana
gaatagcggctttggag

SEQ ID NO: 94183 - DNA, 17 bp, Arabidopsis thaliana
gaatagctggaggtttt

SEQ ID NO: 94184 - DNA, 17 bp, Arabidopsis thaliana
gaataggaatagtgtgg

SEQ ID NO: 94185 - DNA, 17 bp, Arabidopsis thaliana
gaataggaccgtggtct

SEQ ID NO: 94186 - DNA, 17 bp, Arabidopsis thaliana
gaataggtctttgaggg

SEQ ID NO: 94187 - DNA, 17 bp, Arabidopsis thaliana
gaatagtccgcagtagt

SEQ ID NO: 94188 - DNA, 17 bp, Arabidopsis thaliana
gaatagtctcggaacaa

SEQ ID NO: 94189 - DNA, 17 bp, Arabidopsis thaliana
gaatagtcttcgatggt

SEQ ID NO: 94190 - DNA, 17 bp, Arabidopsis thaliana
gaatagtggagaacagc

SEQ ID NO: 94191 - DNA, 17 bp, Arabidopsis thaliana
gaatagttggatcccaa

SEQ ID NO: 94192 - DNA, 17 bp, Arabidopsis thaliana
gaatagttggatcgttg

SEQ ID NO: 94193 - DNA, 17 bp, Arabidopsis thaliana
gaatagtttgtggattt

SEQ ID NO: 94194 - DNA, 17 bp, Arabidopsis thaliana
gaatagttttccaaagt

SEQ ID NO: 94195 - DNA, 17 bp, Arabidopsis thaliana
gaatatcacatcggtgg

SEQ ID NO: 94196 - DNA, 17 bp, Arabidopsis thaliana
gaatatcagaagattgt

SEQ ID NO: 94197 - DNA, 17 bp, Arabidopsis thaliana
gaatatcagaaggttct

SEQ ID NO: 94198 - DNA, 17 bp, Arabidopsis thaliana
gaatatcagagatcgct

SEQ ID NO: 94199 - DNA, 17 bp, Arabidopsis thaliana
gaatatcaggagattct

SEQ ID NO: 94200 - DNA, 17 bp, Arabidopsis thaliana
gaatatcaggaggttct

SEQ ID NO: 94201 - DNA, 17 bp, Arabidopsis thaliana
gaatatcaggaggtttt

SEQ ID NO: 94202 - DNA, 17 bp, Arabidopsis thaliana
gaatatccagtttgttc

SEQ ID NO: 94203 - DNA, 17 bp, Arabidopsis thaliana
gaatatccgctttgatc

SEQ ID NO: 94204 - DNA, 17 bp, Arabidopsis thaliana
gaatatcgctcactgct

SEQ ID NO: 94205 - DNA, 17 bp, Arabidopsis thaliana
gaatatgaccagttttg

SEQ ID NO: 94206 - DNA, 17 bp, Arabidopsis thaliana
gaatatgacggctcatg

SEQ ID NO: 94207 - DNA, 17 bp, Arabidopsis thaliana
gaatatgaggaggaaga

SEQ ID NO: 94208 - DNA, 17 bp, Arabidopsis thaliana
gaatatgatagctcagg

SEQ ID NO: 94209 - DNA, 17 bp, Arabidopsis thaliana
gaatatgccttacttcc

SEQ ID NO: 94210 - DNA, 17 bp, Arabidopsis thaliana
gaatatgggctttgtcc

SEQ ID NO: 94211 - DNA, 17 bp, Arabidopsis thaliana
gaatatggggagcaact

SEQ ID NO: 94212 - DNA, 17 bp, Arabidopsis thaliana
gaatatgttttcatcca

SEQ ID NO: 94213 - DNA, 17 bp, Arabidopsis thaliana
gaatattccagggtgta

SEQ ID NO: 94214 - DNA, 17 bp, Arabidopsis thaliana
gaatattctcaggatat

SEQ ID NO: 94215 - DNA, 17 bp, Arabidopsis thaliana
gaatattcttcggaata

SEQ ID NO: 94216 - DNA, 17 bp, Arabidopsis thaliana
gaatattgacacgtgga

SEQ ID NO: 94217 - DNA, 17 bp, Arabidopsis thaliana
gaatattgctctgattc

SEQ ID NO: 94218 - DNA, 17 bp, Arabidopsis thaliana
gaatattgtgtggatct

SEQ ID NO: 94219 - DNA, 17 bp, Arabidopsis thaliana
gaatatttgaaggttct

SEQ ID NO: 94220 - DNA, 17 bp, Arabidopsis thaliana
gaatatttgttaggtcc

SEQ ID NO: 94221 - DNA, 17 bp, Arabidopsis thaliana
gaatcaaacagtgaaaa

SEQ ID NO: 94222 - DNA, 17 bp, Arabidopsis thaliana
gaatcaaagaacagggc

SEQ ID NO: 94223 - DNA, 17 bp, Arabidopsis thaliana
gaatcaaatagcctcga

SEQ ID NO: 94224 - DNA, 17 bp, Arabidopsis thaliana
gaatcaaattccaaagg

SEQ ID NO: 94225 - DNA, 17 bp, Arabidopsis thaliana
gaatcaaccgatgtaga

SEQ ID NO: 94226 - DNA, 17 bp, Arabidopsis thaliana
gaatcaacctctacgga

SEQ ID NO: 94227 - DNA, 17 bp, Arabidopsis thaliana
gaatcaacgaactgcag

SEQ ID NO: 94228 - DNA, 17 bp, Arabidopsis thaliana
gaatcaacgaactgcgg

SEQ ID NO: 94229 - DNA, 17 bp, Arabidopsis thaliana
gaatcaacgagcttagg

SEQ ID NO: 94230 - DNA, 17 bp, Arabidopsis thaliana
gaatcaacgatgtggcg

SEQ ID NO: 94231 - DNA, 17 bp, Arabidopsis thaliana
gaatcaacggatgtcta

SEQ ID NO: 94232 - DNA, 17 bp, Arabidopsis thaliana
gaatcaactcttcaggt

SEQ ID NO: 94233 - DNA, 17 bp, Arabidopsis thaliana
gaatcaagactttccgc

SEQ ID NO: 94234 - DNA, 17 bp, Arabidopsis thaliana
gaatcaatctccatctc

SEQ ID NO: 94235 - DNA, 17 bp, Arabidopsis thaliana
gaatcaatgagtctttc

SEQ ID NO: 94236 - DNA, 17 bp, Arabidopsis thaliana
gaatcaatttttgaaaa

SEQ ID NO: 94237 - DNA, 17 bp, Arabidopsis thaliana
gaatcacccgtagtgtg

SEQ ID NO: 94238 - DNA, 17 bp, Arabidopsis thaliana
gaatcaccgcaagatgt

SEQ ID NO: 94239 - DNA, 17 bp, Arabidopsis thaliana
gaatcaccttgagttta

SEQ ID NO: 94240 - DNA, 17 bp, Arabidopsis thaliana
gaatcactaacgaccaa

SEQ ID NO: 94241 - DNA, 17 bp, Arabidopsis thaliana
gaatcagaaagctgcga

SEQ ID NO: 94242 - DNA, 17 bp, Arabidopsis thaliana
gaatcagactgcaggat

SEQ ID NO: 94243 - DNA, 17 bp, Arabidopsis thaliana
gaatcagatctttttgc

SEQ ID NO: 94244 - DNA, 17 bp, Arabidopsis thaliana
gaatcagatcttttttg

SEQ ID NO: 94245 - DNA, 17 bp, Arabidopsis thaliana
gaatcagcatttcgtca

SEQ ID NO: 94246 - DNA, 17 bp, Arabidopsis thaliana
gaatcagccctttgtcg

SEQ ID NO: 94247 - DNA, 17 bp, Arabidopsis thaliana
gaatcagcgtctttcct

SEQ ID NO: 94248 - DNA, 17 bp, Arabidopsis thaliana
gaatcaggtctcgaact

SEQ ID NO: 94249 - DNA, 17 bp, Arabidopsis thaliana
gaatcagtctatggtag

SEQ ID NO: 94250 - DNA, 17 bp, Arabidopsis thaliana
gaatcagtgatgtaacc

SEQ ID NO: 94251 - DNA, 17 bp, Arabidopsis thaliana
gaatcagttttgctcta

SEQ ID NO: 94252 - DNA, 17 bp, Arabidopsis thaliana
gaatcatcagagcaacg

SEQ ID NO: 94253 - DNA, 17 bp, Arabidopsis thaliana
gaatcatcgcctctttc

SEQ ID NO: 94254 - DNA, 17 bp, Arabidopsis thaliana
gaatcatgcagactttt

SEQ ID NO: 94255 - DNA, 17 bp, Arabidopsis thaliana
gaatcattccggggttc

SEQ ID NO: 94256 - DNA, 17 bp, Arabidopsis thaliana
gaatcattggtgacacg

SEQ ID NO: 94257 - DNA, 17 bp, Arabidopsis thaliana
gaatcatttccatccaa

SEQ ID NO: 94258 - DNA, 17 bp, Arabidopsis thaliana
gaatcatttggatggtc

SEQ ID NO: 94259 - DNA, 17 bp, Arabidopsis thaliana
gaatccaaggcctccat

SEQ ID NO: 94260 - DNA, 17 bp, Arabidopsis thaliana
gaatccaccacacggct

SEQ ID NO: 94261 - DNA, 17 bp, Arabidopsis thaliana
gaatccaccatgagcgc

SEQ ID NO: 94262 - DNA, 17 bp, Arabidopsis thaliana
gaatccagattaccaga

SEQ ID NO: 94263 - DNA, 17 bp, Arabidopsis thaliana
gaatccagccgcgctca

SEQ ID NO: 94264 - DNA, 17 bp, Arabidopsis thaliana
gaatccagcgaccaaaa

SEQ ID NO: 94265 - DNA, 17 bp, Arabidopsis thaliana
gaatccagcgacctggg

SEQ ID NO: 94266 - DNA, 17 bp, Arabidopsis thaliana
gaatccaggatcaagag

SEQ ID NO: 94267 - DNA, 17 bp, Arabidopsis thaliana
gaatccagtggtgtggc

SEQ ID NO: 94268 - DNA, 17 bp, Arabidopsis thaliana
gaatccatagtaagccg

SEQ ID NO: 94269 - DNA, 17 bp, Arabidopsis thaliana
gaatccatcttgaagta

SEQ ID NO: 94270 - DNA, 17 bp, Arabidopsis thaliana
gaatcccagggagtatg

SEQ ID NO: 94271 - DNA, 17 bp, Arabidopsis thaliana
gaatcccgtcccagcca

SEQ ID NO: 94272 - DNA, 17 bp, Arabidopsis thaliana
gaatccctctccatccg

SEQ ID NO: 94273 - DNA, 17 bp, Arabidopsis thaliana
gaatccgattcatgttg

SEQ ID NO: 94274 - DNA, 17 bp, Arabidopsis thaliana
gaatccgattcatgttt

SEQ ID NO: 94275 - DNA, 17 bp, Arabidopsis thaliana
gaatccgattcgtctcg

SEQ ID NO: 94276 - DNA, 17 bp, Arabidopsis thaliana
gaatccgcgatttgacg

SEQ ID NO: 94277 - DNA, 17 bp, Arabidopsis thaliana
gaatccggcaggctctg

SEQ ID NO: 94278 - DNA, 17 bp, Arabidopsis thaliana
gaatccggccaaaattg

SEQ ID NO: 94279 - DNA, 17 bp, Arabidopsis thaliana
gaatccggcccaagtcg

SEQ ID NO: 94280 - DNA, 17 bp, Arabidopsis thaliana
gaatccggctgagtctg

SEQ ID NO: 94281 - DNA, 17 bp, Arabidopsis thaliana
gaatccgggctagaagc

SEQ ID NO: 94282 - DNA, 17 bp, Arabidopsis thaliana
gaatccgggtgtcgggc

SEQ ID NO: 94283 - DNA, 17 bp, Arabidopsis thaliana
gaatccggtggcaacgg

SEQ ID NO: 94284 - DNA, 17 bp, Arabidopsis thaliana
gaatccggttgggctct

SEQ ID NO: 94285 - DNA, 17 bp, Arabidopsis thaliana
gaatccgtggttaggca

SEQ ID NO: 94286 - DNA, 17 bp, Arabidopsis thaliana
gaatcctaagatcagtt

SEQ ID NO: 94287 - DNA, 17 bp, Arabidopsis thaliana
gaatcctacttggggag

SEQ ID NO: 94288 - DNA, 17 bp, Arabidopsis thaliana
gaatcctagatattgcg

SEQ ID NO: 94289 - DNA, 17 bp, Arabidopsis thaliana
gaatcctcaaatacgtg

SEQ ID NO: 94290 - DNA, 17 bp, Arabidopsis thaliana
gaatcctcggacccggt

SEQ ID NO: 94291 - DNA, 17 bp, Arabidopsis thaliana
gaatcctcttgagcacc

SEQ ID NO: 94292 - DNA, 17 bp, Arabidopsis thaliana
gaatcctgtaatctctc

SEQ ID NO: 94293 - DNA, 17 bp, Arabidopsis thaliana
gaatccttatgggcttt

SEQ ID NO: 94294 - DNA, 17 bp, Arabidopsis thaliana
gaatccttccgtcccag

SEQ ID NO: 94295 - DNA, 17 bp, Arabidopsis thaliana
gaatccttgatcaacta

SEQ ID NO: 94296 - DNA, 17 bp, Arabidopsis thaliana
gaatccttgccggcgat

SEQ ID NO: 94297 - DNA, 17 bp, Arabidopsis thaliana
gaatcctttgcagacga

SEQ ID NO: 94298 - DNA, 17 bp, Arabidopsis thaliana
gaatccttttgacccgg

SEQ ID NO: 94299 - DNA, 17 bp, Arabidopsis thaliana
gaatcgcgatggcagca

SEQ ID NO: 94300 - DNA, 17 bp, Arabidopsis thaliana
gaatcgctaacgactaa

SEQ ID NO: 94301 - DNA, 17 bp, Arabidopsis thaliana
gaatcgctaacgactat

SEQ ID NO: 94302 - DNA, 17 bp, Arabidopsis thaliana
gaatcgctgtgcgccgt

SEQ ID NO: 94303 - DNA, 17 bp, Arabidopsis thaliana
gaatcggagccgttgac

SEQ ID NO: 94304 - DNA, 17 bp, Arabidopsis thaliana
gaatcggcgacctctaa

SEQ ID NO: 94305 - DNA, 17 bp, Arabidopsis thaliana
gaatcggctgggtgtgg

SEQ ID NO: 94306 - DNA, 17 bp, Arabidopsis thaliana
gaatcggggtgtccatg

SEQ ID NO: 94307 - DNA, 17 bp, Arabidopsis thaliana
gaatcggtgatgtgccg

SEQ ID NO: 94308 - DNA, 17 bp, Arabidopsis thaliana
gaatcgtattgcctgca

SEQ ID NO: 94309 - DNA, 17 bp, Arabidopsis thaliana
gaatcgtcgttggtgct

SEQ ID NO: 94310 - DNA, 17 bp, Arabidopsis thaliana
gaatcgtctatcgaaag

SEQ ID NO: 94311 - DNA, 17 bp, Arabidopsis thaliana
gaatcgtctcaagcgtc

SEQ ID NO: 94312 - DNA, 17 bp, Arabidopsis thaliana
gaatcgtctgcaaattg

SEQ ID NO: 94313 - DNA, 17 bp, Arabidopsis thaliana
gaatcgttcagatgtga

SEQ ID NO: 94314 - DNA, 17 bp, Arabidopsis thaliana
gaatcgttccgattgtt

SEQ ID NO: 94315 - DNA, 17 bp, Arabidopsis thaliana
gaatcgtttctctgaca

SEQ ID NO: 94316 - DNA, 17 bp, Arabidopsis thaliana
gaatcgttttcgtcttg

SEQ ID NO: 94317 - DNA, 17 bp, Arabidopsis thaliana
gaatctaaagctgtgaa

SEQ ID NO: 94318 - DNA, 17 bp, Arabidopsis thaliana
gaatctaacctggtgtc

SEQ ID NO: 94319 - DNA, 17 bp, Arabidopsis thaliana
gaatctaatacccgtgg

SEQ ID NO: 94320 - DNA, 17 bp, Arabidopsis thaliana
gaatctaccttgtgtaa

SEQ ID NO: 94321 - DNA, 17 bp, Arabidopsis thaliana
gaatctacttttccggt

SEQ ID NO: 94322 - DNA, 17 bp, Arabidopsis thaliana
gaatctatcgtcaaggg

SEQ ID NO: 94323 - DNA, 17 bp, Arabidopsis thaliana
gaatctatgggtccgat

SEQ ID NO: 94324 - DNA, 17 bp, Arabidopsis thaliana
gaatctcaaacccaaat

SEQ ID NO: 94325 - DNA, 17 bp, Arabidopsis thaliana
gaatctcaaggtggcgg

SEQ ID NO: 94326 - DNA, 17 bp, Arabidopsis thaliana
gaatctcaatggattgg

SEQ ID NO: 94327 - DNA, 17 bp, Arabidopsis thaliana
gaatctcacaaagatcc

SEQ ID NO: 94328 - DNA, 17 bp, Arabidopsis thaliana
gaatctcacttccatag

SEQ ID NO: 94329 - DNA, 17 bp, Arabidopsis thaliana
gaatctcaggttaaccg

SEQ ID NO: 94330 - DNA, 17 bp, Arabidopsis thaliana
gaatctcatcgatggtc

SEQ ID NO: 94331 - DNA, 17 bp, Arabidopsis thaliana
gaatctcatttgacacg

SEQ ID NO: 94332 - DNA, 17 bp, Arabidopsis thaliana
gaatctccaacagacag

SEQ ID NO: 94333 - DNA, 17 bp, Arabidopsis thaliana
gaatctccctgttgtgt

SEQ ID NO: 94334 - DNA, 17 bp, Arabidopsis thaliana
gaatctcgaaggattat

SEQ ID NO: 94335 - DNA, 17 bp, Arabidopsis thaliana
gaatctcgttaatccat

SEQ ID NO: 94336 - DNA, 17 bp, Arabidopsis thaliana
gaatctctacattttgg

SEQ ID NO: 94337 - DNA, 17 bp, Arabidopsis thaliana
gaatctctcaggcgacg

SEQ ID NO: 94338 - DNA, 17 bp, Arabidopsis thaliana
gaatctctcaggtgtcc

SEQ ID NO: 94339 - DNA, 17 bp, Arabidopsis thaliana
gaatctctcaggtgtcg

SEQ ID NO: 94340 - DNA, 17 bp, Arabidopsis thaliana
gaatctctctcagccgc

SEQ ID NO: 94341 - DNA, 17 bp, Arabidopsis thaliana
gaatctctggtatgtgt

SEQ ID NO: 94342 - DNA, 17 bp, Arabidopsis thaliana
gaatctcttgcgtttcc

SEQ ID NO: 94343 - DNA, 17 bp, Arabidopsis thaliana
gaatctgaatcggttgc

SEQ ID NO: 94344 - DNA, 17 bp, Arabidopsis thaliana
gaatctgaccatgaagt

SEQ ID NO: 94345 - DNA, 17 bp, Arabidopsis thaliana
gaatctgattcatagga

SEQ ID NO: 94346 - DNA, 17 bp, Arabidopsis thaliana
gaatctggaaagctgat

SEQ ID NO: 94347 - DNA, 17 bp, Arabidopsis thaliana
gaatctggatgaccgta

SEQ ID NO: 94348 - DNA, 17 bp, Arabidopsis thaliana
gaatctggccaaagttg

SEQ ID NO: 94349 - DNA, 17 bp, Arabidopsis thaliana
gaatctggtgtcctagg

SEQ ID NO: 94350 - DNA, 17 bp, Arabidopsis thaliana
gaatctgtccagggctt

SEQ ID NO: 94351 - DNA, 17 bp, Arabidopsis thaliana
gaatctgtggccctgca

SEQ ID NO: 94352 - DNA, 17 bp, Arabidopsis thaliana
gaatctgtggctcttgt

SEQ ID NO: 94353 - DNA, 17 bp, Arabidopsis thaliana
gaatcttaaaggtgtga

SEQ ID NO: 94354 - DNA, 17 bp, Arabidopsis thaliana
gaatcttagcgacaaag

SEQ ID NO: 94355 - DNA, 17 bp, Arabidopsis thaliana
gaatcttaggacatctc

SEQ ID NO: 94356 - DNA, 17 bp, Arabidopsis thaliana
gaatcttagtgggtgtt

SEQ ID NO: 94357 - DNA, 17 bp, Arabidopsis thaliana
gaatcttccatcacagt

SEQ ID NO: 94358 - DNA, 17 bp, Arabidopsis thaliana
gaatcttcccaggaaac

SEQ ID NO: 94359 - DNA, 17 bp, Arabidopsis thaliana
gaatcttcggagtcatg

SEQ ID NO: 94360 - DNA, 17 bp, Arabidopsis thaliana
gaatcttctattttccg

SEQ ID NO: 94361 - DNA, 17 bp, Arabidopsis thaliana
gaatcttctgacaacgg

SEQ ID NO: 94362 - DNA, 17 bp, Arabidopsis thaliana
gaatcttcttggcgtgc

SEQ ID NO: 94363 - DNA, 17 bp, Arabidopsis thaliana
gaatcttcttgttcatc

SEQ ID NO: 94364 - DNA, 17 bp, Arabidopsis thaliana
gaatcttctttccgtca

SEQ ID NO: 94365 - DNA, 17 bp, Arabidopsis thaliana
gaatcttgcagcgattt

SEQ ID NO: 94366 - DNA, 17 bp, Arabidopsis thaliana
gaatcttgggatgggtc

SEQ ID NO: 94367 - DNA, 17 bp, Arabidopsis thaliana
gaatcttgtaatccctc

SEQ ID NO: 94368 - DNA, 17 bp, Arabidopsis thaliana
gaatcttgtgggatacg

SEQ ID NO: 94369 - DNA, 17 bp, Arabidopsis thaliana
gaatcttgtttgctgag

SEQ ID NO: 94370 - DNA, 17 bp, Arabidopsis thaliana
gaatctttactgtgccg

SEQ ID NO: 94371 - DNA, 17 bp, Arabidopsis thaliana
gaatctttagaccaggc

SEQ ID NO: 94372 - DNA, 17 bp, Arabidopsis thaliana
gaatctttgaggaggac

SEQ ID NO: 94373 - DNA, 17 bp, Arabidopsis thaliana
gaatctttgccggtggt

SEQ ID NO: 94374 - DNA, 17 bp, Arabidopsis thaliana
gaatctttggctttgtg

SEQ ID NO: 94375 - DNA, 17 bp, Arabidopsis thaliana
gaatctttgggtcttcg

SEQ ID NO: 94376 - DNA, 17 bp, Arabidopsis thaliana
gaatctttgttgcctcg

SEQ ID NO: 94377 - DNA, 17 bp, Arabidopsis thaliana
gaatgaaacgacgtgct

SEQ ID NO: 94378 - DNA, 17 bp, Arabidopsis thaliana
gaatgaaactaatccgt

SEQ ID NO: 94379 - DNA, 17 bp, Arabidopsis thaliana
gaatgaaagagtcgcag

SEQ ID NO: 94380 - DNA, 17 bp, Arabidopsis thaliana
gaatgaagcctggtccg

SEQ ID NO: 94381 - DNA, 17 bp, Arabidopsis thaliana
gaatgaagcctggtcgg

SEQ ID NO: 94382 - DNA, 17 bp, Arabidopsis thaliana
gaatgaagtcagtgtac

SEQ ID NO: 94383 - DNA, 17 bp, Arabidopsis thaliana
gaatgaatgtgccagtg

SEQ ID NO: 94384 - DNA, 17 bp, Arabidopsis thaliana
gaatgacaataactcgt

SEQ ID NO: 94385 - DNA, 17 bp, Arabidopsis thaliana
gaatgacacatcaacac

SEQ ID NO: 94386 - DNA, 17 bp, Arabidopsis thaliana
gaatgacacatgtaaag

SEQ ID NO: 94387 - DNA, 17 bp, Arabidopsis thaliana
gaatgaccagctttttc

SEQ ID NO: 94388 - DNA, 17 bp, Arabidopsis thaliana
gaatgacccgctttctc

SEQ ID NO: 94389 - DNA, 17 bp, Arabidopsis thaliana
gaatgaccgaattacag

SEQ ID NO: 94390 - DNA, 17 bp, Arabidopsis thaliana
gaatgaccgaccgtccg

SEQ ID NO: 94391 - DNA, 17 bp, Arabidopsis thaliana
gaatgaccgcatttttg

SEQ ID NO: 94392 - DNA, 17 bp, Arabidopsis thaliana
gaatgaccgcatttttt

SEQ ID NO: 94393 - DNA, 17 bp, Arabidopsis thaliana
gaatgaccggcattttc

SEQ ID NO: 94394 - DNA, 17 bp, Arabidopsis thaliana
gaatgaccttgtgtcag

SEQ ID NO: 94395 - DNA, 17 bp, Arabidopsis thaliana
gaatgagcaggaagctt

SEQ ID NO: 94396 - DNA, 17 bp, Arabidopsis thaliana
gaatgagcaggaagttt

SEQ ID NO: 94397 - DNA, 17 bp, Arabidopsis thaliana
gaatgagcggtccagtt

SEQ ID NO: 94398 - DNA, 17 bp, Arabidopsis thaliana
gaatgagtcattcatcc

SEQ ID NO: 94399 - DNA, 17 bp, Arabidopsis thaliana
gaatgagtctagctact

SEQ ID NO: 94400 - DNA, 17 bp, Arabidopsis thaliana
gaatgagtgtccgagaa

SEQ ID NO: 94401 - DNA, 17 bp, Arabidopsis thaliana
gaatgataaaccagcgg

SEQ ID NO: 94402 - DNA, 17 bp, Arabidopsis thaliana
gaatgatattgggctgg

SEQ ID NO: 94403 - DNA, 17 bp, Arabidopsis thaliana
gaatgatccagagcagt

SEQ ID NO: 94404 - DNA, 17 bp, Arabidopsis thaliana
gaatgatcggttgttca

SEQ ID NO: 94405 - DNA, 17 bp, Arabidopsis thaliana
gaatgatcttccacgag

SEQ ID NO: 94406 - DNA, 17 bp, Arabidopsis thaliana
gaatgatgaatgcctcg

SEQ ID NO: 94407 - DNA, 17 bp, Arabidopsis thaliana
gaatgatgcgagtcggc

SEQ ID NO: 94408 - DNA, 17 bp, Arabidopsis thaliana
gaatgatggttcaagtt

SEQ ID NO: 94409 - DNA, 17 bp, Arabidopsis thaliana
gaatgccagtggtagcg

SEQ ID NO: 94410 - DNA, 17 bp, Arabidopsis thaliana
gaatgcccgaccgtccg

SEQ ID NO: 94411 - DNA, 17 bp, Arabidopsis thaliana
gaatgcccgatcacttg

SEQ ID NO: 94412 - DNA, 17 bp, Arabidopsis thaliana
gaatgccgattaacttc

SEQ ID NO: 94413 - DNA, 17 bp, Arabidopsis thaliana
gaatgcgaaaagttccg

SEQ ID NO: 94414 - DNA, 17 bp, Arabidopsis thaliana
gaatgcgaatctttggt

SEQ ID NO: 94415 - DNA, 17 bp, Arabidopsis thaliana
gaatgcgatcgagtgga

SEQ ID NO: 94416 - DNA, 17 bp, Arabidopsis thaliana
gaatgcgcacgtgtgcc

SEQ ID NO: 94417 - DNA, 17 bp, Arabidopsis thaliana
gaatgcgggttttgcaa

SEQ ID NO: 94418 - DNA, 17 bp, Arabidopsis thaliana
gaatgcggtgcgcttgg

SEQ ID NO: 94419 - DNA, 17 bp, Arabidopsis thaliana
gaatgctacctggttga

SEQ ID NO: 94420 - DNA, 17 bp, Arabidopsis thaliana
gaatgctctcgagttcc

SEQ ID NO: 94421 - DNA, 17 bp, Arabidopsis thaliana
gaatgctgaccgaatcg

SEQ ID NO: 94422 - DNA, 17 bp, Arabidopsis thaliana
gaatgctggaaagccca

SEQ ID NO: 94423 - DNA, 17 bp, Arabidopsis thaliana
gaatgcttctgggctcg

SEQ ID NO: 94424 - DNA, 17 bp, Arabidopsis thaliana
gaatggaacagagaaag

SEQ ID NO: 94425 - DNA, 17 bp, Arabidopsis thaliana
gaatggaccattctttc

SEQ ID NO: 94426 - DNA, 17 bp, Arabidopsis thaliana
gaatggacctttctctt

SEQ ID NO: 94427 - DNA, 17 bp, Arabidopsis thaliana
gaatggagacgtgcggt

SEQ ID NO: 94428 - DNA, 17 bp, Arabidopsis thaliana
gaatggatcagttggat

SEQ ID NO: 94429 - DNA, 17 bp, Arabidopsis thaliana
gaatggatgatttgact

SEQ ID NO: 94430 - DNA, 17 bp, Arabidopsis thaliana
gaatggatgtgagtttg

SEQ ID NO: 94431 - DNA, 17 bp, Arabidopsis thaliana
gaatggcattatgatcc

SEQ ID NO: 94432 - DNA, 17 bp, Arabidopsis thaliana
gaatggccagtgttttc

SEQ ID NO: 94433 - DNA, 17 bp, Arabidopsis thaliana
gaatggccattgggatt

SEQ ID NO: 94434 - DNA, 17 bp, Arabidopsis thaliana
gaatggccgaattacag

SEQ ID NO: 94435 - DNA, 17 bp, Arabidopsis thaliana
gaatggccgacattttc

SEQ ID NO: 94436 - DNA, 17 bp, Arabidopsis thaliana
gaatggccgaccttctc

SEQ ID NO: 94437 - DNA, 17 bp, Arabidopsis thaliana
gaatggccgatattttc

SEQ ID NO: 94438 - DNA, 17 bp, Arabidopsis thaliana
gaatggccggcgttctc

SEQ ID NO: 94439 - DNA, 17 bp, Arabidopsis thaliana
gaatggccggcgttttc

SEQ ID NO: 94440 - DNA, 17 bp, Arabidopsis thaliana
gaatggccggctttctc

SEQ ID NO: 94441 - DNA, 17 bp, Arabidopsis thaliana
gaatggcgagcccacag

SEQ ID NO: 94442 - DNA, 17 bp, Arabidopsis thaliana
gaatggctctatgcgct

SEQ ID NO: 94443 - DNA, 17 bp, Arabidopsis thaliana
gaatgggccaaaaaaac

SEQ ID NO: 94444 - DNA, 17 bp, Arabidopsis thaliana
gaatgggccattttgtt

SEQ ID NO: 94445 - DNA, 17 bp, Arabidopsis thaliana
gaatgggctctgaatgg

SEQ ID NO: 94446 - DNA, 17 bp, Arabidopsis thaliana
gaatgggtccgacttca

SEQ ID NO: 94447 - DNA, 17 bp, Arabidopsis thaliana
gaatggtaacgtgcggt

SEQ ID NO: 94448 - DNA, 17 bp, Arabidopsis thaliana
gaatggtatcgggtttg

SEQ ID NO: 94449 - DNA, 17 bp, Arabidopsis thaliana
gaatggtcacagctttg

SEQ ID NO: 94450 - DNA, 17 bp, Arabidopsis thaliana
gaatggtcaccgtgcgc

SEQ ID NO: 94451 - DNA, 17 bp, Arabidopsis thaliana
gaatggtccattctatc

SEQ ID NO: 94452 - DNA, 17 bp, Arabidopsis thaliana
gaatggtccattttctc

SEQ ID NO: 94453 - DNA, 17 bp, Arabidopsis thaliana
gaatggtccgcagcgat

SEQ ID NO: 94454 - DNA, 17 bp, Arabidopsis thaliana
gaatggtcggctttctc

SEQ ID NO: 94455 - DNA, 17 bp, Arabidopsis thaliana
gaatggtgaccaaaacc

SEQ ID NO: 94456 - DNA, 17 bp, Arabidopsis thaliana
gaatggtgaccgaaccg

SEQ ID NO: 94457 - DNA, 17 bp, Arabidopsis thaliana
gaatggtgacgacggtt

SEQ ID NO: 94458 - DNA, 17 bp, Arabidopsis thaliana
gaatggtgactgagttt

SEQ ID NO: 94459 - DNA, 17 bp, Arabidopsis thaliana
gaatggtgagaccaatg

SEQ ID NO: 94460 - DNA, 17 bp, Arabidopsis thaliana
gaatggtgagctggatg

SEQ ID NO: 94461 - DNA, 17 bp, Arabidopsis thaliana
gaatggtgatatacccc

SEQ ID NO: 94462 - DNA, 17 bp, Arabidopsis thaliana
gaatggtgatataccct

SEQ ID NO: 94463 - DNA, 17 bp, Arabidopsis thaliana
gaatggttacagcggcc

SEQ ID NO: 94464 - DNA, 17 bp, Arabidopsis thaliana
gaatggttactgcggtc

SEQ ID NO: 94465 - DNA, 17 bp, Arabidopsis thaliana
gaatggttggtgcgttt

SEQ ID NO: 94466 - DNA, 17 bp, Arabidopsis thaliana
gaatggtttcgacaatc

SEQ ID NO: 94467 - DNA, 17 bp, Arabidopsis thaliana
gaatggttttggaacct

SEQ ID NO: 94468 - DNA, 17 bp, Arabidopsis thaliana
gaatgtaaaaaacgctg

SEQ ID NO: 94469 - DNA, 17 bp, Arabidopsis thaliana
gaatgtaatgtatgact

SEQ ID NO: 94470 - DNA, 17 bp, Arabidopsis thaliana
gaatgtacagttctagc

SEQ ID NO: 94471 - DNA, 17 bp, Arabidopsis thaliana
gaatgtaccatatgacc

SEQ ID NO: 94472 - DNA, 17 bp, Arabidopsis thaliana
gaatgtatcgtctgtcg

SEQ ID NO: 94473 - DNA, 17 bp, Arabidopsis thaliana
gaatgtcgaacctggct

SEQ ID NO: 94474 - DNA, 17 bp, Arabidopsis thaliana
gaatgtcggctattcgg

SEQ ID NO: 94475 - DNA, 17 bp, Arabidopsis thaliana
gaatgtcggcttgagta

SEQ ID NO: 94476 - DNA, 17 bp, Arabidopsis thaliana
gaatgtgacacgtttag

SEQ ID NO: 94477 - DNA, 17 bp, Arabidopsis thaliana
gaatgtgattcggcttg

SEQ ID NO: 94478 - DNA, 17 bp, Arabidopsis thaliana
gaatgtgcagaatcatc

SEQ ID NO: 94479 - DNA, 17 bp, Arabidopsis thaliana
gaatgtggcttattgtt

SEQ ID NO: 94480 - DNA, 17 bp, Arabidopsis thaliana
gaatgtgtactccagga

SEQ ID NO: 94481 - DNA, 17 bp, Arabidopsis thaliana
gaatgtgtcgtccgtcg

SEQ ID NO: 94482 - DNA, 17 bp, Arabidopsis thaliana
gaatgtgtcgtctgtcg

SEQ ID NO: 94483 - DNA, 17 bp, Arabidopsis thaliana
gaatgtgtggtctatcg

SEQ ID NO: 94484 - DNA, 17 bp, Arabidopsis thaliana
gaatgtgttgtctgtcg

SEQ ID NO: 94485 - DNA, 17 bp, Arabidopsis thaliana
gaatgtgtttgacaggg

SEQ ID NO: 94486 - DNA, 17 bp, Arabidopsis thaliana
gaatgttctgttttgtc

SEQ ID NO: 94487 - DNA, 17 bp, Arabidopsis thaliana
gaatgttcttttgactg

SEQ ID NO: 94488 - DNA, 17 bp, Arabidopsis thaliana
gaatgttgtctggatcg

SEQ ID NO: 94489 - DNA, 17 bp, Arabidopsis thaliana
gaatgtttccgactaat

SEQ ID NO: 94490 - DNA, 17 bp, Arabidopsis thaliana
gaattaagcctggtccg

SEQ ID NO: 94491 - DNA, 17 bp, Arabidopsis thaliana
gaattacagatcgcttg

SEQ ID NO: 94492 - DNA, 17 bp, Arabidopsis thaliana
gaattacagtcactgcg

SEQ ID NO: 94493 - DNA, 17 bp, Arabidopsis thaliana
gaattaccaccgagcgg

SEQ ID NO: 94494 - DNA, 17 bp, Arabidopsis thaliana
gaattaccgatggtcac

SEQ ID NO: 94495 - DNA, 17 bp, Arabidopsis thaliana
gaattaccgatttcggg

SEQ ID NO: 94496 - DNA, 17 bp, Arabidopsis thaliana
gaattacgggattcggc

SEQ ID NO: 94497 - DNA, 17 bp, Arabidopsis thaliana
gaattacgggtttcggc

SEQ ID NO: 94498 - DNA, 17 bp, Arabidopsis thaliana
gaattagcaactttgaa

SEQ ID NO: 94499 - DNA, 17 bp, Arabidopsis thaliana
gaattagtgggcattgg

SEQ ID NO: 94500 - DNA, 17 bp, Arabidopsis thaliana
gaattagttcttttgcg

SEQ ID NO: 94501 - DNA, 17 bp, Arabidopsis thaliana
gaattatcatcaatggc

SEQ ID NO: 94502 - DNA, 17 bp, Arabidopsis thaliana
gaattatcgtccagcgg

SEQ ID NO: 94503 - DNA, 17 bp, Arabidopsis thaliana
gaattattgacctgtta

SEQ ID NO: 94504 - DNA, 17 bp, Arabidopsis thaliana
gaattattgtgctttca

SEQ ID NO: 94505 - DNA, 17 bp, Arabidopsis thaliana
gaattatttctccgtcg

SEQ ID NO: 94506 - DNA, 17 bp, Arabidopsis thaliana
gaattcaactccgtctt

SEQ ID NO: 94507 - DNA, 17 bp, Arabidopsis thaliana
gaattcaacttgatgtg

SEQ ID NO: 94508 - DNA, 17 bp, Arabidopsis thaliana
gaattcaccatcgcggg

SEQ ID NO: 94509 - DNA, 17 bp, Arabidopsis thaliana
gaattcaccgtataatt

SEQ ID NO: 94510 - DNA, 17 bp, Arabidopsis thaliana
gaattcacgaccgacaa

SEQ ID NO: 94511 - DNA, 17 bp, Arabidopsis thaliana
gaattcacgattaattt

SEQ ID NO: 94512 - DNA, 17 bp, Arabidopsis thaliana
gaattcacggttaattt

SEQ ID NO: 94513 - DNA, 17 bp, Arabidopsis thaliana
gaattcagaattgtttg

SEQ ID NO: 94514 - DNA, 17 bp, Arabidopsis thaliana
gaattcagactgtgaaa

SEQ ID NO: 94515 - DNA, 17 bp, Arabidopsis thaliana
gaattcagcaaggcatg

SEQ ID NO: 94516 - DNA, 17 bp, Arabidopsis thaliana
gaattcagccgttacgc

SEQ ID NO: 94517 - DNA, 17 bp, Arabidopsis thaliana
gaattcaggtctttcat

SEQ ID NO: 94518 - DNA, 17 bp, Arabidopsis thaliana
gaattcagttcagatgt

SEQ ID NO: 94519 - DNA, 17 bp, Arabidopsis thaliana
gaattcatatgccattg

SEQ ID NO: 94520 - DNA, 17 bp, Arabidopsis thaliana
gaattcatccggtgagg

SEQ ID NO: 94521 - DNA, 17 bp, Arabidopsis thaliana
gaattccacaaagccta

SEQ ID NO: 94522 - DNA, 17 bp, Arabidopsis thaliana
gaattccatgaggttct

SEQ ID NO: 94523 - DNA, 17 bp, Arabidopsis thaliana
gaattccattttccttc

SEQ ID NO: 94524 - DNA, 17 bp, Arabidopsis thaliana
gaattcccacgctactg

SEQ ID NO: 94525 - DNA, 17 bp, Arabidopsis thaliana
gaattcctagtaagcgc

SEQ ID NO: 94526 - DNA, 17 bp, Arabidopsis thaliana
gaattcgacaacttatg

SEQ ID NO: 94527 - DNA, 17 bp, Arabidopsis thaliana
gaattcgacttatctta

SEQ ID NO: 94528 - DNA, 17 bp, Arabidopsis thaliana
gaattcgagccggttat

SEQ ID NO: 94529 - DNA, 17 bp, Arabidopsis thaliana
gaattcgatttaaccgg

SEQ ID NO: 94530 - DNA, 17 bp, Arabidopsis thaliana
gaattcgttcatactta

SEQ ID NO: 94531 - DNA, 17 bp, Arabidopsis thaliana
gaattcgttcccgggcc

SEQ ID NO: 94532 - DNA, 17 bp, Arabidopsis thaliana
gaattcgttcccggtct

SEQ ID NO: 94533 - DNA, 17 bp, Arabidopsis thaliana
gaattctaaccttgtgt

SEQ ID NO: 94534 - DNA, 17 bp, Arabidopsis thaliana
gaattctaagccgttgt

SEQ ID NO: 94535 - DNA, 17 bp, Arabidopsis thaliana
gaattctcagcgcttct

SEQ ID NO: 94536 - DNA, 17 bp, Arabidopsis thaliana
gaattctcctccagttg

SEQ ID NO: 94537 - DNA, 17 bp, Arabidopsis thaliana
gaattctctcaggacct

SEQ ID NO: 94538 - DNA, 17 bp, Arabidopsis thaliana
gaattctgcgtgttagc

SEQ ID NO: 94539 - DNA, 17 bp, Arabidopsis thaliana
gaattctggggctggac

SEQ ID NO: 94540 - DNA, 17 bp, Arabidopsis thaliana
gaattctgttatgatct

SEQ ID NO: 94541 - DNA, 17 bp, Arabidopsis thaliana
gaattcttagtgctatc

SEQ ID NO: 94542 - DNA, 17 bp, Arabidopsis thaliana
gaattcttcgtcaatgt

SEQ ID NO: 94543 - DNA, 17 bp, Arabidopsis thaliana
gaattcttctcttttca

SEQ ID NO: 94544 - DNA, 17 bp, Arabidopsis thaliana
gaattctttttccgata

SEQ ID NO: 94545 - DNA, 17 bp, Arabidopsis thaliana
gaattgaaatcgtcgac

SEQ ID NO: 94546 - DNA, 17 bp, Arabidopsis thaliana
gaattgacattaggaca

SEQ ID NO: 94547 - DNA, 17 bp, Arabidopsis thaliana
gaattgaccagatccca

SEQ ID NO: 94548 - DNA, 17 bp, Arabidopsis thaliana
gaattgaccaggtggtt

SEQ ID NO: 94549 - DNA, 17 bp, Arabidopsis thaliana
gaattgacggaagggca

SEQ ID NO: 94550 - DNA, 17 bp, Arabidopsis thaliana
gaattgacggccttgat

SEQ ID NO: 94551 - DNA, 17 bp, Arabidopsis thaliana
gaattgactggtggatc

SEQ ID NO: 94552 - DNA, 17 bp, Arabidopsis thaliana
gaattgactggtttggg

SEQ ID NO: 94553 - DNA, 17 bp, Arabidopsis thaliana
gaattgagtaacgccag

SEQ ID NO: 94554 - DNA, 17 bp, Arabidopsis thaliana
gaattgagtatcacata

SEQ ID NO: 94555 - DNA, 17 bp, Arabidopsis thaliana
gaattgatgggttgatg

SEQ ID NO: 94556 - DNA, 17 bp, Arabidopsis thaliana
gaattgcaacaggcggt

SEQ ID NO: 94557 - DNA, 17 bp, Arabidopsis thaliana
gaattgcccgcctaaaa

SEQ ID NO: 94558 - DNA, 17 bp, Arabidopsis thaliana
gaattgcgtttctgagg

SEQ ID NO: 94559 - DNA, 17 bp, Arabidopsis thaliana
gaattgctggatctgaa

SEQ ID NO: 94560 - DNA, 17 bp, Arabidopsis thaliana
gaattgctggggctgct

SEQ ID NO: 94561 - DNA, 17 bp, Arabidopsis thaliana
gaattggattgagcctt

SEQ ID NO: 94562 - DNA, 17 bp, Arabidopsis thaliana
gaattggccgggtcgtg

SEQ ID NO: 94563 - DNA, 17 bp, Arabidopsis thaliana
gaattggcgactacgat

SEQ ID NO: 94564 - DNA, 17 bp, Arabidopsis thaliana
gaattggctaagatgag

SEQ ID NO: 94565 - DNA, 17 bp, Arabidopsis thaliana
gaattggctttgggtca

SEQ ID NO: 94566 - DNA, 17 bp, Arabidopsis thaliana
gaattgggacccggtgc

SEQ ID NO: 94567 - DNA, 17 bp, Arabidopsis thaliana
gaattgggactattttt

SEQ ID NO: 94568 - DNA, 17 bp, Arabidopsis thaliana
gaattgggcatggaggg

SEQ ID NO: 94569 - DNA, 17 bp, Arabidopsis thaliana
gaattgggccggcctta

SEQ ID NO: 94570 - DNA, 17 bp, Arabidopsis thaliana
gaattgggttcggtttg

SEQ ID NO: 94571 - DNA, 17 bp, Arabidopsis thaliana
gaattggtccgctgcgg

SEQ ID NO: 94572 - DNA, 17 bp, Arabidopsis thaliana
gaattggtgatgtgccg

SEQ ID NO: 94573 - DNA, 17 bp, Arabidopsis thaliana
gaattggtttatctcgg

SEQ ID NO: 94574 - DNA, 17 bp, Arabidopsis thaliana
gaattgtacaccgcagg

SEQ ID NO: 94575 - DNA, 17 bp, Arabidopsis thaliana
gaattgtatcgcactgt

SEQ ID NO: 94576 - DNA, 17 bp, Arabidopsis thaliana
gaattgtccaaaactca

SEQ ID NO: 94577 - DNA, 17 bp, Arabidopsis thaliana
gaattgtcgctaatggt

SEQ ID NO: 94578 - DNA, 17 bp, Arabidopsis thaliana
gaattgtcgctaatgtt

SEQ ID NO: 94579 - DNA, 17 bp, Arabidopsis thaliana
gaattgtcgtcaggtat

SEQ ID NO: 94580 - DNA, 17 bp, Arabidopsis thaliana
gaattgtctccgcggtg

SEQ ID NO: 94581 - DNA, 17 bp, Arabidopsis thaliana
gaattgtgaccatcgga

SEQ ID NO: 94582 - DNA, 17 bp, Arabidopsis thaliana
gaattgtgtttgggttc

SEQ ID NO: 94583 - DNA, 17 bp, Arabidopsis thaliana
gaattgttcaatgactg

SEQ ID NO: 94584 - DNA, 17 bp, Arabidopsis thaliana
gaattgtttcgtactga

SEQ ID NO: 94585 - DNA, 17 bp, Arabidopsis thaliana
gaattgtttgtgaccgt

SEQ ID NO: 94586 - DNA, 17 bp, Arabidopsis thaliana
gaatttatcattttcca

SEQ ID NO: 94587 - DNA, 17 bp, Arabidopsis thaliana
gaatttatcctggtatg

SEQ ID NO: 94588 - DNA, 17 bp, Arabidopsis thaliana
gaatttatttcacaaaa

SEQ ID NO: 94589 - DNA, 17 bp, Arabidopsis thaliana
gaatttcagatccaaag

SEQ ID NO: 94590 - DNA, 17 bp, Arabidopsis thaliana
gaatttcaggtcttttg

SEQ ID NO: 94591 - DNA, 17 bp, Arabidopsis thaliana
gaatttcatggttcgtt

SEQ ID NO: 94592 - DNA, 17 bp, Arabidopsis thaliana
gaatttccagtttgctg

SEQ ID NO: 94593 - DNA, 17 bp, Arabidopsis thaliana
gaatttccttgtcgctc

SEQ ID NO: 94594 - DNA, 17 bp, Arabidopsis thaliana
gaatttcggacctaagg

SEQ ID NO: 94595 - DNA, 17 bp, Arabidopsis thaliana
gaatttcggttgccgat

SEQ ID NO: 94596 - DNA, 17 bp, Arabidopsis thaliana
gaatttcgtctcgcggt

SEQ ID NO: 94597 - DNA, 17 bp, Arabidopsis thaliana
gaatttctcatggatgg

SEQ ID NO: 94598 - DNA, 17 bp, Arabidopsis thaliana
gaatttctttgtcactg

SEQ ID NO: 94599 - DNA, 17 bp, Arabidopsis thaliana
gaatttgacaagggtcc

SEQ ID NO: 94600 - DNA, 17 bp, Arabidopsis thaliana
gaatttgacctcacatc

SEQ ID NO: 94601 - DNA, 17 bp, Arabidopsis thaliana
gaatttgagcccagata

SEQ ID NO: 94602 - DNA, 17 bp, Arabidopsis thaliana
gaatttgaggctcgtcg

SEQ ID NO: 94603 - DNA, 17 bp, Arabidopsis thaliana
gaatttgatagtggagc

SEQ ID NO: 94604 - DNA, 17 bp, Arabidopsis thaliana
gaatttgatgatggagc

SEQ ID NO: 94605 - DNA, 17 bp, Arabidopsis thaliana
gaatttgatttcatcgg

SEQ ID NO: 94606 - DNA, 17 bp, Arabidopsis thaliana
gaatttgccaacttggg

SEQ ID NO: 94607 - DNA, 17 bp, Arabidopsis thaliana
gaatttgccatcaacgc

SEQ ID NO: 94608 - DNA, 17 bp, Arabidopsis thaliana
gaatttgccgctggatg

SEQ ID NO: 94609 - DNA, 17 bp, Arabidopsis thaliana
gaatttggactattttt

SEQ ID NO: 94610 - DNA, 17 bp, Arabidopsis thaliana
gaatttggatgtctgga

SEQ ID NO: 94611 - DNA, 17 bp, Arabidopsis thaliana
gaatttggcccattagt

SEQ ID NO: 94612 - DNA, 17 bp, Arabidopsis thaliana
gaatttgggatgggtcg

SEQ ID NO: 94613 - DNA, 17 bp, Arabidopsis thaliana
gaatttggggtctaagc

SEQ ID NO: 94614 - DNA, 17 bp, Arabidopsis thaliana
gaatttgtagtcccgtt

SEQ ID NO: 94615 - DNA, 17 bp, Arabidopsis thaliana
gaatttgtgatagtgcc

SEQ ID NO: 94616 - DNA, 17 bp, Arabidopsis thaliana
gaatttgtgcgcttggg

SEQ ID NO: 94617 - DNA, 17 bp, Arabidopsis thaliana
gaatttgtggttaattc

SEQ ID NO: 94618 - DNA, 17 bp, Arabidopsis thaliana
gaatttgttggctatcg

SEQ ID NO: 94619 - DNA, 17 bp, Arabidopsis thaliana
gaattttaagatccgtt

SEQ ID NO: 94620 - DNA, 17 bp, Arabidopsis thaliana
gaattttaagccgtgta

SEQ ID NO: 94621 - DNA, 17 bp, Arabidopsis thaliana
gaattttacttggtgtg

SEQ ID NO: 94622 - DNA, 17 bp, Arabidopsis thaliana
gaattttcaggtcggct

SEQ ID NO: 94623 - DNA, 17 bp, Arabidopsis thaliana
gaattttccactaccat

SEQ ID NO: 94624 - DNA, 17 bp, Arabidopsis thaliana
gaattttccccaggctg

SEQ ID NO: 94625 - DNA, 17 bp, Arabidopsis thaliana
gaattttcggtttcggt

SEQ ID NO: 94626 - DNA, 17 bp, Arabidopsis thaliana
gaattttcgtgatttgg

SEQ ID NO: 94627 - DNA, 17 bp, Arabidopsis thaliana
gaattttgaagatttca

SEQ ID NO: 94628 - DNA, 17 bp, Arabidopsis thaliana
gaattttgacccatttt

SEQ ID NO: 94629 - DNA, 17 bp, Arabidopsis thaliana
gaattttgagagataag

SEQ ID NO: 94630 - DNA, 17 bp, Arabidopsis thaliana
gaattttgcgatggtaa

SEQ ID NO: 94631 - DNA, 17 bp, Arabidopsis thaliana
gaattttggatacttgc

SEQ ID NO: 94632 - DNA, 17 bp, Arabidopsis thaliana
gaattttggcgcagatc

SEQ ID NO: 94633 - DNA, 17 bp, Arabidopsis thaliana
gaattttggttcggttc

SEQ ID NO: 94634 - DNA, 17 bp, Arabidopsis thaliana
gaattttgttggattga

SEQ ID NO: 94635 - DNA, 17 bp, Arabidopsis thaliana
gaattttgttgtgtgtg

SEQ ID NO: 94636 - DNA, 17 bp, Arabidopsis thaliana
gaatttttgcggtatgt

SEQ ID NO: 94637 - DNA, 17 bp, Arabidopsis thaliana
gaatttttgggctttag

SEQ ID NO: 94638 - DNA, 17 bp, Arabidopsis thaliana
gaatttttgggttctgg

SEQ ID NO: 94639 - DNA, 17 bp, Arabidopsis thaliana
gaatttttggtgagcga

SEQ ID NO: 94640 - DNA, 17 bp, Arabidopsis thaliana
gaatttttttgtgatat

SEQ ID NO: 94641 - DNA, 17 bp, Arabidopsis thaliana
gacaaaaaattgctgag

SEQ ID NO: 94642 - DNA, 17 bp, Arabidopsis thaliana
gacaaaacactgtagct

SEQ ID NO: 94643 - DNA, 17 bp, Arabidopsis thaliana
gacaaaacggtccaatt

SEQ ID NO: 94644 - DNA, 17 bp, Arabidopsis thaliana
gacaaaactggtcatat

SEQ ID NO: 94645 - DNA, 17 bp, Arabidopsis thaliana
gacaaaactggttatat

SEQ ID NO: 94646 - DNA, 17 bp, Arabidopsis thaliana
gacaaaagtccatgacg

SEQ ID NO: 94647 - DNA, 17 bp, Arabidopsis thaliana
gacaaaatcgctgtggt

SEQ ID NO: 94648 - DNA, 17 bp, Arabidopsis thaliana
gacaaaatctcgagggc

SEQ ID NO: 94649 - DNA, 17 bp, Arabidopsis thaliana
gacaaaattacccctag

SEQ ID NO: 94650 - DNA, 17 bp, Arabidopsis thaliana
gacaaaatttttacttt

SEQ ID NO: 94651 - DNA, 17 bp, Arabidopsis thaliana
gacaaaccactgctggg

SEQ ID NO: 94652 - DNA, 17 bp, Arabidopsis thaliana
gacaaaccggcggctct

SEQ ID NO: 94653 - DNA, 17 bp, Arabidopsis thaliana
gacaaagagccacggcg

SEQ ID NO: 94654 - DNA, 17 bp, Arabidopsis thaliana
gacaaagcaccgggtcc

SEQ ID NO: 94655 - DNA, 17 bp, Arabidopsis thaliana
gacaaagcacgtgcgcc

SEQ ID NO: 94656 - DNA, 17 bp, Arabidopsis thaliana
gacaaagcagagcggac

SEQ ID NO: 94657 - DNA, 17 bp, Arabidopsis thaliana
gacaaagcccgcgggct

SEQ ID NO: 94658 - DNA, 17 bp, Arabidopsis thaliana
gacaaagccgcgttcta

SEQ ID NO: 94659 - DNA, 17 bp, Arabidopsis thaliana
gacaaagcgttctatgt

SEQ ID NO: 94660 - DNA, 17 bp, Arabidopsis thaliana
gacaaagctaatactgg

SEQ ID NO: 94661 - DNA, 17 bp, Arabidopsis thaliana
gacaaaggcaacggagg

SEQ ID NO: 94662 - DNA, 17 bp, Arabidopsis thaliana
gacaaagggtcgcgatc

SEQ ID NO: 94663 - DNA, 17 bp, Arabidopsis thaliana
gacaaagtgaatgccgg

SEQ ID NO: 94664 - DNA, 17 bp, Arabidopsis thaliana
gacaaagtgggcagggc

SEQ ID NO: 94665 - DNA, 17 bp, Arabidopsis thaliana
gacaaatcacggcggag

SEQ ID NO: 94666 - DNA, 17 bp, Arabidopsis thaliana
gacaaatcgtttgttgg

SEQ ID NO: 94667 - DNA, 17 bp, Arabidopsis thaliana
gacaaatctgttgaggc

SEQ ID NO: 94668 - DNA, 17 bp, Arabidopsis thaliana
gacaaatgaaagtagga

SEQ ID NO: 94669 - DNA, 17 bp, Arabidopsis thaliana
gacaaatgactcgatgt

SEQ ID NO: 94670 - DNA, 17 bp, Arabidopsis thaliana
gacaaatgcgaccaatc

SEQ ID NO: 94671 - DNA, 17 bp, Arabidopsis thaliana
gacaaatgcgttccagt

SEQ ID NO: 94672 - DNA, 17 bp, Arabidopsis thaliana
gacaaattagaccgcta

SEQ ID NO: 94673 - DNA, 17 bp, Arabidopsis thaliana
gacaaattagaccgctt

SEQ ID NO: 94674 - DNA, 17 bp, Arabidopsis thaliana
gacaaattagaccgttt

SEQ ID NO: 94675 - DNA, 17 bp, Arabidopsis thaliana
gacaaattgataaggtt

SEQ ID NO: 94676 - DNA, 17 bp, Arabidopsis thaliana
gacaacaaagacggcaa

SEQ ID NO: 94677 - DNA, 17 bp, Arabidopsis thaliana
gacaacacaaatgagta

SEQ ID NO: 94678 - DNA, 17 bp, Arabidopsis thaliana
gacaacagactgtgcag

SEQ ID NO: 94679 - DNA, 17 bp, Arabidopsis thaliana
gacaacaggatcttaaa

SEQ ID NO: 94680 - DNA, 17 bp, Arabidopsis thaliana
gacaacatggttggtgc

SEQ ID NO: 94681 - DNA, 17 bp, Arabidopsis thaliana
gacaacatttgtaccca

SEQ ID NO: 94682 - DNA, 17 bp, Arabidopsis thaliana
gacaaccaagacgtagc

SEQ ID NO: 94683 - DNA, 17 bp, Arabidopsis thaliana
gacaaccaggggcagag

SEQ ID NO: 94684 - DNA, 17 bp, Arabidopsis thaliana
gacaaccagtcgtatgc

SEQ ID NO: 94685 - DNA, 17 bp, Arabidopsis thaliana
gacaacccaatgctccc

SEQ ID NO: 94686 - DNA, 17 bp, Arabidopsis thaliana
gacaacgaggccgcaac

SEQ ID NO: 94687 - DNA, 17 bp, Arabidopsis thaliana
gacaacgatgtgggagg

SEQ ID NO: 94688 - DNA, 17 bp, Arabidopsis thaliana
gacaacgggctgcccat

SEQ ID NO: 94689 - DNA, 17 bp, Arabidopsis thaliana
gacaacgtgggtccatg

SEQ ID NO: 94690 - DNA, 17 bp, Arabidopsis thaliana
gacaacgtggtccatag

SEQ ID NO: 94691 - DNA, 17 bp, Arabidopsis thaliana
gacaactaagattggta

SEQ ID NO: 94692 - DNA, 17 bp, Arabidopsis thaliana
gacaactaggtgtgtaa

SEQ ID NO: 94693 - DNA, 17 bp, Arabidopsis thaliana
gacaactagttcaccag

SEQ ID NO: 94694 - DNA, 17 bp, Arabidopsis thaliana
gacaactatttccatcc

SEQ ID NO: 94695 - DNA, 17 bp, Arabidopsis thaliana
gacaactccgtcctttc

SEQ ID NO: 94696 - DNA, 17 bp, Arabidopsis thaliana
gacaactcgcagcccgg

SEQ ID NO: 94697 - DNA, 17 bp, Arabidopsis thaliana
gacaactctctctaagg

SEQ ID NO: 94698 - DNA, 17 bp, Arabidopsis thaliana
gacaactgggtggtcga

SEQ ID NO: 94699 - DNA, 17 bp, Arabidopsis thaliana
gacaactgtcaataaat

SEQ ID NO: 94700 - DNA, 17 bp, Arabidopsis thaliana
gacaactgtcgctgtgt

SEQ ID NO: 94701 - DNA, 17 bp, Arabidopsis thaliana
gacaactttggtacagg

SEQ ID NO: 94702 - DNA, 17 bp, Arabidopsis thaliana
gacaagataatgaatgg

SEQ ID NO: 94703 - DNA, 17 bp, Arabidopsis thaliana
gacaagatactgtgact

SEQ ID NO: 94704 - DNA, 17 bp, Arabidopsis thaliana
gacaagatccaaagtcc

SEQ ID NO: 94705 - DNA, 17 bp, Arabidopsis thaliana
gacaagcaaacgaacag

SEQ ID NO: 94706 - DNA, 17 bp, Arabidopsis thaliana
gacaagccacgggcaac

SEQ ID NO: 94707 - DNA, 17 bp, Arabidopsis thaliana
gacaagcgtctggattt

SEQ ID NO: 94708 - DNA, 17 bp, Arabidopsis thaliana
gacaagcttgcctttat

SEQ ID NO: 94709 - DNA, 17 bp, Arabidopsis thaliana
gacaaggactttgggtt

SEQ ID NO: 94710 - DNA, 17 bp, Arabidopsis thaliana
gacaaggccctgttcgt

SEQ ID NO: 94711 - DNA, 17 bp, Arabidopsis thaliana
gacaaggcctgattccg

SEQ ID NO: 94712 - DNA, 17 bp, Arabidopsis thaliana
gacaaggcgcaagaaaa

SEQ ID NO: 94713 - DNA, 17 bp, Arabidopsis thaliana
gacaagggatgtgtgtt

SEQ ID NO: 94714 - DNA, 17 bp, Arabidopsis thaliana
gacaagggcaatccgac

SEQ ID NO: 94715 - DNA, 17 bp, Arabidopsis thaliana
gacaaggggaatccgac

SEQ ID NO: 94716 - DNA, 17 bp, Arabidopsis thaliana
gacaaggtcctgatcga

SEQ ID NO: 94717 - DNA, 17 bp, Arabidopsis thaliana
gacaagtgacaacatcg

SEQ ID NO: 94718 - DNA, 17 bp, Arabidopsis thaliana
gacaagtgactacatcg

SEQ ID NO: 94719 - DNA, 17 bp, Arabidopsis thaliana
gacaagtgagattccaa

SEQ ID NO: 94720 - DNA, 17 bp, Arabidopsis thaliana
gacaagtggcaatgagg

SEQ ID NO: 94721 - DNA, 17 bp, Arabidopsis thaliana
gacaagtgtgcaggaga

SEQ ID NO: 94722 - DNA, 17 bp, Arabidopsis thaliana
gacaagttcggacagca

SEQ ID NO: 94723 - DNA, 17 bp, Arabidopsis thaliana
gacaagttggtcgattg

SEQ ID NO: 94724 - DNA, 17 bp, Arabidopsis thaliana
gacaatataagttccgc

SEQ ID NO: 94725 - DNA, 17 bp, Arabidopsis thaliana
gacaatatgggcttgac

SEQ ID NO: 94726 - DNA, 17 bp, Arabidopsis thaliana
gacaatattatctccaa

SEQ ID NO: 94727 - DNA, 17 bp, Arabidopsis thaliana
gacaatatttgcacagg

SEQ ID NO: 94728 - DNA, 17 bp, Arabidopsis thaliana
gacaatcacccggagag

SEQ ID NO: 94729 - DNA, 17 bp, Arabidopsis thaliana
gacaatcagcacgcacc

SEQ ID NO: 94730 - DNA, 17 bp, Arabidopsis thaliana
gacaatcagcacggaca

SEQ ID NO: 94731 - DNA, 17 bp, Arabidopsis thaliana
gacaatcgctggcgact

SEQ ID NO: 94732 - DNA, 17 bp, Arabidopsis thaliana
gacaatcgttccgctac

SEQ ID NO: 94733 - DNA, 17 bp, Arabidopsis thaliana
gacaatcgtttcatcct

SEQ ID NO: 94734 - DNA, 17 bp, Arabidopsis thaliana
gacaatctcgtgttcag

SEQ ID NO: 94735 - DNA, 17 bp, Arabidopsis thaliana
gacaatctctccgcagt

SEQ ID NO: 94736 - DNA, 17 bp, Arabidopsis thaliana
gacaatgacttttcatg

SEQ ID NO: 94737 - DNA, 17 bp, Arabidopsis thaliana
gacaatgagatgtatga

SEQ ID NO: 94738 - DNA, 17 bp, Arabidopsis thaliana
gacaatgaggaagactg

SEQ ID NO: 94739 - DNA, 17 bp, Arabidopsis thaliana
gacaatgatttccgcag

SEQ ID NO: 94740 - DNA, 17 bp, Arabidopsis thaliana
gacaatggatatcatct

SEQ ID NO: 94741 - DNA, 17 bp, Arabidopsis thaliana
gacaatgtcccacatcg

SEQ ID NO: 94742 - DNA, 17 bp, Arabidopsis thaliana
gacaatgtgaacctgct

SEQ ID NO: 94743 - DNA, 17 bp, Arabidopsis thaliana
gacaatgtggtcggtga

SEQ ID NO: 94744 - DNA, 17 bp, Arabidopsis thaliana
gacaattttgtaagtaa

SEQ ID NO: 94745 - DNA, 17 bp, Arabidopsis thaliana
gacaattttgtctgctt

SEQ ID NO: 94746 - DNA, 17 bp, Arabidopsis thaliana
gacacaacatcggggca

SEQ ID NO: 94747 - DNA, 17 bp, Arabidopsis thaliana
gacacaacgccacccac

SEQ ID NO: 94748 - DNA, 17 bp, Arabidopsis thaliana
gacacaagagacagcag

SEQ ID NO: 94749 - DNA, 17 bp, Arabidopsis thaliana
gacacaagcaaatggtt

SEQ ID NO: 94750 - DNA, 17 bp, Arabidopsis thaliana
gacacaagcttaggatg

SEQ ID NO: 94751 - DNA, 17 bp, Arabidopsis thaliana
gacacacgtgctacaat

SEQ ID NO: 94752 - DNA, 17 bp, Arabidopsis thaliana
gacacagacccgggttt

SEQ ID NO: 94753 - DNA, 17 bp, Arabidopsis thaliana
gacacagactagaccgg

SEQ ID NO: 94754 - DNA, 17 bp, Arabidopsis thaliana
gacacagactctacgct

SEQ ID NO: 94755 - DNA, 17 bp, Arabidopsis thaliana
gacacagcaaatgtttc

SEQ ID NO: 94756 - DNA, 17 bp, Arabidopsis thaliana
gacacaggtggtggatg

SEQ ID NO: 94757 - DNA, 17 bp, Arabidopsis thaliana
gacacaggtggtgggtg

SEQ ID NO: 94758 - DNA, 17 bp, Arabidopsis thaliana
gacacaggtgtccattg

SEQ ID NO: 94759 - DNA, 17 bp, Arabidopsis thaliana
gacacagttgcgggcgg

SEQ ID NO: 94760 - DNA, 17 bp, Arabidopsis thaliana
gacacagtttgagtctt

SEQ ID NO: 94761 - DNA, 17 bp, Arabidopsis thaliana
gacacatactttgaccg

SEQ ID NO: 94762 - DNA, 17 bp, Arabidopsis thaliana
gacacatcagcacatga

SEQ ID NO: 94763 - DNA, 17 bp, Arabidopsis thaliana
gacacatctggacacag

SEQ ID NO: 94764 - DNA, 17 bp, Arabidopsis thaliana
gacacatgcatggatct

SEQ ID NO: 94765 - DNA, 17 bp, Arabidopsis thaliana
gacacatgctgtggttt

SEQ ID NO: 94766 - DNA, 17 bp, Arabidopsis thaliana
gacacatgtaatctgat

SEQ ID NO: 94767 - DNA, 17 bp, Arabidopsis thaliana
gacacatgtccatggcg

SEQ ID NO: 94768 - DNA, 17 bp, Arabidopsis thaliana
gacacatgtccggttct

SEQ ID NO: 94769 - DNA, 17 bp, Arabidopsis thaliana
gacacatgtgtgcgagt

SEQ ID NO: 94770 - DNA, 17 bp, Arabidopsis thaliana
gacacatttgaccgtat

SEQ ID NO: 94771 - DNA, 17 bp, Arabidopsis thaliana
gacaccaacagacggcg

SEQ ID NO: 94772 - DNA, 17 bp, Arabidopsis thaliana
gacaccaaggctatttt

SEQ ID NO: 94773 - DNA, 17 bp, Arabidopsis thaliana
gacaccatcttcaccag

SEQ ID NO: 94774 - DNA, 17 bp, Arabidopsis thaliana
gacaccatcttcactag

SEQ ID NO: 94775 - DNA, 17 bp, Arabidopsis thaliana
gacaccatggctatttt

SEQ ID NO: 94776 - DNA, 17 bp, Arabidopsis thaliana
gacaccattgatcttcg

SEQ ID NO: 94777 - DNA, 17 bp, Arabidopsis thaliana
gacacccaaagcttgga

SEQ ID NO: 94778 - DNA, 17 bp, Arabidopsis thaliana
gacacccaggcaaacgt

SEQ ID NO: 94779 - DNA, 17 bp, Arabidopsis thaliana
gacacccaggcagacgg

SEQ ID NO: 94780 - DNA, 17 bp, Arabidopsis thaliana
gacacccaggcagacgt

SEQ ID NO: 94781 - DNA, 17 bp, Arabidopsis thaliana
gacacccctttgtttga

SEQ ID NO: 94782 - DNA, 17 bp, Arabidopsis thaliana
gacacccgtagacacct

SEQ ID NO: 94783 - DNA, 17 bp, Arabidopsis thaliana
gacaccgacgcggatta

SEQ ID NO: 94784 - DNA, 17 bp, Arabidopsis thaliana
gacaccgaggcagaagc

SEQ ID NO: 94785 - DNA, 17 bp, Arabidopsis thaliana
gacaccgattttgatcg

SEQ ID NO: 94786 - DNA, 17 bp, Arabidopsis thaliana
gacaccggaatcgattt

SEQ ID NO: 94787 - DNA, 17 bp, Arabidopsis thaliana
gacaccgttttctatgg

SEQ ID NO: 94788 - DNA, 17 bp, Arabidopsis thaliana
gacacctagcaagggcg

SEQ ID NO: 94789 - DNA, 17 bp, Arabidopsis thaliana
gacacctgcgatggatc

SEQ ID NO: 94790 - DNA, 17 bp, Arabidopsis thaliana
gacaccttagctcagtt

SEQ ID NO: 94791 - DNA, 17 bp, Arabidopsis thaliana
gacacgaggacttcccg

SEQ ID NO: 94792 - DNA, 17 bp, Arabidopsis thaliana
gacacgatgaaactgtt

SEQ ID NO: 94793 - DNA, 17 bp, Arabidopsis thaliana
gacacgcccaatggtcc

SEQ ID NO: 94794 - DNA, 17 bp, Arabidopsis thaliana
gacacgcgactgcttgt

SEQ ID NO: 94795 - DNA, 17 bp, Arabidopsis thaliana
gacacgcggattacggt

SEQ ID NO: 94796 - DNA, 17 bp, Arabidopsis thaliana
gacacggaaacgaacag

SEQ ID NO: 94797 - DNA, 17 bp, Arabidopsis thaliana
gacacggattacggtgg

SEQ ID NO: 94798 - DNA, 17 bp, Arabidopsis thaliana
gacacggatttaactgg

SEQ ID NO: 94799 - DNA, 17 bp, Arabidopsis thaliana
gacacggcccagactcc

SEQ ID NO: 94800 - DNA, 17 bp, Arabidopsis thaliana
gacacggctcaatcagt

SEQ ID NO: 94801 - DNA, 17 bp, Arabidopsis thaliana
gacacgggaaacgagta

SEQ ID NO: 94802 - DNA, 17 bp, Arabidopsis thaliana
gacacggggaggtagtg

SEQ ID NO: 94803 - DNA, 17 bp, Arabidopsis thaliana
gacacgggttggcgtga

SEQ ID NO: 94804 - DNA, 17 bp, Arabidopsis thaliana
gacacggtctaatttgt

SEQ ID NO: 94805 - DNA, 17 bp, Arabidopsis thaliana
gacacgtatccggttct

SEQ ID NO: 94806 - DNA, 17 bp, Arabidopsis thaliana
gacacgtctgcctgggt

SEQ ID NO: 94807 - DNA, 17 bp, Arabidopsis thaliana
gacactaggcgctgtgc

SEQ ID NO: 94808 - DNA, 17 bp, Arabidopsis thaliana
gacactagggaggagac

SEQ ID NO: 94809 - DNA, 17 bp, Arabidopsis thaliana
gacactaggttcaaggc

SEQ ID NO: 94810 - DNA, 17 bp, Arabidopsis thaliana
gacactcccagctcggc

SEQ ID NO: 94811 - DNA, 17 bp, Arabidopsis thaliana
gacactctacactgcac

SEQ ID NO: 94812 - DNA, 17 bp, Arabidopsis thaliana
gacactctgatggctta

SEQ ID NO: 94813 - DNA, 17 bp, Arabidopsis thaliana
gacactcttagcaattc

SEQ ID NO: 94814 - DNA, 17 bp, Arabidopsis thaliana
gacactctttttgtgtg

SEQ ID NO: 94815 - DNA, 17 bp, Arabidopsis thaliana
gacactgactggtgtga

SEQ ID NO: 94816 - DNA, 17 bp, Arabidopsis thaliana
gacactgagtgtccagc

SEQ ID NO: 94817 - DNA, 17 bp, Arabidopsis thaliana
gacactgggtgcttgcg

SEQ ID NO: 94818 - DNA, 17 bp, Arabidopsis thaliana
gacactgggtgtggtta

SEQ ID NO: 94819 - DNA, 17 bp, Arabidopsis thaliana
gacactgtgggctgagc

SEQ ID NO: 94820 - DNA, 17 bp, Arabidopsis thaliana
gacactgtgttcttgac

SEQ ID NO: 94821 - DNA, 17 bp, Arabidopsis thaliana
gacactgttgccaacgt

SEQ ID NO: 94822 - DNA, 17 bp, Arabidopsis thaliana
gacactgttgcggtgcg

SEQ ID NO: 94823 - DNA, 17 bp, Arabidopsis thaliana
gacacttactggtgtgt

SEQ ID NO: 94824 - DNA, 17 bp, Arabidopsis thaliana
gacacttcccctggggg

SEQ ID NO: 94825 - DNA, 17 bp, Arabidopsis thaliana
gacacttggattacggt

SEQ ID NO: 94826 - DNA, 17 bp, Arabidopsis thaliana
gacacttggggtgatga

SEQ ID NO: 94827 - DNA, 17 bp, Arabidopsis thaliana
gacacttgtcacagtca

SEQ ID NO: 94828 - DNA, 17 bp, Arabidopsis thaliana
gacactttatgcacagt

SEQ ID NO: 94829 - DNA, 17 bp, Arabidopsis thaliana
gacactttcgccgagtg

SEQ ID NO: 94830 - DNA, 17 bp, Arabidopsis thaliana
gacactttggccgactg

SEQ ID NO: 94831 - DNA, 17 bp, Arabidopsis thaliana
gacactttggccgagtg

SEQ ID NO: 94832 - DNA, 17 bp, Arabidopsis thaliana
gacactttggccgattg

SEQ ID NO: 94833 - DNA, 17 bp, Arabidopsis thaliana
gacactttggctgagtg

SEQ ID NO: 94834 - DNA, 17 bp, Arabidopsis thaliana
gacagaacaccaccacc

SEQ ID NO: 94835 - DNA, 17 bp, Arabidopsis thaliana
gacagaaggctgagtgg

SEQ ID NO: 94836 - DNA, 17 bp, Arabidopsis thaliana
gacagaatttgcagagt

SEQ ID NO: 94837 - DNA, 17 bp, Arabidopsis thaliana
gacagacaagctgagtt

SEQ ID NO: 94838 - DNA, 17 bp, Arabidopsis thaliana
gacagacagaatttgtt

SEQ ID NO: 94839 - DNA, 17 bp, Arabidopsis thaliana
gacagacagattttgtt

SEQ ID NO: 94840 - DNA, 17 bp, Arabidopsis thaliana
gacagacagtgtggtgg

SEQ ID NO: 94841 - DNA, 17 bp, Arabidopsis thaliana
gacagacgcgacggcaa

SEQ ID NO: 94842 - DNA, 17 bp, Arabidopsis thaliana
gacagacgcggattacg

SEQ ID NO: 94843 - DNA, 17 bp, Arabidopsis thaliana
gacagacggtgttgatt

SEQ ID NO: 94844 - DNA, 17 bp, Arabidopsis thaliana
gacagacgtggctttgt

SEQ ID NO: 94845 - DNA, 17 bp, Arabidopsis thaliana
gacagacgtgttgacga

SEQ ID NO: 94846 - DNA, 17 bp, Arabidopsis thaliana
gacagactgcggctgcc

SEQ ID NO: 94847 - DNA, 17 bp, Arabidopsis thaliana
gacagacttcgactctg

SEQ ID NO: 94848 - DNA, 17 bp, Arabidopsis thaliana
gacagagaaatcgctga

SEQ ID NO: 94849 - DNA, 17 bp, Arabidopsis thaliana
gacagagacagctgtct

SEQ ID NO: 94850 - DNA, 17 bp, Arabidopsis thaliana
gacagaggaatgccaga

SEQ ID NO: 94851 - DNA, 17 bp, Arabidopsis thaliana
gacagaggagacttggg

SEQ ID NO: 94852 - DNA, 17 bp, Arabidopsis thaliana
gacagatacagtgcgtt

SEQ ID NO: 94853 - DNA, 17 bp, Arabidopsis thaliana
gacagatcgagacttga

SEQ ID NO: 94854 - DNA, 17 bp, Arabidopsis thaliana
gacagatcgtaggttag

SEQ ID NO: 94855 - DNA, 17 bp, Arabidopsis thaliana
gacagatctaaacgacg

SEQ ID NO: 94856 - DNA, 17 bp, Arabidopsis thaliana
gacagatctctatggtt

SEQ ID NO: 94857 - DNA, 17 bp, Arabidopsis thaliana
gacagatctgttcgtcg

SEQ ID NO: 94858 - DNA, 17 bp, Arabidopsis thaliana
gacagatctttgcaaat

SEQ ID NO: 94859 - DNA, 17 bp, Arabidopsis thaliana
gacagatgggtagtgac

SEQ ID NO: 94860 - DNA, 17 bp, Arabidopsis thaliana
gacagattagtccgcac

SEQ ID NO: 94861 - DNA, 17 bp, Arabidopsis thaliana
gacagatttcccttcta

SEQ ID NO: 94862 - DNA, 17 bp, Arabidopsis thaliana
gacagatttgccggtca

SEQ ID NO: 94863 - DNA, 17 bp, Arabidopsis thaliana
gacagcagacttgtaga

SEQ ID NO: 94864 - DNA, 17 bp, Arabidopsis thaliana
gacagcagcgaagtgcg

SEQ ID NO: 94865 - DNA, 17 bp, Arabidopsis thaliana
gacagcaggacggtggt

SEQ ID NO: 94866 - DNA, 17 bp, Arabidopsis thaliana
gacagcaggcgctttag

SEQ ID NO: 94867 - DNA, 17 bp, Arabidopsis thaliana
gacagcccagacgaccg

SEQ ID NO: 94868 - DNA, 17 bp, Arabidopsis thaliana
gacagcccgctgtgaca

SEQ ID NO: 94869 - DNA, 17 bp, Arabidopsis thaliana
gacagcgacagcaacca

SEQ ID NO: 94870 - DNA, 17 bp, Arabidopsis thaliana
gacagcgacagcgacca

SEQ ID NO: 94871 - DNA, 17 bp, Arabidopsis thaliana
gacagcgaccagcgacc

SEQ ID NO: 94872 - DNA, 17 bp, Arabidopsis thaliana
gacagcgacgggattga

SEQ ID NO: 94873 - DNA, 17 bp, Arabidopsis thaliana
gacagcggcataaggct

SEQ ID NO: 94874 - DNA, 17 bp, Arabidopsis thaliana
gacaggaaagactctcc

SEQ ID NO: 94875 - DNA, 17 bp, Arabidopsis thaliana
gacaggaaccatggcga

SEQ ID NO: 94876 - DNA, 17 bp, Arabidopsis thaliana
gacaggaactatggcga

SEQ ID NO: 94877 - DNA, 17 bp, Arabidopsis thaliana
gacaggacgtgtcggct

SEQ ID NO: 94878 - DNA, 17 bp, Arabidopsis thaliana
gacaggatcgctcatgt

SEQ ID NO: 94879 - DNA, 17 bp, Arabidopsis thaliana
gacaggattcagcgtga

SEQ ID NO: 94880 - DNA, 17 bp, Arabidopsis thaliana
gacaggattggtggggc

SEQ ID NO: 94881 - DNA, 17 bp, Arabidopsis thaliana
gacaggatttgaacccg

SEQ ID NO: 94882 - DNA, 17 bp, Arabidopsis thaliana
gacaggcaaaccaacag

SEQ ID NO: 94883 - DNA, 17 bp, Arabidopsis thaliana
gacaggcaaacgaacag

SEQ ID NO: 94884 - DNA, 17 bp, Arabidopsis thaliana
gacaggcggacgacgga

SEQ ID NO: 94885 - DNA, 17 bp, Arabidopsis thaliana
gacaggctcagatcctg

SEQ ID NO: 94886 - DNA, 17 bp, Arabidopsis thaliana
gacaggggagccggcga

SEQ ID NO: 94887 - DNA, 17 bp, Arabidopsis thaliana
gacaggggttcgattcc

SEQ ID NO: 94888 - DNA, 17 bp, Arabidopsis thaliana
gacagggtccgggcacg

SEQ ID NO: 94889 - DNA, 17 bp, Arabidopsis thaliana
gacaggtgctgcatggc

SEQ ID NO: 94890 - DNA, 17 bp, Arabidopsis thaliana
gacaggtggatcctaca

SEQ ID NO: 94891 - DNA, 17 bp, Arabidopsis thaliana
gacaggtgggtagtgac

SEQ ID NO: 94892 - DNA, 17 bp, Arabidopsis thaliana
gacaggttctggtataa

SEQ ID NO: 94893 - DNA, 17 bp, Arabidopsis thaliana
gacaggttggcgggacg

SEQ ID NO: 94894 - DNA, 17 bp, Arabidopsis thaliana
gacaggtttggcgggac

SEQ ID NO: 94895 - DNA, 17 bp, Arabidopsis thaliana
gacagtagcacactgcc

SEQ ID NO: 94896 - DNA, 17 bp, Arabidopsis thaliana
gacagtagggggcattc

SEQ ID NO: 94897 - DNA, 17 bp, Arabidopsis thaliana
gacagtatcatggaagc

SEQ ID NO: 94898 - DNA, 17 bp, Arabidopsis thaliana
gacagtatggtagtcct

SEQ ID NO: 94899 - DNA, 17 bp, Arabidopsis thaliana
gacagtcgccagcgacc

SEQ ID NO: 94900 - DNA, 17 bp, Arabidopsis thaliana
gacagtcgctgcgatcg

SEQ ID NO: 94901 - DNA, 17 bp, Arabidopsis thaliana
gacagtcgggggcattc

SEQ ID NO: 94902 - DNA, 17 bp, Arabidopsis thaliana
gacagtgaagtatttag

SEQ ID NO: 94903 - DNA, 17 bp, Arabidopsis thaliana
gacagtggctggtgtac

SEQ ID NO: 94904 - DNA, 17 bp, Arabidopsis thaliana
gacagtgtggtggtcca

SEQ ID NO: 94905 - DNA, 17 bp, Arabidopsis thaliana
gacagttagacagatgt

SEQ ID NO: 94906 - DNA, 17 bp, Arabidopsis thaliana
gacagttattaccaatg

SEQ ID NO: 94907 - DNA, 17 bp, Arabidopsis thaliana
gacagttccagcagagt

SEQ ID NO: 94908 - DNA, 17 bp, Arabidopsis thaliana
gacagttcgatcctggc

SEQ ID NO: 94909 - DNA, 17 bp, Arabidopsis thaliana
gacagttcggtccatat

SEQ ID NO: 94910 - DNA, 17 bp, Arabidopsis thaliana
gacagttgaccttggct

SEQ ID NO: 94911 - DNA, 17 bp, Arabidopsis thaliana
gacagttgagcaggttt

SEQ ID NO: 94912 - DNA, 17 bp, Arabidopsis thaliana
gacagttgatggtgatg

SEQ ID NO: 94913 - DNA, 17 bp, Arabidopsis thaliana
gacagttggctgctctg

SEQ ID NO: 94914 - DNA, 17 bp, Arabidopsis thaliana
gacagttggctggtctg

SEQ ID NO: 94915 - DNA, 17 bp, Arabidopsis thaliana
gacagttgggtgtttct

SEQ ID NO: 94916 - DNA, 17 bp, Arabidopsis thaliana
gacagtttctatggggc

SEQ ID NO: 94917 - DNA, 17 bp, Arabidopsis thaliana
gacagtttgaccgagtg

SEQ ID NO: 94918 - DNA, 17 bp, Arabidopsis thaliana
gacagtttggccgagta

SEQ ID NO: 94919 - DNA, 17 bp, Arabidopsis thaliana
gacagtttggccgagtg

SEQ ID NO: 94920 - DNA, 17 bp, Arabidopsis thaliana
gacagtttggccgattg

SEQ ID NO: 94921 - DNA, 17 bp, Arabidopsis thaliana
gacagtttggctgagtg

SEQ ID NO: 94922 - DNA, 17 bp, Arabidopsis thaliana
gacagttttcaattgtg

SEQ ID NO: 94923 - DNA, 17 bp, Arabidopsis thaliana
gacagttttgcaaatta

SEQ ID NO: 94924 - DNA, 17 bp, Arabidopsis thaliana
gacagttttggcgggac

SEQ ID NO: 94925 - DNA, 17 bp, Arabidopsis thaliana
gacataaaccgcattca

SEQ ID NO: 94926 - DNA, 17 bp, Arabidopsis thaliana
gacatagactagaccgg

SEQ ID NO: 94927 - DNA, 17 bp, Arabidopsis thaliana
gacatagctcaatcgtc

SEQ ID NO: 94928 - DNA, 17 bp, Arabidopsis thaliana
gacatcaactccgaagg

SEQ ID NO: 94929 - DNA, 17 bp, Arabidopsis thaliana
gacatcatgccagatag

SEQ ID NO: 94930 - DNA, 17 bp, Arabidopsis thaliana
gacatccgctctgtaat

SEQ ID NO: 94931 - DNA, 17 bp, Arabidopsis thaliana
gacatcgatgacaagca

SEQ ID NO: 94932 - DNA, 17 bp, Arabidopsis thaliana
gacatcgccatctatgg

SEQ ID NO: 94933 - DNA, 17 bp, Arabidopsis thaliana
gacatcgccgtattggt

SEQ ID NO: 94934 - DNA, 17 bp, Arabidopsis thaliana
gacatcgctacaaagat

SEQ ID NO: 94935 - DNA, 17 bp, Arabidopsis thaliana
gacatcggcgatttcga

SEQ ID NO: 94936 - DNA, 17 bp, Arabidopsis thaliana
gacatcgtagatcgtct

SEQ ID NO: 94937 - DNA, 17 bp, Arabidopsis thaliana
gacatctaacctggtgt

SEQ ID NO: 94938 - DNA, 17 bp, Arabidopsis thaliana
gacatctacgagcacgg

SEQ ID NO: 94939 - DNA, 17 bp, Arabidopsis thaliana
gacatctaggggtaaag

SEQ ID NO: 94940 - DNA, 17 bp, Arabidopsis thaliana
gacatctatgaagtttg

SEQ ID NO: 94941 - DNA, 17 bp, Arabidopsis thaliana
gacatgacttttctctt

SEQ ID NO: 94942 - DNA, 17 bp, Arabidopsis thaliana
gacatgccacttgtatg

SEQ ID NO: 94943 - DNA, 17 bp, Arabidopsis thaliana
gacatgccgttatcagt

SEQ ID NO: 94944 - DNA, 17 bp, Arabidopsis thaliana
gacatgcggtggtgaac

SEQ ID NO: 94945 - DNA, 17 bp, Arabidopsis thaliana
gacatgctctaagttgc

SEQ ID NO: 94946 - DNA, 17 bp, Arabidopsis thaliana
gacatggcggcttgtga

SEQ ID NO: 94947 - DNA, 17 bp, Arabidopsis thaliana
gacatggcttggtgtgt

SEQ ID NO: 94948 - DNA, 17 bp, Arabidopsis thaliana
gacatgggaacgaacag

SEQ ID NO: 94949 - DNA, 17 bp, Arabidopsis thaliana
gacatggtccaagcccg

SEQ ID NO: 94950 - DNA, 17 bp, Arabidopsis thaliana
gacatggtcgctggatt

SEQ ID NO: 94951 - DNA, 17 bp, Arabidopsis thaliana
gacatgtctcgaagcaa

SEQ ID NO: 94952 - DNA, 17 bp, Arabidopsis thaliana
gacatgtgacattcact

SEQ ID NO: 94953 - DNA, 17 bp, Arabidopsis thaliana
gacatgtgccaaggctt

SEQ ID NO: 94954 - DNA, 17 bp, Arabidopsis thaliana
gacatgtggatcgactc

SEQ ID NO: 94955 - DNA, 17 bp, Arabidopsis thaliana
gacatgtggcaagaaga

SEQ ID NO: 94956 - DNA, 17 bp, Arabidopsis thaliana
gacatgtggcacgatcg

SEQ ID NO: 94957 - DNA, 17 bp, Arabidopsis thaliana
gacatgtggtgcggagc

SEQ ID NO: 94958 - DNA, 17 bp, Arabidopsis thaliana
gacatgtgtgcgagtca

SEQ ID NO: 94959 - DNA, 17 bp, Arabidopsis thaliana
gacatgttcctatagca

SEQ ID NO: 94960 - DNA, 17 bp, Arabidopsis thaliana
gacatgttcttgaccct

SEQ ID NO: 94961 - DNA, 17 bp, Arabidopsis thaliana
gacattaaagtcaccgt

SEQ ID NO: 94962 - DNA, 17 bp, Arabidopsis thaliana
gacattaccgatttgtg

SEQ ID NO: 94963 - DNA, 17 bp, Arabidopsis thaliana
gacattcaggtacccgt

SEQ ID NO: 94964 - DNA, 17 bp, Arabidopsis thaliana
gacattccaagcgatgt

SEQ ID NO: 94965 - DNA, 17 bp, Arabidopsis thaliana
gacattcggttcttcac

SEQ ID NO: 94966 - DNA, 17 bp, Arabidopsis thaliana
gacattcgtgcgcttta

SEQ ID NO: 94967 - DNA, 17 bp, Arabidopsis thaliana
gacattctcatgcttgc

SEQ ID NO: 94968 - DNA, 17 bp, Arabidopsis thaliana
gacattctcgtgcttgc

SEQ ID NO: 94969 - DNA, 17 bp, Arabidopsis thaliana
gacattgaagacacggg

SEQ ID NO: 94970 - DNA, 17 bp, Arabidopsis thaliana
gacattgcgtagaagtg

SEQ ID NO: 94971 - DNA, 17 bp, Arabidopsis thaliana
gacattgggcaattcat

SEQ ID NO: 94972 - DNA, 17 bp, Arabidopsis thaliana
gacattgtccgatcttc

SEQ ID NO: 94973 - DNA, 17 bp, Arabidopsis thaliana
gacatttagaggctcag

SEQ ID NO: 94974 - DNA, 17 bp, Arabidopsis thaliana
gacatttagttggtctg

SEQ ID NO: 94975 - DNA, 17 bp, Arabidopsis thaliana
gacatttcaggagttgg

SEQ ID NO: 94976 - DNA, 17 bp, Arabidopsis thaliana
gacatttcatcgtgatg

SEQ ID NO: 94977 - DNA, 17 bp, Arabidopsis thaliana
gacatttgcgtaatagt

SEQ ID NO: 94978 - DNA, 17 bp, Arabidopsis thaliana
gacatttgtcccacatt

SEQ ID NO: 94979 - DNA, 17 bp, Arabidopsis thaliana
gacattttaccatttgc

SEQ ID NO: 94980 - DNA, 17 bp, Arabidopsis thaliana
gacattttctttggacg

SEQ ID NO: 94981 - DNA, 17 bp, Arabidopsis thaliana
gacattttggccgagtg

SEQ ID NO: 94982 - DNA, 17 bp, Arabidopsis thaliana
gacattttggtggttca

SEQ ID NO: 94983 - DNA, 17 bp, Arabidopsis thaliana
gacatttttcggaccat

SEQ ID NO: 94984 - DNA, 17 bp, Arabidopsis thaliana
gacatttttgcagccac

SEQ ID NO: 94985 - DNA, 17 bp, Arabidopsis thaliana
gacatttttgcgattag

SEQ ID NO: 94986 - DNA, 17 bp, Arabidopsis thaliana
gaccaaaaatagcgata

SEQ ID NO: 94987 - DNA, 17 bp, Arabidopsis thaliana
gaccaaaagttgttcgt

SEQ ID NO: 94988 - DNA, 17 bp, Arabidopsis thaliana
gaccaaaccgcctctga

SEQ ID NO: 94989 - DNA, 17 bp, Arabidopsis thaliana
gaccaaacggctgaacg

SEQ ID NO: 94990 - DNA, 17 bp, Arabidopsis thaliana
gaccaaagactgcagtg

SEQ ID NO: 94991 - DNA, 17 bp, Arabidopsis thaliana
gaccaaatggtggacgt

SEQ ID NO: 94992 - DNA, 17 bp, Arabidopsis thaliana
gaccaaattaccctcat

SEQ ID NO: 94993 - DNA, 17 bp, Arabidopsis thaliana
gaccaacaccaaaggaa

SEQ ID NO: 94994 - DNA, 17 bp, Arabidopsis thaliana
gaccaaccgtatgccgt

SEQ ID NO: 94995 - DNA, 17 bp, Arabidopsis thaliana
gaccaaccgtatgctgc

SEQ ID NO: 94996 - DNA, 17 bp, Arabidopsis thaliana
gaccaaccgtatgctgt

SEQ ID NO: 94997 - DNA, 17 bp, Arabidopsis thaliana
gaccaaccgtatgttgt

SEQ ID NO: 94998 - DNA, 17 bp, Arabidopsis thaliana
gaccaacgcggattacg

SEQ ID NO: 94999 - DNA, 17 bp, Arabidopsis thaliana
gaccaacgggtttgcgg

SEQ ID NO: 95000 - DNA, 17 bp, Arabidopsis thaliana
gaccaacttcttcatat

SEQ ID NO: 95001 - DNA, 17 bp, Arabidopsis thaliana
gaccaactttcgttgac

SEQ ID NO: 95002 - DNA, 17 bp, Arabidopsis thaliana
gaccaactttctccata

SEQ ID NO: 95003 - DNA, 17 bp, Arabidopsis thaliana
gaccaagagttcgttga

SEQ ID NO: 95004 - DNA, 17 bp, Arabidopsis thaliana
gaccaagcacggtgcgg

SEQ ID NO: 95005 - DNA, 17 bp, Arabidopsis thaliana
gaccaaggatgacttgc

SEQ ID NO: 95006 - DNA, 17 bp, Arabidopsis thaliana
gaccaaggattgcagcg

SEQ ID NO: 95007 - DNA, 17 bp, Arabidopsis thaliana
gaccaagtattgctgct

SEQ ID NO: 95008 - DNA, 17 bp, Arabidopsis thaliana
gaccaagttccagagtg

SEQ ID NO: 95009 - DNA, 17 bp, Arabidopsis thaliana
gaccaatcaggccgtga

SEQ ID NO: 95010 - DNA, 17 bp, Arabidopsis thaliana
gaccaatcggatatcca

SEQ ID NO: 95011 - DNA, 17 bp, Arabidopsis thaliana
gaccacactcgaccatt

SEQ ID NO: 95012 - DNA, 17 bp, Arabidopsis thaliana
gaccacaggttcattaa

SEQ ID NO: 95013 - DNA, 17 bp, Arabidopsis thaliana
gaccacatagcgcagtg

SEQ ID NO: 95014 - DNA, 17 bp, Arabidopsis thaliana
gaccacatgccgaccgt

SEQ ID NO: 95015 - DNA, 17 bp, Arabidopsis thaliana
gaccaccagcgtgaggc

SEQ ID NO: 95016 - DNA, 17 bp, Arabidopsis thaliana
gaccaccatgtgtttat

SEQ ID NO: 95017 - DNA, 17 bp, Arabidopsis thaliana
gaccacccagttgtctg

SEQ ID NO: 95018 - DNA, 17 bp, Arabidopsis thaliana
gaccaccggatccgcca

SEQ ID NO: 95019 - DNA, 17 bp, Arabidopsis thaliana
gaccacgatgtgtttag

SEQ ID NO: 95020 - DNA, 17 bp, Arabidopsis thaliana
gaccacgattaaatggc

SEQ ID NO: 95021 - DNA, 17 bp, Arabidopsis thaliana
gaccacgcgttccgagc

SEQ ID NO: 95022 - DNA, 17 bp, Arabidopsis thaliana
gaccacgggatgttggg

SEQ ID NO: 95023 - DNA, 17 bp, Arabidopsis thaliana
gaccacggttaaatagc

SEQ ID NO: 95024 - DNA, 17 bp, Arabidopsis thaliana
gaccacggttaaatgac

SEQ ID NO: 95025 - DNA, 17 bp, Arabidopsis thaliana
gaccacggttaaatggc

SEQ ID NO: 95026 - DNA, 17 bp, Arabidopsis thaliana
gaccacggttacggtta

SEQ ID NO: 95027 - DNA, 17 bp, Arabidopsis thaliana
gaccacgtctgcctggg

SEQ ID NO: 95028 - DNA, 17 bp, Arabidopsis thaliana
gaccacgtgtcgttggc

SEQ ID NO: 95029 - DNA, 17 bp, Arabidopsis thaliana
gaccactatggctcccc

SEQ ID NO: 95030 - DNA, 17 bp, Arabidopsis thaliana
gaccactcggatatcca

SEQ ID NO: 95031 - DNA, 17 bp, Arabidopsis thaliana
gaccactctgaagcatt

SEQ ID NO: 95032 - DNA, 17 bp, Arabidopsis thaliana
gaccacttttttagcaa

SEQ ID NO: 95033 - DNA, 17 bp, Arabidopsis thaliana
gaccagaagcaagtccg

SEQ ID NO: 95034 - DNA, 17 bp, Arabidopsis thaliana
gaccagagtcgtgggtt

SEQ ID NO: 95035 - DNA, 17 bp, Arabidopsis thaliana
gaccagatcagctgata

SEQ ID NO: 95036 - DNA, 17 bp, Arabidopsis thaliana
gaccagatccaacagcg

SEQ ID NO: 95037 - DNA, 17 bp, Arabidopsis thaliana
gaccagattcatgctct

SEQ ID NO: 95038 - DNA, 17 bp, Arabidopsis thaliana
gaccagattcgagcgtt

SEQ ID NO: 95039 - DNA, 17 bp, Arabidopsis thaliana
gaccagattttgttcat

SEQ ID NO: 95040 - DNA, 17 bp, Arabidopsis thaliana
gaccagcaatgcttgaa

SEQ ID NO: 95041 - DNA, 17 bp, Arabidopsis thaliana
gaccagccactcgacct

SEQ ID NO: 95042 - DNA, 17 bp, Arabidopsis thaliana
gaccagcgacagcaacc

SEQ ID NO: 95043 - DNA, 17 bp, Arabidopsis thaliana
gaccagcgacagcgaca

SEQ ID NO: 95044 - DNA, 17 bp, Arabidopsis thaliana
gaccagcgacagtaacc

SEQ ID NO: 95045 - DNA, 17 bp, Arabidopsis thaliana
gaccagcgacatcatac

SEQ ID NO: 95046 - DNA, 17 bp, Arabidopsis thaliana
gaccagcgaccagcgac

SEQ ID NO: 95047 - DNA, 17 bp, Arabidopsis thaliana
gaccagcgacggcaacc

SEQ ID NO: 95048 - DNA, 17 bp, Arabidopsis thaliana
gaccaggacgcatcgcc

SEQ ID NO: 95049 - DNA, 17 bp, Arabidopsis thaliana
gaccaggagcgtatcgc

SEQ ID NO: 95050 - DNA, 17 bp, Arabidopsis thaliana
gaccaggccaaaatcat

SEQ ID NO: 95051 - DNA, 17 bp, Arabidopsis thaliana
gaccaggcccggccgac

SEQ ID NO: 95052 - DNA, 17 bp, Arabidopsis thaliana
gaccaggcccgggcgac

SEQ ID NO: 95053 - DNA, 17 bp, Arabidopsis thaliana
gaccaggcctagttgag

SEQ ID NO: 95054 - DNA, 17 bp, Arabidopsis thaliana
gaccaggcctggcgact

SEQ ID NO: 95055 - DNA, 17 bp, Arabidopsis thaliana
gaccaggctttatagtt

SEQ ID NO: 95056 - DNA, 17 bp, Arabidopsis thaliana
gaccagggatttttgag

SEQ ID NO: 95057 - DNA, 17 bp, Arabidopsis thaliana
gaccagggggcgcaata

SEQ ID NO: 95058 - DNA, 17 bp, Arabidopsis thaliana
gaccagggggtcgagta

SEQ ID NO: 95059 - DNA, 17 bp, Arabidopsis thaliana
gaccaggtagtccactt

SEQ ID NO: 95060 - DNA, 17 bp, Arabidopsis thaliana
gaccagtccgccagccg

SEQ ID NO: 95061 - DNA, 17 bp, Arabidopsis thaliana
gaccagtctcacggacc

SEQ ID NO: 95062 - DNA, 17 bp, Arabidopsis thaliana
gaccagtctcttttgcc

SEQ ID NO: 95063 - DNA, 17 bp, Arabidopsis thaliana
gaccagtgatttgccgt

SEQ ID NO: 95064 - DNA, 17 bp, Arabidopsis thaliana
gaccagtgttgaccggt

SEQ ID NO: 95065 - DNA, 17 bp, Arabidopsis thaliana
gaccagttattcattgc

SEQ ID NO: 95066 - DNA, 17 bp, Arabidopsis thaliana
gaccagttcagattcag

SEQ ID NO: 95067 - DNA, 17 bp, Arabidopsis thaliana
gaccagttttgtccacg

SEQ ID NO: 95068 - DNA, 17 bp, Arabidopsis thaliana
gaccataaggctgtcca

SEQ ID NO: 95069 - DNA, 17 bp, Arabidopsis thaliana
gaccatatggacaacgg

SEQ ID NO: 95070 - DNA, 17 bp, Arabidopsis thaliana
gaccatatggacaatgg

SEQ ID NO: 95071 - DNA, 17 bp, Arabidopsis thaliana
gaccatccaaatgattc

SEQ ID NO: 95072 - DNA, 17 bp, Arabidopsis thaliana
gaccatcgtctttgttg

SEQ ID NO: 95073 - DNA, 17 bp, Arabidopsis thaliana
gaccatcgttgcaggtg

SEQ ID NO: 95074 - DNA, 17 bp, Arabidopsis thaliana
gaccatcgtttcggcat

SEQ ID NO: 95075 - DNA, 17 bp, Arabidopsis thaliana
gaccatcgtttcggcct

SEQ ID NO: 95076 - DNA, 17 bp, Arabidopsis thaliana
gaccatctacatcggtt

SEQ ID NO: 95077 - DNA, 17 bp, Arabidopsis thaliana
gaccatctccatcaatg

SEQ ID NO: 95078 - DNA, 17 bp, Arabidopsis thaliana
gaccatctccatcggta

SEQ ID NO: 95079 - DNA, 17 bp, Arabidopsis thaliana
gaccatctccattggta

SEQ ID NO: 95080 - DNA, 17 bp, Arabidopsis thaliana
gaccatctgccgaccgt

SEQ ID NO: 95081 - DNA, 17 bp, Arabidopsis thaliana
gaccatctgcggaccaa

SEQ ID NO: 95082 - DNA, 17 bp, Arabidopsis thaliana
gaccatgttcagtggtg

SEQ ID NO: 95083 - DNA, 17 bp, Arabidopsis thaliana
gaccattaaagaccatt

SEQ ID NO: 95084 - DNA, 17 bp, Arabidopsis thaliana
gaccattacctctgttg

SEQ ID NO: 95085 - DNA, 17 bp, Arabidopsis thaliana
gaccattcctcttcatg

SEQ ID NO: 95086 - DNA, 17 bp, Arabidopsis thaliana
gaccattgacattcaac

SEQ ID NO: 95087 - DNA, 17 bp, Arabidopsis thaliana
gaccattgggcgtgttc

SEQ ID NO: 95088 - DNA, 17 bp, Arabidopsis thaliana
gaccattgtccattatg

SEQ ID NO: 95089 - DNA, 17 bp, Arabidopsis thaliana
gaccattgtctctctat

SEQ ID NO: 95090 - DNA, 17 bp, Arabidopsis thaliana
gaccatttccaacaggt

SEQ ID NO: 95091 - DNA, 17 bp, Arabidopsis thaliana
gaccattttcgtgattt

SEQ ID NO: 95092 - DNA, 17 bp, Arabidopsis thaliana
gaccatttttgaaattt

SEQ ID NO: 95093 - DNA, 17 bp, Arabidopsis thaliana
gaccattttttgaaagt

SEQ ID NO: 95094 - DNA, 17 bp, Arabidopsis thaliana
gacccaaacccaactag

SEQ ID NO: 95095 - DNA, 17 bp, Arabidopsis thaliana
gacccaaacccaactgg

SEQ ID NO: 95096 - DNA, 17 bp, Arabidopsis thaliana
gacccaaacccgtctta

SEQ ID NO: 95097 - DNA, 17 bp, Arabidopsis thaliana
gacccaaacctgtctta

SEQ ID NO: 95098 - DNA, 17 bp, Arabidopsis thaliana
gacccaacatttgagtc

SEQ ID NO: 95099 - DNA, 17 bp, Arabidopsis thaliana
gacccaaggatgactcc

SEQ ID NO: 95100 - DNA, 17 bp, Arabidopsis thaliana
gacccaaggatgacttg

SEQ ID NO: 95101 - DNA, 17 bp, Arabidopsis thaliana
gacccaatgataaatct

SEQ ID NO: 95102 - DNA, 17 bp, Arabidopsis thaliana
gacccaatgatcgagta

SEQ ID NO: 95103 - DNA, 17 bp, Arabidopsis thaliana
gacccacatctctatct

SEQ ID NO: 95104 - DNA, 17 bp, Arabidopsis thaliana
gacccacccgtcgagca

SEQ ID NO: 95105 - DNA, 17 bp, Arabidopsis thaliana
gacccacgagtttggcc

SEQ ID NO: 95106 - DNA, 17 bp, Arabidopsis thaliana
gacccagggcgaacggt

SEQ ID NO: 95107 - DNA, 17 bp, Arabidopsis thaliana
gacccaggtgtcgagtg

SEQ ID NO: 95108 - DNA, 17 bp, Arabidopsis thaliana
gacccagtgccgctccc

SEQ ID NO: 95109 - DNA, 17 bp, Arabidopsis thaliana
gacccatagaggactct

SEQ ID NO: 95110 - DNA, 17 bp, Arabidopsis thaliana
gacccatcaacccattc

SEQ ID NO: 95111 - DNA, 17 bp, Arabidopsis thaliana
gacccatggtccaacct

SEQ ID NO: 95112 - DNA, 17 bp, Arabidopsis thaliana
gacccattagctcagtt

SEQ ID NO: 95113 - DNA, 17 bp, Arabidopsis thaliana
gacccattcggttgctt

SEQ ID NO: 95114 - DNA, 17 bp, Arabidopsis thaliana
gacccattttgacaccc

SEQ ID NO: 95115 - DNA, 17 bp, Arabidopsis thaliana
gaccccaggatgacttg

SEQ ID NO: 95116 - DNA, 17 bp, Arabidopsis thaliana
gaccccagggcctgggt

SEQ ID NO: 95117 - DNA, 17 bp, Arabidopsis thaliana
gaccccaggtcaggcag

SEQ ID NO: 95118 - DNA, 17 bp, Arabidopsis thaliana
gaccccaggtcaggcgg

SEQ ID NO: 95119 - DNA, 17 bp, Arabidopsis thaliana
gacccccgagcccagcc

SEQ ID NO: 95120 - DNA, 17 bp, Arabidopsis thaliana
gaccccctggtcgagta

SEQ ID NO: 95121 - DNA, 17 bp, Arabidopsis thaliana
gaccccgtaacttcggg

SEQ ID NO: 95122 - DNA, 17 bp, Arabidopsis thaliana
gacccctcggagctcat

SEQ ID NO: 95123 - DNA, 17 bp, Arabidopsis thaliana
gacccctctttagatcc

SEQ ID NO: 95124 - DNA, 17 bp, Arabidopsis thaliana
gaccccttattagatcc

SEQ ID NO: 95125 - DNA, 17 bp, Arabidopsis thaliana
gacccctttgtcgctaa

SEQ ID NO: 95126 - DNA, 17 bp, Arabidopsis thaliana
gacccgaaagatggaga

SEQ ID NO: 95127 - DNA, 17 bp, Arabidopsis thaliana
gacccgaaagatggtga

SEQ ID NO: 95128 - DNA, 17 bp, Arabidopsis thaliana
gacccgacaaggtgcgt

SEQ ID NO: 95129 - DNA, 17 bp, Arabidopsis thaliana
gacccgagaaccatcca

SEQ ID NO: 95130 - DNA, 17 bp, Arabidopsis thaliana
gacccgatccaagccac

SEQ ID NO: 95131 - DNA, 17 bp, Arabidopsis thaliana
gacccgatgttgcccct

SEQ ID NO: 95132 - DNA, 17 bp, Arabidopsis thaliana
gacccgcaggtcccgat

SEQ ID NO: 95133 - DNA, 17 bp, Arabidopsis thaliana
gacccgggttcgatccc

SEQ ID NO: 95134 - DNA, 17 bp, Arabidopsis thaliana
gacccgggttcgtttcc

SEQ ID NO: 95135 - DNA, 17 bp, Arabidopsis thaliana
gacccgtactgggattc

SEQ ID NO: 95136 - DNA, 17 bp, Arabidopsis thaliana
gacccgtagactggtag

SEQ ID NO: 95137 - DNA, 17 bp, Arabidopsis thaliana
gacccgtaggatgggac

SEQ ID NO: 95138 - DNA, 17 bp, Arabidopsis thaliana
gacccgtaggctgggac

SEQ ID NO: 95139 - DNA, 17 bp, Arabidopsis thaliana
gacccgtctttagatcc

SEQ ID NO: 95140 - DNA, 17 bp, Arabidopsis thaliana
gacccgtgcagtgctgt

SEQ ID NO: 95141 - DNA, 17 bp, Arabidopsis thaliana
gacccgttactcagtag

SEQ ID NO: 95142 - DNA, 17 bp, Arabidopsis thaliana
gacccgtttattaaccg

SEQ ID NO: 95143 - DNA, 17 bp, Arabidopsis thaliana
gaccctacatggcgggt

SEQ ID NO: 95144 - DNA, 17 bp, Arabidopsis thaliana
gaccctcagtaggagct

SEQ ID NO: 95145 - DNA, 17 bp, Arabidopsis thaliana
gaccctgaacccgtgtt

SEQ ID NO: 95146 - DNA, 17 bp, Arabidopsis thaliana
gaccctgaactttggct

SEQ ID NO: 95147 - DNA, 17 bp, Arabidopsis thaliana
gaccctgaccattgctg

SEQ ID NO: 95148 - DNA, 17 bp, Arabidopsis thaliana
gaccctgagatggatct

SEQ ID NO: 95149 - DNA, 17 bp, Arabidopsis thaliana
gaccctgccgcaccacg

SEQ ID NO: 95150 - DNA, 17 bp, Arabidopsis thaliana
gaccctggatggacaga

SEQ ID NO: 95151 - DNA, 17 bp, Arabidopsis thaliana
gaccctggatggacagg

SEQ ID NO: 95152 - DNA, 17 bp, Arabidopsis thaliana
gaccctgtcgcaccacc

SEQ ID NO: 95153 - DNA, 17 bp, Arabidopsis thaliana
gaccctgtcgcaccacg

SEQ ID NO: 95154 - DNA, 17 bp, Arabidopsis thaliana
gaccctgttgagcttga

SEQ ID NO: 95155 - DNA, 17 bp, Arabidopsis thaliana
gacccttaagtactttt

SEQ ID NO: 95156 - DNA, 17 bp, Arabidopsis thaliana
gacccttgggagctacc

SEQ ID NO: 95157 - DNA, 17 bp, Arabidopsis thaliana
gaccctttaggatctgg

SEQ ID NO: 95158 - DNA, 17 bp, Arabidopsis thaliana
gaccctttgtccctaag

SEQ ID NO: 95159 - DNA, 17 bp, Arabidopsis thaliana
gaccctttgtcgctaag

SEQ ID NO: 95160 - DNA, 17 bp, Arabidopsis thaliana
gaccgaaccagcaggtc

SEQ ID NO: 95161 - DNA, 17 bp, Arabidopsis thaliana
gaccgaagccccggtga

SEQ ID NO: 95162 - DNA, 17 bp, Arabidopsis thaliana
gaccgaagggaaccagt

SEQ ID NO: 95163 - DNA, 17 bp, Arabidopsis thaliana
gaccgaagggacaagcc

SEQ ID NO: 95164 - DNA, 17 bp, Arabidopsis thaliana
gaccgaagtcaccgttg

SEQ ID NO: 95165 - DNA, 17 bp, Arabidopsis thaliana
gaccgaagtcagttatg

SEQ ID NO: 95166 - DNA, 17 bp, Arabidopsis thaliana
gaccgaagtccgtaatc

SEQ ID NO: 95167 - DNA, 17 bp, Arabidopsis thaliana
gaccgaatggccaacgt

SEQ ID NO: 95168 - DNA, 17 bp, Arabidopsis thaliana
gaccgaattacagtcgc

SEQ ID NO: 95169 - DNA, 17 bp, Arabidopsis thaliana
gaccgaatttgagggtg

SEQ ID NO: 95170 - DNA, 17 bp, Arabidopsis thaliana
gaccgacaaaacactgt

SEQ ID NO: 95171 - DNA, 17 bp, Arabidopsis thaliana
gaccgacaaattagacc

SEQ ID NO: 95172 - DNA, 17 bp, Arabidopsis thaliana
gaccgacaacagatggc

SEQ ID NO: 95173 - DNA, 17 bp, Arabidopsis thaliana
gaccgacaactgatggc

SEQ ID NO: 95174 - DNA, 17 bp, Arabidopsis thaliana
gaccgacaaggcccgat

SEQ ID NO: 95175 - DNA, 17 bp, Arabidopsis thaliana
gaccgacaatgactggc

SEQ ID NO: 95176 - DNA, 17 bp, Arabidopsis thaliana
gaccgacacacgactac

SEQ ID NO: 95177 - DNA, 17 bp, Arabidopsis thaliana
gaccgacacggattacg

SEQ ID NO: 95178 - DNA, 17 bp, Arabidopsis thaliana
gaccgacactttggccg

SEQ ID NO: 95179 - DNA, 17 bp, Arabidopsis thaliana
gaccgacaggcgaatca

SEQ ID NO: 95180 - DNA, 17 bp, Arabidopsis thaliana
gaccgacagtttggccg

SEQ ID NO: 95181 - DNA, 17 bp, Arabidopsis thaliana
gaccgacatggtccaag

SEQ ID NO: 95182 - DNA, 17 bp, Arabidopsis thaliana
gaccgaccaggcccggg

SEQ ID NO: 95183 - DNA, 17 bp, Arabidopsis thaliana
gaccgaccattgacatt

SEQ ID NO: 95184 - DNA, 17 bp, Arabidopsis thaliana
gaccgacccagggcgaa

SEQ ID NO: 95185 - DNA, 17 bp, Arabidopsis thaliana
gaccgaccccaggtcag

SEQ ID NO: 95186 - DNA, 17 bp, Arabidopsis thaliana
gaccgacccggattacg

SEQ ID NO: 95187 - DNA, 17 bp, Arabidopsis thaliana
gaccgaccctgttgagc

SEQ ID NO: 95188 - DNA, 17 bp, Arabidopsis thaliana
gaccgaccgaattacag

SEQ ID NO: 95189 - DNA, 17 bp, Arabidopsis thaliana
gaccgaccgacaatgac

SEQ ID NO: 95190 - DNA, 17 bp, Arabidopsis thaliana
gaccgaccgaccgaccg

SEQ ID NO: 95191 - DNA, 17 bp, Arabidopsis thaliana
gaccgaccgacgcggat

SEQ ID NO: 95192 - DNA, 17 bp, Arabidopsis thaliana
gaccgaccgagagacag

SEQ ID NO: 95193 - DNA, 17 bp, Arabidopsis thaliana
gaccgaccgagtgccgc

SEQ ID NO: 95194 - DNA, 17 bp, Arabidopsis thaliana
gaccgaccggatctgag

SEQ ID NO: 95195 - DNA, 17 bp, Arabidopsis thaliana
gaccgaccggattacgg

SEQ ID NO: 95196 - DNA, 17 bp, Arabidopsis thaliana
gaccgaccggctgattc

SEQ ID NO: 95197 - DNA, 17 bp, Arabidopsis thaliana
gaccgaccgggtccgag

SEQ ID NO: 95198 - DNA, 17 bp, Arabidopsis thaliana
gaccgaccggtataaga

SEQ ID NO: 95199 - DNA, 17 bp, Arabidopsis thaliana
gaccgaccgttcggccg

SEQ ID NO: 95200 - DNA, 17 bp, Arabidopsis thaliana
gaccgacctcccgggaa

SEQ ID NO: 95201 - DNA, 17 bp, Arabidopsis thaliana
gaccgacctctggatgt

SEQ ID NO: 95202 - DNA, 17 bp, Arabidopsis thaliana
gaccgacctgaaatccg

SEQ ID NO: 95203 - DNA, 17 bp, Arabidopsis thaliana
gaccgacctgttacttt

SEQ ID NO: 95204 - DNA, 17 bp, Arabidopsis thaliana
gaccgaccttgtactat

SEQ ID NO: 95205 - DNA, 17 bp, Arabidopsis thaliana
gaccgacctttaagtac

SEQ ID NO: 95206 - DNA, 17 bp, Arabidopsis thaliana
gaccgacctttgtcgat

SEQ ID NO: 95207 - DNA, 17 bp, Arabidopsis thaliana
gaccgacgacgcttgga

SEQ ID NO: 95208 - DNA, 17 bp, Arabidopsis thaliana
gaccgacgcagattacg

SEQ ID NO: 95209 - DNA, 17 bp, Arabidopsis thaliana
gaccgacgcattacggt

SEQ ID NO: 95210 - DNA, 17 bp, Arabidopsis thaliana
gaccgacgccgattacg

SEQ ID NO: 95211 - DNA, 17 bp, Arabidopsis thaliana
gaccgacgcgaacggtg

SEQ ID NO: 95212 - DNA, 17 bp, Arabidopsis thaliana
gaccgacgcgaattacg

SEQ ID NO: 95213 - DNA, 17 bp, Arabidopsis thaliana
gaccgacgcggactacg

SEQ ID NO: 95214 - DNA, 17 bp, Arabidopsis thaliana
gaccgacgcggatacgg

SEQ ID NO: 95215 - DNA, 17 bp, Arabidopsis thaliana
gaccgacgcggatgatg

SEQ ID NO: 95216 - DNA, 17 bp, Arabidopsis thaliana
gaccgacgcggattaca

SEQ ID NO: 95217 - DNA, 17 bp, Arabidopsis thaliana
gaccgacgcggattacg

SEQ ID NO: 95218 - DNA, 17 bp, Arabidopsis thaliana
gaccgacgcggattact

SEQ ID NO: 95219 - DNA, 17 bp, Arabidopsis thaliana
gaccgacgcggattagg

SEQ ID NO: 95220 - DNA, 17 bp, Arabidopsis thaliana
gaccgacgcggattatg

SEQ ID NO: 95221 - DNA, 17 bp, Arabidopsis thaliana
gaccgacgcggattccg

SEQ ID NO: 95222 - DNA, 17 bp, Arabidopsis thaliana
gaccgacgcgggttacg

SEQ ID NO: 95223 - DNA, 17 bp, Arabidopsis thaliana
gaccgacgcgtattacg

SEQ ID NO: 95224 - DNA, 17 bp, Arabidopsis thaliana
gaccgacgctgattacg

SEQ ID NO: 95225 - DNA, 17 bp, Arabidopsis thaliana
gaccgacggaccgggcc

SEQ ID NO: 95226 - DNA, 17 bp, Arabidopsis thaliana
gaccgacggattacggt

SEQ ID NO: 95227 - DNA, 17 bp, Arabidopsis thaliana
gaccgacggtactgtgg

SEQ ID NO: 95228 - DNA, 17 bp, Arabidopsis thaliana
gaccgacgtcgagtttg

SEQ ID NO: 95229 - DNA, 17 bp, Arabidopsis thaliana
gaccgacgtcgcgggcg

SEQ ID NO: 95230 - DNA, 17 bp, Arabidopsis thaliana
gaccgacgtcggcgggg

SEQ ID NO: 95231 - DNA, 17 bp, Arabidopsis thaliana
gaccgacgtggattacg

SEQ ID NO: 95232 - DNA, 17 bp, Arabidopsis thaliana
gaccgacgttaaatcga

SEQ ID NO: 95233 - DNA, 17 bp, Arabidopsis thaliana
gaccgacgtttgaatta

SEQ ID NO: 95234 - DNA, 17 bp, Arabidopsis thaliana
gaccgacgtttgggaca

SEQ ID NO: 95235 - DNA, 17 bp, Arabidopsis thaliana
gaccgactaatcgaacc

SEQ ID NO: 95236 - DNA, 17 bp, Arabidopsis thaliana
gaccgactcggattacg

SEQ ID NO: 95237 - DNA, 17 bp, Arabidopsis thaliana
gaccgactctagtccga

SEQ ID NO: 95238 - DNA, 17 bp, Arabidopsis thaliana
gaccgactctcggcaac

SEQ ID NO: 95239 - DNA, 17 bp, Arabidopsis thaliana
gaccgactctgagagaa

SEQ ID NO: 95240 - DNA, 17 bp, Arabidopsis thaliana
gaccgactgcgtgtagc

SEQ ID NO: 95241 - DNA, 17 bp, Arabidopsis thaliana
gaccgactgcgttttgt

SEQ ID NO: 95242 - DNA, 17 bp, Arabidopsis thaliana
gaccgactggtaaacca

SEQ ID NO: 95243 - DNA, 17 bp, Arabidopsis thaliana
gaccgactggtcactgg

SEQ ID NO: 95244 - DNA, 17 bp, Arabidopsis thaliana
gaccgacttcaaagact

SEQ ID NO: 95245 - DNA, 17 bp, Arabidopsis thaliana
gaccgactttgatgaca

SEQ ID NO: 95246 - DNA, 17 bp, Arabidopsis thaliana
gaccgacttttatgaat

SEQ ID NO: 95247 - DNA, 17 bp, Arabidopsis thaliana
gaccgactttttgtcga

SEQ ID NO: 95248 - DNA, 17 bp, Arabidopsis thaliana
gaccgagacaagtgcgg

SEQ ID NO: 95249 - DNA, 17 bp, Arabidopsis thaliana
gaccgagagacaggatc

SEQ ID NO: 95250 - DNA, 17 bp, Arabidopsis thaliana
gaccgagctatccccgg

SEQ ID NO: 95251 - DNA, 17 bp, Arabidopsis thaliana
gaccgaggcggattacg

SEQ ID NO: 95252 - DNA, 17 bp, Arabidopsis thaliana
gaccgagggcacacttc

SEQ ID NO: 95253 - DNA, 17 bp, Arabidopsis thaliana
gaccgagggcacgtccg

SEQ ID NO: 95254 - DNA, 17 bp, Arabidopsis thaliana
gaccgagggcacgtctg

SEQ ID NO: 95255 - DNA, 17 bp, Arabidopsis thaliana
gaccgaggttaaagttt

SEQ ID NO: 95256 - DNA, 17 bp, Arabidopsis thaliana
gaccgagtctactgtgc

SEQ ID NO: 95257 - DNA, 17 bp, Arabidopsis thaliana
gaccgagtgccgctcac

SEQ ID NO: 95258 - DNA, 17 bp, Arabidopsis thaliana
gaccgagtgtcgctcac

SEQ ID NO: 95259 - DNA, 17 bp, Arabidopsis thaliana
gaccgataccacctggg

SEQ ID NO: 95260 - DNA, 17 bp, Arabidopsis thaliana
gaccgatagcgaacaag

SEQ ID NO: 95261 - DNA, 17 bp, Arabidopsis thaliana
gaccgatagcgaagtag

SEQ ID NO: 95262 - DNA, 17 bp, Arabidopsis thaliana
gaccgatccgagcggat

SEQ ID NO: 95263 - DNA, 17 bp, Arabidopsis thaliana
gaccgatccggaagatt

SEQ ID NO: 95264 - DNA, 17 bp, Arabidopsis thaliana
gaccgatccgtaggctt

SEQ ID NO: 95265 - DNA, 17 bp, Arabidopsis thaliana
gaccgatcgaccggctg

SEQ ID NO: 95266 - DNA, 17 bp, Arabidopsis thaliana
gaccgatcgcaacgact

SEQ ID NO: 95267 - DNA, 17 bp, Arabidopsis thaliana
gaccgatcgcagcgact

SEQ ID NO: 95268 - DNA, 17 bp, Arabidopsis thaliana
gaccgatctgatcttct

SEQ ID NO: 95269 - DNA, 17 bp, Arabidopsis thaliana
gaccgatctgtcgctgt

SEQ ID NO: 95270 - DNA, 17 bp, Arabidopsis thaliana
gaccgatgcggattacg

SEQ ID NO: 95271 - DNA, 17 bp, Arabidopsis thaliana
gaccgatggactggtgg

SEQ ID NO: 95272 - DNA, 17 bp, Arabidopsis thaliana
gaccgatgtggattgtg

SEQ ID NO: 95273 - DNA, 17 bp, Arabidopsis thaliana
gaccgattgtttttgct

SEQ ID NO: 95274 - DNA, 17 bp, Arabidopsis thaliana
gaccgatttctccgagt

SEQ ID NO: 95275 - DNA, 17 bp, Arabidopsis thaliana
gaccgcaaacaaatggg

SEQ ID NO: 95276 - DNA, 17 bp, Arabidopsis thaliana
gaccgcacccaaaaccg

SEQ ID NO: 95277 - DNA, 17 bp, Arabidopsis thaliana
gaccgcataacgcagtg

SEQ ID NO: 95278 - DNA, 17 bp, Arabidopsis thaliana
gaccgcatagcgaagtg

SEQ ID NO: 95279 - DNA, 17 bp, Arabidopsis thaliana
gaccgcatagcgcactg

SEQ ID NO: 95280 - DNA, 17 bp, Arabidopsis thaliana
gaccgcatagcgcagcg

SEQ ID NO: 95281 - DNA, 17 bp, Arabidopsis thaliana
gaccgcatagcgcagtg

SEQ ID NO: 95282 - DNA, 17 bp, Arabidopsis thaliana
gaccgcatagcgcattg

SEQ ID NO: 95283 - DNA, 17 bp, Arabidopsis thaliana
gaccgcatagcgcggat

SEQ ID NO: 95284 - DNA, 17 bp, Arabidopsis thaliana
gaccgcatagcgtagtg

SEQ ID NO: 95285 - DNA, 17 bp, Arabidopsis thaliana
gaccgcatggcctctgt

SEQ ID NO: 95286 - DNA, 17 bp, Arabidopsis thaliana
gaccgcccgtcgaccgt

SEQ ID NO: 95287 - DNA, 17 bp, Arabidopsis thaliana
gaccgccgggtcgtgaa

SEQ ID NO: 95288 - DNA, 17 bp, Arabidopsis thaliana
gaccgctacactgctta

SEQ ID NO: 95289 - DNA, 17 bp, Arabidopsis thaliana
gaccgctagactcgtca

SEQ ID NO: 95290 - DNA, 17 bp, Arabidopsis thaliana
gaccgctatgttggact

SEQ ID NO: 95291 - DNA, 17 bp, Arabidopsis thaliana
gaccgctcaccctgttt

SEQ ID NO: 95292 - DNA, 17 bp, Arabidopsis thaliana
gaccgctctacaactgc

SEQ ID NO: 95293 - DNA, 17 bp, Arabidopsis thaliana
gaccgctctgttgttct

SEQ ID NO: 95294 - DNA, 17 bp, Arabidopsis thaliana
gaccgctgacagattag

SEQ ID NO: 95295 - DNA, 17 bp, Arabidopsis thaliana
gaccgctgcttttggtc

SEQ ID NO: 95296 - DNA, 17 bp, Arabidopsis thaliana
gaccgcttcatgtagta

SEQ ID NO: 95297 - DNA, 17 bp, Arabidopsis thaliana
gaccgcttctaagcaag

SEQ ID NO: 95298 - DNA, 17 bp, Arabidopsis thaliana
gaccgcttgatctgctc

SEQ ID NO: 95299 - DNA, 17 bp, Arabidopsis thaliana
gaccgctttgtccgtta

SEQ ID NO: 95300 - DNA, 17 bp, Arabidopsis thaliana
gaccggaatcgatggtg

SEQ ID NO: 95301 - DNA, 17 bp, Arabidopsis thaliana
gaccggacactcgatca

SEQ ID NO: 95302 - DNA, 17 bp, Arabidopsis thaliana
gaccggagaagtgaggc

SEQ ID NO: 95303 - DNA, 17 bp, Arabidopsis thaliana
gaccggagaattagggt

SEQ ID NO: 95304 - DNA, 17 bp, Arabidopsis thaliana
gaccggagcagcggaaa

SEQ ID NO: 95305 - DNA, 17 bp, Arabidopsis thaliana
gaccggagcagcggaac

SEQ ID NO: 95306 - DNA, 17 bp, Arabidopsis thaliana
gaccggagttgaagttt

SEQ ID NO: 95307 - DNA, 17 bp, Arabidopsis thaliana
gaccggataagtatgga

SEQ ID NO: 95308 - DNA, 17 bp, Arabidopsis thaliana
gaccggatccgaggatt

SEQ ID NO: 95309 - DNA, 17 bp, Arabidopsis thaliana
gaccggatctgagagtg

SEQ ID NO: 95310 - DNA, 17 bp, Arabidopsis thaliana
gaccggatcttaaaggc

SEQ ID NO: 95311 - DNA, 17 bp, Arabidopsis thaliana
gaccggatttgagggtg

SEQ ID NO: 95312 - DNA, 17 bp, Arabidopsis thaliana
gaccggcaatgttggat

SEQ ID NO: 95313 - DNA, 17 bp, Arabidopsis thaliana
gaccggcaccggagctg

SEQ ID NO: 95314 - DNA, 17 bp, Arabidopsis thaliana
gaccggcgattgtcaac

SEQ ID NO: 95315 - DNA, 17 bp, Arabidopsis thaliana
gaccggcgcggattacg

SEQ ID NO: 95316 - DNA, 17 bp, Arabidopsis thaliana
gaccgggaggcttgtga

SEQ ID NO: 95317 - DNA, 17 bp, Arabidopsis thaliana
gaccgggatctctctct

SEQ ID NO: 95318 - DNA, 17 bp, Arabidopsis thaliana
gaccgggcctaagttcc

SEQ ID NO: 95319 - DNA, 17 bp, Arabidopsis thaliana
gaccgggcggtttgcgt

SEQ ID NO: 95320 - DNA, 17 bp, Arabidopsis thaliana
gaccggggttaaagttt

SEQ ID NO: 95321 - DNA, 17 bp, Arabidopsis thaliana
gaccggggttgaagttt

SEQ ID NO: 95322 - DNA, 17 bp, Arabidopsis thaliana
gaccgggtccaagtatt

SEQ ID NO: 95323 - DNA, 17 bp, Arabidopsis thaliana
gaccgggtccaggatta

SEQ ID NO: 95324 - DNA, 17 bp, Arabidopsis thaliana
gaccgggtccgaggatt

SEQ ID NO: 95325 - DNA, 17 bp, Arabidopsis thaliana
gaccggtaaaccagcgg

SEQ ID NO: 95326 - DNA, 17 bp, Arabidopsis thaliana
gaccggtataagaaatt

SEQ ID NO: 95327 - DNA, 17 bp, Arabidopsis thaliana
gaccggtccctctgtgt

SEQ ID NO: 95328 - DNA, 17 bp, Arabidopsis thaliana
gaccggtccgcctttgg

SEQ ID NO: 95329 - DNA, 17 bp, Arabidopsis thaliana
gaccggtgcaactataa

SEQ ID NO: 95330 - DNA, 17 bp, Arabidopsis thaliana
gaccggtggactggtgg

SEQ ID NO: 95331 - DNA, 17 bp, Arabidopsis thaliana
gaccggttaagtaaatt

SEQ ID NO: 95332 - DNA, 17 bp, Arabidopsis thaliana
gaccggttccagagtat

SEQ ID NO: 95333 - DNA, 17 bp, Arabidopsis thaliana
gaccggttctagatagt

SEQ ID NO: 95334 - DNA, 17 bp, Arabidopsis thaliana
gaccggttgatgtccac

SEQ ID NO: 95335 - DNA, 17 bp, Arabidopsis thaliana
gaccgtaacgaagatgt

SEQ ID NO: 95336 - DNA, 17 bp, Arabidopsis thaliana
gaccgtataagattgtc

SEQ ID NO: 95337 - DNA, 17 bp, Arabidopsis thaliana
gaccgtatcagacgcaa

SEQ ID NO: 95338 - DNA, 17 bp, Arabidopsis thaliana
gaccgtatggacaatgg

SEQ ID NO: 95339 - DNA, 17 bp, Arabidopsis thaliana
gaccgtccgatctctcg

SEQ ID NO: 95340 - DNA, 17 bp, Arabidopsis thaliana
gaccgtccggccgccgg

SEQ ID NO: 95341 - DNA, 17 bp, Arabidopsis thaliana
gaccgtcggacagaggt

SEQ ID NO: 95342 - DNA, 17 bp, Arabidopsis thaliana
gaccgtctacattcttg

SEQ ID NO: 95343 - DNA, 17 bp, Arabidopsis thaliana
gaccgtctgcctgggtg

SEQ ID NO: 95344 - DNA, 17 bp, Arabidopsis thaliana
gaccgtgaggccaaacc

SEQ ID NO: 95345 - DNA, 17 bp, Arabidopsis thaliana
gaccgtgaggccaaact

SEQ ID NO: 95346 - DNA, 17 bp, Arabidopsis thaliana
gaccgtgaggccaaccc

SEQ ID NO: 95347 - DNA, 17 bp, Arabidopsis thaliana
gaccgtgaggccgaact

SEQ ID NO: 95348 - DNA, 17 bp, Arabidopsis thaliana
gaccgtggtataagttt

SEQ ID NO: 95349 - DNA, 17 bp, Arabidopsis thaliana
gaccgtggtcccagttc

SEQ ID NO: 95350 - DNA, 17 bp, Arabidopsis thaliana
gaccgttcgaactttgt

SEQ ID NO: 95351 - DNA, 17 bp, Arabidopsis thaliana
gaccgttgacgcgattc

SEQ ID NO: 95352 - DNA, 17 bp, Arabidopsis thaliana
gaccgttgctcatctta

SEQ ID NO: 95353 - DNA, 17 bp, Arabidopsis thaliana
gaccgttgctcggctag

SEQ ID NO: 95354 - DNA, 17 bp, Arabidopsis thaliana
gaccgttgttcggctag

SEQ ID NO: 95355 - DNA, 17 bp, Arabidopsis thaliana
gaccgtttgctgaccgc

SEQ ID NO: 95356 - DNA, 17 bp, Arabidopsis thaliana
gaccgtttggttaacag

SEQ ID NO: 95357 - DNA, 17 bp, Arabidopsis thaliana
gaccgtttttctgtttt

SEQ ID NO: 95358 - DNA, 17 bp, Arabidopsis thaliana
gacctaaacccaactgg

SEQ ID NO: 95359 - DNA, 17 bp, Arabidopsis thaliana
gacctaaacctgtcaat

SEQ ID NO: 95360 - DNA, 17 bp, Arabidopsis thaliana
gacctaagcctacatat

SEQ ID NO: 95361 - DNA, 17 bp, Arabidopsis thaliana
gacctaagctcgttgat

SEQ ID NO: 95362 - DNA, 17 bp, Arabidopsis thaliana
gacctaagtttcatcga

SEQ ID NO: 95363 - DNA, 17 bp, Arabidopsis thaliana
gacctaattggacccta

SEQ ID NO: 95364 - DNA, 17 bp, Arabidopsis thaliana
gacctaccgagaatcgg

SEQ ID NO: 95365 - DNA, 17 bp, Arabidopsis thaliana
gacctaccgtgcgctgg

SEQ ID NO: 95366 - DNA, 17 bp, Arabidopsis thaliana
gacctaccttttgggtc

SEQ ID NO: 95367 - DNA, 17 bp, Arabidopsis thaliana
gacctacgcagctgacg

SEQ ID NO: 95368 - DNA, 17 bp, Arabidopsis thaliana
gacctacgcggattacg

SEQ ID NO: 95369 - DNA, 17 bp, Arabidopsis thaliana
gacctacgggccggact

SEQ ID NO: 95370 - DNA, 17 bp, Arabidopsis thaliana
gacctagtgccgctcac

SEQ ID NO: 95371 - DNA, 17 bp, Arabidopsis thaliana
gacctatacccggccct

SEQ ID NO: 95372 - DNA, 17 bp, Arabidopsis thaliana
gacctatgcatgcagga

SEQ ID NO: 95373 - DNA, 17 bp, Arabidopsis thaliana
gacctatgtttctacca

SEQ ID NO: 95374 - DNA, 17 bp, Arabidopsis thaliana
gacctattagctcagtg

SEQ ID NO: 95375 - DNA, 17 bp, Arabidopsis thaliana
gacctattagctcagtt

SEQ ID NO: 95376 - DNA, 17 bp, Arabidopsis thaliana
gacctattgtgttggcc

SEQ ID NO: 95377 - DNA, 17 bp, Arabidopsis thaliana
gacctcaaatgactacc

SEQ ID NO: 95378 - DNA, 17 bp, Arabidopsis thaliana
gacctcaatcccaaaac

SEQ ID NO: 95379 - DNA, 17 bp, Arabidopsis thaliana
gacctcagcctgctaac

SEQ ID NO: 95380 - DNA, 17 bp, Arabidopsis thaliana
gacctcaggagggatag

SEQ ID NO: 95381 - DNA, 17 bp, Arabidopsis thaliana
gacctcatcacaacgtg

SEQ ID NO: 95382 - DNA, 17 bp, Arabidopsis thaliana
gacctccaactgtcggc

SEQ ID NO: 95383 - DNA, 17 bp, Arabidopsis thaliana
gacctccaggaaagtcc

SEQ ID NO: 95384 - DNA, 17 bp, Arabidopsis thaliana
gacctccaggtcgagtg

SEQ ID NO: 95385 - DNA, 17 bp, Arabidopsis thaliana
gacctcccatcgtttgt

SEQ ID NO: 95386 - DNA, 17 bp, Arabidopsis thaliana
gacctcccggcaagtcc

SEQ ID NO: 95387 - DNA, 17 bp, Arabidopsis thaliana
gacctcccgggaagtcc

SEQ ID NO: 95388 - DNA, 17 bp, Arabidopsis thaliana
gacctccctggtgagtc

SEQ ID NO: 95389 - DNA, 17 bp, Arabidopsis thaliana
gacctcccttcttctgc

SEQ ID NO: 95390 - DNA, 17 bp, Arabidopsis thaliana
gacctcctatgagagct

SEQ ID NO: 95391 - DNA, 17 bp, Arabidopsis thaliana
gacctcctgccatccat

SEQ ID NO: 95392 - DNA, 17 bp, Arabidopsis thaliana
gacctcctgcgaaaggc

SEQ ID NO: 95393 - DNA, 17 bp, Arabidopsis thaliana
gacctcgacgggggcct

SEQ ID NO: 95394 - DNA, 17 bp, Arabidopsis thaliana
gacctcgactcaatagc

SEQ ID NO: 95395 - DNA, 17 bp, Arabidopsis thaliana
gacctcgactccagtct

SEQ ID NO: 95396 - DNA, 17 bp, Arabidopsis thaliana
gacctcgactcgatagc

SEQ ID NO: 95397 - DNA, 17 bp, Arabidopsis thaliana
gacctcgatcttctgag

SEQ ID NO: 95398 - DNA, 17 bp, Arabidopsis thaliana
gacctcgcacatgtgaa

SEQ ID NO: 95399 - DNA, 17 bp, Arabidopsis thaliana
gacctcgcagagttgag

SEQ ID NO: 95400 - DNA, 17 bp, Arabidopsis thaliana
gacctcgtgtgcctata

SEQ ID NO: 95401 - DNA, 17 bp, Arabidopsis thaliana
gacctctaagcttcgcc

SEQ ID NO: 95402 - DNA, 17 bp, Arabidopsis thaliana
gacctctaagtttcgcc

SEQ ID NO: 95403 - DNA, 17 bp, Arabidopsis thaliana
gacctctaggttagtca

SEQ ID NO: 95404 - DNA, 17 bp, Arabidopsis thaliana
gacctctatcaccaagc

SEQ ID NO: 95405 - DNA, 17 bp, Arabidopsis thaliana
gacctctgagtggtgat

SEQ ID NO: 95406 - DNA, 17 bp, Arabidopsis thaliana
gacctctgcaagtcttg

SEQ ID NO: 95407 - DNA, 17 bp, Arabidopsis thaliana
gacctctgctaaggttt

SEQ ID NO: 95408 - DNA, 17 bp, Arabidopsis thaliana
gacctctgctccttcgt

SEQ ID NO: 95409 - DNA, 17 bp, Arabidopsis thaliana
gacctctggatgtagaa

SEQ ID NO: 95410 - DNA, 17 bp, Arabidopsis thaliana
gacctcttcatcaactt

SEQ ID NO: 95411 - DNA, 17 bp, Arabidopsis thaliana
gacctgaatcttctact

SEQ ID NO: 95412 - DNA, 17 bp, Arabidopsis thaliana
gacctgacgaaccagtt

SEQ ID NO: 95413 - DNA, 17 bp, Arabidopsis thaliana
gacctgagattggtctt

SEQ ID NO: 95414 - DNA, 17 bp, Arabidopsis thaliana
gacctgatactcgacca

SEQ ID NO: 95415 - DNA, 17 bp, Arabidopsis thaliana
gacctgatactcgatcg

SEQ ID NO: 95416 - DNA, 17 bp, Arabidopsis thaliana
gacctgcaccaagcgag

SEQ ID NO: 95417 - DNA, 17 bp, Arabidopsis thaliana
gacctgcctatgcggcg

SEQ ID NO: 95418 - DNA, 17 bp, Arabidopsis thaliana
gacctggacagcaggag

SEQ ID NO: 95419 - DNA, 17 bp, Arabidopsis thaliana
gacctggactcacatca

SEQ ID NO: 95420 - DNA, 17 bp, Arabidopsis thaliana
gacctggactcacatta

SEQ ID NO: 95421 - DNA, 17 bp, Arabidopsis thaliana
gacctggagatcgagtg

SEQ ID NO: 95422 - DNA, 17 bp, Arabidopsis thaliana
gacctggatcagattgc

SEQ ID NO: 95423 - DNA, 17 bp, Arabidopsis thaliana
gacctggcaggttctga

SEQ ID NO: 95424 - DNA, 17 bp, Arabidopsis thaliana
gacctggccaaaatccc

SEQ ID NO: 95425 - DNA, 17 bp, Arabidopsis thaliana
gacctgggttcggctca

SEQ ID NO: 95426 - DNA, 17 bp, Arabidopsis thaliana
gacctgggttcggctcc

SEQ ID NO: 95427 - DNA, 17 bp, Arabidopsis thaliana
gacctggtacggacaag

SEQ ID NO: 95428 - DNA, 17 bp, Arabidopsis thaliana
gacctggtgaagaaggt

SEQ ID NO: 95429 - DNA, 17 bp, Arabidopsis thaliana
gacctggtgaagatagt

SEQ ID NO: 95430 - DNA, 17 bp, Arabidopsis thaliana
gacctggtgaagatggt

SEQ ID NO: 95431 - DNA, 17 bp, Arabidopsis thaliana
gacctggttcatgacta

SEQ ID NO: 95432 - DNA, 17 bp, Arabidopsis thaliana
gacctggttgatcctgc

SEQ ID NO: 95433 - DNA, 17 bp, Arabidopsis thaliana
gacctgtacgacaacag

SEQ ID NO: 95434 - DNA, 17 bp, Arabidopsis thaliana
gacctgtactttcggtt

SEQ ID NO: 95435 - DNA, 17 bp, Arabidopsis thaliana
gacctgtcaaagattgc

SEQ ID NO: 95436 - DNA, 17 bp, Arabidopsis thaliana
gacctgtccgacgagca

SEQ ID NO: 95437 - DNA, 17 bp, Arabidopsis thaliana
gacctgtgtgccattcg

SEQ ID NO: 95438 - DNA, 17 bp, Arabidopsis thaliana
gacctgttacttttggc

SEQ ID NO: 95439 - DNA, 17 bp, Arabidopsis thaliana
gacctgttccctaagtt

SEQ ID NO: 95440 - DNA, 17 bp, Arabidopsis thaliana
gacctgttgaccttgac

SEQ ID NO: 95441 - DNA, 17 bp, Arabidopsis thaliana
gaccttaactaggtgat

SEQ ID NO: 95442 - DNA, 17 bp, Arabidopsis thaliana
gaccttaagtactttct

SEQ ID NO: 95443 - DNA, 17 bp, Arabidopsis thaliana
gaccttaagtacttttt

SEQ ID NO: 95444 - DNA, 17 bp, Arabidopsis thaliana
gaccttacaagatcggg

SEQ ID NO: 95445 - DNA, 17 bp, Arabidopsis thaliana
gaccttagctcagttgg

SEQ ID NO: 95446 - DNA, 17 bp, Arabidopsis thaliana
gaccttagtcagctcgc

SEQ ID NO: 95447 - DNA, 17 bp, Arabidopsis thaliana
gaccttagtgcaggtcg

SEQ ID NO: 95448 - DNA, 17 bp, Arabidopsis thaliana
gaccttagtgctcaggt

SEQ ID NO: 95449 - DNA, 17 bp, Arabidopsis thaliana
gaccttatcctctttgc

SEQ ID NO: 95450 - DNA, 17 bp, Arabidopsis thaliana
gaccttcctgattccat

SEQ ID NO: 95451 - DNA, 17 bp, Arabidopsis thaliana
gaccttgactgacctcg

SEQ ID NO: 95452 - DNA, 17 bp, Arabidopsis thaliana
gaccttgactgcaatgg

SEQ ID NO: 95453 - DNA, 17 bp, Arabidopsis thaliana
gaccttgatcttctgag

SEQ ID NO: 95454 - DNA, 17 bp, Arabidopsis thaliana
gaccttgatgacctccg

SEQ ID NO: 95455 - DNA, 17 bp, Arabidopsis thaliana
gaccttgccgcaccacg

SEQ ID NO: 95456 - DNA, 17 bp, Arabidopsis thaliana
gaccttggataaccggc

SEQ ID NO: 95457 - DNA, 17 bp, Arabidopsis thaliana
gaccttggtgcaggtcg

SEQ ID NO: 95458 - DNA, 17 bp, Arabidopsis thaliana
gaccttgtactatggac

SEQ ID NO: 95459 - DNA, 17 bp, Arabidopsis thaliana
gaccttgtgctatgctc

SEQ ID NO: 95460 - DNA, 17 bp, Arabidopsis thaliana
gaccttgttgcattaac

SEQ ID NO: 95461 - DNA, 17 bp, Arabidopsis thaliana
gaccttgttttggacag

SEQ ID NO: 95462 - DNA, 17 bp, Arabidopsis thaliana
gacctttaaatactttt

SEQ ID NO: 95463 - DNA, 17 bp, Arabidopsis thaliana
gacctttaagacttttt

SEQ ID NO: 95464 - DNA, 17 bp, Arabidopsis thaliana
gacctttaagtactttt

SEQ ID NO: 95465 - DNA, 17 bp, Arabidopsis thaliana
gacctttaggtactttt

SEQ ID NO: 95466 - DNA, 17 bp, Arabidopsis thaliana
gacctttaggttcagtt

SEQ ID NO: 95467 - DNA, 17 bp, Arabidopsis thaliana
gacctttgagcattccc

SEQ ID NO: 95468 - DNA, 17 bp, Arabidopsis thaliana
gacctttgatgacccgt

SEQ ID NO: 95469 - DNA, 17 bp, Arabidopsis thaliana
gacctttggatcatctc

SEQ ID NO: 95470 - DNA, 17 bp, Arabidopsis thaliana
gacctttggttaagatg

SEQ ID NO: 95471 - DNA, 17 bp, Arabidopsis thaliana
gacctttggtttgtacc

SEQ ID NO: 95472 - DNA, 17 bp, Arabidopsis thaliana
gacctttgtcgattcgt

SEQ ID NO: 95473 - DNA, 17 bp, Arabidopsis thaliana
gaccttttgtaatccgg

SEQ ID NO: 95474 - DNA, 17 bp, Arabidopsis thaliana
gacgaaaacgactatcc

SEQ ID NO: 95475 - DNA, 17 bp, Arabidopsis thaliana
gacgaaaacgattcgat

SEQ ID NO: 95476 - DNA, 17 bp, Arabidopsis thaliana
gacgaaacagtggcggt

SEQ ID NO: 95477 - DNA, 17 bp, Arabidopsis thaliana
gacgaaactaatattgc

SEQ ID NO: 95478 - DNA, 17 bp, Arabidopsis thaliana
gacgaaactctggaagg

SEQ ID NO: 95479 - DNA, 17 bp, Arabidopsis thaliana
gacgaaatcttgtgaag

SEQ ID NO: 95480 - DNA, 17 bp, Arabidopsis thaliana
gacgaacaacgacttgg

SEQ ID NO: 95481 - DNA, 17 bp, Arabidopsis thaliana
gacgaacaactgcgaaa

SEQ ID NO: 95482 - DNA, 17 bp, Arabidopsis thaliana
gacgaacgactggttga

SEQ ID NO: 95483 - DNA, 17 bp, Arabidopsis thaliana
gacgaacgcggactgcg

SEQ ID NO: 95484 - DNA, 17 bp, Arabidopsis thaliana
gacgaacggctataatt

SEQ ID NO: 95485 - DNA, 17 bp, Arabidopsis thaliana
gacgaactcagagatgt

SEQ ID NO: 95486 - DNA, 17 bp, Arabidopsis thaliana
gacgaagaggtggtggt

SEQ ID NO: 95487 - DNA, 17 bp, Arabidopsis thaliana
gacgaagcacacggcgg

SEQ ID NO: 95488 - DNA, 17 bp, Arabidopsis thaliana
gacgaagcacgcccatc

SEQ ID NO: 95489 - DNA, 17 bp, Arabidopsis thaliana
gacgaagctgttgaaca

SEQ ID NO: 95490 - DNA, 17 bp, Arabidopsis thaliana
gacgaagcttcgttcca

SEQ ID NO: 95491 - DNA, 17 bp, Arabidopsis thaliana
gacgaaggagactgcgc

SEQ ID NO: 95492 - DNA, 17 bp, Arabidopsis thaliana
gacgaaggagcagaggt

SEQ ID NO: 95493 - DNA, 17 bp, Arabidopsis thaliana
gacgaatccaggttcta

SEQ ID NO: 95494 - DNA, 17 bp, Arabidopsis thaliana
gacgaatcctcggacac

SEQ ID NO: 95495 - DNA, 17 bp, Arabidopsis thaliana
gacgaatcgtatggtgc

SEQ ID NO: 95496 - DNA, 17 bp, Arabidopsis thaliana
gacgaatctccctgttg

SEQ ID NO: 95497 - DNA, 17 bp, Arabidopsis thaliana
gacgaatctgactctag

SEQ ID NO: 95498 - DNA, 17 bp, Arabidopsis thaliana
gacgaattctcggaccc

SEQ ID NO: 95499 - DNA, 17 bp, Arabidopsis thaliana
gacgaattttggttcag

SEQ ID NO: 95500 - DNA, 17 bp, Arabidopsis thaliana
gacgacaacagaacaca

SEQ ID NO: 95501 - DNA, 17 bp, Arabidopsis thaliana
gacgacaagtgtcagac

SEQ ID NO: 95502 - DNA, 17 bp, Arabidopsis thaliana
gacgacaagtgtgatcc

SEQ ID NO: 95503 - DNA, 17 bp, Arabidopsis thaliana
gacgacaatacgatacc

SEQ ID NO: 95504 - DNA, 17 bp, Arabidopsis thaliana
gacgacaatacggttat

SEQ ID NO: 95505 - DNA, 17 bp, Arabidopsis thaliana
gacgacagagtgttccg

SEQ ID NO: 95506 - DNA, 17 bp, Arabidopsis thaliana
gacgacatattcacgct

SEQ ID NO: 95507 - DNA, 17 bp, Arabidopsis thaliana
gacgacatctccgcaat

SEQ ID NO: 95508 - DNA, 17 bp, Arabidopsis thaliana
gacgacccacggcgaat

SEQ ID NO: 95509 - DNA, 17 bp, Arabidopsis thaliana
gacgacccgggttcgtt

SEQ ID NO: 95510 - DNA, 17 bp, Arabidopsis thaliana
gacgacccgggtttccc

SEQ ID NO: 95511 - DNA, 17 bp, Arabidopsis thaliana
gacgaccgggttggcga

SEQ ID NO: 95512 - DNA, 17 bp, Arabidopsis thaliana
gacgaccgtaacggatg

SEQ ID NO: 95513 - DNA, 17 bp, Arabidopsis thaliana
gacgaccgtgatctttc

SEQ ID NO: 95514 - DNA, 17 bp, Arabidopsis thaliana
gacgaccgttaactggg

SEQ ID NO: 95515 - DNA, 17 bp, Arabidopsis thaliana
gacgacgaaactagggt

SEQ ID NO: 95516 - DNA, 17 bp, Arabidopsis thaliana
gacgacgaacctccgcc

SEQ ID NO: 95517 - DNA, 17 bp, Arabidopsis thaliana
gacgacgaacctcctga

SEQ ID NO: 95518 - DNA, 17 bp, Arabidopsis thaliana
gacgacgaagtatttgg

SEQ ID NO: 95519 - DNA, 17 bp, Arabidopsis thaliana
gacgacgacgacccatt

SEQ ID NO: 95520 - DNA, 17 bp, Arabidopsis thaliana
gacgacgacgacgggag

SEQ ID NO: 95521 - DNA, 17 bp, Arabidopsis thaliana
gacgacgacggctcgag

SEQ ID NO: 95522 - DNA, 17 bp, Arabidopsis thaliana
gacgacgagacacgcac

SEQ ID NO: 95523 - DNA, 17 bp, Arabidopsis thaliana
gacgacgagatattcgc

SEQ ID NO: 95524 - DNA, 17 bp, Arabidopsis thaliana
gacgacgagtggcagat

SEQ ID NO: 95525 - DNA, 17 bp, Arabidopsis thaliana
gacgacgatggtgatgg

SEQ ID NO: 95526 - DNA, 17 bp, Arabidopsis thaliana
gacgacgcttggagaag

SEQ ID NO: 95527 - DNA, 17 bp, Arabidopsis thaliana
gacgacgcttggagata

SEQ ID NO: 95528 - DNA, 17 bp, Arabidopsis thaliana
gacgacggaatcaacgg

SEQ ID NO: 95529 - DNA, 17 bp, Arabidopsis thaliana
gacgacggaatgaacga

SEQ ID NO: 95530 - DNA, 17 bp, Arabidopsis thaliana
gacgacggactgggaac

SEQ ID NO: 95531 - DNA, 17 bp, Arabidopsis thaliana
gacgacggagcggtcgc

SEQ ID NO: 95532 - DNA, 17 bp, Arabidopsis thaliana
gacgacggggcaggtgg

SEQ ID NO: 95533 - DNA, 17 bp, Arabidopsis thaliana
gacgacgtagttccggc

SEQ ID NO: 95534 - DNA, 17 bp, Arabidopsis thaliana
gacgacgtgccggagtg

SEQ ID NO: 95535 - DNA, 17 bp, Arabidopsis thaliana
gacgacgtggaaagact

SEQ ID NO: 95536 - DNA, 17 bp, Arabidopsis thaliana
gacgacgttcgtaccgg

SEQ ID NO: 95537 - DNA, 17 bp, Arabidopsis thaliana
gacgactataaaactca

SEQ ID NO: 95538 - DNA, 17 bp, Arabidopsis thaliana
gacgactatcagacttg

SEQ ID NO: 95539 - DNA, 17 bp, Arabidopsis thaliana
gacgactatttgtttag

SEQ ID NO: 95540 - DNA, 17 bp, Arabidopsis thaliana
gacgactctcggcaacg

SEQ ID NO: 95541 - DNA, 17 bp, Arabidopsis thaliana
gacgactctttgaagac

SEQ ID NO: 95542 - DNA, 17 bp, Arabidopsis thaliana
gacgactgaacttcact

SEQ ID NO: 95543 - DNA, 17 bp, Arabidopsis thaliana
gacgactgaattcccct

SEQ ID NO: 95544 - DNA, 17 bp, Arabidopsis thaliana
gacgactgaatttccct

SEQ ID NO: 95545 - DNA, 17 bp, Arabidopsis thaliana
gacgactgacgactgct

SEQ ID NO: 95546 - DNA, 17 bp, Arabidopsis thaliana
gacgactgagatatgtt

SEQ ID NO: 95547 - DNA, 17 bp, Arabidopsis thaliana
gacgactgcaggctagg

SEQ ID NO: 95548 - DNA, 17 bp, Arabidopsis thaliana
gacgactgccggcaact

SEQ ID NO: 95549 - DNA, 17 bp, Arabidopsis thaliana
gacgactgctacctatt

SEQ ID NO: 95550 - DNA, 17 bp, Arabidopsis thaliana
gacgactgcttccgtcg

SEQ ID NO: 95551 - DNA, 17 bp, Arabidopsis thaliana
gacgactgtggcggtgt

SEQ ID NO: 95552 - DNA, 17 bp, Arabidopsis thaliana
gacgacttagctgtgcg

SEQ ID NO: 95553 - DNA, 17 bp, Arabidopsis thaliana
gacgacttcctccatgg

SEQ ID NO: 95554 - DNA, 17 bp, Arabidopsis thaliana
gacgacttcgtctcctt

SEQ ID NO: 95555 - DNA, 17 bp, Arabidopsis thaliana
gacgacttctgcagttt

SEQ ID NO: 95556 - DNA, 17 bp, Arabidopsis thaliana
gacgacttgagcagtca

SEQ ID NO: 95557 - DNA, 17 bp, Arabidopsis thaliana
gacgacttgctcactat

SEQ ID NO: 95558 - DNA, 17 bp, Arabidopsis thaliana
gacgactttcttatttt

SEQ ID NO: 95559 - DNA, 17 bp, Arabidopsis thaliana
gacgactttgccattct

SEQ ID NO: 95560 - DNA, 17 bp, Arabidopsis thaliana
gacgactttgtctctgc

SEQ ID NO: 95561 - DNA, 17 bp, Arabidopsis thaliana
gacgagaagttgcgaag

SEQ ID NO: 95562 - DNA, 17 bp, Arabidopsis thaliana
gacgagacgtagagttc

SEQ ID NO: 95563 - DNA, 17 bp, Arabidopsis thaliana
gacgagagagaactcca

SEQ ID NO: 95564 - DNA, 17 bp, Arabidopsis thaliana
gacgagagccccgtcgt

SEQ ID NO: 95565 - DNA, 17 bp, Arabidopsis thaliana
gacgagagctaacctaa

SEQ ID NO: 95566 - DNA, 17 bp, Arabidopsis thaliana
gacgagagtgatcgcag

SEQ ID NO: 95567 - DNA, 17 bp, Arabidopsis thaliana
gacgagagtgttcgcag

SEQ ID NO: 95568 - DNA, 17 bp, Arabidopsis thaliana
gacgagatcattccgtc

SEQ ID NO: 95569 - DNA, 17 bp, Arabidopsis thaliana
gacgagccaccatcacg

SEQ ID NO: 95570 - DNA, 17 bp, Arabidopsis thaliana
gacgagccagtacgaag

SEQ ID NO: 95571 - DNA, 17 bp, Arabidopsis thaliana
gacgagccattatacgg

SEQ ID NO: 95572 - DNA, 17 bp, Arabidopsis thaliana
gacgagcccgtgtcgac

SEQ ID NO: 95573 - DNA, 17 bp, Arabidopsis thaliana
gacgagcgatttgtctg

SEQ ID NO: 95574 - DNA, 17 bp, Arabidopsis thaliana
gacgagcgggcaggtgg

SEQ ID NO: 95575 - DNA, 17 bp, Arabidopsis thaliana
gacgagctatttcctca

SEQ ID NO: 95576 - DNA, 17 bp, Arabidopsis thaliana
gacgagctgcttgagac

SEQ ID NO: 95577 - DNA, 17 bp, Arabidopsis thaliana
gacgaggaatcgtcgac

SEQ ID NO: 95578 - DNA, 17 bp, Arabidopsis thaliana
gacgaggagcgtcttca

SEQ ID NO: 95579 - DNA, 17 bp, Arabidopsis thaliana
gacgaggaggaagtagc

SEQ ID NO: 95580 - DNA, 17 bp, Arabidopsis thaliana
gacgaggtctttaccgt

SEQ ID NO: 95581 - DNA, 17 bp, Arabidopsis thaliana
gacgagtacaccagtgt

SEQ ID NO: 95582 - DNA, 17 bp, Arabidopsis thaliana
gacgagtccaacaacag

SEQ ID NO: 95583 - DNA, 17 bp, Arabidopsis thaliana
gacgagtcccacggaac

SEQ ID NO: 95584 - DNA, 17 bp, Arabidopsis thaliana
gacgagtgacttgatgg

SEQ ID NO: 95585 - DNA, 17 bp, Arabidopsis thaliana
gacgagttttctcgtcc

SEQ ID NO: 95586 - DNA, 17 bp, Arabidopsis thaliana
gacgataacattggtta

SEQ ID NO: 95587 - DNA, 17 bp, Arabidopsis thaliana
gacgataacattggttg

SEQ ID NO: 95588 - DNA, 17 bp, Arabidopsis thaliana
gacgataatctctcaag

SEQ ID NO: 95589 - DNA, 17 bp, Arabidopsis thaliana
gacgatactgtagggga

SEQ ID NO: 95590 - DNA, 17 bp, Arabidopsis thaliana
gacgatagattcaaaaa

SEQ ID NO: 95591 - DNA, 17 bp, Arabidopsis thaliana
gacgatagcaagtgccg

SEQ ID NO: 95592 - DNA, 17 bp, Arabidopsis thaliana
gacgatatctatgccgg

SEQ ID NO: 95593 - DNA, 17 bp, Arabidopsis thaliana
gacgatcggaatgtcta

SEQ ID NO: 95594 - DNA, 17 bp, Arabidopsis thaliana
gacgatgaagggtctga

SEQ ID NO: 95595 - DNA, 17 bp, Arabidopsis thaliana
gacgatgaagggtctgt

SEQ ID NO: 95596 - DNA, 17 bp, Arabidopsis thaliana
gacgatgacgacgggag

SEQ ID NO: 95597 - DNA, 17 bp, Arabidopsis thaliana
gacgatgactcggaagt

SEQ ID NO: 95598 - DNA, 17 bp, Arabidopsis thaliana
gacgatgatggcgggac

SEQ ID NO: 95599 - DNA, 17 bp, Arabidopsis thaliana
gacgatgatggtctgtg

SEQ ID NO: 95600 - DNA, 17 bp, Arabidopsis thaliana
gacgatgcttcaacagt

SEQ ID NO: 95601 - DNA, 17 bp, Arabidopsis thaliana
gacgatggaggcaggcc

SEQ ID NO: 95602 - DNA, 17 bp, Arabidopsis thaliana
gacgatgggaccggttt

SEQ ID NO: 95603 - DNA, 17 bp, Arabidopsis thaliana
gacgatgttgcccctgt

SEQ ID NO: 95604 - DNA, 17 bp, Arabidopsis thaliana
gacgatgttgcccttgt

SEQ ID NO: 95605 - DNA, 17 bp, Arabidopsis thaliana
gacgatgttgctcttgt

SEQ ID NO: 95606 - DNA, 17 bp, Arabidopsis thaliana
gacgatgtttgcgttcg

SEQ ID NO: 95607 - DNA, 17 bp, Arabidopsis thaliana
gacgattagggtttcga

SEQ ID NO: 95608 - DNA, 17 bp, Arabidopsis thaliana
gacgattagggtttcgc

SEQ ID NO: 95609 - DNA, 17 bp, Arabidopsis thaliana
gacgattatccgccaca

SEQ ID NO: 95610 - DNA, 17 bp, Arabidopsis thaliana
gacgattatctgccaca

SEQ ID NO: 95611 - DNA, 17 bp, Arabidopsis thaliana
gacgattattcgactgt

SEQ ID NO: 95612 - DNA, 17 bp, Arabidopsis thaliana
gacgattatttaggcgg

SEQ ID NO: 95613 - DNA, 17 bp, Arabidopsis thaliana
gacgattatttgttccg

SEQ ID NO: 95614 - DNA, 17 bp, Arabidopsis thaliana
gacgattcagcagtttt

SEQ ID NO: 95615 - DNA, 17 bp, Arabidopsis thaliana
gacgattcataaactag

SEQ ID NO: 95616 - DNA, 17 bp, Arabidopsis thaliana
gacgattccaagtccga

SEQ ID NO: 95617 - DNA, 17 bp, Arabidopsis thaliana
gacgattccaagtccgg

SEQ ID NO: 95618 - DNA, 17 bp, Arabidopsis thaliana
gacgattctactacgca

SEQ ID NO: 95619 - DNA, 17 bp, Arabidopsis thaliana
gacgattggttggactg

SEQ ID NO: 95620 - DNA, 17 bp, Arabidopsis thaliana
gacgattgtgtccgccc

SEQ ID NO: 95621 - DNA, 17 bp, Arabidopsis thaliana
gacgatttagatttcag

SEQ ID NO: 95622 - DNA, 17 bp, Arabidopsis thaliana
gacgatttcagttccag

SEQ ID NO: 95623 - DNA, 17 bp, Arabidopsis thaliana
gacgatttccactcctg

SEQ ID NO: 95624 - DNA, 17 bp, Arabidopsis thaliana
gacgatttcggtttttg

SEQ ID NO: 95625 - DNA, 17 bp, Arabidopsis thaliana
gacgatttctcagtcta

SEQ ID NO: 95626 - DNA, 17 bp, Arabidopsis thaliana
gacgatttctcttgcat

SEQ ID NO: 95627 - DNA, 17 bp, Arabidopsis thaliana
gacgatttgaccgggag

SEQ ID NO: 95628 - DNA, 17 bp, Arabidopsis thaliana
gacgatttgagtgagcc

SEQ ID NO: 95629 - DNA, 17 bp, Arabidopsis thaliana
gacgatttgcgaggaac

SEQ ID NO: 95630 - DNA, 17 bp, Arabidopsis thaliana
gacgattttagcctttc

SEQ ID NO: 95631 - DNA, 17 bp, Arabidopsis thaliana
gacgattttccggtgac

SEQ ID NO: 95632 - DNA, 17 bp, Arabidopsis thaliana
gacgcaaaccagtaagt

SEQ ID NO: 95633 - DNA, 17 bp, Arabidopsis thaliana
gacgcaaacttggtccg

SEQ ID NO: 95634 - DNA, 17 bp, Arabidopsis thaliana
gacgcaaccaaggtatg

SEQ ID NO: 95635 - DNA, 17 bp, Arabidopsis thaliana
gacgcaccgaccgtcgg

SEQ ID NO: 95636 - DNA, 17 bp, Arabidopsis thaliana
gacgcaccgataacaaa

SEQ ID NO: 95637 - DNA, 17 bp, Arabidopsis thaliana
gacgcaccgctggtgta

SEQ ID NO: 95638 - DNA, 17 bp, Arabidopsis thaliana
gacgcacgggaatttat

SEQ ID NO: 95639 - DNA, 17 bp, Arabidopsis thaliana
gacgcactttgtcgcta

SEQ ID NO: 95640 - DNA, 17 bp, Arabidopsis thaliana
gacgcaggaaatagtcg

SEQ ID NO: 95641 - DNA, 17 bp, Arabidopsis thaliana
gacgcagggcagatttc

SEQ ID NO: 95642 - DNA, 17 bp, Arabidopsis thaliana
gacgcaggggtttggtg

SEQ ID NO: 95643 - DNA, 17 bp, Arabidopsis thaliana
gacgcaggtgattgtgc

SEQ ID NO: 95644 - DNA, 17 bp, Arabidopsis thaliana
gacgcaggtttatgtcg

SEQ ID NO: 95645 - DNA, 17 bp, Arabidopsis thaliana
gacgcagttggacacga

SEQ ID NO: 95646 - DNA, 17 bp, Arabidopsis thaliana
gacgcagttttgtcact

SEQ ID NO: 95647 - DNA, 17 bp, Arabidopsis thaliana
gacgcatggacgagttt

SEQ ID NO: 95648 - DNA, 17 bp, Arabidopsis thaliana
gacgcatgttcttttgg

SEQ ID NO: 95649 - DNA, 17 bp, Arabidopsis thaliana
gacgcattgactcgagg

SEQ ID NO: 95650 - DNA, 17 bp, Arabidopsis thaliana
gacgccaatcgctaaca

SEQ ID NO: 95651 - DNA, 17 bp, Arabidopsis thaliana
gacgccaccaccagctc

SEQ ID NO: 95652 - DNA, 17 bp, Arabidopsis thaliana
gacgccactttgtgaaa

SEQ ID NO: 95653 - DNA, 17 bp, Arabidopsis thaliana
gacgccaggttgtttta

SEQ ID NO: 95654 - DNA, 17 bp, Arabidopsis thaliana
gacgccatggctatttt

SEQ ID NO: 95655 - DNA, 17 bp, Arabidopsis thaliana
gacgcccaggcagacgg

SEQ ID NO: 95656 - DNA, 17 bp, Arabidopsis thaliana
gacgccctcgttcgacg

SEQ ID NO: 95657 - DNA, 17 bp, Arabidopsis thaliana
gacgccgcttaggggtt

SEQ ID NO: 95658 - DNA, 17 bp, Arabidopsis thaliana
gacgccggcaaggagag

SEQ ID NO: 95659 - DNA, 17 bp, Arabidopsis thaliana
gacgccggcgaaggtgc

SEQ ID NO: 95660 - DNA, 17 bp, Arabidopsis thaliana
gacgccggcgttttgcg

SEQ ID NO: 95661 - DNA, 17 bp, Arabidopsis thaliana
gacgccggtcatgttga

SEQ ID NO: 95662 - DNA, 17 bp, Arabidopsis thaliana
gacgccgtgaagttata

SEQ ID NO: 95663 - DNA, 17 bp, Arabidopsis thaliana
gacgcctagacactctt

SEQ ID NO: 95664 - DNA, 17 bp, Arabidopsis thaliana
gacgcctcaggagcggc

SEQ ID NO: 95665 - DNA, 17 bp, Arabidopsis thaliana
gacgcgaattaggacca

SEQ ID NO: 95666 - DNA, 17 bp, Arabidopsis thaliana
gacgcgactgaaaccag

SEQ ID NO: 95667 - DNA, 17 bp, Arabidopsis thaliana
gacgcgactttcagacg

SEQ ID NO: 95668 - DNA, 17 bp, Arabidopsis thaliana
gacgcgagttctatcgg

SEQ ID NO: 95669 - DNA, 17 bp, Arabidopsis thaliana
gacgcgattcagttccg

SEQ ID NO: 95670 - DNA, 17 bp, Arabidopsis thaliana
gacgcgattcggttccg

SEQ ID NO: 95671 - DNA, 17 bp, Arabidopsis thaliana
gacgcgattgtcctacg

SEQ ID NO: 95672 - DNA, 17 bp, Arabidopsis thaliana
gacgcgattgtcctagg

SEQ ID NO: 95673 - DNA, 17 bp, Arabidopsis thaliana
gacgcggattacgatgg

SEQ ID NO: 95674 - DNA, 17 bp, Arabidopsis thaliana
gacgcggattacggcgg

SEQ ID NO: 95675 - DNA, 17 bp, Arabidopsis thaliana
gacgcggattacggtgg

SEQ ID NO: 95676 - DNA, 17 bp, Arabidopsis thaliana
gacgcggattggggcgg

SEQ ID NO: 95677 - DNA, 17 bp, Arabidopsis thaliana
gacgcggatttcggtgg

SEQ ID NO: 95678 - DNA, 17 bp, Arabidopsis thaliana
gacgcggctcagcggag

SEQ ID NO: 95679 - DNA, 17 bp, Arabidopsis thaliana
gacgcggctcggcggag

SEQ ID NO: 95680 - DNA, 17 bp, Arabidopsis thaliana
gacgcgtcagagccaag

SEQ ID NO: 95681 - DNA, 17 bp, Arabidopsis thaliana
gacgcgtggtcttgctc

SEQ ID NO: 95682 - DNA, 17 bp, Arabidopsis thaliana
gacgcgttgaggcatag

SEQ ID NO: 95683 - DNA, 17 bp, Arabidopsis thaliana
gacgctaagagagaaag

SEQ ID NO: 95684 - DNA, 17 bp, Arabidopsis thaliana
gacgctaaggcgcttat

SEQ ID NO: 95685 - DNA, 17 bp, Arabidopsis thaliana
gacgctaatgatgttgc

SEQ ID NO: 95686 - DNA, 17 bp, Arabidopsis thaliana
gacgctctgtttttgtg

SEQ ID NO: 95687 - DNA, 17 bp, Arabidopsis thaliana
gacgctgaaaatcacgg

SEQ ID NO: 95688 - DNA, 17 bp, Arabidopsis thaliana
gacgctgaatgcgctgc

SEQ ID NO: 95689 - DNA, 17 bp, Arabidopsis thaliana
gacgctgctgatgtttg

SEQ ID NO: 95690 - DNA, 17 bp, Arabidopsis thaliana
gacgctggtccgcggta

SEQ ID NO: 95691 - DNA, 17 bp, Arabidopsis thaliana
gacgctggttctgctga

SEQ ID NO: 95692 - DNA, 17 bp, Arabidopsis thaliana
gacgcttcataggggtt

SEQ ID NO: 95693 - DNA, 17 bp, Arabidopsis thaliana
gacgcttctgattcggg

SEQ ID NO: 95694 - DNA, 17 bp, Arabidopsis thaliana
gacgcttctgcccttcc

SEQ ID NO: 95695 - DNA, 17 bp, Arabidopsis thaliana
gacgcttgcagagagaa

SEQ ID NO: 95696 - DNA, 17 bp, Arabidopsis thaliana
gacgcttgcgaacaaag

SEQ ID NO: 95697 - DNA, 17 bp, Arabidopsis thaliana
gacgctttacatacctg

SEQ ID NO: 95698 - DNA, 17 bp, Arabidopsis thaliana
gacgctttgaacgatca

SEQ ID NO: 95699 - DNA, 17 bp, Arabidopsis thaliana
gacgctttggccgagtg

SEQ ID NO: 95700 - DNA, 17 bp, Arabidopsis thaliana
gacgctttggtggtaca

SEQ ID NO: 95701 - DNA, 17 bp, Arabidopsis thaliana
gacggaaaaatcacggg

SEQ ID NO: 95702 - DNA, 17 bp, Arabidopsis thaliana
gacggaaattaccgcgt

SEQ ID NO: 95703 - DNA, 17 bp, Arabidopsis thaliana
gacggaacactggatat

SEQ ID NO: 95704 - DNA, 17 bp, Arabidopsis thaliana
gacggaacggggttgga

SEQ ID NO: 95705 - DNA, 17 bp, Arabidopsis thaliana
gacggaacttggtttgg

SEQ ID NO: 95706 - DNA, 17 bp, Arabidopsis thaliana
gacggaagcgaaagaca

SEQ ID NO: 95707 - DNA, 17 bp, Arabidopsis thaliana
gacggaagggcaccacc

SEQ ID NO: 95708 - DNA, 17 bp, Arabidopsis thaliana
gacggaagggcctgttg

SEQ ID NO: 95709 - DNA, 17 bp, Arabidopsis thaliana
gacggaagtccaaacga

SEQ ID NO: 95710 - DNA, 17 bp, Arabidopsis thaliana
gacggaagtttcgacaa

SEQ ID NO: 95711 - DNA, 17 bp, Arabidopsis thaliana
gacggaatcttatggcg

SEQ ID NO: 95712 - DNA, 17 bp, Arabidopsis thaliana
gacggaatgcgaggtgc

SEQ ID NO: 95713 - DNA, 17 bp, Arabidopsis thaliana
gacggacacagatcgtt

SEQ ID NO: 95714 - DNA, 17 bp, Arabidopsis thaliana
gacggacagatcggtcg

SEQ ID NO: 95715 - DNA, 17 bp, Arabidopsis thaliana
gacggaccgggcctaag

SEQ ID NO: 95716 - DNA, 17 bp, Arabidopsis thaliana
gacggacctaaatgggg

SEQ ID NO: 95717 - DNA, 17 bp, Arabidopsis thaliana
gacggacctggcctaag

SEQ ID NO: 95718 - DNA, 17 bp, Arabidopsis thaliana
gacggacgcggattacg

SEQ ID NO: 95719 - DNA, 17 bp, Arabidopsis thaliana
gacggacgtggattacg

SEQ ID NO: 95720 - DNA, 17 bp, Arabidopsis thaliana
gacggactgcgcggttt

SEQ ID NO: 95721 - DNA, 17 bp, Arabidopsis thaliana
gacggactgggaacgga

SEQ ID NO: 95722 - DNA, 17 bp, Arabidopsis thaliana
gacggactgggaacggc

SEQ ID NO: 95723 - DNA, 17 bp, Arabidopsis thaliana
gacggactgtgaacggc

SEQ ID NO: 95724 - DNA, 17 bp, Arabidopsis thaliana
gacggactttggctaca

SEQ ID NO: 95725 - DNA, 17 bp, Arabidopsis thaliana
gacggagaattagggtt

SEQ ID NO: 95726 - DNA, 17 bp, Arabidopsis thaliana
gacggagaggattggag

SEQ ID NO: 95727 - DNA, 17 bp, Arabidopsis thaliana
gacggagagtttaattg

SEQ ID NO: 95728 - DNA, 17 bp, Arabidopsis thaliana
gacggagatccggatca

SEQ ID NO: 95729 - DNA, 17 bp, Arabidopsis thaliana
gacggagattctgattt

SEQ ID NO: 95730 - DNA, 17 bp, Arabidopsis thaliana
gacggaggaaaaggcga

SEQ ID NO: 95731 - DNA, 17 bp, Arabidopsis thaliana
gacggagggattggctt

SEQ ID NO: 95732 - DNA, 17 bp, Arabidopsis thaliana
gacggaggtggtggcgg

SEQ ID NO: 95733 - DNA, 17 bp, Arabidopsis thaliana
gacggatacgctcagct

SEQ ID NO: 95734 - DNA, 17 bp, Arabidopsis thaliana
gacggatatgttgtggt

SEQ ID NO: 95735 - DNA, 17 bp, Arabidopsis thaliana
gacggatcacatggcct

SEQ ID NO: 95736 - DNA, 17 bp, Arabidopsis thaliana
gacggatcatatcagcc

SEQ ID NO: 95737 - DNA, 17 bp, Arabidopsis thaliana
gacggatccctcgatga

SEQ ID NO: 95738 - DNA, 17 bp, Arabidopsis thaliana
gacggatcgcatggcct

SEQ ID NO: 95739 - DNA, 17 bp, Arabidopsis thaliana
gacggatcggatcggcc

SEQ ID NO: 95740 - DNA, 17 bp, Arabidopsis thaliana
gacggatcgtgccacgt

SEQ ID NO: 95741 - DNA, 17 bp, Arabidopsis thaliana
gacggatctctatggtt

SEQ ID NO: 95742 - DNA, 17 bp, Arabidopsis thaliana
gacggatgagacggatg

SEQ ID NO: 95743 - DNA, 17 bp, Arabidopsis thaliana
gacggatgtagccaagt

SEQ ID NO: 95744 - DNA, 17 bp, Arabidopsis thaliana
gacggatgtgattgtcg

SEQ ID NO: 95745 - DNA, 17 bp, Arabidopsis thaliana
gacggattaatggacat

SEQ ID NO: 95746 - DNA, 17 bp, Arabidopsis thaliana
gacggattggcgggacg

SEQ ID NO: 95747 - DNA, 17 bp, Arabidopsis thaliana
gacggatttgcgagggt

SEQ ID NO: 95748 - DNA, 17 bp, Arabidopsis thaliana
gacggatttggagtgac

SEQ ID NO: 95749 - DNA, 17 bp, Arabidopsis thaliana
gacggatttggcaggac

SEQ ID NO: 95750 - DNA, 17 bp, Arabidopsis thaliana
gacggatttgttatcga

SEQ ID NO: 95751 - DNA, 17 bp, Arabidopsis thaliana
gacggcaatcgccttca

SEQ ID NO: 95752 - DNA, 17 bp, Arabidopsis thaliana
gacggcatagccgacca

SEQ ID NO: 95753 - DNA, 17 bp, Arabidopsis thaliana
gacggcatgggattcaa

SEQ ID NO: 95754 - DNA, 17 bp, Arabidopsis thaliana
gacggcgacgaccgatc

SEQ ID NO: 95755 - DNA, 17 bp, Arabidopsis thaliana
gacggcgccaaatttga

SEQ ID NO: 95756 - DNA, 17 bp, Arabidopsis thaliana
gacggcggcaccggtcc

SEQ ID NO: 95757 - DNA, 17 bp, Arabidopsis thaliana
gacggcggcggtggttg

SEQ ID NO: 95758 - DNA, 17 bp, Arabidopsis thaliana
gacggcggctcagatcg

SEQ ID NO: 95759 - DNA, 17 bp, Arabidopsis thaliana
gacggcgggtcgacggc

SEQ ID NO: 95760 - DNA, 17 bp, Arabidopsis thaliana
gacggcggtgctcacat

SEQ ID NO: 95761 - DNA, 17 bp, Arabidopsis thaliana
gacggcggttaagtacc

SEQ ID NO: 95762 - DNA, 17 bp, Arabidopsis thaliana
gacggcggttaggtcgg

SEQ ID NO: 95763 - DNA, 17 bp, Arabidopsis thaliana
gacggctacaacacagg

SEQ ID NO: 95764 - DNA, 17 bp, Arabidopsis thaliana
gacggctatactgtgga

SEQ ID NO: 95765 - DNA, 17 bp, Arabidopsis thaliana
gacggctcacatggttg

SEQ ID NO: 95766 - DNA, 17 bp, Arabidopsis thaliana
gacggctcagttttctc

SEQ ID NO: 95767 - DNA, 17 bp, Arabidopsis thaliana
gacggctcgtttgagca

SEQ ID NO: 95768 - DNA, 17 bp, Arabidopsis thaliana
gacggctcgtttgagcg

SEQ ID NO: 95769 - DNA, 17 bp, Arabidopsis thaliana
gacggctgagtttgttt

SEQ ID NO: 95770 - DNA, 17 bp, Arabidopsis thaliana
gacggctgatggatatc

SEQ ID NO: 95771 - DNA, 17 bp, Arabidopsis thaliana
gacggcttattgttatg

SEQ ID NO: 95772 - DNA, 17 bp, Arabidopsis thaliana
gacggcttgtcccttcg

SEQ ID NO: 95773 - DNA, 17 bp, Arabidopsis thaliana
gacgggaagtggtgttt

SEQ ID NO: 95774 - DNA, 17 bp, Arabidopsis thaliana
gacgggaatgtgacacg

SEQ ID NO: 95775 - DNA, 17 bp, Arabidopsis thaliana
gacgggaccgaaaaggt

SEQ ID NO: 95776 - DNA, 17 bp, Arabidopsis thaliana
gacgggagaaggggtgc

SEQ ID NO: 95777 - DNA, 17 bp, Arabidopsis thaliana
gacgggaggctagacac

SEQ ID NO: 95778 - DNA, 17 bp, Arabidopsis thaliana
gacgggagtgttgtgtg

SEQ ID NO: 95779 - DNA, 17 bp, Arabidopsis thaliana
gacgggatacctaggcg

SEQ ID NO: 95780 - DNA, 17 bp, Arabidopsis thaliana
gacgggatcataatgtt

SEQ ID NO: 95781 - DNA, 17 bp, Arabidopsis thaliana
gacgggatgcccagacg

SEQ ID NO: 95782 - DNA, 17 bp, Arabidopsis thaliana
gacgggccgatggaccg

SEQ ID NO: 95783 - DNA, 17 bp, Arabidopsis thaliana
gacgggccgctcatggg

SEQ ID NO: 95784 - DNA, 17 bp, Arabidopsis thaliana
gacgggcctcagatagt

SEQ ID NO: 95785 - DNA, 17 bp, Arabidopsis thaliana
gacggggattttaatct

SEQ ID NO: 95786 - DNA, 17 bp, Arabidopsis thaliana
gacgggggcccgcacaa

SEQ ID NO: 95787 - DNA, 17 bp, Arabidopsis thaliana
gacggggtttgcgagcc

SEQ ID NO: 95788 - DNA, 17 bp, Arabidopsis thaliana
gacgggtgtagctggcg

SEQ ID NO: 95789 - DNA, 17 bp, Arabidopsis thaliana
gacgggttaggcaggat

SEQ ID NO: 95790 - DNA, 17 bp, Arabidopsis thaliana
gacgggttcggaactgg

SEQ ID NO: 95791 - DNA, 17 bp, Arabidopsis thaliana
gacgggttcgtgggcag

SEQ ID NO: 95792 - DNA, 17 bp, Arabidopsis thaliana
gacgggttgacgggagg

SEQ ID NO: 95793 - DNA, 17 bp, Arabidopsis thaliana
gacgggttggcaggacg

SEQ ID NO: 95794 - DNA, 17 bp, Arabidopsis thaliana
gacgggttggcggacgg

SEQ ID NO: 95795 - DNA, 17 bp, Arabidopsis thaliana
gacgggttggcgggacg

SEQ ID NO: 95796 - DNA, 17 bp, Arabidopsis thaliana
gacgggttgggatccat

SEQ ID NO: 95797 - DNA, 17 bp, Arabidopsis thaliana
gacgggtttggatcgat

SEQ ID NO: 95798 - DNA, 17 bp, Arabidopsis thaliana
gacgggtttggatggat

SEQ ID NO: 95799 - DNA, 17 bp, Arabidopsis thaliana
gacgggtttggcaggac

SEQ ID NO: 95800 - DNA, 17 bp, Arabidopsis thaliana
gacgggtttggcggaac

SEQ ID NO: 95801 - DNA, 17 bp, Arabidopsis thaliana
gacgggtttggcgggac

SEQ ID NO: 95802 - DNA, 17 bp, Arabidopsis thaliana
gacgggtttggcgggct

SEQ ID NO: 95803 - DNA, 17 bp, Arabidopsis thaliana
gacgggttttgcggaac

SEQ ID NO: 95804 - DNA, 17 bp, Arabidopsis thaliana
gacgggttttgcgggac

SEQ ID NO: 95805 - DNA, 17 bp, Arabidopsis thaliana
gacggtaaggatttgga

SEQ ID NO: 95806 - DNA, 17 bp, Arabidopsis thaliana
gacggtactgtagacgg

SEQ ID NO: 95807 - DNA, 17 bp, Arabidopsis thaliana
gacggtataccacaagt

SEQ ID NO: 95808 - DNA, 17 bp, Arabidopsis thaliana
gacggtataccaggggg

SEQ ID NO: 95809 - DNA, 17 bp, Arabidopsis thaliana
gacggtatactacgggt

SEQ ID NO: 95810 - DNA, 17 bp, Arabidopsis thaliana
gacggtccaaacggttg

SEQ ID NO: 95811 - DNA, 17 bp, Arabidopsis thaliana
gacggtccacaattagc

SEQ ID NO: 95812 - DNA, 17 bp, Arabidopsis thaliana
gacggtccacatggttg

SEQ ID NO: 95813 - DNA, 17 bp, Arabidopsis thaliana
gacggtccgcctttggt

SEQ ID NO: 95814 - DNA, 17 bp, Arabidopsis thaliana
gacggtcctatcgcagt

SEQ ID NO: 95815 - DNA, 17 bp, Arabidopsis thaliana
gacggtgaagaataagt

SEQ ID NO: 95816 - DNA, 17 bp, Arabidopsis thaliana
gacggtgacaacggtgg

SEQ ID NO: 95817 - DNA, 17 bp, Arabidopsis thaliana
gacggtgatgtcacttg

SEQ ID NO: 95818 - DNA, 17 bp, Arabidopsis thaliana
gacggtggtcaggagac

SEQ ID NO: 95819 - DNA, 17 bp, Arabidopsis thaliana
gacggtggtgacggccg

SEQ ID NO: 95820 - DNA, 17 bp, Arabidopsis thaliana
gacggtgtctttgattt

SEQ ID NO: 95821 - DNA, 17 bp, Arabidopsis thaliana
gacggttacaggagcat

SEQ ID NO: 95822 - DNA, 17 bp, Arabidopsis thaliana
gacggttccacgagatc

SEQ ID NO: 95823 - DNA, 17 bp, Arabidopsis thaliana
gacggttcgtttccggc

SEQ ID NO: 95824 - DNA, 17 bp, Arabidopsis thaliana
gacggttgagttgctga

SEQ ID NO: 95825 - DNA, 17 bp, Arabidopsis thaliana
gacggttgcaatgattc

SEQ ID NO: 95826 - DNA, 17 bp, Arabidopsis thaliana
gacggttgcagtgattc

SEQ ID NO: 95827 - DNA, 17 bp, Arabidopsis thaliana
gacggttgcggtgttaa

SEQ ID NO: 95828 - DNA, 17 bp, Arabidopsis thaliana
gacggttgcggtttcaa

SEQ ID NO: 95829 - DNA, 17 bp, Arabidopsis thaliana
gacggttgcggttttaa

SEQ ID NO: 95830 - DNA, 17 bp, Arabidopsis thaliana
gacggttgtatcgtcgg

SEQ ID NO: 95831 - DNA, 17 bp, Arabidopsis thaliana
gacggtttctgtgtgat

SEQ ID NO: 95832 - DNA, 17 bp, Arabidopsis thaliana
gacggttttgttcgctt

SEQ ID NO: 95833 - DNA, 17 bp, Arabidopsis thaliana
gacgtaagtcagccgca

SEQ ID NO: 95834 - DNA, 17 bp, Arabidopsis thaliana
gacgtagcgatcaatca

SEQ ID NO: 95835 - DNA, 17 bp, Arabidopsis thaliana
gacgtagcggaccgagt

SEQ ID NO: 95836 - DNA, 17 bp, Arabidopsis thaliana
gacgtagcgtttgaggc

SEQ ID NO: 95837 - DNA, 17 bp, Arabidopsis thaliana
gacgtaggattccaaat

SEQ ID NO: 95838 - DNA, 17 bp, Arabidopsis thaliana
gacgtaggcgaaggttt

SEQ ID NO: 95839 - DNA, 17 bp, Arabidopsis thaliana
gacgtagttggattcct

SEQ ID NO: 95840 - DNA, 17 bp, Arabidopsis thaliana
gacgtattggttttctc

SEQ ID NO: 95841 - DNA, 17 bp, Arabidopsis thaliana
gacgtcaagtccgcatg

SEQ ID NO: 95842 - DNA, 17 bp, Arabidopsis thaliana
gacgtcagagaacttgg

SEQ ID NO: 95843 - DNA, 17 bp, Arabidopsis thaliana
gacgtcatctttagcag

SEQ ID NO: 95844 - DNA, 17 bp, Arabidopsis thaliana
gacgtccagtcgatgaa

SEQ ID NO: 95845 - DNA, 17 bp, Arabidopsis thaliana
gacgtccatttaagctc

SEQ ID NO: 95846 - DNA, 17 bp, Arabidopsis thaliana
gacgtcccggtcccagc

SEQ ID NO: 95847 - DNA, 17 bp, Arabidopsis thaliana
gacgtcgaatccgccaa

SEQ ID NO: 95848 - DNA, 17 bp, Arabidopsis thaliana
gacgtcgacgggggcct

SEQ ID NO: 95849 - DNA, 17 bp, Arabidopsis thaliana
gacgtcgagtatgagcc

SEQ ID NO: 95850 - DNA, 17 bp, Arabidopsis thaliana
gacgtcgataggtttta

SEQ ID NO: 95851 - DNA, 17 bp, Arabidopsis thaliana
gacgtcgatcgggctct

SEQ ID NO: 95852 - DNA, 17 bp, Arabidopsis thaliana
gacgtcgcagggttttt

SEQ ID NO: 95853 - DNA, 17 bp, Arabidopsis thaliana
gacgtcgccgggggcct

SEQ ID NO: 95854 - DNA, 17 bp, Arabidopsis thaliana
gacgtcgcgagaagtcc

SEQ ID NO: 95855 - DNA, 17 bp, Arabidopsis thaliana
gacgtcgcgggcggcga

SEQ ID NO: 95856 - DNA, 17 bp, Arabidopsis thaliana
gacgtcgctcccgtgat

SEQ ID NO: 95857 - DNA, 17 bp, Arabidopsis thaliana
gacgtcgctgccgtgat

SEQ ID NO: 95858 - DNA, 17 bp, Arabidopsis thaliana
gacgtcggcgggggcct

SEQ ID NO: 95859 - DNA, 17 bp, Arabidopsis thaliana
gacgtctcaagcaaggg

SEQ ID NO: 95860 - DNA, 17 bp, Arabidopsis thaliana
gacgtctgcctgggcgt

SEQ ID NO: 95861 - DNA, 17 bp, Arabidopsis thaliana
gacgtctgcctgggtgt

SEQ ID NO: 95862 - DNA, 17 bp, Arabidopsis thaliana
gacgtcttcagtgatca

SEQ ID NO: 95863 - DNA, 17 bp, Arabidopsis thaliana
gacgtcttcggcgttcg

SEQ ID NO: 95864 - DNA, 17 bp, Arabidopsis thaliana
gacgtcttgccaaaccc

SEQ ID NO: 95865 - DNA, 17 bp, Arabidopsis thaliana
gacgtgaaaccgtagct

SEQ ID NO: 95866 - DNA, 17 bp, Arabidopsis thaliana
gacgtgacaacatacgg

SEQ ID NO: 95867 - DNA, 17 bp, Arabidopsis thaliana
gacgtgacacgtgctga

SEQ ID NO: 95868 - DNA, 17 bp, Arabidopsis thaliana
gacgtgacatcacacca

SEQ ID NO: 95869 - DNA, 17 bp, Arabidopsis thaliana
gacgtgacgcttgtgag

SEQ ID NO: 95870 - DNA, 17 bp, Arabidopsis thaliana
gacgtgacgtagagttc

SEQ ID NO: 95871 - DNA, 17 bp, Arabidopsis thaliana
gacgtgatctccgagat

SEQ ID NO: 95872 - DNA, 17 bp, Arabidopsis thaliana
gacgtgattttctccga

SEQ ID NO: 95873 - DNA, 17 bp, Arabidopsis thaliana
gacgtgcattggtcggc

SEQ ID NO: 95874 - DNA, 17 bp, Arabidopsis thaliana
gacgtgccatcttctga

SEQ ID NO: 95875 - DNA, 17 bp, Arabidopsis thaliana
gacgtgcgattcaacta

SEQ ID NO: 95876 - DNA, 17 bp, Arabidopsis thaliana
gacgtgcgcgtgaaaca

SEQ ID NO: 95877 - DNA, 17 bp, Arabidopsis thaliana
gacgtgcggtgctcttc

SEQ ID NO: 95878 - DNA, 17 bp, Arabidopsis thaliana
gacgtgcggttcaactg

SEQ ID NO: 95879 - DNA, 17 bp, Arabidopsis thaliana
gacgtgctgttcgtttg

SEQ ID NO: 95880 - DNA, 17 bp, Arabidopsis thaliana
gacgtgcttgtcgctaa

SEQ ID NO: 95881 - DNA, 17 bp, Arabidopsis thaliana
gacgtggaaagactcgt

SEQ ID NO: 95882 - DNA, 17 bp, Arabidopsis thaliana
gacgtggattagggtaa

SEQ ID NO: 95883 - DNA, 17 bp, Arabidopsis thaliana
gacgtggcacgtgctga

SEQ ID NO: 95884 - DNA, 17 bp, Arabidopsis thaliana
gacgtggcaggtgctct

SEQ ID NO: 95885 - DNA, 17 bp, Arabidopsis thaliana
gacgtggcgcaccgact

SEQ ID NO: 95886 - DNA, 17 bp, Arabidopsis thaliana
gacgtggcggctgacgg

SEQ ID NO: 95887 - DNA, 17 bp, Arabidopsis thaliana
gacgtggcggttgacgg

SEQ ID NO: 95888 - DNA, 17 bp, Arabidopsis thaliana
gacgtggctgtatctta

SEQ ID NO: 95889 - DNA, 17 bp, Arabidopsis thaliana
gacgtgggtggttcgcc

SEQ ID NO: 95890 - DNA, 17 bp, Arabidopsis thaliana
gacgtggtcggcttgtc

SEQ ID NO: 95891 - DNA, 17 bp, Arabidopsis thaliana
gacgtgtccaacaacaa

SEQ ID NO: 95892 - DNA, 17 bp, Arabidopsis thaliana
gacgtgtcctaagatga

SEQ ID NO: 95893 - DNA, 17 bp, Arabidopsis thaliana
gacgtgtcggctgcttt

SEQ ID NO: 95894 - DNA, 17 bp, Arabidopsis thaliana
gacgtgtcggcttttgt

SEQ ID NO: 95895 - DNA, 17 bp, Arabidopsis thaliana
gacgtgtcggtcgagag

SEQ ID NO: 95896 - DNA, 17 bp, Arabidopsis thaliana
gacgtgtctacgcttga

SEQ ID NO: 95897 - DNA, 17 bp, Arabidopsis thaliana
gacgtgtgacatatgcg

SEQ ID NO: 95898 - DNA, 17 bp, Arabidopsis thaliana
gacgtgtgacatgtgcg

SEQ ID NO: 95899 - DNA, 17 bp, Arabidopsis thaliana
gacgtgtgcctctgatg

SEQ ID NO: 95900 - DNA, 17 bp, Arabidopsis thaliana
gacgtgtgggacctcct

SEQ ID NO: 95901 - DNA, 17 bp, Arabidopsis thaliana
gacgtgtggtttgttca

SEQ ID NO: 95902 - DNA, 17 bp, Arabidopsis thaliana
gacgtgtggtttgttct

SEQ ID NO: 95903 - DNA, 17 bp, Arabidopsis thaliana
gacgtgtgtcgaatcca

SEQ ID NO: 95904 - DNA, 17 bp, Arabidopsis thaliana
gacgtgtgtggttcgcc

SEQ ID NO: 95905 - DNA, 17 bp, Arabidopsis thaliana
gacgtgttgtgctgagc

SEQ ID NO: 95906 - DNA, 17 bp, Arabidopsis thaliana
gacgtgtttccaggtgt

SEQ ID NO: 95907 - DNA, 17 bp, Arabidopsis thaliana
gacgtgtttctgagact

SEQ ID NO: 95908 - DNA, 17 bp, Arabidopsis thaliana
gacgttaaatcgattaa

SEQ ID NO: 95909 - DNA, 17 bp, Arabidopsis thaliana
gacgttacgcgaatcga

SEQ ID NO: 95910 - DNA, 17 bp, Arabidopsis thaliana
gacgttagcagggacga

SEQ ID NO: 95911 - DNA, 17 bp, Arabidopsis thaliana
gacgttcaaatggatgt

SEQ ID NO: 95912 - DNA, 17 bp, Arabidopsis thaliana
gacgttcaagtggcaac

SEQ ID NO: 95913 - DNA, 17 bp, Arabidopsis thaliana
gacgttcatgttccgtt

SEQ ID NO: 95914 - DNA, 17 bp, Arabidopsis thaliana
gacgttcgagtcccact

SEQ ID NO: 95915 - DNA, 17 bp, Arabidopsis thaliana
gacgttgacgatagcga

SEQ ID NO: 95916 - DNA, 17 bp, Arabidopsis thaliana
gacgttgacgatggtaa

SEQ ID NO: 95917 - DNA, 17 bp, Arabidopsis thaliana
gacgttgactgatctac

SEQ ID NO: 95918 - DNA, 17 bp, Arabidopsis thaliana
gacgttgcagcatacgg

SEQ ID NO: 95919 - DNA, 17 bp, Arabidopsis thaliana
gacgttgccgtttgtat

SEQ ID NO: 95920 - DNA, 17 bp, Arabidopsis thaliana
gacgttgcttcaggatc

SEQ ID NO: 95921 - DNA, 17 bp, Arabidopsis thaliana
gacgttgcttgatcctt

SEQ ID NO: 95922 - DNA, 17 bp, Arabidopsis thaliana
gacgttgctttttgatc

SEQ ID NO: 95923 - DNA, 17 bp, Arabidopsis thaliana
gacgttggagatctttt

SEQ ID NO: 95924 - DNA, 17 bp, Arabidopsis thaliana
gacgttggatacctatg

SEQ ID NO: 95925 - DNA, 17 bp, Arabidopsis thaliana
gacgttggcagtatgct

SEQ ID NO: 95926 - DNA, 17 bp, Arabidopsis thaliana
gacgttggtggtggtgg

SEQ ID NO: 95927 - DNA, 17 bp, Arabidopsis thaliana
gacgttgtaaccctcgg

SEQ ID NO: 95928 - DNA, 17 bp, Arabidopsis thaliana
gacgttgtcattgctac

SEQ ID NO: 95929 - DNA, 17 bp, Arabidopsis thaliana
gacgttgtcattttgct

SEQ ID NO: 95930 - DNA, 17 bp, Arabidopsis thaliana
gacgttgtgaaatctaa

SEQ ID NO: 95931 - DNA, 17 bp, Arabidopsis thaliana
gacgtttccagcagggg

SEQ ID NO: 95932 - DNA, 17 bp, Arabidopsis thaliana
gacgtttctgaccatgt

SEQ ID NO: 95933 - DNA, 17 bp, Arabidopsis thaliana
gacgtttctggccaact

SEQ ID NO: 95934 - DNA, 17 bp, Arabidopsis thaliana
gacgtttctggccacgt

SEQ ID NO: 95935 - DNA, 17 bp, Arabidopsis thaliana
gacgtttgaattaccca

SEQ ID NO: 95936 - DNA, 17 bp, Arabidopsis thaliana
gacgtttgagacacttt

SEQ ID NO: 95937 - DNA, 17 bp, Arabidopsis thaliana
gacgtttgagacatttt

SEQ ID NO: 95938 - DNA, 17 bp, Arabidopsis thaliana
gacgtttgatacacttt

SEQ ID NO: 95939 - DNA, 17 bp, Arabidopsis thaliana
gacgtttggagaagacg

SEQ ID NO: 95940 - DNA, 17 bp, Arabidopsis thaliana
gacgtttgggacacttt

SEQ ID NO: 95941 - DNA, 17 bp, Arabidopsis thaliana
gacgttttctaatgcgg

SEQ ID NO: 95942 - DNA, 17 bp, Arabidopsis thaliana
gacgtttttccttgcgg

SEQ ID NO: 95943 - DNA, 17 bp, Arabidopsis thaliana
gacgtttttctcactgc

SEQ ID NO: 95944 - DNA, 17 bp, Arabidopsis thaliana
gacgtttttctctgctg

SEQ ID NO: 95945 - DNA, 17 bp, Arabidopsis thaliana
gacgtttttctctgctt

SEQ ID NO: 95946 - DNA, 17 bp, Arabidopsis thaliana
gacgtttttgcggggaa

SEQ ID NO: 95947 - DNA, 17 bp, Arabidopsis thaliana
gacgtttttggccatgt

SEQ ID NO: 95948 - DNA, 17 bp, Arabidopsis thaliana
gactaaaaattaagatc

SEQ ID NO: 95949 - DNA, 17 bp, Arabidopsis thaliana
gactaaaccgcagatag

SEQ ID NO: 95950 - DNA, 17 bp, Arabidopsis thaliana
gactaaccttcgtgtct

SEQ ID NO: 95951 - DNA, 17 bp, Arabidopsis thaliana
gactaactgaactcgtc

SEQ ID NO: 95952 - DNA, 17 bp, Arabidopsis thaliana
gactaactgcggaccgt

SEQ ID NO: 95953 - DNA, 17 bp, Arabidopsis thaliana
gactaagacaatgatgg

SEQ ID NO: 95954 - DNA, 17 bp, Arabidopsis thaliana
gactaagtctgcgcact

SEQ ID NO: 95955 - DNA, 17 bp, Arabidopsis thaliana
gactaatcaaacgaaca

SEQ ID NO: 95956 - DNA, 17 bp, Arabidopsis thaliana
gactaatcgctgaaacc

SEQ ID NO: 95957 - DNA, 17 bp, Arabidopsis thaliana
gactaatctgacgggaa

SEQ ID NO: 95958 - DNA, 17 bp, Arabidopsis thaliana
gactaatctggcgtcct

SEQ ID NO: 95959 - DNA, 17 bp, Arabidopsis thaliana
gactaattacaagccgc

SEQ ID NO: 95960 - DNA, 17 bp, Arabidopsis thaliana
gactaattctgcggtct

SEQ ID NO: 95961 - DNA, 17 bp, Arabidopsis thaliana
gactacaagttagttcg

SEQ ID NO: 95962 - DNA, 17 bp, Arabidopsis thaliana
gactaccaggtaaacca

SEQ ID NO: 95963 - DNA, 17 bp, Arabidopsis thaliana
gactacggtcgatctat

SEQ ID NO: 95964 - DNA, 17 bp, Arabidopsis thaliana
gactacgtccctgccct

SEQ ID NO: 95965 - DNA, 17 bp, Arabidopsis thaliana
gactacgttttgcggta

SEQ ID NO: 95966 - DNA, 17 bp, Arabidopsis thaliana
gactactaatctgactg

SEQ ID NO: 95967 - DNA, 17 bp, Arabidopsis thaliana
gactactatgcgactgt

SEQ ID NO: 95968 - DNA, 17 bp, Arabidopsis thaliana
gactactcagatgggat

SEQ ID NO: 95969 - DNA, 17 bp, Arabidopsis thaliana
gactactgatggagacg

SEQ ID NO: 95970 - DNA, 17 bp, Arabidopsis thaliana
gactacttatgggttct

SEQ ID NO: 95971 - DNA, 17 bp, Arabidopsis thaliana
gactacttcccgaaaag

SEQ ID NO: 95972 - DNA, 17 bp, Arabidopsis thaliana
gactacttcctacgtca

SEQ ID NO: 95973 - DNA, 17 bp, Arabidopsis thaliana
gactactttctaggtca

SEQ ID NO: 95974 - DNA, 17 bp, Arabidopsis thaliana
gactactttctgggtca

SEQ ID NO: 95975 - DNA, 17 bp, Arabidopsis thaliana
gactactttgcaaattg

SEQ ID NO: 95976 - DNA, 17 bp, Arabidopsis thaliana
gactaggattgtgccac

SEQ ID NO: 95977 - DNA, 17 bp, Arabidopsis thaliana
gactaggtggtgcggaa

SEQ ID NO: 95978 - DNA, 17 bp, Arabidopsis thaliana
gactagtcagatcactg

SEQ ID NO: 95979 - DNA, 17 bp, Arabidopsis thaliana
gactagtttccaaccgg

SEQ ID NO: 95980 - DNA, 17 bp, Arabidopsis thaliana
gactatcaggcaaacaa

SEQ ID NO: 95981 - DNA, 17 bp, Arabidopsis thaliana
gactatcaggtaaacca

SEQ ID NO: 95982 - DNA, 17 bp, Arabidopsis thaliana
gactatcaggtaaatct

SEQ ID NO: 95983 - DNA, 17 bp, Arabidopsis thaliana
gactatcaggtgaacca

SEQ ID NO: 95984 - DNA, 17 bp, Arabidopsis thaliana
gactatcccctagcatt

SEQ ID NO: 95985 - DNA, 17 bp, Arabidopsis thaliana
gactatccgagaacaat

SEQ ID NO: 95986 - DNA, 17 bp, Arabidopsis thaliana
gactatccgcagttagt

SEQ ID NO: 95987 - DNA, 17 bp, Arabidopsis thaliana
gactatcttggagatat

SEQ ID NO: 95988 - DNA, 17 bp, Arabidopsis thaliana
gactatgaatcggactt

SEQ ID NO: 95989 - DNA, 17 bp, Arabidopsis thaliana
gactatgtttcgattac

SEQ ID NO: 95990 - DNA, 17 bp, Arabidopsis thaliana
gactattatgcgactaa

SEQ ID NO: 95991 - DNA, 17 bp, Arabidopsis thaliana
gactattgcgttcagcg

SEQ ID NO: 95992 - DNA, 17 bp, Arabidopsis thaliana
gactattgtcgggcaag

SEQ ID NO: 95993 - DNA, 17 bp, Arabidopsis thaliana
gactattgtctacagct

SEQ ID NO: 95994 - DNA, 17 bp, Arabidopsis thaliana
gactattgtgtcggctt

SEQ ID NO: 95995 - DNA, 17 bp, Arabidopsis thaliana
gactatttcatcaaaga

SEQ ID NO: 95996 - DNA, 17 bp, Arabidopsis thaliana
gactatttgttaggtcc

SEQ ID NO: 95997 - DNA, 17 bp, Arabidopsis thaliana
gactattttttggagtg

SEQ ID NO: 95998 - DNA, 17 bp, Arabidopsis thaliana
gactcaaacgagccaat

SEQ ID NO: 95999 - DNA, 17 bp, Arabidopsis thaliana
gactcaaactctgtagg

SEQ ID NO: 96000 - DNA, 17 bp, Arabidopsis thaliana
gactcaacttccgatgt

SEQ ID NO: 96001 - DNA, 17 bp, Arabidopsis thaliana
gactcaacttggaggtt

SEQ ID NO: 96002 - DNA, 17 bp, Arabidopsis thaliana
gactcaagaatcctccg

SEQ ID NO: 96003 - DNA, 17 bp, Arabidopsis thaliana
gactcagaagcaggtga

SEQ ID NO: 96004 - DNA, 17 bp, Arabidopsis thaliana
gactcagacgctaacag

SEQ ID NO: 96005 - DNA, 17 bp, Arabidopsis thaliana
gactcagagatttctgc

SEQ ID NO: 96006 - DNA, 17 bp, Arabidopsis thaliana
gactcagagttgttgcc

SEQ ID NO: 96007 - DNA, 17 bp, Arabidopsis thaliana
gactcagcagacccccg

SEQ ID NO: 96008 - DNA, 17 bp, Arabidopsis thaliana
gactcagcagcaggtgg

SEQ ID NO: 96009 - DNA, 17 bp, Arabidopsis thaliana
gactcagcgttcttcga

SEQ ID NO: 96010 - DNA, 17 bp, Arabidopsis thaliana
gactcaggctgcatagg

SEQ ID NO: 96011 - DNA, 17 bp, Arabidopsis thaliana
gactcagtcgtcagcgg

SEQ ID NO: 96012 - DNA, 17 bp, Arabidopsis thaliana
gactcagtggtaaatct

SEQ ID NO: 96013 - DNA, 17 bp, Arabidopsis thaliana
gactcagttttatgccg

SEQ ID NO: 96014 - DNA, 17 bp, Arabidopsis thaliana
gactcatacgcccaagc

SEQ ID NO: 96015 - DNA, 17 bp, Arabidopsis thaliana
gactcataggatcgtgt

SEQ ID NO: 96016 - DNA, 17 bp, Arabidopsis thaliana
gactcataggcagtggc

SEQ ID NO: 96017 - DNA, 17 bp, Arabidopsis thaliana
gactcataggtagtggc

SEQ ID NO: 96018 - DNA, 17 bp, Arabidopsis thaliana
gactcatcagcaggtgg

SEQ ID NO: 96019 - DNA, 17 bp, Arabidopsis thaliana
gactcatcttttggact

SEQ ID NO: 96020 - DNA, 17 bp, Arabidopsis thaliana
gactcatgacaggaatg

SEQ ID NO: 96021 - DNA, 17 bp, Arabidopsis thaliana
gactcatggctaaattt

SEQ ID NO: 96022 - DNA, 17 bp, Arabidopsis thaliana
gactcattgacggcggt

SEQ ID NO: 96023 - DNA, 17 bp, Arabidopsis thaliana
gactcattggactattt

SEQ ID NO: 96024 - DNA, 17 bp, Arabidopsis thaliana
gactcattggatggagc

SEQ ID NO: 96025 - DNA, 17 bp, Arabidopsis thaliana
gactcattttgaccata

SEQ ID NO: 96026 - DNA, 17 bp, Arabidopsis thaliana
gactccactgagattca

SEQ ID NO: 96027 - DNA, 17 bp, Arabidopsis thaliana
gactccattgttgcgaa

SEQ ID NO: 96028 - DNA, 17 bp, Arabidopsis thaliana
gactcccggcagacgca

SEQ ID NO: 96029 - DNA, 17 bp, Arabidopsis thaliana
gactcccggtaggacct

SEQ ID NO: 96030 - DNA, 17 bp, Arabidopsis thaliana
gactccgaacaacaacc

SEQ ID NO: 96031 - DNA, 17 bp, Arabidopsis thaliana
gactccgaagattcggg

SEQ ID NO: 96032 - DNA, 17 bp, Arabidopsis thaliana
gactccgaatggtgact

SEQ ID NO: 96033 - DNA, 17 bp, Arabidopsis thaliana
gactccgattggaccat

SEQ ID NO: 96034 - DNA, 17 bp, Arabidopsis thaliana
gactccgctggcaccca

SEQ ID NO: 96035 - DNA, 17 bp, Arabidopsis thaliana
gactccgctggcacctt

SEQ ID NO: 96036 - DNA, 17 bp, Arabidopsis thaliana
gactccggagactttct

SEQ ID NO: 96037 - DNA, 17 bp, Arabidopsis thaliana
gactccggatgtagtgg

SEQ ID NO: 96038 - DNA, 17 bp, Arabidopsis thaliana
gactccggcgttgacta

SEQ ID NO: 96039 - DNA, 17 bp, Arabidopsis thaliana
gactcctcgcaggggag

SEQ ID NO: 96040 - DNA, 17 bp, Arabidopsis thaliana
gactcctcgtgttgcat

SEQ ID NO: 96041 - DNA, 17 bp, Arabidopsis thaliana
gactcctctgaaagaca

SEQ ID NO: 96042 - DNA, 17 bp, Arabidopsis thaliana
gactccttctgtatctc

SEQ ID NO: 96043 - DNA, 17 bp, Arabidopsis thaliana
gactccttggggttgta

SEQ ID NO: 96044 - DNA, 17 bp, Arabidopsis thaliana
gactcggcattcaggcg

SEQ ID NO: 96045 - DNA, 17 bp, Arabidopsis thaliana
gactcggtacagtggga

SEQ ID NO: 96046 - DNA, 17 bp, Arabidopsis thaliana
gactcggttatctgcag

SEQ ID NO: 96047 - DNA, 17 bp, Arabidopsis thaliana
gactcgtagatgggagg

SEQ ID NO: 96048 - DNA, 17 bp, Arabidopsis thaliana
gactcgtccacgtggcc

SEQ ID NO: 96049 - DNA, 17 bp, Arabidopsis thaliana
gactcgtgtcccactgg

SEQ ID NO: 96050 - DNA, 17 bp, Arabidopsis thaliana
gactctactcggctcac

SEQ ID NO: 96051 - DNA, 17 bp, Arabidopsis thaliana
gactctagtccgacttt

SEQ ID NO: 96052 - DNA, 17 bp, Arabidopsis thaliana
gactctatgggctggag

SEQ ID NO: 96053 - DNA, 17 bp, Arabidopsis thaliana
gactctatggtgtagtg

SEQ ID NO: 96054 - DNA, 17 bp, Arabidopsis thaliana
gactctattttagaggc

SEQ ID NO: 96055 - DNA, 17 bp, Arabidopsis thaliana
gactctcacggtgactc

SEQ ID NO: 96056 - DNA, 17 bp, Arabidopsis thaliana
gactctcagtttatggc

SEQ ID NO: 96057 - DNA, 17 bp, Arabidopsis thaliana
gactctcattaggtggg

SEQ ID NO: 96058 - DNA, 17 bp, Arabidopsis thaliana
gactctcccaggcacta

SEQ ID NO: 96059 - DNA, 17 bp, Arabidopsis thaliana
gactctccttgcgtctg

SEQ ID NO: 96060 - DNA, 17 bp, Arabidopsis thaliana
gactctcgactcattca

SEQ ID NO: 96061 - DNA, 17 bp, Arabidopsis thaliana
gactctcggcaacggac

SEQ ID NO: 96062 - DNA, 17 bp, Arabidopsis thaliana
gactctcggcaacggat

SEQ ID NO: 96063 - DNA, 17 bp, Arabidopsis thaliana
gactctcggcaacgggt

SEQ ID NO: 96064 - DNA, 17 bp, Arabidopsis thaliana
gactctcggcggatatc

SEQ ID NO: 96065 - DNA, 17 bp, Arabidopsis thaliana
gactctctcgttgcgtt

SEQ ID NO: 96066 - DNA, 17 bp, Arabidopsis thaliana
gactctcttttgaacac

SEQ ID NO: 96067 - DNA, 17 bp, Arabidopsis thaliana
gactctgaactgtatgt

SEQ ID NO: 96068 - DNA, 17 bp, Arabidopsis thaliana
gactctgaagtgtatgt

SEQ ID NO: 96069 - DNA, 17 bp, Arabidopsis thaliana
gactctgaatggtgact

SEQ ID NO: 96070 - DNA, 17 bp, Arabidopsis thaliana
gactctgactctgcctc

SEQ ID NO: 96071 - DNA, 17 bp, Arabidopsis thaliana
gactctgagagaacaaa

SEQ ID NO: 96072 - DNA, 17 bp, Arabidopsis thaliana
gactctgagagaacaag

SEQ ID NO: 96073 - DNA, 17 bp, Arabidopsis thaliana
gactctgattcgacttg

SEQ ID NO: 96074 - DNA, 17 bp, Arabidopsis thaliana
gactctgattggactag

SEQ ID NO: 96075 - DNA, 17 bp, Arabidopsis thaliana
gactctgccttttttgc

SEQ ID NO: 96076 - DNA, 17 bp, Arabidopsis thaliana
gactctgctggttgatg

SEQ ID NO: 96077 - DNA, 17 bp, Arabidopsis thaliana
gactctggaaaaaccat

SEQ ID NO: 96078 - DNA, 17 bp, Arabidopsis thaliana
gactctggccattcatc

SEQ ID NO: 96079 - DNA, 17 bp, Arabidopsis thaliana
gactctggcccaatgga

SEQ ID NO: 96080 - DNA, 17 bp, Arabidopsis thaliana
gactctggctgtgattg

SEQ ID NO: 96081 - DNA, 17 bp, Arabidopsis thaliana
gactctggttgacaacc

SEQ ID NO: 96082 - DNA, 17 bp, Arabidopsis thaliana
gactctgtcagccattg

SEQ ID NO: 96083 - DNA, 17 bp, Arabidopsis thaliana
gactctgtccagacttg

SEQ ID NO: 96084 - DNA, 17 bp, Arabidopsis thaliana
gactctgtggcccaatg

SEQ ID NO: 96085 - DNA, 17 bp, Arabidopsis thaliana
gactctgttcgctcaga

SEQ ID NO: 96086 - DNA, 17 bp, Arabidopsis thaliana
gactcttacggatttgg

SEQ ID NO: 96087 - DNA, 17 bp, Arabidopsis thaliana
gactcttatgatggccg

SEQ ID NO: 96088 - DNA, 17 bp, Arabidopsis thaliana
gactcttcgaactttgt

SEQ ID NO: 96089 - DNA, 17 bp, Arabidopsis thaliana
gactcttcgcaggggag

SEQ ID NO: 96090 - DNA, 17 bp, Arabidopsis thaliana
gactcttctggtgttgt

SEQ ID NO: 96091 - DNA, 17 bp, Arabidopsis thaliana
gactcttggacaggtat

SEQ ID NO: 96092 - DNA, 17 bp, Arabidopsis thaliana
gactcttggtggcatga

SEQ ID NO: 96093 - DNA, 17 bp, Arabidopsis thaliana
gactcttggttgtcggc

SEQ ID NO: 96094 - DNA, 17 bp, Arabidopsis thaliana
gactcttgtcagctgaa

SEQ ID NO: 96095 - DNA, 17 bp, Arabidopsis thaliana
gactcttgtcagctttg

SEQ ID NO: 96096 - DNA, 17 bp, Arabidopsis thaliana
gactctttcaccggcgg

SEQ ID NO: 96097 - DNA, 17 bp, Arabidopsis thaliana
gactctttccgctgctc

SEQ ID NO: 96098 - DNA, 17 bp, Arabidopsis thaliana
gactctttgttgcagca

SEQ ID NO: 96099 - DNA, 17 bp, Arabidopsis thaliana
gactgaacacgatgacg

SEQ ID NO: 96100 - DNA, 17 bp, Arabidopsis thaliana
gactgaacgcctctaag

SEQ ID NO: 96101 - DNA, 17 bp, Arabidopsis thaliana
gactgaagtttccgttg

SEQ ID NO: 96102 - DNA, 17 bp, Arabidopsis thaliana
gactgacgcggattacg

SEQ ID NO: 96103 - DNA, 17 bp, Arabidopsis thaliana
gactgacgggttagcaa

SEQ ID NO: 96104 - DNA, 17 bp, Arabidopsis thaliana
gactgagacagttcggt

SEQ ID NO: 96105 - DNA, 17 bp, Arabidopsis thaliana
gactgagccaagggggc

SEQ ID NO: 96106 - DNA, 17 bp, Arabidopsis thaliana
gactgagccatcaacgg

SEQ ID NO: 96107 - DNA, 17 bp, Arabidopsis thaliana
gactgagctaacgacac

SEQ ID NO: 96108 - DNA, 17 bp, Arabidopsis thaliana
gactgagttgttttgtt

SEQ ID NO: 96109 - DNA, 17 bp, Arabidopsis thaliana
gactgataaaccagccg

SEQ ID NO: 96110 - DNA, 17 bp, Arabidopsis thaliana
gactgataacggcatgt

SEQ ID NO: 96111 - DNA, 17 bp, Arabidopsis thaliana
gactgataatcaaatct

SEQ ID NO: 96112 - DNA, 17 bp, Arabidopsis thaliana
gactgatacggctcacc

SEQ ID NO: 96113 - DNA, 17 bp, Arabidopsis thaliana
gactgatatactctatc

SEQ ID NO: 96114 - DNA, 17 bp, Arabidopsis thaliana
gactgatcaaacgaaca

SEQ ID NO: 96115 - DNA, 17 bp, Arabidopsis thaliana
gactgatcggagtgtga

SEQ ID NO: 96116 - DNA, 17 bp, Arabidopsis thaliana
gactgatctggtgagtc

SEQ ID NO: 96117 - DNA, 17 bp, Arabidopsis thaliana
gactgattaacgacgta

SEQ ID NO: 96118 - DNA, 17 bp, Arabidopsis thaliana
gactgattttccaagca

SEQ ID NO: 96119 - DNA, 17 bp, Arabidopsis thaliana
gactgcctgtcgctggt

SEQ ID NO: 96120 - DNA, 17 bp, Arabidopsis thaliana
gactgcgcaaactcaca

SEQ ID NO: 96121 - DNA, 17 bp, Arabidopsis thaliana
gactgcgcattagccat

SEQ ID NO: 96122 - DNA, 17 bp, Arabidopsis thaliana
gactgcggaatttgtga

SEQ ID NO: 96123 - DNA, 17 bp, Arabidopsis thaliana
gactgcgtgtagctgac

SEQ ID NO: 96124 - DNA, 17 bp, Arabidopsis thaliana
gactgcgttttgcggtg

SEQ ID NO: 96125 - DNA, 17 bp, Arabidopsis thaliana
gactgcgttttgtggtg

SEQ ID NO: 96126 - DNA, 17 bp, Arabidopsis thaliana
gactgctcaagatggtg

SEQ ID NO: 96127 - DNA, 17 bp, Arabidopsis thaliana
gactgctcattgaccag

SEQ ID NO: 96128 - DNA, 17 bp, Arabidopsis thaliana
gactgctcgagctgctt

SEQ ID NO: 96129 - DNA, 17 bp, Arabidopsis thaliana
gactgcttccatccggt

SEQ ID NO: 96130 - DNA, 17 bp, Arabidopsis thaliana
gactggacaagcccatg

SEQ ID NO: 96131 - DNA, 17 bp, Arabidopsis thaliana
gactggactttggctac

SEQ ID NO: 96132 - DNA, 17 bp, Arabidopsis thaliana
gactggattgctgacgg

SEQ ID NO: 96133 - DNA, 17 bp, Arabidopsis thaliana
gactggcaaactgcgag

SEQ ID NO: 96134 - DNA, 17 bp, Arabidopsis thaliana
gactggcgggacgggtt

SEQ ID NO: 96135 - DNA, 17 bp, Arabidopsis thaliana
gactggctcaactcatg

SEQ ID NO: 96136 - DNA, 17 bp, Arabidopsis thaliana
gactgggaacggctctc

SEQ ID NO: 96137 - DNA, 17 bp, Arabidopsis thaliana
gactgggacccacggcg

SEQ ID NO: 96138 - DNA, 17 bp, Arabidopsis thaliana
gactgggcaagcccatg

SEQ ID NO: 96139 - DNA, 17 bp, Arabidopsis thaliana
gactggggaatctgacc

SEQ ID NO: 96140 - DNA, 17 bp, Arabidopsis thaliana
gactggtaaaccagcag

SEQ ID NO: 96141 - DNA, 17 bp, Arabidopsis thaliana
gactggtaaaccagcgg

SEQ ID NO: 96142 - DNA, 17 bp, Arabidopsis thaliana
gactggtaaatcagcgg

SEQ ID NO: 96143 - DNA, 17 bp, Arabidopsis thaliana
gactggtcaagtggctg

SEQ ID NO: 96144 - DNA, 17 bp, Arabidopsis thaliana
gactggtcactggacgc

SEQ ID NO: 96145 - DNA, 17 bp, Arabidopsis thaliana
gactggtcctgttcgtt

SEQ ID NO: 96146 - DNA, 17 bp, Arabidopsis thaliana
gactggtcgcatttgcc

SEQ ID NO: 96147 - DNA, 17 bp, Arabidopsis thaliana
gactggtgctgctcaga

SEQ ID NO: 96148 - DNA, 17 bp, Arabidopsis thaliana
gactggtgtgtgctcat

SEQ ID NO: 96149 - DNA, 17 bp, Arabidopsis thaliana
gactggtgttgaacgat

SEQ ID NO: 96150 - DNA, 17 bp, Arabidopsis thaliana
gactggttaaccagcag

SEQ ID NO: 96151 - DNA, 17 bp, Arabidopsis thaliana
gactggttagtccgtgt

SEQ ID NO: 96152 - DNA, 17 bp, Arabidopsis thaliana
gactggttgatcagcgg

SEQ ID NO: 96153 - DNA, 17 bp, Arabidopsis thaliana
gactggttgatcgtgac

SEQ ID NO: 96154 - DNA, 17 bp, Arabidopsis thaliana
gactgtagaaactttgg

SEQ ID NO: 96155 - DNA, 17 bp, Arabidopsis thaliana
gactgtattgcgggtga

SEQ ID NO: 96156 - DNA, 17 bp, Arabidopsis thaliana
gactgtcaaagagagac

SEQ ID NO: 96157 - DNA, 17 bp, Arabidopsis thaliana
gactgtcaagtcgtggc

SEQ ID NO: 96158 - DNA, 17 bp, Arabidopsis thaliana
gactgtcgaatgtgact

SEQ ID NO: 96159 - DNA, 17 bp, Arabidopsis thaliana
gactgtctcatcaggtg

SEQ ID NO: 96160 - DNA, 17 bp, Arabidopsis thaliana
gactgtctggacctgga

SEQ ID NO: 96161 - DNA, 17 bp, Arabidopsis thaliana
gactgtctgtgcttagg

SEQ ID NO: 96162 - DNA, 17 bp, Arabidopsis thaliana
gactgtcttgcgctaat

SEQ ID NO: 96163 - DNA, 17 bp, Arabidopsis thaliana
gactgtgaaactgcgaa

SEQ ID NO: 96164 - DNA, 17 bp, Arabidopsis thaliana
gactgtgaatggtgaca

SEQ ID NO: 96165 - DNA, 17 bp, Arabidopsis thaliana
gactgtgactaaatcca

SEQ ID NO: 96166 - DNA, 17 bp, Arabidopsis thaliana
gactgtgactaattcca

SEQ ID NO: 96167 - DNA, 17 bp, Arabidopsis thaliana
gactgtgaggccaaact

SEQ ID NO: 96168 - DNA, 17 bp, Arabidopsis thaliana
gactgtgcagtcgagta

SEQ ID NO: 96169 - DNA, 17 bp, Arabidopsis thaliana
gactgtgccatttcggg

SEQ ID NO: 96170 - DNA, 17 bp, Arabidopsis thaliana
gactgtgcctgcttcat

SEQ ID NO: 96171 - DNA, 17 bp, Arabidopsis thaliana
gactgtgctacaacaac

SEQ ID NO: 96172 - DNA, 17 bp, Arabidopsis thaliana
gactgtgctatatgacg

SEQ ID NO: 96173 - DNA, 17 bp, Arabidopsis thaliana
gactgtgtgactgtgtg

SEQ ID NO: 96174 - DNA, 17 bp, Arabidopsis thaliana
gactgtgttacgactaa

SEQ ID NO: 96175 - DNA, 17 bp, Arabidopsis thaliana
gactgttagtgattccg

SEQ ID NO: 96176 - DNA, 17 bp, Arabidopsis thaliana
gactgttcacatgacaa

SEQ ID NO: 96177 - DNA, 17 bp, Arabidopsis thaliana
gactgttcagaactaag

SEQ ID NO: 96178 - DNA, 17 bp, Arabidopsis thaliana
gactgttcagacctggt

SEQ ID NO: 96179 - DNA, 17 bp, Arabidopsis thaliana
gactgttcagacttggt

SEQ ID NO: 96180 - DNA, 17 bp, Arabidopsis thaliana
gactgttccaaccaggc

SEQ ID NO: 96181 - DNA, 17 bp, Arabidopsis thaliana
gactgttccctgggatt

SEQ ID NO: 96182 - DNA, 17 bp, Arabidopsis thaliana
gactgttcgggtcggtc

SEQ ID NO: 96183 - DNA, 17 bp, Arabidopsis thaliana
gactgttgaattgctaa

SEQ ID NO: 96184 - DNA, 17 bp, Arabidopsis thaliana
gactgttgtctggctcg

SEQ ID NO: 96185 - DNA, 17 bp, Arabidopsis thaliana
gactgtttagacctggt

SEQ ID NO: 96186 - DNA, 17 bp, Arabidopsis thaliana
gactgtttgggttgata

SEQ ID NO: 96187 - DNA, 17 bp, Arabidopsis thaliana
gactgtttgtgaatccg

SEQ ID NO: 96188 - DNA, 17 bp, Arabidopsis thaliana
gactgttttgccaggct

SEQ ID NO: 96189 - DNA, 17 bp, Arabidopsis thaliana
gacttaagaaggtaaga

SEQ ID NO: 96190 - DNA, 17 bp, Arabidopsis thaliana
gacttacgacgtagtcg

SEQ ID NO: 96191 - DNA, 17 bp, Arabidopsis thaliana
gacttactcttatgggt

SEQ ID NO: 96192 - DNA, 17 bp, Arabidopsis thaliana
gacttagcgcttgattg

SEQ ID NO: 96193 - DNA, 17 bp, Arabidopsis thaliana
gacttaggttctggatc

SEQ ID NO: 96194 - DNA, 17 bp, Arabidopsis thaliana
gacttagtcagacggtc

SEQ ID NO: 96195 - DNA, 17 bp, Arabidopsis thaliana
gacttagtgatgtgtat

SEQ ID NO: 96196 - DNA, 17 bp, Arabidopsis thaliana
gacttagtgatgtttat

SEQ ID NO: 96197 - DNA, 17 bp, Arabidopsis thaliana
gacttagttctactacc

SEQ ID NO: 96198 - DNA, 17 bp, Arabidopsis thaliana
gacttagttgcttgggt

SEQ ID NO: 96199 - DNA, 17 bp, Arabidopsis thaliana
gacttagtttccgggat

SEQ ID NO: 96200 - DNA, 17 bp, Arabidopsis thaliana
gacttatgattcgtctg

SEQ ID NO: 96201 - DNA, 17 bp, Arabidopsis thaliana
gacttattctccaggag

SEQ ID NO: 96202 - DNA, 17 bp, Arabidopsis thaliana
gacttatttacaatggc

SEQ ID NO: 96203 - DNA, 17 bp, Arabidopsis thaliana
gacttatttacagtggc

SEQ ID NO: 96204 - DNA, 17 bp, Arabidopsis thaliana
gacttcaacttcaggct

SEQ ID NO: 96205 - DNA, 17 bp, Arabidopsis thaliana
gacttcaagcctgcgcg

SEQ ID NO: 96206 - DNA, 17 bp, Arabidopsis thaliana
gacttcatactatggac

SEQ ID NO: 96207 - DNA, 17 bp, Arabidopsis thaliana
gacttcatagttgatcg

SEQ ID NO: 96208 - DNA, 17 bp, Arabidopsis thaliana
gacttccatctctgaat

SEQ ID NO: 96209 - DNA, 17 bp, Arabidopsis thaliana
gacttccatttgcgttt

SEQ ID NO: 96210 - DNA, 17 bp, Arabidopsis thaliana
gacttcccctgggggta

SEQ ID NO: 96211 - DNA, 17 bp, Arabidopsis thaliana
gacttccctgggggtac

SEQ ID NO: 96212 - DNA, 17 bp, Arabidopsis thaliana
gacttccgactcattca

SEQ ID NO: 96213 - DNA, 17 bp, Arabidopsis thaliana
gacttccgccggtggag

SEQ ID NO: 96214 - DNA, 17 bp, Arabidopsis thaliana
gacttccgtaacgtcca

SEQ ID NO: 96215 - DNA, 17 bp, Arabidopsis thaliana
gacttcgcacgtgtgta

SEQ ID NO: 96216 - DNA, 17 bp, Arabidopsis thaliana
gacttcgcctagggttt

SEQ ID NO: 96217 - DNA, 17 bp, Arabidopsis thaliana
gacttcggcccagaacc

SEQ ID NO: 96218 - DNA, 17 bp, Arabidopsis thaliana
gacttcggcggtgactc

SEQ ID NO: 96219 - DNA, 17 bp, Arabidopsis thaliana
gacttcggcgttgggtt

SEQ ID NO: 96220 - DNA, 17 bp, Arabidopsis thaliana
gacttcggttcagaacc

SEQ ID NO: 96221 - DNA, 17 bp, Arabidopsis thaliana
gacttcgtgatcggact

SEQ ID NO: 96222 - DNA, 17 bp, Arabidopsis thaliana
gacttcgtggtatgtct

SEQ ID NO: 96223 - DNA, 17 bp, Arabidopsis thaliana
gacttcgttaccggtaa

SEQ ID NO: 96224 - DNA, 17 bp, Arabidopsis thaliana
gacttcgtttccccgca

SEQ ID NO: 96225 - DNA, 17 bp, Arabidopsis thaliana
gacttctccttccactg

SEQ ID NO: 96226 - DNA, 17 bp, Arabidopsis thaliana
gacttctgagataccac

SEQ ID NO: 96227 - DNA, 17 bp, Arabidopsis thaliana
gacttctgatttgccga

SEQ ID NO: 96228 - DNA, 17 bp, Arabidopsis thaliana
gacttctgcagtagccg

SEQ ID NO: 96229 - DNA, 17 bp, Arabidopsis thaliana
gacttctggctaggccc

SEQ ID NO: 96230 - DNA, 17 bp, Arabidopsis thaliana
gacttcttatggacctt

SEQ ID NO: 96231 - DNA, 17 bp, Arabidopsis thaliana
gacttcttcaacctcag

SEQ ID NO: 96232 - DNA, 17 bp, Arabidopsis thaliana
gacttcttgaaaccgtt

SEQ ID NO: 96233 - DNA, 17 bp, Arabidopsis thaliana
gacttcttgggcttcag

SEQ ID NO: 96234 - DNA, 17 bp, Arabidopsis thaliana
gacttgacatcacatca

SEQ ID NO: 96235 - DNA, 17 bp, Arabidopsis thaliana
gacttgacgagagaact

SEQ ID NO: 96236 - DNA, 17 bp, Arabidopsis thaliana
gacttgacggatcacag

SEQ ID NO: 96237 - DNA, 17 bp, Arabidopsis thaliana
gacttgatctcatgggt

SEQ ID NO: 96238 - DNA, 17 bp, Arabidopsis thaliana
gacttgatcttgtgggt

SEQ ID NO: 96239 - DNA, 17 bp, Arabidopsis thaliana
gacttgatggattgttt

SEQ ID NO: 96240 - DNA, 17 bp, Arabidopsis thaliana
gacttgccgtttcgggt

SEQ ID NO: 96241 - DNA, 17 bp, Arabidopsis thaliana
gacttgctttcagccac

SEQ ID NO: 96242 - DNA, 17 bp, Arabidopsis thaliana
gacttggaatgtcatgt

SEQ ID NO: 96243 - DNA, 17 bp, Arabidopsis thaliana
gacttggccgcaggacc

SEQ ID NO: 96244 - DNA, 17 bp, Arabidopsis thaliana
gacttggctaagtccgt

SEQ ID NO: 96245 - DNA, 17 bp, Arabidopsis thaliana
gacttggctcaggtttc

SEQ ID NO: 96246 - DNA, 17 bp, Arabidopsis thaliana
gacttggctctgacgcg

SEQ ID NO: 96247 - DNA, 17 bp, Arabidopsis thaliana
gacttgggtataggggc

SEQ ID NO: 96248 - DNA, 17 bp, Arabidopsis thaliana
gacttgggtctcactac

SEQ ID NO: 96249 - DNA, 17 bp, Arabidopsis thaliana
gacttggtccacggatt

SEQ ID NO: 96250 - DNA, 17 bp, Arabidopsis thaliana
gacttggtctatttgtg

SEQ ID NO: 96251 - DNA, 17 bp, Arabidopsis thaliana
gacttggtctgcagtga

SEQ ID NO: 96252 - DNA, 17 bp, Arabidopsis thaliana
gacttggtgaagatggt

SEQ ID NO: 96253 - DNA, 17 bp, Arabidopsis thaliana
gacttggtgaggtgtat

SEQ ID NO: 96254 - DNA, 17 bp, Arabidopsis thaliana
gacttggtgctattgtt

SEQ ID NO: 96255 - DNA, 17 bp, Arabidopsis thaliana
gacttggttggaccatt

SEQ ID NO: 96256 - DNA, 17 bp, Arabidopsis thaliana
gacttggttggacttgg

SEQ ID NO: 96257 - DNA, 17 bp, Arabidopsis thaliana
gacttgtatcggttctg

SEQ ID NO: 96258 - DNA, 17 bp, Arabidopsis thaliana
gacttgtcggctgcttt

SEQ ID NO: 96259 - DNA, 17 bp, Arabidopsis thaliana
gacttgtctacagttac

SEQ ID NO: 96260 - DNA, 17 bp, Arabidopsis thaliana
gacttgtgatgttgttt

SEQ ID NO: 96261 - DNA, 17 bp, Arabidopsis thaliana
gacttgtgctgataacg

SEQ ID NO: 96262 - DNA, 17 bp, Arabidopsis thaliana
gacttgtgtgcaacctg

SEQ ID NO: 96263 - DNA, 17 bp, Arabidopsis thaliana
gacttgttggacacaca

SEQ ID NO: 96264 - DNA, 17 bp, Arabidopsis thaliana
gactttacgatttctta

SEQ ID NO: 96265 - DNA, 17 bp, Arabidopsis thaliana
gactttatttgtgtgac

SEQ ID NO: 96266 - DNA, 17 bp, Arabidopsis thaliana
gactttcaccgctacag

SEQ ID NO: 96267 - DNA, 17 bp, Arabidopsis thaliana
gactttcacggcgttcg

SEQ ID NO: 96268 - DNA, 17 bp, Arabidopsis thaliana
gactttccattgtgcgg

SEQ ID NO: 96269 - DNA, 17 bp, Arabidopsis thaliana
gactttccggttctcca

SEQ ID NO: 96270 - DNA, 17 bp, Arabidopsis thaliana
gactttcgcaacttgga

SEQ ID NO: 96271 - DNA, 17 bp, Arabidopsis thaliana
gactttcgttattgcgc

SEQ ID NO: 96272 - DNA, 17 bp, Arabidopsis thaliana
gactttcgttgttgcgc

SEQ ID NO: 96273 - DNA, 17 bp, Arabidopsis thaliana
gactttctgggctgtaa

SEQ ID NO: 96274 - DNA, 17 bp, Arabidopsis thaliana
gactttcttctgcatgt

SEQ ID NO: 96275 - DNA, 17 bp, Arabidopsis thaliana
gactttcttttcaggct

SEQ ID NO: 96276 - DNA, 17 bp, Arabidopsis thaliana
gactttgaatggttata

SEQ ID NO: 96277 - DNA, 17 bp, Arabidopsis thaliana
gactttgagttgactcg

SEQ ID NO: 96278 - DNA, 17 bp, Arabidopsis thaliana
gactttgatgacatagg

SEQ ID NO: 96279 - DNA, 17 bp, Arabidopsis thaliana
gactttgatgtaggcca

SEQ ID NO: 96280 - DNA, 17 bp, Arabidopsis thaliana
gactttgcatatctatg

SEQ ID NO: 96281 - DNA, 17 bp, Arabidopsis thaliana
gactttgctggagttca

SEQ ID NO: 96282 - DNA, 17 bp, Arabidopsis thaliana
gactttggatttggttg

SEQ ID NO: 96283 - DNA, 17 bp, Arabidopsis thaliana
gactttggctaaaccat

SEQ ID NO: 96284 - DNA, 17 bp, Arabidopsis thaliana
gactttggctacaccat

SEQ ID NO: 96285 - DNA, 17 bp, Arabidopsis thaliana
gactttggctatttgtc

SEQ ID NO: 96286 - DNA, 17 bp, Arabidopsis thaliana
gactttggttcgtcgac

SEQ ID NO: 96287 - DNA, 17 bp, Arabidopsis thaliana
gactttgtaactaggaa

SEQ ID NO: 96288 - DNA, 17 bp, Arabidopsis thaliana
gactttgtctctgcagt

SEQ ID NO: 96289 - DNA, 17 bp, Arabidopsis thaliana
gactttgtgaaatgact

SEQ ID NO: 96290 - DNA, 17 bp, Arabidopsis thaliana
gactttgtggaatgact

SEQ ID NO: 96291 - DNA, 17 bp, Arabidopsis thaliana
gactttgtttgactggt

SEQ ID NO: 96292 - DNA, 17 bp, Arabidopsis thaliana
gactttgtttttccgag

SEQ ID NO: 96293 - DNA, 17 bp, Arabidopsis thaliana
gacttttaagtactttt

SEQ ID NO: 96294 - DNA, 17 bp, Arabidopsis thaliana
gacttttaatgtgcgga

SEQ ID NO: 96295 - DNA, 17 bp, Arabidopsis thaliana
gacttttccgttgatgt

SEQ ID NO: 96296 - DNA, 17 bp, Arabidopsis thaliana
gacttttgcagttcgag

SEQ ID NO: 96297 - DNA, 17 bp, Arabidopsis thaliana
gacttttggggtgctaa

SEQ ID NO: 96298 - DNA, 17 bp, Arabidopsis thaliana
gacttttgtttaccgag

SEQ ID NO: 96299 - DNA, 17 bp, Arabidopsis thaliana
gactttttctaacagct

SEQ ID NO: 96300 - DNA, 17 bp, Arabidopsis thaliana
gactttttcttcaggca

SEQ ID NO: 96301 - DNA, 17 bp, Arabidopsis thaliana
gactttttgccatttac

SEQ ID NO: 96302 - DNA, 17 bp, Arabidopsis thaliana
gactttttgtcgacccc

SEQ ID NO: 96303 - DNA, 17 bp, Arabidopsis thaliana
gacttttttggtggatt

SEQ ID NO: 96304 - DNA, 17 bp, Arabidopsis thaliana
gactttttttcgttttt

SEQ ID NO: 96305 - DNA, 17 bp, Arabidopsis thaliana
gacttttttttcctttt

SEQ ID NO: 96306 - DNA, 17 bp, Arabidopsis thaliana
gagaaaaaatcggcggg

SEQ ID NO: 96307 - DNA, 17 bp, Arabidopsis thaliana
gagaaaaatatctgcca

SEQ ID NO: 96308 - DNA, 17 bp, Arabidopsis thaliana
gagaaaaatgtaatgat

SEQ ID NO: 96309 - DNA, 17 bp, Arabidopsis thaliana
gagaaaacctagaactt

SEQ ID NO: 96310 - DNA, 17 bp, Arabidopsis thaliana
gagaaaactcaggcgta

SEQ ID NO: 96311 - DNA, 17 bp, Arabidopsis thaliana
gagaaaagtttaccggg

SEQ ID NO: 96312 - DNA, 17 bp, Arabidopsis thaliana
gagaaaatcacgggttt

SEQ ID NO: 96313 - DNA, 17 bp, Arabidopsis thaliana
gagaaaatctcctgatc

SEQ ID NO: 96314 - DNA, 17 bp, Arabidopsis thaliana
gagaaaatgatcgagaa

SEQ ID NO: 96315 - DNA, 17 bp, Arabidopsis thaliana
gagaaaatgccccgagc

SEQ ID NO: 96316 - DNA, 17 bp, Arabidopsis thaliana
gagaaaattgagcagtg

SEQ ID NO: 96317 - DNA, 17 bp, Arabidopsis thaliana
gagaaaattggatgatc

SEQ ID NO: 96318 - DNA, 17 bp, Arabidopsis thaliana
gagaaaatttatcggtt

SEQ ID NO: 96319 - DNA, 17 bp, Arabidopsis thaliana
gagaaacactgcggcta

SEQ ID NO: 96320 - DNA, 17 bp, Arabidopsis thaliana
gagaaacagagtgctcc

SEQ ID NO: 96321 - DNA, 17 bp, Arabidopsis thaliana
gagaaacagatccattc

SEQ ID NO: 96322 - DNA, 17 bp, Arabidopsis thaliana
gagaaaccacctccggt

SEQ ID NO: 96323 - DNA, 17 bp, Arabidopsis thaliana
gagaaacctccctccgt

SEQ ID NO: 96324 - DNA, 17 bp, Arabidopsis thaliana
gagaaacgaaagaaggc

SEQ ID NO: 96325 - DNA, 17 bp, Arabidopsis thaliana
gagaaactctcttgaca

SEQ ID NO: 96326 - DNA, 17 bp, Arabidopsis thaliana
gagaaactctgagatac

SEQ ID NO: 96327 - DNA, 17 bp, Arabidopsis thaliana
gagaaactctgagatag

SEQ ID NO: 96328 - DNA, 17 bp, Arabidopsis thaliana
gagaaacttccatttgc

SEQ ID NO: 96329 - DNA, 17 bp, Arabidopsis thaliana
gagaaactttcgacact

SEQ ID NO: 96330 - DNA, 17 bp, Arabidopsis thaliana
gagaaagacttagggca

SEQ ID NO: 96331 - DNA, 17 bp, Arabidopsis thaliana
gagaaagagaagccact

SEQ ID NO: 96332 - DNA, 17 bp, Arabidopsis thaliana
gagaaagaggacccccg

SEQ ID NO: 96333 - DNA, 17 bp, Arabidopsis thaliana
gagaaagatcatgtggt

SEQ ID NO: 96334 - DNA, 17 bp, Arabidopsis thaliana
gagaaagcaggaggatc

SEQ ID NO: 96335 - DNA, 17 bp, Arabidopsis thaliana
gagaaagcgggccattc

SEQ ID NO: 96336 - DNA, 17 bp, Arabidopsis thaliana
gagaaagcgggtcattc

SEQ ID NO: 96337 - DNA, 17 bp, Arabidopsis thaliana
gagaaagctggtcattc

SEQ ID NO: 96338 - DNA, 17 bp, Arabidopsis thaliana
gagaaagcttccgacaa

SEQ ID NO: 96339 - DNA, 17 bp, Arabidopsis thaliana
gagaaaggcggagagga

SEQ ID NO: 96340 - DNA, 17 bp, Arabidopsis thaliana
gagaaagggtacgcaga

SEQ ID NO: 96341 - DNA, 17 bp, Arabidopsis thaliana
gagaaagtggagatgtg

SEQ ID NO: 96342 - DNA, 17 bp, Arabidopsis thaliana
gagaaagttttattgtg

SEQ ID NO: 96343 - DNA, 17 bp, Arabidopsis thaliana
gagaaatagaccgtttt

SEQ ID NO: 96344 - DNA, 17 bp, Arabidopsis thaliana
gagaaatcaaagttttt

SEQ ID NO: 96345 - DNA, 17 bp, Arabidopsis thaliana
gagaaatcaccagttcc

SEQ ID NO: 96346 - DNA, 17 bp, Arabidopsis thaliana
gagaaatctggatttgg

SEQ ID NO: 96347 - DNA, 17 bp, Arabidopsis thaliana
gagaaatcttcggactg

SEQ ID NO: 96348 - DNA, 17 bp, Arabidopsis thaliana
gagaaatgcttcgatcc

SEQ ID NO: 96349 - DNA, 17 bp, Arabidopsis thaliana
gagaaatggaagatatc

SEQ ID NO: 96350 - DNA, 17 bp, Arabidopsis thaliana
gagaaatgtgagagtga

SEQ ID NO: 96351 - DNA, 17 bp, Arabidopsis thaliana
gagaaatgttctaagcg

SEQ ID NO: 96352 - DNA, 17 bp, Arabidopsis thaliana
gagaaattacgggattc

SEQ ID NO: 96353 - DNA, 17 bp, Arabidopsis thaliana
gagaaattagaccgctt

SEQ ID NO: 96354 - DNA, 17 bp, Arabidopsis thaliana
gagaaattcctaaggat

SEQ ID NO: 96355 - DNA, 17 bp, Arabidopsis thaliana
gagaaattctagaccct

SEQ ID NO: 96356 - DNA, 17 bp, Arabidopsis thaliana
gagaaattctgcggcgc

SEQ ID NO: 96357 - DNA, 17 bp, Arabidopsis thaliana
gagaaattgttaggaat

SEQ ID NO: 96358 - DNA, 17 bp, Arabidopsis thaliana
gagaaatttggaactgc

SEQ ID NO: 96359 - DNA, 17 bp, Arabidopsis thaliana
gagaacaaaccaatgcg

SEQ ID NO: 96360 - DNA, 17 bp, Arabidopsis thaliana
gagaacacaattttaca

SEQ ID NO: 96361 - DNA, 17 bp, Arabidopsis thaliana
gagaacaccagagcaat

SEQ ID NO: 96362 - DNA, 17 bp, Arabidopsis thaliana
gagaacagaacggatgt

SEQ ID NO: 96363 - DNA, 17 bp, Arabidopsis thaliana
gagaaccaaagcggctc

SEQ ID NO: 96364 - DNA, 17 bp, Arabidopsis thaliana
gagaaccaccatgattg

SEQ ID NO: 96365 - DNA, 17 bp, Arabidopsis thaliana
gagaaccactaaggcgg

SEQ ID NO: 96366 - DNA, 17 bp, Arabidopsis thaliana
gagaaccctatgcagga

SEQ ID NO: 96367 - DNA, 17 bp, Arabidopsis thaliana
gagaaccggcttaagtg

SEQ ID NO: 96368 - DNA, 17 bp, Arabidopsis thaliana
gagaaccgttacatagc

SEQ ID NO: 96369 - DNA, 17 bp, Arabidopsis thaliana
gagaaccttgttcgtgt

SEQ ID NO: 96370 - DNA, 17 bp, Arabidopsis thaliana
gagaactaacacactca

SEQ ID NO: 96371 - DNA, 17 bp, Arabidopsis thaliana
gagaactaggtgcacca

SEQ ID NO: 96372 - DNA, 17 bp, Arabidopsis thaliana
gagaactcaaacacccc

SEQ ID NO: 96373 - DNA, 17 bp, Arabidopsis thaliana
gagaactccacagtgag

SEQ ID NO: 96374 - DNA, 17 bp, Arabidopsis thaliana
gagaactccatggctaa

SEQ ID NO: 96375 - DNA, 17 bp, Arabidopsis thaliana
gagaactgatcgccggt

SEQ ID NO: 96376 - DNA, 17 bp, Arabidopsis thaliana
gagaactgctgaaaaaa

SEQ ID NO: 96377 - DNA, 17 bp, Arabidopsis thaliana
gagaacttaaaccgtaa

SEQ ID NO: 96378 - DNA, 17 bp, Arabidopsis thaliana
gagaacttcctcttgga

SEQ ID NO: 96379 - DNA, 17 bp, Arabidopsis thaliana
gagaacttggatccggc

SEQ ID NO: 96380 - DNA, 17 bp, Arabidopsis thaliana
gagaacttggcatgtaa

SEQ ID NO: 96381 - DNA, 17 bp, Arabidopsis thaliana
gagaactttacagacaa

SEQ ID NO: 96382 - DNA, 17 bp, Arabidopsis thaliana
gagaactttagcctcta

SEQ ID NO: 96383 - DNA, 17 bp, Arabidopsis thaliana
gagaactttttttgggt

SEQ ID NO: 96384 - DNA, 17 bp, Arabidopsis thaliana
gagaagaagatttgcgg

SEQ ID NO: 96385 - DNA, 17 bp, Arabidopsis thaliana
gagaagaatgatgtcct

SEQ ID NO: 96386 - DNA, 17 bp, Arabidopsis thaliana
gagaagacatcgtctgc

SEQ ID NO: 96387 - DNA, 17 bp, Arabidopsis thaliana
gagaagacgagttgcga

SEQ ID NO: 96388 - DNA, 17 bp, Arabidopsis thaliana
gagaagacgcccgatct

SEQ ID NO: 96389 - DNA, 17 bp, Arabidopsis thaliana
gagaagactcaagatgg

SEQ ID NO: 96390 - DNA, 17 bp, Arabidopsis thaliana
gagaagactgtcgtttc

SEQ ID NO: 96391 - DNA, 17 bp, Arabidopsis thaliana
gagaagactgtggaggc

SEQ ID NO: 96392 - DNA, 17 bp, Arabidopsis thaliana
gagaagagcgtgtttag

SEQ ID NO: 96393 - DNA, 17 bp, Arabidopsis thaliana
gagaagagtatcgatta

SEQ ID NO: 96394 - DNA, 17 bp, Arabidopsis thaliana
gagaagatcattgtagg

SEQ ID NO: 96395 - DNA, 17 bp, Arabidopsis thaliana
gagaagatccgggtgaa

SEQ ID NO: 96396 - DNA, 17 bp, Arabidopsis thaliana
gagaagatcttctgcgg

SEQ ID NO: 96397 - DNA, 17 bp, Arabidopsis thaliana
gagaagcaaccaacaaa

SEQ ID NO: 96398 - DNA, 17 bp, Arabidopsis thaliana
gagaagccattcaactc

SEQ ID NO: 96399 - DNA, 17 bp, Arabidopsis thaliana
gagaagcgaccgccagc

SEQ ID NO: 96400 - DNA, 17 bp, Arabidopsis thaliana
gagaagctgctaagtgt

SEQ ID NO: 96401 - DNA, 17 bp, Arabidopsis thaliana
gagaagctgctgcggga

SEQ ID NO: 96402 - DNA, 17 bp, Arabidopsis thaliana
gagaagcttctctcggt

SEQ ID NO: 96403 - DNA, 17 bp, Arabidopsis thaliana
gagaaggcgactgctcg

SEQ ID NO: 96404 - DNA, 17 bp, Arabidopsis thaliana
gagaaggcgcaaccaga

SEQ ID NO: 96405 - DNA, 17 bp, Arabidopsis thaliana
gagaaggctgatgtgga

SEQ ID NO: 96406 - DNA, 17 bp, Arabidopsis thaliana
gagaagggacatgtcat

SEQ ID NO: 96407 - DNA, 17 bp, Arabidopsis thaliana
gagaagggctgcgaggc

SEQ ID NO: 96408 - DNA, 17 bp, Arabidopsis thaliana
gagaagggcttgtgttt

SEQ ID NO: 96409 - DNA, 17 bp, Arabidopsis thaliana
gagaaggggtgcctcct

SEQ ID NO: 96410 - DNA, 17 bp, Arabidopsis thaliana
gagaaggggtgctctcc

SEQ ID NO: 96411 - DNA, 17 bp, Arabidopsis thaliana
gagaaggtacatccatc

SEQ ID NO: 96412 - DNA, 17 bp, Arabidopsis thaliana
gagaaggtcggccattc

SEQ ID NO: 96413 - DNA, 17 bp, Arabidopsis thaliana
gagaaggtttggaagcg

SEQ ID NO: 96414 - DNA, 17 bp, Arabidopsis thaliana
gagaagtatcttttcgg

SEQ ID NO: 96415 - DNA, 17 bp, Arabidopsis thaliana
gagaagtccatcagtct

SEQ ID NO: 96416 - DNA, 17 bp, Arabidopsis thaliana
gagaagtccccccttcg

SEQ ID NO: 96417 - DNA, 17 bp, Arabidopsis thaliana
gagaagtccgttcggcg

SEQ ID NO: 96418 - DNA, 17 bp, Arabidopsis thaliana
gagaagtccttgaggcg

SEQ ID NO: 96419 - DNA, 17 bp, Arabidopsis thaliana
gagaagtcgtaacaagg

SEQ ID NO: 96420 - DNA, 17 bp, Arabidopsis thaliana
gagaagtctgctcgtca

SEQ ID NO: 96421 - DNA, 17 bp, Arabidopsis thaliana
gagaagtctggattttc

SEQ ID NO: 96422 - DNA, 17 bp, Arabidopsis thaliana
gagaagtcttctacgga

SEQ ID NO: 96423 - DNA, 17 bp, Arabidopsis thaliana
gagaagtgaccagatcc

SEQ ID NO: 96424 - DNA, 17 bp, Arabidopsis thaliana
gagaagtgactacatcg

SEQ ID NO: 96425 - DNA, 17 bp, Arabidopsis thaliana
gagaagtgcgatacggt

SEQ ID NO: 96426 - DNA, 17 bp, Arabidopsis thaliana
gagaagtgcggtgcggt

SEQ ID NO: 96427 - DNA, 17 bp, Arabidopsis thaliana
gagaagtgggccagact

SEQ ID NO: 96428 - DNA, 17 bp, Arabidopsis thaliana
gagaagttcaggagtta

SEQ ID NO: 96429 - DNA, 17 bp, Arabidopsis thaliana
gagaataagtctgccaa

SEQ ID NO: 96430 - DNA, 17 bp, Arabidopsis thaliana
gagaataagttcaagcc

SEQ ID NO: 96431 - DNA, 17 bp, Arabidopsis thaliana
gagaatagcgagccaaa

SEQ ID NO: 96432 - DNA, 17 bp, Arabidopsis thaliana
gagaatatcccggtgtt

SEQ ID NO: 96433 - DNA, 17 bp, Arabidopsis thaliana
gagaatcaactctgccc

SEQ ID NO: 96434 - DNA, 17 bp, Arabidopsis thaliana
gagaatcagcagcttgt

SEQ ID NO: 96435 - DNA, 17 bp, Arabidopsis thaliana
gagaatcagcgagatca

SEQ ID NO: 96436 - DNA, 17 bp, Arabidopsis thaliana
gagaatccaagtttgtg

SEQ ID NO: 96437 - DNA, 17 bp, Arabidopsis thaliana
gagaatccagtggtgtg

SEQ ID NO: 96438 - DNA, 17 bp, Arabidopsis thaliana
gagaatcctcgcgaatg

SEQ ID NO: 96439 - DNA, 17 bp, Arabidopsis thaliana
gagaatcgtttctgcca

SEQ ID NO: 96440 - DNA, 17 bp, Arabidopsis thaliana
gagaatctatgggtccg

SEQ ID NO: 96441 - DNA, 17 bp, Arabidopsis thaliana
gagaatctggctgagta

SEQ ID NO: 96442 - DNA, 17 bp, Arabidopsis thaliana
gagaatcttgtttgctg

SEQ ID NO: 96443 - DNA, 17 bp, Arabidopsis thaliana
gagaatgaccggtttgg

SEQ ID NO: 96444 - DNA, 17 bp, Arabidopsis thaliana
gagaatgaccgtgttga

SEQ ID NO: 96445 - DNA, 17 bp, Arabidopsis thaliana
gagaatgcaaatcctta

SEQ ID NO: 96446 - DNA, 17 bp, Arabidopsis thaliana
gagaatggggtagaagc

SEQ ID NO: 96447 - DNA, 17 bp, Arabidopsis thaliana
gagaatggtccattcta

SEQ ID NO: 96448 - DNA, 17 bp, Arabidopsis thaliana
gagaatgtcggcttgag

SEQ ID NO: 96449 - DNA, 17 bp, Arabidopsis thaliana
gagacaaagaggacccg

SEQ ID NO: 96450 - DNA, 17 bp, Arabidopsis thaliana
gagacaaagccggaggg

SEQ ID NO: 96451 - DNA, 17 bp, Arabidopsis thaliana
gagacaaatgggtcgtc

SEQ ID NO: 96452 - DNA, 17 bp, Arabidopsis thaliana
gagacaaattcgttgat

SEQ ID NO: 96453 - DNA, 17 bp, Arabidopsis thaliana
gagacaacaacttggtt

SEQ ID NO: 96454 - DNA, 17 bp, Arabidopsis thaliana
gagacaacattggatcg

SEQ ID NO: 96455 - DNA, 17 bp, Arabidopsis thaliana
gagacaacgggctgagc

SEQ ID NO: 96456 - DNA, 17 bp, Arabidopsis thaliana
gagacaactaagattgg

SEQ ID NO: 96457 - DNA, 17 bp, Arabidopsis thaliana
gagacaactatctattc

SEQ ID NO: 96458 - DNA, 17 bp, Arabidopsis thaliana
gagacaagcggagaagg

SEQ ID NO: 96459 - DNA, 17 bp, Arabidopsis thaliana
gagacaaggcacaccac

SEQ ID NO: 96460 - DNA, 17 bp, Arabidopsis thaliana
gagacaaggtcagtcca

SEQ ID NO: 96461 - DNA, 17 bp, Arabidopsis thaliana
gagacaagtctggcttt

SEQ ID NO: 96462 - DNA, 17 bp, Arabidopsis thaliana
gagacaagtgggccact

SEQ ID NO: 96463 - DNA, 17 bp, Arabidopsis thaliana
gagacaagtgtccacga

SEQ ID NO: 96464 - DNA, 17 bp, Arabidopsis thaliana
gagacaagtgtgcagga

SEQ ID NO: 96465 - DNA, 17 bp, Arabidopsis thaliana
gagacaagttttctcag

SEQ ID NO: 96466 - DNA, 17 bp, Arabidopsis thaliana
gagacaatccgacggac

SEQ ID NO: 96467 - DNA, 17 bp, Arabidopsis thaliana
gagacaatgcgtcggtc

SEQ ID NO: 96468 - DNA, 17 bp, Arabidopsis thaliana
gagacaatggtccaaac

SEQ ID NO: 96469 - DNA, 17 bp, Arabidopsis thaliana
gagacaattcctccgac

SEQ ID NO: 96470 - DNA, 17 bp, Arabidopsis thaliana
gagacacaacagggaga

SEQ ID NO: 96471 - DNA, 17 bp, Arabidopsis thaliana
gagacacaggtcgttca

SEQ ID NO: 96472 - DNA, 17 bp, Arabidopsis thaliana
gagacacagtacctgac

SEQ ID NO: 96473 - DNA, 17 bp, Arabidopsis thaliana
gagacaccaagtctggg

SEQ ID NO: 96474 - DNA, 17 bp, Arabidopsis thaliana
gagacaccgcttgagca

SEQ ID NO: 96475 - DNA, 17 bp, Arabidopsis thaliana
gagacacggttcactaa

SEQ ID NO: 96476 - DNA, 17 bp, Arabidopsis thaliana
gagacactgatgtctta

SEQ ID NO: 96477 - DNA, 17 bp, Arabidopsis thaliana
gagacactgtggctttg

SEQ ID NO: 96478 - DNA, 17 bp, Arabidopsis thaliana
gagacacttacgagatg

SEQ ID NO: 96479 - DNA, 17 bp, Arabidopsis thaliana
gagacagaatgagtcca

SEQ ID NO: 96480 - DNA, 17 bp, Arabidopsis thaliana
gagacagacattcatca

SEQ ID NO: 96481 - DNA, 17 bp, Arabidopsis thaliana
gagacagaccggctcgt

SEQ ID NO: 96482 - DNA, 17 bp, Arabidopsis thaliana
gagacagatacgggtga

SEQ ID NO: 96483 - DNA, 17 bp, Arabidopsis thaliana
gagacagatagctctcc

SEQ ID NO: 96484 - DNA, 17 bp, Arabidopsis thaliana
gagacagcaggttcacc

SEQ ID NO: 96485 - DNA, 17 bp, Arabidopsis thaliana
gagacagccaagaggtt

SEQ ID NO: 96486 - DNA, 17 bp, Arabidopsis thaliana
gagacagccaggaggtt

SEQ ID NO: 96487 - DNA, 17 bp, Arabidopsis thaliana
gagacagctgtcagttt

SEQ ID NO: 96488 - DNA, 17 bp, Arabidopsis thaliana
gagacaggaacttcgcg

SEQ ID NO: 96489 - DNA, 17 bp, Arabidopsis thaliana
gagacaggtcgttcatc

SEQ ID NO: 96490 - DNA, 17 bp, Arabidopsis thaliana
gagacaggttagtttta

SEQ ID NO: 96491 - DNA, 17 bp, Arabidopsis thaliana
gagacagtcagcccgga

SEQ ID NO: 96492 - DNA, 17 bp, Arabidopsis thaliana
gagacagttcggttcct

SEQ ID NO: 96493 - DNA, 17 bp, Arabidopsis thaliana
gagacagtttgccgagc

SEQ ID NO: 96494 - DNA, 17 bp, Arabidopsis thaliana
gagacatagccaacgat

SEQ ID NO: 96495 - DNA, 17 bp, Arabidopsis thaliana
gagacatcaaatttggg

SEQ ID NO: 96496 - DNA, 17 bp, Arabidopsis thaliana
gagacatgattacctgc

SEQ ID NO: 96497 - DNA, 17 bp, Arabidopsis thaliana
gagacatgattggcggc

SEQ ID NO: 96498 - DNA, 17 bp, Arabidopsis thaliana
gagacatgccacttgta

SEQ ID NO: 96499 - DNA, 17 bp, Arabidopsis thaliana
gagacatgctgtgaccg

SEQ ID NO: 96500 - DNA, 17 bp, Arabidopsis thaliana
gagacatggtccaagcc

SEQ ID NO: 96501 - DNA, 17 bp, Arabidopsis thaliana
gagacatgttcctccgt

SEQ ID NO: 96502 - DNA, 17 bp, Arabidopsis thaliana
gagacattatctctctc

SEQ ID NO: 96503 - DNA, 17 bp, Arabidopsis thaliana
gagaccaagccgggtga

SEQ ID NO: 96504 - DNA, 17 bp, Arabidopsis thaliana
gagaccaagtccagcaa

SEQ ID NO: 96505 - DNA, 17 bp, Arabidopsis thaliana
gagaccaagtccatcaa

SEQ ID NO: 96506 - DNA, 17 bp, Arabidopsis thaliana
gagaccaatgtggcaga

SEQ ID NO: 96507 - DNA, 17 bp, Arabidopsis thaliana
gagaccaccattgctgc

SEQ ID NO: 96508 - DNA, 17 bp, Arabidopsis thaliana
gagaccactcgaccccc

SEQ ID NO: 96509 - DNA, 17 bp, Arabidopsis thaliana
gagaccagagtagacga

SEQ ID NO: 96510 - DNA, 17 bp, Arabidopsis thaliana
gagaccatccctccagt

SEQ ID NO: 96511 - DNA, 17 bp, Arabidopsis thaliana
gagaccatctacatcgg

SEQ ID NO: 96512 - DNA, 17 bp, Arabidopsis thaliana
gagaccatctcattgga

SEQ ID NO: 96513 - DNA, 17 bp, Arabidopsis thaliana
gagaccatgcccagcag

SEQ ID NO: 96514 - DNA, 17 bp, Arabidopsis thaliana
gagaccatggaaaagtt

SEQ ID NO: 96515 - DNA, 17 bp, Arabidopsis thaliana
gagaccatgggaagatt

SEQ ID NO: 96516 - DNA, 17 bp, Arabidopsis thaliana
gagaccatgtgagtgtt

SEQ ID NO: 96517 - DNA, 17 bp, Arabidopsis thaliana
gagaccatttttagcaa

SEQ ID NO: 96518 - DNA, 17 bp, Arabidopsis thaliana
gagaccatttttcgcaa

SEQ ID NO: 96519 - DNA, 17 bp, Arabidopsis thaliana
gagacccaaagttggtg

SEQ ID NO: 96520 - DNA, 17 bp, Arabidopsis thaliana
gagacccaacgctcagt

SEQ ID NO: 96521 - DNA, 17 bp, Arabidopsis thaliana
gagacccacaagagaac

SEQ ID NO: 96522 - DNA, 17 bp, Arabidopsis thaliana
gagacccagggcgaacg

SEQ ID NO: 96523 - DNA, 17 bp, Arabidopsis thaliana
gagacccgggtatccat

SEQ ID NO: 96524 - DNA, 17 bp, Arabidopsis thaliana
gagacccgggttcgtcc

SEQ ID NO: 96525 - DNA, 17 bp, Arabidopsis thaliana
gagacccgggttcgttc

SEQ ID NO: 96526 - DNA, 17 bp, Arabidopsis thaliana
gagacccgggttcgttt

SEQ ID NO: 96527 - DNA, 17 bp, Arabidopsis thaliana
gagaccctgccaaaccc

SEQ ID NO: 96528 - DNA, 17 bp, Arabidopsis thaliana
gagaccgagactgaccg

SEQ ID NO: 96529 - DNA, 17 bp, Arabidopsis thaliana
gagaccgatagcgaaca

SEQ ID NO: 96530 - DNA, 17 bp, Arabidopsis thaliana
gagaccgatcacctcgt

SEQ ID NO: 96531 - DNA, 17 bp, Arabidopsis thaliana
gagaccgcctagccgac

SEQ ID NO: 96532 - DNA, 17 bp, Arabidopsis thaliana
gagaccggagaagtgag

SEQ ID NO: 96533 - DNA, 17 bp, Arabidopsis thaliana
gagaccggtcttttcat

SEQ ID NO: 96534 - DNA, 17 bp, Arabidopsis thaliana
gagaccgtcatgctcat

SEQ ID NO: 96535 - DNA, 17 bp, Arabidopsis thaliana
gagaccgtttcttattt

SEQ ID NO: 96536 - DNA, 17 bp, Arabidopsis thaliana
gagacctacctcagcca

SEQ ID NO: 96537 - DNA, 17 bp, Arabidopsis thaliana
gagacctagcgtggagt

SEQ ID NO: 96538 - DNA, 17 bp, Arabidopsis thaliana
gagacctagtgtttgtt

SEQ ID NO: 96539 - DNA, 17 bp, Arabidopsis thaliana
gagacctcaagcggtac

SEQ ID NO: 96540 - DNA, 17 bp, Arabidopsis thaliana
gagacctcagcctgcta

SEQ ID NO: 96541 - DNA, 17 bp, Arabidopsis thaliana
gagacctgatgcggtta

SEQ ID NO: 96542 - DNA, 17 bp, Arabidopsis thaliana
gagacctgggctcgtat

SEQ ID NO: 96543 - DNA, 17 bp, Arabidopsis thaliana
gagaccttgtgctttag

SEQ ID NO: 96544 - DNA, 17 bp, Arabidopsis thaliana
gagaccttttgcacact

SEQ ID NO: 96545 - DNA, 17 bp, Arabidopsis thaliana
gagacctttttctctta

SEQ ID NO: 96546 - DNA, 17 bp, Arabidopsis thaliana
gagacgaagactcaact

SEQ ID NO: 96547 - DNA, 17 bp, Arabidopsis thaliana
gagacgaagccggaggg

SEQ ID NO: 96548 - DNA, 17 bp, Arabidopsis thaliana
gagacgaagggtatttt

SEQ ID NO: 96549 - DNA, 17 bp, Arabidopsis thaliana
gagacgaaggttccttg

SEQ ID NO: 96550 - DNA, 17 bp, Arabidopsis thaliana
gagacgaatcatgtgca

SEQ ID NO: 96551 - DNA, 17 bp, Arabidopsis thaliana
gagacgacaagacaacc

SEQ ID NO: 96552 - DNA, 17 bp, Arabidopsis thaliana
gagacgacaatgaggcc

SEQ ID NO: 96553 - DNA, 17 bp, Arabidopsis thaliana
gagacgacacagaacgg

SEQ ID NO: 96554 - DNA, 17 bp, Arabidopsis thaliana
gagacgagacaagacac

SEQ ID NO: 96555 - DNA, 17 bp, Arabidopsis thaliana
gagacgagatattccgt

SEQ ID NO: 96556 - DNA, 17 bp, Arabidopsis thaliana
gagacgagctgttgccc

SEQ ID NO: 96557 - DNA, 17 bp, Arabidopsis thaliana
gagacgaggtatcagtg

SEQ ID NO: 96558 - DNA, 17 bp, Arabidopsis thaliana
gagacgagtttacatgg

SEQ ID NO: 96559 - DNA, 17 bp, Arabidopsis thaliana
gagacgatcgcagttac

SEQ ID NO: 96560 - DNA, 17 bp, Arabidopsis thaliana
gagacgatcttcgagtg

SEQ ID NO: 96561 - DNA, 17 bp, Arabidopsis thaliana
gagacgattagcttccc

SEQ ID NO: 96562 - DNA, 17 bp, Arabidopsis thaliana
gagacgattctcacttc

SEQ ID NO: 96563 - DNA, 17 bp, Arabidopsis thaliana
gagacgattctctcatc

SEQ ID NO: 96564 - DNA, 17 bp, Arabidopsis thaliana
gagacgcatatcggcta

SEQ ID NO: 96565 - DNA, 17 bp, Arabidopsis thaliana
gagacgccactcttcca

SEQ ID NO: 96566 - DNA, 17 bp, Arabidopsis thaliana
gagacgcggattacggt

SEQ ID NO: 96567 - DNA, 17 bp, Arabidopsis thaliana
gagacgcggcggtttta

SEQ ID NO: 96568 - DNA, 17 bp, Arabidopsis thaliana
gagacgcgggactatgg

SEQ ID NO: 96569 - DNA, 17 bp, Arabidopsis thaliana
gagacgcggtccatggt

SEQ ID NO: 96570 - DNA, 17 bp, Arabidopsis thaliana
gagacggacaaatctgt

SEQ ID NO: 96571 - DNA, 17 bp, Arabidopsis thaliana
gagacggaccggctggc

SEQ ID NO: 96572 - DNA, 17 bp, Arabidopsis thaliana
gagacggacttgagcga

SEQ ID NO: 96573 - DNA, 17 bp, Arabidopsis thaliana
gagacggatttggcagg

SEQ ID NO: 96574 - DNA, 17 bp, Arabidopsis thaliana
gagacggcggcaggcga

SEQ ID NO: 96575 - DNA, 17 bp, Arabidopsis thaliana
gagacggcgtaatccga

SEQ ID NO: 96576 - DNA, 17 bp, Arabidopsis thaliana
gagacggcgtgctttca

SEQ ID NO: 96577 - DNA, 17 bp, Arabidopsis thaliana
gagacgggttggcggga

SEQ ID NO: 96578 - DNA, 17 bp, Arabidopsis thaliana
gagacgggtttgacagg

SEQ ID NO: 96579 - DNA, 17 bp, Arabidopsis thaliana
gagacgggtttggcaag

SEQ ID NO: 96580 - DNA, 17 bp, Arabidopsis thaliana
gagacgggtttggcagg

SEQ ID NO: 96581 - DNA, 17 bp, Arabidopsis thaliana
gagacgggtttggtagg

SEQ ID NO: 96582 - DNA, 17 bp, Arabidopsis thaliana
gagacggtctggtagga

SEQ ID NO: 96583 - DNA, 17 bp, Arabidopsis thaliana
gagacggtgaagaagac

SEQ ID NO: 96584 - DNA, 17 bp, Arabidopsis thaliana
gagactaactctactcc

SEQ ID NO: 96585 - DNA, 17 bp, Arabidopsis thaliana
gagactaagttgagtcc

SEQ ID NO: 96586 - DNA, 17 bp, Arabidopsis thaliana
gagactaccaatggaga

SEQ ID NO: 96587 - DNA, 17 bp, Arabidopsis thaliana
gagactacccgtcagta

SEQ ID NO: 96588 - DNA, 17 bp, Arabidopsis thaliana
gagactacccgtgggta

SEQ ID NO: 96589 - DNA, 17 bp, Arabidopsis thaliana
gagactacccttggtgt

SEQ ID NO: 96590 - DNA, 17 bp, Arabidopsis thaliana
gagactaccgacgctca

SEQ ID NO: 96591 - DNA, 17 bp, Arabidopsis thaliana
gagactactcggtcact

SEQ ID NO: 96592 - DNA, 17 bp, Arabidopsis thaliana
gagactactcgtgggta

SEQ ID NO: 96593 - DNA, 17 bp, Arabidopsis thaliana
gagactactgatggaga

SEQ ID NO: 96594 - DNA, 17 bp, Arabidopsis thaliana
gagactagattttatca

SEQ ID NO: 96595 - DNA, 17 bp, Arabidopsis thaliana
gagactaggattggtga

SEQ ID NO: 96596 - DNA, 17 bp, Arabidopsis thaliana
gagactatccgtgggta

SEQ ID NO: 96597 - DNA, 17 bp, Arabidopsis thaliana
gagactcacttcctatg

SEQ ID NO: 96598 - DNA, 17 bp, Arabidopsis thaliana
gagactcgccaaccatg

SEQ ID NO: 96599 - DNA, 17 bp, Arabidopsis thaliana
gagactcggctggatgt

SEQ ID NO: 96600 - DNA, 17 bp, Arabidopsis thaliana
gagactcgtcttggatc

SEQ ID NO: 96601 - DNA, 17 bp, Arabidopsis thaliana
gagactctagttttccg

SEQ ID NO: 96602 - DNA, 17 bp, Arabidopsis thaliana
gagactctatggcttat

SEQ ID NO: 96603 - DNA, 17 bp, Arabidopsis thaliana
gagactctcccaggcac

SEQ ID NO: 96604 - DNA, 17 bp, Arabidopsis thaliana
gagactctctttcatcc

SEQ ID NO: 96605 - DNA, 17 bp, Arabidopsis thaliana
gagactctgtctcccgt

SEQ ID NO: 96606 - DNA, 17 bp, Arabidopsis thaliana
gagactcttcttgcgtc

SEQ ID NO: 96607 - DNA, 17 bp, Arabidopsis thaliana
gagactcttgacttctc

SEQ ID NO: 96608 - DNA, 17 bp, Arabidopsis thaliana
gagactgaaaggctgtc

SEQ ID NO: 96609 - DNA, 17 bp, Arabidopsis thaliana
gagactgaatatctggc

SEQ ID NO: 96610 - DNA, 17 bp, Arabidopsis thaliana
gagactgaccggtttgg

SEQ ID NO: 96611 - DNA, 17 bp, Arabidopsis thaliana
gagactgagtatgagcc

SEQ ID NO: 96612 - DNA, 17 bp, Arabidopsis thaliana
gagactgcagaagtcgt

SEQ ID NO: 96613 - DNA, 17 bp, Arabidopsis thaliana
gagactgcagaagttgt

SEQ ID NO: 96614 - DNA, 17 bp, Arabidopsis thaliana
gagactgcattggttcc

SEQ ID NO: 96615 - DNA, 17 bp, Arabidopsis thaliana
gagactggctcaactca

SEQ ID NO: 96616 - DNA, 17 bp, Arabidopsis thaliana
gagactggcttaactca

SEQ ID NO: 96617 - DNA, 17 bp, Arabidopsis thaliana
gagactgggaaagacta

SEQ ID NO: 96618 - DNA, 17 bp, Arabidopsis thaliana
gagactgggttgacagg

SEQ ID NO: 96619 - DNA, 17 bp, Arabidopsis thaliana
gagactggttgaacttg

SEQ ID NO: 96620 - DNA, 17 bp, Arabidopsis thaliana
gagactgtccatgagct

SEQ ID NO: 96621 - DNA, 17 bp, Arabidopsis thaliana
gagactgtccgttttgc

SEQ ID NO: 96622 - DNA, 17 bp, Arabidopsis thaliana
gagactgtcttaactca

SEQ ID NO: 96623 - DNA, 17 bp, Arabidopsis thaliana
gagactgtgctcggaat

SEQ ID NO: 96624 - DNA, 17 bp, Arabidopsis thaliana
gagactgttcaaataac

SEQ ID NO: 96625 - DNA, 17 bp, Arabidopsis thaliana
gagactgttgcggtgcg

SEQ ID NO: 96626 - DNA, 17 bp, Arabidopsis thaliana
gagacttaaccgcacgg

SEQ ID NO: 96627 - DNA, 17 bp, Arabidopsis thaliana
gagacttaagtgtttaa

SEQ ID NO: 96628 - DNA, 17 bp, Arabidopsis thaliana
gagacttaccatgatgg

SEQ ID NO: 96629 - DNA, 17 bp, Arabidopsis thaliana
gagacttagagcatttc

SEQ ID NO: 96630 - DNA, 17 bp, Arabidopsis thaliana
gagacttattgtttgcg

SEQ ID NO: 96631 - DNA, 17 bp, Arabidopsis thaliana
gagacttatttacaatg

SEQ ID NO: 96632 - DNA, 17 bp, Arabidopsis thaliana
gagacttatttacagcg

SEQ ID NO: 96633 - DNA, 17 bp, Arabidopsis thaliana
gagacttatttacgaaa

SEQ ID NO: 96634 - DNA, 17 bp, Arabidopsis thaliana
gagacttatttacgatg

SEQ ID NO: 96635 - DNA, 17 bp, Arabidopsis thaliana
gagacttatttacgttg

SEQ ID NO: 96636 - DNA, 17 bp, Arabidopsis thaliana
gagacttatttgagtct

SEQ ID NO: 96637 - DNA, 17 bp, Arabidopsis thaliana
gagacttcagaagaatt

SEQ ID NO: 96638 - DNA, 17 bp, Arabidopsis thaliana
gagacttcatcgaccgg

SEQ ID NO: 96639 - DNA, 17 bp, Arabidopsis thaliana
gagacttccggttattc

SEQ ID NO: 96640 - DNA, 17 bp, Arabidopsis thaliana
gagacttcgagctaatc

SEQ ID NO: 96641 - DNA, 17 bp, Arabidopsis thaliana
gagacttgcctcgtgtt

SEQ ID NO: 96642 - DNA, 17 bp, Arabidopsis thaliana
gagacttgctcatttgt

SEQ ID NO: 96643 - DNA, 17 bp, Arabidopsis thaliana
gagacttgcttgtaacg

SEQ ID NO: 96644 - DNA, 17 bp, Arabidopsis thaliana
gagacttgggagccaga

SEQ ID NO: 96645 - DNA, 17 bp, Arabidopsis thaliana
gagacttggggtgaact

SEQ ID NO: 96646 - DNA, 17 bp, Arabidopsis thaliana
gagacttggtggtggtg

SEQ ID NO: 96647 - DNA, 17 bp, Arabidopsis thaliana
gagacttgtcaaaggca

SEQ ID NO: 96648 - DNA, 17 bp, Arabidopsis thaliana
gagacttgtcatgatgg

SEQ ID NO: 96649 - DNA, 17 bp, Arabidopsis thaliana
gagacttgtgcttcctt

SEQ ID NO: 96650 - DNA, 17 bp, Arabidopsis thaliana
gagactttactcgacca

SEQ ID NO: 96651 - DNA, 17 bp, Arabidopsis thaliana
gagactttagccatgaa

SEQ ID NO: 96652 - DNA, 17 bp, Arabidopsis thaliana
gagactttagccatgga

SEQ ID NO: 96653 - DNA, 17 bp, Arabidopsis thaliana
gagactttagcccagct

SEQ ID NO: 96654 - DNA, 17 bp, Arabidopsis thaliana
gagactttagccgagct

SEQ ID NO: 96655 - DNA, 17 bp, Arabidopsis thaliana
gagactttaggccaaga

SEQ ID NO: 96656 - DNA, 17 bp, Arabidopsis thaliana
gagactttctagctagc

SEQ ID NO: 96657 - DNA, 17 bp, Arabidopsis thaliana
gagactttgagtgttga

SEQ ID NO: 96658 - DNA, 17 bp, Arabidopsis thaliana
gagactttggcgtagtc

SEQ ID NO: 96659 - DNA, 17 bp, Arabidopsis thaliana
gagactttgtctcccct

SEQ ID NO: 96660 - DNA, 17 bp, Arabidopsis thaliana
gagactttgtctccctt

SEQ ID NO: 96661 - DNA, 17 bp, Arabidopsis thaliana
gagacttttagttgtct

SEQ ID NO: 96662 - DNA, 17 bp, Arabidopsis thaliana
gagacttttgatgggct

SEQ ID NO: 96663 - DNA, 17 bp, Arabidopsis thaliana
gagacttttgttccagg

SEQ ID NO: 96664 - DNA, 17 bp, Arabidopsis thaliana
gagagaaaggacgaggt

SEQ ID NO: 96665 - DNA, 17 bp, Arabidopsis thaliana
gagagaaagggtgtgtg

SEQ ID NO: 96666 - DNA, 17 bp, Arabidopsis thaliana
gagagaaattgaacagt

SEQ ID NO: 96667 - DNA, 17 bp, Arabidopsis thaliana
gagagaaattgtatttc

SEQ ID NO: 96668 - DNA, 17 bp, Arabidopsis thaliana
gagagaaccgcgcagag

SEQ ID NO: 96669 - DNA, 17 bp, Arabidopsis thaliana
gagagaacttctcttaa

SEQ ID NO: 96670 - DNA, 17 bp, Arabidopsis thaliana
gagagaagcctcgtgga

SEQ ID NO: 96671 - DNA, 17 bp, Arabidopsis thaliana
gagagaagtccggctga

SEQ ID NO: 96672 - DNA, 17 bp, Arabidopsis thaliana
gagagacacaatcggcg

SEQ ID NO: 96673 - DNA, 17 bp, Arabidopsis thaliana
gagagacacggtgacga

SEQ ID NO: 96674 - DNA, 17 bp, Arabidopsis thaliana
gagagacacggtgactt

SEQ ID NO: 96675 - DNA, 17 bp, Arabidopsis thaliana
gagagacactgtggctt

SEQ ID NO: 96676 - DNA, 17 bp, Arabidopsis thaliana
gagagacaggatccaca

SEQ ID NO: 96677 - DNA, 17 bp, Arabidopsis thaliana
gagagaccagctcgtgg

SEQ ID NO: 96678 - DNA, 17 bp, Arabidopsis thaliana
gagagaccgctgtcgtt

SEQ ID NO: 96679 - DNA, 17 bp, Arabidopsis thaliana
gagagacgattctcagc

SEQ ID NO: 96680 - DNA, 17 bp, Arabidopsis thaliana
gagagacggatttgcag

SEQ ID NO: 96681 - DNA, 17 bp, Arabidopsis thaliana
gagagacggttgaccgc

SEQ ID NO: 96682 - DNA, 17 bp, Arabidopsis thaliana
gagagacgtttctggcc

SEQ ID NO: 96683 - DNA, 17 bp, Arabidopsis thaliana
gagagactccgaagttc

SEQ ID NO: 96684 - DNA, 17 bp, Arabidopsis thaliana
gagagagaagtgagaat

SEQ ID NO: 96685 - DNA, 17 bp, Arabidopsis thaliana
gagagagacatggctat

SEQ ID NO: 96686 - DNA, 17 bp, Arabidopsis thaliana
gagagagactctggacg

SEQ ID NO: 96687 - DNA, 17 bp, Arabidopsis thaliana
gagagagagaaagaggg

SEQ ID NO: 96688 - DNA, 17 bp, Arabidopsis thaliana
gagagagagagacatgt

SEQ ID NO: 96689 - DNA, 17 bp, Arabidopsis thaliana
gagagagaggagcgaga

SEQ ID NO: 96690 - DNA, 17 bp, Arabidopsis thaliana
gagagagcagagcgtac

SEQ ID NO: 96691 - DNA, 17 bp, Arabidopsis thaliana
gagagagccgttcccag

SEQ ID NO: 96692 - DNA, 17 bp, Arabidopsis thaliana
gagagagcgtgggtcag

SEQ ID NO: 96693 - DNA, 17 bp, Arabidopsis thaliana
gagagagctttgttccg

SEQ ID NO: 96694 - DNA, 17 bp, Arabidopsis thaliana
gagagagggcactttgc

SEQ ID NO: 96695 - DNA, 17 bp, Arabidopsis thaliana
gagagagttggccaact

SEQ ID NO: 96696 - DNA, 17 bp, Arabidopsis thaliana
gagagatacagtgcgtt

SEQ ID NO: 96697 - DNA, 17 bp, Arabidopsis thaliana
gagagatatgtgagctg

SEQ ID NO: 96698 - DNA, 17 bp, Arabidopsis thaliana
gagagatcaggaggccg

SEQ ID NO: 96699 - DNA, 17 bp, Arabidopsis thaliana
gagagatcccttgtgac

SEQ ID NO: 96700 - DNA, 17 bp, Arabidopsis thaliana
gagagatccttgtcctc

SEQ ID NO: 96701 - DNA, 17 bp, Arabidopsis thaliana
gagagatcgggcttttt

SEQ ID NO: 96702 - DNA, 17 bp, Arabidopsis thaliana
gagagatctaataccgg

SEQ ID NO: 96703 - DNA, 17 bp, Arabidopsis thaliana
gagagatctgcaggttt

SEQ ID NO: 96704 - DNA, 17 bp, Arabidopsis thaliana
gagagatggccgagtgg

SEQ ID NO: 96705 - DNA, 17 bp, Arabidopsis thaliana
gagagatggctgagtgg

SEQ ID NO: 96706 - DNA, 17 bp, Arabidopsis thaliana
gagagatgtcgtctgtc

SEQ ID NO: 96707 - DNA, 17 bp, Arabidopsis thaliana
gagagatgtcgtggaac

SEQ ID NO: 96708 - DNA, 17 bp, Arabidopsis thaliana
gagagattacaggcttc

SEQ ID NO: 96709 - DNA, 17 bp, Arabidopsis thaliana
gagagattacgggcttc

SEQ ID NO: 96710 - DNA, 17 bp, Arabidopsis thaliana
gagagattacgggtttc

SEQ ID NO: 96711 - DNA, 17 bp, Arabidopsis thaliana
gagagattggtcgtcgc

SEQ ID NO: 96712 - DNA, 17 bp, Arabidopsis thaliana
gagagatttccagttat

SEQ ID NO: 96713 - DNA, 17 bp, Arabidopsis thaliana
gagagattttaccactg

SEQ ID NO: 96714 - DNA, 17 bp, Arabidopsis thaliana
gagagcaacctctgcag

SEQ ID NO: 96715 - DNA, 17 bp, Arabidopsis thaliana
gagagcacgtctgcctg

SEQ ID NO: 96716 - DNA, 17 bp, Arabidopsis thaliana
gagagcagaacacgggt

SEQ ID NO: 96717 - DNA, 17 bp, Arabidopsis thaliana
gagagcagagctggccc

SEQ ID NO: 96718 - DNA, 17 bp, Arabidopsis thaliana
gagagcagctgattact

SEQ ID NO: 96719 - DNA, 17 bp, Arabidopsis thaliana
gagagcatgcctgtcgg

SEQ ID NO: 96720 - DNA, 17 bp, Arabidopsis thaliana
gagagcatgtccattgc

SEQ ID NO: 96721 - DNA, 17 bp, Arabidopsis thaliana
gagagcatgttcattgc

SEQ ID NO: 96722 - DNA, 17 bp, Arabidopsis thaliana
gagagccacggcctgcc

SEQ ID NO: 96723 - DNA, 17 bp, Arabidopsis thaliana
gagagccagcgcccagt

SEQ ID NO: 96724 - DNA, 17 bp, Arabidopsis thaliana
gagagccattggtgaag

SEQ ID NO: 96725 - DNA, 17 bp, Arabidopsis thaliana
gagagccccgccgtgcc

SEQ ID NO: 96726 - DNA, 17 bp, Arabidopsis thaliana
gagagccccgtcgtgcc

SEQ ID NO: 96727 - DNA, 17 bp, Arabidopsis thaliana
gagagccctccgacgaa

SEQ ID NO: 96728 - DNA, 17 bp, Arabidopsis thaliana
gagagccgtccgaattg

SEQ ID NO: 96729 - DNA, 17 bp, Arabidopsis thaliana
gagagccgttcccagtc

SEQ ID NO: 96730 - DNA, 17 bp, Arabidopsis thaliana
gagagcctcttcctgac

SEQ ID NO: 96731 - DNA, 17 bp, Arabidopsis thaliana
gagagcgaacgtgagca

SEQ ID NO: 96732 - DNA, 17 bp, Arabidopsis thaliana
gagagcgagagagagga

SEQ ID NO: 96733 - DNA, 17 bp, Arabidopsis thaliana
gagagcgcgtgagagag

SEQ ID NO: 96734 - DNA, 17 bp, Arabidopsis thaliana
gagagcgggtcgccgcg

SEQ ID NO: 96735 - DNA, 17 bp, Arabidopsis thaliana
gagaggaacgcctatcg

SEQ ID NO: 96736 - DNA, 17 bp, Arabidopsis thaliana
gagaggaacgcctatct

SEQ ID NO: 96737 - DNA, 17 bp, Arabidopsis thaliana
gagaggaagccatggca

SEQ ID NO: 96738 - DNA, 17 bp, Arabidopsis thaliana
gagaggaaggcggggac

SEQ ID NO: 96739 - DNA, 17 bp, Arabidopsis thaliana
gagaggaaggcgggtac

SEQ ID NO: 96740 - DNA, 17 bp, Arabidopsis thaliana
gagaggaccagggtagc

SEQ ID NO: 96741 - DNA, 17 bp, Arabidopsis thaliana
gagaggaccttggtcgt

SEQ ID NO: 96742 - DNA, 17 bp, Arabidopsis thaliana
gagaggacggatgatat

SEQ ID NO: 96743 - DNA, 17 bp, Arabidopsis thaliana
gagaggactctaggagc

SEQ ID NO: 96744 - DNA, 17 bp, Arabidopsis thaliana
gagaggactctaggagg

SEQ ID NO: 96745 - DNA, 17 bp, Arabidopsis thaliana
gagaggactctcgaaga

SEQ ID NO: 96746 - DNA, 17 bp, Arabidopsis thaliana
gagaggacttgttgacg

SEQ ID NO: 96747 - DNA, 17 bp, Arabidopsis thaliana
gagaggagccgtcttag

SEQ ID NO: 96748 - DNA, 17 bp, Arabidopsis thaliana
gagaggatatgcagcca

SEQ ID NO: 96749 - DNA, 17 bp, Arabidopsis thaliana
gagaggatccgaaatca

SEQ ID NO: 96750 - DNA, 17 bp, Arabidopsis thaliana
gagaggatgacggaatg

SEQ ID NO: 96751 - DNA, 17 bp, Arabidopsis thaliana
gagaggatgatcagcca

SEQ ID NO: 96752 - DNA, 17 bp, Arabidopsis thaliana
gagaggatggaacctgc

SEQ ID NO: 96753 - DNA, 17 bp, Arabidopsis thaliana
gagaggatgtacaggct

SEQ ID NO: 96754 - DNA, 17 bp, Arabidopsis thaliana
gagaggatgtggcgggg

SEQ ID NO: 96755 - DNA, 17 bp, Arabidopsis thaliana
gagaggattacggaatt

SEQ ID NO: 96756 - DNA, 17 bp, Arabidopsis thaliana
gagaggcacggggatcg

SEQ ID NO: 96757 - DNA, 17 bp, Arabidopsis thaliana
gagaggcacggggtttc

SEQ ID NO: 96758 - DNA, 17 bp, Arabidopsis thaliana
gagaggccacaccaacg

SEQ ID NO: 96759 - DNA, 17 bp, Arabidopsis thaliana
gagaggccagcccatgc

SEQ ID NO: 96760 - DNA, 17 bp, Arabidopsis thaliana
gagaggccctctcacgg

SEQ ID NO: 96761 - DNA, 17 bp, Arabidopsis thaliana
gagaggcgagaccgaca

SEQ ID NO: 96762 - DNA, 17 bp, Arabidopsis thaliana
gagaggcggaacccaca

SEQ ID NO: 96763 - DNA, 17 bp, Arabidopsis thaliana
gagaggcggcggcggct

SEQ ID NO: 96764 - DNA, 17 bp, Arabidopsis thaliana
gagaggctcggtgaaat

SEQ ID NO: 96765 - DNA, 17 bp, Arabidopsis thaliana
gagagggaaaatcagcg

SEQ ID NO: 96766 - DNA, 17 bp, Arabidopsis thaliana
gagaggggacatctcag

SEQ ID NO: 96767 - DNA, 17 bp, Arabidopsis thaliana
gagaggggctccaaaaa

SEQ ID NO: 96768 - DNA, 17 bp, Arabidopsis thaliana
gagaggggtgcggcggt

SEQ ID NO: 96769 - DNA, 17 bp, Arabidopsis thaliana
gagaggtacggggatcg

SEQ ID NO: 96770 - DNA, 17 bp, Arabidopsis thaliana
gagaggtcccgagttca

SEQ ID NO: 96771 - DNA, 17 bp, Arabidopsis thaliana
gagaggtctatccatcg

SEQ ID NO: 96772 - DNA, 17 bp, Arabidopsis thaliana
gagaggtggaacttgga

SEQ ID NO: 96773 - DNA, 17 bp, Arabidopsis thaliana
gagaggttcatccacgg

SEQ ID NO: 96774 - DNA, 17 bp, Arabidopsis thaliana
gagaggttttgcccgtt

SEQ ID NO: 96775 - DNA, 17 bp, Arabidopsis thaliana
gagagtaagaacgtcgg

SEQ ID NO: 96776 - DNA, 17 bp, Arabidopsis thaliana
gagagtacgagcccttg

SEQ ID NO: 96777 - DNA, 17 bp, Arabidopsis thaliana
gagagtaggacgtcgcc

SEQ ID NO: 96778 - DNA, 17 bp, Arabidopsis thaliana
gagagtaggacgttgcc

SEQ ID NO: 96779 - DNA, 17 bp, Arabidopsis thaliana
gagagtatcggcagaac

SEQ ID NO: 96780 - DNA, 17 bp, Arabidopsis thaliana
gagagtcatcccagtgg

SEQ ID NO: 96781 - DNA, 17 bp, Arabidopsis thaliana
gagagtcattcaggaac

SEQ ID NO: 96782 - DNA, 17 bp, Arabidopsis thaliana
gagagtccagaacttga

SEQ ID NO: 96783 - DNA, 17 bp, Arabidopsis thaliana
gagagtccatccgaatg

SEQ ID NO: 96784 - DNA, 17 bp, Arabidopsis thaliana
gagagtccctctacgcg

SEQ ID NO: 96785 - DNA, 17 bp, Arabidopsis thaliana
gagagtctcttcccgac

SEQ ID NO: 96786 - DNA, 17 bp, Arabidopsis thaliana
gagagtctgctggtttg

SEQ ID NO: 96787 - DNA, 17 bp, Arabidopsis thaliana
gagagtgctgacgtgac

SEQ ID NO: 96788 - DNA, 17 bp, Arabidopsis thaliana
gagagtgtcgttacggc

SEQ ID NO: 96789 - DNA, 17 bp, Arabidopsis thaliana
gagagttaaaacggcca

SEQ ID NO: 96790 - DNA, 17 bp, Arabidopsis thaliana
gagagttaagagcatcc

SEQ ID NO: 96791 - DNA, 17 bp, Arabidopsis thaliana
gagagttcgggcctctc

SEQ ID NO: 96792 - DNA, 17 bp, Arabidopsis thaliana
gagagtttcaacaacaa

SEQ ID NO: 96793 - DNA, 17 bp, Arabidopsis thaliana
gagagtttctttccgat

SEQ ID NO: 96794 - DNA, 17 bp, Arabidopsis thaliana
gagagttttgggggatt

SEQ ID NO: 96795 - DNA, 17 bp, Arabidopsis thaliana
gagataaaagtacccat

SEQ ID NO: 96796 - DNA, 17 bp, Arabidopsis thaliana
gagataaattcctgagc

SEQ ID NO: 96797 - DNA, 17 bp, Arabidopsis thaliana
gagataatttcagtcgg

SEQ ID NO: 96798 - DNA, 17 bp, Arabidopsis thaliana
gagatacagtgcgtcgc

SEQ ID NO: 96799 - DNA, 17 bp, Arabidopsis thaliana
gagatacagtgcgttgc

SEQ ID NO: 96800 - DNA, 17 bp, Arabidopsis thaliana
gagataccttcgggaca

SEQ ID NO: 96801 - DNA, 17 bp, Arabidopsis thaliana
gagatactgccaatgga

SEQ ID NO: 96802 - DNA, 17 bp, Arabidopsis thaliana
gagatagactcggtttt

SEQ ID NO: 96803 - DNA, 17 bp, Arabidopsis thaliana
gagataggctattcggc

SEQ ID NO: 96804 - DNA, 17 bp, Arabidopsis thaliana
gagataggctcccaatc

SEQ ID NO: 96805 - DNA, 17 bp, Arabidopsis thaliana
gagatagtcccggtatt

SEQ ID NO: 96806 - DNA, 17 bp, Arabidopsis thaliana
gagatcaaggctgtctc

SEQ ID NO: 96807 - DNA, 17 bp, Arabidopsis thaliana
gagatcaatgtcgagcc

SEQ ID NO: 96808 - DNA, 17 bp, Arabidopsis thaliana
gagatcaccagaaggcc

SEQ ID NO: 96809 - DNA, 17 bp, Arabidopsis thaliana
gagatcacctgggattg

SEQ ID NO: 96810 - DNA, 17 bp, Arabidopsis thaliana
gagatcacgtgtgacag

SEQ ID NO: 96811 - DNA, 17 bp, Arabidopsis thaliana
gagatcagccgataggg

SEQ ID NO: 96812 - DNA, 17 bp, Arabidopsis thaliana
gagatcagccttggttg

SEQ ID NO: 96813 - DNA, 17 bp, Arabidopsis thaliana
gagatcagtatgttgcc

SEQ ID NO: 96814 - DNA, 17 bp, Arabidopsis thaliana
gagatcatactttgggc

SEQ ID NO: 96815 - DNA, 17 bp, Arabidopsis thaliana
gagatccacttagtggc

SEQ ID NO: 96816 - DNA, 17 bp, Arabidopsis thaliana
gagatccaggaatcgtc

SEQ ID NO: 96817 - DNA, 17 bp, Arabidopsis thaliana
gagatccctcctaacat

SEQ ID NO: 96818 - DNA, 17 bp, Arabidopsis thaliana
gagatcccttccaacgt

SEQ ID NO: 96819 - DNA, 17 bp, Arabidopsis thaliana
gagatccgaccatcgtt

SEQ ID NO: 96820 - DNA, 17 bp, Arabidopsis thaliana
gagatccgcggcgtgaa

SEQ ID NO: 96821 - DNA, 17 bp, Arabidopsis thaliana
gagatccggcgatagag

SEQ ID NO: 96822 - DNA, 17 bp, Arabidopsis thaliana
gagatcctccatgacat

SEQ ID NO: 96823 - DNA, 17 bp, Arabidopsis thaliana
gagatcgacatgcgatt

SEQ ID NO: 96824 - DNA, 17 bp, Arabidopsis thaliana
gagatcgacttgggtgc

SEQ ID NO: 96825 - DNA, 17 bp, Arabidopsis thaliana
gagatcgagaccagtag

SEQ ID NO: 96826 - DNA, 17 bp, Arabidopsis thaliana
gagatcgatgggtgagc

SEQ ID NO: 96827 - DNA, 17 bp, Arabidopsis thaliana
gagatcgattgatggtg

SEQ ID NO: 96828 - DNA, 17 bp, Arabidopsis thaliana
gagatcgtcggttcgag

SEQ ID NO: 96829 - DNA, 17 bp, Arabidopsis thaliana
gagatcgtgtagggcgg

SEQ ID NO: 96830 - DNA, 17 bp, Arabidopsis thaliana
gagatctaatcactttg

SEQ ID NO: 96831 - DNA, 17 bp, Arabidopsis thaliana
gagatctacatgcgatt

SEQ ID NO: 96832 - DNA, 17 bp, Arabidopsis thaliana
gagatctcacaagcgtc

SEQ ID NO: 96833 - DNA, 17 bp, Arabidopsis thaliana
gagatctctaaatcttt

SEQ ID NO: 96834 - DNA, 17 bp, Arabidopsis thaliana
gagatctctcccagcgt

SEQ ID NO: 96835 - DNA, 17 bp, Arabidopsis thaliana
gagatctctttctacca

SEQ ID NO: 96836 - DNA, 17 bp, Arabidopsis thaliana
gagatctgcggcgtgaa

SEQ ID NO: 96837 - DNA, 17 bp, Arabidopsis thaliana
gagatctggttgaggtt

SEQ ID NO: 96838 - DNA, 17 bp, Arabidopsis thaliana
gagatctgtctgactta

SEQ ID NO: 96839 - DNA, 17 bp, Arabidopsis thaliana
gagatctgtgcgcttta

SEQ ID NO: 96840 - DNA, 17 bp, Arabidopsis thaliana
gagatctttgggttgga

SEQ ID NO: 96841 - DNA, 17 bp, Arabidopsis thaliana
gagatcttttgcacact

SEQ ID NO: 96842 - DNA, 17 bp, Arabidopsis thaliana
gagatcttttggcctgt

SEQ ID NO: 96843 - DNA, 17 bp, Arabidopsis thaliana
gagatcttttgggttgg

SEQ ID NO: 96844 - DNA, 17 bp, Arabidopsis thaliana
gagatgaaaacgggtgg

SEQ ID NO: 96845 - DNA, 17 bp, Arabidopsis thaliana
gagatgaaaggagcaca

SEQ ID NO: 96846 - DNA, 17 bp, Arabidopsis thaliana
gagatgaacttacctga

SEQ ID NO: 96847 - DNA, 17 bp, Arabidopsis thaliana
gagatgaagcctggtcc

SEQ ID NO: 96848 - DNA, 17 bp, Arabidopsis thaliana
gagatgaatgacttctg

SEQ ID NO: 96849 - DNA, 17 bp, Arabidopsis thaliana
gagatgactcgaccggg

SEQ ID NO: 96850 - DNA, 17 bp, Arabidopsis thaliana
gagatgagagacccata

SEQ ID NO: 96851 - DNA, 17 bp, Arabidopsis thaliana
gagatgatccttaatga

SEQ ID NO: 96852 - DNA, 17 bp, Arabidopsis thaliana
gagatgcgttttaagct

SEQ ID NO: 96853 - DNA, 17 bp, Arabidopsis thaliana
gagatgctcaaagattg

SEQ ID NO: 96854 - DNA, 17 bp, Arabidopsis thaliana
gagatgctctaagatgg

SEQ ID NO: 96855 - DNA, 17 bp, Arabidopsis thaliana
gagatgcttgccgcaca

SEQ ID NO: 96856 - DNA, 17 bp, Arabidopsis thaliana
gagatggacccacacca

SEQ ID NO: 96857 - DNA, 17 bp, Arabidopsis thaliana
gagatggactaaaccgc

SEQ ID NO: 96858 - DNA, 17 bp, Arabidopsis thaliana
gagatggatctgattcg

SEQ ID NO: 96859 - DNA, 17 bp, Arabidopsis thaliana
gagatggatgtgacgac

SEQ ID NO: 96860 - DNA, 17 bp, Arabidopsis thaliana
gagatggccaagctgga

SEQ ID NO: 96861 - DNA, 17 bp, Arabidopsis thaliana
gagatggccgagtgttg

SEQ ID NO: 96862 - DNA, 17 bp, Arabidopsis thaliana
gagatggctcacgggga

SEQ ID NO: 96863 - DNA, 17 bp, Arabidopsis thaliana
gagatggggtcttacaa

SEQ ID NO: 96864 - DNA, 17 bp, Arabidopsis thaliana
gagatggtagaccccct

SEQ ID NO: 96865 - DNA, 17 bp, Arabidopsis thaliana
gagatggttcatccaaa

SEQ ID NO: 96866 - DNA, 17 bp, Arabidopsis thaliana
gagatggtttgtccgct

SEQ ID NO: 96867 - DNA, 17 bp, Arabidopsis thaliana
gagatgtagaacctttg

SEQ ID NO: 96868 - DNA, 17 bp, Arabidopsis thaliana
gagatgtcacctagatt

SEQ ID NO: 96869 - DNA, 17 bp, Arabidopsis thaliana
gagatgtgaagaacctg

SEQ ID NO: 96870 - DNA, 17 bp, Arabidopsis thaliana
gagatgtggttttcacc

SEQ ID NO: 96871 - DNA, 17 bp, Arabidopsis thaliana
gagatgtgtgatgtgtg

SEQ ID NO: 96872 - DNA, 17 bp, Arabidopsis thaliana
gagatgttctgggccgc

SEQ ID NO: 96873 - DNA, 17 bp, Arabidopsis thaliana
gagatgttgggcttacg

SEQ ID NO: 96874 - DNA, 17 bp, Arabidopsis thaliana
gagatgttgggcttgat

SEQ ID NO: 96875 - DNA, 17 bp, Arabidopsis thaliana
gagattaaaattgttta

SEQ ID NO: 96876 - DNA, 17 bp, Arabidopsis thaliana
gagattaaagatcgtcg

SEQ ID NO: 96877 - DNA, 17 bp, Arabidopsis thaliana
gagattacgggcttcgc

SEQ ID NO: 96878 - DNA, 17 bp, Arabidopsis thaliana
gagattacgggtttcgg

SEQ ID NO: 96879 - DNA, 17 bp, Arabidopsis thaliana
gagattagatggtagga

SEQ ID NO: 96880 - DNA, 17 bp, Arabidopsis thaliana
gagattagggttcaagt

SEQ ID NO: 96881 - DNA, 17 bp, Arabidopsis thaliana
gagattagtctggactt

SEQ ID NO: 96882 - DNA, 17 bp, Arabidopsis thaliana
gagattagtgacatccg

SEQ ID NO: 96883 - DNA, 17 bp, Arabidopsis thaliana
gagattatcatggcaca

SEQ ID NO: 96884 - DNA, 17 bp, Arabidopsis thaliana
gagattatcgccaagtc

SEQ ID NO: 96885 - DNA, 17 bp, Arabidopsis thaliana
gagattatcgtgacaca

SEQ ID NO: 96886 - DNA, 17 bp, Arabidopsis thaliana
gagattatggccgattt

SEQ ID NO: 96887 - DNA, 17 bp, Arabidopsis thaliana
gagattatgtgcgaaac

SEQ ID NO: 96888 - DNA, 17 bp, Arabidopsis thaliana
gagattatgtggctgac

SEQ ID NO: 96889 - DNA, 17 bp, Arabidopsis thaliana
gagattatgtgtgaaac

SEQ ID NO: 96890 - DNA, 17 bp, Arabidopsis thaliana
gagattcagccatttgt

SEQ ID NO: 96891 - DNA, 17 bp, Arabidopsis thaliana
gagattcagccctttgt

SEQ ID NO: 96892 - DNA, 17 bp, Arabidopsis thaliana
gagattcagccgttgat

SEQ ID NO: 96893 - DNA, 17 bp, Arabidopsis thaliana
gagattcagttctttgt

SEQ ID NO: 96894 - DNA, 17 bp, Arabidopsis thaliana
gagattcatgggttaag

SEQ ID NO: 96895 - DNA, 17 bp, Arabidopsis thaliana
gagattccaaccgactt

SEQ ID NO: 96896 - DNA, 17 bp, Arabidopsis thaliana
gagattcccactctccc

SEQ ID NO: 96897 - DNA, 17 bp, Arabidopsis thaliana
gagattcccactgtccc

SEQ ID NO: 96898 - DNA, 17 bp, Arabidopsis thaliana
gagattccgcatatcgc

SEQ ID NO: 96899 - DNA, 17 bp, Arabidopsis thaliana
gagattcgattaaccgt

SEQ ID NO: 96900 - DNA, 17 bp, Arabidopsis thaliana
gagattcgcagatgtcg

SEQ ID NO: 96901 - DNA, 17 bp, Arabidopsis thaliana
gagattcgcgttgagat

SEQ ID NO: 96902 - DNA, 17 bp, Arabidopsis thaliana
gagattcggatcgggtt

SEQ ID NO: 96903 - DNA, 17 bp, Arabidopsis thaliana
gagattcgtcgatggcc

SEQ ID NO: 96904 - DNA, 17 bp, Arabidopsis thaliana
gagattcgttttcgtga

SEQ ID NO: 96905 - DNA, 17 bp, Arabidopsis thaliana
gagattctcggagatcc

SEQ ID NO: 96906 - DNA, 17 bp, Arabidopsis thaliana
gagattctggaggatcg

SEQ ID NO: 96907 - DNA, 17 bp, Arabidopsis thaliana
gagattgaagtccgtgt

SEQ ID NO: 96908 - DNA, 17 bp, Arabidopsis thaliana
gagattgatggaatcgc

SEQ ID NO: 96909 - DNA, 17 bp, Arabidopsis thaliana
gagattggatagttgtg

SEQ ID NO: 96910 - DNA, 17 bp, Arabidopsis thaliana
gagattggatggtctca

SEQ ID NO: 96911 - DNA, 17 bp, Arabidopsis thaliana
gagattggatggtttca

SEQ ID NO: 96912 - DNA, 17 bp, Arabidopsis thaliana
gagattggtcctggaat

SEQ ID NO: 96913 - DNA, 17 bp, Arabidopsis thaliana
gagattggttagttgca

SEQ ID NO: 96914 - DNA, 17 bp, Arabidopsis thaliana
gagattggttgccaacg

SEQ ID NO: 96915 - DNA, 17 bp, Arabidopsis thaliana
gagattgtctgagtttt

SEQ ID NO: 96916 - DNA, 17 bp, Arabidopsis thaliana
gagattgtgggttcggg

SEQ ID NO: 96917 - DNA, 17 bp, Arabidopsis thaliana
gagattgtgggttcggt

SEQ ID NO: 96918 - DNA, 17 bp, Arabidopsis thaliana
gagattgtttaccgtcc

SEQ ID NO: 96919 - DNA, 17 bp, Arabidopsis thaliana
gagattgtttgcgggtt

SEQ ID NO: 96920 - DNA, 17 bp, Arabidopsis thaliana
gagatttacgactggtt

SEQ ID NO: 96921 - DNA, 17 bp, Arabidopsis thaliana
gagatttactacgacca

SEQ ID NO: 96922 - DNA, 17 bp, Arabidopsis thaliana
gagatttagccctttgt

SEQ ID NO: 96923 - DNA, 17 bp, Arabidopsis thaliana
gagatttagcgtatgct

SEQ ID NO: 96924 - DNA, 17 bp, Arabidopsis thaliana
gagatttaggctgtgaa

SEQ ID NO: 96925 - DNA, 17 bp, Arabidopsis thaliana
gagatttatcagggtac

SEQ ID NO: 96926 - DNA, 17 bp, Arabidopsis thaliana
gagatttatcagggtgc

SEQ ID NO: 96927 - DNA, 17 bp, Arabidopsis thaliana
gagatttatttacagcg

SEQ ID NO: 96928 - DNA, 17 bp, Arabidopsis thaliana
gagatttcagacttgct

SEQ ID NO: 96929 - DNA, 17 bp, Arabidopsis thaliana
gagatttcctgcacact

SEQ ID NO: 96930 - DNA, 17 bp, Arabidopsis thaliana
gagatttcctggtgttt

SEQ ID NO: 96931 - DNA, 17 bp, Arabidopsis thaliana
gagatttcttccgatgt

SEQ ID NO: 96932 - DNA, 17 bp, Arabidopsis thaliana
gagatttgaagccttcc

SEQ ID NO: 96933 - DNA, 17 bp, Arabidopsis thaliana
gagatttgaggatctag

SEQ ID NO: 96934 - DNA, 17 bp, Arabidopsis thaliana
gagatttgatttggggg

SEQ ID NO: 96935 - DNA, 17 bp, Arabidopsis thaliana
gagatttggacactgtt

SEQ ID NO: 96936 - DNA, 17 bp, Arabidopsis thaliana
gagatttggagaactat

SEQ ID NO: 96937 - DNA, 17 bp, Arabidopsis thaliana
gagatttggatggattt

SEQ ID NO: 96938 - DNA, 17 bp, Arabidopsis thaliana
gagatttggctaagcgg

SEQ ID NO: 96939 - DNA, 17 bp, Arabidopsis thaliana
gagatttgtcgaccagg

SEQ ID NO: 96940 - DNA, 17 bp, Arabidopsis thaliana
gagatttgtcgttggtg

SEQ ID NO: 96941 - DNA, 17 bp, Arabidopsis thaliana
gagatttgttaacgggg

SEQ ID NO: 96942 - DNA, 17 bp, Arabidopsis thaliana
gagattttcgttatctg

SEQ ID NO: 96943 - DNA, 17 bp, Arabidopsis thaliana
gagattttctgcacact

SEQ ID NO: 96944 - DNA, 17 bp, Arabidopsis thaliana
gagattttgacaactca

SEQ ID NO: 96945 - DNA, 17 bp, Arabidopsis thaliana
gagattttgacactgtt

SEQ ID NO: 96946 - DNA, 17 bp, Arabidopsis thaliana
gagattttgctgattga

SEQ ID NO: 96947 - DNA, 17 bp, Arabidopsis thaliana
gagattttgctgatttt

SEQ ID NO: 96948 - DNA, 17 bp, Arabidopsis thaliana
gagattttggtgtagct

SEQ ID NO: 96949 - DNA, 17 bp, Arabidopsis thaliana
gagcaaagagcgactgt

SEQ ID NO: 96950 - DNA, 17 bp, Arabidopsis thaliana
gagcaaagctcagatct

SEQ ID NO: 96951 - DNA, 17 bp, Arabidopsis thaliana
gagcaaatcctacagag

SEQ ID NO: 96952 - DNA, 17 bp, Arabidopsis thaliana
gagcaacataaaagacc

SEQ ID NO: 96953 - DNA, 17 bp, Arabidopsis thaliana
gagcaaccaaatccgga

SEQ ID NO: 96954 - DNA, 17 bp, Arabidopsis thaliana
gagcaacgacgctctct

SEQ ID NO: 96955 - DNA, 17 bp, Arabidopsis thaliana
gagcaacggtcacatgt

SEQ ID NO: 96956 - DNA, 17 bp, Arabidopsis thaliana
gagcaactggcaggatg

SEQ ID NO: 96957 - DNA, 17 bp, Arabidopsis thaliana
gagcaagacagactctg

SEQ ID NO: 96958 - DNA, 17 bp, Arabidopsis thaliana
gagcaagagcgtgactg

SEQ ID NO: 96959 - DNA, 17 bp, Arabidopsis thaliana
gagcaagccttggtgac

SEQ ID NO: 96960 - DNA, 17 bp, Arabidopsis thaliana
gagcaagtctagtaagg

SEQ ID NO: 96961 - DNA, 17 bp, Arabidopsis thaliana
gagcacacaccagtcat

SEQ ID NO: 96962 - DNA, 17 bp, Arabidopsis thaliana
gagcacacgtgaagaac

SEQ ID NO: 96963 - DNA, 17 bp, Arabidopsis thaliana
gagcacactctgatggt

SEQ ID NO: 96964 - DNA, 17 bp, Arabidopsis thaliana
gagcacactgaatggac

SEQ ID NO: 96965 - DNA, 17 bp, Arabidopsis thaliana
gagcacagtagccgttg

SEQ ID NO: 96966 - DNA, 17 bp, Arabidopsis thaliana
gagcacagtgtggacga

SEQ ID NO: 96967 - DNA, 17 bp, Arabidopsis thaliana
gagcaccaccaccaccc

SEQ ID NO: 96968 - DNA, 17 bp, Arabidopsis thaliana
gagcaccaccaccactc

SEQ ID NO: 96969 - DNA, 17 bp, Arabidopsis thaliana
gagcacccttcaatcca

SEQ ID NO: 96970 - DNA, 17 bp, Arabidopsis thaliana
gagcaccgaacagttac

SEQ ID NO: 96971 - DNA, 17 bp, Arabidopsis thaliana
gagcaccgactgtggct

SEQ ID NO: 96972 - DNA, 17 bp, Arabidopsis thaliana
gagcaccgcacgtcacg

SEQ ID NO: 96973 - DNA, 17 bp, Arabidopsis thaliana
gagcaccgcacgtcgcg

SEQ ID NO: 96974 - DNA, 17 bp, Arabidopsis thaliana
gagcaccgccgaagctt

SEQ ID NO: 96975 - DNA, 17 bp, Arabidopsis thaliana
gagcaccgccgtcaatg

SEQ ID NO: 96976 - DNA, 17 bp, Arabidopsis thaliana
gagcaccggatttcgac

SEQ ID NO: 96977 - DNA, 17 bp, Arabidopsis thaliana
gagcaccggctttggcg

SEQ ID NO: 96978 - DNA, 17 bp, Arabidopsis thaliana
gagcacgacatggttgg

SEQ ID NO: 96979 - DNA, 17 bp, Arabidopsis thaliana
gagcacgacgctcatgt

SEQ ID NO: 96980 - DNA, 17 bp, Arabidopsis thaliana
gagcacgaggttctatc

SEQ ID NO: 96981 - DNA, 17 bp, Arabidopsis thaliana
gagcacgctttagggtg

SEQ ID NO: 96982 - DNA, 17 bp, Arabidopsis thaliana
gagcacgcttttagggt

SEQ ID NO: 96983 - DNA, 17 bp, Arabidopsis thaliana
gagcacggcaagcggga

SEQ ID NO: 96984 - DNA, 17 bp, Arabidopsis thaliana
gagcacggggttttcgc

SEQ ID NO: 96985 - DNA, 17 bp, Arabidopsis thaliana
gagcacgtcggcctggg

SEQ ID NO: 96986 - DNA, 17 bp, Arabidopsis thaliana
gagcacgtctgcctgag

SEQ ID NO: 96987 - DNA, 17 bp, Arabidopsis thaliana
gagcacgtctgcctggg

SEQ ID NO: 96988 - DNA, 17 bp, Arabidopsis thaliana
gagcacgtgtcgttggc

SEQ ID NO: 96989 - DNA, 17 bp, Arabidopsis thaliana
gagcactgctctatctg

SEQ ID NO: 96990 - DNA, 17 bp, Arabidopsis thaliana
gagcagaaggctgacct

SEQ ID NO: 96991 - DNA, 17 bp, Arabidopsis thaliana
gagcagaatggcagcag

SEQ ID NO: 96992 - DNA, 17 bp, Arabidopsis thaliana
gagcagacaatgtttga

SEQ ID NO: 96993 - DNA, 17 bp, Arabidopsis thaliana
gagcagacccgggtttc

SEQ ID NO: 96994 - DNA, 17 bp, Arabidopsis thaliana
gagcagacttacagcct

SEQ ID NO: 96995 - DNA, 17 bp, Arabidopsis thaliana
gagcagagagaagatga

SEQ ID NO: 96996 - DNA, 17 bp, Arabidopsis thaliana
gagcagagcggatctag

SEQ ID NO: 96997 - DNA, 17 bp, Arabidopsis thaliana
gagcagagctttgcttg

SEQ ID NO: 96998 - DNA, 17 bp, Arabidopsis thaliana
gagcagagggtgagccg

SEQ ID NO: 96999 - DNA, 17 bp, Arabidopsis thaliana
gagcagaggtcgagtac

SEQ ID NO: 97000 - DNA, 17 bp, Arabidopsis thaliana
gagcagagtcagatatg

SEQ ID NO: 97001 - DNA, 17 bp, Arabidopsis thaliana
gagcagagtgtcgagca

SEQ ID NO: 97002 - DNA, 17 bp, Arabidopsis thaliana
gagcagatatccagttg

SEQ ID NO: 97003 - DNA, 17 bp, Arabidopsis thaliana
gagcagatcttgtggaa

SEQ ID NO: 97004 - DNA, 17 bp, Arabidopsis thaliana
gagcagattatcggctt

SEQ ID NO: 97005 - DNA, 17 bp, Arabidopsis thaliana
gagcagcagcgcgtgta

SEQ ID NO: 97006 - DNA, 17 bp, Arabidopsis thaliana
gagcagccactcgacca

SEQ ID NO: 97007 - DNA, 17 bp, Arabidopsis thaliana
gagcagccgcagaacga

SEQ ID NO: 97008 - DNA, 17 bp, Arabidopsis thaliana
gagcagccgtagaacga

SEQ ID NO: 97009 - DNA, 17 bp, Arabidopsis thaliana
gagcagcgacacgtgcc

SEQ ID NO: 97010 - DNA, 17 bp, Arabidopsis thaliana
gagcagcgcatagagcc

SEQ ID NO: 97011 - DNA, 17 bp, Arabidopsis thaliana
gagcagcgtctaagcca

SEQ ID NO: 97012 - DNA, 17 bp, Arabidopsis thaliana
gagcagctacgtctctg

SEQ ID NO: 97013 - DNA, 17 bp, Arabidopsis thaliana
gagcagctctgcgctct

SEQ ID NO: 97014 - DNA, 17 bp, Arabidopsis thaliana
gagcagctgagcttgtt

SEQ ID NO: 97015 - DNA, 17 bp, Arabidopsis thaliana
gagcagctgattactct

SEQ ID NO: 97016 - DNA, 17 bp, Arabidopsis thaliana
gagcaggaccgcttgat

SEQ ID NO: 97017 - DNA, 17 bp, Arabidopsis thaliana
gagcaggacgacccggt

SEQ ID NO: 97018 - DNA, 17 bp, Arabidopsis thaliana
gagcaggatttgattgg

SEQ ID NO: 97019 - DNA, 17 bp, Arabidopsis thaliana
gagcaggcacgtcgcgg

SEQ ID NO: 97020 - DNA, 17 bp, Arabidopsis thaliana
gagcaggcactggtagg

SEQ ID NO: 97021 - DNA, 17 bp, Arabidopsis thaliana
gagcaggcgcatattgt

SEQ ID NO: 97022 - DNA, 17 bp, Arabidopsis thaliana
gagcagggccggccctg

SEQ ID NO: 97023 - DNA, 17 bp, Arabidopsis thaliana
gagcaggttcacattgt

SEQ ID NO: 97024 - DNA, 17 bp, Arabidopsis thaliana
gagcaggttggcgtcat

SEQ ID NO: 97025 - DNA, 17 bp, Arabidopsis thaliana
gagcagtccgctgacac

SEQ ID NO: 97026 - DNA, 17 bp, Arabidopsis thaliana
gagcagtccgctgacag

SEQ ID NO: 97027 - DNA, 17 bp, Arabidopsis thaliana
gagcagtcgccggattc

SEQ ID NO: 97028 - DNA, 17 bp, Arabidopsis thaliana
gagcagtgccgcgtgga

SEQ ID NO: 97029 - DNA, 17 bp, Arabidopsis thaliana
gagcagttatgtatctg

SEQ ID NO: 97030 - DNA, 17 bp, Arabidopsis thaliana
gagcagttgatgatgaa

SEQ ID NO: 97031 - DNA, 17 bp, Arabidopsis thaliana
gagcagtttggcgtcgc

SEQ ID NO: 97032 - DNA, 17 bp, Arabidopsis thaliana
gagcataatccgtcact

SEQ ID NO: 97033 - DNA, 17 bp, Arabidopsis thaliana
gagcatacttgatcggc

SEQ ID NO: 97034 - DNA, 17 bp, Arabidopsis thaliana
gagcatatcatgatgtg

SEQ ID NO: 97035 - DNA, 17 bp, Arabidopsis thaliana
gagcatatcttcagact

SEQ ID NO: 97036 - DNA, 17 bp, Arabidopsis thaliana
gagcatgaatacttttg

SEQ ID NO: 97037 - DNA, 17 bp, Arabidopsis thaliana
gagcatgtccaatggtg

SEQ ID NO: 97038 - DNA, 17 bp, Arabidopsis thaliana
gagcattaaggacttgg

SEQ ID NO: 97039 - DNA, 17 bp, Arabidopsis thaliana
gagcattacgatctgca

SEQ ID NO: 97040 - DNA, 17 bp, Arabidopsis thaliana
gagcattattgtcttca

SEQ ID NO: 97041 - DNA, 17 bp, Arabidopsis thaliana
gagcattcctacagtgt

SEQ ID NO: 97042 - DNA, 17 bp, Arabidopsis thaliana
gagcattgacgacgccg

SEQ ID NO: 97043 - DNA, 17 bp, Arabidopsis thaliana
gagcattgagaggacct

SEQ ID NO: 97044 - DNA, 17 bp, Arabidopsis thaliana
gagcattttcattggtg

SEQ ID NO: 97045 - DNA, 17 bp, Arabidopsis thaliana
gagcattttcgtgattt

SEQ ID NO: 97046 - DNA, 17 bp, Arabidopsis thaliana
gagcattttgtgatgaa

SEQ ID NO: 97047 - DNA, 17 bp, Arabidopsis thaliana
gagccaaaaattcatgt

SEQ ID NO: 97048 - DNA, 17 bp, Arabidopsis thaliana
gagccaaagatgacttg

SEQ ID NO: 97049 - DNA, 17 bp, Arabidopsis thaliana
gagccaaagtggctaat

SEQ ID NO: 97050 - DNA, 17 bp, Arabidopsis thaliana
gagccaaccttgctttg

SEQ ID NO: 97051 - DNA, 17 bp, Arabidopsis thaliana
gagccaagaagtggaag

SEQ ID NO: 97052 - DNA, 17 bp, Arabidopsis thaliana
gagccaagataaacatt

SEQ ID NO: 97053 - DNA, 17 bp, Arabidopsis thaliana
gagccaaggatgacttg

SEQ ID NO: 97054 - DNA, 17 bp, Arabidopsis thaliana
gagccaagggaacacca

SEQ ID NO: 97055 - DNA, 17 bp, Arabidopsis thaliana
gagccaagtgatgtaaa

SEQ ID NO: 97056 - DNA, 17 bp, Arabidopsis thaliana
gagccaatcgcaccaaa

SEQ ID NO: 97057 - DNA, 17 bp, Arabidopsis thaliana
gagccaatcgggtcgtc

SEQ ID NO: 97058 - DNA, 17 bp, Arabidopsis thaliana
gagccaatgttcgagta

SEQ ID NO: 97059 - DNA, 17 bp, Arabidopsis thaliana
gagccaattctctgcct

SEQ ID NO: 97060 - DNA, 17 bp, Arabidopsis thaliana
gagccacaaggcaccgc

SEQ ID NO: 97061 - DNA, 17 bp, Arabidopsis thaliana
gagccaccggataggcg

SEQ ID NO: 97062 - DNA, 17 bp, Arabidopsis thaliana
gagccaccgggtctcac

SEQ ID NO: 97063 - DNA, 17 bp, Arabidopsis thaliana
gagccactctcgtcgct

SEQ ID NO: 97064 - DNA, 17 bp, Arabidopsis thaliana
gagccagaatgccagat

SEQ ID NO: 97065 - DNA, 17 bp, Arabidopsis thaliana
gagccagacaacagtcc

SEQ ID NO: 97066 - DNA, 17 bp, Arabidopsis thaliana
gagccagaccggtgtcc

SEQ ID NO: 97067 - DNA, 17 bp, Arabidopsis thaliana
gagccagaggtgaggat

SEQ ID NO: 97068 - DNA, 17 bp, Arabidopsis thaliana
gagccagatccaaggtg

SEQ ID NO: 97069 - DNA, 17 bp, Arabidopsis thaliana
gagccaggaagtgtaat

SEQ ID NO: 97070 - DNA, 17 bp, Arabidopsis thaliana
gagccaggcccgggcga

SEQ ID NO: 97071 - DNA, 17 bp, Arabidopsis thaliana
gagccaggcctcgatga

SEQ ID NO: 97072 - DNA, 17 bp, Arabidopsis thaliana
gagccaggcctcgatta

SEQ ID NO: 97073 - DNA, 17 bp, Arabidopsis thaliana
gagccaggtgaaggcca

SEQ ID NO: 97074 - DNA, 17 bp, Arabidopsis thaliana
gagccagtcgcagaaga

SEQ ID NO: 97075 - DNA, 17 bp, Arabidopsis thaliana
gagccagtctccgccat

SEQ ID NO: 97076 - DNA, 17 bp, Arabidopsis thaliana
gagccagtctccgcttc

SEQ ID NO: 97077 - DNA, 17 bp, Arabidopsis thaliana
gagccagttgtggtctg

SEQ ID NO: 97078 - DNA, 17 bp, Arabidopsis thaliana
gagccataaactattta

SEQ ID NO: 97079 - DNA, 17 bp, Arabidopsis thaliana
gagccataagacagctg

SEQ ID NO: 97080 - DNA, 17 bp, Arabidopsis thaliana
gagccataagttattca

SEQ ID NO: 97081 - DNA, 17 bp, Arabidopsis thaliana
gagccatcctgtagggt

SEQ ID NO: 97082 - DNA, 17 bp, Arabidopsis thaliana
gagccatctcgaggggg

SEQ ID NO: 97083 - DNA, 17 bp, Arabidopsis thaliana
gagccatgaatcttgtg

SEQ ID NO: 97084 - DNA, 17 bp, Arabidopsis thaliana
gagccatgatattattt

SEQ ID NO: 97085 - DNA, 17 bp, Arabidopsis thaliana
gagccattagctcagtt

SEQ ID NO: 97086 - DNA, 17 bp, Arabidopsis thaliana
gagccattcaagaaccg

SEQ ID NO: 97087 - DNA, 17 bp, Arabidopsis thaliana
gagccattcaggaactg

SEQ ID NO: 97088 - DNA, 17 bp, Arabidopsis thaliana
gagccattggtgtgacg

SEQ ID NO: 97089 - DNA, 17 bp, Arabidopsis thaliana
gagccatttccatttga

SEQ ID NO: 97090 - DNA, 17 bp, Arabidopsis thaliana
gagcccaaacttggcat

SEQ ID NO: 97091 - DNA, 17 bp, Arabidopsis thaliana
gagcccaaacttggcct

SEQ ID NO: 97092 - DNA, 17 bp, Arabidopsis thaliana
gagcccaaaggacctcg

SEQ ID NO: 97093 - DNA, 17 bp, Arabidopsis thaliana
gagcccaaagtatgatc

SEQ ID NO: 97094 - DNA, 17 bp, Arabidopsis thaliana
gagcccagacatttccg

SEQ ID NO: 97095 - DNA, 17 bp, Arabidopsis thaliana
gagcccagcttgaaaat

SEQ ID NO: 97096 - DNA, 17 bp, Arabidopsis thaliana
gagcccaggttccaaag

SEQ ID NO: 97097 - DNA, 17 bp, Arabidopsis thaliana
gagcccagttaaatccg

SEQ ID NO: 97098 - DNA, 17 bp, Arabidopsis thaliana
gagcccatgatggaggt

SEQ ID NO: 97099 - DNA, 17 bp, Arabidopsis thaliana
gagcccatgggctatac

SEQ ID NO: 97100 - DNA, 17 bp, Arabidopsis thaliana
gagcccatggttggtcc

SEQ ID NO: 97101 - DNA, 17 bp, Arabidopsis thaliana
gagcccattcaggaacc

SEQ ID NO: 97102 - DNA, 17 bp, Arabidopsis thaliana
gagcccattctttgact

SEQ ID NO: 97103 - DNA, 17 bp, Arabidopsis thaliana
gagcccccggcgaggat

SEQ ID NO: 97104 - DNA, 17 bp, Arabidopsis thaliana
gagccccgccggaagca

SEQ ID NO: 97105 - DNA, 17 bp, Arabidopsis thaliana
gagccccggtgaaacct

SEQ ID NO: 97106 - DNA, 17 bp, Arabidopsis thaliana
gagccccgtcagtcccg

SEQ ID NO: 97107 - DNA, 17 bp, Arabidopsis thaliana
gagccccgtcgtccccc

SEQ ID NO: 97108 - DNA, 17 bp, Arabidopsis thaliana
gagccccgtcgtgccca

SEQ ID NO: 97109 - DNA, 17 bp, Arabidopsis thaliana
gagccccgtcgtgcccg

SEQ ID NO: 97110 - DNA, 17 bp, Arabidopsis thaliana
gagcccgcagaggaagc

SEQ ID NO: 97111 - DNA, 17 bp, Arabidopsis thaliana
gagcccgcgtcgacctt

SEQ ID NO: 97112 - DNA, 17 bp, Arabidopsis thaliana
gagcccgggcggagcgg

SEQ ID NO: 97113 - DNA, 17 bp, Arabidopsis thaliana
gagcccggttggacaga

SEQ ID NO: 97114 - DNA, 17 bp, Arabidopsis thaliana
gagcccgtaatccccag

SEQ ID NO: 97115 - DNA, 17 bp, Arabidopsis thaliana
gagcccgtaatttccta

SEQ ID NO: 97116 - DNA, 17 bp, Arabidopsis thaliana
gagccctaggctgcgtc

SEQ ID NO: 97117 - DNA, 17 bp, Arabidopsis thaliana
gagccctgattctcggc

SEQ ID NO: 97118 - DNA, 17 bp, Arabidopsis thaliana
gagccctgggctctgac

SEQ ID NO: 97119 - DNA, 17 bp, Arabidopsis thaliana
gagccctgggctctggc

SEQ ID NO: 97120 - DNA, 17 bp, Arabidopsis thaliana
gagccctgggctcttac

SEQ ID NO: 97121 - DNA, 17 bp, Arabidopsis thaliana
gagccctgttgagcgag

SEQ ID NO: 97122 - DNA, 17 bp, Arabidopsis thaliana
gagccctttgtcgctaa

SEQ ID NO: 97123 - DNA, 17 bp, Arabidopsis thaliana
gagccctttgtgtaggt

SEQ ID NO: 97124 - DNA, 17 bp, Arabidopsis thaliana
gagccgaagcccgtaat

SEQ ID NO: 97125 - DNA, 17 bp, Arabidopsis thaliana
gagccgaagcccgtagt

SEQ ID NO: 97126 - DNA, 17 bp, Arabidopsis thaliana
gagccgagcataggaag

SEQ ID NO: 97127 - DNA, 17 bp, Arabidopsis thaliana
gagccgaggagctgttg

SEQ ID NO: 97128 - DNA, 17 bp, Arabidopsis thaliana
gagccgccactgataat

SEQ ID NO: 97129 - DNA, 17 bp, Arabidopsis thaliana
gagccgccgatcaggcc

SEQ ID NO: 97130 - DNA, 17 bp, Arabidopsis thaliana
gagccgcgaagctcgca

SEQ ID NO: 97131 - DNA, 17 bp, Arabidopsis thaliana
gagccgcgcttgattgt

SEQ ID NO: 97132 - DNA, 17 bp, Arabidopsis thaliana
gagccgcttgggtgtga

SEQ ID NO: 97133 - DNA, 17 bp, Arabidopsis thaliana
gagccggtgacgttgac

SEQ ID NO: 97134 - DNA, 17 bp, Arabidopsis thaliana
gagccgtcacacggaat

SEQ ID NO: 97135 - DNA, 17 bp, Arabidopsis thaliana
gagccgtcgtgcccgga

SEQ ID NO: 97136 - DNA, 17 bp, Arabidopsis thaliana
gagccgtgactataagc

SEQ ID NO: 97137 - DNA, 17 bp, Arabidopsis thaliana
gagccgtgaggccaaac

SEQ ID NO: 97138 - DNA, 17 bp, Arabidopsis thaliana
gagccgtgccaatatca

SEQ ID NO: 97139 - DNA, 17 bp, Arabidopsis thaliana
gagccgttcccagtccg

SEQ ID NO: 97140 - DNA, 17 bp, Arabidopsis thaliana
gagccgtttccaggggg

SEQ ID NO: 97141 - DNA, 17 bp, Arabidopsis thaliana
gagccgtttccagggtg

SEQ ID NO: 97142 - DNA, 17 bp, Arabidopsis thaliana
gagcctaagcaactgtg

SEQ ID NO: 97143 - DNA, 17 bp, Arabidopsis thaliana
gagcctaagtagtgttt

SEQ ID NO: 97144 - DNA, 17 bp, Arabidopsis thaliana
gagcctacctagctgag

SEQ ID NO: 97145 - DNA, 17 bp, Arabidopsis thaliana
gagcctagacatttctg

SEQ ID NO: 97146 - DNA, 17 bp, Arabidopsis thaliana
gagcctatactcgacca

SEQ ID NO: 97147 - DNA, 17 bp, Arabidopsis thaliana
gagcctatagctcagtg

SEQ ID NO: 97148 - DNA, 17 bp, Arabidopsis thaliana
gagcctatcatgatgtg

SEQ ID NO: 97149 - DNA, 17 bp, Arabidopsis thaliana
gagcctatctcgccttg

SEQ ID NO: 97150 - DNA, 17 bp, Arabidopsis thaliana
gagcctcagatccaacg

SEQ ID NO: 97151 - DNA, 17 bp, Arabidopsis thaliana
gagcctccatcacttag

SEQ ID NO: 97152 - DNA, 17 bp, Arabidopsis thaliana
gagcctccatctccgcc

SEQ ID NO: 97153 - DNA, 17 bp, Arabidopsis thaliana
gagcctcccgactcgtt

SEQ ID NO: 97154 - DNA, 17 bp, Arabidopsis thaliana
gagcctctctcacccca

SEQ ID NO: 97155 - DNA, 17 bp, Arabidopsis thaliana
gagcctctgtggtagcc

SEQ ID NO: 97156 - DNA, 17 bp, Arabidopsis thaliana
gagcctgactctagtcc

SEQ ID NO: 97157 - DNA, 17 bp, Arabidopsis thaliana
gagcctgagttcggctg

SEQ ID NO: 97158 - DNA, 17 bp, Arabidopsis thaliana
gagcctgctattatctg

SEQ ID NO: 97159 - DNA, 17 bp, Arabidopsis thaliana
gagcctggtgttgtgat

SEQ ID NO: 97160 - DNA, 17 bp, Arabidopsis thaliana
gagccttgggatgggtc

SEQ ID NO: 97161 - DNA, 17 bp, Arabidopsis thaliana
gagcctttgtagccttt

SEQ ID NO: 97162 - DNA, 17 bp, Arabidopsis thaliana
gagccttttcgtgatct

SEQ ID NO: 97163 - DNA, 17 bp, Arabidopsis thaliana
gagcgaaagatcactgg

SEQ ID NO: 97164 - DNA, 17 bp, Arabidopsis thaliana
gagcgaacccgggctca

SEQ ID NO: 97165 - DNA, 17 bp, Arabidopsis thaliana
gagcgaagtccgtaatc

SEQ ID NO: 97166 - DNA, 17 bp, Arabidopsis thaliana
gagcgaagtgacaagcg

SEQ ID NO: 97167 - DNA, 17 bp, Arabidopsis thaliana
gagcgaagttccagcat

SEQ ID NO: 97168 - DNA, 17 bp, Arabidopsis thaliana
gagcgaattccggcaag

SEQ ID NO: 97169 - DNA, 17 bp, Arabidopsis thaliana
gagcgacaaagaagagt

SEQ ID NO: 97170 - DNA, 17 bp, Arabidopsis thaliana
gagcgacaagtactatt

SEQ ID NO: 97171 - DNA, 17 bp, Arabidopsis thaliana
gagcgacagtaattagc

SEQ ID NO: 97172 - DNA, 17 bp, Arabidopsis thaliana
gagcgaccgaccgcagc

SEQ ID NO: 97173 - DNA, 17 bp, Arabidopsis thaliana
gagcgaccgatcgcagc

SEQ ID NO: 97174 - DNA, 17 bp, Arabidopsis thaliana
gagcgaccgtttttgta

SEQ ID NO: 97175 - DNA, 17 bp, Arabidopsis thaliana
gagcgacctccggtgtg

SEQ ID NO: 97176 - DNA, 17 bp, Arabidopsis thaliana
gagcgacgaacaggttt

SEQ ID NO: 97177 - DNA, 17 bp, Arabidopsis thaliana
gagcgacgcggattacg

SEQ ID NO: 97178 - DNA, 17 bp, Arabidopsis thaliana
gagcgacggaaaatgct

SEQ ID NO: 97179 - DNA, 17 bp, Arabidopsis thaliana
gagcgacggatcgaatg

SEQ ID NO: 97180 - DNA, 17 bp, Arabidopsis thaliana
gagcgacggctcggagt

SEQ ID NO: 97181 - DNA, 17 bp, Arabidopsis thaliana
gagcgacggctcgtagt

SEQ ID NO: 97182 - DNA, 17 bp, Arabidopsis thaliana
gagcgactgacagtggg

SEQ ID NO: 97183 - DNA, 17 bp, Arabidopsis thaliana
gagcgactgtttttgta

SEQ ID NO: 97184 - DNA, 17 bp, Arabidopsis thaliana
gagcgacttttgtgtgt

SEQ ID NO: 97185 - DNA, 17 bp, Arabidopsis thaliana
gagcgagaaaagccgtc

SEQ ID NO: 97186 - DNA, 17 bp, Arabidopsis thaliana
gagcgagactacccgtg

SEQ ID NO: 97187 - DNA, 17 bp, Arabidopsis thaliana
gagcgagactcttcttg

SEQ ID NO: 97188 - DNA, 17 bp, Arabidopsis thaliana
gagcgagagaaattgta

SEQ ID NO: 97189 - DNA, 17 bp, Arabidopsis thaliana
gagcgagagagccgttc

SEQ ID NO: 97190 - DNA, 17 bp, Arabidopsis thaliana
gagcgagattgtgggtt

SEQ ID NO: 97191 - DNA, 17 bp, Arabidopsis thaliana
gagcgagcaccgcacgt

SEQ ID NO: 97192 - DNA, 17 bp, Arabidopsis thaliana
gagcgagcagagggtga

SEQ ID NO: 97193 - DNA, 17 bp, Arabidopsis thaliana
gagcgagccagaccggt

SEQ ID NO: 97194 - DNA, 17 bp, Arabidopsis thaliana
gagcgagcccagcttga

SEQ ID NO: 97195 - DNA, 17 bp, Arabidopsis thaliana
gagcgagccctgggctc

SEQ ID NO: 97196 - DNA, 17 bp, Arabidopsis thaliana
gagcgagccgtcgtgcc

SEQ ID NO: 97197 - DNA, 17 bp, Arabidopsis thaliana
gagcgagctaagtggtc

SEQ ID NO: 97198 - DNA, 17 bp, Arabidopsis thaliana
gagcgagctcagttgaa

SEQ ID NO: 97199 - DNA, 17 bp, Arabidopsis thaliana
gagcgagctcggacgcg

SEQ ID NO: 97200 - DNA, 17 bp, Arabidopsis thaliana
gagcgagctgtctcgct

SEQ ID NO: 97201 - DNA, 17 bp, Arabidopsis thaliana
gagcgagcttaggctcc

SEQ ID NO: 97202 - DNA, 17 bp, Arabidopsis thaliana
gagcgagcttcaccagg

SEQ ID NO: 97203 - DNA, 17 bp, Arabidopsis thaliana
gagcgagcttcgtggac

SEQ ID NO: 97204 - DNA, 17 bp, Arabidopsis thaliana
gagcgagcttgactcta

SEQ ID NO: 97205 - DNA, 17 bp, Arabidopsis thaliana
gagcgagcttgacttag

SEQ ID NO: 97206 - DNA, 17 bp, Arabidopsis thaliana
gagcgagcttgacttta

SEQ ID NO: 97207 - DNA, 17 bp, Arabidopsis thaliana
gagcgagctttccccgg

SEQ ID NO: 97208 - DNA, 17 bp, Arabidopsis thaliana
gagcgagctttgttctt

SEQ ID NO: 97209 - DNA, 17 bp, Arabidopsis thaliana
gagcgaggaccgagtgc

SEQ ID NO: 97210 - DNA, 17 bp, Arabidopsis thaliana
gagcgaggattacgggt

SEQ ID NO: 97211 - DNA, 17 bp, Arabidopsis thaliana
gagcgaggattacggtt

SEQ ID NO: 97212 - DNA, 17 bp, Arabidopsis thaliana
gagcgaggcaggattcg

SEQ ID NO: 97213 - DNA, 17 bp, Arabidopsis thaliana
gagcgaggcggactatg

SEQ ID NO: 97214 - DNA, 17 bp, Arabidopsis thaliana
gagcgaggctttaggtt

SEQ ID NO: 97215 - DNA, 17 bp, Arabidopsis thaliana
gagcgagggaagcggat

SEQ ID NO: 97216 - DNA, 17 bp, Arabidopsis thaliana
gagcgagggattacgag

SEQ ID NO: 97217 - DNA, 17 bp, Arabidopsis thaliana
gagcgagggcacgtctg

SEQ ID NO: 97218 - DNA, 17 bp, Arabidopsis thaliana
gagcgaggggacctcca

SEQ ID NO: 97219 - DNA, 17 bp, Arabidopsis thaliana
gagcgaggtccgtcacg

SEQ ID NO: 97220 - DNA, 17 bp, Arabidopsis thaliana
gagcgaggttccgacgc

SEQ ID NO: 97221 - DNA, 17 bp, Arabidopsis thaliana
gagcgagtatcgattat

SEQ ID NO: 97222 - DNA, 17 bp, Arabidopsis thaliana
gagcgagtcatcagctc

SEQ ID NO: 97223 - DNA, 17 bp, Arabidopsis thaliana
gagcgagtcccggcgac

SEQ ID NO: 97224 - DNA, 17 bp, Arabidopsis thaliana
gagcgagtccggagacg

SEQ ID NO: 97225 - DNA, 17 bp, Arabidopsis thaliana
gagcgagtcgtttttct

SEQ ID NO: 97226 - DNA, 17 bp, Arabidopsis thaliana
gagcgagttcatttctc

SEQ ID NO: 97227 - DNA, 17 bp, Arabidopsis thaliana
gagcgagttcgaatctc

SEQ ID NO: 97228 - DNA, 17 bp, Arabidopsis thaliana
gagcgagttgcgagtcc

SEQ ID NO: 97229 - DNA, 17 bp, Arabidopsis thaliana
gagcgagttggattcaa

SEQ ID NO: 97230 - DNA, 17 bp, Arabidopsis thaliana
gagcgagtttgactcta

SEQ ID NO: 97231 - DNA, 17 bp, Arabidopsis thaliana
gagcgagtttgccgctt

SEQ ID NO: 97232 - DNA, 17 bp, Arabidopsis thaliana
gagcgataggatgtcaa

SEQ ID NO: 97233 - DNA, 17 bp, Arabidopsis thaliana
gagcgatcagtccctgg

SEQ ID NO: 97234 - DNA, 17 bp, Arabidopsis thaliana
gagcgatgataagtcag

SEQ ID NO: 97235 - DNA, 17 bp, Arabidopsis thaliana
gagcgatggattaccag

SEQ ID NO: 97236 - DNA, 17 bp, Arabidopsis thaliana
gagcgatgtgccaggat

SEQ ID NO: 97237 - DNA, 17 bp, Arabidopsis thaliana
gagcgattactggtatg

SEQ ID NO: 97238 - DNA, 17 bp, Arabidopsis thaliana
gagcgattaggttattg

SEQ ID NO: 97239 - DNA, 17 bp, Arabidopsis thaliana
gagcgattcaaaggtta

SEQ ID NO: 97240 - DNA, 17 bp, Arabidopsis thaliana
gagcgattccaatggcc

SEQ ID NO: 97241 - DNA, 17 bp, Arabidopsis thaliana
gagcgattccggcaggt

SEQ ID NO: 97242 - DNA, 17 bp, Arabidopsis thaliana
gagcgattgggttgtgt

SEQ ID NO: 97243 - DNA, 17 bp, Arabidopsis thaliana
gagcgattgtctggtta

SEQ ID NO: 97244 - DNA, 17 bp, Arabidopsis thaliana
gagcgattgtgatgttg

SEQ ID NO: 97245 - DNA, 17 bp, Arabidopsis thaliana
gagcgcaggaatgtctt

SEQ ID NO: 97246 - DNA, 17 bp, Arabidopsis thaliana
gagcgcataccagtaaa

SEQ ID NO: 97247 - DNA, 17 bp, Arabidopsis thaliana
gagcgcatagcgcagtg

SEQ ID NO: 97248 - DNA, 17 bp, Arabidopsis thaliana
gagcgcattatctgtaa

SEQ ID NO: 97249 - DNA, 17 bp, Arabidopsis thaliana
gagcgccacttgtcaga

SEQ ID NO: 97250 - DNA, 17 bp, Arabidopsis thaliana
gagcgccgacatttttc

SEQ ID NO: 97251 - DNA, 17 bp, Arabidopsis thaliana
gagcgcctagcaaatcc

SEQ ID NO: 97252 - DNA, 17 bp, Arabidopsis thaliana
gagcgcctaggagttgt

SEQ ID NO: 97253 - DNA, 17 bp, Arabidopsis thaliana
gagcgctacaatctaca

SEQ ID NO: 97254 - DNA, 17 bp, Arabidopsis thaliana
gagcgctatgttggact

SEQ ID NO: 97255 - DNA, 17 bp, Arabidopsis thaliana
gagcgctcttgcgccga

SEQ ID NO: 97256 - DNA, 17 bp, Arabidopsis thaliana
gagcgctggacgtctgg

SEQ ID NO: 97257 - DNA, 17 bp, Arabidopsis thaliana
gagcgctgggagacgct

SEQ ID NO: 97258 - DNA, 17 bp, Arabidopsis thaliana
gagcgcttatggagttt

SEQ ID NO: 97259 - DNA, 17 bp, Arabidopsis thaliana
gagcggacatctatcat

SEQ ID NO: 97260 - DNA, 17 bp, Arabidopsis thaliana
gagcggactgagctgcc

SEQ ID NO: 97261 - DNA, 17 bp, Arabidopsis thaliana
gagcggactgtgaaggc

SEQ ID NO: 97262 - DNA, 17 bp, Arabidopsis thaliana
gagcggagcggacagag

SEQ ID NO: 97263 - DNA, 17 bp, Arabidopsis thaliana
gagcggagtgtagtcat

SEQ ID NO: 97264 - DNA, 17 bp, Arabidopsis thaliana
gagcggatcaaccgacc

SEQ ID NO: 97265 - DNA, 17 bp, Arabidopsis thaliana
gagcggatccaatacca

SEQ ID NO: 97266 - DNA, 17 bp, Arabidopsis thaliana
gagcggatcgcatggcc

SEQ ID NO: 97267 - DNA, 17 bp, Arabidopsis thaliana
gagcggatttctgagat

SEQ ID NO: 97268 - DNA, 17 bp, Arabidopsis thaliana
gagcggccagaggggag

SEQ ID NO: 97269 - DNA, 17 bp, Arabidopsis thaliana
gagcggcccgtgtccaa

SEQ ID NO: 97270 - DNA, 17 bp, Arabidopsis thaliana
gagcggccgccggtgca

SEQ ID NO: 97271 - DNA, 17 bp, Arabidopsis thaliana
gagcggccggcggacag

SEQ ID NO: 97272 - DNA, 17 bp, Arabidopsis thaliana
gagcggccgtcggtgca

SEQ ID NO: 97273 - DNA, 17 bp, Arabidopsis thaliana
gagcggcgaaaccttcg

SEQ ID NO: 97274 - DNA, 17 bp, Arabidopsis thaliana
gagcggcgatgtacgag

SEQ ID NO: 97275 - DNA, 17 bp, Arabidopsis thaliana
gagcggcgattgtggct

SEQ ID NO: 97276 - DNA, 17 bp, Arabidopsis thaliana
gagcggcgggtagaatc

SEQ ID NO: 97277 - DNA, 17 bp, Arabidopsis thaliana
gagcggctgcttattat

SEQ ID NO: 97278 - DNA, 17 bp, Arabidopsis thaliana
gagcggcttgtcccttc

SEQ ID NO: 97279 - DNA, 17 bp, Arabidopsis thaliana
gagcgggagaacggtct

SEQ ID NO: 97280 - DNA, 17 bp, Arabidopsis thaliana
gagcgggagattgtggg

SEQ ID NO: 97281 - DNA, 17 bp, Arabidopsis thaliana
gagcggtaaatcaagag

SEQ ID NO: 97282 - DNA, 17 bp, Arabidopsis thaliana
gagcggtaatggagcca

SEQ ID NO: 97283 - DNA, 17 bp, Arabidopsis thaliana
gagcggtccaaagcggt

SEQ ID NO: 97284 - DNA, 17 bp, Arabidopsis thaliana
gagcggtcttgccccga

SEQ ID NO: 97285 - DNA, 17 bp, Arabidopsis thaliana
gagcggtgacgacggtg

SEQ ID NO: 97286 - DNA, 17 bp, Arabidopsis thaliana
gagcggttaaccggttc

SEQ ID NO: 97287 - DNA, 17 bp, Arabidopsis thaliana
gagcggttacggtcgaa

SEQ ID NO: 97288 - DNA, 17 bp, Arabidopsis thaliana
gagcggttctactttga

SEQ ID NO: 97289 - DNA, 17 bp, Arabidopsis thaliana
gagcggttgagaagtgt

SEQ ID NO: 97290 - DNA, 17 bp, Arabidopsis thaliana
gagcggttgaggttgac

SEQ ID NO: 97291 - DNA, 17 bp, Arabidopsis thaliana
gagcgtaccagttgtac

SEQ ID NO: 97292 - DNA, 17 bp, Arabidopsis thaliana
gagcgtatcgccgaccg

SEQ ID NO: 97293 - DNA, 17 bp, Arabidopsis thaliana
gagcgtattgtccaaac

SEQ ID NO: 97294 - DNA, 17 bp, Arabidopsis thaliana
gagcgtcatcaagatct

SEQ ID NO: 97295 - DNA, 17 bp, Arabidopsis thaliana
gagcgtcgaaccagtca

SEQ ID NO: 97296 - DNA, 17 bp, Arabidopsis thaliana
gagcgtcggaccagtca

SEQ ID NO: 97297 - DNA, 17 bp, Arabidopsis thaliana
gagcgtctctccgggtg

SEQ ID NO: 97298 - DNA, 17 bp, Arabidopsis thaliana
gagcgtctctgtcatct

SEQ ID NO: 97299 - DNA, 17 bp, Arabidopsis thaliana
gagcgtctgcctgggtg

SEQ ID NO: 97300 - DNA, 17 bp, Arabidopsis thaliana
gagcgtctggcaacttc

SEQ ID NO: 97301 - DNA, 17 bp, Arabidopsis thaliana
gagcgtcttcacagcgt

SEQ ID NO: 97302 - DNA, 17 bp, Arabidopsis thaliana
gagcgtgatgggtttgc

SEQ ID NO: 97303 - DNA, 17 bp, Arabidopsis thaliana
gagcgtgccgttgaagt

SEQ ID NO: 97304 - DNA, 17 bp, Arabidopsis thaliana
gagcgtgcgaaaactct

SEQ ID NO: 97305 - DNA, 17 bp, Arabidopsis thaliana
gagcgtgttttgcgact

SEQ ID NO: 97306 - DNA, 17 bp, Arabidopsis thaliana
gagcgttaacagtggta

SEQ ID NO: 97307 - DNA, 17 bp, Arabidopsis thaliana
gagcgttacaagccttt

SEQ ID NO: 97308 - DNA, 17 bp, Arabidopsis thaliana
gagcgttataaccagca

SEQ ID NO: 97309 - DNA, 17 bp, Arabidopsis thaliana
gagcgttatttatctgc

SEQ ID NO: 97310 - DNA, 17 bp, Arabidopsis thaliana
gagcgttcagttatcca

SEQ ID NO: 97311 - DNA, 17 bp, Arabidopsis thaliana
gagcgttccatagggtg

SEQ ID NO: 97312 - DNA, 17 bp, Arabidopsis thaliana
gagcgttcggaccgcct

SEQ ID NO: 97313 - DNA, 17 bp, Arabidopsis thaliana
gagcgttggatctgagg

SEQ ID NO: 97314 - DNA, 17 bp, Arabidopsis thaliana
gagcgtttctcaccgtc

SEQ ID NO: 97315 - DNA, 17 bp, Arabidopsis thaliana
gagcgtttgataatggg

SEQ ID NO: 97316 - DNA, 17 bp, Arabidopsis thaliana
gagcgtttgataatgtg

SEQ ID NO: 97317 - DNA, 17 bp, Arabidopsis thaliana
gagctaacaagcgccat

SEQ ID NO: 97318 - DNA, 17 bp, Arabidopsis thaliana
gagctaacgacaacaag

SEQ ID NO: 97319 - DNA, 17 bp, Arabidopsis thaliana
gagctaacgacacttga

SEQ ID NO: 97320 - DNA, 17 bp, Arabidopsis thaliana
gagctaacgacacttgg

SEQ ID NO: 97321 - DNA, 17 bp, Arabidopsis thaliana
gagctaacgtcacttgg

SEQ ID NO: 97322 - DNA, 17 bp, Arabidopsis thaliana
gagctaactgcgaaccg

SEQ ID NO: 97323 - DNA, 17 bp, Arabidopsis thaliana
gagctaagagaggagtg

SEQ ID NO: 97324 - DNA, 17 bp, Arabidopsis thaliana
gagctaagctcctacca

SEQ ID NO: 97325 - DNA, 17 bp, Arabidopsis thaliana
gagctaaggagattgat

SEQ ID NO: 97326 - DNA, 17 bp, Arabidopsis thaliana
gagctaaggagattgct

SEQ ID NO: 97327 - DNA, 17 bp, Arabidopsis thaliana
gagctaagggtttgtgc

SEQ ID NO: 97328 - DNA, 17 bp, Arabidopsis thaliana
gagctaagtgtgtgatg

SEQ ID NO: 97329 - DNA, 17 bp, Arabidopsis thaliana
gagctaagttgagcgaa

SEQ ID NO: 97330 - DNA, 17 bp, Arabidopsis thaliana
gagctaatgacacttgg

SEQ ID NO: 97331 - DNA, 17 bp, Arabidopsis thaliana
gagctacaaagaacccg

SEQ ID NO: 97332 - DNA, 17 bp, Arabidopsis thaliana
gagctacactcttgcgc

SEQ ID NO: 97333 - DNA, 17 bp, Arabidopsis thaliana
gagctacatgaagttgt

SEQ ID NO: 97334 - DNA, 17 bp, Arabidopsis thaliana
gagctacatgcgctttc

SEQ ID NO: 97335 - DNA, 17 bp, Arabidopsis thaliana
gagctaccaattaggcc

SEQ ID NO: 97336 - DNA, 17 bp, Arabidopsis thaliana
gagctaccacgtgcgta

SEQ ID NO: 97337 - DNA, 17 bp, Arabidopsis thaliana
gagctaccatttaggcc

SEQ ID NO: 97338 - DNA, 17 bp, Arabidopsis thaliana
gagctaccgtgcgctgg

SEQ ID NO: 97339 - DNA, 17 bp, Arabidopsis thaliana
gagctacttgccttgtc

SEQ ID NO: 97340 - DNA, 17 bp, Arabidopsis thaliana
gagctacttgcgaggat

SEQ ID NO: 97341 - DNA, 17 bp, Arabidopsis thaliana
gagctatatgcgcagtt

SEQ ID NO: 97342 - DNA, 17 bp, Arabidopsis thaliana
gagctatcagggacaat

SEQ ID NO: 97343 - DNA, 17 bp, Arabidopsis thaliana
gagctatccacagacct

SEQ ID NO: 97344 - DNA, 17 bp, Arabidopsis thaliana
gagctatcctcttgtac

SEQ ID NO: 97345 - DNA, 17 bp, Arabidopsis thaliana
gagctattactggtggt

SEQ ID NO: 97346 - DNA, 17 bp, Arabidopsis thaliana
gagctattagctcagtg

SEQ ID NO: 97347 - DNA, 17 bp, Arabidopsis thaliana
gagctatttgtggagta

SEQ ID NO: 97348 - DNA, 17 bp, Arabidopsis thaliana
gagctcaaactccaacc

SEQ ID NO: 97349 - DNA, 17 bp, Arabidopsis thaliana
gagctcaaccttactcg

SEQ ID NO: 97350 - DNA, 17 bp, Arabidopsis thaliana
gagctcaacttgctgcg

SEQ ID NO: 97351 - DNA, 17 bp, Arabidopsis thaliana
gagctcacggttaattt

SEQ ID NO: 97352 - DNA, 17 bp, Arabidopsis thaliana
gagctcacgtcttcctg

SEQ ID NO: 97353 - DNA, 17 bp, Arabidopsis thaliana
gagctcagaagtgtggc

SEQ ID NO: 97354 - DNA, 17 bp, Arabidopsis thaliana
gagctcagctacgagga

SEQ ID NO: 97355 - DNA, 17 bp, Arabidopsis thaliana
gagctcagctgcaagga

SEQ ID NO: 97356 - DNA, 17 bp, Arabidopsis thaliana
gagctcagttgaacctt

SEQ ID NO: 97357 - DNA, 17 bp, Arabidopsis thaliana
gagctcatctactccgg

SEQ ID NO: 97358 - DNA, 17 bp, Arabidopsis thaliana
gagctcatcttattgcc

SEQ ID NO: 97359 - DNA, 17 bp, Arabidopsis thaliana
gagctccaagtgggcca

SEQ ID NO: 97360 - DNA, 17 bp, Arabidopsis thaliana
gagctccagagaagtat

SEQ ID NO: 97361 - DNA, 17 bp, Arabidopsis thaliana
gagctccctgatggatc

SEQ ID NO: 97362 - DNA, 17 bp, Arabidopsis thaliana
gagctcccttcaatcca

SEQ ID NO: 97363 - DNA, 17 bp, Arabidopsis thaliana
gagctcccttcaatccg

SEQ ID NO: 97364 - DNA, 17 bp, Arabidopsis thaliana
gagctcccttcaatgat

SEQ ID NO: 97365 - DNA, 17 bp, Arabidopsis thaliana
gagctcccttcagtcca

SEQ ID NO: 97366 - DNA, 17 bp, Arabidopsis thaliana
gagctcccttcattcca

SEQ ID NO: 97367 - DNA, 17 bp, Arabidopsis thaliana
gagctcccttcattcct

SEQ ID NO: 97368 - DNA, 17 bp, Arabidopsis thaliana
gagctcccttccatcca

SEQ ID NO: 97369 - DNA, 17 bp, Arabidopsis thaliana
gagctccgacgagattt

SEQ ID NO: 97370 - DNA, 17 bp, Arabidopsis thaliana
gagctccggtgaaacct

SEQ ID NO: 97371 - DNA, 17 bp, Arabidopsis thaliana
gagctccggtttggaat

SEQ ID NO: 97372 - DNA, 17 bp, Arabidopsis thaliana
gagctccttcgacctct

SEQ ID NO: 97373 - DNA, 17 bp, Arabidopsis thaliana
gagctccttcttgattc

SEQ ID NO: 97374 - DNA, 17 bp, Arabidopsis thaliana
gagctcctttcttactt

SEQ ID NO: 97375 - DNA, 17 bp, Arabidopsis thaliana
gagctcgacaccgaggc

SEQ ID NO: 97376 - DNA, 17 bp, Arabidopsis thaliana
gagctcgactcacttgt

SEQ ID NO: 97377 - DNA, 17 bp, Arabidopsis thaliana
gagctcgactctagtcc

SEQ ID NO: 97378 - DNA, 17 bp, Arabidopsis thaliana
gagctcggaatcggtgt

SEQ ID NO: 97379 - DNA, 17 bp, Arabidopsis thaliana
gagctcggacgccagtg

SEQ ID NO: 97380 - DNA, 17 bp, Arabidopsis thaliana
gagctcggacgccagtt

SEQ ID NO: 97381 - DNA, 17 bp, Arabidopsis thaliana
gagctcggacgcgagtt

SEQ ID NO: 97382 - DNA, 17 bp, Arabidopsis thaliana
gagctcggtgaccgaag

SEQ ID NO: 97383 - DNA, 17 bp, Arabidopsis thaliana
gagctcgtgaaatgacc

SEQ ID NO: 97384 - DNA, 17 bp, Arabidopsis thaliana
gagctctactgcggtga

SEQ ID NO: 97385 - DNA, 17 bp, Arabidopsis thaliana
gagctctagccttctgt

SEQ ID NO: 97386 - DNA, 17 bp, Arabidopsis thaliana
gagctctatactgttcc

SEQ ID NO: 97387 - DNA, 17 bp, Arabidopsis thaliana
gagctctatttggcatg

SEQ ID NO: 97388 - DNA, 17 bp, Arabidopsis thaliana
gagctctccactcggca

SEQ ID NO: 97389 - DNA, 17 bp, Arabidopsis thaliana
gagctctcggatgtgtt

SEQ ID NO: 97390 - DNA, 17 bp, Arabidopsis thaliana
gagctctcggcaacgga

SEQ ID NO: 97391 - DNA, 17 bp, Arabidopsis thaliana
gagctctcgtgcccgca

SEQ ID NO: 97392 - DNA, 17 bp, Arabidopsis thaliana
gagctctctctctctaa

SEQ ID NO: 97393 - DNA, 17 bp, Arabidopsis thaliana
gagctctctcttgattc

SEQ ID NO: 97394 - DNA, 17 bp, Arabidopsis thaliana
gagctctgcagagagcc

SEQ ID NO: 97395 - DNA, 17 bp, Arabidopsis thaliana
gagctctgcgatggtaa

SEQ ID NO: 97396 - DNA, 17 bp, Arabidopsis thaliana
gagctctggtttgccaa

SEQ ID NO: 97397 - DNA, 17 bp, Arabidopsis thaliana
gagctcttatgcattag

SEQ ID NO: 97398 - DNA, 17 bp, Arabidopsis thaliana
gagctcttgattgtcgg

SEQ ID NO: 97399 - DNA, 17 bp, Arabidopsis thaliana
gagctcttgtcggacgc

SEQ ID NO: 97400 - DNA, 17 bp, Arabidopsis thaliana
gagctctttcttgattc

SEQ ID NO: 97401 - DNA, 17 bp, Arabidopsis thaliana
gagctctttgacccgga

SEQ ID NO: 97402 - DNA, 17 bp, Arabidopsis thaliana
gagctgaaaccctctga

SEQ ID NO: 97403 - DNA, 17 bp, Arabidopsis thaliana
gagctgaacgacttctg

SEQ ID NO: 97404 - DNA, 17 bp, Arabidopsis thaliana
gagctgaaggtctcctc

SEQ ID NO: 97405 - DNA, 17 bp, Arabidopsis thaliana
gagctgaatttctcatg

SEQ ID NO: 97406 - DNA, 17 bp, Arabidopsis thaliana
gagctgaccatgggctt

SEQ ID NO: 97407 - DNA, 17 bp, Arabidopsis thaliana
gagctgacgtggcttta

SEQ ID NO: 97408 - DNA, 17 bp, Arabidopsis thaliana
gagctgactacttagcc

SEQ ID NO: 97409 - DNA, 17 bp, Arabidopsis thaliana
gagctgactatttagcc

SEQ ID NO: 97410 - DNA, 17 bp, Arabidopsis thaliana
gagctgactcagctgac

SEQ ID NO: 97411 - DNA, 17 bp, Arabidopsis thaliana
gagctgactctagtccg

SEQ ID NO: 97412 - DNA, 17 bp, Arabidopsis thaliana
gagctgacttgaccagc

SEQ ID NO: 97413 - DNA, 17 bp, Arabidopsis thaliana
gagctgagagaagagag

SEQ ID NO: 97414 - DNA, 17 bp, Arabidopsis thaliana
gagctgagatgagggag

SEQ ID NO: 97415 - DNA, 17 bp, Arabidopsis thaliana
gagctgagattctgcag

SEQ ID NO: 97416 - DNA, 17 bp, Arabidopsis thaliana
gagctgagcgtatccgt

SEQ ID NO: 97417 - DNA, 17 bp, Arabidopsis thaliana
gagctgagctcggttta

SEQ ID NO: 97418 - DNA, 17 bp, Arabidopsis thaliana
gagctgaggcacagggt

SEQ ID NO: 97419 - DNA, 17 bp, Arabidopsis thaliana
gagctgaggcaccaagc

SEQ ID NO: 97420 - DNA, 17 bp, Arabidopsis thaliana
gagctgagttgagttta

SEQ ID NO: 97421 - DNA, 17 bp, Arabidopsis thaliana
gagctgagtttgaaggt

SEQ ID NO: 97422 - DNA, 17 bp, Arabidopsis thaliana
gagctgatctagggttc

SEQ ID NO: 97423 - DNA, 17 bp, Arabidopsis thaliana
gagctgatcttcgacac

SEQ ID NO: 97424 - DNA, 17 bp, Arabidopsis thaliana
gagctgatgtacaggtc

SEQ ID NO: 97425 - DNA, 17 bp, Arabidopsis thaliana
gagctgatgttgttcga

SEQ ID NO: 97426 - DNA, 17 bp, Arabidopsis thaliana
gagctgattccaggata

SEQ ID NO: 97427 - DNA, 17 bp, Arabidopsis thaliana
gagctgccaatggtgat

SEQ ID NO: 97428 - DNA, 17 bp, Arabidopsis thaliana
gagctgcccacttttct

SEQ ID NO: 97429 - DNA, 17 bp, Arabidopsis thaliana
gagctgccggtgtcgat

SEQ ID NO: 97430 - DNA, 17 bp, Arabidopsis thaliana
gagctgcgattcgtttg

SEQ ID NO: 97431 - DNA, 17 bp, Arabidopsis thaliana
gagctgcggcggtcgag

SEQ ID NO: 97432 - DNA, 17 bp, Arabidopsis thaliana
gagctgctacccctttt

SEQ ID NO: 97433 - DNA, 17 bp, Arabidopsis thaliana
gagctgcttccactttg

SEQ ID NO: 97434 - DNA, 17 bp, Arabidopsis thaliana
gagctgcttctaagcaa

SEQ ID NO: 97435 - DNA, 17 bp, Arabidopsis thaliana
gagctgctttgactatc

SEQ ID NO: 97436 - DNA, 17 bp, Arabidopsis thaliana
gagctgctttgatgtgg

SEQ ID NO: 97437 - DNA, 17 bp, Arabidopsis thaliana
gagctggaactgttgtg

SEQ ID NO: 97438 - DNA, 17 bp, Arabidopsis thaliana
gagctggacagggtggt

SEQ ID NO: 97439 - DNA, 17 bp, Arabidopsis thaliana
gagctggagttcgtggt

SEQ ID NO: 97440 - DNA, 17 bp, Arabidopsis thaliana
gagctggccatgcccga

SEQ ID NO: 97441 - DNA, 17 bp, Arabidopsis thaliana
gagctggcctgaagatt

SEQ ID NO: 97442 - DNA, 17 bp, Arabidopsis thaliana
gagctggctccctgtat

SEQ ID NO: 97443 - DNA, 17 bp, Arabidopsis thaliana
gagctgggactttcatg

SEQ ID NO: 97444 - DNA, 17 bp, Arabidopsis thaliana
gagctgggattagaccg

SEQ ID NO: 97445 - DNA, 17 bp, Arabidopsis thaliana
gagctgggctcgggggt

SEQ ID NO: 97446 - DNA, 17 bp, Arabidopsis thaliana
gagctgggtgtcgatcg

SEQ ID NO: 97447 - DNA, 17 bp, Arabidopsis thaliana
gagctgggttagaccgt

SEQ ID NO: 97448 - DNA, 17 bp, Arabidopsis thaliana
gagctgggtttagaccg

SEQ ID NO: 97449 - DNA, 17 bp, Arabidopsis thaliana
gagctggtactgctcac

SEQ ID NO: 97450 - DNA, 17 bp, Arabidopsis thaliana
gagctggtgacggcggc

SEQ ID NO: 97451 - DNA, 17 bp, Arabidopsis thaliana
gagctggtgacggcggg

SEQ ID NO: 97452 - DNA, 17 bp, Arabidopsis thaliana
gagctgtcaaagcgggc

SEQ ID NO: 97453 - DNA, 17 bp, Arabidopsis thaliana
gagctgtccttgtttcc

SEQ ID NO: 97454 - DNA, 17 bp, Arabidopsis thaliana
gagctgtcgaccggcgc

SEQ ID NO: 97455 - DNA, 17 bp, Arabidopsis thaliana
gagctgtctcgctaatt

SEQ ID NO: 97456 - DNA, 17 bp, Arabidopsis thaliana
gagctgtgacattgtct

SEQ ID NO: 97457 - DNA, 17 bp, Arabidopsis thaliana
gagctgtgggtgcttcg

SEQ ID NO: 97458 - DNA, 17 bp, Arabidopsis thaliana
gagctgtgtgtagccgt

SEQ ID NO: 97459 - DNA, 17 bp, Arabidopsis thaliana
gagctgttcagcttaga

SEQ ID NO: 97460 - DNA, 17 bp, Arabidopsis thaliana
gagctgttcatcctcag

SEQ ID NO: 97461 - DNA, 17 bp, Arabidopsis thaliana
gagcttaaatagtcgtt

SEQ ID NO: 97462 - DNA, 17 bp, Arabidopsis thaliana
gagcttacaatccaaat

SEQ ID NO: 97463 - DNA, 17 bp, Arabidopsis thaliana
gagcttacggaggggct

SEQ ID NO: 97464 - DNA, 17 bp, Arabidopsis thaliana
gagcttagcgagtagag

SEQ ID NO: 97465 - DNA, 17 bp, Arabidopsis thaliana
gagcttaggctcccaaa

SEQ ID NO: 97466 - DNA, 17 bp, Arabidopsis thaliana
gagcttattcggcgatt

SEQ ID NO: 97467 - DNA, 17 bp, Arabidopsis thaliana
gagcttcaccaggtgct

SEQ ID NO: 97468 - DNA, 17 bp, Arabidopsis thaliana
gagcttcactcgaaccg

SEQ ID NO: 97469 - DNA, 17 bp, Arabidopsis thaliana
gagcttcagaagcagtg

SEQ ID NO: 97470 - DNA, 17 bp, Arabidopsis thaliana
gagcttccatttcggta

SEQ ID NO: 97471 - DNA, 17 bp, Arabidopsis thaliana
gagcttccgacctttat

SEQ ID NO: 97472 - DNA, 17 bp, Arabidopsis thaliana
gagcttccgactcattc

SEQ ID NO: 97473 - DNA, 17 bp, Arabidopsis thaliana
gagcttccgagatcagt

SEQ ID NO: 97474 - DNA, 17 bp, Arabidopsis thaliana
gagcttccgcataaaaa

SEQ ID NO: 97475 - DNA, 17 bp, Arabidopsis thaliana
gagcttccttgagtcca

SEQ ID NO: 97476 - DNA, 17 bp, Arabidopsis thaliana
gagcttcgaatgtgcag

SEQ ID NO: 97477 - DNA, 17 bp, Arabidopsis thaliana
gagcttcgacccagaac

SEQ ID NO: 97478 - DNA, 17 bp, Arabidopsis thaliana
gagcttcgagatattca

SEQ ID NO: 97479 - DNA, 17 bp, Arabidopsis thaliana
gagcttcgcaacctaat

SEQ ID NO: 97480 - DNA, 17 bp, Arabidopsis thaliana
gagcttcgcagaatccg

SEQ ID NO: 97481 - DNA, 17 bp, Arabidopsis thaliana
gagcttcgcctagtgtc

SEQ ID NO: 97482 - DNA, 17 bp, Arabidopsis thaliana
gagcttcgcggactcgg

SEQ ID NO: 97483 - DNA, 17 bp, Arabidopsis thaliana
gagcttcgcggattcgg

SEQ ID NO: 97484 - DNA, 17 bp, Arabidopsis thaliana
gagcttcggcgcaagtg

SEQ ID NO: 97485 - DNA, 17 bp, Arabidopsis thaliana
gagcttcgtggactcag

SEQ ID NO: 97486 - DNA, 17 bp, Arabidopsis thaliana
gagcttcgtttagtctc

SEQ ID NO: 97487 - DNA, 17 bp, Arabidopsis thaliana
gagcttctctggctgcg

SEQ ID NO: 97488 - DNA, 17 bp, Arabidopsis thaliana
gagcttctctttgatca

SEQ ID NO: 97489 - DNA, 17 bp, Arabidopsis thaliana
gagcttctgagatcatt

SEQ ID NO: 97490 - DNA, 17 bp, Arabidopsis thaliana
gagcttcttgatgtgtt

SEQ ID NO: 97491 - DNA, 17 bp, Arabidopsis thaliana
gagcttgaagatcgttg

SEQ ID NO: 97492 - DNA, 17 bp, Arabidopsis thaliana
gagcttgacactagtcc

SEQ ID NO: 97493 - DNA, 17 bp, Arabidopsis thaliana
gagcttgaccctagtcc

SEQ ID NO: 97494 - DNA, 17 bp, Arabidopsis thaliana
gagcttgactagtccga

SEQ ID NO: 97495 - DNA, 17 bp, Arabidopsis thaliana
gagcttgactcgagtcc

SEQ ID NO: 97496 - DNA, 17 bp, Arabidopsis thaliana
gagcttgactctaatcc

SEQ ID NO: 97497 - DNA, 17 bp, Arabidopsis thaliana
gagcttgactctagtca

SEQ ID NO: 97498 - DNA, 17 bp, Arabidopsis thaliana
gagcttgactctagtcc

SEQ ID NO: 97499 - DNA, 17 bp, Arabidopsis thaliana
gagcttgactctagtcg

SEQ ID NO: 97500 - DNA, 17 bp, Arabidopsis thaliana
gagcttgactctagtct

SEQ ID NO: 97501 - DNA, 17 bp, Arabidopsis thaliana
gagcttgactctagttt

SEQ ID NO: 97502 - DNA, 17 bp, Arabidopsis thaliana
gagcttgactgcaagac

SEQ ID NO: 97503 - DNA, 17 bp, Arabidopsis thaliana
gagcttgacttagtccg

SEQ ID NO: 97504 - DNA, 17 bp, Arabidopsis thaliana
gagcttgacttcagtcc

SEQ ID NO: 97505 - DNA, 17 bp, Arabidopsis thaliana
gagcttgactttagtcc

SEQ ID NO: 97506 - DNA, 17 bp, Arabidopsis thaliana
gagcttgagagactcca

SEQ ID NO: 97507 - DNA, 17 bp, Arabidopsis thaliana
gagcttgaggccggaag

SEQ ID NO: 97508 - DNA, 17 bp, Arabidopsis thaliana
gagcttgagtctagtcc

SEQ ID NO: 97509 - DNA, 17 bp, Arabidopsis thaliana
gagcttgatcccttggc

SEQ ID NO: 97510 - DNA, 17 bp, Arabidopsis thaliana
gagcttgatggcgctta

SEQ ID NO: 97511 - DNA, 17 bp, Arabidopsis thaliana
gagcttgatgtgcttcc

SEQ ID NO: 97512 - DNA, 17 bp, Arabidopsis thaliana
gagcttgattctagtcc

SEQ ID NO: 97513 - DNA, 17 bp, Arabidopsis thaliana
gagcttgctcgcggtgg

SEQ ID NO: 97514 - DNA, 17 bp, Arabidopsis thaliana
gagcttgctgaagatgg

SEQ ID NO: 97515 - DNA, 17 bp, Arabidopsis thaliana
gagcttggctctagtcc

SEQ ID NO: 97516 - DNA, 17 bp, Arabidopsis thaliana
gagcttgggatgggtcg

SEQ ID NO: 97517 - DNA, 17 bp, Arabidopsis thaliana
gagcttggtgcaggtcg

SEQ ID NO: 97518 - DNA, 17 bp, Arabidopsis thaliana
gagcttgtactcaaaga

SEQ ID NO: 97519 - DNA, 17 bp, Arabidopsis thaliana
gagcttgtgagttctct

SEQ ID NO: 97520 - DNA, 17 bp, Arabidopsis thaliana
gagcttgtggctgttaa

SEQ ID NO: 97521 - DNA, 17 bp, Arabidopsis thaliana
gagcttgtttcatctgt

SEQ ID NO: 97522 - DNA, 17 bp, Arabidopsis thaliana
gagctttactctagtcc

SEQ ID NO: 97523 - DNA, 17 bp, Arabidopsis thaliana
gagctttccccgggcgt

SEQ ID NO: 97524 - DNA, 17 bp, Arabidopsis thaliana
gagctttccccgggctt

SEQ ID NO: 97525 - DNA, 17 bp, Arabidopsis thaliana
gagctttccgaaaaggt

SEQ ID NO: 97526 - DNA, 17 bp, Arabidopsis thaliana
gagctttctcaacacag

SEQ ID NO: 97527 - DNA, 17 bp, Arabidopsis thaliana
gagctttcttcaggatt

SEQ ID NO: 97528 - DNA, 17 bp, Arabidopsis thaliana
gagctttcttcggtcca

SEQ ID NO: 97529 - DNA, 17 bp, Arabidopsis thaliana
gagctttcttgacttgt

SEQ ID NO: 97530 - DNA, 17 bp, Arabidopsis thaliana
gagctttgacaacggca

SEQ ID NO: 97531 - DNA, 17 bp, Arabidopsis thaliana
gagctttgacccggatg

SEQ ID NO: 97532 - DNA, 17 bp, Arabidopsis thaliana
gagctttgccccaattg

SEQ ID NO: 97533 - DNA, 17 bp, Arabidopsis thaliana
gagctttggtgtgattt

SEQ ID NO: 97534 - DNA, 17 bp, Arabidopsis thaliana
gagctttgtgaattatt

SEQ ID NO: 97535 - DNA, 17 bp, Arabidopsis thaliana
gagctttgttccagcga

SEQ ID NO: 97536 - DNA, 17 bp, Arabidopsis thaliana
gagctttgttctttgac

SEQ ID NO: 97537 - DNA, 17 bp, Arabidopsis thaliana
gagcttttacccttttg

SEQ ID NO: 97538 - DNA, 17 bp, Arabidopsis thaliana
gagcttttctcatcttt

SEQ ID NO: 97539 - DNA, 17 bp, Arabidopsis thaliana
gagctttttctacccag

SEQ ID NO: 97540 - DNA, 17 bp, Arabidopsis thaliana
gagctttttgtcccaga

SEQ ID NO: 97541 - DNA, 17 bp, Arabidopsis thaliana
gagctttttttagatcg

SEQ ID NO: 97542 - DNA, 17 bp, Arabidopsis thaliana
gaggaaaaatcggcgga

SEQ ID NO: 97543 - DNA, 17 bp, Arabidopsis thaliana
gaggaaaacttttgtct

SEQ ID NO: 97544 - DNA, 17 bp, Arabidopsis thaliana
gaggaaacactacgctg

SEQ ID NO: 97545 - DNA, 17 bp, Arabidopsis thaliana
gaggaaagcttcccctc

SEQ ID NO: 97546 - DNA, 17 bp, Arabidopsis thaliana
gaggaaagtgattggta

SEQ ID NO: 97547 - DNA, 17 bp, Arabidopsis thaliana
gaggaaatacttggtac

SEQ ID NO: 97548 - DNA, 17 bp, Arabidopsis thaliana
gaggaaataggagtggc

SEQ ID NO: 97549 - DNA, 17 bp, Arabidopsis thaliana
gaggaaatcttcccaaa

SEQ ID NO: 97550 - DNA, 17 bp, Arabidopsis thaliana
gaggaaccgttgattcg

SEQ ID NO: 97551 - DNA, 17 bp, Arabidopsis thaliana
gaggaacgacttctctt

SEQ ID NO: 97552 - DNA, 17 bp, Arabidopsis thaliana
gaggaactcgccagatc

SEQ ID NO: 97553 - DNA, 17 bp, Arabidopsis thaliana
gaggaacttcgattgcg

SEQ ID NO: 97554 - DNA, 17 bp, Arabidopsis thaliana
gaggaagcattgttctt

SEQ ID NO: 97555 - DNA, 17 bp, Arabidopsis thaliana
gaggaaggattcatacg

SEQ ID NO: 97556 - DNA, 17 bp, Arabidopsis thaliana
gaggaagtcccactaaa

SEQ ID NO: 97557 - DNA, 17 bp, Arabidopsis thaliana
gaggaagtcccatggtt

SEQ ID NO: 97558 - DNA, 17 bp, Arabidopsis thaliana
gaggaagtgctacttgg

SEQ ID NO: 97559 - DNA, 17 bp, Arabidopsis thaliana
gaggaagtgtctgagtc

SEQ ID NO: 97560 - DNA, 17 bp, Arabidopsis thaliana
gaggaataactctgacg

SEQ ID NO: 97561 - DNA, 17 bp, Arabidopsis thaliana
gaggaatcctcgattcg

SEQ ID NO: 97562 - DNA, 17 bp, Arabidopsis thaliana
gaggaatcgtcgaccag

SEQ ID NO: 97563 - DNA, 17 bp, Arabidopsis thaliana
gaggaatcgtcgaccgg

SEQ ID NO: 97564 - DNA, 17 bp, Arabidopsis thaliana
gaggaatctgatctgaa

SEQ ID NO: 97565 - DNA, 17 bp, Arabidopsis thaliana
gaggaatcttttttgtc

SEQ ID NO: 97566 - DNA, 17 bp, Arabidopsis thaliana
gaggaatgtcttcaacc

SEQ ID NO: 97567 - DNA, 17 bp, Arabidopsis thaliana
gaggaattacgaggttc

SEQ ID NO: 97568 - DNA, 17 bp, Arabidopsis thaliana
gaggaattacgggattc

SEQ ID NO: 97569 - DNA, 17 bp, Arabidopsis thaliana
gaggaattacggggttc

SEQ ID NO: 97570 - DNA, 17 bp, Arabidopsis thaliana
gaggaattcccaagact

SEQ ID NO: 97571 - DNA, 17 bp, Arabidopsis thaliana
gaggaattcctagtaag

SEQ ID NO: 97572 - DNA, 17 bp, Arabidopsis thaliana
gaggaattgtgacagtt

SEQ ID NO: 97573 - DNA, 17 bp, Arabidopsis thaliana
gaggacaaggatctctc

SEQ ID NO: 97574 - DNA, 17 bp, Arabidopsis thaliana
gaggacaatttaccatg

SEQ ID NO: 97575 - DNA, 17 bp, Arabidopsis thaliana
gaggacacgaggcaagt

SEQ ID NO: 97576 - DNA, 17 bp, Arabidopsis thaliana
gaggacacgcctgcctg

SEQ ID NO: 97577 - DNA, 17 bp, Arabidopsis thaliana
gaggacacgtctgcctg

SEQ ID NO: 97578 - DNA, 17 bp, Arabidopsis thaliana
gaggacacgtttgcctg

SEQ ID NO: 97579 - DNA, 17 bp, Arabidopsis thaliana
gaggacacttttgctcg

SEQ ID NO: 97580 - DNA, 17 bp, Arabidopsis thaliana
gaggacagtgcggacga

SEQ ID NO: 97581 - DNA, 17 bp, Arabidopsis thaliana
gaggacagtttctaccg

SEQ ID NO: 97582 - DNA, 17 bp, Arabidopsis thaliana
gaggacattgtcaggtg

SEQ ID NO: 97583 - DNA, 17 bp, Arabidopsis thaliana
gaggaccaactggatcg

SEQ ID NO: 97584 - DNA, 17 bp, Arabidopsis thaliana
gaggaccacttacagag

SEQ ID NO: 97585 - DNA, 17 bp, Arabidopsis thaliana
gaggaccaggcttcatt

SEQ ID NO: 97586 - DNA, 17 bp, Arabidopsis thaliana
gaggaccccttaagcgg

SEQ ID NO: 97587 - DNA, 17 bp, Arabidopsis thaliana
gaggaccctcttctcct

SEQ ID NO: 97588 - DNA, 17 bp, Arabidopsis thaliana
gaggaccctgttcataa

SEQ ID NO: 97589 - DNA, 17 bp, Arabidopsis thaliana
gaggaccctgttgagct

SEQ ID NO: 97590 - DNA, 17 bp, Arabidopsis thaliana
gaggaccgagtgccgca

SEQ ID NO: 97591 - DNA, 17 bp, Arabidopsis thaliana
gaggaccgagtgccgct

SEQ ID NO: 97592 - DNA, 17 bp, Arabidopsis thaliana
gaggaccgagtgccgtt

SEQ ID NO: 97593 - DNA, 17 bp, Arabidopsis thaliana
gaggaccgagtgtcgct

SEQ ID NO: 97594 - DNA, 17 bp, Arabidopsis thaliana
gaggaccgagttccgct

SEQ ID NO: 97595 - DNA, 17 bp, Arabidopsis thaliana
gaggacctccatagatt

SEQ ID NO: 97596 - DNA, 17 bp, Arabidopsis thaliana
gaggacgaagaattgag

SEQ ID NO: 97597 - DNA, 17 bp, Arabidopsis thaliana
gaggacgattcgtcttc

SEQ ID NO: 97598 - DNA, 17 bp, Arabidopsis thaliana
gaggacgcaatgttcaa

SEQ ID NO: 97599 - DNA, 17 bp, Arabidopsis thaliana
gaggacgccaacgatca

SEQ ID NO: 97600 - DNA, 17 bp, Arabidopsis thaliana
gaggacgcttctccaga

SEQ ID NO: 97601 - DNA, 17 bp, Arabidopsis thaliana
gaggacggacttctgct

SEQ ID NO: 97602 - DNA, 17 bp, Arabidopsis thaliana
gaggacgggttggcatg

SEQ ID NO: 97603 - DNA, 17 bp, Arabidopsis thaliana
gaggacgggttggcgag

SEQ ID NO: 97604 - DNA, 17 bp, Arabidopsis thaliana
gaggacgggttggcggg

SEQ ID NO: 97605 - DNA, 17 bp, Arabidopsis thaliana
gaggacgtaggtgaagg

SEQ ID NO: 97606 - DNA, 17 bp, Arabidopsis thaliana
gaggacgtggcaaaatc

SEQ ID NO: 97607 - DNA, 17 bp, Arabidopsis thaliana
gaggacgttagccattg

SEQ ID NO: 97608 - DNA, 17 bp, Arabidopsis thaliana
gaggactacttgcaatg

SEQ ID NO: 97609 - DNA, 17 bp, Arabidopsis thaliana
gaggactaggtgttggt

SEQ ID NO: 97610 - DNA, 17 bp, Arabidopsis thaliana
gaggactcatatggact

SEQ ID NO: 97611 - DNA, 17 bp, Arabidopsis thaliana
gaggactcgtcccctac

SEQ ID NO: 97612 - DNA, 17 bp, Arabidopsis thaliana
gaggactcgtcctttac

SEQ ID NO: 97613 - DNA, 17 bp, Arabidopsis thaliana
gaggactctggtcagct

SEQ ID NO: 97614 - DNA, 17 bp, Arabidopsis thaliana
gaggactctttgtgatt

SEQ ID NO: 97615 - DNA, 17 bp, Arabidopsis thaliana
gaggactgaagatgttg

SEQ ID NO: 97616 - DNA, 17 bp, Arabidopsis thaliana
gaggactgcctactcga

SEQ ID NO: 97617 - DNA, 17 bp, Arabidopsis thaliana
gaggactgcgttttgcg

SEQ ID NO: 97618 - DNA, 17 bp, Arabidopsis thaliana
gaggactgtcggctcgc

SEQ ID NO: 97619 - DNA, 17 bp, Arabidopsis thaliana
gaggactgtctttgggc

SEQ ID NO: 97620 - DNA, 17 bp, Arabidopsis thaliana
gaggactgtgagagttt

SEQ ID NO: 97621 - DNA, 17 bp, Arabidopsis thaliana
gaggacttactcgacct

SEQ ID NO: 97622 - DNA, 17 bp, Arabidopsis thaliana
gaggacttcccgggagc

SEQ ID NO: 97623 - DNA, 17 bp, Arabidopsis thaliana
gaggacttcccgggagg

SEQ ID NO: 97624 - DNA, 17 bp, Arabidopsis thaliana
gaggacttcccgggagt

SEQ ID NO: 97625 - DNA, 17 bp, Arabidopsis thaliana
gaggacttcctatggga

SEQ ID NO: 97626 - DNA, 17 bp, Arabidopsis thaliana
gaggacttcctcaaagg

SEQ ID NO: 97627 - DNA, 17 bp, Arabidopsis thaliana
gaggacttcttaagcgg

SEQ ID NO: 97628 - DNA, 17 bp, Arabidopsis thaliana
gaggacttggggtcggc

SEQ ID NO: 97629 - DNA, 17 bp, Arabidopsis thaliana
gaggactttcagagact

SEQ ID NO: 97630 - DNA, 17 bp, Arabidopsis thaliana
gaggacttttgcccttc

SEQ ID NO: 97631 - DNA, 17 bp, Arabidopsis thaliana
gaggagaagacaccatc

SEQ ID NO: 97632 - DNA, 17 bp, Arabidopsis thaliana
gaggagaaggcaggggg

SEQ ID NO: 97633 - DNA, 17 bp, Arabidopsis thaliana
gaggagacccgcggggt

SEQ ID NO: 97634 - DNA, 17 bp, Arabidopsis thaliana
gaggagacgcaaggaga

SEQ ID NO: 97635 - DNA, 17 bp, Arabidopsis thaliana
gaggagacgccactcga

SEQ ID NO: 97636 - DNA, 17 bp, Arabidopsis thaliana
gaggagacgtggggtag

SEQ ID NO: 97637 - DNA, 17 bp, Arabidopsis thaliana
gaggagactctggtaca

SEQ ID NO: 97638 - DNA, 17 bp, Arabidopsis thaliana
gaggagaggcaactgac

SEQ ID NO: 97639 - DNA, 17 bp, Arabidopsis thaliana
gaggagaggcaactggc

SEQ ID NO: 97640 - DNA, 17 bp, Arabidopsis thaliana
gaggagagtttgccttg

SEQ ID NO: 97641 - DNA, 17 bp, Arabidopsis thaliana
gaggagatatgacgcgc

SEQ ID NO: 97642 - DNA, 17 bp, Arabidopsis thaliana
gaggagatccagatagc

SEQ ID NO: 97643 - DNA, 17 bp, Arabidopsis thaliana
gaggagattatttgtga

SEQ ID NO: 97644 - DNA, 17 bp, Arabidopsis thaliana
gaggagattggactaat

SEQ ID NO: 97645 - DNA, 17 bp, Arabidopsis thaliana
gaggagatttctggtgc

SEQ ID NO: 97646 - DNA, 17 bp, Arabidopsis thaliana
gaggagcagcgtgtagc

SEQ ID NO: 97647 - DNA, 17 bp, Arabidopsis thaliana
gaggagccctgggctct

SEQ ID NO: 97648 - DNA, 17 bp, Arabidopsis thaliana
gaggagcgacttgttct

SEQ ID NO: 97649 - DNA, 17 bp, Arabidopsis thaliana
gaggagcggtcgagtga

SEQ ID NO: 97650 - DNA, 17 bp, Arabidopsis thaliana
gaggagctcgctgtgct

SEQ ID NO: 97651 - DNA, 17 bp, Arabidopsis thaliana
gaggagctctctggata

SEQ ID NO: 97652 - DNA, 17 bp, Arabidopsis thaliana
gaggagctgaggaacag

SEQ ID NO: 97653 - DNA, 17 bp, Arabidopsis thaliana
gaggagctgaggcacag

SEQ ID NO: 97654 - DNA, 17 bp, Arabidopsis thaliana
gaggagctgaggcacgg

SEQ ID NO: 97655 - DNA, 17 bp, Arabidopsis thaliana
gaggagcttgccaccta

SEQ ID NO: 97656 - DNA, 17 bp, Arabidopsis thaliana
gaggaggaccgagtgcc

SEQ ID NO: 97657 - DNA, 17 bp, Arabidopsis thaliana
gaggaggactcggcggt

SEQ ID NO: 97658 - DNA, 17 bp, Arabidopsis thaliana
gaggaggcaccaagtca

SEQ ID NO: 97659 - DNA, 17 bp, Arabidopsis thaliana
gaggaggcacccttggg

SEQ ID NO: 97660 - DNA, 17 bp, Arabidopsis thaliana
gaggaggccacggtggg

SEQ ID NO: 97661 - DNA, 17 bp, Arabidopsis thaliana
gaggaggccatccagat

SEQ ID NO: 97662 - DNA, 17 bp, Arabidopsis thaliana
gaggaggccattcgcgt

SEQ ID NO: 97663 - DNA, 17 bp, Arabidopsis thaliana
gaggaggcgcagcgggc

SEQ ID NO: 97664 - DNA, 17 bp, Arabidopsis thaliana
gaggaggcggtccatgc

SEQ ID NO: 97665 - DNA, 17 bp, Arabidopsis thaliana
gaggaggctccaccacc

SEQ ID NO: 97666 - DNA, 17 bp, Arabidopsis thaliana
gaggaggctcggctggg

SEQ ID NO: 97667 - DNA, 17 bp, Arabidopsis thaliana
gaggagggaccgccggt

SEQ ID NO: 97668 - DNA, 17 bp, Arabidopsis thaliana
gaggagggctgtattag

SEQ ID NO: 97669 - DNA, 17 bp, Arabidopsis thaliana
gaggagggtagctcaag

SEQ ID NO: 97670 - DNA, 17 bp, Arabidopsis thaliana
gaggagggtcagcagag

SEQ ID NO: 97671 - DNA, 17 bp, Arabidopsis thaliana
gaggaggttctggaccg

SEQ ID NO: 97672 - DNA, 17 bp, Arabidopsis thaliana
gaggagtacccatgtcc

SEQ ID NO: 97673 - DNA, 17 bp, Arabidopsis thaliana
gaggagtactaggatgg

SEQ ID NO: 97674 - DNA, 17 bp, Arabidopsis thaliana
gaggagtccgacaggca

SEQ ID NO: 97675 - DNA, 17 bp, Arabidopsis thaliana
gaggagtcgacggggcc

SEQ ID NO: 97676 - DNA, 17 bp, Arabidopsis thaliana
gaggagtcggaggattt

SEQ ID NO: 97677 - DNA, 17 bp, Arabidopsis thaliana
gaggagtgtggattctg

SEQ ID NO: 97678 - DNA, 17 bp, Arabidopsis thaliana
gaggagtgttaggatat

SEQ ID NO: 97679 - DNA, 17 bp, Arabidopsis thaliana
gaggagtttcagagcga

SEQ ID NO: 97680 - DNA, 17 bp, Arabidopsis thaliana
gaggagttttcagtgtt

SEQ ID NO: 97681 - DNA, 17 bp, Arabidopsis thaliana
gaggataaccgaatcag

SEQ ID NO: 97682 - DNA, 17 bp, Arabidopsis thaliana
gaggataagaggtcgat

SEQ ID NO: 97683 - DNA, 17 bp, Arabidopsis thaliana
gaggataataacgggcc

SEQ ID NO: 97684 - DNA, 17 bp, Arabidopsis thaliana
gaggatagtgacgtagc

SEQ ID NO: 97685 - DNA, 17 bp, Arabidopsis thaliana
gaggatagttgttacgc

SEQ ID NO: 97686 - DNA, 17 bp, Arabidopsis thaliana
gaggatatagcgggtct

SEQ ID NO: 97687 - DNA, 17 bp, Arabidopsis thaliana
gaggatatctatgccgg

SEQ ID NO: 97688 - DNA, 17 bp, Arabidopsis thaliana
gaggatatgtccgagtg

SEQ ID NO: 97689 - DNA, 17 bp, Arabidopsis thaliana
gaggatattgtcaggtg

SEQ ID NO: 97690 - DNA, 17 bp, Arabidopsis thaliana
gaggatgaccagaccca

SEQ ID NO: 97691 - DNA, 17 bp, Arabidopsis thaliana
gaggatgaccttgggat

SEQ ID NO: 97692 - DNA, 17 bp, Arabidopsis thaliana
gaggatgaggacgaggg

SEQ ID NO: 97693 - DNA, 17 bp, Arabidopsis thaliana
gaggatgataagccgtg

SEQ ID NO: 97694 - DNA, 17 bp, Arabidopsis thaliana
gaggatgatggatgatg

SEQ ID NO: 97695 - DNA, 17 bp, Arabidopsis thaliana
gaggatgattggttgcg

SEQ ID NO: 97696 - DNA, 17 bp, Arabidopsis thaliana
gaggatggtctgaaagt

SEQ ID NO: 97697 - DNA, 17 bp, Arabidopsis thaliana
gaggatggtctgagagt

SEQ ID NO: 97698 - DNA, 17 bp, Arabidopsis thaliana
gaggatgtgtttgagac

SEQ ID NO: 97699 - DNA, 17 bp, Arabidopsis thaliana
gaggatgttacgtgaat

SEQ ID NO: 97700 - DNA, 17 bp, Arabidopsis thaliana
gaggatgttcagcacct

SEQ ID NO: 97701 - DNA, 17 bp, Arabidopsis thaliana
gaggattaagagcttcg

SEQ ID NO: 97702 - DNA, 17 bp, Arabidopsis thaliana
gaggattaagagtttcg

SEQ ID NO: 97703 - DNA, 17 bp, Arabidopsis thaliana
gaggattacaggcttcg

SEQ ID NO: 97704 - DNA, 17 bp, Arabidopsis thaliana
gaggattacaggtttcg

SEQ ID NO: 97705 - DNA, 17 bp, Arabidopsis thaliana
gaggattacggacttaa

SEQ ID NO: 97706 - DNA, 17 bp, Arabidopsis thaliana
gaggattacggactttg

SEQ ID NO: 97707 - DNA, 17 bp, Arabidopsis thaliana
gaggattacgggcttca

SEQ ID NO: 97708 - DNA, 17 bp, Arabidopsis thaliana
gaggattacgggtttcg

SEQ ID NO: 97709 - DNA, 17 bp, Arabidopsis thaliana
gaggattatgcggagtc

SEQ ID NO: 97710 - DNA, 17 bp, Arabidopsis thaliana
gaggattatgctgagta

SEQ ID NO: 97711 - DNA, 17 bp, Arabidopsis thaliana
gaggattatggcattcg

SEQ ID NO: 97712 - DNA, 17 bp, Arabidopsis thaliana
gaggattcaacaagtga

SEQ ID NO: 97713 - DNA, 17 bp, Arabidopsis thaliana
gaggattcgccactgta

SEQ ID NO: 97714 - DNA, 17 bp, Arabidopsis thaliana
gaggattcgccactgtt

SEQ ID NO: 97715 - DNA, 17 bp, Arabidopsis thaliana
gaggattcgtcgaccag

SEQ ID NO: 97716 - DNA, 17 bp, Arabidopsis thaliana
gaggattctcaagcgtt

SEQ ID NO: 97717 - DNA, 17 bp, Arabidopsis thaliana
gaggattctgacatttg

SEQ ID NO: 97718 - DNA, 17 bp, Arabidopsis thaliana
gaggattctttctaagt

SEQ ID NO: 97719 - DNA, 17 bp, Arabidopsis thaliana
gaggattgctgctacct

SEQ ID NO: 97720 - DNA, 17 bp, Arabidopsis thaliana
gaggattgctgctgcct

SEQ ID NO: 97721 - DNA, 17 bp, Arabidopsis thaliana
gaggattgcttcagtta

SEQ ID NO: 97722 - DNA, 17 bp, Arabidopsis thaliana
gaggatttatttcacaa

SEQ ID NO: 97723 - DNA, 17 bp, Arabidopsis thaliana
gaggatttgatttgtgt

SEQ ID NO: 97724 - DNA, 17 bp, Arabidopsis thaliana
gaggatttgtatctttg

SEQ ID NO: 97725 - DNA, 17 bp, Arabidopsis thaliana
gaggatttgtcgaccag

SEQ ID NO: 97726 - DNA, 17 bp, Arabidopsis thaliana
gaggattttggcctggt

SEQ ID NO: 97727 - DNA, 17 bp, Arabidopsis thaliana
gaggcaaacatggcgac

SEQ ID NO: 97728 - DNA, 17 bp, Arabidopsis thaliana
gaggcaaagacgggtgg

SEQ ID NO: 97729 - DNA, 17 bp, Arabidopsis thaliana
gaggcaaagtgggctgg

SEQ ID NO: 97730 - DNA, 17 bp, Arabidopsis thaliana
gaggcaaatgtacatga

SEQ ID NO: 97731 - DNA, 17 bp, Arabidopsis thaliana
gaggcaacccactgttt

SEQ ID NO: 97732 - DNA, 17 bp, Arabidopsis thaliana
gaggcaagagtgcagga

SEQ ID NO: 97733 - DNA, 17 bp, Arabidopsis thaliana
gaggcaagattctttcg

SEQ ID NO: 97734 - DNA, 17 bp, Arabidopsis thaliana
gaggcaagggaacaggg

SEQ ID NO: 97735 - DNA, 17 bp, Arabidopsis thaliana
gaggcaagtaaagatct

SEQ ID NO: 97736 - DNA, 17 bp, Arabidopsis thaliana
gaggcaagtatgcagga

SEQ ID NO: 97737 - DNA, 17 bp, Arabidopsis thaliana
gaggcaagtgtgcaaga

SEQ ID NO: 97738 - DNA, 17 bp, Arabidopsis thaliana
gaggcaagtgtgcagga

SEQ ID NO: 97739 - DNA, 17 bp, Arabidopsis thaliana
gaggcaataacaggtct

SEQ ID NO: 97740 - DNA, 17 bp, Arabidopsis thaliana
gaggcaatcctgagaaa

SEQ ID NO: 97741 - DNA, 17 bp, Arabidopsis thaliana
gaggcacaagggccagt

SEQ ID NO: 97742 - DNA, 17 bp, Arabidopsis thaliana
gaggcaccattactccg

SEQ ID NO: 97743 - DNA, 17 bp, Arabidopsis thaliana
gaggcacccaagtcgat

SEQ ID NO: 97744 - DNA, 17 bp, Arabidopsis thaliana
gaggcacggctctgcaa

SEQ ID NO: 97745 - DNA, 17 bp, Arabidopsis thaliana
gaggcacggctctgcgc

SEQ ID NO: 97746 - DNA, 17 bp, Arabidopsis thaliana
gaggcacggctctgtga

SEQ ID NO: 97747 - DNA, 17 bp, Arabidopsis thaliana
gaggcacggggttcgat

SEQ ID NO: 97748 - DNA, 17 bp, Arabidopsis thaliana
gaggcacggggttcgtt

SEQ ID NO: 97749 - DNA, 17 bp, Arabidopsis thaliana
gaggcacgtatgcagga

SEQ ID NO: 97750 - DNA, 17 bp, Arabidopsis thaliana
gaggcacgtctctgtgt

SEQ ID NO: 97751 - DNA, 17 bp, Arabidopsis thaliana
gaggcacgtctgcctgg

SEQ ID NO: 97752 - DNA, 17 bp, Arabidopsis thaliana
gaggcacgtctgggtgt

SEQ ID NO: 97753 - DNA, 17 bp, Arabidopsis thaliana
gaggcacgtgtcgttgg

SEQ ID NO: 97754 - DNA, 17 bp, Arabidopsis thaliana
gaggcacttgaactttc

SEQ ID NO: 97755 - DNA, 17 bp, Arabidopsis thaliana
gaggcacttggcgagca

SEQ ID NO: 97756 - DNA, 17 bp, Arabidopsis thaliana
gaggcacttgtcaggga

SEQ ID NO: 97757 - DNA, 17 bp, Arabidopsis thaliana
gaggcactttccaagca

SEQ ID NO: 97758 - DNA, 17 bp, Arabidopsis thaliana
gaggcactttccaaggt

SEQ ID NO: 97759 - DNA, 17 bp, Arabidopsis thaliana
gaggcactttctaatgt

SEQ ID NO: 97760 - DNA, 17 bp, Arabidopsis thaliana
gaggcacttttcagaga

SEQ ID NO: 97761 - DNA, 17 bp, Arabidopsis thaliana
gaggcacttttcaggga

SEQ ID NO: 97762 - DNA, 17 bp, Arabidopsis thaliana
gaggcagattagggttt

SEQ ID NO: 97763 - DNA, 17 bp, Arabidopsis thaliana
gaggcagcacgactact

SEQ ID NO: 97764 - DNA, 17 bp, Arabidopsis thaliana
gaggcagcggacaaaac

SEQ ID NO: 97765 - DNA, 17 bp, Arabidopsis thaliana
gaggcagcggacaaagc

SEQ ID NO: 97766 - DNA, 17 bp, Arabidopsis thaliana
gaggcagcggttcatcg

SEQ ID NO: 97767 - DNA, 17 bp, Arabidopsis thaliana
gaggcaggacccacaca

SEQ ID NO: 97768 - DNA, 17 bp, Arabidopsis thaliana
gaggcaggattcgggct

SEQ ID NO: 97769 - DNA, 17 bp, Arabidopsis thaliana
gaggcaggccttgtcat

SEQ ID NO: 97770 - DNA, 17 bp, Arabidopsis thaliana
gaggcaggtggtggcag

SEQ ID NO: 97771 - DNA, 17 bp, Arabidopsis thaliana
gaggcaggttgttcggg

SEQ ID NO: 97772 - DNA, 17 bp, Arabidopsis thaliana
gaggcagttggtttcgg

SEQ ID NO: 97773 - DNA, 17 bp, Arabidopsis thaliana
gaggcagttgttggagc

SEQ ID NO: 97774 - DNA, 17 bp, Arabidopsis thaliana
gaggcataaccgattca

SEQ ID NO: 97775 - DNA, 17 bp, Arabidopsis thaliana
gaggcataagccaacga

SEQ ID NO: 97776 - DNA, 17 bp, Arabidopsis thaliana
gaggcatgtggttcttc

SEQ ID NO: 97777 - DNA, 17 bp, Arabidopsis thaliana
gaggcattactggtggt

SEQ ID NO: 97778 - DNA, 17 bp, Arabidopsis thaliana
gaggcattgggggcgca

SEQ ID NO: 97779 - DNA, 17 bp, Arabidopsis thaliana
gaggcattgtactacaa

SEQ ID NO: 97780 - DNA, 17 bp, Arabidopsis thaliana
gaggcattgtgctctaa

SEQ ID NO: 97781 - DNA, 17 bp, Arabidopsis thaliana
gaggcattgtgttctaa

SEQ ID NO: 97782 - DNA, 17 bp, Arabidopsis thaliana
gaggcatttctggataa

SEQ ID NO: 97783 - DNA, 17 bp, Arabidopsis thaliana
gaggccaaactcggcat

SEQ ID NO: 97784 - DNA, 17 bp, Arabidopsis thaliana
gaggccaaactgcatgt

SEQ ID NO: 97785 - DNA, 17 bp, Arabidopsis thaliana
gaggccaaacttgacat

SEQ ID NO: 97786 - DNA, 17 bp, Arabidopsis thaliana
gaggccaaacttggcat

SEQ ID NO: 97787 - DNA, 17 bp, Arabidopsis thaliana
gaggccaaacttggtat

SEQ ID NO: 97788 - DNA, 17 bp, Arabidopsis thaliana
gaggccaaactttgcat

SEQ ID NO: 97789 - DNA, 17 bp, Arabidopsis thaliana
gaggccaaccggaggtg

SEQ ID NO: 97790 - DNA, 17 bp, Arabidopsis thaliana
gaggccaagagggaaaa

SEQ ID NO: 97791 - DNA, 17 bp, Arabidopsis thaliana
gaggccaatgttgtgat

SEQ ID NO: 97792 - DNA, 17 bp, Arabidopsis thaliana
gaggccacaaggaagtt

SEQ ID NO: 97793 - DNA, 17 bp, Arabidopsis thaliana
gaggccacactcgaccg

SEQ ID NO: 97794 - DNA, 17 bp, Arabidopsis thaliana
gaggccaccttgtgcac

SEQ ID NO: 97795 - DNA, 17 bp, Arabidopsis thaliana
gaggccacgccggcgac

SEQ ID NO: 97796 - DNA, 17 bp, Arabidopsis thaliana
gaggccacggtcgagga

SEQ ID NO: 97797 - DNA, 17 bp, Arabidopsis thaliana
gaggccacgtctgcctg

SEQ ID NO: 97798 - DNA, 17 bp, Arabidopsis thaliana
gaggccactgataactt

SEQ ID NO: 97799 - DNA, 17 bp, Arabidopsis thaliana
gaggccagagggcctgt

SEQ ID NO: 97800 - DNA, 17 bp, Arabidopsis thaliana
gaggccagtgcggctag

SEQ ID NO: 97801 - DNA, 17 bp, Arabidopsis thaliana
gaggcccaaatgtctct

SEQ ID NO: 97802 - DNA, 17 bp, Arabidopsis thaliana
gaggcccatgtgttgtt

SEQ ID NO: 97803 - DNA, 17 bp, Arabidopsis thaliana
gaggcccccgccgacgt

SEQ ID NO: 97804 - DNA, 17 bp, Arabidopsis thaliana
gaggcccgctaatttgt

SEQ ID NO: 97805 - DNA, 17 bp, Arabidopsis thaliana
gaggcccgctgtaaacc

SEQ ID NO: 97806 - DNA, 17 bp, Arabidopsis thaliana
gaggcccggtagatggt

SEQ ID NO: 97807 - DNA, 17 bp, Arabidopsis thaliana
gaggccctgttcgtttg

SEQ ID NO: 97808 - DNA, 17 bp, Arabidopsis thaliana
gaggccgaacaatcttc

SEQ ID NO: 97809 - DNA, 17 bp, Arabidopsis thaliana
gaggccgaggatgatga

SEQ ID NO: 97810 - DNA, 17 bp, Arabidopsis thaliana
gaggccgagtggagcac

SEQ ID NO: 97811 - DNA, 17 bp, Arabidopsis thaliana
gaggccgattctttcca

SEQ ID NO: 97812 - DNA, 17 bp, Arabidopsis thaliana
gaggccgattctttcga

SEQ ID NO: 97813 - DNA, 17 bp, Arabidopsis thaliana
gaggccggcgagtatcg

SEQ ID NO: 97814 - DNA, 17 bp, Arabidopsis thaliana
gaggccggctcgggatg

SEQ ID NO: 97815 - DNA, 17 bp, Arabidopsis thaliana
gaggccggctggcaggt

SEQ ID NO: 97816 - DNA, 17 bp, Arabidopsis thaliana
gaggccggtttgtttta

SEQ ID NO: 97817 - DNA, 17 bp, Arabidopsis thaliana
gaggccgtgttagacga

SEQ ID NO: 97818 - DNA, 17 bp, Arabidopsis thaliana
gaggccgttgttgtttg

SEQ ID NO: 97819 - DNA, 17 bp, Arabidopsis thaliana
gaggccgtttttggtaa

SEQ ID NO: 97820 - DNA, 17 bp, Arabidopsis thaliana
gaggcctctcaaggtgt

SEQ ID NO: 97821 - DNA, 17 bp, Arabidopsis thaliana
gaggcctgcgtgccgtt

SEQ ID NO: 97822 - DNA, 17 bp, Arabidopsis thaliana
gaggcctgtgtccaaat

SEQ ID NO: 97823 - DNA, 17 bp, Arabidopsis thaliana
gaggccttcttgaatcc

SEQ ID NO: 97824 - DNA, 17 bp, Arabidopsis thaliana
gaggccttggcggattg

SEQ ID NO: 97825 - DNA, 17 bp, Arabidopsis thaliana
gaggccttttgggaagg

SEQ ID NO: 97826 - DNA, 17 bp, Arabidopsis thaliana
gaggcgaaatatcccga

SEQ ID NO: 97827 - DNA, 17 bp, Arabidopsis thaliana
gaggcgaaggcgcgtac

SEQ ID NO: 97828 - DNA, 17 bp, Arabidopsis thaliana
gaggcgacagtggttac

SEQ ID NO: 97829 - DNA, 17 bp, Arabidopsis thaliana
gaggcgacctacacgtg

SEQ ID NO: 97830 - DNA, 17 bp, Arabidopsis thaliana
gaggcgacgcatgcgcc

SEQ ID NO: 97831 - DNA, 17 bp, Arabidopsis thaliana
gaggcgacggtgagaag

SEQ ID NO: 97832 - DNA, 17 bp, Arabidopsis thaliana
gaggcgacggtgagagt

SEQ ID NO: 97833 - DNA, 17 bp, Arabidopsis thaliana
gaggcgacggtggtgac

SEQ ID NO: 97834 - DNA, 17 bp, Arabidopsis thaliana
gaggcgacttgatgtct

SEQ ID NO: 97835 - DNA, 17 bp, Arabidopsis thaliana
gaggcgagacccacacc

SEQ ID NO: 97836 - DNA, 17 bp, Arabidopsis thaliana
gaggcgagaccgacacc

SEQ ID NO: 97837 - DNA, 17 bp, Arabidopsis thaliana
gaggcgaggatgtatca

SEQ ID NO: 97838 - DNA, 17 bp, Arabidopsis thaliana
gaggcgaggtggaacgg

SEQ ID NO: 97839 - DNA, 17 bp, Arabidopsis thaliana
gaggcggaacccacacc

SEQ ID NO: 97840 - DNA, 17 bp, Arabidopsis thaliana
gaggcggagaccgacgg

SEQ ID NO: 97841 - DNA, 17 bp, Arabidopsis thaliana
gaggcggctcggcctgg

SEQ ID NO: 97842 - DNA, 17 bp, Arabidopsis thaliana
gaggcggctcgggatcg

SEQ ID NO: 97843 - DNA, 17 bp, Arabidopsis thaliana
gaggcgggacccacacc

SEQ ID NO: 97844 - DNA, 17 bp, Arabidopsis thaliana
gaggcgggacccacatg

SEQ ID NO: 97845 - DNA, 17 bp, Arabidopsis thaliana
gaggcgggacctacata

SEQ ID NO: 97846 - DNA, 17 bp, Arabidopsis thaliana
gaggcgggactcacacc

SEQ ID NO: 97847 - DNA, 17 bp, Arabidopsis thaliana
gaggcggggacgcggct

SEQ ID NO: 97848 - DNA, 17 bp, Arabidopsis thaliana
gaggcggggttagatgg

SEQ ID NO: 97849 - DNA, 17 bp, Arabidopsis thaliana
gaggcggtcaaaactgc

SEQ ID NO: 97850 - DNA, 17 bp, Arabidopsis thaliana
gaggcggtgtatggtgt

SEQ ID NO: 97851 - DNA, 17 bp, Arabidopsis thaliana
gaggcggtttggtcagg

SEQ ID NO: 97852 - DNA, 17 bp, Arabidopsis thaliana
gaggcgtccaacctcag

SEQ ID NO: 97853 - DNA, 17 bp, Arabidopsis thaliana
gaggcgtccaatctcag

SEQ ID NO: 97854 - DNA, 17 bp, Arabidopsis thaliana
gaggcgtccacttcgaa

SEQ ID NO: 97855 - DNA, 17 bp, Arabidopsis thaliana
gaggcgtcgaactacca

SEQ ID NO: 97856 - DNA, 17 bp, Arabidopsis thaliana
gaggcgtcgtctgtcgt

SEQ ID NO: 97857 - DNA, 17 bp, Arabidopsis thaliana
gaggcgtgacgcgctct

SEQ ID NO: 97858 - DNA, 17 bp, Arabidopsis thaliana
gaggcgttagggtggcg

SEQ ID NO: 97859 - DNA, 17 bp, Arabidopsis thaliana
gaggcgttcagtcataa

SEQ ID NO: 97860 - DNA, 17 bp, Arabidopsis thaliana
gaggcgttcttgagctg

SEQ ID NO: 97861 - DNA, 17 bp, Arabidopsis thaliana
gaggcgttgtacgggag

SEQ ID NO: 97862 - DNA, 17 bp, Arabidopsis thaliana
gaggcgtttgcttggtc

SEQ ID NO: 97863 - DNA, 17 bp, Arabidopsis thaliana
gaggctaaacaaatttc

SEQ ID NO: 97864 - DNA, 17 bp, Arabidopsis thaliana
gaggctaaacaactcct

SEQ ID NO: 97865 - DNA, 17 bp, Arabidopsis thaliana
gaggctaaacaactttc

SEQ ID NO: 97866 - DNA, 17 bp, Arabidopsis thaliana
gaggctaaccgccttgc

SEQ ID NO: 97867 - DNA, 17 bp, Arabidopsis thaliana
gaggctaactctctcca

SEQ ID NO: 97868 - DNA, 17 bp, Arabidopsis thaliana
gaggctacagctacaat

SEQ ID NO: 97869 - DNA, 17 bp, Arabidopsis thaliana
gaggctacgaaattcac

SEQ ID NO: 97870 - DNA, 17 bp, Arabidopsis thaliana
gaggctacgctattttg

SEQ ID NO: 97871 - DNA, 17 bp, Arabidopsis thaliana
gaggctacggcgttagt

SEQ ID NO: 97872 - DNA, 17 bp, Arabidopsis thaliana
gaggctagacttgtgta

SEQ ID NO: 97873 - DNA, 17 bp, Arabidopsis thaliana
gaggctagctaccgtgg

SEQ ID NO: 97874 - DNA, 17 bp, Arabidopsis thaliana
gaggctaggttagccga

SEQ ID NO: 97875 - DNA, 17 bp, Arabidopsis thaliana
gaggctatagactcagg

SEQ ID NO: 97876 - DNA, 17 bp, Arabidopsis thaliana
gaggctatgtggctgta

SEQ ID NO: 97877 - DNA, 17 bp, Arabidopsis thaliana
gaggctcagagccatgg

SEQ ID NO: 97878 - DNA, 17 bp, Arabidopsis thaliana
gaggctcagccctttgt

SEQ ID NO: 97879 - DNA, 17 bp, Arabidopsis thaliana
gaggctcaggtgcaagg

SEQ ID NO: 97880 - DNA, 17 bp, Arabidopsis thaliana
gaggctcatcgcttgct

SEQ ID NO: 97881 - DNA, 17 bp, Arabidopsis thaliana
gaggctccgaatggtga

SEQ ID NO: 97882 - DNA, 17 bp, Arabidopsis thaliana
gaggctccgagatcgca

SEQ ID NO: 97883 - DNA, 17 bp, Arabidopsis thaliana
gaggctccggaaagatg

SEQ ID NO: 97884 - DNA, 17 bp, Arabidopsis thaliana
gaggctcgctgtaaacc

SEQ ID NO: 97885 - DNA, 17 bp, Arabidopsis thaliana
gaggctcgtcgagatct

SEQ ID NO: 97886 - DNA, 17 bp, Arabidopsis thaliana
gaggctctcaccgtccc

SEQ ID NO: 97887 - DNA, 17 bp, Arabidopsis thaliana
gaggctctgctcatttt

SEQ ID NO: 97888 - DNA, 17 bp, Arabidopsis thaliana
gaggctctgggccgaaa

SEQ ID NO: 97889 - DNA, 17 bp, Arabidopsis thaliana
gaggctgaactggttgg

SEQ ID NO: 97890 - DNA, 17 bp, Arabidopsis thaliana
gaggctgaagattattg

SEQ ID NO: 97891 - DNA, 17 bp, Arabidopsis thaliana
gaggctgaagcgttgcg

SEQ ID NO: 97892 - DNA, 17 bp, Arabidopsis thaliana
gaggctgagcgacatgg

SEQ ID NO: 97893 - DNA, 17 bp, Arabidopsis thaliana
gaggctgatgttgtgat

SEQ ID NO: 97894 - DNA, 17 bp, Arabidopsis thaliana
gaggctgattggatatg

SEQ ID NO: 97895 - DNA, 17 bp, Arabidopsis thaliana
gaggctgcgggaatgtt

SEQ ID NO: 97896 - DNA, 17 bp, Arabidopsis thaliana
gaggctgctccaatggt

SEQ ID NO: 97897 - DNA, 17 bp, Arabidopsis thaliana
gaggctgggctgtgatg

SEQ ID NO: 97898 - DNA, 17 bp, Arabidopsis thaliana
gaggctggtttcacaga

SEQ ID NO: 97899 - DNA, 17 bp, Arabidopsis thaliana
gaggctgtcaaccaaat

SEQ ID NO: 97900 - DNA, 17 bp, Arabidopsis thaliana
gaggctgtcaaccagat

SEQ ID NO: 97901 - DNA, 17 bp, Arabidopsis thaliana
gaggctgttacctgtcg

SEQ ID NO: 97902 - DNA, 17 bp, Arabidopsis thaliana
gaggcttactgttgctg

SEQ ID NO: 97903 - DNA, 17 bp, Arabidopsis thaliana
gaggcttcgttccaggt

SEQ ID NO: 97904 - DNA, 17 bp, Arabidopsis thaliana
gaggcttgactatttgt

SEQ ID NO: 97905 - DNA, 17 bp, Arabidopsis thaliana
gaggcttgcatttctgt

SEQ ID NO: 97906 - DNA, 17 bp, Arabidopsis thaliana
gaggcttgccttaagtt

SEQ ID NO: 97907 - DNA, 17 bp, Arabidopsis thaliana
gaggctttaggttgacg

SEQ ID NO: 97908 - DNA, 17 bp, Arabidopsis thaliana
gaggctttcgacgaaat

SEQ ID NO: 97909 - DNA, 17 bp, Arabidopsis thaliana
gaggctttctgggtcgt

SEQ ID NO: 97910 - DNA, 17 bp, Arabidopsis thaliana
gaggctttgaatggtta

SEQ ID NO: 97911 - DNA, 17 bp, Arabidopsis thaliana
gaggctttgacaaagtt

SEQ ID NO: 97912 - DNA, 17 bp, Arabidopsis thaliana
gaggctttttctctgga

SEQ ID NO: 97913 - DNA, 17 bp, Arabidopsis thaliana
gagggaaaatcggcgga

SEQ ID NO: 97914 - DNA, 17 bp, Arabidopsis thaliana
gagggaaatcgactgtt

SEQ ID NO: 97915 - DNA, 17 bp, Arabidopsis thaliana
gagggaagcggatgggg

SEQ ID NO: 97916 - DNA, 17 bp, Arabidopsis thaliana
gagggaagtcctcgtgt

SEQ ID NO: 97917 - DNA, 17 bp, Arabidopsis thaliana
gagggaattcatccggt

SEQ ID NO: 97918 - DNA, 17 bp, Arabidopsis thaliana
gagggacaaagtccggt

SEQ ID NO: 97919 - DNA, 17 bp, Arabidopsis thaliana
gagggacagaagagaga

SEQ ID NO: 97920 - DNA, 17 bp, Arabidopsis thaliana
gagggacagaggagaga

SEQ ID NO: 97921 - DNA, 17 bp, Arabidopsis thaliana
gagggacccactgctgc

SEQ ID NO: 97922 - DNA, 17 bp, Arabidopsis thaliana
gagggacggcaacttgg

SEQ ID NO: 97923 - DNA, 17 bp, Arabidopsis thaliana
gagggagaaccaatcaa

SEQ ID NO: 97924 - DNA, 17 bp, Arabidopsis thaliana
gagggagacaggtgtga

SEQ ID NO: 97925 - DNA, 17 bp, Arabidopsis thaliana
gagggagaccacaacac

SEQ ID NO: 97926 - DNA, 17 bp, Arabidopsis thaliana
gagggagactcctgacg

SEQ ID NO: 97927 - DNA, 17 bp, Arabidopsis thaliana
gagggagcttctgattc

SEQ ID NO: 97928 - DNA, 17 bp, Arabidopsis thaliana
gagggaggcaagcaagc

SEQ ID NO: 97929 - DNA, 17 bp, Arabidopsis thaliana
gagggagggagagagag

SEQ ID NO: 97930 - DNA, 17 bp, Arabidopsis thaliana
gagggagggcacgtctg

SEQ ID NO: 97931 - DNA, 17 bp, Arabidopsis thaliana
gagggaggtttctcacg

SEQ ID NO: 97932 - DNA, 17 bp, Arabidopsis thaliana
gagggagtctgggcagt

SEQ ID NO: 97933 - DNA, 17 bp, Arabidopsis thaliana
gagggagtggtcacttt

SEQ ID NO: 97934 - DNA, 17 bp, Arabidopsis thaliana
gagggataacacgcact

SEQ ID NO: 97935 - DNA, 17 bp, Arabidopsis thaliana
gagggataaggcacttt

SEQ ID NO: 97936 - DNA, 17 bp, Arabidopsis thaliana
gagggataagtgtgaat

SEQ ID NO: 97937 - DNA, 17 bp, Arabidopsis thaliana
gagggatccagaaccta

SEQ ID NO: 97938 - DNA, 17 bp, Arabidopsis thaliana
gagggatcccctgttac

SEQ ID NO: 97939 - DNA, 17 bp, Arabidopsis thaliana
gagggatcgatagtcgc

SEQ ID NO: 97940 - DNA, 17 bp, Arabidopsis thaliana
gagggatctcgtggttg

SEQ ID NO: 97941 - DNA, 17 bp, Arabidopsis thaliana
gagggatctgccttcgg

SEQ ID NO: 97942 - DNA, 17 bp, Arabidopsis thaliana
gagggatgaaatctagt

SEQ ID NO: 97943 - DNA, 17 bp, Arabidopsis thaliana
gagggattacaagattc

SEQ ID NO: 97944 - DNA, 17 bp, Arabidopsis thaliana
gagggattacgagtttc

SEQ ID NO: 97945 - DNA, 17 bp, Arabidopsis thaliana
gagggattacgggattc

SEQ ID NO: 97946 - DNA, 17 bp, Arabidopsis thaliana
gagggattacgggcttc

SEQ ID NO: 97947 - DNA, 17 bp, Arabidopsis thaliana
gagggattacggggttc

SEQ ID NO: 97948 - DNA, 17 bp, Arabidopsis thaliana
gagggattacgggtttc

SEQ ID NO: 97949 - DNA, 17 bp, Arabidopsis thaliana
gagggattatgggtttt

SEQ ID NO: 97950 - DNA, 17 bp, Arabidopsis thaliana
gagggatttcggtgtgc

SEQ ID NO: 97951 - DNA, 17 bp, Arabidopsis thaliana
gagggatttgcgtcttt

SEQ ID NO: 97952 - DNA, 17 bp, Arabidopsis thaliana
gagggcaaagcccgtat

SEQ ID NO: 97953 - DNA, 17 bp, Arabidopsis thaliana
gagggcaagtctggtgc

SEQ ID NO: 97954 - DNA, 17 bp, Arabidopsis thaliana
gagggcacatctgccgg

SEQ ID NO: 97955 - DNA, 17 bp, Arabidopsis thaliana
gagggcacatctgcctg

SEQ ID NO: 97956 - DNA, 17 bp, Arabidopsis thaliana
gagggcacctccccctg

SEQ ID NO: 97957 - DNA, 17 bp, Arabidopsis thaliana
gagggcacctctgcctg

SEQ ID NO: 97958 - DNA, 17 bp, Arabidopsis thaliana
gagggcacgcctgcctg

SEQ ID NO: 97959 - DNA, 17 bp, Arabidopsis thaliana
gagggcacgtatgcctg

SEQ ID NO: 97960 - DNA, 17 bp, Arabidopsis thaliana
gagggcacgtccccctc

SEQ ID NO: 97961 - DNA, 17 bp, Arabidopsis thaliana
gagggcacgtccctggg

SEQ ID NO: 97962 - DNA, 17 bp, Arabidopsis thaliana
gagggcacgtccgcctg

SEQ ID NO: 97963 - DNA, 17 bp, Arabidopsis thaliana
gagggcacgtcctgggt

SEQ ID NO: 97964 - DNA, 17 bp, Arabidopsis thaliana
gagggcacgtcggccgg

SEQ ID NO: 97965 - DNA, 17 bp, Arabidopsis thaliana
gagggcacgtcggcctg

SEQ ID NO: 97966 - DNA, 17 bp, Arabidopsis thaliana
gagggcacgtcgtcctg

SEQ ID NO: 97967 - DNA, 17 bp, Arabidopsis thaliana
gagggcacgtctacctg

SEQ ID NO: 97968 - DNA, 17 bp, Arabidopsis thaliana
gagggcacgtctccctg

SEQ ID NO: 97969 - DNA, 17 bp, Arabidopsis thaliana
gagggcacgtctcctgg

SEQ ID NO: 97970 - DNA, 17 bp, Arabidopsis thaliana
gagggcacgtctctctg

SEQ ID NO: 97971 - DNA, 17 bp, Arabidopsis thaliana
gagggcacgtctctggg

SEQ ID NO: 97972 - DNA, 17 bp, Arabidopsis thaliana
gagggcacgtctcttgg

SEQ ID NO: 97973 - DNA, 17 bp, Arabidopsis thaliana
gagggcacgtctgcatg

SEQ ID NO: 97974 - DNA, 17 bp, Arabidopsis thaliana
gagggcacgtctgcccg

SEQ ID NO: 97975 - DNA, 17 bp, Arabidopsis thaliana
gagggcacgtctgccgg

SEQ ID NO: 97976 - DNA, 17 bp, Arabidopsis thaliana
gagggcacgtctgccta

SEQ ID NO: 97977 - DNA, 17 bp, Arabidopsis thaliana
gagggcacgtctgcctc

SEQ ID NO: 97978 - DNA, 17 bp, Arabidopsis thaliana
gagggcacgtctgcctg

SEQ ID NO: 97979 - DNA, 17 bp, Arabidopsis thaliana
gagggcacgtctgcctt

SEQ ID NO: 97980 - DNA, 17 bp, Arabidopsis thaliana
gagggcacgtctgcggg

SEQ ID NO: 97981 - DNA, 17 bp, Arabidopsis thaliana
gagggcacgtctgcgtg

SEQ ID NO: 97982 - DNA, 17 bp, Arabidopsis thaliana
gagggcacgtctgctcg

SEQ ID NO: 97983 - DNA, 17 bp, Arabidopsis thaliana
gagggcacgtctgctgg

SEQ ID NO: 97984 - DNA, 17 bp, Arabidopsis thaliana
gagggcacgtctgcttg

SEQ ID NO: 97985 - DNA, 17 bp, Arabidopsis thaliana
gagggcacgtctggctg

SEQ ID NO: 97986 - DNA, 17 bp, Arabidopsis thaliana
gagggcacgtctggggg

SEQ ID NO: 97987 - DNA, 17 bp, Arabidopsis thaliana
gagggcacgtctgggtg

SEQ ID NO: 97988 - DNA, 17 bp, Arabidopsis thaliana
gagggcacgtctgtctg

SEQ ID NO: 97989 - DNA, 17 bp, Arabidopsis thaliana
gagggcacgtcttcctg

SEQ ID NO: 97990 - DNA, 17 bp, Arabidopsis thaliana
gagggcacgtcttgggt

SEQ ID NO: 97991 - DNA, 17 bp, Arabidopsis thaliana
gagggcacgtgcctggg

SEQ ID NO: 97992 - DNA, 17 bp, Arabidopsis thaliana
gagggcacgttgcctgg

SEQ ID NO: 97993 - DNA, 17 bp, Arabidopsis thaliana
gagggcacgtttgcctg

SEQ ID NO: 97994 - DNA, 17 bp, Arabidopsis thaliana
gagggcacttctgcctg

SEQ ID NO: 97995 - DNA, 17 bp, Arabidopsis thaliana
gagggcagcagtcagtt

SEQ ID NO: 97996 - DNA, 17 bp, Arabidopsis thaliana
gagggcagtccgccaac

SEQ ID NO: 97997 - DNA, 17 bp, Arabidopsis thaliana
gagggcatggccgagtg

SEQ ID NO: 97998 - DNA, 17 bp, Arabidopsis thaliana
gagggcgaatcgggaaa

SEQ ID NO: 97999 - DNA, 17 bp, Arabidopsis thaliana
gagggcgattctgtggg

SEQ ID NO: 98000 - DNA, 17 bp, Arabidopsis thaliana
gagggcgcggcggtcgc

SEQ ID NO: 98001 - DNA, 17 bp, Arabidopsis thaliana
gagggcggactgagctg

SEQ ID NO: 98002 - DNA, 17 bp, Arabidopsis thaliana
gagggcggcggcagctg

SEQ ID NO: 98003 - DNA, 17 bp, Arabidopsis thaliana
gagggctaagtagtccg

SEQ ID NO: 98004 - DNA, 17 bp, Arabidopsis thaliana
gagggctacctttgatg

SEQ ID NO: 98005 - DNA, 17 bp, Arabidopsis thaliana
gagggctatctttgggc

SEQ ID NO: 98006 - DNA, 17 bp, Arabidopsis thaliana
gagggctcaggaagtgt

SEQ ID NO: 98007 - DNA, 17 bp, Arabidopsis thaliana
gagggctcaggagtgat

SEQ ID NO: 98008 - DNA, 17 bp, Arabidopsis thaliana
gagggctgagctcgggg

SEQ ID NO: 98009 - DNA, 17 bp, Arabidopsis thaliana
gagggctggctcggggg

SEQ ID NO: 98010 - DNA, 17 bp, Arabidopsis thaliana
gagggctgggcgcgggg

SEQ ID NO: 98011 - DNA, 17 bp, Arabidopsis thaliana
gagggctgggctccggg

SEQ ID NO: 98012 - DNA, 17 bp, Arabidopsis thaliana
gagggctgggctcgggg

SEQ ID NO: 98013 - DNA, 17 bp, Arabidopsis thaliana
gagggctgggctcggtg

SEQ ID NO: 98014 - DNA, 17 bp, Arabidopsis thaliana
gagggctgggctctggg

SEQ ID NO: 98015 - DNA, 17 bp, Arabidopsis thaliana
gagggctgggctggggg

SEQ ID NO: 98016 - DNA, 17 bp, Arabidopsis thaliana
gagggctggggcggcac

SEQ ID NO: 98017 - DNA, 17 bp, Arabidopsis thaliana
gagggctgtctttggac

SEQ ID NO: 98018 - DNA, 17 bp, Arabidopsis thaliana
gagggctgtctttgggc

SEQ ID NO: 98019 - DNA, 17 bp, Arabidopsis thaliana
gagggcttacctccggt

SEQ ID NO: 98020 - DNA, 17 bp, Arabidopsis thaliana
gaggggaaggtctatct

SEQ ID NO: 98021 - DNA, 17 bp, Arabidopsis thaliana
gaggggaatcaactctg

SEQ ID NO: 98022 - DNA, 17 bp, Arabidopsis thaliana
gaggggacaccaggagg

SEQ ID NO: 98023 - DNA, 17 bp, Arabidopsis thaliana
gaggggacctccaatag

SEQ ID NO: 98024 - DNA, 17 bp, Arabidopsis thaliana
gaggggacttcgaccgg

SEQ ID NO: 98025 - DNA, 17 bp, Arabidopsis thaliana
gaggggagcaggatgtg

SEQ ID NO: 98026 - DNA, 17 bp, Arabidopsis thaliana
gaggggagctgaagcac

SEQ ID NO: 98027 - DNA, 17 bp, Arabidopsis thaliana
gaggggagggccaaatc

SEQ ID NO: 98028 - DNA, 17 bp, Arabidopsis thaliana
gaggggaggtggtgggc

SEQ ID NO: 98029 - DNA, 17 bp, Arabidopsis thaliana
gaggggagttttatgac

SEQ ID NO: 98030 - DNA, 17 bp, Arabidopsis thaliana
gaggggattgccattag

SEQ ID NO: 98031 - DNA, 17 bp, Arabidopsis thaliana
gaggggcaagccggagg

SEQ ID NO: 98032 - DNA, 17 bp, Arabidopsis thaliana
gaggggcacacaggtcg

SEQ ID NO: 98033 - DNA, 17 bp, Arabidopsis thaliana
gaggggctcgcgtctga

SEQ ID NO: 98034 - DNA, 17 bp, Arabidopsis thaliana
gagggggacacaggtcg

SEQ ID NO: 98035 - DNA, 17 bp, Arabidopsis thaliana
gagggggacacaggtct

SEQ ID NO: 98036 - DNA, 17 bp, Arabidopsis thaliana
gagggggcagacggtgc

SEQ ID NO: 98037 - DNA, 17 bp, Arabidopsis thaliana
gaggggtccagaaccta

SEQ ID NO: 98038 - DNA, 17 bp, Arabidopsis thaliana
gaggggtgccttcggga

SEQ ID NO: 98039 - DNA, 17 bp, Arabidopsis thaliana
gaggggtgttgggctgt

SEQ ID NO: 98040 - DNA, 17 bp, Arabidopsis thaliana
gagggtacgtctgcctg

SEQ ID NO: 98041 - DNA, 17 bp, Arabidopsis thaliana
gagggtactttttattg

SEQ ID NO: 98042 - DNA, 17 bp, Arabidopsis thaliana
gagggtcaccagagacc

SEQ ID NO: 98043 - DNA, 17 bp, Arabidopsis thaliana
gagggtcagcagagacg

SEQ ID NO: 98044 - DNA, 17 bp, Arabidopsis thaliana
gagggtcaggatacata

SEQ ID NO: 98045 - DNA, 17 bp, Arabidopsis thaliana
gagggtcctgctttcga

SEQ ID NO: 98046 - DNA, 17 bp, Arabidopsis thaliana
gagggtcgccaaatcgc

SEQ ID NO: 98047 - DNA, 17 bp, Arabidopsis thaliana
gagggtcggcaatcggg

SEQ ID NO: 98048 - DNA, 17 bp, Arabidopsis thaliana
gagggtgagagccccgt

SEQ ID NO: 98049 - DNA, 17 bp, Arabidopsis thaliana
gagggtgctatgcttaa

SEQ ID NO: 98050 - DNA, 17 bp, Arabidopsis thaliana
gagggtgctcttactgc

SEQ ID NO: 98051 - DNA, 17 bp, Arabidopsis thaliana
gagggtggaataaggca

SEQ ID NO: 98052 - DNA, 17 bp, Arabidopsis thaliana
gagggtggcatgctccc

SEQ ID NO: 98053 - DNA, 17 bp, Arabidopsis thaliana
gagggtggcggcctaag

SEQ ID NO: 98054 - DNA, 17 bp, Arabidopsis thaliana
gagggttcggatccctc

SEQ ID NO: 98055 - DNA, 17 bp, Arabidopsis thaliana
gagggttcggcgatgag

SEQ ID NO: 98056 - DNA, 17 bp, Arabidopsis thaliana
gagggttgtctttgggc

SEQ ID NO: 98057 - DNA, 17 bp, Arabidopsis thaliana
gagggttttgctcgttc

SEQ ID NO: 98058 - DNA, 17 bp, Arabidopsis thaliana
gagggttttgtgagcct

SEQ ID NO: 98059 - DNA, 17 bp, Arabidopsis thaliana
gaggtaaatgtacatga

SEQ ID NO: 98060 - DNA, 17 bp, Arabidopsis thaliana
gaggtaagccctcccgt

SEQ ID NO: 98061 - DNA, 17 bp, Arabidopsis thaliana
gaggtaagccgcagtga

SEQ ID NO: 98062 - DNA, 17 bp, Arabidopsis thaliana
gaggtaaggaacacagt

SEQ ID NO: 98063 - DNA, 17 bp, Arabidopsis thaliana
gaggtaaggtccagcgg

SEQ ID NO: 98064 - DNA, 17 bp, Arabidopsis thaliana
gaggtaagtgtgcagga

SEQ ID NO: 98065 - DNA, 17 bp, Arabidopsis thaliana
gaggtaagtgtgcatga

SEQ ID NO: 98066 - DNA, 17 bp, Arabidopsis thaliana
gaggtagaccctccagc

SEQ ID NO: 98067 - DNA, 17 bp, Arabidopsis thaliana
gaggtagcggacaaagc

SEQ ID NO: 98068 - DNA, 17 bp, Arabidopsis thaliana
gaggtaggagaagaggt

SEQ ID NO: 98069 - DNA, 17 bp, Arabidopsis thaliana
gaggtaggagtgagtcc

SEQ ID NO: 98070 - DNA, 17 bp, Arabidopsis thaliana
gaggtaggggtgcagag

SEQ ID NO: 98071 - DNA, 17 bp, Arabidopsis thaliana
gaggtagggtccaccgg

SEQ ID NO: 98072 - DNA, 17 bp, Arabidopsis thaliana
gaggtagggtccagcgg

SEQ ID NO: 98073 - DNA, 17 bp, Arabidopsis thaliana
gaggtagtgtgattgac

SEQ ID NO: 98074 - DNA, 17 bp, Arabidopsis thaliana
gaggtataaaacggcca

SEQ ID NO: 98075 - DNA, 17 bp, Arabidopsis thaliana
gaggtataccgcgggac

SEQ ID NO: 98076 - DNA, 17 bp, Arabidopsis thaliana
gaggtatactgcggaac

SEQ ID NO: 98077 - DNA, 17 bp, Arabidopsis thaliana
gaggtatccaacttcag

SEQ ID NO: 98078 - DNA, 17 bp, Arabidopsis thaliana
gaggtatccctacatag

SEQ ID NO: 98079 - DNA, 17 bp, Arabidopsis thaliana
gaggtatgggtggtcta

SEQ ID NO: 98080 - DNA, 17 bp, Arabidopsis thaliana
gaggtattccatagccc

SEQ ID NO: 98081 - DNA, 17 bp, Arabidopsis thaliana
gaggtattccatagctc

SEQ ID NO: 98082 - DNA, 17 bp, Arabidopsis thaliana
gaggtattggatgaact

SEQ ID NO: 98083 - DNA, 17 bp, Arabidopsis thaliana
gaggtcaaagtttgggc

SEQ ID NO: 98084 - DNA, 17 bp, Arabidopsis thaliana
gaggtcaaggccgaagc

SEQ ID NO: 98085 - DNA, 17 bp, Arabidopsis thaliana
gaggtcaattggtggac

SEQ ID NO: 98086 - DNA, 17 bp, Arabidopsis thaliana
gaggtcacggtttgtcg

SEQ ID NO: 98087 - DNA, 17 bp, Arabidopsis thaliana
gaggtcacgtctgcctg

SEQ ID NO: 98088 - DNA, 17 bp, Arabidopsis thaliana
gaggtcagtccgttgat

SEQ ID NO: 98089 - DNA, 17 bp, Arabidopsis thaliana
gaggtcagttgggactt

SEQ ID NO: 98090 - DNA, 17 bp, Arabidopsis thaliana
gaggtcatggatcaaat

SEQ ID NO: 98091 - DNA, 17 bp, Arabidopsis thaliana
gaggtcattgttttcgt

SEQ ID NO: 98092 - DNA, 17 bp, Arabidopsis thaliana
gaggtcatttgccgact

SEQ ID NO: 98093 - DNA, 17 bp, Arabidopsis thaliana
gaggtccaacgactaat

SEQ ID NO: 98094 - DNA, 17 bp, Arabidopsis thaliana
gaggtccacccgatgta

SEQ ID NO: 98095 - DNA, 17 bp, Arabidopsis thaliana
gaggtcccgagttcgtt

SEQ ID NO: 98096 - DNA, 17 bp, Arabidopsis thaliana
gaggtccgaatttttgg

SEQ ID NO: 98097 - DNA, 17 bp, Arabidopsis thaliana
gaggtccgcgtagagaa

SEQ ID NO: 98098 - DNA, 17 bp, Arabidopsis thaliana
gaggtccggttttttgc

SEQ ID NO: 98099 - DNA, 17 bp, Arabidopsis thaliana
gaggtccgtaaagtcga

SEQ ID NO: 98100 - DNA, 17 bp, Arabidopsis thaliana
gaggtcctaccgggagc

SEQ ID NO: 98101 - DNA, 17 bp, Arabidopsis thaliana
gaggtcctcaatgatta

SEQ ID NO: 98102 - DNA, 17 bp, Arabidopsis thaliana
gaggtcctcctggatat

SEQ ID NO: 98103 - DNA, 17 bp, Arabidopsis thaliana
gaggtcctctacagatt

SEQ ID NO: 98104 - DNA, 17 bp, Arabidopsis thaliana
gaggtcgactaggagct

SEQ ID NO: 98105 - DNA, 17 bp, Arabidopsis thaliana
gaggtcgacttgatgga

SEQ ID NO: 98106 - DNA, 17 bp, Arabidopsis thaliana
gaggtcgagtacccaca

SEQ ID NO: 98107 - DNA, 17 bp, Arabidopsis thaliana
gaggtcgagtacttatc

SEQ ID NO: 98108 - DNA, 17 bp, Arabidopsis thaliana
gaggtcgagtcctcttg

SEQ ID NO: 98109 - DNA, 17 bp, Arabidopsis thaliana
gaggtcgagtgacaggt

SEQ ID NO: 98110 - DNA, 17 bp, Arabidopsis thaliana
gaggtcgagtgagccgg

SEQ ID NO: 98111 - DNA, 17 bp, Arabidopsis thaliana
gaggtcgagtgtgatgg

SEQ ID NO: 98112 - DNA, 17 bp, Arabidopsis thaliana
gaggtcgattggttgct

SEQ ID NO: 98113 - DNA, 17 bp, Arabidopsis thaliana
gaggtcgccagttcgaa

SEQ ID NO: 98114 - DNA, 17 bp, Arabidopsis thaliana
gaggtcgccggttcgag

SEQ ID NO: 98115 - DNA, 17 bp, Arabidopsis thaliana
gaggtcgctggttcgag

SEQ ID NO: 98116 - DNA, 17 bp, Arabidopsis thaliana
gaggtcggcgactttca

SEQ ID NO: 98117 - DNA, 17 bp, Arabidopsis thaliana
gaggtcggttcatagcg

SEQ ID NO: 98118 - DNA, 17 bp, Arabidopsis thaliana
gaggtctaatgttccag

SEQ ID NO: 98119 - DNA, 17 bp, Arabidopsis thaliana
gaggtctagcccactca

SEQ ID NO: 98120 - DNA, 17 bp, Arabidopsis thaliana
gaggtctatcatccgaa

SEQ ID NO: 98121 - DNA, 17 bp, Arabidopsis thaliana
gaggtctcaacggtggg

SEQ ID NO: 98122 - DNA, 17 bp, Arabidopsis thaliana
gaggtctcatttctcat

SEQ ID NO: 98123 - DNA, 17 bp, Arabidopsis thaliana
gaggtctcggagattca

SEQ ID NO: 98124 - DNA, 17 bp, Arabidopsis thaliana
gaggtctcttgtcgccg

SEQ ID NO: 98125 - DNA, 17 bp, Arabidopsis thaliana
gaggtctgctgcttctt

SEQ ID NO: 98126 - DNA, 17 bp, Arabidopsis thaliana
gaggtcttagctcaatg

SEQ ID NO: 98127 - DNA, 17 bp, Arabidopsis thaliana
gaggtcttcatcctcgg

SEQ ID NO: 98128 - DNA, 17 bp, Arabidopsis thaliana
gaggtcttctgcttctt

SEQ ID NO: 98129 - DNA, 17 bp, Arabidopsis thaliana
gaggtcttgggttcgag

SEQ ID NO: 98130 - DNA, 17 bp, Arabidopsis thaliana
gaggtctttcagtctgg

SEQ ID NO: 98131 - DNA, 17 bp, Arabidopsis thaliana
gaggtctttttcgattg

SEQ ID NO: 98132 - DNA, 17 bp, Arabidopsis thaliana
gaggtgaaacaccgatt

SEQ ID NO: 98133 - DNA, 17 bp, Arabidopsis thaliana
gaggtgaaactccgatt

SEQ ID NO: 98134 - DNA, 17 bp, Arabidopsis thaliana
gaggtgaaaggccgcgg

SEQ ID NO: 98135 - DNA, 17 bp, Arabidopsis thaliana
gaggtgaaatggggcgg

SEQ ID NO: 98136 - DNA, 17 bp, Arabidopsis thaliana
gaggtgaaggtctctgc

SEQ ID NO: 98137 - DNA, 17 bp, Arabidopsis thaliana
gaggtgacaggagagct

SEQ ID NO: 98138 - DNA, 17 bp, Arabidopsis thaliana
gaggtgaccattggagc

SEQ ID NO: 98139 - DNA, 17 bp, Arabidopsis thaliana
gaggtgaccattggagt

SEQ ID NO: 98140 - DNA, 17 bp, Arabidopsis thaliana
gaggtgaccatttgagc

SEQ ID NO: 98141 - DNA, 17 bp, Arabidopsis thaliana
gaggtgacctatctcca

SEQ ID NO: 98142 - DNA, 17 bp, Arabidopsis thaliana
gaggtgagactctcaac

SEQ ID NO: 98143 - DNA, 17 bp, Arabidopsis thaliana
gaggtgagatttggaca

SEQ ID NO: 98144 - DNA, 17 bp, Arabidopsis thaliana
gaggtgatgattgttag

SEQ ID NO: 98145 - DNA, 17 bp, Arabidopsis thaliana
gaggtgatgttgaatgg

SEQ ID NO: 98146 - DNA, 17 bp, Arabidopsis thaliana
gaggtgatgttgttgtg

SEQ ID NO: 98147 - DNA, 17 bp, Arabidopsis thaliana
gaggtgatttggtcatt

SEQ ID NO: 98148 - DNA, 17 bp, Arabidopsis thaliana
gaggtgcaaatcttcaa

SEQ ID NO: 98149 - DNA, 17 bp, Arabidopsis thaliana
gaggtgcagaaccagga

SEQ ID NO: 98150 - DNA, 17 bp, Arabidopsis thaliana
gaggtgcattggccggc

SEQ ID NO: 98151 - DNA, 17 bp, Arabidopsis thaliana
gaggtgcattggtcggc

SEQ ID NO: 98152 - DNA, 17 bp, Arabidopsis thaliana
gaggtgcccttaaaatt

SEQ ID NO: 98153 - DNA, 17 bp, Arabidopsis thaliana
gaggtgcctctgggggt

SEQ ID NO: 98154 - DNA, 17 bp, Arabidopsis thaliana
gaggtgcctctggtggt

SEQ ID NO: 98155 - DNA, 17 bp, Arabidopsis thaliana
gaggtgccttatccccg

SEQ ID NO: 98156 - DNA, 17 bp, Arabidopsis thaliana
gaggtgccttgcagtcc

SEQ ID NO: 98157 - DNA, 17 bp, Arabidopsis thaliana
gaggtgccttgttgcgg

SEQ ID NO: 98158 - DNA, 17 bp, Arabidopsis thaliana
gaggtgcgacgctcggt

SEQ ID NO: 98159 - DNA, 17 bp, Arabidopsis thaliana
gaggtgcgacggcctaa

SEQ ID NO: 98160 - DNA, 17 bp, Arabidopsis thaliana
gaggtgcgcctggatca

SEQ ID NO: 98161 - DNA, 17 bp, Arabidopsis thaliana
gaggtgcggctcgatca

SEQ ID NO: 98162 - DNA, 17 bp, Arabidopsis thaliana
gaggtgcggctggatca

SEQ ID NO: 98163 - DNA, 17 bp, Arabidopsis thaliana
gaggtgctgggttcgaa

SEQ ID NO: 98164 - DNA, 17 bp, Arabidopsis thaliana
gaggtggagatcttggg

SEQ ID NO: 98165 - DNA, 17 bp, Arabidopsis thaliana
gaggtggaggtctctgc

SEQ ID NO: 98166 - DNA, 17 bp, Arabidopsis thaliana
gaggtggctaaggatcc

SEQ ID NO: 98167 - DNA, 17 bp, Arabidopsis thaliana
gaggtggttccacaggg

SEQ ID NO: 98168 - DNA, 17 bp, Arabidopsis thaliana
gaggtgtagcataagtg

SEQ ID NO: 98169 - DNA, 17 bp, Arabidopsis thaliana
gaggtgtaggataagtg

SEQ ID NO: 98170 - DNA, 17 bp, Arabidopsis thaliana
gaggtgtcaagctatga

SEQ ID NO: 98171 - DNA, 17 bp, Arabidopsis thaliana
gaggtgtcaagctgtga

SEQ ID NO: 98172 - DNA, 17 bp, Arabidopsis thaliana
gaggtgtcaagctgtgg

SEQ ID NO: 98173 - DNA, 17 bp, Arabidopsis thaliana
gaggtgtcaatgggtaa

SEQ ID NO: 98174 - DNA, 17 bp, Arabidopsis thaliana
gaggtgtcagaaaagtt

SEQ ID NO: 98175 - DNA, 17 bp, Arabidopsis thaliana
gaggtgtcagacgggcc

SEQ ID NO: 98176 - DNA, 17 bp, Arabidopsis thaliana
gaggtgtcagcagaaga

SEQ ID NO: 98177 - DNA, 17 bp, Arabidopsis thaliana
gaggtgtcatctctcgt

SEQ ID NO: 98178 - DNA, 17 bp, Arabidopsis thaliana
gaggtgtcattctatcg

SEQ ID NO: 98179 - DNA, 17 bp, Arabidopsis thaliana
gaggtgtcccgcgggtc

SEQ ID NO: 98180 - DNA, 17 bp, Arabidopsis thaliana
gaggtgtcgtatatcgt

SEQ ID NO: 98181 - DNA, 17 bp, Arabidopsis thaliana
gaggtgtcgtctatcgt

SEQ ID NO: 98182 - DNA, 17 bp, Arabidopsis thaliana
gaggtgtggatgagtaa

SEQ ID NO: 98183 - DNA, 17 bp, Arabidopsis thaliana
gaggttaaagcctgggc

SEQ ID NO: 98184 - DNA, 17 bp, Arabidopsis thaliana
gaggttaagccaatcat

SEQ ID NO: 98185 - DNA, 17 bp, Arabidopsis thaliana
gaggttaaggtgggtct

SEQ ID NO: 98186 - DNA, 17 bp, Arabidopsis thaliana
gaggttacaggtgctgc

SEQ ID NO: 98187 - DNA, 17 bp, Arabidopsis thaliana
gaggttatactttgggc

SEQ ID NO: 98188 - DNA, 17 bp, Arabidopsis thaliana
gaggttatcgtacttcc

SEQ ID NO: 98189 - DNA, 17 bp, Arabidopsis thaliana
gaggttcaggccctcct

SEQ ID NO: 98190 - DNA, 17 bp, Arabidopsis thaliana
gaggttccaaaaccatt

SEQ ID NO: 98191 - DNA, 17 bp, Arabidopsis thaliana
gaggttccaggatcagg

SEQ ID NO: 98192 - DNA, 17 bp, Arabidopsis thaliana
gaggttccattgtcttg

SEQ ID NO: 98193 - DNA, 17 bp, Arabidopsis thaliana
gaggttcccccctctct

SEQ ID NO: 98194 - DNA, 17 bp, Arabidopsis thaliana
gaggttccgacaggccg

SEQ ID NO: 98195 - DNA, 17 bp, Arabidopsis thaliana
gaggttccgacgccggc

SEQ ID NO: 98196 - DNA, 17 bp, Arabidopsis thaliana
gaggttccggttgatga

SEQ ID NO: 98197 - DNA, 17 bp, Arabidopsis thaliana
gaggttcctctctctct

SEQ ID NO: 98198 - DNA, 17 bp, Arabidopsis thaliana
gaggttcctctttggga

SEQ ID NO: 98199 - DNA, 17 bp, Arabidopsis thaliana
gaggttcctttaccacc

SEQ ID NO: 98200 - DNA, 17 bp, Arabidopsis thaliana
gaggttcgaatccttcc

SEQ ID NO: 98201 - DNA, 17 bp, Arabidopsis thaliana
gaggttcgacccctcct

SEQ ID NO: 98202 - DNA, 17 bp, Arabidopsis thaliana
gaggttcgacccctctc

SEQ ID NO: 98203 - DNA, 17 bp, Arabidopsis thaliana
gaggttcgagtcctcga

SEQ ID NO: 98204 - DNA, 17 bp, Arabidopsis thaliana
gaggttcgagtcctctt

SEQ ID NO: 98205 - DNA, 17 bp, Arabidopsis thaliana
gaggttcggtgccgaga

SEQ ID NO: 98206 - DNA, 17 bp, Arabidopsis thaliana
gaggttcgtcgtgttgt

SEQ ID NO: 98207 - DNA, 17 bp, Arabidopsis thaliana
gaggttcgtctatggcc

SEQ ID NO: 98208 - DNA, 17 bp, Arabidopsis thaliana
gaggttctaatccttcc

SEQ ID NO: 98209 - DNA, 17 bp, Arabidopsis thaliana
gaggttctaggccgaat

SEQ ID NO: 98210 - DNA, 17 bp, Arabidopsis thaliana
gaggttctatgccgatt

SEQ ID NO: 98211 - DNA, 17 bp, Arabidopsis thaliana
gaggttctcagatctgt

SEQ ID NO: 98212 - DNA, 17 bp, Arabidopsis thaliana
gaggttctctgtgtaaa

SEQ ID NO: 98213 - DNA, 17 bp, Arabidopsis thaliana
gaggttctgagccaaac

SEQ ID NO: 98214 - DNA, 17 bp, Arabidopsis thaliana
gaggttctgagccgaag

SEQ ID NO: 98215 - DNA, 17 bp, Arabidopsis thaliana
gaggttctgaggcgaag

SEQ ID NO: 98216 - DNA, 17 bp, Arabidopsis thaliana
gaggttctgcgctgaag

SEQ ID NO: 98217 - DNA, 17 bp, Arabidopsis thaliana
gaggttctggaccgaaa

SEQ ID NO: 98218 - DNA, 17 bp, Arabidopsis thaliana
gaggttctggaccgaat

SEQ ID NO: 98219 - DNA, 17 bp, Arabidopsis thaliana
gaggttctggccgaagc

SEQ ID NO: 98220 - DNA, 17 bp, Arabidopsis thaliana
gaggttctgggccgaaa

SEQ ID NO: 98221 - DNA, 17 bp, Arabidopsis thaliana
gaggttctgggccgaac

SEQ ID NO: 98222 - DNA, 17 bp, Arabidopsis thaliana
gaggttctgggccgaat

SEQ ID NO: 98223 - DNA, 17 bp, Arabidopsis thaliana
gaggttctgggctgaaa

SEQ ID NO: 98224 - DNA, 17 bp, Arabidopsis thaliana
gaggttctgtttgcgtg

SEQ ID NO: 98225 - DNA, 17 bp, Arabidopsis thaliana
gaggttgaaaacggttc

SEQ ID NO: 98226 - DNA, 17 bp, Arabidopsis thaliana
gaggttgacatgtaggt

SEQ ID NO: 98227 - DNA, 17 bp, Arabidopsis thaliana
gaggttgatacttgatc

SEQ ID NO: 98228 - DNA, 17 bp, Arabidopsis thaliana
gaggttgccacctacac

SEQ ID NO: 98229 - DNA, 17 bp, Arabidopsis thaliana
gaggttgccgagatttt

SEQ ID NO: 98230 - DNA, 17 bp, Arabidopsis thaliana
gaggttggaggaagaca

SEQ ID NO: 98231 - DNA, 17 bp, Arabidopsis thaliana
gaggttgtgaattcgca

SEQ ID NO: 98232 - DNA, 17 bp, Arabidopsis thaliana
gaggtttataggctgtt

SEQ ID NO: 98233 - DNA, 17 bp, Arabidopsis thaliana
gaggtttccacgatttc

SEQ ID NO: 98234 - DNA, 17 bp, Arabidopsis thaliana
gaggtttcgatggagct

SEQ ID NO: 98235 - DNA, 17 bp, Arabidopsis thaliana
gaggtttctcacgagaa

SEQ ID NO: 98236 - DNA, 17 bp, Arabidopsis thaliana
gaggtttctccggcgag

SEQ ID NO: 98237 - DNA, 17 bp, Arabidopsis thaliana
gaggtttgaaggctgat

SEQ ID NO: 98238 - DNA, 17 bp, Arabidopsis thaliana
gaggtttgacttgagca

SEQ ID NO: 98239 - DNA, 17 bp, Arabidopsis thaliana
gaggtttgcggttgcgg

SEQ ID NO: 98240 - DNA, 17 bp, Arabidopsis thaliana
gaggtttgcttttctgt

SEQ ID NO: 98241 - DNA, 17 bp, Arabidopsis thaliana
gaggtttggtcgagtga

SEQ ID NO: 98242 - DNA, 17 bp, Arabidopsis thaliana
gaggtttgttagtcaga

SEQ ID NO: 98243 - DNA, 17 bp, Arabidopsis thaliana
gaggttttcacggcggc

SEQ ID NO: 98244 - DNA, 17 bp, Arabidopsis thaliana
gaggttttccgattaat

SEQ ID NO: 98245 - DNA, 17 bp, Arabidopsis thaliana
gaggttttgaacgcaag

SEQ ID NO: 98246 - DNA, 17 bp, Arabidopsis thaliana
gaggttttggaccgaag

SEQ ID NO: 98247 - DNA, 17 bp, Arabidopsis thaliana
gaggttttgggccgaaa

SEQ ID NO: 98248 - DNA, 17 bp, Arabidopsis thaliana
gaggttttgggccgaga

SEQ ID NO: 98249 - DNA, 17 bp, Arabidopsis thaliana
gaggttttgtatgttgg

SEQ ID NO: 98250 - DNA, 17 bp, Arabidopsis thaliana
gaggttttgtgaacggg

SEQ ID NO: 98251 - DNA, 17 bp, Arabidopsis thaliana
gaggttttgtggacgga

SEQ ID NO: 98252 - DNA, 17 bp, Arabidopsis thaliana
gagtaaccggtggcgtt

SEQ ID NO: 98253 - DNA, 17 bp, Arabidopsis thaliana
gagtaacggacgttaga

SEQ ID NO: 98254 - DNA, 17 bp, Arabidopsis thaliana
gagtaactatgaatcat

SEQ ID NO: 98255 - DNA, 17 bp, Arabidopsis thaliana
gagtaactatgaatctt

SEQ ID NO: 98256 - DNA, 17 bp, Arabidopsis thaliana
gagtaactatgactctc

SEQ ID NO: 98257 - DNA, 17 bp, Arabidopsis thaliana
gagtaatcgtgtgtcgg

SEQ ID NO: 98258 - DNA, 17 bp, Arabidopsis thaliana
gagtaatctgcactatc

SEQ ID NO: 98259 - DNA, 17 bp, Arabidopsis thaliana
gagtaatctggatcccg

SEQ ID NO: 98260 - DNA, 17 bp, Arabidopsis thaliana
gagtacaactcagcctt

SEQ ID NO: 98261 - DNA, 17 bp, Arabidopsis thaliana
gagtacacgccaagcga

SEQ ID NO: 98262 - DNA, 17 bp, Arabidopsis thaliana
gagtaccaggtcgagta

SEQ ID NO: 98263 - DNA, 17 bp, Arabidopsis thaliana
gagtacccacgcgagag

SEQ ID NO: 98264 - DNA, 17 bp, Arabidopsis thaliana
gagtacccgcactacgt

SEQ ID NO: 98265 - DNA, 17 bp, Arabidopsis thaliana
gagtacctgtgatttcg

SEQ ID NO: 98266 - DNA, 17 bp, Arabidopsis thaliana
gagtacgtcttgcgtct

SEQ ID NO: 98267 - DNA, 17 bp, Arabidopsis thaliana
gagtactcgattgcggc

SEQ ID NO: 98268 - DNA, 17 bp, Arabidopsis thaliana
gagtactctctccatct

SEQ ID NO: 98269 - DNA, 17 bp, Arabidopsis thaliana
gagtactgagaatgtta

SEQ ID NO: 98270 - DNA, 17 bp, Arabidopsis thaliana
gagtactttggctactt

SEQ ID NO: 98271 - DNA, 17 bp, Arabidopsis thaliana
gagtagaaaatattacc

SEQ ID NO: 98272 - DNA, 17 bp, Arabidopsis thaliana
gagtagcagatcacagg

SEQ ID NO: 98273 - DNA, 17 bp, Arabidopsis thaliana
gagtagccgacctctgc

SEQ ID NO: 98274 - DNA, 17 bp, Arabidopsis thaliana
gagtagcggcttgatta

SEQ ID NO: 98275 - DNA, 17 bp, Arabidopsis thaliana
gagtaggaataatgtca

SEQ ID NO: 98276 - DNA, 17 bp, Arabidopsis thaliana
gagtaggactagatggt

SEQ ID NO: 98277 - DNA, 17 bp, Arabidopsis thaliana
gagtagtcctgatctgt

SEQ ID NO: 98278 - DNA, 17 bp, Arabidopsis thaliana
gagtagtcgtgtgtcgg

SEQ ID NO: 98279 - DNA, 17 bp, Arabidopsis thaliana
gagtagtctcgtaacaa

SEQ ID NO: 98280 - DNA, 17 bp, Arabidopsis thaliana
gagtagttagaccgcca

SEQ ID NO: 98281 - DNA, 17 bp, Arabidopsis thaliana
gagtagttcgttggatg

SEQ ID NO: 98282 - DNA, 17 bp, Arabidopsis thaliana
gagtagttgattccggc

SEQ ID NO: 98283 - DNA, 17 bp, Arabidopsis thaliana
gagtatcaggtcgagta

SEQ ID NO: 98284 - DNA, 17 bp, Arabidopsis thaliana
gagtatcaggtgacgtg

SEQ ID NO: 98285 - DNA, 17 bp, Arabidopsis thaliana
gagtatcatgtgacttg

SEQ ID NO: 98286 - DNA, 17 bp, Arabidopsis thaliana
gagtatcctcagagcgg

SEQ ID NO: 98287 - DNA, 17 bp, Arabidopsis thaliana
gagtatcgattatcccg

SEQ ID NO: 98288 - DNA, 17 bp, Arabidopsis thaliana
gagtatcggcagaacca

SEQ ID NO: 98289 - DNA, 17 bp, Arabidopsis thaliana
gagtatctatggcttat

SEQ ID NO: 98290 - DNA, 17 bp, Arabidopsis thaliana
gagtatcttgttaacag

SEQ ID NO: 98291 - DNA, 17 bp, Arabidopsis thaliana
gagtatgacgagtggtg

SEQ ID NO: 98292 - DNA, 17 bp, Arabidopsis thaliana
gagtatggatatacgga

SEQ ID NO: 98293 - DNA, 17 bp, Arabidopsis thaliana
gagtatggccccggagt

SEQ ID NO: 98294 - DNA, 17 bp, Arabidopsis thaliana
gagtatggtcgcaaggc

SEQ ID NO: 98295 - DNA, 17 bp, Arabidopsis thaliana
gagtatggttccattct

SEQ ID NO: 98296 - DNA, 17 bp, Arabidopsis thaliana
gagtattaacgcgggcc

SEQ ID NO: 98297 - DNA, 17 bp, Arabidopsis thaliana
gagtattaccatgcgga

SEQ ID NO: 98298 - DNA, 17 bp, Arabidopsis thaliana
gagtattcagtccgatt

SEQ ID NO: 98299 - DNA, 17 bp, Arabidopsis thaliana
gagtattcgcccaaacc

SEQ ID NO: 98300 - DNA, 17 bp, Arabidopsis thaliana
gagtcaaactacgatgg

SEQ ID NO: 98301 - DNA, 17 bp, Arabidopsis thaliana
gagtcaaaggtttgtgg

SEQ ID NO: 98302 - DNA, 17 bp, Arabidopsis thaliana
gagtcaaccttgctttg

SEQ ID NO: 98303 - DNA, 17 bp, Arabidopsis thaliana
gagtcaagttgacgggg

SEQ ID NO: 98304 - DNA, 17 bp, Arabidopsis thaliana
gagtcaagttttcctta

SEQ ID NO: 98305 - DNA, 17 bp, Arabidopsis thaliana
gagtcacagtctcgtct

SEQ ID NO: 98306 - DNA, 17 bp, Arabidopsis thaliana
gagtcacatgtgtgcga

SEQ ID NO: 98307 - DNA, 17 bp, Arabidopsis thaliana
gagtcacgcgatggaga

SEQ ID NO: 98308 - DNA, 17 bp, Arabidopsis thaliana
gagtcacgtctaaactt

SEQ ID NO: 98309 - DNA, 17 bp, Arabidopsis thaliana
gagtcacgttgaaaggg

SEQ ID NO: 98310 - DNA, 17 bp, Arabidopsis thaliana
gagtcagagtcgaaaag

SEQ ID NO: 98311 - DNA, 17 bp, Arabidopsis thaliana
gagtcagatttgagtag

SEQ ID NO: 98312 - DNA, 17 bp, Arabidopsis thaliana
gagtcagccgttgattc

SEQ ID NO: 98313 - DNA, 17 bp, Arabidopsis thaliana
gagtcagcgtgtgagag

SEQ ID NO: 98314 - DNA, 17 bp, Arabidopsis thaliana
gagtcatcaacttttgg

SEQ ID NO: 98315 - DNA, 17 bp, Arabidopsis thaliana
gagtcatcagctcgcgt

SEQ ID NO: 98316 - DNA, 17 bp, Arabidopsis thaliana
gagtcatcctgcagctt

SEQ ID NO: 98317 - DNA, 17 bp, Arabidopsis thaliana
gagtcatcgacttccct

SEQ ID NO: 98318 - DNA, 17 bp, Arabidopsis thaliana
gagtcatcggaagtgta

SEQ ID NO: 98319 - DNA, 17 bp, Arabidopsis thaliana
gagtcattcaggaaccg

SEQ ID NO: 98320 - DNA, 17 bp, Arabidopsis thaliana
gagtcattctggcagct

SEQ ID NO: 98321 - DNA, 17 bp, Arabidopsis thaliana
gagtcattcttcagggg

SEQ ID NO: 98322 - DNA, 17 bp, Arabidopsis thaliana
gagtccaacttgcatag

SEQ ID NO: 98323 - DNA, 17 bp, Arabidopsis thaliana
gagtccaagcaaggaag

SEQ ID NO: 98324 - DNA, 17 bp, Arabidopsis thaliana
gagtccacatttggcta

SEQ ID NO: 98325 - DNA, 17 bp, Arabidopsis thaliana
gagtccagcgttggggg

SEQ ID NO: 98326 - DNA, 17 bp, Arabidopsis thaliana
gagtccaggacgaattg

SEQ ID NO: 98327 - DNA, 17 bp, Arabidopsis thaliana
gagtccaggtcttcagg

SEQ ID NO: 98328 - DNA, 17 bp, Arabidopsis thaliana
gagtccatgctacaagc

SEQ ID NO: 98329 - DNA, 17 bp, Arabidopsis thaliana
gagtcccaaggtgtggt

SEQ ID NO: 98330 - DNA, 17 bp, Arabidopsis thaliana
gagtcccaccgggtgtg

SEQ ID NO: 98331 - DNA, 17 bp, Arabidopsis thaliana
gagtcccaccgtggtcg

SEQ ID NO: 98332 - DNA, 17 bp, Arabidopsis thaliana
gagtcccactgggtgtg

SEQ ID NO: 98333 - DNA, 17 bp, Arabidopsis thaliana
gagtcccagggatgatt

SEQ ID NO: 98334 - DNA, 17 bp, Arabidopsis thaliana
gagtcccctgttactcg

SEQ ID NO: 98335 - DNA, 17 bp, Arabidopsis thaliana
gagtcccgccaatccgt

SEQ ID NO: 98336 - DNA, 17 bp, Arabidopsis thaliana
gagtcccgctcaaggaa

SEQ ID NO: 98337 - DNA, 17 bp, Arabidopsis thaliana
gagtcccgggcaaccca

SEQ ID NO: 98338 - DNA, 17 bp, Arabidopsis thaliana
gagtcccgtcgtgcccg

SEQ ID NO: 98339 - DNA, 17 bp, Arabidopsis thaliana
gagtccgaatcacacat

SEQ ID NO: 98340 - DNA, 17 bp, Arabidopsis thaliana
gagtccgcatcagttta

SEQ ID NO: 98341 - DNA, 17 bp, Arabidopsis thaliana
gagtccgctgccgtatg

SEQ ID NO: 98342 - DNA, 17 bp, Arabidopsis thaliana
gagtccggagacgtcga

SEQ ID NO: 98343 - DNA, 17 bp, Arabidopsis thaliana
gagtccggagacgtcgg

SEQ ID NO: 98344 - DNA, 17 bp, Arabidopsis thaliana
gagtccggagacgtcgt

SEQ ID NO: 98345 - DNA, 17 bp, Arabidopsis thaliana
gagtccggcgtaggagg

SEQ ID NO: 98346 - DNA, 17 bp, Arabidopsis thaliana
gagtccgttcaccagtt

SEQ ID NO: 98347 - DNA, 17 bp, Arabidopsis thaliana
gagtcctaacccgcccc

SEQ ID NO: 98348 - DNA, 17 bp, Arabidopsis thaliana
gagtcctacatcgtatc

SEQ ID NO: 98349 - DNA, 17 bp, Arabidopsis thaliana
gagtcctatttgctgcg

SEQ ID NO: 98350 - DNA, 17 bp, Arabidopsis thaliana
gagtcctcttcaaggca

SEQ ID NO: 98351 - DNA, 17 bp, Arabidopsis thaliana
gagtcctcttctgccaa

SEQ ID NO: 98352 - DNA, 17 bp, Arabidopsis thaliana
gagtcctgaactagctg

SEQ ID NO: 98353 - DNA, 17 bp, Arabidopsis thaliana
gagtcctgctaaactcg

SEQ ID NO: 98354 - DNA, 17 bp, Arabidopsis thaliana
gagtcctggtccactag

SEQ ID NO: 98355 - DNA, 17 bp, Arabidopsis thaliana
gagtccttctgctttgg

SEQ ID NO: 98356 - DNA, 17 bp, Arabidopsis thaliana
gagtcgcagaccgctct

SEQ ID NO: 98357 - DNA, 17 bp, Arabidopsis thaliana
gagtcgcatcctgtaga

SEQ ID NO: 98358 - DNA, 17 bp, Arabidopsis thaliana
gagtcgcatcctgtgga

SEQ ID NO: 98359 - DNA, 17 bp, Arabidopsis thaliana
gagtcgccacctgctgt

SEQ ID NO: 98360 - DNA, 17 bp, Arabidopsis thaliana
gagtcgcgatgaaggct

SEQ ID NO: 98361 - DNA, 17 bp, Arabidopsis thaliana
gagtcgcgcctgtagat

SEQ ID NO: 98362 - DNA, 17 bp, Arabidopsis thaliana
gagtcgcggtttaagtt

SEQ ID NO: 98363 - DNA, 17 bp, Arabidopsis thaliana
gagtcgcttccagacct

SEQ ID NO: 98364 - DNA, 17 bp, Arabidopsis thaliana
gagtcggaaggaattgt

SEQ ID NO: 98365 - DNA, 17 bp, Arabidopsis thaliana
gagtcggacctatttgc

SEQ ID NO: 98366 - DNA, 17 bp, Arabidopsis thaliana
gagtcgggtctccttat

SEQ ID NO: 98367 - DNA, 17 bp, Arabidopsis thaliana
gagtcgtccgagatgat

SEQ ID NO: 98368 - DNA, 17 bp, Arabidopsis thaliana
gagtcgtcgcatttttg

SEQ ID NO: 98369 - DNA, 17 bp, Arabidopsis thaliana
gagtcgtgcaacttctg

SEQ ID NO: 98370 - DNA, 17 bp, Arabidopsis thaliana
gagtcgtgcagcttctg

SEQ ID NO: 98371 - DNA, 17 bp, Arabidopsis thaliana
gagtcgtggatgactgc

SEQ ID NO: 98372 - DNA, 17 bp, Arabidopsis thaliana
gagtcgttgcggcgatg

SEQ ID NO: 98373 - DNA, 17 bp, Arabidopsis thaliana
gagtcgtttcaggtgca

SEQ ID NO: 98374 - DNA, 17 bp, Arabidopsis thaliana
gagtcgtttgcatgtcg

SEQ ID NO: 98375 - DNA, 17 bp, Arabidopsis thaliana
gagtctaaatcatcgag

SEQ ID NO: 98376 - DNA, 17 bp, Arabidopsis thaliana
gagtctacaggcaccgt

SEQ ID NO: 98377 - DNA, 17 bp, Arabidopsis thaliana
gagtctacaggcactgt

SEQ ID NO: 98378 - DNA, 17 bp, Arabidopsis thaliana
gagtctaccttcgacct

SEQ ID NO: 98379 - DNA, 17 bp, Arabidopsis thaliana
gagtctactatgcagac

SEQ ID NO: 98380 - DNA, 17 bp, Arabidopsis thaliana
gagtctagacatctctt

SEQ ID NO: 98381 - DNA, 17 bp, Arabidopsis thaliana
gagtctcaaagtgtggt

SEQ ID NO: 98382 - DNA, 17 bp, Arabidopsis thaliana
gagtctcaatctgtctc

SEQ ID NO: 98383 - DNA, 17 bp, Arabidopsis thaliana
gagtctcactctaccat

SEQ ID NO: 98384 - DNA, 17 bp, Arabidopsis thaliana
gagtctcattggtaacc

SEQ ID NO: 98385 - DNA, 17 bp, Arabidopsis thaliana
gagtctccacagggttt

SEQ ID NO: 98386 - DNA, 17 bp, Arabidopsis thaliana
gagtctcgaagcgtgtg

SEQ ID NO: 98387 - DNA, 17 bp, Arabidopsis thaliana
gagtctcgtaacagggg

SEQ ID NO: 98388 - DNA, 17 bp, Arabidopsis thaliana
gagtctctcccctgcga

SEQ ID NO: 98389 - DNA, 17 bp, Arabidopsis thaliana
gagtctctgtaggtggt

SEQ ID NO: 98390 - DNA, 17 bp, Arabidopsis thaliana
gagtctgacatgtgtgc

SEQ ID NO: 98391 - DNA, 17 bp, Arabidopsis thaliana
gagtctgagaaacgcat

SEQ ID NO: 98392 - DNA, 17 bp, Arabidopsis thaliana
gagtctgatgatctact

SEQ ID NO: 98393 - DNA, 17 bp, Arabidopsis thaliana
gagtctgattaagtgac

SEQ ID NO: 98394 - DNA, 17 bp, Arabidopsis thaliana
gagtctgatttgactgc

SEQ ID NO: 98395 - DNA, 17 bp, Arabidopsis thaliana
gagtctgggcagtccgt

SEQ ID NO: 98396 - DNA, 17 bp, Arabidopsis thaliana
gagtctgtcagttgggt

SEQ ID NO: 98397 - DNA, 17 bp, Arabidopsis thaliana
gagtctgtggagactgt

SEQ ID NO: 98398 - DNA, 17 bp, Arabidopsis thaliana
gagtcttaggccctgtt

SEQ ID NO: 98399 - DNA, 17 bp, Arabidopsis thaliana
gagtcttcgaattgtga

SEQ ID NO: 98400 - DNA, 17 bp, Arabidopsis thaliana
gagtcttgaccaacgga

SEQ ID NO: 98401 - DNA, 17 bp, Arabidopsis thaliana
gagtcttgagcgtctgg

SEQ ID NO: 98402 - DNA, 17 bp, Arabidopsis thaliana
gagtcttgcagttctgg

SEQ ID NO: 98403 - DNA, 17 bp, Arabidopsis thaliana
gagtcttgtgcagaagt

SEQ ID NO: 98404 - DNA, 17 bp, Arabidopsis thaliana
gagtctttacgttttga

SEQ ID NO: 98405 - DNA, 17 bp, Arabidopsis thaliana
gagtctttcgctttgtg

SEQ ID NO: 98406 - DNA, 17 bp, Arabidopsis thaliana
gagtctttcttcgacgg

SEQ ID NO: 98407 - DNA, 17 bp, Arabidopsis thaliana
gagtctttgaacgcaag

SEQ ID NO: 98408 - DNA, 17 bp, Arabidopsis thaliana
gagtctttggcttggtg

SEQ ID NO: 98409 - DNA, 17 bp, Arabidopsis thaliana
gagtctttggctttgtg

SEQ ID NO: 98410 - DNA, 17 bp, Arabidopsis thaliana
gagtctttggctttgtt

SEQ ID NO: 98411 - DNA, 17 bp, Arabidopsis thaliana
gagtctttgggtttgtg

SEQ ID NO: 98412 - DNA, 17 bp, Arabidopsis thaliana
gagtcttttccagcggg

SEQ ID NO: 98413 - DNA, 17 bp, Arabidopsis thaliana
gagtgaaacttggaact

SEQ ID NO: 98414 - DNA, 17 bp, Arabidopsis thaliana
gagtgaaagatgtgtgg

SEQ ID NO: 98415 - DNA, 17 bp, Arabidopsis thaliana
gagtgaaatgcgagtgg

SEQ ID NO: 98416 - DNA, 17 bp, Arabidopsis thaliana
gagtgaacaaccggaaa

SEQ ID NO: 98417 - DNA, 17 bp, Arabidopsis thaliana
gagtgaaccaggccaat

SEQ ID NO: 98418 - DNA, 17 bp, Arabidopsis thaliana
gagtgaacgacctgtgt

SEQ ID NO: 98419 - DNA, 17 bp, Arabidopsis thaliana
gagtgaactgtgagggg

SEQ ID NO: 98420 - DNA, 17 bp, Arabidopsis thaliana
gagtgaatatgccttac

SEQ ID NO: 98421 - DNA, 17 bp, Arabidopsis thaliana
gagtgaattttgagatt

SEQ ID NO: 98422 - DNA, 17 bp, Arabidopsis thaliana
gagtgacaggtcgagtg

SEQ ID NO: 98423 - DNA, 17 bp, Arabidopsis thaliana
gagtgaccatagttagc

SEQ ID NO: 98424 - DNA, 17 bp, Arabidopsis thaliana
gagtgaccgacctctgt

SEQ ID NO: 98425 - DNA, 17 bp, Arabidopsis thaliana
gagtgaccgatttctct

SEQ ID NO: 98426 - DNA, 17 bp, Arabidopsis thaliana
gagtgacgaaaataccc

SEQ ID NO: 98427 - DNA, 17 bp, Arabidopsis thaliana
gagtgacgcttgggacg

SEQ ID NO: 98428 - DNA, 17 bp, Arabidopsis thaliana
gagtgactggtcgagtg

SEQ ID NO: 98429 - DNA, 17 bp, Arabidopsis thaliana
gagtgactgttggcggg

SEQ ID NO: 98430 - DNA, 17 bp, Arabidopsis thaliana
gagtgactttggagcca

SEQ ID NO: 98431 - DNA, 17 bp, Arabidopsis thaliana
gagtgagaagcggctgg

SEQ ID NO: 98432 - DNA, 17 bp, Arabidopsis thaliana
gagtgagacacgcgata

SEQ ID NO: 98433 - DNA, 17 bp, Arabidopsis thaliana
gagtgagacctacctca

SEQ ID NO: 98434 - DNA, 17 bp, Arabidopsis thaliana
gagtgagattggtgctc

SEQ ID NO: 98435 - DNA, 17 bp, Arabidopsis thaliana
gagtgagcaggttgaac

SEQ ID NO: 98436 - DNA, 17 bp, Arabidopsis thaliana
gagtgagccataactgt

SEQ ID NO: 98437 - DNA, 17 bp, Arabidopsis thaliana
gagtgagccgactgtct

SEQ ID NO: 98438 - DNA, 17 bp, Arabidopsis thaliana
gagtgagctccttggcg

SEQ ID NO: 98439 - DNA, 17 bp, Arabidopsis thaliana
gagtgagtacgaccggg

SEQ ID NO: 98440 - DNA, 17 bp, Arabidopsis thaliana
gagtgagtagcggcttg

SEQ ID NO: 98441 - DNA, 17 bp, Arabidopsis thaliana
gagtgataccgcagcgg

SEQ ID NO: 98442 - DNA, 17 bp, Arabidopsis thaliana
gagtgatacttctgata

SEQ ID NO: 98443 - DNA, 17 bp, Arabidopsis thaliana
gagtgatcatctcttgt

SEQ ID NO: 98444 - DNA, 17 bp, Arabidopsis thaliana
gagtgatccatctacag

SEQ ID NO: 98445 - DNA, 17 bp, Arabidopsis thaliana
gagtgatccgcgctttg

SEQ ID NO: 98446 - DNA, 17 bp, Arabidopsis thaliana
gagtgatcctgaggtcg

SEQ ID NO: 98447 - DNA, 17 bp, Arabidopsis thaliana
gagtgatccttgtggaa

SEQ ID NO: 98448 - DNA, 17 bp, Arabidopsis thaliana
gagtgatcgctggacct

SEQ ID NO: 98449 - DNA, 17 bp, Arabidopsis thaliana
gagtgatgatgatcgat

SEQ ID NO: 98450 - DNA, 17 bp, Arabidopsis thaliana
gagtgatgctagtgact

SEQ ID NO: 98451 - DNA, 17 bp, Arabidopsis thaliana
gagtgatgcttctcgac

SEQ ID NO: 98452 - DNA, 17 bp, Arabidopsis thaliana
gagtgatgggtgccgca

SEQ ID NO: 98453 - DNA, 17 bp, Arabidopsis thaliana
gagtgatgttcgggacg

SEQ ID NO: 98454 - DNA, 17 bp, Arabidopsis thaliana
gagtgatgtttcggacg

SEQ ID NO: 98455 - DNA, 17 bp, Arabidopsis thaliana
gagtgatttcccgtcag

SEQ ID NO: 98456 - DNA, 17 bp, Arabidopsis thaliana
gagtgccaacttacaga

SEQ ID NO: 98457 - DNA, 17 bp, Arabidopsis thaliana
gagtgccgctcacgccc

SEQ ID NO: 98458 - DNA, 17 bp, Arabidopsis thaliana
gagtgccgctcacgccg

SEQ ID NO: 98459 - DNA, 17 bp, Arabidopsis thaliana
gagtgccggttgggtct

SEQ ID NO: 98460 - DNA, 17 bp, Arabidopsis thaliana
gagtgcctgccagtctg

SEQ ID NO: 98461 - DNA, 17 bp, Arabidopsis thaliana
gagtgcctgtcgggacc

SEQ ID NO: 98462 - DNA, 17 bp, Arabidopsis thaliana
gagtgcgattttggtca

SEQ ID NO: 98463 - DNA, 17 bp, Arabidopsis thaliana
gagtgcggatttgagta

SEQ ID NO: 98464 - DNA, 17 bp, Arabidopsis thaliana
gagtgcgggtagaatcc

SEQ ID NO: 98465 - DNA, 17 bp, Arabidopsis thaliana
gagtgcggtttatgtca

SEQ ID NO: 98466 - DNA, 17 bp, Arabidopsis thaliana
gagtgcggttttggtca

SEQ ID NO: 98467 - DNA, 17 bp, Arabidopsis thaliana
gagtgcggttttgttta

SEQ ID NO: 98468 - DNA, 17 bp, Arabidopsis thaliana
gagtgctaccactgcag

SEQ ID NO: 98469 - DNA, 17 bp, Arabidopsis thaliana
gagtgctacgcgtctct

SEQ ID NO: 98470 - DNA, 17 bp, Arabidopsis thaliana
gagtgctcaaagcaagc

SEQ ID NO: 98471 - DNA, 17 bp, Arabidopsis thaliana
gagtgctgattgctgga

SEQ ID NO: 98472 - DNA, 17 bp, Arabidopsis thaliana
gagtgctgggattttct

SEQ ID NO: 98473 - DNA, 17 bp, Arabidopsis thaliana
gagtgcttgaaattgtc

SEQ ID NO: 98474 - DNA, 17 bp, Arabidopsis thaliana
gagtgctttattgtttc

SEQ ID NO: 98475 - DNA, 17 bp, Arabidopsis thaliana
gagtggacaaaagatgg

SEQ ID NO: 98476 - DNA, 17 bp, Arabidopsis thaliana
gagtggagcctgcggct

SEQ ID NO: 98477 - DNA, 17 bp, Arabidopsis thaliana
gagtggagcctgcgggt

SEQ ID NO: 98478 - DNA, 17 bp, Arabidopsis thaliana
gagtggagttgagttga

SEQ ID NO: 98479 - DNA, 17 bp, Arabidopsis thaliana
gagtggatcctgcgggt

SEQ ID NO: 98480 - DNA, 17 bp, Arabidopsis thaliana
gagtggcacagcggaag

SEQ ID NO: 98481 - DNA, 17 bp, Arabidopsis thaliana
gagtggccacgaccaag

SEQ ID NO: 98482 - DNA, 17 bp, Arabidopsis thaliana
gagtggcctgagctgcg

SEQ ID NO: 98483 - DNA, 17 bp, Arabidopsis thaliana
gagtggcgcagcggaag

SEQ ID NO: 98484 - DNA, 17 bp, Arabidopsis thaliana
gagtggcgggtgtttaa

SEQ ID NO: 98485 - DNA, 17 bp, Arabidopsis thaliana
gagtggggaatataaca

SEQ ID NO: 98486 - DNA, 17 bp, Arabidopsis thaliana
gagtggtgacttaggtt

SEQ ID NO: 98487 - DNA, 17 bp, Arabidopsis thaliana
gagtggtgctctaatcc

SEQ ID NO: 98488 - DNA, 17 bp, Arabidopsis thaliana
gagtggttttggccagt

SEQ ID NO: 98489 - DNA, 17 bp, Arabidopsis thaliana
gagtgtactctgacacc

SEQ ID NO: 98490 - DNA, 17 bp, Arabidopsis thaliana
gagtgtagactcaggtt

SEQ ID NO: 98491 - DNA, 17 bp, Arabidopsis thaliana
gagtgtagctcggacgt

SEQ ID NO: 98492 - DNA, 17 bp, Arabidopsis thaliana
gagtgtatcttatctgc

SEQ ID NO: 98493 - DNA, 17 bp, Arabidopsis thaliana
gagtgtcacaagcctct

SEQ ID NO: 98494 - DNA, 17 bp, Arabidopsis thaliana
gagtgtcaccatcaacc

SEQ ID NO: 98495 - DNA, 17 bp, Arabidopsis thaliana
gagtgtcaggacaggtt

SEQ ID NO: 98496 - DNA, 17 bp, Arabidopsis thaliana
gagtgtccgatcacttg

SEQ ID NO: 98497 - DNA, 17 bp, Arabidopsis thaliana
gagtgtccggtcgagtg

SEQ ID NO: 98498 - DNA, 17 bp, Arabidopsis thaliana
gagtgtccgtcgattat

SEQ ID NO: 98499 - DNA, 17 bp, Arabidopsis thaliana
gagtgtctaggcgtcgc

SEQ ID NO: 98500 - DNA, 17 bp, Arabidopsis thaliana
gagtgtgacgcttcgta

SEQ ID NO: 98501 - DNA, 17 bp, Arabidopsis thaliana
gagtgtgactgccagga

SEQ ID NO: 98502 - DNA, 17 bp, Arabidopsis thaliana
gagtgtgagcatgcctg

SEQ ID NO: 98503 - DNA, 17 bp, Arabidopsis thaliana
gagtgtgattgaccttt

SEQ ID NO: 98504 - DNA, 17 bp, Arabidopsis thaliana
gagtgtggaccacgcgc

SEQ ID NO: 98505 - DNA, 17 bp, Arabidopsis thaliana
gagtgtgggcttcaatt

SEQ ID NO: 98506 - DNA, 17 bp, Arabidopsis thaliana
gagtgtgttcttgtgat

SEQ ID NO: 98507 - DNA, 17 bp, Arabidopsis thaliana
gagtgttaacgatgagt

SEQ ID NO: 98508 - DNA, 17 bp, Arabidopsis thaliana
gagtgttaaggccttgg

SEQ ID NO: 98509 - DNA, 17 bp, Arabidopsis thaliana
gagtgttccctgggatt

SEQ ID NO: 98510 - DNA, 17 bp, Arabidopsis thaliana
gagtgttctgacgtggg

SEQ ID NO: 98511 - DNA, 17 bp, Arabidopsis thaliana
gagtgttcttgtgaatg

SEQ ID NO: 98512 - DNA, 17 bp, Arabidopsis thaliana
gagtgttgaggccttgg

SEQ ID NO: 98513 - DNA, 17 bp, Arabidopsis thaliana
gagtgttgcagttgtgt

SEQ ID NO: 98514 - DNA, 17 bp, Arabidopsis thaliana
gagtgttgtctggctcg

SEQ ID NO: 98515 - DNA, 17 bp, Arabidopsis thaliana
gagtgttgttctcttgg

SEQ ID NO: 98516 - DNA, 17 bp, Arabidopsis thaliana
gagtgtttggaagactc

SEQ ID NO: 98517 - DNA, 17 bp, Arabidopsis thaliana
gagtgtttggtgatgag

SEQ ID NO: 98518 - DNA, 17 bp, Arabidopsis thaliana
gagttacaaatttgtgg

SEQ ID NO: 98519 - DNA, 17 bp, Arabidopsis thaliana
gagttacaacttttttt

SEQ ID NO: 98520 - DNA, 17 bp, Arabidopsis thaliana
gagttacatttgtttca

SEQ ID NO: 98521 - DNA, 17 bp, Arabidopsis thaliana
gagttaccacagttaaa

SEQ ID NO: 98522 - DNA, 17 bp, Arabidopsis thaliana
gagttacccattttgac

SEQ ID NO: 98523 - DNA, 17 bp, Arabidopsis thaliana
gagttacgacattacac

SEQ ID NO: 98524 - DNA, 17 bp, Arabidopsis thaliana
gagttacggtatgttgc

SEQ ID NO: 98525 - DNA, 17 bp, Arabidopsis thaliana
gagttagatttatgtta

SEQ ID NO: 98526 - DNA, 17 bp, Arabidopsis thaliana
gagttagcaaactatgc

SEQ ID NO: 98527 - DNA, 17 bp, Arabidopsis thaliana
gagttagcgttgagccg

SEQ ID NO: 98528 - DNA, 17 bp, Arabidopsis thaliana
gagttagctcgtgtcca

SEQ ID NO: 98529 - DNA, 17 bp, Arabidopsis thaliana
gagttagcttccgatat

SEQ ID NO: 98530 - DNA, 17 bp, Arabidopsis thaliana
gagttagtctaacgtta

SEQ ID NO: 98531 - DNA, 17 bp, Arabidopsis thaliana
gagttagtgatcgaagg

SEQ ID NO: 98532 - DNA, 17 bp, Arabidopsis thaliana
gagttagtggtaggacg

SEQ ID NO: 98533 - DNA, 17 bp, Arabidopsis thaliana
gagttatcgactgccac

SEQ ID NO: 98534 - DNA, 17 bp, Arabidopsis thaliana
gagttatctccatgatc

SEQ ID NO: 98535 - DNA, 17 bp, Arabidopsis thaliana
gagttatctcgctctgg

SEQ ID NO: 98536 - DNA, 17 bp, Arabidopsis thaliana
gagttatcttaatgatc

SEQ ID NO: 98537 - DNA, 17 bp, Arabidopsis thaliana
gagttatcttagtgatc

SEQ ID NO: 98538 - DNA, 17 bp, Arabidopsis thaliana
gagttattaggccatct

SEQ ID NO: 98539 - DNA, 17 bp, Arabidopsis thaliana
gagttattcgcagtttc

SEQ ID NO: 98540 - DNA, 17 bp, Arabidopsis thaliana
gagttattgggcttgct

SEQ ID NO: 98541 - DNA, 17 bp, Arabidopsis thaliana
gagttattgggtcaatt

SEQ ID NO: 98542 - DNA, 17 bp, Arabidopsis thaliana
gagttattgttttttga

SEQ ID NO: 98543 - DNA, 17 bp, Arabidopsis thaliana
gagttatttacaatggt

SEQ ID NO: 98544 - DNA, 17 bp, Arabidopsis thaliana
gagttcaaatccgagtg

SEQ ID NO: 98545 - DNA, 17 bp, Arabidopsis thaliana
gagttcaaatccgggtg

SEQ ID NO: 98546 - DNA, 17 bp, Arabidopsis thaliana
gagttcaagtctcggtg

SEQ ID NO: 98547 - DNA, 17 bp, Arabidopsis thaliana
gagttcacaccttggcc

SEQ ID NO: 98548 - DNA, 17 bp, Arabidopsis thaliana
gagttcacagttaattt

SEQ ID NO: 98549 - DNA, 17 bp, Arabidopsis thaliana
gagttcaccatcaaatg

SEQ ID NO: 98550 - DNA, 17 bp, Arabidopsis thaliana
gagttcacccctatttg

SEQ ID NO: 98551 - DNA, 17 bp, Arabidopsis thaliana
gagttcacgcctagggt

SEQ ID NO: 98552 - DNA, 17 bp, Arabidopsis thaliana
gagttcacggctaaccg

SEQ ID NO: 98553 - DNA, 17 bp, Arabidopsis thaliana
gagttcacggttaattt

SEQ ID NO: 98554 - DNA, 17 bp, Arabidopsis thaliana
gagttcacggttacttt

SEQ ID NO: 98555 - DNA, 17 bp, Arabidopsis thaliana
gagttcactgtcttgcc

SEQ ID NO: 98556 - DNA, 17 bp, Arabidopsis thaliana
gagttcactttccgtta

SEQ ID NO: 98557 - DNA, 17 bp, Arabidopsis thaliana
gagttcagccctatttg

SEQ ID NO: 98558 - DNA, 17 bp, Arabidopsis thaliana
gagttcagtctcgtacc

SEQ ID NO: 98559 - DNA, 17 bp, Arabidopsis thaliana
gagttcagttctcggaa

SEQ ID NO: 98560 - DNA, 17 bp, Arabidopsis thaliana
gagttcatgctcaggaa

SEQ ID NO: 98561 - DNA, 17 bp, Arabidopsis thaliana
gagttcatgtctcggtg

SEQ ID NO: 98562 - DNA, 17 bp, Arabidopsis thaliana
gagttcatgtctcggtt

SEQ ID NO: 98563 - DNA, 17 bp, Arabidopsis thaliana
gagttcattccggggtg

SEQ ID NO: 98564 - DNA, 17 bp, Arabidopsis thaliana
gagttcatttctccgaa

SEQ ID NO: 98565 - DNA, 17 bp, Arabidopsis thaliana
gagttcatttctcggaa

SEQ ID NO: 98566 - DNA, 17 bp, Arabidopsis thaliana
gagttccatcgggtaaa

SEQ ID NO: 98567 - DNA, 17 bp, Arabidopsis thaliana
gagttccggttgatgaa

SEQ ID NO: 98568 - DNA, 17 bp, Arabidopsis thaliana
gagttcctcgccggggc

SEQ ID NO: 98569 - DNA, 17 bp, Arabidopsis thaliana
gagttccttagctactt

SEQ ID NO: 98570 - DNA, 17 bp, Arabidopsis thaliana
gagttcctttcttctct

SEQ ID NO: 98571 - DNA, 17 bp, Arabidopsis thaliana
gagttcgaatctctcag

SEQ ID NO: 98572 - DNA, 17 bp, Arabidopsis thaliana
gagttcgaatctgtcag

SEQ ID NO: 98573 - DNA, 17 bp, Arabidopsis thaliana
gagttcgaatctttcag

SEQ ID NO: 98574 - DNA, 17 bp, Arabidopsis thaliana
gagttcgactcgttcat

SEQ ID NO: 98575 - DNA, 17 bp, Arabidopsis thaliana
gagttcgactgttcacc

SEQ ID NO: 98576 - DNA, 17 bp, Arabidopsis thaliana
gagttcgacttattgta

SEQ ID NO: 98577 - DNA, 17 bp, Arabidopsis thaliana
gagttcgagaacggtgc

SEQ ID NO: 98578 - DNA, 17 bp, Arabidopsis thaliana
gagttcgagccggcggc

SEQ ID NO: 98579 - DNA, 17 bp, Arabidopsis thaliana
gagttcgaggatgtgtt

SEQ ID NO: 98580 - DNA, 17 bp, Arabidopsis thaliana
gagttcgatcctcgccg

SEQ ID NO: 98581 - DNA, 17 bp, Arabidopsis thaliana
gagttcgatgtgattgt

SEQ ID NO: 98582 - DNA, 17 bp, Arabidopsis thaliana
gagttcgattgttcacc

SEQ ID NO: 98583 - DNA, 17 bp, Arabidopsis thaliana
gagttcggagaatttgc

SEQ ID NO: 98584 - DNA, 17 bp, Arabidopsis thaliana
gagttcggagattctcc

SEQ ID NO: 98585 - DNA, 17 bp, Arabidopsis thaliana
gagttcggcttagaacc

SEQ ID NO: 98586 - DNA, 17 bp, Arabidopsis thaliana
gagttcgggtagaaccc

SEQ ID NO: 98587 - DNA, 17 bp, Arabidopsis thaliana
gagttcggtcctcgccg

SEQ ID NO: 98588 - DNA, 17 bp, Arabidopsis thaliana
gagttcggtcctcgtcg

SEQ ID NO: 98589 - DNA, 17 bp, Arabidopsis thaliana
gagttcgtatctcggag

SEQ ID NO: 98590 - DNA, 17 bp, Arabidopsis thaliana
gagttcgtatctctcag

SEQ ID NO: 98591 - DNA, 17 bp, Arabidopsis thaliana
gagttcgttcctcgccg

SEQ ID NO: 98592 - DNA, 17 bp, Arabidopsis thaliana
gagttcgttgacgattc

SEQ ID NO: 98593 - DNA, 17 bp, Arabidopsis thaliana
gagttcgttgccaacaa

SEQ ID NO: 98594 - DNA, 17 bp, Arabidopsis thaliana
gagttcgttggtgatcc

SEQ ID NO: 98595 - DNA, 17 bp, Arabidopsis thaliana
gagttcgtttctcggaa

SEQ ID NO: 98596 - DNA, 17 bp, Arabidopsis thaliana
gagttctacagatccgt

SEQ ID NO: 98597 - DNA, 17 bp, Arabidopsis thaliana
gagttctactacaaggc

SEQ ID NO: 98598 - DNA, 17 bp, Arabidopsis thaliana
gagttctactcatactt

SEQ ID NO: 98599 - DNA, 17 bp, Arabidopsis thaliana
gagttctatcgggtaaa

SEQ ID NO: 98600 - DNA, 17 bp, Arabidopsis thaliana
gagttctcagttagatc

SEQ ID NO: 98601 - DNA, 17 bp, Arabidopsis thaliana
gagttctccacaagcta

SEQ ID NO: 98602 - DNA, 17 bp, Arabidopsis thaliana
gagttctccgcgatatt

SEQ ID NO: 98603 - DNA, 17 bp, Arabidopsis thaliana
gagttctcctctcaggg

SEQ ID NO: 98604 - DNA, 17 bp, Arabidopsis thaliana
gagttctccttttgtgt

SEQ ID NO: 98605 - DNA, 17 bp, Arabidopsis thaliana
gagttctcttgggattc

SEQ ID NO: 98606 - DNA, 17 bp, Arabidopsis thaliana
gagttctgatgggatcc

SEQ ID NO: 98607 - DNA, 17 bp, Arabidopsis thaliana
gagttcttaccgattgt

SEQ ID NO: 98608 - DNA, 17 bp, Arabidopsis thaliana
gagttcttagatcatcc

SEQ ID NO: 98609 - DNA, 17 bp, Arabidopsis thaliana
gagttcttccttgtcgc

SEQ ID NO: 98610 - DNA, 17 bp, Arabidopsis thaliana
gagttcttctcgctgat

SEQ ID NO: 98611 - DNA, 17 bp, Arabidopsis thaliana
gagttgaaataatttca

SEQ ID NO: 98612 - DNA, 17 bp, Arabidopsis thaliana
gagttgaattgagttga

SEQ ID NO: 98613 - DNA, 17 bp, Arabidopsis thaliana
gagttgaccatgaattt

SEQ ID NO: 98614 - DNA, 17 bp, Arabidopsis thaliana
gagttgacccatgaatc

SEQ ID NO: 98615 - DNA, 17 bp, Arabidopsis thaliana
gagttgacccatgaatt

SEQ ID NO: 98616 - DNA, 17 bp, Arabidopsis thaliana
gagttgacgctaaatga

SEQ ID NO: 98617 - DNA, 17 bp, Arabidopsis thaliana
gagttgactcgtgggct

SEQ ID NO: 98618 - DNA, 17 bp, Arabidopsis thaliana
gagttgactctagtccg

SEQ ID NO: 98619 - DNA, 17 bp, Arabidopsis thaliana
gagttgactctagtcct

SEQ ID NO: 98620 - DNA, 17 bp, Arabidopsis thaliana
gagttgacttgagttga

SEQ ID NO: 98621 - DNA, 17 bp, Arabidopsis thaliana
gagttgagttgagttga

SEQ ID NO: 98622 - DNA, 17 bp, Arabidopsis thaliana
gagttgatcacaggaag

SEQ ID NO: 98623 - DNA, 17 bp, Arabidopsis thaliana
gagttgatccatgaatt

SEQ ID NO: 98624 - DNA, 17 bp, Arabidopsis thaliana
gagttgatttcagatcg

SEQ ID NO: 98625 - DNA, 17 bp, Arabidopsis thaliana
gagttgccattcgaagc

SEQ ID NO: 98626 - DNA, 17 bp, Arabidopsis thaliana
gagttgccgcagctgtc

SEQ ID NO: 98627 - DNA, 17 bp, Arabidopsis thaliana
gagttgcctttggttat

SEQ ID NO: 98628 - DNA, 17 bp, Arabidopsis thaliana
gagttgcgagtccttgg

SEQ ID NO: 98629 - DNA, 17 bp, Arabidopsis thaliana
gagttgcggtttaagtt

SEQ ID NO: 98630 - DNA, 17 bp, Arabidopsis thaliana
gagttgctggatcatac

SEQ ID NO: 98631 - DNA, 17 bp, Arabidopsis thaliana
gagttgcttttccttca

SEQ ID NO: 98632 - DNA, 17 bp, Arabidopsis thaliana
gagttggaacttattta

SEQ ID NO: 98633 - DNA, 17 bp, Arabidopsis thaliana
gagttggaatgctacag

SEQ ID NO: 98634 - DNA, 17 bp, Arabidopsis thaliana
gagttggattcaaccca

SEQ ID NO: 98635 - DNA, 17 bp, Arabidopsis thaliana
gagttggccagaaacgt

SEQ ID NO: 98636 - DNA, 17 bp, Arabidopsis thaliana
gagttggcccgatctat

SEQ ID NO: 98637 - DNA, 17 bp, Arabidopsis thaliana
gagttggccgaactctt

SEQ ID NO: 98638 - DNA, 17 bp, Arabidopsis thaliana
gagttggcggttggcac

SEQ ID NO: 98639 - DNA, 17 bp, Arabidopsis thaliana
gagttggctttagaagc

SEQ ID NO: 98640 - DNA, 17 bp, Arabidopsis thaliana
gagttgggacttattta

SEQ ID NO: 98641 - DNA, 17 bp, Arabidopsis thaliana
gagttgggatttattta

SEQ ID NO: 98642 - DNA, 17 bp, Arabidopsis thaliana
gagttgggttacccatt

SEQ ID NO: 98643 - DNA, 17 bp, Arabidopsis thaliana
gagttgggttagccatt

SEQ ID NO: 98644 - DNA, 17 bp, Arabidopsis thaliana
gagttggtccacaacag

SEQ ID NO: 98645 - DNA, 17 bp, Arabidopsis thaliana
gagttggtctacgctat

SEQ ID NO: 98646 - DNA, 17 bp, Arabidopsis thaliana
gagttggttattgggtc

SEQ ID NO: 98647 - DNA, 17 bp, Arabidopsis thaliana
gagttggttgcgacggt

SEQ ID NO: 98648 - DNA, 17 bp, Arabidopsis thaliana
gagttgtactgtccgat

SEQ ID NO: 98649 - DNA, 17 bp, Arabidopsis thaliana
gagttgtattgcgggtg

SEQ ID NO: 98650 - DNA, 17 bp, Arabidopsis thaliana
gagttgtcaaatcgggg

SEQ ID NO: 98651 - DNA, 17 bp, Arabidopsis thaliana
gagttgtcaggtgggga

SEQ ID NO: 98652 - DNA, 17 bp, Arabidopsis thaliana
gagttgtccgtcgaagc

SEQ ID NO: 98653 - DNA, 17 bp, Arabidopsis thaliana
gagttgtcttttaccgg

SEQ ID NO: 98654 - DNA, 17 bp, Arabidopsis thaliana
gagttgtgaatcaggtg

SEQ ID NO: 98655 - DNA, 17 bp, Arabidopsis thaliana
gagttgtgaccaagtga

SEQ ID NO: 98656 - DNA, 17 bp, Arabidopsis thaliana
gagttgtgttccattca

SEQ ID NO: 98657 - DNA, 17 bp, Arabidopsis thaliana
gagttgttaacgcttcg

SEQ ID NO: 98658 - DNA, 17 bp, Arabidopsis thaliana
gagttgttgcttgttga

SEQ ID NO: 98659 - DNA, 17 bp, Arabidopsis thaliana
gagttgttggaatgtgg

SEQ ID NO: 98660 - DNA, 17 bp, Arabidopsis thaliana
gagttgtttcactttgg

SEQ ID NO: 98661 - DNA, 17 bp, Arabidopsis thaliana
gagttgtttcatgtctt

SEQ ID NO: 98662 - DNA, 17 bp, Arabidopsis thaliana
gagtttacagcttgttt

SEQ ID NO: 98663 - DNA, 17 bp, Arabidopsis thaliana
gagtttacggttttttt

SEQ ID NO: 98664 - DNA, 17 bp, Arabidopsis thaliana
gagtttatctaaggtcc

SEQ ID NO: 98665 - DNA, 17 bp, Arabidopsis thaliana
gagtttcaacaatgacg

SEQ ID NO: 98666 - DNA, 17 bp, Arabidopsis thaliana
gagtttcaccaacttta

SEQ ID NO: 98667 - DNA, 17 bp, Arabidopsis thaliana
gagtttcaggacgacaa

SEQ ID NO: 98668 - DNA, 17 bp, Arabidopsis thaliana
gagtttcattcttttat

SEQ ID NO: 98669 - DNA, 17 bp, Arabidopsis thaliana
gagtttccaaaggcccg

SEQ ID NO: 98670 - DNA, 17 bp, Arabidopsis thaliana
gagtttccgcagagcgg

SEQ ID NO: 98671 - DNA, 17 bp, Arabidopsis thaliana
gagtttcctcagagcgg

SEQ ID NO: 98672 - DNA, 17 bp, Arabidopsis thaliana
gagtttcctctggcttt

SEQ ID NO: 98673 - DNA, 17 bp, Arabidopsis thaliana
gagtttccttcttttat

SEQ ID NO: 98674 - DNA, 17 bp, Arabidopsis thaliana
gagtttcgagttggaac

SEQ ID NO: 98675 - DNA, 17 bp, Arabidopsis thaliana
gagtttcgcttcatact

SEQ ID NO: 98676 - DNA, 17 bp, Arabidopsis thaliana
gagtttctggattgccg

SEQ ID NO: 98677 - DNA, 17 bp, Arabidopsis thaliana
gagtttctgggctttgg

SEQ ID NO: 98678 - DNA, 17 bp, Arabidopsis thaliana
gagtttctggtggtgtg

SEQ ID NO: 98679 - DNA, 17 bp, Arabidopsis thaliana
gagtttgacatgattgg

SEQ ID NO: 98680 - DNA, 17 bp, Arabidopsis thaliana
gagtttgacatggttgg

SEQ ID NO: 98681 - DNA, 17 bp, Arabidopsis thaliana
gagtttgacgaaaaaga

SEQ ID NO: 98682 - DNA, 17 bp, Arabidopsis thaliana
gagtttgactctagtcc

SEQ ID NO: 98683 - DNA, 17 bp, Arabidopsis thaliana
gagtttgactctattcc

SEQ ID NO: 98684 - DNA, 17 bp, Arabidopsis thaliana
gagtttgagatgaagga

SEQ ID NO: 98685 - DNA, 17 bp, Arabidopsis thaliana
gagtttgatcggtgcat

SEQ ID NO: 98686 - DNA, 17 bp, Arabidopsis thaliana
gagtttgatcggtggat

SEQ ID NO: 98687 - DNA, 17 bp, Arabidopsis thaliana
gagtttgcaatggttga

SEQ ID NO: 98688 - DNA, 17 bp, Arabidopsis thaliana
gagtttgccgcttagac

SEQ ID NO: 98689 - DNA, 17 bp, Arabidopsis thaliana
gagtttgcgcctactaa

SEQ ID NO: 98690 - DNA, 17 bp, Arabidopsis thaliana
gagtttgctacaagatg

SEQ ID NO: 98691 - DNA, 17 bp, Arabidopsis thaliana
gagtttgctaccatttg

SEQ ID NO: 98692 - DNA, 17 bp, Arabidopsis thaliana
gagtttggaccaaggaa

SEQ ID NO: 98693 - DNA, 17 bp, Arabidopsis thaliana
gagtttggccttagatc

SEQ ID NO: 98694 - DNA, 17 bp, Arabidopsis thaliana
gagtttggctggggcgg

SEQ ID NO: 98695 - DNA, 17 bp, Arabidopsis thaliana
gagtttggttccatatc

SEQ ID NO: 98696 - DNA, 17 bp, Arabidopsis thaliana
gagtttggttccatatg

SEQ ID NO: 98697 - DNA, 17 bp, Arabidopsis thaliana
gagtttgtctggggcgg

SEQ ID NO: 98698 - DNA, 17 bp, Arabidopsis thaliana
gagtttgtggagttcgc

SEQ ID NO: 98699 - DNA, 17 bp, Arabidopsis thaliana
gagtttgtggctctggt

SEQ ID NO: 98700 - DNA, 17 bp, Arabidopsis thaliana
gagtttgttttgccctt

SEQ ID NO: 98701 - DNA, 17 bp, Arabidopsis thaliana
gagttttcagatggcga

SEQ ID NO: 98702 - DNA, 17 bp, Arabidopsis thaliana
gagttttccatctctaa

SEQ ID NO: 98703 - DNA, 17 bp, Arabidopsis thaliana
gagttttccgtagattc

SEQ ID NO: 98704 - DNA, 17 bp, Arabidopsis thaliana
gagttttcgggttgtca

SEQ ID NO: 98705 - DNA, 17 bp, Arabidopsis thaliana
gagttttcgttatttaa

SEQ ID NO: 98706 - DNA, 17 bp, Arabidopsis thaliana
gagttttctagcgttcg

SEQ ID NO: 98707 - DNA, 17 bp, Arabidopsis thaliana
gagttttctgaccatgg

SEQ ID NO: 98708 - DNA, 17 bp, Arabidopsis thaliana
gagttttgacgttcgtt

SEQ ID NO: 98709 - DNA, 17 bp, Arabidopsis thaliana
gagttttgatgttcgtt

SEQ ID NO: 98710 - DNA, 17 bp, Arabidopsis thaliana
gagttttgcttcattcc

SEQ ID NO: 98711 - DNA, 17 bp, Arabidopsis thaliana
gagttttgtgatattag

SEQ ID NO: 98712 - DNA, 17 bp, Arabidopsis thaliana
gagttttgttgcgtcca

SEQ ID NO: 98713 - DNA, 17 bp, Arabidopsis thaliana
gagtttttcatacaggg

SEQ ID NO: 98714 - DNA, 17 bp, Arabidopsis thaliana
gagtttttgtgggtttt

SEQ ID NO: 98715 - DNA, 17 bp, Arabidopsis thaliana
gagttttttgcccaggc

SEQ ID NO: 98716 - DNA, 17 bp, Arabidopsis thaliana
gagtttttttcgcatat

SEQ ID NO: 98717 - DNA, 17 bp, Arabidopsis thaliana
gataaaaaacctccggc

SEQ ID NO: 98718 - DNA, 17 bp, Arabidopsis thaliana
gataaaaaatcgggtga

SEQ ID NO: 98719 - DNA, 17 bp, Arabidopsis thaliana
gataaaacatttgctgt

SEQ ID NO: 98720 - DNA, 17 bp, Arabidopsis thaliana
gataaaactcagacaat

SEQ ID NO: 98721 - DNA, 17 bp, Arabidopsis thaliana
gataaaactgtcacgtg

SEQ ID NO: 98722 - DNA, 17 bp, Arabidopsis thaliana
gataaaaggtcgacgcg

SEQ ID NO: 98723 - DNA, 17 bp, Arabidopsis thaliana
gataaaatcgttcaggt

SEQ ID NO: 98724 - DNA, 17 bp, Arabidopsis thaliana
gataaaatgcttctccg

SEQ ID NO: 98725 - DNA, 17 bp, Arabidopsis thaliana
gataaaccctatcggct

SEQ ID NO: 98726 - DNA, 17 bp, Arabidopsis thaliana
gataaacctcgggttta

SEQ ID NO: 98727 - DNA, 17 bp, Arabidopsis thaliana
gataaacgacctgtgtc

SEQ ID NO: 98728 - DNA, 17 bp, Arabidopsis thaliana
gataaagaagactaagt

SEQ ID NO: 98729 - DNA, 17 bp, Arabidopsis thaliana
gataaagatcgcaaaga

SEQ ID NO: 98730 - DNA, 17 bp, Arabidopsis thaliana
gataaagatgtggtaat

SEQ ID NO: 98731 - DNA, 17 bp, Arabidopsis thaliana
gataaagcggtctaatt

SEQ ID NO: 98732 - DNA, 17 bp, Arabidopsis thaliana
gataaagctcgttgata

SEQ ID NO: 98733 - DNA, 17 bp, Arabidopsis thaliana
gataaagtgcggtgcgg

SEQ ID NO: 98734 - DNA, 17 bp, Arabidopsis thaliana
gataaagtgctaaaacc

SEQ ID NO: 98735 - DNA, 17 bp, Arabidopsis thaliana
gataaattagaccgctt

SEQ ID NO: 98736 - DNA, 17 bp, Arabidopsis thaliana
gataaattagaccgttt

SEQ ID NO: 98737 - DNA, 17 bp, Arabidopsis thaliana
gataaattgtccccgcg

SEQ ID NO: 98738 - DNA, 17 bp, Arabidopsis thaliana
gataaattttgtcatag

SEQ ID NO: 98739 - DNA, 17 bp, Arabidopsis thaliana
gataacaaaagtgataa

SEQ ID NO: 98740 - DNA, 17 bp, Arabidopsis thaliana
gataacaatcacgggtt

SEQ ID NO: 98741 - DNA, 17 bp, Arabidopsis thaliana
gataacaggacgcttgt

SEQ ID NO: 98742 - DNA, 17 bp, Arabidopsis thaliana
gataacagtgaatttcg

SEQ ID NO: 98743 - DNA, 17 bp, Arabidopsis thaliana
gataacatcggctctcc

SEQ ID NO: 98744 - DNA, 17 bp, Arabidopsis thaliana
gataacatttttgttga

SEQ ID NO: 98745 - DNA, 17 bp, Arabidopsis thaliana
gataaccaacgtgttct

SEQ ID NO: 98746 - DNA, 17 bp, Arabidopsis thaliana
gataaccaagatgtccc

SEQ ID NO: 98747 - DNA, 17 bp, Arabidopsis thaliana
gataaccaggaggttcg

SEQ ID NO: 98748 - DNA, 17 bp, Arabidopsis thaliana
gataacgcaggtgtcct

SEQ ID NO: 98749 - DNA, 17 bp, Arabidopsis thaliana
gataacgctgtcctaag

SEQ ID NO: 98750 - DNA, 17 bp, Arabidopsis thaliana
gataacggaatcgctaa

SEQ ID NO: 98751 - DNA, 17 bp, Arabidopsis thaliana
gataacggcatgtctat

SEQ ID NO: 98752 - DNA, 17 bp, Arabidopsis thaliana
gataacggcctaggaga

SEQ ID NO: 98753 - DNA, 17 bp, Arabidopsis thaliana
gataacgggtttcagcg

SEQ ID NO: 98754 - DNA, 17 bp, Arabidopsis thaliana
gataacggtatggggat

SEQ ID NO: 98755 - DNA, 17 bp, Arabidopsis thaliana
gataacgtcgtgtggat

SEQ ID NO: 98756 - DNA, 17 bp, Arabidopsis thaliana
gataactaaaaccttcc

SEQ ID NO: 98757 - DNA, 17 bp, Arabidopsis thaliana
gataactatgacatcat

SEQ ID NO: 98758 - DNA, 17 bp, Arabidopsis thaliana
gataactcgacggatcg

SEQ ID NO: 98759 - DNA, 17 bp, Arabidopsis thaliana
gataactttggtcatgt

SEQ ID NO: 98760 - DNA, 17 bp, Arabidopsis thaliana
gataacttttttctggg

SEQ ID NO: 98761 - DNA, 17 bp, Arabidopsis thaliana
gataagacacgtgtaaa

SEQ ID NO: 98762 - DNA, 17 bp, Arabidopsis thaliana
gataagatttgatcggt

SEQ ID NO: 98763 - DNA, 17 bp, Arabidopsis thaliana
gataagcagtaggtgcc

SEQ ID NO: 98764 - DNA, 17 bp, Arabidopsis thaliana
gataagccgctgcggtt

SEQ ID NO: 98765 - DNA, 17 bp, Arabidopsis thaliana
gataagccggaggaagg

SEQ ID NO: 98766 - DNA, 17 bp, Arabidopsis thaliana
gataagcgactttccgg

SEQ ID NO: 98767 - DNA, 17 bp, Arabidopsis thaliana
gataaggaagactgcaa

SEQ ID NO: 98768 - DNA, 17 bp, Arabidopsis thaliana
gataaggactgtaacca

SEQ ID NO: 98769 - DNA, 17 bp, Arabidopsis thaliana
gataaggcgagatctgg

SEQ ID NO: 98770 - DNA, 17 bp, Arabidopsis thaliana
gataagggaatgtgaca

SEQ ID NO: 98771 - DNA, 17 bp, Arabidopsis thaliana
gataaggttgcggttta

SEQ ID NO: 98772 - DNA, 17 bp, Arabidopsis thaliana
gataagtactttgccgc

SEQ ID NO: 98773 - DNA, 17 bp, Arabidopsis thaliana
gataagtcgacggatcg

SEQ ID NO: 98774 - DNA, 17 bp, Arabidopsis thaliana
gataagtgaggagggtg

SEQ ID NO: 98775 - DNA, 17 bp, Arabidopsis thaliana
gataagtgcattacact

SEQ ID NO: 98776 - DNA, 17 bp, Arabidopsis thaliana
gataagtgcatttcgtg

SEQ ID NO: 98777 - DNA, 17 bp, Arabidopsis thaliana
gataagttccattgtcc

SEQ ID NO: 98778 - DNA, 17 bp, Arabidopsis thaliana
gataagttgttaactga

SEQ ID NO: 98779 - DNA, 17 bp, Arabidopsis thaliana
gataagttgttcgtttg

SEQ ID NO: 98780 - DNA, 17 bp, Arabidopsis thaliana
gataagtttgggaagtc

SEQ ID NO: 98781 - DNA, 17 bp, Arabidopsis thaliana
gataataaggtcgccag

SEQ ID NO: 98782 - DNA, 17 bp, Arabidopsis thaliana
gataataccgcctccag

SEQ ID NO: 98783 - DNA, 17 bp, Arabidopsis thaliana
gataataggtgcgtttg

SEQ ID NO: 98784 - DNA, 17 bp, Arabidopsis thaliana
gataatatcccacatcg

SEQ ID NO: 98785 - DNA, 17 bp, Arabidopsis thaliana
gataatcaaagtcgcaa

SEQ ID NO: 98786 - DNA, 17 bp, Arabidopsis thaliana
gataatccctcaggccc

SEQ ID NO: 98787 - DNA, 17 bp, Arabidopsis thaliana
gataatcctgtcacctt

SEQ ID NO: 98788 - DNA, 17 bp, Arabidopsis thaliana
gataatgagtgcgtttg

SEQ ID NO: 98789 - DNA, 17 bp, Arabidopsis thaliana
gataatgcaggtattaa

SEQ ID NO: 98790 - DNA, 17 bp, Arabidopsis thaliana
gataatggccggttatg

SEQ ID NO: 98791 - DNA, 17 bp, Arabidopsis thaliana
gataatggcctacttct

SEQ ID NO: 98792 - DNA, 17 bp, Arabidopsis thaliana
gataatgggtgcgtttg

SEQ ID NO: 98793 - DNA, 17 bp, Arabidopsis thaliana
gataatggtgaaggtgg

SEQ ID NO: 98794 - DNA, 17 bp, Arabidopsis thaliana
gatacaaactgggtgta

SEQ ID NO: 98795 - DNA, 17 bp, Arabidopsis thaliana
gatacaacatcctgcac

SEQ ID NO: 98796 - DNA, 17 bp, Arabidopsis thaliana
gatacaaccatctacgg

SEQ ID NO: 98797 - DNA, 17 bp, Arabidopsis thaliana
gatacaaccgcacagat

SEQ ID NO: 98798 - DNA, 17 bp, Arabidopsis thaliana
gatacaaccgtcgaccg

SEQ ID NO: 98799 - DNA, 17 bp, Arabidopsis thaliana
gatacaagagcatggcc

SEQ ID NO: 98800 - DNA, 17 bp, Arabidopsis thaliana
gatacaatcaggttcgc

SEQ ID NO: 98801 - DNA, 17 bp, Arabidopsis thaliana
gatacaatcgtctccgg

SEQ ID NO: 98802 - DNA, 17 bp, Arabidopsis thaliana
gatacacaatggtgcag

SEQ ID NO: 98803 - DNA, 17 bp, Arabidopsis thaliana
gatacacattgctgatt

SEQ ID NO: 98804 - DNA, 17 bp, Arabidopsis thaliana
gatacaccggcttcgca

SEQ ID NO: 98805 - DNA, 17 bp, Arabidopsis thaliana
gatacaccgttggtcga

SEQ ID NO: 98806 - DNA, 17 bp, Arabidopsis thaliana
gatacactagatcatcc

SEQ ID NO: 98807 - DNA, 17 bp, Arabidopsis thaliana
gatacagacccgggttc

SEQ ID NO: 98808 - DNA, 17 bp, Arabidopsis thaliana
gatacagcggcagttac

SEQ ID NO: 98809 - DNA, 17 bp, Arabidopsis thaliana
gatacaggaagtgggcg

SEQ ID NO: 98810 - DNA, 17 bp, Arabidopsis thaliana
gatacaggatgtgtcag

SEQ ID NO: 98811 - DNA, 17 bp, Arabidopsis thaliana
gatacaggcacaaaaaa

SEQ ID NO: 98812 - DNA, 17 bp, Arabidopsis thaliana
gatacagtgcgttgcca

SEQ ID NO: 98813 - DNA, 17 bp, Arabidopsis thaliana
gatacagtggcggacca

SEQ ID NO: 98814 - DNA, 17 bp, Arabidopsis thaliana
gatacatgaaaccgcgc

SEQ ID NO: 98815 - DNA, 17 bp, Arabidopsis thaliana
gataccaaacgtaaccc

SEQ ID NO: 98816 - DNA, 17 bp, Arabidopsis thaliana
gataccagtatcatctg

SEQ ID NO: 98817 - DNA, 17 bp, Arabidopsis thaliana
gataccccaatggagat

SEQ ID NO: 98818 - DNA, 17 bp, Arabidopsis thaliana
gataccccatcattgcc

SEQ ID NO: 98819 - DNA, 17 bp, Arabidopsis thaliana
gataccccgcatttcca

SEQ ID NO: 98820 - DNA, 17 bp, Arabidopsis thaliana
gatacccgaaaacccag

SEQ ID NO: 98821 - DNA, 17 bp, Arabidopsis thaliana
gatacccgaatttttgt

SEQ ID NO: 98822 - DNA, 17 bp, Arabidopsis thaliana
gatacccgttcggattc

SEQ ID NO: 98823 - DNA, 17 bp, Arabidopsis thaliana
gataccgaagtccgtaa

SEQ ID NO: 98824 - DNA, 17 bp, Arabidopsis thaliana
gataccgacaacctcat

SEQ ID NO: 98825 - DNA, 17 bp, Arabidopsis thaliana
gataccgaccagccgac

SEQ ID NO: 98826 - DNA, 17 bp, Arabidopsis thaliana
gataccgaggcctgttc

SEQ ID NO: 98827 - DNA, 17 bp, Arabidopsis thaliana
gataccgatcggaggtt

SEQ ID NO: 98828 - DNA, 17 bp, Arabidopsis thaliana
gataccgctattcatcc

SEQ ID NO: 98829 - DNA, 17 bp, Arabidopsis thaliana
gataccggattgattcg

SEQ ID NO: 98830 - DNA, 17 bp, Arabidopsis thaliana
gataccggcgagcagag

SEQ ID NO: 98831 - DNA, 17 bp, Arabidopsis thaliana
gataccgttttggaccg

SEQ ID NO: 98832 - DNA, 17 bp, Arabidopsis thaliana
gatacctaggcacccag

SEQ ID NO: 98833 - DNA, 17 bp, Arabidopsis thaliana
gatacctcccttaacga

SEQ ID NO: 98834 - DNA, 17 bp, Arabidopsis thaliana
gatacctccttcgactt

SEQ ID NO: 98835 - DNA, 17 bp, Arabidopsis thaliana
gatacgactttgtttgc

SEQ ID NO: 98836 - DNA, 17 bp, Arabidopsis thaliana
gatacgatttcgggtgc

SEQ ID NO: 98837 - DNA, 17 bp, Arabidopsis thaliana
gatacgatttgggtgcg

SEQ ID NO: 98838 - DNA, 17 bp, Arabidopsis thaliana
gatacgattttaggtac

SEQ ID NO: 98839 - DNA, 17 bp, Arabidopsis thaliana
gatacgattttgcgtgc

SEQ ID NO: 98840 - DNA, 17 bp, Arabidopsis thaliana
gatacgattttgggtgc

SEQ ID NO: 98841 - DNA, 17 bp, Arabidopsis thaliana
gatacgcgaaaccacgg

SEQ ID NO: 98842 - DNA, 17 bp, Arabidopsis thaliana
gatacgcggattacgct

SEQ ID NO: 98843 - DNA, 17 bp, Arabidopsis thaliana
gatacgcggattacggt

SEQ ID NO: 98844 - DNA, 17 bp, Arabidopsis thaliana
gatacggaccggctggc

SEQ ID NO: 98845 - DNA, 17 bp, Arabidopsis thaliana
gatacggagttttcgtg

SEQ ID NO: 98846 - DNA, 17 bp, Arabidopsis thaliana
gatacggattgctctgc

SEQ ID NO: 98847 - DNA, 17 bp, Arabidopsis thaliana
gatacggcgacgggagg

SEQ ID NO: 98848 - DNA, 17 bp, Arabidopsis thaliana
gatacgggctttgcctt

SEQ ID NO: 98849 - DNA, 17 bp, Arabidopsis thaliana
gatacgggttttgctct

SEQ ID NO: 98850 - DNA, 17 bp, Arabidopsis thaliana
gatacggttttgagtgc

SEQ ID NO: 98851 - DNA, 17 bp, Arabidopsis thaliana
gatactaaatcagaatg

SEQ ID NO: 98852 - DNA, 17 bp, Arabidopsis thaliana
gatactaaccagattag

SEQ ID NO: 98853 - DNA, 17 bp, Arabidopsis thaliana
gatactaacggcctgta

SEQ ID NO: 98854 - DNA, 17 bp, Arabidopsis thaliana
gatactactgatggaga

SEQ ID NO: 98855 - DNA, 17 bp, Arabidopsis thaliana
gatactagactgcacag

SEQ ID NO: 98856 - DNA, 17 bp, Arabidopsis thaliana
gatactagctcaggccg

SEQ ID NO: 98857 - DNA, 17 bp, Arabidopsis thaliana
gatactaggcgctgtgc

SEQ ID NO: 98858 - DNA, 17 bp, Arabidopsis thaliana
gatactcgaatgcacag

SEQ ID NO: 98859 - DNA, 17 bp, Arabidopsis thaliana
gatactcggctctcacc

SEQ ID NO: 98860 - DNA, 17 bp, Arabidopsis thaliana
gatactcggcttcaact

SEQ ID NO: 98861 - DNA, 17 bp, Arabidopsis thaliana
gatactctctctcacca

SEQ ID NO: 98862 - DNA, 17 bp, Arabidopsis thaliana
gatactctctctgacca

SEQ ID NO: 98863 - DNA, 17 bp, Arabidopsis thaliana
gatactcttctcgtgcg

SEQ ID NO: 98864 - DNA, 17 bp, Arabidopsis thaliana
gatactgaggtcactgc

SEQ ID NO: 98865 - DNA, 17 bp, Arabidopsis thaliana
gatactgagtatcaggt

SEQ ID NO: 98866 - DNA, 17 bp, Arabidopsis thaliana
gatactgatggcgatgg

SEQ ID NO: 98867 - DNA, 17 bp, Arabidopsis thaliana
gatactgggacttgctg

SEQ ID NO: 98868 - DNA, 17 bp, Arabidopsis thaliana
gatactggtcgtcatca

SEQ ID NO: 98869 - DNA, 17 bp, Arabidopsis thaliana
gatactgtgaaactgcg

SEQ ID NO: 98870 - DNA, 17 bp, Arabidopsis thaliana
gatacttatcttaccag

SEQ ID NO: 98871 - DNA, 17 bp, Arabidopsis thaliana
gatacttcttgcaaact

SEQ ID NO: 98872 - DNA, 17 bp, Arabidopsis thaliana
gatacttgaaggtgtga

SEQ ID NO: 98873 - DNA, 17 bp, Arabidopsis thaliana
gatacttggtgtgaatt

SEQ ID NO: 98874 - DNA, 17 bp, Arabidopsis thaliana
gatacttggtgtggatc

SEQ ID NO: 98875 - DNA, 17 bp, Arabidopsis thaliana
gatacttgtgtccatgg

SEQ ID NO: 98876 - DNA, 17 bp, Arabidopsis thaliana
gatactttctgctttgg

SEQ ID NO: 98877 - DNA, 17 bp, Arabidopsis thaliana
gatactttggccgagtg

SEQ ID NO: 98878 - DNA, 17 bp, Arabidopsis thaliana
gatacttttgatggagg

SEQ ID NO: 98879 - DNA, 17 bp, Arabidopsis thaliana
gatacttttgccgagat

SEQ ID NO: 98880 - DNA, 17 bp, Arabidopsis thaliana
gatagaaactttccctc

SEQ ID NO: 98881 - DNA, 17 bp, Arabidopsis thaliana
gatagaaccttgacttg

SEQ ID NO: 98882 - DNA, 17 bp, Arabidopsis thaliana
gatagaagcggtgattt

SEQ ID NO: 98883 - DNA, 17 bp, Arabidopsis thaliana
gatagacctgacacgtg

SEQ ID NO: 98884 - DNA, 17 bp, Arabidopsis thaliana
gatagacgtttctgacc

SEQ ID NO: 98885 - DNA, 17 bp, Arabidopsis thaliana
gatagacgtttgtggct

SEQ ID NO: 98886 - DNA, 17 bp, Arabidopsis thaliana
gatagagacacagtttt

SEQ ID NO: 98887 - DNA, 17 bp, Arabidopsis thaliana
gatagagctatctacgg

SEQ ID NO: 98888 - DNA, 17 bp, Arabidopsis thaliana
gatagagcttgaagtca

SEQ ID NO: 98889 - DNA, 17 bp, Arabidopsis thaliana
gatagagtcttgagcgt

SEQ ID NO: 98890 - DNA, 17 bp, Arabidopsis thaliana
gatagatattgacctgc

SEQ ID NO: 98891 - DNA, 17 bp, Arabidopsis thaliana
gatagatccgacagaga

SEQ ID NO: 98892 - DNA, 17 bp, Arabidopsis thaliana
gatagatccgacgattc

SEQ ID NO: 98893 - DNA, 17 bp, Arabidopsis thaliana
gatagatccgacggtaa

SEQ ID NO: 98894 - DNA, 17 bp, Arabidopsis thaliana
gatagatcctaaagttt

SEQ ID NO: 98895 - DNA, 17 bp, Arabidopsis thaliana
gatagatgaaggcctaa

SEQ ID NO: 98896 - DNA, 17 bp, Arabidopsis thaliana
gatagattacgggtttc

SEQ ID NO: 98897 - DNA, 17 bp, Arabidopsis thaliana
gatagattggccatatc

SEQ ID NO: 98898 - DNA, 17 bp, Arabidopsis thaliana
gatagatttctctcgac

SEQ ID NO: 98899 - DNA, 17 bp, Arabidopsis thaliana
gatagatttggcggact

SEQ ID NO: 98900 - DNA, 17 bp, Arabidopsis thaliana
gatagccaccgatgttt

SEQ ID NO: 98901 - DNA, 17 bp, Arabidopsis thaliana
gatagcccaaagacagc

SEQ ID NO: 98902 - DNA, 17 bp, Arabidopsis thaliana
gatagccgccgctgacc

SEQ ID NO: 98903 - DNA, 17 bp, Arabidopsis thaliana
gatagcgaacaagtacc

SEQ ID NO: 98904 - DNA, 17 bp, Arabidopsis thaliana
gatagcgacaacttcgt

SEQ ID NO: 98905 - DNA, 17 bp, Arabidopsis thaliana
gatagcgaccagcgacc

SEQ ID NO: 98906 - DNA, 17 bp, Arabidopsis thaliana
gatagcgcccagacttg

SEQ ID NO: 98907 - DNA, 17 bp, Arabidopsis thaliana
gatagcgctcgtacgac

SEQ ID NO: 98908 - DNA, 17 bp, Arabidopsis thaliana
gatagcggcatgtctat

SEQ ID NO: 98909 - DNA, 17 bp, Arabidopsis thaliana
gatagcggctatgtgca

SEQ ID NO: 98910 - DNA, 17 bp, Arabidopsis thaliana
gatagcggtgtacagat

SEQ ID NO: 98911 - DNA, 17 bp, Arabidopsis thaliana
gatagcggttgttagcg

SEQ ID NO: 98912 - DNA, 17 bp, Arabidopsis thaliana
gataggacgtgtcggct

SEQ ID NO: 98913 - DNA, 17 bp, Arabidopsis thaliana
gataggatcgctcgttt

SEQ ID NO: 98914 - DNA, 17 bp, Arabidopsis thaliana
gataggatcgcttgttt

SEQ ID NO: 98915 - DNA, 17 bp, Arabidopsis thaliana
gataggatgtagcagat

SEQ ID NO: 98916 - DNA, 17 bp, Arabidopsis thaliana
gataggattctgagtca

SEQ ID NO: 98917 - DNA, 17 bp, Arabidopsis thaliana
gataggattcttcatct

SEQ ID NO: 98918 - DNA, 17 bp, Arabidopsis thaliana
gataggccacgctttca

SEQ ID NO: 98919 - DNA, 17 bp, Arabidopsis thaliana
gataggccctgttcgtt

SEQ ID NO: 98920 - DNA, 17 bp, Arabidopsis thaliana
gataggccgttcatagg

SEQ ID NO: 98921 - DNA, 17 bp, Arabidopsis thaliana
gataggcggacgttcgt

SEQ ID NO: 98922 - DNA, 17 bp, Arabidopsis thaliana
gataggcggtcctcggg

SEQ ID NO: 98923 - DNA, 17 bp, Arabidopsis thaliana
gatagggcacgtctgcc

SEQ ID NO: 98924 - DNA, 17 bp, Arabidopsis thaliana
gatagggctgacgaaaa

SEQ ID NO: 98925 - DNA, 17 bp, Arabidopsis thaliana
gataggtgctatattac

SEQ ID NO: 98926 - DNA, 17 bp, Arabidopsis thaliana
gataggttttactccca

SEQ ID NO: 98927 - DNA, 17 bp, Arabidopsis thaliana
gataggttttggactga

SEQ ID NO: 98928 - DNA, 17 bp, Arabidopsis thaliana
gatagtatccaatcagt

SEQ ID NO: 98929 - DNA, 17 bp, Arabidopsis thaliana
gatagtatgcgttgtcg

SEQ ID NO: 98930 - DNA, 17 bp, Arabidopsis thaliana
gatagtcagacaggcag

SEQ ID NO: 98931 - DNA, 17 bp, Arabidopsis thaliana
gatagtcgctgcgatcg

SEQ ID NO: 98932 - DNA, 17 bp, Arabidopsis thaliana
gatagtggcctaccatg

SEQ ID NO: 98933 - DNA, 17 bp, Arabidopsis thaliana
gatagtgtcttctccga

SEQ ID NO: 98934 - DNA, 17 bp, Arabidopsis thaliana
gatagttaaatgagtca

SEQ ID NO: 98935 - DNA, 17 bp, Arabidopsis thaliana
gatagttccagcagcgg

SEQ ID NO: 98936 - DNA, 17 bp, Arabidopsis thaliana
gatagttctcgtgggga

SEQ ID NO: 98937 - DNA, 17 bp, Arabidopsis thaliana
gatagttgaccttggct

SEQ ID NO: 98938 - DNA, 17 bp, Arabidopsis thaliana
gatagttgcagtcgtcg

SEQ ID NO: 98939 - DNA, 17 bp, Arabidopsis thaliana
gatagttgccctggtac

SEQ ID NO: 98940 - DNA, 17 bp, Arabidopsis thaliana
gatagttgcttcgagac

SEQ ID NO: 98941 - DNA, 17 bp, Arabidopsis thaliana
gatagttgggtcactgt

SEQ ID NO: 98942 - DNA, 17 bp, Arabidopsis thaliana
gatagttgtctcgggtg

SEQ ID NO: 98943 - DNA, 17 bp, Arabidopsis thaliana
gatagtttggccgagtg

SEQ ID NO: 98944 - DNA, 17 bp, Arabidopsis thaliana
gatataaacgggatgtc

SEQ ID NO: 98945 - DNA, 17 bp, Arabidopsis thaliana
gatataactcaatggta

SEQ ID NO: 98946 - DNA, 17 bp, Arabidopsis thaliana
gatataagcatattttg

SEQ ID NO: 98947 - DNA, 17 bp, Arabidopsis thaliana
gatataccacgggtgag

SEQ ID NO: 98948 - DNA, 17 bp, Arabidopsis thaliana
gatatacggatcgggtt

SEQ ID NO: 98949 - DNA, 17 bp, Arabidopsis thaliana
gatatacgggtcggccc

SEQ ID NO: 98950 - DNA, 17 bp, Arabidopsis thaliana
gatatacggtggttgct

SEQ ID NO: 98951 - DNA, 17 bp, Arabidopsis thaliana
gatatagacacttctct

SEQ ID NO: 98952 - DNA, 17 bp, Arabidopsis thaliana
gatatagaccgctgtac

SEQ ID NO: 98953 - DNA, 17 bp, Arabidopsis thaliana
gatatagatgtttcccg

SEQ ID NO: 98954 - DNA, 17 bp, Arabidopsis thaliana
gatatagatgttttccg

SEQ ID NO: 98955 - DNA, 17 bp, Arabidopsis thaliana
gatatagcgggtttgcg

SEQ ID NO: 98956 - DNA, 17 bp, Arabidopsis thaliana
gatataggagagtcgag

SEQ ID NO: 98957 - DNA, 17 bp, Arabidopsis thaliana
gatatagggcgtacgga

SEQ ID NO: 98958 - DNA, 17 bp, Arabidopsis thaliana
gatatagttctacgcaa

SEQ ID NO: 98959 - DNA, 17 bp, Arabidopsis thaliana
gatatcatacggcaagg

SEQ ID NO: 98960 - DNA, 17 bp, Arabidopsis thaliana
gatatcatacggctcgg

SEQ ID NO: 98961 - DNA, 17 bp, Arabidopsis thaliana
gatatccgccaccacct

SEQ ID NO: 98962 - DNA, 17 bp, Arabidopsis thaliana
gatatccgcttcgtgcc

SEQ ID NO: 98963 - DNA, 17 bp, Arabidopsis thaliana
gatatccggaggaccga

SEQ ID NO: 98964 - DNA, 17 bp, Arabidopsis thaliana
gatatccgtcgacttgg

SEQ ID NO: 98965 - DNA, 17 bp, Arabidopsis thaliana
gatatccgtctcactcc

SEQ ID NO: 98966 - DNA, 17 bp, Arabidopsis thaliana
gatatcctctgattggt

SEQ ID NO: 98967 - DNA, 17 bp, Arabidopsis thaliana
gatatcctctgcctttc

SEQ ID NO: 98968 - DNA, 17 bp, Arabidopsis thaliana
gatatcgaatggagttt

SEQ ID NO: 98969 - DNA, 17 bp, Arabidopsis thaliana
gatatcggatatcttag

SEQ ID NO: 98970 - DNA, 17 bp, Arabidopsis thaliana
gatatcggccatggtac

SEQ ID NO: 98971 - DNA, 17 bp, Arabidopsis thaliana
gatatcgggaggcaccc

SEQ ID NO: 98972 - DNA, 17 bp, Arabidopsis thaliana
gatatcgtttgctcgtc

SEQ ID NO: 98973 - DNA, 17 bp, Arabidopsis thaliana
gatatctacccatgtgt

SEQ ID NO: 98974 - DNA, 17 bp, Arabidopsis thaliana
gatatctagcggcttct

SEQ ID NO: 98975 - DNA, 17 bp, Arabidopsis thaliana
gatatctctgctccggt

SEQ ID NO: 98976 - DNA, 17 bp, Arabidopsis thaliana
gatatctctggggattg

SEQ ID NO: 98977 - DNA, 17 bp, Arabidopsis thaliana
gatatctgcttcgtgcc

SEQ ID NO: 98978 - DNA, 17 bp, Arabidopsis thaliana
gatatctgtttcgtacc

SEQ ID NO: 98979 - DNA, 17 bp, Arabidopsis thaliana
gatatgaaagacacaga

SEQ ID NO: 98980 - DNA, 17 bp, Arabidopsis thaliana
gatatgaaagacacagg

SEQ ID NO: 98981 - DNA, 17 bp, Arabidopsis thaliana
gatatgaaccgtccaac

SEQ ID NO: 98982 - DNA, 17 bp, Arabidopsis thaliana
gatatgaacttctccac

SEQ ID NO: 98983 - DNA, 17 bp, Arabidopsis thaliana
gatatgacaggtttgca

SEQ ID NO: 98984 - DNA, 17 bp, Arabidopsis thaliana
gatatgagcagcccatg

SEQ ID NO: 98985 - DNA, 17 bp, Arabidopsis thaliana
gatatgccgctcagatt

SEQ ID NO: 98986 - DNA, 17 bp, Arabidopsis thaliana
gatatgcgcggtttgaa

SEQ ID NO: 98987 - DNA, 17 bp, Arabidopsis thaliana
gatatggccttttctaa

SEQ ID NO: 98988 - DNA, 17 bp, Arabidopsis thaliana
gatatggctcatgtttc

SEQ ID NO: 98989 - DNA, 17 bp, Arabidopsis thaliana
gatatgggcctctccac

SEQ ID NO: 98990 - DNA, 17 bp, Arabidopsis thaliana
gatatgtaccatcattt

SEQ ID NO: 98991 - DNA, 17 bp, Arabidopsis thaliana
gatatgtcccacggtat

SEQ ID NO: 98992 - DNA, 17 bp, Arabidopsis thaliana
gatatgtcctaaatggc

SEQ ID NO: 98993 - DNA, 17 bp, Arabidopsis thaliana
gatatgtcgagtaggca

SEQ ID NO: 98994 - DNA, 17 bp, Arabidopsis thaliana
gatatgtcgtccagcgt

SEQ ID NO: 98995 - DNA, 17 bp, Arabidopsis thaliana
gatatgtctaatgtctc

SEQ ID NO: 98996 - DNA, 17 bp, Arabidopsis thaliana
gatatgtctggaaccgc

SEQ ID NO: 98997 - DNA, 17 bp, Arabidopsis thaliana
gatatgtggctctatcc

SEQ ID NO: 98998 - DNA, 17 bp, Arabidopsis thaliana
gatatgtggcttcatcc

SEQ ID NO: 98999 - DNA, 17 bp, Arabidopsis thaliana
gatatgtggttagacgg

SEQ ID NO: 99000 - DNA, 17 bp, Arabidopsis thaliana
gatatgttgagtctccg

SEQ ID NO: 99001 - DNA, 17 bp, Arabidopsis thaliana
gatattaagcaaggttc

SEQ ID NO: 99002 - DNA, 17 bp, Arabidopsis thaliana
gatattacaggctttgc

SEQ ID NO: 99003 - DNA, 17 bp, Arabidopsis thaliana
gatattacggttttgac

SEQ ID NO: 99004 - DNA, 17 bp, Arabidopsis thaliana
gatattagcaggcctac

SEQ ID NO: 99005 - DNA, 17 bp, Arabidopsis thaliana
gatattcacggaaaaac

SEQ ID NO: 99006 - DNA, 17 bp, Arabidopsis thaliana
gatattccacggtgtta

SEQ ID NO: 99007 - DNA, 17 bp, Arabidopsis thaliana
gatattccgatggagat

SEQ ID NO: 99008 - DNA, 17 bp, Arabidopsis thaliana
gatattctgacggattt

SEQ ID NO: 99009 - DNA, 17 bp, Arabidopsis thaliana
gatattcttcgtaaccc

SEQ ID NO: 99010 - DNA, 17 bp, Arabidopsis thaliana
gatattgacccgcggtt

SEQ ID NO: 99011 - DNA, 17 bp, Arabidopsis thaliana
gatattgacctgcaggc

SEQ ID NO: 99012 - DNA, 17 bp, Arabidopsis thaliana
gatattgctgttgcggc

SEQ ID NO: 99013 - DNA, 17 bp, Arabidopsis thaliana
gatattggcctaccatg

SEQ ID NO: 99014 - DNA, 17 bp, Arabidopsis thaliana
gatattggctaagtcaa

SEQ ID NO: 99015 - DNA, 17 bp, Arabidopsis thaliana
gatattggtccgtgaca

SEQ ID NO: 99016 - DNA, 17 bp, Arabidopsis thaliana
gatattgtctcatggat

SEQ ID NO: 99017 - DNA, 17 bp, Arabidopsis thaliana
gatattgtgttccttag

SEQ ID NO: 99018 - DNA, 17 bp, Arabidopsis thaliana
gatatttccattgctgg

SEQ ID NO: 99019 - DNA, 17 bp, Arabidopsis thaliana
gatatttcgctcaaggt

SEQ ID NO: 99020 - DNA, 17 bp, Arabidopsis thaliana
gatatttgccaaggatg

SEQ ID NO: 99021 - DNA, 17 bp, Arabidopsis thaliana
gatatttgtcccgttgt

SEQ ID NO: 99022 - DNA, 17 bp, Arabidopsis thaliana
gatattttccaagactg

SEQ ID NO: 99023 - DNA, 17 bp, Arabidopsis thaliana
gatattttctgccatga

SEQ ID NO: 99024 - DNA, 17 bp, Arabidopsis thaliana
gatcaaaagactggaca

SEQ ID NO: 99025 - DNA, 17 bp, Arabidopsis thaliana
gatcaaaatcccttgtc

SEQ ID NO: 99026 - DNA, 17 bp, Arabidopsis thaliana
gatcaaacatcctgtag

SEQ ID NO: 99027 - DNA, 17 bp, Arabidopsis thaliana
gatcaaacgatattgct

SEQ ID NO: 99028 - DNA, 17 bp, Arabidopsis thaliana
gatcaaacgccttgcac

SEQ ID NO: 99029 - DNA, 17 bp, Arabidopsis thaliana
gatcaaacggaattagc

SEQ ID NO: 99030 - DNA, 17 bp, Arabidopsis thaliana
gatcaaacgtatcaggc

SEQ ID NO: 99031 - DNA, 17 bp, Arabidopsis thaliana
gatcaaactgttcagac

SEQ ID NO: 99032 - DNA, 17 bp, Arabidopsis thaliana
gatcaaagaccgtctgc

SEQ ID NO: 99033 - DNA, 17 bp, Arabidopsis thaliana
gatcaaagactccgctg

SEQ ID NO: 99034 - DNA, 17 bp, Arabidopsis thaliana
gatcaaatagacgatcg

SEQ ID NO: 99035 - DNA, 17 bp, Arabidopsis thaliana
gatcaaatgtgactgtg

SEQ ID NO: 99036 - DNA, 17 bp, Arabidopsis thaliana
gatcaaattcaccgttt

SEQ ID NO: 99037 - DNA, 17 bp, Arabidopsis thaliana
gatcaacaaacgttggc

SEQ ID NO: 99038 - DNA, 17 bp, Arabidopsis thaliana
gatcaacactcaggggt

SEQ ID NO: 99039 - DNA, 17 bp, Arabidopsis thaliana
gatcaaccaccccacag

SEQ ID NO: 99040 - DNA, 17 bp, Arabidopsis thaliana
gatcaaccattgaacca

SEQ ID NO: 99041 - DNA, 17 bp, Arabidopsis thaliana
gatcaaccggtgccaga

SEQ ID NO: 99042 - DNA, 17 bp, Arabidopsis thaliana
gatcaaccggtgcggat

SEQ ID NO: 99043 - DNA, 17 bp, Arabidopsis thaliana
gatcaacctatgcgatt

SEQ ID NO: 99044 - DNA, 17 bp, Arabidopsis thaliana
gatcaacggataagctt

SEQ ID NO: 99045 - DNA, 17 bp, Arabidopsis thaliana
gatcaacggctactgtg

SEQ ID NO: 99046 - DNA, 17 bp, Arabidopsis thaliana
gatcaactgattgtggc

SEQ ID NO: 99047 - DNA, 17 bp, Arabidopsis thaliana
gatcaactttggctgct

SEQ ID NO: 99048 - DNA, 17 bp, Arabidopsis thaliana
gatcaagaaatgtgtca

SEQ ID NO: 99049 - DNA, 17 bp, Arabidopsis thaliana
gatcaagacgctggaat

SEQ ID NO: 99050 - DNA, 17 bp, Arabidopsis thaliana
gatcaagacttcaggaa

SEQ ID NO: 99051 - DNA, 17 bp, Arabidopsis thaliana
gatcaagaggaaaatca

SEQ ID NO: 99052 - DNA, 17 bp, Arabidopsis thaliana
gatcaagccattcgtag

SEQ ID NO: 99053 - DNA, 17 bp, Arabidopsis thaliana
gatcaagcccgttcaag

SEQ ID NO: 99054 - DNA, 17 bp, Arabidopsis thaliana
gatcaagcggattaggt

SEQ ID NO: 99055 - DNA, 17 bp, Arabidopsis thaliana
gatcaagcggtgcggat

SEQ ID NO: 99056 - DNA, 17 bp, Arabidopsis thaliana
gatcaagcggttatggc

SEQ ID NO: 99057 - DNA, 17 bp, Arabidopsis thaliana
gatcaagcggttatggt

SEQ ID NO: 99058 - DNA, 17 bp, Arabidopsis thaliana
gatcaaggcaattgcga

SEQ ID NO: 99059 - DNA, 17 bp, Arabidopsis thaliana
gatcaagtacctagcgg

SEQ ID NO: 99060 - DNA, 17 bp, Arabidopsis thaliana
gatcaagtgagtgtagc

SEQ ID NO: 99061 - DNA, 17 bp, Arabidopsis thaliana
gatcaagttgcggttta

SEQ ID NO: 99062 - DNA, 17 bp, Arabidopsis thaliana
gatcaatcaaagaacag

SEQ ID NO: 99063 - DNA, 17 bp, Arabidopsis thaliana
gatcaatcacgacctgg

SEQ ID NO: 99064 - DNA, 17 bp, Arabidopsis thaliana
gatcaatcgtctcagtc

SEQ ID NO: 99065 - DNA, 17 bp, Arabidopsis thaliana
gatcaatctctaaagcc

SEQ ID NO: 99066 - DNA, 17 bp, Arabidopsis thaliana
gatcaatggatctgcaa

SEQ ID NO: 99067 - DNA, 17 bp, Arabidopsis thaliana
gatcaatgtttactaac

SEQ ID NO: 99068 - DNA, 17 bp, Arabidopsis thaliana
gatcaatttggtatccg

SEQ ID NO: 99069 - DNA, 17 bp, Arabidopsis thaliana
gatcacaaatgcaaatg

SEQ ID NO: 99070 - DNA, 17 bp, Arabidopsis thaliana
gatcacaacaccaggct

SEQ ID NO: 99071 - DNA, 17 bp, Arabidopsis thaliana
gatcacaatgtgccaga

SEQ ID NO: 99072 - DNA, 17 bp, Arabidopsis thaliana
gatcacactcggactct

SEQ ID NO: 99073 - DNA, 17 bp, Arabidopsis thaliana
gatcacacttgtcgtcg

SEQ ID NO: 99074 - DNA, 17 bp, Arabidopsis thaliana
gatcacaggactccgga

SEQ ID NO: 99075 - DNA, 17 bp, Arabidopsis thaliana
gatcacaggacttcgga

SEQ ID NO: 99076 - DNA, 17 bp, Arabidopsis thaliana
gatcacaggtggtgcat

SEQ ID NO: 99077 - DNA, 17 bp, Arabidopsis thaliana
gatcaccaggagagatt

SEQ ID NO: 99078 - DNA, 17 bp, Arabidopsis thaliana
gatcaccatcaactata

SEQ ID NO: 99079 - DNA, 17 bp, Arabidopsis thaliana
gatcaccatctttcggc

SEQ ID NO: 99080 - DNA, 17 bp, Arabidopsis thaliana
gatcaccattgctgctg

SEQ ID NO: 99081 - DNA, 17 bp, Arabidopsis thaliana
gatcacccatcatcgat

SEQ ID NO: 99082 - DNA, 17 bp, Arabidopsis thaliana
gatcaccgcttgcttgt

SEQ ID NO: 99083 - DNA, 17 bp, Arabidopsis thaliana
gatcaccgttcgcttag

SEQ ID NO: 99084 - DNA, 17 bp, Arabidopsis thaliana
gatcacggccagcgact

SEQ ID NO: 99085 - DNA, 17 bp, Arabidopsis thaliana
gatcacggctcaagagg

SEQ ID NO: 99086 - DNA, 17 bp, Arabidopsis thaliana
gatcacggtctttcata

SEQ ID NO: 99087 - DNA, 17 bp, Arabidopsis thaliana
gatcacggtttggcgtc

SEQ ID NO: 99088 - DNA, 17 bp, Arabidopsis thaliana
gatcacgtcgtctatgg

SEQ ID NO: 99089 - DNA, 17 bp, Arabidopsis thaliana
gatcacgtctgcctggg

SEQ ID NO: 99090 - DNA, 17 bp, Arabidopsis thaliana
gatcacgttcgcagttt

SEQ ID NO: 99091 - DNA, 17 bp, Arabidopsis thaliana
gatcactcgactgcggt

SEQ ID NO: 99092 - DNA, 17 bp, Arabidopsis thaliana
gatcactcgtctcagtc

SEQ ID NO: 99093 - DNA, 17 bp, Arabidopsis thaliana
gatcactcttggttggt

SEQ ID NO: 99094 - DNA, 17 bp, Arabidopsis thaliana
gatcactgcaggttcga

SEQ ID NO: 99095 - DNA, 17 bp, Arabidopsis thaliana
gatcactgctctatctg

SEQ ID NO: 99096 - DNA, 17 bp, Arabidopsis thaliana
gatcactgtgatcctag

SEQ ID NO: 99097 - DNA, 17 bp, Arabidopsis thaliana
gatcactgtgcacatgt

SEQ ID NO: 99098 - DNA, 17 bp, Arabidopsis thaliana
gatcactgtgtggtcag

SEQ ID NO: 99099 - DNA, 17 bp, Arabidopsis thaliana
gatcactgtgtggtctg

SEQ ID NO: 99100 - DNA, 17 bp, Arabidopsis thaliana
gatcacttaaaccgcaa

SEQ ID NO: 99101 - DNA, 17 bp, Arabidopsis thaliana
gatcacttagtcgctcc

SEQ ID NO: 99102 - DNA, 17 bp, Arabidopsis thaliana
gatcacttgattcatcg

SEQ ID NO: 99103 - DNA, 17 bp, Arabidopsis thaliana
gatcacttgcttctcag

SEQ ID NO: 99104 - DNA, 17 bp, Arabidopsis thaliana
gatcactttggaagtaa

SEQ ID NO: 99105 - DNA, 17 bp, Arabidopsis thaliana
gatcactttgtctcttc

SEQ ID NO: 99106 - DNA, 17 bp, Arabidopsis thaliana
gatcactttgttgtgct

SEQ ID NO: 99107 - DNA, 17 bp, Arabidopsis thaliana
gatcacttttttgcctc

SEQ ID NO: 99108 - DNA, 17 bp, Arabidopsis thaliana
gatcagaacctcgtcgc

SEQ ID NO: 99109 - DNA, 17 bp, Arabidopsis thaliana
gatcagaaggttgcgtg

SEQ ID NO: 99110 - DNA, 17 bp, Arabidopsis thaliana
gatcagaatctattggg

SEQ ID NO: 99111 - DNA, 17 bp, Arabidopsis thaliana
gatcagaatttgtgcgc

SEQ ID NO: 99112 - DNA, 17 bp, Arabidopsis thaliana
gatcagacaggtaatca

SEQ ID NO: 99113 - DNA, 17 bp, Arabidopsis thaliana
gatcagacggtgtagat

SEQ ID NO: 99114 - DNA, 17 bp, Arabidopsis thaliana
gatcagactaatcggat

SEQ ID NO: 99115 - DNA, 17 bp, Arabidopsis thaliana
gatcagactccggcgat

SEQ ID NO: 99116 - DNA, 17 bp, Arabidopsis thaliana
gatcagacttagcccga

SEQ ID NO: 99117 - DNA, 17 bp, Arabidopsis thaliana
gatcagagacttcacgc

SEQ ID NO: 99118 - DNA, 17 bp, Arabidopsis thaliana
gatcagagtaagaacct

SEQ ID NO: 99119 - DNA, 17 bp, Arabidopsis thaliana
gatcagataccgtccta

SEQ ID NO: 99120 - DNA, 17 bp, Arabidopsis thaliana
gatcagatcagctgata

SEQ ID NO: 99121 - DNA, 17 bp, Arabidopsis thaliana
gatcagatcggccagac

SEQ ID NO: 99122 - DNA, 17 bp, Arabidopsis thaliana
gatcagatcgttgatgg

SEQ ID NO: 99123 - DNA, 17 bp, Arabidopsis thaliana
gatcagatcttgttcag

SEQ ID NO: 99124 - DNA, 17 bp, Arabidopsis thaliana
gatcagcaacaggagga

SEQ ID NO: 99125 - DNA, 17 bp, Arabidopsis thaliana
gatcagccacactggga

SEQ ID NO: 99126 - DNA, 17 bp, Arabidopsis thaliana
gatcagccctttgtcgc

SEQ ID NO: 99127 - DNA, 17 bp, Arabidopsis thaliana
gatcagccgatagggta

SEQ ID NO: 99128 - DNA, 17 bp, Arabidopsis thaliana
gatcagccgctgccaac

SEQ ID NO: 99129 - DNA, 17 bp, Arabidopsis thaliana
gatcagcctcggtagaa

SEQ ID NO: 99130 - DNA, 17 bp, Arabidopsis thaliana
gatcagcgacagcaacc

SEQ ID NO: 99131 - DNA, 17 bp, Arabidopsis thaliana
gatcagcgaccccaggt

SEQ ID NO: 99132 - DNA, 17 bp, Arabidopsis thaliana
gatcagcgaccgcaatt

SEQ ID NO: 99133 - DNA, 17 bp, Arabidopsis thaliana
gatcagcggatgttgct

SEQ ID NO: 99134 - DNA, 17 bp, Arabidopsis thaliana
gatcagcgggtacgata

SEQ ID NO: 99135 - DNA, 17 bp, Arabidopsis thaliana
gatcagctgctaagcta

SEQ ID NO: 99136 - DNA, 17 bp, Arabidopsis thaliana
gatcagcttccttgagt

SEQ ID NO: 99137 - DNA, 17 bp, Arabidopsis thaliana
gatcaggaaagatctct

SEQ ID NO: 99138 - DNA, 17 bp, Arabidopsis thaliana
gatcaggaatgtggtca

SEQ ID NO: 99139 - DNA, 17 bp, Arabidopsis thaliana
gatcaggactatcgttt

SEQ ID NO: 99140 - DNA, 17 bp, Arabidopsis thaliana
gatcaggatctcaaact

SEQ ID NO: 99141 - DNA, 17 bp, Arabidopsis thaliana
gatcaggcaaggtctca

SEQ ID NO: 99142 - DNA, 17 bp, Arabidopsis thaliana
gatcaggcattgttcca

SEQ ID NO: 99143 - DNA, 17 bp, Arabidopsis thaliana
gatcaggccgaaaggcg

SEQ ID NO: 99144 - DNA, 17 bp, Arabidopsis thaliana
gatcaggccgagactct

SEQ ID NO: 99145 - DNA, 17 bp, Arabidopsis thaliana
gatcaggctgttaacgt

SEQ ID NO: 99146 - DNA, 17 bp, Arabidopsis thaliana
gatcagggatgtcctag

SEQ ID NO: 99147 - DNA, 17 bp, Arabidopsis thaliana
gatcagggctctcttga

SEQ ID NO: 99148 - DNA, 17 bp, Arabidopsis thaliana
gatcagggcttgactgg

SEQ ID NO: 99149 - DNA, 17 bp, Arabidopsis thaliana
gatcaggtctgcttctt

SEQ ID NO: 99150 - DNA, 17 bp, Arabidopsis thaliana
gatcaggttgggcagct

SEQ ID NO: 99151 - DNA, 17 bp, Arabidopsis thaliana
gatcagtcagttccagg

SEQ ID NO: 99152 - DNA, 17 bp, Arabidopsis thaliana
gatcagtccctggtttc

SEQ ID NO: 99153 - DNA, 17 bp, Arabidopsis thaliana
gatcagtcgcatcctgt

SEQ ID NO: 99154 - DNA, 17 bp, Arabidopsis thaliana
gatcagtcgctgctttc

SEQ ID NO: 99155 - DNA, 17 bp, Arabidopsis thaliana
gatcagtgtgtgtccct

SEQ ID NO: 99156 - DNA, 17 bp, Arabidopsis thaliana
gatcagttatttgctca

SEQ ID NO: 99157 - DNA, 17 bp, Arabidopsis thaliana
gatcagttccggtttgg

SEQ ID NO: 99158 - DNA, 17 bp, Arabidopsis thaliana
gatcagttcttcgggtt

SEQ ID NO: 99159 - DNA, 17 bp, Arabidopsis thaliana
gatcagttggatggatc

SEQ ID NO: 99160 - DNA, 17 bp, Arabidopsis thaliana
gatcagtttagattttt

SEQ ID NO: 99161 - DNA, 17 bp, Arabidopsis thaliana
gatcataattgacacgg

SEQ ID NO: 99162 - DNA, 17 bp, Arabidopsis thaliana
gatcataccagcactaa

SEQ ID NO: 99163 - DNA, 17 bp, Arabidopsis thaliana
gatcatagcccaagtcc

SEQ ID NO: 99164 - DNA, 17 bp, Arabidopsis thaliana
gatcatatcctgtagat

SEQ ID NO: 99165 - DNA, 17 bp, Arabidopsis thaliana
gatcatatctcaccagg

SEQ ID NO: 99166 - DNA, 17 bp, Arabidopsis thaliana
gatcatatctcatctgt

SEQ ID NO: 99167 - DNA, 17 bp, Arabidopsis thaliana
gatcatatggactggac

SEQ ID NO: 99168 - DNA, 17 bp, Arabidopsis thaliana
gatcatatttccgtcac

SEQ ID NO: 99169 - DNA, 17 bp, Arabidopsis thaliana
gatcatcaggttctctc

SEQ ID NO: 99170 - DNA, 17 bp, Arabidopsis thaliana
gatcatccgcactattg

SEQ ID NO: 99171 - DNA, 17 bp, Arabidopsis thaliana
gatcatccttccagagc

SEQ ID NO: 99172 - DNA, 17 bp, Arabidopsis thaliana
gatcatcgaaaggagaa

SEQ ID NO: 99173 - DNA, 17 bp, Arabidopsis thaliana
gatcatcgattagatgt

SEQ ID NO: 99174 - DNA, 17 bp, Arabidopsis thaliana
gatcatcgcaaggttga

SEQ ID NO: 99175 - DNA, 17 bp, Arabidopsis thaliana
gatcatcgccgaaagtg

SEQ ID NO: 99176 - DNA, 17 bp, Arabidopsis thaliana
gatcatcggaggttcaa

SEQ ID NO: 99177 - DNA, 17 bp, Arabidopsis thaliana
gatcatcggatgttgct

SEQ ID NO: 99178 - DNA, 17 bp, Arabidopsis thaliana
gatcatcggattcgaca

SEQ ID NO: 99179 - DNA, 17 bp, Arabidopsis thaliana
gatcatctccattggaa

SEQ ID NO: 99180 - DNA, 17 bp, Arabidopsis thaliana
gatcatctctgcataca

SEQ ID NO: 99181 - DNA, 17 bp, Arabidopsis thaliana
gatcatctggatgatac

SEQ ID NO: 99182 - DNA, 17 bp, Arabidopsis thaliana
gatcatctggttcttgg

SEQ ID NO: 99183 - DNA, 17 bp, Arabidopsis thaliana
gatcatgaattagtaac

SEQ ID NO: 99184 - DNA, 17 bp, Arabidopsis thaliana
gatcatgctggcagcct

SEQ ID NO: 99185 - DNA, 17 bp, Arabidopsis thaliana
gatcatgctggcagctt

SEQ ID NO: 99186 - DNA, 17 bp, Arabidopsis thaliana
gatcatgctggcaggtt

SEQ ID NO: 99187 - DNA, 17 bp, Arabidopsis thaliana
gatcatgttcgcagtct

SEQ ID NO: 99188 - DNA, 17 bp, Arabidopsis thaliana
gatcatgttcgcagtta

SEQ ID NO: 99189 - DNA, 17 bp, Arabidopsis thaliana
gatcatgttcgcagttt

SEQ ID NO: 99190 - DNA, 17 bp, Arabidopsis thaliana
gatcattagactgtgcc

SEQ ID NO: 99191 - DNA, 17 bp, Arabidopsis thaliana
gatcattcaacttagca

SEQ ID NO: 99192 - DNA, 17 bp, Arabidopsis thaliana
gatcattcgtctcagtc

SEQ ID NO: 99193 - DNA, 17 bp, Arabidopsis thaliana
gatcattgcaaacagcc

SEQ ID NO: 99194 - DNA, 17 bp, Arabidopsis thaliana
gatcattggaaaagtag

SEQ ID NO: 99195 - DNA, 17 bp, Arabidopsis thaliana
gatcattggctcgggca

SEQ ID NO: 99196 - DNA, 17 bp, Arabidopsis thaliana
gatcattggtcggcttg

SEQ ID NO: 99197 - DNA, 17 bp, Arabidopsis thaliana
gatcattgtcttaggcg

SEQ ID NO: 99198 - DNA, 17 bp, Arabidopsis thaliana
gatcatttcaatggtgt

SEQ ID NO: 99199 - DNA, 17 bp, Arabidopsis thaliana
gatcatttgcgccgata

SEQ ID NO: 99200 - DNA, 17 bp, Arabidopsis thaliana
gatcatttgcgccgatg

SEQ ID NO: 99201 - DNA, 17 bp, Arabidopsis thaliana
gatcattttgactttgg

SEQ ID NO: 99202 - DNA, 17 bp, Arabidopsis thaliana
gatccaaagacccatac

SEQ ID NO: 99203 - DNA, 17 bp, Arabidopsis thaliana
gatccaaaggtcctaca

SEQ ID NO: 99204 - DNA, 17 bp, Arabidopsis thaliana
gatccaaccaatgaata

SEQ ID NO: 99205 - DNA, 17 bp, Arabidopsis thaliana
gatccaactgaagatcg

SEQ ID NO: 99206 - DNA, 17 bp, Arabidopsis thaliana
gatccaagaagtggtat

SEQ ID NO: 99207 - DNA, 17 bp, Arabidopsis thaliana
gatccaagacgagtctc

SEQ ID NO: 99208 - DNA, 17 bp, Arabidopsis thaliana
gatccaagccgatgtcc

SEQ ID NO: 99209 - DNA, 17 bp, Arabidopsis thaliana
gatccaaggatgacttg

SEQ ID NO: 99210 - DNA, 17 bp, Arabidopsis thaliana
gatccaaggtgcttctc

SEQ ID NO: 99211 - DNA, 17 bp, Arabidopsis thaliana
gatccaagtggtagtat

SEQ ID NO: 99212 - DNA, 17 bp, Arabidopsis thaliana
gatccacaagatctgtg

SEQ ID NO: 99213 - DNA, 17 bp, Arabidopsis thaliana
gatccacagaactgtag

SEQ ID NO: 99214 - DNA, 17 bp, Arabidopsis thaliana
gatccacaggtttgttt

SEQ ID NO: 99215 - DNA, 17 bp, Arabidopsis thaliana
gatccacagtcgaaatg

SEQ ID NO: 99216 - DNA, 17 bp, Arabidopsis thaliana
gatccacagttaccagt

SEQ ID NO: 99217 - DNA, 17 bp, Arabidopsis thaliana
gatccacatactcctgg

SEQ ID NO: 99218 - DNA, 17 bp, Arabidopsis thaliana
gatccacctgtctgaaa

SEQ ID NO: 99219 - DNA, 17 bp, Arabidopsis thaliana
gatccacgacagacgac

SEQ ID NO: 99220 - DNA, 17 bp, Arabidopsis thaliana
gatccactgagattcag

SEQ ID NO: 99221 - DNA, 17 bp, Arabidopsis thaliana
gatccagaaggtaatcc

SEQ ID NO: 99222 - DNA, 17 bp, Arabidopsis thaliana
gatccagacgcggcttc

SEQ ID NO: 99223 - DNA, 17 bp, Arabidopsis thaliana
gatccagatcctcctag

SEQ ID NO: 99224 - DNA, 17 bp, Arabidopsis thaliana
gatccagcgggttggcc

SEQ ID NO: 99225 - DNA, 17 bp, Arabidopsis thaliana
gatccaggcagctacag

SEQ ID NO: 99226 - DNA, 17 bp, Arabidopsis thaliana
gatccaggcctcgatga

SEQ ID NO: 99227 - DNA, 17 bp, Arabidopsis thaliana
gatccagtatgtgtgtc

SEQ ID NO: 99228 - DNA, 17 bp, Arabidopsis thaliana
gatccagttgcgattta

SEQ ID NO: 99229 - DNA, 17 bp, Arabidopsis thaliana
gatccagtttgtgtgcg

SEQ ID NO: 99230 - DNA, 17 bp, Arabidopsis thaliana
gatccatatgtactgtg

SEQ ID NO: 99231 - DNA, 17 bp, Arabidopsis thaliana
gatccatcagaacatag

SEQ ID NO: 99232 - DNA, 17 bp, Arabidopsis thaliana
gatccatccaaaactgc

SEQ ID NO: 99233 - DNA, 17 bp, Arabidopsis thaliana
gatccatccattgggat

SEQ ID NO: 99234 - DNA, 17 bp, Arabidopsis thaliana
gatccatctacaggatg

SEQ ID NO: 99235 - DNA, 17 bp, Arabidopsis thaliana
gatccatgggtataggt

SEQ ID NO: 99236 - DNA, 17 bp, Arabidopsis thaliana
gatccatgtaagtctta

SEQ ID NO: 99237 - DNA, 17 bp, Arabidopsis thaliana
gatccattggagggcaa

SEQ ID NO: 99238 - DNA, 17 bp, Arabidopsis thaliana
gatcccaaaacccagcc

SEQ ID NO: 99239 - DNA, 17 bp, Arabidopsis thaliana
gatcccaagcattcccg

SEQ ID NO: 99240 - DNA, 17 bp, Arabidopsis thaliana
gatcccagggcagagtg

SEQ ID NO: 99241 - DNA, 17 bp, Arabidopsis thaliana
gatcccatagcggagtg

SEQ ID NO: 99242 - DNA, 17 bp, Arabidopsis thaliana
gatcccatcatctaagc

SEQ ID NO: 99243 - DNA, 17 bp, Arabidopsis thaliana
gatcccatctgtgtaat

SEQ ID NO: 99244 - DNA, 17 bp, Arabidopsis thaliana
gatcccatctttaacgc

SEQ ID NO: 99245 - DNA, 17 bp, Arabidopsis thaliana
gatcccatgttatttaa

SEQ ID NO: 99246 - DNA, 17 bp, Arabidopsis thaliana
gatccccggcaacggcg

SEQ ID NO: 99247 - DNA, 17 bp, Arabidopsis thaliana
gatccccgtcgtgcccg

SEQ ID NO: 99248 - DNA, 17 bp, Arabidopsis thaliana
gatcccgaccttagctc

SEQ ID NO: 99249 - DNA, 17 bp, Arabidopsis thaliana
gatcccgacgagacttt

SEQ ID NO: 99250 - DNA, 17 bp, Arabidopsis thaliana
gatcccgacgcggatta

SEQ ID NO: 99251 - DNA, 17 bp, Arabidopsis thaliana
gatcccgagttaggacc

SEQ ID NO: 99252 - DNA, 17 bp, Arabidopsis thaliana
gatcccgccttgcatca

SEQ ID NO: 99253 - DNA, 17 bp, Arabidopsis thaliana
gatcccgctcgttgtgt

SEQ ID NO: 99254 - DNA, 17 bp, Arabidopsis thaliana
gatcccgctttctctgg

SEQ ID NO: 99255 - DNA, 17 bp, Arabidopsis thaliana
gatcccgcttttaccac

SEQ ID NO: 99256 - DNA, 17 bp, Arabidopsis thaliana
gatcccggaaactaagc

SEQ ID NO: 99257 - DNA, 17 bp, Arabidopsis thaliana
gatcccggagatctcgt

SEQ ID NO: 99258 - DNA, 17 bp, Arabidopsis thaliana
gatcccggtcgtttact

SEQ ID NO: 99259 - DNA, 17 bp, Arabidopsis thaliana
gatcccgtagctcagtt

SEQ ID NO: 99260 - DNA, 17 bp, Arabidopsis thaliana
gatcccgtatcaacggg

SEQ ID NO: 99261 - DNA, 17 bp, Arabidopsis thaliana
gatcccgtcgtgcccgg

SEQ ID NO: 99262 - DNA, 17 bp, Arabidopsis thaliana
gatccctatcggacact

SEQ ID NO: 99263 - DNA, 17 bp, Arabidopsis thaliana
gatccctcctgtagatg

SEQ ID NO: 99264 - DNA, 17 bp, Arabidopsis thaliana
gatccctgcgtcgacct

SEQ ID NO: 99265 - DNA, 17 bp, Arabidopsis thaliana
gatccctggtcggcatc

SEQ ID NO: 99266 - DNA, 17 bp, Arabidopsis thaliana
gatccctggtttaattg

SEQ ID NO: 99267 - DNA, 17 bp, Arabidopsis thaliana
gatcccttaacagagtc

SEQ ID NO: 99268 - DNA, 17 bp, Arabidopsis thaliana
gatcccttgatcttagg

SEQ ID NO: 99269 - DNA, 17 bp, Arabidopsis thaliana
gatccgaaaccgttccg

SEQ ID NO: 99270 - DNA, 17 bp, Arabidopsis thaliana
gatccgaacggtgactg

SEQ ID NO: 99271 - DNA, 17 bp, Arabidopsis thaliana
gatccgaagacgctttg

SEQ ID NO: 99272 - DNA, 17 bp, Arabidopsis thaliana
gatccgaccatcgtttc

SEQ ID NO: 99273 - DNA, 17 bp, Arabidopsis thaliana
gatccgacggtccataa

SEQ ID NO: 99274 - DNA, 17 bp, Arabidopsis thaliana
gatccgacggtgccgag

SEQ ID NO: 99275 - DNA, 17 bp, Arabidopsis thaliana
gatccgactattttcat

SEQ ID NO: 99276 - DNA, 17 bp, Arabidopsis thaliana
gatccgagcggagatga

SEQ ID NO: 99277 - DNA, 17 bp, Arabidopsis thaliana
gatccgatccgtccgac

SEQ ID NO: 99278 - DNA, 17 bp, Arabidopsis thaliana
gatccgatcttcttcgt

SEQ ID NO: 99279 - DNA, 17 bp, Arabidopsis thaliana
gatccgattaagtttga

SEQ ID NO: 99280 - DNA, 17 bp, Arabidopsis thaliana
gatccgattcaatctaa

SEQ ID NO: 99281 - DNA, 17 bp, Arabidopsis thaliana
gatccgattgcgcttca

SEQ ID NO: 99282 - DNA, 17 bp, Arabidopsis thaliana
gatccgcaacggaccag

SEQ ID NO: 99283 - DNA, 17 bp, Arabidopsis thaliana
gatccgcaacttcggga

SEQ ID NO: 99284 - DNA, 17 bp, Arabidopsis thaliana
gatccgcacatactcaa

SEQ ID NO: 99285 - DNA, 17 bp, Arabidopsis thaliana
gatccgcacatactcac

SEQ ID NO: 99286 - DNA, 17 bp, Arabidopsis thaliana
gatccgcacctaaacgc

SEQ ID NO: 99287 - DNA, 17 bp, Arabidopsis thaliana
gatccgcagttcccaac

SEQ ID NO: 99288 - DNA, 17 bp, Arabidopsis thaliana
gatccgcatcctgtaga

SEQ ID NO: 99289 - DNA, 17 bp, Arabidopsis thaliana
gatccgccactgtctgg

SEQ ID NO: 99290 - DNA, 17 bp, Arabidopsis thaliana
gatccgcgcgtaaatct

SEQ ID NO: 99291 - DNA, 17 bp, Arabidopsis thaliana
gatccgcgcgtgccacg

SEQ ID NO: 99292 - DNA, 17 bp, Arabidopsis thaliana
gatccgcgcgtttctaa

SEQ ID NO: 99293 - DNA, 17 bp, Arabidopsis thaliana
gatccgctcttaagatc

SEQ ID NO: 99294 - DNA, 17 bp, Arabidopsis thaliana
gatccgctcttgttccg

SEQ ID NO: 99295 - DNA, 17 bp, Arabidopsis thaliana
gatccgctggagcaaac

SEQ ID NO: 99296 - DNA, 17 bp, Arabidopsis thaliana
gatccgtaacatttggt

SEQ ID NO: 99297 - DNA, 17 bp, Arabidopsis thaliana
gatccgtaacttcggga

SEQ ID NO: 99298 - DNA, 17 bp, Arabidopsis thaliana
gatccgtaatatagccc

SEQ ID NO: 99299 - DNA, 17 bp, Arabidopsis thaliana
gatccgtacatactcaa

SEQ ID NO: 99300 - DNA, 17 bp, Arabidopsis thaliana
gatccgtccactgctgt

SEQ ID NO: 99301 - DNA, 17 bp, Arabidopsis thaliana
gatccgtggcgcaatgg

SEQ ID NO: 99302 - DNA, 17 bp, Arabidopsis thaliana
gatccgtgggtccgtga

SEQ ID NO: 99303 - DNA, 17 bp, Arabidopsis thaliana
gatccgtgttatgctgc

SEQ ID NO: 99304 - DNA, 17 bp, Arabidopsis thaliana
gatccgttcgtttgctg

SEQ ID NO: 99305 - DNA, 17 bp, Arabidopsis thaliana
gatccgttcttgaacct

SEQ ID NO: 99306 - DNA, 17 bp, Arabidopsis thaliana
gatccgttgacggtttt

SEQ ID NO: 99307 - DNA, 17 bp, Arabidopsis thaliana
gatccgtttgcggttta

SEQ ID NO: 99308 - DNA, 17 bp, Arabidopsis thaliana
gatcctaaagtttggtc

SEQ ID NO: 99309 - DNA, 17 bp, Arabidopsis thaliana
gatcctaacaagcgtcc

SEQ ID NO: 99310 - DNA, 17 bp, Arabidopsis thaliana
gatcctacagaagatga

SEQ ID NO: 99311 - DNA, 17 bp, Arabidopsis thaliana
gatcctatgagttagca

SEQ ID NO: 99312 - DNA, 17 bp, Arabidopsis thaliana
gatcctattgtgttggc

SEQ ID NO: 99313 - DNA, 17 bp, Arabidopsis thaliana
gatcctccactcctgga

SEQ ID NO: 99314 - DNA, 17 bp, Arabidopsis thaliana
gatcctccattgtcacg

SEQ ID NO: 99315 - DNA, 17 bp, Arabidopsis thaliana
gatcctcctctcgagaa

SEQ ID NO: 99316 - DNA, 17 bp, Arabidopsis thaliana
gatcctcgccgggggct

SEQ ID NO: 99317 - DNA, 17 bp, Arabidopsis thaliana
gatcctgattactgatc

SEQ ID NO: 99318 - DNA, 17 bp, Arabidopsis thaliana
gatcctgcctctgccat

SEQ ID NO: 99319 - DNA, 17 bp, Arabidopsis thaliana
gatcctgcggaaggatc

SEQ ID NO: 99320 - DNA, 17 bp, Arabidopsis thaliana
gatcctgcgtgtgggca

SEQ ID NO: 99321 - DNA, 17 bp, Arabidopsis thaliana
gatcctgggcagcacca

SEQ ID NO: 99322 - DNA, 17 bp, Arabidopsis thaliana
gatcctgggtgatctat

SEQ ID NO: 99323 - DNA, 17 bp, Arabidopsis thaliana
gatcctgtagatggatc

SEQ ID NO: 99324 - DNA, 17 bp, Arabidopsis thaliana
gatcctgtaggtggtct

SEQ ID NO: 99325 - DNA, 17 bp, Arabidopsis thaliana
gatcctgtcatttgacc

SEQ ID NO: 99326 - DNA, 17 bp, Arabidopsis thaliana
gatcctgttcatttgcc

SEQ ID NO: 99327 - DNA, 17 bp, Arabidopsis thaliana
gatcctgttcgtttgcc

SEQ ID NO: 99328 - DNA, 17 bp, Arabidopsis thaliana
gatccttaggttctgct

SEQ ID NO: 99329 - DNA, 17 bp, Arabidopsis thaliana
gatccttagtcgcatcc

SEQ ID NO: 99330 - DNA, 17 bp, Arabidopsis thaliana
gatccttatagcgttgg

SEQ ID NO: 99331 - DNA, 17 bp, Arabidopsis thaliana
gatccttatgacccggg

SEQ ID NO: 99332 - DNA, 17 bp, Arabidopsis thaliana
gatccttatgactcggg

SEQ ID NO: 99333 - DNA, 17 bp, Arabidopsis thaliana
gatccttcgatgtcggc

SEQ ID NO: 99334 - DNA, 17 bp, Arabidopsis thaliana
gatccttgggaatgagt

SEQ ID NO: 99335 - DNA, 17 bp, Arabidopsis thaliana
gatccttgggctttcaa

SEQ ID NO: 99336 - DNA, 17 bp, Arabidopsis thaliana
gatcctttaggataagg

SEQ ID NO: 99337 - DNA, 17 bp, Arabidopsis thaliana
gatcctttgtcgctaag

SEQ ID NO: 99338 - DNA, 17 bp, Arabidopsis thaliana
gatccttttgacccggg

SEQ ID NO: 99339 - DNA, 17 bp, Arabidopsis thaliana
gatcgaaaccatcacct

SEQ ID NO: 99340 - DNA, 17 bp, Arabidopsis thaliana
gatcgaaacctgcatgc

SEQ ID NO: 99341 - DNA, 17 bp, Arabidopsis thaliana
gatcgaaacctggctct

SEQ ID NO: 99342 - DNA, 17 bp, Arabidopsis thaliana
gatcgaaacttggctct

SEQ ID NO: 99343 - DNA, 17 bp, Arabidopsis thaliana
gatcgaaatctggctct

SEQ ID NO: 99344 - DNA, 17 bp, Arabidopsis thaliana
gatcgaagacaggcttg

SEQ ID NO: 99345 - DNA, 17 bp, Arabidopsis thaliana
gatcgaagactttgaca

SEQ ID NO: 99346 - DNA, 17 bp, Arabidopsis thaliana
gatcgaagctttcatag

SEQ ID NO: 99347 - DNA, 17 bp, Arabidopsis thaliana
gatcgaaggacccttcg

SEQ ID NO: 99348 - DNA, 17 bp, Arabidopsis thaliana
gatcgaagtttgtcagt

SEQ ID NO: 99349 - DNA, 17 bp, Arabidopsis thaliana
gatcgaatcccaaaacg

SEQ ID NO: 99350 - DNA, 17 bp, Arabidopsis thaliana
gatcgaattacagtcgc

SEQ ID NO: 99351 - DNA, 17 bp, Arabidopsis thaliana
gatcgaattcagtggct

SEQ ID NO: 99352 - DNA, 17 bp, Arabidopsis thaliana
gatcgacaaagtccgat

SEQ ID NO: 99353 - DNA, 17 bp, Arabidopsis thaliana
gatcgacaagacccgat

SEQ ID NO: 99354 - DNA, 17 bp, Arabidopsis thaliana
gatcgacaaggccagat

SEQ ID NO: 99355 - DNA, 17 bp, Arabidopsis thaliana
gatcgacaaggcccgat

SEQ ID NO: 99356 - DNA, 17 bp, Arabidopsis thaliana
gatcgacactgggtccg

SEQ ID NO: 99357 - DNA, 17 bp, Arabidopsis thaliana
gatcgacagatctctat

SEQ ID NO: 99358 - DNA, 17 bp, Arabidopsis thaliana
gatcgacatcgttgctc

SEQ ID NO: 99359 - DNA, 17 bp, Arabidopsis thaliana
gatcgaccgagacgaca

SEQ ID NO: 99360 - DNA, 17 bp, Arabidopsis thaliana
gatcgaccgagatgaca

SEQ ID NO: 99361 - DNA, 17 bp, Arabidopsis thaliana
gatcgaccgattcagat

SEQ ID NO: 99362 - DNA, 17 bp, Arabidopsis thaliana
gatcgaccggtgcttgg

SEQ ID NO: 99363 - DNA, 17 bp, Arabidopsis thaliana
gatcgaccgtcccgaag

SEQ ID NO: 99364 - DNA, 17 bp, Arabidopsis thaliana
gatcgaccttcggtgcc

SEQ ID NO: 99365 - DNA, 17 bp, Arabidopsis thaliana
gatcgacgaatcctcgg

SEQ ID NO: 99366 - DNA, 17 bp, Arabidopsis thaliana
gatcgacgcggattacg

SEQ ID NO: 99367 - DNA, 17 bp, Arabidopsis thaliana
gatcgacgcggattact

SEQ ID NO: 99368 - DNA, 17 bp, Arabidopsis thaliana
gatcgacgtggattacg

SEQ ID NO: 99369 - DNA, 17 bp, Arabidopsis thaliana
gatcgactaactccggc

SEQ ID NO: 99370 - DNA, 17 bp, Arabidopsis thaliana
gatcgactcttgggtaa

SEQ ID NO: 99371 - DNA, 17 bp, Arabidopsis thaliana
gatcgactgaacaatat

SEQ ID NO: 99372 - DNA, 17 bp, Arabidopsis thaliana
gatcgactgattcaatc

SEQ ID NO: 99373 - DNA, 17 bp, Arabidopsis thaliana
gatcgagaaaccttttg

SEQ ID NO: 99374 - DNA, 17 bp, Arabidopsis thaliana
gatcgagacacggcggt

SEQ ID NO: 99375 - DNA, 17 bp, Arabidopsis thaliana
gatcgagacgggtttga

SEQ ID NO: 99376 - DNA, 17 bp, Arabidopsis thaliana
gatcgagatcatacttt

SEQ ID NO: 99377 - DNA, 17 bp, Arabidopsis thaliana
gatcgagatcttcaata

SEQ ID NO: 99378 - DNA, 17 bp, Arabidopsis thaliana
gatcgagatgagcttgc

SEQ ID NO: 99379 - DNA, 17 bp, Arabidopsis thaliana
gatcgaggagtaaattc

SEQ ID NO: 99380 - DNA, 17 bp, Arabidopsis thaliana
gatcgagggcacgtctg

SEQ ID NO: 99381 - DNA, 17 bp, Arabidopsis thaliana
gatcgagtgagatgtag

SEQ ID NO: 99382 - DNA, 17 bp, Arabidopsis thaliana
gatcgagtgcgatcgag

SEQ ID NO: 99383 - DNA, 17 bp, Arabidopsis thaliana
gatcgagtgtttctgat

SEQ ID NO: 99384 - DNA, 17 bp, Arabidopsis thaliana
gatcgagttaccactgc

SEQ ID NO: 99385 - DNA, 17 bp, Arabidopsis thaliana
gatcgagttcattcggg

SEQ ID NO: 99386 - DNA, 17 bp, Arabidopsis thaliana
gatcgagttgcggttca

SEQ ID NO: 99387 - DNA, 17 bp, Arabidopsis thaliana
gatcgagttgcggttta

SEQ ID NO: 99388 - DNA, 17 bp, Arabidopsis thaliana
gatcgagttgttggtgg

SEQ ID NO: 99389 - DNA, 17 bp, Arabidopsis thaliana
gatcgataaaaggtcga

SEQ ID NO: 99390 - DNA, 17 bp, Arabidopsis thaliana
gatcgataaacctctgc

SEQ ID NO: 99391 - DNA, 17 bp, Arabidopsis thaliana
gatcgataaccaggagg

SEQ ID NO: 99392 - DNA, 17 bp, Arabidopsis thaliana
gatcgataacgcaggtg

SEQ ID NO: 99393 - DNA, 17 bp, Arabidopsis thaliana
gatcgataactcgacgg

SEQ ID NO: 99394 - DNA, 17 bp, Arabidopsis thaliana
gatcgatacatcagggt

SEQ ID NO: 99395 - DNA, 17 bp, Arabidopsis thaliana
gatcgatacggagtttt

SEQ ID NO: 99396 - DNA, 17 bp, Arabidopsis thaliana
gatcgatactaggcgct

SEQ ID NO: 99397 - DNA, 17 bp, Arabidopsis thaliana
gatcgatagacttgaca

SEQ ID NO: 99398 - DNA, 17 bp, Arabidopsis thaliana
gatcgatagcggcatgt

SEQ ID NO: 99399 - DNA, 17 bp, Arabidopsis thaliana
gatcgatataaggtctc

SEQ ID NO: 99400 - DNA, 17 bp, Arabidopsis thaliana
gatcgatatgtctggaa

SEQ ID NO: 99401 - DNA, 17 bp, Arabidopsis thaliana
gatcgatattagactgt

SEQ ID NO: 99402 - DNA, 17 bp, Arabidopsis thaliana
gatcgatcagcggatgt

SEQ ID NO: 99403 - DNA, 17 bp, Arabidopsis thaliana
gatcgatcagctcattc

SEQ ID NO: 99404 - DNA, 17 bp, Arabidopsis thaliana
gatcgatcagtcgcatc

SEQ ID NO: 99405 - DNA, 17 bp, Arabidopsis thaliana
gatcgatcagtcgctgc

SEQ ID NO: 99406 - DNA, 17 bp, Arabidopsis thaliana
gatcgatccgacggtcc

SEQ ID NO: 99407 - DNA, 17 bp, Arabidopsis thaliana
gatcgatccgattcaat

SEQ ID NO: 99408 - DNA, 17 bp, Arabidopsis thaliana
gatcgatccgcacatac

SEQ ID NO: 99409 - DNA, 17 bp, Arabidopsis thaliana
gatcgatccgtaacttc

SEQ ID NO: 99410 - DNA, 17 bp, Arabidopsis thaliana
gatcgatccgttcttga

SEQ ID NO: 99411 - DNA, 17 bp, Arabidopsis thaliana
gatcgatccgttgacgg

SEQ ID NO: 99412 - DNA, 17 bp, Arabidopsis thaliana
gatcgatcctgttcgtt

SEQ ID NO: 99413 - DNA, 17 bp, Arabidopsis thaliana
gatcgatccttcgatgt

SEQ ID NO: 99414 - DNA, 17 bp, Arabidopsis thaliana
gatcgatcgatgtcggg

SEQ ID NO: 99415 - DNA, 17 bp, Arabidopsis thaliana
gatcgatcgcagttgat

SEQ ID NO: 99416 - DNA, 17 bp, Arabidopsis thaliana
gatcgatcgctaagtca

SEQ ID NO: 99417 - DNA, 17 bp, Arabidopsis thaliana
gatcgatcgctgcgaca

SEQ ID NO: 99418 - DNA, 17 bp, Arabidopsis thaliana
gatcgatcggttcatga

SEQ ID NO: 99419 - DNA, 17 bp, Arabidopsis thaliana
gatcgatcgtggtctgc

SEQ ID NO: 99420 - DNA, 17 bp, Arabidopsis thaliana
gatcgatcgtgtcatca

SEQ ID NO: 99421 - DNA, 17 bp, Arabidopsis thaliana
gatcgatctatggttga

SEQ ID NO: 99422 - DNA, 17 bp, Arabidopsis thaliana
gatcgatctgatccgat

SEQ ID NO: 99423 - DNA, 17 bp, Arabidopsis thaliana
gatcgatctggcaggtt

SEQ ID NO: 99424 - DNA, 17 bp, Arabidopsis thaliana
gatcgatctggccaaag

SEQ ID NO: 99425 - DNA, 17 bp, Arabidopsis thaliana
gatcgatcttaaccgga

SEQ ID NO: 99426 - DNA, 17 bp, Arabidopsis thaliana
gatcgatcttagtcgca

SEQ ID NO: 99427 - DNA, 17 bp, Arabidopsis thaliana
gatcgatcttatccacc

SEQ ID NO: 99428 - DNA, 17 bp, Arabidopsis thaliana
gatcgatcttcagtttg

SEQ ID NO: 99429 - DNA, 17 bp, Arabidopsis thaliana
gatcgatctttccgttg

SEQ ID NO: 99430 - DNA, 17 bp, Arabidopsis thaliana
gatcgatgaaccattcg

SEQ ID NO: 99431 - DNA, 17 bp, Arabidopsis thaliana
gatcgatgaactgtttg

SEQ ID NO: 99432 - DNA, 17 bp, Arabidopsis thaliana
gatcgatgaatcaggtg

SEQ ID NO: 99433 - DNA, 17 bp, Arabidopsis thaliana
gatcgatgaatgctacc

SEQ ID NO: 99434 - DNA, 17 bp, Arabidopsis thaliana
gatcgatgagtcgattt

SEQ ID NO: 99435 - DNA, 17 bp, Arabidopsis thaliana
gatcgatgatatctgaa

SEQ ID NO: 99436 - DNA, 17 bp, Arabidopsis thaliana
gatcgatgatgaatccg

SEQ ID NO: 99437 - DNA, 17 bp, Arabidopsis thaliana
gatcgatgatggaattc

SEQ ID NO: 99438 - DNA, 17 bp, Arabidopsis thaliana
gatcgatgatgtccaac

SEQ ID NO: 99439 - DNA, 17 bp, Arabidopsis thaliana
gatcgatgatttaacga

SEQ ID NO: 99440 - DNA, 17 bp, Arabidopsis thaliana
gatcgatgcccttagat

SEQ ID NO: 99441 - DNA, 17 bp, Arabidopsis thaliana
gatcgatgcggactacc

SEQ ID NO: 99442 - DNA, 17 bp, Arabidopsis thaliana
gatcgatgctgaggtgg

SEQ ID NO: 99443 - DNA, 17 bp, Arabidopsis thaliana
gatcgatggatcctatt

SEQ ID NO: 99444 - DNA, 17 bp, Arabidopsis thaliana
gatcgatggcgcttaag

SEQ ID NO: 99445 - DNA, 17 bp, Arabidopsis thaliana
gatcgatgggatccggt

SEQ ID NO: 99446 - DNA, 17 bp, Arabidopsis thaliana
gatcgatggtgaactat

SEQ ID NO: 99447 - DNA, 17 bp, Arabidopsis thaliana
gatcgatggtttcctcc

SEQ ID NO: 99448 - DNA, 17 bp, Arabidopsis thaliana
gatcgatgtctctctcg

SEQ ID NO: 99449 - DNA, 17 bp, Arabidopsis thaliana
gatcgatgtgggtccgc

SEQ ID NO: 99450 - DNA, 17 bp, Arabidopsis thaliana
gatcgatgttgggcttg

SEQ ID NO: 99451 - DNA, 17 bp, Arabidopsis thaliana
gatcgatgtttgtttcg

SEQ ID NO: 99452 - DNA, 17 bp, Arabidopsis thaliana
gatcgattaagccatgc

SEQ ID NO: 99453 - DNA, 17 bp, Arabidopsis thaliana
gatcgattacggtggcg

SEQ ID NO: 99454 - DNA, 17 bp, Arabidopsis thaliana
gatcgattagcatagaa

SEQ ID NO: 99455 - DNA, 17 bp, Arabidopsis thaliana
gatcgattagtcagatg

SEQ ID NO: 99456 - DNA, 17 bp, Arabidopsis thaliana
gatcgattagtttggac

SEQ ID NO: 99457 - DNA, 17 bp, Arabidopsis thaliana
gatcgattatgcactgg

SEQ ID NO: 99458 - DNA, 17 bp, Arabidopsis thaliana
gatcgattatggaccgt

SEQ ID NO: 99459 - DNA, 17 bp, Arabidopsis thaliana
gatcgattcagcccttc

SEQ ID NO: 99460 - DNA, 17 bp, Arabidopsis thaliana
gatcgattcagcccttt

SEQ ID NO: 99461 - DNA, 17 bp, Arabidopsis thaliana
gatcgattcccggctgg

SEQ ID NO: 99462 - DNA, 17 bp, Arabidopsis thaliana
gatcgattcggggcgtg

SEQ ID NO: 99463 - DNA, 17 bp, Arabidopsis thaliana
gatcgattctacaacgg

SEQ ID NO: 99464 - DNA, 17 bp, Arabidopsis thaliana
gatcgattctatagggt

SEQ ID NO: 99465 - DNA, 17 bp, Arabidopsis thaliana
gatcgattctatgggtg

SEQ ID NO: 99466 - DNA, 17 bp, Arabidopsis thaliana
gatcgattctcaaatgt

SEQ ID NO: 99467 - DNA, 17 bp, Arabidopsis thaliana
gatcgattctctgccct

SEQ ID NO: 99468 - DNA, 17 bp, Arabidopsis thaliana
gatcgattcttcgccag

SEQ ID NO: 99469 - DNA, 17 bp, Arabidopsis thaliana
gatcgattgatcgctaa

SEQ ID NO: 99470 - DNA, 17 bp, Arabidopsis thaliana
gatcgattgcttaggtt

SEQ ID NO: 99471 - DNA, 17 bp, Arabidopsis thaliana
gatcgattggactgaag

SEQ ID NO: 99472 - DNA, 17 bp, Arabidopsis thaliana
gatcgattggtgccgac

SEQ ID NO: 99473 - DNA, 17 bp, Arabidopsis thaliana
gatcgatttagcccttt

SEQ ID NO: 99474 - DNA, 17 bp, Arabidopsis thaliana
gatcgatttcaatcaaa

SEQ ID NO: 99475 - DNA, 17 bp, Arabidopsis thaliana
gatcgatttcatcctat

SEQ ID NO: 99476 - DNA, 17 bp, Arabidopsis thaliana
gatcgatttcgtcgtct

SEQ ID NO: 99477 - DNA, 17 bp, Arabidopsis thaliana
gatcgatttctccagct

SEQ ID NO: 99478 - DNA, 17 bp, Arabidopsis thaliana
gatcgatttgttgtact

SEQ ID NO: 99479 - DNA, 17 bp, Arabidopsis thaliana
gatcgattttattgttg

SEQ ID NO: 99480 - DNA, 17 bp, Arabidopsis thaliana
gatcgattttccatttg

SEQ ID NO: 99481 - DNA, 17 bp, Arabidopsis thaliana
gatcgcaagttgacctt

SEQ ID NO: 99482 - DNA, 17 bp, Arabidopsis thaliana
gatcgcacctcctgagc

SEQ ID NO: 99483 - DNA, 17 bp, Arabidopsis thaliana
gatcgcacgtctgcctg

SEQ ID NO: 99484 - DNA, 17 bp, Arabidopsis thaliana
gatcgcagcgactatca

SEQ ID NO: 99485 - DNA, 17 bp, Arabidopsis thaliana
gatcgcagcgactgtcg

SEQ ID NO: 99486 - DNA, 17 bp, Arabidopsis thaliana
gatcgcagttgatggtc

SEQ ID NO: 99487 - DNA, 17 bp, Arabidopsis thaliana
gatcgcatcctgtagat

SEQ ID NO: 99488 - DNA, 17 bp, Arabidopsis thaliana
gatcgcatggcctctgt

SEQ ID NO: 99489 - DNA, 17 bp, Arabidopsis thaliana
gatcgcattgcaggttt

SEQ ID NO: 99490 - DNA, 17 bp, Arabidopsis thaliana
gatcgccggaaaagtcg

SEQ ID NO: 99491 - DNA, 17 bp, Arabidopsis thaliana
gatcgccgggatagctc

SEQ ID NO: 99492 - DNA, 17 bp, Arabidopsis thaliana
gatcgccggttcgagtg

SEQ ID NO: 99493 - DNA, 17 bp, Arabidopsis thaliana
gatcgcctctttggtgg

SEQ ID NO: 99494 - DNA, 17 bp, Arabidopsis thaliana
gatcgcgtgattcgccg

SEQ ID NO: 99495 - DNA, 17 bp, Arabidopsis thaliana
gatcgctaagtcagcta

SEQ ID NO: 99496 - DNA, 17 bp, Arabidopsis thaliana
gatcgctaagttgttcg

SEQ ID NO: 99497 - DNA, 17 bp, Arabidopsis thaliana
gatcgctactggttcag

SEQ ID NO: 99498 - DNA, 17 bp, Arabidopsis thaliana
gatcgctataatatccg

SEQ ID NO: 99499 - DNA, 17 bp, Arabidopsis thaliana
gatcgctatagtatccg

SEQ ID NO: 99500 - DNA, 17 bp, Arabidopsis thaliana
gatcgctattgctggtt

SEQ ID NO: 99501 - DNA, 17 bp, Arabidopsis thaliana
gatcgctccgattggac

SEQ ID NO: 99502 - DNA, 17 bp, Arabidopsis thaliana
gatcgctgcgacaagca

SEQ ID NO: 99503 - DNA, 17 bp, Arabidopsis thaliana
gatcgctggatccagcg

SEQ ID NO: 99504 - DNA, 17 bp, Arabidopsis thaliana
gatcgctggtccctggt

SEQ ID NO: 99505 - DNA, 17 bp, Arabidopsis thaliana
gatcgcttcaccctaaa

SEQ ID NO: 99506 - DNA, 17 bp, Arabidopsis thaliana
gatcgcttcatttcgtg

SEQ ID NO: 99507 - DNA, 17 bp, Arabidopsis thaliana
gatcggaacctggctct

SEQ ID NO: 99508 - DNA, 17 bp, Arabidopsis thaliana
gatcggacagtggtgac

SEQ ID NO: 99509 - DNA, 17 bp, Arabidopsis thaliana
gatcggaccagctgatt

SEQ ID NO: 99510 - DNA, 17 bp, Arabidopsis thaliana
gatcggaccaggcttca

SEQ ID NO: 99511 - DNA, 17 bp, Arabidopsis thaliana
gatcggacctctgctga

SEQ ID NO: 99512 - DNA, 17 bp, Arabidopsis thaliana
gatcggacgacggtgat

SEQ ID NO: 99513 - DNA, 17 bp, Arabidopsis thaliana
gatcggactgcgagatt

SEQ ID NO: 99514 - DNA, 17 bp, Arabidopsis thaliana
gatcggagttgactgga

SEQ ID NO: 99515 - DNA, 17 bp, Arabidopsis thaliana
gatcggatcggccagac

SEQ ID NO: 99516 - DNA, 17 bp, Arabidopsis thaliana
gatcggatgtcagcggc

SEQ ID NO: 99517 - DNA, 17 bp, Arabidopsis thaliana
gatcggatgttgacacg

SEQ ID NO: 99518 - DNA, 17 bp, Arabidopsis thaliana
gatcggattcgggtttg

SEQ ID NO: 99519 - DNA, 17 bp, Arabidopsis thaliana
gatcggcataacacctc

SEQ ID NO: 99520 - DNA, 17 bp, Arabidopsis thaliana
gatcggccagatctgac

SEQ ID NO: 99521 - DNA, 17 bp, Arabidopsis thaliana
gatcggcctttcgatgg

SEQ ID NO: 99522 - DNA, 17 bp, Arabidopsis thaliana
gatcggcgagcagcggc

SEQ ID NO: 99523 - DNA, 17 bp, Arabidopsis thaliana
gatcggcgatttccatc

SEQ ID NO: 99524 - DNA, 17 bp, Arabidopsis thaliana
gatcggcggaccggatt

SEQ ID NO: 99525 - DNA, 17 bp, Arabidopsis thaliana
gatcggctgaggcgggg

SEQ ID NO: 99526 - DNA, 17 bp, Arabidopsis thaliana
gatcggcttcggccggc

SEQ ID NO: 99527 - DNA, 17 bp, Arabidopsis thaliana
gatcggcttgtcccttc

SEQ ID NO: 99528 - DNA, 17 bp, Arabidopsis thaliana
gatcgggcctgctgagg

SEQ ID NO: 99529 - DNA, 17 bp, Arabidopsis thaliana
gatcgggctctgatacc

SEQ ID NO: 99530 - DNA, 17 bp, Arabidopsis thaliana
gatcgggctgcggttta

SEQ ID NO: 99531 - DNA, 17 bp, Arabidopsis thaliana
gatcgggcttgttcgtt

SEQ ID NO: 99532 - DNA, 17 bp, Arabidopsis thaliana
gatcgggtagcggttta

SEQ ID NO: 99533 - DNA, 17 bp, Arabidopsis thaliana
gatcgggtccagttggg

SEQ ID NO: 99534 - DNA, 17 bp, Arabidopsis thaliana
gatcgggttacggttta

SEQ ID NO: 99535 - DNA, 17 bp, Arabidopsis thaliana
gatcgggttcaggtccg

SEQ ID NO: 99536 - DNA, 17 bp, Arabidopsis thaliana
gatcgggttcaggttcg

SEQ ID NO: 99537 - DNA, 17 bp, Arabidopsis thaliana
gatcgggttgagtatgt

SEQ ID NO: 99538 - DNA, 17 bp, Arabidopsis thaliana
gatcgggttgcggatta

SEQ ID NO: 99539 - DNA, 17 bp, Arabidopsis thaliana
gatcgggttgcggttta

SEQ ID NO: 99540 - DNA, 17 bp, Arabidopsis thaliana
gatcgggttgtggttta

SEQ ID NO: 99541 - DNA, 17 bp, Arabidopsis thaliana
gatcgggtttcggttta

SEQ ID NO: 99542 - DNA, 17 bp, Arabidopsis thaliana
gatcgggtttgttgcta

SEQ ID NO: 99543 - DNA, 17 bp, Arabidopsis thaliana
gatcggtaagaccaaag

SEQ ID NO: 99544 - DNA, 17 bp, Arabidopsis thaliana
gatcggtaccccgcatc

SEQ ID NO: 99545 - DNA, 17 bp, Arabidopsis thaliana
gatcggtccgcctttgg

SEQ ID NO: 99546 - DNA, 17 bp, Arabidopsis thaliana
gatcggtcctgaatatg

SEQ ID NO: 99547 - DNA, 17 bp, Arabidopsis thaliana
gatcggtctgcagcacg

SEQ ID NO: 99548 - DNA, 17 bp, Arabidopsis thaliana
gatcggttcgtcatatc

SEQ ID NO: 99549 - DNA, 17 bp, Arabidopsis thaliana
gatcggttctgatgtgg

SEQ ID NO: 99550 - DNA, 17 bp, Arabidopsis thaliana
gatcggttcttcggatt

SEQ ID NO: 99551 - DNA, 17 bp, Arabidopsis thaliana
gatcggttgcggtttaa

SEQ ID NO: 99552 - DNA, 17 bp, Arabidopsis thaliana
gatcgtaaaagtcttag

SEQ ID NO: 99553 - DNA, 17 bp, Arabidopsis thaliana
gatcgtaacctggctct

SEQ ID NO: 99554 - DNA, 17 bp, Arabidopsis thaliana
gatcgtaccccgcatct

SEQ ID NO: 99555 - DNA, 17 bp, Arabidopsis thaliana
gatcgtaccgactgtca

SEQ ID NO: 99556 - DNA, 17 bp, Arabidopsis thaliana
gatcgtacttccggcga

SEQ ID NO: 99557 - DNA, 17 bp, Arabidopsis thaliana
gatcgtaggtagctgac

SEQ ID NO: 99558 - DNA, 17 bp, Arabidopsis thaliana
gatcgtcaagatggccg

SEQ ID NO: 99559 - DNA, 17 bp, Arabidopsis thaliana
gatcgtcagacgaatcg

SEQ ID NO: 99560 - DNA, 17 bp, Arabidopsis thaliana
gatcgtcagacggacag

SEQ ID NO: 99561 - DNA, 17 bp, Arabidopsis thaliana
gatcgtcagacggatcg

SEQ ID NO: 99562 - DNA, 17 bp, Arabidopsis thaliana
gatcgtccaaatttttc

SEQ ID NO: 99563 - DNA, 17 bp, Arabidopsis thaliana
gatcgtccgtttcctat

SEQ ID NO: 99564 - DNA, 17 bp, Arabidopsis thaliana
gatcgtcgcatcctgta

SEQ ID NO: 99565 - DNA, 17 bp, Arabidopsis thaliana
gatcgtcggctatgagt

SEQ ID NO: 99566 - DNA, 17 bp, Arabidopsis thaliana
gatcgtcgtatcggatc

SEQ ID NO: 99567 - DNA, 17 bp, Arabidopsis thaliana
gatcgtctatgtaggtg

SEQ ID NO: 99568 - DNA, 17 bp, Arabidopsis thaliana
gatcgtctgcctgggtg

SEQ ID NO: 99569 - DNA, 17 bp, Arabidopsis thaliana
gatcgtgaaccgtctga

SEQ ID NO: 99570 - DNA, 17 bp, Arabidopsis thaliana
gatcgtgacacgtatca

SEQ ID NO: 99571 - DNA, 17 bp, Arabidopsis thaliana
gatcgtgacagatcgag

SEQ ID NO: 99572 - DNA, 17 bp, Arabidopsis thaliana
gatcgtgacggacttga

SEQ ID NO: 99573 - DNA, 17 bp, Arabidopsis thaliana
gatcgtgatacatcgtt

SEQ ID NO: 99574 - DNA, 17 bp, Arabidopsis thaliana
gatcgtggaccgtctga

SEQ ID NO: 99575 - DNA, 17 bp, Arabidopsis thaliana
gatcgtggtctgcagca

SEQ ID NO: 99576 - DNA, 17 bp, Arabidopsis thaliana
gatcgtggtctgtagca

SEQ ID NO: 99577 - DNA, 17 bp, Arabidopsis thaliana
gatcgtggtggttgcgg

SEQ ID NO: 99578 - DNA, 17 bp, Arabidopsis thaliana
gatcgtgtcccggcaac

SEQ ID NO: 99579 - DNA, 17 bp, Arabidopsis thaliana
gatcgtgtcgtcggtag

SEQ ID NO: 99580 - DNA, 17 bp, Arabidopsis thaliana
gatcgtgttgcggttta

SEQ ID NO: 99581 - DNA, 17 bp, Arabidopsis thaliana
gatcgttaccccgcatc

SEQ ID NO: 99582 - DNA, 17 bp, Arabidopsis thaliana
gatcgttaccccgcatt

SEQ ID NO: 99583 - DNA, 17 bp, Arabidopsis thaliana
gatcgttactcggctcg

SEQ ID NO: 99584 - DNA, 17 bp, Arabidopsis thaliana
gatcgttagcgatttca

SEQ ID NO: 99585 - DNA, 17 bp, Arabidopsis thaliana
gatcgttgaatgcttac

SEQ ID NO: 99586 - DNA, 17 bp, Arabidopsis thaliana
gatcgttggaactgtga

SEQ ID NO: 99587 - DNA, 17 bp, Arabidopsis thaliana
gatcgttggatcggatc

SEQ ID NO: 99588 - DNA, 17 bp, Arabidopsis thaliana
gatcgttggttggtgct

SEQ ID NO: 99589 - DNA, 17 bp, Arabidopsis thaliana
gatcgttgtctagagag

SEQ ID NO: 99590 - DNA, 17 bp, Arabidopsis thaliana
gatcgttgtggtgttga

SEQ ID NO: 99591 - DNA, 17 bp, Arabidopsis thaliana
gatcgtttgacttgaca

SEQ ID NO: 99592 - DNA, 17 bp, Arabidopsis thaliana
gatcgtttgcggttgca

SEQ ID NO: 99593 - DNA, 17 bp, Arabidopsis thaliana
gatcgtttgcttgttgc

SEQ ID NO: 99594 - DNA, 17 bp, Arabidopsis thaliana
gatcgtttggaccatcg

SEQ ID NO: 99595 - DNA, 17 bp, Arabidopsis thaliana
gatcgtttggttaacag

SEQ ID NO: 99596 - DNA, 17 bp, Arabidopsis thaliana
gatctaaaaaggtcact

SEQ ID NO: 99597 - DNA, 17 bp, Arabidopsis thaliana
gatctaaaccagacttt

SEQ ID NO: 99598 - DNA, 17 bp, Arabidopsis thaliana
gatctaaacccgtcaat

SEQ ID NO: 99599 - DNA, 17 bp, Arabidopsis thaliana
gatctaaacgacggtaa

SEQ ID NO: 99600 - DNA, 17 bp, Arabidopsis thaliana
gatctaaaggtgcagat

SEQ ID NO: 99601 - DNA, 17 bp, Arabidopsis thaliana
gatctaaatgatgttcg

SEQ ID NO: 99602 - DNA, 17 bp, Arabidopsis thaliana
gatctaacacgatgacg

SEQ ID NO: 99603 - DNA, 17 bp, Arabidopsis thaliana
gatctaacacgtggcgt

SEQ ID NO: 99604 - DNA, 17 bp, Arabidopsis thaliana
gatctaacctggtgtcg

SEQ ID NO: 99605 - DNA, 17 bp, Arabidopsis thaliana
gatctaacgacacttgg

SEQ ID NO: 99606 - DNA, 17 bp, Arabidopsis thaliana
gatctaactttaatccg

SEQ ID NO: 99607 - DNA, 17 bp, Arabidopsis thaliana
gatctaagaatagtcgc

SEQ ID NO: 99608 - DNA, 17 bp, Arabidopsis thaliana
gatctaagactaccatt

SEQ ID NO: 99609 - DNA, 17 bp, Arabidopsis thaliana
gatctaagagattacgg

SEQ ID NO: 99610 - DNA, 17 bp, Arabidopsis thaliana
gatctaagcgtatccgt

SEQ ID NO: 99611 - DNA, 17 bp, Arabidopsis thaliana
gatctaagctgatgtgt

SEQ ID NO: 99612 - DNA, 17 bp, Arabidopsis thaliana
gatctaaggcttgggta

SEQ ID NO: 99613 - DNA, 17 bp, Arabidopsis thaliana
gatctaaggttttcggc

SEQ ID NO: 99614 - DNA, 17 bp, Arabidopsis thaliana
gatctaaggttttggag

SEQ ID NO: 99615 - DNA, 17 bp, Arabidopsis thaliana
gatctaagtggcattca

SEQ ID NO: 99616 - DNA, 17 bp, Arabidopsis thaliana
gatctaatacgctaagt

SEQ ID NO: 99617 - DNA, 17 bp, Arabidopsis thaliana
gatctacaaattgcgcc

SEQ ID NO: 99618 - DNA, 17 bp, Arabidopsis thaliana
gatctacagaaacttgt

SEQ ID NO: 99619 - DNA, 17 bp, Arabidopsis thaliana
gatctacagaaccatgt

SEQ ID NO: 99620 - DNA, 17 bp, Arabidopsis thaliana
gatctacagcagagggc

SEQ ID NO: 99621 - DNA, 17 bp, Arabidopsis thaliana
gatctacagggtgagta

SEQ ID NO: 99622 - DNA, 17 bp, Arabidopsis thaliana
gatctacatgatctgca

SEQ ID NO: 99623 - DNA, 17 bp, Arabidopsis thaliana
gatctacatgcgattca

SEQ ID NO: 99624 - DNA, 17 bp, Arabidopsis thaliana
gatctaccatcatcttg

SEQ ID NO: 99625 - DNA, 17 bp, Arabidopsis thaliana
gatctacccaaagttga

SEQ ID NO: 99626 - DNA, 17 bp, Arabidopsis thaliana
gatctacgatgtcagcg

SEQ ID NO: 99627 - DNA, 17 bp, Arabidopsis thaliana
gatctacgcacgtggta

SEQ ID NO: 99628 - DNA, 17 bp, Arabidopsis thaliana
gatctacgctatggctc

SEQ ID NO: 99629 - DNA, 17 bp, Arabidopsis thaliana
gatctacgtcggttgtg

SEQ ID NO: 99630 - DNA, 17 bp, Arabidopsis thaliana
gatctacgtctttggag

SEQ ID NO: 99631 - DNA, 17 bp, Arabidopsis thaliana
gatctactggtaggaat

SEQ ID NO: 99632 - DNA, 17 bp, Arabidopsis thaliana
gatctacttgatccgct

SEQ ID NO: 99633 - DNA, 17 bp, Arabidopsis thaliana
gatctatcggctgattc

SEQ ID NO: 99634 - DNA, 17 bp, Arabidopsis thaliana
gatctatctcgtcctac

SEQ ID NO: 99635 - DNA, 17 bp, Arabidopsis thaliana
gatctatgcatgcagtc

SEQ ID NO: 99636 - DNA, 17 bp, Arabidopsis thaliana
gatctatgcgattcaag

SEQ ID NO: 99637 - DNA, 17 bp, Arabidopsis thaliana
gatctatggttgacaat

SEQ ID NO: 99638 - DNA, 17 bp, Arabidopsis thaliana
gatctatgtgtgatgag

SEQ ID NO: 99639 - DNA, 17 bp, Arabidopsis thaliana
gatctattagctcagtg

SEQ ID NO: 99640 - DNA, 17 bp, Arabidopsis thaliana
gatctattagctcatgg

SEQ ID NO: 99641 - DNA, 17 bp, Arabidopsis thaliana
gatctattcaccgcata

SEQ ID NO: 99642 - DNA, 17 bp, Arabidopsis thaliana
gatctattgacgaaggg

SEQ ID NO: 99643 - DNA, 17 bp, Arabidopsis thaliana
gatctattgcttggtcg

SEQ ID NO: 99644 - DNA, 17 bp, Arabidopsis thaliana
gatctcaaactctctct

SEQ ID NO: 99645 - DNA, 17 bp, Arabidopsis thaliana
gatctcaacagttggtg

SEQ ID NO: 99646 - DNA, 17 bp, Arabidopsis thaliana
gatctcaagcgggtttt

SEQ ID NO: 99647 - DNA, 17 bp, Arabidopsis thaliana
gatctcaaggccggtgt

SEQ ID NO: 99648 - DNA, 17 bp, Arabidopsis thaliana
gatctcacattgggcga

SEQ ID NO: 99649 - DNA, 17 bp, Arabidopsis thaliana
gatctcactttattaag

SEQ ID NO: 99650 - DNA, 17 bp, Arabidopsis thaliana
gatctcagaaatgtgcg

SEQ ID NO: 99651 - DNA, 17 bp, Arabidopsis thaliana
gatctcagacgctggga

SEQ ID NO: 99652 - DNA, 17 bp, Arabidopsis thaliana
gatctcagatggcgaat

SEQ ID NO: 99653 - DNA, 17 bp, Arabidopsis thaliana
gatctcagattttgaca

SEQ ID NO: 99654 - DNA, 17 bp, Arabidopsis thaliana
gatctcagcacgggggc

SEQ ID NO: 99655 - DNA, 17 bp, Arabidopsis thaliana
gatctcagtggcattcg

SEQ ID NO: 99656 - DNA, 17 bp, Arabidopsis thaliana
gatctcagtttgcgttg

SEQ ID NO: 99657 - DNA, 17 bp, Arabidopsis thaliana
gatctcatgtgtatgat

SEQ ID NO: 99658 - DNA, 17 bp, Arabidopsis thaliana
gatctcatttctctctt

SEQ ID NO: 99659 - DNA, 17 bp, Arabidopsis thaliana
gatctccaagttgcgaa

SEQ ID NO: 99660 - DNA, 17 bp, Arabidopsis thaliana
gatctccacaacttgct

SEQ ID NO: 99661 - DNA, 17 bp, Arabidopsis thaliana
gatctccaggatatcgc

SEQ ID NO: 99662 - DNA, 17 bp, Arabidopsis thaliana
gatctccatcttcagtc

SEQ ID NO: 99663 - DNA, 17 bp, Arabidopsis thaliana
gatctcccaggacatgc

SEQ ID NO: 99664 - DNA, 17 bp, Arabidopsis thaliana
gatctccgagtaccgct

SEQ ID NO: 99665 - DNA, 17 bp, Arabidopsis thaliana
gatctcctatgtccgtg

SEQ ID NO: 99666 - DNA, 17 bp, Arabidopsis thaliana
gatctcctcagttggca

SEQ ID NO: 99667 - DNA, 17 bp, Arabidopsis thaliana
gatctcctcagttggcg

SEQ ID NO: 99668 - DNA, 17 bp, Arabidopsis thaliana
gatctcctctcggatca

SEQ ID NO: 99669 - DNA, 17 bp, Arabidopsis thaliana
gatctcctcttgcgatc

SEQ ID NO: 99670 - DNA, 17 bp, Arabidopsis thaliana
gatctccttcttgtgcc

SEQ ID NO: 99671 - DNA, 17 bp, Arabidopsis thaliana
gatctcgacgagcctca

SEQ ID NO: 99672 - DNA, 17 bp, Arabidopsis thaliana
gatctcgatctaacttc

SEQ ID NO: 99673 - DNA, 17 bp, Arabidopsis thaliana
gatctcgattatctcaa

SEQ ID NO: 99674 - DNA, 17 bp, Arabidopsis thaliana
gatctcgcagagagttg

SEQ ID NO: 99675 - DNA, 17 bp, Arabidopsis thaliana
gatctcgctaagtgttc

SEQ ID NO: 99676 - DNA, 17 bp, Arabidopsis thaliana
gatctcgcttggtgcag

SEQ ID NO: 99677 - DNA, 17 bp, Arabidopsis thaliana
gatctcggaccaggctt

SEQ ID NO: 99678 - DNA, 17 bp, Arabidopsis thaliana
gatctcgggaaatgcgt

SEQ ID NO: 99679 - DNA, 17 bp, Arabidopsis thaliana
gatctcgggttaaatgg

SEQ ID NO: 99680 - DNA, 17 bp, Arabidopsis thaliana
gatctcggtattttgct

SEQ ID NO: 99681 - DNA, 17 bp, Arabidopsis thaliana
gatctcggtcggccaat

SEQ ID NO: 99682 - DNA, 17 bp, Arabidopsis thaliana
gatctcgtggttgtatg

SEQ ID NO: 99683 - DNA, 17 bp, Arabidopsis thaliana
gatctcgttttgtttca

SEQ ID NO: 99684 - DNA, 17 bp, Arabidopsis thaliana
gatctctaaacttcgcc

SEQ ID NO: 99685 - DNA, 17 bp, Arabidopsis thaliana
gatctctaactaagcag

SEQ ID NO: 99686 - DNA, 17 bp, Arabidopsis thaliana
gatctctaagtttcgcc

SEQ ID NO: 99687 - DNA, 17 bp, Arabidopsis thaliana
gatctctacattgagcc

SEQ ID NO: 99688 - DNA, 17 bp, Arabidopsis thaliana
gatctctaccgcgatgt

SEQ ID NO: 99689 - DNA, 17 bp, Arabidopsis thaliana
gatctctaggccctcag

SEQ ID NO: 99690 - DNA, 17 bp, Arabidopsis thaliana
gatctctaggcggatag

SEQ ID NO: 99691 - DNA, 17 bp, Arabidopsis thaliana
gatctctaggtacttgt

SEQ ID NO: 99692 - DNA, 17 bp, Arabidopsis thaliana
gatctctcctgtgctga

SEQ ID NO: 99693 - DNA, 17 bp, Arabidopsis thaliana
gatctctcggcaacgga

SEQ ID NO: 99694 - DNA, 17 bp, Arabidopsis thaliana
gatctctctgaagcaga

SEQ ID NO: 99695 - DNA, 17 bp, Arabidopsis thaliana
gatctctgcgagtgata

SEQ ID NO: 99696 - DNA, 17 bp, Arabidopsis thaliana
gatctctgctatattac

SEQ ID NO: 99697 - DNA, 17 bp, Arabidopsis thaliana
gatctctgttggagctg

SEQ ID NO: 99698 - DNA, 17 bp, Arabidopsis thaliana
gatctcttcgtcggatc

SEQ ID NO: 99699 - DNA, 17 bp, Arabidopsis thaliana
gatctcttctccggttc

SEQ ID NO: 99700 - DNA, 17 bp, Arabidopsis thaliana
gatctctttgtggtgta

SEQ ID NO: 99701 - DNA, 17 bp, Arabidopsis thaliana
gatctgaaaccgattgg

SEQ ID NO: 99702 - DNA, 17 bp, Arabidopsis thaliana
gatctgacacccgtctt

SEQ ID NO: 99703 - DNA, 17 bp, Arabidopsis thaliana
gatctgacatttcccat

SEQ ID NO: 99704 - DNA, 17 bp, Arabidopsis thaliana
gatctgacgtgtaggcg

SEQ ID NO: 99705 - DNA, 17 bp, Arabidopsis thaliana
gatctgactatccactg

SEQ ID NO: 99706 - DNA, 17 bp, Arabidopsis thaliana
gatctgagaaagaaggc

SEQ ID NO: 99707 - DNA, 17 bp, Arabidopsis thaliana
gatctgagaccggagca

SEQ ID NO: 99708 - DNA, 17 bp, Arabidopsis thaliana
gatctgagactagagat

SEQ ID NO: 99709 - DNA, 17 bp, Arabidopsis thaliana
gatctgagagttcggtt

SEQ ID NO: 99710 - DNA, 17 bp, Arabidopsis thaliana
gatctgaggtagggttg

SEQ ID NO: 99711 - DNA, 17 bp, Arabidopsis thaliana
gatctgagtgacttcaa

SEQ ID NO: 99712 - DNA, 17 bp, Arabidopsis thaliana
gatctgatccattgacg

SEQ ID NO: 99713 - DNA, 17 bp, Arabidopsis thaliana
gatctgatccgattcac

SEQ ID NO: 99714 - DNA, 17 bp, Arabidopsis thaliana
gatctgattcaatctaa

SEQ ID NO: 99715 - DNA, 17 bp, Arabidopsis thaliana
gatctgattcagacatg

SEQ ID NO: 99716 - DNA, 17 bp, Arabidopsis thaliana
gatctgattgcggttta

SEQ ID NO: 99717 - DNA, 17 bp, Arabidopsis thaliana
gatctgcaaaacgttat

SEQ ID NO: 99718 - DNA, 17 bp, Arabidopsis thaliana
gatctgcagcggtttgt

SEQ ID NO: 99719 - DNA, 17 bp, Arabidopsis thaliana
gatctgcagcgtttgtt

SEQ ID NO: 99720 - DNA, 17 bp, Arabidopsis thaliana
gatctgcaggtttgttt

SEQ ID NO: 99721 - DNA, 17 bp, Arabidopsis thaliana
gatctgcagttgaaccg

SEQ ID NO: 99722 - DNA, 17 bp, Arabidopsis thaliana
gatctgcatgatctgca

SEQ ID NO: 99723 - DNA, 17 bp, Arabidopsis thaliana
gatctgccatctttgtg

SEQ ID NO: 99724 - DNA, 17 bp, Arabidopsis thaliana
gatctgccgaagctcgg

SEQ ID NO: 99725 - DNA, 17 bp, Arabidopsis thaliana
gatctgccgaagctgtg

SEQ ID NO: 99726 - DNA, 17 bp, Arabidopsis thaliana
gatctgccggactcgta

SEQ ID NO: 99727 - DNA, 17 bp, Arabidopsis thaliana
gatctgcctatgcgggg

SEQ ID NO: 99728 - DNA, 17 bp, Arabidopsis thaliana
gatctgcgaactgcttc

SEQ ID NO: 99729 - DNA, 17 bp, Arabidopsis thaliana
gatctgcgacatgtatg

SEQ ID NO: 99730 - DNA, 17 bp, Arabidopsis thaliana
gatctgcggcagctgtc

SEQ ID NO: 99731 - DNA, 17 bp, Arabidopsis thaliana
gatctgcggttgggtta

SEQ ID NO: 99732 - DNA, 17 bp, Arabidopsis thaliana
gatctgctgtgcttggt

SEQ ID NO: 99733 - DNA, 17 bp, Arabidopsis thaliana
gatctgcttagcaactg

SEQ ID NO: 99734 - DNA, 17 bp, Arabidopsis thaliana
gatctgcttatcgagac

SEQ ID NO: 99735 - DNA, 17 bp, Arabidopsis thaliana
gatctgcttctgttttg

SEQ ID NO: 99736 - DNA, 17 bp, Arabidopsis thaliana
gatctgcttgaccgttt

SEQ ID NO: 99737 - DNA, 17 bp, Arabidopsis thaliana
gatctgcttgatccgct

SEQ ID NO: 99738 - DNA, 17 bp, Arabidopsis thaliana
gatctgcttgatccgta

SEQ ID NO: 99739 - DNA, 17 bp, Arabidopsis thaliana
gatctgcttgatctgct

SEQ ID NO: 99740 - DNA, 17 bp, Arabidopsis thaliana
gatctgcttggtttctc

SEQ ID NO: 99741 - DNA, 17 bp, Arabidopsis thaliana
gatctggactgccatcg

SEQ ID NO: 99742 - DNA, 17 bp, Arabidopsis thaliana
gatctggacttggaatc

SEQ ID NO: 99743 - DNA, 17 bp, Arabidopsis thaliana
gatctggagagattacg

SEQ ID NO: 99744 - DNA, 17 bp, Arabidopsis thaliana
gatctggaggcactggt

SEQ ID NO: 99745 - DNA, 17 bp, Arabidopsis thaliana
gatctggcaggttggtc

SEQ ID NO: 99746 - DNA, 17 bp, Arabidopsis thaliana
gatctggccaaagttaa

SEQ ID NO: 99747 - DNA, 17 bp, Arabidopsis thaliana
gatctggccaaagttga

SEQ ID NO: 99748 - DNA, 17 bp, Arabidopsis thaliana
gatctggccttgtcgat

SEQ ID NO: 99749 - DNA, 17 bp, Arabidopsis thaliana
gatctggctccctgtat

SEQ ID NO: 99750 - DNA, 17 bp, Arabidopsis thaliana
gatctggggcgtagcca

SEQ ID NO: 99751 - DNA, 17 bp, Arabidopsis thaliana
gatctgggttcgggtcc

SEQ ID NO: 99752 - DNA, 17 bp, Arabidopsis thaliana
gatctggtccaagaagc

SEQ ID NO: 99753 - DNA, 17 bp, Arabidopsis thaliana
gatctggtccgtcagat

SEQ ID NO: 99754 - DNA, 17 bp, Arabidopsis thaliana
gatctggttgacatcct

SEQ ID NO: 99755 - DNA, 17 bp, Arabidopsis thaliana
gatctggttgcgaatct

SEQ ID NO: 99756 - DNA, 17 bp, Arabidopsis thaliana
gatctggttgcggttta

SEQ ID NO: 99757 - DNA, 17 bp, Arabidopsis thaliana
gatctgtaaactacttt

SEQ ID NO: 99758 - DNA, 17 bp, Arabidopsis thaliana
gatctgtagatggatca

SEQ ID NO: 99759 - DNA, 17 bp, Arabidopsis thaliana
gatctgtcaattccgct

SEQ ID NO: 99760 - DNA, 17 bp, Arabidopsis thaliana
gatctgtcatcgatggc

SEQ ID NO: 99761 - DNA, 17 bp, Arabidopsis thaliana
gatctgtcattctacag

SEQ ID NO: 99762 - DNA, 17 bp, Arabidopsis thaliana
gatctgtgaacacctgc

SEQ ID NO: 99763 - DNA, 17 bp, Arabidopsis thaliana
gatctgtgattgagagg

SEQ ID NO: 99764 - DNA, 17 bp, Arabidopsis thaliana
gatctgtggcataagaa

SEQ ID NO: 99765 - DNA, 17 bp, Arabidopsis thaliana
gatctgtgtccgtctag

SEQ ID NO: 99766 - DNA, 17 bp, Arabidopsis thaliana
gatctgtgtgaccacgt

SEQ ID NO: 99767 - DNA, 17 bp, Arabidopsis thaliana
gatctgtgtgactcatc

SEQ ID NO: 99768 - DNA, 17 bp, Arabidopsis thaliana
gatctgttaatatccga

SEQ ID NO: 99769 - DNA, 17 bp, Arabidopsis thaliana
gatctgttccgttcgat

SEQ ID NO: 99770 - DNA, 17 bp, Arabidopsis thaliana
gatctgttgaggatgat

SEQ ID NO: 99771 - DNA, 17 bp, Arabidopsis thaliana
gatctgttgtggcattg

SEQ ID NO: 99772 - DNA, 17 bp, Arabidopsis thaliana
gatctgtttgcggtgta

SEQ ID NO: 99773 - DNA, 17 bp, Arabidopsis thaliana
gatctgtttgcggttta

SEQ ID NO: 99774 - DNA, 17 bp, Arabidopsis thaliana
gatctgttttgctctag

SEQ ID NO: 99775 - DNA, 17 bp, Arabidopsis thaliana
gatcttaaaagcctaag

SEQ ID NO: 99776 - DNA, 17 bp, Arabidopsis thaliana
gatcttaaaggcgtaag

SEQ ID NO: 99777 - DNA, 17 bp, Arabidopsis thaliana
gatcttaaccggaacgc

SEQ ID NO: 99778 - DNA, 17 bp, Arabidopsis thaliana
gatcttaccaaggaatt

SEQ ID NO: 99779 - DNA, 17 bp, Arabidopsis thaliana
gatcttaccaatcttgt

SEQ ID NO: 99780 - DNA, 17 bp, Arabidopsis thaliana
gatcttaccaggagcca

SEQ ID NO: 99781 - DNA, 17 bp, Arabidopsis thaliana
gatcttacccatttgca

SEQ ID NO: 99782 - DNA, 17 bp, Arabidopsis thaliana
gatcttagagtgttatg

SEQ ID NO: 99783 - DNA, 17 bp, Arabidopsis thaliana
gatcttagatgttgaca

SEQ ID NO: 99784 - DNA, 17 bp, Arabidopsis thaliana
gatcttagatgttgata

SEQ ID NO: 99785 - DNA, 17 bp, Arabidopsis thaliana
gatcttagattttgaca

SEQ ID NO: 99786 - DNA, 17 bp, Arabidopsis thaliana
gatcttaggtttcttct

SEQ ID NO: 99787 - DNA, 17 bp, Arabidopsis thaliana
gatcttaggtttgttgc

SEQ ID NO: 99788 - DNA, 17 bp, Arabidopsis thaliana
gatcttagtcgcatcct

SEQ ID NO: 99789 - DNA, 17 bp, Arabidopsis thaliana
gatcttagttgggctac

SEQ ID NO: 99790 - DNA, 17 bp, Arabidopsis thaliana
gatcttatcaacgtcca

SEQ ID NO: 99791 - DNA, 17 bp, Arabidopsis thaliana
gatcttatcaccctccc

SEQ ID NO: 99792 - DNA, 17 bp, Arabidopsis thaliana
gatcttatccacctcgg

SEQ ID NO: 99793 - DNA, 17 bp, Arabidopsis thaliana
gatcttattggtgcttc

SEQ ID NO: 99794 - DNA, 17 bp, Arabidopsis thaliana
gatcttcaacggaagca

SEQ ID NO: 99795 - DNA, 17 bp, Arabidopsis thaliana
gatcttcacaagggcaa

SEQ ID NO: 99796 - DNA, 17 bp, Arabidopsis thaliana
gatcttcagatccatgc

SEQ ID NO: 99797 - DNA, 17 bp, Arabidopsis thaliana
gatcttcagccctttgt

SEQ ID NO: 99798 - DNA, 17 bp, Arabidopsis thaliana
gatcttcagggtcagtg

SEQ ID NO: 99799 - DNA, 17 bp, Arabidopsis thaliana
gatcttcagtcggagca

SEQ ID NO: 99800 - DNA, 17 bp, Arabidopsis thaliana
gatcttcagtcgtagca

SEQ ID NO: 99801 - DNA, 17 bp, Arabidopsis thaliana
gatcttcagtttaagtc

SEQ ID NO: 99802 - DNA, 17 bp, Arabidopsis thaliana
gatcttcagtttgagtc

SEQ ID NO: 99803 - DNA, 17 bp, Arabidopsis thaliana
gatcttccaatttttgc

SEQ ID NO: 99804 - DNA, 17 bp, Arabidopsis thaliana
gatcttcctgctggtgt

SEQ ID NO: 99805 - DNA, 17 bp, Arabidopsis thaliana
gatcttccttaaggctc

SEQ ID NO: 99806 - DNA, 17 bp, Arabidopsis thaliana
gatcttcgattcccggc

SEQ ID NO: 99807 - DNA, 17 bp, Arabidopsis thaliana
gatcttcggttctctat

SEQ ID NO: 99808 - DNA, 17 bp, Arabidopsis thaliana
gatcttcgttaggttgc

SEQ ID NO: 99809 - DNA, 17 bp, Arabidopsis thaliana
gatcttctcgtttgtta

SEQ ID NO: 99810 - DNA, 17 bp, Arabidopsis thaliana
gatcttctctcagtttc

SEQ ID NO: 99811 - DNA, 17 bp, Arabidopsis thaliana
gatcttctgagaaggga

SEQ ID NO: 99812 - DNA, 17 bp, Arabidopsis thaliana
gatcttctgagaagggt

SEQ ID NO: 99813 - DNA, 17 bp, Arabidopsis thaliana
gatcttcttcaccttca

SEQ ID NO: 99814 - DNA, 17 bp, Arabidopsis thaliana
gatcttcttcagtcggt

SEQ ID NO: 99815 - DNA, 17 bp, Arabidopsis thaliana
gatcttcttcctcagtt

SEQ ID NO: 99816 - DNA, 17 bp, Arabidopsis thaliana
gatcttgaccatatgga

SEQ ID NO: 99817 - DNA, 17 bp, Arabidopsis thaliana
gatcttgactctagtcc

SEQ ID NO: 99818 - DNA, 17 bp, Arabidopsis thaliana
gatcttgatccttcgat

SEQ ID NO: 99819 - DNA, 17 bp, Arabidopsis thaliana
gatcttgcacatgggtt

SEQ ID NO: 99820 - DNA, 17 bp, Arabidopsis thaliana
gatcttgccaaagttca

SEQ ID NO: 99821 - DNA, 17 bp, Arabidopsis thaliana
gatcttgccttcagtcc

SEQ ID NO: 99822 - DNA, 17 bp, Arabidopsis thaliana
gatcttgccttgcattg

SEQ ID NO: 99823 - DNA, 17 bp, Arabidopsis thaliana
gatcttgcggaaagaga

SEQ ID NO: 99824 - DNA, 17 bp, Arabidopsis thaliana
gatcttggaaccaaatg

SEQ ID NO: 99825 - DNA, 17 bp, Arabidopsis thaliana
gatcttggaccaggctt

SEQ ID NO: 99826 - DNA, 17 bp, Arabidopsis thaliana
gatcttggactaggtct

SEQ ID NO: 99827 - DNA, 17 bp, Arabidopsis thaliana
gatcttggactgaaggg

SEQ ID NO: 99828 - DNA, 17 bp, Arabidopsis thaliana
gatcttggagcaactat

SEQ ID NO: 99829 - DNA, 17 bp, Arabidopsis thaliana
gatcttggattgcagga

SEQ ID NO: 99830 - DNA, 17 bp, Arabidopsis thaliana
gatcttggattggaacc

SEQ ID NO: 99831 - DNA, 17 bp, Arabidopsis thaliana
gatcttggtaaagcccc

SEQ ID NO: 99832 - DNA, 17 bp, Arabidopsis thaliana
gatcttggtcttggctg

SEQ ID NO: 99833 - DNA, 17 bp, Arabidopsis thaliana
gatcttggtgcaggtcg

SEQ ID NO: 99834 - DNA, 17 bp, Arabidopsis thaliana
gatcttggtggagcgat

SEQ ID NO: 99835 - DNA, 17 bp, Arabidopsis thaliana
gatcttgtcaggataca

SEQ ID NO: 99836 - DNA, 17 bp, Arabidopsis thaliana
gatcttgtgcgccttga

SEQ ID NO: 99837 - DNA, 17 bp, Arabidopsis thaliana
gatcttgtggaaatgct

SEQ ID NO: 99838 - DNA, 17 bp, Arabidopsis thaliana
gatcttgtggatgatct

SEQ ID NO: 99839 - DNA, 17 bp, Arabidopsis thaliana
gatcttgtgtggaaagg

SEQ ID NO: 99840 - DNA, 17 bp, Arabidopsis thaliana
gatcttgttcgcagttt

SEQ ID NO: 99841 - DNA, 17 bp, Arabidopsis thaliana
gatcttgttgcggttta

SEQ ID NO: 99842 - DNA, 17 bp, Arabidopsis thaliana
gatctttaagatccggt

SEQ ID NO: 99843 - DNA, 17 bp, Arabidopsis thaliana
gatctttccaatgtgaa

SEQ ID NO: 99844 - DNA, 17 bp, Arabidopsis thaliana
gatctttccgttgagca

SEQ ID NO: 99845 - DNA, 17 bp, Arabidopsis thaliana
gatctttcggacttcct

SEQ ID NO: 99846 - DNA, 17 bp, Arabidopsis thaliana
gatctttcgtctgtggc

SEQ ID NO: 99847 - DNA, 17 bp, Arabidopsis thaliana
gatctttctcaacatct

SEQ ID NO: 99848 - DNA, 17 bp, Arabidopsis thaliana
gatctttgaaccctagg

SEQ ID NO: 99849 - DNA, 17 bp, Arabidopsis thaliana
gatctttgaccgaattt

SEQ ID NO: 99850 - DNA, 17 bp, Arabidopsis thaliana
gatctttgacgagcaga

SEQ ID NO: 99851 - DNA, 17 bp, Arabidopsis thaliana
gatctttgactcgtccg

SEQ ID NO: 99852 - DNA, 17 bp, Arabidopsis thaliana
gatctttgagacacatg

SEQ ID NO: 99853 - DNA, 17 bp, Arabidopsis thaliana
gatctttgatgacccgt

SEQ ID NO: 99854 - DNA, 17 bp, Arabidopsis thaliana
gatctttgcagaaaatg

SEQ ID NO: 99855 - DNA, 17 bp, Arabidopsis thaliana
gatctttgcaggttgct

SEQ ID NO: 99856 - DNA, 17 bp, Arabidopsis thaliana
gatctttgcccagtttc

SEQ ID NO: 99857 - DNA, 17 bp, Arabidopsis thaliana
gatctttgcggtgcgta

SEQ ID NO: 99858 - DNA, 17 bp, Arabidopsis thaliana
gatctttgctatattac

SEQ ID NO: 99859 - DNA, 17 bp, Arabidopsis thaliana
gatctttggagatgatt

SEQ ID NO: 99860 - DNA, 17 bp, Arabidopsis thaliana
gatctttgggacattct

SEQ ID NO: 99861 - DNA, 17 bp, Arabidopsis thaliana
gatctttgtgcactact

SEQ ID NO: 99862 - DNA, 17 bp, Arabidopsis thaliana
gatctttgttcttcgat

SEQ ID NO: 99863 - DNA, 17 bp, Arabidopsis thaliana
gatcttttaaccgtgac

SEQ ID NO: 99864 - DNA, 17 bp, Arabidopsis thaliana
gatcttttaagctatcg

SEQ ID NO: 99865 - DNA, 17 bp, Arabidopsis thaliana
gatcttttactgcagta

SEQ ID NO: 99866 - DNA, 17 bp, Arabidopsis thaliana
gatcttttccattgtta

SEQ ID NO: 99867 - DNA, 17 bp, Arabidopsis thaliana
gatcttttcccatgctt

SEQ ID NO: 99868 - DNA, 17 bp, Arabidopsis thaliana
gatcttttgccatgttt

SEQ ID NO: 99869 - DNA, 17 bp, Arabidopsis thaliana
gatctttttcagttgat

SEQ ID NO: 99870 - DNA, 17 bp, Arabidopsis thaliana
gatgaaaactatttggt

SEQ ID NO: 99871 - DNA, 17 bp, Arabidopsis thaliana
gatgaaacctaggcaat

SEQ ID NO: 99872 - DNA, 17 bp, Arabidopsis thaliana
gatgaaacgacgtgtca

SEQ ID NO: 99873 - DNA, 17 bp, Arabidopsis thaliana
gatgaaacgatgaaagc

SEQ ID NO: 99874 - DNA, 17 bp, Arabidopsis thaliana
gatgaaacggacggtgc

SEQ ID NO: 99875 - DNA, 17 bp, Arabidopsis thaliana
gatgaaagcctatagcg

SEQ ID NO: 99876 - DNA, 17 bp, Arabidopsis thaliana
gatgaaagtgcactacg

SEQ ID NO: 99877 - DNA, 17 bp, Arabidopsis thaliana
gatgaaatctcaagatg

SEQ ID NO: 99878 - DNA, 17 bp, Arabidopsis thaliana
gatgaaatcttcagttg

SEQ ID NO: 99879 - DNA, 17 bp, Arabidopsis thaliana
gatgaaatgacggatgg

SEQ ID NO: 99880 - DNA, 17 bp, Arabidopsis thaliana
gatgaaatggggccggc

SEQ ID NO: 99881 - DNA, 17 bp, Arabidopsis thaliana
gatgaaattgagttccg

SEQ ID NO: 99882 - DNA, 17 bp, Arabidopsis thaliana
gatgaaattgctcttgt

SEQ ID NO: 99883 - DNA, 17 bp, Arabidopsis thaliana
gatgaaccattcgccgt

SEQ ID NO: 99884 - DNA, 17 bp, Arabidopsis thaliana
gatgaaccattgcaact

SEQ ID NO: 99885 - DNA, 17 bp, Arabidopsis thaliana
gatgaaccggaagccgg

SEQ ID NO: 99886 - DNA, 17 bp, Arabidopsis thaliana
gatgaaccgtctgtaga

SEQ ID NO: 99887 - DNA, 17 bp, Arabidopsis thaliana
gatgaaccgttcaccgt

SEQ ID NO: 99888 - DNA, 17 bp, Arabidopsis thaliana
gatgaaccgttcgccct

SEQ ID NO: 99889 - DNA, 17 bp, Arabidopsis thaliana
gatgaaccgttcgccgt

SEQ ID NO: 99890 - DNA, 17 bp, Arabidopsis thaliana
gatgaacctgaaaaatt

SEQ ID NO: 99891 - DNA, 17 bp, Arabidopsis thaliana
gatgaacgctggcggca

SEQ ID NO: 99892 - DNA, 17 bp, Arabidopsis thaliana
gatgaacttacctgaca

SEQ ID NO: 99893 - DNA, 17 bp, Arabidopsis thaliana
gatgaagccatggcaca

SEQ ID NO: 99894 - DNA, 17 bp, Arabidopsis thaliana
gatgaagccgaagtgat

SEQ ID NO: 99895 - DNA, 17 bp, Arabidopsis thaliana
gatgaagccgtctgatg

SEQ ID NO: 99896 - DNA, 17 bp, Arabidopsis thaliana
gatgaagcggatttcta

SEQ ID NO: 99897 - DNA, 17 bp, Arabidopsis thaliana
gatgaagctcagggttg

SEQ ID NO: 99898 - DNA, 17 bp, Arabidopsis thaliana
gatgaagctgccagcat

SEQ ID NO: 99899 - DNA, 17 bp, Arabidopsis thaliana
gatgaagcttgggtgaa

SEQ ID NO: 99900 - DNA, 17 bp, Arabidopsis thaliana
gatgaagctttgccgtc

SEQ ID NO: 99901 - DNA, 17 bp, Arabidopsis thaliana
gatgaagcttttgccgt

SEQ ID NO: 99902 - DNA, 17 bp, Arabidopsis thaliana
gatgaaggtccaggccg

SEQ ID NO: 99903 - DNA, 17 bp, Arabidopsis thaliana
gatgaagtctcggacct

SEQ ID NO: 99904 - DNA, 17 bp, Arabidopsis thaliana
gatgaagtgtatgatcg

SEQ ID NO: 99905 - DNA, 17 bp, Arabidopsis thaliana
gatgaagtgtatgattg

SEQ ID NO: 99906 - DNA, 17 bp, Arabidopsis thaliana
gatgaagtgttcggatc

SEQ ID NO: 99907 - DNA, 17 bp, Arabidopsis thaliana
gatgaatagataaggcc

SEQ ID NO: 99908 - DNA, 17 bp, Arabidopsis thaliana
gatgaatatgtccatct

SEQ ID NO: 99909 - DNA, 17 bp, Arabidopsis thaliana
gatgaatcatttggatg

SEQ ID NO: 99910 - DNA, 17 bp, Arabidopsis thaliana
gatgaatccgaggcgga

SEQ ID NO: 99911 - DNA, 17 bp, Arabidopsis thaliana
gatgaatctaacctggt

SEQ ID NO: 99912 - DNA, 17 bp, Arabidopsis thaliana
gatgaatctacatacgc

SEQ ID NO: 99913 - DNA, 17 bp, Arabidopsis thaliana
gatgaatgcaaaaacaa

SEQ ID NO: 99914 - DNA, 17 bp, Arabidopsis thaliana
gatgaatgcctcgcagg

SEQ ID NO: 99915 - DNA, 17 bp, Arabidopsis thaliana
gatgaatgctacctggt

SEQ ID NO: 99916 - DNA, 17 bp, Arabidopsis thaliana
gatgaattcttccgtcg

SEQ ID NO: 99917 - DNA, 17 bp, Arabidopsis thaliana
gatgaattgagacccgt

SEQ ID NO: 99918 - DNA, 17 bp, Arabidopsis thaliana
gatgaattggattggct

SEQ ID NO: 99919 - DNA, 17 bp, Arabidopsis thaliana
gatgaattgtgtaacct

SEQ ID NO: 99920 - DNA, 17 bp, Arabidopsis thaliana
gatgacaaaactcacca

SEQ ID NO: 99921 - DNA, 17 bp, Arabidopsis thaliana
gatgacaaaatcgccgg

SEQ ID NO: 99922 - DNA, 17 bp, Arabidopsis thaliana
gatgacaaactcgtggc

SEQ ID NO: 99923 - DNA, 17 bp, Arabidopsis thaliana
gatgacaacttgttcaa

SEQ ID NO: 99924 - DNA, 17 bp, Arabidopsis thaliana
gatgacacgggttcgat

SEQ ID NO: 99925 - DNA, 17 bp, Arabidopsis thaliana
gatgacacgtcagatga

SEQ ID NO: 99926 - DNA, 17 bp, Arabidopsis thaliana
gatgacacgtggggtgc

SEQ ID NO: 99927 - DNA, 17 bp, Arabidopsis thaliana
gatgacactctttctgg

SEQ ID NO: 99928 - DNA, 17 bp, Arabidopsis thaliana
gatgacagcaaacctat

SEQ ID NO: 99929 - DNA, 17 bp, Arabidopsis thaliana
gatgacagcgacgggat

SEQ ID NO: 99930 - DNA, 17 bp, Arabidopsis thaliana
gatgacagctttggttc

SEQ ID NO: 99931 - DNA, 17 bp, Arabidopsis thaliana
gatgacaggccgagtac

SEQ ID NO: 99932 - DNA, 17 bp, Arabidopsis thaliana
gatgacaggtgtccttg

SEQ ID NO: 99933 - DNA, 17 bp, Arabidopsis thaliana
gatgacatcttcctcgt

SEQ ID NO: 99934 - DNA, 17 bp, Arabidopsis thaliana
gatgacatgacggcttg

SEQ ID NO: 99935 - DNA, 17 bp, Arabidopsis thaliana
gatgacatggcggatta

SEQ ID NO: 99936 - DNA, 17 bp, Arabidopsis thaliana
gatgacatggcggcgtg

SEQ ID NO: 99937 - DNA, 17 bp, Arabidopsis thaliana
gatgacatggcggctgg

SEQ ID NO: 99938 - DNA, 17 bp, Arabidopsis thaliana
gatgacatggcggcttg

SEQ ID NO: 99939 - DNA, 17 bp, Arabidopsis thaliana
gatgacattgtaaccct

SEQ ID NO: 99940 - DNA, 17 bp, Arabidopsis thaliana
gatgaccaccacactgt

SEQ ID NO: 99941 - DNA, 17 bp, Arabidopsis thaliana
gatgaccagactacttt

SEQ ID NO: 99942 - DNA, 17 bp, Arabidopsis thaliana
gatgacccgctttctcc

SEQ ID NO: 99943 - DNA, 17 bp, Arabidopsis thaliana
gatgaccctttcgccgt

SEQ ID NO: 99944 - DNA, 17 bp, Arabidopsis thaliana
gatgaccgagtgcctct

SEQ ID NO: 99945 - DNA, 17 bp, Arabidopsis thaliana
gatgaccgtgtccattt

SEQ ID NO: 99946 - DNA, 17 bp, Arabidopsis thaliana
gatgaccgtttgctgga

SEQ ID NO: 99947 - DNA, 17 bp, Arabidopsis thaliana
gatgacctccgtggatg

SEQ ID NO: 99948 - DNA, 17 bp, Arabidopsis thaliana
gatgaccttagtgctca

SEQ ID NO: 99949 - DNA, 17 bp, Arabidopsis thaliana
gatgacgacatttggtt

SEQ ID NO: 99950 - DNA, 17 bp, Arabidopsis thaliana
gatgacgagcccggatc

SEQ ID NO: 99951 - DNA, 17 bp, Arabidopsis thaliana
gatgacgatctttggcc

SEQ ID NO: 99952 - DNA, 17 bp, Arabidopsis thaliana
gatgacgattacaggtt

SEQ ID NO: 99953 - DNA, 17 bp, Arabidopsis thaliana
gatgacgctgtgtgtcc

SEQ ID NO: 99954 - DNA, 17 bp, Arabidopsis thaliana
gatgacggaatgccggc

SEQ ID NO: 99955 - DNA, 17 bp, Arabidopsis thaliana
gatgacggactgggaac

SEQ ID NO: 99956 - DNA, 17 bp, Arabidopsis thaliana
gatgacgggcttagatg

SEQ ID NO: 99957 - DNA, 17 bp, Arabidopsis thaliana
gatgacgggtgatggag

SEQ ID NO: 99958 - DNA, 17 bp, Arabidopsis thaliana
gatgacgggttggagca

SEQ ID NO: 99959 - DNA, 17 bp, Arabidopsis thaliana
gatgacggtccaaacgg

SEQ ID NO: 99960 - DNA, 17 bp, Arabidopsis thaliana
gatgacgtcagctgttg

SEQ ID NO: 99961 - DNA, 17 bp, Arabidopsis thaliana
gatgacgtgccggagtg

SEQ ID NO: 99962 - DNA, 17 bp, Arabidopsis thaliana
gatgacgtggcagtcga

SEQ ID NO: 99963 - DNA, 17 bp, Arabidopsis thaliana
gatgacgtggcgcgttc

SEQ ID NO: 99964 - DNA, 17 bp, Arabidopsis thaliana
gatgacgttacggacgg

SEQ ID NO: 99965 - DNA, 17 bp, Arabidopsis thaliana
gatgactaaaatggtgt

SEQ ID NO: 99966 - DNA, 17 bp, Arabidopsis thaliana
gatgactaaatttgcga

SEQ ID NO: 99967 - DNA, 17 bp, Arabidopsis thaliana
gatgactatccttgcgg

SEQ ID NO: 99968 - DNA, 17 bp, Arabidopsis thaliana
gatgactatggtgttta

SEQ ID NO: 99969 - DNA, 17 bp, Arabidopsis thaliana
gatgactcaacgcgatt

SEQ ID NO: 99970 - DNA, 17 bp, Arabidopsis thaliana
gatgactcagactctga

SEQ ID NO: 99971 - DNA, 17 bp, Arabidopsis thaliana
gatgactcattcccaag

SEQ ID NO: 99972 - DNA, 17 bp, Arabidopsis thaliana
gatgactcctttctcgc

SEQ ID NO: 99973 - DNA, 17 bp, Arabidopsis thaliana
gatgactctgtcagcca

SEQ ID NO: 99974 - DNA, 17 bp, Arabidopsis thaliana
gatgactgagcatagct

SEQ ID NO: 99975 - DNA, 17 bp, Arabidopsis thaliana
gatgactgccgcttctt

SEQ ID NO: 99976 - DNA, 17 bp, Arabidopsis thaliana
gatgactgcgtcgctgc

SEQ ID NO: 99977 - DNA, 17 bp, Arabidopsis thaliana
gatgactgtagtcgtag

SEQ ID NO: 99978 - DNA, 17 bp, Arabidopsis thaliana
gatgacttatcggctgc

SEQ ID NO: 99979 - DNA, 17 bp, Arabidopsis thaliana
gatgacttggccccggc

SEQ ID NO: 99980 - DNA, 17 bp, Arabidopsis thaliana
gatgactttgcctcgca

SEQ ID NO: 99981 - DNA, 17 bp, Arabidopsis thaliana
gatgactttgctgccac

SEQ ID NO: 99982 - DNA, 17 bp, Arabidopsis thaliana
gatgagaaagagcttgc

SEQ ID NO: 99983 - DNA, 17 bp, Arabidopsis thaliana
gatgagaaagccggcca

SEQ ID NO: 99984 - DNA, 17 bp, Arabidopsis thaliana
gatgagaattgcgtata

SEQ ID NO: 99985 - DNA, 17 bp, Arabidopsis thaliana
gatgagacattgacgtt

SEQ ID NO: 99986 - DNA, 17 bp, Arabidopsis thaliana
gatgagactcatcttgg

SEQ ID NO: 99987 - DNA, 17 bp, Arabidopsis thaliana
gatgagacttgtcatga

SEQ ID NO: 99988 - DNA, 17 bp, Arabidopsis thaliana
gatgagactttgtgggc

SEQ ID NO: 99989 - DNA, 17 bp, Arabidopsis thaliana
gatgagagacagctatt

SEQ ID NO: 99990 - DNA, 17 bp, Arabidopsis thaliana
gatgagagatacagtgc

SEQ ID NO: 99991 - DNA, 17 bp, Arabidopsis thaliana
gatgagagattttggtg

SEQ ID NO: 99992 - DNA, 17 bp, Arabidopsis thaliana
gatgagagttataccga

SEQ ID NO: 99993 - DNA, 17 bp, Arabidopsis thaliana
gatgagagttatacgca

SEQ ID NO: 99994 - DNA, 17 bp, Arabidopsis thaliana
gatgagagttgtctttc

SEQ ID NO: 99995 - DNA, 17 bp, Arabidopsis thaliana
gatgagatccggtgcat

SEQ ID NO: 99996 - DNA, 17 bp, Arabidopsis thaliana
gatgagatgagacgaac

SEQ ID NO: 99997 - DNA, 17 bp, Arabidopsis thaliana
gatgagatgtgggattc

SEQ ID NO: 99998 - DNA, 17 bp, Arabidopsis thaliana
gatgagattcaggttga

SEQ ID NO: 99999 - DNA, 17 bp, Arabidopsis thaliana
gatgagattcgggttga

SEQ ID NO: 100000 - DNA, 17 bp, Arabidopsis thaliana
gatgagattgctgaagt

SEQ ID NO: 100001 - DNA, 17 bp, Arabidopsis thaliana
gatgagattggctatcc

SEQ ID NO: 100002 - DNA, 17 bp, Arabidopsis thaliana
gatgagattggtggtgg

SEQ ID NO: 100003 - DNA, 17 bp, Arabidopsis thaliana
gatgagcaagagcgttc

SEQ ID NO: 100004 - DNA, 17 bp, Arabidopsis thaliana
gatgagcgagcgtaatg

SEQ ID NO: 100005 - DNA, 17 bp, Arabidopsis thaliana
gatgagcgtttgaaaag

SEQ ID NO: 100006 - DNA, 17 bp, Arabidopsis thaliana
gatgagctttcagataa

SEQ ID NO: 100007 - DNA, 17 bp, Arabidopsis thaliana
gatgaggacgaggatgt

SEQ ID NO: 100008 - DNA, 17 bp, Arabidopsis thaliana
gatgaggacgagggtga

SEQ ID NO: 100009 - DNA, 17 bp, Arabidopsis thaliana
gatgaggatgggtttgt

SEQ ID NO: 100010 - DNA, 17 bp, Arabidopsis thaliana
gatgaggattccagtgc

SEQ ID NO: 100011 - DNA, 17 bp, Arabidopsis thaliana
gatgaggccattagtgg

SEQ ID NO: 100012 - DNA, 17 bp, Arabidopsis thaliana
gatgaggcgctcaggaa

SEQ ID NO: 100013 - DNA, 17 bp, Arabidopsis thaliana
gatgagggcacgtctgc

SEQ ID NO: 100014 - DNA, 17 bp, Arabidopsis thaliana
gatgaggttccactttc

SEQ ID NO: 100015 - DNA, 17 bp, Arabidopsis thaliana
gatgagtaaaatgagtt

SEQ ID NO: 100016 - DNA, 17 bp, Arabidopsis thaliana
gatgagtaggagggcgc

SEQ ID NO: 100017 - DNA, 17 bp, Arabidopsis thaliana
gatgagtatcatgtgac

SEQ ID NO: 100018 - DNA, 17 bp, Arabidopsis thaliana
gatgagtcaaatgagtt

SEQ ID NO: 100019 - DNA, 17 bp, Arabidopsis thaliana
gatgagtcaattggttt

SEQ ID NO: 100020 - DNA, 17 bp, Arabidopsis thaliana
gatgagtcgatctacat

SEQ ID NO: 100021 - DNA, 17 bp, Arabidopsis thaliana
gatgagtcgatttggcc

SEQ ID NO: 100022 - DNA, 17 bp, Arabidopsis thaliana
gatgagtctgtggctga

SEQ ID NO: 100023 - DNA, 17 bp, Arabidopsis thaliana
gatgagtcttggtttca

SEQ ID NO: 100024 - DNA, 17 bp, Arabidopsis thaliana
gatgagtcttggtttta

SEQ ID NO: 100025 - DNA, 17 bp, Arabidopsis thaliana
gatgagtgaacgagtct

SEQ ID NO: 100026 - DNA, 17 bp, Arabidopsis thaliana
gatgagtgctacaggtt

SEQ ID NO: 100027 - DNA, 17 bp, Arabidopsis thaliana
gatgagtttcagattcg

SEQ ID NO: 100028 - DNA, 17 bp, Arabidopsis thaliana
gatgagtttggcaggac

SEQ ID NO: 100029 - DNA, 17 bp, Arabidopsis thaliana
gatgagttttgatgttc

SEQ ID NO: 100030 - DNA, 17 bp, Arabidopsis thaliana
gatgataagccgtgctc

SEQ ID NO: 100031 - DNA, 17 bp, Arabidopsis thaliana
gatgatactcgaccagg

SEQ ID NO: 100032 - DNA, 17 bp, Arabidopsis thaliana
gatgatacttgaaggtg

SEQ ID NO: 100033 - DNA, 17 bp, Arabidopsis thaliana
gatgatagacactaaac

SEQ ID NO: 100034 - DNA, 17 bp, Arabidopsis thaliana
gatgataggacgggttt

SEQ ID NO: 100035 - DNA, 17 bp, Arabidopsis thaliana
gatgatatctacccatg

SEQ ID NO: 100036 - DNA, 17 bp, Arabidopsis thaliana
gatgatatctgaaccgt

SEQ ID NO: 100037 - DNA, 17 bp, Arabidopsis thaliana
gatgatatgacggcttt

SEQ ID NO: 100038 - DNA, 17 bp, Arabidopsis thaliana
gatgatattgtcctctt

SEQ ID NO: 100039 - DNA, 17 bp, Arabidopsis thaliana
gatgatcggagcaaaga

SEQ ID NO: 100040 - DNA, 17 bp, Arabidopsis thaliana
gatgatgaaatgacatg

SEQ ID NO: 100041 - DNA, 17 bp, Arabidopsis thaliana
gatgatgagacgttcca

SEQ ID NO: 100042 - DNA, 17 bp, Arabidopsis thaliana
gatgatgagttcgaggc

SEQ ID NO: 100043 - DNA, 17 bp, Arabidopsis thaliana
gatgatgataaagacgt

SEQ ID NO: 100044 - DNA, 17 bp, Arabidopsis thaliana
gatgatgctgcatatgc

SEQ ID NO: 100045 - DNA, 17 bp, Arabidopsis thaliana
gatgatgctgcatatgt

SEQ ID NO: 100046 - DNA, 17 bp, Arabidopsis thaliana
gatgatgctgcatttat

SEQ ID NO: 100047 - DNA, 17 bp, Arabidopsis thaliana
gatgatggaattctcag

SEQ ID NO: 100048 - DNA, 17 bp, Arabidopsis thaliana
gatgatggacttagatg

SEQ ID NO: 100049 - DNA, 17 bp, Arabidopsis thaliana
gatgatggcggattacg

SEQ ID NO: 100050 - DNA, 17 bp, Arabidopsis thaliana
gatgatggcggcggtgg

SEQ ID NO: 100051 - DNA, 17 bp, Arabidopsis thaliana
gatgatggctcttccac

SEQ ID NO: 100052 - DNA, 17 bp, Arabidopsis thaliana
gatgatgggacactggt

SEQ ID NO: 100053 - DNA, 17 bp, Arabidopsis thaliana
gatgatgggcttagacg

SEQ ID NO: 100054 - DNA, 17 bp, Arabidopsis thaliana
gatgatgggcttagata

SEQ ID NO: 100055 - DNA, 17 bp, Arabidopsis thaliana
gatgatgggcttagatg

SEQ ID NO: 100056 - DNA, 17 bp, Arabidopsis thaliana
gatgatggtgaaaggct

SEQ ID NO: 100057 - DNA, 17 bp, Arabidopsis thaliana
gatgatggttaagtgcg

SEQ ID NO: 100058 - DNA, 17 bp, Arabidopsis thaliana
gatgatggttgatgtgt

SEQ ID NO: 100059 - DNA, 17 bp, Arabidopsis thaliana
gatgatggtttgccaat

SEQ ID NO: 100060 - DNA, 17 bp, Arabidopsis thaliana
gatgatgtccaacttgt

SEQ ID NO: 100061 - DNA, 17 bp, Arabidopsis thaliana
gatgatgtgcctgggtg

SEQ ID NO: 100062 - DNA, 17 bp, Arabidopsis thaliana
gatgatgttgatgatga

SEQ ID NO: 100063 - DNA, 17 bp, Arabidopsis thaliana
gatgattaggtgagcgt

SEQ ID NO: 100064 - DNA, 17 bp, Arabidopsis thaliana
gatgattatgacttcca

SEQ ID NO: 100065 - DNA, 17 bp, Arabidopsis thaliana
gatgattatggtgttgg

SEQ ID NO: 100066 - DNA, 17 bp, Arabidopsis thaliana
gatgattcaggttattg

SEQ ID NO: 100067 - DNA, 17 bp, Arabidopsis thaliana
gatgattccaactacaa

SEQ ID NO: 100068 - DNA, 17 bp, Arabidopsis thaliana
gatgattcggactccga

SEQ ID NO: 100069 - DNA, 17 bp, Arabidopsis thaliana
gatgattcgtcaacaga

SEQ ID NO: 100070 - DNA, 17 bp, Arabidopsis thaliana
gatgattctccagattt

SEQ ID NO: 100071 - DNA, 17 bp, Arabidopsis thaliana
gatgattctggaccgtc

SEQ ID NO: 100072 - DNA, 17 bp, Arabidopsis thaliana
gatgattctggaccgtt

SEQ ID NO: 100073 - DNA, 17 bp, Arabidopsis thaliana
gatgattgatattgcgg

SEQ ID NO: 100074 - DNA, 17 bp, Arabidopsis thaliana
gatgattgcaattgtat

SEQ ID NO: 100075 - DNA, 17 bp, Arabidopsis thaliana
gatgattgcacagacat

SEQ ID NO: 100076 - DNA, 17 bp, Arabidopsis thaliana
gatgattgcgagtcgtt

SEQ ID NO: 100077 - DNA, 17 bp, Arabidopsis thaliana
gatgattggttgggctg

SEQ ID NO: 100078 - DNA, 17 bp, Arabidopsis thaliana
gatgatttaacgatttt

SEQ ID NO: 100079 - DNA, 17 bp, Arabidopsis thaliana
gatgatttaggaactcg

SEQ ID NO: 100080 - DNA, 17 bp, Arabidopsis thaliana
gatgatttctgaggacg

SEQ ID NO: 100081 - DNA, 17 bp, Arabidopsis thaliana
gatgatttcttagtcct

SEQ ID NO: 100082 - DNA, 17 bp, Arabidopsis thaliana
gatgatttgactcattt

SEQ ID NO: 100083 - DNA, 17 bp, Arabidopsis thaliana
gatgatttgagagtcgc

SEQ ID NO: 100084 - DNA, 17 bp, Arabidopsis thaliana
gatgatttgccacgact

SEQ ID NO: 100085 - DNA, 17 bp, Arabidopsis thaliana
gatgatttgcttttgct

SEQ ID NO: 100086 - DNA, 17 bp, Arabidopsis thaliana
gatgatttgtttttgct

SEQ ID NO: 100087 - DNA, 17 bp, Arabidopsis thaliana
gatgcaacacgaggact

SEQ ID NO: 100088 - DNA, 17 bp, Arabidopsis thaliana
gatgcaccagttccggg

SEQ ID NO: 100089 - DNA, 17 bp, Arabidopsis thaliana
gatgcaccgatcaaagt

SEQ ID NO: 100090 - DNA, 17 bp, Arabidopsis thaliana
gatgcacgtctgcctgg

SEQ ID NO: 100091 - DNA, 17 bp, Arabidopsis thaliana
gatgcacgttcggaggg

SEQ ID NO: 100092 - DNA, 17 bp, Arabidopsis thaliana
gatgcagatgaagcggt

SEQ ID NO: 100093 - DNA, 17 bp, Arabidopsis thaliana
gatgcagcggacaaagc

SEQ ID NO: 100094 - DNA, 17 bp, Arabidopsis thaliana
gatgcaggaaccaccac

SEQ ID NO: 100095 - DNA, 17 bp, Arabidopsis thaliana
gatgcagttttgagtgc

SEQ ID NO: 100096 - DNA, 17 bp, Arabidopsis thaliana
gatgcatagattctcaa

SEQ ID NO: 100097 - DNA, 17 bp, Arabidopsis thaliana
gatgcatatgggcgaac

SEQ ID NO: 100098 - DNA, 17 bp, Arabidopsis thaliana
gatgcatgtccgcaaat

SEQ ID NO: 100099 - DNA, 17 bp, Arabidopsis thaliana
gatgcatttcatcattt

SEQ ID NO: 100100 - DNA, 17 bp, Arabidopsis thaliana
gatgccaatgggtctgc

SEQ ID NO: 100101 - DNA, 17 bp, Arabidopsis thaliana
gatgccagtgctgcgac

SEQ ID NO: 100102 - DNA, 17 bp, Arabidopsis thaliana
gatgccagtggaggtga

SEQ ID NO: 100103 - DNA, 17 bp, Arabidopsis thaliana
gatgcccattaaagacc

SEQ ID NO: 100104 - DNA, 17 bp, Arabidopsis thaliana
gatgcccgcgtcgcgat

SEQ ID NO: 100105 - DNA, 17 bp, Arabidopsis thaliana
gatgcccttagatgttc

SEQ ID NO: 100106 - DNA, 17 bp, Arabidopsis thaliana
gatgcccttagatgttt

SEQ ID NO: 100107 - DNA, 17 bp, Arabidopsis thaliana
gatgccctttgtcgcta

SEQ ID NO: 100108 - DNA, 17 bp, Arabidopsis thaliana
gatgccgccgacagccc

SEQ ID NO: 100109 - DNA, 17 bp, Arabidopsis thaliana
gatgccggaaacttcag

SEQ ID NO: 100110 - DNA, 17 bp, Arabidopsis thaliana
gatgcctatgtggataa

SEQ ID NO: 100111 - DNA, 17 bp, Arabidopsis thaliana
gatgcctatttggctgc

SEQ ID NO: 100112 - DNA, 17 bp, Arabidopsis thaliana
gatgcctctaagggacg

SEQ ID NO: 100113 - DNA, 17 bp, Arabidopsis thaliana
gatgcctggctcgagta

SEQ ID NO: 100114 - DNA, 17 bp, Arabidopsis thaliana
gatgccttcagaaatgc

SEQ ID NO: 100115 - DNA, 17 bp, Arabidopsis thaliana
gatgcctttggattcga

SEQ ID NO: 100116 - DNA, 17 bp, Arabidopsis thaliana
gatgcgaattgtcatga

SEQ ID NO: 100117 - DNA, 17 bp, Arabidopsis thaliana
gatgcgatcataccagc

SEQ ID NO: 100118 - DNA, 17 bp, Arabidopsis thaliana
gatgcggaacggagcaa

SEQ ID NO: 100119 - DNA, 17 bp, Arabidopsis thaliana
gatgcggactacctgca

SEQ ID NO: 100120 - DNA, 17 bp, Arabidopsis thaliana
gatgcggcttttctggt

SEQ ID NO: 100121 - DNA, 17 bp, Arabidopsis thaliana
gatgcgggatgaaccgg

SEQ ID NO: 100122 - DNA, 17 bp, Arabidopsis thaliana
gatgcggtagcggttta

SEQ ID NO: 100123 - DNA, 17 bp, Arabidopsis thaliana
gatgcggtcgtttagtg

SEQ ID NO: 100124 - DNA, 17 bp, Arabidopsis thaliana
gatgcgtccacgataat

SEQ ID NO: 100125 - DNA, 17 bp, Arabidopsis thaliana
gatgcgtcgtgctgcta

SEQ ID NO: 100126 - DNA, 17 bp, Arabidopsis thaliana
gatgcgtctgtaggtgg

SEQ ID NO: 100127 - DNA, 17 bp, Arabidopsis thaliana
gatgcgtttgcgggagt

SEQ ID NO: 100128 - DNA, 17 bp, Arabidopsis thaliana
gatgctaacgcaacgtg

SEQ ID NO: 100129 - DNA, 17 bp, Arabidopsis thaliana
gatgctaacgcaatgtg

SEQ ID NO: 100130 - DNA, 17 bp, Arabidopsis thaliana
gatgctaagtccgttcg

SEQ ID NO: 100131 - DNA, 17 bp, Arabidopsis thaliana
gatgctaagttaccaaa

SEQ ID NO: 100132 - DNA, 17 bp, Arabidopsis thaliana
gatgctagcggcttaga

SEQ ID NO: 100133 - DNA, 17 bp, Arabidopsis thaliana
gatgctataatttccga

SEQ ID NO: 100134 - DNA, 17 bp, Arabidopsis thaliana
gatgctcaaacgagccg

SEQ ID NO: 100135 - DNA, 17 bp, Arabidopsis thaliana
gatgctccaatggtcac

SEQ ID NO: 100136 - DNA, 17 bp, Arabidopsis thaliana
gatgctccagcaaggat

SEQ ID NO: 100137 - DNA, 17 bp, Arabidopsis thaliana
gatgctcttagacgtcg

SEQ ID NO: 100138 - DNA, 17 bp, Arabidopsis thaliana
gatgctgacacctgcga

SEQ ID NO: 100139 - DNA, 17 bp, Arabidopsis thaliana
gatgctgaggtggcgac

SEQ ID NO: 100140 - DNA, 17 bp, Arabidopsis thaliana
gatgctgccatgcatgc

SEQ ID NO: 100141 - DNA, 17 bp, Arabidopsis thaliana
gatgctgtcctagccga

SEQ ID NO: 100142 - DNA, 17 bp, Arabidopsis thaliana
gatgctgtgctgcgaac

SEQ ID NO: 100143 - DNA, 17 bp, Arabidopsis thaliana
gatgctgttacccagtt

SEQ ID NO: 100144 - DNA, 17 bp, Arabidopsis thaliana
gatgcttagtccgtccg

SEQ ID NO: 100145 - DNA, 17 bp, Arabidopsis thaliana
gatgcttatggttcgca

SEQ ID NO: 100146 - DNA, 17 bp, Arabidopsis thaliana
gatgcttctcgactact

SEQ ID NO: 100147 - DNA, 17 bp, Arabidopsis thaliana
gatgcttgccgcacaag

SEQ ID NO: 100148 - DNA, 17 bp, Arabidopsis thaliana
gatgcttgtgcgcctac

SEQ ID NO: 100149 - DNA, 17 bp, Arabidopsis thaliana
gatgctttgaatggatg

SEQ ID NO: 100150 - DNA, 17 bp, Arabidopsis thaliana
gatgcttttgcgggagt

SEQ ID NO: 100151 - DNA, 17 bp, Arabidopsis thaliana
gatgcttttgtcgctaa

SEQ ID NO: 100152 - DNA, 17 bp, Arabidopsis thaliana
gatggaaatgttggtgg

SEQ ID NO: 100153 - DNA, 17 bp, Arabidopsis thaliana
gatggaaccaggaaggt

SEQ ID NO: 100154 - DNA, 17 bp, Arabidopsis thaliana
gatggaacctcgtgctc

SEQ ID NO: 100155 - DNA, 17 bp, Arabidopsis thaliana
gatggaacgatgaaagc

SEQ ID NO: 100156 - DNA, 17 bp, Arabidopsis thaliana
gatggaacttgtgacca

SEQ ID NO: 100157 - DNA, 17 bp, Arabidopsis thaliana
gatggaagccgcgtctg

SEQ ID NO: 100158 - DNA, 17 bp, Arabidopsis thaliana
gatggaaggggataggg

SEQ ID NO: 100159 - DNA, 17 bp, Arabidopsis thaliana
gatggaataggccgttc

SEQ ID NO: 100160 - DNA, 17 bp, Arabidopsis thaliana
gatggaatcaactctgc

SEQ ID NO: 100161 - DNA, 17 bp, Arabidopsis thaliana
gatggaatcgccgatta

SEQ ID NO: 100162 - DNA, 17 bp, Arabidopsis thaliana
gatggaatgcttgatcc

SEQ ID NO: 100163 - DNA, 17 bp, Arabidopsis thaliana
gatggacaacaggtgaa

SEQ ID NO: 100164 - DNA, 17 bp, Arabidopsis thaliana
gatggaccaaaaacggt

SEQ ID NO: 100165 - DNA, 17 bp, Arabidopsis thaliana
gatggaccaagacgcgt

SEQ ID NO: 100166 - DNA, 17 bp, Arabidopsis thaliana
gatggaccatcactgat

SEQ ID NO: 100167 - DNA, 17 bp, Arabidopsis thaliana
gatggaccgagattcgt

SEQ ID NO: 100168 - DNA, 17 bp, Arabidopsis thaliana
gatggacgatttcatga

SEQ ID NO: 100169 - DNA, 17 bp, Arabidopsis thaliana
gatggacgcaccgctgg

SEQ ID NO: 100170 - DNA, 17 bp, Arabidopsis thaliana
gatggactacagatttg

SEQ ID NO: 100171 - DNA, 17 bp, Arabidopsis thaliana
gatggactgatggactg

SEQ ID NO: 100172 - DNA, 17 bp, Arabidopsis thaliana
gatggacttgggcaaag

SEQ ID NO: 100173 - DNA, 17 bp, Arabidopsis thaliana
gatggagacgcacggac

SEQ ID NO: 100174 - DNA, 17 bp, Arabidopsis thaliana
gatggagcagctttgta

SEQ ID NO: 100175 - DNA, 17 bp, Arabidopsis thaliana
gatggagcgtcttgcat

SEQ ID NO: 100176 - DNA, 17 bp, Arabidopsis thaliana
gatggagctcggacgcg

SEQ ID NO: 100177 - DNA, 17 bp, Arabidopsis thaliana
gatggaggagacgcaag

SEQ ID NO: 100178 - DNA, 17 bp, Arabidopsis thaliana
gatggaggcaagtgtgc

SEQ ID NO: 100179 - DNA, 17 bp, Arabidopsis thaliana
gatggagggaagcagca

SEQ ID NO: 100180 - DNA, 17 bp, Arabidopsis thaliana
gatggaggtccaggccg

SEQ ID NO: 100181 - DNA, 17 bp, Arabidopsis thaliana
gatggaggtgctagtcg

SEQ ID NO: 100182 - DNA, 17 bp, Arabidopsis thaliana
gatggagtgctgggatt

SEQ ID NO: 100183 - DNA, 17 bp, Arabidopsis thaliana
gatggagttacctgtag

SEQ ID NO: 100184 - DNA, 17 bp, Arabidopsis thaliana
gatggagttatcgacga

SEQ ID NO: 100185 - DNA, 17 bp, Arabidopsis thaliana
gatggataaagggtgtt

SEQ ID NO: 100186 - DNA, 17 bp, Arabidopsis thaliana
gatggatactagacgct

SEQ ID NO: 100187 - DNA, 17 bp, Arabidopsis thaliana
gatggatactaggcgct

SEQ ID NO: 100188 - DNA, 17 bp, Arabidopsis thaliana
gatggatactcaggatt

SEQ ID NO: 100189 - DNA, 17 bp, Arabidopsis thaliana
gatggatcaaaaacggt

SEQ ID NO: 100190 - DNA, 17 bp, Arabidopsis thaliana
gatggatcaaacctcga

SEQ ID NO: 100191 - DNA, 17 bp, Arabidopsis thaliana
gatggatcaccgttcgc

SEQ ID NO: 100192 - DNA, 17 bp, Arabidopsis thaliana
gatggatcacgcatcct

SEQ ID NO: 100193 - DNA, 17 bp, Arabidopsis thaliana
gatggatcactcgacaa

SEQ ID NO: 100194 - DNA, 17 bp, Arabidopsis thaliana
gatggatcatttggatg

SEQ ID NO: 100195 - DNA, 17 bp, Arabidopsis thaliana
gatggatccaacctcga

SEQ ID NO: 100196 - DNA, 17 bp, Arabidopsis thaliana
gatggatccagtttcat

SEQ ID NO: 100197 - DNA, 17 bp, Arabidopsis thaliana
gatggatccctgtagat

SEQ ID NO: 100198 - DNA, 17 bp, Arabidopsis thaliana
gatggatccgcatcctg

SEQ ID NO: 100199 - DNA, 17 bp, Arabidopsis thaliana
gatggatccgcgtcctg

SEQ ID NO: 100200 - DNA, 17 bp, Arabidopsis thaliana
gatggatcctacgcatc

SEQ ID NO: 100201 - DNA, 17 bp, Arabidopsis thaliana
gatggatcctatccttt

SEQ ID NO: 100202 - DNA, 17 bp, Arabidopsis thaliana
gatggatcctattcgca

SEQ ID NO: 100203 - DNA, 17 bp, Arabidopsis thaliana
gatggatccttagtcgc

SEQ ID NO: 100204 - DNA, 17 bp, Arabidopsis thaliana
gatggatcgagtttcag

SEQ ID NO: 100205 - DNA, 17 bp, Arabidopsis thaliana
gatggatcgcacccatg

SEQ ID NO: 100206 - DNA, 17 bp, Arabidopsis thaliana
gatggatcgcatggcct

SEQ ID NO: 100207 - DNA, 17 bp, Arabidopsis thaliana
gatggatcgccagttga

SEQ ID NO: 100208 - DNA, 17 bp, Arabidopsis thaliana
gatggatcggccagatc

SEQ ID NO: 100209 - DNA, 17 bp, Arabidopsis thaliana
gatggatcggtatacca

SEQ ID NO: 100210 - DNA, 17 bp, Arabidopsis thaliana
gatggatcgtgtgctag

SEQ ID NO: 100211 - DNA, 17 bp, Arabidopsis thaliana
gatggatctcgcatcct

SEQ ID NO: 100212 - DNA, 17 bp, Arabidopsis thaliana
gatggatctggctccat

SEQ ID NO: 100213 - DNA, 17 bp, Arabidopsis thaliana
gatggatcttagattca

SEQ ID NO: 100214 - DNA, 17 bp, Arabidopsis thaliana
gatggatgagggtaatt

SEQ ID NO: 100215 - DNA, 17 bp, Arabidopsis thaliana
gatggatgatgatgatg

SEQ ID NO: 100216 - DNA, 17 bp, Arabidopsis thaliana
gatggatgtagccaagt

SEQ ID NO: 100217 - DNA, 17 bp, Arabidopsis thaliana
gatggatgtcaaaacgg

SEQ ID NO: 100218 - DNA, 17 bp, Arabidopsis thaliana
gatggattatgactgaa

SEQ ID NO: 100219 - DNA, 17 bp, Arabidopsis thaliana
gatggattgcgtggttt

SEQ ID NO: 100220 - DNA, 17 bp, Arabidopsis thaliana
gatggatttctctattt

SEQ ID NO: 100221 - DNA, 17 bp, Arabidopsis thaliana
gatggcaaagtgcccac

SEQ ID NO: 100222 - DNA, 17 bp, Arabidopsis thaliana
gatggcaaagtgccctc

SEQ ID NO: 100223 - DNA, 17 bp, Arabidopsis thaliana
gatggcacgtctgcctg

SEQ ID NO: 100224 - DNA, 17 bp, Arabidopsis thaliana
gatggcactgcactcat

SEQ ID NO: 100225 - DNA, 17 bp, Arabidopsis thaliana
gatggcagagaatcgat

SEQ ID NO: 100226 - DNA, 17 bp, Arabidopsis thaliana
gatggcagtccagatca

SEQ ID NO: 100227 - DNA, 17 bp, Arabidopsis thaliana
gatggcagttcatccac

SEQ ID NO: 100228 - DNA, 17 bp, Arabidopsis thaliana
gatggcgactagggttg

SEQ ID NO: 100229 - DNA, 17 bp, Arabidopsis thaliana
gatggcgctgtctacga

SEQ ID NO: 100230 - DNA, 17 bp, Arabidopsis thaliana
gatggcgcttaagcgcg

SEQ ID NO: 100231 - DNA, 17 bp, Arabidopsis thaliana
gatggctaaagcccttc

SEQ ID NO: 100232 - DNA, 17 bp, Arabidopsis thaliana
gatggctagtgtccaaa

SEQ ID NO: 100233 - DNA, 17 bp, Arabidopsis thaliana
gatggctcagatactcg

SEQ ID NO: 100234 - DNA, 17 bp, Arabidopsis thaliana
gatggctgacttaccgt

SEQ ID NO: 100235 - DNA, 17 bp, Arabidopsis thaliana
gatggctgagtggctta

SEQ ID NO: 100236 - DNA, 17 bp, Arabidopsis thaliana
gatggctggctcctatg

SEQ ID NO: 100237 - DNA, 17 bp, Arabidopsis thaliana
gatggctgggctcgggg

SEQ ID NO: 100238 - DNA, 17 bp, Arabidopsis thaliana
gatgggaccagtcgttt

SEQ ID NO: 100239 - DNA, 17 bp, Arabidopsis thaliana
gatgggaccctacaggt

SEQ ID NO: 100240 - DNA, 17 bp, Arabidopsis thaliana
gatgggactgtcgttga

SEQ ID NO: 100241 - DNA, 17 bp, Arabidopsis thaliana
gatgggaggaagatggc

SEQ ID NO: 100242 - DNA, 17 bp, Arabidopsis thaliana
gatgggagtccggctgt

SEQ ID NO: 100243 - DNA, 17 bp, Arabidopsis thaliana
gatgggagtggatttat

SEQ ID NO: 100244 - DNA, 17 bp, Arabidopsis thaliana
gatgggatagcttctgt

SEQ ID NO: 100245 - DNA, 17 bp, Arabidopsis thaliana
gatgggatccggtcgga

SEQ ID NO: 100246 - DNA, 17 bp, Arabidopsis thaliana
gatgggatccggtgcat

SEQ ID NO: 100247 - DNA, 17 bp, Arabidopsis thaliana
gatgggatccggtgcgt

SEQ ID NO: 100248 - DNA, 17 bp, Arabidopsis thaliana
gatgggatcctgtgcat

SEQ ID NO: 100249 - DNA, 17 bp, Arabidopsis thaliana
gatgggatctcaagcgg

SEQ ID NO: 100250 - DNA, 17 bp, Arabidopsis thaliana
gatgggatctggtcact

SEQ ID NO: 100251 - DNA, 17 bp, Arabidopsis thaliana
gatgggatgtatgttgt

SEQ ID NO: 100252 - DNA, 17 bp, Arabidopsis thaliana
gatgggattcgaatcgg

SEQ ID NO: 100253 - DNA, 17 bp, Arabidopsis thaliana
gatgggcccttgtaact

SEQ ID NO: 100254 - DNA, 17 bp, Arabidopsis thaliana
gatgggccgacgggtta

SEQ ID NO: 100255 - DNA, 17 bp, Arabidopsis thaliana
gatgggccgttcatcct

SEQ ID NO: 100256 - DNA, 17 bp, Arabidopsis thaliana
gatgggcctacaggttg

SEQ ID NO: 100257 - DNA, 17 bp, Arabidopsis thaliana
gatgggccttgggcacc

SEQ ID NO: 100258 - DNA, 17 bp, Arabidopsis thaliana
gatgggcggatttattt

SEQ ID NO: 100259 - DNA, 17 bp, Arabidopsis thaliana
gatgggcgggtatgcga

SEQ ID NO: 100260 - DNA, 17 bp, Arabidopsis thaliana
gatgggggccggcgatg

SEQ ID NO: 100261 - DNA, 17 bp, Arabidopsis thaliana
gatggggttttcctcgc

SEQ ID NO: 100262 - DNA, 17 bp, Arabidopsis thaliana
gatgggtaaaggctttg

SEQ ID NO: 100263 - DNA, 17 bp, Arabidopsis thaliana
gatgggtatcgtattgt

SEQ ID NO: 100264 - DNA, 17 bp, Arabidopsis thaliana
gatgggtcaaatgggtt

SEQ ID NO: 100265 - DNA, 17 bp, Arabidopsis thaliana
gatgggtcgactgattc

SEQ ID NO: 100266 - DNA, 17 bp, Arabidopsis thaliana
gatgggtcggccggtcc

SEQ ID NO: 100267 - DNA, 17 bp, Arabidopsis thaliana
gatgggtctgccggtcc

SEQ ID NO: 100268 - DNA, 17 bp, Arabidopsis thaliana
gatgggtgacctcccag

SEQ ID NO: 100269 - DNA, 17 bp, Arabidopsis thaliana
gatgggtgacctcccgg

SEQ ID NO: 100270 - DNA, 17 bp, Arabidopsis thaliana
gatgggtgacctcctgg

SEQ ID NO: 100271 - DNA, 17 bp, Arabidopsis thaliana
gatgggtgaccttccgg

SEQ ID NO: 100272 - DNA, 17 bp, Arabidopsis thaliana
gatgggtgcaaagagtt

SEQ ID NO: 100273 - DNA, 17 bp, Arabidopsis thaliana
gatgggtggattacacg

SEQ ID NO: 100274 - DNA, 17 bp, Arabidopsis thaliana
gatgggtgggtcggcga

SEQ ID NO: 100275 - DNA, 17 bp, Arabidopsis thaliana
gatgggtgtgttaactt

SEQ ID NO: 100276 - DNA, 17 bp, Arabidopsis thaliana
gatgggttgtacagagt

SEQ ID NO: 100277 - DNA, 17 bp, Arabidopsis thaliana
gatgggttgtagagagt

SEQ ID NO: 100278 - DNA, 17 bp, Arabidopsis thaliana
gatgggtttgcttggtg

SEQ ID NO: 100279 - DNA, 17 bp, Arabidopsis thaliana
gatggtaagacgagttt

SEQ ID NO: 100280 - DNA, 17 bp, Arabidopsis thaliana
gatggtaagacgggttt

SEQ ID NO: 100281 - DNA, 17 bp, Arabidopsis thaliana
gatggtacctgtgctac

SEQ ID NO: 100282 - DNA, 17 bp, Arabidopsis thaliana
gatggtacgccagaata

SEQ ID NO: 100283 - DNA, 17 bp, Arabidopsis thaliana
gatggtactcactttca

SEQ ID NO: 100284 - DNA, 17 bp, Arabidopsis thaliana
gatggtagagatgtggt

SEQ ID NO: 100285 - DNA, 17 bp, Arabidopsis thaliana
gatggtagcggttatta

SEQ ID NO: 100286 - DNA, 17 bp, Arabidopsis thaliana
gatggtaggacgatttt

SEQ ID NO: 100287 - DNA, 17 bp, Arabidopsis thaliana
gatggtaggacgggttt

SEQ ID NO: 100288 - DNA, 17 bp, Arabidopsis thaliana
gatggtaggacggtttt

SEQ ID NO: 100289 - DNA, 17 bp, Arabidopsis thaliana
gatggtagtccaacaat

SEQ ID NO: 100290 - DNA, 17 bp, Arabidopsis thaliana
gatggtagttcaagtat

SEQ ID NO: 100291 - DNA, 17 bp, Arabidopsis thaliana
gatggtatactacaggt

SEQ ID NO: 100292 - DNA, 17 bp, Arabidopsis thaliana
gatggtatccagatttc

SEQ ID NO: 100293 - DNA, 17 bp, Arabidopsis thaliana
gatggtatcttggtgcc

SEQ ID NO: 100294 - DNA, 17 bp, Arabidopsis thaliana
gatggtcagttggtgga

SEQ ID NO: 100295 - DNA, 17 bp, Arabidopsis thaliana
gatggtccatctgaatg

SEQ ID NO: 100296 - DNA, 17 bp, Arabidopsis thaliana
gatggtccccgaacccg

SEQ ID NO: 100297 - DNA, 17 bp, Arabidopsis thaliana
gatggtccctgcggatg

SEQ ID NO: 100298 - DNA, 17 bp, Arabidopsis thaliana
gatggtccgcagcggtt

SEQ ID NO: 100299 - DNA, 17 bp, Arabidopsis thaliana
gatggtccgttgcggtt

SEQ ID NO: 100300 - DNA, 17 bp, Arabidopsis thaliana
gatggtcctgttcgttt

SEQ ID NO: 100301 - DNA, 17 bp, Arabidopsis thaliana
gatggtcgttgtcgcct

SEQ ID NO: 100302 - DNA, 17 bp, Arabidopsis thaliana
gatggtctcaattatcg

SEQ ID NO: 100303 - DNA, 17 bp, Arabidopsis thaliana
gatggtgaactatgcat

SEQ ID NO: 100304 - DNA, 17 bp, Arabidopsis thaliana
gatggtgaactatgcct

SEQ ID NO: 100305 - DNA, 17 bp, Arabidopsis thaliana
gatggtgacagactgat

SEQ ID NO: 100306 - DNA, 17 bp, Arabidopsis thaliana
gatggtgagggacgacg

SEQ ID NO: 100307 - DNA, 17 bp, Arabidopsis thaliana
gatggtgagtcgatttg

SEQ ID NO: 100308 - DNA, 17 bp, Arabidopsis thaliana
gatggtgattgtctccg

SEQ ID NO: 100309 - DNA, 17 bp, Arabidopsis thaliana
gatggtgcgacggatct

SEQ ID NO: 100310 - DNA, 17 bp, Arabidopsis thaliana
gatggtggacgcaacaa

SEQ ID NO: 100311 - DNA, 17 bp, Arabidopsis thaliana
gatggtggcggcgctgg

SEQ ID NO: 100312 - DNA, 17 bp, Arabidopsis thaliana
gatggtggctgcctctt

SEQ ID NO: 100313 - DNA, 17 bp, Arabidopsis thaliana
gatggtgggcagttgcg

SEQ ID NO: 100314 - DNA, 17 bp, Arabidopsis thaliana
gatggtggttgtctccg

SEQ ID NO: 100315 - DNA, 17 bp, Arabidopsis thaliana
gatggtgtactacgggt

SEQ ID NO: 100316 - DNA, 17 bp, Arabidopsis thaliana
gatggttagagcttgtg

SEQ ID NO: 100317 - DNA, 17 bp, Arabidopsis thaliana
gatggttcacgggattc

SEQ ID NO: 100318 - DNA, 17 bp, Arabidopsis thaliana
gatggttcagctttttg

SEQ ID NO: 100319 - DNA, 17 bp, Arabidopsis thaliana
gatggttccagaccggg

SEQ ID NO: 100320 - DNA, 17 bp, Arabidopsis thaliana
gatggttcgataagcca

SEQ ID NO: 100321 - DNA, 17 bp, Arabidopsis thaliana
gatggttcggaatctac

SEQ ID NO: 100322 - DNA, 17 bp, Arabidopsis thaliana
gatggttgaagacattc

SEQ ID NO: 100323 - DNA, 17 bp, Arabidopsis thaliana
gatggttgcagtgaagc

SEQ ID NO: 100324 - DNA, 17 bp, Arabidopsis thaliana
gatggttggacacgcat

SEQ ID NO: 100325 - DNA, 17 bp, Arabidopsis thaliana
gatggtttacagtcaat

SEQ ID NO: 100326 - DNA, 17 bp, Arabidopsis thaliana
gatggtttacggtcaaa

SEQ ID NO: 100327 - DNA, 17 bp, Arabidopsis thaliana
gatggtttagccgaagt

SEQ ID NO: 100328 - DNA, 17 bp, Arabidopsis thaliana
gatggtttcctcctaag

SEQ ID NO: 100329 - DNA, 17 bp, Arabidopsis thaliana
gatggtttctactcggg

SEQ ID NO: 100330 - DNA, 17 bp, Arabidopsis thaliana
gatggtttgtccgcttg

SEQ ID NO: 100331 - DNA, 17 bp, Arabidopsis thaliana
gatgtaacgcatgttgt

SEQ ID NO: 100332 - DNA, 17 bp, Arabidopsis thaliana
gatgtaacttcatctga

SEQ ID NO: 100333 - DNA, 17 bp, Arabidopsis thaliana
gatgtaatggtgacggt

SEQ ID NO: 100334 - DNA, 17 bp, Arabidopsis thaliana
gatgtagactaaactgg

SEQ ID NO: 100335 - DNA, 17 bp, Arabidopsis thaliana
gatgtagcgttctttac

SEQ ID NO: 100336 - DNA, 17 bp, Arabidopsis thaliana
gatgtaggactccgcat

SEQ ID NO: 100337 - DNA, 17 bp, Arabidopsis thaliana
gatgtaggatgtgtcag

SEQ ID NO: 100338 - DNA, 17 bp, Arabidopsis thaliana
gatgtaggtgtgatgac

SEQ ID NO: 100339 - DNA, 17 bp, Arabidopsis thaliana
gatgtaggtgttttctc

SEQ ID NO: 100340 - DNA, 17 bp, Arabidopsis thaliana
gatgtaggttgcgacca

SEQ ID NO: 100341 - DNA, 17 bp, Arabidopsis thaliana
gatgtagttttgagtgc

SEQ ID NO: 100342 - DNA, 17 bp, Arabidopsis thaliana
gatgtatccgtttttga

SEQ ID NO: 100343 - DNA, 17 bp, Arabidopsis thaliana
gatgtatctgcacagtg

SEQ ID NO: 100344 - DNA, 17 bp, Arabidopsis thaliana
gatgtatctggacagtg

SEQ ID NO: 100345 - DNA, 17 bp, Arabidopsis thaliana
gatgtatgcagctgagg

SEQ ID NO: 100346 - DNA, 17 bp, Arabidopsis thaliana
gatgtatggtcgcaagg

SEQ ID NO: 100347 - DNA, 17 bp, Arabidopsis thaliana
gatgtatgtcctgacgg

SEQ ID NO: 100348 - DNA, 17 bp, Arabidopsis thaliana
gatgtcaaactgcagct

SEQ ID NO: 100349 - DNA, 17 bp, Arabidopsis thaliana
gatgtcaaaggtaacat

SEQ ID NO: 100350 - DNA, 17 bp, Arabidopsis thaliana
gatgtcaattccgttgc

SEQ ID NO: 100351 - DNA, 17 bp, Arabidopsis thaliana
gatgtcacgtcggattg

SEQ ID NO: 100352 - DNA, 17 bp, Arabidopsis thaliana
gatgtcactatgcaatt

SEQ ID NO: 100353 - DNA, 17 bp, Arabidopsis thaliana
gatgtcactggcttatt

SEQ ID NO: 100354 - DNA, 17 bp, Arabidopsis thaliana
gatgtcagagaacttgg

SEQ ID NO: 100355 - DNA, 17 bp, Arabidopsis thaliana
gatgtcaggaagaggct

SEQ ID NO: 100356 - DNA, 17 bp, Arabidopsis thaliana
gatgtcagtctgcctgg

SEQ ID NO: 100357 - DNA, 17 bp, Arabidopsis thaliana
gatgtcagtggtgctat

SEQ ID NO: 100358 - DNA, 17 bp, Arabidopsis thaliana
gatgtcagttgggtctt

SEQ ID NO: 100359 - DNA, 17 bp, Arabidopsis thaliana
gatgtcattgtcgaagc

SEQ ID NO: 100360 - DNA, 17 bp, Arabidopsis thaliana
gatgtcattttttcggg

SEQ ID NO: 100361 - DNA, 17 bp, Arabidopsis thaliana
gatgtcccgtgttcact

SEQ ID NO: 100362 - DNA, 17 bp, Arabidopsis thaliana
gatgtccggtgcgcccc

SEQ ID NO: 100363 - DNA, 17 bp, Arabidopsis thaliana
gatgtcctaggatgtgc

SEQ ID NO: 100364 - DNA, 17 bp, Arabidopsis thaliana
gatgtcctccaggtgat

SEQ ID NO: 100365 - DNA, 17 bp, Arabidopsis thaliana
gatgtcctcgtgttgca

SEQ ID NO: 100366 - DNA, 17 bp, Arabidopsis thaliana
gatgtcctctactcgac

SEQ ID NO: 100367 - DNA, 17 bp, Arabidopsis thaliana
gatgtccttggagtgcc

SEQ ID NO: 100368 - DNA, 17 bp, Arabidopsis thaliana
gatgtcgatagactgat

SEQ ID NO: 100369 - DNA, 17 bp, Arabidopsis thaliana
gatgtcgatcgtcggct

SEQ ID NO: 100370 - DNA, 17 bp, Arabidopsis thaliana
gatgtcgcacggcgatc

SEQ ID NO: 100371 - DNA, 17 bp, Arabidopsis thaliana
gatgtcgccggattcgt

SEQ ID NO: 100372 - DNA, 17 bp, Arabidopsis thaliana
gatgtcggattcagatc

SEQ ID NO: 100373 - DNA, 17 bp, Arabidopsis thaliana
gatgtcggctcttcgcc

SEQ ID NO: 100374 - DNA, 17 bp, Arabidopsis thaliana
gatgtcgggaagagact

SEQ ID NO: 100375 - DNA, 17 bp, Arabidopsis thaliana
gatgtcgggattcttct

SEQ ID NO: 100376 - DNA, 17 bp, Arabidopsis thaliana
gatgtcgtcaagcggag

SEQ ID NO: 100377 - DNA, 17 bp, Arabidopsis thaliana
gatgtcgtccagcggtg

SEQ ID NO: 100378 - DNA, 17 bp, Arabidopsis thaliana
gatgtcgtccagcggtt

SEQ ID NO: 100379 - DNA, 17 bp, Arabidopsis thaliana
gatgtcgtccagcgtta

SEQ ID NO: 100380 - DNA, 17 bp, Arabidopsis thaliana
gatgtcgtcggcgatgg

SEQ ID NO: 100381 - DNA, 17 bp, Arabidopsis thaliana
gatgtcgtcggctacag

SEQ ID NO: 100382 - DNA, 17 bp, Arabidopsis thaliana
gatgtcgtctgtcgtgg

SEQ ID NO: 100383 - DNA, 17 bp, Arabidopsis thaliana
gatgtcgtcttcacttt

SEQ ID NO: 100384 - DNA, 17 bp, Arabidopsis thaliana
gatgtcgtttccacaga

SEQ ID NO: 100385 - DNA, 17 bp, Arabidopsis thaliana
gatgtctagcggtgtct

SEQ ID NO: 100386 - DNA, 17 bp, Arabidopsis thaliana
gatgtctatttgagtga

SEQ ID NO: 100387 - DNA, 17 bp, Arabidopsis thaliana
gatgtctcaggatcaac

SEQ ID NO: 100388 - DNA, 17 bp, Arabidopsis thaliana
gatgtctccaaggtgaa

SEQ ID NO: 100389 - DNA, 17 bp, Arabidopsis thaliana
gatgtctcgctgaacct

SEQ ID NO: 100390 - DNA, 17 bp, Arabidopsis thaliana
gatgtctctctcgaaag

SEQ ID NO: 100391 - DNA, 17 bp, Arabidopsis thaliana
gatgtctgaattcagag

SEQ ID NO: 100392 - DNA, 17 bp, Arabidopsis thaliana
gatgtctgattcctgcg

SEQ ID NO: 100393 - DNA, 17 bp, Arabidopsis thaliana
gatgtctgcctgggtgt

SEQ ID NO: 100394 - DNA, 17 bp, Arabidopsis thaliana
gatgtctgttggtgcca

SEQ ID NO: 100395 - DNA, 17 bp, Arabidopsis thaliana
gatgtcttccattgggg

SEQ ID NO: 100396 - DNA, 17 bp, Arabidopsis thaliana
gatgtcttcttgtggcc

SEQ ID NO: 100397 - DNA, 17 bp, Arabidopsis thaliana
gatgtcttgctcgtctg

SEQ ID NO: 100398 - DNA, 17 bp, Arabidopsis thaliana
gatgtctttggacgcaa

SEQ ID NO: 100399 - DNA, 17 bp, Arabidopsis thaliana
gatgtctttgtggctat

SEQ ID NO: 100400 - DNA, 17 bp, Arabidopsis thaliana
gatgtgaaataaccagt

SEQ ID NO: 100401 - DNA, 17 bp, Arabidopsis thaliana
gatgtgaagttgtccaa

SEQ ID NO: 100402 - DNA, 17 bp, Arabidopsis thaliana
gatgtgaatcccatctc

SEQ ID NO: 100403 - DNA, 17 bp, Arabidopsis thaliana
gatgtgaatcgatttta

SEQ ID NO: 100404 - DNA, 17 bp, Arabidopsis thaliana
gatgtgagagattgggt

SEQ ID NO: 100405 - DNA, 17 bp, Arabidopsis thaliana
gatgtgaggctttttct

SEQ ID NO: 100406 - DNA, 17 bp, Arabidopsis thaliana
gatgtgagggtggcgtc

SEQ ID NO: 100407 - DNA, 17 bp, Arabidopsis thaliana
gatgtgagtccaggtct

SEQ ID NO: 100408 - DNA, 17 bp, Arabidopsis thaliana
gatgtgatgatacagga

SEQ ID NO: 100409 - DNA, 17 bp, Arabidopsis thaliana
gatgtgcatgcatgcga

SEQ ID NO: 100410 - DNA, 17 bp, Arabidopsis thaliana
gatgtgcattggtcggc

SEQ ID NO: 100411 - DNA, 17 bp, Arabidopsis thaliana
gatgtgccaggatgtat

SEQ ID NO: 100412 - DNA, 17 bp, Arabidopsis thaliana
gatgtgcgcgacttata

SEQ ID NO: 100413 - DNA, 17 bp, Arabidopsis thaliana
gatgtgcttacaagact

SEQ ID NO: 100414 - DNA, 17 bp, Arabidopsis thaliana
gatgtgcttatccgtcg

SEQ ID NO: 100415 - DNA, 17 bp, Arabidopsis thaliana
gatgtgcttgatgttac

SEQ ID NO: 100416 - DNA, 17 bp, Arabidopsis thaliana
gatgtgcttggtccgct

SEQ ID NO: 100417 - DNA, 17 bp, Arabidopsis thaliana
gatgtgcttgtcgatta

SEQ ID NO: 100418 - DNA, 17 bp, Arabidopsis thaliana
gatgtggagaggatgtg

SEQ ID NO: 100419 - DNA, 17 bp, Arabidopsis thaliana
gatgtggaggatgttga

SEQ ID NO: 100420 - DNA, 17 bp, Arabidopsis thaliana
gatgtggatcagcttga

SEQ ID NO: 100421 - DNA, 17 bp, Arabidopsis thaliana
gatgtggatcggattga

SEQ ID NO: 100422 - DNA, 17 bp, Arabidopsis thaliana
gatgtggcgtttccaag

SEQ ID NO: 100423 - DNA, 17 bp, Arabidopsis thaliana
gatgtgggacattccaa

SEQ ID NO: 100424 - DNA, 17 bp, Arabidopsis thaliana
gatgtgggacctttggt

SEQ ID NO: 100425 - DNA, 17 bp, Arabidopsis thaliana
gatgtgggtccgctcct

SEQ ID NO: 100426 - DNA, 17 bp, Arabidopsis thaliana
gatgtgggtgctgaatg

SEQ ID NO: 100427 - DNA, 17 bp, Arabidopsis thaliana
gatgtgggtggcagagg

SEQ ID NO: 100428 - DNA, 17 bp, Arabidopsis thaliana
gatgtgggttctgaatg

SEQ ID NO: 100429 - DNA, 17 bp, Arabidopsis thaliana
gatgtggttggcgtaat

SEQ ID NO: 100430 - DNA, 17 bp, Arabidopsis thaliana
gatgtgtacgcgccttc

SEQ ID NO: 100431 - DNA, 17 bp, Arabidopsis thaliana
gatgtgtatccgctttc

SEQ ID NO: 100432 - DNA, 17 bp, Arabidopsis thaliana
gatgtgtcaactgctgg

SEQ ID NO: 100433 - DNA, 17 bp, Arabidopsis thaliana
gatgtgtcctgactaat

SEQ ID NO: 100434 - DNA, 17 bp, Arabidopsis thaliana
gatgtgtcgtctgccat

SEQ ID NO: 100435 - DNA, 17 bp, Arabidopsis thaliana
gatgtgtgacctcccgg

SEQ ID NO: 100436 - DNA, 17 bp, Arabidopsis thaliana
gatgtgtgactggaatg

SEQ ID NO: 100437 - DNA, 17 bp, Arabidopsis thaliana
gatgtgtgggtgccatg

SEQ ID NO: 100438 - DNA, 17 bp, Arabidopsis thaliana
gatgtgttctgcttctt

SEQ ID NO: 100439 - DNA, 17 bp, Arabidopsis thaliana
gatgtgttgctgattga

SEQ ID NO: 100440 - DNA, 17 bp, Arabidopsis thaliana
gatgtgtttctgcttct

SEQ ID NO: 100441 - DNA, 17 bp, Arabidopsis thaliana
gatgttaaagaaggctg

SEQ ID NO: 100442 - DNA, 17 bp, Arabidopsis thaliana
gatgttaaccagattag

SEQ ID NO: 100443 - DNA, 17 bp, Arabidopsis thaliana
gatgttaactcgccgat

SEQ ID NO: 100444 - DNA, 17 bp, Arabidopsis thaliana
gatgttaagtcgcaggt

SEQ ID NO: 100445 - DNA, 17 bp, Arabidopsis thaliana
gatgttagcagtggtat

SEQ ID NO: 100446 - DNA, 17 bp, Arabidopsis thaliana
gatgttcacattgctaa

SEQ ID NO: 100447 - DNA, 17 bp, Arabidopsis thaliana
gatgttcatttggtgga

SEQ ID NO: 100448 - DNA, 17 bp, Arabidopsis thaliana
gatgttccatctgaacg

SEQ ID NO: 100449 - DNA, 17 bp, Arabidopsis thaliana
gatgttccatctgaatg

SEQ ID NO: 100450 - DNA, 17 bp, Arabidopsis thaliana
gatgttcgaccacgcgt

SEQ ID NO: 100451 - DNA, 17 bp, Arabidopsis thaliana
gatgttcggctacgaca

SEQ ID NO: 100452 - DNA, 17 bp, Arabidopsis thaliana
gatgttctcaggggtga

SEQ ID NO: 100453 - DNA, 17 bp, Arabidopsis thaliana
gatgttctgggccgcac

SEQ ID NO: 100454 - DNA, 17 bp, Arabidopsis thaliana
gatgttctgtaacggct

SEQ ID NO: 100455 - DNA, 17 bp, Arabidopsis thaliana
gatgttgaagctgcttc

SEQ ID NO: 100456 - DNA, 17 bp, Arabidopsis thaliana
gatgttgaagtcaaggc

SEQ ID NO: 100457 - DNA, 17 bp, Arabidopsis thaliana
gatgttgaagtggaacc

SEQ ID NO: 100458 - DNA, 17 bp, Arabidopsis thaliana
gatgttgaatggctcta

SEQ ID NO: 100459 - DNA, 17 bp, Arabidopsis thaliana
gatgttgaccagtcgca

SEQ ID NO: 100460 - DNA, 17 bp, Arabidopsis thaliana
gatgttgagaccgttga

SEQ ID NO: 100461 - DNA, 17 bp, Arabidopsis thaliana
gatgttgcccaattcta

SEQ ID NO: 100462 - DNA, 17 bp, Arabidopsis thaliana
gatgttgcggttactgc

SEQ ID NO: 100463 - DNA, 17 bp, Arabidopsis thaliana
gatgttgcggttctctt

SEQ ID NO: 100464 - DNA, 17 bp, Arabidopsis thaliana
gatgttgcggtttaggc

SEQ ID NO: 100465 - DNA, 17 bp, Arabidopsis thaliana
gatgttgctactccgtc

SEQ ID NO: 100466 - DNA, 17 bp, Arabidopsis thaliana
gatgttgcttataggac

SEQ ID NO: 100467 - DNA, 17 bp, Arabidopsis thaliana
gatgttgggcttgatct

SEQ ID NO: 100468 - DNA, 17 bp, Arabidopsis thaliana
gatgttgggtttaggtc

SEQ ID NO: 100469 - DNA, 17 bp, Arabidopsis thaliana
gatgttgtggctatcca

SEQ ID NO: 100470 - DNA, 17 bp, Arabidopsis thaliana
gatgttgttgcggatat

SEQ ID NO: 100471 - DNA, 17 bp, Arabidopsis thaliana
gatgttgtttggttgca

SEQ ID NO: 100472 - DNA, 17 bp, Arabidopsis thaliana
gatgtttatggggcacg

SEQ ID NO: 100473 - DNA, 17 bp, Arabidopsis thaliana
gatgtttctacggatat

SEQ ID NO: 100474 - DNA, 17 bp, Arabidopsis thaliana
gatgtttctgtacacca

SEQ ID NO: 100475 - DNA, 17 bp, Arabidopsis thaliana
gatgtttcttggactgg

SEQ ID NO: 100476 - DNA, 17 bp, Arabidopsis thaliana
gatgtttgacctcccat

SEQ ID NO: 100477 - DNA, 17 bp, Arabidopsis thaliana
gatgtttgagagagaga

SEQ ID NO: 100478 - DNA, 17 bp, Arabidopsis thaliana
gatgtttggactagcag

SEQ ID NO: 100479 - DNA, 17 bp, Arabidopsis thaliana
gatgtttgtttcgttct

SEQ ID NO: 100480 - DNA, 17 bp, Arabidopsis thaliana
gatgttttacagagtga

SEQ ID NO: 100481 - DNA, 17 bp, Arabidopsis thaliana
gatgttttcatctgtgg

SEQ ID NO: 100482 - DNA, 17 bp, Arabidopsis thaliana
gatgttttccgctctag

SEQ ID NO: 100483 - DNA, 17 bp, Arabidopsis thaliana
gatgttttcctcctaag

SEQ ID NO: 100484 - DNA, 17 bp, Arabidopsis thaliana
gatgttttgatagatcc

SEQ ID NO: 100485 - DNA, 17 bp, Arabidopsis thaliana
gatgttttttttggtcg

SEQ ID NO: 100486 - DNA, 17 bp, Arabidopsis thaliana
gattaaatctagactca

SEQ ID NO: 100487 - DNA, 17 bp, Arabidopsis thaliana
gattaaatgaactaagc

SEQ ID NO: 100488 - DNA, 17 bp, Arabidopsis thaliana
gattaaatgaactcagc

SEQ ID NO: 100489 - DNA, 17 bp, Arabidopsis thaliana
gattaacagggacagtc

SEQ ID NO: 100490 - DNA, 17 bp, Arabidopsis thaliana
gattaacgagattccca

SEQ ID NO: 100491 - DNA, 17 bp, Arabidopsis thaliana
gattaacgattgtggcc

SEQ ID NO: 100492 - DNA, 17 bp, Arabidopsis thaliana
gattaactctgcgaggt

SEQ ID NO: 100493 - DNA, 17 bp, Arabidopsis thaliana
gattaagaatattgttg

SEQ ID NO: 100494 - DNA, 17 bp, Arabidopsis thaliana
gattaagccatgcatgt

SEQ ID NO: 100495 - DNA, 17 bp, Arabidopsis thaliana
gattaagctcaagttca

SEQ ID NO: 100496 - DNA, 17 bp, Arabidopsis thaliana
gattaatccgtcagcgg

SEQ ID NO: 100497 - DNA, 17 bp, Arabidopsis thaliana
gattaatccgttagcgg

SEQ ID NO: 100498 - DNA, 17 bp, Arabidopsis thaliana
gattaatcgtctcgcag

SEQ ID NO: 100499 - DNA, 17 bp, Arabidopsis thaliana
gattacaactaagattg

SEQ ID NO: 100500 - DNA, 17 bp, Arabidopsis thaliana
gattacaagaaactagc

SEQ ID NO: 100501 - DNA, 17 bp, Arabidopsis thaliana
gattacaaggcttattg

SEQ ID NO: 100502 - DNA, 17 bp, Arabidopsis thaliana
gattacactctgaaggc

SEQ ID NO: 100503 - DNA, 17 bp, Arabidopsis thaliana
gattacagacacagtta

SEQ ID NO: 100504 - DNA, 17 bp, Arabidopsis thaliana
gattacaggctttggcc

SEQ ID NO: 100505 - DNA, 17 bp, Arabidopsis thaliana
gattacagggcttattg

SEQ ID NO: 100506 - DNA, 17 bp, Arabidopsis thaliana
gattacagttttcagcc

SEQ ID NO: 100507 - DNA, 17 bp, Arabidopsis thaliana
gattacatcaggtatta

SEQ ID NO: 100508 - DNA, 17 bp, Arabidopsis thaliana
gattacattgtcggagc

SEQ ID NO: 100509 - DNA, 17 bp, Arabidopsis thaliana
gattaccactttgtcag

SEQ ID NO: 100510 - DNA, 17 bp, Arabidopsis thaliana
gattaccatcacgatgt

SEQ ID NO: 100511 - DNA, 17 bp, Arabidopsis thaliana
gattaccatcacggtgt

SEQ ID NO: 100512 - DNA, 17 bp, Arabidopsis thaliana
gattaccatgataccgc

SEQ ID NO: 100513 - DNA, 17 bp, Arabidopsis thaliana
gattaccgacattggcc

SEQ ID NO: 100514 - DNA, 17 bp, Arabidopsis thaliana
gattaccgcacatgctc

SEQ ID NO: 100515 - DNA, 17 bp, Arabidopsis thaliana
gattaccgtggcggcct

SEQ ID NO: 100516 - DNA, 17 bp, Arabidopsis thaliana
gattacctcatttcggc

SEQ ID NO: 100517 - DNA, 17 bp, Arabidopsis thaliana
gattacctcatttcttc

SEQ ID NO: 100518 - DNA, 17 bp, Arabidopsis thaliana
gattacgaatgagcagg

SEQ ID NO: 100519 - DNA, 17 bp, Arabidopsis thaliana
gattacgagttttgttc

SEQ ID NO: 100520 - DNA, 17 bp, Arabidopsis thaliana
gattacggattgtggcc

SEQ ID NO: 100521 - DNA, 17 bp, Arabidopsis thaliana
gattacggcggcggcct

SEQ ID NO: 100522 - DNA, 17 bp, Arabidopsis thaliana
gattacgggtgtcatac

SEQ ID NO: 100523 - DNA, 17 bp, Arabidopsis thaliana
gattacgggttgggtgt

SEQ ID NO: 100524 - DNA, 17 bp, Arabidopsis thaliana
gattacgggtttcagtt

SEQ ID NO: 100525 - DNA, 17 bp, Arabidopsis thaliana
gattacgggtttcggtt

SEQ ID NO: 100526 - DNA, 17 bp, Arabidopsis thaliana
gattacggtggcgacct

SEQ ID NO: 100527 - DNA, 17 bp, Arabidopsis thaliana
gattacggtggcggcct

SEQ ID NO: 100528 - DNA, 17 bp, Arabidopsis thaliana
gattacggtggcggtct

SEQ ID NO: 100529 - DNA, 17 bp, Arabidopsis thaliana
gattacggtgtcggcct

SEQ ID NO: 100530 - DNA, 17 bp, Arabidopsis thaliana
gattacggttcaataca

SEQ ID NO: 100531 - DNA, 17 bp, Arabidopsis thaliana
gattacgtcgtgttgcg

SEQ ID NO: 100532 - DNA, 17 bp, Arabidopsis thaliana
gattacgtgctagatgt

SEQ ID NO: 100533 - DNA, 17 bp, Arabidopsis thaliana
gattactatcacgatgt

SEQ ID NO: 100534 - DNA, 17 bp, Arabidopsis thaliana
gattactctgaccttga

SEQ ID NO: 100535 - DNA, 17 bp, Arabidopsis thaliana
gattactggatttgtcg

SEQ ID NO: 100536 - DNA, 17 bp, Arabidopsis thaliana
gattactgggtcattgg

SEQ ID NO: 100537 - DNA, 17 bp, Arabidopsis thaliana
gattactgtgatgattc

SEQ ID NO: 100538 - DNA, 17 bp, Arabidopsis thaliana
gattacttgggctttgt

SEQ ID NO: 100539 - DNA, 17 bp, Arabidopsis thaliana
gattagaccgctgacgg

SEQ ID NO: 100540 - DNA, 17 bp, Arabidopsis thaliana
gattagaccgtcgtgag

SEQ ID NO: 100541 - DNA, 17 bp, Arabidopsis thaliana
gattagacgtttatgca

SEQ ID NO: 100542 - DNA, 17 bp, Arabidopsis thaliana
gattagacgtttctgac

SEQ ID NO: 100543 - DNA, 17 bp, Arabidopsis thaliana
gattagcaaactatgcg

SEQ ID NO: 100544 - DNA, 17 bp, Arabidopsis thaliana
gattagcaacttggtgt

SEQ ID NO: 100545 - DNA, 17 bp, Arabidopsis thaliana
gattagcagagttcggt

SEQ ID NO: 100546 - DNA, 17 bp, Arabidopsis thaliana
gattagcatggcccctg

SEQ ID NO: 100547 - DNA, 17 bp, Arabidopsis thaliana
gattagcccagaacatg

SEQ ID NO: 100548 - DNA, 17 bp, Arabidopsis thaliana
gattagcgacttggtgt

SEQ ID NO: 100549 - DNA, 17 bp, Arabidopsis thaliana
gattagcgatttgtggg

SEQ ID NO: 100550 - DNA, 17 bp, Arabidopsis thaliana
gattagctccggctgtg

SEQ ID NO: 100551 - DNA, 17 bp, Arabidopsis thaliana
gattagcttccctatac

SEQ ID NO: 100552 - DNA, 17 bp, Arabidopsis thaliana
gattaggcctttttttg

SEQ ID NO: 100553 - DNA, 17 bp, Arabidopsis thaliana
gattaggcttcatcgga

SEQ ID NO: 100554 - DNA, 17 bp, Arabidopsis thaliana
gattaggggtttaggga

SEQ ID NO: 100555 - DNA, 17 bp, Arabidopsis thaliana
gattagggtttcgctgg

SEQ ID NO: 100556 - DNA, 17 bp, Arabidopsis thaliana
gattaggtcgctggtac

SEQ ID NO: 100557 - DNA, 17 bp, Arabidopsis thaliana
gattaggtttatttgcg

SEQ ID NO: 100558 - DNA, 17 bp, Arabidopsis thaliana
gattaggtttcacattc

SEQ ID NO: 100559 - DNA, 17 bp, Arabidopsis thaliana
gattagtcgcatcctgt

SEQ ID NO: 100560 - DNA, 17 bp, Arabidopsis thaliana
gattagtcgctactttt

SEQ ID NO: 100561 - DNA, 17 bp, Arabidopsis thaliana
gattagtcgctgctttt

SEQ ID NO: 100562 - DNA, 17 bp, Arabidopsis thaliana
gattagtcttagcatgt

SEQ ID NO: 100563 - DNA, 17 bp, Arabidopsis thaliana
gattagtctttgggccg

SEQ ID NO: 100564 - DNA, 17 bp, Arabidopsis thaliana
gattatcagtttcaaaa

SEQ ID NO: 100565 - DNA, 17 bp, Arabidopsis thaliana
gattatccaaaattctg

SEQ ID NO: 100566 - DNA, 17 bp, Arabidopsis thaliana
gattatccatctcgggt

SEQ ID NO: 100567 - DNA, 17 bp, Arabidopsis thaliana
gattatccgaccgctag

SEQ ID NO: 100568 - DNA, 17 bp, Arabidopsis thaliana
gattatccgaccgttag

SEQ ID NO: 100569 - DNA, 17 bp, Arabidopsis thaliana
gattatcgtttgatggc

SEQ ID NO: 100570 - DNA, 17 bp, Arabidopsis thaliana
gattatctccctcttat

SEQ ID NO: 100571 - DNA, 17 bp, Arabidopsis thaliana
gattatctcttgccggc

SEQ ID NO: 100572 - DNA, 17 bp, Arabidopsis thaliana
gattatctgccacattg

SEQ ID NO: 100573 - DNA, 17 bp, Arabidopsis thaliana
gattatcttcctgcgat

SEQ ID NO: 100574 - DNA, 17 bp, Arabidopsis thaliana
gattatcttcgatgata

SEQ ID NO: 100575 - DNA, 17 bp, Arabidopsis thaliana
gattatcttggaccgcc

SEQ ID NO: 100576 - DNA, 17 bp, Arabidopsis thaliana
gattatctttgataggg

SEQ ID NO: 100577 - DNA, 17 bp, Arabidopsis thaliana
gattatgactaaacgcc

SEQ ID NO: 100578 - DNA, 17 bp, Arabidopsis thaliana
gattatgactgaacgcc

SEQ ID NO: 100579 - DNA, 17 bp, Arabidopsis thaliana
gattatgaggccgaaca

SEQ ID NO: 100580 - DNA, 17 bp, Arabidopsis thaliana
gattatgagttgagttg

SEQ ID NO: 100581 - DNA, 17 bp, Arabidopsis thaliana
gattatgagttgggttg

SEQ ID NO: 100582 - DNA, 17 bp, Arabidopsis thaliana
gattatgcactgggtat

SEQ ID NO: 100583 - DNA, 17 bp, Arabidopsis thaliana
gattatgcagttggggc

SEQ ID NO: 100584 - DNA, 17 bp, Arabidopsis thaliana
gattatgccacgtgtca

SEQ ID NO: 100585 - DNA, 17 bp, Arabidopsis thaliana
gattatgccatgggtca

SEQ ID NO: 100586 - DNA, 17 bp, Arabidopsis thaliana
gattatgccatgtgtca

SEQ ID NO: 100587 - DNA, 17 bp, Arabidopsis thaliana
gattatgccatttgggt

SEQ ID NO: 100588 - DNA, 17 bp, Arabidopsis thaliana
gattatgccgtggaacg

SEQ ID NO: 100589 - DNA, 17 bp, Arabidopsis thaliana
gattatgcgcttacagg

SEQ ID NO: 100590 - DNA, 17 bp, Arabidopsis thaliana
gattatggaccgtcgga

SEQ ID NO: 100591 - DNA, 17 bp, Arabidopsis thaliana
gattatggcggcggctc

SEQ ID NO: 100592 - DNA, 17 bp, Arabidopsis thaliana
gattatggcttcgaata

SEQ ID NO: 100593 - DNA, 17 bp, Arabidopsis thaliana
gattatgggcttgattg

SEQ ID NO: 100594 - DNA, 17 bp, Arabidopsis thaliana
gattatgttcgcagttt

SEQ ID NO: 100595 - DNA, 17 bp, Arabidopsis thaliana
gattattcggacctggt

SEQ ID NO: 100596 - DNA, 17 bp, Arabidopsis thaliana
gattattcgttgaccag

SEQ ID NO: 100597 - DNA, 17 bp, Arabidopsis thaliana
gattattctgcatttgt

SEQ ID NO: 100598 - DNA, 17 bp, Arabidopsis thaliana
gattattgcggacggtg

SEQ ID NO: 100599 - DNA, 17 bp, Arabidopsis thaliana
gattattgtgtactaac

SEQ ID NO: 100600 - DNA, 17 bp, Arabidopsis thaliana
gattattgttcaagatt

SEQ ID NO: 100601 - DNA, 17 bp, Arabidopsis thaliana
gattatttccattgctg

SEQ ID NO: 100602 - DNA, 17 bp, Arabidopsis thaliana
gattatttccatttgca

SEQ ID NO: 100603 - DNA, 17 bp, Arabidopsis thaliana
gattatttctaccgcca

SEQ ID NO: 100604 - DNA, 17 bp, Arabidopsis thaliana
gattcaaattttgaaaa

SEQ ID NO: 100605 - DNA, 17 bp, Arabidopsis thaliana
gattcaacatcctccac

SEQ ID NO: 100606 - DNA, 17 bp, Arabidopsis thaliana
gattcaacatctactga

SEQ ID NO: 100607 - DNA, 17 bp, Arabidopsis thaliana
gattcaaccctttgtcg

SEQ ID NO: 100608 - DNA, 17 bp, Arabidopsis thaliana
gattcaacggcattcac

SEQ ID NO: 100609 - DNA, 17 bp, Arabidopsis thaliana
gattcaatctaaaccgt

SEQ ID NO: 100610 - DNA, 17 bp, Arabidopsis thaliana
gattcaatgggcagttt

SEQ ID NO: 100611 - DNA, 17 bp, Arabidopsis thaliana
gattcacaggaccgagc

SEQ ID NO: 100612 - DNA, 17 bp, Arabidopsis thaliana
gattcacaggttgatag

SEQ ID NO: 100613 - DNA, 17 bp, Arabidopsis thaliana
gattcaccgcttgctgt

SEQ ID NO: 100614 - DNA, 17 bp, Arabidopsis thaliana
gattcacgcggtggctc

SEQ ID NO: 100615 - DNA, 17 bp, Arabidopsis thaliana
gattcacgtcgggttca

SEQ ID NO: 100616 - DNA, 17 bp, Arabidopsis thaliana
gattcactttctctctc

SEQ ID NO: 100617 - DNA, 17 bp, Arabidopsis thaliana
gattcagacctttgtcg

SEQ ID NO: 100618 - DNA, 17 bp, Arabidopsis thaliana
gattcagactagcccac

SEQ ID NO: 100619 - DNA, 17 bp, Arabidopsis thaliana
gattcagactctgagga

SEQ ID NO: 100620 - DNA, 17 bp, Arabidopsis thaliana
gattcagactttgagga

SEQ ID NO: 100621 - DNA, 17 bp, Arabidopsis thaliana
gattcagatcttcaggg

SEQ ID NO: 100622 - DNA, 17 bp, Arabidopsis thaliana
gattcagccccttgtcg

SEQ ID NO: 100623 - DNA, 17 bp, Arabidopsis thaliana
gattcagcccgttgtcg

SEQ ID NO: 100624 - DNA, 17 bp, Arabidopsis thaliana
gattcagccctcgagtg

SEQ ID NO: 100625 - DNA, 17 bp, Arabidopsis thaliana
gattcagccctctcgct

SEQ ID NO: 100626 - DNA, 17 bp, Arabidopsis thaliana
gattcagcccttgtcgc

SEQ ID NO: 100627 - DNA, 17 bp, Arabidopsis thaliana
gattcagccctttctcg

SEQ ID NO: 100628 - DNA, 17 bp, Arabidopsis thaliana
gattcagccctttgcct

SEQ ID NO: 100629 - DNA, 17 bp, Arabidopsis thaliana
gattcagccctttggcg

SEQ ID NO: 100630 - DNA, 17 bp, Arabidopsis thaliana
gattcagccctttgtcg

SEQ ID NO: 100631 - DNA, 17 bp, Arabidopsis thaliana
gattcagccctttgttg

SEQ ID NO: 100632 - DNA, 17 bp, Arabidopsis thaliana
gattcagcccttttcgc

SEQ ID NO: 100633 - DNA, 17 bp, Arabidopsis thaliana
gattcagccttcgtcgc

SEQ ID NO: 100634 - DNA, 17 bp, Arabidopsis thaliana
gattcagccttgtcgct

SEQ ID NO: 100635 - DNA, 17 bp, Arabidopsis thaliana
gattcagcctttgtcgc

SEQ ID NO: 100636 - DNA, 17 bp, Arabidopsis thaliana
gattcagccttttatct

SEQ ID NO: 100637 - DNA, 17 bp, Arabidopsis thaliana
gattcagccttttgtcg

SEQ ID NO: 100638 - DNA, 17 bp, Arabidopsis thaliana
gattcagccttttgtct

SEQ ID NO: 100639 - DNA, 17 bp, Arabidopsis thaliana
gattcagcgaccagtta

SEQ ID NO: 100640 - DNA, 17 bp, Arabidopsis thaliana
gattcagcttttgtcgc

SEQ ID NO: 100641 - DNA, 17 bp, Arabidopsis thaliana
gattcaggatgtgtcag

SEQ ID NO: 100642 - DNA, 17 bp, Arabidopsis thaliana
gattcaggttgagattt

SEQ ID NO: 100643 - DNA, 17 bp, Arabidopsis thaliana
gattcagtcctttgtcg

SEQ ID NO: 100644 - DNA, 17 bp, Arabidopsis thaliana
gattcagtcgccgtaga

SEQ ID NO: 100645 - DNA, 17 bp, Arabidopsis thaliana
gattcagtctcagaacg

SEQ ID NO: 100646 - DNA, 17 bp, Arabidopsis thaliana
gattcagttgccgtaga

SEQ ID NO: 100647 - DNA, 17 bp, Arabidopsis thaliana
gattcagttgccgtata

SEQ ID NO: 100648 - DNA, 17 bp, Arabidopsis thaliana
gattcagttgtcgctaa

SEQ ID NO: 100649 - DNA, 17 bp, Arabidopsis thaliana
gattcataggctgtgaa

SEQ ID NO: 100650 - DNA, 17 bp, Arabidopsis thaliana
gattcatatcccacagt

SEQ ID NO: 100651 - DNA, 17 bp, Arabidopsis thaliana
gattcatcactctttca

SEQ ID NO: 100652 - DNA, 17 bp, Arabidopsis thaliana
gattcatcaggccgagt

SEQ ID NO: 100653 - DNA, 17 bp, Arabidopsis thaliana
gattcatgactatggca

SEQ ID NO: 100654 - DNA, 17 bp, Arabidopsis thaliana
gattcatgataactcga

SEQ ID NO: 100655 - DNA, 17 bp, Arabidopsis thaliana
gattcatggaccgtgtg

SEQ ID NO: 100656 - DNA, 17 bp, Arabidopsis thaliana
gattcatgtctgtctgt

SEQ ID NO: 100657 - DNA, 17 bp, Arabidopsis thaliana
gattcattggagagatc

SEQ ID NO: 100658 - DNA, 17 bp, Arabidopsis thaliana
gattccaaccgactttg

SEQ ID NO: 100659 - DNA, 17 bp, Arabidopsis thaliana
gattccaactagtatag

SEQ ID NO: 100660 - DNA, 17 bp, Arabidopsis thaliana
gattccaacttggtcga

SEQ ID NO: 100661 - DNA, 17 bp, Arabidopsis thaliana
gattccagtcagggccg

SEQ ID NO: 100662 - DNA, 17 bp, Arabidopsis thaliana
gattccagttagggccg

SEQ ID NO: 100663 - DNA, 17 bp, Arabidopsis thaliana
gattccatcttctctcg

SEQ ID NO: 100664 - DNA, 17 bp, Arabidopsis thaliana
gattccatgatggaagt

SEQ ID NO: 100665 - DNA, 17 bp, Arabidopsis thaliana
gattccattgacttttt

SEQ ID NO: 100666 - DNA, 17 bp, Arabidopsis thaliana
gattcccactgtccctg

SEQ ID NO: 100667 - DNA, 17 bp, Arabidopsis thaliana
gattcccatgttgatca

SEQ ID NO: 100668 - DNA, 17 bp, Arabidopsis thaliana
gattcccgctacccgct

SEQ ID NO: 100669 - DNA, 17 bp, Arabidopsis thaliana
gattcccgctatccgcc

SEQ ID NO: 100670 - DNA, 17 bp, Arabidopsis thaliana
gattcccgctatccgct

SEQ ID NO: 100671 - DNA, 17 bp, Arabidopsis thaliana
gattcccggctggtgca

SEQ ID NO: 100672 - DNA, 17 bp, Arabidopsis thaliana
gattcccggctggtgta

SEQ ID NO: 100673 - DNA, 17 bp, Arabidopsis thaliana
gattccgatgtgggaca

SEQ ID NO: 100674 - DNA, 17 bp, Arabidopsis thaliana
gattccgccctttgtcg

SEQ ID NO: 100675 - DNA, 17 bp, Arabidopsis thaliana
gattccgcgctcacagg

SEQ ID NO: 100676 - DNA, 17 bp, Arabidopsis thaliana
gattccggacctcgcca

SEQ ID NO: 100677 - DNA, 17 bp, Arabidopsis thaliana
gattccggatgtgttag

SEQ ID NO: 100678 - DNA, 17 bp, Arabidopsis thaliana
gattccggcaggtcgga

SEQ ID NO: 100679 - DNA, 17 bp, Arabidopsis thaliana
gattccggcgagaccag

SEQ ID NO: 100680 - DNA, 17 bp, Arabidopsis thaliana
gattccggctaccgact

SEQ ID NO: 100681 - DNA, 17 bp, Arabidopsis thaliana
gattccgggaagattgg

SEQ ID NO: 100682 - DNA, 17 bp, Arabidopsis thaliana
gattccgtcttaacatg

SEQ ID NO: 100683 - DNA, 17 bp, Arabidopsis thaliana
gattccgtgccggtgaa

SEQ ID NO: 100684 - DNA, 17 bp, Arabidopsis thaliana
gattccgtgcgcaatgg

SEQ ID NO: 100685 - DNA, 17 bp, Arabidopsis thaliana
gattcctacggtcccgg

SEQ ID NO: 100686 - DNA, 17 bp, Arabidopsis thaliana
gattcctcgaccgagag

SEQ ID NO: 100687 - DNA, 17 bp, Arabidopsis thaliana
gattcctctgaattgcc

SEQ ID NO: 100688 - DNA, 17 bp, Arabidopsis thaliana
gattcctgcctcagatc

SEQ ID NO: 100689 - DNA, 17 bp, Arabidopsis thaliana
gattcctgtagatggat

SEQ ID NO: 100690 - DNA, 17 bp, Arabidopsis thaliana
gattccttggttgtgct

SEQ ID NO: 100691 - DNA, 17 bp, Arabidopsis thaliana
gattcctttgtcagata

SEQ ID NO: 100692 - DNA, 17 bp, Arabidopsis thaliana
gattcgaccaagccagc

SEQ ID NO: 100693 - DNA, 17 bp, Arabidopsis thaliana
gattcgacttcccctgg

SEQ ID NO: 100694 - DNA, 17 bp, Arabidopsis thaliana
gattcgagttttttcgg

SEQ ID NO: 100695 - DNA, 17 bp, Arabidopsis thaliana
gattcgcacaattggtc

SEQ ID NO: 100696 - DNA, 17 bp, Arabidopsis thaliana
gattcgcagattacggt

SEQ ID NO: 100697 - DNA, 17 bp, Arabidopsis thaliana
gattcgcattttgctgc

SEQ ID NO: 100698 - DNA, 17 bp, Arabidopsis thaliana
gattcgcctacagttac

SEQ ID NO: 100699 - DNA, 17 bp, Arabidopsis thaliana
gattcgcctgtagagag

SEQ ID NO: 100700 - DNA, 17 bp, Arabidopsis thaliana
gattcgctgggacttag

SEQ ID NO: 100701 - DNA, 17 bp, Arabidopsis thaliana
gattcgcttggccccta

SEQ ID NO: 100702 - DNA, 17 bp, Arabidopsis thaliana
gattcggactcggcttt

SEQ ID NO: 100703 - DNA, 17 bp, Arabidopsis thaliana
gattcggccatgccatt

SEQ ID NO: 100704 - DNA, 17 bp, Arabidopsis thaliana
gattcggcccagaacct

SEQ ID NO: 100705 - DNA, 17 bp, Arabidopsis thaliana
gattcggccctttgtcg

SEQ ID NO: 100706 - DNA, 17 bp, Arabidopsis thaliana
gattcggggcgtggacc

SEQ ID NO: 100707 - DNA, 17 bp, Arabidopsis thaliana
gattcggtatttgattt

SEQ ID NO: 100708 - DNA, 17 bp, Arabidopsis thaliana
gattcggtccagtatgg

SEQ ID NO: 100709 - DNA, 17 bp, Arabidopsis thaliana
gattcggttacagaaca

SEQ ID NO: 100710 - DNA, 17 bp, Arabidopsis thaliana
gattcggttccgttaca

SEQ ID NO: 100711 - DNA, 17 bp, Arabidopsis thaliana
gattcggttgcggatta

SEQ ID NO: 100712 - DNA, 17 bp, Arabidopsis thaliana
gattcggttgcggttta

SEQ ID NO: 100713 - DNA, 17 bp, Arabidopsis thaliana
gattcgtccgtcttctt

SEQ ID NO: 100714 - DNA, 17 bp, Arabidopsis thaliana
gattcgtcgaagctctg

SEQ ID NO: 100715 - DNA, 17 bp, Arabidopsis thaliana
gattcgtcttgcatact

SEQ ID NO: 100716 - DNA, 17 bp, Arabidopsis thaliana
gattcgtgactctatac

SEQ ID NO: 100717 - DNA, 17 bp, Arabidopsis thaliana
gattcgtgctcggagct

SEQ ID NO: 100718 - DNA, 17 bp, Arabidopsis thaliana
gattcgttacaggtttg

SEQ ID NO: 100719 - DNA, 17 bp, Arabidopsis thaliana
gattcgttctctggatc

SEQ ID NO: 100720 - DNA, 17 bp, Arabidopsis thaliana
gattcgttgccctctgc

SEQ ID NO: 100721 - DNA, 17 bp, Arabidopsis thaliana
gattcgtttgattatcc

SEQ ID NO: 100722 - DNA, 17 bp, Arabidopsis thaliana
gattcgtttgcgggtta

SEQ ID NO: 100723 - DNA, 17 bp, Arabidopsis thaliana
gattcgttttcgctcga

SEQ ID NO: 100724 - DNA, 17 bp, Arabidopsis thaliana
gattcgttttggttgtg

SEQ ID NO: 100725 - DNA, 17 bp, Arabidopsis thaliana
gattctaacggacttgg

SEQ ID NO: 100726 - DNA, 17 bp, Arabidopsis thaliana
gattctaactgtggatg

SEQ ID NO: 100727 - DNA, 17 bp, Arabidopsis thaliana
gattctaagaattttaa

SEQ ID NO: 100728 - DNA, 17 bp, Arabidopsis thaliana
gattctaatttgggtgt

SEQ ID NO: 100729 - DNA, 17 bp, Arabidopsis thaliana
gattctacaacaggcgg

SEQ ID NO: 100730 - DNA, 17 bp, Arabidopsis thaliana
gattctacaacggacaa

SEQ ID NO: 100731 - DNA, 17 bp, Arabidopsis thaliana
gattctacctttgatgt

SEQ ID NO: 100732 - DNA, 17 bp, Arabidopsis thaliana
gattctacctttggtgt

SEQ ID NO: 100733 - DNA, 17 bp, Arabidopsis thaliana
gattctacgcagagaag

SEQ ID NO: 100734 - DNA, 17 bp, Arabidopsis thaliana
gattctacgtctcactt

SEQ ID NO: 100735 - DNA, 17 bp, Arabidopsis thaliana
gattctacttgctctag

SEQ ID NO: 100736 - DNA, 17 bp, Arabidopsis thaliana
gattctagcgacatagg

SEQ ID NO: 100737 - DNA, 17 bp, Arabidopsis thaliana
gattctatcggtggtgg

SEQ ID NO: 100738 - DNA, 17 bp, Arabidopsis thaliana
gattctatgggtggagg

SEQ ID NO: 100739 - DNA, 17 bp, Arabidopsis thaliana
gattctatgggtggtgg

SEQ ID NO: 100740 - DNA, 17 bp, Arabidopsis thaliana
gattctcacctaagtca

SEQ ID NO: 100741 - DNA, 17 bp, Arabidopsis thaliana
gattctcagcaactgat

SEQ ID NO: 100742 - DNA, 17 bp, Arabidopsis thaliana
gattctcaggtacataa

SEQ ID NO: 100743 - DNA, 17 bp, Arabidopsis thaliana
gattctccttttatccg

SEQ ID NO: 100744 - DNA, 17 bp, Arabidopsis thaliana
gattctccttttcgccg

SEQ ID NO: 100745 - DNA, 17 bp, Arabidopsis thaliana
gattctccttttgtccg

SEQ ID NO: 100746 - DNA, 17 bp, Arabidopsis thaliana
gattctcgaaatggcat

SEQ ID NO: 100747 - DNA, 17 bp, Arabidopsis thaliana
gattctcgaccgagaac

SEQ ID NO: 100748 - DNA, 17 bp, Arabidopsis thaliana
gattctcgccggcgtcg

SEQ ID NO: 100749 - DNA, 17 bp, Arabidopsis thaliana
gattctcgctctgattc

SEQ ID NO: 100750 - DNA, 17 bp, Arabidopsis thaliana
gattctcggaacgcccc

SEQ ID NO: 100751 - DNA, 17 bp, Arabidopsis thaliana
gattctcggaacgccgc

SEQ ID NO: 100752 - DNA, 17 bp, Arabidopsis thaliana
gattctcggaatgcccc

SEQ ID NO: 100753 - DNA, 17 bp, Arabidopsis thaliana
gattctcggagatccta

SEQ ID NO: 100754 - DNA, 17 bp, Arabidopsis thaliana
gattctcggcaacggaa

SEQ ID NO: 100755 - DNA, 17 bp, Arabidopsis thaliana
gattctctaagcgatgg

SEQ ID NO: 100756 - DNA, 17 bp, Arabidopsis thaliana
gattctctaatgttgtt

SEQ ID NO: 100757 - DNA, 17 bp, Arabidopsis thaliana
gattctctccctcgccg

SEQ ID NO: 100758 - DNA, 17 bp, Arabidopsis thaliana
gattctctctagggtta

SEQ ID NO: 100759 - DNA, 17 bp, Arabidopsis thaliana
gattctctggtcgatct

SEQ ID NO: 100760 - DNA, 17 bp, Arabidopsis thaliana
gattctctttttgccaa

SEQ ID NO: 100761 - DNA, 17 bp, Arabidopsis thaliana
gattctgaacggttacg

SEQ ID NO: 100762 - DNA, 17 bp, Arabidopsis thaliana
gattctgacccaagacg

SEQ ID NO: 100763 - DNA, 17 bp, Arabidopsis thaliana
gattctgacttagaggc

SEQ ID NO: 100764 - DNA, 17 bp, Arabidopsis thaliana
gattctgagaagctaag

SEQ ID NO: 100765 - DNA, 17 bp, Arabidopsis thaliana
gattctgagatttgcgc

SEQ ID NO: 100766 - DNA, 17 bp, Arabidopsis thaliana
gattctgagcaagttgg

SEQ ID NO: 100767 - DNA, 17 bp, Arabidopsis thaliana
gattctgatccgcacat

SEQ ID NO: 100768 - DNA, 17 bp, Arabidopsis thaliana
gattctgatgagatcgt

SEQ ID NO: 100769 - DNA, 17 bp, Arabidopsis thaliana
gattctgattacgaatg

SEQ ID NO: 100770 - DNA, 17 bp, Arabidopsis thaliana
gattctgattccggcgc

SEQ ID NO: 100771 - DNA, 17 bp, Arabidopsis thaliana
gattctgattttcagta

SEQ ID NO: 100772 - DNA, 17 bp, Arabidopsis thaliana
gattctgccccgcacgt

SEQ ID NO: 100773 - DNA, 17 bp, Arabidopsis thaliana
gattctgccctttgtcg

SEQ ID NO: 100774 - DNA, 17 bp, Arabidopsis thaliana
gattctgcgagtagact

SEQ ID NO: 100775 - DNA, 17 bp, Arabidopsis thaliana
gattctgcgattgaacg

SEQ ID NO: 100776 - DNA, 17 bp, Arabidopsis thaliana
gattctgcggttttgac

SEQ ID NO: 100777 - DNA, 17 bp, Arabidopsis thaliana
gattctgctcggcatgg

SEQ ID NO: 100778 - DNA, 17 bp, Arabidopsis thaliana
gattctgcttctattgg

SEQ ID NO: 100779 - DNA, 17 bp, Arabidopsis thaliana
gattctggaatcaaccg

SEQ ID NO: 100780 - DNA, 17 bp, Arabidopsis thaliana
gattctggacctaggac

SEQ ID NO: 100781 - DNA, 17 bp, Arabidopsis thaliana
gattctggagagtcatg

SEQ ID NO: 100782 - DNA, 17 bp, Arabidopsis thaliana
gattctggcgattatcg

SEQ ID NO: 100783 - DNA, 17 bp, Arabidopsis thaliana
gattctggctatccaaa

SEQ ID NO: 100784 - DNA, 17 bp, Arabidopsis thaliana
gattctgggcaaggcaa

SEQ ID NO: 100785 - DNA, 17 bp, Arabidopsis thaliana
gattctgggtcaaagtc

SEQ ID NO: 100786 - DNA, 17 bp, Arabidopsis thaliana
gattctggtccagcccc

SEQ ID NO: 100787 - DNA, 17 bp, Arabidopsis thaliana
gattctggtgtcctagg

SEQ ID NO: 100788 - DNA, 17 bp, Arabidopsis thaliana
gattctggttctgattc

SEQ ID NO: 100789 - DNA, 17 bp, Arabidopsis thaliana
gattctgttctctggat

SEQ ID NO: 100790 - DNA, 17 bp, Arabidopsis thaliana
gattctgttggctttac

SEQ ID NO: 100791 - DNA, 17 bp, Arabidopsis thaliana
gattcttacctgtgtgc

SEQ ID NO: 100792 - DNA, 17 bp, Arabidopsis thaliana
gattcttacgactttag

SEQ ID NO: 100793 - DNA, 17 bp, Arabidopsis thaliana
gattcttagcccgtttt

SEQ ID NO: 100794 - DNA, 17 bp, Arabidopsis thaliana
gattcttaggcctgtcg

SEQ ID NO: 100795 - DNA, 17 bp, Arabidopsis thaliana
gattcttaggctgtgaa

SEQ ID NO: 100796 - DNA, 17 bp, Arabidopsis thaliana
gattcttcagctggctg

SEQ ID NO: 100797 - DNA, 17 bp, Arabidopsis thaliana
gattcttccaatgttgt

SEQ ID NO: 100798 - DNA, 17 bp, Arabidopsis thaliana
gattcttccaccgcacg

SEQ ID NO: 100799 - DNA, 17 bp, Arabidopsis thaliana
gattcttccgagactac

SEQ ID NO: 100800 - DNA, 17 bp, Arabidopsis thaliana
gattcttcgaggcctag

SEQ ID NO: 100801 - DNA, 17 bp, Arabidopsis thaliana
gattcttcgtcattctt

SEQ ID NO: 100802 - DNA, 17 bp, Arabidopsis thaliana
gattcttcttcttccct

SEQ ID NO: 100803 - DNA, 17 bp, Arabidopsis thaliana
gattcttcttggctttg

SEQ ID NO: 100804 - DNA, 17 bp, Arabidopsis thaliana
gattcttgacgagatct

SEQ ID NO: 100805 - DNA, 17 bp, Arabidopsis thaliana
gattcttgggaatacag

SEQ ID NO: 100806 - DNA, 17 bp, Arabidopsis thaliana
gattcttgggtgaacga

SEQ ID NO: 100807 - DNA, 17 bp, Arabidopsis thaliana
gattcttgtccggatct

SEQ ID NO: 100808 - DNA, 17 bp, Arabidopsis thaliana
gattcttgtgatcgctt

SEQ ID NO: 100809 - DNA, 17 bp, Arabidopsis thaliana
gattctttctatcgccg

SEQ ID NO: 100810 - DNA, 17 bp, Arabidopsis thaliana
gattctttgagatgaac

SEQ ID NO: 100811 - DNA, 17 bp, Arabidopsis thaliana
gattctttgagctgcga

SEQ ID NO: 100812 - DNA, 17 bp, Arabidopsis thaliana
gattctttgatccgcga

SEQ ID NO: 100813 - DNA, 17 bp, Arabidopsis thaliana
gattctttgattctcgg

SEQ ID NO: 100814 - DNA, 17 bp, Arabidopsis thaliana
gattgaaactaggatcg

SEQ ID NO: 100815 - DNA, 17 bp, Arabidopsis thaliana
gattgaaactgagatcg

SEQ ID NO: 100816 - DNA, 17 bp, Arabidopsis thaliana
gattgaacggaagttgc

SEQ ID NO: 100817 - DNA, 17 bp, Arabidopsis thaliana
gattgaagctgccagca

SEQ ID NO: 100818 - DNA, 17 bp, Arabidopsis thaliana
gattgaagctgccagcc

SEQ ID NO: 100819 - DNA, 17 bp, Arabidopsis thaliana
gattgaatatgcggttt

SEQ ID NO: 100820 - DNA, 17 bp, Arabidopsis thaliana
gattgaatcagttcact

SEQ ID NO: 100821 - DNA, 17 bp, Arabidopsis thaliana
gattgaatctatgcggc

SEQ ID NO: 100822 - DNA, 17 bp, Arabidopsis thaliana
gattgaatctcggtccg

SEQ ID NO: 100823 - DNA, 17 bp, Arabidopsis thaliana
gattgaatctctactgc

SEQ ID NO: 100824 - DNA, 17 bp, Arabidopsis thaliana
gattgaattcagaatct

SEQ ID NO: 100825 - DNA, 17 bp, Arabidopsis thaliana
gattgaattggatttgc

SEQ ID NO: 100826 - DNA, 17 bp, Arabidopsis thaliana
gattgaattggtggttg

SEQ ID NO: 100827 - DNA, 17 bp, Arabidopsis thaliana
gattgaattttggatcc

SEQ ID NO: 100828 - DNA, 17 bp, Arabidopsis thaliana
gattgacatgtggcgat

SEQ ID NO: 100829 - DNA, 17 bp, Arabidopsis thaliana
gattgaccgacattcgc

SEQ ID NO: 100830 - DNA, 17 bp, Arabidopsis thaliana
gattgaccgtctgctag

SEQ ID NO: 100831 - DNA, 17 bp, Arabidopsis thaliana
gattgaccgtttagtga

SEQ ID NO: 100832 - DNA, 17 bp, Arabidopsis thaliana
gattgaccttatgtgtg

SEQ ID NO: 100833 - DNA, 17 bp, Arabidopsis thaliana
gattgacgcggattacg

SEQ ID NO: 100834 - DNA, 17 bp, Arabidopsis thaliana
gattgagagtatcagta

SEQ ID NO: 100835 - DNA, 17 bp, Arabidopsis thaliana
gattgagattgaggttt

SEQ ID NO: 100836 - DNA, 17 bp, Arabidopsis thaliana
gattgagccagaatgcc

SEQ ID NO: 100837 - DNA, 17 bp, Arabidopsis thaliana
gattgagccgaggttat

SEQ ID NO: 100838 - DNA, 17 bp, Arabidopsis thaliana
gattgagccgcgccaac

SEQ ID NO: 100839 - DNA, 17 bp, Arabidopsis thaliana
gattgagccgcgccaat

SEQ ID NO: 100840 - DNA, 17 bp, Arabidopsis thaliana
gattgagccgcgccaga

SEQ ID NO: 100841 - DNA, 17 bp, Arabidopsis thaliana
gattgagccgcgccagc

SEQ ID NO: 100842 - DNA, 17 bp, Arabidopsis thaliana
gattgagccgtgtcaat

SEQ ID NO: 100843 - DNA, 17 bp, Arabidopsis thaliana
gattgagcctgggacta

SEQ ID NO: 100844 - DNA, 17 bp, Arabidopsis thaliana
gattgagggagcttctg

SEQ ID NO: 100845 - DNA, 17 bp, Arabidopsis thaliana
gattgaggtcattggct

SEQ ID NO: 100846 - DNA, 17 bp, Arabidopsis thaliana
gattgagtactgttgcc

SEQ ID NO: 100847 - DNA, 17 bp, Arabidopsis thaliana
gattgagtcatggggca

SEQ ID NO: 100848 - DNA, 17 bp, Arabidopsis thaliana
gattgagtctagcctat

SEQ ID NO: 100849 - DNA, 17 bp, Arabidopsis thaliana
gattgagtctgggacta

SEQ ID NO: 100850 - DNA, 17 bp, Arabidopsis thaliana
gattgagtgatggtcag

SEQ ID NO: 100851 - DNA, 17 bp, Arabidopsis thaliana
gattgagtttccgaaat

SEQ ID NO: 100852 - DNA, 17 bp, Arabidopsis thaliana
gattgataagactacca

SEQ ID NO: 100853 - DNA, 17 bp, Arabidopsis thaliana
gattgatacagctgaag

SEQ ID NO: 100854 - DNA, 17 bp, Arabidopsis thaliana
gattgatcaggaggtcg

SEQ ID NO: 100855 - DNA, 17 bp, Arabidopsis thaliana
gattgatcctacatttg

SEQ ID NO: 100856 - DNA, 17 bp, Arabidopsis thaliana
gattgatcgctaagtca

SEQ ID NO: 100857 - DNA, 17 bp, Arabidopsis thaliana
gattgatcgtggtctgc

SEQ ID NO: 100858 - DNA, 17 bp, Arabidopsis thaliana
gattgatcgttcgagag

SEQ ID NO: 100859 - DNA, 17 bp, Arabidopsis thaliana
gattgatcttgtaccag

SEQ ID NO: 100860 - DNA, 17 bp, Arabidopsis thaliana
gattgatgaatccatgg

SEQ ID NO: 100861 - DNA, 17 bp, Arabidopsis thaliana
gattgatgagcgttgca

SEQ ID NO: 100862 - DNA, 17 bp, Arabidopsis thaliana
gattgatgagtgctgca

SEQ ID NO: 100863 - DNA, 17 bp, Arabidopsis thaliana
gattgatgtctaactgc

SEQ ID NO: 100864 - DNA, 17 bp, Arabidopsis thaliana
gattgattaggtcctga

SEQ ID NO: 100865 - DNA, 17 bp, Arabidopsis thaliana
gattgattatgtgatgt

SEQ ID NO: 100866 - DNA, 17 bp, Arabidopsis thaliana
gattgattgagccgcgc

SEQ ID NO: 100867 - DNA, 17 bp, Arabidopsis thaliana
gattgatttttgactcg

SEQ ID NO: 100868 - DNA, 17 bp, Arabidopsis thaliana
gattgcccatctgtctg

SEQ ID NO: 100869 - DNA, 17 bp, Arabidopsis thaliana
gattgcccgcaaccata

SEQ ID NO: 100870 - DNA, 17 bp, Arabidopsis thaliana
gattgccgaccctcagt

SEQ ID NO: 100871 - DNA, 17 bp, Arabidopsis thaliana
gattgccggatagtcgc

SEQ ID NO: 100872 - DNA, 17 bp, Arabidopsis thaliana
gattgcctcagttcgga

SEQ ID NO: 100873 - DNA, 17 bp, Arabidopsis thaliana
gattgcgatttacccga

SEQ ID NO: 100874 - DNA, 17 bp, Arabidopsis thaliana
gattgcggaatttcgtg

SEQ ID NO: 100875 - DNA, 17 bp, Arabidopsis thaliana
gattgcggttgcaggag

SEQ ID NO: 100876 - DNA, 17 bp, Arabidopsis thaliana
gattgcggttgcggcgg

SEQ ID NO: 100877 - DNA, 17 bp, Arabidopsis thaliana
gattgcgtcttgtgttg

SEQ ID NO: 100878 - DNA, 17 bp, Arabidopsis thaliana
gattgcgtttcccaggt

SEQ ID NO: 100879 - DNA, 17 bp, Arabidopsis thaliana
gattgcgttttgcggtg

SEQ ID NO: 100880 - DNA, 17 bp, Arabidopsis thaliana
gattgctaagctgttcg

SEQ ID NO: 100881 - DNA, 17 bp, Arabidopsis thaliana
gattgctaagttgttcg

SEQ ID NO: 100882 - DNA, 17 bp, Arabidopsis thaliana
gattgctcattgtcgca

SEQ ID NO: 100883 - DNA, 17 bp, Arabidopsis thaliana
gattgctcggtgcaaaa

SEQ ID NO: 100884 - DNA, 17 bp, Arabidopsis thaliana
gattgctgagatgtcat

SEQ ID NO: 100885 - DNA, 17 bp, Arabidopsis thaliana
gattgctggcttatcca

SEQ ID NO: 100886 - DNA, 17 bp, Arabidopsis thaliana
gattgcttaggttgcca

SEQ ID NO: 100887 - DNA, 17 bp, Arabidopsis thaliana
gattgcttgtgcgatct

SEQ ID NO: 100888 - DNA, 17 bp, Arabidopsis thaliana
gattggaacgaggactg

SEQ ID NO: 100889 - DNA, 17 bp, Arabidopsis thaliana
gattggaaggtggctaa

SEQ ID NO: 100890 - DNA, 17 bp, Arabidopsis thaliana
gattggaccgaagattt

SEQ ID NO: 100891 - DNA, 17 bp, Arabidopsis thaliana
gattggactgaaggagc

SEQ ID NO: 100892 - DNA, 17 bp, Arabidopsis thaliana
gattggactgaagggag

SEQ ID NO: 100893 - DNA, 17 bp, Arabidopsis thaliana
gattggactgagtcggt

SEQ ID NO: 100894 - DNA, 17 bp, Arabidopsis thaliana
gattggagatgaacggg

SEQ ID NO: 100895 - DNA, 17 bp, Arabidopsis thaliana
gattggatagtccgagt

SEQ ID NO: 100896 - DNA, 17 bp, Arabidopsis thaliana
gattggatctacagacg

SEQ ID NO: 100897 - DNA, 17 bp, Arabidopsis thaliana
gattggattgccggtaa

SEQ ID NO: 100898 - DNA, 17 bp, Arabidopsis thaliana
gattggattgtgaaatc

SEQ ID NO: 100899 - DNA, 17 bp, Arabidopsis thaliana
gattggattgtgacacg

SEQ ID NO: 100900 - DNA, 17 bp, Arabidopsis thaliana
gattggatttgtccaca

SEQ ID NO: 100901 - DNA, 17 bp, Arabidopsis thaliana
gattggccatatctgac

SEQ ID NO: 100902 - DNA, 17 bp, Arabidopsis thaliana
gattggccgacatttac

SEQ ID NO: 100903 - DNA, 17 bp, Arabidopsis thaliana
gattggccgactttttc

SEQ ID NO: 100904 - DNA, 17 bp, Arabidopsis thaliana
gattggccgactttttt

SEQ ID NO: 100905 - DNA, 17 bp, Arabidopsis thaliana
gattggcggcgatcctc

SEQ ID NO: 100906 - DNA, 17 bp, Arabidopsis thaliana
gattggcgggagaggtg

SEQ ID NO: 100907 - DNA, 17 bp, Arabidopsis thaliana
gattggcgggatccctc

SEQ ID NO: 100908 - DNA, 17 bp, Arabidopsis thaliana
gattggcgtcttcagaa

SEQ ID NO: 100909 - DNA, 17 bp, Arabidopsis thaliana
gattggctctgagggct

SEQ ID NO: 100910 - DNA, 17 bp, Arabidopsis thaliana
gattgggagaagaacag

SEQ ID NO: 100911 - DNA, 17 bp, Arabidopsis thaliana
gattgggcgtaaagcgt

SEQ ID NO: 100912 - DNA, 17 bp, Arabidopsis thaliana
gattgggcttcatgttc

SEQ ID NO: 100913 - DNA, 17 bp, Arabidopsis thaliana
gattgggttgcggttag

SEQ ID NO: 100914 - DNA, 17 bp, Arabidopsis thaliana
gattggtaaaccagcgg

SEQ ID NO: 100915 - DNA, 17 bp, Arabidopsis thaliana
gattggtatgatcgcat

SEQ ID NO: 100916 - DNA, 17 bp, Arabidopsis thaliana
gattggtattcctcata

SEQ ID NO: 100917 - DNA, 17 bp, Arabidopsis thaliana
gattggtcgttctaaat

SEQ ID NO: 100918 - DNA, 17 bp, Arabidopsis thaliana
gattggtcgttgaacca

SEQ ID NO: 100919 - DNA, 17 bp, Arabidopsis thaliana
gattggtcttcacgagg

SEQ ID NO: 100920 - DNA, 17 bp, Arabidopsis thaliana
gattggtgccgacaacc

SEQ ID NO: 100921 - DNA, 17 bp, Arabidopsis thaliana
gattggttcatgatttc

SEQ ID NO: 100922 - DNA, 17 bp, Arabidopsis thaliana
gattggttcgtcggtat

SEQ ID NO: 100923 - DNA, 17 bp, Arabidopsis thaliana
gattggttctccctctg

SEQ ID NO: 100924 - DNA, 17 bp, Arabidopsis thaliana
gattggttctcgagact

SEQ ID NO: 100925 - DNA, 17 bp, Arabidopsis thaliana
gattggttgacggaaaa

SEQ ID NO: 100926 - DNA, 17 bp, Arabidopsis thaliana
gattggttgggctgtaa

SEQ ID NO: 100927 - DNA, 17 bp, Arabidopsis thaliana
gattgtaagtggccggt

SEQ ID NO: 100928 - DNA, 17 bp, Arabidopsis thaliana
gattgtaatctgtccct

SEQ ID NO: 100929 - DNA, 17 bp, Arabidopsis thaliana
gattgtaatctgtctct

SEQ ID NO: 100930 - DNA, 17 bp, Arabidopsis thaliana
gattgtaggacgggtgg

SEQ ID NO: 100931 - DNA, 17 bp, Arabidopsis thaliana
gattgtattccaggctg

SEQ ID NO: 100932 - DNA, 17 bp, Arabidopsis thaliana
gattgtcagccgtgtag

SEQ ID NO: 100933 - DNA, 17 bp, Arabidopsis thaliana
gattgtccaagcagtcc

SEQ ID NO: 100934 - DNA, 17 bp, Arabidopsis thaliana
gattgtccatttgaatt

SEQ ID NO: 100935 - DNA, 17 bp, Arabidopsis thaliana
gattgtcgaccctcagt

SEQ ID NO: 100936 - DNA, 17 bp, Arabidopsis thaliana
gattgtcgattaatggc

SEQ ID NO: 100937 - DNA, 17 bp, Arabidopsis thaliana
gattgtcgctacttttg

SEQ ID NO: 100938 - DNA, 17 bp, Arabidopsis thaliana
gattgtcggaactatgc

SEQ ID NO: 100939 - DNA, 17 bp, Arabidopsis thaliana
gattgtcggcgccaatc

SEQ ID NO: 100940 - DNA, 17 bp, Arabidopsis thaliana
gattgtcgtctctgact

SEQ ID NO: 100941 - DNA, 17 bp, Arabidopsis thaliana
gattgtctaattgaccg

SEQ ID NO: 100942 - DNA, 17 bp, Arabidopsis thaliana
gattgtctactaaaacc

SEQ ID NO: 100943 - DNA, 17 bp, Arabidopsis thaliana
gattgtctactgtgggc

SEQ ID NO: 100944 - DNA, 17 bp, Arabidopsis thaliana
gattgtctcagcgacag

SEQ ID NO: 100945 - DNA, 17 bp, Arabidopsis thaliana
gattgtctcatggattc

SEQ ID NO: 100946 - DNA, 17 bp, Arabidopsis thaliana
gattgtctccaaactgt

SEQ ID NO: 100947 - DNA, 17 bp, Arabidopsis thaliana
gattgtctgtgcgatct

SEQ ID NO: 100948 - DNA, 17 bp, Arabidopsis thaliana
gattgtgaattcaccat

SEQ ID NO: 100949 - DNA, 17 bp, Arabidopsis thaliana
gattgtgacacattttg

SEQ ID NO: 100950 - DNA, 17 bp, Arabidopsis thaliana
gattgtgagatttgcga

SEQ ID NO: 100951 - DNA, 17 bp, Arabidopsis thaliana
gattgtgattgtaacga

SEQ ID NO: 100952 - DNA, 17 bp, Arabidopsis thaliana
gattgtgatttcgacct

SEQ ID NO: 100953 - DNA, 17 bp, Arabidopsis thaliana
gattgtgccacgtgtca

SEQ ID NO: 100954 - DNA, 17 bp, Arabidopsis thaliana
gattgtgccatgtgtcg

SEQ ID NO: 100955 - DNA, 17 bp, Arabidopsis thaliana
gattgtgctcggaaact

SEQ ID NO: 100956 - DNA, 17 bp, Arabidopsis thaliana
gattgtgctggatgagc

SEQ ID NO: 100957 - DNA, 17 bp, Arabidopsis thaliana
gattgtggaccacccac

SEQ ID NO: 100958 - DNA, 17 bp, Arabidopsis thaliana
gattgtggaccacccat

SEQ ID NO: 100959 - DNA, 17 bp, Arabidopsis thaliana
gattgtggcaacgatcg

SEQ ID NO: 100960 - DNA, 17 bp, Arabidopsis thaliana
gattgtgggttcgtccc

SEQ ID NO: 100961 - DNA, 17 bp, Arabidopsis thaliana
gattgtgtccggtttgt

SEQ ID NO: 100962 - DNA, 17 bp, Arabidopsis thaliana
gattgtgtctcggagat

SEQ ID NO: 100963 - DNA, 17 bp, Arabidopsis thaliana
gattgtgtctcggatat

SEQ ID NO: 100964 - DNA, 17 bp, Arabidopsis thaliana
gattgtgtgctactatg

SEQ ID NO: 100965 - DNA, 17 bp, Arabidopsis thaliana
gattgtgtgttggactt

SEQ ID NO: 100966 - DNA, 17 bp, Arabidopsis thaliana
gattgttaaagggtgag

SEQ ID NO: 100967 - DNA, 17 bp, Arabidopsis thaliana
gattgttacgagactac

SEQ ID NO: 100968 - DNA, 17 bp, Arabidopsis thaliana
gattgttacgatgggtg

SEQ ID NO: 100969 - DNA, 17 bp, Arabidopsis thaliana
gattgttactaagtaac

SEQ ID NO: 100970 - DNA, 17 bp, Arabidopsis thaliana
gattgttactttgttgc

SEQ ID NO: 100971 - DNA, 17 bp, Arabidopsis thaliana
gattgttatgcatgtga

SEQ ID NO: 100972 - DNA, 17 bp, Arabidopsis thaliana
gattgttccgagactac

SEQ ID NO: 100973 - DNA, 17 bp, Arabidopsis thaliana
gattgttccgagactat

SEQ ID NO: 100974 - DNA, 17 bp, Arabidopsis thaliana
gattgttccgagtctac

SEQ ID NO: 100975 - DNA, 17 bp, Arabidopsis thaliana
gattgttctactgcgcc

SEQ ID NO: 100976 - DNA, 17 bp, Arabidopsis thaliana
gattgttctgagactac

SEQ ID NO: 100977 - DNA, 17 bp, Arabidopsis thaliana
gattgttctggatcggt

SEQ ID NO: 100978 - DNA, 17 bp, Arabidopsis thaliana
gattgttgatgatgtgc

SEQ ID NO: 100979 - DNA, 17 bp, Arabidopsis thaliana
gattgttgcataagagc

SEQ ID NO: 100980 - DNA, 17 bp, Arabidopsis thaliana
gattgttgctagtcgag

SEQ ID NO: 100981 - DNA, 17 bp, Arabidopsis thaliana
gattgttgtgcgccgca

SEQ ID NO: 100982 - DNA, 17 bp, Arabidopsis thaliana
gattgttgtttaagact

SEQ ID NO: 100983 - DNA, 17 bp, Arabidopsis thaliana
gattgtttgccttggat

SEQ ID NO: 100984 - DNA, 17 bp, Arabidopsis thaliana
gatttaccttggctttc

SEQ ID NO: 100985 - DNA, 17 bp, Arabidopsis thaliana
gatttactacgaccagc

SEQ ID NO: 100986 - DNA, 17 bp, Arabidopsis thaliana
gatttactgactgttgg

SEQ ID NO: 100987 - DNA, 17 bp, Arabidopsis thaliana
gatttagaaacggttcg

SEQ ID NO: 100988 - DNA, 17 bp, Arabidopsis thaliana
gatttagacattgcgaa

SEQ ID NO: 100989 - DNA, 17 bp, Arabidopsis thaliana
gatttagccctttgtcg

SEQ ID NO: 100990 - DNA, 17 bp, Arabidopsis thaliana
gatttagccgaagtcca

SEQ ID NO: 100991 - DNA, 17 bp, Arabidopsis thaliana
gatttagcgtatgcttc

SEQ ID NO: 100992 - DNA, 17 bp, Arabidopsis thaliana
gatttagtgaaccgtgt

SEQ ID NO: 100993 - DNA, 17 bp, Arabidopsis thaliana
gatttagtgatgtttat

SEQ ID NO: 100994 - DNA, 17 bp, Arabidopsis thaliana
gatttatcactaggcca

SEQ ID NO: 100995 - DNA, 17 bp, Arabidopsis thaliana
gatttatttcacaaagt

SEQ ID NO: 100996 - DNA, 17 bp, Arabidopsis thaliana
gatttatttgtcttccg

SEQ ID NO: 100997 - DNA, 17 bp, Arabidopsis thaliana
gatttcaaaatctctgg

SEQ ID NO: 100998 - DNA, 17 bp, Arabidopsis thaliana
gatttcaaagtgataga

SEQ ID NO: 100999 - DNA, 17 bp, Arabidopsis thaliana
gatttcaatcaaaccag

SEQ ID NO: 101000 - DNA, 17 bp, Arabidopsis thaliana
gatttcaatcaaaccgg

SEQ ID NO: 101001 - DNA, 17 bp, Arabidopsis thaliana
gatttcacaagcagtga

SEQ ID NO: 101002 - DNA, 17 bp, Arabidopsis thaliana
gatttcaccaggtgaac

SEQ ID NO: 101003 - DNA, 17 bp, Arabidopsis thaliana
gatttcacccatggtat

SEQ ID NO: 101004 - DNA, 17 bp, Arabidopsis thaliana
gatttcacccgtgctat

SEQ ID NO: 101005 - DNA, 17 bp, Arabidopsis thaliana
gatttcacccgtggtag

SEQ ID NO: 101006 - DNA, 17 bp, Arabidopsis thaliana
gatttcacccgtggtat

SEQ ID NO: 101007 - DNA, 17 bp, Arabidopsis thaliana
gatttcaccgctgatta

SEQ ID NO: 101008 - DNA, 17 bp, Arabidopsis thaliana
gatttcacctcaacttg

SEQ ID NO: 101009 - DNA, 17 bp, Arabidopsis thaliana
gatttcacgccgcagat

SEQ ID NO: 101010 - DNA, 17 bp, Arabidopsis thaliana
gatttcacggttaattt

SEQ ID NO: 101011 - DNA, 17 bp, Arabidopsis thaliana
gatttcactcttggtat

SEQ ID NO: 101012 - DNA, 17 bp, Arabidopsis thaliana
gatttcacttgtggtat

SEQ ID NO: 101013 - DNA, 17 bp, Arabidopsis thaliana
gatttcagagtgaatac

SEQ ID NO: 101014 - DNA, 17 bp, Arabidopsis thaliana
gatttcaggaccaccag

SEQ ID NO: 101015 - DNA, 17 bp, Arabidopsis thaliana
gatttcaggcttctcct

SEQ ID NO: 101016 - DNA, 17 bp, Arabidopsis thaliana
gatttcagggtggaaag

SEQ ID NO: 101017 - DNA, 17 bp, Arabidopsis thaliana
gatttcaggtcgggtta

SEQ ID NO: 101018 - DNA, 17 bp, Arabidopsis thaliana
gatttcatagcttggat

SEQ ID NO: 101019 - DNA, 17 bp, Arabidopsis thaliana
gatttcatcccctgctg

SEQ ID NO: 101020 - DNA, 17 bp, Arabidopsis thaliana
gatttcatcctatttgc

SEQ ID NO: 101021 - DNA, 17 bp, Arabidopsis thaliana
gatttcattcctgacca

SEQ ID NO: 101022 - DNA, 17 bp, Arabidopsis thaliana
gatttcattcgtcgtat

SEQ ID NO: 101023 - DNA, 17 bp, Arabidopsis thaliana
gatttcccctttgtccg

SEQ ID NO: 101024 - DNA, 17 bp, Arabidopsis thaliana
gatttcccggctggtgc

SEQ ID NO: 101025 - DNA, 17 bp, Arabidopsis thaliana
gatttccggctggtgca

SEQ ID NO: 101026 - DNA, 17 bp, Arabidopsis thaliana
gatttcctcaaacttgt

SEQ ID NO: 101027 - DNA, 17 bp, Arabidopsis thaliana
gatttcctttcgacttc

SEQ ID NO: 101028 - DNA, 17 bp, Arabidopsis thaliana
gatttcctttctcaggc

SEQ ID NO: 101029 - DNA, 17 bp, Arabidopsis thaliana
gatttcgaaagttggtg

SEQ ID NO: 101030 - DNA, 17 bp, Arabidopsis thaliana
gatttcgagtcccctac

SEQ ID NO: 101031 - DNA, 17 bp, Arabidopsis thaliana
gatttcgatcctattgt

SEQ ID NO: 101032 - DNA, 17 bp, Arabidopsis thaliana
gatttcgcgatctcgga

SEQ ID NO: 101033 - DNA, 17 bp, Arabidopsis thaliana
gatttcgcgtctactaa

SEQ ID NO: 101034 - DNA, 17 bp, Arabidopsis thaliana
gatttcggcccagaacc

SEQ ID NO: 101035 - DNA, 17 bp, Arabidopsis thaliana
gatttcgggaagatagt

SEQ ID NO: 101036 - DNA, 17 bp, Arabidopsis thaliana
gatttcgggtcgggtcg

SEQ ID NO: 101037 - DNA, 17 bp, Arabidopsis thaliana
gatttcggtggtattcc

SEQ ID NO: 101038 - DNA, 17 bp, Arabidopsis thaliana
gatttcggtttcagtgg

SEQ ID NO: 101039 - DNA, 17 bp, Arabidopsis thaliana
gatttcgtggctgttaa

SEQ ID NO: 101040 - DNA, 17 bp, Arabidopsis thaliana
gatttctaatgcgagat

SEQ ID NO: 101041 - DNA, 17 bp, Arabidopsis thaliana
gatttctatcgatcggc

SEQ ID NO: 101042 - DNA, 17 bp, Arabidopsis thaliana
gatttctcacctgtgca

SEQ ID NO: 101043 - DNA, 17 bp, Arabidopsis thaliana
gatttctccagcgagac

SEQ ID NO: 101044 - DNA, 17 bp, Arabidopsis thaliana
gatttctccagctcagc

SEQ ID NO: 101045 - DNA, 17 bp, Arabidopsis thaliana
gatttctccatgggttg

SEQ ID NO: 101046 - DNA, 17 bp, Arabidopsis thaliana
gatttctccgagaatct

SEQ ID NO: 101047 - DNA, 17 bp, Arabidopsis thaliana
gatttctcctccatcac

SEQ ID NO: 101048 - DNA, 17 bp, Arabidopsis thaliana
gatttctccttatctca

SEQ ID NO: 101049 - DNA, 17 bp, Arabidopsis thaliana
gatttctcggtctatgg

SEQ ID NO: 101050 - DNA, 17 bp, Arabidopsis thaliana
gatttctcggtttcggc

SEQ ID NO: 101051 - DNA, 17 bp, Arabidopsis thaliana
gatttctctttattctt

SEQ ID NO: 101052 - DNA, 17 bp, Arabidopsis thaliana
gatttctgagactcaga

SEQ ID NO: 101053 - DNA, 17 bp, Arabidopsis thaliana
gatttctgcagtttttt

SEQ ID NO: 101054 - DNA, 17 bp, Arabidopsis thaliana
gatttctgcccagtgct

SEQ ID NO: 101055 - DNA, 17 bp, Arabidopsis thaliana
gatttctgcctgccccg

SEQ ID NO: 101056 - DNA, 17 bp, Arabidopsis thaliana
gatttctgggtttcggc

SEQ ID NO: 101057 - DNA, 17 bp, Arabidopsis thaliana
gatttctgtgcttgtgt

SEQ ID NO: 101058 - DNA, 17 bp, Arabidopsis thaliana
gatttcttcaggggctc

SEQ ID NO: 101059 - DNA, 17 bp, Arabidopsis thaliana
gatttcttcttcagtcg

SEQ ID NO: 101060 - DNA, 17 bp, Arabidopsis thaliana
gatttcttgagatcgat

SEQ ID NO: 101061 - DNA, 17 bp, Arabidopsis thaliana
gatttgacaagggttcg

SEQ ID NO: 101062 - DNA, 17 bp, Arabidopsis thaliana
gatttgaccacctatgt

SEQ ID NO: 101063 - DNA, 17 bp, Arabidopsis thaliana
gatttgacttctcctgg

SEQ ID NO: 101064 - DNA, 17 bp, Arabidopsis thaliana
gatttgacttgtggtag

SEQ ID NO: 101065 - DNA, 17 bp, Arabidopsis thaliana
gatttgagatttattta

SEQ ID NO: 101066 - DNA, 17 bp, Arabidopsis thaliana
gatttgatcttggagaa

SEQ ID NO: 101067 - DNA, 17 bp, Arabidopsis thaliana
gatttgattcttcacaa

SEQ ID NO: 101068 - DNA, 17 bp, Arabidopsis thaliana
gatttgcaacttggaac

SEQ ID NO: 101069 - DNA, 17 bp, Arabidopsis thaliana
gatttgccagacagtgc

SEQ ID NO: 101070 - DNA, 17 bp, Arabidopsis thaliana
gatttgcccatctgtct

SEQ ID NO: 101071 - DNA, 17 bp, Arabidopsis thaliana
gatttgcccttttgcag

SEQ ID NO: 101072 - DNA, 17 bp, Arabidopsis thaliana
gatttgcgagtccttgg

SEQ ID NO: 101073 - DNA, 17 bp, Arabidopsis thaliana
gatttgcggttcatcgc

SEQ ID NO: 101074 - DNA, 17 bp, Arabidopsis thaliana
gatttgcgtcggctgtt

SEQ ID NO: 101075 - DNA, 17 bp, Arabidopsis thaliana
gatttgctcgtggcaac

SEQ ID NO: 101076 - DNA, 17 bp, Arabidopsis thaliana
gatttgctgggccgaaa

SEQ ID NO: 101077 - DNA, 17 bp, Arabidopsis thaliana
gatttgcttcttgtggc

SEQ ID NO: 101078 - DNA, 17 bp, Arabidopsis thaliana
gatttgcttgatggctg

SEQ ID NO: 101079 - DNA, 17 bp, Arabidopsis thaliana
gatttggacaacttctg

SEQ ID NO: 101080 - DNA, 17 bp, Arabidopsis thaliana
gatttggacccatggac

SEQ ID NO: 101081 - DNA, 17 bp, Arabidopsis thaliana
gatttggaccgtttccc

SEQ ID NO: 101082 - DNA, 17 bp, Arabidopsis thaliana
gatttggagggacgggt

SEQ ID NO: 101083 - DNA, 17 bp, Arabidopsis thaliana
gatttggatgtgcctgc

SEQ ID NO: 101084 - DNA, 17 bp, Arabidopsis thaliana
gatttggcagttgttga

SEQ ID NO: 101085 - DNA, 17 bp, Arabidopsis thaliana
gatttggcccaattggt

SEQ ID NO: 101086 - DNA, 17 bp, Arabidopsis thaliana
gatttggcctggtcaac

SEQ ID NO: 101087 - DNA, 17 bp, Arabidopsis thaliana
gatttggcgtgattgag

SEQ ID NO: 101088 - DNA, 17 bp, Arabidopsis thaliana
gatttggctaagatata

SEQ ID NO: 101089 - DNA, 17 bp, Arabidopsis thaliana
gatttgggaccaatcat

SEQ ID NO: 101090 - DNA, 17 bp, Arabidopsis thaliana
gatttgggatagttaga

SEQ ID NO: 101091 - DNA, 17 bp, Arabidopsis thaliana
gatttgggcctgagccg

SEQ ID NO: 101092 - DNA, 17 bp, Arabidopsis thaliana
gatttgggttacaactt

SEQ ID NO: 101093 - DNA, 17 bp, Arabidopsis thaliana
gatttggtcaccaaaac

SEQ ID NO: 101094 - DNA, 17 bp, Arabidopsis thaliana
gatttggtcattctgtt

SEQ ID NO: 101095 - DNA, 17 bp, Arabidopsis thaliana
gatttggtccacggatt

SEQ ID NO: 101096 - DNA, 17 bp, Arabidopsis thaliana
gatttggtccgccgtct

SEQ ID NO: 101097 - DNA, 17 bp, Arabidopsis thaliana
gatttggtctcgctcat

SEQ ID NO: 101098 - DNA, 17 bp, Arabidopsis thaliana
gatttggttgctcttgg

SEQ ID NO: 101099 - DNA, 17 bp, Arabidopsis thaliana
gatttggttgttgctta

SEQ ID NO: 101100 - DNA, 17 bp, Arabidopsis thaliana
gatttggtttcggcaac

SEQ ID NO: 101101 - DNA, 17 bp, Arabidopsis thaliana
gatttgtaccgcggtga

SEQ ID NO: 101102 - DNA, 17 bp, Arabidopsis thaliana
gatttgtactacgcctc

SEQ ID NO: 101103 - DNA, 17 bp, Arabidopsis thaliana
gatttgtccacattgtt

SEQ ID NO: 101104 - DNA, 17 bp, Arabidopsis thaliana
gatttgtccgcagttca

SEQ ID NO: 101105 - DNA, 17 bp, Arabidopsis thaliana
gatttgtccgtcttagc

SEQ ID NO: 101106 - DNA, 17 bp, Arabidopsis thaliana
gatttgtctggttaatt

SEQ ID NO: 101107 - DNA, 17 bp, Arabidopsis thaliana
gatttgtgatagtgtga

SEQ ID NO: 101108 - DNA, 17 bp, Arabidopsis thaliana
gatttgtgatttggatt

SEQ ID NO: 101109 - DNA, 17 bp, Arabidopsis thaliana
gatttgtgcgaatacgg

SEQ ID NO: 101110 - DNA, 17 bp, Arabidopsis thaliana
gatttgtgctatatgac

SEQ ID NO: 101111 - DNA, 17 bp, Arabidopsis thaliana
gatttgtgctatattac

SEQ ID NO: 101112 - DNA, 17 bp, Arabidopsis thaliana
gatttgtgctgtatgac

SEQ ID NO: 101113 - DNA, 17 bp, Arabidopsis thaliana
gatttgtggcttggttc

SEQ ID NO: 101114 - DNA, 17 bp, Arabidopsis thaliana
gatttgtgtccaagcaa

SEQ ID NO: 101115 - DNA, 17 bp, Arabidopsis thaliana
gatttgttcattctgct

SEQ ID NO: 101116 - DNA, 17 bp, Arabidopsis thaliana
gatttgttgctggatgg

SEQ ID NO: 101117 - DNA, 17 bp, Arabidopsis thaliana
gatttgttgctggattg

SEQ ID NO: 101118 - DNA, 17 bp, Arabidopsis thaliana
gatttgttgtactttcg

SEQ ID NO: 101119 - DNA, 17 bp, Arabidopsis thaliana
gatttgtttgtgctctt

SEQ ID NO: 101120 - DNA, 17 bp, Arabidopsis thaliana
gatttgttttccaacga

SEQ ID NO: 101121 - DNA, 17 bp, Arabidopsis thaliana
gatttgtttttgctgct

SEQ ID NO: 101122 - DNA, 17 bp, Arabidopsis thaliana
gattttacagtcttggg

SEQ ID NO: 101123 - DNA, 17 bp, Arabidopsis thaliana
gattttcaaatcacagg

SEQ ID NO: 101124 - DNA, 17 bp, Arabidopsis thaliana
gattttcaagctgggct

SEQ ID NO: 101125 - DNA, 17 bp, Arabidopsis thaliana
gattttcaccgtttgtc

SEQ ID NO: 101126 - DNA, 17 bp, Arabidopsis thaliana
gattttccctctctggc

SEQ ID NO: 101127 - DNA, 17 bp, Arabidopsis thaliana
gattttccggcaggtcg

SEQ ID NO: 101128 - DNA, 17 bp, Arabidopsis thaliana
gattttccggctaggcg

SEQ ID NO: 101129 - DNA, 17 bp, Arabidopsis thaliana
gattttcgaaatatcaa

SEQ ID NO: 101130 - DNA, 17 bp, Arabidopsis thaliana
gattttcgggtctgttt

SEQ ID NO: 101131 - DNA, 17 bp, Arabidopsis thaliana
gattttcgtgccaaatt

SEQ ID NO: 101132 - DNA, 17 bp, Arabidopsis thaliana
gattttctccccgggat

SEQ ID NO: 101133 - DNA, 17 bp, Arabidopsis thaliana
gattttctcttcttgcg

SEQ ID NO: 101134 - DNA, 17 bp, Arabidopsis thaliana
gattttctggttcacgg

SEQ ID NO: 101135 - DNA, 17 bp, Arabidopsis thaliana
gattttctgtgatggtt

SEQ ID NO: 101136 - DNA, 17 bp, Arabidopsis thaliana
gattttcttttttgtcg

SEQ ID NO: 101137 - DNA, 17 bp, Arabidopsis thaliana
gattttgaaagattgtt

SEQ ID NO: 101138 - DNA, 17 bp, Arabidopsis thaliana
gattttgacactgtggg

SEQ ID NO: 101139 - DNA, 17 bp, Arabidopsis thaliana
gattttgacattgtggg

SEQ ID NO: 101140 - DNA, 17 bp, Arabidopsis thaliana
gattttgactctgattt

SEQ ID NO: 101141 - DNA, 17 bp, Arabidopsis thaliana
gattttgacttagaggc

SEQ ID NO: 101142 - DNA, 17 bp, Arabidopsis thaliana
gattttgagactgtggg

SEQ ID NO: 101143 - DNA, 17 bp, Arabidopsis thaliana
gattttgaggtcaaggt

SEQ ID NO: 101144 - DNA, 17 bp, Arabidopsis thaliana
gattttgatactgtggg

SEQ ID NO: 101145 - DNA, 17 bp, Arabidopsis thaliana
gattttgatcttgttgt

SEQ ID NO: 101146 - DNA, 17 bp, Arabidopsis thaliana
gattttgattactttgc

SEQ ID NO: 101147 - DNA, 17 bp, Arabidopsis thaliana
gattttgcagaacattc

SEQ ID NO: 101148 - DNA, 17 bp, Arabidopsis thaliana
gattttgcagtttgctg

SEQ ID NO: 101149 - DNA, 17 bp, Arabidopsis thaliana
gattttgccaaggatgt

SEQ ID NO: 101150 - DNA, 17 bp, Arabidopsis thaliana
gattttgccaagtatcg

SEQ ID NO: 101151 - DNA, 17 bp, Arabidopsis thaliana
gattttgccagcactcg

SEQ ID NO: 101152 - DNA, 17 bp, Arabidopsis thaliana
gattttgcctctaacga

SEQ ID NO: 101153 - DNA, 17 bp, Arabidopsis thaliana
gattttgcgataccagt

SEQ ID NO: 101154 - DNA, 17 bp, Arabidopsis thaliana
gattttgcggttgattg

SEQ ID NO: 101155 - DNA, 17 bp, Arabidopsis thaliana
gattttgctaaaggaat

SEQ ID NO: 101156 - DNA, 17 bp, Arabidopsis thaliana
gattttgcttggcgatg

SEQ ID NO: 101157 - DNA, 17 bp, Arabidopsis thaliana
gattttggacctaggcc

SEQ ID NO: 101158 - DNA, 17 bp, Arabidopsis thaliana
gattttggacctgtgac

SEQ ID NO: 101159 - DNA, 17 bp, Arabidopsis thaliana
gattttggatccatcat

SEQ ID NO: 101160 - DNA, 17 bp, Arabidopsis thaliana
gattttggattcaggaa

SEQ ID NO: 101161 - DNA, 17 bp, Arabidopsis thaliana
gattttggcagatgagg

SEQ ID NO: 101162 - DNA, 17 bp, Arabidopsis thaliana
gattttggccagctcaa

SEQ ID NO: 101163 - DNA, 17 bp, Arabidopsis thaliana
gattttggccaggtcaa

SEQ ID NO: 101164 - DNA, 17 bp, Arabidopsis thaliana
gattttggccgttttct

SEQ ID NO: 101165 - DNA, 17 bp, Arabidopsis thaliana
gattttggcctggtcaa

SEQ ID NO: 101166 - DNA, 17 bp, Arabidopsis thaliana
gattttggcttagaacc

SEQ ID NO: 101167 - DNA, 17 bp, Arabidopsis thaliana
gattttggcttggttgt

SEQ ID NO: 101168 - DNA, 17 bp, Arabidopsis thaliana
gattttgggatcatact

SEQ ID NO: 101169 - DNA, 17 bp, Arabidopsis thaliana
gattttgggcataatcg

SEQ ID NO: 101170 - DNA, 17 bp, Arabidopsis thaliana
gattttgggtgcggtct

SEQ ID NO: 101171 - DNA, 17 bp, Arabidopsis thaliana
gattttggtggtggtgc

SEQ ID NO: 101172 - DNA, 17 bp, Arabidopsis thaliana
gattttggttcaggaat

SEQ ID NO: 101173 - DNA, 17 bp, Arabidopsis thaliana
gattttggttccagctt

SEQ ID NO: 101174 - DNA, 17 bp, Arabidopsis thaliana
gattttggttcgggtcc

SEQ ID NO: 101175 - DNA, 17 bp, Arabidopsis thaliana
gattttggttgagatcc

SEQ ID NO: 101176 - DNA, 17 bp, Arabidopsis thaliana
gattttgtcaactttgc

SEQ ID NO: 101177 - DNA, 17 bp, Arabidopsis thaliana
gattttgtccccgattt

SEQ ID NO: 101178 - DNA, 17 bp, Arabidopsis thaliana
gattttgtcggcaccgg

SEQ ID NO: 101179 - DNA, 17 bp, Arabidopsis thaliana
gattttgttcgtttgcc

SEQ ID NO: 101180 - DNA, 17 bp, Arabidopsis thaliana
gattttgttgctcttgg

SEQ ID NO: 101181 - DNA, 17 bp, Arabidopsis thaliana
gattttgttttcggggt

SEQ ID NO: 101182 - DNA, 17 bp, Arabidopsis thaliana
gatttttacatattggt

SEQ ID NO: 101183 - DNA, 17 bp, Arabidopsis thaliana
gatttttcacactttgc

SEQ ID NO: 101184 - DNA, 17 bp, Arabidopsis thaliana
gatttttcgtgatttgg

SEQ ID NO: 101185 - DNA, 17 bp, Arabidopsis thaliana
gatttttgacatgtgcg

SEQ ID NO: 101186 - DNA, 17 bp, Arabidopsis thaliana
gatttttgccacgtcct

SEQ ID NO: 101187 - DNA, 17 bp, Arabidopsis thaliana
gatttttgccgtggatg

SEQ ID NO: 101188 - DNA, 17 bp, Arabidopsis thaliana
gatttttgcgagctatg

SEQ ID NO: 101189 - DNA, 17 bp, Arabidopsis thaliana
gatttttgctatatgaa

SEQ ID NO: 101190 - DNA, 17 bp, Arabidopsis thaliana
gatttttgctatatgac

SEQ ID NO: 101191 - DNA, 17 bp, Arabidopsis thaliana
gatttttgctatatgat

SEQ ID NO: 101192 - DNA, 17 bp, Arabidopsis thaliana
gatttttgctgggtttt

SEQ ID NO: 101193 - DNA, 17 bp, Arabidopsis thaliana
gatttttgtgtttagct

SEQ ID NO: 101194 - DNA, 17 bp, Arabidopsis thaliana
gatttttgtttatggga

SEQ ID NO: 101195 - DNA, 17 bp, Arabidopsis thaliana
gatttttgtttccaagg

SEQ ID NO: 101196 - DNA, 17 bp, Arabidopsis thaliana
gatttttgtttgggttc

SEQ ID NO: 101197 - DNA, 17 bp, Arabidopsis thaliana
gatttttgttttcaggg

SEQ ID NO: 101198 - DNA, 17 bp, Arabidopsis thaliana
gattttttaggactgtg

SEQ ID NO: 101199 - DNA, 17 bp, Arabidopsis thaliana
gattttttcccctcgac

SEQ ID NO: 101200 - DNA, 17 bp, Arabidopsis thaliana
gattttttccttttcgg

SEQ ID NO: 101201 - DNA, 17 bp, Arabidopsis thaliana
gattttttgaggttttt

SEQ ID NO: 101202 - DNA, 17 bp, Arabidopsis thaliana
gattttttgcgctaatt

SEQ ID NO: 101203 - DNA, 17 bp, Arabidopsis thaliana
gatttttttctctcgat

SEQ ID NO: 101204 - DNA, 17 bp, Arabidopsis thaliana
gatttttttctgcatat

SEQ ID NO: 101205 - DNA, 17 bp, Arabidopsis thaliana
gatttttttgggtttct

SEQ ID NO: 101206 - DNA, 17 bp, Arabidopsis thaliana
gcaaaaactcctggtgt

SEQ ID NO: 101207 - DNA, 17 bp, Arabidopsis thaliana
gcaaaaagacttctagt

SEQ ID NO: 101208 - DNA, 17 bp, Arabidopsis thaliana
gcaaaacaaaatacaag

SEQ ID NO: 101209 - DNA, 17 bp, Arabidopsis thaliana
gcaaaacccgtatccca

SEQ ID NO: 101210 - DNA, 17 bp, Arabidopsis thaliana
gcaaaacgacgacgagc

SEQ ID NO: 101211 - DNA, 17 bp, Arabidopsis thaliana
gcaaaacgatgacgaca

SEQ ID NO: 101212 - DNA, 17 bp, Arabidopsis thaliana
gcaaaacgattatcctc

SEQ ID NO: 101213 - DNA, 17 bp, Arabidopsis thaliana
gcaaaactactcgtgtt

SEQ ID NO: 101214 - DNA, 17 bp, Arabidopsis thaliana
gcaaaactactggtgtt

SEQ ID NO: 101215 - DNA, 17 bp, Arabidopsis thaliana
gcaaaacttccacgagg

SEQ ID NO: 101216 - DNA, 17 bp, Arabidopsis thaliana
gcaaaagcgattcccgt

SEQ ID NO: 101217 - DNA, 17 bp, Arabidopsis thaliana
gcaaaagcttcatcgca

SEQ ID NO: 101218 - DNA, 17 bp, Arabidopsis thaliana
gcaaaaggtctccagtt

SEQ ID NO: 101219 - DNA, 17 bp, Arabidopsis thaliana
gcaaaagtctaagcatg

SEQ ID NO: 101220 - DNA, 17 bp, Arabidopsis thaliana
gcaaaagtctgtcagtt

SEQ ID NO: 101221 - DNA, 17 bp, Arabidopsis thaliana
gcaaaagtggcttggtc

SEQ ID NO: 101222 - DNA, 17 bp, Arabidopsis thaliana
gcaaaatacggtgggcc

SEQ ID NO: 101223 - DNA, 17 bp, Arabidopsis thaliana
gcaaaatctcaagattg

SEQ ID NO: 101224 - DNA, 17 bp, Arabidopsis thaliana
gcaaaatctgccatatt

SEQ ID NO: 101225 - DNA, 17 bp, Arabidopsis thaliana
gcaaaatgacgatttcg

SEQ ID NO: 101226 - DNA, 17 bp, Arabidopsis thaliana
gcaaaatgacgtttctg

SEQ ID NO: 101227 - DNA, 17 bp, Arabidopsis thaliana
gcaaaatgatgattcta

SEQ ID NO: 101228 - DNA, 17 bp, Arabidopsis thaliana
gcaaaatgatgattctg

SEQ ID NO: 101229 - DNA, 17 bp, Arabidopsis thaliana
gcaaaatggatccgtaa

SEQ ID NO: 101230 - DNA, 17 bp, Arabidopsis thaliana
gcaaaatgggttgtggt

SEQ ID NO: 101231 - DNA, 17 bp, Arabidopsis thaliana
gcaaaattagaccgctt

SEQ ID NO: 101232 - DNA, 17 bp, Arabidopsis thaliana
gcaaaattagatttgca

SEQ ID NO: 101233 - DNA, 17 bp, Arabidopsis thaliana
gcaaaattagggttgca

SEQ ID NO: 101234 - DNA, 17 bp, Arabidopsis thaliana
gcaaaattgtcaccgcg

SEQ ID NO: 101235 - DNA, 17 bp, Arabidopsis thaliana
gcaaaatttagagatcg

SEQ ID NO: 101236 - DNA, 17 bp, Arabidopsis thaliana
gcaaacaggttgctgat

SEQ ID NO: 101237 - DNA, 17 bp, Arabidopsis thaliana
gcaaacatattcgggtg

SEQ ID NO: 101238 - DNA, 17 bp, Arabidopsis thaliana
gcaaaccaccatgattg

SEQ ID NO: 101239 - DNA, 17 bp, Arabidopsis thaliana
gcaaaccggggatgtaa

SEQ ID NO: 101240 - DNA, 17 bp, Arabidopsis thaliana
gcaaacctaattttgcg

SEQ ID NO: 101241 - DNA, 17 bp, Arabidopsis thaliana
gcaaacgaacaacttag

SEQ ID NO: 101242 - DNA, 17 bp, Arabidopsis thaliana
gcaaacgagatcgattt

SEQ ID NO: 101243 - DNA, 17 bp, Arabidopsis thaliana
gcaaacgagttttaccc

SEQ ID NO: 101244 - DNA, 17 bp, Arabidopsis thaliana
gcaaacgatatggttgc

SEQ ID NO: 101245 - DNA, 17 bp, Arabidopsis thaliana
gcaaacgcaaccgtttg

SEQ ID NO: 101246 - DNA, 17 bp, Arabidopsis thaliana
gcaaacgcaactgtttg

SEQ ID NO: 101247 - DNA, 17 bp, Arabidopsis thaliana
gcaaacgcaagccagag

SEQ ID NO: 101248 - DNA, 17 bp, Arabidopsis thaliana
gcaaacgcaagtcgttg

SEQ ID NO: 101249 - DNA, 17 bp, Arabidopsis thaliana
gcaaacgcaatcgtttg

SEQ ID NO: 101250 - DNA, 17 bp, Arabidopsis thaliana
gcaaacggatgtattga

SEQ ID NO: 101251 - DNA, 17 bp, Arabidopsis thaliana
gcaaacgtgagcacttt

SEQ ID NO: 101252 - DNA, 17 bp, Arabidopsis thaliana
gcaaactaaaccagttt

SEQ ID NO: 101253 - DNA, 17 bp, Arabidopsis thaliana
gcaaactatgcgttctc

SEQ ID NO: 101254 - DNA, 17 bp, Arabidopsis thaliana
gcaaactcaacacttag

SEQ ID NO: 101255 - DNA, 17 bp, Arabidopsis thaliana
gcaaactcattacagcc

SEQ ID NO: 101256 - DNA, 17 bp, Arabidopsis thaliana
gcaaactcccgcaaccg

SEQ ID NO: 101257 - DNA, 17 bp, Arabidopsis thaliana
gcaaactctcatgtgct

SEQ ID NO: 101258 - DNA, 17 bp, Arabidopsis thaliana
gcaaacttggcatgtga

SEQ ID NO: 101259 - DNA, 17 bp, Arabidopsis thaliana
gcaaacttttgacttag

SEQ ID NO: 101260 - DNA, 17 bp, Arabidopsis thaliana
gcaaagaagatccggag

SEQ ID NO: 101261 - DNA, 17 bp, Arabidopsis thaliana
gcaaagactaagtttgg

SEQ ID NO: 101262 - DNA, 17 bp, Arabidopsis thaliana
gcaaagactatgtccgg

SEQ ID NO: 101263 - DNA, 17 bp, Arabidopsis thaliana
gcaaagactggagaggc

SEQ ID NO: 101264 - DNA, 17 bp, Arabidopsis thaliana
gcaaagaggccgaaagg

SEQ ID NO: 101265 - DNA, 17 bp, Arabidopsis thaliana
gcaaagagttgtgttgg

SEQ ID NO: 101266 - DNA, 17 bp, Arabidopsis thaliana
gcaaagatctgagccat

SEQ ID NO: 101267 - DNA, 17 bp, Arabidopsis thaliana
gcaaagattcaggctgt

SEQ ID NO: 101268 - DNA, 17 bp, Arabidopsis thaliana
gcaaagcaaagaggttc

SEQ ID NO: 101269 - DNA, 17 bp, Arabidopsis thaliana
gcaaagccgtcagattc

SEQ ID NO: 101270 - DNA, 17 bp, Arabidopsis thaliana
gcaaagcgctgcggaga

SEQ ID NO: 101271 - DNA, 17 bp, Arabidopsis thaliana
gcaaagcgtctgtaggt

SEQ ID NO: 101272 - DNA, 17 bp, Arabidopsis thaliana
gcaaagctaatactggg

SEQ ID NO: 101273 - DNA, 17 bp, Arabidopsis thaliana
gcaaagcttagaggtcg

SEQ ID NO: 101274 - DNA, 17 bp, Arabidopsis thaliana
gcaaaggattctacccg

SEQ ID NO: 101275 - DNA, 17 bp, Arabidopsis thaliana
gcaaaggattgtgatgt

SEQ ID NO: 101276 - DNA, 17 bp, Arabidopsis thaliana
gcaaagggggtgaacga

SEQ ID NO: 101277 - DNA, 17 bp, Arabidopsis thaliana
gcaaagggtgtgaacga

SEQ ID NO: 101278 - DNA, 17 bp, Arabidopsis thaliana
gcaaaggtctattaagg

SEQ ID NO: 101279 - DNA, 17 bp, Arabidopsis thaliana
gcaaaggttttgcgtta

SEQ ID NO: 101280 - DNA, 17 bp, Arabidopsis thaliana
gcaaagtaagactacaa

SEQ ID NO: 101281 - DNA, 17 bp, Arabidopsis thaliana
gcaaagtagccatgctt

SEQ ID NO: 101282 - DNA, 17 bp, Arabidopsis thaliana
gcaaagtccggtttaga

SEQ ID NO: 101283 - DNA, 17 bp, Arabidopsis thaliana
gcaaagtcgtaagacca

SEQ ID NO: 101284 - DNA, 17 bp, Arabidopsis thaliana
gcaaagtctgatggccc

SEQ ID NO: 101285 - DNA, 17 bp, Arabidopsis thaliana
gcaaagtgactacatag

SEQ ID NO: 101286 - DNA, 17 bp, Arabidopsis thaliana
gcaaagtgactacatcg

SEQ ID NO: 101287 - DNA, 17 bp, Arabidopsis thaliana
gcaaagtgcgactgtgt

SEQ ID NO: 101288 - DNA, 17 bp, Arabidopsis thaliana
gcaaagtgtctggtcct

SEQ ID NO: 101289 - DNA, 17 bp, Arabidopsis thaliana
gcaaagtgtcttcggag

SEQ ID NO: 101290 - DNA, 17 bp, Arabidopsis thaliana
gcaaagtgtttttccag

SEQ ID NO: 101291 - DNA, 17 bp, Arabidopsis thaliana
gcaaagtttagaggttg

SEQ ID NO: 101292 - DNA, 17 bp, Arabidopsis thaliana
gcaaagtttcggttgac

SEQ ID NO: 101293 - DNA, 17 bp, Arabidopsis thaliana
gcaaagttttggctgac

SEQ ID NO: 101294 - DNA, 17 bp, Arabidopsis thaliana
gcaaatattctacgagg

SEQ ID NO: 101295 - DNA, 17 bp, Arabidopsis thaliana
gcaaatcacatttgttt

SEQ ID NO: 101296 - DNA, 17 bp, Arabidopsis thaliana
gcaaatcaggatggaaa

SEQ ID NO: 101297 - DNA, 17 bp, Arabidopsis thaliana
gcaaatcatgttttgac

SEQ ID NO: 101298 - DNA, 17 bp, Arabidopsis thaliana
gcaaatccatattggca

SEQ ID NO: 101299 - DNA, 17 bp, Arabidopsis thaliana
gcaaatccgtctcgctt

SEQ ID NO: 101300 - DNA, 17 bp, Arabidopsis thaliana
gcaaatcggttcaagga

SEQ ID NO: 101301 - DNA, 17 bp, Arabidopsis thaliana
gcaaatcgttcgtccga

SEQ ID NO: 101302 - DNA, 17 bp, Arabidopsis thaliana
gcaaatcgttcgtctga

SEQ ID NO: 101303 - DNA, 17 bp, Arabidopsis thaliana
gcaaatctctggatctt

SEQ ID NO: 101304 - DNA, 17 bp, Arabidopsis thaliana
gcaaatctgttgaggcc

SEQ ID NO: 101305 - DNA, 17 bp, Arabidopsis thaliana
gcaaatgaaaaggtgag

SEQ ID NO: 101306 - DNA, 17 bp, Arabidopsis thaliana
gcaaatgcagcgtctgc

SEQ ID NO: 101307 - DNA, 17 bp, Arabidopsis thaliana
gcaaatgcgtgtccaat

SEQ ID NO: 101308 - DNA, 17 bp, Arabidopsis thaliana
gcaaatgcgtgtctaat

SEQ ID NO: 101309 - DNA, 17 bp, Arabidopsis thaliana
gcaaatggcccattagc

SEQ ID NO: 101310 - DNA, 17 bp, Arabidopsis thaliana
gcaaatggtccgctgcg

SEQ ID NO: 101311 - DNA, 17 bp, Arabidopsis thaliana
gcaaatggttgcacgtt

SEQ ID NO: 101312 - DNA, 17 bp, Arabidopsis thaliana
gcaaatgtcatgggtcc

SEQ ID NO: 101313 - DNA, 17 bp, Arabidopsis thaliana
gcaaatgttaaaacgga

SEQ ID NO: 101314 - DNA, 17 bp, Arabidopsis thaliana
gcaaattacaggttttt

SEQ ID NO: 101315 - DNA, 17 bp, Arabidopsis thaliana
gcaaattacccaatcct

SEQ ID NO: 101316 - DNA, 17 bp, Arabidopsis thaliana
gcaaattcagtgtgggc

SEQ ID NO: 101317 - DNA, 17 bp, Arabidopsis thaliana
gcaaattcctacgactc

SEQ ID NO: 101318 - DNA, 17 bp, Arabidopsis thaliana
gcaaattctgtctgaac

SEQ ID NO: 101319 - DNA, 17 bp, Arabidopsis thaliana
gcaaattgacaatgtac

SEQ ID NO: 101320 - DNA, 17 bp, Arabidopsis thaliana
gcaaattgaccttggct

SEQ ID NO: 101321 - DNA, 17 bp, Arabidopsis thaliana
gcaaattgctatagact

SEQ ID NO: 101322 - DNA, 17 bp, Arabidopsis thaliana
gcaaattggatatcagg

SEQ ID NO: 101323 - DNA, 17 bp, Arabidopsis thaliana
gcaaatttgcgacgacc

SEQ ID NO: 101324 - DNA, 17 bp, Arabidopsis thaliana
gcaacaaaactcgggat

SEQ ID NO: 101325 - DNA, 17 bp, Arabidopsis thaliana
gcaacaaatcgctgtga

SEQ ID NO: 101326 - DNA, 17 bp, Arabidopsis thaliana
gcaacaacattggaggt

SEQ ID NO: 101327 - DNA, 17 bp, Arabidopsis thaliana
gcaacaaccgcatgtgt

SEQ ID NO: 101328 - DNA, 17 bp, Arabidopsis thaliana
gcaacaagatcttaaag

SEQ ID NO: 101329 - DNA, 17 bp, Arabidopsis thaliana
gcaacaaggaggtccca

SEQ ID NO: 101330 - DNA, 17 bp, Arabidopsis thaliana
gcaacacaaacaatgac

SEQ ID NO: 101331 - DNA, 17 bp, Arabidopsis thaliana
gcaacacaaggaattcc

SEQ ID NO: 101332 - DNA, 17 bp, Arabidopsis thaliana
gcaacacaaggacttcc

SEQ ID NO: 101333 - DNA, 17 bp, Arabidopsis thaliana
gcaacacagcacgcaag

SEQ ID NO: 101334 - DNA, 17 bp, Arabidopsis thaliana
gcaacacagcacgcagg

SEQ ID NO: 101335 - DNA, 17 bp, Arabidopsis thaliana
gcaacacgagaagcacc

SEQ ID NO: 101336 - DNA, 17 bp, Arabidopsis thaliana
gcaacacgaggacttcc

SEQ ID NO: 101337 - DNA, 17 bp, Arabidopsis thaliana
gcaacacggttgcttgc

SEQ ID NO: 101338 - DNA, 17 bp, Arabidopsis thaliana
gcaacacgtctttctat

SEQ ID NO: 101339 - DNA, 17 bp, Arabidopsis thaliana
gcaacagactgtgcagt

SEQ ID NO: 101340 - DNA, 17 bp, Arabidopsis thaliana
gcaacagcgaccagcga

SEQ ID NO: 101341 - DNA, 17 bp, Arabidopsis thaliana
gcaacagctaagtctcc

SEQ ID NO: 101342 - DNA, 17 bp, Arabidopsis thaliana
gcaacaggatcttaaag

SEQ ID NO: 101343 - DNA, 17 bp, Arabidopsis thaliana
gcaacaggccaccaggc

SEQ ID NO: 101344 - DNA, 17 bp, Arabidopsis thaliana
gcaacaggttccctcaa

SEQ ID NO: 101345 - DNA, 17 bp, Arabidopsis thaliana
gcaacagttgcgggcgg

SEQ ID NO: 101346 - DNA, 17 bp, Arabidopsis thaliana
gcaacatccgactatgc

SEQ ID NO: 101347 - DNA, 17 bp, Arabidopsis thaliana
gcaacatcttcaactgc

SEQ ID NO: 101348 - DNA, 17 bp, Arabidopsis thaliana
gcaacatcttcaagatt

SEQ ID NO: 101349 - DNA, 17 bp, Arabidopsis thaliana
gcaacatgaaaccgcgc

SEQ ID NO: 101350 - DNA, 17 bp, Arabidopsis thaliana
gcaacatgtactttcag

SEQ ID NO: 101351 - DNA, 17 bp, Arabidopsis thaliana
gcaacatgttgtagttt

SEQ ID NO: 101352 - DNA, 17 bp, Arabidopsis thaliana
gcaacattgtgcttgtc

SEQ ID NO: 101353 - DNA, 17 bp, Arabidopsis thaliana
gcaacatttattgatga

SEQ ID NO: 101354 - DNA, 17 bp, Arabidopsis thaliana
gcaaccacacgcaccat

SEQ ID NO: 101355 - DNA, 17 bp, Arabidopsis thaliana
gcaaccactcgattacc

SEQ ID NO: 101356 - DNA, 17 bp, Arabidopsis thaliana
gcaaccagctgtgaatc

SEQ ID NO: 101357 - DNA, 17 bp, Arabidopsis thaliana
gcaaccagcttgttcgt

SEQ ID NO: 101358 - DNA, 17 bp, Arabidopsis thaliana
gcaaccatatcatttgc

SEQ ID NO: 101359 - DNA, 17 bp, Arabidopsis thaliana
gcaaccatccatcgctc

SEQ ID NO: 101360 - DNA, 17 bp, Arabidopsis thaliana
gcaaccatcttgttagg

SEQ ID NO: 101361 - DNA, 17 bp, Arabidopsis thaliana
gcaaccatttgaatcct

SEQ ID NO: 101362 - DNA, 17 bp, Arabidopsis thaliana
gcaaccccaggtcaggc

SEQ ID NO: 101363 - DNA, 17 bp, Arabidopsis thaliana
gcaacccgtggtcagcc

SEQ ID NO: 101364 - DNA, 17 bp, Arabidopsis thaliana
gcaaccctttgaccttt

SEQ ID NO: 101365 - DNA, 17 bp, Arabidopsis thaliana
gcaaccgaatcttaaag

SEQ ID NO: 101366 - DNA, 17 bp, Arabidopsis thaliana
gcaaccgcaaccgcaac

SEQ ID NO: 101367 - DNA, 17 bp, Arabidopsis thaliana
gcaaccgcccgtttccg

SEQ ID NO: 101368 - DNA, 17 bp, Arabidopsis thaliana
gcaaccggatcttaaag

SEQ ID NO: 101369 - DNA, 17 bp, Arabidopsis thaliana
gcaaccggatcttgaag

SEQ ID NO: 101370 - DNA, 17 bp, Arabidopsis thaliana
gcaaccggatctttaag

SEQ ID NO: 101371 - DNA, 17 bp, Arabidopsis thaliana
gcaaccggttagggttg

SEQ ID NO: 101372 - DNA, 17 bp, Arabidopsis thaliana
gcaaccgtggcatgacg

SEQ ID NO: 101373 - DNA, 17 bp, Arabidopsis thaliana
gcaaccgtggcctcacg

SEQ ID NO: 101374 - DNA, 17 bp, Arabidopsis thaliana
gcaaccgtggcctgacg

SEQ ID NO: 101375 - DNA, 17 bp, Arabidopsis thaliana
gcaaccgtgtgaacgat

SEQ ID NO: 101376 - DNA, 17 bp, Arabidopsis thaliana
gcaaccgtttggtctat

SEQ ID NO: 101377 - DNA, 17 bp, Arabidopsis thaliana
gcaacctacagactgtg

SEQ ID NO: 101378 - DNA, 17 bp, Arabidopsis thaliana
gcaacctctaagattcg

SEQ ID NO: 101379 - DNA, 17 bp, Arabidopsis thaliana
gcaacctctgatgtggt

SEQ ID NO: 101380 - DNA, 17 bp, Arabidopsis thaliana
gcaacctgagatctagt

SEQ ID NO: 101381 - DNA, 17 bp, Arabidopsis thaliana
gcaacctgcatgggcca

SEQ ID NO: 101382 - DNA, 17 bp, Arabidopsis thaliana
gcaacctggatcttaaa

SEQ ID NO: 101383 - DNA, 17 bp, Arabidopsis thaliana
gcaacctggtccgccgg

SEQ ID NO: 101384 - DNA, 17 bp, Arabidopsis thaliana
gcaaccttggtccaatt

SEQ ID NO: 101385 - DNA, 17 bp, Arabidopsis thaliana
gcaacgaaggcctattg

SEQ ID NO: 101386 - DNA, 17 bp, Arabidopsis thaliana
gcaacgaccatcacaag

SEQ ID NO: 101387 - DNA, 17 bp, Arabidopsis thaliana
gcaacgacgaaagcggt

SEQ ID NO: 101388 - DNA, 17 bp, Arabidopsis thaliana
gcaacgacggcgagtgg

SEQ ID NO: 101389 - DNA, 17 bp, Arabidopsis thaliana
gcaacgactctcggcaa

SEQ ID NO: 101390 - DNA, 17 bp, Arabidopsis thaliana
gcaacgactctgggcaa

SEQ ID NO: 101391 - DNA, 17 bp, Arabidopsis thaliana
gcaacgactttaaaccg

SEQ ID NO: 101392 - DNA, 17 bp, Arabidopsis thaliana
gcaacgagcgcaaccct

SEQ ID NO: 101393 - DNA, 17 bp, Arabidopsis thaliana
gcaacgcgatcttaaag

SEQ ID NO: 101394 - DNA, 17 bp, Arabidopsis thaliana
gcaacgcgcgggtctcc

SEQ ID NO: 101395 - DNA, 17 bp, Arabidopsis thaliana
gcaacgcggattacggt

SEQ ID NO: 101396 - DNA, 17 bp, Arabidopsis thaliana
gcaacggatatctcggc

SEQ ID NO: 101397 - DNA, 17 bp, Arabidopsis thaliana
gcaacggatcattcaag

SEQ ID NO: 101398 - DNA, 17 bp, Arabidopsis thaliana
gcaacgggagcaaatac

SEQ ID NO: 101399 - DNA, 17 bp, Arabidopsis thaliana
gcaacgggatcttaaag

SEQ ID NO: 101400 - DNA, 17 bp, Arabidopsis thaliana
gcaacgggtttggcagg

SEQ ID NO: 101401 - DNA, 17 bp, Arabidopsis thaliana
gcaacggttgctctttc

SEQ ID NO: 101402 - DNA, 17 bp, Arabidopsis thaliana
gcaacggttgctttctt

SEQ ID NO: 101403 - DNA, 17 bp, Arabidopsis thaliana
gcaacggtttattatcc

SEQ ID NO: 101404 - DNA, 17 bp, Arabidopsis thaliana
gcaacggtttattgtcc

SEQ ID NO: 101405 - DNA, 17 bp, Arabidopsis thaliana
gcaacgtatcccgattt

SEQ ID NO: 101406 - DNA, 17 bp, Arabidopsis thaliana
gcaacgtgcgactgagt

SEQ ID NO: 101407 - DNA, 17 bp, Arabidopsis thaliana
gcaacgtgcgactgtgt

SEQ ID NO: 101408 - DNA, 17 bp, Arabidopsis thaliana
gcaactaaagaacctgg

SEQ ID NO: 101409 - DNA, 17 bp, Arabidopsis thaliana
gcaactaaagaacttgc

SEQ ID NO: 101410 - DNA, 17 bp, Arabidopsis thaliana
gcaactacagacggaag

SEQ ID NO: 101411 - DNA, 17 bp, Arabidopsis thaliana
gcaactacctgcggcga

SEQ ID NO: 101412 - DNA, 17 bp, Arabidopsis thaliana
gcaactaggatgagatt

SEQ ID NO: 101413 - DNA, 17 bp, Arabidopsis thaliana
gcaactaggatgggtga

SEQ ID NO: 101414 - DNA, 17 bp, Arabidopsis thaliana
gcaactcagaatcggtg

SEQ ID NO: 101415 - DNA, 17 bp, Arabidopsis thaliana
gcaactcggctgattat

SEQ ID NO: 101416 - DNA, 17 bp, Arabidopsis thaliana
gcaactctagggttcat

SEQ ID NO: 101417 - DNA, 17 bp, Arabidopsis thaliana
gcaactgaatcacttgg

SEQ ID NO: 101418 - DNA, 17 bp, Arabidopsis thaliana
gcaactgcgtggtaact

SEQ ID NO: 101419 - DNA, 17 bp, Arabidopsis thaliana
gcaactgctcaaagcca

SEQ ID NO: 101420 - DNA, 17 bp, Arabidopsis thaliana
gcaactggagcctgcac

SEQ ID NO: 101421 - DNA, 17 bp, Arabidopsis thaliana
gcaactggatcttaaag

SEQ ID NO: 101422 - DNA, 17 bp, Arabidopsis thaliana
gcaactggctcggactc

SEQ ID NO: 101423 - DNA, 17 bp, Arabidopsis thaliana
gcaactggttcggactc

SEQ ID NO: 101424 - DNA, 17 bp, Arabidopsis thaliana
gcaactggtttcagagc

SEQ ID NO: 101425 - DNA, 17 bp, Arabidopsis thaliana
gcaactgtgttgactgt

SEQ ID NO: 101426 - DNA, 17 bp, Arabidopsis thaliana
gcaactgttccgatgag

SEQ ID NO: 101427 - DNA, 17 bp, Arabidopsis thaliana
gcaacttccaccacctg

SEQ ID NO: 101428 - DNA, 17 bp, Arabidopsis thaliana
gcaacttcccctggggg

SEQ ID NO: 101429 - DNA, 17 bp, Arabidopsis thaliana
gcaacttgaattgagcc

SEQ ID NO: 101430 - DNA, 17 bp, Arabidopsis thaliana
gcaacttgtccttggct

SEQ ID NO: 101431 - DNA, 17 bp, Arabidopsis thaliana
gcaacttgtctccggag

SEQ ID NO: 101432 - DNA, 17 bp, Arabidopsis thaliana
gcaactttacgactcgt

SEQ ID NO: 101433 - DNA, 17 bp, Arabidopsis thaliana
gcaactttgatagccgc

SEQ ID NO: 101434 - DNA, 17 bp, Arabidopsis thaliana
gcaactttttcgtaccc

SEQ ID NO: 101435 - DNA, 17 bp, Arabidopsis thaliana
gcaacttttttgcgacg

SEQ ID NO: 101436 - DNA, 17 bp, Arabidopsis thaliana
gcaagaaagagcacgca

SEQ ID NO: 101437 - DNA, 17 bp, Arabidopsis thaliana
gcaagaagcagggcacg

SEQ ID NO: 101438 - DNA, 17 bp, Arabidopsis thaliana
gcaagaagcatgccgaa

SEQ ID NO: 101439 - DNA, 17 bp, Arabidopsis thaliana
gcaagaatgggcaaaga

SEQ ID NO: 101440 - DNA, 17 bp, Arabidopsis thaliana
gcaagaatttgctatca

SEQ ID NO: 101441 - DNA, 17 bp, Arabidopsis thaliana
gcaagaattttatcgaa

SEQ ID NO: 101442 - DNA, 17 bp, Arabidopsis thaliana
gcaagacaactgggtgg

SEQ ID NO: 101443 - DNA, 17 bp, Arabidopsis thaliana
gcaagacagaggtgtgt

SEQ ID NO: 101444 - DNA, 17 bp, Arabidopsis thaliana
gcaagaccttgttgcta

SEQ ID NO: 101445 - DNA, 17 bp, Arabidopsis thaliana
gcaagacgagtctgtgt

SEQ ID NO: 101446 - DNA, 17 bp, Arabidopsis thaliana
gcaagacgattagcctt

SEQ ID NO: 101447 - DNA, 17 bp, Arabidopsis thaliana
gcaagactttttggtgg

SEQ ID NO: 101448 - DNA, 17 bp, Arabidopsis thaliana
gcaagacttttttggtg

SEQ ID NO: 101449 - DNA, 17 bp, Arabidopsis thaliana
gcaagagattcgacggc

SEQ ID NO: 101450 - DNA, 17 bp, Arabidopsis thaliana
gcaagagccaggcctcg

SEQ ID NO: 101451 - DNA, 17 bp, Arabidopsis thaliana
gcaagagcggctccaaa

SEQ ID NO: 101452 - DNA, 17 bp, Arabidopsis thaliana
gcaagagcggtggaaag

SEQ ID NO: 101453 - DNA, 17 bp, Arabidopsis thaliana
gcaagagcgtgaagtaa

SEQ ID NO: 101454 - DNA, 17 bp, Arabidopsis thaliana
gcaagaggtggagaggc

SEQ ID NO: 101455 - DNA, 17 bp, Arabidopsis thaliana
gcaagaggttccgcatg

SEQ ID NO: 101456 - DNA, 17 bp, Arabidopsis thaliana
gcaagagttttatgact

SEQ ID NO: 101457 - DNA, 17 bp, Arabidopsis thaliana
gcaagatacatggatca

SEQ ID NO: 101458 - DNA, 17 bp, Arabidopsis thaliana
gcaagataccttgtgtg

SEQ ID NO: 101459 - DNA, 17 bp, Arabidopsis thaliana
gcaagatcggtgtgatc

SEQ ID NO: 101460 - DNA, 17 bp, Arabidopsis thaliana
gcaagatcttcatggaa

SEQ ID NO: 101461 - DNA, 17 bp, Arabidopsis thaliana
gcaagatgacaatcctc

SEQ ID NO: 101462 - DNA, 17 bp, Arabidopsis thaliana
gcaagatttttttggtg

SEQ ID NO: 101463 - DNA, 17 bp, Arabidopsis thaliana
gcaagcaaagctttcct

SEQ ID NO: 101464 - DNA, 17 bp, Arabidopsis thaliana
gcaagcagatttagcca

SEQ ID NO: 101465 - DNA, 17 bp, Arabidopsis thaliana
gcaagcagccccagcaa

SEQ ID NO: 101466 - DNA, 17 bp, Arabidopsis thaliana
gcaagcagccccagcac

SEQ ID NO: 101467 - DNA, 17 bp, Arabidopsis thaliana
gcaagcatttgcggttg

SEQ ID NO: 101468 - DNA, 17 bp, Arabidopsis thaliana
gcaagccagagagtcca

SEQ ID NO: 101469 - DNA, 17 bp, Arabidopsis thaliana
gcaagcctacgctctgg

SEQ ID NO: 101470 - DNA, 17 bp, Arabidopsis thaliana
gcaagcgatgagcctcg

SEQ ID NO: 101471 - DNA, 17 bp, Arabidopsis thaliana
gcaagcgcttatggcgg

SEQ ID NO: 101472 - DNA, 17 bp, Arabidopsis thaliana
gcaagcggttcatcgat

SEQ ID NO: 101473 - DNA, 17 bp, Arabidopsis thaliana
gcaagcgtttgcggttg

SEQ ID NO: 101474 - DNA, 17 bp, Arabidopsis thaliana
gcaagctgccagcatga

SEQ ID NO: 101475 - DNA, 17 bp, Arabidopsis thaliana
gcaaggacactattctc

SEQ ID NO: 101476 - DNA, 17 bp, Arabidopsis thaliana
gcaaggacccgaagctc

SEQ ID NO: 101477 - DNA, 17 bp, Arabidopsis thaliana
gcaaggacggcttgatc

SEQ ID NO: 101478 - DNA, 17 bp, Arabidopsis thaliana
gcaaggagacctcatcc

SEQ ID NO: 101479 - DNA, 17 bp, Arabidopsis thaliana
gcaaggagctgatctag

SEQ ID NO: 101480 - DNA, 17 bp, Arabidopsis thaliana
gcaaggagttggcagct

SEQ ID NO: 101481 - DNA, 17 bp, Arabidopsis thaliana
gcaaggatttgttattg

SEQ ID NO: 101482 - DNA, 17 bp, Arabidopsis thaliana
gcaaggcaagatcagtc

SEQ ID NO: 101483 - DNA, 17 bp, Arabidopsis thaliana
gcaaggccactctgcca

SEQ ID NO: 101484 - DNA, 17 bp, Arabidopsis thaliana
gcaaggcccaaagaaag

SEQ ID NO: 101485 - DNA, 17 bp, Arabidopsis thaliana
gcaaggcccatataacc

SEQ ID NO: 101486 - DNA, 17 bp, Arabidopsis thaliana
gcaaggcgtctcggatt

SEQ ID NO: 101487 - DNA, 17 bp, Arabidopsis thaliana
gcaaggctctttgaaga

SEQ ID NO: 101488 - DNA, 17 bp, Arabidopsis thaliana
gcaaggctgaaacttaa

SEQ ID NO: 101489 - DNA, 17 bp, Arabidopsis thaliana
gcaaggcttcacactac

SEQ ID NO: 101490 - DNA, 17 bp, Arabidopsis thaliana
gcaaggcttgtaatggg

SEQ ID NO: 101491 - DNA, 17 bp, Arabidopsis thaliana
gcaagggaagtcggcaa

SEQ ID NO: 101492 - DNA, 17 bp, Arabidopsis thaliana
gcaagggctggctcaac

SEQ ID NO: 101493 - DNA, 17 bp, Arabidopsis thaliana
gcaagggtctggctcat

SEQ ID NO: 101494 - DNA, 17 bp, Arabidopsis thaliana
gcaagggtgtcggctcg

SEQ ID NO: 101495 - DNA, 17 bp, Arabidopsis thaliana
gcaaggtactcaaagac

SEQ ID NO: 101496 - DNA, 17 bp, Arabidopsis thaliana
gcaaggtccctgcaatg

SEQ ID NO: 101497 - DNA, 17 bp, Arabidopsis thaliana
gcaaggtgattgagttg

SEQ ID NO: 101498 - DNA, 17 bp, Arabidopsis thaliana
gcaaggttagttgatca

SEQ ID NO: 101499 - DNA, 17 bp, Arabidopsis thaliana
gcaaggttcaagaacgg

SEQ ID NO: 101500 - DNA, 17 bp, Arabidopsis thaliana
gcaaggttcatccacgg

SEQ ID NO: 101501 - DNA, 17 bp, Arabidopsis thaliana
gcaaggttcgtccacgg

SEQ ID NO: 101502 - DNA, 17 bp, Arabidopsis thaliana
gcaagtagttcctgagg

SEQ ID NO: 101503 - DNA, 17 bp, Arabidopsis thaliana
gcaagtatctactggtt

SEQ ID NO: 101504 - DNA, 17 bp, Arabidopsis thaliana
gcaagtcatccttggct

SEQ ID NO: 101505 - DNA, 17 bp, Arabidopsis thaliana
gcaagtcgaccttggct

SEQ ID NO: 101506 - DNA, 17 bp, Arabidopsis thaliana
gcaagtctggtgccagc

SEQ ID NO: 101507 - DNA, 17 bp, Arabidopsis thaliana
gcaagtgaatgacaaag

SEQ ID NO: 101508 - DNA, 17 bp, Arabidopsis thaliana
gcaagtgaccttggctc

SEQ ID NO: 101509 - DNA, 17 bp, Arabidopsis thaliana
gcaagtgctctgagttt

SEQ ID NO: 101510 - DNA, 17 bp, Arabidopsis thaliana
gcaagtggagcgatggt

SEQ ID NO: 101511 - DNA, 17 bp, Arabidopsis thaliana
gcaagttaatggcgttg

SEQ ID NO: 101512 - DNA, 17 bp, Arabidopsis thaliana
gcaagttgaacttggct

SEQ ID NO: 101513 - DNA, 17 bp, Arabidopsis thaliana
gcaagttgaccctggct

SEQ ID NO: 101514 - DNA, 17 bp, Arabidopsis thaliana
gcaagttgaccttagct

SEQ ID NO: 101515 - DNA, 17 bp, Arabidopsis thaliana
gcaagttgaccttgact

SEQ ID NO: 101516 - DNA, 17 bp, Arabidopsis thaliana
gcaagttgaccttgctc

SEQ ID NO: 101517 - DNA, 17 bp, Arabidopsis thaliana
gcaagttgaccttggat

SEQ ID NO: 101518 - DNA, 17 bp, Arabidopsis thaliana
gcaagttgaccttggct

SEQ ID NO: 101519 - DNA, 17 bp, Arabidopsis thaliana
gcaagttgaccttggtt

SEQ ID NO: 101520 - DNA, 17 bp, Arabidopsis thaliana
gcaagttgaccttgtct

SEQ ID NO: 101521 - DNA, 17 bp, Arabidopsis thaliana
gcaagttgacctttgct

SEQ ID NO: 101522 - DNA, 17 bp, Arabidopsis thaliana
gcaagttgacttacttt

SEQ ID NO: 101523 - DNA, 17 bp, Arabidopsis thaliana
gcaagttgactttgctc

SEQ ID NO: 101524 - DNA, 17 bp, Arabidopsis thaliana
gcaagttgactttggct

SEQ ID NO: 101525 - DNA, 17 bp, Arabidopsis thaliana
gcaagttgagcttggct

SEQ ID NO: 101526 - DNA, 17 bp, Arabidopsis thaliana
gcaagttgatcttggct

SEQ ID NO: 101527 - DNA, 17 bp, Arabidopsis thaliana
gcaagttgatttggctc

SEQ ID NO: 101528 - DNA, 17 bp, Arabidopsis thaliana
gcaagttgattttggct

SEQ ID NO: 101529 - DNA, 17 bp, Arabidopsis thaliana
gcaagttgccctcggct

SEQ ID NO: 101530 - DNA, 17 bp, Arabidopsis thaliana
gcaagttggccttggct

SEQ ID NO: 101531 - DNA, 17 bp, Arabidopsis thaliana
gcaagttgtccttcggc

SEQ ID NO: 101532 - DNA, 17 bp, Arabidopsis thaliana
gcaagttgtccttggct

SEQ ID NO: 101533 - DNA, 17 bp, Arabidopsis thaliana
gcaagttgtccttgggt

SEQ ID NO: 101534 - DNA, 17 bp, Arabidopsis thaliana
gcaagtttaggtttggc

SEQ ID NO: 101535 - DNA, 17 bp, Arabidopsis thaliana
gcaagtttgttcaccgg

SEQ ID NO: 101536 - DNA, 17 bp, Arabidopsis thaliana
gcaagttttgcattcaa

SEQ ID NO: 101537 - DNA, 17 bp, Arabidopsis thaliana
gcaataaactctcctcc

SEQ ID NO: 101538 - DNA, 17 bp, Arabidopsis thaliana
gcaataacaggtctgtg

SEQ ID NO: 101539 - DNA, 17 bp, Arabidopsis thaliana
gcaataagaatggttgg

SEQ ID NO: 101540 - DNA, 17 bp, Arabidopsis thaliana
gcaataagacagttact

SEQ ID NO: 101541 - DNA, 17 bp, Arabidopsis thaliana
gcaatacgattgtagtg

SEQ ID NO: 101542 - DNA, 17 bp, Arabidopsis thaliana
gcaatacggtcgagcgt

SEQ ID NO: 101543 - DNA, 17 bp, Arabidopsis thaliana
gcaatagacccggggct

SEQ ID NO: 101544 - DNA, 17 bp, Arabidopsis thaliana
gcaatagacccgggtac

SEQ ID NO: 101545 - DNA, 17 bp, Arabidopsis thaliana
gcaatagacccgggttc

SEQ ID NO: 101546 - DNA, 17 bp, Arabidopsis thaliana
gcaataggtggagaggc

SEQ ID NO: 101547 - DNA, 17 bp, Arabidopsis thaliana
gcaatagtgcggatgat

SEQ ID NO: 101548 - DNA, 17 bp, Arabidopsis thaliana
gcaatagttgcttcgag

SEQ ID NO: 101549 - DNA, 17 bp, Arabidopsis thaliana
gcaatagttgcttcgat

SEQ ID NO: 101550 - DNA, 17 bp, Arabidopsis thaliana
gcaatatgccaatatca

SEQ ID NO: 101551 - DNA, 17 bp, Arabidopsis thaliana
gcaatatgttgtagttc

SEQ ID NO: 101552 - DNA, 17 bp, Arabidopsis thaliana
gcaatcaaacataggcc

SEQ ID NO: 101553 - DNA, 17 bp, Arabidopsis thaliana
gcaatcaactctgtacg

SEQ ID NO: 101554 - DNA, 17 bp, Arabidopsis thaliana
gcaatcaactctgtgcg

SEQ ID NO: 101555 - DNA, 17 bp, Arabidopsis thaliana
gcaatcacgcaaatttc

SEQ ID NO: 101556 - DNA, 17 bp, Arabidopsis thaliana
gcaatcagatacgcagc

SEQ ID NO: 101557 - DNA, 17 bp, Arabidopsis thaliana
gcaatcattcagtttgc

SEQ ID NO: 101558 - DNA, 17 bp, Arabidopsis thaliana
gcaatccactctttggg

SEQ ID NO: 101559 - DNA, 17 bp, Arabidopsis thaliana
gcaatccggtccgccga

SEQ ID NO: 101560 - DNA, 17 bp, Arabidopsis thaliana
gcaatcctgtagatgga

SEQ ID NO: 101561 - DNA, 17 bp, Arabidopsis thaliana
gcaatcgctaatgacca

SEQ ID NO: 101562 - DNA, 17 bp, Arabidopsis thaliana
gcaatcggatcttaaag

SEQ ID NO: 101563 - DNA, 17 bp, Arabidopsis thaliana
gcaatcgtaaccgaacc

SEQ ID NO: 101564 - DNA, 17 bp, Arabidopsis thaliana
gcaatctacggttacgc

SEQ ID NO: 101565 - DNA, 17 bp, Arabidopsis thaliana
gcaatctgaatatccac

SEQ ID NO: 101566 - DNA, 17 bp, Arabidopsis thaliana
gcaatctgtcaccatct

SEQ ID NO: 101567 - DNA, 17 bp, Arabidopsis thaliana
gcaatctgtggcggccg

SEQ ID NO: 101568 - DNA, 17 bp, Arabidopsis thaliana
gcaatctttttggcttt

SEQ ID NO: 101569 - DNA, 17 bp, Arabidopsis thaliana
gcaatgaaagtggagtg

SEQ ID NO: 101570 - DNA, 17 bp, Arabidopsis thaliana
gcaatgaagttgctcgc

SEQ ID NO: 101571 - DNA, 17 bp, Arabidopsis thaliana
gcaatgaattgtgagcc

SEQ ID NO: 101572 - DNA, 17 bp, Arabidopsis thaliana
gcaatgagtatgcctat

SEQ ID NO: 101573 - DNA, 17 bp, Arabidopsis thaliana
gcaatgattctatgtct

SEQ ID NO: 101574 - DNA, 17 bp, Arabidopsis thaliana
gcaatgattttatgacg

SEQ ID NO: 101575 - DNA, 17 bp, Arabidopsis thaliana
gcaatgcaacatctctg

SEQ ID NO: 101576 - DNA, 17 bp, Arabidopsis thaliana
gcaatgcaatattttgt

SEQ ID NO: 101577 - DNA, 17 bp, Arabidopsis thaliana
gcaatgccgcgtggagg

SEQ ID NO: 101578 - DNA, 17 bp, Arabidopsis thaliana
gcaatgccgcttgtaaa

SEQ ID NO: 101579 - DNA, 17 bp, Arabidopsis thaliana
gcaatgcgtatgactga

SEQ ID NO: 101580 - DNA, 17 bp, Arabidopsis thaliana
gcaatgctagtttgttg

SEQ ID NO: 101581 - DNA, 17 bp, Arabidopsis thaliana
gcaatggagtttgcacg

SEQ ID NO: 101582 - DNA, 17 bp, Arabidopsis thaliana
gcaatggccatctgcaa

SEQ ID NO: 101583 - DNA, 17 bp, Arabidopsis thaliana
gcaatgggcgaaagcat

SEQ ID NO: 101584 - DNA, 17 bp, Arabidopsis thaliana
gcaatgggcgaaagcct

SEQ ID NO: 101585 - DNA, 17 bp, Arabidopsis thaliana
gcaatggtttgttgtct

SEQ ID NO: 101586 - DNA, 17 bp, Arabidopsis thaliana
gcaatgtatctcgggtt

SEQ ID NO: 101587 - DNA, 17 bp, Arabidopsis thaliana
gcaatgtcaatccattc

SEQ ID NO: 101588 - DNA, 17 bp, Arabidopsis thaliana
gcaatgtcagataatcc

SEQ ID NO: 101589 - DNA, 17 bp, Arabidopsis thaliana
gcaatgtctaatgggtt

SEQ ID NO: 101590 - DNA, 17 bp, Arabidopsis thaliana
gcaatgtgacttctgcc

SEQ ID NO: 101591 - DNA, 17 bp, Arabidopsis thaliana
gcaatgtgattctgccc

SEQ ID NO: 101592 - DNA, 17 bp, Arabidopsis thaliana
gcaatgtgattgcccag

SEQ ID NO: 101593 - DNA, 17 bp, Arabidopsis thaliana
gcaatgtgatttctgcc

SEQ ID NO: 101594 - DNA, 17 bp, Arabidopsis thaliana
gcaatgtgggagtgttt

SEQ ID NO: 101595 - DNA, 17 bp, Arabidopsis thaliana
gcaatgtgtgactcaac

SEQ ID NO: 101596 - DNA, 17 bp, Arabidopsis thaliana
gcaatgttgtctggcac

SEQ ID NO: 101597 - DNA, 17 bp, Arabidopsis thaliana
gcaattaaacttcacgt

SEQ ID NO: 101598 - DNA, 17 bp, Arabidopsis thaliana
gcaattaagatgatgat

SEQ ID NO: 101599 - DNA, 17 bp, Arabidopsis thaliana
gcaattatagccgttcg

SEQ ID NO: 101600 - DNA, 17 bp, Arabidopsis thaliana
gcaattatccgcttcag

SEQ ID NO: 101601 - DNA, 17 bp, Arabidopsis thaliana
gcaattcacagtagttt

SEQ ID NO: 101602 - DNA, 17 bp, Arabidopsis thaliana
gcaattcacagtctgta

SEQ ID NO: 101603 - DNA, 17 bp, Arabidopsis thaliana
gcaattcaggaaggttt

SEQ ID NO: 101604 - DNA, 17 bp, Arabidopsis thaliana
gcaattcgaccggtgaa

SEQ ID NO: 101605 - DNA, 17 bp, Arabidopsis thaliana
gcaattcgggatgtggt

SEQ ID NO: 101606 - DNA, 17 bp, Arabidopsis thaliana
gcaattcttctgatgat

SEQ ID NO: 101607 - DNA, 17 bp, Arabidopsis thaliana
gcaattctttcttgtta

SEQ ID NO: 101608 - DNA, 17 bp, Arabidopsis thaliana
gcaattgaatgatccgg

SEQ ID NO: 101609 - DNA, 17 bp, Arabidopsis thaliana
gcaattgactgcagatc

SEQ ID NO: 101610 - DNA, 17 bp, Arabidopsis thaliana
gcaattgtcagggatga

SEQ ID NO: 101611 - DNA, 17 bp, Arabidopsis thaliana
gcaattgtcttttgggt

SEQ ID NO: 101612 - DNA, 17 bp, Arabidopsis thaliana
gcaatttaagtgtgtgc

SEQ ID NO: 101613 - DNA, 17 bp, Arabidopsis thaliana
gcaatttcatcgactgg

SEQ ID NO: 101614 - DNA, 17 bp, Arabidopsis thaliana
gcaatttgaccttggct

SEQ ID NO: 101615 - DNA, 17 bp, Arabidopsis thaliana
gcaatttgatttctgcc

SEQ ID NO: 101616 - DNA, 17 bp, Arabidopsis thaliana
gcaatttgggaggaagt

SEQ ID NO: 101617 - DNA, 17 bp, Arabidopsis thaliana
gcaatttgtagatctgc

SEQ ID NO: 101618 - DNA, 17 bp, Arabidopsis thaliana
gcaattttcgggaccgg

SEQ ID NO: 101619 - DNA, 17 bp, Arabidopsis thaliana
gcaattttgatcgtctt

SEQ ID NO: 101620 - DNA, 17 bp, Arabidopsis thaliana
gcaattttttgatgtgt

SEQ ID NO: 101621 - DNA, 17 bp, Arabidopsis thaliana
gcacaaacccgccaacc

SEQ ID NO: 101622 - DNA, 17 bp, Arabidopsis thaliana
gcacaaacctgatgtat

SEQ ID NO: 101623 - DNA, 17 bp, Arabidopsis thaliana
gcacaaactttaatgtg

SEQ ID NO: 101624 - DNA, 17 bp, Arabidopsis thaliana
gcacaaagctttgatgg

SEQ ID NO: 101625 - DNA, 17 bp, Arabidopsis thaliana
gcacaaagtttcgttga

SEQ ID NO: 101626 - DNA, 17 bp, Arabidopsis thaliana
gcacaaatcacgaaaat

SEQ ID NO: 101627 - DNA, 17 bp, Arabidopsis thaliana
gcacaaatcttgagcca

SEQ ID NO: 101628 - DNA, 17 bp, Arabidopsis thaliana
gcacaaattgcgctgta

SEQ ID NO: 101629 - DNA, 17 bp, Arabidopsis thaliana
gcacaacaggcgagtca

SEQ ID NO: 101630 - DNA, 17 bp, Arabidopsis thaliana
gcacaaccgcaagacac

SEQ ID NO: 101631 - DNA, 17 bp, Arabidopsis thaliana
gcacaactacggataat

SEQ ID NO: 101632 - DNA, 17 bp, Arabidopsis thaliana
gcacaactacggctaat

SEQ ID NO: 101633 - DNA, 17 bp, Arabidopsis thaliana
gcacaactatggctaat

SEQ ID NO: 101634 - DNA, 17 bp, Arabidopsis thaliana
gcacaactatggttaat

SEQ ID NO: 101635 - DNA, 17 bp, Arabidopsis thaliana
gcacaagaactaggtgg

SEQ ID NO: 101636 - DNA, 17 bp, Arabidopsis thaliana
gcacaagaggatacatt

SEQ ID NO: 101637 - DNA, 17 bp, Arabidopsis thaliana
gcacaagccgaaggatt

SEQ ID NO: 101638 - DNA, 17 bp, Arabidopsis thaliana
gcacaaggatttgttat

SEQ ID NO: 101639 - DNA, 17 bp, Arabidopsis thaliana
gcacaaggctaacttcg

SEQ ID NO: 101640 - DNA, 17 bp, Arabidopsis thaliana
gcacaaggctttgcgtt

SEQ ID NO: 101641 - DNA, 17 bp, Arabidopsis thaliana
gcacaagtccacttggc

SEQ ID NO: 101642 - DNA, 17 bp, Arabidopsis thaliana
gcacaagtgtttcaact

SEQ ID NO: 101643 - DNA, 17 bp, Arabidopsis thaliana
gcacacagtagccattg

SEQ ID NO: 101644 - DNA, 17 bp, Arabidopsis thaliana
gcacaccaaaggcggac

SEQ ID NO: 101645 - DNA, 17 bp, Arabidopsis thaliana
gcacaccacagccgtca

SEQ ID NO: 101646 - DNA, 17 bp, Arabidopsis thaliana
gcacacccggtgggaca

SEQ ID NO: 101647 - DNA, 17 bp, Arabidopsis thaliana
gcacacgattggtcagc

SEQ ID NO: 101648 - DNA, 17 bp, Arabidopsis thaliana
gcacacgatttattgtc

SEQ ID NO: 101649 - DNA, 17 bp, Arabidopsis thaliana
gcacacgtctgcctggg

SEQ ID NO: 101650 - DNA, 17 bp, Arabidopsis thaliana
gcacacgtgtttttttt

SEQ ID NO: 101651 - DNA, 17 bp, Arabidopsis thaliana
gcacactgatgctcaca

SEQ ID NO: 101652 - DNA, 17 bp, Arabidopsis thaliana
gcacactgatgctgaca

SEQ ID NO: 101653 - DNA, 17 bp, Arabidopsis thaliana
gcacactgccgctacca

SEQ ID NO: 101654 - DNA, 17 bp, Arabidopsis thaliana
gcacactgcctgggtgt

SEQ ID NO: 101655 - DNA, 17 bp, Arabidopsis thaliana
gcacactgctctatctg

SEQ ID NO: 101656 - DNA, 17 bp, Arabidopsis thaliana
gcacactgtcgcgacca

SEQ ID NO: 101657 - DNA, 17 bp, Arabidopsis thaliana
gcacacttaactgtgga

SEQ ID NO: 101658 - DNA, 17 bp, Arabidopsis thaliana
gcacacttacaccatcc

SEQ ID NO: 101659 - DNA, 17 bp, Arabidopsis thaliana
gcacacttgcttccatc

SEQ ID NO: 101660 - DNA, 17 bp, Arabidopsis thaliana
gcacagaagatcagtga

SEQ ID NO: 101661 - DNA, 17 bp, Arabidopsis thaliana
gcacagaccgctcacgg

SEQ ID NO: 101662 - DNA, 17 bp, Arabidopsis thaliana
gcacagagttgattgcg

SEQ ID NO: 101663 - DNA, 17 bp, Arabidopsis thaliana
gcacagatccatcttct

SEQ ID NO: 101664 - DNA, 17 bp, Arabidopsis thaliana
gcacagatgatgtggcg

SEQ ID NO: 101665 - DNA, 17 bp, Arabidopsis thaliana
gcacagattgcgccgta

SEQ ID NO: 101666 - DNA, 17 bp, Arabidopsis thaliana
gcacagattgcggtgta

SEQ ID NO: 101667 - DNA, 17 bp, Arabidopsis thaliana
gcacagccctttgtcgc

SEQ ID NO: 101668 - DNA, 17 bp, Arabidopsis thaliana
gcacagcggatgttgct

SEQ ID NO: 101669 - DNA, 17 bp, Arabidopsis thaliana
gcacaggcttggctcaa

SEQ ID NO: 101670 - DNA, 17 bp, Arabidopsis thaliana
gcacaggcttggctcat

SEQ ID NO: 101671 - DNA, 17 bp, Arabidopsis thaliana
gcacagggataactggc

SEQ ID NO: 101672 - DNA, 17 bp, Arabidopsis thaliana
gcacaggtggaggcgga

SEQ ID NO: 101673 - DNA, 17 bp, Arabidopsis thaliana
gcacaggttcaccagag

SEQ ID NO: 101674 - DNA, 17 bp, Arabidopsis thaliana
gcacaggttggctgact

SEQ ID NO: 101675 - DNA, 17 bp, Arabidopsis thaliana
gcacaggttggctgatt

SEQ ID NO: 101676 - DNA, 17 bp, Arabidopsis thaliana
gcacagtctgttgccaa

SEQ ID NO: 101677 - DNA, 17 bp, Arabidopsis thaliana
gcacagtctgttgccca

SEQ ID NO: 101678 - DNA, 17 bp, Arabidopsis thaliana
gcacagttccgacaatt

SEQ ID NO: 101679 - DNA, 17 bp, Arabidopsis thaliana
gcacataagatgtttaa

SEQ ID NO: 101680 - DNA, 17 bp, Arabidopsis thaliana
gcacataccagggggta

SEQ ID NO: 101681 - DNA, 17 bp, Arabidopsis thaliana
gcacatagggaacccaa

SEQ ID NO: 101682 - DNA, 17 bp, Arabidopsis thaliana
gcacatatggtaaacga

SEQ ID NO: 101683 - DNA, 17 bp, Arabidopsis thaliana
gcacatatgtgtgcttt

SEQ ID NO: 101684 - DNA, 17 bp, Arabidopsis thaliana
gcacatcagttcctgaa

SEQ ID NO: 101685 - DNA, 17 bp, Arabidopsis thaliana
gcacatctgcctcggtg

SEQ ID NO: 101686 - DNA, 17 bp, Arabidopsis thaliana
gcacatctgcctgggtg

SEQ ID NO: 101687 - DNA, 17 bp, Arabidopsis thaliana
gcacatcttttgcctct

SEQ ID NO: 101688 - DNA, 17 bp, Arabidopsis thaliana
gcacatgatttgaaaat

SEQ ID NO: 101689 - DNA, 17 bp, Arabidopsis thaliana
gcacatgggttactcga

SEQ ID NO: 101690 - DNA, 17 bp, Arabidopsis thaliana
gcacatgggttagtcga

SEQ ID NO: 101691 - DNA, 17 bp, Arabidopsis thaliana
gcacatggtttagtcga

SEQ ID NO: 101692 - DNA, 17 bp, Arabidopsis thaliana
gcacattacttatgcgg

SEQ ID NO: 101693 - DNA, 17 bp, Arabidopsis thaliana
gcacatttgccacagcg

SEQ ID NO: 101694 - DNA, 17 bp, Arabidopsis thaliana
gcacattttcgtgattt

SEQ ID NO: 101695 - DNA, 17 bp, Arabidopsis thaliana
gcaccaaactatgacca

SEQ ID NO: 101696 - DNA, 17 bp, Arabidopsis thaliana
gcaccaaagtacttcag

SEQ ID NO: 101697 - DNA, 17 bp, Arabidopsis thaliana
gcaccaaataccgttgg

SEQ ID NO: 101698 - DNA, 17 bp, Arabidopsis thaliana
gcaccaacagaatccat

SEQ ID NO: 101699 - DNA, 17 bp, Arabidopsis thaliana
gcaccaaccgagttttc

SEQ ID NO: 101700 - DNA, 17 bp, Arabidopsis thaliana
gcaccaaccttctaccg

SEQ ID NO: 101701 - DNA, 17 bp, Arabidopsis thaliana
gcaccaacttcacctca

SEQ ID NO: 101702 - DNA, 17 bp, Arabidopsis thaliana
gcaccaaggatgacttg

SEQ ID NO: 101703 - DNA, 17 bp, Arabidopsis thaliana
gcaccaccaagagtgaa

SEQ ID NO: 101704 - DNA, 17 bp, Arabidopsis thaliana
gcaccaccaagagtgga

SEQ ID NO: 101705 - DNA, 17 bp, Arabidopsis thaliana
gcaccaccacattgtct

SEQ ID NO: 101706 - DNA, 17 bp, Arabidopsis thaliana
gcaccaccaggagtgaa

SEQ ID NO: 101707 - DNA, 17 bp, Arabidopsis thaliana
gcaccaccaggagtgga

SEQ ID NO: 101708 - DNA, 17 bp, Arabidopsis thaliana
gcaccaccaggattgga

SEQ ID NO: 101709 - DNA, 17 bp, Arabidopsis thaliana
gcaccacgaggcgctgt

SEQ ID NO: 101710 - DNA, 17 bp, Arabidopsis thaliana
gcaccacttctgcagct

SEQ ID NO: 101711 - DNA, 17 bp, Arabidopsis thaliana
gcaccacttctgcagtt

SEQ ID NO: 101712 - DNA, 17 bp, Arabidopsis thaliana
gcaccagactgtttcct

SEQ ID NO: 101713 - DNA, 17 bp, Arabidopsis thaliana
gcaccagcttagcggtg

SEQ ID NO: 101714 - DNA, 17 bp, Arabidopsis thaliana
gcaccaggagtggagcc

SEQ ID NO: 101715 - DNA, 17 bp, Arabidopsis thaliana
gcaccagtggtctagcg

SEQ ID NO: 101716 - DNA, 17 bp, Arabidopsis thaliana
gcaccagtggtctagga

SEQ ID NO: 101717 - DNA, 17 bp, Arabidopsis thaliana
gcaccagtggtctagtg

SEQ ID NO: 101718 - DNA, 17 bp, Arabidopsis thaliana
gcaccagtttgttgtcc

SEQ ID NO: 101719 - DNA, 17 bp, Arabidopsis thaliana
gcaccatataatcccgt

SEQ ID NO: 101720 - DNA, 17 bp, Arabidopsis thaliana
gcaccatcaggagtgaa

SEQ ID NO: 101721 - DNA, 17 bp, Arabidopsis thaliana
gcaccatcaggagtgga

SEQ ID NO: 101722 - DNA, 17 bp, Arabidopsis thaliana
gcaccatcttcctttgc

SEQ ID NO: 101723 - DNA, 17 bp, Arabidopsis thaliana
gcaccatgactttcact

SEQ ID NO: 101724 - DNA, 17 bp, Arabidopsis thaliana
gcaccatggacacgtgg

SEQ ID NO: 101725 - DNA, 17 bp, Arabidopsis thaliana
gcaccattagggagttc

SEQ ID NO: 101726 - DNA, 17 bp, Arabidopsis thaliana
gcacccaaggtggcgaa

SEQ ID NO: 101727 - DNA, 17 bp, Arabidopsis thaliana
gcacccagagacgagga

SEQ ID NO: 101728 - DNA, 17 bp, Arabidopsis thaliana
gcacccatagcctaatg

SEQ ID NO: 101729 - DNA, 17 bp, Arabidopsis thaliana
gcacccatcgcctaatg

SEQ ID NO: 101730 - DNA, 17 bp, Arabidopsis thaliana
gcacccatggcctaata

SEQ ID NO: 101731 - DNA, 17 bp, Arabidopsis thaliana
gcacccatggcctaatg

SEQ ID NO: 101732 - DNA, 17 bp, Arabidopsis thaliana
gcacccattgcctaatg

SEQ ID NO: 101733 - DNA, 17 bp, Arabidopsis thaliana
gcaccccaggtcaggcg

SEQ ID NO: 101734 - DNA, 17 bp, Arabidopsis thaliana
gcaccccgtaattcctc

SEQ ID NO: 101735 - DNA, 17 bp, Arabidopsis thaliana
gcacccgcgagggatcc

SEQ ID NO: 101736 - DNA, 17 bp, Arabidopsis thaliana
gcacccgctgcgtttaa

SEQ ID NO: 101737 - DNA, 17 bp, Arabidopsis thaliana
gcacccgctggtttacc

SEQ ID NO: 101738 - DNA, 17 bp, Arabidopsis thaliana
gcacccgtagcctaatg

SEQ ID NO: 101739 - DNA, 17 bp, Arabidopsis thaliana
gcacccgtcgcctaatg

SEQ ID NO: 101740 - DNA, 17 bp, Arabidopsis thaliana
gcacccgtggcctaacg

SEQ ID NO: 101741 - DNA, 17 bp, Arabidopsis thaliana
gcacccgtggcctaatg

SEQ ID NO: 101742 - DNA, 17 bp, Arabidopsis thaliana
gcacccgtggcctaatt

SEQ ID NO: 101743 - DNA, 17 bp, Arabidopsis thaliana
gcacccgttgcctaacg

SEQ ID NO: 101744 - DNA, 17 bp, Arabidopsis thaliana
gcacccgttgcctaatg

SEQ ID NO: 101745 - DNA, 17 bp, Arabidopsis thaliana
gcacccgttgttagttt

SEQ ID NO: 101746 - DNA, 17 bp, Arabidopsis thaliana
gcacccgtttggtaagc

SEQ ID NO: 101747 - DNA, 17 bp, Arabidopsis thaliana
gcaccctagatggcgag

SEQ ID NO: 101748 - DNA, 17 bp, Arabidopsis thaliana
gcaccctcggccgcacg

SEQ ID NO: 101749 - DNA, 17 bp, Arabidopsis thaliana
gcaccctctgtcaggac

SEQ ID NO: 101750 - DNA, 17 bp, Arabidopsis thaliana
gcaccctcttggcacca

SEQ ID NO: 101751 - DNA, 17 bp, Arabidopsis thaliana
gcaccctgtagatggat

SEQ ID NO: 101752 - DNA, 17 bp, Arabidopsis thaliana
gcaccctttgtcgctaa

SEQ ID NO: 101753 - DNA, 17 bp, Arabidopsis thaliana
gcaccgactgtcggaca

SEQ ID NO: 101754 - DNA, 17 bp, Arabidopsis thaliana
gcaccgatcactcctgg

SEQ ID NO: 101755 - DNA, 17 bp, Arabidopsis thaliana
gcaccgcaacagtgttg

SEQ ID NO: 101756 - DNA, 17 bp, Arabidopsis thaliana
gcaccgcacttctcccg

SEQ ID NO: 101757 - DNA, 17 bp, Arabidopsis thaliana
gcaccgcacttctttcg

SEQ ID NO: 101758 - DNA, 17 bp, Arabidopsis thaliana
gcaccgcactttatccg

SEQ ID NO: 101759 - DNA, 17 bp, Arabidopsis thaliana
gcaccgcaggagttact

SEQ ID NO: 101760 - DNA, 17 bp, Arabidopsis thaliana
gcaccgccgaccgacct

SEQ ID NO: 101761 - DNA, 17 bp, Arabidopsis thaliana
gcaccgcttgatccgct

SEQ ID NO: 101762 - DNA, 17 bp, Arabidopsis thaliana
gcaccggacaccacgcg

SEQ ID NO: 101763 - DNA, 17 bp, Arabidopsis thaliana
gcaccggctctcatgct

SEQ ID NO: 101764 - DNA, 17 bp, Arabidopsis thaliana
gcaccggctctcatgtt

SEQ ID NO: 101765 - DNA, 17 bp, Arabidopsis thaliana
gcaccggcttgcaatgt

SEQ ID NO: 101766 - DNA, 17 bp, Arabidopsis thaliana
gcaccgtactctattca

SEQ ID NO: 101767 - DNA, 17 bp, Arabidopsis thaliana
gcaccgtgcttggtcca

SEQ ID NO: 101768 - DNA, 17 bp, Arabidopsis thaliana
gcacctaaaaccgcaat

SEQ ID NO: 101769 - DNA, 17 bp, Arabidopsis thaliana
gcacctaaaaccgcact

SEQ ID NO: 101770 - DNA, 17 bp, Arabidopsis thaliana
gcacctactcgaccact

SEQ ID NO: 101771 - DNA, 17 bp, Arabidopsis thaliana
gcacctagatatccgag

SEQ ID NO: 101772 - DNA, 17 bp, Arabidopsis thaliana
gcacctagcgacagttt

SEQ ID NO: 101773 - DNA, 17 bp, Arabidopsis thaliana
gcacctattcgaaatca

SEQ ID NO: 101774 - DNA, 17 bp, Arabidopsis thaliana
gcacctcccaagagccg

SEQ ID NO: 101775 - DNA, 17 bp, Arabidopsis thaliana
gcacctcgatgtcggct

SEQ ID NO: 101776 - DNA, 17 bp, Arabidopsis thaliana
gcacctcgtttacacgt

SEQ ID NO: 101777 - DNA, 17 bp, Arabidopsis thaliana
gcacctctccattggca

SEQ ID NO: 101778 - DNA, 17 bp, Arabidopsis thaliana
gcacctctgcctgggtg

SEQ ID NO: 101779 - DNA, 17 bp, Arabidopsis thaliana
gcacctgcagtagtcgt

SEQ ID NO: 101780 - DNA, 17 bp, Arabidopsis thaliana
gcacctgcctgggtgtc

SEQ ID NO: 101781 - DNA, 17 bp, Arabidopsis thaliana
gcacctggcctaatgga

SEQ ID NO: 101782 - DNA, 17 bp, Arabidopsis thaliana
gcacctgggaatgatag

SEQ ID NO: 101783 - DNA, 17 bp, Arabidopsis thaliana
gcacctgggatcagcgg

SEQ ID NO: 101784 - DNA, 17 bp, Arabidopsis thaliana
gcacctgtaccaaagct

SEQ ID NO: 101785 - DNA, 17 bp, Arabidopsis thaliana
gcacctgtagatggatc

SEQ ID NO: 101786 - DNA, 17 bp, Arabidopsis thaliana
gcacctgtagatgggtc

SEQ ID NO: 101787 - DNA, 17 bp, Arabidopsis thaliana
gcacctgttcgtttgcc

SEQ ID NO: 101788 - DNA, 17 bp, Arabidopsis thaliana
gcaccttatgtgacgcg

SEQ ID NO: 101789 - DNA, 17 bp, Arabidopsis thaliana
gcaccttcgtgagcgtc

SEQ ID NO: 101790 - DNA, 17 bp, Arabidopsis thaliana
gcaccttcttcggcgtc

SEQ ID NO: 101791 - DNA, 17 bp, Arabidopsis thaliana
gcaccttgaccttggct

SEQ ID NO: 101792 - DNA, 17 bp, Arabidopsis thaliana
gcaccttgtcgctctgt

SEQ ID NO: 101793 - DNA, 17 bp, Arabidopsis thaliana
gcacctttgcgagcgtt

SEQ ID NO: 101794 - DNA, 17 bp, Arabidopsis thaliana
gcacctttgtcgctaag

SEQ ID NO: 101795 - DNA, 17 bp, Arabidopsis thaliana
gcacgaaacagagatga

SEQ ID NO: 101796 - DNA, 17 bp, Arabidopsis thaliana
gcacgaaaggcgtaacg

SEQ ID NO: 101797 - DNA, 17 bp, Arabidopsis thaliana
gcacgaatactgaccta

SEQ ID NO: 101798 - DNA, 17 bp, Arabidopsis thaliana
gcacgaatgatcagcat

SEQ ID NO: 101799 - DNA, 17 bp, Arabidopsis thaliana
gcacgaccaccctggcc

SEQ ID NO: 101800 - DNA, 17 bp, Arabidopsis thaliana
gcacgaccaccctgtcc

SEQ ID NO: 101801 - DNA, 17 bp, Arabidopsis thaliana
gcacgacgcggattacg

SEQ ID NO: 101802 - DNA, 17 bp, Arabidopsis thaliana
gcacgacggatcgaatg

SEQ ID NO: 101803 - DNA, 17 bp, Arabidopsis thaliana
gcacgactgctattccc

SEQ ID NO: 101804 - DNA, 17 bp, Arabidopsis thaliana
gcacgagacccctaagg

SEQ ID NO: 101805 - DNA, 17 bp, Arabidopsis thaliana
gcacgagatttggatgg

SEQ ID NO: 101806 - DNA, 17 bp, Arabidopsis thaliana
gcacgagggcacgtctg

SEQ ID NO: 101807 - DNA, 17 bp, Arabidopsis thaliana
gcacgatcctatgagcg

SEQ ID NO: 101808 - DNA, 17 bp, Arabidopsis thaliana
gcacgatcctgcgtgtg

SEQ ID NO: 101809 - DNA, 17 bp, Arabidopsis thaliana
gcacgattcaatcttgg

SEQ ID NO: 101810 - DNA, 17 bp, Arabidopsis thaliana
gcacgatttctctgtcg

SEQ ID NO: 101811 - DNA, 17 bp, Arabidopsis thaliana
gcacgcaaacgcaagtc

SEQ ID NO: 101812 - DNA, 17 bp, Arabidopsis thaliana
gcacgcaaactctcatg

SEQ ID NO: 101813 - DNA, 17 bp, Arabidopsis thaliana
gcacgcaaagtttcggt

SEQ ID NO: 101814 - DNA, 17 bp, Arabidopsis thaliana
gcacgcaacgacgaaag

SEQ ID NO: 101815 - DNA, 17 bp, Arabidopsis thaliana
gcacgcaacggatcatt

SEQ ID NO: 101816 - DNA, 17 bp, Arabidopsis thaliana
gcacgcaagaaagagca

SEQ ID NO: 101817 - DNA, 17 bp, Arabidopsis thaliana
gcacgcaagtctggtgc

SEQ ID NO: 101818 - DNA, 17 bp, Arabidopsis thaliana
gcacgcaagttgacctt

SEQ ID NO: 101819 - DNA, 17 bp, Arabidopsis thaliana
gcacgcaagttgacttt

SEQ ID NO: 101820 - DNA, 17 bp, Arabidopsis thaliana
gcacgcaagttgtcctt

SEQ ID NO: 101821 - DNA, 17 bp, Arabidopsis thaliana
gcacgcaatgccgcttg

SEQ ID NO: 101822 - DNA, 17 bp, Arabidopsis thaliana
gcacgcacaaggctttg

SEQ ID NO: 101823 - DNA, 17 bp, Arabidopsis thaliana
gcacgcaccaccaggag

SEQ ID NO: 101824 - DNA, 17 bp, Arabidopsis thaliana
gcacgcaccagtttgtt

SEQ ID NO: 101825 - DNA, 17 bp, Arabidopsis thaliana
gcacgcaccatcaggag

SEQ ID NO: 101826 - DNA, 17 bp, Arabidopsis thaliana
gcacgcacccgtggcct

SEQ ID NO: 101827 - DNA, 17 bp, Arabidopsis thaliana
gcacgcacccgttgcct

SEQ ID NO: 101828 - DNA, 17 bp, Arabidopsis thaliana
gcacgcaccctctgtca

SEQ ID NO: 101829 - DNA, 17 bp, Arabidopsis thaliana
gcacgcacctttgcgag

SEQ ID NO: 101830 - DNA, 17 bp, Arabidopsis thaliana
gcacgcacgcacctcga

SEQ ID NO: 101831 - DNA, 17 bp, Arabidopsis thaliana
gcacgcacgcagttttg

SEQ ID NO: 101832 - DNA, 17 bp, Arabidopsis thaliana
gcacgcacgcctgcctg

SEQ ID NO: 101833 - DNA, 17 bp, Arabidopsis thaliana
gcacgcacggctgagtc

SEQ ID NO: 101834 - DNA, 17 bp, Arabidopsis thaliana
gcacgcacggggttcgt

SEQ ID NO: 101835 - DNA, 17 bp, Arabidopsis thaliana
gcacgcacgtccgtctg

SEQ ID NO: 101836 - DNA, 17 bp, Arabidopsis thaliana
gcacgcacgtctctggg

SEQ ID NO: 101837 - DNA, 17 bp, Arabidopsis thaliana
gcacgcacgtctcttgg

SEQ ID NO: 101838 - DNA, 17 bp, Arabidopsis thaliana
gcacgcacgtctgcctg

SEQ ID NO: 101839 - DNA, 17 bp, Arabidopsis thaliana
gcacgcacgtgcctggg

SEQ ID NO: 101840 - DNA, 17 bp, Arabidopsis thaliana
gcacgcactcaattaat

SEQ ID NO: 101841 - DNA, 17 bp, Arabidopsis thaliana
gcacgcactctgctggg

SEQ ID NO: 101842 - DNA, 17 bp, Arabidopsis thaliana
gcacgcacttctgcctg

SEQ ID NO: 101843 - DNA, 17 bp, Arabidopsis thaliana
gcacgcagaccaacggt

SEQ ID NO: 101844 - DNA, 17 bp, Arabidopsis thaliana
gcacgcagacgatcggt

SEQ ID NO: 101845 - DNA, 17 bp, Arabidopsis thaliana
gcacgcagagacttctc

SEQ ID NO: 101846 - DNA, 17 bp, Arabidopsis thaliana
gcacgcagagggactga

SEQ ID NO: 101847 - DNA, 17 bp, Arabidopsis thaliana
gcacgcagagtagcctt

SEQ ID NO: 101848 - DNA, 17 bp, Arabidopsis thaliana
gcacgcagatggtagca

SEQ ID NO: 101849 - DNA, 17 bp, Arabidopsis thaliana
gcacgcagattgatgga

SEQ ID NO: 101850 - DNA, 17 bp, Arabidopsis thaliana
gcacgcagccaagcgtt

SEQ ID NO: 101851 - DNA, 17 bp, Arabidopsis thaliana
gcacgcagccatactct

SEQ ID NO: 101852 - DNA, 17 bp, Arabidopsis thaliana
gcacgcagcgactgtcg

SEQ ID NO: 101853 - DNA, 17 bp, Arabidopsis thaliana
gcacgcagcgatactga

SEQ ID NO: 101854 - DNA, 17 bp, Arabidopsis thaliana
gcacgcagctatggcag

SEQ ID NO: 101855 - DNA, 17 bp, Arabidopsis thaliana
gcacgcaggtgacttga

SEQ ID NO: 101856 - DNA, 17 bp, Arabidopsis thaliana
gcacgcaggtttgcccg

SEQ ID NO: 101857 - DNA, 17 bp, Arabidopsis thaliana
gcacgcagtatcctcgc

SEQ ID NO: 101858 - DNA, 17 bp, Arabidopsis thaliana
gcacgcagtgaccaggc

SEQ ID NO: 101859 - DNA, 17 bp, Arabidopsis thaliana
gcacgcagtgattcttt

SEQ ID NO: 101860 - DNA, 17 bp, Arabidopsis thaliana
gcacgcagtggaccatc

SEQ ID NO: 101861 - DNA, 17 bp, Arabidopsis thaliana
gcacgcagttaagcgtg

SEQ ID NO: 101862 - DNA, 17 bp, Arabidopsis thaliana
gcacgcagttttgatcc

SEQ ID NO: 101863 - DNA, 17 bp, Arabidopsis thaliana
gcacgcataggtccatc

SEQ ID NO: 101864 - DNA, 17 bp, Arabidopsis thaliana
gcacgcatattgccaaa

SEQ ID NO: 101865 - DNA, 17 bp, Arabidopsis thaliana
gcacgcatcctgtagat

SEQ ID NO: 101866 - DNA, 17 bp, Arabidopsis thaliana
gcacgcatgcgcccgct

SEQ ID NO: 101867 - DNA, 17 bp, Arabidopsis thaliana
gcacgcatggccgttct

SEQ ID NO: 101868 - DNA, 17 bp, Arabidopsis thaliana
gcacgcattcaactgga

SEQ ID NO: 101869 - DNA, 17 bp, Arabidopsis thaliana
gcacgcattcaggtttg

SEQ ID NO: 101870 - DNA, 17 bp, Arabidopsis thaliana
gcacgcattcttctaca

SEQ ID NO: 101871 - DNA, 17 bp, Arabidopsis thaliana
gcacgcatttgccaagg

SEQ ID NO: 101872 - DNA, 17 bp, Arabidopsis thaliana
gcacgcatttggactgg

SEQ ID NO: 101873 - DNA, 17 bp, Arabidopsis thaliana
gcacgcattttcgtgat

SEQ ID NO: 101874 - DNA, 17 bp, Arabidopsis thaliana
gcacgccattgtagtca

SEQ ID NO: 101875 - DNA, 17 bp, Arabidopsis thaliana
gcacgcccattttgaca

SEQ ID NO: 101876 - DNA, 17 bp, Arabidopsis thaliana
gcacgcctgcctgggtg

SEQ ID NO: 101877 - DNA, 17 bp, Arabidopsis thaliana
gcacgcgcctaacggcg

SEQ ID NO: 101878 - DNA, 17 bp, Arabidopsis thaliana
gcacgctggctatgacg

SEQ ID NO: 101879 - DNA, 17 bp, Arabidopsis thaliana
gcacggaccttgcaagt

SEQ ID NO: 101880 - DNA, 17 bp, Arabidopsis thaliana
gcacggactttgcaagt

SEQ ID NO: 101881 - DNA, 17 bp, Arabidopsis thaliana
gcacggagtgaagcaca

SEQ ID NO: 101882 - DNA, 17 bp, Arabidopsis thaliana
gcacggatccaatacca

SEQ ID NO: 101883 - DNA, 17 bp, Arabidopsis thaliana
gcacggcaatacgattg

SEQ ID NO: 101884 - DNA, 17 bp, Arabidopsis thaliana
gcacggcgacgtgggtg

SEQ ID NO: 101885 - DNA, 17 bp, Arabidopsis thaliana
gcacggcggtctgacag

SEQ ID NO: 101886 - DNA, 17 bp, Arabidopsis thaliana
gcacggctctgcgcata

SEQ ID NO: 101887 - DNA, 17 bp, Arabidopsis thaliana
gcacggctgagtcattg

SEQ ID NO: 101888 - DNA, 17 bp, Arabidopsis thaliana
gcacgggcctggctcaa

SEQ ID NO: 101889 - DNA, 17 bp, Arabidopsis thaliana
gcacgggcctggctcat

SEQ ID NO: 101890 - DNA, 17 bp, Arabidopsis thaliana
gcacgggcttggctcaa

SEQ ID NO: 101891 - DNA, 17 bp, Arabidopsis thaliana
gcacggggctccccccc

SEQ ID NO: 101892 - DNA, 17 bp, Arabidopsis thaliana
gcacggggctcccccgc

SEQ ID NO: 101893 - DNA, 17 bp, Arabidopsis thaliana
gcacgggggttcccccg

SEQ ID NO: 101894 - DNA, 17 bp, Arabidopsis thaliana
gcacggggttcgattcc

SEQ ID NO: 101895 - DNA, 17 bp, Arabidopsis thaliana
gcacggggttcgattcg

SEQ ID NO: 101896 - DNA, 17 bp, Arabidopsis thaliana
gcacggggttcgttccc

SEQ ID NO: 101897 - DNA, 17 bp, Arabidopsis thaliana
gcacggggttcgtttcc

SEQ ID NO: 101898 - DNA, 17 bp, Arabidopsis thaliana
gcacggggtttccccgc

SEQ ID NO: 101899 - DNA, 17 bp, Arabidopsis thaliana
gcacggtagcttcgcgc

SEQ ID NO: 101900 - DNA, 17 bp, Arabidopsis thaliana
gcacggtcctggctcaa

SEQ ID NO: 101901 - DNA, 17 bp, Arabidopsis thaliana
gcacggtcttggctcaa

SEQ ID NO: 101902 - DNA, 17 bp, Arabidopsis thaliana
gcacggttagaactaat

SEQ ID NO: 101903 - DNA, 17 bp, Arabidopsis thaliana
gcacggttctattggca

SEQ ID NO: 101904 - DNA, 17 bp, Arabidopsis thaliana
gcacgtaatgcgggtac

SEQ ID NO: 101905 - DNA, 17 bp, Arabidopsis thaliana
gcacgtatggtaaacaa

SEQ ID NO: 101906 - DNA, 17 bp, Arabidopsis thaliana
gcacgtatggtaaacga

SEQ ID NO: 101907 - DNA, 17 bp, Arabidopsis thaliana
gcacgtccaaacgttga

SEQ ID NO: 101908 - DNA, 17 bp, Arabidopsis thaliana
gcacgtccctgggtgtc

SEQ ID NO: 101909 - DNA, 17 bp, Arabidopsis thaliana
gcacgtccgcctgggtg

SEQ ID NO: 101910 - DNA, 17 bp, Arabidopsis thaliana
gcacgtccgtctgggtg

SEQ ID NO: 101911 - DNA, 17 bp, Arabidopsis thaliana
gcacgtcctgggtgtca

SEQ ID NO: 101912 - DNA, 17 bp, Arabidopsis thaliana
gcacgtcgcctgggtgt

SEQ ID NO: 101913 - DNA, 17 bp, Arabidopsis thaliana
gcacgtcgcgtggtgtc

SEQ ID NO: 101914 - DNA, 17 bp, Arabidopsis thaliana
gcacgtcgtcctgggtg

SEQ ID NO: 101915 - DNA, 17 bp, Arabidopsis thaliana
gcacgtctacctgagtg

SEQ ID NO: 101916 - DNA, 17 bp, Arabidopsis thaliana
gcacgtctacctgggtg

SEQ ID NO: 101917 - DNA, 17 bp, Arabidopsis thaliana
gcacgtctccattcaga

SEQ ID NO: 101918 - DNA, 17 bp, Arabidopsis thaliana
gcacgtctccctcggtg

SEQ ID NO: 101919 - DNA, 17 bp, Arabidopsis thaliana
gcacgtctccctgggtc

SEQ ID NO: 101920 - DNA, 17 bp, Arabidopsis thaliana
gcacgtctccctgggtg

SEQ ID NO: 101921 - DNA, 17 bp, Arabidopsis thaliana
gcacgtctcctgggtgt

SEQ ID NO: 101922 - DNA, 17 bp, Arabidopsis thaliana
gcacgtctctcctgggt

SEQ ID NO: 101923 - DNA, 17 bp, Arabidopsis thaliana
gcacgtctctgggtgtc

SEQ ID NO: 101924 - DNA, 17 bp, Arabidopsis thaliana
gcacgtctcttgggtgt

SEQ ID NO: 101925 - DNA, 17 bp, Arabidopsis thaliana
gcacgtctgccagtttg

SEQ ID NO: 101926 - DNA, 17 bp, Arabidopsis thaliana
gcacgtctgcccagttt

SEQ ID NO: 101927 - DNA, 17 bp, Arabidopsis thaliana
gcacgtctgcccgggtg

SEQ ID NO: 101928 - DNA, 17 bp, Arabidopsis thaliana
gcacgtctgcccggtgt

SEQ ID NO: 101929 - DNA, 17 bp, Arabidopsis thaliana
gcacgtctgcccgtgtc

SEQ ID NO: 101930 - DNA, 17 bp, Arabidopsis thaliana
gcacgtctgccggggtg

SEQ ID NO: 101931 - DNA, 17 bp, Arabidopsis thaliana
gcacgtctgccggtgtc

SEQ ID NO: 101932 - DNA, 17 bp, Arabidopsis thaliana
gcacgtctgcctaggtg

SEQ ID NO: 101933 - DNA, 17 bp, Arabidopsis thaliana
gcacgtctgcctcggtg

SEQ ID NO: 101934 - DNA, 17 bp, Arabidopsis thaliana
gcacgtctgcctgagcg

SEQ ID NO: 101935 - DNA, 17 bp, Arabidopsis thaliana
gcacgtctgcctgagtg

SEQ ID NO: 101936 - DNA, 17 bp, Arabidopsis thaliana
gcacgtctgcctgcgtg

SEQ ID NO: 101937 - DNA, 17 bp, Arabidopsis thaliana
gcacgtctgcctggatg

SEQ ID NO: 101938 - DNA, 17 bp, Arabidopsis thaliana
gcacgtctgcctggctg

SEQ ID NO: 101939 - DNA, 17 bp, Arabidopsis thaliana
gcacgtctgcctgggcg

SEQ ID NO: 101940 - DNA, 17 bp, Arabidopsis thaliana
gcacgtctgcctggggg

SEQ ID NO: 101941 - DNA, 17 bp, Arabidopsis thaliana
gcacgtctgcctgggta

SEQ ID NO: 101942 - DNA, 17 bp, Arabidopsis thaliana
gcacgtctgcctgggtc

SEQ ID NO: 101943 - DNA, 17 bp, Arabidopsis thaliana
gcacgtctgcctgggtg

SEQ ID NO: 101944 - DNA, 17 bp, Arabidopsis thaliana
gcacgtctgcctgggtt

SEQ ID NO: 101945 - DNA, 17 bp, Arabidopsis thaliana
gcacgtctgcctggtgt

SEQ ID NO: 101946 - DNA, 17 bp, Arabidopsis thaliana
gcacgtctgcctggttg

SEQ ID NO: 101947 - DNA, 17 bp, Arabidopsis thaliana
gcacgtctgcctgtcac

SEQ ID NO: 101948 - DNA, 17 bp, Arabidopsis thaliana
gcacgtctgcctgtgtc

SEQ ID NO: 101949 - DNA, 17 bp, Arabidopsis thaliana
gcacgtctgcctgtgtg

SEQ ID NO: 101950 - DNA, 17 bp, Arabidopsis thaliana
gcacgtctgcctgtgtt

SEQ ID NO: 101951 - DNA, 17 bp, Arabidopsis thaliana
gcacgtctgccttggtg

SEQ ID NO: 101952 - DNA, 17 bp, Arabidopsis thaliana
gcacgtctgcgggtgtc

SEQ ID NO: 101953 - DNA, 17 bp, Arabidopsis thaliana
gcacgtctgcgtgggtg

SEQ ID NO: 101954 - DNA, 17 bp, Arabidopsis thaliana
gcacgtctgctcgggtg

SEQ ID NO: 101955 - DNA, 17 bp, Arabidopsis thaliana
gcacgtctgctctgggt

SEQ ID NO: 101956 - DNA, 17 bp, Arabidopsis thaliana
gcacgtctgctgggtgt

SEQ ID NO: 101957 - DNA, 17 bp, Arabidopsis thaliana
gcacgtctgcttgggtg

SEQ ID NO: 101958 - DNA, 17 bp, Arabidopsis thaliana
gcacgtctgggtgtcac

SEQ ID NO: 101959 - DNA, 17 bp, Arabidopsis thaliana
gcacgtctgtctaggtg

SEQ ID NO: 101960 - DNA, 17 bp, Arabidopsis thaliana
gcacgtctgtctgggtg

SEQ ID NO: 101961 - DNA, 17 bp, Arabidopsis thaliana
gcacgtctgtttgggtg

SEQ ID NO: 101962 - DNA, 17 bp, Arabidopsis thaliana
gcacgtcttcctgggtg

SEQ ID NO: 101963 - DNA, 17 bp, Arabidopsis thaliana
gcacgtgccgtagtggt

SEQ ID NO: 101964 - DNA, 17 bp, Arabidopsis thaliana
gcacgtgcctgggtgtc

SEQ ID NO: 101965 - DNA, 17 bp, Arabidopsis thaliana
gcacgtggagaatgtgt

SEQ ID NO: 101966 - DNA, 17 bp, Arabidopsis thaliana
gcacgtggtagctccgt

SEQ ID NO: 101967 - DNA, 17 bp, Arabidopsis thaliana
gcacgtgtcgttggcta

SEQ ID NO: 101968 - DNA, 17 bp, Arabidopsis thaliana
gcacgttcgcctgggtg

SEQ ID NO: 101969 - DNA, 17 bp, Arabidopsis thaliana
gcacgttctgcctgggt

SEQ ID NO: 101970 - DNA, 17 bp, Arabidopsis thaliana
gcacgttgcctgggtgt

SEQ ID NO: 101971 - DNA, 17 bp, Arabidopsis thaliana
gcacgtttgcctgggtg

SEQ ID NO: 101972 - DNA, 17 bp, Arabidopsis thaliana
gcactaaaatactccag

SEQ ID NO: 101973 - DNA, 17 bp, Arabidopsis thaliana
gcactaaaatacttcag

SEQ ID NO: 101974 - DNA, 17 bp, Arabidopsis thaliana
gcactaagtttatccgg

SEQ ID NO: 101975 - DNA, 17 bp, Arabidopsis thaliana
gcactactgcacgggcc

SEQ ID NO: 101976 - DNA, 17 bp, Arabidopsis thaliana
gcactagatgactatgg

SEQ ID NO: 101977 - DNA, 17 bp, Arabidopsis thaliana
gcactagtctttgactc

SEQ ID NO: 101978 - DNA, 17 bp, Arabidopsis thaliana
gcactagttgtacaaac

SEQ ID NO: 101979 - DNA, 17 bp, Arabidopsis thaliana
gcactataaggcgtaaa

SEQ ID NO: 101980 - DNA, 17 bp, Arabidopsis thaliana
gcactatctgtacaacg

SEQ ID NO: 101981 - DNA, 17 bp, Arabidopsis thaliana
gcactatgaatgtccgt

SEQ ID NO: 101982 - DNA, 17 bp, Arabidopsis thaliana
gcactatggccgaggta

SEQ ID NO: 101983 - DNA, 17 bp, Arabidopsis thaliana
gcactattagctcagtg

SEQ ID NO: 101984 - DNA, 17 bp, Arabidopsis thaliana
gcactattagctcagtt

SEQ ID NO: 101985 - DNA, 17 bp, Arabidopsis thaliana
gcactattggagatggt

SEQ ID NO: 101986 - DNA, 17 bp, Arabidopsis thaliana
gcactatttcctgcgtc

SEQ ID NO: 101987 - DNA, 17 bp, Arabidopsis thaliana
gcactcaaaacaacata

SEQ ID NO: 101988 - DNA, 17 bp, Arabidopsis thaliana
gcactcaaaaccgcacc

SEQ ID NO: 101989 - DNA, 17 bp, Arabidopsis thaliana
gcactcaaaactacacc

SEQ ID NO: 101990 - DNA, 17 bp, Arabidopsis thaliana
gcactcaaaactacatc

SEQ ID NO: 101991 - DNA, 17 bp, Arabidopsis thaliana
gcactcaactggttctc

SEQ ID NO: 101992 - DNA, 17 bp, Arabidopsis thaliana
gcactcaattaatggcg

SEQ ID NO: 101993 - DNA, 17 bp, Arabidopsis thaliana
gcactcaggagggatag

SEQ ID NO: 101994 - DNA, 17 bp, Arabidopsis thaliana
gcactcatactcgacta

SEQ ID NO: 101995 - DNA, 17 bp, Arabidopsis thaliana
gcactcccatcgacagt

SEQ ID NO: 101996 - DNA, 17 bp, Arabidopsis thaliana
gcactcgaaccactgac

SEQ ID NO: 101997 - DNA, 17 bp, Arabidopsis thaliana
gcactcgatgataagtt

SEQ ID NO: 101998 - DNA, 17 bp, Arabidopsis thaliana
gcactcggaacggttgt

SEQ ID NO: 101999 - DNA, 17 bp, Arabidopsis thaliana
gcactcggatgaccatt

SEQ ID NO: 102000 - DNA, 17 bp, Arabidopsis thaliana
gcactcggatgtcgctt

SEQ ID NO: 102001 - DNA, 17 bp, Arabidopsis thaliana
gcactcggctggacaat

SEQ ID NO: 102002 - DNA, 17 bp, Arabidopsis thaliana
gcactcgggttagcgtt

SEQ ID NO: 102003 - DNA, 17 bp, Arabidopsis thaliana
gcactcgttgcctaatg

SEQ ID NO: 102004 - DNA, 17 bp, Arabidopsis thaliana
gcactctacgacccagt

SEQ ID NO: 102005 - DNA, 17 bp, Arabidopsis thaliana
gcactctacgcagcgat

SEQ ID NO: 102006 - DNA, 17 bp, Arabidopsis thaliana
gcactctactttgatga

SEQ ID NO: 102007 - DNA, 17 bp, Arabidopsis thaliana
gcactctatcgtctttt

SEQ ID NO: 102008 - DNA, 17 bp, Arabidopsis thaliana
gcactctctggtatggc

SEQ ID NO: 102009 - DNA, 17 bp, Arabidopsis thaliana
gcactctgaacggttgt

SEQ ID NO: 102010 - DNA, 17 bp, Arabidopsis thaliana
gcactctgatttgatga

SEQ ID NO: 102011 - DNA, 17 bp, Arabidopsis thaliana
gcactctgccggccgac

SEQ ID NO: 102012 - DNA, 17 bp, Arabidopsis thaliana
gcactctgcctgggtgt

SEQ ID NO: 102013 - DNA, 17 bp, Arabidopsis thaliana
gcactctgctgggccga

SEQ ID NO: 102014 - DNA, 17 bp, Arabidopsis thaliana
gcactctgctgggctga

SEQ ID NO: 102015 - DNA, 17 bp, Arabidopsis thaliana
gcactctgcttttgttg

SEQ ID NO: 102016 - DNA, 17 bp, Arabidopsis thaliana
gcactctttgcgaggca

SEQ ID NO: 102017 - DNA, 17 bp, Arabidopsis thaliana
gcactgaaccgcttcat

SEQ ID NO: 102018 - DNA, 17 bp, Arabidopsis thaliana
gcactgaatgacaagct

SEQ ID NO: 102019 - DNA, 17 bp, Arabidopsis thaliana
gcactgactagtgttga

SEQ ID NO: 102020 - DNA, 17 bp, Arabidopsis thaliana
gcactgagaacctgaat

SEQ ID NO: 102021 - DNA, 17 bp, Arabidopsis thaliana
gcactgagggctgggct

SEQ ID NO: 102022 - DNA, 17 bp, Arabidopsis thaliana
gcactgattgggtgcgg

SEQ ID NO: 102023 - DNA, 17 bp, Arabidopsis thaliana
gcactgccatcgacagt

SEQ ID NO: 102024 - DNA, 17 bp, Arabidopsis thaliana
gcactgccggaaacggg

SEQ ID NO: 102025 - DNA, 17 bp, Arabidopsis thaliana
gcactgcctcttccctg

SEQ ID NO: 102026 - DNA, 17 bp, Arabidopsis thaliana
gcactgcgctacagagt

SEQ ID NO: 102027 - DNA, 17 bp, Arabidopsis thaliana
gcactgcgtgagattaa

SEQ ID NO: 102028 - DNA, 17 bp, Arabidopsis thaliana
gcactggactatatgag

SEQ ID NO: 102029 - DNA, 17 bp, Arabidopsis thaliana
gcactggattatgcggt

SEQ ID NO: 102030 - DNA, 17 bp, Arabidopsis thaliana
gcactggatttgtgaca

SEQ ID NO: 102031 - DNA, 17 bp, Arabidopsis thaliana
gcactgggtgaggtcga

SEQ ID NO: 102032 - DNA, 17 bp, Arabidopsis thaliana
gcactggtggacgctaa

SEQ ID NO: 102033 - DNA, 17 bp, Arabidopsis thaliana
gcactgtaccttcagga

SEQ ID NO: 102034 - DNA, 17 bp, Arabidopsis thaliana
gcactgtctcggagaga

SEQ ID NO: 102035 - DNA, 17 bp, Arabidopsis thaliana
gcactgtgcgattcggt

SEQ ID NO: 102036 - DNA, 17 bp, Arabidopsis thaliana
gcactgtgcggttcggt

SEQ ID NO: 102037 - DNA, 17 bp, Arabidopsis thaliana
gcactgttacatagacg

SEQ ID NO: 102038 - DNA, 17 bp, Arabidopsis thaliana
gcactgttccatgtctg

SEQ ID NO: 102039 - DNA, 17 bp, Arabidopsis thaliana
gcactgttgcgatgcgg

SEQ ID NO: 102040 - DNA, 17 bp, Arabidopsis thaliana
gcactgtttctcacaaa

SEQ ID NO: 102041 - DNA, 17 bp, Arabidopsis thaliana
gcacttaatcctaacgg

SEQ ID NO: 102042 - DNA, 17 bp, Arabidopsis thaliana
gcacttaattacctaat

SEQ ID NO: 102043 - DNA, 17 bp, Arabidopsis thaliana
gcacttactggtgtgat

SEQ ID NO: 102044 - DNA, 17 bp, Arabidopsis thaliana
gcacttcatactaccgt

SEQ ID NO: 102045 - DNA, 17 bp, Arabidopsis thaliana
gcacttctatcgggaaa

SEQ ID NO: 102046 - DNA, 17 bp, Arabidopsis thaliana
gcacttctgcaaggctc

SEQ ID NO: 102047 - DNA, 17 bp, Arabidopsis thaliana
gcacttctgcctgggtg

SEQ ID NO: 102048 - DNA, 17 bp, Arabidopsis thaliana
gcacttgacgtgaaacc

SEQ ID NO: 102049 - DNA, 17 bp, Arabidopsis thaliana
gcacttgcacatgggtt

SEQ ID NO: 102050 - DNA, 17 bp, Arabidopsis thaliana
gcacttgccaaggatgt

SEQ ID NO: 102051 - DNA, 17 bp, Arabidopsis thaliana
gcacttgctccttgcga

SEQ ID NO: 102052 - DNA, 17 bp, Arabidopsis thaliana
gcacttggaacgtttag

SEQ ID NO: 102053 - DNA, 17 bp, Arabidopsis thaliana
gcacttggcccaatggt

SEQ ID NO: 102054 - DNA, 17 bp, Arabidopsis thaliana
gcacttggtgcaggtcg

SEQ ID NO: 102055 - DNA, 17 bp, Arabidopsis thaliana
gcacttgtcagggatgg

SEQ ID NO: 102056 - DNA, 17 bp, Arabidopsis thaliana
gcactttatccgcagtt

SEQ ID NO: 102057 - DNA, 17 bp, Arabidopsis thaliana
gcactttccaagcagta

SEQ ID NO: 102058 - DNA, 17 bp, Arabidopsis thaliana
gcactttctaaggttca

SEQ ID NO: 102059 - DNA, 17 bp, Arabidopsis thaliana
gcactttctgattcctc

SEQ ID NO: 102060 - DNA, 17 bp, Arabidopsis thaliana
gcactttgaatggtcca

SEQ ID NO: 102061 - DNA, 17 bp, Arabidopsis thaliana
gcactttgatagttcta

SEQ ID NO: 102062 - DNA, 17 bp, Arabidopsis thaliana
gcactttgatgacatag

SEQ ID NO: 102063 - DNA, 17 bp, Arabidopsis thaliana
gcactttggctccaagg

SEQ ID NO: 102064 - DNA, 17 bp, Arabidopsis thaliana
gcactttggtgacatag

SEQ ID NO: 102065 - DNA, 17 bp, Arabidopsis thaliana
gcacttttcaaatcagg

SEQ ID NO: 102066 - DNA, 17 bp, Arabidopsis thaliana
gcacttttcgttgccga

SEQ ID NO: 102067 - DNA, 17 bp, Arabidopsis thaliana
gcacttttgaacggttg

SEQ ID NO: 102068 - DNA, 17 bp, Arabidopsis thaliana
gcacttttgaggtagtt

SEQ ID NO: 102069 - DNA, 17 bp, Arabidopsis thaliana
gcacttttgggcgatga

SEQ ID NO: 102070 - DNA, 17 bp, Arabidopsis thaliana
gcacttttgttctgccc

SEQ ID NO: 102071 - DNA, 17 bp, Arabidopsis thaliana
gcagaaaaagtggttgc

SEQ ID NO: 102072 - DNA, 17 bp, Arabidopsis thaliana
gcagaaaaccgccgcgg

SEQ ID NO: 102073 - DNA, 17 bp, Arabidopsis thaliana
gcagaaaaggatacaca

SEQ ID NO: 102074 - DNA, 17 bp, Arabidopsis thaliana
gcagaaactaatcgtct

SEQ ID NO: 102075 - DNA, 17 bp, Arabidopsis thaliana
gcagaaactgatcactg

SEQ ID NO: 102076 - DNA, 17 bp, Arabidopsis thaliana
gcagaaactgcgaatgg

SEQ ID NO: 102077 - DNA, 17 bp, Arabidopsis thaliana
gcagaaagactgtgtca

SEQ ID NO: 102078 - DNA, 17 bp, Arabidopsis thaliana
gcagaaaggagttgacg

SEQ ID NO: 102079 - DNA, 17 bp, Arabidopsis thaliana
gcagaacctacggaagg

SEQ ID NO: 102080 - DNA, 17 bp, Arabidopsis thaliana
gcagaacctgagggcga

SEQ ID NO: 102081 - DNA, 17 bp, Arabidopsis thaliana
gcagaacctttggatcg

SEQ ID NO: 102082 - DNA, 17 bp, Arabidopsis thaliana
gcagaactattggctct

SEQ ID NO: 102083 - DNA, 17 bp, Arabidopsis thaliana
gcagaagaggtgaaatg

SEQ ID NO: 102084 - DNA, 17 bp, Arabidopsis thaliana
gcagaagcccgtaattc

SEQ ID NO: 102085 - DNA, 17 bp, Arabidopsis thaliana
gcagaaggcccaagcgc

SEQ ID NO: 102086 - DNA, 17 bp, Arabidopsis thaliana
gcagaagggagcttgac

SEQ ID NO: 102087 - DNA, 17 bp, Arabidopsis thaliana
gcagaagtaattgatag

SEQ ID NO: 102088 - DNA, 17 bp, Arabidopsis thaliana
gcagaagtgacgctttt

SEQ ID NO: 102089 - DNA, 17 bp, Arabidopsis thaliana
gcagaagtggccatagt

SEQ ID NO: 102090 - DNA, 17 bp, Arabidopsis thaliana
gcagaagttcacgattg

SEQ ID NO: 102091 - DNA, 17 bp, Arabidopsis thaliana
gcagaatcaatgcctat

SEQ ID NO: 102092 - DNA, 17 bp, Arabidopsis thaliana
gcagaatcccgtgaacc

SEQ ID NO: 102093 - DNA, 17 bp, Arabidopsis thaliana
gcagaatcgttagggtt

SEQ ID NO: 102094 - DNA, 17 bp, Arabidopsis thaliana
gcagaatgtgtccatct

SEQ ID NO: 102095 - DNA, 17 bp, Arabidopsis thaliana
gcagaattcaccaagtg

SEQ ID NO: 102096 - DNA, 17 bp, Arabidopsis thaliana
gcagaattgatcgtctt

SEQ ID NO: 102097 - DNA, 17 bp, Arabidopsis thaliana
gcagacaagaagttttt

SEQ ID NO: 102098 - DNA, 17 bp, Arabidopsis thaliana
gcagacaagcgatggca

SEQ ID NO: 102099 - DNA, 17 bp, Arabidopsis thaliana
gcagacaaggtcgagtg

SEQ ID NO: 102100 - DNA, 17 bp, Arabidopsis thaliana
gcagacaagtactattt

SEQ ID NO: 102101 - DNA, 17 bp, Arabidopsis thaliana
gcagacaataaaccgtt

SEQ ID NO: 102102 - DNA, 17 bp, Arabidopsis thaliana
gcagacaatgctagaac

SEQ ID NO: 102103 - DNA, 17 bp, Arabidopsis thaliana
gcagacacagtgttctt

SEQ ID NO: 102104 - DNA, 17 bp, Arabidopsis thaliana
gcagacactgtgttctt

SEQ ID NO: 102105 - DNA, 17 bp, Arabidopsis thaliana
gcagacacttcgctgag

SEQ ID NO: 102106 - DNA, 17 bp, Arabidopsis thaliana
gcagacatattagaccg

SEQ ID NO: 102107 - DNA, 17 bp, Arabidopsis thaliana
gcagacatggatgcttt

SEQ ID NO: 102108 - DNA, 17 bp, Arabidopsis thaliana
gcagaccaacggtgtcg

SEQ ID NO: 102109 - DNA, 17 bp, Arabidopsis thaliana
gcagaccaactaaatgt

SEQ ID NO: 102110 - DNA, 17 bp, Arabidopsis thaliana
gcagaccagtctttcct

SEQ ID NO: 102111 - DNA, 17 bp, Arabidopsis thaliana
gcagaccggtccgcaaa

SEQ ID NO: 102112 - DNA, 17 bp, Arabidopsis thaliana
gcagaccgttgctgttg

SEQ ID NO: 102113 - DNA, 17 bp, Arabidopsis thaliana
gcagacctctccaggga

SEQ ID NO: 102114 - DNA, 17 bp, Arabidopsis thaliana
gcagacctggtgttcta

SEQ ID NO: 102115 - DNA, 17 bp, Arabidopsis thaliana
gcagacgacgctaaatg

SEQ ID NO: 102116 - DNA, 17 bp, Arabidopsis thaliana
gcagacgacttaaatac

SEQ ID NO: 102117 - DNA, 17 bp, Arabidopsis thaliana
gcagacgatcggtttat

SEQ ID NO: 102118 - DNA, 17 bp, Arabidopsis thaliana
gcagacgcgttgagccg

SEQ ID NO: 102119 - DNA, 17 bp, Arabidopsis thaliana
gcagacggtagcggtta

SEQ ID NO: 102120 - DNA, 17 bp, Arabidopsis thaliana
gcagacgtaagcgtggt

SEQ ID NO: 102121 - DNA, 17 bp, Arabidopsis thaliana
gcagacgtgccggagtg

SEQ ID NO: 102122 - DNA, 17 bp, Arabidopsis thaliana
gcagactatagtcgcca

SEQ ID NO: 102123 - DNA, 17 bp, Arabidopsis thaliana
gcagactatgtgagtgt

SEQ ID NO: 102124 - DNA, 17 bp, Arabidopsis thaliana
gcagactccatctgatc

SEQ ID NO: 102125 - DNA, 17 bp, Arabidopsis thaliana
gcagactgagttgtagt

SEQ ID NO: 102126 - DNA, 17 bp, Arabidopsis thaliana
gcagactgtgctggttc

SEQ ID NO: 102127 - DNA, 17 bp, Arabidopsis thaliana
gcagactgttcagacct

SEQ ID NO: 102128 - DNA, 17 bp, Arabidopsis thaliana
gcagactttcttgccaa

SEQ ID NO: 102129 - DNA, 17 bp, Arabidopsis thaliana
gcagacttttttggttg

SEQ ID NO: 102130 - DNA, 17 bp, Arabidopsis thaliana
gcagagaaccttctatt

SEQ ID NO: 102131 - DNA, 17 bp, Arabidopsis thaliana
gcagagacagccaggaa

SEQ ID NO: 102132 - DNA, 17 bp, Arabidopsis thaliana
gcagagacagccaggag

SEQ ID NO: 102133 - DNA, 17 bp, Arabidopsis thaliana
gcagagacagccaggcg

SEQ ID NO: 102134 - DNA, 17 bp, Arabidopsis thaliana
gcagagaccctgttaag

SEQ ID NO: 102135 - DNA, 17 bp, Arabidopsis thaliana
gcagagacgctcctccg

SEQ ID NO: 102136 - DNA, 17 bp, Arabidopsis thaliana
gcagagacggtacggac

SEQ ID NO: 102137 - DNA, 17 bp, Arabidopsis thaliana
gcagagacggttggacc

SEQ ID NO: 102138 - DNA, 17 bp, Arabidopsis thaliana
gcagagacttctcagat

SEQ ID NO: 102139 - DNA, 17 bp, Arabidopsis thaliana
gcagagagccctggtcc

SEQ ID NO: 102140 - DNA, 17 bp, Arabidopsis thaliana
gcagagagcgcaattgt

SEQ ID NO: 102141 - DNA, 17 bp, Arabidopsis thaliana
gcagagatggccgagtg

SEQ ID NO: 102142 - DNA, 17 bp, Arabidopsis thaliana
gcagagattctgttgat

SEQ ID NO: 102143 - DNA, 17 bp, Arabidopsis thaliana
gcagagcaactccagtg

SEQ ID NO: 102144 - DNA, 17 bp, Arabidopsis thaliana
gcagagcactgggtgag

SEQ ID NO: 102145 - DNA, 17 bp, Arabidopsis thaliana
gcagagcccgcgtccac

SEQ ID NO: 102146 - DNA, 17 bp, Arabidopsis thaliana
gcagagcccgcgtcgac

SEQ ID NO: 102147 - DNA, 17 bp, Arabidopsis thaliana
gcagagccctgggtgag

SEQ ID NO: 102148 - DNA, 17 bp, Arabidopsis thaliana
gcagagcgagttgtcta

SEQ ID NO: 102149 - DNA, 17 bp, Arabidopsis thaliana
gcagagctgatcttcga

SEQ ID NO: 102150 - DNA, 17 bp, Arabidopsis thaliana
gcagagctttctttcat

SEQ ID NO: 102151 - DNA, 17 bp, Arabidopsis thaliana
gcagaggaccggcgggt

SEQ ID NO: 102152 - DNA, 17 bp, Arabidopsis thaliana
gcagagggactgaaggc

SEQ ID NO: 102153 - DNA, 17 bp, Arabidopsis thaliana
gcagagggcacgtctgc

SEQ ID NO: 102154 - DNA, 17 bp, Arabidopsis thaliana
gcagaggtctaaactac

SEQ ID NO: 102155 - DNA, 17 bp, Arabidopsis thaliana
gcagaggtcttcatcct

SEQ ID NO: 102156 - DNA, 17 bp, Arabidopsis thaliana
gcagagtagccttgctg

SEQ ID NO: 102157 - DNA, 17 bp, Arabidopsis thaliana
gcagagtagcgcagcgg

SEQ ID NO: 102158 - DNA, 17 bp, Arabidopsis thaliana
gcagagtatcatgtgac

SEQ ID NO: 102159 - DNA, 17 bp, Arabidopsis thaliana
gcagagtcctaggaacg

SEQ ID NO: 102160 - DNA, 17 bp, Arabidopsis thaliana
gcagagtctgtggattg

SEQ ID NO: 102161 - DNA, 17 bp, Arabidopsis thaliana
gcagagtgataggcggc

SEQ ID NO: 102162 - DNA, 17 bp, Arabidopsis thaliana
gcagagtgtccgagtga

SEQ ID NO: 102163 - DNA, 17 bp, Arabidopsis thaliana
gcagagtgtccgagtgt

SEQ ID NO: 102164 - DNA, 17 bp, Arabidopsis thaliana
gcagagttcaggtctcg

SEQ ID NO: 102165 - DNA, 17 bp, Arabidopsis thaliana
gcagataaaatctggtg

SEQ ID NO: 102166 - DNA, 17 bp, Arabidopsis thaliana
gcagataaacctccgtg

SEQ ID NO: 102167 - DNA, 17 bp, Arabidopsis thaliana
gcagataaagtgcggtg

SEQ ID NO: 102168 - DNA, 17 bp, Arabidopsis thaliana
gcagataaccagaacgt

SEQ ID NO: 102169 - DNA, 17 bp, Arabidopsis thaliana
gcagataagccgctgcg

SEQ ID NO: 102170 - DNA, 17 bp, Arabidopsis thaliana
gcagatacgagattatc

SEQ ID NO: 102171 - DNA, 17 bp, Arabidopsis thaliana
gcagatacttgtagttc

SEQ ID NO: 102172 - DNA, 17 bp, Arabidopsis thaliana
gcagatagtggcatacc

SEQ ID NO: 102173 - DNA, 17 bp, Arabidopsis thaliana
gcagatagtggcattcc

SEQ ID NO: 102174 - DNA, 17 bp, Arabidopsis thaliana
gcagatattgctgttgc

SEQ ID NO: 102175 - DNA, 17 bp, Arabidopsis thaliana
gcagatcaagcggacaa

SEQ ID NO: 102176 - DNA, 17 bp, Arabidopsis thaliana
gcagatctacgccgaga

SEQ ID NO: 102177 - DNA, 17 bp, Arabidopsis thaliana
gcagatctgcaggtttg

SEQ ID NO: 102178 - DNA, 17 bp, Arabidopsis thaliana
gcagatctgtttttctt

SEQ ID NO: 102179 - DNA, 17 bp, Arabidopsis thaliana
gcagatgaaggaggtct

SEQ ID NO: 102180 - DNA, 17 bp, Arabidopsis thaliana
gcagatgattcgagaaa

SEQ ID NO: 102181 - DNA, 17 bp, Arabidopsis thaliana
gcagatgattcgagaat

SEQ ID NO: 102182 - DNA, 17 bp, Arabidopsis thaliana
gcagatggacctgttta

SEQ ID NO: 102183 - DNA, 17 bp, Arabidopsis thaliana
gcagatggacctgtttg

SEQ ID NO: 102184 - DNA, 17 bp, Arabidopsis thaliana
gcagatggtaagtgtat

SEQ ID NO: 102185 - DNA, 17 bp, Arabidopsis thaliana
gcagatggtagcacgta

SEQ ID NO: 102186 - DNA, 17 bp, Arabidopsis thaliana
gcagatggtccgcagcg

SEQ ID NO: 102187 - DNA, 17 bp, Arabidopsis thaliana
gcagatggtcttatggg

SEQ ID NO: 102188 - DNA, 17 bp, Arabidopsis thaliana
gcagatgtgagaggctc

SEQ ID NO: 102189 - DNA, 17 bp, Arabidopsis thaliana
gcagattaatggaggca

SEQ ID NO: 102190 - DNA, 17 bp, Arabidopsis thaliana
gcagattaatggaggtg

SEQ ID NO: 102191 - DNA, 17 bp, Arabidopsis thaliana
gcagattaccatcacga

SEQ ID NO: 102192 - DNA, 17 bp, Arabidopsis thaliana
gcagattacggtagaga

SEQ ID NO: 102193 - DNA, 17 bp, Arabidopsis thaliana
gcagattcaaatttgag

SEQ ID NO: 102194 - DNA, 17 bp, Arabidopsis thaliana
gcagattcacatggatc

SEQ ID NO: 102195 - DNA, 17 bp, Arabidopsis thaliana
gcagattccgctatcga

SEQ ID NO: 102196 - DNA, 17 bp, Arabidopsis thaliana
gcagattcggtgatgaa

SEQ ID NO: 102197 - DNA, 17 bp, Arabidopsis thaliana
gcagattctcatcgtct

SEQ ID NO: 102198 - DNA, 17 bp, Arabidopsis thaliana
gcagattgatggaggca

SEQ ID NO: 102199 - DNA, 17 bp, Arabidopsis thaliana
gcagattgcgatcatac

SEQ ID NO: 102200 - DNA, 17 bp, Arabidopsis thaliana
gcagattgctgatatga

SEQ ID NO: 102201 - DNA, 17 bp, Arabidopsis thaliana
gcagattggtggaattg

SEQ ID NO: 102202 - DNA, 17 bp, Arabidopsis thaliana
gcagattgtctcttgtt

SEQ ID NO: 102203 - DNA, 17 bp, Arabidopsis thaliana
gcagattgtctgtgcca

SEQ ID NO: 102204 - DNA, 17 bp, Arabidopsis thaliana
gcagattgtgactttgt

SEQ ID NO: 102205 - DNA, 17 bp, Arabidopsis thaliana
gcagatttagccagcag

SEQ ID NO: 102206 - DNA, 17 bp, Arabidopsis thaliana
gcagattttgcagatgt

SEQ ID NO: 102207 - DNA, 17 bp, Arabidopsis thaliana
gcagattttggcagaaa

SEQ ID NO: 102208 - DNA, 17 bp, Arabidopsis thaliana
gcagatttttcaaccat

SEQ ID NO: 102209 - DNA, 17 bp, Arabidopsis thaliana
gcagatttttcaaccgt

SEQ ID NO: 102210 - DNA, 17 bp, Arabidopsis thaliana
gcagattttttaaccgt

SEQ ID NO: 102211 - DNA, 17 bp, Arabidopsis thaliana
gcagcaacaggcaacag

SEQ ID NO: 102212 - DNA, 17 bp, Arabidopsis thaliana
gcagcaactcgtttgcg

SEQ ID NO: 102213 - DNA, 17 bp, Arabidopsis thaliana
gcagcaagagacaacct

SEQ ID NO: 102214 - DNA, 17 bp, Arabidopsis thaliana
gcagcaagctgaggaga

SEQ ID NO: 102215 - DNA, 17 bp, Arabidopsis thaliana
gcagcaatagtggtctc

SEQ ID NO: 102216 - DNA, 17 bp, Arabidopsis thaliana
gcagcacagagtgtcga

SEQ ID NO: 102217 - DNA, 17 bp, Arabidopsis thaliana
gcagcaccacctttttt

SEQ ID NO: 102218 - DNA, 17 bp, Arabidopsis thaliana
gcagcaccaggagtgaa

SEQ ID NO: 102219 - DNA, 17 bp, Arabidopsis thaliana
gcagcaccattaagatt

SEQ ID NO: 102220 - DNA, 17 bp, Arabidopsis thaliana
gcagcaccattaaggtt

SEQ ID NO: 102221 - DNA, 17 bp, Arabidopsis thaliana
gcagcacctcatcaccg

SEQ ID NO: 102222 - DNA, 17 bp, Arabidopsis thaliana
gcagcacgtctgcctgg

SEQ ID NO: 102223 - DNA, 17 bp, Arabidopsis thaliana
gcagcacgtctgcttgg

SEQ ID NO: 102224 - DNA, 17 bp, Arabidopsis thaliana
gcagcagatccgagcag

SEQ ID NO: 102225 - DNA, 17 bp, Arabidopsis thaliana
gcagcagatctgatggt

SEQ ID NO: 102226 - DNA, 17 bp, Arabidopsis thaliana
gcagcagatgttagtgc

SEQ ID NO: 102227 - DNA, 17 bp, Arabidopsis thaliana
gcagcagcagataacgg

SEQ ID NO: 102228 - DNA, 17 bp, Arabidopsis thaliana
gcagcagcggctattgc

SEQ ID NO: 102229 - DNA, 17 bp, Arabidopsis thaliana
gcagcaggatattcggt

SEQ ID NO: 102230 - DNA, 17 bp, Arabidopsis thaliana
gcagcagtgttgtggca

SEQ ID NO: 102231 - DNA, 17 bp, Arabidopsis thaliana
gcagcagttgactggac

SEQ ID NO: 102232 - DNA, 17 bp, Arabidopsis thaliana
gcagcatagcacgggtg

SEQ ID NO: 102233 - DNA, 17 bp, Arabidopsis thaliana
gcagcatgaagatcaaa

SEQ ID NO: 102234 - DNA, 17 bp, Arabidopsis thaliana
gcagcatgttcattgca

SEQ ID NO: 102235 - DNA, 17 bp, Arabidopsis thaliana
gcagcattttaccttgg

SEQ ID NO: 102236 - DNA, 17 bp, Arabidopsis thaliana
gcagccaaaaccagaag

SEQ ID NO: 102237 - DNA, 17 bp, Arabidopsis thaliana
gcagccaagcgttaata

SEQ ID NO: 102238 - DNA, 17 bp, Arabidopsis thaliana
gcagccaagcgttcata

SEQ ID NO: 102239 - DNA, 17 bp, Arabidopsis thaliana
gcagccaaggatgactt

SEQ ID NO: 102240 - DNA, 17 bp, Arabidopsis thaliana
gcagccactcgacctgt

SEQ ID NO: 102241 - DNA, 17 bp, Arabidopsis thaliana
gcagccactttgtgaaa

SEQ ID NO: 102242 - DNA, 17 bp, Arabidopsis thaliana
gcagccagcttaggagt

SEQ ID NO: 102243 - DNA, 17 bp, Arabidopsis thaliana
gcagccatactcttcag

SEQ ID NO: 102244 - DNA, 17 bp, Arabidopsis thaliana
gcagccatgggggacta

SEQ ID NO: 102245 - DNA, 17 bp, Arabidopsis thaliana
gcagccatgtggtgagc

SEQ ID NO: 102246 - DNA, 17 bp, Arabidopsis thaliana
gcagccattccattttg

SEQ ID NO: 102247 - DNA, 17 bp, Arabidopsis thaliana
gcagccattgtaaataa

SEQ ID NO: 102248 - DNA, 17 bp, Arabidopsis thaliana
gcagccattgtgaataa

SEQ ID NO: 102249 - DNA, 17 bp, Arabidopsis thaliana
gcagccattttgtaaaa

SEQ ID NO: 102250 - DNA, 17 bp, Arabidopsis thaliana
gcagccattttgtgaaa

SEQ ID NO: 102251 - DNA, 17 bp, Arabidopsis thaliana
gcagcccattgtccata

SEQ ID NO: 102252 - DNA, 17 bp, Arabidopsis thaliana
gcagccctgtcatcagt

SEQ ID NO: 102253 - DNA, 17 bp, Arabidopsis thaliana
gcagcccttgtcgctaa

SEQ ID NO: 102254 - DNA, 17 bp, Arabidopsis thaliana
gcagccgacttgagccg

SEQ ID NO: 102255 - DNA, 17 bp, Arabidopsis thaliana
gcagccgcagtacgacc

SEQ ID NO: 102256 - DNA, 17 bp, Arabidopsis thaliana
gcagccgcggtaattcc

SEQ ID NO: 102257 - DNA, 17 bp, Arabidopsis thaliana
gcagccggtctgactat

SEQ ID NO: 102258 - DNA, 17 bp, Arabidopsis thaliana
gcagccggttgtgatgg

SEQ ID NO: 102259 - DNA, 17 bp, Arabidopsis thaliana
gcagccgtgacatgacg

SEQ ID NO: 102260 - DNA, 17 bp, Arabidopsis thaliana
gcagccgtttattgttc

SEQ ID NO: 102261 - DNA, 17 bp, Arabidopsis thaliana
gcagcctaaaacagaaa

SEQ ID NO: 102262 - DNA, 17 bp, Arabidopsis thaliana
gcagcctaatggtttcc

SEQ ID NO: 102263 - DNA, 17 bp, Arabidopsis thaliana
gcagcctagcgttcata

SEQ ID NO: 102264 - DNA, 17 bp, Arabidopsis thaliana
gcagcctatttggtgct

SEQ ID NO: 102265 - DNA, 17 bp, Arabidopsis thaliana
gcagcctgccgtgaaga

SEQ ID NO: 102266 - DNA, 17 bp, Arabidopsis thaliana
gcagcctgtagatggat

SEQ ID NO: 102267 - DNA, 17 bp, Arabidopsis thaliana
gcagcgaatccagagtg

SEQ ID NO: 102268 - DNA, 17 bp, Arabidopsis thaliana
gcagcgaccaactgatc

SEQ ID NO: 102269 - DNA, 17 bp, Arabidopsis thaliana
gcagcgacgcatgcgcc

SEQ ID NO: 102270 - DNA, 17 bp, Arabidopsis thaliana
gcagcgactgtcgccag

SEQ ID NO: 102271 - DNA, 17 bp, Arabidopsis thaliana
gcagcgagctgagacga

SEQ ID NO: 102272 - DNA, 17 bp, Arabidopsis thaliana
gcagcgatactgagtgc

SEQ ID NO: 102273 - DNA, 17 bp, Arabidopsis thaliana
gcagcgatgatggagag

SEQ ID NO: 102274 - DNA, 17 bp, Arabidopsis thaliana
gcagcgatggccggctt

SEQ ID NO: 102275 - DNA, 17 bp, Arabidopsis thaliana
gcagcgattagtgatta

SEQ ID NO: 102276 - DNA, 17 bp, Arabidopsis thaliana
gcagcgattggacacat

SEQ ID NO: 102277 - DNA, 17 bp, Arabidopsis thaliana
gcagcgatttatcgtcc

SEQ ID NO: 102278 - DNA, 17 bp, Arabidopsis thaliana
gcagcgatttattgtcc

SEQ ID NO: 102279 - DNA, 17 bp, Arabidopsis thaliana
gcagcgatttgtctggt

SEQ ID NO: 102280 - DNA, 17 bp, Arabidopsis thaliana
gcagcgcatagagccat

SEQ ID NO: 102281 - DNA, 17 bp, Arabidopsis thaliana
gcagcgctcctctgtac

SEQ ID NO: 102282 - DNA, 17 bp, Arabidopsis thaliana
gcagcggaccatttgcg

SEQ ID NO: 102283 - DNA, 17 bp, Arabidopsis thaliana
gcagcggactgaaggtt

SEQ ID NO: 102284 - DNA, 17 bp, Arabidopsis thaliana
gcagcggatcatctacg

SEQ ID NO: 102285 - DNA, 17 bp, Arabidopsis thaliana
gcagcggatcgagcggt

SEQ ID NO: 102286 - DNA, 17 bp, Arabidopsis thaliana
gcagcggcagaacgacc

SEQ ID NO: 102287 - DNA, 17 bp, Arabidopsis thaliana
gcagcggcagcacctgt

SEQ ID NO: 102288 - DNA, 17 bp, Arabidopsis thaliana
gcagcggccttgcaatt

SEQ ID NO: 102289 - DNA, 17 bp, Arabidopsis thaliana
gcagcggcgagcggtgt

SEQ ID NO: 102290 - DNA, 17 bp, Arabidopsis thaliana
gcagcgggtagaatcct

SEQ ID NO: 102291 - DNA, 17 bp, Arabidopsis thaliana
gcagcgggtgcggttgc

SEQ ID NO: 102292 - DNA, 17 bp, Arabidopsis thaliana
gcagcggtagttcagtt

SEQ ID NO: 102293 - DNA, 17 bp, Arabidopsis thaliana
gcagcggtttattgtcc

SEQ ID NO: 102294 - DNA, 17 bp, Arabidopsis thaliana
gcagcggtttattgtct

SEQ ID NO: 102295 - DNA, 17 bp, Arabidopsis thaliana
gcagcggtttattgttc

SEQ ID NO: 102296 - DNA, 17 bp, Arabidopsis thaliana
gcagcggtttgttctct

SEQ ID NO: 102297 - DNA, 17 bp, Arabidopsis thaliana
gcagcggtttgttgtct

SEQ ID NO: 102298 - DNA, 17 bp, Arabidopsis thaliana
gcagcgtaccatttgcg

SEQ ID NO: 102299 - DNA, 17 bp, Arabidopsis thaliana
gcagcgtagaaagtgga

SEQ ID NO: 102300 - DNA, 17 bp, Arabidopsis thaliana
gcagcgtcggccggaaa

SEQ ID NO: 102301 - DNA, 17 bp, Arabidopsis thaliana
gcagcgtctactcccgt

SEQ ID NO: 102302 - DNA, 17 bp, Arabidopsis thaliana
gcagcgtctactgccgt

SEQ ID NO: 102303 - DNA, 17 bp, Arabidopsis thaliana
gcagcgtctgtgcggat

SEQ ID NO: 102304 - DNA, 17 bp, Arabidopsis thaliana
gcagcgtgaaggtgaaa

SEQ ID NO: 102305 - DNA, 17 bp, Arabidopsis thaliana
gcagcgtgcttctatcc

SEQ ID NO: 102306 - DNA, 17 bp, Arabidopsis thaliana
gcagcgttagcgttaag

SEQ ID NO: 102307 - DNA, 17 bp, Arabidopsis thaliana
gcagcgttagcgttagg

SEQ ID NO: 102308 - DNA, 17 bp, Arabidopsis thaliana
gcagcgtttgcggatgg

SEQ ID NO: 102309 - DNA, 17 bp, Arabidopsis thaliana
gcagcgtttgcgggtgg

SEQ ID NO: 102310 - DNA, 17 bp, Arabidopsis thaliana
gcagcgtttgttagttg

SEQ ID NO: 102311 - DNA, 17 bp, Arabidopsis thaliana
gcagctaacccgcctcc

SEQ ID NO: 102312 - DNA, 17 bp, Arabidopsis thaliana
gcagctaagcgttcata

SEQ ID NO: 102313 - DNA, 17 bp, Arabidopsis thaliana
gcagctaataattccac

SEQ ID NO: 102314 - DNA, 17 bp, Arabidopsis thaliana
gcagctagagatgatgg

SEQ ID NO: 102315 - DNA, 17 bp, Arabidopsis thaliana
gcagctagtgcggttgc

SEQ ID NO: 102316 - DNA, 17 bp, Arabidopsis thaliana
gcagctagttcaggact

SEQ ID NO: 102317 - DNA, 17 bp, Arabidopsis thaliana
gcagctatagcgatgat

SEQ ID NO: 102318 - DNA, 17 bp, Arabidopsis thaliana
gcagctatggcagttga

SEQ ID NO: 102319 - DNA, 17 bp, Arabidopsis thaliana
gcagctattgacacgtg

SEQ ID NO: 102320 - DNA, 17 bp, Arabidopsis thaliana
gcagctcacatggttgg

SEQ ID NO: 102321 - DNA, 17 bp, Arabidopsis thaliana
gcagctcaggacatcac

SEQ ID NO: 102322 - DNA, 17 bp, Arabidopsis thaliana
gcagctcatcacaccca

SEQ ID NO: 102323 - DNA, 17 bp, Arabidopsis thaliana
gcagctctcagttttgt

SEQ ID NO: 102324 - DNA, 17 bp, Arabidopsis thaliana
gcagctgacggtttatg

SEQ ID NO: 102325 - DNA, 17 bp, Arabidopsis thaliana
gcagctgacttttactg

SEQ ID NO: 102326 - DNA, 17 bp, Arabidopsis thaliana
gcagctgattactctga

SEQ ID NO: 102327 - DNA, 17 bp, Arabidopsis thaliana
gcagctgcgactgctgt

SEQ ID NO: 102328 - DNA, 17 bp, Arabidopsis thaliana
gcagctgctcaagaata

SEQ ID NO: 102329 - DNA, 17 bp, Arabidopsis thaliana
gcagctgctccatctgc

SEQ ID NO: 102330 - DNA, 17 bp, Arabidopsis thaliana
gcagctggctcataaaa

SEQ ID NO: 102331 - DNA, 17 bp, Arabidopsis thaliana
gcagctgtctatttgtt

SEQ ID NO: 102332 - DNA, 17 bp, Arabidopsis thaliana
gcagcttagaggatgag

SEQ ID NO: 102333 - DNA, 17 bp, Arabidopsis thaliana
gcagcttaggacaattc

SEQ ID NO: 102334 - DNA, 17 bp, Arabidopsis thaliana
gcagcttccattcctgg

SEQ ID NO: 102335 - DNA, 17 bp, Arabidopsis thaliana
gcagcttcggaagcgct

SEQ ID NO: 102336 - DNA, 17 bp, Arabidopsis thaliana
gcagcttcggagcaacg

SEQ ID NO: 102337 - DNA, 17 bp, Arabidopsis thaliana
gcagcttcggcttggtc

SEQ ID NO: 102338 - DNA, 17 bp, Arabidopsis thaliana
gcagcttcttctaattc

SEQ ID NO: 102339 - DNA, 17 bp, Arabidopsis thaliana
gcagcttgatatggttt

SEQ ID NO: 102340 - DNA, 17 bp, Arabidopsis thaliana
gcagcttggactacttc

SEQ ID NO: 102341 - DNA, 17 bp, Arabidopsis thaliana
gcagcttggatggtggt

SEQ ID NO: 102342 - DNA, 17 bp, Arabidopsis thaliana
gcagcttttggattcta

SEQ ID NO: 102343 - DNA, 17 bp, Arabidopsis thaliana
gcaggaaaacacggatg

SEQ ID NO: 102344 - DNA, 17 bp, Arabidopsis thaliana
gcaggaacctgcggaag

SEQ ID NO: 102345 - DNA, 17 bp, Arabidopsis thaliana
gcaggacgcctctgtaa

SEQ ID NO: 102346 - DNA, 17 bp, Arabidopsis thaliana
gcaggactctcctgttt

SEQ ID NO: 102347 - DNA, 17 bp, Arabidopsis thaliana
gcaggactgtcaggtct

SEQ ID NO: 102348 - DNA, 17 bp, Arabidopsis thaliana
gcaggagattcatgcat

SEQ ID NO: 102349 - DNA, 17 bp, Arabidopsis thaliana
gcaggagcgatttgtct

SEQ ID NO: 102350 - DNA, 17 bp, Arabidopsis thaliana
gcaggagctgttcagct

SEQ ID NO: 102351 - DNA, 17 bp, Arabidopsis thaliana
gcaggaggagaagcaga

SEQ ID NO: 102352 - DNA, 17 bp, Arabidopsis thaliana
gcaggatactcgcgtgg

SEQ ID NO: 102353 - DNA, 17 bp, Arabidopsis thaliana
gcaggatcaccatcaca

SEQ ID NO: 102354 - DNA, 17 bp, Arabidopsis thaliana
gcaggatccctcgcggg

SEQ ID NO: 102355 - DNA, 17 bp, Arabidopsis thaliana
gcaggatcggaaacagc

SEQ ID NO: 102356 - DNA, 17 bp, Arabidopsis thaliana
gcaggatggcagagaaa

SEQ ID NO: 102357 - DNA, 17 bp, Arabidopsis thaliana
gcaggatgtagcgcagc

SEQ ID NO: 102358 - DNA, 17 bp, Arabidopsis thaliana
gcaggatgtttttcttg

SEQ ID NO: 102359 - DNA, 17 bp, Arabidopsis thaliana
gcaggattgatgtcagc

SEQ ID NO: 102360 - DNA, 17 bp, Arabidopsis thaliana
gcaggcaaactcgtccg

SEQ ID NO: 102361 - DNA, 17 bp, Arabidopsis thaliana
gcaggcaatcggtttat

SEQ ID NO: 102362 - DNA, 17 bp, Arabidopsis thaliana
gcaggcaatgtgatttc

SEQ ID NO: 102363 - DNA, 17 bp, Arabidopsis thaliana
gcaggcacgtctgcctg

SEQ ID NO: 102364 - DNA, 17 bp, Arabidopsis thaliana
gcaggcagagtctgtgg

SEQ ID NO: 102365 - DNA, 17 bp, Arabidopsis thaliana
gcaggcagataaccaga

SEQ ID NO: 102366 - DNA, 17 bp, Arabidopsis thaliana
gcaggcagtgcagtctg

SEQ ID NO: 102367 - DNA, 17 bp, Arabidopsis thaliana
gcaggcgacgaaccgcg

SEQ ID NO: 102368 - DNA, 17 bp, Arabidopsis thaliana
gcaggcggctatgggcg

SEQ ID NO: 102369 - DNA, 17 bp, Arabidopsis thaliana
gcaggcggtctaactac

SEQ ID NO: 102370 - DNA, 17 bp, Arabidopsis thaliana
gcaggcggtttgattac

SEQ ID NO: 102371 - DNA, 17 bp, Arabidopsis thaliana
gcaggctaccctggtct

SEQ ID NO: 102372 - DNA, 17 bp, Arabidopsis thaliana
gcaggctatgttagtga

SEQ ID NO: 102373 - DNA, 17 bp, Arabidopsis thaliana
gcaggctcagtttgcta

SEQ ID NO: 102374 - DNA, 17 bp, Arabidopsis thaliana
gcaggcttacagtgaca

SEQ ID NO: 102375 - DNA, 17 bp, Arabidopsis thaliana
gcaggctttgtcattat

SEQ ID NO: 102376 - DNA, 17 bp, Arabidopsis thaliana
gcaggctttgtccatgc

SEQ ID NO: 102377 - DNA, 17 bp, Arabidopsis thaliana
gcagggacagtcggggg

SEQ ID NO: 102378 - DNA, 17 bp, Arabidopsis thaliana
gcagggaccatcgcaat

SEQ ID NO: 102379 - DNA, 17 bp, Arabidopsis thaliana
gcagggaccttacaagt

SEQ ID NO: 102380 - DNA, 17 bp, Arabidopsis thaliana
gcagggaccttgcaagg

SEQ ID NO: 102381 - DNA, 17 bp, Arabidopsis thaliana
gcagggaccttgcaagt

SEQ ID NO: 102382 - DNA, 17 bp, Arabidopsis thaliana
gcagggacgaaagtcgg

SEQ ID NO: 102383 - DNA, 17 bp, Arabidopsis thaliana
gcagggatcccattcaa

SEQ ID NO: 102384 - DNA, 17 bp, Arabidopsis thaliana
gcagggccaaggacagt

SEQ ID NO: 102385 - DNA, 17 bp, Arabidopsis thaliana
gcagggcctaagttttg

SEQ ID NO: 102386 - DNA, 17 bp, Arabidopsis thaliana
gcagggctacggttcga

SEQ ID NO: 102387 - DNA, 17 bp, Arabidopsis thaliana
gcaggggacgcggagcc

SEQ ID NO: 102388 - DNA, 17 bp, Arabidopsis thaliana
gcaggggagagactcaa

SEQ ID NO: 102389 - DNA, 17 bp, Arabidopsis thaliana
gcaggggccattttttt

SEQ ID NO: 102390 - DNA, 17 bp, Arabidopsis thaliana
gcagggggtagtcaggc

SEQ ID NO: 102391 - DNA, 17 bp, Arabidopsis thaliana
gcagggtagagcggatc

SEQ ID NO: 102392 - DNA, 17 bp, Arabidopsis thaliana
gcagggtttttggcttg

SEQ ID NO: 102393 - DNA, 17 bp, Arabidopsis thaliana
gcaggtaagcgtgcttg

SEQ ID NO: 102394 - DNA, 17 bp, Arabidopsis thaliana
gcaggtacttggtgtgg

SEQ ID NO: 102395 - DNA, 17 bp, Arabidopsis thaliana
gcaggtagctgacttag

SEQ ID NO: 102396 - DNA, 17 bp, Arabidopsis thaliana
gcaggtcatacgggagt

SEQ ID NO: 102397 - DNA, 17 bp, Arabidopsis thaliana
gcaggtcccacggttaa

SEQ ID NO: 102398 - DNA, 17 bp, Arabidopsis thaliana
gcaggtcggactttgtt

SEQ ID NO: 102399 - DNA, 17 bp, Arabidopsis thaliana
gcaggtctattggaagc

SEQ ID NO: 102400 - DNA, 17 bp, Arabidopsis thaliana
gcaggtctcttttgcta

SEQ ID NO: 102401 - DNA, 17 bp, Arabidopsis thaliana
gcaggtgaacgacctgt

SEQ ID NO: 102402 - DNA, 17 bp, Arabidopsis thaliana
gcaggtgacttgattat

SEQ ID NO: 102403 - DNA, 17 bp, Arabidopsis thaliana
gcaggtgcagtgggatg

SEQ ID NO: 102404 - DNA, 17 bp, Arabidopsis thaliana
gcaggtggcacaggcac

SEQ ID NO: 102405 - DNA, 17 bp, Arabidopsis thaliana
gcaggtggtgggagtga

SEQ ID NO: 102406 - DNA, 17 bp, Arabidopsis thaliana
gcaggtgtcctaagatg

SEQ ID NO: 102407 - DNA, 17 bp, Arabidopsis thaliana
gcaggttagacggttgt

SEQ ID NO: 102408 - DNA, 17 bp, Arabidopsis thaliana
gcaggttcatcatttga

SEQ ID NO: 102409 - DNA, 17 bp, Arabidopsis thaliana
gcaggttccaaccctgc

SEQ ID NO: 102410 - DNA, 17 bp, Arabidopsis thaliana
gcaggttcgaaccctgc

SEQ ID NO: 102411 - DNA, 17 bp, Arabidopsis thaliana
gcaggttcgaatcctgc

SEQ ID NO: 102412 - DNA, 17 bp, Arabidopsis thaliana
gcaggttcgtatcctgc

SEQ ID NO: 102413 - DNA, 17 bp, Arabidopsis thaliana
gcaggtttactccaacg

SEQ ID NO: 102414 - DNA, 17 bp, Arabidopsis thaliana
gcaggtttgcccgagag

SEQ ID NO: 102415 - DNA, 17 bp, Arabidopsis thaliana
gcaggtttgcccgagtg

SEQ ID NO: 102416 - DNA, 17 bp, Arabidopsis thaliana
gcagtaaaccatcggct

SEQ ID NO: 102417 - DNA, 17 bp, Arabidopsis thaliana
gcagtaaaccgcgggac

SEQ ID NO: 102418 - DNA, 17 bp, Arabidopsis thaliana
gcagtaacttcaggcac

SEQ ID NO: 102419 - DNA, 17 bp, Arabidopsis thaliana
gcagtaattttgacatg

SEQ ID NO: 102420 - DNA, 17 bp, Arabidopsis thaliana
gcagtagatagattggc

SEQ ID NO: 102421 - DNA, 17 bp, Arabidopsis thaliana
gcagtagccgtgacgcg

SEQ ID NO: 102422 - DNA, 17 bp, Arabidopsis thaliana
gcagtaggagcggacga

SEQ ID NO: 102423 - DNA, 17 bp, Arabidopsis thaliana
gcagtagtcactctcac

SEQ ID NO: 102424 - DNA, 17 bp, Arabidopsis thaliana
gcagtagtgggtccctc

SEQ ID NO: 102425 - DNA, 17 bp, Arabidopsis thaliana
gcagtagttcatctaca

SEQ ID NO: 102426 - DNA, 17 bp, Arabidopsis thaliana
gcagtagttgggacttg

SEQ ID NO: 102427 - DNA, 17 bp, Arabidopsis thaliana
gcagtataccgcaggta

SEQ ID NO: 102428 - DNA, 17 bp, Arabidopsis thaliana
gcagtatcctcgcatgg

SEQ ID NO: 102429 - DNA, 17 bp, Arabidopsis thaliana
gcagtatctgatacggc

SEQ ID NO: 102430 - DNA, 17 bp, Arabidopsis thaliana
gcagtcacgatcaacca

SEQ ID NO: 102431 - DNA, 17 bp, Arabidopsis thaliana
gcagtcactttgtgaaa

SEQ ID NO: 102432 - DNA, 17 bp, Arabidopsis thaliana
gcagtcagggagtttca

SEQ ID NO: 102433 - DNA, 17 bp, Arabidopsis thaliana
gcagtcaggtttcctcg

SEQ ID NO: 102434 - DNA, 17 bp, Arabidopsis thaliana
gcagtcagttccaggag

SEQ ID NO: 102435 - DNA, 17 bp, Arabidopsis thaliana
gcagtccaaaccattgt

SEQ ID NO: 102436 - DNA, 17 bp, Arabidopsis thaliana
gcagtccagatcagttt

SEQ ID NO: 102437 - DNA, 17 bp, Arabidopsis thaliana
gcagtccgcctctgaga

SEQ ID NO: 102438 - DNA, 17 bp, Arabidopsis thaliana
gcagtccggatccagtg

SEQ ID NO: 102439 - DNA, 17 bp, Arabidopsis thaliana
gcagtccggatcggggc

SEQ ID NO: 102440 - DNA, 17 bp, Arabidopsis thaliana
gcagtcgaccaaactgg

SEQ ID NO: 102441 - DNA, 17 bp, Arabidopsis thaliana
gcagtcgactgacttcg

SEQ ID NO: 102442 - DNA, 17 bp, Arabidopsis thaliana
gcagtcgagtatccctg

SEQ ID NO: 102443 - DNA, 17 bp, Arabidopsis thaliana
gcagtcgcatcctgtag

SEQ ID NO: 102444 - DNA, 17 bp, Arabidopsis thaliana
gcagtcggtgcgccacg

SEQ ID NO: 102445 - DNA, 17 bp, Arabidopsis thaliana
gcagtcgtttgtgcggc

SEQ ID NO: 102446 - DNA, 17 bp, Arabidopsis thaliana
gcagtctacggttcgag

SEQ ID NO: 102447 - DNA, 17 bp, Arabidopsis thaliana
gcagtctcacaaccttt

SEQ ID NO: 102448 - DNA, 17 bp, Arabidopsis thaliana
gcagtctccttcgttgc

SEQ ID NO: 102449 - DNA, 17 bp, Arabidopsis thaliana
gcagtctccttggctat

SEQ ID NO: 102450 - DNA, 17 bp, Arabidopsis thaliana
gcagtctgcctgggtgt

SEQ ID NO: 102451 - DNA, 17 bp, Arabidopsis thaliana
gcagtcttagctcagtg

SEQ ID NO: 102452 - DNA, 17 bp, Arabidopsis thaliana
gcagtcttgaaggttgc

SEQ ID NO: 102453 - DNA, 17 bp, Arabidopsis thaliana
gcagtctttggcgatgg

SEQ ID NO: 102454 - DNA, 17 bp, Arabidopsis thaliana
gcagtgaagttctctcc

SEQ ID NO: 102455 - DNA, 17 bp, Arabidopsis thaliana
gcagtgaattcgtcatt

SEQ ID NO: 102456 - DNA, 17 bp, Arabidopsis thaliana
gcagtgaccaggcccgg

SEQ ID NO: 102457 - DNA, 17 bp, Arabidopsis thaliana
gcagtgacctgaagtgt

SEQ ID NO: 102458 - DNA, 17 bp, Arabidopsis thaliana
gcagtgactaattcagc

SEQ ID NO: 102459 - DNA, 17 bp, Arabidopsis thaliana
gcagtgactcgttcgag

SEQ ID NO: 102460 - DNA, 17 bp, Arabidopsis thaliana
gcagtgactgcaaccat

SEQ ID NO: 102461 - DNA, 17 bp, Arabidopsis thaliana
gcagtgatagcactccc

SEQ ID NO: 102462 - DNA, 17 bp, Arabidopsis thaliana
gcagtgatctaattagc

SEQ ID NO: 102463 - DNA, 17 bp, Arabidopsis thaliana
gcagtgattcttttgat

SEQ ID NO: 102464 - DNA, 17 bp, Arabidopsis thaliana
gcagtgattgtcgaaat

SEQ ID NO: 102465 - DNA, 17 bp, Arabidopsis thaliana
gcagtgatttttttgat

SEQ ID NO: 102466 - DNA, 17 bp, Arabidopsis thaliana
gcagtgcaggaaaaatg

SEQ ID NO: 102467 - DNA, 17 bp, Arabidopsis thaliana
gcagtgcaggaaaaatt

SEQ ID NO: 102468 - DNA, 17 bp, Arabidopsis thaliana
gcagtgcattggtcggc

SEQ ID NO: 102469 - DNA, 17 bp, Arabidopsis thaliana
gcagtgccagcagccgc

SEQ ID NO: 102470 - DNA, 17 bp, Arabidopsis thaliana
gcagtgccatctatggt

SEQ ID NO: 102471 - DNA, 17 bp, Arabidopsis thaliana
gcagtgcggttttgggt

SEQ ID NO: 102472 - DNA, 17 bp, Arabidopsis thaliana
gcagtgcgtatcgaccc

SEQ ID NO: 102473 - DNA, 17 bp, Arabidopsis thaliana
gcagtgctgtagctaac

SEQ ID NO: 102474 - DNA, 17 bp, Arabidopsis thaliana
gcagtggacacgaaaag

SEQ ID NO: 102475 - DNA, 17 bp, Arabidopsis thaliana
gcagtggaccatctgca

SEQ ID NO: 102476 - DNA, 17 bp, Arabidopsis thaliana
gcagtggacggatcacg

SEQ ID NO: 102477 - DNA, 17 bp, Arabidopsis thaliana
gcagtggattatgtctc

SEQ ID NO: 102478 - DNA, 17 bp, Arabidopsis thaliana
gcagtggcagttgaccg

SEQ ID NO: 102479 - DNA, 17 bp, Arabidopsis thaliana
gcagtgggctgcgccac

SEQ ID NO: 102480 - DNA, 17 bp, Arabidopsis thaliana
gcagtggtctaggcatt

SEQ ID NO: 102481 - DNA, 17 bp, Arabidopsis thaliana
gcagtggtggtgcatgg

SEQ ID NO: 102482 - DNA, 17 bp, Arabidopsis thaliana
gcagtgtaccgcgggcc

SEQ ID NO: 102483 - DNA, 17 bp, Arabidopsis thaliana
gcagtgtcagaccgtcc

SEQ ID NO: 102484 - DNA, 17 bp, Arabidopsis thaliana
gcagtgtccgcccaaat

SEQ ID NO: 102485 - DNA, 17 bp, Arabidopsis thaliana
gcagtgtgatttctgcc

SEQ ID NO: 102486 - DNA, 17 bp, Arabidopsis thaliana
gcagtgtgctactgtct

SEQ ID NO: 102487 - DNA, 17 bp, Arabidopsis thaliana
gcagtgtgttgtctgat

SEQ ID NO: 102488 - DNA, 17 bp, Arabidopsis thaliana
gcagtgttgtggcattt

SEQ ID NO: 102489 - DNA, 17 bp, Arabidopsis thaliana
gcagtgtttggtcggct

SEQ ID NO: 102490 - DNA, 17 bp, Arabidopsis thaliana
gcagttaagcgtcggtg

SEQ ID NO: 102491 - DNA, 17 bp, Arabidopsis thaliana
gcagttaagcgtgcatg

SEQ ID NO: 102492 - DNA, 17 bp, Arabidopsis thaliana
gcagttaagcgtgcttg

SEQ ID NO: 102493 - DNA, 17 bp, Arabidopsis thaliana
gcagttacctgttttat

SEQ ID NO: 102494 - DNA, 17 bp, Arabidopsis thaliana
gcagttacggaaaatga

SEQ ID NO: 102495 - DNA, 17 bp, Arabidopsis thaliana
gcagttagtccgacgaa

SEQ ID NO: 102496 - DNA, 17 bp, Arabidopsis thaliana
gcagttagtccgcagcg

SEQ ID NO: 102497 - DNA, 17 bp, Arabidopsis thaliana
gcagttcagtaaaccgt

SEQ ID NO: 102498 - DNA, 17 bp, Arabidopsis thaliana
gcagttcagtgcgaact

SEQ ID NO: 102499 - DNA, 17 bp, Arabidopsis thaliana
gcagttcgaccagtatt

SEQ ID NO: 102500 - DNA, 17 bp, Arabidopsis thaliana
gcagttcgactcccggt

SEQ ID NO: 102501 - DNA, 17 bp, Arabidopsis thaliana
gcagttcggctccagag

SEQ ID NO: 102502 - DNA, 17 bp, Arabidopsis thaliana
gcagttcgtgccccacg

SEQ ID NO: 102503 - DNA, 17 bp, Arabidopsis thaliana
gcagttctattctggac

SEQ ID NO: 102504 - DNA, 17 bp, Arabidopsis thaliana
gcagttcttttgttgtt

SEQ ID NO: 102505 - DNA, 17 bp, Arabidopsis thaliana
gcagttgaaaacgggtg

SEQ ID NO: 102506 - DNA, 17 bp, Arabidopsis thaliana
gcagttgaaccgcacgt

SEQ ID NO: 102507 - DNA, 17 bp, Arabidopsis thaliana
gcagttgaatcgcacgt

SEQ ID NO: 102508 - DNA, 17 bp, Arabidopsis thaliana
gcagttgcaggtggtag

SEQ ID NO: 102509 - DNA, 17 bp, Arabidopsis thaliana
gcagttgccatcaccca

SEQ ID NO: 102510 - DNA, 17 bp, Arabidopsis thaliana
gcagttggtgatgttgc

SEQ ID NO: 102511 - DNA, 17 bp, Arabidopsis thaliana
gcagttgtaacggcaag

SEQ ID NO: 102512 - DNA, 17 bp, Arabidopsis thaliana
gcagttgtaggatgtac

SEQ ID NO: 102513 - DNA, 17 bp, Arabidopsis thaliana
gcagttgtatgtcgtga

SEQ ID NO: 102514 - DNA, 17 bp, Arabidopsis thaliana
gcagttgttcgtttgac

SEQ ID NO: 102515 - DNA, 17 bp, Arabidopsis thaliana
gcagttgttcttgggct

SEQ ID NO: 102516 - DNA, 17 bp, Arabidopsis thaliana
gcagtttaagtcgtgat

SEQ ID NO: 102517 - DNA, 17 bp, Arabidopsis thaliana
gcagtttcttctgggtt

SEQ ID NO: 102518 - DNA, 17 bp, Arabidopsis thaliana
gcagtttgttaaccttg

SEQ ID NO: 102519 - DNA, 17 bp, Arabidopsis thaliana
gcagttttaggtgcggt

SEQ ID NO: 102520 - DNA, 17 bp, Arabidopsis thaliana
gcagttttgatcctagc

SEQ ID NO: 102521 - DNA, 17 bp, Arabidopsis thaliana
gcagttttggatgtggt

SEQ ID NO: 102522 - DNA, 17 bp, Arabidopsis thaliana
gcagttttgggtgcggt

SEQ ID NO: 102523 - DNA, 17 bp, Arabidopsis thaliana
gcagttttggttaccat

SEQ ID NO: 102524 - DNA, 17 bp, Arabidopsis thaliana
gcagtttttgacggcta

SEQ ID NO: 102525 - DNA, 17 bp, Arabidopsis thaliana
gcagtttttttacagga

SEQ ID NO: 102526 - DNA, 17 bp, Arabidopsis thaliana
gcataaactctggactt

SEQ ID NO: 102527 - DNA, 17 bp, Arabidopsis thaliana
gcataagcctgaggatt

SEQ ID NO: 102528 - DNA, 17 bp, Arabidopsis thaliana
gcataagtgatgtgatt

SEQ ID NO: 102529 - DNA, 17 bp, Arabidopsis thaliana
gcataatctctaagcgc

SEQ ID NO: 102530 - DNA, 17 bp, Arabidopsis thaliana
gcataattggcagtgac

SEQ ID NO: 102531 - DNA, 17 bp, Arabidopsis thaliana
gcataattgttgaggca

SEQ ID NO: 102532 - DNA, 17 bp, Arabidopsis thaliana
gcataatttggacttgg

SEQ ID NO: 102533 - DNA, 17 bp, Arabidopsis thaliana
gcatacatgcgtattca

SEQ ID NO: 102534 - DNA, 17 bp, Arabidopsis thaliana
gcatacattctgcattc

SEQ ID NO: 102535 - DNA, 17 bp, Arabidopsis thaliana
gcataccaaccgtcgga

SEQ ID NO: 102536 - DNA, 17 bp, Arabidopsis thaliana
gcataccagggcaactt

SEQ ID NO: 102537 - DNA, 17 bp, Arabidopsis thaliana
gcatacccacaagtaga

SEQ ID NO: 102538 - DNA, 17 bp, Arabidopsis thaliana
gcataccgttttgattg

SEQ ID NO: 102539 - DNA, 17 bp, Arabidopsis thaliana
gcatacctttcgcctct

SEQ ID NO: 102540 - DNA, 17 bp, Arabidopsis thaliana
gcatacctttggaattt

SEQ ID NO: 102541 - DNA, 17 bp, Arabidopsis thaliana
gcatacgaaagaatcta

SEQ ID NO: 102542 - DNA, 17 bp, Arabidopsis thaliana
gcatacttaccgttgac

SEQ ID NO: 102543 - DNA, 17 bp, Arabidopsis thaliana
gcatacttcttggttgt

SEQ ID NO: 102544 - DNA, 17 bp, Arabidopsis thaliana
gcatagattctttgcga

SEQ ID NO: 102545 - DNA, 17 bp, Arabidopsis thaliana
gcatagccgacctgaga

SEQ ID NO: 102546 - DNA, 17 bp, Arabidopsis thaliana
gcatagccgttcttcgt

SEQ ID NO: 102547 - DNA, 17 bp, Arabidopsis thaliana
gcatagcgtgatccatg

SEQ ID NO: 102548 - DNA, 17 bp, Arabidopsis thaliana
gcataggcacccattaa

SEQ ID NO: 102549 - DNA, 17 bp, Arabidopsis thaliana
gcataggcaggtccaaa

SEQ ID NO: 102550 - DNA, 17 bp, Arabidopsis thaliana
gcataggccacggtcgc

SEQ ID NO: 102551 - DNA, 17 bp, Arabidopsis thaliana
gcataggtccatcaagt

SEQ ID NO: 102552 - DNA, 17 bp, Arabidopsis thaliana
gcataggtctggactgc

SEQ ID NO: 102553 - DNA, 17 bp, Arabidopsis thaliana
gcataggttagacaggt

SEQ ID NO: 102554 - DNA, 17 bp, Arabidopsis thaliana
gcataggttagaccgtt

SEQ ID NO: 102555 - DNA, 17 bp, Arabidopsis thaliana
gcataggttcgtgacga

SEQ ID NO: 102556 - DNA, 17 bp, Arabidopsis thaliana
gcatagtgagaacctgt

SEQ ID NO: 102557 - DNA, 17 bp, Arabidopsis thaliana
gcatatcgatgtaggtt

SEQ ID NO: 102558 - DNA, 17 bp, Arabidopsis thaliana
gcatatcgggcggagca

SEQ ID NO: 102559 - DNA, 17 bp, Arabidopsis thaliana
gcatatcggttcctgaa

SEQ ID NO: 102560 - DNA, 17 bp, Arabidopsis thaliana
gcatatctctgtgagtg

SEQ ID NO: 102561 - DNA, 17 bp, Arabidopsis thaliana
gcatatgaccagttttg

SEQ ID NO: 102562 - DNA, 17 bp, Arabidopsis thaliana
gcatatgacggattatt

SEQ ID NO: 102563 - DNA, 17 bp, Arabidopsis thaliana
gcatatgcctgctttga

SEQ ID NO: 102564 - DNA, 17 bp, Arabidopsis thaliana
gcatatgctccacccac

SEQ ID NO: 102565 - DNA, 17 bp, Arabidopsis thaliana
gcatatgctccatccag

SEQ ID NO: 102566 - DNA, 17 bp, Arabidopsis thaliana
gcatatggccgtaattt

SEQ ID NO: 102567 - DNA, 17 bp, Arabidopsis thaliana
gcatatggtatggcgtc

SEQ ID NO: 102568 - DNA, 17 bp, Arabidopsis thaliana
gcatatggttgcctggc

SEQ ID NO: 102569 - DNA, 17 bp, Arabidopsis thaliana
gcatatgttgtgattct

SEQ ID NO: 102570 - DNA, 17 bp, Arabidopsis thaliana
gcatattagaccgcttt

SEQ ID NO: 102571 - DNA, 17 bp, Arabidopsis thaliana
gcatattagggcttgac

SEQ ID NO: 102572 - DNA, 17 bp, Arabidopsis thaliana
gcatattcaccctaatg

SEQ ID NO: 102573 - DNA, 17 bp, Arabidopsis thaliana
gcatattcagatttgcc

SEQ ID NO: 102574 - DNA, 17 bp, Arabidopsis thaliana
gcatattcagctcctgt

SEQ ID NO: 102575 - DNA, 17 bp, Arabidopsis thaliana
gcatattgatgtgcggc

SEQ ID NO: 102576 - DNA, 17 bp, Arabidopsis thaliana
gcatattgccaaaaaat

SEQ ID NO: 102577 - DNA, 17 bp, Arabidopsis thaliana
gcatattgctgactttg

SEQ ID NO: 102578 - DNA, 17 bp, Arabidopsis thaliana
gcatattggtgcggttc

SEQ ID NO: 102579 - DNA, 17 bp, Arabidopsis thaliana
gcatatttcactgtcca

SEQ ID NO: 102580 - DNA, 17 bp, Arabidopsis thaliana
gcatatttcgcaagata

SEQ ID NO: 102581 - DNA, 17 bp, Arabidopsis thaliana
gcatatttggttgagcg

SEQ ID NO: 102582 - DNA, 17 bp, Arabidopsis thaliana
gcatcaattcccgtcgg

SEQ ID NO: 102583 - DNA, 17 bp, Arabidopsis thaliana
gcatcagaactccgcag

SEQ ID NO: 102584 - DNA, 17 bp, Arabidopsis thaliana
gcatcagtgtgcataca

SEQ ID NO: 102585 - DNA, 17 bp, Arabidopsis thaliana
gcatcagtgtgcatact

SEQ ID NO: 102586 - DNA, 17 bp, Arabidopsis thaliana
gcatcagtgtgcatcag

SEQ ID NO: 102587 - DNA, 17 bp, Arabidopsis thaliana
gcatcatgttcgcagtt

SEQ ID NO: 102588 - DNA, 17 bp, Arabidopsis thaliana
gcatccatggctgaatg

SEQ ID NO: 102589 - DNA, 17 bp, Arabidopsis thaliana
gcatccctgtcgggacc

SEQ ID NO: 102590 - DNA, 17 bp, Arabidopsis thaliana
gcatcctaccagaagga

SEQ ID NO: 102591 - DNA, 17 bp, Arabidopsis thaliana
gcatcctatagatggat

SEQ ID NO: 102592 - DNA, 17 bp, Arabidopsis thaliana
gcatcctcagccagttt

SEQ ID NO: 102593 - DNA, 17 bp, Arabidopsis thaliana
gcatcctgtaaatcttg

SEQ ID NO: 102594 - DNA, 17 bp, Arabidopsis thaliana
gcatcctgtaattagcc

SEQ ID NO: 102595 - DNA, 17 bp, Arabidopsis thaliana
gcatcctgtagaatacg

SEQ ID NO: 102596 - DNA, 17 bp, Arabidopsis thaliana
gcatcctgtagagatgg

SEQ ID NO: 102597 - DNA, 17 bp, Arabidopsis thaliana
gcatcctgtagagggat

SEQ ID NO: 102598 - DNA, 17 bp, Arabidopsis thaliana
gcatcctgtagatactg

SEQ ID NO: 102599 - DNA, 17 bp, Arabidopsis thaliana
gcatcctgtagatatct

SEQ ID NO: 102600 - DNA, 17 bp, Arabidopsis thaliana
gcatcctgtagatcgat

SEQ ID NO: 102601 - DNA, 17 bp, Arabidopsis thaliana
gcatcctgtagatgaat

SEQ ID NO: 102602 - DNA, 17 bp, Arabidopsis thaliana
gcatcctgtagatgaca

SEQ ID NO: 102603 - DNA, 17 bp, Arabidopsis thaliana
gcatcctgtagatgatc

SEQ ID NO: 102604 - DNA, 17 bp, Arabidopsis thaliana
gcatcctgtagatgatg

SEQ ID NO: 102605 - DNA, 17 bp, Arabidopsis thaliana
gcatcctgtagatgcat

SEQ ID NO: 102606 - DNA, 17 bp, Arabidopsis thaliana
gcatcctgtagatggaa

SEQ ID NO: 102607 - DNA, 17 bp, Arabidopsis thaliana
gcatcctgtagatggac

SEQ ID NO: 102608 - DNA, 17 bp, Arabidopsis thaliana
gcatcctgtagatggag

SEQ ID NO: 102609 - DNA, 17 bp, Arabidopsis thaliana
gcatcctgtagatggat

SEQ ID NO: 102610 - DNA, 17 bp, Arabidopsis thaliana
gcatcctgtagatgggg

SEQ ID NO: 102611 - DNA, 17 bp, Arabidopsis thaliana
gcatcctgtagatggtc

SEQ ID NO: 102612 - DNA, 17 bp, Arabidopsis thaliana
gcatcctgtagatgtat

SEQ ID NO: 102613 - DNA, 17 bp, Arabidopsis thaliana
gcatcctgtagatgtct

SEQ ID NO: 102614 - DNA, 17 bp, Arabidopsis thaliana
gcatcctgtagattagc

SEQ ID NO: 102615 - DNA, 17 bp, Arabidopsis thaliana
gcatcctgtagattgga

SEQ ID NO: 102616 - DNA, 17 bp, Arabidopsis thaliana
gcatcctgtagcattcg

SEQ ID NO: 102617 - DNA, 17 bp, Arabidopsis thaliana
gcatcctgtaggtatgc

SEQ ID NO: 102618 - DNA, 17 bp, Arabidopsis thaliana
gcatcctgtagtatctt

SEQ ID NO: 102619 - DNA, 17 bp, Arabidopsis thaliana
gcatcctgtagtatgga

SEQ ID NO: 102620 - DNA, 17 bp, Arabidopsis thaliana
gcatcctgtagtggatc

SEQ ID NO: 102621 - DNA, 17 bp, Arabidopsis thaliana
gcatcctgtgatggaac

SEQ ID NO: 102622 - DNA, 17 bp, Arabidopsis thaliana
gcatcggcttgtccctt

SEQ ID NO: 102623 - DNA, 17 bp, Arabidopsis thaliana
gcatcggcttgtcttcg

SEQ ID NO: 102624 - DNA, 17 bp, Arabidopsis thaliana
gcatcggtcctgggcag

SEQ ID NO: 102625 - DNA, 17 bp, Arabidopsis thaliana
gcatctctagttgagga

SEQ ID NO: 102626 - DNA, 17 bp, Arabidopsis thaliana
gcatctgaaatttgggt

SEQ ID NO: 102627 - DNA, 17 bp, Arabidopsis thaliana
gcatctgcctgggtgtc

SEQ ID NO: 102628 - DNA, 17 bp, Arabidopsis thaliana
gcatctggtgtcctagg

SEQ ID NO: 102629 - DNA, 17 bp, Arabidopsis thaliana
gcatctgtagtccaacg

SEQ ID NO: 102630 - DNA, 17 bp, Arabidopsis thaliana
gcatgaaccacggtgtg

SEQ ID NO: 102631 - DNA, 17 bp, Arabidopsis thaliana
gcatgaactgcttgatt

SEQ ID NO: 102632 - DNA, 17 bp, Arabidopsis thaliana
gcatgaactttggacat

SEQ ID NO: 102633 - DNA, 17 bp, Arabidopsis thaliana
gcatgaatacttttggc

SEQ ID NO: 102634 - DNA, 17 bp, Arabidopsis thaliana
gcatgagctagtcaccg

SEQ ID NO: 102635 - DNA, 17 bp, Arabidopsis thaliana
gcatgatcgtctagatg

SEQ ID NO: 102636 - DNA, 17 bp, Arabidopsis thaliana
gcatgatgaccaggttt

SEQ ID NO: 102637 - DNA, 17 bp, Arabidopsis thaliana
gcatgatgaggattgtt

SEQ ID NO: 102638 - DNA, 17 bp, Arabidopsis thaliana
gcatgatgcggtacttc

SEQ ID NO: 102639 - DNA, 17 bp, Arabidopsis thaliana
gcatgatggaagtaggg

SEQ ID NO: 102640 - DNA, 17 bp, Arabidopsis thaliana
gcatgatgggatccggt

SEQ ID NO: 102641 - DNA, 17 bp, Arabidopsis thaliana
gcatgatgggtaaaggc

SEQ ID NO: 102642 - DNA, 17 bp, Arabidopsis thaliana
gcatgattttgttattg

SEQ ID NO: 102643 - DNA, 17 bp, Arabidopsis thaliana
gcatgcatttgccaagg

SEQ ID NO: 102644 - DNA, 17 bp, Arabidopsis thaliana
gcatgccgttagtgctg

SEQ ID NO: 102645 - DNA, 17 bp, Arabidopsis thaliana
gcatgcctgtcgggacc

SEQ ID NO: 102646 - DNA, 17 bp, Arabidopsis thaliana
gcatgcgatcataccag

SEQ ID NO: 102647 - DNA, 17 bp, Arabidopsis thaliana
gcatgcgcccgccgccc

SEQ ID NO: 102648 - DNA, 17 bp, Arabidopsis thaliana
gcatgcgcccgctgccc

SEQ ID NO: 102649 - DNA, 17 bp, Arabidopsis thaliana
gcatgcgcttctgtggt

SEQ ID NO: 102650 - DNA, 17 bp, Arabidopsis thaliana
gcatgctctcagaattg

SEQ ID NO: 102651 - DNA, 17 bp, Arabidopsis thaliana
gcatgcttccacctgtg

SEQ ID NO: 102652 - DNA, 17 bp, Arabidopsis thaliana
gcatggacccgagacat

SEQ ID NO: 102653 - DNA, 17 bp, Arabidopsis thaliana
gcatggagactgcggtt

SEQ ID NO: 102654 - DNA, 17 bp, Arabidopsis thaliana
gcatggagcgatttgtc

SEQ ID NO: 102655 - DNA, 17 bp, Arabidopsis thaliana
gcatggatcagattcat

SEQ ID NO: 102656 - DNA, 17 bp, Arabidopsis thaliana
gcatggatccgcctagg

SEQ ID NO: 102657 - DNA, 17 bp, Arabidopsis thaliana
gcatggattcgagggtt

SEQ ID NO: 102658 - DNA, 17 bp, Arabidopsis thaliana
gcatggccaattgacct

SEQ ID NO: 102659 - DNA, 17 bp, Arabidopsis thaliana
gcatggccgtgatacat

SEQ ID NO: 102660 - DNA, 17 bp, Arabidopsis thaliana
gcatggccgttcttact

SEQ ID NO: 102661 - DNA, 17 bp, Arabidopsis thaliana
gcatggccgttcttagt

SEQ ID NO: 102662 - DNA, 17 bp, Arabidopsis thaliana
gcatggccgttcttatt

SEQ ID NO: 102663 - DNA, 17 bp, Arabidopsis thaliana
gcatggcctctgtgctg

SEQ ID NO: 102664 - DNA, 17 bp, Arabidopsis thaliana
gcatggctgtcgtcagc

SEQ ID NO: 102665 - DNA, 17 bp, Arabidopsis thaliana
gcatgggataacatcat

SEQ ID NO: 102666 - DNA, 17 bp, Arabidopsis thaliana
gcatgggccttcctttt

SEQ ID NO: 102667 - DNA, 17 bp, Arabidopsis thaliana
gcatgggcgactcgcga

SEQ ID NO: 102668 - DNA, 17 bp, Arabidopsis thaliana
gcatgggcttggctcaa

SEQ ID NO: 102669 - DNA, 17 bp, Arabidopsis thaliana
gcatgggctttgtgata

SEQ ID NO: 102670 - DNA, 17 bp, Arabidopsis thaliana
gcatggtaaccgcggtt

SEQ ID NO: 102671 - DNA, 17 bp, Arabidopsis thaliana
gcatggtaggtctatgg

SEQ ID NO: 102672 - DNA, 17 bp, Arabidopsis thaliana
gcatggtcaggcggtgg

SEQ ID NO: 102673 - DNA, 17 bp, Arabidopsis thaliana
gcatggtctacagcaga

SEQ ID NO: 102674 - DNA, 17 bp, Arabidopsis thaliana
gcatggtgatttggttc

SEQ ID NO: 102675 - DNA, 17 bp, Arabidopsis thaliana
gcatggtttgattgtat

SEQ ID NO: 102676 - DNA, 17 bp, Arabidopsis thaliana
gcatgtagtaacgaatg

SEQ ID NO: 102677 - DNA, 17 bp, Arabidopsis thaliana
gcatgtagtcagtggcg

SEQ ID NO: 102678 - DNA, 17 bp, Arabidopsis thaliana
gcatgtcatgttgtacg

SEQ ID NO: 102679 - DNA, 17 bp, Arabidopsis thaliana
gcatgtccattgcagag

SEQ ID NO: 102680 - DNA, 17 bp, Arabidopsis thaliana
gcatgtccattgcaggg

SEQ ID NO: 102681 - DNA, 17 bp, Arabidopsis thaliana
gcatgtccctccagggt

SEQ ID NO: 102682 - DNA, 17 bp, Arabidopsis thaliana
gcatgtccgaaatggct

SEQ ID NO: 102683 - DNA, 17 bp, Arabidopsis thaliana
gcatgtccgaattggcc

SEQ ID NO: 102684 - DNA, 17 bp, Arabidopsis thaliana
gcatgtccgcaaatgaa

SEQ ID NO: 102685 - DNA, 17 bp, Arabidopsis thaliana
gcatgtcgggacccgaa

SEQ ID NO: 102686 - DNA, 17 bp, Arabidopsis thaliana
gcatgtcgttaagtttc

SEQ ID NO: 102687 - DNA, 17 bp, Arabidopsis thaliana
gcatgtctattttggcc

SEQ ID NO: 102688 - DNA, 17 bp, Arabidopsis thaliana
gcatgtctctggttttt

SEQ ID NO: 102689 - DNA, 17 bp, Arabidopsis thaliana
gcatgtctgaagattgg

SEQ ID NO: 102690 - DNA, 17 bp, Arabidopsis thaliana
gcatgtctgcctgggtg

SEQ ID NO: 102691 - DNA, 17 bp, Arabidopsis thaliana
gcatgtgacgatggtgc

SEQ ID NO: 102692 - DNA, 17 bp, Arabidopsis thaliana
gcatgtgcagtacacct

SEQ ID NO: 102693 - DNA, 17 bp, Arabidopsis thaliana
gcatgtgcattggtcgg

SEQ ID NO: 102694 - DNA, 17 bp, Arabidopsis thaliana
gcatgtgcccatcttca

SEQ ID NO: 102695 - DNA, 17 bp, Arabidopsis thaliana
gcatgtgctatggcttt

SEQ ID NO: 102696 - DNA, 17 bp, Arabidopsis thaliana
gcatgttcaaatcgtgt

SEQ ID NO: 102697 - DNA, 17 bp, Arabidopsis thaliana
gcatgttcacttaggac

SEQ ID NO: 102698 - DNA, 17 bp, Arabidopsis thaliana
gcatgttcattgcaggg

SEQ ID NO: 102699 - DNA, 17 bp, Arabidopsis thaliana
gcatgttctcgacctcg

SEQ ID NO: 102700 - DNA, 17 bp, Arabidopsis thaliana
gcatgttgtgattctga

SEQ ID NO: 102701 - DNA, 17 bp, Arabidopsis thaliana
gcattaacgattcgact

SEQ ID NO: 102702 - DNA, 17 bp, Arabidopsis thaliana
gcattaatgaacccttg

SEQ ID NO: 102703 - DNA, 17 bp, Arabidopsis thaliana
gcattacaacgtgagac

SEQ ID NO: 102704 - DNA, 17 bp, Arabidopsis thaliana
gcattacaacgtgcgac

SEQ ID NO: 102705 - DNA, 17 bp, Arabidopsis thaliana
gcattacacttgggtgc

SEQ ID NO: 102706 - DNA, 17 bp, Arabidopsis thaliana
gcattacataagggagt

SEQ ID NO: 102707 - DNA, 17 bp, Arabidopsis thaliana
gcattactcgaaccggc

SEQ ID NO: 102708 - DNA, 17 bp, Arabidopsis thaliana
gcattactggtggtgcg

SEQ ID NO: 102709 - DNA, 17 bp, Arabidopsis thaliana
gcattagaggagggctg

SEQ ID NO: 102710 - DNA, 17 bp, Arabidopsis thaliana
gcattagccatagttga

SEQ ID NO: 102711 - DNA, 17 bp, Arabidopsis thaliana
gcattagcgaaggctgc

SEQ ID NO: 102712 - DNA, 17 bp, Arabidopsis thaliana
gcattataccgcaggta

SEQ ID NO: 102713 - DNA, 17 bp, Arabidopsis thaliana
gcattatgatcccatct

SEQ ID NO: 102714 - DNA, 17 bp, Arabidopsis thaliana
gcattatgattccatca

SEQ ID NO: 102715 - DNA, 17 bp, Arabidopsis thaliana
gcattatgttcaggacg

SEQ ID NO: 102716 - DNA, 17 bp, Arabidopsis thaliana
gcattattacagtgcgg

SEQ ID NO: 102717 - DNA, 17 bp, Arabidopsis thaliana
gcattatttgatccgct

SEQ ID NO: 102718 - DNA, 17 bp, Arabidopsis thaliana
gcattcaactggtcgga

SEQ ID NO: 102719 - DNA, 17 bp, Arabidopsis thaliana
gcattcacccggggcaa

SEQ ID NO: 102720 - DNA, 17 bp, Arabidopsis thaliana
gcattcactggtgtgat

SEQ ID NO: 102721 - DNA, 17 bp, Arabidopsis thaliana
gcattcaggtttgcgat

SEQ ID NO: 102722 - DNA, 17 bp, Arabidopsis thaliana
gcattcagtgattgaca

SEQ ID NO: 102723 - DNA, 17 bp, Arabidopsis thaliana
gcattcataaccgcaaa

SEQ ID NO: 102724 - DNA, 17 bp, Arabidopsis thaliana
gcattcatcgctgctcc

SEQ ID NO: 102725 - DNA, 17 bp, Arabidopsis thaliana
gcattcatggtgtagcc

SEQ ID NO: 102726 - DNA, 17 bp, Arabidopsis thaliana
gcattcattgctgctcc

SEQ ID NO: 102727 - DNA, 17 bp, Arabidopsis thaliana
gcattcattgcttcgta

SEQ ID NO: 102728 - DNA, 17 bp, Arabidopsis thaliana
gcattccgatgaatcaa

SEQ ID NO: 102729 - DNA, 17 bp, Arabidopsis thaliana
gcattccggtcatatgg

SEQ ID NO: 102730 - DNA, 17 bp, Arabidopsis thaliana
gcattccggtcggtgaa

SEQ ID NO: 102731 - DNA, 17 bp, Arabidopsis thaliana
gcattccggttgcgggt

SEQ ID NO: 102732 - DNA, 17 bp, Arabidopsis thaliana
gcattcgatgtcttctt

SEQ ID NO: 102733 - DNA, 17 bp, Arabidopsis thaliana
gcattcgcggatctaca

SEQ ID NO: 102734 - DNA, 17 bp, Arabidopsis thaliana
gcattcggagttttgca

SEQ ID NO: 102735 - DNA, 17 bp, Arabidopsis thaliana
gcattcggccggaccgg

SEQ ID NO: 102736 - DNA, 17 bp, Arabidopsis thaliana
gcattcgggtcatatgg

SEQ ID NO: 102737 - DNA, 17 bp, Arabidopsis thaliana
gcattcggttcggcggt

SEQ ID NO: 102738 - DNA, 17 bp, Arabidopsis thaliana
gcattcgtcaaaatttt

SEQ ID NO: 102739 - DNA, 17 bp, Arabidopsis thaliana
gcattcgtcggtctagg

SEQ ID NO: 102740 - DNA, 17 bp, Arabidopsis thaliana
gcattcgtgatttgggc

SEQ ID NO: 102741 - DNA, 17 bp, Arabidopsis thaliana
gcattcgtgccccacgg

SEQ ID NO: 102742 - DNA, 17 bp, Arabidopsis thaliana
gcattctaggtcttgac

SEQ ID NO: 102743 - DNA, 17 bp, Arabidopsis thaliana
gcattctagtggtgaat

SEQ ID NO: 102744 - DNA, 17 bp, Arabidopsis thaliana
gcattctatcgattgcg

SEQ ID NO: 102745 - DNA, 17 bp, Arabidopsis thaliana
gcattctcagactccga

SEQ ID NO: 102746 - DNA, 17 bp, Arabidopsis thaliana
gcattctccactgtggt

SEQ ID NO: 102747 - DNA, 17 bp, Arabidopsis thaliana
gcattctcctgattctg

SEQ ID NO: 102748 - DNA, 17 bp, Arabidopsis thaliana
gcattctcttgtatgcg

SEQ ID NO: 102749 - DNA, 17 bp, Arabidopsis thaliana
gcattctctttttcaaa

SEQ ID NO: 102750 - DNA, 17 bp, Arabidopsis thaliana
gcattctgcctgggtgt

SEQ ID NO: 102751 - DNA, 17 bp, Arabidopsis thaliana
gcattctgtagatggat

SEQ ID NO: 102752 - DNA, 17 bp, Arabidopsis thaliana
gcattcttccacaagct

SEQ ID NO: 102753 - DNA, 17 bp, Arabidopsis thaliana
gcattcttctacaagct

SEQ ID NO: 102754 - DNA, 17 bp, Arabidopsis thaliana
gcattgacaagggttcg

SEQ ID NO: 102755 - DNA, 17 bp, Arabidopsis thaliana
gcattgactctagtccg

SEQ ID NO: 102756 - DNA, 17 bp, Arabidopsis thaliana
gcattgagaaggatcag

SEQ ID NO: 102757 - DNA, 17 bp, Arabidopsis thaliana
gcattgatagcacaaga

SEQ ID NO: 102758 - DNA, 17 bp, Arabidopsis thaliana
gcattgatggatgttct

SEQ ID NO: 102759 - DNA, 17 bp, Arabidopsis thaliana
gcattgattgcggatgg

SEQ ID NO: 102760 - DNA, 17 bp, Arabidopsis thaliana
gcattgcaacattgctg

SEQ ID NO: 102761 - DNA, 17 bp, Arabidopsis thaliana
gcattgcatggtgtgtt

SEQ ID NO: 102762 - DNA, 17 bp, Arabidopsis thaliana
gcattgccaaggatgta

SEQ ID NO: 102763 - DNA, 17 bp, Arabidopsis thaliana
gcattgccaaggatgtt

SEQ ID NO: 102764 - DNA, 17 bp, Arabidopsis thaliana
gcattgcgatggtccct

SEQ ID NO: 102765 - DNA, 17 bp, Arabidopsis thaliana
gcattgcgatggtcctt

SEQ ID NO: 102766 - DNA, 17 bp, Arabidopsis thaliana
gcattgcgatgttccct

SEQ ID NO: 102767 - DNA, 17 bp, Arabidopsis thaliana
gcattgcgattgtctag

SEQ ID NO: 102768 - DNA, 17 bp, Arabidopsis thaliana
gcattggacatggatag

SEQ ID NO: 102769 - DNA, 17 bp, Arabidopsis thaliana
gcattggattgtgacac

SEQ ID NO: 102770 - DNA, 17 bp, Arabidopsis thaliana
gcattgggggcgcaacg

SEQ ID NO: 102771 - DNA, 17 bp, Arabidopsis thaliana
gcattggggtgttcttg

SEQ ID NO: 102772 - DNA, 17 bp, Arabidopsis thaliana
gcattgggttgtaaata

SEQ ID NO: 102773 - DNA, 17 bp, Arabidopsis thaliana
gcattggtcggctcgtc

SEQ ID NO: 102774 - DNA, 17 bp, Arabidopsis thaliana
gcattggtcggcttgcc

SEQ ID NO: 102775 - DNA, 17 bp, Arabidopsis thaliana
gcattggtcggcttgtc

SEQ ID NO: 102776 - DNA, 17 bp, Arabidopsis thaliana
gcattggtgaatgagtt

SEQ ID NO: 102777 - DNA, 17 bp, Arabidopsis thaliana
gcattggtgataggtcg

SEQ ID NO: 102778 - DNA, 17 bp, Arabidopsis thaliana
gcattggttgccattgg

SEQ ID NO: 102779 - DNA, 17 bp, Arabidopsis thaliana
gcattggttggtgtaac

SEQ ID NO: 102780 - DNA, 17 bp, Arabidopsis thaliana
gcattggttgtggcttt

SEQ ID NO: 102781 - DNA, 17 bp, Arabidopsis thaliana
gcattggtttgctaaat

SEQ ID NO: 102782 - DNA, 17 bp, Arabidopsis thaliana
gcattgtacagttcggt

SEQ ID NO: 102783 - DNA, 17 bp, Arabidopsis thaliana
gcattgtactttatccg

SEQ ID NO: 102784 - DNA, 17 bp, Arabidopsis thaliana
gcattgtatcatgttgg

SEQ ID NO: 102785 - DNA, 17 bp, Arabidopsis thaliana
gcattgtatgtgcttgg

SEQ ID NO: 102786 - DNA, 17 bp, Arabidopsis thaliana
gcattgtcgaaggtgct

SEQ ID NO: 102787 - DNA, 17 bp, Arabidopsis thaliana
gcattgtgtgcaatact

SEQ ID NO: 102788 - DNA, 17 bp, Arabidopsis thaliana
gcattgttaccggatct

SEQ ID NO: 102789 - DNA, 17 bp, Arabidopsis thaliana
gcattgttctaatcttc

SEQ ID NO: 102790 - DNA, 17 bp, Arabidopsis thaliana
gcattgttctgatcttc

SEQ ID NO: 102791 - DNA, 17 bp, Arabidopsis thaliana
gcattgtttccacgctt

SEQ ID NO: 102792 - DNA, 17 bp, Arabidopsis thaliana
gcatttaaatccagagg

SEQ ID NO: 102793 - DNA, 17 bp, Arabidopsis thaliana
gcatttaagatctggtt

SEQ ID NO: 102794 - DNA, 17 bp, Arabidopsis thaliana
gcatttatagttggtga

SEQ ID NO: 102795 - DNA, 17 bp, Arabidopsis thaliana
gcatttatagttggtta

SEQ ID NO: 102796 - DNA, 17 bp, Arabidopsis thaliana
gcatttcaaaatgaagt

SEQ ID NO: 102797 - DNA, 17 bp, Arabidopsis thaliana
gcatttcaaattcggaa

SEQ ID NO: 102798 - DNA, 17 bp, Arabidopsis thaliana
gcatttcatccgcaggt

SEQ ID NO: 102799 - DNA, 17 bp, Arabidopsis thaliana
gcatttcatccgcagtt

SEQ ID NO: 102800 - DNA, 17 bp, Arabidopsis thaliana
gcatttccacatcttag

SEQ ID NO: 102801 - DNA, 17 bp, Arabidopsis thaliana
gcatttccatccatggg

SEQ ID NO: 102802 - DNA, 17 bp, Arabidopsis thaliana
gcatttccgtgctgcgt

SEQ ID NO: 102803 - DNA, 17 bp, Arabidopsis thaliana
gcatttcctgactggtc

SEQ ID NO: 102804 - DNA, 17 bp, Arabidopsis thaliana
gcatttccttgatgtgg

SEQ ID NO: 102805 - DNA, 17 bp, Arabidopsis thaliana
gcatttccttgggtgac

SEQ ID NO: 102806 - DNA, 17 bp, Arabidopsis thaliana
gcatttcgattagggtc

SEQ ID NO: 102807 - DNA, 17 bp, Arabidopsis thaliana
gcatttcgtctagtggt

SEQ ID NO: 102808 - DNA, 17 bp, Arabidopsis thaliana
gcatttcgtgttgccta

SEQ ID NO: 102809 - DNA, 17 bp, Arabidopsis thaliana
gcatttcgtttagtctt

SEQ ID NO: 102810 - DNA, 17 bp, Arabidopsis thaliana
gcatttctacctgaccg

SEQ ID NO: 102811 - DNA, 17 bp, Arabidopsis thaliana
gcatttctcggctgttc

SEQ ID NO: 102812 - DNA, 17 bp, Arabidopsis thaliana
gcatttctcgtcgatga

SEQ ID NO: 102813 - DNA, 17 bp, Arabidopsis thaliana
gcatttctgactaccag

SEQ ID NO: 102814 - DNA, 17 bp, Arabidopsis thaliana
gcatttctgccgaggct

SEQ ID NO: 102815 - DNA, 17 bp, Arabidopsis thaliana
gcatttcttggtgcaaa

SEQ ID NO: 102816 - DNA, 17 bp, Arabidopsis thaliana
gcatttcttttgttgct

SEQ ID NO: 102817 - DNA, 17 bp, Arabidopsis thaliana
gcatttgaccacatgag

SEQ ID NO: 102818 - DNA, 17 bp, Arabidopsis thaliana
gcatttgactgcagatc

SEQ ID NO: 102819 - DNA, 17 bp, Arabidopsis thaliana
gcatttgagatacacaa

SEQ ID NO: 102820 - DNA, 17 bp, Arabidopsis thaliana
gcatttgccaaggatgt

SEQ ID NO: 102821 - DNA, 17 bp, Arabidopsis thaliana
gcatttgccatggatgt

SEQ ID NO: 102822 - DNA, 17 bp, Arabidopsis thaliana
gcatttgccttctcgct

SEQ ID NO: 102823 - DNA, 17 bp, Arabidopsis thaliana
gcatttgcttatcaacg

SEQ ID NO: 102824 - DNA, 17 bp, Arabidopsis thaliana
gcatttggactgggcaa

SEQ ID NO: 102825 - DNA, 17 bp, Arabidopsis thaliana
gcatttggagattatta

SEQ ID NO: 102826 - DNA, 17 bp, Arabidopsis thaliana
gcatttggagattattg

SEQ ID NO: 102827 - DNA, 17 bp, Arabidopsis thaliana
gcatttggagtgtttta

SEQ ID NO: 102828 - DNA, 17 bp, Arabidopsis thaliana
gcatttgggacccaaag

SEQ ID NO: 102829 - DNA, 17 bp, Arabidopsis thaliana
gcatttggtctagtggt

SEQ ID NO: 102830 - DNA, 17 bp, Arabidopsis thaliana
gcatttggttagtgtct

SEQ ID NO: 102831 - DNA, 17 bp, Arabidopsis thaliana
gcatttgtgatcgtggt

SEQ ID NO: 102832 - DNA, 17 bp, Arabidopsis thaliana
gcatttgttttgaaagg

SEQ ID NO: 102833 - DNA, 17 bp, Arabidopsis thaliana
gcattttaagtgggtga

SEQ ID NO: 102834 - DNA, 17 bp, Arabidopsis thaliana
gcattttatctgcagtt

SEQ ID NO: 102835 - DNA, 17 bp, Arabidopsis thaliana
gcattttattctcagct

SEQ ID NO: 102836 - DNA, 17 bp, Arabidopsis thaliana
gcattttcacgtctgcc

SEQ ID NO: 102837 - DNA, 17 bp, Arabidopsis thaliana
gcattttcgtaattggg

SEQ ID NO: 102838 - DNA, 17 bp, Arabidopsis thaliana
gcattttcgtgattggg

SEQ ID NO: 102839 - DNA, 17 bp, Arabidopsis thaliana
gcattttcgtgatttag

SEQ ID NO: 102840 - DNA, 17 bp, Arabidopsis thaliana
gcattttcgtgatttga

SEQ ID NO: 102841 - DNA, 17 bp, Arabidopsis thaliana
gcattttcgtgatttgc

SEQ ID NO: 102842 - DNA, 17 bp, Arabidopsis thaliana
gcattttcgtgatttgg

SEQ ID NO: 102843 - DNA, 17 bp, Arabidopsis thaliana
gcattttcgtgatttgt

SEQ ID NO: 102844 - DNA, 17 bp, Arabidopsis thaliana
gcattttcgtgattttg

SEQ ID NO: 102845 - DNA, 17 bp, Arabidopsis thaliana
gcattttcgtgtgcagg

SEQ ID NO: 102846 - DNA, 17 bp, Arabidopsis thaliana
gcattttctttgtatgt

SEQ ID NO: 102847 - DNA, 17 bp, Arabidopsis thaliana
gcattttgaccttggct

SEQ ID NO: 102848 - DNA, 17 bp, Arabidopsis thaliana
gcatttttagatcagtt

SEQ ID NO: 102849 - DNA, 17 bp, Arabidopsis thaliana
gcatttttcctaaatcg

SEQ ID NO: 102850 - DNA, 17 bp, Arabidopsis thaliana
gcatttttgtgatttgg

SEQ ID NO: 102851 - DNA, 17 bp, Arabidopsis thaliana
gcattttttggacgtgg

SEQ ID NO: 102852 - DNA, 17 bp, Arabidopsis thaliana
gccaaaaacaccgcgac

SEQ ID NO: 102853 - DNA, 17 bp, Arabidopsis thaliana
gccaaaaagtccggggg

SEQ ID NO: 102854 - DNA, 17 bp, Arabidopsis thaliana
gccaaaaccgcgattta

SEQ ID NO: 102855 - DNA, 17 bp, Arabidopsis thaliana
gccaaaaccggcatgag

SEQ ID NO: 102856 - DNA, 17 bp, Arabidopsis thaliana
gccaaaacgtttatggc

SEQ ID NO: 102857 - DNA, 17 bp, Arabidopsis thaliana
gccaaaactgcttatat

SEQ ID NO: 102858 - DNA, 17 bp, Arabidopsis thaliana
gccaaaatagacatgcc

SEQ ID NO: 102859 - DNA, 17 bp, Arabidopsis thaliana
gccaaaatgtttttttc

SEQ ID NO: 102860 - DNA, 17 bp, Arabidopsis thaliana
gccaaaattcacgctca

SEQ ID NO: 102861 - DNA, 17 bp, Arabidopsis thaliana
gccaaaattggcttggt

SEQ ID NO: 102862 - DNA, 17 bp, Arabidopsis thaliana
gccaaaatttctgtagc

SEQ ID NO: 102863 - DNA, 17 bp, Arabidopsis thaliana
gccaaacccgtcccgcc

SEQ ID NO: 102864 - DNA, 17 bp, Arabidopsis thaliana
gccaaacccgtcccgct

SEQ ID NO: 102865 - DNA, 17 bp, Arabidopsis thaliana
gccaaaccgtgatccat

SEQ ID NO: 102866 - DNA, 17 bp, Arabidopsis thaliana
gccaaaccgtgatccgt

SEQ ID NO: 102867 - DNA, 17 bp, Arabidopsis thaliana
gccaaacgataaatctc

SEQ ID NO: 102868 - DNA, 17 bp, Arabidopsis thaliana
gccaaacttggcatgta

SEQ ID NO: 102869 - DNA, 17 bp, Arabidopsis thaliana
gccaaacttggcatgtg

SEQ ID NO: 102870 - DNA, 17 bp, Arabidopsis thaliana
gccaaagactcgagaat

SEQ ID NO: 102871 - DNA, 17 bp, Arabidopsis thaliana
gccaaagaggaaatcaa

SEQ ID NO: 102872 - DNA, 17 bp, Arabidopsis thaliana
gccaaagcccgtaatct

SEQ ID NO: 102873 - DNA, 17 bp, Arabidopsis thaliana
gccaaagccgaagagga

SEQ ID NO: 102874 - DNA, 17 bp, Arabidopsis thaliana
gccaaagctaagccaag

SEQ ID NO: 102875 - DNA, 17 bp, Arabidopsis thaliana
gccaaaggagagttgcc

SEQ ID NO: 102876 - DNA, 17 bp, Arabidopsis thaliana
gccaaaggagatttgcc

SEQ ID NO: 102877 - DNA, 17 bp, Arabidopsis thaliana
gccaaagggaacgggct

SEQ ID NO: 102878 - DNA, 17 bp, Arabidopsis thaliana
gccaaagggtgttgctg

SEQ ID NO: 102879 - DNA, 17 bp, Arabidopsis thaliana
gccaaagggttgaaaag

SEQ ID NO: 102880 - DNA, 17 bp, Arabidopsis thaliana
gccaaagtgactatttt

SEQ ID NO: 102881 - DNA, 17 bp, Arabidopsis thaliana
gccaaagtggctaataa

SEQ ID NO: 102882 - DNA, 17 bp, Arabidopsis thaliana
gccaaagtggctgataa

SEQ ID NO: 102883 - DNA, 17 bp, Arabidopsis thaliana
gccaaagtgtcctcgcg

SEQ ID NO: 102884 - DNA, 17 bp, Arabidopsis thaliana
gccaaagtttcagggag

SEQ ID NO: 102885 - DNA, 17 bp, Arabidopsis thaliana
gccaaagtttgcaaagt

SEQ ID NO: 102886 - DNA, 17 bp, Arabidopsis thaliana
gccaaatagtatgtacg

SEQ ID NO: 102887 - DNA, 17 bp, Arabidopsis thaliana
gccaaatgcctcgtcat

SEQ ID NO: 102888 - DNA, 17 bp, Arabidopsis thaliana
gccaaatgttaaaacgg

SEQ ID NO: 102889 - DNA, 17 bp, Arabidopsis thaliana
gccaaattatccgcttt

SEQ ID NO: 102890 - DNA, 17 bp, Arabidopsis thaliana
gccaacaagtgtgactg

SEQ ID NO: 102891 - DNA, 17 bp, Arabidopsis thaliana
gccaacaatggagcccg

SEQ ID NO: 102892 - DNA, 17 bp, Arabidopsis thaliana
gccaacaggttcagagt

SEQ ID NO: 102893 - DNA, 17 bp, Arabidopsis thaliana
gccaacagttctgtcag

SEQ ID NO: 102894 - DNA, 17 bp, Arabidopsis thaliana
gccaaccggatcttaaa

SEQ ID NO: 102895 - DNA, 17 bp, Arabidopsis thaliana
gccaacctatggtgtac

SEQ ID NO: 102896 - DNA, 17 bp, Arabidopsis thaliana
gccaactaagcacattt

SEQ ID NO: 102897 - DNA, 17 bp, Arabidopsis thaliana
gccaactcacctttgta

SEQ ID NO: 102898 - DNA, 17 bp, Arabidopsis thaliana
gccaactcagaatgagc

SEQ ID NO: 102899 - DNA, 17 bp, Arabidopsis thaliana
gccaactcagccaacgt

SEQ ID NO: 102900 - DNA, 17 bp, Arabidopsis thaliana
gccaactctccccattt

SEQ ID NO: 102901 - DNA, 17 bp, Arabidopsis thaliana
gccaactctctctatat

SEQ ID NO: 102902 - DNA, 17 bp, Arabidopsis thaliana
gccaacttaacctcggt

SEQ ID NO: 102903 - DNA, 17 bp, Arabidopsis thaliana
gccaacttggcatgtga

SEQ ID NO: 102904 - DNA, 17 bp, Arabidopsis thaliana
gccaactttcttcgtat

SEQ ID NO: 102905 - DNA, 17 bp, Arabidopsis thaliana
gccaagactgtttgctc

SEQ ID NO: 102906 - DNA, 17 bp, Arabidopsis thaliana
gccaagagttccggtat

SEQ ID NO: 102907 - DNA, 17 bp, Arabidopsis thaliana
gccaagcactgggtgtg

SEQ ID NO: 102908 - DNA, 17 bp, Arabidopsis thaliana
gccaagcgaatgatgat

SEQ ID NO: 102909 - DNA, 17 bp, Arabidopsis thaliana
gccaagcggtaaggcaa

SEQ ID NO: 102910 - DNA, 17 bp, Arabidopsis thaliana
gccaagcggtgacttct

SEQ ID NO: 102911 - DNA, 17 bp, Arabidopsis thaliana
gccaagcgttcatagcg

SEQ ID NO: 102912 - DNA, 17 bp, Arabidopsis thaliana
gccaaggacgggtggct

SEQ ID NO: 102913 - DNA, 17 bp, Arabidopsis thaliana
gccaaggatcgatgaat

SEQ ID NO: 102914 - DNA, 17 bp, Arabidopsis thaliana
gccaaggatcgatgagt

SEQ ID NO: 102915 - DNA, 17 bp, Arabidopsis thaliana
gccaaggatcgcttgct

SEQ ID NO: 102916 - DNA, 17 bp, Arabidopsis thaliana
gccaaggatgacttgcc

SEQ ID NO: 102917 - DNA, 17 bp, Arabidopsis thaliana
gccaaggatgacttgct

SEQ ID NO: 102918 - DNA, 17 bp, Arabidopsis thaliana
gccaaggatgatttgcc

SEQ ID NO: 102919 - DNA, 17 bp, Arabidopsis thaliana
gccaaggatgttttcat

SEQ ID NO: 102920 - DNA, 17 bp, Arabidopsis thaliana
gccaaggattgggtgca

SEQ ID NO: 102921 - DNA, 17 bp, Arabidopsis thaliana
gccaaggcggcggctta

SEQ ID NO: 102922 - DNA, 17 bp, Arabidopsis thaliana
gccaagggacagtctca

SEQ ID NO: 102923 - DNA, 17 bp, Arabidopsis thaliana
gccaagggataatcaga

SEQ ID NO: 102924 - DNA, 17 bp, Arabidopsis thaliana
gccaagggcacgtctgc

SEQ ID NO: 102925 - DNA, 17 bp, Arabidopsis thaliana
gccaagggtcgcttact

SEQ ID NO: 102926 - DNA, 17 bp, Arabidopsis thaliana
gccaagtaccgccaagt

SEQ ID NO: 102927 - DNA, 17 bp, Arabidopsis thaliana
gccaagtactttccgca

SEQ ID NO: 102928 - DNA, 17 bp, Arabidopsis thaliana
gccaagtatctgggaaa

SEQ ID NO: 102929 - DNA, 17 bp, Arabidopsis thaliana
gccaagtcatcacaggc

SEQ ID NO: 102930 - DNA, 17 bp, Arabidopsis thaliana
gccaagtcccgccaccc

SEQ ID NO: 102931 - DNA, 17 bp, Arabidopsis thaliana
gccaagtcccgccactt

SEQ ID NO: 102932 - DNA, 17 bp, Arabidopsis thaliana
gccaagtcggcgcaggc

SEQ ID NO: 102933 - DNA, 17 bp, Arabidopsis thaliana
gccaagtgaatagacat

SEQ ID NO: 102934 - DNA, 17 bp, Arabidopsis thaliana
gccaagtgaatagacct

SEQ ID NO: 102935 - DNA, 17 bp, Arabidopsis thaliana
gccaagtgactacatcg

SEQ ID NO: 102936 - DNA, 17 bp, Arabidopsis thaliana
gccaagtgcggcttgtg

SEQ ID NO: 102937 - DNA, 17 bp, Arabidopsis thaliana
gccaagttggacggtcc

SEQ ID NO: 102938 - DNA, 17 bp, Arabidopsis thaliana
gccaagtttggcctcac

SEQ ID NO: 102939 - DNA, 17 bp, Arabidopsis thaliana
gccaagtttggcttcac

SEQ ID NO: 102940 - DNA, 17 bp, Arabidopsis thaliana
gccaagtttgggcctgt

SEQ ID NO: 102941 - DNA, 17 bp, Arabidopsis thaliana
gccaagtttgggctcac

SEQ ID NO: 102942 - DNA, 17 bp, Arabidopsis thaliana
gccaagttttgcattca

SEQ ID NO: 102943 - DNA, 17 bp, Arabidopsis thaliana
gccaagttttgcctcac

SEQ ID NO: 102944 - DNA, 17 bp, Arabidopsis thaliana
gccaatactatccctgt

SEQ ID NO: 102945 - DNA, 17 bp, Arabidopsis thaliana
gccaatagcacaacggg

SEQ ID NO: 102946 - DNA, 17 bp, Arabidopsis thaliana
gccaatatggatttgct

SEQ ID NO: 102947 - DNA, 17 bp, Arabidopsis thaliana
gccaatatgtccgagtg

SEQ ID NO: 102948 - DNA, 17 bp, Arabidopsis thaliana
gccaatcctctgcaact

SEQ ID NO: 102949 - DNA, 17 bp, Arabidopsis thaliana
gccaatctgaactgaaa

SEQ ID NO: 102950 - DNA, 17 bp, Arabidopsis thaliana
gccaatctttgagatag

SEQ ID NO: 102951 - DNA, 17 bp, Arabidopsis thaliana
gccaatgacctgcttcg

SEQ ID NO: 102952 - DNA, 17 bp, Arabidopsis thaliana
gccaatgaggatcaggc

SEQ ID NO: 102953 - DNA, 17 bp, Arabidopsis thaliana
gccaatggaaatgatct

SEQ ID NO: 102954 - DNA, 17 bp, Arabidopsis thaliana
gccaatgtactccatca

SEQ ID NO: 102955 - DNA, 17 bp, Arabidopsis thaliana
gccaatgtccgagtggt

SEQ ID NO: 102956 - DNA, 17 bp, Arabidopsis thaliana
gccaatgttcgagtacc

SEQ ID NO: 102957 - DNA, 17 bp, Arabidopsis thaliana
gccaattctcagtagcg

SEQ ID NO: 102958 - DNA, 17 bp, Arabidopsis thaliana
gccaattgggtgtttgt

SEQ ID NO: 102959 - DNA, 17 bp, Arabidopsis thaliana
gccaatttacttgtgtt

SEQ ID NO: 102960 - DNA, 17 bp, Arabidopsis thaliana
gccaattttccggtgac

SEQ ID NO: 102961 - DNA, 17 bp, Arabidopsis thaliana
gccacaacacctatcag

SEQ ID NO: 102962 - DNA, 17 bp, Arabidopsis thaliana
gccacaacctgcagaac

SEQ ID NO: 102963 - DNA, 17 bp, Arabidopsis thaliana
gccacaagaccgaacta

SEQ ID NO: 102964 - DNA, 17 bp, Arabidopsis thaliana
gccacaagaccgaagta

SEQ ID NO: 102965 - DNA, 17 bp, Arabidopsis thaliana
gccacaaggatgttttt

SEQ ID NO: 102966 - DNA, 17 bp, Arabidopsis thaliana
gccacaagtagttttgc

SEQ ID NO: 102967 - DNA, 17 bp, Arabidopsis thaliana
gccacaatatgatgact

SEQ ID NO: 102968 - DNA, 17 bp, Arabidopsis thaliana
gccacaatgtcggctga

SEQ ID NO: 102969 - DNA, 17 bp, Arabidopsis thaliana
gccacaattccgtcaag

SEQ ID NO: 102970 - DNA, 17 bp, Arabidopsis thaliana
gccacactgggactgag

SEQ ID NO: 102971 - DNA, 17 bp, Arabidopsis thaliana
gccacagagctgatgag

SEQ ID NO: 102972 - DNA, 17 bp, Arabidopsis thaliana
gccacagaggtgattac

SEQ ID NO: 102973 - DNA, 17 bp, Arabidopsis thaliana
gccacagattcctacta

SEQ ID NO: 102974 - DNA, 17 bp, Arabidopsis thaliana
gccacagattgcctaat

SEQ ID NO: 102975 - DNA, 17 bp, Arabidopsis thaliana
gccacagctgccacaaa

SEQ ID NO: 102976 - DNA, 17 bp, Arabidopsis thaliana
gccacaggaagcagccc

SEQ ID NO: 102977 - DNA, 17 bp, Arabidopsis thaliana
gccacagtccgcagatg

SEQ ID NO: 102978 - DNA, 17 bp, Arabidopsis thaliana
gccacatcatcttgaga

SEQ ID NO: 102979 - DNA, 17 bp, Arabidopsis thaliana
gccacatctgcctgggt

SEQ ID NO: 102980 - DNA, 17 bp, Arabidopsis thaliana
gccacatttccgcgacg

SEQ ID NO: 102981 - DNA, 17 bp, Arabidopsis thaliana
gccaccaccaccaccaa

SEQ ID NO: 102982 - DNA, 17 bp, Arabidopsis thaliana
gccaccaccaggagtgg

SEQ ID NO: 102983 - DNA, 17 bp, Arabidopsis thaliana
gccaccaccgacgcagc

SEQ ID NO: 102984 - DNA, 17 bp, Arabidopsis thaliana
gccaccaggcttcattc

SEQ ID NO: 102985 - DNA, 17 bp, Arabidopsis thaliana
gccaccccaagatgagt

SEQ ID NO: 102986 - DNA, 17 bp, Arabidopsis thaliana
gccaccccaggtcaggc

SEQ ID NO: 102987 - DNA, 17 bp, Arabidopsis thaliana
gccaccgttgagtttgg

SEQ ID NO: 102988 - DNA, 17 bp, Arabidopsis thaliana
gccaccgttgatcgtcg

SEQ ID NO: 102989 - DNA, 17 bp, Arabidopsis thaliana
gccacctaagcaaagat

SEQ ID NO: 102990 - DNA, 17 bp, Arabidopsis thaliana
gccacctactaagatta

SEQ ID NO: 102991 - DNA, 17 bp, Arabidopsis thaliana
gccacctatgtcaccaa

SEQ ID NO: 102992 - DNA, 17 bp, Arabidopsis thaliana
gccacctcgatgtcggc

SEQ ID NO: 102993 - DNA, 17 bp, Arabidopsis thaliana
gccacctcgccaagagc

SEQ ID NO: 102994 - DNA, 17 bp, Arabidopsis thaliana
gccacctgcggaaggat

SEQ ID NO: 102995 - DNA, 17 bp, Arabidopsis thaliana
gccacctggggctgtag

SEQ ID NO: 102996 - DNA, 17 bp, Arabidopsis thaliana
gccacgagaccggagaa

SEQ ID NO: 102997 - DNA, 17 bp, Arabidopsis thaliana
gccacgagcaaatctat

SEQ ID NO: 102998 - DNA, 17 bp, Arabidopsis thaliana
gccacgatccaatgaga

SEQ ID NO: 102999 - DNA, 17 bp, Arabidopsis thaliana
gccacgatccaccgaga

SEQ ID NO: 103000 - DNA, 17 bp, Arabidopsis thaliana
gccacgatccactgaaa

SEQ ID NO: 103001 - DNA, 17 bp, Arabidopsis thaliana
gccacgatccactgaga

SEQ ID NO: 103002 - DNA, 17 bp, Arabidopsis thaliana
gccacgattcaatcttg

SEQ ID NO: 103003 - DNA, 17 bp, Arabidopsis thaliana
gccacgattttgtagtt

SEQ ID NO: 103004 - DNA, 17 bp, Arabidopsis thaliana
gccacgcggattacggt

SEQ ID NO: 103005 - DNA, 17 bp, Arabidopsis thaliana
gccacgcttgtactccc

SEQ ID NO: 103006 - DNA, 17 bp, Arabidopsis thaliana
gccacgcttgtacttcc

SEQ ID NO: 103007 - DNA, 17 bp, Arabidopsis thaliana
gccacggagtctctgat

SEQ ID NO: 103008 - DNA, 17 bp, Arabidopsis thaliana
gccacggctgagttata

SEQ ID NO: 103009 - DNA, 17 bp, Arabidopsis thaliana
gccacgggtttggctgg

SEQ ID NO: 103010 - DNA, 17 bp, Arabidopsis thaliana
gccacggtacagacccg

SEQ ID NO: 103011 - DNA, 17 bp, Arabidopsis thaliana
gccacggtgtcgctgac

SEQ ID NO: 103012 - DNA, 17 bp, Arabidopsis thaliana
gccacggttcatcactt

SEQ ID NO: 103013 - DNA, 17 bp, Arabidopsis thaliana
gccacgtcatttgttat

SEQ ID NO: 103014 - DNA, 17 bp, Arabidopsis thaliana
gccacgtctcaccgtcc

SEQ ID NO: 103015 - DNA, 17 bp, Arabidopsis thaliana
gccacgtctccctgggt

SEQ ID NO: 103016 - DNA, 17 bp, Arabidopsis thaliana
gccacgtctgcctggct

SEQ ID NO: 103017 - DNA, 17 bp, Arabidopsis thaliana
gccacgtctgcctgggt

SEQ ID NO: 103018 - DNA, 17 bp, Arabidopsis thaliana
gccacgtctgcctgtgt

SEQ ID NO: 103019 - DNA, 17 bp, Arabidopsis thaliana
gccacgtcttcctgggt

SEQ ID NO: 103020 - DNA, 17 bp, Arabidopsis thaliana
gccacgtgtcaagtcta

SEQ ID NO: 103021 - DNA, 17 bp, Arabidopsis thaliana
gccacgttggctttagg

SEQ ID NO: 103022 - DNA, 17 bp, Arabidopsis thaliana
gccactaaaaccggaat

SEQ ID NO: 103023 - DNA, 17 bp, Arabidopsis thaliana
gccactaataccagatg

SEQ ID NO: 103024 - DNA, 17 bp, Arabidopsis thaliana
gccactacccttgccac

SEQ ID NO: 103025 - DNA, 17 bp, Arabidopsis thaliana
gccactacgattcttgt

SEQ ID NO: 103026 - DNA, 17 bp, Arabidopsis thaliana
gccactacttcaacagg

SEQ ID NO: 103027 - DNA, 17 bp, Arabidopsis thaliana
gccactatcttgtgccc

SEQ ID NO: 103028 - DNA, 17 bp, Arabidopsis thaliana
gccactcagattcacca

SEQ ID NO: 103029 - DNA, 17 bp, Arabidopsis thaliana
gccactccggctaagcg

SEQ ID NO: 103030 - DNA, 17 bp, Arabidopsis thaliana
gccactcgactagtcac

SEQ ID NO: 103031 - DNA, 17 bp, Arabidopsis thaliana
gccactcgccgtcgttg

SEQ ID NO: 103032 - DNA, 17 bp, Arabidopsis thaliana
gccactcgtggcgcaac

SEQ ID NO: 103033 - DNA, 17 bp, Arabidopsis thaliana
gccactctcggcaacgg

SEQ ID NO: 103034 - DNA, 17 bp, Arabidopsis thaliana
gccactgactacatgca

SEQ ID NO: 103035 - DNA, 17 bp, Arabidopsis thaliana
gccactgtatctcgatc

SEQ ID NO: 103036 - DNA, 17 bp, Arabidopsis thaliana
gccacttctgcaccaca

SEQ ID NO: 103037 - DNA, 17 bp, Arabidopsis thaliana
gccacttgtatgggcca

SEQ ID NO: 103038 - DNA, 17 bp, Arabidopsis thaliana
gccactttgaaccgaac

SEQ ID NO: 103039 - DNA, 17 bp, Arabidopsis thaliana
gccactttggctcaaaa

SEQ ID NO: 103040 - DNA, 17 bp, Arabidopsis thaliana
gccactttggctcaaga

SEQ ID NO: 103041 - DNA, 17 bp, Arabidopsis thaliana
gccagaaaatgtgctga

SEQ ID NO: 103042 - DNA, 17 bp, Arabidopsis thaliana
gccagacaactgggtgg

SEQ ID NO: 103043 - DNA, 17 bp, Arabidopsis thaliana
gccagacactgggtgtg

SEQ ID NO: 103044 - DNA, 17 bp, Arabidopsis thaliana
gccagacatgtatcttc

SEQ ID NO: 103045 - DNA, 17 bp, Arabidopsis thaliana
gccagaccgatcgtcag

SEQ ID NO: 103046 - DNA, 17 bp, Arabidopsis thaliana
gccagagaatggggaga

SEQ ID NO: 103047 - DNA, 17 bp, Arabidopsis thaliana
gccagagacgccattat

SEQ ID NO: 103048 - DNA, 17 bp, Arabidopsis thaliana
gccagagactgtaagta

SEQ ID NO: 103049 - DNA, 17 bp, Arabidopsis thaliana
gccagagagtccatccg

SEQ ID NO: 103050 - DNA, 17 bp, Arabidopsis thaliana
gccagagccaggcctcg

SEQ ID NO: 103051 - DNA, 17 bp, Arabidopsis thaliana
gccagaggtagggtcca

SEQ ID NO: 103052 - DNA, 17 bp, Arabidopsis thaliana
gccagataacgcaggtg

SEQ ID NO: 103053 - DNA, 17 bp, Arabidopsis thaliana
gccagatccaaggtgct

SEQ ID NO: 103054 - DNA, 17 bp, Arabidopsis thaliana
gccagatgggccatatg

SEQ ID NO: 103055 - DNA, 17 bp, Arabidopsis thaliana
gccagattaatctgcta

SEQ ID NO: 103056 - DNA, 17 bp, Arabidopsis thaliana
gccagcacggccggagg

SEQ ID NO: 103057 - DNA, 17 bp, Arabidopsis thaliana
gccagcagattggtaga

SEQ ID NO: 103058 - DNA, 17 bp, Arabidopsis thaliana
gccagcagccgcggtaa

SEQ ID NO: 103059 - DNA, 17 bp, Arabidopsis thaliana
gccagcagtttgttgca

SEQ ID NO: 103060 - DNA, 17 bp, Arabidopsis thaliana
gccagcatttcggatgg

SEQ ID NO: 103061 - DNA, 17 bp, Arabidopsis thaliana
gccagccctttgtcgct

SEQ ID NO: 103062 - DNA, 17 bp, Arabidopsis thaliana
gccagccgggattcgac

SEQ ID NO: 103063 - DNA, 17 bp, Arabidopsis thaliana
gccagccgggggacgga

SEQ ID NO: 103064 - DNA, 17 bp, Arabidopsis thaliana
gccagccgggggacggg

SEQ ID NO: 103065 - DNA, 17 bp, Arabidopsis thaliana
gccagcgactgcaatta

SEQ ID NO: 103066 - DNA, 17 bp, Arabidopsis thaliana
gccagcgactgcaattt

SEQ ID NO: 103067 - DNA, 17 bp, Arabidopsis thaliana
gccagcgactgtcgcca

SEQ ID NO: 103068 - DNA, 17 bp, Arabidopsis thaliana
gccagcgatcagcgacc

SEQ ID NO: 103069 - DNA, 17 bp, Arabidopsis thaliana
gccaggaattcacccac

SEQ ID NO: 103070 - DNA, 17 bp, Arabidopsis thaliana
gccaggaattcagccac

SEQ ID NO: 103071 - DNA, 17 bp, Arabidopsis thaliana
gccaggagatcactcga

SEQ ID NO: 103072 - DNA, 17 bp, Arabidopsis thaliana
gccaggaggttctgggc

SEQ ID NO: 103073 - DNA, 17 bp, Arabidopsis thaliana
gccaggagtgccagttc

SEQ ID NO: 103074 - DNA, 17 bp, Arabidopsis thaliana
gccaggatagctcagtt

SEQ ID NO: 103075 - DNA, 17 bp, Arabidopsis thaliana
gccaggatttgtggtcg

SEQ ID NO: 103076 - DNA, 17 bp, Arabidopsis thaliana
gccaggccgcttaacag

SEQ ID NO: 103077 - DNA, 17 bp, Arabidopsis thaliana
gccaggcgaaacttaga

SEQ ID NO: 103078 - DNA, 17 bp, Arabidopsis thaliana
gccaggctatctcgcca

SEQ ID NO: 103079 - DNA, 17 bp, Arabidopsis thaliana
gccagggcacgtctgcc

SEQ ID NO: 103080 - DNA, 17 bp, Arabidopsis thaliana
gccagggcacgttgcct

SEQ ID NO: 103081 - DNA, 17 bp, Arabidopsis thaliana
gccagggctaaccagat

SEQ ID NO: 103082 - DNA, 17 bp, Arabidopsis thaliana
gccaggggtagtcaggc

SEQ ID NO: 103083 - DNA, 17 bp, Arabidopsis thaliana
gccaggtcaacgttttg

SEQ ID NO: 103084 - DNA, 17 bp, Arabidopsis thaliana
gccagtagctttgtgtc

SEQ ID NO: 103085 - DNA, 17 bp, Arabidopsis thaliana
gccagtctggtgccagc

SEQ ID NO: 103086 - DNA, 17 bp, Arabidopsis thaliana
gccagtgacagccattg

SEQ ID NO: 103087 - DNA, 17 bp, Arabidopsis thaliana
gccagtgaccagccacc

SEQ ID NO: 103088 - DNA, 17 bp, Arabidopsis thaliana
gccagtgaccagcgacc

SEQ ID NO: 103089 - DNA, 17 bp, Arabidopsis thaliana
gccagtgagacggtggg

SEQ ID NO: 103090 - DNA, 17 bp, Arabidopsis thaliana
gccagtgcacgtctgcc

SEQ ID NO: 103091 - DNA, 17 bp, Arabidopsis thaliana
gccagtggcagccattt

SEQ ID NO: 103092 - DNA, 17 bp, Arabidopsis thaliana
gccagtggcgcgaagct

SEQ ID NO: 103093 - DNA, 17 bp, Arabidopsis thaliana
gccagtggtagcgactg

SEQ ID NO: 103094 - DNA, 17 bp, Arabidopsis thaliana
gccagttagttaaggct

SEQ ID NO: 103095 - DNA, 17 bp, Arabidopsis thaliana
gccagttgaccttggct

SEQ ID NO: 103096 - DNA, 17 bp, Arabidopsis thaliana
gccagttgacttaacga

SEQ ID NO: 103097 - DNA, 17 bp, Arabidopsis thaliana
gccagttgatgagccac

SEQ ID NO: 103098 - DNA, 17 bp, Arabidopsis thaliana
gccagttgcaacattcg

SEQ ID NO: 103099 - DNA, 17 bp, Arabidopsis thaliana
gccagttgtacctaaac

SEQ ID NO: 103100 - DNA, 17 bp, Arabidopsis thaliana
gccagttgtatgagcca

SEQ ID NO: 103101 - DNA, 17 bp, Arabidopsis thaliana
gccagttttctttcatc

SEQ ID NO: 103102 - DNA, 17 bp, Arabidopsis thaliana
gccataagtgcattcag

SEQ ID NO: 103103 - DNA, 17 bp, Arabidopsis thaliana
gccatacagcctctgct

SEQ ID NO: 103104 - DNA, 17 bp, Arabidopsis thaliana
gccatacggcggtgaat

SEQ ID NO: 103105 - DNA, 17 bp, Arabidopsis thaliana
gccatactcttcagcga

SEQ ID NO: 103106 - DNA, 17 bp, Arabidopsis thaliana
gccatagccagtgacgg

SEQ ID NO: 103107 - DNA, 17 bp, Arabidopsis thaliana
gccatagcccgcccggc

SEQ ID NO: 103108 - DNA, 17 bp, Arabidopsis thaliana
gccatagcccgcctggc

SEQ ID NO: 103109 - DNA, 17 bp, Arabidopsis thaliana
gccatagcgatggacga

SEQ ID NO: 103110 - DNA, 17 bp, Arabidopsis thaliana
gccataggtttcgactt

SEQ ID NO: 103111 - DNA, 17 bp, Arabidopsis thaliana
gccatagtgatccggga

SEQ ID NO: 103112 - DNA, 17 bp, Arabidopsis thaliana
gccatatctgactctgc

SEQ ID NO: 103113 - DNA, 17 bp, Arabidopsis thaliana
gccatccaaccatcctt

SEQ ID NO: 103114 - DNA, 17 bp, Arabidopsis thaliana
gccatccatattttgac

SEQ ID NO: 103115 - DNA, 17 bp, Arabidopsis thaliana
gccatcctgagacttga

SEQ ID NO: 103116 - DNA, 17 bp, Arabidopsis thaliana
gccatcgccggacagaa

SEQ ID NO: 103117 - DNA, 17 bp, Arabidopsis thaliana
gccatcgtctagtggtt

SEQ ID NO: 103118 - DNA, 17 bp, Arabidopsis thaliana
gccatctctatcagccg

SEQ ID NO: 103119 - DNA, 17 bp, Arabidopsis thaliana
gccatctctatcagcgg

SEQ ID NO: 103120 - DNA, 17 bp, Arabidopsis thaliana
gccatcttagctcagtg

SEQ ID NO: 103121 - DNA, 17 bp, Arabidopsis thaliana
gccatcttgataccatt

SEQ ID NO: 103122 - DNA, 17 bp, Arabidopsis thaliana
gccatgaaacctccttt

SEQ ID NO: 103123 - DNA, 17 bp, Arabidopsis thaliana
gccatgatcacacttta

SEQ ID NO: 103124 - DNA, 17 bp, Arabidopsis thaliana
gccatgatcttgtcagg

SEQ ID NO: 103125 - DNA, 17 bp, Arabidopsis thaliana
gccatgattccacgatc

SEQ ID NO: 103126 - DNA, 17 bp, Arabidopsis thaliana
gccatggcacaagcgta

SEQ ID NO: 103127 - DNA, 17 bp, Arabidopsis thaliana
gccatggctgtctattc

SEQ ID NO: 103128 - DNA, 17 bp, Arabidopsis thaliana
gccatggctttatccca

SEQ ID NO: 103129 - DNA, 17 bp, Arabidopsis thaliana
gccatggggtagccttg

SEQ ID NO: 103130 - DNA, 17 bp, Arabidopsis thaliana
gccatggtacagacccg

SEQ ID NO: 103131 - DNA, 17 bp, Arabidopsis thaliana
gccatgtgttatgatct

SEQ ID NO: 103132 - DNA, 17 bp, Arabidopsis thaliana
gccatgttagtgtaatc

SEQ ID NO: 103133 - DNA, 17 bp, Arabidopsis thaliana
gccatgtttgtttgtcc

SEQ ID NO: 103134 - DNA, 17 bp, Arabidopsis thaliana
gccattaagatccagtt

SEQ ID NO: 103135 - DNA, 17 bp, Arabidopsis thaliana
gccattaccgctcagga

SEQ ID NO: 103136 - DNA, 17 bp, Arabidopsis thaliana
gccattatcctgccctt

SEQ ID NO: 103137 - DNA, 17 bp, Arabidopsis thaliana
gccattcgttatttttc

SEQ ID NO: 103138 - DNA, 17 bp, Arabidopsis thaliana
gccattctaatccaacg

SEQ ID NO: 103139 - DNA, 17 bp, Arabidopsis thaliana
gccattctccaccttgt

SEQ ID NO: 103140 - DNA, 17 bp, Arabidopsis thaliana
gccattgagccagaatg

SEQ ID NO: 103141 - DNA, 17 bp, Arabidopsis thaliana
gccattgatcacgatat

SEQ ID NO: 103142 - DNA, 17 bp, Arabidopsis thaliana
gccattgcgatgaagct

SEQ ID NO: 103143 - DNA, 17 bp, Arabidopsis thaliana
gccattggtcggcttgt

SEQ ID NO: 103144 - DNA, 17 bp, Arabidopsis thaliana
gccattgtaaataagtc

SEQ ID NO: 103145 - DNA, 17 bp, Arabidopsis thaliana
gccattgtaaataagtt

SEQ ID NO: 103146 - DNA, 17 bp, Arabidopsis thaliana
gccattgtgaataagtc

SEQ ID NO: 103147 - DNA, 17 bp, Arabidopsis thaliana
gccatttcacgagttca

SEQ ID NO: 103148 - DNA, 17 bp, Arabidopsis thaliana
gccatttccaacagctt

SEQ ID NO: 103149 - DNA, 17 bp, Arabidopsis thaliana
gccatttctatcaggag

SEQ ID NO: 103150 - DNA, 17 bp, Arabidopsis thaliana
gccattttattcgcttt

SEQ ID NO: 103151 - DNA, 17 bp, Arabidopsis thaliana
gccattttgccttttcc

SEQ ID NO: 103152 - DNA, 17 bp, Arabidopsis thaliana
gccattttttgaaagtt

SEQ ID NO: 103153 - DNA, 17 bp, Arabidopsis thaliana
gcccaaacggcacgcag

SEQ ID NO: 103154 - DNA, 17 bp, Arabidopsis thaliana
gcccaaacttataccac

SEQ ID NO: 103155 - DNA, 17 bp, Arabidopsis thaliana
gcccaaacttggcatgc

SEQ ID NO: 103156 - DNA, 17 bp, Arabidopsis thaliana
gcccaaacttggcatgt

SEQ ID NO: 103157 - DNA, 17 bp, Arabidopsis thaliana
gcccaaacttggcctgt

SEQ ID NO: 103158 - DNA, 17 bp, Arabidopsis thaliana
gcccaaactttaacctc

SEQ ID NO: 103159 - DNA, 17 bp, Arabidopsis thaliana
gcccaaactttgacctc

SEQ ID NO: 103160 - DNA, 17 bp, Arabidopsis thaliana
gcccaaagtatgaccga

SEQ ID NO: 103161 - DNA, 17 bp, Arabidopsis thaliana
gcccaaataggcccaga

SEQ ID NO: 103162 - DNA, 17 bp, Arabidopsis thaliana
gcccaaatcacgaaaat

SEQ ID NO: 103163 - DNA, 17 bp, Arabidopsis thaliana
gcccaaatctatcactg

SEQ ID NO: 103164 - DNA, 17 bp, Arabidopsis thaliana
gcccaacaggctaaccg

SEQ ID NO: 103165 - DNA, 17 bp, Arabidopsis thaliana
gcccaacatgattggct

SEQ ID NO: 103166 - DNA, 17 bp, Arabidopsis thaliana
gcccaacgggtgtggcc

SEQ ID NO: 103167 - DNA, 17 bp, Arabidopsis thaliana
gcccaactgcgcgctaa

SEQ ID NO: 103168 - DNA, 17 bp, Arabidopsis thaliana
gcccaagaacgcttaac

SEQ ID NO: 103169 - DNA, 17 bp, Arabidopsis thaliana
gcccaagacagccctcc

SEQ ID NO: 103170 - DNA, 17 bp, Arabidopsis thaliana
gcccaagacatttccgt

SEQ ID NO: 103171 - DNA, 17 bp, Arabidopsis thaliana
gcccaagatgagtgctc

SEQ ID NO: 103172 - DNA, 17 bp, Arabidopsis thaliana
gcccaagccgccattgt

SEQ ID NO: 103173 - DNA, 17 bp, Arabidopsis thaliana
gcccaaggatgacttgc

SEQ ID NO: 103174 - DNA, 17 bp, Arabidopsis thaliana
gcccaagggctgcgtat

SEQ ID NO: 103175 - DNA, 17 bp, Arabidopsis thaliana
gcccaatacgcggtctg

SEQ ID NO: 103176 - DNA, 17 bp, Arabidopsis thaliana
gcccaatagagaccatg

SEQ ID NO: 103177 - DNA, 17 bp, Arabidopsis thaliana
gcccaatatgaacccgc

SEQ ID NO: 103178 - DNA, 17 bp, Arabidopsis thaliana
gcccaattggtttacct

SEQ ID NO: 103179 - DNA, 17 bp, Arabidopsis thaliana
gcccacaacagatttcg

SEQ ID NO: 103180 - DNA, 17 bp, Arabidopsis thaliana
gcccaccccaagatgag

SEQ ID NO: 103181 - DNA, 17 bp, Arabidopsis thaliana
gcccacccctatccgac

SEQ ID NO: 103182 - DNA, 17 bp, Arabidopsis thaliana
gcccaccgctatatgta

SEQ ID NO: 103183 - DNA, 17 bp, Arabidopsis thaliana
gcccaccgctgcgttga

SEQ ID NO: 103184 - DNA, 17 bp, Arabidopsis thaliana
gcccaccgtcctggtat

SEQ ID NO: 103185 - DNA, 17 bp, Arabidopsis thaliana
gcccaccgttggggcgg

SEQ ID NO: 103186 - DNA, 17 bp, Arabidopsis thaliana
gcccaccgttggggcta

SEQ ID NO: 103187 - DNA, 17 bp, Arabidopsis thaliana
gcccaccgttggggctg

SEQ ID NO: 103188 - DNA, 17 bp, Arabidopsis thaliana
gcccacgcaaggcaagc

SEQ ID NO: 103189 - DNA, 17 bp, Arabidopsis thaliana
gcccacgcccatctagc

SEQ ID NO: 103190 - DNA, 17 bp, Arabidopsis thaliana
gcccacggagccccagc

SEQ ID NO: 103191 - DNA, 17 bp, Arabidopsis thaliana
gcccacgtattaaggct

SEQ ID NO: 103192 - DNA, 17 bp, Arabidopsis thaliana
gcccacgtctgcctggg

SEQ ID NO: 103193 - DNA, 17 bp, Arabidopsis thaliana
gcccactccctcataag

SEQ ID NO: 103194 - DNA, 17 bp, Arabidopsis thaliana
gcccactcgcaccaacc

SEQ ID NO: 103195 - DNA, 17 bp, Arabidopsis thaliana
gcccactgctctatctg

SEQ ID NO: 103196 - DNA, 17 bp, Arabidopsis thaliana
gcccactgggaaggacc

SEQ ID NO: 103197 - DNA, 17 bp, Arabidopsis thaliana
gcccactgttgcggtgc

SEQ ID NO: 103198 - DNA, 17 bp, Arabidopsis thaliana
gcccagaaaatctggcg

SEQ ID NO: 103199 - DNA, 17 bp, Arabidopsis thaliana
gcccagacatttccacg

SEQ ID NO: 103200 - DNA, 17 bp, Arabidopsis thaliana
gcccagaccctgtcgca

SEQ ID NO: 103201 - DNA, 17 bp, Arabidopsis thaliana
gcccagacctttgagca

SEQ ID NO: 103202 - DNA, 17 bp, Arabidopsis thaliana
gcccagacgtagcaccg

SEQ ID NO: 103203 - DNA, 17 bp, Arabidopsis thaliana
gcccagactcctacggg

SEQ ID NO: 103204 - DNA, 17 bp, Arabidopsis thaliana
gcccagattaggtcgct

SEQ ID NO: 103205 - DNA, 17 bp, Arabidopsis thaliana
gcccagccagccagcca

SEQ ID NO: 103206 - DNA, 17 bp, Arabidopsis thaliana
gcccagccctttgtcgc

SEQ ID NO: 103207 - DNA, 17 bp, Arabidopsis thaliana
gcccagccttcgaggac

SEQ ID NO: 103208 - DNA, 17 bp, Arabidopsis thaliana
gcccagcttgaaaatcg

SEQ ID NO: 103209 - DNA, 17 bp, Arabidopsis thaliana
gcccagcttgggctact

SEQ ID NO: 103210 - DNA, 17 bp, Arabidopsis thaliana
gcccaggacagccccaa

SEQ ID NO: 103211 - DNA, 17 bp, Arabidopsis thaliana
gcccaggaccggccctg

SEQ ID NO: 103212 - DNA, 17 bp, Arabidopsis thaliana
gcccaggcctactagca

SEQ ID NO: 103213 - DNA, 17 bp, Arabidopsis thaliana
gcccagggcacgtctgc

SEQ ID NO: 103214 - DNA, 17 bp, Arabidopsis thaliana
gcccagggccggccctg

SEQ ID NO: 103215 - DNA, 17 bp, Arabidopsis thaliana
gcccaggttgttagttc

SEQ ID NO: 103216 - DNA, 17 bp, Arabidopsis thaliana
gcccagtatgctaggtg

SEQ ID NO: 103217 - DNA, 17 bp, Arabidopsis thaliana
gcccagtccactttgcc

SEQ ID NO: 103218 - DNA, 17 bp, Arabidopsis thaliana
gcccagttttgatggcg

SEQ ID NO: 103219 - DNA, 17 bp, Arabidopsis thaliana
gcccatacggacaattg

SEQ ID NO: 103220 - DNA, 17 bp, Arabidopsis thaliana
gcccataggcttgccca

SEQ ID NO: 103221 - DNA, 17 bp, Arabidopsis thaliana
gcccatataattgacca

SEQ ID NO: 103222 - DNA, 17 bp, Arabidopsis thaliana
gcccatcaacaggctaa

SEQ ID NO: 103223 - DNA, 17 bp, Arabidopsis thaliana
gcccatcaagcaaggga

SEQ ID NO: 103224 - DNA, 17 bp, Arabidopsis thaliana
gcccatcaagcaagggc

SEQ ID NO: 103225 - DNA, 17 bp, Arabidopsis thaliana
gcccatcagaatgaccc

SEQ ID NO: 103226 - DNA, 17 bp, Arabidopsis thaliana
gcccatcagaatgaccg

SEQ ID NO: 103227 - DNA, 17 bp, Arabidopsis thaliana
gcccatcagaatgacgg

SEQ ID NO: 103228 - DNA, 17 bp, Arabidopsis thaliana
gcccatcatctaagccc

SEQ ID NO: 103229 - DNA, 17 bp, Arabidopsis thaliana
gcccatcatctagatgt

SEQ ID NO: 103230 - DNA, 17 bp, Arabidopsis thaliana
gcccatccaaccatcca

SEQ ID NO: 103231 - DNA, 17 bp, Arabidopsis thaliana
gcccatccgtgacaagt

SEQ ID NO: 103232 - DNA, 17 bp, Arabidopsis thaliana
gcccatctagctaagtt

SEQ ID NO: 103233 - DNA, 17 bp, Arabidopsis thaliana
gcccatctagctcagtt

SEQ ID NO: 103234 - DNA, 17 bp, Arabidopsis thaliana
gcccatctatgatagtg

SEQ ID NO: 103235 - DNA, 17 bp, Arabidopsis thaliana
gcccatctgacatgagc

SEQ ID NO: 103236 - DNA, 17 bp, Arabidopsis thaliana
gcccatctgtctgagga

SEQ ID NO: 103237 - DNA, 17 bp, Arabidopsis thaliana
gcccatgcttggtggct

SEQ ID NO: 103238 - DNA, 17 bp, Arabidopsis thaliana
gcccatggaagatgtag

SEQ ID NO: 103239 - DNA, 17 bp, Arabidopsis thaliana
gcccatgggcttgtcca

SEQ ID NO: 103240 - DNA, 17 bp, Arabidopsis thaliana
gcccatgggttcgtttt

SEQ ID NO: 103241 - DNA, 17 bp, Arabidopsis thaliana
gcccatggttggtgact

SEQ ID NO: 103242 - DNA, 17 bp, Arabidopsis thaliana
gcccattagctcagttg

SEQ ID NO: 103243 - DNA, 17 bp, Arabidopsis thaliana
gcccattagtgctggta

SEQ ID NO: 103244 - DNA, 17 bp, Arabidopsis thaliana
gcccattcgtgtttagg

SEQ ID NO: 103245 - DNA, 17 bp, Arabidopsis thaliana
gcccattctttgacttc

SEQ ID NO: 103246 - DNA, 17 bp, Arabidopsis thaliana
gcccattgcgagatgag

SEQ ID NO: 103247 - DNA, 17 bp, Arabidopsis thaliana
gcccattggtgtgacgg

SEQ ID NO: 103248 - DNA, 17 bp, Arabidopsis thaliana
gcccattgtacaaccca

SEQ ID NO: 103249 - DNA, 17 bp, Arabidopsis thaliana
gcccattgtccatatgg

SEQ ID NO: 103250 - DNA, 17 bp, Arabidopsis thaliana
gcccattgtccatattg

SEQ ID NO: 103251 - DNA, 17 bp, Arabidopsis thaliana
gcccatttcggccaact

SEQ ID NO: 103252 - DNA, 17 bp, Arabidopsis thaliana
gcccattttcgtgattt

SEQ ID NO: 103253 - DNA, 17 bp, Arabidopsis thaliana
gcccattttggataagc

SEQ ID NO: 103254 - DNA, 17 bp, Arabidopsis thaliana
gcccattttggatataa

SEQ ID NO: 103255 - DNA, 17 bp, Arabidopsis thaliana
gccccaaaatatatccg

SEQ ID NO: 103256 - DNA, 17 bp, Arabidopsis thaliana
gccccaaacttagttgt

SEQ ID NO: 103257 - DNA, 17 bp, Arabidopsis thaliana
gccccaagccttctggc

SEQ ID NO: 103258 - DNA, 17 bp, Arabidopsis thaliana
gccccaaggatgactta

SEQ ID NO: 103259 - DNA, 17 bp, Arabidopsis thaliana
gccccaaggatgacttg

SEQ ID NO: 103260 - DNA, 17 bp, Arabidopsis thaliana
gccccaagtagggagac

SEQ ID NO: 103261 - DNA, 17 bp, Arabidopsis thaliana
gccccaatcgggcggta

SEQ ID NO: 103262 - DNA, 17 bp, Arabidopsis thaliana
gccccaatctggcggta

SEQ ID NO: 103263 - DNA, 17 bp, Arabidopsis thaliana
gccccaatctggcggtc

SEQ ID NO: 103264 - DNA, 17 bp, Arabidopsis thaliana
gccccaccaggagtgga

SEQ ID NO: 103265 - DNA, 17 bp, Arabidopsis thaliana
gccccacccacccaccc

SEQ ID NO: 103266 - DNA, 17 bp, Arabidopsis thaliana
gccccagttatattatt

SEQ ID NO: 103267 - DNA, 17 bp, Arabidopsis thaliana
gccccatactaacccga

SEQ ID NO: 103268 - DNA, 17 bp, Arabidopsis thaliana
gccccatcgtctagtgg

SEQ ID NO: 103269 - DNA, 17 bp, Arabidopsis thaliana
gcccccatcctctagtg

SEQ ID NO: 103270 - DNA, 17 bp, Arabidopsis thaliana
gcccccatcgtagtggt

SEQ ID NO: 103271 - DNA, 17 bp, Arabidopsis thaliana
gcccccatcgtctagcg

SEQ ID NO: 103272 - DNA, 17 bp, Arabidopsis thaliana
gcccccatcgtctagtg

SEQ ID NO: 103273 - DNA, 17 bp, Arabidopsis thaliana
gcccccatcgtctattg

SEQ ID NO: 103274 - DNA, 17 bp, Arabidopsis thaliana
gcccccatcgttcagtg

SEQ ID NO: 103275 - DNA, 17 bp, Arabidopsis thaliana
gcccccggttggagatg

SEQ ID NO: 103276 - DNA, 17 bp, Arabidopsis thaliana
gccccctacctggcgcg

SEQ ID NO: 103277 - DNA, 17 bp, Arabidopsis thaliana
gccccctttgtcgcgaa

SEQ ID NO: 103278 - DNA, 17 bp, Arabidopsis thaliana
gccccgaaaatggatgg

SEQ ID NO: 103279 - DNA, 17 bp, Arabidopsis thaliana
gccccgaaaatgtatgg

SEQ ID NO: 103280 - DNA, 17 bp, Arabidopsis thaliana
gccccgactaatggcag

SEQ ID NO: 103281 - DNA, 17 bp, Arabidopsis thaliana
gccccgccatacaccac

SEQ ID NO: 103282 - DNA, 17 bp, Arabidopsis thaliana
gccccgcgatagtgccg

SEQ ID NO: 103283 - DNA, 17 bp, Arabidopsis thaliana
gccccgcgatataccac

SEQ ID NO: 103284 - DNA, 17 bp, Arabidopsis thaliana
gccccgcgctcaccacc

SEQ ID NO: 103285 - DNA, 17 bp, Arabidopsis thaliana
gccccgcgctcaccccc

SEQ ID NO: 103286 - DNA, 17 bp, Arabidopsis thaliana
gccccgctaagtctgtc

SEQ ID NO: 103287 - DNA, 17 bp, Arabidopsis thaliana
gccccgctcgtcgctcc

SEQ ID NO: 103288 - DNA, 17 bp, Arabidopsis thaliana
gccccgggtcccacggg

SEQ ID NO: 103289 - DNA, 17 bp, Arabidopsis thaliana
gccccgtaatatagcaa

SEQ ID NO: 103290 - DNA, 17 bp, Arabidopsis thaliana
gccccgtcgtgcccgca

SEQ ID NO: 103291 - DNA, 17 bp, Arabidopsis thaliana
gccccgtcgtgcccgcc

SEQ ID NO: 103292 - DNA, 17 bp, Arabidopsis thaliana
gccccgtcgtgcccgga

SEQ ID NO: 103293 - DNA, 17 bp, Arabidopsis thaliana
gccccgtctgcctggct

SEQ ID NO: 103294 - DNA, 17 bp, Arabidopsis thaliana
gcccctaccgactgaat

SEQ ID NO: 103295 - DNA, 17 bp, Arabidopsis thaliana
gcccctccctccctccc

SEQ ID NO: 103296 - DNA, 17 bp, Arabidopsis thaliana
gcccctccctccctgcc

SEQ ID NO: 103297 - DNA, 17 bp, Arabidopsis thaliana
gcccctggctcgcgagg

SEQ ID NO: 103298 - DNA, 17 bp, Arabidopsis thaliana
gcccctggctctgaccg

SEQ ID NO: 103299 - DNA, 17 bp, Arabidopsis thaliana
gcccctggttgtgttac

SEQ ID NO: 103300 - DNA, 17 bp, Arabidopsis thaliana
gccccttagatgttctg

SEQ ID NO: 103301 - DNA, 17 bp, Arabidopsis thaliana
gccccttatgccctggg

SEQ ID NO: 103302 - DNA, 17 bp, Arabidopsis thaliana
gccccttattggtcggc

SEQ ID NO: 103303 - DNA, 17 bp, Arabidopsis thaliana
gccccttgtcgctaaga

SEQ ID NO: 103304 - DNA, 17 bp, Arabidopsis thaliana
gcccctttcgctaagat

SEQ ID NO: 103305 - DNA, 17 bp, Arabidopsis thaliana
gccccttttcaacttta

SEQ ID NO: 103306 - DNA, 17 bp, Arabidopsis thaliana
gcccgaaaagctagggt

SEQ ID NO: 103307 - DNA, 17 bp, Arabidopsis thaliana
gcccgaaaccacagcat

SEQ ID NO: 103308 - DNA, 17 bp, Arabidopsis thaliana
gcccgaccagcgacagc

SEQ ID NO: 103309 - DNA, 17 bp, Arabidopsis thaliana
gcccgaccaggagttaa

SEQ ID NO: 103310 - DNA, 17 bp, Arabidopsis thaliana
gcccgacctggactgcc

SEQ ID NO: 103311 - DNA, 17 bp, Arabidopsis thaliana
gcccgaccttccttaac

SEQ ID NO: 103312 - DNA, 17 bp, Arabidopsis thaliana
gcccgaccttccttcac

SEQ ID NO: 103313 - DNA, 17 bp, Arabidopsis thaliana
gcccgacgcggattacg

SEQ ID NO: 103314 - DNA, 17 bp, Arabidopsis thaliana
gcccgacttatcacgtt

SEQ ID NO: 103315 - DNA, 17 bp, Arabidopsis thaliana
gcccgagggcacgtctg

SEQ ID NO: 103316 - DNA, 17 bp, Arabidopsis thaliana
gcccgagtctgatcagg

SEQ ID NO: 103317 - DNA, 17 bp, Arabidopsis thaliana
gcccgagtgccacatca

SEQ ID NO: 103318 - DNA, 17 bp, Arabidopsis thaliana
gcccgagttaacgactg

SEQ ID NO: 103319 - DNA, 17 bp, Arabidopsis thaliana
gcccgatccagaaatcg

SEQ ID NO: 103320 - DNA, 17 bp, Arabidopsis thaliana
gcccgatccataatcac

SEQ ID NO: 103321 - DNA, 17 bp, Arabidopsis thaliana
gcccgatcgtggtctgc

SEQ ID NO: 103322 - DNA, 17 bp, Arabidopsis thaliana
gcccgatcttgcaggat

SEQ ID NO: 103323 - DNA, 17 bp, Arabidopsis thaliana
gcccgatgaagatggtc

SEQ ID NO: 103324 - DNA, 17 bp, Arabidopsis thaliana
gcccgatggttcagact

SEQ ID NO: 103325 - DNA, 17 bp, Arabidopsis thaliana
gcccgattaccgaccct

SEQ ID NO: 103326 - DNA, 17 bp, Arabidopsis thaliana
gcccgattcttgggagt

SEQ ID NO: 103327 - DNA, 17 bp, Arabidopsis thaliana
gcccgattgccgaccct

SEQ ID NO: 103328 - DNA, 17 bp, Arabidopsis thaliana
gcccgattgccgattca

SEQ ID NO: 103329 - DNA, 17 bp, Arabidopsis thaliana
gcccgattgctgaccct

SEQ ID NO: 103330 - DNA, 17 bp, Arabidopsis thaliana
gcccgcaaccgcaaacg

SEQ ID NO: 103331 - DNA, 17 bp, Arabidopsis thaliana
gcccgcaactacagacg

SEQ ID NO: 103332 - DNA, 17 bp, Arabidopsis thaliana
gcccgcacagagttgat

SEQ ID NO: 103333 - DNA, 17 bp, Arabidopsis thaliana
gcccgcagcgatactga

SEQ ID NO: 103334 - DNA, 17 bp, Arabidopsis thaliana
gcccgcagtgtgcccgt

SEQ ID NO: 103335 - DNA, 17 bp, Arabidopsis thaliana
gcccgccaaaaagtccg

SEQ ID NO: 103336 - DNA, 17 bp, Arabidopsis thaliana
gcccgccaatgtactcc

SEQ ID NO: 103337 - DNA, 17 bp, Arabidopsis thaliana
gcccgccaatgtccgag

SEQ ID NO: 103338 - DNA, 17 bp, Arabidopsis thaliana
gcccgccacaatgtcgg

SEQ ID NO: 103339 - DNA, 17 bp, Arabidopsis thaliana
gcccgccacgatccact

SEQ ID NO: 103340 - DNA, 17 bp, Arabidopsis thaliana
gcccgccacggtacaga

SEQ ID NO: 103341 - DNA, 17 bp, Arabidopsis thaliana
gcccgccactatcttgt

SEQ ID NO: 103342 - DNA, 17 bp, Arabidopsis thaliana
gcccgccactcgtggcg

SEQ ID NO: 103343 - DNA, 17 bp, Arabidopsis thaliana
gcccgccagtggcagcc

SEQ ID NO: 103344 - DNA, 17 bp, Arabidopsis thaliana
gcccgccatggctttat

SEQ ID NO: 103345 - DNA, 17 bp, Arabidopsis thaliana
gcccgcccagaccctgt

SEQ ID NO: 103346 - DNA, 17 bp, Arabidopsis thaliana
gcccgccccgtcgtgcc

SEQ ID NO: 103347 - DNA, 17 bp, Arabidopsis thaliana
gcccgcccgccgaagcc

SEQ ID NO: 103348 - DNA, 17 bp, Arabidopsis thaliana
gcccgcccgccggggga

SEQ ID NO: 103349 - DNA, 17 bp, Arabidopsis thaliana
gcccgcccgccggtccg

SEQ ID NO: 103350 - DNA, 17 bp, Arabidopsis thaliana
gcccgcccgggcttttg

SEQ ID NO: 103351 - DNA, 17 bp, Arabidopsis thaliana
gcccgcccgtctacctc

SEQ ID NO: 103352 - DNA, 17 bp, Arabidopsis thaliana
gcccgcccgtctagctc

SEQ ID NO: 103353 - DNA, 17 bp, Arabidopsis thaliana
gcccgccctccgacgaa

SEQ ID NO: 103354 - DNA, 17 bp, Arabidopsis thaliana
gcccgcccttagatgtt

SEQ ID NO: 103355 - DNA, 17 bp, Arabidopsis thaliana
gcccgccctttgtcgct

SEQ ID NO: 103356 - DNA, 17 bp, Arabidopsis thaliana
gcccgccgaaacccgta

SEQ ID NO: 103357 - DNA, 17 bp, Arabidopsis thaliana
gcccgccgaagcccgta

SEQ ID NO: 103358 - DNA, 17 bp, Arabidopsis thaliana
gcccgccgaaggccata

SEQ ID NO: 103359 - DNA, 17 bp, Arabidopsis thaliana
gcccgccgaccctcagt

SEQ ID NO: 103360 - DNA, 17 bp, Arabidopsis thaliana
gcccgccgaccggggga

SEQ ID NO: 103361 - DNA, 17 bp, Arabidopsis thaliana
gcccgccgacggcacgt

SEQ ID NO: 103362 - DNA, 17 bp, Arabidopsis thaliana
gcccgccgacggtgtat

SEQ ID NO: 103363 - DNA, 17 bp, Arabidopsis thaliana
gcccgccgaggccgcgc

SEQ ID NO: 103364 - DNA, 17 bp, Arabidopsis thaliana
gcccgccgagggcacgt

SEQ ID NO: 103365 - DNA, 17 bp, Arabidopsis thaliana
gcccgccgagtgcacgt

SEQ ID NO: 103366 - DNA, 17 bp, Arabidopsis thaliana
gcccgccgataattgca

SEQ ID NO: 103367 - DNA, 17 bp, Arabidopsis thaliana
gcccgccgattctacct

SEQ ID NO: 103368 - DNA, 17 bp, Arabidopsis thaliana
gcccgccgattcttttg

SEQ ID NO: 103369 - DNA, 17 bp, Arabidopsis thaliana
gcccgccgattttcttc

SEQ ID NO: 103370 - DNA, 17 bp, Arabidopsis thaliana
gcccgccgcagatctgt

SEQ ID NO: 103371 - DNA, 17 bp, Arabidopsis thaliana
gcccgccgcaggtttat

SEQ ID NO: 103372 - DNA, 17 bp, Arabidopsis thaliana
gcccgccgcccgatcgc

SEQ ID NO: 103373 - DNA, 17 bp, Arabidopsis thaliana
gcccgccgcccgattgc

SEQ ID NO: 103374 - DNA, 17 bp, Arabidopsis thaliana
gcccgccgcggtaattc

SEQ ID NO: 103375 - DNA, 17 bp, Arabidopsis thaliana
gcccgccgctaaagaat

SEQ ID NO: 103376 - DNA, 17 bp, Arabidopsis thaliana
gcccgccgctatggtga

SEQ ID NO: 103377 - DNA, 17 bp, Arabidopsis thaliana
gcccgccgctatgttga

SEQ ID NO: 103378 - DNA, 17 bp, Arabidopsis thaliana
gcccgccgctgaaagtc

SEQ ID NO: 103379 - DNA, 17 bp, Arabidopsis thaliana
gcccgccggaggtaggg

SEQ ID NO: 103380 - DNA, 17 bp, Arabidopsis thaliana
gcccgccggatgtaggg

SEQ ID NO: 103381 - DNA, 17 bp, Arabidopsis thaliana
gcccgccggcaaagtga

SEQ ID NO: 103382 - DNA, 17 bp, Arabidopsis thaliana
gcccgccggccggcggg

SEQ ID NO: 103383 - DNA, 17 bp, Arabidopsis thaliana
gcccgccggccggtccg

SEQ ID NO: 103384 - DNA, 17 bp, Arabidopsis thaliana
gcccgccgggatagctc

SEQ ID NO: 103385 - DNA, 17 bp, Arabidopsis thaliana
gcccgccgggggacgga

SEQ ID NO: 103386 - DNA, 17 bp, Arabidopsis thaliana
gcccgccgggttacggt

SEQ ID NO: 103387 - DNA, 17 bp, Arabidopsis thaliana
gcccgccggtccgcctt

SEQ ID NO: 103388 - DNA, 17 bp, Arabidopsis thaliana
gcccgccggtccgcttg

SEQ ID NO: 103389 - DNA, 17 bp, Arabidopsis thaliana
gcccgccgtcttagctc

SEQ ID NO: 103390 - DNA, 17 bp, Arabidopsis thaliana
gcccgccgtgatcgtgg

SEQ ID NO: 103391 - DNA, 17 bp, Arabidopsis thaliana
gcccgccgttcgattgc

SEQ ID NO: 103392 - DNA, 17 bp, Arabidopsis thaliana
gcccgccgttgttggct

SEQ ID NO: 103393 - DNA, 17 bp, Arabidopsis thaliana
gcccgcctcattcaggt

SEQ ID NO: 103394 - DNA, 17 bp, Arabidopsis thaliana
gcccgcctctaaactcg

SEQ ID NO: 103395 - DNA, 17 bp, Arabidopsis thaliana
gcccgcctctaagtcaa

SEQ ID NO: 103396 - DNA, 17 bp, Arabidopsis thaliana
gcccgcctctaagtcag

SEQ ID NO: 103397 - DNA, 17 bp, Arabidopsis thaliana
gcccgcctctaggaatc

SEQ ID NO: 103398 - DNA, 17 bp, Arabidopsis thaliana
gcccgcctctgaaggtc

SEQ ID NO: 103399 - DNA, 17 bp, Arabidopsis thaliana
gcccgcctctgtgctgg

SEQ ID NO: 103400 - DNA, 17 bp, Arabidopsis thaliana
gcccgcctgacggagca

SEQ ID NO: 103401 - DNA, 17 bp, Arabidopsis thaliana
gcccgcctgctttgacc

SEQ ID NO: 103402 - DNA, 17 bp, Arabidopsis thaliana
gcccgcctggaggatta

SEQ ID NO: 103403 - DNA, 17 bp, Arabidopsis thaliana
gcccgcctgtcactggt

SEQ ID NO: 103404 - DNA, 17 bp, Arabidopsis thaliana
gcccgcctgtcgggacc

SEQ ID NO: 103405 - DNA, 17 bp, Arabidopsis thaliana
gcccgcctgttgggacc

SEQ ID NO: 103406 - DNA, 17 bp, Arabidopsis thaliana
gcccgccttaggcttgt

SEQ ID NO: 103407 - DNA, 17 bp, Arabidopsis thaliana
gcccgccttccgactaa

SEQ ID NO: 103408 - DNA, 17 bp, Arabidopsis thaliana
gcccgccttcgggatcg

SEQ ID NO: 103409 - DNA, 17 bp, Arabidopsis thaliana
gcccgcctttaagatcc

SEQ ID NO: 103410 - DNA, 17 bp, Arabidopsis thaliana
gcccgcctttaagatcg

SEQ ID NO: 103411 - DNA, 17 bp, Arabidopsis thaliana
gcccgcctttaagatct

SEQ ID NO: 103412 - DNA, 17 bp, Arabidopsis thaliana
gcccgcctttaagattc

SEQ ID NO: 103413 - DNA, 17 bp, Arabidopsis thaliana
gcccgcctttacgataa

SEQ ID NO: 103414 - DNA, 17 bp, Arabidopsis thaliana
gcccgcctttggtgtgc

SEQ ID NO: 103415 - DNA, 17 bp, Arabidopsis thaliana
gcccgcgacgtcgcgag

SEQ ID NO: 103416 - DNA, 17 bp, Arabidopsis thaliana
gcccgcgcaggttcgaa

SEQ ID NO: 103417 - DNA, 17 bp, Arabidopsis thaliana
gcccgctgcgacaagca

SEQ ID NO: 103418 - DNA, 17 bp, Arabidopsis thaliana
gcccgcttagctcagag

SEQ ID NO: 103419 - DNA, 17 bp, Arabidopsis thaliana
gcccggaccctgtcgca

SEQ ID NO: 103420 - DNA, 17 bp, Arabidopsis thaliana
gcccggactatccagcc

SEQ ID NO: 103421 - DNA, 17 bp, Arabidopsis thaliana
gcccggcagggcaactt

SEQ ID NO: 103422 - DNA, 17 bp, Arabidopsis thaliana
gcccggcttggcccggc

SEQ ID NO: 103423 - DNA, 17 bp, Arabidopsis thaliana
gcccgggatcaatgcat

SEQ ID NO: 103424 - DNA, 17 bp, Arabidopsis thaliana
gcccgggcgaagcggcc

SEQ ID NO: 103425 - DNA, 17 bp, Arabidopsis thaliana
gcccgggcgactgttta

SEQ ID NO: 103426 - DNA, 17 bp, Arabidopsis thaliana
gcccgggcggagcggcc

SEQ ID NO: 103427 - DNA, 17 bp, Arabidopsis thaliana
gcccgggcggagcgtcc

SEQ ID NO: 103428 - DNA, 17 bp, Arabidopsis thaliana
gcccgggctttgatacg

SEQ ID NO: 103429 - DNA, 17 bp, Arabidopsis thaliana
gcccgggcttttgatac

SEQ ID NO: 103430 - DNA, 17 bp, Arabidopsis thaliana
gcccgggcttttgatag

SEQ ID NO: 103431 - DNA, 17 bp, Arabidopsis thaliana
gcccgggtttggcagga

SEQ ID NO: 103432 - DNA, 17 bp, Arabidopsis thaliana
gcccggttcccggctgg

SEQ ID NO: 103433 - DNA, 17 bp, Arabidopsis thaliana
gcccggtttggtctcct

SEQ ID NO: 103434 - DNA, 17 bp, Arabidopsis thaliana
gcccgtaagccctccag

SEQ ID NO: 103435 - DNA, 17 bp, Arabidopsis thaliana
gcccgtaaggtctcttt

SEQ ID NO: 103436 - DNA, 17 bp, Arabidopsis thaliana
gcccgtaatcccctcag

SEQ ID NO: 103437 - DNA, 17 bp, Arabidopsis thaliana
gcccgtaatccctccag

SEQ ID NO: 103438 - DNA, 17 bp, Arabidopsis thaliana
gcccgtaatcctcctag

SEQ ID NO: 103439 - DNA, 17 bp, Arabidopsis thaliana
gcccgtaatctcaccag

SEQ ID NO: 103440 - DNA, 17 bp, Arabidopsis thaliana
gcccgtaatctctccag

SEQ ID NO: 103441 - DNA, 17 bp, Arabidopsis thaliana
gcccgtaattcctccag

SEQ ID NO: 103442 - DNA, 17 bp, Arabidopsis thaliana
gcccgtaatttcctagg

SEQ ID NO: 103443 - DNA, 17 bp, Arabidopsis thaliana
gcccgtatagctcagtc

SEQ ID NO: 103444 - DNA, 17 bp, Arabidopsis thaliana
gcccgtatagctcagtg

SEQ ID NO: 103445 - DNA, 17 bp, Arabidopsis thaliana
gcccgtatcgaaaggaa

SEQ ID NO: 103446 - DNA, 17 bp, Arabidopsis thaliana
gcccgtatggctcagtg

SEQ ID NO: 103447 - DNA, 17 bp, Arabidopsis thaliana
gcccgtcacaccaccac

SEQ ID NO: 103448 - DNA, 17 bp, Arabidopsis thaliana
gcccgtcacactatggg

SEQ ID NO: 103449 - DNA, 17 bp, Arabidopsis thaliana
gcccgtcagactatggg

SEQ ID NO: 103450 - DNA, 17 bp, Arabidopsis thaliana
gcccgtcatcgtaggtc

SEQ ID NO: 103451 - DNA, 17 bp, Arabidopsis thaliana
gcccgtcgctcctaccg

SEQ ID NO: 103452 - DNA, 17 bp, Arabidopsis thaliana
gcccgtctaactcagtt

SEQ ID NO: 103453 - DNA, 17 bp, Arabidopsis thaliana
gcccgtctacctcagtt

SEQ ID NO: 103454 - DNA, 17 bp, Arabidopsis thaliana
gcccgtctagctaactt

SEQ ID NO: 103455 - DNA, 17 bp, Arabidopsis thaliana
gcccgtctagctaagtt

SEQ ID NO: 103456 - DNA, 17 bp, Arabidopsis thaliana
gcccgtctagctaggtt

SEQ ID NO: 103457 - DNA, 17 bp, Arabidopsis thaliana
gcccgtctagctcaatt

SEQ ID NO: 103458 - DNA, 17 bp, Arabidopsis thaliana
gcccgtctagctcactc

SEQ ID NO: 103459 - DNA, 17 bp, Arabidopsis thaliana
gcccgtctagctcactt

SEQ ID NO: 103460 - DNA, 17 bp, Arabidopsis thaliana
gcccgtctagctcagta

SEQ ID NO: 103461 - DNA, 17 bp, Arabidopsis thaliana
gcccgtctagctcagtc

SEQ ID NO: 103462 - DNA, 17 bp, Arabidopsis thaliana
gcccgtctagctcagtg

SEQ ID NO: 103463 - DNA, 17 bp, Arabidopsis thaliana
gcccgtctagctcagtt

SEQ ID NO: 103464 - DNA, 17 bp, Arabidopsis thaliana
gcccgtctagctcggtt

SEQ ID NO: 103465 - DNA, 17 bp, Arabidopsis thaliana
gcccgtctagctctgtt

SEQ ID NO: 103466 - DNA, 17 bp, Arabidopsis thaliana
gcccgtctagctgagtt

SEQ ID NO: 103467 - DNA, 17 bp, Arabidopsis thaliana
gcccgtctagcttagtt

SEQ ID NO: 103468 - DNA, 17 bp, Arabidopsis thaliana
gcccgtctcgctcagtc

SEQ ID NO: 103469 - DNA, 17 bp, Arabidopsis thaliana
gcccgtctgccggggtg

SEQ ID NO: 103470 - DNA, 17 bp, Arabidopsis thaliana
gcccgtctgcctgggtg

SEQ ID NO: 103471 - DNA, 17 bp, Arabidopsis thaliana
gcccgtctggctccctc

SEQ ID NO: 103472 - DNA, 17 bp, Arabidopsis thaliana
gcccgtctgtctcagtt

SEQ ID NO: 103473 - DNA, 17 bp, Arabidopsis thaliana
gcccgtgaacgactgac

SEQ ID NO: 103474 - DNA, 17 bp, Arabidopsis thaliana
gcccgtgatcctcctag

SEQ ID NO: 103475 - DNA, 17 bp, Arabidopsis thaliana
gcccgttgctctgatga

SEQ ID NO: 103476 - DNA, 17 bp, Arabidopsis thaliana
gcccgttgtccatatgg

SEQ ID NO: 103477 - DNA, 17 bp, Arabidopsis thaliana
gcccgttgtggtttatt

SEQ ID NO: 103478 - DNA, 17 bp, Arabidopsis thaliana
gcccgtttagctaagta

SEQ ID NO: 103479 - DNA, 17 bp, Arabidopsis thaliana
gcccgtttagctcagtt

SEQ ID NO: 103480 - DNA, 17 bp, Arabidopsis thaliana
gcccgtttcccggctgg

SEQ ID NO: 103481 - DNA, 17 bp, Arabidopsis thaliana
gcccgtttgccgaccct

SEQ ID NO: 103482 - DNA, 17 bp, Arabidopsis thaliana
gcccgtttgcggttgcg

SEQ ID NO: 103483 - DNA, 17 bp, Arabidopsis thaliana
gcccgttttgattcatt

SEQ ID NO: 103484 - DNA, 17 bp, Arabidopsis thaliana
gcccgtttttcatcaag

SEQ ID NO: 103485 - DNA, 17 bp, Arabidopsis thaliana
gccctaacaaccgctac

SEQ ID NO: 103486 - DNA, 17 bp, Arabidopsis thaliana
gccctaattgacttgtc

SEQ ID NO: 103487 - DNA, 17 bp, Arabidopsis thaliana
gccctacatgccaaagc

SEQ ID NO: 103488 - DNA, 17 bp, Arabidopsis thaliana
gccctacgctactggcg

SEQ ID NO: 103489 - DNA, 17 bp, Arabidopsis thaliana
gccctactagtggatgg

SEQ ID NO: 103490 - DNA, 17 bp, Arabidopsis thaliana
gccctactcagacctga

SEQ ID NO: 103491 - DNA, 17 bp, Arabidopsis thaliana
gccctaggcgtttgggt

SEQ ID NO: 103492 - DNA, 17 bp, Arabidopsis thaliana
gccctatactaacattc

SEQ ID NO: 103493 - DNA, 17 bp, Arabidopsis thaliana
gccctatcaactttcga

SEQ ID NO: 103494 - DNA, 17 bp, Arabidopsis thaliana
gccctatccccttccat

SEQ ID NO: 103495 - DNA, 17 bp, Arabidopsis thaliana
gccctatgattacctgg

SEQ ID NO: 103496 - DNA, 17 bp, Arabidopsis thaliana
gccctattagctcagtg

SEQ ID NO: 103497 - DNA, 17 bp, Arabidopsis thaliana
gccctattagctcagtt

SEQ ID NO: 103498 - DNA, 17 bp, Arabidopsis thaliana
gccctattagcttagtg

SEQ ID NO: 103499 - DNA, 17 bp, Arabidopsis thaliana
gccctatttggtgaacg

SEQ ID NO: 103500 - DNA, 17 bp, Arabidopsis thaliana
gccctcaggagggatag

SEQ ID NO: 103501 - DNA, 17 bp, Arabidopsis thaliana
gccctccgacgaaagaa

SEQ ID NO: 103502 - DNA, 17 bp, Arabidopsis thaliana
gccctccgacgaaataa

SEQ ID NO: 103503 - DNA, 17 bp, Arabidopsis thaliana
gccctccgacgaaatta

SEQ ID NO: 103504 - DNA, 17 bp, Arabidopsis thaliana
gccctccgacgaactaa

SEQ ID NO: 103505 - DNA, 17 bp, Arabidopsis thaliana
gccctcctttggaagtg

SEQ ID NO: 103506 - DNA, 17 bp, Arabidopsis thaliana
gccctcgacctattctc

SEQ ID NO: 103507 - DNA, 17 bp, Arabidopsis thaliana
gccctcgttgttcttgg

SEQ ID NO: 103508 - DNA, 17 bp, Arabidopsis thaliana
gccctctcgaaaggcga

SEQ ID NO: 103509 - DNA, 17 bp, Arabidopsis thaliana
gccctctcggcaacgga

SEQ ID NO: 103510 - DNA, 17 bp, Arabidopsis thaliana
gccctctgctgtagacc

SEQ ID NO: 103511 - DNA, 17 bp, Arabidopsis thaliana
gccctctgttcggatcc

SEQ ID NO: 103512 - DNA, 17 bp, Arabidopsis thaliana
gccctcttgaccaccct

SEQ ID NO: 103513 - DNA, 17 bp, Arabidopsis thaliana
gccctgataccggggga

SEQ ID NO: 103514 - DNA, 17 bp, Arabidopsis thaliana
gccctgcagcgctgtct

SEQ ID NO: 103515 - DNA, 17 bp, Arabidopsis thaliana
gccctgggcattcggtt

SEQ ID NO: 103516 - DNA, 17 bp, Arabidopsis thaliana
gccctgggcgacacacg

SEQ ID NO: 103517 - DNA, 17 bp, Arabidopsis thaliana
gccctgggctctgaccg

SEQ ID NO: 103518 - DNA, 17 bp, Arabidopsis thaliana
gccctgggctctgactg

SEQ ID NO: 103519 - DNA, 17 bp, Arabidopsis thaliana
gccctgggcttcgaccg

SEQ ID NO: 103520 - DNA, 17 bp, Arabidopsis thaliana
gccctgtttttgacatc

SEQ ID NO: 103521 - DNA, 17 bp, Arabidopsis thaliana
gccctgttttttgattg

SEQ ID NO: 103522 - DNA, 17 bp, Arabidopsis thaliana
gcccttaaaatgtcccg

SEQ ID NO: 103523 - DNA, 17 bp, Arabidopsis thaliana
gcccttagatgttctgg

SEQ ID NO: 103524 - DNA, 17 bp, Arabidopsis thaliana
gcccttatagctcagtg

SEQ ID NO: 103525 - DNA, 17 bp, Arabidopsis thaliana
gcccttatgtggagtgt

SEQ ID NO: 103526 - DNA, 17 bp, Arabidopsis thaliana
gcccttcagtccaaaga

SEQ ID NO: 103527 - DNA, 17 bp, Arabidopsis thaliana
gcccttcatcacatagc

SEQ ID NO: 103528 - DNA, 17 bp, Arabidopsis thaliana
gcccttcccccccaccc

SEQ ID NO: 103529 - DNA, 17 bp, Arabidopsis thaliana
gcccttcgtcgctaaga

SEQ ID NO: 103530 - DNA, 17 bp, Arabidopsis thaliana
gcccttctaactttgct

SEQ ID NO: 103531 - DNA, 17 bp, Arabidopsis thaliana
gcccttctagctcagtt

SEQ ID NO: 103532 - DNA, 17 bp, Arabidopsis thaliana
gcccttctgcctgggtg

SEQ ID NO: 103533 - DNA, 17 bp, Arabidopsis thaliana
gcccttgaaaatccgga

SEQ ID NO: 103534 - DNA, 17 bp, Arabidopsis thaliana
gcccttgactctagtcc

SEQ ID NO: 103535 - DNA, 17 bp, Arabidopsis thaliana
gcccttgatggtgacag

SEQ ID NO: 103536 - DNA, 17 bp, Arabidopsis thaliana
gcccttgccgaagacat

SEQ ID NO: 103537 - DNA, 17 bp, Arabidopsis thaliana
gcccttggtgcaggtcg

SEQ ID NO: 103538 - DNA, 17 bp, Arabidopsis thaliana
gcccttgtcgctaagat

SEQ ID NO: 103539 - DNA, 17 bp, Arabidopsis thaliana
gcccttgtgttttactt

SEQ ID NO: 103540 - DNA, 17 bp, Arabidopsis thaliana
gccctttcctaaaggcc

SEQ ID NO: 103541 - DNA, 17 bp, Arabidopsis thaliana
gccctttgatacgtagt

SEQ ID NO: 103542 - DNA, 17 bp, Arabidopsis thaliana
gccctttggtcgattga

SEQ ID NO: 103543 - DNA, 17 bp, Arabidopsis thaliana
gccctttgtacacaccg

SEQ ID NO: 103544 - DNA, 17 bp, Arabidopsis thaliana
gccctttgtcgctaaaa

SEQ ID NO: 103545 - DNA, 17 bp, Arabidopsis thaliana
gccctttgtcgctaaga

SEQ ID NO: 103546 - DNA, 17 bp, Arabidopsis thaliana
gccctttgtcgctagga

SEQ ID NO: 103547 - DNA, 17 bp, Arabidopsis thaliana
gccctttgtcgctcaga

SEQ ID NO: 103548 - DNA, 17 bp, Arabidopsis thaliana
gccctttgtctctaaga

SEQ ID NO: 103549 - DNA, 17 bp, Arabidopsis thaliana
gccctttgtctctcaga

SEQ ID NO: 103550 - DNA, 17 bp, Arabidopsis thaliana
gccctttgttaccctct

SEQ ID NO: 103551 - DNA, 17 bp, Arabidopsis thaliana
gcccttttaactcactg

SEQ ID NO: 103552 - DNA, 17 bp, Arabidopsis thaliana
gcccttttaactcagtg

SEQ ID NO: 103553 - DNA, 17 bp, Arabidopsis thaliana
gcccttttccctcttgg

SEQ ID NO: 103554 - DNA, 17 bp, Arabidopsis thaliana
gcccttttcctccttcc

SEQ ID NO: 103555 - DNA, 17 bp, Arabidopsis thaliana
gcccttttcctccttgg

SEQ ID NO: 103556 - DNA, 17 bp, Arabidopsis thaliana
gcccttttccttcttgg

SEQ ID NO: 103557 - DNA, 17 bp, Arabidopsis thaliana
gcccttttctcaatgcc

SEQ ID NO: 103558 - DNA, 17 bp, Arabidopsis thaliana
gcccttttctggccctt

SEQ ID NO: 103559 - DNA, 17 bp, Arabidopsis thaliana
gccctttttggaactga

SEQ ID NO: 103560 - DNA, 17 bp, Arabidopsis thaliana
gcccttttttgctaagt

SEQ ID NO: 103561 - DNA, 17 bp, Arabidopsis thaliana
gccgaaaacgccggcca

SEQ ID NO: 103562 - DNA, 17 bp, Arabidopsis thaliana
gccgaaaagacgatcgt

SEQ ID NO: 103563 - DNA, 17 bp, Arabidopsis thaliana
gccgaaacccgtaatcc

SEQ ID NO: 103564 - DNA, 17 bp, Arabidopsis thaliana
gccgaaacccgtaattc

SEQ ID NO: 103565 - DNA, 17 bp, Arabidopsis thaliana
gccgaaactcgtaatca

SEQ ID NO: 103566 - DNA, 17 bp, Arabidopsis thaliana
gccgaaactcgtaatcc

SEQ ID NO: 103567 - DNA, 17 bp, Arabidopsis thaliana
gccgaaagccctgtcag

SEQ ID NO: 103568 - DNA, 17 bp, Arabidopsis thaliana
gccgaaatcagttatgt

SEQ ID NO: 103569 - DNA, 17 bp, Arabidopsis thaliana
gccgaaatgtgtgtaag

SEQ ID NO: 103570 - DNA, 17 bp, Arabidopsis thaliana
gccgaacagggggtggg

SEQ ID NO: 103571 - DNA, 17 bp, Arabidopsis thaliana
gccgaaccccgtaattc

SEQ ID NO: 103572 - DNA, 17 bp, Arabidopsis thaliana
gccgaaccgacagacaa

SEQ ID NO: 103573 - DNA, 17 bp, Arabidopsis thaliana
gccgaactgagataaag

SEQ ID NO: 103574 - DNA, 17 bp, Arabidopsis thaliana
gccgaacttatcgggtt

SEQ ID NO: 103575 - DNA, 17 bp, Arabidopsis thaliana
gccgaagacgcctcatg

SEQ ID NO: 103576 - DNA, 17 bp, Arabidopsis thaliana
gccgaagaggggaaagg

SEQ ID NO: 103577 - DNA, 17 bp, Arabidopsis thaliana
gccgaagattgacgggt

SEQ ID NO: 103578 - DNA, 17 bp, Arabidopsis thaliana
gccgaagattttgagtc

SEQ ID NO: 103579 - DNA, 17 bp, Arabidopsis thaliana
gccgaagcccgtaatca

SEQ ID NO: 103580 - DNA, 17 bp, Arabidopsis thaliana
gccgaagcccgtaatcc

SEQ ID NO: 103581 - DNA, 17 bp, Arabidopsis thaliana
gccgaagcccgtaatct

SEQ ID NO: 103582 - DNA, 17 bp, Arabidopsis thaliana
gccgaagcccgtaattc

SEQ ID NO: 103583 - DNA, 17 bp, Arabidopsis thaliana
gccgaagcccgtaattt

SEQ ID NO: 103584 - DNA, 17 bp, Arabidopsis thaliana
gccgaagcccgttatcc

SEQ ID NO: 103585 - DNA, 17 bp, Arabidopsis thaliana
gccgaagcccttaatct

SEQ ID NO: 103586 - DNA, 17 bp, Arabidopsis thaliana
gccgaagcgagccttgg

SEQ ID NO: 103587 - DNA, 17 bp, Arabidopsis thaliana
gccgaagcgtaaaccag

SEQ ID NO: 103588 - DNA, 17 bp, Arabidopsis thaliana
gccgaaggagattcgac

SEQ ID NO: 103589 - DNA, 17 bp, Arabidopsis thaliana
gccgaaggcacgtctgc

SEQ ID NO: 103590 - DNA, 17 bp, Arabidopsis thaliana
gccgaaggcagggctag

SEQ ID NO: 103591 - DNA, 17 bp, Arabidopsis thaliana
gccgaaggcagtgctag

SEQ ID NO: 103592 - DNA, 17 bp, Arabidopsis thaliana
gccgaaggccataatcc

SEQ ID NO: 103593 - DNA, 17 bp, Arabidopsis thaliana
gccgaagtccgtatgag

SEQ ID NO: 103594 - DNA, 17 bp, Arabidopsis thaliana
gccgaagttaagtccct

SEQ ID NO: 103595 - DNA, 17 bp, Arabidopsis thaliana
gccgaatctcgtaatct

SEQ ID NO: 103596 - DNA, 17 bp, Arabidopsis thaliana
gccgaatcttgtaatcc

SEQ ID NO: 103597 - DNA, 17 bp, Arabidopsis thaliana
gccgaatctttagacca

SEQ ID NO: 103598 - DNA, 17 bp, Arabidopsis thaliana
gccgaatggctaaaacc

SEQ ID NO: 103599 - DNA, 17 bp, Arabidopsis thaliana
gccgaatttcgacttcg

SEQ ID NO: 103600 - DNA, 17 bp, Arabidopsis thaliana
gccgacaaatactattt

SEQ ID NO: 103601 - DNA, 17 bp, Arabidopsis thaliana
gccgacaaatagaggga

SEQ ID NO: 103602 - DNA, 17 bp, Arabidopsis thaliana
gccgacaaatcagttta

SEQ ID NO: 103603 - DNA, 17 bp, Arabidopsis thaliana
gccgacaaccaagaagt

SEQ ID NO: 103604 - DNA, 17 bp, Arabidopsis thaliana
gccgacaaccaagatgt

SEQ ID NO: 103605 - DNA, 17 bp, Arabidopsis thaliana
gccgacaagtactattt

SEQ ID NO: 103606 - DNA, 17 bp, Arabidopsis thaliana
gccgacacagtctgcta

SEQ ID NO: 103607 - DNA, 17 bp, Arabidopsis thaliana
gccgacacgtggggtgc

SEQ ID NO: 103608 - DNA, 17 bp, Arabidopsis thaliana
gccgacaggatcgctca

SEQ ID NO: 103609 - DNA, 17 bp, Arabidopsis thaliana
gccgacagggtcggggc

SEQ ID NO: 103610 - DNA, 17 bp, Arabidopsis thaliana
gccgacatggcggcttg

SEQ ID NO: 103611 - DNA, 17 bp, Arabidopsis thaliana
gccgacatgttttccag

SEQ ID NO: 103612 - DNA, 17 bp, Arabidopsis thaliana
gccgacatttggttgaa

SEQ ID NO: 103613 - DNA, 17 bp, Arabidopsis thaliana
gccgaccaccggtgttg

SEQ ID NO: 103614 - DNA, 17 bp, Arabidopsis thaliana
gccgaccaggccttatt

SEQ ID NO: 103615 - DNA, 17 bp, Arabidopsis thaliana
gccgaccaggctgcagt

SEQ ID NO: 103616 - DNA, 17 bp, Arabidopsis thaliana
gccgaccagggatcagc

SEQ ID NO: 103617 - DNA, 17 bp, Arabidopsis thaliana
gccgaccatttggccga

SEQ ID NO: 103618 - DNA, 17 bp, Arabidopsis thaliana
gccgaccctcaggagct

SEQ ID NO: 103619 - DNA, 17 bp, Arabidopsis thaliana
gccgaccctcagtagca

SEQ ID NO: 103620 - DNA, 17 bp, Arabidopsis thaliana
gccgaccctcagtagga

SEQ ID NO: 103621 - DNA, 17 bp, Arabidopsis thaliana
gccgaccctcagtagta

SEQ ID NO: 103622 - DNA, 17 bp, Arabidopsis thaliana
gccgaccctccgtagga

SEQ ID NO: 103623 - DNA, 17 bp, Arabidopsis thaliana
gccgaccctgtcgcacc

SEQ ID NO: 103624 - DNA, 17 bp, Arabidopsis thaliana
gccgacccttagtagga

SEQ ID NO: 103625 - DNA, 17 bp, Arabidopsis thaliana
gccgaccgaagggacaa

SEQ ID NO: 103626 - DNA, 17 bp, Arabidopsis thaliana
gccgaccgaccttgatc

SEQ ID NO: 103627 - DNA, 17 bp, Arabidopsis thaliana
gccgaccgggggacgac

SEQ ID NO: 103628 - DNA, 17 bp, Arabidopsis thaliana
gccgaccgggggacgga

SEQ ID NO: 103629 - DNA, 17 bp, Arabidopsis thaliana
gccgacgacaaatctgg

SEQ ID NO: 103630 - DNA, 17 bp, Arabidopsis thaliana
gccgacgacaccggtat

SEQ ID NO: 103631 - DNA, 17 bp, Arabidopsis thaliana
gccgacgaggacggagg

SEQ ID NO: 103632 - DNA, 17 bp, Arabidopsis thaliana
gccgacgcctgcccggt

SEQ ID NO: 103633 - DNA, 17 bp, Arabidopsis thaliana
gccgacggagtgacggt

SEQ ID NO: 103634 - DNA, 17 bp, Arabidopsis thaliana
gccgacggcacgtctgc

SEQ ID NO: 103635 - DNA, 17 bp, Arabidopsis thaliana
gccgacgggttcggaac

SEQ ID NO: 103636 - DNA, 17 bp, Arabidopsis thaliana
gccgacggtgtatgtga

SEQ ID NO: 103637 - DNA, 17 bp, Arabidopsis thaliana
gccgacgtcagagttca

SEQ ID NO: 103638 - DNA, 17 bp, Arabidopsis thaliana
gccgacgtgccggagtg

SEQ ID NO: 103639 - DNA, 17 bp, Arabidopsis thaliana
gccgactaaaacattca

SEQ ID NO: 103640 - DNA, 17 bp, Arabidopsis thaliana
gccgactaatatacgac

SEQ ID NO: 103641 - DNA, 17 bp, Arabidopsis thaliana
gccgactacgaaaatgc

SEQ ID NO: 103642 - DNA, 17 bp, Arabidopsis thaliana
gccgactatgacaaatg

SEQ ID NO: 103643 - DNA, 17 bp, Arabidopsis thaliana
gccgactcaagctgctg

SEQ ID NO: 103644 - DNA, 17 bp, Arabidopsis thaliana
gccgactcagtgacggg

SEQ ID NO: 103645 - DNA, 17 bp, Arabidopsis thaliana
gccgactctcggcaacg

SEQ ID NO: 103646 - DNA, 17 bp, Arabidopsis thaliana
gccgactgatttatgat

SEQ ID NO: 103647 - DNA, 17 bp, Arabidopsis thaliana
gccgactggaaaattta

SEQ ID NO: 103648 - DNA, 17 bp, Arabidopsis thaliana
gccgactggaaaatttc

SEQ ID NO: 103649 - DNA, 17 bp, Arabidopsis thaliana
gccgactggggttgtcg

SEQ ID NO: 103650 - DNA, 17 bp, Arabidopsis thaliana
gccgactgtggacgtct

SEQ ID NO: 103651 - DNA, 17 bp, Arabidopsis thaliana
gccgacttagtgagcaa

SEQ ID NO: 103652 - DNA, 17 bp, Arabidopsis thaliana
gccgacttcaaggatcc

SEQ ID NO: 103653 - DNA, 17 bp, Arabidopsis thaliana
gccgacttgagtttccc

SEQ ID NO: 103654 - DNA, 17 bp, Arabidopsis thaliana
gccgacttggactaagt

SEQ ID NO: 103655 - DNA, 17 bp, Arabidopsis thaliana
gccgacttggctcgggc

SEQ ID NO: 103656 - DNA, 17 bp, Arabidopsis thaliana
gccgactttagccccaa

SEQ ID NO: 103657 - DNA, 17 bp, Arabidopsis thaliana
gccgactttgccccagt

SEQ ID NO: 103658 - DNA, 17 bp, Arabidopsis thaliana
gccgagaacagggccag

SEQ ID NO: 103659 - DNA, 17 bp, Arabidopsis thaliana
gccgagactggagactt

SEQ ID NO: 103660 - DNA, 17 bp, Arabidopsis thaliana
gccgagagagagctttg

SEQ ID NO: 103661 - DNA, 17 bp, Arabidopsis thaliana
gccgagagcacgtctgc

SEQ ID NO: 103662 - DNA, 17 bp, Arabidopsis thaliana
gccgagagtgaaagtta

SEQ ID NO: 103663 - DNA, 17 bp, Arabidopsis thaliana
gccgagagttatacgca

SEQ ID NO: 103664 - DNA, 17 bp, Arabidopsis thaliana
gccgagatgaatgttgc

SEQ ID NO: 103665 - DNA, 17 bp, Arabidopsis thaliana
gccgagattcattcagc

SEQ ID NO: 103666 - DNA, 17 bp, Arabidopsis thaliana
gccgagatttggtgaat

SEQ ID NO: 103667 - DNA, 17 bp, Arabidopsis thaliana
gccgagcaaaaaggctg

SEQ ID NO: 103668 - DNA, 17 bp, Arabidopsis thaliana
gccgagcacgtctgcct

SEQ ID NO: 103669 - DNA, 17 bp, Arabidopsis thaliana
gccgagcataggaagtg

SEQ ID NO: 103670 - DNA, 17 bp, Arabidopsis thaliana
gccgagccaaacgccag

SEQ ID NO: 103671 - DNA, 17 bp, Arabidopsis thaliana
gccgagcgatttgtctg

SEQ ID NO: 103672 - DNA, 17 bp, Arabidopsis thaliana
gccgagcgcacgtcccc

SEQ ID NO: 103673 - DNA, 17 bp, Arabidopsis thaliana
gccgagcgcacgtccgc

SEQ ID NO: 103674 - DNA, 17 bp, Arabidopsis thaliana
gccgagcgcacgtctgc

SEQ ID NO: 103675 - DNA, 17 bp, Arabidopsis thaliana
gccgaggacacgtcggc

SEQ ID NO: 103676 - DNA, 17 bp, Arabidopsis thaliana
gccgaggacacgtctgc

SEQ ID NO: 103677 - DNA, 17 bp, Arabidopsis thaliana
gccgaggacttcttaag

SEQ ID NO: 103678 - DNA, 17 bp, Arabidopsis thaliana
gccgaggagaagcggtt

SEQ ID NO: 103679 - DNA, 17 bp, Arabidopsis thaliana
gccgaggattccttgtt

SEQ ID NO: 103680 - DNA, 17 bp, Arabidopsis thaliana
gccgaggcacgtctgcc

SEQ ID NO: 103681 - DNA, 17 bp, Arabidopsis thaliana
gccgaggccacgtctgc

SEQ ID NO: 103682 - DNA, 17 bp, Arabidopsis thaliana
gccgaggcctatgggtt

SEQ ID NO: 103683 - DNA, 17 bp, Arabidopsis thaliana
gccgagggatgtggcac

SEQ ID NO: 103684 - DNA, 17 bp, Arabidopsis thaliana
gccgagggcacatctgc

SEQ ID NO: 103685 - DNA, 17 bp, Arabidopsis thaliana
gccgagggcacggctgc

SEQ ID NO: 103686 - DNA, 17 bp, Arabidopsis thaliana
gccgagggcacgtcccc

SEQ ID NO: 103687 - DNA, 17 bp, Arabidopsis thaliana
gccgagggcacgtccct

SEQ ID NO: 103688 - DNA, 17 bp, Arabidopsis thaliana
gccgagggcacgtccgc

SEQ ID NO: 103689 - DNA, 17 bp, Arabidopsis thaliana
gccgagggcacgtcgcc

SEQ ID NO: 103690 - DNA, 17 bp, Arabidopsis thaliana
gccgagggcacgtcggc

SEQ ID NO: 103691 - DNA, 17 bp, Arabidopsis thaliana
gccgagggcacgtctac

SEQ ID NO: 103692 - DNA, 17 bp, Arabidopsis thaliana
gccgagggcacgtctcc

SEQ ID NO: 103693 - DNA, 17 bp, Arabidopsis thaliana
gccgagggcacgtctct

SEQ ID NO: 103694 - DNA, 17 bp, Arabidopsis thaliana
gccgagggcacgtctga

SEQ ID NO: 103695 - DNA, 17 bp, Arabidopsis thaliana
gccgagggcacgtctgc

SEQ ID NO: 103696 - DNA, 17 bp, Arabidopsis thaliana
gccgagggcacgtctgg

SEQ ID NO: 103697 - DNA, 17 bp, Arabidopsis thaliana
gccgagggcacgtctgt

SEQ ID NO: 103698 - DNA, 17 bp, Arabidopsis thaliana
gccgagggcacgtcttg

SEQ ID NO: 103699 - DNA, 17 bp, Arabidopsis thaliana
gccgagggcacgtgact

SEQ ID NO: 103700 - DNA, 17 bp, Arabidopsis thaliana
gccgagggcacgtttgc

SEQ ID NO: 103701 - DNA, 17 bp, Arabidopsis thaliana
gccgagggcacttctgc

SEQ ID NO: 103702 - DNA, 17 bp, Arabidopsis thaliana
gccgagggcatgtctgt

SEQ ID NO: 103703 - DNA, 17 bp, Arabidopsis thaliana
gccgagggccgtctgcc

SEQ ID NO: 103704 - DNA, 17 bp, Arabidopsis thaliana
gccgagggcgtctgcct

SEQ ID NO: 103705 - DNA, 17 bp, Arabidopsis thaliana
gccgagggctcgtctgc

SEQ ID NO: 103706 - DNA, 17 bp, Arabidopsis thaliana
gccgaggggcggtccgc

SEQ ID NO: 103707 - DNA, 17 bp, Arabidopsis thaliana
gccgagggtgtcgatcc

SEQ ID NO: 103708 - DNA, 17 bp, Arabidopsis thaliana
gccgagggttgcctggg

SEQ ID NO: 103709 - DNA, 17 bp, Arabidopsis thaliana
gccgaggtcacgtctgc

SEQ ID NO: 103710 - DNA, 17 bp, Arabidopsis thaliana
gccgagtaactttcagc

SEQ ID NO: 103711 - DNA, 17 bp, Arabidopsis thaliana
gccgagtatggccaggc

SEQ ID NO: 103712 - DNA, 17 bp, Arabidopsis thaliana
gccgagtatggccccag

SEQ ID NO: 103713 - DNA, 17 bp, Arabidopsis thaliana
gccgagtatggccccgg

SEQ ID NO: 103714 - DNA, 17 bp, Arabidopsis thaliana
gccgagtgcacgtctgc

SEQ ID NO: 103715 - DNA, 17 bp, Arabidopsis thaliana
gccgagtggaagggccg

SEQ ID NO: 103716 - DNA, 17 bp, Arabidopsis thaliana
gccgagtggttaaggct

SEQ ID NO: 103717 - DNA, 17 bp, Arabidopsis thaliana
gccgagttcacacgtgc

SEQ ID NO: 103718 - DNA, 17 bp, Arabidopsis thaliana
gccgagttccacaagtt

SEQ ID NO: 103719 - DNA, 17 bp, Arabidopsis thaliana
gccgagtttccggatct

SEQ ID NO: 103720 - DNA, 17 bp, Arabidopsis thaliana
gccgataaaggatgttg

SEQ ID NO: 103721 - DNA, 17 bp, Arabidopsis thaliana
gccgataaagtaccata

SEQ ID NO: 103722 - DNA, 17 bp, Arabidopsis thaliana
gccgataacagatccgg

SEQ ID NO: 103723 - DNA, 17 bp, Arabidopsis thaliana
gccgataaccaagatgt

SEQ ID NO: 103724 - DNA, 17 bp, Arabidopsis thaliana
gccgatacctttcccca

SEQ ID NO: 103725 - DNA, 17 bp, Arabidopsis thaliana
gccgatactgttagtcc

SEQ ID NO: 103726 - DNA, 17 bp, Arabidopsis thaliana
gccgatatgtccgagtg

SEQ ID NO: 103727 - DNA, 17 bp, Arabidopsis thaliana
gccgatcgattcggggc

SEQ ID NO: 103728 - DNA, 17 bp, Arabidopsis thaliana
gccgatctctcaaaagt

SEQ ID NO: 103729 - DNA, 17 bp, Arabidopsis thaliana
gccgatctgtgtaagcc

SEQ ID NO: 103730 - DNA, 17 bp, Arabidopsis thaliana
gccgatgagtgagccgg

SEQ ID NO: 103731 - DNA, 17 bp, Arabidopsis thaliana
gccgatgatttgagaag

SEQ ID NO: 103732 - DNA, 17 bp, Arabidopsis thaliana
gccgatggaccgacgga

SEQ ID NO: 103733 - DNA, 17 bp, Arabidopsis thaliana
gccgatggcacgtctgc

SEQ ID NO: 103734 - DNA, 17 bp, Arabidopsis thaliana
gccgatggtacttggac

SEQ ID NO: 103735 - DNA, 17 bp, Arabidopsis thaliana
gccgatggtatggccgg

SEQ ID NO: 103736 - DNA, 17 bp, Arabidopsis thaliana
gccgatggtgatccaca

SEQ ID NO: 103737 - DNA, 17 bp, Arabidopsis thaliana
gccgatgtcgtccagcg

SEQ ID NO: 103738 - DNA, 17 bp, Arabidopsis thaliana
gccgatgtcttctttgc

SEQ ID NO: 103739 - DNA, 17 bp, Arabidopsis thaliana
gccgatgttgtcgacga

SEQ ID NO: 103740 - DNA, 17 bp, Arabidopsis thaliana
gccgattagggaacatc

SEQ ID NO: 103741 - DNA, 17 bp, Arabidopsis thaliana
gccgattagtcgctgaa

SEQ ID NO: 103742 - DNA, 17 bp, Arabidopsis thaliana
gccgattatcatcacga

SEQ ID NO: 103743 - DNA, 17 bp, Arabidopsis thaliana
gccgattatggactgcg

SEQ ID NO: 103744 - DNA, 17 bp, Arabidopsis thaliana
gccgattcgaatgacgt

SEQ ID NO: 103745 - DNA, 17 bp, Arabidopsis thaliana
gccgattcgagtgacgc

SEQ ID NO: 103746 - DNA, 17 bp, Arabidopsis thaliana
gccgattcggaataggg

SEQ ID NO: 103747 - DNA, 17 bp, Arabidopsis thaliana
gccgattcggggcgtgg

SEQ ID NO: 103748 - DNA, 17 bp, Arabidopsis thaliana
gccgattctacctttgg

SEQ ID NO: 103749 - DNA, 17 bp, Arabidopsis thaliana
gccgattctcgacaggt

SEQ ID NO: 103750 - DNA, 17 bp, Arabidopsis thaliana
gccgattctgtccaact

SEQ ID NO: 103751 - DNA, 17 bp, Arabidopsis thaliana
gccgattctgtgaaccg

SEQ ID NO: 103752 - DNA, 17 bp, Arabidopsis thaliana
gccgattctttccactc

SEQ ID NO: 103753 - DNA, 17 bp, Arabidopsis thaliana
gccgattcttttgagta

SEQ ID NO: 103754 - DNA, 17 bp, Arabidopsis thaliana
gccgattgaatgacgat

SEQ ID NO: 103755 - DNA, 17 bp, Arabidopsis thaliana
gccgattgaccgaagtc

SEQ ID NO: 103756 - DNA, 17 bp, Arabidopsis thaliana
gccgattgtgtccaaat

SEQ ID NO: 103757 - DNA, 17 bp, Arabidopsis thaliana
gccgatttagcgactgt

SEQ ID NO: 103758 - DNA, 17 bp, Arabidopsis thaliana
gccgattttcactctcc

SEQ ID NO: 103759 - DNA, 17 bp, Arabidopsis thaliana
gccgattttcactctct

SEQ ID NO: 103760 - DNA, 17 bp, Arabidopsis thaliana
gccgattttccctctcc

SEQ ID NO: 103761 - DNA, 17 bp, Arabidopsis thaliana
gccgattttcgatacag

SEQ ID NO: 103762 - DNA, 17 bp, Arabidopsis thaliana
gccgattttcttcctcc

SEQ ID NO: 103763 - DNA, 17 bp, Arabidopsis thaliana
gccgattttcttcctgc

SEQ ID NO: 103764 - DNA, 17 bp, Arabidopsis thaliana
gccgattttcttcttcc

SEQ ID NO: 103765 - DNA, 17 bp, Arabidopsis thaliana
gccgattttggctgata

SEQ ID NO: 103766 - DNA, 17 bp, Arabidopsis thaliana
gccgattttgtaccgtt

SEQ ID NO: 103767 - DNA, 17 bp, Arabidopsis thaliana
gccgatttttttgcccg

SEQ ID NO: 103768 - DNA, 17 bp, Arabidopsis thaliana
gccgcaaagtcgtaaga

SEQ ID NO: 103769 - DNA, 17 bp, Arabidopsis thaliana
gccgcaatgagaagacg

SEQ ID NO: 103770 - DNA, 17 bp, Arabidopsis thaliana
gccgcaatgctcaagga

SEQ ID NO: 103771 - DNA, 17 bp, Arabidopsis thaliana
gccgcaattggtgttga

SEQ ID NO: 103772 - DNA, 17 bp, Arabidopsis thaliana
gccgcaccacgaggcac

SEQ ID NO: 103773 - DNA, 17 bp, Arabidopsis thaliana
gccgcaccacgaggcgc

SEQ ID NO: 103774 - DNA, 17 bp, Arabidopsis thaliana
gccgcacccgccctccc

SEQ ID NO: 103775 - DNA, 17 bp, Arabidopsis thaliana
gccgcacctacaaagta

SEQ ID NO: 103776 - DNA, 17 bp, Arabidopsis thaliana
gccgcacgtctgcctgg

SEQ ID NO: 103777 - DNA, 17 bp, Arabidopsis thaliana
gccgcactgctgtactg

SEQ ID NO: 103778 - DNA, 17 bp, Arabidopsis thaliana
gccgcacttgatgtaaa

SEQ ID NO: 103779 - DNA, 17 bp, Arabidopsis thaliana
gccgcagaacgacccac

SEQ ID NO: 103780 - DNA, 17 bp, Arabidopsis thaliana
gccgcagaacgaccctc

SEQ ID NO: 103781 - DNA, 17 bp, Arabidopsis thaliana
gccgcagaaggagctcc

SEQ ID NO: 103782 - DNA, 17 bp, Arabidopsis thaliana
gccgcagatctgttttt

SEQ ID NO: 103783 - DNA, 17 bp, Arabidopsis thaliana
gccgcagatcttggtgg

SEQ ID NO: 103784 - DNA, 17 bp, Arabidopsis thaliana
gccgcagcgaaagcgag

SEQ ID NO: 103785 - DNA, 17 bp, Arabidopsis thaliana
gccgcagcgactataat

SEQ ID NO: 103786 - DNA, 17 bp, Arabidopsis thaliana
gccgcagcgactgtaat

SEQ ID NO: 103787 - DNA, 17 bp, Arabidopsis thaliana
gccgcaggtactcgtgg

SEQ ID NO: 103788 - DNA, 17 bp, Arabidopsis thaliana
gccgcaggttgttgttt

SEQ ID NO: 103789 - DNA, 17 bp, Arabidopsis thaliana
gccgcaggtttatgtcg

SEQ ID NO: 103790 - DNA, 17 bp, Arabidopsis thaliana
gccgcagtgactgtaat

SEQ ID NO: 103791 - DNA, 17 bp, Arabidopsis thaliana
gccgcatgagagtgaga

SEQ ID NO: 103792 - DNA, 17 bp, Arabidopsis thaliana
gccgcattctgtagatg

SEQ ID NO: 103793 - DNA, 17 bp, Arabidopsis thaliana
gccgccacagtgtctct

SEQ ID NO: 103794 - DNA, 17 bp, Arabidopsis thaliana
gccgccaccaccaccac

SEQ ID NO: 103795 - DNA, 17 bp, Arabidopsis thaliana
gccgccaccgtaatccg

SEQ ID NO: 103796 - DNA, 17 bp, Arabidopsis thaliana
gccgccagagagctgat

SEQ ID NO: 103797 - DNA, 17 bp, Arabidopsis thaliana
gccgccatcgtcgctgg

SEQ ID NO: 103798 - DNA, 17 bp, Arabidopsis thaliana
gccgccatgatcgcttt

SEQ ID NO: 103799 - DNA, 17 bp, Arabidopsis thaliana
gccgcccaatggttgac

SEQ ID NO: 103800 - DNA, 17 bp, Arabidopsis thaliana
gccgccccgtgcctccc

SEQ ID NO: 103801 - DNA, 17 bp, Arabidopsis thaliana
gccgcccgattgccgac

SEQ ID NO: 103802 - DNA, 17 bp, Arabidopsis thaliana
gccgcccgattgcctac

SEQ ID NO: 103803 - DNA, 17 bp, Arabidopsis thaliana
gccgcccgggggacgga

SEQ ID NO: 103804 - DNA, 17 bp, Arabidopsis thaliana
gccgccctttgtcgcta

SEQ ID NO: 103805 - DNA, 17 bp, Arabidopsis thaliana
gccgccgatgagatctg

SEQ ID NO: 103806 - DNA, 17 bp, Arabidopsis thaliana
gccgccggagcgacaca

SEQ ID NO: 103807 - DNA, 17 bp, Arabidopsis thaliana
gccgccggatccaagtt

SEQ ID NO: 103808 - DNA, 17 bp, Arabidopsis thaliana
gccgccggcttcgggaa

SEQ ID NO: 103809 - DNA, 17 bp, Arabidopsis thaliana
gccgccgggattttcgc

SEQ ID NO: 103810 - DNA, 17 bp, Arabidopsis thaliana
gccgccgggggacggac

SEQ ID NO: 103811 - DNA, 17 bp, Arabidopsis thaliana
gccgccggtacgctcac

SEQ ID NO: 103812 - DNA, 17 bp, Arabidopsis thaliana
gccgccggtgcagatct

SEQ ID NO: 103813 - DNA, 17 bp, Arabidopsis thaliana
gccgccggtgcttgtcg

SEQ ID NO: 103814 - DNA, 17 bp, Arabidopsis thaliana
gccgccgtctatgaccg

SEQ ID NO: 103815 - DNA, 17 bp, Arabidopsis thaliana
gccgccgtgatcgtggt

SEQ ID NO: 103816 - DNA, 17 bp, Arabidopsis thaliana
gccgcctctattttcgc

SEQ ID NO: 103817 - DNA, 17 bp, Arabidopsis thaliana
gccgcctctgaacttcg

SEQ ID NO: 103818 - DNA, 17 bp, Arabidopsis thaliana
gccgcctgccgtcgcga

SEQ ID NO: 103819 - DNA, 17 bp, Arabidopsis thaliana
gccgcctgtagatggat

SEQ ID NO: 103820 - DNA, 17 bp, Arabidopsis thaliana
gccgccttagctcagtg

SEQ ID NO: 103821 - DNA, 17 bp, Arabidopsis thaliana
gccgcgaactcaacaat

SEQ ID NO: 103822 - DNA, 17 bp, Arabidopsis thaliana
gccgcgaagtccgtaat

SEQ ID NO: 103823 - DNA, 17 bp, Arabidopsis thaliana
gccgcgacacacgtgct

SEQ ID NO: 103824 - DNA, 17 bp, Arabidopsis thaliana
gccgcgagttcgttcct

SEQ ID NO: 103825 - DNA, 17 bp, Arabidopsis thaliana
gccgcgcgattgccgac

SEQ ID NO: 103826 - DNA, 17 bp, Arabidopsis thaliana
gccgcgcgggggacgga

SEQ ID NO: 103827 - DNA, 17 bp, Arabidopsis thaliana
gccgcggcaagtcctaa

SEQ ID NO: 103828 - DNA, 17 bp, Arabidopsis thaliana
gccgcgggttcgagccc

SEQ ID NO: 103829 - DNA, 17 bp, Arabidopsis thaliana
gccgcgggttcgagcgc

SEQ ID NO: 103830 - DNA, 17 bp, Arabidopsis thaliana
gccgcggtaattccagc

SEQ ID NO: 103831 - DNA, 17 bp, Arabidopsis thaliana
gccgcggttttttcaga

SEQ ID NO: 103832 - DNA, 17 bp, Arabidopsis thaliana
gccgcggtttttttttc

SEQ ID NO: 103833 - DNA, 17 bp, Arabidopsis thaliana
gccgcgtctctgctgac

SEQ ID NO: 103834 - DNA, 17 bp, Arabidopsis thaliana
gccgcgtgcagtatgaa

SEQ ID NO: 103835 - DNA, 17 bp, Arabidopsis thaliana
gccgcgtgccggccggc

SEQ ID NO: 103836 - DNA, 17 bp, Arabidopsis thaliana
gccgcgtgccggccggg

SEQ ID NO: 103837 - DNA, 17 bp, Arabidopsis thaliana
gccgcgtggaggtagaa

SEQ ID NO: 103838 - DNA, 17 bp, Arabidopsis thaliana
gccgctaaagaatcgcc

SEQ ID NO: 103839 - DNA, 17 bp, Arabidopsis thaliana
gccgctaccgacgacac

SEQ ID NO: 103840 - DNA, 17 bp, Arabidopsis thaliana
gccgctagtccgcgggc

SEQ ID NO: 103841 - DNA, 17 bp, Arabidopsis thaliana
gccgctagtgagatgat

SEQ ID NO: 103842 - DNA, 17 bp, Arabidopsis thaliana
gccgctagttccggttt

SEQ ID NO: 103843 - DNA, 17 bp, Arabidopsis thaliana
gccgctatggtcaaacc

SEQ ID NO: 103844 - DNA, 17 bp, Arabidopsis thaliana
gccgctatggtcaaatt

SEQ ID NO: 103845 - DNA, 17 bp, Arabidopsis thaliana
gccgctatggtgaaact

SEQ ID NO: 103846 - DNA, 17 bp, Arabidopsis thaliana
gccgctatggtgaaagt

SEQ ID NO: 103847 - DNA, 17 bp, Arabidopsis thaliana
gccgctatggtgaaata

SEQ ID NO: 103848 - DNA, 17 bp, Arabidopsis thaliana
gccgctatggtgaaatc

SEQ ID NO: 103849 - DNA, 17 bp, Arabidopsis thaliana
gccgctatggtgaaatg

SEQ ID NO: 103850 - DNA, 17 bp, Arabidopsis thaliana
gccgctatggtgaaatt

SEQ ID NO: 103851 - DNA, 17 bp, Arabidopsis thaliana
gccgctatggtgggatc

SEQ ID NO: 103852 - DNA, 17 bp, Arabidopsis thaliana
gccgctatgttgaaatt

SEQ ID NO: 103853 - DNA, 17 bp, Arabidopsis thaliana
gccgctattacgttttt

SEQ ID NO: 103854 - DNA, 17 bp, Arabidopsis thaliana
gccgctattcggctaag

SEQ ID NO: 103855 - DNA, 17 bp, Arabidopsis thaliana
gccgctcacgcccggcc

SEQ ID NO: 103856 - DNA, 17 bp, Arabidopsis thaliana
gccgctcacgcccggtc

SEQ ID NO: 103857 - DNA, 17 bp, Arabidopsis thaliana
gccgctcagaaacggtc

SEQ ID NO: 103858 - DNA, 17 bp, Arabidopsis thaliana
gccgctcagccggaggt

SEQ ID NO: 103859 - DNA, 17 bp, Arabidopsis thaliana
gccgctccgacccaccc

SEQ ID NO: 103860 - DNA, 17 bp, Arabidopsis thaliana
gccgctccgattggacc

SEQ ID NO: 103861 - DNA, 17 bp, Arabidopsis thaliana
gccgctccgcctttggt

SEQ ID NO: 103862 - DNA, 17 bp, Arabidopsis thaliana
gccgctctattttggca

SEQ ID NO: 103863 - DNA, 17 bp, Arabidopsis thaliana
gccgctctgcacgttag

SEQ ID NO: 103864 - DNA, 17 bp, Arabidopsis thaliana
gccgctgaaagtccgat

SEQ ID NO: 103865 - DNA, 17 bp, Arabidopsis thaliana
gccgctgagacggtcca

SEQ ID NO: 103866 - DNA, 17 bp, Arabidopsis thaliana
gccgctgagagtactcc

SEQ ID NO: 103867 - DNA, 17 bp, Arabidopsis thaliana
gccgctgccgcaaccgc

SEQ ID NO: 103868 - DNA, 17 bp, Arabidopsis thaliana
gccgctgcgattggacc

SEQ ID NO: 103869 - DNA, 17 bp, Arabidopsis thaliana
gccgctgctacaatgtt

SEQ ID NO: 103870 - DNA, 17 bp, Arabidopsis thaliana
gccgctgctccggtctt

SEQ ID NO: 103871 - DNA, 17 bp, Arabidopsis thaliana
gccgctggaccctacct

SEQ ID NO: 103872 - DNA, 17 bp, Arabidopsis thaliana
gccgctggtgaaattgg

SEQ ID NO: 103873 - DNA, 17 bp, Arabidopsis thaliana
gccgcttcacttgctct

SEQ ID NO: 103874 - DNA, 17 bp, Arabidopsis thaliana
gccgcttcttagaggga

SEQ ID NO: 103875 - DNA, 17 bp, Arabidopsis thaliana
gccgcttctttggccct

SEQ ID NO: 103876 - DNA, 17 bp, Arabidopsis thaliana
gccgcttgcagagagaa

SEQ ID NO: 103877 - DNA, 17 bp, Arabidopsis thaliana
gccgcttggatcagatt

SEQ ID NO: 103878 - DNA, 17 bp, Arabidopsis thaliana
gccgctttccctacgtc

SEQ ID NO: 103879 - DNA, 17 bp, Arabidopsis thaliana
gccgctttgaggttccc

SEQ ID NO: 103880 - DNA, 17 bp, Arabidopsis thaliana
gccgctttggccgagcg

SEQ ID NO: 103881 - DNA, 17 bp, Arabidopsis thaliana
gccgctttggccgagtg

SEQ ID NO: 103882 - DNA, 17 bp, Arabidopsis thaliana
gccgctttgtccgctgc

SEQ ID NO: 103883 - DNA, 17 bp, Arabidopsis thaliana
gccgcttttgcttctac

SEQ ID NO: 103884 - DNA, 17 bp, Arabidopsis thaliana
gccggaaatgaccacaa

SEQ ID NO: 103885 - DNA, 17 bp, Arabidopsis thaliana
gccggaactgttctgct

SEQ ID NO: 103886 - DNA, 17 bp, Arabidopsis thaliana
gccggaagcgtcgttcg

SEQ ID NO: 103887 - DNA, 17 bp, Arabidopsis thaliana
gccggaagtcctcgtgt

SEQ ID NO: 103888 - DNA, 17 bp, Arabidopsis thaliana
gccggaatagctcagtt

SEQ ID NO: 103889 - DNA, 17 bp, Arabidopsis thaliana
gccggaatctacggaaa

SEQ ID NO: 103890 - DNA, 17 bp, Arabidopsis thaliana
gccggaattgtatgttt

SEQ ID NO: 103891 - DNA, 17 bp, Arabidopsis thaliana
gccggacacgagagccg

SEQ ID NO: 103892 - DNA, 17 bp, Arabidopsis thaliana
gccggaccatggtggtg

SEQ ID NO: 103893 - DNA, 17 bp, Arabidopsis thaliana
gccggaccgatgtggat

SEQ ID NO: 103894 - DNA, 17 bp, Arabidopsis thaliana
gccggacggagattggc

SEQ ID NO: 103895 - DNA, 17 bp, Arabidopsis thaliana
gccggacgggggacgga

SEQ ID NO: 103896 - DNA, 17 bp, Arabidopsis thaliana
gccggactctcaccgtc

SEQ ID NO: 103897 - DNA, 17 bp, Arabidopsis thaliana
gccggagcccgtaatcc

SEQ ID NO: 103898 - DNA, 17 bp, Arabidopsis thaliana
gccggagccggtaatcc

SEQ ID NO: 103899 - DNA, 17 bp, Arabidopsis thaliana
gccggagcgatttgtct

SEQ ID NO: 103900 - DNA, 17 bp, Arabidopsis thaliana
gccggagctagggtcca

SEQ ID NO: 103901 - DNA, 17 bp, Arabidopsis thaliana
gccggagctttatgact

SEQ ID NO: 103902 - DNA, 17 bp, Arabidopsis thaliana
gccggaggtagagtcca

SEQ ID NO: 103903 - DNA, 17 bp, Arabidopsis thaliana
gccggaggtaggatcca

SEQ ID NO: 103904 - DNA, 17 bp, Arabidopsis thaliana
gccggaggtagggtcca

SEQ ID NO: 103905 - DNA, 17 bp, Arabidopsis thaliana
gccggaggtagggtccg

SEQ ID NO: 103906 - DNA, 17 bp, Arabidopsis thaliana
gccggaggtagggttca

SEQ ID NO: 103907 - DNA, 17 bp, Arabidopsis thaliana
gccggaggtaggttcca

SEQ ID NO: 103908 - DNA, 17 bp, Arabidopsis thaliana
gccggagtctgtggggc

SEQ ID NO: 103909 - DNA, 17 bp, Arabidopsis thaliana
gccggagttagggtcca

SEQ ID NO: 103910 - DNA, 17 bp, Arabidopsis thaliana
gccggatacggatccgg

SEQ ID NO: 103911 - DNA, 17 bp, Arabidopsis thaliana
gccggatcaacgttttg

SEQ ID NO: 103912 - DNA, 17 bp, Arabidopsis thaliana
gccggatcaacgttttt

SEQ ID NO: 103913 - DNA, 17 bp, Arabidopsis thaliana
gccggatcaattgttga

SEQ ID NO: 103914 - DNA, 17 bp, Arabidopsis thaliana
gccggatcagccgatag

SEQ ID NO: 103915 - DNA, 17 bp, Arabidopsis thaliana
gccggatccaagttctc

SEQ ID NO: 103916 - DNA, 17 bp, Arabidopsis thaliana
gccggatccggtgctag

SEQ ID NO: 103917 - DNA, 17 bp, Arabidopsis thaliana
gccggatcctgtggcac

SEQ ID NO: 103918 - DNA, 17 bp, Arabidopsis thaliana
gccggatcgcggtggct

SEQ ID NO: 103919 - DNA, 17 bp, Arabidopsis thaliana
gccggatctggtgattt

SEQ ID NO: 103920 - DNA, 17 bp, Arabidopsis thaliana
gccggatgtagggtcca

SEQ ID NO: 103921 - DNA, 17 bp, Arabidopsis thaliana
gccggatgttctgtaac

SEQ ID NO: 103922 - DNA, 17 bp, Arabidopsis thaliana
gccggatgttgtagcgt

SEQ ID NO: 103923 - DNA, 17 bp, Arabidopsis thaliana
gccggatttttcggatc

SEQ ID NO: 103924 - DNA, 17 bp, Arabidopsis thaliana
gccggcaaagtgattag

SEQ ID NO: 103925 - DNA, 17 bp, Arabidopsis thaliana
gccggcaagcaggagcc

SEQ ID NO: 103926 - DNA, 17 bp, Arabidopsis thaliana
gccggcagaccaacaaa

SEQ ID NO: 103927 - DNA, 17 bp, Arabidopsis thaliana
gccggcagatgtgcgac

SEQ ID NO: 103928 - DNA, 17 bp, Arabidopsis thaliana
gccggccaggggacgga

SEQ ID NO: 103929 - DNA, 17 bp, Arabidopsis thaliana
gccggccaggtgtcgaa

SEQ ID NO: 103930 - DNA, 17 bp, Arabidopsis thaliana
gccggccctgggctaaa

SEQ ID NO: 103931 - DNA, 17 bp, Arabidopsis thaliana
gccggcccttgtttgct

SEQ ID NO: 103932 - DNA, 17 bp, Arabidopsis thaliana
gccggccgagggacgga

SEQ ID NO: 103933 - DNA, 17 bp, Arabidopsis thaliana
gccggccgccacagatt

SEQ ID NO: 103934 - DNA, 17 bp, Arabidopsis thaliana
gccggccggaggacgga

SEQ ID NO: 103935 - DNA, 17 bp, Arabidopsis thaliana
gccggccggccggccgg

SEQ ID NO: 103936 - DNA, 17 bp, Arabidopsis thaliana
gccggccggccggcggg

SEQ ID NO: 103937 - DNA, 17 bp, Arabidopsis thaliana
gccggccggcggacgga

SEQ ID NO: 103938 - DNA, 17 bp, Arabidopsis thaliana
gccggccggcggacggg

SEQ ID NO: 103939 - DNA, 17 bp, Arabidopsis thaliana
gccggccggcgggcgga

SEQ ID NO: 103940 - DNA, 17 bp, Arabidopsis thaliana
gccggccgggacggact

SEQ ID NO: 103941 - DNA, 17 bp, Arabidopsis thaliana
gccggccgggagacgga

SEQ ID NO: 103942 - DNA, 17 bp, Arabidopsis thaliana
gccggccgggcgacgga

SEQ ID NO: 103943 - DNA, 17 bp, Arabidopsis thaliana
gccggccgggcggcgga

SEQ ID NO: 103944 - DNA, 17 bp, Arabidopsis thaliana
gccggccgggcggggga

SEQ ID NO: 103945 - DNA, 17 bp, Arabidopsis thaliana
gccggccggggaacgga

SEQ ID NO: 103946 - DNA, 17 bp, Arabidopsis thaliana
gccggccggggacggac

SEQ ID NO: 103947 - DNA, 17 bp, Arabidopsis thaliana
gccggccggggatggac

SEQ ID NO: 103948 - DNA, 17 bp, Arabidopsis thaliana
gccggccggggcggact

SEQ ID NO: 103949 - DNA, 17 bp, Arabidopsis thaliana
gccggccgggggaacgc

SEQ ID NO: 103950 - DNA, 17 bp, Arabidopsis thaliana
gccggccgggggaagga

SEQ ID NO: 103951 - DNA, 17 bp, Arabidopsis thaliana
gccggccgggggacaga

SEQ ID NO: 103952 - DNA, 17 bp, Arabidopsis thaliana
gccggccgggggacccc

SEQ ID NO: 103953 - DNA, 17 bp, Arabidopsis thaliana
gccggccgggggaccga

SEQ ID NO: 103954 - DNA, 17 bp, Arabidopsis thaliana
gccggccgggggacgat

SEQ ID NO: 103955 - DNA, 17 bp, Arabidopsis thaliana
gccggccgggggacgca

SEQ ID NO: 103956 - DNA, 17 bp, Arabidopsis thaliana
gccggccgggggacgga

SEQ ID NO: 103957 - DNA, 17 bp, Arabidopsis thaliana
gccggccgggggacggg

SEQ ID NO: 103958 - DNA, 17 bp, Arabidopsis thaliana
gccggccgggggacggt

SEQ ID NO: 103959 - DNA, 17 bp, Arabidopsis thaliana
gccggccgggggatgga

SEQ ID NO: 103960 - DNA, 17 bp, Arabidopsis thaliana
gccggccggggggacgg

SEQ ID NO: 103961 - DNA, 17 bp, Arabidopsis thaliana
gccggccggggggatgg

SEQ ID NO: 103962 - DNA, 17 bp, Arabidopsis thaliana
gccggccggggggcgat

SEQ ID NO: 103963 - DNA, 17 bp, Arabidopsis thaliana
gccggccggggggcgga

SEQ ID NO: 103964 - DNA, 17 bp, Arabidopsis thaliana
gccggccggggtcggac

SEQ ID NO: 103965 - DNA, 17 bp, Arabidopsis thaliana
gccggccgggtgacgga

SEQ ID NO: 103966 - DNA, 17 bp, Arabidopsis thaliana
gccggccgggtgacggg

SEQ ID NO: 103967 - DNA, 17 bp, Arabidopsis thaliana
gccggccggtccgcctt

SEQ ID NO: 103968 - DNA, 17 bp, Arabidopsis thaliana
gccggccggtggaccga

SEQ ID NO: 103969 - DNA, 17 bp, Arabidopsis thaliana
gccggccggtggacgga

SEQ ID NO: 103970 - DNA, 17 bp, Arabidopsis thaliana
gccggccgtgggacgga

SEQ ID NO: 103971 - DNA, 17 bp, Arabidopsis thaliana
gccggcctggggacgga

SEQ ID NO: 103972 - DNA, 17 bp, Arabidopsis thaliana
gccggcgaccgaagccc

SEQ ID NO: 103973 - DNA, 17 bp, Arabidopsis thaliana
gccggcgactcataggc

SEQ ID NO: 103974 - DNA, 17 bp, Arabidopsis thaliana
gccggcgactcatagtc

SEQ ID NO: 103975 - DNA, 17 bp, Arabidopsis thaliana
gccggcgatggtcgtta

SEQ ID NO: 103976 - DNA, 17 bp, Arabidopsis thaliana
gccggcgcctgaacctt

SEQ ID NO: 103977 - DNA, 17 bp, Arabidopsis thaliana
gccggcggcctctcatg

SEQ ID NO: 103978 - DNA, 17 bp, Arabidopsis thaliana
gccggcgggggacggac

SEQ ID NO: 103979 - DNA, 17 bp, Arabidopsis thaliana
gccggcggtgtgagagg

SEQ ID NO: 103980 - DNA, 17 bp, Arabidopsis thaliana
gccggcgtccacattga

SEQ ID NO: 103981 - DNA, 17 bp, Arabidopsis thaliana
gccggcgttctcagctt

SEQ ID NO: 103982 - DNA, 17 bp, Arabidopsis thaliana
gccggctaaggattgag

SEQ ID NO: 103983 - DNA, 17 bp, Arabidopsis thaliana
gccggctatgttgtacg

SEQ ID NO: 103984 - DNA, 17 bp, Arabidopsis thaliana
gccggctcaaaactacg

SEQ ID NO: 103985 - DNA, 17 bp, Arabidopsis thaliana
gccggctcagaatgtgt

SEQ ID NO: 103986 - DNA, 17 bp, Arabidopsis thaliana
gccggctctgttcttta

SEQ ID NO: 103987 - DNA, 17 bp, Arabidopsis thaliana
gccggctgagttacggt

SEQ ID NO: 103988 - DNA, 17 bp, Arabidopsis thaliana
gccggctggggacggac

SEQ ID NO: 103989 - DNA, 17 bp, Arabidopsis thaliana
gccggctgggggacggt

SEQ ID NO: 103990 - DNA, 17 bp, Arabidopsis thaliana
gccggcttatgtaatca

SEQ ID NO: 103991 - DNA, 17 bp, Arabidopsis thaliana
gccggcttatgtttgta

SEQ ID NO: 103992 - DNA, 17 bp, Arabidopsis thaliana
gccggcttcttagaggg

SEQ ID NO: 103993 - DNA, 17 bp, Arabidopsis thaliana
gccggctttgtgtttca

SEQ ID NO: 103994 - DNA, 17 bp, Arabidopsis thaliana
gccgggaagtcctcgtg

SEQ ID NO: 103995 - DNA, 17 bp, Arabidopsis thaliana
gccgggacaaagggtcg

SEQ ID NO: 103996 - DNA, 17 bp, Arabidopsis thaliana
gccgggacaaagggtgg

SEQ ID NO: 103997 - DNA, 17 bp, Arabidopsis thaliana
gccgggaccaaaacatg

SEQ ID NO: 103998 - DNA, 17 bp, Arabidopsis thaliana
gccgggaccaaaacttg

SEQ ID NO: 103999 - DNA, 17 bp, Arabidopsis thaliana
gccgggaccagatggga

SEQ ID NO: 104000 - DNA, 17 bp, Arabidopsis thaliana
gccgggagtcgccgcga

SEQ ID NO: 104001 - DNA, 17 bp, Arabidopsis thaliana
gccgggataactcagtt

SEQ ID NO: 104002 - DNA, 17 bp, Arabidopsis thaliana
gccgggatagctaattg

SEQ ID NO: 104003 - DNA, 17 bp, Arabidopsis thaliana
gccgggatagctcaggt

SEQ ID NO: 104004 - DNA, 17 bp, Arabidopsis thaliana
gccgggatagctcagta

SEQ ID NO: 104005 - DNA, 17 bp, Arabidopsis thaliana
gccgggatagctcagtc

SEQ ID NO: 104006 - DNA, 17 bp, Arabidopsis thaliana
gccgggatagctcagtg

SEQ ID NO: 104007 - DNA, 17 bp, Arabidopsis thaliana
gccgggatagctcagtt

SEQ ID NO: 104008 - DNA, 17 bp, Arabidopsis thaliana
gccgggatagctcattt

SEQ ID NO: 104009 - DNA, 17 bp, Arabidopsis thaliana
gccgggatagctttgga

SEQ ID NO: 104010 - DNA, 17 bp, Arabidopsis thaliana
gccgggatggctcagtt

SEQ ID NO: 104011 - DNA, 17 bp, Arabidopsis thaliana
gccgggattcgacttcc

SEQ ID NO: 104012 - DNA, 17 bp, Arabidopsis thaliana
gccgggcgggggacgga

SEQ ID NO: 104013 - DNA, 17 bp, Arabidopsis thaliana
gccgggcgggggacggg

SEQ ID NO: 104014 - DNA, 17 bp, Arabidopsis thaliana
gccgggctagctcagtt

SEQ ID NO: 104015 - DNA, 17 bp, Arabidopsis thaliana
gccgggctgggctcggg

SEQ ID NO: 104016 - DNA, 17 bp, Arabidopsis thaliana
gccggggaacggactgg

SEQ ID NO: 104017 - DNA, 17 bp, Arabidopsis thaliana
gccggggcacgtctgcc

SEQ ID NO: 104018 - DNA, 17 bp, Arabidopsis thaliana
gccgggggacggacggg

SEQ ID NO: 104019 - DNA, 17 bp, Arabidopsis thaliana
gccgggggacggactgg

SEQ ID NO: 104020 - DNA, 17 bp, Arabidopsis thaliana
gccgggggacgtactgg

SEQ ID NO: 104021 - DNA, 17 bp, Arabidopsis thaliana
gccgggggactgactgg

SEQ ID NO: 104022 - DNA, 17 bp, Arabidopsis thaliana
gccgggggcacgtctgc

SEQ ID NO: 104023 - DNA, 17 bp, Arabidopsis thaliana
gccggggggacggacgg

SEQ ID NO: 104024 - DNA, 17 bp, Arabidopsis thaliana
gccgggggggacggact

SEQ ID NO: 104025 - DNA, 17 bp, Arabidopsis thaliana
gccggggggggacggac

SEQ ID NO: 104026 - DNA, 17 bp, Arabidopsis thaliana
gccggggttttgtgata

SEQ ID NO: 104027 - DNA, 17 bp, Arabidopsis thaliana
gccggggttttgtgatg

SEQ ID NO: 104028 - DNA, 17 bp, Arabidopsis thaliana
gccgggtccgaggattc

SEQ ID NO: 104029 - DNA, 17 bp, Arabidopsis thaliana
gccgggttacggtgccc

SEQ ID NO: 104030 - DNA, 17 bp, Arabidopsis thaliana
gccgggttacggttgcg

SEQ ID NO: 104031 - DNA, 17 bp, Arabidopsis thaliana
gccgggtttacgggttg

SEQ ID NO: 104032 - DNA, 17 bp, Arabidopsis thaliana
gccggtataagtgtgct

SEQ ID NO: 104033 - DNA, 17 bp, Arabidopsis thaliana
gccggtattgtcggagg

SEQ ID NO: 104034 - DNA, 17 bp, Arabidopsis thaliana
gccggtccaaacggatt

SEQ ID NO: 104035 - DNA, 17 bp, Arabidopsis thaliana
gccggtccgcccttggt

SEQ ID NO: 104036 - DNA, 17 bp, Arabidopsis thaliana
gccggtccgcctgtgcg

SEQ ID NO: 104037 - DNA, 17 bp, Arabidopsis thaliana
gccggtccgccttggtg

SEQ ID NO: 104038 - DNA, 17 bp, Arabidopsis thaliana
gccggtccgcctttcgt

SEQ ID NO: 104039 - DNA, 17 bp, Arabidopsis thaliana
gccggtccgcctttgat

SEQ ID NO: 104040 - DNA, 17 bp, Arabidopsis thaliana
gccggtccgcctttgga

SEQ ID NO: 104041 - DNA, 17 bp, Arabidopsis thaliana
gccggtccgcctttggt

SEQ ID NO: 104042 - DNA, 17 bp, Arabidopsis thaliana
gccggtccgcctttgtt

SEQ ID NO: 104043 - DNA, 17 bp, Arabidopsis thaliana
gccggtccgcttggtgt

SEQ ID NO: 104044 - DNA, 17 bp, Arabidopsis thaliana
gccggtccgtctttggt

SEQ ID NO: 104045 - DNA, 17 bp, Arabidopsis thaliana
gccggtcctcctttgga

SEQ ID NO: 104046 - DNA, 17 bp, Arabidopsis thaliana
gccggtcctcctttggt

SEQ ID NO: 104047 - DNA, 17 bp, Arabidopsis thaliana
gccggtccttggtgtgc

SEQ ID NO: 104048 - DNA, 17 bp, Arabidopsis thaliana
gccggtcgcctttggtg

SEQ ID NO: 104049 - DNA, 17 bp, Arabidopsis thaliana
gccggtcgggggacgga

SEQ ID NO: 104050 - DNA, 17 bp, Arabidopsis thaliana
gccggtcgggggacggg

SEQ ID NO: 104051 - DNA, 17 bp, Arabidopsis thaliana
gccggtctcagttcgga

SEQ ID NO: 104052 - DNA, 17 bp, Arabidopsis thaliana
gccggtgactcataggc

SEQ ID NO: 104053 - DNA, 17 bp, Arabidopsis thaliana
gccggtgatgtctacga

SEQ ID NO: 104054 - DNA, 17 bp, Arabidopsis thaliana
gccggtgcctgacacgg

SEQ ID NO: 104055 - DNA, 17 bp, Arabidopsis thaliana
gccggtggctctatctc

SEQ ID NO: 104056 - DNA, 17 bp, Arabidopsis thaliana
gccggtgtatcggaggc

SEQ ID NO: 104057 - DNA, 17 bp, Arabidopsis thaliana
gccggttccatctctat

SEQ ID NO: 104058 - DNA, 17 bp, Arabidopsis thaliana
gccggttcgagtgacgt

SEQ ID NO: 104059 - DNA, 17 bp, Arabidopsis thaliana
gccggttgacatgattt

SEQ ID NO: 104060 - DNA, 17 bp, Arabidopsis thaliana
gccggttgagatctcga

SEQ ID NO: 104061 - DNA, 17 bp, Arabidopsis thaliana
gccggttgggtctatga

SEQ ID NO: 104062 - DNA, 17 bp, Arabidopsis thaliana
gccggtttcttagaggg

SEQ ID NO: 104063 - DNA, 17 bp, Arabidopsis thaliana
gccggtttggacgcggt

SEQ ID NO: 104064 - DNA, 17 bp, Arabidopsis thaliana
gccggtttgtcttgggt

SEQ ID NO: 104065 - DNA, 17 bp, Arabidopsis thaliana
gccgtaaacgatggata

SEQ ID NO: 104066 - DNA, 17 bp, Arabidopsis thaliana
gccgtaaagatgtcgag

SEQ ID NO: 104067 - DNA, 17 bp, Arabidopsis thaliana
gccgtaaggtgttgggt

SEQ ID NO: 104068 - DNA, 17 bp, Arabidopsis thaliana
gccgtacagattgcgct

SEQ ID NO: 104069 - DNA, 17 bp, Arabidopsis thaliana
gccgtacggtgtcagca

SEQ ID NO: 104070 - DNA, 17 bp, Arabidopsis thaliana
gccgtagacaccggaga

SEQ ID NO: 104071 - DNA, 17 bp, Arabidopsis thaliana
gccgtagaccaggtcac

SEQ ID NO: 104072 - DNA, 17 bp, Arabidopsis thaliana
gccgtagcgaaagcgag

SEQ ID NO: 104073 - DNA, 17 bp, Arabidopsis thaliana
gccgtagggccaataga

SEQ ID NO: 104074 - DNA, 17 bp, Arabidopsis thaliana
gccgtaggtagggtcca

SEQ ID NO: 104075 - DNA, 17 bp, Arabidopsis thaliana
gccgtatcggaaggtgc

SEQ ID NO: 104076 - DNA, 17 bp, Arabidopsis thaliana
gccgtatggtgaaattg

SEQ ID NO: 104077 - DNA, 17 bp, Arabidopsis thaliana
gccgtatggtgaaattt

SEQ ID NO: 104078 - DNA, 17 bp, Arabidopsis thaliana
gccgtattagctcagtg

SEQ ID NO: 104079 - DNA, 17 bp, Arabidopsis thaliana
gccgtattgatgatcat

SEQ ID NO: 104080 - DNA, 17 bp, Arabidopsis thaliana
gccgtatttagccaagt

SEQ ID NO: 104081 - DNA, 17 bp, Arabidopsis thaliana
gccgtcaaaatttggga

SEQ ID NO: 104082 - DNA, 17 bp, Arabidopsis thaliana
gccgtcacacggaatcg

SEQ ID NO: 104083 - DNA, 17 bp, Arabidopsis thaliana
gccgtcacataacatac

SEQ ID NO: 104084 - DNA, 17 bp, Arabidopsis thaliana
gccgtcacatagtttta

SEQ ID NO: 104085 - DNA, 17 bp, Arabidopsis thaliana
gccgtcacttgccgaca

SEQ ID NO: 104086 - DNA, 17 bp, Arabidopsis thaliana
gccgtcagatattggtg

SEQ ID NO: 104087 - DNA, 17 bp, Arabidopsis thaliana
gccgtcagtgcccgaac

SEQ ID NO: 104088 - DNA, 17 bp, Arabidopsis thaliana
gccgtccacgcccggtc

SEQ ID NO: 104089 - DNA, 17 bp, Arabidopsis thaliana
gccgtccattattgcaa

SEQ ID NO: 104090 - DNA, 17 bp, Arabidopsis thaliana
gccgtcccatcctacgg

SEQ ID NO: 104091 - DNA, 17 bp, Arabidopsis thaliana
gccgtccgcctttggtg

SEQ ID NO: 104092 - DNA, 17 bp, Arabidopsis thaliana
gccgtccgggggacgga

SEQ ID NO: 104093 - DNA, 17 bp, Arabidopsis thaliana
gccgtccgtatgagtct

SEQ ID NO: 104094 - DNA, 17 bp, Arabidopsis thaliana
gccgtccgtgctgattg

SEQ ID NO: 104095 - DNA, 17 bp, Arabidopsis thaliana
gccgtcgattctcaggt

SEQ ID NO: 104096 - DNA, 17 bp, Arabidopsis thaliana
gccgtcggggcaagagc

SEQ ID NO: 104097 - DNA, 17 bp, Arabidopsis thaliana
gccgtcggtgcagatct

SEQ ID NO: 104098 - DNA, 17 bp, Arabidopsis thaliana
gccgtcgtagtctagct

SEQ ID NO: 104099 - DNA, 17 bp, Arabidopsis thaliana
gccgtcgtcgataaacc

SEQ ID NO: 104100 - DNA, 17 bp, Arabidopsis thaliana
gccgtcgtttcatttgc

SEQ ID NO: 104101 - DNA, 17 bp, Arabidopsis thaliana
gccgtctcgtattactg

SEQ ID NO: 104102 - DNA, 17 bp, Arabidopsis thaliana
gccgtctgcctgggtgt

SEQ ID NO: 104103 - DNA, 17 bp, Arabidopsis thaliana
gccgtcttaactcagtg

SEQ ID NO: 104104 - DNA, 17 bp, Arabidopsis thaliana
gccgtcttacctcagtg

SEQ ID NO: 104105 - DNA, 17 bp, Arabidopsis thaliana
gccgtcttagctaagtg

SEQ ID NO: 104106 - DNA, 17 bp, Arabidopsis thaliana
gccgtcttagctcaccc

SEQ ID NO: 104107 - DNA, 17 bp, Arabidopsis thaliana
gccgtcttagctcactc

SEQ ID NO: 104108 - DNA, 17 bp, Arabidopsis thaliana
gccgtcttagctcactg

SEQ ID NO: 104109 - DNA, 17 bp, Arabidopsis thaliana
gccgtcttagctcagcg

SEQ ID NO: 104110 - DNA, 17 bp, Arabidopsis thaliana
gccgtcttagctcaggg

SEQ ID NO: 104111 - DNA, 17 bp, Arabidopsis thaliana
gccgtcttagctcagta

SEQ ID NO: 104112 - DNA, 17 bp, Arabidopsis thaliana
gccgtcttagctcagtc

SEQ ID NO: 104113 - DNA, 17 bp, Arabidopsis thaliana
gccgtcttagctcagtg

SEQ ID NO: 104114 - DNA, 17 bp, Arabidopsis thaliana
gccgtcttagctcagtt

SEQ ID NO: 104115 - DNA, 17 bp, Arabidopsis thaliana
gccgtcttagctcattg

SEQ ID NO: 104116 - DNA, 17 bp, Arabidopsis thaliana
gccgtcttagctgagtg

SEQ ID NO: 104117 - DNA, 17 bp, Arabidopsis thaliana
gccgtcttagcttagtg

SEQ ID NO: 104118 - DNA, 17 bp, Arabidopsis thaliana
gccgtcttggctcagtg

SEQ ID NO: 104119 - DNA, 17 bp, Arabidopsis thaliana
gccgtgaagaggagaca

SEQ ID NO: 104120 - DNA, 17 bp, Arabidopsis thaliana
gccgtgacatgacgcag

SEQ ID NO: 104121 - DNA, 17 bp, Arabidopsis thaliana
gccgtgactgccgctct

SEQ ID NO: 104122 - DNA, 17 bp, Arabidopsis thaliana
gccgtgactgccgctgt

SEQ ID NO: 104123 - DNA, 17 bp, Arabidopsis thaliana
gccgtgacttaggttct

SEQ ID NO: 104124 - DNA, 17 bp, Arabidopsis thaliana
gccgtgaggctttccca

SEQ ID NO: 104125 - DNA, 17 bp, Arabidopsis thaliana
gccgtgatacactttgc

SEQ ID NO: 104126 - DNA, 17 bp, Arabidopsis thaliana
gccgtgatacattttgc

SEQ ID NO: 104127 - DNA, 17 bp, Arabidopsis thaliana
gccgtgatcgatgaatg

SEQ ID NO: 104128 - DNA, 17 bp, Arabidopsis thaliana
gccgtgatcgtggactc

SEQ ID NO: 104129 - DNA, 17 bp, Arabidopsis thaliana
gccgtgatcgtggtccg

SEQ ID NO: 104130 - DNA, 17 bp, Arabidopsis thaliana
gccgtgatcgtggtcgg

SEQ ID NO: 104131 - DNA, 17 bp, Arabidopsis thaliana
gccgtgatcgtggtcta

SEQ ID NO: 104132 - DNA, 17 bp, Arabidopsis thaliana
gccgtgatcgtggtctc

SEQ ID NO: 104133 - DNA, 17 bp, Arabidopsis thaliana
gccgtgatcgtggtctg

SEQ ID NO: 104134 - DNA, 17 bp, Arabidopsis thaliana
gccgtgatcgtggtctt

SEQ ID NO: 104135 - DNA, 17 bp, Arabidopsis thaliana
gccgtgatcgtgtctgc

SEQ ID NO: 104136 - DNA, 17 bp, Arabidopsis thaliana
gccgtgatcgttgtctg

SEQ ID NO: 104137 - DNA, 17 bp, Arabidopsis thaliana
gccgtgcaatcgagtgg

SEQ ID NO: 104138 - DNA, 17 bp, Arabidopsis thaliana
gccgtgcattggtcggc

SEQ ID NO: 104139 - DNA, 17 bp, Arabidopsis thaliana
gccgtgcgctggattat

SEQ ID NO: 104140 - DNA, 17 bp, Arabidopsis thaliana
gccgtgctgaatctgtt

SEQ ID NO: 104141 - DNA, 17 bp, Arabidopsis thaliana
gccgtggaccgacgcgg

SEQ ID NO: 104142 - DNA, 17 bp, Arabidopsis thaliana
gccgtggactgcagcga

SEQ ID NO: 104143 - DNA, 17 bp, Arabidopsis thaliana
gccgtggagacctggcc

SEQ ID NO: 104144 - DNA, 17 bp, Arabidopsis thaliana
gccgtggagacctgggc

SEQ ID NO: 104145 - DNA, 17 bp, Arabidopsis thaliana
gccgtggagacctgggt

SEQ ID NO: 104146 - DNA, 17 bp, Arabidopsis thaliana
gccgtggatgtggaggc

SEQ ID NO: 104147 - DNA, 17 bp, Arabidopsis thaliana
gccgtgggtccccacag

SEQ ID NO: 104148 - DNA, 17 bp, Arabidopsis thaliana
gccgtgggttcgatccc

SEQ ID NO: 104149 - DNA, 17 bp, Arabidopsis thaliana
gccgtgggttcgttccc

SEQ ID NO: 104150 - DNA, 17 bp, Arabidopsis thaliana
gccgtgggttctcccca

SEQ ID NO: 104151 - DNA, 17 bp, Arabidopsis thaliana
gccgtgggttctccctt

SEQ ID NO: 104152 - DNA, 17 bp, Arabidopsis thaliana
gccgtgtaccgcgggat

SEQ ID NO: 104153 - DNA, 17 bp, Arabidopsis thaliana
gccgtgtcgttcagcgg

SEQ ID NO: 104154 - DNA, 17 bp, Arabidopsis thaliana
gccgtgttcggctaagc

SEQ ID NO: 104155 - DNA, 17 bp, Arabidopsis thaliana
gccgtgttgttgccaga

SEQ ID NO: 104156 - DNA, 17 bp, Arabidopsis thaliana
gccgttaagatccgatt

SEQ ID NO: 104157 - DNA, 17 bp, Arabidopsis thaliana
gccgttagctcagttgg

SEQ ID NO: 104158 - DNA, 17 bp, Arabidopsis thaliana
gccgttagttaaaccgt

SEQ ID NO: 104159 - DNA, 17 bp, Arabidopsis thaliana
gccgttcccagtccgtc

SEQ ID NO: 104160 - DNA, 17 bp, Arabidopsis thaliana
gccgttccgcctttggt

SEQ ID NO: 104161 - DNA, 17 bp, Arabidopsis thaliana
gccgttcgccgggacct

SEQ ID NO: 104162 - DNA, 17 bp, Arabidopsis thaliana
gccgttcttagttgggg

SEQ ID NO: 104163 - DNA, 17 bp, Arabidopsis thaliana
gccgttcttagttggtg

SEQ ID NO: 104164 - DNA, 17 bp, Arabidopsis thaliana
gccgttgaagttactgg

SEQ ID NO: 104165 - DNA, 17 bp, Arabidopsis thaliana
gccgttgacccactttt

SEQ ID NO: 104166 - DNA, 17 bp, Arabidopsis thaliana
gccgttgagcggtctag

SEQ ID NO: 104167 - DNA, 17 bp, Arabidopsis thaliana
gccgttgagcggtcttg

SEQ ID NO: 104168 - DNA, 17 bp, Arabidopsis thaliana
gccgttgagtcgctgca

SEQ ID NO: 104169 - DNA, 17 bp, Arabidopsis thaliana
gccgttgccatttgggt

SEQ ID NO: 104170 - DNA, 17 bp, Arabidopsis thaliana
gccgttggacctttcta

SEQ ID NO: 104171 - DNA, 17 bp, Arabidopsis thaliana
gccgttggatttgtggg

SEQ ID NO: 104172 - DNA, 17 bp, Arabidopsis thaliana
gccgttggcggccttct

SEQ ID NO: 104173 - DNA, 17 bp, Arabidopsis thaliana
gccgttggggaagaatc

SEQ ID NO: 104174 - DNA, 17 bp, Arabidopsis thaliana
gccgttgttggctttat

SEQ ID NO: 104175 - DNA, 17 bp, Arabidopsis thaliana
gccgttgtttaatggtg

SEQ ID NO: 104176 - DNA, 17 bp, Arabidopsis thaliana
gccgtttactcgaccgt

SEQ ID NO: 104177 - DNA, 17 bp, Arabidopsis thaliana
gccgtttagagcgggta

SEQ ID NO: 104178 - DNA, 17 bp, Arabidopsis thaliana
gccgtttaggccaagga

SEQ ID NO: 104179 - DNA, 17 bp, Arabidopsis thaliana
gccgtttaggccaaggg

SEQ ID NO: 104180 - DNA, 17 bp, Arabidopsis thaliana
gccgtttcagacctaag

SEQ ID NO: 104181 - DNA, 17 bp, Arabidopsis thaliana
gccgtttcccggctggt

SEQ ID NO: 104182 - DNA, 17 bp, Arabidopsis thaliana
gccgtttcgggtctctc

SEQ ID NO: 104183 - DNA, 17 bp, Arabidopsis thaliana
gccgtttctatatctca

SEQ ID NO: 104184 - DNA, 17 bp, Arabidopsis thaliana
gccgtttgccaagattt

SEQ ID NO: 104185 - DNA, 17 bp, Arabidopsis thaliana
gccgtttgggactgggt

SEQ ID NO: 104186 - DNA, 17 bp, Arabidopsis thaliana
gccgtttggtagctcgt

SEQ ID NO: 104187 - DNA, 17 bp, Arabidopsis thaliana
gccgtttgttaggattc

SEQ ID NO: 104188 - DNA, 17 bp, Arabidopsis thaliana
gccgttttagctcagtg

SEQ ID NO: 104189 - DNA, 17 bp, Arabidopsis thaliana
gccgttttcagattcgt

SEQ ID NO: 104190 - DNA, 17 bp, Arabidopsis thaliana
gccgttttgggatgatt

SEQ ID NO: 104191 - DNA, 17 bp, Arabidopsis thaliana
gccgttttgggtatgac

SEQ ID NO: 104192 - DNA, 17 bp, Arabidopsis thaliana
gcctaaaactggtgaag

SEQ ID NO: 104193 - DNA, 17 bp, Arabidopsis thaliana
gcctaaaatcgcttagg

SEQ ID NO: 104194 - DNA, 17 bp, Arabidopsis thaliana
gcctaaaccgcaacatc

SEQ ID NO: 104195 - DNA, 17 bp, Arabidopsis thaliana
gcctaaaccgtgttcgt

SEQ ID NO: 104196 - DNA, 17 bp, Arabidopsis thaliana
gcctaaacgcgattatg

SEQ ID NO: 104197 - DNA, 17 bp, Arabidopsis thaliana
gcctaaactcttggaag

SEQ ID NO: 104198 - DNA, 17 bp, Arabidopsis thaliana
gcctaaactgtgaatga

SEQ ID NO: 104199 - DNA, 17 bp, Arabidopsis thaliana
gcctaaactgtgaatgc

SEQ ID NO: 104200 - DNA, 17 bp, Arabidopsis thaliana
gcctaaaggaattacgg

SEQ ID NO: 104201 - DNA, 17 bp, Arabidopsis thaliana
gcctaaatcggcggacc

SEQ ID NO: 104202 - DNA, 17 bp, Arabidopsis thaliana
gcctaaattatcaatga

SEQ ID NO: 104203 - DNA, 17 bp, Arabidopsis thaliana
gcctaacgcttagacgg

SEQ ID NO: 104204 - DNA, 17 bp, Arabidopsis thaliana
gcctaacggatgtgtta

SEQ ID NO: 104205 - DNA, 17 bp, Arabidopsis thaliana
gcctaagcccgggcttt

SEQ ID NO: 104206 - DNA, 17 bp, Arabidopsis thaliana
gcctaagctcctactga

SEQ ID NO: 104207 - DNA, 17 bp, Arabidopsis thaliana
gcctaagctcctactta

SEQ ID NO: 104208 - DNA, 17 bp, Arabidopsis thaliana
gcctaagtagagtttcc

SEQ ID NO: 104209 - DNA, 17 bp, Arabidopsis thaliana
gcctaagtagtgtatcc

SEQ ID NO: 104210 - DNA, 17 bp, Arabidopsis thaliana
gcctaagtagttttcct

SEQ ID NO: 104211 - DNA, 17 bp, Arabidopsis thaliana
gcctaagttccctggaa

SEQ ID NO: 104212 - DNA, 17 bp, Arabidopsis thaliana
gcctaatccacatcgat

SEQ ID NO: 104213 - DNA, 17 bp, Arabidopsis thaliana
gcctacaaatgcaattg

SEQ ID NO: 104214 - DNA, 17 bp, Arabidopsis thaliana
gcctacagactttgtta

SEQ ID NO: 104215 - DNA, 17 bp, Arabidopsis thaliana
gcctaccaatgcgacat

SEQ ID NO: 104216 - DNA, 17 bp, Arabidopsis thaliana
gcctaccatggtggtaa

SEQ ID NO: 104217 - DNA, 17 bp, Arabidopsis thaliana
gcctaccatttgcgaac

SEQ ID NO: 104218 - DNA, 17 bp, Arabidopsis thaliana
gcctaccctcagtagga

SEQ ID NO: 104219 - DNA, 17 bp, Arabidopsis thaliana
gcctaccgtgcgctgga

SEQ ID NO: 104220 - DNA, 17 bp, Arabidopsis thaliana
gcctacgatccgattca

SEQ ID NO: 104221 - DNA, 17 bp, Arabidopsis thaliana
gcctacgatgggtgacc

SEQ ID NO: 104222 - DNA, 17 bp, Arabidopsis thaliana
gcctacgctctggatac

SEQ ID NO: 104223 - DNA, 17 bp, Arabidopsis thaliana
gcctacgctctggattc

SEQ ID NO: 104224 - DNA, 17 bp, Arabidopsis thaliana
gcctacgggtcctgaaa

SEQ ID NO: 104225 - DNA, 17 bp, Arabidopsis thaliana
gcctacgggtcctgaac

SEQ ID NO: 104226 - DNA, 17 bp, Arabidopsis thaliana
gcctacggtgctgctgt

SEQ ID NO: 104227 - DNA, 17 bp, Arabidopsis thaliana
gcctactagataaacca

SEQ ID NO: 104228 - DNA, 17 bp, Arabidopsis thaliana
gcctactatcgcacccg

SEQ ID NO: 104229 - DNA, 17 bp, Arabidopsis thaliana
gcctagaccgctgacgg

SEQ ID NO: 104230 - DNA, 17 bp, Arabidopsis thaliana
gcctagatcttcttaga

SEQ ID NO: 104231 - DNA, 17 bp, Arabidopsis thaliana
gcctagcgcagtctttc

SEQ ID NO: 104232 - DNA, 17 bp, Arabidopsis thaliana
gcctaggctgtcccgag

SEQ ID NO: 104233 - DNA, 17 bp, Arabidopsis thaliana
gcctagggcacgtctgc

SEQ ID NO: 104234 - DNA, 17 bp, Arabidopsis thaliana
gcctaggtgaacctgcg

SEQ ID NO: 104235 - DNA, 17 bp, Arabidopsis thaliana
gcctagtttctttgata

SEQ ID NO: 104236 - DNA, 17 bp, Arabidopsis thaliana
gcctataagatctggtt

SEQ ID NO: 104237 - DNA, 17 bp, Arabidopsis thaliana
gcctataggtacgagtt

SEQ ID NO: 104238 - DNA, 17 bp, Arabidopsis thaliana
gcctataggtgtgaagg

SEQ ID NO: 104239 - DNA, 17 bp, Arabidopsis thaliana
gcctatcataaactgca

SEQ ID NO: 104240 - DNA, 17 bp, Arabidopsis thaliana
gcctatcgactttccag

SEQ ID NO: 104241 - DNA, 17 bp, Arabidopsis thaliana
gcctatcgatcctttaa

SEQ ID NO: 104242 - DNA, 17 bp, Arabidopsis thaliana
gcctatcgatcctttag

SEQ ID NO: 104243 - DNA, 17 bp, Arabidopsis thaliana
gcctatggccggtttcg

SEQ ID NO: 104244 - DNA, 17 bp, Arabidopsis thaliana
gcctatgggccgcctgt

SEQ ID NO: 104245 - DNA, 17 bp, Arabidopsis thaliana
gcctatggggtcgcttc

SEQ ID NO: 104246 - DNA, 17 bp, Arabidopsis thaliana
gcctatgtgacttggac

SEQ ID NO: 104247 - DNA, 17 bp, Arabidopsis thaliana
gcctattacatgctgtg

SEQ ID NO: 104248 - DNA, 17 bp, Arabidopsis thaliana
gcctattagcccagttg

SEQ ID NO: 104249 - DNA, 17 bp, Arabidopsis thaliana
gcctattagctcagttg

SEQ ID NO: 104250 - DNA, 17 bp, Arabidopsis thaliana
gcctattagtgccacat

SEQ ID NO: 104251 - DNA, 17 bp, Arabidopsis thaliana
gcctattgcctaaaaca

SEQ ID NO: 104252 - DNA, 17 bp, Arabidopsis thaliana
gcctattgctttctgat

SEQ ID NO: 104253 - DNA, 17 bp, Arabidopsis thaliana
gcctattgctttctttc

SEQ ID NO: 104254 - DNA, 17 bp, Arabidopsis thaliana
gcctattggaaatgatt

SEQ ID NO: 104255 - DNA, 17 bp, Arabidopsis thaliana
gcctattgtgtcggctt

SEQ ID NO: 104256 - DNA, 17 bp, Arabidopsis thaliana
gcctattgttggactac

SEQ ID NO: 104257 - DNA, 17 bp, Arabidopsis thaliana
gcctatttaggcggcct

SEQ ID NO: 104258 - DNA, 17 bp, Arabidopsis thaliana
gcctatttaggcgggcc

SEQ ID NO: 104259 - DNA, 17 bp, Arabidopsis thaliana
gcctatttaggcgggtg

SEQ ID NO: 104260 - DNA, 17 bp, Arabidopsis thaliana
gcctattttggtatgcc

SEQ ID NO: 104261 - DNA, 17 bp, Arabidopsis thaliana
gcctcaaacgctacgtc

SEQ ID NO: 104262 - DNA, 17 bp, Arabidopsis thaliana
gcctcaagaattcacgg

SEQ ID NO: 104263 - DNA, 17 bp, Arabidopsis thaliana
gcctcaagtgtgcgaag

SEQ ID NO: 104264 - DNA, 17 bp, Arabidopsis thaliana
gcctcaatgagagttcc

SEQ ID NO: 104265 - DNA, 17 bp, Arabidopsis thaliana
gcctcaccggatgaatt

SEQ ID NO: 104266 - DNA, 17 bp, Arabidopsis thaliana
gcctcacctaggtggat

SEQ ID NO: 104267 - DNA, 17 bp, Arabidopsis thaliana
gcctcacgtctgcctgg

SEQ ID NO: 104268 - DNA, 17 bp, Arabidopsis thaliana
gcctcagccctttgtcg

SEQ ID NO: 104269 - DNA, 17 bp, Arabidopsis thaliana
gcctcagctacagacgc

SEQ ID NO: 104270 - DNA, 17 bp, Arabidopsis thaliana
gcctcagctttgggatg

SEQ ID NO: 104271 - DNA, 17 bp, Arabidopsis thaliana
gcctcaggagcgtctgt

SEQ ID NO: 104272 - DNA, 17 bp, Arabidopsis thaliana
gcctcaggattggctcg

SEQ ID NO: 104273 - DNA, 17 bp, Arabidopsis thaliana
gcctcatcactttagca

SEQ ID NO: 104274 - DNA, 17 bp, Arabidopsis thaliana
gcctcatccctgacaag

SEQ ID NO: 104275 - DNA, 17 bp, Arabidopsis thaliana
gcctcattcaggtccgt

SEQ ID NO: 104276 - DNA, 17 bp, Arabidopsis thaliana
gcctccaacgaccggcc

SEQ ID NO: 104277 - DNA, 17 bp, Arabidopsis thaliana
gcctccaacgccggcta

SEQ ID NO: 104278 - DNA, 17 bp, Arabidopsis thaliana
gcctccacctagtgact

SEQ ID NO: 104279 - DNA, 17 bp, Arabidopsis thaliana
gcctccagcgacttatt

SEQ ID NO: 104280 - DNA, 17 bp, Arabidopsis thaliana
gcctccatacggccgag

SEQ ID NO: 104281 - DNA, 17 bp, Arabidopsis thaliana
gcctccatctctagtgg

SEQ ID NO: 104282 - DNA, 17 bp, Arabidopsis thaliana
gcctcccgtacatgcat

SEQ ID NO: 104283 - DNA, 17 bp, Arabidopsis thaliana
gcctccgacgggtgcca

SEQ ID NO: 104284 - DNA, 17 bp, Arabidopsis thaliana
gcctccgcctgcgttta

SEQ ID NO: 104285 - DNA, 17 bp, Arabidopsis thaliana
gcctccggaagctgtag

SEQ ID NO: 104286 - DNA, 17 bp, Arabidopsis thaliana
gcctccggagacgtcgg

SEQ ID NO: 104287 - DNA, 17 bp, Arabidopsis thaliana
gcctccggcgctgttac

SEQ ID NO: 104288 - DNA, 17 bp, Arabidopsis thaliana
gcctccggctcgttctt

SEQ ID NO: 104289 - DNA, 17 bp, Arabidopsis thaliana
gcctccggtgctgttac

SEQ ID NO: 104290 - DNA, 17 bp, Arabidopsis thaliana
gcctccggtggttgtga

SEQ ID NO: 104291 - DNA, 17 bp, Arabidopsis thaliana
gcctccgtagcatagtg

SEQ ID NO: 104292 - DNA, 17 bp, Arabidopsis thaliana
gcctccgtcacaggctc

SEQ ID NO: 104293 - DNA, 17 bp, Arabidopsis thaliana
gcctcctactaagcgct

SEQ ID NO: 104294 - DNA, 17 bp, Arabidopsis thaliana
gcctcctactattttat

SEQ ID NO: 104295 - DNA, 17 bp, Arabidopsis thaliana
gcctcctataggcagcc

SEQ ID NO: 104296 - DNA, 17 bp, Arabidopsis thaliana
gcctcctctctccctcg

SEQ ID NO: 104297 - DNA, 17 bp, Arabidopsis thaliana
gcctcctgcggattacg

SEQ ID NO: 104298 - DNA, 17 bp, Arabidopsis thaliana
gcctcctggaccttcac

SEQ ID NO: 104299 - DNA, 17 bp, Arabidopsis thaliana
gcctcctgtagatggat

SEQ ID NO: 104300 - DNA, 17 bp, Arabidopsis thaliana
gcctcgaacccacccac

SEQ ID NO: 104301 - DNA, 17 bp, Arabidopsis thaliana
gcctcgaagatgacgac

SEQ ID NO: 104302 - DNA, 17 bp, Arabidopsis thaliana
gcctcgatgagtaggag

SEQ ID NO: 104303 - DNA, 17 bp, Arabidopsis thaliana
gcctcgggagcggcctg

SEQ ID NO: 104304 - DNA, 17 bp, Arabidopsis thaliana
gcctcggtccctgtata

SEQ ID NO: 104305 - DNA, 17 bp, Arabidopsis thaliana
gcctcgtaagccgattc

SEQ ID NO: 104306 - DNA, 17 bp, Arabidopsis thaliana
gcctcgtcatctaatta

SEQ ID NO: 104307 - DNA, 17 bp, Arabidopsis thaliana
gcctcgtgaggatggtc

SEQ ID NO: 104308 - DNA, 17 bp, Arabidopsis thaliana
gcctcgtggtgcgacag

SEQ ID NO: 104309 - DNA, 17 bp, Arabidopsis thaliana
gcctcgtggtgcggcag

SEQ ID NO: 104310 - DNA, 17 bp, Arabidopsis thaliana
gcctcgtgtcccactgg

SEQ ID NO: 104311 - DNA, 17 bp, Arabidopsis thaliana
gcctcgttctgactcgt

SEQ ID NO: 104312 - DNA, 17 bp, Arabidopsis thaliana
gcctctaaaaccggact

SEQ ID NO: 104313 - DNA, 17 bp, Arabidopsis thaliana
gcctctaaactcgccat

SEQ ID NO: 104314 - DNA, 17 bp, Arabidopsis thaliana
gcctctaaagcagcagc

SEQ ID NO: 104315 - DNA, 17 bp, Arabidopsis thaliana
gcctctaaatcagaatc

SEQ ID NO: 104316 - DNA, 17 bp, Arabidopsis thaliana
gcctctaagatccggtt

SEQ ID NO: 104317 - DNA, 17 bp, Arabidopsis thaliana
gcctctaagtaagaatc

SEQ ID NO: 104318 - DNA, 17 bp, Arabidopsis thaliana
gcctctaagtcaaaatc

SEQ ID NO: 104319 - DNA, 17 bp, Arabidopsis thaliana
gcctctaagtcagaatc

SEQ ID NO: 104320 - DNA, 17 bp, Arabidopsis thaliana
gcctctaagtcagaatt

SEQ ID NO: 104321 - DNA, 17 bp, Arabidopsis thaliana
gcctctaagtcaggatc

SEQ ID NO: 104322 - DNA, 17 bp, Arabidopsis thaliana
gcctctacagttgaaac

SEQ ID NO: 104323 - DNA, 17 bp, Arabidopsis thaliana
gcctctagaaaatgtaa

SEQ ID NO: 104324 - DNA, 17 bp, Arabidopsis thaliana
gcctctagccttctgtc

SEQ ID NO: 104325 - DNA, 17 bp, Arabidopsis thaliana
gcctctaggaatctctg

SEQ ID NO: 104326 - DNA, 17 bp, Arabidopsis thaliana
gcctctatacttctgtc

SEQ ID NO: 104327 - DNA, 17 bp, Arabidopsis thaliana
gcctctatatgacaact

SEQ ID NO: 104328 - DNA, 17 bp, Arabidopsis thaliana
gcctctatatgacaatt

SEQ ID NO: 104329 - DNA, 17 bp, Arabidopsis thaliana
gcctctatgtgtacgcg

SEQ ID NO: 104330 - DNA, 17 bp, Arabidopsis thaliana
gcctctatttcactcca

SEQ ID NO: 104331 - DNA, 17 bp, Arabidopsis thaliana
gcctctcaaagacgcta

SEQ ID NO: 104332 - DNA, 17 bp, Arabidopsis thaliana
gcctctcttaggatctc

SEQ ID NO: 104333 - DNA, 17 bp, Arabidopsis thaliana
gcctctgaagatcctcc

SEQ ID NO: 104334 - DNA, 17 bp, Arabidopsis thaliana
gcctctgaaggtcctcc

SEQ ID NO: 104335 - DNA, 17 bp, Arabidopsis thaliana
gcctctgacggtcctat

SEQ ID NO: 104336 - DNA, 17 bp, Arabidopsis thaliana
gcctctgatgttcgcca

SEQ ID NO: 104337 - DNA, 17 bp, Arabidopsis thaliana
gcctctgattcgtttac

SEQ ID NO: 104338 - DNA, 17 bp, Arabidopsis thaliana
gcctctgcctgggtgtc

SEQ ID NO: 104339 - DNA, 17 bp, Arabidopsis thaliana
gcctctgccttggatgg

SEQ ID NO: 104340 - DNA, 17 bp, Arabidopsis thaliana
gcctctgctgtcgtcgt

SEQ ID NO: 104341 - DNA, 17 bp, Arabidopsis thaliana
gcctctggaagatgtag

SEQ ID NO: 104342 - DNA, 17 bp, Arabidopsis thaliana
gcctctggaccgagaga

SEQ ID NO: 104343 - DNA, 17 bp, Arabidopsis thaliana
gcctctgggagatgtag

SEQ ID NO: 104344 - DNA, 17 bp, Arabidopsis thaliana
gcctctggtcgatggaa

SEQ ID NO: 104345 - DNA, 17 bp, Arabidopsis thaliana
gcctctggttcaaatcc

SEQ ID NO: 104346 - DNA, 17 bp, Arabidopsis thaliana
gcctctgtagcatagtg

SEQ ID NO: 104347 - DNA, 17 bp, Arabidopsis thaliana
gcctctgtagtccaacg

SEQ ID NO: 104348 - DNA, 17 bp, Arabidopsis thaliana
gcctctgtgctggcgac

SEQ ID NO: 104349 - DNA, 17 bp, Arabidopsis thaliana
gcctcttcagatcgcgg

SEQ ID NO: 104350 - DNA, 17 bp, Arabidopsis thaliana
gcctcttcccttgctaa

SEQ ID NO: 104351 - DNA, 17 bp, Arabidopsis thaliana
gcctcttctgtatctgc

SEQ ID NO: 104352 - DNA, 17 bp, Arabidopsis thaliana
gcctctttattcctttt

SEQ ID NO: 104353 - DNA, 17 bp, Arabidopsis thaliana
gcctctttctggttttg

SEQ ID NO: 104354 - DNA, 17 bp, Arabidopsis thaliana
gcctgaaacatttgctg

SEQ ID NO: 104355 - DNA, 17 bp, Arabidopsis thaliana
gcctgaaccttggaaag

SEQ ID NO: 104356 - DNA, 17 bp, Arabidopsis thaliana
gcctgaacgacgacggt

SEQ ID NO: 104357 - DNA, 17 bp, Arabidopsis thaliana
gcctgaactatgcctga

SEQ ID NO: 104358 - DNA, 17 bp, Arabidopsis thaliana
gcctgaagactgcattc

SEQ ID NO: 104359 - DNA, 17 bp, Arabidopsis thaliana
gcctgaagattttgtgg

SEQ ID NO: 104360 - DNA, 17 bp, Arabidopsis thaliana
gcctgaagcaattccgg

SEQ ID NO: 104361 - DNA, 17 bp, Arabidopsis thaliana
gcctgaagggattacgg

SEQ ID NO: 104362 - DNA, 17 bp, Arabidopsis thaliana
gcctgaagttgagagcg

SEQ ID NO: 104363 - DNA, 17 bp, Arabidopsis thaliana
gcctgaatgccgagtct

SEQ ID NO: 104364 - DNA, 17 bp, Arabidopsis thaliana
gcctgaattacggtgat

SEQ ID NO: 104365 - DNA, 17 bp, Arabidopsis thaliana
gcctgaattggtggttg

SEQ ID NO: 104366 - DNA, 17 bp, Arabidopsis thaliana
gcctgaattttcaaccc

SEQ ID NO: 104367 - DNA, 17 bp, Arabidopsis thaliana
gcctgacactttatcct

SEQ ID NO: 104368 - DNA, 17 bp, Arabidopsis thaliana
gcctgaccctgagatgt

SEQ ID NO: 104369 - DNA, 17 bp, Arabidopsis thaliana
gcctgacggagcaatgc

SEQ ID NO: 104370 - DNA, 17 bp, Arabidopsis thaliana
gcctgactattgttgac

SEQ ID NO: 104371 - DNA, 17 bp, Arabidopsis thaliana
gcctgactgttagaccg

SEQ ID NO: 104372 - DNA, 17 bp, Arabidopsis thaliana
gcctgacttatccgacg

SEQ ID NO: 104373 - DNA, 17 bp, Arabidopsis thaliana
gcctgagaaacggccac

SEQ ID NO: 104374 - DNA, 17 bp, Arabidopsis thaliana
gcctgagaaacggctac

SEQ ID NO: 104375 - DNA, 17 bp, Arabidopsis thaliana
gcctgagacaagtcggc

SEQ ID NO: 104376 - DNA, 17 bp, Arabidopsis thaliana
gcctgagacttcagact

SEQ ID NO: 104377 - DNA, 17 bp, Arabidopsis thaliana
gcctgagagattacgag

SEQ ID NO: 104378 - DNA, 17 bp, Arabidopsis thaliana
gcctgagatacacgctc

SEQ ID NO: 104379 - DNA, 17 bp, Arabidopsis thaliana
gcctgagccgtatcatt

SEQ ID NO: 104380 - DNA, 17 bp, Arabidopsis thaliana
gcctgagcggggtaaag

SEQ ID NO: 104381 - DNA, 17 bp, Arabidopsis thaliana
gcctgaggtagggtcca

SEQ ID NO: 104382 - DNA, 17 bp, Arabidopsis thaliana
gcctgataaatcaaggt

SEQ ID NO: 104383 - DNA, 17 bp, Arabidopsis thaliana
gcctgatccaacatact

SEQ ID NO: 104384 - DNA, 17 bp, Arabidopsis thaliana
gcctgatccgtttgatc

SEQ ID NO: 104385 - DNA, 17 bp, Arabidopsis thaliana
gcctgatccttgttgca

SEQ ID NO: 104386 - DNA, 17 bp, Arabidopsis thaliana
gcctgatgaccatagca

SEQ ID NO: 104387 - DNA, 17 bp, Arabidopsis thaliana
gcctgattggtgcggta

SEQ ID NO: 104388 - DNA, 17 bp, Arabidopsis thaliana
gcctgcatttctgacta

SEQ ID NO: 104389 - DNA, 17 bp, Arabidopsis thaliana
gcctgccagatctaaag

SEQ ID NO: 104390 - DNA, 17 bp, Arabidopsis thaliana
gcctgcccaccctggaa

SEQ ID NO: 104391 - DNA, 17 bp, Arabidopsis thaliana
gcctgccgggggacgga

SEQ ID NO: 104392 - DNA, 17 bp, Arabidopsis thaliana
gcctgcctgggtgtcac

SEQ ID NO: 104393 - DNA, 17 bp, Arabidopsis thaliana
gcctgcgacttgttaga

SEQ ID NO: 104394 - DNA, 17 bp, Arabidopsis thaliana
gcctgcgcaggttcgaa

SEQ ID NO: 104395 - DNA, 17 bp, Arabidopsis thaliana
gcctgcgggagttttat

SEQ ID NO: 104396 - DNA, 17 bp, Arabidopsis thaliana
gcctgctcgagcggcaa

SEQ ID NO: 104397 - DNA, 17 bp, Arabidopsis thaliana
gcctgctcgtggcaaat

SEQ ID NO: 104398 - DNA, 17 bp, Arabidopsis thaliana
gcctgctgaggctcatg

SEQ ID NO: 104399 - DNA, 17 bp, Arabidopsis thaliana
gcctgctggtccgatct

SEQ ID NO: 104400 - DNA, 17 bp, Arabidopsis thaliana
gcctgcttgaaattgtc

SEQ ID NO: 104401 - DNA, 17 bp, Arabidopsis thaliana
gcctgctttgaccgaga

SEQ ID NO: 104402 - DNA, 17 bp, Arabidopsis thaliana
gcctggagagattacag

SEQ ID NO: 104403 - DNA, 17 bp, Arabidopsis thaliana
gcctggagattcgtttg

SEQ ID NO: 104404 - DNA, 17 bp, Arabidopsis thaliana
gcctggagcgtaccgac

SEQ ID NO: 104405 - DNA, 17 bp, Arabidopsis thaliana
gcctggaggaattacgg

SEQ ID NO: 104406 - DNA, 17 bp, Arabidopsis thaliana
gcctggaggattaagag

SEQ ID NO: 104407 - DNA, 17 bp, Arabidopsis thaliana
gcctggagggattacaa

SEQ ID NO: 104408 - DNA, 17 bp, Arabidopsis thaliana
gcctggatccgtatcct

SEQ ID NO: 104409 - DNA, 17 bp, Arabidopsis thaliana
gcctggattctgttcga

SEQ ID NO: 104410 - DNA, 17 bp, Arabidopsis thaliana
gcctggctccctgtatg

SEQ ID NO: 104411 - DNA, 17 bp, Arabidopsis thaliana
gcctgggatttgtgtcc

SEQ ID NO: 104412 - DNA, 17 bp, Arabidopsis thaliana
gcctggggattacgggc

SEQ ID NO: 104413 - DNA, 17 bp, Arabidopsis thaliana
gcctgggggattacggg

SEQ ID NO: 104414 - DNA, 17 bp, Arabidopsis thaliana
gcctgggtgtcacaaat

SEQ ID NO: 104415 - DNA, 17 bp, Arabidopsis thaliana
gcctggtcctgttactt

SEQ ID NO: 104416 - DNA, 17 bp, Arabidopsis thaliana
gcctgtagattccctgg

SEQ ID NO: 104417 - DNA, 17 bp, Arabidopsis thaliana
gcctgtagctggtgact

SEQ ID NO: 104418 - DNA, 17 bp, Arabidopsis thaliana
gcctgtagggccggtaa

SEQ ID NO: 104419 - DNA, 17 bp, Arabidopsis thaliana
gcctgtatcttgatttc

SEQ ID NO: 104420 - DNA, 17 bp, Arabidopsis thaliana
gcctgtcgaccgtttgc

SEQ ID NO: 104421 - DNA, 17 bp, Arabidopsis thaliana
gcctgtcgctcctaccg

SEQ ID NO: 104422 - DNA, 17 bp, Arabidopsis thaliana
gcctgtcgctgacgact

SEQ ID NO: 104423 - DNA, 17 bp, Arabidopsis thaliana
gcctgtcgctggcgact

SEQ ID NO: 104424 - DNA, 17 bp, Arabidopsis thaliana
gcctgtcgctggtgact

SEQ ID NO: 104425 - DNA, 17 bp, Arabidopsis thaliana
gcctgtcgcttgttcag

SEQ ID NO: 104426 - DNA, 17 bp, Arabidopsis thaliana
gcctgtcgggacccgaa

SEQ ID NO: 104427 - DNA, 17 bp, Arabidopsis thaliana
gcctgtctacgagtcgg

SEQ ID NO: 104428 - DNA, 17 bp, Arabidopsis thaliana
gcctgtctagctcagtt

SEQ ID NO: 104429 - DNA, 17 bp, Arabidopsis thaliana
gcctgtctggctcagtt

SEQ ID NO: 104430 - DNA, 17 bp, Arabidopsis thaliana
gcctgtgacggaggtgg

SEQ ID NO: 104431 - DNA, 17 bp, Arabidopsis thaliana
gcctgtgcattggtcgg

SEQ ID NO: 104432 - DNA, 17 bp, Arabidopsis thaliana
gcctgtggatgtttgga

SEQ ID NO: 104433 - DNA, 17 bp, Arabidopsis thaliana
gcctgtggctggattga

SEQ ID NO: 104434 - DNA, 17 bp, Arabidopsis thaliana
gcctgtgggcgcggcag

SEQ ID NO: 104435 - DNA, 17 bp, Arabidopsis thaliana
gcctgtgggctccccat

SEQ ID NO: 104436 - DNA, 17 bp, Arabidopsis thaliana
gcctgttccctcgtttg

SEQ ID NO: 104437 - DNA, 17 bp, Arabidopsis thaliana
gcctgttgggacccgaa

SEQ ID NO: 104438 - DNA, 17 bp, Arabidopsis thaliana
gcctgtttgtgaatccg

SEQ ID NO: 104439 - DNA, 17 bp, Arabidopsis thaliana
gcctgttttggtatgcg

SEQ ID NO: 104440 - DNA, 17 bp, Arabidopsis thaliana
gccttaagacggtgaca

SEQ ID NO: 104441 - DNA, 17 bp, Arabidopsis thaliana
gccttacaggcttcggc

SEQ ID NO: 104442 - DNA, 17 bp, Arabidopsis thaliana
gccttacagtttcaggt

SEQ ID NO: 104443 - DNA, 17 bp, Arabidopsis thaliana
gccttacttaaacgcgc

SEQ ID NO: 104444 - DNA, 17 bp, Arabidopsis thaliana
gccttagatacacgctc

SEQ ID NO: 104445 - DNA, 17 bp, Arabidopsis thaliana
gccttagccaactctaa

SEQ ID NO: 104446 - DNA, 17 bp, Arabidopsis thaliana
gccttagccctgtttgt

SEQ ID NO: 104447 - DNA, 17 bp, Arabidopsis thaliana
gccttaggcttgtaatg

SEQ ID NO: 104448 - DNA, 17 bp, Arabidopsis thaliana
gccttaggcttttaagg

SEQ ID NO: 104449 - DNA, 17 bp, Arabidopsis thaliana
gccttaggggattacgg

SEQ ID NO: 104450 - DNA, 17 bp, Arabidopsis thaliana
gccttagtcacatcctg

SEQ ID NO: 104451 - DNA, 17 bp, Arabidopsis thaliana
gccttagtcgcaccctc

SEQ ID NO: 104452 - DNA, 17 bp, Arabidopsis thaliana
gccttagtcgcaccctg

SEQ ID NO: 104453 - DNA, 17 bp, Arabidopsis thaliana
gccttagtcgcatcctc

SEQ ID NO: 104454 - DNA, 17 bp, Arabidopsis thaliana
gccttagtcgcatcctg

SEQ ID NO: 104455 - DNA, 17 bp, Arabidopsis thaliana
gccttagtgatccgacg

SEQ ID NO: 104456 - DNA, 17 bp, Arabidopsis thaliana
gccttagtgattcgacg

SEQ ID NO: 104457 - DNA, 17 bp, Arabidopsis thaliana
gccttagtggttctctt

SEQ ID NO: 104458 - DNA, 17 bp, Arabidopsis thaliana
gccttatagacagtcgg

SEQ ID NO: 104459 - DNA, 17 bp, Arabidopsis thaliana
gccttattcctttgtca

SEQ ID NO: 104460 - DNA, 17 bp, Arabidopsis thaliana
gccttattcttaggacc

SEQ ID NO: 104461 - DNA, 17 bp, Arabidopsis thaliana
gccttcaagatccagtt

SEQ ID NO: 104462 - DNA, 17 bp, Arabidopsis thaliana
gccttcaagatcctgtt

SEQ ID NO: 104463 - DNA, 17 bp, Arabidopsis thaliana
gccttcaagatcttttg

SEQ ID NO: 104464 - DNA, 17 bp, Arabidopsis thaliana
gccttcacacctatagg

SEQ ID NO: 104465 - DNA, 17 bp, Arabidopsis thaliana
gccttcacccagagccg

SEQ ID NO: 104466 - DNA, 17 bp, Arabidopsis thaliana
gccttcacggccggctt

SEQ ID NO: 104467 - DNA, 17 bp, Arabidopsis thaliana
gccttcagaaatgctct

SEQ ID NO: 104468 - DNA, 17 bp, Arabidopsis thaliana
gccttcatcggagaagt

SEQ ID NO: 104469 - DNA, 17 bp, Arabidopsis thaliana
gccttcattcattcatt

SEQ ID NO: 104470 - DNA, 17 bp, Arabidopsis thaliana
gccttcattggatcatg

SEQ ID NO: 104471 - DNA, 17 bp, Arabidopsis thaliana
gccttccaagcaataga

SEQ ID NO: 104472 - DNA, 17 bp, Arabidopsis thaliana
gccttccagacatagtg

SEQ ID NO: 104473 - DNA, 17 bp, Arabidopsis thaliana
gccttccagccaagccg

SEQ ID NO: 104474 - DNA, 17 bp, Arabidopsis thaliana
gccttccagccaagtcg

SEQ ID NO: 104475 - DNA, 17 bp, Arabidopsis thaliana
gccttccgactaatgcc

SEQ ID NO: 104476 - DNA, 17 bp, Arabidopsis thaliana
gccttccgtctggctat

SEQ ID NO: 104477 - DNA, 17 bp, Arabidopsis thaliana
gccttcgattcccgcta

SEQ ID NO: 104478 - DNA, 17 bp, Arabidopsis thaliana
gccttcgccgccaccca

SEQ ID NO: 104479 - DNA, 17 bp, Arabidopsis thaliana
gccttcgccgccaccta

SEQ ID NO: 104480 - DNA, 17 bp, Arabidopsis thaliana
gccttcgccgccccccc

SEQ ID NO: 104481 - DNA, 17 bp, Arabidopsis thaliana
gccttcgcgccaagcaa

SEQ ID NO: 104482 - DNA, 17 bp, Arabidopsis thaliana
gccttcgggatcggagt

SEQ ID NO: 104483 - DNA, 17 bp, Arabidopsis thaliana
gccttcggtatccaggg

SEQ ID NO: 104484 - DNA, 17 bp, Arabidopsis thaliana
gccttctagccttctgt

SEQ ID NO: 104485 - DNA, 17 bp, Arabidopsis thaliana
gccttctctgtcttcgt

SEQ ID NO: 104486 - DNA, 17 bp, Arabidopsis thaliana
gccttctcttttggaag

SEQ ID NO: 104487 - DNA, 17 bp, Arabidopsis thaliana
gccttctgcgtgtaatg

SEQ ID NO: 104488 - DNA, 17 bp, Arabidopsis thaliana
gccttctggccgagggc

SEQ ID NO: 104489 - DNA, 17 bp, Arabidopsis thaliana
gccttcttagctcagcg

SEQ ID NO: 104490 - DNA, 17 bp, Arabidopsis thaliana
gccttcttagctcagtg

SEQ ID NO: 104491 - DNA, 17 bp, Arabidopsis thaliana
gccttctttctactgga

SEQ ID NO: 104492 - DNA, 17 bp, Arabidopsis thaliana
gccttgaggcacggctc

SEQ ID NO: 104493 - DNA, 17 bp, Arabidopsis thaliana
gccttgatctgcttgtt

SEQ ID NO: 104494 - DNA, 17 bp, Arabidopsis thaliana
gccttgattttgtttct

SEQ ID NO: 104495 - DNA, 17 bp, Arabidopsis thaliana
gccttgcaggtgatagg

SEQ ID NO: 104496 - DNA, 17 bp, Arabidopsis thaliana
gccttgccttggcttga

SEQ ID NO: 104497 - DNA, 17 bp, Arabidopsis thaliana
gccttgcgattgttttc

SEQ ID NO: 104498 - DNA, 17 bp, Arabidopsis thaliana
gccttgctgccacgatc

SEQ ID NO: 104499 - DNA, 17 bp, Arabidopsis thaliana
gccttggacatgtcaat

SEQ ID NO: 104500 - DNA, 17 bp, Arabidopsis thaliana
gccttggaccacggatc

SEQ ID NO: 104501 - DNA, 17 bp, Arabidopsis thaliana
gccttggaccgcagtca

SEQ ID NO: 104502 - DNA, 17 bp, Arabidopsis thaliana
gccttggacgccttttg

SEQ ID NO: 104503 - DNA, 17 bp, Arabidopsis thaliana
gccttggactagttacg

SEQ ID NO: 104504 - DNA, 17 bp, Arabidopsis thaliana
gccttggagccgaagtt

SEQ ID NO: 104505 - DNA, 17 bp, Arabidopsis thaliana
gccttggatttatagat

SEQ ID NO: 104506 - DNA, 17 bp, Arabidopsis thaliana
gccttggcctaattggt

SEQ ID NO: 104507 - DNA, 17 bp, Arabidopsis thaliana
gccttggcggattcgac

SEQ ID NO: 104508 - DNA, 17 bp, Arabidopsis thaliana
gccttggcggattcgag

SEQ ID NO: 104509 - DNA, 17 bp, Arabidopsis thaliana
gccttggctgattttgt

SEQ ID NO: 104510 - DNA, 17 bp, Arabidopsis thaliana
gccttgggatgggtcgg

SEQ ID NO: 104511 - DNA, 17 bp, Arabidopsis thaliana
gccttgggatgggtcgt

SEQ ID NO: 104512 - DNA, 17 bp, Arabidopsis thaliana
gccttgggtttggtcat

SEQ ID NO: 104513 - DNA, 17 bp, Arabidopsis thaliana
gccttggtaactatcag

SEQ ID NO: 104514 - DNA, 17 bp, Arabidopsis thaliana
gccttggtgatgatcgg

SEQ ID NO: 104515 - DNA, 17 bp, Arabidopsis thaliana
gccttggtgcgcaacga

SEQ ID NO: 104516 - DNA, 17 bp, Arabidopsis thaliana
gccttggtggtgaaatg

SEQ ID NO: 104517 - DNA, 17 bp, Arabidopsis thaliana
gccttggtggtgaaatt

SEQ ID NO: 104518 - DNA, 17 bp, Arabidopsis thaliana
gccttgtcatctcggtc

SEQ ID NO: 104519 - DNA, 17 bp, Arabidopsis thaliana
gccttgtcgctaagatt

SEQ ID NO: 104520 - DNA, 17 bp, Arabidopsis thaliana
gccttgtctgcggttta

SEQ ID NO: 104521 - DNA, 17 bp, Arabidopsis thaliana
gccttgttacagtttgc

SEQ ID NO: 104522 - DNA, 17 bp, Arabidopsis thaliana
gcctttaaaatccagtt

SEQ ID NO: 104523 - DNA, 17 bp, Arabidopsis thaliana
gcctttaaaatccggtt

SEQ ID NO: 104524 - DNA, 17 bp, Arabidopsis thaliana
gcctttaaaatcgggtt

SEQ ID NO: 104525 - DNA, 17 bp, Arabidopsis thaliana
gcctttaaattcgggtt

SEQ ID NO: 104526 - DNA, 17 bp, Arabidopsis thaliana
gcctttaagacccggtt

SEQ ID NO: 104527 - DNA, 17 bp, Arabidopsis thaliana
gcctttaagataaaatt

SEQ ID NO: 104528 - DNA, 17 bp, Arabidopsis thaliana
gcctttaagatacggtt

SEQ ID NO: 104529 - DNA, 17 bp, Arabidopsis thaliana
gcctttaagatcagatt

SEQ ID NO: 104530 - DNA, 17 bp, Arabidopsis thaliana
gcctttaagatcaggtt

SEQ ID NO: 104531 - DNA, 17 bp, Arabidopsis thaliana
gcctttaagatcatgtt

SEQ ID NO: 104532 - DNA, 17 bp, Arabidopsis thaliana
gcctttaagatccactt

SEQ ID NO: 104533 - DNA, 17 bp, Arabidopsis thaliana
gcctttaagatccagta

SEQ ID NO: 104534 - DNA, 17 bp, Arabidopsis thaliana
gcctttaagatccagtt

SEQ ID NO: 104535 - DNA, 17 bp, Arabidopsis thaliana
gcctttaagatcccgtt

SEQ ID NO: 104536 - DNA, 17 bp, Arabidopsis thaliana
gcctttaagatccgaat

SEQ ID NO: 104537 - DNA, 17 bp, Arabidopsis thaliana
gcctttaagatccgatt

SEQ ID NO: 104538 - DNA, 17 bp, Arabidopsis thaliana
gcctttaagatccgctt

SEQ ID NO: 104539 - DNA, 17 bp, Arabidopsis thaliana
gcctttaagatccggcg

SEQ ID NO: 104540 - DNA, 17 bp, Arabidopsis thaliana
gcctttaagatccggtc

SEQ ID NO: 104541 - DNA, 17 bp, Arabidopsis thaliana
gcctttaagatccggtt

SEQ ID NO: 104542 - DNA, 17 bp, Arabidopsis thaliana
gcctttaagatccgttc

SEQ ID NO: 104543 - DNA, 17 bp, Arabidopsis thaliana
gcctttaagatccgttg

SEQ ID NO: 104544 - DNA, 17 bp, Arabidopsis thaliana
gcctttaagatccgttt

SEQ ID NO: 104545 - DNA, 17 bp, Arabidopsis thaliana
gcctttaagatcctatt

SEQ ID NO: 104546 - DNA, 17 bp, Arabidopsis thaliana
gcctttaagatcctctt

SEQ ID NO: 104547 - DNA, 17 bp, Arabidopsis thaliana
gcctttaagatcctggt

SEQ ID NO: 104548 - DNA, 17 bp, Arabidopsis thaliana
gcctttaagatcctgtt

SEQ ID NO: 104549 - DNA, 17 bp, Arabidopsis thaliana
gcctttaagatcgggtt

SEQ ID NO: 104550 - DNA, 17 bp, Arabidopsis thaliana
gcctttaagatctagtt

SEQ ID NO: 104551 - DNA, 17 bp, Arabidopsis thaliana
gcctttaagatctgaat

SEQ ID NO: 104552 - DNA, 17 bp, Arabidopsis thaliana
gcctttaagatctgatt

SEQ ID NO: 104553 - DNA, 17 bp, Arabidopsis thaliana
gcctttaagatctgggt

SEQ ID NO: 104554 - DNA, 17 bp, Arabidopsis thaliana
gcctttaagatctggta

SEQ ID NO: 104555 - DNA, 17 bp, Arabidopsis thaliana
gcctttaagatctggtt

SEQ ID NO: 104556 - DNA, 17 bp, Arabidopsis thaliana
gcctttaagatctgttt

SEQ ID NO: 104557 - DNA, 17 bp, Arabidopsis thaliana
gcctttaagatcttgtt

SEQ ID NO: 104558 - DNA, 17 bp, Arabidopsis thaliana
gcctttaagatgtggtt

SEQ ID NO: 104559 - DNA, 17 bp, Arabidopsis thaliana
gcctttaagattaggtt

SEQ ID NO: 104560 - DNA, 17 bp, Arabidopsis thaliana
gcctttaagattcagtt

SEQ ID NO: 104561 - DNA, 17 bp, Arabidopsis thaliana
gcctttaagattcggtt

SEQ ID NO: 104562 - DNA, 17 bp, Arabidopsis thaliana
gcctttaagattcgttt

SEQ ID NO: 104563 - DNA, 17 bp, Arabidopsis thaliana
gcctttaagattctatt

SEQ ID NO: 104564 - DNA, 17 bp, Arabidopsis thaliana
gcctttaagattctgtt

SEQ ID NO: 104565 - DNA, 17 bp, Arabidopsis thaliana
gcctttaagattgggtt

SEQ ID NO: 104566 - DNA, 17 bp, Arabidopsis thaliana
gcctttaagatttgact

SEQ ID NO: 104567 - DNA, 17 bp, Arabidopsis thaliana
gcctttaagatttggtt

SEQ ID NO: 104568 - DNA, 17 bp, Arabidopsis thaliana
gcctttaagctctggtt

SEQ ID NO: 104569 - DNA, 17 bp, Arabidopsis thaliana
gcctttaaggtccggtt

SEQ ID NO: 104570 - DNA, 17 bp, Arabidopsis thaliana
gcctttaagttgcggtt

SEQ ID NO: 104571 - DNA, 17 bp, Arabidopsis thaliana
gcctttacatttgcagt

SEQ ID NO: 104572 - DNA, 17 bp, Arabidopsis thaliana
gcctttacgataaggtt

SEQ ID NO: 104573 - DNA, 17 bp, Arabidopsis thaliana
gcctttatcaagattgt

SEQ ID NO: 104574 - DNA, 17 bp, Arabidopsis thaliana
gcctttatgatccagtt

SEQ ID NO: 104575 - DNA, 17 bp, Arabidopsis thaliana
gcctttcagatccgggt

SEQ ID NO: 104576 - DNA, 17 bp, Arabidopsis thaliana
gcctttcatcatggaag

SEQ ID NO: 104577 - DNA, 17 bp, Arabidopsis thaliana
gcctttccgtgatcttt

SEQ ID NO: 104578 - DNA, 17 bp, Arabidopsis thaliana
gcctttccgttaacggg

SEQ ID NO: 104579 - DNA, 17 bp, Arabidopsis thaliana
gcctttcgtcggagggc

SEQ ID NO: 104580 - DNA, 17 bp, Arabidopsis thaliana
gcctttctgactcggcc

SEQ ID NO: 104581 - DNA, 17 bp, Arabidopsis thaliana
gcctttgaaatcgggtt

SEQ ID NO: 104582 - DNA, 17 bp, Arabidopsis thaliana
gcctttgactccgtgcg

SEQ ID NO: 104583 - DNA, 17 bp, Arabidopsis thaliana
gcctttgactcgagtta

SEQ ID NO: 104584 - DNA, 17 bp, Arabidopsis thaliana
gcctttgagaccttgta

SEQ ID NO: 104585 - DNA, 17 bp, Arabidopsis thaliana
gcctttgagatccggtt

SEQ ID NO: 104586 - DNA, 17 bp, Arabidopsis thaliana
gcctttgatactcaccg

SEQ ID NO: 104587 - DNA, 17 bp, Arabidopsis thaliana
gcctttgatgagccaaa

SEQ ID NO: 104588 - DNA, 17 bp, Arabidopsis thaliana
gcctttgcagccttgtg

SEQ ID NO: 104589 - DNA, 17 bp, Arabidopsis thaliana
gcctttgctgcttctac

SEQ ID NO: 104590 - DNA, 17 bp, Arabidopsis thaliana
gcctttggacatttcta

SEQ ID NO: 104591 - DNA, 17 bp, Arabidopsis thaliana
gcctttggatcgctcgt

SEQ ID NO: 104592 - DNA, 17 bp, Arabidopsis thaliana
gcctttgggagatatca

SEQ ID NO: 104593 - DNA, 17 bp, Arabidopsis thaliana
gcctttggtgtgcattg

SEQ ID NO: 104594 - DNA, 17 bp, Arabidopsis thaliana
gcctttggttatccatt

SEQ ID NO: 104595 - DNA, 17 bp, Arabidopsis thaliana
gcctttgtcgctaagat

SEQ ID NO: 104596 - DNA, 17 bp, Arabidopsis thaliana
gcctttgtctaaggtta

SEQ ID NO: 104597 - DNA, 17 bp, Arabidopsis thaliana
gcctttgtgacctagga

SEQ ID NO: 104598 - DNA, 17 bp, Arabidopsis thaliana
gcctttgtgtctatgct

SEQ ID NO: 104599 - DNA, 17 bp, Arabidopsis thaliana
gccttttaagactttct

SEQ ID NO: 104600 - DNA, 17 bp, Arabidopsis thaliana
gccttttactcgaccct

SEQ ID NO: 104601 - DNA, 17 bp, Arabidopsis thaliana
gccttttactcgacctg

SEQ ID NO: 104602 - DNA, 17 bp, Arabidopsis thaliana
gccttttagatcccgtt

SEQ ID NO: 104603 - DNA, 17 bp, Arabidopsis thaliana
gccttttcgcctctcat

SEQ ID NO: 104604 - DNA, 17 bp, Arabidopsis thaliana
gccttttcgtgatcttt

SEQ ID NO: 104605 - DNA, 17 bp, Arabidopsis thaliana
gccttttcgtgatttgg

SEQ ID NO: 104606 - DNA, 17 bp, Arabidopsis thaliana
gccttttgcgagggtat

SEQ ID NO: 104607 - DNA, 17 bp, Arabidopsis thaliana
gccttttggaaccaaca

SEQ ID NO: 104608 - DNA, 17 bp, Arabidopsis thaliana
gccttttgtacacaccg

SEQ ID NO: 104609 - DNA, 17 bp, Arabidopsis thaliana
gccttttgtcgctaaga

SEQ ID NO: 104610 - DNA, 17 bp, Arabidopsis thaliana
gcctttttgcgatcttt

SEQ ID NO: 104611 - DNA, 17 bp, Arabidopsis thaliana
gcctttttggcgagaca

SEQ ID NO: 104612 - DNA, 17 bp, Arabidopsis thaliana
gccttttttgcaagact

SEQ ID NO: 104613 - DNA, 17 bp, Arabidopsis thaliana
gccttttttgttggttg

SEQ ID NO: 104614 - DNA, 17 bp, Arabidopsis thaliana
gcgaaaaagagtgtgat

SEQ ID NO: 104615 - DNA, 17 bp, Arabidopsis thaliana
gcgaaactttttttccc

SEQ ID NO: 104616 - DNA, 17 bp, Arabidopsis thaliana
gcgaaagcactctgccg

SEQ ID NO: 104617 - DNA, 17 bp, Arabidopsis thaliana
gcgaaagcactctgctg

SEQ ID NO: 104618 - DNA, 17 bp, Arabidopsis thaliana
gcgaaagcatttgccaa

SEQ ID NO: 104619 - DNA, 17 bp, Arabidopsis thaliana
gcgaaagccaaggtcca

SEQ ID NO: 104620 - DNA, 17 bp, Arabidopsis thaliana
gcgaaagcctatggggt

SEQ ID NO: 104621 - DNA, 17 bp, Arabidopsis thaliana
gcgaaagcgagtcttca

SEQ ID NO: 104622 - DNA, 17 bp, Arabidopsis thaliana
gcgaaatgcgatacttg

SEQ ID NO: 104623 - DNA, 17 bp, Arabidopsis thaliana
gcgaaattggctgaata

SEQ ID NO: 104624 - DNA, 17 bp, Arabidopsis thaliana
gcgaacaataaaccgct

SEQ ID NO: 104625 - DNA, 17 bp, Arabidopsis thaliana
gcgaaccgggaagaggc

SEQ ID NO: 104626 - DNA, 17 bp, Arabidopsis thaliana
gcgaaccgggacataag

SEQ ID NO: 104627 - DNA, 17 bp, Arabidopsis thaliana
gcgaacctagattccct

SEQ ID NO: 104628 - DNA, 17 bp, Arabidopsis thaliana
gcgaacggctataattg

SEQ ID NO: 104629 - DNA, 17 bp, Arabidopsis thaliana
gcgaacgggtgcgtaag

SEQ ID NO: 104630 - DNA, 17 bp, Arabidopsis thaliana
gcgaagaacagggagac

SEQ ID NO: 104631 - DNA, 17 bp, Arabidopsis thaliana
gcgaagatgttgagccg

SEQ ID NO: 104632 - DNA, 17 bp, Arabidopsis thaliana
gcgaagatttctgattt

SEQ ID NO: 104633 - DNA, 17 bp, Arabidopsis thaliana
gcgaagcaaccgtgcgc

SEQ ID NO: 104634 - DNA, 17 bp, Arabidopsis thaliana
gcgaagctaccgtgcgc

SEQ ID NO: 104635 - DNA, 17 bp, Arabidopsis thaliana
gcgaagctaccgtgggc

SEQ ID NO: 104636 - DNA, 17 bp, Arabidopsis thaliana
gcgaagcttaaagatcg

SEQ ID NO: 104637 - DNA, 17 bp, Arabidopsis thaliana
gcgaagcttagaggtcg

SEQ ID NO: 104638 - DNA, 17 bp, Arabidopsis thaliana
gcgaaggccaccgcagg

SEQ ID NO: 104639 - DNA, 17 bp, Arabidopsis thaliana
gcgaaggggtctgaggc

SEQ ID NO: 104640 - DNA, 17 bp, Arabidopsis thaliana
gcgaagtgactgttttg

SEQ ID NO: 104641 - DNA, 17 bp, Arabidopsis thaliana
gcgaagttcagagggag

SEQ ID NO: 104642 - DNA, 17 bp, Arabidopsis thaliana
gcgaagttgagacggtg

SEQ ID NO: 104643 - DNA, 17 bp, Arabidopsis thaliana
gcgaatcctgaccgtct

SEQ ID NO: 104644 - DNA, 17 bp, Arabidopsis thaliana
gcgaatctaccgtgcgc

SEQ ID NO: 104645 - DNA, 17 bp, Arabidopsis thaliana
gcgaatctgggtcggct

SEQ ID NO: 104646 - DNA, 17 bp, Arabidopsis thaliana
gcgaatctgtaattgcg

SEQ ID NO: 104647 - DNA, 17 bp, Arabidopsis thaliana
gcgaatgagttacttgc

SEQ ID NO: 104648 - DNA, 17 bp, Arabidopsis thaliana
gcgaatggctcattaaa

SEQ ID NO: 104649 - DNA, 17 bp, Arabidopsis thaliana
gcgaatggctcattcaa

SEQ ID NO: 104650 - DNA, 17 bp, Arabidopsis thaliana
gcgaatggttcatcaag

SEQ ID NO: 104651 - DNA, 17 bp, Arabidopsis thaliana
gcgaatgttctgtaccc

SEQ ID NO: 104652 - DNA, 17 bp, Arabidopsis thaliana
gcgaattaccggcagtt

SEQ ID NO: 104653 - DNA, 17 bp, Arabidopsis thaliana
gcgaattgaactccagt

SEQ ID NO: 104654 - DNA, 17 bp, Arabidopsis thaliana
gcgaattggatgatcgg

SEQ ID NO: 104655 - DNA, 17 bp, Arabidopsis thaliana
gcgaattggttgtggtc

SEQ ID NO: 104656 - DNA, 17 bp, Arabidopsis thaliana
gcgaattttgtggggat

SEQ ID NO: 104657 - DNA, 17 bp, Arabidopsis thaliana
gcgacacacgtgctaca

SEQ ID NO: 104658 - DNA, 17 bp, Arabidopsis thaliana
gcgacacagaaacgaac

SEQ ID NO: 104659 - DNA, 17 bp, Arabidopsis thaliana
gcgacagcgatcagcga

SEQ ID NO: 104660 - DNA, 17 bp, Arabidopsis thaliana
gcgacagctgcggcaac

SEQ ID NO: 104661 - DNA, 17 bp, Arabidopsis thaliana
gcgacaggcaaacgaac

SEQ ID NO: 104662 - DNA, 17 bp, Arabidopsis thaliana
gcgacaggtgtctacgg

SEQ ID NO: 104663 - DNA, 17 bp, Arabidopsis thaliana
gcgacagtcgccagcga

SEQ ID NO: 104664 - DNA, 17 bp, Arabidopsis thaliana
gcgacagtgtgctactg

SEQ ID NO: 104665 - DNA, 17 bp, Arabidopsis thaliana
gcgacatttgtgcttct

SEQ ID NO: 104666 - DNA, 17 bp, Arabidopsis thaliana
gcgacattttgaggtcg

SEQ ID NO: 104667 - DNA, 17 bp, Arabidopsis thaliana
gcgacccaaggtcaggc

SEQ ID NO: 104668 - DNA, 17 bp, Arabidopsis thaliana
gcgaccccaagtcaggc

SEQ ID NO: 104669 - DNA, 17 bp, Arabidopsis thaliana
gcgaccccaggccagcc

SEQ ID NO: 104670 - DNA, 17 bp, Arabidopsis thaliana
gcgaccccaggccaggc

SEQ ID NO: 104671 - DNA, 17 bp, Arabidopsis thaliana
gcgaccccaggcctggg

SEQ ID NO: 104672 - DNA, 17 bp, Arabidopsis thaliana
gcgaccccaggtcagac

SEQ ID NO: 104673 - DNA, 17 bp, Arabidopsis thaliana
gcgaccccaggtcagcc

SEQ ID NO: 104674 - DNA, 17 bp, Arabidopsis thaliana
gcgaccccaggtcaggc

SEQ ID NO: 104675 - DNA, 17 bp, Arabidopsis thaliana
gcgaccccatgtcaggc

SEQ ID NO: 104676 - DNA, 17 bp, Arabidopsis thaliana
gcgaccccgggtcaggc

SEQ ID NO: 104677 - DNA, 17 bp, Arabidopsis thaliana
gcgaccgaatgtgtcat

SEQ ID NO: 104678 - DNA, 17 bp, Arabidopsis thaliana
gcgaccgcacgccagcc

SEQ ID NO: 104679 - DNA, 17 bp, Arabidopsis thaliana
gcgaccgcaggaccggc

SEQ ID NO: 104680 - DNA, 17 bp, Arabidopsis thaliana
gcgaccgttctgctgcc

SEQ ID NO: 104681 - DNA, 17 bp, Arabidopsis thaliana
gcgacgacagcagaaca

SEQ ID NO: 104682 - DNA, 17 bp, Arabidopsis thaliana
gcgacgcatgcgcccgc

SEQ ID NO: 104683 - DNA, 17 bp, Arabidopsis thaliana
gcgacgcggattacggt

SEQ ID NO: 104684 - DNA, 17 bp, Arabidopsis thaliana
gcgacggcaggcggggt

SEQ ID NO: 104685 - DNA, 17 bp, Arabidopsis thaliana
gcgacggcgacggtggt

SEQ ID NO: 104686 - DNA, 17 bp, Arabidopsis thaliana
gcgacggtatggttgga

SEQ ID NO: 104687 - DNA, 17 bp, Arabidopsis thaliana
gcgacgtgggtggttcg

SEQ ID NO: 104688 - DNA, 17 bp, Arabidopsis thaliana
gcgacgttgctttttga

SEQ ID NO: 104689 - DNA, 17 bp, Arabidopsis thaliana
gcgactattttgcaaat

SEQ ID NO: 104690 - DNA, 17 bp, Arabidopsis thaliana
gcgactcataggcagcg

SEQ ID NO: 104691 - DNA, 17 bp, Arabidopsis thaliana
gcgactcataggcagtg

SEQ ID NO: 104692 - DNA, 17 bp, Arabidopsis thaliana
gcgactcatgttacgat

SEQ ID NO: 104693 - DNA, 17 bp, Arabidopsis thaliana
gcgactccactggggaa

SEQ ID NO: 104694 - DNA, 17 bp, Arabidopsis thaliana
gcgactccaggtcaggc

SEQ ID NO: 104695 - DNA, 17 bp, Arabidopsis thaliana
gcgactctcggcaacgg

SEQ ID NO: 104696 - DNA, 17 bp, Arabidopsis thaliana
gcgactgctttgtgaca

SEQ ID NO: 104697 - DNA, 17 bp, Arabidopsis thaliana
gcgactgtcgctacttt

SEQ ID NO: 104698 - DNA, 17 bp, Arabidopsis thaliana
gcgactgtttctgattt

SEQ ID NO: 104699 - DNA, 17 bp, Arabidopsis thaliana
gcgacttctatgcggtc

SEQ ID NO: 104700 - DNA, 17 bp, Arabidopsis thaliana
gcgacttggacagggtc

SEQ ID NO: 104701 - DNA, 17 bp, Arabidopsis thaliana
gcgagaatccagtggtg

SEQ ID NO: 104702 - DNA, 17 bp, Arabidopsis thaliana
gcgagaatgtcggcttg

SEQ ID NO: 104703 - DNA, 17 bp, Arabidopsis thaliana
gcgagaccgacaccagg

SEQ ID NO: 104704 - DNA, 17 bp, Arabidopsis thaliana
gcgagacgtaggattcc

SEQ ID NO: 104705 - DNA, 17 bp, Arabidopsis thaliana
gcgagagcaatgtgttt

SEQ ID NO: 104706 - DNA, 17 bp, Arabidopsis thaliana
gcgagagcgggccgccg

SEQ ID NO: 104707 - DNA, 17 bp, Arabidopsis thaliana
gcgagagcgggtcgccg

SEQ ID NO: 104708 - DNA, 17 bp, Arabidopsis thaliana
gcgagagcgggtcggag

SEQ ID NO: 104709 - DNA, 17 bp, Arabidopsis thaliana
gcgagagcgggtcggcg

SEQ ID NO: 104710 - DNA, 17 bp, Arabidopsis thaliana
gcgagaggcacggggtt

SEQ ID NO: 104711 - DNA, 17 bp, Arabidopsis thaliana
gcgagagtagtactagg

SEQ ID NO: 104712 - DNA, 17 bp, Arabidopsis thaliana
gcgagagttttatgact

SEQ ID NO: 104713 - DNA, 17 bp, Arabidopsis thaliana
gcgagagttttgtgact

SEQ ID NO: 104714 - DNA, 17 bp, Arabidopsis thaliana
gcgagatttttgcgagt

SEQ ID NO: 104715 - DNA, 17 bp, Arabidopsis thaliana
gcgagccccggcgttat

SEQ ID NO: 104716 - DNA, 17 bp, Arabidopsis thaliana
gcgagcggtagcggtta

SEQ ID NO: 104717 - DNA, 17 bp, Arabidopsis thaliana
gcgaggagggcgcggcg

SEQ ID NO: 104718 - DNA, 17 bp, Arabidopsis thaliana
gcgaggcttacctggtg

SEQ ID NO: 104719 - DNA, 17 bp, Arabidopsis thaliana
gcgagggtgagctaact

SEQ ID NO: 104720 - DNA, 17 bp, Arabidopsis thaliana
gcgagtagggctttgga

SEQ ID NO: 104721 - DNA, 17 bp, Arabidopsis thaliana
gcgagtgacccgggttc

SEQ ID NO: 104722 - DNA, 17 bp, Arabidopsis thaliana
gcgagtgagttccagcg

SEQ ID NO: 104723 - DNA, 17 bp, Arabidopsis thaliana
gcgagtgggacccaggg

SEQ ID NO: 104724 - DNA, 17 bp, Arabidopsis thaliana
gcgagttaacgggtgag

SEQ ID NO: 104725 - DNA, 17 bp, Arabidopsis thaliana
gcgagttaagcagtccg

SEQ ID NO: 104726 - DNA, 17 bp, Arabidopsis thaliana
gcgagttcggtcctcgc

SEQ ID NO: 104727 - DNA, 17 bp, Arabidopsis thaliana
gcgagttggtcctgttc

SEQ ID NO: 104728 - DNA, 17 bp, Arabidopsis thaliana
gcgagtttctggattct

SEQ ID NO: 104729 - DNA, 17 bp, Arabidopsis thaliana
gcgagtttttgtgggtt

SEQ ID NO: 104730 - DNA, 17 bp, Arabidopsis thaliana
gcgatacgctcctggtc

SEQ ID NO: 104731 - DNA, 17 bp, Arabidopsis thaliana
gcgatacggagggaggt

SEQ ID NO: 104732 - DNA, 17 bp, Arabidopsis thaliana
gcgatactgacgtgcaa

SEQ ID NO: 104733 - DNA, 17 bp, Arabidopsis thaliana
gcgatacttggtgtgaa

SEQ ID NO: 104734 - DNA, 17 bp, Arabidopsis thaliana
gcgataggatgtcaatt

SEQ ID NO: 104735 - DNA, 17 bp, Arabidopsis thaliana
gcgataggcgatctgcg

SEQ ID NO: 104736 - DNA, 17 bp, Arabidopsis thaliana
gcgatagttccggcggt

SEQ ID NO: 104737 - DNA, 17 bp, Arabidopsis thaliana
gcgatatccagagagct

SEQ ID NO: 104738 - DNA, 17 bp, Arabidopsis thaliana
gcgatcagaatcggtgt

SEQ ID NO: 104739 - DNA, 17 bp, Arabidopsis thaliana
gcgatcgtggcgaagtg

SEQ ID NO: 104740 - DNA, 17 bp, Arabidopsis thaliana
gcgatctgccgaagctg

SEQ ID NO: 104741 - DNA, 17 bp, Arabidopsis thaliana
gcgatctgccgcctgtg

SEQ ID NO: 104742 - DNA, 17 bp, Arabidopsis thaliana
gcgatgaagtgtatgat

SEQ ID NO: 104743 - DNA, 17 bp, Arabidopsis thaliana
gcgatgatcagtagctg

SEQ ID NO: 104744 - DNA, 17 bp, Arabidopsis thaliana
gcgatggagcgacgata

SEQ ID NO: 104745 - DNA, 17 bp, Arabidopsis thaliana
gcgatggtccctgcgga

SEQ ID NO: 104746 - DNA, 17 bp, Arabidopsis thaliana
gcgatggtcgcaccttt

SEQ ID NO: 104747 - DNA, 17 bp, Arabidopsis thaliana
gcgatggtgaaacacaa

SEQ ID NO: 104748 - DNA, 17 bp, Arabidopsis thaliana
gcgatgttcctcacaag

SEQ ID NO: 104749 - DNA, 17 bp, Arabidopsis thaliana
gcgattaacgatttgcg

SEQ ID NO: 104750 - DNA, 17 bp, Arabidopsis thaliana
gcgattaacgatttgct

SEQ ID NO: 104751 - DNA, 17 bp, Arabidopsis thaliana
gcgattactaggtttct

SEQ ID NO: 104752 - DNA, 17 bp, Arabidopsis thaliana
gcgattaggttattggc

SEQ ID NO: 104753 - DNA, 17 bp, Arabidopsis thaliana
gcgattagtcgctgctt

SEQ ID NO: 104754 - DNA, 17 bp, Arabidopsis thaliana
gcgattagttgctgctt

SEQ ID NO: 104755 - DNA, 17 bp, Arabidopsis thaliana
gcgattcacgacggccg

SEQ ID NO: 104756 - DNA, 17 bp, Arabidopsis thaliana
gcgattccaggtcaggc

SEQ ID NO: 104757 - DNA, 17 bp, Arabidopsis thaliana
gcgattctttcagattt

SEQ ID NO: 104758 - DNA, 17 bp, Arabidopsis thaliana
gcgattgtcgctgtaat

SEQ ID NO: 104759 - DNA, 17 bp, Arabidopsis thaliana
gcgattgtctttgcgat

SEQ ID NO: 104760 - DNA, 17 bp, Arabidopsis thaliana
gcgattgtgggttcggg

SEQ ID NO: 104761 - DNA, 17 bp, Arabidopsis thaliana
gcgattgtgggttcgtc

SEQ ID NO: 104762 - DNA, 17 bp, Arabidopsis thaliana
gcgattgttgcataaga

SEQ ID NO: 104763 - DNA, 17 bp, Arabidopsis thaliana
gcgatttacgcctcttt

SEQ ID NO: 104764 - DNA, 17 bp, Arabidopsis thaliana
gcgatttactggtatgc

SEQ ID NO: 104765 - DNA, 17 bp, Arabidopsis thaliana
gcgatttagagcgacag

SEQ ID NO: 104766 - DNA, 17 bp, Arabidopsis thaliana
gcgatttcggcttcctc

SEQ ID NO: 104767 - DNA, 17 bp, Arabidopsis thaliana
gcgatttcttcggttga

SEQ ID NO: 104768 - DNA, 17 bp, Arabidopsis thaliana
gcgatttggtttggttc

SEQ ID NO: 104769 - DNA, 17 bp, Arabidopsis thaliana
gcgattttaccgttttg

SEQ ID NO: 104770 - DNA, 17 bp, Arabidopsis thaliana
gcgattttggcaaaacg

SEQ ID NO: 104771 - DNA, 17 bp, Arabidopsis thaliana
gcgatttttccggcgat

SEQ ID NO: 104772 - DNA, 17 bp, Arabidopsis thaliana
gcgcaaacgattggatg

SEQ ID NO: 104773 - DNA, 17 bp, Arabidopsis thaliana
gcgcaaagaacagagtt

SEQ ID NO: 104774 - DNA, 17 bp, Arabidopsis thaliana
gcgcaacctatacccgg

SEQ ID NO: 104775 - DNA, 17 bp, Arabidopsis thaliana
gcgcaactacaaccgtg

SEQ ID NO: 104776 - DNA, 17 bp, Arabidopsis thaliana
gcgcaaggaagctgatt

SEQ ID NO: 104777 - DNA, 17 bp, Arabidopsis thaliana
gcgcaagtgaaatacca

SEQ ID NO: 104778 - DNA, 17 bp, Arabidopsis thaliana
gcgcaagtgaataccac

SEQ ID NO: 104779 - DNA, 17 bp, Arabidopsis thaliana
gcgcaatttgtagatct

SEQ ID NO: 104780 - DNA, 17 bp, Arabidopsis thaliana
gcgcacaagcccggccc

SEQ ID NO: 104781 - DNA, 17 bp, Arabidopsis thaliana
gcgcacctgtagatgga

SEQ ID NO: 104782 - DNA, 17 bp, Arabidopsis thaliana
gcgcacgtctgcctggg

SEQ ID NO: 104783 - DNA, 17 bp, Arabidopsis thaliana
gcgcactagccacgaca

SEQ ID NO: 104784 - DNA, 17 bp, Arabidopsis thaliana
gcgcactttccattgag

SEQ ID NO: 104785 - DNA, 17 bp, Arabidopsis thaliana
gcgcagagatctgttta

SEQ ID NO: 104786 - DNA, 17 bp, Arabidopsis thaliana
gcgcagagatctgtttt

SEQ ID NO: 104787 - DNA, 17 bp, Arabidopsis thaliana
gcgcagagctgctcaaa

SEQ ID NO: 104788 - DNA, 17 bp, Arabidopsis thaliana
gcgcagcagttgactgg

SEQ ID NO: 104789 - DNA, 17 bp, Arabidopsis thaliana
gcgcagccgatagggta

SEQ ID NO: 104790 - DNA, 17 bp, Arabidopsis thaliana
gcgcagcggatgttgct

SEQ ID NO: 104791 - DNA, 17 bp, Arabidopsis thaliana
gcgcaggttcgaatcct

SEQ ID NO: 104792 - DNA, 17 bp, Arabidopsis thaliana
gcgcaggttcggatcct

SEQ ID NO: 104793 - DNA, 17 bp, Arabidopsis thaliana
gcgcagtagccgttgac

SEQ ID NO: 104794 - DNA, 17 bp, Arabidopsis thaliana
gcgcagtgcggatgatc

SEQ ID NO: 104795 - DNA, 17 bp, Arabidopsis thaliana
gcgcagtgggccgccac

SEQ ID NO: 104796 - DNA, 17 bp, Arabidopsis thaliana
gcgcagtgggccgccag

SEQ ID NO: 104797 - DNA, 17 bp, Arabidopsis thaliana
gcgcagtgggctgcgcc

SEQ ID NO: 104798 - DNA, 17 bp, Arabidopsis thaliana
gcgcagttagtttccga

SEQ ID NO: 104799 - DNA, 17 bp, Arabidopsis thaliana
gcgcatacaacggtggg

SEQ ID NO: 104800 - DNA, 17 bp, Arabidopsis thaliana
gcgcataccacggtgcg

SEQ ID NO: 104801 - DNA, 17 bp, Arabidopsis thaliana
gcgcataccacggtggg

SEQ ID NO: 104802 - DNA, 17 bp, Arabidopsis thaliana
gcgcatctggtgtagtg

SEQ ID NO: 104803 - DNA, 17 bp, Arabidopsis thaliana
gcgcatgattctatggg

SEQ ID NO: 104804 - DNA, 17 bp, Arabidopsis thaliana
gcgcatggtactaatgt

SEQ ID NO: 104805 - DNA, 17 bp, Arabidopsis thaliana
gcgcattctgtagatgg

SEQ ID NO: 104806 - DNA, 17 bp, Arabidopsis thaliana
gcgcattttcgtgattt

SEQ ID NO: 104807 - DNA, 17 bp, Arabidopsis thaliana
gcgccaactttcaaatt

SEQ ID NO: 104808 - DNA, 17 bp, Arabidopsis thaliana
gcgccaactttcaattt

SEQ ID NO: 104809 - DNA, 17 bp, Arabidopsis thaliana
gcgccacaactgtttca

SEQ ID NO: 104810 - DNA, 17 bp, Arabidopsis thaliana
gcgccatagccaagtgg

SEQ ID NO: 104811 - DNA, 17 bp, Arabidopsis thaliana
gcgcccaagatattgcg

SEQ ID NO: 104812 - DNA, 17 bp, Arabidopsis thaliana
gcgccccaagccttccg

SEQ ID NO: 104813 - DNA, 17 bp, Arabidopsis thaliana
gcgccccaagccttctg

SEQ ID NO: 104814 - DNA, 17 bp, Arabidopsis thaliana
gcgcccgccgcccgact

SEQ ID NO: 104815 - DNA, 17 bp, Arabidopsis thaliana
gcgcccgccgcccgatt

SEQ ID NO: 104816 - DNA, 17 bp, Arabidopsis thaliana
gcgcccgtgcctaatgg

SEQ ID NO: 104817 - DNA, 17 bp, Arabidopsis thaliana
gcgcccgtggcctaacg

SEQ ID NO: 104818 - DNA, 17 bp, Arabidopsis thaliana
gcgcccgttgcctaatg

SEQ ID NO: 104819 - DNA, 17 bp, Arabidopsis thaliana
gcgccgaagatgaacgg

SEQ ID NO: 104820 - DNA, 17 bp, Arabidopsis thaliana
gcgccgattttgtaccg

SEQ ID NO: 104821 - DNA, 17 bp, Arabidopsis thaliana
gcgccgcagagccagca

SEQ ID NO: 104822 - DNA, 17 bp, Arabidopsis thaliana
gcgccgcggacaaaact

SEQ ID NO: 104823 - DNA, 17 bp, Arabidopsis thaliana
gcgccggcgatgttgat

SEQ ID NO: 104824 - DNA, 17 bp, Arabidopsis thaliana
gcgccgggcagctaagt

SEQ ID NO: 104825 - DNA, 17 bp, Arabidopsis thaliana
gcgccgggtggctttgc

SEQ ID NO: 104826 - DNA, 17 bp, Arabidopsis thaliana
gcgccggtgatatcaat

SEQ ID NO: 104827 - DNA, 17 bp, Arabidopsis thaliana
gcgccggtggtgttttt

SEQ ID NO: 104828 - DNA, 17 bp, Arabidopsis thaliana
gcgcctaacggcgtgcc

SEQ ID NO: 104829 - DNA, 17 bp, Arabidopsis thaliana
gcgcctccattggcagg

SEQ ID NO: 104830 - DNA, 17 bp, Arabidopsis thaliana
gcgcctcgtggtgcgac

SEQ ID NO: 104831 - DNA, 17 bp, Arabidopsis thaliana
gcgcctctatgtgtacg

SEQ ID NO: 104832 - DNA, 17 bp, Arabidopsis thaliana
gcgcctctccattggca

SEQ ID NO: 104833 - DNA, 17 bp, Arabidopsis thaliana
gcgcctctccattggcc

SEQ ID NO: 104834 - DNA, 17 bp, Arabidopsis thaliana
gcgcctgactgtacaat

SEQ ID NO: 104835 - DNA, 17 bp, Arabidopsis thaliana
gcgcctgcagcccagcg

SEQ ID NO: 104836 - DNA, 17 bp, Arabidopsis thaliana
gcgcctgctgccttcct

SEQ ID NO: 104837 - DNA, 17 bp, Arabidopsis thaliana
gcgcctgtaactcagtg

SEQ ID NO: 104838 - DNA, 17 bp, Arabidopsis thaliana
gcgcctgtagctcagcg

SEQ ID NO: 104839 - DNA, 17 bp, Arabidopsis thaliana
gcgcctgtagctcagta

SEQ ID NO: 104840 - DNA, 17 bp, Arabidopsis thaliana
gcgcctgtagctcagtc

SEQ ID NO: 104841 - DNA, 17 bp, Arabidopsis thaliana
gcgcctgtagctcagtg

SEQ ID NO: 104842 - DNA, 17 bp, Arabidopsis thaliana
gcgcctgtagctgggtt

SEQ ID NO: 104843 - DNA, 17 bp, Arabidopsis thaliana
gcgcctgtagtccaacg

SEQ ID NO: 104844 - DNA, 17 bp, Arabidopsis thaliana
gcgcgaagctaccgtcg

SEQ ID NO: 104845 - DNA, 17 bp, Arabidopsis thaliana
gcgcgaagctaccgtgc

SEQ ID NO: 104846 - DNA, 17 bp, Arabidopsis thaliana
gcgcgaccgatacccgg

SEQ ID NO: 104847 - DNA, 17 bp, Arabidopsis thaliana
gcgcgacctatacccgc

SEQ ID NO: 104848 - DNA, 17 bp, Arabidopsis thaliana
gcgcgacctatacccgg

SEQ ID NO: 104849 - DNA, 17 bp, Arabidopsis thaliana
gcgcgacctatatccgt

SEQ ID NO: 104850 - DNA, 17 bp, Arabidopsis thaliana
gcgcgacctatcccccc

SEQ ID NO: 104851 - DNA, 17 bp, Arabidopsis thaliana
gcgcgattcagttgcct

SEQ ID NO: 104852 - DNA, 17 bp, Arabidopsis thaliana
gcgcgcaccaaagaaac

SEQ ID NO: 104853 - DNA, 17 bp, Arabidopsis thaliana
gcgcgcatagcgcagtg

SEQ ID NO: 104854 - DNA, 17 bp, Arabidopsis thaliana
gcgcgcgcctaacggcg

SEQ ID NO: 104855 - DNA, 17 bp, Arabidopsis thaliana
gcgcgctgtagccgaat

SEQ ID NO: 104856 - DNA, 17 bp, Arabidopsis thaliana
gcgcgcttaagccgagt

SEQ ID NO: 104857 - DNA, 17 bp, Arabidopsis thaliana
gcgcggactgagctgct

SEQ ID NO: 104858 - DNA, 17 bp, Arabidopsis thaliana
gcgcggctctgctatgc

SEQ ID NO: 104859 - DNA, 17 bp, Arabidopsis thaliana
gcgcgggtaaacggcgg

SEQ ID NO: 104860 - DNA, 17 bp, Arabidopsis thaliana
gcgcgggttttgctctg

SEQ ID NO: 104861 - DNA, 17 bp, Arabidopsis thaliana
gcgcggtttcggcctag

SEQ ID NO: 104862 - DNA, 17 bp, Arabidopsis thaliana
gcgcgtctgcctgggtg

SEQ ID NO: 104863 - DNA, 17 bp, Arabidopsis thaliana
gcgcgtgaagctcagga

SEQ ID NO: 104864 - DNA, 17 bp, Arabidopsis thaliana
gcgcgtgcggccgagcg

SEQ ID NO: 104865 - DNA, 17 bp, Arabidopsis thaliana
gcgctaacctagaaccc

SEQ ID NO: 104866 - DNA, 17 bp, Arabidopsis thaliana
gcgctaatcgttgcgtc

SEQ ID NO: 104867 - DNA, 17 bp, Arabidopsis thaliana
gcgctacccgccggatt

SEQ ID NO: 104868 - DNA, 17 bp, Arabidopsis thaliana
gcgctacgcatgagttt

SEQ ID NO: 104869 - DNA, 17 bp, Arabidopsis thaliana
gcgctacgggagaaata

SEQ ID NO: 104870 - DNA, 17 bp, Arabidopsis thaliana
gcgctagataggggtgg

SEQ ID NO: 104871 - DNA, 17 bp, Arabidopsis thaliana
gcgctataatgaccact

SEQ ID NO: 104872 - DNA, 17 bp, Arabidopsis thaliana
gcgctatccatcctgag

SEQ ID NO: 104873 - DNA, 17 bp, Arabidopsis thaliana
gcgctatctctcctgcg

SEQ ID NO: 104874 - DNA, 17 bp, Arabidopsis thaliana
gcgctattcatggtgct

SEQ ID NO: 104875 - DNA, 17 bp, Arabidopsis thaliana
gcgctcacgcccggtcg

SEQ ID NO: 104876 - DNA, 17 bp, Arabidopsis thaliana
gcgctcaggagggatag

SEQ ID NO: 104877 - DNA, 17 bp, Arabidopsis thaliana
gcgctccgactatttcc

SEQ ID NO: 104878 - DNA, 17 bp, Arabidopsis thaliana
gcgctcctgtagatgga

SEQ ID NO: 104879 - DNA, 17 bp, Arabidopsis thaliana
gcgctcgggggtcccag

SEQ ID NO: 104880 - DNA, 17 bp, Arabidopsis thaliana
gcgctcgtggcccaatg

SEQ ID NO: 104881 - DNA, 17 bp, Arabidopsis thaliana
gcgctgaagagacgctc

SEQ ID NO: 104882 - DNA, 17 bp, Arabidopsis thaliana
gcgctgacatcgtagat

SEQ ID NO: 104883 - DNA, 17 bp, Arabidopsis thaliana
gcgctgcattgtctgct

SEQ ID NO: 104884 - DNA, 17 bp, Arabidopsis thaliana
gcgctgcggggggtcgt

SEQ ID NO: 104885 - DNA, 17 bp, Arabidopsis thaliana
gcgctggattaggactg

SEQ ID NO: 104886 - DNA, 17 bp, Arabidopsis thaliana
gcgctggattatgactg

SEQ ID NO: 104887 - DNA, 17 bp, Arabidopsis thaliana
gcgctggtggtggtggt

SEQ ID NO: 104888 - DNA, 17 bp, Arabidopsis thaliana
gcgctgtacagattaag

SEQ ID NO: 104889 - DNA, 17 bp, Arabidopsis thaliana
gcgctgtctacgagtca

SEQ ID NO: 104890 - DNA, 17 bp, Arabidopsis thaliana
gcgctgtctacgagtcg

SEQ ID NO: 104891 - DNA, 17 bp, Arabidopsis thaliana
gcgctgtctatcagtcg

SEQ ID NO: 104892 - DNA, 17 bp, Arabidopsis thaliana
gcgctgtgcgtatcgac

SEQ ID NO: 104893 - DNA, 17 bp, Arabidopsis thaliana
gcgcttacagggattct

SEQ ID NO: 104894 - DNA, 17 bp, Arabidopsis thaliana
gcgcttagaattggact

SEQ ID NO: 104895 - DNA, 17 bp, Arabidopsis thaliana
gcgcttatggcggttct

SEQ ID NO: 104896 - DNA, 17 bp, Arabidopsis thaliana
gcgcttcagcccagaac

SEQ ID NO: 104897 - DNA, 17 bp, Arabidopsis thaliana
gcgcttcggacaaaccc

SEQ ID NO: 104898 - DNA, 17 bp, Arabidopsis thaliana
gcgcttggtgcaggccc

SEQ ID NO: 104899 - DNA, 17 bp, Arabidopsis thaliana
gcgcttggtgcaggtcg

SEQ ID NO: 104900 - DNA, 17 bp, Arabidopsis thaliana
gcgcttggttgaaaagc

SEQ ID NO: 104901 - DNA, 17 bp, Arabidopsis thaliana
gcgcttggttgacagaa

SEQ ID NO: 104902 - DNA, 17 bp, Arabidopsis thaliana
gcgcttgtggagacgtc

SEQ ID NO: 104903 - DNA, 17 bp, Arabidopsis thaliana
gcgcttttgccgagtgg

SEQ ID NO: 104904 - DNA, 17 bp, Arabidopsis thaliana
gcgctttttgttgactg

SEQ ID NO: 104905 - DNA, 17 bp, Arabidopsis thaliana
gcggaaaaaatgcggta

SEQ ID NO: 104906 - DNA, 17 bp, Arabidopsis thaliana
gcggaaaaatagctcga

SEQ ID NO: 104907 - DNA, 17 bp, Arabidopsis thaliana
gcggaaaaatcacgggt

SEQ ID NO: 104908 - DNA, 17 bp, Arabidopsis thaliana
gcggaaaattctgagct

SEQ ID NO: 104909 - DNA, 17 bp, Arabidopsis thaliana
gcggaaatagcttaata

SEQ ID NO: 104910 - DNA, 17 bp, Arabidopsis thaliana
gcggaaatgtctgggct

SEQ ID NO: 104911 - DNA, 17 bp, Arabidopsis thaliana
gcggaacagacagtgcg

SEQ ID NO: 104912 - DNA, 17 bp, Arabidopsis thaliana
gcggaacggagcaagcc

SEQ ID NO: 104913 - DNA, 17 bp, Arabidopsis thaliana
gcggaacggagcaatcc

SEQ ID NO: 104914 - DNA, 17 bp, Arabidopsis thaliana
gcggaagatttactgac

SEQ ID NO: 104915 - DNA, 17 bp, Arabidopsis thaliana
gcggaagcgtcgttcgg

SEQ ID NO: 104916 - DNA, 17 bp, Arabidopsis thaliana
gcggaagtggctcagcg

SEQ ID NO: 104917 - DNA, 17 bp, Arabidopsis thaliana
gcggaagtttgcggaaa

SEQ ID NO: 104918 - DNA, 17 bp, Arabidopsis thaliana
gcggaagtttgcggaca

SEQ ID NO: 104919 - DNA, 17 bp, Arabidopsis thaliana
gcggaattgacttccta

SEQ ID NO: 104920 - DNA, 17 bp, Arabidopsis thaliana
gcggaccaggcttcatt

SEQ ID NO: 104921 - DNA, 17 bp, Arabidopsis thaliana
gcggaccatttgatggt

SEQ ID NO: 104922 - DNA, 17 bp, Arabidopsis thaliana
gcggaccatttgcgaac

SEQ ID NO: 104923 - DNA, 17 bp, Arabidopsis thaliana
gcggaccgtcatgcgtg

SEQ ID NO: 104924 - DNA, 17 bp, Arabidopsis thaliana
gcggaccgtcatgcttg

SEQ ID NO: 104925 - DNA, 17 bp, Arabidopsis thaliana
gcggacggattagcaaa

SEQ ID NO: 104926 - DNA, 17 bp, Arabidopsis thaliana
gcggacgtcttggcatg

SEQ ID NO: 104927 - DNA, 17 bp, Arabidopsis thaliana
gcggactacctgcacct

SEQ ID NO: 104928 - DNA, 17 bp, Arabidopsis thaliana
gcggactctcggcaacg

SEQ ID NO: 104929 - DNA, 17 bp, Arabidopsis thaliana
gcggactgctcgagctg

SEQ ID NO: 104930 - DNA, 17 bp, Arabidopsis thaliana
gcggacttgctcaggcg

SEQ ID NO: 104931 - DNA, 17 bp, Arabidopsis thaliana
gcggagaagaagaagaa

SEQ ID NO: 104932 - DNA, 17 bp, Arabidopsis thaliana
gcggagaagacggtgaa

SEQ ID NO: 104933 - DNA, 17 bp, Arabidopsis thaliana
gcggagcggccgtcgga

SEQ ID NO: 104934 - DNA, 17 bp, Arabidopsis thaliana
gcggaggacattgtcag

SEQ ID NO: 104935 - DNA, 17 bp, Arabidopsis thaliana
gcggaggaccgagtgcc

SEQ ID NO: 104936 - DNA, 17 bp, Arabidopsis thaliana
gcggaggtcttcatcgt

SEQ ID NO: 104937 - DNA, 17 bp, Arabidopsis thaliana
gcggataaaaccgtcaa

SEQ ID NO: 104938 - DNA, 17 bp, Arabidopsis thaliana
gcggataaagcggtcta

SEQ ID NO: 104939 - DNA, 17 bp, Arabidopsis thaliana
gcggataatatgggctt

SEQ ID NO: 104940 - DNA, 17 bp, Arabidopsis thaliana
gcggatagaagcttatc

SEQ ID NO: 104941 - DNA, 17 bp, Arabidopsis thaliana
gcggatagaatccttta

SEQ ID NO: 104942 - DNA, 17 bp, Arabidopsis thaliana
gcggatatagtcgaatg

SEQ ID NO: 104943 - DNA, 17 bp, Arabidopsis thaliana
gcggatatgcggttgga

SEQ ID NO: 104944 - DNA, 17 bp, Arabidopsis thaliana
gcggatcgcatatctca

SEQ ID NO: 104945 - DNA, 17 bp, Arabidopsis thaliana
gcggatgaatcctttcc

SEQ ID NO: 104946 - DNA, 17 bp, Arabidopsis thaliana
gcggatgagttgtggtt

SEQ ID NO: 104947 - DNA, 17 bp, Arabidopsis thaliana
gcggatgctaacgcaat

SEQ ID NO: 104948 - DNA, 17 bp, Arabidopsis thaliana
gcggatgctaacgcgat

SEQ ID NO: 104949 - DNA, 17 bp, Arabidopsis thaliana
gcggatgggggccggcg

SEQ ID NO: 104950 - DNA, 17 bp, Arabidopsis thaliana
gcggatgggggccggct

SEQ ID NO: 104951 - DNA, 17 bp, Arabidopsis thaliana
gcggatgtagccaagcg

SEQ ID NO: 104952 - DNA, 17 bp, Arabidopsis thaliana
gcggatgtagccaagta

SEQ ID NO: 104953 - DNA, 17 bp, Arabidopsis thaliana
gcggatgtagccaagtg

SEQ ID NO: 104954 - DNA, 17 bp, Arabidopsis thaliana
gcggatgtcagcggttc

SEQ ID NO: 104955 - DNA, 17 bp, Arabidopsis thaliana
gcggatgtcagcgtttc

SEQ ID NO: 104956 - DNA, 17 bp, Arabidopsis thaliana
gcggatgttgcttatag

SEQ ID NO: 104957 - DNA, 17 bp, Arabidopsis thaliana
gcggatgttgtatggta

SEQ ID NO: 104958 - DNA, 17 bp, Arabidopsis thaliana
gcggattacggcggcgg

SEQ ID NO: 104959 - DNA, 17 bp, Arabidopsis thaliana
gcggattacggtggcgg

SEQ ID NO: 104960 - DNA, 17 bp, Arabidopsis thaliana
gcggattacggtggggg

SEQ ID NO: 104961 - DNA, 17 bp, Arabidopsis thaliana
gcggattattcgtgtga

SEQ ID NO: 104962 - DNA, 17 bp, Arabidopsis thaliana
gcggatttgatttcagc

SEQ ID NO: 104963 - DNA, 17 bp, Arabidopsis thaliana
gcggattttgtttttcc

SEQ ID NO: 104964 - DNA, 17 bp, Arabidopsis thaliana
gcggatttttttgcagg

SEQ ID NO: 104965 - DNA, 17 bp, Arabidopsis thaliana
gcggcaaccgcaggtga

SEQ ID NO: 104966 - DNA, 17 bp, Arabidopsis thaliana
gcggcaacggcagcggc

SEQ ID NO: 104967 - DNA, 17 bp, Arabidopsis thaliana
gcggcaatcagcagtgt

SEQ ID NO: 104968 - DNA, 17 bp, Arabidopsis thaliana
gcggcacaggcacaggg

SEQ ID NO: 104969 - DNA, 17 bp, Arabidopsis thaliana
gcggcaccgcagggtta

SEQ ID NO: 104970 - DNA, 17 bp, Arabidopsis thaliana
gcggcactcctctaccg

SEQ ID NO: 104971 - DNA, 17 bp, Arabidopsis thaliana
gcggcatggccgactgg

SEQ ID NO: 104972 - DNA, 17 bp, Arabidopsis thaliana
gcggcatggccgagtgg

SEQ ID NO: 104973 - DNA, 17 bp, Arabidopsis thaliana
gcggcatggccgagtgt

SEQ ID NO: 104974 - DNA, 17 bp, Arabidopsis thaliana
gcggccaccgtgtagat

SEQ ID NO: 104975 - DNA, 17 bp, Arabidopsis thaliana
gcggccacgtctgagtt

SEQ ID NO: 104976 - DNA, 17 bp, Arabidopsis thaliana
gcggccatctttagcac

SEQ ID NO: 104977 - DNA, 17 bp, Arabidopsis thaliana
gcggccatctttagcag

SEQ ID NO: 104978 - DNA, 17 bp, Arabidopsis thaliana
gcggcccaaagcgatgt

SEQ ID NO: 104979 - DNA, 17 bp, Arabidopsis thaliana
gcggccgtcggtgcagg

SEQ ID NO: 104980 - DNA, 17 bp, Arabidopsis thaliana
gcggcctgactacccct

SEQ ID NO: 104981 - DNA, 17 bp, Arabidopsis thaliana
gcggcgacgtgggtggt

SEQ ID NO: 104982 - DNA, 17 bp, Arabidopsis thaliana
gcggcgagagcgggtcg

SEQ ID NO: 104983 - DNA, 17 bp, Arabidopsis thaliana
gcggcgcagtcaccggc

SEQ ID NO: 104984 - DNA, 17 bp, Arabidopsis thaliana
gcggcggaattgctttg

SEQ ID NO: 104985 - DNA, 17 bp, Arabidopsis thaliana
gcggcgggaaaatcacg

SEQ ID NO: 104986 - DNA, 17 bp, Arabidopsis thaliana
gcggcgggggatcaaca

SEQ ID NO: 104987 - DNA, 17 bp, Arabidopsis thaliana
gcggctacgaggcgacg

SEQ ID NO: 104988 - DNA, 17 bp, Arabidopsis thaliana
gcggctacggctttaac

SEQ ID NO: 104989 - DNA, 17 bp, Arabidopsis thaliana
gcggctatcagagaacg

SEQ ID NO: 104990 - DNA, 17 bp, Arabidopsis thaliana
gcggctggaagagcacc

SEQ ID NO: 104991 - DNA, 17 bp, Arabidopsis thaliana
gcggctggaggtggggt

SEQ ID NO: 104992 - DNA, 17 bp, Arabidopsis thaliana
gcggctgttgattgtgt

SEQ ID NO: 104993 - DNA, 17 bp, Arabidopsis thaliana
gcggcttaggcgttggt

SEQ ID NO: 104994 - DNA, 17 bp, Arabidopsis thaliana
gcggcttcatatcctgt

SEQ ID NO: 104995 - DNA, 17 bp, Arabidopsis thaliana
gcggctttgttactagt

SEQ ID NO: 104996 - DNA, 17 bp, Arabidopsis thaliana
gcgggaaaaatgcggaa

SEQ ID NO: 104997 - DNA, 17 bp, Arabidopsis thaliana
gcgggaaaaatgcggtg

SEQ ID NO: 104998 - DNA, 17 bp, Arabidopsis thaliana
gcgggaaaatcacaggt

SEQ ID NO: 104999 - DNA, 17 bp, Arabidopsis thaliana
gcgggaaaatcacgggt

SEQ ID NO: 105000 - DNA, 17 bp, Arabidopsis thaliana
gcgggaaagtgcaggtg

SEQ ID NO: 105001 - DNA, 17 bp, Arabidopsis thaliana
gcgggaagcatttgcac

SEQ ID NO: 105002 - DNA, 17 bp, Arabidopsis thaliana
gcgggaaggatttgcac

SEQ ID NO: 105003 - DNA, 17 bp, Arabidopsis thaliana
gcgggaatctatcagag

SEQ ID NO: 105004 - DNA, 17 bp, Arabidopsis thaliana
gcgggaatctatcagtg

SEQ ID NO: 105005 - DNA, 17 bp, Arabidopsis thaliana
gcgggacctttgtgtga

SEQ ID NO: 105006 - DNA, 17 bp, Arabidopsis thaliana
gcgggacgggtttggca

SEQ ID NO: 105007 - DNA, 17 bp, Arabidopsis thaliana
gcgggagaagtgcggtg

SEQ ID NO: 105008 - DNA, 17 bp, Arabidopsis thaliana
gcgggagattgtgggtt

SEQ ID NO: 105009 - DNA, 17 bp, Arabidopsis thaliana
gcgggaggagtgcggtg

SEQ ID NO: 105010 - DNA, 17 bp, Arabidopsis thaliana
gcgggagtaactatgac

SEQ ID NO: 105011 - DNA, 17 bp, Arabidopsis thaliana
gcgggagtttgcggaga

SEQ ID NO: 105012 - DNA, 17 bp, Arabidopsis thaliana
gcgggatcccacccagc

SEQ ID NO: 105013 - DNA, 17 bp, Arabidopsis thaliana
gcgggatcccgcgtggg

SEQ ID NO: 105014 - DNA, 17 bp, Arabidopsis thaliana
gcgggatcccgggaggg

SEQ ID NO: 105015 - DNA, 17 bp, Arabidopsis thaliana
gcgggatcccgtgcggg

SEQ ID NO: 105016 - DNA, 17 bp, Arabidopsis thaliana
gcgggatccctcgcggg

SEQ ID NO: 105017 - DNA, 17 bp, Arabidopsis thaliana
gcgggatccctcgtggg

SEQ ID NO: 105018 - DNA, 17 bp, Arabidopsis thaliana
gcgggatccctggcggg

SEQ ID NO: 105019 - DNA, 17 bp, Arabidopsis thaliana
gcgggatgtccgccgga

SEQ ID NO: 105020 - DNA, 17 bp, Arabidopsis thaliana
gcgggattcctcgcggg

SEQ ID NO: 105021 - DNA, 17 bp, Arabidopsis thaliana
gcgggattttgttattt

SEQ ID NO: 105022 - DNA, 17 bp, Arabidopsis thaliana
gcgggattttgttgttg

SEQ ID NO: 105023 - DNA, 17 bp, Arabidopsis thaliana
gcgggattttgttgttt

SEQ ID NO: 105024 - DNA, 17 bp, Arabidopsis thaliana
gcgggccttatctagtt

SEQ ID NO: 105025 - DNA, 17 bp, Arabidopsis thaliana
gcgggcgactcataggc

SEQ ID NO: 105026 - DNA, 17 bp, Arabidopsis thaliana
gcgggcgtacccaagcg

SEQ ID NO: 105027 - DNA, 17 bp, Arabidopsis thaliana
gcgggctttggcatgta

SEQ ID NO: 105028 - DNA, 17 bp, Arabidopsis thaliana
gcggggatagctaagtt

SEQ ID NO: 105029 - DNA, 17 bp, Arabidopsis thaliana
gcggggatagctcagtt

SEQ ID NO: 105030 - DNA, 17 bp, Arabidopsis thaliana
gcggggattcgacttcc

SEQ ID NO: 105031 - DNA, 17 bp, Arabidopsis thaliana
gcgggggcctcgggggg

SEQ ID NO: 105032 - DNA, 17 bp, Arabidopsis thaliana
gcgggtagaatcctttg

SEQ ID NO: 105033 - DNA, 17 bp, Arabidopsis thaliana
gcgggtgacccgggggg

SEQ ID NO: 105034 - DNA, 17 bp, Arabidopsis thaliana
gcgggtgacccggggtc

SEQ ID NO: 105035 - DNA, 17 bp, Arabidopsis thaliana
gcgggtgacccgggtga

SEQ ID NO: 105036 - DNA, 17 bp, Arabidopsis thaliana
gcgggtgacccgggttc

SEQ ID NO: 105037 - DNA, 17 bp, Arabidopsis thaliana
gcgggtgaccggggttc

SEQ ID NO: 105038 - DNA, 17 bp, Arabidopsis thaliana
gcgggtgactcgggttc

SEQ ID NO: 105039 - DNA, 17 bp, Arabidopsis thaliana
gcgggtgcaccgccgac

SEQ ID NO: 105040 - DNA, 17 bp, Arabidopsis thaliana
gcgggtgcggttgcgct

SEQ ID NO: 105041 - DNA, 17 bp, Arabidopsis thaliana
gcgggtgcggttgcggt

SEQ ID NO: 105042 - DNA, 17 bp, Arabidopsis thaliana
gcgggtggccggggtgc

SEQ ID NO: 105043 - DNA, 17 bp, Arabidopsis thaliana
gcgggttcgagccccgt

SEQ ID NO: 105044 - DNA, 17 bp, Arabidopsis thaliana
gcgggttcgtgccccgc

SEQ ID NO: 105045 - DNA, 17 bp, Arabidopsis thaliana
gcgggttcgtgtcccgg

SEQ ID NO: 105046 - DNA, 17 bp, Arabidopsis thaliana
gcgggttgattcccgct

SEQ ID NO: 105047 - DNA, 17 bp, Arabidopsis thaliana
gcgggtttatgatttag

SEQ ID NO: 105048 - DNA, 17 bp, Arabidopsis thaliana
gcgggttttccggattg

SEQ ID NO: 105049 - DNA, 17 bp, Arabidopsis thaliana
gcggtaaatttttgact

SEQ ID NO: 105050 - DNA, 17 bp, Arabidopsis thaliana
gcggtaactgacaggaa

SEQ ID NO: 105051 - DNA, 17 bp, Arabidopsis thaliana
gcggtaaggcaacgggt

SEQ ID NO: 105052 - DNA, 17 bp, Arabidopsis thaliana
gcggtacgggaaaaggg

SEQ ID NO: 105053 - DNA, 17 bp, Arabidopsis thaliana
gcggtacgggagaagcg

SEQ ID NO: 105054 - DNA, 17 bp, Arabidopsis thaliana
gcggtacgggagaagtg

SEQ ID NO: 105055 - DNA, 17 bp, Arabidopsis thaliana
gcggtagaccgccgact

SEQ ID NO: 105056 - DNA, 17 bp, Arabidopsis thaliana
gcggtagccaagtggtg

SEQ ID NO: 105057 - DNA, 17 bp, Arabidopsis thaliana
gcggtagcgaagagggt

SEQ ID NO: 105058 - DNA, 17 bp, Arabidopsis thaliana
gcggtatactgcaggat

SEQ ID NO: 105059 - DNA, 17 bp, Arabidopsis thaliana
gcggtatgtgttagtgt

SEQ ID NO: 105060 - DNA, 17 bp, Arabidopsis thaliana
gcggtcatacaccaact

SEQ ID NO: 105061 - DNA, 17 bp, Arabidopsis thaliana
gcggtcatcatcactgt

SEQ ID NO: 105062 - DNA, 17 bp, Arabidopsis thaliana
gcggtcctgtgttatta

SEQ ID NO: 105063 - DNA, 17 bp, Arabidopsis thaliana
gcggtcgagtatccatg

SEQ ID NO: 105064 - DNA, 17 bp, Arabidopsis thaliana
gcggtctgtaggtggct

SEQ ID NO: 105065 - DNA, 17 bp, Arabidopsis thaliana
gcggtgaagccgttgtt

SEQ ID NO: 105066 - DNA, 17 bp, Arabidopsis thaliana
gcggtgcactaaccatt

SEQ ID NO: 105067 - DNA, 17 bp, Arabidopsis thaliana
gcggtgccaggcgggct

SEQ ID NO: 105068 - DNA, 17 bp, Arabidopsis thaliana
gcggtggagcatgtggt

SEQ ID NO: 105069 - DNA, 17 bp, Arabidopsis thaliana
gcggtggtcccggaggg

SEQ ID NO: 105070 - DNA, 17 bp, Arabidopsis thaliana
gcggtggtggcaggcag

SEQ ID NO: 105071 - DNA, 17 bp, Arabidopsis thaliana
gcggtgtcttgaaggcc

SEQ ID NO: 105072 - DNA, 17 bp, Arabidopsis thaliana
gcggtgtgcattggggt

SEQ ID NO: 105073 - DNA, 17 bp, Arabidopsis thaliana
gcggtgtgggcgttaga

SEQ ID NO: 105074 - DNA, 17 bp, Arabidopsis thaliana
gcggttacggttgcggg

SEQ ID NO: 105075 - DNA, 17 bp, Arabidopsis thaliana
gcggttatccagacggt

SEQ ID NO: 105076 - DNA, 17 bp, Arabidopsis thaliana
gcggttcaactgcggat

SEQ ID NO: 105077 - DNA, 17 bp, Arabidopsis thaliana
gcggttcaagcagatct

SEQ ID NO: 105078 - DNA, 17 bp, Arabidopsis thaliana
gcggttcaagtgtgtca

SEQ ID NO: 105079 - DNA, 17 bp, Arabidopsis thaliana
gcggttcaataaagctg

SEQ ID NO: 105080 - DNA, 17 bp, Arabidopsis thaliana
gcggttcagaattcgtc

SEQ ID NO: 105081 - DNA, 17 bp, Arabidopsis thaliana
gcggttcgaatccggac

SEQ ID NO: 105082 - DNA, 17 bp, Arabidopsis thaliana
gcggttcgagtccgctt

SEQ ID NO: 105083 - DNA, 17 bp, Arabidopsis thaliana
gcggttcgatcccgctt

SEQ ID NO: 105084 - DNA, 17 bp, Arabidopsis thaliana
gcggttcgatcccgtca

SEQ ID NO: 105085 - DNA, 17 bp, Arabidopsis thaliana
gcggttcggaattggtg

SEQ ID NO: 105086 - DNA, 17 bp, Arabidopsis thaliana
gcggttcgggagactgc

SEQ ID NO: 105087 - DNA, 17 bp, Arabidopsis thaliana
gcggttcgtctatggcc

SEQ ID NO: 105088 - DNA, 17 bp, Arabidopsis thaliana
gcggttgaaaacaggta

SEQ ID NO: 105089 - DNA, 17 bp, Arabidopsis thaliana
gcggttgacggcaacgt

SEQ ID NO: 105090 - DNA, 17 bp, Arabidopsis thaliana
gcggttgagcacaagac

SEQ ID NO: 105091 - DNA, 17 bp, Arabidopsis thaliana
gcggttgcggatgcggt

SEQ ID NO: 105092 - DNA, 17 bp, Arabidopsis thaliana
gcggttgcgggagtttg

SEQ ID NO: 105093 - DNA, 17 bp, Arabidopsis thaliana
gcggttgcgggcggtag

SEQ ID NO: 105094 - DNA, 17 bp, Arabidopsis thaliana
gcggttgcgggtggaag

SEQ ID NO: 105095 - DNA, 17 bp, Arabidopsis thaliana
gcggttgcggttgcgga

SEQ ID NO: 105096 - DNA, 17 bp, Arabidopsis thaliana
gcggttgcggttgcggg

SEQ ID NO: 105097 - DNA, 17 bp, Arabidopsis thaliana
gcggttgcggtttcgag

SEQ ID NO: 105098 - DNA, 17 bp, Arabidopsis thaliana
gcggttgcggttttggt

SEQ ID NO: 105099 - DNA, 17 bp, Arabidopsis thaliana
gcggttgtggacggtag

SEQ ID NO: 105100 - DNA, 17 bp, Arabidopsis thaliana
gcggttgtgggagtttg

SEQ ID NO: 105101 - DNA, 17 bp, Arabidopsis thaliana
gcggtttaggcgctaga

SEQ ID NO: 105102 - DNA, 17 bp, Arabidopsis thaliana
gcggtttctttgctgct

SEQ ID NO: 105103 - DNA, 17 bp, Arabidopsis thaliana
gcggtttgatccattga

SEQ ID NO: 105104 - DNA, 17 bp, Arabidopsis thaliana
gcggtttgcgagggata

SEQ ID NO: 105105 - DNA, 17 bp, Arabidopsis thaliana
gcggttttactgcgggc

SEQ ID NO: 105106 - DNA, 17 bp, Arabidopsis thaliana
gcggttttagtcatcat

SEQ ID NO: 105107 - DNA, 17 bp, Arabidopsis thaliana
gcggttttgagctcgat

SEQ ID NO: 105108 - DNA, 17 bp, Arabidopsis thaliana
gcggttttgagtgcggt

SEQ ID NO: 105109 - DNA, 17 bp, Arabidopsis thaliana
gcggttttggatgtggt

SEQ ID NO: 105110 - DNA, 17 bp, Arabidopsis thaliana
gcggttttgggtacggt

SEQ ID NO: 105111 - DNA, 17 bp, Arabidopsis thaliana
gcggttttgggtgcggt

SEQ ID NO: 105112 - DNA, 17 bp, Arabidopsis thaliana
gcggtttttatgattgg

SEQ ID NO: 105113 - DNA, 17 bp, Arabidopsis thaliana
gcggtttttatgattgt

SEQ ID NO: 105114 - DNA, 17 bp, Arabidopsis thaliana
gcgtaaagcgtctgtag

SEQ ID NO: 105115 - DNA, 17 bp, Arabidopsis thaliana
gcgtaaagttcgtgtct

SEQ ID NO: 105116 - DNA, 17 bp, Arabidopsis thaliana
gcgtaccatttgcgaac

SEQ ID NO: 105117 - DNA, 17 bp, Arabidopsis thaliana
gcgtacccaagcggtaa

SEQ ID NO: 105118 - DNA, 17 bp, Arabidopsis thaliana
gcgtactattgcacctg

SEQ ID NO: 105119 - DNA, 17 bp, Arabidopsis thaliana
gcgtagaatcctggcaa

SEQ ID NO: 105120 - DNA, 17 bp, Arabidopsis thaliana
gcgtagatctcactctc

SEQ ID NO: 105121 - DNA, 17 bp, Arabidopsis thaliana
gcgtagcgatgaaggcc

SEQ ID NO: 105122 - DNA, 17 bp, Arabidopsis thaliana
gcgtatagttgaaggtg

SEQ ID NO: 105123 - DNA, 17 bp, Arabidopsis thaliana
gcgtatagttgatggtg

SEQ ID NO: 105124 - DNA, 17 bp, Arabidopsis thaliana
gcgtatcgacccgtgca

SEQ ID NO: 105125 - DNA, 17 bp, Arabidopsis thaliana
gcgtatcgcatatctca

SEQ ID NO: 105126 - DNA, 17 bp, Arabidopsis thaliana
gcgtatcgccgaccgaa

SEQ ID NO: 105127 - DNA, 17 bp, Arabidopsis thaliana
gcgtatgtaggtaggtg

SEQ ID NO: 105128 - DNA, 17 bp, Arabidopsis thaliana
gcgtattcagatttgcc

SEQ ID NO: 105129 - DNA, 17 bp, Arabidopsis thaliana
gcgtcactcgaaccggc

SEQ ID NO: 105130 - DNA, 17 bp, Arabidopsis thaliana
gcgtcactcgaatcggc

SEQ ID NO: 105131 - DNA, 17 bp, Arabidopsis thaliana
gcgtcactggtatgatg

SEQ ID NO: 105132 - DNA, 17 bp, Arabidopsis thaliana
gcgtcagatttgggcac

SEQ ID NO: 105133 - DNA, 17 bp, Arabidopsis thaliana
gcgtcagctagcttggt

SEQ ID NO: 105134 - DNA, 17 bp, Arabidopsis thaliana
gcgtcaggcttaaggta

SEQ ID NO: 105135 - DNA, 17 bp, Arabidopsis thaliana
gcgtccagtgaccagtc

SEQ ID NO: 105136 - DNA, 17 bp, Arabidopsis thaliana
gcgtccgggtggctaac

SEQ ID NO: 105137 - DNA, 17 bp, Arabidopsis thaliana
gcgtccgtagtccaacg

SEQ ID NO: 105138 - DNA, 17 bp, Arabidopsis thaliana
gcgtcctaagatccaat

SEQ ID NO: 105139 - DNA, 17 bp, Arabidopsis thaliana
gcgtcctcaccgacgga

SEQ ID NO: 105140 - DNA, 17 bp, Arabidopsis thaliana
gcgtcctcagcgacgga

SEQ ID NO: 105141 - DNA, 17 bp, Arabidopsis thaliana
gcgtcctcagcgacggg

SEQ ID NO: 105142 - DNA, 17 bp, Arabidopsis thaliana
gcgtcctcagcgatgga

SEQ ID NO: 105143 - DNA, 17 bp, Arabidopsis thaliana
gcgtcctcagtgacgga

SEQ ID NO: 105144 - DNA, 17 bp, Arabidopsis thaliana
gcgtccttggattgctg

SEQ ID NO: 105145 - DNA, 17 bp, Arabidopsis thaliana
gcgtcggccagacggat

SEQ ID NO: 105146 - DNA, 17 bp, Arabidopsis thaliana
gcgtcggccgcagcgtt

SEQ ID NO: 105147 - DNA, 17 bp, Arabidopsis thaliana
gcgtcggcctgtggact

SEQ ID NO: 105148 - DNA, 17 bp, Arabidopsis thaliana
gcgtcggcctgtgggcc

SEQ ID NO: 105149 - DNA, 17 bp, Arabidopsis thaliana
gcgtcggcctgtgggct

SEQ ID NO: 105150 - DNA, 17 bp, Arabidopsis thaliana
gcgtcggcctttgggct

SEQ ID NO: 105151 - DNA, 17 bp, Arabidopsis thaliana
gcgtcggggcagaaggt

SEQ ID NO: 105152 - DNA, 17 bp, Arabidopsis thaliana
gcgtcggtagcggccac

SEQ ID NO: 105153 - DNA, 17 bp, Arabidopsis thaliana
gcgtcggtttattgtcc

SEQ ID NO: 105154 - DNA, 17 bp, Arabidopsis thaliana
gcgtcgtgagtttgtta

SEQ ID NO: 105155 - DNA, 17 bp, Arabidopsis thaliana
gcgtcgtgctgctaggc

SEQ ID NO: 105156 - DNA, 17 bp, Arabidopsis thaliana
gcgtcgttgtgcctggg

SEQ ID NO: 105157 - DNA, 17 bp, Arabidopsis thaliana
gcgtctaaaaaatttgg

SEQ ID NO: 105158 - DNA, 17 bp, Arabidopsis thaliana
gcgtctaagcaaatgtt

SEQ ID NO: 105159 - DNA, 17 bp, Arabidopsis thaliana
gcgtctatagtccaacg

SEQ ID NO: 105160 - DNA, 17 bp, Arabidopsis thaliana
gcgtctcaagcgtcact

SEQ ID NO: 105161 - DNA, 17 bp, Arabidopsis thaliana
gcgtctcatcggaaacc

SEQ ID NO: 105162 - DNA, 17 bp, Arabidopsis thaliana
gcgtctccagatggcac

SEQ ID NO: 105163 - DNA, 17 bp, Arabidopsis thaliana
gcgtctctatgggagtc

SEQ ID NO: 105164 - DNA, 17 bp, Arabidopsis thaliana
gcgtctctccgggtgat

SEQ ID NO: 105165 - DNA, 17 bp, Arabidopsis thaliana
gcgtctgaaacagtcca

SEQ ID NO: 105166 - DNA, 17 bp, Arabidopsis thaliana
gcgtctgaatggtaaca

SEQ ID NO: 105167 - DNA, 17 bp, Arabidopsis thaliana
gcgtctgagaaaacgtg

SEQ ID NO: 105168 - DNA, 17 bp, Arabidopsis thaliana
gcgtctgcgttatgtag

SEQ ID NO: 105169 - DNA, 17 bp, Arabidopsis thaliana
gcgtctggctctgttag

SEQ ID NO: 105170 - DNA, 17 bp, Arabidopsis thaliana
gcgtctgtaatccaacg

SEQ ID NO: 105171 - DNA, 17 bp, Arabidopsis thaliana
gcgtctgtagcccaacg

SEQ ID NO: 105172 - DNA, 17 bp, Arabidopsis thaliana
gcgtctgtagctcagtc

SEQ ID NO: 105173 - DNA, 17 bp, Arabidopsis thaliana
gcgtctgtagctcagtg

SEQ ID NO: 105174 - DNA, 17 bp, Arabidopsis thaliana
gcgtctgtaggccaacg

SEQ ID NO: 105175 - DNA, 17 bp, Arabidopsis thaliana
gcgtctgtaggtggctt

SEQ ID NO: 105176 - DNA, 17 bp, Arabidopsis thaliana
gcgtctgtaggtgggtt

SEQ ID NO: 105177 - DNA, 17 bp, Arabidopsis thaliana
gcgtctgtagtcaaacg

SEQ ID NO: 105178 - DNA, 17 bp, Arabidopsis thaliana
gcgtctgtagtcaaccg

SEQ ID NO: 105179 - DNA, 17 bp, Arabidopsis thaliana
gcgtctgtagtcaagcg

SEQ ID NO: 105180 - DNA, 17 bp, Arabidopsis thaliana
gcgtctgtagtccaaca

SEQ ID NO: 105181 - DNA, 17 bp, Arabidopsis thaliana
gcgtctgtagtccaacc

SEQ ID NO: 105182 - DNA, 17 bp, Arabidopsis thaliana
gcgtctgtagtccaacg

SEQ ID NO: 105183 - DNA, 17 bp, Arabidopsis thaliana
gcgtctgtagtccaact

SEQ ID NO: 105184 - DNA, 17 bp, Arabidopsis thaliana
gcgtctgtagtccaaga

SEQ ID NO: 105185 - DNA, 17 bp, Arabidopsis thaliana
gcgtctgtagtccaagg

SEQ ID NO: 105186 - DNA, 17 bp, Arabidopsis thaliana
gcgtctgtagtccaatg

SEQ ID NO: 105187 - DNA, 17 bp, Arabidopsis thaliana
gcgtctgtagtccaccc

SEQ ID NO: 105188 - DNA, 17 bp, Arabidopsis thaliana
gcgtctgtagtccaccg

SEQ ID NO: 105189 - DNA, 17 bp, Arabidopsis thaliana
gcgtctgtagtccagcc

SEQ ID NO: 105190 - DNA, 17 bp, Arabidopsis thaliana
gcgtctgtagtccagcg

SEQ ID NO: 105191 - DNA, 17 bp, Arabidopsis thaliana
gcgtctgtagtccatca

SEQ ID NO: 105192 - DNA, 17 bp, Arabidopsis thaliana
gcgtctgtagtccatcg

SEQ ID NO: 105193 - DNA, 17 bp, Arabidopsis thaliana
gcgtctgtagtccgacg

SEQ ID NO: 105194 - DNA, 17 bp, Arabidopsis thaliana
gcgtctgtagtcgaacg

SEQ ID NO: 105195 - DNA, 17 bp, Arabidopsis thaliana
gcgtctgtagttaatcg

SEQ ID NO: 105196 - DNA, 17 bp, Arabidopsis thaliana
gcgtctgtagttcaacg

SEQ ID NO: 105197 - DNA, 17 bp, Arabidopsis thaliana
gcgtctgtagttcatcg

SEQ ID NO: 105198 - DNA, 17 bp, Arabidopsis thaliana
gcgtctgtattccaacg

SEQ ID NO: 105199 - DNA, 17 bp, Arabidopsis thaliana
gcgtctgtggtccaacc

SEQ ID NO: 105200 - DNA, 17 bp, Arabidopsis thaliana
gcgtcttaggggtttgg

SEQ ID NO: 105201 - DNA, 17 bp, Arabidopsis thaliana
gcgtctttagtccaacg

SEQ ID NO: 105202 - DNA, 17 bp, Arabidopsis thaliana
gcgtgacggctcttggt

SEQ ID NO: 105203 - DNA, 17 bp, Arabidopsis thaliana
gcgtgacgtcgtaagtt

SEQ ID NO: 105204 - DNA, 17 bp, Arabidopsis thaliana
gcgtgaggccggcgtcg

SEQ ID NO: 105205 - DNA, 17 bp, Arabidopsis thaliana
gcgtgatccatggttct

SEQ ID NO: 105206 - DNA, 17 bp, Arabidopsis thaliana
gcgtgcaaagcttaatt

SEQ ID NO: 105207 - DNA, 17 bp, Arabidopsis thaliana
gcgtgcaaaggtttcct

SEQ ID NO: 105208 - DNA, 17 bp, Arabidopsis thaliana
gcgtgcaaaggtttttg

SEQ ID NO: 105209 - DNA, 17 bp, Arabidopsis thaliana
gcgtgccggccggcgga

SEQ ID NO: 105210 - DNA, 17 bp, Arabidopsis thaliana
gcgtgccggccggcggg

SEQ ID NO: 105211 - DNA, 17 bp, Arabidopsis thaliana
gcgtgccggccggggga

SEQ ID NO: 105212 - DNA, 17 bp, Arabidopsis thaliana
gcgtgccggccgggggg

SEQ ID NO: 105213 - DNA, 17 bp, Arabidopsis thaliana
gcgtgcgcctaacggcg

SEQ ID NO: 105214 - DNA, 17 bp, Arabidopsis thaliana
gcgtgcgtgggactggc

SEQ ID NO: 105215 - DNA, 17 bp, Arabidopsis thaliana
gcgtgctccgggcgtcc

SEQ ID NO: 105216 - DNA, 17 bp, Arabidopsis thaliana
gcgtgctccgggcgtcg

SEQ ID NO: 105217 - DNA, 17 bp, Arabidopsis thaliana
gcgtgctcggggcgtcg

SEQ ID NO: 105218 - DNA, 17 bp, Arabidopsis thaliana
gcgtggaccgacgcgga

SEQ ID NO: 105219 - DNA, 17 bp, Arabidopsis thaliana
gcgtggaccgacgcggt

SEQ ID NO: 105220 - DNA, 17 bp, Arabidopsis thaliana
gcgtggaccgactcgga

SEQ ID NO: 105221 - DNA, 17 bp, Arabidopsis thaliana
gcgtggaggttcgagtc

SEQ ID NO: 105222 - DNA, 17 bp, Arabidopsis thaliana
gcgtgggttcatcccac

SEQ ID NO: 105223 - DNA, 17 bp, Arabidopsis thaliana
gcgtggtgtccggtggg

SEQ ID NO: 105224 - DNA, 17 bp, Arabidopsis thaliana
gcgtgtggatgggtggg

SEQ ID NO: 105225 - DNA, 17 bp, Arabidopsis thaliana
gcgtgtgggcccataac

SEQ ID NO: 105226 - DNA, 17 bp, Arabidopsis thaliana
gcgttaagtatcccgcc

SEQ ID NO: 105227 - DNA, 17 bp, Arabidopsis thaliana
gcgttaatggacatgtg

SEQ ID NO: 105228 - DNA, 17 bp, Arabidopsis thaliana
gcgttacagctgtcgtg

SEQ ID NO: 105229 - DNA, 17 bp, Arabidopsis thaliana
gcgttactcaaatcggc

SEQ ID NO: 105230 - DNA, 17 bp, Arabidopsis thaliana
gcgttagtttgcgaaga

SEQ ID NO: 105231 - DNA, 17 bp, Arabidopsis thaliana
gcgttatccggaatgaa

SEQ ID NO: 105232 - DNA, 17 bp, Arabidopsis thaliana
gcgttcatcgatgaagt

SEQ ID NO: 105233 - DNA, 17 bp, Arabidopsis thaliana
gcgttccagtgtattat

SEQ ID NO: 105234 - DNA, 17 bp, Arabidopsis thaliana
gcgttcgaattgtagtc

SEQ ID NO: 105235 - DNA, 17 bp, Arabidopsis thaliana
gcgttctcgaagcggtg

SEQ ID NO: 105236 - DNA, 17 bp, Arabidopsis thaliana
gcgttctctccaacggc

SEQ ID NO: 105237 - DNA, 17 bp, Arabidopsis thaliana
gcgttctgctgtcctac

SEQ ID NO: 105238 - DNA, 17 bp, Arabidopsis thaliana
gcgttgactacgtccct

SEQ ID NO: 105239 - DNA, 17 bp, Arabidopsis thaliana
gcgttgaggcgcagcag

SEQ ID NO: 105240 - DNA, 17 bp, Arabidopsis thaliana
gcgttggacacgggccg

SEQ ID NO: 105241 - DNA, 17 bp, Arabidopsis thaliana
gcgttggcctcacatca

SEQ ID NO: 105242 - DNA, 17 bp, Arabidopsis thaliana
gcgttgggtgcggtcta

SEQ ID NO: 105243 - DNA, 17 bp, Arabidopsis thaliana
gcgttgtaactgaggcg

SEQ ID NO: 105244 - DNA, 17 bp, Arabidopsis thaliana
gcgtttaaaccagtcag

SEQ ID NO: 105245 - DNA, 17 bp, Arabidopsis thaliana
gcgtttactgtaccgca

SEQ ID NO: 105246 - DNA, 17 bp, Arabidopsis thaliana
gcgtttactgtaccgcg

SEQ ID NO: 105247 - DNA, 17 bp, Arabidopsis thaliana
gcgtttctaacaaccat

SEQ ID NO: 105248 - DNA, 17 bp, Arabidopsis thaliana
gcgtttctaccggagct

SEQ ID NO: 105249 - DNA, 17 bp, Arabidopsis thaliana
gcgtttctaccggggtt

SEQ ID NO: 105250 - DNA, 17 bp, Arabidopsis thaliana
gcgtttcttggcctcgt

SEQ ID NO: 105251 - DNA, 17 bp, Arabidopsis thaliana
gcgtttgaggccgtgaa

SEQ ID NO: 105252 - DNA, 17 bp, Arabidopsis thaliana
gcgtttgataatgggtg

SEQ ID NO: 105253 - DNA, 17 bp, Arabidopsis thaliana
gcgtttgatggtgtaaa

SEQ ID NO: 105254 - DNA, 17 bp, Arabidopsis thaliana
gcgtttgcatgtcgctg

SEQ ID NO: 105255 - DNA, 17 bp, Arabidopsis thaliana
gcgtttgccaaggatgt

SEQ ID NO: 105256 - DNA, 17 bp, Arabidopsis thaliana
gcgtttgcggaggtgac

SEQ ID NO: 105257 - DNA, 17 bp, Arabidopsis thaliana
gcgtttgcgggtggtag

SEQ ID NO: 105258 - DNA, 17 bp, Arabidopsis thaliana
gcgtttgcggttacggg

SEQ ID NO: 105259 - DNA, 17 bp, Arabidopsis thaliana
gcgtttgcggttgcggg

SEQ ID NO: 105260 - DNA, 17 bp, Arabidopsis thaliana
gcgtttgcggttggtag

SEQ ID NO: 105261 - DNA, 17 bp, Arabidopsis thaliana
gcgtttgggttgctggc

SEQ ID NO: 105262 - DNA, 17 bp, Arabidopsis thaliana
gcgtttggtaatgggtg

SEQ ID NO: 105263 - DNA, 17 bp, Arabidopsis thaliana
gcgtttggttatgggtg

SEQ ID NO: 105264 - DNA, 17 bp, Arabidopsis thaliana
gcgtttggttgacagaa

SEQ ID NO: 105265 - DNA, 17 bp, Arabidopsis thaliana
gcgtttgtagtccaacg

SEQ ID NO: 105266 - DNA, 17 bp, Arabidopsis thaliana
gcgtttgtagtccatcg

SEQ ID NO: 105267 - DNA, 17 bp, Arabidopsis thaliana
gcgtttgtcctccacat

SEQ ID NO: 105268 - DNA, 17 bp, Arabidopsis thaliana
gcgtttgttatcagttt

SEQ ID NO: 105269 - DNA, 17 bp, Arabidopsis thaliana
gcgtttgttccggcttt

SEQ ID NO: 105270 - DNA, 17 bp, Arabidopsis thaliana
gcgttttaatcaaccgg

SEQ ID NO: 105271 - DNA, 17 bp, Arabidopsis thaliana
gcgttttattcagatgg

SEQ ID NO: 105272 - DNA, 17 bp, Arabidopsis thaliana
gcgttttcgtagattgt

SEQ ID NO: 105273 - DNA, 17 bp, Arabidopsis thaliana
gcgttttcgtgatttgg

SEQ ID NO: 105274 - DNA, 17 bp, Arabidopsis thaliana
gcgttttgatccttcga

SEQ ID NO: 105275 - DNA, 17 bp, Arabidopsis thaliana
gcgttttggtatcagag

SEQ ID NO: 105276 - DNA, 17 bp, Arabidopsis thaliana
gcgtttttactgaggtt

SEQ ID NO: 105277 - DNA, 17 bp, Arabidopsis thaliana
gcgtttttggcgggaaa

SEQ ID NO: 105278 - DNA, 17 bp, Arabidopsis thaliana
gctaaaaacggctccat

SEQ ID NO: 105279 - DNA, 17 bp, Arabidopsis thaliana
gctaaaaatactatgcg

SEQ ID NO: 105280 - DNA, 17 bp, Arabidopsis thaliana
gctaaaacgtggttggc

SEQ ID NO: 105281 - DNA, 17 bp, Arabidopsis thaliana
gctaaaacttttgatgg

SEQ ID NO: 105282 - DNA, 17 bp, Arabidopsis thaliana
gctaaaagagtcggagc

SEQ ID NO: 105283 - DNA, 17 bp, Arabidopsis thaliana
gctaaaagattgcaaag

SEQ ID NO: 105284 - DNA, 17 bp, Arabidopsis thaliana
gctaaaatccaggtggt

SEQ ID NO: 105285 - DNA, 17 bp, Arabidopsis thaliana
gctaaaatgtctgtgca

SEQ ID NO: 105286 - DNA, 17 bp, Arabidopsis thaliana
gctaaacatcccgtccc

SEQ ID NO: 105287 - DNA, 17 bp, Arabidopsis thaliana
gctaaactgagacaaaa

SEQ ID NO: 105288 - DNA, 17 bp, Arabidopsis thaliana
gctaaagatctgtcttc

SEQ ID NO: 105289 - DNA, 17 bp, Arabidopsis thaliana
gctaaagattggggggc

SEQ ID NO: 105290 - DNA, 17 bp, Arabidopsis thaliana
gctaaaggccctacatc

SEQ ID NO: 105291 - DNA, 17 bp, Arabidopsis thaliana
gctaaaggctcagatcc

SEQ ID NO: 105292 - DNA, 17 bp, Arabidopsis thaliana
gctaaaggtaagtccca

SEQ ID NO: 105293 - DNA, 17 bp, Arabidopsis thaliana
gctaaagttggtgaaac

SEQ ID NO: 105294 - DNA, 17 bp, Arabidopsis thaliana
gctaaagtttcaggagg

SEQ ID NO: 105295 - DNA, 17 bp, Arabidopsis thaliana
gctaaatacgggcgaga

SEQ ID NO: 105296 - DNA, 17 bp, Arabidopsis thaliana
gctaaatactcctgggt

SEQ ID NO: 105297 - DNA, 17 bp, Arabidopsis thaliana
gctaacaaccgccacca

SEQ ID NO: 105298 - DNA, 17 bp, Arabidopsis thaliana
gctaacacctgttatcg

SEQ ID NO: 105299 - DNA, 17 bp, Arabidopsis thaliana
gctaacatttggggtac

SEQ ID NO: 105300 - DNA, 17 bp, Arabidopsis thaliana
gctaaccaagttgttgt

SEQ ID NO: 105301 - DNA, 17 bp, Arabidopsis thaliana
gctaacccgtccgcaag

SEQ ID NO: 105302 - DNA, 17 bp, Arabidopsis thaliana
gctaacccgtcggctca

SEQ ID NO: 105303 - DNA, 17 bp, Arabidopsis thaliana
gctaacgaaatgtgatt

SEQ ID NO: 105304 - DNA, 17 bp, Arabidopsis thaliana
gctaacgacacttgatt

SEQ ID NO: 105305 - DNA, 17 bp, Arabidopsis thaliana
gctaacgacacttggtc

SEQ ID NO: 105306 - DNA, 17 bp, Arabidopsis thaliana
gctaacgactaatgctg

SEQ ID NO: 105307 - DNA, 17 bp, Arabidopsis thaliana
gctaacgactattgctg

SEQ ID NO: 105308 - DNA, 17 bp, Arabidopsis thaliana
gctaacgatcaaatgac

SEQ ID NO: 105309 - DNA, 17 bp, Arabidopsis thaliana
gctaacgcaatgtgatt

SEQ ID NO: 105310 - DNA, 17 bp, Arabidopsis thaliana
gctaacgcctgttatcg

SEQ ID NO: 105311 - DNA, 17 bp, Arabidopsis thaliana
gctaacggaaacactaa

SEQ ID NO: 105312 - DNA, 17 bp, Arabidopsis thaliana
gctaacgtcgcagggtt

SEQ ID NO: 105313 - DNA, 17 bp, Arabidopsis thaliana
gctaactaagtggtgac

SEQ ID NO: 105314 - DNA, 17 bp, Arabidopsis thaliana
gctaactacgagctgag

SEQ ID NO: 105315 - DNA, 17 bp, Arabidopsis thaliana
gctaactactgatgact

SEQ ID NO: 105316 - DNA, 17 bp, Arabidopsis thaliana
gctaactagctacgtag

SEQ ID NO: 105317 - DNA, 17 bp, Arabidopsis thaliana
gctaactaggatatgat

SEQ ID NO: 105318 - DNA, 17 bp, Arabidopsis thaliana
gctaactcaaaggattg

SEQ ID NO: 105319 - DNA, 17 bp, Arabidopsis thaliana
gctaactcacctttgta

SEQ ID NO: 105320 - DNA, 17 bp, Arabidopsis thaliana
gctaactcaggtgatcg

SEQ ID NO: 105321 - DNA, 17 bp, Arabidopsis thaliana
gctaactcatacgatcg

SEQ ID NO: 105322 - DNA, 17 bp, Arabidopsis thaliana
gctaactcataggatcg

SEQ ID NO: 105323 - DNA, 17 bp, Arabidopsis thaliana
gctaactcataggattg

SEQ ID NO: 105324 - DNA, 17 bp, Arabidopsis thaliana
gctaactctctccttct

SEQ ID NO: 105325 - DNA, 17 bp, Arabidopsis thaliana
gctaactgggagatgtt

SEQ ID NO: 105326 - DNA, 17 bp, Arabidopsis thaliana
gctaactgtggccctga

SEQ ID NO: 105327 - DNA, 17 bp, Arabidopsis thaliana
gctaactgtgtgttttc

SEQ ID NO: 105328 - DNA, 17 bp, Arabidopsis thaliana
gctaacttctatctatg

SEQ ID NO: 105329 - DNA, 17 bp, Arabidopsis thaliana
gctaacttgtggtcatt

SEQ ID NO: 105330 - DNA, 17 bp, Arabidopsis thaliana
gctaactttcgttgact

SEQ ID NO: 105331 - DNA, 17 bp, Arabidopsis thaliana
gctaactttctccagtt

SEQ ID NO: 105332 - DNA, 17 bp, Arabidopsis thaliana
gctaactttctccatat

SEQ ID NO: 105333 - DNA, 17 bp, Arabidopsis thaliana
gctaactttgtcaaagc

SEQ ID NO: 105334 - DNA, 17 bp, Arabidopsis thaliana
gctaacttttctttttt

SEQ ID NO: 105335 - DNA, 17 bp, Arabidopsis thaliana
gctaagaaagtggtgga

SEQ ID NO: 105336 - DNA, 17 bp, Arabidopsis thaliana
gctaagaacagtctgcc

SEQ ID NO: 105337 - DNA, 17 bp, Arabidopsis thaliana
gctaagaatgtctttgg

SEQ ID NO: 105338 - DNA, 17 bp, Arabidopsis thaliana
gctaagagtttgggtgg

SEQ ID NO: 105339 - DNA, 17 bp, Arabidopsis thaliana
gctaagatcgctggttt

SEQ ID NO: 105340 - DNA, 17 bp, Arabidopsis thaliana
gctaagattctgctcgt

SEQ ID NO: 105341 - DNA, 17 bp, Arabidopsis thaliana
gctaagcaagctgcgca

SEQ ID NO: 105342 - DNA, 17 bp, Arabidopsis thaliana
gctaagcaggcgttcga

SEQ ID NO: 105343 - DNA, 17 bp, Arabidopsis thaliana
gctaagcaggctctgtt

SEQ ID NO: 105344 - DNA, 17 bp, Arabidopsis thaliana
gctaagcagttttttgt

SEQ ID NO: 105345 - DNA, 17 bp, Arabidopsis thaliana
gctaagcattgggtgca

SEQ ID NO: 105346 - DNA, 17 bp, Arabidopsis thaliana
gctaagccatctgccga

SEQ ID NO: 105347 - DNA, 17 bp, Arabidopsis thaliana
gctaagcgaacggtgat

SEQ ID NO: 105348 - DNA, 17 bp, Arabidopsis thaliana
gctaagcggctgcatag

SEQ ID NO: 105349 - DNA, 17 bp, Arabidopsis thaliana
gctaagctggattcggt

SEQ ID NO: 105350 - DNA, 17 bp, Arabidopsis thaliana
gctaaggaaagggtggt

SEQ ID NO: 105351 - DNA, 17 bp, Arabidopsis thaliana
gctaaggacacgtgttt

SEQ ID NO: 105352 - DNA, 17 bp, Arabidopsis thaliana
gctaaggacgattttgg

SEQ ID NO: 105353 - DNA, 17 bp, Arabidopsis thaliana
gctaaggagtgtgtaac

SEQ ID NO: 105354 - DNA, 17 bp, Arabidopsis thaliana
gctaaggcgagtttttc

SEQ ID NO: 105355 - DNA, 17 bp, Arabidopsis thaliana
gctaaggcggggtgttt

SEQ ID NO: 105356 - DNA, 17 bp, Arabidopsis thaliana
gctaaggctgagggttc

SEQ ID NO: 105357 - DNA, 17 bp, Arabidopsis thaliana
gctaaggtacaaggttg

SEQ ID NO: 105358 - DNA, 17 bp, Arabidopsis thaliana
gctaaggtttgctcgtg

SEQ ID NO: 105359 - DNA, 17 bp, Arabidopsis thaliana
gctaagtcagctaccta

SEQ ID NO: 105360 - DNA, 17 bp, Arabidopsis thaliana
gctaagtccatcatatc

SEQ ID NO: 105361 - DNA, 17 bp, Arabidopsis thaliana
gctaagtccgttcggcg

SEQ ID NO: 105362 - DNA, 17 bp, Arabidopsis thaliana
gctaagtctccaaggtt

SEQ ID NO: 105363 - DNA, 17 bp, Arabidopsis thaliana
gctaagtgactacatcg

SEQ ID NO: 105364 - DNA, 17 bp, Arabidopsis thaliana
gctaagtggaggatatt

SEQ ID NO: 105365 - DNA, 17 bp, Arabidopsis thaliana
gctaagttgtccttggc

SEQ ID NO: 105366 - DNA, 17 bp, Arabidopsis thaliana
gctaagttgttccagtt

SEQ ID NO: 105367 - DNA, 17 bp, Arabidopsis thaliana
gctaagttgttcgtttg

SEQ ID NO: 105368 - DNA, 17 bp, Arabidopsis thaliana
gctaagtttggccgcat

SEQ ID NO: 105369 - DNA, 17 bp, Arabidopsis thaliana
gctaatacggtcagccc

SEQ ID NO: 105370 - DNA, 17 bp, Arabidopsis thaliana
gctaatccatcagcaag

SEQ ID NO: 105371 - DNA, 17 bp, Arabidopsis thaliana
gctaatccattcactat

SEQ ID NO: 105372 - DNA, 17 bp, Arabidopsis thaliana
gctaatccatttgtcag

SEQ ID NO: 105373 - DNA, 17 bp, Arabidopsis thaliana
gctaatccgggtctgca

SEQ ID NO: 105374 - DNA, 17 bp, Arabidopsis thaliana
gctaatcctgaggaatg

SEQ ID NO: 105375 - DNA, 17 bp, Arabidopsis thaliana
gctaatcgtcttggttg

SEQ ID NO: 105376 - DNA, 17 bp, Arabidopsis thaliana
gctaatctattagttac

SEQ ID NO: 105377 - DNA, 17 bp, Arabidopsis thaliana
gctaatctcgatttgcc

SEQ ID NO: 105378 - DNA, 17 bp, Arabidopsis thaliana
gctaatgacctaaatgc

SEQ ID NO: 105379 - DNA, 17 bp, Arabidopsis thaliana
gctaatgcagccggtct

SEQ ID NO: 105380 - DNA, 17 bp, Arabidopsis thaliana
gctaatggtgtggtggc

SEQ ID NO: 105381 - DNA, 17 bp, Arabidopsis thaliana
gctaattcataggatcg

SEQ ID NO: 105382 - DNA, 17 bp, Arabidopsis thaliana
gctaatttttgtcgctg

SEQ ID NO: 105383 - DNA, 17 bp, Arabidopsis thaliana
gctacaagcgacgcatg

SEQ ID NO: 105384 - DNA, 17 bp, Arabidopsis thaliana
gctacaatcagcacgga

SEQ ID NO: 105385 - DNA, 17 bp, Arabidopsis thaliana
gctacaatgatgtcaag

SEQ ID NO: 105386 - DNA, 17 bp, Arabidopsis thaliana
gctacaatggccgggac

SEQ ID NO: 105387 - DNA, 17 bp, Arabidopsis thaliana
gctacacgattttgaca

SEQ ID NO: 105388 - DNA, 17 bp, Arabidopsis thaliana
gctacagaaagtttgta

SEQ ID NO: 105389 - DNA, 17 bp, Arabidopsis thaliana
gctacagagggtgggcg

SEQ ID NO: 105390 - DNA, 17 bp, Arabidopsis thaliana
gctacagcagacgggga

SEQ ID NO: 105391 - DNA, 17 bp, Arabidopsis thaliana
gctacaggcgacattcc

SEQ ID NO: 105392 - DNA, 17 bp, Arabidopsis thaliana
gctacaggttgcgggtg

SEQ ID NO: 105393 - DNA, 17 bp, Arabidopsis thaliana
gctacatacgattggcg

SEQ ID NO: 105394 - DNA, 17 bp, Arabidopsis thaliana
gctacatcttggttgtc

SEQ ID NO: 105395 - DNA, 17 bp, Arabidopsis thaliana
gctacatgctgtggttt

SEQ ID NO: 105396 - DNA, 17 bp, Arabidopsis thaliana
gctacatggctaagtcc

SEQ ID NO: 105397 - DNA, 17 bp, Arabidopsis thaliana
gctacatgggttagtcg

SEQ ID NO: 105398 - DNA, 17 bp, Arabidopsis thaliana
gctacatggtcaacggg

SEQ ID NO: 105399 - DNA, 17 bp, Arabidopsis thaliana
gctacattctggagaat

SEQ ID NO: 105400 - DNA, 17 bp, Arabidopsis thaliana
gctacatttttcgtctc

SEQ ID NO: 105401 - DNA, 17 bp, Arabidopsis thaliana
gctaccacatccaagga

SEQ ID NO: 105402 - DNA, 17 bp, Arabidopsis thaliana
gctaccaccagttgcaa

SEQ ID NO: 105403 - DNA, 17 bp, Arabidopsis thaliana
gctaccactacagggag

SEQ ID NO: 105404 - DNA, 17 bp, Arabidopsis thaliana
gctaccactgcagggag

SEQ ID NO: 105405 - DNA, 17 bp, Arabidopsis thaliana
gctaccattggcattta

SEQ ID NO: 105406 - DNA, 17 bp, Arabidopsis thaliana
gctaccccaggtcaggc

SEQ ID NO: 105407 - DNA, 17 bp, Arabidopsis thaliana
gctaccgacgacacgat

SEQ ID NO: 105408 - DNA, 17 bp, Arabidopsis thaliana
gctaccgagcgctggat

SEQ ID NO: 105409 - DNA, 17 bp, Arabidopsis thaliana
gctaccgctgtcttctt

SEQ ID NO: 105410 - DNA, 17 bp, Arabidopsis thaliana
gctaccggaagactagg

SEQ ID NO: 105411 - DNA, 17 bp, Arabidopsis thaliana
gctaccgtacgctggat

SEQ ID NO: 105412 - DNA, 17 bp, Arabidopsis thaliana
gctaccgtccgctggat

SEQ ID NO: 105413 - DNA, 17 bp, Arabidopsis thaliana
gctaccgtgcgctggat

SEQ ID NO: 105414 - DNA, 17 bp, Arabidopsis thaliana
gctaccgtgcgctggct

SEQ ID NO: 105415 - DNA, 17 bp, Arabidopsis thaliana
gctaccgtgcgggggat

SEQ ID NO: 105416 - DNA, 17 bp, Arabidopsis thaliana
gctaccgtgcgttggat

SEQ ID NO: 105417 - DNA, 17 bp, Arabidopsis thaliana
gctaccgtgtgctggat

SEQ ID NO: 105418 - DNA, 17 bp, Arabidopsis thaliana
gctacctattggaggcc

SEQ ID NO: 105419 - DNA, 17 bp, Arabidopsis thaliana
gctacctattggaggtc

SEQ ID NO: 105420 - DNA, 17 bp, Arabidopsis thaliana
gctaccttagctcagtt

SEQ ID NO: 105421 - DNA, 17 bp, Arabidopsis thaliana
gctaccttgtgcttaac

SEQ ID NO: 105422 - DNA, 17 bp, Arabidopsis thaliana
gctacgaatttgcgaga

SEQ ID NO: 105423 - DNA, 17 bp, Arabidopsis thaliana
gctacgacccaactcat

SEQ ID NO: 105424 - DNA, 17 bp, Arabidopsis thaliana
gctacgagaacggatta

SEQ ID NO: 105425 - DNA, 17 bp, Arabidopsis thaliana
gctacgaggcgacggtt

SEQ ID NO: 105426 - DNA, 17 bp, Arabidopsis thaliana
gctacgaggtggatagt

SEQ ID NO: 105427 - DNA, 17 bp, Arabidopsis thaliana
gctacgatgtcagcgcc

SEQ ID NO: 105428 - DNA, 17 bp, Arabidopsis thaliana
gctacgcaatgtgattg

SEQ ID NO: 105429 - DNA, 17 bp, Arabidopsis thaliana
gctacgcaatgtgattt

SEQ ID NO: 105430 - DNA, 17 bp, Arabidopsis thaliana
gctacgccgcttttgct

SEQ ID NO: 105431 - DNA, 17 bp, Arabidopsis thaliana
gctacgcggattacggt

SEQ ID NO: 105432 - DNA, 17 bp, Arabidopsis thaliana
gctacgcgggagtttgt

SEQ ID NO: 105433 - DNA, 17 bp, Arabidopsis thaliana
gctacgctccggtattt

SEQ ID NO: 105434 - DNA, 17 bp, Arabidopsis thaliana
gctacgctgcggtattt

SEQ ID NO: 105435 - DNA, 17 bp, Arabidopsis thaliana
gctacggatttggaggg

SEQ ID NO: 105436 - DNA, 17 bp, Arabidopsis thaliana
gctacggatttggcagg

SEQ ID NO: 105437 - DNA, 17 bp, Arabidopsis thaliana
gctacggcgctgaagta

SEQ ID NO: 105438 - DNA, 17 bp, Arabidopsis thaliana
gctacggctccaacgac

SEQ ID NO: 105439 - DNA, 17 bp, Arabidopsis thaliana
gctacgggagactgcgg

SEQ ID NO: 105440 - DNA, 17 bp, Arabidopsis thaliana
gctacgggtttggcagg

SEQ ID NO: 105441 - DNA, 17 bp, Arabidopsis thaliana
gctacgtcttggttgtc

SEQ ID NO: 105442 - DNA, 17 bp, Arabidopsis thaliana
gctacgttcattctttc

SEQ ID NO: 105443 - DNA, 17 bp, Arabidopsis thaliana
gctacgttctggttatc

SEQ ID NO: 105444 - DNA, 17 bp, Arabidopsis thaliana
gctactaatcggccgct

SEQ ID NO: 105445 - DNA, 17 bp, Arabidopsis thaliana
gctactacttgtgttgc

SEQ ID NO: 105446 - DNA, 17 bp, Arabidopsis thaliana
gctactagatggttcga

SEQ ID NO: 105447 - DNA, 17 bp, Arabidopsis thaliana
gctactagctagtgcgg

SEQ ID NO: 105448 - DNA, 17 bp, Arabidopsis thaliana
gctactaggatgggtga

SEQ ID NO: 105449 - DNA, 17 bp, Arabidopsis thaliana
gctactatcaccaagat

SEQ ID NO: 105450 - DNA, 17 bp, Arabidopsis thaliana
gctactcgaccgtcgat

SEQ ID NO: 105451 - DNA, 17 bp, Arabidopsis thaliana
gctactctgtgtctctt

SEQ ID NO: 105452 - DNA, 17 bp, Arabidopsis thaliana
gctactcttggaggcgg

SEQ ID NO: 105453 - DNA, 17 bp, Arabidopsis thaliana
gctactgatttgatttt

SEQ ID NO: 105454 - DNA, 17 bp, Arabidopsis thaliana
gctactgcactcttcat

SEQ ID NO: 105455 - DNA, 17 bp, Arabidopsis thaliana
gctactgcgggtacatg

SEQ ID NO: 105456 - DNA, 17 bp, Arabidopsis thaliana
gctactggcgagccgaa

SEQ ID NO: 105457 - DNA, 17 bp, Arabidopsis thaliana
gctactggtgttgggat

SEQ ID NO: 105458 - DNA, 17 bp, Arabidopsis thaliana
gctactggttcaggaga

SEQ ID NO: 105459 - DNA, 17 bp, Arabidopsis thaliana
gctactggtttcagcga

SEQ ID NO: 105460 - DNA, 17 bp, Arabidopsis thaliana
gctactgtcagccattg

SEQ ID NO: 105461 - DNA, 17 bp, Arabidopsis thaliana
gctactgtctggaccac

SEQ ID NO: 105462 - DNA, 17 bp, Arabidopsis thaliana
gctactgtctgtaccac

SEQ ID NO: 105463 - DNA, 17 bp, Arabidopsis thaliana
gctacttattaccaacg

SEQ ID NO: 105464 - DNA, 17 bp, Arabidopsis thaliana
gctacttcttggttgtc

SEQ ID NO: 105465 - DNA, 17 bp, Arabidopsis thaliana
gctacttggataggtct

SEQ ID NO: 105466 - DNA, 17 bp, Arabidopsis thaliana
gctacttgtatcattct

SEQ ID NO: 105467 - DNA, 17 bp, Arabidopsis thaliana
gctacttgtcggcacca

SEQ ID NO: 105468 - DNA, 17 bp, Arabidopsis thaliana
gctactttaggtggatt

SEQ ID NO: 105469 - DNA, 17 bp, Arabidopsis thaliana
gctactttcagcgctcg

SEQ ID NO: 105470 - DNA, 17 bp, Arabidopsis thaliana
gctactttcgcaacttg

SEQ ID NO: 105471 - DNA, 17 bp, Arabidopsis thaliana
gctactttgctttagtt

SEQ ID NO: 105472 - DNA, 17 bp, Arabidopsis thaliana
gctactttgtgactgat

SEQ ID NO: 105473 - DNA, 17 bp, Arabidopsis thaliana
gctactttgtggacgga

SEQ ID NO: 105474 - DNA, 17 bp, Arabidopsis thaliana
gctacttttgatcgctg

SEQ ID NO: 105475 - DNA, 17 bp, Arabidopsis thaliana
gctacttttggtcgttg

SEQ ID NO: 105476 - DNA, 17 bp, Arabidopsis thaliana
gctagaaccctcttcag

SEQ ID NO: 105477 - DNA, 17 bp, Arabidopsis thaliana
gctagaaccgacgcatg

SEQ ID NO: 105478 - DNA, 17 bp, Arabidopsis thaliana
gctagaaccgcttgatc

SEQ ID NO: 105479 - DNA, 17 bp, Arabidopsis thaliana
gctagaagcagggcacg

SEQ ID NO: 105480 - DNA, 17 bp, Arabidopsis thaliana
gctagaagcgacgcatg

SEQ ID NO: 105481 - DNA, 17 bp, Arabidopsis thaliana
gctagacggttagccgt

SEQ ID NO: 105482 - DNA, 17 bp, Arabidopsis thaliana
gctagacggttagcctt

SEQ ID NO: 105483 - DNA, 17 bp, Arabidopsis thaliana
gctagactctgaactgt

SEQ ID NO: 105484 - DNA, 17 bp, Arabidopsis thaliana
gctagagcgacgattgt

SEQ ID NO: 105485 - DNA, 17 bp, Arabidopsis thaliana
gctagaggcacggggtt

SEQ ID NO: 105486 - DNA, 17 bp, Arabidopsis thaliana
gctagagggtcctatta

SEQ ID NO: 105487 - DNA, 17 bp, Arabidopsis thaliana
gctagaggtgtcagaaa

SEQ ID NO: 105488 - DNA, 17 bp, Arabidopsis thaliana
gctagataccgctttgg

SEQ ID NO: 105489 - DNA, 17 bp, Arabidopsis thaliana
gctagataccgttttgg

SEQ ID NO: 105490 - DNA, 17 bp, Arabidopsis thaliana
gctagatagagcccaaa

SEQ ID NO: 105491 - DNA, 17 bp, Arabidopsis thaliana
gctagatcaactttggt

SEQ ID NO: 105492 - DNA, 17 bp, Arabidopsis thaliana
gctagatccaaaatccg

SEQ ID NO: 105493 - DNA, 17 bp, Arabidopsis thaliana
gctagatcgtggtgttt

SEQ ID NO: 105494 - DNA, 17 bp, Arabidopsis thaliana
gctagatctgcaggttt

SEQ ID NO: 105495 - DNA, 17 bp, Arabidopsis thaliana
gctagatgggtgcgggc

SEQ ID NO: 105496 - DNA, 17 bp, Arabidopsis thaliana
gctagatgtatcagagc

SEQ ID NO: 105497 - DNA, 17 bp, Arabidopsis thaliana
gctagattctcaaatgt

SEQ ID NO: 105498 - DNA, 17 bp, Arabidopsis thaliana
gctagatttctccatgg

SEQ ID NO: 105499 - DNA, 17 bp, Arabidopsis thaliana
gctagattttgacccgc

SEQ ID NO: 105500 - DNA, 17 bp, Arabidopsis thaliana
gctagattttgatccgc

SEQ ID NO: 105501 - DNA, 17 bp, Arabidopsis thaliana
gctagcacgacttagtt

SEQ ID NO: 105502 - DNA, 17 bp, Arabidopsis thaliana
gctagcagacggtcaat

SEQ ID NO: 105503 - DNA, 17 bp, Arabidopsis thaliana
gctagcagatatggtgt

SEQ ID NO: 105504 - DNA, 17 bp, Arabidopsis thaliana
gctagcagtgtctaatg

SEQ ID NO: 105505 - DNA, 17 bp, Arabidopsis thaliana
gctagcatttgcagtgg

SEQ ID NO: 105506 - DNA, 17 bp, Arabidopsis thaliana
gctagccaaagctcact

SEQ ID NO: 105507 - DNA, 17 bp, Arabidopsis thaliana
gctagcgagtgtaggaa

SEQ ID NO: 105508 - DNA, 17 bp, Arabidopsis thaliana
gctaggaacagggtgtt

SEQ ID NO: 105509 - DNA, 17 bp, Arabidopsis thaliana
gctaggaggatgtgaga

SEQ ID NO: 105510 - DNA, 17 bp, Arabidopsis thaliana
gctaggatgagtccatg

SEQ ID NO: 105511 - DNA, 17 bp, Arabidopsis thaliana
gctaggatgggtgacct

SEQ ID NO: 105512 - DNA, 17 bp, Arabidopsis thaliana
gctaggccctttggcaa

SEQ ID NO: 105513 - DNA, 17 bp, Arabidopsis thaliana
gctaggcgaagcggtgg

SEQ ID NO: 105514 - DNA, 17 bp, Arabidopsis thaliana
gctaggcgaggagatgg

SEQ ID NO: 105515 - DNA, 17 bp, Arabidopsis thaliana
gctaggctccctagccc

SEQ ID NO: 105516 - DNA, 17 bp, Arabidopsis thaliana
gctagggcacgtctgcc

SEQ ID NO: 105517 - DNA, 17 bp, Arabidopsis thaliana
gctaggggtgaaaggcc

SEQ ID NO: 105518 - DNA, 17 bp, Arabidopsis thaliana
gctaggtatcatgggaa

SEQ ID NO: 105519 - DNA, 17 bp, Arabidopsis thaliana
gctaggtgcaacgtttt

SEQ ID NO: 105520 - DNA, 17 bp, Arabidopsis thaliana
gctaggtgccacctgct

SEQ ID NO: 105521 - DNA, 17 bp, Arabidopsis thaliana
gctaggtgttaggggtt

SEQ ID NO: 105522 - DNA, 17 bp, Arabidopsis thaliana
gctaggttcaaggatcg

SEQ ID NO: 105523 - DNA, 17 bp, Arabidopsis thaliana
gctagtcctgggttgac

SEQ ID NO: 105524 - DNA, 17 bp, Arabidopsis thaliana
gctagtcgctgttgctg

SEQ ID NO: 105525 - DNA, 17 bp, Arabidopsis thaliana
gctagtcgttgcttttg

SEQ ID NO: 105526 - DNA, 17 bp, Arabidopsis thaliana
gctagtgacagccattg

SEQ ID NO: 105527 - DNA, 17 bp, Arabidopsis thaliana
gctagtgactggagtga

SEQ ID NO: 105528 - DNA, 17 bp, Arabidopsis thaliana
gctagtggcagccattg

SEQ ID NO: 105529 - DNA, 17 bp, Arabidopsis thaliana
gctagttcagcgaccag

SEQ ID NO: 105530 - DNA, 17 bp, Arabidopsis thaliana
gctagttcggatcttcg

SEQ ID NO: 105531 - DNA, 17 bp, Arabidopsis thaliana
gctagttctaactgtct

SEQ ID NO: 105532 - DNA, 17 bp, Arabidopsis thaliana
gctagttgaccttggct

SEQ ID NO: 105533 - DNA, 17 bp, Arabidopsis thaliana
gctagttgtctgttgcg

SEQ ID NO: 105534 - DNA, 17 bp, Arabidopsis thaliana
gctagtttgttgggatg

SEQ ID NO: 105535 - DNA, 17 bp, Arabidopsis thaliana
gctataaaaaattgacc

SEQ ID NO: 105536 - DNA, 17 bp, Arabidopsis thaliana
gctatacaacaggtgga

SEQ ID NO: 105537 - DNA, 17 bp, Arabidopsis thaliana
gctatagacatcagctt

SEQ ID NO: 105538 - DNA, 17 bp, Arabidopsis thaliana
gctatagacttgcgagc

SEQ ID NO: 105539 - DNA, 17 bp, Arabidopsis thaliana
gctatagcgatgatgtc

SEQ ID NO: 105540 - DNA, 17 bp, Arabidopsis thaliana
gctatagctgccagaga

SEQ ID NO: 105541 - DNA, 17 bp, Arabidopsis thaliana
gctataggctttcatcg

SEQ ID NO: 105542 - DNA, 17 bp, Arabidopsis thaliana
gctataggttgcaagtg

SEQ ID NO: 105543 - DNA, 17 bp, Arabidopsis thaliana
gctatcaaacttgtgca

SEQ ID NO: 105544 - DNA, 17 bp, Arabidopsis thaliana
gctatcaaatatctatg

SEQ ID NO: 105545 - DNA, 17 bp, Arabidopsis thaliana
gctatcaaggaatcctg

SEQ ID NO: 105546 - DNA, 17 bp, Arabidopsis thaliana
gctatcaagtttggaac

SEQ ID NO: 105547 - DNA, 17 bp, Arabidopsis thaliana
gctatcaatttcgtatg

SEQ ID NO: 105548 - DNA, 17 bp, Arabidopsis thaliana
gctatcagagaacggcg

SEQ ID NO: 105549 - DNA, 17 bp, Arabidopsis thaliana
gctatcagagactggcc

SEQ ID NO: 105550 - DNA, 17 bp, Arabidopsis thaliana
gctatcaggaaagggca

SEQ ID NO: 105551 - DNA, 17 bp, Arabidopsis thaliana
gctatcaggaagcagtt

SEQ ID NO: 105552 - DNA, 17 bp, Arabidopsis thaliana
gctatcagttgcttgac

SEQ ID NO: 105553 - DNA, 17 bp, Arabidopsis thaliana
gctatcatctacaacat

SEQ ID NO: 105554 - DNA, 17 bp, Arabidopsis thaliana
gctatcattgcaggatc

SEQ ID NO: 105555 - DNA, 17 bp, Arabidopsis thaliana
gctatccatcctgagtt

SEQ ID NO: 105556 - DNA, 17 bp, Arabidopsis thaliana
gctatcctagattccct

SEQ ID NO: 105557 - DNA, 17 bp, Arabidopsis thaliana
gctatcgaacgctatgt

SEQ ID NO: 105558 - DNA, 17 bp, Arabidopsis thaliana
gctatcgagtatcagaa

SEQ ID NO: 105559 - DNA, 17 bp, Arabidopsis thaliana
gctatcgggatctggtg

SEQ ID NO: 105560 - DNA, 17 bp, Arabidopsis thaliana
gctatcggtatggtgat

SEQ ID NO: 105561 - DNA, 17 bp, Arabidopsis thaliana
gctatcggtcatgctga

SEQ ID NO: 105562 - DNA, 17 bp, Arabidopsis thaliana
gctatcggtctctcgcc

SEQ ID NO: 105563 - DNA, 17 bp, Arabidopsis thaliana
gctatctccatttgcgt

SEQ ID NO: 105564 - DNA, 17 bp, Arabidopsis thaliana
gctatctctcgagcgca

SEQ ID NO: 105565 - DNA, 17 bp, Arabidopsis thaliana
gctatcttctgtctgcg

SEQ ID NO: 105566 - DNA, 17 bp, Arabidopsis thaliana
gctatcttggtcgcatc

SEQ ID NO: 105567 - DNA, 17 bp, Arabidopsis thaliana
gctatctttacagttgc

SEQ ID NO: 105568 - DNA, 17 bp, Arabidopsis thaliana
gctatgaagatcaatga

SEQ ID NO: 105569 - DNA, 17 bp, Arabidopsis thaliana
gctatgattgacttttg

SEQ ID NO: 105570 - DNA, 17 bp, Arabidopsis thaliana
gctatggcatggacaca

SEQ ID NO: 105571 - DNA, 17 bp, Arabidopsis thaliana
gctatggttatccacag

SEQ ID NO: 105572 - DNA, 17 bp, Arabidopsis thaliana
gctatggtttcgggtct

SEQ ID NO: 105573 - DNA, 17 bp, Arabidopsis thaliana
gctatgtagttgatgac

SEQ ID NO: 105574 - DNA, 17 bp, Arabidopsis thaliana
gctatgtcacgtttcag

SEQ ID NO: 105575 - DNA, 17 bp, Arabidopsis thaliana
gctatgtcacgtttctg

SEQ ID NO: 105576 - DNA, 17 bp, Arabidopsis thaliana
gctatgtggtcgatgtt

SEQ ID NO: 105577 - DNA, 17 bp, Arabidopsis thaliana
gctattaagatcgagtt

SEQ ID NO: 105578 - DNA, 17 bp, Arabidopsis thaliana
gctattacatgctaagt

SEQ ID NO: 105579 - DNA, 17 bp, Arabidopsis thaliana
gctattagctcagtggt

SEQ ID NO: 105580 - DNA, 17 bp, Arabidopsis thaliana
gctattccacaggtaca

SEQ ID NO: 105581 - DNA, 17 bp, Arabidopsis thaliana
gctattccgtgtcagtg

SEQ ID NO: 105582 - DNA, 17 bp, Arabidopsis thaliana
gctattcctctggttta

SEQ ID NO: 105583 - DNA, 17 bp, Arabidopsis thaliana
gctattcggaggttcga

SEQ ID NO: 105584 - DNA, 17 bp, Arabidopsis thaliana
gctattgttgtggctgc

SEQ ID NO: 105585 - DNA, 17 bp, Arabidopsis thaliana
gctatttcaagagttta

SEQ ID NO: 105586 - DNA, 17 bp, Arabidopsis thaliana
gctatttcctcttgagc

SEQ ID NO: 105587 - DNA, 17 bp, Arabidopsis thaliana
gctatttcgatttctaa

SEQ ID NO: 105588 - DNA, 17 bp, Arabidopsis thaliana
gctatttggtgtaccac

SEQ ID NO: 105589 - DNA, 17 bp, Arabidopsis thaliana
gctatttttacggactg

SEQ ID NO: 105590 - DNA, 17 bp, Arabidopsis thaliana
gctatttttggctacag

SEQ ID NO: 105591 - DNA, 17 bp, Arabidopsis thaliana
gctcaaaacatcatcaa

SEQ ID NO: 105592 - DNA, 17 bp, Arabidopsis thaliana
gctcaaaagacttgtca

SEQ ID NO: 105593 - DNA, 17 bp, Arabidopsis thaliana
gctcaaaccacaaagga

SEQ ID NO: 105594 - DNA, 17 bp, Arabidopsis thaliana
gctcaaactgtctggct

SEQ ID NO: 105595 - DNA, 17 bp, Arabidopsis thaliana
gctcaaacttcaatccc

SEQ ID NO: 105596 - DNA, 17 bp, Arabidopsis thaliana
gctcaaactttaacctc

SEQ ID NO: 105597 - DNA, 17 bp, Arabidopsis thaliana
gctcaaagcaagcctac

SEQ ID NO: 105598 - DNA, 17 bp, Arabidopsis thaliana
gctcaaagctctatctg

SEQ ID NO: 105599 - DNA, 17 bp, Arabidopsis thaliana
gctcaaagtctgttagt

SEQ ID NO: 105600 - DNA, 17 bp, Arabidopsis thaliana
gctcaaagtgtcacagg

SEQ ID NO: 105601 - DNA, 17 bp, Arabidopsis thaliana
gctcaaatcacgaaaat

SEQ ID NO: 105602 - DNA, 17 bp, Arabidopsis thaliana
gctcaaatctcgttggt

SEQ ID NO: 105603 - DNA, 17 bp, Arabidopsis thaliana
gctcaaatgacggtgct

SEQ ID NO: 105604 - DNA, 17 bp, Arabidopsis thaliana
gctcaaattcgcgcctc

SEQ ID NO: 105605 - DNA, 17 bp, Arabidopsis thaliana
gctcaaattttgctatc

SEQ ID NO: 105606 - DNA, 17 bp, Arabidopsis thaliana
gctcaacatccgatgtg

SEQ ID NO: 105607 - DNA, 17 bp, Arabidopsis thaliana
gctcaacccgcgacctc

SEQ ID NO: 105608 - DNA, 17 bp, Arabidopsis thaliana
gctcaaccctggacagg

SEQ ID NO: 105609 - DNA, 17 bp, Arabidopsis thaliana
gctcaacgcgaggttgg

SEQ ID NO: 105610 - DNA, 17 bp, Arabidopsis thaliana
gctcaacggtgacttcg

SEQ ID NO: 105611 - DNA, 17 bp, Arabidopsis thaliana
gctcaactatggctaat

SEQ ID NO: 105612 - DNA, 17 bp, Arabidopsis thaliana
gctcaactgtcacagaa

SEQ ID NO: 105613 - DNA, 17 bp, Arabidopsis thaliana
gctcaagaaagctgtgg

SEQ ID NO: 105614 - DNA, 17 bp, Arabidopsis thaliana
gctcaagaaagcttggg

SEQ ID NO: 105615 - DNA, 17 bp, Arabidopsis thaliana
gctcaagacaaaagcag

SEQ ID NO: 105616 - DNA, 17 bp, Arabidopsis thaliana
gctcaagactttggtcc

SEQ ID NO: 105617 - DNA, 17 bp, Arabidopsis thaliana
gctcaagacttttctga

SEQ ID NO: 105618 - DNA, 17 bp, Arabidopsis thaliana
gctcaagattagctgac

SEQ ID NO: 105619 - DNA, 17 bp, Arabidopsis thaliana
gctcaagcagagatgga

SEQ ID NO: 105620 - DNA, 17 bp, Arabidopsis thaliana
gctcaagccataccgtg

SEQ ID NO: 105621 - DNA, 17 bp, Arabidopsis thaliana
gctcaagctgcggcaca

SEQ ID NO: 105622 - DNA, 17 bp, Arabidopsis thaliana
gctcaaggattccacta

SEQ ID NO: 105623 - DNA, 17 bp, Arabidopsis thaliana
gctcaaggttaactggt

SEQ ID NO: 105624 - DNA, 17 bp, Arabidopsis thaliana
gctcaagtcgccggcgg

SEQ ID NO: 105625 - DNA, 17 bp, Arabidopsis thaliana
gctcaagtcttctactt

SEQ ID NO: 105626 - DNA, 17 bp, Arabidopsis thaliana
gctcaatatggacgccg

SEQ ID NO: 105627 - DNA, 17 bp, Arabidopsis thaliana
gctcaatctcgattgca

SEQ ID NO: 105628 - DNA, 17 bp, Arabidopsis thaliana
gctcaatgctctatctg

SEQ ID NO: 105629 - DNA, 17 bp, Arabidopsis thaliana
gctcaattagatctccc

SEQ ID NO: 105630 - DNA, 17 bp, Arabidopsis thaliana
gctcaattggtaaagac

SEQ ID NO: 105631 - DNA, 17 bp, Arabidopsis thaliana
gctcaattggtaaagat

SEQ ID NO: 105632 - DNA, 17 bp, Arabidopsis thaliana
gctcacaaagggtgttg

SEQ ID NO: 105633 - DNA, 17 bp, Arabidopsis thaliana
gctcacacggttttgac

SEQ ID NO: 105634 - DNA, 17 bp, Arabidopsis thaliana
gctcacactcgggacag

SEQ ID NO: 105635 - DNA, 17 bp, Arabidopsis thaliana
gctcacactgggtgatg

SEQ ID NO: 105636 - DNA, 17 bp, Arabidopsis thaliana
gctcacacttcgtcaga

SEQ ID NO: 105637 - DNA, 17 bp, Arabidopsis thaliana
gctcacagctctatctg

SEQ ID NO: 105638 - DNA, 17 bp, Arabidopsis thaliana
gctcacatcaccaatgc

SEQ ID NO: 105639 - DNA, 17 bp, Arabidopsis thaliana
gctcacatcggaagttg

SEQ ID NO: 105640 - DNA, 17 bp, Arabidopsis thaliana
gctcacatctgcgcatt

SEQ ID NO: 105641 - DNA, 17 bp, Arabidopsis thaliana
gctcaccgctctatctg

SEQ ID NO: 105642 - DNA, 17 bp, Arabidopsis thaliana
gctcacctccttttctg

SEQ ID NO: 105643 - DNA, 17 bp, Arabidopsis thaliana
gctcacctctctttctg

SEQ ID NO: 105644 - DNA, 17 bp, Arabidopsis thaliana
gctcacctctctttttg

SEQ ID NO: 105645 - DNA, 17 bp, Arabidopsis thaliana
gctcacgcccggtcgta

SEQ ID NO: 105646 - DNA, 17 bp, Arabidopsis thaliana
gctcacgctctatccgt

SEQ ID NO: 105647 - DNA, 17 bp, Arabidopsis thaliana
gctcacggctctatcgc

SEQ ID NO: 105648 - DNA, 17 bp, Arabidopsis thaliana
gctcacgtctgcctggg

SEQ ID NO: 105649 - DNA, 17 bp, Arabidopsis thaliana
gctcacgtttgctctca

SEQ ID NO: 105650 - DNA, 17 bp, Arabidopsis thaliana
gctcactaggagattgt

SEQ ID NO: 105651 - DNA, 17 bp, Arabidopsis thaliana
gctcactctctactcgt

SEQ ID NO: 105652 - DNA, 17 bp, Arabidopsis thaliana
gctcactctctatccgt

SEQ ID NO: 105653 - DNA, 17 bp, Arabidopsis thaliana
gctcactctctatctgt

SEQ ID NO: 105654 - DNA, 17 bp, Arabidopsis thaliana
gctcactctctctttgt

SEQ ID NO: 105655 - DNA, 17 bp, Arabidopsis thaliana
gctcactctcttttgtc

SEQ ID NO: 105656 - DNA, 17 bp, Arabidopsis thaliana
gctcactctctttttgt

SEQ ID NO: 105657 - DNA, 17 bp, Arabidopsis thaliana
gctcactgccatctgtc

SEQ ID NO: 105658 - DNA, 17 bp, Arabidopsis thaliana
gctcactgccctatctg

SEQ ID NO: 105659 - DNA, 17 bp, Arabidopsis thaliana
gctcactgccttatctg

SEQ ID NO: 105660 - DNA, 17 bp, Arabidopsis thaliana
gctcactgcctttctgt

SEQ ID NO: 105661 - DNA, 17 bp, Arabidopsis thaliana
gctcactgctacctgcc

SEQ ID NO: 105662 - DNA, 17 bp, Arabidopsis thaliana
gctcactgctataaccg

SEQ ID NO: 105663 - DNA, 17 bp, Arabidopsis thaliana
gctcactgctccatctg

SEQ ID NO: 105664 - DNA, 17 bp, Arabidopsis thaliana
gctcactgctctacctg

SEQ ID NO: 105665 - DNA, 17 bp, Arabidopsis thaliana
gctcactgctctagctg

SEQ ID NO: 105666 - DNA, 17 bp, Arabidopsis thaliana
gctcactgctctatcgc

SEQ ID NO: 105667 - DNA, 17 bp, Arabidopsis thaliana
gctcactgctctatcgg

SEQ ID NO: 105668 - DNA, 17 bp, Arabidopsis thaliana
gctcactgctctatcta

SEQ ID NO: 105669 - DNA, 17 bp, Arabidopsis thaliana
gctcactgctctatctc

SEQ ID NO: 105670 - DNA, 17 bp, Arabidopsis thaliana
gctcactgctctatctg

SEQ ID NO: 105671 - DNA, 17 bp, Arabidopsis thaliana
gctcactgctctatctt

SEQ ID NO: 105672 - DNA, 17 bp, Arabidopsis thaliana
gctcactgctctctctg

SEQ ID NO: 105673 - DNA, 17 bp, Arabidopsis thaliana
gctcactgctctgtcag

SEQ ID NO: 105674 - DNA, 17 bp, Arabidopsis thaliana
gctcactgctctgtctg

SEQ ID NO: 105675 - DNA, 17 bp, Arabidopsis thaliana
gctcactgctcttctgt

SEQ ID NO: 105676 - DNA, 17 bp, Arabidopsis thaliana
gctcactgctctttctc

SEQ ID NO: 105677 - DNA, 17 bp, Arabidopsis thaliana
gctcactgctctttctg

SEQ ID NO: 105678 - DNA, 17 bp, Arabidopsis thaliana
gctcactgcttatctgt

SEQ ID NO: 105679 - DNA, 17 bp, Arabidopsis thaliana
gctcactgcttcatctg

SEQ ID NO: 105680 - DNA, 17 bp, Arabidopsis thaliana
gctcactgcttctgtca

SEQ ID NO: 105681 - DNA, 17 bp, Arabidopsis thaliana
gctcactgctttatctg

SEQ ID NO: 105682 - DNA, 17 bp, Arabidopsis thaliana
gctcactgctttctgtc

SEQ ID NO: 105683 - DNA, 17 bp, Arabidopsis thaliana
gctcactgcttttctgt

SEQ ID NO: 105684 - DNA, 17 bp, Arabidopsis thaliana
gctcactgtctatctgt

SEQ ID NO: 105685 - DNA, 17 bp, Arabidopsis thaliana
gctcacttggatatcta

SEQ ID NO: 105686 - DNA, 17 bp, Arabidopsis thaliana
gctcactttccgttact

SEQ ID NO: 105687 - DNA, 17 bp, Arabidopsis thaliana
gctcagaaaatggtact

SEQ ID NO: 105688 - DNA, 17 bp, Arabidopsis thaliana
gctcagaactggtacgg

SEQ ID NO: 105689 - DNA, 17 bp, Arabidopsis thaliana
gctcagacagcatacga

SEQ ID NO: 105690 - DNA, 17 bp, Arabidopsis thaliana
gctcagacctggtaaaa

SEQ ID NO: 105691 - DNA, 17 bp, Arabidopsis thaliana
gctcagacctggtgaag

SEQ ID NO: 105692 - DNA, 17 bp, Arabidopsis thaliana
gctcagactccctcaac

SEQ ID NO: 105693 - DNA, 17 bp, Arabidopsis thaliana
gctcagagcattttggc

SEQ ID NO: 105694 - DNA, 17 bp, Arabidopsis thaliana
gctcagagccaagtctt

SEQ ID NO: 105695 - DNA, 17 bp, Arabidopsis thaliana
gctcagatcacggtctt

SEQ ID NO: 105696 - DNA, 17 bp, Arabidopsis thaliana
gctcagatcaggcgcgg

SEQ ID NO: 105697 - DNA, 17 bp, Arabidopsis thaliana
gctcagatctgctgctt

SEQ ID NO: 105698 - DNA, 17 bp, Arabidopsis thaliana
gctcagatgttgtatac

SEQ ID NO: 105699 - DNA, 17 bp, Arabidopsis thaliana
gctcagattcgcggcct

SEQ ID NO: 105700 - DNA, 17 bp, Arabidopsis thaliana
gctcagattgtcgatct

SEQ ID NO: 105701 - DNA, 17 bp, Arabidopsis thaliana
gctcagcattgcttctg

SEQ ID NO: 105702 - DNA, 17 bp, Arabidopsis thaliana
gctcagccctttgtcgc

SEQ ID NO: 105703 - DNA, 17 bp, Arabidopsis thaliana
gctcagccggacttctc

SEQ ID NO: 105704 - DNA, 17 bp, Arabidopsis thaliana
gctcagccggaggtagg

SEQ ID NO: 105705 - DNA, 17 bp, Arabidopsis thaliana
gctcagcctcaacgcca

SEQ ID NO: 105706 - DNA, 17 bp, Arabidopsis thaliana
gctcagcctgtggttaa

SEQ ID NO: 105707 - DNA, 17 bp, Arabidopsis thaliana
gctcagcgacctgtcgg

SEQ ID NO: 105708 - DNA, 17 bp, Arabidopsis thaliana
gctcagctctctttctg

SEQ ID NO: 105709 - DNA, 17 bp, Arabidopsis thaliana
gctcagctgaatctagt

SEQ ID NO: 105710 - DNA, 17 bp, Arabidopsis thaliana
gctcagctgtatttgct

SEQ ID NO: 105711 - DNA, 17 bp, Arabidopsis thaliana
gctcagctgtgactcac

SEQ ID NO: 105712 - DNA, 17 bp, Arabidopsis thaliana
gctcagctgttgacgtt

SEQ ID NO: 105713 - DNA, 17 bp, Arabidopsis thaliana
gctcaggaagtgtgcgt

SEQ ID NO: 105714 - DNA, 17 bp, Arabidopsis thaliana
gctcaggaatttatctc

SEQ ID NO: 105715 - DNA, 17 bp, Arabidopsis thaliana
gctcaggacagggactc

SEQ ID NO: 105716 - DNA, 17 bp, Arabidopsis thaliana
gctcaggatgaacgcag

SEQ ID NO: 105717 - DNA, 17 bp, Arabidopsis thaliana
gctcaggatgaacgctg

SEQ ID NO: 105718 - DNA, 17 bp, Arabidopsis thaliana
gctcaggatggtaattt

SEQ ID NO: 105719 - DNA, 17 bp, Arabidopsis thaliana
gctcaggcccaaatcag

SEQ ID NO: 105720 - DNA, 17 bp, Arabidopsis thaliana
gctcaggcctgtggtga

SEQ ID NO: 105721 - DNA, 17 bp, Arabidopsis thaliana
gctcaggctgctggtct

SEQ ID NO: 105722 - DNA, 17 bp, Arabidopsis thaliana
gctcagggagacctaag

SEQ ID NO: 105723 - DNA, 17 bp, Arabidopsis thaliana
gctcaggtctccaaggt

SEQ ID NO: 105724 - DNA, 17 bp, Arabidopsis thaliana
gctcaggttgtttggtt

SEQ ID NO: 105725 - DNA, 17 bp, Arabidopsis thaliana
gctcagtcgagaggtag

SEQ ID NO: 105726 - DNA, 17 bp, Arabidopsis thaliana
gctcagtgactatggtt

SEQ ID NO: 105727 - DNA, 17 bp, Arabidopsis thaliana
gctcagtgagtccaggc

SEQ ID NO: 105728 - DNA, 17 bp, Arabidopsis thaliana
gctcagtgataaaggag

SEQ ID NO: 105729 - DNA, 17 bp, Arabidopsis thaliana
gctcagttatctatttg

SEQ ID NO: 105730 - DNA, 17 bp, Arabidopsis thaliana
gctcagttggtagagct

SEQ ID NO: 105731 - DNA, 17 bp, Arabidopsis thaliana
gctcagttggtatagct

SEQ ID NO: 105732 - DNA, 17 bp, Arabidopsis thaliana
gctcatagcctgctagc

SEQ ID NO: 105733 - DNA, 17 bp, Arabidopsis thaliana
gctcatatggagagtgt

SEQ ID NO: 105734 - DNA, 17 bp, Arabidopsis thaliana
gctcatcaagttgtgac

SEQ ID NO: 105735 - DNA, 17 bp, Arabidopsis thaliana
gctcatcatctaagccc

SEQ ID NO: 105736 - DNA, 17 bp, Arabidopsis thaliana
gctcatcgacaaagtga

SEQ ID NO: 105737 - DNA, 17 bp, Arabidopsis thaliana
gctcatctacaattgca

SEQ ID NO: 105738 - DNA, 17 bp, Arabidopsis thaliana
gctcatctcatgtttca

SEQ ID NO: 105739 - DNA, 17 bp, Arabidopsis thaliana
gctcatctgcaacttag

SEQ ID NO: 105740 - DNA, 17 bp, Arabidopsis thaliana
gctcatcttcagcatgc

SEQ ID NO: 105741 - DNA, 17 bp, Arabidopsis thaliana
gctcatcttcagcatgt

SEQ ID NO: 105742 - DNA, 17 bp, Arabidopsis thaliana
gctcatcttcattggac

SEQ ID NO: 105743 - DNA, 17 bp, Arabidopsis thaliana
gctcatcttcggtgtca

SEQ ID NO: 105744 - DNA, 17 bp, Arabidopsis thaliana
gctcatgtgccggaggg

SEQ ID NO: 105745 - DNA, 17 bp, Arabidopsis thaliana
gctcattacacgaaatg

SEQ ID NO: 105746 - DNA, 17 bp, Arabidopsis thaliana
gctcattacatgttagt

SEQ ID NO: 105747 - DNA, 17 bp, Arabidopsis thaliana
gctcattgactttttgt

SEQ ID NO: 105748 - DNA, 17 bp, Arabidopsis thaliana
gctcattgctctatctg

SEQ ID NO: 105749 - DNA, 17 bp, Arabidopsis thaliana
gctcattggtgtgaagg

SEQ ID NO: 105750 - DNA, 17 bp, Arabidopsis thaliana
gctcatttccatggttg

SEQ ID NO: 105751 - DNA, 17 bp, Arabidopsis thaliana
gctcatttcccgggagg

SEQ ID NO: 105752 - DNA, 17 bp, Arabidopsis thaliana
gctcatttggatgattc

SEQ ID NO: 105753 - DNA, 17 bp, Arabidopsis thaliana
gctcattttccgttact

SEQ ID NO: 105754 - DNA, 17 bp, Arabidopsis thaliana
gctcattttctgttccc

SEQ ID NO: 105755 - DNA, 17 bp, Arabidopsis thaliana
gctccaaaaggcacgtg

SEQ ID NO: 105756 - DNA, 17 bp, Arabidopsis thaliana
gctccaagcgatgaatc

SEQ ID NO: 105757 - DNA, 17 bp, Arabidopsis thaliana
gctccaaggatgacttg

SEQ ID NO: 105758 - DNA, 17 bp, Arabidopsis thaliana
gctccaaggttggtgac

SEQ ID NO: 105759 - DNA, 17 bp, Arabidopsis thaliana
gctccaagtgggccatt

SEQ ID NO: 105760 - DNA, 17 bp, Arabidopsis thaliana
gctccaatcatgcactt

SEQ ID NO: 105761 - DNA, 17 bp, Arabidopsis thaliana
gctccaatggggtctgg

SEQ ID NO: 105762 - DNA, 17 bp, Arabidopsis thaliana
gctccaatggtcacctc

SEQ ID NO: 105763 - DNA, 17 bp, Arabidopsis thaliana
gctccacgagtttggcc

SEQ ID NO: 105764 - DNA, 17 bp, Arabidopsis thaliana
gctccactcgattcacc

SEQ ID NO: 105765 - DNA, 17 bp, Arabidopsis thaliana
gctccactgttccgcca

SEQ ID NO: 105766 - DNA, 17 bp, Arabidopsis thaliana
gctccagaatgctcaat

SEQ ID NO: 105767 - DNA, 17 bp, Arabidopsis thaliana
gctccagagctgcgcag

SEQ ID NO: 105768 - DNA, 17 bp, Arabidopsis thaliana
gctccaggatagcgtag

SEQ ID NO: 105769 - DNA, 17 bp, Arabidopsis thaliana
gctccagggcagagtgt

SEQ ID NO: 105770 - DNA, 17 bp, Arabidopsis thaliana
gctccatctccatcggt

SEQ ID NO: 105771 - DNA, 17 bp, Arabidopsis thaliana
gctccatgctgttgacc

SEQ ID NO: 105772 - DNA, 17 bp, Arabidopsis thaliana
gctcccaaagcacgtat

SEQ ID NO: 105773 - DNA, 17 bp, Arabidopsis thaliana
gctcccaaagcacgtgt

SEQ ID NO: 105774 - DNA, 17 bp, Arabidopsis thaliana
gctcccaaaggcacgtg

SEQ ID NO: 105775 - DNA, 17 bp, Arabidopsis thaliana
gctcccaaaggcacgtt

SEQ ID NO: 105776 - DNA, 17 bp, Arabidopsis thaliana
gctcccaagcagtggga

SEQ ID NO: 105777 - DNA, 17 bp, Arabidopsis thaliana
gctcccagagccgtggg

SEQ ID NO: 105778 - DNA, 17 bp, Arabidopsis thaliana
gctcccatagtgtgacg

SEQ ID NO: 105779 - DNA, 17 bp, Arabidopsis thaliana
gctcccatcatctaagc

SEQ ID NO: 105780 - DNA, 17 bp, Arabidopsis thaliana
gctcccatggttggcga

SEQ ID NO: 105781 - DNA, 17 bp, Arabidopsis thaliana
gctccccattcgacccg

SEQ ID NO: 105782 - DNA, 17 bp, Arabidopsis thaliana
gctcccgatgttgtggc

SEQ ID NO: 105783 - DNA, 17 bp, Arabidopsis thaliana
gctcccggtaggacctc

SEQ ID NO: 105784 - DNA, 17 bp, Arabidopsis thaliana
gctcccgtagctcagta

SEQ ID NO: 105785 - DNA, 17 bp, Arabidopsis thaliana
gctcccgtagctcagtt

SEQ ID NO: 105786 - DNA, 17 bp, Arabidopsis thaliana
gctccctctctatccgt

SEQ ID NO: 105787 - DNA, 17 bp, Arabidopsis thaliana
gctccctgctctgctat

SEQ ID NO: 105788 - DNA, 17 bp, Arabidopsis thaliana
gctcccttattttgcta

SEQ ID NO: 105789 - DNA, 17 bp, Arabidopsis thaliana
gctcccttcaatccaaa

SEQ ID NO: 105790 - DNA, 17 bp, Arabidopsis thaliana
gctcccttcaattcgtc

SEQ ID NO: 105791 - DNA, 17 bp, Arabidopsis thaliana
gctcccttcggtcggcg

SEQ ID NO: 105792 - DNA, 17 bp, Arabidopsis thaliana
gctcccttgggccaatg

SEQ ID NO: 105793 - DNA, 17 bp, Arabidopsis thaliana
gctccctttgtcgctaa

SEQ ID NO: 105794 - DNA, 17 bp, Arabidopsis thaliana
gctccgaaccaacggac

SEQ ID NO: 105795 - DNA, 17 bp, Arabidopsis thaliana
gctccgaacttggtggt

SEQ ID NO: 105796 - DNA, 17 bp, Arabidopsis thaliana
gctccgaatgagtagcg

SEQ ID NO: 105797 - DNA, 17 bp, Arabidopsis thaliana
gctccgaatggtgactg

SEQ ID NO: 105798 - DNA, 17 bp, Arabidopsis thaliana
gctccgacccgtgctct

SEQ ID NO: 105799 - DNA, 17 bp, Arabidopsis thaliana
gctccgactaatgtcaa

SEQ ID NO: 105800 - DNA, 17 bp, Arabidopsis thaliana
gctccgagactacccgt

SEQ ID NO: 105801 - DNA, 17 bp, Arabidopsis thaliana
gctccgattaatcactt

SEQ ID NO: 105802 - DNA, 17 bp, Arabidopsis thaliana
gctccgattggaccatc

SEQ ID NO: 105803 - DNA, 17 bp, Arabidopsis thaliana
gctccgctgcgcacata

SEQ ID NO: 105804 - DNA, 17 bp, Arabidopsis thaliana
gctccggcaacactgca

SEQ ID NO: 105805 - DNA, 17 bp, Arabidopsis thaliana
gctccgggcgtcggcct

SEQ ID NO: 105806 - DNA, 17 bp, Arabidopsis thaliana
gctccgtaatatagccc

SEQ ID NO: 105807 - DNA, 17 bp, Arabidopsis thaliana
gctccgtgatatgggct

SEQ ID NO: 105808 - DNA, 17 bp, Arabidopsis thaliana
gctccgtgatgtttatc

SEQ ID NO: 105809 - DNA, 17 bp, Arabidopsis thaliana
gctccgtgggttggctt

SEQ ID NO: 105810 - DNA, 17 bp, Arabidopsis thaliana
gctccgtgttgcaccgc

SEQ ID NO: 105811 - DNA, 17 bp, Arabidopsis thaliana
gctccgttccgcatccg

SEQ ID NO: 105812 - DNA, 17 bp, Arabidopsis thaliana
gctccgttgcggaccgt

SEQ ID NO: 105813 - DNA, 17 bp, Arabidopsis thaliana
gctcctaccgactgaat

SEQ ID NO: 105814 - DNA, 17 bp, Arabidopsis thaliana
gctcctaccgattgaat

SEQ ID NO: 105815 - DNA, 17 bp, Arabidopsis thaliana
gctcctactgagggtcg

SEQ ID NO: 105816 - DNA, 17 bp, Arabidopsis thaliana
gctcctagtcccagact

SEQ ID NO: 105817 - DNA, 17 bp, Arabidopsis thaliana
gctcctcatcactgaga

SEQ ID NO: 105818 - DNA, 17 bp, Arabidopsis thaliana
gctcctccagctgcggc

SEQ ID NO: 105819 - DNA, 17 bp, Arabidopsis thaliana
gctcctcccgagctcgt

SEQ ID NO: 105820 - DNA, 17 bp, Arabidopsis thaliana
gctcctccggtacaagc

SEQ ID NO: 105821 - DNA, 17 bp, Arabidopsis thaliana
gctcctctattaatgcg

SEQ ID NO: 105822 - DNA, 17 bp, Arabidopsis thaliana
gctcctctctcacaagc

SEQ ID NO: 105823 - DNA, 17 bp, Arabidopsis thaliana
gctcctctttctgggac

SEQ ID NO: 105824 - DNA, 17 bp, Arabidopsis thaliana
gctcctgcatgcatagg

SEQ ID NO: 105825 - DNA, 17 bp, Arabidopsis thaliana
gctcctggtcttaattg

SEQ ID NO: 105826 - DNA, 17 bp, Arabidopsis thaliana
gctcctgtggctggatg

SEQ ID NO: 105827 - DNA, 17 bp, Arabidopsis thaliana
gctcctgttgcagctgc

SEQ ID NO: 105828 - DNA, 17 bp, Arabidopsis thaliana
gctccttagccttctgt

SEQ ID NO: 105829 - DNA, 17 bp, Arabidopsis thaliana
gctccttctaagagctt

SEQ ID NO: 105830 - DNA, 17 bp, Arabidopsis thaliana
gctccttgcgactgact

SEQ ID NO: 105831 - DNA, 17 bp, Arabidopsis thaliana
gctccttgcggttgtag

SEQ ID NO: 105832 - DNA, 17 bp, Arabidopsis thaliana
gctccttgctgcaccgc

SEQ ID NO: 105833 - DNA, 17 bp, Arabidopsis thaliana
gctccttggggttgtag

SEQ ID NO: 105834 - DNA, 17 bp, Arabidopsis thaliana
gctcctttttccactga

SEQ ID NO: 105835 - DNA, 17 bp, Arabidopsis thaliana
gctcctttttggagact

SEQ ID NO: 105836 - DNA, 17 bp, Arabidopsis thaliana
gctcgaaactctgattg

SEQ ID NO: 105837 - DNA, 17 bp, Arabidopsis thaliana
gctcgaacccgggcgaa

SEQ ID NO: 105838 - DNA, 17 bp, Arabidopsis thaliana
gctcgaacccgggctca

SEQ ID NO: 105839 - DNA, 17 bp, Arabidopsis thaliana
gctcgaactctggttgc

SEQ ID NO: 105840 - DNA, 17 bp, Arabidopsis thaliana
gctcgaagacgatcaga

SEQ ID NO: 105841 - DNA, 17 bp, Arabidopsis thaliana
gctcgaagatattacgc

SEQ ID NO: 105842 - DNA, 17 bp, Arabidopsis thaliana
gctcgaagattaccaca

SEQ ID NO: 105843 - DNA, 17 bp, Arabidopsis thaliana
gctcgaaggtagactca

SEQ ID NO: 105844 - DNA, 17 bp, Arabidopsis thaliana
gctcgaatcatgcggta

SEQ ID NO: 105845 - DNA, 17 bp, Arabidopsis thaliana
gctcgaatccaattcgt

SEQ ID NO: 105846 - DNA, 17 bp, Arabidopsis thaliana
gctcgaatcccagcagc

SEQ ID NO: 105847 - DNA, 17 bp, Arabidopsis thaliana
gctcgaatcccgccggc

SEQ ID NO: 105848 - DNA, 17 bp, Arabidopsis thaliana
gctcgaattcgacttgt

SEQ ID NO: 105849 - DNA, 17 bp, Arabidopsis thaliana
gctcgacgccaggatga

SEQ ID NO: 105850 - DNA, 17 bp, Arabidopsis thaliana
gctcgacgcggattacg

SEQ ID NO: 105851 - DNA, 17 bp, Arabidopsis thaliana
gctcgactctagtccga

SEQ ID NO: 105852 - DNA, 17 bp, Arabidopsis thaliana
gctcgagacttgtcatt

SEQ ID NO: 105853 - DNA, 17 bp, Arabidopsis thaliana
gctcgagatgttggttt

SEQ ID NO: 105854 - DNA, 17 bp, Arabidopsis thaliana
gctcgagctgctcccgc

SEQ ID NO: 105855 - DNA, 17 bp, Arabidopsis thaliana
gctcgagctgcttccgc

SEQ ID NO: 105856 - DNA, 17 bp, Arabidopsis thaliana
gctcgaggccaagtccc

SEQ ID NO: 105857 - DNA, 17 bp, Arabidopsis thaliana
gctcgagggcacgtctg

SEQ ID NO: 105858 - DNA, 17 bp, Arabidopsis thaliana
gctcgatccgctgtcac

SEQ ID NO: 105859 - DNA, 17 bp, Arabidopsis thaliana
gctcgatctcgggtgag

SEQ ID NO: 105860 - DNA, 17 bp, Arabidopsis thaliana
gctcgatctctgactac

SEQ ID NO: 105861 - DNA, 17 bp, Arabidopsis thaliana
gctcgattcagcctgat

SEQ ID NO: 105862 - DNA, 17 bp, Arabidopsis thaliana
gctcgattccaatggcc

SEQ ID NO: 105863 - DNA, 17 bp, Arabidopsis thaliana
gctcgattccggcaggt

SEQ ID NO: 105864 - DNA, 17 bp, Arabidopsis thaliana
gctcgattgctaggatt

SEQ ID NO: 105865 - DNA, 17 bp, Arabidopsis thaliana
gctcgattgctcactcg

SEQ ID NO: 105866 - DNA, 17 bp, Arabidopsis thaliana
gctcgattttaaaaaca

SEQ ID NO: 105867 - DNA, 17 bp, Arabidopsis thaliana
gctcgattttggttcgg

SEQ ID NO: 105868 - DNA, 17 bp, Arabidopsis thaliana
gctcgcagccttctgtc

SEQ ID NO: 105869 - DNA, 17 bp, Arabidopsis thaliana
gctcgcagcggaccatt

SEQ ID NO: 105870 - DNA, 17 bp, Arabidopsis thaliana
gctcgccgcccgattgc

SEQ ID NO: 105871 - DNA, 17 bp, Arabidopsis thaliana
gctcgccggtataagtg

SEQ ID NO: 105872 - DNA, 17 bp, Arabidopsis thaliana
gctcgcgttgactacgt

SEQ ID NO: 105873 - DNA, 17 bp, Arabidopsis thaliana
gctcgctaacccagtcg

SEQ ID NO: 105874 - DNA, 17 bp, Arabidopsis thaliana
gctcgctaacgtcgcag

SEQ ID NO: 105875 - DNA, 17 bp, Arabidopsis thaliana
gctcgctaactcacctt

SEQ ID NO: 105876 - DNA, 17 bp, Arabidopsis thaliana
gctcgctaagctcaggc

SEQ ID NO: 105877 - DNA, 17 bp, Arabidopsis thaliana
gctcgctaccgtgcgct

SEQ ID NO: 105878 - DNA, 17 bp, Arabidopsis thaliana
gctcgctactagctagt

SEQ ID NO: 105879 - DNA, 17 bp, Arabidopsis thaliana
gctcgctagccaaagct

SEQ ID NO: 105880 - DNA, 17 bp, Arabidopsis thaliana
gctcgctcactctctct

SEQ ID NO: 105881 - DNA, 17 bp, Arabidopsis thaliana
gctcgctcactgctcta

SEQ ID NO: 105882 - DNA, 17 bp, Arabidopsis thaliana
gctcgctcactgctctt

SEQ ID NO: 105883 - DNA, 17 bp, Arabidopsis thaliana
gctcgctcagctgtatt

SEQ ID NO: 105884 - DNA, 17 bp, Arabidopsis thaliana
gctcgctcaggatgaac

SEQ ID NO: 105885 - DNA, 17 bp, Arabidopsis thaliana
gctcgctcagtctcgtt

SEQ ID NO: 105886 - DNA, 17 bp, Arabidopsis thaliana
gctcgctccaagtgggc

SEQ ID NO: 105887 - DNA, 17 bp, Arabidopsis thaliana
gctcgctcccgtagctc

SEQ ID NO: 105888 - DNA, 17 bp, Arabidopsis thaliana
gctcgctccgaatgagt

SEQ ID NO: 105889 - DNA, 17 bp, Arabidopsis thaliana
gctcgctccgattggac

SEQ ID NO: 105890 - DNA, 17 bp, Arabidopsis thaliana
gctcgctccttacagat

SEQ ID NO: 105891 - DNA, 17 bp, Arabidopsis thaliana
gctcgctccttgcggtt

SEQ ID NO: 105892 - DNA, 17 bp, Arabidopsis thaliana
gctcgctcgctcgctcg

SEQ ID NO: 105893 - DNA, 17 bp, Arabidopsis thaliana
gctcgctcgctgaagtg

SEQ ID NO: 105894 - DNA, 17 bp, Arabidopsis thaliana
gctcgctcgctgagatt

SEQ ID NO: 105895 - DNA, 17 bp, Arabidopsis thaliana
gctcgctcgctgtgctg

SEQ ID NO: 105896 - DNA, 17 bp, Arabidopsis thaliana
gctcgctcgggggtccc

SEQ ID NO: 105897 - DNA, 17 bp, Arabidopsis thaliana
gctcgctcgtttgattc

SEQ ID NO: 105898 - DNA, 17 bp, Arabidopsis thaliana
gctcgctctaaaatgac

SEQ ID NO: 105899 - DNA, 17 bp, Arabidopsis thaliana
gctcgctctatctgtga

SEQ ID NO: 105900 - DNA, 17 bp, Arabidopsis thaliana
gctcgctctatttgttg

SEQ ID NO: 105901 - DNA, 17 bp, Arabidopsis thaliana
gctcgctctcgtagctc

SEQ ID NO: 105902 - DNA, 17 bp, Arabidopsis thaliana
gctcgctctctagcctt

SEQ ID NO: 105903 - DNA, 17 bp, Arabidopsis thaliana
gctcgctctctggaact

SEQ ID NO: 105904 - DNA, 17 bp, Arabidopsis thaliana
gctcgctctgaatggtg

SEQ ID NO: 105905 - DNA, 17 bp, Arabidopsis thaliana
gctcgctctgagggctg

SEQ ID NO: 105906 - DNA, 17 bp, Arabidopsis thaliana
gctcgctctgcccgttg

SEQ ID NO: 105907 - DNA, 17 bp, Arabidopsis thaliana
gctcgctctgcgcagat

SEQ ID NO: 105908 - DNA, 17 bp, Arabidopsis thaliana
gctcgctcttttggcgg

SEQ ID NO: 105909 - DNA, 17 bp, Arabidopsis thaliana
gctcgctgaaccagcga

SEQ ID NO: 105910 - DNA, 17 bp, Arabidopsis thaliana
gctcgctgaatctcagt

SEQ ID NO: 105911 - DNA, 17 bp, Arabidopsis thaliana
gctcgctgactagaata

SEQ ID NO: 105912 - DNA, 17 bp, Arabidopsis thaliana
gctcgctgagaaccgag

SEQ ID NO: 105913 - DNA, 17 bp, Arabidopsis thaliana
gctcgctgagaattaat

SEQ ID NO: 105914 - DNA, 17 bp, Arabidopsis thaliana
gctcgctgagatttcct

SEQ ID NO: 105915 - DNA, 17 bp, Arabidopsis thaliana
gctcgctgagcttattt

SEQ ID NO: 105916 - DNA, 17 bp, Arabidopsis thaliana
gctcgctgagttacggt

SEQ ID NO: 105917 - DNA, 17 bp, Arabidopsis thaliana
gctcgctgagttttctg

SEQ ID NO: 105918 - DNA, 17 bp, Arabidopsis thaliana
gctcgctgattgacgcc

SEQ ID NO: 105919 - DNA, 17 bp, Arabidopsis thaliana
gctcgctgccgtgatcg

SEQ ID NO: 105920 - DNA, 17 bp, Arabidopsis thaliana
gctcgctgcgacaagca

SEQ ID NO: 105921 - DNA, 17 bp, Arabidopsis thaliana
gctcgctgctctatctg

SEQ ID NO: 105922 - DNA, 17 bp, Arabidopsis thaliana
gctcgctggaattggcc

SEQ ID NO: 105923 - DNA, 17 bp, Arabidopsis thaliana
gctcgctggatccagcg

SEQ ID NO: 105924 - DNA, 17 bp, Arabidopsis thaliana
gctcgctggcttgacaa

SEQ ID NO: 105925 - DNA, 17 bp, Arabidopsis thaliana
gctcgctggttcgtttc

SEQ ID NO: 105926 - DNA, 17 bp, Arabidopsis thaliana
gctcgctgtaattggtc

SEQ ID NO: 105927 - DNA, 17 bp, Arabidopsis thaliana
gctcgctgtgcgtatcg

SEQ ID NO: 105928 - DNA, 17 bp, Arabidopsis thaliana
gctcgctgtttcgttcc

SEQ ID NO: 105929 - DNA, 17 bp, Arabidopsis thaliana
gctcgcttaagcggttc

SEQ ID NO: 105930 - DNA, 17 bp, Arabidopsis thaliana
gctcgcttacgactaat

SEQ ID NO: 105931 - DNA, 17 bp, Arabidopsis thaliana
gctcgcttactgctcta

SEQ ID NO: 105932 - DNA, 17 bp, Arabidopsis thaliana
gctcgcttagacgaggg

SEQ ID NO: 105933 - DNA, 17 bp, Arabidopsis thaliana
gctcgcttagtccgtcc

SEQ ID NO: 105934 - DNA, 17 bp, Arabidopsis thaliana
gctcgcttattttgtcg

SEQ ID NO: 105935 - DNA, 17 bp, Arabidopsis thaliana
gctcgcttcactgttcc

SEQ ID NO: 105936 - DNA, 17 bp, Arabidopsis thaliana
gctcgcttcactgtttc

SEQ ID NO: 105937 - DNA, 17 bp, Arabidopsis thaliana
gctcgcttcggattcgg

SEQ ID NO: 105938 - DNA, 17 bp, Arabidopsis thaliana
gctcgcttcggctaaga

SEQ ID NO: 105939 - DNA, 17 bp, Arabidopsis thaliana
gctcgcttcggtgcgag

SEQ ID NO: 105940 - DNA, 17 bp, Arabidopsis thaliana
gctcgcttctaagcaag

SEQ ID NO: 105941 - DNA, 17 bp, Arabidopsis thaliana
gctcgcttctcaaagct

SEQ ID NO: 105942 - DNA, 17 bp, Arabidopsis thaliana
gctcgcttcttggggtt

SEQ ID NO: 105943 - DNA, 17 bp, Arabidopsis thaliana
gctcgcttctttcttgc

SEQ ID NO: 105944 - DNA, 17 bp, Arabidopsis thaliana
gctcgcttgaaaatcgg

SEQ ID NO: 105945 - DNA, 17 bp, Arabidopsis thaliana
gctcgcttggtgctgct

SEQ ID NO: 105946 - DNA, 17 bp, Arabidopsis thaliana
gctcgcttgtcccttcg

SEQ ID NO: 105947 - DNA, 17 bp, Arabidopsis thaliana
gctcgcttgtgaaatcg

SEQ ID NO: 105948 - DNA, 17 bp, Arabidopsis thaliana
gctcgcttgtggaaacg

SEQ ID NO: 105949 - DNA, 17 bp, Arabidopsis thaliana
gctcgcttgtggagacg

SEQ ID NO: 105950 - DNA, 17 bp, Arabidopsis thaliana
gctcgctttcaatcttc

SEQ ID NO: 105951 - DNA, 17 bp, Arabidopsis thaliana
gctcgctttcatggtgt

SEQ ID NO: 105952 - DNA, 17 bp, Arabidopsis thaliana
gctcgctttctcagggg

SEQ ID NO: 105953 - DNA, 17 bp, Arabidopsis thaliana
gctcgctttgatggttt

SEQ ID NO: 105954 - DNA, 17 bp, Arabidopsis thaliana
gctcgctttggcccaat

SEQ ID NO: 105955 - DNA, 17 bp, Arabidopsis thaliana
gctcgctttggccccat

SEQ ID NO: 105956 - DNA, 17 bp, Arabidopsis thaliana
gctcgctttgggctttt

SEQ ID NO: 105957 - DNA, 17 bp, Arabidopsis thaliana
gctcgcttttaagatcg

SEQ ID NO: 105958 - DNA, 17 bp, Arabidopsis thaliana
gctcgcttttcgtcgga

SEQ ID NO: 105959 - DNA, 17 bp, Arabidopsis thaliana
gctcgcttttctcatca

SEQ ID NO: 105960 - DNA, 17 bp, Arabidopsis thaliana
gctcgcttttgaatgat

SEQ ID NO: 105961 - DNA, 17 bp, Arabidopsis thaliana
gctcggagataaactga

SEQ ID NO: 105962 - DNA, 17 bp, Arabidopsis thaliana
gctcggatgttgcttat

SEQ ID NO: 105963 - DNA, 17 bp, Arabidopsis thaliana
gctcggattgttgtgag

SEQ ID NO: 105964 - DNA, 17 bp, Arabidopsis thaliana
gctcggattttgattct

SEQ ID NO: 105965 - DNA, 17 bp, Arabidopsis thaliana
gctcggcaagataggtt

SEQ ID NO: 105966 - DNA, 17 bp, Arabidopsis thaliana
gctcggccagtgagacg

SEQ ID NO: 105967 - DNA, 17 bp, Arabidopsis thaliana
gctcggcccatcacacc

SEQ ID NO: 105968 - DNA, 17 bp, Arabidopsis thaliana
gctcggcccatcacagc

SEQ ID NO: 105969 - DNA, 17 bp, Arabidopsis thaliana
gctcggccgtgacttcg

SEQ ID NO: 105970 - DNA, 17 bp, Arabidopsis thaliana
gctcggcctgtgggctc

SEQ ID NO: 105971 - DNA, 17 bp, Arabidopsis thaliana
gctcggcgttttacaca

SEQ ID NO: 105972 - DNA, 17 bp, Arabidopsis thaliana
gctcggctctctgaccg

SEQ ID NO: 105973 - DNA, 17 bp, Arabidopsis thaliana
gctcggctctgcttgct

SEQ ID NO: 105974 - DNA, 17 bp, Arabidopsis thaliana
gctcggctgggctcaaa

SEQ ID NO: 105975 - DNA, 17 bp, Arabidopsis thaliana
gctcggcttgtcccttc

SEQ ID NO: 105976 - DNA, 17 bp, Arabidopsis thaliana
gctcgggatcgacggtg

SEQ ID NO: 105977 - DNA, 17 bp, Arabidopsis thaliana
gctcggggctcccagtt

SEQ ID NO: 105978 - DNA, 17 bp, Arabidopsis thaliana
gctcgggggtcccagct

SEQ ID NO: 105979 - DNA, 17 bp, Arabidopsis thaliana
gctcgggggtcccagtt

SEQ ID NO: 105980 - DNA, 17 bp, Arabidopsis thaliana
gctcgggggtcccgttt

SEQ ID NO: 105981 - DNA, 17 bp, Arabidopsis thaliana
gctcgggggtccgagtt

SEQ ID NO: 105982 - DNA, 17 bp, Arabidopsis thaliana
gctcggggtcccagttc

SEQ ID NO: 105983 - DNA, 17 bp, Arabidopsis thaliana
gctcggggtcgctgccg

SEQ ID NO: 105984 - DNA, 17 bp, Arabidopsis thaliana
gctcgggtcggctgtga

SEQ ID NO: 105985 - DNA, 17 bp, Arabidopsis thaliana
gctcgggttcgattccc

SEQ ID NO: 105986 - DNA, 17 bp, Arabidopsis thaliana
gctcgggttcgtcccgg

SEQ ID NO: 105987 - DNA, 17 bp, Arabidopsis thaliana
gctcgggttggctctgg

SEQ ID NO: 105988 - DNA, 17 bp, Arabidopsis thaliana
gctcggtccatggtctt

SEQ ID NO: 105989 - DNA, 17 bp, Arabidopsis thaliana
gctcggtccgcctttgg

SEQ ID NO: 105990 - DNA, 17 bp, Arabidopsis thaliana
gctcggtgccaggcggg

SEQ ID NO: 105991 - DNA, 17 bp, Arabidopsis thaliana
gctcgtagttgaacctt

SEQ ID NO: 105992 - DNA, 17 bp, Arabidopsis thaliana
gctcgtcacttgtcttc

SEQ ID NO: 105993 - DNA, 17 bp, Arabidopsis thaliana
gctcgtcacttgttttc

SEQ ID NO: 105994 - DNA, 17 bp, Arabidopsis thaliana
gctcgtcagcctttctt

SEQ ID NO: 105995 - DNA, 17 bp, Arabidopsis thaliana
gctcgtcattgtttgtg

SEQ ID NO: 105996 - DNA, 17 bp, Arabidopsis thaliana
gctcgtccactcgggga

SEQ ID NO: 105997 - DNA, 17 bp, Arabidopsis thaliana
gctcgtccgtctcaagt

SEQ ID NO: 105998 - DNA, 17 bp, Arabidopsis thaliana
gctcgtcgagaagacct

SEQ ID NO: 105999 - DNA, 17 bp, Arabidopsis thaliana
gctcgtcgagatctggg

SEQ ID NO: 106000 - DNA, 17 bp, Arabidopsis thaliana
gctcgtcgggagaagtc

SEQ ID NO: 106001 - DNA, 17 bp, Arabidopsis thaliana
gctcgtctagcgatagt

SEQ ID NO: 106002 - DNA, 17 bp, Arabidopsis thaliana
gctcgtctagtggcaaa

SEQ ID NO: 106003 - DNA, 17 bp, Arabidopsis thaliana
gctcgtctcattcacag

SEQ ID NO: 106004 - DNA, 17 bp, Arabidopsis thaliana
gctcgtctgccgcgaat

SEQ ID NO: 106005 - DNA, 17 bp, Arabidopsis thaliana
gctcgtctgcctgggtg

SEQ ID NO: 106006 - DNA, 17 bp, Arabidopsis thaliana
gctcgtcttgacttagc

SEQ ID NO: 106007 - DNA, 17 bp, Arabidopsis thaliana
gctcgtctttcatctac

SEQ ID NO: 106008 - DNA, 17 bp, Arabidopsis thaliana
gctcgtgatcggcttga

SEQ ID NO: 106009 - DNA, 17 bp, Arabidopsis thaliana
gctcgtgccgtaaggtg

SEQ ID NO: 106010 - DNA, 17 bp, Arabidopsis thaliana
gctcgtggagacgtcgc

SEQ ID NO: 106011 - DNA, 17 bp, Arabidopsis thaliana
gctcgtggtcccagtcc

SEQ ID NO: 106012 - DNA, 17 bp, Arabidopsis thaliana
gctcgtggtcccagttc

SEQ ID NO: 106013 - DNA, 17 bp, Arabidopsis thaliana
gctcgtgtgtacaaagt

SEQ ID NO: 106014 - DNA, 17 bp, Arabidopsis thaliana
gctcgttacaatgcgcc

SEQ ID NO: 106015 - DNA, 17 bp, Arabidopsis thaliana
gctcgttagatctctcg

SEQ ID NO: 106016 - DNA, 17 bp, Arabidopsis thaliana
gctcgttcatctgagga

SEQ ID NO: 106017 - DNA, 17 bp, Arabidopsis thaliana
gctcgttcccagctgga

SEQ ID NO: 106018 - DNA, 17 bp, Arabidopsis thaliana
gctcgttctaaaagttt

SEQ ID NO: 106019 - DNA, 17 bp, Arabidopsis thaliana
gctcgttgtccgtgatc

SEQ ID NO: 106020 - DNA, 17 bp, Arabidopsis thaliana
gctcgtttgattctgat

SEQ ID NO: 106021 - DNA, 17 bp, Arabidopsis thaliana
gctcgtttgcggcacat

SEQ ID NO: 106022 - DNA, 17 bp, Arabidopsis thaliana
gctcgttttatcaggaa

SEQ ID NO: 106023 - DNA, 17 bp, Arabidopsis thaliana
gctctaaaatgacagtt

SEQ ID NO: 106024 - DNA, 17 bp, Arabidopsis thaliana
gctctaaacctggtgtt

SEQ ID NO: 106025 - DNA, 17 bp, Arabidopsis thaliana
gctctaaactgaacagc

SEQ ID NO: 106026 - DNA, 17 bp, Arabidopsis thaliana
gctctaaatctaacggg

SEQ ID NO: 106027 - DNA, 17 bp, Arabidopsis thaliana
gctctaagaggtgttgc

SEQ ID NO: 106028 - DNA, 17 bp, Arabidopsis thaliana
gctctaagatagaaggt

SEQ ID NO: 106029 - DNA, 17 bp, Arabidopsis thaliana
gctctaaggacgagtta

SEQ ID NO: 106030 - DNA, 17 bp, Arabidopsis thaliana
gctctaaggttgtgtgt

SEQ ID NO: 106031 - DNA, 17 bp, Arabidopsis thaliana
gctctaagtaaagttga

SEQ ID NO: 106032 - DNA, 17 bp, Arabidopsis thaliana
gctctaagtgttagtgt

SEQ ID NO: 106033 - DNA, 17 bp, Arabidopsis thaliana
gctctaagttgcccatg

SEQ ID NO: 106034 - DNA, 17 bp, Arabidopsis thaliana
gctctaatcagcagtgt

SEQ ID NO: 106035 - DNA, 17 bp, Arabidopsis thaliana
gctctaatgggcttatc

SEQ ID NO: 106036 - DNA, 17 bp, Arabidopsis thaliana
gctctacacgaatcagc

SEQ ID NO: 106037 - DNA, 17 bp, Arabidopsis thaliana
gctctacagtcgtggga

SEQ ID NO: 106038 - DNA, 17 bp, Arabidopsis thaliana
gctctacctaactgagc

SEQ ID NO: 106039 - DNA, 17 bp, Arabidopsis thaliana
gctctacgagatgttag

SEQ ID NO: 106040 - DNA, 17 bp, Arabidopsis thaliana
gctctacgagtcgggtt

SEQ ID NO: 106041 - DNA, 17 bp, Arabidopsis thaliana
gctctacgattgtgatc

SEQ ID NO: 106042 - DNA, 17 bp, Arabidopsis thaliana
gctctacttctgcttct

SEQ ID NO: 106043 - DNA, 17 bp, Arabidopsis thaliana
gctctacttcttggttg

SEQ ID NO: 106044 - DNA, 17 bp, Arabidopsis thaliana
gctctagttggttagca

SEQ ID NO: 106045 - DNA, 17 bp, Arabidopsis thaliana
gctctatataggcccca

SEQ ID NO: 106046 - DNA, 17 bp, Arabidopsis thaliana
gctctatctgtgaagcg

SEQ ID NO: 106047 - DNA, 17 bp, Arabidopsis thaliana
gctctatgatgattctt

SEQ ID NO: 106048 - DNA, 17 bp, Arabidopsis thaliana
gctctatgatgattttt

SEQ ID NO: 106049 - DNA, 17 bp, Arabidopsis thaliana
gctctattagctcagtg

SEQ ID NO: 106050 - DNA, 17 bp, Arabidopsis thaliana
gctctattggaagccga

SEQ ID NO: 106051 - DNA, 17 bp, Arabidopsis thaliana
gctctatttcaagatct

SEQ ID NO: 106052 - DNA, 17 bp, Arabidopsis thaliana
gctctatttggcatgat

SEQ ID NO: 106053 - DNA, 17 bp, Arabidopsis thaliana
gctctatttggcgtgat

SEQ ID NO: 106054 - DNA, 17 bp, Arabidopsis thaliana
gctctatttgttgtcac

SEQ ID NO: 106055 - DNA, 17 bp, Arabidopsis thaliana
gctctcaaagaccttgt

SEQ ID NO: 106056 - DNA, 17 bp, Arabidopsis thaliana
gctctcaaggtcgagtg

SEQ ID NO: 106057 - DNA, 17 bp, Arabidopsis thaliana
gctctcaatcgaaaccg

SEQ ID NO: 106058 - DNA, 17 bp, Arabidopsis thaliana
gctctcagatatgactg

SEQ ID NO: 106059 - DNA, 17 bp, Arabidopsis thaliana
gctctcagattatgcat

SEQ ID NO: 106060 - DNA, 17 bp, Arabidopsis thaliana
gctctcagcagtggacg

SEQ ID NO: 106061 - DNA, 17 bp, Arabidopsis thaliana
gctctcagcagtgggcg

SEQ ID NO: 106062 - DNA, 17 bp, Arabidopsis thaliana
gctctcagccttctgtc

SEQ ID NO: 106063 - DNA, 17 bp, Arabidopsis thaliana
gctctcaggagggatag

SEQ ID NO: 106064 - DNA, 17 bp, Arabidopsis thaliana
gctctcaggctatcttt

SEQ ID NO: 106065 - DNA, 17 bp, Arabidopsis thaliana
gctctcagtatcgtgtt

SEQ ID NO: 106066 - DNA, 17 bp, Arabidopsis thaliana
gctctcataagcctgtt

SEQ ID NO: 106067 - DNA, 17 bp, Arabidopsis thaliana
gctctcatatgctgatg

SEQ ID NO: 106068 - DNA, 17 bp, Arabidopsis thaliana
gctctcatgacaggaat

SEQ ID NO: 106069 - DNA, 17 bp, Arabidopsis thaliana
gctctcatgtgctgatc

SEQ ID NO: 106070 - DNA, 17 bp, Arabidopsis thaliana
gctctcatgtgctgatg

SEQ ID NO: 106071 - DNA, 17 bp, Arabidopsis thaliana
gctctcatgtgcttatg

SEQ ID NO: 106072 - DNA, 17 bp, Arabidopsis thaliana
gctctccacttcgtcaa

SEQ ID NO: 106073 - DNA, 17 bp, Arabidopsis thaliana
gctctccagccttctgt

SEQ ID NO: 106074 - DNA, 17 bp, Arabidopsis thaliana
gctctcccaagctgccg

SEQ ID NO: 106075 - DNA, 17 bp, Arabidopsis thaliana
gctctcccaatctgccg

SEQ ID NO: 106076 - DNA, 17 bp, Arabidopsis thaliana
gctctccgagcagcgca

SEQ ID NO: 106077 - DNA, 17 bp, Arabidopsis thaliana
gctctccgggattactg

SEQ ID NO: 106078 - DNA, 17 bp, Arabidopsis thaliana
gctctccgtaatacaca

SEQ ID NO: 106079 - DNA, 17 bp, Arabidopsis thaliana
gctctcctgtgcagccc

SEQ ID NO: 106080 - DNA, 17 bp, Arabidopsis thaliana
gctctcgaagtgcagcg

SEQ ID NO: 106081 - DNA, 17 bp, Arabidopsis thaliana
gctctcgacggcgattc

SEQ ID NO: 106082 - DNA, 17 bp, Arabidopsis thaliana
gctctcgactaatacat

SEQ ID NO: 106083 - DNA, 17 bp, Arabidopsis thaliana
gctctcgatctgcttct

SEQ ID NO: 106084 - DNA, 17 bp, Arabidopsis thaliana
gctctcgggagataagc

SEQ ID NO: 106085 - DNA, 17 bp, Arabidopsis thaliana
gctctcggtcactttga

SEQ ID NO: 106086 - DNA, 17 bp, Arabidopsis thaliana
gctctcggttttgctcc

SEQ ID NO: 106087 - DNA, 17 bp, Arabidopsis thaliana
gctctcgtagctcagtc

SEQ ID NO: 106088 - DNA, 17 bp, Arabidopsis thaliana
gctctcgtagctcagtt

SEQ ID NO: 106089 - DNA, 17 bp, Arabidopsis thaliana
gctctcgtcatcaacaa

SEQ ID NO: 106090 - DNA, 17 bp, Arabidopsis thaliana
gctctcgtcgctgcgat

SEQ ID NO: 106091 - DNA, 17 bp, Arabidopsis thaliana
gctctctaaccttctgt

SEQ ID NO: 106092 - DNA, 17 bp, Arabidopsis thaliana
gctctctaccctcctct

SEQ ID NO: 106093 - DNA, 17 bp, Arabidopsis thaliana
gctctctaccctcctgc

SEQ ID NO: 106094 - DNA, 17 bp, Arabidopsis thaliana
gctctctacccttctgt

SEQ ID NO: 106095 - DNA, 17 bp, Arabidopsis thaliana
gctctctagccatcttt

SEQ ID NO: 106096 - DNA, 17 bp, Arabidopsis thaliana
gctctctagccctctgt

SEQ ID NO: 106097 - DNA, 17 bp, Arabidopsis thaliana
gctctctagccctcttg

SEQ ID NO: 106098 - DNA, 17 bp, Arabidopsis thaliana
gctctctagccctgtca

SEQ ID NO: 106099 - DNA, 17 bp, Arabidopsis thaliana
gctctctagcccttgtc

SEQ ID NO: 106100 - DNA, 17 bp, Arabidopsis thaliana
gctctctagcctcatct

SEQ ID NO: 106101 - DNA, 17 bp, Arabidopsis thaliana
gctctctagcctcttgt

SEQ ID NO: 106102 - DNA, 17 bp, Arabidopsis thaliana
gctctctagcctgtcat

SEQ ID NO: 106103 - DNA, 17 bp, Arabidopsis thaliana
gctctctagccttatgt

SEQ ID NO: 106104 - DNA, 17 bp, Arabidopsis thaliana
gctctctagccttctca

SEQ ID NO: 106105 - DNA, 17 bp, Arabidopsis thaliana
gctctctagccttctct

SEQ ID NO: 106106 - DNA, 17 bp, Arabidopsis thaliana
gctctctagccttctgc

SEQ ID NO: 106107 - DNA, 17 bp, Arabidopsis thaliana
gctctctagccttctgg

SEQ ID NO: 106108 - DNA, 17 bp, Arabidopsis thaliana
gctctctagccttctgt

SEQ ID NO: 106109 - DNA, 17 bp, Arabidopsis thaliana
gctctctagccttcttc

SEQ ID NO: 106110 - DNA, 17 bp, Arabidopsis thaliana
gctctctagccttcttt

SEQ ID NO: 106111 - DNA, 17 bp, Arabidopsis thaliana
gctctctagccttgtca

SEQ ID NO: 106112 - DNA, 17 bp, Arabidopsis thaliana
gctctctagccttttgt

SEQ ID NO: 106113 - DNA, 17 bp, Arabidopsis thaliana
gctctctagctatctct

SEQ ID NO: 106114 - DNA, 17 bp, Arabidopsis thaliana
gctctctagcttctgcc

SEQ ID NO: 106115 - DNA, 17 bp, Arabidopsis thaliana
gctctctagcttctgtc

SEQ ID NO: 106116 - DNA, 17 bp, Arabidopsis thaliana
gctctctagctttctgt

SEQ ID NO: 106117 - DNA, 17 bp, Arabidopsis thaliana
gctctctaggcttctgt

SEQ ID NO: 106118 - DNA, 17 bp, Arabidopsis thaliana
gctctctagtcttctgt

SEQ ID NO: 106119 - DNA, 17 bp, Arabidopsis thaliana
gctctctagttttctgt

SEQ ID NO: 106120 - DNA, 17 bp, Arabidopsis thaliana
gctctctatacttctgt

SEQ ID NO: 106121 - DNA, 17 bp, Arabidopsis thaliana
gctctctcggcaacgga

SEQ ID NO: 106122 - DNA, 17 bp, Arabidopsis thaliana
gctctctcgggagcttt

SEQ ID NO: 106123 - DNA, 17 bp, Arabidopsis thaliana
gctctctcttgcgattt

SEQ ID NO: 106124 - DNA, 17 bp, Arabidopsis thaliana
gctctctgaatgtcaga

SEQ ID NO: 106125 - DNA, 17 bp, Arabidopsis thaliana
gctctctgatggattcc

SEQ ID NO: 106126 - DNA, 17 bp, Arabidopsis thaliana
gctctctggaactggtg

SEQ ID NO: 106127 - DNA, 17 bp, Arabidopsis thaliana
gctctctgggtccctac

SEQ ID NO: 106128 - DNA, 17 bp, Arabidopsis thaliana
gctctcttcccctgtcg

SEQ ID NO: 106129 - DNA, 17 bp, Arabidopsis thaliana
gctctctttcactaaac

SEQ ID NO: 106130 - DNA, 17 bp, Arabidopsis thaliana
gctctctttctgtcacc

SEQ ID NO: 106131 - DNA, 17 bp, Arabidopsis thaliana
gctctctttgattctat

SEQ ID NO: 106132 - DNA, 17 bp, Arabidopsis thaliana
gctctgaagaaccgtcc

SEQ ID NO: 106133 - DNA, 17 bp, Arabidopsis thaliana
gctctgaataaacggct

SEQ ID NO: 106134 - DNA, 17 bp, Arabidopsis thaliana
gctctgaatggagacgt

SEQ ID NO: 106135 - DNA, 17 bp, Arabidopsis thaliana
gctctgacccctctcag

SEQ ID NO: 106136 - DNA, 17 bp, Arabidopsis thaliana
gctctgaccgcgtgcct

SEQ ID NO: 106137 - DNA, 17 bp, Arabidopsis thaliana
gctctgaccgcttgcct

SEQ ID NO: 106138 - DNA, 17 bp, Arabidopsis thaliana
gctctgacgaagatggt

SEQ ID NO: 106139 - DNA, 17 bp, Arabidopsis thaliana
gctctgactgtgactaa

SEQ ID NO: 106140 - DNA, 17 bp, Arabidopsis thaliana
gctctgacttagatggc

SEQ ID NO: 106141 - DNA, 17 bp, Arabidopsis thaliana
gctctgagacttagtta

SEQ ID NO: 106142 - DNA, 17 bp, Arabidopsis thaliana
gctctgagagctgggct

SEQ ID NO: 106143 - DNA, 17 bp, Arabidopsis thaliana
gctctgaggcttccgtg

SEQ ID NO: 106144 - DNA, 17 bp, Arabidopsis thaliana
gctctgagggctggact

SEQ ID NO: 106145 - DNA, 17 bp, Arabidopsis thaliana
gctctgagggctggctc

SEQ ID NO: 106146 - DNA, 17 bp, Arabidopsis thaliana
gctctgagggctgggct

SEQ ID NO: 106147 - DNA, 17 bp, Arabidopsis thaliana
gctctgagggggctcgg

SEQ ID NO: 106148 - DNA, 17 bp, Arabidopsis thaliana
gctctgagggttgggct

SEQ ID NO: 106149 - DNA, 17 bp, Arabidopsis thaliana
gctctgataccatattg

SEQ ID NO: 106150 - DNA, 17 bp, Arabidopsis thaliana
gctctgatcagttcgtc

SEQ ID NO: 106151 - DNA, 17 bp, Arabidopsis thaliana
gctctgatcatagaccg

SEQ ID NO: 106152 - DNA, 17 bp, Arabidopsis thaliana
gctctgatcatgtccga

SEQ ID NO: 106153 - DNA, 17 bp, Arabidopsis thaliana
gctctgatctccagtcc

SEQ ID NO: 106154 - DNA, 17 bp, Arabidopsis thaliana
gctctgatgattcatga

SEQ ID NO: 106155 - DNA, 17 bp, Arabidopsis thaliana
gctctgattcgtttact

SEQ ID NO: 106156 - DNA, 17 bp, Arabidopsis thaliana
gctctgattctcacgct

SEQ ID NO: 106157 - DNA, 17 bp, Arabidopsis thaliana
gctctgatttgtctatc

SEQ ID NO: 106158 - DNA, 17 bp, Arabidopsis thaliana
gctctgcacgattgttt

SEQ ID NO: 106159 - DNA, 17 bp, Arabidopsis thaliana
gctctgcagagagccct

SEQ ID NO: 106160 - DNA, 17 bp, Arabidopsis thaliana
gctctgcagtgtaccgc

SEQ ID NO: 106161 - DNA, 17 bp, Arabidopsis thaliana
gctctgcccgcgcaggt

SEQ ID NO: 106162 - DNA, 17 bp, Arabidopsis thaliana
gctctgcccgttgctct

SEQ ID NO: 106163 - DNA, 17 bp, Arabidopsis thaliana
gctctgcgacaaaggca

SEQ ID NO: 106164 - DNA, 17 bp, Arabidopsis thaliana
gctctgcgctctgatca

SEQ ID NO: 106165 - DNA, 17 bp, Arabidopsis thaliana
gctctgcggtgttcgaa

SEQ ID NO: 106166 - DNA, 17 bp, Arabidopsis thaliana
gctctgctatgcgctat

SEQ ID NO: 106167 - DNA, 17 bp, Arabidopsis thaliana
gctctgctcaacaagat

SEQ ID NO: 106168 - DNA, 17 bp, Arabidopsis thaliana
gctctgctccaagctat

SEQ ID NO: 106169 - DNA, 17 bp, Arabidopsis thaliana
gctctgctgggataaca

SEQ ID NO: 106170 - DNA, 17 bp, Arabidopsis thaliana
gctctgcttagttacga

SEQ ID NO: 106171 - DNA, 17 bp, Arabidopsis thaliana
gctctggaagcatgtat

SEQ ID NO: 106172 - DNA, 17 bp, Arabidopsis thaliana
gctctggatacattagc

SEQ ID NO: 106173 - DNA, 17 bp, Arabidopsis thaliana
gctctggcaatgctaac

SEQ ID NO: 106174 - DNA, 17 bp, Arabidopsis thaliana
gctctggtacggacaag

SEQ ID NO: 106175 - DNA, 17 bp, Arabidopsis thaliana
gctctggtccaatcgtc

SEQ ID NO: 106176 - DNA, 17 bp, Arabidopsis thaliana
gctctggtccgaaaggg

SEQ ID NO: 106177 - DNA, 17 bp, Arabidopsis thaliana
gctctgtagtttggttg

SEQ ID NO: 106178 - DNA, 17 bp, Arabidopsis thaliana
gctctgtcagcgacggc

SEQ ID NO: 106179 - DNA, 17 bp, Arabidopsis thaliana
gctctgtcggtcggccg

SEQ ID NO: 106180 - DNA, 17 bp, Arabidopsis thaliana
gctctgtgtactacaat

SEQ ID NO: 106181 - DNA, 17 bp, Arabidopsis thaliana
gctctgtttccgtggca

SEQ ID NO: 106182 - DNA, 17 bp, Arabidopsis thaliana
gctctgtttggtgcgtc

SEQ ID NO: 106183 - DNA, 17 bp, Arabidopsis thaliana
gctcttaaccttgtggt

SEQ ID NO: 106184 - DNA, 17 bp, Arabidopsis thaliana
gctcttaagatcgagtt

SEQ ID NO: 106185 - DNA, 17 bp, Arabidopsis thaliana
gctcttaagatcgggtt

SEQ ID NO: 106186 - DNA, 17 bp, Arabidopsis thaliana
gctcttaagtacttttt

SEQ ID NO: 106187 - DNA, 17 bp, Arabidopsis thaliana
gctcttacggcgatttg

SEQ ID NO: 106188 - DNA, 17 bp, Arabidopsis thaliana
gctcttactttcgccgt

SEQ ID NO: 106189 - DNA, 17 bp, Arabidopsis thaliana
gctcttagatgttctgg

SEQ ID NO: 106190 - DNA, 17 bp, Arabidopsis thaliana
gctcttaggagatgtcc

SEQ ID NO: 106191 - DNA, 17 bp, Arabidopsis thaliana
gctcttaggttgctctt

SEQ ID NO: 106192 - DNA, 17 bp, Arabidopsis thaliana
gctcttagtcgcattct

SEQ ID NO: 106193 - DNA, 17 bp, Arabidopsis thaliana
gctcttagttttatctg

SEQ ID NO: 106194 - DNA, 17 bp, Arabidopsis thaliana
gctcttatggctaatag

SEQ ID NO: 106195 - DNA, 17 bp, Arabidopsis thaliana
gctcttatgtgctgatg

SEQ ID NO: 106196 - DNA, 17 bp, Arabidopsis thaliana
gctcttattagctaagt

SEQ ID NO: 106197 - DNA, 17 bp, Arabidopsis thaliana
gctcttattccgattaa

SEQ ID NO: 106198 - DNA, 17 bp, Arabidopsis thaliana
gctcttcaaggtgatat

SEQ ID NO: 106199 - DNA, 17 bp, Arabidopsis thaliana
gctcttcagaccaggtt

SEQ ID NO: 106200 - DNA, 17 bp, Arabidopsis thaliana
gctcttcagcttgttgt

SEQ ID NO: 106201 - DNA, 17 bp, Arabidopsis thaliana
gctcttcatctcctctg

SEQ ID NO: 106202 - DNA, 17 bp, Arabidopsis thaliana
gctcttccaaaggtttt

SEQ ID NO: 106203 - DNA, 17 bp, Arabidopsis thaliana
gctcttccagccgctgg

SEQ ID NO: 106204 - DNA, 17 bp, Arabidopsis thaliana
gctcttcctcgtctaaa

SEQ ID NO: 106205 - DNA, 17 bp, Arabidopsis thaliana
gctcttcgctacgtatt

SEQ ID NO: 106206 - DNA, 17 bp, Arabidopsis thaliana
gctcttctagttatgga

SEQ ID NO: 106207 - DNA, 17 bp, Arabidopsis thaliana
gctcttctcgggaacaa

SEQ ID NO: 106208 - DNA, 17 bp, Arabidopsis thaliana
gctcttctctaggcgat

SEQ ID NO: 106209 - DNA, 17 bp, Arabidopsis thaliana
gctcttcttgggcttgt

SEQ ID NO: 106210 - DNA, 17 bp, Arabidopsis thaliana
gctcttcttgttcgatc

SEQ ID NO: 106211 - DNA, 17 bp, Arabidopsis thaliana
gctcttctttgggcgat

SEQ ID NO: 106212 - DNA, 17 bp, Arabidopsis thaliana
gctcttgccaaacgctt

SEQ ID NO: 106213 - DNA, 17 bp, Arabidopsis thaliana
gctcttgcgaataagtc

SEQ ID NO: 106214 - DNA, 17 bp, Arabidopsis thaliana
gctcttgcgaataattc

SEQ ID NO: 106215 - DNA, 17 bp, Arabidopsis thaliana
gctcttgcgccgaagat

SEQ ID NO: 106216 - DNA, 17 bp, Arabidopsis thaliana
gctcttgctcatcttca

SEQ ID NO: 106217 - DNA, 17 bp, Arabidopsis thaliana
gctcttggctattctct

SEQ ID NO: 106218 - DNA, 17 bp, Arabidopsis thaliana
gctcttgggaggtgctg

SEQ ID NO: 106219 - DNA, 17 bp, Arabidopsis thaliana
gctcttggtccattaca

SEQ ID NO: 106220 - DNA, 17 bp, Arabidopsis thaliana
gctcttggtgcaggtcg

SEQ ID NO: 106221 - DNA, 17 bp, Arabidopsis thaliana
gctcttggttagtcgct

SEQ ID NO: 106222 - DNA, 17 bp, Arabidopsis thaliana
gctcttggttagttgct

SEQ ID NO: 106223 - DNA, 17 bp, Arabidopsis thaliana
gctcttgtagctcagtt

SEQ ID NO: 106224 - DNA, 17 bp, Arabidopsis thaliana
gctcttgtcattctgtc

SEQ ID NO: 106225 - DNA, 17 bp, Arabidopsis thaliana
gctcttgtctccgggag

SEQ ID NO: 106226 - DNA, 17 bp, Arabidopsis thaliana
gctcttgtgtgaccatt

SEQ ID NO: 106227 - DNA, 17 bp, Arabidopsis thaliana
gctcttgttgcgacgga

SEQ ID NO: 106228 - DNA, 17 bp, Arabidopsis thaliana
gctcttgttgcgacgta

SEQ ID NO: 106229 - DNA, 17 bp, Arabidopsis thaliana
gctcttgttgtgtcggt

SEQ ID NO: 106230 - DNA, 17 bp, Arabidopsis thaliana
gctctttagccttctgt

SEQ ID NO: 106231 - DNA, 17 bp, Arabidopsis thaliana
gctctttctctctacaa

SEQ ID NO: 106232 - DNA, 17 bp, Arabidopsis thaliana
gctctttctggagtgtt

SEQ ID NO: 106233 - DNA, 17 bp, Arabidopsis thaliana
gctctttcttgattcta

SEQ ID NO: 106234 - DNA, 17 bp, Arabidopsis thaliana
gctctttgacccggatg

SEQ ID NO: 106235 - DNA, 17 bp, Arabidopsis thaliana
gctctttgatctaaagc

SEQ ID NO: 106236 - DNA, 17 bp, Arabidopsis thaliana
gctctttgcgattggtg

SEQ ID NO: 106237 - DNA, 17 bp, Arabidopsis thaliana
gctctttggagggcttt

SEQ ID NO: 106238 - DNA, 17 bp, Arabidopsis thaliana
gctctttggtgatggcg

SEQ ID NO: 106239 - DNA, 17 bp, Arabidopsis thaliana
gctctttgtcgctaaga

SEQ ID NO: 106240 - DNA, 17 bp, Arabidopsis thaliana
gctcttttcctgtgatc

SEQ ID NO: 106241 - DNA, 17 bp, Arabidopsis thaliana
gctcttttgctgtcagg

SEQ ID NO: 106242 - DNA, 17 bp, Arabidopsis thaliana
gctcttttgctttgtga

SEQ ID NO: 106243 - DNA, 17 bp, Arabidopsis thaliana
gctcttttggcggcttt

SEQ ID NO: 106244 - DNA, 17 bp, Arabidopsis thaliana
gctcttttgggcgatga

SEQ ID NO: 106245 - DNA, 17 bp, Arabidopsis thaliana
gctgaaaaagggtgtga

SEQ ID NO: 106246 - DNA, 17 bp, Arabidopsis thaliana
gctgaaaaatgctctga

SEQ ID NO: 106247 - DNA, 17 bp, Arabidopsis thaliana
gctgaaaatgctggcca

SEQ ID NO: 106248 - DNA, 17 bp, Arabidopsis thaliana
gctgaaaatttttttgg

SEQ ID NO: 106249 - DNA, 17 bp, Arabidopsis thaliana
gctgaaaccagcgactg

SEQ ID NO: 106250 - DNA, 17 bp, Arabidopsis thaliana
gctgaaacgattctcac

SEQ ID NO: 106251 - DNA, 17 bp, Arabidopsis thaliana
gctgaaactaaatacgg

SEQ ID NO: 106252 - DNA, 17 bp, Arabidopsis thaliana
gctgaaactctcttaag

SEQ ID NO: 106253 - DNA, 17 bp, Arabidopsis thaliana
gctgaaagtgacagtga

SEQ ID NO: 106254 - DNA, 17 bp, Arabidopsis thaliana
gctgaaatccaaggatc

SEQ ID NO: 106255 - DNA, 17 bp, Arabidopsis thaliana
gctgaaatgaatctgtg

SEQ ID NO: 106256 - DNA, 17 bp, Arabidopsis thaliana
gctgaaatgtttttcta

SEQ ID NO: 106257 - DNA, 17 bp, Arabidopsis thaliana
gctgaacaagcgacagg

SEQ ID NO: 106258 - DNA, 17 bp, Arabidopsis thaliana
gctgaacaggagagaca

SEQ ID NO: 106259 - DNA, 17 bp, Arabidopsis thaliana
gctgaaccaatggtgtg

SEQ ID NO: 106260 - DNA, 17 bp, Arabidopsis thaliana
gctgaaccagcgacaag

SEQ ID NO: 106261 - DNA, 17 bp, Arabidopsis thaliana
gctgaaccagcgacaga

SEQ ID NO: 106262 - DNA, 17 bp, Arabidopsis thaliana
gctgaaccagcgacagg

SEQ ID NO: 106263 - DNA, 17 bp, Arabidopsis thaliana
gctgaaccagcgactga

SEQ ID NO: 106264 - DNA, 17 bp, Arabidopsis thaliana
gctgaaccgcttcatat

SEQ ID NO: 106265 - DNA, 17 bp, Arabidopsis thaliana
gctgaaccggttgaggt

SEQ ID NO: 106266 - DNA, 17 bp, Arabidopsis thaliana
gctgaacctgcggaagg

SEQ ID NO: 106267 - DNA, 17 bp, Arabidopsis thaliana
gctgaaccttgggatgg

SEQ ID NO: 106268 - DNA, 17 bp, Arabidopsis thaliana
gctgaacgtcttctcgg

SEQ ID NO: 106269 - DNA, 17 bp, Arabidopsis thaliana
gctgaacttggattagt

SEQ ID NO: 106270 - DNA, 17 bp, Arabidopsis thaliana
gctgaacttgtacagtc

SEQ ID NO: 106271 - DNA, 17 bp, Arabidopsis thaliana
gctgaagacaagtcaat

SEQ ID NO: 106272 - DNA, 17 bp, Arabidopsis thaliana
gctgaagatggctaagg

SEQ ID NO: 106273 - DNA, 17 bp, Arabidopsis thaliana
gctgaagcccgtaaacc

SEQ ID NO: 106274 - DNA, 17 bp, Arabidopsis thaliana
gctgaagcctggctact

SEQ ID NO: 106275 - DNA, 17 bp, Arabidopsis thaliana
gctgaagcgtcctcagc

SEQ ID NO: 106276 - DNA, 17 bp, Arabidopsis thaliana
gctgaagcgtgtgggcc

SEQ ID NO: 106277 - DNA, 17 bp, Arabidopsis thaliana
gctgaagcgtgtgggcg

SEQ ID NO: 106278 - DNA, 17 bp, Arabidopsis thaliana
gctgaagcttgggtgaa

SEQ ID NO: 106279 - DNA, 17 bp, Arabidopsis thaliana
gctgaaggtgcggctgg

SEQ ID NO: 106280 - DNA, 17 bp, Arabidopsis thaliana
gctgaagtccatatgag

SEQ ID NO: 106281 - DNA, 17 bp, Arabidopsis thaliana
gctgaagtcctttgtga

SEQ ID NO: 106282 - DNA, 17 bp, Arabidopsis thaliana
gctgaagtgccaagcta

SEQ ID NO: 106283 - DNA, 17 bp, Arabidopsis thaliana
gctgaagtgccaagctg

SEQ ID NO: 106284 - DNA, 17 bp, Arabidopsis thaliana
gctgaagtggttctgac

SEQ ID NO: 106285 - DNA, 17 bp, Arabidopsis thaliana
gctgaataagcagttgc

SEQ ID NO: 106286 - DNA, 17 bp, Arabidopsis thaliana
gctgaatatgactttct

SEQ ID NO: 106287 - DNA, 17 bp, Arabidopsis thaliana
gctgaatattgtgtgcg

SEQ ID NO: 106288 - DNA, 17 bp, Arabidopsis thaliana
gctgaatccagcgacat

SEQ ID NO: 106289 - DNA, 17 bp, Arabidopsis thaliana
gctgaatccagcgatgt

SEQ ID NO: 106290 - DNA, 17 bp, Arabidopsis thaliana
gctgaatccatgggcag

SEQ ID NO: 106291 - DNA, 17 bp, Arabidopsis thaliana
gctgaatctcagtggat

SEQ ID NO: 106292 - DNA, 17 bp, Arabidopsis thaliana
gctgaatctcgtctgaa

SEQ ID NO: 106293 - DNA, 17 bp, Arabidopsis thaliana
gctgaattagcgacagg

SEQ ID NO: 106294 - DNA, 17 bp, Arabidopsis thaliana
gctgacaagcgcaaggt

SEQ ID NO: 106295 - DNA, 17 bp, Arabidopsis thaliana
gctgacacagacaaata

SEQ ID NO: 106296 - DNA, 17 bp, Arabidopsis thaliana
gctgacacagggtgaac

SEQ ID NO: 106297 - DNA, 17 bp, Arabidopsis thaliana
gctgacacagggtgagc

SEQ ID NO: 106298 - DNA, 17 bp, Arabidopsis thaliana
gctgacacagggtgtgc

SEQ ID NO: 106299 - DNA, 17 bp, Arabidopsis thaliana
gctgacagaggcttcga

SEQ ID NO: 106300 - DNA, 17 bp, Arabidopsis thaliana
gctgacagagtcatcag

SEQ ID NO: 106301 - DNA, 17 bp, Arabidopsis thaliana
gctgacatcaatcctgc

SEQ ID NO: 106302 - DNA, 17 bp, Arabidopsis thaliana
gctgacatcgtagatcg

SEQ ID NO: 106303 - DNA, 17 bp, Arabidopsis thaliana
gctgaccaagcttcctt

SEQ ID NO: 106304 - DNA, 17 bp, Arabidopsis thaliana
gctgaccacgggttgcc

SEQ ID NO: 106305 - DNA, 17 bp, Arabidopsis thaliana
gctgaccgacaattctt

SEQ ID NO: 106306 - DNA, 17 bp, Arabidopsis thaliana
gctgaccggatcagccg

SEQ ID NO: 106307 - DNA, 17 bp, Arabidopsis thaliana
gctgaccggattagtcg

SEQ ID NO: 106308 - DNA, 17 bp, Arabidopsis thaliana
gctgacctcccgggaag

SEQ ID NO: 106309 - DNA, 17 bp, Arabidopsis thaliana
gctgacgagatatgcaa

SEQ ID NO: 106310 - DNA, 17 bp, Arabidopsis thaliana
gctgacgaggtatgacg

SEQ ID NO: 106311 - DNA, 17 bp, Arabidopsis thaliana
gctgacgcctgcccagt

SEQ ID NO: 106312 - DNA, 17 bp, Arabidopsis thaliana
gctgacgcctgcccggt

SEQ ID NO: 106313 - DNA, 17 bp, Arabidopsis thaliana
gctgacggattagttcg

SEQ ID NO: 106314 - DNA, 17 bp, Arabidopsis thaliana
gctgacgggtttagtcc

SEQ ID NO: 106315 - DNA, 17 bp, Arabidopsis thaliana
gctgacgtccatgtact

SEQ ID NO: 106316 - DNA, 17 bp, Arabidopsis thaliana
gctgacgtgacatgatg

SEQ ID NO: 106317 - DNA, 17 bp, Arabidopsis thaliana
gctgacgtgccggagtg

SEQ ID NO: 106318 - DNA, 17 bp, Arabidopsis thaliana
gctgacgtggctgtatc

SEQ ID NO: 106319 - DNA, 17 bp, Arabidopsis thaliana
gctgactaaagcgttgg

SEQ ID NO: 106320 - DNA, 17 bp, Arabidopsis thaliana
gctgactaaagtcataa

SEQ ID NO: 106321 - DNA, 17 bp, Arabidopsis thaliana
gctgactacaaagcgtt

SEQ ID NO: 106322 - DNA, 17 bp, Arabidopsis thaliana
gctgactacggtatccg

SEQ ID NO: 106323 - DNA, 17 bp, Arabidopsis thaliana
gctgactacttagcccg

SEQ ID NO: 106324 - DNA, 17 bp, Arabidopsis thaliana
gctgactagaatagtgg

SEQ ID NO: 106325 - DNA, 17 bp, Arabidopsis thaliana
gctgactagtccgaaag

SEQ ID NO: 106326 - DNA, 17 bp, Arabidopsis thaliana
gctgactccaaagccac

SEQ ID NO: 106327 - DNA, 17 bp, Arabidopsis thaliana
gctgactccgatttcag

SEQ ID NO: 106328 - DNA, 17 bp, Arabidopsis thaliana
gctgactctatatcgat

SEQ ID NO: 106329 - DNA, 17 bp, Arabidopsis thaliana
gctgactcttcgtgtgt

SEQ ID NO: 106330 - DNA, 17 bp, Arabidopsis thaliana
gctgactggtcgagtgg

SEQ ID NO: 106331 - DNA, 17 bp, Arabidopsis thaliana
gctgactgtccatccgc

SEQ ID NO: 106332 - DNA, 17 bp, Arabidopsis thaliana
gctgactgtctatccgc

SEQ ID NO: 106333 - DNA, 17 bp, Arabidopsis thaliana
gctgactgttcgacgcc

SEQ ID NO: 106334 - DNA, 17 bp, Arabidopsis thaliana
gctgacttaccgtcgtt

SEQ ID NO: 106335 - DNA, 17 bp, Arabidopsis thaliana
gctgacttacggtatgt

SEQ ID NO: 106336 - DNA, 17 bp, Arabidopsis thaliana
gctgacttattcaccaa

SEQ ID NO: 106337 - DNA, 17 bp, Arabidopsis thaliana
gctgacttgtgtacgta

SEQ ID NO: 106338 - DNA, 17 bp, Arabidopsis thaliana
gctgagaagttgccaga

SEQ ID NO: 106339 - DNA, 17 bp, Arabidopsis thaliana
gctgagaatcgtctctc

SEQ ID NO: 106340 - DNA, 17 bp, Arabidopsis thaliana
gctgagaatcgtttctg

SEQ ID NO: 106341 - DNA, 17 bp, Arabidopsis thaliana
gctgagaattaatggtg

SEQ ID NO: 106342 - DNA, 17 bp, Arabidopsis thaliana
gctgagacgagggagtg

SEQ ID NO: 106343 - DNA, 17 bp, Arabidopsis thaliana
gctgagagtgatccggt

SEQ ID NO: 106344 - DNA, 17 bp, Arabidopsis thaliana
gctgagagtgatccgtg

SEQ ID NO: 106345 - DNA, 17 bp, Arabidopsis thaliana
gctgagatccagttcag

SEQ ID NO: 106346 - DNA, 17 bp, Arabidopsis thaliana
gctgagatggctgagtg

SEQ ID NO: 106347 - DNA, 17 bp, Arabidopsis thaliana
gctgagattatcgttgt

SEQ ID NO: 106348 - DNA, 17 bp, Arabidopsis thaliana
gctgagattcctgacaa

SEQ ID NO: 106349 - DNA, 17 bp, Arabidopsis thaliana
gctgagatttcctggtg

SEQ ID NO: 106350 - DNA, 17 bp, Arabidopsis thaliana
gctgagatttcctggtt

SEQ ID NO: 106351 - DNA, 17 bp, Arabidopsis thaliana
gctgagattttgcagaa

SEQ ID NO: 106352 - DNA, 17 bp, Arabidopsis thaliana
gctgagcaggagtagac

SEQ ID NO: 106353 - DNA, 17 bp, Arabidopsis thaliana
gctgagccggaggtagg

SEQ ID NO: 106354 - DNA, 17 bp, Arabidopsis thaliana
gctgagccgtttccagg

SEQ ID NO: 106355 - DNA, 17 bp, Arabidopsis thaliana
gctgagcgatttgtctg

SEQ ID NO: 106356 - DNA, 17 bp, Arabidopsis thaliana
gctgagctacgagaaca

SEQ ID NO: 106357 - DNA, 17 bp, Arabidopsis thaliana
gctgagctgagtgaact

SEQ ID NO: 106358 - DNA, 17 bp, Arabidopsis thaliana
gctgagcttatttctgt

SEQ ID NO: 106359 - DNA, 17 bp, Arabidopsis thaliana
gctgagcttatttcttt

SEQ ID NO: 106360 - DNA, 17 bp, Arabidopsis thaliana
gctgagcttgagcttcg

SEQ ID NO: 106361 - DNA, 17 bp, Arabidopsis thaliana
gctgaggaagagttacg

SEQ ID NO: 106362 - DNA, 17 bp, Arabidopsis thaliana
gctgaggcacagggtcc

SEQ ID NO: 106363 - DNA, 17 bp, Arabidopsis thaliana
gctgaggcacagggtct

SEQ ID NO: 106364 - DNA, 17 bp, Arabidopsis thaliana
gctgaggccttccgtgc

SEQ ID NO: 106365 - DNA, 17 bp, Arabidopsis thaliana
gctgaggcggggacgcg

SEQ ID NO: 106366 - DNA, 17 bp, Arabidopsis thaliana
gctgaggcttaccttgg

SEQ ID NO: 106367 - DNA, 17 bp, Arabidopsis thaliana
gctgagggattacgagt

SEQ ID NO: 106368 - DNA, 17 bp, Arabidopsis thaliana
gctgagggcacgtctgc

SEQ ID NO: 106369 - DNA, 17 bp, Arabidopsis thaliana
gctgagggcccaggagt

SEQ ID NO: 106370 - DNA, 17 bp, Arabidopsis thaliana
gctgaggtttcctggtg

SEQ ID NO: 106371 - DNA, 17 bp, Arabidopsis thaliana
gctgagtaaaccctagc

SEQ ID NO: 106372 - DNA, 17 bp, Arabidopsis thaliana
gctgagtccttttcggt

SEQ ID NO: 106373 - DNA, 17 bp, Arabidopsis thaliana
gctgagtcttcgcgggt

SEQ ID NO: 106374 - DNA, 17 bp, Arabidopsis thaliana
gctgagtcttcttcggt

SEQ ID NO: 106375 - DNA, 17 bp, Arabidopsis thaliana
gctgagtcttgcagttc

SEQ ID NO: 106376 - DNA, 17 bp, Arabidopsis thaliana
gctgagtgaccaatacg

SEQ ID NO: 106377 - DNA, 17 bp, Arabidopsis thaliana
gctgagtgagtctttct

SEQ ID NO: 106378 - DNA, 17 bp, Arabidopsis thaliana
gctgagtgatagggttc

SEQ ID NO: 106379 - DNA, 17 bp, Arabidopsis thaliana
gctgagtgctgacacta

SEQ ID NO: 106380 - DNA, 17 bp, Arabidopsis thaliana
gctgagtggctaaaacc

SEQ ID NO: 106381 - DNA, 17 bp, Arabidopsis thaliana
gctgagtgtgctagtgc

SEQ ID NO: 106382 - DNA, 17 bp, Arabidopsis thaliana
gctgagttacgatatgt

SEQ ID NO: 106383 - DNA, 17 bp, Arabidopsis thaliana
gctgagttacggtatgt

SEQ ID NO: 106384 - DNA, 17 bp, Arabidopsis thaliana
gctgagttacggtattt

SEQ ID NO: 106385 - DNA, 17 bp, Arabidopsis thaliana
gctgagttgagttgatc

SEQ ID NO: 106386 - DNA, 17 bp, Arabidopsis thaliana
gctgagttttctgagga

SEQ ID NO: 106387 - DNA, 17 bp, Arabidopsis thaliana
gctgataaccaagatgt

SEQ ID NO: 106388 - DNA, 17 bp, Arabidopsis thaliana
gctgataacgcgaagcc

SEQ ID NO: 106389 - DNA, 17 bp, Arabidopsis thaliana
gctgatacaagggtttt

SEQ ID NO: 106390 - DNA, 17 bp, Arabidopsis thaliana
gctgatagaggatgttg

SEQ ID NO: 106391 - DNA, 17 bp, Arabidopsis thaliana
gctgatattattaaccg

SEQ ID NO: 106392 - DNA, 17 bp, Arabidopsis thaliana
gctgatcaggatactcg

SEQ ID NO: 106393 - DNA, 17 bp, Arabidopsis thaliana
gctgatcagtgaccact

SEQ ID NO: 106394 - DNA, 17 bp, Arabidopsis thaliana
gctgatcgctggcgact

SEQ ID NO: 106395 - DNA, 17 bp, Arabidopsis thaliana
gctgatcggccatattg

SEQ ID NO: 106396 - DNA, 17 bp, Arabidopsis thaliana
gctgatcgtatttgcgt

SEQ ID NO: 106397 - DNA, 17 bp, Arabidopsis thaliana
gctgatctggtaaacaa

SEQ ID NO: 106398 - DNA, 17 bp, Arabidopsis thaliana
gctgatcttgcgattgg

SEQ ID NO: 106399 - DNA, 17 bp, Arabidopsis thaliana
gctgatctttgacgagc

SEQ ID NO: 106400 - DNA, 17 bp, Arabidopsis thaliana
gctgatctttgtagcga

SEQ ID NO: 106401 - DNA, 17 bp, Arabidopsis thaliana
gctgatgatttgggttt

SEQ ID NO: 106402 - DNA, 17 bp, Arabidopsis thaliana
gctgatggacatggtct

SEQ ID NO: 106403 - DNA, 17 bp, Arabidopsis thaliana
gctgatggtttgtccgc

SEQ ID NO: 106404 - DNA, 17 bp, Arabidopsis thaliana
gctgatgtccggatcat

SEQ ID NO: 106405 - DNA, 17 bp, Arabidopsis thaliana
gctgatgtcggcgctga

SEQ ID NO: 106406 - DNA, 17 bp, Arabidopsis thaliana
gctgatgtgatgataca

SEQ ID NO: 106407 - DNA, 17 bp, Arabidopsis thaliana
gctgatgtggcattgac

SEQ ID NO: 106408 - DNA, 17 bp, Arabidopsis thaliana
gctgatgtgtcaagctg

SEQ ID NO: 106409 - DNA, 17 bp, Arabidopsis thaliana
gctgatgtgtcaagtta

SEQ ID NO: 106410 - DNA, 17 bp, Arabidopsis thaliana
gctgatgttgttcgaag

SEQ ID NO: 106411 - DNA, 17 bp, Arabidopsis thaliana
gctgattaagtcttacg

SEQ ID NO: 106412 - DNA, 17 bp, Arabidopsis thaliana
gctgattatcagatgtg

SEQ ID NO: 106413 - DNA, 17 bp, Arabidopsis thaliana
gctgattcacagagata

SEQ ID NO: 106414 - DNA, 17 bp, Arabidopsis thaliana
gctgattcatcagatga

SEQ ID NO: 106415 - DNA, 17 bp, Arabidopsis thaliana
gctgattccaggtgtag

SEQ ID NO: 106416 - DNA, 17 bp, Arabidopsis thaliana
gctgattcggtttggtt

SEQ ID NO: 106417 - DNA, 17 bp, Arabidopsis thaliana
gctgattctatgggtgg

SEQ ID NO: 106418 - DNA, 17 bp, Arabidopsis thaliana
gctgattctggaccgtc

SEQ ID NO: 106419 - DNA, 17 bp, Arabidopsis thaliana
gctgattcttcgccggt

SEQ ID NO: 106420 - DNA, 17 bp, Arabidopsis thaliana
gctgattgacgccagac

SEQ ID NO: 106421 - DNA, 17 bp, Arabidopsis thaliana
gctgattggcgggatcc

SEQ ID NO: 106422 - DNA, 17 bp, Arabidopsis thaliana
gctgattgttattagaa

SEQ ID NO: 106423 - DNA, 17 bp, Arabidopsis thaliana
gctgatttctggtggag

SEQ ID NO: 106424 - DNA, 17 bp, Arabidopsis thaliana
gctgatttgattggtct

SEQ ID NO: 106425 - DNA, 17 bp, Arabidopsis thaliana
gctgatttgtctggtta

SEQ ID NO: 106426 - DNA, 17 bp, Arabidopsis thaliana
gctgattttagattcag

SEQ ID NO: 106427 - DNA, 17 bp, Arabidopsis thaliana
gctgattttagtcacca

SEQ ID NO: 106428 - DNA, 17 bp, Arabidopsis thaliana
gctgcaaagtgttggac

SEQ ID NO: 106429 - DNA, 17 bp, Arabidopsis thaliana
gctgcaaatagtgagac

SEQ ID NO: 106430 - DNA, 17 bp, Arabidopsis thaliana
gctgcaaggcttacctg

SEQ ID NO: 106431 - DNA, 17 bp, Arabidopsis thaliana
gctgcaagtagttgcgg

SEQ ID NO: 106432 - DNA, 17 bp, Arabidopsis thaliana
gctgcaagtgcggcaac

SEQ ID NO: 106433 - DNA, 17 bp, Arabidopsis thaliana
gctgcaatatgtgctaa

SEQ ID NO: 106434 - DNA, 17 bp, Arabidopsis thaliana
gctgcacagtttggttt

SEQ ID NO: 106435 - DNA, 17 bp, Arabidopsis thaliana
gctgcacgtctgcctgg

SEQ ID NO: 106436 - DNA, 17 bp, Arabidopsis thaliana
gctgcactagtttgtgg

SEQ ID NO: 106437 - DNA, 17 bp, Arabidopsis thaliana
gctgcacttgtgttcta

SEQ ID NO: 106438 - DNA, 17 bp, Arabidopsis thaliana
gctgcagacgacttttg

SEQ ID NO: 106439 - DNA, 17 bp, Arabidopsis thaliana
gctgcagagattcataa

SEQ ID NO: 106440 - DNA, 17 bp, Arabidopsis thaliana
gctgcagccaccgccga

SEQ ID NO: 106441 - DNA, 17 bp, Arabidopsis thaliana
gctgcagcgaggttgcg

SEQ ID NO: 106442 - DNA, 17 bp, Arabidopsis thaliana
gctgcagctaagggcat

SEQ ID NO: 106443 - DNA, 17 bp, Arabidopsis thaliana
gctgcagctgatacggt

SEQ ID NO: 106444 - DNA, 17 bp, Arabidopsis thaliana
gctgcagctgttgcgtg

SEQ ID NO: 106445 - DNA, 17 bp, Arabidopsis thaliana
gctgcagcttaggacaa

SEQ ID NO: 106446 - DNA, 17 bp, Arabidopsis thaliana
gctgcagcttcgcacga

SEQ ID NO: 106447 - DNA, 17 bp, Arabidopsis thaliana
gctgcaggaatctggga

SEQ ID NO: 106448 - DNA, 17 bp, Arabidopsis thaliana
gctgcatagaactcggt

SEQ ID NO: 106449 - DNA, 17 bp, Arabidopsis thaliana
gctgcatatctcacacg

SEQ ID NO: 106450 - DNA, 17 bp, Arabidopsis thaliana
gctgcatggatctgaag

SEQ ID NO: 106451 - DNA, 17 bp, Arabidopsis thaliana
gctgcatgttccgtgat

SEQ ID NO: 106452 - DNA, 17 bp, Arabidopsis thaliana
gctgcattcttatactt

SEQ ID NO: 106453 - DNA, 17 bp, Arabidopsis thaliana
gctgcattcttgtactt

SEQ ID NO: 106454 - DNA, 17 bp, Arabidopsis thaliana
gctgcattggattgact

SEQ ID NO: 106455 - DNA, 17 bp, Arabidopsis thaliana
gctgcatttctaactac

SEQ ID NO: 106456 - DNA, 17 bp, Arabidopsis thaliana
gctgcatttttaactac

SEQ ID NO: 106457 - DNA, 17 bp, Arabidopsis thaliana
gctgccaaaaacgtaag

SEQ ID NO: 106458 - DNA, 17 bp, Arabidopsis thaliana
gctgccacaagccagtt

SEQ ID NO: 106459 - DNA, 17 bp, Arabidopsis thaliana
gctgccacgatccactg

SEQ ID NO: 106460 - DNA, 17 bp, Arabidopsis thaliana
gctgccctatcaacttt

SEQ ID NO: 106461 - DNA, 17 bp, Arabidopsis thaliana
gctgccgagtgaaaacc

SEQ ID NO: 106462 - DNA, 17 bp, Arabidopsis thaliana
gctgccgctggatttta

SEQ ID NO: 106463 - DNA, 17 bp, Arabidopsis thaliana
gctgccgtgacctggtc

SEQ ID NO: 106464 - DNA, 17 bp, Arabidopsis thaliana
gctgccgtgactgagcg

SEQ ID NO: 106465 - DNA, 17 bp, Arabidopsis thaliana
gctgccgtgatcggcgt

SEQ ID NO: 106466 - DNA, 17 bp, Arabidopsis thaliana
gctgccgtgatcgggcg

SEQ ID NO: 106467 - DNA, 17 bp, Arabidopsis thaliana
gctgccgtgatcgtggt

SEQ ID NO: 106468 - DNA, 17 bp, Arabidopsis thaliana
gctgcctacagtctggt

SEQ ID NO: 106469 - DNA, 17 bp, Arabidopsis thaliana
gctgcctataggagccc

SEQ ID NO: 106470 - DNA, 17 bp, Arabidopsis thaliana
gctgcctataggaggcc

SEQ ID NO: 106471 - DNA, 17 bp, Arabidopsis thaliana
gctgcctatgattttcg

SEQ ID NO: 106472 - DNA, 17 bp, Arabidopsis thaliana
gctgcctcgttacaatc

SEQ ID NO: 106473 - DNA, 17 bp, Arabidopsis thaliana
gctgcctgagagtccga

SEQ ID NO: 106474 - DNA, 17 bp, Arabidopsis thaliana
gctgcctggatcggtga

SEQ ID NO: 106475 - DNA, 17 bp, Arabidopsis thaliana
gctgccttccttggatg

SEQ ID NO: 106476 - DNA, 17 bp, Arabidopsis thaliana
gctgccttcgggaacgc

SEQ ID NO: 106477 - DNA, 17 bp, Arabidopsis thaliana
gctgcgaatgtcggtca

SEQ ID NO: 106478 - DNA, 17 bp, Arabidopsis thaliana
gctgcgaatgtgtttat

SEQ ID NO: 106479 - DNA, 17 bp, Arabidopsis thaliana
gctgcgacaagcaccga

SEQ ID NO: 106480 - DNA, 17 bp, Arabidopsis thaliana
gctgcgacaagcaccgg

SEQ ID NO: 106481 - DNA, 17 bp, Arabidopsis thaliana
gctgcgacagcgacagc

SEQ ID NO: 106482 - DNA, 17 bp, Arabidopsis thaliana
gctgcgaccggtaactg

SEQ ID NO: 106483 - DNA, 17 bp, Arabidopsis thaliana
gctgcgacgaggtaggg

SEQ ID NO: 106484 - DNA, 17 bp, Arabidopsis thaliana
gctgcgactctttcatt

SEQ ID NO: 106485 - DNA, 17 bp, Arabidopsis thaliana
gctgcgactgctgtttt

SEQ ID NO: 106486 - DNA, 17 bp, Arabidopsis thaliana
gctgcgactggtaacta

SEQ ID NO: 106487 - DNA, 17 bp, Arabidopsis thaliana
gctgcgactggtaactg

SEQ ID NO: 106488 - DNA, 17 bp, Arabidopsis thaliana
gctgcgagaagtccact

SEQ ID NO: 106489 - DNA, 17 bp, Arabidopsis thaliana
gctgcgagctggaggga

SEQ ID NO: 106490 - DNA, 17 bp, Arabidopsis thaliana
gctgcgatcagatccag

SEQ ID NO: 106491 - DNA, 17 bp, Arabidopsis thaliana
gctgcgatcggtcgctc

SEQ ID NO: 106492 - DNA, 17 bp, Arabidopsis thaliana
gctgcgatcggtcggtc

SEQ ID NO: 106493 - DNA, 17 bp, Arabidopsis thaliana
gctgcgatgatagggtt

SEQ ID NO: 106494 - DNA, 17 bp, Arabidopsis thaliana
gctgcgattgatctaaa

SEQ ID NO: 106495 - DNA, 17 bp, Arabidopsis thaliana
gctgcgattgctgtttt

SEQ ID NO: 106496 - DNA, 17 bp, Arabidopsis thaliana
gctgcgcctcctccgac

SEQ ID NO: 106497 - DNA, 17 bp, Arabidopsis thaliana
gctgcggaccatctgcc

SEQ ID NO: 106498 - DNA, 17 bp, Arabidopsis thaliana
gctgcggaccatctgcg

SEQ ID NO: 106499 - DNA, 17 bp, Arabidopsis thaliana
gctgcggactaactgcg

SEQ ID NO: 106500 - DNA, 17 bp, Arabidopsis thaliana
gctgcgggaggatttga

SEQ ID NO: 106501 - DNA, 17 bp, Arabidopsis thaliana
gctgcgggttcgagccc

SEQ ID NO: 106502 - DNA, 17 bp, Arabidopsis thaliana
gctgcgggttgaccttc

SEQ ID NO: 106503 - DNA, 17 bp, Arabidopsis thaliana
gctgcggtctaatttat

SEQ ID NO: 106504 - DNA, 17 bp, Arabidopsis thaliana
gctgcggttgcaatggg

SEQ ID NO: 106505 - DNA, 17 bp, Arabidopsis thaliana
gctgcggttgcggttta

SEQ ID NO: 106506 - DNA, 17 bp, Arabidopsis thaliana
gctgcggttgctgagga

SEQ ID NO: 106507 - DNA, 17 bp, Arabidopsis thaliana
gctgcggttttctttta

SEQ ID NO: 106508 - DNA, 17 bp, Arabidopsis thaliana
gctgcggttttgggctt

SEQ ID NO: 106509 - DNA, 17 bp, Arabidopsis thaliana
gctgcggttttgtgtga

SEQ ID NO: 106510 - DNA, 17 bp, Arabidopsis thaliana
gctgcgtcacagatttc

SEQ ID NO: 106511 - DNA, 17 bp, Arabidopsis thaliana
gctgcgtcagctacctg

SEQ ID NO: 106512 - DNA, 17 bp, Arabidopsis thaliana
gctgcgtcctcagcgac

SEQ ID NO: 106513 - DNA, 17 bp, Arabidopsis thaliana
gctgcgtcgagccaaag

SEQ ID NO: 106514 - DNA, 17 bp, Arabidopsis thaliana
gctgcgtgtaatctgcc

SEQ ID NO: 106515 - DNA, 17 bp, Arabidopsis thaliana
gctgcgtttgcgggtgg

SEQ ID NO: 106516 - DNA, 17 bp, Arabidopsis thaliana
gctgctaaccctgggtt

SEQ ID NO: 106517 - DNA, 17 bp, Arabidopsis thaliana
gctgctaataccccgta

SEQ ID NO: 106518 - DNA, 17 bp, Arabidopsis thaliana
gctgctaatgctgctcg

SEQ ID NO: 106519 - DNA, 17 bp, Arabidopsis thaliana
gctgctacagaggttac

SEQ ID NO: 106520 - DNA, 17 bp, Arabidopsis thaliana
gctgctagcttcctctt

SEQ ID NO: 106521 - DNA, 17 bp, Arabidopsis thaliana
gctgctaggcgaagcgg

SEQ ID NO: 106522 - DNA, 17 bp, Arabidopsis thaliana
gctgctaggttgattgg

SEQ ID NO: 106523 - DNA, 17 bp, Arabidopsis thaliana
gctgctataggaacatg

SEQ ID NO: 106524 - DNA, 17 bp, Arabidopsis thaliana
gctgctatggtgaaatt

SEQ ID NO: 106525 - DNA, 17 bp, Arabidopsis thaliana
gctgctatttcatggag

SEQ ID NO: 106526 - DNA, 17 bp, Arabidopsis thaliana
gctgctatttcatgtag

SEQ ID NO: 106527 - DNA, 17 bp, Arabidopsis thaliana
gctgctcaagaaggtgt

SEQ ID NO: 106528 - DNA, 17 bp, Arabidopsis thaliana
gctgctcacggttattt

SEQ ID NO: 106529 - DNA, 17 bp, Arabidopsis thaliana
gctgctcagatatccga

SEQ ID NO: 106530 - DNA, 17 bp, Arabidopsis thaliana
gctgctccggtacaagc

SEQ ID NO: 106531 - DNA, 17 bp, Arabidopsis thaliana
gctgctccggtcttatg

SEQ ID NO: 106532 - DNA, 17 bp, Arabidopsis thaliana
gctgctcctccagtaga

SEQ ID NO: 106533 - DNA, 17 bp, Arabidopsis thaliana
gctgctcgacttgtacc

SEQ ID NO: 106534 - DNA, 17 bp, Arabidopsis thaliana
gctgctcgagtaactgg

SEQ ID NO: 106535 - DNA, 17 bp, Arabidopsis thaliana
gctgctcggagccctag

SEQ ID NO: 106536 - DNA, 17 bp, Arabidopsis thaliana
gctgctctcagtatcgt

SEQ ID NO: 106537 - DNA, 17 bp, Arabidopsis thaliana
gctgctgaatccatgga

SEQ ID NO: 106538 - DNA, 17 bp, Arabidopsis thaliana
gctgctgaatccatggg

SEQ ID NO: 106539 - DNA, 17 bp, Arabidopsis thaliana
gctgctgaatcttctac

SEQ ID NO: 106540 - DNA, 17 bp, Arabidopsis thaliana
gctgctgaggttgggta

SEQ ID NO: 106541 - DNA, 17 bp, Arabidopsis thaliana
gctgctgagtcttcttt

SEQ ID NO: 106542 - DNA, 17 bp, Arabidopsis thaliana
gctgctgatgtttgatc

SEQ ID NO: 106543 - DNA, 17 bp, Arabidopsis thaliana
gctgctgcaatatgtgc

SEQ ID NO: 106544 - DNA, 17 bp, Arabidopsis thaliana
gctgctgccctaagtct

SEQ ID NO: 106545 - DNA, 17 bp, Arabidopsis thaliana
gctgctgcgtttggttg

SEQ ID NO: 106546 - DNA, 17 bp, Arabidopsis thaliana
gctgctgctacttggtc

SEQ ID NO: 106547 - DNA, 17 bp, Arabidopsis thaliana
gctgctgctctggcttt

SEQ ID NO: 106548 - DNA, 17 bp, Arabidopsis thaliana
gctgctgctgccctaag

SEQ ID NO: 106549 - DNA, 17 bp, Arabidopsis thaliana
gctgctggacattgcac

SEQ ID NO: 106550 - DNA, 17 bp, Arabidopsis thaliana
gctgctgggctcggggg

SEQ ID NO: 106551 - DNA, 17 bp, Arabidopsis thaliana
gctgctgggtttagacc

SEQ ID NO: 106552 - DNA, 17 bp, Arabidopsis thaliana
gctgctggtgcaactgg

SEQ ID NO: 106553 - DNA, 17 bp, Arabidopsis thaliana
gctgcttaagcaaagct

SEQ ID NO: 106554 - DNA, 17 bp, Arabidopsis thaliana
gctgcttagtggttatg

SEQ ID NO: 106555 - DNA, 17 bp, Arabidopsis thaliana
gctgcttcattaaactg

SEQ ID NO: 106556 - DNA, 17 bp, Arabidopsis thaliana
gctgcttccagcttttg

SEQ ID NO: 106557 - DNA, 17 bp, Arabidopsis thaliana
gctgcttcttagaggga

SEQ ID NO: 106558 - DNA, 17 bp, Arabidopsis thaliana
gctgcttgcagagagaa

SEQ ID NO: 106559 - DNA, 17 bp, Arabidopsis thaliana
gctgctttgctagaacc

SEQ ID NO: 106560 - DNA, 17 bp, Arabidopsis thaliana
gctgctttggccgagtg

SEQ ID NO: 106561 - DNA, 17 bp, Arabidopsis thaliana
gctgctttgttgagccg

SEQ ID NO: 106562 - DNA, 17 bp, Arabidopsis thaliana
gctgctttgttgccatc

SEQ ID NO: 106563 - DNA, 17 bp, Arabidopsis thaliana
gctgctttgttgctttc

SEQ ID NO: 106564 - DNA, 17 bp, Arabidopsis thaliana
gctgctttgttttcctc

SEQ ID NO: 106565 - DNA, 17 bp, Arabidopsis thaliana
gctgcttttgggaagta

SEQ ID NO: 106566 - DNA, 17 bp, Arabidopsis thaliana
gctgcttttggtcgctg

SEQ ID NO: 106567 - DNA, 17 bp, Arabidopsis thaliana
gctgcttttgtcgctaa

SEQ ID NO: 106568 - DNA, 17 bp, Arabidopsis thaliana
gctggaacgacgccggc

SEQ ID NO: 106569 - DNA, 17 bp, Arabidopsis thaliana
gctggaagagcaccgca

SEQ ID NO: 106570 - DNA, 17 bp, Arabidopsis thaliana
gctggaaggactgacgg

SEQ ID NO: 106571 - DNA, 17 bp, Arabidopsis thaliana
gctggaagtcctcgtgt

SEQ ID NO: 106572 - DNA, 17 bp, Arabidopsis thaliana
gctggaagtggattcag

SEQ ID NO: 106573 - DNA, 17 bp, Arabidopsis thaliana
gctggaatagctcagat

SEQ ID NO: 106574 - DNA, 17 bp, Arabidopsis thaliana
gctggaatagctcagct

SEQ ID NO: 106575 - DNA, 17 bp, Arabidopsis thaliana
gctggaatagctcagtt

SEQ ID NO: 106576 - DNA, 17 bp, Arabidopsis thaliana
gctggaatagttcagtt

SEQ ID NO: 106577 - DNA, 17 bp, Arabidopsis thaliana
gctggaatatggtcgtg

SEQ ID NO: 106578 - DNA, 17 bp, Arabidopsis thaliana
gctggaatcgctcagtt

SEQ ID NO: 106579 - DNA, 17 bp, Arabidopsis thaliana
gctggaattaccgcggc

SEQ ID NO: 106580 - DNA, 17 bp, Arabidopsis thaliana
gctggaattggcctcgt

SEQ ID NO: 106581 - DNA, 17 bp, Arabidopsis thaliana
gctggaattggctacac

SEQ ID NO: 106582 - DNA, 17 bp, Arabidopsis thaliana
gctggacaagcccatgg

SEQ ID NO: 106583 - DNA, 17 bp, Arabidopsis thaliana
gctggacagggtggtcg

SEQ ID NO: 106584 - DNA, 17 bp, Arabidopsis thaliana
gctggaccaaaactggt

SEQ ID NO: 106585 - DNA, 17 bp, Arabidopsis thaliana
gctggacgactgacagt

SEQ ID NO: 106586 - DNA, 17 bp, Arabidopsis thaliana
gctggactcattcttgt

SEQ ID NO: 106587 - DNA, 17 bp, Arabidopsis thaliana
gctggacttggtctcac

SEQ ID NO: 106588 - DNA, 17 bp, Arabidopsis thaliana
gctggagattgtgatat

SEQ ID NO: 106589 - DNA, 17 bp, Arabidopsis thaliana
gctggagctcggacgcg

SEQ ID NO: 106590 - DNA, 17 bp, Arabidopsis thaliana
gctggaggagctgaggc

SEQ ID NO: 106591 - DNA, 17 bp, Arabidopsis thaliana
gctggaggccgagcgga

SEQ ID NO: 106592 - DNA, 17 bp, Arabidopsis thaliana
gctggaggctggagcca

SEQ ID NO: 106593 - DNA, 17 bp, Arabidopsis thaliana
gctggaggtagggtcca

SEQ ID NO: 106594 - DNA, 17 bp, Arabidopsis thaliana
gctggaggtgcacaaaa

SEQ ID NO: 106595 - DNA, 17 bp, Arabidopsis thaliana
gctggagtaactcagtt

SEQ ID NO: 106596 - DNA, 17 bp, Arabidopsis thaliana
gctggagtagctcagta

SEQ ID NO: 106597 - DNA, 17 bp, Arabidopsis thaliana
gctggagtagctcagtc

SEQ ID NO: 106598 - DNA, 17 bp, Arabidopsis thaliana
gctggagtagctcagtt

SEQ ID NO: 106599 - DNA, 17 bp, Arabidopsis thaliana
gctggagtatctaagtt

SEQ ID NO: 106600 - DNA, 17 bp, Arabidopsis thaliana
gctggagtatctcagtt

SEQ ID NO: 106601 - DNA, 17 bp, Arabidopsis thaliana
gctggagtcgctcagtt

SEQ ID NO: 106602 - DNA, 17 bp, Arabidopsis thaliana
gctggagtgattacggg

SEQ ID NO: 106603 - DNA, 17 bp, Arabidopsis thaliana
gctggatccaacgacag

SEQ ID NO: 106604 - DNA, 17 bp, Arabidopsis thaliana
gctggatccagcgacag

SEQ ID NO: 106605 - DNA, 17 bp, Arabidopsis thaliana
gctggatccagcgacat

SEQ ID NO: 106606 - DNA, 17 bp, Arabidopsis thaliana
gctggatctgatcacag

SEQ ID NO: 106607 - DNA, 17 bp, Arabidopsis thaliana
gctggatctgatcgcag

SEQ ID NO: 106608 - DNA, 17 bp, Arabidopsis thaliana
gctggatgttgctgaag

SEQ ID NO: 106609 - DNA, 17 bp, Arabidopsis thaliana
gctggattatgacgaac

SEQ ID NO: 106610 - DNA, 17 bp, Arabidopsis thaliana
gctggattatgactgaa

SEQ ID NO: 106611 - DNA, 17 bp, Arabidopsis thaliana
gctggattcagcgacag

SEQ ID NO: 106612 - DNA, 17 bp, Arabidopsis thaliana
gctggattcagcgagcg

SEQ ID NO: 106613 - DNA, 17 bp, Arabidopsis thaliana
gctggattcttggtacc

SEQ ID NO: 106614 - DNA, 17 bp, Arabidopsis thaliana
gctggattgctgaggtg

SEQ ID NO: 106615 - DNA, 17 bp, Arabidopsis thaliana
gctggattggcggtcag

SEQ ID NO: 106616 - DNA, 17 bp, Arabidopsis thaliana
gctggatttggcgaagt

SEQ ID NO: 106617 - DNA, 17 bp, Arabidopsis thaliana
gctggattttgtgtttt

SEQ ID NO: 106618 - DNA, 17 bp, Arabidopsis thaliana
gctggattttgtttttc

SEQ ID NO: 106619 - DNA, 17 bp, Arabidopsis thaliana
gctggcaccagacttgc

SEQ ID NO: 106620 - DNA, 17 bp, Arabidopsis thaliana
gctggcaggatactcgg

SEQ ID NO: 106621 - DNA, 17 bp, Arabidopsis thaliana
gctggcgactgaaacca

SEQ ID NO: 106622 - DNA, 17 bp, Arabidopsis thaliana
gctggcgactgaaagca

SEQ ID NO: 106623 - DNA, 17 bp, Arabidopsis thaliana
gctggcgactgaaatta

SEQ ID NO: 106624 - DNA, 17 bp, Arabidopsis thaliana
gctggcgactgtcgtta

SEQ ID NO: 106625 - DNA, 17 bp, Arabidopsis thaliana
gctggcgagtagggctt

SEQ ID NO: 106626 - DNA, 17 bp, Arabidopsis thaliana
gctggcgggtgaccggg

SEQ ID NO: 106627 - DNA, 17 bp, Arabidopsis thaliana
gctggcgtacccaagcg

SEQ ID NO: 106628 - DNA, 17 bp, Arabidopsis thaliana
gctggctacttggcgac

SEQ ID NO: 106629 - DNA, 17 bp, Arabidopsis thaliana
gctggctcattttgaca

SEQ ID NO: 106630 - DNA, 17 bp, Arabidopsis thaliana
gctggctcgaagacgat

SEQ ID NO: 106631 - DNA, 17 bp, Arabidopsis thaliana
gctggctcggactccca

SEQ ID NO: 106632 - DNA, 17 bp, Arabidopsis thaliana
gctggctcgttcccagc

SEQ ID NO: 106633 - DNA, 17 bp, Arabidopsis thaliana
gctggctctcagcagtg

SEQ ID NO: 106634 - DNA, 17 bp, Arabidopsis thaliana
gctggcttgacaaggct

SEQ ID NO: 106635 - DNA, 17 bp, Arabidopsis thaliana
gctggcttgctgggtgg

SEQ ID NO: 106636 - DNA, 17 bp, Arabidopsis thaliana
gctgggaaatgtgagac

SEQ ID NO: 106637 - DNA, 17 bp, Arabidopsis thaliana
gctgggaatgctagtaa

SEQ ID NO: 106638 - DNA, 17 bp, Arabidopsis thaliana
gctgggagtgtcgagga

SEQ ID NO: 106639 - DNA, 17 bp, Arabidopsis thaliana
gctgggagtgtgaatat

SEQ ID NO: 106640 - DNA, 17 bp, Arabidopsis thaliana
gctgggatccctcgcgg

SEQ ID NO: 106641 - DNA, 17 bp, Arabidopsis thaliana
gctgggatccgacttcc

SEQ ID NO: 106642 - DNA, 17 bp, Arabidopsis thaliana
gctgggatgacagatcg

SEQ ID NO: 106643 - DNA, 17 bp, Arabidopsis thaliana
gctgggattagaccgtc

SEQ ID NO: 106644 - DNA, 17 bp, Arabidopsis thaliana
gctgggattctctcgac

SEQ ID NO: 106645 - DNA, 17 bp, Arabidopsis thaliana
gctgggccgaaactggt

SEQ ID NO: 106646 - DNA, 17 bp, Arabidopsis thaliana
gctgggccgttttccac

SEQ ID NO: 106647 - DNA, 17 bp, Arabidopsis thaliana
gctgggctcagtttgaa

SEQ ID NO: 106648 - DNA, 17 bp, Arabidopsis thaliana
gctgggctcgggggtcc

SEQ ID NO: 106649 - DNA, 17 bp, Arabidopsis thaliana
gctgggctcgggggtgg

SEQ ID NO: 106650 - DNA, 17 bp, Arabidopsis thaliana
gctggggaatcccatga

SEQ ID NO: 106651 - DNA, 17 bp, Arabidopsis thaliana
gctggggactgaccaag

SEQ ID NO: 106652 - DNA, 17 bp, Arabidopsis thaliana
gctggggactgaccagg

SEQ ID NO: 106653 - DNA, 17 bp, Arabidopsis thaliana
gctggggggattacgag

SEQ ID NO: 106654 - DNA, 17 bp, Arabidopsis thaliana
gctggggtggtcccagt

SEQ ID NO: 106655 - DNA, 17 bp, Arabidopsis thaliana
gctgggtaaagactggt

SEQ ID NO: 106656 - DNA, 17 bp, Arabidopsis thaliana
gctggtaacaatcacat

SEQ ID NO: 106657 - DNA, 17 bp, Arabidopsis thaliana
gctggtacgtttccggc

SEQ ID NO: 106658 - DNA, 17 bp, Arabidopsis thaliana
gctggtagtgaggagac

SEQ ID NO: 106659 - DNA, 17 bp, Arabidopsis thaliana
gctggtatgatcgcatc

SEQ ID NO: 106660 - DNA, 17 bp, Arabidopsis thaliana
gctggtcaggatactcg

SEQ ID NO: 106661 - DNA, 17 bp, Arabidopsis thaliana
gctggtcataacccggc

SEQ ID NO: 106662 - DNA, 17 bp, Arabidopsis thaliana
gctggtccctggtgata

SEQ ID NO: 106663 - DNA, 17 bp, Arabidopsis thaliana
gctggtccgagaggatg

SEQ ID NO: 106664 - DNA, 17 bp, Arabidopsis thaliana
gctggtccgcctttggt

SEQ ID NO: 106665 - DNA, 17 bp, Arabidopsis thaliana
gctggtcctaaatcgcg

SEQ ID NO: 106666 - DNA, 17 bp, Arabidopsis thaliana
gctggtcctaattcgcg

SEQ ID NO: 106667 - DNA, 17 bp, Arabidopsis thaliana
gctggtcgcagtcgctg

SEQ ID NO: 106668 - DNA, 17 bp, Arabidopsis thaliana
gctggtcgctgactaag

SEQ ID NO: 106669 - DNA, 17 bp, Arabidopsis thaliana
gctggtcgctgtcgctg

SEQ ID NO: 106670 - DNA, 17 bp, Arabidopsis thaliana
gctggtcgggttcagct

SEQ ID NO: 106671 - DNA, 17 bp, Arabidopsis thaliana
gctggtctttgtcgttc

SEQ ID NO: 106672 - DNA, 17 bp, Arabidopsis thaliana
gctggtgacaaatagac

SEQ ID NO: 106673 - DNA, 17 bp, Arabidopsis thaliana
gctggtgacttaaataa

SEQ ID NO: 106674 - DNA, 17 bp, Arabidopsis thaliana
gctggtgacttaaatta

SEQ ID NO: 106675 - DNA, 17 bp, Arabidopsis thaliana
gctggtgatctatctat

SEQ ID NO: 106676 - DNA, 17 bp, Arabidopsis thaliana
gctggtgcagcagggag

SEQ ID NO: 106677 - DNA, 17 bp, Arabidopsis thaliana
gctggtgcgtaggcaaa

SEQ ID NO: 106678 - DNA, 17 bp, Arabidopsis thaliana
gctggtgctgagattat

SEQ ID NO: 106679 - DNA, 17 bp, Arabidopsis thaliana
gctggtgctttttgtgg

SEQ ID NO: 106680 - DNA, 17 bp, Arabidopsis thaliana
gctggtggactcagggt

SEQ ID NO: 106681 - DNA, 17 bp, Arabidopsis thaliana
gctggtggagatggacc

SEQ ID NO: 106682 - DNA, 17 bp, Arabidopsis thaliana
gctggtgtaccaaatta

SEQ ID NO: 106683 - DNA, 17 bp, Arabidopsis thaliana
gctggtgtagctcaggg

SEQ ID NO: 106684 - DNA, 17 bp, Arabidopsis thaliana
gctggtgtattctcagg

SEQ ID NO: 106685 - DNA, 17 bp, Arabidopsis thaliana
gctggttaccgtttgac

SEQ ID NO: 106686 - DNA, 17 bp, Arabidopsis thaliana
gctggttaggatactcg

SEQ ID NO: 106687 - DNA, 17 bp, Arabidopsis thaliana
gctggttcaaatccagc

SEQ ID NO: 106688 - DNA, 17 bp, Arabidopsis thaliana
gctggttcactttctct

SEQ ID NO: 106689 - DNA, 17 bp, Arabidopsis thaliana
gctggttcgatcgatcc

SEQ ID NO: 106690 - DNA, 17 bp, Arabidopsis thaliana
gctggttcgattccggc

SEQ ID NO: 106691 - DNA, 17 bp, Arabidopsis thaliana
gctggttcgatttctgc

SEQ ID NO: 106692 - DNA, 17 bp, Arabidopsis thaliana
gctggttcggttccggc

SEQ ID NO: 106693 - DNA, 17 bp, Arabidopsis thaliana
gctggttcgttatctct

SEQ ID NO: 106694 - DNA, 17 bp, Arabidopsis thaliana
gctggttcgttcccggc

SEQ ID NO: 106695 - DNA, 17 bp, Arabidopsis thaliana
gctggttcgttccctcc

SEQ ID NO: 106696 - DNA, 17 bp, Arabidopsis thaliana
gctggttcgtttccggc

SEQ ID NO: 106697 - DNA, 17 bp, Arabidopsis thaliana
gctggttctgctgatta

SEQ ID NO: 106698 - DNA, 17 bp, Arabidopsis thaliana
gctggttctggtgtaag

SEQ ID NO: 106699 - DNA, 17 bp, Arabidopsis thaliana
gctggttctttccggca

SEQ ID NO: 106700 - DNA, 17 bp, Arabidopsis thaliana
gctggttgactttctct

SEQ ID NO: 106701 - DNA, 17 bp, Arabidopsis thaliana
gctggttgccggtttga

SEQ ID NO: 106702 - DNA, 17 bp, Arabidopsis thaliana
gctggttgcggttctag

SEQ ID NO: 106703 - DNA, 17 bp, Arabidopsis thaliana
gctggttggtcttcttg

SEQ ID NO: 106704 - DNA, 17 bp, Arabidopsis thaliana
gctggttggttggttgg

SEQ ID NO: 106705 - DNA, 17 bp, Arabidopsis thaliana
gctggtttcagcgatta

SEQ ID NO: 106706 - DNA, 17 bp, Arabidopsis thaliana
gctggtttgtggtgaat

SEQ ID NO: 106707 - DNA, 17 bp, Arabidopsis thaliana
gctggtttgtggttaat

SEQ ID NO: 106708 - DNA, 17 bp, Arabidopsis thaliana
gctgtaaaccagcgggt

SEQ ID NO: 106709 - DNA, 17 bp, Arabidopsis thaliana
gctgtaactgtgttgac

SEQ ID NO: 106710 - DNA, 17 bp, Arabidopsis thaliana
gctgtaagactacttgc

SEQ ID NO: 106711 - DNA, 17 bp, Arabidopsis thaliana
gctgtaagtgccttttg

SEQ ID NO: 106712 - DNA, 17 bp, Arabidopsis thaliana
gctgtaagttgcgtcga

SEQ ID NO: 106713 - DNA, 17 bp, Arabidopsis thaliana
gctgtaattggtcgctg

SEQ ID NO: 106714 - DNA, 17 bp, Arabidopsis thaliana
gctgtacaaactatacc

SEQ ID NO: 106715 - DNA, 17 bp, Arabidopsis thaliana
gctgtacatcggatcga

SEQ ID NO: 106716 - DNA, 17 bp, Arabidopsis thaliana
gctgtagacgtacggtg

SEQ ID NO: 106717 - DNA, 17 bp, Arabidopsis thaliana
gctgtagatgggatcga

SEQ ID NO: 106718 - DNA, 17 bp, Arabidopsis thaliana
gctgtagccaacacaga

SEQ ID NO: 106719 - DNA, 17 bp, Arabidopsis thaliana
gctgtagctggtatgct

SEQ ID NO: 106720 - DNA, 17 bp, Arabidopsis thaliana
gctgtagtagctcagtt

SEQ ID NO: 106721 - DNA, 17 bp, Arabidopsis thaliana
gctgtagttgtgttggc

SEQ ID NO: 106722 - DNA, 17 bp, Arabidopsis thaliana
gctgtataccacgggtt

SEQ ID NO: 106723 - DNA, 17 bp, Arabidopsis thaliana
gctgtatagcacgggtt

SEQ ID NO: 106724 - DNA, 17 bp, Arabidopsis thaliana
gctgtatccctacatag

SEQ ID NO: 106725 - DNA, 17 bp, Arabidopsis thaliana
gctgtatctcataggag

SEQ ID NO: 106726 - DNA, 17 bp, Arabidopsis thaliana
gctgtattcctctatgg

SEQ ID NO: 106727 - DNA, 17 bp, Arabidopsis thaliana
gctgtattttcgtttgc

SEQ ID NO: 106728 - DNA, 17 bp, Arabidopsis thaliana
gctgtcaaagcgggctg

SEQ ID NO: 106729 - DNA, 17 bp, Arabidopsis thaliana
gctgtcacagcgattaa

SEQ ID NO: 106730 - DNA, 17 bp, Arabidopsis thaliana
gctgtcaccattctgca

SEQ ID NO: 106731 - DNA, 17 bp, Arabidopsis thaliana
gctgtcactaagtcaca

SEQ ID NO: 106732 - DNA, 17 bp, Arabidopsis thaliana
gctgtcagcggactgct

SEQ ID NO: 106733 - DNA, 17 bp, Arabidopsis thaliana
gctgtccatttttgcaa

SEQ ID NO: 106734 - DNA, 17 bp, Arabidopsis thaliana
gctgtcctggtgagata

SEQ ID NO: 106735 - DNA, 17 bp, Arabidopsis thaliana
gctgtcctgttgcggca

SEQ ID NO: 106736 - DNA, 17 bp, Arabidopsis thaliana
gctgtcgatcctgagct

SEQ ID NO: 106737 - DNA, 17 bp, Arabidopsis thaliana
gctgtcgcatcctgtag

SEQ ID NO: 106738 - DNA, 17 bp, Arabidopsis thaliana
gctgtcgctgatcgctg

SEQ ID NO: 106739 - DNA, 17 bp, Arabidopsis thaliana
gctgtcgctggtcgctg

SEQ ID NO: 106740 - DNA, 17 bp, Arabidopsis thaliana
gctgtcgctggttgctg

SEQ ID NO: 106741 - DNA, 17 bp, Arabidopsis thaliana
gctgtcgctgtcgctgg

SEQ ID NO: 106742 - DNA, 17 bp, Arabidopsis thaliana
gctgtcgggcttgcgga

SEQ ID NO: 106743 - DNA, 17 bp, Arabidopsis thaliana
gctgtcgtcagctcgtg

SEQ ID NO: 106744 - DNA, 17 bp, Arabidopsis thaliana
gctgtctacgagtcgga

SEQ ID NO: 106745 - DNA, 17 bp, Arabidopsis thaliana
gctgtctacgagtcggg

SEQ ID NO: 106746 - DNA, 17 bp, Arabidopsis thaliana
gctgtctccgtcatgga

SEQ ID NO: 106747 - DNA, 17 bp, Arabidopsis thaliana
gctgtctcgcctgatgg

SEQ ID NO: 106748 - DNA, 17 bp, Arabidopsis thaliana
gctgtctctgttggcgc

SEQ ID NO: 106749 - DNA, 17 bp, Arabidopsis thaliana
gctgtctgcctgggtgt

SEQ ID NO: 106750 - DNA, 17 bp, Arabidopsis thaliana
gctgtctgtgattgctc

SEQ ID NO: 106751 - DNA, 17 bp, Arabidopsis thaliana
gctgtcttagctcagtg

SEQ ID NO: 106752 - DNA, 17 bp, Arabidopsis thaliana
gctgtcttgggccttga

SEQ ID NO: 106753 - DNA, 17 bp, Arabidopsis thaliana
gctgtctttgggctttc

SEQ ID NO: 106754 - DNA, 17 bp, Arabidopsis thaliana
gctgtgaaactgcgaat

SEQ ID NO: 106755 - DNA, 17 bp, Arabidopsis thaliana
gctgtgaatagtgacca

SEQ ID NO: 106756 - DNA, 17 bp, Arabidopsis thaliana
gctgtgaatccatctgg

SEQ ID NO: 106757 - DNA, 17 bp, Arabidopsis thaliana
gctgtgactccaagaag

SEQ ID NO: 106758 - DNA, 17 bp, Arabidopsis thaliana
gctgtgatcaggtccgc

SEQ ID NO: 106759 - DNA, 17 bp, Arabidopsis thaliana
gctgtgatttcggtcct

SEQ ID NO: 106760 - DNA, 17 bp, Arabidopsis thaliana
gctgtgatttgcggtcg

SEQ ID NO: 106761 - DNA, 17 bp, Arabidopsis thaliana
gctgtgcagaacaagcg

SEQ ID NO: 106762 - DNA, 17 bp, Arabidopsis thaliana
gctgtgcagtgaagcgt

SEQ ID NO: 106763 - DNA, 17 bp, Arabidopsis thaliana
gctgtgcattggtcggc

SEQ ID NO: 106764 - DNA, 17 bp, Arabidopsis thaliana
gctgtgcgtatcgaccc

SEQ ID NO: 106765 - DNA, 17 bp, Arabidopsis thaliana
gctgtgctgcgaactga

SEQ ID NO: 106766 - DNA, 17 bp, Arabidopsis thaliana
gctgtggatggatgaac

SEQ ID NO: 106767 - DNA, 17 bp, Arabidopsis thaliana
gctgtggattcattgtg

SEQ ID NO: 106768 - DNA, 17 bp, Arabidopsis thaliana
gctgtggtcaaggccag

SEQ ID NO: 106769 - DNA, 17 bp, Arabidopsis thaliana
gctgtggtcaaggccgg

SEQ ID NO: 106770 - DNA, 17 bp, Arabidopsis thaliana
gctgtggtttagagcct

SEQ ID NO: 106771 - DNA, 17 bp, Arabidopsis thaliana
gctgtggtttcaggcct

SEQ ID NO: 106772 - DNA, 17 bp, Arabidopsis thaliana
gctgtggtttcagggct

SEQ ID NO: 106773 - DNA, 17 bp, Arabidopsis thaliana
gctgtggtttcgctgga

SEQ ID NO: 106774 - DNA, 17 bp, Arabidopsis thaliana
gctgtggtttcggacct

SEQ ID NO: 106775 - DNA, 17 bp, Arabidopsis thaliana
gctgtggtttcgggcct

SEQ ID NO: 106776 - DNA, 17 bp, Arabidopsis thaliana
gctgtgtactaactgca

SEQ ID NO: 106777 - DNA, 17 bp, Arabidopsis thaliana
gctgtgtgaggacatcg

SEQ ID NO: 106778 - DNA, 17 bp, Arabidopsis thaliana
gctgtgttggccttttg

SEQ ID NO: 106779 - DNA, 17 bp, Arabidopsis thaliana
gctgtgttgttcgtttg

SEQ ID NO: 106780 - DNA, 17 bp, Arabidopsis thaliana
gctgtgtttccatatgt

SEQ ID NO: 106781 - DNA, 17 bp, Arabidopsis thaliana
gctgttaagacgaactg

SEQ ID NO: 106782 - DNA, 17 bp, Arabidopsis thaliana
gctgttaagctcggtca

SEQ ID NO: 106783 - DNA, 17 bp, Arabidopsis thaliana
gctgttaattttggcga

SEQ ID NO: 106784 - DNA, 17 bp, Arabidopsis thaliana
gctgttaccattcagac

SEQ ID NO: 106785 - DNA, 17 bp, Arabidopsis thaliana
gctgttagctggagcgg

SEQ ID NO: 106786 - DNA, 17 bp, Arabidopsis thaliana
gctgttaggaccttgtc

SEQ ID NO: 106787 - DNA, 17 bp, Arabidopsis thaliana
gctgttagggatttggt

SEQ ID NO: 106788 - DNA, 17 bp, Arabidopsis thaliana
gctgttattgttcatcc

SEQ ID NO: 106789 - DNA, 17 bp, Arabidopsis thaliana
gctgttattttttggcg

SEQ ID NO: 106790 - DNA, 17 bp, Arabidopsis thaliana
gctgttcatcgacgaga

SEQ ID NO: 106791 - DNA, 17 bp, Arabidopsis thaliana
gctgttccgtcgactgc

SEQ ID NO: 106792 - DNA, 17 bp, Arabidopsis thaliana
gctgttcgaatctctca

SEQ ID NO: 106793 - DNA, 17 bp, Arabidopsis thaliana
gctgttcgtcaggattc

SEQ ID NO: 106794 - DNA, 17 bp, Arabidopsis thaliana
gctgttctggacacagg

SEQ ID NO: 106795 - DNA, 17 bp, Arabidopsis thaliana
gctgttctgtggtttgt

SEQ ID NO: 106796 - DNA, 17 bp, Arabidopsis thaliana
gctgttgaaattgttga

SEQ ID NO: 106797 - DNA, 17 bp, Arabidopsis thaliana
gctgttgcaggtgctgg

SEQ ID NO: 106798 - DNA, 17 bp, Arabidopsis thaliana
gctgttgccttaagtcc

SEQ ID NO: 106799 - DNA, 17 bp, Arabidopsis thaliana
gctgttgccttaagtct

SEQ ID NO: 106800 - DNA, 17 bp, Arabidopsis thaliana
gctgttggcccaatggt

SEQ ID NO: 106801 - DNA, 17 bp, Arabidopsis thaliana
gctgtttaagtcgtgat

SEQ ID NO: 106802 - DNA, 17 bp, Arabidopsis thaliana
gctgtttatgtgaaatg

SEQ ID NO: 106803 - DNA, 17 bp, Arabidopsis thaliana
gctgtttcatctgaggt

SEQ ID NO: 106804 - DNA, 17 bp, Arabidopsis thaliana
gctgtttcgttccgacg

SEQ ID NO: 106805 - DNA, 17 bp, Arabidopsis thaliana
gctgtttgacctaatca

SEQ ID NO: 106806 - DNA, 17 bp, Arabidopsis thaliana
gctgtttgcgagggaga

SEQ ID NO: 106807 - DNA, 17 bp, Arabidopsis thaliana
gctgtttgcgagggata

SEQ ID NO: 106808 - DNA, 17 bp, Arabidopsis thaliana
gctgtttgcgagggtta

SEQ ID NO: 106809 - DNA, 17 bp, Arabidopsis thaliana
gctgttttaccaatatg

SEQ ID NO: 106810 - DNA, 17 bp, Arabidopsis thaliana
gctgttttcctccatgg

SEQ ID NO: 106811 - DNA, 17 bp, Arabidopsis thaliana
gctgtttttctctgctg

SEQ ID NO: 106812 - DNA, 17 bp, Arabidopsis thaliana
gctgttttttcttggcc

SEQ ID NO: 106813 - DNA, 17 bp, Arabidopsis thaliana
gcttaaaccacaacccg

SEQ ID NO: 106814 - DNA, 17 bp, Arabidopsis thaliana
gcttaaaccgcaacccg

SEQ ID NO: 106815 - DNA, 17 bp, Arabidopsis thaliana
gcttaaactggggcgat

SEQ ID NO: 106816 - DNA, 17 bp, Arabidopsis thaliana
gcttaactgcgagattg

SEQ ID NO: 106817 - DNA, 17 bp, Arabidopsis thaliana
gcttaactgcggagttc

SEQ ID NO: 106818 - DNA, 17 bp, Arabidopsis thaliana
gcttaacttagtgactt

SEQ ID NO: 106819 - DNA, 17 bp, Arabidopsis thaliana
gcttaagcagcagatcc

SEQ ID NO: 106820 - DNA, 17 bp, Arabidopsis thaliana
gcttaagcgctatcaga

SEQ ID NO: 106821 - DNA, 17 bp, Arabidopsis thaliana
gcttaagcggttctctc

SEQ ID NO: 106822 - DNA, 17 bp, Arabidopsis thaliana
gcttaagtctagatggt

SEQ ID NO: 106823 - DNA, 17 bp, Arabidopsis thaliana
gcttaagttcaacatag

SEQ ID NO: 106824 - DNA, 17 bp, Arabidopsis thaliana
gcttaatcgttctcatt

SEQ ID NO: 106825 - DNA, 17 bp, Arabidopsis thaliana
gcttaatctatcactgc

SEQ ID NO: 106826 - DNA, 17 bp, Arabidopsis thaliana
gcttaatctgtcttgac

SEQ ID NO: 106827 - DNA, 17 bp, Arabidopsis thaliana
gcttaatttctcgagac

SEQ ID NO: 106828 - DNA, 17 bp, Arabidopsis thaliana
gcttaatttggcccggt

SEQ ID NO: 106829 - DNA, 17 bp, Arabidopsis thaliana
gcttacaagatcaggtt

SEQ ID NO: 106830 - DNA, 17 bp, Arabidopsis thaliana
gcttacaagatcggatt

SEQ ID NO: 106831 - DNA, 17 bp, Arabidopsis thaliana
gcttacaagatcgggtt

SEQ ID NO: 106832 - DNA, 17 bp, Arabidopsis thaliana
gcttacaagattaggtt

SEQ ID NO: 106833 - DNA, 17 bp, Arabidopsis thaliana
gcttacaagattgggtt

SEQ ID NO: 106834 - DNA, 17 bp, Arabidopsis thaliana
gcttacaatgttccagc

SEQ ID NO: 106835 - DNA, 17 bp, Arabidopsis thaliana
gcttacgacgagcctgc

SEQ ID NO: 106836 - DNA, 17 bp, Arabidopsis thaliana
gcttacgactaacgcac

SEQ ID NO: 106837 - DNA, 17 bp, Arabidopsis thaliana
gcttacgagtgtgattc

SEQ ID NO: 106838 - DNA, 17 bp, Arabidopsis thaliana
gcttacgattttagcct

SEQ ID NO: 106839 - DNA, 17 bp, Arabidopsis thaliana
gcttacgggtccttaac

SEQ ID NO: 106840 - DNA, 17 bp, Arabidopsis thaliana
gcttacggtggatacat

SEQ ID NO: 106841 - DNA, 17 bp, Arabidopsis thaliana
gcttactaatgcgacat

SEQ ID NO: 106842 - DNA, 17 bp, Arabidopsis thaliana
gcttactacggcgaggt

SEQ ID NO: 106843 - DNA, 17 bp, Arabidopsis thaliana
gcttactagggatctct

SEQ ID NO: 106844 - DNA, 17 bp, Arabidopsis thaliana
gcttactatcgcacccg

SEQ ID NO: 106845 - DNA, 17 bp, Arabidopsis thaliana
gcttactctctctctgt

SEQ ID NO: 106846 - DNA, 17 bp, Arabidopsis thaliana
gcttactgctctatctg

SEQ ID NO: 106847 - DNA, 17 bp, Arabidopsis thaliana
gcttactgctttatctg

SEQ ID NO: 106848 - DNA, 17 bp, Arabidopsis thaliana
gcttactggcgtcagac

SEQ ID NO: 106849 - DNA, 17 bp, Arabidopsis thaliana
gcttactggtgtgatga

SEQ ID NO: 106850 - DNA, 17 bp, Arabidopsis thaliana
gcttactgtagcgataa

SEQ ID NO: 106851 - DNA, 17 bp, Arabidopsis thaliana
gcttagacgagggagtg

SEQ ID NO: 106852 - DNA, 17 bp, Arabidopsis thaliana
gcttagagaatctccat

SEQ ID NO: 106853 - DNA, 17 bp, Arabidopsis thaliana
gcttagattgtgattgt

SEQ ID NO: 106854 - DNA, 17 bp, Arabidopsis thaliana
gcttagccgtggtgatg

SEQ ID NO: 106855 - DNA, 17 bp, Arabidopsis thaliana
gcttagcctgtacgatg

SEQ ID NO: 106856 - DNA, 17 bp, Arabidopsis thaliana
gcttagcgagcagagag

SEQ ID NO: 106857 - DNA, 17 bp, Arabidopsis thaliana
gcttaggccccgattaa

SEQ ID NO: 106858 - DNA, 17 bp, Arabidopsis thaliana
gcttaggctcccaaagg

SEQ ID NO: 106859 - DNA, 17 bp, Arabidopsis thaliana
gcttaggtctcataatc

SEQ ID NO: 106860 - DNA, 17 bp, Arabidopsis thaliana
gcttaggtgatcatccg

SEQ ID NO: 106861 - DNA, 17 bp, Arabidopsis thaliana
gcttaggtggttctgac

SEQ ID NO: 106862 - DNA, 17 bp, Arabidopsis thaliana
gcttaggttgccaaagt

SEQ ID NO: 106863 - DNA, 17 bp, Arabidopsis thaliana
gcttagtcacatcctgt

SEQ ID NO: 106864 - DNA, 17 bp, Arabidopsis thaliana
gcttagtccgtccgctt

SEQ ID NO: 106865 - DNA, 17 bp, Arabidopsis thaliana
gcttagtcgcatccggc

SEQ ID NO: 106866 - DNA, 17 bp, Arabidopsis thaliana
gcttagtcgcatcctgt

SEQ ID NO: 106867 - DNA, 17 bp, Arabidopsis thaliana
gcttagtcgcattcctg

SEQ ID NO: 106868 - DNA, 17 bp, Arabidopsis thaliana
gcttagtcgctcctgta

SEQ ID NO: 106869 - DNA, 17 bp, Arabidopsis thaliana
gcttagtcgctccttta

SEQ ID NO: 106870 - DNA, 17 bp, Arabidopsis thaliana
gcttagtctcgtcgacg

SEQ ID NO: 106871 - DNA, 17 bp, Arabidopsis thaliana
gcttagtgatggccgta

SEQ ID NO: 106872 - DNA, 17 bp, Arabidopsis thaliana
gcttagtgctactggag

SEQ ID NO: 106873 - DNA, 17 bp, Arabidopsis thaliana
gcttagttcaattgccc

SEQ ID NO: 106874 - DNA, 17 bp, Arabidopsis thaliana
gcttagtttcctctttt

SEQ ID NO: 106875 - DNA, 17 bp, Arabidopsis thaliana
gcttataaattgcggtt

SEQ ID NO: 106876 - DNA, 17 bp, Arabidopsis thaliana
gcttataagatcgggtt

SEQ ID NO: 106877 - DNA, 17 bp, Arabidopsis thaliana
gcttataagtttgtcct

SEQ ID NO: 106878 - DNA, 17 bp, Arabidopsis thaliana
gcttatccattgagttt

SEQ ID NO: 106879 - DNA, 17 bp, Arabidopsis thaliana
gcttatccgagaacaat

SEQ ID NO: 106880 - DNA, 17 bp, Arabidopsis thaliana
gcttatcgcgagggttg

SEQ ID NO: 106881 - DNA, 17 bp, Arabidopsis thaliana
gcttatcgcgatacagg

SEQ ID NO: 106882 - DNA, 17 bp, Arabidopsis thaliana
gcttatctgagcgattg

SEQ ID NO: 106883 - DNA, 17 bp, Arabidopsis thaliana
gcttatctgtcagtcgc

SEQ ID NO: 106884 - DNA, 17 bp, Arabidopsis thaliana
gcttatctgttctgcgc

SEQ ID NO: 106885 - DNA, 17 bp, Arabidopsis thaliana
gcttatgaatcgaccat

SEQ ID NO: 106886 - DNA, 17 bp, Arabidopsis thaliana
gcttatgacccaaactt

SEQ ID NO: 106887 - DNA, 17 bp, Arabidopsis thaliana
gcttatgacccttggta

SEQ ID NO: 106888 - DNA, 17 bp, Arabidopsis thaliana
gcttatgatttgttatt

SEQ ID NO: 106889 - DNA, 17 bp, Arabidopsis thaliana
gcttatgcctttgccgt

SEQ ID NO: 106890 - DNA, 17 bp, Arabidopsis thaliana
gcttatgctctcgatgt

SEQ ID NO: 106891 - DNA, 17 bp, Arabidopsis thaliana
gcttatgcttacaagat

SEQ ID NO: 106892 - DNA, 17 bp, Arabidopsis thaliana
gcttatggcggttctca

SEQ ID NO: 106893 - DNA, 17 bp, Arabidopsis thaliana
gcttatgtgtgtgtgtg

SEQ ID NO: 106894 - DNA, 17 bp, Arabidopsis thaliana
gcttatgttctccggtg

SEQ ID NO: 106895 - DNA, 17 bp, Arabidopsis thaliana
gcttatgttttggatag

SEQ ID NO: 106896 - DNA, 17 bp, Arabidopsis thaliana
gcttattatttgcttgg

SEQ ID NO: 106897 - DNA, 17 bp, Arabidopsis thaliana
gcttattcaccctaatg

SEQ ID NO: 106898 - DNA, 17 bp, Arabidopsis thaliana
gcttattccgtcggagg

SEQ ID NO: 106899 - DNA, 17 bp, Arabidopsis thaliana
gcttattggatctaaag

SEQ ID NO: 106900 - DNA, 17 bp, Arabidopsis thaliana
gcttatttacaatggct

SEQ ID NO: 106901 - DNA, 17 bp, Arabidopsis thaliana
gcttatttcgtcgaagg

SEQ ID NO: 106902 - DNA, 17 bp, Arabidopsis thaliana
gcttatttcgtcggagg

SEQ ID NO: 106903 - DNA, 17 bp, Arabidopsis thaliana
gcttatttggaagaagt

SEQ ID NO: 106904 - DNA, 17 bp, Arabidopsis thaliana
gcttattttctttggat

SEQ ID NO: 106905 - DNA, 17 bp, Arabidopsis thaliana
gcttattttgcgtgcaa

SEQ ID NO: 106906 - DNA, 17 bp, Arabidopsis thaliana
gcttattttgtcggagg

SEQ ID NO: 106907 - DNA, 17 bp, Arabidopsis thaliana
gcttatttttctcatcg

SEQ ID NO: 106908 - DNA, 17 bp, Arabidopsis thaliana
gcttcaaaacagcactg

SEQ ID NO: 106909 - DNA, 17 bp, Arabidopsis thaliana
gcttcaaaggttgcttt

SEQ ID NO: 106910 - DNA, 17 bp, Arabidopsis thaliana
gcttcaaagtggctagg

SEQ ID NO: 106911 - DNA, 17 bp, Arabidopsis thaliana
gcttcaaatctggttgc

SEQ ID NO: 106912 - DNA, 17 bp, Arabidopsis thaliana
gcttcaacgaccttctc

SEQ ID NO: 106913 - DNA, 17 bp, Arabidopsis thaliana
gcttcaacgtgggtccg

SEQ ID NO: 106914 - DNA, 17 bp, Arabidopsis thaliana
gcttcaaggtggttagg

SEQ ID NO: 106915 - DNA, 17 bp, Arabidopsis thaliana
gcttcaaggttgctttt

SEQ ID NO: 106916 - DNA, 17 bp, Arabidopsis thaliana
gcttcaataccgtctag

SEQ ID NO: 106917 - DNA, 17 bp, Arabidopsis thaliana
gcttcaatccgcgggac

SEQ ID NO: 106918 - DNA, 17 bp, Arabidopsis thaliana
gcttcaattgggattta

SEQ ID NO: 106919 - DNA, 17 bp, Arabidopsis thaliana
gcttcacaaactgatca

SEQ ID NO: 106920 - DNA, 17 bp, Arabidopsis thaliana
gcttcacgagcagatct

SEQ ID NO: 106921 - DNA, 17 bp, Arabidopsis thaliana
gcttcacggatcgtgtc

SEQ ID NO: 106922 - DNA, 17 bp, Arabidopsis thaliana
gcttcactgttccctgg

SEQ ID NO: 106923 - DNA, 17 bp, Arabidopsis thaliana
gcttcactgtttcctgg

SEQ ID NO: 106924 - DNA, 17 bp, Arabidopsis thaliana
gcttcagagtagacttt

SEQ ID NO: 106925 - DNA, 17 bp, Arabidopsis thaliana
gcttcagagtggacttt

SEQ ID NO: 106926 - DNA, 17 bp, Arabidopsis thaliana
gcttcagattctcagga

SEQ ID NO: 106927 - DNA, 17 bp, Arabidopsis thaliana
gcttcagattggacttc

SEQ ID NO: 106928 - DNA, 17 bp, Arabidopsis thaliana
gcttcagccctttgtcg

SEQ ID NO: 106929 - DNA, 17 bp, Arabidopsis thaliana
gcttcagccgttacgag

SEQ ID NO: 106930 - DNA, 17 bp, Arabidopsis thaliana
gcttcagcctgaccgtt

SEQ ID NO: 106931 - DNA, 17 bp, Arabidopsis thaliana
gcttcagctgcagtctt

SEQ ID NO: 106932 - DNA, 17 bp, Arabidopsis thaliana
gcttcagcttcaacttg

SEQ ID NO: 106933 - DNA, 17 bp, Arabidopsis thaliana
gcttcaggccttgggat

SEQ ID NO: 106934 - DNA, 17 bp, Arabidopsis thaliana
gcttcaggggcaaatta

SEQ ID NO: 106935 - DNA, 17 bp, Arabidopsis thaliana
gcttcaggtgaccgaaa

SEQ ID NO: 106936 - DNA, 17 bp, Arabidopsis thaliana
gcttcaggtgcagagtt

SEQ ID NO: 106937 - DNA, 17 bp, Arabidopsis thaliana
gcttcaggtttgtttta

SEQ ID NO: 106938 - DNA, 17 bp, Arabidopsis thaliana
gcttcagtcaacgacaa

SEQ ID NO: 106939 - DNA, 17 bp, Arabidopsis thaliana
gcttcagttgaccagtc

SEQ ID NO: 106940 - DNA, 17 bp, Arabidopsis thaliana
gcttcagtttctttgat

SEQ ID NO: 106941 - DNA, 17 bp, Arabidopsis thaliana
gcttcagtttgattttt

SEQ ID NO: 106942 - DNA, 17 bp, Arabidopsis thaliana
gcttcagttttggtgcc

SEQ ID NO: 106943 - DNA, 17 bp, Arabidopsis thaliana
gcttcataatctgtctc

SEQ ID NO: 106944 - DNA, 17 bp, Arabidopsis thaliana
gcttcatccgtgacaag

SEQ ID NO: 106945 - DNA, 17 bp, Arabidopsis thaliana
gcttcatcctgtgctga

SEQ ID NO: 106946 - DNA, 17 bp, Arabidopsis thaliana
gcttcatctatatcatc

SEQ ID NO: 106947 - DNA, 17 bp, Arabidopsis thaliana
gcttcatctctgcaaag

SEQ ID NO: 106948 - DNA, 17 bp, Arabidopsis thaliana
gcttcatctgaggttgc

SEQ ID NO: 106949 - DNA, 17 bp, Arabidopsis thaliana
gcttcatctggttatgc

SEQ ID NO: 106950 - DNA, 17 bp, Arabidopsis thaliana
gcttcatcttttgagcc

SEQ ID NO: 106951 - DNA, 17 bp, Arabidopsis thaliana
gcttcatgaactttagc

SEQ ID NO: 106952 - DNA, 17 bp, Arabidopsis thaliana
gcttcatgtctcgcaag

SEQ ID NO: 106953 - DNA, 17 bp, Arabidopsis thaliana
gcttcattcaaggtatg

SEQ ID NO: 106954 - DNA, 17 bp, Arabidopsis thaliana
gcttcattccttcatca

SEQ ID NO: 106955 - DNA, 17 bp, Arabidopsis thaliana
gcttccaatagacctgc

SEQ ID NO: 106956 - DNA, 17 bp, Arabidopsis thaliana
gcttccacagctttctt

SEQ ID NO: 106957 - DNA, 17 bp, Arabidopsis thaliana
gcttccacatcggtccg

SEQ ID NO: 106958 - DNA, 17 bp, Arabidopsis thaliana
gcttccacgacttctac

SEQ ID NO: 106959 - DNA, 17 bp, Arabidopsis thaliana
gcttccactacggtttt

SEQ ID NO: 106960 - DNA, 17 bp, Arabidopsis thaliana
gcttccactttggtgat

SEQ ID NO: 106961 - DNA, 17 bp, Arabidopsis thaliana
gcttccagattctgagt

SEQ ID NO: 106962 - DNA, 17 bp, Arabidopsis thaliana
gcttccataatctctag

SEQ ID NO: 106963 - DNA, 17 bp, Arabidopsis thaliana
gcttccatcttgttgag

SEQ ID NO: 106964 - DNA, 17 bp, Arabidopsis thaliana
gcttccatgagtggttt

SEQ ID NO: 106965 - DNA, 17 bp, Arabidopsis thaliana
gcttccatgcgtcataa

SEQ ID NO: 106966 - DNA, 17 bp, Arabidopsis thaliana
gcttccatggttgacgg

SEQ ID NO: 106967 - DNA, 17 bp, Arabidopsis thaliana
gcttccatttcctggcc

SEQ ID NO: 106968 - DNA, 17 bp, Arabidopsis thaliana
gcttcccctgtgtatgc

SEQ ID NO: 106969 - DNA, 17 bp, Arabidopsis thaliana
gcttcccgattagtgat

SEQ ID NO: 106970 - DNA, 17 bp, Arabidopsis thaliana
gcttcccggctggtgca

SEQ ID NO: 106971 - DNA, 17 bp, Arabidopsis thaliana
gcttccgagatgttggc

SEQ ID NO: 106972 - DNA, 17 bp, Arabidopsis thaliana
gcttccgaggatgtgtt

SEQ ID NO: 106973 - DNA, 17 bp, Arabidopsis thaliana
gcttccgtcgattagca

SEQ ID NO: 106974 - DNA, 17 bp, Arabidopsis thaliana
gcttcctcctagcacag

SEQ ID NO: 106975 - DNA, 17 bp, Arabidopsis thaliana
gcttcctcgagatgatc

SEQ ID NO: 106976 - DNA, 17 bp, Arabidopsis thaliana
gcttcctctgttcctct

SEQ ID NO: 106977 - DNA, 17 bp, Arabidopsis thaliana
gcttcctcttcggttca

SEQ ID NO: 106978 - DNA, 17 bp, Arabidopsis thaliana
gcttcctgaaaccaata

SEQ ID NO: 106979 - DNA, 17 bp, Arabidopsis thaliana
gcttcctggtctcgtag

SEQ ID NO: 106980 - DNA, 17 bp, Arabidopsis thaliana
gcttccttggacccatt

SEQ ID NO: 106981 - DNA, 17 bp, Arabidopsis thaliana
gcttcctttggcatttg

SEQ ID NO: 106982 - DNA, 17 bp, Arabidopsis thaliana
gcttcgaatctggttgc

SEQ ID NO: 106983 - DNA, 17 bp, Arabidopsis thaliana
gcttcgactttaccagg

SEQ ID NO: 106984 - DNA, 17 bp, Arabidopsis thaliana
gcttcgcaggttcgtga

SEQ ID NO: 106985 - DNA, 17 bp, Arabidopsis thaliana
gcttcgcccgcgcaggt

SEQ ID NO: 106986 - DNA, 17 bp, Arabidopsis thaliana
gcttcgcccgggtacga

SEQ ID NO: 106987 - DNA, 17 bp, Arabidopsis thaliana
gcttcgcgagtgaaact

SEQ ID NO: 106988 - DNA, 17 bp, Arabidopsis thaliana
gcttcggactagaatct

SEQ ID NO: 106989 - DNA, 17 bp, Arabidopsis thaliana
gcttcggatccggtagg

SEQ ID NO: 106990 - DNA, 17 bp, Arabidopsis thaliana
gcttcggattctgaaaa

SEQ ID NO: 106991 - DNA, 17 bp, Arabidopsis thaliana
gcttcggcagaaggaca

SEQ ID NO: 106992 - DNA, 17 bp, Arabidopsis thaliana
gcttcggcagcggctgg

SEQ ID NO: 106993 - DNA, 17 bp, Arabidopsis thaliana
gcttcggcccagaacct

SEQ ID NO: 106994 - DNA, 17 bp, Arabidopsis thaliana
gcttcggcggaatcaga

SEQ ID NO: 106995 - DNA, 17 bp, Arabidopsis thaliana
gcttcggctaagattgg

SEQ ID NO: 106996 - DNA, 17 bp, Arabidopsis thaliana
gcttcggctctgtggca

SEQ ID NO: 106997 - DNA, 17 bp, Arabidopsis thaliana
gcttcggctgcgcgagg

SEQ ID NO: 106998 - DNA, 17 bp, Arabidopsis thaliana
gcttcggcttttggtgt

SEQ ID NO: 106999 - DNA, 17 bp, Arabidopsis thaliana
gcttcgggtaaacggtc

SEQ ID NO: 107000 - DNA, 17 bp, Arabidopsis thaliana
gcttcgggtcccaccgg

SEQ ID NO: 107001 - DNA, 17 bp, Arabidopsis thaliana
gcttcgggtcccactgg

SEQ ID NO: 107002 - DNA, 17 bp, Arabidopsis thaliana
gcttcgggtgcgcgagg

SEQ ID NO: 107003 - DNA, 17 bp, Arabidopsis thaliana
gcttcggtattgcggca

SEQ ID NO: 107004 - DNA, 17 bp, Arabidopsis thaliana
gcttcggtgcgagaggt

SEQ ID NO: 107005 - DNA, 17 bp, Arabidopsis thaliana
gcttcggttattgctgc

SEQ ID NO: 107006 - DNA, 17 bp, Arabidopsis thaliana
gcttcggttcgggatat

SEQ ID NO: 107007 - DNA, 17 bp, Arabidopsis thaliana
gcttcgtaagcgaaaga

SEQ ID NO: 107008 - DNA, 17 bp, Arabidopsis thaliana
gcttcgtaagcgaaagg

SEQ ID NO: 107009 - DNA, 17 bp, Arabidopsis thaliana
gcttcgtgctcaggcct

SEQ ID NO: 107010 - DNA, 17 bp, Arabidopsis thaliana
gcttcgtgtccaggcct

SEQ ID NO: 107011 - DNA, 17 bp, Arabidopsis thaliana
gcttcgttccaaagtgt

SEQ ID NO: 107012 - DNA, 17 bp, Arabidopsis thaliana
gcttcgttgatcttgcg

SEQ ID NO: 107013 - DNA, 17 bp, Arabidopsis thaliana
gcttcgtttcccggctg

SEQ ID NO: 107014 - DNA, 17 bp, Arabidopsis thaliana
gcttcgtttccggcagg

SEQ ID NO: 107015 - DNA, 17 bp, Arabidopsis thaliana
gcttctaaagggattcg

SEQ ID NO: 107016 - DNA, 17 bp, Arabidopsis thaliana
gcttctaagcaagtttt

SEQ ID NO: 107017 - DNA, 17 bp, Arabidopsis thaliana
gcttctaagcaatgttt

SEQ ID NO: 107018 - DNA, 17 bp, Arabidopsis thaliana
gcttctaagtcacagac

SEQ ID NO: 107019 - DNA, 17 bp, Arabidopsis thaliana
gcttctaagtcacagat

SEQ ID NO: 107020 - DNA, 17 bp, Arabidopsis thaliana
gcttctaatcgcttcta

SEQ ID NO: 107021 - DNA, 17 bp, Arabidopsis thaliana
gcttctacaagttgcac

SEQ ID NO: 107022 - DNA, 17 bp, Arabidopsis thaliana
gcttctagcccggattc

SEQ ID NO: 107023 - DNA, 17 bp, Arabidopsis thaliana
gcttctagccttctgtc

SEQ ID NO: 107024 - DNA, 17 bp, Arabidopsis thaliana
gcttctatcagatgtaa

SEQ ID NO: 107025 - DNA, 17 bp, Arabidopsis thaliana
gcttctatccgctaaca

SEQ ID NO: 107026 - DNA, 17 bp, Arabidopsis thaliana
gcttctatgctggtcga

SEQ ID NO: 107027 - DNA, 17 bp, Arabidopsis thaliana
gcttctatttcctggcc

SEQ ID NO: 107028 - DNA, 17 bp, Arabidopsis thaliana
gcttctcaaagctttca

SEQ ID NO: 107029 - DNA, 17 bp, Arabidopsis thaliana
gcttctcagaatcggtg

SEQ ID NO: 107030 - DNA, 17 bp, Arabidopsis thaliana
gcttctcagaatcggtt

SEQ ID NO: 107031 - DNA, 17 bp, Arabidopsis thaliana
gcttctcatcgatggtc

SEQ ID NO: 107032 - DNA, 17 bp, Arabidopsis thaliana
gcttctcccttcggtcg

SEQ ID NO: 107033 - DNA, 17 bp, Arabidopsis thaliana
gcttctcgattcatttg

SEQ ID NO: 107034 - DNA, 17 bp, Arabidopsis thaliana
gcttctcggaatcggtg

SEQ ID NO: 107035 - DNA, 17 bp, Arabidopsis thaliana
gcttctcggtagcgttc

SEQ ID NO: 107036 - DNA, 17 bp, Arabidopsis thaliana
gcttctctcaaagtgct

SEQ ID NO: 107037 - DNA, 17 bp, Arabidopsis thaliana
gcttctctcgtaatagt

SEQ ID NO: 107038 - DNA, 17 bp, Arabidopsis thaliana
gcttctctcttttgggc

SEQ ID NO: 107039 - DNA, 17 bp, Arabidopsis thaliana
gcttctcttgtcggggg

SEQ ID NO: 107040 - DNA, 17 bp, Arabidopsis thaliana
gcttctctttggcagcg

SEQ ID NO: 107041 - DNA, 17 bp, Arabidopsis thaliana
gcttctgacttgctgca

SEQ ID NO: 107042 - DNA, 17 bp, Arabidopsis thaliana
gcttctgagattcagct

SEQ ID NO: 107043 - DNA, 17 bp, Arabidopsis thaliana
gcttctgaggattacgg

SEQ ID NO: 107044 - DNA, 17 bp, Arabidopsis thaliana
gcttctgatacttgata

SEQ ID NO: 107045 - DNA, 17 bp, Arabidopsis thaliana
gcttctgcaaaggtttg

SEQ ID NO: 107046 - DNA, 17 bp, Arabidopsis thaliana
gcttctgcctcggtgtc

SEQ ID NO: 107047 - DNA, 17 bp, Arabidopsis thaliana
gcttctgcctgggtgtc

SEQ ID NO: 107048 - DNA, 17 bp, Arabidopsis thaliana
gcttctgctcatccttg

SEQ ID NO: 107049 - DNA, 17 bp, Arabidopsis thaliana
gcttctgggattcagtt

SEQ ID NO: 107050 - DNA, 17 bp, Arabidopsis thaliana
gcttctgggattcggtt

SEQ ID NO: 107051 - DNA, 17 bp, Arabidopsis thaliana
gcttctgtaggcttgta

SEQ ID NO: 107052 - DNA, 17 bp, Arabidopsis thaliana
gcttctgtagtccaacg

SEQ ID NO: 107053 - DNA, 17 bp, Arabidopsis thaliana
gcttctgtagtccatcg

SEQ ID NO: 107054 - DNA, 17 bp, Arabidopsis thaliana
gcttctgtccggggtgg

SEQ ID NO: 107055 - DNA, 17 bp, Arabidopsis thaliana
gcttctgtgagaactgc

SEQ ID NO: 107056 - DNA, 17 bp, Arabidopsis thaliana
gcttctgtgtttattta

SEQ ID NO: 107057 - DNA, 17 bp, Arabidopsis thaliana
gcttctgttggtcgagt

SEQ ID NO: 107058 - DNA, 17 bp, Arabidopsis thaliana
gcttctgttggtcggtt

SEQ ID NO: 107059 - DNA, 17 bp, Arabidopsis thaliana
gcttctgtttggtgcgt

SEQ ID NO: 107060 - DNA, 17 bp, Arabidopsis thaliana
gcttcttagagggacta

SEQ ID NO: 107061 - DNA, 17 bp, Arabidopsis thaliana
gcttcttagatcgagat

SEQ ID NO: 107062 - DNA, 17 bp, Arabidopsis thaliana
gcttcttcaatggctga

SEQ ID NO: 107063 - DNA, 17 bp, Arabidopsis thaliana
gcttcttcactgagttt

SEQ ID NO: 107064 - DNA, 17 bp, Arabidopsis thaliana
gcttcttcagactttaa

SEQ ID NO: 107065 - DNA, 17 bp, Arabidopsis thaliana
gcttcttcaggtcgttc

SEQ ID NO: 107066 - DNA, 17 bp, Arabidopsis thaliana
gcttcttcatctgaggc

SEQ ID NO: 107067 - DNA, 17 bp, Arabidopsis thaliana
gcttcttccacaggcct

SEQ ID NO: 107068 - DNA, 17 bp, Arabidopsis thaliana
gcttcttccctgtaagc

SEQ ID NO: 107069 - DNA, 17 bp, Arabidopsis thaliana
gcttcttcctcaaatgt

SEQ ID NO: 107070 - DNA, 17 bp, Arabidopsis thaliana
gcttcttcctctggtgt

SEQ ID NO: 107071 - DNA, 17 bp, Arabidopsis thaliana
gcttcttctctgcttca

SEQ ID NO: 107072 - DNA, 17 bp, Arabidopsis thaliana
gcttcttctctggtttt

SEQ ID NO: 107073 - DNA, 17 bp, Arabidopsis thaliana
gcttcttctgaggctgc

SEQ ID NO: 107074 - DNA, 17 bp, Arabidopsis thaliana
gcttcttctgattggtc

SEQ ID NO: 107075 - DNA, 17 bp, Arabidopsis thaliana
gcttcttcttaggctgc

SEQ ID NO: 107076 - DNA, 17 bp, Arabidopsis thaliana
gcttcttcttcgaacga

SEQ ID NO: 107077 - DNA, 17 bp, Arabidopsis thaliana
gcttcttgaatcactgg

SEQ ID NO: 107078 - DNA, 17 bp, Arabidopsis thaliana
gcttcttggaaagttgt

SEQ ID NO: 107079 - DNA, 17 bp, Arabidopsis thaliana
gcttcttggaacatcaa

SEQ ID NO: 107080 - DNA, 17 bp, Arabidopsis thaliana
gcttcttggctgcagct

SEQ ID NO: 107081 - DNA, 17 bp, Arabidopsis thaliana
gcttcttggggttgtag

SEQ ID NO: 107082 - DNA, 17 bp, Arabidopsis thaliana
gcttcttgggtatttag

SEQ ID NO: 107083 - DNA, 17 bp, Arabidopsis thaliana
gcttcttggttacaact

SEQ ID NO: 107084 - DNA, 17 bp, Arabidopsis thaliana
gcttcttggttgtcggc

SEQ ID NO: 107085 - DNA, 17 bp, Arabidopsis thaliana
gcttcttgtctaggatg

SEQ ID NO: 107086 - DNA, 17 bp, Arabidopsis thaliana
gcttcttgtgttgtcac

SEQ ID NO: 107087 - DNA, 17 bp, Arabidopsis thaliana
gcttctttcgtcgaggg

SEQ ID NO: 107088 - DNA, 17 bp, Arabidopsis thaliana
gcttctttcgtcggagg

SEQ ID NO: 107089 - DNA, 17 bp, Arabidopsis thaliana
gcttctttcttgcgagc

SEQ ID NO: 107090 - DNA, 17 bp, Arabidopsis thaliana
gcttctttgctgctttt

SEQ ID NO: 107091 - DNA, 17 bp, Arabidopsis thaliana
gcttctttggccctgct

SEQ ID NO: 107092 - DNA, 17 bp, Arabidopsis thaliana
gcttcttttcgatggcc

SEQ ID NO: 107093 - DNA, 17 bp, Arabidopsis thaliana
gcttcttttggctaaca

SEQ ID NO: 107094 - DNA, 17 bp, Arabidopsis thaliana
gcttgaaaagagttagt

SEQ ID NO: 107095 - DNA, 17 bp, Arabidopsis thaliana
gcttgaaaatcggacgt

SEQ ID NO: 107096 - DNA, 17 bp, Arabidopsis thaliana
gcttgaaactcggatgc

SEQ ID NO: 107097 - DNA, 17 bp, Arabidopsis thaliana
gcttgaaagaaattcta

SEQ ID NO: 107098 - DNA, 17 bp, Arabidopsis thaliana
gcttgaaattgtcggga

SEQ ID NO: 107099 - DNA, 17 bp, Arabidopsis thaliana
gcttgaaccgtcttctt

SEQ ID NO: 107100 - DNA, 17 bp, Arabidopsis thaliana
gcttgaaccttaggggt

SEQ ID NO: 107101 - DNA, 17 bp, Arabidopsis thaliana
gcttgaagatgtcgtcc

SEQ ID NO: 107102 - DNA, 17 bp, Arabidopsis thaliana
gcttgacactagtccga

SEQ ID NO: 107103 - DNA, 17 bp, Arabidopsis thaliana
gcttgaccatatggaca

SEQ ID NO: 107104 - DNA, 17 bp, Arabidopsis thaliana
gcttgaccctagtccga

SEQ ID NO: 107105 - DNA, 17 bp, Arabidopsis thaliana
gcttgaccggaatgtcc

SEQ ID NO: 107106 - DNA, 17 bp, Arabidopsis thaliana
gcttgaccgtacggaca

SEQ ID NO: 107107 - DNA, 17 bp, Arabidopsis thaliana
gcttgaccgtatggaca

SEQ ID NO: 107108 - DNA, 17 bp, Arabidopsis thaliana
gcttgactcaggccggt

SEQ ID NO: 107109 - DNA, 17 bp, Arabidopsis thaliana
gcttgactcagtccgac

SEQ ID NO: 107110 - DNA, 17 bp, Arabidopsis thaliana
gcttgactcatagtggt

SEQ ID NO: 107111 - DNA, 17 bp, Arabidopsis thaliana
gcttgactcctgtccga

SEQ ID NO: 107112 - DNA, 17 bp, Arabidopsis thaliana
gcttgactctactccga

SEQ ID NO: 107113 - DNA, 17 bp, Arabidopsis thaliana
gcttgactctagtacga

SEQ ID NO: 107114 - DNA, 17 bp, Arabidopsis thaliana
gcttgactctagtccga

SEQ ID NO: 107115 - DNA, 17 bp, Arabidopsis thaliana
gcttgactctagtccgt

SEQ ID NO: 107116 - DNA, 17 bp, Arabidopsis thaliana
gcttgactctagtccta

SEQ ID NO: 107117 - DNA, 17 bp, Arabidopsis thaliana
gcttgactctagttcga

SEQ ID NO: 107118 - DNA, 17 bp, Arabidopsis thaliana
gcttgactctattccta

SEQ ID NO: 107119 - DNA, 17 bp, Arabidopsis thaliana
gcttgactctgatttgg

SEQ ID NO: 107120 - DNA, 17 bp, Arabidopsis thaliana
gcttgactcttgtacga

SEQ ID NO: 107121 - DNA, 17 bp, Arabidopsis thaliana
gcttgactgtagttcga

SEQ ID NO: 107122 - DNA, 17 bp, Arabidopsis thaliana
gcttgactgttgtccga

SEQ ID NO: 107123 - DNA, 17 bp, Arabidopsis thaliana
gcttgacttagtgactt

SEQ ID NO: 107124 - DNA, 17 bp, Arabidopsis thaliana
gcttgagagccccgtcg

SEQ ID NO: 107125 - DNA, 17 bp, Arabidopsis thaliana
gcttgagagtctctgtt

SEQ ID NO: 107126 - DNA, 17 bp, Arabidopsis thaliana
gcttgagcaactcagtc

SEQ ID NO: 107127 - DNA, 17 bp, Arabidopsis thaliana
gcttgagtagtgattag

SEQ ID NO: 107128 - DNA, 17 bp, Arabidopsis thaliana
gcttgatatgtttgact

SEQ ID NO: 107129 - DNA, 17 bp, Arabidopsis thaliana
gcttgatccgcctgata

SEQ ID NO: 107130 - DNA, 17 bp, Arabidopsis thaliana
gcttgatccgctcttgt

SEQ ID NO: 107131 - DNA, 17 bp, Arabidopsis thaliana
gcttgatctgtttcacg

SEQ ID NO: 107132 - DNA, 17 bp, Arabidopsis thaliana
gcttgatctttgtgttc

SEQ ID NO: 107133 - DNA, 17 bp, Arabidopsis thaliana
gcttgatgggcttctgc

SEQ ID NO: 107134 - DNA, 17 bp, Arabidopsis thaliana
gcttgatgtgcttgatc

SEQ ID NO: 107135 - DNA, 17 bp, Arabidopsis thaliana
gcttgattcacgttcca

SEQ ID NO: 107136 - DNA, 17 bp, Arabidopsis thaliana
gcttgattcatccgaag

SEQ ID NO: 107137 - DNA, 17 bp, Arabidopsis thaliana
gcttgattggactttgg

SEQ ID NO: 107138 - DNA, 17 bp, Arabidopsis thaliana
gcttgatttagtttttg

SEQ ID NO: 107139 - DNA, 17 bp, Arabidopsis thaliana
gcttgatttgcgcgagt

SEQ ID NO: 107140 - DNA, 17 bp, Arabidopsis thaliana
gcttgattttccgagat

SEQ ID NO: 107141 - DNA, 17 bp, Arabidopsis thaliana
gcttgccaagatctttg

SEQ ID NO: 107142 - DNA, 17 bp, Arabidopsis thaliana
gcttgccccgcgatagt

SEQ ID NO: 107143 - DNA, 17 bp, Arabidopsis thaliana
gcttgccgcacaagccg

SEQ ID NO: 107144 - DNA, 17 bp, Arabidopsis thaliana
gcttgccgcccgattgc

SEQ ID NO: 107145 - DNA, 17 bp, Arabidopsis thaliana
gcttgccggctgcgttt

SEQ ID NO: 107146 - DNA, 17 bp, Arabidopsis thaliana
gcttgcctttgtacttg

SEQ ID NO: 107147 - DNA, 17 bp, Arabidopsis thaliana
gcttgctaagtacatgg

SEQ ID NO: 107148 - DNA, 17 bp, Arabidopsis thaliana
gcttgctacttggtgag

SEQ ID NO: 107149 - DNA, 17 bp, Arabidopsis thaliana
gcttgctatctgggctt

SEQ ID NO: 107150 - DNA, 17 bp, Arabidopsis thaliana
gcttgctgttgggaact

SEQ ID NO: 107151 - DNA, 17 bp, Arabidopsis thaliana
gcttgcttctggtctgg

SEQ ID NO: 107152 - DNA, 17 bp, Arabidopsis thaliana
gcttgcttttacatctg

SEQ ID NO: 107153 - DNA, 17 bp, Arabidopsis thaliana
gcttggaaataattcgt

SEQ ID NO: 107154 - DNA, 17 bp, Arabidopsis thaliana
gcttggaacagctgact

SEQ ID NO: 107155 - DNA, 17 bp, Arabidopsis thaliana
gcttggaacgaatttcg

SEQ ID NO: 107156 - DNA, 17 bp, Arabidopsis thaliana
gcttggaaggattacgg

SEQ ID NO: 107157 - DNA, 17 bp, Arabidopsis thaliana
gcttggacggtaagctc

SEQ ID NO: 107158 - DNA, 17 bp, Arabidopsis thaliana
gcttggaggattacagg

SEQ ID NO: 107159 - DNA, 17 bp, Arabidopsis thaliana
gcttggatcatcagacc

SEQ ID NO: 107160 - DNA, 17 bp, Arabidopsis thaliana
gcttggatccaatcggg

SEQ ID NO: 107161 - DNA, 17 bp, Arabidopsis thaliana
gcttggcccaattggtt

SEQ ID NO: 107162 - DNA, 17 bp, Arabidopsis thaliana
gcttggccggtagtagg

SEQ ID NO: 107163 - DNA, 17 bp, Arabidopsis thaliana
gcttggccttcctttac

SEQ ID NO: 107164 - DNA, 17 bp, Arabidopsis thaliana
gcttggcgaatttggcg

SEQ ID NO: 107165 - DNA, 17 bp, Arabidopsis thaliana
gcttggcgattatcttg

SEQ ID NO: 107166 - DNA, 17 bp, Arabidopsis thaliana
gcttggcgattctctcg

SEQ ID NO: 107167 - DNA, 17 bp, Arabidopsis thaliana
gcttggctcaggcggtt

SEQ ID NO: 107168 - DNA, 17 bp, Arabidopsis thaliana
gcttggctcatgcaggt

SEQ ID NO: 107169 - DNA, 17 bp, Arabidopsis thaliana
gcttggcttgacttagt

SEQ ID NO: 107170 - DNA, 17 bp, Arabidopsis thaliana
gcttgggaaatgattgg

SEQ ID NO: 107171 - DNA, 17 bp, Arabidopsis thaliana
gcttgggagagacgagc

SEQ ID NO: 107172 - DNA, 17 bp, Arabidopsis thaliana
gcttgggccgctgtaac

SEQ ID NO: 107173 - DNA, 17 bp, Arabidopsis thaliana
gcttgggctctgaccgc

SEQ ID NO: 107174 - DNA, 17 bp, Arabidopsis thaliana
gcttgggtcaactctgg

SEQ ID NO: 107175 - DNA, 17 bp, Arabidopsis thaliana
gcttgggtgaaactaag

SEQ ID NO: 107176 - DNA, 17 bp, Arabidopsis thaliana
gcttgggttgccaagat

SEQ ID NO: 107177 - DNA, 17 bp, Arabidopsis thaliana
gcttgggttgcgagagg

SEQ ID NO: 107178 - DNA, 17 bp, Arabidopsis thaliana
gcttggtcattttgtgc

SEQ ID NO: 107179 - DNA, 17 bp, Arabidopsis thaliana
gcttggtgactagtggg

SEQ ID NO: 107180 - DNA, 17 bp, Arabidopsis thaliana
gcttggtgcaggtcggg

SEQ ID NO: 107181 - DNA, 17 bp, Arabidopsis thaliana
gcttggtgctgctcaga

SEQ ID NO: 107182 - DNA, 17 bp, Arabidopsis thaliana
gcttggtgctgctcagc

SEQ ID NO: 107183 - DNA, 17 bp, Arabidopsis thaliana
gcttggtgctgctctga

SEQ ID NO: 107184 - DNA, 17 bp, Arabidopsis thaliana
gcttggttagtgttttg

SEQ ID NO: 107185 - DNA, 17 bp, Arabidopsis thaliana
gcttggttcggtttcgg

SEQ ID NO: 107186 - DNA, 17 bp, Arabidopsis thaliana
gcttggtttgacttagt

SEQ ID NO: 107187 - DNA, 17 bp, Arabidopsis thaliana
gcttggtttgactttgt

SEQ ID NO: 107188 - DNA, 17 bp, Arabidopsis thaliana
gcttggtttgtggtttg

SEQ ID NO: 107189 - DNA, 17 bp, Arabidopsis thaliana
gcttggttttttcagaa

SEQ ID NO: 107190 - DNA, 17 bp, Arabidopsis thaliana
gcttgtaatgatctgcc

SEQ ID NO: 107191 - DNA, 17 bp, Arabidopsis thaliana
gcttgtacggctttggc

SEQ ID NO: 107192 - DNA, 17 bp, Arabidopsis thaliana
gcttgtcacctaagatt

SEQ ID NO: 107193 - DNA, 17 bp, Arabidopsis thaliana
gcttgtcagcggttaat

SEQ ID NO: 107194 - DNA, 17 bp, Arabidopsis thaliana
gcttgtcatctggatcc

SEQ ID NO: 107195 - DNA, 17 bp, Arabidopsis thaliana
gcttgtcccaaagatta

SEQ ID NO: 107196 - DNA, 17 bp, Arabidopsis thaliana
gcttgtcccttcggtcg

SEQ ID NO: 107197 - DNA, 17 bp, Arabidopsis thaliana
gcttgtcccttcgtcgg

SEQ ID NO: 107198 - DNA, 17 bp, Arabidopsis thaliana
gcttgtcctttcggtcg

SEQ ID NO: 107199 - DNA, 17 bp, Arabidopsis thaliana
gcttgtcgattacgaat

SEQ ID NO: 107200 - DNA, 17 bp, Arabidopsis thaliana
gcttgtcggaactatgc

SEQ ID NO: 107201 - DNA, 17 bp, Arabidopsis thaliana
gcttgtcgttggattct

SEQ ID NO: 107202 - DNA, 17 bp, Arabidopsis thaliana
gcttgtctcaaagatta

SEQ ID NO: 107203 - DNA, 17 bp, Arabidopsis thaliana
gcttgtctgccactgag

SEQ ID NO: 107204 - DNA, 17 bp, Arabidopsis thaliana
gcttgtctgtaagtgcc

SEQ ID NO: 107205 - DNA, 17 bp, Arabidopsis thaliana
gcttgtgaaatcgtgcg

SEQ ID NO: 107206 - DNA, 17 bp, Arabidopsis thaliana
gcttgtgaagaactcta

SEQ ID NO: 107207 - DNA, 17 bp, Arabidopsis thaliana
gcttgtgaagacgtcgc

SEQ ID NO: 107208 - DNA, 17 bp, Arabidopsis thaliana
gcttgtgaatctttggc

SEQ ID NO: 107209 - DNA, 17 bp, Arabidopsis thaliana
gcttgtgacatggcttt

SEQ ID NO: 107210 - DNA, 17 bp, Arabidopsis thaliana
gcttgtgacccggttca

SEQ ID NO: 107211 - DNA, 17 bp, Arabidopsis thaliana
gcttgtgactaactcac

SEQ ID NO: 107212 - DNA, 17 bp, Arabidopsis thaliana
gcttgtgatctcggcat

SEQ ID NO: 107213 - DNA, 17 bp, Arabidopsis thaliana
gcttgtgccgttgaaaa

SEQ ID NO: 107214 - DNA, 17 bp, Arabidopsis thaliana
gcttgtgctcatgaacg

SEQ ID NO: 107215 - DNA, 17 bp, Arabidopsis thaliana
gcttgtggagacgtcgc

SEQ ID NO: 107216 - DNA, 17 bp, Arabidopsis thaliana
gcttgtggagacgtcgt

SEQ ID NO: 107217 - DNA, 17 bp, Arabidopsis thaliana
gcttgtggatacgtcgc

SEQ ID NO: 107218 - DNA, 17 bp, Arabidopsis thaliana
gcttgtggattttgctg

SEQ ID NO: 107219 - DNA, 17 bp, Arabidopsis thaliana
gcttgtgggggaatctg

SEQ ID NO: 107220 - DNA, 17 bp, Arabidopsis thaliana
gcttgtgtccagctgct

SEQ ID NO: 107221 - DNA, 17 bp, Arabidopsis thaliana
gcttgtgtctgcggcta

SEQ ID NO: 107222 - DNA, 17 bp, Arabidopsis thaliana
gcttgtgttgaactccg

SEQ ID NO: 107223 - DNA, 17 bp, Arabidopsis thaliana
gcttgtgtttgctctgg

SEQ ID NO: 107224 - DNA, 17 bp, Arabidopsis thaliana
gcttgttaagtactggc

SEQ ID NO: 107225 - DNA, 17 bp, Arabidopsis thaliana
gcttgttactcgacttg

SEQ ID NO: 107226 - DNA, 17 bp, Arabidopsis thaliana
gcttgttccagcaatca

SEQ ID NO: 107227 - DNA, 17 bp, Arabidopsis thaliana
gcttgttgactgaaccg

SEQ ID NO: 107228 - DNA, 17 bp, Arabidopsis thaliana
gcttgtttctcgttata

SEQ ID NO: 107229 - DNA, 17 bp, Arabidopsis thaliana
gcttgtttgttgagctg

SEQ ID NO: 107230 - DNA, 17 bp, Arabidopsis thaliana
gcttgttttctacgggc

SEQ ID NO: 107231 - DNA, 17 bp, Arabidopsis thaliana
gctttacgtctatctgg

SEQ ID NO: 107232 - DNA, 17 bp, Arabidopsis thaliana
gctttactgttcatcat

SEQ ID NO: 107233 - DNA, 17 bp, Arabidopsis thaliana
gctttagacctcttttg

SEQ ID NO: 107234 - DNA, 17 bp, Arabidopsis thaliana
gctttagcccaggaccg

SEQ ID NO: 107235 - DNA, 17 bp, Arabidopsis thaliana
gctttagcttcgcgagt

SEQ ID NO: 107236 - DNA, 17 bp, Arabidopsis thaliana
gctttataagtgccacg

SEQ ID NO: 107237 - DNA, 17 bp, Arabidopsis thaliana
gctttatccgcttgatc

SEQ ID NO: 107238 - DNA, 17 bp, Arabidopsis thaliana
gctttatctcaagggac

SEQ ID NO: 107239 - DNA, 17 bp, Arabidopsis thaliana
gctttattgatggctga

SEQ ID NO: 107240 - DNA, 17 bp, Arabidopsis thaliana
gctttattggaacagtg

SEQ ID NO: 107241 - DNA, 17 bp, Arabidopsis thaliana
gctttcaaagttgcgat

SEQ ID NO: 107242 - DNA, 17 bp, Arabidopsis thaliana
gctttcaagatctggtt

SEQ ID NO: 107243 - DNA, 17 bp, Arabidopsis thaliana
gctttcaaggttgcgat

SEQ ID NO: 107244 - DNA, 17 bp, Arabidopsis thaliana
gctttcaatcgctaaca

SEQ ID NO: 107245 - DNA, 17 bp, Arabidopsis thaliana
gctttcaatcttcaatt

SEQ ID NO: 107246 - DNA, 17 bp, Arabidopsis thaliana
gctttcacaaccgacgt

SEQ ID NO: 107247 - DNA, 17 bp, Arabidopsis thaliana
gctttcacgacggcgac

SEQ ID NO: 107248 - DNA, 17 bp, Arabidopsis thaliana
gctttcaggaaatatga

SEQ ID NO: 107249 - DNA, 17 bp, Arabidopsis thaliana
gctttcagtctgttact

SEQ ID NO: 107250 - DNA, 17 bp, Arabidopsis thaliana
gctttcatacttgtgcc

SEQ ID NO: 107251 - DNA, 17 bp, Arabidopsis thaliana
gctttcatagctcagtt

SEQ ID NO: 107252 - DNA, 17 bp, Arabidopsis thaliana
gctttcatcgcaccgac

SEQ ID NO: 107253 - DNA, 17 bp, Arabidopsis thaliana
gctttcatggtgtagcc

SEQ ID NO: 107254 - DNA, 17 bp, Arabidopsis thaliana
gctttcatggtgtagct

SEQ ID NO: 107255 - DNA, 17 bp, Arabidopsis thaliana
gctttcatggtgtaggc

SEQ ID NO: 107256 - DNA, 17 bp, Arabidopsis thaliana
gctttccaactaatgcc

SEQ ID NO: 107257 - DNA, 17 bp, Arabidopsis thaliana
gctttccaatgcatacc

SEQ ID NO: 107258 - DNA, 17 bp, Arabidopsis thaliana
gctttccatcctcttac

SEQ ID NO: 107259 - DNA, 17 bp, Arabidopsis thaliana
gctttccatggaagttg

SEQ ID NO: 107260 - DNA, 17 bp, Arabidopsis thaliana
gctttccgaaaaggttt

SEQ ID NO: 107261 - DNA, 17 bp, Arabidopsis thaliana
gctttccgactaatgcc

SEQ ID NO: 107262 - DNA, 17 bp, Arabidopsis thaliana
gctttccgactaatggc

SEQ ID NO: 107263 - DNA, 17 bp, Arabidopsis thaliana
gctttccgcagttcatc

SEQ ID NO: 107264 - DNA, 17 bp, Arabidopsis thaliana
gctttccttgaaggtag

SEQ ID NO: 107265 - DNA, 17 bp, Arabidopsis thaliana
gctttcgaaatccgatt

SEQ ID NO: 107266 - DNA, 17 bp, Arabidopsis thaliana
gctttcgcaacttggag

SEQ ID NO: 107267 - DNA, 17 bp, Arabidopsis thaliana
gctttcgcagttgttcg

SEQ ID NO: 107268 - DNA, 17 bp, Arabidopsis thaliana
gctttcgctgaaccaat

SEQ ID NO: 107269 - DNA, 17 bp, Arabidopsis thaliana
gctttcggttctctgga

SEQ ID NO: 107270 - DNA, 17 bp, Arabidopsis thaliana
gctttcggttgccgatc

SEQ ID NO: 107271 - DNA, 17 bp, Arabidopsis thaliana
gctttcgtgatagatct

SEQ ID NO: 107272 - DNA, 17 bp, Arabidopsis thaliana
gctttcgtttgctcatt

SEQ ID NO: 107273 - DNA, 17 bp, Arabidopsis thaliana
gctttctagccttctgt

SEQ ID NO: 107274 - DNA, 17 bp, Arabidopsis thaliana
gctttctcaggggggct

SEQ ID NO: 107275 - DNA, 17 bp, Arabidopsis thaliana
gctttctccaaattatg

SEQ ID NO: 107276 - DNA, 17 bp, Arabidopsis thaliana
gctttctcctgctaagt

SEQ ID NO: 107277 - DNA, 17 bp, Arabidopsis thaliana
gctttctgactcttcac

SEQ ID NO: 107278 - DNA, 17 bp, Arabidopsis thaliana
gctttcttgacttgttc

SEQ ID NO: 107279 - DNA, 17 bp, Arabidopsis thaliana
gctttctttgacttcct

SEQ ID NO: 107280 - DNA, 17 bp, Arabidopsis thaliana
gctttcttttgcgactc

SEQ ID NO: 107281 - DNA, 17 bp, Arabidopsis thaliana
gctttgacccagaactt

SEQ ID NO: 107282 - DNA, 17 bp, Arabidopsis thaliana
gctttgaccgagccagg

SEQ ID NO: 107283 - DNA, 17 bp, Arabidopsis thaliana
gctttgaccgcctaaat

SEQ ID NO: 107284 - DNA, 17 bp, Arabidopsis thaliana
gctttgaccgctgcctg

SEQ ID NO: 107285 - DNA, 17 bp, Arabidopsis thaliana
gctttgactcgagtgac

SEQ ID NO: 107286 - DNA, 17 bp, Arabidopsis thaliana
gctttgactctagtccg

SEQ ID NO: 107287 - DNA, 17 bp, Arabidopsis thaliana
gctttgactgcagagac

SEQ ID NO: 107288 - DNA, 17 bp, Arabidopsis thaliana
gctttgatcgttcggta

SEQ ID NO: 107289 - DNA, 17 bp, Arabidopsis thaliana
gctttgatctccttcct

SEQ ID NO: 107290 - DNA, 17 bp, Arabidopsis thaliana
gctttgatcttgtgggt

SEQ ID NO: 107291 - DNA, 17 bp, Arabidopsis thaliana
gctttgatggtgactta

SEQ ID NO: 107292 - DNA, 17 bp, Arabidopsis thaliana
gctttgatggtgtagcc

SEQ ID NO: 107293 - DNA, 17 bp, Arabidopsis thaliana
gctttgatggtttagcc

SEQ ID NO: 107294 - DNA, 17 bp, Arabidopsis thaliana
gctttgattggcgttta

SEQ ID NO: 107295 - DNA, 17 bp, Arabidopsis thaliana
gctttgcaactcggatt

SEQ ID NO: 107296 - DNA, 17 bp, Arabidopsis thaliana
gctttgcagaccagtct

SEQ ID NO: 107297 - DNA, 17 bp, Arabidopsis thaliana
gctttgcccgcccaggt

SEQ ID NO: 107298 - DNA, 17 bp, Arabidopsis thaliana
gctttgcccgcgcagct

SEQ ID NO: 107299 - DNA, 17 bp, Arabidopsis thaliana
gctttgcccgcgcagga

SEQ ID NO: 107300 - DNA, 17 bp, Arabidopsis thaliana
gctttgcccgcgcaggt

SEQ ID NO: 107301 - DNA, 17 bp, Arabidopsis thaliana
gctttgcccgctcaggt

SEQ ID NO: 107302 - DNA, 17 bp, Arabidopsis thaliana
gctttgcctagggtctt

SEQ ID NO: 107303 - DNA, 17 bp, Arabidopsis thaliana
gctttgcgccctgtgac

SEQ ID NO: 107304 - DNA, 17 bp, Arabidopsis thaliana
gctttgcggctgttgat

SEQ ID NO: 107305 - DNA, 17 bp, Arabidopsis thaliana
gctttgcggttgtgtgc

SEQ ID NO: 107306 - DNA, 17 bp, Arabidopsis thaliana
gctttgcggttgtgtgt

SEQ ID NO: 107307 - DNA, 17 bp, Arabidopsis thaliana
gctttgctctcgggaga

SEQ ID NO: 107308 - DNA, 17 bp, Arabidopsis thaliana
gctttgctgttacgact

SEQ ID NO: 107309 - DNA, 17 bp, Arabidopsis thaliana
gctttggactcgatgtt

SEQ ID NO: 107310 - DNA, 17 bp, Arabidopsis thaliana
gctttggattatggaat

SEQ ID NO: 107311 - DNA, 17 bp, Arabidopsis thaliana
gctttggcattccatca

SEQ ID NO: 107312 - DNA, 17 bp, Arabidopsis thaliana
gctttggccattgaggt

SEQ ID NO: 107313 - DNA, 17 bp, Arabidopsis thaliana
gctttggcccaattggt

SEQ ID NO: 107314 - DNA, 17 bp, Arabidopsis thaliana
gctttggccccattggt

SEQ ID NO: 107315 - DNA, 17 bp, Arabidopsis thaliana
gctttggctagcagatc

SEQ ID NO: 107316 - DNA, 17 bp, Arabidopsis thaliana
gctttggctcggattcg

SEQ ID NO: 107317 - DNA, 17 bp, Arabidopsis thaliana
gctttggctctgtcgac

SEQ ID NO: 107318 - DNA, 17 bp, Arabidopsis thaliana
gctttggcttctctgat

SEQ ID NO: 107319 - DNA, 17 bp, Arabidopsis thaliana
gctttggctttgtgtct

SEQ ID NO: 107320 - DNA, 17 bp, Arabidopsis thaliana
gctttgggatagttctg

SEQ ID NO: 107321 - DNA, 17 bp, Arabidopsis thaliana
gctttgggatggagaat

SEQ ID NO: 107322 - DNA, 17 bp, Arabidopsis thaliana
gctttgggcttttcctg

SEQ ID NO: 107323 - DNA, 17 bp, Arabidopsis thaliana
gctttggggacaaggct

SEQ ID NO: 107324 - DNA, 17 bp, Arabidopsis thaliana
gctttgggtgcgagagg

SEQ ID NO: 107325 - DNA, 17 bp, Arabidopsis thaliana
gctttgggtgtgagttg

SEQ ID NO: 107326 - DNA, 17 bp, Arabidopsis thaliana
gctttggtaggaatgca

SEQ ID NO: 107327 - DNA, 17 bp, Arabidopsis thaliana
gctttggtgagaaaacg

SEQ ID NO: 107328 - DNA, 17 bp, Arabidopsis thaliana
gctttggtgggcgggtt

SEQ ID NO: 107329 - DNA, 17 bp, Arabidopsis thaliana
gctttggtgtgtgcgtt

SEQ ID NO: 107330 - DNA, 17 bp, Arabidopsis thaliana
gctttgtactccagttc

SEQ ID NO: 107331 - DNA, 17 bp, Arabidopsis thaliana
gctttgtacttcagcag

SEQ ID NO: 107332 - DNA, 17 bp, Arabidopsis thaliana
gctttgtacttcagttc

SEQ ID NO: 107333 - DNA, 17 bp, Arabidopsis thaliana
gctttgtataggattga

SEQ ID NO: 107334 - DNA, 17 bp, Arabidopsis thaliana
gctttgtatgatcttgg

SEQ ID NO: 107335 - DNA, 17 bp, Arabidopsis thaliana
gctttgtcaaggattcg

SEQ ID NO: 107336 - DNA, 17 bp, Arabidopsis thaliana
gctttgtccattcggag

SEQ ID NO: 107337 - DNA, 17 bp, Arabidopsis thaliana
gctttgtcgctaagatt

SEQ ID NO: 107338 - DNA, 17 bp, Arabidopsis thaliana
gctttgtcggtcgactt

SEQ ID NO: 107339 - DNA, 17 bp, Arabidopsis thaliana
gctttgtgattctcagt

SEQ ID NO: 107340 - DNA, 17 bp, Arabidopsis thaliana
gctttgtgcaacttttt

SEQ ID NO: 107341 - DNA, 17 bp, Arabidopsis thaliana
gctttgtgtctatcggt

SEQ ID NO: 107342 - DNA, 17 bp, Arabidopsis thaliana
gctttgtgtttaaccgc

SEQ ID NO: 107343 - DNA, 17 bp, Arabidopsis thaliana
gctttgttaaccatctg

SEQ ID NO: 107344 - DNA, 17 bp, Arabidopsis thaliana
gctttgttacaagatcc

SEQ ID NO: 107345 - DNA, 17 bp, Arabidopsis thaliana
gctttgttactttttcc

SEQ ID NO: 107346 - DNA, 17 bp, Arabidopsis thaliana
gctttgttccagcgact

SEQ ID NO: 107347 - DNA, 17 bp, Arabidopsis thaliana
gctttgttctatcgcct

SEQ ID NO: 107348 - DNA, 17 bp, Arabidopsis thaliana
gctttgttgaactgtat

SEQ ID NO: 107349 - DNA, 17 bp, Arabidopsis thaliana
gctttgttgagccgtca

SEQ ID NO: 107350 - DNA, 17 bp, Arabidopsis thaliana
gctttgttgttgctctg

SEQ ID NO: 107351 - DNA, 17 bp, Arabidopsis thaliana
gctttgtttaggattgt

SEQ ID NO: 107352 - DNA, 17 bp, Arabidopsis thaliana
gcttttaaaatgcggtt

SEQ ID NO: 107353 - DNA, 17 bp, Arabidopsis thaliana
gcttttaagataaggtt

SEQ ID NO: 107354 - DNA, 17 bp, Arabidopsis thaliana
gcttttaagatatggtt

SEQ ID NO: 107355 - DNA, 17 bp, Arabidopsis thaliana
gcttttaagatcaagtt

SEQ ID NO: 107356 - DNA, 17 bp, Arabidopsis thaliana
gcttttaagatcaggtt

SEQ ID NO: 107357 - DNA, 17 bp, Arabidopsis thaliana
gcttttaagatccggtt

SEQ ID NO: 107358 - DNA, 17 bp, Arabidopsis thaliana
gcttttaagatcgattt

SEQ ID NO: 107359 - DNA, 17 bp, Arabidopsis thaliana
gcttttaagatcgggct

SEQ ID NO: 107360 - DNA, 17 bp, Arabidopsis thaliana
gcttttaagatcgggtt

SEQ ID NO: 107361 - DNA, 17 bp, Arabidopsis thaliana
gcttttaagatcggtat

SEQ ID NO: 107362 - DNA, 17 bp, Arabidopsis thaliana
gcttttaagatctggtt

SEQ ID NO: 107363 - DNA, 17 bp, Arabidopsis thaliana
gcttttaagattgggtt

SEQ ID NO: 107364 - DNA, 17 bp, Arabidopsis thaliana
gcttttaagttctggtt

SEQ ID NO: 107365 - DNA, 17 bp, Arabidopsis thaliana
gcttttacatctgcgag

SEQ ID NO: 107366 - DNA, 17 bp, Arabidopsis thaliana
gcttttacgataaggtt

SEQ ID NO: 107367 - DNA, 17 bp, Arabidopsis thaliana
gcttttacgatcgggtt

SEQ ID NO: 107368 - DNA, 17 bp, Arabidopsis thaliana
gcttttacttaggctcc

SEQ ID NO: 107369 - DNA, 17 bp, Arabidopsis thaliana
gcttttatgatcgggtt

SEQ ID NO: 107370 - DNA, 17 bp, Arabidopsis thaliana
gcttttatgattgggtt

SEQ ID NO: 107371 - DNA, 17 bp, Arabidopsis thaliana
gcttttccattgagctc

SEQ ID NO: 107372 - DNA, 17 bp, Arabidopsis thaliana
gcttttcgtcggagtcc

SEQ ID NO: 107373 - DNA, 17 bp, Arabidopsis thaliana
gcttttctcaggcgttg

SEQ ID NO: 107374 - DNA, 17 bp, Arabidopsis thaliana
gcttttctcatcagtgt

SEQ ID NO: 107375 - DNA, 17 bp, Arabidopsis thaliana
gcttttctcgggtttcc

SEQ ID NO: 107376 - DNA, 17 bp, Arabidopsis thaliana
gcttttctctggttttc

SEQ ID NO: 107377 - DNA, 17 bp, Arabidopsis thaliana
gcttttctggttgagtg

SEQ ID NO: 107378 - DNA, 17 bp, Arabidopsis thaliana
gcttttcttcctgtgat

SEQ ID NO: 107379 - DNA, 17 bp, Arabidopsis thaliana
gcttttgaatgatggac

SEQ ID NO: 107380 - DNA, 17 bp, Arabidopsis thaliana
gcttttgagatcagtta

SEQ ID NO: 107381 - DNA, 17 bp, Arabidopsis thaliana
gcttttgataaactgca

SEQ ID NO: 107382 - DNA, 17 bp, Arabidopsis thaliana
gcttttgatacgcttgt

SEQ ID NO: 107383 - DNA, 17 bp, Arabidopsis thaliana
gcttttgccaaggatgt

SEQ ID NO: 107384 - DNA, 17 bp, Arabidopsis thaliana
gcttttgcccagtcaac

SEQ ID NO: 107385 - DNA, 17 bp, Arabidopsis thaliana
gcttttgccgtctttgt

SEQ ID NO: 107386 - DNA, 17 bp, Arabidopsis thaliana
gcttttgcttccgactg

SEQ ID NO: 107387 - DNA, 17 bp, Arabidopsis thaliana
gcttttggattcaggaa

SEQ ID NO: 107388 - DNA, 17 bp, Arabidopsis thaliana
gcttttggtcggtgctt

SEQ ID NO: 107389 - DNA, 17 bp, Arabidopsis thaliana
gcttttggtcgtggctt

SEQ ID NO: 107390 - DNA, 17 bp, Arabidopsis thaliana
gcttttggttgtggact

SEQ ID NO: 107391 - DNA, 17 bp, Arabidopsis thaliana
gcttttggttgtgtgac

SEQ ID NO: 107392 - DNA, 17 bp, Arabidopsis thaliana
gcttttgtaaccaagtg

SEQ ID NO: 107393 - DNA, 17 bp, Arabidopsis thaliana
gcttttgtcaaatgtga

SEQ ID NO: 107394 - DNA, 17 bp, Arabidopsis thaliana
gcttttgtggaggtttg

SEQ ID NO: 107395 - DNA, 17 bp, Arabidopsis thaliana
gcttttgtggtcagggt

SEQ ID NO: 107396 - DNA, 17 bp, Arabidopsis thaliana
gcttttgttccgctaca

SEQ ID NO: 107397 - DNA, 17 bp, Arabidopsis thaliana
gcttttgttctacttga

SEQ ID NO: 107398 - DNA, 17 bp, Arabidopsis thaliana
gctttttaagtccgccg

SEQ ID NO: 107399 - DNA, 17 bp, Arabidopsis thaliana
gctttttacagtctctc

SEQ ID NO: 107400 - DNA, 17 bp, Arabidopsis thaliana
gctttttagatcgagtt

SEQ ID NO: 107401 - DNA, 17 bp, Arabidopsis thaliana
gctttttattggctcac

SEQ ID NO: 107402 - DNA, 17 bp, Arabidopsis thaliana
gctttttccagaaggat

SEQ ID NO: 107403 - DNA, 17 bp, Arabidopsis thaliana
gctttttcgccgtcact

SEQ ID NO: 107404 - DNA, 17 bp, Arabidopsis thaliana
gctttttcggccttttc

SEQ ID NO: 107405 - DNA, 17 bp, Arabidopsis thaliana
gctttttcgtgatcttt

SEQ ID NO: 107406 - DNA, 17 bp, Arabidopsis thaliana
gctttttcgttggcagt

SEQ ID NO: 107407 - DNA, 17 bp, Arabidopsis thaliana
gctttttctctggagag

SEQ ID NO: 107408 - DNA, 17 bp, Arabidopsis thaliana
gctttttcttccgactg

SEQ ID NO: 107409 - DNA, 17 bp, Arabidopsis thaliana
gctttttctttctccac

SEQ ID NO: 107410 - DNA, 17 bp, Arabidopsis thaliana
gctttttgatcctccga

SEQ ID NO: 107411 - DNA, 17 bp, Arabidopsis thaliana
gctttttgatccttcga

SEQ ID NO: 107412 - DNA, 17 bp, Arabidopsis thaliana
gctttttgattcttcca

SEQ ID NO: 107413 - DNA, 17 bp, Arabidopsis thaliana
gctttttgattcttcga

SEQ ID NO: 107414 - DNA, 17 bp, Arabidopsis thaliana
gctttttggatgttgtg

SEQ ID NO: 107415 - DNA, 17 bp, Arabidopsis thaliana
gctttttggatgtttgt

SEQ ID NO: 107416 - DNA, 17 bp, Arabidopsis thaliana
gctttttgtaactggat

SEQ ID NO: 107417 - DNA, 17 bp, Arabidopsis thaliana
gctttttgtatttctag

SEQ ID NO: 107418 - DNA, 17 bp, Arabidopsis thaliana
gctttttgtcgctaaga

SEQ ID NO: 107419 - DNA, 17 bp, Arabidopsis thaliana
ggaaaaacatgcgacat

SEQ ID NO: 107420 - DNA, 17 bp, Arabidopsis thaliana
ggaaaaacccctgggac

SEQ ID NO: 107421 - DNA, 17 bp, Arabidopsis thaliana
ggaaaaacttttcccgc

SEQ ID NO: 107422 - DNA, 17 bp, Arabidopsis thaliana
ggaaaaatagctcgacg

SEQ ID NO: 107423 - DNA, 17 bp, Arabidopsis thaliana
ggaaaaatctcgggttt

SEQ ID NO: 107424 - DNA, 17 bp, Arabidopsis thaliana
ggaaaaatgcggtgcgg

SEQ ID NO: 107425 - DNA, 17 bp, Arabidopsis thaliana
ggaaaaatggagcataa

SEQ ID NO: 107426 - DNA, 17 bp, Arabidopsis thaliana
ggaaaaattacgggttt

SEQ ID NO: 107427 - DNA, 17 bp, Arabidopsis thaliana
ggaaaacattccaaact

SEQ ID NO: 107428 - DNA, 17 bp, Arabidopsis thaliana
ggaaaaccacgggctcc

SEQ ID NO: 107429 - DNA, 17 bp, Arabidopsis thaliana
ggaaaaccctatccgct

SEQ ID NO: 107430 - DNA, 17 bp, Arabidopsis thaliana
ggaaaacgccgagggtg

SEQ ID NO: 107431 - DNA, 17 bp, Arabidopsis thaliana
ggaaaacggccaatttt

SEQ ID NO: 107432 - DNA, 17 bp, Arabidopsis thaliana
ggaaaactaaccggact

SEQ ID NO: 107433 - DNA, 17 bp, Arabidopsis thaliana
ggaaaagaactaggttg

SEQ ID NO: 107434 - DNA, 17 bp, Arabidopsis thaliana
ggaaaagaattcagagt

SEQ ID NO: 107435 - DNA, 17 bp, Arabidopsis thaliana
ggaaaagaggagttgct

SEQ ID NO: 107436 - DNA, 17 bp, Arabidopsis thaliana
ggaaaagctcgaacgac

SEQ ID NO: 107437 - DNA, 17 bp, Arabidopsis thaliana
ggaaaagctgagaatgc

SEQ ID NO: 107438 - DNA, 17 bp, Arabidopsis thaliana
ggaaaaggattggctct

SEQ ID NO: 107439 - DNA, 17 bp, Arabidopsis thaliana
ggaaaaggctcagttct

SEQ ID NO: 107440 - DNA, 17 bp, Arabidopsis thaliana
ggaaaaggggaatccga

SEQ ID NO: 107441 - DNA, 17 bp, Arabidopsis thaliana
ggaaaagtgtagagatt

SEQ ID NO: 107442 - DNA, 17 bp, Arabidopsis thaliana
ggaaaagttccattgtc

SEQ ID NO: 107443 - DNA, 17 bp, Arabidopsis thaliana
ggaaaagttgtcgacgg

SEQ ID NO: 107444 - DNA, 17 bp, Arabidopsis thaliana
ggaaaatagaccgttta

SEQ ID NO: 107445 - DNA, 17 bp, Arabidopsis thaliana
ggaaaatagaggctgat

SEQ ID NO: 107446 - DNA, 17 bp, Arabidopsis thaliana
ggaaaatcactaatcgt

SEQ ID NO: 107447 - DNA, 17 bp, Arabidopsis thaliana
ggaaaatcaggtttagt

SEQ ID NO: 107448 - DNA, 17 bp, Arabidopsis thaliana
ggaaaatcgagatcggg

SEQ ID NO: 107449 - DNA, 17 bp, Arabidopsis thaliana
ggaaaatcggttaggat

SEQ ID NO: 107450 - DNA, 17 bp, Arabidopsis thaliana
ggaaaatctgtcagttg

SEQ ID NO: 107451 - DNA, 17 bp, Arabidopsis thaliana
ggaaaatgactgtctta

SEQ ID NO: 107452 - DNA, 17 bp, Arabidopsis thaliana
ggaaaatgagctatccc

SEQ ID NO: 107453 - DNA, 17 bp, Arabidopsis thaliana
ggaaaatgatctgagtt

SEQ ID NO: 107454 - DNA, 17 bp, Arabidopsis thaliana
ggaaaattacaggtttc

SEQ ID NO: 107455 - DNA, 17 bp, Arabidopsis thaliana
ggaaaattacgggtttc

SEQ ID NO: 107456 - DNA, 17 bp, Arabidopsis thaliana
ggaaaattcacagtaga

SEQ ID NO: 107457 - DNA, 17 bp, Arabidopsis thaliana
ggaaaattcaggtaaaa

SEQ ID NO: 107458 - DNA, 17 bp, Arabidopsis thaliana
ggaaaattcgcgtaatt

SEQ ID NO: 107459 - DNA, 17 bp, Arabidopsis thaliana
ggaaaattggatggcct

SEQ ID NO: 107460 - DNA, 17 bp, Arabidopsis thaliana
ggaaaattgggcctgag

SEQ ID NO: 107461 - DNA, 17 bp, Arabidopsis thaliana
ggaaaatttgcggaatt

SEQ ID NO: 107462 - DNA, 17 bp, Arabidopsis thaliana
ggaaaattttggcggga

SEQ ID NO: 107463 - DNA, 17 bp, Arabidopsis thaliana
ggaaaatttttggcggg

SEQ ID NO: 107464 - DNA, 17 bp, Arabidopsis thaliana
ggaaacaacgattagtg

SEQ ID NO: 107465 - DNA, 17 bp, Arabidopsis thaliana
ggaaacaactatgaccg

SEQ ID NO: 107466 - DNA, 17 bp, Arabidopsis thaliana
ggaaacagagacgattc

SEQ ID NO: 107467 - DNA, 17 bp, Arabidopsis thaliana
ggaaacagagctctttt

SEQ ID NO: 107468 - DNA, 17 bp, Arabidopsis thaliana
ggaaacagagtcagatc

SEQ ID NO: 107469 - DNA, 17 bp, Arabidopsis thaliana
ggaaacagcatgtggat

SEQ ID NO: 107470 - DNA, 17 bp, Arabidopsis thaliana
ggaaacaggcggttgcg

SEQ ID NO: 107471 - DNA, 17 bp, Arabidopsis thaliana
ggaaacagtgacggcaa

SEQ ID NO: 107472 - DNA, 17 bp, Arabidopsis thaliana
ggaaacatgattttgcg

SEQ ID NO: 107473 - DNA, 17 bp, Arabidopsis thaliana
ggaaacccattgttgcg

SEQ ID NO: 107474 - DNA, 17 bp, Arabidopsis thaliana
ggaaacccgctcaagga

SEQ ID NO: 107475 - DNA, 17 bp, Arabidopsis thaliana
ggaaacccgtctgatag

SEQ ID NO: 107476 - DNA, 17 bp, Arabidopsis thaliana
ggaaaccgtgtacttaa

SEQ ID NO: 107477 - DNA, 17 bp, Arabidopsis thaliana
ggaaaccgtgtacttag

SEQ ID NO: 107478 - DNA, 17 bp, Arabidopsis thaliana
ggaaacctctttactga

SEQ ID NO: 107479 - DNA, 17 bp, Arabidopsis thaliana
ggaaacgcttactggcc

SEQ ID NO: 107480 - DNA, 17 bp, Arabidopsis thaliana
ggaaacggagtgggtta

SEQ ID NO: 107481 - DNA, 17 bp, Arabidopsis thaliana
ggaaacggctcagccgg

SEQ ID NO: 107482 - DNA, 17 bp, Arabidopsis thaliana
ggaaacggtcatctatg

SEQ ID NO: 107483 - DNA, 17 bp, Arabidopsis thaliana
ggaaacgtgcggccgtg

SEQ ID NO: 107484 - DNA, 17 bp, Arabidopsis thaliana
ggaaacgtgttttggct

SEQ ID NO: 107485 - DNA, 17 bp, Arabidopsis thaliana
ggaaacgttggccaatt

SEQ ID NO: 107486 - DNA, 17 bp, Arabidopsis thaliana
ggaaactaaccggattt

SEQ ID NO: 107487 - DNA, 17 bp, Arabidopsis thaliana
ggaaactaagccaagaa

SEQ ID NO: 107488 - DNA, 17 bp, Arabidopsis thaliana
ggaaactaagtcggcag

SEQ ID NO: 107489 - DNA, 17 bp, Arabidopsis thaliana
ggaaactaccaatgggg

SEQ ID NO: 107490 - DNA, 17 bp, Arabidopsis thaliana
ggaaactagttaacggc

SEQ ID NO: 107491 - DNA, 17 bp, Arabidopsis thaliana
ggaaactattggttcgt

SEQ ID NO: 107492 - DNA, 17 bp, Arabidopsis thaliana
ggaaactcagaatcact

SEQ ID NO: 107493 - DNA, 17 bp, Arabidopsis thaliana
ggaaactccgaatacag

SEQ ID NO: 107494 - DNA, 17 bp, Arabidopsis thaliana
ggaaactctgtgcggga

SEQ ID NO: 107495 - DNA, 17 bp, Arabidopsis thaliana
ggaaactgaaacttttc

SEQ ID NO: 107496 - DNA, 17 bp, Arabidopsis thaliana
ggaaacttaccaggtcc

SEQ ID NO: 107497 - DNA, 17 bp, Arabidopsis thaliana
ggaaacttcgccaaatc

SEQ ID NO: 107498 - DNA, 17 bp, Arabidopsis thaliana
ggaaacttctatctgga

SEQ ID NO: 107499 - DNA, 17 bp, Arabidopsis thaliana
ggaaacttctgacggaa

SEQ ID NO: 107500 - DNA, 17 bp, Arabidopsis thaliana
ggaaacttctgcacttg

SEQ ID NO: 107501 - DNA, 17 bp, Arabidopsis thaliana
ggaaacttgacgtaacc

SEQ ID NO: 107502 - DNA, 17 bp, Arabidopsis thaliana
ggaaacttggatctctt

SEQ ID NO: 107503 - DNA, 17 bp, Arabidopsis thaliana
ggaaactttttttggat

SEQ ID NO: 107504 - DNA, 17 bp, Arabidopsis thaliana
ggaaagaagaccctgtt

SEQ ID NO: 107505 - DNA, 17 bp, Arabidopsis thaliana
ggaaagaattactcagc

SEQ ID NO: 107506 - DNA, 17 bp, Arabidopsis thaliana
ggaaagacaagggatgt

SEQ ID NO: 107507 - DNA, 17 bp, Arabidopsis thaliana
ggaaagacaccctctgc

SEQ ID NO: 107508 - DNA, 17 bp, Arabidopsis thaliana
ggaaagacatcactttg

SEQ ID NO: 107509 - DNA, 17 bp, Arabidopsis thaliana
ggaaagaccaagtgaaa

SEQ ID NO: 107510 - DNA, 17 bp, Arabidopsis thaliana
ggaaagacctttctgtc

SEQ ID NO: 107511 - DNA, 17 bp, Arabidopsis thaliana
ggaaagactattggtgt

SEQ ID NO: 107512 - DNA, 17 bp, Arabidopsis thaliana
ggaaagactggtctgca

SEQ ID NO: 107513 - DNA, 17 bp, Arabidopsis thaliana
ggaaagagtcattggag

SEQ ID NO: 107514 - DNA, 17 bp, Arabidopsis thaliana
ggaaagatcaagtttga

SEQ ID NO: 107515 - DNA, 17 bp, Arabidopsis thaliana
ggaaagatcatgtggtg

SEQ ID NO: 107516 - DNA, 17 bp, Arabidopsis thaliana
ggaaagatggccgagtg

SEQ ID NO: 107517 - DNA, 17 bp, Arabidopsis thaliana
ggaaagatggtgaacta

SEQ ID NO: 107518 - DNA, 17 bp, Arabidopsis thaliana
ggaaagatgtaggcaag

SEQ ID NO: 107519 - DNA, 17 bp, Arabidopsis thaliana
ggaaagattggtttccc

SEQ ID NO: 107520 - DNA, 17 bp, Arabidopsis thaliana
ggaaagcaatggttgta

SEQ ID NO: 107521 - DNA, 17 bp, Arabidopsis thaliana
ggaaagcattccaaaca

SEQ ID NO: 107522 - DNA, 17 bp, Arabidopsis thaliana
ggaaagcattccaaact

SEQ ID NO: 107523 - DNA, 17 bp, Arabidopsis thaliana
ggaaagcccaaagacag

SEQ ID NO: 107524 - DNA, 17 bp, Arabidopsis thaliana
ggaaagcccaaagagag

SEQ ID NO: 107525 - DNA, 17 bp, Arabidopsis thaliana
ggaaagcccaaagataa

SEQ ID NO: 107526 - DNA, 17 bp, Arabidopsis thaliana
ggaaagcccaaagatag

SEQ ID NO: 107527 - DNA, 17 bp, Arabidopsis thaliana
ggaaagccgaaagagag

SEQ ID NO: 107528 - DNA, 17 bp, Arabidopsis thaliana
ggaaagcgtgggatcat

SEQ ID NO: 107529 - DNA, 17 bp, Arabidopsis thaliana
ggaaagctctccaaagt

SEQ ID NO: 107530 - DNA, 17 bp, Arabidopsis thaliana
ggaaagctctccaactc

SEQ ID NO: 107531 - DNA, 17 bp, Arabidopsis thaliana
ggaaagctgagatagcc

SEQ ID NO: 107532 - DNA, 17 bp, Arabidopsis thaliana
ggaaagctgtattgcag

SEQ ID NO: 107533 - DNA, 17 bp, Arabidopsis thaliana
ggaaaggactccattcg

SEQ ID NO: 107534 - DNA, 17 bp, Arabidopsis thaliana
ggaaaggatgaaagtac

SEQ ID NO: 107535 - DNA, 17 bp, Arabidopsis thaliana
ggaaaggattcatccgc

SEQ ID NO: 107536 - DNA, 17 bp, Arabidopsis thaliana
ggaaagggaagcaaaca

SEQ ID NO: 107537 - DNA, 17 bp, Arabidopsis thaliana
ggaaaggtatcggctct

SEQ ID NO: 107538 - DNA, 17 bp, Arabidopsis thaliana
ggaaagtccacggtggg

SEQ ID NO: 107539 - DNA, 17 bp, Arabidopsis thaliana
ggaaagtccactgttac

SEQ ID NO: 107540 - DNA, 17 bp, Arabidopsis thaliana
ggaaagtctgtcagtta

SEQ ID NO: 107541 - DNA, 17 bp, Arabidopsis thaliana
ggaaagtctgtcagttg

SEQ ID NO: 107542 - DNA, 17 bp, Arabidopsis thaliana
ggaaagtctgttagtta

SEQ ID NO: 107543 - DNA, 17 bp, Arabidopsis thaliana
ggaaagtcttttggttg

SEQ ID NO: 107544 - DNA, 17 bp, Arabidopsis thaliana
ggaaagtgactacatcg

SEQ ID NO: 107545 - DNA, 17 bp, Arabidopsis thaliana
ggaaagtgactactttg

SEQ ID NO: 107546 - DNA, 17 bp, Arabidopsis thaliana
ggaaagtgattgtccga

SEQ ID NO: 107547 - DNA, 17 bp, Arabidopsis thaliana
ggaaagtgcctgttttg

SEQ ID NO: 107548 - DNA, 17 bp, Arabidopsis thaliana
ggaaagtgcggacgggt

SEQ ID NO: 107549 - DNA, 17 bp, Arabidopsis thaliana
ggaaagtgctaaggatg

SEQ ID NO: 107550 - DNA, 17 bp, Arabidopsis thaliana
ggaaagtgcttagcaaa

SEQ ID NO: 107551 - DNA, 17 bp, Arabidopsis thaliana
ggaaagttcatcgagat

SEQ ID NO: 107552 - DNA, 17 bp, Arabidopsis thaliana
ggaaagttgaaagatcc

SEQ ID NO: 107553 - DNA, 17 bp, Arabidopsis thaliana
ggaaagttgttgttgag

SEQ ID NO: 107554 - DNA, 17 bp, Arabidopsis thaliana
ggaaagtttgcactgaa

SEQ ID NO: 107555 - DNA, 17 bp, Arabidopsis thaliana
ggaaagttttgatggaa

SEQ ID NO: 107556 - DNA, 17 bp, Arabidopsis thaliana
ggaaataatccggtaac

SEQ ID NO: 107557 - DNA, 17 bp, Arabidopsis thaliana
ggaaataatccggttac

SEQ ID NO: 107558 - DNA, 17 bp, Arabidopsis thaliana
ggaaataatgagtttac

SEQ ID NO: 107559 - DNA, 17 bp, Arabidopsis thaliana
ggaaataccgaaggctt

SEQ ID NO: 107560 - DNA, 17 bp, Arabidopsis thaliana
ggaaatacgttctgcca

SEQ ID NO: 107561 - DNA, 17 bp, Arabidopsis thaliana
ggaaatagacactttct

SEQ ID NO: 107562 - DNA, 17 bp, Arabidopsis thaliana
ggaaatagaccgttttt

SEQ ID NO: 107563 - DNA, 17 bp, Arabidopsis thaliana
ggaaatattctcaggat

SEQ ID NO: 107564 - DNA, 17 bp, Arabidopsis thaliana
ggaaatcagcctctgca

SEQ ID NO: 107565 - DNA, 17 bp, Arabidopsis thaliana
ggaaatccactagaacc

SEQ ID NO: 107566 - DNA, 17 bp, Arabidopsis thaliana
ggaaatccagatctagt

SEQ ID NO: 107567 - DNA, 17 bp, Arabidopsis thaliana
ggaaatccagatctata

SEQ ID NO: 107568 - DNA, 17 bp, Arabidopsis thaliana
ggaaatcccaaagaaaa

SEQ ID NO: 107569 - DNA, 17 bp, Arabidopsis thaliana
ggaaatcccaaagaaag

SEQ ID NO: 107570 - DNA, 17 bp, Arabidopsis thaliana
ggaaatccgcttacatg

SEQ ID NO: 107571 - DNA, 17 bp, Arabidopsis thaliana
ggaaatctgtcagttgg

SEQ ID NO: 107572 - DNA, 17 bp, Arabidopsis thaliana
ggaaatctgtgcagctt

SEQ ID NO: 107573 - DNA, 17 bp, Arabidopsis thaliana
ggaaatcttgatttgaa

SEQ ID NO: 107574 - DNA, 17 bp, Arabidopsis thaliana
ggaaatctttgatgacc

SEQ ID NO: 107575 - DNA, 17 bp, Arabidopsis thaliana
ggaaatgaccacaagct

SEQ ID NO: 107576 - DNA, 17 bp, Arabidopsis thaliana
ggaaatgaccacaagtt

SEQ ID NO: 107577 - DNA, 17 bp, Arabidopsis thaliana
ggaaatgacttctcttt

SEQ ID NO: 107578 - DNA, 17 bp, Arabidopsis thaliana
ggaaatgatctggttac

SEQ ID NO: 107579 - DNA, 17 bp, Arabidopsis thaliana
ggaaatggactgccgcc

SEQ ID NO: 107580 - DNA, 17 bp, Arabidopsis thaliana
ggaaatggccctaattg

SEQ ID NO: 107581 - DNA, 17 bp, Arabidopsis thaliana
ggaaatggctaactggg

SEQ ID NO: 107582 - DNA, 17 bp, Arabidopsis thaliana
ggaaatggtgcgtcgtg

SEQ ID NO: 107583 - DNA, 17 bp, Arabidopsis thaliana
ggaaatgtctgggctca

SEQ ID NO: 107584 - DNA, 17 bp, Arabidopsis thaliana
ggaaatgtggcgagatg

SEQ ID NO: 107585 - DNA, 17 bp, Arabidopsis thaliana
ggaaatgtgggctgctt

SEQ ID NO: 107586 - DNA, 17 bp, Arabidopsis thaliana
ggaaatgtttgccgtaa

SEQ ID NO: 107587 - DNA, 17 bp, Arabidopsis thaliana
ggaaattaattggccgc

SEQ ID NO: 107588 - DNA, 17 bp, Arabidopsis thaliana
ggaaattcagaaaccgc

SEQ ID NO: 107589 - DNA, 17 bp, Arabidopsis thaliana
ggaaattcctttatatc

SEQ ID NO: 107590 - DNA, 17 bp, Arabidopsis thaliana
ggaaattgagagaccaa

SEQ ID NO: 107591 - DNA, 17 bp, Arabidopsis thaliana
ggaaattgtgaatgccg

SEQ ID NO: 107592 - DNA, 17 bp, Arabidopsis thaliana
ggaaattgtgactgaac

SEQ ID NO: 107593 - DNA, 17 bp, Arabidopsis thaliana
ggaacaaaccgggtttt

SEQ ID NO: 107594 - DNA, 17 bp, Arabidopsis thaliana
ggaacaaacggtttggg

SEQ ID NO: 107595 - DNA, 17 bp, Arabidopsis thaliana
ggaacaacaccaatcca

SEQ ID NO: 107596 - DNA, 17 bp, Arabidopsis thaliana
ggaacaagagcggatca

SEQ ID NO: 107597 - DNA, 17 bp, Arabidopsis thaliana
ggaacaagagtgtttga

SEQ ID NO: 107598 - DNA, 17 bp, Arabidopsis thaliana
ggaacaagatgccactc

SEQ ID NO: 107599 - DNA, 17 bp, Arabidopsis thaliana
ggaacaaggtagccgta

SEQ ID NO: 107600 - DNA, 17 bp, Arabidopsis thaliana
ggaacaagtgcagtttg

SEQ ID NO: 107601 - DNA, 17 bp, Arabidopsis thaliana
ggaacaagtgcagtttt

SEQ ID NO: 107602 - DNA, 17 bp, Arabidopsis thaliana
ggaacaatcaggttttt

SEQ ID NO: 107603 - DNA, 17 bp, Arabidopsis thaliana
ggaacaatcgttccgac

SEQ ID NO: 107604 - DNA, 17 bp, Arabidopsis thaliana
ggaacaattttcttctt

SEQ ID NO: 107605 - DNA, 17 bp, Arabidopsis thaliana
ggaacacatgcgattgt

SEQ ID NO: 107606 - DNA, 17 bp, Arabidopsis thaliana
ggaacacggttaggatt

SEQ ID NO: 107607 - DNA, 17 bp, Arabidopsis thaliana
ggaacagacagtgcggg

SEQ ID NO: 107608 - DNA, 17 bp, Arabidopsis thaliana
ggaacagagccagacgc

SEQ ID NO: 107609 - DNA, 17 bp, Arabidopsis thaliana
ggaacagattttgatga

SEQ ID NO: 107610 - DNA, 17 bp, Arabidopsis thaliana
ggaacagcagtggcgca

SEQ ID NO: 107611 - DNA, 17 bp, Arabidopsis thaliana
ggaacagctgactctga

SEQ ID NO: 107612 - DNA, 17 bp, Arabidopsis thaliana
ggaacaggaccggtcga

SEQ ID NO: 107613 - DNA, 17 bp, Arabidopsis thaliana
ggaacaggatggttctg

SEQ ID NO: 107614 - DNA, 17 bp, Arabidopsis thaliana
ggaacaggcctcggtat

SEQ ID NO: 107615 - DNA, 17 bp, Arabidopsis thaliana
ggaacaggcctcggtgt

SEQ ID NO: 107616 - DNA, 17 bp, Arabidopsis thaliana
ggaacaggtctcggtat

SEQ ID NO: 107617 - DNA, 17 bp, Arabidopsis thaliana
ggaacaggtttggcatg

SEQ ID NO: 107618 - DNA, 17 bp, Arabidopsis thaliana
ggaacagtgtacgtaac

SEQ ID NO: 107619 - DNA, 17 bp, Arabidopsis thaliana
ggaacagtttggttgcc

SEQ ID NO: 107620 - DNA, 17 bp, Arabidopsis thaliana
ggaacagtttggttgcg

SEQ ID NO: 107621 - DNA, 17 bp, Arabidopsis thaliana
ggaacagtttggttgtg

SEQ ID NO: 107622 - DNA, 17 bp, Arabidopsis thaliana
ggaacatactccaaggc

SEQ ID NO: 107623 - DNA, 17 bp, Arabidopsis thaliana
ggaacatctcgattgcg

SEQ ID NO: 107624 - DNA, 17 bp, Arabidopsis thaliana
ggaacattagacctctg

SEQ ID NO: 107625 - DNA, 17 bp, Arabidopsis thaliana
ggaacattagacttctg

SEQ ID NO: 107626 - DNA, 17 bp, Arabidopsis thaliana
ggaacattggttaagcc

SEQ ID NO: 107627 - DNA, 17 bp, Arabidopsis thaliana
ggaacatttcatagttt

SEQ ID NO: 107628 - DNA, 17 bp, Arabidopsis thaliana
ggaaccaaatggctgaa

SEQ ID NO: 107629 - DNA, 17 bp, Arabidopsis thaliana
ggaaccaagggctcccc

SEQ ID NO: 107630 - DNA, 17 bp, Arabidopsis thaliana
ggaaccaagtcggcggc

SEQ ID NO: 107631 - DNA, 17 bp, Arabidopsis thaliana
ggaaccaatgtagtctc

SEQ ID NO: 107632 - DNA, 17 bp, Arabidopsis thaliana
ggaaccaccaaacttgc

SEQ ID NO: 107633 - DNA, 17 bp, Arabidopsis thaliana
ggaaccagtatcggcgc

SEQ ID NO: 107634 - DNA, 17 bp, Arabidopsis thaliana
ggaaccagtcaatcccc

SEQ ID NO: 107635 - DNA, 17 bp, Arabidopsis thaliana
ggaaccatctatgcaca

SEQ ID NO: 107636 - DNA, 17 bp, Arabidopsis thaliana
ggaaccattcgccgtgg

SEQ ID NO: 107637 - DNA, 17 bp, Arabidopsis thaliana
ggaaccattgggcgtgt

SEQ ID NO: 107638 - DNA, 17 bp, Arabidopsis thaliana
ggaacccaccactgacg

SEQ ID NO: 107639 - DNA, 17 bp, Arabidopsis thaliana
ggaacccataatgacct

SEQ ID NO: 107640 - DNA, 17 bp, Arabidopsis thaliana
ggaacccggtgctctgg

SEQ ID NO: 107641 - DNA, 17 bp, Arabidopsis thaliana
ggaacccggttaggatt

SEQ ID NO: 107642 - DNA, 17 bp, Arabidopsis thaliana
ggaaccgaatattttgt

SEQ ID NO: 107643 - DNA, 17 bp, Arabidopsis thaliana
ggaaccgacgtgcttac

SEQ ID NO: 107644 - DNA, 17 bp, Arabidopsis thaliana
ggaaccgatcgactcta

SEQ ID NO: 107645 - DNA, 17 bp, Arabidopsis thaliana
ggaaccgatgtgcttat

SEQ ID NO: 107646 - DNA, 17 bp, Arabidopsis thaliana
ggaaccgctacatacca

SEQ ID NO: 107647 - DNA, 17 bp, Arabidopsis thaliana
ggaaccgctcgcaatag

SEQ ID NO: 107648 - DNA, 17 bp, Arabidopsis thaliana
ggaaccgcttgatccgc

SEQ ID NO: 107649 - DNA, 17 bp, Arabidopsis thaliana
ggaaccgcttgatcgct

SEQ ID NO: 107650 - DNA, 17 bp, Arabidopsis thaliana
ggaaccgcttgcttcgc

SEQ ID NO: 107651 - DNA, 17 bp, Arabidopsis thaliana
ggaaccggaagccgggt

SEQ ID NO: 107652 - DNA, 17 bp, Arabidopsis thaliana
ggaaccgggacgtggcg

SEQ ID NO: 107653 - DNA, 17 bp, Arabidopsis thaliana
ggaaccggtcgtcttat

SEQ ID NO: 107654 - DNA, 17 bp, Arabidopsis thaliana
ggaaccggtgtctcctc

SEQ ID NO: 107655 - DNA, 17 bp, Arabidopsis thaliana
ggaaccgtcagtgatgt

SEQ ID NO: 107656 - DNA, 17 bp, Arabidopsis thaliana
ggaaccgttgattcgca

SEQ ID NO: 107657 - DNA, 17 bp, Arabidopsis thaliana
ggaacctaagttgagtt

SEQ ID NO: 107658 - DNA, 17 bp, Arabidopsis thaliana
ggaacctagaagatgct

SEQ ID NO: 107659 - DNA, 17 bp, Arabidopsis thaliana
ggaacctccatccaaac

SEQ ID NO: 107660 - DNA, 17 bp, Arabidopsis thaliana
ggaacctccatctcgct

SEQ ID NO: 107661 - DNA, 17 bp, Arabidopsis thaliana
ggaacctcgcaggttgc

SEQ ID NO: 107662 - DNA, 17 bp, Arabidopsis thaliana
ggaacctcggtttgtgg

SEQ ID NO: 107663 - DNA, 17 bp, Arabidopsis thaliana
ggaacctgcatgggcca

SEQ ID NO: 107664 - DNA, 17 bp, Arabidopsis thaliana
ggaacctgcctagtcat

SEQ ID NO: 107665 - DNA, 17 bp, Arabidopsis thaliana
ggaacctgcggaaggat

SEQ ID NO: 107666 - DNA, 17 bp, Arabidopsis thaliana
ggaacctggctctgata

SEQ ID NO: 107667 - DNA, 17 bp, Arabidopsis thaliana
ggaacctgtggctggat

SEQ ID NO: 107668 - DNA, 17 bp, Arabidopsis thaliana
ggaaccttacatgaaac

SEQ ID NO: 107669 - DNA, 17 bp, Arabidopsis thaliana
ggaaccttatggatgac

SEQ ID NO: 107670 - DNA, 17 bp, Arabidopsis thaliana
ggaaccttctaatctcc

SEQ ID NO: 107671 - DNA, 17 bp, Arabidopsis thaliana
ggaaccttgctttatca

SEQ ID NO: 107672 - DNA, 17 bp, Arabidopsis thaliana
ggaacgaaactaagggg

SEQ ID NO: 107673 - DNA, 17 bp, Arabidopsis thaliana
ggaacgacgtttgattc

SEQ ID NO: 107674 - DNA, 17 bp, Arabidopsis thaliana
ggaacgacttttccgtc

SEQ ID NO: 107675 - DNA, 17 bp, Arabidopsis thaliana
ggaacgagattcccact

SEQ ID NO: 107676 - DNA, 17 bp, Arabidopsis thaliana
ggaacgcgaagagtaac

SEQ ID NO: 107677 - DNA, 17 bp, Arabidopsis thaliana
ggaacgcgaaggagcaa

SEQ ID NO: 107678 - DNA, 17 bp, Arabidopsis thaliana
ggaacgcggattacggt

SEQ ID NO: 107679 - DNA, 17 bp, Arabidopsis thaliana
ggaacgctcttgctcat

SEQ ID NO: 107680 - DNA, 17 bp, Arabidopsis thaliana
ggaacgcttgtctttct

SEQ ID NO: 107681 - DNA, 17 bp, Arabidopsis thaliana
ggaacggattggcggga

SEQ ID NO: 107682 - DNA, 17 bp, Arabidopsis thaliana
ggaacggatttggaagg

SEQ ID NO: 107683 - DNA, 17 bp, Arabidopsis thaliana
ggaacggatttggcagg

SEQ ID NO: 107684 - DNA, 17 bp, Arabidopsis thaliana
ggaacggctctctcggg

SEQ ID NO: 107685 - DNA, 17 bp, Arabidopsis thaliana
ggaacggctttctcggg

SEQ ID NO: 107686 - DNA, 17 bp, Arabidopsis thaliana
ggaacgggcttggcaga

SEQ ID NO: 107687 - DNA, 17 bp, Arabidopsis thaliana
ggaacggggtgctgtaa

SEQ ID NO: 107688 - DNA, 17 bp, Arabidopsis thaliana
ggaacgggtccagttgg

SEQ ID NO: 107689 - DNA, 17 bp, Arabidopsis thaliana
ggaacgggttggcggga

SEQ ID NO: 107690 - DNA, 17 bp, Arabidopsis thaliana
ggaacgggtttggaagg

SEQ ID NO: 107691 - DNA, 17 bp, Arabidopsis thaliana
ggaacgggtttggatca

SEQ ID NO: 107692 - DNA, 17 bp, Arabidopsis thaliana
ggaacgggtttggcagg

SEQ ID NO: 107693 - DNA, 17 bp, Arabidopsis thaliana
ggaacggtatgtaatcg

SEQ ID NO: 107694 - DNA, 17 bp, Arabidopsis thaliana
ggaacgtctgcctgggt

SEQ ID NO: 107695 - DNA, 17 bp, Arabidopsis thaliana
ggaacgtgagctgggtt

SEQ ID NO: 107696 - DNA, 17 bp, Arabidopsis thaliana
ggaactaaagagaatgt

SEQ ID NO: 107697 - DNA, 17 bp, Arabidopsis thaliana
ggaactaagtcgtgcta

SEQ ID NO: 107698 - DNA, 17 bp, Arabidopsis thaliana
ggaactaatccatgttt

SEQ ID NO: 107699 - DNA, 17 bp, Arabidopsis thaliana
ggaactacgacaatttg

SEQ ID NO: 107700 - DNA, 17 bp, Arabidopsis thaliana
ggaactagagatgtcaa

SEQ ID NO: 107701 - DNA, 17 bp, Arabidopsis thaliana
ggaactaggttccttcc

SEQ ID NO: 107702 - DNA, 17 bp, Arabidopsis thaliana
ggaactatcccttttct

SEQ ID NO: 107703 - DNA, 17 bp, Arabidopsis thaliana
ggaactatcgggacctc

SEQ ID NO: 107704 - DNA, 17 bp, Arabidopsis thaliana
ggaactatgttgaagat

SEQ ID NO: 107705 - DNA, 17 bp, Arabidopsis thaliana
ggaactcaaggctccta

SEQ ID NO: 107706 - DNA, 17 bp, Arabidopsis thaliana
ggaactcaattgagaca

SEQ ID NO: 107707 - DNA, 17 bp, Arabidopsis thaliana
ggaactcatatgccttt

SEQ ID NO: 107708 - DNA, 17 bp, Arabidopsis thaliana
ggaactccattgggcac

SEQ ID NO: 107709 - DNA, 17 bp, Arabidopsis thaliana
ggaactccgagacgcag

SEQ ID NO: 107710 - DNA, 17 bp, Arabidopsis thaliana
ggaactcctgctttaat

SEQ ID NO: 107711 - DNA, 17 bp, Arabidopsis thaliana
ggaactctcggcaacgg

SEQ ID NO: 107712 - DNA, 17 bp, Arabidopsis thaliana
ggaactcttggctactg

SEQ ID NO: 107713 - DNA, 17 bp, Arabidopsis thaliana
ggaactcttgtgcgtct

SEQ ID NO: 107714 - DNA, 17 bp, Arabidopsis thaliana
ggaactgacctgaaatt

SEQ ID NO: 107715 - DNA, 17 bp, Arabidopsis thaliana
ggaactgactgctgccc

SEQ ID NO: 107716 - DNA, 17 bp, Arabidopsis thaliana
ggaactgactggaggca

SEQ ID NO: 107717 - DNA, 17 bp, Arabidopsis thaliana
ggaactgactgtcgccc

SEQ ID NO: 107718 - DNA, 17 bp, Arabidopsis thaliana
ggaactgagacttccgg

SEQ ID NO: 107719 - DNA, 17 bp, Arabidopsis thaliana
ggaactgagcggatcag

SEQ ID NO: 107720 - DNA, 17 bp, Arabidopsis thaliana
ggaactgattgaccgtt

SEQ ID NO: 107721 - DNA, 17 bp, Arabidopsis thaliana
ggaactgatttagccat

SEQ ID NO: 107722 - DNA, 17 bp, Arabidopsis thaliana
ggaactggaaaccctag

SEQ ID NO: 107723 - DNA, 17 bp, Arabidopsis thaliana
ggaactggaacgagacg

SEQ ID NO: 107724 - DNA, 17 bp, Arabidopsis thaliana
ggaactggtggtctgag

SEQ ID NO: 107725 - DNA, 17 bp, Arabidopsis thaliana
ggaactgtcaaggactc

SEQ ID NO: 107726 - DNA, 17 bp, Arabidopsis thaliana
ggaactgtccggcgatg

SEQ ID NO: 107727 - DNA, 17 bp, Arabidopsis thaliana
ggaactgtcggaggagg

SEQ ID NO: 107728 - DNA, 17 bp, Arabidopsis thaliana
ggaactgtgaactgttt

SEQ ID NO: 107729 - DNA, 17 bp, Arabidopsis thaliana
ggaactgttcaactctc

SEQ ID NO: 107730 - DNA, 17 bp, Arabidopsis thaliana
ggaactgttgacttcca

SEQ ID NO: 107731 - DNA, 17 bp, Arabidopsis thaliana
ggaacttaacgcaacga

SEQ ID NO: 107732 - DNA, 17 bp, Arabidopsis thaliana
ggaacttaggcccggtc

SEQ ID NO: 107733 - DNA, 17 bp, Arabidopsis thaliana
ggaacttagtttccgtc

SEQ ID NO: 107734 - DNA, 17 bp, Arabidopsis thaliana
ggaacttatcgagacct

SEQ ID NO: 107735 - DNA, 17 bp, Arabidopsis thaliana
ggaacttatgaccgatg

SEQ ID NO: 107736 - DNA, 17 bp, Arabidopsis thaliana
ggaacttatgtcccggt

SEQ ID NO: 107737 - DNA, 17 bp, Arabidopsis thaliana
ggaacttatttacaatg

SEQ ID NO: 107738 - DNA, 17 bp, Arabidopsis thaliana
ggaacttatttacgatg

SEQ ID NO: 107739 - DNA, 17 bp, Arabidopsis thaliana
ggaacttctaacggccg

SEQ ID NO: 107740 - DNA, 17 bp, Arabidopsis thaliana
ggaacttctaacgtccg

SEQ ID NO: 107741 - DNA, 17 bp, Arabidopsis thaliana
ggaacttctatcctacc

SEQ ID NO: 107742 - DNA, 17 bp, Arabidopsis thaliana
ggaacttctccattgac

SEQ ID NO: 107743 - DNA, 17 bp, Arabidopsis thaliana
ggaacttcttccatctc

SEQ ID NO: 107744 - DNA, 17 bp, Arabidopsis thaliana
ggaacttgacttgcttt

SEQ ID NO: 107745 - DNA, 17 bp, Arabidopsis thaliana
ggaacttgcgaggaaca

SEQ ID NO: 107746 - DNA, 17 bp, Arabidopsis thaliana
ggaacttggggatgggt

SEQ ID NO: 107747 - DNA, 17 bp, Arabidopsis thaliana
ggaacttggtttgggct

SEQ ID NO: 107748 - DNA, 17 bp, Arabidopsis thaliana
ggaactttagaccaatg

SEQ ID NO: 107749 - DNA, 17 bp, Arabidopsis thaliana
ggaactttaggccaccc

SEQ ID NO: 107750 - DNA, 17 bp, Arabidopsis thaliana
ggaactttcatttggtg

SEQ ID NO: 107751 - DNA, 17 bp, Arabidopsis thaliana
ggaactttcgccgtatc

SEQ ID NO: 107752 - DNA, 17 bp, Arabidopsis thaliana
ggaacttttccattgac

SEQ ID NO: 107753 - DNA, 17 bp, Arabidopsis thaliana
ggaacttttgctaaagg

SEQ ID NO: 107754 - DNA, 17 bp, Arabidopsis thaliana
ggaacttttttggttaa

SEQ ID NO: 107755 - DNA, 17 bp, Arabidopsis thaliana
ggaagaaaactatgagc

SEQ ID NO: 107756 - DNA, 17 bp, Arabidopsis thaliana
ggaagaaagttgaccaa

SEQ ID NO: 107757 - DNA, 17 bp, Arabidopsis thaliana
ggaagaagcggacttga

SEQ ID NO: 107758 - DNA, 17 bp, Arabidopsis thaliana
ggaagaagcttggttgg

SEQ ID NO: 107759 - DNA, 17 bp, Arabidopsis thaliana
ggaagaagtcagtgggg

SEQ ID NO: 107760 - DNA, 17 bp, Arabidopsis thaliana
ggaagaagtcagttggg

SEQ ID NO: 107761 - DNA, 17 bp, Arabidopsis thaliana
ggaagaagtgatgagcg

SEQ ID NO: 107762 - DNA, 17 bp, Arabidopsis thaliana
ggaagacaccatcatca

SEQ ID NO: 107763 - DNA, 17 bp, Arabidopsis thaliana
ggaagacaccatctcca

SEQ ID NO: 107764 - DNA, 17 bp, Arabidopsis thaliana
ggaagacaccatcttca

SEQ ID NO: 107765 - DNA, 17 bp, Arabidopsis thaliana
ggaagacagcaaacggt

SEQ ID NO: 107766 - DNA, 17 bp, Arabidopsis thaliana
ggaagaccaagtgtcgt

SEQ ID NO: 107767 - DNA, 17 bp, Arabidopsis thaliana
ggaagaccattcttctt

SEQ ID NO: 107768 - DNA, 17 bp, Arabidopsis thaliana
ggaagaccctatgaagc

SEQ ID NO: 107769 - DNA, 17 bp, Arabidopsis thaliana
ggaagaccgccagcatt

SEQ ID NO: 107770 - DNA, 17 bp, Arabidopsis thaliana
ggaagacctcagggaga

SEQ ID NO: 107771 - DNA, 17 bp, Arabidopsis thaliana
ggaagacgaaactttgt

SEQ ID NO: 107772 - DNA, 17 bp, Arabidopsis thaliana
ggaagacgtgctggttt

SEQ ID NO: 107773 - DNA, 17 bp, Arabidopsis thaliana
ggaagactctgactctg

SEQ ID NO: 107774 - DNA, 17 bp, Arabidopsis thaliana
ggaagactgtagccgac

SEQ ID NO: 107775 - DNA, 17 bp, Arabidopsis thaliana
ggaagagaccgaaccga

SEQ ID NO: 107776 - DNA, 17 bp, Arabidopsis thaliana
ggaagagcaccgcacgt

SEQ ID NO: 107777 - DNA, 17 bp, Arabidopsis thaliana
ggaagagcgctaggatg

SEQ ID NO: 107778 - DNA, 17 bp, Arabidopsis thaliana
ggaagaggcttccgtgg

SEQ ID NO: 107779 - DNA, 17 bp, Arabidopsis thaliana
ggaagaggtggagagag

SEQ ID NO: 107780 - DNA, 17 bp, Arabidopsis thaliana
ggaagaggtttgtcgac

SEQ ID NO: 107781 - DNA, 17 bp, Arabidopsis thaliana
ggaagagttacagagcg

SEQ ID NO: 107782 - DNA, 17 bp, Arabidopsis thaliana
ggaagataatggattcg

SEQ ID NO: 107783 - DNA, 17 bp, Arabidopsis thaliana
ggaagatactgtgtcat

SEQ ID NO: 107784 - DNA, 17 bp, Arabidopsis thaliana
ggaagatatgaaacgac

SEQ ID NO: 107785 - DNA, 17 bp, Arabidopsis thaliana
ggaagatatgggtgtta

SEQ ID NO: 107786 - DNA, 17 bp, Arabidopsis thaliana
ggaagatcaataccggt

SEQ ID NO: 107787 - DNA, 17 bp, Arabidopsis thaliana
ggaagatccgcaccgaa

SEQ ID NO: 107788 - DNA, 17 bp, Arabidopsis thaliana
ggaagatccgggggcgt

SEQ ID NO: 107789 - DNA, 17 bp, Arabidopsis thaliana
ggaagatcggacaatgt

SEQ ID NO: 107790 - DNA, 17 bp, Arabidopsis thaliana
ggaagatctggtggttg

SEQ ID NO: 107791 - DNA, 17 bp, Arabidopsis thaliana
ggaagatcttttgtttc

SEQ ID NO: 107792 - DNA, 17 bp, Arabidopsis thaliana
ggaagatgaacgaatgg

SEQ ID NO: 107793 - DNA, 17 bp, Arabidopsis thaliana
ggaagatgatagattcc

SEQ ID NO: 107794 - DNA, 17 bp, Arabidopsis thaliana
ggaagatgatggttgat

SEQ ID NO: 107795 - DNA, 17 bp, Arabidopsis thaliana
ggaagatggacccacac

SEQ ID NO: 107796 - DNA, 17 bp, Arabidopsis thaliana
ggaagatgggttctcac

SEQ ID NO: 107797 - DNA, 17 bp, Arabidopsis thaliana
ggaagattacgagattc

SEQ ID NO: 107798 - DNA, 17 bp, Arabidopsis thaliana
ggaagattgaacctaat

SEQ ID NO: 107799 - DNA, 17 bp, Arabidopsis thaliana
ggaagatttgaatttcg

SEQ ID NO: 107800 - DNA, 17 bp, Arabidopsis thaliana
ggaagatttgaatttga

SEQ ID NO: 107801 - DNA, 17 bp, Arabidopsis thaliana
ggaagatttgccggtca

SEQ ID NO: 107802 - DNA, 17 bp, Arabidopsis thaliana
ggaagcacaggagaacg

SEQ ID NO: 107803 - DNA, 17 bp, Arabidopsis thaliana
ggaagcacttggcccaa

SEQ ID NO: 107804 - DNA, 17 bp, Arabidopsis thaliana
ggaagcagctccggtgc

SEQ ID NO: 107805 - DNA, 17 bp, Arabidopsis thaliana
ggaagcatggtctgtat

SEQ ID NO: 107806 - DNA, 17 bp, Arabidopsis thaliana
ggaagccactgctaggg

SEQ ID NO: 107807 - DNA, 17 bp, Arabidopsis thaliana
ggaagcccccttggccc

SEQ ID NO: 107808 - DNA, 17 bp, Arabidopsis thaliana
ggaagcccgcagcgata

SEQ ID NO: 107809 - DNA, 17 bp, Arabidopsis thaliana
ggaagccctcgtgttgc

SEQ ID NO: 107810 - DNA, 17 bp, Arabidopsis thaliana
ggaagccgccaccgtca

SEQ ID NO: 107811 - DNA, 17 bp, Arabidopsis thaliana
ggaagccgggttacggt

SEQ ID NO: 107812 - DNA, 17 bp, Arabidopsis thaliana
ggaagccttacaagcaa

SEQ ID NO: 107813 - DNA, 17 bp, Arabidopsis thaliana
ggaagcgatctgtttta

SEQ ID NO: 107814 - DNA, 17 bp, Arabidopsis thaliana
ggaagcggatgagccat

SEQ ID NO: 107815 - DNA, 17 bp, Arabidopsis thaliana
ggaagcggatgggggcc

SEQ ID NO: 107816 - DNA, 17 bp, Arabidopsis thaliana
ggaagcggcctggacct

SEQ ID NO: 107817 - DNA, 17 bp, Arabidopsis thaliana
ggaagctgcattgatgg

SEQ ID NO: 107818 - DNA, 17 bp, Arabidopsis thaliana
ggaagctgccagcatga

SEQ ID NO: 107819 - DNA, 17 bp, Arabidopsis thaliana
ggaaggaagttcttttg

SEQ ID NO: 107820 - DNA, 17 bp, Arabidopsis thaliana
ggaaggaattgtccgta

SEQ ID NO: 107821 - DNA, 17 bp, Arabidopsis thaliana
ggaaggacaacaacatg

SEQ ID NO: 107822 - DNA, 17 bp, Arabidopsis thaliana
ggaaggacacgtctgcc

SEQ ID NO: 107823 - DNA, 17 bp, Arabidopsis thaliana
ggaaggagagagggaga

SEQ ID NO: 107824 - DNA, 17 bp, Arabidopsis thaliana
ggaaggagctacagcag

SEQ ID NO: 107825 - DNA, 17 bp, Arabidopsis thaliana
ggaaggagtgctgattg

SEQ ID NO: 107826 - DNA, 17 bp, Arabidopsis thaliana
ggaaggatagactgtgc

SEQ ID NO: 107827 - DNA, 17 bp, Arabidopsis thaliana
ggaaggatcgtgccacg

SEQ ID NO: 107828 - DNA, 17 bp, Arabidopsis thaliana
ggaaggattacggattt

SEQ ID NO: 107829 - DNA, 17 bp, Arabidopsis thaliana
ggaaggattgtttggct

SEQ ID NO: 107830 - DNA, 17 bp, Arabidopsis thaliana
ggaaggatttcgtaggt

SEQ ID NO: 107831 - DNA, 17 bp, Arabidopsis thaliana
ggaaggcaacgaatgaa

SEQ ID NO: 107832 - DNA, 17 bp, Arabidopsis thaliana
ggaaggcagacagtgca

SEQ ID NO: 107833 - DNA, 17 bp, Arabidopsis thaliana
ggaaggcgggtaccact

SEQ ID NO: 107834 - DNA, 17 bp, Arabidopsis thaliana
ggaagggaactgggaca

SEQ ID NO: 107835 - DNA, 17 bp, Arabidopsis thaliana
ggaagggacgcatttat

SEQ ID NO: 107836 - DNA, 17 bp, Arabidopsis thaliana
ggaagggactctcagac

SEQ ID NO: 107837 - DNA, 17 bp, Arabidopsis thaliana
ggaagggcacgtctgcc

SEQ ID NO: 107838 - DNA, 17 bp, Arabidopsis thaliana
ggaagggccgctcatgg

SEQ ID NO: 107839 - DNA, 17 bp, Arabidopsis thaliana
ggaagggccgtcgctca

SEQ ID NO: 107840 - DNA, 17 bp, Arabidopsis thaliana
ggaaggggtggcttgag

SEQ ID NO: 107841 - DNA, 17 bp, Arabidopsis thaliana
ggaagggtgaaaagaac

SEQ ID NO: 107842 - DNA, 17 bp, Arabidopsis thaliana
ggaagggtgacctcccg

SEQ ID NO: 107843 - DNA, 17 bp, Arabidopsis thaliana
ggaagggtgctatgctt

SEQ ID NO: 107844 - DNA, 17 bp, Arabidopsis thaliana
ggaaggtacagtacgat

SEQ ID NO: 107845 - DNA, 17 bp, Arabidopsis thaliana
ggaaggtaggaacttgc

SEQ ID NO: 107846 - DNA, 17 bp, Arabidopsis thaliana
ggaaggtctggggtttg

SEQ ID NO: 107847 - DNA, 17 bp, Arabidopsis thaliana
ggaaggtgaggatgacg

SEQ ID NO: 107848 - DNA, 17 bp, Arabidopsis thaliana
ggaaggtgcggcgggat

SEQ ID NO: 107849 - DNA, 17 bp, Arabidopsis thaliana
ggaaggtgcggctggag

SEQ ID NO: 107850 - DNA, 17 bp, Arabidopsis thaliana
ggaaggtgcggctggat

SEQ ID NO: 107851 - DNA, 17 bp, Arabidopsis thaliana
ggaaggtgcggctgggg

SEQ ID NO: 107852 - DNA, 17 bp, Arabidopsis thaliana
ggaaggttattgcctat

SEQ ID NO: 107853 - DNA, 17 bp, Arabidopsis thaliana
ggaagtaccgaatgcag

SEQ ID NO: 107854 - DNA, 17 bp, Arabidopsis thaliana
ggaagtactcgtgttgc

SEQ ID NO: 107855 - DNA, 17 bp, Arabidopsis thaliana
ggaagtatgcggttatg

SEQ ID NO: 107856 - DNA, 17 bp, Arabidopsis thaliana
ggaagtcataatcatcg

SEQ ID NO: 107857 - DNA, 17 bp, Arabidopsis thaliana
ggaagtcctcgtgtcgc

SEQ ID NO: 107858 - DNA, 17 bp, Arabidopsis thaliana
ggaagtcctcgtgttcc

SEQ ID NO: 107859 - DNA, 17 bp, Arabidopsis thaliana
ggaagtcctcgtgttgc

SEQ ID NO: 107860 - DNA, 17 bp, Arabidopsis thaliana
ggaagtcctcgtgtttc

SEQ ID NO: 107861 - DNA, 17 bp, Arabidopsis thaliana
ggaagtcctcgttttgc

SEQ ID NO: 107862 - DNA, 17 bp, Arabidopsis thaliana
ggaagtcctctgttgca

SEQ ID NO: 107863 - DNA, 17 bp, Arabidopsis thaliana
ggaagtcctcttgcatc

SEQ ID NO: 107864 - DNA, 17 bp, Arabidopsis thaliana
ggaagtcctcttgttgc

SEQ ID NO: 107865 - DNA, 17 bp, Arabidopsis thaliana
ggaagtccttgtgttgc

SEQ ID NO: 107866 - DNA, 17 bp, Arabidopsis thaliana
ggaagtcgaaatccgct

SEQ ID NO: 107867 - DNA, 17 bp, Arabidopsis thaliana
ggaagtcggcaaaatgg

SEQ ID NO: 107868 - DNA, 17 bp, Arabidopsis thaliana
ggaagtcggctagacgg

SEQ ID NO: 107869 - DNA, 17 bp, Arabidopsis thaliana
ggaagtcggctaggcgg

SEQ ID NO: 107870 - DNA, 17 bp, Arabidopsis thaliana
ggaagtctgtcagttgt

SEQ ID NO: 107871 - DNA, 17 bp, Arabidopsis thaliana
ggaagtcttcatgttgc

SEQ ID NO: 107872 - DNA, 17 bp, Arabidopsis thaliana
ggaagtcttcgtgttgc

SEQ ID NO: 107873 - DNA, 17 bp, Arabidopsis thaliana
ggaagtctttctaacct

SEQ ID NO: 107874 - DNA, 17 bp, Arabidopsis thaliana
ggaagtgaagtgatgta

SEQ ID NO: 107875 - DNA, 17 bp, Arabidopsis thaliana
ggaagtgactagcagga

SEQ ID NO: 107876 - DNA, 17 bp, Arabidopsis thaliana
ggaagtgcagtgatgta

SEQ ID NO: 107877 - DNA, 17 bp, Arabidopsis thaliana
ggaagtgctacttggat

SEQ ID NO: 107878 - DNA, 17 bp, Arabidopsis thaliana
ggaagtgctctaagttc

SEQ ID NO: 107879 - DNA, 17 bp, Arabidopsis thaliana
ggaagtggaagcggacg

SEQ ID NO: 107880 - DNA, 17 bp, Arabidopsis thaliana
ggaagtgtcgtctgtca

SEQ ID NO: 107881 - DNA, 17 bp, Arabidopsis thaliana
ggaagtgtcgtctgtcg

SEQ ID NO: 107882 - DNA, 17 bp, Arabidopsis thaliana
ggaagtgtggtccactg

SEQ ID NO: 107883 - DNA, 17 bp, Arabidopsis thaliana
ggaagttacatcaaggg

SEQ ID NO: 107884 - DNA, 17 bp, Arabidopsis thaliana
ggaagttcaagcccaaa

SEQ ID NO: 107885 - DNA, 17 bp, Arabidopsis thaliana
ggaagttcaaggccaaa

SEQ ID NO: 107886 - DNA, 17 bp, Arabidopsis thaliana
ggaagttcgggcccaaa

SEQ ID NO: 107887 - DNA, 17 bp, Arabidopsis thaliana
ggaagttctcgtgttgc

SEQ ID NO: 107888 - DNA, 17 bp, Arabidopsis thaliana
ggaagttctgctcctac

SEQ ID NO: 107889 - DNA, 17 bp, Arabidopsis thaliana
ggaagttctggatcgaa

SEQ ID NO: 107890 - DNA, 17 bp, Arabidopsis thaliana
ggaagttctgggccaat

SEQ ID NO: 107891 - DNA, 17 bp, Arabidopsis thaliana
ggaagttctgtgagcag

SEQ ID NO: 107892 - DNA, 17 bp, Arabidopsis thaliana
ggaagttctttgacgtt

SEQ ID NO: 107893 - DNA, 17 bp, Arabidopsis thaliana
ggaagttgaggcggaac

SEQ ID NO: 107894 - DNA, 17 bp, Arabidopsis thaliana
ggaagttggcttgactg

SEQ ID NO: 107895 - DNA, 17 bp, Arabidopsis thaliana
ggaagtttgaggcaata

SEQ ID NO: 107896 - DNA, 17 bp, Arabidopsis thaliana
ggaagtttgcggaaacg

SEQ ID NO: 107897 - DNA, 17 bp, Arabidopsis thaliana
ggaagtttgggtttgcg

SEQ ID NO: 107898 - DNA, 17 bp, Arabidopsis thaliana
ggaagttttcattgatt

SEQ ID NO: 107899 - DNA, 17 bp, Arabidopsis thaliana
ggaagttttgtgccgaa

SEQ ID NO: 107900 - DNA, 17 bp, Arabidopsis thaliana
ggaagtttttctgatgg

SEQ ID NO: 107901 - DNA, 17 bp, Arabidopsis thaliana
ggaataaactgtgagat

SEQ ID NO: 107902 - DNA, 17 bp, Arabidopsis thaliana
ggaataatctagaaaac

SEQ ID NO: 107903 - DNA, 17 bp, Arabidopsis thaliana
ggaataatctagaaaat

SEQ ID NO: 107904 - DNA, 17 bp, Arabidopsis thaliana
ggaataatgttcccatc

SEQ ID NO: 107905 - DNA, 17 bp, Arabidopsis thaliana
ggaataatttcaggata

SEQ ID NO: 107906 - DNA, 17 bp, Arabidopsis thaliana
ggaataccaatcttagt

SEQ ID NO: 107907 - DNA, 17 bp, Arabidopsis thaliana
ggaatacggatgttaca

SEQ ID NO: 107908 - DNA, 17 bp, Arabidopsis thaliana
ggaatacggtgcggttc

SEQ ID NO: 107909 - DNA, 17 bp, Arabidopsis thaliana
ggaatactaggcgctgt

SEQ ID NO: 107910 - DNA, 17 bp, Arabidopsis thaliana
ggaatactgggaccttg

SEQ ID NO: 107911 - DNA, 17 bp, Arabidopsis thaliana
ggaatagacataccaaa

SEQ ID NO: 107912 - DNA, 17 bp, Arabidopsis thaliana
ggaatagacttagcttg

SEQ ID NO: 107913 - DNA, 17 bp, Arabidopsis thaliana
ggaatagacttcgtctc

SEQ ID NO: 107914 - DNA, 17 bp, Arabidopsis thaliana
ggaatagagatgagaga

SEQ ID NO: 107915 - DNA, 17 bp, Arabidopsis thaliana
ggaataggccgttcccc

SEQ ID NO: 107916 - DNA, 17 bp, Arabidopsis thaliana
ggaataggggaaacggc

SEQ ID NO: 107917 - DNA, 17 bp, Arabidopsis thaliana
ggaatagtgcaaagctg

SEQ ID NO: 107918 - DNA, 17 bp, Arabidopsis thaliana
ggaatatccattcactt

SEQ ID NO: 107919 - DNA, 17 bp, Arabidopsis thaliana
ggaatatcggtcttgtc

SEQ ID NO: 107920 - DNA, 17 bp, Arabidopsis thaliana
ggaatatgaccagtttt

SEQ ID NO: 107921 - DNA, 17 bp, Arabidopsis thaliana
ggaatatggtcgtgcgg

SEQ ID NO: 107922 - DNA, 17 bp, Arabidopsis thaliana
ggaatcaaactcttgtc

SEQ ID NO: 107923 - DNA, 17 bp, Arabidopsis thaliana
ggaatcaacggctgact

SEQ ID NO: 107924 - DNA, 17 bp, Arabidopsis thaliana
ggaatcacaattgggat

SEQ ID NO: 107925 - DNA, 17 bp, Arabidopsis thaliana
ggaatcacagtgttgct

SEQ ID NO: 107926 - DNA, 17 bp, Arabidopsis thaliana
ggaatcagctctttctg

SEQ ID NO: 107927 - DNA, 17 bp, Arabidopsis thaliana
ggaatcagctgttggag

SEQ ID NO: 107928 - DNA, 17 bp, Arabidopsis thaliana
ggaatcagtttcgctct

SEQ ID NO: 107929 - DNA, 17 bp, Arabidopsis thaliana
ggaatccctgggcgtcc

SEQ ID NO: 107930 - DNA, 17 bp, Arabidopsis thaliana
ggaatccgacagagctc

SEQ ID NO: 107931 - DNA, 17 bp, Arabidopsis thaliana
ggaatccgctttcaggt

SEQ ID NO: 107932 - DNA, 17 bp, Arabidopsis thaliana
ggaatccggctgagtct

SEQ ID NO: 107933 - DNA, 17 bp, Arabidopsis thaliana
ggaatccggtggaccaa

SEQ ID NO: 107934 - DNA, 17 bp, Arabidopsis thaliana
ggaatccggtggaccga

SEQ ID NO: 107935 - DNA, 17 bp, Arabidopsis thaliana
ggaatccgtttgccaca

SEQ ID NO: 107936 - DNA, 17 bp, Arabidopsis thaliana
ggaatcctggacgaata

SEQ ID NO: 107937 - DNA, 17 bp, Arabidopsis thaliana
ggaatcctggacgatta

SEQ ID NO: 107938 - DNA, 17 bp, Arabidopsis thaliana
ggaatccttgtctgaca

SEQ ID NO: 107939 - DNA, 17 bp, Arabidopsis thaliana
ggaatcgactcaaatgc

SEQ ID NO: 107940 - DNA, 17 bp, Arabidopsis thaliana
ggaatcgagagctccaa

SEQ ID NO: 107941 - DNA, 17 bp, Arabidopsis thaliana
ggaatcgagatctccaa

SEQ ID NO: 107942 - DNA, 17 bp, Arabidopsis thaliana
ggaatcgagcccaaaag

SEQ ID NO: 107943 - DNA, 17 bp, Arabidopsis thaliana
ggaatcgagcccgaaag

SEQ ID NO: 107944 - DNA, 17 bp, Arabidopsis thaliana
ggaatcgctaacgacta

SEQ ID NO: 107945 - DNA, 17 bp, Arabidopsis thaliana
ggaatcgctaacggtta

SEQ ID NO: 107946 - DNA, 17 bp, Arabidopsis thaliana
ggaatcgctaatgacca

SEQ ID NO: 107947 - DNA, 17 bp, Arabidopsis thaliana
ggaatcgctaatgacta

SEQ ID NO: 107948 - DNA, 17 bp, Arabidopsis thaliana
ggaatcggacggttgcg

SEQ ID NO: 107949 - DNA, 17 bp, Arabidopsis thaliana
ggaatcgggcaacgagg

SEQ ID NO: 107950 - DNA, 17 bp, Arabidopsis thaliana
ggaatcggtgtttcttc

SEQ ID NO: 107951 - DNA, 17 bp, Arabidopsis thaliana
ggaatcgtagaagaaaa

SEQ ID NO: 107952 - DNA, 17 bp, Arabidopsis thaliana
ggaatcgtcgaccagga

SEQ ID NO: 107953 - DNA, 17 bp, Arabidopsis thaliana
ggaatcgtcgaccggct

SEQ ID NO: 107954 - DNA, 17 bp, Arabidopsis thaliana
ggaatcgtcgaccgggt

SEQ ID NO: 107955 - DNA, 17 bp, Arabidopsis thaliana
ggaatctagccaaggat

SEQ ID NO: 107956 - DNA, 17 bp, Arabidopsis thaliana
ggaatctcaacttttca

SEQ ID NO: 107957 - DNA, 17 bp, Arabidopsis thaliana
ggaatctccaggtcact

SEQ ID NO: 107958 - DNA, 17 bp, Arabidopsis thaliana
ggaatctccgtcgttat

SEQ ID NO: 107959 - DNA, 17 bp, Arabidopsis thaliana
ggaatctctacattttg

SEQ ID NO: 107960 - DNA, 17 bp, Arabidopsis thaliana
ggaatctctgacgatat

SEQ ID NO: 107961 - DNA, 17 bp, Arabidopsis thaliana
ggaatctgacggtcttg

SEQ ID NO: 107962 - DNA, 17 bp, Arabidopsis thaliana
ggaatctgcagacaaag

SEQ ID NO: 107963 - DNA, 17 bp, Arabidopsis thaliana
ggaatctgccagcatga

SEQ ID NO: 107964 - DNA, 17 bp, Arabidopsis thaliana
ggaatctgtggccctgc

SEQ ID NO: 107965 - DNA, 17 bp, Arabidopsis thaliana
ggaatctgtgttaccat

SEQ ID NO: 107966 - DNA, 17 bp, Arabidopsis thaliana
ggaatcttcctccgtcc

SEQ ID NO: 107967 - DNA, 17 bp, Arabidopsis thaliana
ggaatcttccttcgtcc

SEQ ID NO: 107968 - DNA, 17 bp, Arabidopsis thaliana
ggaatcttgataatgct

SEQ ID NO: 107969 - DNA, 17 bp, Arabidopsis thaliana
ggaatcttgatgacgct

SEQ ID NO: 107970 - DNA, 17 bp, Arabidopsis thaliana
ggaatcttgatgatacc

SEQ ID NO: 107971 - DNA, 17 bp, Arabidopsis thaliana
ggaatcttgatgatact

SEQ ID NO: 107972 - DNA, 17 bp, Arabidopsis thaliana
ggaatcttgatgatgct

SEQ ID NO: 107973 - DNA, 17 bp, Arabidopsis thaliana
ggaatcttgatgattct

SEQ ID NO: 107974 - DNA, 17 bp, Arabidopsis thaliana
ggaatgaaactaatccg

SEQ ID NO: 107975 - DNA, 17 bp, Arabidopsis thaliana
ggaatgaagccaggtcc

SEQ ID NO: 107976 - DNA, 17 bp, Arabidopsis thaliana
ggaatgaagcctggccc

SEQ ID NO: 107977 - DNA, 17 bp, Arabidopsis thaliana
ggaatgaagcctggtag

SEQ ID NO: 107978 - DNA, 17 bp, Arabidopsis thaliana
ggaatgaagcctggtcc

SEQ ID NO: 107979 - DNA, 17 bp, Arabidopsis thaliana
ggaatgaagcctggtcg

SEQ ID NO: 107980 - DNA, 17 bp, Arabidopsis thaliana
ggaatgaattcggacta

SEQ ID NO: 107981 - DNA, 17 bp, Arabidopsis thaliana
ggaatgacagaagggcg

SEQ ID NO: 107982 - DNA, 17 bp, Arabidopsis thaliana
ggaatgacccctggata

SEQ ID NO: 107983 - DNA, 17 bp, Arabidopsis thaliana
ggaatgacccttggata

SEQ ID NO: 107984 - DNA, 17 bp, Arabidopsis thaliana
ggaatgaccgaccgtcc

SEQ ID NO: 107985 - DNA, 17 bp, Arabidopsis thaliana
ggaatgacgggttttga

SEQ ID NO: 107986 - DNA, 17 bp, Arabidopsis thaliana
ggaatgacttggccctg

SEQ ID NO: 107987 - DNA, 17 bp, Arabidopsis thaliana
ggaatgatccggtgaag

SEQ ID NO: 107988 - DNA, 17 bp, Arabidopsis thaliana
ggaatgccgcaacagga

SEQ ID NO: 107989 - DNA, 17 bp, Arabidopsis thaliana
ggaatgcggttgcggtt

SEQ ID NO: 107990 - DNA, 17 bp, Arabidopsis thaliana
ggaatgctaagtatgtc

SEQ ID NO: 107991 - DNA, 17 bp, Arabidopsis thaliana
ggaatggctcgtttgaa

SEQ ID NO: 107992 - DNA, 17 bp, Arabidopsis thaliana
ggaatgggactaaggta

SEQ ID NO: 107993 - DNA, 17 bp, Arabidopsis thaliana
ggaatgggcaagcaaag

SEQ ID NO: 107994 - DNA, 17 bp, Arabidopsis thaliana
ggaatgggccattttgt

SEQ ID NO: 107995 - DNA, 17 bp, Arabidopsis thaliana
ggaatgggtcggccggt

SEQ ID NO: 107996 - DNA, 17 bp, Arabidopsis thaliana
ggaatgggtttggcagg

SEQ ID NO: 107997 - DNA, 17 bp, Arabidopsis thaliana
ggaatgtcgttcggatg

SEQ ID NO: 107998 - DNA, 17 bp, Arabidopsis thaliana
ggaatgttgtctggatc

SEQ ID NO: 107999 - DNA, 17 bp, Arabidopsis thaliana
ggaattaaactatgcca

SEQ ID NO: 108000 - DNA, 17 bp, Arabidopsis thaliana
ggaattaacaccgtgga

SEQ ID NO: 108001 - DNA, 17 bp, Arabidopsis thaliana
ggaattaacatgcggat

SEQ ID NO: 108002 - DNA, 17 bp, Arabidopsis thaliana
ggaattaacgactttca

SEQ ID NO: 108003 - DNA, 17 bp, Arabidopsis thaliana
ggaattacaatcgtcca

SEQ ID NO: 108004 - DNA, 17 bp, Arabidopsis thaliana
ggaattacagatcgcct

SEQ ID NO: 108005 - DNA, 17 bp, Arabidopsis thaliana
ggaattagtcgcatcct

SEQ ID NO: 108006 - DNA, 17 bp, Arabidopsis thaliana
ggaattagtctacgcga

SEQ ID NO: 108007 - DNA, 17 bp, Arabidopsis thaliana
ggaattcatctgacctc

SEQ ID NO: 108008 - DNA, 17 bp, Arabidopsis thaliana
ggaattcatgcggataa

SEQ ID NO: 108009 - DNA, 17 bp, Arabidopsis thaliana
ggaattcctcctgttgc

SEQ ID NO: 108010 - DNA, 17 bp, Arabidopsis thaliana
ggaattcctcgtgttgc

SEQ ID NO: 108011 - DNA, 17 bp, Arabidopsis thaliana
ggaattcctcgttttgc

SEQ ID NO: 108012 - DNA, 17 bp, Arabidopsis thaliana
ggaattcgcaatctcca

SEQ ID NO: 108013 - DNA, 17 bp, Arabidopsis thaliana
ggaattcgggataggag

SEQ ID NO: 108014 - DNA, 17 bp, Arabidopsis thaliana
ggaattctctttcttcg

SEQ ID NO: 108015 - DNA, 17 bp, Arabidopsis thaliana
ggaattgacgggggcac

SEQ ID NO: 108016 - DNA, 17 bp, Arabidopsis thaliana
ggaattgacgggtttag

SEQ ID NO: 108017 - DNA, 17 bp, Arabidopsis thaliana
ggaattgacttcagggc

SEQ ID NO: 108018 - DNA, 17 bp, Arabidopsis thaliana
ggaattgagtacacacc

SEQ ID NO: 108019 - DNA, 17 bp, Arabidopsis thaliana
ggaattgattgctcctt

SEQ ID NO: 108020 - DNA, 17 bp, Arabidopsis thaliana
ggaattgccgtgatcga

SEQ ID NO: 108021 - DNA, 17 bp, Arabidopsis thaliana
ggaattggactgggcaa

SEQ ID NO: 108022 - DNA, 17 bp, Arabidopsis thaliana
ggaattggcctcgttgt

SEQ ID NO: 108023 - DNA, 17 bp, Arabidopsis thaliana
ggaattggcttctgaca

SEQ ID NO: 108024 - DNA, 17 bp, Arabidopsis thaliana
ggaattgggacgcttct

SEQ ID NO: 108025 - DNA, 17 bp, Arabidopsis thaliana
ggaattgggttatatgg

SEQ ID NO: 108026 - DNA, 17 bp, Arabidopsis thaliana
ggaattggtgatccgtt

SEQ ID NO: 108027 - DNA, 17 bp, Arabidopsis thaliana
ggaattggttggaccgc

SEQ ID NO: 108028 - DNA, 17 bp, Arabidopsis thaliana
ggaattgtctcaagaag

SEQ ID NO: 108029 - DNA, 17 bp, Arabidopsis thaliana
ggaattgtctctcttag

SEQ ID NO: 108030 - DNA, 17 bp, Arabidopsis thaliana
ggaatttacggtcgtgt

SEQ ID NO: 108031 - DNA, 17 bp, Arabidopsis thaliana
ggaatttaggatctaat

SEQ ID NO: 108032 - DNA, 17 bp, Arabidopsis thaliana
ggaatttcgagtagttg

SEQ ID NO: 108033 - DNA, 17 bp, Arabidopsis thaliana
ggaatttcgtgcgatga

SEQ ID NO: 108034 - DNA, 17 bp, Arabidopsis thaliana
ggaatttctccattgac

SEQ ID NO: 108035 - DNA, 17 bp, Arabidopsis thaliana
ggaatttctgtcaggtt

SEQ ID NO: 108036 - DNA, 17 bp, Arabidopsis thaliana
ggaatttgaccggctat

SEQ ID NO: 108037 - DNA, 17 bp, Arabidopsis thaliana
ggaatttgccaacttgg

SEQ ID NO: 108038 - DNA, 17 bp, Arabidopsis thaliana
ggaatttggctgagggt

SEQ ID NO: 108039 - DNA, 17 bp, Arabidopsis thaliana
ggaatttgtctgttggg

SEQ ID NO: 108040 - DNA, 17 bp, Arabidopsis thaliana
ggaattttccccgatgt

SEQ ID NO: 108041 - DNA, 17 bp, Arabidopsis thaliana
ggaattttttggagaca

SEQ ID NO: 108042 - DNA, 17 bp, Arabidopsis thaliana
ggacaaaaataccttcc

SEQ ID NO: 108043 - DNA, 17 bp, Arabidopsis thaliana
ggacaaaaattgctgag

SEQ ID NO: 108044 - DNA, 17 bp, Arabidopsis thaliana
ggacaaaacgaatgttg

SEQ ID NO: 108045 - DNA, 17 bp, Arabidopsis thaliana
ggacaaaacgacgtcgt

SEQ ID NO: 108046 - DNA, 17 bp, Arabidopsis thaliana
ggacaaaacggatgttg

SEQ ID NO: 108047 - DNA, 17 bp, Arabidopsis thaliana
ggacaaaactggtcata

SEQ ID NO: 108048 - DNA, 17 bp, Arabidopsis thaliana
ggacaaacagacagagc

SEQ ID NO: 108049 - DNA, 17 bp, Arabidopsis thaliana
ggacaaacatcaaaatg

SEQ ID NO: 108050 - DNA, 17 bp, Arabidopsis thaliana
ggacaaagcccgcgggc

SEQ ID NO: 108051 - DNA, 17 bp, Arabidopsis thaliana
ggacaaagggacaatcg

SEQ ID NO: 108052 - DNA, 17 bp, Arabidopsis thaliana
ggacaaagtgttttgga

SEQ ID NO: 108053 - DNA, 17 bp, Arabidopsis thaliana
ggacaaatccgtcggct

SEQ ID NO: 108054 - DNA, 17 bp, Arabidopsis thaliana
ggacaaatttagagggt

SEQ ID NO: 108055 - DNA, 17 bp, Arabidopsis thaliana
ggacaacaaactgctac

SEQ ID NO: 108056 - DNA, 17 bp, Arabidopsis thaliana
ggacaaccaccgtcgcc

SEQ ID NO: 108057 - DNA, 17 bp, Arabidopsis thaliana
ggacaaccagccgatat

SEQ ID NO: 108058 - DNA, 17 bp, Arabidopsis thaliana
ggacaaccggcatgtgc

SEQ ID NO: 108059 - DNA, 17 bp, Arabidopsis thaliana
ggacaacgatttttttg

SEQ ID NO: 108060 - DNA, 17 bp, Arabidopsis thaliana
ggacaacggattagtta

SEQ ID NO: 108061 - DNA, 17 bp, Arabidopsis thaliana
ggacaacggattagttt

SEQ ID NO: 108062 - DNA, 17 bp, Arabidopsis thaliana
ggacaacgggaatccga

SEQ ID NO: 108063 - DNA, 17 bp, Arabidopsis thaliana
ggacaactatgcctcag

SEQ ID NO: 108064 - DNA, 17 bp, Arabidopsis thaliana
ggacaactcttgatgtc

SEQ ID NO: 108065 - DNA, 17 bp, Arabidopsis thaliana
ggacaactgtgtggacc

SEQ ID NO: 108066 - DNA, 17 bp, Arabidopsis thaliana
ggacaagaaactcctct

SEQ ID NO: 108067 - DNA, 17 bp, Arabidopsis thaliana
ggacaagaatttggctg

SEQ ID NO: 108068 - DNA, 17 bp, Arabidopsis thaliana
ggacaagccacgggtga

SEQ ID NO: 108069 - DNA, 17 bp, Arabidopsis thaliana
ggacaagccatgggcga

SEQ ID NO: 108070 - DNA, 17 bp, Arabidopsis thaliana
ggacaagccattcggta

SEQ ID NO: 108071 - DNA, 17 bp, Arabidopsis thaliana
ggacaagccgaccaacc

SEQ ID NO: 108072 - DNA, 17 bp, Arabidopsis thaliana
ggacaagccgaccaatg

SEQ ID NO: 108073 - DNA, 17 bp, Arabidopsis thaliana
ggacaagctgatcgcca

SEQ ID NO: 108074 - DNA, 17 bp, Arabidopsis thaliana
ggacaaggaatcccccc

SEQ ID NO: 108075 - DNA, 17 bp, Arabidopsis thaliana
ggacaaggccgacaata

SEQ ID NO: 108076 - DNA, 17 bp, Arabidopsis thaliana
ggacaaggggaatccga

SEQ ID NO: 108077 - DNA, 17 bp, Arabidopsis thaliana
ggacaaggtcagtcttc

SEQ ID NO: 108078 - DNA, 17 bp, Arabidopsis thaliana
ggacaaggtcctgatcg

SEQ ID NO: 108079 - DNA, 17 bp, Arabidopsis thaliana
ggacaaggttatggtgt

SEQ ID NO: 108080 - DNA, 17 bp, Arabidopsis thaliana
ggacaagtatttatggc

SEQ ID NO: 108081 - DNA, 17 bp, Arabidopsis thaliana
ggacaagtcctgctcct

SEQ ID NO: 108082 - DNA, 17 bp, Arabidopsis thaliana
ggacaagtgttaatgga

SEQ ID NO: 108083 - DNA, 17 bp, Arabidopsis thaliana
ggacaagtgttgttcta

SEQ ID NO: 108084 - DNA, 17 bp, Arabidopsis thaliana
ggacaagttgacgggac

SEQ ID NO: 108085 - DNA, 17 bp, Arabidopsis thaliana
ggacaagttttccatat

SEQ ID NO: 108086 - DNA, 17 bp, Arabidopsis thaliana
ggacaataaaccactgc

SEQ ID NO: 108087 - DNA, 17 bp, Arabidopsis thaliana
ggacaataaaccgacgc

SEQ ID NO: 108088 - DNA, 17 bp, Arabidopsis thaliana
ggacaataaaccgctgc

SEQ ID NO: 108089 - DNA, 17 bp, Arabidopsis thaliana
ggacaataaatcgctgc

SEQ ID NO: 108090 - DNA, 17 bp, Arabidopsis thaliana
ggacaatagaacttttc

SEQ ID NO: 108091 - DNA, 17 bp, Arabidopsis thaliana
ggacaatatgggcttga

SEQ ID NO: 108092 - DNA, 17 bp, Arabidopsis thaliana
ggacaatatttgcacag

SEQ ID NO: 108093 - DNA, 17 bp, Arabidopsis thaliana
ggacaatccataccgta

SEQ ID NO: 108094 - DNA, 17 bp, Arabidopsis thaliana
ggacaatgccggaatca

SEQ ID NO: 108095 - DNA, 17 bp, Arabidopsis thaliana
ggacaatgggctaccca

SEQ ID NO: 108096 - DNA, 17 bp, Arabidopsis thaliana
ggacaatgggctgccca

SEQ ID NO: 108097 - DNA, 17 bp, Arabidopsis thaliana
ggacaatgggttaccca

SEQ ID NO: 108098 - DNA, 17 bp, Arabidopsis thaliana
ggacaatgtcccacatc

SEQ ID NO: 108099 - DNA, 17 bp, Arabidopsis thaliana
ggacaattatgggattg

SEQ ID NO: 108100 - DNA, 17 bp, Arabidopsis thaliana
ggacaattccttctgac

SEQ ID NO: 108101 - DNA, 17 bp, Arabidopsis thaliana
ggacaattcctttcgac

SEQ ID NO: 108102 - DNA, 17 bp, Arabidopsis thaliana
ggacaattcggcctgag

SEQ ID NO: 108103 - DNA, 17 bp, Arabidopsis thaliana
ggacaattgtctcatgg

SEQ ID NO: 108104 - DNA, 17 bp, Arabidopsis thaliana
ggacaattttggcggga

SEQ ID NO: 108105 - DNA, 17 bp, Arabidopsis thaliana
ggacacaagattatcgt

SEQ ID NO: 108106 - DNA, 17 bp, Arabidopsis thaliana
ggacacaagcactagcc

SEQ ID NO: 108107 - DNA, 17 bp, Arabidopsis thaliana
ggacacaagtatccgac

SEQ ID NO: 108108 - DNA, 17 bp, Arabidopsis thaliana
ggacacacttcgtcaga

SEQ ID NO: 108109 - DNA, 17 bp, Arabidopsis thaliana
ggacacaggtcgtttac

SEQ ID NO: 108110 - DNA, 17 bp, Arabidopsis thaliana
ggacacaggtggtgaat

SEQ ID NO: 108111 - DNA, 17 bp, Arabidopsis thaliana
ggacacaggtggtgcat

SEQ ID NO: 108112 - DNA, 17 bp, Arabidopsis thaliana
ggacacaggtggtgctt

SEQ ID NO: 108113 - DNA, 17 bp, Arabidopsis thaliana
ggacacagtttaatgaa

SEQ ID NO: 108114 - DNA, 17 bp, Arabidopsis thaliana
ggacacatgtcgaaata

SEQ ID NO: 108115 - DNA, 17 bp, Arabidopsis thaliana
ggacacccctttgtcgc

SEQ ID NO: 108116 - DNA, 17 bp, Arabidopsis thaliana
ggacaccgccaagagcg

SEQ ID NO: 108117 - DNA, 17 bp, Arabidopsis thaliana
ggacacctatccagttg

SEQ ID NO: 108118 - DNA, 17 bp, Arabidopsis thaliana
ggacaccttacacgcgg

SEQ ID NO: 108119 - DNA, 17 bp, Arabidopsis thaliana
ggacacgaagcggatat

SEQ ID NO: 108120 - DNA, 17 bp, Arabidopsis thaliana
ggacacgatcgagatga

SEQ ID NO: 108121 - DNA, 17 bp, Arabidopsis thaliana
ggacacggaagctttga

SEQ ID NO: 108122 - DNA, 17 bp, Arabidopsis thaliana
ggacacggatttaacta

SEQ ID NO: 108123 - DNA, 17 bp, Arabidopsis thaliana
ggacacggatttaactg

SEQ ID NO: 108124 - DNA, 17 bp, Arabidopsis thaliana
ggacacgtctgcctggg

SEQ ID NO: 108125 - DNA, 17 bp, Arabidopsis thaliana
ggacacgtgtcgttggc

SEQ ID NO: 108126 - DNA, 17 bp, Arabidopsis thaliana
ggacacgtgtttgcttc

SEQ ID NO: 108127 - DNA, 17 bp, Arabidopsis thaliana
ggacactgagcttatct

SEQ ID NO: 108128 - DNA, 17 bp, Arabidopsis thaliana
ggacactgctctatctg

SEQ ID NO: 108129 - DNA, 17 bp, Arabidopsis thaliana
ggacactgtgaagtatg

SEQ ID NO: 108130 - DNA, 17 bp, Arabidopsis thaliana
ggacacttccttccgac

SEQ ID NO: 108131 - DNA, 17 bp, Arabidopsis thaliana
ggacacttcgtgaaaac

SEQ ID NO: 108132 - DNA, 17 bp, Arabidopsis thaliana
ggacacttgcccagggc

SEQ ID NO: 108133 - DNA, 17 bp, Arabidopsis thaliana
ggacacttgtctccatt

SEQ ID NO: 108134 - DNA, 17 bp, Arabidopsis thaliana
ggacactttgatgagcg

SEQ ID NO: 108135 - DNA, 17 bp, Arabidopsis thaliana
ggacacttttgccgatg

SEQ ID NO: 108136 - DNA, 17 bp, Arabidopsis thaliana
ggacagaaaggtcttta

SEQ ID NO: 108137 - DNA, 17 bp, Arabidopsis thaliana
ggacagaagagacacgg

SEQ ID NO: 108138 - DNA, 17 bp, Arabidopsis thaliana
ggacagaagagagtgag

SEQ ID NO: 108139 - DNA, 17 bp, Arabidopsis thaliana
ggacagaagccattgac

SEQ ID NO: 108140 - DNA, 17 bp, Arabidopsis thaliana
ggacagaagttattcaa

SEQ ID NO: 108141 - DNA, 17 bp, Arabidopsis thaliana
ggacagacacatgacaa

SEQ ID NO: 108142 - DNA, 17 bp, Arabidopsis thaliana
ggacagacagtgtggta

SEQ ID NO: 108143 - DNA, 17 bp, Arabidopsis thaliana
ggacagacagtgtggtg

SEQ ID NO: 108144 - DNA, 17 bp, Arabidopsis thaliana
ggacagaccgaccgtcg

SEQ ID NO: 108145 - DNA, 17 bp, Arabidopsis thaliana
ggacagaccgatcgtcg

SEQ ID NO: 108146 - DNA, 17 bp, Arabidopsis thaliana
ggacagaccgatcgttg

SEQ ID NO: 108147 - DNA, 17 bp, Arabidopsis thaliana
ggacagacctcgactcc

SEQ ID NO: 108148 - DNA, 17 bp, Arabidopsis thaliana
ggacagacgagcttagg

SEQ ID NO: 108149 - DNA, 17 bp, Arabidopsis thaliana
ggacagacggtccatgg

SEQ ID NO: 108150 - DNA, 17 bp, Arabidopsis thaliana
ggacagacttagcgggc

SEQ ID NO: 108151 - DNA, 17 bp, Arabidopsis thaliana
ggacagacttagcgggg

SEQ ID NO: 108152 - DNA, 17 bp, Arabidopsis thaliana
ggacagacttcgtcaag

SEQ ID NO: 108153 - DNA, 17 bp, Arabidopsis thaliana
ggacagagacgacggag

SEQ ID NO: 108154 - DNA, 17 bp, Arabidopsis thaliana
ggacagagccctgatgg

SEQ ID NO: 108155 - DNA, 17 bp, Arabidopsis thaliana
ggacagagccggtagcc

SEQ ID NO: 108156 - DNA, 17 bp, Arabidopsis thaliana
ggacagagctgcttcgg

SEQ ID NO: 108157 - DNA, 17 bp, Arabidopsis thaliana
ggacagatcgtattgcc

SEQ ID NO: 108158 - DNA, 17 bp, Arabidopsis thaliana
ggacagattggagttaa

SEQ ID NO: 108159 - DNA, 17 bp, Arabidopsis thaliana
ggacagccttacagttt

SEQ ID NO: 108160 - DNA, 17 bp, Arabidopsis thaliana
ggacagcggattgtaca

SEQ ID NO: 108161 - DNA, 17 bp, Arabidopsis thaliana
ggacagcggtactcgga

SEQ ID NO: 108162 - DNA, 17 bp, Arabidopsis thaliana
ggacagctcagtttttg

SEQ ID NO: 108163 - DNA, 17 bp, Arabidopsis thaliana
ggacagctctaccttgg

SEQ ID NO: 108164 - DNA, 17 bp, Arabidopsis thaliana
ggacagctgtcatcgta

SEQ ID NO: 108165 - DNA, 17 bp, Arabidopsis thaliana
ggacagcttctgcagtt

SEQ ID NO: 108166 - DNA, 17 bp, Arabidopsis thaliana
ggacaggagatcggcgg

SEQ ID NO: 108167 - DNA, 17 bp, Arabidopsis thaliana
ggacaggattctcatta

SEQ ID NO: 108168 - DNA, 17 bp, Arabidopsis thaliana
ggacaggattcttctta

SEQ ID NO: 108169 - DNA, 17 bp, Arabidopsis thaliana
ggacaggattggtgggg

SEQ ID NO: 108170 - DNA, 17 bp, Arabidopsis thaliana
ggacaggcggtggaaaa

SEQ ID NO: 108171 - DNA, 17 bp, Arabidopsis thaliana
ggacaggcggtggaaac

SEQ ID NO: 108172 - DNA, 17 bp, Arabidopsis thaliana
ggacaggctaaggttct

SEQ ID NO: 108173 - DNA, 17 bp, Arabidopsis thaliana
ggacagggtaactcgtt

SEQ ID NO: 108174 - DNA, 17 bp, Arabidopsis thaliana
ggacagggtggcggggc

SEQ ID NO: 108175 - DNA, 17 bp, Arabidopsis thaliana
ggacaggtcccatttcg

SEQ ID NO: 108176 - DNA, 17 bp, Arabidopsis thaliana
ggacaggtggtgcatgg

SEQ ID NO: 108177 - DNA, 17 bp, Arabidopsis thaliana
ggacaggttggcgggac

SEQ ID NO: 108178 - DNA, 17 bp, Arabidopsis thaliana
ggacaggtttgacggaa

SEQ ID NO: 108179 - DNA, 17 bp, Arabidopsis thaliana
ggacaggtttggcagga

SEQ ID NO: 108180 - DNA, 17 bp, Arabidopsis thaliana
ggacaggtttggcggga

SEQ ID NO: 108181 - DNA, 17 bp, Arabidopsis thaliana
ggacaggtttgggtcga

SEQ ID NO: 108182 - DNA, 17 bp, Arabidopsis thaliana
ggacaggttttgcggga

SEQ ID NO: 108183 - DNA, 17 bp, Arabidopsis thaliana
ggacagtacaactctac

SEQ ID NO: 108184 - DNA, 17 bp, Arabidopsis thaliana
ggacagtagatgccaca

SEQ ID NO: 108185 - DNA, 17 bp, Arabidopsis thaliana
ggacagtagatgtcaca

SEQ ID NO: 108186 - DNA, 17 bp, Arabidopsis thaliana
ggacagtcaggggcatt

SEQ ID NO: 108187 - DNA, 17 bp, Arabidopsis thaliana
ggacagtccaatgccat

SEQ ID NO: 108188 - DNA, 17 bp, Arabidopsis thaliana
ggacagtccatggtcgg

SEQ ID NO: 108189 - DNA, 17 bp, Arabidopsis thaliana
ggacagtcgggggcatt

SEQ ID NO: 108190 - DNA, 17 bp, Arabidopsis thaliana
ggacagtctcaggtaat

SEQ ID NO: 108191 - DNA, 17 bp, Arabidopsis thaliana
ggacagtctcaggtaga

SEQ ID NO: 108192 - DNA, 17 bp, Arabidopsis thaliana
ggacagtgacgattgat

SEQ ID NO: 108193 - DNA, 17 bp, Arabidopsis thaliana
ggacagtgcataccaag

SEQ ID NO: 108194 - DNA, 17 bp, Arabidopsis thaliana
ggacagtggcgaaaggg

SEQ ID NO: 108195 - DNA, 17 bp, Arabidopsis thaliana
ggacagtggtgtacagt

SEQ ID NO: 108196 - DNA, 17 bp, Arabidopsis thaliana
ggacagtgttcagtatg

SEQ ID NO: 108197 - DNA, 17 bp, Arabidopsis thaliana
ggacagttctaagcttg

SEQ ID NO: 108198 - DNA, 17 bp, Arabidopsis thaliana
ggacagtttggcacgat

SEQ ID NO: 108199 - DNA, 17 bp, Arabidopsis thaliana
ggacagttttggcggga

SEQ ID NO: 108200 - DNA, 17 bp, Arabidopsis thaliana
ggacagttttttctatg

SEQ ID NO: 108201 - DNA, 17 bp, Arabidopsis thaliana
ggacagttttttttatg

SEQ ID NO: 108202 - DNA, 17 bp, Arabidopsis thaliana
ggacataccaactgact

SEQ ID NO: 108203 - DNA, 17 bp, Arabidopsis thaliana
ggacatacggttggtca

SEQ ID NO: 108204 - DNA, 17 bp, Arabidopsis thaliana
ggacatagacagcccgc

SEQ ID NO: 108205 - DNA, 17 bp, Arabidopsis thaliana
ggacatagagtaggaca

SEQ ID NO: 108206 - DNA, 17 bp, Arabidopsis thaliana
ggacatatattcgacgc

SEQ ID NO: 108207 - DNA, 17 bp, Arabidopsis thaliana
ggacatatccaatcagc

SEQ ID NO: 108208 - DNA, 17 bp, Arabidopsis thaliana
ggacatatcggtttcct

SEQ ID NO: 108209 - DNA, 17 bp, Arabidopsis thaliana
ggacatatgtggctaat

SEQ ID NO: 108210 - DNA, 17 bp, Arabidopsis thaliana
ggacatattccaggata

SEQ ID NO: 108211 - DNA, 17 bp, Arabidopsis thaliana
ggacatcaagactttgg

SEQ ID NO: 108212 - DNA, 17 bp, Arabidopsis thaliana
ggacatcatcaatggaa

SEQ ID NO: 108213 - DNA, 17 bp, Arabidopsis thaliana
ggacatcatcaatggag

SEQ ID NO: 108214 - DNA, 17 bp, Arabidopsis thaliana
ggacatcatcttccggg

SEQ ID NO: 108215 - DNA, 17 bp, Arabidopsis thaliana
ggacatccctgatctgc

SEQ ID NO: 108216 - DNA, 17 bp, Arabidopsis thaliana
ggacatcggaacttctg

SEQ ID NO: 108217 - DNA, 17 bp, Arabidopsis thaliana
ggacatcggccacgggc

SEQ ID NO: 108218 - DNA, 17 bp, Arabidopsis thaliana
ggacatctcctcagctt

SEQ ID NO: 108219 - DNA, 17 bp, Arabidopsis thaliana
ggacatctcggcgtgct

SEQ ID NO: 108220 - DNA, 17 bp, Arabidopsis thaliana
ggacatctcggtatttc

SEQ ID NO: 108221 - DNA, 17 bp, Arabidopsis thaliana
ggacatctgaagcgtga

SEQ ID NO: 108222 - DNA, 17 bp, Arabidopsis thaliana
ggacatctggattgtgg

SEQ ID NO: 108223 - DNA, 17 bp, Arabidopsis thaliana
ggacatgaagtcatgaa

SEQ ID NO: 108224 - DNA, 17 bp, Arabidopsis thaliana
ggacatgaccatttggc

SEQ ID NO: 108225 - DNA, 17 bp, Arabidopsis thaliana
ggacatgggtactcctc

SEQ ID NO: 108226 - DNA, 17 bp, Arabidopsis thaliana
ggacatgtagaccaagg

SEQ ID NO: 108227 - DNA, 17 bp, Arabidopsis thaliana
ggacatgtagaccgggg

SEQ ID NO: 108228 - DNA, 17 bp, Arabidopsis thaliana
ggacatgtctcgggtac

SEQ ID NO: 108229 - DNA, 17 bp, Arabidopsis thaliana
ggacatgttcttgaccc

SEQ ID NO: 108230 - DNA, 17 bp, Arabidopsis thaliana
ggacattaatggacatg

SEQ ID NO: 108231 - DNA, 17 bp, Arabidopsis thaliana
ggacattacatgctttt

SEQ ID NO: 108232 - DNA, 17 bp, Arabidopsis thaliana
ggacattagaccaaggt

SEQ ID NO: 108233 - DNA, 17 bp, Arabidopsis thaliana
ggacattcagttgggaa

SEQ ID NO: 108234 - DNA, 17 bp, Arabidopsis thaliana
ggacattcagttggtaa

SEQ ID NO: 108235 - DNA, 17 bp, Arabidopsis thaliana
ggacattcatagtgcgt

SEQ ID NO: 108236 - DNA, 17 bp, Arabidopsis thaliana
ggacattccatggcttc

SEQ ID NO: 108237 - DNA, 17 bp, Arabidopsis thaliana
ggacattctaagcgatg

SEQ ID NO: 108238 - DNA, 17 bp, Arabidopsis thaliana
ggacattgacatttttt

SEQ ID NO: 108239 - DNA, 17 bp, Arabidopsis thaliana
ggacattgccacggatc

SEQ ID NO: 108240 - DNA, 17 bp, Arabidopsis thaliana
ggacattgcggtccatt

SEQ ID NO: 108241 - DNA, 17 bp, Arabidopsis thaliana
ggacattgtcaggtagt

SEQ ID NO: 108242 - DNA, 17 bp, Arabidopsis thaliana
ggacattgtcaggtgga

SEQ ID NO: 108243 - DNA, 17 bp, Arabidopsis thaliana
ggacattgtcaggtggg

SEQ ID NO: 108244 - DNA, 17 bp, Arabidopsis thaliana
ggacattgtcaggttgg

SEQ ID NO: 108245 - DNA, 17 bp, Arabidopsis thaliana
ggacattgtgatttaaa

SEQ ID NO: 108246 - DNA, 17 bp, Arabidopsis thaliana
ggacattgtttaggaag

SEQ ID NO: 108247 - DNA, 17 bp, Arabidopsis thaliana
ggacatttacgtaatta

SEQ ID NO: 108248 - DNA, 17 bp, Arabidopsis thaliana
ggacatttggcggtact

SEQ ID NO: 108249 - DNA, 17 bp, Arabidopsis thaliana
ggacatttggtcaacta

SEQ ID NO: 108250 - DNA, 17 bp, Arabidopsis thaliana
ggacatttggtcaactc

SEQ ID NO: 108251 - DNA, 17 bp, Arabidopsis thaliana
ggacattttcgtgattt

SEQ ID NO: 108252 - DNA, 17 bp, Arabidopsis thaliana
ggacattttgacccacc

SEQ ID NO: 108253 - DNA, 17 bp, Arabidopsis thaliana
ggacatttttttttccg

SEQ ID NO: 108254 - DNA, 17 bp, Arabidopsis thaliana
ggaccaaaaactgtcct

SEQ ID NO: 108255 - DNA, 17 bp, Arabidopsis thaliana
ggaccaaaaactgttct

SEQ ID NO: 108256 - DNA, 17 bp, Arabidopsis thaliana
ggaccaaaatgtggcag

SEQ ID NO: 108257 - DNA, 17 bp, Arabidopsis thaliana
ggaccaaacatggatta

SEQ ID NO: 108258 - DNA, 17 bp, Arabidopsis thaliana
ggaccaaaccacgttgt

SEQ ID NO: 108259 - DNA, 17 bp, Arabidopsis thaliana
ggaccaaaccactttgt

SEQ ID NO: 108260 - DNA, 17 bp, Arabidopsis thaliana
ggaccaaacttcacgta

SEQ ID NO: 108261 - DNA, 17 bp, Arabidopsis thaliana
ggaccaaagccaccatt

SEQ ID NO: 108262 - DNA, 17 bp, Arabidopsis thaliana
ggaccaaatagtacttg

SEQ ID NO: 108263 - DNA, 17 bp, Arabidopsis thaliana
ggaccaaatcatcctcg

SEQ ID NO: 108264 - DNA, 17 bp, Arabidopsis thaliana
ggaccaacatgtgggat

SEQ ID NO: 108265 - DNA, 17 bp, Arabidopsis thaliana
ggaccaaccatgggctc

SEQ ID NO: 108266 - DNA, 17 bp, Arabidopsis thaliana
ggaccaagagccgatat

SEQ ID NO: 108267 - DNA, 17 bp, Arabidopsis thaliana
ggaccaagagcgttaca

SEQ ID NO: 108268 - DNA, 17 bp, Arabidopsis thaliana
ggaccaagatatccagt

SEQ ID NO: 108269 - DNA, 17 bp, Arabidopsis thaliana
ggaccaagatcgaggta

SEQ ID NO: 108270 - DNA, 17 bp, Arabidopsis thaliana
ggaccaaggagtatcgg

SEQ ID NO: 108271 - DNA, 17 bp, Arabidopsis thaliana
ggaccaaggagtctgac

SEQ ID NO: 108272 - DNA, 17 bp, Arabidopsis thaliana
ggaccaaggatgacttg

SEQ ID NO: 108273 - DNA, 17 bp, Arabidopsis thaliana
ggaccaagtcgtagcca

SEQ ID NO: 108274 - DNA, 17 bp, Arabidopsis thaliana
ggaccaagtgaattttg

SEQ ID NO: 108275 - DNA, 17 bp, Arabidopsis thaliana
ggaccaataactgttct

SEQ ID NO: 108276 - DNA, 17 bp, Arabidopsis thaliana
ggaccaatcagatatcc

SEQ ID NO: 108277 - DNA, 17 bp, Arabidopsis thaliana
ggaccaatcggatatcc

SEQ ID NO: 108278 - DNA, 17 bp, Arabidopsis thaliana
ggaccaatcggatatct

SEQ ID NO: 108279 - DNA, 17 bp, Arabidopsis thaliana
ggaccaccaattctgct

SEQ ID NO: 108280 - DNA, 17 bp, Arabidopsis thaliana
ggaccaccacactgtct

SEQ ID NO: 108281 - DNA, 17 bp, Arabidopsis thaliana
ggaccacgatttggact

SEQ ID NO: 108282 - DNA, 17 bp, Arabidopsis thaliana
ggaccacgcgttttgtt

SEQ ID NO: 108283 - DNA, 17 bp, Arabidopsis thaliana
ggaccagaaaccgaact

SEQ ID NO: 108284 - DNA, 17 bp, Arabidopsis thaliana
ggaccagaccggtgtcc

SEQ ID NO: 108285 - DNA, 17 bp, Arabidopsis thaliana
ggaccagatagttcaga

SEQ ID NO: 108286 - DNA, 17 bp, Arabidopsis thaliana
ggaccagccttcattcc

SEQ ID NO: 108287 - DNA, 17 bp, Arabidopsis thaliana
ggaccagccttccctgt

SEQ ID NO: 108288 - DNA, 17 bp, Arabidopsis thaliana
ggaccagctcgggagac

SEQ ID NO: 108289 - DNA, 17 bp, Arabidopsis thaliana
ggaccaggacttgtcct

SEQ ID NO: 108290 - DNA, 17 bp, Arabidopsis thaliana
ggaccaggattcattcc

SEQ ID NO: 108291 - DNA, 17 bp, Arabidopsis thaliana
ggaccaggcttcatccc

SEQ ID NO: 108292 - DNA, 17 bp, Arabidopsis thaliana
ggaccaggcttcattcc

SEQ ID NO: 108293 - DNA, 17 bp, Arabidopsis thaliana
ggaccagggctctctgc

SEQ ID NO: 108294 - DNA, 17 bp, Arabidopsis thaliana
ggaccagggtagcctgc

SEQ ID NO: 108295 - DNA, 17 bp, Arabidopsis thaliana
ggaccagggttcattcc

SEQ ID NO: 108296 - DNA, 17 bp, Arabidopsis thaliana
ggaccaggtcactgcac

SEQ ID NO: 108297 - DNA, 17 bp, Arabidopsis thaliana
ggaccaggtggaaattg

SEQ ID NO: 108298 - DNA, 17 bp, Arabidopsis thaliana
ggaccagtactaggctc

SEQ ID NO: 108299 - DNA, 17 bp, Arabidopsis thaliana
ggaccagtgaaatcttg

SEQ ID NO: 108300 - DNA, 17 bp, Arabidopsis thaliana
ggaccataggtgcgatg

SEQ ID NO: 108301 - DNA, 17 bp, Arabidopsis thaliana
ggaccatatcgagcatt

SEQ ID NO: 108302 - DNA, 17 bp, Arabidopsis thaliana
ggaccatccaaatgatt

SEQ ID NO: 108303 - DNA, 17 bp, Arabidopsis thaliana
ggaccatctgcaaaccg

SEQ ID NO: 108304 - DNA, 17 bp, Arabidopsis thaliana
ggaccatctgcagaccg

SEQ ID NO: 108305 - DNA, 17 bp, Arabidopsis thaliana
ggaccatctgccgaccg

SEQ ID NO: 108306 - DNA, 17 bp, Arabidopsis thaliana
ggaccatctgcggactg

SEQ ID NO: 108307 - DNA, 17 bp, Arabidopsis thaliana
ggaccatgcggattggt

SEQ ID NO: 108308 - DNA, 17 bp, Arabidopsis thaliana
ggaccattgggcgtgta

SEQ ID NO: 108309 - DNA, 17 bp, Arabidopsis thaliana
ggaccattgggcgtgtc

SEQ ID NO: 108310 - DNA, 17 bp, Arabidopsis thaliana
ggaccattgggcgtgtt

SEQ ID NO: 108311 - DNA, 17 bp, Arabidopsis thaliana
ggaccattgtctctcta

SEQ ID NO: 108312 - DNA, 17 bp, Arabidopsis thaliana
ggaccatttctcgattt

SEQ ID NO: 108313 - DNA, 17 bp, Arabidopsis thaliana
ggaccatttgatggtga

SEQ ID NO: 108314 - DNA, 17 bp, Arabidopsis thaliana
ggaccatttgcggacca

SEQ ID NO: 108315 - DNA, 17 bp, Arabidopsis thaliana
ggaccatttgcggactg

SEQ ID NO: 108316 - DNA, 17 bp, Arabidopsis thaliana
ggaccatttggatggag

SEQ ID NO: 108317 - DNA, 17 bp, Arabidopsis thaliana
ggacccaaggcgagata

SEQ ID NO: 108318 - DNA, 17 bp, Arabidopsis thaliana
ggacccacttggtgcag

SEQ ID NO: 108319 - DNA, 17 bp, Arabidopsis thaliana
ggacccatagctcagtg

SEQ ID NO: 108320 - DNA, 17 bp, Arabidopsis thaliana
ggacccatcatgctctt

SEQ ID NO: 108321 - DNA, 17 bp, Arabidopsis thaliana
ggacccatcgccggccc

SEQ ID NO: 108322 - DNA, 17 bp, Arabidopsis thaliana
ggacccatggactgact

SEQ ID NO: 108323 - DNA, 17 bp, Arabidopsis thaliana
ggacccatggactgcct

SEQ ID NO: 108324 - DNA, 17 bp, Arabidopsis thaliana
ggacccatggatccatc

SEQ ID NO: 108325 - DNA, 17 bp, Arabidopsis thaliana
ggacccatgtacttcgg

SEQ ID NO: 108326 - DNA, 17 bp, Arabidopsis thaliana
ggacccccaatgatcca

SEQ ID NO: 108327 - DNA, 17 bp, Arabidopsis thaliana
ggacccccgagcccagc

SEQ ID NO: 108328 - DNA, 17 bp, Arabidopsis thaliana
ggaccccctctccatcg

SEQ ID NO: 108329 - DNA, 17 bp, Arabidopsis thaliana
ggaccccgactaggcgc

SEQ ID NO: 108330 - DNA, 17 bp, Arabidopsis thaliana
ggacccgaaagatggtg

SEQ ID NO: 108331 - DNA, 17 bp, Arabidopsis thaliana
ggacccgacccgaacca

SEQ ID NO: 108332 - DNA, 17 bp, Arabidopsis thaliana
ggacccgatccaagcca

SEQ ID NO: 108333 - DNA, 17 bp, Arabidopsis thaliana
ggacccgctttttattt

SEQ ID NO: 108334 - DNA, 17 bp, Arabidopsis thaliana
ggacccggtcgacgatt

SEQ ID NO: 108335 - DNA, 17 bp, Arabidopsis thaliana
ggacccggtcgatgaag

SEQ ID NO: 108336 - DNA, 17 bp, Arabidopsis thaliana
ggacccggtgcactagc

SEQ ID NO: 108337 - DNA, 17 bp, Arabidopsis thaliana
ggacccgtgatttttcc

SEQ ID NO: 108338 - DNA, 17 bp, Arabidopsis thaliana
ggacccgtttttgcttg

SEQ ID NO: 108339 - DNA, 17 bp, Arabidopsis thaliana
ggaccctaaagcgtaag

SEQ ID NO: 108340 - DNA, 17 bp, Arabidopsis thaliana
ggaccctgacgaatata

SEQ ID NO: 108341 - DNA, 17 bp, Arabidopsis thaliana
ggaccctgccgcaccac

SEQ ID NO: 108342 - DNA, 17 bp, Arabidopsis thaliana
ggaccctgtcgcaccac

SEQ ID NO: 108343 - DNA, 17 bp, Arabidopsis thaliana
ggaccctgtgcctcagc

SEQ ID NO: 108344 - DNA, 17 bp, Arabidopsis thaliana
ggaccctttagcagggg

SEQ ID NO: 108345 - DNA, 17 bp, Arabidopsis thaliana
ggaccgaaaaccgtacc

SEQ ID NO: 108346 - DNA, 17 bp, Arabidopsis thaliana
ggaccgaaacccgtatt

SEQ ID NO: 108347 - DNA, 17 bp, Arabidopsis thaliana
ggaccgaaccgaaccaa

SEQ ID NO: 108348 - DNA, 17 bp, Arabidopsis thaliana
ggaccgaagtccgtaat

SEQ ID NO: 108349 - DNA, 17 bp, Arabidopsis thaliana
ggaccgaagttaatcca

SEQ ID NO: 108350 - DNA, 17 bp, Arabidopsis thaliana
ggaccgaatcagcaaat

SEQ ID NO: 108351 - DNA, 17 bp, Arabidopsis thaliana
ggaccgaatcccgtaat

SEQ ID NO: 108352 - DNA, 17 bp, Arabidopsis thaliana
ggaccgaatctaatacc

SEQ ID NO: 108353 - DNA, 17 bp, Arabidopsis thaliana
ggaccgaatctcgtaat

SEQ ID NO: 108354 - DNA, 17 bp, Arabidopsis thaliana
ggaccgaatgccgctca

SEQ ID NO: 108355 - DNA, 17 bp, Arabidopsis thaliana
ggaccgaccattggcag

SEQ ID NO: 108356 - DNA, 17 bp, Arabidopsis thaliana
ggaccgacccgcggatc

SEQ ID NO: 108357 - DNA, 17 bp, Arabidopsis thaliana
ggaccgacgcagattac

SEQ ID NO: 108358 - DNA, 17 bp, Arabidopsis thaliana
ggaccgacgcgcattac

SEQ ID NO: 108359 - DNA, 17 bp, Arabidopsis thaliana
ggaccgacgcgcattcc

SEQ ID NO: 108360 - DNA, 17 bp, Arabidopsis thaliana
ggaccgacgcggattaa

SEQ ID NO: 108361 - DNA, 17 bp, Arabidopsis thaliana
ggaccgacgcggattac

SEQ ID NO: 108362 - DNA, 17 bp, Arabidopsis thaliana
ggaccgacgcggattcc

SEQ ID NO: 108363 - DNA, 17 bp, Arabidopsis thaliana
ggaccgacgtggattac

SEQ ID NO: 108364 - DNA, 17 bp, Arabidopsis thaliana
ggaccgactcggattac

SEQ ID NO: 108365 - DNA, 17 bp, Arabidopsis thaliana
ggaccgagagacagaaa

SEQ ID NO: 108366 - DNA, 17 bp, Arabidopsis thaliana
ggaccgagagacagaca

SEQ ID NO: 108367 - DNA, 17 bp, Arabidopsis thaliana
ggaccgagagacagact

SEQ ID NO: 108368 - DNA, 17 bp, Arabidopsis thaliana
ggaccgagagacaggaa

SEQ ID NO: 108369 - DNA, 17 bp, Arabidopsis thaliana
ggaccgagagacaggat

SEQ ID NO: 108370 - DNA, 17 bp, Arabidopsis thaliana
ggaccgagatgaaaggg

SEQ ID NO: 108371 - DNA, 17 bp, Arabidopsis thaliana
ggaccgaggagctgttg

SEQ ID NO: 108372 - DNA, 17 bp, Arabidopsis thaliana
ggaccgaggttaaagtt

SEQ ID NO: 108373 - DNA, 17 bp, Arabidopsis thaliana
ggaccgagtgccgctca

SEQ ID NO: 108374 - DNA, 17 bp, Arabidopsis thaliana
ggaccgagtgccgctta

SEQ ID NO: 108375 - DNA, 17 bp, Arabidopsis thaliana
ggaccgagtgtcgctca

SEQ ID NO: 108376 - DNA, 17 bp, Arabidopsis thaliana
ggaccgatccgtaggct

SEQ ID NO: 108377 - DNA, 17 bp, Arabidopsis thaliana
ggaccgatgtggattgg

SEQ ID NO: 108378 - DNA, 17 bp, Arabidopsis thaliana
ggaccgattggattctt

SEQ ID NO: 108379 - DNA, 17 bp, Arabidopsis thaliana
ggaccgatttatatttg

SEQ ID NO: 108380 - DNA, 17 bp, Arabidopsis thaliana
ggaccgcaacccacgac

SEQ ID NO: 108381 - DNA, 17 bp, Arabidopsis thaliana
ggaccgcacgatttctg

SEQ ID NO: 108382 - DNA, 17 bp, Arabidopsis thaliana
ggaccgcaggtacaatg

SEQ ID NO: 108383 - DNA, 17 bp, Arabidopsis thaliana
ggaccgcagtaaccatt

SEQ ID NO: 108384 - DNA, 17 bp, Arabidopsis thaliana
ggaccgcatgatattct

SEQ ID NO: 108385 - DNA, 17 bp, Arabidopsis thaliana
ggaccgcgtcgttggaa

SEQ ID NO: 108386 - DNA, 17 bp, Arabidopsis thaliana
ggaccgctaattccgtt

SEQ ID NO: 108387 - DNA, 17 bp, Arabidopsis thaliana
ggaccgctctacaactg

SEQ ID NO: 108388 - DNA, 17 bp, Arabidopsis thaliana
ggaccgctgacagatta

SEQ ID NO: 108389 - DNA, 17 bp, Arabidopsis thaliana
ggaccgctgcggaccat

SEQ ID NO: 108390 - DNA, 17 bp, Arabidopsis thaliana
ggaccgcttcgtttttg

SEQ ID NO: 108391 - DNA, 17 bp, Arabidopsis thaliana
ggaccgcttgaaatcgc

SEQ ID NO: 108392 - DNA, 17 bp, Arabidopsis thaliana
ggaccgcttgaaattgc

SEQ ID NO: 108393 - DNA, 17 bp, Arabidopsis thaliana
ggaccggcgggtcttaa

SEQ ID NO: 108394 - DNA, 17 bp, Arabidopsis thaliana
ggaccgggtaacctcac

SEQ ID NO: 108395 - DNA, 17 bp, Arabidopsis thaliana
ggaccgggtggtgtttt

SEQ ID NO: 108396 - DNA, 17 bp, Arabidopsis thaliana
ggaccggtcccggatgt

SEQ ID NO: 108397 - DNA, 17 bp, Arabidopsis thaliana
ggaccggttaacctgag

SEQ ID NO: 108398 - DNA, 17 bp, Arabidopsis thaliana
ggaccggttagggttgg

SEQ ID NO: 108399 - DNA, 17 bp, Arabidopsis thaliana
ggaccgtaaccagaccg

SEQ ID NO: 108400 - DNA, 17 bp, Arabidopsis thaliana
ggaccgtaaccggatta

SEQ ID NO: 108401 - DNA, 17 bp, Arabidopsis thaliana
ggaccgtagttccttat

SEQ ID NO: 108402 - DNA, 17 bp, Arabidopsis thaliana
ggaccgtccaacttggc

SEQ ID NO: 108403 - DNA, 17 bp, Arabidopsis thaliana
ggaccgtccaacttggg

SEQ ID NO: 108404 - DNA, 17 bp, Arabidopsis thaliana
ggaccgtgaccattcaa

SEQ ID NO: 108405 - DNA, 17 bp, Arabidopsis thaliana
ggaccgtgactcttttt

SEQ ID NO: 108406 - DNA, 17 bp, Arabidopsis thaliana
ggaccgtgggtatctgt

SEQ ID NO: 108407 - DNA, 17 bp, Arabidopsis thaliana
ggaccgtggtataagtt

SEQ ID NO: 108408 - DNA, 17 bp, Arabidopsis thaliana
ggaccgtgtcaggtggg

SEQ ID NO: 108409 - DNA, 17 bp, Arabidopsis thaliana
ggaccgttcacagttgt

SEQ ID NO: 108410 - DNA, 17 bp, Arabidopsis thaliana
ggaccgttcttaccttc

SEQ ID NO: 108411 - DNA, 17 bp, Arabidopsis thaliana
ggaccgttcttaccttg

SEQ ID NO: 108412 - DNA, 17 bp, Arabidopsis thaliana
ggaccgttgacggatta

SEQ ID NO: 108413 - DNA, 17 bp, Arabidopsis thaliana
ggaccgttggtgaccac

SEQ ID NO: 108414 - DNA, 17 bp, Arabidopsis thaliana
ggaccgtttattaaccg

SEQ ID NO: 108415 - DNA, 17 bp, Arabidopsis thaliana
ggaccgtttcacagttg

SEQ ID NO: 108416 - DNA, 17 bp, Arabidopsis thaliana
ggaccgtttgttgtaat

SEQ ID NO: 108417 - DNA, 17 bp, Arabidopsis thaliana
ggaccgttttggaccgt

SEQ ID NO: 108418 - DNA, 17 bp, Arabidopsis thaliana
ggaccgttttgtccgct

SEQ ID NO: 108419 - DNA, 17 bp, Arabidopsis thaliana
ggaccgtttttcaccca

SEQ ID NO: 108420 - DNA, 17 bp, Arabidopsis thaliana
ggacctaaggggattac

SEQ ID NO: 108421 - DNA, 17 bp, Arabidopsis thaliana
ggacctaatggccaaaa

SEQ ID NO: 108422 - DNA, 17 bp, Arabidopsis thaliana
ggacctaatggctaaaa

SEQ ID NO: 108423 - DNA, 17 bp, Arabidopsis thaliana
ggacctaatgttgtggc

SEQ ID NO: 108424 - DNA, 17 bp, Arabidopsis thaliana
ggacctaattggaccct

SEQ ID NO: 108425 - DNA, 17 bp, Arabidopsis thaliana
ggacctaccgcgaagac

SEQ ID NO: 108426 - DNA, 17 bp, Arabidopsis thaliana
ggacctacgggccaacg

SEQ ID NO: 108427 - DNA, 17 bp, Arabidopsis thaliana
ggacctacgggccaagg

SEQ ID NO: 108428 - DNA, 17 bp, Arabidopsis thaliana
ggacctacgggccggac

SEQ ID NO: 108429 - DNA, 17 bp, Arabidopsis thaliana
ggacctacggggccaga

SEQ ID NO: 108430 - DNA, 17 bp, Arabidopsis thaliana
ggacctagagaaatgct

SEQ ID NO: 108431 - DNA, 17 bp, Arabidopsis thaliana
ggacctagatgaagagc

SEQ ID NO: 108432 - DNA, 17 bp, Arabidopsis thaliana
ggacctagatgatgagc

SEQ ID NO: 108433 - DNA, 17 bp, Arabidopsis thaliana
ggacctaggacttgggc

SEQ ID NO: 108434 - DNA, 17 bp, Arabidopsis thaliana
ggacctagtgaagatgg

SEQ ID NO: 108435 - DNA, 17 bp, Arabidopsis thaliana
ggacctcaagaatacag

SEQ ID NO: 108436 - DNA, 17 bp, Arabidopsis thaliana
ggacctcggggcgagtt

SEQ ID NO: 108437 - DNA, 17 bp, Arabidopsis thaliana
ggacctctgctaaggtt

SEQ ID NO: 108438 - DNA, 17 bp, Arabidopsis thaliana
ggacctcttcttctgac

SEQ ID NO: 108439 - DNA, 17 bp, Arabidopsis thaliana
ggacctgaaggaattac

SEQ ID NO: 108440 - DNA, 17 bp, Arabidopsis thaliana
ggacctgacgcggatta

SEQ ID NO: 108441 - DNA, 17 bp, Arabidopsis thaliana
ggacctgagagattacg

SEQ ID NO: 108442 - DNA, 17 bp, Arabidopsis thaliana
ggacctgatgtgggtcc

SEQ ID NO: 108443 - DNA, 17 bp, Arabidopsis thaliana
ggacctgcccgctcgtc

SEQ ID NO: 108444 - DNA, 17 bp, Arabidopsis thaliana
ggacctgcctatgcggc

SEQ ID NO: 108445 - DNA, 17 bp, Arabidopsis thaliana
ggacctgcggaaggatc

SEQ ID NO: 108446 - DNA, 17 bp, Arabidopsis thaliana
ggacctgctcctttcct

SEQ ID NO: 108447 - DNA, 17 bp, Arabidopsis thaliana
ggacctgctcctttctt

SEQ ID NO: 108448 - DNA, 17 bp, Arabidopsis thaliana
ggacctggaggaattac

SEQ ID NO: 108449 - DNA, 17 bp, Arabidopsis thaliana
ggacctggctcagacgc

SEQ ID NO: 108450 - DNA, 17 bp, Arabidopsis thaliana
ggacctgggatccgatt

SEQ ID NO: 108451 - DNA, 17 bp, Arabidopsis thaliana
ggacctgggctcgtatc

SEQ ID NO: 108452 - DNA, 17 bp, Arabidopsis thaliana
ggacctggtgatagcca

SEQ ID NO: 108453 - DNA, 17 bp, Arabidopsis thaliana
ggacctggtggcgtagc

SEQ ID NO: 108454 - DNA, 17 bp, Arabidopsis thaliana
ggacctgtggctggatg

SEQ ID NO: 108455 - DNA, 17 bp, Arabidopsis thaliana
ggacctgtgtaaagaaa

SEQ ID NO: 108456 - DNA, 17 bp, Arabidopsis thaliana
ggacctgttcgtttctg

SEQ ID NO: 108457 - DNA, 17 bp, Arabidopsis thaliana
ggaccttcagaggcagg

SEQ ID NO: 108458 - DNA, 17 bp, Arabidopsis thaliana
ggaccttcagccactac

SEQ ID NO: 108459 - DNA, 17 bp, Arabidopsis thaliana
ggaccttcatcctcagc

SEQ ID NO: 108460 - DNA, 17 bp, Arabidopsis thaliana
ggaccttcattggactt

SEQ ID NO: 108461 - DNA, 17 bp, Arabidopsis thaliana
ggaccttgtgctatgct

SEQ ID NO: 108462 - DNA, 17 bp, Arabidopsis thaliana
ggaccttgttgtattcg

SEQ ID NO: 108463 - DNA, 17 bp, Arabidopsis thaliana
ggaccttgtttcgaatc

SEQ ID NO: 108464 - DNA, 17 bp, Arabidopsis thaliana
ggacctttaagtacttt

SEQ ID NO: 108465 - DNA, 17 bp, Arabidopsis thaliana
ggacctttggatctgaa

SEQ ID NO: 108466 - DNA, 17 bp, Arabidopsis thaliana
ggacctttggtttgtac

SEQ ID NO: 108467 - DNA, 17 bp, Arabidopsis thaliana
ggaccttttgcaaacac

SEQ ID NO: 108468 - DNA, 17 bp, Arabidopsis thaliana
ggacgaaacagacacaa

SEQ ID NO: 108469 - DNA, 17 bp, Arabidopsis thaliana
ggacgaaactgaaccac

SEQ ID NO: 108470 - DNA, 17 bp, Arabidopsis thaliana
ggacgaaagtcggcctg

SEQ ID NO: 108471 - DNA, 17 bp, Arabidopsis thaliana
ggacgaaccaatgggtt

SEQ ID NO: 108472 - DNA, 17 bp, Arabidopsis thaliana
ggacgaacccgggctca

SEQ ID NO: 108473 - DNA, 17 bp, Arabidopsis thaliana
ggacgaacctttgtact

SEQ ID NO: 108474 - DNA, 17 bp, Arabidopsis thaliana
ggacgaagcccgtaatt

SEQ ID NO: 108475 - DNA, 17 bp, Arabidopsis thaliana
ggacgaagggaaagaat

SEQ ID NO: 108476 - DNA, 17 bp, Arabidopsis thaliana
ggacgaatatgatcaca

SEQ ID NO: 108477 - DNA, 17 bp, Arabidopsis thaliana
ggacgaatccgagccaa

SEQ ID NO: 108478 - DNA, 17 bp, Arabidopsis thaliana
ggacgaatttaagacaa

SEQ ID NO: 108479 - DNA, 17 bp, Arabidopsis thaliana
ggacgaattttgcggga

SEQ ID NO: 108480 - DNA, 17 bp, Arabidopsis thaliana
ggacgacactgtcattg

SEQ ID NO: 108481 - DNA, 17 bp, Arabidopsis thaliana
ggacgaccctcagtagg

SEQ ID NO: 108482 - DNA, 17 bp, Arabidopsis thaliana
ggacgaccgattcagcc

SEQ ID NO: 108483 - DNA, 17 bp, Arabidopsis thaliana
ggacgacgaggacagtg

SEQ ID NO: 108484 - DNA, 17 bp, Arabidopsis thaliana
ggacgacgccgacccgc

SEQ ID NO: 108485 - DNA, 17 bp, Arabidopsis thaliana
ggacgacgcggattacg

SEQ ID NO: 108486 - DNA, 17 bp, Arabidopsis thaliana
ggacgacggacggctga

SEQ ID NO: 108487 - DNA, 17 bp, Arabidopsis thaliana
ggacgagaaatctgtag

SEQ ID NO: 108488 - DNA, 17 bp, Arabidopsis thaliana
ggacgagaagatggatt

SEQ ID NO: 108489 - DNA, 17 bp, Arabidopsis thaliana
ggacgagagaagagtat

SEQ ID NO: 108490 - DNA, 17 bp, Arabidopsis thaliana
ggacgagagacaggatc

SEQ ID NO: 108491 - DNA, 17 bp, Arabidopsis thaliana
ggacgagagtcggctcg

SEQ ID NO: 108492 - DNA, 17 bp, Arabidopsis thaliana
ggacgagatgactgttg

SEQ ID NO: 108493 - DNA, 17 bp, Arabidopsis thaliana
ggacgagcaacgaacgg

SEQ ID NO: 108494 - DNA, 17 bp, Arabidopsis thaliana
ggacgagccaccatcac

SEQ ID NO: 108495 - DNA, 17 bp, Arabidopsis thaliana
ggacgagccaccatccc

SEQ ID NO: 108496 - DNA, 17 bp, Arabidopsis thaliana
ggacgagctcaggagct

SEQ ID NO: 108497 - DNA, 17 bp, Arabidopsis thaliana
ggacgagcttgctcgcg

SEQ ID NO: 108498 - DNA, 17 bp, Arabidopsis thaliana
ggacgagggcacgtctg

SEQ ID NO: 108499 - DNA, 17 bp, Arabidopsis thaliana
ggacgagggtgatgata

SEQ ID NO: 108500 - DNA, 17 bp, Arabidopsis thaliana
ggacgaggtcttgaccg

SEQ ID NO: 108501 - DNA, 17 bp, Arabidopsis thaliana
ggacgagtctaagagca

SEQ ID NO: 108502 - DNA, 17 bp, Arabidopsis thaliana
ggacgagtcttgatcga

SEQ ID NO: 108503 - DNA, 17 bp, Arabidopsis thaliana
ggacgagttcacacacc

SEQ ID NO: 108504 - DNA, 17 bp, Arabidopsis thaliana
ggacgagttcacccacc

SEQ ID NO: 108505 - DNA, 17 bp, Arabidopsis thaliana
ggacgagttggcccggg

SEQ ID NO: 108506 - DNA, 17 bp, Arabidopsis thaliana
ggacgagttggcgggac

SEQ ID NO: 108507 - DNA, 17 bp, Arabidopsis thaliana
ggacgagtttgaaaggc

SEQ ID NO: 108508 - DNA, 17 bp, Arabidopsis thaliana
ggacgagtttgctcgcg

SEQ ID NO: 108509 - DNA, 17 bp, Arabidopsis thaliana
ggacgagtttggcagga

SEQ ID NO: 108510 - DNA, 17 bp, Arabidopsis thaliana
ggacgagtttggcggga

SEQ ID NO: 108511 - DNA, 17 bp, Arabidopsis thaliana
ggacgatagccagcaag

SEQ ID NO: 108512 - DNA, 17 bp, Arabidopsis thaliana
ggacgatccatgacttg

SEQ ID NO: 108513 - DNA, 17 bp, Arabidopsis thaliana
ggacgatggaccgatgg

SEQ ID NO: 108514 - DNA, 17 bp, Arabidopsis thaliana
ggacgatgggctatgct

SEQ ID NO: 108515 - DNA, 17 bp, Arabidopsis thaliana
ggacgattatctccggt

SEQ ID NO: 108516 - DNA, 17 bp, Arabidopsis thaliana
ggacgattcaatcttga

SEQ ID NO: 108517 - DNA, 17 bp, Arabidopsis thaliana
ggacgattctcacttct

SEQ ID NO: 108518 - DNA, 17 bp, Arabidopsis thaliana
ggacgattgagctatgt

SEQ ID NO: 108519 - DNA, 17 bp, Arabidopsis thaliana
ggacgattgtaattccg

SEQ ID NO: 108520 - DNA, 17 bp, Arabidopsis thaliana
ggacgatttgccgtata

SEQ ID NO: 108521 - DNA, 17 bp, Arabidopsis thaliana
ggacgatttggatctcg

SEQ ID NO: 108522 - DNA, 17 bp, Arabidopsis thaliana
ggacgattttgtggaat

SEQ ID NO: 108523 - DNA, 17 bp, Arabidopsis thaliana
ggacgatttttcggtct

SEQ ID NO: 108524 - DNA, 17 bp, Arabidopsis thaliana
ggacgcaaatcctccga

SEQ ID NO: 108525 - DNA, 17 bp, Arabidopsis thaliana
ggacgcacctctggtgt

SEQ ID NO: 108526 - DNA, 17 bp, Arabidopsis thaliana
ggacgcaggaaatagtc

SEQ ID NO: 108527 - DNA, 17 bp, Arabidopsis thaliana
ggacgcataacatactg

SEQ ID NO: 108528 - DNA, 17 bp, Arabidopsis thaliana
ggacgcatagtgcgatt

SEQ ID NO: 108529 - DNA, 17 bp, Arabidopsis thaliana
ggacgcatcgccggccc

SEQ ID NO: 108530 - DNA, 17 bp, Arabidopsis thaliana
ggacgcatgtgtgagat

SEQ ID NO: 108531 - DNA, 17 bp, Arabidopsis thaliana
ggacgcattgactcgat

SEQ ID NO: 108532 - DNA, 17 bp, Arabidopsis thaliana
ggacgccacttaccgca

SEQ ID NO: 108533 - DNA, 17 bp, Arabidopsis thaliana
ggacgccgatttcaacg

SEQ ID NO: 108534 - DNA, 17 bp, Arabidopsis thaliana
ggacgcctgataaatca

SEQ ID NO: 108535 - DNA, 17 bp, Arabidopsis thaliana
ggacgcctgatagataa

SEQ ID NO: 108536 - DNA, 17 bp, Arabidopsis thaliana
ggacgctgagtatgatg

SEQ ID NO: 108537 - DNA, 17 bp, Arabidopsis thaliana
ggacgctggacgtctat

SEQ ID NO: 108538 - DNA, 17 bp, Arabidopsis thaliana
ggacgcttgattgactg

SEQ ID NO: 108539 - DNA, 17 bp, Arabidopsis thaliana
ggacgctttcagaggcg

SEQ ID NO: 108540 - DNA, 17 bp, Arabidopsis thaliana
ggacggaaacaactatg

SEQ ID NO: 108541 - DNA, 17 bp, Arabidopsis thaliana
ggacggaaacttctatc

SEQ ID NO: 108542 - DNA, 17 bp, Arabidopsis thaliana
ggacggaacgggtttgg

SEQ ID NO: 108543 - DNA, 17 bp, Arabidopsis thaliana
ggacggaagatgagaat

SEQ ID NO: 108544 - DNA, 17 bp, Arabidopsis thaliana
ggacggaagtcctcgtg

SEQ ID NO: 108545 - DNA, 17 bp, Arabidopsis thaliana
ggacggaagtggtgttt

SEQ ID NO: 108546 - DNA, 17 bp, Arabidopsis thaliana
ggacggaatctcaactt

SEQ ID NO: 108547 - DNA, 17 bp, Arabidopsis thaliana
ggacggaattacaatcg

SEQ ID NO: 108548 - DNA, 17 bp, Arabidopsis thaliana
ggacggacaacggttcg

SEQ ID NO: 108549 - DNA, 17 bp, Arabidopsis thaliana
ggacggacaaggggaat

SEQ ID NO: 108550 - DNA, 17 bp, Arabidopsis thaliana
ggacggacaaggtgggc

SEQ ID NO: 108551 - DNA, 17 bp, Arabidopsis thaliana
ggacggacacaggtggt

SEQ ID NO: 108552 - DNA, 17 bp, Arabidopsis thaliana
ggacggacactgtgaag

SEQ ID NO: 108553 - DNA, 17 bp, Arabidopsis thaliana
ggacggacagagctgct

SEQ ID NO: 108554 - DNA, 17 bp, Arabidopsis thaliana
ggacggacatcatcttc

SEQ ID NO: 108555 - DNA, 17 bp, Arabidopsis thaliana
ggacggacattcagttg

SEQ ID NO: 108556 - DNA, 17 bp, Arabidopsis thaliana
ggacggaccaaaccacg

SEQ ID NO: 108557 - DNA, 17 bp, Arabidopsis thaliana
ggacggaccataggtgc

SEQ ID NO: 108558 - DNA, 17 bp, Arabidopsis thaliana
ggacggaccatttgaca

SEQ ID NO: 108559 - DNA, 17 bp, Arabidopsis thaliana
ggacggaccattttgac

SEQ ID NO: 108560 - DNA, 17 bp, Arabidopsis thaliana
ggacggacccgtttttg

SEQ ID NO: 108561 - DNA, 17 bp, Arabidopsis thaliana
ggacggaccgaagtccg

SEQ ID NO: 108562 - DNA, 17 bp, Arabidopsis thaliana
ggacggaccgagagaca

SEQ ID NO: 108563 - DNA, 17 bp, Arabidopsis thaliana
ggacggaccgatttata

SEQ ID NO: 108564 - DNA, 17 bp, Arabidopsis thaliana
ggacggaccgggaacgg

SEQ ID NO: 108565 - DNA, 17 bp, Arabidopsis thaliana
ggacggaccgtaaccgg

SEQ ID NO: 108566 - DNA, 17 bp, Arabidopsis thaliana
ggacggaccgtggtata

SEQ ID NO: 108567 - DNA, 17 bp, Arabidopsis thaliana
ggacggacctaaatggg

SEQ ID NO: 108568 - DNA, 17 bp, Arabidopsis thaliana
ggacggacctaatggct

SEQ ID NO: 108569 - DNA, 17 bp, Arabidopsis thaliana
ggacggacgaaagccaa

SEQ ID NO: 108570 - DNA, 17 bp, Arabidopsis thaliana
ggacggacgattctcac

SEQ ID NO: 108571 - DNA, 17 bp, Arabidopsis thaliana
ggacggacggaagtggt

SEQ ID NO: 108572 - DNA, 17 bp, Arabidopsis thaliana
ggacggacggaccattt

SEQ ID NO: 108573 - DNA, 17 bp, Arabidopsis thaliana
ggacggacggactggga

SEQ ID NO: 108574 - DNA, 17 bp, Arabidopsis thaliana
ggacggacgggaagtgg

SEQ ID NO: 108575 - DNA, 17 bp, Arabidopsis thaliana
ggacggacgggttggcg

SEQ ID NO: 108576 - DNA, 17 bp, Arabidopsis thaliana
ggacggacgtgaccgag

SEQ ID NO: 108577 - DNA, 17 bp, Arabidopsis thaliana
ggacggactaactgcgg

SEQ ID NO: 108578 - DNA, 17 bp, Arabidopsis thaliana
ggacggactaattctgc

SEQ ID NO: 108579 - DNA, 17 bp, Arabidopsis thaliana
ggacggactattagctc

SEQ ID NO: 108580 - DNA, 17 bp, Arabidopsis thaliana
ggacggactattttgac

SEQ ID NO: 108581 - DNA, 17 bp, Arabidopsis thaliana
ggacggactctgctaca

SEQ ID NO: 108582 - DNA, 17 bp, Arabidopsis thaliana
ggacggactgaaacccg

SEQ ID NO: 108583 - DNA, 17 bp, Arabidopsis thaliana
ggacggactgaggttaa

SEQ ID NO: 108584 - DNA, 17 bp, Arabidopsis thaliana
ggacggactggacattg

SEQ ID NO: 108585 - DNA, 17 bp, Arabidopsis thaliana
ggacggactgggaacga

SEQ ID NO: 108586 - DNA, 17 bp, Arabidopsis thaliana
ggacggactgggaacgg

SEQ ID NO: 108587 - DNA, 17 bp, Arabidopsis thaliana
ggacggactgggaactc

SEQ ID NO: 108588 - DNA, 17 bp, Arabidopsis thaliana
ggacggactggtcaacg

SEQ ID NO: 108589 - DNA, 17 bp, Arabidopsis thaliana
ggacggactgttgtctg

SEQ ID NO: 108590 - DNA, 17 bp, Arabidopsis thaliana
ggacggacttattcaca

SEQ ID NO: 108591 - DNA, 17 bp, Arabidopsis thaliana
ggacggacttatttaca

SEQ ID NO: 108592 - DNA, 17 bp, Arabidopsis thaliana
ggacggacttggcttaa

SEQ ID NO: 108593 - DNA, 17 bp, Arabidopsis thaliana
ggacggagaattagggt

SEQ ID NO: 108594 - DNA, 17 bp, Arabidopsis thaliana
ggacggagacaatttgt

SEQ ID NO: 108595 - DNA, 17 bp, Arabidopsis thaliana
ggacggagacccgggtt

SEQ ID NO: 108596 - DNA, 17 bp, Arabidopsis thaliana
ggacggagactttgcag

SEQ ID NO: 108597 - DNA, 17 bp, Arabidopsis thaliana
ggacggagagatggctg

SEQ ID NO: 108598 - DNA, 17 bp, Arabidopsis thaliana
ggacggagattcaggtt

SEQ ID NO: 108599 - DNA, 17 bp, Arabidopsis thaliana
ggacggagatttggaac

SEQ ID NO: 108600 - DNA, 17 bp, Arabidopsis thaliana
ggacggagcatgctttg

SEQ ID NO: 108601 - DNA, 17 bp, Arabidopsis thaliana
ggacggagcggatcaag

SEQ ID NO: 108602 - DNA, 17 bp, Arabidopsis thaliana
ggacggagctctttgat

SEQ ID NO: 108603 - DNA, 17 bp, Arabidopsis thaliana
ggacggaggaggctagg

SEQ ID NO: 108604 - DNA, 17 bp, Arabidopsis thaliana
ggacggagggcgcggcg

SEQ ID NO: 108605 - DNA, 17 bp, Arabidopsis thaliana
ggacggaggtagggtcc

SEQ ID NO: 108606 - DNA, 17 bp, Arabidopsis thaliana
ggacggagtaatcgtac

SEQ ID NO: 108607 - DNA, 17 bp, Arabidopsis thaliana
ggacggagtggaataga

SEQ ID NO: 108608 - DNA, 17 bp, Arabidopsis thaliana
ggacggagttctgatgg

SEQ ID NO: 108609 - DNA, 17 bp, Arabidopsis thaliana
ggacggagttgagactg

SEQ ID NO: 108610 - DNA, 17 bp, Arabidopsis thaliana
ggacggagttgtcgagt

SEQ ID NO: 108611 - DNA, 17 bp, Arabidopsis thaliana
ggacggataaaatttcg

SEQ ID NO: 108612 - DNA, 17 bp, Arabidopsis thaliana
ggacggataatcagttc

SEQ ID NO: 108613 - DNA, 17 bp, Arabidopsis thaliana
ggacggatactaggcgc

SEQ ID NO: 108614 - DNA, 17 bp, Arabidopsis thaliana
ggacggatatccgcttt

SEQ ID NO: 108615 - DNA, 17 bp, Arabidopsis thaliana
ggacggatcaacgtttt

SEQ ID NO: 108616 - DNA, 17 bp, Arabidopsis thaliana
ggacggatcacggtttg

SEQ ID NO: 108617 - DNA, 17 bp, Arabidopsis thaliana
ggacggatcagaccttg

SEQ ID NO: 108618 - DNA, 17 bp, Arabidopsis thaliana
ggacggatcagcggatg

SEQ ID NO: 108619 - DNA, 17 bp, Arabidopsis thaliana
ggacggatcattaccag

SEQ ID NO: 108620 - DNA, 17 bp, Arabidopsis thaliana
ggacggatccagacaaa

SEQ ID NO: 108621 - DNA, 17 bp, Arabidopsis thaliana
ggacggatccttctgta

SEQ ID NO: 108622 - DNA, 17 bp, Arabidopsis thaliana
ggacggatcgcgatctc

SEQ ID NO: 108623 - DNA, 17 bp, Arabidopsis thaliana
ggacggatctaggatag

SEQ ID NO: 108624 - DNA, 17 bp, Arabidopsis thaliana
ggacggatctgaccaaa

SEQ ID NO: 108625 - DNA, 17 bp, Arabidopsis thaliana
ggacggatctgattgag

SEQ ID NO: 108626 - DNA, 17 bp, Arabidopsis thaliana
ggacggatctggccaaa

SEQ ID NO: 108627 - DNA, 17 bp, Arabidopsis thaliana
ggacggatcttaaatac

SEQ ID NO: 108628 - DNA, 17 bp, Arabidopsis thaliana
ggacggatcttccatag

SEQ ID NO: 108629 - DNA, 17 bp, Arabidopsis thaliana
ggacggatcttggtctt

SEQ ID NO: 108630 - DNA, 17 bp, Arabidopsis thaliana
ggacggatggatgtcat

SEQ ID NO: 108631 - DNA, 17 bp, Arabidopsis thaliana
ggacggatggtctcgtt

SEQ ID NO: 108632 - DNA, 17 bp, Arabidopsis thaliana
ggacggattacggtggc

SEQ ID NO: 108633 - DNA, 17 bp, Arabidopsis thaliana
ggacggattctggtcaa

SEQ ID NO: 108634 - DNA, 17 bp, Arabidopsis thaliana
ggacggattggacccat

SEQ ID NO: 108635 - DNA, 17 bp, Arabidopsis thaliana
ggacggattggcgggac

SEQ ID NO: 108636 - DNA, 17 bp, Arabidopsis thaliana
ggacggattgggaacgg

SEQ ID NO: 108637 - DNA, 17 bp, Arabidopsis thaliana
ggacggattgttagacc

SEQ ID NO: 108638 - DNA, 17 bp, Arabidopsis thaliana
ggacggatttagcgaga

SEQ ID NO: 108639 - DNA, 17 bp, Arabidopsis thaliana
ggacggatttgcccttt

SEQ ID NO: 108640 - DNA, 17 bp, Arabidopsis thaliana
ggacggatttggcagga

SEQ ID NO: 108641 - DNA, 17 bp, Arabidopsis thaliana
ggacggatttggcgaga

SEQ ID NO: 108642 - DNA, 17 bp, Arabidopsis thaliana
ggacggatttggcggga

SEQ ID NO: 108643 - DNA, 17 bp, Arabidopsis thaliana
ggacggattttcctgga

SEQ ID NO: 108644 - DNA, 17 bp, Arabidopsis thaliana
ggacggattttgcctca

SEQ ID NO: 108645 - DNA, 17 bp, Arabidopsis thaliana
ggacggccataagagtc

SEQ ID NO: 108646 - DNA, 17 bp, Arabidopsis thaliana
ggacggccgggtgatca

SEQ ID NO: 108647 - DNA, 17 bp, Arabidopsis thaliana
ggacggccgggtggtcg

SEQ ID NO: 108648 - DNA, 17 bp, Arabidopsis thaliana
ggacggcgagatcatga

SEQ ID NO: 108649 - DNA, 17 bp, Arabidopsis thaliana
ggacggcgggccgatta

SEQ ID NO: 108650 - DNA, 17 bp, Arabidopsis thaliana
ggacggcggtactcgga

SEQ ID NO: 108651 - DNA, 17 bp, Arabidopsis thaliana
ggacggctgtcgaccag

SEQ ID NO: 108652 - DNA, 17 bp, Arabidopsis thaliana
ggacgggaagtggtgtt

SEQ ID NO: 108653 - DNA, 17 bp, Arabidopsis thaliana
ggacgggacgatgggtg

SEQ ID NO: 108654 - DNA, 17 bp, Arabidopsis thaliana
ggacgggatgatgggtg

SEQ ID NO: 108655 - DNA, 17 bp, Arabidopsis thaliana
ggacgggatgttgtgtc

SEQ ID NO: 108656 - DNA, 17 bp, Arabidopsis thaliana
ggacgggattagatgga

SEQ ID NO: 108657 - DNA, 17 bp, Arabidopsis thaliana
ggacgggccactgcttg

SEQ ID NO: 108658 - DNA, 17 bp, Arabidopsis thaliana
ggacgggccgctcatgg

SEQ ID NO: 108659 - DNA, 17 bp, Arabidopsis thaliana
ggacgggctatatttcg

SEQ ID NO: 108660 - DNA, 17 bp, Arabidopsis thaliana
ggacggggaaatggatt

SEQ ID NO: 108661 - DNA, 17 bp, Arabidopsis thaliana
ggacggggttatatggt

SEQ ID NO: 108662 - DNA, 17 bp, Arabidopsis thaliana
ggacggggtttggaatc

SEQ ID NO: 108663 - DNA, 17 bp, Arabidopsis thaliana
ggacgggttagctaact

SEQ ID NO: 108664 - DNA, 17 bp, Arabidopsis thaliana
ggacgggttggcaggac

SEQ ID NO: 108665 - DNA, 17 bp, Arabidopsis thaliana
ggacgggttggcggaac

SEQ ID NO: 108666 - DNA, 17 bp, Arabidopsis thaliana
ggacgggttggcgggac

SEQ ID NO: 108667 - DNA, 17 bp, Arabidopsis thaliana
ggacgggtttgacggaa

SEQ ID NO: 108668 - DNA, 17 bp, Arabidopsis thaliana
ggacgggtttggcaaga

SEQ ID NO: 108669 - DNA, 17 bp, Arabidopsis thaliana
ggacgggtttggcagga

SEQ ID NO: 108670 - DNA, 17 bp, Arabidopsis thaliana
ggacgggtttggcaggg

SEQ ID NO: 108671 - DNA, 17 bp, Arabidopsis thaliana
ggacgggtttggcggga

SEQ ID NO: 108672 - DNA, 17 bp, Arabidopsis thaliana
ggacgggtttggtcgat

SEQ ID NO: 108673 - DNA, 17 bp, Arabidopsis thaliana
ggacgggttttgcggaa

SEQ ID NO: 108674 - DNA, 17 bp, Arabidopsis thaliana
ggacgggttttgcggga

SEQ ID NO: 108675 - DNA, 17 bp, Arabidopsis thaliana
ggacggtccataatgga

SEQ ID NO: 108676 - DNA, 17 bp, Arabidopsis thaliana
ggacggtccgcctttgg

SEQ ID NO: 108677 - DNA, 17 bp, Arabidopsis thaliana
ggacggtctataactcg

SEQ ID NO: 108678 - DNA, 17 bp, Arabidopsis thaliana
ggacggtgacccaatgc

SEQ ID NO: 108679 - DNA, 17 bp, Arabidopsis thaliana
ggacggtgagacgtggc

SEQ ID NO: 108680 - DNA, 17 bp, Arabidopsis thaliana
ggacggtggtcatggaa

SEQ ID NO: 108681 - DNA, 17 bp, Arabidopsis thaliana
ggacggttcatatttcc

SEQ ID NO: 108682 - DNA, 17 bp, Arabidopsis thaliana
ggacggtttggcgagac

SEQ ID NO: 108683 - DNA, 17 bp, Arabidopsis thaliana
ggacggtttggcgggac

SEQ ID NO: 108684 - DNA, 17 bp, Arabidopsis thaliana
ggacgtaagtttaggct

SEQ ID NO: 108685 - DNA, 17 bp, Arabidopsis thaliana
ggacgtaatccgggacg

SEQ ID NO: 108686 - DNA, 17 bp, Arabidopsis thaliana
ggacgtaatggacatgg

SEQ ID NO: 108687 - DNA, 17 bp, Arabidopsis thaliana
ggacgtacggtagtgca

SEQ ID NO: 108688 - DNA, 17 bp, Arabidopsis thaliana
ggacgtagaccgaatgt

SEQ ID NO: 108689 - DNA, 17 bp, Arabidopsis thaliana
ggacgtcaaagtgagtt

SEQ ID NO: 108690 - DNA, 17 bp, Arabidopsis thaliana
ggacgtcacctgatact

SEQ ID NO: 108691 - DNA, 17 bp, Arabidopsis thaliana
ggacgtctgcctgagtg

SEQ ID NO: 108692 - DNA, 17 bp, Arabidopsis thaliana
ggacgtctgcctgggtg

SEQ ID NO: 108693 - DNA, 17 bp, Arabidopsis thaliana
ggacgtctgttacttgg

SEQ ID NO: 108694 - DNA, 17 bp, Arabidopsis thaliana
ggacgtctgttgcgttt

SEQ ID NO: 108695 - DNA, 17 bp, Arabidopsis thaliana
ggacgtgcgggatgttt

SEQ ID NO: 108696 - DNA, 17 bp, Arabidopsis thaliana
ggacgtgcggttgacgg

SEQ ID NO: 108697 - DNA, 17 bp, Arabidopsis thaliana
ggacgtggcggttgacg

SEQ ID NO: 108698 - DNA, 17 bp, Arabidopsis thaliana
ggacgtggctgctttgt

SEQ ID NO: 108699 - DNA, 17 bp, Arabidopsis thaliana
ggacgtgtcggcctttg

SEQ ID NO: 108700 - DNA, 17 bp, Arabidopsis thaliana
ggacgtgtcggctgctt

SEQ ID NO: 108701 - DNA, 17 bp, Arabidopsis thaliana
ggacgttctgggccaat

SEQ ID NO: 108702 - DNA, 17 bp, Arabidopsis thaliana
ggacgttgactagtgtt

SEQ ID NO: 108703 - DNA, 17 bp, Arabidopsis thaliana
ggacgttgcgatctgtt

SEQ ID NO: 108704 - DNA, 17 bp, Arabidopsis thaliana
ggacgttgggtcgatct

SEQ ID NO: 108705 - DNA, 17 bp, Arabidopsis thaliana
ggacgtttcccggctgg

SEQ ID NO: 108706 - DNA, 17 bp, Arabidopsis thaliana
ggacgtttgcggttgcg

SEQ ID NO: 108707 - DNA, 17 bp, Arabidopsis thaliana
ggacgtttttccttgcg

SEQ ID NO: 108708 - DNA, 17 bp, Arabidopsis thaliana
ggactaaaaaccgcata

SEQ ID NO: 108709 - DNA, 17 bp, Arabidopsis thaliana
ggactaaaaaccgcgta

SEQ ID NO: 108710 - DNA, 17 bp, Arabidopsis thaliana
ggactaaaaagtaccca

SEQ ID NO: 108711 - DNA, 17 bp, Arabidopsis thaliana
ggactaaaccaaacttc

SEQ ID NO: 108712 - DNA, 17 bp, Arabidopsis thaliana
ggactaaaccatgttct

SEQ ID NO: 108713 - DNA, 17 bp, Arabidopsis thaliana
ggactaaaccatgttgt

SEQ ID NO: 108714 - DNA, 17 bp, Arabidopsis thaliana
ggactaaaccgcagaca

SEQ ID NO: 108715 - DNA, 17 bp, Arabidopsis thaliana
ggactaaaggttcttgg

SEQ ID NO: 108716 - DNA, 17 bp, Arabidopsis thaliana
ggactaaatcgctgacg

SEQ ID NO: 108717 - DNA, 17 bp, Arabidopsis thaliana
ggactaacaactagcca

SEQ ID NO: 108718 - DNA, 17 bp, Arabidopsis thaliana
ggactaacagtatcggc

SEQ ID NO: 108719 - DNA, 17 bp, Arabidopsis thaliana
ggactaactgcagacgg

SEQ ID NO: 108720 - DNA, 17 bp, Arabidopsis thaliana
ggactaactgcggaccg

SEQ ID NO: 108721 - DNA, 17 bp, Arabidopsis thaliana
ggactaactgtggaccg

SEQ ID NO: 108722 - DNA, 17 bp, Arabidopsis thaliana
ggactaagctagtgacg

SEQ ID NO: 108723 - DNA, 17 bp, Arabidopsis thaliana
ggactaagtgggcgttt

SEQ ID NO: 108724 - DNA, 17 bp, Arabidopsis thaliana
ggactaagttgttcgtt

SEQ ID NO: 108725 - DNA, 17 bp, Arabidopsis thaliana
ggactaatccgtcagca

SEQ ID NO: 108726 - DNA, 17 bp, Arabidopsis thaliana
ggactaatccgtcagcg

SEQ ID NO: 108727 - DNA, 17 bp, Arabidopsis thaliana
ggactaattcgatgtcg

SEQ ID NO: 108728 - DNA, 17 bp, Arabidopsis thaliana
ggactaattctgcggtc

SEQ ID NO: 108729 - DNA, 17 bp, Arabidopsis thaliana
ggactaattttggttga

SEQ ID NO: 108730 - DNA, 17 bp, Arabidopsis thaliana
ggactacaaattctggg

SEQ ID NO: 108731 - DNA, 17 bp, Arabidopsis thaliana
ggactacacccgtgccg

SEQ ID NO: 108732 - DNA, 17 bp, Arabidopsis thaliana
ggactacagactattac

SEQ ID NO: 108733 - DNA, 17 bp, Arabidopsis thaliana
ggactacagatttggtt

SEQ ID NO: 108734 - DNA, 17 bp, Arabidopsis thaliana
ggactaccatactgtct

SEQ ID NO: 108735 - DNA, 17 bp, Arabidopsis thaliana
ggactacccagcccctc

SEQ ID NO: 108736 - DNA, 17 bp, Arabidopsis thaliana
ggactacctgcacttgg

SEQ ID NO: 108737 - DNA, 17 bp, Arabidopsis thaliana
ggactaccttctgggtc

SEQ ID NO: 108738 - DNA, 17 bp, Arabidopsis thaliana
ggactaccttttgggtc

SEQ ID NO: 108739 - DNA, 17 bp, Arabidopsis thaliana
ggactacgcctttcatt

SEQ ID NO: 108740 - DNA, 17 bp, Arabidopsis thaliana
ggactacgggattcggc

SEQ ID NO: 108741 - DNA, 17 bp, Arabidopsis thaliana
ggactacggtgtgtact

SEQ ID NO: 108742 - DNA, 17 bp, Arabidopsis thaliana
ggactacgttttgcggt

SEQ ID NO: 108743 - DNA, 17 bp, Arabidopsis thaliana
ggactactcttgatgtc

SEQ ID NO: 108744 - DNA, 17 bp, Arabidopsis thaliana
ggactagagagcctcat

SEQ ID NO: 108745 - DNA, 17 bp, Arabidopsis thaliana
ggactaggcttcattcc

SEQ ID NO: 108746 - DNA, 17 bp, Arabidopsis thaliana
ggactagggccgtttag

SEQ ID NO: 108747 - DNA, 17 bp, Arabidopsis thaliana
ggactaggtggtgcgga

SEQ ID NO: 108748 - DNA, 17 bp, Arabidopsis thaliana
ggactaggtgttggtgg

SEQ ID NO: 108749 - DNA, 17 bp, Arabidopsis thaliana
ggactagtgcctaacgc

SEQ ID NO: 108750 - DNA, 17 bp, Arabidopsis thaliana
ggactagttgcctttac

SEQ ID NO: 108751 - DNA, 17 bp, Arabidopsis thaliana
ggactagttgcgtttac

SEQ ID NO: 108752 - DNA, 17 bp, Arabidopsis thaliana
ggactatcggtgtgcgg

SEQ ID NO: 108753 - DNA, 17 bp, Arabidopsis thaliana
ggactatctcctggatt

SEQ ID NO: 108754 - DNA, 17 bp, Arabidopsis thaliana
ggactatctgtgaagcg

SEQ ID NO: 108755 - DNA, 17 bp, Arabidopsis thaliana
ggactatgaatggggtt

SEQ ID NO: 108756 - DNA, 17 bp, Arabidopsis thaliana
ggactatgcggtttcat

SEQ ID NO: 108757 - DNA, 17 bp, Arabidopsis thaliana
ggactatggccgtttag

SEQ ID NO: 108758 - DNA, 17 bp, Arabidopsis thaliana
ggactatgtatcaaaat

SEQ ID NO: 108759 - DNA, 17 bp, Arabidopsis thaliana
ggactattagctcagtg

SEQ ID NO: 108760 - DNA, 17 bp, Arabidopsis thaliana
ggactattagctcagtt

SEQ ID NO: 108761 - DNA, 17 bp, Arabidopsis thaliana
ggactattgccgtttag

SEQ ID NO: 108762 - DNA, 17 bp, Arabidopsis thaliana
ggactatttctcgattt

SEQ ID NO: 108763 - DNA, 17 bp, Arabidopsis thaliana
ggactattttcccttgc

SEQ ID NO: 108764 - DNA, 17 bp, Arabidopsis thaliana
ggactatttttcgacca

SEQ ID NO: 108765 - DNA, 17 bp, Arabidopsis thaliana
ggactcaaacctgaaga

SEQ ID NO: 108766 - DNA, 17 bp, Arabidopsis thaliana
ggactcaacatgaccgg

SEQ ID NO: 108767 - DNA, 17 bp, Arabidopsis thaliana
ggactcaatgggatttg

SEQ ID NO: 108768 - DNA, 17 bp, Arabidopsis thaliana
ggactcacttggtttgc

SEQ ID NO: 108769 - DNA, 17 bp, Arabidopsis thaliana
ggactcagaatcggtgt

SEQ ID NO: 108770 - DNA, 17 bp, Arabidopsis thaliana
ggactcagagccaaaga

SEQ ID NO: 108771 - DNA, 17 bp, Arabidopsis thaliana
ggactcagagccaaagc

SEQ ID NO: 108772 - DNA, 17 bp, Arabidopsis thaliana
ggactcaggttgaacgg

SEQ ID NO: 108773 - DNA, 17 bp, Arabidopsis thaliana
ggactcaggtttttcga

SEQ ID NO: 108774 - DNA, 17 bp, Arabidopsis thaliana
ggactcatcgtacctga

SEQ ID NO: 108775 - DNA, 17 bp, Arabidopsis thaliana
ggactcccagatcctct

SEQ ID NO: 108776 - DNA, 17 bp, Arabidopsis thaliana
ggactccccagattccc

SEQ ID NO: 108777 - DNA, 17 bp, Arabidopsis thaliana
ggactcccctggcacct

SEQ ID NO: 108778 - DNA, 17 bp, Arabidopsis thaliana
ggactcccggcacctta

SEQ ID NO: 108779 - DNA, 17 bp, Arabidopsis thaliana
ggactcccggcaccttc

SEQ ID NO: 108780 - DNA, 17 bp, Arabidopsis thaliana
ggactccctaacgttgc

SEQ ID NO: 108781 - DNA, 17 bp, Arabidopsis thaliana
ggactccgatacaccgg

SEQ ID NO: 108782 - DNA, 17 bp, Arabidopsis thaliana
ggactccgatcaagttc

SEQ ID NO: 108783 - DNA, 17 bp, Arabidopsis thaliana
ggactccgcagactccc

SEQ ID NO: 108784 - DNA, 17 bp, Arabidopsis thaliana
ggactccgctggcacct

SEQ ID NO: 108785 - DNA, 17 bp, Arabidopsis thaliana
ggactcgaaccactgac

SEQ ID NO: 108786 - DNA, 17 bp, Arabidopsis thaliana
ggactcgaaccccagac

SEQ ID NO: 108787 - DNA, 17 bp, Arabidopsis thaliana
ggactcgaaccccagag

SEQ ID NO: 108788 - DNA, 17 bp, Arabidopsis thaliana
ggactcgaaccgctgac

SEQ ID NO: 108789 - DNA, 17 bp, Arabidopsis thaliana
ggactcgacagctccgt

SEQ ID NO: 108790 - DNA, 17 bp, Arabidopsis thaliana
ggactcggaatcggtgt

SEQ ID NO: 108791 - DNA, 17 bp, Arabidopsis thaliana
ggactcggacccctgcg

SEQ ID NO: 108792 - DNA, 17 bp, Arabidopsis thaliana
ggactcggccaattggg

SEQ ID NO: 108793 - DNA, 17 bp, Arabidopsis thaliana
ggactcggcttagaagt

SEQ ID NO: 108794 - DNA, 17 bp, Arabidopsis thaliana
ggactcgggagctggag

SEQ ID NO: 108795 - DNA, 17 bp, Arabidopsis thaliana
ggactcgtgctgataac

SEQ ID NO: 108796 - DNA, 17 bp, Arabidopsis thaliana
ggactcgtggttgtatg

SEQ ID NO: 108797 - DNA, 17 bp, Arabidopsis thaliana
ggactctaaatgtggtt

SEQ ID NO: 108798 - DNA, 17 bp, Arabidopsis thaliana
ggactctacgcttccca

SEQ ID NO: 108799 - DNA, 17 bp, Arabidopsis thaliana
ggactctaggaggacag

SEQ ID NO: 108800 - DNA, 17 bp, Arabidopsis thaliana
ggactctatgggctgga

SEQ ID NO: 108801 - DNA, 17 bp, Arabidopsis thaliana
ggactctattccatctc

SEQ ID NO: 108802 - DNA, 17 bp, Arabidopsis thaliana
ggactctccatgacgac

SEQ ID NO: 108803 - DNA, 17 bp, Arabidopsis thaliana
ggactctcggcaacgga

SEQ ID NO: 108804 - DNA, 17 bp, Arabidopsis thaliana
ggactctctggcttgcg

SEQ ID NO: 108805 - DNA, 17 bp, Arabidopsis thaliana
ggactctgacccagaat

SEQ ID NO: 108806 - DNA, 17 bp, Arabidopsis thaliana
ggactctgacttagatg

SEQ ID NO: 108807 - DNA, 17 bp, Arabidopsis thaliana
ggactctgccttgcgat

SEQ ID NO: 108808 - DNA, 17 bp, Arabidopsis thaliana
ggactctgctacagaca

SEQ ID NO: 108809 - DNA, 17 bp, Arabidopsis thaliana
ggactctgctctgtgta

SEQ ID NO: 108810 - DNA, 17 bp, Arabidopsis thaliana
ggactctgttaagggat

SEQ ID NO: 108811 - DNA, 17 bp, Arabidopsis thaliana
ggactctgtttgcgaaa

SEQ ID NO: 108812 - DNA, 17 bp, Arabidopsis thaliana
ggactcttacctgtttt

SEQ ID NO: 108813 - DNA, 17 bp, Arabidopsis thaliana
ggactcttatgcaccac

SEQ ID NO: 108814 - DNA, 17 bp, Arabidopsis thaliana
ggactcttcccctttac

SEQ ID NO: 108815 - DNA, 17 bp, Arabidopsis thaliana
ggactcttgcccgtttt

SEQ ID NO: 108816 - DNA, 17 bp, Arabidopsis thaliana
ggactcttgcttgtggc

SEQ ID NO: 108817 - DNA, 17 bp, Arabidopsis thaliana
ggactgaaaatcctcgt

SEQ ID NO: 108818 - DNA, 17 bp, Arabidopsis thaliana
ggactgaaaatccttct

SEQ ID NO: 108819 - DNA, 17 bp, Arabidopsis thaliana
ggactgaaacccgtaat

SEQ ID NO: 108820 - DNA, 17 bp, Arabidopsis thaliana
ggactgaaacgttcaac

SEQ ID NO: 108821 - DNA, 17 bp, Arabidopsis thaliana
ggactgaaccgctaacg

SEQ ID NO: 108822 - DNA, 17 bp, Arabidopsis thaliana
ggactgaagcccgtaat

SEQ ID NO: 108823 - DNA, 17 bp, Arabidopsis thaliana
ggactgaccaggccagg

SEQ ID NO: 108824 - DNA, 17 bp, Arabidopsis thaliana
ggactgaccgacccggt

SEQ ID NO: 108825 - DNA, 17 bp, Arabidopsis thaliana
ggactgactgtcgcacc

SEQ ID NO: 108826 - DNA, 17 bp, Arabidopsis thaliana
ggactgacttagatggt

SEQ ID NO: 108827 - DNA, 17 bp, Arabidopsis thaliana
ggactgagacacggccc

SEQ ID NO: 108828 - DNA, 17 bp, Arabidopsis thaliana
ggactgagattcgtcgt

SEQ ID NO: 108829 - DNA, 17 bp, Arabidopsis thaliana
ggactgagcaattccat

SEQ ID NO: 108830 - DNA, 17 bp, Arabidopsis thaliana
ggactgagccaaccaag

SEQ ID NO: 108831 - DNA, 17 bp, Arabidopsis thaliana
ggactgagctgccgaat

SEQ ID NO: 108832 - DNA, 17 bp, Arabidopsis thaliana
ggactgagctgctgagt

SEQ ID NO: 108833 - DNA, 17 bp, Arabidopsis thaliana
ggactgaggcaaggaga

SEQ ID NO: 108834 - DNA, 17 bp, Arabidopsis thaliana
ggactgaggttaaaatt

SEQ ID NO: 108835 - DNA, 17 bp, Arabidopsis thaliana
ggactgagttgttttgt

SEQ ID NO: 108836 - DNA, 17 bp, Arabidopsis thaliana
ggactgagttgtttttg

SEQ ID NO: 108837 - DNA, 17 bp, Arabidopsis thaliana
ggactgatacatccctt

SEQ ID NO: 108838 - DNA, 17 bp, Arabidopsis thaliana
ggactgcacaattttat

SEQ ID NO: 108839 - DNA, 17 bp, Arabidopsis thaliana
ggactgcaccgctgacg

SEQ ID NO: 108840 - DNA, 17 bp, Arabidopsis thaliana
ggactgccagggtcgag

SEQ ID NO: 108841 - DNA, 17 bp, Arabidopsis thaliana
ggactgccatcagttaa

SEQ ID NO: 108842 - DNA, 17 bp, Arabidopsis thaliana
ggactgcccagactccc

SEQ ID NO: 108843 - DNA, 17 bp, Arabidopsis thaliana
ggactgcccagactctc

SEQ ID NO: 108844 - DNA, 17 bp, Arabidopsis thaliana
ggactgcccagactttc

SEQ ID NO: 108845 - DNA, 17 bp, Arabidopsis thaliana
ggactgcccagcccctc

SEQ ID NO: 108846 - DNA, 17 bp, Arabidopsis thaliana
ggactgcggaatttgtg

SEQ ID NO: 108847 - DNA, 17 bp, Arabidopsis thaliana
ggactgcgtctacatta

SEQ ID NO: 108848 - DNA, 17 bp, Arabidopsis thaliana
ggactgctccggtcggg

SEQ ID NO: 108849 - DNA, 17 bp, Arabidopsis thaliana
ggactgcttagcccgct

SEQ ID NO: 108850 - DNA, 17 bp, Arabidopsis thaliana
ggactggacaagcccat

SEQ ID NO: 108851 - DNA, 17 bp, Arabidopsis thaliana
ggactggacattgttga

SEQ ID NO: 108852 - DNA, 17 bp, Arabidopsis thaliana
ggactggaccgctgaca

SEQ ID NO: 108853 - DNA, 17 bp, Arabidopsis thaliana
ggactggactaatggac

SEQ ID NO: 108854 - DNA, 17 bp, Arabidopsis thaliana
ggactggactgctgacg

SEQ ID NO: 108855 - DNA, 17 bp, Arabidopsis thaliana
ggactggactgcttgga

SEQ ID NO: 108856 - DNA, 17 bp, Arabidopsis thaliana
ggactggactgttgatc

SEQ ID NO: 108857 - DNA, 17 bp, Arabidopsis thaliana
ggactggataggactag

SEQ ID NO: 108858 - DNA, 17 bp, Arabidopsis thaliana
ggactggatagtgcaga

SEQ ID NO: 108859 - DNA, 17 bp, Arabidopsis thaliana
ggactggattctcgtac

SEQ ID NO: 108860 - DNA, 17 bp, Arabidopsis thaliana
ggactggattgacaccc

SEQ ID NO: 108861 - DNA, 17 bp, Arabidopsis thaliana
ggactggattgctgacg

SEQ ID NO: 108862 - DNA, 17 bp, Arabidopsis thaliana
ggactggccctgagcac

SEQ ID NO: 108863 - DNA, 17 bp, Arabidopsis thaliana
ggactgggaacggctct

SEQ ID NO: 108864 - DNA, 17 bp, Arabidopsis thaliana
ggactgggaacggttct

SEQ ID NO: 108865 - DNA, 17 bp, Arabidopsis thaliana
ggactgggcaagcccat

SEQ ID NO: 108866 - DNA, 17 bp, Arabidopsis thaliana
ggactgggccaaccacg

SEQ ID NO: 108867 - DNA, 17 bp, Arabidopsis thaliana
ggactggtcaacgatta

SEQ ID NO: 108868 - DNA, 17 bp, Arabidopsis thaliana
ggactggttcttctcct

SEQ ID NO: 108869 - DNA, 17 bp, Arabidopsis thaliana
ggactggttcttgagac

SEQ ID NO: 108870 - DNA, 17 bp, Arabidopsis thaliana
ggactggtttgtgattg

SEQ ID NO: 108871 - DNA, 17 bp, Arabidopsis thaliana
ggactgtaaaaacccac

SEQ ID NO: 108872 - DNA, 17 bp, Arabidopsis thaliana
ggactgtaaccatctgg

SEQ ID NO: 108873 - DNA, 17 bp, Arabidopsis thaliana
ggactgtccagccgcac

SEQ ID NO: 108874 - DNA, 17 bp, Arabidopsis thaliana
ggactgtccgtccgtct

SEQ ID NO: 108875 - DNA, 17 bp, Arabidopsis thaliana
ggactgtcgtctggctc

SEQ ID NO: 108876 - DNA, 17 bp, Arabidopsis thaliana
ggactgttcagacctgg

SEQ ID NO: 108877 - DNA, 17 bp, Arabidopsis thaliana
ggactgttcagacttgg

SEQ ID NO: 108878 - DNA, 17 bp, Arabidopsis thaliana
ggactgttcagatctgg

SEQ ID NO: 108879 - DNA, 17 bp, Arabidopsis thaliana
ggactgttgctggctcg

SEQ ID NO: 108880 - DNA, 17 bp, Arabidopsis thaliana
ggactgttgtccggctc

SEQ ID NO: 108881 - DNA, 17 bp, Arabidopsis thaliana
ggactgttgtccggctg

SEQ ID NO: 108882 - DNA, 17 bp, Arabidopsis thaliana
ggactgttgtctggcgc

SEQ ID NO: 108883 - DNA, 17 bp, Arabidopsis thaliana
ggactgttgtctggctc

SEQ ID NO: 108884 - DNA, 17 bp, Arabidopsis thaliana
ggactgttgtctggctg

SEQ ID NO: 108885 - DNA, 17 bp, Arabidopsis thaliana
ggactgttgtttggctc

SEQ ID NO: 108886 - DNA, 17 bp, Arabidopsis thaliana
ggactgttttccaccca

SEQ ID NO: 108887 - DNA, 17 bp, Arabidopsis thaliana
ggactgttttctggctc

SEQ ID NO: 108888 - DNA, 17 bp, Arabidopsis thaliana
ggactgtttttcgttgg

SEQ ID NO: 108889 - DNA, 17 bp, Arabidopsis thaliana
ggacttaaggtggtggt

SEQ ID NO: 108890 - DNA, 17 bp, Arabidopsis thaliana
ggacttaagtcctccgc

SEQ ID NO: 108891 - DNA, 17 bp, Arabidopsis thaliana
ggacttaatcgcaacgg

SEQ ID NO: 108892 - DNA, 17 bp, Arabidopsis thaliana
ggacttaattggggcct

SEQ ID NO: 108893 - DNA, 17 bp, Arabidopsis thaliana
ggacttacaatgctacg

SEQ ID NO: 108894 - DNA, 17 bp, Arabidopsis thaliana
ggacttacaatgctagg

SEQ ID NO: 108895 - DNA, 17 bp, Arabidopsis thaliana
ggacttaccggccgttg

SEQ ID NO: 108896 - DNA, 17 bp, Arabidopsis thaliana
ggacttactcgaccttc

SEQ ID NO: 108897 - DNA, 17 bp, Arabidopsis thaliana
ggacttagaatacgcta

SEQ ID NO: 108898 - DNA, 17 bp, Arabidopsis thaliana
ggacttagaatgaatga

SEQ ID NO: 108899 - DNA, 17 bp, Arabidopsis thaliana
ggacttagccaacgaca

SEQ ID NO: 108900 - DNA, 17 bp, Arabidopsis thaliana
ggacttagttacaatgg

SEQ ID NO: 108901 - DNA, 17 bp, Arabidopsis thaliana
ggacttagtttaaagac

SEQ ID NO: 108902 - DNA, 17 bp, Arabidopsis thaliana
ggacttatgaccagtga

SEQ ID NO: 108903 - DNA, 17 bp, Arabidopsis thaliana
ggacttattcacaatgg

SEQ ID NO: 108904 - DNA, 17 bp, Arabidopsis thaliana
ggacttattccaacgtg

SEQ ID NO: 108905 - DNA, 17 bp, Arabidopsis thaliana
ggacttatttacaatga

SEQ ID NO: 108906 - DNA, 17 bp, Arabidopsis thaliana
ggacttatttacaatgc

SEQ ID NO: 108907 - DNA, 17 bp, Arabidopsis thaliana
ggacttatttacaatgg

SEQ ID NO: 108908 - DNA, 17 bp, Arabidopsis thaliana
ggacttatttacagtgg

SEQ ID NO: 108909 - DNA, 17 bp, Arabidopsis thaliana
ggacttatttacattgg

SEQ ID NO: 108910 - DNA, 17 bp, Arabidopsis thaliana
ggacttatttatgggct

SEQ ID NO: 108911 - DNA, 17 bp, Arabidopsis thaliana
ggacttcactctcatcc

SEQ ID NO: 108912 - DNA, 17 bp, Arabidopsis thaliana
ggacttcagacctcttt

SEQ ID NO: 108913 - DNA, 17 bp, Arabidopsis thaliana
ggacttcccgggaggtc

SEQ ID NO: 108914 - DNA, 17 bp, Arabidopsis thaliana
ggacttcctttagcgat

SEQ ID NO: 108915 - DNA, 17 bp, Arabidopsis thaliana
ggacttcgacaacgcat

SEQ ID NO: 108916 - DNA, 17 bp, Arabidopsis thaliana
ggacttcgactgcttca

SEQ ID NO: 108917 - DNA, 17 bp, Arabidopsis thaliana
ggacttcggactaggtt

SEQ ID NO: 108918 - DNA, 17 bp, Arabidopsis thaliana
ggacttcggaggatcat

SEQ ID NO: 108919 - DNA, 17 bp, Arabidopsis thaliana
ggacttcggatttggtt

SEQ ID NO: 108920 - DNA, 17 bp, Arabidopsis thaliana
ggacttcggctaaacaa

SEQ ID NO: 108921 - DNA, 17 bp, Arabidopsis thaliana
ggacttcggctaaacca

SEQ ID NO: 108922 - DNA, 17 bp, Arabidopsis thaliana
ggacttctcaagttccc

SEQ ID NO: 108923 - DNA, 17 bp, Arabidopsis thaliana
ggacttctcaccgaagg

SEQ ID NO: 108924 - DNA, 17 bp, Arabidopsis thaliana
ggacttctcaccggccg

SEQ ID NO: 108925 - DNA, 17 bp, Arabidopsis thaliana
ggacttctcagacaggt

SEQ ID NO: 108926 - DNA, 17 bp, Arabidopsis thaliana
ggacttctcatgttggg

SEQ ID NO: 108927 - DNA, 17 bp, Arabidopsis thaliana
ggacttctccacgaagg

SEQ ID NO: 108928 - DNA, 17 bp, Arabidopsis thaliana
ggacttctccccgaagg

SEQ ID NO: 108929 - DNA, 17 bp, Arabidopsis thaliana
ggacttctcctcgaagg

SEQ ID NO: 108930 - DNA, 17 bp, Arabidopsis thaliana
ggacttctgatttgccg

SEQ ID NO: 108931 - DNA, 17 bp, Arabidopsis thaliana
ggacttcttcccgaaaa

SEQ ID NO: 108932 - DNA, 17 bp, Arabidopsis thaliana
ggacttcttcccggcct

SEQ ID NO: 108933 - DNA, 17 bp, Arabidopsis thaliana
ggacttctttcttactc

SEQ ID NO: 108934 - DNA, 17 bp, Arabidopsis thaliana
ggacttgaaatcggtgt

SEQ ID NO: 108935 - DNA, 17 bp, Arabidopsis thaliana
ggacttgaactcgggtt

SEQ ID NO: 108936 - DNA, 17 bp, Arabidopsis thaliana
ggacttgaagtcgggtt

SEQ ID NO: 108937 - DNA, 17 bp, Arabidopsis thaliana
ggacttgactgctgacg

SEQ ID NO: 108938 - DNA, 17 bp, Arabidopsis thaliana
ggacttgattcattttt

SEQ ID NO: 108939 - DNA, 17 bp, Arabidopsis thaliana
ggacttgattgatctgg

SEQ ID NO: 108940 - DNA, 17 bp, Arabidopsis thaliana
ggacttgcggcacaccg

SEQ ID NO: 108941 - DNA, 17 bp, Arabidopsis thaliana
ggacttgctctagcgcc

SEQ ID NO: 108942 - DNA, 17 bp, Arabidopsis thaliana
ggacttgctgccacgat

SEQ ID NO: 108943 - DNA, 17 bp, Arabidopsis thaliana
ggacttgctgttattcg

SEQ ID NO: 108944 - DNA, 17 bp, Arabidopsis thaliana
ggacttgctttacccag

SEQ ID NO: 108945 - DNA, 17 bp, Arabidopsis thaliana
ggacttggaatcgtcga

SEQ ID NO: 108946 - DNA, 17 bp, Arabidopsis thaliana
ggacttggacttattta

SEQ ID NO: 108947 - DNA, 17 bp, Arabidopsis thaliana
ggacttggcttaaggag

SEQ ID NO: 108948 - DNA, 17 bp, Arabidopsis thaliana
ggacttggcttgactgg

SEQ ID NO: 108949 - DNA, 17 bp, Arabidopsis thaliana
ggacttggtcccgggga

SEQ ID NO: 108950 - DNA, 17 bp, Arabidopsis thaliana
ggacttggtccgggaga

SEQ ID NO: 108951 - DNA, 17 bp, Arabidopsis thaliana
ggacttggtctgcaagg

SEQ ID NO: 108952 - DNA, 17 bp, Arabidopsis thaliana
ggacttggtgcaggtcg

SEQ ID NO: 108953 - DNA, 17 bp, Arabidopsis thaliana
ggacttggttaacatga

SEQ ID NO: 108954 - DNA, 17 bp, Arabidopsis thaliana
ggacttggttggacttg

SEQ ID NO: 108955 - DNA, 17 bp, Arabidopsis thaliana
ggacttgtgcatgctct

SEQ ID NO: 108956 - DNA, 17 bp, Arabidopsis thaliana
ggacttgtgctgataac

SEQ ID NO: 108957 - DNA, 17 bp, Arabidopsis thaliana
ggacttgtggtgcaact

SEQ ID NO: 108958 - DNA, 17 bp, Arabidopsis thaliana
ggacttgtgtaacttgc

SEQ ID NO: 108959 - DNA, 17 bp, Arabidopsis thaliana
ggacttgttcggggcat

SEQ ID NO: 108960 - DNA, 17 bp, Arabidopsis thaliana
ggacttgttgggggcat

SEQ ID NO: 108961 - DNA, 17 bp, Arabidopsis thaliana
ggacttgttgtaggacg

SEQ ID NO: 108962 - DNA, 17 bp, Arabidopsis thaliana
ggactttagaggcctgt

SEQ ID NO: 108963 - DNA, 17 bp, Arabidopsis thaliana
ggactttagtgtttttt

SEQ ID NO: 108964 - DNA, 17 bp, Arabidopsis thaliana
ggactttataatggaca

SEQ ID NO: 108965 - DNA, 17 bp, Arabidopsis thaliana
ggactttatgcaatttt

SEQ ID NO: 108966 - DNA, 17 bp, Arabidopsis thaliana
ggactttattcgtcacg

SEQ ID NO: 108967 - DNA, 17 bp, Arabidopsis thaliana
ggactttcagagactct

SEQ ID NO: 108968 - DNA, 17 bp, Arabidopsis thaliana
ggactttccatgacgac

SEQ ID NO: 108969 - DNA, 17 bp, Arabidopsis thaliana
ggactttgaatccagcg

SEQ ID NO: 108970 - DNA, 17 bp, Arabidopsis thaliana
ggactttgacccacaac

SEQ ID NO: 108971 - DNA, 17 bp, Arabidopsis thaliana
ggactttgacccggatg

SEQ ID NO: 108972 - DNA, 17 bp, Arabidopsis thaliana
ggactttgactccgtca

SEQ ID NO: 108973 - DNA, 17 bp, Arabidopsis thaliana
ggactttgactgcttgt

SEQ ID NO: 108974 - DNA, 17 bp, Arabidopsis thaliana
ggactttgatccgattc

SEQ ID NO: 108975 - DNA, 17 bp, Arabidopsis thaliana
ggactttgccaaatatt

SEQ ID NO: 108976 - DNA, 17 bp, Arabidopsis thaliana
ggactttgccaaatttt

SEQ ID NO: 108977 - DNA, 17 bp, Arabidopsis thaliana
ggactttgcttctctga

SEQ ID NO: 108978 - DNA, 17 bp, Arabidopsis thaliana
ggactttgcttcttggt

SEQ ID NO: 108979 - DNA, 17 bp, Arabidopsis thaliana
ggactttggaccaattg

SEQ ID NO: 108980 - DNA, 17 bp, Arabidopsis thaliana
ggactttggatcccgtc

SEQ ID NO: 108981 - DNA, 17 bp, Arabidopsis thaliana
ggactttggatcctgtc

SEQ ID NO: 108982 - DNA, 17 bp, Arabidopsis thaliana
ggactttggattgaagg

SEQ ID NO: 108983 - DNA, 17 bp, Arabidopsis thaliana
ggactttggctaaacca

SEQ ID NO: 108984 - DNA, 17 bp, Arabidopsis thaliana
ggactttggctacacca

SEQ ID NO: 108985 - DNA, 17 bp, Arabidopsis thaliana
ggactttggctacaccg

SEQ ID NO: 108986 - DNA, 17 bp, Arabidopsis thaliana
ggactttgggtcatcta

SEQ ID NO: 108987 - DNA, 17 bp, Arabidopsis thaliana
ggactttgggttcgtca

SEQ ID NO: 108988 - DNA, 17 bp, Arabidopsis thaliana
ggactttggtgaagaca

SEQ ID NO: 108989 - DNA, 17 bp, Arabidopsis thaliana
ggactttgtaactgggt

SEQ ID NO: 108990 - DNA, 17 bp, Arabidopsis thaliana
ggactttgtctggctcg

SEQ ID NO: 108991 - DNA, 17 bp, Arabidopsis thaliana
ggactttgttgtattcg

SEQ ID NO: 108992 - DNA, 17 bp, Arabidopsis thaliana
ggacttttccaaactat

SEQ ID NO: 108993 - DNA, 17 bp, Arabidopsis thaliana
ggacttttggatcctta

SEQ ID NO: 108994 - DNA, 17 bp, Arabidopsis thaliana
ggacttttgtctggctc

SEQ ID NO: 108995 - DNA, 17 bp, Arabidopsis thaliana
ggacttttgttgctatt

SEQ ID NO: 108996 - DNA, 17 bp, Arabidopsis thaliana
ggactttttcggcatat

SEQ ID NO: 108997 - DNA, 17 bp, Arabidopsis thaliana
ggactttttcgtgatct

SEQ ID NO: 108998 - DNA, 17 bp, Arabidopsis thaliana
ggagaaaactattagga

SEQ ID NO: 108999 - DNA, 17 bp, Arabidopsis thaliana
ggagaaacttagccatt

SEQ ID NO: 109000 - DNA, 17 bp, Arabidopsis thaliana
ggagaaagacgtgtggt

SEQ ID NO: 109001 - DNA, 17 bp, Arabidopsis thaliana
ggagaaagcaggaggat

SEQ ID NO: 109002 - DNA, 17 bp, Arabidopsis thaliana
ggagaaagcggatcgga

SEQ ID NO: 109003 - DNA, 17 bp, Arabidopsis thaliana
ggagaaagtgaatgcgg

SEQ ID NO: 109004 - DNA, 17 bp, Arabidopsis thaliana
ggagaaatacggtgcgg

SEQ ID NO: 109005 - DNA, 17 bp, Arabidopsis thaliana
ggagaaatagaccgttt

SEQ ID NO: 109006 - DNA, 17 bp, Arabidopsis thaliana
ggagaaatggccgagtg

SEQ ID NO: 109007 - DNA, 17 bp, Arabidopsis thaliana
ggagaaattccagaccg

SEQ ID NO: 109008 - DNA, 17 bp, Arabidopsis thaliana
ggagaacagattatgtc

SEQ ID NO: 109009 - DNA, 17 bp, Arabidopsis thaliana
ggagaacataccgccac

SEQ ID NO: 109010 - DNA, 17 bp, Arabidopsis thaliana
ggagaaccgaaagtaca

SEQ ID NO: 109011 - DNA, 17 bp, Arabidopsis thaliana
ggagaaccttgggatgg

SEQ ID NO: 109012 - DNA, 17 bp, Arabidopsis thaliana
ggagaacgtaccagtga

SEQ ID NO: 109013 - DNA, 17 bp, Arabidopsis thaliana
ggagaactgtgacaggt

SEQ ID NO: 109014 - DNA, 17 bp, Arabidopsis thaliana
ggagaacttcgtccttg

SEQ ID NO: 109015 - DNA, 17 bp, Arabidopsis thaliana
ggagaagaagatgtcgt

SEQ ID NO: 109016 - DNA, 17 bp, Arabidopsis thaliana
ggagaagacaccatctt

SEQ ID NO: 109017 - DNA, 17 bp, Arabidopsis thaliana
ggagaagaccgttgcac

SEQ ID NO: 109018 - DNA, 17 bp, Arabidopsis thaliana
ggagaagactctacccc

SEQ ID NO: 109019 - DNA, 17 bp, Arabidopsis thaliana
ggagaagactggttatt

SEQ ID NO: 109020 - DNA, 17 bp, Arabidopsis thaliana
ggagaagagatccctcc

SEQ ID NO: 109021 - DNA, 17 bp, Arabidopsis thaliana
ggagaagattgagagag

SEQ ID NO: 109022 - DNA, 17 bp, Arabidopsis thaliana
ggagaagcagggcacgt

SEQ ID NO: 109023 - DNA, 17 bp, Arabidopsis thaliana
ggagaagcccattgtga

SEQ ID NO: 109024 - DNA, 17 bp, Arabidopsis thaliana
ggagaagcgtcctcagc

SEQ ID NO: 109025 - DNA, 17 bp, Arabidopsis thaliana
ggagaaggaggagcagg

SEQ ID NO: 109026 - DNA, 17 bp, Arabidopsis thaliana
ggagaaggtgtagtggc

SEQ ID NO: 109027 - DNA, 17 bp, Arabidopsis thaliana
ggagaagtacccaagta

SEQ ID NO: 109028 - DNA, 17 bp, Arabidopsis thaliana
ggagaagtacccaagtg

SEQ ID NO: 109029 - DNA, 17 bp, Arabidopsis thaliana
ggagaagtcgtaacaag

SEQ ID NO: 109030 - DNA, 17 bp, Arabidopsis thaliana
ggagaagtcgtgactgc

SEQ ID NO: 109031 - DNA, 17 bp, Arabidopsis thaliana
ggagaagtgattattgt

SEQ ID NO: 109032 - DNA, 17 bp, Arabidopsis thaliana
ggagaagtgcggtgcga

SEQ ID NO: 109033 - DNA, 17 bp, Arabidopsis thaliana
ggagaatatgcctttga

SEQ ID NO: 109034 - DNA, 17 bp, Arabidopsis thaliana
ggagaatcagactaccg

SEQ ID NO: 109035 - DNA, 17 bp, Arabidopsis thaliana
ggagaatcgagctatgg

SEQ ID NO: 109036 - DNA, 17 bp, Arabidopsis thaliana
ggagaatgagtgaaatc

SEQ ID NO: 109037 - DNA, 17 bp, Arabidopsis thaliana
ggagaatgccaatttgg

SEQ ID NO: 109038 - DNA, 17 bp, Arabidopsis thaliana
ggagaatggggttcatc

SEQ ID NO: 109039 - DNA, 17 bp, Arabidopsis thaliana
ggagaatgtaccatatg

SEQ ID NO: 109040 - DNA, 17 bp, Arabidopsis thaliana
ggagaatgtgagacgga

SEQ ID NO: 109041 - DNA, 17 bp, Arabidopsis thaliana
ggagaattacgggtttc

SEQ ID NO: 109042 - DNA, 17 bp, Arabidopsis thaliana
ggagaattagggttcaa

SEQ ID NO: 109043 - DNA, 17 bp, Arabidopsis thaliana
ggagaattagggttcga

SEQ ID NO: 109044 - DNA, 17 bp, Arabidopsis thaliana
ggagaattccttcaggc

SEQ ID NO: 109045 - DNA, 17 bp, Arabidopsis thaliana
ggagacaaagcccatct

SEQ ID NO: 109046 - DNA, 17 bp, Arabidopsis thaliana
ggagacaaatgggtcgt

SEQ ID NO: 109047 - DNA, 17 bp, Arabidopsis thaliana
ggagacaacctgtggca

SEQ ID NO: 109048 - DNA, 17 bp, Arabidopsis thaliana
ggagacaacctttgaac

SEQ ID NO: 109049 - DNA, 17 bp, Arabidopsis thaliana
ggagacaacctttgtaa

SEQ ID NO: 109050 - DNA, 17 bp, Arabidopsis thaliana
ggagacaactttctcaa

SEQ ID NO: 109051 - DNA, 17 bp, Arabidopsis thaliana
ggagacaagtgtccacg

SEQ ID NO: 109052 - DNA, 17 bp, Arabidopsis thaliana
ggagacaagttgctcaa

SEQ ID NO: 109053 - DNA, 17 bp, Arabidopsis thaliana
ggagacaatctgtgttc

SEQ ID NO: 109054 - DNA, 17 bp, Arabidopsis thaliana
ggagacaatggtgtact

SEQ ID NO: 109055 - DNA, 17 bp, Arabidopsis thaliana
ggagacacaggtcgttc

SEQ ID NO: 109056 - DNA, 17 bp, Arabidopsis thaliana
ggagacagaggactggt

SEQ ID NO: 109057 - DNA, 17 bp, Arabidopsis thaliana
ggagacagagttaccag

SEQ ID NO: 109058 - DNA, 17 bp, Arabidopsis thaliana
ggagacaggctccgccg

SEQ ID NO: 109059 - DNA, 17 bp, Arabidopsis thaliana
ggagacatatggaccga

SEQ ID NO: 109060 - DNA, 17 bp, Arabidopsis thaliana
ggagacatggagagaga

SEQ ID NO: 109061 - DNA, 17 bp, Arabidopsis thaliana
ggagacattgtcaggtg

SEQ ID NO: 109062 - DNA, 17 bp, Arabidopsis thaliana
ggagaccaaattctgag

SEQ ID NO: 109063 - DNA, 17 bp, Arabidopsis thaliana
ggagaccaagtccaaga

SEQ ID NO: 109064 - DNA, 17 bp, Arabidopsis thaliana
ggagacccgggttcgat

SEQ ID NO: 109065 - DNA, 17 bp, Arabidopsis thaliana
ggagacccgggttcggt

SEQ ID NO: 109066 - DNA, 17 bp, Arabidopsis thaliana
ggagacccgggttcgtt

SEQ ID NO: 109067 - DNA, 17 bp, Arabidopsis thaliana
ggagacccgggttcttc

SEQ ID NO: 109068 - DNA, 17 bp, Arabidopsis thaliana
ggagacccgggtttccc

SEQ ID NO: 109069 - DNA, 17 bp, Arabidopsis thaliana
ggagacccgggtttttc

SEQ ID NO: 109070 - DNA, 17 bp, Arabidopsis thaliana
ggagaccgcctagccga

SEQ ID NO: 109071 - DNA, 17 bp, Arabidopsis thaliana
ggagaccgcgggttcga

SEQ ID NO: 109072 - DNA, 17 bp, Arabidopsis thaliana
ggagaccgtgatctgta

SEQ ID NO: 109073 - DNA, 17 bp, Arabidopsis thaliana
ggagaccgtgatgtcgt

SEQ ID NO: 109074 - DNA, 17 bp, Arabidopsis thaliana
ggagacctccacctcca

SEQ ID NO: 109075 - DNA, 17 bp, Arabidopsis thaliana
ggagacctgggctccga

SEQ ID NO: 109076 - DNA, 17 bp, Arabidopsis thaliana
ggagacctgggctcgaa

SEQ ID NO: 109077 - DNA, 17 bp, Arabidopsis thaliana
ggagacctgggctcgcg

SEQ ID NO: 109078 - DNA, 17 bp, Arabidopsis thaliana
ggagacctgggctcgga

SEQ ID NO: 109079 - DNA, 17 bp, Arabidopsis thaliana
ggagacctgggctcgta

SEQ ID NO: 109080 - DNA, 17 bp, Arabidopsis thaliana
ggagacctgggctcgtg

SEQ ID NO: 109081 - DNA, 17 bp, Arabidopsis thaliana
ggagacgacggcacggt

SEQ ID NO: 109082 - DNA, 17 bp, Arabidopsis thaliana
ggagacgagataggcgg

SEQ ID NO: 109083 - DNA, 17 bp, Arabidopsis thaliana
ggagacgatgactctgt

SEQ ID NO: 109084 - DNA, 17 bp, Arabidopsis thaliana
ggagacggaggagacgg

SEQ ID NO: 109085 - DNA, 17 bp, Arabidopsis thaliana
ggagacggaggcggagg

SEQ ID NO: 109086 - DNA, 17 bp, Arabidopsis thaliana
ggagacgggatcataat

SEQ ID NO: 109087 - DNA, 17 bp, Arabidopsis thaliana
ggagacgggggcgggga

SEQ ID NO: 109088 - DNA, 17 bp, Arabidopsis thaliana
ggagacgggtgactcaa

SEQ ID NO: 109089 - DNA, 17 bp, Arabidopsis thaliana
ggagacggtggagaggt

SEQ ID NO: 109090 - DNA, 17 bp, Arabidopsis thaliana
ggagacggtggccctgg

SEQ ID NO: 109091 - DNA, 17 bp, Arabidopsis thaliana
ggagacgtcgctgccgt

SEQ ID NO: 109092 - DNA, 17 bp, Arabidopsis thaliana
ggagacgtcgctgtgat

SEQ ID NO: 109093 - DNA, 17 bp, Arabidopsis thaliana
ggagacgtcggcggggg

SEQ ID NO: 109094 - DNA, 17 bp, Arabidopsis thaliana
ggagacgtgcggttcaa

SEQ ID NO: 109095 - DNA, 17 bp, Arabidopsis thaliana
ggagacgttgctgccgt

SEQ ID NO: 109096 - DNA, 17 bp, Arabidopsis thaliana
ggagactaaaccgcaat

SEQ ID NO: 109097 - DNA, 17 bp, Arabidopsis thaliana
ggagactaccctagctt

SEQ ID NO: 109098 - DNA, 17 bp, Arabidopsis thaliana
ggagactagcaatcacc

SEQ ID NO: 109099 - DNA, 17 bp, Arabidopsis thaliana
ggagactcaaatggtgg

SEQ ID NO: 109100 - DNA, 17 bp, Arabidopsis thaliana
ggagactcatcatttgg

SEQ ID NO: 109101 - DNA, 17 bp, Arabidopsis thaliana
ggagactctcagctgta

SEQ ID NO: 109102 - DNA, 17 bp, Arabidopsis thaliana
ggagactctcggcaacg

SEQ ID NO: 109103 - DNA, 17 bp, Arabidopsis thaliana
ggagactgaaaccacag

SEQ ID NO: 109104 - DNA, 17 bp, Arabidopsis thaliana
ggagactggctcaactc

SEQ ID NO: 109105 - DNA, 17 bp, Arabidopsis thaliana
ggagactgggaacggct

SEQ ID NO: 109106 - DNA, 17 bp, Arabidopsis thaliana
ggagacttacggcattt

SEQ ID NO: 109107 - DNA, 17 bp, Arabidopsis thaliana
ggagacttcataaggtt

SEQ ID NO: 109108 - DNA, 17 bp, Arabidopsis thaliana
ggagacttcgctgccgt

SEQ ID NO: 109109 - DNA, 17 bp, Arabidopsis thaliana
ggagacttcttttcgct

SEQ ID NO: 109110 - DNA, 17 bp, Arabidopsis thaliana
ggagacttgggagccag

SEQ ID NO: 109111 - DNA, 17 bp, Arabidopsis thaliana
ggagacttgtaactaga

SEQ ID NO: 109112 - DNA, 17 bp, Arabidopsis thaliana
ggagacttgtggcgggt

SEQ ID NO: 109113 - DNA, 17 bp, Arabidopsis thaliana
ggagactttcgaggata

SEQ ID NO: 109114 - DNA, 17 bp, Arabidopsis thaliana
ggagactttgcagtttc

SEQ ID NO: 109115 - DNA, 17 bp, Arabidopsis thaliana
ggagagaaacggcggag

SEQ ID NO: 109116 - DNA, 17 bp, Arabidopsis thaliana
ggagagaactgatcgcc

SEQ ID NO: 109117 - DNA, 17 bp, Arabidopsis thaliana
ggagagacacggtgact

SEQ ID NO: 109118 - DNA, 17 bp, Arabidopsis thaliana
ggagagacacggtgaga

SEQ ID NO: 109119 - DNA, 17 bp, Arabidopsis thaliana
ggagagacactgtggct

SEQ ID NO: 109120 - DNA, 17 bp, Arabidopsis thaliana
ggagagacgtcaaggcc

SEQ ID NO: 109121 - DNA, 17 bp, Arabidopsis thaliana
ggagagacttttcccac

SEQ ID NO: 109122 - DNA, 17 bp, Arabidopsis thaliana
ggagagagaactgatcg

SEQ ID NO: 109123 - DNA, 17 bp, Arabidopsis thaliana
ggagagagaagagatgt

SEQ ID NO: 109124 - DNA, 17 bp, Arabidopsis thaliana
ggagagagatttgttta

SEQ ID NO: 109125 - DNA, 17 bp, Arabidopsis thaliana
ggagagagttagcctcc

SEQ ID NO: 109126 - DNA, 17 bp, Arabidopsis thaliana
ggagagagttggccaac

SEQ ID NO: 109127 - DNA, 17 bp, Arabidopsis thaliana
ggagagatacggcgacg

SEQ ID NO: 109128 - DNA, 17 bp, Arabidopsis thaliana
ggagagatactgatttt

SEQ ID NO: 109129 - DNA, 17 bp, Arabidopsis thaliana
ggagagatagctgagtg

SEQ ID NO: 109130 - DNA, 17 bp, Arabidopsis thaliana
ggagagatggccaagtg

SEQ ID NO: 109131 - DNA, 17 bp, Arabidopsis thaliana
ggagagatggccgagta

SEQ ID NO: 109132 - DNA, 17 bp, Arabidopsis thaliana
ggagagatggccgagtg

SEQ ID NO: 109133 - DNA, 17 bp, Arabidopsis thaliana
ggagagatggctgagta

SEQ ID NO: 109134 - DNA, 17 bp, Arabidopsis thaliana
ggagagatggctgagtg

SEQ ID NO: 109135 - DNA, 17 bp, Arabidopsis thaliana
ggagagatggtcgagtg

SEQ ID NO: 109136 - DNA, 17 bp, Arabidopsis thaliana
ggagagatgtcaaggcc

SEQ ID NO: 109137 - DNA, 17 bp, Arabidopsis thaliana
ggagagatgtcgaaata

SEQ ID NO: 109138 - DNA, 17 bp, Arabidopsis thaliana
ggagagattacggactt

SEQ ID NO: 109139 - DNA, 17 bp, Arabidopsis thaliana
ggagagattacgggttt

SEQ ID NO: 109140 - DNA, 17 bp, Arabidopsis thaliana
ggagagattgccgagtg

SEQ ID NO: 109141 - DNA, 17 bp, Arabidopsis thaliana
ggagagcagtttggacg

SEQ ID NO: 109142 - DNA, 17 bp, Arabidopsis thaliana
ggagagccacggcctgc

SEQ ID NO: 109143 - DNA, 17 bp, Arabidopsis thaliana
ggagagccttggtttta

SEQ ID NO: 109144 - DNA, 17 bp, Arabidopsis thaliana
ggagagctgtaatggag

SEQ ID NO: 109145 - DNA, 17 bp, Arabidopsis thaliana
ggagagcttctctcatt

SEQ ID NO: 109146 - DNA, 17 bp, Arabidopsis thaliana
ggagaggaaggcgggta

SEQ ID NO: 109147 - DNA, 17 bp, Arabidopsis thaliana
ggagaggaccacgtggc

SEQ ID NO: 109148 - DNA, 17 bp, Arabidopsis thaliana
ggagaggacggtgagac

SEQ ID NO: 109149 - DNA, 17 bp, Arabidopsis thaliana
ggagaggagtcgctcga

SEQ ID NO: 109150 - DNA, 17 bp, Arabidopsis thaliana
ggagaggatgacggaat

SEQ ID NO: 109151 - DNA, 17 bp, Arabidopsis thaliana
ggagaggcaaaggggca

SEQ ID NO: 109152 - DNA, 17 bp, Arabidopsis thaliana
ggagaggcgaaaccctc

SEQ ID NO: 109153 - DNA, 17 bp, Arabidopsis thaliana
ggagagggaaaatcggc

SEQ ID NO: 109154 - DNA, 17 bp, Arabidopsis thaliana
ggagaggggacacctca

SEQ ID NO: 109155 - DNA, 17 bp, Arabidopsis thaliana
ggagaggggtgcggcgg

SEQ ID NO: 109156 - DNA, 17 bp, Arabidopsis thaliana
ggagagggtgagatgac

SEQ ID NO: 109157 - DNA, 17 bp, Arabidopsis thaliana
ggagaggtgatgtagaa

SEQ ID NO: 109158 - DNA, 17 bp, Arabidopsis thaliana
ggagaggtgatgttgaa

SEQ ID NO: 109159 - DNA, 17 bp, Arabidopsis thaliana
ggagagtacatgggacc

SEQ ID NO: 109160 - DNA, 17 bp, Arabidopsis thaliana
ggagagtaggacgtcgc

SEQ ID NO: 109161 - DNA, 17 bp, Arabidopsis thaliana
ggagagtaggacgttgc

SEQ ID NO: 109162 - DNA, 17 bp, Arabidopsis thaliana
ggagagtaggcactttt

SEQ ID NO: 109163 - DNA, 17 bp, Arabidopsis thaliana
ggagagtctctctttga

SEQ ID NO: 109164 - DNA, 17 bp, Arabidopsis thaliana
ggagagtctgcgtagat

SEQ ID NO: 109165 - DNA, 17 bp, Arabidopsis thaliana
ggagagtctgcgtaggt

SEQ ID NO: 109166 - DNA, 17 bp, Arabidopsis thaliana
ggagagtcttctgtcag

SEQ ID NO: 109167 - DNA, 17 bp, Arabidopsis thaliana
ggagagtgtaggccaat

SEQ ID NO: 109168 - DNA, 17 bp, Arabidopsis thaliana
ggagagttatctcagtt

SEQ ID NO: 109169 - DNA, 17 bp, Arabidopsis thaliana
ggagagttatgcgagtc

SEQ ID NO: 109170 - DNA, 17 bp, Arabidopsis thaliana
ggagagttgacaaacca

SEQ ID NO: 109171 - DNA, 17 bp, Arabidopsis thaliana
ggagagttgtcagtgtg

SEQ ID NO: 109172 - DNA, 17 bp, Arabidopsis thaliana
ggagagtttcttttgag

SEQ ID NO: 109173 - DNA, 17 bp, Arabidopsis thaliana
ggagagtttgcagaatc

SEQ ID NO: 109174 - DNA, 17 bp, Arabidopsis thaliana
ggagagtttgccttggg

SEQ ID NO: 109175 - DNA, 17 bp, Arabidopsis thaliana
ggagagttttgaccatg

SEQ ID NO: 109176 - DNA, 17 bp, Arabidopsis thaliana
ggagataaactgagatc

SEQ ID NO: 109177 - DNA, 17 bp, Arabidopsis thaliana
ggagataggaacctcca

SEQ ID NO: 109178 - DNA, 17 bp, Arabidopsis thaliana
ggagatatactctgtcg

SEQ ID NO: 109179 - DNA, 17 bp, Arabidopsis thaliana
ggagatatttcgctcaa

SEQ ID NO: 109180 - DNA, 17 bp, Arabidopsis thaliana
ggagatcaccgagcaag

SEQ ID NO: 109181 - DNA, 17 bp, Arabidopsis thaliana
ggagatccctttagcca

SEQ ID NO: 109182 - DNA, 17 bp, Arabidopsis thaliana
ggagatccgttgggagg

SEQ ID NO: 109183 - DNA, 17 bp, Arabidopsis thaliana
ggagatcgagtgtacaa

SEQ ID NO: 109184 - DNA, 17 bp, Arabidopsis thaliana
ggagatcggtggatggg

SEQ ID NO: 109185 - DNA, 17 bp, Arabidopsis thaliana
ggagatctcaacctgcc

SEQ ID NO: 109186 - DNA, 17 bp, Arabidopsis thaliana
ggagatctcatgtacat

SEQ ID NO: 109187 - DNA, 17 bp, Arabidopsis thaliana
ggagatcttgtcattta

SEQ ID NO: 109188 - DNA, 17 bp, Arabidopsis thaliana
ggagatgaacttacctg

SEQ ID NO: 109189 - DNA, 17 bp, Arabidopsis thaliana
ggagatgacctagggtc

SEQ ID NO: 109190 - DNA, 17 bp, Arabidopsis thaliana
ggagatgagacgtcgtg

SEQ ID NO: 109191 - DNA, 17 bp, Arabidopsis thaliana
ggagatgataccgagta

SEQ ID NO: 109192 - DNA, 17 bp, Arabidopsis thaliana
ggagatgatgaccttag

SEQ ID NO: 109193 - DNA, 17 bp, Arabidopsis thaliana
ggagatggacagacaca

SEQ ID NO: 109194 - DNA, 17 bp, Arabidopsis thaliana
ggagatggacccacacc

SEQ ID NO: 109195 - DNA, 17 bp, Arabidopsis thaliana
ggagatggccgagtggt

SEQ ID NO: 109196 - DNA, 17 bp, Arabidopsis thaliana
ggagatggctgcagtaa

SEQ ID NO: 109197 - DNA, 17 bp, Arabidopsis thaliana
ggagatggtctgagagt

SEQ ID NO: 109198 - DNA, 17 bp, Arabidopsis thaliana
ggagatgtagggccttt

SEQ ID NO: 109199 - DNA, 17 bp, Arabidopsis thaliana
ggagatgtctccggaat

SEQ ID NO: 109200 - DNA, 17 bp, Arabidopsis thaliana
ggagatgtctcgactat

SEQ ID NO: 109201 - DNA, 17 bp, Arabidopsis thaliana
ggagatgtgattgattg

SEQ ID NO: 109202 - DNA, 17 bp, Arabidopsis thaliana
ggagattacgggctttg

SEQ ID NO: 109203 - DNA, 17 bp, Arabidopsis thaliana
ggagattatcagaaccg

SEQ ID NO: 109204 - DNA, 17 bp, Arabidopsis thaliana
ggagattatcagaactg

SEQ ID NO: 109205 - DNA, 17 bp, Arabidopsis thaliana
ggagattatgagcttcg

SEQ ID NO: 109206 - DNA, 17 bp, Arabidopsis thaliana
ggagattcaaggactgt

SEQ ID NO: 109207 - DNA, 17 bp, Arabidopsis thaliana
ggagattcagcgtggtt

SEQ ID NO: 109208 - DNA, 17 bp, Arabidopsis thaliana
ggagattcctcgattat

SEQ ID NO: 109209 - DNA, 17 bp, Arabidopsis thaliana
ggagattcgatcataga

SEQ ID NO: 109210 - DNA, 17 bp, Arabidopsis thaliana
ggagattcgtctgatcg

SEQ ID NO: 109211 - DNA, 17 bp, Arabidopsis thaliana
ggagattctctaagtgc

SEQ ID NO: 109212 - DNA, 17 bp, Arabidopsis thaliana
ggagattctttcagtca

SEQ ID NO: 109213 - DNA, 17 bp, Arabidopsis thaliana
ggagattctttcagtcc

SEQ ID NO: 109214 - DNA, 17 bp, Arabidopsis thaliana
ggagattgaaatccagt

SEQ ID NO: 109215 - DNA, 17 bp, Arabidopsis thaliana
ggagattgaagtctgca

SEQ ID NO: 109216 - DNA, 17 bp, Arabidopsis thaliana
ggagattgacactgaga

SEQ ID NO: 109217 - DNA, 17 bp, Arabidopsis thaliana
ggagattgactgggtaa

SEQ ID NO: 109218 - DNA, 17 bp, Arabidopsis thaliana
ggagattgaggctgcaa

SEQ ID NO: 109219 - DNA, 17 bp, Arabidopsis thaliana
ggagattgctgagagga

SEQ ID NO: 109220 - DNA, 17 bp, Arabidopsis thaliana
ggagattggaggtgact

SEQ ID NO: 109221 - DNA, 17 bp, Arabidopsis thaliana
ggagattggtttgccta

SEQ ID NO: 109222 - DNA, 17 bp, Arabidopsis thaliana
ggagatttaccactagg

SEQ ID NO: 109223 - DNA, 17 bp, Arabidopsis thaliana
ggagatttacgactggt

SEQ ID NO: 109224 - DNA, 17 bp, Arabidopsis thaliana
ggagatttctacttgga

SEQ ID NO: 109225 - DNA, 17 bp, Arabidopsis thaliana
ggagatttctacttggg

SEQ ID NO: 109226 - DNA, 17 bp, Arabidopsis thaliana
ggagatttctgcccagt

SEQ ID NO: 109227 - DNA, 17 bp, Arabidopsis thaliana
ggagatttggtgggagc

SEQ ID NO: 109228 - DNA, 17 bp, Arabidopsis thaliana
ggagatttggttatgcc

SEQ ID NO: 109229 - DNA, 17 bp, Arabidopsis thaliana
ggagatttggttttgta

SEQ ID NO: 109230 - DNA, 17 bp, Arabidopsis thaliana
ggagattttttacatgt

SEQ ID NO: 109231 - DNA, 17 bp, Arabidopsis thaliana
ggagcaaaatcgagcgg

SEQ ID NO: 109232 - DNA, 17 bp, Arabidopsis thaliana
ggagcaacctcgactgc

SEQ ID NO: 109233 - DNA, 17 bp, Arabidopsis thaliana
ggagcaagattgattgg

SEQ ID NO: 109234 - DNA, 17 bp, Arabidopsis thaliana
ggagcaagttccgcact

SEQ ID NO: 109235 - DNA, 17 bp, Arabidopsis thaliana
ggagcaataggtgcttt

SEQ ID NO: 109236 - DNA, 17 bp, Arabidopsis thaliana
ggagcaatccggtccgc

SEQ ID NO: 109237 - DNA, 17 bp, Arabidopsis thaliana
ggagcaccacggatgtc

SEQ ID NO: 109238 - DNA, 17 bp, Arabidopsis thaliana
ggagcaccgagagcatg

SEQ ID NO: 109239 - DNA, 17 bp, Arabidopsis thaliana
ggagcacgattgaaggc

SEQ ID NO: 109240 - DNA, 17 bp, Arabidopsis thaliana
ggagcacgtctgcctgg

SEQ ID NO: 109241 - DNA, 17 bp, Arabidopsis thaliana
ggagcagaacaacgaga

SEQ ID NO: 109242 - DNA, 17 bp, Arabidopsis thaliana
ggagcagaatcgttagg

SEQ ID NO: 109243 - DNA, 17 bp, Arabidopsis thaliana
ggagcagaggtcgagta

SEQ ID NO: 109244 - DNA, 17 bp, Arabidopsis thaliana
ggagcagccgtacgtgt

SEQ ID NO: 109245 - DNA, 17 bp, Arabidopsis thaliana
ggagcagcttagcatgc

SEQ ID NO: 109246 - DNA, 17 bp, Arabidopsis thaliana
ggagcaggtctgcctgg

SEQ ID NO: 109247 - DNA, 17 bp, Arabidopsis thaliana
ggagcaggtgaactgtg

SEQ ID NO: 109248 - DNA, 17 bp, Arabidopsis thaliana
ggagcagtggcgatgtg

SEQ ID NO: 109249 - DNA, 17 bp, Arabidopsis thaliana
ggagcagttgtgcaaga

SEQ ID NO: 109250 - DNA, 17 bp, Arabidopsis thaliana
ggagcatagacacaaag

SEQ ID NO: 109251 - DNA, 17 bp, Arabidopsis thaliana
ggagcatagcacagggt

SEQ ID NO: 109252 - DNA, 17 bp, Arabidopsis thaliana
ggagcatgctttgatct

SEQ ID NO: 109253 - DNA, 17 bp, Arabidopsis thaliana
ggagcatgtccattgca

SEQ ID NO: 109254 - DNA, 17 bp, Arabidopsis thaliana
ggagcatgttcagtttg

SEQ ID NO: 109255 - DNA, 17 bp, Arabidopsis thaliana
ggagcatgttcattgca

SEQ ID NO: 109256 - DNA, 17 bp, Arabidopsis thaliana
ggagcattatggcattc

SEQ ID NO: 109257 - DNA, 17 bp, Arabidopsis thaliana
ggagcattgacgacgcc

SEQ ID NO: 109258 - DNA, 17 bp, Arabidopsis thaliana
ggagccaaaaattcatg

SEQ ID NO: 109259 - DNA, 17 bp, Arabidopsis thaliana
ggagccaagaagtggaa

SEQ ID NO: 109260 - DNA, 17 bp, Arabidopsis thaliana
ggagccaccatcgtcgg

SEQ ID NO: 109261 - DNA, 17 bp, Arabidopsis thaliana
ggagccacttgtgtttg

SEQ ID NO: 109262 - DNA, 17 bp, Arabidopsis thaliana
ggagccagaggcgagga

SEQ ID NO: 109263 - DNA, 17 bp, Arabidopsis thaliana
ggagccagatccaaggt

SEQ ID NO: 109264 - DNA, 17 bp, Arabidopsis thaliana
ggagccaggttccgatc

SEQ ID NO: 109265 - DNA, 17 bp, Arabidopsis thaliana
ggagccatccgatcgtt

SEQ ID NO: 109266 - DNA, 17 bp, Arabidopsis thaliana
ggagccatctctgctgg

SEQ ID NO: 109267 - DNA, 17 bp, Arabidopsis thaliana
ggagcccagttaaatcc

SEQ ID NO: 109268 - DNA, 17 bp, Arabidopsis thaliana
ggagcccgaaaccacat

SEQ ID NO: 109269 - DNA, 17 bp, Arabidopsis thaliana
ggagccctgggctctga

SEQ ID NO: 109270 - DNA, 17 bp, Arabidopsis thaliana
ggagccctgttcgtttg

SEQ ID NO: 109271 - DNA, 17 bp, Arabidopsis thaliana
ggagccgaaaccgattt

SEQ ID NO: 109272 - DNA, 17 bp, Arabidopsis thaliana
ggagccggccgtgagca

SEQ ID NO: 109273 - DNA, 17 bp, Arabidopsis thaliana
ggagccgtggtgtagag

SEQ ID NO: 109274 - DNA, 17 bp, Arabidopsis thaliana
ggagcctaagttacggt

SEQ ID NO: 109275 - DNA, 17 bp, Arabidopsis thaliana
ggagcctaccgaatcgc

SEQ ID NO: 109276 - DNA, 17 bp, Arabidopsis thaliana
ggagcctcaacagcagc

SEQ ID NO: 109277 - DNA, 17 bp, Arabidopsis thaliana
ggagcctcctcagaatt

SEQ ID NO: 109278 - DNA, 17 bp, Arabidopsis thaliana
ggagcctctgtcagctt

SEQ ID NO: 109279 - DNA, 17 bp, Arabidopsis thaliana
ggagcctgcggcttaat

SEQ ID NO: 109280 - DNA, 17 bp, Arabidopsis thaliana
ggagcctgcgtttgcaa

SEQ ID NO: 109281 - DNA, 17 bp, Arabidopsis thaliana
ggagccttgaccacaag

SEQ ID NO: 109282 - DNA, 17 bp, Arabidopsis thaliana
ggagcgaagcccgtaat

SEQ ID NO: 109283 - DNA, 17 bp, Arabidopsis thaliana
ggagcgacagcgacagc

SEQ ID NO: 109284 - DNA, 17 bp, Arabidopsis thaliana
ggagcgacctatacccg

SEQ ID NO: 109285 - DNA, 17 bp, Arabidopsis thaliana
ggagcgagatgctgggc

SEQ ID NO: 109286 - DNA, 17 bp, Arabidopsis thaliana
ggagcgaggcacagagt

SEQ ID NO: 109287 - DNA, 17 bp, Arabidopsis thaliana
ggagcgatggccggctt

SEQ ID NO: 109288 - DNA, 17 bp, Arabidopsis thaliana
ggagcgatttcatgcaa

SEQ ID NO: 109289 - DNA, 17 bp, Arabidopsis thaliana
ggagcgatttgtctggt

SEQ ID NO: 109290 - DNA, 17 bp, Arabidopsis thaliana
ggagcggaacctctatc

SEQ ID NO: 109291 - DNA, 17 bp, Arabidopsis thaliana
ggagcggacctgatatc

SEQ ID NO: 109292 - DNA, 17 bp, Arabidopsis thaliana
ggagcggactaaaccat

SEQ ID NO: 109293 - DNA, 17 bp, Arabidopsis thaliana
ggagcggcaacagcggt

SEQ ID NO: 109294 - DNA, 17 bp, Arabidopsis thaliana
ggagcggccgtcggtgc

SEQ ID NO: 109295 - DNA, 17 bp, Arabidopsis thaliana
ggagcggcggtgttggc

SEQ ID NO: 109296 - DNA, 17 bp, Arabidopsis thaliana
ggagcgggacgatttat

SEQ ID NO: 109297 - DNA, 17 bp, Arabidopsis thaliana
ggagcggttaccaggtg

SEQ ID NO: 109298 - DNA, 17 bp, Arabidopsis thaliana
ggagcgtagatctcttg

SEQ ID NO: 109299 - DNA, 17 bp, Arabidopsis thaliana
ggagcgtatcgccgacc

SEQ ID NO: 109300 - DNA, 17 bp, Arabidopsis thaliana
ggagcgtcttgcatcct

SEQ ID NO: 109301 - DNA, 17 bp, Arabidopsis thaliana
ggagcgttaggattggg

SEQ ID NO: 109302 - DNA, 17 bp, Arabidopsis thaliana
ggagcgttccgccttag

SEQ ID NO: 109303 - DNA, 17 bp, Arabidopsis thaliana
ggagcgttgaggatgtc

SEQ ID NO: 109304 - DNA, 17 bp, Arabidopsis thaliana
ggagctaagttgtatct

SEQ ID NO: 109305 - DNA, 17 bp, Arabidopsis thaliana
ggagctacgtctgcttt

SEQ ID NO: 109306 - DNA, 17 bp, Arabidopsis thaliana
ggagctatggtgaaatt

SEQ ID NO: 109307 - DNA, 17 bp, Arabidopsis thaliana
ggagctcagggccagtc

SEQ ID NO: 109308 - DNA, 17 bp, Arabidopsis thaliana
ggagctcccttcagtcc

SEQ ID NO: 109309 - DNA, 17 bp, Arabidopsis thaliana
ggagctcctccagttga

SEQ ID NO: 109310 - DNA, 17 bp, Arabidopsis thaliana
ggagctccttcttgctt

SEQ ID NO: 109311 - DNA, 17 bp, Arabidopsis thaliana
ggagctcgaagacgatc

SEQ ID NO: 109312 - DNA, 17 bp, Arabidopsis thaliana
ggagctcgacaccgagg

SEQ ID NO: 109313 - DNA, 17 bp, Arabidopsis thaliana
ggagctcgagctggccg

SEQ ID NO: 109314 - DNA, 17 bp, Arabidopsis thaliana
ggagctcgagctggcct

SEQ ID NO: 109315 - DNA, 17 bp, Arabidopsis thaliana
ggagctcggaccagaat

SEQ ID NO: 109316 - DNA, 17 bp, Arabidopsis thaliana
ggagctcggacgcgagt

SEQ ID NO: 109317 - DNA, 17 bp, Arabidopsis thaliana
ggagctcggtgaccgaa

SEQ ID NO: 109318 - DNA, 17 bp, Arabidopsis thaliana
ggagctctatcactttt

SEQ ID NO: 109319 - DNA, 17 bp, Arabidopsis thaliana
ggagctgaagggtggac

SEQ ID NO: 109320 - DNA, 17 bp, Arabidopsis thaliana
ggagctgagaccgaaca

SEQ ID NO: 109321 - DNA, 17 bp, Arabidopsis thaliana
ggagctgaggcacaggg

SEQ ID NO: 109322 - DNA, 17 bp, Arabidopsis thaliana
ggagctgagggaggatg

SEQ ID NO: 109323 - DNA, 17 bp, Arabidopsis thaliana
ggagctgagtgcggcgg

SEQ ID NO: 109324 - DNA, 17 bp, Arabidopsis thaliana
ggagctgagttgagttg

SEQ ID NO: 109325 - DNA, 17 bp, Arabidopsis thaliana
ggagctgctaatcttcg

SEQ ID NO: 109326 - DNA, 17 bp, Arabidopsis thaliana
ggagctgctagagatta

SEQ ID NO: 109327 - DNA, 17 bp, Arabidopsis thaliana
ggagctggatttccctc

SEQ ID NO: 109328 - DNA, 17 bp, Arabidopsis thaliana
ggagctggccatgcccg

SEQ ID NO: 109329 - DNA, 17 bp, Arabidopsis thaliana
ggagctgggattagacc

SEQ ID NO: 109330 - DNA, 17 bp, Arabidopsis thaliana
ggagctgttcagcttag

SEQ ID NO: 109331 - DNA, 17 bp, Arabidopsis thaliana
ggagctgttcttgcggc

SEQ ID NO: 109332 - DNA, 17 bp, Arabidopsis thaliana
ggagcttaggctcccaa

SEQ ID NO: 109333 - DNA, 17 bp, Arabidopsis thaliana
ggagcttatctcggtct

SEQ ID NO: 109334 - DNA, 17 bp, Arabidopsis thaliana
ggagcttcccccgggcg

SEQ ID NO: 109335 - DNA, 17 bp, Arabidopsis thaliana
ggagcttcgacccattg

SEQ ID NO: 109336 - DNA, 17 bp, Arabidopsis thaliana
ggagcttcttagaggga

SEQ ID NO: 109337 - DNA, 17 bp, Arabidopsis thaliana
ggagcttgactgcaaga

SEQ ID NO: 109338 - DNA, 17 bp, Arabidopsis thaliana
ggagcttgagacatcac

SEQ ID NO: 109339 - DNA, 17 bp, Arabidopsis thaliana
ggagcttgcagagagaa

SEQ ID NO: 109340 - DNA, 17 bp, Arabidopsis thaliana
ggagctttccccgggcg

SEQ ID NO: 109341 - DNA, 17 bp, Arabidopsis thaliana
ggagctttccgtctacc

SEQ ID NO: 109342 - DNA, 17 bp, Arabidopsis thaliana
ggagctttctcaacaca

SEQ ID NO: 109343 - DNA, 17 bp, Arabidopsis thaliana
ggagctttctcaccaca

SEQ ID NO: 109344 - DNA, 17 bp, Arabidopsis thaliana
ggagctttgaccacaag

SEQ ID NO: 109345 - DNA, 17 bp, Arabidopsis thaliana
ggagctttgtctgtttg

SEQ ID NO: 109346 - DNA, 17 bp, Arabidopsis thaliana
ggagctttgtttgtttg

SEQ ID NO: 109347 - DNA, 17 bp, Arabidopsis thaliana
ggagcttttccggcagc

SEQ ID NO: 109348 - DNA, 17 bp, Arabidopsis thaliana
ggagcttttgttcaccg

SEQ ID NO: 109349 - DNA, 17 bp, Arabidopsis thaliana
ggaggaaatttcgatcg

SEQ ID NO: 109350 - DNA, 17 bp, Arabidopsis thaliana
ggaggaactacagagcg

SEQ ID NO: 109351 - DNA, 17 bp, Arabidopsis thaliana
ggaggaactgacgcaca

SEQ ID NO: 109352 - DNA, 17 bp, Arabidopsis thaliana
ggaggaactgaggcaca

SEQ ID NO: 109353 - DNA, 17 bp, Arabidopsis thaliana
ggaggaactgattgacc

SEQ ID NO: 109354 - DNA, 17 bp, Arabidopsis thaliana
ggaggaatcccaaggcc

SEQ ID NO: 109355 - DNA, 17 bp, Arabidopsis thaliana
ggaggaatctgtcacgg

SEQ ID NO: 109356 - DNA, 17 bp, Arabidopsis thaliana
ggaggaattacgggatt

SEQ ID NO: 109357 - DNA, 17 bp, Arabidopsis thaliana
ggaggaattacgggctt

SEQ ID NO: 109358 - DNA, 17 bp, Arabidopsis thaliana
ggaggaattacggggtt

SEQ ID NO: 109359 - DNA, 17 bp, Arabidopsis thaliana
ggaggacaaagggtcgc

SEQ ID NO: 109360 - DNA, 17 bp, Arabidopsis thaliana
ggaggacacgaagcaag

SEQ ID NO: 109361 - DNA, 17 bp, Arabidopsis thaliana
ggaggacacgaggcaag

SEQ ID NO: 109362 - DNA, 17 bp, Arabidopsis thaliana
ggaggacagaagggcgg

SEQ ID NO: 109363 - DNA, 17 bp, Arabidopsis thaliana
ggaggacataccggtgg

SEQ ID NO: 109364 - DNA, 17 bp, Arabidopsis thaliana
ggaggacatgggcgtca

SEQ ID NO: 109365 - DNA, 17 bp, Arabidopsis thaliana
ggaggacattgtcaggt

SEQ ID NO: 109366 - DNA, 17 bp, Arabidopsis thaliana
ggaggaccaacaggggg

SEQ ID NO: 109367 - DNA, 17 bp, Arabidopsis thaliana
ggaggaccgagggccgg

SEQ ID NO: 109368 - DNA, 17 bp, Arabidopsis thaliana
ggaggaccgagtgccgc

SEQ ID NO: 109369 - DNA, 17 bp, Arabidopsis thaliana
ggaggaccgagtgccgg

SEQ ID NO: 109370 - DNA, 17 bp, Arabidopsis thaliana
ggaggaccggaagcgag

SEQ ID NO: 109371 - DNA, 17 bp, Arabidopsis thaliana
ggaggacgagcgccggc

SEQ ID NO: 109372 - DNA, 17 bp, Arabidopsis thaliana
ggaggacggcgatggtg

SEQ ID NO: 109373 - DNA, 17 bp, Arabidopsis thaliana
ggaggacgtgcagcatt

SEQ ID NO: 109374 - DNA, 17 bp, Arabidopsis thaliana
ggaggagcacttgtctt

SEQ ID NO: 109375 - DNA, 17 bp, Arabidopsis thaliana
ggaggagccgacaacga

SEQ ID NO: 109376 - DNA, 17 bp, Arabidopsis thaliana
ggaggagcggtgattcg

SEQ ID NO: 109377 - DNA, 17 bp, Arabidopsis thaliana
ggaggagctgaggcaca

SEQ ID NO: 109378 - DNA, 17 bp, Arabidopsis thaliana
ggaggagctgaggcgca

SEQ ID NO: 109379 - DNA, 17 bp, Arabidopsis thaliana
ggaggaggaccaccagt

SEQ ID NO: 109380 - DNA, 17 bp, Arabidopsis thaliana
ggaggaggactcttcgc

SEQ ID NO: 109381 - DNA, 17 bp, Arabidopsis thaliana
ggaggaggcgcagcggg

SEQ ID NO: 109382 - DNA, 17 bp, Arabidopsis thaliana
ggaggatcacccacccc

SEQ ID NO: 109383 - DNA, 17 bp, Arabidopsis thaliana
ggaggatcacccaccgc

SEQ ID NO: 109384 - DNA, 17 bp, Arabidopsis thaliana
ggaggatccgattggtg

SEQ ID NO: 109385 - DNA, 17 bp, Arabidopsis thaliana
ggaggatccgcggagcc

SEQ ID NO: 109386 - DNA, 17 bp, Arabidopsis thaliana
ggaggatcgatcagtct

SEQ ID NO: 109387 - DNA, 17 bp, Arabidopsis thaliana
ggaggatcgccgccaat

SEQ ID NO: 109388 - DNA, 17 bp, Arabidopsis thaliana
ggaggatctgcgtctgg

SEQ ID NO: 109389 - DNA, 17 bp, Arabidopsis thaliana
ggaggatcttgctgagc

SEQ ID NO: 109390 - DNA, 17 bp, Arabidopsis thaliana
ggaggatcttggtcttg

SEQ ID NO: 109391 - DNA, 17 bp, Arabidopsis thaliana
ggaggatgaatggagtg

SEQ ID NO: 109392 - DNA, 17 bp, Arabidopsis thaliana
ggaggattaagagtttc

SEQ ID NO: 109393 - DNA, 17 bp, Arabidopsis thaliana
ggaggattacaggcttc

SEQ ID NO: 109394 - DNA, 17 bp, Arabidopsis thaliana
ggaggattacgggcttt

SEQ ID NO: 109395 - DNA, 17 bp, Arabidopsis thaliana
ggaggattacgggtttc

SEQ ID NO: 109396 - DNA, 17 bp, Arabidopsis thaliana
ggaggattatggcattc

SEQ ID NO: 109397 - DNA, 17 bp, Arabidopsis thaliana
ggaggattgatgttcat

SEQ ID NO: 109398 - DNA, 17 bp, Arabidopsis thaliana
ggaggattgcgcactat

SEQ ID NO: 109399 - DNA, 17 bp, Arabidopsis thaliana
ggaggcaagtgggaagg

SEQ ID NO: 109400 - DNA, 17 bp, Arabidopsis thaliana
ggaggcacgtctgccgg

SEQ ID NO: 109401 - DNA, 17 bp, Arabidopsis thaliana
ggaggcagcggacaaag

SEQ ID NO: 109402 - DNA, 17 bp, Arabidopsis thaliana
ggaggcagctctgcgaa

SEQ ID NO: 109403 - DNA, 17 bp, Arabidopsis thaliana
ggaggcatgccggtccg

SEQ ID NO: 109404 - DNA, 17 bp, Arabidopsis thaliana
ggaggcatggccgagtg

SEQ ID NO: 109405 - DNA, 17 bp, Arabidopsis thaliana
ggaggctaagagtttgg

SEQ ID NO: 109406 - DNA, 17 bp, Arabidopsis thaliana
ggaggctacggcgttag

SEQ ID NO: 109407 - DNA, 17 bp, Arabidopsis thaliana
ggaggctctccagaacc

SEQ ID NO: 109408 - DNA, 17 bp, Arabidopsis thaliana
ggaggcttaagcgaaag

SEQ ID NO: 109409 - DNA, 17 bp, Arabidopsis thaliana
ggaggcttagctcagct

SEQ ID NO: 109410 - DNA, 17 bp, Arabidopsis thaliana
ggaggcttagctgagtg

SEQ ID NO: 109411 - DNA, 17 bp, Arabidopsis thaliana
ggaggcttgaggtcggc

SEQ ID NO: 109412 - DNA, 17 bp, Arabidopsis thaliana
ggaggctttgccttttt

SEQ ID NO: 109413 - DNA, 17 bp, Arabidopsis thaliana
ggagggaagcggatggg

SEQ ID NO: 109414 - DNA, 17 bp, Arabidopsis thaliana
ggagggaattgccacgg

SEQ ID NO: 109415 - DNA, 17 bp, Arabidopsis thaliana
ggagggacaagccgacc

SEQ ID NO: 109416 - DNA, 17 bp, Arabidopsis thaliana
ggagggagcagcttagc

SEQ ID NO: 109417 - DNA, 17 bp, Arabidopsis thaliana
ggagggaggtttctcac

SEQ ID NO: 109418 - DNA, 17 bp, Arabidopsis thaliana
ggagggatggagctcct

SEQ ID NO: 109419 - DNA, 17 bp, Arabidopsis thaliana
ggagggatggctgagtg

SEQ ID NO: 109420 - DNA, 17 bp, Arabidopsis thaliana
ggagggattacaagatt

SEQ ID NO: 109421 - DNA, 17 bp, Arabidopsis thaliana
ggagggattaccggttt

SEQ ID NO: 109422 - DNA, 17 bp, Arabidopsis thaliana
ggagggattacgggcgt

SEQ ID NO: 109423 - DNA, 17 bp, Arabidopsis thaliana
ggagggattacgggctt

SEQ ID NO: 109424 - DNA, 17 bp, Arabidopsis thaliana
ggagggcaaatgctaaa

SEQ ID NO: 109425 - DNA, 17 bp, Arabidopsis thaliana
ggagggcaatgcgtgag

SEQ ID NO: 109426 - DNA, 17 bp, Arabidopsis thaliana
ggagggcacgtctgcct

SEQ ID NO: 109427 - DNA, 17 bp, Arabidopsis thaliana
ggagggcccttgcttaa

SEQ ID NO: 109428 - DNA, 17 bp, Arabidopsis thaliana
ggagggcgcggcggtcg

SEQ ID NO: 109429 - DNA, 17 bp, Arabidopsis thaliana
ggagggctgggctcggg

SEQ ID NO: 109430 - DNA, 17 bp, Arabidopsis thaliana
ggagggctgtctttggg

SEQ ID NO: 109431 - DNA, 17 bp, Arabidopsis thaliana
ggaggggctcgcgtctg

SEQ ID NO: 109432 - DNA, 17 bp, Arabidopsis thaliana
ggaggggtttggcagga

SEQ ID NO: 109433 - DNA, 17 bp, Arabidopsis thaliana
ggagggtaatgcgtgag

SEQ ID NO: 109434 - DNA, 17 bp, Arabidopsis thaliana
ggagggtcgaaacatgg

SEQ ID NO: 109435 - DNA, 17 bp, Arabidopsis thaliana
ggagggtgagtcagggc

SEQ ID NO: 109436 - DNA, 17 bp, Arabidopsis thaliana
ggaggtagcggacaaag

SEQ ID NO: 109437 - DNA, 17 bp, Arabidopsis thaliana
ggaggtagggtccagcg

SEQ ID NO: 109438 - DNA, 17 bp, Arabidopsis thaliana
ggaggtagtctcgatgg

SEQ ID NO: 109439 - DNA, 17 bp, Arabidopsis thaliana
ggaggtcacccatccta

SEQ ID NO: 109440 - DNA, 17 bp, Arabidopsis thaliana
ggaggtcaggtgtttta

SEQ ID NO: 109441 - DNA, 17 bp, Arabidopsis thaliana
ggaggtcatttgccgac

SEQ ID NO: 109442 - DNA, 17 bp, Arabidopsis thaliana
ggaggtccacttgatga

SEQ ID NO: 109443 - DNA, 17 bp, Arabidopsis thaliana
ggaggtccgaaaccaaa

SEQ ID NO: 109444 - DNA, 17 bp, Arabidopsis thaliana
ggaggtccgaaccgact

SEQ ID NO: 109445 - DNA, 17 bp, Arabidopsis thaliana
ggaggtcctaccgggag

SEQ ID NO: 109446 - DNA, 17 bp, Arabidopsis thaliana
ggaggtgatgacaattt

SEQ ID NO: 109447 - DNA, 17 bp, Arabidopsis thaliana
ggaggtgccgacaacca

SEQ ID NO: 109448 - DNA, 17 bp, Arabidopsis thaliana
ggaggtgcggctggatc

SEQ ID NO: 109449 - DNA, 17 bp, Arabidopsis thaliana
ggaggtgctcttaagtg

SEQ ID NO: 109450 - DNA, 17 bp, Arabidopsis thaliana
ggaggtggctaaggagg

SEQ ID NO: 109451 - DNA, 17 bp, Arabidopsis thaliana
ggaggtggtgggccacg

SEQ ID NO: 109452 - DNA, 17 bp, Arabidopsis thaliana
ggaggtgtcgtctgtcg

SEQ ID NO: 109453 - DNA, 17 bp, Arabidopsis thaliana
ggaggtgtgcgaaggta

SEQ ID NO: 109454 - DNA, 17 bp, Arabidopsis thaliana
ggaggtgttatcaattg

SEQ ID NO: 109455 - DNA, 17 bp, Arabidopsis thaliana
ggaggtgttcttgcggc

SEQ ID NO: 109456 - DNA, 17 bp, Arabidopsis thaliana
ggaggtgttgagttcaa

SEQ ID NO: 109457 - DNA, 17 bp, Arabidopsis thaliana
ggaggttcaggccctcc

SEQ ID NO: 109458 - DNA, 17 bp, Arabidopsis thaliana
ggaggttcgaaccctcc

SEQ ID NO: 109459 - DNA, 17 bp, Arabidopsis thaliana
ggaggttcgaatccttc

SEQ ID NO: 109460 - DNA, 17 bp, Arabidopsis thaliana
ggaggttcgacccctcc

SEQ ID NO: 109461 - DNA, 17 bp, Arabidopsis thaliana
ggaggttcgaggcctct

SEQ ID NO: 109462 - DNA, 17 bp, Arabidopsis thaliana
ggaggttcgagtcctct

SEQ ID NO: 109463 - DNA, 17 bp, Arabidopsis thaliana
ggaggttcgtcaagggg

SEQ ID NO: 109464 - DNA, 17 bp, Arabidopsis thaliana
ggaggttctcggccgaa

SEQ ID NO: 109465 - DNA, 17 bp, Arabidopsis thaliana
ggaggttctgagccgaa

SEQ ID NO: 109466 - DNA, 17 bp, Arabidopsis thaliana
ggaggttctggccgaag

SEQ ID NO: 109467 - DNA, 17 bp, Arabidopsis thaliana
ggaggttctgggccgaa

SEQ ID NO: 109468 - DNA, 17 bp, Arabidopsis thaliana
ggaggttctgggctgaa

SEQ ID NO: 109469 - DNA, 17 bp, Arabidopsis thaliana
ggaggttctggttcgaa

SEQ ID NO: 109470 - DNA, 17 bp, Arabidopsis thaliana
ggaggttctgtctgcgg

SEQ ID NO: 109471 - DNA, 17 bp, Arabidopsis thaliana
ggaggttgtgggtcaaa

SEQ ID NO: 109472 - DNA, 17 bp, Arabidopsis thaliana
ggaggtttcgttctgtt

SEQ ID NO: 109473 - DNA, 17 bp, Arabidopsis thaliana
ggaggtttctatgtacc

SEQ ID NO: 109474 - DNA, 17 bp, Arabidopsis thaliana
ggaggtttgtatgtatc

SEQ ID NO: 109475 - DNA, 17 bp, Arabidopsis thaliana
ggagtaaaacggtgcaa

SEQ ID NO: 109476 - DNA, 17 bp, Arabidopsis thaliana
ggagtaaagccttttcg

SEQ ID NO: 109477 - DNA, 17 bp, Arabidopsis thaliana
ggagtaaccatgtagca

SEQ ID NO: 109478 - DNA, 17 bp, Arabidopsis thaliana
ggagtaacgagattccc

SEQ ID NO: 109479 - DNA, 17 bp, Arabidopsis thaliana
ggagtaactatgaccct

SEQ ID NO: 109480 - DNA, 17 bp, Arabidopsis thaliana
ggagtaactatgactct

SEQ ID NO: 109481 - DNA, 17 bp, Arabidopsis thaliana
ggagtaagactcagtgg

SEQ ID NO: 109482 - DNA, 17 bp, Arabidopsis thaliana
ggagtaagagaatggaa

SEQ ID NO: 109483 - DNA, 17 bp, Arabidopsis thaliana
ggagtaagcgacccttg

SEQ ID NO: 109484 - DNA, 17 bp, Arabidopsis thaliana
ggagtaagtgaccctca

SEQ ID NO: 109485 - DNA, 17 bp, Arabidopsis thaliana
ggagtaatcgtacttgt

SEQ ID NO: 109486 - DNA, 17 bp, Arabidopsis thaliana
ggagtagaacttgagaa

SEQ ID NO: 109487 - DNA, 17 bp, Arabidopsis thaliana
ggagtagacactttttt

SEQ ID NO: 109488 - DNA, 17 bp, Arabidopsis thaliana
ggagtagacggcgggtg

SEQ ID NO: 109489 - DNA, 17 bp, Arabidopsis thaliana
ggagtagtttcaggatg

SEQ ID NO: 109490 - DNA, 17 bp, Arabidopsis thaliana
ggagtagtttgtgagag

SEQ ID NO: 109491 - DNA, 17 bp, Arabidopsis thaliana
ggagtagttttgtgcct

SEQ ID NO: 109492 - DNA, 17 bp, Arabidopsis thaliana
ggagtatccgcaggcga

SEQ ID NO: 109493 - DNA, 17 bp, Arabidopsis thaliana
ggagtatgccccttatt

SEQ ID NO: 109494 - DNA, 17 bp, Arabidopsis thaliana
ggagtatggtcgcaagg

SEQ ID NO: 109495 - DNA, 17 bp, Arabidopsis thaliana
ggagtattcttgttcga

SEQ ID NO: 109496 - DNA, 17 bp, Arabidopsis thaliana
ggagtattggatctttc

SEQ ID NO: 109497 - DNA, 17 bp, Arabidopsis thaliana
ggagtcaatctcgatgg

SEQ ID NO: 109498 - DNA, 17 bp, Arabidopsis thaliana
ggagtcaatgatcgttt

SEQ ID NO: 109499 - DNA, 17 bp, Arabidopsis thaliana
ggagtcaatgccggatt

SEQ ID NO: 109500 - DNA, 17 bp, Arabidopsis thaliana
ggagtcaattaatcgat

SEQ ID NO: 109501 - DNA, 17 bp, Arabidopsis thaliana
ggagtcaccgccgtcta

SEQ ID NO: 109502 - DNA, 17 bp, Arabidopsis thaliana
ggagtcagtgaggatgg

SEQ ID NO: 109503 - DNA, 17 bp, Arabidopsis thaliana
ggagtcatctacgtgca

SEQ ID NO: 109504 - DNA, 17 bp, Arabidopsis thaliana
ggagtcatgtgatctgc

SEQ ID NO: 109505 - DNA, 17 bp, Arabidopsis thaliana
ggagtcattgtgtctca

SEQ ID NO: 109506 - DNA, 17 bp, Arabidopsis thaliana
ggagtccaagttaacaa

SEQ ID NO: 109507 - DNA, 17 bp, Arabidopsis thaliana
ggagtccagcgttgggg

SEQ ID NO: 109508 - DNA, 17 bp, Arabidopsis thaliana
ggagtccatcccactgg

SEQ ID NO: 109509 - DNA, 17 bp, Arabidopsis thaliana
ggagtccccgttggtgg

SEQ ID NO: 109510 - DNA, 17 bp, Arabidopsis thaliana
ggagtccgacaggcaaa

SEQ ID NO: 109511 - DNA, 17 bp, Arabidopsis thaliana
ggagtccgaggtgtttc

SEQ ID NO: 109512 - DNA, 17 bp, Arabidopsis thaliana
ggagtccggagacgtcg

SEQ ID NO: 109513 - DNA, 17 bp, Arabidopsis thaliana
ggagtcctcagcgacgg

SEQ ID NO: 109514 - DNA, 17 bp, Arabidopsis thaliana
ggagtcctctatgggtc

SEQ ID NO: 109515 - DNA, 17 bp, Arabidopsis thaliana
ggagtcgaataggaccg

SEQ ID NO: 109516 - DNA, 17 bp, Arabidopsis thaliana
ggagtcgaatatgactt

SEQ ID NO: 109517 - DNA, 17 bp, Arabidopsis thaliana
ggagtcgaatatgcctt

SEQ ID NO: 109518 - DNA, 17 bp, Arabidopsis thaliana
ggagtcgagacttattt

SEQ ID NO: 109519 - DNA, 17 bp, Arabidopsis thaliana
ggagtcgagtctctgct

SEQ ID NO: 109520 - DNA, 17 bp, Arabidopsis thaliana
ggagtcgcatcctgtag

SEQ ID NO: 109521 - DNA, 17 bp, Arabidopsis thaliana
ggagtcgctaaagaatg

SEQ ID NO: 109522 - DNA, 17 bp, Arabidopsis thaliana
ggagtcggaggatttgc

SEQ ID NO: 109523 - DNA, 17 bp, Arabidopsis thaliana
ggagtcggtgcttctac

SEQ ID NO: 109524 - DNA, 17 bp, Arabidopsis thaliana
ggagtctacaggcactg

SEQ ID NO: 109525 - DNA, 17 bp, Arabidopsis thaliana
ggagtctaccttccggc

SEQ ID NO: 109526 - DNA, 17 bp, Arabidopsis thaliana
ggagtctgacatgtgtg

SEQ ID NO: 109527 - DNA, 17 bp, Arabidopsis thaliana
ggagtctgacatgtttg

SEQ ID NO: 109528 - DNA, 17 bp, Arabidopsis thaliana
ggagtctgattttgcgg

SEQ ID NO: 109529 - DNA, 17 bp, Arabidopsis thaliana
ggagtctgggcagtccg

SEQ ID NO: 109530 - DNA, 17 bp, Arabidopsis thaliana
ggagtctgtcagttggg

SEQ ID NO: 109531 - DNA, 17 bp, Arabidopsis thaliana
ggagtctgttggtgcca

SEQ ID NO: 109532 - DNA, 17 bp, Arabidopsis thaliana
ggagtcttgattctgca

SEQ ID NO: 109533 - DNA, 17 bp, Arabidopsis thaliana
ggagtcttgttcctttg

SEQ ID NO: 109534 - DNA, 17 bp, Arabidopsis thaliana
ggagtgaaaggcctttg

SEQ ID NO: 109535 - DNA, 17 bp, Arabidopsis thaliana
ggagtgaactagcctct

SEQ ID NO: 109536 - DNA, 17 bp, Arabidopsis thaliana
ggagtgacatcaagagt

SEQ ID NO: 109537 - DNA, 17 bp, Arabidopsis thaliana
ggagtgacccataccat

SEQ ID NO: 109538 - DNA, 17 bp, Arabidopsis thaliana
ggagtgactttcttgtg

SEQ ID NO: 109539 - DNA, 17 bp, Arabidopsis thaliana
ggagtgagacacggccc

SEQ ID NO: 109540 - DNA, 17 bp, Arabidopsis thaliana
ggagtgagacctaccta

SEQ ID NO: 109541 - DNA, 17 bp, Arabidopsis thaliana
ggagtgagacctacctc

SEQ ID NO: 109542 - DNA, 17 bp, Arabidopsis thaliana
ggagtgataggaggttg

SEQ ID NO: 109543 - DNA, 17 bp, Arabidopsis thaliana
ggagtgattccggcttt

SEQ ID NO: 109544 - DNA, 17 bp, Arabidopsis thaliana
ggagtgcagattcacat

SEQ ID NO: 109545 - DNA, 17 bp, Arabidopsis thaliana
ggagtgcattggtcggc

SEQ ID NO: 109546 - DNA, 17 bp, Arabidopsis thaliana
ggagtgccggttgggtc

SEQ ID NO: 109547 - DNA, 17 bp, Arabidopsis thaliana
ggagtgcgccgaggccg

SEQ ID NO: 109548 - DNA, 17 bp, Arabidopsis thaliana
ggagtgcgccgaggtcg

SEQ ID NO: 109549 - DNA, 17 bp, Arabidopsis thaliana
ggagtggaacctctttg

SEQ ID NO: 109550 - DNA, 17 bp, Arabidopsis thaliana
ggagtggaatagaccgt

SEQ ID NO: 109551 - DNA, 17 bp, Arabidopsis thaliana
ggagtggagcctgcggc

SEQ ID NO: 109552 - DNA, 17 bp, Arabidopsis thaliana
ggagtggagcctgcgtc

SEQ ID NO: 109553 - DNA, 17 bp, Arabidopsis thaliana
ggagtgggacggcgaga

SEQ ID NO: 109554 - DNA, 17 bp, Arabidopsis thaliana
ggagtggggactggtgg

SEQ ID NO: 109555 - DNA, 17 bp, Arabidopsis thaliana
ggagtgttaggatacgt

SEQ ID NO: 109556 - DNA, 17 bp, Arabidopsis thaliana
ggagttaaaaggtaggt

SEQ ID NO: 109557 - DNA, 17 bp, Arabidopsis thaliana
ggagttaaactttcatt

SEQ ID NO: 109558 - DNA, 17 bp, Arabidopsis thaliana
ggagttaacttctcgtt

SEQ ID NO: 109559 - DNA, 17 bp, Arabidopsis thaliana
ggagttaaggtgtagtg

SEQ ID NO: 109560 - DNA, 17 bp, Arabidopsis thaliana
ggagttacaaaggtgtt

SEQ ID NO: 109561 - DNA, 17 bp, Arabidopsis thaliana
ggagttacagagagaca

SEQ ID NO: 109562 - DNA, 17 bp, Arabidopsis thaliana
ggagttagaagctttaa

SEQ ID NO: 109563 - DNA, 17 bp, Arabidopsis thaliana
ggagttagaccgtttat

SEQ ID NO: 109564 - DNA, 17 bp, Arabidopsis thaliana
ggagttagacttttcct

SEQ ID NO: 109565 - DNA, 17 bp, Arabidopsis thaliana
ggagttagagtaggccg

SEQ ID NO: 109566 - DNA, 17 bp, Arabidopsis thaliana
ggagttagatgaagcga

SEQ ID NO: 109567 - DNA, 17 bp, Arabidopsis thaliana
ggagttagatgatatga

SEQ ID NO: 109568 - DNA, 17 bp, Arabidopsis thaliana
ggagttagatggtagga

SEQ ID NO: 109569 - DNA, 17 bp, Arabidopsis thaliana
ggagttagtcacaagca

SEQ ID NO: 109570 - DNA, 17 bp, Arabidopsis thaliana
ggagttagtggtaggac

SEQ ID NO: 109571 - DNA, 17 bp, Arabidopsis thaliana
ggagttatcagcttcag

SEQ ID NO: 109572 - DNA, 17 bp, Arabidopsis thaliana
ggagttatcgacgaggt

SEQ ID NO: 109573 - DNA, 17 bp, Arabidopsis thaliana
ggagttcagccctattt

SEQ ID NO: 109574 - DNA, 17 bp, Arabidopsis thaliana
ggagttcaggaatcagg

SEQ ID NO: 109575 - DNA, 17 bp, Arabidopsis thaliana
ggagttcctatcgtaat

SEQ ID NO: 109576 - DNA, 17 bp, Arabidopsis thaliana
ggagttcgatcctggct

SEQ ID NO: 109577 - DNA, 17 bp, Arabidopsis thaliana
ggagttcgctttaagat

SEQ ID NO: 109578 - DNA, 17 bp, Arabidopsis thaliana
ggagttcgtttcccggc

SEQ ID NO: 109579 - DNA, 17 bp, Arabidopsis thaliana
ggagttcgtttgactgt

SEQ ID NO: 109580 - DNA, 17 bp, Arabidopsis thaliana
ggagttctagcccagta

SEQ ID NO: 109581 - DNA, 17 bp, Arabidopsis thaliana
ggagttctattcgagat

SEQ ID NO: 109582 - DNA, 17 bp, Arabidopsis thaliana
ggagttctctcaggatc

SEQ ID NO: 109583 - DNA, 17 bp, Arabidopsis thaliana
ggagttctctcggaacg

SEQ ID NO: 109584 - DNA, 17 bp, Arabidopsis thaliana
ggagttctctcgtattt

SEQ ID NO: 109585 - DNA, 17 bp, Arabidopsis thaliana
ggagttctcttaggacg

SEQ ID NO: 109586 - DNA, 17 bp, Arabidopsis thaliana
ggagttctgacgggatc

SEQ ID NO: 109587 - DNA, 17 bp, Arabidopsis thaliana
ggagttctgatgggatc

SEQ ID NO: 109588 - DNA, 17 bp, Arabidopsis thaliana
ggagttctgcgggttga

SEQ ID NO: 109589 - DNA, 17 bp, Arabidopsis thaliana
ggagttcttcagtttga

SEQ ID NO: 109590 - DNA, 17 bp, Arabidopsis thaliana
ggagttctttcaggacc

SEQ ID NO: 109591 - DNA, 17 bp, Arabidopsis thaliana
ggagttgaaaataagcg

SEQ ID NO: 109592 - DNA, 17 bp, Arabidopsis thaliana
ggagttgaccgattcag

SEQ ID NO: 109593 - DNA, 17 bp, Arabidopsis thaliana
ggagttgactttttctt

SEQ ID NO: 109594 - DNA, 17 bp, Arabidopsis thaliana
ggagttgagtttgatga

SEQ ID NO: 109595 - DNA, 17 bp, Arabidopsis thaliana
ggagttgcgagtccttg

SEQ ID NO: 109596 - DNA, 17 bp, Arabidopsis thaliana
ggagttgctaagatgta

SEQ ID NO: 109597 - DNA, 17 bp, Arabidopsis thaliana
ggagttgctctaacaaa

SEQ ID NO: 109598 - DNA, 17 bp, Arabidopsis thaliana
ggagttgcttagatgta

SEQ ID NO: 109599 - DNA, 17 bp, Arabidopsis thaliana
ggagttggactagatgg

SEQ ID NO: 109600 - DNA, 17 bp, Arabidopsis thaliana
ggagttggcaatggttg

SEQ ID NO: 109601 - DNA, 17 bp, Arabidopsis thaliana
ggagttgggacttattt

SEQ ID NO: 109602 - DNA, 17 bp, Arabidopsis thaliana
ggagttgggcaagttac

SEQ ID NO: 109603 - DNA, 17 bp, Arabidopsis thaliana
ggagttggtcgtcaatg

SEQ ID NO: 109604 - DNA, 17 bp, Arabidopsis thaliana
ggagttggtctcagata

SEQ ID NO: 109605 - DNA, 17 bp, Arabidopsis thaliana
ggagttgtccttggcta

SEQ ID NO: 109606 - DNA, 17 bp, Arabidopsis thaliana
ggagttgttggaatgtg

SEQ ID NO: 109607 - DNA, 17 bp, Arabidopsis thaliana
ggagttgttttctcaat

SEQ ID NO: 109608 - DNA, 17 bp, Arabidopsis thaliana
ggagtttaccgaagccg

SEQ ID NO: 109609 - DNA, 17 bp, Arabidopsis thaliana
ggagtttacggaaacgg

SEQ ID NO: 109610 - DNA, 17 bp, Arabidopsis thaliana
ggagtttatccatcgcc

SEQ ID NO: 109611 - DNA, 17 bp, Arabidopsis thaliana
ggagtttatttaaagtg

SEQ ID NO: 109612 - DNA, 17 bp, Arabidopsis thaliana
ggagtttatttacagtg

SEQ ID NO: 109613 - DNA, 17 bp, Arabidopsis thaliana
ggagtttcgaatccttc

SEQ ID NO: 109614 - DNA, 17 bp, Arabidopsis thaliana
ggagtttcgctgtcagg

SEQ ID NO: 109615 - DNA, 17 bp, Arabidopsis thaliana
ggagtttgacatggctg

SEQ ID NO: 109616 - DNA, 17 bp, Arabidopsis thaliana
ggagtttgcaatggttg

SEQ ID NO: 109617 - DNA, 17 bp, Arabidopsis thaliana
ggagtttgcacgtttat

SEQ ID NO: 109618 - DNA, 17 bp, Arabidopsis thaliana
ggagtttgcggaaacgg

SEQ ID NO: 109619 - DNA, 17 bp, Arabidopsis thaliana
ggagtttgcggaccatg

SEQ ID NO: 109620 - DNA, 17 bp, Arabidopsis thaliana
ggagtttggaagaagaa

SEQ ID NO: 109621 - DNA, 17 bp, Arabidopsis thaliana
ggagtttggctggggcg

SEQ ID NO: 109622 - DNA, 17 bp, Arabidopsis thaliana
ggagtttggtggggcgg

SEQ ID NO: 109623 - DNA, 17 bp, Arabidopsis thaliana
ggagttttatgactggt

SEQ ID NO: 109624 - DNA, 17 bp, Arabidopsis thaliana
ggagttttcatctacca

SEQ ID NO: 109625 - DNA, 17 bp, Arabidopsis thaliana
ggagttttcatcttaaa

SEQ ID NO: 109626 - DNA, 17 bp, Arabidopsis thaliana
ggagttttcgatttttg

SEQ ID NO: 109627 - DNA, 17 bp, Arabidopsis thaliana
ggagttttgatagtact

SEQ ID NO: 109628 - DNA, 17 bp, Arabidopsis thaliana
ggataaaatgcaatgcg

SEQ ID NO: 109629 - DNA, 17 bp, Arabidopsis thaliana
ggataaaatttcgggtt

SEQ ID NO: 109630 - DNA, 17 bp, Arabidopsis thaliana
ggataaactcagtgccc

SEQ ID NO: 109631 - DNA, 17 bp, Arabidopsis thaliana
ggataacatcataggat

SEQ ID NO: 109632 - DNA, 17 bp, Arabidopsis thaliana
ggataacgagacaccat

SEQ ID NO: 109633 - DNA, 17 bp, Arabidopsis thaliana
ggataacgcaggtgccc

SEQ ID NO: 109634 - DNA, 17 bp, Arabidopsis thaliana
ggataacgcaggtgtcc

SEQ ID NO: 109635 - DNA, 17 bp, Arabidopsis thaliana
ggataactttgacctgt

SEQ ID NO: 109636 - DNA, 17 bp, Arabidopsis thaliana
ggataagaggtgtgttt

SEQ ID NO: 109637 - DNA, 17 bp, Arabidopsis thaliana
ggataagattgcggtag

SEQ ID NO: 109638 - DNA, 17 bp, Arabidopsis thaliana
ggataagatttcgggtt

SEQ ID NO: 109639 - DNA, 17 bp, Arabidopsis thaliana
ggataagcttgaggata

SEQ ID NO: 109640 - DNA, 17 bp, Arabidopsis thaliana
ggataaggttccagatt

SEQ ID NO: 109641 - DNA, 17 bp, Arabidopsis thaliana
ggataaggttgtagtta

SEQ ID NO: 109642 - DNA, 17 bp, Arabidopsis thaliana
ggataagtgatcatcac

SEQ ID NO: 109643 - DNA, 17 bp, Arabidopsis thaliana
ggataagtttcgtaatt

SEQ ID NO: 109644 - DNA, 17 bp, Arabidopsis thaliana
ggataatcaagccgcta

SEQ ID NO: 109645 - DNA, 17 bp, Arabidopsis thaliana
ggataatcagttccggt

SEQ ID NO: 109646 - DNA, 17 bp, Arabidopsis thaliana
ggataatcgatactctt

SEQ ID NO: 109647 - DNA, 17 bp, Arabidopsis thaliana
ggataatttgacccatt

SEQ ID NO: 109648 - DNA, 17 bp, Arabidopsis thaliana
ggataatttggcacgtt

SEQ ID NO: 109649 - DNA, 17 bp, Arabidopsis thaliana
ggatacaaaatggatcg

SEQ ID NO: 109650 - DNA, 17 bp, Arabidopsis thaliana
ggatacagtggcggacc

SEQ ID NO: 109651 - DNA, 17 bp, Arabidopsis thaliana
ggatacccggttgaacc

SEQ ID NO: 109652 - DNA, 17 bp, Arabidopsis thaliana
ggataccgaggcctgtt

SEQ ID NO: 109653 - DNA, 17 bp, Arabidopsis thaliana
ggatacctcagctttgg

SEQ ID NO: 109654 - DNA, 17 bp, Arabidopsis thaliana
ggatacctcattgatcc

SEQ ID NO: 109655 - DNA, 17 bp, Arabidopsis thaliana
ggatacctggtcgttct

SEQ ID NO: 109656 - DNA, 17 bp, Arabidopsis thaliana
ggatacgaggatttgga

SEQ ID NO: 109657 - DNA, 17 bp, Arabidopsis thaliana
ggatacgtttggaggtt

SEQ ID NO: 109658 - DNA, 17 bp, Arabidopsis thaliana
ggatactaggcgctgtg

SEQ ID NO: 109659 - DNA, 17 bp, Arabidopsis thaliana
ggatactatgagctttt

SEQ ID NO: 109660 - DNA, 17 bp, Arabidopsis thaliana
ggatactcaggatcggt

SEQ ID NO: 109661 - DNA, 17 bp, Arabidopsis thaliana
ggatactgggtgttcat

SEQ ID NO: 109662 - DNA, 17 bp, Arabidopsis thaliana
ggatacttatcgactaa

SEQ ID NO: 109663 - DNA, 17 bp, Arabidopsis thaliana
ggatacttgtgtccatg

SEQ ID NO: 109664 - DNA, 17 bp, Arabidopsis thaliana
ggatagacaacaaaccg

SEQ ID NO: 109665 - DNA, 17 bp, Arabidopsis thaliana
ggatagacatcccgaat

SEQ ID NO: 109666 - DNA, 17 bp, Arabidopsis thaliana
ggatagatcctgatgtg

SEQ ID NO: 109667 - DNA, 17 bp, Arabidopsis thaliana
ggatagattcggctccg

SEQ ID NO: 109668 - DNA, 17 bp, Arabidopsis thaliana
ggatagcaggaggtgca

SEQ ID NO: 109669 - DNA, 17 bp, Arabidopsis thaliana
ggatagccgagaaagac

SEQ ID NO: 109670 - DNA, 17 bp, Arabidopsis thaliana
ggatagctggagctcgg

SEQ ID NO: 109671 - DNA, 17 bp, Arabidopsis thaliana
ggataggccacaacaca

SEQ ID NO: 109672 - DNA, 17 bp, Arabidopsis thaliana
ggataggcttgaatgtg

SEQ ID NO: 109673 - DNA, 17 bp, Arabidopsis thaliana
ggatagtccgagttact

SEQ ID NO: 109674 - DNA, 17 bp, Arabidopsis thaliana
ggatagtccgagtttcg

SEQ ID NO: 109675 - DNA, 17 bp, Arabidopsis thaliana
ggatagtctttaaacaa

SEQ ID NO: 109676 - DNA, 17 bp, Arabidopsis thaliana
ggatagtctttaaacta

SEQ ID NO: 109677 - DNA, 17 bp, Arabidopsis thaliana
ggatagttcttgaaaac

SEQ ID NO: 109678 - DNA, 17 bp, Arabidopsis thaliana
ggatagtttgtggattt

SEQ ID NO: 109679 - DNA, 17 bp, Arabidopsis thaliana
ggatatcagaagctttc

SEQ ID NO: 109680 - DNA, 17 bp, Arabidopsis thaliana
ggatatcatctacgagg

SEQ ID NO: 109681 - DNA, 17 bp, Arabidopsis thaliana
ggatatcccaccaagac

SEQ ID NO: 109682 - DNA, 17 bp, Arabidopsis thaliana
ggatatccgaacgccca

SEQ ID NO: 109683 - DNA, 17 bp, Arabidopsis thaliana
ggatatccgcttcgtac

SEQ ID NO: 109684 - DNA, 17 bp, Arabidopsis thaliana
ggatatccgcttcgtgc

SEQ ID NO: 109685 - DNA, 17 bp, Arabidopsis thaliana
ggatatccgctttgata

SEQ ID NO: 109686 - DNA, 17 bp, Arabidopsis thaliana
ggatatccgtttcgtgc

SEQ ID NO: 109687 - DNA, 17 bp, Arabidopsis thaliana
ggatatctcggctctcg

SEQ ID NO: 109688 - DNA, 17 bp, Arabidopsis thaliana
ggatatgagcaccgcct

SEQ ID NO: 109689 - DNA, 17 bp, Arabidopsis thaliana
ggatatgagttgccttt

SEQ ID NO: 109690 - DNA, 17 bp, Arabidopsis thaliana
ggatatgatctactttc

SEQ ID NO: 109691 - DNA, 17 bp, Arabidopsis thaliana
ggatatgcacactgaga

SEQ ID NO: 109692 - DNA, 17 bp, Arabidopsis thaliana
ggatatggacctttcca

SEQ ID NO: 109693 - DNA, 17 bp, Arabidopsis thaliana
ggatatggcctaactta

SEQ ID NO: 109694 - DNA, 17 bp, Arabidopsis thaliana
ggatatggctgtaggtt

SEQ ID NO: 109695 - DNA, 17 bp, Arabidopsis thaliana
ggatatgtctaatgtct

SEQ ID NO: 109696 - DNA, 17 bp, Arabidopsis thaliana
ggatatgtctggctcat

SEQ ID NO: 109697 - DNA, 17 bp, Arabidopsis thaliana
ggatatgtgagctgttg

SEQ ID NO: 109698 - DNA, 17 bp, Arabidopsis thaliana
ggatattccaccgagga

SEQ ID NO: 109699 - DNA, 17 bp, Arabidopsis thaliana
ggatattcgagtgggtg

SEQ ID NO: 109700 - DNA, 17 bp, Arabidopsis thaliana
ggatattcgcttcgtgc

SEQ ID NO: 109701 - DNA, 17 bp, Arabidopsis thaliana
ggatattcgctttgtgc

SEQ ID NO: 109702 - DNA, 17 bp, Arabidopsis thaliana
ggatattcggcaggtca

SEQ ID NO: 109703 - DNA, 17 bp, Arabidopsis thaliana
ggatattctacagcgga

SEQ ID NO: 109704 - DNA, 17 bp, Arabidopsis thaliana
ggatattctgcagcgga

SEQ ID NO: 109705 - DNA, 17 bp, Arabidopsis thaliana
ggatattggttaactgc

SEQ ID NO: 109706 - DNA, 17 bp, Arabidopsis thaliana
ggatatttacagcggct

SEQ ID NO: 109707 - DNA, 17 bp, Arabidopsis thaliana
ggatatttctggaggat

SEQ ID NO: 109708 - DNA, 17 bp, Arabidopsis thaliana
ggatattttcaggactt

SEQ ID NO: 109709 - DNA, 17 bp, Arabidopsis thaliana
ggatattttcggaccat

SEQ ID NO: 109710 - DNA, 17 bp, Arabidopsis thaliana
ggatattttgtctaccg

SEQ ID NO: 109711 - DNA, 17 bp, Arabidopsis thaliana
ggatcaaaaatccgaaa

SEQ ID NO: 109712 - DNA, 17 bp, Arabidopsis thaliana
ggatcaaaacatgatca

SEQ ID NO: 109713 - DNA, 17 bp, Arabidopsis thaliana
ggatcaaacagtcaatt

SEQ ID NO: 109714 - DNA, 17 bp, Arabidopsis thaliana
ggatcaaacataggccg

SEQ ID NO: 109715 - DNA, 17 bp, Arabidopsis thaliana
ggatcaaaggatggtcc

SEQ ID NO: 109716 - DNA, 17 bp, Arabidopsis thaliana
ggatcaaagggtggtcc

SEQ ID NO: 109717 - DNA, 17 bp, Arabidopsis thaliana
ggatcaaaggtacgccg

SEQ ID NO: 109718 - DNA, 17 bp, Arabidopsis thaliana
ggatcaacatcctgtag

SEQ ID NO: 109719 - DNA, 17 bp, Arabidopsis thaliana
ggatcaaccgtgactga

SEQ ID NO: 109720 - DNA, 17 bp, Arabidopsis thaliana
ggatcaacctggctctg

SEQ ID NO: 109721 - DNA, 17 bp, Arabidopsis thaliana
ggatcaacggctactgt

SEQ ID NO: 109722 - DNA, 17 bp, Arabidopsis thaliana
ggatcaacgttttggga

SEQ ID NO: 109723 - DNA, 17 bp, Arabidopsis thaliana
ggatcaactttcattga

SEQ ID NO: 109724 - DNA, 17 bp, Arabidopsis thaliana
ggatcaactttttgtaa

SEQ ID NO: 109725 - DNA, 17 bp, Arabidopsis thaliana
ggatcaagaaacccatc

SEQ ID NO: 109726 - DNA, 17 bp, Arabidopsis thaliana
ggatcaagcggtgcgga

SEQ ID NO: 109727 - DNA, 17 bp, Arabidopsis thaliana
ggatcaagcggttagaa

SEQ ID NO: 109728 - DNA, 17 bp, Arabidopsis thaliana
ggatcaagcgtattagg

SEQ ID NO: 109729 - DNA, 17 bp, Arabidopsis thaliana
ggatcaagtgtaccggt

SEQ ID NO: 109730 - DNA, 17 bp, Arabidopsis thaliana
ggatcaagtgtcgtttg

SEQ ID NO: 109731 - DNA, 17 bp, Arabidopsis thaliana
ggatcaagttaagtacg

SEQ ID NO: 109732 - DNA, 17 bp, Arabidopsis thaliana
ggatcaagttccattgt

SEQ ID NO: 109733 - DNA, 17 bp, Arabidopsis thaliana
ggatcaagttgaggcga

SEQ ID NO: 109734 - DNA, 17 bp, Arabidopsis thaliana
ggatcaatgctcgaaaa

SEQ ID NO: 109735 - DNA, 17 bp, Arabidopsis thaliana
ggatcaattatgggttt

SEQ ID NO: 109736 - DNA, 17 bp, Arabidopsis thaliana
ggatcacaagctgttac

SEQ ID NO: 109737 - DNA, 17 bp, Arabidopsis thaliana
ggatcacaggactccgg

SEQ ID NO: 109738 - DNA, 17 bp, Arabidopsis thaliana
ggatcacaggacttcgg

SEQ ID NO: 109739 - DNA, 17 bp, Arabidopsis thaliana
ggatcaccgcaacccac

SEQ ID NO: 109740 - DNA, 17 bp, Arabidopsis thaliana
ggatcaccgcaacccga

SEQ ID NO: 109741 - DNA, 17 bp, Arabidopsis thaliana
ggatcaccgcttgctgt

SEQ ID NO: 109742 - DNA, 17 bp, Arabidopsis thaliana
ggatcaccttccgaata

SEQ ID NO: 109743 - DNA, 17 bp, Arabidopsis thaliana
ggatcacgcatcctgta

SEQ ID NO: 109744 - DNA, 17 bp, Arabidopsis thaliana
ggatcacggattctgtc

SEQ ID NO: 109745 - DNA, 17 bp, Arabidopsis thaliana
ggatcacggattctttc

SEQ ID NO: 109746 - DNA, 17 bp, Arabidopsis thaliana
ggatcacggtccgccta

SEQ ID NO: 109747 - DNA, 17 bp, Arabidopsis thaliana
ggatcacggtccgcctt

SEQ ID NO: 109748 - DNA, 17 bp, Arabidopsis thaliana
ggatcactgggtgttac

SEQ ID NO: 109749 - DNA, 17 bp, Arabidopsis thaliana
ggatcacttagtcgcat

SEQ ID NO: 109750 - DNA, 17 bp, Arabidopsis thaliana
ggatcacttgcgagaag

SEQ ID NO: 109751 - DNA, 17 bp, Arabidopsis thaliana
ggatcagaccttggtcc

SEQ ID NO: 109752 - DNA, 17 bp, Arabidopsis thaliana
ggatcagagattctggg

SEQ ID NO: 109753 - DNA, 17 bp, Arabidopsis thaliana
ggatcagagattgccca

SEQ ID NO: 109754 - DNA, 17 bp, Arabidopsis thaliana
ggatcagaggatagttg

SEQ ID NO: 109755 - DNA, 17 bp, Arabidopsis thaliana
ggatcagatcggtttag

SEQ ID NO: 109756 - DNA, 17 bp, Arabidopsis thaliana
ggatcagatctggaatg

SEQ ID NO: 109757 - DNA, 17 bp, Arabidopsis thaliana
ggatcagatcttgttca

SEQ ID NO: 109758 - DNA, 17 bp, Arabidopsis thaliana
ggatcagatttgttcag

SEQ ID NO: 109759 - DNA, 17 bp, Arabidopsis thaliana
ggatcagcaaatgcgtc

SEQ ID NO: 109760 - DNA, 17 bp, Arabidopsis thaliana
ggatcagccctttgtcg

SEQ ID NO: 109761 - DNA, 17 bp, Arabidopsis thaliana
ggatcagccgataatgt

SEQ ID NO: 109762 - DNA, 17 bp, Arabidopsis thaliana
ggatcagccgatagagt

SEQ ID NO: 109763 - DNA, 17 bp, Arabidopsis thaliana
ggatcagcggatgttgc

SEQ ID NO: 109764 - DNA, 17 bp, Arabidopsis thaliana
ggatcagcggatgttgt

SEQ ID NO: 109765 - DNA, 17 bp, Arabidopsis thaliana
ggatcagcttccttgag

SEQ ID NO: 109766 - DNA, 17 bp, Arabidopsis thaliana
ggatcaggaggttctgg

SEQ ID NO: 109767 - DNA, 17 bp, Arabidopsis thaliana
ggatcaggcagtgtggt

SEQ ID NO: 109768 - DNA, 17 bp, Arabidopsis thaliana
ggatcaggcctatctgc

SEQ ID NO: 109769 - DNA, 17 bp, Arabidopsis thaliana
ggatcaggcttttgttg

SEQ ID NO: 109770 - DNA, 17 bp, Arabidopsis thaliana
ggatcagggaacttcta

SEQ ID NO: 109771 - DNA, 17 bp, Arabidopsis thaliana
ggatcagggctgggcgc

SEQ ID NO: 109772 - DNA, 17 bp, Arabidopsis thaliana
ggatcagggctgggctc

SEQ ID NO: 109773 - DNA, 17 bp, Arabidopsis thaliana
ggatcaggtgaatcgag

SEQ ID NO: 109774 - DNA, 17 bp, Arabidopsis thaliana
ggatcagtagttgtcga

SEQ ID NO: 109775 - DNA, 17 bp, Arabidopsis thaliana
ggatcagtcacatcctg

SEQ ID NO: 109776 - DNA, 17 bp, Arabidopsis thaliana
ggatcagtcctcgtgtt

SEQ ID NO: 109777 - DNA, 17 bp, Arabidopsis thaliana
ggatcagtcgcattctg

SEQ ID NO: 109778 - DNA, 17 bp, Arabidopsis thaliana
ggatcagtctctctgtt

SEQ ID NO: 109779 - DNA, 17 bp, Arabidopsis thaliana
ggatcagtcttagtcgc

SEQ ID NO: 109780 - DNA, 17 bp, Arabidopsis thaliana
ggatcagttccatctac

SEQ ID NO: 109781 - DNA, 17 bp, Arabidopsis thaliana
ggatcagttggatggac

SEQ ID NO: 109782 - DNA, 17 bp, Arabidopsis thaliana
ggatcagttggtggagc

SEQ ID NO: 109783 - DNA, 17 bp, Arabidopsis thaliana
ggatcataaatttttcc

SEQ ID NO: 109784 - DNA, 17 bp, Arabidopsis thaliana
ggatcataatctgtctg

SEQ ID NO: 109785 - DNA, 17 bp, Arabidopsis thaliana
ggatcatagattgcttg

SEQ ID NO: 109786 - DNA, 17 bp, Arabidopsis thaliana
ggatcatatctcaccag

SEQ ID NO: 109787 - DNA, 17 bp, Arabidopsis thaliana
ggatcatatggtacatt

SEQ ID NO: 109788 - DNA, 17 bp, Arabidopsis thaliana
ggatcatcagatcaacc

SEQ ID NO: 109789 - DNA, 17 bp, Arabidopsis thaliana
ggatcatcaggagattt

SEQ ID NO: 109790 - DNA, 17 bp, Arabidopsis thaliana
ggatcatccagtggatg

SEQ ID NO: 109791 - DNA, 17 bp, Arabidopsis thaliana
ggatcatccatagaatc

SEQ ID NO: 109792 - DNA, 17 bp, Arabidopsis thaliana
ggatcatccctaaagac

SEQ ID NO: 109793 - DNA, 17 bp, Arabidopsis thaliana
ggatcatcctgtagatg

SEQ ID NO: 109794 - DNA, 17 bp, Arabidopsis thaliana
ggatcatctacggacca

SEQ ID NO: 109795 - DNA, 17 bp, Arabidopsis thaliana
ggatcatctacggaccg

SEQ ID NO: 109796 - DNA, 17 bp, Arabidopsis thaliana
ggatcatctgatccaaa

SEQ ID NO: 109797 - DNA, 17 bp, Arabidopsis thaliana
ggatcatctggatcgct

SEQ ID NO: 109798 - DNA, 17 bp, Arabidopsis thaliana
ggatcatctggatgata

SEQ ID NO: 109799 - DNA, 17 bp, Arabidopsis thaliana
ggatcatcttctgagct

SEQ ID NO: 109800 - DNA, 17 bp, Arabidopsis thaliana
ggatcatcttgtccgtt

SEQ ID NO: 109801 - DNA, 17 bp, Arabidopsis thaliana
ggatcatgaatttgcaa

SEQ ID NO: 109802 - DNA, 17 bp, Arabidopsis thaliana
ggatcatgccaagtttg

SEQ ID NO: 109803 - DNA, 17 bp, Arabidopsis thaliana
ggatcatgggttactgg

SEQ ID NO: 109804 - DNA, 17 bp, Arabidopsis thaliana
ggatcatgtggatggac

SEQ ID NO: 109805 - DNA, 17 bp, Arabidopsis thaliana
ggatcatgttcttgggc

SEQ ID NO: 109806 - DNA, 17 bp, Arabidopsis thaliana
ggatcattaccaggtaa

SEQ ID NO: 109807 - DNA, 17 bp, Arabidopsis thaliana
ggatcattattcttctt

SEQ ID NO: 109808 - DNA, 17 bp, Arabidopsis thaliana
ggatcattatttccggt

SEQ ID NO: 109809 - DNA, 17 bp, Arabidopsis thaliana
ggatcattcattagtcg

SEQ ID NO: 109810 - DNA, 17 bp, Arabidopsis thaliana
ggatcattctggtgtcc

SEQ ID NO: 109811 - DNA, 17 bp, Arabidopsis thaliana
ggatcattgtgacctgt

SEQ ID NO: 109812 - DNA, 17 bp, Arabidopsis thaliana
ggatcatttgcgccgat

SEQ ID NO: 109813 - DNA, 17 bp, Arabidopsis thaliana
ggatcatttgcggaccg

SEQ ID NO: 109814 - DNA, 17 bp, Arabidopsis thaliana
ggatcatttgcgtagat

SEQ ID NO: 109815 - DNA, 17 bp, Arabidopsis thaliana
ggatcatttggatgaag

SEQ ID NO: 109816 - DNA, 17 bp, Arabidopsis thaliana
ggatcatttggatggag

SEQ ID NO: 109817 - DNA, 17 bp, Arabidopsis thaliana
ggatcatttgtaacgcc

SEQ ID NO: 109818 - DNA, 17 bp, Arabidopsis thaliana
ggatcatttgtcaggcg

SEQ ID NO: 109819 - DNA, 17 bp, Arabidopsis thaliana
ggatcattttcgtgatt

SEQ ID NO: 109820 - DNA, 17 bp, Arabidopsis thaliana
ggatccaagacagtgtc

SEQ ID NO: 109821 - DNA, 17 bp, Arabidopsis thaliana
ggatccaatccttacta

SEQ ID NO: 109822 - DNA, 17 bp, Arabidopsis thaliana
ggatccaatgacaagtc

SEQ ID NO: 109823 - DNA, 17 bp, Arabidopsis thaliana
ggatccaatggagggca

SEQ ID NO: 109824 - DNA, 17 bp, Arabidopsis thaliana
ggatccacgatggagag

SEQ ID NO: 109825 - DNA, 17 bp, Arabidopsis thaliana
ggatccagacaaaagac

SEQ ID NO: 109826 - DNA, 17 bp, Arabidopsis thaliana
ggatccagacgaaccta

SEQ ID NO: 109827 - DNA, 17 bp, Arabidopsis thaliana
ggatccagagtttgctg

SEQ ID NO: 109828 - DNA, 17 bp, Arabidopsis thaliana
ggatccagcgacagaga

SEQ ID NO: 109829 - DNA, 17 bp, Arabidopsis thaliana
ggatccagcgacagcga

SEQ ID NO: 109830 - DNA, 17 bp, Arabidopsis thaliana
ggatccagcgtcagcga

SEQ ID NO: 109831 - DNA, 17 bp, Arabidopsis thaliana
ggatccagggtggatct

SEQ ID NO: 109832 - DNA, 17 bp, Arabidopsis thaliana
ggatccagtcgcatcct

SEQ ID NO: 109833 - DNA, 17 bp, Arabidopsis thaliana
ggatccatagctcagtg

SEQ ID NO: 109834 - DNA, 17 bp, Arabidopsis thaliana
ggatccatagtcgcatc

SEQ ID NO: 109835 - DNA, 17 bp, Arabidopsis thaliana
ggatccatccatcggga

SEQ ID NO: 109836 - DNA, 17 bp, Arabidopsis thaliana
ggatccatcctgtagat

SEQ ID NO: 109837 - DNA, 17 bp, Arabidopsis thaliana
ggatccatggcgcaatg

SEQ ID NO: 109838 - DNA, 17 bp, Arabidopsis thaliana
ggatccattgaagggta

SEQ ID NO: 109839 - DNA, 17 bp, Arabidopsis thaliana
ggatccattggagggca

SEQ ID NO: 109840 - DNA, 17 bp, Arabidopsis thaliana
ggatcccacggctctgg

SEQ ID NO: 109841 - DNA, 17 bp, Arabidopsis thaliana
ggatcccatcctcagat

SEQ ID NO: 109842 - DNA, 17 bp, Arabidopsis thaliana
ggatcccgccgattttc

SEQ ID NO: 109843 - DNA, 17 bp, Arabidopsis thaliana
ggatcccgggttcgttc

SEQ ID NO: 109844 - DNA, 17 bp, Arabidopsis thaliana
ggatcccggttccagat

SEQ ID NO: 109845 - DNA, 17 bp, Arabidopsis thaliana
ggatcccgtatcaacgg

SEQ ID NO: 109846 - DNA, 17 bp, Arabidopsis thaliana
ggatccctcgcgggtgc

SEQ ID NO: 109847 - DNA, 17 bp, Arabidopsis thaliana
ggatccctgtataggcc

SEQ ID NO: 109848 - DNA, 17 bp, Arabidopsis thaliana
ggatcccttagtcgcat

SEQ ID NO: 109849 - DNA, 17 bp, Arabidopsis thaliana
ggatccgaacggtgacc

SEQ ID NO: 109850 - DNA, 17 bp, Arabidopsis thaliana
ggatccgaacggtgact

SEQ ID NO: 109851 - DNA, 17 bp, Arabidopsis thaliana
ggatccgatcctgtaga

SEQ ID NO: 109852 - DNA, 17 bp, Arabidopsis thaliana
ggatccgattaagtttg

SEQ ID NO: 109853 - DNA, 17 bp, Arabidopsis thaliana
ggatccgcatcctgtag

SEQ ID NO: 109854 - DNA, 17 bp, Arabidopsis thaliana
ggatccgccactgctcg

SEQ ID NO: 109855 - DNA, 17 bp, Arabidopsis thaliana
ggatccgccgaagatga

SEQ ID NO: 109856 - DNA, 17 bp, Arabidopsis thaliana
ggatccggaaccatctg

SEQ ID NO: 109857 - DNA, 17 bp, Arabidopsis thaliana
ggatccggacgatagct

SEQ ID NO: 109858 - DNA, 17 bp, Arabidopsis thaliana
ggatccggatcctagtc

SEQ ID NO: 109859 - DNA, 17 bp, Arabidopsis thaliana
ggatccggatgatagct

SEQ ID NO: 109860 - DNA, 17 bp, Arabidopsis thaliana
ggatccgggagaagggg

SEQ ID NO: 109861 - DNA, 17 bp, Arabidopsis thaliana
ggatccggtgcattagt

SEQ ID NO: 109862 - DNA, 17 bp, Arabidopsis thaliana
ggatccggttctaaccg

SEQ ID NO: 109863 - DNA, 17 bp, Arabidopsis thaliana
ggatccgtagcgcaatg

SEQ ID NO: 109864 - DNA, 17 bp, Arabidopsis thaliana
ggatccgtgcgcaatgg

SEQ ID NO: 109865 - DNA, 17 bp, Arabidopsis thaliana
ggatccgtggcgcaatg

SEQ ID NO: 109866 - DNA, 17 bp, Arabidopsis thaliana
ggatccgttgcgcaatg

SEQ ID NO: 109867 - DNA, 17 bp, Arabidopsis thaliana
ggatcctaaccaagttg

SEQ ID NO: 109868 - DNA, 17 bp, Arabidopsis thaliana
ggatcctccataggcaa

SEQ ID NO: 109869 - DNA, 17 bp, Arabidopsis thaliana
ggatcctccattggcag

SEQ ID NO: 109870 - DNA, 17 bp, Arabidopsis thaliana
ggatcctgcgtgtgggc

SEQ ID NO: 109871 - DNA, 17 bp, Arabidopsis thaliana
ggatcctggataacatg

SEQ ID NO: 109872 - DNA, 17 bp, Arabidopsis thaliana
ggatcctgtcacttgac

SEQ ID NO: 109873 - DNA, 17 bp, Arabidopsis thaliana
ggatcctgttcatttgc

SEQ ID NO: 109874 - DNA, 17 bp, Arabidopsis thaliana
ggatccttagcgcatcc

SEQ ID NO: 109875 - DNA, 17 bp, Arabidopsis thaliana
ggatccttagtcgcaac

SEQ ID NO: 109876 - DNA, 17 bp, Arabidopsis thaliana
ggatccttagtcgcacc

SEQ ID NO: 109877 - DNA, 17 bp, Arabidopsis thaliana
ggatccttagtcgcatc

SEQ ID NO: 109878 - DNA, 17 bp, Arabidopsis thaliana
ggatccttcaccatcac

SEQ ID NO: 109879 - DNA, 17 bp, Arabidopsis thaliana
ggatccttctgtatctc

SEQ ID NO: 109880 - DNA, 17 bp, Arabidopsis thaliana
ggatccttgttcgacaa

SEQ ID NO: 109881 - DNA, 17 bp, Arabidopsis thaliana
ggatccttttgacccag

SEQ ID NO: 109882 - DNA, 17 bp, Arabidopsis thaliana
ggatccttttgacccgg

SEQ ID NO: 109883 - DNA, 17 bp, Arabidopsis thaliana
ggatcgaaaccgctctg

SEQ ID NO: 109884 - DNA, 17 bp, Arabidopsis thaliana
ggatcgaaacctggctc

SEQ ID NO: 109885 - DNA, 17 bp, Arabidopsis thaliana
ggatcgacgcggattac

SEQ ID NO: 109886 - DNA, 17 bp, Arabidopsis thaliana
ggatcgactaccgtatt

SEQ ID NO: 109887 - DNA, 17 bp, Arabidopsis thaliana
ggatcgagaattcattt

SEQ ID NO: 109888 - DNA, 17 bp, Arabidopsis thaliana
ggatcgataccccgcat

SEQ ID NO: 109889 - DNA, 17 bp, Arabidopsis thaliana
ggatcgatctaccaatc

SEQ ID NO: 109890 - DNA, 17 bp, Arabidopsis thaliana
ggatcgatctatcaatc

SEQ ID NO: 109891 - DNA, 17 bp, Arabidopsis thaliana
ggatcgatggagatgga

SEQ ID NO: 109892 - DNA, 17 bp, Arabidopsis thaliana
ggatcgatgggcttaga

SEQ ID NO: 109893 - DNA, 17 bp, Arabidopsis thaliana
ggatcgattggagttaa

SEQ ID NO: 109894 - DNA, 17 bp, Arabidopsis thaliana
ggatcgcaacctggctc

SEQ ID NO: 109895 - DNA, 17 bp, Arabidopsis thaliana
ggatcgcacgtctgcct

SEQ ID NO: 109896 - DNA, 17 bp, Arabidopsis thaliana
ggatcgcatcctgtaga

SEQ ID NO: 109897 - DNA, 17 bp, Arabidopsis thaliana
ggatcgcatggcctctg

SEQ ID NO: 109898 - DNA, 17 bp, Arabidopsis thaliana
ggatcgccggtccgcct

SEQ ID NO: 109899 - DNA, 17 bp, Arabidopsis thaliana
ggatcgccgttcttagt

SEQ ID NO: 109900 - DNA, 17 bp, Arabidopsis thaliana
ggatcgcgaaccgagac

SEQ ID NO: 109901 - DNA, 17 bp, Arabidopsis thaliana
ggatcgcgaccccaggt

SEQ ID NO: 109902 - DNA, 17 bp, Arabidopsis thaliana
ggatcgcggcgacgtgg

SEQ ID NO: 109903 - DNA, 17 bp, Arabidopsis thaliana
ggatcgcgggaattttg

SEQ ID NO: 109904 - DNA, 17 bp, Arabidopsis thaliana
ggatcgctaacctaaga

SEQ ID NO: 109905 - DNA, 17 bp, Arabidopsis thaliana
ggatcgctctctagcct

SEQ ID NO: 109906 - DNA, 17 bp, Arabidopsis thaliana
ggatcgctggagctcgg

SEQ ID NO: 109907 - DNA, 17 bp, Arabidopsis thaliana
ggatcgctggtcgctgg

SEQ ID NO: 109908 - DNA, 17 bp, Arabidopsis thaliana
ggatcggaaccaggctc

SEQ ID NO: 109909 - DNA, 17 bp, Arabidopsis thaliana
ggatcggaacctggctc

SEQ ID NO: 109910 - DNA, 17 bp, Arabidopsis thaliana
ggatcggaaggaattgt

SEQ ID NO: 109911 - DNA, 17 bp, Arabidopsis thaliana
ggatcggcaagttgtcc

SEQ ID NO: 109912 - DNA, 17 bp, Arabidopsis thaliana
ggatcggccggtccgcc

SEQ ID NO: 109913 - DNA, 17 bp, Arabidopsis thaliana
ggatcgggctctgatac

SEQ ID NO: 109914 - DNA, 17 bp, Arabidopsis thaliana
ggatcgggtgttgatta

SEQ ID NO: 109915 - DNA, 17 bp, Arabidopsis thaliana
ggatcggtagaggagtg

SEQ ID NO: 109916 - DNA, 17 bp, Arabidopsis thaliana
ggatcggtcctgaatat

SEQ ID NO: 109917 - DNA, 17 bp, Arabidopsis thaliana
ggatcggttcccggctg

SEQ ID NO: 109918 - DNA, 17 bp, Arabidopsis thaliana
ggatcgtaacctgctct

SEQ ID NO: 109919 - DNA, 17 bp, Arabidopsis thaliana
ggatcgtaacctggctc

SEQ ID NO: 109920 - DNA, 17 bp, Arabidopsis thaliana
ggatcgtaacctggttc

SEQ ID NO: 109921 - DNA, 17 bp, Arabidopsis thaliana
ggatcgtaatcggaccg

SEQ ID NO: 109922 - DNA, 17 bp, Arabidopsis thaliana
ggatcgtacttgtcggc

SEQ ID NO: 109923 - DNA, 17 bp, Arabidopsis thaliana
ggatcgtcaggttggcc

SEQ ID NO: 109924 - DNA, 17 bp, Arabidopsis thaliana
ggatcgtgataatcgaa

SEQ ID NO: 109925 - DNA, 17 bp, Arabidopsis thaliana
ggatcgtgccacgtgtc

SEQ ID NO: 109926 - DNA, 17 bp, Arabidopsis thaliana
ggatcgtgccatgtgtc

SEQ ID NO: 109927 - DNA, 17 bp, Arabidopsis thaliana
ggatcgtggaaaagtgt

SEQ ID NO: 109928 - DNA, 17 bp, Arabidopsis thaliana
ggatcgtggcacgaggt

SEQ ID NO: 109929 - DNA, 17 bp, Arabidopsis thaliana
ggatcgttaccccgcat

SEQ ID NO: 109930 - DNA, 17 bp, Arabidopsis thaliana
ggatcgttacggtgccc

SEQ ID NO: 109931 - DNA, 17 bp, Arabidopsis thaliana
ggatcgttcccaaaaat

SEQ ID NO: 109932 - DNA, 17 bp, Arabidopsis thaliana
ggatcgttcctaaaatt

SEQ ID NO: 109933 - DNA, 17 bp, Arabidopsis thaliana
ggatcgttggagtagct

SEQ ID NO: 109934 - DNA, 17 bp, Arabidopsis thaliana
ggatcgttttgaatgtg

SEQ ID NO: 109935 - DNA, 17 bp, Arabidopsis thaliana
ggatcgttttgcgggat

SEQ ID NO: 109936 - DNA, 17 bp, Arabidopsis thaliana
ggatctaaactgcgagt

SEQ ID NO: 109937 - DNA, 17 bp, Arabidopsis thaliana
ggatctaaagacggatc

SEQ ID NO: 109938 - DNA, 17 bp, Arabidopsis thaliana
ggatctaaagacgggtc

SEQ ID NO: 109939 - DNA, 17 bp, Arabidopsis thaliana
ggatctaaagtccggtt

SEQ ID NO: 109940 - DNA, 17 bp, Arabidopsis thaliana
ggatctaacttgcggac

SEQ ID NO: 109941 - DNA, 17 bp, Arabidopsis thaliana
ggatctaaggtgtttgg

SEQ ID NO: 109942 - DNA, 17 bp, Arabidopsis thaliana
ggatctaagtagtttgc

SEQ ID NO: 109943 - DNA, 17 bp, Arabidopsis thaliana
ggatctaatagatcgaa

SEQ ID NO: 109944 - DNA, 17 bp, Arabidopsis thaliana
ggatctacctggttgat

SEQ ID NO: 109945 - DNA, 17 bp, Arabidopsis thaliana
ggatctacggtcctgaa

SEQ ID NO: 109946 - DNA, 17 bp, Arabidopsis thaliana
ggatctacgtttagctc

SEQ ID NO: 109947 - DNA, 17 bp, Arabidopsis thaliana
ggatctacttttaggag

SEQ ID NO: 109948 - DNA, 17 bp, Arabidopsis thaliana
ggatctagaagaattca

SEQ ID NO: 109949 - DNA, 17 bp, Arabidopsis thaliana
ggatctagccaaagttg

SEQ ID NO: 109950 - DNA, 17 bp, Arabidopsis thaliana
ggatctagccctttgtc

SEQ ID NO: 109951 - DNA, 17 bp, Arabidopsis thaliana
ggatctagctctgattc

SEQ ID NO: 109952 - DNA, 17 bp, Arabidopsis thaliana
ggatctaggacgggttt

SEQ ID NO: 109953 - DNA, 17 bp, Arabidopsis thaliana
ggatctaggataggatt

SEQ ID NO: 109954 - DNA, 17 bp, Arabidopsis thaliana
ggatctagtcgcatcct

SEQ ID NO: 109955 - DNA, 17 bp, Arabidopsis thaliana
ggatctagtcgcattct

SEQ ID NO: 109956 - DNA, 17 bp, Arabidopsis thaliana
ggatctatcatgccaga

SEQ ID NO: 109957 - DNA, 17 bp, Arabidopsis thaliana
ggatctatcggaaaaac

SEQ ID NO: 109958 - DNA, 17 bp, Arabidopsis thaliana
ggatctatctgattttt

SEQ ID NO: 109959 - DNA, 17 bp, Arabidopsis thaliana
ggatctatggtgtagtg

SEQ ID NO: 109960 - DNA, 17 bp, Arabidopsis thaliana
ggatctattatttgatg

SEQ ID NO: 109961 - DNA, 17 bp, Arabidopsis thaliana
ggatctattgggtccta

SEQ ID NO: 109962 - DNA, 17 bp, Arabidopsis thaliana
ggatctatttggccgca

SEQ ID NO: 109963 - DNA, 17 bp, Arabidopsis thaliana
ggatctcaccctcgttc

SEQ ID NO: 109964 - DNA, 17 bp, Arabidopsis thaliana
ggatctcactcctcttc

SEQ ID NO: 109965 - DNA, 17 bp, Arabidopsis thaliana
ggatctcatcaatgata

SEQ ID NO: 109966 - DNA, 17 bp, Arabidopsis thaliana
ggatctccttacgcatt

SEQ ID NO: 109967 - DNA, 17 bp, Arabidopsis thaliana
ggatctcgcatggttcc

SEQ ID NO: 109968 - DNA, 17 bp, Arabidopsis thaliana
ggatctcggaccaggct

SEQ ID NO: 109969 - DNA, 17 bp, Arabidopsis thaliana
ggatctcggtggatctt

SEQ ID NO: 109970 - DNA, 17 bp, Arabidopsis thaliana
ggatctcgtggttgtat

SEQ ID NO: 109971 - DNA, 17 bp, Arabidopsis thaliana
ggatctctataagtcgg

SEQ ID NO: 109972 - DNA, 17 bp, Arabidopsis thaliana
ggatctctatacgtcgg

SEQ ID NO: 109973 - DNA, 17 bp, Arabidopsis thaliana
ggatctctatgctgcag

SEQ ID NO: 109974 - DNA, 17 bp, Arabidopsis thaliana
ggatctctattgcttct

SEQ ID NO: 109975 - DNA, 17 bp, Arabidopsis thaliana
ggatctctcggcaacgg

SEQ ID NO: 109976 - DNA, 17 bp, Arabidopsis thaliana
ggatctctggattcgcg

SEQ ID NO: 109977 - DNA, 17 bp, Arabidopsis thaliana
ggatctctgtcttcgtt

SEQ ID NO: 109978 - DNA, 17 bp, Arabidopsis thaliana
ggatctctgtgggaacg

SEQ ID NO: 109979 - DNA, 17 bp, Arabidopsis thaliana
ggatctgaaccctcatt

SEQ ID NO: 109980 - DNA, 17 bp, Arabidopsis thaliana
ggatctgaagctgccag

SEQ ID NO: 109981 - DNA, 17 bp, Arabidopsis thaliana
ggatctgacatagagcg

SEQ ID NO: 109982 - DNA, 17 bp, Arabidopsis thaliana
ggatctgacatggagag

SEQ ID NO: 109983 - DNA, 17 bp, Arabidopsis thaliana
ggatctgaccaaagttg

SEQ ID NO: 109984 - DNA, 17 bp, Arabidopsis thaliana
ggatctgaggcaggaat

SEQ ID NO: 109985 - DNA, 17 bp, Arabidopsis thaliana
ggatctgatccttcgat

SEQ ID NO: 109986 - DNA, 17 bp, Arabidopsis thaliana
ggatctgattggttcat

SEQ ID NO: 109987 - DNA, 17 bp, Arabidopsis thaliana
ggatctgattggttgat

SEQ ID NO: 109988 - DNA, 17 bp, Arabidopsis thaliana
ggatctgattggttgtt

SEQ ID NO: 109989 - DNA, 17 bp, Arabidopsis thaliana
ggatctgcagccaagga

SEQ ID NO: 109990 - DNA, 17 bp, Arabidopsis thaliana
ggatctgcctatgcggg

SEQ ID NO: 109991 - DNA, 17 bp, Arabidopsis thaliana
ggatctgctgcttaagc

SEQ ID NO: 109992 - DNA, 17 bp, Arabidopsis thaliana
ggatctgcttcttgtgg

SEQ ID NO: 109993 - DNA, 17 bp, Arabidopsis thaliana
ggatctgctttgggcgc

SEQ ID NO: 109994 - DNA, 17 bp, Arabidopsis thaliana
ggatctggatacctttc

SEQ ID NO: 109995 - DNA, 17 bp, Arabidopsis thaliana
ggatctggccaaagttc

SEQ ID NO: 109996 - DNA, 17 bp, Arabidopsis thaliana
ggatctggccaaagttg

SEQ ID NO: 109997 - DNA, 17 bp, Arabidopsis thaliana
ggatctggctaattcgt

SEQ ID NO: 109998 - DNA, 17 bp, Arabidopsis thaliana
ggatctggctccagtta

SEQ ID NO: 109999 - DNA, 17 bp, Arabidopsis thaliana
ggatctggctctctaca

SEQ ID NO: 110000 - DNA, 17 bp, Arabidopsis thaliana
ggatctgggatccgatt

SEQ ID NO: 110001 - DNA, 17 bp, Arabidopsis thaliana
ggatctggtccatcatg

SEQ ID NO: 110002 - DNA, 17 bp, Arabidopsis thaliana
ggatctggtggagcgat

SEQ ID NO: 110003 - DNA, 17 bp, Arabidopsis thaliana
ggatctggtggattacg

SEQ ID NO: 110004 - DNA, 17 bp, Arabidopsis thaliana
ggatctggtgtagatga

SEQ ID NO: 110005 - DNA, 17 bp, Arabidopsis thaliana
ggatctggtgtcctagg

SEQ ID NO: 110006 - DNA, 17 bp, Arabidopsis thaliana
ggatctgttttggagca

SEQ ID NO: 110007 - DNA, 17 bp, Arabidopsis thaliana
ggatcttaaatacggct

SEQ ID NO: 110008 - DNA, 17 bp, Arabidopsis thaliana
ggatcttaggtcgtttc

SEQ ID NO: 110009 - DNA, 17 bp, Arabidopsis thaliana
ggatcttaggtttcgaa

SEQ ID NO: 110010 - DNA, 17 bp, Arabidopsis thaliana
ggatcttagtcgcatcc

SEQ ID NO: 110011 - DNA, 17 bp, Arabidopsis thaliana
ggatcttcaacagttgc

SEQ ID NO: 110012 - DNA, 17 bp, Arabidopsis thaliana
ggatcttcagccctttg

SEQ ID NO: 110013 - DNA, 17 bp, Arabidopsis thaliana
ggatcttccatagcaac

SEQ ID NO: 110014 - DNA, 17 bp, Arabidopsis thaliana
ggatcttcgatgtggga

SEQ ID NO: 110015 - DNA, 17 bp, Arabidopsis thaliana
ggatcttcgggtttgga

SEQ ID NO: 110016 - DNA, 17 bp, Arabidopsis thaliana
ggatcttctcaaatcac

SEQ ID NO: 110017 - DNA, 17 bp, Arabidopsis thaliana
ggatcttctttgctctt

SEQ ID NO: 110018 - DNA, 17 bp, Arabidopsis thaliana
ggatcttgaaagtgact

SEQ ID NO: 110019 - DNA, 17 bp, Arabidopsis thaliana
ggatcttgaaggcgtaa

SEQ ID NO: 110020 - DNA, 17 bp, Arabidopsis thaliana
ggatcttgatccttcga

SEQ ID NO: 110021 - DNA, 17 bp, Arabidopsis thaliana
ggatcttgcgctgcaac

SEQ ID NO: 110022 - DNA, 17 bp, Arabidopsis thaliana
ggatcttgcggtttaag

SEQ ID NO: 110023 - DNA, 17 bp, Arabidopsis thaliana
ggatcttgcggtttagg

SEQ ID NO: 110024 - DNA, 17 bp, Arabidopsis thaliana
ggatcttgctctgtcag

SEQ ID NO: 110025 - DNA, 17 bp, Arabidopsis thaliana
ggatcttggactgaagg

SEQ ID NO: 110026 - DNA, 17 bp, Arabidopsis thaliana
ggatcttggagcaacta

SEQ ID NO: 110027 - DNA, 17 bp, Arabidopsis thaliana
ggatcttggggattgct

SEQ ID NO: 110028 - DNA, 17 bp, Arabidopsis thaliana
ggatcttggtcttggct

SEQ ID NO: 110029 - DNA, 17 bp, Arabidopsis thaliana
ggatcttgtaagcctaa

SEQ ID NO: 110030 - DNA, 17 bp, Arabidopsis thaliana
ggatctttagcctttca

SEQ ID NO: 110031 - DNA, 17 bp, Arabidopsis thaliana
ggatctttatgacttgt

SEQ ID NO: 110032 - DNA, 17 bp, Arabidopsis thaliana
ggatctttcggacttcc

SEQ ID NO: 110033 - DNA, 17 bp, Arabidopsis thaliana
ggatctttctgggtttc

SEQ ID NO: 110034 - DNA, 17 bp, Arabidopsis thaliana
ggatctttgatgtttct

SEQ ID NO: 110035 - DNA, 17 bp, Arabidopsis thaliana
ggatctttgctgtcaag

SEQ ID NO: 110036 - DNA, 17 bp, Arabidopsis thaliana
ggatctttggagagggt

SEQ ID NO: 110037 - DNA, 17 bp, Arabidopsis thaliana
ggatctttggcccattc

SEQ ID NO: 110038 - DNA, 17 bp, Arabidopsis thaliana
ggatctttggtaaggca

SEQ ID NO: 110039 - DNA, 17 bp, Arabidopsis thaliana
ggatgaaagatactggg

SEQ ID NO: 110040 - DNA, 17 bp, Arabidopsis thaliana
ggatgaaccttatggtg

SEQ ID NO: 110041 - DNA, 17 bp, Arabidopsis thaliana
ggatgaacgctggcggc

SEQ ID NO: 110042 - DNA, 17 bp, Arabidopsis thaliana
ggatgaagcccgacccg

SEQ ID NO: 110043 - DNA, 17 bp, Arabidopsis thaliana
ggatgaagcttgggtga

SEQ ID NO: 110044 - DNA, 17 bp, Arabidopsis thaliana
ggatgacaaacaaacca

SEQ ID NO: 110045 - DNA, 17 bp, Arabidopsis thaliana
ggatgacatgacgcagt

SEQ ID NO: 110046 - DNA, 17 bp, Arabidopsis thaliana
ggatgacccagtgactc

SEQ ID NO: 110047 - DNA, 17 bp, Arabidopsis thaliana
ggatgagattggctatc

SEQ ID NO: 110048 - DNA, 17 bp, Arabidopsis thaliana
ggatgagctgagttgag

SEQ ID NO: 110049 - DNA, 17 bp, Arabidopsis thaliana
ggatgaggatgatagaa

SEQ ID NO: 110050 - DNA, 17 bp, Arabidopsis thaliana
ggatgagttgtggttag

SEQ ID NO: 110051 - DNA, 17 bp, Arabidopsis thaliana
ggatgataaggcgtggc

SEQ ID NO: 110052 - DNA, 17 bp, Arabidopsis thaliana
ggatgatacatctgaat

SEQ ID NO: 110053 - DNA, 17 bp, Arabidopsis thaliana
ggatgatagatgatggt

SEQ ID NO: 110054 - DNA, 17 bp, Arabidopsis thaliana
ggatgatcagccacact

SEQ ID NO: 110055 - DNA, 17 bp, Arabidopsis thaliana
ggatgatcatcgtgcag

SEQ ID NO: 110056 - DNA, 17 bp, Arabidopsis thaliana
ggatgatcatgttcgca

SEQ ID NO: 110057 - DNA, 17 bp, Arabidopsis thaliana
ggatgatcgtggtctgc

SEQ ID NO: 110058 - DNA, 17 bp, Arabidopsis thaliana
ggatgatctggttcaac

SEQ ID NO: 110059 - DNA, 17 bp, Arabidopsis thaliana
ggatgatggatgtccac

SEQ ID NO: 110060 - DNA, 17 bp, Arabidopsis thaliana
ggatgatggtcggggtg

SEQ ID NO: 110061 - DNA, 17 bp, Arabidopsis thaliana
ggatgatgttggattcg

SEQ ID NO: 110062 - DNA, 17 bp, Arabidopsis thaliana
ggatgattacggggttt

SEQ ID NO: 110063 - DNA, 17 bp, Arabidopsis thaliana
ggatgattcatccgact

SEQ ID NO: 110064 - DNA, 17 bp, Arabidopsis thaliana
ggatgattcatttggat

SEQ ID NO: 110065 - DNA, 17 bp, Arabidopsis thaliana
ggatgcagcggttcgag

SEQ ID NO: 110066 - DNA, 17 bp, Arabidopsis thaliana
ggatgccagcggttcga

SEQ ID NO: 110067 - DNA, 17 bp, Arabidopsis thaliana
ggatgcccgggcctcgc

SEQ ID NO: 110068 - DNA, 17 bp, Arabidopsis thaliana
ggatgcgactaagacca

SEQ ID NO: 110069 - DNA, 17 bp, Arabidopsis thaliana
ggatgcgactaagaccg

SEQ ID NO: 110070 - DNA, 17 bp, Arabidopsis thaliana
ggatgcgatcataccag

SEQ ID NO: 110071 - DNA, 17 bp, Arabidopsis thaliana
ggatgcgatcatactag

SEQ ID NO: 110072 - DNA, 17 bp, Arabidopsis thaliana
ggatgcgcaccaatgca

SEQ ID NO: 110073 - DNA, 17 bp, Arabidopsis thaliana
ggatgcggaacggagca

SEQ ID NO: 110074 - DNA, 17 bp, Arabidopsis thaliana
ggatgcggttttagtca

SEQ ID NO: 110075 - DNA, 17 bp, Arabidopsis thaliana
ggatgcgtgcttgtgac

SEQ ID NO: 110076 - DNA, 17 bp, Arabidopsis thaliana
ggatgctaacgcaatgt

SEQ ID NO: 110077 - DNA, 17 bp, Arabidopsis thaliana
ggatgctatgttgctgc

SEQ ID NO: 110078 - DNA, 17 bp, Arabidopsis thaliana
ggatgctattgcatact

SEQ ID NO: 110079 - DNA, 17 bp, Arabidopsis thaliana
ggatgctccgatctact

SEQ ID NO: 110080 - DNA, 17 bp, Arabidopsis thaliana
ggatggaataatttcag

SEQ ID NO: 110081 - DNA, 17 bp, Arabidopsis thaliana
ggatggacaacggatta

SEQ ID NO: 110082 - DNA, 17 bp, Arabidopsis thaliana
ggatggaccctcaaatc

SEQ ID NO: 110083 - DNA, 17 bp, Arabidopsis thaliana
ggatggagaaacaaaca

SEQ ID NO: 110084 - DNA, 17 bp, Arabidopsis thaliana
ggatggagaacaaactg

SEQ ID NO: 110085 - DNA, 17 bp, Arabidopsis thaliana
ggatggagattctctaa

SEQ ID NO: 110086 - DNA, 17 bp, Arabidopsis thaliana
ggatggaggaatttggg

SEQ ID NO: 110087 - DNA, 17 bp, Arabidopsis thaliana
ggatggatcatgtggat

SEQ ID NO: 110088 - DNA, 17 bp, Arabidopsis thaliana
ggatggatccggctttt

SEQ ID NO: 110089 - DNA, 17 bp, Arabidopsis thaliana
ggatggatcgctcaaat

SEQ ID NO: 110090 - DNA, 17 bp, Arabidopsis thaliana
ggatggatcggccagat

SEQ ID NO: 110091 - DNA, 17 bp, Arabidopsis thaliana
ggatggatgtctgagcg

SEQ ID NO: 110092 - DNA, 17 bp, Arabidopsis thaliana
ggatggatttggcggga

SEQ ID NO: 110093 - DNA, 17 bp, Arabidopsis thaliana
ggatggccggttcagat

SEQ ID NO: 110094 - DNA, 17 bp, Arabidopsis thaliana
ggatggcgatggttttc

SEQ ID NO: 110095 - DNA, 17 bp, Arabidopsis thaliana
ggatggcgcttaagcgc

SEQ ID NO: 110096 - DNA, 17 bp, Arabidopsis thaliana
ggatggcgcttacgcgc

SEQ ID NO: 110097 - DNA, 17 bp, Arabidopsis thaliana
ggatggctcagatcttt

SEQ ID NO: 110098 - DNA, 17 bp, Arabidopsis thaliana
ggatggctcatgttgat

SEQ ID NO: 110099 - DNA, 17 bp, Arabidopsis thaliana
ggatgggagttggtccg

SEQ ID NO: 110100 - DNA, 17 bp, Arabidopsis thaliana
ggatgggggccggcgag

SEQ ID NO: 110101 - DNA, 17 bp, Arabidopsis thaliana
ggatgggggggcagagg

SEQ ID NO: 110102 - DNA, 17 bp, Arabidopsis thaliana
ggatgggtcggccggtc

SEQ ID NO: 110103 - DNA, 17 bp, Arabidopsis thaliana
ggatgggtgacctcccg

SEQ ID NO: 110104 - DNA, 17 bp, Arabidopsis thaliana
ggatgggtgaccttccg

SEQ ID NO: 110105 - DNA, 17 bp, Arabidopsis thaliana
ggatgggttatattccg

SEQ ID NO: 110106 - DNA, 17 bp, Arabidopsis thaliana
ggatgggtttggcggaa

SEQ ID NO: 110107 - DNA, 17 bp, Arabidopsis thaliana
ggatggtagaaacatag

SEQ ID NO: 110108 - DNA, 17 bp, Arabidopsis thaliana
ggatggtccatctgaat

SEQ ID NO: 110109 - DNA, 17 bp, Arabidopsis thaliana
ggatggtcgggtgtggc

SEQ ID NO: 110110 - DNA, 17 bp, Arabidopsis thaliana
ggatggtgagggacgac

SEQ ID NO: 110111 - DNA, 17 bp, Arabidopsis thaliana
ggatggtgatggcgtcg

SEQ ID NO: 110112 - DNA, 17 bp, Arabidopsis thaliana
ggatggtggagcgattt

SEQ ID NO: 110113 - DNA, 17 bp, Arabidopsis thaliana
ggatggtggtcgtctgc

SEQ ID NO: 110114 - DNA, 17 bp, Arabidopsis thaliana
ggatggtgtactacggg

SEQ ID NO: 110115 - DNA, 17 bp, Arabidopsis thaliana
ggatggttcgtgtcttt

SEQ ID NO: 110116 - DNA, 17 bp, Arabidopsis thaliana
ggatggttgtgaaaggt

SEQ ID NO: 110117 - DNA, 17 bp, Arabidopsis thaliana
ggatggttgtgaaagtt

SEQ ID NO: 110118 - DNA, 17 bp, Arabidopsis thaliana
ggatggtttcaggcttc

SEQ ID NO: 110119 - DNA, 17 bp, Arabidopsis thaliana
ggatgtaatggacatgg

SEQ ID NO: 110120 - DNA, 17 bp, Arabidopsis thaliana
ggatgtacccattcgag

SEQ ID NO: 110121 - DNA, 17 bp, Arabidopsis thaliana
ggatgtagagacggagt

SEQ ID NO: 110122 - DNA, 17 bp, Arabidopsis thaliana
ggatgtagtggctttgt

SEQ ID NO: 110123 - DNA, 17 bp, Arabidopsis thaliana
ggatgtcaagtatgctc

SEQ ID NO: 110124 - DNA, 17 bp, Arabidopsis thaliana
ggatgtcagcggtccca

SEQ ID NO: 110125 - DNA, 17 bp, Arabidopsis thaliana
ggatgtcagcggtccga

SEQ ID NO: 110126 - DNA, 17 bp, Arabidopsis thaliana
ggatgtcagcggttcga

SEQ ID NO: 110127 - DNA, 17 bp, Arabidopsis thaliana
ggatgtcagcggttgag

SEQ ID NO: 110128 - DNA, 17 bp, Arabidopsis thaliana
ggatgtcatgtgctcga

SEQ ID NO: 110129 - DNA, 17 bp, Arabidopsis thaliana
ggatgtcggattcagac

SEQ ID NO: 110130 - DNA, 17 bp, Arabidopsis thaliana
ggatgtcgttttcacag

SEQ ID NO: 110131 - DNA, 17 bp, Arabidopsis thaliana
ggatgttccatctgaat

SEQ ID NO: 110132 - DNA, 17 bp, Arabidopsis thaliana
ggatgttccgagactac

SEQ ID NO: 110133 - DNA, 17 bp, Arabidopsis thaliana
ggatgttgcttatagga

SEQ ID NO: 110134 - DNA, 17 bp, Arabidopsis thaliana
ggatgttgtcgggcctg

SEQ ID NO: 110135 - DNA, 17 bp, Arabidopsis thaliana
ggatgttgttaaccagg

SEQ ID NO: 110136 - DNA, 17 bp, Arabidopsis thaliana
ggatgtttacagtgcgt

SEQ ID NO: 110137 - DNA, 17 bp, Arabidopsis thaliana
ggatgtttctacagagt

SEQ ID NO: 110138 - DNA, 17 bp, Arabidopsis thaliana
ggatgtttgtagggttt

SEQ ID NO: 110139 - DNA, 17 bp, Arabidopsis thaliana
ggatgttttcttttgtc

SEQ ID NO: 110140 - DNA, 17 bp, Arabidopsis thaliana
ggatgttttggcgaaag

SEQ ID NO: 110141 - DNA, 17 bp, Arabidopsis thaliana
ggattaaaaggtcgacg

SEQ ID NO: 110142 - DNA, 17 bp, Arabidopsis thaliana
ggattaaacacttgcgt

SEQ ID NO: 110143 - DNA, 17 bp, Arabidopsis thaliana
ggattaacaattgtttc

SEQ ID NO: 110144 - DNA, 17 bp, Arabidopsis thaliana
ggattaaccagttggag

SEQ ID NO: 110145 - DNA, 17 bp, Arabidopsis thaliana
ggattaaccttggaccc

SEQ ID NO: 110146 - DNA, 17 bp, Arabidopsis thaliana
ggattaacgagattccc

SEQ ID NO: 110147 - DNA, 17 bp, Arabidopsis thaliana
ggattaacttgacctcc

SEQ ID NO: 110148 - DNA, 17 bp, Arabidopsis thaliana
ggattaagcatgccgtc

SEQ ID NO: 110149 - DNA, 17 bp, Arabidopsis thaliana
ggattaagggttcattg

SEQ ID NO: 110150 - DNA, 17 bp, Arabidopsis thaliana
ggattaatccgtcagcg

SEQ ID NO: 110151 - DNA, 17 bp, Arabidopsis thaliana
ggattacaaaccatata

SEQ ID NO: 110152 - DNA, 17 bp, Arabidopsis thaliana
ggattacaacgtcgatg

SEQ ID NO: 110153 - DNA, 17 bp, Arabidopsis thaliana
ggattacaatgcgaacg

SEQ ID NO: 110154 - DNA, 17 bp, Arabidopsis thaliana
ggattacaggctttggc

SEQ ID NO: 110155 - DNA, 17 bp, Arabidopsis thaliana
ggattaccgtttatttc

SEQ ID NO: 110156 - DNA, 17 bp, Arabidopsis thaliana
ggattacgagatttgac

SEQ ID NO: 110157 - DNA, 17 bp, Arabidopsis thaliana
ggattacggactttgac

SEQ ID NO: 110158 - DNA, 17 bp, Arabidopsis thaliana
ggattacgggcttcgaa

SEQ ID NO: 110159 - DNA, 17 bp, Arabidopsis thaliana
ggattacggggttcggc

SEQ ID NO: 110160 - DNA, 17 bp, Arabidopsis thaliana
ggattacgggtgttgtt

SEQ ID NO: 110161 - DNA, 17 bp, Arabidopsis thaliana
ggattacgggtttcggc

SEQ ID NO: 110162 - DNA, 17 bp, Arabidopsis thaliana
ggattacggtggcggcc

SEQ ID NO: 110163 - DNA, 17 bp, Arabidopsis thaliana
ggattacggtggcggct

SEQ ID NO: 110164 - DNA, 17 bp, Arabidopsis thaliana
ggattacgtttttggcg

SEQ ID NO: 110165 - DNA, 17 bp, Arabidopsis thaliana
ggattactgtgccaaac

SEQ ID NO: 110166 - DNA, 17 bp, Arabidopsis thaliana
ggattagacagtgtggt

SEQ ID NO: 110167 - DNA, 17 bp, Arabidopsis thaliana
ggattagactctcatta

SEQ ID NO: 110168 - DNA, 17 bp, Arabidopsis thaliana
ggattagatggtatgac

SEQ ID NO: 110169 - DNA, 17 bp, Arabidopsis thaliana
ggattagattcacgcac

SEQ ID NO: 110170 - DNA, 17 bp, Arabidopsis thaliana
ggattagcaaactatgc

SEQ ID NO: 110171 - DNA, 17 bp, Arabidopsis thaliana
ggattaggggtgttcag

SEQ ID NO: 110172 - DNA, 17 bp, Arabidopsis thaliana
ggattagtagacgcgaa

SEQ ID NO: 110173 - DNA, 17 bp, Arabidopsis thaliana
ggattagtctgcagatt

SEQ ID NO: 110174 - DNA, 17 bp, Arabidopsis thaliana
ggattagttgcgcttat

SEQ ID NO: 110175 - DNA, 17 bp, Arabidopsis thaliana
ggattagttgctgattc

SEQ ID NO: 110176 - DNA, 17 bp, Arabidopsis thaliana
ggattagtttttggccc

SEQ ID NO: 110177 - DNA, 17 bp, Arabidopsis thaliana
ggattatatggtgtgac

SEQ ID NO: 110178 - DNA, 17 bp, Arabidopsis thaliana
ggattatctgaatgaac

SEQ ID NO: 110179 - DNA, 17 bp, Arabidopsis thaliana
ggattatgactgaacgc

SEQ ID NO: 110180 - DNA, 17 bp, Arabidopsis thaliana
ggattatgattccacaa

SEQ ID NO: 110181 - DNA, 17 bp, Arabidopsis thaliana
ggattatgtgttatgga

SEQ ID NO: 110182 - DNA, 17 bp, Arabidopsis thaliana
ggattattgtataactg

SEQ ID NO: 110183 - DNA, 17 bp, Arabidopsis thaliana
ggattatttccatcgcc

SEQ ID NO: 110184 - DNA, 17 bp, Arabidopsis thaliana
ggattatttgcctcttg

SEQ ID NO: 110185 - DNA, 17 bp, Arabidopsis thaliana
ggattcaattctgggac

SEQ ID NO: 110186 - DNA, 17 bp, Arabidopsis thaliana
ggattcaccgcaaatac

SEQ ID NO: 110187 - DNA, 17 bp, Arabidopsis thaliana
ggattcagattaagttt

SEQ ID NO: 110188 - DNA, 17 bp, Arabidopsis thaliana
ggattcagcagttctcg

SEQ ID NO: 110189 - DNA, 17 bp, Arabidopsis thaliana
ggattcagcctatttct

SEQ ID NO: 110190 - DNA, 17 bp, Arabidopsis thaliana
ggattcagcgacagcga

SEQ ID NO: 110191 - DNA, 17 bp, Arabidopsis thaliana
ggattcatttgctgtgc

SEQ ID NO: 110192 - DNA, 17 bp, Arabidopsis thaliana
ggattccaacgacgcgg

SEQ ID NO: 110193 - DNA, 17 bp, Arabidopsis thaliana
ggattccactttttaca

SEQ ID NO: 110194 - DNA, 17 bp, Arabidopsis thaliana
ggattccgacatccaca

SEQ ID NO: 110195 - DNA, 17 bp, Arabidopsis thaliana
ggattccggctgcgtac

SEQ ID NO: 110196 - DNA, 17 bp, Arabidopsis thaliana
ggattccgtgaagttca

SEQ ID NO: 110197 - DNA, 17 bp, Arabidopsis thaliana
ggattcctgatcccaaa

SEQ ID NO: 110198 - DNA, 17 bp, Arabidopsis thaliana
ggattcgacttcccctg

SEQ ID NO: 110199 - DNA, 17 bp, Arabidopsis thaliana
ggattcgattcccgcta

SEQ ID NO: 110200 - DNA, 17 bp, Arabidopsis thaliana
ggattcgctacaatcac

SEQ ID NO: 110201 - DNA, 17 bp, Arabidopsis thaliana
ggattcggatcagatat

SEQ ID NO: 110202 - DNA, 17 bp, Arabidopsis thaliana
ggattcggattaagttt

SEQ ID NO: 110203 - DNA, 17 bp, Arabidopsis thaliana
ggattcggcccagaatc

SEQ ID NO: 110204 - DNA, 17 bp, Arabidopsis thaliana
ggattcgggacttcagc

SEQ ID NO: 110205 - DNA, 17 bp, Arabidopsis thaliana
ggattcgggtttcggat

SEQ ID NO: 110206 - DNA, 17 bp, Arabidopsis thaliana
ggattcgggtttttttc

SEQ ID NO: 110207 - DNA, 17 bp, Arabidopsis thaliana
ggattcggttttgtttc

SEQ ID NO: 110208 - DNA, 17 bp, Arabidopsis thaliana
ggattcgtacaatttac

SEQ ID NO: 110209 - DNA, 17 bp, Arabidopsis thaliana
ggattcgtcgcgcaatg

SEQ ID NO: 110210 - DNA, 17 bp, Arabidopsis thaliana
ggattcgtgcgcgttgc

SEQ ID NO: 110211 - DNA, 17 bp, Arabidopsis thaliana
ggattcgtggtaaaccg

SEQ ID NO: 110212 - DNA, 17 bp, Arabidopsis thaliana
ggattcgtggtatagcg

SEQ ID NO: 110213 - DNA, 17 bp, Arabidopsis thaliana
ggattcgtttcccggct

SEQ ID NO: 110214 - DNA, 17 bp, Arabidopsis thaliana
ggattctacccgccgct

SEQ ID NO: 110215 - DNA, 17 bp, Arabidopsis thaliana
ggattctcctaggccgt

SEQ ID NO: 110216 - DNA, 17 bp, Arabidopsis thaliana
ggattctccttttatcc

SEQ ID NO: 110217 - DNA, 17 bp, Arabidopsis thaliana
ggattctgagtcgatgt

SEQ ID NO: 110218 - DNA, 17 bp, Arabidopsis thaliana
ggattctttacagaatt

SEQ ID NO: 110219 - DNA, 17 bp, Arabidopsis thaliana
ggattgaaattgagatc

SEQ ID NO: 110220 - DNA, 17 bp, Arabidopsis thaliana
ggattgaaggtcgcgat

SEQ ID NO: 110221 - DNA, 17 bp, Arabidopsis thaliana
ggattgacaagcttatg

SEQ ID NO: 110222 - DNA, 17 bp, Arabidopsis thaliana
ggattgacagactgaga

SEQ ID NO: 110223 - DNA, 17 bp, Arabidopsis thaliana
ggattgacatgtctcga

SEQ ID NO: 110224 - DNA, 17 bp, Arabidopsis thaliana
ggattgaccctgtatac

SEQ ID NO: 110225 - DNA, 17 bp, Arabidopsis thaliana
ggattgaccgaagtctt

SEQ ID NO: 110226 - DNA, 17 bp, Arabidopsis thaliana
ggattgacctgtggtag

SEQ ID NO: 110227 - DNA, 17 bp, Arabidopsis thaliana
ggattgacgactacgag

SEQ ID NO: 110228 - DNA, 17 bp, Arabidopsis thaliana
ggattgacgcggattac

SEQ ID NO: 110229 - DNA, 17 bp, Arabidopsis thaliana
ggattgactatgaatcg

SEQ ID NO: 110230 - DNA, 17 bp, Arabidopsis thaliana
ggattgactcaatgaac

SEQ ID NO: 110231 - DNA, 17 bp, Arabidopsis thaliana
ggattgagccgtgtcac

SEQ ID NO: 110232 - DNA, 17 bp, Arabidopsis thaliana
ggattgagctttgaggc

SEQ ID NO: 110233 - DNA, 17 bp, Arabidopsis thaliana
ggattgagttgagttga

SEQ ID NO: 110234 - DNA, 17 bp, Arabidopsis thaliana
ggattgagtttaccaat

SEQ ID NO: 110235 - DNA, 17 bp, Arabidopsis thaliana
ggattgatctctgtgga

SEQ ID NO: 110236 - DNA, 17 bp, Arabidopsis thaliana
ggattgatctgcacatt

SEQ ID NO: 110237 - DNA, 17 bp, Arabidopsis thaliana
ggattgattgtatcttc

SEQ ID NO: 110238 - DNA, 17 bp, Arabidopsis thaliana
ggattgcaggctgcaac

SEQ ID NO: 110239 - DNA, 17 bp, Arabidopsis thaliana
ggattgccggtaagtga

SEQ ID NO: 110240 - DNA, 17 bp, Arabidopsis thaliana
ggattgctccgttccgc

SEQ ID NO: 110241 - DNA, 17 bp, Arabidopsis thaliana
ggattgctttccctgga

SEQ ID NO: 110242 - DNA, 17 bp, Arabidopsis thaliana
ggattggaccacggatt

SEQ ID NO: 110243 - DNA, 17 bp, Arabidopsis thaliana
ggattggataatattgt

SEQ ID NO: 110244 - DNA, 17 bp, Arabidopsis thaliana
ggattggatttcgccac

SEQ ID NO: 110245 - DNA, 17 bp, Arabidopsis thaliana
ggattggccgaaatcag

SEQ ID NO: 110246 - DNA, 17 bp, Arabidopsis thaliana
ggattggcgactacgag

SEQ ID NO: 110247 - DNA, 17 bp, Arabidopsis thaliana
ggattggcgggacggat

SEQ ID NO: 110248 - DNA, 17 bp, Arabidopsis thaliana
ggattggcgttgaggct

SEQ ID NO: 110249 - DNA, 17 bp, Arabidopsis thaliana
ggattggctctgagggc

SEQ ID NO: 110250 - DNA, 17 bp, Arabidopsis thaliana
ggattggctctgatggc

SEQ ID NO: 110251 - DNA, 17 bp, Arabidopsis thaliana
ggattggctgctgacat

SEQ ID NO: 110252 - DNA, 17 bp, Arabidopsis thaliana
ggattggctgttgactt

SEQ ID NO: 110253 - DNA, 17 bp, Arabidopsis thaliana
ggattggctttccttcg

SEQ ID NO: 110254 - DNA, 17 bp, Arabidopsis thaliana
ggattggctttgggctt

SEQ ID NO: 110255 - DNA, 17 bp, Arabidopsis thaliana
ggattgggatcggttat

SEQ ID NO: 110256 - DNA, 17 bp, Arabidopsis thaliana
ggattgggcacttttct

SEQ ID NO: 110257 - DNA, 17 bp, Arabidopsis thaliana
ggattgggttccatgga

SEQ ID NO: 110258 - DNA, 17 bp, Arabidopsis thaliana
ggattgggttgactata

SEQ ID NO: 110259 - DNA, 17 bp, Arabidopsis thaliana
ggattggtttataggaa

SEQ ID NO: 110260 - DNA, 17 bp, Arabidopsis thaliana
ggattggtttataggga

SEQ ID NO: 110261 - DNA, 17 bp, Arabidopsis thaliana
ggattgtacccaacaat

SEQ ID NO: 110262 - DNA, 17 bp, Arabidopsis thaliana
ggattgtctttaaacta

SEQ ID NO: 110263 - DNA, 17 bp, Arabidopsis thaliana
ggattgtgacacagttt

SEQ ID NO: 110264 - DNA, 17 bp, Arabidopsis thaliana
ggattgtggtcattgtt

SEQ ID NO: 110265 - DNA, 17 bp, Arabidopsis thaliana
ggattgtgtcggattcg

SEQ ID NO: 110266 - DNA, 17 bp, Arabidopsis thaliana
ggattgttacacatttt

SEQ ID NO: 110267 - DNA, 17 bp, Arabidopsis thaliana
ggattgttagaccatct

SEQ ID NO: 110268 - DNA, 17 bp, Arabidopsis thaliana
ggattgttctactgcgc

SEQ ID NO: 110269 - DNA, 17 bp, Arabidopsis thaliana
ggattgttgatccttat

SEQ ID NO: 110270 - DNA, 17 bp, Arabidopsis thaliana
ggattgttgtctggctc

SEQ ID NO: 110271 - DNA, 17 bp, Arabidopsis thaliana
ggattgtttggcttccc

SEQ ID NO: 110272 - DNA, 17 bp, Arabidopsis thaliana
ggatttaacgacatttt

SEQ ID NO: 110273 - DNA, 17 bp, Arabidopsis thaliana
ggatttaagtacattac

SEQ ID NO: 110274 - DNA, 17 bp, Arabidopsis thaliana
ggatttaatcgcatgtc

SEQ ID NO: 110275 - DNA, 17 bp, Arabidopsis thaliana
ggatttacttgatggac

SEQ ID NO: 110276 - DNA, 17 bp, Arabidopsis thaliana
ggatttagatttgcgtc

SEQ ID NO: 110277 - DNA, 17 bp, Arabidopsis thaliana
ggatttagtcaggtgtg

SEQ ID NO: 110278 - DNA, 17 bp, Arabidopsis thaliana
ggatttagtcgcatcct

SEQ ID NO: 110279 - DNA, 17 bp, Arabidopsis thaliana
ggatttataatggattg

SEQ ID NO: 110280 - DNA, 17 bp, Arabidopsis thaliana
ggatttatacctcttcc

SEQ ID NO: 110281 - DNA, 17 bp, Arabidopsis thaliana
ggatttatctatcccga

SEQ ID NO: 110282 - DNA, 17 bp, Arabidopsis thaliana
ggatttatctatcccta

SEQ ID NO: 110283 - DNA, 17 bp, Arabidopsis thaliana
ggatttatctgtatcta

SEQ ID NO: 110284 - DNA, 17 bp, Arabidopsis thaliana
ggatttatctttacagt

SEQ ID NO: 110285 - DNA, 17 bp, Arabidopsis thaliana
ggatttatttacagcgg

SEQ ID NO: 110286 - DNA, 17 bp, Arabidopsis thaliana
ggatttatttacagtgg

SEQ ID NO: 110287 - DNA, 17 bp, Arabidopsis thaliana
ggatttatttacgatga

SEQ ID NO: 110288 - DNA, 17 bp, Arabidopsis thaliana
ggatttatttcacaaaa

SEQ ID NO: 110289 - DNA, 17 bp, Arabidopsis thaliana
ggatttatttcacaaac

SEQ ID NO: 110290 - DNA, 17 bp, Arabidopsis thaliana
ggatttatttcacaaag

SEQ ID NO: 110291 - DNA, 17 bp, Arabidopsis thaliana
ggatttcaaatctctgc

SEQ ID NO: 110292 - DNA, 17 bp, Arabidopsis thaliana
ggatttcacccgtggta

SEQ ID NO: 110293 - DNA, 17 bp, Arabidopsis thaliana
ggatttcactcctactt

SEQ ID NO: 110294 - DNA, 17 bp, Arabidopsis thaliana
ggatttcactcctagtt

SEQ ID NO: 110295 - DNA, 17 bp, Arabidopsis thaliana
ggatttcactgaacgcc

SEQ ID NO: 110296 - DNA, 17 bp, Arabidopsis thaliana
ggatttcagatcggatt

SEQ ID NO: 110297 - DNA, 17 bp, Arabidopsis thaliana
ggatttcagcttcagtt

SEQ ID NO: 110298 - DNA, 17 bp, Arabidopsis thaliana
ggatttcatagccctca

SEQ ID NO: 110299 - DNA, 17 bp, Arabidopsis thaliana
ggatttcattgatggtt

SEQ ID NO: 110300 - DNA, 17 bp, Arabidopsis thaliana
ggatttcatttcagggt

SEQ ID NO: 110301 - DNA, 17 bp, Arabidopsis thaliana
ggatttcgacaattggt

SEQ ID NO: 110302 - DNA, 17 bp, Arabidopsis thaliana
ggatttcgatcctattg

SEQ ID NO: 110303 - DNA, 17 bp, Arabidopsis thaliana
ggatttcgatcctattt

SEQ ID NO: 110304 - DNA, 17 bp, Arabidopsis thaliana
ggatttcggcccagaac

SEQ ID NO: 110305 - DNA, 17 bp, Arabidopsis thaliana
ggatttcggcctggtca

SEQ ID NO: 110306 - DNA, 17 bp, Arabidopsis thaliana
ggatttcggtgtgcttg

SEQ ID NO: 110307 - DNA, 17 bp, Arabidopsis thaliana
ggatttcgtaaagttcg

SEQ ID NO: 110308 - DNA, 17 bp, Arabidopsis thaliana
ggatttcgtggctgagt

SEQ ID NO: 110309 - DNA, 17 bp, Arabidopsis thaliana
ggatttctaagagaaaa

SEQ ID NO: 110310 - DNA, 17 bp, Arabidopsis thaliana
ggatttctcatagttgg

SEQ ID NO: 110311 - DNA, 17 bp, Arabidopsis thaliana
ggatttctcatgaggga

SEQ ID NO: 110312 - DNA, 17 bp, Arabidopsis thaliana
ggatttctctcctctct

SEQ ID NO: 110313 - DNA, 17 bp, Arabidopsis thaliana
ggatttctctgttcctc

SEQ ID NO: 110314 - DNA, 17 bp, Arabidopsis thaliana
ggatttgacctgaaatc

SEQ ID NO: 110315 - DNA, 17 bp, Arabidopsis thaliana
ggatttgagaagttgcg

SEQ ID NO: 110316 - DNA, 17 bp, Arabidopsis thaliana
ggatttgagttttgcgg

SEQ ID NO: 110317 - DNA, 17 bp, Arabidopsis thaliana
ggatttgatgaactccc

SEQ ID NO: 110318 - DNA, 17 bp, Arabidopsis thaliana
ggatttgatgtacgata

SEQ ID NO: 110319 - DNA, 17 bp, Arabidopsis thaliana
ggatttgccatttgttg

SEQ ID NO: 110320 - DNA, 17 bp, Arabidopsis thaliana
ggatttgccctttgcag

SEQ ID NO: 110321 - DNA, 17 bp, Arabidopsis thaliana
ggatttgcccttttgca

SEQ ID NO: 110322 - DNA, 17 bp, Arabidopsis thaliana
ggatttgcccttttgta

SEQ ID NO: 110323 - DNA, 17 bp, Arabidopsis thaliana
ggatttgcctgtgcgat

SEQ ID NO: 110324 - DNA, 17 bp, Arabidopsis thaliana
ggatttgcgaggaactt

SEQ ID NO: 110325 - DNA, 17 bp, Arabidopsis thaliana
ggatttgctagagtctt

SEQ ID NO: 110326 - DNA, 17 bp, Arabidopsis thaliana
ggatttgctctgccgcc

SEQ ID NO: 110327 - DNA, 17 bp, Arabidopsis thaliana
ggatttgctgctgacat

SEQ ID NO: 110328 - DNA, 17 bp, Arabidopsis thaliana
ggatttggacacaggcc

SEQ ID NO: 110329 - DNA, 17 bp, Arabidopsis thaliana
ggatttggactaggcta

SEQ ID NO: 110330 - DNA, 17 bp, Arabidopsis thaliana
ggatttggacttattta

SEQ ID NO: 110331 - DNA, 17 bp, Arabidopsis thaliana
ggatttggagattaatt

SEQ ID NO: 110332 - DNA, 17 bp, Arabidopsis thaliana
ggatttggatggacggg

SEQ ID NO: 110333 - DNA, 17 bp, Arabidopsis thaliana
ggatttggatttccctg

SEQ ID NO: 110334 - DNA, 17 bp, Arabidopsis thaliana
ggatttggcaggacgtt

SEQ ID NO: 110335 - DNA, 17 bp, Arabidopsis thaliana
ggatttgggtaaaagtg

SEQ ID NO: 110336 - DNA, 17 bp, Arabidopsis thaliana
ggatttgggttcaggtt

SEQ ID NO: 110337 - DNA, 17 bp, Arabidopsis thaliana
ggatttggttgctctta

SEQ ID NO: 110338 - DNA, 17 bp, Arabidopsis thaliana
ggatttggttgttgctt

SEQ ID NO: 110339 - DNA, 17 bp, Arabidopsis thaliana
ggatttggtttgacatc

SEQ ID NO: 110340 - DNA, 17 bp, Arabidopsis thaliana
ggatttgtatttctttt

SEQ ID NO: 110341 - DNA, 17 bp, Arabidopsis thaliana
ggatttgtcctgagtac

SEQ ID NO: 110342 - DNA, 17 bp, Arabidopsis thaliana
ggatttgtggttaatcc

SEQ ID NO: 110343 - DNA, 17 bp, Arabidopsis thaliana
ggatttgttggtggagg

SEQ ID NO: 110344 - DNA, 17 bp, Arabidopsis thaliana
ggatttgttgttggcta

SEQ ID NO: 110345 - DNA, 17 bp, Arabidopsis thaliana
ggatttgtttgctacag

SEQ ID NO: 110346 - DNA, 17 bp, Arabidopsis thaliana
ggattttaacccacggt

SEQ ID NO: 110347 - DNA, 17 bp, Arabidopsis thaliana
ggattttaagaggttct

SEQ ID NO: 110348 - DNA, 17 bp, Arabidopsis thaliana
ggattttaccaaaggct

SEQ ID NO: 110349 - DNA, 17 bp, Arabidopsis thaliana
ggattttatgacgactc

SEQ ID NO: 110350 - DNA, 17 bp, Arabidopsis thaliana
ggattttatgtgatcgg

SEQ ID NO: 110351 - DNA, 17 bp, Arabidopsis thaliana
ggattttcccggatatt

SEQ ID NO: 110352 - DNA, 17 bp, Arabidopsis thaliana
ggattttcctggaattt

SEQ ID NO: 110353 - DNA, 17 bp, Arabidopsis thaliana
ggattttcttaggaaac

SEQ ID NO: 110354 - DNA, 17 bp, Arabidopsis thaliana
ggattttgaggtcccgc

SEQ ID NO: 110355 - DNA, 17 bp, Arabidopsis thaliana
ggattttgaggttcgat

SEQ ID NO: 110356 - DNA, 17 bp, Arabidopsis thaliana
ggattttgattatgttc

SEQ ID NO: 110357 - DNA, 17 bp, Arabidopsis thaliana
ggattttgccgtcacat

SEQ ID NO: 110358 - DNA, 17 bp, Arabidopsis thaliana
ggattttgcctcagaga

SEQ ID NO: 110359 - DNA, 17 bp, Arabidopsis thaliana
ggattttgctacttcag

SEQ ID NO: 110360 - DNA, 17 bp, Arabidopsis thaliana
ggattttggatacttgc

SEQ ID NO: 110361 - DNA, 17 bp, Arabidopsis thaliana
ggattttggatccagct

SEQ ID NO: 110362 - DNA, 17 bp, Arabidopsis thaliana
ggattttggatgaaatt

SEQ ID NO: 110363 - DNA, 17 bp, Arabidopsis thaliana
ggattttggccaggtca

SEQ ID NO: 110364 - DNA, 17 bp, Arabidopsis thaliana
ggattttggccataacc

SEQ ID NO: 110365 - DNA, 17 bp, Arabidopsis thaliana
ggattttggcctggtca

SEQ ID NO: 110366 - DNA, 17 bp, Arabidopsis thaliana
ggattttgtgatagccg

SEQ ID NO: 110367 - DNA, 17 bp, Arabidopsis thaliana
ggattttgttatgactt

SEQ ID NO: 110368 - DNA, 17 bp, Arabidopsis thaliana
ggattttgttgtcgggg

SEQ ID NO: 110369 - DNA, 17 bp, Arabidopsis thaliana
ggattttgtttccgggg

SEQ ID NO: 110370 - DNA, 17 bp, Arabidopsis thaliana
ggattttgttttcgggg

SEQ ID NO: 110371 - DNA, 17 bp, Arabidopsis thaliana
ggatttttaccgacttt

SEQ ID NO: 110372 - DNA, 17 bp, Arabidopsis thaliana
ggatttttctgccatgg

SEQ ID NO: 110373 - DNA, 17 bp, Arabidopsis thaliana
ggatttttgaagttcgc

SEQ ID NO: 110374 - DNA, 17 bp, Arabidopsis thaliana
ggatttttgcggggaaa

SEQ ID NO: 110375 - DNA, 17 bp, Arabidopsis thaliana
ggatttttgctaccttt

SEQ ID NO: 110376 - DNA, 17 bp, Arabidopsis thaliana
ggatttttgctggtgtt

SEQ ID NO: 110377 - DNA, 17 bp, Arabidopsis thaliana
ggatttttggcctggtc

SEQ ID NO: 110378 - DNA, 17 bp, Arabidopsis thaliana
ggattttttcatgtctg

SEQ ID NO: 110379 - DNA, 17 bp, Arabidopsis thaliana
ggatttttttcttaaat

SEQ ID NO: 110380 - DNA, 17 bp, Arabidopsis thaliana
ggcaaaaactgtgttcc

SEQ ID NO: 110381 - DNA, 17 bp, Arabidopsis thaliana
ggcaaaaatgagatggc

SEQ ID NO: 110382 - DNA, 17 bp, Arabidopsis thaliana
ggcaaaacatttggcgt

SEQ ID NO: 110383 - DNA, 17 bp, Arabidopsis thaliana
ggcaaaaccggttttca

SEQ ID NO: 110384 - DNA, 17 bp, Arabidopsis thaliana
ggcaaaacgctgcggcc

SEQ ID NO: 110385 - DNA, 17 bp, Arabidopsis thaliana
ggcaaaagtaggattga

SEQ ID NO: 110386 - DNA, 17 bp, Arabidopsis thaliana
ggcaaaatatgaccaaa

SEQ ID NO: 110387 - DNA, 17 bp, Arabidopsis thaliana
ggcaaaatatgaccaac

SEQ ID NO: 110388 - DNA, 17 bp, Arabidopsis thaliana
ggcaaaatcgagtaccg

SEQ ID NO: 110389 - DNA, 17 bp, Arabidopsis thaliana
ggcaaaatctgacaagt

SEQ ID NO: 110390 - DNA, 17 bp, Arabidopsis thaliana
ggcaaaatggatccgta

SEQ ID NO: 110391 - DNA, 17 bp, Arabidopsis thaliana
ggcaaaattggccgttt

SEQ ID NO: 110392 - DNA, 17 bp, Arabidopsis thaliana
ggcaaaatttagagatc

SEQ ID NO: 110393 - DNA, 17 bp, Arabidopsis thaliana
ggcaaacattgtcaggt

SEQ ID NO: 110394 - DNA, 17 bp, Arabidopsis thaliana
ggcaaacccgtctgata

SEQ ID NO: 110395 - DNA, 17 bp, Arabidopsis thaliana
ggcaaacgaacaacttt

SEQ ID NO: 110396 - DNA, 17 bp, Arabidopsis thaliana
ggcaaacgctgtctacg

SEQ ID NO: 110397 - DNA, 17 bp, Arabidopsis thaliana
ggcaaacggatcttaaa

SEQ ID NO: 110398 - DNA, 17 bp, Arabidopsis thaliana
ggcaaactgagatgtgg

SEQ ID NO: 110399 - DNA, 17 bp, Arabidopsis thaliana
ggcaaagaatccaaagc

SEQ ID NO: 110400 - DNA, 17 bp, Arabidopsis thaliana
ggcaaagattccatcaa

SEQ ID NO: 110401 - DNA, 17 bp, Arabidopsis thaliana
ggcaaagattccatcga

SEQ ID NO: 110402 - DNA, 17 bp, Arabidopsis thaliana
ggcaaagcggattattt

SEQ ID NO: 110403 - DNA, 17 bp, Arabidopsis thaliana
ggcaaagctaatactgg

SEQ ID NO: 110404 - DNA, 17 bp, Arabidopsis thaliana
ggcaaagtgagatgtgg

SEQ ID NO: 110405 - DNA, 17 bp, Arabidopsis thaliana
ggcaaagtgggttgagc

SEQ ID NO: 110406 - DNA, 17 bp, Arabidopsis thaliana
ggcaaagttcgtaatcc

SEQ ID NO: 110407 - DNA, 17 bp, Arabidopsis thaliana
ggcaaatactagtccgg

SEQ ID NO: 110408 - DNA, 17 bp, Arabidopsis thaliana
ggcaaatagatcataaa

SEQ ID NO: 110409 - DNA, 17 bp, Arabidopsis thaliana
ggcaaatcatcagtcgt

SEQ ID NO: 110410 - DNA, 17 bp, Arabidopsis thaliana
ggcaaatgccatgggtc

SEQ ID NO: 110411 - DNA, 17 bp, Arabidopsis thaliana
ggcaaatgcgtctggca

SEQ ID NO: 110412 - DNA, 17 bp, Arabidopsis thaliana
ggcaaatgtagctacga

SEQ ID NO: 110413 - DNA, 17 bp, Arabidopsis thaliana
ggcaaatgtagttacag

SEQ ID NO: 110414 - DNA, 17 bp, Arabidopsis thaliana
ggcaaatgtctcccggt

SEQ ID NO: 110415 - DNA, 17 bp, Arabidopsis thaliana
ggcaaattttgatcggt

SEQ ID NO: 110416 - DNA, 17 bp, Arabidopsis thaliana
ggcaaattttgcaagat

SEQ ID NO: 110417 - DNA, 17 bp, Arabidopsis thaliana
ggcaacaactccaccat

SEQ ID NO: 110418 - DNA, 17 bp, Arabidopsis thaliana
ggcaacagaatgtgcag

SEQ ID NO: 110419 - DNA, 17 bp, Arabidopsis thaliana
ggcaacagaccggtaga

SEQ ID NO: 110420 - DNA, 17 bp, Arabidopsis thaliana
ggcaacagactgtgcag

SEQ ID NO: 110421 - DNA, 17 bp, Arabidopsis thaliana
ggcaacagcggtagtgg

SEQ ID NO: 110422 - DNA, 17 bp, Arabidopsis thaliana
ggcaacccaagcaacca

SEQ ID NO: 110423 - DNA, 17 bp, Arabidopsis thaliana
ggcaacgacgctctctc

SEQ ID NO: 110424 - DNA, 17 bp, Arabidopsis thaliana
ggcaacgacggtgggtg

SEQ ID NO: 110425 - DNA, 17 bp, Arabidopsis thaliana
ggcaacgataacgacag

SEQ ID NO: 110426 - DNA, 17 bp, Arabidopsis thaliana
ggcaacgatcagtttgc

SEQ ID NO: 110427 - DNA, 17 bp, Arabidopsis thaliana
ggcaacgattctggtca

SEQ ID NO: 110428 - DNA, 17 bp, Arabidopsis thaliana
ggcaacggacatctcgg

SEQ ID NO: 110429 - DNA, 17 bp, Arabidopsis thaliana
ggcaacggatatctcgc

SEQ ID NO: 110430 - DNA, 17 bp, Arabidopsis thaliana
ggcaacggatatctcgg

SEQ ID NO: 110431 - DNA, 17 bp, Arabidopsis thaliana
ggcaacggcagagtcgg

SEQ ID NO: 110432 - DNA, 17 bp, Arabidopsis thaliana
ggcaacggtatggctga

SEQ ID NO: 110433 - DNA, 17 bp, Arabidopsis thaliana
ggcaacgtcctactctc

SEQ ID NO: 110434 - DNA, 17 bp, Arabidopsis thaliana
ggcaactaggatgagat

SEQ ID NO: 110435 - DNA, 17 bp, Arabidopsis thaliana
ggcaactatcgctattt

SEQ ID NO: 110436 - DNA, 17 bp, Arabidopsis thaliana
ggcaactcacctgactg

SEQ ID NO: 110437 - DNA, 17 bp, Arabidopsis thaliana
ggcaactctaatgacgg

SEQ ID NO: 110438 - DNA, 17 bp, Arabidopsis thaliana
ggcaactctctgcgaca

SEQ ID NO: 110439 - DNA, 17 bp, Arabidopsis thaliana
ggcaactgaatcacttg

SEQ ID NO: 110440 - DNA, 17 bp, Arabidopsis thaliana
ggcaactgtcgctactt

SEQ ID NO: 110441 - DNA, 17 bp, Arabidopsis thaliana
ggcaagacaccttgtgt

SEQ ID NO: 110442 - DNA, 17 bp, Arabidopsis thaliana
ggcaagacccggtgcta

SEQ ID NO: 110443 - DNA, 17 bp, Arabidopsis thaliana
ggcaagacgattagctt

SEQ ID NO: 110444 - DNA, 17 bp, Arabidopsis thaliana
ggcaagataccttgtgt

SEQ ID NO: 110445 - DNA, 17 bp, Arabidopsis thaliana
ggcaagatcaccattgg

SEQ ID NO: 110446 - DNA, 17 bp, Arabidopsis thaliana
ggcaagatcgagtgccc

SEQ ID NO: 110447 - DNA, 17 bp, Arabidopsis thaliana
ggcaagatgagtgttcg

SEQ ID NO: 110448 - DNA, 17 bp, Arabidopsis thaliana
ggcaagctatcatctct

SEQ ID NO: 110449 - DNA, 17 bp, Arabidopsis thaliana
ggcaagctctcattgct

SEQ ID NO: 110450 - DNA, 17 bp, Arabidopsis thaliana
ggcaagctgtccttggc

SEQ ID NO: 110451 - DNA, 17 bp, Arabidopsis thaliana
ggcaagcttgagatgtg

SEQ ID NO: 110452 - DNA, 17 bp, Arabidopsis thaliana
ggcaaggctgcttttct

SEQ ID NO: 110453 - DNA, 17 bp, Arabidopsis thaliana
ggcaaggtcgattgggg

SEQ ID NO: 110454 - DNA, 17 bp, Arabidopsis thaliana
ggcaaggttagttgatc

SEQ ID NO: 110455 - DNA, 17 bp, Arabidopsis thaliana
ggcaaggttggtactga

SEQ ID NO: 110456 - DNA, 17 bp, Arabidopsis thaliana
ggcaagtaactcgcaag

SEQ ID NO: 110457 - DNA, 17 bp, Arabidopsis thaliana
ggcaagtagactttggc

SEQ ID NO: 110458 - DNA, 17 bp, Arabidopsis thaliana
ggcaagtagtccttcgg

SEQ ID NO: 110459 - DNA, 17 bp, Arabidopsis thaliana
ggcaagtagtccttggc

SEQ ID NO: 110460 - DNA, 17 bp, Arabidopsis thaliana
ggcaagtatgttgacta

SEQ ID NO: 110461 - DNA, 17 bp, Arabidopsis thaliana
ggcaagtctgcctgggt

SEQ ID NO: 110462 - DNA, 17 bp, Arabidopsis thaliana
ggcaagtctggtgccag

SEQ ID NO: 110463 - DNA, 17 bp, Arabidopsis thaliana
ggcaagtgactacatcg

SEQ ID NO: 110464 - DNA, 17 bp, Arabidopsis thaliana
ggcaagtgcggcttgtg

SEQ ID NO: 110465 - DNA, 17 bp, Arabidopsis thaliana
ggcaagtggtggcagtg

SEQ ID NO: 110466 - DNA, 17 bp, Arabidopsis thaliana
ggcaagtgtccttggct

SEQ ID NO: 110467 - DNA, 17 bp, Arabidopsis thaliana
ggcaagtgtgcaggaga

SEQ ID NO: 110468 - DNA, 17 bp, Arabidopsis thaliana
ggcaagtgtgccacgag

SEQ ID NO: 110469 - DNA, 17 bp, Arabidopsis thaliana
ggcaagttattactggt

SEQ ID NO: 110470 - DNA, 17 bp, Arabidopsis thaliana
ggcaagttctccttggc

SEQ ID NO: 110471 - DNA, 17 bp, Arabidopsis thaliana
ggcaagttgaccttggc

SEQ ID NO: 110472 - DNA, 17 bp, Arabidopsis thaliana
ggcaagttgactttggc

SEQ ID NO: 110473 - DNA, 17 bp, Arabidopsis thaliana
ggcaagttgtccttagc

SEQ ID NO: 110474 - DNA, 17 bp, Arabidopsis thaliana
ggcaagttgtccttcgg

SEQ ID NO: 110475 - DNA, 17 bp, Arabidopsis thaliana
ggcaagttgtccttctg

SEQ ID NO: 110476 - DNA, 17 bp, Arabidopsis thaliana
ggcaagttgtccttgcc

SEQ ID NO: 110477 - DNA, 17 bp, Arabidopsis thaliana
ggcaagttgtccttggc

SEQ ID NO: 110478 - DNA, 17 bp, Arabidopsis thaliana
ggcaagttgtccttgtc

SEQ ID NO: 110479 - DNA, 17 bp, Arabidopsis thaliana
ggcaagttgtcctttgc

SEQ ID NO: 110480 - DNA, 17 bp, Arabidopsis thaliana
ggcaagttgtctcggct

SEQ ID NO: 110481 - DNA, 17 bp, Arabidopsis thaliana
ggcaagttgtctttggc

SEQ ID NO: 110482 - DNA, 17 bp, Arabidopsis thaliana
ggcaagttgtgtttcgg

SEQ ID NO: 110483 - DNA, 17 bp, Arabidopsis thaliana
ggcaagttgtgtttggc

SEQ ID NO: 110484 - DNA, 17 bp, Arabidopsis thaliana
ggcaagttgttcttggc

SEQ ID NO: 110485 - DNA, 17 bp, Arabidopsis thaliana
ggcaagtttcagtatgt

SEQ ID NO: 110486 - DNA, 17 bp, Arabidopsis thaliana
ggcaagtttccttggct

SEQ ID NO: 110487 - DNA, 17 bp, Arabidopsis thaliana
ggcaagttttgcattca

SEQ ID NO: 110488 - DNA, 17 bp, Arabidopsis thaliana
ggcaataacaggtctgt

SEQ ID NO: 110489 - DNA, 17 bp, Arabidopsis thaliana
ggcaataagcccaaaaa

SEQ ID NO: 110490 - DNA, 17 bp, Arabidopsis thaliana
ggcaatacgtggagtga

SEQ ID NO: 110491 - DNA, 17 bp, Arabidopsis thaliana
ggcaataggtggagaga

SEQ ID NO: 110492 - DNA, 17 bp, Arabidopsis thaliana
ggcaataggtggagagg

SEQ ID NO: 110493 - DNA, 17 bp, Arabidopsis thaliana
ggcaatagtgtaggatc

SEQ ID NO: 110494 - DNA, 17 bp, Arabidopsis thaliana
ggcaatatagcaagtgt

SEQ ID NO: 110495 - DNA, 17 bp, Arabidopsis thaliana
ggcaatatgattgtagt

SEQ ID NO: 110496 - DNA, 17 bp, Arabidopsis thaliana
ggcaatatgccatcaca

SEQ ID NO: 110497 - DNA, 17 bp, Arabidopsis thaliana
ggcaatatggccagcgt

SEQ ID NO: 110498 - DNA, 17 bp, Arabidopsis thaliana
ggcaatcaaaaaacaag

SEQ ID NO: 110499 - DNA, 17 bp, Arabidopsis thaliana
ggcaatcaaaaaacagg

SEQ ID NO: 110500 - DNA, 17 bp, Arabidopsis thaliana
ggcaatcatctcggact

SEQ ID NO: 110501 - DNA, 17 bp, Arabidopsis thaliana
ggcaatccacagtctgt

SEQ ID NO: 110502 - DNA, 17 bp, Arabidopsis thaliana
ggcaatccataaccgag

SEQ ID NO: 110503 - DNA, 17 bp, Arabidopsis thaliana
ggcaatcgagcggcggg

SEQ ID NO: 110504 - DNA, 17 bp, Arabidopsis thaliana
ggcaatcggaggcgggg

SEQ ID NO: 110505 - DNA, 17 bp, Arabidopsis thaliana
ggcaatcgggcggcgag

SEQ ID NO: 110506 - DNA, 17 bp, Arabidopsis thaliana
ggcaatcgggcggcggg

SEQ ID NO: 110507 - DNA, 17 bp, Arabidopsis thaliana
ggcaatctatgtcacca

SEQ ID NO: 110508 - DNA, 17 bp, Arabidopsis thaliana
ggcaatcttcggtgttg

SEQ ID NO: 110509 - DNA, 17 bp, Arabidopsis thaliana
ggcaatgagaggcgctt

SEQ ID NO: 110510 - DNA, 17 bp, Arabidopsis thaliana
ggcaatgcggtttgagg

SEQ ID NO: 110511 - DNA, 17 bp, Arabidopsis thaliana
ggcaatgcggtttgggg

SEQ ID NO: 110512 - DNA, 17 bp, Arabidopsis thaliana
ggcaatgctaacacagg

SEQ ID NO: 110513 - DNA, 17 bp, Arabidopsis thaliana
ggcaatgctaacactgg

SEQ ID NO: 110514 - DNA, 17 bp, Arabidopsis thaliana
ggcaatggtgctgaaat

SEQ ID NO: 110515 - DNA, 17 bp, Arabidopsis thaliana
ggcaattcacagtccgt

SEQ ID NO: 110516 - DNA, 17 bp, Arabidopsis thaliana
ggcaattcacagtctct

SEQ ID NO: 110517 - DNA, 17 bp, Arabidopsis thaliana
ggcacaaaagtggacgg

SEQ ID NO: 110518 - DNA, 17 bp, Arabidopsis thaliana
ggcacaaccgtcaatgg

SEQ ID NO: 110519 - DNA, 17 bp, Arabidopsis thaliana
ggcacaactacggctaa

SEQ ID NO: 110520 - DNA, 17 bp, Arabidopsis thaliana
ggcacaagagttatttt

SEQ ID NO: 110521 - DNA, 17 bp, Arabidopsis thaliana
ggcacaagatagtggcc

SEQ ID NO: 110522 - DNA, 17 bp, Arabidopsis thaliana
ggcacacaggtcgttca

SEQ ID NO: 110523 - DNA, 17 bp, Arabidopsis thaliana
ggcacactgcctgggtg

SEQ ID NO: 110524 - DNA, 17 bp, Arabidopsis thaliana
ggcacagagaaacaaaa

SEQ ID NO: 110525 - DNA, 17 bp, Arabidopsis thaliana
ggcacagccctcccgtg

SEQ ID NO: 110526 - DNA, 17 bp, Arabidopsis thaliana
ggcacaggttatgatct

SEQ ID NO: 110527 - DNA, 17 bp, Arabidopsis thaliana
ggcacaggtttggcagg

SEQ ID NO: 110528 - DNA, 17 bp, Arabidopsis thaliana
ggcacataacaggcttg

SEQ ID NO: 110529 - DNA, 17 bp, Arabidopsis thaliana
ggcacatctgcctgggt

SEQ ID NO: 110530 - DNA, 17 bp, Arabidopsis thaliana
ggcacatgaagcggttt

SEQ ID NO: 110531 - DNA, 17 bp, Arabidopsis thaliana
ggcacatgaccaaaatg

SEQ ID NO: 110532 - DNA, 17 bp, Arabidopsis thaliana
ggcacattgtgatcaac

SEQ ID NO: 110533 - DNA, 17 bp, Arabidopsis thaliana
ggcacatttgtgtgaaa

SEQ ID NO: 110534 - DNA, 17 bp, Arabidopsis thaliana
ggcaccaacaggagtgg

SEQ ID NO: 110535 - DNA, 17 bp, Arabidopsis thaliana
ggcaccaagagcgagat

SEQ ID NO: 110536 - DNA, 17 bp, Arabidopsis thaliana
ggcaccaccaggagtgg

SEQ ID NO: 110537 - DNA, 17 bp, Arabidopsis thaliana
ggcaccaggcttcatcc

SEQ ID NO: 110538 - DNA, 17 bp, Arabidopsis thaliana
ggcaccagttttggccc

SEQ ID NO: 110539 - DNA, 17 bp, Arabidopsis thaliana
ggcaccctacaggatgg

SEQ ID NO: 110540 - DNA, 17 bp, Arabidopsis thaliana
ggcaccgaaaatgtatc

SEQ ID NO: 110541 - DNA, 17 bp, Arabidopsis thaliana
ggcaccgaacgtcgaca

SEQ ID NO: 110542 - DNA, 17 bp, Arabidopsis thaliana
ggcaccgaacgtcgacc

SEQ ID NO: 110543 - DNA, 17 bp, Arabidopsis thaliana
ggcaccgagacaagccc

SEQ ID NO: 110544 - DNA, 17 bp, Arabidopsis thaliana
ggcaccgcagggttaca

SEQ ID NO: 110545 - DNA, 17 bp, Arabidopsis thaliana
ggcaccgcggcggccct

SEQ ID NO: 110546 - DNA, 17 bp, Arabidopsis thaliana
ggcaccggagctgctag

SEQ ID NO: 110547 - DNA, 17 bp, Arabidopsis thaliana
ggcaccggtgtctcctc

SEQ ID NO: 110548 - DNA, 17 bp, Arabidopsis thaliana
ggcaccggtgtctctca

SEQ ID NO: 110549 - DNA, 17 bp, Arabidopsis thaliana
ggcacctcgatgtcgac

SEQ ID NO: 110550 - DNA, 17 bp, Arabidopsis thaliana
ggcacctcgatgtcggc

SEQ ID NO: 110551 - DNA, 17 bp, Arabidopsis thaliana
ggcacctctgcctgggt

SEQ ID NO: 110552 - DNA, 17 bp, Arabidopsis thaliana
ggcaccttagctcagtt

SEQ ID NO: 110553 - DNA, 17 bp, Arabidopsis thaliana
ggcacgaagcggatatc

SEQ ID NO: 110554 - DNA, 17 bp, Arabidopsis thaliana
ggcacgaggaatgaccg

SEQ ID NO: 110555 - DNA, 17 bp, Arabidopsis thaliana
ggcacgaggaggactac

SEQ ID NO: 110556 - DNA, 17 bp, Arabidopsis thaliana
ggcacgcctgcctgggt

SEQ ID NO: 110557 - DNA, 17 bp, Arabidopsis thaliana
ggcacgcggattacggt

SEQ ID NO: 110558 - DNA, 17 bp, Arabidopsis thaliana
ggcacgcggcgacccgc

SEQ ID NO: 110559 - DNA, 17 bp, Arabidopsis thaliana
ggcacggaaccaccgtt

SEQ ID NO: 110560 - DNA, 17 bp, Arabidopsis thaliana
ggcacggaagctcgttc

SEQ ID NO: 110561 - DNA, 17 bp, Arabidopsis thaliana
ggcacggatttggcagg

SEQ ID NO: 110562 - DNA, 17 bp, Arabidopsis thaliana
ggcacggctgcctgggt

SEQ ID NO: 110563 - DNA, 17 bp, Arabidopsis thaliana
ggcacgggattcggaag

SEQ ID NO: 110564 - DNA, 17 bp, Arabidopsis thaliana
ggcacgggtttgacagg

SEQ ID NO: 110565 - DNA, 17 bp, Arabidopsis thaliana
ggcacgggtttggcagg

SEQ ID NO: 110566 - DNA, 17 bp, Arabidopsis thaliana
ggcacgtatgcctgggt

SEQ ID NO: 110567 - DNA, 17 bp, Arabidopsis thaliana
ggcacgtccctgggtgc

SEQ ID NO: 110568 - DNA, 17 bp, Arabidopsis thaliana
ggcacgtccctgggtgt

SEQ ID NO: 110569 - DNA, 17 bp, Arabidopsis thaliana
ggcacgtccgcctgggt

SEQ ID NO: 110570 - DNA, 17 bp, Arabidopsis thaliana
ggcacgtcctgggtgtc

SEQ ID NO: 110571 - DNA, 17 bp, Arabidopsis thaliana
ggcacgtctacctgggt

SEQ ID NO: 110572 - DNA, 17 bp, Arabidopsis thaliana
ggcacgtctccctgggt

SEQ ID NO: 110573 - DNA, 17 bp, Arabidopsis thaliana
ggcacgtctctgggtgt

SEQ ID NO: 110574 - DNA, 17 bp, Arabidopsis thaliana
ggcacgtctgcatgggt

SEQ ID NO: 110575 - DNA, 17 bp, Arabidopsis thaliana
ggcacgtctgcccgggt

SEQ ID NO: 110576 - DNA, 17 bp, Arabidopsis thaliana
ggcacgtctgcctagct

SEQ ID NO: 110577 - DNA, 17 bp, Arabidopsis thaliana
ggcacgtctgcctaggt

SEQ ID NO: 110578 - DNA, 17 bp, Arabidopsis thaliana
ggcacgtctgcctcggt

SEQ ID NO: 110579 - DNA, 17 bp, Arabidopsis thaliana
ggcacgtctgcctgagt

SEQ ID NO: 110580 - DNA, 17 bp, Arabidopsis thaliana
ggcacgtctgcctgcct

SEQ ID NO: 110581 - DNA, 17 bp, Arabidopsis thaliana
ggcacgtctgcctgcgc

SEQ ID NO: 110582 - DNA, 17 bp, Arabidopsis thaliana
ggcacgtctgcctgcgt

SEQ ID NO: 110583 - DNA, 17 bp, Arabidopsis thaliana
ggcacgtctgcctggat

SEQ ID NO: 110584 - DNA, 17 bp, Arabidopsis thaliana
ggcacgtctgcctggct

SEQ ID NO: 110585 - DNA, 17 bp, Arabidopsis thaliana
ggcacgtctgcctggga

SEQ ID NO: 110586 - DNA, 17 bp, Arabidopsis thaliana
ggcacgtctgcctgggc

SEQ ID NO: 110587 - DNA, 17 bp, Arabidopsis thaliana
ggcacgtctgcctgggg

SEQ ID NO: 110588 - DNA, 17 bp, Arabidopsis thaliana
ggcacgtctgcctgggt

SEQ ID NO: 110589 - DNA, 17 bp, Arabidopsis thaliana
ggcacgtctgcctggtc

SEQ ID NO: 110590 - DNA, 17 bp, Arabidopsis thaliana
ggcacgtctgcctggtg

SEQ ID NO: 110591 - DNA, 17 bp, Arabidopsis thaliana
ggcacgtctgcctggtt

SEQ ID NO: 110592 - DNA, 17 bp, Arabidopsis thaliana
ggcacgtctgcctgtgt

SEQ ID NO: 110593 - DNA, 17 bp, Arabidopsis thaliana
ggcacgtctgccttggt

SEQ ID NO: 110594 - DNA, 17 bp, Arabidopsis thaliana
ggcacgtctgcgtgggt

SEQ ID NO: 110595 - DNA, 17 bp, Arabidopsis thaliana
ggcacgtctgctgggtg

SEQ ID NO: 110596 - DNA, 17 bp, Arabidopsis thaliana
ggcacgtctgcttgggt

SEQ ID NO: 110597 - DNA, 17 bp, Arabidopsis thaliana
ggcacgtctggggtgtc

SEQ ID NO: 110598 - DNA, 17 bp, Arabidopsis thaliana
ggcacgtctgggtgtca

SEQ ID NO: 110599 - DNA, 17 bp, Arabidopsis thaliana
ggcacgtctgtctgggt

SEQ ID NO: 110600 - DNA, 17 bp, Arabidopsis thaliana
ggcacgtcttcctgggt

SEQ ID NO: 110601 - DNA, 17 bp, Arabidopsis thaliana
ggcacgtgcctgggtgt

SEQ ID NO: 110602 - DNA, 17 bp, Arabidopsis thaliana
ggcacgtgtcgttgact

SEQ ID NO: 110603 - DNA, 17 bp, Arabidopsis thaliana
ggcacgtgtcgttggca

SEQ ID NO: 110604 - DNA, 17 bp, Arabidopsis thaliana
ggcacgtgtcgttggct

SEQ ID NO: 110605 - DNA, 17 bp, Arabidopsis thaliana
ggcacgtgtgcctgggt

SEQ ID NO: 110606 - DNA, 17 bp, Arabidopsis thaliana
ggcacgttctgtttgga

SEQ ID NO: 110607 - DNA, 17 bp, Arabidopsis thaliana
ggcacgttgtccttggc

SEQ ID NO: 110608 - DNA, 17 bp, Arabidopsis thaliana
ggcacgtttgcctgggt

SEQ ID NO: 110609 - DNA, 17 bp, Arabidopsis thaliana
ggcacgtttgcttgggt

SEQ ID NO: 110610 - DNA, 17 bp, Arabidopsis thaliana
ggcactaaagcaagtgt

SEQ ID NO: 110611 - DNA, 17 bp, Arabidopsis thaliana
ggcactaaagcctaatt

SEQ ID NO: 110612 - DNA, 17 bp, Arabidopsis thaliana
ggcactaaatcaccatg

SEQ ID NO: 110613 - DNA, 17 bp, Arabidopsis thaliana
ggcactaatgcaccgga

SEQ ID NO: 110614 - DNA, 17 bp, Arabidopsis thaliana
ggcactaggatgggtga

SEQ ID NO: 110615 - DNA, 17 bp, Arabidopsis thaliana
ggcactagtttagtggt

SEQ ID NO: 110616 - DNA, 17 bp, Arabidopsis thaliana
ggcactatcgcggtgca

SEQ ID NO: 110617 - DNA, 17 bp, Arabidopsis thaliana
ggcactatggctggcag

SEQ ID NO: 110618 - DNA, 17 bp, Arabidopsis thaliana
ggcactcatactcgact

SEQ ID NO: 110619 - DNA, 17 bp, Arabidopsis thaliana
ggcactcattgtcatta

SEQ ID NO: 110620 - DNA, 17 bp, Arabidopsis thaliana
ggcactccttgattggt

SEQ ID NO: 110621 - DNA, 17 bp, Arabidopsis thaliana
ggcactcgaaccgacga

SEQ ID NO: 110622 - DNA, 17 bp, Arabidopsis thaliana
ggcactcgaccgtggtg

SEQ ID NO: 110623 - DNA, 17 bp, Arabidopsis thaliana
ggcactcgggacggctt

SEQ ID NO: 110624 - DNA, 17 bp, Arabidopsis thaliana
ggcactctactttgatc

SEQ ID NO: 110625 - DNA, 17 bp, Arabidopsis thaliana
ggcactctactttgatg

SEQ ID NO: 110626 - DNA, 17 bp, Arabidopsis thaliana
ggcactctccggggtaa

SEQ ID NO: 110627 - DNA, 17 bp, Arabidopsis thaliana
ggcactctgcctgggtg

SEQ ID NO: 110628 - DNA, 17 bp, Arabidopsis thaliana
ggcactgcctcttccct

SEQ ID NO: 110629 - DNA, 17 bp, Arabidopsis thaliana
ggcactgcctctttcct

SEQ ID NO: 110630 - DNA, 17 bp, Arabidopsis thaliana
ggcactgggtggcgaga

SEQ ID NO: 110631 - DNA, 17 bp, Arabidopsis thaliana
ggcactgtctacgagtc

SEQ ID NO: 110632 - DNA, 17 bp, Arabidopsis thaliana
ggcactgtctcggagag

SEQ ID NO: 110633 - DNA, 17 bp, Arabidopsis thaliana
ggcacttaaaccgcaac

SEQ ID NO: 110634 - DNA, 17 bp, Arabidopsis thaliana
ggcacttacagcccaac

SEQ ID NO: 110635 - DNA, 17 bp, Arabidopsis thaliana
ggcacttactggtgtga

SEQ ID NO: 110636 - DNA, 17 bp, Arabidopsis thaliana
ggcacttatggaaggga

SEQ ID NO: 110637 - DNA, 17 bp, Arabidopsis thaliana
ggcacttctataccgtg

SEQ ID NO: 110638 - DNA, 17 bp, Arabidopsis thaliana
ggcacttctgcctaggt

SEQ ID NO: 110639 - DNA, 17 bp, Arabidopsis thaliana
ggcacttctgcctgggt

SEQ ID NO: 110640 - DNA, 17 bp, Arabidopsis thaliana
ggcacttctgcctggtg

SEQ ID NO: 110641 - DNA, 17 bp, Arabidopsis thaliana
ggcacttcttcttctgc

SEQ ID NO: 110642 - DNA, 17 bp, Arabidopsis thaliana
ggcacttgcacatgggt

SEQ ID NO: 110643 - DNA, 17 bp, Arabidopsis thaliana
ggcacttgcctgggtgt

SEQ ID NO: 110644 - DNA, 17 bp, Arabidopsis thaliana
ggcacttgtcacggatg

SEQ ID NO: 110645 - DNA, 17 bp, Arabidopsis thaliana
ggcacttgtcagggatg

SEQ ID NO: 110646 - DNA, 17 bp, Arabidopsis thaliana
ggcacttgtgagggata

SEQ ID NO: 110647 - DNA, 17 bp, Arabidopsis thaliana
ggcactttagggatgag

SEQ ID NO: 110648 - DNA, 17 bp, Arabidopsis thaliana
ggcactttctaaggccc

SEQ ID NO: 110649 - DNA, 17 bp, Arabidopsis thaliana
ggcactttctaaggttc

SEQ ID NO: 110650 - DNA, 17 bp, Arabidopsis thaliana
ggcactttgacttgtta

SEQ ID NO: 110651 - DNA, 17 bp, Arabidopsis thaliana
ggcactttggagctgtt

SEQ ID NO: 110652 - DNA, 17 bp, Arabidopsis thaliana
ggcactttggttcttcg

SEQ ID NO: 110653 - DNA, 17 bp, Arabidopsis thaliana
ggcactttgttcttggt

SEQ ID NO: 110654 - DNA, 17 bp, Arabidopsis thaliana
ggcacttttccaacttt

SEQ ID NO: 110655 - DNA, 17 bp, Arabidopsis thaliana
ggcacttttcggaaata

SEQ ID NO: 110656 - DNA, 17 bp, Arabidopsis thaliana
ggcacttttctcaaaca

SEQ ID NO: 110657 - DNA, 17 bp, Arabidopsis thaliana
ggcacttttgtgacttg

SEQ ID NO: 110658 - DNA, 17 bp, Arabidopsis thaliana
ggcagaaaaacggtcta

SEQ ID NO: 110659 - DNA, 17 bp, Arabidopsis thaliana
ggcagaaacgcaccgaa

SEQ ID NO: 110660 - DNA, 17 bp, Arabidopsis thaliana
ggcagaaactttgatca

SEQ ID NO: 110661 - DNA, 17 bp, Arabidopsis thaliana
ggcagaaatacaggcgg

SEQ ID NO: 110662 - DNA, 17 bp, Arabidopsis thaliana
ggcagaacaggattggc

SEQ ID NO: 110663 - DNA, 17 bp, Arabidopsis thaliana
ggcagaagggagcttga

SEQ ID NO: 110664 - DNA, 17 bp, Arabidopsis thaliana
ggcagaatgtgcttcgt

SEQ ID NO: 110665 - DNA, 17 bp, Arabidopsis thaliana
ggcagaattctattggt

SEQ ID NO: 110666 - DNA, 17 bp, Arabidopsis thaliana
ggcagacaagcttggac

SEQ ID NO: 110667 - DNA, 17 bp, Arabidopsis thaliana
ggcagacattatggatt

SEQ ID NO: 110668 - DNA, 17 bp, Arabidopsis thaliana
ggcagacctttttttcg

SEQ ID NO: 110669 - DNA, 17 bp, Arabidopsis thaliana
ggcagacggtagagagc

SEQ ID NO: 110670 - DNA, 17 bp, Arabidopsis thaliana
ggcagactctagcgggt

SEQ ID NO: 110671 - DNA, 17 bp, Arabidopsis thaliana
ggcagactcttccagag

SEQ ID NO: 110672 - DNA, 17 bp, Arabidopsis thaliana
ggcagagattggaggtg

SEQ ID NO: 110673 - DNA, 17 bp, Arabidopsis thaliana
ggcagagattggaggtt

SEQ ID NO: 110674 - DNA, 17 bp, Arabidopsis thaliana
ggcagagcaactgaggt

SEQ ID NO: 110675 - DNA, 17 bp, Arabidopsis thaliana
ggcagagcccgcgtcga

SEQ ID NO: 110676 - DNA, 17 bp, Arabidopsis thaliana
ggcagagcggccttgct

SEQ ID NO: 110677 - DNA, 17 bp, Arabidopsis thaliana
ggcagaggacattgtca

SEQ ID NO: 110678 - DNA, 17 bp, Arabidopsis thaliana
ggcagaggagaagaacc

SEQ ID NO: 110679 - DNA, 17 bp, Arabidopsis thaliana
ggcagagggaggaggaa

SEQ ID NO: 110680 - DNA, 17 bp, Arabidopsis thaliana
ggcagagtggccgtgct

SEQ ID NO: 110681 - DNA, 17 bp, Arabidopsis thaliana
ggcagagtggccttgct

SEQ ID NO: 110682 - DNA, 17 bp, Arabidopsis thaliana
ggcagagtgttaaggcc

SEQ ID NO: 110683 - DNA, 17 bp, Arabidopsis thaliana
ggcagatatccgagatt

SEQ ID NO: 110684 - DNA, 17 bp, Arabidopsis thaliana
ggcagatattgctgttg

SEQ ID NO: 110685 - DNA, 17 bp, Arabidopsis thaliana
ggcagatattgttgtgg

SEQ ID NO: 110686 - DNA, 17 bp, Arabidopsis thaliana
ggcagatcagcctgggg

SEQ ID NO: 110687 - DNA, 17 bp, Arabidopsis thaliana
ggcagatcgcgaaatac

SEQ ID NO: 110688 - DNA, 17 bp, Arabidopsis thaliana
ggcagatctgcaggttt

SEQ ID NO: 110689 - DNA, 17 bp, Arabidopsis thaliana
ggcagatctgtgcctag

SEQ ID NO: 110690 - DNA, 17 bp, Arabidopsis thaliana
ggcagatgatgatttta

SEQ ID NO: 110691 - DNA, 17 bp, Arabidopsis thaliana
ggcagatgtagccaagt

SEQ ID NO: 110692 - DNA, 17 bp, Arabidopsis thaliana
ggcagattagcctcggg

SEQ ID NO: 110693 - DNA, 17 bp, Arabidopsis thaliana
ggcagattctgagattg

SEQ ID NO: 110694 - DNA, 17 bp, Arabidopsis thaliana
ggcagattcttgtacgg

SEQ ID NO: 110695 - DNA, 17 bp, Arabidopsis thaliana
ggcagattgattgtgtt

SEQ ID NO: 110696 - DNA, 17 bp, Arabidopsis thaliana
ggcagattgcgtctcgg

SEQ ID NO: 110697 - DNA, 17 bp, Arabidopsis thaliana
ggcagatttccagttat

SEQ ID NO: 110698 - DNA, 17 bp, Arabidopsis thaliana
ggcagatttcgtggctg

SEQ ID NO: 110699 - DNA, 17 bp, Arabidopsis thaliana
ggcagcaagcatactcc

SEQ ID NO: 110700 - DNA, 17 bp, Arabidopsis thaliana
ggcagcaagcctgcgca

SEQ ID NO: 110701 - DNA, 17 bp, Arabidopsis thaliana
ggcagcactttgtcggg

SEQ ID NO: 110702 - DNA, 17 bp, Arabidopsis thaliana
ggcagcagacagaccgc

SEQ ID NO: 110703 - DNA, 17 bp, Arabidopsis thaliana
ggcagcagagttatttg

SEQ ID NO: 110704 - DNA, 17 bp, Arabidopsis thaliana
ggcagcagcaatagtgg

SEQ ID NO: 110705 - DNA, 17 bp, Arabidopsis thaliana
ggcagcaggatattcgg

SEQ ID NO: 110706 - DNA, 17 bp, Arabidopsis thaliana
ggcagcaggcagtgcag

SEQ ID NO: 110707 - DNA, 17 bp, Arabidopsis thaliana
ggcagcaggcttgagga

SEQ ID NO: 110708 - DNA, 17 bp, Arabidopsis thaliana
ggcagccaagatcatca

SEQ ID NO: 110709 - DNA, 17 bp, Arabidopsis thaliana
ggcagccaccatccacc

SEQ ID NO: 110710 - DNA, 17 bp, Arabidopsis thaliana
ggcagccaccatccact

SEQ ID NO: 110711 - DNA, 17 bp, Arabidopsis thaliana
ggcagccactgtgaata

SEQ ID NO: 110712 - DNA, 17 bp, Arabidopsis thaliana
ggcagccaggcctcgat

SEQ ID NO: 110713 - DNA, 17 bp, Arabidopsis thaliana
ggcagccattgtaaata

SEQ ID NO: 110714 - DNA, 17 bp, Arabidopsis thaliana
ggcagccattgtgaata

SEQ ID NO: 110715 - DNA, 17 bp, Arabidopsis thaliana
ggcagcccattgtccat

SEQ ID NO: 110716 - DNA, 17 bp, Arabidopsis thaliana
ggcagccgctgtaaata

SEQ ID NO: 110717 - DNA, 17 bp, Arabidopsis thaliana
ggcagcctgtacttctt

SEQ ID NO: 110718 - DNA, 17 bp, Arabidopsis thaliana
ggcagcctttacttagg

SEQ ID NO: 110719 - DNA, 17 bp, Arabidopsis thaliana
ggcagcggggattcgac

SEQ ID NO: 110720 - DNA, 17 bp, Arabidopsis thaliana
ggcagcggtagcggcaa

SEQ ID NO: 110721 - DNA, 17 bp, Arabidopsis thaliana
ggcagcggtagcggcag

SEQ ID NO: 110722 - DNA, 17 bp, Arabidopsis thaliana
ggcagcggtagtgattc

SEQ ID NO: 110723 - DNA, 17 bp, Arabidopsis thaliana
ggcagcggtagtggcag

SEQ ID NO: 110724 - DNA, 17 bp, Arabidopsis thaliana
ggcagcggttcatcgat

SEQ ID NO: 110725 - DNA, 17 bp, Arabidopsis thaliana
ggcagctaattgcgcat

SEQ ID NO: 110726 - DNA, 17 bp, Arabidopsis thaliana
ggcaggaaaacgtgatt

SEQ ID NO: 110727 - DNA, 17 bp, Arabidopsis thaliana
ggcaggaatcgagacta

SEQ ID NO: 110728 - DNA, 17 bp, Arabidopsis thaliana
ggcaggacgcctatggg

SEQ ID NO: 110729 - DNA, 17 bp, Arabidopsis thaliana
ggcaggacgggtttgac

SEQ ID NO: 110730 - DNA, 17 bp, Arabidopsis thaliana
ggcaggacgggtttgat

SEQ ID NO: 110731 - DNA, 17 bp, Arabidopsis thaliana
ggcaggagagacgattc

SEQ ID NO: 110732 - DNA, 17 bp, Arabidopsis thaliana
ggcaggatgggtgacct

SEQ ID NO: 110733 - DNA, 17 bp, Arabidopsis thaliana
ggcaggccgtgatttgt

SEQ ID NO: 110734 - DNA, 17 bp, Arabidopsis thaliana
ggcaggccgtggctctc

SEQ ID NO: 110735 - DNA, 17 bp, Arabidopsis thaliana
ggcaggcctgctgagcc

SEQ ID NO: 110736 - DNA, 17 bp, Arabidopsis thaliana
ggcaggcctgctgaggc

SEQ ID NO: 110737 - DNA, 17 bp, Arabidopsis thaliana
ggcaggcggctatgggc

SEQ ID NO: 110738 - DNA, 17 bp, Arabidopsis thaliana
ggcaggctctggcaaag

SEQ ID NO: 110739 - DNA, 17 bp, Arabidopsis thaliana
ggcagggcacgtctgcc

SEQ ID NO: 110740 - DNA, 17 bp, Arabidopsis thaliana
ggcagggccaaagaagc

SEQ ID NO: 110741 - DNA, 17 bp, Arabidopsis thaliana
ggcagggctagtgactc

SEQ ID NO: 110742 - DNA, 17 bp, Arabidopsis thaliana
ggcagggctagtgactg

SEQ ID NO: 110743 - DNA, 17 bp, Arabidopsis thaliana
ggcaggtagcagtgagc

SEQ ID NO: 110744 - DNA, 17 bp, Arabidopsis thaliana
ggcaggtccgcctttgc

SEQ ID NO: 110745 - DNA, 17 bp, Arabidopsis thaliana
ggcaggtctgcctgggt

SEQ ID NO: 110746 - DNA, 17 bp, Arabidopsis thaliana
ggcaggtggaataggga

SEQ ID NO: 110747 - DNA, 17 bp, Arabidopsis thaliana
ggcagtaggtgaacaga

SEQ ID NO: 110748 - DNA, 17 bp, Arabidopsis thaliana
ggcagtcaaatggataa

SEQ ID NO: 110749 - DNA, 17 bp, Arabidopsis thaliana
ggcagtcagaggagcaa

SEQ ID NO: 110750 - DNA, 17 bp, Arabidopsis thaliana
ggcagtccagatcagtt

SEQ ID NO: 110751 - DNA, 17 bp, Arabidopsis thaliana
ggcagtcgataactccg

SEQ ID NO: 110752 - DNA, 17 bp, Arabidopsis thaliana
ggcagtcgatagggttg

SEQ ID NO: 110753 - DNA, 17 bp, Arabidopsis thaliana
ggcagtcgtcggatcga

SEQ ID NO: 110754 - DNA, 17 bp, Arabidopsis thaliana
ggcagtctccttggcta

SEQ ID NO: 110755 - DNA, 17 bp, Arabidopsis thaliana
ggcagtctcttggctat

SEQ ID NO: 110756 - DNA, 17 bp, Arabidopsis thaliana
ggcagtctctttggcta

SEQ ID NO: 110757 - DNA, 17 bp, Arabidopsis thaliana
ggcagtctgcttggcta

SEQ ID NO: 110758 - DNA, 17 bp, Arabidopsis thaliana
ggcagtgacattccttg

SEQ ID NO: 110759 - DNA, 17 bp, Arabidopsis thaliana
ggcagtgacattgcttg

SEQ ID NO: 110760 - DNA, 17 bp, Arabidopsis thaliana
ggcagtgccgaaggggc

SEQ ID NO: 110761 - DNA, 17 bp, Arabidopsis thaliana
ggcagtgtgctactgtc

SEQ ID NO: 110762 - DNA, 17 bp, Arabidopsis thaliana
ggcagtgtggtgaccta

SEQ ID NO: 110763 - DNA, 17 bp, Arabidopsis thaliana
ggcagtgttgcggacag

SEQ ID NO: 110764 - DNA, 17 bp, Arabidopsis thaliana
ggcagttacggctgagt

SEQ ID NO: 110765 - DNA, 17 bp, Arabidopsis thaliana
ggcagttcgaccgtgaa

SEQ ID NO: 110766 - DNA, 17 bp, Arabidopsis thaliana
ggcagttcgatctatga

SEQ ID NO: 110767 - DNA, 17 bp, Arabidopsis thaliana
ggcagttgctactgtct

SEQ ID NO: 110768 - DNA, 17 bp, Arabidopsis thaliana
ggcagtttctttggcta

SEQ ID NO: 110769 - DNA, 17 bp, Arabidopsis thaliana
ggcagttttgcaaatct

SEQ ID NO: 110770 - DNA, 17 bp, Arabidopsis thaliana
ggcataaaccaacagtc

SEQ ID NO: 110771 - DNA, 17 bp, Arabidopsis thaliana
ggcataaagcgtctgta

SEQ ID NO: 110772 - DNA, 17 bp, Arabidopsis thaliana
ggcataacttttagacc

SEQ ID NO: 110773 - DNA, 17 bp, Arabidopsis thaliana
ggcataatggcggatct

SEQ ID NO: 110774 - DNA, 17 bp, Arabidopsis thaliana
ggcatagatgtgcctta

SEQ ID NO: 110775 - DNA, 17 bp, Arabidopsis thaliana
ggcatagcctaaggata

SEQ ID NO: 110776 - DNA, 17 bp, Arabidopsis thaliana
ggcatagcgcaggtagt

SEQ ID NO: 110777 - DNA, 17 bp, Arabidopsis thaliana
ggcatatgaccagtttt

SEQ ID NO: 110778 - DNA, 17 bp, Arabidopsis thaliana
ggcatatttggtgtcga

SEQ ID NO: 110779 - DNA, 17 bp, Arabidopsis thaliana
ggcatcacaactttcga

SEQ ID NO: 110780 - DNA, 17 bp, Arabidopsis thaliana
ggcatcagccgataggg

SEQ ID NO: 110781 - DNA, 17 bp, Arabidopsis thaliana
ggcatcatactttgggc

SEQ ID NO: 110782 - DNA, 17 bp, Arabidopsis thaliana
ggcatccaggagttgtg

SEQ ID NO: 110783 - DNA, 17 bp, Arabidopsis thaliana
ggcatccgtgcttgttc

SEQ ID NO: 110784 - DNA, 17 bp, Arabidopsis thaliana
ggcatcctgtagatgga

SEQ ID NO: 110785 - DNA, 17 bp, Arabidopsis thaliana
ggcatctcagtggatcg

SEQ ID NO: 110786 - DNA, 17 bp, Arabidopsis thaliana
ggcatctctgcgtgctg

SEQ ID NO: 110787 - DNA, 17 bp, Arabidopsis thaliana
ggcatctcttagtggcg

SEQ ID NO: 110788 - DNA, 17 bp, Arabidopsis thaliana
ggcatctgacgtggctt

SEQ ID NO: 110789 - DNA, 17 bp, Arabidopsis thaliana
ggcatctgtcagttgcg

SEQ ID NO: 110790 - DNA, 17 bp, Arabidopsis thaliana
ggcatcttgatgatgct

SEQ ID NO: 110791 - DNA, 17 bp, Arabidopsis thaliana
ggcatgacctgttcttg

SEQ ID NO: 110792 - DNA, 17 bp, Arabidopsis thaliana
ggcatgagagcgaagat

SEQ ID NO: 110793 - DNA, 17 bp, Arabidopsis thaliana
ggcatgagcggctttcg

SEQ ID NO: 110794 - DNA, 17 bp, Arabidopsis thaliana
ggcatgccgttaaattt

SEQ ID NO: 110795 - DNA, 17 bp, Arabidopsis thaliana
ggcatggccgttcttag

SEQ ID NO: 110796 - DNA, 17 bp, Arabidopsis thaliana
ggcatgggcattttttg

SEQ ID NO: 110797 - DNA, 17 bp, Arabidopsis thaliana
ggcatggggggattacg

SEQ ID NO: 110798 - DNA, 17 bp, Arabidopsis thaliana
ggcatggtctacagcag

SEQ ID NO: 110799 - DNA, 17 bp, Arabidopsis thaliana
ggcatggtcttaggttc

SEQ ID NO: 110800 - DNA, 17 bp, Arabidopsis thaliana
ggcatgtcgtccagcgg

SEQ ID NO: 110801 - DNA, 17 bp, Arabidopsis thaliana
ggcatgtcgttaagtca

SEQ ID NO: 110802 - DNA, 17 bp, Arabidopsis thaliana
ggcatgtcgttaagttt

SEQ ID NO: 110803 - DNA, 17 bp, Arabidopsis thaliana
ggcatgtctattttgac

SEQ ID NO: 110804 - DNA, 17 bp, Arabidopsis thaliana
ggcatgtctgcctgcct

SEQ ID NO: 110805 - DNA, 17 bp, Arabidopsis thaliana
ggcatgtctgcctgcgt

SEQ ID NO: 110806 - DNA, 17 bp, Arabidopsis thaliana
ggcatgtctgcctgggt

SEQ ID NO: 110807 - DNA, 17 bp, Arabidopsis thaliana
ggcatgtgatacctttt

SEQ ID NO: 110808 - DNA, 17 bp, Arabidopsis thaliana
ggcatgtggatgctttt

SEQ ID NO: 110809 - DNA, 17 bp, Arabidopsis thaliana
ggcatgtgggtgcttat

SEQ ID NO: 110810 - DNA, 17 bp, Arabidopsis thaliana
ggcatgtgtcgggctgc

SEQ ID NO: 110811 - DNA, 17 bp, Arabidopsis thaliana
ggcatgtttctgggctg

SEQ ID NO: 110812 - DNA, 17 bp, Arabidopsis thaliana
ggcatgtttggtaaccg

SEQ ID NO: 110813 - DNA, 17 bp, Arabidopsis thaliana
ggcattcatcggtctag

SEQ ID NO: 110814 - DNA, 17 bp, Arabidopsis thaliana
ggcattcgagtaagcgg

SEQ ID NO: 110815 - DNA, 17 bp, Arabidopsis thaliana
ggcattcggattttgga

SEQ ID NO: 110816 - DNA, 17 bp, Arabidopsis thaliana
ggcattcgtatttcata

SEQ ID NO: 110817 - DNA, 17 bp, Arabidopsis thaliana
ggcattctagacgctct

SEQ ID NO: 110818 - DNA, 17 bp, Arabidopsis thaliana
ggcattctgacttcccg

SEQ ID NO: 110819 - DNA, 17 bp, Arabidopsis thaliana
ggcattgaatgatttac

SEQ ID NO: 110820 - DNA, 17 bp, Arabidopsis thaliana
ggcattgacgtacttgg

SEQ ID NO: 110821 - DNA, 17 bp, Arabidopsis thaliana
ggcattgcagtatttgt

SEQ ID NO: 110822 - DNA, 17 bp, Arabidopsis thaliana
ggcattgccgaccctca

SEQ ID NO: 110823 - DNA, 17 bp, Arabidopsis thaliana
ggcattgccgtgatcga

SEQ ID NO: 110824 - DNA, 17 bp, Arabidopsis thaliana
ggcattggagccagaac

SEQ ID NO: 110825 - DNA, 17 bp, Arabidopsis thaliana
ggcattgggaaatcttc

SEQ ID NO: 110826 - DNA, 17 bp, Arabidopsis thaliana
ggcattgggggcgcaac

SEQ ID NO: 110827 - DNA, 17 bp, Arabidopsis thaliana
ggcattgggttgtaaat

SEQ ID NO: 110828 - DNA, 17 bp, Arabidopsis thaliana
ggcattgtgagtgggcc

SEQ ID NO: 110829 - DNA, 17 bp, Arabidopsis thaliana
ggcattgtgtgttgatc

SEQ ID NO: 110830 - DNA, 17 bp, Arabidopsis thaliana
ggcattgttccgggctg

SEQ ID NO: 110831 - DNA, 17 bp, Arabidopsis thaliana
ggcattgttcggctgtc

SEQ ID NO: 110832 - DNA, 17 bp, Arabidopsis thaliana
ggcattgttggtttgca

SEQ ID NO: 110833 - DNA, 17 bp, Arabidopsis thaliana
ggcatttacatctaaat

SEQ ID NO: 110834 - DNA, 17 bp, Arabidopsis thaliana
ggcatttaggtcattag

SEQ ID NO: 110835 - DNA, 17 bp, Arabidopsis thaliana
ggcatttatgagggaga

SEQ ID NO: 110836 - DNA, 17 bp, Arabidopsis thaliana
ggcatttatggctcaag

SEQ ID NO: 110837 - DNA, 17 bp, Arabidopsis thaliana
ggcatttatttttcgtt

SEQ ID NO: 110838 - DNA, 17 bp, Arabidopsis thaliana
ggcatttccgtgatttg

SEQ ID NO: 110839 - DNA, 17 bp, Arabidopsis thaliana
ggcatttctgactacca

SEQ ID NO: 110840 - DNA, 17 bp, Arabidopsis thaliana
ggcatttctgactatca

SEQ ID NO: 110841 - DNA, 17 bp, Arabidopsis thaliana
ggcatttgcagcctgtg

SEQ ID NO: 110842 - DNA, 17 bp, Arabidopsis thaliana
ggcatttgcatttgtaa

SEQ ID NO: 110843 - DNA, 17 bp, Arabidopsis thaliana
ggcatttgcctttgccg

SEQ ID NO: 110844 - DNA, 17 bp, Arabidopsis thaliana
ggcatttggtctagtgg

SEQ ID NO: 110845 - DNA, 17 bp, Arabidopsis thaliana
ggcatttggtctagtgt

SEQ ID NO: 110846 - DNA, 17 bp, Arabidopsis thaliana
ggcattttcatgatttg

SEQ ID NO: 110847 - DNA, 17 bp, Arabidopsis thaliana
ggcattttcgtgatggg

SEQ ID NO: 110848 - DNA, 17 bp, Arabidopsis thaliana
ggcattttcgtgattta

SEQ ID NO: 110849 - DNA, 17 bp, Arabidopsis thaliana
ggcattttcgtgatttg

SEQ ID NO: 110850 - DNA, 17 bp, Arabidopsis thaliana
ggcattttcgtgttggg

SEQ ID NO: 110851 - DNA, 17 bp, Arabidopsis thaliana
ggcattttcttgatttg

SEQ ID NO: 110852 - DNA, 17 bp, Arabidopsis thaliana
ggcatttttccaacttt

SEQ ID NO: 110853 - DNA, 17 bp, Arabidopsis thaliana
ggccaaaatagacatgt

SEQ ID NO: 110854 - DNA, 17 bp, Arabidopsis thaliana
ggccaaactgagatatt

SEQ ID NO: 110855 - DNA, 17 bp, Arabidopsis thaliana
ggccaaacttggcatgt

SEQ ID NO: 110856 - DNA, 17 bp, Arabidopsis thaliana
ggccaaagacttgggtg

SEQ ID NO: 110857 - DNA, 17 bp, Arabidopsis thaliana
ggccaaagcccaactga

SEQ ID NO: 110858 - DNA, 17 bp, Arabidopsis thaliana
ggccaaagtagtgctcg

SEQ ID NO: 110859 - DNA, 17 bp, Arabidopsis thaliana
ggccaaatagatcccca

SEQ ID NO: 110860 - DNA, 17 bp, Arabidopsis thaliana
ggccaaatccaagttct

SEQ ID NO: 110861 - DNA, 17 bp, Arabidopsis thaliana
ggccaaatgccctacat

SEQ ID NO: 110862 - DNA, 17 bp, Arabidopsis thaliana
ggccaaattccaaataa

SEQ ID NO: 110863 - DNA, 17 bp, Arabidopsis thaliana
ggccaacaagtgtgact

SEQ ID NO: 110864 - DNA, 17 bp, Arabidopsis thaliana
ggccaaccgggacaact

SEQ ID NO: 110865 - DNA, 17 bp, Arabidopsis thaliana
ggccaacgatgatcaag

SEQ ID NO: 110866 - DNA, 17 bp, Arabidopsis thaliana
ggccaactcgtttttca

SEQ ID NO: 110867 - DNA, 17 bp, Arabidopsis thaliana
ggccaactctctccatc

SEQ ID NO: 110868 - DNA, 17 bp, Arabidopsis thaliana
ggccaactctctccatt

SEQ ID NO: 110869 - DNA, 17 bp, Arabidopsis thaliana
ggccaactctctccctt

SEQ ID NO: 110870 - DNA, 17 bp, Arabidopsis thaliana
ggccaactctctctata

SEQ ID NO: 110871 - DNA, 17 bp, Arabidopsis thaliana
ggccaagagttccggta

SEQ ID NO: 110872 - DNA, 17 bp, Arabidopsis thaliana
ggccaagcacatgtttc

SEQ ID NO: 110873 - DNA, 17 bp, Arabidopsis thaliana
ggccaaggatgacttgc

SEQ ID NO: 110874 - DNA, 17 bp, Arabidopsis thaliana
ggccaaggcatgaggcc

SEQ ID NO: 110875 - DNA, 17 bp, Arabidopsis thaliana
ggccaaggccttctcgg

SEQ ID NO: 110876 - DNA, 17 bp, Arabidopsis thaliana
ggccaagggcacgtccg

SEQ ID NO: 110877 - DNA, 17 bp, Arabidopsis thaliana
ggccaagggcacgtctg

SEQ ID NO: 110878 - DNA, 17 bp, Arabidopsis thaliana
ggccaagtgacttgtga

SEQ ID NO: 110879 - DNA, 17 bp, Arabidopsis thaliana
ggccaagtgtactaata

SEQ ID NO: 110880 - DNA, 17 bp, Arabidopsis thaliana
ggccaagtttgggctca

SEQ ID NO: 110881 - DNA, 17 bp, Arabidopsis thaliana
ggccaatactctccata

SEQ ID NO: 110882 - DNA, 17 bp, Arabidopsis thaliana
ggccaatcaggagcgga

SEQ ID NO: 110883 - DNA, 17 bp, Arabidopsis thaliana
ggccaatctaacgaccc

SEQ ID NO: 110884 - DNA, 17 bp, Arabidopsis thaliana
ggccaatctaccgaccc

SEQ ID NO: 110885 - DNA, 17 bp, Arabidopsis thaliana
ggccaatgagtgacgcg

SEQ ID NO: 110886 - DNA, 17 bp, Arabidopsis thaliana
ggccaattcggactatt

SEQ ID NO: 110887 - DNA, 17 bp, Arabidopsis thaliana
ggccaattttgtggttg

SEQ ID NO: 110888 - DNA, 17 bp, Arabidopsis thaliana
ggccacaaccatacttc

SEQ ID NO: 110889 - DNA, 17 bp, Arabidopsis thaliana
ggccacaaccgttacgt

SEQ ID NO: 110890 - DNA, 17 bp, Arabidopsis thaliana
ggccacaaggaagtttg

SEQ ID NO: 110891 - DNA, 17 bp, Arabidopsis thaliana
ggccacaaggaagtttt

SEQ ID NO: 110892 - DNA, 17 bp, Arabidopsis thaliana
ggccacaccgcccgtcg

SEQ ID NO: 110893 - DNA, 17 bp, Arabidopsis thaliana
ggccacacgatgttccc

SEQ ID NO: 110894 - DNA, 17 bp, Arabidopsis thaliana
ggccacagctttcttga

SEQ ID NO: 110895 - DNA, 17 bp, Arabidopsis thaliana
ggccacagtgttgacct

SEQ ID NO: 110896 - DNA, 17 bp, Arabidopsis thaliana
ggccacagttacggcga

SEQ ID NO: 110897 - DNA, 17 bp, Arabidopsis thaliana
ggccacatgtgtgattc

SEQ ID NO: 110898 - DNA, 17 bp, Arabidopsis thaliana
ggccacattcaaaacaa

SEQ ID NO: 110899 - DNA, 17 bp, Arabidopsis thaliana
ggccaccaccgactccg

SEQ ID NO: 110900 - DNA, 17 bp, Arabidopsis thaliana
ggccaccgggatcggtt

SEQ ID NO: 110901 - DNA, 17 bp, Arabidopsis thaliana
ggccacctgtaatgggt

SEQ ID NO: 110902 - DNA, 17 bp, Arabidopsis thaliana
ggccacgatgtctgtag

SEQ ID NO: 110903 - DNA, 17 bp, Arabidopsis thaliana
ggccacgccttggggaa

SEQ ID NO: 110904 - DNA, 17 bp, Arabidopsis thaliana
ggccacgctctgtctgt

SEQ ID NO: 110905 - DNA, 17 bp, Arabidopsis thaliana
ggccacggcggtctgac

SEQ ID NO: 110906 - DNA, 17 bp, Arabidopsis thaliana
ggccacggttaaatgac

SEQ ID NO: 110907 - DNA, 17 bp, Arabidopsis thaliana
ggccacgtctccctgcg

SEQ ID NO: 110908 - DNA, 17 bp, Arabidopsis thaliana
ggccacgtctgcctggg

SEQ ID NO: 110909 - DNA, 17 bp, Arabidopsis thaliana
ggccacgtgttttttca

SEQ ID NO: 110910 - DNA, 17 bp, Arabidopsis thaliana
ggccacgtgttttttta

SEQ ID NO: 110911 - DNA, 17 bp, Arabidopsis thaliana
ggccacgtgtttttttt

SEQ ID NO: 110912 - DNA, 17 bp, Arabidopsis thaliana
ggccactacaagagcaa

SEQ ID NO: 110913 - DNA, 17 bp, Arabidopsis thaliana
ggccactacaagagcac

SEQ ID NO: 110914 - DNA, 17 bp, Arabidopsis thaliana
ggccactagggtacacc

SEQ ID NO: 110915 - DNA, 17 bp, Arabidopsis thaliana
ggccactgcgagtttgt

SEQ ID NO: 110916 - DNA, 17 bp, Arabidopsis thaliana
ggccactgctctatctg

SEQ ID NO: 110917 - DNA, 17 bp, Arabidopsis thaliana
ggccacttgtcagggat

SEQ ID NO: 110918 - DNA, 17 bp, Arabidopsis thaliana
ggccactttttgaaaat

SEQ ID NO: 110919 - DNA, 17 bp, Arabidopsis thaliana
ggccagaaaagggctca

SEQ ID NO: 110920 - DNA, 17 bp, Arabidopsis thaliana
ggccagaaacgtctctc

SEQ ID NO: 110921 - DNA, 17 bp, Arabidopsis thaliana
ggccagaaggcttgggg

SEQ ID NO: 110922 - DNA, 17 bp, Arabidopsis thaliana
ggccagaccggtgtcca

SEQ ID NO: 110923 - DNA, 17 bp, Arabidopsis thaliana
ggccagaccgttgtcca

SEQ ID NO: 110924 - DNA, 17 bp, Arabidopsis thaliana
ggccagactgaccgtcg

SEQ ID NO: 110925 - DNA, 17 bp, Arabidopsis thaliana
ggccagaggaagtgatg

SEQ ID NO: 110926 - DNA, 17 bp, Arabidopsis thaliana
ggccagatatgtgacat

SEQ ID NO: 110927 - DNA, 17 bp, Arabidopsis thaliana
ggccagatctgactcta

SEQ ID NO: 110928 - DNA, 17 bp, Arabidopsis thaliana
ggccagattagttccgt

SEQ ID NO: 110929 - DNA, 17 bp, Arabidopsis thaliana
ggccagcaccgcagtcg

SEQ ID NO: 110930 - DNA, 17 bp, Arabidopsis thaliana
ggccagcaccgcggtcg

SEQ ID NO: 110931 - DNA, 17 bp, Arabidopsis thaliana
ggccagcaccgctctga

SEQ ID NO: 110932 - DNA, 17 bp, Arabidopsis thaliana
ggccagcaggcgggcga

SEQ ID NO: 110933 - DNA, 17 bp, Arabidopsis thaliana
ggccagcccactttgac

SEQ ID NO: 110934 - DNA, 17 bp, Arabidopsis thaliana
ggccagcccactttgtc

SEQ ID NO: 110935 - DNA, 17 bp, Arabidopsis thaliana
ggccaggattagacgcg

SEQ ID NO: 110936 - DNA, 17 bp, Arabidopsis thaliana
ggccagggaaggtgggg

SEQ ID NO: 110937 - DNA, 17 bp, Arabidopsis thaliana
ggccagggcacgtctgc

SEQ ID NO: 110938 - DNA, 17 bp, Arabidopsis thaliana
ggccaggtcaacgttta

SEQ ID NO: 110939 - DNA, 17 bp, Arabidopsis thaliana
ggccaggtcaacgtttt

SEQ ID NO: 110940 - DNA, 17 bp, Arabidopsis thaliana
ggccagtccgcctttgg

SEQ ID NO: 110941 - DNA, 17 bp, Arabidopsis thaliana
ggccagtctgctaggac

SEQ ID NO: 110942 - DNA, 17 bp, Arabidopsis thaliana
ggccagtgagacggtgg

SEQ ID NO: 110943 - DNA, 17 bp, Arabidopsis thaliana
ggccagtgccagttttt

SEQ ID NO: 110944 - DNA, 17 bp, Arabidopsis thaliana
ggccagttgtgtcataa

SEQ ID NO: 110945 - DNA, 17 bp, Arabidopsis thaliana
ggccatactagtgtcac

SEQ ID NO: 110946 - DNA, 17 bp, Arabidopsis thaliana
ggccatatctgactctg

SEQ ID NO: 110947 - DNA, 17 bp, Arabidopsis thaliana
ggccatcaagcaagggc

SEQ ID NO: 110948 - DNA, 17 bp, Arabidopsis thaliana
ggccatcggggcaagat

SEQ ID NO: 110949 - DNA, 17 bp, Arabidopsis thaliana
ggccatgaatggtgaca

SEQ ID NO: 110950 - DNA, 17 bp, Arabidopsis thaliana
ggccatgagaaccttgt

SEQ ID NO: 110951 - DNA, 17 bp, Arabidopsis thaliana
ggccatggtgtcagagt

SEQ ID NO: 110952 - DNA, 17 bp, Arabidopsis thaliana
ggccatgttcaaactct

SEQ ID NO: 110953 - DNA, 17 bp, Arabidopsis thaliana
ggccattcggttggaaa

SEQ ID NO: 110954 - DNA, 17 bp, Arabidopsis thaliana
ggccattcggttggaca

SEQ ID NO: 110955 - DNA, 17 bp, Arabidopsis thaliana
ggccattcttcaggtga

SEQ ID NO: 110956 - DNA, 17 bp, Arabidopsis thaliana
ggccattgcaatttctt

SEQ ID NO: 110957 - DNA, 17 bp, Arabidopsis thaliana
ggccattgggctttgga

SEQ ID NO: 110958 - DNA, 17 bp, Arabidopsis thaliana
ggccattgtagcacgtg

SEQ ID NO: 110959 - DNA, 17 bp, Arabidopsis thaliana
ggccatttcaaaaattc

SEQ ID NO: 110960 - DNA, 17 bp, Arabidopsis thaliana
ggccatttccgagtttc

SEQ ID NO: 110961 - DNA, 17 bp, Arabidopsis thaliana
ggccatttcgtgatctg

SEQ ID NO: 110962 - DNA, 17 bp, Arabidopsis thaliana
ggccatttggatgaacc

SEQ ID NO: 110963 - DNA, 17 bp, Arabidopsis thaliana
ggccattttatacatca

SEQ ID NO: 110964 - DNA, 17 bp, Arabidopsis thaliana
ggccattttattcgtca

SEQ ID NO: 110965 - DNA, 17 bp, Arabidopsis thaliana
ggccattttcgtgattt

SEQ ID NO: 110966 - DNA, 17 bp, Arabidopsis thaliana
ggccattttgttgggaa

SEQ ID NO: 110967 - DNA, 17 bp, Arabidopsis thaliana
ggccattttttcaaacg

SEQ ID NO: 110968 - DNA, 17 bp, Arabidopsis thaliana
ggccattttttgaaagt

SEQ ID NO: 110969 - DNA, 17 bp, Arabidopsis thaliana
ggcccaaaagggaagga

SEQ ID NO: 110970 - DNA, 17 bp, Arabidopsis thaliana
ggcccaaactaatgtgt

SEQ ID NO: 110971 - DNA, 17 bp, Arabidopsis thaliana
ggcccaaagacagccct

SEQ ID NO: 110972 - DNA, 17 bp, Arabidopsis thaliana
ggcccaaagggtgtcat

SEQ ID NO: 110973 - DNA, 17 bp, Arabidopsis thaliana
ggcccaacaccggattg

SEQ ID NO: 110974 - DNA, 17 bp, Arabidopsis thaliana
ggcccaacgacttgcag

SEQ ID NO: 110975 - DNA, 17 bp, Arabidopsis thaliana
ggcccaagcgtcactcg

SEQ ID NO: 110976 - DNA, 17 bp, Arabidopsis thaliana
ggcccaaggatgacttg

SEQ ID NO: 110977 - DNA, 17 bp, Arabidopsis thaliana
ggcccaaggtgagagat

SEQ ID NO: 110978 - DNA, 17 bp, Arabidopsis thaliana
ggcccaagtcgttcctc

SEQ ID NO: 110979 - DNA, 17 bp, Arabidopsis thaliana
ggcccaataattgatca

SEQ ID NO: 110980 - DNA, 17 bp, Arabidopsis thaliana
ggcccaatactttgctt

SEQ ID NO: 110981 - DNA, 17 bp, Arabidopsis thaliana
ggcccaatcatgcactt

SEQ ID NO: 110982 - DNA, 17 bp, Arabidopsis thaliana
ggcccaatggactagtc

SEQ ID NO: 110983 - DNA, 17 bp, Arabidopsis thaliana
ggcccaatgggctaatg

SEQ ID NO: 110984 - DNA, 17 bp, Arabidopsis thaliana
ggcccaatgggctaatt

SEQ ID NO: 110985 - DNA, 17 bp, Arabidopsis thaliana
ggcccaatggttgacca

SEQ ID NO: 110986 - DNA, 17 bp, Arabidopsis thaliana
ggcccaatgtcattcct

SEQ ID NO: 110987 - DNA, 17 bp, Arabidopsis thaliana
ggcccaattctatctga

SEQ ID NO: 110988 - DNA, 17 bp, Arabidopsis thaliana
ggcccaattttacatgg

SEQ ID NO: 110989 - DNA, 17 bp, Arabidopsis thaliana
ggcccaccacactgtct

SEQ ID NO: 110990 - DNA, 17 bp, Arabidopsis thaliana
ggcccaccaggagtgaa

SEQ ID NO: 110991 - DNA, 17 bp, Arabidopsis thaliana
ggcccaccatggtggta

SEQ ID NO: 110992 - DNA, 17 bp, Arabidopsis thaliana
ggcccacgggtcggatc

SEQ ID NO: 110993 - DNA, 17 bp, Arabidopsis thaliana
ggcccactttacgacgc

SEQ ID NO: 110994 - DNA, 17 bp, Arabidopsis thaliana
ggcccagaacctcctaa

SEQ ID NO: 110995 - DNA, 17 bp, Arabidopsis thaliana
ggcccagaaccttctag

SEQ ID NO: 110996 - DNA, 17 bp, Arabidopsis thaliana
ggcccagacacttttcc

SEQ ID NO: 110997 - DNA, 17 bp, Arabidopsis thaliana
ggcccagactagcccac

SEQ ID NO: 110998 - DNA, 17 bp, Arabidopsis thaliana
ggcccagatcaggcgcg

SEQ ID NO: 110999 - DNA, 17 bp, Arabidopsis thaliana
ggcccagcccacagtgt

SEQ ID NO: 111000 - DNA, 17 bp, Arabidopsis thaliana
ggcccaggccacctctc

SEQ ID NO: 111001 - DNA, 17 bp, Arabidopsis thaliana
ggcccagggcacgtctg

SEQ ID NO: 111002 - DNA, 17 bp, Arabidopsis thaliana
ggcccagtctcatgcag

SEQ ID NO: 111003 - DNA, 17 bp, Arabidopsis thaliana
ggcccagtggtctaagt

SEQ ID NO: 111004 - DNA, 17 bp, Arabidopsis thaliana
ggcccatagctcagtgg

SEQ ID NO: 111005 - DNA, 17 bp, Arabidopsis thaliana
ggcccatcatccaacca

SEQ ID NO: 111006 - DNA, 17 bp, Arabidopsis thaliana
ggcccatcatccaagcc

SEQ ID NO: 111007 - DNA, 17 bp, Arabidopsis thaliana
ggcccatcatctaaccc

SEQ ID NO: 111008 - DNA, 17 bp, Arabidopsis thaliana
ggcccatcatctaagcc

SEQ ID NO: 111009 - DNA, 17 bp, Arabidopsis thaliana
ggcccatcatctaagtc

SEQ ID NO: 111010 - DNA, 17 bp, Arabidopsis thaliana
ggcccatgtccattaac

SEQ ID NO: 111011 - DNA, 17 bp, Arabidopsis thaliana
ggcccattagctcagta

SEQ ID NO: 111012 - DNA, 17 bp, Arabidopsis thaliana
ggcccattagctcagtc

SEQ ID NO: 111013 - DNA, 17 bp, Arabidopsis thaliana
ggcccattagctcagtt

SEQ ID NO: 111014 - DNA, 17 bp, Arabidopsis thaliana
ggccccacccacccacc

SEQ ID NO: 111015 - DNA, 17 bp, Arabidopsis thaliana
ggccccatagctcagtg

SEQ ID NO: 111016 - DNA, 17 bp, Arabidopsis thaliana
ggcccccagcaggaggc

SEQ ID NO: 111017 - DNA, 17 bp, Arabidopsis thaliana
ggcccccgactgttgcc

SEQ ID NO: 111018 - DNA, 17 bp, Arabidopsis thaliana
ggccccgtagctcagtt

SEQ ID NO: 111019 - DNA, 17 bp, Arabidopsis thaliana
ggcccctaaatgaccgc

SEQ ID NO: 111020 - DNA, 17 bp, Arabidopsis thaliana
ggcccctttaccattct

SEQ ID NO: 111021 - DNA, 17 bp, Arabidopsis thaliana
ggcccgaaaccataaca

SEQ ID NO: 111022 - DNA, 17 bp, Arabidopsis thaliana
ggcccgaaccccgtaat

SEQ ID NO: 111023 - DNA, 17 bp, Arabidopsis thaliana
ggcccgagcagaagtcc

SEQ ID NO: 111024 - DNA, 17 bp, Arabidopsis thaliana
ggcccgagtctttatta

SEQ ID NO: 111025 - DNA, 17 bp, Arabidopsis thaliana
ggcccgatacacctcac

SEQ ID NO: 111026 - DNA, 17 bp, Arabidopsis thaliana
ggcccgatctatcttct

SEQ ID NO: 111027 - DNA, 17 bp, Arabidopsis thaliana
ggcccgattgccgaccc

SEQ ID NO: 111028 - DNA, 17 bp, Arabidopsis thaliana
ggcccgcccgattgccg

SEQ ID NO: 111029 - DNA, 17 bp, Arabidopsis thaliana
ggcccgcctaaatagat

SEQ ID NO: 111030 - DNA, 17 bp, Arabidopsis thaliana
ggcccggcccatgacat

SEQ ID NO: 111031 - DNA, 17 bp, Arabidopsis thaliana
ggcccgggcgactgttt

SEQ ID NO: 111032 - DNA, 17 bp, Arabidopsis thaliana
ggcccgggtttggcagg

SEQ ID NO: 111033 - DNA, 17 bp, Arabidopsis thaliana
ggcccgtctttagatcc

SEQ ID NO: 111034 - DNA, 17 bp, Arabidopsis thaliana
ggcccgtgaggccaaac

SEQ ID NO: 111035 - DNA, 17 bp, Arabidopsis thaliana
ggccctaaggctttgaa

SEQ ID NO: 111036 - DNA, 17 bp, Arabidopsis thaliana
ggccctaatggctaaaa

SEQ ID NO: 111037 - DNA, 17 bp, Arabidopsis thaliana
ggccctaattgacttgt

SEQ ID NO: 111038 - DNA, 17 bp, Arabidopsis thaliana
ggccctacatctcccag

SEQ ID NO: 111039 - DNA, 17 bp, Arabidopsis thaliana
ggccctagcttgagtgt

SEQ ID NO: 111040 - DNA, 17 bp, Arabidopsis thaliana
ggccctccagatccttc

SEQ ID NO: 111041 - DNA, 17 bp, Arabidopsis thaliana
ggccctcgagatcttgc

SEQ ID NO: 111042 - DNA, 17 bp, Arabidopsis thaliana
ggccctcgagatcttgt

SEQ ID NO: 111043 - DNA, 17 bp, Arabidopsis thaliana
ggccctctattttggtc

SEQ ID NO: 111044 - DNA, 17 bp, Arabidopsis thaliana
ggccctctccgcgactc

SEQ ID NO: 111045 - DNA, 17 bp, Arabidopsis thaliana
ggccctgacattagatt

SEQ ID NO: 111046 - DNA, 17 bp, Arabidopsis thaliana
ggccctgcaggaatcgg

SEQ ID NO: 111047 - DNA, 17 bp, Arabidopsis thaliana
ggccctgccaacattgg

SEQ ID NO: 111048 - DNA, 17 bp, Arabidopsis thaliana
ggccctgcggaaggatc

SEQ ID NO: 111049 - DNA, 17 bp, Arabidopsis thaliana
ggccctgctgtgtttag

SEQ ID NO: 111050 - DNA, 17 bp, Arabidopsis thaliana
ggccctgggctaaagtt

SEQ ID NO: 111051 - DNA, 17 bp, Arabidopsis thaliana
ggccctggtttatctga

SEQ ID NO: 111052 - DNA, 17 bp, Arabidopsis thaliana
ggccctgtcgccattat

SEQ ID NO: 111053 - DNA, 17 bp, Arabidopsis thaliana
ggccctgttcgtttgat

SEQ ID NO: 111054 - DNA, 17 bp, Arabidopsis thaliana
ggccctgttcgtttgcc

SEQ ID NO: 111055 - DNA, 17 bp, Arabidopsis thaliana
ggccctgttcgtttgct

SEQ ID NO: 111056 - DNA, 17 bp, Arabidopsis thaliana
ggccctgttcgttttct

SEQ ID NO: 111057 - DNA, 17 bp, Arabidopsis thaliana
ggccctgtttattccca

SEQ ID NO: 111058 - DNA, 17 bp, Arabidopsis thaliana
ggccctgtttgtatcgc

SEQ ID NO: 111059 - DNA, 17 bp, Arabidopsis thaliana
ggcccttcaagatgcgg

SEQ ID NO: 111060 - DNA, 17 bp, Arabidopsis thaliana
ggcccttgggatgggtc

SEQ ID NO: 111061 - DNA, 17 bp, Arabidopsis thaliana
ggccctttaagatccga

SEQ ID NO: 111062 - DNA, 17 bp, Arabidopsis thaliana
ggccctttcgtgatctt

SEQ ID NO: 111063 - DNA, 17 bp, Arabidopsis thaliana
ggccctttgtacacacc

SEQ ID NO: 111064 - DNA, 17 bp, Arabidopsis thaliana
ggccctttgtcgctaag

SEQ ID NO: 111065 - DNA, 17 bp, Arabidopsis thaliana
ggccctttttggaactg

SEQ ID NO: 111066 - DNA, 17 bp, Arabidopsis thaliana
ggccgaaacccctaatc

SEQ ID NO: 111067 - DNA, 17 bp, Arabidopsis thaliana
ggccgaaacccgtaatc

SEQ ID NO: 111068 - DNA, 17 bp, Arabidopsis thaliana
ggccgaaaccgtaatcc

SEQ ID NO: 111069 - DNA, 17 bp, Arabidopsis thaliana
ggccgaaactcgtaatc

SEQ ID NO: 111070 - DNA, 17 bp, Arabidopsis thaliana
ggccgaaatcagttatg

SEQ ID NO: 111071 - DNA, 17 bp, Arabidopsis thaliana
ggccgaaatccgtaatt

SEQ ID NO: 111072 - DNA, 17 bp, Arabidopsis thaliana
ggccgaacccgggcgaa

SEQ ID NO: 111073 - DNA, 17 bp, Arabidopsis thaliana
ggccgaacccgggctca

SEQ ID NO: 111074 - DNA, 17 bp, Arabidopsis thaliana
ggccgaagaggggaaag

SEQ ID NO: 111075 - DNA, 17 bp, Arabidopsis thaliana
ggccgaagcccgtaatc

SEQ ID NO: 111076 - DNA, 17 bp, Arabidopsis thaliana
ggccgaagcccgttatc

SEQ ID NO: 111077 - DNA, 17 bp, Arabidopsis thaliana
ggccgaaggcacgtctg

SEQ ID NO: 111078 - DNA, 17 bp, Arabidopsis thaliana
ggccgaatcctgtagtc

SEQ ID NO: 111079 - DNA, 17 bp, Arabidopsis thaliana
ggccgaatgttgcaact

SEQ ID NO: 111080 - DNA, 17 bp, Arabidopsis thaliana
ggccgaattacagtcac

SEQ ID NO: 111081 - DNA, 17 bp, Arabidopsis thaliana
ggccgaattacagtcgc

SEQ ID NO: 111082 - DNA, 17 bp, Arabidopsis thaliana
ggccgaattctatgctg

SEQ ID NO: 111083 - DNA, 17 bp, Arabidopsis thaliana
ggccgaattgatgttgt

SEQ ID NO: 111084 - DNA, 17 bp, Arabidopsis thaliana
ggccgaattgggcatcc

SEQ ID NO: 111085 - DNA, 17 bp, Arabidopsis thaliana
ggccgaattgggcatgg

SEQ ID NO: 111086 - DNA, 17 bp, Arabidopsis thaliana
ggccgacagacccgggt

SEQ ID NO: 111087 - DNA, 17 bp, Arabidopsis thaliana
ggccgacaggcccggat

SEQ ID NO: 111088 - DNA, 17 bp, Arabidopsis thaliana
ggccgacaggcccgggt

SEQ ID NO: 111089 - DNA, 17 bp, Arabidopsis thaliana
ggccgacatggccgatt

SEQ ID NO: 111090 - DNA, 17 bp, Arabidopsis thaliana
ggccgacgactagatgg

SEQ ID NO: 111091 - DNA, 17 bp, Arabidopsis thaliana
ggccgacgcggattacg

SEQ ID NO: 111092 - DNA, 17 bp, Arabidopsis thaliana
ggccgacggatcgcatg

SEQ ID NO: 111093 - DNA, 17 bp, Arabidopsis thaliana
ggccgacggatctctat

SEQ ID NO: 111094 - DNA, 17 bp, Arabidopsis thaliana
ggccgacggcacgtctg

SEQ ID NO: 111095 - DNA, 17 bp, Arabidopsis thaliana
ggccgacgtcagagttc

SEQ ID NO: 111096 - DNA, 17 bp, Arabidopsis thaliana
ggccgacgttagtagct

SEQ ID NO: 111097 - DNA, 17 bp, Arabidopsis thaliana
ggccgactggtcgatgg

SEQ ID NO: 111098 - DNA, 17 bp, Arabidopsis thaliana
ggccgagagcacgtctg

SEQ ID NO: 111099 - DNA, 17 bp, Arabidopsis thaliana
ggccgagccacgtctgc

SEQ ID NO: 111100 - DNA, 17 bp, Arabidopsis thaliana
ggccgagcccacctccc

SEQ ID NO: 111101 - DNA, 17 bp, Arabidopsis thaliana
ggccgagcgacccaccc

SEQ ID NO: 111102 - DNA, 17 bp, Arabidopsis thaliana
ggccgagcgattaggtt

SEQ ID NO: 111103 - DNA, 17 bp, Arabidopsis thaliana
ggccgagcgcacgtctg

SEQ ID NO: 111104 - DNA, 17 bp, Arabidopsis thaliana
ggccgaggacacgtctg

SEQ ID NO: 111105 - DNA, 17 bp, Arabidopsis thaliana
ggccgaggcacgtctgc

SEQ ID NO: 111106 - DNA, 17 bp, Arabidopsis thaliana
ggccgaggccacgtctg

SEQ ID NO: 111107 - DNA, 17 bp, Arabidopsis thaliana
ggccgagggaacgtctg

SEQ ID NO: 111108 - DNA, 17 bp, Arabidopsis thaliana
ggccgagggaccgaccc

SEQ ID NO: 111109 - DNA, 17 bp, Arabidopsis thaliana
ggccgagggacgtctgc

SEQ ID NO: 111110 - DNA, 17 bp, Arabidopsis thaliana
ggccgagggcaagtcgg

SEQ ID NO: 111111 - DNA, 17 bp, Arabidopsis thaliana
ggccgagggcacactgc

SEQ ID NO: 111112 - DNA, 17 bp, Arabidopsis thaliana
ggccgagggcacatctg

SEQ ID NO: 111113 - DNA, 17 bp, Arabidopsis thaliana
ggccgagggcacctctg

SEQ ID NO: 111114 - DNA, 17 bp, Arabidopsis thaliana
ggccgagggcacgaccg

SEQ ID NO: 111115 - DNA, 17 bp, Arabidopsis thaliana
ggccgagggcacgactg

SEQ ID NO: 111116 - DNA, 17 bp, Arabidopsis thaliana
ggccgagggcacgcccc

SEQ ID NO: 111117 - DNA, 17 bp, Arabidopsis thaliana
ggccgagggcacgcccg

SEQ ID NO: 111118 - DNA, 17 bp, Arabidopsis thaliana
ggccgagggcacgcctg

SEQ ID NO: 111119 - DNA, 17 bp, Arabidopsis thaliana
ggccgagggcacgctgc

SEQ ID NO: 111120 - DNA, 17 bp, Arabidopsis thaliana
ggccgagggcacgtcac

SEQ ID NO: 111121 - DNA, 17 bp, Arabidopsis thaliana
ggccgagggcacgtcag

SEQ ID NO: 111122 - DNA, 17 bp, Arabidopsis thaliana
ggccgagggcacgtccc

SEQ ID NO: 111123 - DNA, 17 bp, Arabidopsis thaliana
ggccgagggcacgtccg

SEQ ID NO: 111124 - DNA, 17 bp, Arabidopsis thaliana
ggccgagggcacgtcga

SEQ ID NO: 111125 - DNA, 17 bp, Arabidopsis thaliana
ggccgagggcacgtcgc

SEQ ID NO: 111126 - DNA, 17 bp, Arabidopsis thaliana
ggccgagggcacgtcgg

SEQ ID NO: 111127 - DNA, 17 bp, Arabidopsis thaliana
ggccgagggcacgtcta

SEQ ID NO: 111128 - DNA, 17 bp, Arabidopsis thaliana
ggccgagggcacgtctc

SEQ ID NO: 111129 - DNA, 17 bp, Arabidopsis thaliana
ggccgagggcacgtctg

SEQ ID NO: 111130 - DNA, 17 bp, Arabidopsis thaliana
ggccgagggcacgtctt

SEQ ID NO: 111131 - DNA, 17 bp, Arabidopsis thaliana
ggccgagggcacgttcg

SEQ ID NO: 111132 - DNA, 17 bp, Arabidopsis thaliana
ggccgagggcacgttgc

SEQ ID NO: 111133 - DNA, 17 bp, Arabidopsis thaliana
ggccgagggcacgtttg

SEQ ID NO: 111134 - DNA, 17 bp, Arabidopsis thaliana
ggccgagggcactctgc

SEQ ID NO: 111135 - DNA, 17 bp, Arabidopsis thaliana
ggccgagggcactgccg

SEQ ID NO: 111136 - DNA, 17 bp, Arabidopsis thaliana
ggccgagggcactgcct

SEQ ID NO: 111137 - DNA, 17 bp, Arabidopsis thaliana
ggccgagggcacttctg

SEQ ID NO: 111138 - DNA, 17 bp, Arabidopsis thaliana
ggccgagggcaggtctg

SEQ ID NO: 111139 - DNA, 17 bp, Arabidopsis thaliana
ggccgagggcatgtctg

SEQ ID NO: 111140 - DNA, 17 bp, Arabidopsis thaliana
ggccgagggcccctccc

SEQ ID NO: 111141 - DNA, 17 bp, Arabidopsis thaliana
ggccgagggcccggccg

SEQ ID NO: 111142 - DNA, 17 bp, Arabidopsis thaliana
ggccgagggccgtctgc

SEQ ID NO: 111143 - DNA, 17 bp, Arabidopsis thaliana
ggccgagggcgcgtctg

SEQ ID NO: 111144 - DNA, 17 bp, Arabidopsis thaliana
ggccgagggtaaaaatg

SEQ ID NO: 111145 - DNA, 17 bp, Arabidopsis thaliana
ggccgagggtacgtctg

SEQ ID NO: 111146 - DNA, 17 bp, Arabidopsis thaliana
ggccgaggtgcaggtcg

SEQ ID NO: 111147 - DNA, 17 bp, Arabidopsis thaliana
ggccgagtggtaaggcg

SEQ ID NO: 111148 - DNA, 17 bp, Arabidopsis thaliana
ggccgagtggtctaagg

SEQ ID NO: 111149 - DNA, 17 bp, Arabidopsis thaliana
ggccgagttcacacgtg

SEQ ID NO: 111150 - DNA, 17 bp, Arabidopsis thaliana
ggccgagttgccaagat

SEQ ID NO: 111151 - DNA, 17 bp, Arabidopsis thaliana
ggccgataaggggctaa

SEQ ID NO: 111152 - DNA, 17 bp, Arabidopsis thaliana
ggccgatccgtgaagct

SEQ ID NO: 111153 - DNA, 17 bp, Arabidopsis thaliana
ggccgatcgtctgacgg

SEQ ID NO: 111154 - DNA, 17 bp, Arabidopsis thaliana
ggccgatggaccgatgg

SEQ ID NO: 111155 - DNA, 17 bp, Arabidopsis thaliana
ggccgatggcacgtctg

SEQ ID NO: 111156 - DNA, 17 bp, Arabidopsis thaliana
ggccgattatgttgtct

SEQ ID NO: 111157 - DNA, 17 bp, Arabidopsis thaliana
ggccgcaagcatgaatt

SEQ ID NO: 111158 - DNA, 17 bp, Arabidopsis thaliana
ggccgcatacgaagttg

SEQ ID NO: 111159 - DNA, 17 bp, Arabidopsis thaliana
ggccgcatcctgtagat

SEQ ID NO: 111160 - DNA, 17 bp, Arabidopsis thaliana
ggccgcatgagagtgag

SEQ ID NO: 111161 - DNA, 17 bp, Arabidopsis thaliana
ggccgccgctctcactc

SEQ ID NO: 111162 - DNA, 17 bp, Arabidopsis thaliana
ggccgccgctctcagat

SEQ ID NO: 111163 - DNA, 17 bp, Arabidopsis thaliana
ggccgcctgcatttctg

SEQ ID NO: 111164 - DNA, 17 bp, Arabidopsis thaliana
ggccgcctgtccaattg

SEQ ID NO: 111165 - DNA, 17 bp, Arabidopsis thaliana
ggccgcgagttcgttcc

SEQ ID NO: 111166 - DNA, 17 bp, Arabidopsis thaliana
ggccgcgcacgtctgcc

SEQ ID NO: 111167 - DNA, 17 bp, Arabidopsis thaliana
ggccgctaccgacgaca

SEQ ID NO: 111168 - DNA, 17 bp, Arabidopsis thaliana
ggccgctacgaattcaa

SEQ ID NO: 111169 - DNA, 17 bp, Arabidopsis thaliana
ggccgctctgttgttct

SEQ ID NO: 111170 - DNA, 17 bp, Arabidopsis thaliana
ggccgcttcaaccctag

SEQ ID NO: 111171 - DNA, 17 bp, Arabidopsis thaliana
ggccggaattatgcact

SEQ ID NO: 111172 - DNA, 17 bp, Arabidopsis thaliana
ggccggacttgcaggtt

SEQ ID NO: 111173 - DNA, 17 bp, Arabidopsis thaliana
ggccggatcaatgtttt

SEQ ID NO: 111174 - DNA, 17 bp, Arabidopsis thaliana
ggccggatccggtgcta

SEQ ID NO: 111175 - DNA, 17 bp, Arabidopsis thaliana
ggccggatcgcattgca

SEQ ID NO: 111176 - DNA, 17 bp, Arabidopsis thaliana
ggccggatctctcaggt

SEQ ID NO: 111177 - DNA, 17 bp, Arabidopsis thaliana
ggccggatggtcgacga

SEQ ID NO: 111178 - DNA, 17 bp, Arabidopsis thaliana
ggccggcaaatactagt

SEQ ID NO: 111179 - DNA, 17 bp, Arabidopsis thaliana
ggccggcaacggatatc

SEQ ID NO: 111180 - DNA, 17 bp, Arabidopsis thaliana
ggccggcaagtaactcg

SEQ ID NO: 111181 - DNA, 17 bp, Arabidopsis thaliana
ggccggcaagttgtcct

SEQ ID NO: 111182 - DNA, 17 bp, Arabidopsis thaliana
ggccggcaatgctaaca

SEQ ID NO: 111183 - DNA, 17 bp, Arabidopsis thaliana
ggccggcaggacgggtt

SEQ ID NO: 111184 - DNA, 17 bp, Arabidopsis thaliana
ggccggcaggtcacctt

SEQ ID NO: 111185 - DNA, 17 bp, Arabidopsis thaliana
ggccggcattttcgtga

SEQ ID NO: 111186 - DNA, 17 bp, Arabidopsis thaliana
ggccggccaagcacatg

SEQ ID NO: 111187 - DNA, 17 bp, Arabidopsis thaliana
ggccggccaagggcacg

SEQ ID NO: 111188 - DNA, 17 bp, Arabidopsis thaliana
ggccggccactttttga

SEQ ID NO: 111189 - DNA, 17 bp, Arabidopsis thaliana
ggccggccagcaccgcg

SEQ ID NO: 111190 - DNA, 17 bp, Arabidopsis thaliana
ggccggccagtgagacg

SEQ ID NO: 111191 - DNA, 17 bp, Arabidopsis thaliana
ggccggccattttttga

SEQ ID NO: 111192 - DNA, 17 bp, Arabidopsis thaliana
ggccggccctgggctaa

SEQ ID NO: 111193 - DNA, 17 bp, Arabidopsis thaliana
ggccggccctgggttaa

SEQ ID NO: 111194 - DNA, 17 bp, Arabidopsis thaliana
ggccggccgaggcacgt

SEQ ID NO: 111195 - DNA, 17 bp, Arabidopsis thaliana
ggccggccgagggacgt

SEQ ID NO: 111196 - DNA, 17 bp, Arabidopsis thaliana
ggccggccgagggcaca

SEQ ID NO: 111197 - DNA, 17 bp, Arabidopsis thaliana
ggccggccgagggcacc

SEQ ID NO: 111198 - DNA, 17 bp, Arabidopsis thaliana
ggccggccgagggcacg

SEQ ID NO: 111199 - DNA, 17 bp, Arabidopsis thaliana
ggccggccgagttcaca

SEQ ID NO: 111200 - DNA, 17 bp, Arabidopsis thaliana
ggccggccggaacataa

SEQ ID NO: 111201 - DNA, 17 bp, Arabidopsis thaliana
ggccggccgggggacgg

SEQ ID NO: 111202 - DNA, 17 bp, Arabidopsis thaliana
ggccggccggtccgcct

SEQ ID NO: 111203 - DNA, 17 bp, Arabidopsis thaliana
ggccggccgtcggggca

SEQ ID NO: 111204 - DNA, 17 bp, Arabidopsis thaliana
ggccggcctaagcccgg

SEQ ID NO: 111205 - DNA, 17 bp, Arabidopsis thaliana
ggccggcctaagttccc

SEQ ID NO: 111206 - DNA, 17 bp, Arabidopsis thaliana
ggccggcctatcgatcc

SEQ ID NO: 111207 - DNA, 17 bp, Arabidopsis thaliana
ggccggcctattagctc

SEQ ID NO: 111208 - DNA, 17 bp, Arabidopsis thaliana
ggccggcctcttctagg

SEQ ID NO: 111209 - DNA, 17 bp, Arabidopsis thaliana
ggccggcctgagcctag

SEQ ID NO: 111210 - DNA, 17 bp, Arabidopsis thaliana
ggccggcctgggccgta

SEQ ID NO: 111211 - DNA, 17 bp, Arabidopsis thaliana
ggccggccttcgggatc

SEQ ID NO: 111212 - DNA, 17 bp, Arabidopsis thaliana
ggccggccttgctgcca

SEQ ID NO: 111213 - DNA, 17 bp, Arabidopsis thaliana
ggccggcgaatttcctc

SEQ ID NO: 111214 - DNA, 17 bp, Arabidopsis thaliana
ggccggcgactgtcgct

SEQ ID NO: 111215 - DNA, 17 bp, Arabidopsis thaliana
ggccggcgagagtagta

SEQ ID NO: 111216 - DNA, 17 bp, Arabidopsis thaliana
ggccggcgcagatggac

SEQ ID NO: 111217 - DNA, 17 bp, Arabidopsis thaliana
ggccggcgctgcagcgc

SEQ ID NO: 111218 - DNA, 17 bp, Arabidopsis thaliana
ggccggcgctgtctacg

SEQ ID NO: 111219 - DNA, 17 bp, Arabidopsis thaliana
ggccggcgctgtgatgg

SEQ ID NO: 111220 - DNA, 17 bp, Arabidopsis thaliana
ggccggcgctgtgcgta

SEQ ID NO: 111221 - DNA, 17 bp, Arabidopsis thaliana
ggccggcggacaggcaa

SEQ ID NO: 111222 - DNA, 17 bp, Arabidopsis thaliana
ggccggcggatgtagcc

SEQ ID NO: 111223 - DNA, 17 bp, Arabidopsis thaliana
ggccggcggcggcggcg

SEQ ID NO: 111224 - DNA, 17 bp, Arabidopsis thaliana
ggccggcggcggtggtt

SEQ ID NO: 111225 - DNA, 17 bp, Arabidopsis thaliana
ggccggcggctgcggtt

SEQ ID NO: 111226 - DNA, 17 bp, Arabidopsis thaliana
ggccggcggttgaggcc

SEQ ID NO: 111227 - DNA, 17 bp, Arabidopsis thaliana
ggccggcgtccggcgac

SEQ ID NO: 111228 - DNA, 17 bp, Arabidopsis thaliana
ggccggcgttgactagg

SEQ ID NO: 111229 - DNA, 17 bp, Arabidopsis thaliana
ggccggcgttgtgcgta

SEQ ID NO: 111230 - DNA, 17 bp, Arabidopsis thaliana
ggccggcgttttcagtg

SEQ ID NO: 111231 - DNA, 17 bp, Arabidopsis thaliana
ggccggctacgtccagg

SEQ ID NO: 111232 - DNA, 17 bp, Arabidopsis thaliana
ggccggctactagtact

SEQ ID NO: 111233 - DNA, 17 bp, Arabidopsis thaliana
ggccggctatcagtttc

SEQ ID NO: 111234 - DNA, 17 bp, Arabidopsis thaliana
ggccggctcagaatgtg

SEQ ID NO: 111235 - DNA, 17 bp, Arabidopsis thaliana
ggccggctcggcaggat

SEQ ID NO: 111236 - DNA, 17 bp, Arabidopsis thaliana
ggccggctgagccgttt

SEQ ID NO: 111237 - DNA, 17 bp, Arabidopsis thaliana
ggccggctgagggcacg

SEQ ID NO: 111238 - DNA, 17 bp, Arabidopsis thaliana
ggccggctgagggctgg

SEQ ID NO: 111239 - DNA, 17 bp, Arabidopsis thaliana
ggccggctgataatctg

SEQ ID NO: 111240 - DNA, 17 bp, Arabidopsis thaliana
ggccggctgctgggtga

SEQ ID NO: 111241 - DNA, 17 bp, Arabidopsis thaliana
ggccggctgggctcggg

SEQ ID NO: 111242 - DNA, 17 bp, Arabidopsis thaliana
ggccggctgtacagact

SEQ ID NO: 111243 - DNA, 17 bp, Arabidopsis thaliana
ggccggcttataagatc

SEQ ID NO: 111244 - DNA, 17 bp, Arabidopsis thaliana
ggccggcttcgaatgga

SEQ ID NO: 111245 - DNA, 17 bp, Arabidopsis thaliana
ggccggcttcggagatt

SEQ ID NO: 111246 - DNA, 17 bp, Arabidopsis thaliana
ggccggcttcggctcag

SEQ ID NO: 111247 - DNA, 17 bp, Arabidopsis thaliana
ggccggcttgtagtata

SEQ ID NO: 111248 - DNA, 17 bp, Arabidopsis thaliana
ggccggcttgtttgctg

SEQ ID NO: 111249 - DNA, 17 bp, Arabidopsis thaliana
ggccggctttgtatcca

SEQ ID NO: 111250 - DNA, 17 bp, Arabidopsis thaliana
ggccggcttttgggtgt

SEQ ID NO: 111251 - DNA, 17 bp, Arabidopsis thaliana
ggccgggacaaagggtc

SEQ ID NO: 111252 - DNA, 17 bp, Arabidopsis thaliana
ggccgggcacgtctgcc

SEQ ID NO: 111253 - DNA, 17 bp, Arabidopsis thaliana
ggccgggccgacagacc

SEQ ID NO: 111254 - DNA, 17 bp, Arabidopsis thaliana
ggccgggcttgtgcgct

SEQ ID NO: 111255 - DNA, 17 bp, Arabidopsis thaliana
ggccggggacggactgg

SEQ ID NO: 111256 - DNA, 17 bp, Arabidopsis thaliana
ggccggggagacggtac

SEQ ID NO: 111257 - DNA, 17 bp, Arabidopsis thaliana
ggccggggcacgtctgc

SEQ ID NO: 111258 - DNA, 17 bp, Arabidopsis thaliana
ggccgggggacggacgg

SEQ ID NO: 111259 - DNA, 17 bp, Arabidopsis thaliana
ggccgggggacggactg

SEQ ID NO: 111260 - DNA, 17 bp, Arabidopsis thaliana
ggccgggggcacgtccg

SEQ ID NO: 111261 - DNA, 17 bp, Arabidopsis thaliana
ggccgggggcacgtctg

SEQ ID NO: 111262 - DNA, 17 bp, Arabidopsis thaliana
ggccgggtcacgtctgc

SEQ ID NO: 111263 - DNA, 17 bp, Arabidopsis thaliana
ggccgggtcgtgcctcc

SEQ ID NO: 111264 - DNA, 17 bp, Arabidopsis thaliana
ggccgggtcgtgcctcg

SEQ ID NO: 111265 - DNA, 17 bp, Arabidopsis thaliana
ggccggtacggatcatg

SEQ ID NO: 111266 - DNA, 17 bp, Arabidopsis thaliana
ggccggtccgcccttgg

SEQ ID NO: 111267 - DNA, 17 bp, Arabidopsis thaliana
ggccggtccgccgatgg

SEQ ID NO: 111268 - DNA, 17 bp, Arabidopsis thaliana
ggccggtccgccttcgg

SEQ ID NO: 111269 - DNA, 17 bp, Arabidopsis thaliana
ggccggtccgccttggt

SEQ ID NO: 111270 - DNA, 17 bp, Arabidopsis thaliana
ggccggtccgcctttgg

SEQ ID NO: 111271 - DNA, 17 bp, Arabidopsis thaliana
ggccggtccgccttttg

SEQ ID NO: 111272 - DNA, 17 bp, Arabidopsis thaliana
ggccggtccgcttggtg

SEQ ID NO: 111273 - DNA, 17 bp, Arabidopsis thaliana
ggccggtccgcttttgg

SEQ ID NO: 111274 - DNA, 17 bp, Arabidopsis thaliana
ggccggtcctgggctaa

SEQ ID NO: 111275 - DNA, 17 bp, Arabidopsis thaliana
ggccggtcctggttctt

SEQ ID NO: 111276 - DNA, 17 bp, Arabidopsis thaliana
ggccggtgcaactataa

SEQ ID NO: 111277 - DNA, 17 bp, Arabidopsis thaliana
ggccggttcgcctttgg

SEQ ID NO: 111278 - DNA, 17 bp, Arabidopsis thaliana
ggccggttgtcttcttc

SEQ ID NO: 111279 - DNA, 17 bp, Arabidopsis thaliana
ggccgtaaggtctcttt

SEQ ID NO: 111280 - DNA, 17 bp, Arabidopsis thaliana
ggccgtagaagcagtct

SEQ ID NO: 111281 - DNA, 17 bp, Arabidopsis thaliana
ggccgtagaccgaaacg

SEQ ID NO: 111282 - DNA, 17 bp, Arabidopsis thaliana
ggccgtagtttagtggt

SEQ ID NO: 111283 - DNA, 17 bp, Arabidopsis thaliana
ggccgtcaagggaaggt

SEQ ID NO: 111284 - DNA, 17 bp, Arabidopsis thaliana
ggccgtccgtcgatgtg

SEQ ID NO: 111285 - DNA, 17 bp, Arabidopsis thaliana
ggccgtcggggcaagag

SEQ ID NO: 111286 - DNA, 17 bp, Arabidopsis thaliana
ggccgtcggggcaagcg

SEQ ID NO: 111287 - DNA, 17 bp, Arabidopsis thaliana
ggccgtcggtgcagatc

SEQ ID NO: 111288 - DNA, 17 bp, Arabidopsis thaliana
ggccgtctgcctgggtg

SEQ ID NO: 111289 - DNA, 17 bp, Arabidopsis thaliana
ggccgtgatttgggcta

SEQ ID NO: 111290 - DNA, 17 bp, Arabidopsis thaliana
ggccgtgcttgggcgag

SEQ ID NO: 111291 - DNA, 17 bp, Arabidopsis thaliana
ggccgtggagacctggg

SEQ ID NO: 111292 - DNA, 17 bp, Arabidopsis thaliana
ggccgtgggttcgtccc

SEQ ID NO: 111293 - DNA, 17 bp, Arabidopsis thaliana
ggccgtgggttcgttcc

SEQ ID NO: 111294 - DNA, 17 bp, Arabidopsis thaliana
ggccgtgttcaaaagag

SEQ ID NO: 111295 - DNA, 17 bp, Arabidopsis thaliana
ggccgttagaagttccg

SEQ ID NO: 111296 - DNA, 17 bp, Arabidopsis thaliana
ggccgttcagacgacga

SEQ ID NO: 111297 - DNA, 17 bp, Arabidopsis thaliana
ggccgttcttagttggt

SEQ ID NO: 111298 - DNA, 17 bp, Arabidopsis thaliana
ggccgttgatgtttgta

SEQ ID NO: 111299 - DNA, 17 bp, Arabidopsis thaliana
ggccgttgtgtcaagtt

SEQ ID NO: 111300 - DNA, 17 bp, Arabidopsis thaliana
ggccgtttcccggctgg

SEQ ID NO: 111301 - DNA, 17 bp, Arabidopsis thaliana
ggccgtttgcggttgcg

SEQ ID NO: 111302 - DNA, 17 bp, Arabidopsis thaliana
ggcctaaaactggtgaa

SEQ ID NO: 111303 - DNA, 17 bp, Arabidopsis thaliana
ggcctaaatccgagcca

SEQ ID NO: 111304 - DNA, 17 bp, Arabidopsis thaliana
ggcctaaccctgacaga

SEQ ID NO: 111305 - DNA, 17 bp, Arabidopsis thaliana
ggcctaaccctgacatc

SEQ ID NO: 111306 - DNA, 17 bp, Arabidopsis thaliana
ggcctaagacttacatg

SEQ ID NO: 111307 - DNA, 17 bp, Arabidopsis thaliana
ggcctaagcagaatgtt

SEQ ID NO: 111308 - DNA, 17 bp, Arabidopsis thaliana
ggcctaagcccgggctc

SEQ ID NO: 111309 - DNA, 17 bp, Arabidopsis thaliana
ggcctaagcccgggctt

SEQ ID NO: 111310 - DNA, 17 bp, Arabidopsis thaliana
ggcctaagcccgtaatg

SEQ ID NO: 111311 - DNA, 17 bp, Arabidopsis thaliana
ggcctaaggagtttgtc

SEQ ID NO: 111312 - DNA, 17 bp, Arabidopsis thaliana
ggcctaagtagtgtttc

SEQ ID NO: 111313 - DNA, 17 bp, Arabidopsis thaliana
ggcctaagttccctgca

SEQ ID NO: 111314 - DNA, 17 bp, Arabidopsis thaliana
ggcctaagttccctgga

SEQ ID NO: 111315 - DNA, 17 bp, Arabidopsis thaliana
ggcctaagtttatcaga

SEQ ID NO: 111316 - DNA, 17 bp, Arabidopsis thaliana
ggcctacacctactgga

SEQ ID NO: 111317 - DNA, 17 bp, Arabidopsis thaliana
ggcctacaggatgcgac

SEQ ID NO: 111318 - DNA, 17 bp, Arabidopsis thaliana
ggcctaccatggtggta

SEQ ID NO: 111319 - DNA, 17 bp, Arabidopsis thaliana
ggcctaccggagaagat

SEQ ID NO: 111320 - DNA, 17 bp, Arabidopsis thaliana
ggcctacgcgtcctgaa

SEQ ID NO: 111321 - DNA, 17 bp, Arabidopsis thaliana
ggcctacgggtcctgaa

SEQ ID NO: 111322 - DNA, 17 bp, Arabidopsis thaliana
ggcctacgggttgaact

SEQ ID NO: 111323 - DNA, 17 bp, Arabidopsis thaliana
ggcctagaagattacgg

SEQ ID NO: 111324 - DNA, 17 bp, Arabidopsis thaliana
ggcctagctcagttggt

SEQ ID NO: 111325 - DNA, 17 bp, Arabidopsis thaliana
ggcctaggctagtgact

SEQ ID NO: 111326 - DNA, 17 bp, Arabidopsis thaliana
ggcctagtggcgtcggg

SEQ ID NO: 111327 - DNA, 17 bp, Arabidopsis thaliana
ggcctagtggtaaatct

SEQ ID NO: 111328 - DNA, 17 bp, Arabidopsis thaliana
ggcctagtgttaaatct

SEQ ID NO: 111329 - DNA, 17 bp, Arabidopsis thaliana
ggcctagttgaccaaga

SEQ ID NO: 111330 - DNA, 17 bp, Arabidopsis thaliana
ggcctataagctcagtt

SEQ ID NO: 111331 - DNA, 17 bp, Arabidopsis thaliana
ggcctataggtgtgaag

SEQ ID NO: 111332 - DNA, 17 bp, Arabidopsis thaliana
ggcctatcgatccttca

SEQ ID NO: 111333 - DNA, 17 bp, Arabidopsis thaliana
ggcctatcgatccttta

SEQ ID NO: 111334 - DNA, 17 bp, Arabidopsis thaliana
ggcctatgcctgagcgg

SEQ ID NO: 111335 - DNA, 17 bp, Arabidopsis thaliana
ggcctatgcggagtcct

SEQ ID NO: 111336 - DNA, 17 bp, Arabidopsis thaliana
ggcctatgtactcggct

SEQ ID NO: 111337 - DNA, 17 bp, Arabidopsis thaliana
ggcctattagctaagtt

SEQ ID NO: 111338 - DNA, 17 bp, Arabidopsis thaliana
ggcctattagctcactc

SEQ ID NO: 111339 - DNA, 17 bp, Arabidopsis thaliana
ggcctattagctcagct

SEQ ID NO: 111340 - DNA, 17 bp, Arabidopsis thaliana
ggcctattagctcaggt

SEQ ID NO: 111341 - DNA, 17 bp, Arabidopsis thaliana
ggcctattagctcagtc

SEQ ID NO: 111342 - DNA, 17 bp, Arabidopsis thaliana
ggcctattagctcagtg

SEQ ID NO: 111343 - DNA, 17 bp, Arabidopsis thaliana
ggcctattagctcagtt

SEQ ID NO: 111344 - DNA, 17 bp, Arabidopsis thaliana
ggcctattagcttagtt

SEQ ID NO: 111345 - DNA, 17 bp, Arabidopsis thaliana
ggcctcaaaatccgcag

SEQ ID NO: 111346 - DNA, 17 bp, Arabidopsis thaliana
ggcctcactactactta

SEQ ID NO: 111347 - DNA, 17 bp, Arabidopsis thaliana
ggcctcaggctgattac

SEQ ID NO: 111348 - DNA, 17 bp, Arabidopsis thaliana
ggcctcagtatgctgat

SEQ ID NO: 111349 - DNA, 17 bp, Arabidopsis thaliana
ggcctcatagctcagtg

SEQ ID NO: 111350 - DNA, 17 bp, Arabidopsis thaliana
ggcctccgtcggaccat

SEQ ID NO: 111351 - DNA, 17 bp, Arabidopsis thaliana
ggcctcgatgagtagga

SEQ ID NO: 111352 - DNA, 17 bp, Arabidopsis thaliana
ggcctcggaatcggtgt

SEQ ID NO: 111353 - DNA, 17 bp, Arabidopsis thaliana
ggcctcggagctctgcc

SEQ ID NO: 111354 - DNA, 17 bp, Arabidopsis thaliana
ggcctcggtatccacca

SEQ ID NO: 111355 - DNA, 17 bp, Arabidopsis thaliana
ggcctcggtgggccggt

SEQ ID NO: 111356 - DNA, 17 bp, Arabidopsis thaliana
ggcctcgtctaaacgat

SEQ ID NO: 111357 - DNA, 17 bp, Arabidopsis thaliana
ggcctcgtctgactaac

SEQ ID NO: 111358 - DNA, 17 bp, Arabidopsis thaliana
ggcctctagccttctgt

SEQ ID NO: 111359 - DNA, 17 bp, Arabidopsis thaliana
ggcctctatcggctgat

SEQ ID NO: 111360 - DNA, 17 bp, Arabidopsis thaliana
ggcctctccacctattg

SEQ ID NO: 111361 - DNA, 17 bp, Arabidopsis thaliana
ggcctctctggtttttg

SEQ ID NO: 111362 - DNA, 17 bp, Arabidopsis thaliana
ggcctctcttgcttgct

SEQ ID NO: 111363 - DNA, 17 bp, Arabidopsis thaliana
ggcctctggctcggact

SEQ ID NO: 111364 - DNA, 17 bp, Arabidopsis thaliana
ggcctctgtgctagcga

SEQ ID NO: 111365 - DNA, 17 bp, Arabidopsis thaliana
ggcctctgtgctggcga

SEQ ID NO: 111366 - DNA, 17 bp, Arabidopsis thaliana
ggcctcttctaggacaa

SEQ ID NO: 111367 - DNA, 17 bp, Arabidopsis thaliana
ggcctcttctaggacca

SEQ ID NO: 111368 - DNA, 17 bp, Arabidopsis thaliana
ggcctcttctaggtgac

SEQ ID NO: 111369 - DNA, 17 bp, Arabidopsis thaliana
ggcctgaaacgtgacat

SEQ ID NO: 111370 - DNA, 17 bp, Arabidopsis thaliana
ggcctgaaccgtatcat

SEQ ID NO: 111371 - DNA, 17 bp, Arabidopsis thaliana
ggcctgaactaggactt

SEQ ID NO: 111372 - DNA, 17 bp, Arabidopsis thaliana
ggcctgaagtctgtggt

SEQ ID NO: 111373 - DNA, 17 bp, Arabidopsis thaliana
ggcctgactatcactcg

SEQ ID NO: 111374 - DNA, 17 bp, Arabidopsis thaliana
ggcctgacttgggaccg

SEQ ID NO: 111375 - DNA, 17 bp, Arabidopsis thaliana
ggcctgagagatcacgg

SEQ ID NO: 111376 - DNA, 17 bp, Arabidopsis thaliana
ggcctgagcctagagag

SEQ ID NO: 111377 - DNA, 17 bp, Arabidopsis thaliana
ggcctgatacgaataag

SEQ ID NO: 111378 - DNA, 17 bp, Arabidopsis thaliana
ggcctgatcaacgatta

SEQ ID NO: 111379 - DNA, 17 bp, Arabidopsis thaliana
ggcctgcaatttaccct

SEQ ID NO: 111380 - DNA, 17 bp, Arabidopsis thaliana
ggcctgcacaagcggtg

SEQ ID NO: 111381 - DNA, 17 bp, Arabidopsis thaliana
ggcctgcctcgttgccc

SEQ ID NO: 111382 - DNA, 17 bp, Arabidopsis thaliana
ggcctggctccctgtat

SEQ ID NO: 111383 - DNA, 17 bp, Arabidopsis thaliana
ggcctggctgtcattat

SEQ ID NO: 111384 - DNA, 17 bp, Arabidopsis thaliana
ggcctgggccgtagggg

SEQ ID NO: 111385 - DNA, 17 bp, Arabidopsis thaliana
ggcctggtcaacatttt

SEQ ID NO: 111386 - DNA, 17 bp, Arabidopsis thaliana
ggcctggtcaacgaaag

SEQ ID NO: 111387 - DNA, 17 bp, Arabidopsis thaliana
ggcctggtcaacgatta

SEQ ID NO: 111388 - DNA, 17 bp, Arabidopsis thaliana
ggcctggtcactgcgac

SEQ ID NO: 111389 - DNA, 17 bp, Arabidopsis thaliana
ggcctggtcgacgaatg

SEQ ID NO: 111390 - DNA, 17 bp, Arabidopsis thaliana
ggcctggtttgtagaca

SEQ ID NO: 111391 - DNA, 17 bp, Arabidopsis thaliana
ggcctgtcagttgggat

SEQ ID NO: 111392 - DNA, 17 bp, Arabidopsis thaliana
ggcctgtcccatccgac

SEQ ID NO: 111393 - DNA, 17 bp, Arabidopsis thaliana
ggcctgtccgcctttgg

SEQ ID NO: 111394 - DNA, 17 bp, Arabidopsis thaliana
ggcctgtcgctgctatg

SEQ ID NO: 111395 - DNA, 17 bp, Arabidopsis thaliana
ggcctgtgatacctttt

SEQ ID NO: 111396 - DNA, 17 bp, Arabidopsis thaliana
ggcctgtgcagaggaga

SEQ ID NO: 111397 - DNA, 17 bp, Arabidopsis thaliana
ggcctgtgctgacttgg

SEQ ID NO: 111398 - DNA, 17 bp, Arabidopsis thaliana
ggcctgtgggctcccca

SEQ ID NO: 111399 - DNA, 17 bp, Arabidopsis thaliana
ggcctgtggtgacttgg

SEQ ID NO: 111400 - DNA, 17 bp, Arabidopsis thaliana
ggccttaattttctagg

SEQ ID NO: 111401 - DNA, 17 bp, Arabidopsis thaliana
ggccttagaaagtgcct

SEQ ID NO: 111402 - DNA, 17 bp, Arabidopsis thaliana
ggccttagatcacggct

SEQ ID NO: 111403 - DNA, 17 bp, Arabidopsis thaliana
ggccttaggctcccaaa

SEQ ID NO: 111404 - DNA, 17 bp, Arabidopsis thaliana
ggccttagtaatccgac

SEQ ID NO: 111405 - DNA, 17 bp, Arabidopsis thaliana
ggccttagtatgagttt

SEQ ID NO: 111406 - DNA, 17 bp, Arabidopsis thaliana
ggccttagtgatccgaa

SEQ ID NO: 111407 - DNA, 17 bp, Arabidopsis thaliana
ggccttagtgatccgac

SEQ ID NO: 111408 - DNA, 17 bp, Arabidopsis thaliana
ggccttagtttcttaag

SEQ ID NO: 111409 - DNA, 17 bp, Arabidopsis thaliana
ggccttatgggtgtctt

SEQ ID NO: 111410 - DNA, 17 bp, Arabidopsis thaliana
ggccttattggatctaa

SEQ ID NO: 111411 - DNA, 17 bp, Arabidopsis thaliana
ggccttccattcgatcc

SEQ ID NO: 111412 - DNA, 17 bp, Arabidopsis thaliana
ggccttcgagctgtcac

SEQ ID NO: 111413 - DNA, 17 bp, Arabidopsis thaliana
ggccttcgggatcggag

SEQ ID NO: 111414 - DNA, 17 bp, Arabidopsis thaliana
ggccttcgggttagaca

SEQ ID NO: 111415 - DNA, 17 bp, Arabidopsis thaliana
ggccttcgggttcggtt

SEQ ID NO: 111416 - DNA, 17 bp, Arabidopsis thaliana
ggccttcgtataaattt

SEQ ID NO: 111417 - DNA, 17 bp, Arabidopsis thaliana
ggccttctcttctctgc

SEQ ID NO: 111418 - DNA, 17 bp, Arabidopsis thaliana
ggccttctttggaaaac

SEQ ID NO: 111419 - DNA, 17 bp, Arabidopsis thaliana
ggccttgagaatctttg

SEQ ID NO: 111420 - DNA, 17 bp, Arabidopsis thaliana
ggccttgagtcatacgc

SEQ ID NO: 111421 - DNA, 17 bp, Arabidopsis thaliana
ggccttgatcttctgag

SEQ ID NO: 111422 - DNA, 17 bp, Arabidopsis thaliana
ggccttgctgccacgat

SEQ ID NO: 111423 - DNA, 17 bp, Arabidopsis thaliana
ggccttggatgatcagt

SEQ ID NO: 111424 - DNA, 17 bp, Arabidopsis thaliana
ggccttggcggattcga

SEQ ID NO: 111425 - DNA, 17 bp, Arabidopsis thaliana
ggccttggtgcaggtcg

SEQ ID NO: 111426 - DNA, 17 bp, Arabidopsis thaliana
ggccttggtgctgttgg

SEQ ID NO: 111427 - DNA, 17 bp, Arabidopsis thaliana
ggccttggttggacttg

SEQ ID NO: 111428 - DNA, 17 bp, Arabidopsis thaliana
ggccttgtacacaccgc

SEQ ID NO: 111429 - DNA, 17 bp, Arabidopsis thaliana
ggccttgtgctggcgac

SEQ ID NO: 111430 - DNA, 17 bp, Arabidopsis thaliana
ggccttgtttgtttgat

SEQ ID NO: 111431 - DNA, 17 bp, Arabidopsis thaliana
ggccttgtttgtttgtt

SEQ ID NO: 111432 - DNA, 17 bp, Arabidopsis thaliana
ggcctttaagatcgggt

SEQ ID NO: 111433 - DNA, 17 bp, Arabidopsis thaliana
ggcctttaagtactttt

SEQ ID NO: 111434 - DNA, 17 bp, Arabidopsis thaliana
ggcctttcactccttac

SEQ ID NO: 111435 - DNA, 17 bp, Arabidopsis thaliana
ggcctttcaggtctgtg

SEQ ID NO: 111436 - DNA, 17 bp, Arabidopsis thaliana
ggcctttctactggaat

SEQ ID NO: 111437 - DNA, 17 bp, Arabidopsis thaliana
ggcctttggtcgattga

SEQ ID NO: 111438 - DNA, 17 bp, Arabidopsis thaliana
ggcctttgtcgctaaga

SEQ ID NO: 111439 - DNA, 17 bp, Arabidopsis thaliana
ggccttttagaccgtga

SEQ ID NO: 111440 - DNA, 17 bp, Arabidopsis thaliana
ggccttttggagcttac

SEQ ID NO: 111441 - DNA, 17 bp, Arabidopsis thaliana
ggccttttttcagcacg

SEQ ID NO: 111442 - DNA, 17 bp, Arabidopsis thaliana
ggcgaaaaagtggtttt

SEQ ID NO: 111443 - DNA, 17 bp, Arabidopsis thaliana
ggcgaaaaatgtgtggg

SEQ ID NO: 111444 - DNA, 17 bp, Arabidopsis thaliana
ggcgaaaatcccggcgg

SEQ ID NO: 111445 - DNA, 17 bp, Arabidopsis thaliana
ggcgaaaatgaagtcgg

SEQ ID NO: 111446 - DNA, 17 bp, Arabidopsis thaliana
ggcgaaacattctttat

SEQ ID NO: 111447 - DNA, 17 bp, Arabidopsis thaliana
ggcgaaacccgtaatct

SEQ ID NO: 111448 - DNA, 17 bp, Arabidopsis thaliana
ggcgaaactgcgaatgg

SEQ ID NO: 111449 - DNA, 17 bp, Arabidopsis thaliana
ggcgaaagactaatcga

SEQ ID NO: 111450 - DNA, 17 bp, Arabidopsis thaliana
ggcgaaagagacttgct

SEQ ID NO: 111451 - DNA, 17 bp, Arabidopsis thaliana
ggcgaaagagagaacgt

SEQ ID NO: 111452 - DNA, 17 bp, Arabidopsis thaliana
ggcgaaagagttagatt

SEQ ID NO: 111453 - DNA, 17 bp, Arabidopsis thaliana
ggcgaaagatgttttgt

SEQ ID NO: 111454 - DNA, 17 bp, Arabidopsis thaliana
ggcgaaagcactctgct

SEQ ID NO: 111455 - DNA, 17 bp, Arabidopsis thaliana
ggcgaaagcctgacgga

SEQ ID NO: 111456 - DNA, 17 bp, Arabidopsis thaliana
ggcgaaaggatccttct

SEQ ID NO: 111457 - DNA, 17 bp, Arabidopsis thaliana
ggcgaaagtattgacgt

SEQ ID NO: 111458 - DNA, 17 bp, Arabidopsis thaliana
ggcgaaataccgaggct

SEQ ID NO: 111459 - DNA, 17 bp, Arabidopsis thaliana
ggcgaaatttttttttt

SEQ ID NO: 111460 - DNA, 17 bp, Arabidopsis thaliana
ggcgaacaataaaccgc

SEQ ID NO: 111461 - DNA, 17 bp, Arabidopsis thaliana
ggcgaaccaaatctgta

SEQ ID NO: 111462 - DNA, 17 bp, Arabidopsis thaliana
ggcgaaccacccacgtc

SEQ ID NO: 111463 - DNA, 17 bp, Arabidopsis thaliana
ggcgaacccgggctcag

SEQ ID NO: 111464 - DNA, 17 bp, Arabidopsis thaliana
ggcgaacctgccggcta

SEQ ID NO: 111465 - DNA, 17 bp, Arabidopsis thaliana
ggcgaaccttgggatgg

SEQ ID NO: 111466 - DNA, 17 bp, Arabidopsis thaliana
ggcgaacgacctgtgtc

SEQ ID NO: 111467 - DNA, 17 bp, Arabidopsis thaliana
ggcgaacggctataatt

SEQ ID NO: 111468 - DNA, 17 bp, Arabidopsis thaliana
ggcgaacggttcatcaa

SEQ ID NO: 111469 - DNA, 17 bp, Arabidopsis thaliana
ggcgaactccgtctccg

SEQ ID NO: 111470 - DNA, 17 bp, Arabidopsis thaliana
ggcgaactctgagatcg

SEQ ID NO: 111471 - DNA, 17 bp, Arabidopsis thaliana
ggcgaactggaacatat

SEQ ID NO: 111472 - DNA, 17 bp, Arabidopsis thaliana
ggcgaagagtcacaata

SEQ ID NO: 111473 - DNA, 17 bp, Arabidopsis thaliana
ggcgaagcttagaggtc

SEQ ID NO: 111474 - DNA, 17 bp, Arabidopsis thaliana
ggcgaagcttgaaatct

SEQ ID NO: 111475 - DNA, 17 bp, Arabidopsis thaliana
ggcgaagcttgagatct

SEQ ID NO: 111476 - DNA, 17 bp, Arabidopsis thaliana
ggcgaaggtcaatttgg

SEQ ID NO: 111477 - DNA, 17 bp, Arabidopsis thaliana
ggcgaagtcccgtcgtt

SEQ ID NO: 111478 - DNA, 17 bp, Arabidopsis thaliana
ggcgaagtttccgatta

SEQ ID NO: 111479 - DNA, 17 bp, Arabidopsis thaliana
ggcgaatagggtcttta

SEQ ID NO: 111480 - DNA, 17 bp, Arabidopsis thaliana
ggcgaatcatttgctgt

SEQ ID NO: 111481 - DNA, 17 bp, Arabidopsis thaliana
ggcgaatcgtccttctt

SEQ ID NO: 111482 - DNA, 17 bp, Arabidopsis thaliana
ggcgaatctgagacatc

SEQ ID NO: 111483 - DNA, 17 bp, Arabidopsis thaliana
ggcgaatgatctgtgtc

SEQ ID NO: 111484 - DNA, 17 bp, Arabidopsis thaliana
ggcgaatggttcatcaa

SEQ ID NO: 111485 - DNA, 17 bp, Arabidopsis thaliana
ggcgaattctgagatcg

SEQ ID NO: 111486 - DNA, 17 bp, Arabidopsis thaliana
ggcgaatttcctctccg

SEQ ID NO: 111487 - DNA, 17 bp, Arabidopsis thaliana
ggcgaatttcctctctg

SEQ ID NO: 111488 - DNA, 17 bp, Arabidopsis thaliana
ggcgaatttgacacttg

SEQ ID NO: 111489 - DNA, 17 bp, Arabidopsis thaliana
ggcgaatttgagtaggt

SEQ ID NO: 111490 - DNA, 17 bp, Arabidopsis thaliana
ggcgaatttttcccagt

SEQ ID NO: 111491 - DNA, 17 bp, Arabidopsis thaliana
ggcgacaaagctctctc

SEQ ID NO: 111492 - DNA, 17 bp, Arabidopsis thaliana
ggcgacaaagttgcgac

SEQ ID NO: 111493 - DNA, 17 bp, Arabidopsis thaliana
ggcgacaaccggccctg

SEQ ID NO: 111494 - DNA, 17 bp, Arabidopsis thaliana
ggcgacaagtggcgaca

SEQ ID NO: 111495 - DNA, 17 bp, Arabidopsis thaliana
ggcgacaagttagattc

SEQ ID NO: 111496 - DNA, 17 bp, Arabidopsis thaliana
ggcgacaatcgctttaa

SEQ ID NO: 111497 - DNA, 17 bp, Arabidopsis thaliana
ggcgacaatgggctccg

SEQ ID NO: 111498 - DNA, 17 bp, Arabidopsis thaliana
ggcgacaattcgaacga

SEQ ID NO: 111499 - DNA, 17 bp, Arabidopsis thaliana
ggcgacaccatgaaagc

SEQ ID NO: 111500 - DNA, 17 bp, Arabidopsis thaliana
ggcgacactgcacctgc

SEQ ID NO: 111501 - DNA, 17 bp, Arabidopsis thaliana
ggcgacagccccaggcc

SEQ ID NO: 111502 - DNA, 17 bp, Arabidopsis thaliana
ggcgacagcggattgag

SEQ ID NO: 111503 - DNA, 17 bp, Arabidopsis thaliana
ggcgacagctctcaatt

SEQ ID NO: 111504 - DNA, 17 bp, Arabidopsis thaliana
ggcgacagtcgctgcga

SEQ ID NO: 111505 - DNA, 17 bp, Arabidopsis thaliana
ggcgacagtggttccac

SEQ ID NO: 111506 - DNA, 17 bp, Arabidopsis thaliana
ggcgacagttggcgacg

SEQ ID NO: 111507 - DNA, 17 bp, Arabidopsis thaliana
ggcgacagtttaacgcg

SEQ ID NO: 111508 - DNA, 17 bp, Arabidopsis thaliana
ggcgacatcacttgtta

SEQ ID NO: 111509 - DNA, 17 bp, Arabidopsis thaliana
ggcgacatggcggcttg

SEQ ID NO: 111510 - DNA, 17 bp, Arabidopsis thaliana
ggcgacatgtgtcccgc

SEQ ID NO: 111511 - DNA, 17 bp, Arabidopsis thaliana
ggcgacatgtgtgcgag

SEQ ID NO: 111512 - DNA, 17 bp, Arabidopsis thaliana
ggcgacattcgtaggtc

SEQ ID NO: 111513 - DNA, 17 bp, Arabidopsis thaliana
ggcgacatttacccact

SEQ ID NO: 111514 - DNA, 17 bp, Arabidopsis thaliana
ggcgacatttgtgcttc

SEQ ID NO: 111515 - DNA, 17 bp, Arabidopsis thaliana
ggcgaccaggcagtcca

SEQ ID NO: 111516 - DNA, 17 bp, Arabidopsis thaliana
ggcgaccaggcttcccc

SEQ ID NO: 111517 - DNA, 17 bp, Arabidopsis thaliana
ggcgacccgagacgggg

SEQ ID NO: 111518 - DNA, 17 bp, Arabidopsis thaliana
ggcgacccgctctcgcc

SEQ ID NO: 111519 - DNA, 17 bp, Arabidopsis thaliana
ggcgacccgggttcgtt

SEQ ID NO: 111520 - DNA, 17 bp, Arabidopsis thaliana
ggcgaccctcttctcct

SEQ ID NO: 111521 - DNA, 17 bp, Arabidopsis thaliana
ggcgaccgaagacgacg

SEQ ID NO: 111522 - DNA, 17 bp, Arabidopsis thaliana
ggcgaccgaagccccgg

SEQ ID NO: 111523 - DNA, 17 bp, Arabidopsis thaliana
ggcgaccgtgggggtgc

SEQ ID NO: 111524 - DNA, 17 bp, Arabidopsis thaliana
ggcgaccgtgggggttc

SEQ ID NO: 111525 - DNA, 17 bp, Arabidopsis thaliana
ggcgaccgttctgctgc

SEQ ID NO: 111526 - DNA, 17 bp, Arabidopsis thaliana
ggcgacctgattacctg

SEQ ID NO: 111527 - DNA, 17 bp, Arabidopsis thaliana
ggcgacctggagtgaga

SEQ ID NO: 111528 - DNA, 17 bp, Arabidopsis thaliana
ggcgaccttcgccgcga

SEQ ID NO: 111529 - DNA, 17 bp, Arabidopsis thaliana
ggcgacgacgcttggag

SEQ ID NO: 111530 - DNA, 17 bp, Arabidopsis thaliana
ggcgacgcggtcgcagt

SEQ ID NO: 111531 - DNA, 17 bp, Arabidopsis thaliana
ggcgacgcttttacgac

SEQ ID NO: 111532 - DNA, 17 bp, Arabidopsis thaliana
ggcgacggagataacaa

SEQ ID NO: 111533 - DNA, 17 bp, Arabidopsis thaliana
ggcgacggcgatggtgg

SEQ ID NO: 111534 - DNA, 17 bp, Arabidopsis thaliana
ggcgacggcggcgatgg

SEQ ID NO: 111535 - DNA, 17 bp, Arabidopsis thaliana
ggcgacggtgagacggt

SEQ ID NO: 111536 - DNA, 17 bp, Arabidopsis thaliana
ggcgacgtctgcctggg

SEQ ID NO: 111537 - DNA, 17 bp, Arabidopsis thaliana
ggcgacgtgccggagtg

SEQ ID NO: 111538 - DNA, 17 bp, Arabidopsis thaliana
ggcgacgtgggtggttc

SEQ ID NO: 111539 - DNA, 17 bp, Arabidopsis thaliana
ggcgacgtgggttctgg

SEQ ID NO: 111540 - DNA, 17 bp, Arabidopsis thaliana
ggcgacgttgtactcaa

SEQ ID NO: 111541 - DNA, 17 bp, Arabidopsis thaliana
ggcgactaacttccgca

SEQ ID NO: 111542 - DNA, 17 bp, Arabidopsis thaliana
ggcgactacgatggtgt

SEQ ID NO: 111543 - DNA, 17 bp, Arabidopsis thaliana
ggcgactatcgctattt

SEQ ID NO: 111544 - DNA, 17 bp, Arabidopsis thaliana
ggcgactcataggcagt

SEQ ID NO: 111545 - DNA, 17 bp, Arabidopsis thaliana
ggcgactcattgacggc

SEQ ID NO: 111546 - DNA, 17 bp, Arabidopsis thaliana
ggcgactctaaagcata

SEQ ID NO: 111547 - DNA, 17 bp, Arabidopsis thaliana
ggcgactctcggcaacg

SEQ ID NO: 111548 - DNA, 17 bp, Arabidopsis thaliana
ggcgactgaaaccagcg

SEQ ID NO: 111549 - DNA, 17 bp, Arabidopsis thaliana
ggcgactgcgttttgcg

SEQ ID NO: 111550 - DNA, 17 bp, Arabidopsis thaliana
ggcgactgctcagccgg

SEQ ID NO: 111551 - DNA, 17 bp, Arabidopsis thaliana
ggcgactgtcgctaatt

SEQ ID NO: 111552 - DNA, 17 bp, Arabidopsis thaliana
ggcgactgtcgctacct

SEQ ID NO: 111553 - DNA, 17 bp, Arabidopsis thaliana
ggcgactgtcgctactt

SEQ ID NO: 111554 - DNA, 17 bp, Arabidopsis thaliana
ggcgactgtttaccaaa

SEQ ID NO: 111555 - DNA, 17 bp, Arabidopsis thaliana
ggcgacttatttacagt

SEQ ID NO: 111556 - DNA, 17 bp, Arabidopsis thaliana
ggcgactttcaccttgt

SEQ ID NO: 111557 - DNA, 17 bp, Arabidopsis thaliana
ggcgactttctgagctg

SEQ ID NO: 111558 - DNA, 17 bp, Arabidopsis thaliana
ggcgactttctgggctg

SEQ ID NO: 111559 - DNA, 17 bp, Arabidopsis thaliana
ggcgacttttccggcga

SEQ ID NO: 111560 - DNA, 17 bp, Arabidopsis thaliana
ggcgacttttttgtcta

SEQ ID NO: 111561 - DNA, 17 bp, Arabidopsis thaliana
ggcgagaaaaaagattg

SEQ ID NO: 111562 - DNA, 17 bp, Arabidopsis thaliana
ggcgagaaaatcacgag

SEQ ID NO: 111563 - DNA, 17 bp, Arabidopsis thaliana
ggcgagaaaattatggg

SEQ ID NO: 111564 - DNA, 17 bp, Arabidopsis thaliana
ggcgagaagatccattt

SEQ ID NO: 111565 - DNA, 17 bp, Arabidopsis thaliana
ggcgagacaatcagcac

SEQ ID NO: 111566 - DNA, 17 bp, Arabidopsis thaliana
ggcgagaccgacaccag

SEQ ID NO: 111567 - DNA, 17 bp, Arabidopsis thaliana
ggcgagacgggttacgc

SEQ ID NO: 111568 - DNA, 17 bp, Arabidopsis thaliana
ggcgagacgtagcgttc

SEQ ID NO: 111569 - DNA, 17 bp, Arabidopsis thaliana
ggcgagacgtagcgttt

SEQ ID NO: 111570 - DNA, 17 bp, Arabidopsis thaliana
ggcgagactccggtgac

SEQ ID NO: 111571 - DNA, 17 bp, Arabidopsis thaliana
ggcgagactggctgcga

SEQ ID NO: 111572 - DNA, 17 bp, Arabidopsis thaliana
ggcgagagaccgatagc

SEQ ID NO: 111573 - DNA, 17 bp, Arabidopsis thaliana
ggcgagagcgggtcgcc

SEQ ID NO: 111574 - DNA, 17 bp, Arabidopsis thaliana
ggcgagagtagtactag

SEQ ID NO: 111575 - DNA, 17 bp, Arabidopsis thaliana
ggcgagatctgtttggc

SEQ ID NO: 111576 - DNA, 17 bp, Arabidopsis thaliana
ggcgagatcttcatcat

SEQ ID NO: 111577 - DNA, 17 bp, Arabidopsis thaliana
ggcgagccaccatcaca

SEQ ID NO: 111578 - DNA, 17 bp, Arabidopsis thaliana
ggcgagcgtatagaggc

SEQ ID NO: 111579 - DNA, 17 bp, Arabidopsis thaliana
ggcgagctcctgccgac

SEQ ID NO: 111580 - DNA, 17 bp, Arabidopsis thaliana
ggcgagctgataaggac

SEQ ID NO: 111581 - DNA, 17 bp, Arabidopsis thaliana
ggcgaggagtacccatg

SEQ ID NO: 111582 - DNA, 17 bp, Arabidopsis thaliana
ggcgagggacatattgg

SEQ ID NO: 111583 - DNA, 17 bp, Arabidopsis thaliana
ggcgagggcacgtctgc

SEQ ID NO: 111584 - DNA, 17 bp, Arabidopsis thaliana
ggcgagggcacttctgc

SEQ ID NO: 111585 - DNA, 17 bp, Arabidopsis thaliana
ggcgaggttgagtgaca

SEQ ID NO: 111586 - DNA, 17 bp, Arabidopsis thaliana
ggcgagtaacttgtcct

SEQ ID NO: 111587 - DNA, 17 bp, Arabidopsis thaliana
ggcgagtagcaaatcct

SEQ ID NO: 111588 - DNA, 17 bp, Arabidopsis thaliana
ggcgagtatcgatatct

SEQ ID NO: 111589 - DNA, 17 bp, Arabidopsis thaliana
ggcgagtgatcaggaga

SEQ ID NO: 111590 - DNA, 17 bp, Arabidopsis thaliana
ggcgagtgatcaggagg

SEQ ID NO: 111591 - DNA, 17 bp, Arabidopsis thaliana
ggcgagtgtcctggtcg

SEQ ID NO: 111592 - DNA, 17 bp, Arabidopsis thaliana
ggcgagttaacatctag

SEQ ID NO: 111593 - DNA, 17 bp, Arabidopsis thaliana
ggcgagttgattggttt

SEQ ID NO: 111594 - DNA, 17 bp, Arabidopsis thaliana
ggcgagttgtccttggc

SEQ ID NO: 111595 - DNA, 17 bp, Arabidopsis thaliana
ggcgataaatctgtgaa

SEQ ID NO: 111596 - DNA, 17 bp, Arabidopsis thaliana
ggcgataatcgacctcc

SEQ ID NO: 111597 - DNA, 17 bp, Arabidopsis thaliana
ggcgataatggttgtga

SEQ ID NO: 111598 - DNA, 17 bp, Arabidopsis thaliana
ggcgatacgctcctgat

SEQ ID NO: 111599 - DNA, 17 bp, Arabidopsis thaliana
ggcgatacgctcctggt

SEQ ID NO: 111600 - DNA, 17 bp, Arabidopsis thaliana
ggcgatagagaagcggt

SEQ ID NO: 111601 - DNA, 17 bp, Arabidopsis thaliana
ggcgatagagattggga

SEQ ID NO: 111602 - DNA, 17 bp, Arabidopsis thaliana
ggcgatagatcagaatt

SEQ ID NO: 111603 - DNA, 17 bp, Arabidopsis thaliana
ggcgatatctgatttcg

SEQ ID NO: 111604 - DNA, 17 bp, Arabidopsis thaliana
ggcgatatgtccgagtg

SEQ ID NO: 111605 - DNA, 17 bp, Arabidopsis thaliana
ggcgatcaaatggatat

SEQ ID NO: 111606 - DNA, 17 bp, Arabidopsis thaliana
ggcgatcacacacatga

SEQ ID NO: 111607 - DNA, 17 bp, Arabidopsis thaliana
ggcgatcagtcgctggt

SEQ ID NO: 111608 - DNA, 17 bp, Arabidopsis thaliana
ggcgatcatataggtga

SEQ ID NO: 111609 - DNA, 17 bp, Arabidopsis thaliana
ggcgatcattcgctggt

SEQ ID NO: 111610 - DNA, 17 bp, Arabidopsis thaliana
ggcgatcggaatctgtg

SEQ ID NO: 111611 - DNA, 17 bp, Arabidopsis thaliana
ggcgatcgtcgctactt

SEQ ID NO: 111612 - DNA, 17 bp, Arabidopsis thaliana
ggcgatcgtggcgaagt

SEQ ID NO: 111613 - DNA, 17 bp, Arabidopsis thaliana
ggcgatctgaaaaggtg

SEQ ID NO: 111614 - DNA, 17 bp, Arabidopsis thaliana
ggcgatctgagaaggtg

SEQ ID NO: 111615 - DNA, 17 bp, Arabidopsis thaliana
ggcgatgaagagtatga

SEQ ID NO: 111616 - DNA, 17 bp, Arabidopsis thaliana
ggcgatgaaggtctttg

SEQ ID NO: 111617 - DNA, 17 bp, Arabidopsis thaliana
ggcgatgaagtgtacga

SEQ ID NO: 111618 - DNA, 17 bp, Arabidopsis thaliana
ggcgatgaagtgtatga

SEQ ID NO: 111619 - DNA, 17 bp, Arabidopsis thaliana
ggcgatgacaggtttcg

SEQ ID NO: 111620 - DNA, 17 bp, Arabidopsis thaliana
ggcgatgacctacaaag

SEQ ID NO: 111621 - DNA, 17 bp, Arabidopsis thaliana
ggcgatgacggtggtgt

SEQ ID NO: 111622 - DNA, 17 bp, Arabidopsis thaliana
ggcgatgataatggcga

SEQ ID NO: 111623 - DNA, 17 bp, Arabidopsis thaliana
ggcgatgatcagtagct

SEQ ID NO: 111624 - DNA, 17 bp, Arabidopsis thaliana
ggcgatgattgtttgtg

SEQ ID NO: 111625 - DNA, 17 bp, Arabidopsis thaliana
ggcgatgcgtcctggtc

SEQ ID NO: 111626 - DNA, 17 bp, Arabidopsis thaliana
ggcgatggaattctcag

SEQ ID NO: 111627 - DNA, 17 bp, Arabidopsis thaliana
ggcgatggtcctggtcg

SEQ ID NO: 111628 - DNA, 17 bp, Arabidopsis thaliana
ggcgatgtagcgcagct

SEQ ID NO: 111629 - DNA, 17 bp, Arabidopsis thaliana
ggcgatgtagtgcttaa

SEQ ID NO: 111630 - DNA, 17 bp, Arabidopsis thaliana
ggcgatgtgttggctta

SEQ ID NO: 111631 - DNA, 17 bp, Arabidopsis thaliana
ggcgatgtttctactat

SEQ ID NO: 111632 - DNA, 17 bp, Arabidopsis thaliana
ggcgattaataaacgaa

SEQ ID NO: 111633 - DNA, 17 bp, Arabidopsis thaliana
ggcgattacataccgtt

SEQ ID NO: 111634 - DNA, 17 bp, Arabidopsis thaliana
ggcgattacttgctatc

SEQ ID NO: 111635 - DNA, 17 bp, Arabidopsis thaliana
ggcgattactttggcga

SEQ ID NO: 111636 - DNA, 17 bp, Arabidopsis thaliana
ggcgattagccgtggag

SEQ ID NO: 111637 - DNA, 17 bp, Arabidopsis thaliana
ggcgattagttgctgct

SEQ ID NO: 111638 - DNA, 17 bp, Arabidopsis thaliana
ggcgattatccggaccc

SEQ ID NO: 111639 - DNA, 17 bp, Arabidopsis thaliana
ggcgattatcgctattt

SEQ ID NO: 111640 - DNA, 17 bp, Arabidopsis thaliana
ggcgattatgactcgat

SEQ ID NO: 111641 - DNA, 17 bp, Arabidopsis thaliana
ggcgattattttggcga

SEQ ID NO: 111642 - DNA, 17 bp, Arabidopsis thaliana
ggcgattcagttatgtg

SEQ ID NO: 111643 - DNA, 17 bp, Arabidopsis thaliana
ggcgattccgacggtct

SEQ ID NO: 111644 - DNA, 17 bp, Arabidopsis thaliana
ggcgattcctgtgttga

SEQ ID NO: 111645 - DNA, 17 bp, Arabidopsis thaliana
ggcgattgatgtgatgg

SEQ ID NO: 111646 - DNA, 17 bp, Arabidopsis thaliana
ggcgattgatgtgattg

SEQ ID NO: 111647 - DNA, 17 bp, Arabidopsis thaliana
ggcgattggcagatcag

SEQ ID NO: 111648 - DNA, 17 bp, Arabidopsis thaliana
ggcgattgtaatcggcg

SEQ ID NO: 111649 - DNA, 17 bp, Arabidopsis thaliana
ggcgattgtatacggtt

SEQ ID NO: 111650 - DNA, 17 bp, Arabidopsis thaliana
ggcgattgtcgcgctac

SEQ ID NO: 111651 - DNA, 17 bp, Arabidopsis thaliana
ggcgattgtcgttactt

SEQ ID NO: 111652 - DNA, 17 bp, Arabidopsis thaliana
ggcgattgtctcagcga

SEQ ID NO: 111653 - DNA, 17 bp, Arabidopsis thaliana
ggcgattgtttgtgcga

SEQ ID NO: 111654 - DNA, 17 bp, Arabidopsis thaliana
ggcgatttattgtccgc

SEQ ID NO: 111655 - DNA, 17 bp, Arabidopsis thaliana
ggcgatttcagctcttc

SEQ ID NO: 111656 - DNA, 17 bp, Arabidopsis thaliana
ggcgatttcatctcctg

SEQ ID NO: 111657 - DNA, 17 bp, Arabidopsis thaliana
ggcgatttgacgagtta

SEQ ID NO: 111658 - DNA, 17 bp, Arabidopsis thaliana
ggcgatttgccacgact

SEQ ID NO: 111659 - DNA, 17 bp, Arabidopsis thaliana
ggcgattttacggtttt

SEQ ID NO: 111660 - DNA, 17 bp, Arabidopsis thaliana
ggcgattttcgacattg

SEQ ID NO: 111661 - DNA, 17 bp, Arabidopsis thaliana
ggcgattttgaacggtg

SEQ ID NO: 111662 - DNA, 17 bp, Arabidopsis thaliana
ggcgattttgagtgaaa

SEQ ID NO: 111663 - DNA, 17 bp, Arabidopsis thaliana
ggcgattttggcaaaac

SEQ ID NO: 111664 - DNA, 17 bp, Arabidopsis thaliana
ggcgattttttgcctaa

SEQ ID NO: 111665 - DNA, 17 bp, Arabidopsis thaliana
ggcgcaaaaggtgcccg

SEQ ID NO: 111666 - DNA, 17 bp, Arabidopsis thaliana
ggcgcaaacatctaacc

SEQ ID NO: 111667 - DNA, 17 bp, Arabidopsis thaliana
ggcgcaaagtgctcgca

SEQ ID NO: 111668 - DNA, 17 bp, Arabidopsis thaliana
ggcgcaaagttcagttt

SEQ ID NO: 111669 - DNA, 17 bp, Arabidopsis thaliana
ggcgcaacgccctcgac

SEQ ID NO: 111670 - DNA, 17 bp, Arabidopsis thaliana
ggcgcaacgccctcgcc

SEQ ID NO: 111671 - DNA, 17 bp, Arabidopsis thaliana
ggcgcaactggagcctc

SEQ ID NO: 111672 - DNA, 17 bp, Arabidopsis thaliana
ggcgcaagagccaggcc

SEQ ID NO: 111673 - DNA, 17 bp, Arabidopsis thaliana
ggcgcaaggacattgac

SEQ ID NO: 111674 - DNA, 17 bp, Arabidopsis thaliana
ggcgcaagtgaaatacc

SEQ ID NO: 111675 - DNA, 17 bp, Arabidopsis thaliana
ggcgcaatttgtaaatc

SEQ ID NO: 111676 - DNA, 17 bp, Arabidopsis thaliana
ggcgcaatttgtagatc

SEQ ID NO: 111677 - DNA, 17 bp, Arabidopsis thaliana
ggcgcacaggcccgcca

SEQ ID NO: 111678 - DNA, 17 bp, Arabidopsis thaliana
ggcgcacaggcccgtca

SEQ ID NO: 111679 - DNA, 17 bp, Arabidopsis thaliana
ggcgcaccggacaccac

SEQ ID NO: 111680 - DNA, 17 bp, Arabidopsis thaliana
ggcgcacgcattcatta

SEQ ID NO: 111681 - DNA, 17 bp, Arabidopsis thaliana
ggcgcacgtctgcctgg

SEQ ID NO: 111682 - DNA, 17 bp, Arabidopsis thaliana
ggcgcacgtgtcgttgg

SEQ ID NO: 111683 - DNA, 17 bp, Arabidopsis thaliana
ggcgcactgaccgtcgg

SEQ ID NO: 111684 - DNA, 17 bp, Arabidopsis thaliana
ggcgcacttgtcacgga

SEQ ID NO: 111685 - DNA, 17 bp, Arabidopsis thaliana
ggcgcagaaaattaccg

SEQ ID NO: 111686 - DNA, 17 bp, Arabidopsis thaliana
ggcgcagactttgtagc

SEQ ID NO: 111687 - DNA, 17 bp, Arabidopsis thaliana
ggcgcagatggacagtg

SEQ ID NO: 111688 - DNA, 17 bp, Arabidopsis thaliana
ggcgcagcagttgactg

SEQ ID NO: 111689 - DNA, 17 bp, Arabidopsis thaliana
ggcgcagcgggcattac

SEQ ID NO: 111690 - DNA, 17 bp, Arabidopsis thaliana
ggcgcaggagcgctcgg

SEQ ID NO: 111691 - DNA, 17 bp, Arabidopsis thaliana
ggcgcaggtgcttgttg

SEQ ID NO: 111692 - DNA, 17 bp, Arabidopsis thaliana
ggcgcagtgaatggcga

SEQ ID NO: 111693 - DNA, 17 bp, Arabidopsis thaliana
ggcgcagtgcggatgat

SEQ ID NO: 111694 - DNA, 17 bp, Arabidopsis thaliana
ggcgcatccatggcaac

SEQ ID NO: 111695 - DNA, 17 bp, Arabidopsis thaliana
ggcgcatgttcattgca

SEQ ID NO: 111696 - DNA, 17 bp, Arabidopsis thaliana
ggcgcattggtcggctt

SEQ ID NO: 111697 - DNA, 17 bp, Arabidopsis thaliana
ggcgcatttctaccggt

SEQ ID NO: 111698 - DNA, 17 bp, Arabidopsis thaliana
ggcgccaagagggaaaa

SEQ ID NO: 111699 - DNA, 17 bp, Arabidopsis thaliana
ggcgccatagccaagtg

SEQ ID NO: 111700 - DNA, 17 bp, Arabidopsis thaliana
ggcgccatatcgaggtc

SEQ ID NO: 111701 - DNA, 17 bp, Arabidopsis thaliana
ggcgcccaccgtggggc

SEQ ID NO: 111702 - DNA, 17 bp, Arabidopsis thaliana
ggcgcccatacggacaa

SEQ ID NO: 111703 - DNA, 17 bp, Arabidopsis thaliana
ggcgccctttgtcgcta

SEQ ID NO: 111704 - DNA, 17 bp, Arabidopsis thaliana
ggcgccggaaagttttt

SEQ ID NO: 111705 - DNA, 17 bp, Arabidopsis thaliana
ggcgccgtctgtaagct

SEQ ID NO: 111706 - DNA, 17 bp, Arabidopsis thaliana
ggcgcctatggggtcgc

SEQ ID NO: 111707 - DNA, 17 bp, Arabidopsis thaliana
ggcgcctctccattggc

SEQ ID NO: 111708 - DNA, 17 bp, Arabidopsis thaliana
ggcgcctgaaccttcac

SEQ ID NO: 111709 - DNA, 17 bp, Arabidopsis thaliana
ggcgcctgggcccgagg

SEQ ID NO: 111710 - DNA, 17 bp, Arabidopsis thaliana
ggcgcctgttcttttcc

SEQ ID NO: 111711 - DNA, 17 bp, Arabidopsis thaliana
ggcgccttggagagctt

SEQ ID NO: 111712 - DNA, 17 bp, Arabidopsis thaliana
ggcgcgaattaagtgtg

SEQ ID NO: 111713 - DNA, 17 bp, Arabidopsis thaliana
ggcgcgaccccgggcgg

SEQ ID NO: 111714 - DNA, 17 bp, Arabidopsis thaliana
ggcgcgacctatacccg

SEQ ID NO: 111715 - DNA, 17 bp, Arabidopsis thaliana
ggcgcgagcccgggcgg

SEQ ID NO: 111716 - DNA, 17 bp, Arabidopsis thaliana
ggcgcgatacaactctc

SEQ ID NO: 111717 - DNA, 17 bp, Arabidopsis thaliana
ggcgcgtctgcctgggt

SEQ ID NO: 111718 - DNA, 17 bp, Arabidopsis thaliana
ggcgcgtgctgcagacc

SEQ ID NO: 111719 - DNA, 17 bp, Arabidopsis thaliana
ggcgcgtgtgggccacc

SEQ ID NO: 111720 - DNA, 17 bp, Arabidopsis thaliana
ggcgcgttctgattgat

SEQ ID NO: 111721 - DNA, 17 bp, Arabidopsis thaliana
ggcgctaaaacttgtga

SEQ ID NO: 111722 - DNA, 17 bp, Arabidopsis thaliana
ggcgctaaaacttgtgt

SEQ ID NO: 111723 - DNA, 17 bp, Arabidopsis thaliana
ggcgctaatcgtctcga

SEQ ID NO: 111724 - DNA, 17 bp, Arabidopsis thaliana
ggcgctacgaccgatcg

SEQ ID NO: 111725 - DNA, 17 bp, Arabidopsis thaliana
ggcgctacttttgatcg

SEQ ID NO: 111726 - DNA, 17 bp, Arabidopsis thaliana
ggcgctagagcaagtcc

SEQ ID NO: 111727 - DNA, 17 bp, Arabidopsis thaliana
ggcgctagataggggtg

SEQ ID NO: 111728 - DNA, 17 bp, Arabidopsis thaliana
ggcgctagggcgtcaac

SEQ ID NO: 111729 - DNA, 17 bp, Arabidopsis thaliana
ggcgctatgagccaagt

SEQ ID NO: 111730 - DNA, 17 bp, Arabidopsis thaliana
ggcgctattgccaattg

SEQ ID NO: 111731 - DNA, 17 bp, Arabidopsis thaliana
ggcgctcatcctcgccg

SEQ ID NO: 111732 - DNA, 17 bp, Arabidopsis thaliana
ggcgctcatcctcgtcg

SEQ ID NO: 111733 - DNA, 17 bp, Arabidopsis thaliana
ggcgctccgactattcc

SEQ ID NO: 111734 - DNA, 17 bp, Arabidopsis thaliana
ggcgctccgactatttc

SEQ ID NO: 111735 - DNA, 17 bp, Arabidopsis thaliana
ggcgctcgatatcagaa

SEQ ID NO: 111736 - DNA, 17 bp, Arabidopsis thaliana
ggcgctcgggggtccca

SEQ ID NO: 111737 - DNA, 17 bp, Arabidopsis thaliana
ggcgctcggtatgggac

SEQ ID NO: 111738 - DNA, 17 bp, Arabidopsis thaliana
ggcgctctgacgaaaat

SEQ ID NO: 111739 - DNA, 17 bp, Arabidopsis thaliana
ggcgctgacgggtttcg

SEQ ID NO: 111740 - DNA, 17 bp, Arabidopsis thaliana
ggcgctgagacatcaat

SEQ ID NO: 111741 - DNA, 17 bp, Arabidopsis thaliana
ggcgctgaggttagacc

SEQ ID NO: 111742 - DNA, 17 bp, Arabidopsis thaliana
ggcgctgcagcgcatcg

SEQ ID NO: 111743 - DNA, 17 bp, Arabidopsis thaliana
ggcgctggaaaagtcac

SEQ ID NO: 111744 - DNA, 17 bp, Arabidopsis thaliana
ggcgctggaggtggtgg

SEQ ID NO: 111745 - DNA, 17 bp, Arabidopsis thaliana
ggcgctggattatgact

SEQ ID NO: 111746 - DNA, 17 bp, Arabidopsis thaliana
ggcgctggtggtggtgg

SEQ ID NO: 111747 - DNA, 17 bp, Arabidopsis thaliana
ggcgctggtgtccggct

SEQ ID NO: 111748 - DNA, 17 bp, Arabidopsis thaliana
ggcgctggtttaaggct

SEQ ID NO: 111749 - DNA, 17 bp, Arabidopsis thaliana
ggcgctgtacgtatcga

SEQ ID NO: 111750 - DNA, 17 bp, Arabidopsis thaliana
ggcgctgtctacgagtc

SEQ ID NO: 111751 - DNA, 17 bp, Arabidopsis thaliana
ggcgctgtgatggctat

SEQ ID NO: 111752 - DNA, 17 bp, Arabidopsis thaliana
ggcgctgtgcgtatcga

SEQ ID NO: 111753 - DNA, 17 bp, Arabidopsis thaliana
ggcgctgtgcgtatgga

SEQ ID NO: 111754 - DNA, 17 bp, Arabidopsis thaliana
ggcgctgtggccgagtg

SEQ ID NO: 111755 - DNA, 17 bp, Arabidopsis thaliana
ggcgctgttgtctgcga

SEQ ID NO: 111756 - DNA, 17 bp, Arabidopsis thaliana
ggcgcttaagcgcgcga

SEQ ID NO: 111757 - DNA, 17 bp, Arabidopsis thaliana
ggcgcttaatgactgta

SEQ ID NO: 111758 - DNA, 17 bp, Arabidopsis thaliana
ggcgcttaccaaggcga

SEQ ID NO: 111759 - DNA, 17 bp, Arabidopsis thaliana
ggcgcttcaacttcgct

SEQ ID NO: 111760 - DNA, 17 bp, Arabidopsis thaliana
ggcgcttcgacttcccg

SEQ ID NO: 111761 - DNA, 17 bp, Arabidopsis thaliana
ggcgcttcgacttctgt

SEQ ID NO: 111762 - DNA, 17 bp, Arabidopsis thaliana
ggcgcttgagagaacca

SEQ ID NO: 111763 - DNA, 17 bp, Arabidopsis thaliana
ggcgcttgagagaacga

SEQ ID NO: 111764 - DNA, 17 bp, Arabidopsis thaliana
ggcgcttgcagagagaa

SEQ ID NO: 111765 - DNA, 17 bp, Arabidopsis thaliana
ggcgctttagtttctgc

SEQ ID NO: 111766 - DNA, 17 bp, Arabidopsis thaliana
ggcgctttgaatggatg

SEQ ID NO: 111767 - DNA, 17 bp, Arabidopsis thaliana
ggcgctttggccgagtg

SEQ ID NO: 111768 - DNA, 17 bp, Arabidopsis thaliana
ggcgcttttgcttccga

SEQ ID NO: 111769 - DNA, 17 bp, Arabidopsis thaliana
ggcgcttttgtcgctaa

SEQ ID NO: 111770 - DNA, 17 bp, Arabidopsis thaliana
ggcggaaaaacacgatt

SEQ ID NO: 111771 - DNA, 17 bp, Arabidopsis thaliana
ggcggaaaaatcacagg

SEQ ID NO: 111772 - DNA, 17 bp, Arabidopsis thaliana
ggcggaaaaatctcggg

SEQ ID NO: 111773 - DNA, 17 bp, Arabidopsis thaliana
ggcggaaaaatgcggat

SEQ ID NO: 111774 - DNA, 17 bp, Arabidopsis thaliana
ggcggaaaaattacggg

SEQ ID NO: 111775 - DNA, 17 bp, Arabidopsis thaliana
ggcggaaagattggttt

SEQ ID NO: 111776 - DNA, 17 bp, Arabidopsis thaliana
ggcggaaagtgttcgac

SEQ ID NO: 111777 - DNA, 17 bp, Arabidopsis thaliana
ggcggaaattttttttg

SEQ ID NO: 111778 - DNA, 17 bp, Arabidopsis thaliana
ggcggaacgagtttggc

SEQ ID NO: 111779 - DNA, 17 bp, Arabidopsis thaliana
ggcggaacggctctctc

SEQ ID NO: 111780 - DNA, 17 bp, Arabidopsis thaliana
ggcggaacgggtttggc

SEQ ID NO: 111781 - DNA, 17 bp, Arabidopsis thaliana
ggcggaactgtgcgaat

SEQ ID NO: 111782 - DNA, 17 bp, Arabidopsis thaliana
ggcggaagagtgagaga

SEQ ID NO: 111783 - DNA, 17 bp, Arabidopsis thaliana
ggcggaagcgtcgttcc

SEQ ID NO: 111784 - DNA, 17 bp, Arabidopsis thaliana
ggcggaagcgtcgttcg

SEQ ID NO: 111785 - DNA, 17 bp, Arabidopsis thaliana
ggcggaagcgttgttcg

SEQ ID NO: 111786 - DNA, 17 bp, Arabidopsis thaliana
ggcggaagtcctcgtgt

SEQ ID NO: 111787 - DNA, 17 bp, Arabidopsis thaliana
ggcggaatggtcggctt

SEQ ID NO: 111788 - DNA, 17 bp, Arabidopsis thaliana
ggcggaattggacatgg

SEQ ID NO: 111789 - DNA, 17 bp, Arabidopsis thaliana
ggcggacaacaaacagg

SEQ ID NO: 111790 - DNA, 17 bp, Arabidopsis thaliana
ggcggaccagaccgtcg

SEQ ID NO: 111791 - DNA, 17 bp, Arabidopsis thaliana
ggcggaccggattgctc

SEQ ID NO: 111792 - DNA, 17 bp, Arabidopsis thaliana
ggcggacgagtctgagt

SEQ ID NO: 111793 - DNA, 17 bp, Arabidopsis thaliana
ggcggacgggttggcgg

SEQ ID NO: 111794 - DNA, 17 bp, Arabidopsis thaliana
ggcggacgtagccaagt

SEQ ID NO: 111795 - DNA, 17 bp, Arabidopsis thaliana
ggcggactacgatattg

SEQ ID NO: 111796 - DNA, 17 bp, Arabidopsis thaliana
ggcggagaagacggtga

SEQ ID NO: 111797 - DNA, 17 bp, Arabidopsis thaliana
ggcggagaatcagagta

SEQ ID NO: 111798 - DNA, 17 bp, Arabidopsis thaliana
ggcggagagaacggcgg

SEQ ID NO: 111799 - DNA, 17 bp, Arabidopsis thaliana
ggcggagagcgacggat

SEQ ID NO: 111800 - DNA, 17 bp, Arabidopsis thaliana
ggcggagagggaaaatc

SEQ ID NO: 111801 - DNA, 17 bp, Arabidopsis thaliana
ggcggagatttcgcgac

SEQ ID NO: 111802 - DNA, 17 bp, Arabidopsis thaliana
ggcggagccagaacaat

SEQ ID NO: 111803 - DNA, 17 bp, Arabidopsis thaliana
ggcggagcggatcaagc

SEQ ID NO: 111804 - DNA, 17 bp, Arabidopsis thaliana
ggcggagcggccgtcgg

SEQ ID NO: 111805 - DNA, 17 bp, Arabidopsis thaliana
ggcggaggacagggaag

SEQ ID NO: 111806 - DNA, 17 bp, Arabidopsis thaliana
ggcggaggacattgtca

SEQ ID NO: 111807 - DNA, 17 bp, Arabidopsis thaliana
ggcggaggagctctctg

SEQ ID NO: 111808 - DNA, 17 bp, Arabidopsis thaliana
ggcggagggcacgtcga

SEQ ID NO: 111809 - DNA, 17 bp, Arabidopsis thaliana
ggcggagggcacgtctg

SEQ ID NO: 111810 - DNA, 17 bp, Arabidopsis thaliana
ggcggaggtcacggctg

SEQ ID NO: 111811 - DNA, 17 bp, Arabidopsis thaliana
ggcggaggtggtagtcg

SEQ ID NO: 111812 - DNA, 17 bp, Arabidopsis thaliana
ggcggagtggccgtcgg

SEQ ID NO: 111813 - DNA, 17 bp, Arabidopsis thaliana
ggcggagtggccgtggg

SEQ ID NO: 111814 - DNA, 17 bp, Arabidopsis thaliana
ggcggagtgtagtgaca

SEQ ID NO: 111815 - DNA, 17 bp, Arabidopsis thaliana
ggcggagtgtgactgcc

SEQ ID NO: 111816 - DNA, 17 bp, Arabidopsis thaliana
ggcggagttcaggatgt

SEQ ID NO: 111817 - DNA, 17 bp, Arabidopsis thaliana
ggcggatagaccttgct

SEQ ID NO: 111818 - DNA, 17 bp, Arabidopsis thaliana
ggcggatatcgcaaggg

SEQ ID NO: 111819 - DNA, 17 bp, Arabidopsis thaliana
ggcggatatgtagttat

SEQ ID NO: 111820 - DNA, 17 bp, Arabidopsis thaliana
ggcggatcaacaatgtc

SEQ ID NO: 111821 - DNA, 17 bp, Arabidopsis thaliana
ggcggatccaggaaata

SEQ ID NO: 111822 - DNA, 17 bp, Arabidopsis thaliana
ggcggatcgttaccccg

SEQ ID NO: 111823 - DNA, 17 bp, Arabidopsis thaliana
ggcggatctagagagat

SEQ ID NO: 111824 - DNA, 17 bp, Arabidopsis thaliana
ggcggatctagccaagt

SEQ ID NO: 111825 - DNA, 17 bp, Arabidopsis thaliana
ggcggatctatgtgtat

SEQ ID NO: 111826 - DNA, 17 bp, Arabidopsis thaliana
ggcggatgatgtggaga

SEQ ID NO: 111827 - DNA, 17 bp, Arabidopsis thaliana
ggcggatgattcacggt

SEQ ID NO: 111828 - DNA, 17 bp, Arabidopsis thaliana
ggcggatgcagccaagc

SEQ ID NO: 111829 - DNA, 17 bp, Arabidopsis thaliana
ggcggatgctgtgctgc

SEQ ID NO: 111830 - DNA, 17 bp, Arabidopsis thaliana
ggcggatggtctgaata

SEQ ID NO: 111831 - DNA, 17 bp, Arabidopsis thaliana
ggcggatgtacccaagt

SEQ ID NO: 111832 - DNA, 17 bp, Arabidopsis thaliana
ggcggatgtagccaact

SEQ ID NO: 111833 - DNA, 17 bp, Arabidopsis thaliana
ggcggatgtagccaagt

SEQ ID NO: 111834 - DNA, 17 bp, Arabidopsis thaliana
ggcggatgtagccaatg

SEQ ID NO: 111835 - DNA, 17 bp, Arabidopsis thaliana
ggcggatgtagccaatt

SEQ ID NO: 111836 - DNA, 17 bp, Arabidopsis thaliana
ggcggatgtatccaagt

SEQ ID NO: 111837 - DNA, 17 bp, Arabidopsis thaliana
ggcggatgtcagcggtt

SEQ ID NO: 111838 - DNA, 17 bp, Arabidopsis thaliana
ggcggatgtggtcggct

SEQ ID NO: 111839 - DNA, 17 bp, Arabidopsis thaliana
ggcggatgttgcttata

SEQ ID NO: 111840 - DNA, 17 bp, Arabidopsis thaliana
ggcggattacggtggcg

SEQ ID NO: 111841 - DNA, 17 bp, Arabidopsis thaliana
ggcggattggacggctt

SEQ ID NO: 111842 - DNA, 17 bp, Arabidopsis thaliana
ggcggattggtcggctt

SEQ ID NO: 111843 - DNA, 17 bp, Arabidopsis thaliana
ggcggattttgctgtgt

SEQ ID NO: 111844 - DNA, 17 bp, Arabidopsis thaliana
ggcggcacgtcggcctg

SEQ ID NO: 111845 - DNA, 17 bp, Arabidopsis thaliana
ggcggcactggtggaga

SEQ ID NO: 111846 - DNA, 17 bp, Arabidopsis thaliana
ggcggcaggcgacggcg

SEQ ID NO: 111847 - DNA, 17 bp, Arabidopsis thaliana
ggcggcaggcgagggcg

SEQ ID NO: 111848 - DNA, 17 bp, Arabidopsis thaliana
ggcggcatagccgagtg

SEQ ID NO: 111849 - DNA, 17 bp, Arabidopsis thaliana
ggcggcatcgccgagtg

SEQ ID NO: 111850 - DNA, 17 bp, Arabidopsis thaliana
ggcggcatgaccgagtg

SEQ ID NO: 111851 - DNA, 17 bp, Arabidopsis thaliana
ggcggcatggccaagtg

SEQ ID NO: 111852 - DNA, 17 bp, Arabidopsis thaliana
ggcggcatggccgactg

SEQ ID NO: 111853 - DNA, 17 bp, Arabidopsis thaliana
ggcggcatggccgagat

SEQ ID NO: 111854 - DNA, 17 bp, Arabidopsis thaliana
ggcggcatggccgagcg

SEQ ID NO: 111855 - DNA, 17 bp, Arabidopsis thaliana
ggcggcatggccgagtg

SEQ ID NO: 111856 - DNA, 17 bp, Arabidopsis thaliana
ggcggcatggccgattg

SEQ ID NO: 111857 - DNA, 17 bp, Arabidopsis thaliana
ggcggcatggccgtgtg

SEQ ID NO: 111858 - DNA, 17 bp, Arabidopsis thaliana
ggcggcatggcctagtg

SEQ ID NO: 111859 - DNA, 17 bp, Arabidopsis thaliana
ggcggcatggcggagtg

SEQ ID NO: 111860 - DNA, 17 bp, Arabidopsis thaliana
ggcggcatgttggtttt

SEQ ID NO: 111861 - DNA, 17 bp, Arabidopsis thaliana
ggcggcatttgcatttg

SEQ ID NO: 111862 - DNA, 17 bp, Arabidopsis thaliana
ggcggccggacggtcgg

SEQ ID NO: 111863 - DNA, 17 bp, Arabidopsis thaliana
ggcggcctgattatccc

SEQ ID NO: 111864 - DNA, 17 bp, Arabidopsis thaliana
ggcggcgacgacaagta

SEQ ID NO: 111865 - DNA, 17 bp, Arabidopsis thaliana
ggcggcgacgacgcttg

SEQ ID NO: 111866 - DNA, 17 bp, Arabidopsis thaliana
ggcggcgattctttagc

SEQ ID NO: 111867 - DNA, 17 bp, Arabidopsis thaliana
ggcggcggagaaagact

SEQ ID NO: 111868 - DNA, 17 bp, Arabidopsis thaliana
ggcggcggagctgtgtc

SEQ ID NO: 111869 - DNA, 17 bp, Arabidopsis thaliana
ggcggcggatctgtggt

SEQ ID NO: 111870 - DNA, 17 bp, Arabidopsis thaliana
ggcggcggcggatcaac

SEQ ID NO: 111871 - DNA, 17 bp, Arabidopsis thaliana
ggcggcggcggctcaga

SEQ ID NO: 111872 - DNA, 17 bp, Arabidopsis thaliana
ggcggcggcggtgaata

SEQ ID NO: 111873 - DNA, 17 bp, Arabidopsis thaliana
ggcggctacggcaaatc

SEQ ID NO: 111874 - DNA, 17 bp, Arabidopsis thaliana
ggcggctagggcaacct

SEQ ID NO: 111875 - DNA, 17 bp, Arabidopsis thaliana
ggcggctcgtctctgca

SEQ ID NO: 111876 - DNA, 17 bp, Arabidopsis thaliana
ggcggctctatactcat

SEQ ID NO: 111877 - DNA, 17 bp, Arabidopsis thaliana
ggcggctgaggagcgtt

SEQ ID NO: 111878 - DNA, 17 bp, Arabidopsis thaliana
ggcggctgcggttgcgg

SEQ ID NO: 111879 - DNA, 17 bp, Arabidopsis thaliana
ggcggctgctagggttt

SEQ ID NO: 111880 - DNA, 17 bp, Arabidopsis thaliana
ggcggctgtcgtagatc

SEQ ID NO: 111881 - DNA, 17 bp, Arabidopsis thaliana
ggcggctgtgtccttgt

SEQ ID NO: 111882 - DNA, 17 bp, Arabidopsis thaliana
ggcggctgtgtgctttt

SEQ ID NO: 111883 - DNA, 17 bp, Arabidopsis thaliana
ggcggcttaactggttt

SEQ ID NO: 111884 - DNA, 17 bp, Arabidopsis thaliana
ggcggcttcagaatcgc

SEQ ID NO: 111885 - DNA, 17 bp, Arabidopsis thaliana
ggcggcttcagggaatt

SEQ ID NO: 111886 - DNA, 17 bp, Arabidopsis thaliana
ggcggcttgtcccttcg

SEQ ID NO: 111887 - DNA, 17 bp, Arabidopsis thaliana
ggcggcttgtgattagt

SEQ ID NO: 111888 - DNA, 17 bp, Arabidopsis thaliana
ggcgggaaaatagtttg

SEQ ID NO: 111889 - DNA, 17 bp, Arabidopsis thaliana
ggcgggaaaatcacagg

SEQ ID NO: 111890 - DNA, 17 bp, Arabidopsis thaliana
ggcgggaaaatcacgag

SEQ ID NO: 111891 - DNA, 17 bp, Arabidopsis thaliana
ggcgggaaaatcacggg

SEQ ID NO: 111892 - DNA, 17 bp, Arabidopsis thaliana
ggcgggaaaattacggc

SEQ ID NO: 111893 - DNA, 17 bp, Arabidopsis thaliana
ggcgggaaaattacggg

SEQ ID NO: 111894 - DNA, 17 bp, Arabidopsis thaliana
ggcgggaaaatttcagt

SEQ ID NO: 111895 - DNA, 17 bp, Arabidopsis thaliana
ggcgggaaacatgattt

SEQ ID NO: 111896 - DNA, 17 bp, Arabidopsis thaliana
ggcgggaaagcttttga

SEQ ID NO: 111897 - DNA, 17 bp, Arabidopsis thaliana
ggcgggaaagtttttgg

SEQ ID NO: 111898 - DNA, 17 bp, Arabidopsis thaliana
ggcgggacaggtttggc

SEQ ID NO: 111899 - DNA, 17 bp, Arabidopsis thaliana
ggcgggacgagtttagc

SEQ ID NO: 111900 - DNA, 17 bp, Arabidopsis thaliana
ggcgggacgagtttgac

SEQ ID NO: 111901 - DNA, 17 bp, Arabidopsis thaliana
ggcgggacgagtttggc

SEQ ID NO: 111902 - DNA, 17 bp, Arabidopsis thaliana
ggcgggacgggtttgac

SEQ ID NO: 111903 - DNA, 17 bp, Arabidopsis thaliana
ggcgggacgggtttggc

SEQ ID NO: 111904 - DNA, 17 bp, Arabidopsis thaliana
ggcgggactgagacacg

SEQ ID NO: 111905 - DNA, 17 bp, Arabidopsis thaliana
ggcgggagtaactatga

SEQ ID NO: 111906 - DNA, 17 bp, Arabidopsis thaliana
ggcgggagttttatgac

SEQ ID NO: 111907 - DNA, 17 bp, Arabidopsis thaliana
ggcgggatccctcgagg

SEQ ID NO: 111908 - DNA, 17 bp, Arabidopsis thaliana
ggcgggatccctcgccc

SEQ ID NO: 111909 - DNA, 17 bp, Arabidopsis thaliana
ggcgggatccctcgcgg

SEQ ID NO: 111910 - DNA, 17 bp, Arabidopsis thaliana
ggcgggatcctccgcgg

SEQ ID NO: 111911 - DNA, 17 bp, Arabidopsis thaliana
ggcgggatccttcgcgg

SEQ ID NO: 111912 - DNA, 17 bp, Arabidopsis thaliana
ggcgggatgggtttggc

SEQ ID NO: 111913 - DNA, 17 bp, Arabidopsis thaliana
ggcgggattacccgctg

SEQ ID NO: 111914 - DNA, 17 bp, Arabidopsis thaliana
ggcgggattcctcgcgg

SEQ ID NO: 111915 - DNA, 17 bp, Arabidopsis thaliana
ggcgggcaaggaatcgg

SEQ ID NO: 111916 - DNA, 17 bp, Arabidopsis thaliana
ggcgggcaagtcggcga

SEQ ID NO: 111917 - DNA, 17 bp, Arabidopsis thaliana
ggcgggccggtcctggt

SEQ ID NO: 111918 - DNA, 17 bp, Arabidopsis thaliana
ggcgggcttgacggaaa

SEQ ID NO: 111919 - DNA, 17 bp, Arabidopsis thaliana
ggcgggctttatctatt

SEQ ID NO: 111920 - DNA, 17 bp, Arabidopsis thaliana
ggcggggatctgctgtg

SEQ ID NO: 111921 - DNA, 17 bp, Arabidopsis thaliana
ggcgggggcctcgggaa

SEQ ID NO: 111922 - DNA, 17 bp, Arabidopsis thaliana
ggcggggtacaacccct

SEQ ID NO: 111923 - DNA, 17 bp, Arabidopsis thaliana
ggcggggtccctcgcgc

SEQ ID NO: 111924 - DNA, 17 bp, Arabidopsis thaliana
ggcgggtagaatccttt

SEQ ID NO: 111925 - DNA, 17 bp, Arabidopsis thaliana
ggcgggtagaatctttt

SEQ ID NO: 111926 - DNA, 17 bp, Arabidopsis thaliana
ggcgggtcttatctagt

SEQ ID NO: 111927 - DNA, 17 bp, Arabidopsis thaliana
ggcgggtgctgctattg

SEQ ID NO: 111928 - DNA, 17 bp, Arabidopsis thaliana
ggcgggtgggacccacg

SEQ ID NO: 111929 - DNA, 17 bp, Arabidopsis thaliana
ggcgggtgggacccagg

SEQ ID NO: 111930 - DNA, 17 bp, Arabidopsis thaliana
ggcgggtgtaagatgta

SEQ ID NO: 111931 - DNA, 17 bp, Arabidopsis thaliana
ggcgggttttacggacc

SEQ ID NO: 111932 - DNA, 17 bp, Arabidopsis thaliana
ggcgggttttgcaacta

SEQ ID NO: 111933 - DNA, 17 bp, Arabidopsis thaliana
ggcggtaactttttggc

SEQ ID NO: 111934 - DNA, 17 bp, Arabidopsis thaliana
ggcggtagacacagtgc

SEQ ID NO: 111935 - DNA, 17 bp, Arabidopsis thaliana
ggcggtagcgacaagcg

SEQ ID NO: 111936 - DNA, 17 bp, Arabidopsis thaliana
ggcggtaggagatctat

SEQ ID NO: 111937 - DNA, 17 bp, Arabidopsis thaliana
ggcggtcagttccgact

SEQ ID NO: 111938 - DNA, 17 bp, Arabidopsis thaliana
ggcggtccaacaaagag

SEQ ID NO: 111939 - DNA, 17 bp, Arabidopsis thaliana
ggcggtccgcctttggt

SEQ ID NO: 111940 - DNA, 17 bp, Arabidopsis thaliana
ggcggtcctccgctgga

SEQ ID NO: 111941 - DNA, 17 bp, Arabidopsis thaliana
ggcggtcgacagaacag

SEQ ID NO: 111942 - DNA, 17 bp, Arabidopsis thaliana
ggcggtcgttgcgatta

SEQ ID NO: 111943 - DNA, 17 bp, Arabidopsis thaliana
ggcggtctcagtccatt

SEQ ID NO: 111944 - DNA, 17 bp, Arabidopsis thaliana
ggcggtctgactactcc

SEQ ID NO: 111945 - DNA, 17 bp, Arabidopsis thaliana
ggcggtctggttcaagg

SEQ ID NO: 111946 - DNA, 17 bp, Arabidopsis thaliana
ggcggtgaagccgttgt

SEQ ID NO: 111947 - DNA, 17 bp, Arabidopsis thaliana
ggcggtgactcataggt

SEQ ID NO: 111948 - DNA, 17 bp, Arabidopsis thaliana
ggcggtgactctgacgg

SEQ ID NO: 111949 - DNA, 17 bp, Arabidopsis thaliana
ggcggtgcaacacggag

SEQ ID NO: 111950 - DNA, 17 bp, Arabidopsis thaliana
ggcggtgccaggcgggc

SEQ ID NO: 111951 - DNA, 17 bp, Arabidopsis thaliana
ggcggtggagaagcttt

SEQ ID NO: 111952 - DNA, 17 bp, Arabidopsis thaliana
ggcggtggaggtggtgg

SEQ ID NO: 111953 - DNA, 17 bp, Arabidopsis thaliana
ggcggtggatctctccc

SEQ ID NO: 111954 - DNA, 17 bp, Arabidopsis thaliana
ggcggtggcgacaagtg

SEQ ID NO: 111955 - DNA, 17 bp, Arabidopsis thaliana
ggcggtggcggcctaag

SEQ ID NO: 111956 - DNA, 17 bp, Arabidopsis thaliana
ggcggtggctccggtga

SEQ ID NO: 111957 - DNA, 17 bp, Arabidopsis thaliana
ggcggtgtacagatagc

SEQ ID NO: 111958 - DNA, 17 bp, Arabidopsis thaliana
ggcggtgtagaatgcag

SEQ ID NO: 111959 - DNA, 17 bp, Arabidopsis thaliana
ggcggtgtagctcagct

SEQ ID NO: 111960 - DNA, 17 bp, Arabidopsis thaliana
ggcggtgtagctcatat

SEQ ID NO: 111961 - DNA, 17 bp, Arabidopsis thaliana
ggcggtgtgagaaggct

SEQ ID NO: 111962 - DNA, 17 bp, Arabidopsis thaliana
ggcggtgtgtacaaagg

SEQ ID NO: 111963 - DNA, 17 bp, Arabidopsis thaliana
ggcggtgttggctaaga

SEQ ID NO: 111964 - DNA, 17 bp, Arabidopsis thaliana
ggcggttaagtatcagg

SEQ ID NO: 111965 - DNA, 17 bp, Arabidopsis thaliana
ggcggttacgtgtgctt

SEQ ID NO: 111966 - DNA, 17 bp, Arabidopsis thaliana
ggcggttatcagatcga

SEQ ID NO: 111967 - DNA, 17 bp, Arabidopsis thaliana
ggcggttatcagatctg

SEQ ID NO: 111968 - DNA, 17 bp, Arabidopsis thaliana
ggcggttcgagtcctac

SEQ ID NO: 111969 - DNA, 17 bp, Arabidopsis thaliana
ggcggttcgatcccgtc

SEQ ID NO: 111970 - DNA, 17 bp, Arabidopsis thaliana
ggcggttcgtctcccgg

SEQ ID NO: 111971 - DNA, 17 bp, Arabidopsis thaliana
ggcggttctggccgaag

SEQ ID NO: 111972 - DNA, 17 bp, Arabidopsis thaliana
ggcggttgacggcaacg

SEQ ID NO: 111973 - DNA, 17 bp, Arabidopsis thaliana
ggcggttgaggccgtga

SEQ ID NO: 111974 - DNA, 17 bp, Arabidopsis thaliana
ggcggttgcagtgaagc

SEQ ID NO: 111975 - DNA, 17 bp, Arabidopsis thaliana
ggcggttgcggtttcaa

SEQ ID NO: 111976 - DNA, 17 bp, Arabidopsis thaliana
ggcggttgcggtttcga

SEQ ID NO: 111977 - DNA, 17 bp, Arabidopsis thaliana
ggcggttgcggttttaa

SEQ ID NO: 111978 - DNA, 17 bp, Arabidopsis thaliana
ggcggttgttagcgttt

SEQ ID NO: 111979 - DNA, 17 bp, Arabidopsis thaliana
ggcggtttaagcaactt

SEQ ID NO: 111980 - DNA, 17 bp, Arabidopsis thaliana
ggcggtttacttttgtg

SEQ ID NO: 111981 - DNA, 17 bp, Arabidopsis thaliana
ggcggtttaggcgagtg

SEQ ID NO: 111982 - DNA, 17 bp, Arabidopsis thaliana
ggcggtttgattacctc

SEQ ID NO: 111983 - DNA, 17 bp, Arabidopsis thaliana
ggcggttttgacatcta

SEQ ID NO: 111984 - DNA, 17 bp, Arabidopsis thaliana
ggcggttttgcgattgg

SEQ ID NO: 111985 - DNA, 17 bp, Arabidopsis thaliana
ggcgtaaaacgtctgta

SEQ ID NO: 111986 - DNA, 17 bp, Arabidopsis thaliana
ggcgtaaagcatctgta

SEQ ID NO: 111987 - DNA, 17 bp, Arabidopsis thaliana
ggcgtaaagcgtctgta

SEQ ID NO: 111988 - DNA, 17 bp, Arabidopsis thaliana
ggcgtaaatcaggtttg

SEQ ID NO: 111989 - DNA, 17 bp, Arabidopsis thaliana
ggcgtaacgatctgggc

SEQ ID NO: 111990 - DNA, 17 bp, Arabidopsis thaliana
ggcgtaagaattgtatc

SEQ ID NO: 111991 - DNA, 17 bp, Arabidopsis thaliana
ggcgtaagaattgtttc

SEQ ID NO: 111992 - DNA, 17 bp, Arabidopsis thaliana
ggcgtaatgcgggtact

SEQ ID NO: 111993 - DNA, 17 bp, Arabidopsis thaliana
ggcgtacaaaggtgtta

SEQ ID NO: 111994 - DNA, 17 bp, Arabidopsis thaliana
ggcgtagcacgagtgat

SEQ ID NO: 111995 - DNA, 17 bp, Arabidopsis thaliana
ggcgtaggcctcccaaa

SEQ ID NO: 111996 - DNA, 17 bp, Arabidopsis thaliana
ggcgtagtccacagtgt

SEQ ID NO: 111997 - DNA, 17 bp, Arabidopsis thaliana
ggcgtagtgtgactgcc

SEQ ID NO: 111998 - DNA, 17 bp, Arabidopsis thaliana
ggcgtataatggattgt

SEQ ID NO: 111999 - DNA, 17 bp, Arabidopsis thaliana
ggcgtatattttcgttg

SEQ ID NO: 112000 - DNA, 17 bp, Arabidopsis thaliana
ggcgtatgatatgggat

SEQ ID NO: 112001 - DNA, 17 bp, Arabidopsis thaliana
ggcgtatgcttccgagg

SEQ ID NO: 112002 - DNA, 17 bp, Arabidopsis thaliana
ggcgtattatgatgtat

SEQ ID NO: 112003 - DNA, 17 bp, Arabidopsis thaliana
ggcgtcagctattgcct

SEQ ID NO: 112004 - DNA, 17 bp, Arabidopsis thaliana
ggcgtcagttgcatttg

SEQ ID NO: 112005 - DNA, 17 bp, Arabidopsis thaliana
ggcgtcattgtgtctca

SEQ ID NO: 112006 - DNA, 17 bp, Arabidopsis thaliana
ggcgtccacactttgtt

SEQ ID NO: 112007 - DNA, 17 bp, Arabidopsis thaliana
ggcgtcccaccgggtgt

SEQ ID NO: 112008 - DNA, 17 bp, Arabidopsis thaliana
ggcgtccgcctttggtg

SEQ ID NO: 112009 - DNA, 17 bp, Arabidopsis thaliana
ggcgtccggcgaccgtg

SEQ ID NO: 112010 - DNA, 17 bp, Arabidopsis thaliana
ggcgtccggtgcgcccc

SEQ ID NO: 112011 - DNA, 17 bp, Arabidopsis thaliana
ggcgtcctgctaaaccc

SEQ ID NO: 112012 - DNA, 17 bp, Arabidopsis thaliana
ggcgtcgaacagtcagc

SEQ ID NO: 112013 - DNA, 17 bp, Arabidopsis thaliana
ggcgtcgaacggtcagc

SEQ ID NO: 112014 - DNA, 17 bp, Arabidopsis thaliana
ggcgtcgacggcgcacg

SEQ ID NO: 112015 - DNA, 17 bp, Arabidopsis thaliana
ggcgtcgcatcctgtag

SEQ ID NO: 112016 - DNA, 17 bp, Arabidopsis thaliana
ggcgtcgctcagaacca

SEQ ID NO: 112017 - DNA, 17 bp, Arabidopsis thaliana
ggcgtcggaacttctcc

SEQ ID NO: 112018 - DNA, 17 bp, Arabidopsis thaliana
ggcgtcggagctgctgg

SEQ ID NO: 112019 - DNA, 17 bp, Arabidopsis thaliana
ggcgtcggagctgcttg

SEQ ID NO: 112020 - DNA, 17 bp, Arabidopsis thaliana
ggcgtcggcctgtgggc

SEQ ID NO: 112021 - DNA, 17 bp, Arabidopsis thaliana
ggcgtcggcgataactc

SEQ ID NO: 112022 - DNA, 17 bp, Arabidopsis thaliana
ggcgtcggcggaggtga

SEQ ID NO: 112023 - DNA, 17 bp, Arabidopsis thaliana
ggcgtcgggacgttgct

SEQ ID NO: 112024 - DNA, 17 bp, Arabidopsis thaliana
ggcgtcgggagatccca

SEQ ID NO: 112025 - DNA, 17 bp, Arabidopsis thaliana
ggcgtcgggatttagct

SEQ ID NO: 112026 - DNA, 17 bp, Arabidopsis thaliana
ggcgtcggtggggatgt

SEQ ID NO: 112027 - DNA, 17 bp, Arabidopsis thaliana
ggcgtcgtaaccgttct

SEQ ID NO: 112028 - DNA, 17 bp, Arabidopsis thaliana
ggcgtcgtctacaagaa

SEQ ID NO: 112029 - DNA, 17 bp, Arabidopsis thaliana
ggcgtcgtcttgagacc

SEQ ID NO: 112030 - DNA, 17 bp, Arabidopsis thaliana
ggcgtcgttaatttaaa

SEQ ID NO: 112031 - DNA, 17 bp, Arabidopsis thaliana
ggcgtcgttgtgaggat

SEQ ID NO: 112032 - DNA, 17 bp, Arabidopsis thaliana
ggcgtcgttgtgcctgg

SEQ ID NO: 112033 - DNA, 17 bp, Arabidopsis thaliana
ggcgtcgtttaggacgt

SEQ ID NO: 112034 - DNA, 17 bp, Arabidopsis thaliana
ggcgtctaaacactgct

SEQ ID NO: 112035 - DNA, 17 bp, Arabidopsis thaliana
ggcgtctcaaggtgaac

SEQ ID NO: 112036 - DNA, 17 bp, Arabidopsis thaliana
ggcgtctctcaaggtgc

SEQ ID NO: 112037 - DNA, 17 bp, Arabidopsis thaliana
ggcgtctgaatttcggc

SEQ ID NO: 112038 - DNA, 17 bp, Arabidopsis thaliana
ggcgtctgatgtgccgg

SEQ ID NO: 112039 - DNA, 17 bp, Arabidopsis thaliana
ggcgtctgcctgggtgt

SEQ ID NO: 112040 - DNA, 17 bp, Arabidopsis thaliana
ggcgtctgcctgtgggc

SEQ ID NO: 112041 - DNA, 17 bp, Arabidopsis thaliana
ggcgtctggagcctggt

SEQ ID NO: 112042 - DNA, 17 bp, Arabidopsis thaliana
ggcgtcttctagtcata

SEQ ID NO: 112043 - DNA, 17 bp, Arabidopsis thaliana
ggcgtcttctcattgcg

SEQ ID NO: 112044 - DNA, 17 bp, Arabidopsis thaliana
ggcgtctttttaagtgt

SEQ ID NO: 112045 - DNA, 17 bp, Arabidopsis thaliana
ggcgtgacgggtttggc

SEQ ID NO: 112046 - DNA, 17 bp, Arabidopsis thaliana
ggcgtgaggccggcgtc

SEQ ID NO: 112047 - DNA, 17 bp, Arabidopsis thaliana
ggcgtgatcgtggactc

SEQ ID NO: 112048 - DNA, 17 bp, Arabidopsis thaliana
ggcgtgattcctcccgg

SEQ ID NO: 112049 - DNA, 17 bp, Arabidopsis thaliana
ggcgtgattcctcgcgg

SEQ ID NO: 112050 - DNA, 17 bp, Arabidopsis thaliana
ggcgtgatttcaccggc

SEQ ID NO: 112051 - DNA, 17 bp, Arabidopsis thaliana
ggcgtgcaaaggtttcc

SEQ ID NO: 112052 - DNA, 17 bp, Arabidopsis thaliana
ggcgtgcagcgacctgg

SEQ ID NO: 112053 - DNA, 17 bp, Arabidopsis thaliana
ggcgtgcagtgacctgg

SEQ ID NO: 112054 - DNA, 17 bp, Arabidopsis thaliana
ggcgtgcattgatcggc

SEQ ID NO: 112055 - DNA, 17 bp, Arabidopsis thaliana
ggcgtgcattggtcggc

SEQ ID NO: 112056 - DNA, 17 bp, Arabidopsis thaliana
ggcgtgccggagttatc

SEQ ID NO: 112057 - DNA, 17 bp, Arabidopsis thaliana
ggcgtgctgactttaac

SEQ ID NO: 112058 - DNA, 17 bp, Arabidopsis thaliana
ggcgtggaccgacgcgg

SEQ ID NO: 112059 - DNA, 17 bp, Arabidopsis thaliana
ggcgtggcgacaggtgt

SEQ ID NO: 112060 - DNA, 17 bp, Arabidopsis thaliana
ggcgtggcgactggtgg

SEQ ID NO: 112061 - DNA, 17 bp, Arabidopsis thaliana
ggcgtgtccgcctttgg

SEQ ID NO: 112062 - DNA, 17 bp, Arabidopsis thaliana
ggcgtgtgcattggtcg

SEQ ID NO: 112063 - DNA, 17 bp, Arabidopsis thaliana
ggcgttaagtgcggctg

SEQ ID NO: 112064 - DNA, 17 bp, Arabidopsis thaliana
ggcgttaagttatccat

SEQ ID NO: 112065 - DNA, 17 bp, Arabidopsis thaliana
ggcgttacaagtctccc

SEQ ID NO: 112066 - DNA, 17 bp, Arabidopsis thaliana
ggcgttacaggcggccc

SEQ ID NO: 112067 - DNA, 17 bp, Arabidopsis thaliana
ggcgttactcgttggct

SEQ ID NO: 112068 - DNA, 17 bp, Arabidopsis thaliana
ggcgttaggatatttgg

SEQ ID NO: 112069 - DNA, 17 bp, Arabidopsis thaliana
ggcgttagggtggcggc

SEQ ID NO: 112070 - DNA, 17 bp, Arabidopsis thaliana
ggcgttatcaggtcgct

SEQ ID NO: 112071 - DNA, 17 bp, Arabidopsis thaliana
ggcgttcaacctcgtgg

SEQ ID NO: 112072 - DNA, 17 bp, Arabidopsis thaliana
ggcgttcactatggaag

SEQ ID NO: 112073 - DNA, 17 bp, Arabidopsis thaliana
ggcgttcagtcataatc

SEQ ID NO: 112074 - DNA, 17 bp, Arabidopsis thaliana
ggcgttcgaaaccgatt

SEQ ID NO: 112075 - DNA, 17 bp, Arabidopsis thaliana
ggcgttcgaattgtagt

SEQ ID NO: 112076 - DNA, 17 bp, Arabidopsis thaliana
ggcgttctccccacaga

SEQ ID NO: 112077 - DNA, 17 bp, Arabidopsis thaliana
ggcgttctctaagcttc

SEQ ID NO: 112078 - DNA, 17 bp, Arabidopsis thaliana
ggcgttctctaagtggc

SEQ ID NO: 112079 - DNA, 17 bp, Arabidopsis thaliana
ggcgttgaaagggaatg

SEQ ID NO: 112080 - DNA, 17 bp, Arabidopsis thaliana
ggcgttgaccgatgttg

SEQ ID NO: 112081 - DNA, 17 bp, Arabidopsis thaliana
ggcgttgactagggttg

SEQ ID NO: 112082 - DNA, 17 bp, Arabidopsis thaliana
ggcgttgactagtgtta

SEQ ID NO: 112083 - DNA, 17 bp, Arabidopsis thaliana
ggcgttgactagtgttg

SEQ ID NO: 112084 - DNA, 17 bp, Arabidopsis thaliana
ggcgttgactgattctt

SEQ ID NO: 112085 - DNA, 17 bp, Arabidopsis thaliana
ggcgttgagatcactgc

SEQ ID NO: 112086 - DNA, 17 bp, Arabidopsis thaliana
ggcgttgaggctgagcg

SEQ ID NO: 112087 - DNA, 17 bp, Arabidopsis thaliana
ggcgttgagttgagttg

SEQ ID NO: 112088 - DNA, 17 bp, Arabidopsis thaliana
ggcgttgatgtcctttg

SEQ ID NO: 112089 - DNA, 17 bp, Arabidopsis thaliana
ggcgttgcagtgataag

SEQ ID NO: 112090 - DNA, 17 bp, Arabidopsis thaliana
ggcgttggacacgggcc

SEQ ID NO: 112091 - DNA, 17 bp, Arabidopsis thaliana
ggcgttggctaagtccg

SEQ ID NO: 112092 - DNA, 17 bp, Arabidopsis thaliana
ggcgttggtctctgatt

SEQ ID NO: 112093 - DNA, 17 bp, Arabidopsis thaliana
ggcgttgtgactgtgat

SEQ ID NO: 112094 - DNA, 17 bp, Arabidopsis thaliana
ggcgttgtgcgtatcga

SEQ ID NO: 112095 - DNA, 17 bp, Arabidopsis thaliana
ggcgtttaatgggcgtt

SEQ ID NO: 112096 - DNA, 17 bp, Arabidopsis thaliana
ggcgtttacactgacca

SEQ ID NO: 112097 - DNA, 17 bp, Arabidopsis thaliana
ggcgtttactatctcac

SEQ ID NO: 112098 - DNA, 17 bp, Arabidopsis thaliana
ggcgtttaggccaagga

SEQ ID NO: 112099 - DNA, 17 bp, Arabidopsis thaliana
ggcgtttcgtttattag

SEQ ID NO: 112100 - DNA, 17 bp, Arabidopsis thaliana
ggcgtttctcattgcgg

SEQ ID NO: 112101 - DNA, 17 bp, Arabidopsis thaliana
ggcgtttggatgttctg

SEQ ID NO: 112102 - DNA, 17 bp, Arabidopsis thaliana
ggcgtttggtctagtgg

SEQ ID NO: 112103 - DNA, 17 bp, Arabidopsis thaliana
ggcgtttggtttcatgt

SEQ ID NO: 112104 - DNA, 17 bp, Arabidopsis thaliana
ggcgttttcaagcacat

SEQ ID NO: 112105 - DNA, 17 bp, Arabidopsis thaliana
ggcgttttcagtgtatt

SEQ ID NO: 112106 - DNA, 17 bp, Arabidopsis thaliana
ggcgttttgacgggaaa

SEQ ID NO: 112107 - DNA, 17 bp, Arabidopsis thaliana
ggcgttttgtctagtgg

SEQ ID NO: 112108 - DNA, 17 bp, Arabidopsis thaliana
ggcgtttttgacggctt

SEQ ID NO: 112109 - DNA, 17 bp, Arabidopsis thaliana
ggctaaaagagtcggag

SEQ ID NO: 112110 - DNA, 17 bp, Arabidopsis thaliana
ggctaaaagggagttat

SEQ ID NO: 112111 - DNA, 17 bp, Arabidopsis thaliana
ggctaaaccatcaatgc

SEQ ID NO: 112112 - DNA, 17 bp, Arabidopsis thaliana
ggctaaagtcggcaaat

SEQ ID NO: 112113 - DNA, 17 bp, Arabidopsis thaliana
ggctaaagttggtgaag

SEQ ID NO: 112114 - DNA, 17 bp, Arabidopsis thaliana
ggctaaatacgggcgag

SEQ ID NO: 112115 - DNA, 17 bp, Arabidopsis thaliana
ggctaacagagtttttc

SEQ ID NO: 112116 - DNA, 17 bp, Arabidopsis thaliana
ggctaacgataacggta

SEQ ID NO: 112117 - DNA, 17 bp, Arabidopsis thaliana
ggctaacgataacggtg

SEQ ID NO: 112118 - DNA, 17 bp, Arabidopsis thaliana
ggctaacgcaatgtgat

SEQ ID NO: 112119 - DNA, 17 bp, Arabidopsis thaliana
ggctaactacgtgccag

SEQ ID NO: 112120 - DNA, 17 bp, Arabidopsis thaliana
ggctaactctgtgccag

SEQ ID NO: 112121 - DNA, 17 bp, Arabidopsis thaliana
ggctaagaaagtggtgg

SEQ ID NO: 112122 - DNA, 17 bp, Arabidopsis thaliana
ggctaagaggccacctg

SEQ ID NO: 112123 - DNA, 17 bp, Arabidopsis thaliana
ggctaagatataccgct

SEQ ID NO: 112124 - DNA, 17 bp, Arabidopsis thaliana
ggctaagcgatctgccg

SEQ ID NO: 112125 - DNA, 17 bp, Arabidopsis thaliana
ggctaagtccgttcggc

SEQ ID NO: 112126 - DNA, 17 bp, Arabidopsis thaliana
ggctaatcgctaagtcc

SEQ ID NO: 112127 - DNA, 17 bp, Arabidopsis thaliana
ggctaatgttgtgatct

SEQ ID NO: 112128 - DNA, 17 bp, Arabidopsis thaliana
ggctaattacctgatcg

SEQ ID NO: 112129 - DNA, 17 bp, Arabidopsis thaliana
ggctaattacctgatta

SEQ ID NO: 112130 - DNA, 17 bp, Arabidopsis thaliana
ggctaattattggtgtc

SEQ ID NO: 112131 - DNA, 17 bp, Arabidopsis thaliana
ggctacaccatgaaagc

SEQ ID NO: 112132 - DNA, 17 bp, Arabidopsis thaliana
ggctacacgctatgaaa

SEQ ID NO: 112133 - DNA, 17 bp, Arabidopsis thaliana
ggctacagcacgtagac

SEQ ID NO: 112134 - DNA, 17 bp, Arabidopsis thaliana
ggctacagccaggacgt

SEQ ID NO: 112135 - DNA, 17 bp, Arabidopsis thaliana
ggctacagctaatgcat

SEQ ID NO: 112136 - DNA, 17 bp, Arabidopsis thaliana
ggctacaggtggttcat

SEQ ID NO: 112137 - DNA, 17 bp, Arabidopsis thaliana
ggctacagtcatcacac

SEQ ID NO: 112138 - DNA, 17 bp, Arabidopsis thaliana
ggctacatcttggttgt

SEQ ID NO: 112139 - DNA, 17 bp, Arabidopsis thaliana
ggctaccacatccaagg

SEQ ID NO: 112140 - DNA, 17 bp, Arabidopsis thaliana
ggctaccagttcaggag

SEQ ID NO: 112141 - DNA, 17 bp, Arabidopsis thaliana
ggctacccaggagcgca

SEQ ID NO: 112142 - DNA, 17 bp, Arabidopsis thaliana
ggctaccggatccccaa

SEQ ID NO: 112143 - DNA, 17 bp, Arabidopsis thaliana
ggctaccgtctaagcgt

SEQ ID NO: 112144 - DNA, 17 bp, Arabidopsis thaliana
ggctaccgtgcgctgga

SEQ ID NO: 112145 - DNA, 17 bp, Arabidopsis thaliana
ggctacctattggaggt

SEQ ID NO: 112146 - DNA, 17 bp, Arabidopsis thaliana
ggctacgaaggcgggag

SEQ ID NO: 112147 - DNA, 17 bp, Arabidopsis thaliana
ggctacgaggcgacggt

SEQ ID NO: 112148 - DNA, 17 bp, Arabidopsis thaliana
ggctacggatttgttgg

SEQ ID NO: 112149 - DNA, 17 bp, Arabidopsis thaliana
ggctacggtggcggcct

SEQ ID NO: 112150 - DNA, 17 bp, Arabidopsis thaliana
ggctacggtggtaaggt

SEQ ID NO: 112151 - DNA, 17 bp, Arabidopsis thaliana
ggctacgtcaggagcgc

SEQ ID NO: 112152 - DNA, 17 bp, Arabidopsis thaliana
ggctacgtccaggagcg

SEQ ID NO: 112153 - DNA, 17 bp, Arabidopsis thaliana
ggctacgtccggagcgt

SEQ ID NO: 112154 - DNA, 17 bp, Arabidopsis thaliana
ggctacgtttggtcaat

SEQ ID NO: 112155 - DNA, 17 bp, Arabidopsis thaliana
ggctactaatctgatgg

SEQ ID NO: 112156 - DNA, 17 bp, Arabidopsis thaliana
ggctactattgcggatg

SEQ ID NO: 112157 - DNA, 17 bp, Arabidopsis thaliana
ggctactgtgcgcaatt

SEQ ID NO: 112158 - DNA, 17 bp, Arabidopsis thaliana
ggctactgtgtgcaagt

SEQ ID NO: 112159 - DNA, 17 bp, Arabidopsis thaliana
ggctactgtgtgcaatt

SEQ ID NO: 112160 - DNA, 17 bp, Arabidopsis thaliana
ggctactgtgtgtaatt

SEQ ID NO: 112161 - DNA, 17 bp, Arabidopsis thaliana
ggctacttgtatgctga

SEQ ID NO: 112162 - DNA, 17 bp, Arabidopsis thaliana
ggctactttcgcaactt

SEQ ID NO: 112163 - DNA, 17 bp, Arabidopsis thaliana
ggctagatccgccattg

SEQ ID NO: 112164 - DNA, 17 bp, Arabidopsis thaliana
ggctagcagatctgcag

SEQ ID NO: 112165 - DNA, 17 bp, Arabidopsis thaliana
ggctagccatccttagg

SEQ ID NO: 112166 - DNA, 17 bp, Arabidopsis thaliana
ggctaggcttacaagat

SEQ ID NO: 112167 - DNA, 17 bp, Arabidopsis thaliana
ggctaggtcaggagcgc

SEQ ID NO: 112168 - DNA, 17 bp, Arabidopsis thaliana
ggctagtgactggaggg

SEQ ID NO: 112169 - DNA, 17 bp, Arabidopsis thaliana
ggctagtgactggagtg

SEQ ID NO: 112170 - DNA, 17 bp, Arabidopsis thaliana
ggctagttgtccttggc

SEQ ID NO: 112171 - DNA, 17 bp, Arabidopsis thaliana
ggctatagcgatgatgt

SEQ ID NO: 112172 - DNA, 17 bp, Arabidopsis thaliana
ggctataggtggagaag

SEQ ID NO: 112173 - DNA, 17 bp, Arabidopsis thaliana
ggctatcagagattggc

SEQ ID NO: 112174 - DNA, 17 bp, Arabidopsis thaliana
ggctatcagtttcaaaa

SEQ ID NO: 112175 - DNA, 17 bp, Arabidopsis thaliana
ggctatccaggaatggg

SEQ ID NO: 112176 - DNA, 17 bp, Arabidopsis thaliana
ggctatccatcctgagt

SEQ ID NO: 112177 - DNA, 17 bp, Arabidopsis thaliana
ggctatcggtgttttat

SEQ ID NO: 112178 - DNA, 17 bp, Arabidopsis thaliana
ggctatggatcttcttc

SEQ ID NO: 112179 - DNA, 17 bp, Arabidopsis thaliana
ggctatgggtgcaatct

SEQ ID NO: 112180 - DNA, 17 bp, Arabidopsis thaliana
ggctatgttggttacga

SEQ ID NO: 112181 - DNA, 17 bp, Arabidopsis thaliana
ggctattaaatgccagt

SEQ ID NO: 112182 - DNA, 17 bp, Arabidopsis thaliana
ggctattaagctatata

SEQ ID NO: 112183 - DNA, 17 bp, Arabidopsis thaliana
ggctattacagtgggtg

SEQ ID NO: 112184 - DNA, 17 bp, Arabidopsis thaliana
ggctattacggctagtt

SEQ ID NO: 112185 - DNA, 17 bp, Arabidopsis thaliana
ggctattagctcacccg

SEQ ID NO: 112186 - DNA, 17 bp, Arabidopsis thaliana
ggctattagctcactgg

SEQ ID NO: 112187 - DNA, 17 bp, Arabidopsis thaliana
ggctattagctcagggg

SEQ ID NO: 112188 - DNA, 17 bp, Arabidopsis thaliana
ggctattagctcagtgg

SEQ ID NO: 112189 - DNA, 17 bp, Arabidopsis thaliana
ggctattagctcagtgt

SEQ ID NO: 112190 - DNA, 17 bp, Arabidopsis thaliana
ggctattagctgagtgg

SEQ ID NO: 112191 - DNA, 17 bp, Arabidopsis thaliana
ggctattcaccctaatg

SEQ ID NO: 112192 - DNA, 17 bp, Arabidopsis thaliana
ggctattcagttgggga

SEQ ID NO: 112193 - DNA, 17 bp, Arabidopsis thaliana
ggctattggagcagttc

SEQ ID NO: 112194 - DNA, 17 bp, Arabidopsis thaliana
ggctattggagcagttt

SEQ ID NO: 112195 - DNA, 17 bp, Arabidopsis thaliana
ggctattgtttgctacg

SEQ ID NO: 112196 - DNA, 17 bp, Arabidopsis thaliana
ggctatttatgaggtgt

SEQ ID NO: 112197 - DNA, 17 bp, Arabidopsis thaliana
ggctatttcaggtttgc

SEQ ID NO: 112198 - DNA, 17 bp, Arabidopsis thaliana
ggctatttcaggttttc

SEQ ID NO: 112199 - DNA, 17 bp, Arabidopsis thaliana
ggctatttgatcaaggg

SEQ ID NO: 112200 - DNA, 17 bp, Arabidopsis thaliana
ggctatttgcttctaaa

SEQ ID NO: 112201 - DNA, 17 bp, Arabidopsis thaliana
ggctcaaatccgggtgc

SEQ ID NO: 112202 - DNA, 17 bp, Arabidopsis thaliana
ggctcaaatctaccaag

SEQ ID NO: 112203 - DNA, 17 bp, Arabidopsis thaliana
ggctcaaatggttggcg

SEQ ID NO: 112204 - DNA, 17 bp, Arabidopsis thaliana
ggctcaacaccattttg

SEQ ID NO: 112205 - DNA, 17 bp, Arabidopsis thaliana
ggctcaaccttagcatt

SEQ ID NO: 112206 - DNA, 17 bp, Arabidopsis thaliana
ggctcaacgtggtcggc

SEQ ID NO: 112207 - DNA, 17 bp, Arabidopsis thaliana
ggctcaagatgatggta

SEQ ID NO: 112208 - DNA, 17 bp, Arabidopsis thaliana
ggctcaagtccatcaga

SEQ ID NO: 112209 - DNA, 17 bp, Arabidopsis thaliana
ggctcaagttgctgttg

SEQ ID NO: 112210 - DNA, 17 bp, Arabidopsis thaliana
ggctcaatagactgtgc

SEQ ID NO: 112211 - DNA, 17 bp, Arabidopsis thaliana
ggctcaatctgcaggtt

SEQ ID NO: 112212 - DNA, 17 bp, Arabidopsis thaliana
ggctcacctctctttct

SEQ ID NO: 112213 - DNA, 17 bp, Arabidopsis thaliana
ggctcacgatcataggt

SEQ ID NO: 112214 - DNA, 17 bp, Arabidopsis thaliana
ggctcactgctataacc

SEQ ID NO: 112215 - DNA, 17 bp, Arabidopsis thaliana
ggctcagaatgtgtttc

SEQ ID NO: 112216 - DNA, 17 bp, Arabidopsis thaliana
ggctcagaggagagtga

SEQ ID NO: 112217 - DNA, 17 bp, Arabidopsis thaliana
ggctcagatactcggac

SEQ ID NO: 112218 - DNA, 17 bp, Arabidopsis thaliana
ggctcagccctttgtcg

SEQ ID NO: 112219 - DNA, 17 bp, Arabidopsis thaliana
ggctcagccggaggtag

SEQ ID NO: 112220 - DNA, 17 bp, Arabidopsis thaliana
ggctcagcgtatcacag

SEQ ID NO: 112221 - DNA, 17 bp, Arabidopsis thaliana
ggctcaggatgaacgca

SEQ ID NO: 112222 - DNA, 17 bp, Arabidopsis thaliana
ggctcaggatgaacgct

SEQ ID NO: 112223 - DNA, 17 bp, Arabidopsis thaliana
ggctcaggcaagaaaac

SEQ ID NO: 112224 - DNA, 17 bp, Arabidopsis thaliana
ggctcaggcgtttcagt

SEQ ID NO: 112225 - DNA, 17 bp, Arabidopsis thaliana
ggctcagtctgagatat

SEQ ID NO: 112226 - DNA, 17 bp, Arabidopsis thaliana
ggctcagttccagacca

SEQ ID NO: 112227 - DNA, 17 bp, Arabidopsis thaliana
ggctcagtttgtttctc

SEQ ID NO: 112228 - DNA, 17 bp, Arabidopsis thaliana
ggctcatactcagtttc

SEQ ID NO: 112229 - DNA, 17 bp, Arabidopsis thaliana
ggctcatagctcactgg

SEQ ID NO: 112230 - DNA, 17 bp, Arabidopsis thaliana
ggctcatagctcagtgg

SEQ ID NO: 112231 - DNA, 17 bp, Arabidopsis thaliana
ggctcatagctcagtgt

SEQ ID NO: 112232 - DNA, 17 bp, Arabidopsis thaliana
ggctcataggatcgtgc

SEQ ID NO: 112233 - DNA, 17 bp, Arabidopsis thaliana
ggctcatatggtacatt

SEQ ID NO: 112234 - DNA, 17 bp, Arabidopsis thaliana
ggctcatcaatggctgc

SEQ ID NO: 112235 - DNA, 17 bp, Arabidopsis thaliana
ggctcatcatctaagcc

SEQ ID NO: 112236 - DNA, 17 bp, Arabidopsis thaliana
ggctcatcgcttactac

SEQ ID NO: 112237 - DNA, 17 bp, Arabidopsis thaliana
ggctcatgactatggca

SEQ ID NO: 112238 - DNA, 17 bp, Arabidopsis thaliana
ggctcatgggctttttg

SEQ ID NO: 112239 - DNA, 17 bp, Arabidopsis thaliana
ggctcattgaccaaaag

SEQ ID NO: 112240 - DNA, 17 bp, Arabidopsis thaliana
ggctcattggttgaccc

SEQ ID NO: 112241 - DNA, 17 bp, Arabidopsis thaliana
ggctcatttaccgtacc

SEQ ID NO: 112242 - DNA, 17 bp, Arabidopsis thaliana
ggctcatttcgcctatt

SEQ ID NO: 112243 - DNA, 17 bp, Arabidopsis thaliana
ggctccaacagctccat

SEQ ID NO: 112244 - DNA, 17 bp, Arabidopsis thaliana
ggctccaagttgtctaa

SEQ ID NO: 112245 - DNA, 17 bp, Arabidopsis thaliana
ggctccaatgagatggt

SEQ ID NO: 112246 - DNA, 17 bp, Arabidopsis thaliana
ggctccacttacagggc

SEQ ID NO: 112247 - DNA, 17 bp, Arabidopsis thaliana
ggctccagcgaaaccac

SEQ ID NO: 112248 - DNA, 17 bp, Arabidopsis thaliana
ggctccatagctcagtg

SEQ ID NO: 112249 - DNA, 17 bp, Arabidopsis thaliana
ggctccatcgctgttgc

SEQ ID NO: 112250 - DNA, 17 bp, Arabidopsis thaliana
ggctcccaaaggcacgt

SEQ ID NO: 112251 - DNA, 17 bp, Arabidopsis thaliana
ggctcccactgtggtcg

SEQ ID NO: 112252 - DNA, 17 bp, Arabidopsis thaliana
ggctccccatccatcca

SEQ ID NO: 112253 - DNA, 17 bp, Arabidopsis thaliana
ggctccccatccatccg

SEQ ID NO: 112254 - DNA, 17 bp, Arabidopsis thaliana
ggctccccattcgaccc

SEQ ID NO: 112255 - DNA, 17 bp, Arabidopsis thaliana
ggctcccgcctgctatg

SEQ ID NO: 112256 - DNA, 17 bp, Arabidopsis thaliana
ggctcccggcagacgca

SEQ ID NO: 112257 - DNA, 17 bp, Arabidopsis thaliana
ggctcccggctggtgca

SEQ ID NO: 112258 - DNA, 17 bp, Arabidopsis thaliana
ggctcccggtagaacct

SEQ ID NO: 112259 - DNA, 17 bp, Arabidopsis thaliana
ggctcccggtaggacct

SEQ ID NO: 112260 - DNA, 17 bp, Arabidopsis thaliana
ggctccgaatgagtagc

SEQ ID NO: 112261 - DNA, 17 bp, Arabidopsis thaliana
ggctccgaatggaaacg

SEQ ID NO: 112262 - DNA, 17 bp, Arabidopsis thaliana
ggctccgattggaccat

SEQ ID NO: 112263 - DNA, 17 bp, Arabidopsis thaliana
ggctccggagactttct

SEQ ID NO: 112264 - DNA, 17 bp, Arabidopsis thaliana
ggctcctcgtgttgcat

SEQ ID NO: 112265 - DNA, 17 bp, Arabidopsis thaliana
ggctcctgccggtggtg

SEQ ID NO: 112266 - DNA, 17 bp, Arabidopsis thaliana
ggctcctggaacgctgc

SEQ ID NO: 112267 - DNA, 17 bp, Arabidopsis thaliana
ggctcctgggactaggg

SEQ ID NO: 112268 - DNA, 17 bp, Arabidopsis thaliana
ggctcctttctctttca

SEQ ID NO: 112269 - DNA, 17 bp, Arabidopsis thaliana
ggctcgaaagtgcgatt

SEQ ID NO: 112270 - DNA, 17 bp, Arabidopsis thaliana
ggctcgaagacgatcag

SEQ ID NO: 112271 - DNA, 17 bp, Arabidopsis thaliana
ggctcgaatcccagcag

SEQ ID NO: 112272 - DNA, 17 bp, Arabidopsis thaliana
ggctcgagcaatttcag

SEQ ID NO: 112273 - DNA, 17 bp, Arabidopsis thaliana
ggctcgagcaggtgcga

SEQ ID NO: 112274 - DNA, 17 bp, Arabidopsis thaliana
ggctcgagtcccaccgg

SEQ ID NO: 112275 - DNA, 17 bp, Arabidopsis thaliana
ggctcgatcaatttcag

SEQ ID NO: 112276 - DNA, 17 bp, Arabidopsis thaliana
ggctcgatctctgacta

SEQ ID NO: 112277 - DNA, 17 bp, Arabidopsis thaliana
ggctcgatgtcgatgag

SEQ ID NO: 112278 - DNA, 17 bp, Arabidopsis thaliana
ggctcgattcagatcgg

SEQ ID NO: 112279 - DNA, 17 bp, Arabidopsis thaliana
ggctcgcaataaagcta

SEQ ID NO: 112280 - DNA, 17 bp, Arabidopsis thaliana
ggctcgcaggtcgctat

SEQ ID NO: 112281 - DNA, 17 bp, Arabidopsis thaliana
ggctcgccagtagcagg

SEQ ID NO: 112282 - DNA, 17 bp, Arabidopsis thaliana
ggctcgcttacctgggt

SEQ ID NO: 112283 - DNA, 17 bp, Arabidopsis thaliana
ggctcgcttcggcgggt

SEQ ID NO: 112284 - DNA, 17 bp, Arabidopsis thaliana
ggctcggaacgcgtggt

SEQ ID NO: 112285 - DNA, 17 bp, Arabidopsis thaliana
ggctcggactgcgtttc

SEQ ID NO: 112286 - DNA, 17 bp, Arabidopsis thaliana
ggctcggatgtgtttcc

SEQ ID NO: 112287 - DNA, 17 bp, Arabidopsis thaliana
ggctcggattcgtccgt

SEQ ID NO: 112288 - DNA, 17 bp, Arabidopsis thaliana
ggctcggcaggatagtc

SEQ ID NO: 112289 - DNA, 17 bp, Arabidopsis thaliana
ggctcggcttgtccctt

SEQ ID NO: 112290 - DNA, 17 bp, Arabidopsis thaliana
ggctcgggacaaaactt

SEQ ID NO: 112291 - DNA, 17 bp, Arabidopsis thaliana
ggctcgggggtcccagt

SEQ ID NO: 112292 - DNA, 17 bp, Arabidopsis thaliana
ggctcggggtcccagtt

SEQ ID NO: 112293 - DNA, 17 bp, Arabidopsis thaliana
ggctcgggtttggcagg

SEQ ID NO: 112294 - DNA, 17 bp, Arabidopsis thaliana
ggctcggtagctcagtc

SEQ ID NO: 112295 - DNA, 17 bp, Arabidopsis thaliana
ggctcgtacccgggctc

SEQ ID NO: 112296 - DNA, 17 bp, Arabidopsis thaliana
ggctcgtcagtgcgtat

SEQ ID NO: 112297 - DNA, 17 bp, Arabidopsis thaliana
ggctcgtcatatctcct

SEQ ID NO: 112298 - DNA, 17 bp, Arabidopsis thaliana
ggctcgtccttgctcag

SEQ ID NO: 112299 - DNA, 17 bp, Arabidopsis thaliana
ggctcgtctgcctgggt

SEQ ID NO: 112300 - DNA, 17 bp, Arabidopsis thaliana
ggctcgtggagaaatag

SEQ ID NO: 112301 - DNA, 17 bp, Arabidopsis thaliana
ggctcgttagtcgagcc

SEQ ID NO: 112302 - DNA, 17 bp, Arabidopsis thaliana
ggctcgttcccagctgg

SEQ ID NO: 112303 - DNA, 17 bp, Arabidopsis thaliana
ggctctacaagtctccc

SEQ ID NO: 112304 - DNA, 17 bp, Arabidopsis thaliana
ggctctacaagtgtgtg

SEQ ID NO: 112305 - DNA, 17 bp, Arabidopsis thaliana
ggctctacagcttcttc

SEQ ID NO: 112306 - DNA, 17 bp, Arabidopsis thaliana
ggctctatccaactcca

SEQ ID NO: 112307 - DNA, 17 bp, Arabidopsis thaliana
ggctctatctgacgtga

SEQ ID NO: 112308 - DNA, 17 bp, Arabidopsis thaliana
ggctctatctggcatga

SEQ ID NO: 112309 - DNA, 17 bp, Arabidopsis thaliana
ggctctatttcgtaccg

SEQ ID NO: 112310 - DNA, 17 bp, Arabidopsis thaliana
ggctctatttggcgtga

SEQ ID NO: 112311 - DNA, 17 bp, Arabidopsis thaliana
ggctctcacagtttgca

SEQ ID NO: 112312 - DNA, 17 bp, Arabidopsis thaliana
ggctctccattcgaccc

SEQ ID NO: 112313 - DNA, 17 bp, Arabidopsis thaliana
ggctctcgccattgtcg

SEQ ID NO: 112314 - DNA, 17 bp, Arabidopsis thaliana
ggctctcgcttaagaaa

SEQ ID NO: 112315 - DNA, 17 bp, Arabidopsis thaliana
ggctctcgggcggtcct

SEQ ID NO: 112316 - DNA, 17 bp, Arabidopsis thaliana
ggctctcgtgtcgtcta

SEQ ID NO: 112317 - DNA, 17 bp, Arabidopsis thaliana
ggctctctcagacgcgt

SEQ ID NO: 112318 - DNA, 17 bp, Arabidopsis thaliana
ggctctctcgggagctt

SEQ ID NO: 112319 - DNA, 17 bp, Arabidopsis thaliana
ggctctctggaactagt

SEQ ID NO: 112320 - DNA, 17 bp, Arabidopsis thaliana
ggctctcttctagcatt

SEQ ID NO: 112321 - DNA, 17 bp, Arabidopsis thaliana
ggctctgaaaactgtga

SEQ ID NO: 112322 - DNA, 17 bp, Arabidopsis thaliana
ggctctgaatggagacg

SEQ ID NO: 112323 - DNA, 17 bp, Arabidopsis thaliana
ggctctgaatggggacg

SEQ ID NO: 112324 - DNA, 17 bp, Arabidopsis thaliana
ggctctgaccgcgtgcc

SEQ ID NO: 112325 - DNA, 17 bp, Arabidopsis thaliana
ggctctgagcctctgac

SEQ ID NO: 112326 - DNA, 17 bp, Arabidopsis thaliana
ggctctgagggctgggc

SEQ ID NO: 112327 - DNA, 17 bp, Arabidopsis thaliana
ggctctgagtgctgggc

SEQ ID NO: 112328 - DNA, 17 bp, Arabidopsis thaliana
ggctctgcatgtggcac

SEQ ID NO: 112329 - DNA, 17 bp, Arabidopsis thaliana
ggctctgctacaacctc

SEQ ID NO: 112330 - DNA, 17 bp, Arabidopsis thaliana
ggctctgggtgaaggct

SEQ ID NO: 112331 - DNA, 17 bp, Arabidopsis thaliana
ggctctggtaccatatt

SEQ ID NO: 112332 - DNA, 17 bp, Arabidopsis thaliana
ggctctggtgctgtgga

SEQ ID NO: 112333 - DNA, 17 bp, Arabidopsis thaliana
ggctctggtgtagtggt

SEQ ID NO: 112334 - DNA, 17 bp, Arabidopsis thaliana
ggctctggttgacggcg

SEQ ID NO: 112335 - DNA, 17 bp, Arabidopsis thaliana
ggctctggttgtccacg

SEQ ID NO: 112336 - DNA, 17 bp, Arabidopsis thaliana
ggctctggtttagatac

SEQ ID NO: 112337 - DNA, 17 bp, Arabidopsis thaliana
ggctctgtctggtacgt

SEQ ID NO: 112338 - DNA, 17 bp, Arabidopsis thaliana
ggctctgtgctggcgac

SEQ ID NO: 112339 - DNA, 17 bp, Arabidopsis thaliana
ggctctgttcgtttcat

SEQ ID NO: 112340 - DNA, 17 bp, Arabidopsis thaliana
ggctctgttggaccaac

SEQ ID NO: 112341 - DNA, 17 bp, Arabidopsis thaliana
ggctctgtttcgtctgt

SEQ ID NO: 112342 - DNA, 17 bp, Arabidopsis thaliana
ggctctgtttggtgcgt

SEQ ID NO: 112343 - DNA, 17 bp, Arabidopsis thaliana
ggctcttaggataagat

SEQ ID NO: 112344 - DNA, 17 bp, Arabidopsis thaliana
ggctcttcgccacctgg

SEQ ID NO: 112345 - DNA, 17 bp, Arabidopsis thaliana
ggctcttctattcagtt

SEQ ID NO: 112346 - DNA, 17 bp, Arabidopsis thaliana
ggctcttctggccattg

SEQ ID NO: 112347 - DNA, 17 bp, Arabidopsis thaliana
ggctcttgcactgtaga

SEQ ID NO: 112348 - DNA, 17 bp, Arabidopsis thaliana
ggctcttgcttcgtttc

SEQ ID NO: 112349 - DNA, 17 bp, Arabidopsis thaliana
ggctcttgtcggctttg

SEQ ID NO: 112350 - DNA, 17 bp, Arabidopsis thaliana
ggctcttgttgcgacag

SEQ ID NO: 112351 - DNA, 17 bp, Arabidopsis thaliana
ggctcttgttgcgacgg

SEQ ID NO: 112352 - DNA, 17 bp, Arabidopsis thaliana
ggctctttagggtctct

SEQ ID NO: 112353 - DNA, 17 bp, Arabidopsis thaliana
ggctctttcgagtctgg

SEQ ID NO: 112354 - DNA, 17 bp, Arabidopsis thaliana
ggctctttctcagatcg

SEQ ID NO: 112355 - DNA, 17 bp, Arabidopsis thaliana
ggctcttttgcgacgac

SEQ ID NO: 112356 - DNA, 17 bp, Arabidopsis thaliana
ggctcttttgggcccga

SEQ ID NO: 112357 - DNA, 17 bp, Arabidopsis thaliana
ggctgaaaattcaggcg

SEQ ID NO: 112358 - DNA, 17 bp, Arabidopsis thaliana
ggctgaaacatttgctg

SEQ ID NO: 112359 - DNA, 17 bp, Arabidopsis thaliana
ggctgaactcttggcgt

SEQ ID NO: 112360 - DNA, 17 bp, Arabidopsis thaliana
ggctgaagcccgtaaac

SEQ ID NO: 112361 - DNA, 17 bp, Arabidopsis thaliana
ggctgaagcgcgtaatt

SEQ ID NO: 112362 - DNA, 17 bp, Arabidopsis thaliana
ggctgaagctcatccac

SEQ ID NO: 112363 - DNA, 17 bp, Arabidopsis thaliana
ggctgaatccgtgttat

SEQ ID NO: 112364 - DNA, 17 bp, Arabidopsis thaliana
ggctgaatctcagtgga

SEQ ID NO: 112365 - DNA, 17 bp, Arabidopsis thaliana
ggctgaatttgccgctg

SEQ ID NO: 112366 - DNA, 17 bp, Arabidopsis thaliana
ggctgacaaatgttggt

SEQ ID NO: 112367 - DNA, 17 bp, Arabidopsis thaliana
ggctgacacttgctggc

SEQ ID NO: 112368 - DNA, 17 bp, Arabidopsis thaliana
ggctgacagaatcaggc

SEQ ID NO: 112369 - DNA, 17 bp, Arabidopsis thaliana
ggctgacatgatgtggt

SEQ ID NO: 112370 - DNA, 17 bp, Arabidopsis thaliana
ggctgaccagtaatgcg

SEQ ID NO: 112371 - DNA, 17 bp, Arabidopsis thaliana
ggctgaccattggacaa

SEQ ID NO: 112372 - DNA, 17 bp, Arabidopsis thaliana
ggctgacgcctgcccag

SEQ ID NO: 112373 - DNA, 17 bp, Arabidopsis thaliana
ggctgacggaaggcaac

SEQ ID NO: 112374 - DNA, 17 bp, Arabidopsis thaliana
ggctgacgggtttgatt

SEQ ID NO: 112375 - DNA, 17 bp, Arabidopsis thaliana
ggctgacttaagatcac

SEQ ID NO: 112376 - DNA, 17 bp, Arabidopsis thaliana
ggctgacttaccgtcgt

SEQ ID NO: 112377 - DNA, 17 bp, Arabidopsis thaliana
ggctgacttacggtatg

SEQ ID NO: 112378 - DNA, 17 bp, Arabidopsis thaliana
ggctgacttatcatcgc

SEQ ID NO: 112379 - DNA, 17 bp, Arabidopsis thaliana
ggctgacttattcacca

SEQ ID NO: 112380 - DNA, 17 bp, Arabidopsis thaliana
ggctgacttgcagtttg

SEQ ID NO: 112381 - DNA, 17 bp, Arabidopsis thaliana
ggctgagaagttgagcc

SEQ ID NO: 112382 - DNA, 17 bp, Arabidopsis thaliana
ggctgagattcagccct

SEQ ID NO: 112383 - DNA, 17 bp, Arabidopsis thaliana
ggctgagcagggccggc

SEQ ID NO: 112384 - DNA, 17 bp, Arabidopsis thaliana
ggctgagccgtttccag

SEQ ID NO: 112385 - DNA, 17 bp, Arabidopsis thaliana
ggctgagccgttttcca

SEQ ID NO: 112386 - DNA, 17 bp, Arabidopsis thaliana
ggctgagctaacgacac

SEQ ID NO: 112387 - DNA, 17 bp, Arabidopsis thaliana
ggctgaggcggggacgc

SEQ ID NO: 112388 - DNA, 17 bp, Arabidopsis thaliana
ggctgaggcggggaggc

SEQ ID NO: 112389 - DNA, 17 bp, Arabidopsis thaliana
ggctgagggcacgtctg

SEQ ID NO: 112390 - DNA, 17 bp, Arabidopsis thaliana
ggctgagggctgggctc

SEQ ID NO: 112391 - DNA, 17 bp, Arabidopsis thaliana
ggctgagtcgcgagaaa

SEQ ID NO: 112392 - DNA, 17 bp, Arabidopsis thaliana
ggctgagtctttgggtg

SEQ ID NO: 112393 - DNA, 17 bp, Arabidopsis thaliana
ggctgagttacgatatg

SEQ ID NO: 112394 - DNA, 17 bp, Arabidopsis thaliana
ggctgataaatggatca

SEQ ID NO: 112395 - DNA, 17 bp, Arabidopsis thaliana
ggctgataacggcatgt

SEQ ID NO: 112396 - DNA, 17 bp, Arabidopsis thaliana
ggctgataatctgatac

SEQ ID NO: 112397 - DNA, 17 bp, Arabidopsis thaliana
ggctgataatgggtgcg

SEQ ID NO: 112398 - DNA, 17 bp, Arabidopsis thaliana
ggctgatagggtagttt

SEQ ID NO: 112399 - DNA, 17 bp, Arabidopsis thaliana
ggctgatattattaacc

SEQ ID NO: 112400 - DNA, 17 bp, Arabidopsis thaliana
ggctgatcaacgtttag

SEQ ID NO: 112401 - DNA, 17 bp, Arabidopsis thaliana
ggctgatcaacgttttt

SEQ ID NO: 112402 - DNA, 17 bp, Arabidopsis thaliana
ggctgatcagacaacgt

SEQ ID NO: 112403 - DNA, 17 bp, Arabidopsis thaliana
ggctgatccgctcagtc

SEQ ID NO: 112404 - DNA, 17 bp, Arabidopsis thaliana
ggctgatccggtcagtc

SEQ ID NO: 112405 - DNA, 17 bp, Arabidopsis thaliana
ggctgatccggttagcc

SEQ ID NO: 112406 - DNA, 17 bp, Arabidopsis thaliana
ggctgatccggttattt

SEQ ID NO: 112407 - DNA, 17 bp, Arabidopsis thaliana
ggctgatcgtactctcg

SEQ ID NO: 112408 - DNA, 17 bp, Arabidopsis thaliana
ggctgatctttccgttg

SEQ ID NO: 112409 - DNA, 17 bp, Arabidopsis thaliana
ggctgatggatgttgat

SEQ ID NO: 112410 - DNA, 17 bp, Arabidopsis thaliana
ggctgatgtagccaagt

SEQ ID NO: 112411 - DNA, 17 bp, Arabidopsis thaliana
ggctgatgtgatgatac

SEQ ID NO: 112412 - DNA, 17 bp, Arabidopsis thaliana
ggctgatgtgatgatag

SEQ ID NO: 112413 - DNA, 17 bp, Arabidopsis thaliana
ggctgatgtgtcaaagt

SEQ ID NO: 112414 - DNA, 17 bp, Arabidopsis thaliana
ggctgatgttgtgatct

SEQ ID NO: 112415 - DNA, 17 bp, Arabidopsis thaliana
ggctgatgttttgcggt

SEQ ID NO: 112416 - DNA, 17 bp, Arabidopsis thaliana
ggctgattcggttatcc

SEQ ID NO: 112417 - DNA, 17 bp, Arabidopsis thaliana
ggctgatttgttagatc

SEQ ID NO: 112418 - DNA, 17 bp, Arabidopsis thaliana
ggctgcaaagtgttgga

SEQ ID NO: 112419 - DNA, 17 bp, Arabidopsis thaliana
ggctgcaaatggttgtc

SEQ ID NO: 112420 - DNA, 17 bp, Arabidopsis thaliana
ggctgcaatgggtggtc

SEQ ID NO: 112421 - DNA, 17 bp, Arabidopsis thaliana
ggctgcagagcgttcta

SEQ ID NO: 112422 - DNA, 17 bp, Arabidopsis thaliana
ggctgcagttgactcag

SEQ ID NO: 112423 - DNA, 17 bp, Arabidopsis thaliana
ggctgcagtttttggca

SEQ ID NO: 112424 - DNA, 17 bp, Arabidopsis thaliana
ggctgccattctaggtc

SEQ ID NO: 112425 - DNA, 17 bp, Arabidopsis thaliana
ggctgcccactcaaaag

SEQ ID NO: 112426 - DNA, 17 bp, Arabidopsis thaliana
ggctgcctataggagcc

SEQ ID NO: 112427 - DNA, 17 bp, Arabidopsis thaliana
ggctgcctataggaggg

SEQ ID NO: 112428 - DNA, 17 bp, Arabidopsis thaliana
ggctgcctgcgtctaat

SEQ ID NO: 112429 - DNA, 17 bp, Arabidopsis thaliana
ggctgccttttcctccg

SEQ ID NO: 112430 - DNA, 17 bp, Arabidopsis thaliana
ggctgcgggggcttttt

SEQ ID NO: 112431 - DNA, 17 bp, Arabidopsis thaliana
ggctgcggtagcggtgg

SEQ ID NO: 112432 - DNA, 17 bp, Arabidopsis thaliana
ggctgcggtggatccat

SEQ ID NO: 112433 - DNA, 17 bp, Arabidopsis thaliana
ggctgcggttgcggttg

SEQ ID NO: 112434 - DNA, 17 bp, Arabidopsis thaliana
ggctgctaataccccgt

SEQ ID NO: 112435 - DNA, 17 bp, Arabidopsis thaliana
ggctgctcagatcacgg

SEQ ID NO: 112436 - DNA, 17 bp, Arabidopsis thaliana
ggctgctcgagtgactg

SEQ ID NO: 112437 - DNA, 17 bp, Arabidopsis thaliana
ggctgctcgtgttgatt

SEQ ID NO: 112438 - DNA, 17 bp, Arabidopsis thaliana
ggctgctctacgtctag

SEQ ID NO: 112439 - DNA, 17 bp, Arabidopsis thaliana
ggctgctgcatgtttat

SEQ ID NO: 112440 - DNA, 17 bp, Arabidopsis thaliana
ggctgctgggtgaagcc

SEQ ID NO: 112441 - DNA, 17 bp, Arabidopsis thaliana
ggctgctggtgcgttgg

SEQ ID NO: 112442 - DNA, 17 bp, Arabidopsis thaliana
ggctgcttgaaattgtc

SEQ ID NO: 112443 - DNA, 17 bp, Arabidopsis thaliana
ggctgctttgtgctcta

SEQ ID NO: 112444 - DNA, 17 bp, Arabidopsis thaliana
ggctgctttgttgagcc

SEQ ID NO: 112445 - DNA, 17 bp, Arabidopsis thaliana
ggctggaaaacatcggt

SEQ ID NO: 112446 - DNA, 17 bp, Arabidopsis thaliana
ggctggaactgcgacag

SEQ ID NO: 112447 - DNA, 17 bp, Arabidopsis thaliana
ggctggaagagcaccgc

SEQ ID NO: 112448 - DNA, 17 bp, Arabidopsis thaliana
ggctggaaggcgagaag

SEQ ID NO: 112449 - DNA, 17 bp, Arabidopsis thaliana
ggctggaattcaccggg

SEQ ID NO: 112450 - DNA, 17 bp, Arabidopsis thaliana
ggctggaccagaatcac

SEQ ID NO: 112451 - DNA, 17 bp, Arabidopsis thaliana
ggctggacgggtttggc

SEQ ID NO: 112452 - DNA, 17 bp, Arabidopsis thaliana
ggctggagtagtttcag

SEQ ID NO: 112453 - DNA, 17 bp, Arabidopsis thaliana
ggctggagtgattacgg

SEQ ID NO: 112454 - DNA, 17 bp, Arabidopsis thaliana
ggctggattcgtctgcg

SEQ ID NO: 112455 - DNA, 17 bp, Arabidopsis thaliana
ggctggatttgcttgat

SEQ ID NO: 112456 - DNA, 17 bp, Arabidopsis thaliana
ggctggcaagacagagg

SEQ ID NO: 112457 - DNA, 17 bp, Arabidopsis thaliana
ggctggccttatgtgga

SEQ ID NO: 112458 - DNA, 17 bp, Arabidopsis thaliana
ggctggcgatttcagct

SEQ ID NO: 112459 - DNA, 17 bp, Arabidopsis thaliana
ggctggcggactggtca

SEQ ID NO: 112460 - DNA, 17 bp, Arabidopsis thaliana
ggctggctctgttagcg

SEQ ID NO: 112461 - DNA, 17 bp, Arabidopsis thaliana
ggctggctttgacttgg

SEQ ID NO: 112462 - DNA, 17 bp, Arabidopsis thaliana
ggctgggatgggtcggc

SEQ ID NO: 112463 - DNA, 17 bp, Arabidopsis thaliana
ggctgggatggttcggc

SEQ ID NO: 112464 - DNA, 17 bp, Arabidopsis thaliana
ggctgggcacgaagcgg

SEQ ID NO: 112465 - DNA, 17 bp, Arabidopsis thaliana
ggctgggctcgggggtc

SEQ ID NO: 112466 - DNA, 17 bp, Arabidopsis thaliana
ggctggggcggcacatc

SEQ ID NO: 112467 - DNA, 17 bp, Arabidopsis thaliana
ggctggtcccctttggt

SEQ ID NO: 112468 - DNA, 17 bp, Arabidopsis thaliana
ggctgtaaagacttcgg

SEQ ID NO: 112469 - DNA, 17 bp, Arabidopsis thaliana
ggctgtaataatcgggg

SEQ ID NO: 112470 - DNA, 17 bp, Arabidopsis thaliana
ggctgtaccactgccac

SEQ ID NO: 112471 - DNA, 17 bp, Arabidopsis thaliana
ggctgtaccactgccat

SEQ ID NO: 112472 - DNA, 17 bp, Arabidopsis thaliana
ggctgtactgagctgtt

SEQ ID NO: 112473 - DNA, 17 bp, Arabidopsis thaliana
ggctgtagccgttatct

SEQ ID NO: 112474 - DNA, 17 bp, Arabidopsis thaliana
ggctgtagtatgttcca

SEQ ID NO: 112475 - DNA, 17 bp, Arabidopsis thaliana
ggctgtagtttagtggt

SEQ ID NO: 112476 - DNA, 17 bp, Arabidopsis thaliana
ggctgtattgcaggtga

SEQ ID NO: 112477 - DNA, 17 bp, Arabidopsis thaliana
ggctgtcagcggactgc

SEQ ID NO: 112478 - DNA, 17 bp, Arabidopsis thaliana
ggctgtcagcggtcgcc

SEQ ID NO: 112479 - DNA, 17 bp, Arabidopsis thaliana
ggctgtcgtagatctaa

SEQ ID NO: 112480 - DNA, 17 bp, Arabidopsis thaliana
ggctgtctatgtgattt

SEQ ID NO: 112481 - DNA, 17 bp, Arabidopsis thaliana
ggctgtctttgggcttt

SEQ ID NO: 112482 - DNA, 17 bp, Arabidopsis thaliana
ggctgtgaacagcggtg

SEQ ID NO: 112483 - DNA, 17 bp, Arabidopsis thaliana
ggctgtgaatgagacga

SEQ ID NO: 112484 - DNA, 17 bp, Arabidopsis thaliana
ggctgtgaatggtgacc

SEQ ID NO: 112485 - DNA, 17 bp, Arabidopsis thaliana
ggctgtgaccgtctgat

SEQ ID NO: 112486 - DNA, 17 bp, Arabidopsis thaliana
ggctgtgcattggtcga

SEQ ID NO: 112487 - DNA, 17 bp, Arabidopsis thaliana
ggctgtggtacagtctg

SEQ ID NO: 112488 - DNA, 17 bp, Arabidopsis thaliana
ggctgtggtccagaata

SEQ ID NO: 112489 - DNA, 17 bp, Arabidopsis thaliana
ggctgtgttcttgtgat

SEQ ID NO: 112490 - DNA, 17 bp, Arabidopsis thaliana
ggctgttaatcgccggc

SEQ ID NO: 112491 - DNA, 17 bp, Arabidopsis thaliana
ggctgttaggagggctg

SEQ ID NO: 112492 - DNA, 17 bp, Arabidopsis thaliana
ggctgttagggatttgg

SEQ ID NO: 112493 - DNA, 17 bp, Arabidopsis thaliana
ggctgttccctgggatt

SEQ ID NO: 112494 - DNA, 17 bp, Arabidopsis thaliana
ggctgttggtccaggga

SEQ ID NO: 112495 - DNA, 17 bp, Arabidopsis thaliana
ggctgttgttctgatgg

SEQ ID NO: 112496 - DNA, 17 bp, Arabidopsis thaliana
ggctgttgtttcgctgg

SEQ ID NO: 112497 - DNA, 17 bp, Arabidopsis thaliana
ggctgtttggttgtttt

SEQ ID NO: 112498 - DNA, 17 bp, Arabidopsis thaliana
ggctgttttctgttacc

SEQ ID NO: 112499 - DNA, 17 bp, Arabidopsis thaliana
ggcttaaaaagttgcaa

SEQ ID NO: 112500 - DNA, 17 bp, Arabidopsis thaliana
ggcttaactctgttcag

SEQ ID NO: 112501 - DNA, 17 bp, Arabidopsis thaliana
ggcttacaagatcagct

SEQ ID NO: 112502 - DNA, 17 bp, Arabidopsis thaliana
ggcttacaagatcaggt

SEQ ID NO: 112503 - DNA, 17 bp, Arabidopsis thaliana
ggcttacaagatcgggt

SEQ ID NO: 112504 - DNA, 17 bp, Arabidopsis thaliana
ggcttacaagattgggt

SEQ ID NO: 112505 - DNA, 17 bp, Arabidopsis thaliana
ggcttaccacctttccg

SEQ ID NO: 112506 - DNA, 17 bp, Arabidopsis thaliana
ggcttaccgtcgtttag

SEQ ID NO: 112507 - DNA, 17 bp, Arabidopsis thaliana
ggcttacgctcagaacc

SEQ ID NO: 112508 - DNA, 17 bp, Arabidopsis thaliana
ggcttacggtggatacc

SEQ ID NO: 112509 - DNA, 17 bp, Arabidopsis thaliana
ggcttagatgatgggcc

SEQ ID NO: 112510 - DNA, 17 bp, Arabidopsis thaliana
ggcttaggtttcccggg

SEQ ID NO: 112511 - DNA, 17 bp, Arabidopsis thaliana
ggcttaggtttctggag

SEQ ID NO: 112512 - DNA, 17 bp, Arabidopsis thaliana
ggcttagtcaacggatt

SEQ ID NO: 112513 - DNA, 17 bp, Arabidopsis thaliana
ggcttagtcgcagtaga

SEQ ID NO: 112514 - DNA, 17 bp, Arabidopsis thaliana
ggcttagtcgcatcctg

SEQ ID NO: 112515 - DNA, 17 bp, Arabidopsis thaliana
ggcttagtcgcgctgta

SEQ ID NO: 112516 - DNA, 17 bp, Arabidopsis thaliana
ggcttagtcgctgtaga

SEQ ID NO: 112517 - DNA, 17 bp, Arabidopsis thaliana
ggcttagtggtgctgtt

SEQ ID NO: 112518 - DNA, 17 bp, Arabidopsis thaliana
ggcttagtggtgttgtt

SEQ ID NO: 112519 - DNA, 17 bp, Arabidopsis thaliana
ggcttagtttccgggat

SEQ ID NO: 112520 - DNA, 17 bp, Arabidopsis thaliana
ggcttataagatcagtt

SEQ ID NO: 112521 - DNA, 17 bp, Arabidopsis thaliana
ggcttataagatccggc

SEQ ID NO: 112522 - DNA, 17 bp, Arabidopsis thaliana
ggcttataagatcgggt

SEQ ID NO: 112523 - DNA, 17 bp, Arabidopsis thaliana
ggcttataagatcggtt

SEQ ID NO: 112524 - DNA, 17 bp, Arabidopsis thaliana
ggcttatcgctggttgc

SEQ ID NO: 112525 - DNA, 17 bp, Arabidopsis thaliana
ggcttatcgctggttgg

SEQ ID NO: 112526 - DNA, 17 bp, Arabidopsis thaliana
ggcttatcgctggttgt

SEQ ID NO: 112527 - DNA, 17 bp, Arabidopsis thaliana
ggcttatcgtccagcgg

SEQ ID NO: 112528 - DNA, 17 bp, Arabidopsis thaliana
ggcttatctgcgaaccg

SEQ ID NO: 112529 - DNA, 17 bp, Arabidopsis thaliana
ggcttatctgcggaccg

SEQ ID NO: 112530 - DNA, 17 bp, Arabidopsis thaliana
ggcttatgatcagtcgt

SEQ ID NO: 112531 - DNA, 17 bp, Arabidopsis thaliana
ggcttatgctcgacccg

SEQ ID NO: 112532 - DNA, 17 bp, Arabidopsis thaliana
ggcttatgttatggatg

SEQ ID NO: 112533 - DNA, 17 bp, Arabidopsis thaliana
ggcttattcctttgtca

SEQ ID NO: 112534 - DNA, 17 bp, Arabidopsis thaliana
ggcttatttacgatggc

SEQ ID NO: 112535 - DNA, 17 bp, Arabidopsis thaliana
ggcttatttcgtcggag

SEQ ID NO: 112536 - DNA, 17 bp, Arabidopsis thaliana
ggcttcaaaggccctac

SEQ ID NO: 112537 - DNA, 17 bp, Arabidopsis thaliana
ggcttcaagaaaggaac

SEQ ID NO: 112538 - DNA, 17 bp, Arabidopsis thaliana
ggcttcaagaaaggtac

SEQ ID NO: 112539 - DNA, 17 bp, Arabidopsis thaliana
ggcttcagcccagaacc

SEQ ID NO: 112540 - DNA, 17 bp, Arabidopsis thaliana
ggcttcagtgactctag

SEQ ID NO: 112541 - DNA, 17 bp, Arabidopsis thaliana
ggcttcagttgaccagt

SEQ ID NO: 112542 - DNA, 17 bp, Arabidopsis thaliana
ggcttcagttgagctct

SEQ ID NO: 112543 - DNA, 17 bp, Arabidopsis thaliana
ggcttcattccccatgc

SEQ ID NO: 112544 - DNA, 17 bp, Arabidopsis thaliana
ggcttccacacgagatt

SEQ ID NO: 112545 - DNA, 17 bp, Arabidopsis thaliana
ggcttccccagtggaac

SEQ ID NO: 112546 - DNA, 17 bp, Arabidopsis thaliana
ggcttcccggctggtgc

SEQ ID NO: 112547 - DNA, 17 bp, Arabidopsis thaliana
ggcttccggttcatccc

SEQ ID NO: 112548 - DNA, 17 bp, Arabidopsis thaliana
ggcttcgaatagtgatc

SEQ ID NO: 112549 - DNA, 17 bp, Arabidopsis thaliana
ggcttcgaatggaataa

SEQ ID NO: 112550 - DNA, 17 bp, Arabidopsis thaliana
ggcttcgaatggaatag

SEQ ID NO: 112551 - DNA, 17 bp, Arabidopsis thaliana
ggcttcgaatggtgaca

SEQ ID NO: 112552 - DNA, 17 bp, Arabidopsis thaliana
ggcttcgacaatgacat

SEQ ID NO: 112553 - DNA, 17 bp, Arabidopsis thaliana
ggcttcgacccagaatc

SEQ ID NO: 112554 - DNA, 17 bp, Arabidopsis thaliana
ggcttcgagtggtaact

SEQ ID NO: 112555 - DNA, 17 bp, Arabidopsis thaliana
ggcttcgcccgttgctc

SEQ ID NO: 112556 - DNA, 17 bp, Arabidopsis thaliana
ggcttcgcctcagaacc

SEQ ID NO: 112557 - DNA, 17 bp, Arabidopsis thaliana
ggcttcggactagaatc

SEQ ID NO: 112558 - DNA, 17 bp, Arabidopsis thaliana
ggcttcggctcagaacc

SEQ ID NO: 112559 - DNA, 17 bp, Arabidopsis thaliana
ggcttcgggaagaggaa

SEQ ID NO: 112560 - DNA, 17 bp, Arabidopsis thaliana
ggcttcggggcgtggac

SEQ ID NO: 112561 - DNA, 17 bp, Arabidopsis thaliana
ggcttcgtgatccgatg

SEQ ID NO: 112562 - DNA, 17 bp, Arabidopsis thaliana
ggcttctaacaattatt

SEQ ID NO: 112563 - DNA, 17 bp, Arabidopsis thaliana
ggcttctaacaattggt

SEQ ID NO: 112564 - DNA, 17 bp, Arabidopsis thaliana
ggcttctacaagttgca

SEQ ID NO: 112565 - DNA, 17 bp, Arabidopsis thaliana
ggcttctaccgcaagag

SEQ ID NO: 112566 - DNA, 17 bp, Arabidopsis thaliana
ggcttctatgattggtg

SEQ ID NO: 112567 - DNA, 17 bp, Arabidopsis thaliana
ggcttctcagaatcggt

SEQ ID NO: 112568 - DNA, 17 bp, Arabidopsis thaliana
ggcttctcggaacgccc

SEQ ID NO: 112569 - DNA, 17 bp, Arabidopsis thaliana
ggcttctctgattctgt

SEQ ID NO: 112570 - DNA, 17 bp, Arabidopsis thaliana
ggcttctctgattcttt

SEQ ID NO: 112571 - DNA, 17 bp, Arabidopsis thaliana
ggcttctgatcttggtg

SEQ ID NO: 112572 - DNA, 17 bp, Arabidopsis thaliana
ggcttctgctaaggttt

SEQ ID NO: 112573 - DNA, 17 bp, Arabidopsis thaliana
ggcttctggttgtaacg

SEQ ID NO: 112574 - DNA, 17 bp, Arabidopsis thaliana
ggcttctgtagtgggct

SEQ ID NO: 112575 - DNA, 17 bp, Arabidopsis thaliana
ggcttctgttagggtct

SEQ ID NO: 112576 - DNA, 17 bp, Arabidopsis thaliana
ggcttcttctgattggt

SEQ ID NO: 112577 - DNA, 17 bp, Arabidopsis thaliana
ggcttcttggagggact

SEQ ID NO: 112578 - DNA, 17 bp, Arabidopsis thaliana
ggcttcttggctattgg

SEQ ID NO: 112579 - DNA, 17 bp, Arabidopsis thaliana
ggcttctttttctgact

SEQ ID NO: 112580 - DNA, 17 bp, Arabidopsis thaliana
ggcttgaccatacggac

SEQ ID NO: 112581 - DNA, 17 bp, Arabidopsis thaliana
ggcttgacccatgaaac

SEQ ID NO: 112582 - DNA, 17 bp, Arabidopsis thaliana
ggcttgacgagtatgct

SEQ ID NO: 112583 - DNA, 17 bp, Arabidopsis thaliana
ggcttgacgagtatggt

SEQ ID NO: 112584 - DNA, 17 bp, Arabidopsis thaliana
ggcttgacggaaaccgg

SEQ ID NO: 112585 - DNA, 17 bp, Arabidopsis thaliana
ggcttgacggaaacggg

SEQ ID NO: 112586 - DNA, 17 bp, Arabidopsis thaliana
ggcttgactaaccactg

SEQ ID NO: 112587 - DNA, 17 bp, Arabidopsis thaliana
ggcttgacttagcgaat

SEQ ID NO: 112588 - DNA, 17 bp, Arabidopsis thaliana
ggcttgacttagtgact

SEQ ID NO: 112589 - DNA, 17 bp, Arabidopsis thaliana
ggcttgacttagttgtt

SEQ ID NO: 112590 - DNA, 17 bp, Arabidopsis thaliana
ggcttgaggagtaagag

SEQ ID NO: 112591 - DNA, 17 bp, Arabidopsis thaliana
ggcttgaggctggaact

SEQ ID NO: 112592 - DNA, 17 bp, Arabidopsis thaliana
ggcttgataccgtatca

SEQ ID NO: 112593 - DNA, 17 bp, Arabidopsis thaliana
ggcttgatcgtaaaatt

SEQ ID NO: 112594 - DNA, 17 bp, Arabidopsis thaliana
ggcttgatctgtttcac

SEQ ID NO: 112595 - DNA, 17 bp, Arabidopsis thaliana
ggcttgatgtgttgttt

SEQ ID NO: 112596 - DNA, 17 bp, Arabidopsis thaliana
ggcttgatttgcaggat

SEQ ID NO: 112597 - DNA, 17 bp, Arabidopsis thaliana
ggcttgcagggcagtaa

SEQ ID NO: 112598 - DNA, 17 bp, Arabidopsis thaliana
ggcttgccgaccctcag

SEQ ID NO: 112599 - DNA, 17 bp, Arabidopsis thaliana
ggcttgcctacatcttt

SEQ ID NO: 112600 - DNA, 17 bp, Arabidopsis thaliana
ggcttgcgtttgctctg

SEQ ID NO: 112601 - DNA, 17 bp, Arabidopsis thaliana
ggcttggatagtttgtc

SEQ ID NO: 112602 - DNA, 17 bp, Arabidopsis thaliana
ggcttggatgatagtta

SEQ ID NO: 112603 - DNA, 17 bp, Arabidopsis thaliana
ggcttggccggtagtag

SEQ ID NO: 112604 - DNA, 17 bp, Arabidopsis thaliana
ggcttggcgccgttgcc

SEQ ID NO: 112605 - DNA, 17 bp, Arabidopsis thaliana
ggcttggctcaggcggt

SEQ ID NO: 112606 - DNA, 17 bp, Arabidopsis thaliana
ggcttgggatgtcggca

SEQ ID NO: 112607 - DNA, 17 bp, Arabidopsis thaliana
ggcttgggtcgaggttg

SEQ ID NO: 112608 - DNA, 17 bp, Arabidopsis thaliana
ggcttggtcaacgttga

SEQ ID NO: 112609 - DNA, 17 bp, Arabidopsis thaliana
ggcttggtctgttgtct

SEQ ID NO: 112610 - DNA, 17 bp, Arabidopsis thaliana
ggcttggtgggcttttg

SEQ ID NO: 112611 - DNA, 17 bp, Arabidopsis thaliana
ggcttggtttatgtaca

SEQ ID NO: 112612 - DNA, 17 bp, Arabidopsis thaliana
ggcttgtagtatagttt

SEQ ID NO: 112613 - DNA, 17 bp, Arabidopsis thaliana
ggcttgtcatttgtctg

SEQ ID NO: 112614 - DNA, 17 bp, Arabidopsis thaliana
ggcttgtccctccgccc

SEQ ID NO: 112615 - DNA, 17 bp, Arabidopsis thaliana
ggcttgtccctcggtcg

SEQ ID NO: 112616 - DNA, 17 bp, Arabidopsis thaliana
ggcttgtcccttcggtc

SEQ ID NO: 112617 - DNA, 17 bp, Arabidopsis thaliana
ggcttgtcccttcgttc

SEQ ID NO: 112618 - DNA, 17 bp, Arabidopsis thaliana
ggcttgtccgtctcagg

SEQ ID NO: 112619 - DNA, 17 bp, Arabidopsis thaliana
ggcttgtcgctaagatt

SEQ ID NO: 112620 - DNA, 17 bp, Arabidopsis thaliana
ggctttaaagatcgggt

SEQ ID NO: 112621 - DNA, 17 bp, Arabidopsis thaliana
ggctttagtttagtggt

SEQ ID NO: 112622 - DNA, 17 bp, Arabidopsis thaliana
ggctttatcagtgacta

SEQ ID NO: 112623 - DNA, 17 bp, Arabidopsis thaliana
ggctttatgtctctaga

SEQ ID NO: 112624 - DNA, 17 bp, Arabidopsis thaliana
ggctttattcaccgctg

SEQ ID NO: 112625 - DNA, 17 bp, Arabidopsis thaliana
ggctttcacccaggaga

SEQ ID NO: 112626 - DNA, 17 bp, Arabidopsis thaliana
ggctttccgaaaaggta

SEQ ID NO: 112627 - DNA, 17 bp, Arabidopsis thaliana
ggctttcgggtcgttgt

SEQ ID NO: 112628 - DNA, 17 bp, Arabidopsis thaliana
ggctttcgttggaccgt

SEQ ID NO: 112629 - DNA, 17 bp, Arabidopsis thaliana
ggctttctcaggggggc

SEQ ID NO: 112630 - DNA, 17 bp, Arabidopsis thaliana
ggctttctccggaatcc

SEQ ID NO: 112631 - DNA, 17 bp, Arabidopsis thaliana
ggctttctcgggagctt

SEQ ID NO: 112632 - DNA, 17 bp, Arabidopsis thaliana
ggctttctctactttgg

SEQ ID NO: 112633 - DNA, 17 bp, Arabidopsis thaliana
ggctttcttcaccgttg

SEQ ID NO: 112634 - DNA, 17 bp, Arabidopsis thaliana
ggctttcttgttttcgt

SEQ ID NO: 112635 - DNA, 17 bp, Arabidopsis thaliana
ggctttcttttgcgact

SEQ ID NO: 112636 - DNA, 17 bp, Arabidopsis thaliana
ggctttgaatggttact

SEQ ID NO: 112637 - DNA, 17 bp, Arabidopsis thaliana
ggctttgaatgttgcgt

SEQ ID NO: 112638 - DNA, 17 bp, Arabidopsis thaliana
ggctttgagctttgatt

SEQ ID NO: 112639 - DNA, 17 bp, Arabidopsis thaliana
ggctttgatgtggcttt

SEQ ID NO: 112640 - DNA, 17 bp, Arabidopsis thaliana
ggctttgccaaggatgt

SEQ ID NO: 112641 - DNA, 17 bp, Arabidopsis thaliana
ggctttgccccccatgc

SEQ ID NO: 112642 - DNA, 17 bp, Arabidopsis thaliana
ggctttgcccgcgcagg

SEQ ID NO: 112643 - DNA, 17 bp, Arabidopsis thaliana
ggctttgcctctacttt

SEQ ID NO: 112644 - DNA, 17 bp, Arabidopsis thaliana
ggctttggagaattacg

SEQ ID NO: 112645 - DNA, 17 bp, Arabidopsis thaliana
ggctttgggcttttcct

SEQ ID NO: 112646 - DNA, 17 bp, Arabidopsis thaliana
ggctttgggcttttctt

SEQ ID NO: 112647 - DNA, 17 bp, Arabidopsis thaliana
ggctttggtcctattgg

SEQ ID NO: 112648 - DNA, 17 bp, Arabidopsis thaliana
ggctttggttcagaatg

SEQ ID NO: 112649 - DNA, 17 bp, Arabidopsis thaliana
ggctttgtataggattg

SEQ ID NO: 112650 - DNA, 17 bp, Arabidopsis thaliana
ggctttgtatccaacat

SEQ ID NO: 112651 - DNA, 17 bp, Arabidopsis thaliana
ggctttgtgtcttctaa

SEQ ID NO: 112652 - DNA, 17 bp, Arabidopsis thaliana
ggctttgttccaggtcc

SEQ ID NO: 112653 - DNA, 17 bp, Arabidopsis thaliana
ggctttgtttgcatagt

SEQ ID NO: 112654 - DNA, 17 bp, Arabidopsis thaliana
ggcttttaaacagtgag

SEQ ID NO: 112655 - DNA, 17 bp, Arabidopsis thaliana
ggcttttaaccacgtgg

SEQ ID NO: 112656 - DNA, 17 bp, Arabidopsis thaliana
ggcttttaagatcaggt

SEQ ID NO: 112657 - DNA, 17 bp, Arabidopsis thaliana
ggcttttaagatccggt

SEQ ID NO: 112658 - DNA, 17 bp, Arabidopsis thaliana
ggcttttaagatcgggt

SEQ ID NO: 112659 - DNA, 17 bp, Arabidopsis thaliana
ggcttttaagatctggt

SEQ ID NO: 112660 - DNA, 17 bp, Arabidopsis thaliana
ggcttttaagattatgt

SEQ ID NO: 112661 - DNA, 17 bp, Arabidopsis thaliana
ggcttttaagctcgggt

SEQ ID NO: 112662 - DNA, 17 bp, Arabidopsis thaliana
ggcttttaatggctaca

SEQ ID NO: 112663 - DNA, 17 bp, Arabidopsis thaliana
ggcttttaatgtgcgga

SEQ ID NO: 112664 - DNA, 17 bp, Arabidopsis thaliana
ggcttttacgaacgttg

SEQ ID NO: 112665 - DNA, 17 bp, Arabidopsis thaliana
ggcttttaggataaaat

SEQ ID NO: 112666 - DNA, 17 bp, Arabidopsis thaliana
ggcttttaggataagat

SEQ ID NO: 112667 - DNA, 17 bp, Arabidopsis thaliana
ggcttttcagatcgggt

SEQ ID NO: 112668 - DNA, 17 bp, Arabidopsis thaliana
ggcttttctcatctgtg

SEQ ID NO: 112669 - DNA, 17 bp, Arabidopsis thaliana
ggcttttgaggttgctt

SEQ ID NO: 112670 - DNA, 17 bp, Arabidopsis thaliana
ggcttttgatacgcttg

SEQ ID NO: 112671 - DNA, 17 bp, Arabidopsis thaliana
ggcttttgatacgcttt

SEQ ID NO: 112672 - DNA, 17 bp, Arabidopsis thaliana
ggcttttgggtgtgagt

SEQ ID NO: 112673 - DNA, 17 bp, Arabidopsis thaliana
ggcttttgtctctcgac

SEQ ID NO: 112674 - DNA, 17 bp, Arabidopsis thaliana
ggcttttgttgctgctg

SEQ ID NO: 112675 - DNA, 17 bp, Arabidopsis thaliana
ggctttttaagtccgcc

SEQ ID NO: 112676 - DNA, 17 bp, Arabidopsis thaliana
ggctttttcagcgtata

SEQ ID NO: 112677 - DNA, 17 bp, Arabidopsis thaliana
ggctttttctctggaga

SEQ ID NO: 112678 - DNA, 17 bp, Arabidopsis thaliana
ggctttttgagggtctc

SEQ ID NO: 112679 - DNA, 17 bp, Arabidopsis thaliana
ggctttttggcaagacg

SEQ ID NO: 112680 - DNA, 17 bp, Arabidopsis thaliana
ggctttttgggcttgat

SEQ ID NO: 112681 - DNA, 17 bp, Arabidopsis thaliana
ggctttttttcctcgag

SEQ ID NO: 112682 - DNA, 17 bp, Arabidopsis thaliana
gggaaaaaaggccctac

SEQ ID NO: 112683 - DNA, 17 bp, Arabidopsis thaliana
gggaaaaaagtgtggcg

SEQ ID NO: 112684 - DNA, 17 bp, Arabidopsis thaliana
gggaaaaacctggaacc

SEQ ID NO: 112685 - DNA, 17 bp, Arabidopsis thaliana
gggaaaaatgttgaaaa

SEQ ID NO: 112686 - DNA, 17 bp, Arabidopsis thaliana
gggaaaacccctgggac

SEQ ID NO: 112687 - DNA, 17 bp, Arabidopsis thaliana
gggaaaacgtccatctg

SEQ ID NO: 112688 - DNA, 17 bp, Arabidopsis thaliana
gggaaaaggattggctc

SEQ ID NO: 112689 - DNA, 17 bp, Arabidopsis thaliana
gggaaaagttcagtctt

SEQ ID NO: 112690 - DNA, 17 bp, Arabidopsis thaliana
gggaaaagttccattgt

SEQ ID NO: 112691 - DNA, 17 bp, Arabidopsis thaliana
gggaaaatagagcctgg

SEQ ID NO: 112692 - DNA, 17 bp, Arabidopsis thaliana
gggaaaatcacaggttt

SEQ ID NO: 112693 - DNA, 17 bp, Arabidopsis thaliana
gggaaaatcacggattt

SEQ ID NO: 112694 - DNA, 17 bp, Arabidopsis thaliana
gggaaaatcacgggctt

SEQ ID NO: 112695 - DNA, 17 bp, Arabidopsis thaliana
gggaaaatcacgggttt

SEQ ID NO: 112696 - DNA, 17 bp, Arabidopsis thaliana
gggaaaatcggcggagg

SEQ ID NO: 112697 - DNA, 17 bp, Arabidopsis thaliana
gggaaaatctatggttg

SEQ ID NO: 112698 - DNA, 17 bp, Arabidopsis thaliana
gggaaaatctcgggttt

SEQ ID NO: 112699 - DNA, 17 bp, Arabidopsis thaliana
gggaaaattacgggttt

SEQ ID NO: 112700 - DNA, 17 bp, Arabidopsis thaliana
gggaaacaccgatttca

SEQ ID NO: 112701 - DNA, 17 bp, Arabidopsis thaliana
gggaaacacttactgat

SEQ ID NO: 112702 - DNA, 17 bp, Arabidopsis thaliana
gggaaacacttactggt

SEQ ID NO: 112703 - DNA, 17 bp, Arabidopsis thaliana
gggaaacccgtctgata

SEQ ID NO: 112704 - DNA, 17 bp, Arabidopsis thaliana
gggaaactatgttgaca

SEQ ID NO: 112705 - DNA, 17 bp, Arabidopsis thaliana
gggaaacttaccaggtc

SEQ ID NO: 112706 - DNA, 17 bp, Arabidopsis thaliana
gggaaagaagaccatgt

SEQ ID NO: 112707 - DNA, 17 bp, Arabidopsis thaliana
gggaaagaagaccctga

SEQ ID NO: 112708 - DNA, 17 bp, Arabidopsis thaliana
gggaaagaagaccctgt

SEQ ID NO: 112709 - DNA, 17 bp, Arabidopsis thaliana
gggaaagacaccatctt

SEQ ID NO: 112710 - DNA, 17 bp, Arabidopsis thaliana
gggaaagactattggtg

SEQ ID NO: 112711 - DNA, 17 bp, Arabidopsis thaliana
gggaaagacttagaatg

SEQ ID NO: 112712 - DNA, 17 bp, Arabidopsis thaliana
gggaaagagggtttggg

SEQ ID NO: 112713 - DNA, 17 bp, Arabidopsis thaliana
gggaaagatcatgtggt

SEQ ID NO: 112714 - DNA, 17 bp, Arabidopsis thaliana
gggaaagattgagtggg

SEQ ID NO: 112715 - DNA, 17 bp, Arabidopsis thaliana
gggaaagattgcccggt

SEQ ID NO: 112716 - DNA, 17 bp, Arabidopsis thaliana
gggaaagccgagaccaa

SEQ ID NO: 112717 - DNA, 17 bp, Arabidopsis thaliana
gggaaaggccccggccc

SEQ ID NO: 112718 - DNA, 17 bp, Arabidopsis thaliana
gggaaaggcccgcccgt

SEQ ID NO: 112719 - DNA, 17 bp, Arabidopsis thaliana
gggaaaggttccatgtg

SEQ ID NO: 112720 - DNA, 17 bp, Arabidopsis thaliana
gggaaatacttactgat

SEQ ID NO: 112721 - DNA, 17 bp, Arabidopsis thaliana
gggaaatacttactggt

SEQ ID NO: 112722 - DNA, 17 bp, Arabidopsis thaliana
gggaaatatcaggaggt

SEQ ID NO: 112723 - DNA, 17 bp, Arabidopsis thaliana
gggaaatatgtactggc

SEQ ID NO: 112724 - DNA, 17 bp, Arabidopsis thaliana
gggaaatcataacaccg

SEQ ID NO: 112725 - DNA, 17 bp, Arabidopsis thaliana
gggaaatctcaggtgac

SEQ ID NO: 112726 - DNA, 17 bp, Arabidopsis thaliana
gggaaatctgtgcagct

SEQ ID NO: 112727 - DNA, 17 bp, Arabidopsis thaliana
gggaaatctgttgaggc

SEQ ID NO: 112728 - DNA, 17 bp, Arabidopsis thaliana
gggaaatcttaggtgac

SEQ ID NO: 112729 - DNA, 17 bp, Arabidopsis thaliana
gggaaatcttgatgatg

SEQ ID NO: 112730 - DNA, 17 bp, Arabidopsis thaliana
gggaaatgaatgaaatc

SEQ ID NO: 112731 - DNA, 17 bp, Arabidopsis thaliana
gggaaatgattgtcgga

SEQ ID NO: 112732 - DNA, 17 bp, Arabidopsis thaliana
gggaaattacggattta

SEQ ID NO: 112733 - DNA, 17 bp, Arabidopsis thaliana
gggaaattacggatttc

SEQ ID NO: 112734 - DNA, 17 bp, Arabidopsis thaliana
gggaaattctcgtgttg

SEQ ID NO: 112735 - DNA, 17 bp, Arabidopsis thaliana
gggaaatttccattttt

SEQ ID NO: 112736 - DNA, 17 bp, Arabidopsis thaliana
gggaaattttttttttg

SEQ ID NO: 112737 - DNA, 17 bp, Arabidopsis thaliana
gggaaattttttttttt

SEQ ID NO: 112738 - DNA, 17 bp, Arabidopsis thaliana
gggaacaccaccgagta

SEQ ID NO: 112739 - DNA, 17 bp, Arabidopsis thaliana
gggaacagaaacggcga

SEQ ID NO: 112740 - DNA, 17 bp, Arabidopsis thaliana
gggaacagatgaaggaa

SEQ ID NO: 112741 - DNA, 17 bp, Arabidopsis thaliana
gggaacagatgaaggat

SEQ ID NO: 112742 - DNA, 17 bp, Arabidopsis thaliana
gggaacagcaacccatc

SEQ ID NO: 112743 - DNA, 17 bp, Arabidopsis thaliana
gggaacaggaatacact

SEQ ID NO: 112744 - DNA, 17 bp, Arabidopsis thaliana
gggaacatgggtctcag

SEQ ID NO: 112745 - DNA, 17 bp, Arabidopsis thaliana
gggaacattggtctcag

SEQ ID NO: 112746 - DNA, 17 bp, Arabidopsis thaliana
gggaacccaagcaagcg

SEQ ID NO: 112747 - DNA, 17 bp, Arabidopsis thaliana
gggaacccgctcaagga

SEQ ID NO: 112748 - DNA, 17 bp, Arabidopsis thaliana
gggaacctgatgcttct

SEQ ID NO: 112749 - DNA, 17 bp, Arabidopsis thaliana
gggaacctgtggctgga

SEQ ID NO: 112750 - DNA, 17 bp, Arabidopsis thaliana
gggaacgaggtaccccg

SEQ ID NO: 112751 - DNA, 17 bp, Arabidopsis thaliana
gggaacgcggaagcgaa

SEQ ID NO: 112752 - DNA, 17 bp, Arabidopsis thaliana
gggaacggaggtggtgg

SEQ ID NO: 112753 - DNA, 17 bp, Arabidopsis thaliana
gggaacggctctctcgg

SEQ ID NO: 112754 - DNA, 17 bp, Arabidopsis thaliana
gggaacggctctcttgg

SEQ ID NO: 112755 - DNA, 17 bp, Arabidopsis thaliana
gggaacgggttaccgac

SEQ ID NO: 112756 - DNA, 17 bp, Arabidopsis thaliana
gggaacggtctatttcc

SEQ ID NO: 112757 - DNA, 17 bp, Arabidopsis thaliana
gggaacgtctgcctggg

SEQ ID NO: 112758 - DNA, 17 bp, Arabidopsis thaliana
gggaacgtgagctgggt

SEQ ID NO: 112759 - DNA, 17 bp, Arabidopsis thaliana
gggaactatggccgagg

SEQ ID NO: 112760 - DNA, 17 bp, Arabidopsis thaliana
gggaactcaaccgcttc

SEQ ID NO: 112761 - DNA, 17 bp, Arabidopsis thaliana
gggaactcagaatcgct

SEQ ID NO: 112762 - DNA, 17 bp, Arabidopsis thaliana
gggaactcagctctttc

SEQ ID NO: 112763 - DNA, 17 bp, Arabidopsis thaliana
gggaactctgaccctcc

SEQ ID NO: 112764 - DNA, 17 bp, Arabidopsis thaliana
gggaactggactttgcc

SEQ ID NO: 112765 - DNA, 17 bp, Arabidopsis thaliana
gggaactggatcttaaa

SEQ ID NO: 112766 - DNA, 17 bp, Arabidopsis thaliana
gggaacttagtttccgt

SEQ ID NO: 112767 - DNA, 17 bp, Arabidopsis thaliana
gggaacttcgggtaatt

SEQ ID NO: 112768 - DNA, 17 bp, Arabidopsis thaliana
gggaacttctatcctac

SEQ ID NO: 112769 - DNA, 17 bp, Arabidopsis thaliana
gggaacttctgctgctt

SEQ ID NO: 112770 - DNA, 17 bp, Arabidopsis thaliana
gggaacttgctccatga

SEQ ID NO: 112771 - DNA, 17 bp, Arabidopsis thaliana
gggaactttggtccatt

SEQ ID NO: 112772 - DNA, 17 bp, Arabidopsis thaliana
gggaagaaatttcagtt

SEQ ID NO: 112773 - DNA, 17 bp, Arabidopsis thaliana
gggaagacaccatctac

SEQ ID NO: 112774 - DNA, 17 bp, Arabidopsis thaliana
gggaagacaccatctcc

SEQ ID NO: 112775 - DNA, 17 bp, Arabidopsis thaliana
gggaagacaccatcttc

SEQ ID NO: 112776 - DNA, 17 bp, Arabidopsis thaliana
gggaagacaccttcttc

SEQ ID NO: 112777 - DNA, 17 bp, Arabidopsis thaliana
gggaagacatctggcca

SEQ ID NO: 112778 - DNA, 17 bp, Arabidopsis thaliana
gggaagaccattcttag

SEQ ID NO: 112779 - DNA, 17 bp, Arabidopsis thaliana
gggaagaccttcaggtt

SEQ ID NO: 112780 - DNA, 17 bp, Arabidopsis thaliana
gggaagatctcgaaagc

SEQ ID NO: 112781 - DNA, 17 bp, Arabidopsis thaliana
gggaagatgagtggtgc

SEQ ID NO: 112782 - DNA, 17 bp, Arabidopsis thaliana
gggaagattacgggttt

SEQ ID NO: 112783 - DNA, 17 bp, Arabidopsis thaliana
gggaagcattgtgtgaa

SEQ ID NO: 112784 - DNA, 17 bp, Arabidopsis thaliana
gggaagcggatgggggc

SEQ ID NO: 112785 - DNA, 17 bp, Arabidopsis thaliana
gggaagcggatgggggg

SEQ ID NO: 112786 - DNA, 17 bp, Arabidopsis thaliana
gggaaggaatgcaagca

SEQ ID NO: 112787 - DNA, 17 bp, Arabidopsis thaliana
gggaaggacctttccct

SEQ ID NO: 112788 - DNA, 17 bp, Arabidopsis thaliana
gggaaggattacgggct

SEQ ID NO: 112789 - DNA, 17 bp, Arabidopsis thaliana
gggaagggactctcaga

SEQ ID NO: 112790 - DNA, 17 bp, Arabidopsis thaliana
gggaagggcctcacatg

SEQ ID NO: 112791 - DNA, 17 bp, Arabidopsis thaliana
gggaaggtgtggcttga

SEQ ID NO: 112792 - DNA, 17 bp, Arabidopsis thaliana
gggaaggtttggcacct

SEQ ID NO: 112793 - DNA, 17 bp, Arabidopsis thaliana
gggaagtcccatgtcta

SEQ ID NO: 112794 - DNA, 17 bp, Arabidopsis thaliana
gggaagtcctcgtgttg

SEQ ID NO: 112795 - DNA, 17 bp, Arabidopsis thaliana
gggaagtcctcgtgttt

SEQ ID NO: 112796 - DNA, 17 bp, Arabidopsis thaliana
gggaagtctgtcacttg

SEQ ID NO: 112797 - DNA, 17 bp, Arabidopsis thaliana
gggaagtctgtcagttg

SEQ ID NO: 112798 - DNA, 17 bp, Arabidopsis thaliana
gggaagtgactacatcg

SEQ ID NO: 112799 - DNA, 17 bp, Arabidopsis thaliana
gggaagtgattatggat

SEQ ID NO: 112800 - DNA, 17 bp, Arabidopsis thaliana
gggaagtgtcgtctgtc

SEQ ID NO: 112801 - DNA, 17 bp, Arabidopsis thaliana
gggaagtgtcgttctaa

SEQ ID NO: 112802 - DNA, 17 bp, Arabidopsis thaliana
gggaagttctaggtttt

SEQ ID NO: 112803 - DNA, 17 bp, Arabidopsis thaliana
gggaagttctcctgaat

SEQ ID NO: 112804 - DNA, 17 bp, Arabidopsis thaliana
gggaagttgtccttggc

SEQ ID NO: 112805 - DNA, 17 bp, Arabidopsis thaliana
gggaagtttgtcagttg

SEQ ID NO: 112806 - DNA, 17 bp, Arabidopsis thaliana
gggaagtttttctgatg

SEQ ID NO: 112807 - DNA, 17 bp, Arabidopsis thaliana
gggaatacaggttgcat

SEQ ID NO: 112808 - DNA, 17 bp, Arabidopsis thaliana
gggaatacgaaccgtga

SEQ ID NO: 112809 - DNA, 17 bp, Arabidopsis thaliana
gggaatagcagggaaac

SEQ ID NO: 112810 - DNA, 17 bp, Arabidopsis thaliana
gggaatatagctcagtt

SEQ ID NO: 112811 - DNA, 17 bp, Arabidopsis thaliana
gggaatatcaggaggtt

SEQ ID NO: 112812 - DNA, 17 bp, Arabidopsis thaliana
gggaatatccataaccc

SEQ ID NO: 112813 - DNA, 17 bp, Arabidopsis thaliana
gggaatatccattcact

SEQ ID NO: 112814 - DNA, 17 bp, Arabidopsis thaliana
gggaatatgaccagttt

SEQ ID NO: 112815 - DNA, 17 bp, Arabidopsis thaliana
gggaatatggttttgcc

SEQ ID NO: 112816 - DNA, 17 bp, Arabidopsis thaliana
gggaatatgtactcgac

SEQ ID NO: 112817 - DNA, 17 bp, Arabidopsis thaliana
gggaatatgtgtcaaaa

SEQ ID NO: 112818 - DNA, 17 bp, Arabidopsis thaliana
gggaatcaactgacgag

SEQ ID NO: 112819 - DNA, 17 bp, Arabidopsis thaliana
gggaatccggtggacca

SEQ ID NO: 112820 - DNA, 17 bp, Arabidopsis thaliana
gggaatccggttacggg

SEQ ID NO: 112821 - DNA, 17 bp, Arabidopsis thaliana
gggaatcgtgttgccgc

SEQ ID NO: 112822 - DNA, 17 bp, Arabidopsis thaliana
gggaatctacgggcacc

SEQ ID NO: 112823 - DNA, 17 bp, Arabidopsis thaliana
gggaatctacggttcaa

SEQ ID NO: 112824 - DNA, 17 bp, Arabidopsis thaliana
gggaatcttcaggaacc

SEQ ID NO: 112825 - DNA, 17 bp, Arabidopsis thaliana
gggaatgaagccaggtc

SEQ ID NO: 112826 - DNA, 17 bp, Arabidopsis thaliana
gggaatgaagcctggtc

SEQ ID NO: 112827 - DNA, 17 bp, Arabidopsis thaliana
gggaatgatcgagtaac

SEQ ID NO: 112828 - DNA, 17 bp, Arabidopsis thaliana
gggaatgcagccccaat

SEQ ID NO: 112829 - DNA, 17 bp, Arabidopsis thaliana
gggaatggctaagatca

SEQ ID NO: 112830 - DNA, 17 bp, Arabidopsis thaliana
gggaatgggctgaccac

SEQ ID NO: 112831 - DNA, 17 bp, Arabidopsis thaliana
gggaatgtagctcagat

SEQ ID NO: 112832 - DNA, 17 bp, Arabidopsis thaliana
gggaatgtctttgttca

SEQ ID NO: 112833 - DNA, 17 bp, Arabidopsis thaliana
gggaattacaggcttcg

SEQ ID NO: 112834 - DNA, 17 bp, Arabidopsis thaliana
gggaattacggcaattt

SEQ ID NO: 112835 - DNA, 17 bp, Arabidopsis thaliana
gggaattcctcgtgttg

SEQ ID NO: 112836 - DNA, 17 bp, Arabidopsis thaliana
gggaattctgtcagtta

SEQ ID NO: 112837 - DNA, 17 bp, Arabidopsis thaliana
gggaattctgtcagttg

SEQ ID NO: 112838 - DNA, 17 bp, Arabidopsis thaliana
gggaatttggtctaatg

SEQ ID NO: 112839 - DNA, 17 bp, Arabidopsis thaliana
gggacaaaaccgtttgc

SEQ ID NO: 112840 - DNA, 17 bp, Arabidopsis thaliana
gggacaaaataaccatg

SEQ ID NO: 112841 - DNA, 17 bp, Arabidopsis thaliana
gggacaaaatatgccta

SEQ ID NO: 112842 - DNA, 17 bp, Arabidopsis thaliana
gggacaaagcccgtaat

SEQ ID NO: 112843 - DNA, 17 bp, Arabidopsis thaliana
gggacaaagccgggttg

SEQ ID NO: 112844 - DNA, 17 bp, Arabidopsis thaliana
gggacaaatttgcggag

SEQ ID NO: 112845 - DNA, 17 bp, Arabidopsis thaliana
gggacaacttagctact

SEQ ID NO: 112846 - DNA, 17 bp, Arabidopsis thaliana
gggacaagctaactgag

SEQ ID NO: 112847 - DNA, 17 bp, Arabidopsis thaliana
gggacaagttaagattg

SEQ ID NO: 112848 - DNA, 17 bp, Arabidopsis thaliana
gggacaagtttagagct

SEQ ID NO: 112849 - DNA, 17 bp, Arabidopsis thaliana
gggacacaattcaccga

SEQ ID NO: 112850 - DNA, 17 bp, Arabidopsis thaliana
gggacacaggtcgttca

SEQ ID NO: 112851 - DNA, 17 bp, Arabidopsis thaliana
gggacacaggtcgttta

SEQ ID NO: 112852 - DNA, 17 bp, Arabidopsis thaliana
gggacaccacgatctcc

SEQ ID NO: 112853 - DNA, 17 bp, Arabidopsis thaliana
gggacacctccgaagac

SEQ ID NO: 112854 - DNA, 17 bp, Arabidopsis thaliana
gggacacggattgcggg

SEQ ID NO: 112855 - DNA, 17 bp, Arabidopsis thaliana
gggacacgtgccccagc

SEQ ID NO: 112856 - DNA, 17 bp, Arabidopsis thaliana
gggacagaagaaactac

SEQ ID NO: 112857 - DNA, 17 bp, Arabidopsis thaliana
gggacagacagtgtggt

SEQ ID NO: 112858 - DNA, 17 bp, Arabidopsis thaliana
gggacagacctaaatgg

SEQ ID NO: 112859 - DNA, 17 bp, Arabidopsis thaliana
gggacagacttagcggg

SEQ ID NO: 112860 - DNA, 17 bp, Arabidopsis thaliana
gggacagagcgggggta

SEQ ID NO: 112861 - DNA, 17 bp, Arabidopsis thaliana
gggacagaggagagaga

SEQ ID NO: 112862 - DNA, 17 bp, Arabidopsis thaliana
gggacagatttgacaag

SEQ ID NO: 112863 - DNA, 17 bp, Arabidopsis thaliana
gggacagatttgacagg

SEQ ID NO: 112864 - DNA, 17 bp, Arabidopsis thaliana
gggacagatttggcgag

SEQ ID NO: 112865 - DNA, 17 bp, Arabidopsis thaliana
gggacagccagccgaga

SEQ ID NO: 112866 - DNA, 17 bp, Arabidopsis thaliana
gggacagcctaggcgga

SEQ ID NO: 112867 - DNA, 17 bp, Arabidopsis thaliana
gggacagcgctctgacg

SEQ ID NO: 112868 - DNA, 17 bp, Arabidopsis thaliana
gggacaggaggagtgta

SEQ ID NO: 112869 - DNA, 17 bp, Arabidopsis thaliana
gggacaggattggtggg

SEQ ID NO: 112870 - DNA, 17 bp, Arabidopsis thaliana
gggacaggccgatcgtc

SEQ ID NO: 112871 - DNA, 17 bp, Arabidopsis thaliana
gggacaggttggcggga

SEQ ID NO: 112872 - DNA, 17 bp, Arabidopsis thaliana
gggacaggtttgacgga

SEQ ID NO: 112873 - DNA, 17 bp, Arabidopsis thaliana
gggacaggtttggattg

SEQ ID NO: 112874 - DNA, 17 bp, Arabidopsis thaliana
gggacaggtttggcagg

SEQ ID NO: 112875 - DNA, 17 bp, Arabidopsis thaliana
gggacaggtttggcggg

SEQ ID NO: 112876 - DNA, 17 bp, Arabidopsis thaliana
gggacagtcatcttctt

SEQ ID NO: 112877 - DNA, 17 bp, Arabidopsis thaliana
gggacagtcgggggcag

SEQ ID NO: 112878 - DNA, 17 bp, Arabidopsis thaliana
gggacagtcgggggcat

SEQ ID NO: 112879 - DNA, 17 bp, Arabidopsis thaliana
gggacagtctcaggtag

SEQ ID NO: 112880 - DNA, 17 bp, Arabidopsis thaliana
gggacagtctgatttct

SEQ ID NO: 112881 - DNA, 17 bp, Arabidopsis thaliana
gggacagtgacgtttaa

SEQ ID NO: 112882 - DNA, 17 bp, Arabidopsis thaliana
gggacagtgacgtttag

SEQ ID NO: 112883 - DNA, 17 bp, Arabidopsis thaliana
gggacatacagtgtggt

SEQ ID NO: 112884 - DNA, 17 bp, Arabidopsis thaliana
gggacatatggattgtg

SEQ ID NO: 112885 - DNA, 17 bp, Arabidopsis thaliana
gggacatctggattgtg

SEQ ID NO: 112886 - DNA, 17 bp, Arabidopsis thaliana
gggacatcttcctcagg

SEQ ID NO: 112887 - DNA, 17 bp, Arabidopsis thaliana
gggacatgattacctgt

SEQ ID NO: 112888 - DNA, 17 bp, Arabidopsis thaliana
gggacatgccttattca

SEQ ID NO: 112889 - DNA, 17 bp, Arabidopsis thaliana
gggacatgctgtggttt

SEQ ID NO: 112890 - DNA, 17 bp, Arabidopsis thaliana
gggacatgtcgagttgg

SEQ ID NO: 112891 - DNA, 17 bp, Arabidopsis thaliana
gggacatgtttggcggg

SEQ ID NO: 112892 - DNA, 17 bp, Arabidopsis thaliana
gggacattccaagcgat

SEQ ID NO: 112893 - DNA, 17 bp, Arabidopsis thaliana
gggacattctaagcgat

SEQ ID NO: 112894 - DNA, 17 bp, Arabidopsis thaliana
gggaccaaaaacagggg

SEQ ID NO: 112895 - DNA, 17 bp, Arabidopsis thaliana
gggaccaaaattatctt

SEQ ID NO: 112896 - DNA, 17 bp, Arabidopsis thaliana
gggaccaaagccaccaa

SEQ ID NO: 112897 - DNA, 17 bp, Arabidopsis thaliana
gggaccaaagccaccac

SEQ ID NO: 112898 - DNA, 17 bp, Arabidopsis thaliana
gggaccaaagccaccat

SEQ ID NO: 112899 - DNA, 17 bp, Arabidopsis thaliana
gggaccacccatttgag

SEQ ID NO: 112900 - DNA, 17 bp, Arabidopsis thaliana
gggaccagaacggtggt

SEQ ID NO: 112901 - DNA, 17 bp, Arabidopsis thaliana
gggaccagaccagaagc

SEQ ID NO: 112902 - DNA, 17 bp, Arabidopsis thaliana
gggaccaggtgtttcgg

SEQ ID NO: 112903 - DNA, 17 bp, Arabidopsis thaliana
gggacccaaaagatggt

SEQ ID NO: 112904 - DNA, 17 bp, Arabidopsis thaliana
gggacccaccgctgacg

SEQ ID NO: 112905 - DNA, 17 bp, Arabidopsis thaliana
gggacccacgcggatta

SEQ ID NO: 112906 - DNA, 17 bp, Arabidopsis thaliana
gggacccacggagaatg

SEQ ID NO: 112907 - DNA, 17 bp, Arabidopsis thaliana
gggacccacggcaaatg

SEQ ID NO: 112908 - DNA, 17 bp, Arabidopsis thaliana
gggacccacggcgaacg

SEQ ID NO: 112909 - DNA, 17 bp, Arabidopsis thaliana
gggacccacggcgaatc

SEQ ID NO: 112910 - DNA, 17 bp, Arabidopsis thaliana
gggacccacggcgaatg

SEQ ID NO: 112911 - DNA, 17 bp, Arabidopsis thaliana
gggacccacggcgaatt

SEQ ID NO: 112912 - DNA, 17 bp, Arabidopsis thaliana
gggacccacggcgattg

SEQ ID NO: 112913 - DNA, 17 bp, Arabidopsis thaliana
gggacccacggtgaacg

SEQ ID NO: 112914 - DNA, 17 bp, Arabidopsis thaliana
gggacccactgctgcag

SEQ ID NO: 112915 - DNA, 17 bp, Arabidopsis thaliana
gggacccagatgtctga

SEQ ID NO: 112916 - DNA, 17 bp, Arabidopsis thaliana
gggacccagggagagag

SEQ ID NO: 112917 - DNA, 17 bp, Arabidopsis thaliana
gggacccagggcgaacg

SEQ ID NO: 112918 - DNA, 17 bp, Arabidopsis thaliana
gggacccccacttacct

SEQ ID NO: 112919 - DNA, 17 bp, Arabidopsis thaliana
gggacccgaaagatggt

SEQ ID NO: 112920 - DNA, 17 bp, Arabidopsis thaliana
gggacccgaaggatggt

SEQ ID NO: 112921 - DNA, 17 bp, Arabidopsis thaliana
gggacccgccgctgacg

SEQ ID NO: 112922 - DNA, 17 bp, Arabidopsis thaliana
gggacccgcgtacgagt

SEQ ID NO: 112923 - DNA, 17 bp, Arabidopsis thaliana
gggacccggtgcaccag

SEQ ID NO: 112924 - DNA, 17 bp, Arabidopsis thaliana
gggacccggtgcactag

SEQ ID NO: 112925 - DNA, 17 bp, Arabidopsis thaliana
gggacccggtgcagtag

SEQ ID NO: 112926 - DNA, 17 bp, Arabidopsis thaliana
gggacccggtgctctgg

SEQ ID NO: 112927 - DNA, 17 bp, Arabidopsis thaliana
gggaccctacaggttcg

SEQ ID NO: 112928 - DNA, 17 bp, Arabidopsis thaliana
gggaccgaggatggtgt

SEQ ID NO: 112929 - DNA, 17 bp, Arabidopsis thaliana
gggaccggacctaatat

SEQ ID NO: 112930 - DNA, 17 bp, Arabidopsis thaliana
gggaccggattgctccg

SEQ ID NO: 112931 - DNA, 17 bp, Arabidopsis thaliana
gggaccggccctgtata

SEQ ID NO: 112932 - DNA, 17 bp, Arabidopsis thaliana
gggaccgggacgtcggg

SEQ ID NO: 112933 - DNA, 17 bp, Arabidopsis thaliana
gggaccggtcaccaact

SEQ ID NO: 112934 - DNA, 17 bp, Arabidopsis thaliana
gggaccggtgccgccgt

SEQ ID NO: 112935 - DNA, 17 bp, Arabidopsis thaliana
gggaccggttggaaaag

SEQ ID NO: 112936 - DNA, 17 bp, Arabidopsis thaliana
gggaccggtttggcagg

SEQ ID NO: 112937 - DNA, 17 bp, Arabidopsis thaliana
gggaccgtgggtatctg

SEQ ID NO: 112938 - DNA, 17 bp, Arabidopsis thaliana
gggaccgttgcagcagc

SEQ ID NO: 112939 - DNA, 17 bp, Arabidopsis thaliana
gggaccgttttctatgg

SEQ ID NO: 112940 - DNA, 17 bp, Arabidopsis thaliana
gggacctccaataggta

SEQ ID NO: 112941 - DNA, 17 bp, Arabidopsis thaliana
gggacctccttttttct

SEQ ID NO: 112942 - DNA, 17 bp, Arabidopsis thaliana
gggacctcttccgagac

SEQ ID NO: 112943 - DNA, 17 bp, Arabidopsis thaliana
gggacctgcggaaggat

SEQ ID NO: 112944 - DNA, 17 bp, Arabidopsis thaliana
gggacctgcgtacgagt

SEQ ID NO: 112945 - DNA, 17 bp, Arabidopsis thaliana
gggacctgggctcgtat

SEQ ID NO: 112946 - DNA, 17 bp, Arabidopsis thaliana
gggaccttagctcagtt

SEQ ID NO: 112947 - DNA, 17 bp, Arabidopsis thaliana
gggacgaaactcatagc

SEQ ID NO: 112948 - DNA, 17 bp, Arabidopsis thaliana
gggacgaaagtcggcct

SEQ ID NO: 112949 - DNA, 17 bp, Arabidopsis thaliana
gggacgaacctaaatgg

SEQ ID NO: 112950 - DNA, 17 bp, Arabidopsis thaliana
gggacgaagcccgtaat

SEQ ID NO: 112951 - DNA, 17 bp, Arabidopsis thaliana
gggacgaatttggcagg

SEQ ID NO: 112952 - DNA, 17 bp, Arabidopsis thaliana
gggacgacgatttgtga

SEQ ID NO: 112953 - DNA, 17 bp, Arabidopsis thaliana
gggacgacggggctctc

SEQ ID NO: 112954 - DNA, 17 bp, Arabidopsis thaliana
gggacgactctcggcaa

SEQ ID NO: 112955 - DNA, 17 bp, Arabidopsis thaliana
gggacgagacccttaat

SEQ ID NO: 112956 - DNA, 17 bp, Arabidopsis thaliana
gggacgagcttctgcaa

SEQ ID NO: 112957 - DNA, 17 bp, Arabidopsis thaliana
gggacgaggtgttcggg

SEQ ID NO: 112958 - DNA, 17 bp, Arabidopsis thaliana
gggacgaggttaaaatg

SEQ ID NO: 112959 - DNA, 17 bp, Arabidopsis thaliana
gggacgagttggaagat

SEQ ID NO: 112960 - DNA, 17 bp, Arabidopsis thaliana
gggacgagttggcagga

SEQ ID NO: 112961 - DNA, 17 bp, Arabidopsis thaliana
gggacgagtttagcagg

SEQ ID NO: 112962 - DNA, 17 bp, Arabidopsis thaliana
gggacgagtttgcagga

SEQ ID NO: 112963 - DNA, 17 bp, Arabidopsis thaliana
gggacgagtttggcaag

SEQ ID NO: 112964 - DNA, 17 bp, Arabidopsis thaliana
gggacgagtttggcaga

SEQ ID NO: 112965 - DNA, 17 bp, Arabidopsis thaliana
gggacgagtttggcagg

SEQ ID NO: 112966 - DNA, 17 bp, Arabidopsis thaliana
gggacgagtttggcgga

SEQ ID NO: 112967 - DNA, 17 bp, Arabidopsis thaliana
gggacgagtttggcggg

SEQ ID NO: 112968 - DNA, 17 bp, Arabidopsis thaliana
gggacgagtttggctgg

SEQ ID NO: 112969 - DNA, 17 bp, Arabidopsis thaliana
gggacgatattttgtgg

SEQ ID NO: 112970 - DNA, 17 bp, Arabidopsis thaliana
gggacgattctcacttc

SEQ ID NO: 112971 - DNA, 17 bp, Arabidopsis thaliana
gggacgatttaatcttg

SEQ ID NO: 112972 - DNA, 17 bp, Arabidopsis thaliana
gggacgcacgcagtggg

SEQ ID NO: 112973 - DNA, 17 bp, Arabidopsis thaliana
gggacgcggatgactct

SEQ ID NO: 112974 - DNA, 17 bp, Arabidopsis thaliana
gggacgcggattacggt

SEQ ID NO: 112975 - DNA, 17 bp, Arabidopsis thaliana
gggacggacctaaatag

SEQ ID NO: 112976 - DNA, 17 bp, Arabidopsis thaliana
gggacggacctaaatgg

SEQ ID NO: 112977 - DNA, 17 bp, Arabidopsis thaliana
gggacggactgagaacg

SEQ ID NO: 112978 - DNA, 17 bp, Arabidopsis thaliana
gggacggactgcgaacg

SEQ ID NO: 112979 - DNA, 17 bp, Arabidopsis thaliana
gggacggactgcgagcg

SEQ ID NO: 112980 - DNA, 17 bp, Arabidopsis thaliana
gggacggactggcaacg

SEQ ID NO: 112981 - DNA, 17 bp, Arabidopsis thaliana
gggacggactgggaaag

SEQ ID NO: 112982 - DNA, 17 bp, Arabidopsis thaliana
gggacggactgggaacc

SEQ ID NO: 112983 - DNA, 17 bp, Arabidopsis thaliana
gggacggactgggaacg

SEQ ID NO: 112984 - DNA, 17 bp, Arabidopsis thaliana
gggacggactgggaagg

SEQ ID NO: 112985 - DNA, 17 bp, Arabidopsis thaliana
gggacggactgggagcg

SEQ ID NO: 112986 - DNA, 17 bp, Arabidopsis thaliana
gggacggactgggaggg

SEQ ID NO: 112987 - DNA, 17 bp, Arabidopsis thaliana
gggacggactgggatcc

SEQ ID NO: 112988 - DNA, 17 bp, Arabidopsis thaliana
gggacggactggtaacg

SEQ ID NO: 112989 - DNA, 17 bp, Arabidopsis thaliana
gggacggatcgggaacg

SEQ ID NO: 112990 - DNA, 17 bp, Arabidopsis thaliana
gggacggattggcggga

SEQ ID NO: 112991 - DNA, 17 bp, Arabidopsis thaliana
gggacggattgggaacg

SEQ ID NO: 112992 - DNA, 17 bp, Arabidopsis thaliana
gggacggatttgacagg

SEQ ID NO: 112993 - DNA, 17 bp, Arabidopsis thaliana
gggacggatttggcaag

SEQ ID NO: 112994 - DNA, 17 bp, Arabidopsis thaliana
gggacggatttggcagg

SEQ ID NO: 112995 - DNA, 17 bp, Arabidopsis thaliana
gggacggatttggcgag

SEQ ID NO: 112996 - DNA, 17 bp, Arabidopsis thaliana
gggacggatttggcggg

SEQ ID NO: 112997 - DNA, 17 bp, Arabidopsis thaliana
gggacggatttggtagg

SEQ ID NO: 112998 - DNA, 17 bp, Arabidopsis thaliana
gggacggcaaacgaacg

SEQ ID NO: 112999 - DNA, 17 bp, Arabidopsis thaliana
gggacggcgagatcatg

SEQ ID NO: 113000 - DNA, 17 bp, Arabidopsis thaliana
gggacgggcttggcagg

SEQ ID NO: 113001 - DNA, 17 bp, Arabidopsis thaliana
gggacggggcaggaagc

SEQ ID NO: 113002 - DNA, 17 bp, Arabidopsis thaliana
gggacggggtgcttagt

SEQ ID NO: 113003 - DNA, 17 bp, Arabidopsis thaliana
gggacggggtgcttggt

SEQ ID NO: 113004 - DNA, 17 bp, Arabidopsis thaliana
gggacgggtctggcaga

SEQ ID NO: 113005 - DNA, 17 bp, Arabidopsis thaliana
gggacgggttcggcagg

SEQ ID NO: 113006 - DNA, 17 bp, Arabidopsis thaliana
gggacgggttgacggga

SEQ ID NO: 113007 - DNA, 17 bp, Arabidopsis thaliana
gggacgggttggcagga

SEQ ID NO: 113008 - DNA, 17 bp, Arabidopsis thaliana
gggacgggttggcgaga

SEQ ID NO: 113009 - DNA, 17 bp, Arabidopsis thaliana
gggacgggttggcggga

SEQ ID NO: 113010 - DNA, 17 bp, Arabidopsis thaliana
gggacgggttggcgtga

SEQ ID NO: 113011 - DNA, 17 bp, Arabidopsis thaliana
gggacgggtttagcaaa

SEQ ID NO: 113012 - DNA, 17 bp, Arabidopsis thaliana
gggacgggtttagcaag

SEQ ID NO: 113013 - DNA, 17 bp, Arabidopsis thaliana
gggacgggtttagcaga

SEQ ID NO: 113014 - DNA, 17 bp, Arabidopsis thaliana
gggacgggtttagcagg

SEQ ID NO: 113015 - DNA, 17 bp, Arabidopsis thaliana
gggacgggtttaggggg

SEQ ID NO: 113016 - DNA, 17 bp, Arabidopsis thaliana
gggacgggtttcaagcg

SEQ ID NO: 113017 - DNA, 17 bp, Arabidopsis thaliana
gggacgggtttcgcagg

SEQ ID NO: 113018 - DNA, 17 bp, Arabidopsis thaliana
gggacgggtttcgggac

SEQ ID NO: 113019 - DNA, 17 bp, Arabidopsis thaliana
gggacgggtttgacaag

SEQ ID NO: 113020 - DNA, 17 bp, Arabidopsis thaliana
gggacgggtttgacagg

SEQ ID NO: 113021 - DNA, 17 bp, Arabidopsis thaliana
gggacgggtttgacgga

SEQ ID NO: 113022 - DNA, 17 bp, Arabidopsis thaliana
gggacgggtttgatagg

SEQ ID NO: 113023 - DNA, 17 bp, Arabidopsis thaliana
gggacgggtttgccagg

SEQ ID NO: 113024 - DNA, 17 bp, Arabidopsis thaliana
gggacgggtttggacgt

SEQ ID NO: 113025 - DNA, 17 bp, Arabidopsis thaliana
gggacgggtttggcaag

SEQ ID NO: 113026 - DNA, 17 bp, Arabidopsis thaliana
gggacgggtttggcaga

SEQ ID NO: 113027 - DNA, 17 bp, Arabidopsis thaliana
gggacgggtttggcagc

SEQ ID NO: 113028 - DNA, 17 bp, Arabidopsis thaliana
gggacgggtttggcagg

SEQ ID NO: 113029 - DNA, 17 bp, Arabidopsis thaliana
gggacgggtttggcagt

SEQ ID NO: 113030 - DNA, 17 bp, Arabidopsis thaliana
gggacgggtttggcatg

SEQ ID NO: 113031 - DNA, 17 bp, Arabidopsis thaliana
gggacgggtttggcgga

SEQ ID NO: 113032 - DNA, 17 bp, Arabidopsis thaliana
gggacgggtttggcggg

SEQ ID NO: 113033 - DNA, 17 bp, Arabidopsis thaliana
gggacgggtttggctgg

SEQ ID NO: 113034 - DNA, 17 bp, Arabidopsis thaliana
gggacgggtttgggagg

SEQ ID NO: 113035 - DNA, 17 bp, Arabidopsis thaliana
gggacgggtttgggggg

SEQ ID NO: 113036 - DNA, 17 bp, Arabidopsis thaliana
gggacgggtttggtagg

SEQ ID NO: 113037 - DNA, 17 bp, Arabidopsis thaliana
gggacgggtttgtcaag

SEQ ID NO: 113038 - DNA, 17 bp, Arabidopsis thaliana
gggacgggtttgtcagg

SEQ ID NO: 113039 - DNA, 17 bp, Arabidopsis thaliana
gggacgggttttgcagg

SEQ ID NO: 113040 - DNA, 17 bp, Arabidopsis thaliana
gggacgggttttgcggg

SEQ ID NO: 113041 - DNA, 17 bp, Arabidopsis thaliana
gggacgggttttggcag

SEQ ID NO: 113042 - DNA, 17 bp, Arabidopsis thaliana
gggactaaagccaccat

SEQ ID NO: 113043 - DNA, 17 bp, Arabidopsis thaliana
gggactacaaattctgg

SEQ ID NO: 113044 - DNA, 17 bp, Arabidopsis thaliana
gggactacaggattcgg

SEQ ID NO: 113045 - DNA, 17 bp, Arabidopsis thaliana
gggactaggttcaaggc

SEQ ID NO: 113046 - DNA, 17 bp, Arabidopsis thaliana
gggactatgaccgttta

SEQ ID NO: 113047 - DNA, 17 bp, Arabidopsis thaliana
gggactatgcgttcgag

SEQ ID NO: 113048 - DNA, 17 bp, Arabidopsis thaliana
gggactatggccgttta

SEQ ID NO: 113049 - DNA, 17 bp, Arabidopsis thaliana
gggactatggccgtttg

SEQ ID NO: 113050 - DNA, 17 bp, Arabidopsis thaliana
gggactattcatgttgt

SEQ ID NO: 113051 - DNA, 17 bp, Arabidopsis thaliana
gggactatttttgtctc

SEQ ID NO: 113052 - DNA, 17 bp, Arabidopsis thaliana
gggactcagatcccctc

SEQ ID NO: 113053 - DNA, 17 bp, Arabidopsis thaliana
gggactcatctttccgg

SEQ ID NO: 113054 - DNA, 17 bp, Arabidopsis thaliana
gggactcatttgagggg

SEQ ID NO: 113055 - DNA, 17 bp, Arabidopsis thaliana
gggactccaaatgtggt

SEQ ID NO: 113056 - DNA, 17 bp, Arabidopsis thaliana
gggactccgtcacagag

SEQ ID NO: 113057 - DNA, 17 bp, Arabidopsis thaliana
gggactcgttcatcctc

SEQ ID NO: 113058 - DNA, 17 bp, Arabidopsis thaliana
gggactctttcattgat

SEQ ID NO: 113059 - DNA, 17 bp, Arabidopsis thaliana
gggactgaagtctcgaa

SEQ ID NO: 113060 - DNA, 17 bp, Arabidopsis thaliana
gggactgacaaggctcg

SEQ ID NO: 113061 - DNA, 17 bp, Arabidopsis thaliana
gggactgaccggatcag

SEQ ID NO: 113062 - DNA, 17 bp, Arabidopsis thaliana
gggactgagacacggac

SEQ ID NO: 113063 - DNA, 17 bp, Arabidopsis thaliana
gggactgagacacggcc

SEQ ID NO: 113064 - DNA, 17 bp, Arabidopsis thaliana
gggactgagcggatcaa

SEQ ID NO: 113065 - DNA, 17 bp, Arabidopsis thaliana
gggactgagcggatcag

SEQ ID NO: 113066 - DNA, 17 bp, Arabidopsis thaliana
gggactgatctctccgc

SEQ ID NO: 113067 - DNA, 17 bp, Arabidopsis thaliana
gggactgatgtttattt

SEQ ID NO: 113068 - DNA, 17 bp, Arabidopsis thaliana
gggactgatttcaccgc

SEQ ID NO: 113069 - DNA, 17 bp, Arabidopsis thaliana
gggactgcctcttcttt

SEQ ID NO: 113070 - DNA, 17 bp, Arabidopsis thaliana
gggactgctccgccgac

SEQ ID NO: 113071 - DNA, 17 bp, Arabidopsis thaliana
gggactggacatccacg

SEQ ID NO: 113072 - DNA, 17 bp, Arabidopsis thaliana
gggactgtgccggtcga

SEQ ID NO: 113073 - DNA, 17 bp, Arabidopsis thaliana
gggactgttgtctggct

SEQ ID NO: 113074 - DNA, 17 bp, Arabidopsis thaliana
gggactgtttgtttctg

SEQ ID NO: 113075 - DNA, 17 bp, Arabidopsis thaliana
gggacttacctttagca

SEQ ID NO: 113076 - DNA, 17 bp, Arabidopsis thaliana
gggacttacttacaatt

SEQ ID NO: 113077 - DNA, 17 bp, Arabidopsis thaliana
gggacttagttacaatg

SEQ ID NO: 113078 - DNA, 17 bp, Arabidopsis thaliana
gggacttattcacaatg

SEQ ID NO: 113079 - DNA, 17 bp, Arabidopsis thaliana
gggacttatttacaatg

SEQ ID NO: 113080 - DNA, 17 bp, Arabidopsis thaliana
gggacttatttacagcg

SEQ ID NO: 113081 - DNA, 17 bp, Arabidopsis thaliana
gggacttatttacagtg

SEQ ID NO: 113082 - DNA, 17 bp, Arabidopsis thaliana
gggacttatttacattg

SEQ ID NO: 113083 - DNA, 17 bp, Arabidopsis thaliana
gggacttatttacgatg

SEQ ID NO: 113084 - DNA, 17 bp, Arabidopsis thaliana
gggacttatttttacaa

SEQ ID NO: 113085 - DNA, 17 bp, Arabidopsis thaliana
gggacttcccctggggg

SEQ ID NO: 113086 - DNA, 17 bp, Arabidopsis thaliana
gggacttcgaccgaatt

SEQ ID NO: 113087 - DNA, 17 bp, Arabidopsis thaliana
gggacttcgaccggatt

SEQ ID NO: 113088 - DNA, 17 bp, Arabidopsis thaliana
gggacttcgccaaacta

SEQ ID NO: 113089 - DNA, 17 bp, Arabidopsis thaliana
gggacttcgcttgttga

SEQ ID NO: 113090 - DNA, 17 bp, Arabidopsis thaliana
gggacttcggaggacca

SEQ ID NO: 113091 - DNA, 17 bp, Arabidopsis thaliana
gggacttgaccactcat

SEQ ID NO: 113092 - DNA, 17 bp, Arabidopsis thaliana
gggacttgcggtcagac

SEQ ID NO: 113093 - DNA, 17 bp, Arabidopsis thaliana
gggacttgcgtggggcc

SEQ ID NO: 113094 - DNA, 17 bp, Arabidopsis thaliana
gggacttgtgctgataa

SEQ ID NO: 113095 - DNA, 17 bp, Arabidopsis thaliana
gggactttgcttctctg

SEQ ID NO: 113096 - DNA, 17 bp, Arabidopsis thaliana
gggagaaatgcggtgcg

SEQ ID NO: 113097 - DNA, 17 bp, Arabidopsis thaliana
gggagaaatgtggtgcg

SEQ ID NO: 113098 - DNA, 17 bp, Arabidopsis thaliana
gggagaagagacgatca

SEQ ID NO: 113099 - DNA, 17 bp, Arabidopsis thaliana
gggagaagagatcgttc

SEQ ID NO: 113100 - DNA, 17 bp, Arabidopsis thaliana
gggagaagatcctgagg

SEQ ID NO: 113101 - DNA, 17 bp, Arabidopsis thaliana
gggagaagatgaagaaa

SEQ ID NO: 113102 - DNA, 17 bp, Arabidopsis thaliana
gggagaagcagggcacg

SEQ ID NO: 113103 - DNA, 17 bp, Arabidopsis thaliana
gggagaaggggtgcctc

SEQ ID NO: 113104 - DNA, 17 bp, Arabidopsis thaliana
gggagaagtgactctgt

SEQ ID NO: 113105 - DNA, 17 bp, Arabidopsis thaliana
gggagaagtgccactgc

SEQ ID NO: 113106 - DNA, 17 bp, Arabidopsis thaliana
gggagaagtgcgatacg

SEQ ID NO: 113107 - DNA, 17 bp, Arabidopsis thaliana
gggagaagtgcggtgca

SEQ ID NO: 113108 - DNA, 17 bp, Arabidopsis thaliana
gggagaagtgcggtgcg

SEQ ID NO: 113109 - DNA, 17 bp, Arabidopsis thaliana
gggagaagtgcggtggg

SEQ ID NO: 113110 - DNA, 17 bp, Arabidopsis thaliana
gggagaatccaggctat

SEQ ID NO: 113111 - DNA, 17 bp, Arabidopsis thaliana
gggagaatccttatcct

SEQ ID NO: 113112 - DNA, 17 bp, Arabidopsis thaliana
gggagaatgtaccatat

SEQ ID NO: 113113 - DNA, 17 bp, Arabidopsis thaliana
gggagaatgtagtgacc

SEQ ID NO: 113114 - DNA, 17 bp, Arabidopsis thaliana
gggagacaagcggagaa

SEQ ID NO: 113115 - DNA, 17 bp, Arabidopsis thaliana
gggagacacaggtcgtt

SEQ ID NO: 113116 - DNA, 17 bp, Arabidopsis thaliana
gggagacactgggggag

SEQ ID NO: 113117 - DNA, 17 bp, Arabidopsis thaliana
gggagacatttatctat

SEQ ID NO: 113118 - DNA, 17 bp, Arabidopsis thaliana
gggagaccaacttacca

SEQ ID NO: 113119 - DNA, 17 bp, Arabidopsis thaliana
gggagaccaaggataga

SEQ ID NO: 113120 - DNA, 17 bp, Arabidopsis thaliana
gggagaccaaggtttgg

SEQ ID NO: 113121 - DNA, 17 bp, Arabidopsis thaliana
gggagacccgctttcac

SEQ ID NO: 113122 - DNA, 17 bp, Arabidopsis thaliana
gggagaccctaggtcat

SEQ ID NO: 113123 - DNA, 17 bp, Arabidopsis thaliana
gggagacctgtgtctct

SEQ ID NO: 113124 - DNA, 17 bp, Arabidopsis thaliana
gggagacctttgagacc

SEQ ID NO: 113125 - DNA, 17 bp, Arabidopsis thaliana
gggagacggcgcctttc

SEQ ID NO: 113126 - DNA, 17 bp, Arabidopsis thaliana
gggagacgggtgtgaca

SEQ ID NO: 113127 - DNA, 17 bp, Arabidopsis thaliana
gggagactcggagacag

SEQ ID NO: 113128 - DNA, 17 bp, Arabidopsis thaliana
gggagactcggagattg

SEQ ID NO: 113129 - DNA, 17 bp, Arabidopsis thaliana
gggagactttcaagatt

SEQ ID NO: 113130 - DNA, 17 bp, Arabidopsis thaliana
gggagagaacatgtaca

SEQ ID NO: 113131 - DNA, 17 bp, Arabidopsis thaliana
gggagagagagcgtcgt

SEQ ID NO: 113132 - DNA, 17 bp, Arabidopsis thaliana
gggagagatacggcgac

SEQ ID NO: 113133 - DNA, 17 bp, Arabidopsis thaliana
gggagagcagagcgatg

SEQ ID NO: 113134 - DNA, 17 bp, Arabidopsis thaliana
gggagagctgacgagct

SEQ ID NO: 113135 - DNA, 17 bp, Arabidopsis thaliana
gggagagcttgaagtca

SEQ ID NO: 113136 - DNA, 17 bp, Arabidopsis thaliana
gggagaggcagggcacg

SEQ ID NO: 113137 - DNA, 17 bp, Arabidopsis thaliana
gggagagggtgagatga

SEQ ID NO: 113138 - DNA, 17 bp, Arabidopsis thaliana
gggagatactcttggct

SEQ ID NO: 113139 - DNA, 17 bp, Arabidopsis thaliana
gggagatattggtgcgg

SEQ ID NO: 113140 - DNA, 17 bp, Arabidopsis thaliana
gggagatcacaaaacac

SEQ ID NO: 113141 - DNA, 17 bp, Arabidopsis thaliana
gggagatcacaagacac

SEQ ID NO: 113142 - DNA, 17 bp, Arabidopsis thaliana
gggagatccgagcggag

SEQ ID NO: 113143 - DNA, 17 bp, Arabidopsis thaliana
gggagatcggatgttaa

SEQ ID NO: 113144 - DNA, 17 bp, Arabidopsis thaliana
gggagatctacatagat

SEQ ID NO: 113145 - DNA, 17 bp, Arabidopsis thaliana
gggagatctacatatcc

SEQ ID NO: 113146 - DNA, 17 bp, Arabidopsis thaliana
gggagatctaccctgat

SEQ ID NO: 113147 - DNA, 17 bp, Arabidopsis thaliana
gggagatctggaggcag

SEQ ID NO: 113148 - DNA, 17 bp, Arabidopsis thaliana
gggagatgaaacagcag

SEQ ID NO: 113149 - DNA, 17 bp, Arabidopsis thaliana
gggagatggacccacac

SEQ ID NO: 113150 - DNA, 17 bp, Arabidopsis thaliana
gggagatgtttcatcct

SEQ ID NO: 113151 - DNA, 17 bp, Arabidopsis thaliana
gggagattacgggcttt

SEQ ID NO: 113152 - DNA, 17 bp, Arabidopsis thaliana
gggagattacgggtttc

SEQ ID NO: 113153 - DNA, 17 bp, Arabidopsis thaliana
gggagattcagcttttt

SEQ ID NO: 113154 - DNA, 17 bp, Arabidopsis thaliana
gggagattgtgggttcg

SEQ ID NO: 113155 - DNA, 17 bp, Arabidopsis thaliana
gggagatttaccactgg

SEQ ID NO: 113156 - DNA, 17 bp, Arabidopsis thaliana
gggagatttaccattgg

SEQ ID NO: 113157 - DNA, 17 bp, Arabidopsis thaliana
gggagatttacgactgg

SEQ ID NO: 113158 - DNA, 17 bp, Arabidopsis thaliana
gggagatttatcaatgg

SEQ ID NO: 113159 - DNA, 17 bp, Arabidopsis thaliana
gggagatttatcactga

SEQ ID NO: 113160 - DNA, 17 bp, Arabidopsis thaliana
gggagatttatcactgg

SEQ ID NO: 113161 - DNA, 17 bp, Arabidopsis thaliana
gggagatttccgacagg

SEQ ID NO: 113162 - DNA, 17 bp, Arabidopsis thaliana
gggagcaaccaaactac

SEQ ID NO: 113163 - DNA, 17 bp, Arabidopsis thaliana
gggagcccacaggccgg

SEQ ID NO: 113164 - DNA, 17 bp, Arabidopsis thaliana
gggagccggatcgcttt

SEQ ID NO: 113165 - DNA, 17 bp, Arabidopsis thaliana
gggagccggatttttcg

SEQ ID NO: 113166 - DNA, 17 bp, Arabidopsis thaliana
gggagccgtcgaccgaa

SEQ ID NO: 113167 - DNA, 17 bp, Arabidopsis thaliana
gggaggacaggttggtt

SEQ ID NO: 113168 - DNA, 17 bp, Arabidopsis thaliana
gggaggactccaagtgt

SEQ ID NO: 113169 - DNA, 17 bp, Arabidopsis thaliana
gggaggactgtattccg

SEQ ID NO: 113170 - DNA, 17 bp, Arabidopsis thaliana
gggaggactgtattgcg

SEQ ID NO: 113171 - DNA, 17 bp, Arabidopsis thaliana
gggaggagctgacatca

SEQ ID NO: 113172 - DNA, 17 bp, Arabidopsis thaliana
gggaggagctgctgcgg

SEQ ID NO: 113173 - DNA, 17 bp, Arabidopsis thaliana
gggaggagtgcggtgcg

SEQ ID NO: 113174 - DNA, 17 bp, Arabidopsis thaliana
gggaggatctcatcatc

SEQ ID NO: 113175 - DNA, 17 bp, Arabidopsis thaliana
gggaggattacgggtta

SEQ ID NO: 113176 - DNA, 17 bp, Arabidopsis thaliana
gggaggattacgggttt

SEQ ID NO: 113177 - DNA, 17 bp, Arabidopsis thaliana
gggaggattttgctcgt

SEQ ID NO: 113178 - DNA, 17 bp, Arabidopsis thaliana
gggaggccaaccgtctt

SEQ ID NO: 113179 - DNA, 17 bp, Arabidopsis thaliana
gggaggcgaatgccagc

SEQ ID NO: 113180 - DNA, 17 bp, Arabidopsis thaliana
gggagggaagcggatgg

SEQ ID NO: 113181 - DNA, 17 bp, Arabidopsis thaliana
gggagggacgggtttgg

SEQ ID NO: 113182 - DNA, 17 bp, Arabidopsis thaliana
gggagggatctcgtggt

SEQ ID NO: 113183 - DNA, 17 bp, Arabidopsis thaliana
gggagggcacgtctgcc

SEQ ID NO: 113184 - DNA, 17 bp, Arabidopsis thaliana
gggaggggtttgacagg

SEQ ID NO: 113185 - DNA, 17 bp, Arabidopsis thaliana
gggaggggtttggcagg

SEQ ID NO: 113186 - DNA, 17 bp, Arabidopsis thaliana
gggagggtctcaggtga

SEQ ID NO: 113187 - DNA, 17 bp, Arabidopsis thaliana
gggaggtcacaagtagg

SEQ ID NO: 113188 - DNA, 17 bp, Arabidopsis thaliana
gggaggtcacccatcct

SEQ ID NO: 113189 - DNA, 17 bp, Arabidopsis thaliana
gggaggtcacccatcgt

SEQ ID NO: 113190 - DNA, 17 bp, Arabidopsis thaliana
gggaggtcacccatctt

SEQ ID NO: 113191 - DNA, 17 bp, Arabidopsis thaliana
gggaggtccaacgactg

SEQ ID NO: 113192 - DNA, 17 bp, Arabidopsis thaliana
gggaggtgcggccggac

SEQ ID NO: 113193 - DNA, 17 bp, Arabidopsis thaliana
gggaggttacgggtttc

SEQ ID NO: 113194 - DNA, 17 bp, Arabidopsis thaliana
gggaggttttggactga

SEQ ID NO: 113195 - DNA, 17 bp, Arabidopsis thaliana
gggagtaaccgtagcga

SEQ ID NO: 113196 - DNA, 17 bp, Arabidopsis thaliana
gggagtagtcgtattaa

SEQ ID NO: 113197 - DNA, 17 bp, Arabidopsis thaliana
gggagtagtgcggtgcg

SEQ ID NO: 113198 - DNA, 17 bp, Arabidopsis thaliana
gggagtatggtcgcaag

SEQ ID NO: 113199 - DNA, 17 bp, Arabidopsis thaliana
gggagtccggagacgcc

SEQ ID NO: 113200 - DNA, 17 bp, Arabidopsis thaliana
gggagtccggagacgtc

SEQ ID NO: 113201 - DNA, 17 bp, Arabidopsis thaliana
gggagtccggctgttcg

SEQ ID NO: 113202 - DNA, 17 bp, Arabidopsis thaliana
gggagtcctcgtgttgc

SEQ ID NO: 113203 - DNA, 17 bp, Arabidopsis thaliana
gggagtcgcaccagggt

SEQ ID NO: 113204 - DNA, 17 bp, Arabidopsis thaliana
gggagtctacaggcacg

SEQ ID NO: 113205 - DNA, 17 bp, Arabidopsis thaliana
gggagtctacaggtacc

SEQ ID NO: 113206 - DNA, 17 bp, Arabidopsis thaliana
gggagtgaagcggatgg

SEQ ID NO: 113207 - DNA, 17 bp, Arabidopsis thaliana
gggagtgcacgtctgcc

SEQ ID NO: 113208 - DNA, 17 bp, Arabidopsis thaliana
gggagtgctaccactgc

SEQ ID NO: 113209 - DNA, 17 bp, Arabidopsis thaliana
gggagtggaccggcgag

SEQ ID NO: 113210 - DNA, 17 bp, Arabidopsis thaliana
gggagtggaccggcgat

SEQ ID NO: 113211 - DNA, 17 bp, Arabidopsis thaliana
gggagtggaccggggat

SEQ ID NO: 113212 - DNA, 17 bp, Arabidopsis thaliana
gggagtgtctgagccac

SEQ ID NO: 113213 - DNA, 17 bp, Arabidopsis thaliana
gggagtgttaggatgcg

SEQ ID NO: 113214 - DNA, 17 bp, Arabidopsis thaliana
gggagttagaatgggct

SEQ ID NO: 113215 - DNA, 17 bp, Arabidopsis thaliana
gggagttaggacatctc

SEQ ID NO: 113216 - DNA, 17 bp, Arabidopsis thaliana
gggagttcggctaaacc

SEQ ID NO: 113217 - DNA, 17 bp, Arabidopsis thaliana
gggagttctctggtgca

SEQ ID NO: 113218 - DNA, 17 bp, Arabidopsis thaliana
gggagttgatgaccaat

SEQ ID NO: 113219 - DNA, 17 bp, Arabidopsis thaliana
gggagtttcacagggtt

SEQ ID NO: 113220 - DNA, 17 bp, Arabidopsis thaliana
gggagtttgcggaaaca

SEQ ID NO: 113221 - DNA, 17 bp, Arabidopsis thaliana
gggagtttgcggaaacg

SEQ ID NO: 113222 - DNA, 17 bp, Arabidopsis thaliana
gggagtttggctggggc

SEQ ID NO: 113223 - DNA, 17 bp, Arabidopsis thaliana
gggagttttcatcttaa

SEQ ID NO: 113224 - DNA, 17 bp, Arabidopsis thaliana
gggataaaaaccaacaa

SEQ ID NO: 113225 - DNA, 17 bp, Arabidopsis thaliana
gggataagtgcggagcg

SEQ ID NO: 113226 - DNA, 17 bp, Arabidopsis thaliana
gggataagtgtgaattg

SEQ ID NO: 113227 - DNA, 17 bp, Arabidopsis thaliana
gggataatcaggccgcc

SEQ ID NO: 113228 - DNA, 17 bp, Arabidopsis thaliana
gggataatcgtgatggc

SEQ ID NO: 113229 - DNA, 17 bp, Arabidopsis thaliana
gggatacaagacctcaa

SEQ ID NO: 113230 - DNA, 17 bp, Arabidopsis thaliana
gggatacggttgtggtt

SEQ ID NO: 113231 - DNA, 17 bp, Arabidopsis thaliana
gggatactgggacttgc

SEQ ID NO: 113232 - DNA, 17 bp, Arabidopsis thaliana
gggatagatcattgcaa

SEQ ID NO: 113233 - DNA, 17 bp, Arabidopsis thaliana
gggatagtttcaggatg

SEQ ID NO: 113234 - DNA, 17 bp, Arabidopsis thaliana
gggatcaaatccttcgg

SEQ ID NO: 113235 - DNA, 17 bp, Arabidopsis thaliana
gggatcaccaacgcttt

SEQ ID NO: 113236 - DNA, 17 bp, Arabidopsis thaliana
gggatcacgaatccgag

SEQ ID NO: 113237 - DNA, 17 bp, Arabidopsis thaliana
gggatcacttcctcagg

SEQ ID NO: 113238 - DNA, 17 bp, Arabidopsis thaliana
gggatcagcggatgttg

SEQ ID NO: 113239 - DNA, 17 bp, Arabidopsis thaliana
gggatccaaaatctggt

SEQ ID NO: 113240 - DNA, 17 bp, Arabidopsis thaliana
gggatccccacgcagac

SEQ ID NO: 113241 - DNA, 17 bp, Arabidopsis thaliana
gggatccctcgcgggcg

SEQ ID NO: 113242 - DNA, 17 bp, Arabidopsis thaliana
gggatccctcgcgggtg

SEQ ID NO: 113243 - DNA, 17 bp, Arabidopsis thaliana
gggatccctcgcgggtt

SEQ ID NO: 113244 - DNA, 17 bp, Arabidopsis thaliana
gggatcgactggctcgg

SEQ ID NO: 113245 - DNA, 17 bp, Arabidopsis thaliana
gggatcgataccccgca

SEQ ID NO: 113246 - DNA, 17 bp, Arabidopsis thaliana
gggatcgcagaatttgc

SEQ ID NO: 113247 - DNA, 17 bp, Arabidopsis thaliana
gggatcggaccagaagt

SEQ ID NO: 113248 - DNA, 17 bp, Arabidopsis thaliana
gggatcgggaatgtgcc

SEQ ID NO: 113249 - DNA, 17 bp, Arabidopsis thaliana
gggatcgttcgtctgac

SEQ ID NO: 113250 - DNA, 17 bp, Arabidopsis thaliana
gggatctatttatgcgg

SEQ ID NO: 113251 - DNA, 17 bp, Arabidopsis thaliana
gggatctctgtacctat

SEQ ID NO: 113252 - DNA, 17 bp, Arabidopsis thaliana
gggatctgaacagagag

SEQ ID NO: 113253 - DNA, 17 bp, Arabidopsis thaliana
gggatctgatagttcaa

SEQ ID NO: 113254 - DNA, 17 bp, Arabidopsis thaliana
gggatctgattcgtcta

SEQ ID NO: 113255 - DNA, 17 bp, Arabidopsis thaliana
gggatctggataccttt

SEQ ID NO: 113256 - DNA, 17 bp, Arabidopsis thaliana
gggatctggcacgtctg

SEQ ID NO: 113257 - DNA, 17 bp, Arabidopsis thaliana
gggatctggcgatttcg

SEQ ID NO: 113258 - DNA, 17 bp, Arabidopsis thaliana
gggatctggtcacttct

SEQ ID NO: 113259 - DNA, 17 bp, Arabidopsis thaliana
gggatcttctatacgag

SEQ ID NO: 113260 - DNA, 17 bp, Arabidopsis thaliana
gggatctttggtgtttc

SEQ ID NO: 113261 - DNA, 17 bp, Arabidopsis thaliana
gggatgaaaaccaacag

SEQ ID NO: 113262 - DNA, 17 bp, Arabidopsis thaliana
gggatgaaccggaagcc

SEQ ID NO: 113263 - DNA, 17 bp, Arabidopsis thaliana
gggatgaagtcactcag

SEQ ID NO: 113264 - DNA, 17 bp, Arabidopsis thaliana
gggatgaagttttgtcc

SEQ ID NO: 113265 - DNA, 17 bp, Arabidopsis thaliana
gggatgaattgattgga

SEQ ID NO: 113266 - DNA, 17 bp, Arabidopsis thaliana
gggatgaattttgaccc

SEQ ID NO: 113267 - DNA, 17 bp, Arabidopsis thaliana
gggatgagtttggcagg

SEQ ID NO: 113268 - DNA, 17 bp, Arabidopsis thaliana
gggatgcaacacgagga

SEQ ID NO: 113269 - DNA, 17 bp, Arabidopsis thaliana
gggatgctacgcctgga

SEQ ID NO: 113270 - DNA, 17 bp, Arabidopsis thaliana
gggatggcggagtgcgt

SEQ ID NO: 113271 - DNA, 17 bp, Arabidopsis thaliana
gggatggcgtactacgg

SEQ ID NO: 113272 - DNA, 17 bp, Arabidopsis thaliana
gggatgggccggccggt

SEQ ID NO: 113273 - DNA, 17 bp, Arabidopsis thaliana
gggatgggtcggccggt

SEQ ID NO: 113274 - DNA, 17 bp, Arabidopsis thaliana
gggatgggtcggccgtt

SEQ ID NO: 113275 - DNA, 17 bp, Arabidopsis thaliana
gggatgggtcggtcggt

SEQ ID NO: 113276 - DNA, 17 bp, Arabidopsis thaliana
gggatgggtgacccccg

SEQ ID NO: 113277 - DNA, 17 bp, Arabidopsis thaliana
gggatgggttggcggga

SEQ ID NO: 113278 - DNA, 17 bp, Arabidopsis thaliana
gggatgggtttggcagg

SEQ ID NO: 113279 - DNA, 17 bp, Arabidopsis thaliana
gggatgggtttggcggg

SEQ ID NO: 113280 - DNA, 17 bp, Arabidopsis thaliana
gggatgggttttgcggg

SEQ ID NO: 113281 - DNA, 17 bp, Arabidopsis thaliana
gggatggtgtactacgg

SEQ ID NO: 113282 - DNA, 17 bp, Arabidopsis thaliana
gggatgtagcgcagctt

SEQ ID NO: 113283 - DNA, 17 bp, Arabidopsis thaliana
gggatgttcaatgggca

SEQ ID NO: 113284 - DNA, 17 bp, Arabidopsis thaliana
gggattaaatggtagga

SEQ ID NO: 113285 - DNA, 17 bp, Arabidopsis thaliana
gggattacaggctttcg

SEQ ID NO: 113286 - DNA, 17 bp, Arabidopsis thaliana
gggattacaggctttgg

SEQ ID NO: 113287 - DNA, 17 bp, Arabidopsis thaliana
gggattacgggattcag

SEQ ID NO: 113288 - DNA, 17 bp, Arabidopsis thaliana
gggattacgggcttccg

SEQ ID NO: 113289 - DNA, 17 bp, Arabidopsis thaliana
gggattacgggcttcgg

SEQ ID NO: 113290 - DNA, 17 bp, Arabidopsis thaliana
gggattacgggtttcga

SEQ ID NO: 113291 - DNA, 17 bp, Arabidopsis thaliana
gggattactgtgccaaa

SEQ ID NO: 113292 - DNA, 17 bp, Arabidopsis thaliana
gggattagaccgtcgtg

SEQ ID NO: 113293 - DNA, 17 bp, Arabidopsis thaliana
gggattagatggtagga

SEQ ID NO: 113294 - DNA, 17 bp, Arabidopsis thaliana
gggattagatggtatga

SEQ ID NO: 113295 - DNA, 17 bp, Arabidopsis thaliana
gggattagccgcattca

SEQ ID NO: 113296 - DNA, 17 bp, Arabidopsis thaliana
gggattagcgaggttgt

SEQ ID NO: 113297 - DNA, 17 bp, Arabidopsis thaliana
gggattatccatgctcc

SEQ ID NO: 113298 - DNA, 17 bp, Arabidopsis thaliana
gggattatccggttcga

SEQ ID NO: 113299 - DNA, 17 bp, Arabidopsis thaliana
gggattatgccacgtgt

SEQ ID NO: 113300 - DNA, 17 bp, Arabidopsis thaliana
gggattatgccatgtgt

SEQ ID NO: 113301 - DNA, 17 bp, Arabidopsis thaliana
gggattatttccatctt

SEQ ID NO: 113302 - DNA, 17 bp, Arabidopsis thaliana
gggattcaaaacactgg

SEQ ID NO: 113303 - DNA, 17 bp, Arabidopsis thaliana
gggattcacggcgaatg

SEQ ID NO: 113304 - DNA, 17 bp, Arabidopsis thaliana
gggattcagtccaccag

SEQ ID NO: 113305 - DNA, 17 bp, Arabidopsis thaliana
gggattcgacttccccc

SEQ ID NO: 113306 - DNA, 17 bp, Arabidopsis thaliana
gggattcgacttcccct

SEQ ID NO: 113307 - DNA, 17 bp, Arabidopsis thaliana
gggattcggtagccggg

SEQ ID NO: 113308 - DNA, 17 bp, Arabidopsis thaliana
gggattcgtgggctgtg

SEQ ID NO: 113309 - DNA, 17 bp, Arabidopsis thaliana
gggattcgttcagtgca

SEQ ID NO: 113310 - DNA, 17 bp, Arabidopsis thaliana
gggattctagatcatca

SEQ ID NO: 113311 - DNA, 17 bp, Arabidopsis thaliana
gggattctcctggatat

SEQ ID NO: 113312 - DNA, 17 bp, Arabidopsis thaliana
gggattctgcgtcggac

SEQ ID NO: 113313 - DNA, 17 bp, Arabidopsis thaliana
gggattgaaggtcgcga

SEQ ID NO: 113314 - DNA, 17 bp, Arabidopsis thaliana
gggattgacttcccctg

SEQ ID NO: 113315 - DNA, 17 bp, Arabidopsis thaliana
gggattgagggttcggc

SEQ ID NO: 113316 - DNA, 17 bp, Arabidopsis thaliana
gggattgagggttcggt

SEQ ID NO: 113317 - DNA, 17 bp, Arabidopsis thaliana
gggattgaggtcggtta

SEQ ID NO: 113318 - DNA, 17 bp, Arabidopsis thaliana
gggattgatagcaggag

SEQ ID NO: 113319 - DNA, 17 bp, Arabidopsis thaliana
gggattgccatcttctg

SEQ ID NO: 113320 - DNA, 17 bp, Arabidopsis thaliana
gggattggaccggatgt

SEQ ID NO: 113321 - DNA, 17 bp, Arabidopsis thaliana
gggattggatcacggta

SEQ ID NO: 113322 - DNA, 17 bp, Arabidopsis thaliana
gggattggccaagtcaa

SEQ ID NO: 113323 - DNA, 17 bp, Arabidopsis thaliana
gggattggctaagtcaa

SEQ ID NO: 113324 - DNA, 17 bp, Arabidopsis thaliana
gggattggctgctgaca

SEQ ID NO: 113325 - DNA, 17 bp, Arabidopsis thaliana
gggattgggatcggtta

SEQ ID NO: 113326 - DNA, 17 bp, Arabidopsis thaliana
gggattgggatcggttg

SEQ ID NO: 113327 - DNA, 17 bp, Arabidopsis thaliana
gggattggttgcaggtt

SEQ ID NO: 113328 - DNA, 17 bp, Arabidopsis thaliana
gggattgtagttcaagt

SEQ ID NO: 113329 - DNA, 17 bp, Arabidopsis thaliana
gggattgtagttcaata

SEQ ID NO: 113330 - DNA, 17 bp, Arabidopsis thaliana
gggattgtagttcaatt

SEQ ID NO: 113331 - DNA, 17 bp, Arabidopsis thaliana
gggatttaatgcgcagt

SEQ ID NO: 113332 - DNA, 17 bp, Arabidopsis thaliana
gggatttactacggcgt

SEQ ID NO: 113333 - DNA, 17 bp, Arabidopsis thaliana
gggatttagatggatta

SEQ ID NO: 113334 - DNA, 17 bp, Arabidopsis thaliana
gggatttagggtgtaga

SEQ ID NO: 113335 - DNA, 17 bp, Arabidopsis thaliana
gggatttatttacagcg

SEQ ID NO: 113336 - DNA, 17 bp, Arabidopsis thaliana
gggatttcagatccaaa

SEQ ID NO: 113337 - DNA, 17 bp, Arabidopsis thaliana
gggatttcagcacatat

SEQ ID NO: 113338 - DNA, 17 bp, Arabidopsis thaliana
gggatttcccggttcaa

SEQ ID NO: 113339 - DNA, 17 bp, Arabidopsis thaliana
gggatttgaacatgcag

SEQ ID NO: 113340 - DNA, 17 bp, Arabidopsis thaliana
gggatttggatcagaca

SEQ ID NO: 113341 - DNA, 17 bp, Arabidopsis thaliana
gggatttggcccaattg

SEQ ID NO: 113342 - DNA, 17 bp, Arabidopsis thaliana
gggatttggctcaattg

SEQ ID NO: 113343 - DNA, 17 bp, Arabidopsis thaliana
gggatttggtttgacat

SEQ ID NO: 113344 - DNA, 17 bp, Arabidopsis thaliana
gggattttggagctgac

SEQ ID NO: 113345 - DNA, 17 bp, Arabidopsis thaliana
gggattttggccaggtc

SEQ ID NO: 113346 - DNA, 17 bp, Arabidopsis thaliana
gggattttgttttcggg

SEQ ID NO: 113347 - DNA, 17 bp, Arabidopsis thaliana
gggcaaaaatgggcaaa

SEQ ID NO: 113348 - DNA, 17 bp, Arabidopsis thaliana
gggcaaaaatgggcgaa

SEQ ID NO: 113349 - DNA, 17 bp, Arabidopsis thaliana
gggcaaaacaatgaaca

SEQ ID NO: 113350 - DNA, 17 bp, Arabidopsis thaliana
gggcaaaagcgcctacg

SEQ ID NO: 113351 - DNA, 17 bp, Arabidopsis thaliana
gggcaaaagtctgtggt

SEQ ID NO: 113352 - DNA, 17 bp, Arabidopsis thaliana
gggcaaaatcaccattg

SEQ ID NO: 113353 - DNA, 17 bp, Arabidopsis thaliana
gggcaaagctcaactga

SEQ ID NO: 113354 - DNA, 17 bp, Arabidopsis thaliana
gggcaaagcttagaggt

SEQ ID NO: 113355 - DNA, 17 bp, Arabidopsis thaliana
gggcaaatcccacaatt

SEQ ID NO: 113356 - DNA, 17 bp, Arabidopsis thaliana
gggcaaatccgcatgta

SEQ ID NO: 113357 - DNA, 17 bp, Arabidopsis thaliana
gggcaaatcctacagag

SEQ ID NO: 113358 - DNA, 17 bp, Arabidopsis thaliana
gggcaacccatttttat

SEQ ID NO: 113359 - DNA, 17 bp, Arabidopsis thaliana
gggcaacgaggcgggcc

SEQ ID NO: 113360 - DNA, 17 bp, Arabidopsis thaliana
gggcaacgtttgatctg

SEQ ID NO: 113361 - DNA, 17 bp, Arabidopsis thaliana
gggcaactttggatcgc

SEQ ID NO: 113362 - DNA, 17 bp, Arabidopsis thaliana
gggcaagaacgagcagt

SEQ ID NO: 113363 - DNA, 17 bp, Arabidopsis thaliana
gggcaagaatcggcaaa

SEQ ID NO: 113364 - DNA, 17 bp, Arabidopsis thaliana
gggcaagaccgctcaac

SEQ ID NO: 113365 - DNA, 17 bp, Arabidopsis thaliana
gggcaagagccaggcct

SEQ ID NO: 113366 - DNA, 17 bp, Arabidopsis thaliana
gggcaagatcaccatcg

SEQ ID NO: 113367 - DNA, 17 bp, Arabidopsis thaliana
gggcaagatcaccattg

SEQ ID NO: 113368 - DNA, 17 bp, Arabidopsis thaliana
gggcaagatcaggcgtg

SEQ ID NO: 113369 - DNA, 17 bp, Arabidopsis thaliana
gggcaagatcatcattg

SEQ ID NO: 113370 - DNA, 17 bp, Arabidopsis thaliana
gggcaagatcgggcgtg

SEQ ID NO: 113371 - DNA, 17 bp, Arabidopsis thaliana
gggcaagcccatggacc

SEQ ID NO: 113372 - DNA, 17 bp, Arabidopsis thaliana
gggcaagcgtgaaagta

SEQ ID NO: 113373 - DNA, 17 bp, Arabidopsis thaliana
gggcaagcttctttatc

SEQ ID NO: 113374 - DNA, 17 bp, Arabidopsis thaliana
gggcaaggttatgacaa

SEQ ID NO: 113375 - DNA, 17 bp, Arabidopsis thaliana
gggcaagtctggtgcca

SEQ ID NO: 113376 - DNA, 17 bp, Arabidopsis thaliana
gggcaataaaccgttac

SEQ ID NO: 113377 - DNA, 17 bp, Arabidopsis thaliana
gggcaatgaaatgtatg

SEQ ID NO: 113378 - DNA, 17 bp, Arabidopsis thaliana
gggcaattcatcggatc

SEQ ID NO: 113379 - DNA, 17 bp, Arabidopsis thaliana
gggcaattgtcactgct

SEQ ID NO: 113380 - DNA, 17 bp, Arabidopsis thaliana
gggcacaacaggagcag

SEQ ID NO: 113381 - DNA, 17 bp, Arabidopsis thaliana
gggcacagctttcttga

SEQ ID NO: 113382 - DNA, 17 bp, Arabidopsis thaliana
gggcacatctgcctggg

SEQ ID NO: 113383 - DNA, 17 bp, Arabidopsis thaliana
gggcacatgacaacttc

SEQ ID NO: 113384 - DNA, 17 bp, Arabidopsis thaliana
gggcacatgggctcacc

SEQ ID NO: 113385 - DNA, 17 bp, Arabidopsis thaliana
gggcaccaccaggagtg

SEQ ID NO: 113386 - DNA, 17 bp, Arabidopsis thaliana
gggcacctctgcctggg

SEQ ID NO: 113387 - DNA, 17 bp, Arabidopsis thaliana
gggcacctcttggcact

SEQ ID NO: 113388 - DNA, 17 bp, Arabidopsis thaliana
gggcacgagtctagtcc

SEQ ID NO: 113389 - DNA, 17 bp, Arabidopsis thaliana
gggcacgccgtaaaatt

SEQ ID NO: 113390 - DNA, 17 bp, Arabidopsis thaliana
gggcacgcctgcctgcc

SEQ ID NO: 113391 - DNA, 17 bp, Arabidopsis thaliana
gggcacgcctgcctggg

SEQ ID NO: 113392 - DNA, 17 bp, Arabidopsis thaliana
gggcacggctctatctg

SEQ ID NO: 113393 - DNA, 17 bp, Arabidopsis thaliana
gggcacggctgcctggg

SEQ ID NO: 113394 - DNA, 17 bp, Arabidopsis thaliana
gggcacgtatgtctgga

SEQ ID NO: 113395 - DNA, 17 bp, Arabidopsis thaliana
gggcacgtccctgggtg

SEQ ID NO: 113396 - DNA, 17 bp, Arabidopsis thaliana
gggcacgtccgcctggg

SEQ ID NO: 113397 - DNA, 17 bp, Arabidopsis thaliana
gggcacgtcctgggtgt

SEQ ID NO: 113398 - DNA, 17 bp, Arabidopsis thaliana
gggcacgtcgcctgggt

SEQ ID NO: 113399 - DNA, 17 bp, Arabidopsis thaliana
gggcacgtcggcccggg

SEQ ID NO: 113400 - DNA, 17 bp, Arabidopsis thaliana
gggcacgtcggcctggg

SEQ ID NO: 113401 - DNA, 17 bp, Arabidopsis thaliana
gggcacgtctacctggg

SEQ ID NO: 113402 - DNA, 17 bp, Arabidopsis thaliana
gggcacgtctatctggg

SEQ ID NO: 113403 - DNA, 17 bp, Arabidopsis thaliana
gggcacgtctcatgtcg

SEQ ID NO: 113404 - DNA, 17 bp, Arabidopsis thaliana
gggcacgtctccctggg

SEQ ID NO: 113405 - DNA, 17 bp, Arabidopsis thaliana
gggcacgtctcctgggt

SEQ ID NO: 113406 - DNA, 17 bp, Arabidopsis thaliana
gggcacgtctcgttggg

SEQ ID NO: 113407 - DNA, 17 bp, Arabidopsis thaliana
gggcacgtctctgggtg

SEQ ID NO: 113408 - DNA, 17 bp, Arabidopsis thaliana
gggcacgtctgcatggg

SEQ ID NO: 113409 - DNA, 17 bp, Arabidopsis thaliana
gggcacgtctgccaggg

SEQ ID NO: 113410 - DNA, 17 bp, Arabidopsis thaliana
gggcacgtctgcccgga

SEQ ID NO: 113411 - DNA, 17 bp, Arabidopsis thaliana
gggcacgtctgcccggg

SEQ ID NO: 113412 - DNA, 17 bp, Arabidopsis thaliana
gggcacgtctgccgggg

SEQ ID NO: 113413 - DNA, 17 bp, Arabidopsis thaliana
gggcacgtctgcctagg

SEQ ID NO: 113414 - DNA, 17 bp, Arabidopsis thaliana
gggcacgtctgcctgag

SEQ ID NO: 113415 - DNA, 17 bp, Arabidopsis thaliana
gggcacgtctgcctgcg

SEQ ID NO: 113416 - DNA, 17 bp, Arabidopsis thaliana
gggcacgtctgcctgct

SEQ ID NO: 113417 - DNA, 17 bp, Arabidopsis thaliana
gggcacgtctgcctgga

SEQ ID NO: 113418 - DNA, 17 bp, Arabidopsis thaliana
gggcacgtctgcctggc

SEQ ID NO: 113419 - DNA, 17 bp, Arabidopsis thaliana
gggcacgtctgcctggg

SEQ ID NO: 113420 - DNA, 17 bp, Arabidopsis thaliana
gggcacgtctgcctggt

SEQ ID NO: 113421 - DNA, 17 bp, Arabidopsis thaliana
gggcacgtctgcctgtg

SEQ ID NO: 113422 - DNA, 17 bp, Arabidopsis thaliana
gggcacgtctgcctgtt

SEQ ID NO: 113423 - DNA, 17 bp, Arabidopsis thaliana
gggcacgtctgccttgg

SEQ ID NO: 113424 - DNA, 17 bp, Arabidopsis thaliana
gggcacgtctgcgtggg

SEQ ID NO: 113425 - DNA, 17 bp, Arabidopsis thaliana
gggcacgtctgctcggg

SEQ ID NO: 113426 - DNA, 17 bp, Arabidopsis thaliana
gggcacgtctgctgggt

SEQ ID NO: 113427 - DNA, 17 bp, Arabidopsis thaliana
gggcacgtctgcttggg

SEQ ID NO: 113428 - DNA, 17 bp, Arabidopsis thaliana
gggcacgtctggctggg

SEQ ID NO: 113429 - DNA, 17 bp, Arabidopsis thaliana
gggcacgtctggggtgt

SEQ ID NO: 113430 - DNA, 17 bp, Arabidopsis thaliana
gggcacgtctgggtgtc

SEQ ID NO: 113431 - DNA, 17 bp, Arabidopsis thaliana
gggcacgtctggtcggc

SEQ ID NO: 113432 - DNA, 17 bp, Arabidopsis thaliana
gggcacgtctgtctggg

SEQ ID NO: 113433 - DNA, 17 bp, Arabidopsis thaliana
gggcacgtctgttgggt

SEQ ID NO: 113434 - DNA, 17 bp, Arabidopsis thaliana
gggcacgtcttcctggg

SEQ ID NO: 113435 - DNA, 17 bp, Arabidopsis thaliana
gggcacgtcttcgtggg

SEQ ID NO: 113436 - DNA, 17 bp, Arabidopsis thaliana
gggcacgtcttgggtgt

SEQ ID NO: 113437 - DNA, 17 bp, Arabidopsis thaliana
gggcacgtgcctgggtg

SEQ ID NO: 113438 - DNA, 17 bp, Arabidopsis thaliana
gggcacgttggatctcc

SEQ ID NO: 113439 - DNA, 17 bp, Arabidopsis thaliana
gggcacgtttgcctggg

SEQ ID NO: 113440 - DNA, 17 bp, Arabidopsis thaliana
gggcactagaaagggca

SEQ ID NO: 113441 - DNA, 17 bp, Arabidopsis thaliana
gggcactctaaggtgac

SEQ ID NO: 113442 - DNA, 17 bp, Arabidopsis thaliana
gggcactctgcctgggt

SEQ ID NO: 113443 - DNA, 17 bp, Arabidopsis thaliana
gggcactgagcttatct

SEQ ID NO: 113444 - DNA, 17 bp, Arabidopsis thaliana
gggcactgctctatctg

SEQ ID NO: 113445 - DNA, 17 bp, Arabidopsis thaliana
gggcactgtctcggaga

SEQ ID NO: 113446 - DNA, 17 bp, Arabidopsis thaliana
gggcacttctgcctggg

SEQ ID NO: 113447 - DNA, 17 bp, Arabidopsis thaliana
gggcacttgatctacaa

SEQ ID NO: 113448 - DNA, 17 bp, Arabidopsis thaliana
gggcacttgtggctact

SEQ ID NO: 113449 - DNA, 17 bp, Arabidopsis thaliana
gggcagaagcgtcattt

SEQ ID NO: 113450 - DNA, 17 bp, Arabidopsis thaliana
gggcagaatcctttgca

SEQ ID NO: 113451 - DNA, 17 bp, Arabidopsis thaliana
gggcagacccgggttcg

SEQ ID NO: 113452 - DNA, 17 bp, Arabidopsis thaliana
gggcagacggtggagga

SEQ ID NO: 113453 - DNA, 17 bp, Arabidopsis thaliana
gggcagagccatgttgt

SEQ ID NO: 113454 - DNA, 17 bp, Arabidopsis thaliana
gggcagaggtcgattat

SEQ ID NO: 113455 - DNA, 17 bp, Arabidopsis thaliana
gggcagagtgtcatcta

SEQ ID NO: 113456 - DNA, 17 bp, Arabidopsis thaliana
gggcagagtgttgaggc

SEQ ID NO: 113457 - DNA, 17 bp, Arabidopsis thaliana
gggcagatttgtttaag

SEQ ID NO: 113458 - DNA, 17 bp, Arabidopsis thaliana
gggcagccacactggga

SEQ ID NO: 113459 - DNA, 17 bp, Arabidopsis thaliana
gggcagcccattgtcca

SEQ ID NO: 113460 - DNA, 17 bp, Arabidopsis thaliana
gggcagccctttgtcgc

SEQ ID NO: 113461 - DNA, 17 bp, Arabidopsis thaliana
gggcagcggatgttgct

SEQ ID NO: 113462 - DNA, 17 bp, Arabidopsis thaliana
gggcagctaaacaattt

SEQ ID NO: 113463 - DNA, 17 bp, Arabidopsis thaliana
gggcagctgaggcaacc

SEQ ID NO: 113464 - DNA, 17 bp, Arabidopsis thaliana
gggcaggaccattgact

SEQ ID NO: 113465 - DNA, 17 bp, Arabidopsis thaliana
gggcaggacgcccatgg

SEQ ID NO: 113466 - DNA, 17 bp, Arabidopsis thaliana
gggcaggataggtggat

SEQ ID NO: 113467 - DNA, 17 bp, Arabidopsis thaliana
gggcaggatcaccattg

SEQ ID NO: 113468 - DNA, 17 bp, Arabidopsis thaliana
gggcaggattcttctta

SEQ ID NO: 113469 - DNA, 17 bp, Arabidopsis thaliana
gggcaggcccattacgg

SEQ ID NO: 113470 - DNA, 17 bp, Arabidopsis thaliana
gggcagggacgtagtca

SEQ ID NO: 113471 - DNA, 17 bp, Arabidopsis thaliana
gggcagggatacgatgg

SEQ ID NO: 113472 - DNA, 17 bp, Arabidopsis thaliana
gggcaggtctgcctggg

SEQ ID NO: 113473 - DNA, 17 bp, Arabidopsis thaliana
gggcaggttcgaatcct

SEQ ID NO: 113474 - DNA, 17 bp, Arabidopsis thaliana
gggcagtacggacccga

SEQ ID NO: 113475 - DNA, 17 bp, Arabidopsis thaliana
gggcagtacggacccta

SEQ ID NO: 113476 - DNA, 17 bp, Arabidopsis thaliana
gggcagtcaagagacaa

SEQ ID NO: 113477 - DNA, 17 bp, Arabidopsis thaliana
gggcagtcaccagcgat

SEQ ID NO: 113478 - DNA, 17 bp, Arabidopsis thaliana
gggcagtccgccaactg

SEQ ID NO: 113479 - DNA, 17 bp, Arabidopsis thaliana
gggcagtccgtgggaac

SEQ ID NO: 113480 - DNA, 17 bp, Arabidopsis thaliana
gggcagtctggatcggg

SEQ ID NO: 113481 - DNA, 17 bp, Arabidopsis thaliana
gggcagtgatgattaaa

SEQ ID NO: 113482 - DNA, 17 bp, Arabidopsis thaliana
gggcagtgtcagaacga

SEQ ID NO: 113483 - DNA, 17 bp, Arabidopsis thaliana
gggcagtttggctgggg

SEQ ID NO: 113484 - DNA, 17 bp, Arabidopsis thaliana
gggcataagaggaagtg

SEQ ID NO: 113485 - DNA, 17 bp, Arabidopsis thaliana
gggcataagcatacgga

SEQ ID NO: 113486 - DNA, 17 bp, Arabidopsis thaliana
gggcataccgctttgat

SEQ ID NO: 113487 - DNA, 17 bp, Arabidopsis thaliana
gggcatagacatttttc

SEQ ID NO: 113488 - DNA, 17 bp, Arabidopsis thaliana
gggcatatctattgtct

SEQ ID NO: 113489 - DNA, 17 bp, Arabidopsis thaliana
gggcatatctcggctct

SEQ ID NO: 113490 - DNA, 17 bp, Arabidopsis thaliana
gggcatatgaccaattt

SEQ ID NO: 113491 - DNA, 17 bp, Arabidopsis thaliana
gggcatatgaccagtta

SEQ ID NO: 113492 - DNA, 17 bp, Arabidopsis thaliana
gggcatatgaccagttt

SEQ ID NO: 113493 - DNA, 17 bp, Arabidopsis thaliana
gggcatatgaccatttt

SEQ ID NO: 113494 - DNA, 17 bp, Arabidopsis thaliana
gggcatatgtattcctt

SEQ ID NO: 113495 - DNA, 17 bp, Arabidopsis thaliana
gggcatattcgtgattt

SEQ ID NO: 113496 - DNA, 17 bp, Arabidopsis thaliana
gggcatatttcaaggtt

SEQ ID NO: 113497 - DNA, 17 bp, Arabidopsis thaliana
gggcatcggtccaaaac

SEQ ID NO: 113498 - DNA, 17 bp, Arabidopsis thaliana
gggcatgtcggcaggcc

SEQ ID NO: 113499 - DNA, 17 bp, Arabidopsis thaliana
gggcatgtcggcaggtc

SEQ ID NO: 113500 - DNA, 17 bp, Arabidopsis thaliana
gggcatgtctgcctgcg

SEQ ID NO: 113501 - DNA, 17 bp, Arabidopsis thaliana
gggcatgtctgcctggg

SEQ ID NO: 113502 - DNA, 17 bp, Arabidopsis thaliana
gggcatgtgtatgccac

SEQ ID NO: 113503 - DNA, 17 bp, Arabidopsis thaliana
gggcatgtttctgagct

SEQ ID NO: 113504 - DNA, 17 bp, Arabidopsis thaliana
gggcattacttcattta

SEQ ID NO: 113505 - DNA, 17 bp, Arabidopsis thaliana
gggcattaggtaatgcg

SEQ ID NO: 113506 - DNA, 17 bp, Arabidopsis thaliana
gggcattcaagatccgg

SEQ ID NO: 113507 - DNA, 17 bp, Arabidopsis thaliana
gggcattctcgtgattt

SEQ ID NO: 113508 - DNA, 17 bp, Arabidopsis thaliana
gggcattctgacttccc

SEQ ID NO: 113509 - DNA, 17 bp, Arabidopsis thaliana
gggcattctgacttctc

SEQ ID NO: 113510 - DNA, 17 bp, Arabidopsis thaliana
gggcattgacatttttt

SEQ ID NO: 113511 - DNA, 17 bp, Arabidopsis thaliana
gggcattgacctagttg

SEQ ID NO: 113512 - DNA, 17 bp, Arabidopsis thaliana
gggcattgacgtacttg

SEQ ID NO: 113513 - DNA, 17 bp, Arabidopsis thaliana
gggcattgtttttcgtg

SEQ ID NO: 113514 - DNA, 17 bp, Arabidopsis thaliana
gggcatttacagacaat

SEQ ID NO: 113515 - DNA, 17 bp, Arabidopsis thaliana
gggcatttacgtgattt

SEQ ID NO: 113516 - DNA, 17 bp, Arabidopsis thaliana
gggcatttatcaattgg

SEQ ID NO: 113517 - DNA, 17 bp, Arabidopsis thaliana
gggcatttccgtcattc

SEQ ID NO: 113518 - DNA, 17 bp, Arabidopsis thaliana
gggcatttccgtgattc

SEQ ID NO: 113519 - DNA, 17 bp, Arabidopsis thaliana
gggcatttcgtgatttg

SEQ ID NO: 113520 - DNA, 17 bp, Arabidopsis thaliana
gggcatttgggtacgcg

SEQ ID NO: 113521 - DNA, 17 bp, Arabidopsis thaliana
gggcatttggtctagcg

SEQ ID NO: 113522 - DNA, 17 bp, Arabidopsis thaliana
gggcatttggtctagtg

SEQ ID NO: 113523 - DNA, 17 bp, Arabidopsis thaliana
gggcatttgtcactgct

SEQ ID NO: 113524 - DNA, 17 bp, Arabidopsis thaliana
gggcattttcaggattt

SEQ ID NO: 113525 - DNA, 17 bp, Arabidopsis thaliana
gggcattttcatgattt

SEQ ID NO: 113526 - DNA, 17 bp, Arabidopsis thaliana
gggcattttcctgattt

SEQ ID NO: 113527 - DNA, 17 bp, Arabidopsis thaliana
gggcattttcgcgattt

SEQ ID NO: 113528 - DNA, 17 bp, Arabidopsis thaliana
gggcattttcgggatct

SEQ ID NO: 113529 - DNA, 17 bp, Arabidopsis thaliana
gggcattttcgggattt

SEQ ID NO: 113530 - DNA, 17 bp, Arabidopsis thaliana
gggcattttcgtattta

SEQ ID NO: 113531 - DNA, 17 bp, Arabidopsis thaliana
gggcattttcgtatttg

SEQ ID NO: 113532 - DNA, 17 bp, Arabidopsis thaliana
gggcattttcgtgagct

SEQ ID NO: 113533 - DNA, 17 bp, Arabidopsis thaliana
gggcattttcgtgagtg

SEQ ID NO: 113534 - DNA, 17 bp, Arabidopsis thaliana
gggcattttcgtgagtt

SEQ ID NO: 113535 - DNA, 17 bp, Arabidopsis thaliana
gggcattttcgtgatct

SEQ ID NO: 113536 - DNA, 17 bp, Arabidopsis thaliana
gggcattttcgtgatgt

SEQ ID NO: 113537 - DNA, 17 bp, Arabidopsis thaliana
gggcattttcgtgatta

SEQ ID NO: 113538 - DNA, 17 bp, Arabidopsis thaliana
gggcattttcgtgattc

SEQ ID NO: 113539 - DNA, 17 bp, Arabidopsis thaliana
gggcattttcgtgattg

SEQ ID NO: 113540 - DNA, 17 bp, Arabidopsis thaliana
gggcattttcgtgattt

SEQ ID NO: 113541 - DNA, 17 bp, Arabidopsis thaliana
gggcattttcgtggggg

SEQ ID NO: 113542 - DNA, 17 bp, Arabidopsis thaliana
gggcattttcgttattt

SEQ ID NO: 113543 - DNA, 17 bp, Arabidopsis thaliana
gggcattttcttgatta

SEQ ID NO: 113544 - DNA, 17 bp, Arabidopsis thaliana
gggcattttcttgattt

SEQ ID NO: 113545 - DNA, 17 bp, Arabidopsis thaliana
gggcattttgtgatgaa

SEQ ID NO: 113546 - DNA, 17 bp, Arabidopsis thaliana
gggcattttgtgatttg

SEQ ID NO: 113547 - DNA, 17 bp, Arabidopsis thaliana
gggcatttttgtgagtt

SEQ ID NO: 113548 - DNA, 17 bp, Arabidopsis thaliana
gggcatttttgtgatta

SEQ ID NO: 113549 - DNA, 17 bp, Arabidopsis thaliana
gggcatttttgtgattt

SEQ ID NO: 113550 - DNA, 17 bp, Arabidopsis thaliana
gggcattttttgatttg

SEQ ID NO: 113551 - DNA, 17 bp, Arabidopsis thaliana
gggccaaaacccgtaat

SEQ ID NO: 113552 - DNA, 17 bp, Arabidopsis thaliana
gggccaaaatccgaaat

SEQ ID NO: 113553 - DNA, 17 bp, Arabidopsis thaliana
gggccaaaatccgtaat

SEQ ID NO: 113554 - DNA, 17 bp, Arabidopsis thaliana
gggccaaaccccgtaat

SEQ ID NO: 113555 - DNA, 17 bp, Arabidopsis thaliana
gggccaaactaaaatgg

SEQ ID NO: 113556 - DNA, 17 bp, Arabidopsis thaliana
gggccaaactcgccccg

SEQ ID NO: 113557 - DNA, 17 bp, Arabidopsis thaliana
gggccaaagaagcggca

SEQ ID NO: 113558 - DNA, 17 bp, Arabidopsis thaliana
gggccaaagcccgtaat

SEQ ID NO: 113559 - DNA, 17 bp, Arabidopsis thaliana
gggccaaagcctgtaat

SEQ ID NO: 113560 - DNA, 17 bp, Arabidopsis thaliana
gggccaaatcacccgcg

SEQ ID NO: 113561 - DNA, 17 bp, Arabidopsis thaliana
gggccaagagttcattg

SEQ ID NO: 113562 - DNA, 17 bp, Arabidopsis thaliana
gggccaagcccatgctt

SEQ ID NO: 113563 - DNA, 17 bp, Arabidopsis thaliana
gggccaagccgtgatgg

SEQ ID NO: 113564 - DNA, 17 bp, Arabidopsis thaliana
gggccaaggaccaactg

SEQ ID NO: 113565 - DNA, 17 bp, Arabidopsis thaliana
gggccaaggatgactcc

SEQ ID NO: 113566 - DNA, 17 bp, Arabidopsis thaliana
gggccaaggatgacttg

SEQ ID NO: 113567 - DNA, 17 bp, Arabidopsis thaliana
gggccaagggaagtcca

SEQ ID NO: 113568 - DNA, 17 bp, Arabidopsis thaliana
gggccaagggacagtct

SEQ ID NO: 113569 - DNA, 17 bp, Arabidopsis thaliana
gggccaagggggcttcc

SEQ ID NO: 113570 - DNA, 17 bp, Arabidopsis thaliana
gggccaagttagactac

SEQ ID NO: 113571 - DNA, 17 bp, Arabidopsis thaliana
gggccaatgtcggtaat

SEQ ID NO: 113572 - DNA, 17 bp, Arabidopsis thaliana
gggccaattcggacatg

SEQ ID NO: 113573 - DNA, 17 bp, Arabidopsis thaliana
gggccaattgggccaag

SEQ ID NO: 113574 - DNA, 17 bp, Arabidopsis thaliana
gggccaattgttgagta

SEQ ID NO: 113575 - DNA, 17 bp, Arabidopsis thaliana
gggccaattgttgatta

SEQ ID NO: 113576 - DNA, 17 bp, Arabidopsis thaliana
gggccacaatccctccg

SEQ ID NO: 113577 - DNA, 17 bp, Arabidopsis thaliana
gggccacaccaaatgtt

SEQ ID NO: 113578 - DNA, 17 bp, Arabidopsis thaliana
gggccacagcaaatatt

SEQ ID NO: 113579 - DNA, 17 bp, Arabidopsis thaliana
gggccacagcaaatgtt

SEQ ID NO: 113580 - DNA, 17 bp, Arabidopsis thaliana
gggccacatcttactaa

SEQ ID NO: 113581 - DNA, 17 bp, Arabidopsis thaliana
gggccacatgttccgaa

SEQ ID NO: 113582 - DNA, 17 bp, Arabidopsis thaliana
gggccaccatattgcat

SEQ ID NO: 113583 - DNA, 17 bp, Arabidopsis thaliana
gggccacgttgtttgcg

SEQ ID NO: 113584 - DNA, 17 bp, Arabidopsis thaliana
gggccactcatcaggaa

SEQ ID NO: 113585 - DNA, 17 bp, Arabidopsis thaliana
gggccagaaagtgtcta

SEQ ID NO: 113586 - DNA, 17 bp, Arabidopsis thaliana
gggccagaccgatggcc

SEQ ID NO: 113587 - DNA, 17 bp, Arabidopsis thaliana
gggccagaccgatgtcc

SEQ ID NO: 113588 - DNA, 17 bp, Arabidopsis thaliana
gggccagaccggcggcc

SEQ ID NO: 113589 - DNA, 17 bp, Arabidopsis thaliana
gggccagaccggcgtcc

SEQ ID NO: 113590 - DNA, 17 bp, Arabidopsis thaliana
gggccagaccggtatcc

SEQ ID NO: 113591 - DNA, 17 bp, Arabidopsis thaliana
gggccagaccggtcgcc

SEQ ID NO: 113592 - DNA, 17 bp, Arabidopsis thaliana
gggccagaccggtggcc

SEQ ID NO: 113593 - DNA, 17 bp, Arabidopsis thaliana
gggccagaccggtgtcc

SEQ ID NO: 113594 - DNA, 17 bp, Arabidopsis thaliana
gggccagaccggtgtgc

SEQ ID NO: 113595 - DNA, 17 bp, Arabidopsis thaliana
gggccagaccggtgttc

SEQ ID NO: 113596 - DNA, 17 bp, Arabidopsis thaliana
gggccagaccggtttcc

SEQ ID NO: 113597 - DNA, 17 bp, Arabidopsis thaliana
gggccagcctgcgtcca

SEQ ID NO: 113598 - DNA, 17 bp, Arabidopsis thaliana
gggccaggccgcttaac

SEQ ID NO: 113599 - DNA, 17 bp, Arabidopsis thaliana
gggccagtcaacgaaag

SEQ ID NO: 113600 - DNA, 17 bp, Arabidopsis thaliana
gggccagtccaaagata

SEQ ID NO: 113601 - DNA, 17 bp, Arabidopsis thaliana
gggccagtgagattcac

SEQ ID NO: 113602 - DNA, 17 bp, Arabidopsis thaliana
gggccataggtgcgatg

SEQ ID NO: 113603 - DNA, 17 bp, Arabidopsis thaliana
gggccatatgtgtttca

SEQ ID NO: 113604 - DNA, 17 bp, Arabidopsis thaliana
gggccatgcgggttccc

SEQ ID NO: 113605 - DNA, 17 bp, Arabidopsis thaliana
gggccattaaatgttga

SEQ ID NO: 113606 - DNA, 17 bp, Arabidopsis thaliana
gggccattagctcagtg

SEQ ID NO: 113607 - DNA, 17 bp, Arabidopsis thaliana
gggccattcggttggga

SEQ ID NO: 113608 - DNA, 17 bp, Arabidopsis thaliana
gggccattcttcagggg

SEQ ID NO: 113609 - DNA, 17 bp, Arabidopsis thaliana
gggccattcttcaggtg

SEQ ID NO: 113610 - DNA, 17 bp, Arabidopsis thaliana
gggccattgccttccga

SEQ ID NO: 113611 - DNA, 17 bp, Arabidopsis thaliana
gggccattgggagaggc

SEQ ID NO: 113612 - DNA, 17 bp, Arabidopsis thaliana
gggccatttccatttga

SEQ ID NO: 113613 - DNA, 17 bp, Arabidopsis thaliana
gggccattttgttcttc

SEQ ID NO: 113614 - DNA, 17 bp, Arabidopsis thaliana
gggcccaaaagtccggg

SEQ ID NO: 113615 - DNA, 17 bp, Arabidopsis thaliana
gggcccaatttagactt

SEQ ID NO: 113616 - DNA, 17 bp, Arabidopsis thaliana
gggcccacccacccacc

SEQ ID NO: 113617 - DNA, 17 bp, Arabidopsis thaliana
gggcccagacaaaagac

SEQ ID NO: 113618 - DNA, 17 bp, Arabidopsis thaliana
gggcccatagctaagtc

SEQ ID NO: 113619 - DNA, 17 bp, Arabidopsis thaliana
gggcccatagctcaatg

SEQ ID NO: 113620 - DNA, 17 bp, Arabidopsis thaliana
gggcccatagctcagcg

SEQ ID NO: 113621 - DNA, 17 bp, Arabidopsis thaliana
gggcccatagctcagta

SEQ ID NO: 113622 - DNA, 17 bp, Arabidopsis thaliana
gggcccatagctcagtc

SEQ ID NO: 113623 - DNA, 17 bp, Arabidopsis thaliana
gggcccatagctcagtg

SEQ ID NO: 113624 - DNA, 17 bp, Arabidopsis thaliana
gggcccatagctcattg

SEQ ID NO: 113625 - DNA, 17 bp, Arabidopsis thaliana
gggcccatcatccattg

SEQ ID NO: 113626 - DNA, 17 bp, Arabidopsis thaliana
gggcccatccagggaaa

SEQ ID NO: 113627 - DNA, 17 bp, Arabidopsis thaliana
gggcccatgagatggca

SEQ ID NO: 113628 - DNA, 17 bp, Arabidopsis thaliana
gggcccatgagatggga

SEQ ID NO: 113629 - DNA, 17 bp, Arabidopsis thaliana
gggcccatgttgctgga

SEQ ID NO: 113630 - DNA, 17 bp, Arabidopsis thaliana
gggcccatttatgctca

SEQ ID NO: 113631 - DNA, 17 bp, Arabidopsis thaliana
gggccccaccaatcaaa

SEQ ID NO: 113632 - DNA, 17 bp, Arabidopsis thaliana
gggccccatttttgttc

SEQ ID NO: 113633 - DNA, 17 bp, Arabidopsis thaliana
gggccccctggaacatg

SEQ ID NO: 113634 - DNA, 17 bp, Arabidopsis thaliana
gggccccctggaactgg

SEQ ID NO: 113635 - DNA, 17 bp, Arabidopsis thaliana
gggccccgccggaagca

SEQ ID NO: 113636 - DNA, 17 bp, Arabidopsis thaliana
gggccccgccgggacca

SEQ ID NO: 113637 - DNA, 17 bp, Arabidopsis thaliana
gggcccctgtggtttct

SEQ ID NO: 113638 - DNA, 17 bp, Arabidopsis thaliana
gggcccctttctttttc

SEQ ID NO: 113639 - DNA, 17 bp, Arabidopsis thaliana
gggcccgtagctcagtg

SEQ ID NO: 113640 - DNA, 17 bp, Arabidopsis thaliana
gggcccgtctgcctggg

SEQ ID NO: 113641 - DNA, 17 bp, Arabidopsis thaliana
gggccctgcaggaatcg

SEQ ID NO: 113642 - DNA, 17 bp, Arabidopsis thaliana
gggccctgttctttgat

SEQ ID NO: 113643 - DNA, 17 bp, Arabidopsis thaliana
gggcccttaaatttcca

SEQ ID NO: 113644 - DNA, 17 bp, Arabidopsis thaliana
gggcccttagctcagtt

SEQ ID NO: 113645 - DNA, 17 bp, Arabidopsis thaliana
gggcccttcttttgtcg

SEQ ID NO: 113646 - DNA, 17 bp, Arabidopsis thaliana
gggccctttgtcgctaa

SEQ ID NO: 113647 - DNA, 17 bp, Arabidopsis thaliana
gggccgaaaccagcgac

SEQ ID NO: 113648 - DNA, 17 bp, Arabidopsis thaliana
gggccgaaacccccccc

SEQ ID NO: 113649 - DNA, 17 bp, Arabidopsis thaliana
gggccgaaacccgtaac

SEQ ID NO: 113650 - DNA, 17 bp, Arabidopsis thaliana
gggccgaaacccgtaat

SEQ ID NO: 113651 - DNA, 17 bp, Arabidopsis thaliana
gggccgaaacccgtacc

SEQ ID NO: 113652 - DNA, 17 bp, Arabidopsis thaliana
gggccgaaactcgtaat

SEQ ID NO: 113653 - DNA, 17 bp, Arabidopsis thaliana
gggccgaaacttaatcc

SEQ ID NO: 113654 - DNA, 17 bp, Arabidopsis thaliana
gggccgaaccccgtaat

SEQ ID NO: 113655 - DNA, 17 bp, Arabidopsis thaliana
gggccgaagcccgtaat

SEQ ID NO: 113656 - DNA, 17 bp, Arabidopsis thaliana
gggccgaagcccgttat

SEQ ID NO: 113657 - DNA, 17 bp, Arabidopsis thaliana
gggccgaagcctgtaat

SEQ ID NO: 113658 - DNA, 17 bp, Arabidopsis thaliana
gggccgaaggccataat

SEQ ID NO: 113659 - DNA, 17 bp, Arabidopsis thaliana
gggccgaagtccgtaat

SEQ ID NO: 113660 - DNA, 17 bp, Arabidopsis thaliana
gggccgaatcactgtta

SEQ ID NO: 113661 - DNA, 17 bp, Arabidopsis thaliana
gggccgaatcccataat

SEQ ID NO: 113662 - DNA, 17 bp, Arabidopsis thaliana
gggccgaatcccgtaat

SEQ ID NO: 113663 - DNA, 17 bp, Arabidopsis thaliana
gggccgaatgccataat

SEQ ID NO: 113664 - DNA, 17 bp, Arabidopsis thaliana
gggccgaattccgtaat

SEQ ID NO: 113665 - DNA, 17 bp, Arabidopsis thaliana
gggccgaattgggcatg

SEQ ID NO: 113666 - DNA, 17 bp, Arabidopsis thaliana
gggccgaccatggactg

SEQ ID NO: 113667 - DNA, 17 bp, Arabidopsis thaliana
gggccgactaatgccag

SEQ ID NO: 113668 - DNA, 17 bp, Arabidopsis thaliana
gggccgactcactaacc

SEQ ID NO: 113669 - DNA, 17 bp, Arabidopsis thaliana
gggccgactttcagcag

SEQ ID NO: 113670 - DNA, 17 bp, Arabidopsis thaliana
gggccgagtatggttca

SEQ ID NO: 113671 - DNA, 17 bp, Arabidopsis thaliana
gggccgagtggtgtggg

SEQ ID NO: 113672 - DNA, 17 bp, Arabidopsis thaliana
gggccgatcccttggcc

SEQ ID NO: 113673 - DNA, 17 bp, Arabidopsis thaliana
gggccgatctcatctga

SEQ ID NO: 113674 - DNA, 17 bp, Arabidopsis thaliana
gggccgatgtcgttacg

SEQ ID NO: 113675 - DNA, 17 bp, Arabidopsis thaliana
gggccgattagtagcca

SEQ ID NO: 113676 - DNA, 17 bp, Arabidopsis thaliana
gggccgattagtagcta

SEQ ID NO: 113677 - DNA, 17 bp, Arabidopsis thaliana
gggccgattattactct

SEQ ID NO: 113678 - DNA, 17 bp, Arabidopsis thaliana
gggccgcaggatgtgct

SEQ ID NO: 113679 - DNA, 17 bp, Arabidopsis thaliana
gggccgcgatgggcttc

SEQ ID NO: 113680 - DNA, 17 bp, Arabidopsis thaliana
gggccgcggcgggttgg

SEQ ID NO: 113681 - DNA, 17 bp, Arabidopsis thaliana
gggccgctaccacaccg

SEQ ID NO: 113682 - DNA, 17 bp, Arabidopsis thaliana
gggccgctccgtgtccg

SEQ ID NO: 113683 - DNA, 17 bp, Arabidopsis thaliana
gggccgctgtaaccatt

SEQ ID NO: 113684 - DNA, 17 bp, Arabidopsis thaliana
gggccgcttctccctct

SEQ ID NO: 113685 - DNA, 17 bp, Arabidopsis thaliana
gggccggaaatgacgat

SEQ ID NO: 113686 - DNA, 17 bp, Arabidopsis thaliana
gggccggaccgatgggg

SEQ ID NO: 113687 - DNA, 17 bp, Arabidopsis thaliana
gggccggcgatgcgtgg

SEQ ID NO: 113688 - DNA, 17 bp, Arabidopsis thaliana
gggccgggcgattaggt

SEQ ID NO: 113689 - DNA, 17 bp, Arabidopsis thaliana
gggccgggcgattcggt

SEQ ID NO: 113690 - DNA, 17 bp, Arabidopsis thaliana
gggccgggcttgtgcgc

SEQ ID NO: 113691 - DNA, 17 bp, Arabidopsis thaliana
gggccgggttcggttgg

SEQ ID NO: 113692 - DNA, 17 bp, Arabidopsis thaliana
gggccgtaggaatttgt

SEQ ID NO: 113693 - DNA, 17 bp, Arabidopsis thaliana
gggccgtcaattctagg

SEQ ID NO: 113694 - DNA, 17 bp, Arabidopsis thaliana
gggccgtcacattatcc

SEQ ID NO: 113695 - DNA, 17 bp, Arabidopsis thaliana
gggccgtcctgggctaa

SEQ ID NO: 113696 - DNA, 17 bp, Arabidopsis thaliana
gggccgtcgctcaacgg

SEQ ID NO: 113697 - DNA, 17 bp, Arabidopsis thaliana
gggccgtgagtccctac

SEQ ID NO: 113698 - DNA, 17 bp, Arabidopsis thaliana
gggccgttcttccttgt

SEQ ID NO: 113699 - DNA, 17 bp, Arabidopsis thaliana
gggccgttttacttgct

SEQ ID NO: 113700 - DNA, 17 bp, Arabidopsis thaliana
gggcctaaatactgacc

SEQ ID NO: 113701 - DNA, 17 bp, Arabidopsis thaliana
gggcctaaatactgact

SEQ ID NO: 113702 - DNA, 17 bp, Arabidopsis thaliana
gggcctaagcccaattg

SEQ ID NO: 113703 - DNA, 17 bp, Arabidopsis thaliana
gggcctaagcccgcgac

SEQ ID NO: 113704 - DNA, 17 bp, Arabidopsis thaliana
gggcctaagcccgtaat

SEQ ID NO: 113705 - DNA, 17 bp, Arabidopsis thaliana
gggcctaagtaccctcg

SEQ ID NO: 113706 - DNA, 17 bp, Arabidopsis thaliana
gggcctaagttccctcc

SEQ ID NO: 113707 - DNA, 17 bp, Arabidopsis thaliana
gggcctaagttccctgg

SEQ ID NO: 113708 - DNA, 17 bp, Arabidopsis thaliana
gggcctaatggctaaaa

SEQ ID NO: 113709 - DNA, 17 bp, Arabidopsis thaliana
gggcctacatcgggtgg

SEQ ID NO: 113710 - DNA, 17 bp, Arabidopsis thaliana
gggcctacggtataccg

SEQ ID NO: 113711 - DNA, 17 bp, Arabidopsis thaliana
gggcctagaagattacg

SEQ ID NO: 113712 - DNA, 17 bp, Arabidopsis thaliana
gggcctagacctgttat

SEQ ID NO: 113713 - DNA, 17 bp, Arabidopsis thaliana
gggcctagacgaattta

SEQ ID NO: 113714 - DNA, 17 bp, Arabidopsis thaliana
gggcctagagcacctct

SEQ ID NO: 113715 - DNA, 17 bp, Arabidopsis thaliana
gggcctagctggtttaa

SEQ ID NO: 113716 - DNA, 17 bp, Arabidopsis thaliana
gggcctaggaggattac

SEQ ID NO: 113717 - DNA, 17 bp, Arabidopsis thaliana
gggcctaggcctgttat

SEQ ID NO: 113718 - DNA, 17 bp, Arabidopsis thaliana
gggcctaggggagatta

SEQ ID NO: 113719 - DNA, 17 bp, Arabidopsis thaliana
gggcctattggggaacc

SEQ ID NO: 113720 - DNA, 17 bp, Arabidopsis thaliana
gggcctcacttctccgg

SEQ ID NO: 113721 - DNA, 17 bp, Arabidopsis thaliana
gggcctcagcgacggac

SEQ ID NO: 113722 - DNA, 17 bp, Arabidopsis thaliana
gggcctctagtggttgc

SEQ ID NO: 113723 - DNA, 17 bp, Arabidopsis thaliana
gggcctctccacctatt

SEQ ID NO: 113724 - DNA, 17 bp, Arabidopsis thaliana
gggcctctccacttatt

SEQ ID NO: 113725 - DNA, 17 bp, Arabidopsis thaliana
gggcctctccattggca

SEQ ID NO: 113726 - DNA, 17 bp, Arabidopsis thaliana
gggcctctctcacccca

SEQ ID NO: 113727 - DNA, 17 bp, Arabidopsis thaliana
gggcctctggaagagtc

SEQ ID NO: 113728 - DNA, 17 bp, Arabidopsis thaliana
gggcctctggaagagtt

SEQ ID NO: 113729 - DNA, 17 bp, Arabidopsis thaliana
gggcctcttttgactct

SEQ ID NO: 113730 - DNA, 17 bp, Arabidopsis thaliana
gggcctgaaccgtatca

SEQ ID NO: 113731 - DNA, 17 bp, Arabidopsis thaliana
gggcctgaagggattac

SEQ ID NO: 113732 - DNA, 17 bp, Arabidopsis thaliana
gggcctgaccatcttga

SEQ ID NO: 113733 - DNA, 17 bp, Arabidopsis thaliana
gggcctgactggtttaa

SEQ ID NO: 113734 - DNA, 17 bp, Arabidopsis thaliana
gggcctgagccgtatca

SEQ ID NO: 113735 - DNA, 17 bp, Arabidopsis thaliana
gggcctgagggattacg

SEQ ID NO: 113736 - DNA, 17 bp, Arabidopsis thaliana
gggcctgaggggattac

SEQ ID NO: 113737 - DNA, 17 bp, Arabidopsis thaliana
gggcctgagtccttcct

SEQ ID NO: 113738 - DNA, 17 bp, Arabidopsis thaliana
gggcctgataggcggtg

SEQ ID NO: 113739 - DNA, 17 bp, Arabidopsis thaliana
gggcctgcccgcgagac

SEQ ID NO: 113740 - DNA, 17 bp, Arabidopsis thaliana
gggcctgcgaatactcg

SEQ ID NO: 113741 - DNA, 17 bp, Arabidopsis thaliana
gggcctggagggattac

SEQ ID NO: 113742 - DNA, 17 bp, Arabidopsis thaliana
gggcctgggggattacg

SEQ ID NO: 113743 - DNA, 17 bp, Arabidopsis thaliana
gggcctggggggattac

SEQ ID NO: 113744 - DNA, 17 bp, Arabidopsis thaliana
gggcctggtcttaattg

SEQ ID NO: 113745 - DNA, 17 bp, Arabidopsis thaliana
gggcctggtgtgggtcc

SEQ ID NO: 113746 - DNA, 17 bp, Arabidopsis thaliana
gggcctgtatttggttg

SEQ ID NO: 113747 - DNA, 17 bp, Arabidopsis thaliana
gggcctgttcgtttctt

SEQ ID NO: 113748 - DNA, 17 bp, Arabidopsis thaliana
gggcctgttcgtttgtt

SEQ ID NO: 113749 - DNA, 17 bp, Arabidopsis thaliana
gggcctgtttgtttctt

SEQ ID NO: 113750 - DNA, 17 bp, Arabidopsis thaliana
gggccttagatgttctg

SEQ ID NO: 113751 - DNA, 17 bp, Arabidopsis thaliana
gggccttataatgggca

SEQ ID NO: 113752 - DNA, 17 bp, Arabidopsis thaliana
gggccttataatgtgca

SEQ ID NO: 113753 - DNA, 17 bp, Arabidopsis thaliana
gggccttcaaaggatca

SEQ ID NO: 113754 - DNA, 17 bp, Arabidopsis thaliana
gggccttcatcgctacg

SEQ ID NO: 113755 - DNA, 17 bp, Arabidopsis thaliana
gggccttcgtgctgaga

SEQ ID NO: 113756 - DNA, 17 bp, Arabidopsis thaliana
gggccttgaaaattacg

SEQ ID NO: 113757 - DNA, 17 bp, Arabidopsis thaliana
gggccttgggatgggtc

SEQ ID NO: 113758 - DNA, 17 bp, Arabidopsis thaliana
gggccttgttctttgat

SEQ ID NO: 113759 - DNA, 17 bp, Arabidopsis thaliana
gggcctttcagctatta

SEQ ID NO: 113760 - DNA, 17 bp, Arabidopsis thaliana
gggcctttccgtgatct

SEQ ID NO: 113761 - DNA, 17 bp, Arabidopsis thaliana
gggcctttgaacctgaa

SEQ ID NO: 113762 - DNA, 17 bp, Arabidopsis thaliana
gggcctttgaacctgac

SEQ ID NO: 113763 - DNA, 17 bp, Arabidopsis thaliana
gggcctttgctttgacg

SEQ ID NO: 113764 - DNA, 17 bp, Arabidopsis thaliana
gggcctttggtaacaga

SEQ ID NO: 113765 - DNA, 17 bp, Arabidopsis thaliana
gggcctttggtaactga

SEQ ID NO: 113766 - DNA, 17 bp, Arabidopsis thaliana
gggcctttggtcgattg

SEQ ID NO: 113767 - DNA, 17 bp, Arabidopsis thaliana
gggcctttgtccaccgg

SEQ ID NO: 113768 - DNA, 17 bp, Arabidopsis thaliana
gggcctttgtcgctaag

SEQ ID NO: 113769 - DNA, 17 bp, Arabidopsis thaliana
gggccttttcgtaatct

SEQ ID NO: 113770 - DNA, 17 bp, Arabidopsis thaliana
gggccttttcgtgatct

SEQ ID NO: 113771 - DNA, 17 bp, Arabidopsis thaliana
gggccttttcgtgattt

SEQ ID NO: 113772 - DNA, 17 bp, Arabidopsis thaliana
gggcctttttgcgatct

SEQ ID NO: 113773 - DNA, 17 bp, Arabidopsis thaliana
gggcctttttgtgatct

SEQ ID NO: 113774 - DNA, 17 bp, Arabidopsis thaliana
gggcgaaaaattcggcc

SEQ ID NO: 113775 - DNA, 17 bp, Arabidopsis thaliana
gggcgaaagcctgacgg

SEQ ID NO: 113776 - DNA, 17 bp, Arabidopsis thaliana
gggcgaaattgtaccct

SEQ ID NO: 113777 - DNA, 17 bp, Arabidopsis thaliana
gggcgaacccgggctca

SEQ ID NO: 113778 - DNA, 17 bp, Arabidopsis thaliana
gggcgaacgacctgtgt

SEQ ID NO: 113779 - DNA, 17 bp, Arabidopsis thaliana
gggcgaactggatgatc

SEQ ID NO: 113780 - DNA, 17 bp, Arabidopsis thaliana
gggcgaagcttgagatc

SEQ ID NO: 113781 - DNA, 17 bp, Arabidopsis thaliana
gggcgaagtccggagcg

SEQ ID NO: 113782 - DNA, 17 bp, Arabidopsis thaliana
gggcgaatactcctatg

SEQ ID NO: 113783 - DNA, 17 bp, Arabidopsis thaliana
gggcgaatcctctattg

SEQ ID NO: 113784 - DNA, 17 bp, Arabidopsis thaliana
gggcgaatcctgccgtt

SEQ ID NO: 113785 - DNA, 17 bp, Arabidopsis thaliana
gggcgaatgaccggctt

SEQ ID NO: 113786 - DNA, 17 bp, Arabidopsis thaliana
gggcgaattacagtcgc

SEQ ID NO: 113787 - DNA, 17 bp, Arabidopsis thaliana
gggcgaattcttacatg

SEQ ID NO: 113788 - DNA, 17 bp, Arabidopsis thaliana
gggcgacaaagcacaca

SEQ ID NO: 113789 - DNA, 17 bp, Arabidopsis thaliana
gggcgacaaagcagcga

SEQ ID NO: 113790 - DNA, 17 bp, Arabidopsis thaliana
gggcgacaaagtccgat

SEQ ID NO: 113791 - DNA, 17 bp, Arabidopsis thaliana
gggcgacacacgtgcta

SEQ ID NO: 113792 - DNA, 17 bp, Arabidopsis thaliana
gggcgaccctcagtagg

SEQ ID NO: 113793 - DNA, 17 bp, Arabidopsis thaliana
gggcgacccttgggtgt

SEQ ID NO: 113794 - DNA, 17 bp, Arabidopsis thaliana
gggcgaccgtgggggtt

SEQ ID NO: 113795 - DNA, 17 bp, Arabidopsis thaliana
gggcgacctcccgggaa

SEQ ID NO: 113796 - DNA, 17 bp, Arabidopsis thaliana
gggcgacgagtgagcta

SEQ ID NO: 113797 - DNA, 17 bp, Arabidopsis thaliana
gggcgacgagtgcctgg

SEQ ID NO: 113798 - DNA, 17 bp, Arabidopsis thaliana
gggcgacgcggattacg

SEQ ID NO: 113799 - DNA, 17 bp, Arabidopsis thaliana
gggcgacggatcgcatg

SEQ ID NO: 113800 - DNA, 17 bp, Arabidopsis thaliana
gggcgagagaccgatag

SEQ ID NO: 113801 - DNA, 17 bp, Arabidopsis thaliana
gggcgagatcgtggcgg

SEQ ID NO: 113802 - DNA, 17 bp, Arabidopsis thaliana
gggcgagccaccatcac

SEQ ID NO: 113803 - DNA, 17 bp, Arabidopsis thaliana
gggcgagggcacgtctg

SEQ ID NO: 113804 - DNA, 17 bp, Arabidopsis thaliana
gggcgaggtctctggtt

SEQ ID NO: 113805 - DNA, 17 bp, Arabidopsis thaliana
gggcgagtgctcgatct

SEQ ID NO: 113806 - DNA, 17 bp, Arabidopsis thaliana
gggcgatcgattcgggg

SEQ ID NO: 113807 - DNA, 17 bp, Arabidopsis thaliana
gggcgatcggtttgcat

SEQ ID NO: 113808 - DNA, 17 bp, Arabidopsis thaliana
gggcgatgaaaatctat

SEQ ID NO: 113809 - DNA, 17 bp, Arabidopsis thaliana
gggcgatgaagtatatg

SEQ ID NO: 113810 - DNA, 17 bp, Arabidopsis thaliana
gggcgatgaagtgtatg

SEQ ID NO: 113811 - DNA, 17 bp, Arabidopsis thaliana
gggcgatgagatcatgc

SEQ ID NO: 113812 - DNA, 17 bp, Arabidopsis thaliana
gggcgatgataatggcg

SEQ ID NO: 113813 - DNA, 17 bp, Arabidopsis thaliana
gggcgatggcgtggcga

SEQ ID NO: 113814 - DNA, 17 bp, Arabidopsis thaliana
gggcgattattttccga

SEQ ID NO: 113815 - DNA, 17 bp, Arabidopsis thaliana
gggcgattccaaagtgt

SEQ ID NO: 113816 - DNA, 17 bp, Arabidopsis thaliana
gggcgattccccctatc

SEQ ID NO: 113817 - DNA, 17 bp, Arabidopsis thaliana
gggcgattcccgctacc

SEQ ID NO: 113818 - DNA, 17 bp, Arabidopsis thaliana
gggcgattcccgctatc

SEQ ID NO: 113819 - DNA, 17 bp, Arabidopsis thaliana
gggcgattcggcttttt

SEQ ID NO: 113820 - DNA, 17 bp, Arabidopsis thaliana
gggcgatttctgtaggg

SEQ ID NO: 113821 - DNA, 17 bp, Arabidopsis thaliana
gggcgcactgtagatgg

SEQ ID NO: 113822 - DNA, 17 bp, Arabidopsis thaliana
gggcgcatagcgcagtg

SEQ ID NO: 113823 - DNA, 17 bp, Arabidopsis thaliana
gggcgccaaggatgtta

SEQ ID NO: 113824 - DNA, 17 bp, Arabidopsis thaliana
gggcgccagagagggtg

SEQ ID NO: 113825 - DNA, 17 bp, Arabidopsis thaliana
gggcgccgatggtggat

SEQ ID NO: 113826 - DNA, 17 bp, Arabidopsis thaliana
gggcgcctctccattgg

SEQ ID NO: 113827 - DNA, 17 bp, Arabidopsis thaliana
gggcgctacttttgatc

SEQ ID NO: 113828 - DNA, 17 bp, Arabidopsis thaliana
gggcgctatgttggact

SEQ ID NO: 113829 - DNA, 17 bp, Arabidopsis thaliana
gggcgctccaagtggaa

SEQ ID NO: 113830 - DNA, 17 bp, Arabidopsis thaliana
gggcgctgaaacggaga

SEQ ID NO: 113831 - DNA, 17 bp, Arabidopsis thaliana
gggcgctgacgctgcgt

SEQ ID NO: 113832 - DNA, 17 bp, Arabidopsis thaliana
gggcgctggaacgtctg

SEQ ID NO: 113833 - DNA, 17 bp, Arabidopsis thaliana
gggcgctgtgaactgaa

SEQ ID NO: 113834 - DNA, 17 bp, Arabidopsis thaliana
gggcgctgtgaactgta

SEQ ID NO: 113835 - DNA, 17 bp, Arabidopsis thaliana
gggcgcttaggctggct

SEQ ID NO: 113836 - DNA, 17 bp, Arabidopsis thaliana
gggcgcttaggtcggct

SEQ ID NO: 113837 - DNA, 17 bp, Arabidopsis thaliana
gggcggaaaagtgaccg

SEQ ID NO: 113838 - DNA, 17 bp, Arabidopsis thaliana
gggcggaaaattcggcc

SEQ ID NO: 113839 - DNA, 17 bp, Arabidopsis thaliana
gggcggaactatgttga

SEQ ID NO: 113840 - DNA, 17 bp, Arabidopsis thaliana
gggcggacaaaaaaact

SEQ ID NO: 113841 - DNA, 17 bp, Arabidopsis thaliana
gggcggacaataaagcg

SEQ ID NO: 113842 - DNA, 17 bp, Arabidopsis thaliana
gggcggagaattagggt

SEQ ID NO: 113843 - DNA, 17 bp, Arabidopsis thaliana
gggcggagcagatcatg

SEQ ID NO: 113844 - DNA, 17 bp, Arabidopsis thaliana
gggcggaggacattgtc

SEQ ID NO: 113845 - DNA, 17 bp, Arabidopsis thaliana
gggcggagtggctttag

SEQ ID NO: 113846 - DNA, 17 bp, Arabidopsis thaliana
gggcggatctactatca

SEQ ID NO: 113847 - DNA, 17 bp, Arabidopsis thaliana
gggcggatctcgatgaa

SEQ ID NO: 113848 - DNA, 17 bp, Arabidopsis thaliana
gggcggatgctgtgccg

SEQ ID NO: 113849 - DNA, 17 bp, Arabidopsis thaliana
gggcggattcggttcta

SEQ ID NO: 113850 - DNA, 17 bp, Arabidopsis thaliana
gggcggattggcgggac

SEQ ID NO: 113851 - DNA, 17 bp, Arabidopsis thaliana
gggcggcgactgtaagg

SEQ ID NO: 113852 - DNA, 17 bp, Arabidopsis thaliana
gggcggcgagtgtttgg

SEQ ID NO: 113853 - DNA, 17 bp, Arabidopsis thaliana
gggcggcggctagggca

SEQ ID NO: 113854 - DNA, 17 bp, Arabidopsis thaliana
gggcggcgggcgcatgc

SEQ ID NO: 113855 - DNA, 17 bp, Arabidopsis thaliana
gggcggcgtccggatct

SEQ ID NO: 113856 - DNA, 17 bp, Arabidopsis thaliana
gggcggctcaagcaacc

SEQ ID NO: 113857 - DNA, 17 bp, Arabidopsis thaliana
gggcggctcggcgaaga

SEQ ID NO: 113858 - DNA, 17 bp, Arabidopsis thaliana
gggcgggaaaaatgttg

SEQ ID NO: 113859 - DNA, 17 bp, Arabidopsis thaliana
gggcgggaaatctcagg

SEQ ID NO: 113860 - DNA, 17 bp, Arabidopsis thaliana
gggcgggaacggctctc

SEQ ID NO: 113861 - DNA, 17 bp, Arabidopsis thaliana
gggcgggaagaccattc

SEQ ID NO: 113862 - DNA, 17 bp, Arabidopsis thaliana
gggcgggaagtcctcgt

SEQ ID NO: 113863 - DNA, 17 bp, Arabidopsis thaliana
gggcgggacaaaaccgt

SEQ ID NO: 113864 - DNA, 17 bp, Arabidopsis thaliana
gggcgggacatgtttgg

SEQ ID NO: 113865 - DNA, 17 bp, Arabidopsis thaliana
gggcgggacccacggcg

SEQ ID NO: 113866 - DNA, 17 bp, Arabidopsis thaliana
gggcgggacctcctttt

SEQ ID NO: 113867 - DNA, 17 bp, Arabidopsis thaliana
gggcgggacgagtttgg

SEQ ID NO: 113868 - DNA, 17 bp, Arabidopsis thaliana
gggcgggacgcccatgg

SEQ ID NO: 113869 - DNA, 17 bp, Arabidopsis thaliana
gggcgggacggacctaa

SEQ ID NO: 113870 - DNA, 17 bp, Arabidopsis thaliana
gggcgggacggactggg

SEQ ID NO: 113871 - DNA, 17 bp, Arabidopsis thaliana
gggcgggacggaggagg

SEQ ID NO: 113872 - DNA, 17 bp, Arabidopsis thaliana
gggcgggacggatttgg

SEQ ID NO: 113873 - DNA, 17 bp, Arabidopsis thaliana
gggcgggacgggttggc

SEQ ID NO: 113874 - DNA, 17 bp, Arabidopsis thaliana
gggcgggacgggtttga

SEQ ID NO: 113875 - DNA, 17 bp, Arabidopsis thaliana
gggcgggacgggtttgc

SEQ ID NO: 113876 - DNA, 17 bp, Arabidopsis thaliana
gggcgggacgggtttgg

SEQ ID NO: 113877 - DNA, 17 bp, Arabidopsis thaliana
gggcgggactgacaagg

SEQ ID NO: 113878 - DNA, 17 bp, Arabidopsis thaliana
gggcgggacttatttac

SEQ ID NO: 113879 - DNA, 17 bp, Arabidopsis thaliana
gggcgggagagcttgaa

SEQ ID NO: 113880 - DNA, 17 bp, Arabidopsis thaliana
gggcgggagtagtgcgg

SEQ ID NO: 113881 - DNA, 17 bp, Arabidopsis thaliana
gggcgggatccctcgcg

SEQ ID NO: 113882 - DNA, 17 bp, Arabidopsis thaliana
gggcgggatgggtcggc

SEQ ID NO: 113883 - DNA, 17 bp, Arabidopsis thaliana
gggcgggattatccatg

SEQ ID NO: 113884 - DNA, 17 bp, Arabidopsis thaliana
gggcgggattcacggcg

SEQ ID NO: 113885 - DNA, 17 bp, Arabidopsis thaliana
gggcgggcaagatcacc

SEQ ID NO: 113886 - DNA, 17 bp, Arabidopsis thaliana
gggcgggcacgtctgcc

SEQ ID NO: 113887 - DNA, 17 bp, Arabidopsis thaliana
gggcgggcacgtctgct

SEQ ID NO: 113888 - DNA, 17 bp, Arabidopsis thaliana
gggcgggcacgtctggg

SEQ ID NO: 113889 - DNA, 17 bp, Arabidopsis thaliana
gggcgggcacgtctgtc

SEQ ID NO: 113890 - DNA, 17 bp, Arabidopsis thaliana
gggcgggcacgtcttgg

SEQ ID NO: 113891 - DNA, 17 bp, Arabidopsis thaliana
gggcgggcagtttggct

SEQ ID NO: 113892 - DNA, 17 bp, Arabidopsis thaliana
gggcgggcatatgacca

SEQ ID NO: 113893 - DNA, 17 bp, Arabidopsis thaliana
gggcgggcatttgggta

SEQ ID NO: 113894 - DNA, 17 bp, Arabidopsis thaliana
gggcgggcattttcgtg

SEQ ID NO: 113895 - DNA, 17 bp, Arabidopsis thaliana
gggcgggcatttttgtg

SEQ ID NO: 113896 - DNA, 17 bp, Arabidopsis thaliana
gggcgggccaaaatccg

SEQ ID NO: 113897 - DNA, 17 bp, Arabidopsis thaliana
gggcgggccaagccgtg

SEQ ID NO: 113898 - DNA, 17 bp, Arabidopsis thaliana
gggcgggccaagggaca

SEQ ID NO: 113899 - DNA, 17 bp, Arabidopsis thaliana
gggcgggccagaccggt

SEQ ID NO: 113900 - DNA, 17 bp, Arabidopsis thaliana
gggcgggcccatagctc

SEQ ID NO: 113901 - DNA, 17 bp, Arabidopsis thaliana
gggcgggcccgtctgcc

SEQ ID NO: 113902 - DNA, 17 bp, Arabidopsis thaliana
gggcgggccgaagcccg

SEQ ID NO: 113903 - DNA, 17 bp, Arabidopsis thaliana
gggcgggccgaaggcca

SEQ ID NO: 113904 - DNA, 17 bp, Arabidopsis thaliana
gggcgggcctaatggct

SEQ ID NO: 113905 - DNA, 17 bp, Arabidopsis thaliana
gggcgggcctagaagat

SEQ ID NO: 113906 - DNA, 17 bp, Arabidopsis thaliana
gggcgggcctgagccgt

SEQ ID NO: 113907 - DNA, 17 bp, Arabidopsis thaliana
gggcgggcgatgaagtg

SEQ ID NO: 113908 - DNA, 17 bp, Arabidopsis thaliana
gggcgggcgatgagatc

SEQ ID NO: 113909 - DNA, 17 bp, Arabidopsis thaliana
gggcgggcgatttcggc

SEQ ID NO: 113910 - DNA, 17 bp, Arabidopsis thaliana
gggcgggcggcgggcgc

SEQ ID NO: 113911 - DNA, 17 bp, Arabidopsis thaliana
gggcgggcgggcgattt

SEQ ID NO: 113912 - DNA, 17 bp, Arabidopsis thaliana
gggcgggcgggcttcca

SEQ ID NO: 113913 - DNA, 17 bp, Arabidopsis thaliana
gggcgggcgtttggtct

SEQ ID NO: 113914 - DNA, 17 bp, Arabidopsis thaliana
gggcgggctaagtagtc

SEQ ID NO: 113915 - DNA, 17 bp, Arabidopsis thaliana
gggcgggctattagctc

SEQ ID NO: 113916 - DNA, 17 bp, Arabidopsis thaliana
gggcgggctattatctc

SEQ ID NO: 113917 - DNA, 17 bp, Arabidopsis thaliana
gggcgggctcatagctc

SEQ ID NO: 113918 - DNA, 17 bp, Arabidopsis thaliana
gggcgggctctgaccgc

SEQ ID NO: 113919 - DNA, 17 bp, Arabidopsis thaliana
gggcgggctgcgggggc

SEQ ID NO: 113920 - DNA, 17 bp, Arabidopsis thaliana
gggcgggcttccaacct

SEQ ID NO: 113921 - DNA, 17 bp, Arabidopsis thaliana
gggcgggcttccacagt

SEQ ID NO: 113922 - DNA, 17 bp, Arabidopsis thaliana
gggcgggcttctgagga

SEQ ID NO: 113923 - DNA, 17 bp, Arabidopsis thaliana
gggcgggcttctttttc

SEQ ID NO: 113924 - DNA, 17 bp, Arabidopsis thaliana
gggcgggcttgaccata

SEQ ID NO: 113925 - DNA, 17 bp, Arabidopsis thaliana
gggcgggctttatctgg

SEQ ID NO: 113926 - DNA, 17 bp, Arabidopsis thaliana
gggcgggctttggtcct

SEQ ID NO: 113927 - DNA, 17 bp, Arabidopsis thaliana
gggcggggaatgtgcca

SEQ ID NO: 113928 - DNA, 17 bp, Arabidopsis thaliana
gggcggggacccgggct

SEQ ID NO: 113929 - DNA, 17 bp, Arabidopsis thaliana
gggcggggacggactgg

SEQ ID NO: 113930 - DNA, 17 bp, Arabidopsis thaliana
gggcggggactaactga

SEQ ID NO: 113931 - DNA, 17 bp, Arabidopsis thaliana
gggcggggactgttgtc

SEQ ID NO: 113932 - DNA, 17 bp, Arabidopsis thaliana
gggcggggattacgggc

SEQ ID NO: 113933 - DNA, 17 bp, Arabidopsis thaliana
gggcggggccggtggcg

SEQ ID NO: 113934 - DNA, 17 bp, Arabidopsis thaliana
gggcggggctaagcgat

SEQ ID NO: 113935 - DNA, 17 bp, Arabidopsis thaliana
gggcggggctcgcggaa

SEQ ID NO: 113936 - DNA, 17 bp, Arabidopsis thaliana
gggcggggctgctctta

SEQ ID NO: 113937 - DNA, 17 bp, Arabidopsis thaliana
gggcggggctggtcacg

SEQ ID NO: 113938 - DNA, 17 bp, Arabidopsis thaliana
gggcgggggaactacag

SEQ ID NO: 113939 - DNA, 17 bp, Arabidopsis thaliana
gggcgggggaatgtacc

SEQ ID NO: 113940 - DNA, 17 bp, Arabidopsis thaliana
gggcgggggacggacgg

SEQ ID NO: 113941 - DNA, 17 bp, Arabidopsis thaliana
gggcgggggcaagcggt

SEQ ID NO: 113942 - DNA, 17 bp, Arabidopsis thaliana
gggcgggggtcccagtt

SEQ ID NO: 113943 - DNA, 17 bp, Arabidopsis thaliana
gggcgggggtcgcaggg

SEQ ID NO: 113944 - DNA, 17 bp, Arabidopsis thaliana
gggcgggggtcgcagtg

SEQ ID NO: 113945 - DNA, 17 bp, Arabidopsis thaliana
gggcggggtatccctac

SEQ ID NO: 113946 - DNA, 17 bp, Arabidopsis thaliana
gggcggggtcgcagtga

SEQ ID NO: 113947 - DNA, 17 bp, Arabidopsis thaliana
gggcggggtctttcggg

SEQ ID NO: 113948 - DNA, 17 bp, Arabidopsis thaliana
gggcggggttcaaatcc

SEQ ID NO: 113949 - DNA, 17 bp, Arabidopsis thaliana
gggcggggttcaagtcc

SEQ ID NO: 113950 - DNA, 17 bp, Arabidopsis thaliana
gggcggggttcaggtcg

SEQ ID NO: 113951 - DNA, 17 bp, Arabidopsis thaliana
gggcggggttcatctta

SEQ ID NO: 113952 - DNA, 17 bp, Arabidopsis thaliana
gggcggggttcgaatcc

SEQ ID NO: 113953 - DNA, 17 bp, Arabidopsis thaliana
gggcgggtcagcaaatg

SEQ ID NO: 113954 - DNA, 17 bp, Arabidopsis thaliana
gggcgggtccatagctc

SEQ ID NO: 113955 - DNA, 17 bp, Arabidopsis thaliana
gggcgggtccttagctc

SEQ ID NO: 113956 - DNA, 17 bp, Arabidopsis thaliana
gggcgggtctgagattg

SEQ ID NO: 113957 - DNA, 17 bp, Arabidopsis thaliana
gggcgggtggttgcggt

SEQ ID NO: 113958 - DNA, 17 bp, Arabidopsis thaliana
gggcgggtgtaagatat

SEQ ID NO: 113959 - DNA, 17 bp, Arabidopsis thaliana
gggcgggtgtaagatgt

SEQ ID NO: 113960 - DNA, 17 bp, Arabidopsis thaliana
gggcgggtgttgaggga

SEQ ID NO: 113961 - DNA, 17 bp, Arabidopsis thaliana
gggcgggttcaattccc

SEQ ID NO: 113962 - DNA, 17 bp, Arabidopsis thaliana
gggcgggttcacccttt

SEQ ID NO: 113963 - DNA, 17 bp, Arabidopsis thaliana
gggcgggttcccggcag

SEQ ID NO: 113964 - DNA, 17 bp, Arabidopsis thaliana
gggcgggttcgagcccc

SEQ ID NO: 113965 - DNA, 17 bp, Arabidopsis thaliana
gggcgggttcgagtccc

SEQ ID NO: 113966 - DNA, 17 bp, Arabidopsis thaliana
gggcgggttcgagtgac

SEQ ID NO: 113967 - DNA, 17 bp, Arabidopsis thaliana
gggcgggttcgatcccc

SEQ ID NO: 113968 - DNA, 17 bp, Arabidopsis thaliana
gggcgggttcgattccc

SEQ ID NO: 113969 - DNA, 17 bp, Arabidopsis thaliana
gggcgggttcgggtccc

SEQ ID NO: 113970 - DNA, 17 bp, Arabidopsis thaliana
gggcgggttcggtcccc

SEQ ID NO: 113971 - DNA, 17 bp, Arabidopsis thaliana
gggcgggttcgtgtccc

SEQ ID NO: 113972 - DNA, 17 bp, Arabidopsis thaliana
gggcgggttcgtttccc

SEQ ID NO: 113973 - DNA, 17 bp, Arabidopsis thaliana
gggcgggttgtcgggac

SEQ ID NO: 113974 - DNA, 17 bp, Arabidopsis thaliana
gggcgggttttaaattg

SEQ ID NO: 113975 - DNA, 17 bp, Arabidopsis thaliana
gggcggtaccgattaga

SEQ ID NO: 113976 - DNA, 17 bp, Arabidopsis thaliana
gggcggtaccggttagg

SEQ ID NO: 113977 - DNA, 17 bp, Arabidopsis thaliana
gggcggtagcggttagg

SEQ ID NO: 113978 - DNA, 17 bp, Arabidopsis thaliana
gggcggtcactttttcg

SEQ ID NO: 113979 - DNA, 17 bp, Arabidopsis thaliana
gggcggtccgcctttgg

SEQ ID NO: 113980 - DNA, 17 bp, Arabidopsis thaliana
gggcggtcggggcgtta

SEQ ID NO: 113981 - DNA, 17 bp, Arabidopsis thaliana
gggcggtctgattatcc

SEQ ID NO: 113982 - DNA, 17 bp, Arabidopsis thaliana
gggcggtcttaagcaaa

SEQ ID NO: 113983 - DNA, 17 bp, Arabidopsis thaliana
gggcggtgagatagtaa

SEQ ID NO: 113984 - DNA, 17 bp, Arabidopsis thaliana
gggcggtgagatcatgc

SEQ ID NO: 113985 - DNA, 17 bp, Arabidopsis thaliana
gggcggtgcgtacaaag

SEQ ID NO: 113986 - DNA, 17 bp, Arabidopsis thaliana
gggcggtggagaatcgg

SEQ ID NO: 113987 - DNA, 17 bp, Arabidopsis thaliana
gggcggtgtagaggccc

SEQ ID NO: 113988 - DNA, 17 bp, Arabidopsis thaliana
gggcggtgtgtacaaag

SEQ ID NO: 113989 - DNA, 17 bp, Arabidopsis thaliana
gggcggttacggtcgaa

SEQ ID NO: 113990 - DNA, 17 bp, Arabidopsis thaliana
gggcggttaggtgaggc

SEQ ID NO: 113991 - DNA, 17 bp, Arabidopsis thaliana
gggcggttgcggtttca

SEQ ID NO: 113992 - DNA, 17 bp, Arabidopsis thaliana
gggcggtttcgcgagtt

SEQ ID NO: 113993 - DNA, 17 bp, Arabidopsis thaliana
gggcgtaaaacgtctgt

SEQ ID NO: 113994 - DNA, 17 bp, Arabidopsis thaliana
gggcgtaaagcgtctgt

SEQ ID NO: 113995 - DNA, 17 bp, Arabidopsis thaliana
gggcgtaaccaggtttc

SEQ ID NO: 113996 - DNA, 17 bp, Arabidopsis thaliana
gggcgtaagaattgtat

SEQ ID NO: 113997 - DNA, 17 bp, Arabidopsis thaliana
gggcgtaggcggaggtg

SEQ ID NO: 113998 - DNA, 17 bp, Arabidopsis thaliana
gggcgtatctctcaggt

SEQ ID NO: 113999 - DNA, 17 bp, Arabidopsis thaliana
gggcgtcagcggcggat

SEQ ID NO: 114000 - DNA, 17 bp, Arabidopsis thaliana
gggcgtcgactttgatc

SEQ ID NO: 114001 - DNA, 17 bp, Arabidopsis thaliana
gggcgtcgattttgatc

SEQ ID NO: 114002 - DNA, 17 bp, Arabidopsis thaliana
gggcgtcggcctgtggg

SEQ ID NO: 114003 - DNA, 17 bp, Arabidopsis thaliana
gggcgtctcaactcttt

SEQ ID NO: 114004 - DNA, 17 bp, Arabidopsis thaliana
gggcgtctgcctgggtg

SEQ ID NO: 114005 - DNA, 17 bp, Arabidopsis thaliana
gggcgtgatcactcctc

SEQ ID NO: 114006 - DNA, 17 bp, Arabidopsis thaliana
gggcgtgctgtccatca

SEQ ID NO: 114007 - DNA, 17 bp, Arabidopsis thaliana
gggcgtggaccgacgac

SEQ ID NO: 114008 - DNA, 17 bp, Arabidopsis thaliana
gggcgtggaccgacgcg

SEQ ID NO: 114009 - DNA, 17 bp, Arabidopsis thaliana
gggcgtggacggacccg

SEQ ID NO: 114010 - DNA, 17 bp, Arabidopsis thaliana
gggcgtgggttcaaacc

SEQ ID NO: 114011 - DNA, 17 bp, Arabidopsis thaliana
gggcgtggtccggagcg

SEQ ID NO: 114012 - DNA, 17 bp, Arabidopsis thaliana
gggcgtggtccggaggg

SEQ ID NO: 114013 - DNA, 17 bp, Arabidopsis thaliana
gggcgtgtagcaccgta

SEQ ID NO: 114014 - DNA, 17 bp, Arabidopsis thaliana
gggcgtgtgtacaaagt

SEQ ID NO: 114015 - DNA, 17 bp, Arabidopsis thaliana
gggcgttacagtttgga

SEQ ID NO: 114016 - DNA, 17 bp, Arabidopsis thaliana
gggcgttcgaaaccgat

SEQ ID NO: 114017 - DNA, 17 bp, Arabidopsis thaliana
gggcgttgagtttggaa

SEQ ID NO: 114018 - DNA, 17 bp, Arabidopsis thaliana
gggcgttggtctagtgg

SEQ ID NO: 114019 - DNA, 17 bp, Arabidopsis thaliana
gggcgttgttggtatca

SEQ ID NO: 114020 - DNA, 17 bp, Arabidopsis thaliana
gggcgtttgcggttgcg

SEQ ID NO: 114021 - DNA, 17 bp, Arabidopsis thaliana
gggcgtttgggtattcg

SEQ ID NO: 114022 - DNA, 17 bp, Arabidopsis thaliana
gggcgtttggtacttcc

SEQ ID NO: 114023 - DNA, 17 bp, Arabidopsis thaliana
gggcgtttggtctagcg

SEQ ID NO: 114024 - DNA, 17 bp, Arabidopsis thaliana
gggcgtttggtctagtg

SEQ ID NO: 114025 - DNA, 17 bp, Arabidopsis thaliana
gggctaaaattcctgtt

SEQ ID NO: 114026 - DNA, 17 bp, Arabidopsis thaliana
gggctaaacccggtcat

SEQ ID NO: 114027 - DNA, 17 bp, Arabidopsis thaliana
gggctaaacggttgtct

SEQ ID NO: 114028 - DNA, 17 bp, Arabidopsis thaliana
gggctaaagttggtgaa

SEQ ID NO: 114029 - DNA, 17 bp, Arabidopsis thaliana
gggctaacacacaaatc

SEQ ID NO: 114030 - DNA, 17 bp, Arabidopsis thaliana
gggctaacgaaagaacg

SEQ ID NO: 114031 - DNA, 17 bp, Arabidopsis thaliana
gggctaacgaacgaacg

SEQ ID NO: 114032 - DNA, 17 bp, Arabidopsis thaliana
gggctaagcagtccgct

SEQ ID NO: 114033 - DNA, 17 bp, Arabidopsis thaliana
gggctaagcccagtcca

SEQ ID NO: 114034 - DNA, 17 bp, Arabidopsis thaliana
gggctaagcgatctgcc

SEQ ID NO: 114035 - DNA, 17 bp, Arabidopsis thaliana
gggctaaggccacacag

SEQ ID NO: 114036 - DNA, 17 bp, Arabidopsis thaliana
gggctaagtagtcagct

SEQ ID NO: 114037 - DNA, 17 bp, Arabidopsis thaliana
gggctaagttgtcccag

SEQ ID NO: 114038 - DNA, 17 bp, Arabidopsis thaliana
gggctaatattggacta

SEQ ID NO: 114039 - DNA, 17 bp, Arabidopsis thaliana
gggctaatcgacaaagg

SEQ ID NO: 114040 - DNA, 17 bp, Arabidopsis thaliana
gggctaatgcgcagtat

SEQ ID NO: 114041 - DNA, 17 bp, Arabidopsis thaliana
gggctaattattggtgt

SEQ ID NO: 114042 - DNA, 17 bp, Arabidopsis thaliana
gggctaattcgatgtcg

SEQ ID NO: 114043 - DNA, 17 bp, Arabidopsis thaliana
gggctaattctgcggtc

SEQ ID NO: 114044 - DNA, 17 bp, Arabidopsis thaliana
gggctaattgggcttat

SEQ ID NO: 114045 - DNA, 17 bp, Arabidopsis thaliana
gggctactagctcagtg

SEQ ID NO: 114046 - DNA, 17 bp, Arabidopsis thaliana
gggctactaggacttgg

SEQ ID NO: 114047 - DNA, 17 bp, Arabidopsis thaliana
gggctactgtgattttt

SEQ ID NO: 114048 - DNA, 17 bp, Arabidopsis thaliana
gggctagaagcgacgca

SEQ ID NO: 114049 - DNA, 17 bp, Arabidopsis thaliana
gggctagcaggcctgcc

SEQ ID NO: 114050 - DNA, 17 bp, Arabidopsis thaliana
gggctagtcccaccggg

SEQ ID NO: 114051 - DNA, 17 bp, Arabidopsis thaliana
gggctagtctggcttcg

SEQ ID NO: 114052 - DNA, 17 bp, Arabidopsis thaliana
gggctagtgactggagt

SEQ ID NO: 114053 - DNA, 17 bp, Arabidopsis thaliana
gggctataccctttgat

SEQ ID NO: 114054 - DNA, 17 bp, Arabidopsis thaliana
gggctatacggccagct

SEQ ID NO: 114055 - DNA, 17 bp, Arabidopsis thaliana
gggctatcagctcagtg

SEQ ID NO: 114056 - DNA, 17 bp, Arabidopsis thaliana
gggctatcataaccggc

SEQ ID NO: 114057 - DNA, 17 bp, Arabidopsis thaliana
gggctatccaccgtgta

SEQ ID NO: 114058 - DNA, 17 bp, Arabidopsis thaliana
gggctatcgatccttta

SEQ ID NO: 114059 - DNA, 17 bp, Arabidopsis thaliana
gggctatctgtgaagcg

SEQ ID NO: 114060 - DNA, 17 bp, Arabidopsis thaliana
gggctatgaaacttttt

SEQ ID NO: 114061 - DNA, 17 bp, Arabidopsis thaliana
gggctatgacttgggaa

SEQ ID NO: 114062 - DNA, 17 bp, Arabidopsis thaliana
gggctatgagctcagtg

SEQ ID NO: 114063 - DNA, 17 bp, Arabidopsis thaliana
gggctatgatactcggc

SEQ ID NO: 114064 - DNA, 17 bp, Arabidopsis thaliana
gggctatggtcgactag

SEQ ID NO: 114065 - DNA, 17 bp, Arabidopsis thaliana
gggctattacctcagtg

SEQ ID NO: 114066 - DNA, 17 bp, Arabidopsis thaliana
gggctattagcccagcg

SEQ ID NO: 114067 - DNA, 17 bp, Arabidopsis thaliana
gggctattagcccagtg

SEQ ID NO: 114068 - DNA, 17 bp, Arabidopsis thaliana
gggctattagcggatta

SEQ ID NO: 114069 - DNA, 17 bp, Arabidopsis thaliana
gggctattagctaagtg

SEQ ID NO: 114070 - DNA, 17 bp, Arabidopsis thaliana
gggctattagctcaatg

SEQ ID NO: 114071 - DNA, 17 bp, Arabidopsis thaliana
gggctattagctcaccg

SEQ ID NO: 114072 - DNA, 17 bp, Arabidopsis thaliana
gggctattagctcactg

SEQ ID NO: 114073 - DNA, 17 bp, Arabidopsis thaliana
gggctattagctcagag

SEQ ID NO: 114074 - DNA, 17 bp, Arabidopsis thaliana
gggctattagctcagca

SEQ ID NO: 114075 - DNA, 17 bp, Arabidopsis thaliana
gggctattagctcagcg

SEQ ID NO: 114076 - DNA, 17 bp, Arabidopsis thaliana
gggctattagctcaggg

SEQ ID NO: 114077 - DNA, 17 bp, Arabidopsis thaliana
gggctattagctcagta

SEQ ID NO: 114078 - DNA, 17 bp, Arabidopsis thaliana
gggctattagctcagtc

SEQ ID NO: 114079 - DNA, 17 bp, Arabidopsis thaliana
gggctattagctcagtg

SEQ ID NO: 114080 - DNA, 17 bp, Arabidopsis thaliana
gggctattagctcagtt

SEQ ID NO: 114081 - DNA, 17 bp, Arabidopsis thaliana
gggctattagctcatcc

SEQ ID NO: 114082 - DNA, 17 bp, Arabidopsis thaliana
gggctattagctcattg

SEQ ID NO: 114083 - DNA, 17 bp, Arabidopsis thaliana
gggctattagctctgtg

SEQ ID NO: 114084 - DNA, 17 bp, Arabidopsis thaliana
gggctattagctgagtt

SEQ ID NO: 114085 - DNA, 17 bp, Arabidopsis thaliana
gggctattagctgattg

SEQ ID NO: 114086 - DNA, 17 bp, Arabidopsis thaliana
gggctattagcttagcg

SEQ ID NO: 114087 - DNA, 17 bp, Arabidopsis thaliana
gggctattagcttagtg

SEQ ID NO: 114088 - DNA, 17 bp, Arabidopsis thaliana
gggctattagcttggtg

SEQ ID NO: 114089 - DNA, 17 bp, Arabidopsis thaliana
gggctattaggtcagtg

SEQ ID NO: 114090 - DNA, 17 bp, Arabidopsis thaliana
gggctattaggttagtt

SEQ ID NO: 114091 - DNA, 17 bp, Arabidopsis thaliana
gggctattagtcatcca

SEQ ID NO: 114092 - DNA, 17 bp, Arabidopsis thaliana
gggctattagttaagta

SEQ ID NO: 114093 - DNA, 17 bp, Arabidopsis thaliana
gggctattagttcagtg

SEQ ID NO: 114094 - DNA, 17 bp, Arabidopsis thaliana
gggctattatctcagtg

SEQ ID NO: 114095 - DNA, 17 bp, Arabidopsis thaliana
gggctattcgctcagtg

SEQ ID NO: 114096 - DNA, 17 bp, Arabidopsis thaliana
gggctattgctcagtgg

SEQ ID NO: 114097 - DNA, 17 bp, Arabidopsis thaliana
gggctattggctcagtg

SEQ ID NO: 114098 - DNA, 17 bp, Arabidopsis thaliana
gggctattggggaaagg

SEQ ID NO: 114099 - DNA, 17 bp, Arabidopsis thaliana
gggctcaaccctggaca

SEQ ID NO: 114100 - DNA, 17 bp, Arabidopsis thaliana
gggctcagaagttttta

SEQ ID NO: 114101 - DNA, 17 bp, Arabidopsis thaliana
gggctcagctaaatcta

SEQ ID NO: 114102 - DNA, 17 bp, Arabidopsis thaliana
gggctcagctaacgcgt

SEQ ID NO: 114103 - DNA, 17 bp, Arabidopsis thaliana
gggctcaggagggatag

SEQ ID NO: 114104 - DNA, 17 bp, Arabidopsis thaliana
gggctcagtttgaacta

SEQ ID NO: 114105 - DNA, 17 bp, Arabidopsis thaliana
gggctcatactcagtgg

SEQ ID NO: 114106 - DNA, 17 bp, Arabidopsis thaliana
gggctcatagctcagta

SEQ ID NO: 114107 - DNA, 17 bp, Arabidopsis thaliana
gggctcatagctcagtg

SEQ ID NO: 114108 - DNA, 17 bp, Arabidopsis thaliana
gggctcatatctcagtg

SEQ ID NO: 114109 - DNA, 17 bp, Arabidopsis thaliana
gggctcatctcagtggt

SEQ ID NO: 114110 - DNA, 17 bp, Arabidopsis thaliana
gggctcattcatgagcg

SEQ ID NO: 114111 - DNA, 17 bp, Arabidopsis thaliana
gggctcattgttgatct

SEQ ID NO: 114112 - DNA, 17 bp, Arabidopsis thaliana
gggctccggggtcccag

SEQ ID NO: 114113 - DNA, 17 bp, Arabidopsis thaliana
gggctcgaagacgatca

SEQ ID NO: 114114 - DNA, 17 bp, Arabidopsis thaliana
gggctcgaagccatcgc

SEQ ID NO: 114115 - DNA, 17 bp, Arabidopsis thaliana
gggctcgagacctcgat

SEQ ID NO: 114116 - DNA, 17 bp, Arabidopsis thaliana
gggctcgagcaatttca

SEQ ID NO: 114117 - DNA, 17 bp, Arabidopsis thaliana
gggctcgatcaagggtt

SEQ ID NO: 114118 - DNA, 17 bp, Arabidopsis thaliana
gggctcgcgtctgataa

SEQ ID NO: 114119 - DNA, 17 bp, Arabidopsis thaliana
gggctcgcgtctgatta

SEQ ID NO: 114120 - DNA, 17 bp, Arabidopsis thaliana
gggctcggatcccagcg

SEQ ID NO: 114121 - DNA, 17 bp, Arabidopsis thaliana
gggctcgggggtcccag

SEQ ID NO: 114122 - DNA, 17 bp, Arabidopsis thaliana
gggctcggtgcaatctc

SEQ ID NO: 114123 - DNA, 17 bp, Arabidopsis thaliana
gggctcgtcgaccgctt

SEQ ID NO: 114124 - DNA, 17 bp, Arabidopsis thaliana
gggctcgtctgcctggg

SEQ ID NO: 114125 - DNA, 17 bp, Arabidopsis thaliana
gggctctaatctctcag

SEQ ID NO: 114126 - DNA, 17 bp, Arabidopsis thaliana
gggctctaccactgtcc

SEQ ID NO: 114127 - DNA, 17 bp, Arabidopsis thaliana
gggctctagccttctgt

SEQ ID NO: 114128 - DNA, 17 bp, Arabidopsis thaliana
gggctctaggtgcaatc

SEQ ID NO: 114129 - DNA, 17 bp, Arabidopsis thaliana
gggctctagtccgactt

SEQ ID NO: 114130 - DNA, 17 bp, Arabidopsis thaliana
gggctctatctagcatg

SEQ ID NO: 114131 - DNA, 17 bp, Arabidopsis thaliana
gggctctatctggcatg

SEQ ID NO: 114132 - DNA, 17 bp, Arabidopsis thaliana
gggctctatctgttatg

SEQ ID NO: 114133 - DNA, 17 bp, Arabidopsis thaliana
gggctctatttggcatg

SEQ ID NO: 114134 - DNA, 17 bp, Arabidopsis thaliana
gggctctatttggcgtg

SEQ ID NO: 114135 - DNA, 17 bp, Arabidopsis thaliana
gggctctgaccacgtgc

SEQ ID NO: 114136 - DNA, 17 bp, Arabidopsis thaliana
gggctctgaccgcgtcc

SEQ ID NO: 114137 - DNA, 17 bp, Arabidopsis thaliana
gggctctgaccgcgtgc

SEQ ID NO: 114138 - DNA, 17 bp, Arabidopsis thaliana
gggctctgaccgcgttc

SEQ ID NO: 114139 - DNA, 17 bp, Arabidopsis thaliana
gggctctgcccgttgct

SEQ ID NO: 114140 - DNA, 17 bp, Arabidopsis thaliana
gggctctgcctgggtgt

SEQ ID NO: 114141 - DNA, 17 bp, Arabidopsis thaliana
gggctctgtcttccaag

SEQ ID NO: 114142 - DNA, 17 bp, Arabidopsis thaliana
gggctcttggccattca

SEQ ID NO: 114143 - DNA, 17 bp, Arabidopsis thaliana
gggctcttggtgatttt

SEQ ID NO: 114144 - DNA, 17 bp, Arabidopsis thaliana
gggctgaaaattcaggc

SEQ ID NO: 114145 - DNA, 17 bp, Arabidopsis thaliana
gggctgaagcccgtaaa

SEQ ID NO: 114146 - DNA, 17 bp, Arabidopsis thaliana
gggctgaagcgcgtaat

SEQ ID NO: 114147 - DNA, 17 bp, Arabidopsis thaliana
gggctgaagttgaggcg

SEQ ID NO: 114148 - DNA, 17 bp, Arabidopsis thaliana
gggctgaatctcagtgg

SEQ ID NO: 114149 - DNA, 17 bp, Arabidopsis thaliana
gggctgaccataggctg

SEQ ID NO: 114150 - DNA, 17 bp, Arabidopsis thaliana
gggctgaccatggactt

SEQ ID NO: 114151 - DNA, 17 bp, Arabidopsis thaliana
gggctgaccattggaca

SEQ ID NO: 114152 - DNA, 17 bp, Arabidopsis thaliana
gggctgacgaaaaaacg

SEQ ID NO: 114153 - DNA, 17 bp, Arabidopsis thaliana
gggctgacgcctgccca

SEQ ID NO: 114154 - DNA, 17 bp, Arabidopsis thaliana
gggctgacgtggcttct

SEQ ID NO: 114155 - DNA, 17 bp, Arabidopsis thaliana
gggctgagacagggtga

SEQ ID NO: 114156 - DNA, 17 bp, Arabidopsis thaliana
gggctgagcatgtaacg

SEQ ID NO: 114157 - DNA, 17 bp, Arabidopsis thaliana
gggctgaggtagtgtga

SEQ ID NO: 114158 - DNA, 17 bp, Arabidopsis thaliana
gggctgagtagtatccg

SEQ ID NO: 114159 - DNA, 17 bp, Arabidopsis thaliana
gggctgataatcaaatc

SEQ ID NO: 114160 - DNA, 17 bp, Arabidopsis thaliana
gggctgatacatccctt

SEQ ID NO: 114161 - DNA, 17 bp, Arabidopsis thaliana
gggctgatattattaac

SEQ ID NO: 114162 - DNA, 17 bp, Arabidopsis thaliana
gggctgcagagcgtttg

SEQ ID NO: 114163 - DNA, 17 bp, Arabidopsis thaliana
gggctgcccgtgtccaa

SEQ ID NO: 114164 - DNA, 17 bp, Arabidopsis thaliana
gggctgcccgttgctct

SEQ ID NO: 114165 - DNA, 17 bp, Arabidopsis thaliana
gggctgccgtccgatgg

SEQ ID NO: 114166 - DNA, 17 bp, Arabidopsis thaliana
gggctgcgccaccaaaa

SEQ ID NO: 114167 - DNA, 17 bp, Arabidopsis thaliana
gggctgcgctaatcttt

SEQ ID NO: 114168 - DNA, 17 bp, Arabidopsis thaliana
gggctgcgggggctttt

SEQ ID NO: 114169 - DNA, 17 bp, Arabidopsis thaliana
gggctgcgggttgtcgg

SEQ ID NO: 114170 - DNA, 17 bp, Arabidopsis thaliana
gggctgcggtttaagtt

SEQ ID NO: 114171 - DNA, 17 bp, Arabidopsis thaliana
gggctgcggtttgcctt

SEQ ID NO: 114172 - DNA, 17 bp, Arabidopsis thaliana
gggctgcgtcactcaaa

SEQ ID NO: 114173 - DNA, 17 bp, Arabidopsis thaliana
gggctggacactcagtg

SEQ ID NO: 114174 - DNA, 17 bp, Arabidopsis thaliana
gggctggaccagaatca

SEQ ID NO: 114175 - DNA, 17 bp, Arabidopsis thaliana
gggctggagatcgagcg

SEQ ID NO: 114176 - DNA, 17 bp, Arabidopsis thaliana
gggctggagtgattacg

SEQ ID NO: 114177 - DNA, 17 bp, Arabidopsis thaliana
gggctggcctttcattt

SEQ ID NO: 114178 - DNA, 17 bp, Arabidopsis thaliana
gggctggctccctgtat

SEQ ID NO: 114179 - DNA, 17 bp, Arabidopsis thaliana
gggctggcttggtattt

SEQ ID NO: 114180 - DNA, 17 bp, Arabidopsis thaliana
gggctgggaccgggacg

SEQ ID NO: 114181 - DNA, 17 bp, Arabidopsis thaliana
gggctgggaccggggcg

SEQ ID NO: 114182 - DNA, 17 bp, Arabidopsis thaliana
gggctgggccaatcagg

SEQ ID NO: 114183 - DNA, 17 bp, Arabidopsis thaliana
gggctgggcctttcaat

SEQ ID NO: 114184 - DNA, 17 bp, Arabidopsis thaliana
gggctgggctcgggggt

SEQ ID NO: 114185 - DNA, 17 bp, Arabidopsis thaliana
gggctgggtacccagct

SEQ ID NO: 114186 - DNA, 17 bp, Arabidopsis thaliana
gggctggtgagatagag

SEQ ID NO: 114187 - DNA, 17 bp, Arabidopsis thaliana
gggctggttccctccga

SEQ ID NO: 114188 - DNA, 17 bp, Arabidopsis thaliana
gggctgtaactgtaaag

SEQ ID NO: 114189 - DNA, 17 bp, Arabidopsis thaliana
gggctgtaagtgccttt

SEQ ID NO: 114190 - DNA, 17 bp, Arabidopsis thaliana
gggctgtacactctatc

SEQ ID NO: 114191 - DNA, 17 bp, Arabidopsis thaliana
gggctgtagtatgttcc

SEQ ID NO: 114192 - DNA, 17 bp, Arabidopsis thaliana
gggctgtcgggacccga

SEQ ID NO: 114193 - DNA, 17 bp, Arabidopsis thaliana
gggctgtcgggcttgcg

SEQ ID NO: 114194 - DNA, 17 bp, Arabidopsis thaliana
gggctgtctttgggctt

SEQ ID NO: 114195 - DNA, 17 bp, Arabidopsis thaliana
gggctgtgataatgatt

SEQ ID NO: 114196 - DNA, 17 bp, Arabidopsis thaliana
gggctgtgcaatcggaa

SEQ ID NO: 114197 - DNA, 17 bp, Arabidopsis thaliana
gggctgtgctgtagatc

SEQ ID NO: 114198 - DNA, 17 bp, Arabidopsis thaliana
gggctgttagctcagtg

SEQ ID NO: 114199 - DNA, 17 bp, Arabidopsis thaliana
gggctgttgggccttta

SEQ ID NO: 114200 - DNA, 17 bp, Arabidopsis thaliana
gggctgtttgggtcttg

SEQ ID NO: 114201 - DNA, 17 bp, Arabidopsis thaliana
gggctgttttccgttgg

SEQ ID NO: 114202 - DNA, 17 bp, Arabidopsis thaliana
gggcttaaactgttttg

SEQ ID NO: 114203 - DNA, 17 bp, Arabidopsis thaliana
gggcttaaaggctttgc

SEQ ID NO: 114204 - DNA, 17 bp, Arabidopsis thaliana
gggcttaactggttttt

SEQ ID NO: 114205 - DNA, 17 bp, Arabidopsis thaliana
gggcttaccagccttga

SEQ ID NO: 114206 - DNA, 17 bp, Arabidopsis thaliana
gggcttacgcctttcag

SEQ ID NO: 114207 - DNA, 17 bp, Arabidopsis thaliana
gggcttacgggcagtgg

SEQ ID NO: 114208 - DNA, 17 bp, Arabidopsis thaliana
gggcttagaaccttctt

SEQ ID NO: 114209 - DNA, 17 bp, Arabidopsis thaliana
gggcttagatgatgggc

SEQ ID NO: 114210 - DNA, 17 bp, Arabidopsis thaliana
gggcttagatgatgggt

SEQ ID NO: 114211 - DNA, 17 bp, Arabidopsis thaliana
gggcttagattctgacc

SEQ ID NO: 114212 - DNA, 17 bp, Arabidopsis thaliana
gggcttagcccaaccaa

SEQ ID NO: 114213 - DNA, 17 bp, Arabidopsis thaliana
gggcttagcccaaccat

SEQ ID NO: 114214 - DNA, 17 bp, Arabidopsis thaliana
gggcttagctcagtggt

SEQ ID NO: 114215 - DNA, 17 bp, Arabidopsis thaliana
gggcttaggactctctt

SEQ ID NO: 114216 - DNA, 17 bp, Arabidopsis thaliana
gggcttagggcccgtaa

SEQ ID NO: 114217 - DNA, 17 bp, Arabidopsis thaliana
gggcttaggtccggaat

SEQ ID NO: 114218 - DNA, 17 bp, Arabidopsis thaliana
gggcttagtcgcatcct

SEQ ID NO: 114219 - DNA, 17 bp, Arabidopsis thaliana
gggcttagtggctctaa

SEQ ID NO: 114220 - DNA, 17 bp, Arabidopsis thaliana
gggcttagtttggactt

SEQ ID NO: 114221 - DNA, 17 bp, Arabidopsis thaliana
gggcttatagctcagtg

SEQ ID NO: 114222 - DNA, 17 bp, Arabidopsis thaliana
gggcttatgggcacaca

SEQ ID NO: 114223 - DNA, 17 bp, Arabidopsis thaliana
gggcttatgggcacaga

SEQ ID NO: 114224 - DNA, 17 bp, Arabidopsis thaliana
gggcttatgggcaccac

SEQ ID NO: 114225 - DNA, 17 bp, Arabidopsis thaliana
gggcttattggatctaa

SEQ ID NO: 114226 - DNA, 17 bp, Arabidopsis thaliana
gggcttattggtgcttc

SEQ ID NO: 114227 - DNA, 17 bp, Arabidopsis thaliana
gggcttcaactcagaac

SEQ ID NO: 114228 - DNA, 17 bp, Arabidopsis thaliana
gggcttcaagtttgcgt

SEQ ID NO: 114229 - DNA, 17 bp, Arabidopsis thaliana
gggcttcagattcagga

SEQ ID NO: 114230 - DNA, 17 bp, Arabidopsis thaliana
gggcttcagtccagaac

SEQ ID NO: 114231 - DNA, 17 bp, Arabidopsis thaliana
gggcttccaacctaaaa

SEQ ID NO: 114232 - DNA, 17 bp, Arabidopsis thaliana
gggcttccaacctacct

SEQ ID NO: 114233 - DNA, 17 bp, Arabidopsis thaliana
gggcttccacagtgtat

SEQ ID NO: 114234 - DNA, 17 bp, Arabidopsis thaliana
gggcttccagaccatct

SEQ ID NO: 114235 - DNA, 17 bp, Arabidopsis thaliana
gggcttcccatatggac

SEQ ID NO: 114236 - DNA, 17 bp, Arabidopsis thaliana
gggcttccccatatgga

SEQ ID NO: 114237 - DNA, 17 bp, Arabidopsis thaliana
gggcttccggaatgcgg

SEQ ID NO: 114238 - DNA, 17 bp, Arabidopsis thaliana
gggcttcgaaccagaac

SEQ ID NO: 114239 - DNA, 17 bp, Arabidopsis thaliana
gggcttcgacccagaac

SEQ ID NO: 114240 - DNA, 17 bp, Arabidopsis thaliana
gggcttcgacccagaat

SEQ ID NO: 114241 - DNA, 17 bp, Arabidopsis thaliana
gggcttcgacccagtgg

SEQ ID NO: 114242 - DNA, 17 bp, Arabidopsis thaliana
gggcttcgcctcagaac

SEQ ID NO: 114243 - DNA, 17 bp, Arabidopsis thaliana
gggcttcggccagaacc

SEQ ID NO: 114244 - DNA, 17 bp, Arabidopsis thaliana
gggcttctaacctaaaa

SEQ ID NO: 114245 - DNA, 17 bp, Arabidopsis thaliana
gggcttctagtatctct

SEQ ID NO: 114246 - DNA, 17 bp, Arabidopsis thaliana
gggcttctatgtttgct

SEQ ID NO: 114247 - DNA, 17 bp, Arabidopsis thaliana
gggcttctgagcccgtg

SEQ ID NO: 114248 - DNA, 17 bp, Arabidopsis thaliana
gggcttctgaggattac

SEQ ID NO: 114249 - DNA, 17 bp, Arabidopsis thaliana
gggcttctgatactcag

SEQ ID NO: 114250 - DNA, 17 bp, Arabidopsis thaliana
gggcttctgtattctca

SEQ ID NO: 114251 - DNA, 17 bp, Arabidopsis thaliana
gggcttctttttctgac

SEQ ID NO: 114252 - DNA, 17 bp, Arabidopsis thaliana
gggcttgaacttccaga

SEQ ID NO: 114253 - DNA, 17 bp, Arabidopsis thaliana
gggcttgacatgccgcg

SEQ ID NO: 114254 - DNA, 17 bp, Arabidopsis thaliana
gggcttgaccatatgac

SEQ ID NO: 114255 - DNA, 17 bp, Arabidopsis thaliana
gggcttgaccatatgga

SEQ ID NO: 114256 - DNA, 17 bp, Arabidopsis thaliana
gggcttgaccgtatgga

SEQ ID NO: 114257 - DNA, 17 bp, Arabidopsis thaliana
gggcttgatgttgatta

SEQ ID NO: 114258 - DNA, 17 bp, Arabidopsis thaliana
gggcttgattggtttat

SEQ ID NO: 114259 - DNA, 17 bp, Arabidopsis thaliana
gggcttgcccatatgga

SEQ ID NO: 114260 - DNA, 17 bp, Arabidopsis thaliana
gggcttgccgcccttcc

SEQ ID NO: 114261 - DNA, 17 bp, Arabidopsis thaliana
gggcttgccgcccttgc

SEQ ID NO: 114262 - DNA, 17 bp, Arabidopsis thaliana
gggcttgccttgcgtgg

SEQ ID NO: 114263 - DNA, 17 bp, Arabidopsis thaliana
gggcttggaccgacgcg

SEQ ID NO: 114264 - DNA, 17 bp, Arabidopsis thaliana
gggcttggactgttttt

SEQ ID NO: 114265 - DNA, 17 bp, Arabidopsis thaliana
gggcttggacttttcgt

SEQ ID NO: 114266 - DNA, 17 bp, Arabidopsis thaliana
gggcttggaggccacaa

SEQ ID NO: 114267 - DNA, 17 bp, Arabidopsis thaliana
gggcttggctcgggatg

SEQ ID NO: 114268 - DNA, 17 bp, Arabidopsis thaliana
gggcttgggatacctgg

SEQ ID NO: 114269 - DNA, 17 bp, Arabidopsis thaliana
gggcttgggcttgggtt

SEQ ID NO: 114270 - DNA, 17 bp, Arabidopsis thaliana
gggcttggtgcaggtcg

SEQ ID NO: 114271 - DNA, 17 bp, Arabidopsis thaliana
gggcttgtcgttaattt

SEQ ID NO: 114272 - DNA, 17 bp, Arabidopsis thaliana
gggcttgtctaatagga

SEQ ID NO: 114273 - DNA, 17 bp, Arabidopsis thaliana
gggcttgtctaataggg

SEQ ID NO: 114274 - DNA, 17 bp, Arabidopsis thaliana
gggcttgtgactttctc

SEQ ID NO: 114275 - DNA, 17 bp, Arabidopsis thaliana
gggcttgtgagatagag

SEQ ID NO: 114276 - DNA, 17 bp, Arabidopsis thaliana
gggcttgtggcctggta

SEQ ID NO: 114277 - DNA, 17 bp, Arabidopsis thaliana
gggctttaaaagactta

SEQ ID NO: 114278 - DNA, 17 bp, Arabidopsis thaliana
gggctttaagtctgact

SEQ ID NO: 114279 - DNA, 17 bp, Arabidopsis thaliana
gggctttaagtttgtgt

SEQ ID NO: 114280 - DNA, 17 bp, Arabidopsis thaliana
gggctttagctcagtgg

SEQ ID NO: 114281 - DNA, 17 bp, Arabidopsis thaliana
gggctttaggtctgggc

SEQ ID NO: 114282 - DNA, 17 bp, Arabidopsis thaliana
gggctttatctggcatg

SEQ ID NO: 114283 - DNA, 17 bp, Arabidopsis thaliana
gggctttatctggctag

SEQ ID NO: 114284 - DNA, 17 bp, Arabidopsis thaliana
gggctttccagggctct

SEQ ID NO: 114285 - DNA, 17 bp, Arabidopsis thaliana
gggctttccgaaaaggt

SEQ ID NO: 114286 - DNA, 17 bp, Arabidopsis thaliana
gggctttccgaaaatat

SEQ ID NO: 114287 - DNA, 17 bp, Arabidopsis thaliana
gggctttctgatttcgg

SEQ ID NO: 114288 - DNA, 17 bp, Arabidopsis thaliana
gggctttcttgacaagg

SEQ ID NO: 114289 - DNA, 17 bp, Arabidopsis thaliana
gggctttgacccagaac

SEQ ID NO: 114290 - DNA, 17 bp, Arabidopsis thaliana
gggctttgaccgcgtgc

SEQ ID NO: 114291 - DNA, 17 bp, Arabidopsis thaliana
gggctttggaccaacga

SEQ ID NO: 114292 - DNA, 17 bp, Arabidopsis thaliana
gggctttggagaattac

SEQ ID NO: 114293 - DNA, 17 bp, Arabidopsis thaliana
gggctttggccccattg

SEQ ID NO: 114294 - DNA, 17 bp, Arabidopsis thaliana
gggctttgggtagttgt

SEQ ID NO: 114295 - DNA, 17 bp, Arabidopsis thaliana
gggctttggtcctattg

SEQ ID NO: 114296 - DNA, 17 bp, Arabidopsis thaliana
gggctttggtgaagaca

SEQ ID NO: 114297 - DNA, 17 bp, Arabidopsis thaliana
gggctttgtcgctaaga

SEQ ID NO: 114298 - DNA, 17 bp, Arabidopsis thaliana
gggcttttagaccgtga

SEQ ID NO: 114299 - DNA, 17 bp, Arabidopsis thaliana
gggcttttcctgcgcag

SEQ ID NO: 114300 - DNA, 17 bp, Arabidopsis thaliana
gggcttttgatacgctc

SEQ ID NO: 114301 - DNA, 17 bp, Arabidopsis thaliana
gggcttttgatacgctt

SEQ ID NO: 114302 - DNA, 17 bp, Arabidopsis thaliana
gggcttttgggcttgaa

SEQ ID NO: 114303 - DNA, 17 bp, Arabidopsis thaliana
gggcttttggtttgaac

SEQ ID NO: 114304 - DNA, 17 bp, Arabidopsis thaliana
gggctttttcgtgatcc

SEQ ID NO: 114305 - DNA, 17 bp, Arabidopsis thaliana
gggctttttcgtgatct

SEQ ID NO: 114306 - DNA, 17 bp, Arabidopsis thaliana
gggctttttgtcgttag

SEQ ID NO: 114307 - DNA, 17 bp, Arabidopsis thaliana
ggggaaaaccgggtaag

SEQ ID NO: 114308 - DNA, 17 bp, Arabidopsis thaliana
ggggaaaaggaccgaaa

SEQ ID NO: 114309 - DNA, 17 bp, Arabidopsis thaliana
ggggaaaagtatcggct

SEQ ID NO: 114310 - DNA, 17 bp, Arabidopsis thaliana
ggggaaaccactatgac

SEQ ID NO: 114311 - DNA, 17 bp, Arabidopsis thaliana
ggggaaacccgtctgat

SEQ ID NO: 114312 - DNA, 17 bp, Arabidopsis thaliana
ggggaaactcttccacg

SEQ ID NO: 114313 - DNA, 17 bp, Arabidopsis thaliana
ggggaaacttaccaggt

SEQ ID NO: 114314 - DNA, 17 bp, Arabidopsis thaliana
ggggaaagaagacccta

SEQ ID NO: 114315 - DNA, 17 bp, Arabidopsis thaliana
ggggaaagaagaccctg

SEQ ID NO: 114316 - DNA, 17 bp, Arabidopsis thaliana
ggggaaagggaaggtgg

SEQ ID NO: 114317 - DNA, 17 bp, Arabidopsis thaliana
ggggaaatagaccgttt

SEQ ID NO: 114318 - DNA, 17 bp, Arabidopsis thaliana
ggggaaatggactgccg

SEQ ID NO: 114319 - DNA, 17 bp, Arabidopsis thaliana
ggggaaatggactgctg

SEQ ID NO: 114320 - DNA, 17 bp, Arabidopsis thaliana
ggggaaattgtaacgac

SEQ ID NO: 114321 - DNA, 17 bp, Arabidopsis thaliana
ggggaaatttaccactg

SEQ ID NO: 114322 - DNA, 17 bp, Arabidopsis thaliana
ggggaaatttgcgtggt

SEQ ID NO: 114323 - DNA, 17 bp, Arabidopsis thaliana
ggggaaccagaggagca

SEQ ID NO: 114324 - DNA, 17 bp, Arabidopsis thaliana
ggggaaccatttggatg

SEQ ID NO: 114325 - DNA, 17 bp, Arabidopsis thaliana
ggggaaccgaacaaggc

SEQ ID NO: 114326 - DNA, 17 bp, Arabidopsis thaliana
ggggaacctgcggaagg

SEQ ID NO: 114327 - DNA, 17 bp, Arabidopsis thaliana
ggggaacctgtggctgg

SEQ ID NO: 114328 - DNA, 17 bp, Arabidopsis thaliana
ggggaagaagactccat

SEQ ID NO: 114329 - DNA, 17 bp, Arabidopsis thaliana
ggggaagacaccatctc

SEQ ID NO: 114330 - DNA, 17 bp, Arabidopsis thaliana
ggggaagacatctggcc

SEQ ID NO: 114331 - DNA, 17 bp, Arabidopsis thaliana
ggggaagactgctgtgt

SEQ ID NO: 114332 - DNA, 17 bp, Arabidopsis thaliana
ggggaagatggtgtccg

SEQ ID NO: 114333 - DNA, 17 bp, Arabidopsis thaliana
ggggaagctgagacaca

SEQ ID NO: 114334 - DNA, 17 bp, Arabidopsis thaliana
ggggaaggctaatgtgg

SEQ ID NO: 114335 - DNA, 17 bp, Arabidopsis thaliana
ggggaaggctgtgcgtg

SEQ ID NO: 114336 - DNA, 17 bp, Arabidopsis thaliana
ggggaagtacaggtggg

SEQ ID NO: 114337 - DNA, 17 bp, Arabidopsis thaliana
ggggaataacaagaccg

SEQ ID NO: 114338 - DNA, 17 bp, Arabidopsis thaliana
ggggaataagacaggag

SEQ ID NO: 114339 - DNA, 17 bp, Arabidopsis thaliana
ggggaatacgggtttcg

SEQ ID NO: 114340 - DNA, 17 bp, Arabidopsis thaliana
ggggaataggcgattta

SEQ ID NO: 114341 - DNA, 17 bp, Arabidopsis thaliana
ggggaatatcaggagct

SEQ ID NO: 114342 - DNA, 17 bp, Arabidopsis thaliana
ggggaatatcaggaggt

SEQ ID NO: 114343 - DNA, 17 bp, Arabidopsis thaliana
ggggaatatcatgtgac

SEQ ID NO: 114344 - DNA, 17 bp, Arabidopsis thaliana
ggggaatatcgggagct

SEQ ID NO: 114345 - DNA, 17 bp, Arabidopsis thaliana
ggggaatccattcttct

SEQ ID NO: 114346 - DNA, 17 bp, Arabidopsis thaliana
ggggaatcccatgacag

SEQ ID NO: 114347 - DNA, 17 bp, Arabidopsis thaliana
ggggaatccgactccaa

SEQ ID NO: 114348 - DNA, 17 bp, Arabidopsis thaliana
ggggaatccttgatagt

SEQ ID NO: 114349 - DNA, 17 bp, Arabidopsis thaliana
ggggaatcgatttggcc

SEQ ID NO: 114350 - DNA, 17 bp, Arabidopsis thaliana
ggggaatctcggcggcc

SEQ ID NO: 114351 - DNA, 17 bp, Arabidopsis thaliana
ggggaatgaggaggatc

SEQ ID NO: 114352 - DNA, 17 bp, Arabidopsis thaliana
ggggaatgtaccatatg

SEQ ID NO: 114353 - DNA, 17 bp, Arabidopsis thaliana
ggggaatgtgccactaa

SEQ ID NO: 114354 - DNA, 17 bp, Arabidopsis thaliana
ggggaatgttgtctggc

SEQ ID NO: 114355 - DNA, 17 bp, Arabidopsis thaliana
ggggaatgtttgtgcct

SEQ ID NO: 114356 - DNA, 17 bp, Arabidopsis thaliana
ggggaatgtttgtgtgt

SEQ ID NO: 114357 - DNA, 17 bp, Arabidopsis thaliana
ggggaattacgcgcttc

SEQ ID NO: 114358 - DNA, 17 bp, Arabidopsis thaliana
ggggaattgacagacac

SEQ ID NO: 114359 - DNA, 17 bp, Arabidopsis thaliana
ggggacaagaaatgagt

SEQ ID NO: 114360 - DNA, 17 bp, Arabidopsis thaliana
ggggacaagatctggag

SEQ ID NO: 114361 - DNA, 17 bp, Arabidopsis thaliana
ggggacaatgtcccaca

SEQ ID NO: 114362 - DNA, 17 bp, Arabidopsis thaliana
ggggacacagatcgttc

SEQ ID NO: 114363 - DNA, 17 bp, Arabidopsis thaliana
ggggacacaggtcgttc

SEQ ID NO: 114364 - DNA, 17 bp, Arabidopsis thaliana
ggggacagtgacgttta

SEQ ID NO: 114365 - DNA, 17 bp, Arabidopsis thaliana
ggggacagtgtcgttta

SEQ ID NO: 114366 - DNA, 17 bp, Arabidopsis thaliana
ggggacatctcaggccg

SEQ ID NO: 114367 - DNA, 17 bp, Arabidopsis thaliana
ggggaccaggcttcatc

SEQ ID NO: 114368 - DNA, 17 bp, Arabidopsis thaliana
ggggacccagttccgaa

SEQ ID NO: 114369 - DNA, 17 bp, Arabidopsis thaliana
ggggacccgggctcgaa

SEQ ID NO: 114370 - DNA, 17 bp, Arabidopsis thaliana
ggggacccgggctcgta

SEQ ID NO: 114371 - DNA, 17 bp, Arabidopsis thaliana
ggggaccctaagtttct

SEQ ID NO: 114372 - DNA, 17 bp, Arabidopsis thaliana
ggggaccctgttgagct

SEQ ID NO: 114373 - DNA, 17 bp, Arabidopsis thaliana
ggggacccttaggaaca

SEQ ID NO: 114374 - DNA, 17 bp, Arabidopsis thaliana
ggggaccgaatggatat

SEQ ID NO: 114375 - DNA, 17 bp, Arabidopsis thaliana
ggggaccgagtgccgct

SEQ ID NO: 114376 - DNA, 17 bp, Arabidopsis thaliana
ggggaccgtgggtatct

SEQ ID NO: 114377 - DNA, 17 bp, Arabidopsis thaliana
ggggacctcttgtcttg

SEQ ID NO: 114378 - DNA, 17 bp, Arabidopsis thaliana
ggggacctgggcaggaa

SEQ ID NO: 114379 - DNA, 17 bp, Arabidopsis thaliana
ggggacctgggctcgaa

SEQ ID NO: 114380 - DNA, 17 bp, Arabidopsis thaliana
ggggacctgggctcgta

SEQ ID NO: 114381 - DNA, 17 bp, Arabidopsis thaliana
ggggacgaacggacgga

SEQ ID NO: 114382 - DNA, 17 bp, Arabidopsis thaliana
ggggacgacaatacggt

SEQ ID NO: 114383 - DNA, 17 bp, Arabidopsis thaliana
ggggacgacgattggtg

SEQ ID NO: 114384 - DNA, 17 bp, Arabidopsis thaliana
ggggacgacgatttgtg

SEQ ID NO: 114385 - DNA, 17 bp, Arabidopsis thaliana
ggggacgacggtttgta

SEQ ID NO: 114386 - DNA, 17 bp, Arabidopsis thaliana
ggggacgactgcccggc

SEQ ID NO: 114387 - DNA, 17 bp, Arabidopsis thaliana
ggggacgagtttggcag

SEQ ID NO: 114388 - DNA, 17 bp, Arabidopsis thaliana
ggggacgcactgggaac

SEQ ID NO: 114389 - DNA, 17 bp, Arabidopsis thaliana
ggggacgcttcgagctg

SEQ ID NO: 114390 - DNA, 17 bp, Arabidopsis thaliana
ggggacggacggggggg

SEQ ID NO: 114391 - DNA, 17 bp, Arabidopsis thaliana
ggggacggactgagaac

SEQ ID NO: 114392 - DNA, 17 bp, Arabidopsis thaliana
ggggacggactggaaac

SEQ ID NO: 114393 - DNA, 17 bp, Arabidopsis thaliana
ggggacggactgggaaa

SEQ ID NO: 114394 - DNA, 17 bp, Arabidopsis thaliana
ggggacggactgggaac

SEQ ID NO: 114395 - DNA, 17 bp, Arabidopsis thaliana
ggggacggactgggagc

SEQ ID NO: 114396 - DNA, 17 bp, Arabidopsis thaliana
ggggacggactgggatc

SEQ ID NO: 114397 - DNA, 17 bp, Arabidopsis thaliana
ggggacggactgggatt

SEQ ID NO: 114398 - DNA, 17 bp, Arabidopsis thaliana
ggggacggagtgggatt

SEQ ID NO: 114399 - DNA, 17 bp, Arabidopsis thaliana
ggggacgggctgggaac

SEQ ID NO: 114400 - DNA, 17 bp, Arabidopsis thaliana
ggggacgggttggcggg

SEQ ID NO: 114401 - DNA, 17 bp, Arabidopsis thaliana
ggggacgtaggtgaagg

SEQ ID NO: 114402 - DNA, 17 bp, Arabidopsis thaliana
ggggacgtcgctgccgt

SEQ ID NO: 114403 - DNA, 17 bp, Arabidopsis thaliana
ggggacgtctccatcgc

SEQ ID NO: 114404 - DNA, 17 bp, Arabidopsis thaliana
ggggacgtctgcctggg

SEQ ID NO: 114405 - DNA, 17 bp, Arabidopsis thaliana
ggggacgtgccggagtg

SEQ ID NO: 114406 - DNA, 17 bp, Arabidopsis thaliana
ggggacgttgtggtaga

SEQ ID NO: 114407 - DNA, 17 bp, Arabidopsis thaliana
ggggactacaggattcg

SEQ ID NO: 114408 - DNA, 17 bp, Arabidopsis thaliana
ggggactagttggcgta

SEQ ID NO: 114409 - DNA, 17 bp, Arabidopsis thaliana
ggggactctcggcaacg

SEQ ID NO: 114410 - DNA, 17 bp, Arabidopsis thaliana
ggggactgaccaggcca

SEQ ID NO: 114411 - DNA, 17 bp, Arabidopsis thaliana
ggggactgactgggaac

SEQ ID NO: 114412 - DNA, 17 bp, Arabidopsis thaliana
ggggactgcggcgttta

SEQ ID NO: 114413 - DNA, 17 bp, Arabidopsis thaliana
ggggactgctgaagttg

SEQ ID NO: 114414 - DNA, 17 bp, Arabidopsis thaliana
ggggactgttgtctggc

SEQ ID NO: 114415 - DNA, 17 bp, Arabidopsis thaliana
ggggacttcccctgggg

SEQ ID NO: 114416 - DNA, 17 bp, Arabidopsis thaliana
ggggactttttcatctt

SEQ ID NO: 114417 - DNA, 17 bp, Arabidopsis thaliana
ggggagaagtccactat

SEQ ID NO: 114418 - DNA, 17 bp, Arabidopsis thaliana
ggggagaagtccactct

SEQ ID NO: 114419 - DNA, 17 bp, Arabidopsis thaliana
ggggagacgctcacgaa

SEQ ID NO: 114420 - DNA, 17 bp, Arabidopsis thaliana
ggggagagactatggga

SEQ ID NO: 114421 - DNA, 17 bp, Arabidopsis thaliana
ggggagagcgaagggtg

SEQ ID NO: 114422 - DNA, 17 bp, Arabidopsis thaliana
ggggagagctaagggtg

SEQ ID NO: 114423 - DNA, 17 bp, Arabidopsis thaliana
ggggagagttggccaac

SEQ ID NO: 114424 - DNA, 17 bp, Arabidopsis thaliana
ggggagcccacaggccg

SEQ ID NO: 114425 - DNA, 17 bp, Arabidopsis thaliana
ggggagccggcgaccga

SEQ ID NO: 114426 - DNA, 17 bp, Arabidopsis thaliana
ggggagccgtaagcagg

SEQ ID NO: 114427 - DNA, 17 bp, Arabidopsis thaliana
ggggagctgaggcacag

SEQ ID NO: 114428 - DNA, 17 bp, Arabidopsis thaliana
ggggagctgcgagccaa

SEQ ID NO: 114429 - DNA, 17 bp, Arabidopsis thaliana
ggggaggaactgaaaaa

SEQ ID NO: 114430 - DNA, 17 bp, Arabidopsis thaliana
ggggaggcaagcaagct

SEQ ID NO: 114431 - DNA, 17 bp, Arabidopsis thaliana
ggggaggcggcagtccg

SEQ ID NO: 114432 - DNA, 17 bp, Arabidopsis thaliana
ggggagggcacgtctgc

SEQ ID NO: 114433 - DNA, 17 bp, Arabidopsis thaliana
ggggagggctcaggaag

SEQ ID NO: 114434 - DNA, 17 bp, Arabidopsis thaliana
ggggaggtcattggacg

SEQ ID NO: 114435 - DNA, 17 bp, Arabidopsis thaliana
ggggagtaagccgagcc

SEQ ID NO: 114436 - DNA, 17 bp, Arabidopsis thaliana
ggggagtagaagcacgc

SEQ ID NO: 114437 - DNA, 17 bp, Arabidopsis thaliana
ggggagtatggtcgcaa

SEQ ID NO: 114438 - DNA, 17 bp, Arabidopsis thaliana
ggggagtatggtcggaa

SEQ ID NO: 114439 - DNA, 17 bp, Arabidopsis thaliana
ggggagtatggtggcaa

SEQ ID NO: 114440 - DNA, 17 bp, Arabidopsis thaliana
ggggagtatggttggga

SEQ ID NO: 114441 - DNA, 17 bp, Arabidopsis thaliana
ggggagtcccctacggg

SEQ ID NO: 114442 - DNA, 17 bp, Arabidopsis thaliana
ggggagtcctctccagt

SEQ ID NO: 114443 - DNA, 17 bp, Arabidopsis thaliana
ggggagtctacaggcac

SEQ ID NO: 114444 - DNA, 17 bp, Arabidopsis thaliana
ggggagtgattcggtca

SEQ ID NO: 114445 - DNA, 17 bp, Arabidopsis thaliana
ggggagtggaccggcga

SEQ ID NO: 114446 - DNA, 17 bp, Arabidopsis thaliana
ggggagtgggagtgatg

SEQ ID NO: 114447 - DNA, 17 bp, Arabidopsis thaliana
ggggagtttacttgttg

SEQ ID NO: 114448 - DNA, 17 bp, Arabidopsis thaliana
ggggagtttggctgggg

SEQ ID NO: 114449 - DNA, 17 bp, Arabidopsis thaliana
ggggataactcagatca

SEQ ID NO: 114450 - DNA, 17 bp, Arabidopsis thaliana
ggggataatcaacaccg

SEQ ID NO: 114451 - DNA, 17 bp, Arabidopsis thaliana
ggggatagctcagatgg

SEQ ID NO: 114452 - DNA, 17 bp, Arabidopsis thaliana
ggggatagctcagttgg

SEQ ID NO: 114453 - DNA, 17 bp, Arabidopsis thaliana
ggggatatagctatgtt

SEQ ID NO: 114454 - DNA, 17 bp, Arabidopsis thaliana
ggggatatagctcagta

SEQ ID NO: 114455 - DNA, 17 bp, Arabidopsis thaliana
ggggatatagctcagtt

SEQ ID NO: 114456 - DNA, 17 bp, Arabidopsis thaliana
ggggatatggcggaagt

SEQ ID NO: 114457 - DNA, 17 bp, Arabidopsis thaliana
ggggatatggcggaatt

SEQ ID NO: 114458 - DNA, 17 bp, Arabidopsis thaliana
ggggatcgcagtgacca

SEQ ID NO: 114459 - DNA, 17 bp, Arabidopsis thaliana
ggggatcgttaccccgc

SEQ ID NO: 114460 - DNA, 17 bp, Arabidopsis thaliana
ggggatctccgaatgcc

SEQ ID NO: 114461 - DNA, 17 bp, Arabidopsis thaliana
ggggatgcaattcggaa

SEQ ID NO: 114462 - DNA, 17 bp, Arabidopsis thaliana
ggggatgggtcggccgg

SEQ ID NO: 114463 - DNA, 17 bp, Arabidopsis thaliana
ggggatggttgaagaca

SEQ ID NO: 114464 - DNA, 17 bp, Arabidopsis thaliana
ggggatgtagcccaaac

SEQ ID NO: 114465 - DNA, 17 bp, Arabidopsis thaliana
ggggatgtagcgcaaca

SEQ ID NO: 114466 - DNA, 17 bp, Arabidopsis thaliana
ggggatgtagctaaaat

SEQ ID NO: 114467 - DNA, 17 bp, Arabidopsis thaliana
ggggatgtagctaagat

SEQ ID NO: 114468 - DNA, 17 bp, Arabidopsis thaliana
ggggatgtagctataat

SEQ ID NO: 114469 - DNA, 17 bp, Arabidopsis thaliana
ggggatgtagctcaaaa

SEQ ID NO: 114470 - DNA, 17 bp, Arabidopsis thaliana
ggggatgtagctcaaac

SEQ ID NO: 114471 - DNA, 17 bp, Arabidopsis thaliana
ggggatgtagctcaaat

SEQ ID NO: 114472 - DNA, 17 bp, Arabidopsis thaliana
ggggatgtagctcagaa

SEQ ID NO: 114473 - DNA, 17 bp, Arabidopsis thaliana
ggggatgtagctcagat

SEQ ID NO: 114474 - DNA, 17 bp, Arabidopsis thaliana
ggggatgtagctcagct

SEQ ID NO: 114475 - DNA, 17 bp, Arabidopsis thaliana
ggggatgtagctcaggg

SEQ ID NO: 114476 - DNA, 17 bp, Arabidopsis thaliana
ggggatgtagctcaggt

SEQ ID NO: 114477 - DNA, 17 bp, Arabidopsis thaliana
ggggatgtagctcagtt

SEQ ID NO: 114478 - DNA, 17 bp, Arabidopsis thaliana
ggggatgtagctcataa

SEQ ID NO: 114479 - DNA, 17 bp, Arabidopsis thaliana
ggggatgtagctcatat

SEQ ID NO: 114480 - DNA, 17 bp, Arabidopsis thaliana
ggggatgtagctcatga

SEQ ID NO: 114481 - DNA, 17 bp, Arabidopsis thaliana
ggggatgtagctcatgg

SEQ ID NO: 114482 - DNA, 17 bp, Arabidopsis thaliana
ggggatgtagctcggat

SEQ ID NO: 114483 - DNA, 17 bp, Arabidopsis thaliana
ggggatgtagctgacat

SEQ ID NO: 114484 - DNA, 17 bp, Arabidopsis thaliana
ggggatgttacagtttg

SEQ ID NO: 114485 - DNA, 17 bp, Arabidopsis thaliana
ggggatgttgatcagaa

SEQ ID NO: 114486 - DNA, 17 bp, Arabidopsis thaliana
ggggattaacgctaaag

SEQ ID NO: 114487 - DNA, 17 bp, Arabidopsis thaliana
ggggattacaggctttg

SEQ ID NO: 114488 - DNA, 17 bp, Arabidopsis thaliana
ggggattacgccattac

SEQ ID NO: 114489 - DNA, 17 bp, Arabidopsis thaliana
ggggattacgggattcg

SEQ ID NO: 114490 - DNA, 17 bp, Arabidopsis thaliana
ggggattacgggctccg

SEQ ID NO: 114491 - DNA, 17 bp, Arabidopsis thaliana
ggggattacgggcttcg

SEQ ID NO: 114492 - DNA, 17 bp, Arabidopsis thaliana
ggggattacgggctttg

SEQ ID NO: 114493 - DNA, 17 bp, Arabidopsis thaliana
ggggattacgggtttcg

SEQ ID NO: 114494 - DNA, 17 bp, Arabidopsis thaliana
ggggattagagcagcgg

SEQ ID NO: 114495 - DNA, 17 bp, Arabidopsis thaliana
ggggattcgacttcccc

SEQ ID NO: 114496 - DNA, 17 bp, Arabidopsis thaliana
ggggattcgactttccc

SEQ ID NO: 114497 - DNA, 17 bp, Arabidopsis thaliana
ggggattgagagactgt

SEQ ID NO: 114498 - DNA, 17 bp, Arabidopsis thaliana
ggggattgatagcagga

SEQ ID NO: 114499 - DNA, 17 bp, Arabidopsis thaliana
ggggattgcaattgtat

SEQ ID NO: 114500 - DNA, 17 bp, Arabidopsis thaliana
ggggattgccgaccctc

SEQ ID NO: 114501 - DNA, 17 bp, Arabidopsis thaliana
ggggattgtgcgattgg

SEQ ID NO: 114502 - DNA, 17 bp, Arabidopsis thaliana
ggggattgtttgcgtcg

SEQ ID NO: 114503 - DNA, 17 bp, Arabidopsis thaliana
ggggatttgaccaccta

SEQ ID NO: 114504 - DNA, 17 bp, Arabidopsis thaliana
ggggatttgtccacatt

SEQ ID NO: 114505 - DNA, 17 bp, Arabidopsis thaliana
ggggattttcgtgattt

SEQ ID NO: 114506 - DNA, 17 bp, Arabidopsis thaliana
ggggattttggcctggt

SEQ ID NO: 114507 - DNA, 17 bp, Arabidopsis thaliana
ggggattttggtctgcg

SEQ ID NO: 114508 - DNA, 17 bp, Arabidopsis thaliana
ggggattttgttttcgg

SEQ ID NO: 114509 - DNA, 17 bp, Arabidopsis thaliana
ggggcaaactgggaagg

SEQ ID NO: 114510 - DNA, 17 bp, Arabidopsis thaliana
ggggcaaagacaactgg

SEQ ID NO: 114511 - DNA, 17 bp, Arabidopsis thaliana
ggggcaaatttcttctt

SEQ ID NO: 114512 - DNA, 17 bp, Arabidopsis thaliana
ggggcaacggatatctc

SEQ ID NO: 114513 - DNA, 17 bp, Arabidopsis thaliana
ggggcaacttccggtgc

SEQ ID NO: 114514 - DNA, 17 bp, Arabidopsis thaliana
ggggcaagaccgctcaa

SEQ ID NO: 114515 - DNA, 17 bp, Arabidopsis thaliana
ggggcaagactgctcaa

SEQ ID NO: 114516 - DNA, 17 bp, Arabidopsis thaliana
ggggcaagagccaggcc

SEQ ID NO: 114517 - DNA, 17 bp, Arabidopsis thaliana
ggggcaagagcccggcc

SEQ ID NO: 114518 - DNA, 17 bp, Arabidopsis thaliana
ggggcaagcggctgagg

SEQ ID NO: 114519 - DNA, 17 bp, Arabidopsis thaliana
ggggcaagcggtgcgac

SEQ ID NO: 114520 - DNA, 17 bp, Arabidopsis thaliana
ggggcaagggagtagta

SEQ ID NO: 114521 - DNA, 17 bp, Arabidopsis thaliana
ggggcaattttactctg

SEQ ID NO: 114522 - DNA, 17 bp, Arabidopsis thaliana
ggggcacaacgccctga

SEQ ID NO: 114523 - DNA, 17 bp, Arabidopsis thaliana
ggggcacgatttggtca

SEQ ID NO: 114524 - DNA, 17 bp, Arabidopsis thaliana
ggggcacgcctgtctgg

SEQ ID NO: 114525 - DNA, 17 bp, Arabidopsis thaliana
ggggcacggctctgcgc

SEQ ID NO: 114526 - DNA, 17 bp, Arabidopsis thaliana
ggggcacgtctgcctgg

SEQ ID NO: 114527 - DNA, 17 bp, Arabidopsis thaliana
ggggcacgtctgggtgt

SEQ ID NO: 114528 - DNA, 17 bp, Arabidopsis thaliana
ggggcactttccaagta

SEQ ID NO: 114529 - DNA, 17 bp, Arabidopsis thaliana
ggggcagaccggtgtcc

SEQ ID NO: 114530 - DNA, 17 bp, Arabidopsis thaliana
ggggcagactctgaccg

SEQ ID NO: 114531 - DNA, 17 bp, Arabidopsis thaliana
ggggcagagtggatgct

SEQ ID NO: 114532 - DNA, 17 bp, Arabidopsis thaliana
ggggcagctgcgggtgt

SEQ ID NO: 114533 - DNA, 17 bp, Arabidopsis thaliana
ggggcaggagcggtgac

SEQ ID NO: 114534 - DNA, 17 bp, Arabidopsis thaliana
ggggcaggagggacctc

SEQ ID NO: 114535 - DNA, 17 bp, Arabidopsis thaliana
ggggcaggataggtgga

SEQ ID NO: 114536 - DNA, 17 bp, Arabidopsis thaliana
ggggcaggtagcagtga

SEQ ID NO: 114537 - DNA, 17 bp, Arabidopsis thaliana
ggggcaggtgggaagac

SEQ ID NO: 114538 - DNA, 17 bp, Arabidopsis thaliana
ggggcatagcaatggca

SEQ ID NO: 114539 - DNA, 17 bp, Arabidopsis thaliana
ggggcatagttcgctaa

SEQ ID NO: 114540 - DNA, 17 bp, Arabidopsis thaliana
ggggcatggtttgatat

SEQ ID NO: 114541 - DNA, 17 bp, Arabidopsis thaliana
ggggcatgtccaatggt

SEQ ID NO: 114542 - DNA, 17 bp, Arabidopsis thaliana
ggggcattgacattttt

SEQ ID NO: 114543 - DNA, 17 bp, Arabidopsis thaliana
ggggccaaacctgttgc

SEQ ID NO: 114544 - DNA, 17 bp, Arabidopsis thaliana
ggggccaaacctgttgg

SEQ ID NO: 114545 - DNA, 17 bp, Arabidopsis thaliana
ggggccaaacctttggt

SEQ ID NO: 114546 - DNA, 17 bp, Arabidopsis thaliana
ggggccaagcgaatcca

SEQ ID NO: 114547 - DNA, 17 bp, Arabidopsis thaliana
ggggccaagcgttcata

SEQ ID NO: 114548 - DNA, 17 bp, Arabidopsis thaliana
ggggccacagcaaatgt

SEQ ID NO: 114549 - DNA, 17 bp, Arabidopsis thaliana
ggggccagtccaaggaa

SEQ ID NO: 114550 - DNA, 17 bp, Arabidopsis thaliana
ggggccatagctcagcg

SEQ ID NO: 114551 - DNA, 17 bp, Arabidopsis thaliana
ggggccatcagactttg

SEQ ID NO: 114552 - DNA, 17 bp, Arabidopsis thaliana
ggggccatttcgggtat

SEQ ID NO: 114553 - DNA, 17 bp, Arabidopsis thaliana
ggggcccatgtccatta

SEQ ID NO: 114554 - DNA, 17 bp, Arabidopsis thaliana
ggggcccccgccgacgc

SEQ ID NO: 114555 - DNA, 17 bp, Arabidopsis thaliana
ggggcccgagccatcag

SEQ ID NO: 114556 - DNA, 17 bp, Arabidopsis thaliana
ggggcccgcacaagcgg

SEQ ID NO: 114557 - DNA, 17 bp, Arabidopsis thaliana
ggggccctaagcccggg

SEQ ID NO: 114558 - DNA, 17 bp, Arabidopsis thaliana
ggggccctttgtcgcta

SEQ ID NO: 114559 - DNA, 17 bp, Arabidopsis thaliana
ggggccgacctacccag

SEQ ID NO: 114560 - DNA, 17 bp, Arabidopsis thaliana
ggggccgagacccttaa

SEQ ID NO: 114561 - DNA, 17 bp, Arabidopsis thaliana
ggggccgattagtagcg

SEQ ID NO: 114562 - DNA, 17 bp, Arabidopsis thaliana
ggggccgcagtgaccag

SEQ ID NO: 114563 - DNA, 17 bp, Arabidopsis thaliana
ggggccgctcacgcccg

SEQ ID NO: 114564 - DNA, 17 bp, Arabidopsis thaliana
ggggccggaccgatgtg

SEQ ID NO: 114565 - DNA, 17 bp, Arabidopsis thaliana
ggggccggccatgtgga

SEQ ID NO: 114566 - DNA, 17 bp, Arabidopsis thaliana
ggggccggccctgctca

SEQ ID NO: 114567 - DNA, 17 bp, Arabidopsis thaliana
ggggccggcgatgtgtc

SEQ ID NO: 114568 - DNA, 17 bp, Arabidopsis thaliana
ggggccgtcaacaccat

SEQ ID NO: 114569 - DNA, 17 bp, Arabidopsis thaliana
ggggcctaacggcgtgc

SEQ ID NO: 114570 - DNA, 17 bp, Arabidopsis thaliana
ggggcctcattggtaag

SEQ ID NO: 114571 - DNA, 17 bp, Arabidopsis thaliana
ggggcctcgggaagagt

SEQ ID NO: 114572 - DNA, 17 bp, Arabidopsis thaliana
ggggcctgagtttttcc

SEQ ID NO: 114573 - DNA, 17 bp, Arabidopsis thaliana
ggggcctggagggatta

SEQ ID NO: 114574 - DNA, 17 bp, Arabidopsis thaliana
ggggccttagctcagtt

SEQ ID NO: 114575 - DNA, 17 bp, Arabidopsis thaliana
ggggccttttgtcgcta

SEQ ID NO: 114576 - DNA, 17 bp, Arabidopsis thaliana
ggggcgaaccgaccgtc

SEQ ID NO: 114577 - DNA, 17 bp, Arabidopsis thaliana
ggggcgaagcccgtaat

SEQ ID NO: 114578 - DNA, 17 bp, Arabidopsis thaliana
ggggcgacagcgaccag

SEQ ID NO: 114579 - DNA, 17 bp, Arabidopsis thaliana
ggggcgacagttgccag

SEQ ID NO: 114580 - DNA, 17 bp, Arabidopsis thaliana
ggggcgacctatacccg

SEQ ID NO: 114581 - DNA, 17 bp, Arabidopsis thaliana
ggggcgactgaaaccaa

SEQ ID NO: 114582 - DNA, 17 bp, Arabidopsis thaliana
ggggcgagtttggcagg

SEQ ID NO: 114583 - DNA, 17 bp, Arabidopsis thaliana
ggggcgatagaccgcga

SEQ ID NO: 114584 - DNA, 17 bp, Arabidopsis thaliana
ggggcgatagaccggga

SEQ ID NO: 114585 - DNA, 17 bp, Arabidopsis thaliana
ggggcgatctagactcg

SEQ ID NO: 114586 - DNA, 17 bp, Arabidopsis thaliana
ggggcggagttggtcta

SEQ ID NO: 114587 - DNA, 17 bp, Arabidopsis thaliana
ggggcggcaaaccgtaa

SEQ ID NO: 114588 - DNA, 17 bp, Arabidopsis thaliana
ggggcggcgggatccct

SEQ ID NO: 114589 - DNA, 17 bp, Arabidopsis thaliana
ggggcgggtttggcagg

SEQ ID NO: 114590 - DNA, 17 bp, Arabidopsis thaliana
ggggcgtagccaagcgg

SEQ ID NO: 114591 - DNA, 17 bp, Arabidopsis thaliana
ggggcgtctgtaggtgg

SEQ ID NO: 114592 - DNA, 17 bp, Arabidopsis thaliana
ggggcgtggaccgacgc

SEQ ID NO: 114593 - DNA, 17 bp, Arabidopsis thaliana
ggggcgtggacggacgg

SEQ ID NO: 114594 - DNA, 17 bp, Arabidopsis thaliana
ggggcgtggatcgacgc

SEQ ID NO: 114595 - DNA, 17 bp, Arabidopsis thaliana
ggggcgtgttcatttcg

SEQ ID NO: 114596 - DNA, 17 bp, Arabidopsis thaliana
ggggcgttttgcctgat

SEQ ID NO: 114597 - DNA, 17 bp, Arabidopsis thaliana
ggggctaaagtcggcaa

SEQ ID NO: 114598 - DNA, 17 bp, Arabidopsis thaliana
ggggctaagcgatctgc

SEQ ID NO: 114599 - DNA, 17 bp, Arabidopsis thaliana
ggggctagcctacgatg

SEQ ID NO: 114600 - DNA, 17 bp, Arabidopsis thaliana
ggggctagctaccctgc

SEQ ID NO: 114601 - DNA, 17 bp, Arabidopsis thaliana
ggggctagctaccctgg

SEQ ID NO: 114602 - DNA, 17 bp, Arabidopsis thaliana
ggggctagtgacggtct

SEQ ID NO: 114603 - DNA, 17 bp, Arabidopsis thaliana
ggggctagttgattcgg

SEQ ID NO: 114604 - DNA, 17 bp, Arabidopsis thaliana
ggggctatggcagttga

SEQ ID NO: 114605 - DNA, 17 bp, Arabidopsis thaliana
ggggctatggtgaaatt

SEQ ID NO: 114606 - DNA, 17 bp, Arabidopsis thaliana
ggggctcagctgaatct

SEQ ID NO: 114607 - DNA, 17 bp, Arabidopsis thaliana
ggggctcccgtgacttt

SEQ ID NO: 114608 - DNA, 17 bp, Arabidopsis thaliana
ggggctccggattgtcg

SEQ ID NO: 114609 - DNA, 17 bp, Arabidopsis thaliana
ggggctccgtcttgcga

SEQ ID NO: 114610 - DNA, 17 bp, Arabidopsis thaliana
ggggctcgaagacgatc

SEQ ID NO: 114611 - DNA, 17 bp, Arabidopsis thaliana
ggggctcgcagtgagca

SEQ ID NO: 114612 - DNA, 17 bp, Arabidopsis thaliana
ggggctcgcggaatcct

SEQ ID NO: 114613 - DNA, 17 bp, Arabidopsis thaliana
ggggctcgggggtccca

SEQ ID NO: 114614 - DNA, 17 bp, Arabidopsis thaliana
ggggctctatctgacgt

SEQ ID NO: 114615 - DNA, 17 bp, Arabidopsis thaliana
ggggctctctcgggagc

SEQ ID NO: 114616 - DNA, 17 bp, Arabidopsis thaliana
ggggctctgaccgggtg

SEQ ID NO: 114617 - DNA, 17 bp, Arabidopsis thaliana
ggggctctggccgagtg

SEQ ID NO: 114618 - DNA, 17 bp, Arabidopsis thaliana
ggggctctgttcattga

SEQ ID NO: 114619 - DNA, 17 bp, Arabidopsis thaliana
ggggctgaactcttgta

SEQ ID NO: 114620 - DNA, 17 bp, Arabidopsis thaliana
ggggctgaccggatggg

SEQ ID NO: 114621 - DNA, 17 bp, Arabidopsis thaliana
ggggctgacgcctgccc

SEQ ID NO: 114622 - DNA, 17 bp, Arabidopsis thaliana
ggggctgagaagggtaa

SEQ ID NO: 114623 - DNA, 17 bp, Arabidopsis thaliana
ggggctgagaatgggct

SEQ ID NO: 114624 - DNA, 17 bp, Arabidopsis thaliana
ggggctgctcaagcgac

SEQ ID NO: 114625 - DNA, 17 bp, Arabidopsis thaliana
ggggctgctctaaggac

SEQ ID NO: 114626 - DNA, 17 bp, Arabidopsis thaliana
ggggctgctcttaatat

SEQ ID NO: 114627 - DNA, 17 bp, Arabidopsis thaliana
ggggctggaccagaaac

SEQ ID NO: 114628 - DNA, 17 bp, Arabidopsis thaliana
ggggctggaccagaatc

SEQ ID NO: 114629 - DNA, 17 bp, Arabidopsis thaliana
ggggctggaccgacgcg

SEQ ID NO: 114630 - DNA, 17 bp, Arabidopsis thaliana
ggggctggagtgattac

SEQ ID NO: 114631 - DNA, 17 bp, Arabidopsis thaliana
ggggctggcagggacgg

SEQ ID NO: 114632 - DNA, 17 bp, Arabidopsis thaliana
ggggctggcttctgcag

SEQ ID NO: 114633 - DNA, 17 bp, Arabidopsis thaliana
ggggctgggccttacag

SEQ ID NO: 114634 - DNA, 17 bp, Arabidopsis thaliana
ggggctggggaatccca

SEQ ID NO: 114635 - DNA, 17 bp, Arabidopsis thaliana
ggggctggtcacgggga

SEQ ID NO: 114636 - DNA, 17 bp, Arabidopsis thaliana
ggggctgtaataatcgg

SEQ ID NO: 114637 - DNA, 17 bp, Arabidopsis thaliana
ggggctgttgtaaggcc

SEQ ID NO: 114638 - DNA, 17 bp, Arabidopsis thaliana
ggggcttccacagtgta

SEQ ID NO: 114639 - DNA, 17 bp, Arabidopsis thaliana
ggggcttctgcttcggg

SEQ ID NO: 114640 - DNA, 17 bp, Arabidopsis thaliana
ggggcttcttagaggga

SEQ ID NO: 114641 - DNA, 17 bp, Arabidopsis thaliana
ggggcttgagcaactgc

SEQ ID NO: 114642 - DNA, 17 bp, Arabidopsis thaliana
ggggcttgagcaactgg

SEQ ID NO: 114643 - DNA, 17 bp, Arabidopsis thaliana
ggggcttggaccgacgc

SEQ ID NO: 114644 - DNA, 17 bp, Arabidopsis thaliana
ggggcttggcggtaaga

SEQ ID NO: 114645 - DNA, 17 bp, Arabidopsis thaliana
ggggctttggccgagtg

SEQ ID NO: 114646 - DNA, 17 bp, Arabidopsis thaliana
ggggcttttacaagaat

SEQ ID NO: 114647 - DNA, 17 bp, Arabidopsis thaliana
ggggcttttcgtgatct

SEQ ID NO: 114648 - DNA, 17 bp, Arabidopsis thaliana
ggggcttttgtcgctaa

SEQ ID NO: 114649 - DNA, 17 bp, Arabidopsis thaliana
gggggaaaaaacctgct

SEQ ID NO: 114650 - DNA, 17 bp, Arabidopsis thaliana
gggggaaacccgtctga

SEQ ID NO: 114651 - DNA, 17 bp, Arabidopsis thaliana
gggggaaacgaggcaag

SEQ ID NO: 114652 - DNA, 17 bp, Arabidopsis thaliana
gggggaaccgccggcca

SEQ ID NO: 114653 - DNA, 17 bp, Arabidopsis thaliana
gggggaacgatggagga

SEQ ID NO: 114654 - DNA, 17 bp, Arabidopsis thaliana
gggggaagcgtcgttcg

SEQ ID NO: 114655 - DNA, 17 bp, Arabidopsis thaliana
gggggaaggatgttggc

SEQ ID NO: 114656 - DNA, 17 bp, Arabidopsis thaliana
gggggaaggtgacccaa

SEQ ID NO: 114657 - DNA, 17 bp, Arabidopsis thaliana
gggggaatccgactcca

SEQ ID NO: 114658 - DNA, 17 bp, Arabidopsis thaliana
gggggaatcggctttga

SEQ ID NO: 114659 - DNA, 17 bp, Arabidopsis thaliana
gggggaatctgacggtc

SEQ ID NO: 114660 - DNA, 17 bp, Arabidopsis thaliana
gggggaatctgacggtt

SEQ ID NO: 114661 - DNA, 17 bp, Arabidopsis thaliana
gggggaatgtacaatat

SEQ ID NO: 114662 - DNA, 17 bp, Arabidopsis thaliana
gggggaatgtaccaaat

SEQ ID NO: 114663 - DNA, 17 bp, Arabidopsis thaliana
gggggaatgtaccagat

SEQ ID NO: 114664 - DNA, 17 bp, Arabidopsis thaliana
gggggaatgtaccatat

SEQ ID NO: 114665 - DNA, 17 bp, Arabidopsis thaliana
gggggaatgtagcatat

SEQ ID NO: 114666 - DNA, 17 bp, Arabidopsis thaliana
gggggaattgacaaaca

SEQ ID NO: 114667 - DNA, 17 bp, Arabidopsis thaliana
gggggaattgacagaca

SEQ ID NO: 114668 - DNA, 17 bp, Arabidopsis thaliana
gggggacacaggtcgtt

SEQ ID NO: 114669 - DNA, 17 bp, Arabidopsis thaliana
gggggacatctagcacg

SEQ ID NO: 114670 - DNA, 17 bp, Arabidopsis thaliana
gggggacattaagagag

SEQ ID NO: 114671 - DNA, 17 bp, Arabidopsis thaliana
gggggacattaagaggg

SEQ ID NO: 114672 - DNA, 17 bp, Arabidopsis thaliana
gggggaccacgccgatt

SEQ ID NO: 114673 - DNA, 17 bp, Arabidopsis thaliana
gggggaccagctgactt

SEQ ID NO: 114674 - DNA, 17 bp, Arabidopsis thaliana
gggggacggacggggaa

SEQ ID NO: 114675 - DNA, 17 bp, Arabidopsis thaliana
gggggacggactggccg

SEQ ID NO: 114676 - DNA, 17 bp, Arabidopsis thaliana
gggggacggactgggaa

SEQ ID NO: 114677 - DNA, 17 bp, Arabidopsis thaliana
gggggacggactgggat

SEQ ID NO: 114678 - DNA, 17 bp, Arabidopsis thaliana
gggggacggactgggcc

SEQ ID NO: 114679 - DNA, 17 bp, Arabidopsis thaliana
gggggacggactggggg

SEQ ID NO: 114680 - DNA, 17 bp, Arabidopsis thaliana
gggggacggactgggtc

SEQ ID NO: 114681 - DNA, 17 bp, Arabidopsis thaliana
gggggactacaggattc

SEQ ID NO: 114682 - DNA, 17 bp, Arabidopsis thaliana
gggggactgggaacggc

SEQ ID NO: 114683 - DNA, 17 bp, Arabidopsis thaliana
gggggagaagcggaggt

SEQ ID NO: 114684 - DNA, 17 bp, Arabidopsis thaliana
gggggaggagctactgc

SEQ ID NO: 114685 - DNA, 17 bp, Arabidopsis thaliana
gggggaggagctgctgc

SEQ ID NO: 114686 - DNA, 17 bp, Arabidopsis thaliana
gggggagtgtgcttatc

SEQ ID NO: 114687 - DNA, 17 bp, Arabidopsis thaliana
gggggatatgtgggctc

SEQ ID NO: 114688 - DNA, 17 bp, Arabidopsis thaliana
gggggatccctacatag

SEQ ID NO: 114689 - DNA, 17 bp, Arabidopsis thaliana
gggggatcggaacctgg

SEQ ID NO: 114690 - DNA, 17 bp, Arabidopsis thaliana
gggggatctgtcgtggc

SEQ ID NO: 114691 - DNA, 17 bp, Arabidopsis thaliana
gggggatggttgaagac

SEQ ID NO: 114692 - DNA, 17 bp, Arabidopsis thaliana
gggggattacgagtttc

SEQ ID NO: 114693 - DNA, 17 bp, Arabidopsis thaliana
gggggattacgccatta

SEQ ID NO: 114694 - DNA, 17 bp, Arabidopsis thaliana
gggggattacggacttc

SEQ ID NO: 114695 - DNA, 17 bp, Arabidopsis thaliana
gggggattacggacttt

SEQ ID NO: 114696 - DNA, 17 bp, Arabidopsis thaliana
gggggattacggatttc

SEQ ID NO: 114697 - DNA, 17 bp, Arabidopsis thaliana
gggggattacgggattc

SEQ ID NO: 114698 - DNA, 17 bp, Arabidopsis thaliana
gggggattacgggcttc

SEQ ID NO: 114699 - DNA, 17 bp, Arabidopsis thaliana
gggggattacgggcttt

SEQ ID NO: 114700 - DNA, 17 bp, Arabidopsis thaliana
gggggattacgggtttc

SEQ ID NO: 114701 - DNA, 17 bp, Arabidopsis thaliana
gggggattcccggctgg

SEQ ID NO: 114702 - DNA, 17 bp, Arabidopsis thaliana
gggggatttgcgtgaat

SEQ ID NO: 114703 - DNA, 17 bp, Arabidopsis thaliana
gggggcaagcggtgcga

SEQ ID NO: 114704 - DNA, 17 bp, Arabidopsis thaliana
gggggcagagtcttctc

SEQ ID NO: 114705 - DNA, 17 bp, Arabidopsis thaliana
gggggcatttcggacat

SEQ ID NO: 114706 - DNA, 17 bp, Arabidopsis thaliana
gggggccacatgtcgtt

SEQ ID NO: 114707 - DNA, 17 bp, Arabidopsis thaliana
gggggcgatggcagaac

SEQ ID NO: 114708 - DNA, 17 bp, Arabidopsis thaliana
gggggcgggttcatttc

SEQ ID NO: 114709 - DNA, 17 bp, Arabidopsis thaliana
gggggcggttcgtctat

SEQ ID NO: 114710 - DNA, 17 bp, Arabidopsis thaliana
gggggcgtagccaagcg

SEQ ID NO: 114711 - DNA, 17 bp, Arabidopsis thaliana
gggggcgtaggcggagg

SEQ ID NO: 114712 - DNA, 17 bp, Arabidopsis thaliana
gggggctaggccgtctg

SEQ ID NO: 114713 - DNA, 17 bp, Arabidopsis thaliana
gggggctaggcggaacc

SEQ ID NO: 114714 - DNA, 17 bp, Arabidopsis thaliana
gggggctcttcctatca

SEQ ID NO: 114715 - DNA, 17 bp, Arabidopsis thaliana
gggggctgacgcctgcc

SEQ ID NO: 114716 - DNA, 17 bp, Arabidopsis thaliana
gggggctgagtttttcc

SEQ ID NO: 114717 - DNA, 17 bp, Arabidopsis thaliana
gggggctgcgacgaggt

SEQ ID NO: 114718 - DNA, 17 bp, Arabidopsis thaliana
gggggctgcgggagagg

SEQ ID NO: 114719 - DNA, 17 bp, Arabidopsis thaliana
gggggcttgtaacgctc

SEQ ID NO: 114720 - DNA, 17 bp, Arabidopsis thaliana
ggggggaacggcctatt

SEQ ID NO: 114721 - DNA, 17 bp, Arabidopsis thaliana
ggggggaagcatttgca

SEQ ID NO: 114722 - DNA, 17 bp, Arabidopsis thaliana
ggggggaatgtaccata

SEQ ID NO: 114723 - DNA, 17 bp, Arabidopsis thaliana
ggggggaatgtaccatt

SEQ ID NO: 114724 - DNA, 17 bp, Arabidopsis thaliana
ggggggaccctcaagat

SEQ ID NO: 114725 - DNA, 17 bp, Arabidopsis thaliana
ggggggactacgggatt

SEQ ID NO: 114726 - DNA, 17 bp, Arabidopsis thaliana
ggggggagtatggtcgc

SEQ ID NO: 114727 - DNA, 17 bp, Arabidopsis thaliana
ggggggagtgctactgc

SEQ ID NO: 114728 - DNA, 17 bp, Arabidopsis thaliana
ggggggatagctcagtt

SEQ ID NO: 114729 - DNA, 17 bp, Arabidopsis thaliana
ggggggatccagaacct

SEQ ID NO: 114730 - DNA, 17 bp, Arabidopsis thaliana
ggggggatccctcgcgg

SEQ ID NO: 114731 - DNA, 17 bp, Arabidopsis thaliana
ggggggattccttgtcc

SEQ ID NO: 114732 - DNA, 17 bp, Arabidopsis thaliana
ggggggattgtcggctc

SEQ ID NO: 114733 - DNA, 17 bp, Arabidopsis thaliana
ggggggccccacggtgg

SEQ ID NO: 114734 - DNA, 17 bp, Arabidopsis thaliana
ggggggcgcagtgacca

SEQ ID NO: 114735 - DNA, 17 bp, Arabidopsis thaliana
gggggggagttttgcaa

SEQ ID NO: 114736 - DNA, 17 bp, Arabidopsis thaliana
gggggggcaagtctggt

SEQ ID NO: 114737 - DNA, 17 bp, Arabidopsis thaliana
gggggggcacgtctgcc

SEQ ID NO: 114738 - DNA, 17 bp, Arabidopsis thaliana
gggggggcctcggaaac

SEQ ID NO: 114739 - DNA, 17 bp, Arabidopsis thaliana
ggggggggggcttggat

SEQ ID NO: 114740 - DNA, 17 bp, Arabidopsis thaliana
ggggggggtcccactgg

SEQ ID NO: 114741 - DNA, 17 bp, Arabidopsis thaliana
ggggggggtcgcagtga

SEQ ID NO: 114742 - DNA, 17 bp, Arabidopsis thaliana
gggggggtgggtgttga

SEQ ID NO: 114743 - DNA, 17 bp, Arabidopsis thaliana
gggggggtggtcccagt

SEQ ID NO: 114744 - DNA, 17 bp, Arabidopsis thaliana
gggggggttcgatcccc

SEQ ID NO: 114745 - DNA, 17 bp, Arabidopsis thaliana
ggggggtctaccataac

SEQ ID NO: 114746 - DNA, 17 bp, Arabidopsis thaliana
ggggggtctgtgttgca

SEQ ID NO: 114747 - DNA, 17 bp, Arabidopsis thaliana
ggggggtgagccgctat

SEQ ID NO: 114748 - DNA, 17 bp, Arabidopsis thaliana
ggggggtgccgaaggca

SEQ ID NO: 114749 - DNA, 17 bp, Arabidopsis thaliana
ggggggtgccgaagtca

SEQ ID NO: 114750 - DNA, 17 bp, Arabidopsis thaliana
ggggggtgggagacggt

SEQ ID NO: 114751 - DNA, 17 bp, Arabidopsis thaliana
ggggggtgggtgttgag

SEQ ID NO: 114752 - DNA, 17 bp, Arabidopsis thaliana
ggggggttgaagtttgg

SEQ ID NO: 114753 - DNA, 17 bp, Arabidopsis thaliana
gggggtactaaattaaa

SEQ ID NO: 114754 - DNA, 17 bp, Arabidopsis thaliana
gggggtactcgacccct

SEQ ID NO: 114755 - DNA, 17 bp, Arabidopsis thaliana
gggggtagtgaaaagag

SEQ ID NO: 114756 - DNA, 17 bp, Arabidopsis thaliana
gggggtatctcatagga

SEQ ID NO: 114757 - DNA, 17 bp, Arabidopsis thaliana
gggggtcccaccgggcg

SEQ ID NO: 114758 - DNA, 17 bp, Arabidopsis thaliana
gggggtcccaccgtggt

SEQ ID NO: 114759 - DNA, 17 bp, Arabidopsis thaliana
gggggtcccagttccga

SEQ ID NO: 114760 - DNA, 17 bp, Arabidopsis thaliana
gggggtcccagttctga

SEQ ID NO: 114761 - DNA, 17 bp, Arabidopsis thaliana
gggggtcccatttccga

SEQ ID NO: 114762 - DNA, 17 bp, Arabidopsis thaliana
gggggtcccgaaggcag

SEQ ID NO: 114763 - DNA, 17 bp, Arabidopsis thaliana
gggggtccgcctttggt

SEQ ID NO: 114764 - DNA, 17 bp, Arabidopsis thaliana
gggggtcgcagtcacca

SEQ ID NO: 114765 - DNA, 17 bp, Arabidopsis thaliana
gggggtcgcagtgacca

SEQ ID NO: 114766 - DNA, 17 bp, Arabidopsis thaliana
gggggtcgcagtgaccc

SEQ ID NO: 114767 - DNA, 17 bp, Arabidopsis thaliana
gggggtcgcagtgacga

SEQ ID NO: 114768 - DNA, 17 bp, Arabidopsis thaliana
gggggtcgcagtgagca

SEQ ID NO: 114769 - DNA, 17 bp, Arabidopsis thaliana
gggggtcgcagtgccgg

SEQ ID NO: 114770 - DNA, 17 bp, Arabidopsis thaliana
gggggtcgcagtgtcca

SEQ ID NO: 114771 - DNA, 17 bp, Arabidopsis thaliana
gggggtcgcattgacca

SEQ ID NO: 114772 - DNA, 17 bp, Arabidopsis thaliana
gggggtcgctgtgacca

SEQ ID NO: 114773 - DNA, 17 bp, Arabidopsis thaliana
gggggtcggagtgacca

SEQ ID NO: 114774 - DNA, 17 bp, Arabidopsis thaliana
gggggtcggagtgacga

SEQ ID NO: 114775 - DNA, 17 bp, Arabidopsis thaliana
gggggtcggcaatcggg

SEQ ID NO: 114776 - DNA, 17 bp, Arabidopsis thaliana
gggggtcgtagtgacca

SEQ ID NO: 114777 - DNA, 17 bp, Arabidopsis thaliana
gggggtcgtagtggcga

SEQ ID NO: 114778 - DNA, 17 bp, Arabidopsis thaliana
gggggtgaaccgctaca

SEQ ID NO: 114779 - DNA, 17 bp, Arabidopsis thaliana
gggggtgaaccgctgtt

SEQ ID NO: 114780 - DNA, 17 bp, Arabidopsis thaliana
gggggtgagccgctatt

SEQ ID NO: 114781 - DNA, 17 bp, Arabidopsis thaliana
gggggtgccgaaggcag

SEQ ID NO: 114782 - DNA, 17 bp, Arabidopsis thaliana
gggggtgcctgttgttg

SEQ ID NO: 114783 - DNA, 17 bp, Arabidopsis thaliana
gggggtgtagctcatat

SEQ ID NO: 114784 - DNA, 17 bp, Arabidopsis thaliana
gggggtgtagctcattg

SEQ ID NO: 114785 - DNA, 17 bp, Arabidopsis thaliana
gggggtgtcaaaccagc

SEQ ID NO: 114786 - DNA, 17 bp, Arabidopsis thaliana
gggggttagatggtaag

SEQ ID NO: 114787 - DNA, 17 bp, Arabidopsis thaliana
gggggttcaagtccctc

SEQ ID NO: 114788 - DNA, 17 bp, Arabidopsis thaliana
gggggttcgagtccctt

SEQ ID NO: 114789 - DNA, 17 bp, Arabidopsis thaliana
gggggttcgatcccctc

SEQ ID NO: 114790 - DNA, 17 bp, Arabidopsis thaliana
gggggttcggctcccgg

SEQ ID NO: 114791 - DNA, 17 bp, Arabidopsis thaliana
gggggttcgggccccac

SEQ ID NO: 114792 - DNA, 17 bp, Arabidopsis thaliana
gggggttgactttctct

SEQ ID NO: 114793 - DNA, 17 bp, Arabidopsis thaliana
gggggttgcagttacca

SEQ ID NO: 114794 - DNA, 17 bp, Arabidopsis thaliana
gggggttgcttccactt

SEQ ID NO: 114795 - DNA, 17 bp, Arabidopsis thaliana
gggggttggtctgtcac

SEQ ID NO: 114796 - DNA, 17 bp, Arabidopsis thaliana
ggggtaaattggtctct

SEQ ID NO: 114797 - DNA, 17 bp, Arabidopsis thaliana
ggggtaacccgcaaggg

SEQ ID NO: 114798 - DNA, 17 bp, Arabidopsis thaliana
ggggtaactttatggat

SEQ ID NO: 114799 - DNA, 17 bp, Arabidopsis thaliana
ggggtaagactataaac

SEQ ID NO: 114800 - DNA, 17 bp, Arabidopsis thaliana
ggggtaagactataagt

SEQ ID NO: 114801 - DNA, 17 bp, Arabidopsis thaliana
ggggtaatgtaccatat

SEQ ID NO: 114802 - DNA, 17 bp, Arabidopsis thaliana
ggggtaattttgtctat

SEQ ID NO: 114803 - DNA, 17 bp, Arabidopsis thaliana
ggggtagacttgtaacg

SEQ ID NO: 114804 - DNA, 17 bp, Arabidopsis thaliana
ggggtagctcagatggt

SEQ ID NO: 114805 - DNA, 17 bp, Arabidopsis thaliana
ggggtataatggtctat

SEQ ID NO: 114806 - DNA, 17 bp, Arabidopsis thaliana
ggggtatcccaacaaac

SEQ ID NO: 114807 - DNA, 17 bp, Arabidopsis thaliana
ggggtatcccactgggt

SEQ ID NO: 114808 - DNA, 17 bp, Arabidopsis thaliana
ggggtatccccacatgg

SEQ ID NO: 114809 - DNA, 17 bp, Arabidopsis thaliana
ggggtatccctacatac

SEQ ID NO: 114810 - DNA, 17 bp, Arabidopsis thaliana
ggggtatccctacatag

SEQ ID NO: 114811 - DNA, 17 bp, Arabidopsis thaliana
ggggtatccctacatca

SEQ ID NO: 114812 - DNA, 17 bp, Arabidopsis thaliana
ggggtatccctacatgg

SEQ ID NO: 114813 - DNA, 17 bp, Arabidopsis thaliana
ggggtatccttacatag

SEQ ID NO: 114814 - DNA, 17 bp, Arabidopsis thaliana
ggggtatcgctacatgg

SEQ ID NO: 114815 - DNA, 17 bp, Arabidopsis thaliana
ggggtatctcataggag

SEQ ID NO: 114816 - DNA, 17 bp, Arabidopsis thaliana
ggggtatctttatggat

SEQ ID NO: 114817 - DNA, 17 bp, Arabidopsis thaliana
ggggtatggatcgaccg

SEQ ID NO: 114818 - DNA, 17 bp, Arabidopsis thaliana
ggggtatgttcctaagc

SEQ ID NO: 114819 - DNA, 17 bp, Arabidopsis thaliana
ggggtattagctcagtg

SEQ ID NO: 114820 - DNA, 17 bp, Arabidopsis thaliana
ggggtattcctacatag

SEQ ID NO: 114821 - DNA, 17 bp, Arabidopsis thaliana
ggggtattgtaagtggc

SEQ ID NO: 114822 - DNA, 17 bp, Arabidopsis thaliana
ggggtattttttctcag

SEQ ID NO: 114823 - DNA, 17 bp, Arabidopsis thaliana
ggggtcaaagcccgtaa

SEQ ID NO: 114824 - DNA, 17 bp, Arabidopsis thaliana
ggggtcaagagatcatg

SEQ ID NO: 114825 - DNA, 17 bp, Arabidopsis thaliana
ggggtcaggtggttctg

SEQ ID NO: 114826 - DNA, 17 bp, Arabidopsis thaliana
ggggtcaggttcgtttc

SEQ ID NO: 114827 - DNA, 17 bp, Arabidopsis thaliana
ggggtccaagcttgcct

SEQ ID NO: 114828 - DNA, 17 bp, Arabidopsis thaliana
ggggtcccaccgggcgt

SEQ ID NO: 114829 - DNA, 17 bp, Arabidopsis thaliana
ggggtcccaccgggtgt

SEQ ID NO: 114830 - DNA, 17 bp, Arabidopsis thaliana
ggggtcccaccgtggtc

SEQ ID NO: 114831 - DNA, 17 bp, Arabidopsis thaliana
ggggtcccactgggtgt

SEQ ID NO: 114832 - DNA, 17 bp, Arabidopsis thaliana
ggggtcccagttccgaa

SEQ ID NO: 114833 - DNA, 17 bp, Arabidopsis thaliana
ggggtccgcctttggtg

SEQ ID NO: 114834 - DNA, 17 bp, Arabidopsis thaliana
ggggtcctgccaaaccc

SEQ ID NO: 114835 - DNA, 17 bp, Arabidopsis thaliana
ggggtcgaatccattcg

SEQ ID NO: 114836 - DNA, 17 bp, Arabidopsis thaliana
ggggtcgacaaaaagtc

SEQ ID NO: 114837 - DNA, 17 bp, Arabidopsis thaliana
ggggtcgagcaggagag

SEQ ID NO: 114838 - DNA, 17 bp, Arabidopsis thaliana
ggggtcgagtcccctac

SEQ ID NO: 114839 - DNA, 17 bp, Arabidopsis thaliana
ggggtcgcagtcaccag

SEQ ID NO: 114840 - DNA, 17 bp, Arabidopsis thaliana
ggggtcgcagtgaccag

SEQ ID NO: 114841 - DNA, 17 bp, Arabidopsis thaliana
ggggtcgcatctgtaga

SEQ ID NO: 114842 - DNA, 17 bp, Arabidopsis thaliana
ggggtcggctgctttgt

SEQ ID NO: 114843 - DNA, 17 bp, Arabidopsis thaliana
ggggtcgtgtagatttt

SEQ ID NO: 114844 - DNA, 17 bp, Arabidopsis thaliana
ggggtctactgccaacg

SEQ ID NO: 114845 - DNA, 17 bp, Arabidopsis thaliana
ggggtctcagttccgaa

SEQ ID NO: 114846 - DNA, 17 bp, Arabidopsis thaliana
ggggtctctgtcacgac

SEQ ID NO: 114847 - DNA, 17 bp, Arabidopsis thaliana
ggggtctgcctgggtgg

SEQ ID NO: 114848 - DNA, 17 bp, Arabidopsis thaliana
ggggtctgcctgggtgt

SEQ ID NO: 114849 - DNA, 17 bp, Arabidopsis thaliana
ggggtctggctagatca

SEQ ID NO: 114850 - DNA, 17 bp, Arabidopsis thaliana
ggggtctgttggtgcca

SEQ ID NO: 114851 - DNA, 17 bp, Arabidopsis thaliana
ggggtcttggaatccat

SEQ ID NO: 114852 - DNA, 17 bp, Arabidopsis thaliana
ggggtctttcgggtgag

SEQ ID NO: 114853 - DNA, 17 bp, Arabidopsis thaliana
ggggtgaaccgctacaa

SEQ ID NO: 114854 - DNA, 17 bp, Arabidopsis thaliana
ggggtgaatccattcat

SEQ ID NO: 114855 - DNA, 17 bp, Arabidopsis thaliana
ggggtgacccaacgatc

SEQ ID NO: 114856 - DNA, 17 bp, Arabidopsis thaliana
ggggtgacttagagttc

SEQ ID NO: 114857 - DNA, 17 bp, Arabidopsis thaliana
ggggtgacttaggttct

SEQ ID NO: 114858 - DNA, 17 bp, Arabidopsis thaliana
ggggtgagccgctatta

SEQ ID NO: 114859 - DNA, 17 bp, Arabidopsis thaliana
ggggtgattgggaaggg

SEQ ID NO: 114860 - DNA, 17 bp, Arabidopsis thaliana
ggggtgcatgggtcggc

SEQ ID NO: 114861 - DNA, 17 bp, Arabidopsis thaliana
ggggtgcattggtcggc

SEQ ID NO: 114862 - DNA, 17 bp, Arabidopsis thaliana
ggggtgcccagagtgag

SEQ ID NO: 114863 - DNA, 17 bp, Arabidopsis thaliana
ggggtgcgagaggtccc

SEQ ID NO: 114864 - DNA, 17 bp, Arabidopsis thaliana
ggggtgcgtttgcggga

SEQ ID NO: 114865 - DNA, 17 bp, Arabidopsis thaliana
ggggtgctgttaacggg

SEQ ID NO: 114866 - DNA, 17 bp, Arabidopsis thaliana
ggggtggccttgctgcc

SEQ ID NO: 114867 - DNA, 17 bp, Arabidopsis thaliana
ggggtggcgcagttgga

SEQ ID NO: 114868 - DNA, 17 bp, Arabidopsis thaliana
ggggtgggtgggtgggg

SEQ ID NO: 114869 - DNA, 17 bp, Arabidopsis thaliana
ggggtgggtgttgaggg

SEQ ID NO: 114870 - DNA, 17 bp, Arabidopsis thaliana
ggggtggtagcgcagtt

SEQ ID NO: 114871 - DNA, 17 bp, Arabidopsis thaliana
ggggtggtggcgcagtt

SEQ ID NO: 114872 - DNA, 17 bp, Arabidopsis thaliana
ggggtggttgcgcaggt

SEQ ID NO: 114873 - DNA, 17 bp, Arabidopsis thaliana
ggggtggttgcgcagtt

SEQ ID NO: 114874 - DNA, 17 bp, Arabidopsis thaliana
ggggtggttgcgcggtt

SEQ ID NO: 114875 - DNA, 17 bp, Arabidopsis thaliana
ggggtgtcaaaatgggt

SEQ ID NO: 114876 - DNA, 17 bp, Arabidopsis thaliana
ggggtgtcccactgggt

SEQ ID NO: 114877 - DNA, 17 bp, Arabidopsis thaliana
ggggtgtcgaaatgggt

SEQ ID NO: 114878 - DNA, 17 bp, Arabidopsis thaliana
ggggtgtcgatcgacag

SEQ ID NO: 114879 - DNA, 17 bp, Arabidopsis thaliana
ggggtgtctgcagttcg

SEQ ID NO: 114880 - DNA, 17 bp, Arabidopsis thaliana
ggggtgttattggattg

SEQ ID NO: 114881 - DNA, 17 bp, Arabidopsis thaliana
ggggtgttgattgatgt

SEQ ID NO: 114882 - DNA, 17 bp, Arabidopsis thaliana
ggggtgttgggctgtgt

SEQ ID NO: 114883 - DNA, 17 bp, Arabidopsis thaliana
ggggttaaaggactatg

SEQ ID NO: 114884 - DNA, 17 bp, Arabidopsis thaliana
ggggttaactcgtgtca

SEQ ID NO: 114885 - DNA, 17 bp, Arabidopsis thaliana
ggggttaatcagcgagt

SEQ ID NO: 114886 - DNA, 17 bp, Arabidopsis thaliana
ggggttactgggggacg

SEQ ID NO: 114887 - DNA, 17 bp, Arabidopsis thaliana
ggggttagaatctccag

SEQ ID NO: 114888 - DNA, 17 bp, Arabidopsis thaliana
ggggttagaccgtcgtg

SEQ ID NO: 114889 - DNA, 17 bp, Arabidopsis thaliana
ggggttagacggtagga

SEQ ID NO: 114890 - DNA, 17 bp, Arabidopsis thaliana
ggggttagatactgctt

SEQ ID NO: 114891 - DNA, 17 bp, Arabidopsis thaliana
ggggttagatggtagga

SEQ ID NO: 114892 - DNA, 17 bp, Arabidopsis thaliana
ggggttaggaccttgtc

SEQ ID NO: 114893 - DNA, 17 bp, Arabidopsis thaliana
ggggttaggtttgttgc

SEQ ID NO: 114894 - DNA, 17 bp, Arabidopsis thaliana
ggggttatatggtgtga

SEQ ID NO: 114895 - DNA, 17 bp, Arabidopsis thaliana
ggggttatgatctagta

SEQ ID NO: 114896 - DNA, 17 bp, Arabidopsis thaliana
ggggttattagatttat

SEQ ID NO: 114897 - DNA, 17 bp, Arabidopsis thaliana
ggggttcaagtccctct

SEQ ID NO: 114898 - DNA, 17 bp, Arabidopsis thaliana
ggggttcaggtcgggct

SEQ ID NO: 114899 - DNA, 17 bp, Arabidopsis thaliana
ggggttcatcatgatct

SEQ ID NO: 114900 - DNA, 17 bp, Arabidopsis thaliana
ggggttcatcttactcg

SEQ ID NO: 114901 - DNA, 17 bp, Arabidopsis thaliana
ggggttcccacggactg

SEQ ID NO: 114902 - DNA, 17 bp, Arabidopsis thaliana
ggggttcctgagcttgt

SEQ ID NO: 114903 - DNA, 17 bp, Arabidopsis thaliana
ggggttcgaatccctcc

SEQ ID NO: 114904 - DNA, 17 bp, Arabidopsis thaliana
ggggttcgaatccctct

SEQ ID NO: 114905 - DNA, 17 bp, Arabidopsis thaliana
ggggttcgagtcccacc

SEQ ID NO: 114906 - DNA, 17 bp, Arabidopsis thaliana
ggggttcgagtccccta

SEQ ID NO: 114907 - DNA, 17 bp, Arabidopsis thaliana
ggggttcgagtccctca

SEQ ID NO: 114908 - DNA, 17 bp, Arabidopsis thaliana
ggggttcgagtcccttc

SEQ ID NO: 114909 - DNA, 17 bp, Arabidopsis thaliana
ggggttcgattccccta

SEQ ID NO: 114910 - DNA, 17 bp, Arabidopsis thaliana
ggggttcggctcccggt

SEQ ID NO: 114911 - DNA, 17 bp, Arabidopsis thaliana
ggggttcgtcccaccgg

SEQ ID NO: 114912 - DNA, 17 bp, Arabidopsis thaliana
ggggttcgtgccccacg

SEQ ID NO: 114913 - DNA, 17 bp, Arabidopsis thaliana
ggggttcgtttccccgc

SEQ ID NO: 114914 - DNA, 17 bp, Arabidopsis thaliana
ggggttctcaggtcacc

SEQ ID NO: 114915 - DNA, 17 bp, Arabidopsis thaliana
ggggttcttctcggaat

SEQ ID NO: 114916 - DNA, 17 bp, Arabidopsis thaliana
ggggttcttgacttttt

SEQ ID NO: 114917 - DNA, 17 bp, Arabidopsis thaliana
ggggttgaccggattag

SEQ ID NO: 114918 - DNA, 17 bp, Arabidopsis thaliana
ggggttgagtcccctac

SEQ ID NO: 114919 - DNA, 17 bp, Arabidopsis thaliana
ggggttgccacctacac

SEQ ID NO: 114920 - DNA, 17 bp, Arabidopsis thaliana
ggggttgcgcagttgga

SEQ ID NO: 114921 - DNA, 17 bp, Arabidopsis thaliana
ggggttgctcttagacc

SEQ ID NO: 114922 - DNA, 17 bp, Arabidopsis thaliana
ggggttgctcttagccc

SEQ ID NO: 114923 - DNA, 17 bp, Arabidopsis thaliana
ggggttgggcttggact

SEQ ID NO: 114924 - DNA, 17 bp, Arabidopsis thaliana
ggggttgtgaatcttat

SEQ ID NO: 114925 - DNA, 17 bp, Arabidopsis thaliana
ggggttgtgctgtccct

SEQ ID NO: 114926 - DNA, 17 bp, Arabidopsis thaliana
ggggtttaaaatggatc

SEQ ID NO: 114927 - DNA, 17 bp, Arabidopsis thaliana
ggggtttcccggctggt

SEQ ID NO: 114928 - DNA, 17 bp, Arabidopsis thaliana
ggggtttctcatacagt

SEQ ID NO: 114929 - DNA, 17 bp, Arabidopsis thaliana
ggggtttgacctaattg

SEQ ID NO: 114930 - DNA, 17 bp, Arabidopsis thaliana
ggggtttgcatgtcgtt

SEQ ID NO: 114931 - DNA, 17 bp, Arabidopsis thaliana
ggggtttgcgggagttt

SEQ ID NO: 114932 - DNA, 17 bp, Arabidopsis thaliana
ggggtttgcggttgcgg

SEQ ID NO: 114933 - DNA, 17 bp, Arabidopsis thaliana
ggggtttggacgttgtg

SEQ ID NO: 114934 - DNA, 17 bp, Arabidopsis thaliana
ggggtttggtcctcgtg

SEQ ID NO: 114935 - DNA, 17 bp, Arabidopsis thaliana
ggggtttgtccaaatga

SEQ ID NO: 114936 - DNA, 17 bp, Arabidopsis thaliana
ggggtttgttctcggtg

SEQ ID NO: 114937 - DNA, 17 bp, Arabidopsis thaliana
ggggtttgttgcacgta

SEQ ID NO: 114938 - DNA, 17 bp, Arabidopsis thaliana
ggggttttaacaggcct

SEQ ID NO: 114939 - DNA, 17 bp, Arabidopsis thaliana
ggggttttagccgtttg

SEQ ID NO: 114940 - DNA, 17 bp, Arabidopsis thaliana
ggggttttcttaggatg

SEQ ID NO: 114941 - DNA, 17 bp, Arabidopsis thaliana
ggggttttgcgacgggt

SEQ ID NO: 114942 - DNA, 17 bp, Arabidopsis thaliana
ggggttttggatgtggt

SEQ ID NO: 114943 - DNA, 17 bp, Arabidopsis thaliana
ggggttttggttcttga

SEQ ID NO: 114944 - DNA, 17 bp, Arabidopsis thaliana
gggtaaaatttcgggtt

SEQ ID NO: 114945 - DNA, 17 bp, Arabidopsis thaliana
gggtaaacggcgggagt

SEQ ID NO: 114946 - DNA, 17 bp, Arabidopsis thaliana
gggtaacagagggatgg

SEQ ID NO: 114947 - DNA, 17 bp, Arabidopsis thaliana
gggtaagaaattcgtga

SEQ ID NO: 114948 - DNA, 17 bp, Arabidopsis thaliana
gggtaagaaattcgtgt

SEQ ID NO: 114949 - DNA, 17 bp, Arabidopsis thaliana
gggtaagacactttgtg

SEQ ID NO: 114950 - DNA, 17 bp, Arabidopsis thaliana
gggtaagacttactggc

SEQ ID NO: 114951 - DNA, 17 bp, Arabidopsis thaliana
gggtaagccaagggaga

SEQ ID NO: 114952 - DNA, 17 bp, Arabidopsis thaliana
gggtaagttctcgggag

SEQ ID NO: 114953 - DNA, 17 bp, Arabidopsis thaliana
gggtaatcaagccgtct

SEQ ID NO: 114954 - DNA, 17 bp, Arabidopsis thaliana
gggtaatcccgcctgac

SEQ ID NO: 114955 - DNA, 17 bp, Arabidopsis thaliana
gggtaattactcgagca

SEQ ID NO: 114956 - DNA, 17 bp, Arabidopsis thaliana
gggtaatttcagatacg

SEQ ID NO: 114957 - DNA, 17 bp, Arabidopsis thaliana
gggtaatttgcaggcca

SEQ ID NO: 114958 - DNA, 17 bp, Arabidopsis thaliana
gggtaatttggtcattc

SEQ ID NO: 114959 - DNA, 17 bp, Arabidopsis thaliana
gggtaatttggttattt

SEQ ID NO: 114960 - DNA, 17 bp, Arabidopsis thaliana
gggtacaacccctgttt

SEQ ID NO: 114961 - DNA, 17 bp, Arabidopsis thaliana
gggtacaccgcctttct

SEQ ID NO: 114962 - DNA, 17 bp, Arabidopsis thaliana
gggtacagaccaaagga

SEQ ID NO: 114963 - DNA, 17 bp, Arabidopsis thaliana
gggtacagaccaaaggt

SEQ ID NO: 114964 - DNA, 17 bp, Arabidopsis thaliana
gggtacagccaacggca

SEQ ID NO: 114965 - DNA, 17 bp, Arabidopsis thaliana
gggtacagcggtccaag

SEQ ID NO: 114966 - DNA, 17 bp, Arabidopsis thaliana
gggtacagtgacggacc

SEQ ID NO: 114967 - DNA, 17 bp, Arabidopsis thaliana
gggtacagttaagcatg

SEQ ID NO: 114968 - DNA, 17 bp, Arabidopsis thaliana
gggtacatccacgcata

SEQ ID NO: 114969 - DNA, 17 bp, Arabidopsis thaliana
gggtacatcgcaggcgg

SEQ ID NO: 114970 - DNA, 17 bp, Arabidopsis thaliana
gggtaccaacgaacggt

SEQ ID NO: 114971 - DNA, 17 bp, Arabidopsis thaliana
gggtacccaacttggtt

SEQ ID NO: 114972 - DNA, 17 bp, Arabidopsis thaliana
gggtacccaagggtagt

SEQ ID NO: 114973 - DNA, 17 bp, Arabidopsis thaliana
gggtacccacaagtaga

SEQ ID NO: 114974 - DNA, 17 bp, Arabidopsis thaliana
gggtacccacgggtagt

SEQ ID NO: 114975 - DNA, 17 bp, Arabidopsis thaliana
gggtaccgctgctgtaa

SEQ ID NO: 114976 - DNA, 17 bp, Arabidopsis thaliana
gggtaccgctgtccacc

SEQ ID NO: 114977 - DNA, 17 bp, Arabidopsis thaliana
gggtaccggcgagagtg

SEQ ID NO: 114978 - DNA, 17 bp, Arabidopsis thaliana
gggtacgacggctccag

SEQ ID NO: 114979 - DNA, 17 bp, Arabidopsis thaliana
gggtacgactcgtttca

SEQ ID NO: 114980 - DNA, 17 bp, Arabidopsis thaliana
gggtacgatagcggtta

SEQ ID NO: 114981 - DNA, 17 bp, Arabidopsis thaliana
gggtacgattttgggtg

SEQ ID NO: 114982 - DNA, 17 bp, Arabidopsis thaliana
gggtacgcagaccccgc

SEQ ID NO: 114983 - DNA, 17 bp, Arabidopsis thaliana
gggtacgcagaccctcg

SEQ ID NO: 114984 - DNA, 17 bp, Arabidopsis thaliana
gggtacggagggattac

SEQ ID NO: 114985 - DNA, 17 bp, Arabidopsis thaliana
gggtacgggcttagggc

SEQ ID NO: 114986 - DNA, 17 bp, Arabidopsis thaliana
gggtacgtctgcctggg

SEQ ID NO: 114987 - DNA, 17 bp, Arabidopsis thaliana
gggtacgtttgggtatg

SEQ ID NO: 114988 - DNA, 17 bp, Arabidopsis thaliana
gggtactcgacctctgc

SEQ ID NO: 114989 - DNA, 17 bp, Arabidopsis thaliana
gggtactcgattgagaa

SEQ ID NO: 114990 - DNA, 17 bp, Arabidopsis thaliana
gggtactctttcaaatg

SEQ ID NO: 114991 - DNA, 17 bp, Arabidopsis thaliana
gggtactgtggtcaccg

SEQ ID NO: 114992 - DNA, 17 bp, Arabidopsis thaliana
gggtacttattcgggtt

SEQ ID NO: 114993 - DNA, 17 bp, Arabidopsis thaliana
gggtactttttgttggg

SEQ ID NO: 114994 - DNA, 17 bp, Arabidopsis thaliana
gggtagaatcctttgca

SEQ ID NO: 114995 - DNA, 17 bp, Arabidopsis thaliana
gggtagaatcctttgta

SEQ ID NO: 114996 - DNA, 17 bp, Arabidopsis thaliana
gggtagaccctgtgcct

SEQ ID NO: 114997 - DNA, 17 bp, Arabidopsis thaliana
gggtagaccgttcggct

SEQ ID NO: 114998 - DNA, 17 bp, Arabidopsis thaliana
gggtagattttcgctgg

SEQ ID NO: 114999 - DNA, 17 bp, Arabidopsis thaliana
gggtagccggcgaccga

SEQ ID NO: 115000 - DNA, 17 bp, Arabidopsis thaliana
gggtagcctgccttctt

SEQ ID NO: 115001 - DNA, 17 bp, Arabidopsis thaliana
gggtagctgttcctaag

SEQ ID NO: 115002 - DNA, 17 bp, Arabidopsis thaliana
gggtaggctttgtcact

SEQ ID NO: 115003 - DNA, 17 bp, Arabidopsis thaliana
gggtagtctcggaacaa

SEQ ID NO: 115004 - DNA, 17 bp, Arabidopsis thaliana
gggtagtctcgtaacaa

SEQ ID NO: 115005 - DNA, 17 bp, Arabidopsis thaliana
gggtagtttttttggcc

SEQ ID NO: 115006 - DNA, 17 bp, Arabidopsis thaliana
gggtataatcgtgatgg

SEQ ID NO: 115007 - DNA, 17 bp, Arabidopsis thaliana
gggtataccaacttcag

SEQ ID NO: 115008 - DNA, 17 bp, Arabidopsis thaliana
gggtatatgaccagttt

SEQ ID NO: 115009 - DNA, 17 bp, Arabidopsis thaliana
gggtatccaagcttgct

SEQ ID NO: 115010 - DNA, 17 bp, Arabidopsis thaliana
gggtatccagataccgt

SEQ ID NO: 115011 - DNA, 17 bp, Arabidopsis thaliana
gggtatccatcctgagt

SEQ ID NO: 115012 - DNA, 17 bp, Arabidopsis thaliana
gggtatcccactgggtg

SEQ ID NO: 115013 - DNA, 17 bp, Arabidopsis thaliana
gggtatccctacatacc

SEQ ID NO: 115014 - DNA, 17 bp, Arabidopsis thaliana
gggtatccctacatagc

SEQ ID NO: 115015 - DNA, 17 bp, Arabidopsis thaliana
gggtatccctacatggc

SEQ ID NO: 115016 - DNA, 17 bp, Arabidopsis thaliana
gggtatcggctctattc

SEQ ID NO: 115017 - DNA, 17 bp, Arabidopsis thaliana
gggtatcgggtttgggt

SEQ ID NO: 115018 - DNA, 17 bp, Arabidopsis thaliana
gggtatctcataggagt

SEQ ID NO: 115019 - DNA, 17 bp, Arabidopsis thaliana
gggtatctgcttgagca

SEQ ID NO: 115020 - DNA, 17 bp, Arabidopsis thaliana
gggtatgaggtgtatga

SEQ ID NO: 115021 - DNA, 17 bp, Arabidopsis thaliana
gggtatggattgtcaca

SEQ ID NO: 115022 - DNA, 17 bp, Arabidopsis thaliana
gggtatggttaattcta

SEQ ID NO: 115023 - DNA, 17 bp, Arabidopsis thaliana
gggtatgtccgggtgag

SEQ ID NO: 115024 - DNA, 17 bp, Arabidopsis thaliana
gggtatgtctaatgtct

SEQ ID NO: 115025 - DNA, 17 bp, Arabidopsis thaliana
gggtattcaggtcaacg

SEQ ID NO: 115026 - DNA, 17 bp, Arabidopsis thaliana
gggtattcaggttcgga

SEQ ID NO: 115027 - DNA, 17 bp, Arabidopsis thaliana
gggtattcaggttggga

SEQ ID NO: 115028 - DNA, 17 bp, Arabidopsis thaliana
gggtattctactcgctt

SEQ ID NO: 115029 - DNA, 17 bp, Arabidopsis thaliana
gggtattgcctcacggc

SEQ ID NO: 115030 - DNA, 17 bp, Arabidopsis thaliana
gggtattttgccgtgca

SEQ ID NO: 115031 - DNA, 17 bp, Arabidopsis thaliana
gggtatttttacggatg

SEQ ID NO: 115032 - DNA, 17 bp, Arabidopsis thaliana
gggtcaaacatctacca

SEQ ID NO: 115033 - DNA, 17 bp, Arabidopsis thaliana
gggtcaaagtccgtaat

SEQ ID NO: 115034 - DNA, 17 bp, Arabidopsis thaliana
gggtcaaattcgtttca

SEQ ID NO: 115035 - DNA, 17 bp, Arabidopsis thaliana
gggtcaaccacatttta

SEQ ID NO: 115036 - DNA, 17 bp, Arabidopsis thaliana
gggtcaaccaggttgga

SEQ ID NO: 115037 - DNA, 17 bp, Arabidopsis thaliana
gggtcaactatggctgg

SEQ ID NO: 115038 - DNA, 17 bp, Arabidopsis thaliana
gggtcaactctggctag

SEQ ID NO: 115039 - DNA, 17 bp, Arabidopsis thaliana
gggtcaactttgggagc

SEQ ID NO: 115040 - DNA, 17 bp, Arabidopsis thaliana
gggtcaactttttgttt

SEQ ID NO: 115041 - DNA, 17 bp, Arabidopsis thaliana
gggtcaagtctatcgat

SEQ ID NO: 115042 - DNA, 17 bp, Arabidopsis thaliana
gggtcacgcctctcgga

SEQ ID NO: 115043 - DNA, 17 bp, Arabidopsis thaliana
gggtcactacacgtttc

SEQ ID NO: 115044 - DNA, 17 bp, Arabidopsis thaliana
gggtcactccgatcatg

SEQ ID NO: 115045 - DNA, 17 bp, Arabidopsis thaliana
gggtcactcgcttactc

SEQ ID NO: 115046 - DNA, 17 bp, Arabidopsis thaliana
gggtcactgctatttct

SEQ ID NO: 115047 - DNA, 17 bp, Arabidopsis thaliana
gggtcagaccggtgtcc

SEQ ID NO: 115048 - DNA, 17 bp, Arabidopsis thaliana
gggtcagcaaatgcctc

SEQ ID NO: 115049 - DNA, 17 bp, Arabidopsis thaliana
gggtcagcaaatgcgtc

SEQ ID NO: 115050 - DNA, 17 bp, Arabidopsis thaliana
gggtcagcagagacgcg

SEQ ID NO: 115051 - DNA, 17 bp, Arabidopsis thaliana
gggtcagcagggagggg

SEQ ID NO: 115052 - DNA, 17 bp, Arabidopsis thaliana
gggtcagcccttgtcgc

SEQ ID NO: 115053 - DNA, 17 bp, Arabidopsis thaliana
gggtcagccctttgtcg

SEQ ID NO: 115054 - DNA, 17 bp, Arabidopsis thaliana
gggtcagcgctctgacg

SEQ ID NO: 115055 - DNA, 17 bp, Arabidopsis thaliana
gggtcagcttcctcatc

SEQ ID NO: 115056 - DNA, 17 bp, Arabidopsis thaliana
gggtcaggtactgtgtc

SEQ ID NO: 115057 - DNA, 17 bp, Arabidopsis thaliana
gggtcaggttccatctt

SEQ ID NO: 115058 - DNA, 17 bp, Arabidopsis thaliana
gggtcaggttcgtttcg

SEQ ID NO: 115059 - DNA, 17 bp, Arabidopsis thaliana
gggtcaggttgttcggt

SEQ ID NO: 115060 - DNA, 17 bp, Arabidopsis thaliana
gggtcataacggaggcc

SEQ ID NO: 115061 - DNA, 17 bp, Arabidopsis thaliana
gggtcatactcgtcagg

SEQ ID NO: 115062 - DNA, 17 bp, Arabidopsis thaliana
gggtcatatggtacagt

SEQ ID NO: 115063 - DNA, 17 bp, Arabidopsis thaliana
gggtcatatggtacatt

SEQ ID NO: 115064 - DNA, 17 bp, Arabidopsis thaliana
gggtcatcctcagtgca

SEQ ID NO: 115065 - DNA, 17 bp, Arabidopsis thaliana
gggtcatcctcagtgct

SEQ ID NO: 115066 - DNA, 17 bp, Arabidopsis thaliana
gggtcatcgggagccat

SEQ ID NO: 115067 - DNA, 17 bp, Arabidopsis thaliana
gggtcatcgggtcaacc

SEQ ID NO: 115068 - DNA, 17 bp, Arabidopsis thaliana
gggtcatgcgatctctt

SEQ ID NO: 115069 - DNA, 17 bp, Arabidopsis thaliana
gggtcattagctgcgaa

SEQ ID NO: 115070 - DNA, 17 bp, Arabidopsis thaliana
gggtcattcttcaggtg

SEQ ID NO: 115071 - DNA, 17 bp, Arabidopsis thaliana
gggtcatttcacttggg

SEQ ID NO: 115072 - DNA, 17 bp, Arabidopsis thaliana
gggtccaatttttgctg

SEQ ID NO: 115073 - DNA, 17 bp, Arabidopsis thaliana
gggtccagaacctaagt

SEQ ID NO: 115074 - DNA, 17 bp, Arabidopsis thaliana
gggtccagcggctggaa

SEQ ID NO: 115075 - DNA, 17 bp, Arabidopsis thaliana
gggtccagcggctggta

SEQ ID NO: 115076 - DNA, 17 bp, Arabidopsis thaliana
gggtccagttgggtttg

SEQ ID NO: 115077 - DNA, 17 bp, Arabidopsis thaliana
gggtccagtttgcttca

SEQ ID NO: 115078 - DNA, 17 bp, Arabidopsis thaliana
gggtccatagctcactg

SEQ ID NO: 115079 - DNA, 17 bp, Arabidopsis thaliana
gggtccatagctcagcc

SEQ ID NO: 115080 - DNA, 17 bp, Arabidopsis thaliana
gggtccatagctcagct

SEQ ID NO: 115081 - DNA, 17 bp, Arabidopsis thaliana
gggtccatagctcagtg

SEQ ID NO: 115082 - DNA, 17 bp, Arabidopsis thaliana
gggtccatatctcagtg

SEQ ID NO: 115083 - DNA, 17 bp, Arabidopsis thaliana
gggtccatggttatttt

SEQ ID NO: 115084 - DNA, 17 bp, Arabidopsis thaliana
gggtcccaccagctatg

SEQ ID NO: 115085 - DNA, 17 bp, Arabidopsis thaliana
gggtcccaccatctatc

SEQ ID NO: 115086 - DNA, 17 bp, Arabidopsis thaliana
gggtcccacccgccatg

SEQ ID NO: 115087 - DNA, 17 bp, Arabidopsis thaliana
gggtcccaccctctatc

SEQ ID NO: 115088 - DNA, 17 bp, Arabidopsis thaliana
gggtcccaccgggtccc

SEQ ID NO: 115089 - DNA, 17 bp, Arabidopsis thaliana
gggtcccaccgggtgtg

SEQ ID NO: 115090 - DNA, 17 bp, Arabidopsis thaliana
gggtcccagttccgaac

SEQ ID NO: 115091 - DNA, 17 bp, Arabidopsis thaliana
gggtcccctggaactgg

SEQ ID NO: 115092 - DNA, 17 bp, Arabidopsis thaliana
gggtccctgaacccgtc

SEQ ID NO: 115093 - DNA, 17 bp, Arabidopsis thaliana
gggtccgaactagcacc

SEQ ID NO: 115094 - DNA, 17 bp, Arabidopsis thaliana
gggtccgaatggtaacc

SEQ ID NO: 115095 - DNA, 17 bp, Arabidopsis thaliana
gggtccgaccgatgtgg

SEQ ID NO: 115096 - DNA, 17 bp, Arabidopsis thaliana
gggtccgagacttcatc

SEQ ID NO: 115097 - DNA, 17 bp, Arabidopsis thaliana
gggtccgaggattcgtc

SEQ ID NO: 115098 - DNA, 17 bp, Arabidopsis thaliana
gggtccgaggatttgtc

SEQ ID NO: 115099 - DNA, 17 bp, Arabidopsis thaliana
gggtccgcagttaagcg

SEQ ID NO: 115100 - DNA, 17 bp, Arabidopsis thaliana
gggtccgccgcatagac

SEQ ID NO: 115101 - DNA, 17 bp, Arabidopsis thaliana
gggtccggatggtatga

SEQ ID NO: 115102 - DNA, 17 bp, Arabidopsis thaliana
gggtccgggcacgacgg

SEQ ID NO: 115103 - DNA, 17 bp, Arabidopsis thaliana
gggtccgtaatatagca

SEQ ID NO: 115104 - DNA, 17 bp, Arabidopsis thaliana
gggtccgtcatatagca

SEQ ID NO: 115105 - DNA, 17 bp, Arabidopsis thaliana
gggtcctacggggcggg

SEQ ID NO: 115106 - DNA, 17 bp, Arabidopsis thaliana
gggtcctcccgtcgccg

SEQ ID NO: 115107 - DNA, 17 bp, Arabidopsis thaliana
gggtcctcggacatcct

SEQ ID NO: 115108 - DNA, 17 bp, Arabidopsis thaliana
gggtcctctgtaactgg

SEQ ID NO: 115109 - DNA, 17 bp, Arabidopsis thaliana
gggtcctcttaagatct

SEQ ID NO: 115110 - DNA, 17 bp, Arabidopsis thaliana
gggtccttaactcagtg

SEQ ID NO: 115111 - DNA, 17 bp, Arabidopsis thaliana
gggtccttagctcagta

SEQ ID NO: 115112 - DNA, 17 bp, Arabidopsis thaliana
gggtccttagctcagtc

SEQ ID NO: 115113 - DNA, 17 bp, Arabidopsis thaliana
gggtccttagctcagtg

SEQ ID NO: 115114 - DNA, 17 bp, Arabidopsis thaliana
gggtccttggggttgta

SEQ ID NO: 115115 - DNA, 17 bp, Arabidopsis thaliana
gggtcgagattcatggg

SEQ ID NO: 115116 - DNA, 17 bp, Arabidopsis thaliana
gggtcgatccgggcgga

SEQ ID NO: 115117 - DNA, 17 bp, Arabidopsis thaliana
gggtcgatctcattggg

SEQ ID NO: 115118 - DNA, 17 bp, Arabidopsis thaliana
gggtcgatgcccgagcg

SEQ ID NO: 115119 - DNA, 17 bp, Arabidopsis thaliana
gggtcgcaggagctgac

SEQ ID NO: 115120 - DNA, 17 bp, Arabidopsis thaliana
gggtcgccgatttgtgt

SEQ ID NO: 115121 - DNA, 17 bp, Arabidopsis thaliana
gggtcgccgcgtgccgg

SEQ ID NO: 115122 - DNA, 17 bp, Arabidopsis thaliana
gggtcgccgggcgttgc

SEQ ID NO: 115123 - DNA, 17 bp, Arabidopsis thaliana
gggtcgcgatcccgcga

SEQ ID NO: 115124 - DNA, 17 bp, Arabidopsis thaliana
gggtcgcgatcccggga

SEQ ID NO: 115125 - DNA, 17 bp, Arabidopsis thaliana
gggtcggaatgcttcaa

SEQ ID NO: 115126 - DNA, 17 bp, Arabidopsis thaliana
gggtcggaatgcttgaa

SEQ ID NO: 115127 - DNA, 17 bp, Arabidopsis thaliana
gggtcggccctttgtcg

SEQ ID NO: 115128 - DNA, 17 bp, Arabidopsis thaliana
gggtcggccggtccgcc

SEQ ID NO: 115129 - DNA, 17 bp, Arabidopsis thaliana
gggtcggccggtcggcc

SEQ ID NO: 115130 - DNA, 17 bp, Arabidopsis thaliana
gggtcggctactgtttt

SEQ ID NO: 115131 - DNA, 17 bp, Arabidopsis thaliana
gggtcggcttgtccctt

SEQ ID NO: 115132 - DNA, 17 bp, Arabidopsis thaliana
gggtcgggccaaatgcg

SEQ ID NO: 115133 - DNA, 17 bp, Arabidopsis thaliana
gggtcggtttttaggtc

SEQ ID NO: 115134 - DNA, 17 bp, Arabidopsis thaliana
gggtcgtagtatacgtc

SEQ ID NO: 115135 - DNA, 17 bp, Arabidopsis thaliana
gggtcgtagtttacgtc

SEQ ID NO: 115136 - DNA, 17 bp, Arabidopsis thaliana
gggtcgtcttacagcag

SEQ ID NO: 115137 - DNA, 17 bp, Arabidopsis thaliana
gggtcgtgactcggtga

SEQ ID NO: 115138 - DNA, 17 bp, Arabidopsis thaliana
gggtcgttctgccgctg

SEQ ID NO: 115139 - DNA, 17 bp, Arabidopsis thaliana
gggtcgttggatggaag

SEQ ID NO: 115140 - DNA, 17 bp, Arabidopsis thaliana
gggtcgtttgacttgat

SEQ ID NO: 115141 - DNA, 17 bp, Arabidopsis thaliana
gggtcgtttgtctatcg

SEQ ID NO: 115142 - DNA, 17 bp, Arabidopsis thaliana
gggtctaaaccaactac

SEQ ID NO: 115143 - DNA, 17 bp, Arabidopsis thaliana
gggtctaaactctttcc

SEQ ID NO: 115144 - DNA, 17 bp, Arabidopsis thaliana
gggtctaacttgatgat

SEQ ID NO: 115145 - DNA, 17 bp, Arabidopsis thaliana
gggtctaagtcttagca

SEQ ID NO: 115146 - DNA, 17 bp, Arabidopsis thaliana
gggtctaagtgtgggag

SEQ ID NO: 115147 - DNA, 17 bp, Arabidopsis thaliana
gggtctaagttctgcat

SEQ ID NO: 115148 - DNA, 17 bp, Arabidopsis thaliana
gggtctaataaacacag

SEQ ID NO: 115149 - DNA, 17 bp, Arabidopsis thaliana
gggtctacatgctcaac

SEQ ID NO: 115150 - DNA, 17 bp, Arabidopsis thaliana
gggtctacatgttcaag

SEQ ID NO: 115151 - DNA, 17 bp, Arabidopsis thaliana
gggtctagagggattac

SEQ ID NO: 115152 - DNA, 17 bp, Arabidopsis thaliana
gggtctatgcccgagcg

SEQ ID NO: 115153 - DNA, 17 bp, Arabidopsis thaliana
gggtctatggtgtagtg

SEQ ID NO: 115154 - DNA, 17 bp, Arabidopsis thaliana
gggtctattcgggtagg

SEQ ID NO: 115155 - DNA, 17 bp, Arabidopsis thaliana
gggtctattgctgcgac

SEQ ID NO: 115156 - DNA, 17 bp, Arabidopsis thaliana
gggtctccatcgcgtga

SEQ ID NO: 115157 - DNA, 17 bp, Arabidopsis thaliana
gggtctcgagtccatac

SEQ ID NO: 115158 - DNA, 17 bp, Arabidopsis thaliana
gggtctcttcaggtgtc

SEQ ID NO: 115159 - DNA, 17 bp, Arabidopsis thaliana
gggtctgaaccattgtc

SEQ ID NO: 115160 - DNA, 17 bp, Arabidopsis thaliana
gggtctgacatgtgtgc

SEQ ID NO: 115161 - DNA, 17 bp, Arabidopsis thaliana
gggtctgacattgccgt

SEQ ID NO: 115162 - DNA, 17 bp, Arabidopsis thaliana
gggtctgagaagattat

SEQ ID NO: 115163 - DNA, 17 bp, Arabidopsis thaliana
gggtctgagagtttcac

SEQ ID NO: 115164 - DNA, 17 bp, Arabidopsis thaliana
gggtctgagattgatct

SEQ ID NO: 115165 - DNA, 17 bp, Arabidopsis thaliana
gggtctgcagattctcg

SEQ ID NO: 115166 - DNA, 17 bp, Arabidopsis thaliana
gggtctggaacgattac

SEQ ID NO: 115167 - DNA, 17 bp, Arabidopsis thaliana
gggtctggaaggattac

SEQ ID NO: 115168 - DNA, 17 bp, Arabidopsis thaliana
gggtctggagggattac

SEQ ID NO: 115169 - DNA, 17 bp, Arabidopsis thaliana
gggtctggcggttctaa

SEQ ID NO: 115170 - DNA, 17 bp, Arabidopsis thaliana
gggtctggctaatggtc

SEQ ID NO: 115171 - DNA, 17 bp, Arabidopsis thaliana
gggtctggctagatcat

SEQ ID NO: 115172 - DNA, 17 bp, Arabidopsis thaliana
gggtctgggaggatgac

SEQ ID NO: 115173 - DNA, 17 bp, Arabidopsis thaliana
gggtctgggaggattac

SEQ ID NO: 115174 - DNA, 17 bp, Arabidopsis thaliana
gggtctgggatgattac

SEQ ID NO: 115175 - DNA, 17 bp, Arabidopsis thaliana
gggtctgggtggattac

SEQ ID NO: 115176 - DNA, 17 bp, Arabidopsis thaliana
gggtctggtgtcctagg

SEQ ID NO: 115177 - DNA, 17 bp, Arabidopsis thaliana
gggtctgtagtccaacg

SEQ ID NO: 115178 - DNA, 17 bp, Arabidopsis thaliana
gggtctgtcctaaaatc

SEQ ID NO: 115179 - DNA, 17 bp, Arabidopsis thaliana
gggtctgttcacctact

SEQ ID NO: 115180 - DNA, 17 bp, Arabidopsis thaliana
gggtcttagccatataa

SEQ ID NO: 115181 - DNA, 17 bp, Arabidopsis thaliana
gggtcttagccatatca

SEQ ID NO: 115182 - DNA, 17 bp, Arabidopsis thaliana
gggtcttagttggtgga

SEQ ID NO: 115183 - DNA, 17 bp, Arabidopsis thaliana
gggtcttattgggccaa

SEQ ID NO: 115184 - DNA, 17 bp, Arabidopsis thaliana
gggtcttcaggcagttg

SEQ ID NO: 115185 - DNA, 17 bp, Arabidopsis thaliana
gggtcttcaggtgatag

SEQ ID NO: 115186 - DNA, 17 bp, Arabidopsis thaliana
gggtcttcgccagggct

SEQ ID NO: 115187 - DNA, 17 bp, Arabidopsis thaliana
gggtcttcggaggtctg

SEQ ID NO: 115188 - DNA, 17 bp, Arabidopsis thaliana
gggtcttcggtgatttg

SEQ ID NO: 115189 - DNA, 17 bp, Arabidopsis thaliana
gggtcttctttctggga

SEQ ID NO: 115190 - DNA, 17 bp, Arabidopsis thaliana
gggtcttgaaaattacg

SEQ ID NO: 115191 - DNA, 17 bp, Arabidopsis thaliana
gggtcttgacctaattg

SEQ ID NO: 115192 - DNA, 17 bp, Arabidopsis thaliana
gggtcttgacctaattt

SEQ ID NO: 115193 - DNA, 17 bp, Arabidopsis thaliana
gggtcttgataagcctg

SEQ ID NO: 115194 - DNA, 17 bp, Arabidopsis thaliana
gggtcttggactccaga

SEQ ID NO: 115195 - DNA, 17 bp, Arabidopsis thaliana
gggtcttggagcaacta

SEQ ID NO: 115196 - DNA, 17 bp, Arabidopsis thaliana
gggtcttgtacacaccg

SEQ ID NO: 115197 - DNA, 17 bp, Arabidopsis thaliana
gggtctttcagtgttcc

SEQ ID NO: 115198 - DNA, 17 bp, Arabidopsis thaliana
gggtctttctcgtcaag

SEQ ID NO: 115199 - DNA, 17 bp, Arabidopsis thaliana
gggtctttgcccaattg

SEQ ID NO: 115200 - DNA, 17 bp, Arabidopsis thaliana
gggtctttttggttgcg

SEQ ID NO: 115201 - DNA, 17 bp, Arabidopsis thaliana
gggtgaaaagaaccccc

SEQ ID NO: 115202 - DNA, 17 bp, Arabidopsis thaliana
gggtgaaaatcgactaa

SEQ ID NO: 115203 - DNA, 17 bp, Arabidopsis thaliana
gggtgaaactccggaac

SEQ ID NO: 115204 - DNA, 17 bp, Arabidopsis thaliana
gggtgaaattcgttgcg

SEQ ID NO: 115205 - DNA, 17 bp, Arabidopsis thaliana
gggtgaaccgctattac

SEQ ID NO: 115206 - DNA, 17 bp, Arabidopsis thaliana
gggtgaacgacctgtgt

SEQ ID NO: 115207 - DNA, 17 bp, Arabidopsis thaliana
gggtgaatcatttggat

SEQ ID NO: 115208 - DNA, 17 bp, Arabidopsis thaliana
gggtgaattgttcaatg

SEQ ID NO: 115209 - DNA, 17 bp, Arabidopsis thaliana
gggtgacaactatgagt

SEQ ID NO: 115210 - DNA, 17 bp, Arabidopsis thaliana
gggtgacatgacaattt

SEQ ID NO: 115211 - DNA, 17 bp, Arabidopsis thaliana
gggtgaccaaaaccgca

SEQ ID NO: 115212 - DNA, 17 bp, Arabidopsis thaliana
gggtgaccaccgtacgg

SEQ ID NO: 115213 - DNA, 17 bp, Arabidopsis thaliana
gggtgacccaacgatcg

SEQ ID NO: 115214 - DNA, 17 bp, Arabidopsis thaliana
gggtgaccccccgggaa

SEQ ID NO: 115215 - DNA, 17 bp, Arabidopsis thaliana
gggtgacccggattcgt

SEQ ID NO: 115216 - DNA, 17 bp, Arabidopsis thaliana
gggtgacccgggttccc

SEQ ID NO: 115217 - DNA, 17 bp, Arabidopsis thaliana
gggtgacccgggttcga

SEQ ID NO: 115218 - DNA, 17 bp, Arabidopsis thaliana
gggtgacccgggttcgg

SEQ ID NO: 115219 - DNA, 17 bp, Arabidopsis thaliana
gggtgacccgggttcgt

SEQ ID NO: 115220 - DNA, 17 bp, Arabidopsis thaliana
gggtgacccgggttctc

SEQ ID NO: 115221 - DNA, 17 bp, Arabidopsis thaliana
gggtgacccgggttggt

SEQ ID NO: 115222 - DNA, 17 bp, Arabidopsis thaliana
gggtgacctcccggcaa

SEQ ID NO: 115223 - DNA, 17 bp, Arabidopsis thaliana
gggtgacctcccgggaa

SEQ ID NO: 115224 - DNA, 17 bp, Arabidopsis thaliana
gggtgacgcgtcttgtg

SEQ ID NO: 115225 - DNA, 17 bp, Arabidopsis thaliana
gggtgacggagaattag

SEQ ID NO: 115226 - DNA, 17 bp, Arabidopsis thaliana
gggtgactatgatactc

SEQ ID NO: 115227 - DNA, 17 bp, Arabidopsis thaliana
gggtgacttttgagatt

SEQ ID NO: 115228 - DNA, 17 bp, Arabidopsis thaliana
gggtgagacgactgcta

SEQ ID NO: 115229 - DNA, 17 bp, Arabidopsis thaliana
gggtgagagccccgtcg

SEQ ID NO: 115230 - DNA, 17 bp, Arabidopsis thaliana
gggtgagagccccgtgc

SEQ ID NO: 115231 - DNA, 17 bp, Arabidopsis thaliana
gggtgagaggctaagtg

SEQ ID NO: 115232 - DNA, 17 bp, Arabidopsis thaliana
gggtgagatcggtcttg

SEQ ID NO: 115233 - DNA, 17 bp, Arabidopsis thaliana
gggtgagattcatcaaa

SEQ ID NO: 115234 - DNA, 17 bp, Arabidopsis thaliana
gggtgagcaacgatgga

SEQ ID NO: 115235 - DNA, 17 bp, Arabidopsis thaliana
gggtgagctcttgggtt

SEQ ID NO: 115236 - DNA, 17 bp, Arabidopsis thaliana
gggtgagctgacgagct

SEQ ID NO: 115237 - DNA, 17 bp, Arabidopsis thaliana
gggtgataagatgtatg

SEQ ID NO: 115238 - DNA, 17 bp, Arabidopsis thaliana
gggtgatccctaaagtg

SEQ ID NO: 115239 - DNA, 17 bp, Arabidopsis thaliana
gggtgatccttttgtcg

SEQ ID NO: 115240 - DNA, 17 bp, Arabidopsis thaliana
gggtgatcgtggaccgt

SEQ ID NO: 115241 - DNA, 17 bp, Arabidopsis thaliana
gggtgatcgtggtctgc

SEQ ID NO: 115242 - DNA, 17 bp, Arabidopsis thaliana
gggtgatctatctatga

SEQ ID NO: 115243 - DNA, 17 bp, Arabidopsis thaliana
gggtgatgggtttagac

SEQ ID NO: 115244 - DNA, 17 bp, Arabidopsis thaliana
gggtgattcacggttga

SEQ ID NO: 115245 - DNA, 17 bp, Arabidopsis thaliana
gggtgattctggtccag

SEQ ID NO: 115246 - DNA, 17 bp, Arabidopsis thaliana
gggtgattgtctaaccg

SEQ ID NO: 115247 - DNA, 17 bp, Arabidopsis thaliana
gggtgatttctcaacag

SEQ ID NO: 115248 - DNA, 17 bp, Arabidopsis thaliana
gggtgatttgggctata

SEQ ID NO: 115249 - DNA, 17 bp, Arabidopsis thaliana
gggtgcaccgccgaccg

SEQ ID NO: 115250 - DNA, 17 bp, Arabidopsis thaliana
gggtgcaccgccgcccg

SEQ ID NO: 115251 - DNA, 17 bp, Arabidopsis thaliana
gggtgcctccggtgctg

SEQ ID NO: 115252 - DNA, 17 bp, Arabidopsis thaliana
gggtgcgatgtacgggt

SEQ ID NO: 115253 - DNA, 17 bp, Arabidopsis thaliana
gggtgcgatttgtggag

SEQ ID NO: 115254 - DNA, 17 bp, Arabidopsis thaliana
gggtgcgggaatgcttg

SEQ ID NO: 115255 - DNA, 17 bp, Arabidopsis thaliana
gggtgcgggataagtac

SEQ ID NO: 115256 - DNA, 17 bp, Arabidopsis thaliana
gggtgcggtgtagagtg

SEQ ID NO: 115257 - DNA, 17 bp, Arabidopsis thaliana
gggtgcggttgcggtta

SEQ ID NO: 115258 - DNA, 17 bp, Arabidopsis thaliana
gggtgcggttgcgttgc

SEQ ID NO: 115259 - DNA, 17 bp, Arabidopsis thaliana
gggtgctgcagctactt

SEQ ID NO: 115260 - DNA, 17 bp, Arabidopsis thaliana
gggtgcttagctcactg

SEQ ID NO: 115261 - DNA, 17 bp, Arabidopsis thaliana
gggtggaaaagtgaccg

SEQ ID NO: 115262 - DNA, 17 bp, Arabidopsis thaliana
gggtggaccctatacct

SEQ ID NO: 115263 - DNA, 17 bp, Arabidopsis thaliana
gggtggaccctgtgcct

SEQ ID NO: 115264 - DNA, 17 bp, Arabidopsis thaliana
gggtggagcgatttgtc

SEQ ID NO: 115265 - DNA, 17 bp, Arabidopsis thaliana
gggtggatcatcctgta

SEQ ID NO: 115266 - DNA, 17 bp, Arabidopsis thaliana
gggtggatccaccttac

SEQ ID NO: 115267 - DNA, 17 bp, Arabidopsis thaliana
gggtggattacgggttt

SEQ ID NO: 115268 - DNA, 17 bp, Arabidopsis thaliana
gggtggcaagtgctgat

SEQ ID NO: 115269 - DNA, 17 bp, Arabidopsis thaliana
gggtggcaggacaggaa

SEQ ID NO: 115270 - DNA, 17 bp, Arabidopsis thaliana
gggtggctaaattgcta

SEQ ID NO: 115271 - DNA, 17 bp, Arabidopsis thaliana
gggtgggacccacggcg

SEQ ID NO: 115272 - DNA, 17 bp, Arabidopsis thaliana
gggtgggacccagggcg

SEQ ID NO: 115273 - DNA, 17 bp, Arabidopsis thaliana
gggtgggaggcctgtga

SEQ ID NO: 115274 - DNA, 17 bp, Arabidopsis thaliana
gggtgggatgggtcggc

SEQ ID NO: 115275 - DNA, 17 bp, Arabidopsis thaliana
gggtgggctattagctc

SEQ ID NO: 115276 - DNA, 17 bp, Arabidopsis thaliana
gggtgggtcggcgattg

SEQ ID NO: 115277 - DNA, 17 bp, Arabidopsis thaliana
gggtgggtgcgaatctg

SEQ ID NO: 115278 - DNA, 17 bp, Arabidopsis thaliana
gggtgggtggaccctgt

SEQ ID NO: 115279 - DNA, 17 bp, Arabidopsis thaliana
gggtgggtgttgaggga

SEQ ID NO: 115280 - DNA, 17 bp, Arabidopsis thaliana
gggtgggttcgggtccc

SEQ ID NO: 115281 - DNA, 17 bp, Arabidopsis thaliana
gggtggtcaccatgtgg

SEQ ID NO: 115282 - DNA, 17 bp, Arabidopsis thaliana
gggtggtccaagtctct

SEQ ID NO: 115283 - DNA, 17 bp, Arabidopsis thaliana
gggtggtcccagttggg

SEQ ID NO: 115284 - DNA, 17 bp, Arabidopsis thaliana
gggtggtcgagtatcag

SEQ ID NO: 115285 - DNA, 17 bp, Arabidopsis thaliana
gggtggtctactccggt

SEQ ID NO: 115286 - DNA, 17 bp, Arabidopsis thaliana
gggtggtgaggttgtga

SEQ ID NO: 115287 - DNA, 17 bp, Arabidopsis thaliana
gggtggtgctgctggta

SEQ ID NO: 115288 - DNA, 17 bp, Arabidopsis thaliana
gggtggtggtgcatggc

SEQ ID NO: 115289 - DNA, 17 bp, Arabidopsis thaliana
gggtggtggtgcatggg

SEQ ID NO: 115290 - DNA, 17 bp, Arabidopsis thaliana
gggtggtggtgccagcc

SEQ ID NO: 115291 - DNA, 17 bp, Arabidopsis thaliana
gggtggtggttcatggg

SEQ ID NO: 115292 - DNA, 17 bp, Arabidopsis thaliana
gggtggttgcgcagttg

SEQ ID NO: 115293 - DNA, 17 bp, Arabidopsis thaliana
gggtggttgcggtttca

SEQ ID NO: 115294 - DNA, 17 bp, Arabidopsis thaliana
gggtgtaagtctactcg

SEQ ID NO: 115295 - DNA, 17 bp, Arabidopsis thaliana
gggtgtacagatagcga

SEQ ID NO: 115296 - DNA, 17 bp, Arabidopsis thaliana
gggtgtacggcaggctg

SEQ ID NO: 115297 - DNA, 17 bp, Arabidopsis thaliana
gggtgtactttcaaagc

SEQ ID NO: 115298 - DNA, 17 bp, Arabidopsis thaliana
gggtgtagattgttagg

SEQ ID NO: 115299 - DNA, 17 bp, Arabidopsis thaliana
gggtgtcacaaatcgtc

SEQ ID NO: 115300 - DNA, 17 bp, Arabidopsis thaliana
gggtgtcccaccgggca

SEQ ID NO: 115301 - DNA, 17 bp, Arabidopsis thaliana
gggtgtcccaccgggtg

SEQ ID NO: 115302 - DNA, 17 bp, Arabidopsis thaliana
gggtgtcccactgggtg

SEQ ID NO: 115303 - DNA, 17 bp, Arabidopsis thaliana
gggtgtcccgacaacgg

SEQ ID NO: 115304 - DNA, 17 bp, Arabidopsis thaliana
gggtgtcctgaacccga

SEQ ID NO: 115305 - DNA, 17 bp, Arabidopsis thaliana
gggtgtcgcagtgacca

SEQ ID NO: 115306 - DNA, 17 bp, Arabidopsis thaliana
gggtgtcttgtatgccg

SEQ ID NO: 115307 - DNA, 17 bp, Arabidopsis thaliana
gggtgtgacatgtgtgc

SEQ ID NO: 115308 - DNA, 17 bp, Arabidopsis thaliana
gggtgtgagcatgcctg

SEQ ID NO: 115309 - DNA, 17 bp, Arabidopsis thaliana
gggtgtgagtcgtgtga

SEQ ID NO: 115310 - DNA, 17 bp, Arabidopsis thaliana
gggtgtgagttaggccc

SEQ ID NO: 115311 - DNA, 17 bp, Arabidopsis thaliana
gggtgtgagttaggccg

SEQ ID NO: 115312 - DNA, 17 bp, Arabidopsis thaliana
gggtgtgatcactcctc

SEQ ID NO: 115313 - DNA, 17 bp, Arabidopsis thaliana
gggtgtgcaacgattat

SEQ ID NO: 115314 - DNA, 17 bp, Arabidopsis thaliana
gggtgtgcattggtcgg

SEQ ID NO: 115315 - DNA, 17 bp, Arabidopsis thaliana
gggtgtgcattggttgg

SEQ ID NO: 115316 - DNA, 17 bp, Arabidopsis thaliana
gggtgtggcctgcaatt

SEQ ID NO: 115317 - DNA, 17 bp, Arabidopsis thaliana
gggtgtggtctagtggt

SEQ ID NO: 115318 - DNA, 17 bp, Arabidopsis thaliana
gggtgtggttcgtatgc

SEQ ID NO: 115319 - DNA, 17 bp, Arabidopsis thaliana
gggtgttcatggagtcg

SEQ ID NO: 115320 - DNA, 17 bp, Arabidopsis thaliana
gggtgttccatctgaat

SEQ ID NO: 115321 - DNA, 17 bp, Arabidopsis thaliana
gggtgttcgtttatctg

SEQ ID NO: 115322 - DNA, 17 bp, Arabidopsis thaliana
gggtgttgagggagtca

SEQ ID NO: 115323 - DNA, 17 bp, Arabidopsis thaliana
gggtgttgagggagtct

SEQ ID NO: 115324 - DNA, 17 bp, Arabidopsis thaliana
gggtgttgagggagttt

SEQ ID NO: 115325 - DNA, 17 bp, Arabidopsis thaliana
gggtgttggtcgattaa

SEQ ID NO: 115326 - DNA, 17 bp, Arabidopsis thaliana
gggtgttgtctagtggt

SEQ ID NO: 115327 - DNA, 17 bp, Arabidopsis thaliana
gggtgtttggtctaatg

SEQ ID NO: 115328 - DNA, 17 bp, Arabidopsis thaliana
gggtgtttggtctagtg

SEQ ID NO: 115329 - DNA, 17 bp, Arabidopsis thaliana
gggtgtttggtcttgtg

SEQ ID NO: 115330 - DNA, 17 bp, Arabidopsis thaliana
gggtgttttggttgtct

SEQ ID NO: 115331 - DNA, 17 bp, Arabidopsis thaliana
gggttaaaatctaccgc

SEQ ID NO: 115332 - DNA, 17 bp, Arabidopsis thaliana
gggttaaagccattttg

SEQ ID NO: 115333 - DNA, 17 bp, Arabidopsis thaliana
gggttaaatggtcgacc

SEQ ID NO: 115334 - DNA, 17 bp, Arabidopsis thaliana
gggttaaccgatcgaga

SEQ ID NO: 115335 - DNA, 17 bp, Arabidopsis thaliana
gggttaaccggtcagac

SEQ ID NO: 115336 - DNA, 17 bp, Arabidopsis thaliana
gggttaactcgtgtcaa

SEQ ID NO: 115337 - DNA, 17 bp, Arabidopsis thaliana
gggttaactggtcggac

SEQ ID NO: 115338 - DNA, 17 bp, Arabidopsis thaliana
gggttaagaccgaccgg

SEQ ID NO: 115339 - DNA, 17 bp, Arabidopsis thaliana
gggttaagcagtccgtc

SEQ ID NO: 115340 - DNA, 17 bp, Arabidopsis thaliana
gggttaagcagttcgtc

SEQ ID NO: 115341 - DNA, 17 bp, Arabidopsis thaliana
gggttaagttgagttga

SEQ ID NO: 115342 - DNA, 17 bp, Arabidopsis thaliana
gggttaatgtggggcac

SEQ ID NO: 115343 - DNA, 17 bp, Arabidopsis thaliana
gggttacatcgacaaag

SEQ ID NO: 115344 - DNA, 17 bp, Arabidopsis thaliana
gggttacatttggagcg

SEQ ID NO: 115345 - DNA, 17 bp, Arabidopsis thaliana
gggttacccattttgac

SEQ ID NO: 115346 - DNA, 17 bp, Arabidopsis thaliana
gggttacggtgcccaac

SEQ ID NO: 115347 - DNA, 17 bp, Arabidopsis thaliana
gggttactcatgtgtat

SEQ ID NO: 115348 - DNA, 17 bp, Arabidopsis thaliana
gggttagaccgtcggga

SEQ ID NO: 115349 - DNA, 17 bp, Arabidopsis thaliana
gggttagaccgtcgtga

SEQ ID NO: 115350 - DNA, 17 bp, Arabidopsis thaliana
gggttagagtttttcgg

SEQ ID NO: 115351 - DNA, 17 bp, Arabidopsis thaliana
gggttagagtttttggg

SEQ ID NO: 115352 - DNA, 17 bp, Arabidopsis thaliana
gggttagcgaactatgc

SEQ ID NO: 115353 - DNA, 17 bp, Arabidopsis thaliana
gggttagctaactatgc

SEQ ID NO: 115354 - DNA, 17 bp, Arabidopsis thaliana
gggttagctcagactga

SEQ ID NO: 115355 - DNA, 17 bp, Arabidopsis thaliana
gggttagctgattttat

SEQ ID NO: 115356 - DNA, 17 bp, Arabidopsis thaliana
gggttagtattgattaa

SEQ ID NO: 115357 - DNA, 17 bp, Arabidopsis thaliana
gggttagtcgcatcctg

SEQ ID NO: 115358 - DNA, 17 bp, Arabidopsis thaliana
gggttatatggtaggac

SEQ ID NO: 115359 - DNA, 17 bp, Arabidopsis thaliana
gggttatcccttgatgt

SEQ ID NO: 115360 - DNA, 17 bp, Arabidopsis thaliana
gggttatggtttacgcg

SEQ ID NO: 115361 - DNA, 17 bp, Arabidopsis thaliana
gggttattagctcagtg

SEQ ID NO: 115362 - DNA, 17 bp, Arabidopsis thaliana
gggttattgggtcaatt

SEQ ID NO: 115363 - DNA, 17 bp, Arabidopsis thaliana
gggttcaaatcccacag

SEQ ID NO: 115364 - DNA, 17 bp, Arabidopsis thaliana
gggttcaaatcctgtct

SEQ ID NO: 115365 - DNA, 17 bp, Arabidopsis thaliana
gggttcaaattttctac

SEQ ID NO: 115366 - DNA, 17 bp, Arabidopsis thaliana
gggttcaacttgatgtg

SEQ ID NO: 115367 - DNA, 17 bp, Arabidopsis thaliana
gggttcaagattttgca

SEQ ID NO: 115368 - DNA, 17 bp, Arabidopsis thaliana
gggttcaagtccctcta

SEQ ID NO: 115369 - DNA, 17 bp, Arabidopsis thaliana
gggttcaagtcccttca

SEQ ID NO: 115370 - DNA, 17 bp, Arabidopsis thaliana
gggttcaattcccgtcg

SEQ ID NO: 115371 - DNA, 17 bp, Arabidopsis thaliana
gggttcaccatcccgca

SEQ ID NO: 115372 - DNA, 17 bp, Arabidopsis thaliana
gggttcacccttatccc

SEQ ID NO: 115373 - DNA, 17 bp, Arabidopsis thaliana
gggttcacggttaattt

SEQ ID NO: 115374 - DNA, 17 bp, Arabidopsis thaliana
gggttcacttctaggga

SEQ ID NO: 115375 - DNA, 17 bp, Arabidopsis thaliana
gggttcagaactgtgac

SEQ ID NO: 115376 - DNA, 17 bp, Arabidopsis thaliana
gggttcagatacggttt

SEQ ID NO: 115377 - DNA, 17 bp, Arabidopsis thaliana
gggttcagatcccacag

SEQ ID NO: 115378 - DNA, 17 bp, Arabidopsis thaliana
gggttcaggtcgggctg

SEQ ID NO: 115379 - DNA, 17 bp, Arabidopsis thaliana
gggttcagtttcgtcaa

SEQ ID NO: 115380 - DNA, 17 bp, Arabidopsis thaliana
gggttcagtttcgtcag

SEQ ID NO: 115381 - DNA, 17 bp, Arabidopsis thaliana
gggttcagtttcgtcga

SEQ ID NO: 115382 - DNA, 17 bp, Arabidopsis thaliana
gggttcatcccacagtt

SEQ ID NO: 115383 - DNA, 17 bp, Arabidopsis thaliana
gggttcatgagttgcgt

SEQ ID NO: 115384 - DNA, 17 bp, Arabidopsis thaliana
gggttcatttcccggct

SEQ ID NO: 115385 - DNA, 17 bp, Arabidopsis thaliana
gggttccacgtgatcgc

SEQ ID NO: 115386 - DNA, 17 bp, Arabidopsis thaliana
gggttcccaaaggttgt

SEQ ID NO: 115387 - DNA, 17 bp, Arabidopsis thaliana
gggttcccacggactgc

SEQ ID NO: 115388 - DNA, 17 bp, Arabidopsis thaliana
gggttccccggcaacgg

SEQ ID NO: 115389 - DNA, 17 bp, Arabidopsis thaliana
gggttcccctgaggtgc

SEQ ID NO: 115390 - DNA, 17 bp, Arabidopsis thaliana
gggttcccggcagacgc

SEQ ID NO: 115391 - DNA, 17 bp, Arabidopsis thaliana
gggttcccggctggtgc

SEQ ID NO: 115392 - DNA, 17 bp, Arabidopsis thaliana
gggttccgagactgacg

SEQ ID NO: 115393 - DNA, 17 bp, Arabidopsis thaliana
gggttccgcctctcgga

SEQ ID NO: 115394 - DNA, 17 bp, Arabidopsis thaliana
gggttccggggggagta

SEQ ID NO: 115395 - DNA, 17 bp, Arabidopsis thaliana
gggttcctcaaagtatt

SEQ ID NO: 115396 - DNA, 17 bp, Arabidopsis thaliana
gggttcgaagcccgtaa

SEQ ID NO: 115397 - DNA, 17 bp, Arabidopsis thaliana
gggttcgaatccactgg

SEQ ID NO: 115398 - DNA, 17 bp, Arabidopsis thaliana
gggttcgaatcccacgg

SEQ ID NO: 115399 - DNA, 17 bp, Arabidopsis thaliana
gggttcgaatcccactg

SEQ ID NO: 115400 - DNA, 17 bp, Arabidopsis thaliana
gggttcgaatccctcgc

SEQ ID NO: 115401 - DNA, 17 bp, Arabidopsis thaliana
gggttcgaatccctctc

SEQ ID NO: 115402 - DNA, 17 bp, Arabidopsis thaliana
gggttcgaatctctctc

SEQ ID NO: 115403 - DNA, 17 bp, Arabidopsis thaliana
gggttcgacccccccag

SEQ ID NO: 115404 - DNA, 17 bp, Arabidopsis thaliana
gggttcgactcccggca

SEQ ID NO: 115405 - DNA, 17 bp, Arabidopsis thaliana
gggttcgactcccggta

SEQ ID NO: 115406 - DNA, 17 bp, Arabidopsis thaliana
gggttcgactctcggca

SEQ ID NO: 115407 - DNA, 17 bp, Arabidopsis thaliana
gggttcgagccccacgg

SEQ ID NO: 115408 - DNA, 17 bp, Arabidopsis thaliana
gggttcgagccccctca

SEQ ID NO: 115409 - DNA, 17 bp, Arabidopsis thaliana
gggttcgagccccgccg

SEQ ID NO: 115410 - DNA, 17 bp, Arabidopsis thaliana
gggttcgagccccgtca

SEQ ID NO: 115411 - DNA, 17 bp, Arabidopsis thaliana
gggttcgagtcccaccg

SEQ ID NO: 115412 - DNA, 17 bp, Arabidopsis thaliana
gggttcgagtcccactg

SEQ ID NO: 115413 - DNA, 17 bp, Arabidopsis thaliana
gggttcgagtcccagcg

SEQ ID NO: 115414 - DNA, 17 bp, Arabidopsis thaliana
gggttcgagtccccccc

SEQ ID NO: 115415 - DNA, 17 bp, Arabidopsis thaliana
gggttcgagtcccctac

SEQ ID NO: 115416 - DNA, 17 bp, Arabidopsis thaliana
gggttcgagtcccgggc

SEQ ID NO: 115417 - DNA, 17 bp, Arabidopsis thaliana
gggttcgagtgaccatc

SEQ ID NO: 115418 - DNA, 17 bp, Arabidopsis thaliana
gggttcgagtgccaccg

SEQ ID NO: 115419 - DNA, 17 bp, Arabidopsis thaliana
gggttcgagttttttag

SEQ ID NO: 115420 - DNA, 17 bp, Arabidopsis thaliana
gggttcgatccccacag

SEQ ID NO: 115421 - DNA, 17 bp, Arabidopsis thaliana
gggttcgatccccagca

SEQ ID NO: 115422 - DNA, 17 bp, Arabidopsis thaliana
gggttcgatccccagtg

SEQ ID NO: 115423 - DNA, 17 bp, Arabidopsis thaliana
gggttcgatccccctag

SEQ ID NO: 115424 - DNA, 17 bp, Arabidopsis thaliana
gggttcgatcctcggca

SEQ ID NO: 115425 - DNA, 17 bp, Arabidopsis thaliana
gggttcgatccttggca

SEQ ID NO: 115426 - DNA, 17 bp, Arabidopsis thaliana
gggttcgatctccacag

SEQ ID NO: 115427 - DNA, 17 bp, Arabidopsis thaliana
gggttcgattcccacag

SEQ ID NO: 115428 - DNA, 17 bp, Arabidopsis thaliana
gggttcgattcccgcta

SEQ ID NO: 115429 - DNA, 17 bp, Arabidopsis thaliana
gggttcgattcccggct

SEQ ID NO: 115430 - DNA, 17 bp, Arabidopsis thaliana
gggttcgattcccgtct

SEQ ID NO: 115431 - DNA, 17 bp, Arabidopsis thaliana
gggttcgattcccgttt

SEQ ID NO: 115432 - DNA, 17 bp, Arabidopsis thaliana
gggttcgattccctgga

SEQ ID NO: 115433 - DNA, 17 bp, Arabidopsis thaliana
gggttcgattccggaga

SEQ ID NO: 115434 - DNA, 17 bp, Arabidopsis thaliana
gggttcgccccacggtg

SEQ ID NO: 115435 - DNA, 17 bp, Arabidopsis thaliana
gggttcgcctcccactg

SEQ ID NO: 115436 - DNA, 17 bp, Arabidopsis thaliana
gggttcgcgccaagcaa

SEQ ID NO: 115437 - DNA, 17 bp, Arabidopsis thaliana
gggttcgcgttcttcag

SEQ ID NO: 115438 - DNA, 17 bp, Arabidopsis thaliana
gggttcgcttctgctta

SEQ ID NO: 115439 - DNA, 17 bp, Arabidopsis thaliana
gggttcggacggttcgg

SEQ ID NO: 115440 - DNA, 17 bp, Arabidopsis thaliana
gggttcggatttgggtt

SEQ ID NO: 115441 - DNA, 17 bp, Arabidopsis thaliana
gggttcggccccacggt

SEQ ID NO: 115442 - DNA, 17 bp, Arabidopsis thaliana
gggttcggctcccaccg

SEQ ID NO: 115443 - DNA, 17 bp, Arabidopsis thaliana
gggttcggctcccactg

SEQ ID NO: 115444 - DNA, 17 bp, Arabidopsis thaliana
gggttcggctcccggca

SEQ ID NO: 115445 - DNA, 17 bp, Arabidopsis thaliana
gggttcggctcccggcc

SEQ ID NO: 115446 - DNA, 17 bp, Arabidopsis thaliana
gggttcggctcccggta

SEQ ID NO: 115447 - DNA, 17 bp, Arabidopsis thaliana
gggttcgggagtatgac

SEQ ID NO: 115448 - DNA, 17 bp, Arabidopsis thaliana
gggttcgggccccacgg

SEQ ID NO: 115449 - DNA, 17 bp, Arabidopsis thaliana
gggttcgggccccatgg

SEQ ID NO: 115450 - DNA, 17 bp, Arabidopsis thaliana
gggttcgggtcccacca

SEQ ID NO: 115451 - DNA, 17 bp, Arabidopsis thaliana
gggttcgggtcccaccg

SEQ ID NO: 115452 - DNA, 17 bp, Arabidopsis thaliana
gggttcgggtcccactg

SEQ ID NO: 115453 - DNA, 17 bp, Arabidopsis thaliana
gggttcgggtcccggca

SEQ ID NO: 115454 - DNA, 17 bp, Arabidopsis thaliana
gggttcggtcccaccgg

SEQ ID NO: 115455 - DNA, 17 bp, Arabidopsis thaliana
gggttcggtcccactgg

SEQ ID NO: 115456 - DNA, 17 bp, Arabidopsis thaliana
gggttcggtccccacag

SEQ ID NO: 115457 - DNA, 17 bp, Arabidopsis thaliana
gggttcggtccccagca

SEQ ID NO: 115458 - DNA, 17 bp, Arabidopsis thaliana
gggttcggtccccagtc

SEQ ID NO: 115459 - DNA, 17 bp, Arabidopsis thaliana
gggttcggtccccagtg

SEQ ID NO: 115460 - DNA, 17 bp, Arabidopsis thaliana
gggttcggtcccccgca

SEQ ID NO: 115461 - DNA, 17 bp, Arabidopsis thaliana
gggttcggtccccggca

SEQ ID NO: 115462 - DNA, 17 bp, Arabidopsis thaliana
gggttcggttccactgg

SEQ ID NO: 115463 - DNA, 17 bp, Arabidopsis thaliana
gggttcggttcccggct

SEQ ID NO: 115464 - DNA, 17 bp, Arabidopsis thaliana
gggttcgtaccccacag

SEQ ID NO: 115465 - DNA, 17 bp, Arabidopsis thaliana
gggttcgtatcccactg

SEQ ID NO: 115466 - DNA, 17 bp, Arabidopsis thaliana
gggttcgtccactgcag

SEQ ID NO: 115467 - DNA, 17 bp, Arabidopsis thaliana
gggttcgtcccaccggg

SEQ ID NO: 115468 - DNA, 17 bp, Arabidopsis thaliana
gggttcgtcccactcgg

SEQ ID NO: 115469 - DNA, 17 bp, Arabidopsis thaliana
gggttcgtcccactggg

SEQ ID NO: 115470 - DNA, 17 bp, Arabidopsis thaliana
gggttcgtccccagtgg

SEQ ID NO: 115471 - DNA, 17 bp, Arabidopsis thaliana
gggttcgtctcccggca

SEQ ID NO: 115472 - DNA, 17 bp, Arabidopsis thaliana
gggttcgtgccccacgg

SEQ ID NO: 115473 - DNA, 17 bp, Arabidopsis thaliana
gggttcgtgccccgccg

SEQ ID NO: 115474 - DNA, 17 bp, Arabidopsis thaliana
gggttcgtgggcaggcc

SEQ ID NO: 115475 - DNA, 17 bp, Arabidopsis thaliana
gggttcgtgtcccaccc

SEQ ID NO: 115476 - DNA, 17 bp, Arabidopsis thaliana
gggttcgtgtcccaccg

SEQ ID NO: 115477 - DNA, 17 bp, Arabidopsis thaliana
gggttcgtgtcccactg

SEQ ID NO: 115478 - DNA, 17 bp, Arabidopsis thaliana
gggttcgtgtcccagcg

SEQ ID NO: 115479 - DNA, 17 bp, Arabidopsis thaliana
gggttcgtgtcccagtt

SEQ ID NO: 115480 - DNA, 17 bp, Arabidopsis thaliana
gggttcgtgtcccggca

SEQ ID NO: 115481 - DNA, 17 bp, Arabidopsis thaliana
gggttcgttccccacag

SEQ ID NO: 115482 - DNA, 17 bp, Arabidopsis thaliana
gggttcgttccccagca

SEQ ID NO: 115483 - DNA, 17 bp, Arabidopsis thaliana
gggttcgttccccagtg

SEQ ID NO: 115484 - DNA, 17 bp, Arabidopsis thaliana
gggttcgttcccccgca

SEQ ID NO: 115485 - DNA, 17 bp, Arabidopsis thaliana
gggttcgttccccggca

SEQ ID NO: 115486 - DNA, 17 bp, Arabidopsis thaliana
gggttcgttccctacag

SEQ ID NO: 115487 - DNA, 17 bp, Arabidopsis thaliana
gggttcgttgactgggc

SEQ ID NO: 115488 - DNA, 17 bp, Arabidopsis thaliana
gggttcgtttccccgca

SEQ ID NO: 115489 - DNA, 17 bp, Arabidopsis thaliana
gggttcgtttccccgcc

SEQ ID NO: 115490 - DNA, 17 bp, Arabidopsis thaliana
gggttcgtttcccggct

SEQ ID NO: 115491 - DNA, 17 bp, Arabidopsis thaliana
gggttcgtttcccggta

SEQ ID NO: 115492 - DNA, 17 bp, Arabidopsis thaliana
gggttcgtttcccggtt

SEQ ID NO: 115493 - DNA, 17 bp, Arabidopsis thaliana
gggttcgtttcccgtct

SEQ ID NO: 115494 - DNA, 17 bp, Arabidopsis thaliana
gggttcgtttccctgct

SEQ ID NO: 115495 - DNA, 17 bp, Arabidopsis thaliana
gggttctaagcccaaat

SEQ ID NO: 115496 - DNA, 17 bp, Arabidopsis thaliana
gggttctacctttggtg

SEQ ID NO: 115497 - DNA, 17 bp, Arabidopsis thaliana
gggttctccccggcaac

SEQ ID NO: 115498 - DNA, 17 bp, Arabidopsis thaliana
gggttctgagccgaagc

SEQ ID NO: 115499 - DNA, 17 bp, Arabidopsis thaliana
gggttctgccccacggt

SEQ ID NO: 115500 - DNA, 17 bp, Arabidopsis thaliana
gggttctggatccctct

SEQ ID NO: 115501 - DNA, 17 bp, Arabidopsis thaliana
gggttctgttccggcga

SEQ ID NO: 115502 - DNA, 17 bp, Arabidopsis thaliana
gggttcttcccggctgg

SEQ ID NO: 115503 - DNA, 17 bp, Arabidopsis thaliana
gggttcttctacgtgta

SEQ ID NO: 115504 - DNA, 17 bp, Arabidopsis thaliana
gggttctttgcagtgtt

SEQ ID NO: 115505 - DNA, 17 bp, Arabidopsis thaliana
gggttgacacattctga

SEQ ID NO: 115506 - DNA, 17 bp, Arabidopsis thaliana
gggttgacccaacgatc

SEQ ID NO: 115507 - DNA, 17 bp, Arabidopsis thaliana
gggttgacccatgaaac

SEQ ID NO: 115508 - DNA, 17 bp, Arabidopsis thaliana
gggttgactctgtgcct

SEQ ID NO: 115509 - DNA, 17 bp, Arabidopsis thaliana
gggttgactcttgtacc

SEQ ID NO: 115510 - DNA, 17 bp, Arabidopsis thaliana
gggttgactgtgtttct

SEQ ID NO: 115511 - DNA, 17 bp, Arabidopsis thaliana
gggttgactttgtgcct

SEQ ID NO: 115512 - DNA, 17 bp, Arabidopsis thaliana
gggttgagttgagttga

SEQ ID NO: 115513 - DNA, 17 bp, Arabidopsis thaliana
gggttgataagaattta

SEQ ID NO: 115514 - DNA, 17 bp, Arabidopsis thaliana
gggttgataagaatttg

SEQ ID NO: 115515 - DNA, 17 bp, Arabidopsis thaliana
gggttgataataatttg

SEQ ID NO: 115516 - DNA, 17 bp, Arabidopsis thaliana
gggttgatacgctcaag

SEQ ID NO: 115517 - DNA, 17 bp, Arabidopsis thaliana
gggttgatatgagaaca

SEQ ID NO: 115518 - DNA, 17 bp, Arabidopsis thaliana
gggttgatccattgacg

SEQ ID NO: 115519 - DNA, 17 bp, Arabidopsis thaliana
gggttgatccccagcag

SEQ ID NO: 115520 - DNA, 17 bp, Arabidopsis thaliana
gggttgatcccccgcat

SEQ ID NO: 115521 - DNA, 17 bp, Arabidopsis thaliana
gggttgatgagtcaatt

SEQ ID NO: 115522 - DNA, 17 bp, Arabidopsis thaliana
gggttgatggatcatgg

SEQ ID NO: 115523 - DNA, 17 bp, Arabidopsis thaliana
gggttgattcccggctg

SEQ ID NO: 115524 - DNA, 17 bp, Arabidopsis thaliana
gggttgattgcggcttc

SEQ ID NO: 115525 - DNA, 17 bp, Arabidopsis thaliana
gggttgcattggtcggc

SEQ ID NO: 115526 - DNA, 17 bp, Arabidopsis thaliana
gggttgccgcccttgct

SEQ ID NO: 115527 - DNA, 17 bp, Arabidopsis thaliana
gggttgcctgaattttc

SEQ ID NO: 115528 - DNA, 17 bp, Arabidopsis thaliana
gggttgcggtttaagtt

SEQ ID NO: 115529 - DNA, 17 bp, Arabidopsis thaliana
gggttgctaactcaacg

SEQ ID NO: 115530 - DNA, 17 bp, Arabidopsis thaliana
gggttgctaactcaatg

SEQ ID NO: 115531 - DNA, 17 bp, Arabidopsis thaliana
gggttgctaactcagcg

SEQ ID NO: 115532 - DNA, 17 bp, Arabidopsis thaliana
gggttggaaggaattgt

SEQ ID NO: 115533 - DNA, 17 bp, Arabidopsis thaliana
gggttggaccacgggtt

SEQ ID NO: 115534 - DNA, 17 bp, Arabidopsis thaliana
gggttggacccacggcg

SEQ ID NO: 115535 - DNA, 17 bp, Arabidopsis thaliana
gggttggaccgtttccc

SEQ ID NO: 115536 - DNA, 17 bp, Arabidopsis thaliana
gggttggacctctgatc

SEQ ID NO: 115537 - DNA, 17 bp, Arabidopsis thaliana
gggttggccgaattttc

SEQ ID NO: 115538 - DNA, 17 bp, Arabidopsis thaliana
gggttggccgacagacc

SEQ ID NO: 115539 - DNA, 17 bp, Arabidopsis thaliana
gggttggcgggacgggt

SEQ ID NO: 115540 - DNA, 17 bp, Arabidopsis thaliana
gggttggctctggctcg

SEQ ID NO: 115541 - DNA, 17 bp, Arabidopsis thaliana
gggttggctgagtgata

SEQ ID NO: 115542 - DNA, 17 bp, Arabidopsis thaliana
gggttggctgattttat

SEQ ID NO: 115543 - DNA, 17 bp, Arabidopsis thaliana
gggttggctgattttcg

SEQ ID NO: 115544 - DNA, 17 bp, Arabidopsis thaliana
gggttggctttttattg

SEQ ID NO: 115545 - DNA, 17 bp, Arabidopsis thaliana
gggttgggccaacctat

SEQ ID NO: 115546 - DNA, 17 bp, Arabidopsis thaliana
gggttgggcttattgat

SEQ ID NO: 115547 - DNA, 17 bp, Arabidopsis thaliana
gggttgggttacctatt

SEQ ID NO: 115548 - DNA, 17 bp, Arabidopsis thaliana
gggttgggttgctatgt

SEQ ID NO: 115549 - DNA, 17 bp, Arabidopsis thaliana
gggttgggtttgtcagg

SEQ ID NO: 115550 - DNA, 17 bp, Arabidopsis thaliana
gggttggtcctcttatt

SEQ ID NO: 115551 - DNA, 17 bp, Arabidopsis thaliana
gggttggtgtttgattg

SEQ ID NO: 115552 - DNA, 17 bp, Arabidopsis thaliana
gggttggttccgattct

SEQ ID NO: 115553 - DNA, 17 bp, Arabidopsis thaliana
gggttgtattgcggttg

SEQ ID NO: 115554 - DNA, 17 bp, Arabidopsis thaliana
gggttgtcgggacgagt

SEQ ID NO: 115555 - DNA, 17 bp, Arabidopsis thaliana
gggttgtctggctcgag

SEQ ID NO: 115556 - DNA, 17 bp, Arabidopsis thaliana
gggttgttctgcagtta

SEQ ID NO: 115557 - DNA, 17 bp, Arabidopsis thaliana
gggttgtttgatctggc

SEQ ID NO: 115558 - DNA, 17 bp, Arabidopsis thaliana
gggtttaaaaatggatc

SEQ ID NO: 115559 - DNA, 17 bp, Arabidopsis thaliana
gggtttaagcccgtgac

SEQ ID NO: 115560 - DNA, 17 bp, Arabidopsis thaliana
gggtttaatcgcaggtc

SEQ ID NO: 115561 - DNA, 17 bp, Arabidopsis thaliana
gggtttaatcgcaggtt

SEQ ID NO: 115562 - DNA, 17 bp, Arabidopsis thaliana
gggtttaatgactgacc

SEQ ID NO: 115563 - DNA, 17 bp, Arabidopsis thaliana
gggtttacccatacaga

SEQ ID NO: 115564 - DNA, 17 bp, Arabidopsis thaliana
gggtttacctcattggg

SEQ ID NO: 115565 - DNA, 17 bp, Arabidopsis thaliana
gggtttagaaagtacga

SEQ ID NO: 115566 - DNA, 17 bp, Arabidopsis thaliana
gggtttagaccgtcgtg

SEQ ID NO: 115567 - DNA, 17 bp, Arabidopsis thaliana
gggtttagactgctagt

SEQ ID NO: 115568 - DNA, 17 bp, Arabidopsis thaliana
gggtttagatacaattg

SEQ ID NO: 115569 - DNA, 17 bp, Arabidopsis thaliana
gggtttagatgagggcc

SEQ ID NO: 115570 - DNA, 17 bp, Arabidopsis thaliana
gggtttaggcacttcca

SEQ ID NO: 115571 - DNA, 17 bp, Arabidopsis thaliana
gggtttatcttcctcca

SEQ ID NO: 115572 - DNA, 17 bp, Arabidopsis thaliana
gggtttcagagcgccgc

SEQ ID NO: 115573 - DNA, 17 bp, Arabidopsis thaliana
gggtttcaggtttgatt

SEQ ID NO: 115574 - DNA, 17 bp, Arabidopsis thaliana
gggtttcataccagcca

SEQ ID NO: 115575 - DNA, 17 bp, Arabidopsis thaliana
gggtttcatgttgactg

SEQ ID NO: 115576 - DNA, 17 bp, Arabidopsis thaliana
gggtttccaaaggcccg

SEQ ID NO: 115577 - DNA, 17 bp, Arabidopsis thaliana
gggtttccaagatcgtc

SEQ ID NO: 115578 - DNA, 17 bp, Arabidopsis thaliana
gggtttccccagtgaag

SEQ ID NO: 115579 - DNA, 17 bp, Arabidopsis thaliana
gggtttccccttcctcc

SEQ ID NO: 115580 - DNA, 17 bp, Arabidopsis thaliana
gggtttcccggctggcg

SEQ ID NO: 115581 - DNA, 17 bp, Arabidopsis thaliana
gggtttcccggctggtg

SEQ ID NO: 115582 - DNA, 17 bp, Arabidopsis thaliana
gggtttccgagatgttg

SEQ ID NO: 115583 - DNA, 17 bp, Arabidopsis thaliana
gggtttcgaatccctcc

SEQ ID NO: 115584 - DNA, 17 bp, Arabidopsis thaliana
gggtttcgaattggggc

SEQ ID NO: 115585 - DNA, 17 bp, Arabidopsis thaliana
gggtttcgacccagaat

SEQ ID NO: 115586 - DNA, 17 bp, Arabidopsis thaliana
gggtttcgagtgattga

SEQ ID NO: 115587 - DNA, 17 bp, Arabidopsis thaliana
gggtttcgctacttcag

SEQ ID NO: 115588 - DNA, 17 bp, Arabidopsis thaliana
gggtttcgctgcaagag

SEQ ID NO: 115589 - DNA, 17 bp, Arabidopsis thaliana
gggtttcggcccaatgg

SEQ ID NO: 115590 - DNA, 17 bp, Arabidopsis thaliana
gggtttcggcgaatttg

SEQ ID NO: 115591 - DNA, 17 bp, Arabidopsis thaliana
gggtttcgtatgaatgt

SEQ ID NO: 115592 - DNA, 17 bp, Arabidopsis thaliana
gggtttctaggttgcgg

SEQ ID NO: 115593 - DNA, 17 bp, Arabidopsis thaliana
gggtttctcccagcgaa

SEQ ID NO: 115594 - DNA, 17 bp, Arabidopsis thaliana
gggtttctcccggcaga

SEQ ID NO: 115595 - DNA, 17 bp, Arabidopsis thaliana
gggtttcttcgtctgtt

SEQ ID NO: 115596 - DNA, 17 bp, Arabidopsis thaliana
gggtttctttgtccgtt

SEQ ID NO: 115597 - DNA, 17 bp, Arabidopsis thaliana
gggtttctttgtgtggt

SEQ ID NO: 115598 - DNA, 17 bp, Arabidopsis thaliana
gggtttgaacaatgatg

SEQ ID NO: 115599 - DNA, 17 bp, Arabidopsis thaliana
gggtttgacaggacgtt

SEQ ID NO: 115600 - DNA, 17 bp, Arabidopsis thaliana
gggtttgagattgccat

SEQ ID NO: 115601 - DNA, 17 bp, Arabidopsis thaliana
gggtttgcagcgataac

SEQ ID NO: 115602 - DNA, 17 bp, Arabidopsis thaliana
gggtttgccaaggatgt

SEQ ID NO: 115603 - DNA, 17 bp, Arabidopsis thaliana
gggtttgccaatccatc

SEQ ID NO: 115604 - DNA, 17 bp, Arabidopsis thaliana
gggtttgccgttggtat

SEQ ID NO: 115605 - DNA, 17 bp, Arabidopsis thaliana
gggtttgctccagaatg

SEQ ID NO: 115606 - DNA, 17 bp, Arabidopsis thaliana
gggtttggaacattaca

SEQ ID NO: 115607 - DNA, 17 bp, Arabidopsis thaliana
gggtttggaaggacggg

SEQ ID NO: 115608 - DNA, 17 bp, Arabidopsis thaliana
gggtttggagggattac

SEQ ID NO: 115609 - DNA, 17 bp, Arabidopsis thaliana
gggtttggatcgaaatt

SEQ ID NO: 115610 - DNA, 17 bp, Arabidopsis thaliana
gggtttggcaggacggg

SEQ ID NO: 115611 - DNA, 17 bp, Arabidopsis thaliana
gggtttggcaggacgtt

SEQ ID NO: 115612 - DNA, 17 bp, Arabidopsis thaliana
gggtttggcaggttggt

SEQ ID NO: 115613 - DNA, 17 bp, Arabidopsis thaliana
gggtttggcaggttgtt

SEQ ID NO: 115614 - DNA, 17 bp, Arabidopsis thaliana
gggtttggccgactgtg

SEQ ID NO: 115615 - DNA, 17 bp, Arabidopsis thaliana
gggtttggcggaacggg

SEQ ID NO: 115616 - DNA, 17 bp, Arabidopsis thaliana
gggtttggcgggacgag

SEQ ID NO: 115617 - DNA, 17 bp, Arabidopsis thaliana
gggtttggcgggacggg

SEQ ID NO: 115618 - DNA, 17 bp, Arabidopsis thaliana
gggtttggctctgatac

SEQ ID NO: 115619 - DNA, 17 bp, Arabidopsis thaliana
gggtttgggtcagtttg

SEQ ID NO: 115620 - DNA, 17 bp, Arabidopsis thaliana
gggtttgggttcgaatc

SEQ ID NO: 115621 - DNA, 17 bp, Arabidopsis thaliana
gggtttggtctaatttg

SEQ ID NO: 115622 - DNA, 17 bp, Arabidopsis thaliana
gggtttggtcttcagaa

SEQ ID NO: 115623 - DNA, 17 bp, Arabidopsis thaliana
gggtttgtccttggatt

SEQ ID NO: 115624 - DNA, 17 bp, Arabidopsis thaliana
gggtttgtcgctaagat

SEQ ID NO: 115625 - DNA, 17 bp, Arabidopsis thaliana
gggtttgttcagcaggt

SEQ ID NO: 115626 - DNA, 17 bp, Arabidopsis thaliana
gggtttgttcatcttac

SEQ ID NO: 115627 - DNA, 17 bp, Arabidopsis thaliana
gggtttgtttcccggct

SEQ ID NO: 115628 - DNA, 17 bp, Arabidopsis thaliana
gggttttaaattgggaa

SEQ ID NO: 115629 - DNA, 17 bp, Arabidopsis thaliana
gggttttaagacaaggt

SEQ ID NO: 115630 - DNA, 17 bp, Arabidopsis thaliana
gggttttacccggttta

SEQ ID NO: 115631 - DNA, 17 bp, Arabidopsis thaliana
gggttttaccctttcct

SEQ ID NO: 115632 - DNA, 17 bp, Arabidopsis thaliana
gggttttacgcaggaca

SEQ ID NO: 115633 - DNA, 17 bp, Arabidopsis thaliana
gggttttccagaatgct

SEQ ID NO: 115634 - DNA, 17 bp, Arabidopsis thaliana
gggttttccgtagattc

SEQ ID NO: 115635 - DNA, 17 bp, Arabidopsis thaliana
gggttttcggtgatttg

SEQ ID NO: 115636 - DNA, 17 bp, Arabidopsis thaliana
gggttttcgtgatttgg

SEQ ID NO: 115637 - DNA, 17 bp, Arabidopsis thaliana
gggttttcgtttttggc

SEQ ID NO: 115638 - DNA, 17 bp, Arabidopsis thaliana
gggttttctactttcac

SEQ ID NO: 115639 - DNA, 17 bp, Arabidopsis thaliana
gggttttctgctgtgat

SEQ ID NO: 115640 - DNA, 17 bp, Arabidopsis thaliana
gggttttctgtctggtg

SEQ ID NO: 115641 - DNA, 17 bp, Arabidopsis thaliana
gggttttcttgacaagg

SEQ ID NO: 115642 - DNA, 17 bp, Arabidopsis thaliana
gggttttgaagattttg

SEQ ID NO: 115643 - DNA, 17 bp, Arabidopsis thaliana
gggttttgaatagcttt

SEQ ID NO: 115644 - DNA, 17 bp, Arabidopsis thaliana
gggttttgattttgtgg

SEQ ID NO: 115645 - DNA, 17 bp, Arabidopsis thaliana
gggttttgcggaacggg

SEQ ID NO: 115646 - DNA, 17 bp, Arabidopsis thaliana
gggttttgcgggacggg

SEQ ID NO: 115647 - DNA, 17 bp, Arabidopsis thaliana
gggttttgctctggtga

SEQ ID NO: 115648 - DNA, 17 bp, Arabidopsis thaliana
gggttttggccaagttg

SEQ ID NO: 115649 - DNA, 17 bp, Arabidopsis thaliana
gggttttggcgacattc

SEQ ID NO: 115650 - DNA, 17 bp, Arabidopsis thaliana
gggttttgggtactcag

SEQ ID NO: 115651 - DNA, 17 bp, Arabidopsis thaliana
gggttttggtgatttgg

SEQ ID NO: 115652 - DNA, 17 bp, Arabidopsis thaliana
gggttttgtatgcataa

SEQ ID NO: 115653 - DNA, 17 bp, Arabidopsis thaliana
gggttttgtatgcatgt

SEQ ID NO: 115654 - DNA, 17 bp, Arabidopsis thaliana
gggttttgtgatatccg

SEQ ID NO: 115655 - DNA, 17 bp, Arabidopsis thaliana
gggtttttagagttcta

SEQ ID NO: 115656 - DNA, 17 bp, Arabidopsis thaliana
gggtttttcaggtcggt

SEQ ID NO: 115657 - DNA, 17 bp, Arabidopsis thaliana
gggtttttcagttcggt

SEQ ID NO: 115658 - DNA, 17 bp, Arabidopsis thaliana
gggtttttctttaattt

SEQ ID NO: 115659 - DNA, 17 bp, Arabidopsis thaliana
gggtttttgagtttgcg

SEQ ID NO: 115660 - DNA, 17 bp, Arabidopsis thaliana
gggtttttgggttctgg

SEQ ID NO: 115661 - DNA, 17 bp, Arabidopsis thaliana
gggtttttttggttgcg

SEQ ID NO: 115662 - DNA, 17 bp, Arabidopsis thaliana
ggtaaaacccgtaatct

SEQ ID NO: 115663 - DNA, 17 bp, Arabidopsis thaliana
ggtaaaacggaaaatgc

SEQ ID NO: 115664 - DNA, 17 bp, Arabidopsis thaliana
ggtaaaacggttacggt

SEQ ID NO: 115665 - DNA, 17 bp, Arabidopsis thaliana
ggtaaaattatctgaac

SEQ ID NO: 115666 - DNA, 17 bp, Arabidopsis thaliana
ggtaaaccagcgggtgc

SEQ ID NO: 115667 - DNA, 17 bp, Arabidopsis thaliana
ggtaaaccagcggttgc

SEQ ID NO: 115668 - DNA, 17 bp, Arabidopsis thaliana
ggtaaaccctttcatcc

SEQ ID NO: 115669 - DNA, 17 bp, Arabidopsis thaliana
ggtaaaccctttcatct

SEQ ID NO: 115670 - DNA, 17 bp, Arabidopsis thaliana
ggtaaaccgtgagttaa

SEQ ID NO: 115671 - DNA, 17 bp, Arabidopsis thaliana
ggtaaacgacctgtgtc

SEQ ID NO: 115672 - DNA, 17 bp, Arabidopsis thaliana
ggtaaacgaggactctg

SEQ ID NO: 115673 - DNA, 17 bp, Arabidopsis thaliana
ggtaaactaattctatt

SEQ ID NO: 115674 - DNA, 17 bp, Arabidopsis thaliana
ggtaaactgatttgtcg

SEQ ID NO: 115675 - DNA, 17 bp, Arabidopsis thaliana
ggtaaagatgaaaagga

SEQ ID NO: 115676 - DNA, 17 bp, Arabidopsis thaliana
ggtaaagatttgcgaga

SEQ ID NO: 115677 - DNA, 17 bp, Arabidopsis thaliana
ggtaaagcactgtttcg

SEQ ID NO: 115678 - DNA, 17 bp, Arabidopsis thaliana
ggtaaagcctcttgcga

SEQ ID NO: 115679 - DNA, 17 bp, Arabidopsis thaliana
ggtaaagcttgtaggca

SEQ ID NO: 115680 - DNA, 17 bp, Arabidopsis thaliana
ggtaaaggaatagcgct

SEQ ID NO: 115681 - DNA, 17 bp, Arabidopsis thaliana
ggtaaaggtgcgcatac

SEQ ID NO: 115682 - DNA, 17 bp, Arabidopsis thaliana
ggtaaagtcagatgtgg

SEQ ID NO: 115683 - DNA, 17 bp, Arabidopsis thaliana
ggtaaatcaagagggat

SEQ ID NO: 115684 - DNA, 17 bp, Arabidopsis thaliana
ggtaaatcaagaggggt

SEQ ID NO: 115685 - DNA, 17 bp, Arabidopsis thaliana
ggtaaatgttacggaat

SEQ ID NO: 115686 - DNA, 17 bp, Arabidopsis thaliana
ggtaaatgttcggtaat

SEQ ID NO: 115687 - DNA, 17 bp, Arabidopsis thaliana
ggtaaattagaccgctt

SEQ ID NO: 115688 - DNA, 17 bp, Arabidopsis thaliana
ggtaaattagggttgca

SEQ ID NO: 115689 - DNA, 17 bp, Arabidopsis thaliana
ggtaaattccgtccaag

SEQ ID NO: 115690 - DNA, 17 bp, Arabidopsis thaliana
ggtaaattgattgtagg

SEQ ID NO: 115691 - DNA, 17 bp, Arabidopsis thaliana
ggtaaattgcgcacagt

SEQ ID NO: 115692 - DNA, 17 bp, Arabidopsis thaliana
ggtaaattttggtttaa

SEQ ID NO: 115693 - DNA, 17 bp, Arabidopsis thaliana
ggtaacaatcggaacga

SEQ ID NO: 115694 - DNA, 17 bp, Arabidopsis thaliana
ggtaacacacgggagac

SEQ ID NO: 115695 - DNA, 17 bp, Arabidopsis thaliana
ggtaaccaaaaccgcac

SEQ ID NO: 115696 - DNA, 17 bp, Arabidopsis thaliana
ggtaacccaagctcata

SEQ ID NO: 115697 - DNA, 17 bp, Arabidopsis thaliana
ggtaaccgagttcacgg

SEQ ID NO: 115698 - DNA, 17 bp, Arabidopsis thaliana
ggtaaccgctattcgat

SEQ ID NO: 115699 - DNA, 17 bp, Arabidopsis thaliana
ggtaacgaagtttgcga

SEQ ID NO: 115700 - DNA, 17 bp, Arabidopsis thaliana
ggtaacggacaagcaga

SEQ ID NO: 115701 - DNA, 17 bp, Arabidopsis thaliana
ggtaacggctctctcgg

SEQ ID NO: 115702 - DNA, 17 bp, Arabidopsis thaliana
ggtaacgtgttcttgac

SEQ ID NO: 115703 - DNA, 17 bp, Arabidopsis thaliana
ggtaactcgacggatcg

SEQ ID NO: 115704 - DNA, 17 bp, Arabidopsis thaliana
ggtaactctgaccacgt

SEQ ID NO: 115705 - DNA, 17 bp, Arabidopsis thaliana
ggtaactgagttttgcg

SEQ ID NO: 115706 - DNA, 17 bp, Arabidopsis thaliana
ggtaactgctccctttg

SEQ ID NO: 115707 - DNA, 17 bp, Arabidopsis thaliana
ggtaactgggtggtcga

SEQ ID NO: 115708 - DNA, 17 bp, Arabidopsis thaliana
ggtaactgtcaaaccct

SEQ ID NO: 115709 - DNA, 17 bp, Arabidopsis thaliana
ggtaacttaggtccggc

SEQ ID NO: 115710 - DNA, 17 bp, Arabidopsis thaliana
ggtaactttcactctcg

SEQ ID NO: 115711 - DNA, 17 bp, Arabidopsis thaliana
ggtaactttctgtcggg

SEQ ID NO: 115712 - DNA, 17 bp, Arabidopsis thaliana
ggtaactttgttcagtg

SEQ ID NO: 115713 - DNA, 17 bp, Arabidopsis thaliana
ggtaagaactatgctga

SEQ ID NO: 115714 - DNA, 17 bp, Arabidopsis thaliana
ggtaagacggatttggg

SEQ ID NO: 115715 - DNA, 17 bp, Arabidopsis thaliana
ggtaagacgtgtcggca

SEQ ID NO: 115716 - DNA, 17 bp, Arabidopsis thaliana
ggtaagacgtgtcggct

SEQ ID NO: 115717 - DNA, 17 bp, Arabidopsis thaliana
ggtaagcaatatgatct

SEQ ID NO: 115718 - DNA, 17 bp, Arabidopsis thaliana
ggtaagcaggacggtga

SEQ ID NO: 115719 - DNA, 17 bp, Arabidopsis thaliana
ggtaagctaacgcaaag

SEQ ID NO: 115720 - DNA, 17 bp, Arabidopsis thaliana
ggtaaggctaatgtggt

SEQ ID NO: 115721 - DNA, 17 bp, Arabidopsis thaliana
ggtaaggctatcggtaa

SEQ ID NO: 115722 - DNA, 17 bp, Arabidopsis thaliana
ggtaagtattcccgcct

SEQ ID NO: 115723 - DNA, 17 bp, Arabidopsis thaliana
ggtaagtcagtcgcaag

SEQ ID NO: 115724 - DNA, 17 bp, Arabidopsis thaliana
ggtaagtcccaagttat

SEQ ID NO: 115725 - DNA, 17 bp, Arabidopsis thaliana
ggtaagtcctcgtgttg

SEQ ID NO: 115726 - DNA, 17 bp, Arabidopsis thaliana
ggtaagtctctcttgtg

SEQ ID NO: 115727 - DNA, 17 bp, Arabidopsis thaliana
ggtaagtgaccgggcgg

SEQ ID NO: 115728 - DNA, 17 bp, Arabidopsis thaliana
ggtaagtgactacatcg

SEQ ID NO: 115729 - DNA, 17 bp, Arabidopsis thaliana
ggtaagtgcagcattgt

SEQ ID NO: 115730 - DNA, 17 bp, Arabidopsis thaliana
ggtaagtgccacgtgtc

SEQ ID NO: 115731 - DNA, 17 bp, Arabidopsis thaliana
ggtaagtgccttgacga

SEQ ID NO: 115732 - DNA, 17 bp, Arabidopsis thaliana
ggtaagtggcgacggtt

SEQ ID NO: 115733 - DNA, 17 bp, Arabidopsis thaliana
ggtaagttccgacccgc

SEQ ID NO: 115734 - DNA, 17 bp, Arabidopsis thaliana
ggtaagttctaggtttt

SEQ ID NO: 115735 - DNA, 17 bp, Arabidopsis thaliana
ggtaataaatctattca

SEQ ID NO: 115736 - DNA, 17 bp, Arabidopsis thaliana
ggtaatattcggagatc

SEQ ID NO: 115737 - DNA, 17 bp, Arabidopsis thaliana
ggtaatcagaaaggaag

SEQ ID NO: 115738 - DNA, 17 bp, Arabidopsis thaliana
ggtaatcagaaatgcat

SEQ ID NO: 115739 - DNA, 17 bp, Arabidopsis thaliana
ggtaatcatacacttta

SEQ ID NO: 115740 - DNA, 17 bp, Arabidopsis thaliana
ggtaatccctcaggccc

SEQ ID NO: 115741 - DNA, 17 bp, Arabidopsis thaliana
ggtaatctatagtccgt

SEQ ID NO: 115742 - DNA, 17 bp, Arabidopsis thaliana
ggtaatctctctgtgta

SEQ ID NO: 115743 - DNA, 17 bp, Arabidopsis thaliana
ggtaatctgcacaacgc

SEQ ID NO: 115744 - DNA, 17 bp, Arabidopsis thaliana
ggtaatgctatcaaagg

SEQ ID NO: 115745 - DNA, 17 bp, Arabidopsis thaliana
ggtaatggactaccgct

SEQ ID NO: 115746 - DNA, 17 bp, Arabidopsis thaliana
ggtaatggagaaagcgg

SEQ ID NO: 115747 - DNA, 17 bp, Arabidopsis thaliana
ggtaatggagccactaa

SEQ ID NO: 115748 - DNA, 17 bp, Arabidopsis thaliana
ggtaatggtcgtcgcag

SEQ ID NO: 115749 - DNA, 17 bp, Arabidopsis thaliana
ggtaattccagctccaa

SEQ ID NO: 115750 - DNA, 17 bp, Arabidopsis thaliana
ggtaattcctgcaacga

SEQ ID NO: 115751 - DNA, 17 bp, Arabidopsis thaliana
ggtaattctagtaaacc

SEQ ID NO: 115752 - DNA, 17 bp, Arabidopsis thaliana
ggtaattctcaatcgat

SEQ ID NO: 115753 - DNA, 17 bp, Arabidopsis thaliana
ggtaattcttcggacaa

SEQ ID NO: 115754 - DNA, 17 bp, Arabidopsis thaliana
ggtaatttcatttgtcg

SEQ ID NO: 115755 - DNA, 17 bp, Arabidopsis thaliana
ggtaatttcatttgtta

SEQ ID NO: 115756 - DNA, 17 bp, Arabidopsis thaliana
ggtaatttgcaggtcac

SEQ ID NO: 115757 - DNA, 17 bp, Arabidopsis thaliana
ggtaatttggcgaagtc

SEQ ID NO: 115758 - DNA, 17 bp, Arabidopsis thaliana
ggtaatttgtaacacgt

SEQ ID NO: 115759 - DNA, 17 bp, Arabidopsis thaliana
ggtacaaaacttctact

SEQ ID NO: 115760 - DNA, 17 bp, Arabidopsis thaliana
ggtacaaacataggaac

SEQ ID NO: 115761 - DNA, 17 bp, Arabidopsis thaliana
ggtacaaacccgggttc

SEQ ID NO: 115762 - DNA, 17 bp, Arabidopsis thaliana
ggtacaaatgcggatca

SEQ ID NO: 115763 - DNA, 17 bp, Arabidopsis thaliana
ggtacaaatgcggttca

SEQ ID NO: 115764 - DNA, 17 bp, Arabidopsis thaliana
ggtacaacccctgttct

SEQ ID NO: 115765 - DNA, 17 bp, Arabidopsis thaliana
ggtacaacccctgtttt

SEQ ID NO: 115766 - DNA, 17 bp, Arabidopsis thaliana
ggtacaagaccgaagta

SEQ ID NO: 115767 - DNA, 17 bp, Arabidopsis thaliana
ggtacaatgcctgatcc

SEQ ID NO: 115768 - DNA, 17 bp, Arabidopsis thaliana
ggtacacagcgggttaa

SEQ ID NO: 115769 - DNA, 17 bp, Arabidopsis thaliana
ggtacaccgcggagaca

SEQ ID NO: 115770 - DNA, 17 bp, Arabidopsis thaliana
ggtacaccgtgggacta

SEQ ID NO: 115771 - DNA, 17 bp, Arabidopsis thaliana
ggtacaccgtgtagaca

SEQ ID NO: 115772 - DNA, 17 bp, Arabidopsis thaliana
ggtacactgggttactg

SEQ ID NO: 115773 - DNA, 17 bp, Arabidopsis thaliana
ggtacactgttccggtt

SEQ ID NO: 115774 - DNA, 17 bp, Arabidopsis thaliana
ggtacagacagagctgc

SEQ ID NO: 115775 - DNA, 17 bp, Arabidopsis thaliana
ggtacagacccaggttc

SEQ ID NO: 115776 - DNA, 17 bp, Arabidopsis thaliana
ggtacagaccccggtac

SEQ ID NO: 115777 - DNA, 17 bp, Arabidopsis thaliana
ggtacagacccgagttc

SEQ ID NO: 115778 - DNA, 17 bp, Arabidopsis thaliana
ggtacagacccgggatt

SEQ ID NO: 115779 - DNA, 17 bp, Arabidopsis thaliana
ggtacagacccggggtt

SEQ ID NO: 115780 - DNA, 17 bp, Arabidopsis thaliana
ggtacagacccgggtac

SEQ ID NO: 115781 - DNA, 17 bp, Arabidopsis thaliana
ggtacagacccgggtcc

SEQ ID NO: 115782 - DNA, 17 bp, Arabidopsis thaliana
ggtacagacccgggtcg

SEQ ID NO: 115783 - DNA, 17 bp, Arabidopsis thaliana
ggtacagacccgggtgc

SEQ ID NO: 115784 - DNA, 17 bp, Arabidopsis thaliana
ggtacagacccgggttc

SEQ ID NO: 115785 - DNA, 17 bp, Arabidopsis thaliana
ggtacagacccgggttg

SEQ ID NO: 115786 - DNA, 17 bp, Arabidopsis thaliana
ggtacagacccgggttt

SEQ ID NO: 115787 - DNA, 17 bp, Arabidopsis thaliana
ggtacagacccggttcg

SEQ ID NO: 115788 - DNA, 17 bp, Arabidopsis thaliana
ggtacagacctgggttc

SEQ ID NO: 115789 - DNA, 17 bp, Arabidopsis thaliana
ggtacagagagtgatag

SEQ ID NO: 115790 - DNA, 17 bp, Arabidopsis thaliana
ggtacagagggccatag

SEQ ID NO: 115791 - DNA, 17 bp, Arabidopsis thaliana
ggtacagagtggacatt

SEQ ID NO: 115792 - DNA, 17 bp, Arabidopsis thaliana
ggtacagatccgggttc

SEQ ID NO: 115793 - DNA, 17 bp, Arabidopsis thaliana
ggtacaggctctgatac

SEQ ID NO: 115794 - DNA, 17 bp, Arabidopsis thaliana
ggtacagggtcacgaat

SEQ ID NO: 115795 - DNA, 17 bp, Arabidopsis thaliana
ggtacaggtgctgaaca

SEQ ID NO: 115796 - DNA, 17 bp, Arabidopsis thaliana
ggtacagtaaacgcgaa

SEQ ID NO: 115797 - DNA, 17 bp, Arabidopsis thaliana
ggtacagtaaacgcgga

SEQ ID NO: 115798 - DNA, 17 bp, Arabidopsis thaliana
ggtacagtacgattcgt

SEQ ID NO: 115799 - DNA, 17 bp, Arabidopsis thaliana
ggtacagtgagattgtg

SEQ ID NO: 115800 - DNA, 17 bp, Arabidopsis thaliana
ggtacagtggcggacca

SEQ ID NO: 115801 - DNA, 17 bp, Arabidopsis thaliana
ggtacataactgatttc

SEQ ID NO: 115802 - DNA, 17 bp, Arabidopsis thaliana
ggtacataatgacccgg

SEQ ID NO: 115803 - DNA, 17 bp, Arabidopsis thaliana
ggtacataccgtttgcc

SEQ ID NO: 115804 - DNA, 17 bp, Arabidopsis thaliana
ggtacatagacttacgt

SEQ ID NO: 115805 - DNA, 17 bp, Arabidopsis thaliana
ggtacatctgaggagag

SEQ ID NO: 115806 - DNA, 17 bp, Arabidopsis thaliana
ggtacatgaaggtcttt

SEQ ID NO: 115807 - DNA, 17 bp, Arabidopsis thaliana
ggtacatgaaggttttt

SEQ ID NO: 115808 - DNA, 17 bp, Arabidopsis thaliana
ggtacatgacgcagttt

SEQ ID NO: 115809 - DNA, 17 bp, Arabidopsis thaliana
ggtacatgtgcggttca

SEQ ID NO: 115810 - DNA, 17 bp, Arabidopsis thaliana
ggtacattcgtatgatt

SEQ ID NO: 115811 - DNA, 17 bp, Arabidopsis thaliana
ggtaccaaaaacgtaaa

SEQ ID NO: 115812 - DNA, 17 bp, Arabidopsis thaliana
ggtaccacttaaggctt

SEQ ID NO: 115813 - DNA, 17 bp, Arabidopsis thaliana
ggtacccacggcgaatg

SEQ ID NO: 115814 - DNA, 17 bp, Arabidopsis thaliana
ggtacccacgggtagtc

SEQ ID NO: 115815 - DNA, 17 bp, Arabidopsis thaliana
ggtacccataacccaat

SEQ ID NO: 115816 - DNA, 17 bp, Arabidopsis thaliana
ggtaccccgcatctcca

SEQ ID NO: 115817 - DNA, 17 bp, Arabidopsis thaliana
ggtaccccgcatttcca

SEQ ID NO: 115818 - DNA, 17 bp, Arabidopsis thaliana
ggtacccgggctcagac

SEQ ID NO: 115819 - DNA, 17 bp, Arabidopsis thaliana
ggtaccgattacaacgt

SEQ ID NO: 115820 - DNA, 17 bp, Arabidopsis thaliana
ggtaccgctgcaatatg

SEQ ID NO: 115821 - DNA, 17 bp, Arabidopsis thaliana
ggtaccggagacgactg

SEQ ID NO: 115822 - DNA, 17 bp, Arabidopsis thaliana
ggtaccggcatgcaaag

SEQ ID NO: 115823 - DNA, 17 bp, Arabidopsis thaliana
ggtaccggttgttagcg

SEQ ID NO: 115824 - DNA, 17 bp, Arabidopsis thaliana
ggtacctcccacccgtt

SEQ ID NO: 115825 - DNA, 17 bp, Arabidopsis thaliana
ggtacctgcggaaggat

SEQ ID NO: 115826 - DNA, 17 bp, Arabidopsis thaliana
ggtaccttagctcagtt

SEQ ID NO: 115827 - DNA, 17 bp, Arabidopsis thaliana
ggtacgaaaaagattga

SEQ ID NO: 115828 - DNA, 17 bp, Arabidopsis thaliana
ggtacgaaacacaggcc

SEQ ID NO: 115829 - DNA, 17 bp, Arabidopsis thaliana
ggtacgaacaataaacc

SEQ ID NO: 115830 - DNA, 17 bp, Arabidopsis thaliana
ggtacgaaccaacggtc

SEQ ID NO: 115831 - DNA, 17 bp, Arabidopsis thaliana
ggtacgaatctggagat

SEQ ID NO: 115832 - DNA, 17 bp, Arabidopsis thaliana
ggtacgatttccaattt

SEQ ID NO: 115833 - DNA, 17 bp, Arabidopsis thaliana
ggtacgcctggatgttt

SEQ ID NO: 115834 - DNA, 17 bp, Arabidopsis thaliana
ggtacgcgacggtttat

SEQ ID NO: 115835 - DNA, 17 bp, Arabidopsis thaliana
ggtacgcgacggtttgt

SEQ ID NO: 115836 - DNA, 17 bp, Arabidopsis thaliana
ggtacgcgagaagtgcg

SEQ ID NO: 115837 - DNA, 17 bp, Arabidopsis thaliana
ggtacgcgataagtgcg

SEQ ID NO: 115838 - DNA, 17 bp, Arabidopsis thaliana
ggtacgcggattacggt

SEQ ID NO: 115839 - DNA, 17 bp, Arabidopsis thaliana
ggtacggacaaggggaa

SEQ ID NO: 115840 - DNA, 17 bp, Arabidopsis thaliana
ggtacggacaataaacc

SEQ ID NO: 115841 - DNA, 17 bp, Arabidopsis thaliana
ggtacggatttggcagg

SEQ ID NO: 115842 - DNA, 17 bp, Arabidopsis thaliana
ggtacgggaaaagtacg

SEQ ID NO: 115843 - DNA, 17 bp, Arabidopsis thaliana
ggtacgggaaaagtgcg

SEQ ID NO: 115844 - DNA, 17 bp, Arabidopsis thaliana
ggtacgggagaagtgcg

SEQ ID NO: 115845 - DNA, 17 bp, Arabidopsis thaliana
ggtacgggtgtgtaccg

SEQ ID NO: 115846 - DNA, 17 bp, Arabidopsis thaliana
ggtacgggttggcggga

SEQ ID NO: 115847 - DNA, 17 bp, Arabidopsis thaliana
ggtacgggtttgacagg

SEQ ID NO: 115848 - DNA, 17 bp, Arabidopsis thaliana
ggtacgggtttggcagg

SEQ ID NO: 115849 - DNA, 17 bp, Arabidopsis thaliana
ggtacgggtttggctgg

SEQ ID NO: 115850 - DNA, 17 bp, Arabidopsis thaliana
ggtacggttcaactgcg

SEQ ID NO: 115851 - DNA, 17 bp, Arabidopsis thaliana
ggtacggttgtgccatg

SEQ ID NO: 115852 - DNA, 17 bp, Arabidopsis thaliana
ggtacggtttcggctct

SEQ ID NO: 115853 - DNA, 17 bp, Arabidopsis thaliana
ggtacggttttgggggc

SEQ ID NO: 115854 - DNA, 17 bp, Arabidopsis thaliana
ggtacggttttgggtgc

SEQ ID NO: 115855 - DNA, 17 bp, Arabidopsis thaliana
ggtacgtctgcctgggt

SEQ ID NO: 115856 - DNA, 17 bp, Arabidopsis thaliana
ggtacgtcttcctgggt

SEQ ID NO: 115857 - DNA, 17 bp, Arabidopsis thaliana
ggtactaagactatgtc

SEQ ID NO: 115858 - DNA, 17 bp, Arabidopsis thaliana
ggtactaattccatccg

SEQ ID NO: 115859 - DNA, 17 bp, Arabidopsis thaliana
ggtactacaccaactgt

SEQ ID NO: 115860 - DNA, 17 bp, Arabidopsis thaliana
ggtactaggatgggtga

SEQ ID NO: 115861 - DNA, 17 bp, Arabidopsis thaliana
ggtactaggttcaaggc

SEQ ID NO: 115862 - DNA, 17 bp, Arabidopsis thaliana
ggtactaggttcaaggg

SEQ ID NO: 115863 - DNA, 17 bp, Arabidopsis thaliana
ggtactagtcctgagga

SEQ ID NO: 115864 - DNA, 17 bp, Arabidopsis thaliana
ggtactatcaactctga

SEQ ID NO: 115865 - DNA, 17 bp, Arabidopsis thaliana
ggtactcattctcggcc

SEQ ID NO: 115866 - DNA, 17 bp, Arabidopsis thaliana
ggtactcctcgccttgc

SEQ ID NO: 115867 - DNA, 17 bp, Arabidopsis thaliana
ggtactcgatctcatca

SEQ ID NO: 115868 - DNA, 17 bp, Arabidopsis thaliana
ggtactcgattggcttt

SEQ ID NO: 115869 - DNA, 17 bp, Arabidopsis thaliana
ggtactcgctatgtcca

SEQ ID NO: 115870 - DNA, 17 bp, Arabidopsis thaliana
ggtactcgtggttcggc

SEQ ID NO: 115871 - DNA, 17 bp, Arabidopsis thaliana
ggtactgaccagggttc

SEQ ID NO: 115872 - DNA, 17 bp, Arabidopsis thaliana
ggtactgacggattgct

SEQ ID NO: 115873 - DNA, 17 bp, Arabidopsis thaliana
ggtactgagagctcttt

SEQ ID NO: 115874 - DNA, 17 bp, Arabidopsis thaliana
ggtactgatccgtgagt

SEQ ID NO: 115875 - DNA, 17 bp, Arabidopsis thaliana
ggtactgtagacggcgg

SEQ ID NO: 115876 - DNA, 17 bp, Arabidopsis thaliana
ggtactgtgcatgtgcg

SEQ ID NO: 115877 - DNA, 17 bp, Arabidopsis thaliana
ggtacttaggcgcggtt

SEQ ID NO: 115878 - DNA, 17 bp, Arabidopsis thaliana
ggtacttcgtatgctgc

SEQ ID NO: 115879 - DNA, 17 bp, Arabidopsis thaliana
ggtacttctaagttcgc

SEQ ID NO: 115880 - DNA, 17 bp, Arabidopsis thaliana
ggtacttctctcgacgg

SEQ ID NO: 115881 - DNA, 17 bp, Arabidopsis thaliana
ggtacttctctgatttg

SEQ ID NO: 115882 - DNA, 17 bp, Arabidopsis thaliana
ggtacttctgtctctaa

SEQ ID NO: 115883 - DNA, 17 bp, Arabidopsis thaliana
ggtacttcttcacagca

SEQ ID NO: 115884 - DNA, 17 bp, Arabidopsis thaliana
ggtacttggaccgcagg

SEQ ID NO: 115885 - DNA, 17 bp, Arabidopsis thaliana
ggtactttattgcttag

SEQ ID NO: 115886 - DNA, 17 bp, Arabidopsis thaliana
ggtactttgggcaagct

SEQ ID NO: 115887 - DNA, 17 bp, Arabidopsis thaliana
ggtactttttcgggcat

SEQ ID NO: 115888 - DNA, 17 bp, Arabidopsis thaliana
ggtagaaatgcaccaat

SEQ ID NO: 115889 - DNA, 17 bp, Arabidopsis thaliana
ggtagaaatgcactgct

SEQ ID NO: 115890 - DNA, 17 bp, Arabidopsis thaliana
ggtagaagcgacgcatg

SEQ ID NO: 115891 - DNA, 17 bp, Arabidopsis thaliana
ggtagaatcctttgcag

SEQ ID NO: 115892 - DNA, 17 bp, Arabidopsis thaliana
ggtagactattacgcaa

SEQ ID NO: 115893 - DNA, 17 bp, Arabidopsis thaliana
ggtagactgctaaccgg

SEQ ID NO: 115894 - DNA, 17 bp, Arabidopsis thaliana
ggtagagctatctacgg

SEQ ID NO: 115895 - DNA, 17 bp, Arabidopsis thaliana
ggtagataatctatctc

SEQ ID NO: 115896 - DNA, 17 bp, Arabidopsis thaliana
ggtagatcgatccgcag

SEQ ID NO: 115897 - DNA, 17 bp, Arabidopsis thaliana
ggtagatctgcaggttt

SEQ ID NO: 115898 - DNA, 17 bp, Arabidopsis thaliana
ggtagatcttttagcag

SEQ ID NO: 115899 - DNA, 17 bp, Arabidopsis thaliana
ggtagatgttatctttg

SEQ ID NO: 115900 - DNA, 17 bp, Arabidopsis thaliana
ggtagattctgtaaggc

SEQ ID NO: 115901 - DNA, 17 bp, Arabidopsis thaliana
ggtagatttgggtaaaa

SEQ ID NO: 115902 - DNA, 17 bp, Arabidopsis thaliana
ggtagcattccctcgtc

SEQ ID NO: 115903 - DNA, 17 bp, Arabidopsis thaliana
ggtagccaaatgcctcg

SEQ ID NO: 115904 - DNA, 17 bp, Arabidopsis thaliana
ggtagccaaggatgact

SEQ ID NO: 115905 - DNA, 17 bp, Arabidopsis thaliana
ggtagccgaatgcctcg

SEQ ID NO: 115906 - DNA, 17 bp, Arabidopsis thaliana
ggtagcgacaagcgacg

SEQ ID NO: 115907 - DNA, 17 bp, Arabidopsis thaliana
ggtagcggcaacggctg

SEQ ID NO: 115908 - DNA, 17 bp, Arabidopsis thaliana
ggtagcggttaggttaa

SEQ ID NO: 115909 - DNA, 17 bp, Arabidopsis thaliana
ggtagcggttgttagcg

SEQ ID NO: 115910 - DNA, 17 bp, Arabidopsis thaliana
ggtaggaacgcaccgag

SEQ ID NO: 115911 - DNA, 17 bp, Arabidopsis thaliana
ggtaggacggacttgtg

SEQ ID NO: 115912 - DNA, 17 bp, Arabidopsis thaliana
ggtaggacgggtttggt

SEQ ID NO: 115913 - DNA, 17 bp, Arabidopsis thaliana
ggtaggacgtatcggct

SEQ ID NO: 115914 - DNA, 17 bp, Arabidopsis thaliana
ggtaggacgtgtcagct

SEQ ID NO: 115915 - DNA, 17 bp, Arabidopsis thaliana
ggtaggacgtgtcggcc

SEQ ID NO: 115916 - DNA, 17 bp, Arabidopsis thaliana
ggtaggacgtgtcggcg

SEQ ID NO: 115917 - DNA, 17 bp, Arabidopsis thaliana
ggtaggacgtgtcggct

SEQ ID NO: 115918 - DNA, 17 bp, Arabidopsis thaliana
ggtaggacgtgtgggct

SEQ ID NO: 115919 - DNA, 17 bp, Arabidopsis thaliana
ggtaggactcgtgctga

SEQ ID NO: 115920 - DNA, 17 bp, Arabidopsis thaliana
ggtaggacttgtcggct

SEQ ID NO: 115921 - DNA, 17 bp, Arabidopsis thaliana
ggtaggagagaagttct

SEQ ID NO: 115922 - DNA, 17 bp, Arabidopsis thaliana
ggtaggagcgacgggcg

SEQ ID NO: 115923 - DNA, 17 bp, Arabidopsis thaliana
ggtaggagtgaggctct

SEQ ID NO: 115924 - DNA, 17 bp, Arabidopsis thaliana
ggtaggatggtcagttg

SEQ ID NO: 115925 - DNA, 17 bp, Arabidopsis thaliana
ggtaggccaaggtgatg

SEQ ID NO: 115926 - DNA, 17 bp, Arabidopsis thaliana
ggtaggcctggtgttgg

SEQ ID NO: 115927 - DNA, 17 bp, Arabidopsis thaliana
ggtaggcttcttcatcg

SEQ ID NO: 115928 - DNA, 17 bp, Arabidopsis thaliana
ggtagggcacgtctgcc

SEQ ID NO: 115929 - DNA, 17 bp, Arabidopsis thaliana
ggtagggcgtgtcggcg

SEQ ID NO: 115930 - DNA, 17 bp, Arabidopsis thaliana
ggtagggtccagcggcg

SEQ ID NO: 115931 - DNA, 17 bp, Arabidopsis thaliana
ggtagggtccagcggct

SEQ ID NO: 115932 - DNA, 17 bp, Arabidopsis thaliana
ggtaggtcaaaatttgg

SEQ ID NO: 115933 - DNA, 17 bp, Arabidopsis thaliana
ggtaggtgactacatcg

SEQ ID NO: 115934 - DNA, 17 bp, Arabidopsis thaliana
ggtaggtgcggctggat

SEQ ID NO: 115935 - DNA, 17 bp, Arabidopsis thaliana
ggtaggttccaacccag

SEQ ID NO: 115936 - DNA, 17 bp, Arabidopsis thaliana
ggtaggtttcatcgggt

SEQ ID NO: 115937 - DNA, 17 bp, Arabidopsis thaliana
ggtagtcagaaatacag

SEQ ID NO: 115938 - DNA, 17 bp, Arabidopsis thaliana
ggtagtcagaaatgcag

SEQ ID NO: 115939 - DNA, 17 bp, Arabidopsis thaliana
ggtagtccatcctgtag

SEQ ID NO: 115940 - DNA, 17 bp, Arabidopsis thaliana
ggtagtcctcgtgttgc

SEQ ID NO: 115941 - DNA, 17 bp, Arabidopsis thaliana
ggtagtcgggctgtggc

SEQ ID NO: 115942 - DNA, 17 bp, Arabidopsis thaliana
ggtagtggcgattgcgg

SEQ ID NO: 115943 - DNA, 17 bp, Arabidopsis thaliana
ggtagttagaaatgcag

SEQ ID NO: 115944 - DNA, 17 bp, Arabidopsis thaliana
ggtagttcgaccgcaaa

SEQ ID NO: 115945 - DNA, 17 bp, Arabidopsis thaliana
ggtagttcgaccgcgaa

SEQ ID NO: 115946 - DNA, 17 bp, Arabidopsis thaliana
ggtagttcgaccgcgag

SEQ ID NO: 115947 - DNA, 17 bp, Arabidopsis thaliana
ggtagttcgaccgtgag

SEQ ID NO: 115948 - DNA, 17 bp, Arabidopsis thaliana
ggtagttgaccttggct

SEQ ID NO: 115949 - DNA, 17 bp, Arabidopsis thaliana
ggtagtttggccgagtg

SEQ ID NO: 115950 - DNA, 17 bp, Arabidopsis thaliana
ggtagtttgtcgcttgc

SEQ ID NO: 115951 - DNA, 17 bp, Arabidopsis thaliana
ggtataaaacggccatt

SEQ ID NO: 115952 - DNA, 17 bp, Arabidopsis thaliana
ggtataactgtctacca

SEQ ID NO: 115953 - DNA, 17 bp, Arabidopsis thaliana
ggtataagatgttgccg

SEQ ID NO: 115954 - DNA, 17 bp, Arabidopsis thaliana
ggtataagcctgcctga

SEQ ID NO: 115955 - DNA, 17 bp, Arabidopsis thaliana
ggtataatcgtgatggc

SEQ ID NO: 115956 - DNA, 17 bp, Arabidopsis thaliana
ggtataccacgggtgag

SEQ ID NO: 115957 - DNA, 17 bp, Arabidopsis thaliana
ggtataccagggggaat

SEQ ID NO: 115958 - DNA, 17 bp, Arabidopsis thaliana
ggtataccgcaggttaa

SEQ ID NO: 115959 - DNA, 17 bp, Arabidopsis thaliana
ggtatacggatcgggtt

SEQ ID NO: 115960 - DNA, 17 bp, Arabidopsis thaliana
ggtatagatcattgcaa

SEQ ID NO: 115961 - DNA, 17 bp, Arabidopsis thaliana
ggtatagtttgtggatt

SEQ ID NO: 115962 - DNA, 17 bp, Arabidopsis thaliana
ggtatcaactcgatgat

SEQ ID NO: 115963 - DNA, 17 bp, Arabidopsis thaliana
ggtatcagagccacttg

SEQ ID NO: 115964 - DNA, 17 bp, Arabidopsis thaliana
ggtatcagagcctgaaa

SEQ ID NO: 115965 - DNA, 17 bp, Arabidopsis thaliana
ggtatcagagcgattac

SEQ ID NO: 115966 - DNA, 17 bp, Arabidopsis thaliana
ggtatcagatgagcaag

SEQ ID NO: 115967 - DNA, 17 bp, Arabidopsis thaliana
ggtatcagtgaatcagc

SEQ ID NO: 115968 - DNA, 17 bp, Arabidopsis thaliana
ggtatccaagcttgctt

SEQ ID NO: 115969 - DNA, 17 bp, Arabidopsis thaliana
ggtatccagtatgcgag

SEQ ID NO: 115970 - DNA, 17 bp, Arabidopsis thaliana
ggtatcccaagcccaat

SEQ ID NO: 115971 - DNA, 17 bp, Arabidopsis thaliana
ggtatccctacatagcg

SEQ ID NO: 115972 - DNA, 17 bp, Arabidopsis thaliana
ggtatccgccggtttgt

SEQ ID NO: 115973 - DNA, 17 bp, Arabidopsis thaliana
ggtatccgggtgcggtt

SEQ ID NO: 115974 - DNA, 17 bp, Arabidopsis thaliana
ggtatccgtcgacttgg

SEQ ID NO: 115975 - DNA, 17 bp, Arabidopsis thaliana
ggtatccttaggctatg

SEQ ID NO: 115976 - DNA, 17 bp, Arabidopsis thaliana
ggtatcgaacacacctt

SEQ ID NO: 115977 - DNA, 17 bp, Arabidopsis thaliana
ggtatcgacaatgatcc

SEQ ID NO: 115978 - DNA, 17 bp, Arabidopsis thaliana
ggtatcgattgacacca

SEQ ID NO: 115979 - DNA, 17 bp, Arabidopsis thaliana
ggtatcggctctattca

SEQ ID NO: 115980 - DNA, 17 bp, Arabidopsis thaliana
ggtatctaggggtcgcg

SEQ ID NO: 115981 - DNA, 17 bp, Arabidopsis thaliana
ggtatctgatggcgtgc

SEQ ID NO: 115982 - DNA, 17 bp, Arabidopsis thaliana
ggtatctggaccgagag

SEQ ID NO: 115983 - DNA, 17 bp, Arabidopsis thaliana
ggtatctggtggaacga

SEQ ID NO: 115984 - DNA, 17 bp, Arabidopsis thaliana
ggtatctggttgacaac

SEQ ID NO: 115985 - DNA, 17 bp, Arabidopsis thaliana
ggtatcttgaagccctt

SEQ ID NO: 115986 - DNA, 17 bp, Arabidopsis thaliana
ggtatctttatgttcca

SEQ ID NO: 115987 - DNA, 17 bp, Arabidopsis thaliana
ggtatctttccaagatc

SEQ ID NO: 115988 - DNA, 17 bp, Arabidopsis thaliana
ggtatctttggactggc

SEQ ID NO: 115989 - DNA, 17 bp, Arabidopsis thaliana
ggtatctttggactgtc

SEQ ID NO: 115990 - DNA, 17 bp, Arabidopsis thaliana
ggtatgacctctgctga

SEQ ID NO: 115991 - DNA, 17 bp, Arabidopsis thaliana
ggtatgacgggtttcgg

SEQ ID NO: 115992 - DNA, 17 bp, Arabidopsis thaliana
ggtatgacgggtttgag

SEQ ID NO: 115993 - DNA, 17 bp, Arabidopsis thaliana
ggtatgactgatctcct

SEQ ID NO: 115994 - DNA, 17 bp, Arabidopsis thaliana
ggtatgagacgacccag

SEQ ID NO: 115995 - DNA, 17 bp, Arabidopsis thaliana
ggtatgagcccttcttg

SEQ ID NO: 115996 - DNA, 17 bp, Arabidopsis thaliana
ggtatgagcgtgccaaa

SEQ ID NO: 115997 - DNA, 17 bp, Arabidopsis thaliana
ggtatgagctcgaaatt

SEQ ID NO: 115998 - DNA, 17 bp, Arabidopsis thaliana
ggtatgagttccggcga

SEQ ID NO: 115999 - DNA, 17 bp, Arabidopsis thaliana
ggtatgagttggctaat

SEQ ID NO: 116000 - DNA, 17 bp, Arabidopsis thaliana
ggtatgatcaattcacc

SEQ ID NO: 116001 - DNA, 17 bp, Arabidopsis thaliana
ggtatgattctcgcttc

SEQ ID NO: 116002 - DNA, 17 bp, Arabidopsis thaliana
ggtatgatttctgacac

SEQ ID NO: 116003 - DNA, 17 bp, Arabidopsis thaliana
ggtatgcaccgatttat

SEQ ID NO: 116004 - DNA, 17 bp, Arabidopsis thaliana
ggtatgcaggcggatgt

SEQ ID NO: 116005 - DNA, 17 bp, Arabidopsis thaliana
ggtatgcattggtccat

SEQ ID NO: 116006 - DNA, 17 bp, Arabidopsis thaliana
ggtatgcattggtcggc

SEQ ID NO: 116007 - DNA, 17 bp, Arabidopsis thaliana
ggtatggattaaggaga

SEQ ID NO: 116008 - DNA, 17 bp, Arabidopsis thaliana
ggtatggcggcttgtga

SEQ ID NO: 116009 - DNA, 17 bp, Arabidopsis thaliana
ggtatggcgtgcggcag

SEQ ID NO: 116010 - DNA, 17 bp, Arabidopsis thaliana
ggtatgggcacgaagcg

SEQ ID NO: 116011 - DNA, 17 bp, Arabidopsis thaliana
ggtatgggtttggcagg

SEQ ID NO: 116012 - DNA, 17 bp, Arabidopsis thaliana
ggtatggttctgcaact

SEQ ID NO: 116013 - DNA, 17 bp, Arabidopsis thaliana
ggtatgtctaatgtctc

SEQ ID NO: 116014 - DNA, 17 bp, Arabidopsis thaliana
ggtatgtctaatgtctt

SEQ ID NO: 116015 - DNA, 17 bp, Arabidopsis thaliana
ggtatgttgcggctgac

SEQ ID NO: 116016 - DNA, 17 bp, Arabidopsis thaliana
ggtatgttgcggttgac

SEQ ID NO: 116017 - DNA, 17 bp, Arabidopsis thaliana
ggtattagagtccgatc

SEQ ID NO: 116018 - DNA, 17 bp, Arabidopsis thaliana
ggtattatcaacggctg

SEQ ID NO: 116019 - DNA, 17 bp, Arabidopsis thaliana
ggtattatcgtcatttc

SEQ ID NO: 116020 - DNA, 17 bp, Arabidopsis thaliana
ggtattcggatcggggt

SEQ ID NO: 116021 - DNA, 17 bp, Arabidopsis thaliana
ggtattcggcaatatct

SEQ ID NO: 116022 - DNA, 17 bp, Arabidopsis thaliana
ggtattcgtcaaccaca

SEQ ID NO: 116023 - DNA, 17 bp, Arabidopsis thaliana
ggtattctgagaatcaa

SEQ ID NO: 116024 - DNA, 17 bp, Arabidopsis thaliana
ggtattgacttcccccg

SEQ ID NO: 116025 - DNA, 17 bp, Arabidopsis thaliana
ggtattgacttcccctg

SEQ ID NO: 116026 - DNA, 17 bp, Arabidopsis thaliana
ggtattgcactaacttg

SEQ ID NO: 116027 - DNA, 17 bp, Arabidopsis thaliana
ggtattggtccagtagt

SEQ ID NO: 116028 - DNA, 17 bp, Arabidopsis thaliana
ggtattggtctccgtct

SEQ ID NO: 116029 - DNA, 17 bp, Arabidopsis thaliana
ggtattgtcggaggtgc

SEQ ID NO: 116030 - DNA, 17 bp, Arabidopsis thaliana
ggtattgtgcgtgtgcg

SEQ ID NO: 116031 - DNA, 17 bp, Arabidopsis thaliana
ggtattgtggtctaatg

SEQ ID NO: 116032 - DNA, 17 bp, Arabidopsis thaliana
ggtattgttttgcgcaa

SEQ ID NO: 116033 - DNA, 17 bp, Arabidopsis thaliana
ggtatttaagcattctc

SEQ ID NO: 116034 - DNA, 17 bp, Arabidopsis thaliana
ggtatttcgaccgcgaa

SEQ ID NO: 116035 - DNA, 17 bp, Arabidopsis thaliana
ggtatttctcatttaat

SEQ ID NO: 116036 - DNA, 17 bp, Arabidopsis thaliana
ggtatttgacacgtggc

SEQ ID NO: 116037 - DNA, 17 bp, Arabidopsis thaliana
ggtatttggtcgcaggg

SEQ ID NO: 116038 - DNA, 17 bp, Arabidopsis thaliana
ggtatttgtgcgcttgg

SEQ ID NO: 116039 - DNA, 17 bp, Arabidopsis thaliana
ggtattttggtggttca

SEQ ID NO: 116040 - DNA, 17 bp, Arabidopsis thaliana
ggtattttttctcactt

SEQ ID NO: 116041 - DNA, 17 bp, Arabidopsis thaliana
ggtcaaaatttggggtc

SEQ ID NO: 116042 - DNA, 17 bp, Arabidopsis thaliana
ggtcaaagcccgtaatc

SEQ ID NO: 116043 - DNA, 17 bp, Arabidopsis thaliana
ggtcaaagcgactcatt

SEQ ID NO: 116044 - DNA, 17 bp, Arabidopsis thaliana
ggtcaaaggctactgtc

SEQ ID NO: 116045 - DNA, 17 bp, Arabidopsis thaliana
ggtcaaagggtgtggcc

SEQ ID NO: 116046 - DNA, 17 bp, Arabidopsis thaliana
ggtcaaagtccgtaatc

SEQ ID NO: 116047 - DNA, 17 bp, Arabidopsis thaliana
ggtcaaagtttgggcta

SEQ ID NO: 116048 - DNA, 17 bp, Arabidopsis thaliana
ggtcaaagtttggtgga

SEQ ID NO: 116049 - DNA, 17 bp, Arabidopsis thaliana
ggtcaaatccaacggtc

SEQ ID NO: 116050 - DNA, 17 bp, Arabidopsis thaliana
ggtcaaatctcggtagg

SEQ ID NO: 116051 - DNA, 17 bp, Arabidopsis thaliana
ggtcaacagaatgttta

SEQ ID NO: 116052 - DNA, 17 bp, Arabidopsis thaliana
ggtcaacaggtgtggcc

SEQ ID NO: 116053 - DNA, 17 bp, Arabidopsis thaliana
ggtcaaccaatggacca

SEQ ID NO: 116054 - DNA, 17 bp, Arabidopsis thaliana
ggtcaaccaggttggaa

SEQ ID NO: 116055 - DNA, 17 bp, Arabidopsis thaliana
ggtcaaccaggttggac

SEQ ID NO: 116056 - DNA, 17 bp, Arabidopsis thaliana
ggtcaaccattgagcca

SEQ ID NO: 116057 - DNA, 17 bp, Arabidopsis thaliana
ggtcaaccgggttggac

SEQ ID NO: 116058 - DNA, 17 bp, Arabidopsis thaliana
ggtcaaccgtgactcca

SEQ ID NO: 116059 - DNA, 17 bp, Arabidopsis thaliana
ggtcaacctttggagct

SEQ ID NO: 116060 - DNA, 17 bp, Arabidopsis thaliana
ggtcaacgacaataata

SEQ ID NO: 116061 - DNA, 17 bp, Arabidopsis thaliana
ggtcaacgaccataata

SEQ ID NO: 116062 - DNA, 17 bp, Arabidopsis thaliana
ggtcaacgattaagttt

SEQ ID NO: 116063 - DNA, 17 bp, Arabidopsis thaliana
ggtcaacgggtctgccc

SEQ ID NO: 116064 - DNA, 17 bp, Arabidopsis thaliana
ggtcaacgggtgtggcc

SEQ ID NO: 116065 - DNA, 17 bp, Arabidopsis thaliana
ggtcaactatgcctggc

SEQ ID NO: 116066 - DNA, 17 bp, Arabidopsis thaliana
ggtcaactatggctggt

SEQ ID NO: 116067 - DNA, 17 bp, Arabidopsis thaliana
ggtcaactattgggcca

SEQ ID NO: 116068 - DNA, 17 bp, Arabidopsis thaliana
ggtcaactctctccata

SEQ ID NO: 116069 - DNA, 17 bp, Arabidopsis thaliana
ggtcaactggtggattt

SEQ ID NO: 116070 - DNA, 17 bp, Arabidopsis thaliana
ggtcaactttttgttca

SEQ ID NO: 116071 - DNA, 17 bp, Arabidopsis thaliana
ggtcaagaagttcggca

SEQ ID NO: 116072 - DNA, 17 bp, Arabidopsis thaliana
ggtcaagacccaactga

SEQ ID NO: 116073 - DNA, 17 bp, Arabidopsis thaliana
ggtcaagacctcgaccc

SEQ ID NO: 116074 - DNA, 17 bp, Arabidopsis thaliana
ggtcaagcccatattgt

SEQ ID NO: 116075 - DNA, 17 bp, Arabidopsis thaliana
ggtcaaggccagccata

SEQ ID NO: 116076 - DNA, 17 bp, Arabidopsis thaliana
ggtcaaggtcaagccca

SEQ ID NO: 116077 - DNA, 17 bp, Arabidopsis thaliana
ggtcaaggtcggccagt

SEQ ID NO: 116078 - DNA, 17 bp, Arabidopsis thaliana
ggtcaagtgatgtcagt

SEQ ID NO: 116079 - DNA, 17 bp, Arabidopsis thaliana
ggtcaagttatgggatt

SEQ ID NO: 116080 - DNA, 17 bp, Arabidopsis thaliana
ggtcaatcttctcgtac

SEQ ID NO: 116081 - DNA, 17 bp, Arabidopsis thaliana
ggtcaatgcctttacaa

SEQ ID NO: 116082 - DNA, 17 bp, Arabidopsis thaliana
ggtcaatgtattcatcg

SEQ ID NO: 116083 - DNA, 17 bp, Arabidopsis thaliana
ggtcaattcggttaggc

SEQ ID NO: 116084 - DNA, 17 bp, Arabidopsis thaliana
ggtcacaacttgatgag

SEQ ID NO: 116085 - DNA, 17 bp, Arabidopsis thaliana
ggtcacacagctcggcc

SEQ ID NO: 116086 - DNA, 17 bp, Arabidopsis thaliana
ggtcacacagctcggct

SEQ ID NO: 116087 - DNA, 17 bp, Arabidopsis thaliana
ggtcacatcactcgggt

SEQ ID NO: 116088 - DNA, 17 bp, Arabidopsis thaliana
ggtcaccaatcggaccc

SEQ ID NO: 116089 - DNA, 17 bp, Arabidopsis thaliana
ggtcacccaatgtttct

SEQ ID NO: 116090 - DNA, 17 bp, Arabidopsis thaliana
ggtcaccgggtcatcgg

SEQ ID NO: 116091 - DNA, 17 bp, Arabidopsis thaliana
ggtcaccggtacccggt

SEQ ID NO: 116092 - DNA, 17 bp, Arabidopsis thaliana
ggtcaccggtatccggt

SEQ ID NO: 116093 - DNA, 17 bp, Arabidopsis thaliana
ggtcaccggttcacccg

SEQ ID NO: 116094 - DNA, 17 bp, Arabidopsis thaliana
ggtcaccggttcgaacc

SEQ ID NO: 116095 - DNA, 17 bp, Arabidopsis thaliana
ggtcaccggttcgaatc

SEQ ID NO: 116096 - DNA, 17 bp, Arabidopsis thaliana
ggtcaccggttcgcacc

SEQ ID NO: 116097 - DNA, 17 bp, Arabidopsis thaliana
ggtcaccggttcggacc

SEQ ID NO: 116098 - DNA, 17 bp, Arabidopsis thaliana
ggtcaccggttcggatc

SEQ ID NO: 116099 - DNA, 17 bp, Arabidopsis thaliana
ggtcaccggttcgtatc

SEQ ID NO: 116100 - DNA, 17 bp, Arabidopsis thaliana
ggtcaccggttgaaccc

SEQ ID NO: 116101 - DNA, 17 bp, Arabidopsis thaliana
ggtcacgagttcgatta

SEQ ID NO: 116102 - DNA, 17 bp, Arabidopsis thaliana
ggtcacgcctctcggag

SEQ ID NO: 116103 - DNA, 17 bp, Arabidopsis thaliana
ggtcacggaaatctaaa

SEQ ID NO: 116104 - DNA, 17 bp, Arabidopsis thaliana
ggtcacggatgagttat

SEQ ID NO: 116105 - DNA, 17 bp, Arabidopsis thaliana
ggtcacggctctgggtg

SEQ ID NO: 116106 - DNA, 17 bp, Arabidopsis thaliana
ggtcacggtcgctgatt

SEQ ID NO: 116107 - DNA, 17 bp, Arabidopsis thaliana
ggtcacgtctgcctggg

SEQ ID NO: 116108 - DNA, 17 bp, Arabidopsis thaliana
ggtcacgtctgcctgtg

SEQ ID NO: 116109 - DNA, 17 bp, Arabidopsis thaliana
ggtcacgtctgccttgg

SEQ ID NO: 116110 - DNA, 17 bp, Arabidopsis thaliana
ggtcactccacctattg

SEQ ID NO: 116111 - DNA, 17 bp, Arabidopsis thaliana
ggtcactcgcttaccgg

SEQ ID NO: 116112 - DNA, 17 bp, Arabidopsis thaliana
ggtcactgctctatctg

SEQ ID NO: 116113 - DNA, 17 bp, Arabidopsis thaliana
ggtcacttctccgatga

SEQ ID NO: 116114 - DNA, 17 bp, Arabidopsis thaliana
ggtcacttggcaatcca

SEQ ID NO: 116115 - DNA, 17 bp, Arabidopsis thaliana
ggtcacttgttgagtta

SEQ ID NO: 116116 - DNA, 17 bp, Arabidopsis thaliana
ggtcactttttggatga

SEQ ID NO: 116117 - DNA, 17 bp, Arabidopsis thaliana
ggtcagaacaatgtgcc

SEQ ID NO: 116118 - DNA, 17 bp, Arabidopsis thaliana
ggtcagacccgggttcg

SEQ ID NO: 116119 - DNA, 17 bp, Arabidopsis thaliana
ggtcagacctcgactcc

SEQ ID NO: 116120 - DNA, 17 bp, Arabidopsis thaliana
ggtcagacgagatgacc

SEQ ID NO: 116121 - DNA, 17 bp, Arabidopsis thaliana
ggtcagagtcggtccaa

SEQ ID NO: 116122 - DNA, 17 bp, Arabidopsis thaliana
ggtcagatccagtagct

SEQ ID NO: 116123 - DNA, 17 bp, Arabidopsis thaliana
ggtcagatccagttggg

SEQ ID NO: 116124 - DNA, 17 bp, Arabidopsis thaliana
ggtcagatctggttaag

SEQ ID NO: 116125 - DNA, 17 bp, Arabidopsis thaliana
ggtcagatgggacaggc

SEQ ID NO: 116126 - DNA, 17 bp, Arabidopsis thaliana
ggtcagattattcgtgt

SEQ ID NO: 116127 - DNA, 17 bp, Arabidopsis thaliana
ggtcagcaaacggtcga

SEQ ID NO: 116128 - DNA, 17 bp, Arabidopsis thaliana
ggtcagcaccggtagaa

SEQ ID NO: 116129 - DNA, 17 bp, Arabidopsis thaliana
ggtcagcagagacgcgg

SEQ ID NO: 116130 - DNA, 17 bp, Arabidopsis thaliana
ggtcagcaggtttagat

SEQ ID NO: 116131 - DNA, 17 bp, Arabidopsis thaliana
ggtcagccctttgtcct

SEQ ID NO: 116132 - DNA, 17 bp, Arabidopsis thaliana
ggtcagcgaccaaaaga

SEQ ID NO: 116133 - DNA, 17 bp, Arabidopsis thaliana
ggtcagcgctctgacga

SEQ ID NO: 116134 - DNA, 17 bp, Arabidopsis thaliana
ggtcagctgattgagta

SEQ ID NO: 116135 - DNA, 17 bp, Arabidopsis thaliana
ggtcagcttccttcgga

SEQ ID NO: 116136 - DNA, 17 bp, Arabidopsis thaliana
ggtcagcttgtcccttc

SEQ ID NO: 116137 - DNA, 17 bp, Arabidopsis thaliana
ggtcaggaccagagcta

SEQ ID NO: 116138 - DNA, 17 bp, Arabidopsis thaliana
ggtcaggactactcgtt

SEQ ID NO: 116139 - DNA, 17 bp, Arabidopsis thaliana
ggtcaggagacgcagaa

SEQ ID NO: 116140 - DNA, 17 bp, Arabidopsis thaliana
ggtcaggctacacccgt

SEQ ID NO: 116141 - DNA, 17 bp, Arabidopsis thaliana
ggtcaggctttaaatgg

SEQ ID NO: 116142 - DNA, 17 bp, Arabidopsis thaliana
ggtcagggatggggcat

SEQ ID NO: 116143 - DNA, 17 bp, Arabidopsis thaliana
ggtcagggtcggctctg

SEQ ID NO: 116144 - DNA, 17 bp, Arabidopsis thaliana
ggtcaggtactgtgtct

SEQ ID NO: 116145 - DNA, 17 bp, Arabidopsis thaliana
ggtcaggtgatgggatg

SEQ ID NO: 116146 - DNA, 17 bp, Arabidopsis thaliana
ggtcaggttcgtttcgc

SEQ ID NO: 116147 - DNA, 17 bp, Arabidopsis thaliana
ggtcaggttgctggtgg

SEQ ID NO: 116148 - DNA, 17 bp, Arabidopsis thaliana
ggtcaggttgttcggtt

SEQ ID NO: 116149 - DNA, 17 bp, Arabidopsis thaliana
ggtcagtacccgtgcta

SEQ ID NO: 116150 - DNA, 17 bp, Arabidopsis thaliana
ggtcagtacttgcagtg

SEQ ID NO: 116151 - DNA, 17 bp, Arabidopsis thaliana
ggtcagtcaaggtcgta

SEQ ID NO: 116152 - DNA, 17 bp, Arabidopsis thaliana
ggtcagtcatagctgca

SEQ ID NO: 116153 - DNA, 17 bp, Arabidopsis thaliana
ggtcagtcccatctttt

SEQ ID NO: 116154 - DNA, 17 bp, Arabidopsis thaliana
ggtcagtcgcaccctgt

SEQ ID NO: 116155 - DNA, 17 bp, Arabidopsis thaliana
ggtcagtctatagcgct

SEQ ID NO: 116156 - DNA, 17 bp, Arabidopsis thaliana
ggtcagtgacgagttcg

SEQ ID NO: 116157 - DNA, 17 bp, Arabidopsis thaliana
ggtcagtgagtaaagtt

SEQ ID NO: 116158 - DNA, 17 bp, Arabidopsis thaliana
ggtcagtggacaccttt

SEQ ID NO: 116159 - DNA, 17 bp, Arabidopsis thaliana
ggtcagtgtagcgcagg

SEQ ID NO: 116160 - DNA, 17 bp, Arabidopsis thaliana
ggtcagttccgagatat

SEQ ID NO: 116161 - DNA, 17 bp, Arabidopsis thaliana
ggtcagtttcgagatat

SEQ ID NO: 116162 - DNA, 17 bp, Arabidopsis thaliana
ggtcagtttggaatagt

SEQ ID NO: 116163 - DNA, 17 bp, Arabidopsis thaliana
ggtcagttttggtaaaa

SEQ ID NO: 116164 - DNA, 17 bp, Arabidopsis thaliana
ggtcataacggaggcct

SEQ ID NO: 116165 - DNA, 17 bp, Arabidopsis thaliana
ggtcataatgccgctct

SEQ ID NO: 116166 - DNA, 17 bp, Arabidopsis thaliana
ggtcatactttgggctc

SEQ ID NO: 116167 - DNA, 17 bp, Arabidopsis thaliana
ggtcatagttgccttgc

SEQ ID NO: 116168 - DNA, 17 bp, Arabidopsis thaliana
ggtcatagtttgggctc

SEQ ID NO: 116169 - DNA, 17 bp, Arabidopsis thaliana
ggtcatatggtacattc

SEQ ID NO: 116170 - DNA, 17 bp, Arabidopsis thaliana
ggtcatcagaatcagaa

SEQ ID NO: 116171 - DNA, 17 bp, Arabidopsis thaliana
ggtcatcagaatcagca

SEQ ID NO: 116172 - DNA, 17 bp, Arabidopsis thaliana
ggtcatcattcggagcc

SEQ ID NO: 116173 - DNA, 17 bp, Arabidopsis thaliana
ggtcatccgagacatta

SEQ ID NO: 116174 - DNA, 17 bp, Arabidopsis thaliana
ggtcatccgtgatggat

SEQ ID NO: 116175 - DNA, 17 bp, Arabidopsis thaliana
ggtcatcgggtcaacca

SEQ ID NO: 116176 - DNA, 17 bp, Arabidopsis thaliana
ggtcatctacgtcgcca

SEQ ID NO: 116177 - DNA, 17 bp, Arabidopsis thaliana
ggtcatctagtgcatat

SEQ ID NO: 116178 - DNA, 17 bp, Arabidopsis thaliana
ggtcatctcaatttgcc

SEQ ID NO: 116179 - DNA, 17 bp, Arabidopsis thaliana
ggtcatctccattggtc

SEQ ID NO: 116180 - DNA, 17 bp, Arabidopsis thaliana
ggtcatctcgtcaggaa

SEQ ID NO: 116181 - DNA, 17 bp, Arabidopsis thaliana
ggtcatctcgtcttatt

SEQ ID NO: 116182 - DNA, 17 bp, Arabidopsis thaliana
ggtcatctctgccgcat

SEQ ID NO: 116183 - DNA, 17 bp, Arabidopsis thaliana
ggtcatctgatttatat

SEQ ID NO: 116184 - DNA, 17 bp, Arabidopsis thaliana
ggtcatgagcccaagtt

SEQ ID NO: 116185 - DNA, 17 bp, Arabidopsis thaliana
ggtcatgcctaaaacta

SEQ ID NO: 116186 - DNA, 17 bp, Arabidopsis thaliana
ggtcatgctctgacagc

SEQ ID NO: 116187 - DNA, 17 bp, Arabidopsis thaliana
ggtcatggctatgcaac

SEQ ID NO: 116188 - DNA, 17 bp, Arabidopsis thaliana
ggtcatggcttgggcta

SEQ ID NO: 116189 - DNA, 17 bp, Arabidopsis thaliana
ggtcatgtggttacgtc

SEQ ID NO: 116190 - DNA, 17 bp, Arabidopsis thaliana
ggtcattcctcgtgtcg

SEQ ID NO: 116191 - DNA, 17 bp, Arabidopsis thaliana
ggtcattcggttggaaa

SEQ ID NO: 116192 - DNA, 17 bp, Arabidopsis thaliana
ggtcattcggttggaga

SEQ ID NO: 116193 - DNA, 17 bp, Arabidopsis thaliana
ggtcattctcaaagatt

SEQ ID NO: 116194 - DNA, 17 bp, Arabidopsis thaliana
ggtcattgacctgcagg

SEQ ID NO: 116195 - DNA, 17 bp, Arabidopsis thaliana
ggtcattgtgtcgccca

SEQ ID NO: 116196 - DNA, 17 bp, Arabidopsis thaliana
ggtcatttcatctactc

SEQ ID NO: 116197 - DNA, 17 bp, Arabidopsis thaliana
ggtcatttcccggctgg

SEQ ID NO: 116198 - DNA, 17 bp, Arabidopsis thaliana
ggtcatttggatcgtca

SEQ ID NO: 116199 - DNA, 17 bp, Arabidopsis thaliana
ggtcattttcgtgattt

SEQ ID NO: 116200 - DNA, 17 bp, Arabidopsis thaliana
ggtccaaaacctcctgt

SEQ ID NO: 116201 - DNA, 17 bp, Arabidopsis thaliana
ggtccaaaatacaaagc

SEQ ID NO: 116202 - DNA, 17 bp, Arabidopsis thaliana
ggtccaaagactaatca

SEQ ID NO: 116203 - DNA, 17 bp, Arabidopsis thaliana
ggtccaaagcgatatct

SEQ ID NO: 116204 - DNA, 17 bp, Arabidopsis thaliana
ggtccaacaaacaaatt

SEQ ID NO: 116205 - DNA, 17 bp, Arabidopsis thaliana
ggtccaacccggttgac

SEQ ID NO: 116206 - DNA, 17 bp, Arabidopsis thaliana
ggtccaacccggttgcc

SEQ ID NO: 116207 - DNA, 17 bp, Arabidopsis thaliana
ggtccaagatctcatct

SEQ ID NO: 116208 - DNA, 17 bp, Arabidopsis thaliana
ggtccaaggatgacttg

SEQ ID NO: 116209 - DNA, 17 bp, Arabidopsis thaliana
ggtccaagtggacatga

SEQ ID NO: 116210 - DNA, 17 bp, Arabidopsis thaliana
ggtccaatccagatgac

SEQ ID NO: 116211 - DNA, 17 bp, Arabidopsis thaliana
ggtccaatccggttgac

SEQ ID NO: 116212 - DNA, 17 bp, Arabidopsis thaliana
ggtccaattggtttatc

SEQ ID NO: 116213 - DNA, 17 bp, Arabidopsis thaliana
ggtccaatttggttgcg

SEQ ID NO: 116214 - DNA, 17 bp, Arabidopsis thaliana
ggtccaatttttgctgc

SEQ ID NO: 116215 - DNA, 17 bp, Arabidopsis thaliana
ggtccacaacggtttat

SEQ ID NO: 116216 - DNA, 17 bp, Arabidopsis thaliana
ggtccacacccgactgg

SEQ ID NO: 116217 - DNA, 17 bp, Arabidopsis thaliana
ggtccacagattagttg

SEQ ID NO: 116218 - DNA, 17 bp, Arabidopsis thaliana
ggtccacgccccgaatc

SEQ ID NO: 116219 - DNA, 17 bp, Arabidopsis thaliana
ggtccacgctcaccgca

SEQ ID NO: 116220 - DNA, 17 bp, Arabidopsis thaliana
ggtccacgtcaattgcg

SEQ ID NO: 116221 - DNA, 17 bp, Arabidopsis thaliana
ggtccacttttataacc

SEQ ID NO: 116222 - DNA, 17 bp, Arabidopsis thaliana
ggtccagaaagtgtcta

SEQ ID NO: 116223 - DNA, 17 bp, Arabidopsis thaliana
ggtccagaacttcctgt

SEQ ID NO: 116224 - DNA, 17 bp, Arabidopsis thaliana
ggtccagaatcatcaat

SEQ ID NO: 116225 - DNA, 17 bp, Arabidopsis thaliana
ggtccagacagacccgc

SEQ ID NO: 116226 - DNA, 17 bp, Arabidopsis thaliana
ggtccagaccactacgg

SEQ ID NO: 116227 - DNA, 17 bp, Arabidopsis thaliana
ggtccagaccactgtgg

SEQ ID NO: 116228 - DNA, 17 bp, Arabidopsis thaliana
ggtccagacccgggttc

SEQ ID NO: 116229 - DNA, 17 bp, Arabidopsis thaliana
ggtccagacgtagcgtt

SEQ ID NO: 116230 - DNA, 17 bp, Arabidopsis thaliana
ggtccagattaaatcta

SEQ ID NO: 116231 - DNA, 17 bp, Arabidopsis thaliana
ggtccagccagatttta

SEQ ID NO: 116232 - DNA, 17 bp, Arabidopsis thaliana
ggtccagcggttggaag

SEQ ID NO: 116233 - DNA, 17 bp, Arabidopsis thaliana
ggtccaggctaatcaag

SEQ ID NO: 116234 - DNA, 17 bp, Arabidopsis thaliana
ggtccagtttgcttcaa

SEQ ID NO: 116235 - DNA, 17 bp, Arabidopsis thaliana
ggtccatttacaacggg

SEQ ID NO: 116236 - DNA, 17 bp, Arabidopsis thaliana
ggtccatttctacgcgg

SEQ ID NO: 116237 - DNA, 17 bp, Arabidopsis thaliana
ggtccatttggatttgg

SEQ ID NO: 116238 - DNA, 17 bp, Arabidopsis thaliana
ggtcccaaacacaattt

SEQ ID NO: 116239 - DNA, 17 bp, Arabidopsis thaliana
ggtcccaacgctcgctt

SEQ ID NO: 116240 - DNA, 17 bp, Arabidopsis thaliana
ggtcccaaggcacgctc

SEQ ID NO: 116241 - DNA, 17 bp, Arabidopsis thaliana
ggtcccaaggctcgctt

SEQ ID NO: 116242 - DNA, 17 bp, Arabidopsis thaliana
ggtcccaaggtcaggtc

SEQ ID NO: 116243 - DNA, 17 bp, Arabidopsis thaliana
ggtcccagttccgaacc

SEQ ID NO: 116244 - DNA, 17 bp, Arabidopsis thaliana
ggtcccatagctcagtt

SEQ ID NO: 116245 - DNA, 17 bp, Arabidopsis thaliana
ggtcccatcctgtagat

SEQ ID NO: 116246 - DNA, 17 bp, Arabidopsis thaliana
ggtccccacagacggcg

SEQ ID NO: 116247 - DNA, 17 bp, Arabidopsis thaliana
ggtccccactgtttgag

SEQ ID NO: 116248 - DNA, 17 bp, Arabidopsis thaliana
ggtcccccccgaacccg

SEQ ID NO: 116249 - DNA, 17 bp, Arabidopsis thaliana
ggtcccccgcataggca

SEQ ID NO: 116250 - DNA, 17 bp, Arabidopsis thaliana
ggtcccgacaggcatgc

SEQ ID NO: 116251 - DNA, 17 bp, Arabidopsis thaliana
ggtcccgagattcaagc

SEQ ID NO: 116252 - DNA, 17 bp, Arabidopsis thaliana
ggtcccgagttaggacc

SEQ ID NO: 116253 - DNA, 17 bp, Arabidopsis thaliana
ggtcccgcagctcagtt

SEQ ID NO: 116254 - DNA, 17 bp, Arabidopsis thaliana
ggtcccgtaactcagtt

SEQ ID NO: 116255 - DNA, 17 bp, Arabidopsis thaliana
ggtcccgtaatctctca

SEQ ID NO: 116256 - DNA, 17 bp, Arabidopsis thaliana
ggtcccgtaattttccc

SEQ ID NO: 116257 - DNA, 17 bp, Arabidopsis thaliana
ggtcccgtagctaagtt

SEQ ID NO: 116258 - DNA, 17 bp, Arabidopsis thaliana
ggtcccgtagctcaatt

SEQ ID NO: 116259 - DNA, 17 bp, Arabidopsis thaliana
ggtcccgtagctcagta

SEQ ID NO: 116260 - DNA, 17 bp, Arabidopsis thaliana
ggtcccgtagctcagtc

SEQ ID NO: 116261 - DNA, 17 bp, Arabidopsis thaliana
ggtcccgtagctcagtt

SEQ ID NO: 116262 - DNA, 17 bp, Arabidopsis thaliana
ggtcccgtagctcggtt

SEQ ID NO: 116263 - DNA, 17 bp, Arabidopsis thaliana
ggtcccgtatctcagtt

SEQ ID NO: 116264 - DNA, 17 bp, Arabidopsis thaliana
ggtccctatctgtcttg

SEQ ID NO: 116265 - DNA, 17 bp, Arabidopsis thaliana
ggtccctgtataggcca

SEQ ID NO: 116266 - DNA, 17 bp, Arabidopsis thaliana
ggtccgaaaacgacata

SEQ ID NO: 116267 - DNA, 17 bp, Arabidopsis thaliana
ggtccgaaaccacaaca

SEQ ID NO: 116268 - DNA, 17 bp, Arabidopsis thaliana
ggtccgaaacccgtaat

SEQ ID NO: 116269 - DNA, 17 bp, Arabidopsis thaliana
ggtccgaaccgactgat

SEQ ID NO: 116270 - DNA, 17 bp, Arabidopsis thaliana
ggtccgaacgacgcttc

SEQ ID NO: 116271 - DNA, 17 bp, Arabidopsis thaliana
ggtccgaacgacgcttg

SEQ ID NO: 116272 - DNA, 17 bp, Arabidopsis thaliana
ggtccgaactagcaccg

SEQ ID NO: 116273 - DNA, 17 bp, Arabidopsis thaliana
ggtccgacccaatagtt

SEQ ID NO: 116274 - DNA, 17 bp, Arabidopsis thaliana
ggtccgaccgtcggaca

SEQ ID NO: 116275 - DNA, 17 bp, Arabidopsis thaliana
ggtccgactagctgcgt

SEQ ID NO: 116276 - DNA, 17 bp, Arabidopsis thaliana
ggtccgagaggatgatc

SEQ ID NO: 116277 - DNA, 17 bp, Arabidopsis thaliana
ggtccgaggaatcgtcg

SEQ ID NO: 116278 - DNA, 17 bp, Arabidopsis thaliana
ggtccgaggatttgtcg

SEQ ID NO: 116279 - DNA, 17 bp, Arabidopsis thaliana
ggtccgatccctataaa

SEQ ID NO: 116280 - DNA, 17 bp, Arabidopsis thaliana
ggtccgatctcatatga

SEQ ID NO: 116281 - DNA, 17 bp, Arabidopsis thaliana
ggtccgatctcatctga

SEQ ID NO: 116282 - DNA, 17 bp, Arabidopsis thaliana
ggtccgcaaatgatccg

SEQ ID NO: 116283 - DNA, 17 bp, Arabidopsis thaliana
ggtccgcagcgatttat

SEQ ID NO: 116284 - DNA, 17 bp, Arabidopsis thaliana
ggtccgcagcggtttat

SEQ ID NO: 116285 - DNA, 17 bp, Arabidopsis thaliana
ggtccgccgatcgattc

SEQ ID NO: 116286 - DNA, 17 bp, Arabidopsis thaliana
ggtccgccgtttaattc

SEQ ID NO: 116287 - DNA, 17 bp, Arabidopsis thaliana
ggtccgcctttggtgtg

SEQ ID NO: 116288 - DNA, 17 bp, Arabidopsis thaliana
ggtccgcgcgtgccacg

SEQ ID NO: 116289 - DNA, 17 bp, Arabidopsis thaliana
ggtccgcgcttagtccg

SEQ ID NO: 116290 - DNA, 17 bp, Arabidopsis thaliana
ggtccgcggatgacttg

SEQ ID NO: 116291 - DNA, 17 bp, Arabidopsis thaliana
ggtccgctctagcaccc

SEQ ID NO: 116292 - DNA, 17 bp, Arabidopsis thaliana
ggtccgcttgtcccttc

SEQ ID NO: 116293 - DNA, 17 bp, Arabidopsis thaliana
ggtccggaatatagccc

SEQ ID NO: 116294 - DNA, 17 bp, Arabidopsis thaliana
ggtccggactgcaccat

SEQ ID NO: 116295 - DNA, 17 bp, Arabidopsis thaliana
ggtccggagacgtcggc

SEQ ID NO: 116296 - DNA, 17 bp, Arabidopsis thaliana
ggtccggcttcatcctc

SEQ ID NO: 116297 - DNA, 17 bp, Arabidopsis thaliana
ggtccggtgcggtgaac

SEQ ID NO: 116298 - DNA, 17 bp, Arabidopsis thaliana
ggtccgtaatatagccc

SEQ ID NO: 116299 - DNA, 17 bp, Arabidopsis thaliana
ggtccgtaatatagtcc

SEQ ID NO: 116300 - DNA, 17 bp, Arabidopsis thaliana
ggtccgtaatttagccc

SEQ ID NO: 116301 - DNA, 17 bp, Arabidopsis thaliana
ggtccgtcagcggttta

SEQ ID NO: 116302 - DNA, 17 bp, Arabidopsis thaliana
ggtccgtcggctggtgc

SEQ ID NO: 116303 - DNA, 17 bp, Arabidopsis thaliana
ggtccgtcttgccgatg

SEQ ID NO: 116304 - DNA, 17 bp, Arabidopsis thaliana
ggtccgtgcgtctctat

SEQ ID NO: 116305 - DNA, 17 bp, Arabidopsis thaliana
ggtccgtttccttttcc

SEQ ID NO: 116306 - DNA, 17 bp, Arabidopsis thaliana
ggtccgttttttcgtca

SEQ ID NO: 116307 - DNA, 17 bp, Arabidopsis thaliana
ggtccgtttttttgtca

SEQ ID NO: 116308 - DNA, 17 bp, Arabidopsis thaliana
ggtcctaactttagaca

SEQ ID NO: 116309 - DNA, 17 bp, Arabidopsis thaliana
ggtcctaaggggattac

SEQ ID NO: 116310 - DNA, 17 bp, Arabidopsis thaliana
ggtcctaatgatgatcc

SEQ ID NO: 116311 - DNA, 17 bp, Arabidopsis thaliana
ggtcctaattcgcgtct

SEQ ID NO: 116312 - DNA, 17 bp, Arabidopsis thaliana
ggtcctaattgacttgt

SEQ ID NO: 116313 - DNA, 17 bp, Arabidopsis thaliana
ggtcctacatcttccag

SEQ ID NO: 116314 - DNA, 17 bp, Arabidopsis thaliana
ggtcctagtcatcctgt

SEQ ID NO: 116315 - DNA, 17 bp, Arabidopsis thaliana
ggtcctatggtctagtg

SEQ ID NO: 116316 - DNA, 17 bp, Arabidopsis thaliana
ggtcctccaaatgaaaa

SEQ ID NO: 116317 - DNA, 17 bp, Arabidopsis thaliana
ggtcctcgtgttgcatc

SEQ ID NO: 116318 - DNA, 17 bp, Arabidopsis thaliana
ggtcctcttctacgatc

SEQ ID NO: 116319 - DNA, 17 bp, Arabidopsis thaliana
ggtcctcttgatcggtg

SEQ ID NO: 116320 - DNA, 17 bp, Arabidopsis thaliana
ggtcctgcggaaggatc

SEQ ID NO: 116321 - DNA, 17 bp, Arabidopsis thaliana
ggtcctgcgtgtgggca

SEQ ID NO: 116322 - DNA, 17 bp, Arabidopsis thaliana
ggtcctgggaactcagc

SEQ ID NO: 116323 - DNA, 17 bp, Arabidopsis thaliana
ggtcctgggagagtagg

SEQ ID NO: 116324 - DNA, 17 bp, Arabidopsis thaliana
ggtcctgggcacgaagc

SEQ ID NO: 116325 - DNA, 17 bp, Arabidopsis thaliana
ggtcctgtagctcagtt

SEQ ID NO: 116326 - DNA, 17 bp, Arabidopsis thaliana
ggtcctgtctgaaaatg

SEQ ID NO: 116327 - DNA, 17 bp, Arabidopsis thaliana
ggtcctgttccgaaccc

SEQ ID NO: 116328 - DNA, 17 bp, Arabidopsis thaliana
ggtcctgttcgtttgcc

SEQ ID NO: 116329 - DNA, 17 bp, Arabidopsis thaliana
ggtcctgttcgtttgct

SEQ ID NO: 116330 - DNA, 17 bp, Arabidopsis thaliana
ggtccttacgcctttaa

SEQ ID NO: 116331 - DNA, 17 bp, Arabidopsis thaliana
ggtccttgggctttcaa

SEQ ID NO: 116332 - DNA, 17 bp, Arabidopsis thaliana
ggtcctttctctcgtat

SEQ ID NO: 116333 - DNA, 17 bp, Arabidopsis thaliana
ggtcctttgtcgctaag

SEQ ID NO: 116334 - DNA, 17 bp, Arabidopsis thaliana
ggtcgaaagggccaatg

SEQ ID NO: 116335 - DNA, 17 bp, Arabidopsis thaliana
ggtcgaacccgggctca

SEQ ID NO: 116336 - DNA, 17 bp, Arabidopsis thaliana
ggtcgaagattggtctc

SEQ ID NO: 116337 - DNA, 17 bp, Arabidopsis thaliana
ggtcgaagcccagagga

SEQ ID NO: 116338 - DNA, 17 bp, Arabidopsis thaliana
ggtcgaagctagagact

SEQ ID NO: 116339 - DNA, 17 bp, Arabidopsis thaliana
ggtcgaagggtgtggcc

SEQ ID NO: 116340 - DNA, 17 bp, Arabidopsis thaliana
ggtcgaaggtagactca

SEQ ID NO: 116341 - DNA, 17 bp, Arabidopsis thaliana
ggtcgaagtccgtaaac

SEQ ID NO: 116342 - DNA, 17 bp, Arabidopsis thaliana
ggtcgacaaatcctcgg

SEQ ID NO: 116343 - DNA, 17 bp, Arabidopsis thaliana
ggtcgacaagactgtct

SEQ ID NO: 116344 - DNA, 17 bp, Arabidopsis thaliana
ggtcgacagggattgcg

SEQ ID NO: 116345 - DNA, 17 bp, Arabidopsis thaliana
ggtcgacatcgttcgcg

SEQ ID NO: 116346 - DNA, 17 bp, Arabidopsis thaliana
ggtcgaccggtccgcct

SEQ ID NO: 116347 - DNA, 17 bp, Arabidopsis thaliana
ggtcgacctgaaagatt

SEQ ID NO: 116348 - DNA, 17 bp, Arabidopsis thaliana
ggtcgacgaatcctcgg

SEQ ID NO: 116349 - DNA, 17 bp, Arabidopsis thaliana
ggtcgacgaccatgagt

SEQ ID NO: 116350 - DNA, 17 bp, Arabidopsis thaliana
ggtcgacgattcctcgg

SEQ ID NO: 116351 - DNA, 17 bp, Arabidopsis thaliana
ggtcgacgcggattacg

SEQ ID NO: 116352 - DNA, 17 bp, Arabidopsis thaliana
ggtcgacgcgggctctg

SEQ ID NO: 116353 - DNA, 17 bp, Arabidopsis thaliana
ggtcgacggatcgcatg

SEQ ID NO: 116354 - DNA, 17 bp, Arabidopsis thaliana
ggtcgacggatctctat

SEQ ID NO: 116355 - DNA, 17 bp, Arabidopsis thaliana
ggtcgacgtggctctgc

SEQ ID NO: 116356 - DNA, 17 bp, Arabidopsis thaliana
ggtcgactgtgttctgc

SEQ ID NO: 116357 - DNA, 17 bp, Arabidopsis thaliana
ggtcgacttgtcccttc

SEQ ID NO: 116358 - DNA, 17 bp, Arabidopsis thaliana
ggtcgactttgacgaat

SEQ ID NO: 116359 - DNA, 17 bp, Arabidopsis thaliana
ggtcgagaccacatttg

SEQ ID NO: 116360 - DNA, 17 bp, Arabidopsis thaliana
ggtcgagactttgccgg

SEQ ID NO: 116361 - DNA, 17 bp, Arabidopsis thaliana
ggtcgagatgtatctaa

SEQ ID NO: 116362 - DNA, 17 bp, Arabidopsis thaliana
ggtcgaggattcgtcag

SEQ ID NO: 116363 - DNA, 17 bp, Arabidopsis thaliana
ggtcgaggcccaggaga

SEQ ID NO: 116364 - DNA, 17 bp, Arabidopsis thaliana
ggtcgagggcacgtctg

SEQ ID NO: 116365 - DNA, 17 bp, Arabidopsis thaliana
ggtcgaggtggtggtcg

SEQ ID NO: 116366 - DNA, 17 bp, Arabidopsis thaliana
ggtcgagtagaccttgt

SEQ ID NO: 116367 - DNA, 17 bp, Arabidopsis thaliana
ggtcgagtatctttgtt

SEQ ID NO: 116368 - DNA, 17 bp, Arabidopsis thaliana
ggtcgagtatggacctc

SEQ ID NO: 116369 - DNA, 17 bp, Arabidopsis thaliana
ggtcgagtattagtgat

SEQ ID NO: 116370 - DNA, 17 bp, Arabidopsis thaliana
ggtcgagtccactccga

SEQ ID NO: 116371 - DNA, 17 bp, Arabidopsis thaliana
ggtcgagtgaatggcga

SEQ ID NO: 116372 - DNA, 17 bp, Arabidopsis thaliana
ggtcgagtgagggttgt

SEQ ID NO: 116373 - DNA, 17 bp, Arabidopsis thaliana
ggtcgagtggctgctag

SEQ ID NO: 116374 - DNA, 17 bp, Arabidopsis thaliana
ggtcgagtggtaaggag

SEQ ID NO: 116375 - DNA, 17 bp, Arabidopsis thaliana
ggtcgagttgcggtcga

SEQ ID NO: 116376 - DNA, 17 bp, Arabidopsis thaliana
ggtcgataggttgacca

SEQ ID NO: 116377 - DNA, 17 bp, Arabidopsis thaliana
ggtcgatccctgtatag

SEQ ID NO: 116378 - DNA, 17 bp, Arabidopsis thaliana
ggtcgatctggctttct

SEQ ID NO: 116379 - DNA, 17 bp, Arabidopsis thaliana
ggtcgatgaggagaaca

SEQ ID NO: 116380 - DNA, 17 bp, Arabidopsis thaliana
ggtcgatgcccgagcgg

SEQ ID NO: 116381 - DNA, 17 bp, Arabidopsis thaliana
ggtcgatggaacaatgt

SEQ ID NO: 116382 - DNA, 17 bp, Arabidopsis thaliana
ggtcgattcccgttatc

SEQ ID NO: 116383 - DNA, 17 bp, Arabidopsis thaliana
ggtcgattcctggcata

SEQ ID NO: 116384 - DNA, 17 bp, Arabidopsis thaliana
ggtcgattctagatgat

SEQ ID NO: 116385 - DNA, 17 bp, Arabidopsis thaliana
ggtcgcaaggctgaaac

SEQ ID NO: 116386 - DNA, 17 bp, Arabidopsis thaliana
ggtcgcaccctgtagat

SEQ ID NO: 116387 - DNA, 17 bp, Arabidopsis thaliana
ggtcgcacggcggtctg

SEQ ID NO: 116388 - DNA, 17 bp, Arabidopsis thaliana
ggtcgcaggtagctgac

SEQ ID NO: 116389 - DNA, 17 bp, Arabidopsis thaliana
ggtcgcagtgaccaggc

SEQ ID NO: 116390 - DNA, 17 bp, Arabidopsis thaliana
ggtcgcatagcgcagtg

SEQ ID NO: 116391 - DNA, 17 bp, Arabidopsis thaliana
ggtcgcatcctgtagat

SEQ ID NO: 116392 - DNA, 17 bp, Arabidopsis thaliana
ggtcgccaggggcattt

SEQ ID NO: 116393 - DNA, 17 bp, Arabidopsis thaliana
ggtcgccctgtagatgg

SEQ ID NO: 116394 - DNA, 17 bp, Arabidopsis thaliana
ggtcgccgcgtgccggc

SEQ ID NO: 116395 - DNA, 17 bp, Arabidopsis thaliana
ggtcgccggtccgcctt

SEQ ID NO: 116396 - DNA, 17 bp, Arabidopsis thaliana
ggtcgccgttttaaatt

SEQ ID NO: 116397 - DNA, 17 bp, Arabidopsis thaliana
ggtcgccttcctccttc

SEQ ID NO: 116398 - DNA, 17 bp, Arabidopsis thaliana
ggtcgccttgcggatgg

SEQ ID NO: 116399 - DNA, 17 bp, Arabidopsis thaliana
ggtcgcgacagtgtgct

SEQ ID NO: 116400 - DNA, 17 bp, Arabidopsis thaliana
ggtcgcgggtgccccgc

SEQ ID NO: 116401 - DNA, 17 bp, Arabidopsis thaliana
ggtcgctatgttggact

SEQ ID NO: 116402 - DNA, 17 bp, Arabidopsis thaliana
ggtcgctcccgcgaggg

SEQ ID NO: 116403 - DNA, 17 bp, Arabidopsis thaliana
ggtcgctgaaccaacga

SEQ ID NO: 116404 - DNA, 17 bp, Arabidopsis thaliana
ggtcgctgctgagtcgc

SEQ ID NO: 116405 - DNA, 17 bp, Arabidopsis thaliana
ggtcgctggttcgattc

SEQ ID NO: 116406 - DNA, 17 bp, Arabidopsis thaliana
ggtcgctggttcgtttc

SEQ ID NO: 116407 - DNA, 17 bp, Arabidopsis thaliana
ggtcgctgtcgctgaat

SEQ ID NO: 116408 - DNA, 17 bp, Arabidopsis thaliana
ggtcgctgtcgctggat

SEQ ID NO: 116409 - DNA, 17 bp, Arabidopsis thaliana
ggtcgcttcaggacgtt

SEQ ID NO: 116410 - DNA, 17 bp, Arabidopsis thaliana
ggtcggaatagcgtcag

SEQ ID NO: 116411 - DNA, 17 bp, Arabidopsis thaliana
ggtcggacccggtcgac

SEQ ID NO: 116412 - DNA, 17 bp, Arabidopsis thaliana
ggtcggattattacagc

SEQ ID NO: 116413 - DNA, 17 bp, Arabidopsis thaliana
ggtcggattgctgttat

SEQ ID NO: 116414 - DNA, 17 bp, Arabidopsis thaliana
ggtcggcaatcgggcgg

SEQ ID NO: 116415 - DNA, 17 bp, Arabidopsis thaliana
ggtcggcacgtcccttc

SEQ ID NO: 116416 - DNA, 17 bp, Arabidopsis thaliana
ggtcggccaagttccat

SEQ ID NO: 116417 - DNA, 17 bp, Arabidopsis thaliana
ggtcggccggtccgcct

SEQ ID NO: 116418 - DNA, 17 bp, Arabidopsis thaliana
ggtcggccggtctgcct

SEQ ID NO: 116419 - DNA, 17 bp, Arabidopsis thaliana
ggtcggcgacgaggagt

SEQ ID NO: 116420 - DNA, 17 bp, Arabidopsis thaliana
ggtcggcgatacgctcc

SEQ ID NO: 116421 - DNA, 17 bp, Arabidopsis thaliana
ggtcggcggaggaccgg

SEQ ID NO: 116422 - DNA, 17 bp, Arabidopsis thaliana
ggtcggcggttcgatcc

SEQ ID NO: 116423 - DNA, 17 bp, Arabidopsis thaliana
ggtcggcgtttgggagg

SEQ ID NO: 116424 - DNA, 17 bp, Arabidopsis thaliana
ggtcggctcatatgcaa

SEQ ID NO: 116425 - DNA, 17 bp, Arabidopsis thaliana
ggtcggctcgtcccttc

SEQ ID NO: 116426 - DNA, 17 bp, Arabidopsis thaliana
ggtcggctggtccctcc

SEQ ID NO: 116427 - DNA, 17 bp, Arabidopsis thaliana
ggtcggctggtcccttc

SEQ ID NO: 116428 - DNA, 17 bp, Arabidopsis thaliana
ggtcggctgtcgtagat

SEQ ID NO: 116429 - DNA, 17 bp, Arabidopsis thaliana
ggtcggcttgtcccccc

SEQ ID NO: 116430 - DNA, 17 bp, Arabidopsis thaliana
ggtcggcttgtcccctc

SEQ ID NO: 116431 - DNA, 17 bp, Arabidopsis thaliana
ggtcggcttgtccctat

SEQ ID NO: 116432 - DNA, 17 bp, Arabidopsis thaliana
ggtcggcttgtccctca

SEQ ID NO: 116433 - DNA, 17 bp, Arabidopsis thaliana
ggtcggcttgtccctcc

SEQ ID NO: 116434 - DNA, 17 bp, Arabidopsis thaliana
ggtcggcttgtccctcg

SEQ ID NO: 116435 - DNA, 17 bp, Arabidopsis thaliana
ggtcggcttgtccctga

SEQ ID NO: 116436 - DNA, 17 bp, Arabidopsis thaliana
ggtcggcttgtccctgg

SEQ ID NO: 116437 - DNA, 17 bp, Arabidopsis thaliana
ggtcggcttgtcccttc

SEQ ID NO: 116438 - DNA, 17 bp, Arabidopsis thaliana
ggtcggcttgtcccttg

SEQ ID NO: 116439 - DNA, 17 bp, Arabidopsis thaliana
ggtcggcttgtcccttt

SEQ ID NO: 116440 - DNA, 17 bp, Arabidopsis thaliana
ggtcggcttgtcctcgg

SEQ ID NO: 116441 - DNA, 17 bp, Arabidopsis thaliana
ggtcggcttgtcctctc

SEQ ID NO: 116442 - DNA, 17 bp, Arabidopsis thaliana
ggtcggcttgtcctggg

SEQ ID NO: 116443 - DNA, 17 bp, Arabidopsis thaliana
ggtcggcttgtccttcc

SEQ ID NO: 116444 - DNA, 17 bp, Arabidopsis thaliana
ggtcggcttgtcctttc

SEQ ID NO: 116445 - DNA, 17 bp, Arabidopsis thaliana
ggtcggcttgtctcggt

SEQ ID NO: 116446 - DNA, 17 bp, Arabidopsis thaliana
ggtcggcttgtctcttc

SEQ ID NO: 116447 - DNA, 17 bp, Arabidopsis thaliana
ggtcggcttgtctttcg

SEQ ID NO: 116448 - DNA, 17 bp, Arabidopsis thaliana
ggtcggcttgtgtcttc

SEQ ID NO: 116449 - DNA, 17 bp, Arabidopsis thaliana
ggtcggcttgttccttc

SEQ ID NO: 116450 - DNA, 17 bp, Arabidopsis thaliana
ggtcggcttgtttcggt

SEQ ID NO: 116451 - DNA, 17 bp, Arabidopsis thaliana
ggtcgggactgatgggg

SEQ ID NO: 116452 - DNA, 17 bp, Arabidopsis thaliana
ggtcggggcaagagcca

SEQ ID NO: 116453 - DNA, 17 bp, Arabidopsis thaliana
ggtcggggctggacact

SEQ ID NO: 116454 - DNA, 17 bp, Arabidopsis thaliana
ggtcgggtccgaggatt

SEQ ID NO: 116455 - DNA, 17 bp, Arabidopsis thaliana
ggtcgggttgtcccttc

SEQ ID NO: 116456 - DNA, 17 bp, Arabidopsis thaliana
ggtcggtaacacttccg

SEQ ID NO: 116457 - DNA, 17 bp, Arabidopsis thaliana
ggtcggtaattccttca

SEQ ID NO: 116458 - DNA, 17 bp, Arabidopsis thaliana
ggtcggtacagacccag

SEQ ID NO: 116459 - DNA, 17 bp, Arabidopsis thaliana
ggtcggtacagacccgg

SEQ ID NO: 116460 - DNA, 17 bp, Arabidopsis thaliana
ggtcggtagcgatccag

SEQ ID NO: 116461 - DNA, 17 bp, Arabidopsis thaliana
ggtcggtaggacgtgtc

SEQ ID NO: 116462 - DNA, 17 bp, Arabidopsis thaliana
ggtcggtagttcgaccg

SEQ ID NO: 116463 - DNA, 17 bp, Arabidopsis thaliana
ggtcggtcaaaatttgg

SEQ ID NO: 116464 - DNA, 17 bp, Arabidopsis thaliana
ggtcggtcaaatccaac

SEQ ID NO: 116465 - DNA, 17 bp, Arabidopsis thaliana
ggtcggtcaccggttca

SEQ ID NO: 116466 - DNA, 17 bp, Arabidopsis thaliana
ggtcggtcaccggttcg

SEQ ID NO: 116467 - DNA, 17 bp, Arabidopsis thaliana
ggtcggtcacgtctgcc

SEQ ID NO: 116468 - DNA, 17 bp, Arabidopsis thaliana
ggtcggtcatctcaatt

SEQ ID NO: 116469 - DNA, 17 bp, Arabidopsis thaliana
ggtcggtcatttttacg

SEQ ID NO: 116470 - DNA, 17 bp, Arabidopsis thaliana
ggtcggtccactatgtc

SEQ ID NO: 116471 - DNA, 17 bp, Arabidopsis thaliana
ggtcggtcccatctttt

SEQ ID NO: 116472 - DNA, 17 bp, Arabidopsis thaliana
ggtcggtcccgcagctc

SEQ ID NO: 116473 - DNA, 17 bp, Arabidopsis thaliana
ggtcggtcccgtagctc

SEQ ID NO: 116474 - DNA, 17 bp, Arabidopsis thaliana
ggtcggtcccgtatctc

SEQ ID NO: 116475 - DNA, 17 bp, Arabidopsis thaliana
ggtcggtccctatctgt

SEQ ID NO: 116476 - DNA, 17 bp, Arabidopsis thaliana
ggtcggtccgaactagc

SEQ ID NO: 116477 - DNA, 17 bp, Arabidopsis thaliana
ggtcggtccgaggaatc

SEQ ID NO: 116478 - DNA, 17 bp, Arabidopsis thaliana
ggtcggtccgcctttgg

SEQ ID NO: 116479 - DNA, 17 bp, Arabidopsis thaliana
ggtcggtccgtaatata

SEQ ID NO: 116480 - DNA, 17 bp, Arabidopsis thaliana
ggtcggtcctgctggaa

SEQ ID NO: 116481 - DNA, 17 bp, Arabidopsis thaliana
ggtcggtcgaccggtcc

SEQ ID NO: 116482 - DNA, 17 bp, Arabidopsis thaliana
ggtcggtcgacgattcc

SEQ ID NO: 116483 - DNA, 17 bp, Arabidopsis thaliana
ggtcggtcgcacggcgg

SEQ ID NO: 116484 - DNA, 17 bp, Arabidopsis thaliana
ggtcggtcgctcccgcg

SEQ ID NO: 116485 - DNA, 17 bp, Arabidopsis thaliana
ggtcggtcgctggttcg

SEQ ID NO: 116486 - DNA, 17 bp, Arabidopsis thaliana
ggtcggtcggcaatcgg

SEQ ID NO: 116487 - DNA, 17 bp, Arabidopsis thaliana
ggtcggtcggccggtcc

SEQ ID NO: 116488 - DNA, 17 bp, Arabidopsis thaliana
ggtcggtcggcgatacg

SEQ ID NO: 116489 - DNA, 17 bp, Arabidopsis thaliana
ggtcggtcggcttgtcc

SEQ ID NO: 116490 - DNA, 17 bp, Arabidopsis thaliana
ggtcggtcggcttgttt

SEQ ID NO: 116491 - DNA, 17 bp, Arabidopsis thaliana
ggtcggtcggtcccatc

SEQ ID NO: 116492 - DNA, 17 bp, Arabidopsis thaliana
ggtcggtcgtcgatggt

SEQ ID NO: 116493 - DNA, 17 bp, Arabidopsis thaliana
ggtcggtctaatttgtc

SEQ ID NO: 116494 - DNA, 17 bp, Arabidopsis thaliana
ggtcggtctccaaggtg

SEQ ID NO: 116495 - DNA, 17 bp, Arabidopsis thaliana
ggtcggtctccagttcg

SEQ ID NO: 116496 - DNA, 17 bp, Arabidopsis thaliana
ggtcggtctctggttca

SEQ ID NO: 116497 - DNA, 17 bp, Arabidopsis thaliana
ggtcggtctgatccatt

SEQ ID NO: 116498 - DNA, 17 bp, Arabidopsis thaliana
ggtcggtctgcagcggt

SEQ ID NO: 116499 - DNA, 17 bp, Arabidopsis thaliana
ggtcggtctgcattggt

SEQ ID NO: 116500 - DNA, 17 bp, Arabidopsis thaliana
ggtcggtctgttgcgtt

SEQ ID NO: 116501 - DNA, 17 bp, Arabidopsis thaliana
ggtcggtcttacaagtt

SEQ ID NO: 116502 - DNA, 17 bp, Arabidopsis thaliana
ggtcggtcttagtcaca

SEQ ID NO: 116503 - DNA, 17 bp, Arabidopsis thaliana
ggtcggtcttagtcgca

SEQ ID NO: 116504 - DNA, 17 bp, Arabidopsis thaliana
ggtcggtcttagtcgcg

SEQ ID NO: 116505 - DNA, 17 bp, Arabidopsis thaliana
ggtcggtctttattggg

SEQ ID NO: 116506 - DNA, 17 bp, Arabidopsis thaliana
ggtcggtctttctctct

SEQ ID NO: 116507 - DNA, 17 bp, Arabidopsis thaliana
ggtcggtgaagtgttcg

SEQ ID NO: 116508 - DNA, 17 bp, Arabidopsis thaliana
ggtcggtgagtcgattt

SEQ ID NO: 116509 - DNA, 17 bp, Arabidopsis thaliana
ggtcggtgcattggtcg

SEQ ID NO: 116510 - DNA, 17 bp, Arabidopsis thaliana
ggtcggtgccaagaggg

SEQ ID NO: 116511 - DNA, 17 bp, Arabidopsis thaliana
ggtcggtgcttatgacc

SEQ ID NO: 116512 - DNA, 17 bp, Arabidopsis thaliana
ggtcggtggaacactgg

SEQ ID NO: 116513 - DNA, 17 bp, Arabidopsis thaliana
ggtcggtggagcgattt

SEQ ID NO: 116514 - DNA, 17 bp, Arabidopsis thaliana
ggtcggtgggacccaag

SEQ ID NO: 116515 - DNA, 17 bp, Arabidopsis thaliana
ggtcggtgggacccacg

SEQ ID NO: 116516 - DNA, 17 bp, Arabidopsis thaliana
ggtcggtgggacccagg

SEQ ID NO: 116517 - DNA, 17 bp, Arabidopsis thaliana
ggtcggtgggccacgtc

SEQ ID NO: 116518 - DNA, 17 bp, Arabidopsis thaliana
ggtcggtgtgcattcgg

SEQ ID NO: 116519 - DNA, 17 bp, Arabidopsis thaliana
ggtcggtgtgcattggt

SEQ ID NO: 116520 - DNA, 17 bp, Arabidopsis thaliana
ggtcggtgttgcgattt

SEQ ID NO: 116521 - DNA, 17 bp, Arabidopsis thaliana
ggtcggtgttttcccca

SEQ ID NO: 116522 - DNA, 17 bp, Arabidopsis thaliana
ggtcggttacggtgccc

SEQ ID NO: 116523 - DNA, 17 bp, Arabidopsis thaliana
ggtcggttagaccgtcg

SEQ ID NO: 116524 - DNA, 17 bp, Arabidopsis thaliana
ggtcggttcaattcccg

SEQ ID NO: 116525 - DNA, 17 bp, Arabidopsis thaliana
ggtcggttcatcccaca

SEQ ID NO: 116526 - DNA, 17 bp, Arabidopsis thaliana
ggtcggttcatttcccg

SEQ ID NO: 116527 - DNA, 17 bp, Arabidopsis thaliana
ggtcggttcccggctgg

SEQ ID NO: 116528 - DNA, 17 bp, Arabidopsis thaliana
ggtcggttcggctcccg

SEQ ID NO: 116529 - DNA, 17 bp, Arabidopsis thaliana
ggtcggttcgggtcccg

SEQ ID NO: 116530 - DNA, 17 bp, Arabidopsis thaliana
ggtcggttcgtacccgg

SEQ ID NO: 116531 - DNA, 17 bp, Arabidopsis thaliana
ggtcggttcgtatccca

SEQ ID NO: 116532 - DNA, 17 bp, Arabidopsis thaliana
ggtcggttcgtccacgg

SEQ ID NO: 116533 - DNA, 17 bp, Arabidopsis thaliana
ggtcggttcgtgccccg

SEQ ID NO: 116534 - DNA, 17 bp, Arabidopsis thaliana
ggtcggttcgtgtccca

SEQ ID NO: 116535 - DNA, 17 bp, Arabidopsis thaliana
ggtcggttcgtgtcccg

SEQ ID NO: 116536 - DNA, 17 bp, Arabidopsis thaliana
ggtcggttcgtgtctcg

SEQ ID NO: 116537 - DNA, 17 bp, Arabidopsis thaliana
ggtcggttcgtttcccg

SEQ ID NO: 116538 - DNA, 17 bp, Arabidopsis thaliana
ggtcggttctatggtgt

SEQ ID NO: 116539 - DNA, 17 bp, Arabidopsis thaliana
ggtcggttctgagccga

SEQ ID NO: 116540 - DNA, 17 bp, Arabidopsis thaliana
ggtcggttctttcccgg

SEQ ID NO: 116541 - DNA, 17 bp, Arabidopsis thaliana
ggtcggttgaagctgcc

SEQ ID NO: 116542 - DNA, 17 bp, Arabidopsis thaliana
ggtcggttgatcatcta

SEQ ID NO: 116543 - DNA, 17 bp, Arabidopsis thaliana
ggtcggttggaccgcag

SEQ ID NO: 116544 - DNA, 17 bp, Arabidopsis thaliana
ggtcggtttcagtcgtc

SEQ ID NO: 116545 - DNA, 17 bp, Arabidopsis thaliana
ggtcggtttcccggctg

SEQ ID NO: 116546 - DNA, 17 bp, Arabidopsis thaliana
ggtcggtttcgtcgtgt

SEQ ID NO: 116547 - DNA, 17 bp, Arabidopsis thaliana
ggtcggtttctatcgct

SEQ ID NO: 116548 - DNA, 17 bp, Arabidopsis thaliana
ggtcggtttgatccatt

SEQ ID NO: 116549 - DNA, 17 bp, Arabidopsis thaliana
ggtcggtttgcgtcgga

SEQ ID NO: 116550 - DNA, 17 bp, Arabidopsis thaliana
ggtcggttttgagtgcg

SEQ ID NO: 116551 - DNA, 17 bp, Arabidopsis thaliana
ggtcggtttttggagtg

SEQ ID NO: 116552 - DNA, 17 bp, Arabidopsis thaliana
ggtcggttttttgggtt

SEQ ID NO: 116553 - DNA, 17 bp, Arabidopsis thaliana
ggtcgtactcataaccg

SEQ ID NO: 116554 - DNA, 17 bp, Arabidopsis thaliana
ggtcgtagccacaaagg

SEQ ID NO: 116555 - DNA, 17 bp, Arabidopsis thaliana
ggtcgtatagctcagtg

SEQ ID NO: 116556 - DNA, 17 bp, Arabidopsis thaliana
ggtcgtattgttggcta

SEQ ID NO: 116557 - DNA, 17 bp, Arabidopsis thaliana
ggtcgtcacctgatact

SEQ ID NO: 116558 - DNA, 17 bp, Arabidopsis thaliana
ggtcgtccatgccacac

SEQ ID NO: 116559 - DNA, 17 bp, Arabidopsis thaliana
ggtcgtcgaaaggatct

SEQ ID NO: 116560 - DNA, 17 bp, Arabidopsis thaliana
ggtcgtcgatggtgaac

SEQ ID NO: 116561 - DNA, 17 bp, Arabidopsis thaliana
ggtcgtcgatggtgaag

SEQ ID NO: 116562 - DNA, 17 bp, Arabidopsis thaliana
ggtcgtcgcagagatgg

SEQ ID NO: 116563 - DNA, 17 bp, Arabidopsis thaliana
ggtcgtcggatctgatc

SEQ ID NO: 116564 - DNA, 17 bp, Arabidopsis thaliana
ggtcgtcgtatcggatc

SEQ ID NO: 116565 - DNA, 17 bp, Arabidopsis thaliana
ggtcgtcgttcggaccg

SEQ ID NO: 116566 - DNA, 17 bp, Arabidopsis thaliana
ggtcgtctactcgatac

SEQ ID NO: 116567 - DNA, 17 bp, Arabidopsis thaliana
ggtcgtctagtaatatg

SEQ ID NO: 116568 - DNA, 17 bp, Arabidopsis thaliana
ggtcgtctatgccctac

SEQ ID NO: 116569 - DNA, 17 bp, Arabidopsis thaliana
ggtcgtctcgtgagtta

SEQ ID NO: 116570 - DNA, 17 bp, Arabidopsis thaliana
ggtcgtctgagagatgt

SEQ ID NO: 116571 - DNA, 17 bp, Arabidopsis thaliana
ggtcgtctgcctgggtg

SEQ ID NO: 116572 - DNA, 17 bp, Arabidopsis thaliana
ggtcgtcttgtcccttc

SEQ ID NO: 116573 - DNA, 17 bp, Arabidopsis thaliana
ggtcgtcttttcgggag

SEQ ID NO: 116574 - DNA, 17 bp, Arabidopsis thaliana
ggtcgtgacatcctcag

SEQ ID NO: 116575 - DNA, 17 bp, Arabidopsis thaliana
ggtcgtgacttggcatc

SEQ ID NO: 116576 - DNA, 17 bp, Arabidopsis thaliana
ggtcgtgagacaaactt

SEQ ID NO: 116577 - DNA, 17 bp, Arabidopsis thaliana
ggtcgtgaggatctcgg

SEQ ID NO: 116578 - DNA, 17 bp, Arabidopsis thaliana
ggtcgtgcctccggcgc

SEQ ID NO: 116579 - DNA, 17 bp, Arabidopsis thaliana
ggtcgtgcggctgatgt

SEQ ID NO: 116580 - DNA, 17 bp, Arabidopsis thaliana
ggtcgtgcgggatgttt

SEQ ID NO: 116581 - DNA, 17 bp, Arabidopsis thaliana
ggtcgtgggttcgggcc

SEQ ID NO: 116582 - DNA, 17 bp, Arabidopsis thaliana
ggtcgtggttaagttca

SEQ ID NO: 116583 - DNA, 17 bp, Arabidopsis thaliana
ggtcgtgtccagttggg

SEQ ID NO: 116584 - DNA, 17 bp, Arabidopsis thaliana
ggtcgtgtgaatgtgtt

SEQ ID NO: 116585 - DNA, 17 bp, Arabidopsis thaliana
ggtcgtgtgctagacga

SEQ ID NO: 116586 - DNA, 17 bp, Arabidopsis thaliana
ggtcgttaccaatcggt

SEQ ID NO: 116587 - DNA, 17 bp, Arabidopsis thaliana
ggtcgttataaaagcaa

SEQ ID NO: 116588 - DNA, 17 bp, Arabidopsis thaliana
ggtcgttataagagcaa

SEQ ID NO: 116589 - DNA, 17 bp, Arabidopsis thaliana
ggtcgttctgcggctgc

SEQ ID NO: 116590 - DNA, 17 bp, Arabidopsis thaliana
ggtcgttgaccgatgtt

SEQ ID NO: 116591 - DNA, 17 bp, Arabidopsis thaliana
ggtcgttgaggcgaata

SEQ ID NO: 116592 - DNA, 17 bp, Arabidopsis thaliana
ggtcgttgcggcgatgg

SEQ ID NO: 116593 - DNA, 17 bp, Arabidopsis thaliana
ggtcgttggagtgttgc

SEQ ID NO: 116594 - DNA, 17 bp, Arabidopsis thaliana
ggtcgttgtattttgcc

SEQ ID NO: 116595 - DNA, 17 bp, Arabidopsis thaliana
ggtcgttgtcgcctaag

SEQ ID NO: 116596 - DNA, 17 bp, Arabidopsis thaliana
ggtcgttgtttctgatc

SEQ ID NO: 116597 - DNA, 17 bp, Arabidopsis thaliana
ggtcgtttatggtctaa

SEQ ID NO: 116598 - DNA, 17 bp, Arabidopsis thaliana
ggtcgtttcatgggcgt

SEQ ID NO: 116599 - DNA, 17 bp, Arabidopsis thaliana
ggtcgtttcccggctgg

SEQ ID NO: 116600 - DNA, 17 bp, Arabidopsis thaliana
ggtcgtttgctcattcg

SEQ ID NO: 116601 - DNA, 17 bp, Arabidopsis thaliana
ggtcgtttgtcgtgtcc

SEQ ID NO: 116602 - DNA, 17 bp, Arabidopsis thaliana
ggtctaaaagttatgga

SEQ ID NO: 116603 - DNA, 17 bp, Arabidopsis thaliana
ggtctaaaatctaaagc

SEQ ID NO: 116604 - DNA, 17 bp, Arabidopsis thaliana
ggtctaaagcgcatacg

SEQ ID NO: 116605 - DNA, 17 bp, Arabidopsis thaliana
ggtctaaatgtgtctgt

SEQ ID NO: 116606 - DNA, 17 bp, Arabidopsis thaliana
ggtctaactaaattttc

SEQ ID NO: 116607 - DNA, 17 bp, Arabidopsis thaliana
ggtctaagagcaacccc

SEQ ID NO: 116608 - DNA, 17 bp, Arabidopsis thaliana
ggtctaagccaccgtca

SEQ ID NO: 116609 - DNA, 17 bp, Arabidopsis thaliana
ggtctaagcttagaggt

SEQ ID NO: 116610 - DNA, 17 bp, Arabidopsis thaliana
ggtctaaggctgaaata

SEQ ID NO: 116611 - DNA, 17 bp, Arabidopsis thaliana
ggtctaaggctgaaatg

SEQ ID NO: 116612 - DNA, 17 bp, Arabidopsis thaliana
ggtctaagtcaccgtca

SEQ ID NO: 116613 - DNA, 17 bp, Arabidopsis thaliana
ggtctaagtcgaagttg

SEQ ID NO: 116614 - DNA, 17 bp, Arabidopsis thaliana
ggtctaagtgtgtgtat

SEQ ID NO: 116615 - DNA, 17 bp, Arabidopsis thaliana
ggtctaatgttccagtt

SEQ ID NO: 116616 - DNA, 17 bp, Arabidopsis thaliana
ggtctaattcctttggt

SEQ ID NO: 116617 - DNA, 17 bp, Arabidopsis thaliana
ggtctaattgggcatat

SEQ ID NO: 116618 - DNA, 17 bp, Arabidopsis thaliana
ggtctaatttatctgcg

SEQ ID NO: 116619 - DNA, 17 bp, Arabidopsis thaliana
ggtctaatttgtctacg

SEQ ID NO: 116620 - DNA, 17 bp, Arabidopsis thaliana
ggtctaatttgtctgcg

SEQ ID NO: 116621 - DNA, 17 bp, Arabidopsis thaliana
ggtctacagcagagggc

SEQ ID NO: 116622 - DNA, 17 bp, Arabidopsis thaliana
ggtctacattgaattga

SEQ ID NO: 116623 - DNA, 17 bp, Arabidopsis thaliana
ggtctaccgatgaagat

SEQ ID NO: 116624 - DNA, 17 bp, Arabidopsis thaliana
ggtctacgcacgtggtg

SEQ ID NO: 116625 - DNA, 17 bp, Arabidopsis thaliana
ggtctacggcaactgaa

SEQ ID NO: 116626 - DNA, 17 bp, Arabidopsis thaliana
ggtctacggtttagggt

SEQ ID NO: 116627 - DNA, 17 bp, Arabidopsis thaliana
ggtctactaacagtcat

SEQ ID NO: 116628 - DNA, 17 bp, Arabidopsis thaliana
ggtctactcgcagcgtc

SEQ ID NO: 116629 - DNA, 17 bp, Arabidopsis thaliana
ggtctactggtcaagga

SEQ ID NO: 116630 - DNA, 17 bp, Arabidopsis thaliana
ggtctagtcgcatcctg

SEQ ID NO: 116631 - DNA, 17 bp, Arabidopsis thaliana
ggtctagtgaatgtttg

SEQ ID NO: 116632 - DNA, 17 bp, Arabidopsis thaliana
ggtctagtggtaaatct

SEQ ID NO: 116633 - DNA, 17 bp, Arabidopsis thaliana
ggtctagtggtatgttt

SEQ ID NO: 116634 - DNA, 17 bp, Arabidopsis thaliana
ggtctatcagtgtctat

SEQ ID NO: 116635 - DNA, 17 bp, Arabidopsis thaliana
ggtctatcggctgattc

SEQ ID NO: 116636 - DNA, 17 bp, Arabidopsis thaliana
ggtctatctcacacgct

SEQ ID NO: 116637 - DNA, 17 bp, Arabidopsis thaliana
ggtctattagctcagtg

SEQ ID NO: 116638 - DNA, 17 bp, Arabidopsis thaliana
ggtctattgtgtgatcc

SEQ ID NO: 116639 - DNA, 17 bp, Arabidopsis thaliana
ggtctatttcctcagga

SEQ ID NO: 116640 - DNA, 17 bp, Arabidopsis thaliana
ggtctcaaggtgggtct

SEQ ID NO: 116641 - DNA, 17 bp, Arabidopsis thaliana
ggtctcaatagttcaag

SEQ ID NO: 116642 - DNA, 17 bp, Arabidopsis thaliana
ggtctcacaggtccgtg

SEQ ID NO: 116643 - DNA, 17 bp, Arabidopsis thaliana
ggtctcacatttgccaa

SEQ ID NO: 116644 - DNA, 17 bp, Arabidopsis thaliana
ggtctcactccctaata

SEQ ID NO: 116645 - DNA, 17 bp, Arabidopsis thaliana
ggtctcagctaggtagg

SEQ ID NO: 116646 - DNA, 17 bp, Arabidopsis thaliana
ggtctcaggcacagctg

SEQ ID NO: 116647 - DNA, 17 bp, Arabidopsis thaliana
ggtctcagtggtggttt

SEQ ID NO: 116648 - DNA, 17 bp, Arabidopsis thaliana
ggtctcagtgtcctagg

SEQ ID NO: 116649 - DNA, 17 bp, Arabidopsis thaliana
ggtctccaaggtgaaca

SEQ ID NO: 116650 - DNA, 17 bp, Arabidopsis thaliana
ggtctccagaggaggat

SEQ ID NO: 116651 - DNA, 17 bp, Arabidopsis thaliana
ggtctccagcttggcca

SEQ ID NO: 116652 - DNA, 17 bp, Arabidopsis thaliana
ggtctccagttcgatcc

SEQ ID NO: 116653 - DNA, 17 bp, Arabidopsis thaliana
ggtctccagttcgatcg

SEQ ID NO: 116654 - DNA, 17 bp, Arabidopsis thaliana
ggtctccctagtgatgt

SEQ ID NO: 116655 - DNA, 17 bp, Arabidopsis thaliana
ggtctccgaaagtgttc

SEQ ID NO: 116656 - DNA, 17 bp, Arabidopsis thaliana
ggtctccgattgaccat

SEQ ID NO: 116657 - DNA, 17 bp, Arabidopsis thaliana
ggtctccgtctcgcccg

SEQ ID NO: 116658 - DNA, 17 bp, Arabidopsis thaliana
ggtctcgaagcgtgtga

SEQ ID NO: 116659 - DNA, 17 bp, Arabidopsis thaliana
ggtctcgattggtctac

SEQ ID NO: 116660 - DNA, 17 bp, Arabidopsis thaliana
ggtctcgcatagtgatg

SEQ ID NO: 116661 - DNA, 17 bp, Arabidopsis thaliana
ggtctcggaatcggtgt

SEQ ID NO: 116662 - DNA, 17 bp, Arabidopsis thaliana
ggtctcggcccagaacc

SEQ ID NO: 116663 - DNA, 17 bp, Arabidopsis thaliana
ggtctcggccccgaacc

SEQ ID NO: 116664 - DNA, 17 bp, Arabidopsis thaliana
ggtctcggggtgaaacg

SEQ ID NO: 116665 - DNA, 17 bp, Arabidopsis thaliana
ggtctcgggttcgaagc

SEQ ID NO: 116666 - DNA, 17 bp, Arabidopsis thaliana
ggtctcgtagctcagtt

SEQ ID NO: 116667 - DNA, 17 bp, Arabidopsis thaliana
ggtctcgtatctcagtt

SEQ ID NO: 116668 - DNA, 17 bp, Arabidopsis thaliana
ggtctcgtctgttttcc

SEQ ID NO: 116669 - DNA, 17 bp, Arabidopsis thaliana
ggtctcgtggcacactt

SEQ ID NO: 116670 - DNA, 17 bp, Arabidopsis thaliana
ggtctcgttttcttcta

SEQ ID NO: 116671 - DNA, 17 bp, Arabidopsis thaliana
ggtctctagaatttgac

SEQ ID NO: 116672 - DNA, 17 bp, Arabidopsis thaliana
ggtctctagaggaggat

SEQ ID NO: 116673 - DNA, 17 bp, Arabidopsis thaliana
ggtctctccacctattg

SEQ ID NO: 116674 - DNA, 17 bp, Arabidopsis thaliana
ggtctctccttttacgg

SEQ ID NO: 116675 - DNA, 17 bp, Arabidopsis thaliana
ggtctctcggcaacgga

SEQ ID NO: 116676 - DNA, 17 bp, Arabidopsis thaliana
ggtctctcggtgatgat

SEQ ID NO: 116677 - DNA, 17 bp, Arabidopsis thaliana
ggtctctgaccgcctgc

SEQ ID NO: 116678 - DNA, 17 bp, Arabidopsis thaliana
ggtctctgagtgagctc

SEQ ID NO: 116679 - DNA, 17 bp, Arabidopsis thaliana
ggtctctgcaacaatga

SEQ ID NO: 116680 - DNA, 17 bp, Arabidopsis thaliana
ggtctctgcacgtttta

SEQ ID NO: 116681 - DNA, 17 bp, Arabidopsis thaliana
ggtctctggttcaaatc

SEQ ID NO: 116682 - DNA, 17 bp, Arabidopsis thaliana
ggtctctggttcgagtg

SEQ ID NO: 116683 - DNA, 17 bp, Arabidopsis thaliana
ggtctctggtttgctgc

SEQ ID NO: 116684 - DNA, 17 bp, Arabidopsis thaliana
ggtctctgttttgctgc

SEQ ID NO: 116685 - DNA, 17 bp, Arabidopsis thaliana
ggtctctgttttgctgt

SEQ ID NO: 116686 - DNA, 17 bp, Arabidopsis thaliana
ggtctcttcaaatttgt

SEQ ID NO: 116687 - DNA, 17 bp, Arabidopsis thaliana
ggtctgaaacttctaaa

SEQ ID NO: 116688 - DNA, 17 bp, Arabidopsis thaliana
ggtctgaaatacaaacg

SEQ ID NO: 116689 - DNA, 17 bp, Arabidopsis thaliana
ggtctgaagcattgtcc

SEQ ID NO: 116690 - DNA, 17 bp, Arabidopsis thaliana
ggtctgacaatctgtct

SEQ ID NO: 116691 - DNA, 17 bp, Arabidopsis thaliana
ggtctgacaccatggct

SEQ ID NO: 116692 - DNA, 17 bp, Arabidopsis thaliana
ggtctgacaggatacta

SEQ ID NO: 116693 - DNA, 17 bp, Arabidopsis thaliana
ggtctgacattgccgta

SEQ ID NO: 116694 - DNA, 17 bp, Arabidopsis thaliana
ggtctgacctgaggaat

SEQ ID NO: 116695 - DNA, 17 bp, Arabidopsis thaliana
ggtctgacgccagtaag

SEQ ID NO: 116696 - DNA, 17 bp, Arabidopsis thaliana
ggtctgacgcgtgggaa

SEQ ID NO: 116697 - DNA, 17 bp, Arabidopsis thaliana
ggtctgactcaatcacc

SEQ ID NO: 116698 - DNA, 17 bp, Arabidopsis thaliana
ggtctgagagtcccttc

SEQ ID NO: 116699 - DNA, 17 bp, Arabidopsis thaliana
ggtctgagagttccttc

SEQ ID NO: 116700 - DNA, 17 bp, Arabidopsis thaliana
ggtctgaggctctttct

SEQ ID NO: 116701 - DNA, 17 bp, Arabidopsis thaliana
ggtctgaggtctgaggt

SEQ ID NO: 116702 - DNA, 17 bp, Arabidopsis thaliana
ggtctgaggtgttgcac

SEQ ID NO: 116703 - DNA, 17 bp, Arabidopsis thaliana
ggtctgataggggtcgt

SEQ ID NO: 116704 - DNA, 17 bp, Arabidopsis thaliana
ggtctgatccattgacg

SEQ ID NO: 116705 - DNA, 17 bp, Arabidopsis thaliana
ggtctgatccgttgacg

SEQ ID NO: 116706 - DNA, 17 bp, Arabidopsis thaliana
ggtctgatctattaaca

SEQ ID NO: 116707 - DNA, 17 bp, Arabidopsis thaliana
ggtctgattcgttgacg

SEQ ID NO: 116708 - DNA, 17 bp, Arabidopsis thaliana
ggtctgattttgcggtt

SEQ ID NO: 116709 - DNA, 17 bp, Arabidopsis thaliana
ggtctgcaacacgcgcc

SEQ ID NO: 116710 - DNA, 17 bp, Arabidopsis thaliana
ggtctgcaaggtgtgtt

SEQ ID NO: 116711 - DNA, 17 bp, Arabidopsis thaliana
ggtctgcagatggtccg

SEQ ID NO: 116712 - DNA, 17 bp, Arabidopsis thaliana
ggtctgcagcacgcgcc

SEQ ID NO: 116713 - DNA, 17 bp, Arabidopsis thaliana
ggtctgcagcgatttat

SEQ ID NO: 116714 - DNA, 17 bp, Arabidopsis thaliana
ggtctgcagcggtttat

SEQ ID NO: 116715 - DNA, 17 bp, Arabidopsis thaliana
ggtctgcattggtcggc

SEQ ID NO: 116716 - DNA, 17 bp, Arabidopsis thaliana
ggtctgccggcgtttgt

SEQ ID NO: 116717 - DNA, 17 bp, Arabidopsis thaliana
ggtctgctaagctcgat

SEQ ID NO: 116718 - DNA, 17 bp, Arabidopsis thaliana
ggtctgctcaaggacct

SEQ ID NO: 116719 - DNA, 17 bp, Arabidopsis thaliana
ggtctggaacgattacg

SEQ ID NO: 116720 - DNA, 17 bp, Arabidopsis thaliana
ggtctggaattggtccg

SEQ ID NO: 116721 - DNA, 17 bp, Arabidopsis thaliana
ggtctggacactgagtt

SEQ ID NO: 116722 - DNA, 17 bp, Arabidopsis thaliana
ggtctggaccactgcgg

SEQ ID NO: 116723 - DNA, 17 bp, Arabidopsis thaliana
ggtctggacccagttcc

SEQ ID NO: 116724 - DNA, 17 bp, Arabidopsis thaliana
ggtctggagggattacg

SEQ ID NO: 116725 - DNA, 17 bp, Arabidopsis thaliana
ggtctggagtcacttca

SEQ ID NO: 116726 - DNA, 17 bp, Arabidopsis thaliana
ggtctggatcagattgc

SEQ ID NO: 116727 - DNA, 17 bp, Arabidopsis thaliana
ggtctggcaatgaaggt

SEQ ID NO: 116728 - DNA, 17 bp, Arabidopsis thaliana
ggtctggctccctgtat

SEQ ID NO: 116729 - DNA, 17 bp, Arabidopsis thaliana
ggtctgggtggattacg

SEQ ID NO: 116730 - DNA, 17 bp, Arabidopsis thaliana
ggtctgggtgtttggtt

SEQ ID NO: 116731 - DNA, 17 bp, Arabidopsis thaliana
ggtctggtcaacgatta

SEQ ID NO: 116732 - DNA, 17 bp, Arabidopsis thaliana
ggtctggtccgttgacg

SEQ ID NO: 116733 - DNA, 17 bp, Arabidopsis thaliana
ggtctggttgatcctgc

SEQ ID NO: 116734 - DNA, 17 bp, Arabidopsis thaliana
ggtctgtactatgttca

SEQ ID NO: 116735 - DNA, 17 bp, Arabidopsis thaliana
ggtctgtagatcttatt

SEQ ID NO: 116736 - DNA, 17 bp, Arabidopsis thaliana
ggtctgtagcgatttat

SEQ ID NO: 116737 - DNA, 17 bp, Arabidopsis thaliana
ggtctgtaggtggcttt

SEQ ID NO: 116738 - DNA, 17 bp, Arabidopsis thaliana
ggtctgtcagttgactt

SEQ ID NO: 116739 - DNA, 17 bp, Arabidopsis thaliana
ggtctgtcagttggtcc

SEQ ID NO: 116740 - DNA, 17 bp, Arabidopsis thaliana
ggtctgtgatgccctta

SEQ ID NO: 116741 - DNA, 17 bp, Arabidopsis thaliana
ggtctgtgttgcgattt

SEQ ID NO: 116742 - DNA, 17 bp, Arabidopsis thaliana
ggtctgttgcgtttcag

SEQ ID NO: 116743 - DNA, 17 bp, Arabidopsis thaliana
ggtctgttttgttgatc

SEQ ID NO: 116744 - DNA, 17 bp, Arabidopsis thaliana
ggtcttaactaggtgat

SEQ ID NO: 116745 - DNA, 17 bp, Arabidopsis thaliana
ggtcttaagtcgcaacc

SEQ ID NO: 116746 - DNA, 17 bp, Arabidopsis thaliana
ggtcttaagtctatctg

SEQ ID NO: 116747 - DNA, 17 bp, Arabidopsis thaliana
ggtcttaatgacttgct

SEQ ID NO: 116748 - DNA, 17 bp, Arabidopsis thaliana
ggtcttaattggccggg

SEQ ID NO: 116749 - DNA, 17 bp, Arabidopsis thaliana
ggtcttacaagatcggg

SEQ ID NO: 116750 - DNA, 17 bp, Arabidopsis thaliana
ggtcttacaagttgccg

SEQ ID NO: 116751 - DNA, 17 bp, Arabidopsis thaliana
ggtcttagatgtcacag

SEQ ID NO: 116752 - DNA, 17 bp, Arabidopsis thaliana
ggtcttagccgtatcac

SEQ ID NO: 116753 - DNA, 17 bp, Arabidopsis thaliana
ggtcttagcgatcctgt

SEQ ID NO: 116754 - DNA, 17 bp, Arabidopsis thaliana
ggtcttagctcatctaa

SEQ ID NO: 116755 - DNA, 17 bp, Arabidopsis thaliana
ggtcttagtcacatcct

SEQ ID NO: 116756 - DNA, 17 bp, Arabidopsis thaliana
ggtcttagtcatcctgt

SEQ ID NO: 116757 - DNA, 17 bp, Arabidopsis thaliana
ggtcttagtcatctgta

SEQ ID NO: 116758 - DNA, 17 bp, Arabidopsis thaliana
ggtcttagtccatcctg

SEQ ID NO: 116759 - DNA, 17 bp, Arabidopsis thaliana
ggtcttagtccatctgt

SEQ ID NO: 116760 - DNA, 17 bp, Arabidopsis thaliana
ggtcttagtcccatcct

SEQ ID NO: 116761 - DNA, 17 bp, Arabidopsis thaliana
ggtcttagtcgatcctg

SEQ ID NO: 116762 - DNA, 17 bp, Arabidopsis thaliana
ggtcttagtcgcaacct

SEQ ID NO: 116763 - DNA, 17 bp, Arabidopsis thaliana
ggtcttagtcgcaccct

SEQ ID NO: 116764 - DNA, 17 bp, Arabidopsis thaliana
ggtcttagtcgcaccgt

SEQ ID NO: 116765 - DNA, 17 bp, Arabidopsis thaliana
ggtcttagtcgcacctg

SEQ ID NO: 116766 - DNA, 17 bp, Arabidopsis thaliana
ggtcttagtcgcatcat

SEQ ID NO: 116767 - DNA, 17 bp, Arabidopsis thaliana
ggtcttagtcgcatccg

SEQ ID NO: 116768 - DNA, 17 bp, Arabidopsis thaliana
ggtcttagtcgcatcct

SEQ ID NO: 116769 - DNA, 17 bp, Arabidopsis thaliana
ggtcttagtcgcattcc

SEQ ID NO: 116770 - DNA, 17 bp, Arabidopsis thaliana
ggtcttagtcgcattct

SEQ ID NO: 116771 - DNA, 17 bp, Arabidopsis thaliana
ggtcttagtcgccctgt

SEQ ID NO: 116772 - DNA, 17 bp, Arabidopsis thaliana
ggtcttagtcgcgctgt

SEQ ID NO: 116773 - DNA, 17 bp, Arabidopsis thaliana
ggtcttagtcgcgtcct

SEQ ID NO: 116774 - DNA, 17 bp, Arabidopsis thaliana
ggtcttagtcgctcctg

SEQ ID NO: 116775 - DNA, 17 bp, Arabidopsis thaliana
ggtcttagtcgcttcct

SEQ ID NO: 116776 - DNA, 17 bp, Arabidopsis thaliana
ggtcttagttggtggag

SEQ ID NO: 116777 - DNA, 17 bp, Arabidopsis thaliana
ggtcttattccgattaa

SEQ ID NO: 116778 - DNA, 17 bp, Arabidopsis thaliana
ggtcttcaggcttgaac

SEQ ID NO: 116779 - DNA, 17 bp, Arabidopsis thaliana
ggtcttccatctgtaga

SEQ ID NO: 116780 - DNA, 17 bp, Arabidopsis thaliana
ggtcttcctccactagc

SEQ ID NO: 116781 - DNA, 17 bp, Arabidopsis thaliana
ggtcttcgactggggtg

SEQ ID NO: 116782 - DNA, 17 bp, Arabidopsis thaliana
ggtcttcgcttcaacga

SEQ ID NO: 116783 - DNA, 17 bp, Arabidopsis thaliana
ggtcttcgggggtctgc

SEQ ID NO: 116784 - DNA, 17 bp, Arabidopsis thaliana
ggtcttcgtcgcacctg

SEQ ID NO: 116785 - DNA, 17 bp, Arabidopsis thaliana
ggtcttctagacccggt

SEQ ID NO: 116786 - DNA, 17 bp, Arabidopsis thaliana
ggtcttctcaggtattt

SEQ ID NO: 116787 - DNA, 17 bp, Arabidopsis thaliana
ggtcttctgaggttgtg

SEQ ID NO: 116788 - DNA, 17 bp, Arabidopsis thaliana
ggtcttctgtatctctt

SEQ ID NO: 116789 - DNA, 17 bp, Arabidopsis thaliana
ggtcttctttctgggag

SEQ ID NO: 116790 - DNA, 17 bp, Arabidopsis thaliana
ggtcttgaagtgcttgg

SEQ ID NO: 116791 - DNA, 17 bp, Arabidopsis thaliana
ggtcttgacatctaaag

SEQ ID NO: 116792 - DNA, 17 bp, Arabidopsis thaliana
ggtcttgacccaattag

SEQ ID NO: 116793 - DNA, 17 bp, Arabidopsis thaliana
ggtcttgacccaattgg

SEQ ID NO: 116794 - DNA, 17 bp, Arabidopsis thaliana
ggtcttgctaaagccat

SEQ ID NO: 116795 - DNA, 17 bp, Arabidopsis thaliana
ggtcttgcttgtggggg

SEQ ID NO: 116796 - DNA, 17 bp, Arabidopsis thaliana
ggtcttggacaagtttt

SEQ ID NO: 116797 - DNA, 17 bp, Arabidopsis thaliana
ggtcttggactactggt

SEQ ID NO: 116798 - DNA, 17 bp, Arabidopsis thaliana
ggtcttggaggcggagg

SEQ ID NO: 116799 - DNA, 17 bp, Arabidopsis thaliana
ggtcttggctgaggagc

SEQ ID NO: 116800 - DNA, 17 bp, Arabidopsis thaliana
ggtcttggtgcaggtcg

SEQ ID NO: 116801 - DNA, 17 bp, Arabidopsis thaliana
ggtcttgtagctcagtt

SEQ ID NO: 116802 - DNA, 17 bp, Arabidopsis thaliana
ggtcttgtctgcttcat

SEQ ID NO: 116803 - DNA, 17 bp, Arabidopsis thaliana
ggtcttgtggagacgtc

SEQ ID NO: 116804 - DNA, 17 bp, Arabidopsis thaliana
ggtcttgttatactcag

SEQ ID NO: 116805 - DNA, 17 bp, Arabidopsis thaliana
ggtcttgtttttgccgc

SEQ ID NO: 116806 - DNA, 17 bp, Arabidopsis thaliana
ggtctttactgggcata

SEQ ID NO: 116807 - DNA, 17 bp, Arabidopsis thaliana
ggtctttagaaggtcgg

SEQ ID NO: 116808 - DNA, 17 bp, Arabidopsis thaliana
ggtctttagaccgtgag

SEQ ID NO: 116809 - DNA, 17 bp, Arabidopsis thaliana
ggtctttattgggcatg

SEQ ID NO: 116810 - DNA, 17 bp, Arabidopsis thaliana
ggtctttcatcctgtag

SEQ ID NO: 116811 - DNA, 17 bp, Arabidopsis thaliana
ggtctttcgggtgagac

SEQ ID NO: 116812 - DNA, 17 bp, Arabidopsis thaliana
ggtctttctctctgagc

SEQ ID NO: 116813 - DNA, 17 bp, Arabidopsis thaliana
ggtctttgcccgttcat

SEQ ID NO: 116814 - DNA, 17 bp, Arabidopsis thaliana
ggtctttgcgttgacta

SEQ ID NO: 116815 - DNA, 17 bp, Arabidopsis thaliana
ggtctttggttcaccaa

SEQ ID NO: 116816 - DNA, 17 bp, Arabidopsis thaliana
ggtctttgtccaactgg

SEQ ID NO: 116817 - DNA, 17 bp, Arabidopsis thaliana
ggtcttttcacgcgtca

SEQ ID NO: 116818 - DNA, 17 bp, Arabidopsis thaliana
ggtctttttggcttaac

SEQ ID NO: 116819 - DNA, 17 bp, Arabidopsis thaliana
ggtctttttggttgcgt

SEQ ID NO: 116820 - DNA, 17 bp, Arabidopsis thaliana
ggtgaaaaaactacttg

SEQ ID NO: 116821 - DNA, 17 bp, Arabidopsis thaliana
ggtgaaaaacctgctca

SEQ ID NO: 116822 - DNA, 17 bp, Arabidopsis thaliana
ggtgaaaaccacatctc

SEQ ID NO: 116823 - DNA, 17 bp, Arabidopsis thaliana
ggtgaaaacgacgagga

SEQ ID NO: 116824 - DNA, 17 bp, Arabidopsis thaliana
ggtgaaaagaatgcgtt

SEQ ID NO: 116825 - DNA, 17 bp, Arabidopsis thaliana
ggtgaaaagttgagatt

SEQ ID NO: 116826 - DNA, 17 bp, Arabidopsis thaliana
ggtgaaacaccgattcg

SEQ ID NO: 116827 - DNA, 17 bp, Arabidopsis thaliana
ggtgaaacaccgattga

SEQ ID NO: 116828 - DNA, 17 bp, Arabidopsis thaliana
ggtgaaacagagcttgg

SEQ ID NO: 116829 - DNA, 17 bp, Arabidopsis thaliana
ggtgaaactcatgcttt

SEQ ID NO: 116830 - DNA, 17 bp, Arabidopsis thaliana
ggtgaaacttccagacc

SEQ ID NO: 116831 - DNA, 17 bp, Arabidopsis thaliana
ggtgaaagcccaaagac

SEQ ID NO: 116832 - DNA, 17 bp, Arabidopsis thaliana
ggtgaaatcgtactgct

SEQ ID NO: 116833 - DNA, 17 bp, Arabidopsis thaliana
ggtgaaatctaagtgtt

SEQ ID NO: 116834 - DNA, 17 bp, Arabidopsis thaliana
ggtgaaatctacagatc

SEQ ID NO: 116835 - DNA, 17 bp, Arabidopsis thaliana
ggtgaaatctacgcaga

SEQ ID NO: 116836 - DNA, 17 bp, Arabidopsis thaliana
ggtgaaatctacgccga

SEQ ID NO: 116837 - DNA, 17 bp, Arabidopsis thaliana
ggtgaaatctacgctga

SEQ ID NO: 116838 - DNA, 17 bp, Arabidopsis thaliana
ggtgaaatctgaagtgt

SEQ ID NO: 116839 - DNA, 17 bp, Arabidopsis thaliana
ggtgaaattatgtgcct

SEQ ID NO: 116840 - DNA, 17 bp, Arabidopsis thaliana
ggtgaaattcccttaat

SEQ ID NO: 116841 - DNA, 17 bp, Arabidopsis thaliana
ggtgaaattctactgca

SEQ ID NO: 116842 - DNA, 17 bp, Arabidopsis thaliana
ggtgaacagaatgttcg

SEQ ID NO: 116843 - DNA, 17 bp, Arabidopsis thaliana
ggtgaacagcctctggt

SEQ ID NO: 116844 - DNA, 17 bp, Arabidopsis thaliana
ggtgaaccagttgaact

SEQ ID NO: 116845 - DNA, 17 bp, Arabidopsis thaliana
ggtgaacccgcggaagg

SEQ ID NO: 116846 - DNA, 17 bp, Arabidopsis thaliana
ggtgaacccgggctcag

SEQ ID NO: 116847 - DNA, 17 bp, Arabidopsis thaliana
ggtgaaccggattattg

SEQ ID NO: 116848 - DNA, 17 bp, Arabidopsis thaliana
ggtgaaccggccggtgt

SEQ ID NO: 116849 - DNA, 17 bp, Arabidopsis thaliana
ggtgaacctaagaccat

SEQ ID NO: 116850 - DNA, 17 bp, Arabidopsis thaliana
ggtgaacctacggaagg

SEQ ID NO: 116851 - DNA, 17 bp, Arabidopsis thaliana
ggtgaacctgccgaagg

SEQ ID NO: 116852 - DNA, 17 bp, Arabidopsis thaliana
ggtgaacctgcggaaag

SEQ ID NO: 116853 - DNA, 17 bp, Arabidopsis thaliana
ggtgaacctgcggaacg

SEQ ID NO: 116854 - DNA, 17 bp, Arabidopsis thaliana
ggtgaacctgcggaaga

SEQ ID NO: 116855 - DNA, 17 bp, Arabidopsis thaliana
ggtgaacctgcggaagg

SEQ ID NO: 116856 - DNA, 17 bp, Arabidopsis thaliana
ggtgaacctgcggatcc

SEQ ID NO: 116857 - DNA, 17 bp, Arabidopsis thaliana
ggtgaaccttgggatgg

SEQ ID NO: 116858 - DNA, 17 bp, Arabidopsis thaliana
ggtgaacgacctgtggg

SEQ ID NO: 116859 - DNA, 17 bp, Arabidopsis thaliana
ggtgaacgacctgtgtc

SEQ ID NO: 116860 - DNA, 17 bp, Arabidopsis thaliana
ggtgaacgacctgtgtg

SEQ ID NO: 116861 - DNA, 17 bp, Arabidopsis thaliana
ggtgaacgatctgtgtc

SEQ ID NO: 116862 - DNA, 17 bp, Arabidopsis thaliana
ggtgaacggcggccgta

SEQ ID NO: 116863 - DNA, 17 bp, Arabidopsis thaliana
ggtgaacggttcatcaa

SEQ ID NO: 116864 - DNA, 17 bp, Arabidopsis thaliana
ggtgaactatgcctgag

SEQ ID NO: 116865 - DNA, 17 bp, Arabidopsis thaliana
ggtgaactcgattgcgg

SEQ ID NO: 116866 - DNA, 17 bp, Arabidopsis thaliana
ggtgaactcgcagcagg

SEQ ID NO: 116867 - DNA, 17 bp, Arabidopsis thaliana
ggtgaactctgcctgag

SEQ ID NO: 116868 - DNA, 17 bp, Arabidopsis thaliana
ggtgaacttgcaacagg

SEQ ID NO: 116869 - DNA, 17 bp, Arabidopsis thaliana
ggtgaagactacatctc

SEQ ID NO: 116870 - DNA, 17 bp, Arabidopsis thaliana
ggtgaagagactttttc

SEQ ID NO: 116871 - DNA, 17 bp, Arabidopsis thaliana
ggtgaagatgtcagcag

SEQ ID NO: 116872 - DNA, 17 bp, Arabidopsis thaliana
ggtgaagcgcctatcag

SEQ ID NO: 116873 - DNA, 17 bp, Arabidopsis thaliana
ggtgaagcggaaccccc

SEQ ID NO: 116874 - DNA, 17 bp, Arabidopsis thaliana
ggtgaagctgcggaagg

SEQ ID NO: 116875 - DNA, 17 bp, Arabidopsis thaliana
ggtgaaggtggaccaag

SEQ ID NO: 116876 - DNA, 17 bp, Arabidopsis thaliana
ggtgaaggtggacccaa

SEQ ID NO: 116877 - DNA, 17 bp, Arabidopsis thaliana
ggtgaagtgttcggatc

SEQ ID NO: 116878 - DNA, 17 bp, Arabidopsis thaliana
ggtgaagtgttcggatt

SEQ ID NO: 116879 - DNA, 17 bp, Arabidopsis thaliana
ggtgaagtgttctgatc

SEQ ID NO: 116880 - DNA, 17 bp, Arabidopsis thaliana
ggtgaagttttcggatc

SEQ ID NO: 116881 - DNA, 17 bp, Arabidopsis thaliana
ggtgaatcaacggtttg

SEQ ID NO: 116882 - DNA, 17 bp, Arabidopsis thaliana
ggtgaatcagactaccg

SEQ ID NO: 116883 - DNA, 17 bp, Arabidopsis thaliana
ggtgaatcagggttcga

SEQ ID NO: 116884 - DNA, 17 bp, Arabidopsis thaliana
ggtgaatccttccgtcc

SEQ ID NO: 116885 - DNA, 17 bp, Arabidopsis thaliana
ggtgaatcgatttggcc

SEQ ID NO: 116886 - DNA, 17 bp, Arabidopsis thaliana
ggtgaatgaatggatcg

SEQ ID NO: 116887 - DNA, 17 bp, Arabidopsis thaliana
ggtgaatggctcattaa

SEQ ID NO: 116888 - DNA, 17 bp, Arabidopsis thaliana
ggtgaatgtgttttggt

SEQ ID NO: 116889 - DNA, 17 bp, Arabidopsis thaliana
ggtgaattcgttcccgg

SEQ ID NO: 116890 - DNA, 17 bp, Arabidopsis thaliana
ggtgaattcttggtact

SEQ ID NO: 116891 - DNA, 17 bp, Arabidopsis thaliana
ggtgaattgttcaatga

SEQ ID NO: 116892 - DNA, 17 bp, Arabidopsis thaliana
ggtgaatttgtggagac

SEQ ID NO: 116893 - DNA, 17 bp, Arabidopsis thaliana
ggtgaattttggttcgc

SEQ ID NO: 116894 - DNA, 17 bp, Arabidopsis thaliana
ggtgacaagaaaccaca

SEQ ID NO: 116895 - DNA, 17 bp, Arabidopsis thaliana
ggtgacaagttccccct

SEQ ID NO: 116896 - DNA, 17 bp, Arabidopsis thaliana
ggtgacaagtttctgag

SEQ ID NO: 116897 - DNA, 17 bp, Arabidopsis thaliana
ggtgacaatccgtttgc

SEQ ID NO: 116898 - DNA, 17 bp, Arabidopsis thaliana
ggtgacacgacttcaac

SEQ ID NO: 116899 - DNA, 17 bp, Arabidopsis thaliana
ggtgacactagggttta

SEQ ID NO: 116900 - DNA, 17 bp, Arabidopsis thaliana
ggtgacagacttgttag

SEQ ID NO: 116901 - DNA, 17 bp, Arabidopsis thaliana
ggtgacataagtccctc

SEQ ID NO: 116902 - DNA, 17 bp, Arabidopsis thaliana
ggtgacatatgacatgt

SEQ ID NO: 116903 - DNA, 17 bp, Arabidopsis thaliana
ggtgacatcggttcatc

SEQ ID NO: 116904 - DNA, 17 bp, Arabidopsis thaliana
ggtgacattgtaaccct

SEQ ID NO: 116905 - DNA, 17 bp, Arabidopsis thaliana
ggtgaccaaaaccgcac

SEQ ID NO: 116906 - DNA, 17 bp, Arabidopsis thaliana
ggtgaccaaatcgttgg

SEQ ID NO: 116907 - DNA, 17 bp, Arabidopsis thaliana
ggtgaccagggttcatt

SEQ ID NO: 116908 - DNA, 17 bp, Arabidopsis thaliana
ggtgaccagtatatttt

SEQ ID NO: 116909 - DNA, 17 bp, Arabidopsis thaliana
ggtgaccattggagcac

SEQ ID NO: 116910 - DNA, 17 bp, Arabidopsis thaliana
ggtgaccatttggactt

SEQ ID NO: 116911 - DNA, 17 bp, Arabidopsis thaliana
ggtgacccatatgccca

SEQ ID NO: 116912 - DNA, 17 bp, Arabidopsis thaliana
ggtgacccgggttcgat

SEQ ID NO: 116913 - DNA, 17 bp, Arabidopsis thaliana
ggtgacccgggttcgtt

SEQ ID NO: 116914 - DNA, 17 bp, Arabidopsis thaliana
ggtgacccgggttctcc

SEQ ID NO: 116915 - DNA, 17 bp, Arabidopsis thaliana
ggtgaccctaatgaact

SEQ ID NO: 116916 - DNA, 17 bp, Arabidopsis thaliana
ggtgaccgaaccgcagt

SEQ ID NO: 116917 - DNA, 17 bp, Arabidopsis thaliana
ggtgaccgacgccggcg

SEQ ID NO: 116918 - DNA, 17 bp, Arabidopsis thaliana
ggtgacctccaggaaag

SEQ ID NO: 116919 - DNA, 17 bp, Arabidopsis thaliana
ggtgacctcccgcgagg

SEQ ID NO: 116920 - DNA, 17 bp, Arabidopsis thaliana
ggtgacctcccgggaag

SEQ ID NO: 116921 - DNA, 17 bp, Arabidopsis thaliana
ggtgacctctcgggaag

SEQ ID NO: 116922 - DNA, 17 bp, Arabidopsis thaliana
ggtgacctgatgacagg

SEQ ID NO: 116923 - DNA, 17 bp, Arabidopsis thaliana
ggtgacctgccgggaag

SEQ ID NO: 116924 - DNA, 17 bp, Arabidopsis thaliana
ggtgacctggtctacgg

SEQ ID NO: 116925 - DNA, 17 bp, Arabidopsis thaliana
ggtgaccttagtcagct

SEQ ID NO: 116926 - DNA, 17 bp, Arabidopsis thaliana
ggtgaccttccagaaag

SEQ ID NO: 116927 - DNA, 17 bp, Arabidopsis thaliana
ggtgaccttctaagcct

SEQ ID NO: 116928 - DNA, 17 bp, Arabidopsis thaliana
ggtgacgaaattttttt

SEQ ID NO: 116929 - DNA, 17 bp, Arabidopsis thaliana
ggtgacgaccttcatct

SEQ ID NO: 116930 - DNA, 17 bp, Arabidopsis thaliana
ggtgacgacgagaggct

SEQ ID NO: 116931 - DNA, 17 bp, Arabidopsis thaliana
ggtgacggaattgttga

SEQ ID NO: 116932 - DNA, 17 bp, Arabidopsis thaliana
ggtgacggagaattagg

SEQ ID NO: 116933 - DNA, 17 bp, Arabidopsis thaliana
ggtgacgtgacaacata

SEQ ID NO: 116934 - DNA, 17 bp, Arabidopsis thaliana
ggtgacgtgacagcata

SEQ ID NO: 116935 - DNA, 17 bp, Arabidopsis thaliana
ggtgacgtgccggagtg

SEQ ID NO: 116936 - DNA, 17 bp, Arabidopsis thaliana
ggtgacgtggcagcata

SEQ ID NO: 116937 - DNA, 17 bp, Arabidopsis thaliana
ggtgacgttggtggtgg

SEQ ID NO: 116938 - DNA, 17 bp, Arabidopsis thaliana
ggtgactaacattacct

SEQ ID NO: 116939 - DNA, 17 bp, Arabidopsis thaliana
ggtgactatgcggttgg

SEQ ID NO: 116940 - DNA, 17 bp, Arabidopsis thaliana
ggtgactattttcttac

SEQ ID NO: 116941 - DNA, 17 bp, Arabidopsis thaliana
ggtgactcctgcttggc

SEQ ID NO: 116942 - DNA, 17 bp, Arabidopsis thaliana
ggtgactcgacaaagtg

SEQ ID NO: 116943 - DNA, 17 bp, Arabidopsis thaliana
ggtgactcgatctgtgg

SEQ ID NO: 116944 - DNA, 17 bp, Arabidopsis thaliana
ggtgactctcacggtga

SEQ ID NO: 116945 - DNA, 17 bp, Arabidopsis thaliana
ggtgactctcggcaacg

SEQ ID NO: 116946 - DNA, 17 bp, Arabidopsis thaliana
ggtgactctgacggtgc

SEQ ID NO: 116947 - DNA, 17 bp, Arabidopsis thaliana
ggtgactctgttcgctc

SEQ ID NO: 116948 - DNA, 17 bp, Arabidopsis thaliana
ggtgactcttttggtgt

SEQ ID NO: 116949 - DNA, 17 bp, Arabidopsis thaliana
ggtgactgaatgagacg

SEQ ID NO: 116950 - DNA, 17 bp, Arabidopsis thaliana
ggtgactgcattttgcc

SEQ ID NO: 116951 - DNA, 17 bp, Arabidopsis thaliana
ggtgactgcgtttgtga

SEQ ID NO: 116952 - DNA, 17 bp, Arabidopsis thaliana
ggtgactgcgttttgcg

SEQ ID NO: 116953 - DNA, 17 bp, Arabidopsis thaliana
ggtgactggaggacgag

SEQ ID NO: 116954 - DNA, 17 bp, Arabidopsis thaliana
ggtgacttaggttctcc

SEQ ID NO: 116955 - DNA, 17 bp, Arabidopsis thaliana
ggtgacttaggttctgg

SEQ ID NO: 116956 - DNA, 17 bp, Arabidopsis thaliana
ggtgactttcctccctt

SEQ ID NO: 116957 - DNA, 17 bp, Arabidopsis thaliana
ggtgacttttatttcga

SEQ ID NO: 116958 - DNA, 17 bp, Arabidopsis thaliana
ggtgacttttccgttga

SEQ ID NO: 116959 - DNA, 17 bp, Arabidopsis thaliana
ggtgagaaagtagcact

SEQ ID NO: 116960 - DNA, 17 bp, Arabidopsis thaliana
ggtgagaagatgtttgc

SEQ ID NO: 116961 - DNA, 17 bp, Arabidopsis thaliana
ggtgagaccaatgtggt

SEQ ID NO: 116962 - DNA, 17 bp, Arabidopsis thaliana
ggtgagacccaggtgct

SEQ ID NO: 116963 - DNA, 17 bp, Arabidopsis thaliana
ggtgagacccccgtcgt

SEQ ID NO: 116964 - DNA, 17 bp, Arabidopsis thaliana
ggtgagacgagtttgag

SEQ ID NO: 116965 - DNA, 17 bp, Arabidopsis thaliana
ggtgagacggtttggat

SEQ ID NO: 116966 - DNA, 17 bp, Arabidopsis thaliana
ggtgagactaatgcttc

SEQ ID NO: 116967 - DNA, 17 bp, Arabidopsis thaliana
ggtgagagccccgtccc

SEQ ID NO: 116968 - DNA, 17 bp, Arabidopsis thaliana
ggtgagagccccgtcgt

SEQ ID NO: 116969 - DNA, 17 bp, Arabidopsis thaliana
ggtgagatcaagcaact

SEQ ID NO: 116970 - DNA, 17 bp, Arabidopsis thaliana
ggtgagatcgacttggg

SEQ ID NO: 116971 - DNA, 17 bp, Arabidopsis thaliana
ggtgagatggccgagtg

SEQ ID NO: 116972 - DNA, 17 bp, Arabidopsis thaliana
ggtgagattcccgagcg

SEQ ID NO: 116973 - DNA, 17 bp, Arabidopsis thaliana
ggtgagccgccgccata

SEQ ID NO: 116974 - DNA, 17 bp, Arabidopsis thaliana
ggtgagcctgcggaagg

SEQ ID NO: 116975 - DNA, 17 bp, Arabidopsis thaliana
ggtgagctacgatagac

SEQ ID NO: 116976 - DNA, 17 bp, Arabidopsis thaliana
ggtgagctccggcgaat

SEQ ID NO: 116977 - DNA, 17 bp, Arabidopsis thaliana
ggtgaggaccagcaggt

SEQ ID NO: 116978 - DNA, 17 bp, Arabidopsis thaliana
ggtgaggaccaggcttc

SEQ ID NO: 116979 - DNA, 17 bp, Arabidopsis thaliana
ggtgaggagattcagtg

SEQ ID NO: 116980 - DNA, 17 bp, Arabidopsis thaliana
ggtgagggacgacgatt

SEQ ID NO: 116981 - DNA, 17 bp, Arabidopsis thaliana
ggtgagggtggacctag

SEQ ID NO: 116982 - DNA, 17 bp, Arabidopsis thaliana
ggtgaggtgcgcaacac

SEQ ID NO: 116983 - DNA, 17 bp, Arabidopsis thaliana
ggtgaggtgcgcaacgt

SEQ ID NO: 116984 - DNA, 17 bp, Arabidopsis thaliana
ggtgaggtgttcggatc

SEQ ID NO: 116985 - DNA, 17 bp, Arabidopsis thaliana
ggtgaggttgagtttgc

SEQ ID NO: 116986 - DNA, 17 bp, Arabidopsis thaliana
ggtgaggttgtgaattc

SEQ ID NO: 116987 - DNA, 17 bp, Arabidopsis thaliana
ggtgagtaaacccgtaa

SEQ ID NO: 116988 - DNA, 17 bp, Arabidopsis thaliana
ggtgagtaacgcgtaag

SEQ ID NO: 116989 - DNA, 17 bp, Arabidopsis thaliana
ggtgagtaatcgctgga

SEQ ID NO: 116990 - DNA, 17 bp, Arabidopsis thaliana
ggtgagtaatcgctggg

SEQ ID NO: 116991 - DNA, 17 bp, Arabidopsis thaliana
ggtgagtacaattgcat

SEQ ID NO: 116992 - DNA, 17 bp, Arabidopsis thaliana
ggtgagtcagggcctaa

SEQ ID NO: 116993 - DNA, 17 bp, Arabidopsis thaliana
ggtgagtcgatttggcc

SEQ ID NO: 116994 - DNA, 17 bp, Arabidopsis thaliana
ggtgagtctaacctggt

SEQ ID NO: 116995 - DNA, 17 bp, Arabidopsis thaliana
ggtgagtctatttggcc

SEQ ID NO: 116996 - DNA, 17 bp, Arabidopsis thaliana
ggtgagtgaacggcgtg

SEQ ID NO: 116997 - DNA, 17 bp, Arabidopsis thaliana
ggtgagtgagatatccg

SEQ ID NO: 116998 - DNA, 17 bp, Arabidopsis thaliana
ggtgagtgagtgtttaa

SEQ ID NO: 116999 - DNA, 17 bp, Arabidopsis thaliana
ggtgagttactttggaa

SEQ ID NO: 117000 - DNA, 17 bp, Arabidopsis thaliana
ggtgataaacaacgacg

SEQ ID NO: 117001 - DNA, 17 bp, Arabidopsis thaliana
ggtgatactcggtcatg

SEQ ID NO: 117002 - DNA, 17 bp, Arabidopsis thaliana
ggtgatactgatttggc

SEQ ID NO: 117003 - DNA, 17 bp, Arabidopsis thaliana
ggtgatagagacaaccg

SEQ ID NO: 117004 - DNA, 17 bp, Arabidopsis thaliana
ggtgatagccagaacac

SEQ ID NO: 117005 - DNA, 17 bp, Arabidopsis thaliana
ggtgatagcggttatta

SEQ ID NO: 117006 - DNA, 17 bp, Arabidopsis thaliana
ggtgataggctgatagc

SEQ ID NO: 117007 - DNA, 17 bp, Arabidopsis thaliana
ggtgatagtcgctgcga

SEQ ID NO: 117008 - DNA, 17 bp, Arabidopsis thaliana
ggtgatatcctgaggcc

SEQ ID NO: 117009 - DNA, 17 bp, Arabidopsis thaliana
ggtgatattagacaatg

SEQ ID NO: 117010 - DNA, 17 bp, Arabidopsis thaliana
ggtgatcaactttgcca

SEQ ID NO: 117011 - DNA, 17 bp, Arabidopsis thaliana
ggtgatcatccgcacta

SEQ ID NO: 117012 - DNA, 17 bp, Arabidopsis thaliana
ggtgatcatctcttgtg

SEQ ID NO: 117013 - DNA, 17 bp, Arabidopsis thaliana
ggtgatccatcgcctat

SEQ ID NO: 117014 - DNA, 17 bp, Arabidopsis thaliana
ggtgatccgtttgctga

SEQ ID NO: 117015 - DNA, 17 bp, Arabidopsis thaliana
ggtgatccgtttgctgg

SEQ ID NO: 117016 - DNA, 17 bp, Arabidopsis thaliana
ggtgatcgtggaccgtc

SEQ ID NO: 117017 - DNA, 17 bp, Arabidopsis thaliana
ggtgatctatctatgac

SEQ ID NO: 117018 - DNA, 17 bp, Arabidopsis thaliana
ggtgatctgttggcccc

SEQ ID NO: 117019 - DNA, 17 bp, Arabidopsis thaliana
ggtgatctgttggccgc

SEQ ID NO: 117020 - DNA, 17 bp, Arabidopsis thaliana
ggtgatcttctcagcct

SEQ ID NO: 117021 - DNA, 17 bp, Arabidopsis thaliana
ggtgatcttcttctgca

SEQ ID NO: 117022 - DNA, 17 bp, Arabidopsis thaliana
ggtgatgaactgtttgt

SEQ ID NO: 117023 - DNA, 17 bp, Arabidopsis thaliana
ggtgatgcctttcggtt

SEQ ID NO: 117024 - DNA, 17 bp, Arabidopsis thaliana
ggtgatggaggtgctag

SEQ ID NO: 117025 - DNA, 17 bp, Arabidopsis thaliana
ggtgatggtgatacccg

SEQ ID NO: 117026 - DNA, 17 bp, Arabidopsis thaliana
ggtgatggtgatactcg

SEQ ID NO: 117027 - DNA, 17 bp, Arabidopsis thaliana
ggtgatgtcgattccga

SEQ ID NO: 117028 - DNA, 17 bp, Arabidopsis thaliana
ggtgatgtgatgtggtt

SEQ ID NO: 117029 - DNA, 17 bp, Arabidopsis thaliana
ggtgatgtgctctactc

SEQ ID NO: 117030 - DNA, 17 bp, Arabidopsis thaliana
ggtgatgtttggcgact

SEQ ID NO: 117031 - DNA, 17 bp, Arabidopsis thaliana
ggtgattacacaaggct

SEQ ID NO: 117032 - DNA, 17 bp, Arabidopsis thaliana
ggtgattacgggattcg

SEQ ID NO: 117033 - DNA, 17 bp, Arabidopsis thaliana
ggtgattattgtgaagt

SEQ ID NO: 117034 - DNA, 17 bp, Arabidopsis thaliana
ggtgattcctccggctt

SEQ ID NO: 117035 - DNA, 17 bp, Arabidopsis thaliana
ggtgattcgccaactac

SEQ ID NO: 117036 - DNA, 17 bp, Arabidopsis thaliana
ggtgattctaatggagt

SEQ ID NO: 117037 - DNA, 17 bp, Arabidopsis thaliana
ggtgattctcagtttca

SEQ ID NO: 117038 - DNA, 17 bp, Arabidopsis thaliana
ggtgattctggtccagc

SEQ ID NO: 117039 - DNA, 17 bp, Arabidopsis thaliana
ggtgattctgtggaggt

SEQ ID NO: 117040 - DNA, 17 bp, Arabidopsis thaliana
ggtgattggatcacact

SEQ ID NO: 117041 - DNA, 17 bp, Arabidopsis thaliana
ggtgattggctaatgat

SEQ ID NO: 117042 - DNA, 17 bp, Arabidopsis thaliana
ggtgattggttagactg

SEQ ID NO: 117043 - DNA, 17 bp, Arabidopsis thaliana
ggtgattggttggactg

SEQ ID NO: 117044 - DNA, 17 bp, Arabidopsis thaliana
ggtgattggttgggctg

SEQ ID NO: 117045 - DNA, 17 bp, Arabidopsis thaliana
ggtgatttacgattttg

SEQ ID NO: 117046 - DNA, 17 bp, Arabidopsis thaliana
ggtgatttggagctgtt

SEQ ID NO: 117047 - DNA, 17 bp, Arabidopsis thaliana
ggtgatttgtagggccg

SEQ ID NO: 117048 - DNA, 17 bp, Arabidopsis thaliana
ggtgatttgttattgtg

SEQ ID NO: 117049 - DNA, 17 bp, Arabidopsis thaliana
ggtgcaaattgtcttcg

SEQ ID NO: 117050 - DNA, 17 bp, Arabidopsis thaliana
ggtgcaacgacggcgag

SEQ ID NO: 117051 - DNA, 17 bp, Arabidopsis thaliana
ggtgcaagagctcatcc

SEQ ID NO: 117052 - DNA, 17 bp, Arabidopsis thaliana
ggtgcaagattatcttc

SEQ ID NO: 117053 - DNA, 17 bp, Arabidopsis thaliana
ggtgcaagcggctgagg

SEQ ID NO: 117054 - DNA, 17 bp, Arabidopsis thaliana
ggtgcaagtccatcatg

SEQ ID NO: 117055 - DNA, 17 bp, Arabidopsis thaliana
ggtgcaatgtaaccagc

SEQ ID NO: 117056 - DNA, 17 bp, Arabidopsis thaliana
ggtgcaattctaccgac

SEQ ID NO: 117057 - DNA, 17 bp, Arabidopsis thaliana
ggtgcaattctaccgat

SEQ ID NO: 117058 - DNA, 17 bp, Arabidopsis thaliana
ggtgcacaaataacgct

SEQ ID NO: 117059 - DNA, 17 bp, Arabidopsis thaliana
ggtgcacagagaaggcc

SEQ ID NO: 117060 - DNA, 17 bp, Arabidopsis thaliana
ggtgcaccatcaaataa

SEQ ID NO: 117061 - DNA, 17 bp, Arabidopsis thaliana
ggtgcaccgccgaccac

SEQ ID NO: 117062 - DNA, 17 bp, Arabidopsis thaliana
ggtgcaccgccgaccga

SEQ ID NO: 117063 - DNA, 17 bp, Arabidopsis thaliana
ggtgcaccgccgaccgc

SEQ ID NO: 117064 - DNA, 17 bp, Arabidopsis thaliana
ggtgcaccgccgaccta

SEQ ID NO: 117065 - DNA, 17 bp, Arabidopsis thaliana
ggtgcacggagttttga

SEQ ID NO: 117066 - DNA, 17 bp, Arabidopsis thaliana
ggtgcacgtctgcctgg

SEQ ID NO: 117067 - DNA, 17 bp, Arabidopsis thaliana
ggtgcactactgtatcc

SEQ ID NO: 117068 - DNA, 17 bp, Arabidopsis thaliana
ggtgcactgttgcattg

SEQ ID NO: 117069 - DNA, 17 bp, Arabidopsis thaliana
ggtgcagaatacatacg

SEQ ID NO: 117070 - DNA, 17 bp, Arabidopsis thaliana
ggtgcagaatacgtacg

SEQ ID NO: 117071 - DNA, 17 bp, Arabidopsis thaliana
ggtgcagagacagccag

SEQ ID NO: 117072 - DNA, 17 bp, Arabidopsis thaliana
ggtgcagatcttggtgg

SEQ ID NO: 117073 - DNA, 17 bp, Arabidopsis thaliana
ggtgcagcttcctaatt

SEQ ID NO: 117074 - DNA, 17 bp, Arabidopsis thaliana
ggtgcaggaagttcggt

SEQ ID NO: 117075 - DNA, 17 bp, Arabidopsis thaliana
ggtgcaggaattagcac

SEQ ID NO: 117076 - DNA, 17 bp, Arabidopsis thaliana
ggtgcaggagatgtcga

SEQ ID NO: 117077 - DNA, 17 bp, Arabidopsis thaliana
ggtgcaggtatggcttc

SEQ ID NO: 117078 - DNA, 17 bp, Arabidopsis thaliana
ggtgcagtgggacttag

SEQ ID NO: 117079 - DNA, 17 bp, Arabidopsis thaliana
ggtgcagttctggttac

SEQ ID NO: 117080 - DNA, 17 bp, Arabidopsis thaliana
ggtgcagttttgaatgc

SEQ ID NO: 117081 - DNA, 17 bp, Arabidopsis thaliana
ggtgcagttttgagtgc

SEQ ID NO: 117082 - DNA, 17 bp, Arabidopsis thaliana
ggtgcagttttggatgt

SEQ ID NO: 117083 - DNA, 17 bp, Arabidopsis thaliana
ggtgcagttttgggtgc

SEQ ID NO: 117084 - DNA, 17 bp, Arabidopsis thaliana
ggtgcatgattggagca

SEQ ID NO: 117085 - DNA, 17 bp, Arabidopsis thaliana
ggtgcattaaatctcct

SEQ ID NO: 117086 - DNA, 17 bp, Arabidopsis thaliana
ggtgcattagtgctggt

SEQ ID NO: 117087 - DNA, 17 bp, Arabidopsis thaliana
ggtgcattggtcggcct

SEQ ID NO: 117088 - DNA, 17 bp, Arabidopsis thaliana
ggtgcattggtcggctt

SEQ ID NO: 117089 - DNA, 17 bp, Arabidopsis thaliana
ggtgcattgtctatttg

SEQ ID NO: 117090 - DNA, 17 bp, Arabidopsis thaliana
ggtgcattgtgatttta

SEQ ID NO: 117091 - DNA, 17 bp, Arabidopsis thaliana
ggtgcatttctaccggt

SEQ ID NO: 117092 - DNA, 17 bp, Arabidopsis thaliana
ggtgccaaaattagttt

SEQ ID NO: 117093 - DNA, 17 bp, Arabidopsis thaliana
ggtgccaaccgctaata

SEQ ID NO: 117094 - DNA, 17 bp, Arabidopsis thaliana
ggtgccaagaggcaaaa

SEQ ID NO: 117095 - DNA, 17 bp, Arabidopsis thaliana
ggtgccaagagggaaaa

SEQ ID NO: 117096 - DNA, 17 bp, Arabidopsis thaliana
ggtgccaagcgttcata

SEQ ID NO: 117097 - DNA, 17 bp, Arabidopsis thaliana
ggtgccaatcgctaaca

SEQ ID NO: 117098 - DNA, 17 bp, Arabidopsis thaliana
ggtgccaatcgctgaca

SEQ ID NO: 117099 - DNA, 17 bp, Arabidopsis thaliana
ggtgccagcagccgcgg

SEQ ID NO: 117100 - DNA, 17 bp, Arabidopsis thaliana
ggtgccaggcgggctat

SEQ ID NO: 117101 - DNA, 17 bp, Arabidopsis thaliana
ggtgccaggttattatt

SEQ ID NO: 117102 - DNA, 17 bp, Arabidopsis thaliana
ggtgccatactcgcaaa

SEQ ID NO: 117103 - DNA, 17 bp, Arabidopsis thaliana
ggtgccatcaaccaagc

SEQ ID NO: 117104 - DNA, 17 bp, Arabidopsis thaliana
ggtgccatcagctgttg

SEQ ID NO: 117105 - DNA, 17 bp, Arabidopsis thaliana
ggtgccatctggagacg

SEQ ID NO: 117106 - DNA, 17 bp, Arabidopsis thaliana
ggtgcccaactcggggc

SEQ ID NO: 117107 - DNA, 17 bp, Arabidopsis thaliana
ggtgcccaactgcgcgc

SEQ ID NO: 117108 - DNA, 17 bp, Arabidopsis thaliana
ggtgcccagagtgagac

SEQ ID NO: 117109 - DNA, 17 bp, Arabidopsis thaliana
ggtgcccgtagattccc

SEQ ID NO: 117110 - DNA, 17 bp, Arabidopsis thaliana
ggtgcccgtagatttcc

SEQ ID NO: 117111 - DNA, 17 bp, Arabidopsis thaliana
ggtgcccttccgtcaat

SEQ ID NO: 117112 - DNA, 17 bp, Arabidopsis thaliana
ggtgccgaaggcagggc

SEQ ID NO: 117113 - DNA, 17 bp, Arabidopsis thaliana
ggtgccgacaaccaaga

SEQ ID NO: 117114 - DNA, 17 bp, Arabidopsis thaliana
ggtgccgagtggaaggg

SEQ ID NO: 117115 - DNA, 17 bp, Arabidopsis thaliana
ggtgccgctgcaatatg

SEQ ID NO: 117116 - DNA, 17 bp, Arabidopsis thaliana
ggtgccgggggacggac

SEQ ID NO: 117117 - DNA, 17 bp, Arabidopsis thaliana
ggtgccgttttgggatg

SEQ ID NO: 117118 - DNA, 17 bp, Arabidopsis thaliana
ggtgcctgtaaaaatgt

SEQ ID NO: 117119 - DNA, 17 bp, Arabidopsis thaliana
ggtgcctgtagactccc

SEQ ID NO: 117120 - DNA, 17 bp, Arabidopsis thaliana
ggtgccttcagacccag

SEQ ID NO: 117121 - DNA, 17 bp, Arabidopsis thaliana
ggtgccttcgggaacgc

SEQ ID NO: 117122 - DNA, 17 bp, Arabidopsis thaliana
ggtgcgaaagagaaaag

SEQ ID NO: 117123 - DNA, 17 bp, Arabidopsis thaliana
ggtgcgacctatacccg

SEQ ID NO: 117124 - DNA, 17 bp, Arabidopsis thaliana
ggtgcgacgagcttcca

SEQ ID NO: 117125 - DNA, 17 bp, Arabidopsis thaliana
ggtgcgatggccggctt

SEQ ID NO: 117126 - DNA, 17 bp, Arabidopsis thaliana
ggtgcgattttggttac

SEQ ID NO: 117127 - DNA, 17 bp, Arabidopsis thaliana
ggtgcgcattggtcggc

SEQ ID NO: 117128 - DNA, 17 bp, Arabidopsis thaliana
ggtgcgcattggtcggt

SEQ ID NO: 117129 - DNA, 17 bp, Arabidopsis thaliana
ggtgcgcgaggtcccga

SEQ ID NO: 117130 - DNA, 17 bp, Arabidopsis thaliana
ggtgcggccggatcacc

SEQ ID NO: 117131 - DNA, 17 bp, Arabidopsis thaliana
ggtgcggctggatcacc

SEQ ID NO: 117132 - DNA, 17 bp, Arabidopsis thaliana
ggtgcgggaaaaatgcg

SEQ ID NO: 117133 - DNA, 17 bp, Arabidopsis thaliana
ggtgcgggaatgcttgg

SEQ ID NO: 117134 - DNA, 17 bp, Arabidopsis thaliana
ggtgcgggacaagtgcg

SEQ ID NO: 117135 - DNA, 17 bp, Arabidopsis thaliana
ggtgcgggatccgacac

SEQ ID NO: 117136 - DNA, 17 bp, Arabidopsis thaliana
ggtgcggttttaagtgc

SEQ ID NO: 117137 - DNA, 17 bp, Arabidopsis thaliana
ggtgcggttttggttac

SEQ ID NO: 117138 - DNA, 17 bp, Arabidopsis thaliana
ggtgcgtccaataggat

SEQ ID NO: 117139 - DNA, 17 bp, Arabidopsis thaliana
ggtgcgttcctaccgag

SEQ ID NO: 117140 - DNA, 17 bp, Arabidopsis thaliana
ggtgcgtttctaccgga

SEQ ID NO: 117141 - DNA, 17 bp, Arabidopsis thaliana
ggtgcgtttctaccggg

SEQ ID NO: 117142 - DNA, 17 bp, Arabidopsis thaliana
ggtgcgtttctacctga

SEQ ID NO: 117143 - DNA, 17 bp, Arabidopsis thaliana
ggtgcgtttctactaaa

SEQ ID NO: 117144 - DNA, 17 bp, Arabidopsis thaliana
ggtgcgtttctacttag

SEQ ID NO: 117145 - DNA, 17 bp, Arabidopsis thaliana
ggtgctaaggtacttcc

SEQ ID NO: 117146 - DNA, 17 bp, Arabidopsis thaliana
ggtgctaatgcttccat

SEQ ID NO: 117147 - DNA, 17 bp, Arabidopsis thaliana
ggtgctacaaagacttt

SEQ ID NO: 117148 - DNA, 17 bp, Arabidopsis thaliana
ggtgctactggatccca

SEQ ID NO: 117149 - DNA, 17 bp, Arabidopsis thaliana
ggtgctccacagaggag

SEQ ID NO: 117150 - DNA, 17 bp, Arabidopsis thaliana
ggtgctcggattcagat

SEQ ID NO: 117151 - DNA, 17 bp, Arabidopsis thaliana
ggtgctcttaggttgct

SEQ ID NO: 117152 - DNA, 17 bp, Arabidopsis thaliana
ggtgctgagattatcgt

SEQ ID NO: 117153 - DNA, 17 bp, Arabidopsis thaliana
ggtgctgagttattgat

SEQ ID NO: 117154 - DNA, 17 bp, Arabidopsis thaliana
ggtgctgatcttgaatg

SEQ ID NO: 117155 - DNA, 17 bp, Arabidopsis thaliana
ggtgctgatttcagcct

SEQ ID NO: 117156 - DNA, 17 bp, Arabidopsis thaliana
ggtgctgcagtggacac

SEQ ID NO: 117157 - DNA, 17 bp, Arabidopsis thaliana
ggtgctgcatggctggc

SEQ ID NO: 117158 - DNA, 17 bp, Arabidopsis thaliana
ggtgctgcccaggaacg

SEQ ID NO: 117159 - DNA, 17 bp, Arabidopsis thaliana
ggtgctgccgagtgaaa

SEQ ID NO: 117160 - DNA, 17 bp, Arabidopsis thaliana
ggtgctgctattcaact

SEQ ID NO: 117161 - DNA, 17 bp, Arabidopsis thaliana
ggtgctgctctaagaca

SEQ ID NO: 117162 - DNA, 17 bp, Arabidopsis thaliana
ggtgctggaaaagtcac

SEQ ID NO: 117163 - DNA, 17 bp, Arabidopsis thaliana
ggtgctggattggttca

SEQ ID NO: 117164 - DNA, 17 bp, Arabidopsis thaliana
ggtgctggtgtagtggt

SEQ ID NO: 117165 - DNA, 17 bp, Arabidopsis thaliana
ggtgctggttctggttc

SEQ ID NO: 117166 - DNA, 17 bp, Arabidopsis thaliana
ggtgctgtgtccaggat

SEQ ID NO: 117167 - DNA, 17 bp, Arabidopsis thaliana
ggtgcttaggagctgaa

SEQ ID NO: 117168 - DNA, 17 bp, Arabidopsis thaliana
ggtgcttatgaccaagg

SEQ ID NO: 117169 - DNA, 17 bp, Arabidopsis thaliana
ggtgcttatgtccaagg

SEQ ID NO: 117170 - DNA, 17 bp, Arabidopsis thaliana
ggtgcttcaaccattcg

SEQ ID NO: 117171 - DNA, 17 bp, Arabidopsis thaliana
ggtgcttcgtagccagg

SEQ ID NO: 117172 - DNA, 17 bp, Arabidopsis thaliana
ggtgcttctcagtgcaa

SEQ ID NO: 117173 - DNA, 17 bp, Arabidopsis thaliana
ggtgcttcttcatggtg

SEQ ID NO: 117174 - DNA, 17 bp, Arabidopsis thaliana
ggtgcttgaaagcagct

SEQ ID NO: 117175 - DNA, 17 bp, Arabidopsis thaliana
ggtgcttgcagagagaa

SEQ ID NO: 117176 - DNA, 17 bp, Arabidopsis thaliana
ggtgctttgcggttgtg

SEQ ID NO: 117177 - DNA, 17 bp, Arabidopsis thaliana
ggtgctttggattcgct

SEQ ID NO: 117178 - DNA, 17 bp, Arabidopsis thaliana
ggtgctttggccgagtg

SEQ ID NO: 117179 - DNA, 17 bp, Arabidopsis thaliana
ggtgctttgtttcacca

SEQ ID NO: 117180 - DNA, 17 bp, Arabidopsis thaliana
ggtggaaaagattttgc

SEQ ID NO: 117181 - DNA, 17 bp, Arabidopsis thaliana
ggtggaaaaggatacgc

SEQ ID NO: 117182 - DNA, 17 bp, Arabidopsis thaliana
ggtggaaactgctctgg

SEQ ID NO: 117183 - DNA, 17 bp, Arabidopsis thaliana
ggtggaaatgtgacttt

SEQ ID NO: 117184 - DNA, 17 bp, Arabidopsis thaliana
ggtggaacactggatcg

SEQ ID NO: 117185 - DNA, 17 bp, Arabidopsis thaliana
ggtggaacactggctcg

SEQ ID NO: 117186 - DNA, 17 bp, Arabidopsis thaliana
ggtggaactagtttgga

SEQ ID NO: 117187 - DNA, 17 bp, Arabidopsis thaliana
ggtggaactgttccact

SEQ ID NO: 117188 - DNA, 17 bp, Arabidopsis thaliana
ggtggaagcacggctgg

SEQ ID NO: 117189 - DNA, 17 bp, Arabidopsis thaliana
ggtggaagcataaagga

SEQ ID NO: 117190 - DNA, 17 bp, Arabidopsis thaliana
ggtggaagctctcctct

SEQ ID NO: 117191 - DNA, 17 bp, Arabidopsis thaliana
ggtggaagtagggcgac

SEQ ID NO: 117192 - DNA, 17 bp, Arabidopsis thaliana
ggtggaagtcataatca

SEQ ID NO: 117193 - DNA, 17 bp, Arabidopsis thaliana
ggtggaagttctatcac

SEQ ID NO: 117194 - DNA, 17 bp, Arabidopsis thaliana
ggtggacaatccgtcaa

SEQ ID NO: 117195 - DNA, 17 bp, Arabidopsis thaliana
ggtggacacttaacttg

SEQ ID NO: 117196 - DNA, 17 bp, Arabidopsis thaliana
ggtggacccttgcctca

SEQ ID NO: 117197 - DNA, 17 bp, Arabidopsis thaliana
ggtggacctgcggaagg

SEQ ID NO: 117198 - DNA, 17 bp, Arabidopsis thaliana
ggtggacgatcttcagt

SEQ ID NO: 117199 - DNA, 17 bp, Arabidopsis thaliana
ggtggacgtgcggaagg

SEQ ID NO: 117200 - DNA, 17 bp, Arabidopsis thaliana
ggtggacttctccccga

SEQ ID NO: 117201 - DNA, 17 bp, Arabidopsis thaliana
ggtggagacccgggtga

SEQ ID NO: 117202 - DNA, 17 bp, Arabidopsis thaliana
ggtggagactcgactaa

SEQ ID NO: 117203 - DNA, 17 bp, Arabidopsis thaliana
ggtggagacttgtaagt

SEQ ID NO: 117204 - DNA, 17 bp, Arabidopsis thaliana
ggtggagcgatttgtcg

SEQ ID NO: 117205 - DNA, 17 bp, Arabidopsis thaliana
ggtggagcgatttgtct

SEQ ID NO: 117206 - DNA, 17 bp, Arabidopsis thaliana
ggtggagctctggaaca

SEQ ID NO: 117207 - DNA, 17 bp, Arabidopsis thaliana
ggtggaggacctcatct

SEQ ID NO: 117208 - DNA, 17 bp, Arabidopsis thaliana
ggtggaggtgttgggtt

SEQ ID NO: 117209 - DNA, 17 bp, Arabidopsis thaliana
ggtggagttgtgatagg

SEQ ID NO: 117210 - DNA, 17 bp, Arabidopsis thaliana
ggtggataccgagacct

SEQ ID NO: 117211 - DNA, 17 bp, Arabidopsis thaliana
ggtggataccgaggcct

SEQ ID NO: 117212 - DNA, 17 bp, Arabidopsis thaliana
ggtggatacctaggcac

SEQ ID NO: 117213 - DNA, 17 bp, Arabidopsis thaliana
ggtggatatccttctaa

SEQ ID NO: 117214 - DNA, 17 bp, Arabidopsis thaliana
ggtggatctacgtatgg

SEQ ID NO: 117215 - DNA, 17 bp, Arabidopsis thaliana
ggtggatgtggttcacc

SEQ ID NO: 117216 - DNA, 17 bp, Arabidopsis thaliana
ggtggatgtggttcagc

SEQ ID NO: 117217 - DNA, 17 bp, Arabidopsis thaliana
ggtggatgttgctactc

SEQ ID NO: 117218 - DNA, 17 bp, Arabidopsis thaliana
ggtggattgcgcatata

SEQ ID NO: 117219 - DNA, 17 bp, Arabidopsis thaliana
ggtggattgcgcattta

SEQ ID NO: 117220 - DNA, 17 bp, Arabidopsis thaliana
ggtggatttcgctgtgt

SEQ ID NO: 117221 - DNA, 17 bp, Arabidopsis thaliana
ggtggattttgtaaaag

SEQ ID NO: 117222 - DNA, 17 bp, Arabidopsis thaliana
ggtggcaaaaactgtgt

SEQ ID NO: 117223 - DNA, 17 bp, Arabidopsis thaliana
ggtggcacagttgacaa

SEQ ID NO: 117224 - DNA, 17 bp, Arabidopsis thaliana
ggtggcacccacggcga

SEQ ID NO: 117225 - DNA, 17 bp, Arabidopsis thaliana
ggtggcagcagacagac

SEQ ID NO: 117226 - DNA, 17 bp, Arabidopsis thaliana
ggtggcagccactgtaa

SEQ ID NO: 117227 - DNA, 17 bp, Arabidopsis thaliana
ggtggcagcttcgaccc

SEQ ID NO: 117228 - DNA, 17 bp, Arabidopsis thaliana
ggtggcagtcaagatct

SEQ ID NO: 117229 - DNA, 17 bp, Arabidopsis thaliana
ggtggcattcagattaa

SEQ ID NO: 117230 - DNA, 17 bp, Arabidopsis thaliana
ggtggccggtaaccgtc

SEQ ID NO: 117231 - DNA, 17 bp, Arabidopsis thaliana
ggtggccgtgagggagg

SEQ ID NO: 117232 - DNA, 17 bp, Arabidopsis thaliana
ggtggcgacaagtgacg

SEQ ID NO: 117233 - DNA, 17 bp, Arabidopsis thaliana
ggtggcgagatcgatat

SEQ ID NO: 117234 - DNA, 17 bp, Arabidopsis thaliana
ggtggcgatggccgagg

SEQ ID NO: 117235 - DNA, 17 bp, Arabidopsis thaliana
ggtggcggagtgtgact

SEQ ID NO: 117236 - DNA, 17 bp, Arabidopsis thaliana
ggtggcggcctaagccc

SEQ ID NO: 117237 - DNA, 17 bp, Arabidopsis thaliana
ggtggcggctgtcgtag

SEQ ID NO: 117238 - DNA, 17 bp, Arabidopsis thaliana
ggtggcggtttgaggag

SEQ ID NO: 117239 - DNA, 17 bp, Arabidopsis thaliana
ggtggctaagtttgggg

SEQ ID NO: 117240 - DNA, 17 bp, Arabidopsis thaliana
ggtggctatgaatgttc

SEQ ID NO: 117241 - DNA, 17 bp, Arabidopsis thaliana
ggtggctattgcttggt

SEQ ID NO: 117242 - DNA, 17 bp, Arabidopsis thaliana
ggtggctccatcgctgt

SEQ ID NO: 117243 - DNA, 17 bp, Arabidopsis thaliana
ggtggctcgagcaactc

SEQ ID NO: 117244 - DNA, 17 bp, Arabidopsis thaliana
ggtggctggaccagtcc

SEQ ID NO: 117245 - DNA, 17 bp, Arabidopsis thaliana
ggtggctgtagctgtaa

SEQ ID NO: 117246 - DNA, 17 bp, Arabidopsis thaliana
ggtggctgtagtctagt

SEQ ID NO: 117247 - DNA, 17 bp, Arabidopsis thaliana
ggtggctgtagtttagt

SEQ ID NO: 117248 - DNA, 17 bp, Arabidopsis thaliana
ggtggcttctacggttg

SEQ ID NO: 117249 - DNA, 17 bp, Arabidopsis thaliana
ggtggctttctccattg

SEQ ID NO: 117250 - DNA, 17 bp, Arabidopsis thaliana
ggtgggaaaattacggg

SEQ ID NO: 117251 - DNA, 17 bp, Arabidopsis thaliana
ggtgggaaagcttctaa

SEQ ID NO: 117252 - DNA, 17 bp, Arabidopsis thaliana
ggtgggacccaaggcga

SEQ ID NO: 117253 - DNA, 17 bp, Arabidopsis thaliana
ggtgggacccacggcaa

SEQ ID NO: 117254 - DNA, 17 bp, Arabidopsis thaliana
ggtgggacccacggcga

SEQ ID NO: 117255 - DNA, 17 bp, Arabidopsis thaliana
ggtgggacccaggacga

SEQ ID NO: 117256 - DNA, 17 bp, Arabidopsis thaliana
ggtgggacccagggcga

SEQ ID NO: 117257 - DNA, 17 bp, Arabidopsis thaliana
ggtgggatcagatccgt

SEQ ID NO: 117258 - DNA, 17 bp, Arabidopsis thaliana
ggtgggattatgcttgg

SEQ ID NO: 117259 - DNA, 17 bp, Arabidopsis thaliana
ggtgggattccgtcaca

SEQ ID NO: 117260 - DNA, 17 bp, Arabidopsis thaliana
ggtgggcatgtctgcct

SEQ ID NO: 117261 - DNA, 17 bp, Arabidopsis thaliana
ggtgggcattggtcggc

SEQ ID NO: 117262 - DNA, 17 bp, Arabidopsis thaliana
ggtgggccacgctctgt

SEQ ID NO: 117263 - DNA, 17 bp, Arabidopsis thaliana
ggtgggcgggtttattt

SEQ ID NO: 117264 - DNA, 17 bp, Arabidopsis thaliana
ggtgggctctttcttct

SEQ ID NO: 117265 - DNA, 17 bp, Arabidopsis thaliana
ggtgggcttgtggattt

SEQ ID NO: 117266 - DNA, 17 bp, Arabidopsis thaliana
ggtggggagtttggctg

SEQ ID NO: 117267 - DNA, 17 bp, Arabidopsis thaliana
ggtggggccaaacctgt

SEQ ID NO: 117268 - DNA, 17 bp, Arabidopsis thaliana
ggtgggtagtgacggag

SEQ ID NO: 117269 - DNA, 17 bp, Arabidopsis thaliana
ggtgggtagtgacggat

SEQ ID NO: 117270 - DNA, 17 bp, Arabidopsis thaliana
ggtgggtcgccgcgtgc

SEQ ID NO: 117271 - DNA, 17 bp, Arabidopsis thaliana
ggtgggtgcaaccatct

SEQ ID NO: 117272 - DNA, 17 bp, Arabidopsis thaliana
ggtgggtgctgctattg

SEQ ID NO: 117273 - DNA, 17 bp, Arabidopsis thaliana
ggtgggtgtgcattggt

SEQ ID NO: 117274 - DNA, 17 bp, Arabidopsis thaliana
ggtgggtgttgagggag

SEQ ID NO: 117275 - DNA, 17 bp, Arabidopsis thaliana
ggtgggttcgtgtccca

SEQ ID NO: 117276 - DNA, 17 bp, Arabidopsis thaliana
ggtgggttttctcaaga

SEQ ID NO: 117277 - DNA, 17 bp, Arabidopsis thaliana
ggtgggttttctcatga

SEQ ID NO: 117278 - DNA, 17 bp, Arabidopsis thaliana
ggtgggttttctgctaa

SEQ ID NO: 117279 - DNA, 17 bp, Arabidopsis thaliana
ggtggtaacacttttct

SEQ ID NO: 117280 - DNA, 17 bp, Arabidopsis thaliana
ggtggtaagccgttggg

SEQ ID NO: 117281 - DNA, 17 bp, Arabidopsis thaliana
ggtggtaatggtcgtcg

SEQ ID NO: 117282 - DNA, 17 bp, Arabidopsis thaliana
ggtggtacaggaggtgg

SEQ ID NO: 117283 - DNA, 17 bp, Arabidopsis thaliana
ggtggtactcgactagg

SEQ ID NO: 117284 - DNA, 17 bp, Arabidopsis thaliana
ggtggtagatcgagctt

SEQ ID NO: 117285 - DNA, 17 bp, Arabidopsis thaliana
ggtggtattcttatcac

SEQ ID NO: 117286 - DNA, 17 bp, Arabidopsis thaliana
ggtggtcaacgataact

SEQ ID NO: 117287 - DNA, 17 bp, Arabidopsis thaliana
ggtggtcatcagatcgg

SEQ ID NO: 117288 - DNA, 17 bp, Arabidopsis thaliana
ggtggtcatggaagtcg

SEQ ID NO: 117289 - DNA, 17 bp, Arabidopsis thaliana
ggtggtcattagcgatt

SEQ ID NO: 117290 - DNA, 17 bp, Arabidopsis thaliana
ggtggtccaagtctatc

SEQ ID NO: 117291 - DNA, 17 bp, Arabidopsis thaliana
ggtggtccagacagtag

SEQ ID NO: 117292 - DNA, 17 bp, Arabidopsis thaliana
ggtggtccatttctacg

SEQ ID NO: 117293 - DNA, 17 bp, Arabidopsis thaliana
ggtggtccttcggggag

SEQ ID NO: 117294 - DNA, 17 bp, Arabidopsis thaliana
ggtggtcgacggtgatg

SEQ ID NO: 117295 - DNA, 17 bp, Arabidopsis thaliana
ggtggtcgcagtgacca

SEQ ID NO: 117296 - DNA, 17 bp, Arabidopsis thaliana
ggtggtcgcgacagtgt

SEQ ID NO: 117297 - DNA, 17 bp, Arabidopsis thaliana
ggtggtcgtggtcgcgg

SEQ ID NO: 117298 - DNA, 17 bp, Arabidopsis thaliana
ggtggtctatgcgaggc

SEQ ID NO: 117299 - DNA, 17 bp, Arabidopsis thaliana
ggtggtctatgggcttt

SEQ ID NO: 117300 - DNA, 17 bp, Arabidopsis thaliana
ggtggtctgtactacgg

SEQ ID NO: 117301 - DNA, 17 bp, Arabidopsis thaliana
ggtggtgaacttgatcc

SEQ ID NO: 117302 - DNA, 17 bp, Arabidopsis thaliana
ggtggtgacaaccaaga

SEQ ID NO: 117303 - DNA, 17 bp, Arabidopsis thaliana
ggtggtgactgcgtttt

SEQ ID NO: 117304 - DNA, 17 bp, Arabidopsis thaliana
ggtggtgatctctgtct

SEQ ID NO: 117305 - DNA, 17 bp, Arabidopsis thaliana
ggtggtgatggtgacga

SEQ ID NO: 117306 - DNA, 17 bp, Arabidopsis thaliana
ggtggtgcatgcggaga

SEQ ID NO: 117307 - DNA, 17 bp, Arabidopsis thaliana
ggtggtgcatggctgtc

SEQ ID NO: 117308 - DNA, 17 bp, Arabidopsis thaliana
ggtggtgcatggctgtt

SEQ ID NO: 117309 - DNA, 17 bp, Arabidopsis thaliana
ggtggtgccgctacaat

SEQ ID NO: 117310 - DNA, 17 bp, Arabidopsis thaliana
ggtggtgcctcagggag

SEQ ID NO: 117311 - DNA, 17 bp, Arabidopsis thaliana
ggtggtgcggaacaagc

SEQ ID NO: 117312 - DNA, 17 bp, Arabidopsis thaliana
ggtggtgcgttgttgag

SEQ ID NO: 117313 - DNA, 17 bp, Arabidopsis thaliana
ggtggtggcgacggaga

SEQ ID NO: 117314 - DNA, 17 bp, Arabidopsis thaliana
ggtggtggcggcgctgg

SEQ ID NO: 117315 - DNA, 17 bp, Arabidopsis thaliana
ggtggtggtgcataccc

SEQ ID NO: 117316 - DNA, 17 bp, Arabidopsis thaliana
ggtggtggtgcatgacc

SEQ ID NO: 117317 - DNA, 17 bp, Arabidopsis thaliana
ggtggtggtgcatgccc

SEQ ID NO: 117318 - DNA, 17 bp, Arabidopsis thaliana
ggtggtggtgcatggcc

SEQ ID NO: 117319 - DNA, 17 bp, Arabidopsis thaliana
ggtggtggtgcatggcg

SEQ ID NO: 117320 - DNA, 17 bp, Arabidopsis thaliana
ggtggtggtgcatggct

SEQ ID NO: 117321 - DNA, 17 bp, Arabidopsis thaliana
ggtggtggtggcggcgc

SEQ ID NO: 117322 - DNA, 17 bp, Arabidopsis thaliana
ggtggtggtggtggtgg

SEQ ID NO: 117323 - DNA, 17 bp, Arabidopsis thaliana
ggtggttaataaaccgt

SEQ ID NO: 117324 - DNA, 17 bp, Arabidopsis thaliana
ggtggttacagaacact

SEQ ID NO: 117325 - DNA, 17 bp, Arabidopsis thaliana
ggtggttccttaacagg

SEQ ID NO: 117326 - DNA, 17 bp, Arabidopsis thaliana
ggtggttcgagtccact

SEQ ID NO: 117327 - DNA, 17 bp, Arabidopsis thaliana
ggtggttcgagtccctt

SEQ ID NO: 117328 - DNA, 17 bp, Arabidopsis thaliana
ggtggttcgattcccgg

SEQ ID NO: 117329 - DNA, 17 bp, Arabidopsis thaliana
ggtggttctgacgaggt

SEQ ID NO: 117330 - DNA, 17 bp, Arabidopsis thaliana
ggtggttctggactggg

SEQ ID NO: 117331 - DNA, 17 bp, Arabidopsis thaliana
ggtggttctttaacagg

SEQ ID NO: 117332 - DNA, 17 bp, Arabidopsis thaliana
ggtggttgccggcgatg

SEQ ID NO: 117333 - DNA, 17 bp, Arabidopsis thaliana
ggtggttgtcaagaaag

SEQ ID NO: 117334 - DNA, 17 bp, Arabidopsis thaliana
ggtggttgtctgtcggt

SEQ ID NO: 117335 - DNA, 17 bp, Arabidopsis thaliana
ggtggttgtttaggcct

SEQ ID NO: 117336 - DNA, 17 bp, Arabidopsis thaliana
ggtgtaacgactgcccc

SEQ ID NO: 117337 - DNA, 17 bp, Arabidopsis thaliana
ggtgtaagacgaggagt

SEQ ID NO: 117338 - DNA, 17 bp, Arabidopsis thaliana
ggtgtacagatagcgat

SEQ ID NO: 117339 - DNA, 17 bp, Arabidopsis thaliana
ggtgtacagatgtggtg

SEQ ID NO: 117340 - DNA, 17 bp, Arabidopsis thaliana
ggtgtacattgctcggc

SEQ ID NO: 117341 - DNA, 17 bp, Arabidopsis thaliana
ggtgtacattggtcggc

SEQ ID NO: 117342 - DNA, 17 bp, Arabidopsis thaliana
ggtgtacattgttgctt

SEQ ID NO: 117343 - DNA, 17 bp, Arabidopsis thaliana
ggtgtaccaacaggcaa

SEQ ID NO: 117344 - DNA, 17 bp, Arabidopsis thaliana
ggtgtacccaaagtccg

SEQ ID NO: 117345 - DNA, 17 bp, Arabidopsis thaliana
ggtgtaccgcaggttaa

SEQ ID NO: 117346 - DNA, 17 bp, Arabidopsis thaliana
ggtgtaccgcggatcaa

SEQ ID NO: 117347 - DNA, 17 bp, Arabidopsis thaliana
ggtgtagacatccgggt

SEQ ID NO: 117348 - DNA, 17 bp, Arabidopsis thaliana
ggtgtagacggcggcga

SEQ ID NO: 117349 - DNA, 17 bp, Arabidopsis thaliana
ggtgtagatttgctttg

SEQ ID NO: 117350 - DNA, 17 bp, Arabidopsis thaliana
ggtgtagccaaagtcca

SEQ ID NO: 117351 - DNA, 17 bp, Arabidopsis thaliana
ggtgtagccaaagtccg

SEQ ID NO: 117352 - DNA, 17 bp, Arabidopsis thaliana
ggtgtaggataagtggg

SEQ ID NO: 117353 - DNA, 17 bp, Arabidopsis thaliana
ggtgtagtgttcggatc

SEQ ID NO: 117354 - DNA, 17 bp, Arabidopsis thaliana
ggtgtatcgggccaaga

SEQ ID NO: 117355 - DNA, 17 bp, Arabidopsis thaliana
ggtgtatgcgatatcct

SEQ ID NO: 117356 - DNA, 17 bp, Arabidopsis thaliana
ggtgtatgtgcggatcg

SEQ ID NO: 117357 - DNA, 17 bp, Arabidopsis thaliana
ggtgtattgcgggttaa

SEQ ID NO: 117358 - DNA, 17 bp, Arabidopsis thaliana
ggtgtattggtcggctt

SEQ ID NO: 117359 - DNA, 17 bp, Arabidopsis thaliana
ggtgtcaaaaattctga

SEQ ID NO: 117360 - DNA, 17 bp, Arabidopsis thaliana
ggtgtcaaccgctaata

SEQ ID NO: 117361 - DNA, 17 bp, Arabidopsis thaliana
ggtgtcaagctgtgatt

SEQ ID NO: 117362 - DNA, 17 bp, Arabidopsis thaliana
ggtgtcaatccaaatgg

SEQ ID NO: 117363 - DNA, 17 bp, Arabidopsis thaliana
ggtgtcagaacacactt

SEQ ID NO: 117364 - DNA, 17 bp, Arabidopsis thaliana
ggtgtcagaccacactc

SEQ ID NO: 117365 - DNA, 17 bp, Arabidopsis thaliana
ggtgtcagatcacactc

SEQ ID NO: 117366 - DNA, 17 bp, Arabidopsis thaliana
ggtgtcagattcagatc

SEQ ID NO: 117367 - DNA, 17 bp, Arabidopsis thaliana
ggtgtcagcatcagtgt

SEQ ID NO: 117368 - DNA, 17 bp, Arabidopsis thaliana
ggtgtcaggacctacgg

SEQ ID NO: 117369 - DNA, 17 bp, Arabidopsis thaliana
ggtgtcaggagggatag

SEQ ID NO: 117370 - DNA, 17 bp, Arabidopsis thaliana
ggtgtcattggtcggct

SEQ ID NO: 117371 - DNA, 17 bp, Arabidopsis thaliana
ggtgtccagtcttttga

SEQ ID NO: 117372 - DNA, 17 bp, Arabidopsis thaliana
ggtgtccagtcttttgt

SEQ ID NO: 117373 - DNA, 17 bp, Arabidopsis thaliana
ggtgtccattggtcggc

SEQ ID NO: 117374 - DNA, 17 bp, Arabidopsis thaliana
ggtgtccatttaagcac

SEQ ID NO: 117375 - DNA, 17 bp, Arabidopsis thaliana
ggtgtcccaccgggtgt

SEQ ID NO: 117376 - DNA, 17 bp, Arabidopsis thaliana
ggtgtcccactcggtgt

SEQ ID NO: 117377 - DNA, 17 bp, Arabidopsis thaliana
ggtgtcccactgggtgt

SEQ ID NO: 117378 - DNA, 17 bp, Arabidopsis thaliana
ggtgtccggtgcgcccc

SEQ ID NO: 117379 - DNA, 17 bp, Arabidopsis thaliana
ggtgtccggtgcgctcc

SEQ ID NO: 117380 - DNA, 17 bp, Arabidopsis thaliana
ggtgtccggtgcgtccc

SEQ ID NO: 117381 - DNA, 17 bp, Arabidopsis thaliana
ggtgtcgatcgacaggt

SEQ ID NO: 117382 - DNA, 17 bp, Arabidopsis thaliana
ggtgtcgatcgacagtc

SEQ ID NO: 117383 - DNA, 17 bp, Arabidopsis thaliana
ggtgtcgatggtgtgtg

SEQ ID NO: 117384 - DNA, 17 bp, Arabidopsis thaliana
ggtgtcgctattaattc

SEQ ID NO: 117385 - DNA, 17 bp, Arabidopsis thaliana
ggtgtcgggggttcgaa

SEQ ID NO: 117386 - DNA, 17 bp, Arabidopsis thaliana
ggtgtcgtcgacgacgt

SEQ ID NO: 117387 - DNA, 17 bp, Arabidopsis thaliana
ggtgtcgtctatcgtgg

SEQ ID NO: 117388 - DNA, 17 bp, Arabidopsis thaliana
ggtgtctcattgtttgc

SEQ ID NO: 117389 - DNA, 17 bp, Arabidopsis thaliana
ggtgtctctatcctccg

SEQ ID NO: 117390 - DNA, 17 bp, Arabidopsis thaliana
ggtgtctctccagttga

SEQ ID NO: 117391 - DNA, 17 bp, Arabidopsis thaliana
ggtgtctcttgaccctt

SEQ ID NO: 117392 - DNA, 17 bp, Arabidopsis thaliana
ggtgtctgaaatgtctc

SEQ ID NO: 117393 - DNA, 17 bp, Arabidopsis thaliana
ggtgtctgagcgaacag

SEQ ID NO: 117394 - DNA, 17 bp, Arabidopsis thaliana
ggtgtctgcagttcgtt

SEQ ID NO: 117395 - DNA, 17 bp, Arabidopsis thaliana
ggtgtctgcatatgagg

SEQ ID NO: 117396 - DNA, 17 bp, Arabidopsis thaliana
ggtgtctgcctgggtgt

SEQ ID NO: 117397 - DNA, 17 bp, Arabidopsis thaliana
ggtgtctgtgatgccct

SEQ ID NO: 117398 - DNA, 17 bp, Arabidopsis thaliana
ggtgtcttaatcctgac

SEQ ID NO: 117399 - DNA, 17 bp, Arabidopsis thaliana
ggtgtcttcatcaccgg

SEQ ID NO: 117400 - DNA, 17 bp, Arabidopsis thaliana
ggtgtcttcccaaccga

SEQ ID NO: 117401 - DNA, 17 bp, Arabidopsis thaliana
ggtgtcttccccaaccg

SEQ ID NO: 117402 - DNA, 17 bp, Arabidopsis thaliana
ggtgtcttcctaaccga

SEQ ID NO: 117403 - DNA, 17 bp, Arabidopsis thaliana
ggtgtctttctgtaaga

SEQ ID NO: 117404 - DNA, 17 bp, Arabidopsis thaliana
ggtgtctttgcctatta

SEQ ID NO: 117405 - DNA, 17 bp, Arabidopsis thaliana
ggtgtcttttccaaccg

SEQ ID NO: 117406 - DNA, 17 bp, Arabidopsis thaliana
ggtgtgaagccatctcg

SEQ ID NO: 117407 - DNA, 17 bp, Arabidopsis thaliana
ggtgtgaagttgttggt

SEQ ID NO: 117408 - DNA, 17 bp, Arabidopsis thaliana
ggtgtgaatgtgacgtg

SEQ ID NO: 117409 - DNA, 17 bp, Arabidopsis thaliana
ggtgtgaattgcagaat

SEQ ID NO: 117410 - DNA, 17 bp, Arabidopsis thaliana
ggtgtgacatcacacca

SEQ ID NO: 117411 - DNA, 17 bp, Arabidopsis thaliana
ggtgtgactaaactcct

SEQ ID NO: 117412 - DNA, 17 bp, Arabidopsis thaliana
ggtgtgactgatcatgg

SEQ ID NO: 117413 - DNA, 17 bp, Arabidopsis thaliana
ggtgtgatccctcgttc

SEQ ID NO: 117414 - DNA, 17 bp, Arabidopsis thaliana
ggtgtgcactgctcggc

SEQ ID NO: 117415 - DNA, 17 bp, Arabidopsis thaliana
ggtgtgcactggtcggc

SEQ ID NO: 117416 - DNA, 17 bp, Arabidopsis thaliana
ggtgtgcagactgagtt

SEQ ID NO: 117417 - DNA, 17 bp, Arabidopsis thaliana
ggtgtgcagtggtcggc

SEQ ID NO: 117418 - DNA, 17 bp, Arabidopsis thaliana
ggtgtgcatcggtcggc

SEQ ID NO: 117419 - DNA, 17 bp, Arabidopsis thaliana
ggtgtgcatgggtcggc

SEQ ID NO: 117420 - DNA, 17 bp, Arabidopsis thaliana
ggtgtgcatggtcggct

SEQ ID NO: 117421 - DNA, 17 bp, Arabidopsis thaliana
ggtgtgcattagtcggc

SEQ ID NO: 117422 - DNA, 17 bp, Arabidopsis thaliana
ggtgtgcattatcggct

SEQ ID NO: 117423 - DNA, 17 bp, Arabidopsis thaliana
ggtgtgcattcggcttg

SEQ ID NO: 117424 - DNA, 17 bp, Arabidopsis thaliana
ggtgtgcattcgtcggc

SEQ ID NO: 117425 - DNA, 17 bp, Arabidopsis thaliana
ggtgtgcattgatcggc

SEQ ID NO: 117426 - DNA, 17 bp, Arabidopsis thaliana
ggtgtgcattgatcggt

SEQ ID NO: 117427 - DNA, 17 bp, Arabidopsis thaliana
ggtgtgcattgattggt

SEQ ID NO: 117428 - DNA, 17 bp, Arabidopsis thaliana
ggtgtgcattgctcgcc

SEQ ID NO: 117429 - DNA, 17 bp, Arabidopsis thaliana
ggtgtgcattgctcggc

SEQ ID NO: 117430 - DNA, 17 bp, Arabidopsis thaliana
ggtgtgcattgctcggg

SEQ ID NO: 117431 - DNA, 17 bp, Arabidopsis thaliana
ggtgtgcattggccggc

SEQ ID NO: 117432 - DNA, 17 bp, Arabidopsis thaliana
ggtgtgcattggcggct

SEQ ID NO: 117433 - DNA, 17 bp, Arabidopsis thaliana
ggtgtgcattgggcggc

SEQ ID NO: 117434 - DNA, 17 bp, Arabidopsis thaliana
ggtgtgcattggtaggc

SEQ ID NO: 117435 - DNA, 17 bp, Arabidopsis thaliana
ggtgtgcattggtcagc

SEQ ID NO: 117436 - DNA, 17 bp, Arabidopsis thaliana
ggtgtgcattggtccgc

SEQ ID NO: 117437 - DNA, 17 bp, Arabidopsis thaliana
ggtgtgcattggtcgac

SEQ ID NO: 117438 - DNA, 17 bp, Arabidopsis thaliana
ggtgtgcattggtcgcc

SEQ ID NO: 117439 - DNA, 17 bp, Arabidopsis thaliana
ggtgtgcattggtcgct

SEQ ID NO: 117440 - DNA, 17 bp, Arabidopsis thaliana
ggtgtgcattggtcgga

SEQ ID NO: 117441 - DNA, 17 bp, Arabidopsis thaliana
ggtgtgcattggtcggc

SEQ ID NO: 117442 - DNA, 17 bp, Arabidopsis thaliana
ggtgtgcattggtcggg

SEQ ID NO: 117443 - DNA, 17 bp, Arabidopsis thaliana
ggtgtgcattggtcggt

SEQ ID NO: 117444 - DNA, 17 bp, Arabidopsis thaliana
ggtgtgcattggtcgtc

SEQ ID NO: 117445 - DNA, 17 bp, Arabidopsis thaliana
ggtgtgcattggtctgc

SEQ ID NO: 117446 - DNA, 17 bp, Arabidopsis thaliana
ggtgtgcattggtgggc

SEQ ID NO: 117447 - DNA, 17 bp, Arabidopsis thaliana
ggtgtgcattggtgggt

SEQ ID NO: 117448 - DNA, 17 bp, Arabidopsis thaliana
ggtgtgcattggttggc

SEQ ID NO: 117449 - DNA, 17 bp, Arabidopsis thaliana
ggtgtgcattggttggt

SEQ ID NO: 117450 - DNA, 17 bp, Arabidopsis thaliana
ggtgtgcattgtcggct

SEQ ID NO: 117451 - DNA, 17 bp, Arabidopsis thaliana
ggtgtgcattgttcggc

SEQ ID NO: 117452 - DNA, 17 bp, Arabidopsis thaliana
ggtgtgcatttgtcggc

SEQ ID NO: 117453 - DNA, 17 bp, Arabidopsis thaliana
ggtgtgccgtcgaagtg

SEQ ID NO: 117454 - DNA, 17 bp, Arabidopsis thaliana
ggtgtgcggctcgatca

SEQ ID NO: 117455 - DNA, 17 bp, Arabidopsis thaliana
ggtgtgcgttggtcggc

SEQ ID NO: 117456 - DNA, 17 bp, Arabidopsis thaliana
ggtgtgctcggcttgtc

SEQ ID NO: 117457 - DNA, 17 bp, Arabidopsis thaliana
ggtgtgctttggtcggc

SEQ ID NO: 117458 - DNA, 17 bp, Arabidopsis thaliana
ggtgtggagtttggttg

SEQ ID NO: 117459 - DNA, 17 bp, Arabidopsis thaliana
ggtgtggatcctgtctc

SEQ ID NO: 117460 - DNA, 17 bp, Arabidopsis thaliana
ggtgtggatgactatgg

SEQ ID NO: 117461 - DNA, 17 bp, Arabidopsis thaliana
ggtgtggattggtcggc

SEQ ID NO: 117462 - DNA, 17 bp, Arabidopsis thaliana
ggtgtggcctgtaaatt

SEQ ID NO: 117463 - DNA, 17 bp, Arabidopsis thaliana
ggtgtggctggatcacc

SEQ ID NO: 117464 - DNA, 17 bp, Arabidopsis thaliana
ggtgtgggtccatctcc

SEQ ID NO: 117465 - DNA, 17 bp, Arabidopsis thaliana
ggtgtgggttccgcctc

SEQ ID NO: 117466 - DNA, 17 bp, Arabidopsis thaliana
ggtgtggtcggcttgct

SEQ ID NO: 117467 - DNA, 17 bp, Arabidopsis thaliana
ggtgtggtcggcttgtc

SEQ ID NO: 117468 - DNA, 17 bp, Arabidopsis thaliana
ggtgtggtgttggttgt

SEQ ID NO: 117469 - DNA, 17 bp, Arabidopsis thaliana
ggtgtgtaataagaatc

SEQ ID NO: 117470 - DNA, 17 bp, Arabidopsis thaliana
ggtgtgtacaaagggca

SEQ ID NO: 117471 - DNA, 17 bp, Arabidopsis thaliana
ggtgtgtacaaaggtaa

SEQ ID NO: 117472 - DNA, 17 bp, Arabidopsis thaliana
ggtgtgtattggtcggc

SEQ ID NO: 117473 - DNA, 17 bp, Arabidopsis thaliana
ggtgtgtcatctatgga

SEQ ID NO: 117474 - DNA, 17 bp, Arabidopsis thaliana
ggtgtgtcggctgcttt

SEQ ID NO: 117475 - DNA, 17 bp, Arabidopsis thaliana
ggtgtgtggaccacgcg

SEQ ID NO: 117476 - DNA, 17 bp, Arabidopsis thaliana
ggtgtgtggtcggcttg

SEQ ID NO: 117477 - DNA, 17 bp, Arabidopsis thaliana
ggtgtgtggttgggtgg

SEQ ID NO: 117478 - DNA, 17 bp, Arabidopsis thaliana
ggtgtgttcctatcgag

SEQ ID NO: 117479 - DNA, 17 bp, Arabidopsis thaliana
ggtgtgttctagcagtc

SEQ ID NO: 117480 - DNA, 17 bp, Arabidopsis thaliana
ggtgtgttggtcggctt

SEQ ID NO: 117481 - DNA, 17 bp, Arabidopsis thaliana
ggtgtgttttgctaacc

SEQ ID NO: 117482 - DNA, 17 bp, Arabidopsis thaliana
ggtgttaatgccacaag

SEQ ID NO: 117483 - DNA, 17 bp, Arabidopsis thaliana
ggtgttaatggatacgg

SEQ ID NO: 117484 - DNA, 17 bp, Arabidopsis thaliana
ggtgttacaaggggcgg

SEQ ID NO: 117485 - DNA, 17 bp, Arabidopsis thaliana
ggtgttacagtgttggc

SEQ ID NO: 117486 - DNA, 17 bp, Arabidopsis thaliana
ggtgttacgcttcgtca

SEQ ID NO: 117487 - DNA, 17 bp, Arabidopsis thaliana
ggtgttacttatcaacc

SEQ ID NO: 117488 - DNA, 17 bp, Arabidopsis thaliana
ggtgttagacgtcatca

SEQ ID NO: 117489 - DNA, 17 bp, Arabidopsis thaliana
ggtgttagtcgcatcct

SEQ ID NO: 117490 - DNA, 17 bp, Arabidopsis thaliana
ggtgttatcctatctga

SEQ ID NO: 117491 - DNA, 17 bp, Arabidopsis thaliana
ggtgttcaaaacagaag

SEQ ID NO: 117492 - DNA, 17 bp, Arabidopsis thaliana
ggtgttcaaatctggtt

SEQ ID NO: 117493 - DNA, 17 bp, Arabidopsis thaliana
ggtgttcaggtcccacc

SEQ ID NO: 117494 - DNA, 17 bp, Arabidopsis thaliana
ggtgttcatggcagaaa

SEQ ID NO: 117495 - DNA, 17 bp, Arabidopsis thaliana
ggtgttcattggtcggc

SEQ ID NO: 117496 - DNA, 17 bp, Arabidopsis thaliana
ggtgttcgacttggcac

SEQ ID NO: 117497 - DNA, 17 bp, Arabidopsis thaliana
ggtgttcggaattcggc

SEQ ID NO: 117498 - DNA, 17 bp, Arabidopsis thaliana
ggtgttcgggttgcccg

SEQ ID NO: 117499 - DNA, 17 bp, Arabidopsis thaliana
ggtgttcggtctcttta

SEQ ID NO: 117500 - DNA, 17 bp, Arabidopsis thaliana
ggtgttcggtttcgaag

SEQ ID NO: 117501 - DNA, 17 bp, Arabidopsis thaliana
ggtgttcttagttcctc

SEQ ID NO: 117502 - DNA, 17 bp, Arabidopsis thaliana
ggtgttcttcttcagct

SEQ ID NO: 117503 - DNA, 17 bp, Arabidopsis thaliana
ggtgttctttgggattt

SEQ ID NO: 117504 - DNA, 17 bp, Arabidopsis thaliana
ggtgttgaagaccttcg

SEQ ID NO: 117505 - DNA, 17 bp, Arabidopsis thaliana
ggtgttgaaggctatag

SEQ ID NO: 117506 - DNA, 17 bp, Arabidopsis thaliana
ggtgttgacctagagtt

SEQ ID NO: 117507 - DNA, 17 bp, Arabidopsis thaliana
ggtgttgactgtgacga

SEQ ID NO: 117508 - DNA, 17 bp, Arabidopsis thaliana
ggtgttgatcatcgttg

SEQ ID NO: 117509 - DNA, 17 bp, Arabidopsis thaliana
ggtgttgcggctggtgg

SEQ ID NO: 117510 - DNA, 17 bp, Arabidopsis thaliana
ggtgttgcgtttaacgg

SEQ ID NO: 117511 - DNA, 17 bp, Arabidopsis thaliana
ggtgttggattcgaggc

SEQ ID NO: 117512 - DNA, 17 bp, Arabidopsis thaliana
ggtgttggcccaataat

SEQ ID NO: 117513 - DNA, 17 bp, Arabidopsis thaliana
ggtgttggtcgattaag

SEQ ID NO: 117514 - DNA, 17 bp, Arabidopsis thaliana
ggtgttgtagaacttat

SEQ ID NO: 117515 - DNA, 17 bp, Arabidopsis thaliana
ggtgttgtctattaggt

SEQ ID NO: 117516 - DNA, 17 bp, Arabidopsis thaliana
ggtgttgtgaagtctac

SEQ ID NO: 117517 - DNA, 17 bp, Arabidopsis thaliana
ggtgttgtgatatcgaa

SEQ ID NO: 117518 - DNA, 17 bp, Arabidopsis thaliana
ggtgttgttatcagact

SEQ ID NO: 117519 - DNA, 17 bp, Arabidopsis thaliana
ggtgttgttgatggtga

SEQ ID NO: 117520 - DNA, 17 bp, Arabidopsis thaliana
ggtgtttaaaatggcca

SEQ ID NO: 117521 - DNA, 17 bp, Arabidopsis thaliana
ggtgtttatcactgtct

SEQ ID NO: 117522 - DNA, 17 bp, Arabidopsis thaliana
ggtgtttccagtggcgg

SEQ ID NO: 117523 - DNA, 17 bp, Arabidopsis thaliana
ggtgtttcctcctccag

SEQ ID NO: 117524 - DNA, 17 bp, Arabidopsis thaliana
ggtgtttcggccggaat

SEQ ID NO: 117525 - DNA, 17 bp, Arabidopsis thaliana
ggtgtttgcttcagcct

SEQ ID NO: 117526 - DNA, 17 bp, Arabidopsis thaliana
ggtgtttggtctagtgg

SEQ ID NO: 117527 - DNA, 17 bp, Arabidopsis thaliana
ggtgtttgtggatttgg

SEQ ID NO: 117528 - DNA, 17 bp, Arabidopsis thaliana
ggtgttttcccaaccga

SEQ ID NO: 117529 - DNA, 17 bp, Arabidopsis thaliana
ggtgttttccccaaccg

SEQ ID NO: 117530 - DNA, 17 bp, Arabidopsis thaliana
ggtgttttctccaaccg

SEQ ID NO: 117531 - DNA, 17 bp, Arabidopsis thaliana
ggtgttttggatgttgt

SEQ ID NO: 117532 - DNA, 17 bp, Arabidopsis thaliana
ggtgttttggctctgag

SEQ ID NO: 117533 - DNA, 17 bp, Arabidopsis thaliana
ggtgttttgttggatca

SEQ ID NO: 117534 - DNA, 17 bp, Arabidopsis thaliana
ggtgtttttcttgctca

SEQ ID NO: 117535 - DNA, 17 bp, Arabidopsis thaliana
ggtgtttttgagtatcc

SEQ ID NO: 117536 - DNA, 17 bp, Arabidopsis thaliana
ggtgtttttggttagtg

SEQ ID NO: 117537 - DNA, 17 bp, Arabidopsis thaliana
ggtgtttttggttatgg

SEQ ID NO: 117538 - DNA, 17 bp, Arabidopsis thaliana
ggtgtttttggttattg

SEQ ID NO: 117539 - DNA, 17 bp, Arabidopsis thaliana
ggttaaaactttatgac

SEQ ID NO: 117540 - DNA, 17 bp, Arabidopsis thaliana
ggttaaatacatcttct

SEQ ID NO: 117541 - DNA, 17 bp, Arabidopsis thaliana
ggttaaccaaatgttcg

SEQ ID NO: 117542 - DNA, 17 bp, Arabidopsis thaliana
ggttaacgttttcctcc

SEQ ID NO: 117543 - DNA, 17 bp, Arabidopsis thaliana
ggttaactccagcgttg

SEQ ID NO: 117544 - DNA, 17 bp, Arabidopsis thaliana
ggttaactggtcggttc

SEQ ID NO: 117545 - DNA, 17 bp, Arabidopsis thaliana
ggttaagacaaagtttg

SEQ ID NO: 117546 - DNA, 17 bp, Arabidopsis thaliana
ggttaagagtttgggtg

SEQ ID NO: 117547 - DNA, 17 bp, Arabidopsis thaliana
ggttaagcataaggttg

SEQ ID NO: 117548 - DNA, 17 bp, Arabidopsis thaliana
ggttaagcctgaaacat

SEQ ID NO: 117549 - DNA, 17 bp, Arabidopsis thaliana
ggttaagcgccttagtt

SEQ ID NO: 117550 - DNA, 17 bp, Arabidopsis thaliana
ggttaaggaagttggtg

SEQ ID NO: 117551 - DNA, 17 bp, Arabidopsis thaliana
ggttaagggttttgtcg

SEQ ID NO: 117552 - DNA, 17 bp, Arabidopsis thaliana
ggttaagtcccgcaacg

SEQ ID NO: 117553 - DNA, 17 bp, Arabidopsis thaliana
ggttaagttcaacatag

SEQ ID NO: 117554 - DNA, 17 bp, Arabidopsis thaliana
ggttaagttttaactac

SEQ ID NO: 117555 - DNA, 17 bp, Arabidopsis thaliana
ggttaatccgacaggtt

SEQ ID NO: 117556 - DNA, 17 bp, Arabidopsis thaliana
ggttaatctcgtttttt

SEQ ID NO: 117557 - DNA, 17 bp, Arabidopsis thaliana
ggttaattagaccgagt

SEQ ID NO: 117558 - DNA, 17 bp, Arabidopsis thaliana
ggttaattcgggttcgg

SEQ ID NO: 117559 - DNA, 17 bp, Arabidopsis thaliana
ggttacaaacgggtttg

SEQ ID NO: 117560 - DNA, 17 bp, Arabidopsis thaliana
ggttacagaaaggcttt

SEQ ID NO: 117561 - DNA, 17 bp, Arabidopsis thaliana
ggttacagattcgggca

SEQ ID NO: 117562 - DNA, 17 bp, Arabidopsis thaliana
ggttacagcggcccaag

SEQ ID NO: 117563 - DNA, 17 bp, Arabidopsis thaliana
ggttacagcggtccaag

SEQ ID NO: 117564 - DNA, 17 bp, Arabidopsis thaliana
ggttacagcttcttcgc

SEQ ID NO: 117565 - DNA, 17 bp, Arabidopsis thaliana
ggttacaggcgagaaga

SEQ ID NO: 117566 - DNA, 17 bp, Arabidopsis thaliana
ggttacagttacgagga

SEQ ID NO: 117567 - DNA, 17 bp, Arabidopsis thaliana
ggttacatatgcagtcc

SEQ ID NO: 117568 - DNA, 17 bp, Arabidopsis thaliana
ggttacatgtgcagaga

SEQ ID NO: 117569 - DNA, 17 bp, Arabidopsis thaliana
ggttaccaatcagaccg

SEQ ID NO: 117570 - DNA, 17 bp, Arabidopsis thaliana
ggttaccaatcagacga

SEQ ID NO: 117571 - DNA, 17 bp, Arabidopsis thaliana
ggttaccaatcagacgg

SEQ ID NO: 117572 - DNA, 17 bp, Arabidopsis thaliana
ggttacccattttgaca

SEQ ID NO: 117573 - DNA, 17 bp, Arabidopsis thaliana
ggttaccccatccttag

SEQ ID NO: 117574 - DNA, 17 bp, Arabidopsis thaliana
ggttacccgttttgaca

SEQ ID NO: 117575 - DNA, 17 bp, Arabidopsis thaliana
ggttacctgcggaagga

SEQ ID NO: 117576 - DNA, 17 bp, Arabidopsis thaliana
ggttacgcttcacagat

SEQ ID NO: 117577 - DNA, 17 bp, Arabidopsis thaliana
ggttacggtgcccaact

SEQ ID NO: 117578 - DNA, 17 bp, Arabidopsis thaliana
ggttacggtggcggcct

SEQ ID NO: 117579 - DNA, 17 bp, Arabidopsis thaliana
ggttacggttggattac

SEQ ID NO: 117580 - DNA, 17 bp, Arabidopsis thaliana
ggttacggtttagttcg

SEQ ID NO: 117581 - DNA, 17 bp, Arabidopsis thaliana
ggttacgtggctatttt

SEQ ID NO: 117582 - DNA, 17 bp, Arabidopsis thaliana
ggttacgtgtgcttcaa

SEQ ID NO: 117583 - DNA, 17 bp, Arabidopsis thaliana
ggttactaatcagaccc

SEQ ID NO: 117584 - DNA, 17 bp, Arabidopsis thaliana
ggttactatcgcacccg

SEQ ID NO: 117585 - DNA, 17 bp, Arabidopsis thaliana
ggttactcatatgccca

SEQ ID NO: 117586 - DNA, 17 bp, Arabidopsis thaliana
ggttactgaacgattct

SEQ ID NO: 117587 - DNA, 17 bp, Arabidopsis thaliana
ggttactgctgattctc

SEQ ID NO: 117588 - DNA, 17 bp, Arabidopsis thaliana
ggttactgcttcagaac

SEQ ID NO: 117589 - DNA, 17 bp, Arabidopsis thaliana
ggttactggatctaatc

SEQ ID NO: 117590 - DNA, 17 bp, Arabidopsis thaliana
ggttactggttggacga

SEQ ID NO: 117591 - DNA, 17 bp, Arabidopsis thaliana
ggttactgtctccattt

SEQ ID NO: 117592 - DNA, 17 bp, Arabidopsis thaliana
ggttactgtgactctga

SEQ ID NO: 117593 - DNA, 17 bp, Arabidopsis thaliana
ggttactgtggtcaccg

SEQ ID NO: 117594 - DNA, 17 bp, Arabidopsis thaliana
ggttacttgtgggactt

SEQ ID NO: 117595 - DNA, 17 bp, Arabidopsis thaliana
ggttactttctctacgc

SEQ ID NO: 117596 - DNA, 17 bp, Arabidopsis thaliana
ggttacttttgcaattc

SEQ ID NO: 117597 - DNA, 17 bp, Arabidopsis thaliana
ggttagaccgtcgtgag

SEQ ID NO: 117598 - DNA, 17 bp, Arabidopsis thaliana
ggttagactgagcttcc

SEQ ID NO: 117599 - DNA, 17 bp, Arabidopsis thaliana
ggttagatggtatgatg

SEQ ID NO: 117600 - DNA, 17 bp, Arabidopsis thaliana
ggttagccacttttcgt

SEQ ID NO: 117601 - DNA, 17 bp, Arabidopsis thaliana
ggttagcccgcttgtgt

SEQ ID NO: 117602 - DNA, 17 bp, Arabidopsis thaliana
ggttagccgaaagatgg

SEQ ID NO: 117603 - DNA, 17 bp, Arabidopsis thaliana
ggttagcgctctgacga

SEQ ID NO: 117604 - DNA, 17 bp, Arabidopsis thaliana
ggttaggaacggtcttg

SEQ ID NO: 117605 - DNA, 17 bp, Arabidopsis thaliana
ggttaggatatctggct

SEQ ID NO: 117606 - DNA, 17 bp, Arabidopsis thaliana
ggttaggccttgggcca

SEQ ID NO: 117607 - DNA, 17 bp, Arabidopsis thaliana
ggttagtccgaatttct

SEQ ID NO: 117608 - DNA, 17 bp, Arabidopsis thaliana
ggttagtcgatcctaag

SEQ ID NO: 117609 - DNA, 17 bp, Arabidopsis thaliana
ggttagtcgatcctgta

SEQ ID NO: 117610 - DNA, 17 bp, Arabidopsis thaliana
ggttagtctctcttgcg

SEQ ID NO: 117611 - DNA, 17 bp, Arabidopsis thaliana
ggttagtgctccaatat

SEQ ID NO: 117612 - DNA, 17 bp, Arabidopsis thaliana
ggttagtgtcgaggcgg

SEQ ID NO: 117613 - DNA, 17 bp, Arabidopsis thaliana
ggttagtgttttcgagt

SEQ ID NO: 117614 - DNA, 17 bp, Arabidopsis thaliana
ggttagttgcggctgcg

SEQ ID NO: 117615 - DNA, 17 bp, Arabidopsis thaliana
ggttatccaaaattctg

SEQ ID NO: 117616 - DNA, 17 bp, Arabidopsis thaliana
ggttatccccttgggtc

SEQ ID NO: 117617 - DNA, 17 bp, Arabidopsis thaliana
ggttatccggtttactc

SEQ ID NO: 117618 - DNA, 17 bp, Arabidopsis thaliana
ggttatcgggtccgtgt

SEQ ID NO: 117619 - DNA, 17 bp, Arabidopsis thaliana
ggttatcgggtccgttt

SEQ ID NO: 117620 - DNA, 17 bp, Arabidopsis thaliana
ggttatcgtttggatct

SEQ ID NO: 117621 - DNA, 17 bp, Arabidopsis thaliana
ggttatctgcagaagct

SEQ ID NO: 117622 - DNA, 17 bp, Arabidopsis thaliana
ggttatgacagacaaat

SEQ ID NO: 117623 - DNA, 17 bp, Arabidopsis thaliana
ggttatgctgcaccgaa

SEQ ID NO: 117624 - DNA, 17 bp, Arabidopsis thaliana
ggttatggaaatctctg

SEQ ID NO: 117625 - DNA, 17 bp, Arabidopsis thaliana
ggttatggctggggcga

SEQ ID NO: 117626 - DNA, 17 bp, Arabidopsis thaliana
ggttatgtctttggagc

SEQ ID NO: 117627 - DNA, 17 bp, Arabidopsis thaliana
ggttattacggttacgg

SEQ ID NO: 117628 - DNA, 17 bp, Arabidopsis thaliana
ggttattagcggttggc

SEQ ID NO: 117629 - DNA, 17 bp, Arabidopsis thaliana
ggttattatctgcacgt

SEQ ID NO: 117630 - DNA, 17 bp, Arabidopsis thaliana
ggttattcaccatgtac

SEQ ID NO: 117631 - DNA, 17 bp, Arabidopsis thaliana
ggttattcggtcatgtg

SEQ ID NO: 117632 - DNA, 17 bp, Arabidopsis thaliana
ggttattgcccactgca

SEQ ID NO: 117633 - DNA, 17 bp, Arabidopsis thaliana
ggttattggaacacggt

SEQ ID NO: 117634 - DNA, 17 bp, Arabidopsis thaliana
ggttattggaacccggt

SEQ ID NO: 117635 - DNA, 17 bp, Arabidopsis thaliana
ggttattgggccgcatg

SEQ ID NO: 117636 - DNA, 17 bp, Arabidopsis thaliana
ggttatttccaactttc

SEQ ID NO: 117637 - DNA, 17 bp, Arabidopsis thaliana
ggttatttcccagtgtg

SEQ ID NO: 117638 - DNA, 17 bp, Arabidopsis thaliana
ggttattttggccgatt

SEQ ID NO: 117639 - DNA, 17 bp, Arabidopsis thaliana
ggttattttgtggtgac

SEQ ID NO: 117640 - DNA, 17 bp, Arabidopsis thaliana
ggttcaaaccccacttc

SEQ ID NO: 117641 - DNA, 17 bp, Arabidopsis thaliana
ggttcaaactgcttctc

SEQ ID NO: 117642 - DNA, 17 bp, Arabidopsis thaliana
ggttcaaagaggatgtc

SEQ ID NO: 117643 - DNA, 17 bp, Arabidopsis thaliana
ggttcaaagtaatgtgc

SEQ ID NO: 117644 - DNA, 17 bp, Arabidopsis thaliana
ggttcaaatccaggatg

SEQ ID NO: 117645 - DNA, 17 bp, Arabidopsis thaliana
ggttcaaatcccacagc

SEQ ID NO: 117646 - DNA, 17 bp, Arabidopsis thaliana
ggttcaaatcccacagt

SEQ ID NO: 117647 - DNA, 17 bp, Arabidopsis thaliana
ggttcaaatcccactct

SEQ ID NO: 117648 - DNA, 17 bp, Arabidopsis thaliana
ggttcaaatcctacaga

SEQ ID NO: 117649 - DNA, 17 bp, Arabidopsis thaliana
ggttcaaatcctacttg

SEQ ID NO: 117650 - DNA, 17 bp, Arabidopsis thaliana
ggttcaaatcctattgg

SEQ ID NO: 117651 - DNA, 17 bp, Arabidopsis thaliana
ggttcaaatcctgtcat

SEQ ID NO: 117652 - DNA, 17 bp, Arabidopsis thaliana
ggttcaaattccaaagg

SEQ ID NO: 117653 - DNA, 17 bp, Arabidopsis thaliana
ggttcaaattttctacg

SEQ ID NO: 117654 - DNA, 17 bp, Arabidopsis thaliana
ggttcaacagtaactac

SEQ ID NO: 117655 - DNA, 17 bp, Arabidopsis thaliana
ggttcaaccgattcacc

SEQ ID NO: 117656 - DNA, 17 bp, Arabidopsis thaliana
ggttcaacgatcaaaag

SEQ ID NO: 117657 - DNA, 17 bp, Arabidopsis thaliana
ggttcaacgtcccgcat

SEQ ID NO: 117658 - DNA, 17 bp, Arabidopsis thaliana
ggttcaactacgagctt

SEQ ID NO: 117659 - DNA, 17 bp, Arabidopsis thaliana
ggttcaactgcggtacg

SEQ ID NO: 117660 - DNA, 17 bp, Arabidopsis thaliana
ggttcaacttgcaagga

SEQ ID NO: 117661 - DNA, 17 bp, Arabidopsis thaliana
ggttcaagaatatctgg

SEQ ID NO: 117662 - DNA, 17 bp, Arabidopsis thaliana
ggttcaagaggattgac

SEQ ID NO: 117663 - DNA, 17 bp, Arabidopsis thaliana
ggttcaaggacttaggg

SEQ ID NO: 117664 - DNA, 17 bp, Arabidopsis thaliana
ggttcaaggccggttca

SEQ ID NO: 117665 - DNA, 17 bp, Arabidopsis thaliana
ggttcaaggctggttca

SEQ ID NO: 117666 - DNA, 17 bp, Arabidopsis thaliana
ggttcaaggctggttga

SEQ ID NO: 117667 - DNA, 17 bp, Arabidopsis thaliana
ggttcaagtccctcctt

SEQ ID NO: 117668 - DNA, 17 bp, Arabidopsis thaliana
ggttcaagtccctctat

SEQ ID NO: 117669 - DNA, 17 bp, Arabidopsis thaliana
ggttcaagtcctcttca

SEQ ID NO: 117670 - DNA, 17 bp, Arabidopsis thaliana
ggttcaagtctaccggt

SEQ ID NO: 117671 - DNA, 17 bp, Arabidopsis thaliana
ggttcaagttgtatccg

SEQ ID NO: 117672 - DNA, 17 bp, Arabidopsis thaliana
ggttcaagtttaaccta

SEQ ID NO: 117673 - DNA, 17 bp, Arabidopsis thaliana
ggttcaatgctggaata

SEQ ID NO: 117674 - DNA, 17 bp, Arabidopsis thaliana
ggttcaattcacagttg

SEQ ID NO: 117675 - DNA, 17 bp, Arabidopsis thaliana
ggttcaattcccgtcag

SEQ ID NO: 117676 - DNA, 17 bp, Arabidopsis thaliana
ggttcaattcccgtcgg

SEQ ID NO: 117677 - DNA, 17 bp, Arabidopsis thaliana
ggttcaattcccgtcgt

SEQ ID NO: 117678 - DNA, 17 bp, Arabidopsis thaliana
ggttcaattcctcgcgg

SEQ ID NO: 117679 - DNA, 17 bp, Arabidopsis thaliana
ggttcaattggaggcgt

SEQ ID NO: 117680 - DNA, 17 bp, Arabidopsis thaliana
ggttcaatttggttctg

SEQ ID NO: 117681 - DNA, 17 bp, Arabidopsis thaliana
ggttcacaatgcgttct

SEQ ID NO: 117682 - DNA, 17 bp, Arabidopsis thaliana
ggttcacatcagcttca

SEQ ID NO: 117683 - DNA, 17 bp, Arabidopsis thaliana
ggttcacatcccacagt

SEQ ID NO: 117684 - DNA, 17 bp, Arabidopsis thaliana
ggttcaccatcggtggt

SEQ ID NO: 117685 - DNA, 17 bp, Arabidopsis thaliana
ggttcacccctagggat

SEQ ID NO: 117686 - DNA, 17 bp, Arabidopsis thaliana
ggttcacccgggctcag

SEQ ID NO: 117687 - DNA, 17 bp, Arabidopsis thaliana
ggttcacctctctttct

SEQ ID NO: 117688 - DNA, 17 bp, Arabidopsis thaliana
ggttcacgaaggcaatc

SEQ ID NO: 117689 - DNA, 17 bp, Arabidopsis thaliana
ggttcacgggattctgc

SEQ ID NO: 117690 - DNA, 17 bp, Arabidopsis thaliana
ggttcacggggatttgt

SEQ ID NO: 117691 - DNA, 17 bp, Arabidopsis thaliana
ggttcactctgtagaca

SEQ ID NO: 117692 - DNA, 17 bp, Arabidopsis thaliana
ggttcactggatcatgg

SEQ ID NO: 117693 - DNA, 17 bp, Arabidopsis thaliana
ggttcagaaatcaaggc

SEQ ID NO: 117694 - DNA, 17 bp, Arabidopsis thaliana
ggttcagaactgtgact

SEQ ID NO: 117695 - DNA, 17 bp, Arabidopsis thaliana
ggttcagacatttcatc

SEQ ID NO: 117696 - DNA, 17 bp, Arabidopsis thaliana
ggttcagatcataggcc

SEQ ID NO: 117697 - DNA, 17 bp, Arabidopsis thaliana
ggttcagatcccacagc

SEQ ID NO: 117698 - DNA, 17 bp, Arabidopsis thaliana
ggttcagatcccacagt

SEQ ID NO: 117699 - DNA, 17 bp, Arabidopsis thaliana
ggttcagatcgccgacg

SEQ ID NO: 117700 - DNA, 17 bp, Arabidopsis thaliana
ggttcagcacagaattt

SEQ ID NO: 117701 - DNA, 17 bp, Arabidopsis thaliana
ggttcagcacggctaac

SEQ ID NO: 117702 - DNA, 17 bp, Arabidopsis thaliana
ggttcagccctttgtcg

SEQ ID NO: 117703 - DNA, 17 bp, Arabidopsis thaliana
ggttcagcccttttcgc

SEQ ID NO: 117704 - DNA, 17 bp, Arabidopsis thaliana
ggttcagcgtatcacag

SEQ ID NO: 117705 - DNA, 17 bp, Arabidopsis thaliana
ggttcaggcaatgagat

SEQ ID NO: 117706 - DNA, 17 bp, Arabidopsis thaliana
ggttcaggcagtgtggt

SEQ ID NO: 117707 - DNA, 17 bp, Arabidopsis thaliana
ggttcaggccctccttc

SEQ ID NO: 117708 - DNA, 17 bp, Arabidopsis thaliana
ggttcaggtcccaccgg

SEQ ID NO: 117709 - DNA, 17 bp, Arabidopsis thaliana
ggttcaggtctggggga

SEQ ID NO: 117710 - DNA, 17 bp, Arabidopsis thaliana
ggttcagttgccgtaga

SEQ ID NO: 117711 - DNA, 17 bp, Arabidopsis thaliana
ggttcagttggttttcc

SEQ ID NO: 117712 - DNA, 17 bp, Arabidopsis thaliana
ggttcagtttggaggca

SEQ ID NO: 117713 - DNA, 17 bp, Arabidopsis thaliana
ggttcatacaaccgagc

SEQ ID NO: 117714 - DNA, 17 bp, Arabidopsis thaliana
ggttcataccccacttc

SEQ ID NO: 117715 - DNA, 17 bp, Arabidopsis thaliana
ggttcatactgacgcgt

SEQ ID NO: 117716 - DNA, 17 bp, Arabidopsis thaliana
ggttcatatcccaaagt

SEQ ID NO: 117717 - DNA, 17 bp, Arabidopsis thaliana
ggttcatatcccacagc

SEQ ID NO: 117718 - DNA, 17 bp, Arabidopsis thaliana
ggttcatatcccacagt

SEQ ID NO: 117719 - DNA, 17 bp, Arabidopsis thaliana
ggttcatatcccactct

SEQ ID NO: 117720 - DNA, 17 bp, Arabidopsis thaliana
ggttcatcaaccagggt

SEQ ID NO: 117721 - DNA, 17 bp, Arabidopsis thaliana
ggttcatcactttagca

SEQ ID NO: 117722 - DNA, 17 bp, Arabidopsis thaliana
ggttcatcagcgagagc

SEQ ID NO: 117723 - DNA, 17 bp, Arabidopsis thaliana
ggttcatcatttaagcc

SEQ ID NO: 117724 - DNA, 17 bp, Arabidopsis thaliana
ggttcatcccacaattg

SEQ ID NO: 117725 - DNA, 17 bp, Arabidopsis thaliana
ggttcatcccacagctc

SEQ ID NO: 117726 - DNA, 17 bp, Arabidopsis thaliana
ggttcatcccacagctg

SEQ ID NO: 117727 - DNA, 17 bp, Arabidopsis thaliana
ggttcatcccacagttg

SEQ ID NO: 117728 - DNA, 17 bp, Arabidopsis thaliana
ggttcatcccacatctg

SEQ ID NO: 117729 - DNA, 17 bp, Arabidopsis thaliana
ggttcatcccactgggt

SEQ ID NO: 117730 - DNA, 17 bp, Arabidopsis thaliana
ggttcatcccgcagctg

SEQ ID NO: 117731 - DNA, 17 bp, Arabidopsis thaliana
ggttcatccctcagttg

SEQ ID NO: 117732 - DNA, 17 bp, Arabidopsis thaliana
ggttcatcttatttttg

SEQ ID NO: 117733 - DNA, 17 bp, Arabidopsis thaliana
ggttcatgagttgagtt

SEQ ID NO: 117734 - DNA, 17 bp, Arabidopsis thaliana
ggttcatgagttgcgtt

SEQ ID NO: 117735 - DNA, 17 bp, Arabidopsis thaliana
ggttcatgccctccttc

SEQ ID NO: 117736 - DNA, 17 bp, Arabidopsis thaliana
ggttcatggaaatcttc

SEQ ID NO: 117737 - DNA, 17 bp, Arabidopsis thaliana
ggttcatggattgagtt

SEQ ID NO: 117738 - DNA, 17 bp, Arabidopsis thaliana
ggttcatgggttgagct

SEQ ID NO: 117739 - DNA, 17 bp, Arabidopsis thaliana
ggttcatgggttgagtt

SEQ ID NO: 117740 - DNA, 17 bp, Arabidopsis thaliana
ggttcattaatgcttct

SEQ ID NO: 117741 - DNA, 17 bp, Arabidopsis thaliana
ggttcattcactctgcc

SEQ ID NO: 117742 - DNA, 17 bp, Arabidopsis thaliana
ggttcattcagatgatc

SEQ ID NO: 117743 - DNA, 17 bp, Arabidopsis thaliana
ggttcattcttgacgcg

SEQ ID NO: 117744 - DNA, 17 bp, Arabidopsis thaliana
ggttcatttcccggctg

SEQ ID NO: 117745 - DNA, 17 bp, Arabidopsis thaliana
ggttcatttgactggac

SEQ ID NO: 117746 - DNA, 17 bp, Arabidopsis thaliana
ggttccaagatcttcat

SEQ ID NO: 117747 - DNA, 17 bp, Arabidopsis thaliana
ggttccaagctttccaa

SEQ ID NO: 117748 - DNA, 17 bp, Arabidopsis thaliana
ggttccaagctttctaa

SEQ ID NO: 117749 - DNA, 17 bp, Arabidopsis thaliana
ggttccaagtgtggtaa

SEQ ID NO: 117750 - DNA, 17 bp, Arabidopsis thaliana
ggttccaatggtgagag

SEQ ID NO: 117751 - DNA, 17 bp, Arabidopsis thaliana
ggttccacatcggtccg

SEQ ID NO: 117752 - DNA, 17 bp, Arabidopsis thaliana
ggttccacccaaattct

SEQ ID NO: 117753 - DNA, 17 bp, Arabidopsis thaliana
ggttccactaagcagat

SEQ ID NO: 117754 - DNA, 17 bp, Arabidopsis thaliana
ggttccagatttactct

SEQ ID NO: 117755 - DNA, 17 bp, Arabidopsis thaliana
ggttccagcgtcagcga

SEQ ID NO: 117756 - DNA, 17 bp, Arabidopsis thaliana
ggttccagttacgcttg

SEQ ID NO: 117757 - DNA, 17 bp, Arabidopsis thaliana
ggttccagttcggacaa

SEQ ID NO: 117758 - DNA, 17 bp, Arabidopsis thaliana
ggttccatagaatcgat

SEQ ID NO: 117759 - DNA, 17 bp, Arabidopsis thaliana
ggttccatatttgtgcc

SEQ ID NO: 117760 - DNA, 17 bp, Arabidopsis thaliana
ggttccatcttatttga

SEQ ID NO: 117761 - DNA, 17 bp, Arabidopsis thaliana
ggttccatggtctagcg

SEQ ID NO: 117762 - DNA, 17 bp, Arabidopsis thaliana
ggttccattatcacaaa

SEQ ID NO: 117763 - DNA, 17 bp, Arabidopsis thaliana
ggttcccacggactgcc

SEQ ID NO: 117764 - DNA, 17 bp, Arabidopsis thaliana
ggttcccatctagcggt

SEQ ID NO: 117765 - DNA, 17 bp, Arabidopsis thaliana
ggttcccccctctctct

SEQ ID NO: 117766 - DNA, 17 bp, Arabidopsis thaliana
ggttccccctacctgac

SEQ ID NO: 117767 - DNA, 17 bp, Arabidopsis thaliana
ggttccccctacctgcc

SEQ ID NO: 117768 - DNA, 17 bp, Arabidopsis thaliana
ggttccccctacctggc

SEQ ID NO: 117769 - DNA, 17 bp, Arabidopsis thaliana
ggttccccctccctgcc

SEQ ID NO: 117770 - DNA, 17 bp, Arabidopsis thaliana
ggttccccctccttcta

SEQ ID NO: 117771 - DNA, 17 bp, Arabidopsis thaliana
ggttccccctctctctc

SEQ ID NO: 117772 - DNA, 17 bp, Arabidopsis thaliana
ggttccccgccgagtgc

SEQ ID NO: 117773 - DNA, 17 bp, Arabidopsis thaliana
ggttcccctctctctat

SEQ ID NO: 117774 - DNA, 17 bp, Arabidopsis thaliana
ggttcccctgtataggc

SEQ ID NO: 117775 - DNA, 17 bp, Arabidopsis thaliana
ggttcccgaatgactct

SEQ ID NO: 117776 - DNA, 17 bp, Arabidopsis thaliana
ggttcccggctggtgca

SEQ ID NO: 117777 - DNA, 17 bp, Arabidopsis thaliana
ggttccgaacagtctgt

SEQ ID NO: 117778 - DNA, 17 bp, Arabidopsis thaliana
ggttccgaattatgacc

SEQ ID NO: 117779 - DNA, 17 bp, Arabidopsis thaliana
ggttccgactaagcgtt

SEQ ID NO: 117780 - DNA, 17 bp, Arabidopsis thaliana
ggttccgatgtgggaca

SEQ ID NO: 117781 - DNA, 17 bp, Arabidopsis thaliana
ggttccgatgtgggact

SEQ ID NO: 117782 - DNA, 17 bp, Arabidopsis thaliana
ggttccgattcgggttt

SEQ ID NO: 117783 - DNA, 17 bp, Arabidopsis thaliana
ggttccgatttggataa

SEQ ID NO: 117784 - DNA, 17 bp, Arabidopsis thaliana
ggttccgcagttctagc

SEQ ID NO: 117785 - DNA, 17 bp, Arabidopsis thaliana
ggttccgcatcctgtag

SEQ ID NO: 117786 - DNA, 17 bp, Arabidopsis thaliana
ggttccgcctctcggag

SEQ ID NO: 117787 - DNA, 17 bp, Arabidopsis thaliana
ggttccggctaaccggc

SEQ ID NO: 117788 - DNA, 17 bp, Arabidopsis thaliana
ggttccggctaattatc

SEQ ID NO: 117789 - DNA, 17 bp, Arabidopsis thaliana
ggttccggggggagtat

SEQ ID NO: 117790 - DNA, 17 bp, Arabidopsis thaliana
ggttccgttgtcttcac

SEQ ID NO: 117791 - DNA, 17 bp, Arabidopsis thaliana
ggttccgttgttgcgct

SEQ ID NO: 117792 - DNA, 17 bp, Arabidopsis thaliana
ggttcctcagaccaagt

SEQ ID NO: 117793 - DNA, 17 bp, Arabidopsis thaliana
ggttcctcccggtagga

SEQ ID NO: 117794 - DNA, 17 bp, Arabidopsis thaliana
ggttcctgccagtggcg

SEQ ID NO: 117795 - DNA, 17 bp, Arabidopsis thaliana
ggttccttaacagggtc

SEQ ID NO: 117796 - DNA, 17 bp, Arabidopsis thaliana
ggttccttagctcagtg

SEQ ID NO: 117797 - DNA, 17 bp, Arabidopsis thaliana
ggttccttcaatatggt

SEQ ID NO: 117798 - DNA, 17 bp, Arabidopsis thaliana
ggttccttggattccga

SEQ ID NO: 117799 - DNA, 17 bp, Arabidopsis thaliana
ggttcctttttgtgcct

SEQ ID NO: 117800 - DNA, 17 bp, Arabidopsis thaliana
ggttcgaacccgggcga

SEQ ID NO: 117801 - DNA, 17 bp, Arabidopsis thaliana
ggttcgaacccgggctc

SEQ ID NO: 117802 - DNA, 17 bp, Arabidopsis thaliana
ggttcgaacccggttga

SEQ ID NO: 117803 - DNA, 17 bp, Arabidopsis thaliana
ggttcgaacccggttgg

SEQ ID NO: 117804 - DNA, 17 bp, Arabidopsis thaliana
ggttcgaaccctgctgt

SEQ ID NO: 117805 - DNA, 17 bp, Arabidopsis thaliana
ggttcgaagcccgtaat

SEQ ID NO: 117806 - DNA, 17 bp, Arabidopsis thaliana
ggttcgaatcccactgg

SEQ ID NO: 117807 - DNA, 17 bp, Arabidopsis thaliana
ggttcgaatcccgtcgg

SEQ ID NO: 117808 - DNA, 17 bp, Arabidopsis thaliana
ggttcgaatccctctcc

SEQ ID NO: 117809 - DNA, 17 bp, Arabidopsis thaliana
ggttcgaatccgctagg

SEQ ID NO: 117810 - DNA, 17 bp, Arabidopsis thaliana
ggttcgaatccggtagg

SEQ ID NO: 117811 - DNA, 17 bp, Arabidopsis thaliana
ggttcgaatccggttgg

SEQ ID NO: 117812 - DNA, 17 bp, Arabidopsis thaliana
ggttcgaatcctacttg

SEQ ID NO: 117813 - DNA, 17 bp, Arabidopsis thaliana
ggttcgaatcctgccgt

SEQ ID NO: 117814 - DNA, 17 bp, Arabidopsis thaliana
ggttcgaatcctgctgt

SEQ ID NO: 117815 - DNA, 17 bp, Arabidopsis thaliana
ggttcgaatccttccgt

SEQ ID NO: 117816 - DNA, 17 bp, Arabidopsis thaliana
ggttcgacccccccttc

SEQ ID NO: 117817 - DNA, 17 bp, Arabidopsis thaliana
ggttcgaccccccttct

SEQ ID NO: 117818 - DNA, 17 bp, Arabidopsis thaliana
ggttcgacccctacctg

SEQ ID NO: 117819 - DNA, 17 bp, Arabidopsis thaliana
ggttcgacccctccctc

SEQ ID NO: 117820 - DNA, 17 bp, Arabidopsis thaliana
ggttcgaccgcgaaatt

SEQ ID NO: 117821 - DNA, 17 bp, Arabidopsis thaliana
ggttcgacctaggtgcg

SEQ ID NO: 117822 - DNA, 17 bp, Arabidopsis thaliana
ggttcgactttcttttc

SEQ ID NO: 117823 - DNA, 17 bp, Arabidopsis thaliana
ggttcgagccccgccgg

SEQ ID NO: 117824 - DNA, 17 bp, Arabidopsis thaliana
ggttcgagccccgtcac

SEQ ID NO: 117825 - DNA, 17 bp, Arabidopsis thaliana
ggttcgagccccgtcag

SEQ ID NO: 117826 - DNA, 17 bp, Arabidopsis thaliana
ggttcgagcggctttca

SEQ ID NO: 117827 - DNA, 17 bp, Arabidopsis thaliana
ggttcgagtcccaccgg

SEQ ID NO: 117828 - DNA, 17 bp, Arabidopsis thaliana
ggttcgagtcccactgg

SEQ ID NO: 117829 - DNA, 17 bp, Arabidopsis thaliana
ggttcgagtccgagtaa

SEQ ID NO: 117830 - DNA, 17 bp, Arabidopsis thaliana
ggttcgagtccgagtag

SEQ ID NO: 117831 - DNA, 17 bp, Arabidopsis thaliana
ggttcgagtccgcttat

SEQ ID NO: 117832 - DNA, 17 bp, Arabidopsis thaliana
ggttcgagtccgtagcc

SEQ ID NO: 117833 - DNA, 17 bp, Arabidopsis thaliana
ggttcgagtccgtatag

SEQ ID NO: 117834 - DNA, 17 bp, Arabidopsis thaliana
ggttcgagtcctcttca

SEQ ID NO: 117835 - DNA, 17 bp, Arabidopsis thaliana
ggttcgagttcaggtac

SEQ ID NO: 117836 - DNA, 17 bp, Arabidopsis thaliana
ggttcgatccccacaga

SEQ ID NO: 117837 - DNA, 17 bp, Arabidopsis thaliana
ggttcgatcccgcttgg

SEQ ID NO: 117838 - DNA, 17 bp, Arabidopsis thaliana
ggttcgatccctgtaca

SEQ ID NO: 117839 - DNA, 17 bp, Arabidopsis thaliana
ggttcgatccctgtata

SEQ ID NO: 117840 - DNA, 17 bp, Arabidopsis thaliana
ggttcgatccctgttta

SEQ ID NO: 117841 - DNA, 17 bp, Arabidopsis thaliana
ggttcgattccccgcat

SEQ ID NO: 117842 - DNA, 17 bp, Arabidopsis thaliana
ggttcgattcccgcccg

SEQ ID NO: 117843 - DNA, 17 bp, Arabidopsis thaliana
ggttcgattcccgcctg

SEQ ID NO: 117844 - DNA, 17 bp, Arabidopsis thaliana
ggttcgattcccgctac

SEQ ID NO: 117845 - DNA, 17 bp, Arabidopsis thaliana
ggttcgattcccgctat

SEQ ID NO: 117846 - DNA, 17 bp, Arabidopsis thaliana
ggttcgattcccgctct

SEQ ID NO: 117847 - DNA, 17 bp, Arabidopsis thaliana
ggttcgattcccgcttt

SEQ ID NO: 117848 - DNA, 17 bp, Arabidopsis thaliana
ggttcgattcccgtaag

SEQ ID NO: 117849 - DNA, 17 bp, Arabidopsis thaliana
ggttcgattcccgtctt

SEQ ID NO: 117850 - DNA, 17 bp, Arabidopsis thaliana
ggttcgattcccgttat

SEQ ID NO: 117851 - DNA, 17 bp, Arabidopsis thaliana
ggttcgattccgatagc

SEQ ID NO: 117852 - DNA, 17 bp, Arabidopsis thaliana
ggttcgattccggagag

SEQ ID NO: 117853 - DNA, 17 bp, Arabidopsis thaliana
ggttcgattccggcagg

SEQ ID NO: 117854 - DNA, 17 bp, Arabidopsis thaliana
ggttcgatttccgctac

SEQ ID NO: 117855 - DNA, 17 bp, Arabidopsis thaliana
ggttcgatttcgattca

SEQ ID NO: 117856 - DNA, 17 bp, Arabidopsis thaliana
ggttcgcattcctcgca

SEQ ID NO: 117857 - DNA, 17 bp, Arabidopsis thaliana
ggttcgccagttgactt

SEQ ID NO: 117858 - DNA, 17 bp, Arabidopsis thaliana
ggttcgccccctacctg

SEQ ID NO: 117859 - DNA, 17 bp, Arabidopsis thaliana
ggttcgcctcccggtag

SEQ ID NO: 117860 - DNA, 17 bp, Arabidopsis thaliana
ggttcgcgacacaggca

SEQ ID NO: 117861 - DNA, 17 bp, Arabidopsis thaliana
ggttcgcgtcccaccgg

SEQ ID NO: 117862 - DNA, 17 bp, Arabidopsis thaliana
ggttcgctaacccgtcc

SEQ ID NO: 117863 - DNA, 17 bp, Arabidopsis thaliana
ggttcgctgatgtcgac

SEQ ID NO: 117864 - DNA, 17 bp, Arabidopsis thaliana
ggttcggaacctgcatg

SEQ ID NO: 117865 - DNA, 17 bp, Arabidopsis thaliana
ggttcggaactgggacc

SEQ ID NO: 117866 - DNA, 17 bp, Arabidopsis thaliana
ggttcggacccgggcga

SEQ ID NO: 117867 - DNA, 17 bp, Arabidopsis thaliana
ggttcggacccgggctc

SEQ ID NO: 117868 - DNA, 17 bp, Arabidopsis thaliana
ggttcggacgtcggttg

SEQ ID NO: 117869 - DNA, 17 bp, Arabidopsis thaliana
ggttcggacttgggtag

SEQ ID NO: 117870 - DNA, 17 bp, Arabidopsis thaliana
ggttcggatccggtagg

SEQ ID NO: 117871 - DNA, 17 bp, Arabidopsis thaliana
ggttcggattcgggtcg

SEQ ID NO: 117872 - DNA, 17 bp, Arabidopsis thaliana
ggttcggccaatgacat

SEQ ID NO: 117873 - DNA, 17 bp, Arabidopsis thaliana
ggttcggcccactgggt

SEQ ID NO: 117874 - DNA, 17 bp, Arabidopsis thaliana
ggttcggctcccggcag

SEQ ID NO: 117875 - DNA, 17 bp, Arabidopsis thaliana
ggttcggctcccggtag

SEQ ID NO: 117876 - DNA, 17 bp, Arabidopsis thaliana
ggttcggcttggttcac

SEQ ID NO: 117877 - DNA, 17 bp, Arabidopsis thaliana
ggttcgggtcccaccga

SEQ ID NO: 117878 - DNA, 17 bp, Arabidopsis thaliana
ggttcgggtcccaccgg

SEQ ID NO: 117879 - DNA, 17 bp, Arabidopsis thaliana
ggttcgggtcccaccgt

SEQ ID NO: 117880 - DNA, 17 bp, Arabidopsis thaliana
ggttcgggtcccactgg

SEQ ID NO: 117881 - DNA, 17 bp, Arabidopsis thaliana
ggttcgggtcccggcaa

SEQ ID NO: 117882 - DNA, 17 bp, Arabidopsis thaliana
ggttcgggtcccggcga

SEQ ID NO: 117883 - DNA, 17 bp, Arabidopsis thaliana
ggttcgggtcggttcgg

SEQ ID NO: 117884 - DNA, 17 bp, Arabidopsis thaliana
ggttcgggttgggctat

SEQ ID NO: 117885 - DNA, 17 bp, Arabidopsis thaliana
ggttcgggtttttcggg

SEQ ID NO: 117886 - DNA, 17 bp, Arabidopsis thaliana
ggttcggtccagtttgg

SEQ ID NO: 117887 - DNA, 17 bp, Arabidopsis thaliana
ggttcggtcccaccggg

SEQ ID NO: 117888 - DNA, 17 bp, Arabidopsis thaliana
ggttcggtcccatcggg

SEQ ID NO: 117889 - DNA, 17 bp, Arabidopsis thaliana
ggttcggtccccacaga

SEQ ID NO: 117890 - DNA, 17 bp, Arabidopsis thaliana
ggttcggtccccagcag

SEQ ID NO: 117891 - DNA, 17 bp, Arabidopsis thaliana
ggttcggtccctgtata

SEQ ID NO: 117892 - DNA, 17 bp, Arabidopsis thaliana
ggttcggtctatcaagt

SEQ ID NO: 117893 - DNA, 17 bp, Arabidopsis thaliana
ggttcggtgtcggttcg

SEQ ID NO: 117894 - DNA, 17 bp, Arabidopsis thaliana
ggttcggttcccggctg

SEQ ID NO: 117895 - DNA, 17 bp, Arabidopsis thaliana
ggttcggttcgttagca

SEQ ID NO: 117896 - DNA, 17 bp, Arabidopsis thaliana
ggttcgtaaatgggata

SEQ ID NO: 117897 - DNA, 17 bp, Arabidopsis thaliana
ggttcgtaatatagccc

SEQ ID NO: 117898 - DNA, 17 bp, Arabidopsis thaliana
ggttcgtaccccacagc

SEQ ID NO: 117899 - DNA, 17 bp, Arabidopsis thaliana
ggttcgtacccgggcga

SEQ ID NO: 117900 - DNA, 17 bp, Arabidopsis thaliana
ggttcgtacccgggctc

SEQ ID NO: 117901 - DNA, 17 bp, Arabidopsis thaliana
ggttcgtacccggttga

SEQ ID NO: 117902 - DNA, 17 bp, Arabidopsis thaliana
ggttcgtaccctgctgt

SEQ ID NO: 117903 - DNA, 17 bp, Arabidopsis thaliana
ggttcgtagattcagga

SEQ ID NO: 117904 - DNA, 17 bp, Arabidopsis thaliana
ggttcgtatccatccag

SEQ ID NO: 117905 - DNA, 17 bp, Arabidopsis thaliana
ggttcgtatcccactgg

SEQ ID NO: 117906 - DNA, 17 bp, Arabidopsis thaliana
ggttcgtatccggtagg

SEQ ID NO: 117907 - DNA, 17 bp, Arabidopsis thaliana
ggttcgtatccggttgg

SEQ ID NO: 117908 - DNA, 17 bp, Arabidopsis thaliana
ggttcgtatcctgccct

SEQ ID NO: 117909 - DNA, 17 bp, Arabidopsis thaliana
ggttcgtatcctgccgc

SEQ ID NO: 117910 - DNA, 17 bp, Arabidopsis thaliana
ggttcgtatcctgctgt

SEQ ID NO: 117911 - DNA, 17 bp, Arabidopsis thaliana
ggttcgtccacggaggg

SEQ ID NO: 117912 - DNA, 17 bp, Arabidopsis thaliana
ggttcgtcccaccgggt

SEQ ID NO: 117913 - DNA, 17 bp, Arabidopsis thaliana
ggttcgtcccaccgtgg

SEQ ID NO: 117914 - DNA, 17 bp, Arabidopsis thaliana
ggttcgtcccactgggt

SEQ ID NO: 117915 - DNA, 17 bp, Arabidopsis thaliana
ggttcgtcccactgtgt

SEQ ID NO: 117916 - DNA, 17 bp, Arabidopsis thaliana
ggttcgtccccggcaac

SEQ ID NO: 117917 - DNA, 17 bp, Arabidopsis thaliana
ggttcgtcccctctctc

SEQ ID NO: 117918 - DNA, 17 bp, Arabidopsis thaliana
ggttcgtcccggcaacg

SEQ ID NO: 117919 - DNA, 17 bp, Arabidopsis thaliana
ggttcgtcccggcgacg

SEQ ID NO: 117920 - DNA, 17 bp, Arabidopsis thaliana
ggttcgtccctctgggt

SEQ ID NO: 117921 - DNA, 17 bp, Arabidopsis thaliana
ggttcgtcggatggatc

SEQ ID NO: 117922 - DNA, 17 bp, Arabidopsis thaliana
ggttcgtctcccggctg

SEQ ID NO: 117923 - DNA, 17 bp, Arabidopsis thaliana
ggttcgtctcccggtag

SEQ ID NO: 117924 - DNA, 17 bp, Arabidopsis thaliana
ggttcgtctgtaactgt

SEQ ID NO: 117925 - DNA, 17 bp, Arabidopsis thaliana
ggttcgtgccccacggt

SEQ ID NO: 117926 - DNA, 17 bp, Arabidopsis thaliana
ggttcgtgccccgccgg

SEQ ID NO: 117927 - DNA, 17 bp, Arabidopsis thaliana
ggttcgtgtcccaccgg

SEQ ID NO: 117928 - DNA, 17 bp, Arabidopsis thaliana
ggttcgtgtcccaccgt

SEQ ID NO: 117929 - DNA, 17 bp, Arabidopsis thaliana
ggttcgtgtcccactga

SEQ ID NO: 117930 - DNA, 17 bp, Arabidopsis thaliana
ggttcgtgtcccactgg

SEQ ID NO: 117931 - DNA, 17 bp, Arabidopsis thaliana
ggttcgtgtcccggcaa

SEQ ID NO: 117932 - DNA, 17 bp, Arabidopsis thaliana
ggttcgtgtcccggcga

SEQ ID NO: 117933 - DNA, 17 bp, Arabidopsis thaliana
ggttcgtgtctcaccgg

SEQ ID NO: 117934 - DNA, 17 bp, Arabidopsis thaliana
ggttcgtgtctcggcga

SEQ ID NO: 117935 - DNA, 17 bp, Arabidopsis thaliana
ggttcgttccccacaga

SEQ ID NO: 117936 - DNA, 17 bp, Arabidopsis thaliana
ggttcgttcccccaacc

SEQ ID NO: 117937 - DNA, 17 bp, Arabidopsis thaliana
ggttcgttcccccaacg

SEQ ID NO: 117938 - DNA, 17 bp, Arabidopsis thaliana
ggttcgttccccggcaa

SEQ ID NO: 117939 - DNA, 17 bp, Arabidopsis thaliana
ggttcgttccctgtata

SEQ ID NO: 117940 - DNA, 17 bp, Arabidopsis thaliana
ggttcgttccctgttta

SEQ ID NO: 117941 - DNA, 17 bp, Arabidopsis thaliana
ggttcgtttcccgctgg

SEQ ID NO: 117942 - DNA, 17 bp, Arabidopsis thaliana
ggttcgtttcccggcaa

SEQ ID NO: 117943 - DNA, 17 bp, Arabidopsis thaliana
ggttcgtttcccggcat

SEQ ID NO: 117944 - DNA, 17 bp, Arabidopsis thaliana
ggttcgtttcccggccg

SEQ ID NO: 117945 - DNA, 17 bp, Arabidopsis thaliana
ggttcgtttcccggctg

SEQ ID NO: 117946 - DNA, 17 bp, Arabidopsis thaliana
ggttcgtttccctgcat

SEQ ID NO: 117947 - DNA, 17 bp, Arabidopsis thaliana
ggttcgtttccctggat

SEQ ID NO: 117948 - DNA, 17 bp, Arabidopsis thaliana
ggttcgtttccggcagg

SEQ ID NO: 117949 - DNA, 17 bp, Arabidopsis thaliana
ggttctaaggcagccgg

SEQ ID NO: 117950 - DNA, 17 bp, Arabidopsis thaliana
ggttctacatctccgag

SEQ ID NO: 117951 - DNA, 17 bp, Arabidopsis thaliana
ggttctacgccgaatcc

SEQ ID NO: 117952 - DNA, 17 bp, Arabidopsis thaliana
ggttctacgctggattt

SEQ ID NO: 117953 - DNA, 17 bp, Arabidopsis thaliana
ggttctactcgaccctg

SEQ ID NO: 117954 - DNA, 17 bp, Arabidopsis thaliana
ggttctactgcactctt

SEQ ID NO: 117955 - DNA, 17 bp, Arabidopsis thaliana
ggttctagaaattcgca

SEQ ID NO: 117956 - DNA, 17 bp, Arabidopsis thaliana
ggttctagatctgggta

SEQ ID NO: 117957 - DNA, 17 bp, Arabidopsis thaliana
ggttctaggaaggatga

SEQ ID NO: 117958 - DNA, 17 bp, Arabidopsis thaliana
ggttctaggccgaaaac

SEQ ID NO: 117959 - DNA, 17 bp, Arabidopsis thaliana
ggttctagggcctgact

SEQ ID NO: 117960 - DNA, 17 bp, Arabidopsis thaliana
ggttctagtctaggctg

SEQ ID NO: 117961 - DNA, 17 bp, Arabidopsis thaliana
ggttctatccctgtata

SEQ ID NO: 117962 - DNA, 17 bp, Arabidopsis thaliana
ggttctatcgtctagcg

SEQ ID NO: 117963 - DNA, 17 bp, Arabidopsis thaliana
ggttctatcgtctagct

SEQ ID NO: 117964 - DNA, 17 bp, Arabidopsis thaliana
ggttctatcgtctatcg

SEQ ID NO: 117965 - DNA, 17 bp, Arabidopsis thaliana
ggttctatggtatagcg

SEQ ID NO: 117966 - DNA, 17 bp, Arabidopsis thaliana
ggttctatggtctagcg

SEQ ID NO: 117967 - DNA, 17 bp, Arabidopsis thaliana
ggttctatggtgtagtg

SEQ ID NO: 117968 - DNA, 17 bp, Arabidopsis thaliana
ggttctcaagaatgggc

SEQ ID NO: 117969 - DNA, 17 bp, Arabidopsis thaliana
ggttctcaagtgcaggc

SEQ ID NO: 117970 - DNA, 17 bp, Arabidopsis thaliana
ggttctcagtgatgagg

SEQ ID NO: 117971 - DNA, 17 bp, Arabidopsis thaliana
ggttctcatccggatta

SEQ ID NO: 117972 - DNA, 17 bp, Arabidopsis thaliana
ggttctcatcgatggtc

SEQ ID NO: 117973 - DNA, 17 bp, Arabidopsis thaliana
ggttctccctgtatagg

SEQ ID NO: 117974 - DNA, 17 bp, Arabidopsis thaliana
ggttctccgcctatttc

SEQ ID NO: 117975 - DNA, 17 bp, Arabidopsis thaliana
ggttctcctcccaagat

SEQ ID NO: 117976 - DNA, 17 bp, Arabidopsis thaliana
ggttctctatattccaa

SEQ ID NO: 117977 - DNA, 17 bp, Arabidopsis thaliana
ggttctctattaggcac

SEQ ID NO: 117978 - DNA, 17 bp, Arabidopsis thaliana
ggttctctccttctagc

SEQ ID NO: 117979 - DNA, 17 bp, Arabidopsis thaliana
ggttctctggatcgggt

SEQ ID NO: 117980 - DNA, 17 bp, Arabidopsis thaliana
ggttctctggattcgcg

SEQ ID NO: 117981 - DNA, 17 bp, Arabidopsis thaliana
ggttctctggtctagcg

SEQ ID NO: 117982 - DNA, 17 bp, Arabidopsis thaliana
ggttctcttcggtgtga

SEQ ID NO: 117983 - DNA, 17 bp, Arabidopsis thaliana
ggttctcttctgtgcga

SEQ ID NO: 117984 - DNA, 17 bp, Arabidopsis thaliana
ggttctcttgggtgaac

SEQ ID NO: 117985 - DNA, 17 bp, Arabidopsis thaliana
ggttctgaatggtgact

SEQ ID NO: 117986 - DNA, 17 bp, Arabidopsis thaliana
ggttctgaccgaacttt

SEQ ID NO: 117987 - DNA, 17 bp, Arabidopsis thaliana
ggttctgagccgaaagt

SEQ ID NO: 117988 - DNA, 17 bp, Arabidopsis thaliana
ggttctgagcgacgcta

SEQ ID NO: 117989 - DNA, 17 bp, Arabidopsis thaliana
ggttctgattctggtgc

SEQ ID NO: 117990 - DNA, 17 bp, Arabidopsis thaliana
ggttctgctctagcggt

SEQ ID NO: 117991 - DNA, 17 bp, Arabidopsis thaliana
ggttctggaccgaatcc

SEQ ID NO: 117992 - DNA, 17 bp, Arabidopsis thaliana
ggttctggatcttactt

SEQ ID NO: 117993 - DNA, 17 bp, Arabidopsis thaliana
ggttctggccgaagccc

SEQ ID NO: 117994 - DNA, 17 bp, Arabidopsis thaliana
ggttctgggccgaaccc

SEQ ID NO: 117995 - DNA, 17 bp, Arabidopsis thaliana
ggttctgggccgaatct

SEQ ID NO: 117996 - DNA, 17 bp, Arabidopsis thaliana
ggttctgggtcacgatg

SEQ ID NO: 117997 - DNA, 17 bp, Arabidopsis thaliana
ggttctggtctagcggt

SEQ ID NO: 117998 - DNA, 17 bp, Arabidopsis thaliana
ggttctggtgtagtggt

SEQ ID NO: 117999 - DNA, 17 bp, Arabidopsis thaliana
ggttctggttgcctgtt

SEQ ID NO: 118000 - DNA, 17 bp, Arabidopsis thaliana
ggttctgtagtccaacg

SEQ ID NO: 118001 - DNA, 17 bp, Arabidopsis thaliana
ggttctgtctaagattc

SEQ ID NO: 118002 - DNA, 17 bp, Arabidopsis thaliana
ggttctgttatgcccat

SEQ ID NO: 118003 - DNA, 17 bp, Arabidopsis thaliana
ggttctgttgctgctgc

SEQ ID NO: 118004 - DNA, 17 bp, Arabidopsis thaliana
ggttctgtttttggttt

SEQ ID NO: 118005 - DNA, 17 bp, Arabidopsis thaliana
ggttcttagatcaggtt

SEQ ID NO: 118006 - DNA, 17 bp, Arabidopsis thaliana
ggttcttccattggctg

SEQ ID NO: 118007 - DNA, 17 bp, Arabidopsis thaliana
ggttcttcccggctggt

SEQ ID NO: 118008 - DNA, 17 bp, Arabidopsis thaliana
ggttcttccctgtaagc

SEQ ID NO: 118009 - DNA, 17 bp, Arabidopsis thaliana
ggttcttcggtgtgatg

SEQ ID NO: 118010 - DNA, 17 bp, Arabidopsis thaliana
ggttcttctggccattc

SEQ ID NO: 118011 - DNA, 17 bp, Arabidopsis thaliana
ggttcttctgttggtgc

SEQ ID NO: 118012 - DNA, 17 bp, Arabidopsis thaliana
ggttcttgggtttgttt

SEQ ID NO: 118013 - DNA, 17 bp, Arabidopsis thaliana
ggttcttgtctagcggt

SEQ ID NO: 118014 - DNA, 17 bp, Arabidopsis thaliana
ggttcttgtcttgttgg

SEQ ID NO: 118015 - DNA, 17 bp, Arabidopsis thaliana
ggttctttcccggctgg

SEQ ID NO: 118016 - DNA, 17 bp, Arabidopsis thaliana
ggttctttcctcgggtg

SEQ ID NO: 118017 - DNA, 17 bp, Arabidopsis thaliana
ggttcttttatggttgc

SEQ ID NO: 118018 - DNA, 17 bp, Arabidopsis thaliana
ggttgaaaacaggtgcg

SEQ ID NO: 118019 - DNA, 17 bp, Arabidopsis thaliana
ggttgaaaatgactgga

SEQ ID NO: 118020 - DNA, 17 bp, Arabidopsis thaliana
ggttgaaagtttgactg

SEQ ID NO: 118021 - DNA, 17 bp, Arabidopsis thaliana
ggttgaaatccttggag

SEQ ID NO: 118022 - DNA, 17 bp, Arabidopsis thaliana
ggttgaacccgggctca

SEQ ID NO: 118023 - DNA, 17 bp, Arabidopsis thaliana
ggttgaaccctttctac

SEQ ID NO: 118024 - DNA, 17 bp, Arabidopsis thaliana
ggttgaaccctttctgc

SEQ ID NO: 118025 - DNA, 17 bp, Arabidopsis thaliana
ggttgaaccgtttgatc

SEQ ID NO: 118026 - DNA, 17 bp, Arabidopsis thaliana
ggttgaacctgcggaag

SEQ ID NO: 118027 - DNA, 17 bp, Arabidopsis thaliana
ggttgaacgttgataat

SEQ ID NO: 118028 - DNA, 17 bp, Arabidopsis thaliana
ggttgaacgtttgataa

SEQ ID NO: 118029 - DNA, 17 bp, Arabidopsis thaliana
ggttgaacttccttgcc

SEQ ID NO: 118030 - DNA, 17 bp, Arabidopsis thaliana
ggttgaaggttctatga

SEQ ID NO: 118031 - DNA, 17 bp, Arabidopsis thaliana
ggttgacagaaaaagtt

SEQ ID NO: 118032 - DNA, 17 bp, Arabidopsis thaliana
ggttgaccaactttctc

SEQ ID NO: 118033 - DNA, 17 bp, Arabidopsis thaliana
ggttgaccaagggttca

SEQ ID NO: 118034 - DNA, 17 bp, Arabidopsis thaliana
ggttgaccaatgcttca

SEQ ID NO: 118035 - DNA, 17 bp, Arabidopsis thaliana
ggttgaccacaggttca

SEQ ID NO: 118036 - DNA, 17 bp, Arabidopsis thaliana
ggttgaccacatacatc

SEQ ID NO: 118037 - DNA, 17 bp, Arabidopsis thaliana
ggttgaccacttgatca

SEQ ID NO: 118038 - DNA, 17 bp, Arabidopsis thaliana
ggttgacccaactcatt

SEQ ID NO: 118039 - DNA, 17 bp, Arabidopsis thaliana
ggttgacccctccttag

SEQ ID NO: 118040 - DNA, 17 bp, Arabidopsis thaliana
ggttgacccgatgaccc

SEQ ID NO: 118041 - DNA, 17 bp, Arabidopsis thaliana
ggttgacggagtggatg

SEQ ID NO: 118042 - DNA, 17 bp, Arabidopsis thaliana
ggttgacgtggcttctt

SEQ ID NO: 118043 - DNA, 17 bp, Arabidopsis thaliana
ggttgactttctcacca

SEQ ID NO: 118044 - DNA, 17 bp, Arabidopsis thaliana
ggttgagaagataattg

SEQ ID NO: 118045 - DNA, 17 bp, Arabidopsis thaliana
ggttgagaatctatgca

SEQ ID NO: 118046 - DNA, 17 bp, Arabidopsis thaliana
ggttgagattatttctt

SEQ ID NO: 118047 - DNA, 17 bp, Arabidopsis thaliana
ggttgagcgtttgataa

SEQ ID NO: 118048 - DNA, 17 bp, Arabidopsis thaliana
ggttgagcgtttggtaa

SEQ ID NO: 118049 - DNA, 17 bp, Arabidopsis thaliana
ggttgagcgtttggtta

SEQ ID NO: 118050 - DNA, 17 bp, Arabidopsis thaliana
ggttgagctgagttgag

SEQ ID NO: 118051 - DNA, 17 bp, Arabidopsis thaliana
ggttgagtgggcaaaga

SEQ ID NO: 118052 - DNA, 17 bp, Arabidopsis thaliana
ggttgagttcccgaagt

SEQ ID NO: 118053 - DNA, 17 bp, Arabidopsis thaliana
ggttgagttgctacaga

SEQ ID NO: 118054 - DNA, 17 bp, Arabidopsis thaliana
ggttgagtttgattcca

SEQ ID NO: 118055 - DNA, 17 bp, Arabidopsis thaliana
ggttgatcacatcctga

SEQ ID NO: 118056 - DNA, 17 bp, Arabidopsis thaliana
ggttgatcatctatctc

SEQ ID NO: 118057 - DNA, 17 bp, Arabidopsis thaliana
ggttgatccagtaaccc

SEQ ID NO: 118058 - DNA, 17 bp, Arabidopsis thaliana
ggttgatccccggcaac

SEQ ID NO: 118059 - DNA, 17 bp, Arabidopsis thaliana
ggttgatccgattagct

SEQ ID NO: 118060 - DNA, 17 bp, Arabidopsis thaliana
ggttgatccgcgcgatt

SEQ ID NO: 118061 - DNA, 17 bp, Arabidopsis thaliana
ggttgatcgtgactgca

SEQ ID NO: 118062 - DNA, 17 bp, Arabidopsis thaliana
ggttgatctgatcagta

SEQ ID NO: 118063 - DNA, 17 bp, Arabidopsis thaliana
ggttgatcttctcagct

SEQ ID NO: 118064 - DNA, 17 bp, Arabidopsis thaliana
ggttgatcttgcttttt

SEQ ID NO: 118065 - DNA, 17 bp, Arabidopsis thaliana
ggttgatgcgagtgggc

SEQ ID NO: 118066 - DNA, 17 bp, Arabidopsis thaliana
ggttgatgtcgctggga

SEQ ID NO: 118067 - DNA, 17 bp, Arabidopsis thaliana
ggttgattatcgctgcc

SEQ ID NO: 118068 - DNA, 17 bp, Arabidopsis thaliana
ggttgattcacaggagc

SEQ ID NO: 118069 - DNA, 17 bp, Arabidopsis thaliana
ggttgattcacggttga

SEQ ID NO: 118070 - DNA, 17 bp, Arabidopsis thaliana
ggttgattcacggttgg

SEQ ID NO: 118071 - DNA, 17 bp, Arabidopsis thaliana
ggttgattccggcaggt

SEQ ID NO: 118072 - DNA, 17 bp, Arabidopsis thaliana
ggttgattctagcgacg

SEQ ID NO: 118073 - DNA, 17 bp, Arabidopsis thaliana
ggttgattcttccgccg

SEQ ID NO: 118074 - DNA, 17 bp, Arabidopsis thaliana
ggttgattgatgattgt

SEQ ID NO: 118075 - DNA, 17 bp, Arabidopsis thaliana
ggttgattttcgccgtt

SEQ ID NO: 118076 - DNA, 17 bp, Arabidopsis thaliana
ggttgcaaacgatagcg

SEQ ID NO: 118077 - DNA, 17 bp, Arabidopsis thaliana
ggttgcaaagtgcgact

SEQ ID NO: 118078 - DNA, 17 bp, Arabidopsis thaliana
ggttgcaatgggtgttg

SEQ ID NO: 118079 - DNA, 17 bp, Arabidopsis thaliana
ggttgcagacgatagcg

SEQ ID NO: 118080 - DNA, 17 bp, Arabidopsis thaliana
ggttgcagagacctcca

SEQ ID NO: 118081 - DNA, 17 bp, Arabidopsis thaliana
ggttgcaggttttgatc

SEQ ID NO: 118082 - DNA, 17 bp, Arabidopsis thaliana
ggttgcattggtcggct

SEQ ID NO: 118083 - DNA, 17 bp, Arabidopsis thaliana
ggttgccaacttttttt

SEQ ID NO: 118084 - DNA, 17 bp, Arabidopsis thaliana
ggttgccacagtaccta

SEQ ID NO: 118085 - DNA, 17 bp, Arabidopsis thaliana
ggttgccaggttgtgtg

SEQ ID NO: 118086 - DNA, 17 bp, Arabidopsis thaliana
ggttgccgtcgttaatt

SEQ ID NO: 118087 - DNA, 17 bp, Arabidopsis thaliana
ggttgcctgttgatcga

SEQ ID NO: 118088 - DNA, 17 bp, Arabidopsis thaliana
ggttgccttcagagacg

SEQ ID NO: 118089 - DNA, 17 bp, Arabidopsis thaliana
ggttgcgaaaccggttg

SEQ ID NO: 118090 - DNA, 17 bp, Arabidopsis thaliana
ggttgcgggcggtagcg

SEQ ID NO: 118091 - DNA, 17 bp, Arabidopsis thaliana
ggttgcggtaccattac

SEQ ID NO: 118092 - DNA, 17 bp, Arabidopsis thaliana
ggttgcggtctaagttg

SEQ ID NO: 118093 - DNA, 17 bp, Arabidopsis thaliana
ggttgcggttctagttc

SEQ ID NO: 118094 - DNA, 17 bp, Arabidopsis thaliana
ggttgcggttgcgggag

SEQ ID NO: 118095 - DNA, 17 bp, Arabidopsis thaliana
ggttgcggtttaagttc

SEQ ID NO: 118096 - DNA, 17 bp, Arabidopsis thaliana
ggttgcggtttaagttg

SEQ ID NO: 118097 - DNA, 17 bp, Arabidopsis thaliana
ggttgctagccaaagct

SEQ ID NO: 118098 - DNA, 17 bp, Arabidopsis thaliana
ggttgctaggtcgggcc

SEQ ID NO: 118099 - DNA, 17 bp, Arabidopsis thaliana
ggttgctatggcttcat

SEQ ID NO: 118100 - DNA, 17 bp, Arabidopsis thaliana
ggttgctctatcacggt

SEQ ID NO: 118101 - DNA, 17 bp, Arabidopsis thaliana
ggttgctcttagacctt

SEQ ID NO: 118102 - DNA, 17 bp, Arabidopsis thaliana
ggttgctgactcagatc

SEQ ID NO: 118103 - DNA, 17 bp, Arabidopsis thaliana
ggttgctgcagaggata

SEQ ID NO: 118104 - DNA, 17 bp, Arabidopsis thaliana
ggttgctgctggttccc

SEQ ID NO: 118105 - DNA, 17 bp, Arabidopsis thaliana
ggttgctggttgctaga

SEQ ID NO: 118106 - DNA, 17 bp, Arabidopsis thaliana
ggttgctgtggtttcgg

SEQ ID NO: 118107 - DNA, 17 bp, Arabidopsis thaliana
ggttgcttcctcttcat

SEQ ID NO: 118108 - DNA, 17 bp, Arabidopsis thaliana
ggttgcttcggagaaag

SEQ ID NO: 118109 - DNA, 17 bp, Arabidopsis thaliana
ggttgcttgaccattcc

SEQ ID NO: 118110 - DNA, 17 bp, Arabidopsis thaliana
ggttgcttgggttgcca

SEQ ID NO: 118111 - DNA, 17 bp, Arabidopsis thaliana
ggttgcttttggttgtg

SEQ ID NO: 118112 - DNA, 17 bp, Arabidopsis thaliana
ggttggaaattatgatc

SEQ ID NO: 118113 - DNA, 17 bp, Arabidopsis thaliana
ggttggaaccggtgtct

SEQ ID NO: 118114 - DNA, 17 bp, Arabidopsis thaliana
ggttggaagcccatacg

SEQ ID NO: 118115 - DNA, 17 bp, Arabidopsis thaliana
ggttggaccgcagggta

SEQ ID NO: 118116 - DNA, 17 bp, Arabidopsis thaliana
ggttggaccgcaggtta

SEQ ID NO: 118117 - DNA, 17 bp, Arabidopsis thaliana
ggttggaccgcaggttt

SEQ ID NO: 118118 - DNA, 17 bp, Arabidopsis thaliana
ggttggaccgccgggca

SEQ ID NO: 118119 - DNA, 17 bp, Arabidopsis thaliana
ggttggacgacggtttc

SEQ ID NO: 118120 - DNA, 17 bp, Arabidopsis thaliana
ggttggacttctcattt

SEQ ID NO: 118121 - DNA, 17 bp, Arabidopsis thaliana
ggttggagctgcgtctg

SEQ ID NO: 118122 - DNA, 17 bp, Arabidopsis thaliana
ggttggagggagtgcgg

SEQ ID NO: 118123 - DNA, 17 bp, Arabidopsis thaliana
ggttggatgtattcgac

SEQ ID NO: 118124 - DNA, 17 bp, Arabidopsis thaliana
ggttggattcgggcata

SEQ ID NO: 118125 - DNA, 17 bp, Arabidopsis thaliana
ggttggccaagtctgat

SEQ ID NO: 118126 - DNA, 17 bp, Arabidopsis thaliana
ggttggccacgctctgt

SEQ ID NO: 118127 - DNA, 17 bp, Arabidopsis thaliana
ggttggccggtccgcct

SEQ ID NO: 118128 - DNA, 17 bp, Arabidopsis thaliana
ggttggcgagtctccat

SEQ ID NO: 118129 - DNA, 17 bp, Arabidopsis thaliana
ggttggcggaacgggtg

SEQ ID NO: 118130 - DNA, 17 bp, Arabidopsis thaliana
ggttggcggaacgggtt

SEQ ID NO: 118131 - DNA, 17 bp, Arabidopsis thaliana
ggttggcgggacgggtt

SEQ ID NO: 118132 - DNA, 17 bp, Arabidopsis thaliana
ggttggcgggatccaaa

SEQ ID NO: 118133 - DNA, 17 bp, Arabidopsis thaliana
ggttggctaagtccgtt

SEQ ID NO: 118134 - DNA, 17 bp, Arabidopsis thaliana
ggttggctctgtttcta

SEQ ID NO: 118135 - DNA, 17 bp, Arabidopsis thaliana
ggttggcttctgatgag

SEQ ID NO: 118136 - DNA, 17 bp, Arabidopsis thaliana
ggttggctttggctcgg

SEQ ID NO: 118137 - DNA, 17 bp, Arabidopsis thaliana
ggttgggaaggagggag

SEQ ID NO: 118138 - DNA, 17 bp, Arabidopsis thaliana
ggttgggattctgtgta

SEQ ID NO: 118139 - DNA, 17 bp, Arabidopsis thaliana
ggttgggattgcaagta

SEQ ID NO: 118140 - DNA, 17 bp, Arabidopsis thaliana
ggttgggccaacctatg

SEQ ID NO: 118141 - DNA, 17 bp, Arabidopsis thaliana
ggttgggccgtcatctt

SEQ ID NO: 118142 - DNA, 17 bp, Arabidopsis thaliana
ggttgggctataactgt

SEQ ID NO: 118143 - DNA, 17 bp, Arabidopsis thaliana
ggttgggctcagaagtt

SEQ ID NO: 118144 - DNA, 17 bp, Arabidopsis thaliana
ggttgggctgtaagtta

SEQ ID NO: 118145 - DNA, 17 bp, Arabidopsis thaliana
ggttggggaagacacca

SEQ ID NO: 118146 - DNA, 17 bp, Arabidopsis thaliana
ggttgggttaattggaa

SEQ ID NO: 118147 - DNA, 17 bp, Arabidopsis thaliana
ggttggtaataaactag

SEQ ID NO: 118148 - DNA, 17 bp, Arabidopsis thaliana
ggttggtccaacattgc

SEQ ID NO: 118149 - DNA, 17 bp, Arabidopsis thaliana
ggttggtccaattgtct

SEQ ID NO: 118150 - DNA, 17 bp, Arabidopsis thaliana
ggttggtccaggtccag

SEQ ID NO: 118151 - DNA, 17 bp, Arabidopsis thaliana
ggttggtcccgcgatgt

SEQ ID NO: 118152 - DNA, 17 bp, Arabidopsis thaliana
ggttggtccttcttccg

SEQ ID NO: 118153 - DNA, 17 bp, Arabidopsis thaliana
ggttggtcgcacggcgg

SEQ ID NO: 118154 - DNA, 17 bp, Arabidopsis thaliana
ggttggtcttgtccggt

SEQ ID NO: 118155 - DNA, 17 bp, Arabidopsis thaliana
ggttggtgataggctga

SEQ ID NO: 118156 - DNA, 17 bp, Arabidopsis thaliana
ggttggtggagcgattt

SEQ ID NO: 118157 - DNA, 17 bp, Arabidopsis thaliana
ggttggtggggttcact

SEQ ID NO: 118158 - DNA, 17 bp, Arabidopsis thaliana
ggttggtgtgcattggt

SEQ ID NO: 118159 - DNA, 17 bp, Arabidopsis thaliana
ggttggttagtgttttg

SEQ ID NO: 118160 - DNA, 17 bp, Arabidopsis thaliana
ggttggttcttactgct

SEQ ID NO: 118161 - DNA, 17 bp, Arabidopsis thaliana
ggttgtaaagactttgg

SEQ ID NO: 118162 - DNA, 17 bp, Arabidopsis thaliana
ggttgtaacacctcgtt

SEQ ID NO: 118163 - DNA, 17 bp, Arabidopsis thaliana
ggttgtactgctggact

SEQ ID NO: 118164 - DNA, 17 bp, Arabidopsis thaliana
ggttgtacttcaggtaa

SEQ ID NO: 118165 - DNA, 17 bp, Arabidopsis thaliana
ggttgtatcatgggatc

SEQ ID NO: 118166 - DNA, 17 bp, Arabidopsis thaliana
ggttgtatgaacccttt

SEQ ID NO: 118167 - DNA, 17 bp, Arabidopsis thaliana
ggttgtcacatgaccga

SEQ ID NO: 118168 - DNA, 17 bp, Arabidopsis thaliana
ggttgtcacgactatgg

SEQ ID NO: 118169 - DNA, 17 bp, Arabidopsis thaliana
ggttgtccaggtggtac

SEQ ID NO: 118170 - DNA, 17 bp, Arabidopsis thaliana
ggttgtcggcaccaatc

SEQ ID NO: 118171 - DNA, 17 bp, Arabidopsis thaliana
ggttgtctacaatgatt

SEQ ID NO: 118172 - DNA, 17 bp, Arabidopsis thaliana
ggttgtctattggacca

SEQ ID NO: 118173 - DNA, 17 bp, Arabidopsis thaliana
ggttgtctctggtgatc

SEQ ID NO: 118174 - DNA, 17 bp, Arabidopsis thaliana
ggttgtctgccgactta

SEQ ID NO: 118175 - DNA, 17 bp, Arabidopsis thaliana
ggttgtctgtcggttcg

SEQ ID NO: 118176 - DNA, 17 bp, Arabidopsis thaliana
ggttgtcttagccggca

SEQ ID NO: 118177 - DNA, 17 bp, Arabidopsis thaliana
ggttgtgaattcgcaaa

SEQ ID NO: 118178 - DNA, 17 bp, Arabidopsis thaliana
ggttgtgacttgttgta

SEQ ID NO: 118179 - DNA, 17 bp, Arabidopsis thaliana
ggttgtgagtttctgac

SEQ ID NO: 118180 - DNA, 17 bp, Arabidopsis thaliana
ggttgtgattttgccgg

SEQ ID NO: 118181 - DNA, 17 bp, Arabidopsis thaliana
ggttgtgccatggcttt

SEQ ID NO: 118182 - DNA, 17 bp, Arabidopsis thaliana
ggttgtgcgagggattt

SEQ ID NO: 118183 - DNA, 17 bp, Arabidopsis thaliana
ggttgtgctatggcttc

SEQ ID NO: 118184 - DNA, 17 bp, Arabidopsis thaliana
ggttgtggacttgttgt

SEQ ID NO: 118185 - DNA, 17 bp, Arabidopsis thaliana
ggttgtggtgcatggcc

SEQ ID NO: 118186 - DNA, 17 bp, Arabidopsis thaliana
ggttgtgtactggttta

SEQ ID NO: 118187 - DNA, 17 bp, Arabidopsis thaliana
ggttgttcgccgattca

SEQ ID NO: 118188 - DNA, 17 bp, Arabidopsis thaliana
ggttgttcggttgtgga

SEQ ID NO: 118189 - DNA, 17 bp, Arabidopsis thaliana
ggttgttctgagactac

SEQ ID NO: 118190 - DNA, 17 bp, Arabidopsis thaliana
ggttgttgcctggaacc

SEQ ID NO: 118191 - DNA, 17 bp, Arabidopsis thaliana
ggttgttggagaccatt

SEQ ID NO: 118192 - DNA, 17 bp, Arabidopsis thaliana
ggttgttgttgatgtag

SEQ ID NO: 118193 - DNA, 17 bp, Arabidopsis thaliana
ggttgtttacggcgacg

SEQ ID NO: 118194 - DNA, 17 bp, Arabidopsis thaliana
ggttgtttcagcagacc

SEQ ID NO: 118195 - DNA, 17 bp, Arabidopsis thaliana
ggttgtttgggaatgca

SEQ ID NO: 118196 - DNA, 17 bp, Arabidopsis thaliana
ggttgttttcaggtact

SEQ ID NO: 118197 - DNA, 17 bp, Arabidopsis thaliana
ggttgtttttggttgtg

SEQ ID NO: 118198 - DNA, 17 bp, Arabidopsis thaliana
ggtttaaaaatggatct

SEQ ID NO: 118199 - DNA, 17 bp, Arabidopsis thaliana
ggtttaactctgttcgg

SEQ ID NO: 118200 - DNA, 17 bp, Arabidopsis thaliana
ggtttaactctgttcgt

SEQ ID NO: 118201 - DNA, 17 bp, Arabidopsis thaliana
ggtttaactttgttcgg

SEQ ID NO: 118202 - DNA, 17 bp, Arabidopsis thaliana
ggtttaatttcacggga

SEQ ID NO: 118203 - DNA, 17 bp, Arabidopsis thaliana
ggtttacaacgtgcttt

SEQ ID NO: 118204 - DNA, 17 bp, Arabidopsis thaliana
ggtttacagggccacgg

SEQ ID NO: 118205 - DNA, 17 bp, Arabidopsis thaliana
ggtttacaggtttacgt

SEQ ID NO: 118206 - DNA, 17 bp, Arabidopsis thaliana
ggtttacccgcgcttgg

SEQ ID NO: 118207 - DNA, 17 bp, Arabidopsis thaliana
ggtttacccttgtgcgg

SEQ ID NO: 118208 - DNA, 17 bp, Arabidopsis thaliana
ggtttacccttgtgcgt

SEQ ID NO: 118209 - DNA, 17 bp, Arabidopsis thaliana
ggtttacctggtagtca

SEQ ID NO: 118210 - DNA, 17 bp, Arabidopsis thaliana
ggtttacggacttcgac

SEQ ID NO: 118211 - DNA, 17 bp, Arabidopsis thaliana
ggtttacgtttctgcgg

SEQ ID NO: 118212 - DNA, 17 bp, Arabidopsis thaliana
ggtttactctgattagg

SEQ ID NO: 118213 - DNA, 17 bp, Arabidopsis thaliana
ggtttactgtaacgccc

SEQ ID NO: 118214 - DNA, 17 bp, Arabidopsis thaliana
ggtttactgtttcggaa

SEQ ID NO: 118215 - DNA, 17 bp, Arabidopsis thaliana
ggtttagactgcttgtg

SEQ ID NO: 118216 - DNA, 17 bp, Arabidopsis thaliana
ggtttagccaaagtcca

SEQ ID NO: 118217 - DNA, 17 bp, Arabidopsis thaliana
ggtttagccctttgtcg

SEQ ID NO: 118218 - DNA, 17 bp, Arabidopsis thaliana
ggtttagcctaagtcca

SEQ ID NO: 118219 - DNA, 17 bp, Arabidopsis thaliana
ggtttaggtatgcgatc

SEQ ID NO: 118220 - DNA, 17 bp, Arabidopsis thaliana
ggtttaggtttcccggg

SEQ ID NO: 118221 - DNA, 17 bp, Arabidopsis thaliana
ggtttagtggacttctc

SEQ ID NO: 118222 - DNA, 17 bp, Arabidopsis thaliana
ggtttagttagtcaggt

SEQ ID NO: 118223 - DNA, 17 bp, Arabidopsis thaliana
ggtttagtttatgcggt

SEQ ID NO: 118224 - DNA, 17 bp, Arabidopsis thaliana
ggtttatcatcatcttc

SEQ ID NO: 118225 - DNA, 17 bp, Arabidopsis thaliana
ggtttatccaatactgg

SEQ ID NO: 118226 - DNA, 17 bp, Arabidopsis thaliana
ggtttatccgttctctt

SEQ ID NO: 118227 - DNA, 17 bp, Arabidopsis thaliana
ggtttatcggccactgt

SEQ ID NO: 118228 - DNA, 17 bp, Arabidopsis thaliana
ggtttatcggtggcttt

SEQ ID NO: 118229 - DNA, 17 bp, Arabidopsis thaliana
ggtttatctttggatta

SEQ ID NO: 118230 - DNA, 17 bp, Arabidopsis thaliana
ggtttattagtgcttct

SEQ ID NO: 118231 - DNA, 17 bp, Arabidopsis thaliana
ggtttattgtgccaaac

SEQ ID NO: 118232 - DNA, 17 bp, Arabidopsis thaliana
ggtttatttcgatgatg

SEQ ID NO: 118233 - DNA, 17 bp, Arabidopsis thaliana
ggtttcaaagtcataca

SEQ ID NO: 118234 - DNA, 17 bp, Arabidopsis thaliana
ggtttcaacatggcgat

SEQ ID NO: 118235 - DNA, 17 bp, Arabidopsis thaliana
ggtttcaacccgatctt

SEQ ID NO: 118236 - DNA, 17 bp, Arabidopsis thaliana
ggtttcaaggatgtcgg

SEQ ID NO: 118237 - DNA, 17 bp, Arabidopsis thaliana
ggtttcaatcaaggggg

SEQ ID NO: 118238 - DNA, 17 bp, Arabidopsis thaliana
ggtttcacaaagtactc

SEQ ID NO: 118239 - DNA, 17 bp, Arabidopsis thaliana
ggtttcacacctatgtg

SEQ ID NO: 118240 - DNA, 17 bp, Arabidopsis thaliana
ggtttcacgttgacgcg

SEQ ID NO: 118241 - DNA, 17 bp, Arabidopsis thaliana
ggtttcagaatctggtc

SEQ ID NO: 118242 - DNA, 17 bp, Arabidopsis thaliana
ggtttcagatctgtcac

SEQ ID NO: 118243 - DNA, 17 bp, Arabidopsis thaliana
ggtttcagccctttgtc

SEQ ID NO: 118244 - DNA, 17 bp, Arabidopsis thaliana
ggtttcagcgattagtt

SEQ ID NO: 118245 - DNA, 17 bp, Arabidopsis thaliana
ggtttcaggcacagctg

SEQ ID NO: 118246 - DNA, 17 bp, Arabidopsis thaliana
ggtttcaggcttcttcg

SEQ ID NO: 118247 - DNA, 17 bp, Arabidopsis thaliana
ggtttcaggtctggggg

SEQ ID NO: 118248 - DNA, 17 bp, Arabidopsis thaliana
ggtttcagtcaaactta

SEQ ID NO: 118249 - DNA, 17 bp, Arabidopsis thaliana
ggtttcagtcgccagcg

SEQ ID NO: 118250 - DNA, 17 bp, Arabidopsis thaliana
ggtttcagtcgtcagcg

SEQ ID NO: 118251 - DNA, 17 bp, Arabidopsis thaliana
ggtttcagttgatgaat

SEQ ID NO: 118252 - DNA, 17 bp, Arabidopsis thaliana
ggtttcatcatctagtt

SEQ ID NO: 118253 - DNA, 17 bp, Arabidopsis thaliana
ggtttcatccacgatcg

SEQ ID NO: 118254 - DNA, 17 bp, Arabidopsis thaliana
ggtttcatccattttag

SEQ ID NO: 118255 - DNA, 17 bp, Arabidopsis thaliana
ggtttcatcgaatcttt

SEQ ID NO: 118256 - DNA, 17 bp, Arabidopsis thaliana
ggtttcatcgtgtagtt

SEQ ID NO: 118257 - DNA, 17 bp, Arabidopsis thaliana
ggtttcatctccgcttg

SEQ ID NO: 118258 - DNA, 17 bp, Arabidopsis thaliana
ggtttcatttggtgcga

SEQ ID NO: 118259 - DNA, 17 bp, Arabidopsis thaliana
ggtttccaaaggcccgc

SEQ ID NO: 118260 - DNA, 17 bp, Arabidopsis thaliana
ggtttccactgggtgac

SEQ ID NO: 118261 - DNA, 17 bp, Arabidopsis thaliana
ggtttccagccgaatgc

SEQ ID NO: 118262 - DNA, 17 bp, Arabidopsis thaliana
ggtttccagttccggtg

SEQ ID NO: 118263 - DNA, 17 bp, Arabidopsis thaliana
ggtttcccagtcgcacg

SEQ ID NO: 118264 - DNA, 17 bp, Arabidopsis thaliana
ggtttccccgcgagagt

SEQ ID NO: 118265 - DNA, 17 bp, Arabidopsis thaliana
ggtttcccggctggtgc

SEQ ID NO: 118266 - DNA, 17 bp, Arabidopsis thaliana
ggtttcccggctggttg

SEQ ID NO: 118267 - DNA, 17 bp, Arabidopsis thaliana
ggtttccgacagcagat

SEQ ID NO: 118268 - DNA, 17 bp, Arabidopsis thaliana
ggtttccgatggagatc

SEQ ID NO: 118269 - DNA, 17 bp, Arabidopsis thaliana
ggtttccggggggagta

SEQ ID NO: 118270 - DNA, 17 bp, Arabidopsis thaliana
ggtttccggtgcgtccc

SEQ ID NO: 118271 - DNA, 17 bp, Arabidopsis thaliana
ggtttccttggaagatc

SEQ ID NO: 118272 - DNA, 17 bp, Arabidopsis thaliana
ggtttccttggccgtag

SEQ ID NO: 118273 - DNA, 17 bp, Arabidopsis thaliana
ggtttcgagtttatcat

SEQ ID NO: 118274 - DNA, 17 bp, Arabidopsis thaliana
ggtttcgattcgggttt

SEQ ID NO: 118275 - DNA, 17 bp, Arabidopsis thaliana
ggtttcgattcgtcgca

SEQ ID NO: 118276 - DNA, 17 bp, Arabidopsis thaliana
ggtttcgattgagagca

SEQ ID NO: 118277 - DNA, 17 bp, Arabidopsis thaliana
ggtttcgctataggctc

SEQ ID NO: 118278 - DNA, 17 bp, Arabidopsis thaliana
ggtttcgctataggctt

SEQ ID NO: 118279 - DNA, 17 bp, Arabidopsis thaliana
ggtttcgctatatgctt

SEQ ID NO: 118280 - DNA, 17 bp, Arabidopsis thaliana
ggtttcgctttagtttc

SEQ ID NO: 118281 - DNA, 17 bp, Arabidopsis thaliana
ggtttcggacctgtggg

SEQ ID NO: 118282 - DNA, 17 bp, Arabidopsis thaliana
ggtttcggactaaaacg

SEQ ID NO: 118283 - DNA, 17 bp, Arabidopsis thaliana
ggtttcggatccatgct

SEQ ID NO: 118284 - DNA, 17 bp, Arabidopsis thaliana
ggtttcggcccaatgga

SEQ ID NO: 118285 - DNA, 17 bp, Arabidopsis thaliana
ggtttcggcccagaacc

SEQ ID NO: 118286 - DNA, 17 bp, Arabidopsis thaliana
ggtttcggcctagaatc

SEQ ID NO: 118287 - DNA, 17 bp, Arabidopsis thaliana
ggtttcggcgaacttga

SEQ ID NO: 118288 - DNA, 17 bp, Arabidopsis thaliana
ggtttcgggcatggggg

SEQ ID NO: 118289 - DNA, 17 bp, Arabidopsis thaliana
ggtttcgggcctggaag

SEQ ID NO: 118290 - DNA, 17 bp, Arabidopsis thaliana
ggtttcgggcctggggg

SEQ ID NO: 118291 - DNA, 17 bp, Arabidopsis thaliana
ggtttcgggtcagcggt

SEQ ID NO: 118292 - DNA, 17 bp, Arabidopsis thaliana
ggtttcgggtgtaaagg

SEQ ID NO: 118293 - DNA, 17 bp, Arabidopsis thaliana
ggtttcggtgtgatggc

SEQ ID NO: 118294 - DNA, 17 bp, Arabidopsis thaliana
ggtttcggtttagatta

SEQ ID NO: 118295 - DNA, 17 bp, Arabidopsis thaliana
ggtttcggtttagtttc

SEQ ID NO: 118296 - DNA, 17 bp, Arabidopsis thaliana
ggtttcgtagtgtagtt

SEQ ID NO: 118297 - DNA, 17 bp, Arabidopsis thaliana
ggtttcgtcgtgtagtg

SEQ ID NO: 118298 - DNA, 17 bp, Arabidopsis thaliana
ggtttcgtcgtgtagtt

SEQ ID NO: 118299 - DNA, 17 bp, Arabidopsis thaliana
ggtttcgtgatgtagtt

SEQ ID NO: 118300 - DNA, 17 bp, Arabidopsis thaliana
ggtttcgtggtctagtt

SEQ ID NO: 118301 - DNA, 17 bp, Arabidopsis thaliana
ggtttcgtggtgtagtt

SEQ ID NO: 118302 - DNA, 17 bp, Arabidopsis thaliana
ggtttcgttcgtgtagt

SEQ ID NO: 118303 - DNA, 17 bp, Arabidopsis thaliana
ggtttcgttgtgtagtt

SEQ ID NO: 118304 - DNA, 17 bp, Arabidopsis thaliana
ggtttcgttttgggtct

SEQ ID NO: 118305 - DNA, 17 bp, Arabidopsis thaliana
ggtttctaaaggtcggt

SEQ ID NO: 118306 - DNA, 17 bp, Arabidopsis thaliana
ggtttctactcggctgg

SEQ ID NO: 118307 - DNA, 17 bp, Arabidopsis thaliana
ggtttctaggagcagaa

SEQ ID NO: 118308 - DNA, 17 bp, Arabidopsis thaliana
ggtttctatcgctaaca

SEQ ID NO: 118309 - DNA, 17 bp, Arabidopsis thaliana
ggtttctatgtacccgt

SEQ ID NO: 118310 - DNA, 17 bp, Arabidopsis thaliana
ggtttctattattagtg

SEQ ID NO: 118311 - DNA, 17 bp, Arabidopsis thaliana
ggtttctcacgagaacg

SEQ ID NO: 118312 - DNA, 17 bp, Arabidopsis thaliana
ggtttctcagatcattt

SEQ ID NO: 118313 - DNA, 17 bp, Arabidopsis thaliana
ggtttctccagctcagc

SEQ ID NO: 118314 - DNA, 17 bp, Arabidopsis thaliana
ggtttctccagtgcatt

SEQ ID NO: 118315 - DNA, 17 bp, Arabidopsis thaliana
ggtttctcccggcagac

SEQ ID NO: 118316 - DNA, 17 bp, Arabidopsis thaliana
ggtttctccgtctttgg

SEQ ID NO: 118317 - DNA, 17 bp, Arabidopsis thaliana
ggtttctcggctggtgc

SEQ ID NO: 118318 - DNA, 17 bp, Arabidopsis thaliana
ggtttctgcctttagcc

SEQ ID NO: 118319 - DNA, 17 bp, Arabidopsis thaliana
ggtttctgcgggtcggg

SEQ ID NO: 118320 - DNA, 17 bp, Arabidopsis thaliana
ggtttctgtcccagcgt

SEQ ID NO: 118321 - DNA, 17 bp, Arabidopsis thaliana
ggtttctgttccggcga

SEQ ID NO: 118322 - DNA, 17 bp, Arabidopsis thaliana
ggtttctgttggagctt

SEQ ID NO: 118323 - DNA, 17 bp, Arabidopsis thaliana
ggtttcttatcttgtgt

SEQ ID NO: 118324 - DNA, 17 bp, Arabidopsis thaliana
ggtttcttatggttgca

SEQ ID NO: 118325 - DNA, 17 bp, Arabidopsis thaliana
ggtttcttccacgatcg

SEQ ID NO: 118326 - DNA, 17 bp, Arabidopsis thaliana
ggtttcttcgtctgttg

SEQ ID NO: 118327 - DNA, 17 bp, Arabidopsis thaliana
ggtttcttcgtgaatat

SEQ ID NO: 118328 - DNA, 17 bp, Arabidopsis thaliana
ggtttcttctgattggt

SEQ ID NO: 118329 - DNA, 17 bp, Arabidopsis thaliana
ggtttctttgtccgttg

SEQ ID NO: 118330 - DNA, 17 bp, Arabidopsis thaliana
ggtttcttttcttcgtc

SEQ ID NO: 118331 - DNA, 17 bp, Arabidopsis thaliana
ggtttctttttgttgag

SEQ ID NO: 118332 - DNA, 17 bp, Arabidopsis thaliana
ggtttgaaagctcagac

SEQ ID NO: 118333 - DNA, 17 bp, Arabidopsis thaliana
ggtttgacaagtttagt

SEQ ID NO: 118334 - DNA, 17 bp, Arabidopsis thaliana
ggtttgacaggacgtta

SEQ ID NO: 118335 - DNA, 17 bp, Arabidopsis thaliana
ggtttgacagggcgtta

SEQ ID NO: 118336 - DNA, 17 bp, Arabidopsis thaliana
ggtttgacccaactcat

SEQ ID NO: 118337 - DNA, 17 bp, Arabidopsis thaliana
ggtttgacccaatagtt

SEQ ID NO: 118338 - DNA, 17 bp, Arabidopsis thaliana
ggtttgacctgtattta

SEQ ID NO: 118339 - DNA, 17 bp, Arabidopsis thaliana
ggtttgactctagtccg

SEQ ID NO: 118340 - DNA, 17 bp, Arabidopsis thaliana
ggtttgactcttgtttt

SEQ ID NO: 118341 - DNA, 17 bp, Arabidopsis thaliana
ggtttgagccccgtcag

SEQ ID NO: 118342 - DNA, 17 bp, Arabidopsis thaliana
ggtttgatagtgcgata

SEQ ID NO: 118343 - DNA, 17 bp, Arabidopsis thaliana
ggtttgatccattgacg

SEQ ID NO: 118344 - DNA, 17 bp, Arabidopsis thaliana
ggtttgatctcgccgtc

SEQ ID NO: 118345 - DNA, 17 bp, Arabidopsis thaliana
ggtttgatggtaggacg

SEQ ID NO: 118346 - DNA, 17 bp, Arabidopsis thaliana
ggtttgattatgttcac

SEQ ID NO: 118347 - DNA, 17 bp, Arabidopsis thaliana
ggtttgattctagactt

SEQ ID NO: 118348 - DNA, 17 bp, Arabidopsis thaliana
ggtttgattctagattt

SEQ ID NO: 118349 - DNA, 17 bp, Arabidopsis thaliana
ggtttgcagatggacac

SEQ ID NO: 118350 - DNA, 17 bp, Arabidopsis thaliana
ggtttgcagatggacag

SEQ ID NO: 118351 - DNA, 17 bp, Arabidopsis thaliana
ggtttgcagtggtccgg

SEQ ID NO: 118352 - DNA, 17 bp, Arabidopsis thaliana
ggtttgcattggtcggc

SEQ ID NO: 118353 - DNA, 17 bp, Arabidopsis thaliana
ggtttgccaacgaaatg

SEQ ID NO: 118354 - DNA, 17 bp, Arabidopsis thaliana
ggtttgccaaggttcag

SEQ ID NO: 118355 - DNA, 17 bp, Arabidopsis thaliana
ggtttgcctgggtgtca

SEQ ID NO: 118356 - DNA, 17 bp, Arabidopsis thaliana
ggtttgcgctgcgattt

SEQ ID NO: 118357 - DNA, 17 bp, Arabidopsis thaliana
ggtttgcgggccggcca

SEQ ID NO: 118358 - DNA, 17 bp, Arabidopsis thaliana
ggtttgcggggcaggat

SEQ ID NO: 118359 - DNA, 17 bp, Arabidopsis thaliana
ggtttgctacatggtta

SEQ ID NO: 118360 - DNA, 17 bp, Arabidopsis thaliana
ggtttgctacggctttc

SEQ ID NO: 118361 - DNA, 17 bp, Arabidopsis thaliana
ggtttgcttaatccgat

SEQ ID NO: 118362 - DNA, 17 bp, Arabidopsis thaliana
ggtttgcttacttgttt

SEQ ID NO: 118363 - DNA, 17 bp, Arabidopsis thaliana
ggtttgcttttctgtcc

SEQ ID NO: 118364 - DNA, 17 bp, Arabidopsis thaliana
ggtttggacggtgacac

SEQ ID NO: 118365 - DNA, 17 bp, Arabidopsis thaliana
ggtttggacttgtttta

SEQ ID NO: 118366 - DNA, 17 bp, Arabidopsis thaliana
ggtttggatcaagtttt

SEQ ID NO: 118367 - DNA, 17 bp, Arabidopsis thaliana
ggtttggcaattattcc

SEQ ID NO: 118368 - DNA, 17 bp, Arabidopsis thaliana
ggtttggcacctcgatg

SEQ ID NO: 118369 - DNA, 17 bp, Arabidopsis thaliana
ggtttggcagctcagac

SEQ ID NO: 118370 - DNA, 17 bp, Arabidopsis thaliana
ggtttggcaggacatta

SEQ ID NO: 118371 - DNA, 17 bp, Arabidopsis thaliana
ggtttggcaggacgtta

SEQ ID NO: 118372 - DNA, 17 bp, Arabidopsis thaliana
ggtttggccccaatacg

SEQ ID NO: 118373 - DNA, 17 bp, Arabidopsis thaliana
ggtttggcgggacgggt

SEQ ID NO: 118374 - DNA, 17 bp, Arabidopsis thaliana
ggtttggctaaagtttt

SEQ ID NO: 118375 - DNA, 17 bp, Arabidopsis thaliana
ggtttggctaccgaccc

SEQ ID NO: 118376 - DNA, 17 bp, Arabidopsis thaliana
ggtttggctttacaaaa

SEQ ID NO: 118377 - DNA, 17 bp, Arabidopsis thaliana
ggtttgggtctcttggc

SEQ ID NO: 118378 - DNA, 17 bp, Arabidopsis thaliana
ggtttgggtgcggtttt

SEQ ID NO: 118379 - DNA, 17 bp, Arabidopsis thaliana
ggtttgggttccagttt

SEQ ID NO: 118380 - DNA, 17 bp, Arabidopsis thaliana
ggtttggtattgggttt

SEQ ID NO: 118381 - DNA, 17 bp, Arabidopsis thaliana
ggtttggtcaacgatta

SEQ ID NO: 118382 - DNA, 17 bp, Arabidopsis thaliana
ggtttggtcttcagaaa

SEQ ID NO: 118383 - DNA, 17 bp, Arabidopsis thaliana
ggtttggtcttgtcgac

SEQ ID NO: 118384 - DNA, 17 bp, Arabidopsis thaliana
ggtttggttcggttaat

SEQ ID NO: 118385 - DNA, 17 bp, Arabidopsis thaliana
ggtttggttgctacttt

SEQ ID NO: 118386 - DNA, 17 bp, Arabidopsis thaliana
ggtttggttgctgcttt

SEQ ID NO: 118387 - DNA, 17 bp, Arabidopsis thaliana
ggtttggtttcggacct

SEQ ID NO: 118388 - DNA, 17 bp, Arabidopsis thaliana
ggtttgtaagaccttgc

SEQ ID NO: 118389 - DNA, 17 bp, Arabidopsis thaliana
ggtttgtacccaacaat

SEQ ID NO: 118390 - DNA, 17 bp, Arabidopsis thaliana
ggtttgtacgtacggac

SEQ ID NO: 118391 - DNA, 17 bp, Arabidopsis thaliana
ggtttgtcagctcagac

SEQ ID NO: 118392 - DNA, 17 bp, Arabidopsis thaliana
ggtttgtcatatcactt

SEQ ID NO: 118393 - DNA, 17 bp, Arabidopsis thaliana
ggtttgtccaccgagta

SEQ ID NO: 118394 - DNA, 17 bp, Arabidopsis thaliana
ggtttgtccctgtctac

SEQ ID NO: 118395 - DNA, 17 bp, Arabidopsis thaliana
ggtttgtccgcttggat

SEQ ID NO: 118396 - DNA, 17 bp, Arabidopsis thaliana
ggtttgtcggagagatc

SEQ ID NO: 118397 - DNA, 17 bp, Arabidopsis thaliana
ggtttgtctaagtgtcc

SEQ ID NO: 118398 - DNA, 17 bp, Arabidopsis thaliana
ggtttgtctcataaatt

SEQ ID NO: 118399 - DNA, 17 bp, Arabidopsis thaliana
ggtttgtgcaaagttag

SEQ ID NO: 118400 - DNA, 17 bp, Arabidopsis thaliana
ggtttgtgctatatgac

SEQ ID NO: 118401 - DNA, 17 bp, Arabidopsis thaliana
ggtttgtgtagtggacc

SEQ ID NO: 118402 - DNA, 17 bp, Arabidopsis thaliana
ggtttgtgtttgcgcgt

SEQ ID NO: 118403 - DNA, 17 bp, Arabidopsis thaliana
ggtttgttagtcagacg

SEQ ID NO: 118404 - DNA, 17 bp, Arabidopsis thaliana
ggtttgttcagcagctt

SEQ ID NO: 118405 - DNA, 17 bp, Arabidopsis thaliana
ggtttgttgtccatcct

SEQ ID NO: 118406 - DNA, 17 bp, Arabidopsis thaliana
ggttttaaatggggtgg

SEQ ID NO: 118407 - DNA, 17 bp, Arabidopsis thaliana
ggttttaactagacaag

SEQ ID NO: 118408 - DNA, 17 bp, Arabidopsis thaliana
ggttttaagtcaccgag

SEQ ID NO: 118409 - DNA, 17 bp, Arabidopsis thaliana
ggttttaagtgcggttt

SEQ ID NO: 118410 - DNA, 17 bp, Arabidopsis thaliana
ggttttaattttgtgtg

SEQ ID NO: 118411 - DNA, 17 bp, Arabidopsis thaliana
ggttttatgttccggcc

SEQ ID NO: 118412 - DNA, 17 bp, Arabidopsis thaliana
ggttttattgtgttcgg

SEQ ID NO: 118413 - DNA, 17 bp, Arabidopsis thaliana
ggttttcaaagattttg

SEQ ID NO: 118414 - DNA, 17 bp, Arabidopsis thaliana
ggttttcaaaggccttt

SEQ ID NO: 118415 - DNA, 17 bp, Arabidopsis thaliana
ggttttcaaagttgcta

SEQ ID NO: 118416 - DNA, 17 bp, Arabidopsis thaliana
ggttttcagggcgagta

SEQ ID NO: 118417 - DNA, 17 bp, Arabidopsis thaliana
ggttttcaggtttggtt

SEQ ID NO: 118418 - DNA, 17 bp, Arabidopsis thaliana
ggttttcagttccattc

SEQ ID NO: 118419 - DNA, 17 bp, Arabidopsis thaliana
ggttttccagaatgctg

SEQ ID NO: 118420 - DNA, 17 bp, Arabidopsis thaliana
ggttttccatctatgtg

SEQ ID NO: 118421 - DNA, 17 bp, Arabidopsis thaliana
ggttttccgaccatcaa

SEQ ID NO: 118422 - DNA, 17 bp, Arabidopsis thaliana
ggttttccgattaatcc

SEQ ID NO: 118423 - DNA, 17 bp, Arabidopsis thaliana
ggttttccgttctgtta

SEQ ID NO: 118424 - DNA, 17 bp, Arabidopsis thaliana
ggttttcggaccgtacc

SEQ ID NO: 118425 - DNA, 17 bp, Arabidopsis thaliana
ggttttcggacggtacc

SEQ ID NO: 118426 - DNA, 17 bp, Arabidopsis thaliana
ggttttcggttttttat

SEQ ID NO: 118427 - DNA, 17 bp, Arabidopsis thaliana
ggttttcgtaatcactt

SEQ ID NO: 118428 - DNA, 17 bp, Arabidopsis thaliana
ggttttcgtccggttaa

SEQ ID NO: 118429 - DNA, 17 bp, Arabidopsis thaliana
ggttttcgtggcagatc

SEQ ID NO: 118430 - DNA, 17 bp, Arabidopsis thaliana
ggttttctatcaagtcc

SEQ ID NO: 118431 - DNA, 17 bp, Arabidopsis thaliana
ggttttctcgggagaga

SEQ ID NO: 118432 - DNA, 17 bp, Arabidopsis thaliana
ggttttctctccattac

SEQ ID NO: 118433 - DNA, 17 bp, Arabidopsis thaliana
ggttttctgcggttaaa

SEQ ID NO: 118434 - DNA, 17 bp, Arabidopsis thaliana
ggttttctgctaagatc

SEQ ID NO: 118435 - DNA, 17 bp, Arabidopsis thaliana
ggttttctgggtcacat

SEQ ID NO: 118436 - DNA, 17 bp, Arabidopsis thaliana
ggttttctgggttacat

SEQ ID NO: 118437 - DNA, 17 bp, Arabidopsis thaliana
ggttttctgtaacaccc

SEQ ID NO: 118438 - DNA, 17 bp, Arabidopsis thaliana
ggttttgaaatatttgc

SEQ ID NO: 118439 - DNA, 17 bp, Arabidopsis thaliana
ggttttgaagtcggatc

SEQ ID NO: 118440 - DNA, 17 bp, Arabidopsis thaliana
ggttttgaatgcgatct

SEQ ID NO: 118441 - DNA, 17 bp, Arabidopsis thaliana
ggttttgaatgcggttt

SEQ ID NO: 118442 - DNA, 17 bp, Arabidopsis thaliana
ggttttgacgggaaaac

SEQ ID NO: 118443 - DNA, 17 bp, Arabidopsis thaliana
ggttttgagtctggcag

SEQ ID NO: 118444 - DNA, 17 bp, Arabidopsis thaliana
ggttttgagtgcggtat

SEQ ID NO: 118445 - DNA, 17 bp, Arabidopsis thaliana
ggttttgagtgcggttg

SEQ ID NO: 118446 - DNA, 17 bp, Arabidopsis thaliana
ggttttgagtgcggttt

SEQ ID NO: 118447 - DNA, 17 bp, Arabidopsis thaliana
ggttttgatcaagtaac

SEQ ID NO: 118448 - DNA, 17 bp, Arabidopsis thaliana
ggttttgattaatgcta

SEQ ID NO: 118449 - DNA, 17 bp, Arabidopsis thaliana
ggttttgattcgattat

SEQ ID NO: 118450 - DNA, 17 bp, Arabidopsis thaliana
ggttttgattttgtggg

SEQ ID NO: 118451 - DNA, 17 bp, Arabidopsis thaliana
ggttttgcagattattt

SEQ ID NO: 118452 - DNA, 17 bp, Arabidopsis thaliana
ggttttgcattggatgg

SEQ ID NO: 118453 - DNA, 17 bp, Arabidopsis thaliana
ggttttgcgccgaatct

SEQ ID NO: 118454 - DNA, 17 bp, Arabidopsis thaliana
ggttttgcgggacgggt

SEQ ID NO: 118455 - DNA, 17 bp, Arabidopsis thaliana
ggttttgctccagaatg

SEQ ID NO: 118456 - DNA, 17 bp, Arabidopsis thaliana
ggttttgcttccaagac

SEQ ID NO: 118457 - DNA, 17 bp, Arabidopsis thaliana
ggttttggactgaaacc

SEQ ID NO: 118458 - DNA, 17 bp, Arabidopsis thaliana
ggttttggactgaagct

SEQ ID NO: 118459 - DNA, 17 bp, Arabidopsis thaliana
ggttttggatatgaaag

SEQ ID NO: 118460 - DNA, 17 bp, Arabidopsis thaliana
ggttttggatgtggtct

SEQ ID NO: 118461 - DNA, 17 bp, Arabidopsis thaliana
ggttttgggaattgtga

SEQ ID NO: 118462 - DNA, 17 bp, Arabidopsis thaliana
ggttttgggataaaggg

SEQ ID NO: 118463 - DNA, 17 bp, Arabidopsis thaliana
ggttttgggatcatact

SEQ ID NO: 118464 - DNA, 17 bp, Arabidopsis thaliana
ggttttgggccgaatct

SEQ ID NO: 118465 - DNA, 17 bp, Arabidopsis thaliana
ggttttgggcctggggg

SEQ ID NO: 118466 - DNA, 17 bp, Arabidopsis thaliana
ggttttgggtgcgattt

SEQ ID NO: 118467 - DNA, 17 bp, Arabidopsis thaliana
ggttttgggtgcggtgt

SEQ ID NO: 118468 - DNA, 17 bp, Arabidopsis thaliana
ggttttgggtgcggttt

SEQ ID NO: 118469 - DNA, 17 bp, Arabidopsis thaliana
ggttttggttatgacgg

SEQ ID NO: 118470 - DNA, 17 bp, Arabidopsis thaliana
ggttttggttatgaggg

SEQ ID NO: 118471 - DNA, 17 bp, Arabidopsis thaliana
ggttttggttcaacttg

SEQ ID NO: 118472 - DNA, 17 bp, Arabidopsis thaliana
ggttttgtccatcccaa

SEQ ID NO: 118473 - DNA, 17 bp, Arabidopsis thaliana
ggttttgtctgctcgaa

SEQ ID NO: 118474 - DNA, 17 bp, Arabidopsis thaliana
ggttttgtctgtttgga

SEQ ID NO: 118475 - DNA, 17 bp, Arabidopsis thaliana
ggttttgtgcgcttgga

SEQ ID NO: 118476 - DNA, 17 bp, Arabidopsis thaliana
ggttttgtgtgcggttt

SEQ ID NO: 118477 - DNA, 17 bp, Arabidopsis thaliana
ggttttgttccactggg

SEQ ID NO: 118478 - DNA, 17 bp, Arabidopsis thaliana
ggttttgttcgcttgga

SEQ ID NO: 118479 - DNA, 17 bp, Arabidopsis thaliana
ggttttgttcggcgagc

SEQ ID NO: 118480 - DNA, 17 bp, Arabidopsis thaliana
ggttttgttcggcggtc

SEQ ID NO: 118481 - DNA, 17 bp, Arabidopsis thaliana
ggttttgttcgttggac

SEQ ID NO: 118482 - DNA, 17 bp, Arabidopsis thaliana
ggttttgttcgtttgga

SEQ ID NO: 118483 - DNA, 17 bp, Arabidopsis thaliana
ggttttgttcgtttgta

SEQ ID NO: 118484 - DNA, 17 bp, Arabidopsis thaliana
ggtttttatctgcacgt

SEQ ID NO: 118485 - DNA, 17 bp, Arabidopsis thaliana
ggtttttatgtacccgt

SEQ ID NO: 118486 - DNA, 17 bp, Arabidopsis thaliana
ggtttttccagaccgtt

SEQ ID NO: 118487 - DNA, 17 bp, Arabidopsis thaliana
ggtttttcctattgggt

SEQ ID NO: 118488 - DNA, 17 bp, Arabidopsis thaliana
ggtttttcctgtccagt

SEQ ID NO: 118489 - DNA, 17 bp, Arabidopsis thaliana
ggtttttcggttcgggt

SEQ ID NO: 118490 - DNA, 17 bp, Arabidopsis thaliana
ggtttttcgtgatttgg

SEQ ID NO: 118491 - DNA, 17 bp, Arabidopsis thaliana
ggtttttgcaggacggg

SEQ ID NO: 118492 - DNA, 17 bp, Arabidopsis thaliana
ggtttttgcgctaaata

SEQ ID NO: 118493 - DNA, 17 bp, Arabidopsis thaliana
ggtttttggaattttcg

SEQ ID NO: 118494 - DNA, 17 bp, Arabidopsis thaliana
ggtttttggatcggatc

SEQ ID NO: 118495 - DNA, 17 bp, Arabidopsis thaliana
ggtttttgtctacatca

SEQ ID NO: 118496 - DNA, 17 bp, Arabidopsis thaliana
ggttttttacgggacgg

SEQ ID NO: 118497 - DNA, 17 bp, Arabidopsis thaliana
ggttttttaggtcgccg

SEQ ID NO: 118498 - DNA, 17 bp, Arabidopsis thaliana
ggttttttccgctactt

SEQ ID NO: 118499 - DNA, 17 bp, Arabidopsis thaliana
ggttttttcgggcttta

SEQ ID NO: 118500 - DNA, 17 bp, Arabidopsis thaliana
ggttttttcgtttggac

SEQ ID NO: 118501 - DNA, 17 bp, Arabidopsis thaliana
ggttttttctccctctt

SEQ ID NO: 118502 - DNA, 17 bp, Arabidopsis thaliana
ggttttttctgaaatac

SEQ ID NO: 118503 - DNA, 17 bp, Arabidopsis thaliana
ggttttttgaccggatt

SEQ ID NO: 118504 - DNA, 17 bp, Arabidopsis thaliana
ggttttttgggttctgg

SEQ ID NO: 118505 - DNA, 17 bp, Arabidopsis thaliana
ggttttttgtgctgaat

SEQ ID NO: 118506 - DNA, 17 bp, Arabidopsis thaliana
ggtttttttcgtttgga

SEQ ID NO: 118507 - DNA, 17 bp, Arabidopsis thaliana
ggtttttttgcaggatg

SEQ ID NO: 118508 - DNA, 17 bp, Arabidopsis thaliana
ggtttttttgccaaggc

SEQ ID NO: 118509 - DNA, 17 bp, Arabidopsis thaliana
ggtttttttgcccaggc

SEQ ID NO: 118510 - DNA, 17 bp, Arabidopsis thaliana
ggttttttttggtgcct

SEQ ID NO: 118511 - DNA, 17 bp, Arabidopsis thaliana
ggtttttttttacggga

SEQ ID NO: 118512 - DNA, 17 bp, Arabidopsis thaliana
gtaaaaacggtatgtgg

SEQ ID NO: 118513 - DNA, 17 bp, Arabidopsis thaliana
gtaaaaacggtttgcag

SEQ ID NO: 118514 - DNA, 17 bp, Arabidopsis thaliana
gtaaaaaggtttccgaa

SEQ ID NO: 118515 - DNA, 17 bp, Arabidopsis thaliana
gtaaaaagttgtgagac

SEQ ID NO: 118516 - DNA, 17 bp, Arabidopsis thaliana
gtaaaaatagttcgtgg

SEQ ID NO: 118517 - DNA, 17 bp, Arabidopsis thaliana
gtaaaaatctacggcgt

SEQ ID NO: 118518 - DNA, 17 bp, Arabidopsis thaliana
gtaaaacgagctctccc
